United States Patent Application Publication US 2026/0015627 A1 - sequence listing, part 2

SEQ ID NO: 9640 - DNA, 203 bp, synthetic construct
  source 1..203: mol_type = other DNA
ggcgcgccagtcctacgtcaggagccctcaaccggttggagaagctggcaagaagtacctttttgctcacaccatttccacgagctgcaaatgaaagatggcagaaagattgtggttccatgtcgagaccaggatgaactaattggaagagccaggctctctccagggtctggctggtcactaacagacgactcggaccgatg

SEQ ID NO: 9641 - DNA, 203 bp, synthetic construct
  source 1..203: mol_type = other DNA
ggcgcgccagtcctcacatacgaggaagattaagaaaaagtgtctgtggggtctttccgtgtagaagggcacacagccataattcttcctctttatacaacatggctacacaacatacgcaatatccagacgcaaggttatcatcacctatagttttagatcagtgtgatcttgtcactcgtgcttgtcgactcggaccgatg

SEQ ID NO: 9642 - DNA, 203 bp, synthetic construct
  source 1..203: mol_type = other DNA
ggcgcgccagtcctagcttcccaggaccggtttccgtgtcatatggatacacggggttgaaggtatcttcagacggtcttgcgcgcttcatctgcaacaacatgaagatagtgggtgcggatggacaggaacaggaggaaactgacattccatttagattgtggagaaagtttgcagccaggaggaagcgactcggaccgatg

SEQ ID NO: 9643 - DNA, 203 bp, synthetic construct
  source 1..203: mol_type = other DNA
ggcgcgccagtcctcagattagaggacgggcgctttggagccggccccaggcagcgtgtgtcggtcgcctagtctggagaactagtcctcgactcacgtgcaaggatgatgctgaaaggaataacaaggcttatctctaggatccataaggccaagcatggggatcagcacgagggtcagcactacaacgactcggaccgatg

SEQ ID NO: 9644 - DNA, 203 bp, synthetic construct
  source 1..203: mol_type = other DNA
ggcgcgccagtccttgacttctaggcgccactggacgacgcaagactgcaattgttctatctatcccggccatataacgggtcatcgcatggcatgggatatgatgatgaactggtcccctacggcagcgttggtggtagctcagctgctccggatcccacaagccatcatggacatgatcgctggtgcgactcggaccgatg

SEQ ID NO: 9645 - DNA, 203 bp, synthetic construct
  source 1..203: mol_type = other DNA
ggcgcgccagtcctttacaatgaggcgggtgggggacttccactacgtatcgggtatgactactgacaatcttaaatgcccgtgccagatcccatcgcccgaatttttcacagaattggacggggtgcgcctacataggtttgcgcccccttgcaagcccttgctgcgggaggaggtatcattcagagcgactcggaccgatg

SEQ ID NO: 9646 - DNA, 203 bp, synthetic construct
  source 1..203: mol_type = other DNA
ggcgcgccagtcctttcacataagggagcctccagtgggggctgtatcatcgccgcctgttgctgcatcacgctctcgtaagaaggaggaggaccctccggatacaccaccgctccgcctagcacggctcgtctcctcatcgtactagacacagataacaaaaaagaacgaacgcacgctcggtcgcccgactcggaccgatg

SEQ ID NO: 9647 - DNA, 203 bp, synthetic construct
  source 1..203: mol_type = other DNA
ggcgcgccagtcctgtaatggaagtaagtattacaccctttgccccacaccccctttcccttactcttccttctctaacgcactttctcctctttccccagtcaccctcctgctcatcgctctctggaatttgcacggacaggcattgtaccttggaattgtgctgttcatcttcgggtgcttacttgcgactcggaccgatg

SEQ ID NO: 9648 - DNA, 203 bp, synthetic construct
  source 1..203: mol_type = other DNA
ggcgcgccagtccttcgtagccagtcgcggctggccgactcatgggttaaagtcagttgacaagacacatggcttcttcaattctggtttctgactccgtctttgcccccatccttacccacaaactctcccgtcggatccggcgacaccccgtcgcttggcatcctagggagaactcccgactgtctcgactcggaccgatg

SEQ ID NO: 9649 - DNA, 203 bp, synthetic construct
  source 1..203: mol_type = other DNA
ggcgcgccagtcctgtagaggcagtgagcgacacactctgcgtcctcgcctcaccagatggagaggagaaaacctatggtggctgtgaaggacctgatgccatgtatgtcaaattgatatcatctgatggccatgaatttattgtaaaaagagaacatgcattaacatcaggcacgataaaagccatgcgactcggaccgatg

SEQ ID NO: 9650 - DNA, 203 bp, synthetic construct
  source 1..203: mol_type = other DNA
ggcgcgccagtcctcgcaagttagttctgcataaaagtgctttgtccctacatgccagcggtcataaaagaattggaaagactgcagctgaaatggggaggtggtttggttagggtgccactctcgcgtaattcgacacatgagatgtactgggtgagcggctcaagtgggaatgtgacaaatagtatcgactcggaccgatg

SEQ ID NO: 9651 - DNA, 203 bp, synthetic construct
  source 1..203: mol_type = other DNA
ggcgcgccagtcctaaacagtgagtttctgcacttaacaacacaaccaatcccactgcctaccacaagggcccggtgactcgactggctctcccatacaccgcgccacaccgtgtgttggctacggcgtacactggcactacgacctacaccgccagtgcacgcggggattcggctcacctaacgacgcgactcggaccgatg

SEQ ID NO: 9652 - DNA, 203 bp, synthetic construct
  source 1..203: mol_type = other DNA
ggcgcgccagtcctctgccgggagttttgcataaaagtgctttgtccctacatgccagcggtcataaaagaattggaaagactgcagctgaaatggggaggtggtttggctagggtgccactctcgcgtaattcaacacatgagatgtactgggtgagcggctcaagtgggaatgtgacaaatagtatcgactcggaccgatg

SEQ ID NO: 9653 - DNA, 203 bp, synthetic construct
  source 1..203: mol_type = other DNA
ggcgcgccagtcctcttataccatagccttcgcctcccgggggaaccatgtttcccccacgcactacgtgccggagagcgatgcagccgcccgcgtcactgccatactcagcagcctcactgtaacccagctcctgaggcgactgcatcagtggataagctcggagtgtaccactccatgctccggttcgactcggaccgatg

SEQ ID NO: 9654 - DNA, 203 bp, synthetic construct
  source 1..203: mol_type = other DNA
ggcgcgccagtccttaacacgtatattcggtaacaatgatgtctgaagacttaccagaagtttggacagctcaatgacagtgtccatctcgtcgcttgtcagttttctgtgtgggtaaaaaaaagactattaaacattgaatgttggcggaaatgagcagttctgtttttgagtttgttttctaaaatcgactcggaccgatg

SEQ ID NO: 9655 - DNA, 203 bp, synthetic construct
  source 1..203: mol_type = other DNA
ggcgcgccagtcctggaacgccatccgggagttgttggacgcggcgcttagccagggtccctatcctcctgactatacgcctcacggaggcgtctgaggtcatgttcaacatgaacgtggacgagagcgcctctggcgctctcggctcctcggccattcctgtgcaccccacgccggcctgggtccgacgactcggaccgatg

SEQ ID NO: 9656 - DNA, 203 bp, synthetic construct
  source 1..203: mol_type = other DNA
ggcgcgccagtccttagatttcatgccagacagggagcagcgagggtgacatcctggctcgggaggcaactcagaactgctgggaagaggttggagggtagaagcaaaacctggtttggcgcttatgccctatcgccttactgtaatgtaacaagcaaaatagggtacatatggtacactaacaactgcgactcggaccgatg

SEQ ID NO: 9657 - DNA, 203 bp, synthetic construct
  source 1..203: mol_type = other DNA
ggcgcgccagtcctgggtccgaattaggcctcacacgtgtggtcgaagctgctcctatccacgctatcattgctggtaggatgttgcttggtggactcattgagtacatgcaggcaaatcctggcaaacatggtagtgctgttggttgcaacccagacctacactggacaaaatttttctttaaattccgactcggaccgatg

SEQ ID NO: 9658 - DNA, 203 bp, synthetic construct
  source 1..203: mol_type = other DNA
ggcgcgccagtcctggcgggcaattgaggggattcctaattctaggcagagaggacaaaagatatggacccgcattgagcatcaatgaactgagcaatcttgcaaaaggggagaaggctaatgtattgataatgcaaggagacgtggtgttggtaatgaaacggaaacgggactttagcatacttactcgactcggaccgatg

SEQ ID NO: 9659 - DNA, 203 bp, synthetic construct
  source 1..203: mol_type = other DNA
ggcgcgccagtcctttactgtcatttattctattgtaagttggggggcaactggacatgtgtgaaaggcgagccagtggtctacacaggggggctagtaaaacaatgtagatggtgtggcttcgacttcgatgggcctgacggactcccgcattaccccataggtaagtgcattttggcaaatgagaccgactcggaccgatg

SEQ ID NO: 9660 - DNA, 203 bp, synthetic construct
  source 1..203: mol_type = other DNA
ggcgcgccagtcctactgtgcacaaaaagaaagaaggttttttgatctttattgtgtgcgaataactatgaggaagattaataattttcctctcattgacacttacattaagattaagattctcattgatctgttacttactctgaggataataattggtgttcagaagtaccccattccccagtgggcgactcggaccgatg

SEQ ID NO: 9661 - DNA, 203 bp, synthetic construct
  source 1..203: mol_type = other DNA
ggcgcgccagtcctctgctgaacaaaagttgtcggtgtcatgtgggactatgatgaagtagcagctcacacgccctctaagtctgctaagtcccacatcactggccttcggggcactgatgttcgttctggagcagcccgcaaggctgttctggacttgcagaagtgtgtcgaggcaggtgagatacccgactcggaccgatg

SEQ ID NO: 9662 - DNA, 203 bp, synthetic construct
  source 1..203: mol_type = other DNA
ggcgcgccagtcctccgtaagacaacctaggggactaggttttctctattttaaaagatgtcaatatgggtgcaaataatagcaaggagagtgtgtccagcaatggcaatcagggtactattgtcaataatttttatgctaactcatattatgcttctattgacgcttctgcctcctcagtcgggggccgactcggaccgatg

SEQ ID NO: 9663 - DNA, 203 bp, synthetic construct
  source 1..203: mol_type = other DNA
ggcgcgccagtcctggttgacccaactgctgctctagaaacttctcctcccgctcctttgggggctacctgtactacccaggctcctaccccagcagcctggtctacagcactgccctctgctctcccagcacctgccagctgcgttcctctctctacagggactgtcagaagacctgctgggagccccgactcggaccgatg

SEQ ID NO: 9664 - DNA, 203 bp, synthetic construct
  source 1..203: mol_type = other DNA
ggcgcgccagtcctcgggcgcacaactgttgctctagaaacttctcctcctgctcccacgggggttacttgcactacccaggctcctcctgtggctcttcctaccccagcaacctggtctacagcactgacctctgctctcccagcacctgccagctgggttcctctctctataggggctgtcaggagcgactcggaccgatg

SEQ ID NO: 9665 - DNA, 203 bp, synthetic construct
  source 1..203: mol_type = other DNA
ggcgcgccagtccttctagttgcaaggatgccaaggaatggctcgacaacacgcgccaagtgtgtttgaagaacgggaacgtccatattgccaacctttgcaaagtggtcgccccagcacccagcaagtcgagacccgagcccgtggtcgtttgcctccgcggcaagtctggccagggcaagagtttccgactcggaccgatg

SEQ ID NO: 9666 - DNA, 203 bp, synthetic construct
  source 1..203: mol_type = other DNA
ggcgcgccagtccttcgcttcgcaaggcccaacctagagtcaagctgtaactctaggggaaggactagaggttagaggagaccccttgcgagtgaacaccacaagagacagcatattgacacctgggatagactaggagaccctctgtcctaacaacaccaaccacttggcacagatcgccgaaagtgcgactcggaccgatg

SEQ ID NO: 9667 - DNA, 203 bp, synthetic construct
  source 1..203: mol_type = other DNA
ggcgcgccagtcctcaactgaccaatacagaaatatgttctggcactttagaaatgcttctgattgtgaacgttgtaattactgggacaatgtataccgtatgcacttagctcatgtttcctctcagacagaatcagaagaaataactgacgaggaaatgctttctgctgctgaaagtatggaaacagcgactcggaccgatg

SEQ ID NO: 9668 - DNA, 203 bp, synthetic construct
  source 1..203: mol_type = other DNA
ggcgcgccagtcctgcctcactcaattctgggacggaaccgactactttggggtgtccgtgtttcttttgttcatattaaactgttttatggtcacaacacaacttggtacgatttgtgattattcactgctcacttgtcacagtaaatatacacaatcatcatgcctgtcgttgtgaactcagtttacgactcggaccgatg

SEQ ID NO: 9669 - DNA, 203 bp, synthetic construct
  source 1..203: mol_type = other DNA
ggcgcgccagtcctgatcgccgcaattggtccaggagagggtggctaggcctgcatccttgcgaccacgttggcataaaccttccactgttcttgaagtattgaatcctaggactgttgttattttggaccatcttggcaacaacagaactgtaagtattgacaatttaaaacctacttctcatcagacgactcggaccgatg

SEQ ID NO: 9670 - DNA, 203 bp, synthetic construct
  source 1..203: mol_type = other DNA
ggcgcgccagtcctcaatcattcaccaagaggaactgactgaattacacaagaaacgtggggagctcaactggtgattgacctgaataaccaaatgcagcggaaggacagggagatgcagatgaatgaagcaaaaattgcagaatgtttgcagactatctctgacctggagacggagtgcctagacctcgactcggaccgatg

SEQ ID NO: 9671 - DNA, 203 bp, synthetic construct
  source 1..203: mol_type = other DNA
ggcgcgccagtcctccacaccacaccggcaagtcacatgagccaccaaaatggtggtgttcgggtatgaggctgggactaagccaagggattcaggtgtggtgccggtgggaactgaggaagcgcccaaggacacaaaatatatatcaaatggcgacatttggaacaacagctggtttctctggaatacgactcggaccgatg

SEQ ID NO: 9672 - DNA, 203 bp, synthetic construct
  source 1..203: mol_type = other DNA
ggcgcgccagtcctttaaactccacctctgactaaggggattttaggatttgtgttcacgctcaccgtgcccagtgagcgaggactgcagcgtagacgctttgtccaaaatgcccttaatgggaacggggatccaaataacatggacaaagcagttaaactgtataggaagctcaagagggagataaccgactcggaccgatg

SEQ ID NO: 9673 - DNA, 203 bp, synthetic construct
  source 1..203: mol_type = other DNA
ggcgcgccagtcctctttattgcacgagtacccggtggggtcgcaattaccttgcgagcccgaaccggacgtagccgtgttgacgtccatgctcactgatccctcccatataacagcagaggcggccgggagaaggttggcgagagggtcacccccttctatggccagctcctcggccagccagctgtcgactcggaccgatg

SEQ ID NO: 9674 - DNA, 203 bp, synthetic construct
  source 1..203: mol_type = other DNA
ggcgcgccagtccttaatccagcagcatcaggaactccggctttctttgatcttaaaaaccttaaaggctggtcagggctaccgatatttgaggcatcaagtggaagggtagtcggcagggtcaaggtcggtaagaatgaggactctaaaccaaccaagcttatgagtggaatacaaacagtttccaacgactcggaccgatg

SEQ ID NO: 9675 - DNA, 203 bp, synthetic construct
  source 1..203: mol_type = other DNA
ggcgcgccagtcctacgtaccgcagcgtgttggacttgggtggaagaggagggggcaacccgttcgctcatctgcgtcccagattcgggcgcatgttgtaaaagtgaaagtaaaataaaaaggcaactcaccaaggccatggcgaccgagcgtgcgttcgttcttttttgttatctgtgtctagtacgcgactcggaccgatg

SEQ ID NO: 9676 - DNA, 203 bp, synthetic construct
  source 1..203: mol_type = other DNA
ggcgcgccagtcctctcaattacaggaggagcccgtgaatcccaggtgtcattcgcgcgtcatccccgcgcacccccagtcccattaacatagcgggcacaatggtgcaggcaccgtctgtatacgtctgcggctttgtggagcgcccggacgccccacccaaggacgcctgccttcacctggatccccgactcggaccgatg

SEQ ID NO: 9677 - DNA, 203 bp, synthetic construct
  source 1..203: mol_type = other DNA
ggcgcgccagtccttgtgtgggcagggtgacaaagacataatggattccaacactgtgtcaagctttcaggtagactgctttctttggcatgtccgcaaacgatttgcagaccaagaactgggtgatgccccattccttgaccggcttcgccgagatcagaagtccctaagaggaagaggcagcactccgactcggaccgatg

SEQ ID NO: 9678 - DNA, 203 bp, synthetic construct
  source 1..203: mol_type = other DNA
ggcgcgccagtcctagttggtacagggttaataatcactcaccgagtgacatcaaaatcatggcgtcccaaggcaccaaacggtcttatgaacagatggaaactgatggggatcgccagaatgcaactgagattagggcatccgtcgggaagatgattgatggaattgggagattctacatccaaatgcgactcggaccgatg

SEQ ID NO: 9679 - DNA, 203 bp, synthetic construct
  source 1..203: mol_type = other DNA
ggcgcgccagtcctgtgtcgtccaggtactgattcgaaatggaagattttgtgcgacaatgcttcaacccgatgattgtcgaacttgcagaaaaagcaatgaaagagtatggagaggatctgaaaattgaaacaaacaaatttgcagcaatatgcacccacttggaggtatgtttcatgtattcagatcgactcggaccgatg

SEQ ID NO: 9680 - DNA, 203 bp, synthetic construct
  source 1..203: mol_type = other DNA
ggcgcgccagtcctagcacttgcagtaacgagctcgtgccgcgacagagggccttcagctaggacaacaacagcgagtgggaaactgataacagattggtgctgtaggtcttgcaccaccccaccactgagatttgttacaaaaagtggatgctggtatgggatggaaattcggccaactgctcacggcgactcggaccgatg

SEQ ID NO: 9681 - DNA, 203 bp, synthetic construct
  source 1..203: mol_type = other DNA
ggcgcgccagtcctgcgcaacgcagtaacgagctcgtgccgcgacagagggccttcagctaggacaacaacagcgagtgggaaactgataacagattggtgttgtaggtcttgcaccaccccaccactgagatttgttacaaaaagtggatgctggtatgggatggaaattcggccaactgctcacggcgactcggaccgatg

SEQ ID NO: 9682 - DNA, 203 bp, synthetic construct
  source 1..203: mol_type = other DNA
ggcgcgccagtcctaaggcatgcagtgccagttccagacactgcccatacctgcgggcgagcatcgggtcatcgggcatatcggccttgaccgcgttgaacatgctgtatgcctcgcagcgcggccgtctgaccgagaacctaagaaacgccctgcagcaggatagcaccacgcaaggctgcctgggtcgactcggaccgatg

SEQ ID NO: 9683 - DNA, 203 bp, synthetic construct
  source 1..203: mol_type = other DNA
ggcgcgccagtcctctaaggtacatcgatgctggatttctgagaaaccgcgtggagactctgaggcaggacaggggtgtggccaatatcccagccgagtcgtatttaaaggccagcgatgccccggacctacaaaagccggacaaggcacttcagagcccaccaccggcctccacagacccagacacccgactcggaccgatg

SEQ ID NO: 9684 - DNA, 203 bp, synthetic construct
  source 1..203: mol_type = other DNA
ggcgcgccagtcctaacactaccatcgcggattacgaaacgccgcggagctgaggcagttccgctggctagtgtgtacgcggcgagcttctcccggcgccgcccgctcggctcccatagcgcccgcgacaggggtccggacgccgcccgaacatggactccgccggccaaggtgtggctgcccggactcgactcggaccgatg

SEQ ID NO: 9685 - DNA, 203 bp, synthetic construct
  source 1..203: mol_type = other DNA
ggcgcgccagtcctccatacggcatgaaaatctcctggaagagttggggtcagtcaatgatctggagtgtcccggaggccccccgacggtttctggtgggcacagagggaagcagtgagtgtccactggcaaagagaagaacaggtgtcttcacagtggctgaatttggaatgggcttgagaacaaaacgactcggaccgatg

SEQ ID NO: 9686 - DNA, 203 bp, synthetic construct
  source 1..203: mol_type = other DNA
ggcgcgccagtcctcgtgcagtcattggcgggagctattccagtgaagtactctggaagcaaattggaaatgacctcaggtcatcttaaatgtagggttaaaatgcagggtttgaagctgaaaggaatgacctacccgatgtgtagcaatacattttccctagtgaagaatcctaccgacactgggcacgactcggaccgatg

SEQ ID NO: 9687 - DNA, 203 bp, synthetic construct
  source 1..203: mol_type = other DNA
ggcgcgccagtccttgcgttagcattggtgcactgcgcaggcgcatgcacctacggatcaacgtggaccgcattgacggcaaacccttcgatcctgtggaggccctcaaaccccttaaccaaccttccaaatatctaacctcccaaactgaactttctctcttcagatcttttaaacttactgttgcccgactcggaccgatg

SEQ ID NO: 9688 - DNA, 203 bp, synthetic construct
  source 1..203: mol_type = other DNA
ggcgcgccagtcctcgcaaagcccaaagaaggaggacttatgtacgcagacgacacggctggatgggacactagaataaccaaggctgatttggaaaacgaagccatcattttggaaaagatggaaccaatgcacagagctgtcgcagaaccactcattaaatttgcctacatgaacaaggtggtgaacgactcggaccgatg

SEQ ID NO: 9689 - DNA, 203 bp, synthetic construct
  source 1..203: mol_type = other DNA
ggcgcgccagtcctttatttatccacagcccttcttgccctccccggcaacattgccggcggtgctccttctgcgacggtcaacgccaacaacacttctatctcctctcaagctcttttaccctccgtcaacccttacccttctactcctgctgtctcactccccaaccccgacgcccccactcaagtcgactcggaccgatg

SEQ ID NO: 9690 - DNA, 203 bp, synthetic construct
  source 1..203: mol_type = other DNA
ggcgcgccagtcctcattgactccaccaaactgccagccccctccatcgaagaggtagtggtaagaaagcgccagttccgggcaagaactggttcgcttaccttgcctccccctccgagatccgtcccaggagtgtcatgtcctgaaagcctgcaacgaagtgacccgttagaaggtccttcaaacctcgactcggaccgatg

SEQ ID NO: 9691 - DNA, 203 bp, synthetic construct
  source 1..203: mol_type = other DNA
ggcgcgccagtcctctaatgatccaccgcggtaaaggtcgctgggaagaccccgtggatccactactctcgactcaagaaagctcctgacaaccaagaagaatggactgtctcaccaacctccgatccactgagggtaaagttgaccaggcgggcaaaaccctaattcttcttgtggtttggtgggggcgactcggaccgatg

SEQ ID NO: 9692 - DNA, 203 bp, synthetic construct
  source 1..203: mol_type = other DNA
ggcgcgccagtcctagcgacctccactgcatacacgcagaatgggacactggtctgaactccaagttcacgttttcaatcccgtacatctcggccgctgactacgcgtacaccgcgtcccacaaggctgaaacaacaagtgtacaggggtgggtctgtgtgtaccaaatcactcacggcaaggcagaccgactcggaccgatg

SEQ ID NO: 9693 - DNA, 203 bp, synthetic construct
  source 1..203: mol_type = other DNA
ggcgcgccagtccttgaggcctccactgctctccaggaagataaggcttttaaagcagcctagcactagaaggctctgtgtgctccgggatggagcaggtgtgcagagggtgagaacccagctctgggaccaagtcacttgcttccttacttagcaagactatcgacttgagcaaacttggacctgggcgactcggaccgatg

SEQ ID NO: 9694 - DNA, 203 bp, synthetic construct
  source 1..203: mol_type = other DNA
ggcgcgccagtcctgccgcgggccatatttccggtatatgaccttcgtaagctgctcggtgcgcttgtcatttcggaaggtagtgtcaagttcgacatataatgtctttgaaggactatctgagacagtccatttctaaagatttggaggtgagacatcgagattctttaaagattagattaggggagcgactcggaccgatg

SEQ ID NO: 9695 - DNA, 203 bp, synthetic construct
  source 1..203: mol_type = other DNA
ggcgcgccagtcctagatcgggccattcggccaaatcccccccgtacaacatccgcgctagcgatacgctcgacgtgtactgttcgcactcgtcgtccccaatgggacgcccggcccccagaggatctcccgactccgcgccccccacgaaaggcatgaccggggcgcggacggcgtggtgggtctggcgactcggaccgatg

SEQ ID NO: 9696 - DNA, 203 bp, synthetic construct
  source 1..203: mol_type = other DNA
ggcgcgccagtcctagttagcgcccaaaaactgaccaccgaccgcattccatttctcgatatcttcgacgataggtacaacctagtcagacacgtcgaacgacaattaaactggtacgccgcatatgccgaagcagcgcagcaagatcttattgctcctcttacgttttaacggtcgcgttctaaccccgactcggaccgatg

SEQ ID NO: 9697 - DNA, 203 bp, synthetic construct
  source 1..203: mol_type = other DNA
ggcgcgccagtcctcgcattaccccaaatgaagtgggagctagaatattgacatcagagtcgcaattgacaataacaaaagagaagaaagaagagctccaggattgtaaaattgctcctttaatggtggcatacatgttggaaagagaactggtccgcaaaaccagatttctaccggtagcaggcggacgactcggaccgatg

SEQ ID NO: 9698 - DNA, 203 bp, synthetic construct
  source 1..203: mol_type = other DNA
ggcgcgccagtccttcgccaatcccaaggatcaccctcaaggtccggcccacggagtgcggatttctatcgaaggcaaaatagactctcgcctgcaacgaattttctcccagcggcccgtgctgatcgagcgagaccagggaaacaccacggtttccatctactgcatttgtaatcaccccggattgccgactcggaccgatg

SEQ ID NO: 9699 - DNA, 203 bp, synthetic construct
  source 1..203: mol_type = other DNA
ggcgcgccagtcctacgcgcctccccagctccagaggcatcagcgcgcgcaggcgggcagcggggtcgtccccagacagcagcaactgacgcgtcacgcgggcgagccccccgtccacctctgccaggggcggctgggcgtctgcccctccgctaccgccgccgctgtcactctccatagcggacgcccgactcggaccgatg

SEQ ID NO: 9700 - DNA, 203 bp, synthetic construct
  source 1..203: mol_type = other DNA
ggcgcgccagtcctgaacgagcccccgtctacgggaaggtttacaacccccctcggactgctctgccggggcggttcacaaactacctggatgttgccgaggcttgtcccaccttcctgatgttcgagaacgtaccttacgtctcaacacgaactgacgggcaaaggctactggccaagttcgacgtgcgactcggaccgatg

SEQ ID NO: 9701 - DNA, 203 bp, synthetic construct
  source 1..203: mol_type = other DNA
ggcgcgccagtcctagagtttacccctgctcttgttcccggggggcttctggctaagcagtttggtgataatatgagagagtttttacaactagaacttaaagaagaacttagagccaagggcatgtcaattgatgttgccattctcaattcgctacaggtgacacaggagcaagatattttgtcattcgactcggaccgatg

SEQ ID NO: 9702 - DNA, 203 bp, synthetic construct
  source 1..203: mol_type = other DNA
ggcgcgccagtcctaatacccgcccgcctttcataagttttaccgtctgtcccgacgttaaagggaggtaaccacaagcatactgccgccttccccggcgttaacgggatgcaaccgtaagacacaccttcatccggaagtaaaacggctgcgtcacatagttttgcccgttttcacgagaaacgggacgactcggaccgatg

SEQ ID NO: 9703 - DNA, 203 bp, synthetic construct
  source 1..203: mol_type = other DNA
ggcgcgccagtcctgcccgtgaccctgtagccggagggttattttccaagggttgagtcgcgggacccccggttcgagtctgggaccggccggactgcggcgaacgggggtttgcctccccgtcatgcaagaccccgcttgcaaattcctccggaaacagggacgagccccttttttgcttttcccagcgactcggaccgatg

SEQ ID NO: 9704 - DNA, 203 bp, synthetic construct
  source 1..203: mol_type = other DNA
ggcgcgccagtccttcctggctccgagcagccggtcctccagtggctccgctccccgttctctgtgggctcaaaatgacagaggctcacaggacacctgcatgcccaaggcactccaccgtatgtgatcaacctggatccagcagtacatgaagttccctttcctgccaatattggtgatgaaatttacgactcggaccgatg

SEQ ID NO: 9705 - DNA, 203 bp, synthetic construct
  source 1..203: mol_type = other DNA
ggcgcgccagtccttgccgaccccgatgatggcgcaagtgggagtaaagagaagaagccagataggatcaacaaaggcaaattaaaaatagccccaaaagagcatgagaaggacagcagaactaggccacctgacgctacgatcgtggtggaaggagtaaaataccaggtcaaaaagaaaggtaaagtcgactcggaccgatg

SEQ ID NO: 9706 - DNA, 203 bp, synthetic construct
  source 1..203: mol_type = other DNA
ggcgcgccagtcctaaacatacccgcacctgcccctacgtttacaaggccctgggcatagtctcgccgcgcgtcctatcgagccgcactttttgagcaagcatgtccatccttatatcgcccagcaataacacaggctggggcctgcgcttcccaagcaagatgtttggcggggccaagaagcgctcccgactcggaccgatg

SEQ ID NO: 9707 - DNA, 203 bp, synthetic construct
  source 1..203: mol_type = other DNA
ggcgcgccagtcctgcgtgtaaccgcctcggaaaaagcgtacggtggtcctcaccgaatcaaccctatctactgccttggccgagcttgccaccaaaagttttggcagctcctcaacttccggcattacgggcgacaatacgacaacatcctctgagcccgccccttctggctgcccccccgactccgcgactcggaccgatg

SEQ ID NO: 9708 - DNA, 203 bp, synthetic construct
  source 1..203: mol_type = other DNA
ggcgcgccagtcctgacaaaccccgcgccgcgcgtcttgtctgctgcagcatcgttctgtgttgtctctgtttgactgtttttctgtatttgtctgaaaacatgggccaggctgttaccacccccttaagtttgactttagaccactggaaggatgtcgaacggacagcccacaacctgtcggtagagcgactcggaccgatg

SEQ ID NO: 9709 - DNA, 203 bp, synthetic construct
  source 1..203: mol_type = other DNA
ggcgcgccagtcctctcgttgtccgcgccgcgcgtcttgtctgtctcagtgttgttctgtcatttgtctgttcattgttgttttggaccgtttctaaaaatatgggacagaccgtaaccactcccttgagtctgacccttgaacactggggagacgtccagcgcattgcgtccaaccagtccgtggaccgactcggaccgatg

SEQ ID NO: 9710 - DNA, 203 bp, synthetic construct
  source 1..203: mol_type = other DNA
ggcgcgccagtcctctgtgggcccgctccgcctagcacggctcgtctcctcatcgtactagacacagataacaaaaaagaacgaacgcacgctcggtcgccatggccttggtgagttgcctttttattttactttcacttttacaacatgcgcccgaatctgggacgcagatgagcgaacgggttgcccgactcggaccgatg

SEQ ID NO: 9711 - DNA, 203 bp, synthetic construct
  source 1..203: mol_type = other DNA
ggcgcgccagtcctgcagattcccggccaggccgggagtggcgtgctgggcgtgcgcggctgcggtacggcgtgttggtcccagcggttcagctgaggtagggacgtgctgtaggccggaatgttaccggctgttggatctgtggatgaggaagaggatcctgcggaggaggattgtcctgaattggtcgactcggaccgatg

SEQ ID NO: 9712 - DNA, 203 bp, synthetic construct
  source 1..203: mol_type = other DNA
ggcgcgccagtcctggctttcaccggctctcctggccagtacccggacgagttcataccaaacttcgacgcaatcagcgagtcagtggatggctatgattgatgtctaatggtggtgcggctgagctagctcgactgcgacacctagaccactgccgccgctttcgctgcttcgcccgggaactcacccgactcggaccgatg

SEQ ID NO: 9713 - DNA, 203 bp, synthetic construct
  source 1..203: mol_type = other DNA
ggcgcgccagtcctacagatagccggtccctccccggggctggagcctttggtaacgtggttgctggtcaggaaattcccatctacgcgatggagtccttccgtccaccagttgactacctaccagccaaagtcaacgattggcttgagttcgcccaccgccctggtctgttcgagtcttacacttggcgactcggaccgatg

SEQ ID NO: 9714 - DNA, 203 bp, synthetic construct
  source 1..203: mol_type = other DNA
ggcgcgccagtcctgctctataccgttgacgcggctaatgaccaggacatctatcaaccaccatgtggagctgggtcccttactcggtgctcttgcggggagaccaaggggtatctggtaacacgactggggtcattggttgaggtcaacaaatccgatgacccttattggtgtgtgtgcggggccctcgactcggaccgatg

SEQ ID NO: 9715 - DNA, 203 bp, synthetic construct
  source 1..203: mol_type = other DNA
ggcgcgccagtcctgtttccaacctaggaaaccctcagctcagagaacaaccctgcattccccacacaacacccacaatcagccactgcgggcgaggagggcacgaggccaggttcccaagagctcagggaacgggcctggctctggcccctgacgcaggaacatggagctgatccaggacacctccccgactcggaccgatg

SEQ ID NO: 9716 - DNA, 203 bp, synthetic construct
  source 1..203: mol_type = other DNA
ggcgcgccagtcctttgctttacctccgagtgactgagtcgcccgggtacccgtgtatccaataaaccctcttgcagttgcatccgacttgtggtctcgctgttccttgggagggtctcctctgagtgattgactacccgtcagcgggggtctttcatttgggggctcgtccgggatcgggagacccccgactcggaccgatg

SEQ ID NO: 9717 - DNA, 203 bp, synthetic construct
  source 1..203: mol_type = other DNA
ggcgcgccagtcctgattagatcctcggagggtggattcagcggccatcctatttgataatctcgcggtggagatatttaacgatgtaatatatcgacaaaatggagttgccgcgaaaatacgacagggtaacgggcaggatattgacacataagaataaccagatgtgtacaaccgaatgttctcagcgactcggaccgatg

SEQ ID NO: 9718 - DNA, 203 bp, synthetic construct
  source 1..203: mol_type = other DNA
ggcgcgccagtccttgtgaacacctctctacaaccctctctcctcagcgcttcttctttcttggtttggtgcttctgagatgtgggcttgcacacgctgttgctatagtacgtgttgatcctgactgctgtcatggcgtgccctctggagaaggccctggatgtgatggtgtccaccttccacaagtacgactcggaccgatg

SEQ ID NO: 9719 - DNA, 203 bp, synthetic construct
  source 1..203: mol_type = other DNA
ggcgcgccagtcctactaatcgcctgtccctacgtttacaaggccctgggcatagtcgcgccgcgcgttctttcaagccgcactttctaaaaaaaaaaaaaatgtccattctcatctcgcccagtaataataccggttggggactgtatgcgcccaccaagatgtatggaggcgcccgcaagcgctctcgactcggaccgatg

SEQ ID NO: 9720 - DNA, 203 bp, synthetic construct
  source 1..203: mol_type = other DNA
ggcgcgccagtccttcttacttcctgtgcttgtgtttaaaaattgtcgcagcttccccaaaccaagtggtcttggttttctctttttattatattgtcaatatggcttgcaaacacggatacccagacgtgtgccctatttgcacagccgttgacgctactcccgactttgaatatttgctcatggcacgactcggaccgatg

SEQ ID NO: 9721 - DNA, 203 bp, synthetic construct
  source 1..203: mol_type = other DNA
ggcgcgccagtcctgcgttacccgaagatcagcttcggcgcacgctggaagacgcggaggctctcttcagtaaatactgcgcgctgactcttaaggactagtttcgcgccctttctcaaatttaagcgcgaaaactacgtcatctccagcggccacacccggcgccagcacctgtcgtcagcgccattcgactcggaccgatg

SEQ ID NO: 9722 - DNA, 203 bp, synthetic construct
  source 1..203: mol_type = other DNA
ggcgcgccagtcctaactatcgcgaccaactcttccttaaacacaacaagggagacatggacgaaccctggcccggactcgaggcggccgccgacctttacttctccaaatttccaaccatgatccatactctgacgatggaagaggcaatcaatggaactcccaatctcgagggcattgacatgaatcgactcggaccgatg

SEQ ID NO: 9723 - DNA, 203 bp, synthetic construct
  source 1..203: mol_type = other DNA
ggcgcgccagtcctgcctggtccgacggatgacagaatagggctcccccaagacaatttccaccaagtggagacgaaatgcccctgtggttacaagatgaaggcagttaagaattgtgctggagaactgagactcttggaggaggagggttcatttctctgcagaaataaattcgggagaggttcacgcgactcggaccgatg

SEQ ID NO: 9724 - DNA, 203 bp, synthetic construct
  source 1..203: mol_type = other DNA
ggcgcgccagtcctagtctacacgatgattgccactgatcctggcggcctgggtattctcggtatccatgtcgccggggtggctggctacaacggcttctccgcgcgccttacccctgaacgtgtccaagctttcctctctaacctggccacacctcagtctgttcttcatttccacccacccatgggcgactcggaccgatg

SEQ ID NO: 9725 - DNA, 203 bp, synthetic construct
  source 1..203: mol_type = other DNA
ggcgcgccagtcctatcaagagcgcacgtctctcgtcgcagtcggctccatccctcccctgcctttggcgccttccccatcaccaaagaaccagcagccctttctaggaaggaccctcgcctccccgagggcaccgacctggatgctatcaccctcgccaagcacgacaagggcgacatcgcgacgcccgactcggaccgatg

SEQ ID NO: 9726 - DNA, 203 bp, synthetic construct
  source 1..203: mol_type = other DNA
ggcgcgccagtcctaaggagcgcgcccccgccttccagctgctgccgggggactcttcgcacaccgcgacgctcgccaggaccccggggggcgaagttgccatggctgggcgggaggggcgcacgcgccagcgaactttacgggacacaatccccgactgcgcgctgcggtcccagaccctggagagtcgactcggaccgatg

SEQ ID NO: 9727 - DNA, 203 bp, synthetic construct
  source 1..203: mol_type = other DNA
ggcgcgccagtcctcacgtagccgcccgcagcacgcggatcttacggcctgcgtcatcacccagggcacgatcctcgcccaattgcacgccatccaaaaatcccgccaagagtttcttctgaaaaagggtaaaggggtctacctggacccccagacgggcgaagtgcttaacccgggtctcccccagccgactcggaccgatg

SEQ ID NO: 9728 - DNA, 203 bp, synthetic construct
  source 1..203: mol_type = other DNA
ggcgcgccagtcctgtcattctcgccgacatggagctgttcctcgcgggccgccgggtgctggtcaccggggcaggcaaagggcgcggcacggtccaggcgctgcacgcgacgggcgcgcgggtggtggctgtgagccggactcaggcggatcttgacagccttgtccgcgagtgcccggggatagaacgactcggaccgatg

SEQ ID NO: 9729 - DNA, 203 bp, synthetic construct
  source 1..203: mol_type = other DNA
ggcgcgccagtcctatccttcccggacggcgtttccacggacgcccaggagacagccggttgctgagccgggagcgctgactggcccggctgggcaggtcttgactcgtctgctgaacaaatcctctgacctcaggccggctgtgaacgtagttcctgagagatagcaaacatgcccaacagtgagcccgactcggaccgatg

SEQ ID NO: 9730 - DNA, 203 bp, synthetic construct
  source 1..203: mol_type = other DNA
ggcgcgccagtcctgattcgcccggccccgccgggcggccgcgggtgggtagagaacatggacttcccgtgcctctggctagggctgttgctgcctttggtagctgcgctggatttcaactaccaccgccaggaagggatggaagcgtttttgaagactgttgcccaaaactacagttctgtcactcacgactcggaccgatg

SEQ ID NO: 9731 - DNA, 203 bp, synthetic construct
  source 1..203: mol_type = other DNA
ggcgcgccagtcctcgatagatcggcgagcagctcagaccatgtcgcctgaagaatggacgtatctagtggttcttcttatctccatccccatcggcttcctctttaagaaagccggtcctgggctgaagagatggggagcagccgctgtgggcctggggctcaccctgttcacctgtggcccccacacgactcggaccgatg

SEQ ID NO: 9732 - DNA, 203 bp, synthetic construct
  source 1..203: mol_type = other DNA
ggcgcgccagtcctatccactacggctcctgaaaaagactgtatgcccaaggccagacggcagcgaactcgtcgcacacgcagcaacagaccaccaacaccatgggtaagataattgctttccttttattccatcttacatgtatcacaatcactaaacagagccggtgcacgcttacggtaggtgtccgactcggaccgatg

SEQ ID NO: 9733 - DNA, 203 bp, synthetic construct
  source 1..203: mol_type = other DNA
ggcgcgccagtcctttcatcgccggctggacttgtccggttggttcacggctggctacagcgggggagacatttatcacagcgtgtctcatgcccggccccgctggttctggttttgcctactcctgctcgctgcaggggtaggcatctacctcctccccaaccgatgaaggttggggtaaacactcccgactcggaccgatg

SEQ ID NO: 9734 - DNA, 203 bp, synthetic construct
  source 1..203: mol_type = other DNA
ggcgcgccagtcctacgctttccgggatgccatctggctgttccgcaacaagcatcatcaacacaattttgaataacatctacgttctctacgccctgcgtagacactatgagggggttgagctggacacctacaccatgatctcctatggagacgacatcgtggtggcaagcgattatgatctggaccgactcggaccgatg

SEQ ID NO: 9735 - DNA, 203 bp, synthetic construct
  source 1..203: mol_type = other DNA
ggcgcgccagtccttaagggttcgtacagtgatctggtcaagtacgtcattctagtggcagctgcatttgctgagagcaatacaggtggtgacattgtgcacttggccatggtggctgcttttaacatccagccaggtttactgattggattcctactgaggaggaagtggagcaatcaggaaagcagcgactcggaccgatg

SEQ ID NO: 9736 - DNA, 203 bp, synthetic construct
  source 1..203: mol_type = other DNA
ggcgcgccagtcctttaccacacgtctcgctgaggtcatcctttacggcaggcgtccgcgtcgctagctagtcgttctgaagcggcggccagagaagagtcaagggcacgagcatcggccatgcctttcttggacatccagaaaaggttcggccttaacatagatcgatggttgacaatccagagtggcgactcggaccgatg

SEQ ID NO: 9737 - DNA, 203 bp, synthetic construct
  source 1..203: mol_type = other DNA
ggcgcgccagtcctcttactagcgttcctgctctcacagatcacgggacgctaccgctgcgcaacagcatcggaggagtccagcgagtgaccattactgacgccagacgccgcacctgcccctacgtttacaaggccctgggcatagtctcgccgcgcgtcctatcgagccgcactttttgagcaagccgactcggaccgatg

SEQ ID NO: 9738 - DNA, 203 bp, synthetic construct
  source 1..203: mol_type = other DNA
ggcgcgccagtcctcctggacactaattcttctgtataagggcagggggtgggtatttaaggatctatatgcccttctctacctgcacctccaaatgagagatgactcggcgtagggtgctaagcgtggtcgtgctgctagccgccctggcgtgccgcctcggtgcgcagaccccagagcagcccgcacgactcggaccgatg

SEQ ID NO: 9739 - DNA, 203 bp, synthetic construct
  source 1..203: mol_type = other DNA
ggcgcgccagtcctagattcgtctacaaccgcttccagctacgttactggccccccgtaccctaagatacggggaaaggattccactcagtcagcccccgccaaacggcctacaaaaaagaagttgggaaagagtgagttttcgtgcagcatgagctacacttggaccgacgtgattagcttcaaaaccgactcggaccgatg

SEQ ID NO: 9740 - DNA, 203 bp, synthetic construct
  source 1..203: mol_type = other DNA
ggcgcgccagtcctctatacaactaggtcgtttgggaaacgccttggagagtcaagaataaatttgcaggtcaaacaatggatgactggaaaagtcggcttgtaatcaagagcatgcttccccatttcgccatggtgggaaatcgtcaggagcccagaaagctccaggaatcgggaactgttaagaggcgactcggaccgatg

SEQ ID NO: 9741 - DNA, 203 bp, synthetic construct
  source 1..203: mol_type = other DNA
ggcgcgccagtcctgatccagactccaaattctttgctgaaaacccccctcctgtatctcttgctggaaaaatcaacctttccgatttcactgacctcactctctccactcctggacagatggtgcgccagggcaactccaccactaacatctacggaagtaataacaatgttactactgacgtgggtcgactcggaccgatg

SEQ ID NO: 9742 - DNA, 203 bp, synthetic construct
  source 1..203: mol_type = other DNA
ggcgcgccagtcctaatctttactcccacgtggcctcctttgtgctggcctggacacgcgcttttgtatcagagtgggctgggttcctctacgaagaggaccgaggcactccgctcgaggacaggcccataaagtcggtctacggggacacggacagcctctttgtcacccagcggggacacgaactccgactcggaccgatg

SEQ ID NO: 9743 - DNA, 203 bp, synthetic construct
  source 1..203: mol_type = other DNA
ggcgcgccagtcctccagagaactcccattgactcagctttctatggcctcagattccccatccccttcccaacgccccagcactggaagacacgtgctgtccctggtgccggctcctacggctcggtcgtggctggccaggaaatccccctggttggctatgcccccgctgctcccccccgcgattacgactcggaccgatg

SEQ ID NO: 9744 - DNA, 203 bp, synthetic construct
  source 1..203: mol_type = other DNA
ggcgcgccagtccttttacgacctcgcacgtggcctcctttgtcttggcgtggacgcgcgcctttgtctcagagtggtccgagtttctctacgaggaggaccgcgggacgcccctgcaggacaggccaatcaagtccgtctacggggacaccgacagcctgtttgtcaccgagcgcggacacagactccgactcggaccgatg

SEQ ID NO: 9745 - DNA, 203 bp, synthetic construct
  source 1..203: mol_type = other DNA
ggcgcgccagtcctgtcgtcaactcgtcctctgagccgcgctctggaggcattggaactctgcaatttattgaggagtttgtgccatcggtctactttaaccccttctcgggacctcccggccactatccggatcaatttattcctaactttgacgcggtaaaggactcggcggacggctacgactgacgactcggaccgatg

SEQ ID NO: 9746 - DNA, 203 bp, synthetic construct
  source 1..203: mol_type = other DNA
ggcgcgccagtcctcagacccactctaggggaaggactagaggttagaggagaccccttgcgagtgaacaccacaagaaacagcatattgacacctgggatagactaggagaccctctgtcctaacaacaccagccacttggcacagatcgccgaaagtgtggctggtggtggtagaacacagagtctcgactcggaccgatg

SEQ ID NO: 9747 - DNA, 203 bp, synthetic construct
  source 1..203: mol_type = other DNA
ggcgcgccagtcctctactgcgctctcgttgcccgctactacccaggccccgccgcctgtctggccctgttgctcattatactatacgcctggagcttcagccattttatggactctctcaagaaccaggtgacagtcaccgccagatacttcagaagggtgcctagccagtccacctgagcgcgaggcgactcggaccgatg

SEQ ID NO: 9748 - DNA, 203 bp, synthetic construct
  source 1..203: mol_type = other DNA
ggcgcgccagtcctacgcgggactgcgggcttgcccctaactttctttgttgcagcagctgctgcccaaccagattatgactggtgggtgcgactgctagtggcagggttagttttgtgggccggccgtaaccgtggtcaccgcatagctctgcttgtaggtccttggcctctggtagcgcttttaaccgactcggaccgatg

SEQ ID NO: 9749 - DNA, 203 bp, synthetic construct
  source 1..203: mol_type = other DNA
ggcgcgccagtcctgaatgttactggcagaaccttgggggaggcatggaaggcccagcttaatcaactgacccggcaagagtttatggaataccggaaagacgggatcattgaagtagatagagctgctgcaaagagagcccgccgtgaagggaatgtgacaggagggcacccagtttcacgaggcaccgactcggaccgatg

SEQ ID NO: 9750 - DNA, 203 bp, synthetic construct
  source 1..203: mol_type = other DNA
ggcgcgccagtcctcccaggccctggcagaactttgggggaggtatggaaggcccagcttaatcaactgacccggcaagagtttatggaataccggaaagacgggatcattgaagtagatagagctgctgcaaagagagcccgccgtgaagggaatgtgacaggagggcacccagtttcacgaggcaccgactcggaccgatg

SEQ ID NO: 9751 - DNA, 203 bp, synthetic construct
  source 1..203: mol_type = other DNA
ggcgcgccagtcctggtgatatctgggcgatcgcttcctggtcctcgcctcctccgctgtctccctggagttcttgcaagtcggccaggatgtctcaggtacagcgcgtgcacagccaggctgcgaaggctgagtttgagaaagctgcagaggaggttaggcaccttaagaccaagccatcggatgagcgactcggaccgatg

SEQ ID NO: 9752 - DNA, 203 bp, synthetic construct
  source 1..203: mol_type = other DNA
ggcgcgccagtccttggtgtccctggtgacctcgtcttcgttaagaagcacgacttccagcagttggggccacggtgggacggaccctacactgtagtcctcagtacccccaccgcggtaaaggtcgctgggaagaccccgtggatccactactctcgactcaagaaagctcctgacaaccaagaagacgactcggaccgatg

SEQ ID NO: 9753 - DNA, 203 bp, synthetic construct
  source 1..203: mol_type = other DNA
ggcgcgccagtcctactccagcctggttggggctgcttcccagctagtagcccttggaactgacgggcactgcgtccacctggccaccacatcggacgggcaggcatttttggtgctgcctgggggctttgttattaaaggccaattggcactcacccccgaggagaggggatatattctggcacgtccgactcggaccgatg

SEQ ID NO: 9754 - DNA, 203 bp, synthetic construct
  source 1..203: mol_type = other DNA
ggcgcgccagtccttaaggaacctgtcacgattggggaacaagcccagagaagggggagagttgggagagtaaagcctggaagatactacaggagtcaagaaactcccgttggttctaaagattaccattatgatttactgcaagcacagaggtacggtattgaagatgggataaacatcaccaaatccgactcggaccgatg

SEQ ID NO: 9755 - DNA, 203 bp, synthetic construct
  source 1..203: mol_type = other DNA
ggcgcgccagtcctgcgctgggctgttgccaagggttcttcaggtgccccgattctgtgctcctccgggcatgttattgggatgttcaccgctgctagaaattctggcggttcagtcagtcagattagggttaggccgttggtgtgtgctggataccatccccagtacacagcacatgccactcttgacgactcggaccgatg

SEQ ID NO: 9756 - DNA, 203 bp, synthetic construct
  source 1..203: mol_type = other DNA
ggcgcgccagtcctatgttccacttagagagttgttcttgatcaattctactgcggatctggataaagatacatcatctctctttcatatgtgatatagtaatggatcttgatcaaatatctgaaacactgagttctgtggccgaagaagagcctttaaccatgtttttacttgataaactgtatgcacgactcggaccgatg

SEQ ID NO: 9757 - DNA, 203 bp, synthetic construct
  source 1..203: mol_type = other DNA
ggcgcgccagtcctcgtttgttcttgaggcaagtcaccagcccctgatcatttcgcctaaaagagcaaggactagagttcctgacctccaggccagtccctgatccctgacctaatgttatcgcggaatgatgatatatgtatctacgggggcctggggctgggcgggctcctgcttctggcagtggtcgactcggaccgatg

SEQ ID NO: 9758 - DNA, 203 bp, synthetic construct
  source 1..203: mol_type = other DNA
ggcgcgccagtccttggcattccttggatgctgactaatcagaggaacgtcagcattttccggcccaggctaagagaagtagataagttagaatctaaattatttatcatccccttgacgaattcgcgttggaaaagcacctctcacttgccgctcttcacacccatcattctaattcggcccctgtgcgactcggaccgatg

SEQ ID NO: 9759 - DNA, 203 bp, synthetic construct
  source 1..203: mol_type = other DNA
ggcgcgccagtcctactggtttgaacacgctaagcggcaggatagaaggcgaagaagagtgtgttctgccagggccgcgttttgctatacaaaatacgagaatgtcaggaagcaactccattatgacaaggttgcgcgcacgctcgacatcatgcgccagacatcacccttacaccagagcccagttacgactcggaccgatg

SEQ ID NO: 9760 - DNA, 203 bp, synthetic construct
  source 1..203: mol_type = other DNA
ggcgcgccagtccttccggtcagaccaaagatgcagagagaggtaaattaaaaagaagggctattgcaacacccgggatgcaaattagagggttcgtgtacttcgttgaaactttagctagaagcatttgcgaaaagcttgaacagtctggacttccggttgggggtaatgaaaagaaggccaaactgcgactcggaccgatg

SEQ ID NO: 9761 - DNA, 203 bp, synthetic construct
  source 1..203: mol_type = other DNA
ggcgcgccagtcctcctagtgagacccagaacttgttcaaattactggagaggggctgttccagtcaacgctaggctgtgtgggtcggctagaccggacccaactgattggactagtcttgtcgtcaattatggcgttagggactactgtaaatatgagaaaatgggagatcacatttttgttacagccgactcggaccgatg

SEQ ID NO: 9762 - DNA, 203 bp, synthetic construct
  source 1..203: mol_type = other DNA
ggcgcgccagtccttaaacgcggacggattagatggggatatttaaaaggggcagcaatctcggctgtctgtacttcttctctgctcgttaaaccaatagcatgtcagctccacgcaaagtcagattgccttctgttaaggctgttgacatgagcatggaagacatggccgcccgcctggctcgcctgcgactcggaccgatg

SEQ ID NO: 9763 - DNA, 203 bp, synthetic construct
  source 1..203: mol_type = other DNA
ggcgcgccagtcctagctacaagaggacttggatgaggatgaggaagaggaggaggatgcacccgctgcggggtactgacgcctccgtgatgtgtttttagatgtcccagcagcaagccccggaccccgccataagggcggcgctgcaaagccagccgtccggtctagcatcggacgactgggaggcccgactcggaccgatg

SEQ ID NO: 9764 - DNA, 203 bp, synthetic construct
  source 1..203: mol_type = other DNA
ggcgcgccagtcctaggtccatgaggagggaagagagaaattggcagctctcttcaggaaatttcctcctcctataccaaattccccctcatctgagggggggcggttcttgttctccctgagccaccatcacccagacacaggcagtctaacaaggaggtgatgtgtgactcggaacaacacccgctcgactcggaccgatg

SEQ ID NO: 9765 - DNA, 203 bp, synthetic construct
  source 1..203: mol_type = other DNA
ggcgcgccagtcctgcatcgatgaggatggttcggaggatggggaattttcagacctggatctgtctgacagcgaccatgaaggggatgagggtgggggggctgttggagggggcaggagtctgcactccctgtattcactgagcgtcatctaataaagatgtctattgatctcttttagtgtgaatccgactcggaccgatg

SEQ ID NO: 9766 - DNA, 203 bp, synthetic construct
  source 1..203: mol_type = other DNA
ggcgcgccagtccttgggaggtgagggagtatcctaggaagagattgtctgcagggcctagggctccgcttgacaaatttatagggagggccactgttcttactgttgcgctacatctggctattccgctcaaatggaagccagaccacacgcctgtgtggattgaccagtggccccttcccgagggtcgactcggaccgatg

SEQ ID NO: 9767 - DNA, 203 bp, synthetic construct
  source 1..203: mol_type = other DNA
ggcgcgccagtccttccactccgaggggcgtgtctgcatagcgttgcgtgccctcatctacaccttcaagacgtatcaggtatttgtaccaaagcccaccgcgctcgccacatttgtccgtgaggcgggcgcgctgcttagacgccactcgatctcgctcctgtccctggagcacaccctgtgtacctcgactcggaccgatg

SEQ ID NO: 9768 - DNA, 203 bp, synthetic construct
  source 1..203: mol_type = other DNA
ggcgcgccagtccttccaaacggatacaagacctggctacagtaccttatcagcacagtgacaggtatctttttaataagggtactgaagggaataggtgagttggatttacacactccgaccttgccatctcatagacccctctttttcattctcgtgtaccttatttccactgcagtggtaacaagcgactcggaccgatg

SEQ ID NO: 9769 - DNA, 203 bp, synthetic construct
  source 1..203: mol_type = other DNA
ggcgcgccagtcctttccctgggatccacttaccaatctgtggtatgggcctgaccctgtattaatatggggacgagggcatgtttgtgtttttccacaggatgccgaagcaccgcgctggattccggaaaggctggtacgcgcggcagaggaactccctgacatatcaaatgcaacgcatgacattgcgactcggaccgatg

SEQ ID NO: 9770 - DNA, 203 bp, synthetic construct
  source 1..203: mol_type = other DNA
ggcgcgccagtcctggccacgggatgttgttgtatgtccgagagacacgtgaggttctgctacgtcattaccaggcacgcgcaggaaacatggcggcggcgggtgttgtgagcgggaagattatatatgaacaagaaggagtatatattcactcatcttgtggaaagaccaatgaccaagacggcttgcgactcggaccgatg

SEQ ID NO: 9771 - DNA, 203 bp, synthetic construct
  source 1..203: mol_type = other DNA
ggcgcgccagtcctccggtgtagattgtctgacctttgaaaaaatttttgtgtccgtgtagcatttcaataaaagtcattatctgctccgagggataaatcatgtctatctcttcgttgttcggaggtagatacgataataagtttttgcttaacatgtcttcggctcccaaaatagagttgattgtacgactcggaccgatg

SEQ ID NO: 9772 - DNA, 203 bp, synthetic construct
  source 1..203: mol_type = other DNA
ggcgcgccagtcctgcgacagcgcaataaggtctctgttgaaattttctcccagcagcacctcacttccctcttcccaactctggtattctaaaccccgttcagcggcatactttctccatactttaaaggggatgtcaaattttagctcctctcctgtacccacaatcttcatgtctttcttcccagcgactcggaccgatg

SEQ ID NO: 9773 - DNA, 203 bp, synthetic construct
  source 1..203: mol_type = other DNA
ggcgcgccagtcctcacggatggcaattggctagtcaatgcagacagactagtaagtagcaagaccgggaataggtacatacccggagagggtcacaccctgcaaggaagacattatgaagaactggtgttggcaagaaaacagatcaacaactttcaagggacagacaggtacaacctaggcccaatcgactcggaccgatg

SEQ ID NO: 9774 - DNA, 203 bp, synthetic construct
  source 1..203: mol_type = other DNA
ggcgcgccagtccttgcaccgggcagacgagcggccgttgccgccgccgcggccatctctagcatgaccagacccaggcgcggaaacgtgtactgggtgcgcgactccatcacgggcgtgcgcgtgcccgtgcgcacccgtcctcctcgtccctgatctaatgcttgtgtcctcccccgcaagcgacgcgactcggaccgatg

SEQ ID NO: 9775 - DNA, 203 bp, synthetic construct
  source 1..203: mol_type = other DNA
ggcgcgccagtcctggttagtcgcatgttacagatttcactactcccaccagcttggagacaacatgtggttcttgacaactctgctcctttggggctggctactactgcaggtctccagcagagtcttcatggaaggagaacctctggccttgaggtgtcatgcgtggaaggataagctggtgtacacgactcggaccgatg

SEQ ID NO: 9776 - DNA, 203 bp, synthetic construct
  source 1..203: mol_type = other DNA
ggcgcgccagtcctgcgcccaggcatgttacagatttcactgctcccaccagcttggagacaacatgtggttcttgacaactctgctcctttgggttccagttgatgggcaagtggacaccacaaaggcagtgatcactttgcagcctccatgggtcagcgtgttccaagaggaaaccgtaaccttgccgactcggaccgatg

SEQ ID NO: 9777 - DNA, 203 bp, synthetic construct
  source 1..203: mol_type = other DNA
ggcgcgccagtcctcgaacactgccccgatccagtgttaatttggggcagaggttcagtctgtgtttactctcaaacctatgatgccgctagatggctaccagaacggttagtaagacaggtgtctaacaataaccaatccagggagtgattctctccctgagatcgctctttcccttgttcacagatcgactcggaccgatg

SEQ ID NO: 9778 - DNA, 203 bp, synthetic construct
  source 1..203: mol_type = other DNA
ggcgcgccagtcctcaaagtcggccctgctctcttgcctgactgtgcccgcttcagcctaccaagtgcgcaattcctcggggctttaccatgtcaccaatgattgccctaactcgagtattgtgtacgaggcggccgatgccatcctgcacactccggggtgtgtcccttgcgttcgcgagggtaacgcgactcggaccgatg

SEQ ID NO: 9779 - DNA, 203 bp, synthetic construct
  source 1..203: mol_type = other DNA
ggcgcgccagtcctcaccctctgccggcgctccgagtgacgtagggaagcgcgccgcgcacctcatggttccggggacagttagggcggcggatggaggtcagcggtggtgctcgctgcgacatcatggcagctcacctggtaaagcgatgcacgtgcctcctgagagaagctgctcgtcaggcccctcgactcggaccgatg

SEQ ID NO: 9780 - DNA, 203 bp, synthetic construct
  source 1..203: mol_type = other DNA
ggcgcgccagtcctccagaaccgcctcagggttgttcccaccctgagggcccacgtggcgtagtactctggtatcaaggtacctttgtacgcctattttatttcccttcccccacagtaacttagaagcttatctcatagttcaacagtagggtcactaaccaagtggctcagcgaacaagcacttctcgactcggaccgatg

SEQ ID NO: 9781 - DNA, 203 bp, synthetic construct
  source 1..203: mol_type = other DNA
ggcgcgccagtcctagcctggggcctgcctcctcgcgaacttgggacgagttggaaaatcctccctgagagagccgtgcggctcaggggagcggtttaactcggaaaaggaaaaggaatccagaaacaaatgaccatggaaacagttgaatcccagcatgatggaagtataacagcttctttgacagacgactcggaccgatg

SEQ ID NO: 9782 - DNA, 203 bp, synthetic construct
  source 1..203: mol_type = other DNA
ggcgcgccagtcctggaagtctgcctgtgggttgctcccacccacagggcccaagtggcgtagtacttggtattccggtacctttgtacacctatttacaaaccctaccccttgtaaccttagaagcaattatttaaccgctcactagggggtgtgctatccaagcacatcaagagcaagcacttctgcgactcggaccgatg

SEQ ID NO: 9783 - DNA, 203 bp, synthetic construct
  source 1..203: mol_type = other DNA
ggcgcgccagtcctttctcggcgcctgtgggttgtacccacccacagggcccactgggcgctagcactctgattctacggaatccttgtgcgcctgttttatgtcccttcccccaatcagtaacttagaagcattgcacctctttcgaccgttagcaggcgtggcgcaccagccatgtcttggtcaagcgactcggaccgatg

SEQ ID NO: 9784 - DNA, 203 bp, synthetic construct
  source 1..203: mol_type = other DNA
ggcgcgccagtcctctccaaccgcctgtgggttgtacccacccgcagggcccactgggcgctagtacactgatatcacggtacctttgtacgcctgttttatctccctacccccatcgtaacttagaagcttaacaatacagatcaatagcctctgcaccaaaccaggtgtggaatgatcaagcatttcgactcggaccgatg

SEQ ID NO: 9785 - DNA, 203 bp, synthetic construct
  source 1..203: mol_type = other DNA
ggcgcgccagtcctgtgcgaatgcctgtgggttgttcccacccacaggcccattgggcgctagcactctggtatcacggtacctttgtgcgcctgttttacatcccctccccaaattgtaatttagaagtttcacacaccgatcattagcaagcgtggcacaccagccatgttttgatcaagcacttccgactcggaccgatg

SEQ ID NO: 9786 - DNA, 203 bp, synthetic construct
  source 1..203: mol_type = other DNA
ggcgcgccagtcctctatgcctgcctgtgggttgttcccacccacagggcccactgggcgctagtacactggtatgccttacctcggtattacggtaccgatgtatatagtacctttgtacgcctgttttatatccctcccccacatgtaaccttagaagtttacacaaacaaagaccaataggagtccgactcggaccgatg

SEQ ID NO: 9787 - DNA, 203 bp, synthetic construct
  source 1..203: mol_type = other DNA
ggcgcgccagtcctttatgtgagcctgtgtgagctgacaaacttagtagtgtttgtgaggattaacaacaattaacacagtgcgagctgtttcttagcacgaagatctcgatgtctaagaaaccaggagggcccggcaagagccgggctgtcaatatgctaaaacgcggaatgccccgcgtgttgtcccgactcggaccgatg

SEQ ID NO: 9788 - DNA, 203 bp, synthetic construct
  source 1..203: mol_type = other DNA
ggcgcgccagtcctatgtgagagcgcaaactaggattaattcacctgtatccctttccctccacccgcagtaactcagcgctggcgtgtgacgtggtgtaaagttttgcctgaacctgtggttgggcaggtacatgccaacaaccttctaagcacccgcgcttgtgttttgctttatctgctgccatccgactcggaccgatg

SEQ ID NO: 9789 - DNA, 203 bp, synthetic construct
  source 1..203: mol_type = other DNA
ggcgcgccagtcctcagtatttgcgcactccggtgtccgcgatcacggacgccatcacgcgttgtcgcgagctcaccaaggtggctgccgacgccaagtctgctcctcattcctccttcctctctcaggccttgcggaactatcaacttgctctcaactctgcccgcatggcccaatctggtcctcgccgactcggaccgatg

SEQ ID NO: 9790 - DNA, 203 bp, synthetic construct
  source 1..203: mol_type = other DNA
ggcgcgccagtcctcggagaccgcggaagtggtccgttctcttcctctcccggcccaagcttctgggtatttctattgcgcgaggcattgtgggttgctgggcggcccggtctcggagaagaggggagagtggcgggccgctgaataagcttccaaaatgatggtgggtgatggcaccacctcagtgacgactcggaccgatg

SEQ ID NO: 9791 - DNA, 203 bp, synthetic construct
  source 1..203: mol_type = other DNA
ggcgcgccagtcctctgcacacgcggtcgcaatctgattgctccttcccacgcattcgtctccgatgattatgagatcacccacatccgcgttggatcgcgcacgcttgacgtgtcgcgtgttacgcgggtggatgacggtgagttatctctgatctcggtgccggatgggccggagcataagagcctcgactcggaccgatg

SEQ ID NO: 9792 - DNA, 203 bp, synthetic construct
  source 1..203: mol_type = other DNA
ggcgcgccagtcctggacaaccgcgtccgcgctcgggggtggtttcgcgctgctcctcttcccgactggccatttccttctcctataggcagaaaaagatcatggagtcagtcgagaagaaggacagcctaaccgccccctctgagttcgccaccaccgcctccaccgatgccgccaacgcgcctacccgactcggaccgatg

SEQ ID NO: 9793 - DNA, 203 bp, synthetic construct
  source 1..203: mol_type = other DNA
ggcgcgccagtccttcacgcatgcgtgcgaggagggggcatggcggatactgtgttgtttgagtttcttcacacggagatggtggctgagctgtgggctcacgaccccgaccccggcccgggggtgagcgccgggctccgtggggaggaagcgggggccaccaaggctgccccgggagacgctggcctcgactcggaccgatg

SEQ ID NO: 9794 - DNA, 203 bp, synthetic construct
  source 1..203: mol_type = other DNA
ggcgcgccagtcctgtggaccagcgtgcgcggggcgggcgggtgcgcgcgcacttcctcctcgcccccacccagacccagaaggcgccaccatggcggcgcccccgcagcccgtcacccacctcatctttgacatggacggacttcttctggatactgaacggctgtattcagtggtgtttcaagaaacgactcggaccgatg

SEQ ID NO: 9795 - DNA, 203 bp, synthetic construct
  source 1..203: mol_type = other DNA
ggcgcgccagtcctagggctttgcgttgcgttagcactcataacagtggcaatgagagatttgaacatgagtataccaacattactcaactccggagccatggcctggctcttgccgagagccgtgtttgaagggacggttagctcctttgctctgccacttgttagcttgctggctccagggctcagcgactcggaccgatg

SEQ ID NO: 9796 - DNA, 203 bp, synthetic construct
  source 1..203: mol_type = other DNA
ggcgcgccagtcctaaagcactgctcgtcgtctccgcatcagcggggaaagactttgagctccggctacctgtggacgctagaaaacaaactacgaccactggtgaatctgctgaccccgtcaccactaccgttgagaactacggaggagagactcaggtccaacgtcgccaccacaccgacgttgcccgactcggaccgatg

SEQ ID NO: 9797 - DNA, 203 bp, synthetic construct
  source 1..203: mol_type = other DNA
ggcgcgccagtcctggtgtttcgctctggggttgttcccaccccagaggcccacgtggcggctagtactccggtaccccggtacccttgtacgcctgttttatactccctttcccaagtaactttagaagaaataaactaatgttcaacaggagggggtacaaaccagtaccaccacgaacacacactcgactcggaccgatg

SEQ ID NO: 9798 - DNA, 203 bp, synthetic construct
  source 1..203: mol_type = other DNA
ggcgcgccagtccttaagattggctcttgtagcattcaagatcatgagcggtgaggtcccctccacggaggacctggtcaatctgctgcccgccatcctctcgcctggagcccttgtagtcggtgtggtctgcgcagcaatactgcgccggcacgttggcccgggcgagggggcagtgcaatggatgacgactcggaccgatg

SEQ ID NO: 9799 - DNA, 203 bp, synthetic construct
  source 1..203: mol_type = other DNA
ggcgcgccagtcctaggaacgggctggaacattgtgacattaaagagtggggttaatgttcatttcaagccgactgaaccatctgacacactgctgtgtgacataggtgaagcttcacccgtcccagaaattgaatctgccagaacaatcagggggctgcaaatggccgaggaatggctagctaggggcgactcggaccgatg

SEQ ID NO: 9800 - DNA, 203 bp, synthetic construct
  source 1..203: mol_type = other DNA
ggcgcgccagtcctagtttggcgctggaatctgggaacgacgagaagccaaaagataattttcacaattatgttaatgttaatagccccagcgtacagcttcagctgtctggggatgcagaaccgagactttgtcgagggagtgaatggtgttgagtggatcgatgtcgttctggaaggcggctcatgcgactcggaccgatg

SEQ ID NO: 9801 - DNA, 203 bp, synthetic construct
  source 1..203: mol_type = other DNA
ggcgcgccagtcctatcgggtcgcttcaaaactgatgttgtaacggctcggatcgtcaccgaaataaattcgcaaattgtcaaaaagttgttcggctgtgtatgttttaatgtcattgaaaatatttagaggtgcttcgatcttaggtaaaatttcggtcgcctgccaattttccatgtttcggcgttcgactcggaccgatg

SEQ ID NO: 9802 - DNA, 203 bp, synthetic construct
  source 1..203: mol_type = other DNA
ggcgcgccagtcctcattaggaggaaaggcattcatcaggttttcggctcagcatttaaaagcttatttggaggaatgtcatggattactcaaggcatgttgggggcactgctattgtggatggggctgaatgcaagggacagatccatttctatgacttttctagccgtaggaggaattttagtcttcgactcggaccgatg

SEQ ID NO: 9803 - DNA, 203 bp, synthetic construct
  source 1..203: mol_type = other DNA
ggcgcgccagtcctcacctggtggaagtttctgccgcggctttgcggggacgggggagtggtagtgggggctgcagctgccggacccaggcgcgatggctacgggcgcggatgtacgggacattctagaactcgggggtccagaaggggatgcagcctctgggaccatcagcaagaaggacattatcacgactcggaccgatg

SEQ ID NO: 9804 - DNA, 203 bp, synthetic construct
  source 1..203: mol_type = other DNA
ggcgcgccagtcctaccggtgcggaatccacgcttgaccatgtactgcttgatagagtcgcggctggccgactcatgggttaaagtcagttgacaagacacatggcttcttcaattctggtttctgactccgtctttgcccccatccttacccacaaactctcccgtcggatccggcgacaccccgtccgactcggaccgatg

SEQ ID NO: 9805 - DNA, 203 bp, synthetic construct
  source 1..203: mol_type = other DNA
ggcgcgccagtcctgggctcccggagaatcagaccttcaactctgacttcctcctcctgggaatcttcaatcatagccccacccacaccttcctcttctttctggtcctggccatcttttcagtggccttcatgggaaactccatcatggttctcctcatctacctggatacccagctccacaccccccgactcggaccgatg

SEQ ID NO: 9806 - DNA, 203 bp, synthetic construct
  source 1..203: mol_type = other DNA
ggcgcgccagtcctattacatgggaggagggacattggaagaagaactgtccaaaactcgtaagcggggcaaccccagtgttggtagaagaattacagtagggccgtcagggttcttccgccctccgtgaacccaggctaaaggttaaagtaggggggcaaataatagattttctagtagatacgggacgactcggaccgatg

SEQ ID NO: 9807 - DNA, 203 bp, synthetic construct
  source 1..203: mol_type = other DNA
ggcgcgccagtcctgggtaaggggaggtcagtgaaacacaggggacagagaaactgacaataacttactcatcgtcaatgatgtgggagattaatggccctgagtcagtgttggtcaatacctatcagtggatcatcagaaactgggaaactgttaaaattcaatggtctcagaatcctacaatgctacgactcggaccgatg

SEQ ID NO: 9808 - DNA, 203 bp, synthetic construct
  source 1..203: mol_type = other DNA
ggcgcgccagtcctatgggctgggataaagaggacgattgatggggtcctgagaggagcaggacccataaggtttgtgctggctctactgactttcttcaagtttacagccctgaggccaaccattggaatgctgaagagatggaagctggttggagttaatgaggcgactaaacatctgaaaagcttcgactcggaccgatg

SEQ ID NO: 9809 - DNA, 203 bp, synthetic construct
  source 1..203: mol_type = other DNA
ggcgcgccagtccttccaccatggatagatgtggtgagaataggtgtgctaaccctgggaatcctctcactattgaaagagaggagcaatgcaatggcaaaaaagaagggaggcatgctcctgggagtggcatgcgctaccgctggaatcgctagccctttggtgtttgctggtctgcacatggtgctcgactcggaccgatg

SEQ ID NO: 9810 - DNA, 203 bp, synthetic construct
  source 1..203: mol_type = other DNA
ggcgcgccagtcctcgctgacaggatcctaggcaattttgtggatctttgctgatacttcattctgcactcaaagccgcatccggcaagagtcatggggaaaacgcagtccaagggacagcccagcacaaatctcctcaaggagacagaaccaaggcatccagtaataccagatgccaggggaactggcgactcggaccgatg

SEQ ID NO: 9811 - DNA, 203 bp, synthetic construct
  source 1..203: mol_type = other DNA
ggcgcgccagtcctgttaagccggatcctaggcatagtgtctaacactttcactgagcaactctattctagatcaaaatcaccagaacttctggcatggcacactccaaggaggttccaagctttagatggactcagtccttaaggagaggtttgagccaattcactcagactgtcaagtcagatgttcgactcggaccgatg

SEQ ID NO: 9812 - DNA, 203 bp, synthetic construct
  source 1..203: mol_type = other DNA
ggcgcgccagtcctgcccgcttggatcctaggctattggattgcgctttgcttttgtcattttggcagatagtctcagttctttgttgtgtgcatacaacacaacaatctggcgatgagtgcctcaaaggaaataaaatcctttttgtggacacaatctttgaggagggaattatctggttactgctccgactcggaccgatg

SEQ ID NO: 9813 - DNA, 203 bp, synthetic construct
  source 1..203: mol_type = other DNA
ggcgcgccagtccttgaccgaaggatgagcccaccctgctttatcttctcttcgaagttttcgacgtggtcagagtgcatcagccacaccgcggcatcatcgaggcagtctacctgcgtacaccgttctcggccggtaacgctaccacgtaagaagcttcttgcttcttgcaaatagcagctgcaacccgactcggaccgatg

SEQ ID NO: 9814 - DNA, 203 bp, synthetic construct
  source 1..203: mol_type = other DNA
ggcgcgccagtcctggaggcagggatgctttaaaattaagcattgaggacccaagtcacgaaggggagggaataccactatatgatgcgatcaagtgcatgagaacattctttggatggaaagaaccctatattgttaaaccacacgaaaagggaataaatccaaattatctgctgtcatggaagcaacgactcggaccgatg

SEQ ID NO: 9815 - DNA, 203 bp, synthetic construct
  source 1..203: mol_type = other DNA
ggcgcgccagtcctgcgtaattggccaaaccctcctcttcaacatattgggggggtgggtggctgcccagctcgccgcccccggtgccgctaccgcctttgtgggcgctggcttagctggcgccgccatcggcagcgttggactggggaaggtcctcgtggacattcttgcagggtatggcgcgggcgcgactcggaccgatg

SEQ ID NO: 9816 - DNA, 203 bp, synthetic construct
  source 1..203: mol_type = other DNA
ggcgcgccagtcctcttccctgggccagcgatgccccggacctacaaaagccggacaaggcacttcagagcccaccaccggcctccacagacccagacaccatgctatcaggtaacgcaggagaaggagcaacagcctgcggaggttcggccgccgcgggccaggacctcatcagcgtcccccgcaaccgactcggaccgatg

SEQ ID NO: 9817 - DNA, 203 bp, synthetic construct
  source 1..203: mol_type = other DNA
ggcgcgccagtcctctttaagcggccagtggagtgaaagccatcagggccggtctcgatgaggccaaaccctggtacaagcttattaagctcctgagccgcttgtcgtgcatggccgctgtagcagcgcggtcaaaggacccagtccttgtggccatcatgctggctgacaccggtctcgagattctgcgactcggaccgatg

SEQ ID NO: 9818 - DNA, 203 bp, synthetic construct
  source 1..203: mol_type = other DNA
ggcgcgccagtcctaaccgacgggcccgcgcgctcctgggcgggggatgttgtgatggagaagccgcggcggagcccgaaccccgcagcctgagccacctccgtcatctgggcccggggcctcaccgcgcagattccttctggaaccccaacgccttcgagacggattccgacctgccggctggatggcgactcggaccgatg

SEQ ID NO: 9819 - DNA, 203 bp, synthetic construct
  source 1..203: mol_type = other DNA
ggcgcgccagtcctccgggcccggcgaactcagagggggcggttaggctgtccttcttctcgactgactccatgatctttttctgcctataggagaaggaaatggccagtcgggaagaggagcagcgcgaaaccacccccgagcgcggacgcggtgcggcgcgacgtcccccaaccatggaggacgtgcgactcggaccgatg

SEQ ID NO: 9820 - DNA, 203 bp, synthetic construct
  source 1..203: mol_type = other DNA
ggcgcgccagtcctcgagatgcggcgcgtgcgcaattggctcgagtacgctgcccgccactcttgggagaggaacctaccctggaccgctgccgacgaagttggcgaccagctagtttcctatcccatccaaccggagactctcgcaaacacccaaaccaacacagcttttgtcctgtccctcttctccgactcggaccgatg

SEQ ID NO: 9821 - DNA, 203 bp, synthetic construct
  source 1..203: mol_type = other DNA
ggcgcgccagtcctgtgatacgggcgggcggcgaacttcctccacaccttgaaagggatgtcaaattcctggtccacaattttcattgtcttccctctcagatgtcaaagaggctccgggtggaagatgacttcaatcccgtctacccctatggctacgcgcggaatcaaaatatccccttccttactcgactcggaccgatg

SEQ ID NO: 9822 - DNA, 203 bp, synthetic construct
  source 1..203: mol_type = other DNA
ggcgcgccagtccttcatgtacggcttcggcttaggagggcgaaaagctgagtggcgtcggagggagctctactgcagggagccaacataccctaccgagcactcagagagtcgttggaagacgggaaggaagcccgacgactgagcggtccaccccagacgtgattctggtcgcccggagatcaagccgactcggaccgatg

SEQ ID NO: 9823 - DNA, 203 bp, synthetic construct
  source 1..203: mol_type = other DNA
ggcgcgccagtccttatcataggggacccgatatctgcctacaaggaagtcatcggccacaatctttttgatcttaagagaacaagcttcgagaagctggccaagttaaatctcagcatgtcagtactcggagcctggactagacacaccagtaaaagactactacaagactgtgtcaatgtgggtgtcgactcggaccgatg

SEQ ID NO: 9824 - DNA, 203 bp, synthetic construct
  source 1..203: mol_type = other DNA
ggcgcgccagtcctatgtagacgggcccgggggatctcccccgcggtaactggtcacagttgccgcggacggagatcatcccccggttaccccctttcgacgcgggtactgcgatagtgccaccccagtccttcctactcccgactcccgaccccaacccaggttccttggaacaggaacaccaatttcgactcggaccgatg

SEQ ID NO: 9825 - DNA, 203 bp, synthetic construct
  source 1..203: mol_type = other DNA
ggcgcgccagtcctatgacctagggcctctttgagattccaagctacagatcactttacctgcgttgggtgaacgccgtgtgcggcgacgcataatcccccaaacatcacaattggcacaatgattttggggcgcgcgacgccgtgggagtgaaaagcccgaaagggcttttcccgcttccttaatcccgactcggaccgatg

SEQ ID NO: 9826 - DNA, 203 bp, synthetic construct
  source 1..203: mol_type = other DNA
ggcgcgccagtcctgtctgagtgggcgctagggtcccacccctaacatgccaacgacagctcctgcgctgcactccacacttacgtttgtgcacgcgcgggaaccgatggactttcgttcaaccacctccagctggactcactgcaccgcgtggccatgttagctggattgtgtggacgaacaccgctcgactcggaccgatg

SEQ ID NO: 9827 - DNA, 203 bp, synthetic construct
  source 1..203: mol_type = other DNA
ggcgcgccagtccttaattagagggcgctagggtcttgccctagttagccgtaacgaccgtccctgcgactcacctcgcacttacgccatcgctcttcggtggcccagatggacttccgttcacccacctctggctggacctgctgcaccgcacctggcccggacagctggactgtgcggacgaacaccgactcggaccgatg

SEQ ID NO: 9828 - DNA, 203 bp, synthetic construct
  source 1..203: mol_type = other DNA
ggcgcgccagtcctatctaacagggcgctagggtttcacccctagcatgccactgcagtccctgcgatacactccacacttacgttcttgtgtgcgcgggacccgatggactttcgttcacccacttacagctggacccacgacaccgcgtgaccactttgctggattgtgcggacgaacaccgcttgcgactcggaccgatg

SEQ ID NO: 9829 - DNA, 203 bp, synthetic construct
  source 1..203: mol_type = other DNA
ggcgcgccagtcctaactcctagggctgactttgtgaacatcgtttcctctgcccccttcattgtccccatggccgacgttaatgacaagggacggttttacacctcccgtgtcgtcatcgtcacctcaaacttccccggccctaacccccgctccgcccgctgtgtggccgcgctggaacgccgcctcgactcggaccgatg

SEQ ID NO: 9830 - DNA, 203 bp, synthetic construct
  source 1..203: mol_type = other DNA
ggcgcgccagtcctgcacacacggggcgagactggttgtgctcgccactgctacccctccgggctccgtcactgtgtcccatcctaacatcgaggaggttgctctgtccaccaccggagagatccctttttacggcaaggctatccccctcgaggtgatcaaggggggaagacatctcatcttctgcccgactcggaccgatg

SEQ ID NO: 9831 - DNA, 203 bp, synthetic construct
  source 1..203: mol_type = other DNA
ggcgcgccagtcctcgataacggggggcaggagtctgcactccctgtattcactgagcgtcatctaataaagatgtctattgatctcttttagtgtgaatcatgtctgacgagggaccaggtacaggacctggaaatggcctaggacagaaggaagacacatctggaccagacggctccagcggcagtcgactcggaccgatg

SEQ ID NO: 9832 - DNA, 203 bp, synthetic construct
  source 1..203: mol_type = other DNA
ggcgcgccagtcctctagttaggggggtgggggggcctcggccccctcaccctcttttccggtggccacccgcccgggccaccgttactccactccactccttcgggactggtttggaggaacataacagggcttcccatccctgtttacccttactccactcacccttccccttgaccaaccctatccgactcggaccgatg

SEQ ID NO: 9833 - DNA, 203 bp, synthetic construct
  source 1..203: mol_type = other DNA
ggcgcgccagtccttgttgtaagggttggagtggccgcaacgggcggggcggggcggggccgggcaagtttgttccccgagttcggagcctaggagccccccgcggctgcggcgcaggtgccctcggcctgagtcgggatggagctgcctgctgtgaacctgaaggggctgcattgtattctcaggctcgactcggaccgatg

SEQ ID NO: 9834 - DNA, 203 bp, synthetic construct
  source 1..203: mol_type = other DNA
ggcgcgccagtcctatgcgcaaggtaaactttgtgagtatggaattctctcttactgatccgaggctggagccacacagatgggaaaagtactgcgttcttcggataggagacatgctcttacggactgaaataggccaagtgtcaaggcccatgtttctttatgtgagaaccaatggaacctccaagcgactcggaccgatg

SEQ ID NO: 9835 - DNA, 203 bp, synthetic construct
  source 1..203: mol_type = other DNA
ggcgcgccagtccttcgagagaggtcaccacgggcatagcattgctcacccgtgaatcaagtcatcgagatttctctgacctctgaagtgcactgtggttgcgtggctgggaatccacgcttgaccatgtactgcttgatagagtcgcggctggccgactcatgggttaaagtcagttgacaagacaccgactcggaccgatg

SEQ ID NO: 9836 - DNA, 203 bp, synthetic construct
  source 1..203: mol_type = other DNA
ggcgcgccagtcctaatcgaacggtggtgaatggttctcaattccatgctggatgtctggcgatggttatggtcccggagtactcctacgggaccttcaaccagaaccgacagaatgctatcttcacctttccttatgccctcctcaacctctaccagggtaatactgcctctcttgaagttccctaccgactcggaccgatg

SEQ ID NO: 9837 - DNA, 203 bp, synthetic construct
  source 1..203: mol_type = other DNA
ggcgcgccagtccttcattcctggtggtgctttgatggaccctcatgcaatactgttctggaagacaataacccagtggagttatggacaaagtcaggtgagaagaaaatcttgaagccccggtggagagatggaagattgtgggcagatcaccaggccttaaaagccttcaaggattttgcgagtggcgactcggaccgatg

SEQ ID NO: 9838 - DNA, 203 bp, synthetic construct
  source 1..203: mol_type = other DNA
ggcgcgccagtcctgtaaaccgggtggtgctttgatggaccctcatgcaatactgttctggaagacaataacccagtggagttatggacaaagtcaggtgagaagaaaatcttgaagccccggtggagagatggaagattgtgggcagatcaccaggctttaaaagccttcaaggattttgcgagtggcgactcggaccgatg

SEQ ID NO: 9839 - DNA, 203 bp, synthetic construct
  source 1..203: mol_type = other DNA
ggcgcgccagtcctctggataagtaaaaggtggcctccctgcccagggccgtgtccaaccatttgattagaagggtagcatcctcgggaagtgcgggtgggctgcggttgcaggccagggcgtaaaagagacccagctgtgaagagaagccctcgagacctccccccatctccctcttaccttgtgtccgactcggaccgatg

SEQ ID NO: 9840 - DNA, 203 bp, synthetic construct
  source 1..203: mol_type = other DNA
ggcgcgccagtcctgagcggcagtatgtgatggttcagtagagtattgggtgtggagactagctataaaagaggccgggaggccttctgcgtccagacgcgatggcacacgccagagacaaggcaggcgctgtcctggccatgatactcatctgtgagacaagccttatctggacatctagtggcagtcgactcggaccgatg

SEQ ID NO: 9841 - DNA, 203 bp, synthetic construct
  source 1..203: mol_type = other DNA
ggcgcgccagtcctggagccgcgtcgaaacctcagtggataaaagacctagagaatgtgtatcccagaagaagctggccaaggatatgggagcaaccaccatggaccagaagtctctctgggcaggatctgcctacaaactggtttgctactttaccaactggtcccaggaccggcaggaaccaggaacgactcggaccgatg

SEQ ID NO: 9842 - DNA, 203 bp, synthetic construct
  source 1..203: mol_type = other DNA
ggcgcgccagtcctcacgtcaggtctacgtggaccgacaagaacagtttcgaatcggaagcttgcttaacgtagttctaacagttttttattagagagcagatctctgatgaacaaccaacggaaaaagacgggtcgaccgtctttcaatatgctgaaacgcgcgagaaaccgcgtgtcaactgtttccgactcggaccgatg

SEQ ID NO: 9843 - DNA, 203 bp, synthetic construct
  source 1..203: mol_type = other DNA
ggcgcgccagtcctgctaagtagtctccgtacccgcagaaattctgcggaagtctcggagattcgcccgggccctgcccgtttgggcgcggccggactacaaccccccgctagtagagacgtggaaaaagcctgactacgaaccacctgtggtccatggctgcccgctaccacctccacggtcccctccgactcggaccgatg

SEQ ID NO: 9844 - DNA, 203 bp, synthetic construct
  source 1..203: mol_type = other DNA
ggcgcgccagtcctcggtcgaggtctcttggtggcattattggctcaagtttctttaaacttaagcgcgccgtggctcctgctctagggaataaagagcgagctcaaaaaagacacttttattttgcaaactcaaataaaggtgctaaaaaatcaaaaaacaacgaacctaaaccaagcacctcaaaacgactcggaccgatg

SEQ ID NO: 9845 - DNA, 203 bp, synthetic construct
  source 1..203: mol_type = other DNA
ggcgcgccagtcctagtcatctgtctgaaggtgctgcgggatgccgttccttcgcgcgtgaggctgcggctctgacgccccataggctccttcaatttccgtgatcctcggagtccccaggagaccaggtgatggcagcagccagactcctgccagtgccggcaggaccccagcccctgtcgttccagcgactcggaccgatg

SEQ ID NO: 9846 - DNA, 203 bp, synthetic construct
  source 1..203: mol_type = other DNA
ggcgcgccagtcctattccttcgtcttgcggaccaggaggagcaactcgaggaagcagcgaccaacgcttctctgtggggagacggcgacctggccgaaggatggatgagtcccgcagacagcgacctgctggtcatgtggcagctaacctcagcccccaaggtgcacgccaacggtccttcaaggatcgactcggaccgatg

SEQ ID NO: 9847 - DNA, 203 bp, synthetic construct
  source 1..203: mol_type = other DNA
ggcgcgccagtcctcggattcagtgaagagggtagtaatgagcttgttggacggcagagggccagtacgtttcgtgctggctcttatcacgttcttcaagtttacagcattagccccgaccaaggcgcttttaggccgatggaaagcagtggaaaagagtgtggcaatgaaacatcttactagtttcacgactcggaccgatg

SEQ ID NO: 9848 - DNA, 203 bp, synthetic construct
  source 1..203: mol_type = other DNA
ggcgcgccagtcctatgcatttgtgatgggagtacgacctgatagggcgctgcagaggcccactattaggctagtataaaaatctctgctgtacatggcacatggagttgaatcactttgaacttttatacaaaacaaacaaacaaaaaccaatgggagtggaggaaccggtgtacgatgccacggggcgactcggaccgatg

SEQ ID NO: 9849 - DNA, 203 bp, synthetic construct
  source 1..203: mol_type = other DNA
ggcgcgccagtccttgtaattagtgcgaattgcctacctacgtcaccatcccgaataccgcaatcaaaatgttgcggcacttcttaggcttatttaaaaccatgcaggctatgctaccagtcattttaattttgctactaccctgcattcccctagcttccaccgccactcgcgctacacctgaacaacgactcggaccgatg

SEQ ID NO: 9850 - DNA, 203 bp, synthetic construct
  source 1..203: mol_type = other DNA
ggcgcgccagtcctcacagttcgtgcgaattgcctacctgcgccaccatcccgaataccgcaaccaaaatatcgcggcacttcttagactcatctaaaaccatgcaggctatactaccaatatttttgcttctattgcttccctacgctgtctcaaccccagctgcctatagtactccaccagaacaccgactcggaccgatg

SEQ ID NO: 9851 - DNA, 203 bp, synthetic construct
  source 1..203: mol_type = other DNA
ggcgcgccagtcctcggaacaagtgctagcagggccagccttgaactcgctggacagagctacagacctatggggcctggaagtgcccgctgagaaagggagaagacagcagaggggttgccgagggagttcctggtcggctccgacgccttctgctgcaacttggctagtgccctactttcagacaccgactcggaccgatg

SEQ ID NO: 9852 - DNA, 203 bp, synthetic construct
  source 1..203: mol_type = other DNA
ggcgcgccagtccttcatagtggtgtgtatgtatcatcaccacgccgccgcagcagaggagaaaggaagaggtcgcgcgccgaggctgagttgctttcaagatggccaccccatcgatgatgccccaatgggcatacatgcacatcgccggacaggatgcttcggagtacctcagtccgggtctggtgcgactcggaccgatg

SEQ ID NO: 9853 - DNA, 203 bp, synthetic construct
  source 1..203: mol_type = other DNA
ggcgcgccagtccttaacgcccgttaagtccgtcaagagactactcttgagtgccagcgagtagagttttctctaaactgtgctcccaaagtttaagaaaaatgagacacctgcacctcctgtcttcaactgtgcctattgacatggccgcattattgctggaggactatgtaaatacaatattggagcgactcggaccgatg

SEQ ID NO: 9854 - DNA, 203 bp, synthetic construct
  source 1..203: mol_type = other DNA
ggcgcgccagtccttccgtaatgttatatagaccggcggcggagcacgcgtgtgtgcggacgcagttgcgtgaggggtttgtactatcctcggtgctgtggtgcagagctagttcctctccagctcagccgcgtaggttgaattgaccaaagcaatggtgatggagaagcctagtcccctgctggtcgcgactcggaccgatg

SEQ ID NO: 9855 - DNA, 203 bp, synthetic construct
  source 1..203: mol_type = other DNA
ggcgcgccagtcctcgtacgatgttcgtcctcgcagccccgctcgggcggcattggaactctccagtttgtggaggagtttactccctctgtctacttcaaccccttctccggctctcctggccagtacccggacgagttcataccaaacttcgacgcaatcagcgagtcagtggatggctatgattgcgactcggaccgatg

SEQ ID NO: 9856 - DNA, 203 bp, synthetic construct
  source 1..203: mol_type = other DNA
ggcgcgccagtcctcaccaagggttgggtcgcgaaaggccttgtggtactgcctgatagggtgcttgcgagtgccccgggaggtctcgtagaccgtgcaacatgagcacacttcctaaacctcaaagaaaaaccaaaagaaacaccatccgtcgcccacaggacgtcaagttcccgggtggcggacagcgactcggaccgatg

SEQ ID NO: 9857 - DNA, 203 bp, synthetic construct
  source 1..203: mol_type = other DNA
ggcgcgccagtcctaacggcccgttgggttgcgaaaggccttgtggtactgcctgatagggtgcttgcgagtgccccgggaggtctcgtagaccgtgcaccatgagcacaaatcctaaacctcaaagaaaaaccaaaagaaacaccaaccgtcgcccacaagacgttaagtttccgggcggcggccagcgactcggaccgatg

SEQ ID NO: 9858 - DNA, 203 bp, synthetic construct
  source 1..203: mol_type = other DNA
ggcgcgccagtcctaacctccttaagccaaatgctgatcaacaggatgcacaaaaccaaccgcaatggacccaggtatgaagaagatgtggacttgggttcagggaccagagctgtgagctgcacaagacagaggactgactggggaatggtcgctgatagggtgaagaatttggccagagaatatgccgactcggaccgatg

SEQ ID NO: 9859 - DNA, 203 bp, synthetic construct
  source 1..203: mol_type = other DNA
ggcgcgccagtccttgctatcttacacagagcgatctaagcggcgagaccggagacgcagatctgtttgtcacgcccgcacctggttttgcttcaggaaatatgactacgtccggcgttccatttggcatgacactacgaccaacacgatctcggttgtctcggcgcactccgtacagtagggatcgtcgactcggaccgatg

SEQ ID NO: 9860 - DNA, 203 bp, synthetic construct
  source 1..203: mol_type = other DNA
ggcgcgccagtcctagtaaacctaccggagcagtcgcctggccatctacatcgaggacctcggtcgaaaatactgccccgcgagcgcgaccgggggagatcatggcatccggcaagcaccatcagcccggggggacgcggagcctgaccatgcaaaaagtaagcctgcgcgtgaccccccgcctggtgcgactcggaccgatg

SEQ ID NO: 9861 - DNA, 203 bp, synthetic construct
  source 1..203: mol_type = other DNA
ggcgcgccagtcctcactgcattactgtcgttagcgggcagagacaggatagacagggaggagagcgaaggaggccccaactcgaccgcgaccagtgtgcctactgcaaagaaaaaggacattgggctaaagattgccccaagaagccaagaggaccccggggaccgcgaccccaggcctccctcctgcgactcggaccgatg

SEQ ID NO: 9862 - DNA, 203 bp, synthetic construct
  source 1..203: mol_type = other DNA
ggcgcgccagtcctgctgagactagcctgcaaggaagattacaggtacgcaatatcgtcaaccgatgagatagggctacttggggccggaggtctcaccaccacctggaaggaatacaaccacgatttgcaactgaatgacgggaccgttaaggccagttgcgtggcaggttcctttaaagtcacagccgactcggaccgatg

SEQ ID NO: 9863 - DNA, 203 bp, synthetic construct
  source 1..203: mol_type = other DNA
ggcgcgccagtcctcgaacttatatcctctcctttgcacgccgtgggaccatccaggagaagttgatttccgtggcaggactcgccgtccactccggaccagacgagtaccggcgcctctttgagcccttccagggcctctttgagattccaagctacagatcactttacctgcgttgggtgaacgcccgactcggaccgatg

SEQ ID NO: 9864 - DNA, 203 bp, synthetic construct
  source 1..203: mol_type = other DNA
ggcgcgccagtcctggctatactatgtctgctatctttggcctgtccctgtagtggggcgcgggtcactgacccagacacaaataccacaatcctgaccaattgctgccagcgtaatcaggttatctattgttctccttccacttgcctacacgagcctggttgtgtgatctgtgcggacgagtgctgcgactcggaccgatg

SEQ ID NO: 9865 - DNA, 203 bp, synthetic construct
  source 1..203: mol_type = other DNA
ggcgcgccagtcctgcgcactatcacagcacacaaattgggggaataaggatggtggacatccttaggcaaaacccaactgaggagcaagctgtggatatatgcaaagcagcaatgggtttgaggatcagttcatcctttagctttggaggcttcactttcaaaagaacaaatggatcatccgtcaagcgactcggaccgatg

SEQ ID NO: 9866 - DNA, 203 bp, synthetic construct
  source 1..203: mol_type = other DNA
ggcgcgccagtccttacctgcgtcacatagatgcccactttctgtcacagactaagcagcagggacttaacttctcgtacctaactgcctaccaagccactgtgtgcgcccgcgcgcaggctcctcccccaagttgggacgagatgtggaagtgtctcgtgcggcttaagccaacactacatggacctcgactcggaccgatg

SEQ ID NO: 9867 - DNA, 203 bp, synthetic construct
  source 1..203: mol_type = other DNA
ggcgcgccagtcctgacatcgatcacgggcgtgcgcgtgcccgtgcgcacccgtcctcctcgtccctgatctaatgcttgtgtcctcccccgcaagcgacgatgtcaaagcgcaaaatcaaggaggagatgctccaggtcgtcgccccggagatttacggacccccggcggaccagaaaccccgcaaacgactcggaccgatg

SEQ ID NO: 9868 - DNA, 203 bp, synthetic construct
  source 1..203: mol_type = other DNA
ggcgcgccagtccttgatctgttccgaggagcaccctcagggtccggcccacggagtgcggattaccatcgaagggggaatagactctcgcctgcatcgcatcttctcccagcggcccgtgctaattgaacgcgaccagggaaatacaaccatctccatctactgcatctgtaaccaccccggattgccgactcggaccgatg

SEQ ID NO: 9869 - DNA, 203 bp, synthetic construct
  source 1..203: mol_type = other DNA
ggcgcgccagtcctccctcaagtcctgaaacatatgctgtaataactggagctccgggggctgtagctgggtttgctgcattggttcaaactgtaactggtggtagtgctattgctcagttgggatatagattttttgctgactgggatcataaagtttcaacagttgggctttttcagcagccagctcgactcggaccgatg

SEQ ID NO: 9870 - DNA, 203 bp, synthetic construct
  source 1..203: mol_type = other DNA
ggcgcgccagtccttggcgccgtcgatcctctactcggtcctccagcacctcgcccccaggctacctgacggggggcacgacgggcccccgtagtcccgccatgcgccagggcgcccccgcgcgggggcgccggtggttcgtcgtatgggcgctcttggggttgacgctgggggtcctggtggcgtcgcgactcggaccgatg

SEQ ID NO: 9871 - DNA, 203 bp, synthetic construct
  source 1..203: mol_type = other DNA
ggcgcgccagtcctcggcagcgtcggaaagtgtcatgcttggtattctcattatgttcttaagtttttcctcttagtgtttggtgagaatggtgtgtttttctataagcacttgcatggtgatgtcttgcctaatgattttgcctcgaaactaccattgcaagagccatttttcccttttgaaggcaacgactcggaccgatg

SEQ ID NO: 9872 - DNA, 203 bp, synthetic construct
  source 1..203: mol_type = other DNA
ggcgcgccagtcctgttcatactcggcggcttccgtagcgggagggcgaaagatggcggcggcagtactgggacagttgggtgcgttatggatacataacctgaggagccgggggaagctggccttggggaaatctaccactgtcgaagacaaataaaatatagcaaagacaagatgtggtatttggccgactcggaccgatg

SEQ ID NO: 9873 - DNA, 203 bp, synthetic construct
  source 1..203: mol_type = other DNA
ggcgcgccagtcctgaagggaatcgggggcagaggtggaggcgactgagatgggctgcggtctggccttggaggcggatggctggcagagctcattccgcgttcgggggtgtgctcccggtggcggtcgcttgactgatttcctccgcggctggccattgtgttctcctaggcagagaaacaacagaccgactcggaccgatg

SEQ ID NO: 9874 - DNA, 203 bp, synthetic construct
  source 1..203: mol_type = other DNA
ggcgcgccagtcctggacgttctcgggggcagaggtggaggcgattgcgaagggctggggtccgacctggaaggcggatgactggcagaaccccttccgcgttcgggggtgtgctccctgtggcggtcgcttaactgatttccttcgcggctggccattgtgttctcctaggcagagaaacaacagaccgactcggaccgatg

SEQ ID NO: 9875 - DNA, 203 bp, synthetic construct
  source 1..203: mol_type = other DNA
ggcgcgccagtccttgtcaagctctataggaatgaaggaagacgcttggcgtgtggggacacggttgatggtttgcccgttgttgcgcgtctcggcgaccttgttttcgcagggttggctatgccgccagatgggtgggccattaccgcaccttttacgctgcagtgtctctctgaacgtggcacgctcgactcggaccgatg

SEQ ID NO: 9876 - DNA, 203 bp, synthetic construct
  source 1..203: mol_type = other DNA
ggcgcgccagtcctagaaagactctatatccaacactaagaaaattcagtcgcgcctccaaagaaggaagcatcatttcatataatcgtggcaacattggataaaacacgacctcaaactcccttccctgctcacagactcgctcatacaaaagttcaagattcgtcttttcaggtgaggaatccatccgactcggaccgatg

SEQ ID NO: 9877 - DNA, 203 bp, synthetic construct
  source 1..203: mol_type = other DNA
ggcgcgccagtcctatcgaggatctcaacgcctacgttgcttacgaagacccccagggcgtggtctaccaagaagtagaaccataccactggatggttgccgttgcaatggtgggcacgcgttgggactactctgccactaacaactgtactcactttgtttctaatatcactggtgttgaactcccccgactcggaccgatg

SEQ ID NO: 9878 - DNA, 203 bp, synthetic construct
  source 1..203: mol_type = other DNA
ggcgcgccagtcctactaacattctcccagtaccgctggttcggcctcaatgaagatctcactccattgaacgtcaccggtggtctgttctatcacgtctccctcaaccccgtcaacttccagcaaaactctctcctcagtgttcttggtgctttcacttacgtgtatgctaacctttccctcaacatcgactcggaccgatg

SEQ ID NO: 9879 - DNA, 203 bp, synthetic construct
  source 1..203: mol_type = other DNA
ggcgcgccagtcctatgacaactctctggcaaccttctttcacagacttcgactccttggttgatgccattgtcgggcgtctggaccggtcaacgggggtttccgacctcctggctagtctggtcaaacgacagggcttgaccattgaagcggagcctactgaactttcctaccaggatgctttagaacgactcggaccgatg

SEQ ID NO: 9880 - DNA, 203 bp, synthetic construct
  source 1..203: mol_type = other DNA
ggcgcgccagtcctacgatatgtctgcctcccactccatggggcctttgatagtcaacatgatatatttgtccttagtccagaaatcatcactcggatttattatggaaaacataccgtttgcgcctcccaagttttttatagttgtatacggaaaataaggtaattcccctggcttgtcacctctagcgactcggaccgatg

SEQ ID NO: 9881 - DNA, 203 bp, synthetic construct
  source 1..203: mol_type = other DNA
ggcgcgccagtcctgatttctatctgctgtacatggcacatggagttgaatcactttgaacttttatacaaaacaaacaaacaaaaaccaatgggagtggaggaaccggtgtacgatgccacggggagaccgttgttcggagacccgagtgaggtacacccacaatcaacactgaagctaccacatgacgactcggaccgatg

SEQ ID NO: 9882 - DNA, 203 bp, synthetic construct
  source 1..203: mol_type = other DNA
ggcgcgccagtcctatctcaattcttcaccactgcctacaacgctcatgcctacttcaattgtggctttgacgtcacagtcgtcgtgaacgcctcccagttccacggcggctcgctgattgtcttggccatggctgaaggtctaggcgacatcaccccagctgactcttccacttggttcaatttccccgactcggaccgatg

SEQ ID NO: 9883 - DNA, 203 bp, synthetic construct
  source 1..203: mol_type = other DNA
ggcgcgccagtcctcactttcctcttgctctattcaccgttacttttcttcttgcccgttctctttcttagtatgaatccagtatgcctgcctgtaattgttgcgccctacctgttttggctggcggctattgccgcctcgtgtttcacggcctcagttagtaccgttgtgaccgccaccggcttggccgactcggaccgatg

SEQ ID NO: 9884 - DNA, 203 bp, synthetic construct
  source 1..203: mol_type = other DNA
ggcgcgccagtcctgagtgacgtgaaatcttccagcggggtcgcggtaggcgggccgtggaccctctggtataaggcggtcccgggggagtgaggagaaagggggggtcttggcggccggaggaggagtaggtgcgggtgaagatggcggcagccgaggccgcgaactgcatcatggagaattttgtacgactcggaccgatg

SEQ ID NO: 9885 - DNA, 203 bp, synthetic construct
  source 1..203: mol_type = other DNA
ggcgcgccagtcctactgtaagtgaagagataggaagaggaagtcaggccagggaatccctgccaccggatgttggatgacggtgctgtctgcgttccaaccccaggaggactgggttaacaaatctgggtgcatggaggagctaagcgttcaaaaccgtctcggagaactccctggctcacgaagtgcgactcggaccgatg

SEQ ID NO: 9886 - DNA, 203 bp, synthetic construct
  source 1..203: mol_type = other DNA
ggcgcgccagtcctctggaaggtgaattcatttttctgggtctctctgattctcagggactccagaccttcctatttatgttgttttttgtattctatggaggaatcgtgtttggaaaccttcttattgtcataacagtggtatctgactcccaccttcactctcccatgtacttcctgctagccaaccgactcggaccgatg

SEQ ID NO: 9887 - DNA, 203 bp, synthetic construct
  source 1..203: mol_type = other DNA
ggcgcgccagtcctgactctgctgaccggtttgtggaggtcacagtgtcggataaccaacacacactcgacgtgatgcaggcacacaaagacaatatcgtgggcgcgcttcttcgcgcagccacgtactatttttctgatttggaaatagcagtgacccacactgggaagctcacatgggtgcccaaccgactcggaccgatg

SEQ ID NO: 9888 - DNA, 203 bp, synthetic construct
  source 1..203: mol_type = other DNA
ggcgcgccagtccttttgagtgtgagacgacgggtgaaaaagttgctgaggctgtgattgaacctgtccttcttgctgctactggaactcccatatcttttgtcaccaacctcttcgcccaatggcgaggagaactccagctttcccttctctttactggttccgcccaacacttcgggcgtctcgctcgactcggaccgatg

SEQ ID NO: 9889 - DNA, 203 bp, synthetic construct
  source 1..203: mol_type = other DNA
ggcgcgccagtcctgacgataatgaggtggctcgtggagcgtgggtttctcaaaccaagaggcaaagttgtggacttaggctgcggcagaggaggctggagttactactgtgcaacattaaagcaggttcaggaagtgagaggttacacaaaaggagggccagggcatgaggaaccagtgatgacccacgactcggaccgatg

SEQ ID NO: 9890 - DNA, 203 bp, synthetic construct
  source 1..203: mol_type = other DNA
ggcgcgccagtcctaggatgcctgagtgagaatgtgtcagaagtcatttgttacagtccaaagtggaccaggcctatcactctagagtataacaactccatatcttggtacccctatacaatccctggtgcgaggggatgtatggttaaattcaaaaataacacatggggttgctgccgtattcgcaacgactcggaccgatg

SEQ ID NO: 9891 - DNA, 203 bp, synthetic construct
  source 1..203: mol_type = other DNA
ggcgcgccagtcctcgttaccctgataccagagatgtggaagagcgcgtccatgtaatgcgcaaaaccaagcttgcacccaccgtcgcgcacggtgtgttcaatcctgagttcgggcctgccgccttgtctaacaaggacccacgcctgaacgaaggtgttgtcctcgatgaagtcattttctccaagcgactcggaccgatg

SEQ ID NO: 9892 - DNA, 203 bp, synthetic construct
  source 1..203: mol_type = other DNA
ggcgcgccagtcctcgaaaggatgatttttccacctgttcgacaggctactatgatatgacgcttgtttcttttattttgcagactaattcaaaactaacaatgttggagcgcagcgcggtaacctattgtatttgcatcccaacggttttgaatgtttctttggaaaatttttcttttattcaatttcgactcggaccgatg

SEQ ID NO: 9893 - DNA, 203 bp, synthetic construct
  source 1..203: mol_type = other DNA
ggcgcgccagtccttgtccggttgcaactggacgcggggcgaacgctgtgatctggaagacagggacaggtccgagctcagcccattgctgctgtccaccacacagtggcaggtccttccgtgttctttcacgaccctgccagccttgtccaccggcctcatccacctccaccagaacattgtggacgcgactcggaccgatg

SEQ ID NO: 9894 - DNA, 203 bp, synthetic construct
  source 1..203: mol_type = other DNA
ggcgcgccagtccttcggcccatgccagggataaaagttcgatttttgccgtagcggctagtaatgattctggagacgtgctgtttttgagtgaactaaggatgaactctaaatcgagtgcacgagctgccattgtggatactgtggaagctgtgaagaagagaaaatatatatctatcgatgagggacgactcggaccgatg

SEQ ID NO: 9895 - DNA, 203 bp, synthetic construct
  source 1..203: mol_type = other DNA
ggcgcgccagtcctccctgccgtgccagtgctattcccaaaaataaagaatggagaggtgactgacagttacgataactataccttcctcaacgcaagaaaattaggggatgatgtacccccttacgtgtatgccacagaggatgaggacttagcggtagagctgctgggcttagactggccggaccccgactcggaccgatg

SEQ ID NO: 9896 - DNA, 203 bp, synthetic construct
  source 1..203: mol_type = other DNA
ggcgcgccagtcctttgcacggtgccgccatgcagcactacggggtgaacggctactcactgcacgccatgaactcactcagcgccatgtacaacctgcaccagcaggcagcccagcaggcccagcatgcccccgactaccggccttcagtgcatgcgcttacattggctgagcgcctggctgacatccgactcggaccgatg

SEQ ID NO: 9897 - DNA, 203 bp, synthetic construct
  source 1..203: mol_type = other DNA
ggcgcgccagtcctcgacggcatgctatgactcagggtcgcaggggcaacgtgtattgggtgcgcgactcggttagcggcctgcgcgtgcccgtgcgcacccgccccccgcgcaactagattgcaagaaaaaactacttagactcgtactgttgtatgtatccagcggcggcggcgcgcaacgaagctcgactcggaccgatg

SEQ ID NO: 9898 - DNA, 203 bp, synthetic construct
  source 1..203: mol_type = other DNA
ggcgcgccagtcctttcattaatggacggcattgcagcgtggatccacgctgcccacgtaaaggctgccgacaccaggattgagccaccatcggaatcgacatggcgtgttcaacgctctcagaatcccctaaagataagattgacccgcgggacctcctaatccccttaattctcttcctgtctctccgactcggaccgatg

SEQ ID NO: 9899 - DNA, 203 bp, synthetic construct
  source 1..203: mol_type = other DNA
ggcgcgccagtcctcaaatcggtggactctctcaagaaccaggtgacagtcaccgccagatacttcagaagggtgcctagccagtccacctgagcgcgaggatggccctgcaaactgacacacatgcctggcgggtggagatagggaccaggggactaatgttctctaactgtgtcccactccacctgcgactcggaccgatg

SEQ ID NO: 9900 - DNA, 203 bp, synthetic construct
  source 1..203: mol_type = other DNA
ggcgcgccagtccttggtggtttggatcctaggcgtaacttcatcattaaatctcagattctgctctgagtgtgacttactgcgaagaggcagacaaatgggcaactgcaacggggcatccaagtctaaccagccagactcctcaagagccacacagccagccgcagaatttaggagggtagctcacacgactcggaccgatg

SEQ ID NO: 9901 - DNA, 203 bp, synthetic construct
  source 1..203: mol_type = other DNA
ggcgcgccagtcctcagacgtgtggatgtgcgcgtggaggctttgctggaagccaccgtggaacatctcgagaaccgtgttacctttgacctggctgttattttccaccaacacagtgggggcgagaggtgccacctccgggacctgcattttgaagtgttccgagaccgtttggaataaagttaatccgactcggaccgatg

SEQ ID NO: 9902 - DNA, 203 bp, synthetic construct
  source 1..203: mol_type = other DNA
ggcgcgccagtcctggacttgatggcggtaacccgtctggatgtgttggcacttccatcatcaacaccatcatcaacaacatttgtgttctttctgctttaatccaacaccctgatttttctcctgaatccttcagaattttggcctatggtgatgatgtgatttatgggtgcgatccacccatccatcgactcggaccgatg

SEQ ID NO: 9903 - DNA, 203 bp, synthetic construct
  source 1..203: mol_type = other DNA
ggcgcgccagtcctcgtagggctggggagaactactttgacatgggagcggatttgcaatggcaacccagtcgcagggccatggaggctgcagggtgtgagcttccttacatagaagaggtggatgaagtcgaggacgaggagggcgagtacttggaagactgatggcgcgacccgtatttttgctagcgactcggaccgatg

SEQ ID NO: 9904 - DNA, 203 bp, synthetic construct
  source 1..203: mol_type = other DNA
ggcgcgccagtccttctggagctgggttcaggcgattttgtcagtatgatcactcaaggggagaagaaggaagaagaagttcctcaggtgtttgacgaaaacatgctgcgaaaaaggcaactaacagtgctggacctacatccaggttcaggaaagaccagaaaggtcctccccatgattctgaagagcgactcggaccgatg

SEQ ID NO: 9905 - DNA, 203 bp, synthetic construct
  source 1..203: mol_type = other DNA
ggcgcgccagtcctgtaagacatggtcagtaggaggtatttggcatcattgcataagaaggctttacccacttccgtgacattcgagctcctgttcgacgggaccaacccatcaactgaggaaatgggagatgacttcaggtccgggctgtgcccgtttgatacgagtcctgttgttaagggaaagtacgactcggaccgatg

SEQ ID NO: 9906 - DNA, 203 bp, synthetic construct
  source 1..203: mol_type = other DNA
ggcgcgccagtcctacacgacctggtggatacaacagacgtagccgtgactgtggtaggggaagcccccactatgactacaggggagacaccgacagtgttcaccagctcaggttcaggcctgaaaagccaacaagttttgaaactaggggtaggtgaaggccaatatccagggactaatccacagagcgactcggaccgatg

SEQ ID NO: 9907 - DNA, 203 bp, synthetic construct
  source 1..203: mol_type = other DNA
ggcgcgccagtcctcctttcactgtgctcccggtggcggtcgcttgactgatttcctccgcggctggccattgtgttctcctaggcagagaaacaacagacatggaaactcagccatcactgccaacatcgctgcaagcaccatcacacctcgcccccagcagcgacgaggaggagagcttaaccacccgactcggaccgatg

SEQ ID NO: 9908 - DNA, 203 bp, synthetic construct
  source 1..203: mol_type = other DNA
ggcgcgccagtcctgaatcctctgtgtacattgaggtattgcatttgactcaagggacctgttgggaacagatgtacactcccggcggagaagtaagaaatgatgatgttgaccagagtttgatcatcgctgccagaaacattgttaggagagcaacagtatcagcggacccactggcatcactcttgcgactcggaccgatg

SEQ ID NO: 9909 - DNA, 203 bp, synthetic construct
  source 1..203: mol_type = other DNA
ggcgcgccagtccttaaacaattgtttttctcaggtgttttccgcgttccgggtcaaagttggcgttttattattatagtcagctgacgtgtagtgtatttatacccggtgagttcctcaagaggccactcttgagtgccagcgagtagagttttctcctccgagccgctccgacaccgggactgaaacgactcggaccgatg

SEQ ID NO: 9910 - DNA, 203 bp, synthetic construct
  source 1..203: mol_type = other DNA
ggcgcgccagtcctagcccagattacaaggagaatagattcatcgagattggagtgacaaggagagaagtccacatatactatcttgaaaaggccaataaaattaaatctgagaatacacacatccacattttctcattcactggggaagaaatggccacaaaggccgactacactctcgatgaggaacgactcggaccgatg

SEQ ID NO: 9911 - DNA, 203 bp, synthetic construct
  source 1..203: mol_type = other DNA
ggcgcgccagtcctggagtagtttacactaagaccggagaggtttttccttgtgctggtttgtttccccggtgcgacatatgacgcgctggtgactttctgtgtgtgtcacgtagctcttctatgtttaacatccagtgcagcatcgttctttgggactgactctagggttagggcccatagaatgttcgactcggaccgatg

SEQ ID NO: 9912 - DNA, 203 bp, synthetic construct
  source 1..203: mol_type = other DNA
ggcgcgccagtcctctgtgaagttacatcggacaaactctgaccgaaccactctgagaacagagtatcgttctgaaacctgttctccatcacagagctggtatggcctccagtcgtgtagacaccattaatttacggatctggctggtctctataatctgtgcagccttgtcattcataaacgtcacgcgactcggaccgatg

SEQ ID NO: 9913 - DNA, 203 bp, synthetic construct
  source 1..203: mol_type = other DNA
ggcgcgccagtcctattcacccttatccaaaaatctacaagacttattttgagaaagtcgaaaggttaaaacatggaacctttggccctgtccattttagaaaccaagtcaaaatacgccgaagagttgacataaaccctggtcatgcagacctcagtgccaaggaggcacaagacgtaatcatggaacgactcggaccgatg

SEQ ID NO: 9914 - DNA, 203 bp, synthetic construct
  source 1..203: mol_type = other DNA
ggcgcgccagtcctgtcctacattccagttaatctatgggggcgtgatatattaagcaaaatgggtgtttatttatatagtccttcacccactgtgacagatttgatgttagaccaaggcttacttccaaatcaaggtttaggtaaacaacatcaaggcatcattttaccccttgatttaaaatctaacgactcggaccgatg

SEQ ID NO: 9915 - DNA, 203 bp, synthetic construct
  source 1..203: mol_type = other DNA
ggcgcgccagtcctaagtgctcttcctcacctgcccctgagtcactaccggttggggtaagaactgagggggcaaagtcatcaatctcagcgtaaaagttttcgtgtctttcgttttcaggggactcatcctcctgacattttcgccagccgccgggcgggccggcctcctttcctggaaatccagcccgactcggaccgatg

SEQ ID NO: 9916 - DNA, 203 bp, synthetic construct
  source 1..203: mol_type = other DNA
ggcgcgccagtccttcactaaattctctgcacgtcttttggtggcttcggcctccagaacggcggagacccaggcaacctccactccaacacatggggaaccctcattctctatgttgacctcccccaaagcgatagtgtctcagtctctgcttacatctctttccgcgacttcgaagcctacgtccccgactcggaccgatg

SEQ ID NO: 9917 - DNA, 203 bp, synthetic construct
  source 1..203: mol_type = other DNA
ggcgcgccagtccttcacatccttctgaagcataaagcccaggatcgccggcagggcctccttcttgataaagttagcctcgtccacaaacaagaggtgaaatgtctgcccccggatgctctgaaagacaggataagaagcgagtcactattggggagacagaatttggacaattgctgagctgggaccgactcggaccgatg

SEQ ID NO: 9918 - DNA, 203 bp, synthetic construct
  source 1..203: mol_type = other DNA
ggcgcgccagtcctgtgagtacttcttggatcaatatttaatcgcagacgaggtttcgtggaacgttgttcccgtaatctgttttttcaggcagtggggactcaagttagatttttttaaaaagttttcggggaagaccaagcggttgtcattttcgtttatacgtgatttgttcgccaggtctcaggcgactcggaccgatg

SEQ ID NO: 9919 - DNA, 203 bp, synthetic construct
  source 1..203: mol_type = other DNA
ggcgcgccagtcctgacagaagttgaagtatcttactacctccacaagaagatcatagatgaaatagcaggagggaccaacttcatctcaagacttgtagccgctttgatcgaagtcaattgggcctttgacaacgaagaagttaggggtttgaagaagttcttcctgttgtctagtagggttaaagacgactcggaccgatg

SEQ ID NO: 9920 - DNA, 203 bp, synthetic construct
  source 1..203: mol_type = other DNA
ggcgcgccagtccttatacaccttgatcctgcgccgggcggacgcggtcagccccggccaggccctgcccccggatgggctttacctcacgtacgactctgaccggcccctaattcttctgtataagggcagggggtgggtatttaaggatctatatgcccttctctacctgcacctccaaatgagagcgactcggaccgatg

SEQ ID NO: 9921 - DNA, 203 bp, synthetic construct
  source 1..203: mol_type = other DNA
ggcgcgccagtccttcatcggattgcgcgtgcatgcgtgtgcttcagacagcccaggcagcgactgtgattgtggatattctttctgcaagttttgtcgtgaacgtgttgagaaaaagacagcttaggagaacaagagctgggaatggccgggaaggccgttctaaaaggaaagggggggggtccccccgactcggaccgatg

SEQ ID NO: 9922 - DNA, 203 bp, synthetic construct
  source 1..203: mol_type = other DNA
ggcgcgccagtccttatacgtattgtttcgattcttccaaaatcagagacagagtgctcccggtgccatgaacggagacgatgcctttgtacggagacctagggttggttctcaaataccagagaagatgcaaaagcatccctggagacaagtctgtgaccgtggaatacatttggtgaatctcagtccgactcggaccgatg

SEQ ID NO: 9923 - DNA, 203 bp, synthetic construct
  source 1..203: mol_type = other DNA
ggcgcgccagtcctgactagggtttcacctaaatttccgcgtacggtgtcaaagttctgtgtttttacgtaggtgtcagctgatcgctagggtatttaaacctgacgagttccgtcaagaggccactcttgagtgccagcgagaagagttttctcctccgcgccgcaagtcagttctgcgctttgaaacgactcggaccgatg

SEQ ID NO: 9924 - DNA, 203 bp, synthetic construct
  source 1..203: mol_type = other DNA
ggcgcgccagtcctccttatctttttttttttttttttttttctttttttctcttttccttctttcttaccttattttactttctttcctggtggctccatcttagccctagtcacggctagctgtgaaaggtccgtgagccgcatgactgcagagagtgccgtaactggtctctctgcagatcatgtcgactcggaccgatg

SEQ ID NO: 9925 - DNA, 203 bp, synthetic construct
  source 1..203: mol_type = other DNA
ggcgcgccagtccttatcggataaaaatctctagcagtggcgcccgaacagggactcgaaagcgaaagttccagagaagttctctcgacgcaggactcggcttgctgaggtgcacacagcaagaggcgagagcggcgactggtgagtacgcctaagatttttgactagcggaggctagaaggagagagcgactcggaccgatg

SEQ ID NO: 9926 - DNA, 203 bp, synthetic construct
  source 1..203: mol_type = other DNA
ggcgcgccagtcctttgcgctcaaaatctctagcagtggcgcccgaacagggacgcgaaagcgaaagtagaaccagagaagatctctcgacgcaggactcggcttgctgaagtgcacacggcaagaggcgagagcggcgactggtgagtacgccaaatttttgactagcagaggctagaaggagagagcgactcggaccgatg

SEQ ID NO: 9927 - DNA, 203 bp, synthetic construct
  source 1..203: mol_type = other DNA
ggcgcgccagtcctgacgcgtaaaaatctctagcagtggcgcccgaacagggactcgaaagcgaaagtgttccagagaagctctctcgacgcgaggactcggcttgctgaggtgcacacagcaaggggcgagagcggcgactggtgagtacgccaattttttgactagcggaggctagaaggagagagcgactcggaccgatg

SEQ ID NO: 9928 - DNA, 203 bp, synthetic construct
  source 1..203: mol_type = other DNA
ggcgcgccagtcctaccggcagaaaatctctagcagtggcgcccgaacagggacttgaaagcgaaagttccagagaagttctctcgacgcaggactcggcttgctgaggtgcacacagcaagaggcgagagcggcgactggtgagtacgcctaaagatttttgactagcggaggctagaaggagagagcgactcggaccgatg

SEQ ID NO: 9929 - DNA, 203 bp, synthetic construct
  source 1..203: mol_type = other DNA
ggcgcgccagtcctcgatgcgcaaaatctctagcagtggcgcccgaacagggacttgaaagcgacagtagaaccagaggagctctctcgacacaggactcggcttgctgaagcgcgcacggcaagaggcgaggggcggcgactggtgagtacgccaatttttgactagcggaggctagaaggagagagcgactcggaccgatg

SEQ ID NO: 9930 - DNA, 203 bp, synthetic construct
  source 1..203: mol_type = other DNA
ggcgcgccagtcctggctcctgaaatctctagcagtggcgcccgaacagggaccgagaaagcgaaagtagaaccagaggagctctctcgacgcacgactcggcttgctgagcgcgcacggcaagaggcgaggggcggcgaccggtgagtacgccaattttttgactagcggaggctagaaggagagagcgactcggaccgatg

SEQ ID NO: 9931 - DNA, 203 bp, synthetic construct
  source 1..203: mol_type = other DNA
ggcgcgccagtcctgcttcttcaaatctctagcagtggcgcccgaacagggaccggaaagcgaaagagaaaccagagaagctctctcgacgcaggactcggcttgctgaagcgcgcacggcaagaggcgaggggcggcgaacggtgagtacgccaaaattttgactagcggaggctagaaggagagagcgactcggaccgatg

SEQ ID NO: 9932 - DNA, 203 bp, synthetic construct
  source 1..203: mol_type = other DNA
ggcgcgccagtcctttgtatcgaaatctctagcagtggcgcccgaacagggacctgaaagcgaaagtaccagagaagttctctcgacgcaggactcggcttgctgaggtgcacacagcaagaggcgagagcggcgactggtgagtacgccaaagaattttttgactagcggtggctagaaggagagagcgactcggaccgatg

SEQ ID NO: 9933 - DNA, 203 bp, synthetic construct
  source 1..203: mol_type = other DNA
ggcgcgccagtcctcttgcgttaaatctctagcagtggcgcccgaacagggacgcgaaagcgaaagtagaaccagaggagaactctcgacgcaggactcggcttgctgaagtgcactcggcaagaggcgagagcggcggctggtgagtacgccattttatttgactagcggaggctagaaggagagtgcgactcggaccgatg

SEQ ID NO: 9934 - DNA, 203 bp, synthetic construct
  source 1..203: mol_type = other DNA
ggcgcgccagtcctttagttcaaaatctctagcagtggcgcccgaacagggacgcgaaagcgaaagtagaaccagaggagatctctcgacgcaggactcggcttgctgaggtgcacacagcaagaggcgagagcggcggctggtgagtacgccaatttttttgactagcggaggctagaaggagagagcgactcggaccgatg

SEQ ID NO: 9935 - DNA, 203 bp, synthetic construct
  source 1..203: mol_type = other DNA
ggcgcgccagtcctcgtcagtaaaatctctagcagtggcgcccgaacagggactcgaaagcgaaagttccagagaagttctctcgacgcaggactcggcttgctgaggtgcacacagcaagaggcgagagcggcgactggtgagtacgcctaagaattttttgactagcggaggctagaaggagagagcgactcggaccgatg

SEQ ID NO: 9936 - DNA, 203 bp, synthetic construct
  source 1..203: mol_type = other DNA
ggcgcgccagtcctttaaggagaaatctctagcagtggcgcccgaacagggactggaaaagcgaaagtaaaaccagaggagatctctcggcgcaggactcggcttgctgcagcgcgcgcggcaagaggcgaggggcggcgactggtgagtacgccaatttttgactagcggaggctagaaggagagagcgactcggaccgatg

SEQ ID NO: 9937 - DNA, 203 bp, synthetic construct
  source 1..203: mol_type = other DNA
ggcgcgccagtcctcgggtttgaaatctctagcagtggcgcccgaacagggacttgaaagcgaaagagaaaccagaggagatctctcgacgcaggactcggcttgctgaagcgcgcacagcaagaggcgaggggcggcgaccggtgagtacgccaattttttgactagcggaggctagaaggagagagcgactcggaccgatg

SEQ ID NO: 9938 - DNA, 203 bp, synthetic construct
  source 1..203: mol_type = other DNA
ggcgcgccagtcctttgggactaaatctctagcagtggcgcccgaacagggacttgaaagcgaaagagaaaccagaggagatctctcgacgcaggactcggcttgctgaagcgcgcacggcaagaggcgaggggcggcgactggtgagtacgccaaatttttgactagcggaggctagaaggagagagcgactcggaccgatg

SEQ ID NO: 9939 - DNA, 203 bp, synthetic construct
  source 1..203: mol_type = other DNA
ggcgcgccagtcctaagatcacaaatctctagcagtggcgcccgaacagggacttgaaagtgaaagtagaaccagaggagctctctcgacgcaggactcggcttgctgaagcgcgcacggcaagaggcgaggggcagcgaacggtgagtacgcaaaatttttgactagcggaggctagaaggagagagcgactcggaccgatg

SEQ ID NO: 9940 - DNA, 203 bp, synthetic construct
  source 1..203: mol_type = other DNA
ggcgcgccagtccttgaccattaacagggacccgaaagtgaaagttaatagggactcgaaagcgaaagttccagagaagttctctcgacgcaggactcggcttgctgaagtgcacacagcaagaggcgagagcggcgactggtgagtacgccaaatccttttgactagcggaggctagaaggagagagcgactcggaccgatg

SEQ ID NO: 9941 - DNA, 203 bp, synthetic construct
  source 1..203: mol_type = other DNA
ggcgcgccagtcctatatccttaacagggacctgaaaacgaaagttaatagggactcgaaagcgaaagttccagagaagttctctcgacgcaggactcggcttgctgaggtgcacacagcaagaggcgagagcggcgaactggtgagtacgccaaaaattttgactagcggaggctagaaggagagagcgactcggaccgatg

SEQ ID NO: 9942 - DNA, 203 bp, synthetic construct
  source 1..203: mol_type = other DNA
ggcgcgccagtccttcggcgtcaacagggacttgaaagagaaagttaaaagggactcgaaagcgaaagttccagagaagttctctcgacgcaggactcggcttgctgaaggtgcacacagcaagaggcgagagcggcggctggtgagtacgccaaattttttgactagcggaggctagaaggagagagcgactcggaccgatg

SEQ ID NO: 9943 - DNA, 203 bp, synthetic construct
  source 1..203: mol_type = other DNA
ggcgcgccagtcctccttcctaaacagggacttgaaagcgaaagttaacagggactcgaaagcgaaagttccagagaagttctctcgacgcaggactcggcttgctgaaggtgcacacagcaagaggcgagagcggcggctggtgagtacgccataaattttgactagcggaggctagaaggagagagcgactcggaccgatg

SEQ ID NO: 9944 - DNA, 203 bp, synthetic construct
  source 1..203: mol_type = other DNA
ggcgcgccagtcctctgtttgaaacagggacttgaaagtgaaagttaatagggactcgaaagcggaagttcccagaggagatctctcgacgcaggactcggcttgctgcagcgcgcacagcaagaggcgaggggcagcagctggtgagtacgctgaaattttgactagcggaggctagaaggagagagcgactcggaccgatg

SEQ ID NO: 9945 - DNA, 203 bp, synthetic construct
  source 1..203: mol_type = other DNA
ggcgcgccagtcctcagtacagaactagagatccctcagaccactctagaaggtgtaaaaatctctagcagtggcgcccgaacagggacccgaaagcgaaagttaatagggactcgaaagcgaaagttccagagaagttctctcgacgcaggactcggcttgctgaggtgcacacggcaagaggcgagcgactcggaccgatg

SEQ ID NO: 9946 - DNA, 203 bp, synthetic construct
  source 1..203: mol_type = other DNA
ggcgcgccagtcctcacatgtaaactagagatccctcagaccactctagacagtgtaaaaatctctagcagtggcgcccgaacagggacccgaaagtgaaagttaatagggactcgaaagcgaaagttccagagaagttctctcgacgcaggactcggcttgctgaagtgcacacagcaagaggcgagcgactcggaccgatg

SEQ ID NO: 9947 - DNA, 203 bp, synthetic construct
  source 1..203: mol_type = other DNA
ggcgcgccagtcctgttcgcgaaactagagatccctcagaccactctagacagtgtaaaaatctctagcagtggcgcccgaacagggacttgaaagcgaaagttaatagggactcgaaagcgaaagttccagagaagatctctcgacgcaggactcggcttgctgaagtgcactcggcaagaggcgagcgactcggaccgatg

SEQ ID NO: 9948 - DNA, 203 bp, synthetic construct
  source 1..203: mol_type = other DNA
ggcgcgccagtcctcccttcgtaactagagatccctcagaccactctagacagtgtaaaaatctctagcagtggcgcccgaacagggacttgaaagcgaaagttaatagggactcgaaagcgaaagttccagagaagttctctcgacgcaggactcggcttgctgaggtgcacacagcaagaggcgagcgactcggaccgatg

SEQ ID NO: 9949 - DNA, 203 bp, synthetic construct
  source 1..203: mol_type = other DNA
ggcgcgccagtccttgctcaaaaactagagatccctcagaccactctagacagtgtaaaaatctctagcagtggcgcccgaacagggacttgaaagtgaaagttaaaagggactcgaaagcggaagttccagagaagttctctcgacgcaggactcggcttgctgaggtgcacacagcaagaggcgagcgactcggaccgatg

SEQ ID NO: 9950 - DNA, 203 bp, synthetic construct
  source 1..203: mol_type = other DNA
ggcgcgccagtccttcaactggaactagagatccctcagaccactctagacggtataaaaatctctagcagtggcgcccgaacagggacccgaaagtgaaagttaatagggactcgaaagcggaagttccagagaagttctctcgacgcaggactcggcttgctgaggtgcacacagcaagaggcgagcgactcggaccgatg

SEQ ID NO: 9951 - DNA, 203 bp, synthetic construct
  source 1..203: mol_type = other DNA
ggcgcgccagtcctcgtcttgcaactagagatccctcagaccactctagactaagtaaaaatctctagcagtggcgcccgaacagggactcgaaagcgaaagttaatagggactcgaaagcgaaagttccagagaagttctctcgacgcaggactcggcttgctgaggtgcacacagcaagaggcgagcgactcggaccgatg

SEQ ID NO: 9952 - DNA, 203 bp, synthetic construct
  source 1..203: mol_type = other DNA
ggcgcgccagtcctccaaccagaactagagatccctcagaccactctagactaagtaaaaatctctagcagtggcgcccgaacagggacttgaaagcgaaagttaatagggactcgaaagcgaaagttccagagaagttctctcgacgcaggactcggcttgctgaggtgcacacagcaagaggcgagcgactcggaccgatg

SEQ ID NO: 9953 - DNA, 203 bp, synthetic construct
  source 1..203: mol_type = other DNA
ggcgcgccagtcctaggccaagaactagagatccctcagaccactctagactaagtaaaaatctctagcagtggcgcccgaacagggacttgaaagcgaaagttaatagggactcgaaagcgaaagttccagagaagttctctcgacgctggactcggcttgctgaggtacacacagcaagaggcgagcgactcggaccgatg

SEQ ID NO: 9954 - DNA, 203 bp, synthetic construct
  source 1..203: mol_type = other DNA
ggcgcgccagtcctgcgttctgaactagagatccctcagaccactctagactgagtaaaaatctctagcagtggcgcccgaacagggacttgaaagcgaaagttaatagggactcgaaagcgaaagttccagagaagttctctcgacgcaggactcggcttgctgaggtgcacacagcaagaggcgagcgactcggaccgatg

SEQ ID NO: 9955 - DNA, 203 bp, synthetic construct
  source 1..203: mol_type = other DNA
ggcgcgccagtcctgtctacttaactagagatccctcagaccactctagactgagtaaaaatctctagcagtggcgcccgaacagggacttgaaagcgaaagttaatagggactcgaaagcgaaagttccagagaagttctctcgacgcaggactcggcttgctgcggtgcacacagcaagcggcgagcgactcggaccgatg

SEQ ID NO: 9956 - DNA, 203 bp, synthetic construct
  source 1..203: mol_type = other DNA
ggcgcgccagtcctgagtacctaactagagatccctcagaccactctagactgagtaaaattctctagcagtggcgcccgaacagggacttgaaaacgaaagttaatagggactcgaaagcgaaagttccagagaagttctctcgacgcaggactcggcttgctgaggtgcacacagcaagaggcgagcgactcggaccgatg

SEQ ID NO: 9957 - DNA, 203 bp, synthetic construct
  source 1..203: mol_type = other DNA
ggcgcgccagtcctccaggctaaactagagatccctcagaccactctagactgtgtaaaaatctctagcagtggcgcccgaacagggacttgaaagtgaaagttaatagggactcgaaagcgaaagttccagagaagttctctcgacgcaggactcggcttgctgaggtgcacacagcaagaggcgagcgactcggaccgatg

SEQ ID NO: 9958 - DNA, 203 bp, synthetic construct
  source 1..203: mol_type = other DNA
ggcgcgccagtccttagcctttaactagagatccctcagaccactctagatagtgtaaaaatctctagcagtggcgcccgaacagggacttgaaaacgaaagttaatagggactcgaaagcgaaagttccagagaagttctctcgacgcaggactcggcttgctgaggtgcacacagcaagaggcgagcgactcggaccgatg

SEQ ID NO: 9959 - DNA, 203 bp, synthetic construct
  source 1..203: mol_type = other DNA
ggcgcgccagtcctggcggctcaatctatagcagtggcgcccgaacagggaccagaaagcgaaagtagaaccagaggagctctctcgacgcaggactcggcttgctgaagcgcgcacggcaagaggcgaggggcggcgactggtgagtacgccaaaaattttgactagcggaggctagaaggagagagcgactcggaccgatg

SEQ ID NO: 9960 - DNA, 203 bp, synthetic construct
  source 1..203: mol_type = other DNA
ggcgcgccagtcctcagctatcaatctctagcagtggcgcccgaacagggaccagaaagcgaaagtaaaaccagagaagttctctcgacgcaggactcggcttgctgaagtgcactcggcaagaggcgagaggggcggctggtgagtacgccatttttatttgactagcggaggctagaaggagagagcgactcggaccgatg

SEQ ID NO: 9961 - DNA, 203 bp, synthetic construct
  source 1..203: mol_type = other DNA
ggcgcgccagtcctgtaccgttaatctctagcagtggcgcccgaacagggaccagaaagcgaaagtaagaccagaggagatctctcgacgcaggactcggcttgctgaagtgcactcggcaagaggcgagagcggcgactggtgagtacgccaattttatttgactagcggaggctagaaggagagagcgactcggaccgatg

SEQ ID NO: 9962 - DNA, 203 bp, synthetic construct
  source 1..203: mol_type = other DNA
ggcgcgccagtcctaaacagtgaatctctagcagtggcgcccgaacagggaccggaaaacgaaagtaaaaccagaggagatctctcgacgcaggactcggcttgctgaagcgcgcacggcaagaggcgaggggcggcggctggtgagtacgccaaaatttttgactagcggaggctagaaggagagagcgactcggaccgatg

SEQ ID NO: 9963 - DNA, 203 bp, synthetic construct
  source 1..203: mol_type = other DNA
ggcgcgccagtcctctgctcctaatctctagcagtggcgcccgaacagggaccggaaagcgaaagagaaaccagaggagctctctcgacgcaggactcggcttgctgaagcgcgcacggcaagaggcgagaggcggcgactggtgagtacgccgaaatttttgactagcggaggctagaaggagagagcgactcggaccgatg

SEQ ID NO: 9964 - DNA, 203 bp, synthetic construct
  source 1..203: mol_type = other DNA
ggcgcgccagtcctagtgcaaaaatctctagcagtggcgcccgaacagggacctgaaagcgaaagtaaaaccagagaagatctctcgacgcaggactcggcttgctgaggcgcacggcaagaggcgaggagcggcgactggtgagtacgccgaaaaatttttgactagcggaggctagaaggagagagcgactcggaccgatg

SEQ ID NO: 9965 - DNA, 203 bp, synthetic construct
  source 1..203: mol_type = other DNA
ggcgcgccagtccttaacacgtaatctctagcagtggcgcccgaacagggacctgaaagcgaaagtaagaccagaggagatctctcgacgcaggactcggcttgctgaagtgcactcggcaagaggcgagagcggcgactggtgagtacgccaaatttatttgactagcggaggctagaaggagagagcgactcggaccgatg

SEQ ID NO: 9966 - DNA, 203 bp, synthetic construct
  source 1..203: mol_type = other DNA
ggcgcgccagtcctagcgtgttaatctctagcagtggcgcccgaacagggacctgaaagcgaaagtaagaccagaggagatctctcgacgcaggactcggcttgctgaagtgcactcggcaagaggcgagaggggcgactggtgagtacgccaattttatttgactagcggaggctagaaggagagagcgactcggaccgatg

SEQ ID NO: 9967 - DNA, 203 bp, synthetic construct
  source 1..203: mol_type = other DNA
ggcgcgccagtcctggaacgccaatctctagcagtggcgcccgaacagggacctgaaagcgaaagtagaaccagagaagatctctcgacgcaggactcggcttgctgaagcgcgcacagcaagaggcgaggggcagcgactggtgagtacgctgaaatttttgactagcggaggctagaaggagagagcgactcggaccgatg

SEQ ID NO: 9968 - DNA, 203 bp, synthetic construct
  source 1..203: mol_type = other DNA
ggcgcgccagtccttggttcaaaatctctagcagtggcgcccgaacagggacctgaaagcgaaagtagaaccagaggagatctctcgacgcaggactcggcttgctgaagcgcgcacagcaagaggcgaggggcggcgactggtgagtacgccaaaaattttgactagcggaggctagaaggagagagcgactcggaccgatg

SEQ ID NO: 9969 - DNA, 203 bp, synthetic construct
  source 1..203: mol_type = other DNA
ggcgcgccagtcctgcgaggagaatctctagcagtggcgcccgaacagggacctgaaagcgaaagtgagaccagagaagctctctcgacgcaggactcggcttgctgaagcgcgcacagcaagaggcgagagcggcgactggtgagtacgccgaaaatttttgactagcggaggctagaaggagagagcgactcggaccgatg

SEQ ID NO: 9970 - DNA, 203 bp, synthetic construct
  source 1..203: mol_type = other DNA
ggcgcgccagtcctgcacaggaaatctctagcagtggcgcccgaacagggacctgaaagcgaaagtgagaccagaggagatctctcgacgcaggactcggcttgctgaagtgcactcagcaagaggcgagagcggcgactggtgagtacgccaattttatttgactagcggaggctagaaggagagagcgactcggaccgatg

SEQ ID NO: 9971 - DNA, 203 bp, synthetic construct
  source 1..203: mol_type = other DNA
ggcgcgccagtcctgtaactgcaatctctagcagtggcgcccgaacagggactagaaagcgaaagtagaaccagagaagatctctcgacgcaggactcggcttgctgaagcgcacggcaagaggcgaggggcggcgactggtgagtacgccaacaaatttttgactagcggaggctagaaggagagagcgactcggaccgatg

SEQ ID NO: 9972 - DNA, 203 bp, synthetic construct
  source 1..203: mol_type = other DNA
ggcgcgccagtcctcaactgacaatctctagcagtggcgcccgaacagggacttgaaaacgaaagtaaactggagcagttctctcgacgcggggactcggcttgctgaagtgcacacggcaagaggcgaggggaggcgactggtgagtacgcctaacttttgactagcggtaggctagaaggagagagcgactcggaccgatg

SEQ ID NO: 9973 - DNA, 203 bp, synthetic construct
  source 1..203: mol_type = other DNA
ggcgcgccagtcctgatcgccgaatctctagcagtggcgcccgaacagggacttgaaaacgaaagtagaaccagaggagatctctcgacgcaggactcggcttgctgaagcgcgcacggcaagaggcgaggggcggcgactggtgagtacgccaaaaactttgactagcggaggctagaaggagagagcgactcggaccgatg

SEQ ID NO: 9974 - DNA, 203 bp, synthetic construct
  source 1..203: mol_type = other DNA
ggcgcgccagtcctcaatcattaatctctagcagtggcgcccgaacagggacttgaaaacgaaagtagaaccggaggagctctctcgacgcaggactcggcttgctgaagcgcgcgcggcaagaggcgaggggcggcgactggtgagtacgccaaaatttttgactagcggaggctagaaggagagagcgactcggaccgatg

SEQ ID NO: 9975 - DNA, 203 bp, synthetic construct
  source 1..203: mol_type = other DNA
ggcgcgccagtcctgtgtcgtcaatctctagcagtggcgcccgaacagggacttgaaagcgaaagtaagaccagaggagatctctcgacgcaggactcggcttgctgaagtgcactcggcaagaggcgagaggggcgactggtgagtacgccaattttatttgactagcggaggctagaaggagagagcgactcggaccgatg

SEQ ID NO: 9976 - DNA, 203 bp, synthetic construct
  source 1..203: mol_type = other DNA
ggcgcgccagtcctaccgcacaaatctctagcagtggcgcccgaacagggacttgaaagcgaaagtaagaccagaggagctctctcgacgcaggactcggcttgctgaagcgcgcacagcaagaggcgaggggcggcgactggtgagtacgccaaaacttttgactagcggaggctagaaggagagagcgactcggaccgatg

SEQ ID NO: 9977 - DNA, 203 bp, synthetic construct
  source 1..203: mol_type = other DNA
ggcgcgccagtcctgaggagttaatctctagcagtggcgcccgaacagggacttgaaagcgaaagtagaaccagagaagatctctcgacgcaggactcggcttgctgcagcgcgcacggcaagaggcgaggggcggcgaccggtgagtacgccaaaatttttgactagcggaggctagaaggagagagcgactcggaccgatg

SEQ ID NO: 9978 - DNA, 203 bp, synthetic construct
  source 1..203: mol_type = other DNA
ggcgcgccagtcctcttgacagaatctctagcagtggcgcccgaacagggacttgaaagcgaaagtagaaccagaggagatctctcgacgcaggactcggcttgctgaagcgcgcacagcaagaggcgaggggcggcgactggtgagtacgccaaaattttttactagcggaggctagaaggagagagcgactcggaccgatg

SEQ ID NO: 9979 - DNA, 203 bp, synthetic construct
  source 1..203: mol_type = other DNA
ggcgcgccagtccttacgccctaatctctagcagtggcgcccgaacagggacttgaaagcgaaagtagaaccagaggagctctctcgacgcaggactcggcttgctgaagcgcgcacagcaagaggcgaggggcagcgaacggtgagtacgctgaaatttttgactagcggaggctagaaggagagagcgactcggaccgatg

SEQ ID NO: 9980 - DNA, 203 bp, synthetic construct
  source 1..203: mol_type = other DNA
ggcgcgccagtcctgacctgaaaatctctagcagtggcgcccgaacagggacttgaaagcgaaagtagaaccagaggagctctctcgacgcaggactcggcttgctgaagcgcgcacagcaagaggcgaggggcggcgactggtgagtacgccaaaatttttgactagcggaggctagaaggagagagcgactcggaccgatg

SEQ ID NO: 9981 - DNA, 203 bp, synthetic construct
  source 1..203: mol_type = other DNA
ggcgcgccagtcctcccggaacaatctctagcagtggcgcccgaacagggacttgaaagcgaaagtagaaccagaggagctctctcgacgcaggactcggcttgctgaagcgcgcacggcaagaggcgaggggcagcgaacggtgagtacgctgaaaaatttgactagcggaggctagaaggagagagcgactcggaccgatg

SEQ ID NO: 9982 - DNA, 203 bp, synthetic construct
  source 1..203: mol_type = other DNA
ggcgcgccagtcctagcacttgaatctctagcagtggcgcccgaacagggacttgaaagcgaaagtagaaccagaggagctctctcgacgcaggactcggcttgctgaagcgcgcacggcaagaggcgaggggcggcgaacggtgagtacgccaaaatttttgactagcggaggctagaaggagagagcgactcggaccgatg

SEQ ID NO: 9983 - DNA, 203 bp, synthetic construct
  source 1..203: mol_type = other DNA
ggcgcgccagtcctaaggcatgaatctctagcagtggcgcccgaacagggacttgaaagcgaaagtagaaccggaggagctctcttgacgcaggactcggcttgctgaagcgcgcacggcaagaggcgaggggcggcgactggtgagtacgccaaaatttttgactagcggaggctagaaggagagagcgactcggaccgatg

SEQ ID NO: 9984 - DNA, 203 bp, synthetic construct
  source 1..203: mol_type = other DNA
ggcgcgccagtcctctaaggtaaatctctagcagtggcgcccgaacaggggcaagaaaaggaaaatgagacccgaggggatttcttgacgcaggactcggcttgctgaagtgcactcggcaagaggcgagaggggcgactggtgagtacgccaattttatttgactagcggaggctagaaggagagagcgactcggaccgatg

SEQ ID NO: 9985 - DNA, 203 bp, synthetic construct
  source 1..203: mol_type = other DNA
ggcgcgccagtcctccatacggaatctctagcagtggcgcctgaacagggacctgaaaacgaaagcggaaccggagcagctctctcgacgcaggactcggcttgctgaagcgcgcacagcaagaggcgaggggaggcgactggtgagtacgccaaattttttgactagcggaggctagaaggagagagcgactcggaccgatg

SEQ ID NO: 9986 - DNA, 203 bp, synthetic construct
  source 1..203: mol_type = other DNA
ggcgcgccagtcctcggtcatcaatttttagcaggggggccccaacagggacccgaaagccaaagttagaacccgagaagttctctcgacgcaggaactcggcttgctgaggtgcacacagcaagaggcgaaagcggcgaactggtgagtaccgccctttttgattaccggaggttaataggagagagcgactcggaccgatg

SEQ ID NO: 9987 - DNA, 203 bp, synthetic construct
  source 1..203: mol_type = other DNA
ggcgcgccagtcctatacatgaacagggaccagaaagtgaaagtggaaccagggaagaaaacctccgacgcaacgggctcggcttagcggagtgcacctgctaagaggcgagaggaactcacagagggtgagtaaattgctggcggtggccagacctaggggaaggacgaagtctctaggggaggaagcgactcggaccgatg

SEQ ID NO: 9988 - DNA, 203 bp, synthetic construct
  source 1..203: mol_type = other DNA
ggcgcgccagtccttcgtgcggacagggacctgaaagcgaaagttaatagggactcgaaagcgaaagttccagagaagttctctcgacgcaggactcggcttgctgaggtgcacacagcaagaggcgagagcggcgactggtgagtacgccaaaaattttttgactagcggaggctagaaggagagagcgactcggaccgatg

SEQ ID NO: 9989 - DNA, 203 bp, synthetic construct
  source 1..203: mol_type = other DNA
ggcgcgccagtcctcgtgcagtacagggaccttaaagcgaaagtaaaagggactcgaaagcggaagttccagagaagatctctcgacgcaggactcggcttgctgagtgcacacagcaagaggcgaggggcggcgactggtgagtacgccaaaaatttttttgactagcggaggctaggaggagagagcgactcggaccgatg

SEQ ID NO: 9990 - DNA, 203 bp, synthetic construct
  source 1..203: mol_type = other DNA
ggcgcgccagtccttgcgttagacagggacgcgaaagagaaagtgaaaccagggaagaaaacctccgacgcaacgggctcggcttagcggagtgcacctgctaagaggcgagaggaactcacaggggtgagtaaatttgctggcggtggccagacctaggggaagggcgaagtctctaggggaggaagcgactcggaccgatg

SEQ ID NO: 9991 - DNA, 203 bp, synthetic construct
  source 1..203: mol_type = other DNA
ggcgcgccagtccttatctcgcactagagatccctcagaccactctagacagtgtaaaaatctctagcagtggcgcccgaacagggacctgaaagcgaaagttaatagggactcgaaagcgaaagttccagagaagttctctcgacgcaggactcggctcgctgaaggtgcactcggcgagaggcgagcgactcggaccgatg

SEQ ID NO: 9992 - DNA, 203 bp, synthetic construct
  source 1..203: mol_type = other DNA
ggcgcgccagtccttttagctaactagagatccctcagaccactctagactgagtaaaaatctctaccagtggcgcccgaacagggcactcgaaagcgaaagttaatagggactcgaaagcgaaagttccagagaagttctctcgacgcaggactcggcttgctgaggtgcacacagcaagaggcgagcgactcggaccgatg

SEQ ID NO: 9993 - DNA, 203 bp, synthetic construct
  source 1..203: mol_type = other DNA
ggcgcgccagtccttgcctccaactagagatccctcagaccactctagactgagtaaaaatctctagcagtggcgcccgaacagggacttgaaagcgaaagttaatagggactcgaaagcgaaagttccagagaagttctctcgacgcaggactcggcttgctgaggtgcgcaacagcaagaggcgagcgactcggaccgatg

SEQ ID NO: 9994 - DNA, 203 bp, synthetic construct
  source 1..203: mol_type = other DNA
ggcgcgccagtcctcgcattacactagagatccctcagaccactctagatagtgtaaaaatctctagaagtggcgcccgaacagggacttgaaagcgaaagttaaacgggactcgaaagcgaaagttccagagaagttctctcgacgcaggactcggcttgctgaaggtgcacacagcaagaggcgagcgactcggaccgatg

SEQ ID NO: 9995 - DNA, 203 bp, synthetic construct
  source 1..203: mol_type = other DNA
ggcgcgccagtcctcataaataactagagatccctcagaccactctagtgagtgtaaaaatctctagcagtggcgcccgaacagggacttgaaagcgaaagttaacagggactcgaaagcgaaagttccagagaagttctctcgacgcaggactcggcttgctgaaggtgcacgcagcaagaggcgagcgactcggaccgatg

SEQ ID NO: 9996 - DNA, 203 bp, synthetic construct
  source 1..203: mol_type = other DNA
ggcgcgccagtcctgtactttgagacagattcggattggcagagagcctgttggaatcaaaagaaggttgccaaaagattcttaaagttttagaaccattagtaccaacagggtcagaaaatttaaaaagcctttttaataccgtctgcgtcatttggtgcttgcacgcagaagagaaagtgaaagatcgactcggaccgatg

SEQ ID NO: 9997 - DNA, 203 bp, synthetic construct
  source 1..203: mol_type = other DNA
ggcgcgccagtcctgaacgagcagacagatttggatcggcagaaagcctgttggaaagcaaagaaggatgtcaaagaatattagcagtactagctccattaatgccaacaggctcggaaaatttaaaaagcttgtttagtactgtctgcgtagtttggtgtctgcacgcagaaatgaaagtgaaagaccgactcggaccgatg

SEQ ID NO: 9998 - DNA, 203 bp, synthetic construct
  source 1..203: mol_type = other DNA
ggcgcgccagtccttttagacgagcagtggcgcctgaacagggacccgaaagcgaaagtaggaccagaggagatctctcgacgcaggactcggcttgctgaagtgcgcacggcaagaggcgaggggacggcggctgggtgagtacgccaaaaataaaattttgactagcggaggctagaaggagagagcgactcggaccgatg

SEQ ID NO: 9999 - DNA, 203 bp, synthetic construct
  source 1..203: mol_type = other DNA
ggcgcgccagtcctatcttagcatcaattgtgtgactctggtatctagagatccctcagacctctttagtccgggtggaaaatctctagcagtggcgcccgaacagggacgcgaaagcgaaagtagaaccggagaagatctctcgacgcaggactcggcttgctgaagcgcgcacagcaagaggcgagcgactcggaccgatg

SEQ ID NO: 10000 - DNA, 203 bp, synthetic construct
  source 1..203: mol_type = other DNA
ggcgcgccagtcctctgtgggcatccaatttgtgactctggtatctagagatccctcagatattaagtgtctgtgcggaaaatctctagcagtggcgcccgaacagggacttgaaaacgaaagtgtaaccggagaagttctctcgacgcaggactcgacttgctgagtgcgcaccagcaaggggcgagcgactcggaccgatg

SEQ ID NO: 10001 - DNA, 203 bp, synthetic construct
  source 1..203: mol_type = other DNA
ggcgcgccagtcctgcaaggttatccattcggtaactctggtacctagagatccctcagaccatctggactgagtagaaaatctctagcagtggcgcccgaacagggacttgaaaacgaaagtagaaccggaggctgaatctctcgacgcaaggactcggctcgttggtgcacacagcgagaggcgagcgactcggaccgatg

SEQ ID NO: 10002 - DNA, 203 bp, synthetic construct
  source 1..203: mol_type = other DNA
ggcgcgccagtcctggcggtgtatctctagcagtggcgcccgaacagggacccgaaagcgaaagtagaaccagagaagctctctcgacgcaggactcggcttgctgaagcgcgctcggcaagaggcgaggggcggcgactggtgagtacgcctaaaatttttgactagcggaggctagaaggagagagcgactcggaccgatg

SEQ ID NO: 10003 - DNA, 203 bp, synthetic construct
  source 1..203: mol_type = other DNA
ggcgcgccagtccttgcgtatcatctctagcagtggcgcccgaacagggacccgaaagcgaaagtgagaccagagaagatctctcgacgcaggactcggcttgctgaagtgcactcggcaagaggcgagaggggcggctggtgagtacgccaaattttatttgactagcggaggctagaaggagagagcgactcggaccgatg

SEQ ID NO: 10004 - DNA, 203 bp, synthetic construct
  source 1..203: mol_type = other DNA
ggcgcgccagtcctttgctttaatctctagcagtggcgcccgaacagggacccgaaagtgaaagtaagaccagaggaggtctctcgacgcaggactcggcttgctgaagtgcactcggcaagaggcgagagcggcgactggtgagtacgccaaattttatttgactagcggaggctagaaggagagagcgactcggaccgatg

SEQ ID NO: 10005 - DNA, 203 bp, synthetic construct
  source 1..203: mol_type = other DNA
ggcgcgccagtcctgattagatatctctagcagtggcgcccgaacagggacctgaaaagcgaaagtaaaaccagagaagctctctcgacgcaggactcggcttgctgagcgcgcacggcaagaggcgaggggcagcgactggtgagtacgctgaaattttttgactagcggaggctagaaggagagagcgactcggaccgatg

SEQ ID NO: 10006 - DNA, 203 bp, synthetic construct
  source 1..203: mol_type = other DNA
ggcgcgccagtcctaaatttagatctctagcagtggcgcccgaacagggacctgaaagcgaaagtaagaccagaggagatctctcgacgcaggactcggcttgctgaagtgcactcggcaagaggcgagagcggcggctggtgagtacgccaatttttatttgactagcggaggctagaaggagagagcgactcggaccgatg

SEQ ID NO: 10007 - DNA, 203 bp, synthetic construct
  source 1..203: mol_type = other DNA
ggcgcgccagtcctgcgttaccatctctagcagtggcgcccgaacagggacgcgaaaagcgaaaataaaaccagagaagatctctcgacgcaggactcggcttgctgaagtgcacacggcaagaggcgaggggagcggcgactggtgagtacgccaatttttgactagcggaggctagaaggagagagcgactcggaccgatg

SEQ ID NO: 10008 - DNA, 203 bp, synthetic construct
  source 1..203: mol_type = other DNA
ggcgcgccagtcctagcagcttatctctagcagtggcgcccgaacagggacgctgaaagtgaaagagaaaccagaggagctctctcgacgcaggactcggcttgctgcagcgcgcacggcaagaggcgaggggcggcgactggtgagtacgccaaaatttttgactagcggaggctagaaggagagagcgactcggaccgatg

SEQ ID NO: 10009 - DNA, 203 bp, synthetic construct
  source 1..203: mol_type = other DNA
ggcgcgccagtcctataaagttatctctagcagtggcgcccgaacagggacgtgaaagcgaaagtagaaccagagaagctctctcgacgcgaggactcggcttgctgaagcgcgcacagcaagaggcgaggggcggcgactggtgagtacgccgaattttttgactagcggaggctagaaggagagagcgactcggaccgatg

SEQ ID NO: 10010 - DNA, 203 bp, synthetic construct
  source 1..203: mol_type = other DNA
ggcgcgccagtcctaaggagcgatctctagcagtggcgcccgaacagggactagaaaacgaaagtaaggccagaggagatctctcgacgcaggactcggcttgctgaagtgcacacggcaagaggcgagagcggcggctggagagtacgccgaattttatttgactagcggaggctagaaggagagagcgactcggaccgatg

SEQ ID NO: 10011 - DNA, 203 bp, synthetic construct
  source 1..203: mol_type = other DNA
ggcgcgccagtcctctgcaataatctctagcagtggcgcccgaacagggacttgaaaacgaaagtgtaaccggagaagttctctcgacgcaggactcgacttgctgagtgcgcaccagcaaggggcgaggggccggcgactggtgagtacgcctaatttttgactagcgaaagctagaaggagagaggcgactcggaccgatg

SEQ ID NO: 10012 - DNA, 203 bp, synthetic construct
  source 1..203: mol_type = other DNA
ggcgcgccagtcctacttcgaaatctctagcagtggcgcccgaacagggacttgaaagcgaaagagaaaccagaggagctctctcgacgcaggactcggcttgctgaagcgcgcacggcaagaggcgaggggcggcgactggtgagtacgccaaaattttttgactagcggatgctagaagaaaaaagcgactcggaccgatg

SEQ ID NO: 10013 - DNA, 203 bp, synthetic construct
  source 1..203: mol_type = other DNA
ggcgcgccagtccttcttcacgatctctagcagtggcgcccgaacagggacttgaaagcgaaagggaaaccagaggagctctctcgacgcaggactcggcttgctgaagcgcgcacggcaagaggcgaggggcggcgactggtgagtacgccgaaaatttttgactagcggaggctagaaggagagagcgactcggaccgatg

SEQ ID NO: 10014 - DNA, 203 bp, synthetic construct
  source 1..203: mol_type = other DNA
ggcgcgccagtcctcaatgggtatctctagcagtggcgcccgaacagggacttgaaagcgaaagtaaaaccagaggagatctctcgacgcaggactcggcttgctgaagtgcactcggcaagaggcgagagcggcgactggtgagtacgccgaattttatttgactagcggaggctagaaggagagagcgactcggaccgatg

SEQ ID NO: 10015 - DNA, 203 bp, synthetic construct
  source 1..203: mol_type = other DNA
ggcgcgccagtcctatccttccatctctagcagtggcgcccgaacagggacttgaaagcgaaagtaaaaccagaggagatctctcgacgcaggactcggcttgctgaagtgcactcggcaagaggcgagagcggcggctggtgagtacgccaaattttatttgactagcggaggctagaaggagagagcgactcggaccgatg

SEQ ID NO: 10016 - DNA, 203 bp, synthetic construct
  source 1..203: mol_type = other DNA
ggcgcgccagtcctttcatcgcatctctagcagtggcgcccgaacagggacttgaaagcgaaagtaagaccagagaagatctctcgacgcaggactcggcttgctgaagtgcactcggcaagaggcgagagcggcgactggtgagtacgccaaattttatttgactggcggaggctagaaggagagagcgactcggaccgatg

SEQ ID NO: 10017 - DNA, 203 bp, synthetic construct
  source 1..203: mol_type = other DNA
ggcgcgccagtcctaccaactgatctctagcagtggcgcccgaacagggacttgaaagcgaaagtaagaccagagaagatctctcgacgcaggactcggcttgctgaagtgcactcggcaagaggcgagaggggcggctggtgagtacgccaatttttatttgactagcggaggctagaaggagagagcgactcggaccgatg

SEQ ID NO: 10018 - DNA, 203 bp, synthetic construct
  source 1..203: mol_type = other DNA
ggcgcgccagtcctaggtaactatctctagcagtggcgcccgaacagggacttgaaagcgaaagtaagaccagagcagatctctcgacgcaggactcggcttgctgaagtgcactcggcaagaggcgagagcggcgactggtgagtacgccgaattttatttgactagcggaggctagaaggagagagcgactcggaccgatg

SEQ ID NO: 10019 - DNA, 203 bp, synthetic construct
  source 1..203: mol_type = other DNA
ggcgcgccagtcctggaatcaaatctctagcagtggcgcccgaacagggacttgaaagcgaaagtaagaccagaggagaactctcgacgcaggactcggcttgctgaagtgcactcggcaagaggcgagagaggcggctggtggagtacgccatttttatttgactagcggaggctagaaggagagagcgactcggaccgatg

SEQ ID NO: 10020 - DNA, 203 bp, synthetic construct
  source 1..203: mol_type = other DNA
ggcgcgccagtcctaatcacttatctctagcagtggcgcccgaacagggacttgaaagcgaaagtaagaccagaggagatctctcgacgcaggactcggcttgctgaagtgcacacggcaagaggcgagagcggcggctggtgagtacgccaaattttatttgactagcggaggctagaaggagagagcgactcggaccgatg

SEQ ID NO: 10021 - DNA, 203 bp, synthetic construct
  source 1..203: mol_type = other DNA
ggcgcgccagtccttaacgataatctctagcagtggcgcccgaacagggacttgaaagcgaaagtaagaccagaggagatctctcgacgcaggactcggcttgctgaagtgcactcggcaagaggcgagagcggcgactggtgagtacgccgaattttatttgactagcggaggctagaaggagagagcgactcggaccgatg

SEQ ID NO: 10022 - DNA, 203 bp, synthetic construct
  source 1..203: mol_type = other DNA
ggcgcgccagtcctacaagcgcatctctagcagtggcgcccgaacagggacttgaaagcgaaagtaagaccagaggagatctctcgacgcaggactcggcttgctgaagtgcactcggcaagaggcgagagcggcggctggtgagtacgccaaattttatttgactagcggaggctaggaggagagagcgactcggaccgatg

SEQ ID NO: 10023 - DNA, 203 bp, synthetic construct
  source 1..203: mol_type = other DNA
ggcgcgccagtcctcttactagatctctagcagtggcgcccgaacagggacttgaaagtgaaagtaagaccagaggaaatctctcgacgcaggactcggcttgctgaagtgcactcggcaagaggcgagagcggcggctggtgagtacgccaaaatttatttgactagcggaggctagaaggagagagcgactcggaccgatg

SEQ ID NO: 10024 - DNA, 203 bp, synthetic construct
  source 1..203: mol_type = other DNA
ggcgcgccagtcctagattcgtatctctagcagtggcgcccgaacagggacttgaagcgaaagcgaaagccagagaagttctctcgacgcaggactcggcttgctgagcgcgcacagcaagaggcgaggggcggcggctggtgagtacgccaaatttcttttgactagcggaggctagaaggagagagcgactcggaccgatg

SEQ ID NO: 10025 - DNA, 203 bp, synthetic construct
  source 1..203: mol_type = other DNA
ggcgcgccagtcctccattagcatctgttcaaccctggtgtctagagatccctcagatcacttagactgaagcagaaaatctctagcagtggcgcccgaacagggacttgaagtgaaagtgaaaccagggaagaaaacctccgacgcaacgggctcggcttagcggagtgcacccgctaagaggcgagcgactcggaccgatg

SEQ ID NO: 10026 - DNA, 203 bp, synthetic construct
  source 1..203: mol_type = other DNA
ggcgcgccagtcctctatacaaatctgttcgaccctggtatctagagatccctcagatcacttagactgaagcagaaaatctctagcagtggcgcccgaacagggaccggaagagaaagtgaaaccagggaagaaaacctccgacgcgacgggctcggcttagcggagtgcacccgctaagaggcgagcgactcggaccgatg

SEQ ID NO: 10027 - DNA, 203 bp, synthetic construct
  source 1..203: mol_type = other DNA
ggcgcgccagtcctaacgcggcatctgttgtgtgactctggtaactagagatccctcaaacccttttagtcagtgtgaaaaatctctagcagtggcgcccgaacagggacccgaaagcgaaagtagaaccggaggagctctctcgacgcaggactcggcttgctgaaccgcgcacggcaaaaggcgagcgactcggaccgatg

SEQ ID NO: 10028 - DNA, 203 bp, synthetic construct
  source 1..203: mol_type = other DNA
ggcgcgccagtcctccagagaaatttgttgtgtgactctggtaactagagatccctcagaccattctagtcagtgtggaaaatctctagcagtggcgcccgaacagggacttgaaagcgaaagtagaaccagaggagatctctcgacgcaggactcggcttgctgaagcgcgcacggcaagaggcgagcgactcggaccgatg

SEQ ID NO: 10029 - DNA, 203 bp, synthetic construct
  source 1..203: mol_type = other DNA
ggcgcgccagtcctatacaaatcaggctcagaaaatttaaagagtctttataatactgtctgcgtcatttggtgcatacacgcagaaatgaaagtgaaaaatactgaggaagcaaagcagatagtgcagaaacacctagcggtagaaaatgaaactgcagaccaattgcctgccacaagtagaccaaccgactcggaccgatg

SEQ ID NO: 10030 - DNA, 203 bp, synthetic construct
  source 1..203: mol_type = other DNA
ggcgcgccagtcctatacgtctcagggacctgaaaaagaaagttaatagggactcgaaagcgaaagttccagagaagttctctcgacgcaggactcggcttactgaagtgcacacagtaagaggcgagagcggcgactggtgagtacgccaaaaaattttttgactagcggaggctagaaggagagagcgactcggaccgatg

SEQ ID NO: 10031 - DNA, 203 bp, synthetic construct
  source 1..203: mol_type = other DNA
ggcgcgccagtcctatggctcccagggacctgaaaaggaaagtgaaaccagggaagaaaacctccgacgcaacgggctcggcttagcggagtgcacctgctaagaggcgagaggactcacagaagggtgagtaaatttgctggcggtggccagacctaggggaagggcgaagtctctaggggaggaagcgactcggaccgatg

SEQ ID NO: 10032 - DNA, 203 bp, synthetic construct
  source 1..203: mol_type = other DNA
ggcgcgccagtccttgggcaaccagggacctgaaagcgaaagttaatagggactcgaaaacgaaagttccagagaagttctctcgacgcaggactcggcttgctgaggtgcacacagcaagaggcgagagcggcgaactggtgagtacgcctaagattttttgactagcggaggctagaaggagagagcgactcggaccgatg

SEQ ID NO: 10033 - DNA, 203 bp, synthetic construct
  source 1..203: mol_type = other DNA
ggcgcgccagtcctctccgtgccagggacttgaaagagaaagtgaaaccagggaagaaaacctccgacgcaacgggctcggcttagcggagtgcacccgctgagaggcgagaggaactcacagagggtgagtaaatttgctggcggtggccagacctaggggaagggcgaagtccctaggggaggaagcgactcggaccgatg

SEQ ID NO: 10034 - DNA, 203 bp, synthetic construct
  source 1..203: mol_type = other DNA
ggcgcgccagtcctaatgctatcaggttcagaaaatttaaaaagtctttttaatactgtctgcgtcatttggtgcatacacgcagaagagaaagtgaaagatactgaaggagcaaaacaaatagtgcggagacatctagtggcagaaacaggaactgcagagaaaatgccaagcacaagtagaccaaccgactcggaccgatg

SEQ ID NO: 10035 - DNA, 203 bp, synthetic construct
  source 1..203: mol_type = other DNA
ggcgcgccagtcctcccaccgacaggttcagaaaatttaaagagcctttacaatactgtctgcgtcatttggtgtttgcacgcagaagaaaaagtgaaacatactgaggaagcaaagcaagtagtgcagagacatctagtggtggaaacaggaacagcagacaacatgccgaaaacaagtaggccaaccgactcggaccgatg

SEQ ID NO: 10036 - DNA, 203 bp, synthetic construct
  source 1..203: mol_type = other DNA
ggcgcgccagtccttactctatcaggttcagaaaatttaaagagcctttataatactgtctgcgtcatttggtgcattcacgcagaagagaaagtgaaacatactgaggaagcaaaacaaatagtgcagagacatctagtggtggaaacaggaacagcagacagaatgccagtaacaagcagaccaaccgactcggaccgatg

SEQ ID NO: 10037 - DNA, 203 bp, synthetic construct
  source 1..203: mol_type = other DNA
ggcgcgccagtcctacgtcgctcaggttcagaaaatttaaagagcctttataatactgtctgcgtcatttggtgcttgcacgcagaagagaaagtgagacatactgaggaagcaaaacaagtagtgcagagacatctagtggtggaaacaggaacagcagacaacatgccgaaaacaagtaggccaaccgactcggaccgatg

SEQ ID NO: 10038 - DNA, 203 bp, synthetic construct
  source 1..203: mol_type = other DNA
ggcgcgccagtcctgattgcgtcaggttcagaaaatttaaagagcttgtacaatactgtctgcgtcatttggtgcattcacgcagaagagaaagtgaaacatactgaggaagcaagacaaatagtgcagaaacatctagtggtggaaacaggaacagcagacaccatgccaaaaacaagtagaccaaccgactcggaccgatg

SEQ ID NO: 10039 - DNA, 203 bp, synthetic construct
  source 1..203: mol_type = other DNA
ggcgcgccagtccttaaacgcgcatccattcggtaactctggtacctagagatccctcagaccatctagactgagtgaaaaatctctagcagtggcgcccgaacagggacttgaaaacgaaagtagaaccggaggctgaatctctcgacgcaggactcggctcgttggtgcacacagcgagaggcgagcgactcggaccgatg

SEQ ID NO: 10040 - DNA, 203 bp, synthetic construct
  source 1..203: mol_type = other DNA
ggcgcgccagtcctgccaagatcatctgttgtgtgactctggtaactagagatccctcagacctctttggtcagtgtagaaaatctctagcagtggcgcccgaacagggacttgaaagcgaaagtagaaccagaggagctctctcgacgcaggactcggcttgctgagcgcgcacagcaagaggcgagcgactcggaccgatg

SEQ ID NO: 10041 - DNA, 203 bp, synthetic construct
  source 1..203: mol_type = other DNA
ggcgcgccagtcctcgctgtagcattagtaccaacaggatcagaaaatttaaaaagcctttttaatactgtctgcgtcattttctgcctgcacgcagaagagaaagtgaaagatacagaggaggcaaaaaagatagcacagcgacacctagcggacgcagaaaaaatgacagctacaaataaaccaaccgactcggaccgatg

SEQ ID NO: 10042 - DNA, 203 bp, synthetic construct
  source 1..203: mol_type = other DNA
ggcgcgccagtcctaggtccatcccgaacagggaccgaaagtgaaaccagggaagaaaacctccgacgcaacgggctcggcttagcggagtgcacccgctaagaggcgagaggaactcacaagagggtgagtaattttgctggcggtggccagacctaggggaagggcgaagtctctaggggaggaagcgactcggaccgatg

SEQ ID NO: 10043 - DNA, 203 bp, synthetic construct
  source 1..203: mol_type = other DNA
ggcgcgccagtccttccaaacgcccgtctgttgtatgactctggtaactagagatccctcagaccactctagacggtgtaaaaaatctctagcagtggcgcccgaacagggacttgaaagcgaaagttccagagaagttctctcgacgcaggactcggcttgctgaggtgcacacagcaagaggcgagcgactcggaccgatg

SEQ ID NO: 10044 - DNA, 203 bp, synthetic construct
  source 1..203: mol_type = other DNA
ggcgcgccagtcctgttacaatccgaacagggacccgaaagtgaaagttaatagggactcgaaagcggaagttccagagaagttctctcgacgcaggactcggcttgctgaggtgcacacagcaagaggcgagagcggcgactggtgagtacgccaatttttgactagcagaggctagaaggagagagcgactcggaccgatg

SEQ ID NO: 10045 - DNA, 203 bp, synthetic construct
  source 1..203: mol_type = other DNA
ggcgcgccagtcctgggcatcaccgaacagggacttaaaagcgaaagttaatagggactcgaaagcgaaagttccagaaaagttctctcgacgcaggactcggcttgctgaggtgcacacagcaagaggcgagagcggcgactggtgagtacgccattttttaactagcggaggctagaaagagagagcgactcggaccgatg

SEQ ID NO: 10046 - DNA, 203 bp, synthetic construct
  source 1..203: mol_type = other DNA
ggcgcgccagtccttaccgcagccgaacagggacttgaaaagcgaaagtaacagggactcgaaagcgaaagttccagagaagttctctcgacgcaggactcggcttgctgaggtgcacacagcaagaggcgagagcggcgactggtgagtacgccattttttgactagcggaggctagaaggagagagcgactcggaccgatg

SEQ ID NO: 10047 - DNA, 203 bp, synthetic construct
  source 1..203: mol_type = other DNA
ggcgcgccagtccttaagtctaccgaacagggacttgaaagcgaaagctaatagggactcgaaagcgaaagttccagagaagttctctcgacgcaggactcggcttgctgcggtgcacacagcaagaggcgagacgggcgactggtgagtacgccaaattttgactagcggaggctagaaggagagagcgactcggaccgatg

SEQ ID NO: 10048 - DNA, 203 bp, synthetic construct
  source 1..203: mol_type = other DNA
ggcgcgccagtcctttgacgcaccgaacagggacttgaaagcgaaagtaacagggactcgaaagcgaaagttccagagaagttctctcgacgcaggactcggcttgctgggtgcacacagcaagaggcgagagcggcgactggtgagtacgccataaattttgactagcggaggctagaaggagagagcgactcggaccgatg

SEQ ID NO: 10049 - DNA, 203 bp, synthetic construct
  source 1..203: mol_type = other DNA
ggcgcgccagtcctacttgggtccgaacagggacttgaaagcgaaagttaacagggactcgaaagcgaaagttccagagaagttctctcgacgcaggactcggcttgctgaaggtgcacacagcaagaggcgagagcggctggtgagtacgccataaattttgactagcggaggctagaaggagagagcgactcggaccgatg

SEQ ID NO: 10050 - DNA, 203 bp, synthetic construct
  source 1..203: mol_type = other DNA
ggcgcgccagtcctcaaagcacccgaacagggacttgaaagcgaaagttaatagggactcgaaagcgaaagttccagagaagttctctcgacgcaggactcggcttgctgaggtgcacacagcaagaggcgagagcggcggctggtgagtacgccaaattttgactagcggaggctagaaggagagagcgactcggaccgatg

SEQ ID NO: 10051 - DNA, 203 bp, synthetic construct
  source 1..203: mol_type = other DNA
ggcgcgccagtcctcgcgtggaccgaacagggacttgaaagcgaaagttaatagggactcgaaagcgaaagttccagagaagttctctcgacgcaggactcggcttgctgaggtgcgcaacagcaagaggcgagagcggctactggtgagtacgccaatttttgactagcggaggctagaaggagaggcgactcggaccgatg

SEQ ID NO: 10052 - DNA, 203 bp, synthetic construct
  source 1..203: mol_type = other DNA
ggcgcgccagtcctcaccctctccgaacagggacttgaaagcgaaagttaatagggactcgaaagcgaaagttccagagaagttctctcgacgcaggactcggcttgctgcggtgcacacagcaagcggcgagagcggcgactggtgagtacgccaagttttgactagcggaggctagaaggagagagcgactcggaccgatg

SEQ ID NO: 10053 - DNA, 203 bp, synthetic construct
  source 1..203: mol_type = other DNA
ggcgcgccagtcctcggttaatccgaacagggactttaaaagcgaaagtaacagggactcgaaagcggaagttccagagaagatctctcgacgcaggactcggcttgctgaggtgcacacagcaagaggcgagagcggcgactggtgagtacgccaatttttaactagcggaggctagaaggagagagcgactcggaccgatg

SEQ ID NO: 10054 - DNA, 203 bp, synthetic construct
  source 1..203: mol_type = other DNA
ggcgcgccagtcctctccaaccccgtctgttgtgtgactctggtaactagagatccctcagaccctttagtcagtgtggaaaatctctagcagtggcgcccgaacagggacttgaaagcgaaagagaaaccagaggagctctctcgacgcaggactcggcttgctgagcgcgcacagcaagaggcgagcgactcggaccgatg

SEQ ID NO: 10055 - DNA, 203 bp, synthetic construct
  source 1..203: mol_type = other DNA
ggcgcgccagtcctttatgtgaccgtctgttgtttgactctggtaactagagatccctcagaccactctagactgtgtaaaaatctctagcagtggcgcccgaacagggactcgaaagcgaaagtgttccagagaagttctctcgacgcaggactcggcttgctgaggtgcacacagcaagaggcgagcgactcggaccgatg

SEQ ID NO: 10056 - DNA, 203 bp, synthetic construct
  source 1..203: mol_type = other DNA
ggcgcgccagtcctccgctgcccgaacagggacttgaaagtgaaagttaatagggactcgaaagcgaaagttccagagaagttctctcgacgcaggactcggcttgctgaggtgcacacagcaagaggcgagagcggcgactggtgagtacgccaattttttgcctagcggaggctagaaggagagagcgactcggaccgatg

SEQ ID NO: 10057 - DNA, 203 bp, synthetic construct
  source 1..203: mol_type = other DNA
ggcgcgccagtcctgtggaccacgaacagggacttgaaagtgaaagttaatagggactcgaaagcgaaagttccagagaagttctctcgacgcaggactcggcttgctgaggtgcacacagcaagaggcgaggagcggcgactggtgagtacgccaaattttgactagcggaggctagaaggagagagcgactcggaccgatg

SEQ ID NO: 10058 - DNA, 203 bp, synthetic construct
  source 1..203: mol_type = other DNA
ggcgcgccagtcctctatagcccgagaaactcgtcttgtcagggaagaaagtagatgaattagaaaaagttaggttacggcccaacggaaagaaaaaatacatgttaaaacatgttgtgtgggcagcgaacgaattggacagatttggattagcagaaagcctgttggaggccaaagaaggatgtcaacgactcggaccgatg

SEQ ID NO: 10059 - DNA, 203 bp, synthetic construct
  source 1..203: mol_type = other DNA
ggcgcgccagtcctagtttggccgtctgttgtatgactctggtaactagagatccctcagactactctagacagtgtaaaaatctctagcagtggcgcccgaacagggactcgaaagcgaaagtgttccagagaagctctctcgacgcgaggactcggcttgctgaggtgcacacagcaaggggcgagcgactcggaccgatg

SEQ ID NO: 10060 - DNA, 203 bp, synthetic construct
  source 1..203: mol_type = other DNA
ggcgcgccagtcctcctggcgtcgtctgttgtgtgactctggtaactagagatccctcagaccaatttggtagtgtggaaaatctctagcagtggcgcccgaacagggacgcgaaagcgaaagtagaaccagaggagatctctcgacgcaggactcggcttgctgaagtgcactcggcaagaggcgagcgactcggaccgatg

SEQ ID NO: 10061 - DNA, 203 bp, synthetic construct
  source 1..203: mol_type = other DNA
ggcgcgccagtcctaccagttacgtctgttgtgtgactctggtaactagagatccctcagacctctgtagtcagtgtgaaaatctctagcagtggcgcccgaacagggacttgaaagcgaaagtagaaccagaggagctctctcgacgcaggactcggcttgctgaagcgcgcacagcaagaggcgagcgactcggaccgatg

SEQ ID NO: 10062 - DNA, 203 bp, synthetic construct
  source 1..203: mol_type = other DNA
ggcgcgccagtcctcgctgacacgtctgttgtgtgactctggtaactagagatccctcagacctttttggcagtatggaaaatctctagcagtggcgcccgaacagggacttgaaagcgaaagtaagaccagagaagaactctcgacgcaggactcggcttgctgaagtgcactcggcaagaggcgagcgactcggaccgatg

SEQ ID NO: 10063 - DNA, 203 bp, synthetic construct
  source 1..203: mol_type = other DNA
ggcgcgccagtcctgcccgcttcgtctgttgtgtgactctggtaactagagatccctcagacctttttggtagtgtggaaaatctctagcagtggcgcccgaacagggacttgaaaacgaaagtaagaccagagaagaactctcgacgcaggactcggcttgctgaagtgcactcggcaagaggcgagcgactcggaccgatg

SEQ ID NO: 10064 - DNA, 203 bp, synthetic construct
  source 1..203: mol_type = other DNA
ggcgcgccagtcctcttcagatcgtctgttgtgtgctctggtaactatagatccctcagacaattctagtcagtgtggaaaatctatagcagtggcgcccgaacagggaccagaaagcgaaagtagaaccagaggagctctctcgacgcaggactcggcttgctgaagcgcgcacggcaagaggcgagcgactcggaccgatg

SEQ ID NO: 10065 - DNA, 203 bp, synthetic construct
  source 1..203: mol_type = other DNA
ggcgcgccagtcctcggcctcccgtctgttgtgtggctctggtaactagagatccctcagaccattttggtagtgtggaaaatctttagcagtggcgcccgaacagggacttgaaagcgaaagtaagaccagaggagatctctcgacgcaagactcggcttgctgaagcgcactcggcaagaggcgagcgactcggaccgatg

SEQ ID NO: 10066 - DNA, 203 bp, synthetic construct
  source 1..203: mol_type = other DNA
ggcgcgccagtcctgcgtaattcgtctgttgtgtggctctggtaactagagatccctcagacctttttggtagtgtggaaaatctctagcagtggcgcccgaacagggacttgaaagcgaaagtaagaccagaggagatctctcgacgcaagactcggcttgctgaagtgcactcggcaagaggcgagcgactcggaccgatg

SEQ ID NO: 10067 - DNA, 203 bp, synthetic construct
  source 1..203: mol_type = other DNA
ggcgcgccagtcctcttccctgctagagatccctcagaccactctagttgttgtaaaaatctctagcagtggcgcccgaacagggacttgaaagcgaaagttaacagggactcgaaagcgaaagttccagagaagttctctcgacgcaggactcggcttgctgaaaggtgcacacggcaagaggcgagcgactcggaccgatg

SEQ ID NO: 10068 - DNA, 203 bp, synthetic construct
  source 1..203: mol_type = other DNA
ggcgcgccagtcctctttaagcctagagatccctcaggaccactctagacagtgtaaaaatctctagcagtggcgcccgaacagggacttgaaagcgaaagttaatatgggaatggaaagggaaagttcccgagaagttctctcgagccaggactcggcttgctgaagtgcaccagcaagaggcgagacgactcggaccgatg

SEQ ID NO: 10069 - DNA, 203 bp, synthetic construct
  source 1..203: mol_type = other DNA
ggcgcgccagtcctccgggcccctagcagtggcgcccgaacagggacgcgaaagcgaaagtagaaccagagacgatctctcgacgcaggactcggcttgctgaagtgcgcacggcaagaggcaaggggcggcgactggtgagtacgccaaaaataaagttttgactagcggaggctagaaggaaagagcgactcggaccgatg

SEQ ID NO: 10070 - DNA, 203 bp, synthetic construct
  source 1..203: mol_type = other DNA
ggcgcgccagtcctgacggcggctatctattcagacactctggtaactagagatccctcagattaaattatagtcaaggaaaatctctagcagtggcgcccgaacagggacctgaagtgaaagtaaccggaggctgaatctcccgacgcacggactcggcttgctgagtgcacacagcaagaggcgagcgactcggaccgatg

SEQ ID NO: 10071 - DNA, 203 bp, synthetic construct
  source 1..203: mol_type = other DNA
ggcgcgccagtccttatcatagctccggtacttagactctggtaactagagatccctcagaccttttagtcagtgtggaaaatctctagcagtggcgcccgaacagggacttgaaagcgaaagtggtaccggagaagatctctcgacgcaggactcggcttgctgaagcgcgcacggcaagaggcgagcgactcggaccgatg

SEQ ID NO: 10072 - DNA, 203 bp, synthetic construct
  source 1..203: mol_type = other DNA
ggcgcgccagtcctgacgtgccctctagcagtggcgcccgaacagggacttgaaagcgaaaggaaaaccagaggagctctctcgacgcaggactcggcttgctgaagcgcgcacagcaagaggcgaggggcggcgactggtgagtacgcctaaaaattttttgactagcggaggctagaaggagagagcgactcggaccgatg

SEQ ID NO: 10073 - DNA, 203 bp, synthetic construct
  source 1..203: mol_type = other DNA
ggcgcgccagtccttgtcccagctctggtaactagagatccctcagaccactctagactgtgtaaaaatctctagcagtggcgcccgaacaggacttgacggtaatagggactcgaaagcgaaagttccagagaagatctctcgacgcaaggactcggcttgctgaggtgcgcacagcaagaggcgagcgactcggaccgatg

SEQ ID NO: 10074 - DNA, 203 bp, synthetic construct
  source 1..203: mol_type = other DNA
ggcgcgccagtcctgcccttagctggtaactagagatccctcagaccactttcagtttgtgtaaaaatctctagcagtggcgcccgaacagggaccggaagttaatagggactcgaaagcgaaagttccagagaagctctctcgacgcagggactcggcttgctgaggtgcacacagcaagaggcgagcgactcggaccgatg

SEQ ID NO: 10075 - DNA, 203 bp, synthetic construct
  source 1..203: mol_type = other DNA
ggcgcgccagtcctgtctgcccctggtatctagagatccctcagaccactctagacttagtgaaaaatctctagcagtggcgcccgaacagggaccggaagttaatagggactcgaaagcgaaagttccagagaagctctctcgacgcagggactcggcttgctgaggtgcacacagcaagaggcgagcgactcggaccgatg

SEQ ID NO: 10076 - DNA, 203 bp, synthetic construct
  source 1..203: mol_type = other DNA
ggcgcgccagtcctaactcctactggtatctagagatccctcagaccactgtagactgtgtaaaaaatctctagcagtggcgcccgaacagggacctgaaattaatagggactcgaaagcgaaagttccagagaagttctctcgacgcaaggactcggcttgctgaggtgcacgcagcaagaggcgagcgactcggaccgatg

SEQ ID NO: 10077 - DNA, 203 bp, synthetic construct
  source 1..203: mol_type = other DNA
ggcgcgccagtccttattaagtctgttcaaccctggtgtctagagatccctcagatcacttagactgaagcagaaaaatctctagcagtggcgcccgaacagggacgcgaaagcgaaagtgaagccagggaagaaaacctccgacgcaacgggctcggcttagcggagtgcacctgctaagaggcgagcgactcggaccgatg

SEQ ID NO: 10078 - DNA, 203 bp, synthetic construct
  source 1..203: mol_type = other DNA
ggcgcgccagtcctgccgccacctgttgtgtgactctggtaactagagatccctcagaccaccttagcagagtgaaaaatctctagcagtggcgcccgaacagggactcgaaagcgaaagtaaaagttccagagaagttctctcgacgcaggactcggcttgctgaggtgcacacagcaagaggcgagcgactcggaccgatg

SEQ ID NO: 10079 - DNA, 203 bp, synthetic construct
  source 1..203: mol_type = other DNA
ggcgcgccagtcctctagttagctgttgtttgactctggtaactagagatccctcagactctcgtagtcagtgtgaaaaatctctagcagtggcgcccgaacagggaccttaaaagcgaaagagaaaccagaggagctctctcgacgcaggactcggcttgctgaaagcgcgcacggcaagaggcgagcgactcggaccgatg

SEQ ID NO: 10080 - DNA, 203 bp, synthetic construct
  source 1..203: mol_type = other DNA
ggcgcgccagtcctattggaccctttgatgtgtgactctggtaactagagatccctcagaccaattgtggtagtgtggaaaatctctagcagcggcgcccgaacagggacttgaaagcgaaagtaagaccagaggagatctctcgacgcaggactcggcttgctgaagtgcactcggcaagaggcgagcgactcggaccgatg

SEQ ID NO: 10081 - DNA, 203 bp, synthetic construct
  source 1..203: mol_type = other DNA
ggcgcgccagtcctccaacggcgaaaaactccgtcttgagagggaaaaaggcagatgaattagaaaaaattaggttacggcccggcgggaagaaaaaatacagattaaaacatattgtgtgggcagcgaatgaattggacagattcggattaacagagagcctgttggagtcaaaagaaggttgccaacgactcggaccgatg

SEQ ID NO: 10082 - DNA, 203 bp, synthetic construct
  source 1..203: mol_type = other DNA
ggcgcgccagtcctaacattgggaaaatctctaccattggcgcccaaccagggactcgaaagcgaaagttacagagaagttctctcgacgcaggactcggcttgctgaggtgcacacagcaagaggcgagagcggcgactggtgagtacgcctaaaatttttgactagcagaggctagaaggagagagcgactcggaccgatg

SEQ ID NO: 10083 - DNA, 203 bp, synthetic construct
  source 1..203: mol_type = other DNA
ggcgcgccagtccttgttcgcagaaaatctctagcagtggcgcccgaacagggacgcgaaagcgaaagtagaaccagaggagatctctcgacgcaggactcggcttgctgaagtgcactcggcaggaggcgagagcggcggctggtgagtacgccaatttttgactagtggaggctagaaggagagagcgactcggaccgatg

SEQ ID NO: 10084 - DNA, 203 bp, synthetic construct
  source 1..203: mol_type = other DNA
ggcgcgccagtccttagtaatggaaaatctctagcagtggcgcccgaacagggacttgaaagcgaaagtagaaccagagaagatctctcgacgcaggactcggcttgctgaagtgcacacggcaagaggcgagagcggcgactggtgagtacgccaaattttgactagcagaggctagaaggagagagcgactcggaccgatg

SEQ ID NO: 10085 - DNA, 203 bp, synthetic construct
  source 1..203: mol_type = other DNA
ggcgcgccagtccttcattcctgaacagggaccggaagagaaagtgaaaccagggaagaaaacctccgacgcgacgggctcggcttagcggagtgcacccgctaagaggcgagaggactcacagaggtgagtagttttgctggcggtggccagacctaggggaagggcgaagtctctaggggaggaggcgactcggaccgatg

SEQ ID NO: 10086 - DNA, 203 bp, synthetic construct
  source 1..203: mol_type = other DNA
ggcgcgccagtcctgtaaaccggaacagggacctgaaaagcgaaagtaaaagggactcgaaagcggcggttccagagaagttctctcgacgcaagactcggcttgctgagtgcacacggcaagaggcgagaagcggcgactggtgagtacgccaaattttttgactagcggaggctagaaggagagagcgactcggaccgatg

SEQ ID NO: 10087 - DNA, 203 bp, synthetic construct
  source 1..203: mol_type = other DNA
ggcgcgccagtccttctcagtcgaacagggacttgaaaagcgaaagtaaaagggactcgaaagcggaagttccagagaagttctctcgacgcaggactcggcttgctgagtgcacacagcaagaggcgaggagcggcgactggtgagtacgccaaaatttttgactagcggaggctagaaggagagagcgactcggaccgatg

SEQ ID NO: 10088 - DNA, 203 bp, synthetic construct
  source 1..203: mol_type = other DNA
ggcgcgccagtcctcgaagatggaacagggacttgaaaagcgaaagtaatagggactcgaaagcggaagttccagagaagttctctcgacgcaggactcggcttgctgaggtgcacaaagcaagaggcgagagcggcgactggtgagtacgccaaaatttttgactagcggaggctagaaggagagagcgactcggaccgatg

SEQ ID NO: 10089 - DNA, 203 bp, synthetic construct
  source 1..203: mol_type = other DNA
ggcgcgccagtccttcctcttagaacagggacttgaaagcgaaagtaatagggactcgaaaacgaaagttccagagaagaagctctcttgacgcaggactcggcttgctgaggtgcacacagcaagaggcgagagcggcgactggtgagtacgccattttttgactagcggaggctagaaggagagagcgactcggaccgatg

SEQ ID NO: 10090 - DNA, 203 bp, synthetic construct
  source 1..203: mol_type = other DNA
ggcgcgccagtccttgatggcggaacagggacttgaaagcgaaagttaaaagggactcgaaagcgaaagttccagagaagttctctcgacgcaggactcggcttgctgaggtgcacacagcaagaggcgagagcggcgactggtgagtacgccaaactttttgactagcggaggctagaaggagagagcgactcggaccgatg

SEQ ID NO: 10091 - DNA, 203 bp, synthetic construct
  source 1..203: mol_type = other DNA
ggcgcgccagtccttttgatgagaacagggacttgaaagtgaaagttaaaagggactcgaaagcggaagttccagagaagttctctcgacgcaggactcggcttgctgaggtgcacacagcaagaggcgagagcggcgactggtgagtacgccaaactttttgactagcggaggctagaaggagagagcgactcggaccgatg

SEQ ID NO: 10092 - DNA, 203 bp, synthetic construct
  source 1..203: mol_type = other DNA
ggcgcgccagtcctcacgtcaggaacagggacttgaaagtgaaagttaatagggactcgaaagcgaaagttccagagaagttctctcgacgcaggactcggcttgctgaggtgcacacagcaagaggcgagagcggcgactggtgagtacgccaaactttttgactagcggaggctagaaggagagagcgactcggaccgatg

SEQ ID NO: 10093 - DNA, 203 bp, synthetic construct
  source 1..203: mol_type = other DNA
ggcgcgccagtcctgctaagtagaagaactccgtcctgagagggaaaaaagctgatgaattagaaagaattaggttacggcccggcggaaagaaaaaatacagagtaaaacatgttgtgtgggcagcgaacgaattggacagattcggattaacagaaagcctgttggaatcaaaagagggttgccaacgactcggaccgatg

SEQ ID NO: 10094 - DNA, 203 bp, synthetic construct
  source 1..203: mol_type = other DNA
ggcgcgccagtcctagtcatctgactctggtaatactctggtaactagagatccctcagacccttgttggttgcgtggaaaatctctagcagtggcgcccgaacagggacttgaaagcgaaagtaaaaccagaggagatctctcgacgcaggactcggcttgctgaagtgcactcggcaagaggcgagcgactcggaccgatg

SEQ ID NO: 10095 - DNA, 203 bp, synthetic construct
  source 1..203: mol_type = other DNA
ggcgcgccagtcctaaatcgacgagaaactccgtcttgtcagggaagaaagcagatgaattagaaaaaattaggttacggcccaacggaaagaaaaagtacatgttgaagcatgtagtatgggcagcaaacgaattggacagatttggattagcagaaagcctgttggagaccaaagaaggttgtcaacgactcggaccgatg

SEQ ID NO: 10096 - DNA, 203 bp, synthetic construct
  source 1..203: mol_type = other DNA
ggcgcgccagtccttccgtaatgagaaactccgtcttgtcagggaagaaagcagatgaattagaaaaaattaggttacggcccaacggaaagaaaaagtatatgttgaagcatgtagtatgggcagcaaatgaattggatagatttggattagcagaaagcctgttggataacaaagaaggttgtcaacgactcggaccgatg

SEQ ID NO: 10097 - DNA, 203 bp, synthetic construct
  source 1..203: mol_type = other DNA
ggcgcgccagtcctgaggcaccgagaaactccgtcttgtcagggaagaaagcagatgaattagaaaaaattaggttacggcccggcggaaagaaaaggtacaagctgaagcatatagtatgggcagcaaatgaattggacagatttggattagcagaaagcctgttggagaacaaagaaggttgtcaacgactcggaccgatg

SEQ ID NO: 10098 - DNA, 203 bp, synthetic construct
  source 1..203: mol_type = other DNA
ggcgcgccagtccttcgagtctgagaaactccgtcttgtcagggaaggaagcagatgaattagaaaaagttaggttacggcccaacggaaagaaaaagtatatgttgaagcatgtagtatgggcagcaaatgaattggacagatttggattagcagaaagcctgttggataacaaagaaggttgtcaacgactcggaccgatg

SEQ ID NO: 10099 - DNA, 203 bp, synthetic construct
  source 1..203: mol_type = other DNA
ggcgcgccagtcctattagcgggagaggctccgtcttgtcagggaagaaaacagatgaattagaaaaagttaggttacggcccggcggaaagaaaaaatattgtctaaagcatatagtatgggcagtgaacgaattggacagatatggattagcagagagcctgttggagtcaaaagaaggatgtcaccgactcggaccgatg

SEQ ID NO: 10100 - DNA, 203 bp, synthetic construct
  source 1..203: mol_type = other DNA
ggcgcgccagtcctagatatcagagaggctccgtcttgtcagggaagaagacagatgaattagaaaaggttaggttacggcccggcggaaagaaaagatacatgctaaaacatatagtatgggcagtgaatgaattagagagatttggattggcagagagccggttgggatcaaaagaaggatgccggcgactcggaccgatg

SEQ ID NO: 10101 - DNA, 203 bp, synthetic construct
  source 1..203: mol_type = other DNA
ggcgcgccagtcctctccataggcagtggcgcccgaacagggaccggaaatatagggactcgaaagcgaaagttccagagaagatctctcgacgcaggactcggcttgctgaggtgcacgcagcaagaggcgagagcggcgactggtgagtacgccaattttgactagcggaggctagaaggagagagcgactcggaccgatg

SEQ ID NO: 10102 - DNA, 203 bp, synthetic construct
  source 1..203: mol_type = other DNA
ggcgcgccagtcctttggttgcgcccgaacagggacgttcggactgagagacagggagcgtggcccctggacgcaggactcggcttgtgacagcgcaatcacaagaggcgaggcggactccggtggtgagtactaatttgttgtcggtgggcaaccctagaggaaggacgaagtctctaggtcaggggcgactcggaccgatg

SEQ ID NO: 10103 - DNA, 203 bp, synthetic construct
  source 1..203: mol_type = other DNA
ggcgcgccagtcctcgaacttagcccgtctgttatttgactctggtaactagagatccctcagaccactatagactgtgtaaaaatctctagcagtggcgcccgaacagggactcgaaagcgaaagttccagagaagttctctcgacgcaggactcggcttgctgaggtgcacacagcaagaggcgagcgactcggaccgatg

SEQ ID NO: 10104 - DNA, 203 bp, synthetic construct
  source 1..203: mol_type = other DNA
ggcgcgccagtcctgatacttggcccgtctgttgtgtgactctggtaactagagatccctcagaccactctagaaggtgtaaaaatctctagcagtggcgcccgaacagggactcgaaagcgaaagttccagaggagttctctcgacgcaggactcggcttgctgaggtgcacacagcaagaggcgagcgactcggaccgatg

SEQ ID NO: 10105 - DNA, 203 bp, synthetic construct
  source 1..203: mol_type = other DNA
ggcgcgccagtccttttctgcagcccgtctgttgtgtgactctggtaactagagatccctcagaccactctaggcggtgtaaaaatctctagcagtggcgcccgaacagggacttgaaagcgaaagttccagagaagttctctcgacgcagggctcggcttgctgaggtgcacacagcaagaggcgagcgactcggaccgatg

SEQ ID NO: 10106 - DNA, 203 bp, synthetic construct
  source 1..203: mol_type = other DNA
ggcgcgccagtcctattagaaaggaaaatctctagcagtggcgcccgaacagggacttgaaagcgaaagtagaaccagagaagatctctcgacgcaggactcggcttgctgaagtgcacacggcaagaggcgagagcggcgactggtgagtacgccaatttttgactagcggaggctagaaggagaggcgactcggaccgatg

SEQ ID NO: 10107 - DNA, 203 bp, synthetic construct
  source 1..203: mol_type = other DNA
ggcgcgccagtcctaaactaggggacagattcggattaacagagagcctgttggagtcaaaagaaggttgccaaaaaattatttcagttttagaaccattagtaccaacagggtcagaaaatttaaaaagcctttataatactacctgcgtcatttggtgcttgcacgcagaagagaaagtgaaagatcgactcggaccgatg

SEQ ID NO: 10108 - DNA, 203 bp, synthetic construct
  source 1..203: mol_type = other DNA
ggcgcgccagtcctgacccaacggacagatttggattagcagaaagcctgttggagaccaaagacggttgtcaaagaattctttcagttttagctccattagttccgacaggttcagaaaatttaaagagcctttataatactgtctgcgtcatttggtgcttgcacgcagaagagaaagtgagacatcgactcggaccgatg

SEQ ID NO: 10109 - DNA, 203 bp, synthetic construct
  source 1..203: mol_type = other DNA
ggcgcgccagtcctatctcaatggacagatttggattggcagaaagcctgttggagtcaaaagaagggtgtcaaaaaattataacggtcttagaaccattagtgccaacaggttcagaaaatttaaagagtctttttaatactgtctgcgtcatttggtgtatccacgcagaagagaaagtgaaacatcgactcggaccgatg

SEQ ID NO: 10110 - DNA, 203 bp, synthetic construct
  source 1..203: mol_type = other DNA
ggcgcgccagtcctgacgataaggatagatttggattggcagaaagcctgttggaaagtaaagaaggctgtcaaaaaatactttcggttttagctccattagtgccaacaggttcagaaaatttaaagagcctttataatactgtctgcgtcatttggtgcttgcacgcagaagagaaagtgaaacatcgactcggaccgatg

SEQ ID NO: 10111 - DNA, 203 bp, synthetic construct
  source 1..203: mol_type = other DNA
ggcgcgccagtcctcgttacccggcgcccgaacagggacttggagttaatagggactcgaaagcgaaagtgccagagaagatctctcgacgcagggactcggcttgctgaagtgcacacagcaagaggcgagagcggcgactggtgagtacgccaaaattttgactagcggaggctagaaggagagagcgactcggaccgatg

SEQ ID NO: 10112 - DNA, 203 bp, synthetic construct
  source 1..203: mol_type = other DNA
ggcgcgccagtccttgtattccgggacttgaaagtgaaagtaaaaccggaggctgaatctctcgacgcacggactcggcttgctgagtgcacgcagcaagaggcgaggcggcgactcaagtggtgagtacgcaattttgctagcggtggctagacctagaggaagggcgaagtctctagggggagaagcgactcggaccgatg

SEQ ID NO: 10113 - DNA, 203 bp, synthetic construct
  source 1..203: mol_type = other DNA
ggcgcgccagtcctgtcgggagggtaactagagatccctcagaccactctaaatagtgtaaaatctctagcagtggcgcccgaacagggacttgaaagcgaaagtaacagggactcgaaagcgaaagttccagagaagttctctcgacgcaggactcggcttgctgggtgcacacagcaagaggcgagcgactcggaccgatg

SEQ ID NO: 10114 - DNA, 203 bp, synthetic construct
  source 1..203: mol_type = other DNA
ggcgcgccagtcctcgaaaggagtaaaaatctctagcagtggcgcccgaacagggactcgaaagcgaaagtgttccagagaagttctctcgacgcaggactcggcttgctgaggtgcacacagcaagaggcgagagcggcgactggtgagtacgccttttttgactagcggaggctagaaggagagagcgactcggaccgatg

SEQ ID NO: 10115 - DNA, 203 bp, synthetic construct
  source 1..203: mol_type = other DNA
ggcgcgccagtcctagaggtccgtaactagagatccctcagaccactctaggtagtgtaaaaatctctagcagtggcgcccgaacagggacttgaaagcgaaagtaaaagggactcgaaagcggaagttccagagaagttctcttgacgcaggactcggcttgctgagtgcacacagcaagaggcgagcgactcggaccgatg

SEQ ID NO: 10116 - DNA, 203 bp, synthetic construct
  source 1..203: mol_type = other DNA
ggcgcgccagtcctggcgcattgtaactagagatccctcagaccattttggtagtgtggaaaatctctagcagtggcgcccgaacagggacttgaaagcgaaagtaatagggactcgaaagcgaaagttccagagaagttctctcgacgcaggactcggcttgctgaagtgcactcggcagaggcgagcgactcggaccgatg

SEQ ID NO: 10117 - DNA, 203 bp, synthetic construct
  source 1..203: mol_type = other DNA
ggcgcgccagtcctcgttgtgtgtctggtatttgactctggtaactagagatccctcagacccctttagtcagtgtggaaaatctctagcagtggcgcccgaacagggacccgaaagcgaaagtagaaccagaggagatctctcgacgcaggactcggcttgctgaagcgcgcacagcaagaggcgagcgactcggaccgatg

SEQ ID NO: 10118 - DNA, 203 bp, synthetic construct
  source 1..203: mol_type = other DNA
ggcgcgccagtcctgaattaatgtctgttgtgtgactctggtaactagagacccctcagacccttttagccagtgtggaaaatctctagcagtggcgcccgaacagggactagaaagcgaaagtagaaccagaggagctctctcgacgcaggactcggcttgctgaagcgcgcacggcaagaggcgagcgactcggaccgatg

SEQ ID NO: 10119 - DNA, 203 bp, synthetic construct
  source 1..203: mol_type = other DNA
ggcgcgccagtcctccgtccgcgtctgttgtgtgactctggtaactagagatccctcagaacattttagtccgggtggaaaatctctagcagtggcgcccgaacagggacgcgaaagcgaaagtagaaccagagaagatctctcgacgcaggactcggcttgctgaagtgcacacggcaagaggcgagcgactcggaccgatg

SEQ ID NO: 10120 - DNA, 203 bp, synthetic construct
  source 1..203: mol_type = other DNA
ggcgcgccagtcctcgacggcagtctgttgtgtgactctggtaactagagatccctcagaacctattagtcagtgtggaaaatctctagcagtggcgcccgaacagggacctgaaagcgaaagtgagaccagaggagctctctcgacgcaggactcggcttgctgaagcgcgcacagcaagaggcgagcgactcggaccgatg

SEQ ID NO: 10121 - DNA, 203 bp, synthetic construct
  source 1..203: mol_type = other DNA
ggcgcgccagtcctgggttgcggtctgttgtgtgactctggtaactagagatccctcagacacattttgtccgtgtggaaaatctctagcagtggcgcccgaacagggacttgaaagcgaaagtaagaccagaggagatctctcgacgcaggactcggcttgctgaagtgcactcggcaagaggcgagcgactcggaccgatg

SEQ ID NO: 10122 - DNA, 203 bp, synthetic construct
  source 1..203: mol_type = other DNA
ggcgcgccagtcctgctagtatgtctgttgtgtgactctggtaactagagatccctcagacacttgtagtcagtgtggaaaatctctagcagtggcgcccgaacagggacttgaaagcgacagtagaaccagaggagctctctcgacacaggactcggcttgctgaagcgcgcacggcaagaggcgagcgactcggaccgatg

SEQ ID NO: 10123 - DNA, 203 bp, synthetic construct
  source 1..203: mol_type = other DNA
ggcgcgccagtcctaagcctcggtctgttgtgtgactctggtaactagagatccctcagacatttgtagtcagtgtggaaaatctctagcagtggcgcccgaacagggacttgaaaacgaaagtagaaccagaggagatctctcgacgcaggactcggcttgctgaagcgcgcacagcaagaggcgagcgactcggaccgatg

SEQ ID NO: 10124 - DNA, 203 bp, synthetic construct
  source 1..203: mol_type = other DNA
ggcgcgccagtcctagggagtcgtctgttgtgtgactctggtaactagagatccctcagaccaactttggtagtgtggaaaatctctagcagtggcgcccgaacagggacttgaaagcgaaagtaagaccagagaagatctctcgacgcaggactcggcttgctgaagtgcactcggcaagaggcgagcgactcggaccgatg

SEQ ID NO: 10125 - DNA, 203 bp, synthetic construct
  source 1..203: mol_type = other DNA
ggcgcgccagtcctgttggcatgtctgttgtgtgactctggtaactagagatccctcagaccaatttagtcagggtggaaaatctctagcagtggcgcccgaacagggaccggaaagcgaaagtaaaaccagaggagatctctcgacgcaggactcggcttgctgaagtgcgcacagcaagaggcgagcgactcggaccgatg

SEQ ID NO: 10126 - DNA, 203 bp, synthetic construct
  source 1..203: mol_type = other DNA
ggcgcgccagtcctacacgaccgtctgttgtgtgactctggtaactagagatccctcagaccaatttagtccgtgtggaaaatctctagcagtggcgcccgaacagggacttgaaagcgaaagtagaaccagaggagctctctcgacgcaggactcggcttgctgaagtgcgcacggcaagaggcgagcgactcggaccgatg

SEQ ID NO: 10127 - DNA, 203 bp, synthetic construct
  source 1..203: mol_type = other DNA
ggcgcgccagtcctcttaccgtgtctgttgtgtgactctggtaactagagatccctcagaccatcttagtcagtgtggaaaatctctagcagtggcgcccgaacagggacctgaaagcgaaagtagaaccagagcagatctctcgacgcaggactcggcttgctgaagtgcacacggcaagaggcgagcgactcggaccgatg

SEQ ID NO: 10128 - DNA, 203 bp, synthetic construct
  source 1..203: mol_type = other DNA
ggcgcgccagtccttgagataagtctgttgtgtgactctggtaactagagatccctcagaccattcgtggtagtgtggaaaatctctagcagtggcgcccgaacagggacttgaaagtgaaagtaagaccagaggaaatctctcgacgcaggactcggcttgctgaagtgcactcggcaagaggcgagcgactcggaccgatg

SEQ ID NO: 10129 - DNA, 203 bp, synthetic construct
  source 1..203: mol_type = other DNA
ggcgcgccagtcctaccatcaagtctgttgtgtgactctggtaactagagatccctcagaccatttagtcagtgtggaaaatctctagcagtggcgcccgaacagggacttgaaagcgaaagcagaaccagaggagatctctcgacgcaggactcggcttgctgaaagtgcacgcggcaagaggcgagcgactcggaccgatg

SEQ ID NO: 10130 - DNA, 203 bp, synthetic construct
  source 1..203: mol_type = other DNA
ggcgcgccagtcctggagactagtctgttgtgtgactctggtaactagagatccctcagaccattttagtcagtgtggaaaatctctagcagtggcgcccgaacagggaccagaaagcgaaagtagaaccagaggagatctctcgacgcaggactcggcttgctgaagcgcgcacagcaagaggcgagcgactcggaccgatg

SEQ ID NO: 10131 - DNA, 203 bp, synthetic construct
  source 1..203: mol_type = other DNA
ggcgcgccagtcctagcccagagtctgttgtgtgactctggtaactagagatccctcagaccattttagtcagtgtggaaaatctctagcagtggcgcccgaacagggacgcgaaagcgaaagtagaaccagaggagatctctcgacgcaggactcggcttgctgaggtgcacacagcaagaggcgagcgactcggaccgatg

SEQ ID NO: 10132 - DNA, 203 bp, synthetic construct
  source 1..203: mol_type = other DNA
ggcgcgccagtcctgaaaccctgtctgttgtgtgactctggtaactagagatccctcagacccctttagtcagtgtggaaaatctctagcagtggcgcccgaacagggacttgaaagtgaaagtgagaccagaggagctctctcgacgcaggactcggcttgctgaagcgcgcacagcaagaggcgagcgactcggaccgatg

SEQ ID NO: 10133 - DNA, 203 bp, synthetic construct
  source 1..203: mol_type = other DNA
ggcgcgccagtcctaagtgctcgtctgttgtgtgactctggtaactagagatccctcagacccttaaagtcaatgtggaaaatctctagcagtggcgcccgaacagggacttgaaagtgaaagtaaaaccagagaagctctcttgacgcaggactcggcttgctgaagcgcgcacggcaagaggcgagcgactcggaccgatg

SEQ ID NO: 10134 - DNA, 203 bp, synthetic construct
  source 1..203: mol_type = other DNA
ggcgcgccagtcctacggattagtctgttgtgtgactctggtaactagagatccctcagacccttgtagtcagtgtggaaaatctctagcagtggcgcccgaacagggacctgaaagcgaaagagaaaccagaggagctctctcgacgcaggactcggcttgctgaagcgcgcacagcaagaggcgagcgactcggaccgatg

SEQ ID NO: 10135 - DNA, 203 bp, synthetic construct
  source 1..203: mol_type = other DNA
ggcgcgccagtcctcgatgcgcgtctgttgtgtgactctggtaactagagatccctcagacccttttagtcagtgtggaaaatctctagcagtggcgcccgaacagggacccgaaagcgaaagtagaaccaggggagctctctcgacgcaggactcggcttgctgaaacgcgcgcggcaagaggcgagcgactcggaccgatg

SEQ ID NO: 10136 - DNA, 203 bp, synthetic construct
  source 1..203: mol_type = other DNA
ggcgcgccagtcctccttatctgtctgttgtgtgactctggtaactagagatccctcagacccttttagtcagtgtggaaaatctctagcagtggcgcccgaacagggacttgaaagcgaaagagaaaccggagaagatctctcgacgcaggactcggcttgctgaagcgcgcacggcaagaggcgagcgactcggaccgatg

SEQ ID NO: 10137 - DNA, 203 bp, synthetic construct
  source 1..203: mol_type = other DNA
ggcgcgccagtcctatccgcgtgtctgttgtgtgactctggtaactagagatccctcagacccttttagtcagtgtggaaaatctctagcagtggcgcccgaacagggacttgaaagcgaaaggaaaaccagaggagctctctcgacgcaggactcggcttgctgaagcgcgcacggcaagaggcgagcgactcggaccgatg

SEQ ID NO: 10138 - DNA, 203 bp, synthetic construct
  source 1..203: mol_type = other DNA
ggcgcgccagtcctcacgctgggtctgttgtgtgactctggtaactagagatccctcagacccttttagtcagtgtggaaaatctctagcagtggcgcccgaacagggacttgaaagcgaaagtgagaccagaggagctctctcgacgcagggctcggcttgctgaagcgtgcgcagcaagaggcgagcgactcggaccgatg

SEQ ID NO: 10139 - DNA, 203 bp, synthetic construct
  source 1..203: mol_type = other DNA
ggcgcgccagtcctcgtcagtagtctgttgtgtgactctggtaactagagatccctcagacccttttagtcagtgtggaaaatctctagcagtggcgcccgaacagggacttgaaagtgaaagtaagaccagaggagctctctcgacgcaggactcggcttgctgaagcgcgcacagcaagaggcgagcgactcggaccgatg

SEQ ID NO: 10140 - DNA, 203 bp, synthetic construct
  source 1..203: mol_type = other DNA
ggcgcgccagtcctcatcccacgtctgttgtgtgactctggtaactagagatccctcagacccttttagtcagtgtggagaatctctagcagtggcgcccgaacagggacttgaaagcgaaagagaaaccagaggagctctctcgacgcaggactcggcttgctgaaacgcgcgcggcaagaggcgagcgactcggaccgatg

SEQ ID NO: 10141 - DNA, 203 bp, synthetic construct
  source 1..203: mol_type = other DNA
ggcgcgccagtcctgtattcacgtctgttgtgtgactctggtaactagagatccctcagacccttttagtccgtgtggaaaatctctagcagtggcgcccgaacagggacccgaaagcgaaagtagaaccagaggagctctctcgacgcaggactcggcttgctgaagcgcgcgcggcaagaggcgagcgactcggaccgatg

SEQ ID NO: 10142 - DNA, 203 bp, synthetic construct
  source 1..203: mol_type = other DNA
ggcgcgccagtcctagaccctggtctgttgtgtgactctggtaactagagatccctcagaccctttttggtagtgtggaaaatctctagcagtggcgcccgaacagggacttgaaagcgaaagtaagaccagagcagatctctcgacgcaggactcggcttgctgaagtgcactcggcaagaggcgagcgactcggaccgatg

SEQ ID NO: 10143 - DNA, 203 bp, synthetic construct
  source 1..203: mol_type = other DNA
ggcgcgccagtcctagtcgagggtctgttgtgtgactctggtaactagagatccctcagacctcggtagtcagtgtagaaaatctctagcagtggcgcccgaacagggacctgaaagcgaaagtagaaccagaggagctctctcgacgcaggactcggcttgctgaagcgtgcacggcaagaggcgagcgactcggaccgatg

SEQ ID NO: 10144 - DNA, 203 bp, synthetic construct
  source 1..203: mol_type = other DNA
ggcgcgccagtcctgcaattccgtctgttgtgtgactctggtaactagagatccctcagacctctttagtcagtgtggaaaatctctagcagtggcgcccgaacagggacctgaaaagcgaaagtaaaaccagagaagctctctcgacgcaggactcggcttgctgagcgcgcacggcaagaggcgagcgactcggaccgatg

SEQ ID NO: 10145 - DNA, 203 bp, synthetic construct
  source 1..203: mol_type = other DNA
ggcgcgccagtccttgaccattgtctgttgtgtgactctggtaactagagatccctcagacctctttagtcagtgtggaaaatctctagcagtggcgcccgaacagggacttgaaagcgaaagtaaaaccagagaagatctctcgacgcaggactcggcttgctgaagcgcgcacagcaagaggcgagcgactcggaccgatg

SEQ ID NO: 10146 - DNA, 203 bp, synthetic construct
  source 1..203: mol_type = other DNA
ggcgcgccagtcctgcttgagggtctgttgtgtgactctggtaactagagatccctcagactcttttagtcagtgtggaaaatctctagcagtggcgcccgaacagggacttgaaagcgaaagggaaaccagaggagctctctcgacgcaggactcggcttgctgaagcgcgcacggcaagaggcgagcgactcggaccgatg

SEQ ID NO: 10147 - DNA, 203 bp, synthetic construct
  source 1..203: mol_type = other DNA
ggcgcgccagtcctgttcgcgagtctgttgtgtgactctggtagctagagatccctcagaccatcctagttagtgtagaaaatctctagcagtggcgcccgaacagggaccggaaagcgaaagagaaaccagaggagatctctcgacgcaggactcggcttgctgaagcgcgcacagcaagaggcgagcgactcggaccgatg

SEQ ID NO: 10148 - DNA, 203 bp, synthetic construct
  source 1..203: mol_type = other DNA
ggcgcgccagtcctccaaccaggtctgttgtgtgactctggtagctagagatccctcagatccttttagttagcgtagaaaatctctagcagtggcgcccgaacagggacgcgaaagcgaaagtagaaccagagaagatctctcgacgcaggactcggcttgctgaagcgcgcacggcaagaggcgagcgactcggaccgatg

SEQ ID NO: 10149 - DNA, 203 bp, synthetic construct
  source 1..203: mol_type = other DNA
ggcgcgccagtcctaggccaaggtctgttgtgtgactctggtagctagagatccctcatacccttttagtcagtgtggaaaatctctagcagtggcgcccgaacagggaccggaaagcgaaagagaaaccagaggagctctctcgacgcaggactcggcttgctgaagcgcgcacggcaagaggcgagcgactcggaccgatg

SEQ ID NO: 10150 - DNA, 203 bp, synthetic construct
  source 1..203: mol_type = other DNA
ggcgcgccagtcctctgtcagtgtctgttgtgtgactctggtatctagagatccctcagaccctattagtcagtgtggaaaatctctagcagtggcgcccgaacagggacctaaaagcgaaagtaaaaccagaggagatctctcgacgcaggactcggcttgctgaagcgcgcacggcaagaggcgagcgactcggaccgatg

SEQ ID NO: 10151 - DNA, 203 bp, synthetic construct
  source 1..203: mol_type = other DNA
ggcgcgccagtcctgtctacttgtctgttgtgtggctctggtaactagagatccctcagacccttgttggtagtgcggaaaatctctagcagtggcgcccgaacagggacctgaaagcgaaagtaagaccagaggagatctctcgacgcagggctcggcttgctgaagtgcactcggcaagaggcgagcgactcggaccgatg

SEQ ID NO: 10152 - DNA, 203 bp, synthetic construct
  source 1..203: mol_type = other DNA
ggcgcgccagtcctaagaggatgtctgttgtgtggctctggtaactagagatccctcagacccttgttggtattgtggcaaatctctagcagtggcgcccgaacagggacttgaaaacgaaagtagaaccagaggagatctcccgacgcaggactcggcttgctgaagtgcactcggcaagaggcgagcgactcggaccgatg

SEQ ID NO: 10153 - DNA, 203 bp, synthetic construct
  source 1..203: mol_type = other DNA
ggcgcgccagtcctgagtacctgtctgttgtttgactctggtaactagagatccctcagaccattttagtcagtgtggaaaatctctagcagtggcgcccgaacagggacctgaaagcgaaagtgagaccagagaagctctcttgacgcagtactcggcttgctgaagcgcgcacagcaagaggcgagcgactcggaccgatg

SEQ ID NO: 10154 - DNA, 203 bp, synthetic construct
  source 1..203: mol_type = other DNA
ggcgcgccagtcctggtagattgtctgttgtttgactctggtaactagagatccctcagaccattttagtcagtgtggaaaatctctagcagtggcgcccgaacagggacttgaaagcgaaagtagaaccagagaagatctctcgacgcaggactcggcttgctgaagtgcacacggcaagaggcgagcgactcggaccgatg

SEQ ID NO: 10155 - DNA, 203 bp, synthetic construct
  source 1..203: mol_type = other DNA
ggcgcgccagtcctcggccgttgtctgttttgtgactctggtaactagagatccctcagacaccttttgtcagtgtggaaaatctctagcagtggcgcccgaacagggacttgaaagcgaaagtagaaccagagaagatctctcgacgcagggctcggcttgctgaagtgcactcggcaagaggcgagcgactcggaccgatg

SEQ ID NO: 10156 - DNA, 203 bp, synthetic construct
  source 1..203: mol_type = other DNA
ggcgcgccagtcctgttatccagtgactctggtaactctggtaactagagatccctcagaccctttgtggtagtgtggaaaatctctagcagtggcgcccgaacagggacttgaaagcgaaagtgagaccagagaagatctctcgacgcaggactcggcttgctgaagtgcactcggcaagaggcgagcgactcggaccgatg

SEQ ID NO: 10157 - DNA, 203 bp, synthetic construct
  source 1..203: mol_type = other DNA
ggcgcgccagtcctccaggctagtggcgcccgaacagggaccggaagttaatagggacgcgaaagcgaaagttccagagaagtatctcgacgcacggactcggcttgctgaggtgcacacagcaagaggcgagagcggcgactggtgagtacgccaatttttgactagcggaggctagaaggagagagcgactcggaccgatg

SEQ ID NO: 10158 - DNA, 203 bp, synthetic construct
  source 1..203: mol_type = other DNA
ggcgcgccagtcctcgtggaaggtggcgcccgaacagggacttgaaagtaatagggactcgaaagcgaaagttccagagaagttctctcgacgcagggactcggcttgctgagtgcacacggcaagaggcgagcgcggcgactggtgagtacgccaaattttgactagcggaggctagaaggagagagcgactcggaccgatg

SEQ ID NO: 10159 - DNA, 203 bp, synthetic construct
  source 1..203: mol_type = other DNA
ggcgcgccagtcctctcagctggtgtgcccatctcattccgcgccggccctggggtagagatccctcagatctctgaaggctaagcaaaaatctctaccagtggcgcccgaacagggacttgagaagcaggggacgcggaacccttgacgccaggactcggcttgtgctgcgcaacacaagaggcgagcgactcggaccgatg

SEQ ID NO: 10160 - DNA, 203 bp, synthetic construct
  source 1..203: mol_type = other DNA
ggcgcgccagtcctgagtaaacgtgtgcccatttcataccgcgtctgccctggggtagagatccctcagatttgtagtggctaagtaaaaatctctaccagtggcgcccgaacagggacttgagaagcagggaacgcggcccctggacgcaggactcggcttgtgacagcgcaatcacaagaggcgagcgactcggaccgatg

SEQ ID NO: 10161 - DNA, 203 bp, synthetic construct
  source 1..203: mol_type = other DNA
ggcgcgccagtcctctgatattgtgtgcccatttcatatcgcgtttgccctggggtagagatccctcagatttgtagtggctaagtaaaaatctctaccagtggcgcccgaacagggacttgaggagcagggaacgcgacccctggacgcaggactcggcttgtgacagcgcaatcacaagaggcgagcgactcggaccgatg

SEQ ID NO: 10162 - DNA, 203 bp, synthetic construct
  source 1..203: mol_type = other DNA
ggcgcgccagtcctggcggctctaacagggacttgtaagcggaagttaacggggactcgaaagcgaaagttccagagaagttctctcgacgcaggactcggcttgctgaagtgcacacagcaagaggcgagagcggcgactggtgagtacgccaaactttttgactagcggaggctagaaggagagagcgactcggaccgatg

SEQ ID NO: 10163 - DNA, 203 bp, synthetic construct
  source 1..203: mol_type = other DNA
ggcgcgccagtcctgtagaggctaactagagatccctcagaccattctaggcagagtaaaaatctctagcagtggcgcccgaacagggacctgaaaagcgaaagtaaaagggactcgaaagcggcggttccagagaagttctctcgacgcaagactcggcttgctgagtgcacacggcaagaggcgagcgactcggaccgatg

SEQ ID NO: 10164 - DNA, 203 bp, synthetic construct
  source 1..203: mol_type = other DNA
ggcgcgccagtcctctaaatgttactagagatccctcagaccactctagactgtgtaaaaatctctagcagtggcgcccgaacagggactcgaaagcgaaagttaatagggactcgaaagcggaagttccagagaagttctctcgacgcaggactcggcttgctgaggtgcacacagcaagaggcgagcgactcggaccgatg

SEQ ID NO: 10165 - DNA, 203 bp, synthetic construct
  source 1..203: mol_type = other DNA
ggcgcgccagtcctctgctccttagacagaataaaaatctctagcagtggcgcccgaacagggacttgaaaacgaaagttaacagggacttgtaagcggaagttaacggggactcgaaagcgaaagttccagagaagttctctcgacgcaggactcggcttgctgaagtgcacacagcaagaggcgagcgactcggaccgatg

SEQ ID NO: 10166 - DNA, 203 bp, synthetic construct
  source 1..203: mol_type = other DNA
ggcgcgccagtccttagctctgtagcagtggcgcccgaacagggacccgaaagcgaaagtagaaccagaggagatctctcgacgcaggactcggcttgctgaagcgcgcacggcaagaggcgaggggcggcgactggtgagtacgccaaaagaaaaatttttgactagcggaggctagaaggagagagcgactcggaccgatg

SEQ ID NO: 10167 - DNA, 203 bp, synthetic construct
  source 1..203: mol_type = other DNA
ggcgcgccagtcctccagtggttagcagtggcgcccgaacagggacctgaaagcgaaagtagaaccagagaagatctctcgacgcaggactcggcttgctgaaagcgcgctcggcaagaggcgaggggcggcggactggtgagtacgccaaaaataaattttgactagcggaggctagaaggagagagcgactcggaccgatg

SEQ ID NO: 10168 - DNA, 203 bp, synthetic construct
  source 1..203: mol_type = other DNA
ggcgcgccagtccttatccatgtagcagtggcgcccgaacagggacttgaaaacgaaagtagaaccagaggagatctctcgacgcaggactcggcttgctgaagcgcgcacagcaagaggcgaggggaggcgactggtgagtacgccaaaaataaaatttttgactagcggaggctagaaggagagagcgactcggaccgatg

SEQ ID NO: 10169 - DNA, 203 bp, synthetic construct
  source 1..203: mol_type = other DNA
ggcgcgccagtcctggaacgcctatccttcagtgactctggtaactagagatccctcagaactcttaaaagtaggtgaaaatctctagcagtggcgcccgaacagggacttgaaaacgaaagtacaaccagaggctgaaacttccgacgcgggactcggctcgctgagtgcacacagcgagaggcgagcgactcggaccgatg

SEQ ID NO: 10170 - DNA, 203 bp, synthetic construct
  source 1..203: mol_type = other DNA
ggcgcgccagtccttacaggcatccattcggtaactctggtacctagagatccctcagaccacttgggctgagtagaaaatctctagcagtggcgcccgaacagggacttgaaaacgaaagtagaaccggaggctgaaatctctcgacgcaggactcggctcgttgggtgcacacagcgagaggcgagcgactcggaccgatg

SEQ ID NO: 10171 - DNA, 203 bp, synthetic construct
  source 1..203: mol_type = other DNA
ggcgcgccagtccttggttcaatctagcagtggcgcccgaacagggacttgaagaaagtaaaaccagaggagatctctcgacgcaggactcggcttgctgaagaagaagcgcgcgcggcaagaggcgaggggcggcgactggtgagtacgcctaaaaattttgactagcggaggctagaaggagagagcgactcggaccgatg

SEQ ID NO: 10172 - DNA, 203 bp, synthetic construct
  source 1..203: mol_type = other DNA
ggcgcgccagtcctaccttacgtctctagcagtggcgcccgaacagggacccgaaagcgaaagtaagaccagagaagatctctcgacgcaggactcggcttgctgaagtgcactcggcaagaggcgaggggcggcggctggtgagtacgccaaattttatttgactagcggaggctagaaggagagagcgactcggaccgatg

SEQ ID NO: 10173 - DNA, 203 bp, synthetic construct
  source 1..203: mol_type = other DNA
ggcgcgccagtcctgcgaggagtctctagcagtggcgcccgaacagggacccgaaagcgaaagtagaaccagagaagatctctcgacgcaggactcggcttgctgaagtgcactcggcaagaggcgagagcggcggctggtgagtacgccaaatttttatttgactagcggaggctagaaggagagagcgactcggaccgatg

SEQ ID NO: 10174 - DNA, 203 bp, synthetic construct
  source 1..203: mol_type = other DNA
ggcgcgccagtcctgcacaggatctctagcagtggcgcccgaacagggacctgaaagcgaaagtaagaccggaggagatctctcgacgcaggactcggcttgctgaagtgcactcggcaagaggcgaaaggggcggctggtgagtacgccaaatttttatttgactagcggaggctaaaaggagagagcgactcggaccgatg

SEQ ID NO: 10175 - DNA, 203 bp, synthetic construct
  source 1..203: mol_type = other DNA
ggcgcgccagtcctgggtccgatctctagcagtggcgcccgaacagggacctgaaagcgaaagtgagaccagaggagctctctcgacgcaggactcggcttgctgaagcgcgcacagcaagaggcgagagcggcgactggtgagtacgccaaaaaattttgtgactagcggaggctagaaggagagagcgactcggaccgatg

SEQ ID NO: 10176 - DNA, 203 bp, synthetic construct
  source 1..203: mol_type = other DNA
ggcgcgccagtcctatcggtattctctagcagtggcgcccgaacagggacttgaaaacgaaagtaagaccagagaagaactctcgacgcaggactcggcttgctgaagtgcactcggcaagaggcgaggggaggcgactggtgagtacgccaaattttatttgactagcggaggctagaaggagagagcgactcggaccgatg

SEQ ID NO: 10177 - DNA, 203 bp, synthetic construct
  source 1..203: mol_type = other DNA
ggcgcgccagtcctgtaactgctctctagcagtggcgcccgaacagggacttgaaagcgaaagtaaaaccagaggagatctctcgacgcaggactcggcttgctgaagtgcactcggcgagaggcgagagcggcggctggtgagtacgccaaattttattttgactagcggaggctagaaggagagagcgactcggaccgatg

SEQ ID NO: 10178 - DNA, 203 bp, synthetic construct
  source 1..203: mol_type = other DNA
ggcgcgccagtcctgatcgccgtctctagcagtggcgcccgaacagggacttgaaagtgaaagtagaaccagaggagctctctcgacgcaggactcggcttgctgaagcgcgcacggcaagaggcgaggggcggcgaccggtgagtacgccaaaaaatttttgactagcggaggctagaaggagagagcgactcggaccgatg

SEQ ID NO: 10179 - DNA, 203 bp, synthetic construct
  source 1..203: mol_type = other DNA
ggcgcgccagtcctccacaccatctctcgcagtggcgcccgaacagggacttgaaagcgaaagtagaaccagaggagctctcccgacgcaggacttggcttgctgaagcgcgcacagcaagaggcgaggggtagcgactggtgagtacgctaaaaattttttgactagcagaggctagaaggggaaagcgactcggaccgatg

SEQ ID NO: 10180 - DNA, 203 bp, synthetic construct
  source 1..203: mol_type = other DNA
ggcgcgccagtcctggtatagctctggtaactagagatccctcagaccactttagactgtgtaaaaatctctagcagtggcgcccgaacagggacttgaagttaatagggactcgaaagcgaaagttccagagaagatctctcgacgcacggactcggcttgctgaggtgcacacagcaagaggcgagcgactcggaccgatg

SEQ ID NO: 10181 - DNA, 203 bp, synthetic construct
  source 1..203: mol_type = other DNA
ggcgcgccagtcctgatcttattctggtaactagagatccctcagaccactttagattgagtaaaaatctctagcagtggcgcccgaacagggacctgaagttaatagggactcgaaagcgaaagttccagagaagatctctcgacgcgaggactcggcttgctgaggtgcacacagcaagaggcgagcgactcggaccgatg

SEQ ID NO: 10182 - DNA, 203 bp, synthetic construct
  source 1..203: mol_type = other DNA
ggcgcgccagtccttaatccagtctggtaactagagatccctcagaccattctagacggtgtaaaaatctctagcagtggcgcccgaacagggaccggaagttaatagggactcgaaaacgaaagttccagagaagatctctcgacgcacggactcggcttgctgaggtgcacacagcaagaggcgagcgactcggaccgatg

SEQ ID NO: 10183 - DNA, 203 bp, synthetic construct
  source 1..203: mol_type = other DNA
ggcgcgccagtcctgactaatatctggtaactagagatccctcagaccattttagcttgagtagaaatctctagcagtggcgcccgaacagggacttgaagttaatagggactcgaaagcgaaagttccagagaagctctcttgacgcagagactcggcttgctgaggtgcacacagcaagaggcgagcgactcggaccgatg

SEQ ID NO: 10184 - DNA, 203 bp, synthetic construct
  source 1..203: mol_type = other DNA
ggcgcgccagtccttttcgtcctctggtaactagagatccctcagacctttgtagtcactgtagaaaatctctagcagtggcgcccgaacagggacttgaaagtaatagggactcgaaagcgaaagttccagagaagttctctcgacgcagggactcggcttgctgagtgcacacggcaagaggcgagcgactcggaccgatg

SEQ ID NO: 10185 - DNA, 203 bp, synthetic construct
  source 1..203: mol_type = other DNA
ggcgcgccagtcctacgccgactctggtaactagagatccctcagactactttagtcagtgtaaaaatctctagcagtggcgcccgaacagggaccggaagttaatagggactcgaaagcgaaagttccagagaagatctctcgacgcacggactcggcttgctgaggtgcacacagcaagaggcgagcgactcggaccgatg

SEQ ID NO: 10186 - DNA, 203 bp, synthetic construct
  source 1..203: mol_type = other DNA
ggcgcgccagtcctctcaattatctgttcaaccctggtatctagagatccctcagatcacgtagactgaggcagaaaatctctagcagtggcgcccgaacagggacttgaaaaggaaagtgaaaccagggaagaaaacctccgacgcaacgggctcggcttagcggagtgcacccgctaagaggcgagcgactcggaccgatg

SEQ ID NO: 10187 - DNA, 203 bp, synthetic construct
  source 1..203: mol_type = other DNA
ggcgcgccagtccttagtttcttctgttcaaccctggtatctagagatccctcagatcacttagactgaagcagaaaatctctagcagtggcgcccgaacagggacttgaaagcgaaagtggaaccagggaagaaaacctccgacgcaacgggctcggcttagcagagtgcacctgctaagaggcgagcgactcggaccgatg

SEQ ID NO: 10188 - DNA, 203 bp, synthetic construct
  source 1..203: mol_type = other DNA
ggcgcgccagtcctggccaaattctgttcaaccctggtgtctagagatccctcagatcacatagactgaagcagaaaatctctagcagtggcgcccgaacagggacttgaaagagaaagtgaaaccagggaagaaaacctccgacgcaacgggctcggcttagcggagtgcacccgctgagaggcgagcgactcggaccgatg

SEQ ID NO: 10189 - DNA, 203 bp, synthetic construct
  source 1..203: mol_type = other DNA
ggcgcgccagtcctgtgtcgtctctgttgtgtgactctggtaaactagagatccctcagacctctttagtcagtgtggaaaatctctagcagtggcgcccgaacagggacttgaaagcgaaagtagaaccagaggagctctctcgacgcaggactcggcttgctgaagcgcgcacagcaagaggcgagcgactcggaccgatg

SEQ ID NO: 10190 - DNA, 203 bp, synthetic construct
  source 1..203: mol_type = other DNA
ggcgcgccagtcctcttgacagtctgttgtgtgactctggtaactagagatccctcagaccattttagtcagagtgtaaaatctctagcagtggcgcccgaacagggacgcgaaaagcgaaaataaaaccagagaagatctctcgacgcaggactcggcttgctgaagtgcacacggcaagaggcgagcgactcggaccgatg

SEQ ID NO: 10191 - DNA, 203 bp, synthetic construct
  source 1..203: mol_type = other DNA
ggcgcgccagtcctcgagtaactctgttgtgtgactctggtaactagagatccctcagaccattttagtcagtgtggaaaatctctagcagtggcgcccgaacagggacctgaaagcgaaagtagaaccagaggagctctctcgacgcaggactcggcttgctgaaagcgcgcgcagcaagaggcgagcgactcggaccgatg

SEQ ID NO: 10192 - DNA, 203 bp, synthetic construct
  source 1..203: mol_type = other DNA
ggcgcgccagtcctgtcaaatgtctgttgtgtgactctggtaactagagatccctcagaccattttagtcagtgtggaaaatctctagcagtggcgcccgaacagggacgcgaaagcgaaagtagaaccagaggagatctctcgacgcaggactcggcttgctgaaagcgcgctcggcaagaggcgagcgactcggaccgatg

SEQ ID NO: 10193 - DNA, 203 bp, synthetic construct
  source 1..203: mol_type = other DNA
ggcgcgccagtccttacgcccttctgttgtgtgactctggtaactagagatccctcagaccattttagtcagtgtggaaaatctctagcagtggcgcccgaacagggacgctgaaagcgaaagtagaaccagaggagatctctcgacgcaggactcggcttgctgaagtgcacacggcaagaggcgagcgactcggaccgatg

SEQ ID NO: 10194 - DNA, 203 bp, synthetic construct
  source 1..203: mol_type = other DNA
ggcgcgccagtcctgcgcaacgtctgttgtgtgactctggtaactagagatccctcagacccttttagtcagtgtggaaaaatctctagcagtggcgcccgaacagggacgcgaaagcgaaagtagaaccagaggagctctctcgacgcaggactcggcttgctgaagcgcgcacagcaagaggcgagcgactcggaccgatg

SEQ ID NO: 10195 - DNA, 203 bp, synthetic construct
  source 1..203: mol_type = other DNA
ggcgcgccagtccttacggagttctgttttgtgactctggtaactagagatccctcagacagctttagtccgggtggaaaatctctagcagtggcgcccgaacagggacctgaaagcgaaagtagaaccagaggagatctctcgacgcaggactcggcttgctgaaagcgcgctcggcaagaggcgagcgactcggaccgatg

SEQ ID NO: 10196 - DNA, 203 bp, synthetic construct
  source 1..203: mol_type = other DNA
ggcgcgccagtcctgtgcagagtgctcatctgttcaaccctggtatctagagatccctcagatcacgtagactgaagcagaaaatctctagcagtggcgcccgaacagggacttgaaagtgaaaccagggaagaaaacctccgacgcaacgggctcggcttagcggagtgcacccgctaagaggcgagcgactcggaccgatg

SEQ ID NO: 10197 - DNA, 203 bp, synthetic construct
  source 1..203: mol_type = other DNA
ggcgcgccagtcctatacatgatggcgcccgaacagggaccggaagttaatagggactcgaaagcgaaagttccagagaagatctctcgacgcacggactcggcttgctgaggtgcacacagcaagaggcgagagcggcgactggtgagtacgccaatttttgactagcggaggctagaaggagagagcgactcggaccgatg

SEQ ID NO: 10198 - DNA, 203 bp, synthetic construct
  source 1..203: mol_type = other DNA
ggcgcgccagtccttattgtgctggcgcccgaacagggacctgaaattaatagggactcgaaagcgaaagttccagagaagttctctcgacgcaaggactcggcttgctgaggtgcacgcagcaagaggcgagagcggcgactggtgagtacgccaatttttgactagcggaggctagaaggagagagcgactcggaccgatg

SEQ ID NO: 10199 - DNA, 203 bp, synthetic construct
  source 1..203: mol_type = other DNA
ggcgcgccagtccttagggcaatggcgcccgaacagggacttgaagttaatagggactcgaaagcgaaagttccagagaagctctcttgacgcagagactcggcttgctgaggtgcacacagcaagaggcgagagcggcgactggtgagtacgccaaattttgactagcggaggctagaaggagagagcgactcggaccgatg

SEQ ID NO: 10200 - DNA, 203 bp, synthetic construct
  source 1..203: mol_type = other DNA
ggcgcgccagtccttccaattttggcgcccgaacagggacttgagaagcagggaacgcggcccctggacgcaggactcggcttgtgacagcgcaatcacaagaggcgaggcggactccggtggtgagtacaaattttgttgtcggtgggcaaccctagaggaagggcgaagtctctaggtaacaggggcgactcggaccgatg

SEQ ID NO: 10201 - DNA, 203 bp, synthetic construct
  source 1..203: mol_type = other DNA
ggcgcgccagtcctcattgacttggtaactagagatccctcagacctttttggttgtgtggaaaatctctagcagtggaaaatctctagcagtggcgcccgaacagggacttgaaagcgaaagtaagaccagaggagatctctcgacgcaggactcggcttgctgaagtgcactcggcaaggggcgagcgactcggaccgatg

SEQ ID NO: 10202 - DNA, 203 bp, synthetic construct
  source 1..203: mol_type = other DNA
ggcgcgccagtccttgaggccttgttatgtgactctggtaactagagatccctcagacccttttagtcagtgtggaaaatctctagcagtggcgcccgaacagggacttgaagaaagtaaaaccagaggagatctctcgacgcaggactcggcttgctgaagaagaagcgcgcgcggcaagaggcgagcgactcggaccgatg

SEQ ID NO: 10203 - DNA, 203 bp, synthetic construct
  source 1..203: mol_type = other DNA
ggcgcgccagtcctgaccatgtttgagtgctttaagtagtgtgtgcccgtctgttgtgtgactctggtaactagagatccctcagaccttcttagtcagtgtggaaaatctctagcagtggcgcccgaacaggggagctctctcgacgcaggactcggcttgctgaagcgcgcacagcaagaggcgagcgactcggaccgatg

SEQ ID NO: 10204 - DNA, 203 bp, synthetic construct
  source 1..203: mol_type = other DNA
ggcgcgccagtcctgagcgtaacaagaagtttgtgcctactcaacagctttgaaagagcacttcccaacgctgctagtagtctttgttttcttcagtgctgtactgtgagattgcccggtacagcagcagttgtattctttattagcttggtagatcattttctctcgctcttttttttaatactagccgactcggaccgatg

SEQ ID NO: 10205 - DNA, 203 bp, synthetic construct
  source 1..203: mol_type = other DNA
ggcgcgccagtcctgtgaataacttctcctcctgcagccgggagcggcctgcctgcctccctgcgcacccgcagcctcccccgctgcctccctagggctcccctccggccgccagcgcccatttttcattccctagatagagatactttgcgcgcacacacatacatacgcgcgcaaaaaggaaaaaacgactcggaccgatg

SEQ ID NO: 10206 - DNA, 203 bp, synthetic construct
  source 1..203: mol_type = other DNA
ggcgcgccagtcctcagaagaagggagcaggagagagaggacaagcggatccaacagccttcgctccaggggaatcagggcatcgcctccttttctgggaggacactcccttctgatggtgaatgggaactcccttcctcctgcagcagcctgcctgcagctgtcctggtagaacagtgtggacattgcgactcggaccgatg

SEQ ID NO: 10207 - DNA, 203 bp, synthetic construct
  source 1..203: mol_type = other DNA
ggcgcgccagtccttggtataagggagcaggagagagaggacaagtggatccaacagccttcgctccaggggaatcagggcatcacctccttttctgggaggacactcccttctgatggtgaatgggaactcccttcctcctgcagcagcctgcctgcagctgtcctggtagaacagtgtggacattgcgactcggaccgatg

SEQ ID NO: 10208 - DNA, 203 bp, synthetic construct
  source 1..203: mol_type = other DNA
ggcgcgccagtcctggtcagaagggagcaggagagagaggacaagtggatccaacagccttcgctctaggggaatcagggcatcgcctccttttctgggaggacactcccttctgatggtgaatgggaactcccttcctcctgcagcagcctgcctgcagctgtcctggtagaacagtgtggacattgcgactcggaccgatg

SEQ ID NO: 10209 - DNA, 203 bp, synthetic construct
  source 1..203: mol_type = other DNA
ggcgcgccagtcctgccgtcaagtgacaaccatagctcttaggggactcccctaaagccttcatccttctgggtgtgtctgacaggccgtggctggaactccctctctttgtggtcctcctgctgtcctatgtgctggccatgttggggaacgtcgccatcatcctggcatcccgggtggatcctcaacgactcggaccgatg

SEQ ID NO: 10210 - DNA, 203 bp, synthetic construct
  source 1..203: mol_type = other DNA
ggcgcgccagtcctgtcgctaagtgacaaccatagctcttaggggattcccctaaagccttcatccttctgggtgtgtctgacaggccgtggctggaactccctctctttgtggtcctcctgctgtcctatgtgctggccatgttggggaacgtcgccatcatcctggcatcccgggtggatcctcaacgactcggaccgatg

SEQ ID NO: 10211 - DNA, 203 bp, synthetic construct
  source 1..203: mol_type = other DNA
ggcgcgccagtcctccgaccaatcggcttactccgcggagttggcctcatttctgcacagagtcggcgctccctgtagtttctcctctcgaacgccaggtggagcaaccggccggataccgccacagccctggcaggcggcgctgtgatgcctgagctgatcctgtatgttgcaatcactctatccgtcgactcggaccgatg

SEQ ID NO: 10212 - DNA, 203 bp, synthetic construct
  source 1..203: mol_type = other DNA
ggcgcgccagtcctgcacccacagaggagggaactgaatgacatcccaggattacataaactgtcagaggcagccgaagagttcacaagtgtgaagcctggaagccggcgggtgccgctgtgtaggaaagaagctaaagcacttccagagcctgtccggagctcagaggttcggaagacttatcgacccgactcggaccgatg

SEQ ID NO: 10213 - DNA, 203 bp, synthetic construct
  source 1..203: mol_type = other DNA
ggcgcgccagtcctacctcgacagccacacgccccaaggcctccaagatgagctacacattggactcgctgggcaacccgtccgcctaccggcgggtaaccgagacccgctcgagcttcagccgcgtcagcggctccccgtccagtggcttccgctcgcagtcgtggtcccgcggctcgcccagcacccgactcggaccgatg

SEQ ID NO: 10214 - DNA, 203 bp, synthetic construct
  source 1..203: mol_type = other DNA
ggcgcgccagtccttgcgttacagccacacgccccaaggcctccaagatgagctacacgttggactggctgggcaacccgtccgcctaccggcgggtaaccgagacccgctcgagcttcagccgcgtcagcggctccccgtccagtggcttccgctcgcagtcgtggtcccgcggctcgcccagcacccgactcggaccgatg

SEQ ID NO: 10215 - DNA, 203 bp, synthetic construct
  source 1..203: mol_type = other DNA
ggcgcgccagtcctcgcccgacagccacacgccccaaggcctccaagatgagctacacgttggattcgctgggcaacccgtccgcctaccggcgggtaaccgagacccgctcgagcttcagccgcgtcagcggctccccgtccagtggcttccgctcgcagtcgtggtcccgcggctcgcccagcacccgactcggaccgatg

SEQ ID NO: 10216 - DNA, 203 bp, synthetic construct
  source 1..203: mol_type = other DNA
ggcgcgccagtcctaaggaaaccaccgcgtgttcgcgcctggtagagatttctcgaagacaccagtgggcccgttccgagccctctggaccgcccgtgtggaaccaaacctgcgcgcgtggccgggccgtgggacaacgaggccgcggagactgtttcaatgcatcaaagctactgacatctcatggccgactcggaccgatg

SEQ ID NO: 10217 - DNA, 203 bp, synthetic construct
  source 1..203: mol_type = other DNA
ggcgcgccagtccttccttaacccagccagggcaccacgctgcccggccctgcgccgccaggcacttctttccggggctcctagggacgccagaaggaagccaacctctgctgcttctccttggcctgcgttggaccttcctttttttgttgtttttttttgtttttcccctttcttccttttgaattcgactcggaccgatg

SEQ ID NO: 10218 - DNA, 203 bp, synthetic construct
  source 1..203: mol_type = other DNA
ggcgcgccagtcctgactacacccagccagggcaccacgctgcccggccctgcgccgccaggcacttctttccggggctcctagggacgccagaaggaagtcaacctctgctgcttctccttggcctgcgttggaccttcctttttttgttgtttttttttgtttttcccctttcttccttttgaattcgactcggaccgatg

SEQ ID NO: 10219 - DNA, 203 bp, synthetic construct
  source 1..203: mol_type = other DNA
ggcgcgccagtcctccgcatacccctaccccatccccttattcagcacatgaaataaacaaggggcatccaaatcttgcagcaacgcccccgggacatgcatcgtcccctggactctctcaaaccccttatccctctggacagaatgcaggtccaaccacgctggtataccctcaaacccctcagacacgactcggaccgatg

SEQ ID NO: 10220 - DNA, 203 bp, synthetic construct
  source 1..203: mol_type = other DNA
ggcgcgccagtcctctcagtacctcaatacaagcccactctttcacatatttgaacttttttcacatatcaactttttttgttcactgcgcagggattgttcattgctgctggaggaagatcatggactgtcgcgggaaactgaagtggttgagtatccactagtcgtggatgagggcagtgacttcgcgactcggaccgatg

SEQ ID NO: 10221 - DNA, 203 bp, synthetic construct
  source 1..203: mol_type = other DNA
ggcgcgccagtccttactgtacctcaatacaagcccactctttcacatgtttgaacttttttcacatatcaactttttttgttcactgtgcagggattgttcattgctgctggaggaagatcatggactgtcgcgggaaactgaagtggttgagtatccactagtcgtggatgagggcagtgacttcgcgactcggaccgatg

SEQ ID NO: 10222 - DNA, 203 bp, synthetic construct
  source 1..203: mol_type = other DNA
ggcgcgccagtccttgggcaacgccggccaagacagcccagacagattgacctattggggtgtttcgcgagtgtgagagggaagcgccgcggcctgtatttctagacctgcccttcgcctggttcgtggcgccttgtgaccccgggcccctgccgcctgcaagtcggaaattgcgctgtgctcctgtgcgactcggaccgatg

SEQ ID NO: 10223 - DNA, 203 bp, synthetic construct
  source 1..203: mol_type = other DNA
ggcgcgccagtcctactgagagacagaacttaacctctgcaagcaagattcgtggaagatagtctccactttttaatgcactaagcaatcggttgctaggagcccatcctgggtcagaggccgatccgcagaaccagaacgttttcccctcctgaactgttagtaacttagtctccctcctcccctaacgactcggaccgatg

SEQ ID NO: 10224 - DNA, 203 bp, synthetic construct
  source 1..203: mol_type = other DNA
ggcgcgccagtcctcacttgagataactggacaattttttaagtcggaggctgttcttactggtgtgaggatttacacacgtcttcagtttttcagcacagaccagcagaccatcatttttagaggaaatactccctctgccctcctttttggtttccttggtgggctcaactaaaaaactgaatgggcgactcggaccgatg

SEQ ID NO: 10225 - DNA, 203 bp, synthetic construct
  source 1..203: mol_type = other DNA
ggcgcgccagtccttcagctagcaccgcgtgttcgcgcctggtagagatttctcgaagacaccagtgggcccgttccgagccctctggaccgcccgtgtggaaccaaacctgcgcgcgtggccgggccgtgggacaacgaggccgcggagactgtttcaatgcatcaaagctactgacatctcatggccgactcggaccgatg

SEQ ID NO: 10226 - DNA, 203 bp, synthetic construct
  source 1..203: mol_type = other DNA
ggcgcgccagtcctatcctaagcgcgggcagcggagcgggcgccaggccggccgggcaggatgcgctaccgggcgtcggccctgggcagtgacggggttcgagtgaccatggagagtgcgctcaccgcccgtgaccgggtgggggtgcaggatttcgtgctgctggagaacttcaccagcgaggccgccgactcggaccgatg

SEQ ID NO: 10227 - DNA, 203 bp, synthetic construct
  source 1..203: mol_type = other DNA
ggcgcgccagtcctgacacaagcgcgggcagcggagcgggcgccaggccggccgggcaggatgcgctaccgggcgtcggccctgggcagtgacggggttcgggtgaccatggagagtgcgctcaccgcccgtgaccgagtgggggtgcaggatttcgtgctgctggagaacttcaccagcgaggccgccgactcggaccgatg

SEQ ID NO: 10228 - DNA, 203 bp, synthetic construct
  source 1..203: mol_type = other DNA
ggcgcgccagtccttaacaaagcgcgggcagcggagcgggcgccaggccggccgggcaggatgcgctaccgggcgtcggccctgggcagtgacggggttcgggtgaccatggagagtgcgctcaccgcccgtgaccgggtggggatgcaggatttcgtgctgctggagaacttcaccagcgaggccgccgactcggaccgatg

SEQ ID NO: 10229 - DNA, 203 bp, synthetic construct
  source 1..203: mol_type = other DNA
ggcgcgccagtcctaattggagctcagtgccagaggaggggattcccggcgccgggggacagagcccctttttttttttgccgaaagaccctttctgctggggagcctcttgtgtccagcctaggcccgcgtgcagcgccgacggatgaccgtcttcttggcaagaaagtgaataaacttaattgagacgactcggaccgatg

SEQ ID NO: 10230 - DNA, 203 bp, synthetic construct
  source 1..203: mol_type = other DNA
ggcgcgccagtcctcatgcgagctcagtgccagaggaggggattcccggcgccgggggacagagcccctttttttttttgccgaaagaccctttctgctggggagcctcttgtgtccagcctaggcccgcgtgcagcgccgacggatgatcgtcttcttggcaagaaagtgaataaacttaattgagacgactcggaccgatg

SEQ ID NO: 10231 - DNA, 203 bp, synthetic construct
  source 1..203: mol_type = other DNA
ggcgcgccagtcctgttatgagctcagtgccagaggaggggattcctggcgccgggggacagagcccctttttttttttgccgaaagaccctttctgctggggagcctcttgtgtccagcctaggcccgcgtgcagcgccgacggatgatcgtcttcttggcaagaaagtgaataaacttaattgagacgactcggaccgatg

SEQ ID NO: 10232 - DNA, 203 bp, synthetic construct
  source 1..203: mol_type = other DNA
ggcgcgccagtccttaaacgaggaagaccagctcggccgagtcctcgtcagcggaatcaggctcaggttctgaggaagaagaggaggaggaggaagaggaggaggaggaagggagcaccagtgaagaatcagaggaggaagaggaagaggaggaggaggagaccggcagcaactctgaggaggcatcacgactcggaccgatg

SEQ ID NO: 10233 - DNA, 203 bp, synthetic construct
  source 1..203: mol_type = other DNA
ggcgcgccagtcctaataccagtccatttgacacaacacctttgatctttgacagtttccttggttttaggtgctagatgatttctcaggctcaccttagacatttcctgccacagacttagaatcagccatttctctaaggaccctgattccatttcatgagaaatgatagagaccacaatcaaaaccgactcggaccgatg

SEQ ID NO: 10234 - DNA, 203 bp, synthetic construct
  source 1..203: mol_type = other DNA
ggcgcgccagtcctccgaccagtgacaaccatagcttcttaggggacccccctaaagccttcatccttctgggtgtgtctgacaggccgtggctggaactccctctctttgtggtcctcctgctgtcctatgtgctggccatgttggggaacgtcgccatcatcctggcatcccgggtggatcctcaacgactcggaccgatg

SEQ ID NO: 10235 - DNA, 203 bp, synthetic construct
  source 1..203: mol_type = other DNA
ggcgcgccagtcctgaagtaagtgacaaccatagcttcttaggggactaccctaaagccttcatccttctgggtgtgtctgacaggccgtggctggaactccctctctttgtggtcctcctgctgtcctatgtgctggccatgttggggaacgtcgccatcatcctggcatcccgggtggatcctcaacgactcggaccgatg

SEQ ID NO: 10236 - DNA, 203 bp, synthetic construct
  source 1..203: mol_type = other DNA
ggcgcgccagtcctacaacaagtgacaaccatagcttcttaggggactcccctaaagccttcatccttctgggtgtgtctgacaggccgtggctggaactccctctctttgtggtcctcctgctgtcctatgtgctggccatgttggggagcgtcgccatcatcctggcatcccgggtggatcctcaacgactcggaccgatg

SEQ ID NO: 10237 - DNA, 203 bp, synthetic construct
  source 1..203: mol_type = other DNA
ggcgcgccagtcctcgcaacagtgcattcgagtaaatttaatttccaggcagcttaatacattctttttagccgtgttacttgtaatgtgtatgccctgctttcactcagtgtgtacagggaaacgcacctgattttttacttattagtttgttttttctttaacctttcagcatcacagaggaagtacgactcggaccgatg

SEQ ID NO: 10238 - DNA, 203 bp, synthetic construct
  source 1..203: mol_type = other DNA
ggcgcgccagtcctatgtacataagattgcgtgggttctgcctaaagctgaattcccagcgctttggcttctctgagttggggttgtgtataggggtcttcgaacagttccggaaccagccagcagcctttaattcttgggcggaccacggccggttctgtgttcttggctaagatgaacagccaccacgactcggaccgatg

SEQ ID NO: 10239 - DNA, 203 bp, synthetic construct
  source 1..203: mol_type = other DNA
ggcgcgccagtcctggctggataagattgcgtgggttctgcctaaagctgaattcccagcgctttggcttctctgagttggggttgtgtataggggtcttcgaacagttccggaaccagccagcagcctttaattcttgggcggaccacggccggttctgtgttcttggctaagatgagcagccaccacgactcggaccgatg

SEQ ID NO: 10240 - DNA, 203 bp, synthetic construct
  source 1..203: mol_type = other DNA
ggcgcgccagtcctaggacgataccagtgtcagctgcacttgtaggggcccaagtgcctcatgacctactcggcagccttcctctccaggatccccaaggctaggaggccaacctactaacaggtgggtgggtatggtgtgtggtttcactcagttcttctcatggggtttctctgagctccattcatcgactcggaccgatg

SEQ ID NO: 10241 - DNA, 203 bp, synthetic construct
  source 1..203: mol_type = other DNA
ggcgcgccagtcctcgcccgatacttgatcctaaattcctgtacttcctcaggccatccgagcatgaaacgctgtcacctacccacatccgctggctgtgacgcttgtcagagtgttctctatcggctgcatgcctagaccaccaaagcgttctgaccggacagtgtcactggagaaggcggcgcgaccgactcggaccgatg

SEQ ID NO: 10242 - DNA, 203 bp, synthetic construct
  source 1..203: mol_type = other DNA
ggcgcgccagtcctaaggaaatcccaaacgcggtacagaccaaaccgcagcccacgttacggatcggcttactccgcggagttggcctcatttctgcacagagtcggcgctccctgtagtttctcctctcgaacgccaggtggagcaaccggccggataccgccacagccctggcaggcggcgctgtgcgactcggaccgatg

SEQ ID NO: 10243 - DNA, 203 bp, synthetic construct
  source 1..203: mol_type = other DNA
ggcgcgccagtcctgcaaggatcccaaacgcggtacagaccaaaccgcagtccacgttacgaatcggcttactccgcggagttggcctcatttctgcacagagtcggcgctccctgtagtttctcctctcgaacgccaggtggagcaaccggccggataccgccacagccctggcaggcggcgctgtgcgactcggaccgatg

SEQ ID NO: 10244 - DNA, 203 bp, synthetic construct
  source 1..203: mol_type = other DNA
ggcgcgccagtcctatcaagatcccaaacgcggtacagaccaaaccgcagtccacgttacggatcggcttactccgcggagttggcctcatttctgcacagagtcggcgctccctgtagtttctcctctcgaacgccaggtggagcaaccggccggataccgccacagccctggcaagaggcgctgtgcgactcggaccgatg

SEQ ID NO: 10245 - DNA, 203 bp, synthetic construct
  source 1..203: mol_type = other DNA
ggcgcgccagtcctgactacatcccaaacgcggtacagaccaaaccgcagtccacgttacggatcggtttactccgcggagttggcctcatttctgcacagagtcggcgctccctgtagtttctcctctcgaacgccaggtggagcaaccggccggataccgccacagccctggcaggcggcgctgtgcgactcggaccgatg

SEQ ID NO: 10246 - DNA, 203 bp, synthetic construct
  source 1..203: mol_type = other DNA
ggcgcgccagtcctccgcatatcccaaacgcggtacagaccaaaccgcagtccgcgttacggatcggcttactccgcggagttggcctcatttctgcacagagtcggcgctccctgtagtttctcctctcgaacgccaggtggagcaaccggccggataccgccacagccctggcaggcggcgctgtgcgactcggaccgatg

SEQ ID NO: 10247 - DNA, 203 bp, synthetic construct
  source 1..203: mol_type = other DNA
ggcgcgccagtcctcagctcatcccaaacgcggtacagaccaaaccgcagtccgcgttacggatcggtttactccgcggagttggcctcatttctgcacagagtcggcgctccctgtagtttctcctctcgaacgccaggtggagcaaccggccggataccgccacagccctggcaggcggcgctgtgcgactcggaccgatg

SEQ ID NO: 10248 - DNA, 203 bp, synthetic construct
  source 1..203: mol_type = other DNA
ggcgcgccagtcctcggtgaatgcggatggattatggtcgtcagaggctcccgtagtcttcagcggcgctggcttccgcaggctccgccctctcttgcccacccggaaacagcctcgccccgcctacgcgggacccaaccgcggcgaccggacgtgcactcctccagtagcggctgcacgtcgtgccacgactcggaccgatg

SEQ ID NO: 10249 - DNA, 203 bp, synthetic construct
  source 1..203: mol_type = other DNA
ggcgcgccagtcctgtccgcatgcggatggattgtggtcgtcagaggctcccgtagtcttcagcggcgctggcttccgcaggctccgccctctcttgcccacccggaaacagcctcgccccgcctacgcgggacccaaccgcggcgaccggacgtgcactcctccagtagcggctgcacgtcgtgccacgactcggaccgatg

SEQ ID NO: 10250 - DNA, 203 bp, synthetic construct
  source 1..203: mol_type = other DNA
ggcgcgccagtcctactcttcaactgaaaccgcgggaggagaaagcgcggaatcaggaactggccggggtccgcaccgggcctgagtgggtccgaggccgtcccaggagcagctgcccgtgcggaacagcactatgggcttctcttctgagctgtgcagcccccagggccacggggtcctgcagcaaacgactcggaccgatg

SEQ ID NO: 10251 - DNA, 203 bp, synthetic construct
  source 1..203: mol_type = other DNA
ggcgcgccagtcctcacttgcaactgaaaccgcgggaggaggaagcgcggaatcaggaactggccggggtccgcaccgggcctgagtgggtccgaggccgtcccaggagcagctgcccgtgcggaacagcactatgggcttctcttccgagctgtgcagcccccagggccacggggtcctgcagaaaacgactcggaccgatg

SEQ ID NO: 10252 - DNA, 203 bp, synthetic construct
  source 1..203: mol_type = other DNA
ggcgcgccagtccttcatgccaagtcaataagactgtggtgagagagttcgtcgtcctcagcttctcatccctggccaggctgcagcagctgctctttgttatcttcctgctcctctacctgttcactctgggcaccaatgcaatcatcatttccaccattgtgctggacagagcccttcatactccccgactcggaccgatg

SEQ ID NO: 10253 - DNA, 203 bp, synthetic construct
  source 1..203: mol_type = other DNA
ggcgcgccagtccttaacaacaagtcaataagactgtggtgagagagtttgtcgtcctcggcttctcatccctggccaggctgcagcagctgctctttgttatcttcctgctcctctacctgttcactctgggcaccaatgcaatcatcatttccaccattgtgctggacagagcccttcatactccccgactcggaccgatg

SEQ ID NO: 10254 - DNA, 203 bp, synthetic construct
  source 1..203: mol_type = other DNA
ggcgcgccagtcctcgtaggcacagtgcctccggaggaaatctgctcagtccccggcagccgccgcttcccctttgatgttttggtacgccgtgcgcatgcgcctcacattagaattactgcactgggcagactaagttggatctcctctcttcagtgaaaccctcaattccatcaaaaactaaagggcgactcggaccgatg

SEQ ID NO: 10255 - DNA, 203 bp, synthetic construct
  source 1..203: mol_type = other DNA
ggcgcgccagtcctcgtctacaccagaatcaagtgttccgcgtgattgaagacaccccctcgtccaagaatgcaaagcacatccaataaaatagctggattataactcctcttctttctctgggggccgtggggtgggagctggggtgagaggtgccgttggcccccgttgcttttcctctgggaaggcgactcggaccgatg

SEQ ID NO: 10256 - DNA, 203 bp, synthetic construct
  source 1..203: mol_type = other DNA
ggcgcgccagtccttaaacgcagaccgtcgcagctacagggggcctcgagccccggggtgagcgtccccgtcccgctcctgctccttcccatagggacgcgcctgatgcctaggaccggccgctgagcccaaggggaccgaggaggccatggtaggagcgctcgcctgctgcggtgcccgctgaggcccgactcggaccgatg

SEQ ID NO: 10257 - DNA, 203 bp, synthetic construct
  source 1..203: mol_type = other DNA
ggcgcgccagtcctgcgtagcagcggcctcgggagggcccaggtagcgagcagcgacctcgcgagccttccgcactcccgcccggttccccggccgtccgcctatccttggccccctccgctttctccgcgccggcccgcctcgcttatgcctcggcgctgagccgctctcccgattgcccgccgacacgactcggaccgatg

SEQ ID NO: 10258 - DNA, 203 bp, synthetic construct
  source 1..203: mol_type = other DNA
ggcgcgccagtcctgccgtccatggtaacaggttccagggtaacagaggagggagctgggtcctgtttactcccagtcctgccgatgaggattctgaccgtagaaactgaattgtcccgtacctatccgtgctctttctgtgttctcaccagggctgagctcgaactgccacctctgccagcaggacccgactcggaccgatg

SEQ ID NO: 10259 - DNA, 203 bp, synthetic construct
  source 1..203: mol_type = other DNA
ggcgcgccagtcctttcggacatggtaacaggttccagggtaacagaggagggagctgggtcctgtttactcccagtcctgccgatgaggattctgaccgtagacactgaattgtcccgtacctatccgtgctctttctgtgttctcaccagggctgagctcaaactgccacctctgccagcaggacccgactcggaccgatg

SEQ ID NO: 10260 - DNA, 203 bp, synthetic construct
  source 1..203: mol_type = other DNA
ggcgcgccagtcctcacggccatggtaacaggttccagggtaacagaggagggagctgggtcctgtttactcccagtcctgccgatgaggattctgaccgtagacactgaattgtcccgtacctatccgtgctctttctgtgttctcaccagggctgagctcgaactgccacctctgccagcaggacccgactcggaccgatg

SEQ ID NO: 10261 - DNA, 203 bp, synthetic construct
  source 1..203: mol_type = other DNA
ggcgcgccagtcctgtcgctcatggtaacaggttccagggtaacagaggagggagctgggtcctgtttactcccagtcctgccgatgaggattctgaccgtagacactgaattgtcccgtacctatccgtgctctttgtgtgttctcaccagggctgagctcgaactgccacctctgccagcaggacccgactcggaccgatg

SEQ ID NO: 10262 - DNA, 203 bp, synthetic construct
  source 1..203: mol_type = other DNA
ggcgcgccagtcctccgacccatggtaacaggttccagggtaacagaggagggagctgggtcctgtttactcccagtcctgccgatgaggattctgaccgtagacactgaattgtcccgtacctatccgtgttctttctgtgttctcaccagggctgagctcgaactgccacctctgccagcaggacccgactcggaccgatg

SEQ ID NO: 10263 - DNA, 203 bp, synthetic construct
  source 1..203: mol_type = other DNA
ggcgcgccagtcctagccatccaaggacagcccaagaactggtctagcctggcagccttttccctcgggtagtagaggctgcccctctgacagggagtttgtggtcagcaagtgggcccttgggggtcttgggctgtcacagggactccagaaagccatgcagagccttgtgccatgaaggacttctccgactcggaccgatg

SEQ ID NO: 10264 - DNA, 203 bp, synthetic construct
  source 1..203: mol_type = other DNA
ggcgcgccagtccttcccagccaaggacagcccaagaactggtctagcctggcagccttttccctcgggtagtagaggctgcccctttgacagggagtttgtggtcagcgagtgggcccttgggggtcttgggctgtcacaggaactccagaaagccatgcagagccttgtgccatgaaggacttctccgactcggaccgatg

SEQ ID NO: 10265 - DNA, 203 bp, synthetic construct
  source 1..203: mol_type = other DNA
ggcgcgccagtcctcgcccgccatcacccctaaatgtattccaaagaataagaacattgttttatacatagcacacttaacaaaatcaagaaatttaacattaatacagtactgttacctaatccgtagtcgattttcaaattttgtcagttgttccaataatgtcctttatatattccccgcccagccgactcggaccgatg

SEQ ID NO: 10266 - DNA, 203 bp, synthetic construct
  source 1..203: mol_type = other DNA
ggcgcgccagtcctgcaaggccatgagaagcgaccacccctcgacaacttctccttcacggttcccacccaggagcacggccaactctcccccggaatccataacggctcacgcaaatagatttctttccgttcctcctcggagggctctccacatttatctgctcgagacgtggcagctccagaacccgactcggaccgatg

SEQ ID NO: 10267 - DNA, 203 bp, synthetic construct
  source 1..203: mol_type = other DNA
ggcgcgccagtcctatcaagccatgagaagcgaccacccctcgacgacttctccttcacggttcccacccaggagcacggccaactctcccccggaatccataacggctcacgcaaatagatttctttccgttcctcctcggagggctctccacatttatctgctcgagacgtggcagctccagaacccgactcggaccgatg

SEQ ID NO: 10268 - DNA, 203 bp, synthetic construct
  source 1..203: mol_type = other DNA
ggcgcgccagtccttccttaccatgagaagcgaccacccctcgacgacttctccttcacggttcccatccaggagcacggccaactctcccccggaatccataacggctcacgcaaatagatttctttccgttcctcctcggagggctctccacatttatctgctcgagacgtggcagctccagaacccgactcggaccgatg

SEQ ID NO: 10269 - DNA, 203 bp, synthetic construct
  source 1..203: mol_type = other DNA
ggcgcgccagtcctcagctcccatgagaagcgaccacccctcgacgacttctccttcatggttcccacccaggagcacggccaactctcccccggaatccataacggctcacgcaaatagatttctttccgttcctcctcggagggctctccacatttatctgctcaagacgtggcagctccagaacccgactcggaccgatg

SEQ ID NO: 10270 - DNA, 203 bp, synthetic construct
  source 1..203: mol_type = other DNA
ggcgcgccagtccttactgtcccaggcctcgctggaccacggacccgccaggttctcccgcaacttgcggagctcctggaacggcccttcccagaggcgcagcgctgagtcccaggagcaggacctgaaccaggaaggggaggggcgagcacagtcctgcctcctcctccccgcacagtgctgggggacgactcggaccgatg

SEQ ID NO: 10271 - DNA, 203 bp, synthetic construct
  source 1..203: mol_type = other DNA
ggcgcgccagtcctcttccccccaggcctcgctggaccacggacccgccaggttctcccgcaacttgcggagctcctggaccggcccttcccagaggcacagcgctgagtcccaggagcaggacctgaaccaggaaggggaggggcgagcacagtcctgcctcctcctccccgcacagtgctgggggacgactcggaccgatg

SEQ ID NO: 10272 - DNA, 203 bp, synthetic construct
  source 1..203: mol_type = other DNA
ggcgcgccagtccttcggaccccaggcctcgctggaccacggacccgccaggttctcccgcaacttgcggagctcctggaccggcccttcccagaggcgcagcgctgagtcccaggagcaggacctgaaccaggaaggggaggggcgagcacagtcctgcctcttcctccccgcacagtgctgggggacgactcggaccgatg

SEQ ID NO: 10273 - DNA, 203 bp, synthetic construct
  source 1..203: mol_type = other DNA
ggcgcgccagtcctaccagcccctgagcaaagagtcacagataaaacaggggcaccagtagaatggccaggacaaacgcagtgcagcacagagactcagaccctggcagccatgcctgcgcaggcagtgatgagagtgacatgtactgttgtggacatgcacaaaagtgagtgtgcaccggcacagaccgactcggaccgatg

SEQ ID NO: 10274 - DNA, 203 bp, synthetic construct
  source 1..203: mol_type = other DNA
ggcgcgccagtcctagcgccccctgagcaaagagtcacagataaaacgggggcaccagtagaatggccaggacaaacgcagtgcagcacagagactcagaccctggcagccatgcctgcgcaggcagtgatgagagtgacatgtactgttgtggacatgcacaaaagtgagtgtgcaccggcacagaccgactcggaccgatg

SEQ ID NO: 10275 - DNA, 203 bp, synthetic construct
  source 1..203: mol_type = other DNA
ggcgcgccagtcctttcaccccgccgggctcagtcccagtgacccccctggtcggggttcgcgcgccctcccccagcacgaccgggcaaggctgccgcggcgtcggagtaatccccaaccctccgccgccgcttcttccctcacccgggcctccagacgtttgccgcggaaacgaaagtaacgctcggcgactcggaccgatg

SEQ ID NO: 10276 - DNA, 203 bp, synthetic construct
  source 1..203: mol_type = other DNA
ggcgcgccagtcctactgagccgccgggctcagtcccagtgacccccctggtcggggttcgcgcgccctcccccagcacgcccgggcaaggctgccgcggcgtcggagtaatccccaaccctccgccgccgcttcttccctcatccgggcctccagacgtttgccgcggaaacgaaagtaacgctcggcgactcggaccgatg

SEQ ID NO: 10277 - DNA, 203 bp, synthetic construct
  source 1..203: mol_type = other DNA
ggcgcgccagtcctactcttccgccgggctcagtcccggtgacccccctggtcggggttcgcgcgccctcccccagcacgaccgggcaaggctgccgcggcgtcggagtaatccccaaccctccgccgccgcttcttccctcatccgggcctccagacgtttgccgcggaaacgaaagtaacgctcggcgactcggaccgatg

SEQ ID NO: 10278 - DNA, 203 bp, synthetic construct
  source 1..203: mol_type = other DNA
ggcgcgccagtccttcagctccgccgggctcagtcccggtgacccccctggtcggggttcgcgcgccctcccccagcacgcccgggcaaggctgccgcggcgtcggagtaatccccaaccctccgccgccgcttcttccctcatccgggcctccagacgtttgccgcggaaacgaaagtaacgctcggcgactcggaccgatg

SEQ ID NO: 10279 - DNA, 203 bp, synthetic construct
  source 1..203: mol_type = other DNA
ggcgcgccagtcctgacacaccggcttccccgccccatttggtgggggctggcccttggccctccaactcctttaccctacatgcctgagaagccagggaccaagatggatcttctcctcgacatcagctaagcctggaggactcttcccctcagagaccatggagagggacagccacgggaatgtatcgactcggaccgatg

SEQ ID NO: 10280 - DNA, 203 bp, synthetic construct
  source 1..203: mol_type = other DNA
ggcgcgccagtcctatacctccggcttccccgccccatttggtgggggctggcccttggccctccaactcctttaccctacatgcctgagaagccaggggccaagatggatcttctcctcgacatcagctaagcctggaggactcttcccctcagagaccatggagagggacagccacgggaatgtatcgactcggaccgatg

SEQ ID NO: 10281 - DNA, 203 bp, synthetic construct
  source 1..203: mol_type = other DNA
ggcgcgccagtcctgagcgtccggggcagacagcgccggtggtgttcagtacgccacaagcgacacaaatgaacacgccttctcagccccgccagcacttctaccctagccgggcccagcccccgagcagtgcagcctcccgagtgcagagtgcagcccctgcccgctctggcccagctgcccatgtccgactcggaccgatg

SEQ ID NO: 10282 - DNA, 203 bp, synthetic construct
  source 1..203: mol_type = other DNA
ggcgcgccagtcctcatgcgccgttccccaacttcctcggcgctccggactcccaagtctccgccggaccctcctttggatattcctcgtgtctccgattctgagacagagggggaagacggtggggcctacccacctgccccgcagaagatgcagttctttggccgcctggtcaataccttcagtggcgactcggaccgatg

SEQ ID NO: 10283 - DNA, 203 bp, synthetic construct
  source 1..203: mol_type = other DNA
ggcgcgccagtcctcgtctaccgttctccaacttcctcggcgctccggactcccaagtctccgccggaccctcctttggatattcctcgtgtctccgattctgagacagagggggaagacggtggggcctccccacctgccccgcagaagatgcagttctttggccgcctggtcaataccttcagtggcgactcggaccgatg

SEQ ID NO: 10284 - DNA, 203 bp, synthetic construct
  source 1..203: mol_type = other DNA
ggcgcgccagtcctggtcagcctgtgaaagatctcacttgttcaaaagtccaagtgtgaattactgtctcacagacaaaccaaagtattttgaaaaacaaaggggagaaaagaaattactccccagaactctcaggcatctagaggacacccaagaacgtgggagtcagctgcttcttgtgtgcagcccgactcggaccgatg

SEQ ID NO: 10285 - DNA, 203 bp, synthetic construct
  source 1..203: mol_type = other DNA
ggcgcgccagtcctttcggacctgtgaaagatctcacttgttcaaaagtccaagtgtgaattactgtctcacagataaaccaaagtattttgaaaaacaaaggggagaaaagaaattactccccagaactctcaggcatctagaggacacccaagaacctgggagtcagctgcttcttgtgtgcagcccgactcggaccgatg

SEQ ID NO: 10286 - DNA, 203 bp, synthetic construct
  source 1..203: mol_type = other DNA
ggcgcgccagtcctccaattcgaaactttgcccatagcagcgggcgggcactttgcactggaacttacaacacccgagcaaggacgcgactctcccgacgtggggaggctattctgcccatttggggacacttccccgccgctgccaggacccgcttctctgaaaggctctccttgcagctgcttagacgactcggaccgatg

SEQ ID NO: 10287 - DNA, 203 bp, synthetic construct
  source 1..203: mol_type = other DNA
ggcgcgccagtcctcattatcgcactaagcaaactgctcggaagtctactggtggcaaggcgccacgcaaacagttagccactaaggcagcccgcaaaagcgctccggccaccggcggcgtgaaaaagccccaccgctaccggccgggcaccgtggctctgcgcgagatccgccgttatcagaagtcccgactcggaccgatg

SEQ ID NO: 10288 - DNA, 203 bp, synthetic construct
  source 1..203: mol_type = other DNA
ggcgcgccagtcctaaacgccgcactaagcaaactgctcggaagtctactggtggcaaggcgccacgcaaacagttggcgactaaggcagcccgcaaaagcgctccggccaccggcggcgtgaaaaagccccaccgctaccggccgggcaccgtggctctgcgcgagatccgccgttatcagaagtcccgactcggaccgatg

SEQ ID NO: 10289 - DNA, 203 bp, synthetic construct
  source 1..203: mol_type = other DNA
ggcgcgccagtcctaaggaacgcgctcctagagctcgggccgtggctcgtcggggtctgtgtcttttggctccgagggcagtcgctgggcttccgagaggggttggggctgcgtaggggcgctttgttttgttcggttttgtttttttgagagtgcgagagaggcggtcgtgcagacccgggagaaagcgactcggaccgatg

SEQ ID NO: 10290 - DNA, 203 bp, synthetic construct
  source 1..203: mol_type = other DNA
ggcgcgccagtcctgactaccgctggtcagcgccaagtgacttacgcccccgaccctgagccgggaccgctaggcgaggaggatcagatctccgctcgagaatctgaaggtgccctggtcctggaggagttccgtcccagcccgcggtctcccgggccgccctcctgaccggccggctcccggttcggcgactcggaccgatg

SEQ ID NO: 10291 - DNA, 203 bp, synthetic construct
  source 1..203: mol_type = other DNA
ggcgcgccagtccttactgtcggagtgtcagctctccatctgtctctgcctggcaggcgcacgcgcccagcaccctgcctccagcgatgccgccccagcccctctgatggccctcctctctgctgccactcattccagaacaggaggcatgagcccggaacgcgcttgcttttaggagacagccacttcgactcggaccgatg

SEQ ID NO: 10292 - DNA, 203 bp, synthetic construct
  source 1..203: mol_type = other DNA
ggcgcgccagtcctatcctacgtactaaacagacagctcggaaatccaccggcggtaaagcgccacgcaagcagctggctaccaaagctgctcgcaagagcgcgccggctaccggcggcgtgaaaaagcctcaccgttaccgcccgggcactgtggctctgcgcgagatccgccgctaccaaaagtcgcgactcggaccgatg

SEQ ID NO: 10293 - DNA, 203 bp, synthetic construct
  source 1..203: mol_type = other DNA
ggcgcgccagtcctgacacacgtactaaacagacagctcggaaatccaccggcggtaaagcgccacgcaagcagctggctaccaaggctgctcgcaagagcgcgccggctaccggcggcgtgaaaaaacctcaccgttaccgcccgggcactgtggctctgcgcgagatccgccgctaccaaaagtcgcgactcggaccgatg

SEQ ID NO: 10294 - DNA, 203 bp, synthetic construct
  source 1..203: mol_type = other DNA
ggcgcgccagtcctgagcgtcgtactaaacagacagctcggaaatccaccggtggtaaagcgccacgcaagcagctggctaccaaggctgctcgcaagagcgcgccggctaccggcggcgtgaaaaagcctcaccgttaccgcccgggcactgtggctctgcgcgagatccgccgctaccaaaagtcgcgactcggaccgatg

SEQ ID NO: 10295 - DNA, 203 bp, synthetic construct
  source 1..203: mol_type = other DNA
ggcgcgccagtcctcaaagacgtactaaacagacagctcggaaatccactggcggtaaagcgccacgcaagcagctggctaccaaggctgctcgcaagagcgcgccggctaccggcggcgtgaaaaagcctcaccgttaccgcccgggcactgtggctctgcgcgagatccgccgctaccaaaagtcgcgactcggaccgatg

SEQ ID NO: 10296 - DNA, 203 bp, synthetic construct
  source 1..203: mol_type = other DNA
ggcgcgccagtcctcatgcgcgtccctggagcgatcagggctcaggagcccgacccggagcccggggcgtccgcgctgacttcgggtccccggagcctggggcacggcagcgagaagacgacggcggagaaggcgacagcggagaaggaaggcaggctgcaggggcgccgtcggcgcagcgggccgggcgactcggaccgatg

SEQ ID NO: 10297 - DNA, 203 bp, synthetic construct
  source 1..203: mol_type = other DNA
ggcgcgccagtcctattgtccgtccctggagcgatcagggctcaggagcccgacccggagcccggggcgtccgcgctgacttcgggtccccggagcctggggcacggcaggaagaagacgacggcggagaaggcgacagcggagaaggcaggcaggctgcaggggcgccgtcggcgcggcgggccgggcgactcggaccgatg

SEQ ID NO: 10298 - DNA, 203 bp, synthetic construct
  source 1..203: mol_type = other DNA
ggcgcgccagtcctgcgtagcgtcggttgccgccttagcgggcgcctccttttcatccctcatccttcatccctggctttcgcgctctagcggagtgggatctgcgaacacgtgaggcgggggcgcggtccccaggctgccgagatggccctgagcgacgaaccggccgcgtgcggccccgaggaggacgactcggaccgatg

SEQ ID NO: 10299 - DNA, 203 bp, synthetic construct
  source 1..203: mol_type = other DNA
ggcgcgccagtccttggtatcgttcgggggcggggcctgctccctctgctctgggtctccgccggcgcccgccccgccagcctcacctgcgcggcacgtgacccgcaccgcccgtgggcaccttgaaggcggatcccgcgcgcccccgctcctgcaggctgtttttcttcaaataaagaacatggtgacgactcggaccgatg

SEQ ID NO: 10300 - DNA, 203 bp, synthetic construct
  source 1..203: mol_type = other DNA
ggcgcgccagtcctagaggactaaagggaaaaaggaagaatgcaacaaaactgaagtatgttctgccacgttcctgaactgcagccataggagccctcccagccctacccaaaccagcctactccctctcaagagctcacagctgcaggactagagccagatgtgccccagcaataaggacttcttcccgactcggaccgatg

SEQ ID NO: 10301 - DNA, 203 bp, synthetic construct
  source 1..203: mol_type = other DNA
ggcgcgccagtcctaataccctactgccttctccgaccgtccgtcctcggggcaggcgtgctctcttccctgagcttttaggggttggcttttccagttccagatcagctacagcaaacatcgttcgagatgtcccaccaagagggcagcacaggtggcttaccagacttagtgactgaaagcctgttcgactcggaccgatg

SEQ ID NO: 10302 - DNA, 203 bp, synthetic construct
  source 1..203: mol_type = other DNA
ggcgcgccagtcctgaagtactcaataagtctgcttccaccttccagcttactggcttcccaggcatggagaaggcacatcactggatattcatcccattattggcagcctacatctccatacttcttggcaatggcactcttctctttctcatcagaaatgatcataacctccatgagcccatgtaccgactcggaccgatg

SEQ ID NO: 10303 - DNA, 203 bp, synthetic construct
  source 1..203: mol_type = other DNA
ggcgcgccagtcctacaacactcaataagtctgcttccaccttccagcttactggcttcccaggcatggagaaggcacatcactggatattcatcccattattggcagcctacatctccatacttcttggcagtggcactcttctctttctcatcaggaatgatcataacctccatgagcccatgtaccgactcggaccgatg

SEQ ID NO: 10304 - DNA, 203 bp, synthetic construct
  source 1..203: mol_type = other DNA
ggcgcgccagtcctagccatctcaatacgtctgcttccaccttccagcttactggcttcccaggcatggagaaggcacatcactggatattcatcccattattggcagcctacatctccatacttcttggcaatggcactcttctctttctcatcaggaatgatcataacctccatgagcccatgtaccgactcggaccgatg

SEQ ID NO: 10305 - DNA, 203 bp, synthetic construct
  source 1..203: mol_type = other DNA
ggcgcgccagtccttatttcctcaatacgtctgcttccaccttccagcttactggcttcccaggcatggagaaggcacatcactggatattcatcccattattggcagcctacatctccatacttcttggcagtggcactcttctctttctcatcaggaatgatcataacctccatgagcccatgtaccgactcggaccgatg

SEQ ID NO: 10306 - DNA, 203 bp, synthetic construct
  source 1..203: mol_type = other DNA
ggcgcgccagtccttcccagctcatccttctactcgtgacacttcccagttctgcctttgtgaaagcaaagatgagcaacactcaagctgagaggtccataataggcatgatcgacatgtttcacaaatacaccggacgtgatggcaagattgagaagccaagcctgctgacgatgatgaaggagaaccgactcggaccgatg

SEQ ID NO: 10307 - DNA, 203 bp, synthetic construct
  source 1..203: mol_type = other DNA
ggcgcgccagtcctacgggtctcatccttctactcgtgacacttcccagttctgcctttttgaaagcaaagatgagcaacagtcaagctgagaggtccataataggcatgatcgacatgtttcacaaatacaccggacgtgatggcaagattgagaagccaagcctgctgacgatgatgaaggagaaccgactcggaccgatg

SEQ ID NO: 10308 - DNA, 203 bp, synthetic construct
  source 1..203: mol_type = other DNA
ggcgcgccagtcctgctactctcatccttctactcgtgacacttcccagttctgcgtttttgaaagcaaagatgagcaacactcaagctgagaggtccataataggcatgatcgacatgtttcacaaatacaccggacgtgatggcaagattgagaagccaagcctgctgacgatgatgaaggagaaccgactcggaccgatg

SEQ ID NO: 10309 - DNA, 203 bp, synthetic construct
  source 1..203: mol_type = other DNA
ggcgcgccagtcctaaacgcctcatccttctactcgtgacacttcccagttctggctttgtgaaagcaaagatgagcaacactcaagctgagaggtccataataggcatgatcgacatgtttcacaaatacaccggacgtgatggcaagattgagaagccaagcctgctgacgatgatgaaggagaaccgactcggaccgatg

SEQ ID NO: 10310 - DNA, 203 bp, synthetic construct
  source 1..203: mol_type = other DNA
ggcgcgccagtccttttcggctcatccttctactcgtgacacttcccagttctggctttttgaaagcaaagatgagcaacactcaagctgagaggtccataataggcatgatcgacatgtttcacaaatacaccggacgtgatggcaagattgacaagccaagcctgctgacgatgatgaaggagaaccgactcggaccgatg

SEQ ID NO: 10311 - DNA, 203 bp, synthetic construct
  source 1..203: mol_type = other DNA
ggcgcgccagtcctcgcccgctccaaagaccccgacaggccccggcgggtgggaggcgcgcgccccggggcgggcggggctccccctaccggccagacccagggagaggcgcgcggaggctgcgaaggttccagaagggcggggagggggcgccgcgcgctgaccctccctgggcaccgctggggacgcgactcggaccgatg

SEQ ID NO: 10312 - DNA, 203 bp, synthetic construct
  source 1..203: mol_type = other DNA
ggcgcgccagtcctgactacctcggtgcccgcagcgccggggcgtggaggcgttaacgcgcacgcgcttaaggatccggccgtggccgagcgcgcggccgtaagaccgcgggtgactagcatgcagatacccatgctctgactttctgcccctccactgacatggcccaccggggtggggagagggaccgactcggaccgatg

SEQ ID NO: 10313 - DNA, 203 bp, synthetic construct
  source 1..203: mol_type = other DNA
ggcgcgccagtcctcttcccctgcctggcaggcgcacgcgcccagcaccctgcctccagcgatgccgccccagcccctctgatggccctcctctctgctgccactcattccagaacaggaggcatgagcccggaacgcgcttgcttttaggagacagccactttctgtgtggtacgctggattcaaggcgactcggaccgatg

SEQ ID NO: 10314 - DNA, 203 bp, synthetic construct
  source 1..203: mol_type = other DNA
ggcgcgccagtcctactcttcttatctggtcggtcatctctgtaacctccctaccaaggactaattggtctttaaaactcctcaatgcaccgggcgcggtggctcacgcctgtaatcccagcactttgggaggccgagacgggcagatcacgaggtcaggaaatcgagaccatcttggctaacaagaacgactcggaccgatg

SEQ ID NO: 10315 - DNA, 203 bp, synthetic construct
  source 1..203: mol_type = other DNA
ggcgcgccagtcctttgtcgcttatctggtcggtcatctctgtaacctccctaccaaggactaattggtctttaaaactcctcaatgcaccgggcgcggtggctcacgcctgtaatcccagcactttgggaggccgaggcgggcagatcacgaggtcaggaaatcgaaaccatcttggctaacaagaacgactcggaccgatg

SEQ ID NO: 10316 - DNA, 203 bp, synthetic construct
  source 1..203: mol_type = other DNA
ggcgcgccagtcctctggtacttccgtccagaccggaacccaagatggctgcgctgttgctgagttggtctcttcccatggcgatgtccatctgccaccgtggcactggtattgctttgagtgcaggggtctctctttttggcatgtcggccctgttactccctgggaactttgagtcttatttggaacgactcggaccgatg

SEQ ID NO: 10317 - DNA, 203 bp, synthetic construct
  source 1..203: mol_type = other DNA
ggcgcgccagtccttaacaacttttatagctccctggttcaacctcaaggccttgaggttttggcagctctggaggatgagagagaacatggccaggggcccttgcaacacgccgagatgggcgtccctgatggtgctggtcgccataggcaccgccgtgacagcggccgtcaaccctggcgtcgtggcgactcggaccgatg

SEQ ID NO: 10318 - DNA, 203 bp, synthetic construct
  source 1..203: mol_type = other DNA
ggcgcgccagtcctgtagaccttttatagctccctggttcaacctcaaggccttgaggttttggcagctctggaggatgagagagaacatggccaggggcccttgcaacgcgccgagatgggcgtccctgatggtgctcgtcgccataggcaccgccgtgacagcggccgtcaaccctggcgtcgtggcgactcggaccgatg

SEQ ID NO: 10319 - DNA, 203 bp, synthetic construct
  source 1..203: mol_type = other DNA
ggcgcgccagtccttgtaaagaacccgggccggacgctgccggcaccgccagcgcacagccccaaccgccgccgccccccccacccgctcccaaggagtccccattctccatcaagaacctgctcaacggagaccaccaccggccgccccctaagcctcagccgcccccacggacgctcttcgcgccacgactcggaccgatg

SEQ ID NO: 10320 - DNA, 203 bp, synthetic construct
  source 1..203: mol_type = other DNA
ggcgcgccagtcctattgtcgaagaggacgggtcaagtgctggcttccggcggaaaagcgcgcgagcaagatggccaccaccaagcgcgtcttgtacgtgggtggactggcagaggaagtggacgacaaagttcttcatgctgcgttcattccttttggagacatcacagatattcagattcctctggcgactcggaccgatg

SEQ ID NO: 10321 - DNA, 203 bp, synthetic construct
  source 1..203: mol_type = other DNA
ggcgcgccagtccttggtatgacagagccctgcacccctaattcccggtggaaaactcctgttgccgtttccctccaccggcctggagtctcccagtcttgtcccggcagtgccgccctccccactaagacctaggcgcaaaggcttggctcatggttgacagctcagagagagaaagagctgagggacgactcggaccgatg

SEQ ID NO: 10322 - DNA, 203 bp, synthetic construct
  source 1..203: mol_type = other DNA
ggcgcgccagtcctagaggagacaggccagtgcctggcaccccggggttgccagggtccacggggaacccgaagtccgaggagcccgaggtcccggaccaggaggggctgcagcgcatcaccggcctgtctcccggccgttcggctctcatagtggcggtgctgtgctacatcaatctcctgaactaccgactcggaccgatg

SEQ ID NO: 10323 - DNA, 203 bp, synthetic construct
  source 1..203: mol_type = other DNA
ggcgcgccagtcctggtcaggacaggccagtgcctggcgccccggggttgccagggtccacggggaacccgaagtccgaggagcccgaggtcccggaccaggaggggctgcagcgcatcaccggcctgtctcccggccgttcggctctcatagtggcggtgctgtgctacatcaatctcctgaactaccgactcggaccgatg

SEQ ID NO: 10324 - DNA, 203 bp, synthetic construct
  source 1..203: mol_type = other DNA
ggcgcgccagtccttatttcgacgggccagtgcctggcaccccggggttgccagggtccacggggaacccgaagtccgaggagcccgaggtccgggaccgggaggggctgcagcgcatcaccggcctgtctcccggccgttcggctctcatagtggcggtgctgtgctacatcaatctcctgaactaccgactcggaccgatg

SEQ ID NO: 10325 - DNA, 203 bp, synthetic construct
  source 1..203: mol_type = other DNA
ggcgcgccagtcctccaattgacgggccagtgcctggcaccccggggttgccagggtccacggggaacctgaagtccgaggagcccgaggtcccggaccaggaggggctgcagcgcatcaccggcctgtctcccggccgttcggctctcatagtggcggtgctgtgctacatcaatctcctgaactaccgactcggaccgatg

SEQ ID NO: 10326 - DNA, 203 bp, synthetic construct
  source 1..203: mol_type = other DNA
ggcgcgccagtcctcgcaacgactacaggggagttttgttgaagttgcaaagtcctggagcctccagagggctgtcggcgcagtagcagcaagcagcagagtccgcacgctccggcgaggggcagaagagcgcgagggagcgcggggcagcagaagcgagagccgagcgcggacccagccaggacccacgactcggaccgatg

SEQ ID NO: 10327 - DNA, 203 bp, synthetic construct
  source 1..203: mol_type = other DNA
ggcgcgccagtcctggctgggagccgcagtcagatcctagcgtcgagccccctctgagtcaggaaacattttcagacctatggaaactacttcctgaaaacaacgttctgtcccccttgccgtcccaagcaatggatgatttgatgctgtcctcggacgatattgaacaatggttcactgaagacccacgactcggaccgatg

SEQ ID NO: 10328 - DNA, 203 bp, synthetic construct
  source 1..203: mol_type = other DNA
ggcgcgccagtcctcgacgtgagccgggccccggccgctgtccagccgctccgtgccccgcgcgtcctgcgccgccgccaccgcctcctggggagacgcagccacttgcccgccatggatactcccagggtcctgctctcggccgtcttcctcatcagttttctgtgggatttgcccggtttccagcacgactcggaccgatg

SEQ ID NO: 10329 - DNA, 203 bp, synthetic construct
  source 1..203: mol_type = other DNA
ggcgcgccagtccttttcgggagccgggccccggccgctgtccagccgctccgtgccccgcgcgtcctgcgccgccgccaccgcctcttggggagacgcagccacttgcccgccatggatactcccagggtcctgctctcggccgtcttcctcatcagttttctgtgggatttgcccggtttccagcacgactcggaccgatg

SEQ ID NO: 10330 - DNA, 203 bp, synthetic construct
  source 1..203: mol_type = other DNA
ggcgcgccagtcctcgatccgatcgacttactccgcggagttggcctcatttctgcacagagtcggcgctccctgtagtttctcctctcgaacgccaggtggagcaaccggccggataccgccacagccctggcaggcggcgctgtgatgcctgagctgatcctgtatgttgcaatcactctatccgtcgactcggaccgatg

SEQ ID NO: 10331 - DNA, 203 bp, synthetic construct
  source 1..203: mol_type = other DNA
ggcgcgccagtcctatcaaggatcggcttactccgcggagttggcctcatttctgcacagagtcggcgctccctgtagtttctcctctcgaacgccaggtggagcaaccggccggataccgccacagccctggcaagaggcgctgtgatgcctgagctgatcctgtatgttgcaatcactctatccgtcgactcggaccgatg

SEQ ID NO: 10332 - DNA, 203 bp, synthetic construct
  source 1..203: mol_type = other DNA
ggcgcgccagtcctgactacgatcggcttactccgcggagttggcctcatttctgcacagagtcggcgctccctgtagtttctcctctcgaacgccaggtggagcaaccggccggataccgccacagccctggcaggcggcgctgtgatgcctgagctgatcctgtatgttgcaatcactctatccgtcgactcggaccgatg

SEQ ID NO: 10333 - DNA, 203 bp, synthetic construct
  source 1..203: mol_type = other DNA
ggcgcgccagtcctcggtgagcaaggcgcgcatgcgcaccgagggtggagccgctgagcacagaaccggaaacttagagacaaagttcggagccccgcccccgccgcgcgccgctgagttgtctggccccgccgacccacggctcacgacccaccgacccacgaatcggcccggccgtcgcgtgcacccgactcggaccgatg

SEQ ID NO: 10334 - DNA, 203 bp, synthetic construct
  source 1..203: mol_type = other DNA
ggcgcgccagtcctgtccgcgcaaggcgcgcatgcgtaccgagggtggagccgctgagcacagaaccggaaacttagagacaaagttcggagccccgcccccgccgcgcgccgctgagttgtctggccccgccgacccacggcccacgacccaccgacccacgaatcggcccggccgtcgcgtgcacccgactcggaccgatg

SEQ ID NO: 10335 - DNA, 203 bp, synthetic construct
  source 1..203: mol_type = other DNA
ggcgcgccagtcctttgcttgccgtgctgttcccgccaattcctgtggtaatccttaccgtggcgagttccgcgctcaatggagacgtttgaccccaccgagctgcccgagctgcttaaactttattaccggaggctctttccctactctcagtactatcgctggctcaactacggtggagtgataaacgactcggaccgatg

SEQ ID NO: 10336 - DNA, 203 bp, synthetic construct
  source 1..203: mol_type = other DNA
ggcgcgccagtcctgaatctgccgtgctgttcccgccaattcctgtggtaatccttaccgtggcgagttccgcgctcaatggagacgtttgcccccaccgagctgcccgagctgcttaaactttattaccggaggctctttccctactctcagtactatcgctggctcaactacggtggagtgataaacgactcggaccgatg

SEQ ID NO: 10337 - DNA, 203 bp, synthetic construct
  source 1..203: mol_type = other DNA
ggcgcgccagtcctggtggcgccgtgctgttcccgccagttcctgtggtaatccttaccgtggcgagttccgcgctcaatggagacgtttgaccccaccgagctgcccgagctgcttaaactttattaccggaggctctttccctactctcagtactatcgctggctcaactacggtggagtgataaacgactcggaccgatg

SEQ ID NO: 10338 - DNA, 203 bp, synthetic construct
  source 1..203: mol_type = other DNA
ggcgcgccagtcctaccagcgcctcctgcttgaggtagttgtttttactcccagtccccaggctcacgagccccacgcgcgctcaatctgccctcccgcttctcctcgccactccgagttctgcgccctcgagatccagcgcatccgcggggtgggcgggtcctggcagctctttgccctcttccaaccgactcggaccgatg

SEQ ID NO: 10339 - DNA, 203 bp, synthetic construct
  source 1..203: mol_type = other DNA
ggcgcgccagtcctagcgccgcctcctgcttgaggtagttgtttttactcccagtccccaggctcacgagccccacgcgcgctcaatctgccctcccgcttctcctcgccactccgagttctgcgccctcgagatccagcgcatccgcggggtgggcgggtcctggcggctctttgccctcttccaaccgactcggaccgatg

SEQ ID NO: 10340 - DNA, 203 bp, synthetic construct
  source 1..203: mol_type = other DNA
ggcgcgccagtcctactcttgccttcgccagcagcgccgcggcggaaccgggcgcaggggagcgagcccggccccgccagcccagcccagcccagcccagccctactccctccccacgccagggcagcagccgttgctcagagagaaggtggaggaagaaatccagaccctagcacgcgcgcaccatccgactcggaccgatg

SEQ ID NO: 10341 - DNA, 203 bp, synthetic construct
  source 1..203: mol_type = other DNA
ggcgcgccagtccttcatgcgcgcgagttggactgtgaagaaacatggcggccgcgacgttgacttcgaaattgtactccctgctgttccgcaggacctccaccttcgccctcaccatcatcgtgggcgtcatgttcttcgagcgcgccttcgatcaaggcgcggacgctatctacgaccacatcaaccgactcggaccgatg

SEQ ID NO: 10342 - DNA, 203 bp, synthetic construct
  source 1..203: mol_type = other DNA
ggcgcgccagtccttcgatggcggggcggatggcgagggagcggggcgagctgctttttgaggctgcgcactcgcatggccccacctcgcaggtccatttccggcgccgcggctgttccgggcggagaccgcttgtgctggagtcggagttgtaacgctccactgactgatagagcgaccggccgacccgactcggaccgatg

SEQ ID NO: 10343 - DNA, 203 bp, synthetic construct
  source 1..203: mol_type = other DNA
ggcgcgccagtcctcagaaggctcgtccgcctaataccgcgcctgcgcaccgcgtctcttcctttctgggctcggacctaggtcgcggcgacatggccaaacgtaccaagaaagtcgggatcgtcggtaaatacgggacccgctatggggcctccctccggaaaatggtgaagaaaattgaaatcagccgactcggaccgatg

SEQ ID NO: 10344 - DNA, 203 bp, synthetic construct
  source 1..203: mol_type = other DNA
ggcgcgccagtccttggtatgctcgtccgcctaataccgcgcctgcgcaccgcgtctcttcctttctgggctcggacctaggtcgcggcgacatggccaaacgtaccaagaaagttgggatcgtcggtaaatacgggacccgctatggggcctccctccggaaaatggtgaagaaaattgaaatcagccgactcggaccgatg

SEQ ID NO: 10345 - DNA, 203 bp, synthetic construct
  source 1..203: mol_type = other DNA
ggcgcgccagtcctgtcgctgctgtctgtgtacttccggcagcctccagacagtttcttccgcttcctgtaccacccggctcaagtagcggacacggaacagggaactatcagcccgtcggcctccgggccctgcattctctagctatggaccgggaccttttgcggcagtcgctaaattgccacgggcgactcggaccgatg

SEQ ID NO: 10346 - DNA, 203 bp, synthetic construct
  source 1..203: mol_type = other DNA
ggcgcgccagtcctccgaccgctgtctgtgtacttccggcagcctccagacagtttcttccgcttcctgtaccacccggctcaagtagcggacacggaacagggaactatcagcccgtcggcctccgggccctgtattctctagccatggaccgggaccttttgcggcagtcgctaaattgccacgggcgactcggaccgatg

SEQ ID NO: 10347 - DNA, 203 bp, synthetic construct
  source 1..203: mol_type = other DNA
ggcgcgccagtcctgaagtagctgtctgtgtacttccggcagcctccagacagtttcttccgcttcctgtaccaccctgctcaagtagcggacacggaacagggaactatcagcccgtcggcctccgggccctgcattctctagccatggaccgggaccttttgcggcagtcgctaaattgccacgggcgactcggaccgatg

SEQ ID NO: 10348 - DNA, 203 bp, synthetic construct
  source 1..203: mol_type = other DNA
ggcgcgccagtcctccaattgcttccgcctccttctttctcgacaagatggccacaccggcggtaccagtaagtgctcctctggccacgccaaccccagtcccggcggcggccccagcctcagttccagcgccaacgccagcaccggctgcggctccggttcccgctgcggctccagcctcatcctcacgactcggaccgatg

SEQ ID NO: 10349 - DNA, 203 bp, synthetic construct
  source 1..203: mol_type = other DNA
ggcgcgccagtccttcccaggcttccgcctccttttttctcgacaagatggccacaccggcggtaccagtaagtgctcctccggccacgccaaccccagtcccggcggcggccccagcctcagttccagcgccaacgccagcaccggctgcggctccggttcccgctgcggctccagcctcatcctcacgactcggaccgatg

SEQ ID NO: 10350 - DNA, 203 bp, synthetic construct
  source 1..203: mol_type = other DNA
ggcgcgccagtcctgtgccagcttccgtctccttctttctcgacaagatggccacaccggcggtaccagtaagtgctcctccggccacgccaaccccagtcccggcggcggccccagcctcagttccagcgccaacgccagcaccggctgcggctccggttcccgctgcggctccagcctcatcctcacgactcggaccgatg

SEQ ID NO: 10351 - DNA, 203 bp, synthetic construct
  source 1..203: mol_type = other DNA
ggcgcgccagtcctcattatgcttccgtctccttctttctcgacaagatggccacaccggcggtaccagtaagtgctcctctggccacgccaaccccagtcccggcggcggccccagcctcagttccagcgccaacgccagcaccggctgcggctccggttcccgctgcggctccagcctcatcctcacgactcggaccgatg

SEQ ID NO: 10352 - DNA, 203 bp, synthetic construct
  source 1..203: mol_type = other DNA
ggcgcgccagtcctacgggtggactggggacctcactcaggaccgtggggagttggctgaaggacttggggagcccagaagctgccaccgaaccaagaaccacctctgtgcagaaaagcaaccaccttgttctctattctgctgcccgagacaaccacatcctcctcctcctacacccaaaggctccccgactcggaccgatg

SEQ ID NO: 10353 - DNA, 203 bp, synthetic construct
  source 1..203: mol_type = other DNA
ggcgcgccagtcctatgtacggactggggacctcgctcaggaccgtggggagttggctgaaggacttggggagcccagaagttgccaccgaaccaagaaccacctctgtgcagaaaagcaaccaccttgttctctattctgctgcccgagacaaccacatcctcctcctcctacacccaaaggctccccgactcggaccgatg

SEQ ID NO: 10354 - DNA, 203 bp, synthetic construct
  source 1..203: mol_type = other DNA
ggcgcgccagtcctcgacgtggagctcagtgccagaggaggggattcccggcgccgggtcagagccccttttttcttttgccgaaagaccctttctgctggggagcctcttgtgtccagcctaggcccgcgtgcagcgccgacggatgatcgtcttcttggcaagaaagtgaataaacttaattgagacgactcggaccgatg

SEQ ID NO: 10355 - DNA, 203 bp, synthetic construct
  source 1..203: mol_type = other DNA
ggcgcgccagtccttttcggggagctcagtgccagaggaggggattcccggcgccgggtcagagcccctttttttttttgccgaaagaccctttctgctggggagcctcttgtgtccagcctaggcccgcgtgcagcgccgacggatgaccgtcttcttggcaagaaagtgaataaacttaattgagacgactcggaccgatg

SEQ ID NO: 10356 - DNA, 203 bp, synthetic construct
  source 1..203: mol_type = other DNA
ggcgcgccagtcctacctcgggagctcagtgccagaggaggggattcctggcgccgggtcagagccccttttttcttttgccgaaagaccctttctgctggggagcctcttgtgtccagcctaggcccgcgtgcagcgccgacggatgaccgtcttcttggcaagaaagtgaataaacttaattgagacgactcggaccgatg

SEQ ID NO: 10357 - DNA, 203 bp, synthetic construct
  source 1..203: mol_type = other DNA
ggcgcgccagtcctcgcccgggaggccgttcctgcgcggccgccccattcccagaccggccgccagcccatctggttagctcccgccgctccgcgccgcccgggagtcgggagccgcggggaaccgggcacctgcatccgccgctgggagtgagtggctccagctggtgcctggcctgtgtctcttggcgactcggaccgatg

SEQ ID NO: 10358 - DNA, 203 bp, synthetic construct
  source 1..203: mol_type = other DNA
ggcgcgccagtcctcgatccggagtaagtctgtctgatctaggatgtcttgcttaccacccaggtagggggttatatactcccagcctttctgattccattgtaactcttgccgaaatccgggtgaacggaagtagtctctttaagaactggtatgggcaggcccaagttgtcaaggcttcggaggtacgactcggaccgatg

SEQ ID NO: 10359 - DNA, 203 bp, synthetic construct
  source 1..203: mol_type = other DNA
ggcgcgccagtcctatcaagggagtaagtctgtctgatctaggatgtcttgcttatcacccaggtagggggttatatactcccagcctttctgattccattgtaactcttgccgaaatccgggtgaacggaagtagtctctttaagaactggtatgggcaggcccaagttgtcaaggcttcggaggtacgactcggaccgatg

SEQ ID NO: 10360 - DNA, 203 bp, synthetic construct
  source 1..203: mol_type = other DNA
ggcgcgccagtccttccttaggatttctgttgtgtttaaattctccacagattgtattgtaaatattttatgaagtagagcatatgtatatatttatatatacgtgcacatacattagtagcactacctttggaagtctcagctcttgcttttcgggactgaagccagttttgcatgataaaagtggccgactcggaccgatg

SEQ ID NO: 10361 - DNA, 203 bp, synthetic construct
  source 1..203: mol_type = other DNA
ggcgcgccagtcctgaggccggccgccggcactggattgcttctgtctggcggcggcagcatggcggcgggggcggctgaggcagctgtagcggccgtggaggaggtcggctcagccgggcactttgaggagctgctgtgcctcaaagccaagtccctccttgtggtccatttctgggcaccatgggccgactcggaccgatg

SEQ ID NO: 10362 - DNA, 203 bp, synthetic construct
  source 1..203: mol_type = other DNA
ggcgcgccagtcctcttcccggccgccggcactggattgcttctgtctggcggcggcagcatggcggcgggggcggctgaggcagctgtagcggccgtggaggaggtcggctcagccgggcagtttgaggagctgctgtgcctcaaagccaagtccctccttgtggtccatttctgggcaccatgggccgactcggaccgatg

SEQ ID NO: 10363 - DNA, 203 bp, synthetic construct
  source 1..203: mol_type = other DNA
ggcgcgccagtcctttaataggccgccgggactggattgcttctgtctggcggcggcagcatggcggcgggggcggctgaggcagctgtagcggccgtggaggaggtcggctcagccgggcagtttgaggagctgctgcgcctcaaagccaagtccctccttgtggtccatttctgggcaccatgggccgactcggaccgatg

SEQ ID NO: 10364 - DNA, 203 bp, synthetic construct
  source 1..203: mol_type = other DNA
ggcgcgccagtcctagcgccggccttgaggtgcccagctccgcgctttccgattttgggggcctttccagaaaatgttgcaaaaaagctaagccggcgggcagaggaaaacgcctgtagccggcgagtgaagacgaaccatcgactgccgtgttccttttcctcttggaggttggagtcccctgggcgcgactcggaccgatg

SEQ ID NO: 10365 - DNA, 203 bp, synthetic construct
  source 1..203: mol_type = other DNA
ggcgcgccagtcctagttctggcgattgcgtcccagaaccgacgtcccaccgccttcccacatcggatcgcagggctcccaaaatggcgagtgaggctgcggggactcgctgagcagcggaaggggagcgtgcagagccgctgcggccctcacagtccggagcccggccgtgccgtgccgtagggaaccgactcggaccgatg

SEQ ID NO: 10366 - DNA, 203 bp, synthetic construct
  source 1..203: mol_type = other DNA
ggcgcgccagtcctttgtcgggcggccgggactggattgcttctgtctggcggcggcagcatggcggcgggggcggctgaggcagctgtagcggccgtggaggaggtcggctcagccgggcagtttgaggagctgctgcgcctcaaagccaagtccctccttgtggtccatttctgggcaccatgggccgactcggaccgatg

SEQ ID NO: 10367 - DNA, 203 bp, synthetic construct
  source 1..203: mol_type = other DNA
ggcgcgccagtccttcatgcggctcggccgccagtcggaagcgccagcccagagcctgggaagtggccgcagaggctgctcggccccgctgcccgccaggtcgtgggctcccgctccgggcccggggccaccggctgtggacttcaaaatgagcgtccctgactacatgcagtgtgctgaggaccacccgactcggaccgatg

SEQ ID NO: 10368 - DNA, 203 bp, synthetic construct
  source 1..203: mol_type = other DNA
ggcgcgccagtccttgattgggctgagacctctctcccagagctggggggagaggacaaagccacgccttgccccagcatcctggagctggaggagctcctgcgggcagggaagtcttcttgcagccgtgtggacgaagtttggcccaaccttttcataggagatgcagctggtccttactccctgcccgactcggaccgatg

SEQ ID NO: 10369 - DNA, 203 bp, synthetic construct
  source 1..203: mol_type = other DNA
ggcgcgccagtcctatcctaggctgagacctctctcccagagctggggggagaggacaaagccacgccttgccccagcatcctggagctggaggagctcctgcgggcagggaagtcttcttgcagccgtgtggacgaagtttggcccaaccttttcataggagatgtagctggtccttactccctgcccgactcggaccgatg

SEQ ID NO: 10370 - DNA, 203 bp, synthetic construct
  source 1..203: mol_type = other DNA
ggcgcgccagtcctgacacaggctgagacctctctcctagagctggggggagaggacaaagccacgccttgccccagcatcctggagctggaggagctcctgcgggcagggaagtcttcttgcagccgtgtggacgaagtttggcccaaccttttcataggagatgcagctggtccttactccctgcccgactcggaccgatg

SEQ ID NO: 10371 - DNA, 203 bp, synthetic construct
  source 1..203: mol_type = other DNA
ggcgcgccagtccttaacaaggctgccggccggcggccccgcgctcgcccgccccgcttccgcccgctgtcctgctgcacgaacccttccaactctcctttcctcccccacccttgagttacccctctgtctttcctgctgttgcgcgggtgctcccacagcggagcggagattacagagccgcccggcgactcggaccgatg

SEQ ID NO: 10372 - DNA, 203 bp, synthetic construct
  source 1..203: mol_type = other DNA
ggcgcgccagtcctcgtaggggctgccggccggcggccccgcgctcgcccgccccgcttccgcccgctgtcctgctgcacgaacccttccaactctcctttcctcccccacccttgagttacccctctgtctttcctgctgtttcgcgggtgctcccacagcggagcggagattacagagccgccgggcgactcggaccgatg

SEQ ID NO: 10373 - DNA, 203 bp, synthetic construct
  source 1..203: mol_type = other DNA
ggcgcgccagtcctcaaagaggcttactgaggctggtggagggagccactgctgggctcaccatggaccgccggatgtggggggcccacgtcttctgcgtgttgagcccgttaccgaccgtattgggccacatgcacccagaatgtgacttcatcacccagctgagagaggatgagagtgcctgtctacgactcggaccgatg

SEQ ID NO: 10374 - DNA, 203 bp, synthetic construct
  source 1..203: mol_type = other DNA
ggcgcgccagtcctcatgcgggcttactgaggctggtggagggagccactgctgggctcaccatggaccgctggatgtggggggcccacgtcttctgcgtgttgagcccgttaccgaccgtattgggccacatgcacccagaatgtgacttcatcacccagctgagagaggatgagagtgcctgtctacgactcggaccgatg

SEQ ID NO: 10375 - DNA, 203 bp, synthetic construct
  source 1..203: mol_type = other DNA
ggcgcgccagtccttcgatggggcagccggccgtgcgcctgcgcggtggcccttccatcccggcagtcgtggctgcagcgctgaggcgagaggttgttgggtgtctccggccacaatgacccaggctgagaagggtgatacggagaacggaaaggagaagggcggcgagaaggagaaggagcagcgcgcgactcggaccgatg

SEQ ID NO: 10376 - DNA, 203 bp, synthetic construct
  source 1..203: mol_type = other DNA
ggcgcgccagtcctcagaaggggcattgcccccagtctcccccaaatttggccattgtccccgggtcttccaacggactgggcgttgctcccggacactgaggactggccccggggtctcgctcaccttcagcagcgtccaccgcctgccacagagcgttcgatcgctcgctgcctgagctcctggtgcgactcggaccgatg

SEQ ID NO: 10377 - DNA, 203 bp, synthetic construct
  source 1..203: mol_type = other DNA
ggcgcgccagtcctcgcaacggggtccgtcctggttcccggccgttgccacgacgacgaagctgccggccaatggctggcggatgggcccaaggttcccggcgtgcagcgcggctgcctgagggcggcaggctcatggcgccggcgtcgcggttgctcgcgctctgggcgctggcggctgtggctctacgactcggaccgatg

SEQ ID NO: 10378 - DNA, 203 bp, synthetic construct
  source 1..203: mol_type = other DNA
ggcgcgccagtcctggagcgggtaggcatttaaaaatgtgtgtgtatgtgtatatatgtatgtgtatgtatgtgtatatatgtatatgtatgtatgtatcgcgtgtatgtgtgtatgtatgcatgtgtatgtatgtatatgtatgtatgtgtatgtgtatatatgtatgtgtgtgtatgtatatgtgtcgactcggaccgatg

SEQ ID NO: 10379 - DNA, 203 bp, synthetic construct
  source 1..203: mol_type = other DNA
ggcgcgccagtcctaaacgcggtcacgtgctgcggaggcttggggaggggcggcgaggcggggtttatagcccgggcgcccgcgggccccacgctttgaccgggtcgtggcagccggagtcgtcttcgggacgcgcctgctcttcgcctttcgctgcagtccgtcgatttctttctccaggaagaaaacgactcggaccgatg

SEQ ID NO: 10380 - DNA, 203 bp, synthetic construct
  source 1..203: mol_type = other DNA
ggcgcgccagtcctggctggggtcccagactccccccagcacagcagagcgcttccctgcccacccgcggaaaccgccccaggtgggccgcgcccccgccccagcagccagcagggcgccagggctgagccggccgtggaggggagcgggtcccgcgggttatacaggcgccggggctccgcggcaggcgactcggaccgatg

SEQ ID NO: 10381 - DNA, 203 bp, synthetic construct
  source 1..203: mol_type = other DNA
ggcgcgccagtcctgcacccggtcccagactccccccagcacagcagagcgcttccctgcccacccgcggaaaccgccccaggtgggccgcgccccctccccagcagccagcagggcgccagggctgagccggccgtggaggggagcgggtcccgcgggttatacaggcgccggggctccgcggcaggcgactcggaccgatg

SEQ ID NO: 10382 - DNA, 203 bp, synthetic construct
  source 1..203: mol_type = other DNA
ggcgcgccagtcctacctcgggtcccctccgcctgacgctcctctctgtctcagccaggactggtttctgtaagaaacagcaggagctgtggcagcggcgaaaggaagcggctgaggcgcttggaacccgaaaagtctcggtgctcctggctacctcgcacagcggtgcccgcccggccgtcagtacccgactcggaccgatg

SEQ ID NO: 10383 - DNA, 203 bp, synthetic construct
  source 1..203: mol_type = other DNA
ggcgcgccagtccttatcctggtcccctccgcctgacgctcctctctgtctcagccaggactggtttctgtaagaaacagcaggagctgtggcagcggcgaaaggaagcggctgaggcgcttggaacccgaaaagtctcggtgctcctggctacctcgcacagcggtgcccgcccggccgtcagtccccgactcggaccgatg

SEQ ID NO: 10384 - DNA, 203 bp, synthetic construct
  source 1..203: mol_type = other DNA
ggcgcgccagtcctaggacgggtcccctccgcctgacgctcctctctgtctcagccaggactggtttctgtaagaaacagcaggagctgtggcagcggcgaaaggaagcggctgaggcgcttggaacccgaaaagtctcggtgctcctggctacctcgcacagtggtgcccgcccggccgtcagtacccgactcggaccgatg

SEQ ID NO: 10385 - DNA, 203 bp, synthetic construct
  source 1..203: mol_type = other DNA
ggcgcgccagtccttgcgttggtcccctccgcctgacgctcctctctgtctcagccaggactggtttctgtaagaaatagcaggagctgtggcagcggcgaaaggaagcggctgaggcgcttggaacccgaaaagtctcggtgctcctggctacctcgcacagcggtgcccgcccggccgtcagtacccgactcggaccgatg

SEQ ID NO: 10386 - DNA, 203 bp, synthetic construct
  source 1..203: mol_type = other DNA
ggcgcgccagtcctcgcccgggtcgcggcaaaggcggtaaaggtttgggtaagggagatgctaagcgtcaccgaaaagtgctgcgggataacatccaaggcatcaccaaaccggccattcggcgccttgctaggcgtggtggggttaagcgaatttccggtttgatttatgaggagactcgtggcgttcgactcggaccgatg

SEQ ID NO: 10387 - DNA, 203 bp, synthetic construct
  source 1..203: mol_type = other DNA
ggcgcgccagtcctaaggaaggtcgcggcaaaggcggtaaaggtttgggtaagggaggtgccaagcgtcaccgaaaagtgctgcgggataacatccaaggcatcaccaaaccggccattcggcgccttgctaggcgtggtggggttaagcgaatttccggtttgatttatgaggagactcgtggcgttcgactcggaccgatg

SEQ ID NO: 10388 - DNA, 203 bp, synthetic construct
  source 1..203: mol_type = other DNA
ggcgcgccagtcctatcaagggtcgcggcaaaggcggtaaaggtttgggtaagggaggtgctaagcgtcaccgaaaagtgctgcgggataacatccaaggcatcaccaaaccggccattcggcgccttgctaggcgtggtggggttaagcgaatttccggtttgatttatgaggagactcgtggcgttcgactcggaccgatg

SEQ ID NO: 10389 - DNA, 203 bp, synthetic construct
  source 1..203: mol_type = other DNA
ggcgcgccagtcctcggtgaggttcgcagcgctgggagcggccgtgacgtcaggcgcccggctgctcctcacttgctctgagacaggtgcggcaagtctactgcgggctggtccgggctcctcaggttcagacccgaccgttatccagtcggttcgtggagaggagaggtgcactttacaggtccccacgactcggaccgatg

SEQ ID NO: 10390 - DNA, 203 bp, synthetic construct
  source 1..203: mol_type = other DNA
ggcgcgccagtccttttgatggttcgcggcgctgggagcggccgtgacgtcaggcgcccggctgctcctcacttgctctgagacaggtgcggcaagtctactgcgggctggtccgggctcctcaggttcagacccgaccgttatccactcggttcgtggagaggagaggtgcactttacaggtccccgcgactcggaccgatg

SEQ ID NO: 10391 - DNA, 203 bp, synthetic construct
  source 1..203: mol_type = other DNA
ggcgcgccagtccttactgtggttcgcggcgctgggagcggccgtgacgtcaggcgcccggctgctcctcacttgctctgagacaggtgcggcaagtctactgcgggctggtccgggctcctcaggttcagacccgaccgttatccagtcggttcgtggagagcagaggtgcactttacaggtccccacgactcggaccgatg

SEQ ID NO: 10392 - DNA, 203 bp, synthetic construct
  source 1..203: mol_type = other DNA
ggcgcgccagtccttcggacggttcgcggcgctgggagcggccgtgacgtcaggcgcccggctgctcctcacttgctctgagacaggtgcggcaagtctactgtgggctggtccgggctcctcaggttcagacccgaccgttatccagtcggttcgtggagaggagaggtgcactttacaggtccccacgactcggaccgatg

SEQ ID NO: 10393 - DNA, 203 bp, synthetic construct
  source 1..203: mol_type = other DNA
ggcgcgccagtcctaccagcgtccccggtcaccggccctgcccccgggccctgtgcttataacctgggatgggcacccctgccagtcctgctctgccgcctgccaccgctgcccgagcccgagtggttcactgcactgtgaaaacagattccagacgccgggaactcacacctccaatcccagacgctcgactcggaccgatg

SEQ ID NO: 10394 - DNA, 203 bp, synthetic construct
  source 1..203: mol_type = other DNA
ggcgcgccagtcctagcgccgtccccggtcaccggccctgcccccgggccctgtgcttataacctgggatgggcacccctgccagtcctgctctgccgcctgccaccgctgcccgagcccgagtggttcactgcactgtgaaaacagattccagacgccgggaactcacgcctccaatcccagacgctcgactcggaccgatg

SEQ ID NO: 10395 - DNA, 203 bp, synthetic construct
  source 1..203: mol_type = other DNA
ggcgcgccagtcctggcgaagtccccggtcaccggccctgcccccgggccctgtgcttataacctgggatgggcacccctgccagtcctgctctgccgcctgccaccgctgcccgagcccgagtggttcactgcactgtgaaaacagattccagacgccgggaactcacgcctccaatcccagatgctcgactcggaccgatg

SEQ ID NO: 10396 - DNA, 203 bp, synthetic construct
  source 1..203: mol_type = other DNA
ggcgcgccagtcctcacttggtggtgttcatcccgggtcgaccggccgctcgcgctgccctgaaactctagtcgccagagaggcggcatgggtttccggaagttctcccccttcctggctctcagtatcttggtcctgtaccaggcgggcagcctccaggcggcgccattcaggtctgccctggagagcgactcggaccgatg

SEQ ID NO: 10397 - DNA, 203 bp, synthetic construct
  source 1..203: mol_type = other DNA
ggcgcgccagtccttggcgcgtttctggcacctacctacctgcttcccgctggggggtggggagttggcccagagtcttaagattggggcagggtggagaggtgggctcttcctgcttcccactcatcttatagctttctttccccagatccgaattcgagatccaaaccaaggaggaaaggatatcacgactcggaccgatg

SEQ ID NO: 10398 - DNA, 203 bp, synthetic construct
  source 1..203: mol_type = other DNA
ggcgcgccagtccttgattgtaaaaccctcccccaccacctccttctccccacccctcgccgcaccacacacagcgcgggcttctagcgctcggcaccggcgggccaggcgcgtcctgccttcatttatccagcagcttttcggaaaatgcatttgctgttcggagtttaatcagaagaggattcctgcgactcggaccgatg

SEQ ID NO: 10399 - DNA, 203 bp, synthetic construct
  source 1..203: mol_type = other DNA
ggcgcgccagtcctatcctataaaacggacatctccagcgtgggtggctcctttttctttttctttttttcccacccttcaggaagtggacgtttcgtaatcttctgatccttgcaccttcttttggggcaaacggggcccttctgcccagatcccctctcttttctcggaaaacaaactactaagtccgactcggaccgatg

SEQ ID NO: 10400 - DNA, 203 bp, synthetic construct
  source 1..203: mol_type = other DNA
ggcgcgccagtccttaacaataaaacggacatctccagcgtgggtggctcctttttctttttctttttttcccacccttcaggaagtggacgtttcgttgtcttctgatccttgcaccttcttttggggcaaacggggcccttctgcccagatcccctctcttttctcggaaaacaaactactaagtccgactcggaccgatg

SEQ ID NO: 10401 - DNA, 203 bp, synthetic construct
  source 1..203: mol_type = other DNA
ggcgcgccagtcctataccttaacaaacgggaggaggaagcgattctggggtttctgtgttgaacggttcttgtccgcgaagatgcgcttcggcctctgtcaggggacttgaacgggcttagtgggcttcagccagcttttctccaccggttccccacggagacccccccccccccccggccgttgcacgactcggaccgatg

SEQ ID NO: 10402 - DNA, 203 bp, synthetic construct
  source 1..203: mol_type = other DNA
ggcgcgccagtcctgagcgttacaacacccgagcaaggacgcgactctcccgacgtggggaggctattctgcccatttggggacacttccccgccgctgccaggacccgcttctctgaaaggctctccttgcagctgcttagacgctggatttttttcgggtagtggaaaaccagcagcctcccgcgacgactcggaccgatg

SEQ ID NO: 10403 - DNA, 203 bp, synthetic construct
  source 1..203: mol_type = other DNA
ggcgcgccagtcctcaaagatacaacacccgagcaaggacgcgactctctcgacgcggggaggctattctgcccatttggggacacttccccgccgctgccaggacccgcttctctgaaaggctctccttgcagctgcttagacgctggatttttttcgggtagtggaaaaccagcagcctcccgcgacgactcggaccgatg

SEQ ID NO: 10404 - DNA, 203 bp, synthetic construct
  source 1..203: mol_type = other DNA
ggcgcgccagtcctgttatgtacggatcggcttactccgcggagttggcctcatttctgcagtcggcgctccctgtagtttctcctctcgaacgccaggtggagcaaccggccggataccgccacagccctggcaggcggcgctgtgatgcctgagctgatcctgtatgttgcaattactctatccgtcgactcggaccgatg

SEQ ID NO: 10405 - DNA, 203 bp, synthetic construct
  source 1..203: mol_type = other DNA
ggcgcgccagtcctaatacctcagtgcctgaggcagagactgcgagaaaaaaacgcgcttcattccttcttccaccgccatactgtattttatactaaatctcatttttattccaacattttactcccgctcgatatagcccttggcgaggtgcctggctccatagattaaagcaaggagagccaatccgactcggaccgatg

SEQ ID NO: 10406 - DNA, 203 bp, synthetic construct
  source 1..203: mol_type = other DNA
ggcgcgccagtcctggagcgtccctactcccagtctccacccaactcccccgcccgccccgtgcaggctgtggagactcccttcccgggggagggggcccccactgccgcaggtgccccctctgcctccaccccgctctgaaatagaaaatgtctgcagacggcggaggcatccaggacacccaggaccgactcggaccgatg

SEQ ID NO: 10407 - DNA, 203 bp, synthetic construct
  source 1..203: mol_type = other DNA
ggcgcgccagtcctcattattcccttctgatggtgaatgggaactcccttcctcctgcagcagcctgcctgcagctgtcctggtagaacagtgtggacattgcagaagctgtcactgtcccagaaagaaagcaccccagagccaaggcaaagagtcttgaaagcgccacaagcagcagctgctgagcccgactcggaccgatg

SEQ ID NO: 10408 - DNA, 203 bp, synthetic construct
  source 1..203: mol_type = other DNA
ggcgcgccagtcctacgggttccgactcgccctcggccttccgcgccagccgcagccacagccgcaacgccacccgcagccacagccacagccacagccccaggcatagccttcggcacagccccggctccggctcctgcgacagctcctctgggcaccgtccctgcgccgacatcctggaggttgggcgactcggaccgatg

SEQ ID NO: 10409 - DNA, 203 bp, synthetic construct
  source 1..203: mol_type = other DNA
ggcgcgccagtcctgctacttccgactcgccctcggccttccgcgccagccgcagccacagccgcaacgccacccgcagccacagccacagccacagccccaggcatagccttcggcacagccccggctccggctcctgcggcagctcctctgggcaccgtccctgcgccgacatcctggaggttgggcgactcggaccgatg

SEQ ID NO: 10410 - DNA, 203 bp, synthetic construct
  source 1..203: mol_type = other DNA
ggcgcgccagtcctaaacgctccgactcgccctcggccttccgcgccagccgcagcgacagccgcaacgccacccgcagccacagccacagccacagccccaggcatagccttcggcacagccccggctccggctcctgcgacagctcctctgggcaccgtccctgcgccgacatcctggaggttgggcgactcggaccgatg

SEQ ID NO: 10411 - DNA, 203 bp, synthetic construct
  source 1..203: mol_type = other DNA
ggcgcgccagtcctcagctctcgccccactgcgcatggcacgttgcgtactcccctcccagcaaccggtctggcggcggcgcggcagtaaaactgaggaggcggagccaagacggtcggggctgcttgctaactccaggaacaggtttaagtttttgaaactgaagtaggcctacacagtaggaactccgactcggaccgatg

SEQ ID NO: 10412 - DNA, 203 bp, synthetic construct
  source 1..203: mol_type = other DNA
ggcgcgccagtcctgaggcctcggtgcagactccggttctccccaaccccgggcctgggcagctggacactggggcgccgttccccacccggcgcggacttcggaaccggccctgggactgactggctctaccactcgagcgcgtctccgctggacccggaatcccggtcggtccattccccgcgaagcgactcggaccgatg

SEQ ID NO: 10413 - DNA, 203 bp, synthetic construct
  source 1..203: mol_type = other DNA
ggcgcgccagtccttactgttcggtgcagactccggttctccccaaccccgggcctgggcagctgggcactggggcgccgttccccacccggcgcggacttcggaaccggccctgggactgactggctctaccactcgagcgcgtctccgctggacccggaatcccggtcggtccattccccgcgaagcgactcggaccgatg

SEQ ID NO: 10414 - DNA, 203 bp, synthetic construct
  source 1..203: mol_type = other DNA
ggcgcgccagtcctggtggctctgccgccgccgctgccttttttttttctcgagctcttgagatctccggttgggattcctgcggattgacatttctgtgaagcagaagtctgggaatcgatctggaaatcctcctaatttttactccctctccccccgactgctgattcattgggaagtttcaaatccgactcggaccgatg

SEQ ID NO: 10415 - DNA, 203 bp, synthetic construct
  source 1..203: mol_type = other DNA
ggcgcgccagtcctagcgcctctgtggagagtcctgctgccctccagccgggctcctccaccggcccttgcaggggcgcagagagctcggcgcccgcccttccgctcgcctttttcgtcagccggctggagcagcatgggtccgggaggtctctgggctgaggcggcgacagctcctctagttccacccgactcggaccgatg

SEQ ID NO: 10416 - DNA, 203 bp, synthetic construct
  source 1..203: mol_type = other DNA
ggcgcgccagtcctactctttcttgggagcgccagttccgtctgtgtgttcgagtggacaaaatggcgaagatcgccaagactcacgaagatattgaagcacagattcgagaaattcaaggcaagaaggcagctcttgatgaagctcaaggagtgggcctcgattctacaggttattatgaccaggaacgactcggaccgatg

SEQ ID NO: 10417 - DNA, 203 bp, synthetic construct
  source 1..203: mol_type = other DNA
ggcgcgccagtcctttgtcgtcttgggagcgccagttccgtctgtgtgttcgagtggacaaaatggcgaagatcgccaagactcacgaagatattgaagcacagattcgagaaattcaaggcaagaaggcagctcttgatgaagctcaaggagtgggccttgattctacaggttattatgaccaggaacgactcggaccgatg

SEQ ID NO: 10418 - DNA, 203 bp, synthetic construct
  source 1..203: mol_type = other DNA
ggcgcgccagtcctgtttgttgaaaaactggagcctgttcttggcaagaagattctaatgcccaggaacatggcgctgctctgggggctcctggtgctcagctggtcctgcctgcaaggcccctgctccgtgttctcccctgtgagcgccatggagcccttgggccggcagctaactagcaggccgaacgactcggaccgatg

SEQ ID NO: 10419 - DNA, 203 bp, synthetic construct
  source 1..203: mol_type = other DNA
ggcgcgccagtccttcgatgtgagggctttttggagctcgctatgcttaacctggagatgattaaggccccgcttcctggcctcccagcctctaatgccaaaagataagggagaggctggcgtgtgaccccgttttgagtcaggtggacagagggctggccaccttcggaaccatgggtgcaatacggcgactcggaccgatg

SEQ ID NO: 10420 - DNA, 203 bp, synthetic construct
  source 1..203: mol_type = other DNA
ggcgcgccagtcctgcgtagtgaggtgtagacgccaactctccctagctcgctagtgggttgcaggaggtgcttacacatgtttgtttctttgctgccgtcttccagttgctttatctgttcacttgtgccctgactttcaactctgtctccttcctcttcctacagtactcccctgccctcaacaagcgactcggaccgatg

SEQ ID NO: 10421 - DNA, 203 bp, synthetic construct
  source 1..203: mol_type = other DNA
ggcgcgccagtccttggtattgaggtgtagacgccaactctctctagctcgctagtgggttgcaggaggtgcttacgcatgcttgtttctttgctgccgtcttccagttgctttatctgttcacttgtgccctgactttcaactctgtctccttcctcttcctacagtactcccctgccctcaacaagcgactcggaccgatg

SEQ ID NO: 10422 - DNA, 203 bp, synthetic construct
  source 1..203: mol_type = other DNA
ggcgcgccagtcctagaggatgaggtgtagacgccaactctctctagctcgctagtgggttgcaggtggtgcttacacatgtttgtttctttgctgccgtcttccagttgctttatctgttcacttgtgccctgactttcaactctgtctccttcctcttcctacagtactcccctgccctcaacaagcgactcggaccgatg

SEQ ID NO: 10423 - DNA, 203 bp, synthetic construct
  source 1..203: mol_type = other DNA
ggcgcgccagtcctggtcagtgagtcggagctctatggaggcggcagcgggtaccgagtggcggctgcagcagcgactcctctgagctgagtttgaggccgtccccgactccttcctcccccttccctcccccttttttttgttttccgttcccctttcccctcccttccctatccccgacgaccggacgactcggaccgatg

SEQ ID NO: 10424 - DNA, 203 bp, synthetic construct
  source 1..203: mol_type = other DNA
ggcgcgccagtcctgccgtctgagtcggggctctatggaggtggcagcgggtaccgagtggcggctgcagcagcgactcctctgagctgagtttgaggccgtccccgactccttcctcccccttccctcccccttttttttgttttccgttcccctttcccctcccttccctatccccgacgaccggacgactcggaccgatg

SEQ ID NO: 10425 - DNA, 203 bp, synthetic construct
  source 1..203: mol_type = other DNA
ggcgcgccagtcctcacggctgatccggggctcggccaagctgaggcggcggcgcccggccgtgcgcccagctttcaggcgcctggctctcacgatgatgaagaagaagaagtttaagtttaaggtggacttcgagctcgaggagctctcctcagtgcccttcgtcaatggggtcctcttctgcaagacgactcggaccgatg

SEQ ID NO: 10426 - DNA, 203 bp, synthetic construct
  source 1..203: mol_type = other DNA
ggcgcgccagtcctggagcgtgctcctctacctgctccaccctcaatccaccagaaccatgggctgctgtggctgctccagaggctgtggctccggctgtgggggctgtggctccagctgtgggggttgtggctctggctgtgggggctgtggctccggccgtgggggctgtggctctggctgtggggcgactcggaccgatg

SEQ ID NO: 10427 - DNA, 203 bp, synthetic construct
  source 1..203: mol_type = other DNA
ggcgcgccagtcctgctacttggaagcgccccagccccgcagcgatcgcagattcggctttcaaacaaaagaggcgccccggggggtgggaccgggacctcacccggtcctcgcagagttgcggccgccctccccttcagccccggctctccgtatgcgcatgagcagaggcgcctccctctgttcctcgactcggaccgatg

SEQ ID NO: 10428 - DNA, 203 bp, synthetic construct
  source 1..203: mol_type = other DNA
ggcgcgccagtcctgcaccctggagcctccagagggctgtcggcgcagtagcagcgagcagcagagtccgcacgctccggcgaggggcagaagagcgcgagggagcgcggggcagcagaagcgagagccgagcgcggacccagccaggacccagagccctccccagctgcccaggaagagccccagcccgactcggaccgatg

SEQ ID NO: 10429 - DNA, 203 bp, synthetic construct
  source 1..203: mol_type = other DNA
ggcgcgccagtcctcgacgttggcgctggcctgctgccccggcgggtccgccggccggaggcgggagtcacaggaagagccctccacaaaaggaggcctcggcggatcaggacagctgcaggcttctgccaggtgggtgtgcagactggtgagctgccagcaggggcccagacgcgccaggcctggagcgactcggaccgatg

SEQ ID NO: 10430 - DNA, 203 bp, synthetic construct
  source 1..203: mol_type = other DNA
ggcgcgccagtcctgcaaggtgttcagtacgccacaagcgacacaaatgaacacgccttctcagccccgccagcacttctaccctagccgggcccagcccccgagcagtgcagcctcccgagtgcagagtgcagcccctgcccgccctggcccagctgcccatgtctaccctgctggatcccaagtaacgactcggaccgatg

SEQ ID NO: 10431 - DNA, 203 bp, synthetic construct
  source 1..203: mol_type = other DNA
ggcgcgccagtcctcgatcctgttcagtacgccacaagcgacacaaatgaacacgccttctcagccccgccagcacttctaccctagccgggcccagcccccgagcagtgcagcctcccgagtgcagagtgcagcccctgcccgctctggcccagctgcccatgtctaccctgctggatcccaagtaacgactcggaccgatg

SEQ ID NO: 10432 - DNA, 203 bp, synthetic construct
  source 1..203: mol_type = other DNA
ggcgcgccagtcctcagctctgttgcctgttccactaggaatattgtttgcaaggcacaaggtgtcttttggtagtgagcgcgctctgcgcatgcgcagttccattcgggaattactgcccagcagccgactaagttgcattccttgaatcttcgcagaaaagacaattcttttaatcagagttagtacgactcggaccgatg

SEQ ID NO: 10433 - DNA, 203 bp, synthetic construct
  source 1..203: mol_type = other DNA
ggcgcgccagtcctgtccgctgtttcccgtcccccgcccgcgagaagtgggggtgaaaagcggcccgacctgcttgcggtgtagtggggggaccgcgcggctggaggtgtgaggatccgaacccaggggtggggggtggaggcggctcctgcgatcgaaggggacttgagactcaccggccgcacgcccgactcggaccgatg

SEQ ID NO: 10434 - DNA, 203 bp, synthetic construct
  source 1..203: mol_type = other DNA
ggcgcgccagtccttgggcatgtttcccgtcccccgcccgcgagaagtgggggtgaaaagcggcccgacctgcttggggtgtagtggggggaccgcgcggctggaggtgtgaggatccgaacccaggggtggggggtggaggcggctcctgcgatcgaaggggacttgagacttaccggccgcacgcccgactcggaccgatg

SEQ ID NO: 10435 - DNA, 203 bp, synthetic construct
  source 1..203: mol_type = other DNA
ggcgcgccagtcctggtggcttataaaaaacccagtctttgctgaccagacaaagcataccagatctcaccagagagtcctaggggactacagaaggaaaaagacaagaggcagcaggatatctgtgtgtcctcccgctgaccacacttcctttagtgacccgattgcctcctcaagtcgcagacactcgactcggaccgatg

SEQ ID NO: 10436 - DNA, 203 bp, synthetic construct
  source 1..203: mol_type = other DNA
ggcgcgccagtcctttgtcgttcaaagtctaactttgacagacaaccttacttccagcgaagtctactcccctccctccggagggaagaatgaatgggctgcggttaagcgtttgccctggtgtcagggccaactgcttcgaagcgccagactttcggagactgtgggtggggagcattaagcgggaacgactcggaccgatg

SEQ ID NO: 10437 - DNA, 203 bp, synthetic construct
  source 1..203: mol_type = other DNA
ggcgcgccagtcctgctcgattccagggccgccgtccacactctcccggtcagagtcctgggaccacatggggacgctgccatggcttcttgccttcttcattctgggtctccaggcttgggatactcccaccatcgtctcccgcaaggagtggggggcaagaccgctcgcctgcagggcactgctgacgactcggaccgatg

SEQ ID NO: 10438 - DNA, 203 bp, synthetic construct
  source 1..203: mol_type = other DNA
ggcgcgccagtcctgtttgtttccagggccgccgtccacactctcccggtcagagtcctgggaccacatggggacgctgccatggcttcttgccttcttcattctgggtctccaggtttgggatactcccaccatcgtctcccgcaaggagtggggggcaagaccgctcgcctgcagggccctgctgacgactcggaccgatg

SEQ ID NO: 10439 - DNA, 203 bp, synthetic construct
  source 1..203: mol_type = other DNA
ggcgcgccagtcctatcctattccagggctgccgtccacactctcccggtcagagtcctgggaccacatggggacgctcccatggcttcttgccttcttcattctgggtctccaggcttgggatactcccaccatcgtctcccgcaaggagtggggggcaagaccgctcgcctgcagggccctgctgacgactcggaccgatg

SEQ ID NO: 10440 - DNA, 203 bp, synthetic construct
  source 1..203: mol_type = other DNA
ggcgcgccagtcctatacctttccagggctgccgtccacactctcccggtcagagtcctgggaccacatggggacgctgccatggcttcttgccttcttcattctgggtctccaggcttgggatactcccaccatcgtctcccgcaaggagtggggggcaagaccgctcgcctgcagggccctgctgacgactcggaccgatg

SEQ ID NO: 10441 - DNA, 203 bp, synthetic construct
  source 1..203: mol_type = other DNA
ggcgcgccagtcctccataatttcttggctaagccgcgtttgtattgtgtcttaccatgcctgaaccggcaaaatccgctccggcccctaaaaagggctccaagaaagccgtcaccaaagcccagaagaaagacggcaagaagcgcaagcgcagccgcaaagagagctactccatctacgtgtacaagcgactcggaccgatg

SEQ ID NO: 10442 - DNA, 203 bp, synthetic construct
  source 1..203: mol_type = other DNA
ggcgcgccagtcctgcgtagtttcttggctaagccgtgtttgtactgtgtcttaccatgcctgaaccggcaaaatccgctccggcccctaaaaagggctccaagaaagccgtcaccaaagcccagaagaaagacggcaagaagcgcaagcgcagccgcaaagagagctactccatctacgtgtacaagcgactcggaccgatg

SEQ ID NO: 10443 - DNA, 203 bp, synthetic construct
  source 1..203: mol_type = other DNA
ggcgcgccagtccttggtattttgcgaattacacatctctttgattatgttgcgactagttttgttagatagtcatttagtgtttgggatacctgttaagccctttgtccagggactgtggttggatttatgaattatttggacggttgtccacttgaaagaactgacagtagcttcataacaatgttcgactcggaccgatg

SEQ ID NO: 10444 - DNA, 203 bp, synthetic construct
  source 1..203: mol_type = other DNA
ggcgcgccagtcctttgtcgaaggctctgtggaggcccagggactcctcacccagctccagcgccagcgcagcctcctagcccaccagccctttgaggagcacttggaccactgggtctcggcctaccacctgctggagtggctggtggagcagcagcagccccttcaagagtacaagggcaggcacccgactcggaccgatg

SEQ ID NO: 10445 - DNA, 203 bp, synthetic construct
  source 1..203: mol_type = other DNA
ggcgcgccagtcctcacttgaaggctctgtggaggcccagggactcctcacccagctccagcgccagcgcagcctcctagcccaccagccctttgaggagctcttggaccactgggtctcggcctaccacctgctggagtggctggtggagcagcagcagccccttcaagagtacaagggcaggcacccgactcggaccgatg

SEQ ID NO: 10446 - DNA, 203 bp, synthetic construct
  source 1..203: mol_type = other DNA
ggcgcgccagtcctgctcgaaagtgtctcccactgaaggcatccgtggttgtttttaagccacaaaaaagccacacccaagatcacctgacacccaccctgacaagtgtccatgatgctgggccctgagggaggtgaaggctttgtggtcaagctccgtggcctgccctggtcctgctctgttgaggacgactcggaccgatg

SEQ ID NO: 10447 - DNA, 203 bp, synthetic construct
  source 1..203: mol_type = other DNA
ggcgcgccagtccttcagctaagtgtctcccactgaaggcatccgtggttgtttttaagccacaaaaaagccacacccaagatcacctgacacccaccctgtcaagtgtccatgatgctgggccctgagggaggtgaaggctttgtggtcaagctccgtggcctgccctggtcctgctctgttgaggacgactcggaccgatg

SEQ ID NO: 10448 - DNA, 203 bp, synthetic construct
  source 1..203: mol_type = other DNA
ggcgcgccagtcctgtttgtaccatatttgttcgcagaggaagccgttgctttctgggatctggctacgccagaaaagacatcggctccaacaggggtgttccacagggtagctgggagttggaagagccaagaacgcctccgagctctggatttgagcttctctgcccatgggtgaagcgcccatgccgactcggaccgatg

SEQ ID NO: 10449 - DNA, 203 bp, synthetic construct
  source 1..203: mol_type = other DNA
ggcgcgccagtccttgattgacgaggcaggcggaagaggcgggacttcgcgggtgacgtcatcggggcgccggaggcccggggcgcctgggaatttgaagcaaacaggcagcgcgcgacaatggcggtcgctcgtgcagctttggggccattggtgacgggtctgtacgacgtgcaggctttcaagttcgactcggaccgatg

SEQ ID NO: 10450 - DNA, 203 bp, synthetic construct
  source 1..203: mol_type = other DNA
ggcgcgccagtcctgacacaacgtgggtgggggaagctgagcgctgagaccaagggctaaagctgggagactgaaaaaatgcagaccgccggggcattattcatttctccagctctgatccgctgttgtaccaggggtctaatcaggcctgtgtctgcctccttcttgaatagcccagtgaattcatccgactcggaccgatg

SEQ ID NO: 10451 - DNA, 203 bp, synthetic construct
  source 1..203: mol_type = other DNA
ggcgcgccagtccttaacaaacgtgggtgggggaagctgagggctgagaccaagggctaaagctgggagactgaaaaaatgcagaccgccggggcattattcatttctccagctctgatccgctgttgtaccaggggtctaatcaggcctgtgtctgcctccttcttgaatagcccagtgaattcatccgactcggaccgatg

SEQ ID NO: 10452 - DNA, 203 bp, synthetic construct
  source 1..203: mol_type = other DNA
ggcgcgccagtcctatacctactccagacaggagaggctgcgccttccccgcaccgggaccttcgcgacacaccagatcctcgcccctggctcgcgcgaacgcacaggatgaccaccaccctcgtgtctgccaccatcttcgacttgagcgaagttttatgcaagggtaacaagatgctcaactatagcgactcggaccgatg

SEQ ID NO: 10453 - DNA, 203 bp, synthetic construct
  source 1..203: mol_type = other DNA
ggcgcgccagtcctcgtaggactctacagctcagaacaccaactgctaaggctgccttgggaagaggatgatcctaaacaaagctctgctgctgggggccctcgctctgaccaccgtgatgagcccctgtggaggtgaagacattgtggctgaccacgttgcctcttgtggtgtaaacttgtaccagtcgactcggaccgatg

SEQ ID NO: 10454 - DNA, 203 bp, synthetic construct
  source 1..203: mol_type = other DNA
ggcgcgccagtcctattgtcagatgtcagcccaggagagctgcctcagcctcatcaagtcctcggcagcctgatcttctgcttcggcatctggatcctcatcgacaagaccagcttcgtgtcctttgtgggcttggccttcgtgcctctgcagatctggtccaaagtcctggccatctcaggaatcttcgactcggaccgatg

SEQ ID NO: 10455 - DNA, 203 bp, synthetic construct
  source 1..203: mol_type = other DNA
ggcgcgccagtcctgcgtagagctctaatgccaccatcctcacgagactctggggccccccaggctcccagacctttgagcaaccttcaccgcacagaaacccagccgcgccctgcaattcccaccgcggaaggtgccgaccaacccccaggatggcggaagctcaccaggccgtggccttccagttccgactcggaccgatg

SEQ ID NO: 10456 - DNA, 203 bp, synthetic construct
  source 1..203: mol_type = other DNA
ggcgcgccagtcctttcggaaggtacataagttccattaggtttgagctgtgttgactaccactgctttttccttggtctcacttacgtcttggaagatggctctgcagatccctggaggcttttgggcagcagctgtgaccgtgatgctggtgatgctgagcaccccagtggctgaggccagagactcgactcggaccgatg

SEQ ID NO: 10457 - DNA, 203 bp, synthetic construct
  source 1..203: mol_type = other DNA
ggcgcgccagtcctgtcgctatcctctctcttgccgttcgagagccccagtgaaacttgagtgagatgagagagcatggagcctgccagtctccccctctgcgcacacacacacgcaaacacatttaactttccacttgcagtgacctgcccttcagtgtgacttatcagctgtttggcttttgtcaccgactcggaccgatg

SEQ ID NO: 10458 - DNA, 203 bp, synthetic construct
  source 1..203: mol_type = other DNA
ggcgcgccagtcctccgaccatcctctctcttgccgttcgagagccccagtgaaacttgagtgagatgagagagcatggagcctgccagtctccccctctgtgcacacacacacgcaaacacatttaactttccacttgcagtgacctgcccttcagtgtgacttatcagctgtttggcttttgtcaccgactcggaccgatg

SEQ ID NO: 10459 - DNA, 203 bp, synthetic construct
  source 1..203: mol_type = other DNA
ggcgcgccagtccttcccagcactcctccccttacctcccttctcttctgaattctccattctgggctcttgcctgtgaaatctttctttgctttccccatcttttcctcgcattttttcaccatctttccctcaatctccaggagccaatgcgagactttggctccgattaagcgacggcccgagaccgactcggaccgatg

SEQ ID NO: 10460 - DNA, 203 bp, synthetic construct
  source 1..203: mol_type = other DNA
ggcgcgccagtcctaaacgccagccggcgactcctacacctggaaggtcggacagggacagcagagaagaaactagccagctgtgaaaagacagttaccgagcttgggaaccagctggagggcaagtgggccgtgctgggaaccctgctgcaggagtacgggctgctgcagaggcggctggagaacttcgactcggaccgatg

SEQ ID NO: 10461 - DNA, 203 bp, synthetic construct
  source 1..203: mol_type = other DNA
ggcgcgccagtcctgcaccccaggccaccaagaggcccagccctccaaaccctggatttgcaacatcctcaaagaacagcaacgggccttgagcagaattgagaaggaaatacccccacctgccctcagccgttaagtgggctttgctattcacaagggcctctgggtgtcctggcagagaggggagacgactcggaccgatg

SEQ ID NO: 10462 - DNA, 203 bp, synthetic construct
  source 1..203: mol_type = other DNA
ggcgcgccagtccttatcctcatcatctagataatcagaaccttggcttccacatcctcctcccttgtcttaactacaaacatttctttctgctgacttcaactcctcagacatgggaaagtctctttctcatttgcctttgcattcaagcaaagaagatgcttatgatggagtcacatctgaaaacacgactcggaccgatg

SEQ ID NO: 10463 - DNA, 203 bp, synthetic construct
  source 1..203: mol_type = other DNA
ggcgcgccagtcctctctcacatgaactgggaagagtagctgagccccagagcctctctggaagagaaaggaagagccagcagttctttctcccagtgtcccacctcactgtccagcgtcttcctctgcccctgctctgccctccctggctcctggactagagcccggcttccagcaggacgtttccccgactcggaccgatg

SEQ ID NO: 10464 - DNA, 203 bp, synthetic construct
  source 1..203: mol_type = other DNA
ggcgcgccagtccttgcgttcatgaactgggaagagtagctgagccccagagcctctctggaagagaaaggaagagccagcagttctttctcccagtgtccgacctcactgtccagcgtcttcctctgcccctgctctgccctccctggctcctggactagagcccggcttccagcaggacgtttccccgactcggaccgatg

SEQ ID NO: 10465 - DNA, 203 bp, synthetic construct
  source 1..203: mol_type = other DNA
ggcgcgccagtcctcgcccgcatgcgcgcttccttgcgcgagccgggctgtcgggtgtgttttgctctccagcctccgtcgtctctgcagcactccgggttctcctccagagcgctagtcccaggagctcggaatgttcgtggaacttaataacctgcttaacaccacccccgacagggcggagcaggcgactcggaccgatg

SEQ ID NO: 10466 - DNA, 203 bp, synthetic construct
  source 1..203: mol_type = other DNA
ggcgcgccagtcctcagctcccccttggagctctgcatctccaacctggaacccaacccagaagtctcaagtttgacgcatcacgtggcgtgcggatccaccgagggtccacagagaggggcgcccatctcctgcgtctcagttatcctggtgttgggaattctgtgccctaaagaattccgactcagcgactcggaccgatg

SEQ ID NO: 10467 - DNA, 203 bp, synthetic construct
  source 1..203: mol_type = other DNA
ggcgcgccagtcctcggtgaccctcggctcccacccttgtgtacctgggccgaaccattcaccggagcgcgcagcgggtggagtgtggctcggaggaccgcagcgggtcaagcacctttctcccccatatctgaaagcatgccctttgtccacgtcgtttacgctcattaaaacttccagaatgcaaccgactcggaccgatg

SEQ ID NO: 10468 - DNA, 203 bp, synthetic construct
  source 1..203: mol_type = other DNA
ggcgcgccagtcctcttcccccgaacctgaaaccgggagcttcctgctcgtgttcgctgttgagaagctacccgcggggttgtagacctcggacctcatggcagagataattcaggaacgcatagaagatcggctcccggaattggaacagctggagcgcattggactgttcagtcatgcggagattacgactcggaccgatg

SEQ ID NO: 10469 - DNA, 203 bp, synthetic construct
  source 1..203: mol_type = other DNA
ggcgcgccagtccttgggcaccgcccctccccccagctagtgagtgcgcgaacgagaaaggaggagggcgctccaggcgacagcactgcagacgccattatcctctgtttctctgctgcaccgacctcgacgtcttgcctgtgtcccacttgttcgcggcctataggctactgcagcactggggtgtccgactcggaccgatg

SEQ ID NO: 10470 - DNA, 203 bp, synthetic construct
  source 1..203: mol_type = other DNA
ggcgcgccagtcctgaatctccgcgacttcgatccggcgctgctggagttcctggtgtgcccgctctccaagaagccgctcagatatgaagcatcaacaaacgaattgattaatgaagagttgggaatagcttatccaatcattgatgggatccctaatatgataccacaggcagctaggatgacacgcgactcggaccgatg

SEQ ID NO: 10471 - DNA, 203 bp, synthetic construct
  source 1..203: mol_type = other DNA
ggcgcgccagtcctggtggcccgcgacttcgatccggcgctgctggagttcctggtgtgcccgctctccaagaagccgctcagatatgaagcatcaacaaatgaattgattaatgaagagttgggaatagcttatccaatcattgatgggatccctaatatgataccacaggcagctaggatgacacgcgactcggaccgatg

SEQ ID NO: 10472 - DNA, 203 bp, synthetic construct
  source 1..203: mol_type = other DNA
ggcgcgccagtcctggcgaaccgcggctctcccacctgtcaccctggcccttctctgcttggatggtgtcttcctctcctcagccgagaatgacttcgtccaccggatccaggaggaactggaccgctttctgctgcagaagcagctgtcaaaggttcttcttttccccccactctccagtcgcctcccgactcggaccgatg

SEQ ID NO: 10473 - DNA, 203 bp, synthetic construct
  source 1..203: mol_type = other DNA
ggcgcgccagtcctttcaccccgcggctctcccacctgtcaccctggcccttctctgcttggatggtgtcttcctctcctcagccgagaatgacttcgtccgccggatccaggaggaactggaccgctttctgctgcagaagcagctgtcaaaggttcttcttttccccccactctccagtcgcctcccgactcggaccgatg

SEQ ID NO: 10474 - DNA, 203 bp, synthetic construct
  source 1..203: mol_type = other DNA
ggcgcgccagtcctagttctccgcgtggtccctccccctcaggccgcggtcgcgattacgctctctacggcctgcgaccgcagggccgttgcgggctggagacacggcgccgactggaaccggaggagctctaggccaaatggttgggccagccaggatcccaggacccttcgccgctcgagaccggacgactcggaccgatg

SEQ ID NO: 10475 - DNA, 203 bp, synthetic construct
  source 1..203: mol_type = other DNA
ggcgcgccagtcctgctcgacctgatacataaatcagacagcctctgctgcatgacacgaagcttgcttctgcctggcatctgtgagcagctgccaggctccggccaggatcccttccttctcctcattggctgatggatcccaaggggctcctctccttgaccttcgtgctgtttctctccctggctcgactcggaccgatg

SEQ ID NO: 10476 - DNA, 203 bp, synthetic construct
  source 1..203: mol_type = other DNA
ggcgcgccagtccttcagctcctgatacataaatcagacagcctctgctgcatgacacgaagcttgcttctgcctggcatctgtgagcagctgccaggctctggccaggatcccttccttctcctcattggctgatggatcccaaggggctcctctccttgaccttcgtgctgtttctctccctggctcgactcggaccgatg

SEQ ID NO: 10477 - DNA, 203 bp, synthetic construct
  source 1..203: mol_type = other DNA
ggcgcgccagtccttcatgcccttggagcgcgcgggaaagagaccaatataaactgtggcgggatagttttcgggtccttgtccagtgaaacaccctcggccgggaagtcagttcgttctctcctctcctctcttcttgtttgaacatggtgcggactaaagcagacagtgttccaggcacttacagacgactcggaccgatg

SEQ ID NO: 10478 - DNA, 203 bp, synthetic construct
  source 1..203: mol_type = other DNA
ggcgcgccagtcctctggtaccttggagcgcgcgggaaagagaccaatataaactgtggcgggatagttttcgggtccttgtccagtgaaacaccctcggctgggaagtcagttcgttctctcctctcctctcttcttgtttgaacatggtgcggactaaagcagacagtgttccaggcacttacagacgactcggaccgatg

SEQ ID NO: 10479 - DNA, 203 bp, synthetic construct
  source 1..203: mol_type = other DNA
ggcgcgccagtccttggcgccgacagtgtcaggatcgcgggcttgctttccggtagcgtgggctgacgcctcgctcaatttctcacagggctgcgcaggtttcccccgtctgcgaatggaccactggaggggttcaaaggttcgcgtcccagtacgggaatgagcctctttgatctcttccggggcttcgactcggaccgatg

SEQ ID NO: 10480 - DNA, 203 bp, synthetic construct
  source 1..203: mol_type = other DNA
ggcgcgccagtccttgattgcgccgcacaggctggcactgcttgaagaggaggctactcggagactgcgccgcgcggattggaggctccccaaatattttgcgatctgaggatccagctcaagtgaggtgccataggacgtgttcctgagtttgcattgcacggagaccttcctggaatttttcatttcgactcggaccgatg

SEQ ID NO: 10481 - DNA, 203 bp, synthetic construct
  source 1..203: mol_type = other DNA
ggcgcgccagtcctatacctcgcgtcgagtttccggcgtccggaaggaccgagctcttctcgcggatccagtgttccgtttccagcccccaatctcagagccgagccgacagagagcagggaaccggcatggccaaagccgcggcgatcggcatcgacctgggcaccacctactcctgcgtgggggtgcgactcggaccgatg

SEQ ID NO: 10482 - DNA, 203 bp, synthetic construct
  source 1..203: mol_type = other DNA
ggcgcgccagtcctgtagaccgcgtcgagtttccggcgtccggaaggaccgagctcttctcgcggatccagtgttccgtttccagcccccaatctcagagcggagccgacagagagcagggaaccggcatggccaaagccgcggcgatcggcatcgacctgggcaccacctactcctgcgtgggggtgcgactcggaccgatg

SEQ ID NO: 10483 - DNA, 203 bp, synthetic construct
  source 1..203: mol_type = other DNA
ggcgcgccagtccttaaacgctaggtccccagatggggagactgaggccgtggctgtgtgtccctctgagagttggagcggggctgggcccgaattcgaccccagcaggattctctctcatttctgagccccggaggtggcagagcggcagacccgggcaagtgaaccctagggctgcaggagcccagcgactcggaccgatg

SEQ ID NO: 10484 - DNA, 203 bp, synthetic construct
  source 1..203: mol_type = other DNA
ggcgcgccagtcctccataactaggtccccagatggggagactgaggccgtggctgtgtgtccctctgagagttggagcggggctgggcccgaattcgaccgcagcaggattctctctcatttctgagccccggaggtggcagagcggcagacccgggcaagtgaaccctagggctgcaggagcccagcgactcggaccgatg

SEQ ID NO: 10485 - DNA, 203 bp, synthetic construct
  source 1..203: mol_type = other DNA
ggcgcgccagtcctattagactgaagccagtgaaggctctctcgcctcgccctctagcgttcgtctggagtagcgccaccccggcttcctggggacacaggtttggcaccatggggcccaccagcgtcccgctggtcaaggcccaccgcagctcggtctctgactacgtcaactatgatatcatcgtccgactcggaccgatg

SEQ ID NO: 10486 - DNA, 203 bp, synthetic construct
  source 1..203: mol_type = other DNA
ggcgcgccagtcctctagggctgtggtgggcgctgcgggtgtttgcaggaggttgcagtactcgctgggctgaggtcgtctcgggtgaggaggtcgcgccgaaagtggctctagccgtggcgcttcggcgtagtaaggagcctgcaacagagttttgttgtttagggggcgcggcaccgcaccgctcccgactcggaccgatg

SEQ ID NO: 10487 - DNA, 203 bp, synthetic construct
  source 1..203: mol_type = other DNA
ggcgcgccagtcctaatacccttcctctgcctgcccctcctcctccttccacgttgtctcctccacctagcagttggttggcaaccccttcctcagtccccggctgaaaaccctccagtcagcgcttatcccttctgctctctcccctcacccagagaaatacatggagtttgaccttaatggaaatgcgactcggaccgatg

SEQ ID NO: 10488 - DNA, 203 bp, synthetic construct
  source 1..203: mol_type = other DNA
ggcgcgccagtcctagaatccttgaggaccaagtttgcggccacttctgcaggcgtcccttcttagctctcgcccgcccctttctgcagcctaggcggcccaggttctcttctcttcctcgcgcgcccagccgcctcggttcccggcgaccatggtgacgatggaggagctgcgggagatggactgcacgactcggaccgatg

SEQ ID NO: 10489 - DNA, 203 bp, synthetic construct
  source 1..203: mol_type = other DNA
ggcgcgccagtcctacaacacttgaggaccaagtttgcggccacttctgcaggcgtcccttcttagctctcgcccgcccctttctgcagcctaggcggcccgggttctcttctcttcctcgcgcgcccagccgcctcggttcccggcgaccatggtgacgatggaggagctgcgggagatggactgcacgactcggaccgatg

SEQ ID NO: 10490 - DNA, 203 bp, synthetic construct
  source 1..203: mol_type = other DNA
ggcgcgccagtcctccaattcttgctttgctgttagcctgttggaccttcgagcctagctgctcgcacaggactcggccacctgcccttcctgcaccgactggccagctcaagaggtttggatatggaccttcttcaattcctggccttcctctttgtcctgcttttgtctgggatgggagccacaggcgactcggaccgatg

SEQ ID NO: 10491 - DNA, 203 bp, synthetic construct
  source 1..203: mol_type = other DNA
ggcgcgccagtcctggagcggaagaagcggagaaagaaatgaaagcctctcttcaggctgaaccacaaaaggccatgggatttaacttttatttatgttgggcaagactgtaagatggctgattagtaatgttgcagcttttagctgaaacaaaaattcacttttaatcaagaagaaaaaagtgtgatcgactcggaccgatg

SEQ ID NO: 10492 - DNA, 203 bp, synthetic construct
  source 1..203: mol_type = other DNA
ggcgcgccagtcctcattatgacctagaccatgcaacccagctgatcctacgatggaaccaaggtgccagtgagatgacaacagccctgctctggtcactccggaagctgaccagtccacacacggctgaagcttgaggagacaacagccctgctctagtcaccccagaagctgactagtctatgcaccgactcggaccgatg

SEQ ID NO: 10493 - DNA, 203 bp, synthetic construct
  source 1..203: mol_type = other DNA
ggcgcgccagtcctacgggtgacctagaccatgcaacccagctgatcctacgatggaaccaaggtgccagtgagatgacaacagccctgctctggtcactctggaagctgaccagtccacacacggctgaagcttgaggagacaacagccctgctctagtcaccccagaagctgactagtctatgcaccgactcggaccgatg

SEQ ID NO: 10494 - DNA, 203 bp, synthetic construct
  source 1..203: mol_type = other DNA
ggcgcgccagtcctggctgggagagccaggcgagcgcggactggggcggccacgccactccgccagaaggtcgccaggagcctccgcccttcaccttcctcggaaatccgccaggccacgccaagctccctgcccaacccttactgacgggggccacattttcccggcctccgcagccagaccttgaccgactcggaccgatg

SEQ ID NO: 10495 - DNA, 203 bp, synthetic construct
  source 1..203: mol_type = other DNA
ggcgcgccagtcctgcacccgaggcgggatggagtgatagggaagatgtttataaattcttctgtgggatcagagggcacgcctattacaaccagaaaactacaagtataacagcgaggatggatgaacaggctctattagggctaaatccaaatgctgattcagactttagacaaagggccctggcccgactcggaccgatg

SEQ ID NO: 10496 - DNA, 203 bp, synthetic construct
  source 1..203: mol_type = other DNA
ggcgcgccagtccttatcctgagttccgctcctctctccaaccggggtccccctccagcgaccctaaagcttcccagacttccgcttcaattcctgtccgcaccccacgcccacctcaacgtggagcgcagtggtctccgaggagcgccggagctgccccgcctgcccagcggggtcagcacttcgcacgactcggaccgatg

SEQ ID NO: 10497 - DNA, 203 bp, synthetic construct
  source 1..203: mol_type = other DNA
ggcgcgccagtcctaggacggagttccgctcctctctccaaccggggtccccctccagcgaccctaaagcttcccagacttccgcttcaattcctgtccgccccccacgcccacctcaacgtggagcgcagtggtctccgaggagcgccggagctgccccgcctgcccagcggggtcagcacttcgcacgactcggaccgatg

SEQ ID NO: 10498 - DNA, 203 bp, synthetic construct
  source 1..203: mol_type = other DNA
ggcgcgccagtccttgcgttgattctgattagttcactactgctactttccctgtggcctaggctttgcctatttccagtgggcgagctagctagatcctcgtcccttaaataagccagtgtttttaagacagaatactacttgcatagtggacaataatatcttaaagaactgagcaggatgaaaagcgactcggaccgatg

SEQ ID NO: 10499 - DNA, 203 bp, synthetic construct
  source 1..203: mol_type = other DNA
ggcgcgccagtcctaaggaagatttgcaaaggtttttggagaggaataaatttaatgaaagatgtacatgacttctaaaaactataagcagtgctgggtaatattaaacacatgatgttcacggaagaccagggtgtagatgacaggctgctctatgacattgtattcaagcacttcaaaagaaataacgactcggaccgatg

SEQ ID NO: 10500 - DNA, 203 bp, synthetic construct
  source 1..203: mol_type = other DNA
ggcgcgccagtcctatcaaggcatccttgtcgctcgtgtccttctcatgcccggcgacgcgtctttgtggtaacgccctgctgccatctcttttcttctctatgcgaggatttggactggcagtgagaataagagacaacgattcacgtctactttctaggatgacttccatgtgctccatctcgcgccgactcggaccgatg

SEQ ID NO: 10501 - DNA, 203 bp, synthetic construct
  source 1..203: mol_type = other DNA
ggcgcgccagtcctccgcatgcatctgcccggcccgggggcggaggcgcccattattcctttggctcctccgaagcgccgtaggggtgtttgttgttagagttggaagcttggcagttggcctcccttcttcccatggaggacgggggcttaacagcctttgaagaggaccagagatgcctttcccagcgactcggaccgatg

SEQ ID NO: 10502 - DNA, 203 bp, synthetic construct
  source 1..203: mol_type = other DNA
ggcgcgccagtcctcagctcgccagggcgcctgcgcggcggggttctcggtcgccagccattcctgaggaggactgccggtcgttcggacgtcttgcctgtagctggaggagaggtccgggctctccaggaaggtggctgcggcgacaaaatgaagatattcgtgggcaacgtcgacggggcggataccgactcggaccgatg

SEQ ID NO: 10503 - DNA, 203 bp, synthetic construct
  source 1..203: mol_type = other DNA
ggcgcgccagtcctgaggccgccatgtcggactcggcgcccagcgcccaagcgctaacccgctgaaagtttctcagcgaaatctcagggacgatctggaccccgctgagaggaactgcttttgagtgagatggtcccagaggcctggaggagcggactggtaagcaccgggagggtagtgggagttttcgactcggaccgatg

SEQ ID NO: 10504 - DNA, 203 bp, synthetic construct
  source 1..203: mol_type = other DNA
ggcgcgccagtcctgtccgcgccccacgctgctttcccagaaggctgtgcgtgctcctcgcttcctccgcggtctttcgagcggtcgcgtgaactgcttcctgcaggctggccatggcgcttcacgttcccaaggctccgggctttgcccagatgctcaaggagggagcgaaacacttttcaggattacgactcggaccgatg

SEQ ID NO: 10505 - DNA, 203 bp, synthetic construct
  source 1..203: mol_type = other DNA
ggcgcgccagtccttcggacgccgggacacgtggtacggaaccggcgccgcgcttgctgctggtaacagggccttgcctagtgggccttccttcccaggtcgcccctcagtctccactagagacaggactgaccagttgctcttccttccaagaaccttcgagatctgcggtctggggtctggttgaacgactcggaccgatg

SEQ ID NO: 10506 - DNA, 203 bp, synthetic construct
  source 1..203: mol_type = other DNA
ggcgcgccagtcctgaatctgcttctgtcctgcgcgcgcagattctcgcaaatctggaagcggatcgcgtggagtgacggtcacaccgcggcgaattaattcccaaagactcatgttacatgagaaagccaccaagaagaccaaagaaaaggagacaaggatggctcttcctcagggatgcttgacttcgactcggaccgatg

SEQ ID NO: 10507 - DNA, 203 bp, synthetic construct
  source 1..203: mol_type = other DNA
ggcgcgccagtcctagcgccggaagatatcagaaacatcctaggatcaggacaccccagatcttctcaactggaaccacgaaggctgtttcttccacacagtactttgatctccatttaagcaggcacctctgtcctgcgttccggagctgcgttcccgatggtcctcctttggctcacgctgctcctcgactcggaccgatg

SEQ ID NO: 10508 - DNA, 203 bp, synthetic construct
  source 1..203: mol_type = other DNA
ggcgcgccagtcctggcgaaggacacgtggtacggaaccggcgccgcgcttgctgctggtaacagggccttgcctagtgggccttccttcccaggtcgcccctcagtctccactagagacaggactgaccagttgctcttccttccaagaaccttcgagatctgcggtctggggtctggttgaaagatcgactcggaccgatg

SEQ ID NO: 10509 - DNA, 203 bp, synthetic construct
  source 1..203: mol_type = other DNA
ggcgcgccagtcctttcaccggacacgtggtacggaaccggcgccgcgcttgctgctggtaacagggccttgcctagtgggccttccttcccaggtcgcccgtcagtctccactagagacaggactgaccagttgctcttccttccaagaaccttcgagatctgcggtctggggtctggttgaaagatcgactcggaccgatg

SEQ ID NO: 10510 - DNA, 203 bp, synthetic construct
  source 1..203: mol_type = other DNA
ggcgcgccagtcctagttctggagagggagaacacagttggagaaaatcggcagctgagacggccttggccggacttagcactcaggcctgtgaatcaggaaatacaaagacctccaaaaaaggaccagttcctcggatgtgccccctcacagagagatgaaggggcagcagaaaacagctgaaacggcgactcggaccgatg

SEQ ID NO: 10511 - DNA, 203 bp, synthetic construct
  source 1..203: mol_type = other DNA
ggcgcgccagtcctactcttggagcagtgcggggtttaaatctgaggctaggctggctcttctcggcgtgctgcggcggaacggctgttggtttctgctggttgtaggtccttggctggtcgggcctccggtgttctgcttctccccgctgagctgctgcctggtgaagaggaagccatggcgctccgcgactcggaccgatg

SEQ ID NO: 10512 - DNA, 203 bp, synthetic construct
  source 1..203: mol_type = other DNA
ggcgcgccagtcctgctcgaggcaacaggcagatttgcctgctgagggtggagacccacgagccgaggcctcctgcagtgttccgcacagcaaaccgcacgctatggctgacagccgggatcccgccagcgaccagatgcagcactggaaggagcagcgggccgcgcagaaagctgatgtcctgaccacgactcggaccgatg

SEQ ID NO: 10513 - DNA, 203 bp, synthetic construct
  source 1..203: mol_type = other DNA
ggcgcgccagtccttcatgcggccgccgcccgctctcccggcgcggcagctgtctgggctgctgcgcgccgcctaggtgtctgggcgatctatgggcaagaacaagggccacgatgacagattacggcgaggagcagcgcaacgagctggaggccctggagtccatctaccctgactccttcacagctcgactcggaccgatg

SEQ ID NO: 10514 - DNA, 203 bp, synthetic construct
  source 1..203: mol_type = other DNA
ggcgcgccagtcctgacacaggcgtccgcgtccccgcgccgagctgctcgggctccctgagccccagatctgaccccttcccttcggcaacctgaacgactcccgccttccacggaagggaccgagcccgtgccaaacaggctgagcgatttgggagtgaggagccatcctaccgctttccccaacctcgactcggaccgatg

SEQ ID NO: 10515 - DNA, 203 bp, synthetic construct
  source 1..203: mol_type = other DNA
ggcgcgccagtcctcgtagggggcactttcgtcttagcttttggacaagacgcaggcgcaacccacggctgctgcggggatccttgtggcccttccggtcgatggaaccaatccgtgcacagagaagcggggcgaactgaggcgagtgaagtggactctgagggctaccgctaccgccactgctgcggcgactcggaccgatg

SEQ ID NO: 10516 - DNA, 203 bp, synthetic construct
  source 1..203: mol_type = other DNA
ggcgcgccagtcctcatgcgggtctttgcgtctggctactaccagaccgcgggttaggggcttcatctctctgcgtcctcagttgtgggaggccttggtgattcggccacagctcagcctccgtcgctctgtgacctgcgggtattggatgattggtagctaagactcccgaatacttcagaagtgggcgactcggaccgatg

SEQ ID NO: 10517 - DNA, 203 bp, synthetic construct
  source 1..203: mol_type = other DNA
ggcgcgccagtccttcgatggtcacttcctggagactggttgaatccggaagtgaccctagagaaatgagttgtggctgaggaccccggcggcagacgcaggttcgggaccatgagctggattccttttaagattgggcagcccaagaaacagattgtgcccaaaacagtggagagagactttgaaagcgactcggaccgatg

SEQ ID NO: 10518 - DNA, 203 bp, synthetic construct
  source 1..203: mol_type = other DNA
ggcgcgccagtcctgccgtctaatgaatcattgattgaccagcactattttaccagttggaatgaatgatcagaaatgggcatagtgctcttagatccaacatgtaacagatggatgttactccatgctgattacttcttcaagccagtacttttttgattgtgtaggatctttgtctcttcatctttcgactcggaccgatg

SEQ ID NO: 10519 - DNA, 203 bp, synthetic construct
  source 1..203: mol_type = other DNA
ggcgcgccagtcctaatacctacaccgccggaagtgtggaggtgtggctgcccgaggcggtagagcggagaaagcctattttcttttcgtttagatacattgccttttgcctaggctggcgtcgagacttgaggccgttgcagactttggcgcggctcgcgcctcctgcttcaagagcccagcggtgacgactcggaccgatg

SEQ ID NO: 10520 - DNA, 203 bp, synthetic construct
  source 1..203: mol_type = other DNA
ggcgcgccagtcctccaatttagggcttgaactgagagcctggcctcccagaaggttttaatagacctacggcacagaaattgacacagcccggaaaaggcccacaaagagaagcccaaccagccagcccccaggccgccccgccagggacccaccaatgaggcacagatggcagccgctgccgccctcgactcggaccgatg

SEQ ID NO: 10521 - DNA, 203 bp, synthetic construct
  source 1..203: mol_type = other DNA
ggcgcgccagtcctcgcaactatttcaaggcgcgcgcctcgtggtggactcaccgctagcccgcagcgctcggcttcctggtaattcttcacctcttctctcagctccctgcagcatgggtgctgggccctccttgctgctcgccgccctcctgctgcttctctccggcgacggcgccgtgcgctgcgcgactcggaccgatg

SEQ ID NO: 10522 - DNA, 203 bp, synthetic construct
  source 1..203: mol_type = other DNA
ggcgcgccagtcctggctggtcccgagggctggcctgagacgggactcccggttctcccgctgcgaagcagcgcggccccccggggccggggcagcggcgctggcatgtcgtctggcaccatgaagttcaatggctatttgagggtccgcatcggtgaggcagtggggctgcagcccacccgctggtccgactcggaccgatg

SEQ ID NO: 10523 - DNA, 203 bp, synthetic construct
  source 1..203: mol_type = other DNA
ggcgcgccagtcctacctcgtcctcttctgtctgctgtctatgagggtcatgtttcctgtgtgaaattgcttctgtcaaagggtgctgataagactgtgaagggcccagatggactgaccgcctttgaagccactgacaaccaggcaatcaaagctcttctccagtgatggatggatggactgataaccgactcggaccgatg

SEQ ID NO: 10524 - DNA, 203 bp, synthetic construct
  source 1..203: mol_type = other DNA
ggcgcgccagtcctaggacgtccttataaagacaaaatctttttctttcctggctgatgatttgtcattctagtcacttcctgccttgtgaccacacacccgggcttgacaaagctgttctgcagatcagaaagaaggggttcctggtcatacaccagtactaccaaggacagcttttttcctgcaagcgactcggaccgatg

SEQ ID NO: 10525 - DNA, 203 bp, synthetic construct
  source 1..203: mol_type = other DNA
ggcgcgccagtcctctctcatctctcgagagttctctccgcacgcgggctggagaagcgggtcctacgcacgctttgttgtcgcgctttgcctccgtccttccccctactcccgccttacctgacttccttttcggaggaagatccttgagcagccgacgttgggacaaaggatttggagaaacccagcgactcggaccgatg

SEQ ID NO: 10526 - DNA, 203 bp, synthetic construct
  source 1..203: mol_type = other DNA
ggcgcgccagtccttccttatcttggtggaggccagcacaggggagagggggtgcccacagatgctagaagcttaaaggctgctgggggctagcggcctcaggacataaggtttccagacaggacggggcaggtggtgatgcagctgtagctcgtgagtctgagcgggaaacagcccccgcgcagtcgcgactcggaccgatg

SEQ ID NO: 10527 - DNA, 203 bp, synthetic construct
  source 1..203: mol_type = other DNA
ggcgcgccagtcctgactactcttttccgtgctacctgcagaggggtccatacggcgttgttctggattcccgtcgtaacttaaagggaaactttcacaatgtccggagcccttgatgtcctgcaaatgaaggaggaggatgtccttaagttccttgcagcaggaacccacttaggtggcaccaatctcgactcggaccgatg

SEQ ID NO: 10528 - DNA, 203 bp, synthetic construct
  source 1..203: mol_type = other DNA
ggcgcgccagtcctccgcattcttttccgtgctacctgcagaggggtccatacggcgttgttctggattcccgtcgtaacttaaagggaaattttcacaatgtccggagcccttgatgtcctgcaaatgaaggaggaggatgtccttaagttccttgcagcaggaacccacttaggtggcaccaatctcgactcggaccgatg

SEQ ID NO: 10529 - DNA, 203 bp, synthetic construct
  source 1..203: mol_type = other DNA
ggcgcgccagtcctctcagttgagaccaagggctaaagctgggaggtgagtctgtcaccttgagccgggcgagcgctgtgggccaagcaggggttgcagggtagtaggagtgcagactgaaaaaatgcagaccgccggggcattattcatttctccagctctgatccgctgttgtaccaggggtctaacgactcggaccgatg

SEQ ID NO: 10530 - DNA, 203 bp, synthetic construct
  source 1..203: mol_type = other DNA
ggcgcgccagtcctgtccgctgccgagagagattccctgctctccaccagctctttggcgtcccatgactccaccttgtcccttgcatcctcccaggcctcggggccggccctctcgcgccatctgctgacttcctttgtctcaggcctctctgatggcatggacagcggctacgtggaggacagcgacgactcggaccgatg

SEQ ID NO: 10531 - DNA, 203 bp, synthetic construct
  source 1..203: mol_type = other DNA
ggcgcgccagtcctttgctttgcgcgaccggaaaattcgcgaaggttcctgaaacgcaacggatcgtttccggaagccggtagccgcctcagtcgtcagactggtgctagcgacacgggagtggcaaacgcatcctcttgccgttcccggtgtttgggccttgcctgtgacggtgggaaaagaaaatgcgactcggaccgatg

SEQ ID NO: 10532 - DNA, 203 bp, synthetic construct
  source 1..203: mol_type = other DNA
ggcgcgccagtcctgaatcttggaggtgggctagaggccgacgccagccagagagcgaaatgttcttttggggccagagtctgggcatatatgaatgcaaacccgtgtttgttcacaactaagcccagctgagacgatcacttttctgtaggccatttgtccaggtacagaatgagcacatgttgttgcgactcggaccgatg

SEQ ID NO: 10533 - DNA, 203 bp, synthetic construct
  source 1..203: mol_type = other DNA
ggcgcgccagtcctgggatatgggactttttggacacccagagaacaggtcccagataccgagtccgcaaccccaaacatcgcgattaataggaggcctctggtctctgcctgccctgggtgctcatggaaccagctgctgctctgcacttctccctgccagcctccctcctcctcctcctgctcctccgactcggaccgatg

SEQ ID NO: 10534 - DNA, 203 bp, synthetic construct
  source 1..203: mol_type = other DNA
ggcgcgccagtccttcatgcttgaacaaatttgatttccggagtcagtcattttactgtcaagacatttcttcggcattctgcaacagtttccaacatggccagatccatcagaaactgaagccgtggagaacgctctcggggcctttgccacttcttggagtagaagccgacagagagctgtttggacgactcggaccgatg

SEQ ID NO: 10535 - DNA, 203 bp, synthetic construct
  source 1..203: mol_type = other DNA
ggcgcgccagtcctatacctttttcgtggcactataaagggtgctgcacggcgcttgcatctcttcgcctctcggagctggaaatgcagctattgagatcttcgaatgctgcggagctggaggcggaggcagctggggaggtccgagcgatgtgaccaggccgccatcgctcgtctcttcctctctcccgactcggaccgatg

SEQ ID NO: 10536 - DNA, 203 bp, synthetic construct
  source 1..203: mol_type = other DNA
ggcgcgccagtcctctgtgaagaaaaactggagcctgttcttggcaagaagattctaatgccagaatttgaaagcgtgctctgggggctcctggtgctcagctggtcctgcctgcaaggcccctgctccgtgttctcccctgtgagcgccatggagcccttgggccggcagctaactagcgggccgaacgactcggaccgatg

SEQ ID NO: 10537 - DNA, 203 bp, synthetic construct
  source 1..203: mol_type = other DNA
ggcgcgccagtccttcgttataaaaaactggagcctgttcttggcaagaagattctaatgcccaggaacatggcgccctgaacaacctatctggtgctcagctggtcctgcctgcaaggcccctgctccgtgttctcccctgtgagcgccatggagcccttgggccggcagctaactagcgggccgaacgactcggaccgatg

SEQ ID NO: 10538 - DNA, 203 bp, synthetic construct
  source 1..203: mol_type = other DNA
ggcgcgccagtcctttgcgctcaaaaactggagcctgttcttggcaagcctgcgtcccgcgacaggaacatggcgctgctctgggggctcctggtgctcagctggtcctgcctgcaaggcccctgctccgtgttctcccctgtgagcgccatggagcccttgggccggcagctaactagcgggccgaacgactcggaccgatg

SEQ ID NO: 10539 - DNA, 203 bp, synthetic construct
  source 1..203: mol_type = other DNA
ggcgcgccagtcctctctctcgaaaaataataattaggcctagggaacaaatccctctcagcgaaggccgaaaagaggctagccatgccccagcacatcggttgataatgaggggggtagcaacagtggtgagttcgttggatggcttaagccctgagtacagggtagtcgtcagtggttcgacgcctcgactcggaccgatg

SEQ ID NO: 10540 - DNA, 203 bp, synthetic construct
  source 1..203: mol_type = other DNA
ggcgcgccagtcctacggattaaaaaataataattaggcctagggaacaaatccctctcagcgaaggccgaaaagaggctagccatgcccttagtaggactagcataatgaggggggttaatcgtcgttaatgttcgttggatggcttaagccctgagtacagggtagtcgtcagtggttcgacgcctcgactcggaccgatg

SEQ ID NO: 10541 - DNA, 203 bp, synthetic construct
  source 1..203: mol_type = other DNA
ggcgcgccagtcctggcagtaaaaaaattcaaattttaaaaatttccaggtctattacagagaaggcagagatcagctgtggaaaggacctggtgaactactgtggaagggagaaggacagaggccgcgtgcggtagggacagacataaaagtagtaccaagaaggaaggccaagattatcagggactcgactcggaccgatg

SEQ ID NO: 10542 - DNA, 203 bp, synthetic construct
  source 1..203: mol_type = other DNA
ggcgcgccagtcctcgatgcgcaaaaattcaaattttaaaaatttccaggtctattacagagggcatcacctagctctgtggaaaggacctggtgaactactgtggaagggagaaggagcagtcatagtcaaggtagggacagacataaaagtagtaccaagaaggaaggccaagattatcagggactcgactcggaccgatg

SEQ ID NO: 10543 - DNA, 203 bp, synthetic construct
  source 1..203: mol_type = other DNA
ggcgcgccagtccttcccacctaaaaattcaaattttaaaaatttccataagacacttgtgaaaggcagagatcagctgtggaaaggacctggtgaactactgtggaagggagaaggagcagtcatagtcaaggtagggacagacataaaagtagtaccaagaaggaaggccaagattatcagggactcgactcggaccgatg

SEQ ID NO: 10544 - DNA, 203 bp, synthetic construct
  source 1..203: mol_type = other DNA
ggcgcgccagtcctcggcgtgaaaaacgcgtataaattaagttacaaaaaaacatgggacaagtgaaaatgtctcttcaagggattcacctgagtgatctatcatacaagcatgctatattaaaagagtctcagtatacaataaagagagatgtaggcacaacaacagcagtgatcaagcttcatacccgactcggaccgatg

SEQ ID NO: 10545 - DNA, 203 bp, synthetic construct
  source 1..203: mol_type = other DNA
ggcgcgccagtcctcagggtgcaaaacgcgtataaattaagttacaaaaaaacatgggacaagtgaaaatgtctcttcaagggattcacctgagtgatctatcatacaagcatgctatattaaaagagtctcgcctgcgccggcgtagagatgtaggcacaacaacagcagtgacaccctcatcattgcgactcggaccgatg

SEQ ID NO: 10546 - DNA, 203 bp, synthetic construct
  source 1..203: mol_type = other DNA
ggcgcgccagtcctactatgacaaaagacgcagtcgacaagaacagtttcgactcggaagcttgcttaacgtagtgctgacagttttttattagagagcagatctctgatgaacaaccaacggaagaagacgggaaaaccgtctatcaatatgctgaaacgcgtgagaaaccgtgtgtcaactggatccgactcggaccgatg

SEQ ID NO: 10547 - DNA, 203 bp, synthetic construct
  source 1..203: mol_type = other DNA
ggcgcgccagtcctccttatctaaaaggagtagtaagtatgggcctaatgtgtgacctgcaggcattttgtgaaaagggtaaagtatgaaagctactctcagaaaagtacttatgtattgatgagagccttaaaatgactttatattcacaaaactgctggaagacaatgatctggggtatcacattccgactcggaccgatg

SEQ ID NO: 10548 - DNA, 203 bp, synthetic construct
  source 1..203: mol_type = other DNA
ggcgcgccagtcctccgaacttaaaaggagtagtggtctaatatagtctgtgtgacctgcaggcattttgtgaaaagggtaaagtatgaaagctactctcagaaaagtacttatgtatgccgatcttaggggaaatgactttatattcacaaaactgctggaagacaatgatctggggtatcacattccgactcggaccgatg

SEQ ID NO: 10549 - DNA, 203 bp, synthetic construct
  source 1..203: mol_type = other DNA
ggcgcgccagtcctttagttcaaaaaggagtagtggtctaatatagtctgtgtgacctgcaggcattttgtgaaaagggtaaagtatgaaagctactctcagaaaagtacttatgtattgatgagagccttaaaatgactttatatggtgtgttgctgcagaagacaatgatctggggtatcacattccgactcggaccgatg

SEQ ID NO: 10550 - DNA, 203 bp, synthetic construct
  source 1..203: mol_type = other DNA
ggcgcgccagtcctcgggtttgaaaattcttctggccggtggtgttcagtacgccacaagcgacacaaatgaacacgccttctcagccccgccagcacttctaccctagccgggcccagcccccgagcagtgcagcctcccgagtgcagagtgcagcccctgcccgccctggcccagctgcccatgtccgactcggaccgatg

SEQ ID NO: 10551 - DNA, 203 bp, synthetic construct
  source 1..203: mol_type = other DNA
ggcgcgccagtcctagtcgaggaaacaacacctcacatcaatagaaggtgaatgtgtgcgggtttaataaaaaaagaaaagaagttaagtaaaatttaaaggacacaatagagaaaatctaggtccgaaagcttgcctctcagacagatcccaaaatcatagtccaaaccccaaacacagcagcagaccgactcggaccgatg

SEQ ID NO: 10552 - DNA, 203 bp, synthetic construct
  source 1..203: mol_type = other DNA
ggcgcgccagtcctgcaattccaaaccaagtttaaagaaaacttaaaaaggtctcccggcccaaccaagtttaaagaaaacttaaaatcaagaaaacttaaaaccaagtttaaagaaaactcaaaatcaagaaaacttaaagccaaaataagctagaaaactaaaagacatcatggcagtcccacaaccgactcggaccgatg

SEQ ID NO: 10553 - DNA, 203 bp, synthetic construct
  source 1..203: mol_type = other DNA
ggcgcgccagtcctccttcctaaaaccaagtttaaagaaaacttaaaatcaagaaaacttaatgatctaagcgtgaaaaacttaaaatcaagaaaacttaaaaccaagtttaaagaaaactcaaaatcaagaaaacttaaagccaaaataagctagaaaactaaaagacatcatggcagtcccacaaccgactcggaccgatg

SEQ ID NO: 10554 - DNA, 203 bp, synthetic construct
  source 1..203: mol_type = other DNA
ggcgcgccagtcctcgagcccgaaacccatctggagcctcagatcatcccaagtcattgttcatcagatctagtactcaaataagttaataaaaatatccacatggggcaaataatcattggaggaaatccaactaatcacaatatctgtcaacatagacgttggcgatgtagtggcaaaatcaaccacgactcggaccgatg

SEQ ID NO: 10555 - DNA, 203 bp, synthetic construct
  source 1..203: mol_type = other DNA
ggcgcgccagtcctgcttgaggaaacccatctggagcctcagatcatcccaagtcattgttcccagccggatccggtcaaataagttaataaaaatatccacatggggcaaataatcattggaggaaatccaactaatcacaatatctgtcaacatagacaagtcaacacgccaggcaaaatcaaccacgactcggaccgatg

SEQ ID NO: 10556 - DNA, 203 bp, synthetic construct
  source 1..203: mol_type = other DNA
ggcgcgccagtcctcacatgtaaaacccatctggagcctcagatcatcgatgtagtaaaccgatcagatctagtactcaaataagttaataaaaatatccacatggggcaaataatcattggaggaaatccaactaatcacaatatctgtcaacatagacaagtcaacacgccaggcaaaatcaaccacgactcggaccgatg

SEQ ID NO: 10557 - DNA, 203 bp, synthetic construct
  source 1..203: mol_type = other DNA
ggcgcgccagtccttccacgtgaaacccatctggtatacggctatgaaccaagtcattgttcatcagatctagtactcaaataagttaataaaaatatccacatggggcaaataatcattggaggaaatccaactaatcacaatatctgtcaacatagacaagtcaacacgccaggcaaaatcaaccacgactcggaccgatg

SEQ ID NO: 10558 - DNA, 203 bp, synthetic construct
  source 1..203: mol_type = other DNA
ggcgcgccagtcctcccttcgtaaacctttagcacgtgacgcggtgcctggcgccgagcctcccaagatggcggtgtgcatcgcggtgattgccaaggagaatcctaatgtctacattcgcagcacccctacggagaacgagctgaagttccactacatggtgcacacatctctggacgtggtggatgcgactcggaccgatg

SEQ ID NO: 10559 - DNA, 203 bp, synthetic construct
  source 1..203: mol_type = other DNA
ggcgcgccagtcctgcctaagcaaacctttagcacgtgacgcggtgcctggcgccgagcctcccaagatggcggtgtgcatcgcggtgattgccaaggagaattaccccctctacattcgcagcacccctacggagaacgagctgaagttccactacatggtgcacacatctctggacgtggtggatgcgactcggaccgatg

SEQ ID NO: 10560 - DNA, 203 bp, synthetic construct
  source 1..203: mol_type = other DNA
ggcgcgccagtcctacggttataaacggagggacgcagttccacttatagctccctgggtggtctaagtcctgagtacaggacagtcgtcagtagttcgacgtgagcagaagcccacctcgagatgctacgtggacgagggcatgccaagacacaccttaaccctagcgggggtcgctagggtgaaatcgactcggaccgatg

SEQ ID NO: 10561 - DNA, 203 bp, synthetic construct
  source 1..203: mol_type = other DNA
ggcgcgccagtccttgctcaaaaaacggagggactagccatagtggcgagctccctgggtggatctttaaacccacacaggacagtcgtcagtagttcgacgtgagcagaagcccacctcgagatgctacgtggacgagggcatgccaagacacaccttaaccctagcgggggtcgctagggtgaaatcgactcggaccgatg

SEQ ID NO: 10562 - DNA, 203 bp, synthetic construct
  source 1..203: mol_type = other DNA
ggcgcgccagtcctgcgatgcaaaacggagggactagccatagtggcgagctccctgggtggtctaagtcctgagtacaggacagtcgtcagtagttcgacgtgagcagaagcccacctcgagatgctacgtggacgagggcatgccaagacacaccttaaccctagcgggggtgagcccccaaggcccgactcggaccgatg

SEQ ID NO: 10563 - DNA, 203 bp, synthetic construct
  source 1..203: mol_type = other DNA
ggcgcgccagtcctccaaccagaaacggagggactagccatagtggcgagctccctgggtggtctaagtcctgagtacaggacagtcgtcagtagttcgacgtgtaggccccatggagtcgagatgctacgtggacgagggcatgccaagacacaccttaaccctagcgggggtcgctagggtgaaatcgactcggaccgatg

SEQ ID NO: 10564 - DNA, 203 bp, synthetic construct
  source 1..203: mol_type = other DNA
ggcgcgccagtcctaggccaagaaacggagggactagccatagtggcgagctccctgggtggtctaagtcctgagtacaggacagtcgtctccctcggagacatagcagaagcccacctcgagatgctacgtggacgagggcatgccaagacacaccttaaccctagcgggggtcgctagggtgaaatcgactcggaccgatg

SEQ ID NO: 10565 - DNA, 203 bp, synthetic construct
  source 1..203: mol_type = other DNA
ggcgcgccagtcctcgttctacaaacggagggactagccatagtggcgtcgctagcataacttctaagtcctgagtacaggacagtcgtcagtagttcgacgtgagcagaagcccacctcgagatgctacgtggacgagggcatgccaagacacaccttaaccctagcgggggtcgctagggtgaaatcgactcggaccgatg

SEQ ID NO: 10566 - DNA, 203 bp, synthetic construct
  source 1..203: mol_type = other DNA
ggcgcgccagtcctgtcgatccaaacgtgcctttttagataagttagatgttaatagtggttcgcgcaacacgccgaagtctaaagttggtaactatcgtttaccgtctagtaaacctagtggtatggatactgccttgttaagagcttaaatctaaactattaggatgtcttatactcccggtcattcgactcggaccgatg

SEQ ID NO: 10567 - DNA, 203 bp, synthetic construct
  source 1..203: mol_type = other DNA
ggcgcgccagtcctgagtacctaaacgtgcctttttagataagttagatgttaatagtggttttgctgtttttgttaagtctaaagttggtaactatcgtttaccgtctagtaaacctagtggtatggatactgccttgttaagagcttaaatctaaactccatactctaggactactcccggtcattcgactcggaccgatg

SEQ ID NO: 10568 - DNA, 203 bp, synthetic construct
  source 1..203: mol_type = other DNA
ggcgcgccagtcctttcgctttaaactacggattgtgctttttcttgtccaatgggagccggctcccgggcgcgaaggggcggggaggaaaggaacgactgtgctacgttgccagaaggggcgggacctgcaacgtccgacagaacgaggggacgtaacggaggcaggttggagccgctgccgtcgcccgactcggaccgatg

SEQ ID NO: 10569 - DNA, 203 bp, synthetic construct
  source 1..203: mol_type = other DNA
ggcgcgccagtcctacgtcaggaaagcgccgagccgaaactcggcggctgagcgtggaggttcttgtctcccctggtttgtgaagtgcggaaaaccagaggcgcagtcatgtcgggattcgacgatcctggcattttctacagcgacagcttcgggggcgacgcccaggccgacgaggggcaggcccgcgactcggaccgatg

SEQ ID NO: 10570 - DNA, 203 bp, synthetic construct
  source 1..203: mol_type = other DNA
ggcgcgccagtcctacctatgaaaaggcccagggaggctgaatgaatgtatttcaccagtagcaaatgagatgaaccatcttcctgcacacagccacgatttgcaaaggtttttggagaggaataaatttaatgaaagatgtacatacagcaggcgcgacataagcagtgctgggtaaaattaaacaccgactcggaccgatg

SEQ ID NO: 10571 - DNA, 203 bp, synthetic construct
  source 1..203: mol_type = other DNA
ggcgcgccagtcctttacaatgaaaggcccaggggtaggcttaacgcctatttcaccagtagcaaatgagatgaaccatcttcctgcacacagccacgatttgcaaaggtttttggagaggaataaatttaatgaaagatgtacatgacttctaaaaactataagcagtgctgggtaaaattaaacaccgactcggaccgatg

SEQ ID NO: 10572 - DNA, 203 bp, synthetic construct
  source 1..203: mol_type = other DNA
ggcgcgccagtcctgtaccgttaaagtattccacgacaaaaccaaattcacgcattatctctccacgaatccagcccttcaaaggataataacagaaaaaaaccaatacaagaacgggaacaacgccctagaaaaaacaagaaggtgcggtgatgctttccctaaaagaagacagccacaagaacagacgactcggaccgatg

SEQ ID NO: 10573 - DNA, 203 bp, synthetic construct
  source 1..203: mol_type = other DNA
ggcgcgccagtccttcgtagccaaagtattccacgacaaaaccaaattggattccctcactaccacgaatccagcccttcaaaggataataacagaaaaaaaccaatacaagaacgggaacaacgccctagaaaaaacaagaaggtaatccctcaacaaacctaaaagaagacagccacaagaacagacgactcggaccgatg

SEQ ID NO: 10574 - DNA, 203 bp, synthetic construct
  source 1..203: mol_type = other DNA
ggcgcgccagtccttgggctcgaaatcaaaagataataacaattggctctgtctctctcaccattgcaacagtatgcttcctcatgcagattgccatcctggtaactactgtgacattgcattttaagcaacatgagtgcgactcccccgcgagcaaccattagggctgcctcaaaccaataataatacgactcggaccgatg

SEQ ID NO: 10575 - DNA, 203 bp, synthetic construct
  source 1..203: mol_type = other DNA
ggcgcgccagtcctcttataccaaatgaaaagagcaggctagcgtttggactgttttgtttttggcggaactaccgggcaggaagattgcacaagtcagggggcgtttccaatcgggtgtcaattttggatctccccccccccacccccctttggatcttgtcgggctttccacgtttcacttaaaaacgactcggaccgatg

SEQ ID NO: 10576 - DNA, 203 bp, synthetic construct
  source 1..203: mol_type = other DNA
ggcgcgccagtcctccgcaggtaaatgcgtacaacaaacttgcgtaaaccaaaaaaatggggcaaataagaatttgataagtaccacttaaatttaactcccttggttagagatgggcagcaattcattgagtatgataaaagttatgcacgcttgaccctttgacaatgatgaagtagcattgttaacgactcggaccgatg

SEQ ID NO: 10577 - DNA, 203 bp, synthetic construct
  source 1..203: mol_type = other DNA
ggcgcgccagtccttggttcaaaaatgcgtacaacaaacttgcgtaaagtgttgttgaacaccaaataagaatttgataagtaccacttaaatttaactcccttggttagagatgggcagcaattcattgagtatgataaaagttagattacaaaatttgtttgacaatgatgaagtagcattgttaacgactcggaccgatg

SEQ ID NO: 10578 - DNA, 203 bp, synthetic construct
  source 1..203: mol_type = other DNA
ggcgcgccagtcctcacgcctcaaatgcgtacaatcggtgaataagctccaaaaaaatggggcaaataagaatttgataagtaccacttaaatttaactcccttggttagagatgggcagcaattcattgagtatgataaaagttagattacaaaatttgtttgacaatgatgaagtagcattgttaacgactcggaccgatg

SEQ ID NO: 10579 - DNA, 203 bp, synthetic construct
  source 1..203: mol_type = other DNA
ggcgcgccagtcctgtcgcagcaaatgcgtactacaaacttgcacattcggaaaaaatggggcaaataagaatttgataagtgctatttaagtctaaccttttcaatcagaaatggggtgcaattcactgagcatgataaaggttagattacaaaatttatttgacaatgacgattagcacgaaagcgcgactcggaccgatg

SEQ ID NO: 10580 - DNA, 203 bp, synthetic construct
  source 1..203: mol_type = other DNA
ggcgcgccagtcctattcagggaaatgcttctctagataatgcttaaaggaccctgcagcagttcttggtattggacatagcatctcagcacaccgtcttaatcccgtgactaccagatttgactcatttgtgattccttcgagaatctcccatgatttgcaatggttacatgaatgtttgggaaggacgactcggaccgatg

SEQ ID NO: 10581 - DNA, 203 bp, synthetic construct
  source 1..203: mol_type = other DNA
ggcgcgccagtccttctagttgaaatgttaggagccggctcctgcgtcgctccggaagcctgcgagttccggaagccttggtaatccagattcggctaggaaaagacaagctttccagagaatgtttcagagaaagttacgtggagcgtgggcgtttcgcagactcctaagagaccttcagagaagaccgactcggaccgatg

SEQ ID NO: 10582 - DNA, 203 bp, synthetic construct
  source 1..203: mol_type = other DNA
ggcgcgccagtcctcaactgacaaattccagttgttagtcgaatccaacaagctgagtaaaagggatttcaggcctttgaatcgctatacatcttgctaaccgaacctctccactcagtccctctagacaataaagtccgagatgtcctaaagtcaacatgaaaaaaacaggcaacaccactgataaacgactcggaccgatg

SEQ ID NO: 10583 - DNA, 203 bp, synthetic construct
  source 1..203: mol_type = other DNA
ggcgcgccagtccttgagcgtgaaattccagttgttagtcgaatccaacaagctgagtaaaatcatgcaagatgacttgaatcgctatacatcttgctaaccgaacctctccactcagtccctctagacaataaagtccgagatgtcctaaagtcaacatgaaaaaaacaggcaacaccactgataaacgactcggaccgatg

SEQ ID NO: 10584 - DNA, 203 bp, synthetic construct
  source 1..203: mol_type = other DNA
ggcgcgccagtcctgactaataaaattctgatgcagaacgtatcagtgaaactccctcccactgtctcttgtattagcatcaaggaagcgagaaaaaataagcaccctgagaatggagacagtgtttgaagagatggatgaagaaagcacaggaggagttaggcggattttttcagaaatagtccttgcgactcggaccgatg

SEQ ID NO: 10585 - DNA, 203 bp, synthetic construct
  source 1..203: mol_type = other DNA
ggcgcgccagtccttttcgtccaaattctgatgcagaacgtatcagtgaaactccctcccactgtctcttgtattagcatcaaggaagcgagaaaaaataagcaccctgagaatggagacagtgtttgaagagatggatgaagaaagcacaggaggagtttcatcttcgaaagaagaaatagtccttgcgactcggaccgatg

SEQ ID NO: 10586 - DNA, 203 bp, synthetic construct
  source 1..203: mol_type = other DNA
ggcgcgccagtcctatcctaagaaattctgatgcagaacgtatcagtgaaactccctcccactgtctcttgtattagcatcaaggaagcgagaaaaaataagcaccctgagaatggagacagtgtttgaagagatggatgaagaaagcacaggaggagtttcatcttcgaaagatccccacaggtgcacgactcggaccgatg

SEQ ID NO: 10587 - DNA, 203 bp, synthetic construct
  source 1..203: mol_type = other DNA
ggcgcgccagtcctcctcgcaaaacaaagaagtacttccctatccccgacgaccggatcctgaggaggcagctgcggtggcagctgctgagttctcggtgaaggtatttcatttctcctgtcccctcccctccccaccccatctattaatattattcttttgaagattcttcgttgtcaagccgccaacgactcggaccgatg

SEQ ID NO: 10588 - DNA, 203 bp, synthetic construct
  source 1..203: mol_type = other DNA
ggcgcgccagtccttagtttctaacaacatagattcaagacttgattgatgcaattcaaaattttctacaacatctaggtattactgatgatatatacacaatatatatattagtgtcataacactcaatcctaatgcttaccacatcatcaaactattaactcaaacaattcaagccatgggacaaacgactcggaccgatg

SEQ ID NO: 10589 - DNA, 203 bp, synthetic construct
  source 1..203: mol_type = other DNA
ggcgcgccagtcctggccaaataacaagggatgtcagcaagctacacaaagtatagatatttccaatgcgacggggaagctatatttacacatttcaagagagggtgcacttgctggggggaggacatgggccgggaaggattggaagaccaaggacctccccctcctccccctccaggtctagtctacgactcggaccgatg

SEQ ID NO: 10590 - DNA, 203 bp, synthetic construct
  source 1..203: mol_type = other DNA
ggcgcgccagtcctaccgcacaaacaagggatgtcagcaagctacacaaagtatagatatttgtgcctaatgcaaaaagctatatttacacatttcaagagagggtgcacttgctggggggaggacatgggccgggaaggattggagttatcgtacaggacccctcctccccctccaggtctagtctacgactcggaccgatg

SEQ ID NO: 10591 - DNA, 203 bp, synthetic construct
  source 1..203: mol_type = other DNA
ggcgcgccagtcctcttgacagaacaagggatgttgcggcatccatataagtatagatatttgtgcctaatgcaaaaagctatatttacacatttcaagagagggtgcacttgctggggggaggacatgggccgggaaggattggaagaccaaggacctccccctcctccccctccaggtctagtctacgactcggaccgatg

SEQ ID NO: 10592 - DNA, 203 bp, synthetic construct
  source 1..203: mol_type = other DNA
ggcgcgccagtcctcccggaacaaccgcgtctccttagcttgccttaagcagtctttatatcttctgtatattattttaaagtttataggagcaaagttcgctttactcgcaatagctattttatttattttaggaatattatcacctcgtaattatttaattataacattagctttatctatttatacgactcggaccgatg

SEQ ID NO: 10593 - DNA, 203 bp, synthetic construct
  source 1..203: mol_type = other DNA
ggcgcgccagtcctgcgcaacgaaccggtacctaatgtgtatgtgtatatatgtatgtgtgtgtatgtatatgtgtgtgtatgtgtatgtgtgtgtgtatgtgtgtgtgtatgtatgtatgtatgtatatgtattatacacatatacacatattggtttttttaatcatttgagagttagttgaagatcgactcggaccgatg

SEQ ID NO: 10594 - DNA, 203 bp, synthetic construct
  source 1..203: mol_type = other DNA
ggcgcgccagtcctaaggcatgaaccttcggggacctcccacctgcattgctctacaatctgtggcctcagcccttgccaactctgcctcttcccccgctgactgggcctctgcagagatgtgggcagctggtcaggatggccattcgggctcagcacagcaacgcagcccagactcagactggggaacgactcggaccgatg

SEQ ID NO: 10595 - DNA, 203 bp, synthetic construct
  source 1..203: mol_type = other DNA
ggcgcgccagtcctgtggcttaaacgctactgcactgcctcccctctcctgtattgaaagcgtttgtgttcatcttatcagggacctgaccctaagagaatccttcccctgccaaggcagttccagcccccagaactcatcaccccatctcctgaggtggttcctatcctccctctcttctcctcgcccgactcggaccgatg

SEQ ID NO: 10596 - DNA, 203 bp, synthetic construct
  source 1..203: mol_type = other DNA
ggcgcgccagtcctcgtgcagtaacggcgagggatctcagcaaactgtacaaaaccaaatctctttttgattttcaaggaaactaggttcctgccaaattttgaatctggacaataaacagacactttgtcctagcatctttctggaatcatttcgggatattttccacaagcaacacagaaacaggacgactcggaccgatg

SEQ ID NO: 10597 - DNA, 203 bp, synthetic construct
  source 1..203: mol_type = other DNA
ggcgcgccagtcctcgcaaagcaacggtcactctgaaaacagggtgggagagctgcctctctttgaacctctcccactctagtggactgaccagggaggcaaacttggtcgatgtaagcggtggcttggagacagaatcatctaatggaaaagatacactagaaggtgctggggatacatcagaggtgcgactcggaccgatg

SEQ ID NO: 10598 - DNA, 203 bp, synthetic construct
  source 1..203: mol_type = other DNA
ggcgcgccagtccttccaatttaacggtcactctgaaaacagggtgggagagctgcctctctttgaacctctcccaggaccaactctaacccagggaggcaaacttggtcgatgtaagcggtggcttggagaacctcagtcagtcaggaaaagatacactagaaggtgctggggatacatcagaggtgcgactcggaccgatg

SEQ ID NO: 10599 - DNA, 203 bp, synthetic construct
  source 1..203: mol_type = other DNA
ggcgcgccagtcctttatttataacggtcactctgaaaacagggtgggagagctgcctctctttgaacctctcccaggaccaactctaacccagggaggcaaacttggtcgatgtaagcggtggcttggagaagagtagcaaactcggaaaagatacactagaaggtgctggggatacatcagaggtgcgactcggaccgatg

SEQ ID NO: 10600 - DNA, 203 bp, synthetic construct
  source 1..203: mol_type = other DNA
ggcgcgccagtccttatctcgcaacggtcactctgaaaacagggtgggagagctgcctctctttgaacctctcccaggaccaactctaacccagggaggcaaacttggtcgatgtaagcggtggcttggagacagaatcatctaatggaaaagatacactgcgccaccagtcacatacatcagaggtgcgactcggaccgatg

SEQ ID NO: 10601 - DNA, 203 bp, synthetic construct
  source 1..203: mol_type = other DNA
ggcgcgccagtcctgaccatgtaacggtcactctgaaaacagggtgggagagctgcctctctttgaacctctcccaggaccaactctaacggtcctcaagtccattggtcgatgtaagcggtggcttggagacagaatcatctaatggaaaagatacactagaaggtgctggggatacatcagaggtgcgactcggaccgatg

SEQ ID NO: 10602 - DNA, 203 bp, synthetic construct
  source 1..203: mol_type = other DNA
ggcgcgccagtcctgccgcgggaacggtcactctgaaaacagggtggggattgcttagtatcttgaacctctcccaggaccaactctaacccagggaggcaaacttggtcgatgtaagcggtggcttggagacagaatcatctaatggaaaagatacactagaaggtgctggggatacatcagaggtgcgactcggaccgatg

SEQ ID NO: 10603 - DNA, 203 bp, synthetic construct
  source 1..203: mol_type = other DNA
ggcgcgccagtccttcgccaataactattatctcgcctgcacgcccgcctcgcgtcccgggggggtcccgcctcccaccccgcctctggacttgtctctttccccgcgcgcgcggacagagccggcgtttaggcccgagcgagcccgggggccgccggccgggaagacaacgcgggcaccgattcgcccgactcggaccgatg

SEQ ID NO: 10604 - DNA, 203 bp, synthetic construct
  source 1..203: mol_type = other DNA
ggcgcgccagtccttcacccgcaactcgaccgaggcagtcctgcagttgcagtcgtgttctccgagttcctgtctctctgccaacgccgcccggatggcttcccaaaaccgcgacccagccgccactagcgtcgccgccgcccgtaaaggagctgagccgagcgggggcgccgcccggggtccggtggcgactcggaccgatg

SEQ ID NO: 10605 - DNA, 203 bp, synthetic construct
  source 1..203: mol_type = other DNA
ggcgcgccagtcctgtactttgaagaacaaaagcaaaaacaaaaacaagaacaaaaaagggaagaaaaacaaaagtatacacaaaaaccaaaaaagaaaaaaggccagagacaaaaacggaggcaagaacaaaaatttaaacaaaaacagaatttaaattcataataaacaccaagatagagacaaaacgactcggaccgatg

SEQ ID NO: 10606 - DNA, 203 bp, synthetic construct
  source 1..203: mol_type = other DNA
ggcgcgccagtcctgcagcctgaagaacaaaagcaaaaacaaaaacaagaacaaaaaagggactctttcagggtaaatacacaaaaaccaaaaaagaaaaaaggccagagacaaaaacggaggcaagaacaaaaatttaaacaaaaacagaatttaaattcataataaacaccaagatagagacaaaacgactcggaccgatg

SEQ ID NO: 10607 - DNA, 203 bp, synthetic construct
  source 1..203: mol_type = other DNA
ggcgcgccagtcctgtgatctcaagacaaaaaccattcaacgccggagacgacttgtcttaacagtggatgcattgagtggattgactgtcagggctgtctttaggcttaattccagacctctctgtgcttagggcaaacatcatttggccttaaatgggattctgtgagaggggatccctccattgacgactcggaccgatg

SEQ ID NO: 10608 - DNA, 203 bp, synthetic construct
  source 1..203: mol_type = other DNA
ggcgcgccagtcctgcccgtgaaagacaaaaaccattcaacgccggaggactgactctcatccagtggatgcattgagtggattgactgtacatctaaagcgggggcttaattccagacctctctgtgcttagggcaaacatcatttggccttaaatgggattctgtgagaggggatccctccattgacgactcggaccgatg

SEQ ID NO: 10609 - DNA, 203 bp, synthetic construct
  source 1..203: mol_type = other DNA
ggcgcgccagtcctgcgtgtaaaagacaaaaaccattcaacgccggaggactgactctcatccagtggatgcattgagtggattgactgtcagggctgtctttaggcttaattccagacctctctgtgcttattaacctgccgccgtggccttaaatgggattctgtgagaggggatccctccattgacgactcggaccgatg

SEQ ID NO: 10610 - DNA, 203 bp, synthetic construct
  source 1..203: mol_type = other DNA
ggcgcgccagtcctctcgttgtaagacaaaaaccattcaacgccggaggactgactctcatcggacttgatatgatagtggattgactgtcagggctgtctttaggcttaattccagacctctctgtgcttagggcaaacatcatttggccttaaatgggattctgtgagaggggatccctccattgacgactcggaccgatg

SEQ ID NO: 10611 - DNA, 203 bp, synthetic construct
  source 1..203: mol_type = other DNA
ggcgcgccagtccttcagaagaaagacaaaaacccaagtcgcatcctagactgactctcatccagtggatgcattgagtggattgactgtcagggctgtctttaggcttaattccagacctctctgtgcttagggcaaacatcatttggccttaaatgggattctgtgagaggggatccctccattgacgactcggaccgatg

SEQ ID NO: 10612 - DNA, 203 bp, synthetic construct
  source 1..203: mol_type = other DNA
ggcgcgccagtcctatcttagcaagatgcggcatatcattctcaaattcttaggacggtcgggccctggaaggaacgctctcggaattggccgcggaaaccgatctgcccgttgtgtttgtgaaacagagaaagataggcggccatggtccaaccttgaaggaggcagcccaatatggcaagaaggtgcgactcggaccgatg

SEQ ID NO: 10613 - DNA, 203 bp, synthetic construct
  source 1..203: mol_type = other DNA
ggcgcgccagtcctctgtgggcaagattgcgtggccgaccgaatcgtgtgaattcccagcgctttggcttctctgagttggggttgtgtataggggtcttcgaacagttccggaaccagccagcagcctttaattcttgggcggaccacggccggttctgtgttcttggctaagatgagcagccaccacgactcggaccgatg

SEQ ID NO: 10614 - DNA, 203 bp, synthetic construct
  source 1..203: mol_type = other DNA
ggcgcgccagtccttggactgaaagattgcgtgggttctgcctaaagccatgacaagcctcttttggcttctctgagttggggttgtgtataggggtcttcgaacagttccggaaccagccagcagcctttaattcttgggcggaccacggccggttctgtgttcttggctaagatgagcagccaccacgactcggaccgatg

SEQ ID NO: 10615 - DNA, 203 bp, synthetic construct
  source 1..203: mol_type = other DNA
ggcgcgccagtccttctaacgaaagattgcgtgggttctgcctaaagctgaattcccagcgctttggcttctctgagttggggttgtgtactctatggggactgcagttccggaaccagccagcagcctttaattcttgggcggaccacggccggttctgtgttcttggctaagatgagcagccaccacgactcggaccgatg

SEQ ID NO: 10616 - DNA, 203 bp, synthetic construct
  source 1..203: mol_type = other DNA
ggcgcgccagtcctgcagattcaagattgcgtgggttctgcctaaagctgaattcccagcgctttggcttctctgagttggggttgtgtataggggtcttcgaacagttccggaaccagccagcagcctttaattcttgggcggacattaattctgcgaatgttcttggctaagatgagcagccaccacgactcggaccgatg

SEQ ID NO: 10617 - DNA, 203 bp, synthetic construct
  source 1..203: mol_type = other DNA
ggcgcgccagtcctggctttcaaagattgcgtgggttctgcctaaagctgaattcccagcgctttggcttctctgagttggggttgtgtataggggtcttcgaacagttccggaaccagccagcagcctttaattcttgggcggaccacggccggttctgtgttcttggctaagatgagcagccaccacgactcggaccgatg

SEQ ID NO: 10618 - DNA, 203 bp, synthetic construct
  source 1..203: mol_type = other DNA
ggcgcgccagtcctgctctataaagattgcgtgggttctgcctaaagctgaattcccagcgctttggcttctctgagttggggttgtgtataggggtcttcgaacagttccggaaccagccagcagcctttacacgactttttcgacacggccggttctgtgttcttggctaagatgagcagccaccacgactcggaccgatg

SEQ ID NO: 10619 - DNA, 203 bp, synthetic construct
  source 1..203: mol_type = other DNA
ggcgcgccagtcctggcggtgtaagattgcgtgggttctgcctaaagctgaattcccagcgctttggcttctctgagttggggttgtgtataggggtcttcgaagtcagttcctcgtcgccagcagcctttaattcttgggcggaccacggccggttctgtgttcttggctaagatgagcagccaccacgactcggaccgatg

SEQ ID NO: 10620 - DNA, 203 bp, synthetic construct
  source 1..203: mol_type = other DNA
ggcgcgccagtccttgcgtatcaagatttcatttgccaaccgctccgctgcgcgcaggctgggctgcaggctctcggctgcagcgctgggtgtcttcaggcctatggagagcagcttgcgtgggctgggcctgcagtacctggtttgcatagatgattggcaggtggatctaggatccggcttccaaccgactcggaccgatg

SEQ ID NO: 10621 - DNA, 203 bp, synthetic construct
  source 1..203: mol_type = other DNA
ggcgcgccagtcctaaatttagaagcaattactcaaaaacggagaaaacatcagctgatgcgtgccctactctcccacccctttatatagttccttcagtatttacttgaggcagacaggaagacttctgaagaacaaatcagcctggtcaccagcttttcggaacagcagagagttcacactagaagcgactcggaccgatg

SEQ ID NO: 10622 - DNA, 203 bp, synthetic construct
  source 1..203: mol_type = other DNA
ggcgcgccagtcctactaatcgaagcaattactcaaaaacggagaaaacatcagctgatgcgtgccctactctcccacccctttatatagttccttcagtatttacttgaggcagacaggaagacttctgaagaacaaatcagcctggtcaccagcttttgcccttgagtagatcacagagggcagtccgactcggaccgatg

SEQ ID NO: 10623 - DNA, 203 bp, synthetic construct
  source 1..203: mol_type = other DNA
ggcgcgccagtcctgcgttaccaagcccaacacgacgcatcagatgaccaattcagttcactggtgcaatgagggtattggggctttttgaacgtgggaataacttgaatttcgcagatacctacgtatatacatggaaccaacagtactcgtatcatgaaaatgcattcctaatttcaaatcaagtacgactcggaccgatg

SEQ ID NO: 10624 - DNA, 203 bp, synthetic construct
  source 1..203: mol_type = other DNA
ggcgcgccagtcctccatgtttaagcccaacacgcaatgcgtttattgcaattcagttcactggtgcaatgagggtattggggctttttgaacgtgggaataacttgaatttcgcagagttgcttcaggtatcatggaaccaacagtactcgtatcatgaaaatgcattcctaatttcaaatcaagtacgactcggaccgatg

SEQ ID NO: 10625 - DNA, 203 bp, synthetic construct
  source 1..203: mol_type = other DNA
ggcgcgccagtcctaagtctgaaagcccaacacgcaatgcgtttattgcaattcagttcactggtgcaatgagggtattggggctttttgaacgtgggaataacttgaatttcgcagatacctacgtatatacatggaaccaacagggtgacatagcctcaaatgcattcctaatttcaaatcaagtacgactcggaccgatg

SEQ ID NO: 10626 - DNA, 203 bp, synthetic construct
  source 1..203: mol_type = other DNA
ggcgcgccagtcctagtctacaaagcccaacacgcaatgcgtttattgcaattcagttcactggtgcaatgagggtattggggctttttgaacgtgggaataacttgaatttcgcagatacctacgtatatacatggaaccaacagtactcgtatcatgaaaatgcattcctaatttcaaatcaagtacgactcggaccgatg

SEQ ID NO: 10627 - DNA, 203 bp, synthetic construct
  source 1..203: mol_type = other DNA
ggcgcgccagtcctactgccctaagcccaacacgcaatgcgtttattgcaattcagttcactggtgcaatgagggtattggggctttttgaacgtgggaataacttgaatttcgcagatacctacgtatatacatggaaccaacagtactcgtatcatgactcctggagagcggtttcaaatcaagtacgactcggaccgatg

SEQ ID NO: 10628 - DNA, 203 bp, synthetic construct
  source 1..203: mol_type = other DNA
ggcgcgccagtcctaaggagcgaagcccaacacgcaatgcgtttattgtttgaagtggggtaggtgcaatgagggtattggggctttttgaacgtgggaataacttgaatttcgcagatacctacgtatatacatggaaccaacagtactcgtatcatgaaaatgcattcctaatttcaaatcaagtacgactcggaccgatg

SEQ ID NO: 10629 - DNA, 203 bp, synthetic construct
  source 1..203: mol_type = other DNA
ggcgcgccagtcctggacccataagcccacctcgagatgctacgtggaacgacaatgagacggacacaccttaaccctagcgggggtcgctagggtgaaatcacaccacgtgatgggagtacgacctgatagggcgctgcagaggcccactattaggctagtataaaaatctctgctgtacatggcaccgactcggaccgatg

SEQ ID NO: 10630 - DNA, 203 bp, synthetic construct
  source 1..203: mol_type = other DNA
ggcgcgccagtcctgtcattctaagcccacctcgagatgctacgtggacgagggcatgccaagacacaccttaaccctagcgggggtcgccttctaccgtggggaccacgtgatgggagtacgacctgatagggcgctgcagaggcccactattaggctagtataaaaatctctgctgtacatggcaccgactcggaccgatg

SEQ ID NO: 10631 - DNA, 203 bp, synthetic construct
  source 1..203: mol_type = other DNA
ggcgcgccagtcctgaattccgaagcccacctcgagatgctacgtggacgagggcatgccaagacacaccttaaccctagcgggggtcgctagggtgaaatcacaccacgtgatgggagtacgacctgatagacatgccattcctaccactattaggctagtataaaaatctctgctgtacatggcaccgactcggaccgatg

SEQ ID NO: 10632 - DNA, 203 bp, synthetic construct
  source 1..203: mol_type = other DNA
ggcgcgccagtcctcggatcgcaagcccacctcgagatgctacgtggacgagggcatgccaagacacaccttaaccctagcgggggtcgctagggtgaaatcacaccacgtgatgggagtacgacctgatagggcgctgcagaggcagcagtaagtctcggtataaaaatctctgctgtacatggcaccgactcggaccgatg

SEQ ID NO: 10633 - DNA, 203 bp, synthetic construct
  source 1..203: mol_type = other DNA
ggcgcgccagtcctacttcgaaaagcccacctcgagatgctacgtggacgagggcatgccaagacacaccttaaccctagcgggggtcgctagggtgaaatcacaccacgtgatgggagtacgacctgatagggcgctgcagaggcccactattaggctacataccctgcaatcgctgtacatggcaccgactcggaccgatg

SEQ ID NO: 10634 - DNA, 203 bp, synthetic construct
  source 1..203: mol_type = other DNA
ggcgcgccagtcctggatgggaaagcccacctcgagatgctacgtggacgagggcatgccaagacacaccttaaccctagcgggggtcgctagggtgaaatcacaccacgtgatgggataggcggtaagcgaggcgctgcagaggcccactattaggctagtataaaaatctctgctgtacatggcaccgactcggaccgatg

SEQ ID NO: 10635 - DNA, 203 bp, synthetic construct
  source 1..203: mol_type = other DNA
ggcgcgccagtcctacgctttcaagcccacctcgagatgctacgtggacgagggcatgccaatggcataacacttactagcgggggtcgctagggtgaaatcacaccacgtgatgggagtacgacctgatagggcgctgcagaggcccactattaggctagtataaaaatctctgctgtacatggcaccgactcggaccgatg

SEQ ID NO: 10636 - DNA, 203 bp, synthetic construct
  source 1..203: mol_type = other DNA
ggcgcgccagtcctaatcacttaagcggcagcgcatagacgaaagaacggtggcaggaggctgcgaggagccggcgcggtcgcagtctccacggcgcaggcccacggtagcgcagccgctctgagaacttcatggaggaacacggagtgacccaaaccgaacatatggctaccatagaagcacatgcacgactcggaccgatg

SEQ ID NO: 10637 - DNA, 203 bp, synthetic construct
  source 1..203: mol_type = other DNA
ggcgcgccagtcctcttactagaagcggcagcgctcgccattgccgctggtggcaggaggctgcgaggagccggcggatagaggactgatacggcgcaggcccacggtagcgcagccgctctgagaacttcatggaggaacacggagtgacccaaaccgaacatatggctaccatagaagcacatgcacgactcggaccgatg

SEQ ID NO: 10638 - DNA, 203 bp, synthetic construct
  source 1..203: mol_type = other DNA
ggcgcgccagtcctccattagcaagctggggccgccaggagtgcgatcgcctgcggatctgcagctgggcaccggccgcaacgcccgccccgcgacggcagggaataaaggctcagggaccggcagttctactctagagcccaccagcctctcagagcctccggtgactggcctgtgtctccccctggcgactcggaccgatg

SEQ ID NO: 10639 - DNA, 203 bp, synthetic construct
  source 1..203: mol_type = other DNA
ggcgcgccagtcctctatacaaaagctggggccgccaggagtgcgatcgcctgcggatctgcagctgggcaccggccgcaacgcccgccccgcgacggcagggaataaaggctcagggaccggcagttctactctagagcccaccataaatagctcttgcccggtgactggcctgtgtctccccctggcgactcggaccgatg

SEQ ID NO: 10640 - DNA, 203 bp, synthetic construct
  source 1..203: mol_type = other DNA
ggcgcgccagtcctaacgcggcaagctggggccgccaggagtgcgatcgcctgcggatctgcagctgggcaccggccgcaacgcccgccccgcgacggcagggaataaaggctcagggtttacagcctctactctagagcccaccagcctctcagagcctccggtgactggcctgtgtctccccctggcgactcggaccgatg

SEQ ID NO: 10641 - DNA, 203 bp, synthetic construct
  source 1..203: mol_type = other DNA
ggcgcgccagtcctcccatttgaagctggggccgccaggagtgcgatcgcctgcggatctgcagctgggctagctttctaacgcccgccccgcgacggcagggaataaaggctcagggtttacagcctctactctagagcccaccagcctctcagagcctccggtgactggcctgtgtctccccctggcgactcggaccgatg

SEQ ID NO: 10642 - DNA, 203 bp, synthetic construct
  source 1..203: mol_type = other DNA
ggcgcgccagtcctaatctttaaagctggggccggaccactgcgtcatgcctgcggatctgcagctgggcaccggccgcaacgcccgccccgcgacggcagggaataaaggctcagggaccggcagttctactctagagcccaccagcctctcagagcctccggtgactggcctgtgtctccccctggcgactcggaccgatg

SEQ ID NO: 10643 - DNA, 203 bp, synthetic construct
  source 1..203: mol_type = other DNA
ggcgcgccagtccttggagtagaaggagccaacgatcttgccaagttccaccagatgctgatgaagataataatgaagtagctacagctcaacttacctgccaaccccatgccagtcgacctaattagtacaacctaaatccattactctcttagcgtcggcaaagtgattgcctcctaagttccacacgactcggaccgatg

SEQ ID NO: 10644 - DNA, 203 bp, synthetic construct
  source 1..203: mol_type = other DNA
ggcgcgccagtcctgagaaagaaaggagccaacgatcttgccaagttccaccagatgctgatgaagataataatgaagtagctacagctcaacttacctgccaaccccatgccagtcgacctaattagtacaacctaaatccattataaaaaacttaggagcaaagtgattgcctcctaagttccacacgactcggaccgatg

SEQ ID NO: 10645 - DNA, 203 bp, synthetic construct
  source 1..203: mol_type = other DNA
ggcgcgccagtcctcgcactgtaaggagccaacgatcttgccaagttccaccagatgctgatgaagataataatgagccgttatttaggaaacttacctgccaaccccatgccagtcgacctaattagtacaacctaaatccattataaaaaacttaggagcaaagtgattgcctcctaagttccacacgactcggaccgatg

SEQ ID NO: 10646 - DNA, 203 bp, synthetic construct
  source 1..203: mol_type = other DNA
ggcgcgccagtccttacataacaaggagccaacgcgtggagttgtgcgcaccagatgctgatgaagataataatgaagtagctacagctcaacttacctgccaaccccatgccagtcgacctaattagtacaacctaaatccattataaaaaacttaggagcaaagtgattgcctcctaagttccacacgactcggaccgatg

SEQ ID NO: 10647 - DNA, 203 bp, synthetic construct
  source 1..203: mol_type = other DNA
ggcgcgccagtccttcagtgccaaggagccagggagtacttagccggagtggggcagcaccgctccttgggtccccactccccatttctcattgcttggaaatccatgccaagatgcctgccttccttggtctaaagtgtctggggaaattgtgcagctctgagaaaagcaaagtcacctcatctgagcgactcggaccgatg

SEQ ID NO: 10648 - DNA, 203 bp, synthetic construct
  source 1..203: mol_type = other DNA
ggcgcgccagtcctgaatgttaaaggagccaggggaacagagagaattgtggggcagcaccgctccttgggtccccactccccatttctcattgcttggaaatccatgccaagatgcctgccttccttggtctaaagtgtctggggaaattgtgcagctcaattgggctgggtctcacctcatctgagcgactcggaccgatg

SEQ ID NO: 10649 - DNA, 203 bp, synthetic construct
  source 1..203: mol_type = other DNA
ggcgcgccagtcctcccaggccaaggagccaggggaacagagagaattgtggggcagcaccgctccttgggtccccactccccatttctcattgcttggaaatccatgccaagatgcctgccttccttggtctaaagtgtctggggaaattgtgcagctctgagaaaagcaaagcgcgggtcgacatccgactcggaccgatg

SEQ ID NO: 10650 - DNA, 203 bp, synthetic construct
  source 1..203: mol_type = other DNA
ggcgcgccagtccttgggcaacaaggagccaggggaacagagagaattgtggggcagcaccgctccttgggtccccactccccatttctccggctcgacttccacatgccaagatgcctgccttccttggtctaaagtgtctggggaaattgtgcagctctgagaaaagcaaagtcacctcatctgagcgactcggaccgatg

SEQ ID NO: 10651 - DNA, 203 bp, synthetic construct
  source 1..203: mol_type = other DNA
ggcgcgccagtcctggtgatataaggagccaggggaacagagagaattgtggggcagcaccgctccttgggtccccgtcattgtccgaggattgcttggaaatccatgccaagatgcctgccttccttggtctaaagtgtctggggaaattgtgcagctctgagaaaagcaaagtcacctcatctgagcgactcggaccgatg

SEQ ID NO: 10652 - DNA, 203 bp, synthetic construct
  source 1..203: mol_type = other DNA
ggcgcgccagtcctgcacgatgaagggacggcggcgattggcggacgctcctggcaggagagcgcggattggtcaggcacggagcaggaggcggggctgatagcccagcagcagcagcggcggcggcggctgcggagcgggtgtgaggcggctggaccgcagaatgaatcgatacagggcgcggcaagcgactcggaccgatg

SEQ ID NO: 10653 - DNA, 203 bp, synthetic construct
  source 1..203: mol_type = other DNA
ggcgcgccagtcctcccaccgaaaggtcagtggtaggtaaggaaggggccttaacctctgctggtgaccagaagcctgcatttctgcattctgcttaattccctttccttagatttgaaagaagccaacactaaaccacaaatatatcgtctacgagcaatctcaaacgagagtcagcctttaacgaacgactcggaccgatg

SEQ ID NO: 10654 - DNA, 203 bp, synthetic construct
  source 1..203: mol_type = other DNA
ggcgcgccagtcctagacaataaaggtcagtggtaggtaaggaaggggccttaacctctgctggtgaccagaagcctgcatttctgcattctgcttaattccctttccttagatttgactacttgttgtctgaaaccacaaatatacaacaaggccattttctcaaacgagagtcagcctttaacgaacgactcggaccgatg

SEQ ID NO: 10655 - DNA, 203 bp, synthetic construct
  source 1..203: mol_type = other DNA
ggcgcgccagtcctccggctgaaaggtcagtggtaggtaaggaaggggtagcgcgtctacggggtgaccagaagcctgcatttctgcattctgcttaattccctttccttagatttgaaagaagccaacactaaaccacaaatatacaacaaggccattttctcaaacgagagtcagcctttaacgaacgactcggaccgatg

SEQ ID NO: 10656 - DNA, 203 bp, synthetic construct
  source 1..203: mol_type = other DNA
ggcgcgccagtccttactctataagtacggttttcggagggatcagactcagactcacgtcgcactcctcgcagttggactggtgggaactgggaacactggagacctgatttctaactgacgctaccgtcgaacgtttatgtcccgacgacttcagcatgtctcaggccaccaagaggaagcatgtgcgactcggaccgatg

SEQ ID NO: 10657 - DNA, 203 bp, synthetic construct
  source 1..203: mol_type = other DNA
ggcgcgccagtcctggcacggaaagtacggttttcggagggatcagactcagactcacgtcgcactcctcgcagttggactggtgggaactgggaacactggagacctgatttctaactgacgctaccgtcgcggccgccgtgtggctacggcgtttgtagtctcaggccaccaagaggaagcatgtgcgactcggaccgatg

SEQ ID NO: 10658 - DNA, 203 bp, synthetic construct
  source 1..203: mol_type = other DNA
ggcgcgccagtcctactggtttaagtacggttttcggagggatcagactcagactcacgtcgcactcctcgcagttggactggtgggaactgggaacactggagacctgatttctaactgacgctaccgtcgcggccgccgtgtgggacgacttcagcatccgcgtttggggatagaggaagcatgtgcgactcggaccgatg

SEQ ID NO: 10659 - DNA, 203 bp, synthetic construct
  source 1..203: mol_type = other DNA
ggcgcgccagtcctacgtcgctaagtacggttttcggagggatcagactcagactcacgtcgcactcctcgcagttggactggtgggaactgggaacactggagacctgatttctaactgacgctaccgtcgcggccgccgtgtgggacgacttcagcatgtctcaggccaccaagaggaagcatgtgcgactcggaccgatg

SEQ ID NO: 10660 - DNA, 203 bp, synthetic construct
  source 1..203: mol_type = other DNA
ggcgcgccagtcctgattgcgtaagtacggttttcggagggatcagactcagactcacgtcgcactcctcgcagtttatgctcactactatgggaacactggagacctgatttctaactgacgctaccgtcgcggccgccgtgtgggacgacttcagcatgtctcaggccaccaagaggaagcatgtgcgactcggaccgatg

SEQ ID NO: 10661 - DNA, 203 bp, synthetic construct
  source 1..203: mol_type = other DNA
ggcgcgccagtccttaaacgcgaagttgggtaaggatagatcaatcaatgatcatattctagtacacttaggattcaagatcctattatcagggacaagagcaggattagggatatccgagatggccacacttttgaggagcttagcattgttcaaaagaccgtccacttgcagacccattacatcagcgactcggaccgatg

SEQ ID NO: 10662 - DNA, 203 bp, synthetic construct
  source 1..203: mol_type = other DNA
ggcgcgccagtcctcattcaggaagttgggtaaggatagatcaatcaatgatcatattctagtacacttaggattcttcgaggccaccgaagggacaagagcaggattagggatatccgagatggccacacttttgaggagcttagcattgttcaaaagaaacaaggacaaaccacccattacatcagcgactcggaccgatg

SEQ ID NO: 10663 - DNA, 203 bp, synthetic construct
  source 1..203: mol_type = other DNA
ggcgcgccagtcctgtcctggcaagttgggtaagtccttcggcggacctgatcatattctagtacacttaggattcaagatcctattatcagggacaagagcaggattagggatatccgagatggccacacttttgaggagcttagcattgttcaaaagaaacaaggacaaaccacccattacatcagcgactcggaccgatg

SEQ ID NO: 10664 - DNA, 203 bp, synthetic construct
  source 1..203: mol_type = other DNA
ggcgcgccagtcctgccaagataataacggtatagcagcgctctcctaagctctcgcggctgcgcttcggtcccggacccgggccacccacggggtagtgggtgctcctcggccccggacattgcaagccccagaaggcaagactaactcggtgttgctcctcccggcgctgacttcgaggcccggctcgactcggaccgatg

SEQ ID NO: 10665 - DNA, 203 bp, synthetic construct
  source 1..203: mol_type = other DNA
ggcgcgccagtcctacccaagtaataattaggccgctcatgtgccgttctctcagcgaaggccgaaaagaggctagccatgcccttagtaggactagcataatgaggggggtagcaacagtggtgagttcgttggatggcttaagccctgagtacagggtagtcgtcagtggttcgacgccttggaatcgactcggaccgatg

SEQ ID NO: 10666 - DNA, 203 bp, synthetic construct
  source 1..203: mol_type = other DNA
ggcgcgccagtcctcctataataataattaggcctagggaacaaatccctctcagcgaaggcactgtgattctctcccatgcccttagtaggactagcataatgaggggggtagcaacagtggtgagttcgttggatggcttaagccctgagtacagggtagtcgtcagtggttcgacgccttggaatcgactcggaccgatg

SEQ ID NO: 10667 - DNA, 203 bp, synthetic construct
  source 1..203: mol_type = other DNA
ggcgcgccagtcctaggtccataataattaggcctagggaacaaatccctctcagcgaaggccgaaaagaggctagccatgcccttagtaggactagcataatgaggggggtagcaacagtggtgagttcgttggatggcttaagccctgagtacagggtagtcgtcagtggttatcatgagcaatgacgactcggaccgatg

SEQ ID NO: 10668 - DNA, 203 bp, synthetic construct
  source 1..203: mol_type = other DNA
ggcgcgccagtcctgcatcgataataattaggcctagggaacaaatccctctcagcgaaggccgaaaagaggctagccatgcccttagtaggactagcataatgaggggggtagcaacagtggtgagttcgttggatggcttaagccctgagtacagggtagtcgtcagtggttcgacgccttggaatcgactcggaccgatg

SEQ ID NO: 10669 - DNA, 203 bp, synthetic construct
  source 1..203: mol_type = other DNA
ggcgcgccagtcctagtagttcaatacaattttgagaggttaataaattacaagtagtgctatttttgtatttaggttagctatttagctttacgttccaggatgcctagtggcagccccacaatatccaggaagccctctctgcggtttttcagattaggtagtcgaaaaaccaccagttcgacttgcgactcggaccgatg

SEQ ID NO: 10670 - DNA, 203 bp, synthetic construct
  source 1..203: mol_type = other DNA
ggcgcgccagtcctttgacgcaaatactcctaaacaactgctaggaccacggaactcagaaacacagcaagcgatcatattggaaatatggcccaaagtgacttcctttacccagagaacccaaaaaggcgggaagaagtaaatcgtcttcaccagcagcttcttgattgcttatctgacagcttcgacgactcggaccgatg

SEQ ID NO: 10671 - DNA, 203 bp, synthetic construct
  source 1..203: mol_type = other DNA
ggcgcgccagtcctcgacacagaatactcctaaacaactgctaggaccacggaactcagaaacacagcaagcgatcatattggaaatatgttgtgggcccgtcgcctttacccagagaacccaaaaaggcgggaagaagtaaatcgtcttcaccagcagcttcttgattgcttatctgacagcttcgacgactcggaccgatg

SEQ ID NO: 10672 - DNA, 203 bp, synthetic construct
  source 1..203: mol_type = other DNA
ggcgcgccagtcctcaaagtcgaatagtatgttcgaatcccgggtttgtggggccgctggtaaacatccacacgggagacaccttctacttccccaacttccgcgcgtccggggcgcagcttcccgggctgccttcgctgtcctacccacgccgcgacaacgtgtgctccctgtcctggccgtcggcgcgactcggaccgatg

SEQ ID NO: 10673 - DNA, 203 bp, synthetic construct
  source 1..203: mol_type = other DNA
ggcgcgccagtcctagcgcgagaatataccctacgtgcctggagatgaccaccaaacggaaaatcatcggccgtctggtgccatgccgatgtttccgaggtgaagaagaaatcatctcagttttagattactcccactgcagtcttcagcaggtgccaaaggaggtctttaacttcgaacgaacattacgactcggaccgatg

SEQ ID NO: 10674 - DNA, 203 bp, synthetic construct
  source 1..203: mol_type = other DNA
ggcgcgccagtcctctttggcgaatatctgggagacctcgggctcttgatctccgagacaccccgtttcgtagtggagaacagtccagatcggggaagtttattttgcccaaagccggttagaggccccctggccctcgattcccacacttactagacttgctcccctgaacagcagctgcagcagcccgactcggaccgatg

SEQ ID NO: 10675 - DNA, 203 bp, synthetic construct
  source 1..203: mol_type = other DNA
ggcgcgccagtcctaagagacaaatatctgggagacctcgggctcttgatctccgagacaccccgtttcgtagtggtatcgtaaagtctccggggaagtttattttgcccaaagccggttagaggccccctggccctcgattcccagtgcggggctcagagctcccctgaacagcagctgcagcagcccgactcggaccgatg

SEQ ID NO: 10676 - DNA, 203 bp, synthetic construct
  source 1..203: mol_type = other DNA
ggcgcgccagtcctctcaacataatatctgggagacctcgggctcttggcggatacttttttccgtttcgtagtggagaacagtccagatcggggaagtttattttgcccaaagccggttagaggccccctggccctcgattcccagtgcggggctcagagctcccctgaacagcagctgcagcagcccgactcggaccgatg

SEQ ID NO: 10677 - DNA, 203 bp, synthetic construct
  source 1..203: mol_type = other DNA
ggcgcgccagtcctaaagcactaatatgttcattaccaacactgcagattcccattgagttggtgggggttttgttacctttgttttttttctcagcaaaataattctataactttttgtttgtgacaagaaatggactttcagtttacttaagattaattgaagggtggattaaaaatcattttgcccgactcggaccgatg

SEQ ID NO: 10678 - DNA, 203 bp, synthetic construct
  source 1..203: mol_type = other DNA
ggcgcgccagtcctgcacctcaaatattcacggcgttccgtctgtgtgttcgagtggacaaaatggcgaagatcgccaagactcacgaagatattgaagcacagattcgagaaattcaaggcaagaaggcagctcttgatgaagctcaaggagtgggcctcgattctacaggttattatgaccaggaacgactcggaccgatg

SEQ ID NO: 10679 - DNA, 203 bp, synthetic construct
  source 1..203: mol_type = other DNA
ggcgcgccagtcctaggaacggaatatttctattgcccggtcttcgcgcccggactcctggcgccagcgctaggcgcactcaccgctctgacgggtgcagacgcgggagttgtcccagactgtggagtggcgggcacggccccagccccccttcccttccctgaccccttcttgccatcgccccagaccgactcggaccgatg

SEQ ID NO: 10680 - DNA, 203 bp, synthetic construct
  source 1..203: mol_type = other DNA
ggcgcgccagtcctagtttggcaatcactattttgtactactaactcacccgtttttctccgggatccaagagatttactctaggatctcctattaagcttagcagtcattagttgagagttcaacttgcaaaactctaaccttcactctaataacaattcatccaatggataaattggaactagtcacgactcggaccgatg

SEQ ID NO: 10681 - DNA, 203 bp, synthetic construct
  source 1..203: mol_type = other DNA
ggcgcgccagtcctatcgggtcaatcactattttgtactactaactcattaagaaaaacttaggatccaagagatttactctaggatctcaggcatcatgggatagtcattagttgagagttcaacttgcaaaactctaaccttcactctaataacaattcatccaatggataaattggaactagtcacgactcggaccgatg

SEQ ID NO: 10682 - DNA, 203 bp, synthetic construct
  source 1..203: mol_type = other DNA
ggcgcgccagtcctgttgtaacaatcccaacctcggagcaggtggtcacaaaccagtgattggcctgtcgtaacgcgcaagtccgtggcggaaccgactactttgggtgtccgtgtttccttttattttattgtggctgcttatggtgacaatcacagattgttatcataaagccgtactagagacgacgactcggaccgatg

SEQ ID NO: 10683 - DNA, 203 bp, synthetic construct
  source 1..203: mol_type = other DNA
ggcgcgccagtcctcctgggtcaatcccaacctcggagcaggtggtcacaaaccagtgattggcctgtcgtaacgcgcaagtccgtggcggaaccgactactttgggtgtccgtgtttccttttattttatttgaaggaggcggcctgacaatcacagattgttatcataaagcgaattggattggcccgactcggaccgatg

SEQ ID NO: 10684 - DNA, 203 bp, synthetic construct
  source 1..203: mol_type = other DNA
ggcgcgccagtcctgggctcccaatcccaacctcggagcaggtggtcacaaaccagtgattggcctgtcgtaacgcttcgcattcgatttgaaccgactactttgggtgtccgtgtttccttttattttattgtggctgcttatggtgacaatcacagattgttatcataaagcgaattggattggcccgactcggaccgatg

SEQ ID NO: 10685 - DNA, 203 bp, synthetic construct
  source 1..203: mol_type = other DNA
ggcgcgccagtccttttagggtaatcccaacctcggagcaggtggtcaggtctgtagtccatgcctgtcgtaacgcgcaagtccgtggcggaaccgactactttgggtgtccgtgtttccttttattttattgtggctgcttatggtgacaatcacagattgttatcataaagcgaattggattggcccgactcggaccgatg

SEQ ID NO: 10686 - DNA, 203 bp, synthetic construct
  source 1..203: mol_type = other DNA
ggcgcgccagtcctaccagttaaatcccactcaaaatccaaaatcactaccagccactatctgctagacctagagtgcgaataggtaaataaaaccaaaatatgctcagccatacgtgtagttagagttcaatcaatctcaacaaccatttataccgccaattcaatacatatactataaatcttaaacgactcggaccgatg

SEQ ID NO: 10687 - DNA, 203 bp, synthetic construct
  source 1..203: mol_type = other DNA
ggcgcgccagtcctcgtgtcataatcccactcaaaatccaaaatcactaccagccactatctgctagacctagagtgcgaataggtaaatcgcggagtgccgatgggtaaatagacattagttagagttcaatcaatctcaacaaccatttataccgccaattcaatacatatactataaatcttaaacgactcggaccgatg

SEQ ID NO: 10688 - DNA, 203 bp, synthetic construct
  source 1..203: mol_type = other DNA
ggcgcgccagtcctcctaattcaatcccagtcctaacagaagtactgcgaatcttgtggcctcattctgaacaaaagggattagagaagaaaaatctcttgatataaggcttgaaagcaagggcaggcaatcaactggtcaccgtatttctgatttttccagaaatcaagcagaagattgagctgctgcgactcggaccgatg

SEQ ID NO: 10689 - DNA, 203 bp, synthetic construct
  source 1..203: mol_type = other DNA
ggcgcgccagtcctgaatatccaatcccagtcctaacagaagtactgcgaatcttgtggcctcattctgaacaaaagggattagagaagatttgatctacatgctaaggcttgaaagcaagggcaggcaatcttggttgtgaatattttctgatttttccagaaatcaagcagaagattgagctgctgcgactcggaccgatg

SEQ ID NO: 10690 - DNA, 203 bp, synthetic construct
  source 1..203: mol_type = other DNA
ggcgcgccagtcctcttcagataatcccagtcctaacagaagtactgcgaatcttgtggccttccaggtggttgttgggattagagaagaaaaatctcttgatataaggcttgaaagcaagggcaggcaatcttggttgtgaatattttctgatttttccagaaatcaagcagaagattgagctgctgcgactcggaccgatg

SEQ ID NO: 10691 - DNA, 203 bp, synthetic construct
  source 1..203: mol_type = other DNA
ggcgcgccagtcctaaccgacgaatccccgcgcgccggccggccccgggcacgcaggcagggcggcgcaggatccagggcgtctgggatgcagtggagctcagagagaggagaacggctcctcacgcctggggcctgctcttcagaagtccccagcgccgcataggaagttcacggacctcagcagcccgactcggaccgatg

SEQ ID NO: 10692 - DNA, 203 bp, synthetic construct
  source 1..203: mol_type = other DNA
ggcgcgccagtcctcgagatgcaatccccgcgcgccggccggccccgggcacgcaggcagggcggcgcaggatccagggcgtctgggatgcagtggagctcagagagaggagaacggctcctcacgcctggggcctgctcttcagaagtccccagcgccgttccttccagatcatcgagatgaggtgtcgactcggaccgatg

SEQ ID NO: 10693 - DNA, 203 bp, synthetic construct
  source 1..203: mol_type = other DNA
ggcgcgccagtccttccgacggaatcgcgatcagagagtgagcccggatggggcggcgggcttcgggagcgcccgggctgatccgagccgagcgggccgtatctccttgtcggcgccgctgattcccggctctgcggaggcctctaggcagccgcgcagcttccgtgtttgctgcgcccgcactgcgacgactcggaccgatg

SEQ ID NO: 10694 - DNA, 203 bp, synthetic construct
  source 1..203: mol_type = other DNA
ggcgcgccagtcctgtctgagtaatctctagcagtggcgcccgaacagggacctgaaagcgaaagggaaaccagaggagctctctcgacgtgctgagacaacccctgaagcgcgcacggcaagaggcgaggggcggcgactggtgagtacgccaaaaattttgactagcggaggctagaaggagagagcgactcggaccgatg

SEQ ID NO: 10695 - DNA, 203 bp, synthetic construct
  source 1..203: mol_type = other DNA
ggcgcgccagtcctgtctgcccaatggaagaaagcagggcataagatcacttacaggacatcagcgacagcgagaggaagaccagctcggccgagtcctcgtcagcagaatcaggctcaggttctgaggaagaagaggaggaggaggaagaggaggaggaggaagggagcaccagtgaagaatcagagcgactcggaccgatg

SEQ ID NO: 10696 - DNA, 203 bp, synthetic construct
  source 1..203: mol_type = other DNA
ggcgcgccagtccttattaagtaatggaagaaagggacctgctgtccgacttacaggacatcagcgacagcgagaggaagaccagctcggccgagtcctcgtcagcagaatcaggctcaggttctgaggaagaagaggaggaggaggaagaggaggaggaattccatcaatggggtgaagaatcagagcgactcggaccgatg

SEQ ID NO: 10697 - DNA, 203 bp, synthetic construct
  source 1..203: mol_type = other DNA
ggcgcgccagtcctctgaagtcaatggaagaaagggacctgctgtccgacttacaggacatcagcgacagcgagaggaagaccagctcggggccagggaatgtcgcagaatcaggctcaggttctgaggaagaagaggaggaggaggaagaggaggaggaggaagggagcaccagtgaagaatcagagcgactcggaccgatg

SEQ ID NO: 10698 - DNA, 203 bp, synthetic construct
  source 1..203: mol_type = other DNA
ggcgcgccagtcctaacattggaatggcataggtgcccgcgtgcgccatcccctcagctagcaggtgtgagcggctttctgcccgcagtctctacacagctcagcatcctgacgcctcctccccttgcaggggcgtgaagctacttcagactctgctgtgacgacttggccgccaggcaccgatcctccgactcggaccgatg

SEQ ID NO: 10699 - DNA, 203 bp, synthetic construct
  source 1..203: mol_type = other DNA
ggcgcgccagtcctgaaagctgaatggcttcgctcatttatagacaattgctcacgaattcttatacagtagatttatccgatgagatacaagagattggatcaactaaatcacaaaatgtcacaattaatctctacagccaaaaccaaacaggttatgctccagttaactggggacctggagaaattcgactcggaccgatg

SEQ ID NO: 10700 - DNA, 203 bp, synthetic construct
  source 1..203: mol_type = other DNA
ggcgcgccagtccttagtaatgaatggcttcgctcatttatagacaattgctcacgaattcttatacagtagatttatccgatgagatacgctgtggcaatcgcactaaatcacaaaatgtcacaattaatcctggaccatttgcgcaaacaggttatgctccagttaactggggacctggagaaattcgactcggaccgatg

SEQ ID NO: 10701 - DNA, 203 bp, synthetic construct
  source 1..203: mol_type = other DNA
ggcgcgccagtcctggagccgcaatgtgatcttgcttgtaaatacaattttgagaggttaataaattacaagtagtgctatttttgtatttaggttagctatttagctttacgttccaggatgcctagtggcagccccacaatatccaggaagccctctcgcgtaggccatgtgttaggtagtcgaaacgactcggaccgatg

SEQ ID NO: 10702 - DNA, 203 bp, synthetic construct
  source 1..203: mol_type = other DNA
ggcgcgccagtcctcgcgactgaatgtgatcttgcttgtaaatacaattttgagaggttaataaattacaagtagtgctatttttgtatttaggttagctatttagctttacgttccaggatgcctagtggcagccccacaatatccaggaagccctctctgcggtttttcagacggctagcagatcgcgactcggaccgatg

SEQ ID NO: 10703 - DNA, 203 bp, synthetic construct
  source 1..203: mol_type = other DNA
ggcgcgccagtcctcggtcgagaatgtgatcttgcttgtaaatacaattttgagaggttaatccggcgttgtctaagctatttttgtatttaggttagctatttagctttacgttccaggatgcctagtggcagccccacaatatccaggaagccctctctgcggtttttcagattaggtagtcgaaacgactcggaccgatg

SEQ ID NO: 10704 - DNA, 203 bp, synthetic construct
  source 1..203: mol_type = other DNA
ggcgcgccagtcctagtcatctaatgttgtacccctaagagtcataaactctggaattactcagtttcaaaagggaaaggagtttgagtttgtagaaggacaaggtgtgcctattgcaccaggagtcccagctactgaagctaaggggtactggtacagacacaacagacgttcttttaaaacagccgcgactcggaccgatg

SEQ ID NO: 10705 - DNA, 203 bp, synthetic construct
  source 1..203: mol_type = other DNA
ggcgcgccagtcctattccttcaatgttgtaccctactattcttggttctctggaattactcagtttcaaaagggaaaggagtttgagtttgtagaaggacaaggtgtgcctattgcaccaggagtcccagccgaccggttcctctggtactggtacagacacaacagacgttcttttaaaacagccgcgactcggaccgatg

SEQ ID NO: 10706 - DNA, 203 bp, synthetic construct
  source 1..203: mol_type = other DNA
ggcgcgccagtcctatgcatttaatgttgtaccctactattcttggttctctggaattactcagtttcaaaagggagtatttaacttagatgtagaaggacaaggtgtgcctattgcaccaggagtcccagctactgaagctaaggggtactggtacagacacaacagacgttcttttaaaacagccgcgactcggaccgatg

SEQ ID NO: 10707 - DNA, 203 bp, synthetic construct
  source 1..203: mol_type = other DNA
ggcgcgccagtccttccgtaataattatagaaagttctgaacctaggggtctttctgtctctgctgtgtggtgggaatcacacggtctccactaatcacatacgaatctgtaaaagaacggtgctgccgcttttgctttaattcaaatgaagaatatgaagtgcactttgaaagtcgaggaaacaactcgactcggaccgatg

SEQ ID NO: 10708 - DNA, 203 bp, synthetic construct
  source 1..203: mol_type = other DNA
ggcgcgccagtcctattagcggaattccagacctctctgtgcttagggcaaacatcatttggccttaaatgggattctgtgagaggggatccctccattgacagctggactgttctttggggccttatgtggtgtttgcctctgaggtactcaggggcataccctcagagtactattcttaaataatacgactcggaccgatg

SEQ ID NO: 10709 - DNA, 203 bp, synthetic construct
  source 1..203: mol_type = other DNA
ggcgcgccagtcctcgcctactaattccagacctctctgtgcttagggcaaacatcatttggccttaaatgggattctgtgagaggggatccctccattgacagctggactgttctttggggccttatgtggtgtttgcctctgagtagacggctacgtgttaggtttttcctcattcttaaataatacgactcggaccgatg

SEQ ID NO: 10710 - DNA, 203 bp, synthetic construct
  source 1..203: mol_type = other DNA
ggcgcgccagtcctccggcactaattccagacctctctgtgcttagggtcgggccagggaccccttaaatgggattctgtgagaggggatccctccattgacagctggactgttctttggggccttatgtggtgtttgcctctgaggtactcaggggcatttaggtttttcctcattcttaaataatacgactcggaccgatg

SEQ ID NO: 10711 - DNA, 203 bp, synthetic construct
  source 1..203: mol_type = other DNA
ggcgcgccagtcctgcaccagtaattcttgagaggttcttggagagattctgggagccaaacactccattgggatcctagctggaatataaagaatggcttatcagtggagaccatcgacagttgagaaaagaagaagcccaaaaagtacaagaatgaaagctaccttcacgccgagaacaacttgtacgactcggaccgatg

SEQ ID NO: 10712 - DNA, 203 bp, synthetic construct
  source 1..203: mol_type = other DNA
ggcgcgccagtcctcctacgcaaattgcaattgagacttgactcccctttgtacctccagagacctcctagagccagaacccggctggcttgctgtttcctttagagcagcgcatatcattatttggtgttctggtggaggacttttctgatggcagaaattagtttctctgggttcatcaggacgggcgactcggaccgatg

SEQ ID NO: 10713 - DNA, 203 bp, synthetic construct
  source 1..203: mol_type = other DNA
ggcgcgccagtcctctgaggctaattgcaattgatcaggtttatattattgtacctccagagacctcctagagccacgtggtacgaacgatgctgtttcctttagagcagcgcatatcattatttggtgttctggtggaggacttttctgatggcagaaattagtttctctgggttcatcaggacgggcgactcggaccgatg

SEQ ID NO: 10714 - DNA, 203 bp, synthetic construct
  source 1..203: mol_type = other DNA
ggcgcgccagtcctccctcaagaattgcaattgatcaggtttatattattgtacctccagagacctcctagagccagaacccggctggcttgctgtttcctttagagcagcgcatatcattatttggtgttctggtggaggacttttctgatggcagaaaccgtggagcaatatttcatcaggacgggcgactcggaccgatg

SEQ ID NO: 10715 - DNA, 203 bp, synthetic construct
  source 1..203: mol_type = other DNA
ggcgcgccagtcctcggcagcgaatttaacaggatacttggacaatagaagccagatcaaaagtaagaaaaacttaactgcggattggcgtcacagatcagctcaaccagacaccaccagcatacacgaaaccaaccttcacagtggatacctcagcatccaaaactctccttcccgaatggatcaggcgactcggaccgatg

SEQ ID NO: 10716 - DNA, 203 bp, synthetic construct
  source 1..203: mol_type = other DNA
ggcgcgccagtcctagtggccaaatttaacaggatacttggacaatagtctttcttagtttggtaagaaaaacttagggtgaatgacaattcacagatcagctcaaccagacaccaccagcatacacgaaaccaaccttcacagtggatacctcagcatccaaaactctccttcccgaatggatcaggcgactcggaccgatg

SEQ ID NO: 10717 - DNA, 203 bp, synthetic construct
  source 1..203: mol_type = other DNA
ggcgcgccagtccttcgtatgtaatttgttctcctgcagccactgacttggggactgctggtggggtagggatgagggagggaggggcattgtgatgtacagggctgctctgtgagatcaagggtctcttaagggtgggagctggggcagggactacgagagcagccagatgggctgaaagtggaactcgactcggaccgatg

SEQ ID NO: 10718 - DNA, 203 bp, synthetic construct
  source 1..203: mol_type = other DNA
ggcgcgccagtccttcataaataattttgccttaaacagaaagacttgaccctcttaggtgtcatacctaagatcagtgtgttttttgtgatatcaaagcagtacaccaaaaaagagaagaaatattgcagtgaatgaagattcctctgcattttagcactgctttttcaactgtagttggcttttgacgactcggaccgatg

SEQ ID NO: 10719 - DNA, 203 bp, synthetic construct
  source 1..203: mol_type = other DNA
ggcgcgccagtccttgtcaagcaattttgccttaaacagaaagacttgaccctcttaggtgtcatacctaagatcagtgtgttttttgtgtccaattcttttatagtgtgttcccgcgagaaatattgcagtgaatgaagattcctctgcattttagcactgctttttcaactgtagttggcttttgacgactcggaccgatg

SEQ ID NO: 10720 - DNA, 203 bp, synthetic construct
  source 1..203: mol_type = other DNA
ggcgcgccagtcctactaacataattttgccttaaacagaaagacttgaccctcttaggtgtcatacctaagatcagtgtgttttttgtgtccaattcttttatcaccaaaaaagagaagaaatattgcagtgaatgaagattcctctgcattttagcactgctttttcaactgggacaatacccgagcgactcggaccgatg

SEQ ID NO: 10721 - DNA, 203 bp, synthetic construct
  source 1..203: mol_type = other DNA
ggcgcgccagtccttgcgtcgtaattttgccttaaacagaaagacttgaccctcttaggtgtcatacctaagatcagtgtgttttttgtgtccaattcttttatcaccaaaaaagagagatcgctggaagacgaatgaagattcctctgcattttagcactgctttttcaactgtagttggcttttgacgactcggaccgatg

SEQ ID NO: 10722 - DNA, 203 bp, synthetic construct
  source 1..203: mol_type = other DNA
ggcgcgccagtcctgatttctaaattttgccttaaacagaaagacttgcatagggcgttgtccatacctaagatcagtgtgttttttgtgtccaattcttttatcaccaaaaaagagaagaaatattgcagtgaatgaagattcctctgcattttagcactgctttttcaactgtagttggcttttgacgactcggaccgatg

SEQ ID NO: 10723 - DNA, 203 bp, synthetic construct
  source 1..203: mol_type = other DNA
ggcgcgccagtcctatctcaatacaaaatcaaaccagcatctcagacttcctgctcctgggcctgcccatccaaccagagcagcaaaaccgcccaatatatagtttcttggccatgtatcttaccaccctcctggggaacctcctcatcattgtcctcattcgactggactcccatctccacacgcctcgactcggaccgatg

SEQ ID NO: 10724 - DNA, 203 bp, synthetic construct
  source 1..203: mol_type = other DNA
ggcgcgccagtcctactgtaagacaaaatcaaaccagcatctcagacttcctgctcctgggcctgcccatccaaccagagcagcaaaacctgtgctatgccctgttcttggccatgtatcttaccaccctcctggggaacctcctcatcattgtcctcatctagtacacagattatctccacacgcctcgactcggaccgatg

SEQ ID NO: 10725 - DNA, 203 bp, synthetic construct
  source 1..203: mol_type = other DNA
ggcgcgccagtcctaatttaccacaaaatcaaaccagcatctcagacttcctgctcctgggcctgcccatccaaccagagcagcaaaacctgtgctatgccctgttcttggccatgtatcttaccaccctcctggggaacctcctcatcattgtcctcattcgactggactcccatctccacacgcctcgactcggaccgatg

SEQ ID NO: 10726 - DNA, 203 bp, synthetic construct
  source 1..203: mol_type = other DNA
ggcgcgccagtccttcgggcttacaaaatcaaaccagcatctcagacttcctgctcctgggctaatgggcgacggaagagcagcaaaacctgtgctatgccctgttcttggccatgtatcttaccaccctcctggggaacctcctcatcattgtcctcattcgactggactcccatctccacacgcctcgactcggaccgatg

SEQ ID NO: 10727 - DNA, 203 bp, synthetic construct
  source 1..203: mol_type = other DNA
ggcgcgccagtccttacccggaacaaaccagtgggtggtgtgtcgtaacgggcaactctgcagcggaaccgactactttgggtgtccgtgtttccttttattcctatattggctgcttcgaaaactttcatgaaagttgttaccatatagctattggattggccatccggtgtgcaacagggcaattgcgactcggaccgatg

SEQ ID NO: 10728 - DNA, 203 bp, synthetic construct
  source 1..203: mol_type = other DNA
ggcgcgccagtccttcggtaggacacaaggaggaatggtgacaatcaaaaagttgttaccatatagctattggattggccatccggtgtgcaacagggcaattgtttacctatttattggttttgtaccattatcactgaagtctgtgatcactctcaaattcattttgaccctcaacacaatcaaaccgactcggaccgatg

SEQ ID NO: 10729 - DNA, 203 bp, synthetic construct
  source 1..203: mol_type = other DNA
ggcgcgccagtccttcggcccaacaccaaaacgcatccacctaactggctgacgctacaccttggtctttccgggtatgccgcacacggcctccaactcctgcagagctgagccggaggggaatccggaagggacacgctgaacaggaacagaaatgaataaaagtcgctggcagagtagaagacgaccgactcggaccgatg

SEQ ID NO: 10730 - DNA, 203 bp, synthetic construct
  source 1..203: mol_type = other DNA
ggcgcgccagtcctgacagggtacaccaaaacgcatccacctaactggctgacgctacaccttggtctttccgggtccttgcacgcttcgctccaactcctgcagagctgagccggaggggaatccggaaggccggacaactgattgaacagaaatgaataaaagtcgctggcagagtagaagacgaccgactcggaccgatg

SEQ ID NO: 10731 - DNA, 203 bp, synthetic construct
  source 1..203: mol_type = other DNA
ggcgcgccagtcctgaattaatacaccaaaacgcatccacctaactggctgacgctacaccttggtctttccgggtccttgcacgcttcgctccaactcctgcagagctgagccggaggggaatccggaagggacacgctgaacaggaacagaaatgaataaaagtcgctggcatctgtctgtcttcgcgactcggaccgatg

SEQ ID NO: 10732 - DNA, 203 bp, synthetic construct
  source 1..203: mol_type = other DNA
ggcgcgccagtcctgcgggatcacaccaaaacgcatccacctaactggctgacgctacaccttggtctttccgggtccttgcacgcttcgctccaactcctgcagagctgagccggaggggaatccggaagggacacgctgaacagtttgttctcctgcaaaaagtcgctggcagagtagaagacgaccgactcggaccgatg

SEQ ID NO: 10733 - DNA, 203 bp, synthetic construct
  source 1..203: mol_type = other DNA
ggcgcgccagtcctcaaatcggacagagcagaggaccagcagatgaatcttgcaacctccatagaggagcagcaggaccagagatcacccctgacctgctacctcggccgccccggttgcttctattggtcaatccctttgggggtcggggcctggcctggcagtggtgtaagaaccacgtgcttccccgactcggaccgatg

SEQ ID NO: 10734 - DNA, 203 bp, synthetic construct
  source 1..203: mol_type = other DNA
ggcgcgccagtcctaacgttcaacagagcagaggaccagcagatgaatggacaccttgaagcagaggagcagcaggaccagagatcacccctgacctgctacctcggccgccccggttgcttctattggtcaatccctttgggggtcggggcctggcctggcagtggtgtaagaaccacgtgcttccccgactcggaccgatg

SEQ ID NO: 10735 - DNA, 203 bp, synthetic construct
  source 1..203: mol_type = other DNA
ggcgcgccagtcctcagacgtgacagagcagaggaccagcagatgaatggacaccttgaagcagaggagcagcaggaccagagatcacccctgacctgctacctcggccgccccggttgcttctattggtcaatccctttgggggtcggggcctggcctggcagtggtgtaagacattgccatgagagcgactcggaccgatg

SEQ ID NO: 10736 - DNA, 203 bp, synthetic construct
  source 1..203: mol_type = other DNA
ggcgcgccagtcctataccggcacagagcagaggaccagcagatgaatggacaccttgaagcagaggagcagcaggaccagagatcacccctgacctgctacctcggccgccccggttgcttctattggtcagcgttgcatccttacggggcctggcctggcagtggtgtaagaaccacgtgcttccccgactcggaccgatg

SEQ ID NO: 10737 - DNA, 203 bp, synthetic construct
  source 1..203: mol_type = other DNA
ggcgcgccagtcctagtaaggtacagagcagaggaccagcagatgaatggacaccttgaagcagaggagcagcaggaccagagatcacccctgacctgctaccttctggaggagcagagcttctattggtcaatccctttgggggtcggggcctggcctggcagtggtgtaagaaccacgtgcttccccgactcggaccgatg

SEQ ID NO: 10738 - DNA, 203 bp, synthetic construct
  source 1..203: mol_type = other DNA
ggcgcgccagtcctgagacgaaacagagcagagggatcttcccaccgcggacaccttgaagcagaggagcagcaggaccagagatcacccctgacctgctacctcggccgccccggttgcttctattggtcaatccctttgggggtcggggcctggcctggcagtggtgtaagaaccacgtgcttccccgactcggaccgatg

SEQ ID NO: 10739 - DNA, 203 bp, synthetic construct
  source 1..203: mol_type = other DNA
ggcgcgccagtcctagggagtcacagcggccctagaagggggatcttgggtgaaggtcagggcttgggcgctagctctccgaggcctgttctgaatcggtctccagaaatgctttgggagacgtcactgcgtctgcaaggaacttccatgcctctaacactcatcttcaaaagactgggactgctgagcgactcggaccgatg

SEQ ID NO: 10740 - DNA, 203 bp, synthetic construct
  source 1..203: mol_type = other DNA
ggcgcgccagtcctgttggcatacagcggccctagaagggggatcttgggtgaaggtcagggcttgggcgctagctctccgaggcctgttctgaatcggtctccagaaatgctttgggttcatctttcattgctgcaaggaacttccatgcctctaacacatcgggcttgtcctctgggactgctgagcgactcggaccgatg

SEQ ID NO: 10741 - DNA, 203 bp, synthetic construct
  source 1..203: mol_type = other DNA
ggcgcgccagtccttccgcgaaacagcggccctagaagggggatcttgggtgaaggtcagggcttgggcgctagctctccgaggcctgttctgaatcggtctccgccctcaaggcaatttcatctttcattgctgcaaggaacttccatgcctctaacactcatcttcaaaagactgggactgctgagcgactcggaccgatg

SEQ ID NO: 10742 - DNA, 203 bp, synthetic construct
  source 1..203: mol_type = other DNA
ggcgcgccagtccttcgttataacagtaaccttggtcgcacccccctgcaaccctcacctctttacaaaaccacatcaacatctcaccatgcaagccatcatccatattataaagtagttaattaaaaataatcataacaatgaactaagatattaagactaacaataacgttggggcaaatgcaaaccgactcggaccgatg

SEQ ID NO: 10743 - DNA, 203 bp, synthetic construct
  source 1..203: mol_type = other DNA
ggcgcgccagtccttatcggatacagtgcttggacggaacccggcgctaaacgtagtatagtgccggccgcccatagccagccctccgtcacctcttcaccgcaccctcggactgccccaaggcccccgccgccgctccagcgccgcgcagccaccgccgccgccgccgcctctccttagtcgccgcccgactcggaccgatg

SEQ ID NO: 10744 - DNA, 203 bp, synthetic construct
  source 1..203: mol_type = other DNA
ggcgcgccagtcctagtgctgcacagtgcttggacggaacccggcgctcgttccccaccccggccggccgcccatagccagccctccgtcacctcttcaccgcaatacatcctgtggacaaggcccccgccgccgctccagcgccgcgcagccaccgccgccgccgccgcctctccttagtcgccgcccgactcggaccgatg

SEQ ID NO: 10745 - DNA, 203 bp, synthetic construct
  source 1..203: mol_type = other DNA
ggcgcgccagtcctgaaaccctacagtgcttggacggaacccggcgctcgttccccaccccggccggccgcccatatgataattagaagaacctcttcaccgcaccctcggactgccccaaggcccccgccgccgctccagcgccgcgcagccaccgccgccgccgccgcctctccttagtcgccgcccgactcggaccgatg

SEQ ID NO: 10746 - DNA, 203 bp, synthetic construct
  source 1..203: mol_type = other DNA
ggcgcgccagtcctggtgctcaacatagatgttccttaaaagctaaatctttttgaacagatgatgataaacctggaagagattcaccaaatgccatttgacggacactggcttggaaagtactcccatgttccgtttgatcttggcaatttaatgctgttcttgaagactaattagttacactggatcgactcggaccgatg

SEQ ID NO: 10747 - DNA, 203 bp, synthetic construct
  source 1..203: mol_type = other DNA
ggcgcgccagtcctgacgcgtaacatagatgttccttaaaagctaaatctttttgaacagatgatgataaacctggaagagattcaccaacaatagcaaattacacactggcttggaaagtactcccatgttccgtttgatcttggcaatttaatgctgtcaaacgtagaactatagttacactggatcgactcggaccgatg

SEQ ID NO: 10748 - DNA, 203 bp, synthetic construct
  source 1..203: mol_type = other DNA
ggcgcgccagtcctggcagtaaacatagatgttccttaaaagctaaattggacgccgtctgggatgataaacctggaagagattcaccaacaatagcaaattacacactggcttggaaagtactcccatgttccgtttgatcttggcaatttaatgctgttcttgaagactaattagttacactggatcgactcggaccgatg

SEQ ID NO: 10749 - DNA, 203 bp, synthetic construct
  source 1..203: mol_type = other DNA
ggcgcgccagtcctctactagaacatcataagaacgttcagaggctcatttgataaatagaagatttatttgggcttggtggtaagtgtgattttatgttttctttgattttcttgtagacttgttcctgacgctgctacaggagcagaagactaacaagcttcatttatttttccaggtaagcaaaccgactcggaccgatg

SEQ ID NO: 10750 - DNA, 203 bp, synthetic construct
  source 1..203: mol_type = other DNA
ggcgcgccagtcctcgtagcctacatcatttcgctttgccatctcctctaccaaagactcaaaatgtatggccctggtagtcagctgggaaagtctggcaataacagctgggctaaggaacgtggatgctcaattgcctgccaagggtctcttacttcagcccggctacatgcccccagcattggagacgactcggaccgatg

SEQ ID NO: 10751 - DNA, 203 bp, synthetic construct
  source 1..203: mol_type = other DNA
ggcgcgccagtcctagatcaccacatgttttatgtcagaaggcaaagatgtcggagcgaaaagtattaaacaaatactacccgccggactttgacccatcaaagatccccaaactcaagctccccaaagaccggcagtacgtggtgcggctgatggcccccttcaacatgaggtgtaagacgtgcggacgactcggaccgatg

SEQ ID NO: 10752 - DNA, 203 bp, synthetic construct
  source 1..203: mol_type = other DNA
ggcgcgccagtcctagtgggacacattgcgaaaacacgcgcccagcaccctgcctccggcgatgccgccccagcccctctgatggccctcctctctgctgccactcattccagaacaggaggcatgagcccggaacgcgcttgcttttaggagacagccactttctgtgtggtacgctggattcaaggcgactcggaccgatg

SEQ ID NO: 10753 - DNA, 203 bp, synthetic construct
  source 1..203: mol_type = other DNA
ggcgcgccagtcctcgatgcgcaccaattgaacgatggtgacaatcatagattgttatcataaagcgagttggattggccatccagtgtgaatcagattaattactcccttgtttgttggatccactcccgaaacgttttactccttaacttattgaaattgtttgaagacaggatttcagtgtcacacgactcggaccgatg

SEQ ID NO: 10754 - DNA, 203 bp, synthetic construct
  source 1..203: mol_type = other DNA
ggcgcgccagtcctactatgacaccaggggcgccaggattcaacactccaggccgcggatgaagaagaaaacccggcgccgctcgacccggagcgaggagttgacccggagcgaggagttgaccctgagtgaggaagcgacctggagtgaagaggcgacccagagtgaggaggcgacccagggcgaagcgactcggaccgatg

SEQ ID NO: 10755 - DNA, 203 bp, synthetic construct
  source 1..203: mol_type = other DNA
ggcgcgccagtccttggtacgcaccaggggcgccgccgccggcgctcgcaggccgcggatgaagaagaaaacccggcgccgctcgacccggagcgaggagttgacccggagcgaggagttgaccctgagtgaggaagcgacctggacaagctgaatagatcagagtgaggaggcgacccagggcgaagcgactcggaccgatg

SEQ ID NO: 10756 - DNA, 203 bp, synthetic construct
  source 1..203: mol_type = other DNA
ggcgcgccagtcctgggctgataccaggtgtggaaagtccccaggctccccagcaggcagaagtatgcaaagcatgcatctcaattagtcccactaatctactacgcccctaactccgcccatcccgcccctaactccgcccagttccgcccattctccgccccatggctgactaattttttttatttcgactcggaccgatg

SEQ ID NO: 10757 - DNA, 203 bp, synthetic construct
  source 1..203: mol_type = other DNA
ggcgcgccagtcctagttaagaaccaggtgtggaaagtccccaggctccccagcaggcagaagtatgcaaagcatggggaagggccttgaagcaaccatagtcccgcccctaactccgcccatcccgcccctaactccgcccagttccgcccattctccgccccatggctgactaattttttttatttcgactcggaccgatg

SEQ ID NO: 10758 - DNA, 203 bp, synthetic construct
  source 1..203: mol_type = other DNA
ggcgcgccagtcctagaccctgaccaggtgtggaaagtccccaggctcgatctatccacccggtatgcaaagcatgcatctcaattagtcagcaaccatagtcccgcccctaactccgcccatcccgcccctaactccgcccagttccgcccattctccgccccatggctgactaattttttttatttcgactcggaccgatg

SEQ ID NO: 10759 - DNA, 203 bp, synthetic construct
  source 1..203: mol_type = other DNA
ggcgcgccagtcctgggtttgcacccagccccgatcctaaggggtcggggcttttgctcactcagcacaggatctgatcaggagacctcccccccctgctttacagggggcgggggttctcttgcgataacgggcctggcaaataacctaggggactaggttttcctttttattttaaagttgtcaatcgactcggaccgatg

SEQ ID NO: 10760 - DNA, 203 bp, synthetic construct
  source 1..203: mol_type = other DNA
ggcgcgccagtcctttgcgtgtacccagccccgatcctaaggggtcggggcttttgctcactcagcacaggatctgatcaggagacctcccccccctgctttacagggggcgggggtttaaaaattgcccaaggcctggcaaataacctaggggactaggttttcctttttattggccgaaataattacgactcggaccgatg

SEQ ID NO: 10761 - DNA, 203 bp, synthetic construct
  source 1..203: mol_type = other DNA
ggcgcgccagtcctaggatagaacccagccccgatcctaaggggtcggggcttttgctcactcagcacaggatctgatcaggagacctcccccccctgctttacagggggcgggggtttaaaaattgcccaaggcctggcaaataacctaggggactaggttttcctttttattttaaagttgtcaatcgactcggaccgatg

SEQ ID NO: 10762 - DNA, 203 bp, synthetic construct
  source 1..203: mol_type = other DNA
ggcgcgccagtcctccttcctaacccagccccgatcctaaggggtcggggcttttgctcactcagcacaggatctggatcatcacgtggtcccccctgctttacagggggcgggggtttaaaaattgcccaaggcctggcaaataacctaggggactaggttttcctttttattttaaagttgtcaatcgactcggaccgatg

SEQ ID NO: 10763 - DNA, 203 bp, synthetic construct
  source 1..203: mol_type = other DNA
ggcgcgccagtcctatatgaacacccagccccgatcctaaggggtcggggcttttgctcactggtggggctcctaaatcaggagacctcccccccctgctttacagggggcgggggtttaaaaattgcccaaggcctggcaaataacctaggggactaggttttcctttttattttaaagttgtcaatcgactcggaccgatg

SEQ ID NO: 10764 - DNA, 203 bp, synthetic construct
  source 1..203: mol_type = other DNA
ggcgcgccagtccttgaatacgaccccgagaaaccgaaaccgcagggcctagggcgggtggaacgagagggaactacatttcccagcaggctgcggaaacgggactgcggccactacttccggcgtgtaccgagagactggcgtccggcgtgtaccgagagactggcgtccggtgtgcaggtggccaccgactcggaccgatg

SEQ ID NO: 10765 - DNA, 203 bp, synthetic construct
  source 1..203: mol_type = other DNA
ggcgcgccagtcctgcgatgcaaccccgagaaaccgaaaccgcagggcctagggcgggtggaacgagagggaactacatttcccagcaggctgcggaaacgggactgcggccactacttgtttaaatcaccgagagactggcgtccggcgtgtaccgagagactggcgtccggtgtgcaggtggccaccgactcggaccgatg

SEQ ID NO: 10766 - DNA, 203 bp, synthetic construct
  source 1..203: mol_type = other DNA
ggcgcgccagtcctaaccgtaaaccccgagaaaccgaaaccgcagggcctagggcgggtggaacgagagggaactacatttcccagcaggctgcggaaacgggatacgttggctctagtccggcgtgtaccgagagactggcgtccggcgtgtaccgagagactggcgtccggtgtgcaggtggccaccgactcggaccgatg

SEQ ID NO: 10767 - DNA, 203 bp, synthetic construct
  source 1..203: mol_type = other DNA
ggcgcgccagtcctcgtcttgcaccccgagaaaccgaaaccgcagggcctagggcgggtggaacgagagggaactacatttcccagcaggtgcttctctattacctgcggccactacttccggcgtgtaccgagagactggcgtccggcgtgtaccgagagactggcgtccggtgtgcaggtggccaccgactcggaccgatg

SEQ ID NO: 10768 - DNA, 203 bp, synthetic construct
  source 1..203: mol_type = other DNA
ggcgcgccagtcctaggccaagaccccgagaaaccgaaaccgcagggcctagggcgggtggacgagccccactaagcatttcccagcaggctgcggaaacgggactgcggccactacttccggcgtgtaccgagagactggcgtccggcgtgtaccgagagactggcgtccggtgtgcaggtggccaccgactcggaccgatg

SEQ ID NO: 10769 - DNA, 203 bp, synthetic construct
  source 1..203: mol_type = other DNA
ggcgcgccagtcctataaatccaccccgagaaaccgaaaccgcagggcgcgttttaccgaacacgagagggaactacatttcccagcaggctgcggaaacgggactgcggccactacttccggcgtgtaccgagagactggcgtccggcgtgtaccgagagactggcgtccggtgtgcaggtggccaccgactcggaccgatg

SEQ ID NO: 10770 - DNA, 203 bp, synthetic construct
  source 1..203: mol_type = other DNA
ggcgcgccagtcctgcgttctgaccccggctactcctgctcagcatggctgctttagggactgttctcttcacaggtgtccggaggctgcactgcagcgtagccatcctacttccaccccagtggcgactacagcagggactggctgccaacccctccggctacgggccccttaccgagctcccagaccgactcggaccgatg

SEQ ID NO: 10771 - DNA, 203 bp, synthetic construct
  source 1..203: mol_type = other DNA
ggcgcgccagtcctggtagattaccccggctactcctgctcagcatggtcctacaccttcaggttctcttcacaggtgtccggaggctgcactgcagcgtagccgcttgggcgggcggccagtggcgactacagcagggactggctgccaacccctccggctacgggccccttaccgagctcccagaccgactcggaccgatg

SEQ ID NO: 10772 - DNA, 203 bp, synthetic construct
  source 1..203: mol_type = other DNA
ggcgcgccagtcctcggccgttaccccggctacttgccgcggttcgaactgctttagggactgttctcttcacaggtgtccggaggctgcactgcagcgtagccgcttgggcgggcggccagtggcgactacagcagggactggctgccaacccctccggctacgggccccttaccgagctcccagaccgactcggaccgatg

SEQ ID NO: 10773 - DNA, 203 bp, synthetic construct
  source 1..203: mol_type = other DNA
ggcgcgccagtcctttcgctttacccctgaatggcaatctcaagcgcctctgtagggaagccaagaatgtccaggaggtaccccttcctctcggaagggatctgacctggagacacatacggtccctcaatgacctgtgcttgtgtttaaaaattgttacagcttccccgaaccaagtggtcttggttcgactcggaccgatg

SEQ ID NO: 10774 - DNA, 203 bp, synthetic construct
  source 1..203: mol_type = other DNA
ggcgcgccagtcctgagcgcacacccctgaatggcaatctcaagcgcctctgtagggaagccaagaatgtccaggaggtaccccttcctctcggaagggatctgacctggagacacatcacacgtgctttacacctgtgcttgtgtcgggtgtcaccacgagcttccccgaaccaagtggtcttggttcgactcggaccgatg

SEQ ID NO: 10775 - DNA, 203 bp, synthetic construct
  source 1..203: mol_type = other DNA
ggcgcgccagtcctgagaccggaccctgatggtttcctcacttgtgtccccaatggggctagctcgggtccacaacagctgccgatcaatccatctgaccagaatgtttcatgggtgtccagattttatcaattaaagcctgtgggaactgccagctcggcaagaggtaggcttggtctgcgccgatacgactcggaccgatg

SEQ ID NO: 10776 - DNA, 203 bp, synthetic construct
  source 1..203: mol_type = other DNA
ggcgcgccagtcctccgcgagcaccctgcactccgtcgccggaagtgccaccgagaagcgccggcctcggggctgtctacagcggcccgggagaggctgtggtggccccgagcgcgaggtgagctcaccagcgacagcggccaggcccgcccctcccctcgtgatggtcattgtcctccagagcagtgcgactcggaccgatg

SEQ ID NO: 10777 - DNA, 203 bp, synthetic construct
  source 1..203: mol_type = other DNA
ggcgcgccagtcctgctattggaccctgcactccgtcgccggaagtgccaccgagaagcgccggcctcggggctgtctacagcggcccgggagaggctgtggtggccccgagcgcgagtgtgtaggtgacaggacagcggccaggctatatgacttgacggtgatggtcattgtcctccagagcagtgcgactcggaccgatg

SEQ ID NO: 10778 - DNA, 203 bp, synthetic construct
  source 1..203: mol_type = other DNA
ggcgcgccagtccttgggctcgaccctgcactccgtcgccggaagtgccaccgagaagcgccggcctcggggctgttatactgtatttatgagaggctgtggtggccccgagcgcgagtgtgtaggtgacaggacagcggccaggcccgcccctcccctcgtgatggtcattgtcctccagagcagtgcgactcggaccgatg

SEQ ID NO: 10779 - DNA, 203 bp, synthetic construct
  source 1..203: mol_type = other DNA
ggcgcgccagtcctagcgtgttaccgcccgagactgtgtttcctgtgagtccagatgtgtgatccagatatgctgcttgctaatacagccctgttgactgagactaggagcgtgcctgaaactccatccctcctcctattattttttaatggtgcttctactggaatagtcaacaaagtgcacccaaccgactcggaccgatg

SEQ ID NO: 10780 - DNA, 203 bp, synthetic construct
  source 1..203: mol_type = other DNA
ggcgcgccagtcctcacgcctcacctcacccggtcctcgcagagttgcggccgcccgccccttcagccccggctctccgtatgcgcatgagcagaggcgcctccaagatagtacgatcaggctaaactttctaattcccttctttgggctcgggggctcccggagcagggcgagagctcgcgtcgccgcgactcggaccgatg

SEQ ID NO: 10781 - DNA, 203 bp, synthetic construct
  source 1..203: mol_type = other DNA
ggcgcgccagtcctatagcgtaacctcacccggtcctcgcagagttgcggccgcccgccccttcagccccggctctccgtatgcgcatgagcagaggcgcctccctctgttcctcccaaggctaaactttctaattcccttctttgggctcgggggctcccggagcagggcgagagctcgcgtcgccgcgactcggaccgatg

SEQ ID NO: 10782 - DNA, 203 bp, synthetic construct
  source 1..203: mol_type = other DNA
ggcgcgccagtcctcataacgcacctcacccggtcctcgcagagttgcggccgcccgccccttcagccccggctctccgtatgcgcatgagcagaggcgcctccctctgttcctcccaaggctaaactttctaattcccttctttgggctcgggggctcccggagcagggcgagctgaaagccaaggacgactcggaccgatg

SEQ ID NO: 10783 - DNA, 203 bp, synthetic construct
  source 1..203: mol_type = other DNA
ggcgcgccagtcctaccttacgacctcacccggtcctcgcagagttgcggccgcccgccccttcagccccggctctccgtatgcgcatgagcagaggcgcctccctctgttcctcccaaggctaaactttctaattcccttctttgttacgttacatcgtcggagcagggcgagagctcgcgtcgccgcgactcggaccgatg

SEQ ID NO: 10784 - DNA, 203 bp, synthetic construct
  source 1..203: mol_type = other DNA
ggcgcgccagtcctgcacaggaacctcacccggtcctcgcagagttgcggccgcccgccccttcagccccggctctccgtatgcgcatgatttccaaatttcagctctgttcctcccaaggctaaactttctaattcccttctttgggctcgggggctcccggagcagggcgagagctcgcgtcgccgcgactcggaccgatg

SEQ ID NO: 10785 - DNA, 203 bp, synthetic construct
  source 1..203: mol_type = other DNA
ggcgcgccagtcctctacgattacctcacccggtcctcgcagagttgcggccgcccgccccttcagccccggctctgatccgcattcgaggcagaggcgcctccctctgttcctcccaaggctaaactttctaattcccttctttgggctcgggggctcccggagcagggcgagagctcgcgtcgccgcgactcggaccgatg

SEQ ID NO: 10786 - DNA, 203 bp, synthetic construct
  source 1..203: mol_type = other DNA
ggcgcgccagtcctgggtccgaacctccaagagaaaataaccggggaccagagaggaaagacaggtccttaggtcctcaccctcccgtctccttgcccttgcagttctgggaactggacagattggacaactataacgacacctccctggtggaaaatcatctctgccctgccacagaggggcccctccgactcggaccgatg

SEQ ID NO: 10787 - DNA, 203 bp, synthetic construct
  source 1..203: mol_type = other DNA
ggcgcgccagtcctggtacctaacctccaagagagctagggttcctctcagagaggaaagacaggtccttaggtcccatttagtgacctcccttgcccttgcagttctgggaactggacagattggacaactataacgacacctccctggtggaaaatcatctctgccctgccacagaggggcccctccgactcggaccgatg

SEQ ID NO: 10788 - DNA, 203 bp, synthetic construct
  source 1..203: mol_type = other DNA
ggcgcgccagtcctgtccgtcgacctccaagagagctagggttcctctcagagaggaaagacaggtccttaggtcctcaccctcccgtctagcatataaaagccttctgggaactggacagattggacaactataacgacacctccctggtggaaaatcatctctgccctgccacagaggggcccctccgactcggaccgatg

SEQ ID NO: 10789 - DNA, 203 bp, synthetic construct
  source 1..203: mol_type = other DNA
ggcgcgccagtcctttactgtcacctccaagagagctagggttcctctcagagaggaaagacaggtccttaggtcctcaccctcccgtctccttgcccttgcagttctgggaactggaacctccaactcttgataacgacacctccctggtggaaaatcatctctgccctgccacagaggggcccctccgactcggaccgatg

SEQ ID NO: 10790 - DNA, 203 bp, synthetic construct
  source 1..203: mol_type = other DNA
ggcgcgccagtcctgttgggtaacctccaagagagctagggttcctctcagagaggaaagacaggtccttaggtcctcaccctcccgtctccttgcccttgcagttctgggaactggacagattggacaactataacgacacctccctggtggaaaatcatctctgccctgccacagaggggcccctccgactcggaccgatg

SEQ ID NO: 10791 - DNA, 203 bp, synthetic construct
  source 1..203: mol_type = other DNA
ggcgcgccagtcctactgtgcaacctccaagagagctagggttcctctcagagaggaaagacaggtccttaggtcctcaccctcccgtctccttgcccttgcagttctgggaactggacagattggacaactataacgacacctcctcctaaagtgggggtctctgccctgccacagaggggcccctccgactcggaccgatg

SEQ ID NO: 10792 - DNA, 203 bp, synthetic construct
  source 1..203: mol_type = other DNA
ggcgcgccagtcctctcgtgacacctccaagagagctagggttcctctcagagaggaaagaccatcgggctcaagatcaccctcccgtctccttgcccttgcagttctgggaactggacagattggacaactataacgacacctccctggtggaaaatcatctctgccctgccacagaggggcccctccgactcggaccgatg

SEQ ID NO: 10793 - DNA, 203 bp, synthetic construct
  source 1..203: mol_type = other DNA
ggcgcgccagtcctggttgaccacctcccagaagagtcacgtgggctgacccagagccggggcggaaaggctgcgttagtttcttccgggtcattgacagaagaccggtcgaggtaaagtagttcgttggttttctttcccctcatccttttgccgtgagatggcgaggggtggctttgatttcggcgcgactcggaccgatg

SEQ ID NO: 10794 - DNA, 203 bp, synthetic construct
  source 1..203: mol_type = other DNA
ggcgcgccagtcctcgggcgcaacctcccagaagagtcacgtgggctgacccagagccggggcggaaaggctgcgttagtttcttccgggtcattgacagaagaccggtcgaggtaaagtagttcgttggttttctttcccctcatccttttgcctgctcccggcgaggggtggctttgatttcggcgcgactcggaccgatg

SEQ ID NO: 10795 - DNA, 203 bp, synthetic construct
  source 1..203: mol_type = other DNA
ggcgcgccagtccttgagcgtgacctcccagaagagtcacgtgggctgacccagagccggggcggaaaggctgcgttagtttcttccgggtcattgacagaagcgtcaattcctgggagtagttcgttggttttctttcccctcatccttttgcctgctctaatttcttacgacctttgatttcggcgcgactcggaccgatg

SEQ ID NO: 10796 - DNA, 203 bp, synthetic construct
  source 1..203: mol_type = other DNA
ggcgcgccagtcctcaatcattacctcccagaagagtcacgtgggctgacccagagccggggcggaaaggctgcgttagtttcttccgggtcattgacagaagcgtcaattcctgggagtagttcgttggttttctttcccctcatgtgccatgacatatccggcgaggggtggctttgatttcggcgcgactcggaccgatg

SEQ ID NO: 10797 - DNA, 203 bp, synthetic construct
  source 1..203: mol_type = other DNA
ggcgcgccagtcctccacaccaacctcccagaagagtcacgtgggctggtgagtcaagcctacggaaaggctgcgttagtttcttccgggtcattgacagaagcgtcaattcctgggagtagttcgttggttttctttcccctcatccttttgcctgctcccggcgaggggtggctttgatttcggcgcgactcggaccgatg

SEQ ID NO: 10798 - DNA, 203 bp, synthetic construct
  source 1..203: mol_type = other DNA
ggcgcgccagtcctgatggtgaacgaaatagatgatctgtttaatgcatttggaagcaactaatcgaatcaacattttgatccaaattaagggccgccgcttccaacttaggattaaagaatcctattataccagaatatagggtggtaaatttagagtttgcttgcaactcaatcaatagagagttgcgactcggaccgatg

SEQ ID NO: 10799 - DNA, 203 bp, synthetic construct
  source 1..203: mol_type = other DNA
ggcgcgccagtcctcgcgctaaacgaacctcagcatttctgttggagactctagacctactggaaataacataactctggacctattggaacttatataattggcgcccaaccaacaatctgaacccaccaatctaatttaacacactttgtcaggcgacaaacagggtagttaagttagaaaagcatcgactcggaccgatg

SEQ ID NO: 10800 - DNA, 203 bp, synthetic construct
  source 1..203: mol_type = other DNA
ggcgcgccagtcctaccgcacaacgaacctcagcgaaagaaggaagatctctagacctactggaaataacataacttgatcttacaatttacttatataattggcgcccaaccaacaatctgaacccaccaatctaatttaacacactttgtcaggcgacaaacagggtagttaagttagaaaagcatcgactcggaccgatg

SEQ ID NO: 10801 - DNA, 203 bp, synthetic construct
  source 1..203: mol_type = other DNA
ggcgcgccagtcctgagatggcacgatatcatatgcgtgctttccacgacggtgacacgcttccctggattggcagccagactgccttccgggtcactgccatggaggagccgcagtcagatcctagcgtcgagccccctctgagtcaggaaacattttcagacctatggaaactacttcctgaaaaccgactcggaccgatg

SEQ ID NO: 10802 - DNA, 203 bp, synthetic construct
  source 1..203: mol_type = other DNA
ggcgcgccagtcctgaggagttacgatgggaaacgcgccagaccgaccctcgacttcggagaggcagcgcggttcctctgggtgcttccgcctccccttctcctgcttctccagcctcttcggcctcctcgcccgccgcgggaacccgagaccccagtgtatgccccacccctgaccccgctcgcgaccgactcggaccgatg

SEQ ID NO: 10803 - DNA, 203 bp, synthetic construct
  source 1..203: mol_type = other DNA
ggcgcgccagtcctcttgacagacgcagccaggcgcgcactgcacagcgtaaagggaaattggccgcccgagcgcacccttcagcccgcgcgccggccgtgagtcctcggtgctcgcccgccggccagacaaacagcccgcccgaccccgtcccgaccctggccgccccgagcggagcctggagcaaacgactcggaccgatg

SEQ ID NO: 10804 - DNA, 203 bp, synthetic construct
  source 1..203: mol_type = other DNA
ggcgcgccagtcctccgtctatacgccgccaaaaccttcgggacagctatgcgggttgacaatcccagtggggggcattatgattatatgttacttgtcctgcgagttcctcttgagactggccgaaaggcagccacggggccaccaaggcggcgcagcgctgcatgcggcaaggggaaaaatccttccgactcggaccgatg

SEQ ID NO: 10805 - DNA, 203 bp, synthetic construct
  source 1..203: mol_type = other DNA
ggcgcgccagtcctccatacggacgccgccaaaaccttcgggacagctatgcgggttgacaatcccagtggggggccggggaccagctgattacttgtcctgcgagttcctcttgagactggccgaaaggcagccacggggccaccgcacacttatttaactgcatgcggcaaggggaaaaatccttccgactcggaccgatg

SEQ ID NO: 10806 - DNA, 203 bp, synthetic construct
  source 1..203: mol_type = other DNA
ggcgcgccagtcctcgaggtatacggacacccctagggtatacaatgacagagatcttctagactaggtgcgagaggccgaggaccagaacaacatccgcctaccctccatcattgttataaaaaacttaggaaccaggtccacacagccgccagccaaccaaccatccactcccacgactggagccgcgactcggaccgatg

SEQ ID NO: 10807 - DNA, 203 bp, synthetic construct
  source 1..203: mol_type = other DNA
ggcgcgccagtccttccttcagacggacacccctagggtatacaatgacagagatcttctagactaggtgcgagaggccgaggaccagaacaacatccgcctaccctccatcattgttataaaaaacttaggtgatgttcaacgggagccgccagccaaccaaccatccactcccacgactggagccgcgactcggaccgatg

SEQ ID NO: 10808 - DNA, 203 bp, synthetic construct
  source 1..203: mol_type = other DNA
ggcgcgccagtccttagggcaaacggacacccctagggtatacaatgacagagatcttctagactaggtgcgagaggccgaggaccagaacaacatccgcctaccctccatcattgtttcctgttggggttaaaccaggtccacacagccgccagccaaccaaccatccactcccacgactggagccgcgactcggaccgatg

SEQ ID NO: 10809 - DNA, 203 bp, synthetic construct
  source 1..203: mol_type = other DNA
ggcgcgccagtcctatcacgctacggacacccctagggtatacaatgacagagatcttctagactaggtgcgagaggccgaggaccagaagtctcgatttgatacctccatcattgttataaaaaacttaggaaccaggtccacacagccgccagccaaccaaccatccactcccacgactggagccgcgactcggaccgatg

SEQ ID NO: 10810 - DNA, 203 bp, synthetic construct
  source 1..203: mol_type = other DNA
ggcgcgccagtcctttatttatacggacacccctagggtatacaatgacagagatcttctagttcgtcccatgtttgccgaggaccagaacaacatccgcctaccctccatcattgttataaaaaacttaggaaccaggtccacacagccgccagccaaccaaccatccactcccacgactggagccgcgactcggaccgatg

SEQ ID NO: 10811 - DNA, 203 bp, synthetic construct
  source 1..203: mol_type = other DNA
ggcgcgccagtcctctaatgatacggacagccaatttttgttgtattgttgagtcttcttgtgttttgttgtctttctacaggttgttgtggttgttgcaattgtttaacttcatcaatgcgaggctgttgtgattgtggttcaactaaacttccttattacgaatttgaaaaggtccacgttcaatacgactcggaccgatg

SEQ ID NO: 10812 - DNA, 203 bp, synthetic construct
  source 1..203: mol_type = other DNA
ggcgcgccagtccttctcctgaacggcctctggctaggacccaggtccttgattatgccaattttctcgagaaatcattcaattgaccatagactgaaagcgttgttacctagttcttcagaagagatcttattagaattaatttatatgatctaattcccttaaaaactgaataccaaaaaacaaaacgactcggaccgatg

SEQ ID NO: 10813 - DNA, 203 bp, synthetic construct
  source 1..203: mol_type = other DNA
ggcgcgccagtccttgaggcctacgtcctcgccacatctctgtaacctccctaccaaggactaattggtctttaaaactcctcaatgcaccgggcgcggtggctcacgcctgtaatcccagcactttgggaggccgaggcgggcagatcacgaggtcaggaaatcgagaccatcttggctaacaagaacgactcggaccgatg

SEQ ID NO: 10814 - DNA, 203 bp, synthetic construct
  source 1..203: mol_type = other DNA
ggcgcgccagtccttttagctaacgtcgttgaagacccacaggctgctgggaggagagcataaggaatctacttgaaaatggatcggtttatgttggattaaatgctgctctttgtggcctcatagcaaacagtctttttcgacgcatcttgaatgtgacaaaggctcgcatagctgctggcttaccacgactcggaccgatg

SEQ ID NO: 10815 - DNA, 203 bp, synthetic construct
  source 1..203: mol_type = other DNA
ggcgcgccagtcctgaccatgtacgtctgtgcggctgcgtggggctcgagttacacttgaccaggagactgaagcacttctaccctagccgggcccagcccccgagcagtgcagcctcccgagtgcagagtgcagcccctgcccgccctggcccagctgcccatgtctaccctgctggatcccaagtacgactcggaccgatg

SEQ ID NO: 10816 - DNA, 203 bp, synthetic construct
  source 1..203: mol_type = other DNA
ggcgcgccagtcctagatcgggacgtctgtgcggctgcgtggggctcggccgcgcggactgaaggagactgaagcacttctaccctagccgggcccagcccccgagcagtgcagcctcccgagtgcagagtgcagcccctgcccgccctggcccagctgcaggctgaagtgagtctggatcccaagtacgactcggaccgatg

SEQ ID NO: 10817 - DNA, 203 bp, synthetic construct
  source 1..203: mol_type = other DNA
ggcgcgccagtcctagttagcgacgtctgtgcggctgcgtggggctcggccgcgcggactgaaggagactgaagcacttctaccctagccgggcccagcccccgagcagtgcagcctcccgagtgcagagtgcagcccctgcccgccctggcccagctgcccatgtctaccctgctggatcccaagtacgactcggaccgatg

SEQ ID NO: 10818 - DNA, 203 bp, synthetic construct
  source 1..203: mol_type = other DNA
ggcgcgccagtccttacgaaagacgtctgtgcggctgcgtggggctcggccgcgcggactgaaggagactgaagcacttctaccctagccgggcccagcccccgagcagtgcagcctcccgagtgcagagtgcagcccctgcccgcgagcctaagcaataccatgtctaccctgctggatcccaagtacgactcggaccgatg

SEQ ID NO: 10819 - DNA, 203 bp, synthetic construct
  source 1..203: mol_type = other DNA
ggcgcgccagtccttcgccaatacgtctgtgcggctgcgtggggctcggccgcgcggactgaaggagactgaagcacttctaccctagccgggcccagcccccgagcagtgcagcctctgccagttgagcgtcagcccctgcccgccctggcccagctgcccatgtctaccctgctggatcccaagtacgactcggaccgatg

SEQ ID NO: 10820 - DNA, 203 bp, synthetic construct
  source 1..203: mol_type = other DNA
ggcgcgccagtccttcacccgcacgtctgtgcggctgcgtggggctcggccgcgcggactgaaggagactgaagcacttctaccctagccgggcccagcccccggttttgtgtttactccgagtgcagagtgcagcccctgcccgccctggcccagctgcccatgtctaccctgctggatcccaagtacgactcggaccgatg

SEQ ID NO: 10821 - DNA, 203 bp, synthetic construct
  source 1..203: mol_type = other DNA
ggcgcgccagtcctcataaataacgtctgtgcggctgcgtggggctcggccgcgcggactgaaggagactgaagcatcagcggatgcattgggcccagcccccgagcagtgcagcctcccgagtgcagagtgcagcccctgcccgccctggcccagctgcccatgtctaccctgctggatcccaagtacgactcggaccgatg

SEQ ID NO: 10822 - DNA, 203 bp, synthetic construct
  source 1..203: mol_type = other DNA
ggcgcgccagtcctacattattacgtctgtgcggtgtgtgcttctgtagccgcgcggactgaaggagactgaagcacttctaccctagccgggcccagcccccgagcagtgcagcctcccgagtgcagagtgcagcccctgcccgccctggcccagctgcccatgtctaccctgctggatcccaagtacgactcggaccgatg

SEQ ID NO: 10823 - DNA, 203 bp, synthetic construct
  source 1..203: mol_type = other DNA
ggcgcgccagtcctagagtttaactaatgtgccgcgcctgtgtggaggtgcgggattgggcgggctgccacggcatggagaatggctccgcttctgttgcagctggcggtgctcggcgcggcgctggcggccgcagccctcgtactgatttccatcgttgcatttacaactgctacaaaaatgccagccgactcggaccgatg

SEQ ID NO: 10824 - DNA, 203 bp, synthetic construct
  source 1..203: mol_type = other DNA
ggcgcgccagtcctgcagcctgactaccagatttgactcatttgtgattccttcgagaatctagttattagacacgtggttacatgaatgtttgggaaggaaaactggcaacatcttagtatatgttctccatggcacattagggaaagaagccagaaaaggctcccaacgcattgatttttaaaatgcgactcggaccgatg

SEQ ID NO: 10825 - DNA, 203 bp, synthetic construct
  source 1..203: mol_type = other DNA
ggcgcgccagtccttgccgaccactaccagatttgactcatttgtgattccttcgagaatctcccatgatttgcaatggttacatgaatgtttgggaaggaaaactggcaacatcttagtatatgttctccatggcacattagggaaagaagccagaaaaactcaattgttagctgatttttaaaatgcgactcggaccgatg

SEQ ID NO: 10826 - DNA, 203 bp, synthetic construct
  source 1..203: mol_type = other DNA
ggcgcgccagtcctgacaaaccactacccccaattgcaataaccccaggacaatctagccacagctaactgcccaaatccactacattccattcatatttagtcagctttgcgtggggaggcccggaaagaattagttctacgagcatcgacacaattatcttgatcgtgtttctttccgggcaagcccgactcggaccgatg

SEQ ID NO: 10827 - DNA, 203 bp, synthetic construct
  source 1..203: mol_type = other DNA
ggcgcgccagtccttcagaagaactacccccaattgcaataaccccaggacaatctagccacagctaactgcccaaatccactacattccattcatatttagtctttaagaaaaaactaggcccggaaagaattagttctacgagcatcgacacaattatcttgatcgtgtttccccttaatgcgcggcgactcggaccgatg

SEQ ID NO: 10828 - DNA, 203 bp, synthetic construct
  source 1..203: mol_type = other DNA
ggcgcgccagtcctgtttggacactacccccaattgcaataaccccaggacaatctagccacagctaactgcccaagggactacttgataattcatatttagtctttaagaaaaaactaggcccggaaagaattagttctacgagcatcgacacaattatcttgatcgtgtttctttccgggcaagcccgactcggaccgatg

SEQ ID NO: 10829 - DNA, 203 bp, synthetic construct
  source 1..203: mol_type = other DNA
ggcgcgccagtcctatggacgcactacccccaattgcaataaccccagtgtcgggataaataagctaactgcccaaatccactacattccattcatatttagtctttaagaaaaaactaggcccggaaagaattagttctacgagcatcgacacaattatcttgatcgtgtttctttccgggcaagcccgactcggaccgatg

SEQ ID NO: 10830 - DNA, 203 bp, synthetic construct
  source 1..203: mol_type = other DNA
ggcgcgccagtcctacagatagactagtcgacgttcttcgttaagaagcacgacttccagcagttggggccacggtgggacggaccctacactgtagtcctcagcacccccaccgcggtaaaggtcgctgggaagaccccgtggatccaccactctcgactcaagaaagctcctgacaaccaagaagacgactcggaccgatg

SEQ ID NO: 10831 - DNA, 203 bp, synthetic construct
  source 1..203: mol_type = other DNA
ggcgcgccagtcctggcggtgtactataatttatagtagagtcggaagccgaccctcacagtaaaatagcacaggctgggttttctacgtacgagtaaaacacggtgatttttctgcagtgagctctcccatgagcaacatgacagaaaacgaaagattgcttcattttttctaaactgaacgaaaagcgactcggaccgatg

SEQ ID NO: 10832 - DNA, 203 bp, synthetic construct
  source 1..203: mol_type = other DNA
ggcgcgccagtcctgcctggtcactattacttttgtttcttttgatgacctttatgttgctattagaggttcttgtgaaaagaacctacaacttatgcgtaaggttgacttgtataatggtgctgtcatttacatttttgccgaagagcctgttgttggtatagtctactcttcgtggaccgtttcgtcgactcggaccgatg

SEQ ID NO: 10833 - DNA, 203 bp, synthetic construct
  source 1..203: mol_type = other DNA
ggcgcgccagtcctccatgtttactattacttttgtttcttttgatgacctttatgttgctattagaggttcttgtgaaaagaacctacaacttatgcgtaaggttgacttgtataatggtgctgtcatttacatttttgccgaagagcctgttgttggtatagtctactcttctcaactatacgaagcgactcggaccgatg

SEQ ID NO: 10834 - DNA, 203 bp, synthetic construct
  source 1..203: mol_type = other DNA
ggcgcgccagtcctactgccctactattacttttgtttcttttgatgacctttatgttgctattagaggttcttgtgaaaagaacctacaggcctaatagggttttgacttgtataatggtgctgtcatttacatttttgccgaagagcctgttgttggtatagtctactcttctcaactatacgaagcgactcggaccgatg

SEQ ID NO: 10835 - DNA, 203 bp, synthetic construct
  source 1..203: mol_type = other DNA
ggcgcgccagtcctatcaagagactattacttttgtttcttttgatgagaaacgcagaatgcttagaggttcttgtgaaaagaacctacaacttatgcgtaaggttgacttgtataatggtgctgtcatttacatttttgccgaagagcctgttgttggtatagtctactcttctcaactatacgaagcgactcggaccgatg

SEQ ID NO: 10836 - DNA, 203 bp, synthetic construct
  source 1..203: mol_type = other DNA
ggcgcgccagtcctgtcattctactcagactttactctaaaagtcaaatcttctgacattctttgaagtgaagcataaccacgggaaccactgaagaaatgaatgaaatgaaataatgcagcatctagtgctttttgcatggcccaaaggggctctgtgctgctccactacagaggaaacttcaagaacgactcggaccgatg

SEQ ID NO: 10837 - DNA, 203 bp, synthetic construct
  source 1..203: mol_type = other DNA
ggcgcgccagtcctcaatgggtactcagactttactctaaaagtcaaatcttctgacattctttgaagtgaagcattctatgaatgtgagctgaagaaatgaatgaaatgaaataatgcagcatctagtgctttttgcatggcccaaaggggctctgtgcctgcgggaatttacggaaacttcaagaacgactcggaccgatg

SEQ ID NO: 10838 - DNA, 203 bp, synthetic construct
  source 1..203: mol_type = other DNA
ggcgcgccagtcctcgatagatactcagactttactctaaaagtcaaatcttctgacattctttgaagtgaagcattctatgaatgtgagctgaagaaatgaatgaaatgaaataatgcagcatctagtgctttttgcatggcccaccatatgataactttgctccactacagaggaaacttcaagaacgactcggaccgatg

SEQ ID NO: 10839 - DNA, 203 bp, synthetic construct
  source 1..203: mol_type = other DNA
ggcgcgccagtcctatccactaactcagactttactctaaaagtcaaatcttctgacattctttgaagtgaagcattctatgaatgtgagctgaagaaatgaatgaaatgaaataatgcagcatctagtgctttttgcatggcccagtctcatgtgtgtatgctccactacagaggaaacttcaagaacgactcggaccgatg

SEQ ID NO: 10840 - DNA, 203 bp, synthetic construct
  source 1..203: mol_type = other DNA
ggcgcgccagtcctaggtaactactcagactttatagactggacggtctcttctgacattctttgaagtgaagcattctatgaatgtgagctgaagaaatgaatgaaatgaaataatgcagcatctagtgctttttgcatggcccaaaggggctctgtgctgctccactacagaggaaacttcaagaacgactcggaccgatg

SEQ ID NO: 10841 - DNA, 203 bp, synthetic construct
  source 1..203: mol_type = other DNA
ggcgcgccagtcctaatcacttactcagcacaggatctgatcaggagatttgtctccggtgctttacaccggagcaaccccagttggtgcgcccaaggcctggcaaataacctaggggactaggttttcttttaatttacacgtctgtcaatatgggtgcaaacaatagcaaggagtctgtgtcaagccgactcggaccgatg

SEQ ID NO: 10842 - DNA, 203 bp, synthetic construct
  source 1..203: mol_type = other DNA
ggcgcgccagtccttgtttaacactcagcacaggatctgatcaggagatttgtctccggtgctttacaccggagcacaaatttaaaaattgcccaaggcctggcaaataacctaggggactaggttttctttatgaggtggtagaagtcaatatgggtgcaaacaatagcaaggagtctgtgtcaagccgactcggaccgatg

SEQ ID NO: 10843 - DNA, 203 bp, synthetic construct
  source 1..203: mol_type = other DNA
ggcgcgccagtcctttgtcctgactcagcacaggatctgatcaggagatttgtctccggtgctttacaccggagcacaaatttaaaaattgcccaaggcctggcggtgtttaccccccactaggttttcttttaatttacacgtctgtcaatatgggtgcaaacaatagcaaggagtctgtgtcaagccgactcggaccgatg

SEQ ID NO: 10844 - DNA, 203 bp, synthetic construct
  source 1..203: mol_type = other DNA
ggcgcgccagtcctcctggacaactcccaggctcctcgggacattttttagcctcctgggagtctcggagggggtgatactagcaggtttgggccttgacgtggctgtggatgcagtcgttctgacccctggtggccgagaggtgaagtgcagtggcggctgcttgctcaaggccggaggaagacgcccgactcggaccgatg

SEQ ID NO: 10845 - DNA, 203 bp, synthetic construct
  source 1..203: mol_type = other DNA
ggcgcgccagtcctttacctacactcccaggctcctcgggactcggcgggtcctcctgggagtctcggaggggaccggctgtgcaggtttgggccttgacgtggaaacatccctgtaggttctgacccctggtggccgagaggtgaagtgcagtggcggctgcttgctcaaggccggaggaagacgcccgactcggaccgatg

SEQ ID NO: 10846 - DNA, 203 bp, synthetic construct
  source 1..203: mol_type = other DNA
ggcgcgccagtcctaacgcggcactcccaggctcctcgggactcggcgggtcctcctgggagtctcggaggggaccggctgtgcaggtttgggccttgacgtggctgtggatgcagtctccggcctgtagattggccgagaggtgaagtgcagtggcggctgcttgctcaaggccggaggaagacgcccgactcggaccgatg

SEQ ID NO: 10847 - DNA, 203 bp, synthetic construct
  source 1..203: mol_type = other DNA
ggcgcgccagtccttctatgctactcccaggctcctcgggactcggcgtcgatgagaccatatctcggaggggaccggctgtgcaggtttgggccttgacgtggctgtggatgcagtcgttctgacccctggtggccgagaggtgaagtgcagtggcggctgcttgctcaaggccggaggaagacgcccgactcggaccgatg

SEQ ID NO: 10848 - DNA, 203 bp, synthetic construct
  source 1..203: mol_type = other DNA
ggcgcgccagtcctcccatttgactcccaggctctggacatagaaataggtcctcctgggagtctcggaggggaccggctgtgcaggtttgggccttgacgtggctgtggatgcagtcgttctgacccctggtggccgagaggtgaagtgcagtggcggctgcttgctcaaggccggaggaagacgcccgactcggaccgatg

SEQ ID NO: 10849 - DNA, 203 bp, synthetic construct
  source 1..203: mol_type = other DNA
ggcgcgccagtcctcggctaggactcttgccatacgtctgtggtttgaattccagcggcgccgccagagtctgaacaagagctggggtggagggggcggggacctggggagcccggcgggtcgctatcgcggggggtactagtggcgccgccgccacagacaccaacgctgtcgccacctctgtagcccgactcggaccgatg

SEQ ID NO: 10850 - DNA, 203 bp, synthetic construct
  source 1..203: mol_type = other DNA
ggcgcgccagtcctgggccggcactgagagcgcctggaggctcgagcgagtacctcgaatcatgcacacctgttagcaagaaacagaagttgaaggactggaacaagtgaactaggaaagagggaacgccaatccaaggatagaaggacaaggacagaatcaccagcactggctgaaggtaccttaaccgactcggaccgatg

SEQ ID NO: 10851 - DNA, 203 bp, synthetic construct
  source 1..203: mol_type = other DNA
ggcgcgccagtcctacttgtcaactgagagcgcctggaggctcgagcggagggtaattcatttgcacacctgttagcaagaaacagaagttgaaggactggaacaagtgaactaggaaagagggaacgccaaagtccaatgtcccagacaaggacagaatcaccagcactggctgaaggtaccttaaccgactcggaccgatg

SEQ ID NO: 10852 - DNA, 203 bp, synthetic construct
  source 1..203: mol_type = other DNA
ggcgcgccagtccttttacgacactgagagcgcctggaggctcgagcggagggtaattcatttgcacacctgttagcaagaaacagaagttgaaggactggaacaagtgaactaggaaagagggaacgccaatccaaggatagaaggacaaggacagaatcaccagcactggctctgctatgagccgtcgactcggaccgatg

SEQ ID NO: 10853 - DNA, 203 bp, synthetic construct
  source 1..203: mol_type = other DNA
ggcgcgccagtcctgtcgtcaaactgagagcgcctggaggctcgagcggagggtaattcatttgcacacctgttagcaagaaacagaagttgaaggactggaacaagtgaactaggaaagagggaacgccaatccaaggatagaaggacaaggacagaatgcggccgtgaattcgaaggtaccttaaccgactcggaccgatg

SEQ ID NO: 10854 - DNA, 203 bp, synthetic construct
  source 1..203: mol_type = other DNA
ggcgcgccagtcctcagacccaactgagagcgcctggaggctcgagcggagggtaattcatttgcacacctgttagcaagaaacagaagttgaaggactggaacaagtgaactaggaacttataccgatatctccaaggatagaaggacaaggacagaatcaccagcactggctgaaggtaccttaaccgactcggaccgatg

SEQ ID NO: 10855 - DNA, 203 bp, synthetic construct
  source 1..203: mol_type = other DNA
ggcgcgccagtcctcgcactgtactgagagcgcctggaggctcgagcggagggtaattcatttgcacacctgttagcaagaaacagaagttgaaggactggaactgtccgctgtccgtagagggaacgccaatccaaggatagaaggacaaggacagaatcaccagcactggctgaaggtaccttaaccgactcggaccgatg

SEQ ID NO: 10856 - DNA, 203 bp, synthetic construct
  source 1..203: mol_type = other DNA
ggcgcgccagtccttcagtgccactgataaagaaaggaaaagctaccaccattacatcagtcttaccgaagccagcactagttgcatctcaacggcgtagaaataaagtccttattctaggatcaggaggtctgtccattggtcaggctggagaatttgattactcaggatctcaagctgtaaaagcccgactcggaccgatg

SEQ ID NO: 10857 - DNA, 203 bp, synthetic construct
  source 1..203: mol_type = other DNA
ggcgcgccagtcctctccgtgcactgcaataggccactcgcgcgaggcttccccttcgtcgatgttggagtgtcggctctcctgctagcagccggatgctggggacaagtcaccctcaccgttacggtaacagcggcaacactccttttttgccactatgcctacatggttcccggttggcaagctgacgactcggaccgatg

SEQ ID NO: 10858 - DNA, 203 bp, synthetic construct
  source 1..203: mol_type = other DNA
ggcgcgccagtccttggtgtccactggcgctaaaagttttgagcttctattgtactctacctcaccgtccagggagcaggtagctgctgggctccggggacactttgcgttcgggctgggagcgtgctttccacgacggtgacacgcttccctggattggcagccagactgccttccgggtcactgcccgactcggaccgatg

SEQ ID NO: 10859 - DNA, 203 bp, synthetic construct
  source 1..203: mol_type = other DNA
ggcgcgccagtcctcatatcttactggcgctaaaagttttgagcttctcaaaagtctagagccaccgtccagggagcaggtagctgctgggctccggggacactttgcgttcgggctgggagcgtgctttccacgacggtgacacgaagtgacttcacaacagccagactgccttccgggtcactgcccgactcggaccgatg

SEQ ID NO: 10860 - DNA, 203 bp, synthetic construct
  source 1..203: mol_type = other DNA
ggcgcgccagtcctccggctgaactgggaaaaatggccttccgcgccagccgcagccacagccgcaacgccacccgcagccacagccacagccacagccccaggcatagccttcggcacagccccggctccggctcctgcggcagctcctctgggcaccgtccctgcgccgacatcctggaggttgggcgactcggaccgatg

SEQ ID NO: 10861 - DNA, 203 bp, synthetic construct
  source 1..203: mol_type = other DNA
ggcgcgccagtcctacatactcactggggacctccgcgcctgggaaaaggagttggctgaaggacttggggagcccagaagctgccaccgaaccaagaaccacctctgtgcagaaaagcaaccaccttgttctctattctgctgcccgagacaaccacatcctcctcctcctacacccaaaggctccccgactcggaccgatg

SEQ ID NO: 10862 - DNA, 203 bp, synthetic construct
  source 1..203: mol_type = other DNA
ggcgcgccagtcctgagcattgactggggacctcgctcaggaccgtggggagttggctgaaggacttggggagcccagaagctgccaccgaaccaagaaccacctctgtgcagaaaagagtaacgtgcccggtctattctgctgcccgagacaaccacatcctcctcctcctacacccaaaggctccccgactcggaccgatg

SEQ ID NO: 10863 - DNA, 203 bp, synthetic construct
  source 1..203: mol_type = other DNA
ggcgcgccagtcctggcacggaactggggacctcgctcaggaccgtggggagttggctgaaggacttggggagcccagaagctgccaccgaaccaagaaccacctctgtgcagaaaagcaaccaccttgttctctattctgctgccatgcttttatcacgcctcctcctcctacacccaaaggctccccgactcggaccgatg

SEQ ID NO: 10864 - DNA, 203 bp, synthetic construct
  source 1..203: mol_type = other DNA
ggcgcgccagtccttgtaagagactggggacctcgctcaggaccgtggggagttggctgaaggacttggggagcccagaagctgccaccggcaacccttttcggtctgtgcagaaaagcaaccaccttgttctctattctgctgcccgagacaaccacatcctcctcctcctacacccaaaggctccccgactcggaccgatg

SEQ ID NO: 10865 - DNA, 203 bp, synthetic construct
  source 1..203: mol_type = other DNA
ggcgcgccagtcctagcgaaacactggggacctcgctcaggaccgtggtcttgctcacccttgacttggggagcccagaagctgccaccgaaccaagaaccacctctgtgcagaaaagcaaccaccttgttctctattctgctgcccgagacaaccacatcctcctcctcctacacccaaaggctccccgactcggaccgatg

SEQ ID NO: 10866 - DNA, 203 bp, synthetic construct
  source 1..203: mol_type = other DNA
ggcgcgccagtcctcgctgtagacttccggtgacgtatttccgcttccctagaatatccgcctacgtatttccgcttccgggacacgtccgcttaaaagcggaagtgacgccctttcccaaccacacctacctcgcctataagaatcagtgtcagttcctctgactcactctgttcgtagaggtcacccgactcggaccgatg

SEQ ID NO: 10867 - DNA, 203 bp, synthetic construct
  source 1..203: mol_type = other DNA
ggcgcgccagtcctagctacaaacttccggtgacgtatttccgcttccggtcccgcgaaaattacgtatttccgcttccgggacacgtccgcttaaaagcggaagtgacgccctttcccaaccacacctacctcgcctataagaatcagtgtcagttcctctgactcactctgtgatcgcctcagtttcgactcggaccgatg

SEQ ID NO: 10868 - DNA, 203 bp, synthetic construct
  source 1..203: mol_type = other DNA
ggcgcgccagtccttccactccacttcgcaagatcaagcgacacaaatgaacacgccttctcagccccgccagcacttctaccctagccgggcccagcccccgagcagtgcagcctcccgagtgcagagtgcagcccctgcccgccctggcccagctgcccatgtctaccctgctggatcccaagtaacgactcggaccgatg

SEQ ID NO: 10869 - DNA, 203 bp, synthetic construct
  source 1..203: mol_type = other DNA
ggcgcgccagtcctacaatacaacttggctgactgtagggctgtgctgcgcggtccttcccattcaccctagtctggcgctcgccggcgtgggcgggccggaccttcgccgcttccaggaagggccacaacggccgtcggaccacggcgcggcggccagttcctttatagttttgttcagaaaaacatcgactcggaccgatg

SEQ ID NO: 10870 - DNA, 203 bp, synthetic construct
  source 1..203: mol_type = other DNA
ggcgcgccagtcctagactcacactttccaaggcgcccgccgactggcatggcgcaccgacccggggccggggccccgggagagggaatgagtgtgagctcgtgagtgggcgccgccgccaccgcccccgccgccgtcgtctcggtagcagccttcgccacgccggggtcttcagctccactggggcccgactcggaccgatg

SEQ ID NO: 10871 - DNA, 203 bp, synthetic construct
  source 1..203: mol_type = other DNA
ggcgcgccagtccttccaaacgactttccaaggcgcccgccgactggctgtattggggagggacatatacttctgtcgggagagggaatgagtgtgagctcgtgagtgggcgccgccgccaccgcccccgccgccgtcgtctcggtagcagccttcgccacgccggggtcttcagctccactggggcccgactcggaccgatg

SEQ ID NO: 10872 - DNA, 203 bp, synthetic construct
  source 1..203: mol_type = other DNA
ggcgcgccagtcctagtagttcactttccaaggcgcccgccgactggctgtattggggagggcggggccggggccccgggagagggaatgagtgtgagctcgtgagtgggcgccgccgccaccgcccccgccgccgtcgtctcggtagcagccttcgccacgccggggtcttcacacatcagatctgacgactcggaccgatg

SEQ ID NO: 10873 - DNA, 203 bp, synthetic construct
  source 1..203: mol_type = other DNA
ggcgcgccagtcctgttacaatactttccaaggcgcccgccgactggctgtattggggagggcggggccggggccccgggagagggaatgagtgtgagctcgtgagtgggcgccgccgccaccgcccccgccgccgtcgtctcggtagcagccttcgccacgccggggtcttcagctccactggggcccgactcggaccgatg

SEQ ID NO: 10874 - DNA, 203 bp, synthetic construct
  source 1..203: mol_type = other DNA
ggcgcgccagtccttaagtctaactttgcccatagcagcgggcgggcactttgcactggaaccccgcggggttcgtcaaggacgcgactctcccgacgcggggaggctattctgcccatttggggacacttccccgccgctgccaggacccgcttctctgaaaggctctccttgcagctgcttagacgcgactcggaccgatg

SEQ ID NO: 10875 - DNA, 203 bp, synthetic construct
  source 1..203: mol_type = other DNA
ggcgcgccagtcctcacggatgactttgcccatagcagcgggcgggcactttgcactggaacttacaacacccgagcaaggacgcgactcggggcttcttaaagggctattctgcccatttggggacacttccccgccgctgccaggacccgcttctctgaaaggctctccttgcagctgcttagacgcgactcggaccgatg

SEQ ID NO: 10876 - DNA, 203 bp, synthetic construct
  source 1..203: mol_type = other DNA
ggcgcgccagtccttaaagtaaactttgcccatagcagcgggcgggcactttgcactggaacttacaacacccgagcaaggacgcgactctcccgacgcggggactgacacggctgagtttggggacacttccccgccgctgccaggacccgcttctctgaaaggctctccttgcagctgcttagacgcgactcggaccgatg

SEQ ID NO: 10877 - DNA, 203 bp, synthetic construct
  source 1..203: mol_type = other DNA
ggcgcgccagtcctttgacgcaactttgcccatagcagcgggcgggcactttgcactggaacttacaacacccgagcaaggacgcgactctcccgacgcggggaggctattctgcccacccctctgttacgacccgccgctgccaggacccgcttctctgaaaggctctccttgcagctgcttagacgcgactcggaccgatg

SEQ ID NO: 10878 - DNA, 203 bp, synthetic construct
  source 1..203: mol_type = other DNA
ggcgcgccagtcctacttgggtactttgcccatagcagcgggcgggcactttgcactggaacttacaacacccgagcaaggacgcgactctcccgacgcggggaggctattctgcccatttggggacacttccccgccgctgccaggacccgcttctctgaaaggctctccttgcagctgcttagacgcgactcggaccgatg

SEQ ID NO: 10879 - DNA, 203 bp, synthetic construct
  source 1..203: mol_type = other DNA
ggcgcgccagtcctcgacatttactttgcccatagcagcgggcgggcactttgcactggaacttacaacacccgagcaaggacgcgactctcccgacgcggggaggctattctgcccatttggggacacttccccgccgctgccagtcttataccgatataaaggctctccttgcagctgcttagacgcgactcggaccgatg

SEQ ID NO: 10880 - DNA, 203 bp, synthetic construct
  source 1..203: mol_type = other DNA
ggcgcgccagtcctgcgcccagactttgcccatagcagcgggcgggcactttgcactggaacttacaacacccgagggtatgtcgcctgatcccgacgcggggaggctattctgcccatttggggacacttccccgccgctgccaggacccgcttctctgaaaggctctccttgcagctgcttagacgcgactcggaccgatg

SEQ ID NO: 10881 - DNA, 203 bp, synthetic construct
  source 1..203: mol_type = other DNA
ggcgcgccagtcctacttatacagaaaggggcggaaaaccactattcggtgcggcagtgcggagctcctgagaccggcgggcacacgggggtctgtggcccccgccgtagcagtggctgccgccgtcgcttggttcccgtcggtctgcgggaggcgggttatggcggcggcggcagtgagagctgtgacgactcggaccgatg

SEQ ID NO: 10882 - DNA, 203 bp, synthetic construct
  source 1..203: mol_type = other DNA
ggcgcgccagtcctggattatcagaaaggggcggggccggcgggcagcgtgcggcagtgcggagctcctgagaccggcgggcacacgggggtctgtggcccccgccgtagcagtggctgccgccgtcgcttggttcccgtcggtctgcgggaggcgggttatggcggcggcggcagtgagagctgtgacgactcggaccgatg

SEQ ID NO: 10883 - DNA, 203 bp, synthetic construct
  source 1..203: mol_type = other DNA
ggcgcgccagtcctctgggtcgagaaaggggcggggccggcgggcagcgtgcggcagtgcggagctcctgagaccggcgggcacacgggggtctgtggcccccgccgtagcagtggctgccgccgtcgcttggttcccgtcggtctgcgggaggcgggttatggcggcggcggctagtgagtagtacccgactcggaccgatg

SEQ ID NO: 10884 - DNA, 203 bp, synthetic construct
  source 1..203: mol_type = other DNA
ggcgcgccagtccttcaggacgagaaaggggcggggccggcgggcagcgtgcggcagtgcggagctcctgagaccggcgggcacacgggggtctgtggcccccggttgccggagtcaggccgccgtcgcttggttcccgtcggtctgcgggaggcgggttatggcggcggcggcagtgagagctgtgacgactcggaccgatg

SEQ ID NO: 10885 - DNA, 203 bp, synthetic construct
  source 1..203: mol_type = other DNA
ggcgcgccagtcctagattaaaagaaaggggcggggccggcgggcagcgtgcggcagtgcggagctcctgagaccggcgggcacacggggtagcccttataggcccgtagcagtggctgccgccgtcgcttggttcccgtcggtctgcgggaggcgggttatggcggcggcggcagtgagagctgtgacgactcggaccgatg

SEQ ID NO: 10886 - DNA, 203 bp, synthetic construct
  source 1..203: mol_type = other DNA
ggcgcgccagtcctcggttaatagaactagttaatgcggcccagtccgagacagcagatgaggagactgtccttcctgtttcgcagatgaggaaactgaggcttagagaagtttggcaaattggctaagttcctacagctaattgtgggattagtgatatgcttttctaaagagtagaaaagtcgaagcgactcggaccgatg

SEQ ID NO: 10887 - DNA, 203 bp, synthetic construct
  source 1..203: mol_type = other DNA
ggcgcgccagtcctttctcggcagaatgatatctgtcaaaagaaacacttggagagcactgagtttagtaataggtgactgccggaaaaaagggaactttgaatattgtcaagaacaggaggcatgagcccggaacgcgcttgcttttaggagacagccactttctgtgtggtacgctggattcaaggcgactcggaccgatg

SEQ ID NO: 10888 - DNA, 203 bp, synthetic construct
  source 1..203: mol_type = other DNA
ggcgcgccagtcctgtgcgaatagaatgatatctgtcaaaagaaacacttggagagcactgagtttagtaataggtgactgccggaaaaaagggaactttgaatcgaagttgtttgctgaggcatgagcccggaacgcgcttgcttttaggagacagccactttctgtgtggtacgctggattcaaggcgactcggaccgatg

SEQ ID NO: 10889 - DNA, 203 bp, synthetic construct
  source 1..203: mol_type = other DNA
ggcgcgccagtccttagagcgcagaatgatatctgtcaaaagaaacacttggagagcactgagtttagtaataggtgactgccggaaaaagaaaggtgacatcgattgtcaagaacaggaggcatgagcccggaacgcgcttgcttttaggagacagccactttctgtgtggtacgctggattcaaggcgactcggaccgatg

SEQ ID NO: 10890 - DNA, 203 bp, synthetic construct
  source 1..203: mol_type = other DNA
ggcgcgccagtcctatgtgagaagacagccttgtctcgtctgaaggaacagaaatctctgggccaggtggaacccagggtcagagagggatgggagagagattccccaggctctcagagaagatcagcagaaagtctgcaagaccctaagaaccatcagccctcagctgcacctcctcccctccaaggcgactcggaccgatg

SEQ ID NO: 10891 - DNA, 203 bp, synthetic construct
  source 1..203: mol_type = other DNA
ggcgcgccagtcctcagtatttagacagccttgttctacagaaatgatgagaaatctctgggccaggtggaacccagggtcagagagggatgggagagagattccccaggctctcagagaagatcagcagaaagtctgcaagaccctaagaaccatcagccctcagctgcacctcctcccctccaaggcgactcggaccgatg

SEQ ID NO: 10892 - DNA, 203 bp, synthetic construct
  source 1..203: mol_type = other DNA
ggcgcgccagtcctctttggcgagacagccttgttctacagatcctccagaggtaacggaaaccaggtggaacccagggtcagagagggatgggagagagattccccaggctctcagagaagatcagcagaaagtctgcaagaccctaagaaccatcagccctcagctgcacctcctcccctccaaggcgactcggaccgatg

SEQ ID NO: 10893 - DNA, 203 bp, synthetic construct
  source 1..203: mol_type = other DNA
ggcgcgccagtcctaagagacaagacagccttgttctacagatcctcccagaaatctctgggccaggtggaacccagggtcagagagggatgggagagagattccccaggctctcagagaagatcagcagaaagtctgcaagaccctaagaaccatcagccctcagctgcacctaggttataagtccacgactcggaccgatg

SEQ ID NO: 10894 - DNA, 203 bp, synthetic construct
  source 1..203: mol_type = other DNA
ggcgcgccagtcctagggctttagacctctctgtgcttagggcaaacatcatttggccttaaatgggattctgtgaacttactcaaaagaattgacagctggactgttctttggggccttatgtggtgtttgcctctgaggtactcaggggcatttaggtttttcctcattcttaaataataatgaaccgactcggaccgatg

SEQ ID NO: 10895 - DNA, 203 bp, synthetic construct
  source 1..203: mol_type = other DNA
ggcgcgccagtcctggtgtttcagacctctctgtgcttagggcaaacatcatttggccttaaatgggattctgtgagaggggatccctccattgacagctggactgttctttggggccttatgtggtgtttgcctctgaggtactcaggggcatttaggtttttcctcattctttttaggatggtttacgactcggaccgatg

SEQ ID NO: 10896 - DNA, 203 bp, synthetic construct
  source 1..203: mol_type = other DNA
ggcgcgccagtccttaagattgagacctctctgtgcttagggcaaacatcatttggccttaaatgggattctgtgagaggggatccctccattgacagctggactgttctttggggccttatgtggtgtttgcctctgaggtactcgatacgggcatcccttttcctcattcttaaataataatgaaccgactcggaccgatg

SEQ ID NO: 10897 - DNA, 203 bp, synthetic construct
  source 1..203: mol_type = other DNA
ggcgcgccagtcctatagtgctagacgccatagttccagaaggcggctataaagggagcctgggaggctgggtggaggagggagcagaaaaaacccaactcagcagatctgggaactgtgagagcggcaagcaggaactgtggtcagaggctgtgcgtcttggctggtagggcctgctcttttctacccgactcggaccgatg

SEQ ID NO: 10898 - DNA, 203 bp, synthetic construct
  source 1..203: mol_type = other DNA
ggcgcgccagtcctagcaatatagactctgtcttcagccaggcactccctccctccctcccaatcgatatgggcgtaacttctgcctgcccagcctgagctgccgcaccagctgctcctcccggccctgcgtgccccccagctgccacagctgcaccctgcccggggcctgcaacatccccgccaatgcgactcggaccgatg

SEQ ID NO: 10899 - DNA, 203 bp, synthetic construct
  source 1..203: mol_type = other DNA
ggcgcgccagtcctatcgggtcagactctgtcttcagccaggcactccctccctccctcccagcactatgccctacaacttctgcctgcccagcctgagctgccgcaccagctgcatactggggccctgcgtgccccccagctgccacagctgcaccctgcccggggcctgcaacatccccgccaatgcgactcggaccgatg

SEQ ID NO: 10900 - DNA, 203 bp, synthetic construct
  source 1..203: mol_type = other DNA
ggcgcgccagtcctattcccatagactctgtcttcagccaggcactccctccctccctcccagcactatgccctacaacttctgcctgcccagcctgagctgccgcaccagctgctccctggaatttacgcagccccccagctgccacagctgcaccctgcccggggcctgcaacatccccgccaatgcgactcggaccgatg

SEQ ID NO: 10901 - DNA, 203 bp, synthetic construct
  source 1..203: mol_type = other DNA
ggcgcgccagtcctcctgctcgagactctgtcttcagccaggcactccctccctccctcccagcactatgccctacaacttctgcctgcccagcctgagctgccgcaccagctgctcctcccggccctgcgtgccccccagctgccacagctgcaccctgcccggggcctgcaacatccccgccaatgcgactcggaccgatg

SEQ ID NO: 10902 - DNA, 203 bp, synthetic construct
  source 1..203: mol_type = other DNA
ggcgcgccagtcctcactgtgaagactctgtcttcagccaggcactccctccctccctcccagcactatgccctacaacttctgcctgcccagcctgagctgccgcaccagctgctcctcccggccctgcgtgccccccagctgccgagttgttctaaaccccggggcctgcaacatccccgccaatgcgactcggaccgatg

SEQ ID NO: 10903 - DNA, 203 bp, synthetic construct
  source 1..203: mol_type = other DNA
ggcgcgccagtcctgttgtggtagactctgtcttcagccaggcactccctccctccctcccagcactatgccctacaacttctgcctgcctgatgcaccggttggcaccagctgctcctcccggccctgcgtgccccccagctgccacagctgcaccctgcccggggcctgcaacatccccgccaatgcgactcggaccgatg

SEQ ID NO: 10904 - DNA, 203 bp, synthetic construct
  source 1..203: mol_type = other DNA
ggcgcgccagtcctgcggatctagactctgtcttcagccaggcactccctccctccctcccagcactatgccctacgtgcgtccagacagcagcctgagctgccgcaccagctgctcctcccggccctgcgtgccccccagctgccacagctgcaccctgcccggggcctgcaacatccccgccaatgcgactcggaccgatg

SEQ ID NO: 10905 - DNA, 203 bp, synthetic construct
  source 1..203: mol_type = other DNA
ggcgcgccagtcctattgtcttagactctgtcttcagccaggcactcctgggacagaggtaggcactatgccctacaacttctgcctgcccagcctgagctgccgcaccagctgctcctcccggccctgcgtgccccccagctgccacagctgcaccctgcccggggcctgcaacatccccgccaatgcgactcggaccgatg

SEQ ID NO: 10906 - DNA, 203 bp, synthetic construct
  source 1..203: mol_type = other DNA
ggcgcgccagtcctgttgtaacagactggagagaagcaggcctgagcccaaatggccaggtgtcctggggactcccaggaccacaggctgagacgagacgcagggtggctggaggaagtgagaggtgaactcagcctgggactggctgggcgagactctccacctgctccctgggaccatcgcccacccgactcggaccgatg

SEQ ID NO: 10907 - DNA, 203 bp, synthetic construct
  source 1..203: mol_type = other DNA
ggcgcgccagtcctatggtgagagactggagagaagcaggcctgagcctccccaaaggcagctcctggggactcccaggaccacaggctgagacgagacgcagggtggctggaggaaggccatttgattaaaagcctgggactggctgggcgagactctccacctgctccctgggaccatcgcccacccgactcggaccgatg

SEQ ID NO: 10908 - DNA, 203 bp, synthetic construct
  source 1..203: mol_type = other DNA
ggcgcgccagtcctttgtagtaagactgtgcagtccacggcctgaacaatgagcatcctcctctaaacgcgtgtcaagacaaaagatgcttcagctttggaaacttgttctcctgtgcggcgtgctcactgggacctcagagtctcttcttgacaatcttggcaatgacctaagcaatgtcgtggatacgactcggaccgatg

SEQ ID NO: 10909 - DNA, 203 bp, synthetic construct
  source 1..203: mol_type = other DNA
ggcgcgccagtcctgggtaaggagactgtgcagtggggcaaggatttcatgagcatcctcctctaaacgcgtgtcaagacaaaagatgcttcagctttggaaacaaccctctagaacaggcgtgctcactgggacctcagagtctcttcttgacaatcttggcaatgacctaagcaatgtcgtggatacgactcggaccgatg

SEQ ID NO: 10910 - DNA, 203 bp, synthetic construct
  source 1..203: mol_type = other DNA
ggcgcgccagtcctatgagcccagactgtgcagtggggcaaggatttcatgagcatcctcctctaaacgcgtgtcaagacaaaagatgcttcagctttggaaacttgttctcctgtgcggcgtgctcactggcgagcatatacgatttcttgacaatcttggcaatgacctaagcaatgtcgtggatacgactcggaccgatg

SEQ ID NO: 10911 - DNA, 203 bp, synthetic construct
  source 1..203: mol_type = other DNA
ggcgcgccagtccttgcttgtgagactgtgcagtggggcaaggatttcatgagcatcctcctctaaacgcgtgtcaagacaaaagatgcttcagctttggaaacttgttctcctgtgcggcgtgctcactgggacctcagagtctcttcttgacaatcttaatccctttacctccaatgtcgtggatacgactcggaccgatg

SEQ ID NO: 10912 - DNA, 203 bp, synthetic construct
  source 1..203: mol_type = other DNA
ggcgcgccagtcctcgctgacaagactgtgcagtggggcaaggatttcatgagcatcctcctctaaacgcgtgtcaagacaaaagatgcttcagctttggaaacttgttctcctgtgcggcgtgctcactgggacctcagagtctcttcttgacaatcttggcaatgacctaagcaatgtcgtggatacgactcggaccgatg

SEQ ID NO: 10913 - DNA, 203 bp, synthetic construct
  source 1..203: mol_type = other DNA
ggcgcgccagtcctgttaagccagactgtgcagtggggcaaggatttcatgagcatcctcctctaaacgcgtgtcaagacaaaagatgcttcagctttggaaacttgttctcctgtgcggcgtgctcactgggacctcagagtctcttcttgacaatcttggcaatgacctaaggtcgagatctttcccgactcggaccgatg

SEQ ID NO: 10914 - DNA, 203 bp, synthetic construct
  source 1..203: mol_type = other DNA
ggcgcgccagtcctgcccgcttagactgtgcagtggggcaaggatttcatgagcatcctcctctaaacgcgtgtcaagacaaaagatgcttcagctttggaaacttgttctcctgtgcttttcctcgcgaccgacctcagagtctcttcttgacaatcttggcaatgacctaagcaatgtcgtggatacgactcggaccgatg

SEQ ID NO: 10915 - DNA, 203 bp, synthetic construct
  source 1..203: mol_type = other DNA
ggcgcgccagtcctcgcaatcgagactgtgcagtggggcaaggatttcggtgctgcggatgcctaaacgcgtgtcaagacaaaagatgcttcagctttggaaacttgttctcctgtgcggcgtgctcactgggacctcagagtctcttcttgacaatcttggcaatgacctaagcaatgtcgtggatacgactcggaccgatg

SEQ ID NO: 10916 - DNA, 203 bp, synthetic construct
  source 1..203: mol_type = other DNA
ggcgcgccagtccttcaacctaagagaaagaaaggactctcagactgttggagcagaactactgagaaaaaccaggcattgtatcttcagttgtcatcaagttcgcaatcagattggaaaagctcaacttgaagctttcttgcctgcagtgaagcagagactgttcggccggatacgtaataaaaaaccgactcggaccgatg

SEQ ID NO: 10917 - DNA, 203 bp, synthetic construct
  source 1..203: mol_type = other DNA
ggcgcgccagtcctcttccctgagagaaagaaaggactctcagactgttggagcagaactactgagaaaaaccaggcattgtatcttcagttgtcatcaagttcgcaatcagattggaaaagctcaacttgaagctttcttgcctgcagtgaagcagagagatagatattattcacgtaataaaaaaccgactcggaccgatg

SEQ ID NO: 10918 - DNA, 203 bp, synthetic construct
  source 1..203: mol_type = other DNA
ggcgcgccagtcctcaagttgaagagaagagacttgtttggaaatatactgggcgtcactggttaacttaggattaaagacattgactagaaggtcaagaaaagggaactctataatttcaaaaatgttgagcctatttgatacatttaatgcacgtaggcaagaaaacataacaaaatcagccggtgcgactcggaccgatg

SEQ ID NO: 10919 - DNA, 203 bp, synthetic construct
  source 1..203: mol_type = other DNA
ggcgcgccagtcctatgacctaagagaccacagactttgagggaagctcactcaggatctgctctccggcaaagtagtaagtgaggtgctgagagcagaatgagctactttgtggattctgctgggagcagccccgtcccttactcagcgcctcgtcctgcagtggtgaggcaaaataggcatgttggcgactcggaccgatg

SEQ ID NO: 10920 - DNA, 203 bp, synthetic construct
  source 1..203: mol_type = other DNA
ggcgcgccagtcctgtctgagtagagaccacagactttgagggaagctcactcaggatctgctctccggcaaagtagtaagtgaggtgctgagagcagaatgagctactttgtggattctgctgggagcagccccgtcccttactcagcgcctcgtcctgcagtggtgaggcaaggacctagcaacaccgactcggaccgatg

SEQ ID NO: 10921 - DNA, 203 bp, synthetic construct
  source 1..203: mol_type = other DNA
ggcgcgccagtccttgtcccagagagaccacagactttgagggaagctcactcaggatctgctctccggcaaagtagtaagtgaggtgctgagagcagaatgagctactttgtggattctgctgggagcagccccgtcccttactcagcgcctcgtcctgggtactgcctcttcggacctagcaacaccgactcggaccgatg

SEQ ID NO: 10922 - DNA, 203 bp, synthetic construct
  source 1..203: mol_type = other DNA
ggcgcgccagtcctgcatgtcgagagaccacagactttgagggaagctcactcaggatctgctctccggcaaagtagtaagtgaggtgctgagagcagaatgagctactttgtggattctgctgggagcagccccgtcccttactctatatacacaagaacagtggtgaggcaaggacctagcaacaccgactcggaccgatg

SEQ ID NO: 10923 - DNA, 203 bp, synthetic construct
  source 1..203: mol_type = other DNA
ggcgcgccagtcctatctaacaagagaccacagactttgagggaagctcactcaggatctgctctccggcaaagtagtaagtgaggtgctttcgctgactgagactactttgtggattctgctgggagcagccccgtcccttactcagcgcctcgtcctgcagtggtgaggcaaggacctagcaacaccgactcggaccgatg

SEQ ID NO: 10924 - DNA, 203 bp, synthetic construct
  source 1..203: mol_type = other DNA
ggcgcgccagtcctttcgcgcgagagaccacagactttgagggaagctcactcaggatctgctctccggcaaagtatatttgacacgctggagagcagaatgagctactttgtggattctgctgggagcagccccgtcccttactcagcgcctcgtcctgcagtggtgaggcaaggacctagcaacaccgactcggaccgatg

SEQ ID NO: 10925 - DNA, 203 bp, synthetic construct
  source 1..203: mol_type = other DNA
ggcgcgccagtcctgcccttagagagaccacagactttgagggaagctttagacaacatatttctccggcaaagtagtaagtgaggtgctgagagcagaatgagctactttgtggattctgctgggagcagccccgtcccttactcagcgcctcgtcctgcagtggtgaggcaaggacctagcaacaccgactcggaccgatg

SEQ ID NO: 10926 - DNA, 203 bp, synthetic construct
  source 1..203: mol_type = other DNA
ggcgcgccagtcctgtctgcccagagaccacagatacctttcctcagacactcaggatctgctctccggcaaagtagtaagtgaggtgctgagagcagaatgagctactttgtggattctgctgggagcagccccgtcccttactcagcgcctcgtcctgcagtggtgaggcaaggacctagcaacaccgactcggaccgatg

SEQ ID NO: 10927 - DNA, 203 bp, synthetic construct
  source 1..203: mol_type = other DNA
ggcgcgccagtcctctgaagtcagagagaaaaaatactgttggcagcagcacaatgtttgggctaagacctggtcttgaaagcgccacaagcagcagctgctgagccatggctgaaggggaaatcaccaccttcacagccctgaccgagaagtttaatcttgggagccttccggacaagaagcccaaacgactcggaccgatg

SEQ ID NO: 10928 - DNA, 203 bp, synthetic construct
  source 1..203: mol_type = other DNA
ggcgcgccagtcctaacattggagagagaaaaaatactgttggcagcagcacaatgtttgggtatcagggaaaaagtgaaagcgccacaagcagcagctgctgagccatggctgaaggggaaatcaccaccttcacagccctgaccgagaagtttaatctgcctccagggaattacaagaagcccaaacgactcggaccgatg

SEQ ID NO: 10929 - DNA, 203 bp, synthetic construct
  source 1..203: mol_type = other DNA
ggcgcgccagtcctttattcggagagcgggagaacgcgtcctcgcccgaaccagcaatatggccggagctggcccatggggagcaggcgcccggtgccggccacgacgaccgccaccgcccgcgccgcgaccggccggtgaagcccagggacccccctctgggagagccccatgagggcaggagagtgcgactcggaccgatg

SEQ ID NO: 10930 - DNA, 203 bp, synthetic construct
  source 1..203: mol_type = other DNA
ggcgcgccagtcctctggataaagagctgggagaaggcagtgagcgagatacgcaactatggggtccgtgcggagcaggcgagcgagcgggaagacgcagccaccttcctcaccagccagcccacagcggtttgttccccttctcgggagtgcgccaatgcctgggccgacccaaaccctgtccccaacgactcggaccgatg

SEQ ID NO: 10931 - DNA, 203 bp, synthetic construct
  source 1..203: mol_type = other DNA
ggcgcgccagtccttctagcacagagctgggagaaggcagtgagcgagcaggcggcaggcagggtccgtgcggagcaggcgagcgagcgggaagacgcagccaccttcctcaccagccagcccacagcggttgcactgttcaagatggagtgcgccaatgcctgggccgacccaaaccctgtccccaacgactcggaccgatg

SEQ ID NO: 10932 - DNA, 203 bp, synthetic construct
  source 1..203: mol_type = other DNA
ggcgcgccagtcctgagcggcaagagctgggagaaggcagtgagcgagcaggcggcaggcagggtccgtgcggagcaggcgagcgagcgggaagacgcagccaccttcctcaccagccagcccacagcggtttgttccccttctcgggagtgcgccaatgcctgggccgacccattattaactatatgcgactcggaccgatg

SEQ ID NO: 10933 - DNA, 203 bp, synthetic construct
  source 1..203: mol_type = other DNA
ggcgcgccagtcctggcatgtcagagctgggagaaggcagtgagcgagcaggcggcaggcagggtccgtgcggagcaggcgagcgagcgggaagacgcagccaccttcctcaccagccagcccacagcggtttgttccccttctcgggagtgcgccaatgtaccacgtctgtagaaccctgtccccaacgactcggaccgatg

SEQ ID NO: 10934 - DNA, 203 bp, synthetic construct
  source 1..203: mol_type = other DNA
ggcgcgccagtcctttctaaacagagctgggagaaggcagtgagcgagcaggcggcaggcagggtccgtgcggagcaggcgagcgagcgggaagacgcagccaccttcctcaccagcctagagggtatctgatgttccccttctcgggagtgcgccaatgcctgggccgacccaaaccctgtccccaacgactcggaccgatg

SEQ ID NO: 10935 - DNA, 203 bp, synthetic construct
  source 1..203: mol_type = other DNA
ggcgcgccagtcctcttcatcaagagctgggagaaggcagtgagcgagcaggcggcaggcagggtccgtgcggagctcagacaaatagacgaagacgcagccaccttcctcaccagccagcccacagcggtttgttccccttctcgggagtgcgccaatgcctgggccgacccaaaccctgtccccaacgactcggaccgatg

SEQ ID NO: 10936 - DNA, 203 bp, synthetic construct
  source 1..203: mol_type = other DNA
ggcgcgccagtccttgtaattaagaggagcggcgctcaggttattccaggatctttggagacccgaggaaagccgtgttgaccaaaagcatccggcggacgcgccagagaaaaaagatggcagaaccaagggcaactaaagccgtcaggttctgaacagctggtagatgggctggcttactgaaggaccgactcggaccgatg

SEQ ID NO: 10937 - DNA, 203 bp, synthetic construct
  source 1..203: mol_type = other DNA
ggcgcgccagtccttcatagtgagaggagggaactgaatgacatcccaggattacataaactgtcagaggcagccgaagagttcacaagttacgcaagctctgtccggcgggtgccgctgtgtaggaaagaagctaaagcacttccagagcctgtccggagctcagaggttcggaagacttatcgacccgactcggaccgatg

SEQ ID NO: 10938 - DNA, 203 bp, synthetic construct
  source 1..203: mol_type = other DNA
ggcgcgccagtccttaacgcccagaggagggaactgaatgacatcccaggattacataaactgtcagaggcagccgttccagctttgctagtgaagcctggaagccggcgggtgccgctgtgtaggaaagaagctaaagcacttccagagcctgtccggagctcagaggttcggaagacttatcgacccgactcggaccgatg

SEQ ID NO: 10939 - DNA, 203 bp, synthetic construct
  source 1..203: mol_type = other DNA
ggcgcgccagtccttccgtaatagaggtctgaggtttcgagagtgactcccgttgtcccaaggcttcccagagcgaacctgtgcggctgcaggcaccggcgcgtcgagtttccggcgtccggaaggaccgagctcttctcgcggatccagtgttccgtttccagcccccaatctcagagcggagccgacgactcggaccgatg

SEQ ID NO: 10940 - DNA, 203 bp, synthetic construct
  source 1..203: mol_type = other DNA
ggcgcgccagtcctgcgggtggagagtaccggaaatccagattagagagcttaattagctctgtattaataataacactactattccaataactggaatcaccagcttgatttatctccaaaatgattcaaagaaaacaaatcatattaagactatcctaagcacgaacccatatcgtccttcaaatccgactcggaccgatg

SEQ ID NO: 10941 - DNA, 203 bp, synthetic construct
  source 1..203: mol_type = other DNA
ggcgcgccagtcctagtaaaccagatcagcgaattaaaatagtgattcaaaaatattttttaccgaaaggcctgcgctacgtgaaagtagtattcaaaataaaatcccgtgcggtcggaaacaaaaattaatttaaattttttaattccgaaacttaaaaccaagtttaaagaaaacttaaaatcaagcgactcggaccgatg

SEQ ID NO: 10942 - DNA, 203 bp, synthetic construct
  source 1..203: mol_type = other DNA
ggcgcgccagtcctttctggaaagcaacctatgagaatttcccctattccccctgatgcttccaggagaatcaacaatcagtccgattttaccggtggtaacttgattgaaattatagaaaaaataagcctagaaggatatcttacggtgatgtgcgggcacttcgaaaatagaattgatcagtaatccgactcggaccgatg

SEQ ID NO: 10943 - DNA, 203 bp, synthetic construct
  source 1..203: mol_type = other DNA
ggcgcgccagtcctcgtgtgccagcaacctatgagaatttcccctattccccctgatgcttccaggagaatcaacaatcagtccgattttaccggtggtaacttgattgaaattatagtttcttattctaaggaaggatatcttacttctcgacttcccaacttcgaaaatagaattgatcagtaatccgactcggaccgatg

SEQ ID NO: 10944 - DNA, 203 bp, synthetic construct
  source 1..203: mol_type = other DNA
ggcgcgccagtcctcggcagcgagcaatgaacgagattgctggtattactggccttggagaagaagcactatctctccaaagacaaacagaaagtttggccatattatgtaatcacacttttggaagtaatataatgagaccccaccgcatccttatcggaaaaggagttgaaggcagagttggagagcgactcggaccgatg

SEQ ID NO: 10945 - DNA, 203 bp, synthetic construct
  source 1..203: mol_type = other DNA
ggcgcgccagtccttcgtatgtagcagatgaggaagtggcaggcaggcaggctggccccggggacttctctctggccctgctccctccgagcgctccgccgttgcccgcctggcccctacggagtccttagccaggatggaggctgttgtgaacttgtaccaagaggtgatgaaatcacgcccgtaaacgactcggaccgatg

SEQ ID NO: 10946 - DNA, 203 bp, synthetic construct
  source 1..203: mol_type = other DNA
ggcgcgccagtccttcataaatagcagatgaggaagtggcaggcaggcaggctggccccggggacttctctctggccctgctccctccgagcgctccgccgttgcccgcctggcccctacggagtccttagccaggatggaggctgttgtgaacttgtaccaagaggtgatgaagcacgcagttcctgcgactcggaccgatg

SEQ ID NO: 10947 - DNA, 203 bp, synthetic construct
  source 1..203: mol_type = other DNA
ggcgcgccagtcctccttagagagcagctgatacccagggaggtgtcaggacctgcccggggcgcggggtcgccggaagccaggcgggagccccggctgctttcaaatggcagcacaccataagtgaccctccctgggctgctttctttcgattatcatcagtgaccctaccccggctgctcttcccacgactcggaccgatg

SEQ ID NO: 10948 - DNA, 203 bp, synthetic construct
  source 1..203: mol_type = other DNA
ggcgcgccagtcctcactttccagcagctgatacccagggaggtgtcaggacctgcccggggcgcggggtcgccggaagccaggcgggagccccggctgctttctggcaatctagtctcataagtgaccctccctgggctgctttctttcgattatcatcagtgaccctaccccggctgctcttcccacgactcggaccgatg

SEQ ID NO: 10949 - DNA, 203 bp, synthetic construct
  source 1..203: mol_type = other DNA
ggcgcgccagtccttggccctaagcagctgatacccagggaggtgtcaggacctgcccggggcgcggggtcgccggaagccaggcgggagccccggctgctttctggcaatctagtctcataagtgaccctcgagacatacaggcatttcgattatcatcagtgaccctaccccggctgctcttcccacgactcggaccgatg

SEQ ID NO: 10950 - DNA, 203 bp, synthetic construct
  source 1..203: mol_type = other DNA
ggcgcgccagtcctctggaaggagcagctgatacccagggaggtgtcaggacctgcccggggcgcggggtcgccggcccttttaaactgcccccggctgctttctggcaatctagtctcataagtgaccctccctgggctgctttctttcgattatcatcagtgaccctaccccggctgctcttcccacgactcggaccgatg

SEQ ID NO: 10951 - DNA, 203 bp, synthetic construct
  source 1..203: mol_type = other DNA
ggcgcgccagtccttttgagtgagcatgacgtaccaaacaggcacgagataagtcccggacatgatggcacatggaatgacaatcagctacaagaaatggcccaactgaggattaagcaccaagaggaactgactgaattacacaaccgtacctaccgtatcaactggtgattgacctgaataaccaacgactcggaccgatg

SEQ ID NO: 10952 - DNA, 203 bp, synthetic construct
  source 1..203: mol_type = other DNA
ggcgcgccagtcctgaattaatagccagagggcagtgtgtcgtaacggtacggatcaacctcgaaccgactactttgggtgtccgtgtttcattttattcctatactggctgcttatggtgacaattgagagattgttaccatatagctattggattggccatccggtgaccaatagagctattatatcgactcggaccgatg

SEQ ID NO: 10953 - DNA, 203 bp, synthetic construct
  source 1..203: mol_type = other DNA
ggcgcgccagtcctccgtccgcagccagccactggagtcgcagcccgcctcggccgccgcgggagcggttcgagttgggagacggccggaagccagtaaaagaagagaaaatggaagaaagggacctgctgtccgacttacaggacatcagcgacagcgagaggaagaccagctcggccgagtcctcgcgactcggaccgatg

SEQ ID NO: 10954 - DNA, 203 bp, synthetic construct
  source 1..203: mol_type = other DNA
ggcgcgccagtcctgtataagaagccagccactggagtcgcagcccgcctcggccgccgcggtgtgaaagtcgagagggagacggccggaagccagtaaaagaagagaaaatggaagaaagggacctgctgtccgacttacaggacatcagcgacagcgagaggaagaccagctcggccgagtcctcgcgactcggaccgatg

SEQ ID NO: 10955 - DNA, 203 bp, synthetic construct
  source 1..203: mol_type = other DNA
ggcgcgccagtccttggtggttagccagccactggagtcgcagcccgcgagccaataaatttgagcggttcgagttgggagacggccggaagccagtaaaagaagagaaaatggaagaaagggacctgctgtccgacttacaggacatcagcgacagcgagaggaagaccagctcggccgagtcctcgcgactcggaccgatg

SEQ ID NO: 10956 - DNA, 203 bp, synthetic construct
  source 1..203: mol_type = other DNA
ggcgcgccagtcctaacgttcaagcccaaccggctaaccgatgacagaccgtggcaaggaggtgtacagccctgactttcatagcctcggaggagaaggtcttggtggccgacaagtctggagacgtctactccttttcggtgctggagccacacgggtgtggccgtctagagctggggcacctgtctcgactcggaccgatg

SEQ ID NO: 10957 - DNA, 203 bp, synthetic construct
  source 1..203: mol_type = other DNA
ggcgcgccagtcctcagacgtgagcccgatcgtagttccgcgtgattgaagacaccccctcgtccaagaatgcaaagcacatccaataaaatagctggattataactcctcttctttctctgggggccgtggggtgggagctggggcgagaggtgccgttggcccccgttgcttttcctctgggaaggcgactcggaccgatg

SEQ ID NO: 10958 - DNA, 203 bp, synthetic construct
  source 1..203: mol_type = other DNA
ggcgcgccagtcctagtaaggtagccggcgcatcaatcatgcaaaatcactattttgtactactaactcattaagaaaaacttaggatccaagagatttactctaggatctcctattaagcttagcagtcattagttgagagttcaacttgcaaaactctaaccttcactctaataacaattcatccacgactcggaccgatg

SEQ ID NO: 10959 - DNA, 203 bp, synthetic construct
  source 1..203: mol_type = other DNA
ggcgcgccagtcctgagacgaaagcgccactctgctggctgaggctgcggagagtgtgcggcgaggccgcccacagcgcggtcgtgatgtctcgggagtcggatgttgaggctcagcagtctcatggcagcagtgcctgttcacagccccatggcagcgttacccagtcccaaggctcctcctcacagcgactcggaccgatg

SEQ ID NO: 10960 - DNA, 203 bp, synthetic construct
  source 1..203: mol_type = other DNA
ggcgcgccagtcctaagcctcgagcgccactctgctggctgaggctgcggagagtgtgcggctccaggtgggctcacgcggtcgtgatgtctcgggagtcggataggatattggctatgtctcatggcagcagtgcctgttcacagccccatggcagcgttacccagtcccaaggctcctcctcacagcgactcggaccgatg

SEQ ID NO: 10961 - DNA, 203 bp, synthetic construct
  source 1..203: mol_type = other DNA
ggcgcgccagtcctcgtagggcagcgccactctgctggctgaggctgcggagagtgtgcggctccaggtgggctcacgcggtcgtgatgtctcgggagtcggatgttgaggctcagcagtctcatggcagcagtgcctgttcacagattataattgttcgtacccagtcccaaggctcctcctcacagcgactcggaccgatg

SEQ ID NO: 10962 - DNA, 203 bp, synthetic construct
  source 1..203: mol_type = other DNA
ggcgcgccagtcctagggagtcagcgccactctgctggctgaggctgcggagagtgtgcggctccaggtgggctcacgcggtcgtgatgtctcgggagtcggatgttgaggctcagcagtctcatggcagcagtgcctgttcacagccccatggcagcgtccaagtcgagatgagctcctcctcacagcgactcggaccgatg

SEQ ID NO: 10963 - DNA, 203 bp, synthetic construct
  source 1..203: mol_type = other DNA
ggcgcgccagtcctgttggcatagcgccactctgctggctgaggctgcggagagtgtgcggctccaggtgggctcacgcggtcgtgatgtctcgggagtcggatgttgaggctcagcagtctcatggcagcagtgcctgttcacagccccatggcagcgttacccagtcccaaggctcctcctcacagcgactcggaccgatg

SEQ ID NO: 10964 - DNA, 203 bp, synthetic construct
  source 1..203: mol_type = other DNA
ggcgcgccagtccttctggagcagcgccactctgctggctgaggctgcggagagtgtgcggctccaggtgggctcacgcggtcgtgatgtctcgggagtcggatgttgaggctcagcagtctcatggcagcagtgcctgttcacagccccatggcagcgttacccagtcccaagttctggtactcggtcgactcggaccgatg

SEQ ID NO: 10965 - DNA, 203 bp, synthetic construct
  source 1..203: mol_type = other DNA
ggcgcgccagtcctgtaagacaagcgccactctgctggctgaggctgcggagagtgtgcggctccaggtgggctcacgcggtcgtgatgtgcattctactcagggttgaggctcagcagtctcatggcagcagtgcctgttcacagccccatggcagcgttacccagtcccaaggctcctcctcacagcgactcggaccgatg

SEQ ID NO: 10966 - DNA, 203 bp, synthetic construct
  source 1..203: mol_type = other DNA
ggcgcgccagtccttccgcgaaagcgccagtttcgcgctgagctgcaggcgcggcgaaacttccctctacccgcccggcccgcggcgcgcaccgttggcgctggacgcttcctccttggaagcgcctctccctcagttatggagaaaacttgtatagatgcacttcctcttactatgaattcttcagacgactcggaccgatg

SEQ ID NO: 10967 - DNA, 203 bp, synthetic construct
  source 1..203: mol_type = other DNA
ggcgcgccagtcctacagccaaagcgcggccgttcttacgctccgatggtcgggggaggacaacaaagggccgcgggcggcgggcagtggtgtcccagtctcccggtgcttccctgaggctgaggcgcccggcctcccgcccgccgcgctccagatgaagtgtgagcactgcacgcgcaaggaatgtacgactcggaccgatg

SEQ ID NO: 10968 - DNA, 203 bp, synthetic construct
  source 1..203: mol_type = other DNA
ggcgcgccagtcctgaagttacagcgcggccgttgggggtgaggccgcagacacaacatcagacaaagggccgcgggcggcgggcagtggtgtcccagtctcccggtgcttccctgaggctgaggcgcccggcctcccgcccgccgcgctccagatgaagtgtgagcactgcacgcgcaaggaatgtacgactcggaccgatg

SEQ ID NO: 10969 - DNA, 203 bp, synthetic construct
  source 1..203: mol_type = other DNA
ggcgcgccagtccttagaactaagcgcggccgttgggggtgaggccgcgtcgggggaggacaacaaagggccgcgggcggcgggcagtgggccgagcaggcggtggtgcttccctgaggctgaggcgcccggcctcccgcccgccgcgctccagatgaagtgtgagcactgcacgcgcaaggaatgtacgactcggaccgatg

SEQ ID NO: 10970 - DNA, 203 bp, synthetic construct
  source 1..203: mol_type = other DNA
ggcgcgccagtcctcttaccgtagcgcggccgttgggggtgaggccgcgtcgggggaggacaacaaagggccgcgggcggcgggcagtggtgtcccagtctcccaccctaattaccctgctgaggcgcccggcctcccgcccgccgcgctccagatgaagtgtgagcactgcacgcgcaaggaatgtacgactcggaccgatg

SEQ ID NO: 10971 - DNA, 203 bp, synthetic construct
  source 1..203: mol_type = other DNA
ggcgcgccagtcctataagttgagcgcggccgttgggggtgaggccgcgtcgggggaggacaacaaagggccgcgggcggcgggcagtggtgtcccagtctcccggtgcttccctgaggctgaggcgcccggcctcccgcccgccgcgctccagatgaagtgtgagcactgcactaatttacccacatcgactcggaccgatg

SEQ ID NO: 10972 - DNA, 203 bp, synthetic construct
  source 1..203: mol_type = other DNA
ggcgcgccagtccttgagtgatagcgcggccgttgggggtgaggccgcgtcgggggaggacactcgcctaggatccgcggcgggcagtggtgtcccagtctcccggtgcttccctgaggctgaggcgcccggcctcccgcccgccgcgctccagatgaagtgtgagcactgcacgcgcaaggaatgtacgactcggaccgatg

SEQ ID NO: 10973 - DNA, 203 bp, synthetic construct
  source 1..203: mol_type = other DNA
ggcgcgccagtcctaccatcaaagcggagcctggaggccaggtctctgcctcggaagtgagtctggtctgtgggagcccctgcctgtcccctcctgggtcactggtgtttgaggattttgctaacctgacgccctttgtcaaggaagagctgaggtttgccatccagaacaagcacctctgccaccggcgactcggaccgatg

SEQ ID NO: 10974 - DNA, 203 bp, synthetic construct
  source 1..203: mol_type = other DNA
ggcgcgccagtcctggagactaagcggagcctggaggccaggtctctgcctcggaagtgagtgcttctgccatcgtcccctgcctgtcccctcctgggtcactgcgaaccttttcgcgtgctaacctgacgccctttgtcaaggaagagctgaggtttgccatccagaacaagcacctctgccaccggcgactcggaccgatg

SEQ ID NO: 10975 - DNA, 203 bp, synthetic construct
  source 1..203: mol_type = other DNA
ggcgcgccagtcctcttatgtgagcggagcctggaggccaggtctctgcctcggaagtgagtgcttctgccatcgtcccctgcctgtcccctcctgggtcactggtgtttgaggattttgctaacctgacgcaaaggtggggtcctgagctgaggtttgccatccagaacaagcacctctgccaccggcgactcggaccgatg

SEQ ID NO: 10976 - DNA, 203 bp, synthetic construct
  source 1..203: mol_type = other DNA
ggcgcgccagtccttaaacaatagcggagcctggaggccaggtctctgcctcggaagtgagtgcttctgccatcgtcccctgcctgtcccctcctgggtcactggtgtttgaggattttgctaacctgacgccctttgtcaaggaagagctgaggtttgccatccagaacaagcacctctgccaccggcgactcggaccgatg

SEQ ID NO: 10977 - DNA, 203 bp, synthetic construct
  source 1..203: mol_type = other DNA
ggcgcgccagtcctaatcgtgtagcggagcctggaggccaggtctctgcctcggaagtgagtgcttctgccatcgtcccctgcctgtcccctcctgggtcactggtgtttgaggattttgctaacctgacgccctttgtcaaggaagagctgaggtttgctcagtgaccagcttacctctgccaccggcgactcggaccgatg

SEQ ID NO: 10978 - DNA, 203 bp, synthetic construct
  source 1..203: mol_type = other DNA
ggcgcgccagtcctcctaaaggagcggagcctggaggccaggtctctgttgattgcaatcacgcttctgccatcgtcccctgcctgtcccctcctgggtcactggtgtttgaggattttgctaacctgacgccctttgtcaaggaagagctgaggtttgccatccagaacaagcacctctgccaccggcgactcggaccgatg

SEQ ID NO: 10979 - DNA, 203 bp, synthetic construct
  source 1..203: mol_type = other DNA
ggcgcgccagtcctagcccagaagcggagcctgggtagatcaggctctcctcggaagtgagtgcttctgccatcgtcccctgcctgtcccctcctgggtcactggtgtttgaggattttgctaacctgacgccctttgtcaaggaagagctgaggtttgccatccagaacaagcacctctgccaccggcgactcggaccgatg

SEQ ID NO: 10980 - DNA, 203 bp, synthetic construct
  source 1..203: mol_type = other DNA
ggcgcgccagtcctggagtagtagcggccacatcgtcccctcctcggagtcattttttcctgttccccctctgccgccctttcctcacgccccgggtgaggcaattctcttggaagcgaaggtgtcggctatgagccggagcctccttccttgaatttctccgtggaggacccgccgcgccccccggccgactcggaccgatg

SEQ ID NO: 10981 - DNA, 203 bp, synthetic construct
  source 1..203: mol_type = other DNA
ggcgcgccagtcctctgtgaagagcggcgggtcacgtgacgcggtgccacagtgatgataggccaagatggcggtgtgcatcgcggtgattgccaaggagaattaccccctctacattcgcagcacccctacggagaacgagctgaagttccactacatggtgcacacatctctggacgtggtggatgcgactcggaccgatg

SEQ ID NO: 10982 - DNA, 203 bp, synthetic construct
  source 1..203: mol_type = other DNA
ggcgcgccagtcctagtgctgcagcggcgggtcacgtgacgcggtgcctggcgccgagcctcccaagatggcggtgtgcatcgcggtgattgccaaggagaattaccccctctacattcgcagcacccctacaccacgacgtgaacagttccactacatggtgcacacatctctggacgtggtggatgcgactcggaccgatg

SEQ ID NO: 10983 - DNA, 203 bp, synthetic construct
  source 1..203: mol_type = other DNA
ggcgcgccagtcctattcacccagcggcgggtcacgtgacgcggtgcctggcgccgagcctcccaagatggcggtgtgcatcgcggtgattgccaaggagaattaccccctctacattcgcagcacccctacggagaacgagctgaagttccactacatggtgcacacatctctggacgtggtggatgcgactcggaccgatg

SEQ ID NO: 10984 - DNA, 203 bp, synthetic construct
  source 1..203: mol_type = other DNA
ggcgcgccagtcctcttccactagcggcgggtcacgtgacgcggtgcctggcgccgagcctcccaagatggcggtgtgcatcgcggtgattgccaaggagaattaccccctctacattcgcagcacccctacggagaacgagctgagagaaactacaccagtgcacacatctctggacgtggtggatgcgactcggaccgatg

SEQ ID NO: 10985 - DNA, 203 bp, synthetic construct
  source 1..203: mol_type = other DNA
ggcgcgccagtcctaggtattgagcggcgggtcacgtgacgcggtgcctggcgccgagcctcccaagatggcggtgtgcatcgcggtgattgccaaggagaattaccccctctacattgtacctgatttacaggagaacgagctgaagttccactacatggtgcacacatctctggacgtggtggatgcgactcggaccgatg

SEQ ID NO: 10986 - DNA, 203 bp, synthetic construct
  source 1..203: mol_type = other DNA
ggcgcgccagtcctacatggagagctgcaacccagcagccagcctgtcgtaacgcgcaagtccgtggcggaaccgaaagaggatacccctcgtgtttccttttattcttgaatggctgcttatggtgacaatcatagattgttatcataaagcgagttggattggccatccagtgtgaatcagattaacgactcggaccgatg

SEQ ID NO: 10987 - DNA, 203 bp, synthetic construct
  source 1..203: mol_type = other DNA
ggcgcgccagtcctacggattaagctgcaacccagcagccagcctgtcgtaacgcgcaagtccgtggcggaaccgactactttgggtgtccgtgtttccttttattcttgaatggctgcttatggtgacaatcatagattgttatcataaagcgagttggattggccatccagtcgattcttagcattcgactcggaccgatg

SEQ ID NO: 10988 - DNA, 203 bp, synthetic construct
  source 1..203: mol_type = other DNA
ggcgcgccagtcctagctggatagctgcaacccagcagccagcctgtcgtaacgcgcaagtccgtggcggaaccgactactttgggtgtccgtgtttccttttattcttgaatggctgcttatggtgacaatttgtctagtaccggataaagcgagttggattggccatccagtgtgaatcagattaacgactcggaccgatg

SEQ ID NO: 10989 - DNA, 203 bp, synthetic construct
  source 1..203: mol_type = other DNA
ggcgcgccagtcctgacagaagagctgcaacccagcagccagcctgtcgtaacgcgcaagtccgtggcggaaccgactactttgggtgtctcatcacgaaggggttcttgaatggctgcttatggtgacaatcatagattgttatcataaagcgagttggattggccatccagtgtgaatcagattaacgactcggaccgatg

SEQ ID NO: 10990 - DNA, 203 bp, synthetic construct
  source 1..203: mol_type = other DNA
ggcgcgccagtcctcgtagcctagctggtgtctgagggattacgactcgcgtggtcggacagcacatgttagtcatgtattatggtgtttcccaacacgtatctttgctctagtattgaactttagtgatgacatcctacttgtgctacacctgattagttagcccttgtggatacgccactgccgctcgactcggaccgatg

SEQ ID NO: 10991 - DNA, 203 bp, synthetic construct
  source 1..203: mol_type = other DNA
ggcgcgccagtcctaccggcagagctggtgtctgagggattacgactcgcgtggtcggacagcacatgttagtcatgtattatggtgtttcccaacacgtatctttgctctagtattgaactttagtgatgagtgtacttggcatgtacacctgattagtatatagagtaatcgacgccactgccgctcgactcggaccgatg

SEQ ID NO: 10992 - DNA, 203 bp, synthetic construct
  source 1..203: mol_type = other DNA
ggcgcgccagtcctagtgggacagctggtgtctgagggattacgactcgcgtggtcggacagcacatgttagtcatgtattatggtgtttcccaacacgtatctttgctctagtattgaactttagtgatgagtgtacttggcatgtacacctgattagttagcccttgtggatggtgattactgtaccgactcggaccgatg

SEQ ID NO: 10993 - DNA, 203 bp, synthetic construct
  source 1..203: mol_type = other DNA
ggcgcgccagtccttatacgtaagctggtgtctgccatgaacacttctgcgtggtcggacagcacatgttagtcatgtattatggtgtttcccaacacgtatctttgctctagtattgaactttagtgatgagtgtacttggcatgtacacctgattagttagcccttgtggatacgccactgccgctcgactcggaccgatg

SEQ ID NO: 10994 - DNA, 203 bp, synthetic construct
  source 1..203: mol_type = other DNA
ggcgcgccagtcctacaagaatagctttttttccccgtcctgcagcaagtccggaagaaggtccgggggctggagtcctgggacctagctcgggaccggcctggagatggagttcgactgcgagggcctgagacggctgcttggcaagtacaagttcagggacctaactgtggaagaactaaggaatgcgactcggaccgatg

SEQ ID NO: 10995 - DNA, 203 bp, synthetic construct
  source 1..203: mol_type = other DNA
ggcgcgccagtcctcgccggtcaggacacaacataccgatatgttataagaatccttgtgtgtagatctttggtggcagtttgaaaattgcaaggagggactttaagactacttctgatttgcaaagattgtctgtgctctgagcaggctgaagtgactggacgagacgcactgttggagaaataaaacgactcggaccgatg

SEQ ID NO: 10996 - DNA, 203 bp, synthetic construct
  source 1..203: mol_type = other DNA
ggcgcgccagtcctgactagggaggacacaacatcagagggacggcagagaatccttgtgtgcgatgggagatgctcagtttgaaaattgcaaggagggactttaagactacttctgatttgcaaagattgtctgtgctctgagcaggctgaagtgactggacgagacgcactgttggagaaataaaacgactcggaccgatg

SEQ ID NO: 10997 - DNA, 203 bp, synthetic construct
  source 1..203: mol_type = other DNA
ggcgcgccagtcctggctcctgaggacacaacatcagagggacggcagagaatccttgtgtgtagatctttggtggcagtttgaaaattgcaaggagggactttaagactacttctgagaacagccacgctgctgtgctctgagcaggctgaagtgactggacgagacgcactgttggagaaataaaacgactcggaccgatg

SEQ ID NO: 10998 - DNA, 203 bp, synthetic construct
  source 1..203: mol_type = other DNA
ggcgcgccagtcctcgtcgtcgaggacacaacatcagagggacggcagagaatccttgtgtgtagatctttggtggcagtttgaaaattgcaaggagggactttaagactacttctgatttgcaaagattgtctgtgctctgagcaggctgaagtgactggacgagacgcactgcacctaggtccgttcgactcggaccgatg

SEQ ID NO: 10999 - DNA, 203 bp, synthetic construct
  source 1..203: mol_type = other DNA
ggcgcgccagtcctccttatctaggacacaacatcagagggacggcaggatgatgcccgcaatagatctttggtggcagtttgaaaattgcaaggagggactttaagactacttctgatttgcaaagattgtctgtgctctgagcaggctgaagtgactggacgagacgcactgttggagaaataaaacgactcggaccgatg

SEQ ID NO: 11000 - DNA, 203 bp, synthetic construct
  source 1..203: mol_type = other DNA
ggcgcgccagtcctatccgcgtaggacagtcagaacttccagagctccactgcctccctgcaccatgccctacaacttctgcctgcccagcctgagctgccgcaccagctgctcctcccggccctgtgtgccccccagctgccacggctacaccctgcccggggcctgcaacatccctgccaatgtgacgactcggaccgatg

SEQ ID NO: 11001 - DNA, 203 bp, synthetic construct
  source 1..203: mol_type = other DNA
ggcgcgccagtcctgggtagaaaggacgaccgggtcctttccattggatcaaacccgctcaagatacttgttcaaaggcgtgcccccgcaagactgctagccgagtagcgttgggttgcgaaaggccttgtggtactgcctgatagggtgcttgcgagtgccccgggaggtctcgtagaccgtgcaaccgactcggaccgatg

SEQ ID NO: 11002 - DNA, 203 bp, synthetic construct
  source 1..203: mol_type = other DNA
ggcgcgccagtcctgaggttcgaggacgaccgggtcctttccattggatcaaacccgctcaatgcctggagatttgaaacgttaaaacgcagactgctagccgagtagcgttgggttgcgaaaggccttgtggtactgcctgatagggtgcttgcgagtgccccgggaggtctcgtagaccgtgcaaccgactcggaccgatg

SEQ ID NO: 11003 - DNA, 203 bp, synthetic construct
  source 1..203: mol_type = other DNA
ggcgcgccagtcctgggctgataggacgaccgggtcctttccattggatcaaacccgctcaatgcctggagatttgggcgtgcccccgcaagactgctagccgagtagcgttgggttgcgaaaggccttgtgaatggtgaaccattggtgcttgcgagtgccccgggaggtctcgtagaccgtgcaaccgactcggaccgatg

SEQ ID NO: 11004 - DNA, 203 bp, synthetic construct
  source 1..203: mol_type = other DNA
ggcgcgccagtcctaagatcacaggacgaccgggtcctttccattggatcaaacccgctcaatgcctggagatttgggcgtgcccccgcaagactgctagccgagtagcgttgggttggtctgactaaccacgtactgcctgatagggtgcttgcgagtgccccgggaggtctcgtagaccgtgcaaccgactcggaccgatg

SEQ ID NO: 11005 - DNA, 203 bp, synthetic construct
  source 1..203: mol_type = other DNA
ggcgcgccagtccttgaccattaggactcactctcgacaaagacagattctttgagggagctaagctcaacgtagttctaacagttttttaattagagagcagatctctgatgaataaccaacggaaaaaggcgaaaaacacgcctttcaatatgctgaaacgcgagagaaaccgcgtgtcgactgtgcgactcggaccgatg

SEQ ID NO: 11006 - DNA, 203 bp, synthetic construct
  source 1..203: mol_type = other DNA
ggcgcgccagtcctctcgaattaggaggctgactccccaagtcctgcaaaggggtgcaagcctagttccaaccctgccgggctgaggcatgagtaggggctgtagcctacgcggttgcggcccccaaagcttccactcgctgccttaaaacgccaacccagcctctcagacaatgctgccctcccactcgactcggaccgatg

SEQ ID NO: 11007 - DNA, 203 bp, synthetic construct
  source 1..203: mol_type = other DNA
ggcgcgccagtcctttgcgtgtaggaggctgactccccaagtcctgcaaaggggtgcaagcctagttccaaccctgccgggctgaggcatgagtaggggctgtatttgcgtgcaggcgggcccccaaagcttccactcgctgccttaaaacgccaacccaatgctaggcgactagctgccctcccactcgactcggaccgatg

SEQ ID NO: 11008 - DNA, 203 bp, synthetic construct
  source 1..203: mol_type = other DNA
ggcgcgccagtcctaggatagaaggaggctgactccccaagtcctgcaaaggggtgcaagcctagttccaaccctgccgggctgaggcatgagtaggggctgtatttgcgtgcaggcgggcccccaaagcttccactcgctgccttaaaacgccaacccagcctctcagacaatgctgccctcccactcgactcggaccgatg

SEQ ID NO: 11009 - DNA, 203 bp, synthetic construct
  source 1..203: mol_type = other DNA
ggcgcgccagtcctccttcctaaggaggctgactccccaagtcctgcaaaggggtgcaagcctagttccaaccctgccgggctgaggcatgagtaggggctgtatttgcgtgcaggcgggcccccaaagcttgtcagataacggggaaaacgccaacccagcctctcagacaatgctgccctcccactcgactcggaccgatg

SEQ ID NO: 11010 - DNA, 203 bp, synthetic construct
  source 1..203: mol_type = other DNA
ggcgcgccagtcctatatgaacaggaggctgactccccaagtcctgcaaaggggtgcaagcctagttccaaccctgccgggctgaggcatgagtaggggctgtatttgcgtgcaggcgtcttgttcttatagccactcgctgccttaaaacgccaacccagcctctcagacaatgctgccctcccactcgactcggaccgatg

SEQ ID NO: 11011 - DNA, 203 bp, synthetic construct
  source 1..203: mol_type = other DNA
ggcgcgccagtcctcgtgacgaaggaggctgactccccaagtcctgcactcccagttggcggtagttccaaccctgccgggctgaggcatgagtaggggctgtatttgcgtgcaggcgggcccccaaagcttccactcgctgccttaaaacgccaacccagcctctcagacaatgctgccctcccactcgactcggaccgatg

SEQ ID NO: 11012 - DNA, 203 bp, synthetic construct
  source 1..203: mol_type = other DNA
ggcgcgccagtcctctgtttgaaggaggctgacttgtgcgactactggaaggggtgcaagcctagttccaaccctgccgggctgaggcatgagtaggggctgtatttgcgtgcaggcgggcccccaaagcttccactcgctgccttaaaacgccaacccagcctctcagacaatgctgccctcccactcgactcggaccgatg

SEQ ID NO: 11013 - DNA, 203 bp, synthetic construct
  source 1..203: mol_type = other DNA
ggcgcgccagtcctactgtcgcaggatgctctcgcaaaagacaactcacaatctccctaaaacagcaacgacaccatgtcagctttgctcaaatctctctgggagaaacttttgcccacatactaacaacatcacaaccatctcaagaaaagaaactgggcaaaacagcatccaagagacaaatagcacgactcggaccgatg

SEQ ID NO: 11014 - DNA, 203 bp, synthetic construct
  source 1..203: mol_type = other DNA
ggcgcgccagtcctgcctaagcaggatggcgcggcacgggccgtgcggggcccgaaccagtaagggaaccgccggctcgcgccctccgttctttcccggagccggcttcacgcagggccgggaacggccgtgcctctgggatccgccttcgctgacgccgggcacctacctggacgcgagcgagcgagcgactcggaccgatg

SEQ ID NO: 11015 - DNA, 203 bp, synthetic construct
  source 1..203: mol_type = other DNA
ggcgcgccagtccttcaactggaggcaaaatttgcacagtataaaatcatgggtcgaacggcttgttggaatcaccgtacctatttaggtttacgctccaagatcggtggatagcagccctatcaatatctaggagaactgtgctatgtttagaagattaggtagtctctaaacagaacaatttacctcgactcggaccgatg

SEQ ID NO: 11016 - DNA, 203 bp, synthetic construct
  source 1..203: mol_type = other DNA
ggcgcgccagtcctccaaccagaggcaaaatttgcacagtataaaatctgcaagtagtgctattgttggaatcaccgtacctatttaggtttacgctccaagatcggtggatagcagccctatcaatatctaggagaactgtgctatgtttagaagattaaagtcgagggcgcgagaacaatttacctcgactcggaccgatg

SEQ ID NO: 11017 - DNA, 203 bp, synthetic construct
  source 1..203: mol_type = other DNA
ggcgcgccagtcctctgtcagtaggcaaaatttgtcttcgtgggccgatgcaagtagtgctattgttggaatcaccgtacctatttaggtttacgctccaagatcggtggatagcagccctatcaatatctaggagaactgtgctatgtttagaagattaggtagtctctaaacagaacaatttacctcgactcggaccgatg

SEQ ID NO: 11018 - DNA, 203 bp, synthetic construct
  source 1..203: mol_type = other DNA
ggcgcgccagtcctaagaggataggcgaaggtttctggtgcttagtaaccgactttcctccggactcctgcacgacctgctcctacagccggcgatccactcccggctgttcccccggagggtccagaggcctttcagaaggagaaggcagctctgtttctctgcagaggagtagggtcctttcagcccgactcggaccgatg

SEQ ID NO: 11019 - DNA, 203 bp, synthetic construct
  source 1..203: mol_type = other DNA
ggcgcgccagtcctgagcgcacaggcgcaagcgcgcacagactgtagccatccgaggacacccccgcccccccggcgtcatgaacctactccgcgcagaatcgcctccggatcccctgcagtcggcgggagtgttggaggtcggcgccggcccccgccttccgcgccccccacgggaaggaagcaccccgactcggaccgatg

SEQ ID NO: 11020 - DNA, 203 bp, synthetic construct
  source 1..203: mol_type = other DNA
ggcgcgccagtcctccaggctaaggcgcaagcgcgcacagactgtagccatccgaggacaccgttaaaaaagactgccacccggagacacccgcgcagaatcgcctccggatcccctgcagtcggcgggagtgttggaggtcggcgccggcccccgccttccgcgccccccacgggaaggaagcaccccgactcggaccgatg

SEQ ID NO: 11021 - DNA, 203 bp, synthetic construct
  source 1..203: mol_type = other DNA
ggcgcgccagtcctacgtcaggaggcgcaagcgcgcacagactgtagctgaggccatttttgcccgcccccccggcccacccggagacacccgcgcagaatcgcctccggatcccctgcagtcggcgggagtgttggaggtcggcgccggcccccgccttccgcgccccccacgggaaggaagcaccccgactcggaccgatg

SEQ ID NO: 11022 - DNA, 203 bp, synthetic construct
  source 1..203: mol_type = other DNA
ggcgcgccagtcctcgtggaagaggcgccgggaagtcgacggcgccggataggatgctgtagggccactgtctgcagctcccgtgaagatgtccactccagacccacccctgggcggaactcctcggccaggtccttccccgggccctggcccttcccctggagccatgctgggccctagcccgggtccgactcggaccgatg

SEQ ID NO: 11023 - DNA, 203 bp, synthetic construct
  source 1..203: mol_type = other DNA
ggcgcgccagtcctctcagctgaggcgccgggaagtcgacggcgccggcggctcctgcaggaggccactgtctgcagctcccgtgaagatgtccactccagacccacccctgggcggaactcctcggccagggttcggagtcaaaactggcccttcccctggagccatgctgggccctagcccgggtccgactcggaccgatg

SEQ ID NO: 11024 - DNA, 203 bp, synthetic construct
  source 1..203: mol_type = other DNA
ggcgcgccagtcctgagaccggaggcgccgggaagtcgacggcgccggcggctcctgcaggaggccactgtctgcagctcccgtgaagatgtccactccagacccacccctgggcggaactcctcggccaggtccttccccgggcctacattgaatagaaggagccatgctgggccctagcccgggtccgactcggaccgatg

SEQ ID NO: 11025 - DNA, 203 bp, synthetic construct
  source 1..203: mol_type = other DNA
ggcgcgccagtcctggcggctcaggcgtaattgcccggacagcaccccctcccttctccggtagctcctacccctgcctgtgcgggcctcgtccccgcgcccagccctcggtgctgcctccgacagcgccgcgctctctcagccgcccccctgcccctcgggcccccctctctgctgcccctggcgcccgactcggaccgatg

SEQ ID NO: 11026 - DNA, 203 bp, synthetic construct
  source 1..203: mol_type = other DNA
ggcgcgccagtcctattcgtagagggaccgtccacaacccggtcacctacccgcgcgactgtgtccacggatggcacgaaagccaagcgagtccccctgccgagctactcgcgtccgcctcctcccaagctgagctctgctccgcccacctgagtccttcgccagttaggaggaaacacagccgcttacgactcggaccgatg

SEQ ID NO: 11027 - DNA, 203 bp, synthetic construct
  source 1..203: mol_type = other DNA
ggcgcgccagtcctgtaccgttagggagaatatggatacgttaaaatatataacgtatttttaaaacttaggaaccaagacaaacacttttggtcttggtattgcgagacgcgcgctaatatcatcatgagtgatatctttgaagaggcggctagttttaggagttatcaatctaagttagggagagacgactcggaccgatg

SEQ ID NO: 11028 - DNA, 203 bp, synthetic construct
  source 1..203: mol_type = other DNA
ggcgcgccagtcctaaagacgaagggagcaggagagagaggacaagtggatccaacagccttcgctccaggggaatacttttgcatatcacttttctgggaggacactcccttctgatggtgaatgggaactcccttcctcctgcagcagcctgcctgcagctgtcctggtagaacagtgtggacattcgactcggaccgatg

SEQ ID NO: 11029 - DNA, 203 bp, synthetic construct
  source 1..203: mol_type = other DNA
ggcgcgccagtcctgctattggagggagcaggagagagaggacaagtggatccaacagccttcgctccaggggaatcagggcatcgcctccttttctgggaggacactcccttctgatacgcctcaaatgagcccttcctcctgcagcagcctgcctgcagctgtcctggtagaacagtgtggacattcgactcggaccgatg

SEQ ID NO: 11030 - DNA, 203 bp, synthetic construct
  source 1..203: mol_type = other DNA
ggcgcgccagtcctcgcaagttagggagcaggagagagaggacaagtggatccaacagccttcgctccaggggaatcagggcatcgcctccttttctgggaggacactcccttctgatggtgaatgggaactcccttcctcctgcagcagcctgcctgcacgacgagactgcttacagtgtggacattcgactcggaccgatg

SEQ ID NO: 11031 - DNA, 203 bp, synthetic construct
  source 1..203: mol_type = other DNA
ggcgcgccagtcctctgccgggagggagcaggagagagaggacaagtggatccaacagccttcgctccaggggaatcagggcatcgcctccttttctgggaggacactcccttctgatggtgaatgggaactcccttcctcctgcatgctaactatgtatgctgtcctggtagaacagtgtggacattcgactcggaccgatg

SEQ ID NO: 11032 - DNA, 203 bp, synthetic construct
  source 1..203: mol_type = other DNA
ggcgcgccagtcctctgctcctagggagcaggagagagaggacaagtggatccaacagccttcgctccaggggaatcagggcatcgcctccttttctgggaggaggtaaaaagaaagcggtgaatgggaactcccttcctcctgcagcagcctgcctgcagctgtcctggtagaacagtgtggacattcgactcggaccgatg

SEQ ID NO: 11033 - DNA, 203 bp, synthetic construct
  source 1..203: mol_type = other DNA
ggcgcgccagtccttagctctgagggagcaggagagagaggacaagtggatccaacagccttcgctccaggggaatcagggcatcgcctctaaggaatatgaaccactcccttctgatggtgaatgggaactcccttcctcctgcagcagcctgcctgcagctgtcctggtagaacagtgtggacattcgactcggaccgatg

SEQ ID NO: 11034 - DNA, 203 bp, synthetic construct
  source 1..203: mol_type = other DNA
ggcgcgccagtcctccagtggtagggagcaggagagagaggacaagtggatccaacagccttgataatcactcgcgcagggcatcgcctccttttctgggaggacactcccttctgatggtgaatgggaactcccttcctcctgcagcagcctgcctgcagctgtcctggtagaacagtgtggacattcgactcggaccgatg

SEQ ID NO: 11035 - DNA, 203 bp, synthetic construct
  source 1..203: mol_type = other DNA
ggcgcgccagtcctcttataccagggagcaggagccttgatgagctacgatccaacagccttcgctccaggggaatcagggcatcgcctccttttctgggaggacactcccttctgatggtgaatgggaactcccttcctcctgcagcagcctgcctgcagctgtcctggtagaacagtgtggacattcgactcggaccgatg

SEQ ID NO: 11036 - DNA, 203 bp, synthetic construct
  source 1..203: mol_type = other DNA
ggcgcgccagtccttaacacgtagggaggagctccctccaggctctatttagagccgggtaggggagcgcagcggccagatacctcagcgagctggtcaccggatggatttctctcccgcctgccggcctgcctgccacagccggactccgccactccggtagcctcatggctgcaacctgtgagattcgactcggaccgatg

SEQ ID NO: 11037 - DNA, 203 bp, synthetic construct
  source 1..203: mol_type = other DNA
ggcgcgccagtcctagcgtgttagggaggagctccctccaggctctatttagagccgggtaggggagcgcagcggccagatacctcagcgctacctggcggaactggatttctctcccgcctgccggcctgcaaaggcttaaaaagctccgccactccggtagcctcatggctgcaacctgtgagattcgactcggaccgatg

SEQ ID NO: 11038 - DNA, 203 bp, synthetic construct
  source 1..203: mol_type = other DNA
ggcgcgccagtccttacaggcaagggaggagctccctccaggctctatttagagccgggtaggggagcgcagcggccagatacctcagcgctacctggcggaactggatttctctcccgcctgccggcctgcctgccacagccggagcttcagcgggttttagcctcatggctgcaacctgtgagattcgactcggaccgatg

SEQ ID NO: 11039 - DNA, 203 bp, synthetic construct
  source 1..203: mol_type = other DNA
ggcgcgccagtcctatttatgtagggaggagctccctccaggctctatttagagccgggtaggggagcgcagcggccagatacctcagcgctacctggcggaactggatttctctccctaactttcagtgatctgccacagccggactccgccactccggtagcctcatggctgcaacctgtgagattcgactcggaccgatg

SEQ ID NO: 11040 - DNA, 203 bp, synthetic construct
  source 1..203: mol_type = other DNA
ggcgcgccagtcctcacgcctcagggaggagctcgagagcctacaacattagagccgggtaggggagcgcagcggccagatacctcagcgctacctggcggaactggatttctctcccgcctgccggcctgcctgccacagccggactccgccactccggtagcctcatggctgcaacctgtgagattcgactcggaccgatg

SEQ ID NO: 11041 - DNA, 203 bp, synthetic construct
  source 1..203: mol_type = other DNA
ggcgcgccagtcctatcggtataggggaccctgtacagctggatgttaatcgcagcgtcggatgttcagagcagcagaagccggcgtcgtcggatgttgtgttgcccgccaccatgagctacacaggctttgtccagggatctgaaaccactttgcagtcgacatactcggataccagcgctcagccccgactcggaccgatg

SEQ ID NO: 11042 - DNA, 203 bp, synthetic construct
  source 1..203: mol_type = other DNA
ggcgcgccagtcctattcagggaggggaccctgtggttagcagcagctatcgcagcgtcggatgttcagagcagcaactaattctccttgcggatgttgtgttgcccgccaccatgagctacacaggctttgtccagggatctgaaaccactttgcagtcgacatactcggataccagcgctcagccccgactcggaccgatg

SEQ ID NO: 11043 - DNA, 203 bp, synthetic construct
  source 1..203: mol_type = other DNA
ggcgcgccagtcctctcgtgacaggggaccctgtggttagcagcagctatcgcagcgtcggatgttcagagcagcagaagccggcgtcgtcggatgttgtgttgcccgccaccatgagctacacaggctttgtccagggatctgaaaccactttgcagtcaggtccggttcccgccagcgctcagccccgactcggaccgatg

SEQ ID NO: 11044 - DNA, 203 bp, synthetic construct
  source 1..203: mol_type = other DNA
ggcgcgccagtcctctgctgaaaggggaccctgtggttagcagcagctatcgcagcgtcggatgttcagagcagcagaagccggcgtcgtcggatgttgtgttgcccgccaccatgagctacacaggctttgtccagggatctgaaaccactttgcagtcgacatactcggataattaaatggtcgggcgactcggaccgatg

SEQ ID NO: 11045 - DNA, 203 bp, synthetic construct
  source 1..203: mol_type = other DNA
ggcgcgccagtcctgtaactgcaggggaccctgtggttagcagcagctatcgcagcgtcggatgttcagagcagcagaagccggcgtcgtcggatgttgtgttgcccgccaccatgagctacacaggctttgtccagggatctgaaaccactttgcagtcgacatactcggataccagcgctcagccccgactcggaccgatg

SEQ ID NO: 11046 - DNA, 203 bp, synthetic construct
  source 1..203: mol_type = other DNA
ggcgcgccagtcctggttgaccaggggaccctgtggttagcagcagctatcgcagcgtcggatgttcagagcagcagaagccggcgtcgtttacctggagaggccccgccaccatgagctacacaggctttgtccagggatctgaaaccactttgcagtcgacatactcggataccagcgctcagccccgactcggaccgatg

SEQ ID NO: 11047 - DNA, 203 bp, synthetic construct
  source 1..203: mol_type = other DNA
ggcgcgccagtcctcgggcgcaaggggaccctgtggttagcagcagcttcattgcaactaattgttcagagcagcagaagccggcgtcgtcggatgttgtgttgcccgccaccatgagctacacaggctttgtccagggatctgaaaccactttgcagtcgacatactcggataccagcgctcagccccgactcggaccgatg

SEQ ID NO: 11048 - DNA, 203 bp, synthetic construct
  source 1..203: mol_type = other DNA
ggcgcgccagtccttctagttgagggggtggggcatgtgccctcttttaatgaccggccgtccctgcggtcccgccccctccccgcccccggagccgcggcctcgctgagtgcccagccgcccggcgcccaggcctggggcaccgcgagtgccgaaccttcggctgctccccgcctcaggacaccaagcgactcggaccgatg

SEQ ID NO: 11049 - DNA, 203 bp, synthetic construct
  source 1..203: mol_type = other DNA
ggcgcgccagtcctccacaccaagggggtggggctatatgttcggaccaatgaccggccgtccctgcggtcccgccccctccccgcccccggagccgcggcctcgctgagtgcccagctcagatttagtattgcctggggcaccgcgagtgccgaaccttcggctgctccccgcctcaggacaccaagcgactcggaccgatg

SEQ ID NO: 11050 - DNA, 203 bp, synthetic construct
  source 1..203: mol_type = other DNA
ggcgcgccagtcctttaaactcagggggtggggctatatgttcggaccaatgaccggccgtccctgcggtcccgcctggcgtagctagtaggagccgcggcctcgctgagtgcccagccgcccggcgcccaggcctggggcaccgcgagtgccgaaccttcggctgctccccgcctcaggacaccaagcgactcggaccgatg

SEQ ID NO: 11051 - DNA, 203 bp, synthetic construct
  source 1..203: mol_type = other DNA
ggcgcgccagtcctctttattgaggggttcttgtgccgaaaggcagccacggggccaccaaggcggcgcagcgctgcatgcggcaaggggaaaaatccttcgggtgacccctggtggcaatcccttcccttaggagcatgagtgtggtcgacacattcaccatggcttggctgtggttgctggtttgccgactcggaccgatg

SEQ ID NO: 11052 - DNA, 203 bp, synthetic construct
  source 1..203: mol_type = other DNA
ggcgcgccagtcctggtatagcagggtcaagcgattcccctgcctcagcttcctgagtagctaacgacctgatgcttgtgtgctccgggatggagcaggtgtgcagagggtgagaacccagctctgggaccaagtcacttgcttccttacttagcaagactatcgacttgagcaaacttggacctgggcgactcggaccgatg

SEQ ID NO: 11053 - DNA, 203 bp, synthetic construct
  source 1..203: mol_type = other DNA
ggcgcgccagtcctgatcttatagggtcaagcgattcccctgcctcagcttcctgagtagctgggattacaggctcacgagttggaatcttggagcaggtgtgcagagggtgagaacccagctctgggaccaagtcacttgcttccttacttagcaagactatcgacttgagcaaacttggacctgggcgactcggaccgatg

SEQ ID NO: 11054 - DNA, 203 bp, synthetic construct
  source 1..203: mol_type = other DNA
ggcgcgccagtccttttcgtccagggtcaagcgattcccctgcctcagcttcctgagtagctgggattacaggctctgtgtgctccgggatggagcaggtgtgcagagggtgagaacccagctctgggaccaagtcacttgcttccactgcgtcggcctttatcgacttgagcaaacttggacctgggcgactcggaccgatg

SEQ ID NO: 11055 - DNA, 203 bp, synthetic construct
  source 1..203: mol_type = other DNA
ggcgcgccagtcctacgccgacagggtcaagcgattcccctgcctcagcttcctgagtagctgggattacaggctctgtgtgctccgggatggagcaggtgtgcagagggtgagaacccagctctgggaccaagtcacttgcttccttacttagcaagactatcgacttgagcaaacttggacctgggcgactcggaccgatg

SEQ ID NO: 11056 - DNA, 203 bp, synthetic construct
  source 1..203: mol_type = other DNA
ggcgcgccagtcctctcaattaaggtaggtgatagaggcttggggtcttcgaaggataatcggcgcccggggccgaacagcgggggcacacggggcgctgccgaagtgcaaggccacggccagagctcgagcccgacgcgctgtctggagtcgtaggaccctgacgtggctgaagcggccccgggagccgactcggaccgatg

SEQ ID NO: 11057 - DNA, 203 bp, synthetic construct
  source 1..203: mol_type = other DNA
ggcgcgccagtccttagtttctaggtctcgagataagtacatactaccggcatgcccaaagcacatcttaacctgagcgggggtcgcccaggtaaaagcagttttaaccgactgttacgaatacagcctgatagggtgctgcagaggcccactgtattgctactaaaaatctctgctgtacatggcaccgactcggaccgatg

SEQ ID NO: 11058 - DNA, 203 bp, synthetic construct
  source 1..203: mol_type = other DNA
ggcgcgccagtcctggccaaataggtctcgagatgccacgtggacgagctatccgtatcgtgacatcttaacctgagcgggggtcgcccaggtaaaagcagttttaaccgactgttacgaatacagcctgatagggtgctgcagaggcccactgtattgctactaaaaatctctgctgtacatggcaccgactcggaccgatg

SEQ ID NO: 11059 - DNA, 203 bp, synthetic construct
  source 1..203: mol_type = other DNA
ggcgcgccagtcctcttgacagaggtctcgagatgccacgtggacgagggcatgcccaaagcacatcttaacctgagcgggggtcgcccaggtaaaagcagttttaaccgactgttacgaatacagcctgatagggtgctgcagaggcccactgtattgcatgcgccgcataacgctgtacatggcaccgactcggaccgatg

SEQ ID NO: 11060 - DNA, 203 bp, synthetic construct
  source 1..203: mol_type = other DNA
ggcgcgccagtcctcgagtaacaggtctcgagatgccacgtggacgagggcatgcccaaagcacatcttaacctgagcgggggtcgcccaggtaaaagcagttttaaccgactgttacgaatacagcctgatagggtgctgcagaggcccactgtattgcctagttgctcagtcgctgtacatggcaccgactcggaccgatg

SEQ ID NO: 11061 - DNA, 203 bp, synthetic construct
  source 1..203: mol_type = other DNA
ggcgcgccagtccttacgccctaggtctcgagatgccacgtggacgagggcatgcccaaagcacatcttaacctgagcgggggtcgcccaggtaaaagcagttttaaccgactgttacgaatacagcctgatagggtgctgcagaggcccactgtattgctactaaaaatctctcacaggggcatgttcgactcggaccgatg

SEQ ID NO: 11062 - DNA, 203 bp, synthetic construct
  source 1..203: mol_type = other DNA
ggcgcgccagtcctcccggaacaggtctcgagatgccacgtggacgagggcatgcccaaagcacatcttaacctgagcgggggtcgcccaggtaaaagcagttttaaccgactgttacgaatacagcctgatcaaaattgtgtatcgcccactgtattgctactaaaaatctctgctgtacatggcaccgactcggaccgatg

SEQ ID NO: 11063 - DNA, 203 bp, synthetic construct
  source 1..203: mol_type = other DNA
ggcgcgccagtcctgcgcaacgaggtctcgagatgccacgtggacgagggcatgcccaaagccatagaggtagcacgcgggggtcgcccaggtaaaagcagttttaaccgactgttacgaatacagcctgatagggtgctgcagaggcccactgtattgctactaaaaatctctgctgtacatggcaccgactcggaccgatg

SEQ ID NO: 11064 - DNA, 203 bp, synthetic construct
  source 1..203: mol_type = other DNA
ggcgcgccagtcctcaacgaagaggtctcgagatgccacgtggacgagggcatgcccaaagcttcatggctgtaacgcgggggtcgcccaggtaaaagcagttttaaccgactgttacgaatacagcctgatagggtgctgcagaggcccactgtattgctactaaaaatctctgctgtacatggcaccgactcggaccgatg

SEQ ID NO: 11065 - DNA, 203 bp, synthetic construct
  source 1..203: mol_type = other DNA
ggcgcgccagtcctattacggaaggtgtatctcgcaccagcccctgatcatttcgcctaaaagagcaaggactagagttcctgacctccaggccagtccctgatccctgacctaatgttatcgcggaatgatgatatatgtatctacgggggcctggggctgggcgggctcctgcttctggcagtggtcgactcggaccgatg

SEQ ID NO: 11066 - DNA, 203 bp, synthetic construct
  source 1..203: mol_type = other DNA
ggcgcgccagtcctgtttgtctagtaagaaaattcctagttataatatttttaatactgctacatttttaagacccttagttatttagctttaccgcccaggatggggtgcagcgttcctgcaatatccagggcacctaggtgcagccttgtagttttagcacttcgggtttgcaagaatttcactagcgactcggaccgatg

SEQ ID NO: 11067 - DNA, 203 bp, synthetic construct
  source 1..203: mol_type = other DNA
ggcgcgccagtccttgcgttagagtaagtctgtctgatctaggatgtcttgcttaccacccaggtagggggttatacgtcagggatagacctgattccattgtaactcttgccgaaatccgggtgaacggaagtagtctctttaagaactggtatgggcaggcccaagttgtcaaggcttcggaggtacgactcggaccgatg

SEQ ID NO: 11068 - DNA, 203 bp, synthetic construct
  source 1..203: mol_type = other DNA
ggcgcgccagtcctcgaggtatagtaagtctgtctgatctaggatgtcttgcttaccacccaggtagggggttatatactcccagcctttctgattccattgtaactcttgccgaaatccgggtgaacggaaaactgaatcacctaaactggtatgggcaggcccaagttgtcaaggcttcggaggtacgactcggaccgatg

SEQ ID NO: 11069 - DNA, 203 bp, synthetic construct
  source 1..203: mol_type = other DNA
ggcgcgccagtccttattgtgcagtaagtctgtctgatctaggatgtcttgcttaccacccaggtagggggttatatactcccagcctttctgattccattgtaactcttgccgaaatccgggtgaacggaagtagtctctttaagaactggtatgggcacatgacccccacgcaggcttcggaggtacgactcggaccgatg

SEQ ID NO: 11070 - DNA, 203 bp, synthetic construct
  source 1..203: mol_type = other DNA
ggcgcgccagtcctcattgactagtaatgattttgtctcccccaaatttgggcattgtccccgggtcttccaacggactgggcgttgctcccggacactgaggactggccccggggtctcgctcaccttcagcagcgtccaccgcctgccacagagcgttcgatcgctcgctgcctgagctcctggtgcgactcggaccgatg

SEQ ID NO: 11071 - DNA, 203 bp, synthetic construct
  source 1..203: mol_type = other DNA
ggcgcgccagtcctagatcgggagtacggtgtgtggagctggagcaccgtgaggaagaagcgctaagagaggcccaagttcagctgcgagatatcaaacaaagaattactctgtacaaagccagaacacatatatcaaagtaatcctgaagtatcagaacaaaataataggctgtaacagaggaggaacgactcggaccgatg

SEQ ID NO: 11072 - DNA, 203 bp, synthetic construct
  source 1..203: mol_type = other DNA
ggcgcgccagtcctcgcattacagtaggtcagcccaaatacgaatgtgcagcggtgctggggtcatgatggctcggtgggcagcgaggggccgggccggctggaggagcacagtgcggattctattctgaaagtcaagaagacatcatccggaatattgccaggcacctcgcccaggtcggggacagccgactcggaccgatg

SEQ ID NO: 11073 - DNA, 203 bp, synthetic construct
  source 1..203: mol_type = other DNA
ggcgcgccagtccttacgaaagagtagttaggatggctgaaggggagtacattcggctgaaggccgactgtgattcccccggttgatacaaggcgattttgaccccctgagggctgctctagaggactcaggccccgaagctgtcccagggaggtccccgctgcatcccaccacccaagctgtgcctccgactcggaccgatg

SEQ ID NO: 11074 - DNA, 203 bp, synthetic construct
  source 1..203: mol_type = other DNA
ggcgcgccagtccttcacccgcagtagttaggatggctgaaggggatactcaccggctgaaggccgactgtgattcccccggttgatacaaggcgattttgaccccctgagggctgctctagaggactcaggccccgaagctgtcccagggaggtccccgctgcatcccaccacccaagctgtgcctccgactcggaccgatg

SEQ ID NO: 11075 - DNA, 203 bp, synthetic construct
  source 1..203: mol_type = other DNA
ggcgcgccagtcctcataaataagtagttaggatggctgaaggggatactcaccggctgaaggccgactgtgattccccctacccccacaaggcgattttgaccccctgagggctgctaattttctaagcacccccgaagctgtcccagggaggtccccgctgcatcccaccacccaagctgtgcctccgactcggaccgatg

SEQ ID NO: 11076 - DNA, 203 bp, synthetic construct
  source 1..203: mol_type = other DNA
ggcgcgccagtcctgagctagtagtagttaggatggctgaaggggatactcaccggctgaaggccgactgtgattccccctacccccacaaggcgattttgaccccctgagggctgctctagaggactcaggatagctgatcaggacagggaggtccccgctgcatcccaccacccaagctgtgcctccgactcggaccgatg

SEQ ID NO: 11077 - DNA, 203 bp, synthetic construct
  source 1..203: mol_type = other DNA
ggcgcgccagtcctacgcgcctagtagttaggatggctgaaggggatactcaccggctgaaggccgactgtgattccccctacccccacaaggcgattttgaccccctgagggctgctctagaggactcaggccccgaagctgtcccagggaggtccccgctgcatcccaccacccaagctgtgcctccgactcggaccgatg

SEQ ID NO: 11078 - DNA, 203 bp, synthetic construct
  source 1..203: mol_type = other DNA
ggcgcgccagtcctagagtttaagtagttaggatggctgaaggggatactcaccggctgaagtgtactacgctggacccctacccccacaaggcgattttgaccccctgagggctgctctagaggactcaggccccgaagctgtcccagggaggtccccgctgcatcccaccacccaagctgtgcctccgactcggaccgatg

SEQ ID NO: 11079 - DNA, 203 bp, synthetic construct
  source 1..203: mol_type = other DNA
ggcgcgccagtcctaatacccgagtagttaggatggctgaaggggatatcacagtatgcggcgccgactgtgattccccctacccccacaaggcgattttgaccccctgagggctgctctagaggactcaggccccgaagctgtcccagggaggtccccgctgcatcccaccacccaagctgtgcctccgactcggaccgatg

SEQ ID NO: 11080 - DNA, 203 bp, synthetic construct
  source 1..203: mol_type = other DNA
ggcgcgccagtccttgaaaccaagtagttaggattctgcctaatagatctcaccggctgaaggccgactgtgattccccctacccccacaaggcgattttgaccccctgagggctgctctagaggactcaggccccgaagctgtcccagggaggtccccgctgcatcccaccacccaagctgtgcctccgactcggaccgatg

SEQ ID NO: 11081 - DNA, 203 bp, synthetic construct
  source 1..203: mol_type = other DNA
ggcgcgccagtcctgcccgtgaagtcaataagactgtggtgagagagttcgtcgtcctcggcccgcatattgactacaggctgcagcagctgctctttgttatcttcctgctcctctacctgttcactctgggcaccaatgcaatcatcatttccaccattgtgctggacagagcccttcatactccccgactcggaccgatg

SEQ ID NO: 11082 - DNA, 203 bp, synthetic construct
  source 1..203: mol_type = other DNA
ggcgcgccagtcctaaacatacagtcaataagactgtggtgagagagttcgtcgtcctcggcttctcatccctggccaggctgcagcagctgctctttgttatcttcctgctcctctacctgttcactctgggcaccaatgcaatcatcatttccaccattgtgctggacagagcccttcatactccccgactcggaccgatg

SEQ ID NO: 11083 - DNA, 203 bp, synthetic construct
  source 1..203: mol_type = other DNA
ggcgcgccagtccttgacgggcagtcaataagactgtggtgagagagttcgtcgtcctcggcttctcatccctggccaggctgcagcagctgctctttgttatcttcctgctcctctacctgttcactctgggcaccaatgcaatcatcatttccaccattgtgctggacagaggaaccgtattggatcgactcggaccgatg

SEQ ID NO: 11084 - DNA, 203 bp, synthetic construct
  source 1..203: mol_type = other DNA
ggcgcgccagtcctgacaaaccagtcaataagactgtggtgagagagttcgtcgtcctcggcttctcatccctggccaggctgcagcagctgctctttgttatcttcctgctcctctattgcgaattcgctagcaccaatgcaatcatcatttccaccattgtgctggacagagcccttcatactccccgactcggaccgatg

SEQ ID NO: 11085 - DNA, 203 bp, synthetic construct
  source 1..203: mol_type = other DNA
ggcgcgccagtcctctcgttgtagtcaataagactgtggtgagagagttcgtcgtcctcggcttctcatccctggctgacggttcaagcgtgctctttgttatcttcctgctcctctacctgttcactctgggcaccaatgcaatcatcatttccaccattgtgctggacagagcccttcatactccccgactcggaccgatg

SEQ ID NO: 11086 - DNA, 203 bp, synthetic construct
  source 1..203: mol_type = other DNA
ggcgcgccagtccttcagaagaagtcaggctattaggaaatctgctcggtccccggcagccgccgcttcccctttgatgttttggtacgccgtgcgcatgcgcctcacattagaattactgcactgggcagactaagttggatctcctctcttcagtgaaaccctcaattccatcaaaaactaaagggcgactcggaccgatg

SEQ ID NO: 11087 - DNA, 203 bp, synthetic construct
  source 1..203: mol_type = other DNA
ggcgcgccagtcctgtttggacagtcaggtggagcgaggctagctggcccgatttctcctccgggtgatgcttttcctagattattctctgatttggtcgtattgggcgcctggtcaccagggctgcttttaactctggtaaagtgagggcacagttatccaatgaccccttcattgacctcaactaccgactcggaccgatg

SEQ ID NO: 11088 - DNA, 203 bp, synthetic construct
  source 1..203: mol_type = other DNA
ggcgcgccagtcctatggacgcagtcaggtggagcgaggctagctggcccgatttctcctccgggtgatgcttttcctagattattctctgatttggtcgtattgggcgcctggtcaccagggctgcttttaactctggtaaagtggatattgttgccatcaatgaccccttcacatctacgccggtgcgactcggaccgatg

SEQ ID NO: 11089 - DNA, 203 bp, synthetic construct
  source 1..203: mol_type = other DNA
ggcgcgccagtcctggctttcaagtcaggtggagcgaggctagctggcccgatttctcctccgggtgatgcttttcctagattattctctgatttggtcgtattgggcgcctggtcaccagggctgcttttaactctggtaaagtggatattgttgccatcaatgaccccttcattgacctcaactaccgactcggaccgatg

SEQ ID NO: 11090 - DNA, 203 bp, synthetic construct
  source 1..203: mol_type = other DNA
ggcgcgccagtcctggcggtgtagtcaggtggagcgaggctagctggcccgatttctcctccgggtgatgcttttcctagattattctctgatttggtcgtattgggcgcctggtcaccagggctgcttttaactctggtaaagtgttcggaaacagtcccaatgaccccttcattgacctcaactaccgactcggaccgatg

SEQ ID NO: 11091 - DNA, 203 bp, synthetic construct
  source 1..203: mol_type = other DNA
ggcgcgccagtcctgtttccaaagtcaggtggagcgaggctagctggcccgatttctcctccgggtgatgcttttcctagattattctctgatttggtcgtattgggcgcctggtcaccagggctgcttttaggaggctgtctccagatattgttgccatcaatgaccccttcattgacctcaactaccgactcggaccgatg

SEQ ID NO: 11092 - DNA, 203 bp, synthetic construct
  source 1..203: mol_type = other DNA
ggcgcgccagtccttgcgtatcagtcaggtggagcgaggctagctggcccgatttctcctccgggtgatgcttttcctagattattctctgatttggtcgtattgggcgcctggtcaccagggctgcttttatgcactaagcttgagatattgttgccatcaatgaccccttcattgacctcaactaccgactcggaccgatg

SEQ ID NO: 11093 - DNA, 203 bp, synthetic construct
  source 1..203: mol_type = other DNA
ggcgcgccagtcctttgctttaagtcaggtggagcgaggctagctggcccgatttctcctccgggtgatgcttttcctagattattctctgatttggtcgtattgggcgcctggtcacggtaaagcagccgcactctggtaaagtggatattgttgccatcaatgaccccttcattgacctcaactaccgactcggaccgatg

SEQ ID NO: 11094 - DNA, 203 bp, synthetic construct
  source 1..203: mol_type = other DNA
ggcgcgccagtcctactaatcgagtcaggtggagcgaggctagctggcccgatttctcctcctaaacgccggaagtctagattattctctgatttggtcgtattgggcgcctggtcaccagggctgcttttaactctggtaaagtggatattgttgccatcaatgaccccttcattgacctcaactaccgactcggaccgatg

SEQ ID NO: 11095 - DNA, 203 bp, synthetic construct
  source 1..203: mol_type = other DNA
ggcgcgccagtccttcggatacagtcagttccaagacgaggtaaacaacaaactcattcgccgagtttctaaacaagacatattcgagtgactcataagaagttgaataacaaaatgccggaaatctacggattgtgtatatccatcatgaaaaaaactaacacccctcctttcgaaccaccccaaaccgactcggaccgatg

SEQ ID NO: 11096 - DNA, 203 bp, synthetic construct
  source 1..203: mol_type = other DNA
ggcgcgccagtcctgcgttaccagtcagttccaatcatcaagctcgtccaaactcattcgccgagtttctaaacaaagtcagaatcgtccactcataagaagttgaataacaaaatgccggaaatctacggattgtgtatatccatcatgaaaaaaactaacacccctcctttcgaaccaccccaaaccgactcggaccgatg

SEQ ID NO: 11097 - DNA, 203 bp, synthetic construct
  source 1..203: mol_type = other DNA
ggcgcgccagtcctaactatcgagtcagttccaatcatcaagctcgtccaaactcattcgccgagtttctaaacaagacatattcgagtgactcataagaagttcttacgagcctacgcggaaatctacggattgtgtatatccatcatgaaaaaaactaacacccctcctttcgaaccaccccaaaccgactcggaccgatg

SEQ ID NO: 11098 - DNA, 203 bp, synthetic construct
  source 1..203: mol_type = other DNA
ggcgcgccagtcctgcctggtcagtcagttccaatcatcaagctcgtccaaactcattcgccgagtttctaaacaagacatattcgagtgactcataagaagttgaataacaaaatgcaatcttgagctctgttgtgtatatccatcatgaaaaaaactaacacccctcctttcgaaccaccccaaaccgactcggaccgatg

SEQ ID NO: 11099 - DNA, 203 bp, synthetic construct
  source 1..203: mol_type = other DNA
ggcgcgccagtcctaagtctgaagtcagttccaatcatcaagctcgtccaaactcattcgccgagtttctaaacaagacatattcgagtgactcataagaagttgaataacaaaatgccggaaatctacggattgtgtatatccatatcctggttcctgcacacccctcctttcgaaccaccccaaaccgactcggaccgatg

SEQ ID NO: 11100 - DNA, 203 bp, synthetic construct
  source 1..203: mol_type = other DNA
ggcgcgccagtcctatcaagagagtcagttccaatcatcaagctcgtccaaactcattcgccgagtttctaaacaagacatattcgagtgcacgccggatccaagaataacaaaatgccggaaatctacggattgtgtatatccatcatgaaaaaaactaacacccctcctttcgaaccaccccaaaccgactcggaccgatg

SEQ ID NO: 11101 - DNA, 203 bp, synthetic construct
  source 1..203: mol_type = other DNA
ggcgcgccagtcctctgcaataagtccgattggggctgcgcgcttcgcttctgcggctcagcctccagcccaggtggcgctgtggaccctgcagccgcggagcgaggcagcggggcggctccgtgaccacggcgggcggagcctagtggacctacgacgtgctgctgtggccgtggctgttcgcgaggcgactcggaccgatg

SEQ ID NO: 11102 - DNA, 203 bp, synthetic construct
  source 1..203: mol_type = other DNA
ggcgcgccagtcctacttcgaaagtccgattggggctgcgcgcttcgcttctgcggctcagcgagagtgttcttccgcgctgtggaccctgcagccgcggagcgaggcagcggggcggctccgtgaccacggcgggcggagcctaggactgagggcgatggctgctgtggccgtggctgttcgcgaggcgactcggaccgatg

SEQ ID NO: 11103 - DNA, 203 bp, synthetic construct
  source 1..203: mol_type = other DNA
ggcgcgccagtccttcttcacgagtccgtaagttaagctaggccagctcctcccactgcctcccttcctctttctcctcctcttactcctttccagccagaccttggctgtctacaggatgggggacaccctgagccccggacatggcaaccacagagagagcagcccttttctttcccccttggaggcgactcggaccgatg

SEQ ID NO: 11104 - DNA, 203 bp, synthetic construct
  source 1..203: mol_type = other DNA
ggcgcgccagtccttgcaggacagtcggagctctatggaggtggcagcaacagagagaactaggctgcagcagcgactcctctgagctgagtttgaggccgtccccgactccttcctcccccttccctcccccttttttttgttttccgttcccctttcccctcccttccctatccccgacgaccggacgactcggaccgatg

SEQ ID NO: 11105 - DNA, 203 bp, synthetic construct
  source 1..203: mol_type = other DNA
ggcgcgccagtcctcaatgggtagtcggagctctatggaggtggcagcgggtaccgagtggcggctgcagcagcgaaggtatacgatgctgtttgaggccgtccccgactccttcctcccccttccctcccccttttttttgttttccgttcccctttcccctcccttccctatccccgacgaccggacgactcggaccgatg

SEQ ID NO: 11106 - DNA, 203 bp, synthetic construct
  source 1..203: mol_type = other DNA
ggcgcgccagtcctgattcgccagtcggagctctatggaggtggcagcgggtaccgagtggcggctgcagcagcgactcctctgagctgagtttgaggccgtccatagtcagagatggccccttccctcccccttttttttgttttccgttcccctttcccctcccttccctatccccgacgaccggacgactcggaccgatg

SEQ ID NO: 11107 - DNA, 203 bp, synthetic construct
  source 1..203: mol_type = other DNA
ggcgcgccagtcctcgatagatagtcggagctctatggaggtggcagcgggtaccgagtggcggctgcagcagcgactcctctgagctgagtttgaggccgtccccgactccttcctcccccttccctcccccttttttttgttttccgttcccctttcccctcccttccctattatgtcaatgtactcgactcggaccgatg

SEQ ID NO: 11108 - DNA, 203 bp, synthetic construct
  source 1..203: mol_type = other DNA
ggcgcgccagtcctttcatcgcagtcggagctctatggaggtggcagcgggtaccgagtggcggctgcagcagcgactcctctgagctgagtttgaggccgtccccgactccttcctcccccttccctcccccttttttttgttttggacattgagccaacctcccttccctatccccgacgaccggacgactcggaccgatg

SEQ ID NO: 11109 - DNA, 203 bp, synthetic construct
  source 1..203: mol_type = other DNA
ggcgcgccagtcctaccaactgagtcggagctctatggaggtggcagcgggtaccgagtggcggctgcagcagcgactcctctgagctgagtttgaggccgtccccgactccttcctcccccttccctccccgcgggaacgcacacccgttcccctttcccctcccttccctatccccgacgaccggacgactcggaccgatg

SEQ ID NO: 11110 - DNA, 203 bp, synthetic construct
  source 1..203: mol_type = other DNA
ggcgcgccagtcctaggtaactagtcggagctctccatgccaccattagggtaccgagtggcggctgcagcagcgactcctctgagctgagtttgaggccgtccccgactccttcctcccccttccctcccccttttttttgttttccgttcccctttcccctcccttccctatccccgacgaccggacgactcggaccgatg

SEQ ID NO: 11111 - DNA, 203 bp, synthetic construct
  source 1..203: mol_type = other DNA
ggcgcgccagtcctaatcacttagtctgacagagtgctgtgatatctggggctcctgctgctatagctggatttgcagctttactgcaaactgtgactggtgtgagcgctgttgctcaagtggggtatagattttttagtgactgggatcacaaagtttctactgttggtttatatcaacaaccaggacgactcggaccgatg

SEQ ID NO: 11112 - DNA, 203 bp, synthetic construct
  source 1..203: mol_type = other DNA
ggcgcgccagtccttgtttaacagtgacgtcataccggttttacacacgtatccgtggcagcggccgtggcaggctggctgggtaccggctgtcgctgacccaggagaagctgcctgtctacatcagcctgggctgcagcgcgctgccgccgcggggccggcagccatggccaaggacatcctgggtgcgactcggaccgatg

SEQ ID NO: 11113 - DNA, 203 bp, synthetic construct
  source 1..203: mol_type = other DNA
ggcgcgccagtccttgaaccacagtgacgtcataggtaaacaggctctgtatccgtggcagcggccgtggcaggctggctgggtaccggctgtcgctgacccaggagaagctgcctgtctacatcagcctggcaaaactttgctctccgccgcggggccggcagccatggccaaggacatcctgggtgcgactcggaccgatg

SEQ ID NO: 11114 - DNA, 203 bp, synthetic construct
  source 1..203: mol_type = other DNA
ggcgcgccagtcctttaccacaagtgacgtcataggtaaacaggctctgtatccgtggcagcggccgtggcaggctggctgggtaccggctgtcgctgacccaggagaagctgcctgtctacatcagcctgggctgcagcgcgctgccgccgcggggccggcagccatggccaaaccttattactaaccgactcggaccgatg

SEQ ID NO: 11115 - DNA, 203 bp, synthetic construct
  source 1..203: mol_type = other DNA
ggcgcgccagtccttagccgccagtgacgtcataggtaaacaggctctgtatccgtggcagcggccgtggcaggctggctgggtaccggctgtcgctgacccaggagaagctgcctgtctacatcagcctgggctgcagcgcgctgttcggtatactggagcagccatggccaaggacatcctgggtgcgactcggaccgatg

SEQ ID NO: 11116 - DNA, 203 bp, synthetic construct
  source 1..203: mol_type = other DNA
ggcgcgccagtcctcttactagagtgacgtcataggtaaacaggctctgtatccgtggcagcggccgtggcaggctggctgggtaccggctgtcgctgacccagtttgtataaagctcctacatcagcctgggctgcagcgcgctgccgccgcggggccggcagccatggccaaggacatcctgggtgcgactcggaccgatg

SEQ ID NO: 11117 - DNA, 203 bp, synthetic construct
  source 1..203: mol_type = other DNA
ggcgcgccagtcctagttcctcagtgacgtcataggtaaacaggctctgtatccgtggcagcggccgtggcaggctggctgggtcagcatgtgcgctgacccaggagaagctgcctgtctacatcagcctgggctgcagcgcgctgccgccgcggggccggcagccatggccaaggacatcctgggtgcgactcggaccgatg

SEQ ID NO: 11118 - DNA, 203 bp, synthetic construct
  source 1..203: mol_type = other DNA
ggcgcgccagtcctagattcgtagtgacgtcataggtaaacaggctctgtatccgtggctaattgataggcaggctggctgggtaccggctgtcgctgacccaggagaagctgcctgtctacatcagcctgggctgcagcgcgctgccgccgcggggccggcagccatggccaaggacatcctgggtgcgactcggaccgatg

SEQ ID NO: 11119 - DNA, 203 bp, synthetic construct
  source 1..203: mol_type = other DNA
ggcgcgccagtcctcataagcgagtgactagctatttcttctgtaaccacaggttcggtggtgagaggaagcctcgcagaatccagcagaatcctcacagaatccagcagcagctctgctggggacatggtccatggtgcaacccacagcaaagccctgacctgacctcctgatgctcaggagaagcccgactcggaccgatg

SEQ ID NO: 11120 - DNA, 203 bp, synthetic construct
  source 1..203: mol_type = other DNA
ggcgcgccagtcctcaggtacaagtgactcccgtgccattggactcggccagagcgaacctgtgcggctgcaggcaccggcgcgtcgagtttccggcgtccggaaggaccgagctcttctcgcggatccagtgttccgtttccagcccccaatctcagagcggagccgacagagagcagggaaccggccgactcggaccgatg

SEQ ID NO: 11121 - DNA, 203 bp, synthetic construct
  source 1..203: mol_type = other DNA
ggcgcgccagtccttggagtagagtgagcgacacactctgcgtcctcgcctcaccagatggagaggagaaaacctatggtggctgtgaagagatactatggtactatgtcaaattgatatcatctgatggccatgaatttattgtaaaaagagaacatgcattaacatcaggcacgataaaagccatgcgactcggaccgatg

SEQ ID NO: 11122 - DNA, 203 bp, synthetic construct
  source 1..203: mol_type = other DNA
ggcgcgccagtcctgtcgtcaaagtgagcgacacactctgcgtcctcgcctcaccagatggagaggagaaaacctatggtggctgtgaaggacctgatgccatgtatgtcaaattgatatcatctgatggccatgaatttattgtaaaaagagaacatgccacgttgaacactgcgataaaagccatgcgactcggaccgatg

SEQ ID NO: 11123 - DNA, 203 bp, synthetic construct
  source 1..203: mol_type = other DNA
ggcgcgccagtcctcagacccaagtgagcgacacactctgcgtcctcgcctcaccagatggagaggagaaaacctatggtggctgtgaaggacctgatgccatgtatgtcaaattgatatcatctgatggcctgtctcagtcatcgaaaagagaacatgcattaacatcaggcacgataaaagccatgcgactcggaccgatg

SEQ ID NO: 11124 - DNA, 203 bp, synthetic construct
  source 1..203: mol_type = other DNA
ggcgcgccagtcctctactgcgagtgagcgacacactctgcgtcctcgtgcatgtcctgtaggaggagaaaacctatggtggctgtgaaggacctgatgccatgtatgtcaaattgatatcatctgatggccatgaatttattgtaaaaagagaacatgcattaacatcaggcacgataaaagccatgcgactcggaccgatg

SEQ ID NO: 11125 - DNA, 203 bp, synthetic construct
  source 1..203: mol_type = other DNA
ggcgcgccagtccttacataacagtgagcgacacctcaaaatgttcttcctcaccagatggagaggagaaaacctatggtggctgtgaaggacctgatgccatgtatgtcaaattgatatcatctgatggccatgaatttattgtaaaaagagaacatgcattaacatcaggcacgataaaagccatgcgactcggaccgatg

SEQ ID NO: 11126 - DNA, 203 bp, synthetic construct
  source 1..203: mol_type = other DNA
ggcgcgccagtcctacgcgggaagtggcggcttcgatgacctctggtacagccgcttccctgtgctgtgagtgtttccaccactccaggagacagcattcagagttgaccttgtgagagctggccataatttaattccatctctaggttttctgtcttattgtttcagaggcacatcgagaaccaacccgactcggaccgatg

SEQ ID NO: 11127 - DNA, 203 bp, synthetic construct
  source 1..203: mol_type = other DNA
ggcgcgccagtcctccgccatgagtggcggcttctccatgggtccagccagccgcttccctgccacagataaagacccaccactccaggagacagcattcagagttgaccttgtgagagctggccataatttaattccatctctaggttttctgtcttattgtttcagaggcacatcgagaaccaacccgactcggaccgatg

SEQ ID NO: 11128 - DNA, 203 bp, synthetic construct
  source 1..203: mol_type = other DNA
ggcgcgccagtcctaatggtcgagtggcggcttctccatgggtccagccagccgcttccctgtgctgtgagtgtttaagggggaggctccgacagcattcagagttgaccttgtgagagctggccataatttaattccatctctaggttttctgtcttattgtttcagaggcacatcgagaaccaacccgactcggaccgatg

SEQ ID NO: 11129 - DNA, 203 bp, synthetic construct
  source 1..203: mol_type = other DNA
ggcgcgccagtcctgaatgttaagtggcggcttctccatgggtccagccagccgcttccctgtgctgtgagtgtttccaccactccaggagacagcattcagaggaagaagcagtctcgctggccataatttaattccatctctaggttttctgtcttattgtttcagaggcacatcgagaaccaacccgactcggaccgatg

SEQ ID NO: 11130 - DNA, 203 bp, synthetic construct
  source 1..203: mol_type = other DNA
ggcgcgccagtccttgggcaacagtggcggcttctccatgggtccagccagccgcttccctgtgctgtgagtgtttccaccactccaggagacagcattcagagttgaccttgtgagagctggccataatttaattccatctctaggttttctgtcttattgtttcagaggcaccagctcctattgtacgactcggaccgatg

SEQ ID NO: 11131 - DNA, 203 bp, synthetic construct
  source 1..203: mol_type = other DNA
ggcgcgccagtccttggtgtccagtggcggcttctccatgggtccagccagccgcttccctgtgctgtgagtgtttccaccactccaggattacattacgtcctttgaccttgtgagagctggccataatttaattccatctctaggttttctgtcttattgtttcagaggcacatcgagaaccaacccgactcggaccgatg

SEQ ID NO: 11132 - DNA, 203 bp, synthetic construct
  source 1..203: mol_type = other DNA
ggcgcgccagtcctactccagcagtggcttactcagttacttgacacgttggagctgtgaggtgttcagcattatttaagatcacctatgcatcatctgaagccacagtcccaggtcatcttcatcaccttccccagtggaatgcctcctgtgttaaagcccacaacaacccctgtggaggaacaacccgactcggaccgatg

SEQ ID NO: 11133 - DNA, 203 bp, synthetic construct
  source 1..203: mol_type = other DNA
ggcgcgccagtcctgcacgatgagtggcttactcccggtgccaggttcttggagctgtgaggtgttcagcattattagctgcgcttacgacatcatctgaagccacagtcccaggtcatcttcatcaccttccccagtggaatgcctcctgtgttaaagcccacaacaacccctgtggaggaacaacccgactcggaccgatg

SEQ ID NO: 11134 - DNA, 203 bp, synthetic construct
  source 1..203: mol_type = other DNA
ggcgcgccagtcctaccacatcagtggcttactcccggtgccaggttcttggagctgtgaggtgttcagcattatttaagatcacctatgcatcatctgaagccacagtcccaggtcatcttcatcaccttccccagtggaatgcctcctgtgttaaagcccacaacaacccctgtggaggaacaacccgactcggaccgatg

SEQ ID NO: 11135 - DNA, 203 bp, synthetic construct
  source 1..203: mol_type = other DNA
ggcgcgccagtcctcgtttgttagttcagataggcccgccagctcgcctcggggaacaggacgcgcgtgagctcaggcgtccccgccccagcttttctcggaaccatgaaccccaactgcgcccggtgcggcaagatcgtgtatcccacggagaaggtgaactgtctggataagttctggcataaagccgactcggaccgatg

SEQ ID NO: 11136 - DNA, 203 bp, synthetic construct
  source 1..203: mol_type = other DNA
ggcgcgccagtcctaaatggcaagttcagctgagagatataaaagagcagtctttccagcacaccaggcaaagccacggcgggcactgacgggcacttgcaccgtgtggacagactctccggttctggggaaatccagtccctgttactccattttggccagaaattcaaggatactgtcatgaagcacgactcggaccgatg

SEQ ID NO: 11137 - DNA, 203 bp, synthetic construct
  source 1..203: mol_type = other DNA
ggcgcgccagtcctactctgttagttcagctgagagatataaaagagcagtctttccagcacctgcaaatccagagcggcgggcactgacgggcacttgcaccggaccccgctggcagccggttctggggaaatccagtccctgttactccattttggccagaaattcaaggatactgtcatgaagcacgactcggaccgatg

SEQ ID NO: 11138 - DNA, 203 bp, synthetic construct
  source 1..203: mol_type = other DNA
ggcgcgccagtcctctcttctaagttcagctgagagatataaaagagcagtctttccagcacctgcaaatccagagcggcgggcactgacgggcacttgcaccgtgtggacagactctccgggaagacaaccttccagtccctgttactccattttggccagaaattcaaggatactgtcatgaagcacgactcggaccgatg

SEQ ID NO: 11139 - DNA, 203 bp, synthetic construct
  source 1..203: mol_type = other DNA
ggcgcgccagtcctccaattaaagttcagctgagagatataaaagagcagtctttccagcacctgcaaatccagagcggcgggcactgacgggcacttgcaccgtgtggacagactctccggttctggggaaatccagtccctgttactccattttggccttctgcaacgattgactgtcatgaagcacgactcggaccgatg

SEQ ID NO: 11140 - DNA, 203 bp, synthetic construct
  source 1..203: mol_type = other DNA
ggcgcgccagtcctaatattctagttcagctgagagatataaaagagcagtctttccagcacctgcaaatccagagcggcgggcactgacgggcacttgcaccgtgtggacagactctgaatccacttcacgatccagtccctgttactccattttggccagaaattcaaggatactgtcatgaagcacgactcggaccgatg

SEQ ID NO: 11141 - DNA, 203 bp, synthetic construct
  source 1..203: mol_type = other DNA
ggcgcgccagtcctggcacggaagttcatccacaaacggagctttgtaatctcggattgtaaaaaatttctagacagactttagtgacttctgatctaagaacctccaccagggctgagggagctcaagtttcagcctgaggcatgggccaggaggccatggtgacctgagacccgtggattctgtcccgactcggaccgatg

SEQ ID NO: 11142 - DNA, 203 bp, synthetic construct
  source 1..203: mol_type = other DNA
ggcgcgccagtcctactggtttagttcatccacaaacggagctttgtaatctcggattgtaagggccaagcttgtgcctcccgtctggccctgatctaagaacctccaccagggctgagggagctcaagtttcagcctgaggcatgggccaggaggccatggtgacctgagacccgtggattctgtcccgactcggaccgatg

SEQ ID NO: 11143 - DNA, 203 bp, synthetic construct
  source 1..203: mol_type = other DNA
ggcgcgccagtccttgtaagagagttcatccacaaacggagctttgtaatctcggattgtaagggccaagcttgtggactttagtgacttctgatctaagaacctccaccagggctgagggagctcaagtttcagcctgaggcatgggccaggaggccataacagtaatgtcttcgtggattctgtcccgactcggaccgatg

SEQ ID NO: 11144 - DNA, 203 bp, synthetic construct
  source 1..203: mol_type = other DNA
ggcgcgccagtcctccacccttagttcatccacaaacggagctttgtaatctcggattgtaagggccaagcttgtggactttagtgactttcccctgctaggagtccaccagggctgagggagctcaagtttcagcctgaggcatgggccaggaggccatggtgacctgagacccgtggattctgtcccgactcggaccgatg

SEQ ID NO: 11145 - DNA, 203 bp, synthetic construct
  source 1..203: mol_type = other DNA
ggcgcgccagtccttaataggcagttcatccacaaacggagctttgtagcaggacgcctgcggggccaagcttgtggactttagtgacttctgatctaagaacctccaccagggctgagggagctcaagtttcagcctgaggcatgggccaggaggccatggtgacctgagacccgtggattctgtcccgactcggaccgatg

SEQ ID NO: 11146 - DNA, 203 bp, synthetic construct
  source 1..203: mol_type = other DNA
ggcgcgccagtcctggtgtacgagttctcggtctagctctagtgcccacaagaaaacagctggtttactggtcactaggcagcggaacccccctcctggtaacaggagcctctgcggccaaaagccacgtggataagatccacctttgtgtgcggtgcaaccccagcaccctggtttcttggtgacaccgactcggaccgatg

SEQ ID NO: 11147 - DNA, 203 bp, synthetic construct
  source 1..203: mol_type = other DNA
ggcgcgccagtcctgtggcgatagttctcggtctagctctagtgcccacaagaaaacagctgtagcgaccacacaaaggcagcggaacccccctcctggtaacaggagcctctgcggccaaaagccacgtggataagatccacctttgtgtgcggtgcaaccccagcaccctggagggaatacaggttcgactcggaccgatg

SEQ ID NO: 11148 - DNA, 203 bp, synthetic construct
  source 1..203: mol_type = other DNA
ggcgcgccagtcctcgctgtagagttctcggtctagctctagtgcccacaagaaaacagctgtagcgaccacacaataaggtttcccgttccctcctggtaacaggagcctctgcggccaaaagccacgtggataagatccacctttgtgtgcggtgcaaccccagcaccctggtttcttggtgacaccgactcggaccgatg

SEQ ID NO: 11149 - DNA, 203 bp, synthetic construct
  source 1..203: mol_type = other DNA
ggcgcgccagtcctacccaagtagttctcggtctgcgcgatcccagaccaagaaaacagctgtagcgaccacacaaaggcagcggaacccccctcctggtaacaggagcctctgcggccaaaagccacgtggataagatccacctttgtgtgcggtgcaaccccagcaccctggtttcttggtgacaccgactcggaccgatg

SEQ ID NO: 11150 - DNA, 203 bp, synthetic construct
  source 1..203: mol_type = other DNA
ggcgcgccagtccttatgtactagttgtgaacagacatctcgagtaagattgagctacatgagagtcctccggcccctgaatgcggctaatcctaaccatggagcaggcagctgcaacccagcagccagcctgtcgtaacgcgcaagtccgtggcggaaccgactactttgggtgtccgtgtttccttcgactcggaccgatg

SEQ ID NO: 11151 - DNA, 203 bp, synthetic construct
  source 1..203: mol_type = other DNA
ggcgcgccagtcctggaagaacagttgtgaacagggtgtgaagagcctattgagctacatgagagtcctccggcccctgaatgcggctaaaaggtggagatacccaggcagctgcaacccagcagccagcctgtcgtaacgcgcaagtccgtggcggaaccgactactttgggtgtccgtgtttccttcgactcggaccgatg

SEQ ID NO: 11152 - DNA, 203 bp, synthetic construct
  source 1..203: mol_type = other DNA
ggcgcgccagtcctagctacaaagttgtgaacagggtgtgaagagcctattgagctacatgagagtcctccggcccctgaatgcggctaatcctaaccatggagcaggcagctgcaacccagcagccagcctagaccctatatggggtccgtggcggaaccgactactttgggtgtccgtgtttccttcgactcggaccgatg

SEQ ID NO: 11153 - DNA, 203 bp, synthetic construct
  source 1..203: mol_type = other DNA
ggcgcgccagtcctgaaacataagttgtgaacagggtgtgaagagcctattgagctacatgagagtcctccggcccctgaatgcggctaatcctaaccatggagcaggcagctgcaacccagcagccagcctgtcgtaacgcgcaagtccgtggcggaaccgactactttgggtgtccgtgtttccttcgactcggaccgatg

SEQ ID NO: 11154 - DNA, 203 bp, synthetic construct
  source 1..203: mol_type = other DNA
ggcgcgccagtcctacaatacaagttgtgaacagggtgtgaagagccttcgttcggctccccgagtcctccggcccctgaatgcggctaatcctaaccatggagcaggcagctgcaacccagcagccagcctgtcgtaacgcgcaagtccgtggcggaaccgactactttgggtgtccgtgtttccttcgactcggaccgatg

SEQ ID NO: 11155 - DNA, 203 bp, synthetic construct
  source 1..203: mol_type = other DNA
ggcgcgccagtcctagtagttcataaaaaacccagtctttgctgaccagacaaagcataccagatctcaccagagagtcctaggggactacagaaggaaaaagaattccaagctcttaatatctgtgtgtcctcccgctgaccacacttcctttagtgacccgattgcctcctcaagtcgcagacactcgactcggaccgatg

SEQ ID NO: 11156 - DNA, 203 bp, synthetic construct
  source 1..203: mol_type = other DNA
ggcgcgccagtcctccggtgtaataaaaaacccagtctttgctgaccagacaaagcataccagatctcaccagagagtcctaggggactacagaaggaaaaagacaagaggcagtaggatatctgtgtgtcctcccgctgaccacacttcctttagtgactgagcatatgttagaagtcgcagacactcgactcggaccgatg

SEQ ID NO: 11157 - DNA, 203 bp, synthetic construct
  source 1..203: mol_type = other DNA
ggcgcgccagtcctgcgacagcataaactatgtgattccaagtgaagtcctactgactcgcctcttgatcgggctatacaacatctgcagagacttactatccaagaactccccgacccgccgactgatctcccagagtctaacagcaatcagggactggctgagacttaaggcggcccaactgcaatcgactcggaccgatg

SEQ ID NO: 11158 - DNA, 203 bp, synthetic construct
  source 1..203: mol_type = other DNA
ggcgcgccagtcctcacggatgataaactatgtgcagttcctgatccacctactgactcgcctcttgatcgggctagttgcagctactccagacttactatccaagaactccccgacccgccgactgatctcccagagtctaacagcaatcagggactggctgagacttaaggcggcccaactgcaatcgactcggaccgatg

SEQ ID NO: 11159 - DNA, 203 bp, synthetic construct
  source 1..203: mol_type = other DNA
ggcgcgccagtcctacttgggtataaactatgtgcagttcctgatccacctactgactcgcctcttgatcgggctatacaacatctgcagagacttactatccaagaactccccgacccgccgactgatctcccagagtctaacagcaatcagggactggagtttgggggtacgggcccaactgcaatcgactcggaccgatg

SEQ ID NO: 11160 - DNA, 203 bp, synthetic construct
  source 1..203: mol_type = other DNA
ggcgcgccagtcctcgacacagataaactatgtgcagttcctgatccacctactgactcgcctcttgatcgggctatacaacatctgcagagacttactatccaagaactccccgacccgccgactgatctcccagagtctaacagcaatcagggactggctgagacttaaggcaaggggctatgttgcgactcggaccgatg

SEQ ID NO: 11161 - DNA, 203 bp, synthetic construct
  source 1..203: mol_type = other DNA
ggcgcgccagtcctcgacatttataaactatgtgcagttcctgatccacctactgactcgcctcttgatcgggctatacaacatctgcagagacttactatccaagaactccccgacccgccgactgatctcccagagtctaacagcaatcagggactggctgagacttaaggcggcccaactgcaatcgactcggaccgatg

SEQ ID NO: 11162 - DNA, 203 bp, synthetic construct
  source 1..203: mol_type = other DNA
ggcgcgccagtccttcaccgctataaactatgtgcagttcctgatccagggtaccgtaatattcttgatcgggctatacaacatctgcagagacttactatccaagaactccccgacccgccgactgatctcccagagtctaacagcaatcagggactggctgagacttaaggcggcccaactgcaatcgactcggaccgatg

SEQ ID NO: 11163 - DNA, 203 bp, synthetic construct
  source 1..203: mol_type = other DNA
ggcgcgccagtcctcgaacactataaatgccccttggaaaaggtttgggtaagggaggagctaagcgtcatcgcaaggttttgcgcgataacatccagggcatcactaagccagctatccggcgccttgctcgtcgcggcggtgtcaagcgaatttctggccttatctatgaggagactcgtggtgttcgactcggaccgatg

SEQ ID NO: 11164 - DNA, 203 bp, synthetic construct
  source 1..203: mol_type = other DNA
ggcgcgccagtcctcaaagtcgataagtaagccgtgccgaaacgttaagtacgtatacagcacgtaacaactgttagtttaattttccaaaatttatttttcacaatttttagttaagattttagcttgccttaagcagtctttatatcttctgtatattattttaaagtttataggagcaaagttcgcgactcggaccgatg

SEQ ID NO: 11165 - DNA, 203 bp, synthetic construct
  source 1..203: mol_type = other DNA
ggcgcgccagtcctcgcgtggaataagtaagccgtgccgaaacgttaatcggtcgctagttgcgtaacaactgttagtttaattttccaaaatttatttttcacaatttttagttaagattttagcttgcctgtccactcgacctgatcttctgtatattattttaaagtttataggagcaaagttcgcgactcggaccgatg

SEQ ID NO: 11166 - DNA, 203 bp, synthetic construct
  source 1..203: mol_type = other DNA
ggcgcgccagtccttcaggacgataagtaagccgtgccgaaacgttaatcggtcgctagttgcgtaacaactgttagtttaattttccaaaatttatttttcacggccgcccaacggaattttagcttgccttaagcagtctttatatcttctgtatattattttaaagtttataggagcaaagttcgcgactcggaccgatg

SEQ ID NO: 11167 - DNA, 203 bp, synthetic construct
  source 1..203: mol_type = other DNA
ggcgcgccagtcctagcctgggataatgggctgtgtgcaatgtaaggataaagaagcaacaaaactgacggaggagagggacggcagcctgaaccagagctctgccaggttaatacaaacagaccccacccctcagcactaccccagcttcggtgtgacctccatccccaactacaacaacttccacgcgactcggaccgatg

SEQ ID NO: 11168 - DNA, 203 bp, synthetic construct
  source 1..203: mol_type = other DNA
ggcgcgccagtcctaggagtgtataatgggctgtgtgcaatgtaaggataaagaagcaacaaaactgacggaggagagggacggcagcctgaaccagagctctgggtaccgctatggcacagaccccaccccgtgcactaggatatgcttcggtgtgacctccatccccaactacaacaacttccacgcgactcggaccgatg

SEQ ID NO: 11169 - DNA, 203 bp, synthetic construct
  source 1..203: mol_type = other DNA
ggcgcgccagtcctctccaaccataatgggctgtgtgcaatgtaaggataaagaagcaacaaaactgacggaggagagggacggcagcctgaaccagagctctgggtaccgctatggccgttctagtttggttcagcactaccccagcttcggtgtgacctccatccccaactacaacaacttccacgcgactcggaccgatg

SEQ ID NO: 11170 - DNA, 203 bp, synthetic construct
  source 1..203: mol_type = other DNA
ggcgcgccagtccttagagcgcataatgggctgtgtgcaatgtaaggataaagaagcaacaatctgagacacatgtagggacggcagcctgaaccagagctctgggtaccgctatggcacagaccccacccctcagcactaccccagcttcggtgtgacctccatccccaactacaacaacttccacgcgactcggaccgatg

SEQ ID NO: 11171 - DNA, 203 bp, synthetic construct
  source 1..203: mol_type = other DNA
ggcgcgccagtcctggtccgtgatacacggtttgtcccccccttccccttccccggggtctgggggtgacattgcaccgcgcccctcgtggggtcgcgttgccaccccacgcggactccccagctcgcgcgcccctcccatttgcctgtcctggtcaggcccccaccccccttcccacctgaccagcccgactcggaccgatg

SEQ ID NO: 11172 - DNA, 203 bp, synthetic construct
  source 1..203: mol_type = other DNA
ggcgcgccagtccttcacgcatatacttggaaaaacccacatagcattaaaaacaaagtactactgaacaaagtgataaatacattttctccgtcacgatggccctaaccacaggaacatttaaacttacaatagaattcactgaagaatatccaaataaaccacctacagttagatttgtctctaagcgactcggaccgatg

SEQ ID NO: 11173 - DNA, 203 bp, synthetic construct
  source 1..203: mol_type = other DNA
ggcgcgccagtcctttagccgaatatcaggctcttgaagagcctattgagctagctggtagtcctccggcccctgaatgcggctaatcctaactgcggagcacatgctcacaaaccagtgggtggtgtgtcgtaacgggcaactctgcagcggaaccgactactttgggtgtccgtgtttccttttatcgactcggaccgatg

SEQ ID NO: 11174 - DNA, 203 bp, synthetic construct
  source 1..203: mol_type = other DNA
ggcgcgccagtcctgcgcatgcatattttaggccagaggttaataagaaggaagtagtgctatcttaataattaggttaactatttagttttactgttcaggatgcctattggcagccccataatatccaggacaccctctctgcttcttatatgattaggttgtcatttagaataagaaaataacctcgactcggaccgatg

SEQ ID NO: 11175 - DNA, 203 bp, synthetic construct
  source 1..203: mol_type = other DNA
ggcgcgccagtcctaccagttaatcacccctaaatgtattccaaagaataagaacattgttttatacatagcacacttaacaaaatcaagaaatttaacattaatacagtactgttacctaatccgtagtcgattttcaaattttgtcagttgttccaataatgtcctttatatgactttgaggtgttcgactcggaccgatg

SEQ ID NO: 11176 - DNA, 203 bp, synthetic construct
  source 1..203: mol_type = other DNA
ggcgcgccagtcctgtgtttagatcacccctaaatgtattccaaagaataagaacattgttttatacatagcacacttaacaaaatcaagaaatttaacattaatacagtactgttacctaatccgtagtcgattttcaaattttgtcagttgttccaatgccaggtggggacgattccccgcccagccgactcggaccgatg

SEQ ID NO: 11177 - DNA, 203 bp, synthetic construct
  source 1..203: mol_type = other DNA
ggcgcgccagtcctctcggccaatcacccctaaatgtattccaaagaataagaacattgttttatacatagcacacttaacaaaatcaagtttcgactgtcccttacagtactgttacctaatccgtagtcgattttcaaattttgtcagttgttccaataatgtcctttatatattccccgcccagccgactcggaccgatg

SEQ ID NO: 11178 - DNA, 203 bp, synthetic construct
  source 1..203: mol_type = other DNA
ggcgcgccagtccttccaccatatcaggctcaggttctgaggaagaagaggaggaggaggaagaggaggaggaggaagggagcaccagtgaagaatcagaggaggaagaggaagaggaggaggaggagaccggcagcaactctgagagactcatgagaacgtctgccgaagaagtaagtgaggaagaacgactcggaccgatg

SEQ ID NO: 11179 - DNA, 203 bp, synthetic construct
  source 1..203: mol_type = other DNA
ggcgcgccagtcctgttaagccatcaggctcaggttctgaggaagaagaggaggaggaggaagaggaggaggaggaagggagcaccagtgaagaatcagaggaggaagaggaagaggaggaggaggagaccggcagcaactctgaggaggcatcagagcatgagcaacgcagcttaagtgaggaagaacgactcggaccgatg

SEQ ID NO: 11180 - DNA, 203 bp, synthetic construct
  source 1..203: mol_type = other DNA
ggcgcgccagtccttgaccgaaatcaggctcaggttctgaggaagaagaggaggaggaggaagaggaggaggaggatactgtacttgcacaagaatcagaggaggaagaggaagaggaggaggaggagaccggcagcaactctgaggaggcatcagagcagtctgccgaagaagtaagtgaggaagaacgactcggaccgatg

SEQ ID NO: 11181 - DNA, 203 bp, synthetic construct
  source 1..203: mol_type = other DNA
ggcgcgccagtcctggaggcagatcaggctcaggttctgaggaagaaggacttataagactggaggaggaggaggaagggagcaccagtgaagaatcagaggaggaagaggaagaggaggaggaggagaccggcagcaactctgaggaggcatcagagcagtctgccgaagaagtaagtgaggaagaacgactcggaccgatg

SEQ ID NO: 11182 - DNA, 203 bp, synthetic construct
  source 1..203: mol_type = other DNA
ggcgcgccagtcctcttccctgatcagttcaatagtttagttattttaaaatatttgagaataggtaagtttctatggcacttcatagcaataggtaataattaacagcttaattatacactccgttccccataaaatcgtaactatttaatttacaaagtaaaaacaaaaatatgggacaagtagttcgactcggaccgatg

SEQ ID NO: 11183 - DNA, 203 bp, synthetic construct
  source 1..203: mol_type = other DNA
ggcgcgccagtcctgtgatacgatcattacattgtccgaggacgtggtgaaggagctgaagaaggctctgtgcaatcctcacattcaagctgataggctgcgctaccggaatgtcatccagcgagtgattagatctggctctcctggccatcaatacgctgtgcaaagactgctcagaccccaatccacgactcggaccgatg

SEQ ID NO: 11184 - DNA, 203 bp, synthetic construct
  source 1..203: mol_type = other DNA
ggcgcgccagtcctgacggcggatccacaacatccttcaggtctccggcccacccagccagggcagcgccagcactagctcagacgcaaggacggaaccgctggactccaggttccttgcctgggagtaggagaaatccacctgctgggggctgagtgtggcctgagggacaggccctgggtcccgggcgactcggaccgatg

SEQ ID NO: 11185 - DNA, 203 bp, synthetic construct
  source 1..203: mol_type = other DNA
ggcgcgccagtcctcaggaaatatccacaacatctccacatcgctgtccccacccagccaggaatataagctatgcagctcagacgcaaggacggaaccgctggactccaggttccttgcctgggagtaggagaaatccacctgctgggggctgagtgtggcctgagggacaggccctgggtcccgggcgactcggaccgatg

SEQ ID NO: 11186 - DNA, 203 bp, synthetic construct
  source 1..203: mol_type = other DNA
ggcgcgccagtccttatgcttcatccacaacatctccacatcgctgtccccacccagccagggcagcgccagcactagctcagacgcaaggacggaaccgctggactccaggttccttgcctgggagtaggagaaatccacctgctgggggctgagtgtgcttgcgttagtcttccctgggtcccgggcgactcggaccgatg

SEQ ID NO: 11187 - DNA, 203 bp, synthetic construct
  source 1..203: mol_type = other DNA
ggcgcgccagtcctgtgtgctaatccacaacatctccacatcgctgtccccacccagccagggcagcgccagcactagctcagacgcaaggacggaaccgctggactccaggttccttgcctgggagtaggagaaatccacctgctgggggctgagtgtggcctgagggacaggccctgggtcccgggcgactcggaccgatg

SEQ ID NO: 11188 - DNA, 203 bp, synthetic construct
  source 1..203: mol_type = other DNA
ggcgcgccagtcctacttaatgatccacaacatctccacatcgctgtccccacccagccagggcagcgccagcactctgcaccgtatcctgacggaaccgctggactccaggttccttgcctgggagtaggagaaatccacctgctgggggctgagtgtggcctgagggacaggccctgggtcccgggcgactcggaccgatg

SEQ ID NO: 11189 - DNA, 203 bp, synthetic construct
  source 1..203: mol_type = other DNA
ggcgcgccagtcctaactcctaatccagacaggactcaccgagtatcaaatgataagaactgtcgcgcaacttcctaataatacttgcactgggagcactaagaaaagattgatctctgggctggtgaacataatctctgtcccagtcagaaaaggagagaggaaattagcagagcgattggtggagacgactcggaccgatg

SEQ ID NO: 11190 - DNA, 203 bp, synthetic construct
  source 1..203: mol_type = other DNA
ggcgcgccagtccttattaagtatccatgctctcaggctccgatttgtgaataggtttttatattcgaagtaggtagtattgcgcatactattaattccacaatacgtggtcttcgtcttagcaaatttacctttcgtccctatggaaatggctcttcggacctgagtacagtgggacaaccccaacgcgactcggaccgatg

SEQ ID NO: 11191 - DNA, 203 bp, synthetic construct
  source 1..203: mol_type = other DNA
ggcgcgccagtcctgccgccacatccgcagtttaggagagaggaagtaagaagacgcctccgggtaagggacgcccgcctttggggaaaaaccaatgcgcgtactgtaaggaggagggacattggaagaagaactgtccaaaactcgtaagcggggcaaccccagtgttggtagaagaattacaatagcgactcggaccgatg

SEQ ID NO: 11192 - DNA, 203 bp, synthetic construct
  source 1..203: mol_type = other DNA
ggcgcgccagtcctatgcgcaaatccgcccaggtagccggctcggacccaggtcctgcgcccaggtcctcccctgccccccagcgacggagccggggccgggggtaattttatgaaacggccatgcgggtgagccgcggctgcagaggcctgagcgcctgatcgccgcggacccgagccgagcccacccgactcggaccgatg

SEQ ID NO: 11193 - DNA, 203 bp, synthetic construct
  source 1..203: mol_type = other DNA
ggcgcgccagtcctgaaagctgatccggagtaactaagttggctggtactgccgtaataaatttaagagcagaccagattaatgatatggtttattcccttcttgaaaagggtaaactacttattagagatacaaataaagaagttttcgttggtgacagtttggttaatgtaatctaaactttaaaacgactcggaccgatg

SEQ ID NO: 11194 - DNA, 203 bp, synthetic construct
  source 1..203: mol_type = other DNA
ggcgcgccagtcctaatcgaacatctagtctcataagtgaccctccctgggctgctttctttcgattatcatcagtagggaaggtttcagtgctcttcccagcacaactccggtgcaaaggcttgggcatcctggtgctttgcctctagcccatgctccacagcgaggagagagaaaaccctgaggcacgactcggaccgatg

SEQ ID NO: 11195 - DNA, 203 bp, synthetic construct
  source 1..203: mol_type = other DNA
ggcgcgccagtcctgggaaatcatctagtctcataagtgaccctccctgggctgctttctttcgattatcatcagtgaccctaccccggctgctcttcccagcacaactccggtgcaaaggcttgggcatcctggtgctttgcctctagcccatgctccacagcgaggagagagaaaaccctgaggcacgactcggaccgatg

SEQ ID NO: 11196 - DNA, 203 bp, synthetic construct
  source 1..203: mol_type = other DNA
ggcgcgccagtcctcgaagatgatctagtctcataagtgaccctccctgggctgctttctttcgattatcatcagtgaccctaccccggctgctcttcccagcatcgtggaccacaggaggcttgggcatcctggtgctttgcctctagcccatgctccacagcgaggagagagaaaaccctgaggcacgactcggaccgatg

SEQ ID NO: 11197 - DNA, 203 bp, synthetic construct
  source 1..203: mol_type = other DNA
ggcgcgccagtccttcctcttaatctagtctcataagtgaccctcccttacagttacaacagcgattatcatcagtgaccctaccccggctgctcttcccagcacaactccggtgcaaaggcttgggcatcctggtgctttgcctctagcccatgctccacagcgaggagagagaaaaccctgaggcacgactcggaccgatg

SEQ ID NO: 11198 - DNA, 203 bp, synthetic construct
  source 1..203: mol_type = other DNA
ggcgcgccagtccttgatggcgatctagtctcatcctgcctatagaaagggctgctttctttcgattatcatcagtgaccctaccccggctgctcttcccagcacaactccggtgcaaaggcttgggcatcctggtgctttgcctctagcccatgctccacagcgaggagagagaaaaccctgaggcacgactcggaccgatg

SEQ ID NO: 11199 - DNA, 203 bp, synthetic construct
  source 1..203: mol_type = other DNA
ggcgcgccagtcctggcatgtcatctagtttccttaaattccccccgcaccgaaacgcggtctttctctagacgcgtcttgctgggagagtgtccgttgcttcccgtccgtgtcgcggccctgcggttggcggcctcctcgtggagcggagcaaggccaggcggcccctgctcgagtcccgcgtcgcccgactcggaccgatg

SEQ ID NO: 11200 - DNA, 203 bp, synthetic construct
  source 1..203: mol_type = other DNA
ggcgcgccagtcctcttcatcaatctatgcactgtcggcctgttgttgtgaatcgccagacctttgtaacacccggaagtctgaagcatgtgtttgatgatctcagaggctcagtatccttgtcctgggttggagatagcactggggtcattctagtcttgactaccttccatgtaccactggtaattcgactcggaccgatg

SEQ ID NO: 11201 - DNA, 203 bp, synthetic construct
  source 1..203: mol_type = other DNA
ggcgcgccagtccttgcgagtaatctcagttctaaaggacgcgactctcccgacgcggggaggctattctgcccatttggggacacttccccgccgctgccaggacccgcttctctgaaaggctctccttgcagctgcttagacgctggatttttttcgggtagtggaaaaccagcagcctcccgcgacgactcggaccgatg

SEQ ID NO: 11202 - DNA, 203 bp, synthetic construct
  source 1..203: mol_type = other DNA
ggcgcgccagtcctgttgcctcatctctagcagtggcgcccgaacagggacctgaaagcgaattcatggggtctaaagctctctcgacgcaggactcggcttgctgaagcgcgcacggcaagaggcgaggggcggcgactggtgagtacgccaaaaattttgactagcggaggctagaaggagagagacgactcggaccgatg

SEQ ID NO: 11203 - DNA, 203 bp, synthetic construct
  source 1..203: mol_type = other DNA
ggcgcgccagtcctcggattcaatctctgtgcaccaaccggctggggtccttgcgcgccgcggctcagggaggagcaccgactgcgccgcgtaagtgccgcctgccctgcgtgggtcgtgccagctcagcgggacaggtcctcgcctcggtccctcggacttagggagcgcggggcagaccctgagagcgactcggaccgatg

SEQ ID NO: 11204 - DNA, 203 bp, synthetic construct
  source 1..203: mol_type = other DNA
ggcgcgccagtcctatgcatttatctgagaatagaaccacaatcaagtcatactactagtcactatacaataatcaacaattttagtcaactgattaccaagatgttatcataggtccgaactgatcaatctaacaaaaaaactaaacgttccacaataagctgcacactgctacaaaatattcagcccgactcggaccgatg

SEQ ID NO: 11205 - DNA, 203 bp, synthetic construct
  source 1..203: mol_type = other DNA
ggcgcgccagtcctcacagttcatctgagaatagaaccacaatcaagtcatactactagtcactatacaataatcaacaattttagtcaatctggacgtttttagttatcataggtccgaactgatcaatctaacaaaaaaactaaacgttccacaataaatcaacgttcaggccaaaatattcagcccgactcggaccgatg

SEQ ID NO: 11206 - DNA, 203 bp, synthetic construct
  source 1..203: mol_type = other DNA
ggcgcgccagtcctatgcttggatctgagaatagtcggggtgctggtacatactactagtcactatacaataatcaacaattttagtcaactgattaccaagatgttatcataggtccgaactgatcaatctaacaaaaaaactaaacgttccacaataaatcaacgttcaggccaaaatattcagcccgactcggaccgatg

SEQ ID NO: 11207 - DNA, 203 bp, synthetic construct
  source 1..203: mol_type = other DNA
ggcgcgccagtcctaagaatgcatctgatctcagacgtgttctcgtcactgcaactcttggaacaagataagacagtcatccattagtaatttttaagaaaaaaacgataggaccgaacctagtattgaaagaaccgtctcggtcaatctaggtaatcgagctgataccgtctcggaaagctcaaatccgactcggaccgatg

SEQ ID NO: 11208 - DNA, 203 bp, synthetic construct
  source 1..203: mol_type = other DNA
ggcgcgccagtcctcgcagaatatctgatctcagtgagaaaaatcaacctgcaactcttggaacaagataagacagtcatccattagtaaaacccccatcgtcgacgataggaccgaacctagtattgaaagaaccgtctcggtcaatctaggtaatcgagctgataccgtctcggaaagctcaaatccgactcggaccgatg

SEQ ID NO: 11209 - DNA, 203 bp, synthetic construct
  source 1..203: mol_type = other DNA
ggcgcgccagtcctgggcgcgtatctgatctcagtgagaaaaatcaacctgcaactcttggaacaagataagacagtcatccattagtaatttttaagaaaaaaacgataggaccgaaagccaatcattgtcaaccgtctcggtcaatctaggtaatcgagctgataccgtctcggaaagctcaaatccgactcggaccgatg

SEQ ID NO: 11210 - DNA, 203 bp, synthetic construct
  source 1..203: mol_type = other DNA
ggcgcgccagtccttcatagtgatctgatctcagtgagaaaaatcaacctgcaactcttggaacaagataagacagtcatccattagtaatttttaagaaaaaaacgataggaccgaacctagtattgaaagtcgttggctccgacatctaggtaatcgagctgataccgtctcggaaagctcaaatccgactcggaccgatg

SEQ ID NO: 11211 - DNA, 203 bp, synthetic construct
  source 1..203: mol_type = other DNA
ggcgcgccagtccttaacgcccatctgatctcagtgagaaaaatcaacctgcaactcttggaacaagataagacagtcatccattagtaatttttaagaaaaaattctcttatttacccctagtattgaaagaaccgtctcggtcaatctaggtaatcgagctgataccgtctcggaaagctcaaatccgactcggaccgatg

SEQ ID NO: 11212 - DNA, 203 bp, synthetic construct
  source 1..203: mol_type = other DNA
ggcgcgccagtcctgaactgctatctgcctacaaactggtttgctactttaccaactggtcccaggaccggcaggaaccaggaaaattcacccctgagaatattgaccccttcctatgctctcatctcatctattcattcgccagcgcgtcgcttgtggtggttatcatcaaggacaagagtgaagtgcgactcggaccgatg

SEQ ID NO: 11213 - DNA, 203 bp, synthetic construct
  source 1..203: mol_type = other DNA
ggcgcgccagtccttcctttgcatctggccatccatccgtgggggtctatgggccttcgagatagccgccaggaatttttccagcagctactgcaaggctgtctcctgcctactgcccagcagggccttgaccagatctggctgctccttgccatctgcctcgcctgccgcctcctctggaggctcggcgactcggaccgatg

SEQ ID NO: 11214 - DNA, 203 bp, synthetic construct
  source 1..203: mol_type = other DNA
ggcgcgccagtccttttcacaaatctggccatccatccgtgggggtctgcaatggccaccttcctaatgtgttctattttccagcagctactgcaaggctgtctcctgcctactgcccagcagggccttgaccagatctggctgctccttgccatctgcctcgcctgccgcctcctctggaggctcggcgactcggaccgatg

SEQ ID NO: 11215 - DNA, 203 bp, synthetic construct
  source 1..203: mol_type = other DNA
ggcgcgccagtcctaattacggatctggccatccatccgtgggggtctgcaatggccacctttagccgccaggaatgcagtattgctaacctgcaaggctgtctcctgcctactgcccagcagggccttgaccagatctggctgctccttgccatctgcctcgcctgccgcctcctctggaggctcggcgactcggaccgatg

SEQ ID NO: 11216 - DNA, 203 bp, synthetic construct
  source 1..203: mol_type = other DNA
ggcgcgccagtcctttaggttcatctggccatccatccgtgggggtctgcaatggccacctttagccgccaggaatttttccagcagctactgcaaggctgtctcctgcctactgcccagcagggccttgacatatcaccagccgcccttgccatctgcctcgcctgccgcctcctctggaggctcggcgactcggaccgatg

SEQ ID NO: 11217 - DNA, 203 bp, synthetic construct
  source 1..203: mol_type = other DNA
ggcgcgccagtcctaacctcctatctggccatccatccgtgggggtctgcaatggccacctttagccgccaggaatttttccagcagctactgcaaggctgtctcctgcctactgcccagcagggccttgaccagatctggctgctccttgccatctgccggtatcctatgacactctggaggctcggcgactcggaccgatg

SEQ ID NO: 11218 - DNA, 203 bp, synthetic construct
  source 1..203: mol_type = other DNA
ggcgcgccagtccttgctgctaatctggccatccatccgtgggggtctgcaatggccacctttagccgccaggaatttttccagcagctactgcaaggctgtctgactggctaaatgaagcagggccttgaccagatctggctgctccttgccatctgcctcgcctgccgcctcctctggaggctcggcgactcggaccgatg

SEQ ID NO: 11219 - DNA, 203 bp, synthetic construct
  source 1..203: mol_type = other DNA
ggcgcgccagtcctgctcagctatctggccatccatccgtgggggtctgcaatggccacctttagccgccaggaatttttccagcagctataattgcatccgaacctgcctactgcccagcagggccttgaccagatctggctgctccttgccatctgcctcgcctgccgcctcctctggaggctcggcgactcggaccgatg

SEQ ID NO: 11220 - DNA, 203 bp, synthetic construct
  source 1..203: mol_type = other DNA
ggcgcgccagtcctagtaaaccatctggccatcccgtacgaattaggcgcaatggccacctttagccgccaggaatttttccagcagctactgcaaggctgtctcctgcctactgcccagcagggccttgaccagatctggctgctccttgccatctgcctcgcctgccgcctcctctggaggctcggcgactcggaccgatg

SEQ ID NO: 11221 - DNA, 203 bp, synthetic construct
  source 1..203: mol_type = other DNA
ggcgcgccagtcctattagcggatcttcctcccggcggttttttggttagtagctcacaatcatctcgtgtttcagcaaagtgtgcataattataaagtgctgggtcatctaagcttttcagtcgagaaaaaaacagtagatcagaagaacaactggcaacacttctcatcctgagacctacttcaagcgactcggaccgatg

SEQ ID NO: 11222 - DNA, 203 bp, synthetic construct
  source 1..203: mol_type = other DNA
ggcgcgccagtcctcgaacttaatcttggcgaattaaccttaaccctagagccttatgccacgatccagtggttgtaaggtcgtaatgagcaattccgggacgggaccgactactttgggtgtccgtgtttctcatttttcttcatattgtcttatggtcacagcatatatatacatatactgtgatccgactcggaccgatg

SEQ ID NO: 11223 - DNA, 203 bp, synthetic construct
  source 1..203: mol_type = other DNA
ggcgcgccagtcctccggcactatgacagagatcttctagactaggtgcgagaggccgaggaccagaacaacatccgcctaccctccatcattgttataaaaaacttaggaaccaggtccacacagccgccagccaaccaaccatccactcccacgactgaccataggttgtatagagcaggcacgcccgactcggaccgatg

SEQ ID NO: 11224 - DNA, 203 bp, synthetic construct
  source 1..203: mol_type = other DNA
ggcgcgccagtcctctatcttcatgacagagatcttctagactaggtgcgagaggccgaggaccagaacaacatccgcctaccctccatcattgttataaaaaacttaggaaccaggtccacacagccgccagccaaccaaccatcgtactgtttcgtgagagccgatggcagaagagcaggcacgcccgactcggaccgatg

SEQ ID NO: 11225 - DNA, 203 bp, synthetic construct
  source 1..203: mol_type = other DNA
ggcgcgccagtcctgacatcgaatgacagagatcttctagactaggtggatccacagcgattccagaacaacatccgcctaccctccatcattgttataaaaaacttaggaaccaggtccacacagccgccagccaaccaaccatccactcccacgactggagccgatggcagaagagcaggcacgcccgactcggaccgatg

SEQ ID NO: 11226 - DNA, 203 bp, synthetic construct
  source 1..203: mol_type = other DNA
ggcgcgccagtcctcctctccgatgaccaattatatgaatcaattatctgaattacttggatttgatcttaatccataaattataataaagcgacttatcttggtcaatgtcactaacaccattagttaatataaaacttgacagaagataaaaatggggcaaataaatcaattcagccgacccaacccgactcggaccgatg

SEQ ID NO: 11227 - DNA, 203 bp, synthetic construct
  source 1..203: mol_type = other DNA
ggcgcgccagtccttcccgaggatgagaagcgaccacccctcgacgacttctccttcacggtcgaacgagtatcatacggccaactctcccccggaatccataacggctcacgcaaatagatttctttccgttcctcctcggagggctctccacatttatctgctcgagacgtggcagctccagaacccgactcggaccgatg

SEQ ID NO: 11228 - DNA, 203 bp, synthetic construct
  source 1..203: mol_type = other DNA
ggcgcgccagtcctgtccctatatgagaagcgaccacccctcgacgacttctccttcacggttcccacccaggagcacggccaactctcccccggaatccataacggctcacgcaaatagatttctttccgtaatagacaacctatctctccacatttatctgctcgagacgtggcagctccagaacccgactcggaccgatg

SEQ ID NO: 11229 - DNA, 203 bp, synthetic construct
  source 1..203: mol_type = other DNA
ggcgcgccagtcctaaactaggatgagaagcgaccacccctcgacgacttctccttcacggttcccacccaggagcacggccaactctcccccggaatccataacggctcacgcaaatagatttctttccgttcctcctcggagggagtagtcatcccccctgctcgagacgtggcagctccagaacccgactcggaccgatg

SEQ ID NO: 11230 - DNA, 203 bp, synthetic construct
  source 1..203: mol_type = other DNA
ggcgcgccagtccttagcaactatgagaagcgaccacccctcgacgacttctccttcacggttcccacccaggagcacggccaactctcccccggaatccataacggctcacgcaaatagatttctttccgttcctcctcggagggctctccacatttatctgctcgagacgtgttgcgatacccctacgactcggaccgatg

SEQ ID NO: 11231 - DNA, 203 bp, synthetic construct
  source 1..203: mol_type = other DNA
ggcgcgccagtcctcggcagcgatgagaagcgaccacccctcgacgacttctccttcacggttcccacccaggagcacggccaactctcccccggaatccataattttctcaaatcgaagatttctttccgttcctcctcggagggctctccacatttatctgctcgagacgtggcagctccagaacccgactcggaccgatg

SEQ ID NO: 11232 - DNA, 203 bp, synthetic construct
  source 1..203: mol_type = other DNA
ggcgcgccagtcctcaagacttatgagcgcgagcggcgggctcttgggtcttttttagcgccatctgctcgcggcgccgcctcctgctcctcccgctgctgctgccgctgccgccctgagtcactgcctgcgcagctccggccgccaaaggtgtacgttcagtcgccgatatttggagttcttacaaccgactcggaccgatg

SEQ ID NO: 11233 - DNA, 203 bp, synthetic construct
  source 1..203: mol_type = other DNA
ggcgcgccagtccttcgtatgtatgagcgcgagcggcgggctcttgggtcttttttagcgccatctgctcgcggcgccgcctcctgctcctcccgctgctgctgccgctgccgccctgagtcactgcctgcgcagctccggccgcctggctccccatactagtcgccgatatttggagttcttacaaccgactcggaccgatg

SEQ ID NO: 11234 - DNA, 203 bp, synthetic construct
  source 1..203: mol_type = other DNA
ggcgcgccagtccttgtcaagcatgagcgcgagcggcgggctcttgggtcttttttagcgccatctgctcgcggcgccgcctcctgctcctcccgctgctgctgccgctgccgccctgagtcactgcctgcggccggtgacttatatggctccccatactagtcgccgatatttggagttcttacaaccgactcggaccgatg

SEQ ID NO: 11235 - DNA, 203 bp, synthetic construct
  source 1..203: mol_type = other DNA
ggcgcgccagtcctactaacatatgagcgcgagcggcgggctcttgggtcttttttagcgcctaactgagcgtcgtccgcctcctgctcctcccgctgctgctgccgctgccgccctgagtcactgcctgcgcagctccggccgcctggctccccatactagtcgccgatatttggagttcttacaaccgactcggaccgatg

SEQ ID NO: 11236 - DNA, 203 bp, synthetic construct
  source 1..203: mol_type = other DNA
ggcgcgccagtcctatgacaacatgatctttgaatattaaatgaaaggagactagaataacaactatgaacaggcgcatgaaggagctttagcaggagcattctttcttggtgtgcaaatcacgcctggcagcccctgcccacagtacccgaagatggcaggccttgttcccttcacctaaattcatacgactcggaccgatg

SEQ ID NO: 11237 - DNA, 203 bp, synthetic construct
  source 1..203: mol_type = other DNA
ggcgcgccagtccttgcgtcgtatgatctttgaatattaaatgaaaggagactagaataacagtctcttgactattcatgaaggagctttagcaggagcattctgatccctacgaattatcacgcctggcagcccctgcccacagtacccgaagatggcaggccttgttcccttcacctaaattcatacgactcggaccgatg

SEQ ID NO: 11238 - DNA, 203 bp, synthetic construct
  source 1..203: mol_type = other DNA
ggcgcgccagtccttggccctaatgatgatgcttggtttaagctatcgagttgaccccgggtcaattcttggttcttccgacatgtctacaggaaaagttttcatttccgtaaggcttgtcaaaatttagattgtaattgtttggggttttatgaatcttcagttgaagaatattaaactcagtgaaacgactcggaccgatg

SEQ ID NO: 11239 - DNA, 203 bp, synthetic construct
  source 1..203: mol_type = other DNA
ggcgcgccagtccttttgagtgatgatgatgcttggtttaagctatcgtaccattatgaaaacaattcttggttcttccgacatgtctacaggaaaagttttcatttccgtaaggcttgtcaaaatttagattgtaattgtttggggttttatgaatcttcagttgaagaatattaaactcagtgaaacgactcggaccgatg

SEQ ID NO: 11240 - DNA, 203 bp, synthetic construct
  source 1..203: mol_type = other DNA
ggcgcgccagtccttcgggcttatgatgatgcttggtttaagctatcgtaccattatgaaaacaattcttggttcttccgacatgtctacaggaaaagttttcatttccgtaaggcttgtcaaaatttagattgtaattgtttggggttttatgaatcttttccacgccttagataaactcagtgaaacgactcggaccgatg

SEQ ID NO: 11241 - DNA, 203 bp, synthetic construct
  source 1..203: mol_type = other DNA
ggcgcgccagtcctaggatgccatgatgatgcttttgcgccctctgtataccattatgaaaacaattcttggttcttccgacatgtctacaggaaaagttttcatttccgtaaggcttgtcaaaatttagattgtaattgtttggggttttatgaatcttcagttgaagaatattaaactcagtgaaacgactcggaccgatg

SEQ ID NO: 11242 - DNA, 203 bp, synthetic construct
  source 1..203: mol_type = other DNA
ggcgcgccagtcctcgttacccatgatgcgaggcgaaatgaatcaagtagattctctgggatataagaggcagccgaagagttcacaagtgtgaagcctggaagccggcgggtgccgctgtgtaggaaagaagctaaagcacttccagagcctgtccggagctcagaggttcggaagacttatcgacccgactcggaccgatg

SEQ ID NO: 11243 - DNA, 203 bp, synthetic construct
  source 1..203: mol_type = other DNA
ggcgcgccagtccttggaccctatgcaattaagggcgacggagcggggtgtgaagatggcggacgaagaggccgagcaggagaggttgagttgcggcgaaggcggctgcgtcgcggagctgcagcgcctgggcgagcggctccaggagctggagctacagctgcgggagagccgggtaccggccgtggcgactcggaccgatg

SEQ ID NO: 11244 - DNA, 203 bp, synthetic construct
  source 1..203: mol_type = other DNA
ggcgcgccagtcctgacagggtatgcagtggtgtgatcctgcgccagggggtgtgggcctcgctcaccggcggttggttcttcgacccgcaccagagcaccttctccaactgcttccacctctatgtgtggatcttcctgctcatctttcccttcttactgtacatggtcctgcctcccagcttgatgcgactcggaccgatg

SEQ ID NO: 11245 - DNA, 203 bp, synthetic construct
  source 1..203: mol_type = other DNA
ggcgcgccagtcctttgcacggatgcatagtatgctacgcgcgcgccaatctccacgacgccgactaacgcccctgtacgtggggcctttaatcttacctactctaaccaggtcatcacccaccgttgtttcgccgcatctggtgggtacccaacttttgccattcgggagagccccagggtgcccgacgactcggaccgatg

SEQ ID NO: 11246 - DNA, 203 bp, synthetic construct
  source 1..203: mol_type = other DNA
ggcgcgccagtcctccgtccgcatgcggcggcccaatcggaaggtggaccgaaatcccgcgacagcaagaggcccggtttccagttgacagctaaggaacacagtgctttcaaaagaattggcgtccgctgttcgcctctcctcccgggagtcttctgcctactcccagaagaggagggaagcacagtcgactcggaccgatg

SEQ ID NO: 11247 - DNA, 203 bp, synthetic construct
  source 1..203: mol_type = other DNA
ggcgcgccagtcctgtcaccagatgcggcggcccaatcggaaggtggaccgaaatcccgcgacagcaagaggcccgtagcgacccgcggtaaggctagcaggtatgctttcaaaagaattggcgtccgctgttcgcctctcctcccgggagtcttctgcctactcccagaagaggagggaagcacagtcgactcggaccgatg

SEQ ID NO: 11248 - DNA, 203 bp, synthetic construct
  source 1..203: mol_type = other DNA
ggcgcgccagtcctgtataagaatgcggcggcccaatcggaaggtggaccgaaatcccgcgacagcaagaggcccgtagcgacccgcggtgctaaggaacacagtgctttcaaaagaattggcgtccgctgttcgcctctcctccctttttcaccacaggtactcccagaagaggagggaagcacagtcgactcggaccgatg

SEQ ID NO: 11249 - DNA, 203 bp, synthetic construct
  source 1..203: mol_type = other DNA
ggcgcgccagtcctgctagtatatgctaccagaggtttgtttgttaccttgtgtttgttcgtcacttgtcgacagcgccctgcgaattggtgtacccacaccgcgcggcttgcgaataatactttggagagtcttttgcctccagtgtcttccgtttgtactcgtcctcctctccctctccggccgggcgactcggaccgatg

SEQ ID NO: 11250 - DNA, 203 bp, synthetic construct
  source 1..203: mol_type = other DNA
ggcgcgccagtcctataccggcatgctactttatgcgccccgcccttgcgctcagcgccctctcaccgcccggctctgtgtgctccgggatggagcaggtgtgcagagggtgagaacccagctctgggaccaagtcacttgcttccttacttagcaagactatcgacttgagcaaacttggacctgggcgactcggaccgatg

SEQ ID NO: 11251 - DNA, 203 bp, synthetic construct
  source 1..203: mol_type = other DNA
ggcgcgccagtcctagtgaattatgctgcaaaagcatatgctgaacaatcgtgttgcgtgtttgtgattaactacagtgtattagacttgacagcagaagaactagaggctatcaaacatcagcttaatccaaaagataatgatgtagagctttgagttaataaaaaaaatggggcaaataaaacatccgactcggaccgatg

SEQ ID NO: 11252 - DNA, 203 bp, synthetic construct
  source 1..203: mol_type = other DNA
ggcgcgccagtcctcccttgcaatggagtggtttgctatttagcgtacgtgtaccataggcagccccaaaaacacgtgtgaggagaaagtcccagtcactttgggcaaagtagacagccgcgcttgcgtggtgggacttaattaatgcctgctaacccagagcctcgctgccggtttgatacaacaaccgactcggaccgatg

SEQ ID NO: 11253 - DNA, 203 bp, synthetic construct
  source 1..203: mol_type = other DNA
ggcgcgccagtcctttcttactatggagtggtttgctatttagcgtactccggattgctcgcgccccaaaaacacgtgtgaggagaaagtcccagtcactttgggcaaagtagacagccgcgcttgcgtggtgggacttaattaatgcctgctaacccagttgaaattgataattttgatacaacaaccgactcggaccgatg

SEQ ID NO: 11254 - DNA, 203 bp, synthetic construct
  source 1..203: mol_type = other DNA
ggcgcgccagtcctaacgatttatggcagggccacgccccagcccatgacaacaatgttggatggcagccttgatcagcgtcagcctctctgggaccttggcaaaccgctgcaagaaggccccagtgaagagctgcacggagtgtgtccgtgtggataaggactgcgcctactgcacagacgagatgtcgactcggaccgatg

SEQ ID NO: 11255 - DNA, 203 bp, synthetic construct
  source 1..203: mol_type = other DNA
ggcgcgccagtccttgagtgatatggcagggccacgccccagcccatgggccaggctgctccattgcaatgctcgtagcgtcagcctctctgggaccttggcaaaccgctgcaagaaggccccagtgaagagctgcacggagtgtgtccgtgtggataaggactgcgcctactgcacagacgagatgtcgactcggaccgatg

SEQ ID NO: 11256 - DNA, 203 bp, synthetic construct
  source 1..203: mol_type = other DNA
ggcgcgccagtcctaccatcaaatggcagggccacgccccagcccatgggccaggctgctcctggcagccttgatcagcgtcagcctctccacttgtgcctaccaccgctgcaagaaggccccagtgaagagctgcacggagtgtgtccgtgtggataaggactgcgcctactgcacagacgagatgtcgactcggaccgatg

SEQ ID NO: 11257 - DNA, 203 bp, synthetic construct
  source 1..203: mol_type = other DNA
ggcgcgccagtcctagctgcggatggcagggccacgccccagcccatgggccaggctgctcctggcagccttgatcagcgtcagcctctctgggaccttggcaaaccgctgcaagaaggccccagtgaagagctgcacggagtgtgtccgtgtggataaggactgcgcctactggtggagatcacgaccgactcggaccgatg

SEQ ID NO: 11258 - DNA, 203 bp, synthetic construct
  source 1..203: mol_type = other DNA
ggcgcgccagtccttcccgttcatggcagggccagctatagtgatcatggccaggctgctcctggcagccttgatcagcgtcagcctctctgggaccttggcaaaccgctgcaagaaggccccagtgaagagctgcacggagtgtgtccgtgtggataaggactgcgcctactgcacagacgagatgtcgactcggaccgatg

SEQ ID NO: 11259 - DNA, 203 bp, synthetic construct
  source 1..203: mol_type = other DNA
ggcgcgccagtcctcctaaaggatggcatccaacatggtgacaatcatagattgttatcataaagcgagttggattggccatccagtgtgaatcagattaattactcccttgtttgttggatccactcccgaaacgttttactccttaacttattgaaattgtttgaagacaggatttcagtgtcacacgactcggaccgatg

SEQ ID NO: 11260 - DNA, 203 bp, synthetic construct
  source 1..203: mol_type = other DNA
ggcgcgccagtcctacggattaatggcggcgcttagttgcatgaaggcggaaactctgtgacttcgggtccgtagtggggcctgcggtgggagtgggaaggaaggcggagggaaccattacgaaacacccccattgcggcgagggtcgcctcgagagacggtttctgagttccttgaactttgtaagacgactcggaccgatg

SEQ ID NO: 11261 - DNA, 203 bp, synthetic construct
  source 1..203: mol_type = other DNA
ggcgcgccagtcctagctggatatgtatatttaagcgcctggggcgggacttccggcgcgctggagcgttttccggccgtgcgtttgtggccgtccggcctccctgacatgcagccctctggaccccgaggttggaccctactgtgacacacctaccatgcggacactcttcaacctcctctggcttgcgactcggaccgatg

SEQ ID NO: 11262 - DNA, 203 bp, synthetic construct
  source 1..203: mol_type = other DNA
ggcgcgccagtcctcgatgcgcatgtggctaaccttaaccctgcagctagagcacgtaacccaatgtgtatctagttaactcacttgtcggcgggatgggaccaactactttgggtgtccgtgtttcactttttcctttatatttgcttatggtgacaatatatacaatatatatattggcaccatggcgactcggaccgatg

SEQ ID NO: 11263 - DNA, 203 bp, synthetic construct
  source 1..203: mol_type = other DNA
ggcgcgccagtcctacaagaatatgttagcttacggacatgtatcagatgctgagacacatgtctccgcccctgggtctggggaagaagtgtccggccagagtggcttacaagcggcttctgcggatggacctgcccgtcgcagatgacaacaccgtccacttcaattccaccctcatggctctgatccgactcggaccgatg

SEQ ID NO: 11264 - DNA, 203 bp, synthetic construct
  source 1..203: mol_type = other DNA
ggcgcgccagtcctgactagggatgtttattatttttaaaaaattaggaatgttcagcaccgaatgtcaagatttaccgtatatccctgtttgtttggatacaccagtgacgtccacttctagaagacaaagttatattacttaaacaaccaaagatggagtctcgctcttcgcccaggctggagtgccgactcggaccgatg

SEQ ID NO: 11265 - DNA, 203 bp, synthetic construct
  source 1..203: mol_type = other DNA
ggcgcgccagtcctcgtcgtcgatgtttattatttttaaaaaattagggcctggattttgacaatgtcaagatttaccgtatatccctgtttgtttggatacaccagtgacgtccacttctagaagacaaagttatattacttaaacaaccaaagatggagtctcgctcttcgcccaggctggagtgccgactcggaccgatg

SEQ ID NO: 11266 - DNA, 203 bp, synthetic construct
  source 1..203: mol_type = other DNA
ggcgcgccagtcctactatgacatgtttattatttttaaaaaattagggcctggattttgacaatgtcaagatttagacgcatgtttgcattgtttggatacaccagtgacgtccacttctagaagacaaagttatattacttaaacaaccaaagatggagtctcgctcttcgcccaggctggagtgccgactcggaccgatg

SEQ ID NO: 11267 - DNA, 203 bp, synthetic construct
  source 1..203: mol_type = other DNA
ggcgcgccagtcctccttatctatgtttattatttttaaaaaattagggcctggattttgactggaatttcggaagccgtatatccctgtttgtttggatacaccagtgacgtccacttctagaagacaaagttatattacttaaacaaccaaagatggagtctcgctcttcgcccaggctggagtgccgactcggaccgatg

SEQ ID NO: 11268 - DNA, 203 bp, synthetic construct
  source 1..203: mol_type = other DNA
ggcgcgccagtcctatccgcgtattaccgactagctgtgaggcccggacctgccccggggcgaagggtatgtggcgagacagagccctgcacccctaattcccggtggaaaactcctgttgccgtttccctccaccggcctggagtctcccagtcttgtcccggcagtgccgccctccccactaagaccgactcggaccgatg

SEQ ID NO: 11269 - DNA, 203 bp, synthetic construct
  source 1..203: mol_type = other DNA
ggcgcgccagtcctcttgcgttattatcaagcgtcaataattaaactaattaagctttgtttcacttgccatatgttttgtaatagaacagtttatggccccattaaaaatgtgtaccacatttaccaatcatatatgcacatagaccctttccctaaacgagttattgatttctaaactaaacgacacgactcggaccgatg

SEQ ID NO: 11270 - DNA, 203 bp, synthetic construct
  source 1..203: mol_type = other DNA
ggcgcgccagtcctcgtcagtaattattacagagaagaaggaaactcacttcctgtcgtcgcagagcacagcctagttctgatgcagaggggactgttttcagatggagacactagtaagaagaagaaaaatgtcaccatgcgatccatcaagaccacccctactaagcgaagaacatatcagtacaacgactcggaccgatg

SEQ ID NO: 11271 - DNA, 203 bp, synthetic construct
  source 1..203: mol_type = other DNA
ggcgcgccagtcctgtatcgcgattattcttttggtaggtgtcctacatcttctattattaaacatccaatttgtgtttatgattttttgcctattattttacaaggtattttattataacattgcaacacatttgttgtttttctattatttttgttatataacgataaatctcattaaatctaaaccgactcggaccgatg

SEQ ID NO: 11272 - DNA, 203 bp, synthetic construct
  source 1..203: mol_type = other DNA
ggcgcgccagtccttttgtataattattcttttggtaggtgtcctacatcttctattattaaacatccaatttgtgtttatgattttttgcctattattttacaaggtattttattatgtttagctttactttttgttgtttttctattatttttgttattatgtcggctcggacattaaatctaaaccgactcggaccgatg

SEQ ID NO: 11273 - DNA, 203 bp, synthetic construct
  source 1..203: mol_type = other DNA
ggcgcgccagtccttcggcgtcattcagcaattgtccaatttaggaaacattctgtttaagagttgacaaggtctcaatgaataatggacaagcaacaattacaagaaatggaggaaggttcgaaatcaggtgtcgtcacttggaccgtgactacaccatgccactaccaaatgctactagtaatgatcgactcggaccgatg

SEQ ID NO: 11274 - DNA, 203 bp, synthetic construct
  source 1..203: mol_type = other DNA
ggcgcgccagtcctccttcctaattcagcaattgtccaatttaggaaacattctgtttaagagttgacaaggtctcaatgaataatggacaagcaacaattacataggtactccagctgttcgaaatcaggtgtcgtcacttggaccgtgactacaccatgccactaccaaatgctactagtaatgatcgactcggaccgatg

SEQ ID NO: 11275 - DNA, 203 bp, synthetic construct
  source 1..203: mol_type = other DNA
ggcgcgccagtcctactgtcgcattccagcccccgatgcgccctctctgggcttttgctcgctcagcacaggatctgatcaggagattcatctctggtgctttacaccagagcatggatttaaaaattgcccaaggcctggcaaacaacctaggggactaggttttctctattttaaaagatgtcaatcgactcggaccgatg

SEQ ID NO: 11276 - DNA, 203 bp, synthetic construct
  source 1..203: mol_type = other DNA
ggcgcgccagtcctcgagcccgattccagccccctccttttgaggagggggcttttgctcgctcagcacaggatctctctcaatttagtctctctggtgctttacaccagagcatggatttaaaaattgcccaaggcctggcaaacaacctaggggactaggttttctctattttaaaagatgtcaatcgactcggaccgatg

SEQ ID NO: 11277 - DNA, 203 bp, synthetic construct
  source 1..203: mol_type = other DNA
ggcgcgccagtcctgccgtcctattccagccccctccttttgaggagggggcttttgctcgctcagcacaggatctgatcaggagattcacgagcaagcgcccccaccagagcatggatttaaaaattgcccaaggcctggcaaacaacctaggggactaggttttctctattttaaaagatgtcaatcgactcggaccgatg

SEQ ID NO: 11278 - DNA, 203 bp, synthetic construct
  source 1..203: mol_type = other DNA
ggcgcgccagtccttccacgtgattccagccccctccttttgaggagggggcttttgctcgctcagcacaggatctgatcaggagattcatctctggtgctttacaccagagcatggatttaaaaattgcccaaggcctggcaaacggggcgtcttctatggttttctctattttaaaagatgtcaatcgactcggaccgatg

SEQ ID NO: 11279 - DNA, 203 bp, synthetic construct
  source 1..203: mol_type = other DNA
ggcgcgccagtcctcgtcttgcattcctagggccgcggcgcttcccggcatgctccgctgcaggcccgcgcccgcgcccggactttgccatcggcggggcagtcgcgggatgcgcccgggagccacagcctgtatgccgaaatgaaaggaggatgtgaccgggactgagtcaggagccctctggaagccgactcggaccgatg

SEQ ID NO: 11280 - DNA, 203 bp, synthetic construct
  source 1..203: mol_type = other DNA
ggcgcgccagtcctacctatgaattctgctgtttttcccatatgaagcaatccttcaacaccgacttaggttcaattttctcatcatttactgttgtaattcaatcttactaaagttattccgatatttaagcgtcggcccggcggatataatgtaacaatactattaagattatgatataggccagacgactcggaccgatg

SEQ ID NO: 11281 - DNA, 203 bp, synthetic construct
  source 1..203: mol_type = other DNA
ggcgcgccagtcctcagattagattgagaagaaaatttttggttgcgcaattcaagtgtcctatttaaaatgggacaaatagtgacattcttccaggaagtgcctcatgtaatagaagaggtgatgaacattgttctcattgcactgtctgtactagcagtgctgaaaggtctgtacaattttgcaaccgactcggaccgatg

SEQ ID NO: 11282 - DNA, 203 bp, synthetic construct
  source 1..203: mol_type = other DNA
ggcgcgccagtcctgagaccggattgcatactttgacgaaacaaattttcgttgcatacccaataaaagattattatattgcatacccgtttttaataaaatacattgcataccctctagggcgcgtcggccttgcatacgttgacgaaacaaattttcgttgcatacccaataaaagattattatatcgactcggaccgatg

SEQ ID NO: 11283 - DNA, 203 bp, synthetic construct
  source 1..203: mol_type = other DNA
ggcgcgccagtcctgtaccgttattgcatactttgacgaaacaaattttcgttgcatacccatccgtctcagggattattgcatacccgtttttaataaaatacattgcataccctcttttaataaaaaatattgcatacgttgacgaaacaaattttcgttgcatacccaataaaagattattatatcgactcggaccgatg

SEQ ID NO: 11284 - DNA, 203 bp, synthetic construct
  source 1..203: mol_type = other DNA
ggcgcgccagtccttgggctcgattgctgtccttggctctagcatgatcctagtgagcatcttcattataatcaagtctggtggacggggaacgggagcacctccagagctgagtggtgtcacaaacaatggcttcataccacacagttagttaattaaaaataaaataaaatttgggacaaatcatacgactcggaccgatg

SEQ ID NO: 11285 - DNA, 203 bp, synthetic construct
  source 1..203: mol_type = other DNA
ggcgcgccagtcctctgccgggattgggacatttgatgtaaccggaccctcgcaccgcagaaggttgtcctgtattgttacggtgtatccgtcttggcacactgaaagggtatttttgggtaatcctttcctactgcctgatagggtggcgtgcccggccacgagagattaagggtagcaatttaaaccgactcggaccgatg

SEQ ID NO: 11286 - DNA, 203 bp, synthetic construct
  source 1..203: mol_type = other DNA
ggcgcgccagtcctctgctcctattgggacatttgatgtaaccggacctggttcagtatccgcagcagatgtgccagttacggtgtatccgtcttggcacactgaaagggtatttttgggtaatcctttcctactgcctgatagggtggcgtgcccggccacgagagattaagggtagcaatttaaaccgactcggaccgatg

SEQ ID NO: 11287 - DNA, 203 bp, synthetic construct
  source 1..203: mol_type = other DNA
ggcgcgccagtccttagctctgattgggacatttgatgtaaccggacctggttcagtatccgggttgtcctgtattacgttaaatgcctggtcttggcacactgaaagggtatttttgggtaatcctttcctactgcctgatagggtggcgtgcccggccacgagagattaagggtagcaatttaaaccgactcggaccgatg

SEQ ID NO: 11288 - DNA, 203 bp, synthetic construct
  source 1..203: mol_type = other DNA
ggcgcgccagtcctaagccggtattgggacatttgatgtaaccggacctggttcagtatccgggttgtcctgtattgttacggtgtatccgtcttggcacactgaaagggtatttttgggtaatcctttcctactgcctgatagggcccgaaagtaataaacgagagattaagggtagcaatttaaaccgactcggaccgatg

SEQ ID NO: 11289 - DNA, 203 bp, synthetic construct
  source 1..203: mol_type = other DNA
ggcgcgccagtcctcttggtacattgggacatttgatgtaaccggacctggttcagtatccgggttgtcctgtattgttacggtgtatccgtcttggcacactgaaagggtatttttgggtaatcctttcctactgcctgatagggtggcgtgcccggccacgagagattaaggtagtttcagggtctcgactcggaccgatg

SEQ ID NO: 11290 - DNA, 203 bp, synthetic construct
  source 1..203: mol_type = other DNA
ggcgcgccagtcctagcgtgttattgggacatttgatgtaaccggacctggttcagtatccgggttgtcctgtattgttacggtgtatccgtcttggcacactgaaagggtatttttgggtaatcctttcctactgcctgatagggtggcgtgcccggcctaatcgctggggcagtagcaatttaaaccgactcggaccgatg

SEQ ID NO: 11291 - DNA, 203 bp, synthetic construct
  source 1..203: mol_type = other DNA
ggcgcgccagtccttggttcaaattgggacatttgatgtaaccggacctggttcagtatccgggttgtcctgtattgttacggtgtatccgtcttggcacactggcgtcactcacccaggtaatcctttcctactgcctgatagggtggcgtgcccggccacgagagattaagggtagcaatttaaaccgactcggaccgatg

SEQ ID NO: 11292 - DNA, 203 bp, synthetic construct
  source 1..203: mol_type = other DNA
ggcgcgccagtcctcataacgcattgggacattttggtgctttactggtggttcagtatccgggttgtcctgtattgttacggtgtatccgtcttggcacactgaaagggtatttttgggtaatcctttcctactgcctgatagggtggcgtgcccggccacgagagattaagggtagcaatttaaaccgactcggaccgatg

SEQ ID NO: 11293 - DNA, 203 bp, synthetic construct
  source 1..203: mol_type = other DNA
ggcgcgccagtcctgtcgcagcatttcagattaactcctccctctccgcgcgcccggcgcgaagcctgcgattcgtgagccgagcgcagagcgcagagccgagtggcgcacgctgggcagtggcctgggcaaccccaaacgcagccagagccctcacccgagtccgctggcccgcgcactcccggacccgactcggaccgatg

SEQ ID NO: 11294 - DNA, 203 bp, synthetic construct
  source 1..203: mol_type = other DNA
ggcgcgccagtcctgcacaggaatttcatttggggatagtgtaccgttaagcaagtgctgtgtgtcctagtctaagggtttcgtgttccgtcacgagattccattctacaaacgccttactcgaggttccgtctcgtgtttgtgtggaagcaaagttctgtctttgtggaaaccagtaactgttcctacgactcggaccgatg

SEQ ID NO: 11295 - DNA, 203 bp, synthetic construct
  source 1..203: mol_type = other DNA
ggcgcgccagtcctggtacctaatttcatttgggttgcaacagtttggaagcaagtgctgtgtgtcctagtctaagggtttcgtgttccggacgacttgaattgtctacaaacgccttactcgaggttccgtctcgtgtttgtgtggaagcaaagttctgtctttgtggaaaccagtaactgttcctacgactcggaccgatg

SEQ ID NO: 11296 - DNA, 203 bp, synthetic construct
  source 1..203: mol_type = other DNA
ggcgcgccagtcctgtccgtcgatttcatttgggttgcaacagtttggaagcaagtgctgtgtgtcctagtctaagggtttcgtgttccgtcacgagattccatgtccttgggtttcgactcgaggttccgtctcgtgtttgtgtggaagcaaagttctgtctttgtggaaaccagtaactgttcctacgactcggaccgatg

SEQ ID NO: 11297 - DNA, 203 bp, synthetic construct
  source 1..203: mol_type = other DNA
ggcgcgccagtcctttactgtcatttcatttgggttgcaacagtttggaagcaagtgctgtgtgtcctagtctaagggtttcgtgttccgtcacgagattccattctacaaacgccttactcgaggttccgtctcgtgtttgtgtggaagcaaagttctgatcggtgtacgtgtagtaactgttcctacgactcggaccgatg

SEQ ID NO: 11298 - DNA, 203 bp, synthetic construct
  source 1..203: mol_type = other DNA
ggcgcgccagtcctatcggtatatttcatttgggttgcaacagtttggaagcaagtgctgtgtgtcctagtctaagggtttcgtgttccgtcacgagattccattctacaaacgccttactcgaggttccgtctcgtgtttgtgtggaagcaaagttctgtctttgtggaaaccagtaactgttcctacgactcggaccgatg

SEQ ID NO: 11299 - DNA, 203 bp, synthetic construct
  source 1..203: mol_type = other DNA
ggcgcgccagtcctgcttaacaatttcatttgggttgcaacagtttggtctgcgacaacagctgtcctagtctaagggtttcgtgttccgtcacgagattccattctacaaacgccttactcgaggttccgtctcgtgtttgtgtggaagcaaagttctgtctttgtggaaaccagtaactgttcctacgactcggaccgatg

SEQ ID NO: 11300 - DNA, 203 bp, synthetic construct
  source 1..203: mol_type = other DNA
ggcgcgccagtcctctcgtgacatttgatctttaggttataatgttagagtccgctcccggtgcttaatgcatttagtaatttaaggcttagttatttaactttacttatcaagatggccgttggcagccccacgaaatctagattagtccgaatgtcctattttgattaggtggtcagataggtcagcgactcggaccgatg

SEQ ID NO: 11301 - DNA, 203 bp, synthetic construct
  source 1..203: mol_type = other DNA
ggcgcgccagtcctgatcgccgatttggctagcacctgcctgccacagccggactccgccactccggtaggattccccgcctgtcattccctagcccagctcttgggaaactgcagaggggtccagaggatttgcagttctgaacctgcacactccagtctaggatctccgagcaagagcgtagcctccgactcggaccgatg

SEQ ID NO: 11302 - DNA, 203 bp, synthetic construct
  source 1..203: mol_type = other DNA
ggcgcgccagtccttgagcgtgatttggtggagcggctgtcggcgcagtagcagcgagcagcagagtccgcacgctccggcgaggggcagaagagcgcgagggagcgcggggcagcagaagcgagagccgagcgcggacccagccaggacccacagccctccccagctgcccaggaagagccccagcccgactcggaccgatg

SEQ ID NO: 11303 - DNA, 203 bp, synthetic construct
  source 1..203: mol_type = other DNA
ggcgcgccagtcctccacaccacaaaaattgtctaagcagcagcaggaacgcgggagcgtttcttttccttttgtactgacatgatggcgctagacgtacgccttagagtttgcgagcagactctgctggcaggtgccgttcgcatgatggacaaattcttgcaaaagagaactgtttttgtcccccacgactcggaccgatg

SEQ ID NO: 11304 - DNA, 203 bp, synthetic construct
  source 1..203: mol_type = other DNA
ggcgcgccagtcctactcgctccaaaaattgtctaagcagcagcaggaacgcgggagcgtttcttttccttttgtactgacatgatggcggcgtctaaggtgtaagttcccgcaatttagactctgctggcaggtgccgttcgcatgatggacaaattcttgcaaaagagaactgtttttgtcccccacgactcggaccgatg

SEQ ID NO: 11305 - DNA, 203 bp, synthetic construct
  source 1..203: mol_type = other DNA
ggcgcgccagtcctttaaactccaaaaattgtctaagcagcagcaggaacgcgggagcgtttcttttccttttgtactgacatgatggcggcgtctaaggtgtatagagtttgcgagcagactctgctggcaggtgccgttcgcatgatggacaaattctccacttctgccgtggtttttgtcccccacgactcggaccgatg

SEQ ID NO: 11306 - DNA, 203 bp, synthetic construct
  source 1..203: mol_type = other DNA
ggcgcgccagtcctgggaagctcaaaaattgtctaagcagcagcaggaacgcgggagcgtttcttttccttttgtactgacatgatggcggcgtctaaggtgtatagagtttgcgagcagactctgctggcaggtgccgttcgcattggcatgggcgcaatgcaaaagagaactgtttttgtcccccacgactcggaccgatg

SEQ ID NO: 11307 - DNA, 203 bp, synthetic construct
  source 1..203: mol_type = other DNA
ggcgcgccagtcctggtatagccaaaaattgtctaagcagcagcaggaacgcgggagcgtttcttttccttttgtactgacatgatggcggcgtctaaggtgtatagagtttgcgagcccgaaggtagctatggtgccgttcgcatgatggacaaattcttgcaaaagagaactgtttttgtcccccacgactcggaccgatg

SEQ ID NO: 11308 - DNA, 203 bp, synthetic construct
  source 1..203: mol_type = other DNA
ggcgcgccagtcctgatcttatcaaaaattgtctaagcagcagcaggaacgcgggagcgttttcccagtcggccccctgacatgatggcggcgtctaaggtgtatagagtttgcgagcagactctgctggcaggtgccgttcgcatgatggacaaattcttgcaaaagagaactgtttttgtcccccacgactcggaccgatg

SEQ ID NO: 11309 - DNA, 203 bp, synthetic construct
  source 1..203: mol_type = other DNA
ggcgcgccagtcctaatgtagacaaaccacgacggagtgctcctagaaaggcgcgggccgaggtaccaaaggcggcgtgtggagcgggaggagttacacgacgggggtgaaggtaagtacctacaccaaaaactgtagccagaaaaggcttgttatcctacctttagacaggtagaagattgtgggagcgactcggaccgatg

SEQ ID NO: 11310 - DNA, 203 bp, synthetic construct
  source 1..203: mol_type = other DNA
ggcgcgccagtccttagtttctcaaaccacgacggagtgctcctagaaaggcgcgggccgaggtaccaaaggcggcgtgtggagcgggagtgaaagaggcctccgggtgaaggtaagtacctacaccaaaaactgtagccagaaaaggcttgttatcctaggcgggagtctagggaagattgtgggagcgactcggaccgatg

SEQ ID NO: 11311 - DNA, 203 bp, synthetic construct
  source 1..203: mol_type = other DNA
ggcgcgccagtccttatggctgcaaaccacgacggagtgctcctagaaaggcgcgggccgaggtaccaaaggcggcgtgtggagcgggagtgaaagaggcctccgggtgaaggtaagtgagaggttatttggctgtagccagaaaaggcttgttatcctacctttagacaggtagaagattgtgggagcgactcggaccgatg

SEQ ID NO: 11312 - DNA, 203 bp, synthetic construct
  source 1..203: mol_type = other DNA
ggcgcgccagtcctttctgttgcaaaccacgacggagtgctcctagaattagagattatttagtaccaaaggcggcgtgtggagcgggagtgaaagaggcctccgggtgaaggtaagtacctacaccaaaaactgtagccagaaaaggcttgttatcctacctttagacaggtagaagattgtgggagcgactcggaccgatg

SEQ ID NO: 11313 - DNA, 203 bp, synthetic construct
  source 1..203: mol_type = other DNA
ggcgcgccagtcctaccgcacacaaaccgcaaaagacatcagtatcccacagcctctccaagtcccccggtctcctcctcttctcgaaggattgctttctagcttccaccacatccgacgacactcaattccccacccccaaaggagacaccgggaatcccagaatcaagactcatccagtgtccatccgactcggaccgatg

SEQ ID NO: 11314 - DNA, 203 bp, synthetic construct
  source 1..203: mol_type = other DNA
ggcgcgccagtcctgaggagttcaaaccgcaaaagacatcagtatcccacagcctctccaagtcccccggtctcctcctcttctcgaagggaccaaaagatcaatccaccacatccgacgacactcaattccccacccccaaaggagacaccgggaatccacctgggccctgggatccagtgtccatccgactcggaccgatg

SEQ ID NO: 11315 - DNA, 203 bp, synthetic construct
  source 1..203: mol_type = other DNA
ggcgcgccagtccttgaagagtcaaaccgcaaaagacatcagtatcccacagcctctccaagtcccccggtctcctcctcttctcgaagggaccaaaagatcaatccaccacatccgacgacactcaattccccacccccaaaggagacaccgggaatcccagaatcaagactcatccagtgtccatccgactcggaccgatg

SEQ ID NO: 11316 - DNA, 203 bp, synthetic construct
  source 1..203: mol_type = other DNA
ggcgcgccagtcctcttgacagcaaaccgcaaaagacatcagtatcccacagcctctccaagtcccccggtctcctcctcttctcgaagggaccaaaagatcaatccaccacatccgacgacactcaattccccacccccaaaggagacaccgggaatcccagaatcaagactcccttctaacaacgacgactcggaccgatg

SEQ ID NO: 11317 - DNA, 203 bp, synthetic construct
  source 1..203: mol_type = other DNA
ggcgcgccagtccttacgccctcaaaccgcaaaagacatcagtatcccacagcctctccaagtcccccggtctcctcctcttctcgaagggaccaaaagatcaatccaccacatccgatagaggcatcaagtccacccccaaaggagacaccgggaatcccagaatcaagactcatccagtgtccatccgactcggaccgatg

SEQ ID NO: 11318 - DNA, 203 bp, synthetic construct
  source 1..203: mol_type = other DNA
ggcgcgccagtcctgacctgaacaaaccgcaaaagacatcagtatccctagtaagaaagtgctcccccggtctcctcctcttctcgaagggaccaaaagatcaatccaccacatccgacgacactcaattccccacccccaaaggagacaccgggaatcccagaatcaagactcatccagtgtccatccgactcggaccgatg

SEQ ID NO: 11319 - DNA, 203 bp, synthetic construct
  source 1..203: mol_type = other DNA
ggcgcgccagtcctcccggaaccaaagacagaacgatgaagagtatgacaagattcgtggaagatagtctccactttttaatgcactaagcaatcggttgctaggagcccatcctgggtcagaggccgatccgcagaaccagaacgttttcccctcctggactgttagtaacttagtctccctcctcccgactcggaccgatg

SEQ ID NO: 11320 - DNA, 203 bp, synthetic construct
  source 1..203: mol_type = other DNA
ggcgcgccagtcctgcgcaacgcaaagacagaacttaacctctgcaagcaagattcgtggaaacatacaagacagatttaatgcactaagcaatcggttgctaggagcccatcctgggtcagaggccgatccgcagaaccagaacgttttcccctcctggactgttagtaacttagtctccctcctcccgactcggaccgatg

SEQ ID NO: 11321 - DNA, 203 bp, synthetic construct
  source 1..203: mol_type = other DNA
ggcgcgccagtcctcaacgaagcaaagacagaacttaacctctgcaagcaagattcgtggaagatagtctccacttcagctccacaccctcaatcggttgctaggagcccatcctgggtcagaggccgatccgcagaaccagaacgttttcccctcctggactgttagtaacttagtctccctcctcccgactcggaccgatg

SEQ ID NO: 11322 - DNA, 203 bp, synthetic construct
  source 1..203: mol_type = other DNA
ggcgcgccagtccttaggatcacaaagacagaacttaacctctgcaagcaagattcgtggaagatagtctccactttttaatgcactaagcaatcggttgctaggagcccatcctgggcagctacttaccatgcagaaccagaacgttttcccctcctggactgttagtaacttagtctccctcctcccgactcggaccgatg

SEQ ID NO: 11323 - DNA, 203 bp, synthetic construct
  source 1..203: mol_type = other DNA
ggcgcgccagtcctcgattccacaaagacagaacttaacctctgcaagcaagattcgtggaagatagtctccactttttaatgcactaaggccagttagcgggagagcccatcctgggtcagaggccgatccgcagaaccagaacgttttcccctcctggactgttagtaacttagtctccctcctcccgactcggaccgatg

SEQ ID NO: 11324 - DNA, 203 bp, synthetic construct
  source 1..203: mol_type = other DNA
ggcgcgccagtcctaacactaccaaatcgctatcgccacaaggctagtccaccgctgcctatgggcgaagtcaagccctccaacctaatctccataaacagtgtctaagacgaacctcagcgaaagaaggaagatctctagacctactggaaataacataactctggacctattggaacttatataatcgactcggaccgatg

SEQ ID NO: 11325 - DNA, 203 bp, synthetic construct
  source 1..203: mol_type = other DNA
ggcgcgccagtcctcggtcatccaaatcgctatcgccacaaggctagtgataataactaagggggcgaagtcaagccctccaacctaatcaagcacgctgaaacctaagacgaacctcagcgaaagaaggaagatctctagacctactggaaataacataactctggacctattggaacttatataatcgactcggaccgatg

SEQ ID NO: 11326 - DNA, 203 bp, synthetic construct
  source 1..203: mol_type = other DNA
ggcgcgccagtcctcgtgcagtcaaatcgctatcgccacaaggctagtgataataactaagggggcgaagtcaagccctccaacctaatctccataaacagtgtctaagacgaacctcagcgaaagaaggaagatctctagacctaggattccgtcatgtactctggacctattggaacttatataatcgactcggaccgatg

SEQ ID NO: 11327 - DNA, 203 bp, synthetic construct
  source 1..203: mol_type = other DNA
ggcgcgccagtccttcacccgccaacacccgagcaaggacgcgactctcccgacgcggggaggctattctgcccatttggggacacttccgtaagtgatgagatacccgcttctctgaaaggctctccttgcagctgcttagacgctggatttttttcgggtagtggaaaaccagcagcctcccgcgacgactcggaccgatg

SEQ ID NO: 11328 - DNA, 203 bp, synthetic construct
  source 1..203: mol_type = other DNA
ggcgcgccagtcctcataaatacaacacccgagcaaggacgcgactctggatggcaaactccgctattctgcccatttggggacacttccccgccgctgccaggacccgcttctctgaaaggctctccttgcagctgcttagacgctggatttttttcgggtagtggaaaaccagcagcctcccgcgacgactcggaccgatg

SEQ ID NO: 11329 - DNA, 203 bp, synthetic construct
  source 1..203: mol_type = other DNA
ggcgcgccagtcctgagctagtcaacacccgagcgccacaagcgtatccccgacgcggggaggctattctgcccatttggggacacttccccgccgctgccaggacccgcttctctgaaaggctctccttgcagctgcttagacgctggatttttttcgggtagtggaaaaccagcagcctcccgcgacgactcggaccgatg

SEQ ID NO: 11330 - DNA, 203 bp, synthetic construct
  source 1..203: mol_type = other DNA
ggcgcgccagtcctacattattcaaccaccttagatgaactttcagtagactcatgacgctcgcgtgatgacaagcgccaagcttgacttggatggccctgatgggcgttcatgggttcggtggtggtggcgctttaggcagcctccacgcccaccacctcccagatagagcggcggcactgtagggacgactcggaccgatg

SEQ ID NO: 11331 - DNA, 203 bp, synthetic construct
  source 1..203: mol_type = other DNA
ggcgcgccagtcctgaacgagccaaccaccttagtatgtaggcggcgggactcatgacgctcgcgtgatgacaagcgccaagcttgacttggatggccctgatgggcgttcatgggttcggtggtggtggcgctttaggcagcctccacgcccaccacctcccagatagagcggcggcactgtagggacgactcggaccgatg

SEQ ID NO: 11332 - DNA, 203 bp, synthetic construct
  source 1..203: mol_type = other DNA
ggcgcgccagtcctaatacccgcaaccaccttagtatgtaggcggcgggactcatgacgctcgcgtgatgacaagcgccaagcttgacttggatggccctgatgtctaaggcacatcccggtggtggtggcgctttaggcagcctccacgcccaccacctcccagatagagcggcggcactgtagggacgactcggaccgatg

SEQ ID NO: 11333 - DNA, 203 bp, synthetic construct
  source 1..203: mol_type = other DNA
ggcgcgccagtccttgacgggccaaccagatcaaagaaaaaacagacagcgtcaatggcagagcaaaaatgtaacacctctacaatggatgccgacaagattgtattcaaagtcaataatcaggtggtctctttgaagcctgagattatcgtggatcaatcgcgtcgatgaatacctgccatcaaagacgactcggaccgatg

SEQ ID NO: 11334 - DNA, 203 bp, synthetic construct
  source 1..203: mol_type = other DNA
ggcgcgccagtcctatcttagccaaccagcagagagggattgagcttcattgaactcaacagagccaacatttcatagcaccatgttcaactttgaacatccaaggcatggcaatggttagagaccctgctgggcgtgaacaccctctggctacctagggacctgtgggcctaccacctggtgccctccgactcggaccgatg

SEQ ID NO: 11335 - DNA, 203 bp, synthetic construct
  source 1..203: mol_type = other DNA
ggcgcgccagtccttggactgacaaccagcagagagggattgagcttcattgaactcaacagagccaacatttcatagcaccatgttcaagaggaggttgaagtggcatggcaatggttagagaccctgctgcctcactgggggtcctggctacctagggacctgtgggcctaccacctggtgccctccgactcggaccgatg

SEQ ID NO: 11336 - DNA, 203 bp, synthetic construct
  source 1..203: mol_type = other DNA
ggcgcgccagtcctgcaaggttcaaccagcagagagggattgagcttcattgaactcaacagagccaacatttcatagcaccatgttcaagaggaggttgaagtggcatggcaatggttagagaccctgctgggcgtgaacaccctctggctacctagggacctgtgggcctacattacaacagtactcgactcggaccgatg

SEQ ID NO: 11337 - DNA, 203 bp, synthetic construct
  source 1..203: mol_type = other DNA
ggcgcgccagtccttctaacgacaaccagcagagagggattgagcttcattgaactcaacagagccaacatttcatagcaccatgttcaagaggaggttgaagtggcatggcaatggttagagaccctgctgggcgtgaacaccctctggctacctagggacctgtgggcctaccacctggtgccctccgactcggaccgatg

SEQ ID NO: 11338 - DNA, 203 bp, synthetic construct
  source 1..203: mol_type = other DNA
ggcgcgccagtcctgcagattccaaccagcagagagggattgagcttcattgaactcaacagagccaacatttcatagcaccatgttcaagaggaggttgaagtggcatggcaatggttagagaccctgctgggcgtgaacacccttgattggagcgataacctgtgggcctaccacctggtgccctccgactcggaccgatg

SEQ ID NO: 11339 - DNA, 203 bp, synthetic construct
  source 1..203: mol_type = other DNA
ggcgcgccagtcctggctttcacaaccagcagagagggattgagcttcattgaactcaacagagccaacatttcatgaacgtgctaaagggaggaggttgaagtggcatggcaatggttagagaccctgctgggcgtgaacaccctctggctacctagggacctgtgggcctaccacctggtgccctccgactcggaccgatg

SEQ ID NO: 11340 - DNA, 203 bp, synthetic construct
  source 1..203: mol_type = other DNA
ggcgcgccagtcctgctctatacaaccagcagagagggattgagcttcccccctgaatctgcagccaacatttcatagcaccatgttcaagaggaggttgaagtggcatggcaatggttagagaccctgctgggcgtgaacaccctctggctacctagggacctgtgggcctaccacctggtgccctccgactcggaccgatg

SEQ ID NO: 11341 - DNA, 203 bp, synthetic construct
  source 1..203: mol_type = other DNA
ggcgcgccagtcctggcggtgtcaaccagcagagccaccagtcctgaaattgaactcaacagagccaacatttcatagcaccatgttcaagaggaggttgaagtggcatggcaatggttagagaccctgctgggcgtgaacaccctctggctacctagggacctgtgggcctaccacctggtgccctccgactcggaccgatg

SEQ ID NO: 11342 - DNA, 203 bp, synthetic construct
  source 1..203: mol_type = other DNA
ggcgcgccagtcctggacccatcaacggccacctcttccaagccaagcgctttaacaggagacgtcgaacttcgttgtgcagcgagaggatatggggcctcgcgaggcaaggctacaggtgcatcaactgcaaactgctggtccataagcgctgccacggcctcgtcccgctgacctgcaggaagcatcgactcggaccgatg

SEQ ID NO: 11343 - DNA, 203 bp, synthetic construct
  source 1..203: mol_type = other DNA
ggcgcgccagtcctcacgtagccaacggccacctcttccaagccaagcgctttaacaggagagcgtactgcggtcacgtggaacccccagtatggggcctcgcgaggcaaggctacaggtgcatcaactgcaaactgctggtccataagcgctgccacggcctcgtcccgctgacctgcaggaagcatcgactcggaccgatg

SEQ ID NO: 11344 - DNA, 203 bp, synthetic construct
  source 1..203: mol_type = other DNA
ggcgcgccagtcctgaccactccaacggccacctcttccaagccaagcgctttaacaggagagcgtactgcggtcagtgcagcgagaggaaccctcctagtaataggcaaggctacaggtgcatcaactgcaaactgctggtccataagcgctgccacggcctcgtcccgctgacctgcaggaagcatcgactcggaccgatg

SEQ ID NO: 11345 - DNA, 203 bp, synthetic construct
  source 1..203: mol_type = other DNA
ggcgcgccagtcctgtcattctcaacggccacctcttccaagccaagcgctttaacaggagagcgtactgcggtcagtgcagcgagaggatatggggcctcgcgaggcaaggctacagcacacggccactggaactgctggtccataagcgctgccacggcctcgtcccgctgacctgcaggaagcatcgactcggaccgatg

SEQ ID NO: 11346 - DNA, 203 bp, synthetic construct
  source 1..203: mol_type = other DNA
ggcgcgccagtcctctgcaatacaacggccacctcttccaagccaagcgctttaacaggagagcgtactgcggtcagtgcagcgagaggatatggggcctcgcgaggcaaggctacaggtgcatcaactgcaaactgctggtccataagcgctgccacggcctcgtcccgctgacctgcaggaagcatcgactcggaccgatg

SEQ ID NO: 11347 - DNA, 203 bp, synthetic construct
  source 1..203: mol_type = other DNA
ggcgcgccagtcctcggatcgccaacggccacctcttccaagccaagcgctttaacaggagagcgtactgcggtcagtgcagcgagaggatatggggcctcgcgaggcaaggctacaggtgcatcaactgcaaactgctggtccataagcgctgccacggtgatacgggagactcctgcaggaagcatcgactcggaccgatg

SEQ ID NO: 11348 - DNA, 203 bp, synthetic construct
  source 1..203: mol_type = other DNA
ggcgcgccagtccttgcaggaccaacggccacctcttccaagccaagcttaccgggcacgccgcgtactgcggtcagtgcagcgagaggatatggggcctcgcgaggcaaggctacaggtgcatcaactgcaaactgctggtccataagcgctgccacggcctcgtcccgctgacctgcaggaagcatcgactcggaccgatg

SEQ ID NO: 11349 - DNA, 203 bp, synthetic construct
  source 1..203: mol_type = other DNA
ggcgcgccagtcctcaatgggtcaactgctgctcctatgtacagaatacccgctcctttgggggctacctgtactacccaggctcctaccccagcagcctggtctacagcactgccctctgctctcccagcacctgccagctgcgttcctctctctacagggactgtcagaagacctgctgggagccccgactcggaccgatg

SEQ ID NO: 11350 - DNA, 203 bp, synthetic construct
  source 1..203: mol_type = other DNA
ggcgcgccagtcctatccttcccaactgctgctctagaaacttcagaggtagctcctttgggggctacctggctgcagcaggctcctaccccagcagcctggtctacagcactgccctctgctctcccagcacctgccagctgcgttcctctctctacagggactgtcagaagacctgctgggagccccgactcggaccgatg

SEQ ID NO: 11351 - DNA, 203 bp, synthetic construct
  source 1..203: mol_type = other DNA
ggcgcgccagtcctgattcgcccaactgctgctctagaaacttcagaggtagctcctttgggggctacctgtactacccaggctcctaccccagcagcctggtctacagcactgccctctgctctcccagcacctgccagctgcgttcctctctctacagggactgtcagaagacctgctgggagccccgactcggaccgatg

SEQ ID NO: 11352 - DNA, 203 bp, synthetic construct
  source 1..203: mol_type = other DNA
ggcgcgccagtcctggatgggacaactgctgctctagaaacttctcctcccgctcctttgggggctacctggctgcagcaggctcctaccccagcagcctggtctacagcactgccctctgctctcccagcacctgccagctgcgttcctctctctacagggactgtcagaagacctgctgggagccccgactcggaccgatg

SEQ ID NO: 11353 - DNA, 203 bp, synthetic construct
  source 1..203: mol_type = other DNA
ggcgcgccagtcctatccactacaactgctgctctagaaacttctcctcccgctcctttgggggctacctgtactacccaggctcctaccccagcagcctggtctacagcactgccctagcggtaatatcgtcctgccagctgcgttcctctctctacagggactgtcagaagacctgctgggagccccgactcggaccgatg

SEQ ID NO: 11354 - DNA, 203 bp, synthetic construct
  source 1..203: mol_type = other DNA
ggcgcgccagtcctaccaactgcaactgctgctctagaaacttctcctcccgctcctttgggggctacctgtactacccaggctcctaccccagcagcctggtctacagcactgccctctgctctcccagcacctgccagctgcgttcctctctctacagaagaccggtacttccctgctgggagccccgactcggaccgatg

SEQ ID NO: 11355 - DNA, 203 bp, synthetic construct
  source 1..203: mol_type = other DNA
ggcgcgccagtcctagccagcacaactgctgctctagaaacttctcctcccgctcctttgggggctacctgtactacccaggctcctaccccagcagcctggtctacagcactgccctctgctctcccagcacctgccagctgcgttcctctctctacagggactgtcagaagatactgctatccttacgactcggaccgatg

SEQ ID NO: 11356 - DNA, 203 bp, synthetic construct
  source 1..203: mol_type = other DNA
ggcgcgccagtcctaggtaactcaactgctgctctagaaacttctcctcccgctcctttgggggctacctgtactacccaggctcctaccccagcagcctggtctacagcactgccctctgctctcccagcagtatatccgcagagtcctctctctacagggactgtcagaagacctgctgggagccccgactcggaccgatg

SEQ ID NO: 11357 - DNA, 203 bp, synthetic construct
  source 1..203: mol_type = other DNA
ggcgcgccagtcctaatcacttcaactgctgctctagaaacttctcctcccgctcctttgggttgccatcagcgctcccaggctcctaccccagcagcctggtctacagcactgccctctgctctcccagcacctgccagctgcgttcctctctctacagggactgtcagaagacctgctgggagccccgactcggaccgatg

SEQ ID NO: 11358 - DNA, 203 bp, synthetic construct
  source 1..203: mol_type = other DNA
ggcgcgccagtccttaagggttcaactgctgctgtggaaacttcggaatggattcctgtgagggctacctgtgctactcaggcactggaagtggtggctcctcgtaccccagcaacctggtctacagcactgaacctttgatctcccagcacctgccagctgggttcctctctctgcaagggctttcacgactcggaccgatg

SEQ ID NO: 11359 - DNA, 203 bp, synthetic construct
  source 1..203: mol_type = other DNA
ggcgcgccagtcctacaagcgccaactgctgctgtggaaacttcggaatggattcctgtgagggctacctgtgctactcaggctactcccgtggtggctcctcgtaccccagcaacctggtctacagcactgaacctttgatctcccagcacctgccagctgggttcctctctctgcaagggctttcacgactcggaccgatg

SEQ ID NO: 11360 - DNA, 203 bp, synthetic construct
  source 1..203: mol_type = other DNA
ggcgcgccagtcctttaccacacaactgctgctgtggaaacttctcctcccattcctgtgagactgcagccctggtctcaggctactcccgtggtggctcctcgtaccccagcaacctggtctacagcactgaacctttgatctcccagcacctgccagctgggttcctctctctgcaagggctttcacgactcggaccgatg

SEQ ID NO: 11361 - DNA, 203 bp, synthetic construct
  source 1..203: mol_type = other DNA
ggcgcgccagtcctttgtcctgcaactgctgctgtggaaacttctcctcccattcctgtgagggctacctgtgctactcaggcactggaagtggtggctcctcgtaccccagcaacctggtctacagcactgaacctttgatctcccagcacctgccagctgggttcctctctctgcaagggctttcacgactcggaccgatg

SEQ ID NO: 11362 - DNA, 203 bp, synthetic construct
  source 1..203: mol_type = other DNA
ggcgcgccagtccttctctgagcaactgctgctgtggaaacttctcctcccattcctgtgagggctacctgtgctactcaggctactcccgtggtggctcctcgagaatttaggtggcggtctacagcactgaacctttgatctcccagcacctgccagctgggttcctctctctgcaagggctttcacgactcggaccgatg

SEQ ID NO: 11363 - DNA, 203 bp, synthetic construct
  source 1..203: mol_type = other DNA
ggcgcgccagtcctcttactagcaactgctgctgtggaaacttctcctcccattcctgtgagggctacctgtgctactcaggctactcccgtggtggctcctcgtaccccagcaacctggtctacagcactgaacctttgatctcccagcacctgccagctgggttcctctctccttgttcttggatccgactcggaccgatg

SEQ ID NO: 11364 - DNA, 203 bp, synthetic construct
  source 1..203: mol_type = other DNA
ggcgcgccagtcctagttcctccaactgctgctgtggaaacttctcctcccattcctgtgagggctacctgtgctactcaggctactcccgtggtggctcctcgtaccccagcaacctggtctacagcactgaacctttgatctcccagcacctgccagctgggttcctctctctgcaagggctttcacgactcggaccgatg

SEQ ID NO: 11365 - DNA, 203 bp, synthetic construct
  source 1..203: mol_type = other DNA
ggcgcgccagtcctcctggacacaactgctgctgtggaaacttctcctcccattcctgtgagggctacctgtgctactcaggctactcccgtggtggctcctcgtaccccagcaacctggtctacagcactgaacctttgatctcctttactggaaagcatgggttcctctctctgcaagggctttcacgactcggaccgatg

SEQ ID NO: 11366 - DNA, 203 bp, synthetic construct
  source 1..203: mol_type = other DNA
ggcgcgccagtcctaactgattcaactgctgctgtggaaacttctcctcccattcctgtgagggctacctgtgctactcaggctactcccgtggtggctcctcgtaccccagcaaccttacgactgaggactaacctttgatctcccagcacctgccagctgggttcctctctctgcaagggctttcacgactcggaccgatg

SEQ ID NO: 11367 - DNA, 203 bp, synthetic construct
  source 1..203: mol_type = other DNA
ggcgcgccagtcctttacctaccaactgctgctgtggaaacttctcctcccattcctgtgagggctacctgtgctactcaggctactccctcacctttcgaggataccccagcaacctggtctacagcactgaacctttgatctcccagcacctgccagctgggttcctctctctgcaagggctttcacgactcggaccgatg

SEQ ID NO: 11368 - DNA, 203 bp, synthetic construct
  source 1..203: mol_type = other DNA
ggcgcgccagtcctcaggtacacaagagacggcccaatctcaagcgcctctgtagggaagccaagaatgtccaggaggtaccccttcctctcggaagggatctgacctggagacacatcacacgtgctttacacctgtgcttgtgtttaaaaattgttacagcttccccgaaccaagtggtcttggttcgactcggaccgatg

SEQ ID NO: 11369 - DNA, 203 bp, synthetic construct
  source 1..203: mol_type = other DNA
ggcgcgccagtcctctatacaacaagcggcttctaacaggttggaataccgtcgcagatgacaacaccgtccacttcaattccaccctcatggctctgatccgcacagccctggacatcaagattgccaagggaggagccgacaaacagcagatggacgctgagctgcggaaggagatgatggcgattcgactcggaccgatg

SEQ ID NO: 11370 - DNA, 203 bp, synthetic construct
  source 1..203: mol_type = other DNA
ggcgcgccagtcctcccatttgcaagcggcttctgcggatggacctgcccgtcgcagatgacaacaccgtccacttcaattccaccctcatggctctgatccgcacagccctggacatcaagattgccaagggaggagccgacaaacagcagatggacgctgagctgcggaaggagatgatggcgattcgactcggaccgatg

SEQ ID NO: 11371 - DNA, 203 bp, synthetic construct
  source 1..203: mol_type = other DNA
ggcgcgccagtcctataatatccaagcggcttctgcggatggacctgcccgtcgcagatgacaacaccgtccacttcaattccaccctcatggctctgatccgcacagccctggacatgcctgcgaatccatgaggagccgacaaacagcagatggacgctgagctgcggaaggagatgatggcgattcgactcggaccgatg

SEQ ID NO: 11372 - DNA, 203 bp, synthetic construct
  source 1..203: mol_type = other DNA
ggcgcgccagtcctgggccggccaagcggcttctgcggatggacctgcccgtcgcagatgacaacaccgtccacttcaattccaccctcatggctctgatccgccgttaatactgatacaagattgccaagggaggagccgacaaacagcagatggacgctgagctgcggaaggagatgatggcgattcgactcggaccgatg

SEQ ID NO: 11373 - DNA, 203 bp, synthetic construct
  source 1..203: mol_type = other DNA
ggcgcgccagtccttttacgaccaagtacgtaatgacgacagacgttcaactggatgattccctactgcgagaatgaagactattctcagcaatcagactgtcgacattccagaaaatgtcgacattactctgaagggacgcacagttatcgtgaagggccccagaggaaccctgcggagggacttcacgactcggaccgatg

SEQ ID NO: 11374 - DNA, 203 bp, synthetic construct
  source 1..203: mol_type = other DNA
ggcgcgccagtcctccgccatgcaagttcagatcaggcaaggaacaaaaaaatctgagtgccacaagaccaaagaagagtacacttaagttgaagacacaacacttgatctgaaacaagaagtttgtgcctactcaacagctttgaaagagcacttcccaacgctgctagtagtctttgttttcttcacgactcggaccgatg

SEQ ID NO: 11375 - DNA, 203 bp, synthetic construct
  source 1..203: mol_type = other DNA
ggcgcgccagtcctcccaggcccaagttcagatcaggcaaggaacaaacctcgtaacaactaacaagaccaaagaagagtacacttaagttgaagacacaacacagatgtgtggtgtggaagtttgtgcctactcaacagctttgaaagagcacttcccaacgctgctagtagtctttgttttcttcacgactcggaccgatg

SEQ ID NO: 11376 - DNA, 203 bp, synthetic construct
  source 1..203: mol_type = other DNA
ggcgcgccagtcctggtgatatcaagttcagatcaggcaaggaacaaacctcgtaacaactaacaagaccaaagaagagtacacttaagttgaagacacaacacttgatctgaaacaagaagtttgtgcctactcaacagctttgaaagagcacttcccagacagagacaagtgctttgttttcttcacgactcggaccgatg

SEQ ID NO: 11377 - DNA, 203 bp, synthetic construct
  source 1..203: mol_type = other DNA
ggcgcgccagtcctgcacgatgcaagttcctggtgcaaaggtggctctgcagcataatttaggcattggaggagctgtggttgtaacactctacaagatgggttttccggaagccgccagttcttttagaaccaggagtgcgattactgttccaaccagctctgcaagtgatggatttaaggcaaatccgactcggaccgatg

SEQ ID NO: 11378 - DNA, 203 bp, synthetic construct
  source 1..203: mol_type = other DNA
ggcgcgccagtcctatcccgtgcaagttcctggtgcaaaggtggctctgcagcataatttaggcattggaggagctgtggttgtaacactctacaagatgggttttccggaagccgccagttcttttagaactcatcaaattgaagctgttccaaccagccacttggtcatcatatttaaggcaaatccgactcggaccgatg

SEQ ID NO: 11379 - DNA, 203 bp, synthetic construct
  source 1..203: mol_type = other DNA
ggcgcgccagtcctcatatcttcaagttcctggtgcaaaggtggctctgcagcataatttaggcattggaggagctgtggttgtaacactctacaagatgggttttccggaagccgccagttcttttagaactcatcaaattgaagctgttccaaccagctctgcaagtgatggccacttctaggggtcgactcggaccgatg

SEQ ID NO: 11380 - DNA, 203 bp, synthetic construct
  source 1..203: mol_type = other DNA
ggcgcgccagtcctatgttccacaagttcctggtgcaaaggtggctctgcagcataatttaggcattggaggagctgtggttgtaacactctacaagatgggttttccggaagccgccttcgtgcacctttttcatcaaattgaagctgttccaaccagctctgcaagtgatggatttaaggcaaatccgactcggaccgatg

SEQ ID NO: 11381 - DNA, 203 bp, synthetic construct
  source 1..203: mol_type = other DNA
ggcgcgccagtcctaccacatccaagttcctggtgcaaaggtggctctgcagcataatttaggcattggaggagcttgaccccattgcagctacaagatgggttttccggaagccgccagttcttttagaactcatcaaattgaagctgttccaaccagctctgcaagtgatggatttaaggcaaatccgactcggaccgatg

SEQ ID NO: 11382 - DNA, 203 bp, synthetic construct
  source 1..203: mol_type = other DNA
ggcgcgccagtcctaatgctatcaagttcctggtgcaaaggtggctcttttcgtcctaaactgcattggaggagctgtggttgtaacactctacaagatgggttttccggaagccgccagttcttttagaactcatcaaattgaagctgttccaaccagctctgcaagtgatggatttaaggcaaatccgactcggaccgatg

SEQ ID NO: 11383 - DNA, 203 bp, synthetic construct
  source 1..203: mol_type = other DNA
ggcgcgccagtcctcgtttgttcaagttcctggttacggccctagctcgcagcataatttaggcattggaggagctgtggttgtaacactctacaagatgggttttccggaagccgccagttcttttagaactcatcaaattgaagctgttccaaccagctctgcaagtgatggatttaaggcaaatccgactcggaccgatg

SEQ ID NO: 11384 - DNA, 203 bp, synthetic construct
  source 1..203: mol_type = other DNA
ggcgcgccagtcctctcttctacaataagtctgcttccaccttccagcttactggcttcccactgcctagttcataacatcactggatattcatcccattattggcagcctacatctccatacttcttggcaatggcactcttctctttctcatcaggaatgatcataacctccatgagcccatgtaccgactcggaccgatg

SEQ ID NO: 11385 - DNA, 203 bp, synthetic construct
  source 1..203: mol_type = other DNA
ggcgcgccagtcctagacaatacaataagtctgcttccaccttccagcttactggcttcccaggcatggagaaggcacatcactggatatcgcgtgacaagcgagcagcctacatctccatacttcttggcaatggcactcttctctttctcatcaggaatgatcataacctccatgagcccatgtaccgactcggaccgatg

SEQ ID NO: 11386 - DNA, 203 bp, synthetic construct
  source 1..203: mol_type = other DNA
ggcgcgccagtcctccacttggcaataagtctgcttccaccttccagcttactggcttcccaggcatggagaaggcacatcactggatattcatcccattattggcagcctacatctccatacttcttggcaatggcactcttctctttctcatcaggaatgatcataacctccatgagcccatgtaccgactcggaccgatg

SEQ ID NO: 11387 - DNA, 203 bp, synthetic construct
  source 1..203: mol_type = other DNA
ggcgcgccagtcctgagcattgcaataagtctgcttccaccttccagcttactggcttcccaggcatggagaaggcacatcactggatattcatcccattattggcagcctacatctccatacttcttggcataactgaaacctcgtttctcatcaggaatgatcataacctccatgagcccatgtaccgactcggaccgatg

SEQ ID NO: 11388 - DNA, 203 bp, synthetic construct
  source 1..203: mol_type = other DNA
ggcgcgccagtcctacgtcgctcaatcaagaaaccaaaagacaactcacaatctccctaaaacagcaacgacaccatgtcagctttgctcaaatctctctgggagaaacttttgcccaatggtctcttgatacacaaccatctcaagaaaagaaactgggcaaaacagcatccaagagacaaatagcacgactcggaccgatg

SEQ ID NO: 11389 - DNA, 203 bp, synthetic construct
  source 1..203: mol_type = other DNA
ggcgcgccagtcctcctagtgacaatcaagaaaccaaaagacaactcacaatctccctaaaacagcaacgacaccatgtcagctttgctcctggaatgtgccacgaaacttttgcccacatactaacaacatcacaaccatctcaagaaaagaaactgggcaaaacagcatccaagagacaaatagcacgactcggaccgatg

SEQ ID NO: 11390 - DNA, 203 bp, synthetic construct
  source 1..203: mol_type = other DNA
ggcgcgccagtcctgctgaagtcaatcgggtgtcaattttggatctccccccccccacccccctttggatcttgtcgggctttccacgttagcaccggtgtttcttcttgtaacgtccaaggcaagctccccacgacccgaacacgcccagaggaaccttggggcctctggggacttggctagcaggtcgactcggaccgatg

SEQ ID NO: 11391 - DNA, 203 bp, synthetic construct
  source 1..203: mol_type = other DNA
ggcgcgccagtccttaaacgcgcaatcgggtgtcaattttggatctccccccccccacccccctttggatcttgtcgggctttccacgtttcacttaaaaaaaattcttgtaacgtccaaggcaagctccccacgacccgaacacgagttccccgtagcgggggcctctggggacttggctagcaggtcgactcggaccgatg

SEQ ID NO: 11392 - DNA, 203 bp, synthetic construct
  source 1..203: mol_type = other DNA
ggcgcgccagtcctgccaagatcaatcgggtgtcaattttggatctccccccccccacccccctttggatcttgtcgggctttccacgtttcacttaaaaaaaattcttgtaacgtcctttcgcttggtttgacgacccgaacacgcccagaggaaccttggggcctctggggacttggctagcaggtcgactcggaccgatg

SEQ ID NO: 11393 - DNA, 203 bp, synthetic construct
  source 1..203: mol_type = other DNA
ggcgcgccagtcctacccaagtcaatcgggtgtctccgaactcatatgccccccccacccccctttggatcttgtcgggctttccacgtttcacttaaaaaaaattcttgtaacgtccaaggcaagctccccacgacccgaacacgcccagaggaaccttggggcctctggggacttggctagcaggtcgactcggaccgatg

SEQ ID NO: 11394 - DNA, 203 bp, synthetic construct
  source 1..203: mol_type = other DNA
ggcgcgccagtccttatgtactcaatgagcgcgcctgctaaaaactcgcggctggtgcgcgagacgccgccgagaggggcactatggcagacaaagttaggaggcagaggccgaggaggcgagtctgttgggccttggtggctgtgctcttggcagacctgttggcactgagtgatacactggcagtgcgactcggaccgatg

SEQ ID NO: 11395 - DNA, 203 bp, synthetic construct
  source 1..203: mol_type = other DNA
ggcgcgccagtcctacgggaaacaatgagcgcgcgccgcgtccggggccggctggtgcgcgagacgccgccgagaggggcactatggcagacaaagttaggaggggttatttagaccagcgagtctgttgggccttggtggctgtgctcttggcagacctgttggcactgagtgatacactggcagtgcgactcggaccgatg

SEQ ID NO: 11396 - DNA, 203 bp, synthetic construct
  source 1..203: mol_type = other DNA
ggcgcgccagtcctagtagttccaatgcaggcattagtttctcagttaaaaaacaaggagagacagtagctgatgttaggacactacccaatgcctcaaccgtgcggctctgcgtaagcatctttggaaatgctgttagtcgagaactgatagaaattggatgtgaggataaaaccctagccttcaaacgactcggaccgatg

SEQ ID NO: 11397 - DNA, 203 bp, synthetic construct
  source 1..203: mol_type = other DNA
ggcgcgccagtcctgttacaatcaatgcaggcattagtttctcagttaaaaaacaaggagagacagtagctgatgttaggacactacccaatgcctcaaccgtggacaatattcgctccatctttggaaatgaaagggcagagcgtctgatagaaattggatgtgaggataaaaccctagccttcaaacgactcggaccgatg

SEQ ID NO: 11398 - DNA, 203 bp, synthetic construct
  source 1..203: mol_type = other DNA
ggcgcgccagtcctgggcatcacaatgcaggcattagtttctcagttaaaaaacaaggagagacagtagctgatgttaggacactacccaatgcctcaaccgtggacaatattcgctctggaagcaattcatctgttagtcgagaactgatagaaattggatgtgaggataaaaccctagccttcaaacgactcggaccgatg

SEQ ID NO: 11399 - DNA, 203 bp, synthetic construct
  source 1..203: mol_type = other DNA
ggcgcgccagtccttaccgcagcaatgcaggcattagtttctcagttaaaaaacaaggagagacagtagctgatgttaggacactacccatccttcgctattaagacaatattcgctccatctttggaaatgctgttagtcgagaactgatagaaattggatgtgaggataaaaccctagccttcaaacgactcggaccgatg

SEQ ID NO: 11400 - DNA, 203 bp, synthetic construct
  source 1..203: mol_type = other DNA
ggcgcgccagtcctgcgacagccaatgcaggcattagtttctcagttaaaaaacaaggagagcattagaaaatgtctaggacactacccaatgcctcaaccgtggacaatattcgctccatctttggaaatgctgttagtcgagaactgatagaaattggatgtgaggataaaaccctagccttcaaacgactcggaccgatg

SEQ ID NO: 11401 - DNA, 203 bp, synthetic construct
  source 1..203: mol_type = other DNA
ggcgcgccagtcctttgacgcacacactaatattatccagattagagagcttaattagctctgtattaataataacactactattccaataactggaatcaccaagagttcgacatggcaaaatgattcaaagaaaacaaatcatattaagactatcctaagcacgaacccatatcgtccttcaaatccgactcggaccgatg

SEQ ID NO: 11402 - DNA, 203 bp, synthetic construct
  source 1..203: mol_type = other DNA
ggcgcgccagtccttgcaccggcacactaatattatccagattagagagcttaattagctctgtattaataataacactactattccaataactggaatcaccagcttgatttatctccaaaatgattcaaagaaaacaaatcataagggtggaggagagagcacgaacccatatcgtccttcaaatccgactcggaccgatg

SEQ ID NO: 11403 - DNA, 203 bp, synthetic construct
  source 1..203: mol_type = other DNA
ggcgcgccagtcctggttagtccacactaatattatccagattagagagcttaattagctctgtattaataataacactactattccaataactggaatcaccagcttgatttatctccaaaatgattcaaatcgcctgggctcgcttaagactatcctaagcacgaacccatatcgtccttcaaatccgactcggaccgatg

SEQ ID NO: 11404 - DNA, 203 bp, synthetic construct
  source 1..203: mol_type = other DNA
ggcgcgccagtcctgatgccagcacagatcagctcaaccagacaccaccagcatacacgaaaccaaccttcacagtggatacctcagcatccaaaactctccttcccgaatggatcaggatgccttcttttttgagagggatcctgaagccgaaggagaggcaccacgaaaacaagaatcactctcagcgactcggaccgatg

SEQ ID NO: 11405 - DNA, 203 bp, synthetic construct
  source 1..203: mol_type = other DNA
ggcgcgccagtcctggattatccacagatcagctcaaccagacaccaccagcatacacgaaaccaaccttcacagtggatacctcagcatccaaaactctccttcccgaatggatcaggatgccttcttttttgagagggatcctgaagccgaaggagagtataggacccggagagaatcactctcagcgactcggaccgatg

SEQ ID NO: 11406 - DNA, 203 bp, synthetic construct
  source 1..203: mol_type = other DNA
ggcgcgccagtcctgataatcacacatctctctggccacgtggacgagggcatgcccaaagcacatcttaacctgagcgggggtcgcccaggtaaaagcagttttaaccgactgttacgaatacagcctgatagggtgctgcagaggcccactgtattgctactaaaaatctctgctgtacatggcaccgactcggaccgatg

SEQ ID NO: 11407 - DNA, 203 bp, synthetic construct
  source 1..203: mol_type = other DNA
ggcgcgccagtcctcggttaatcacccgccatagcaatggagaccccgaaaggacaatgcaataattaatccttcttttttgcttcacaataaaaatagcatggctcttctgattgtaaaaagtgatatacactccttatttaacgaaaaattcaaagaatttgataaatgacaggcgaaaagtcaaacgactcggaccgatg

SEQ ID NO: 11408 - DNA, 203 bp, synthetic construct
  source 1..203: mol_type = other DNA
ggcgcgccagtcctggaagtctcacccgccatagcaatggagaccccgcctcctgctacagttaattaatccttcttttttgcttcacaataaaaatagcatggctcttctgattgtaaaaagtgatatacactccttatttaacgaaaaattcaaagaaggctggtgtctcatggcgaaaagtcaaacgactcggaccgatg

SEQ ID NO: 11409 - DNA, 203 bp, synthetic construct
  source 1..203: mol_type = other DNA
ggcgcgccagtcctggtccgtgcacccgccatagttgcctcccggtaccctcctgctacagttaattaatccttcttttttgcttcacaataaaaatagcatggctcttctgattgtaaaaagtgatatacactccttatttaacgaaaaattcaaagaatttgataaatgacaggcgaaaagtcaaacgactcggaccgatg

SEQ ID NO: 11410 - DNA, 203 bp, synthetic construct
  source 1..203: mol_type = other DNA
ggcgcgccagtcctcggagacccaccgaggatgctctgaatgatatcaagcgagacatcataagaagcgccatatgaactcaccaggaacaccagactcacgggcccgatgcgtgggagaaagccacaatgattccctgtttaataaaaaataagcacgaacacaagtccaatccaaccatagcagcacgactcggaccgatg

SEQ ID NO: 11411 - DNA, 203 bp, synthetic construct
  source 1..203: mol_type = other DNA
ggcgcgccagtcctggacaacccaccgggccggttggggccccgctcgccggcgggagccaccggagccccggccaacccatttgtaacacccccgccggccccgccctcccggctgcggcctggccaatcagagcggctcttactggcgggtgggctgagccggcccagctgctcggaggctctggccgactcggaccgatg

SEQ ID NO: 11412 - DNA, 203 bp, synthetic construct
  source 1..203: mol_type = other DNA
ggcgcgccagtcctaggaacggcaccgggccggttggggccccgctcgttacgtctggccaccggagccccggccacgaaggggtgcgaccccccgccggccccgccctcccggctgcggcctggccaatcagagcggctcttagaactaccagggctgagccggcccagctgctcggaggctctggccgactcggaccgatg

SEQ ID NO: 11413 - DNA, 203 bp, synthetic construct
  source 1..203: mol_type = other DNA
ggcgcgccagtcctagcaatatcacgccttcatgtaaaagaatcagagtgtctcaacccttgacaagaggaccaagtgcctttattccagagaaggaagttgtccaagcaaacacagtggatgaacgtactaactttcttgtggaagaatactctacatccggtcgtctggacaacatcacacaggtccgactcggaccgatg

SEQ ID NO: 11414 - DNA, 203 bp, synthetic construct
  source 1..203: mol_type = other DNA
ggcgcgccagtcctatcgggtccacgcgagccgttggtggttgttgtgatgattatactggataccaggagttagtaatcaaaacttcacatgacgactaagttcgtctttgattcattgcactgatctcttgttagatctttttgcaatctagcatttgttaaagttcttaaggccacgccctattacgactcggaccgatg

SEQ ID NO: 11415 - DNA, 203 bp, synthetic construct
  source 1..203: mol_type = other DNA
ggcgcgccagtcctcacaagaccacgttggttagtccatcttcccggggccgcgccgcgcgcgcgcgcgggctttgggcgggaccctgcagaggcggcggggctcctcctcccgctcctcctcggcctccccttcgggcgctctcgcgctaactgtgctcctccggggccctccgcctgctcccagcccgactcggaccgatg

SEQ ID NO: 11416 - DNA, 203 bp, synthetic construct
  source 1..203: mol_type = other DNA
ggcgcgccagtcctcctggcgtcactggtgacagcggcgtacaataaatcaggtaccccgaggtaacacgcgacactcgggatctgagaaggggactggggcttctataaaagcgctcggtttaaaaagcttctatgcctgaataggtgaccggaggtcggcacctttcctttacaattaatgaccctcgactcggaccgatg

SEQ ID NO: 11417 - DNA, 203 bp, synthetic construct
  source 1..203: mol_type = other DNA
ggcgcgccagtcctcattaggacactggtgacaggctaaggatgccctgactacgaggttttgtaacacgcgacactcgggatctgagaaggggactggggcttctataaaagcgctcggtttaaaaagcttctatgcctgaataggtgaccggaggtcggcacctttcctttacaattaatgaccctcgactcggaccgatg

SEQ ID NO: 11418 - DNA, 203 bp, synthetic construct
  source 1..203: mol_type = other DNA
ggcgcgccagtcctgttgtaaccactggtgacaggctaaggatgcccttcaggtaccccgaggtaacacgcgacactcgggatctgagaaggggactggggcttctataaaagcgctcccggattgccctgactatgcctgaataggtgaccggaggtcggcacctttcctttacaattaatgaccctcgactcggaccgatg

SEQ ID NO: 11419 - DNA, 203 bp, synthetic construct
  source 1..203: mol_type = other DNA
ggcgcgccagtcctgcgcatgccactggtgacaggctaaggatgcccttcaggtaccccgaggtaacacgcgacactcgggatctgagaaggggactggggcttctataaaagcgctcggtttaaaaagcttaagctgagtctactgtgaccggaggtcggcacctttcctttacaattaatgaccctcgactcggaccgatg

SEQ ID NO: 11420 - DNA, 203 bp, synthetic construct
  source 1..203: mol_type = other DNA
ggcgcgccagtcctcctgggtccactggtgacaggctaaggatgcccttcaggtaccccgaggtaacacgcgacactcgggatctgagaaggggactggggcttctataaaagcgctcggtttaaaaagcttctatgcctgaatagacctatcttctaatgcacctttcctttacaattaatgaccctcgactcggaccgatg

SEQ ID NO: 11421 - DNA, 203 bp, synthetic construct
  source 1..203: mol_type = other DNA
ggcgcgccagtcctatggtgagcactggtgacaggctaaggatgcccttcaggtaccccgaggtaacacgcgacactcgggatctgagaaggggactggggcttctataaaagcgctcggtttaaaaagcttctatgcctgaatagcgacttattctcacgcacctttcctttacaattaatgaccctcgactcggaccgatg

SEQ ID NO: 11422 - DNA, 203 bp, synthetic construct
  source 1..203: mol_type = other DNA
ggcgcgccagtcctgggctccccactggtgacaggctaaggatgcccttcaggtaccccgaggtaacacgcgacactcgggatctgagaaggggactggggcttctataaaagcgctcggtttaaaaagcttctatgcctgaataggtgaccggaggtcgcgcttaaagagagtcaattaatgaccctcgactcggaccgatg

SEQ ID NO: 11423 - DNA, 203 bp, synthetic construct
  source 1..203: mol_type = other DNA
ggcgcgccagtcctctcccaaacactggtgacaggctaaggatgcccttcaggtaccccgaggtaacacgcgacactcgggatctgagaaggggactggggcttctataaaagcgctcggtttaaaaagcttctatgcctgaataggtgaccggaggtcgtacgggcgggggcccaattaatgaccctcgactcggaccgatg

SEQ ID NO: 11424 - DNA, 203 bp, synthetic construct
  source 1..203: mol_type = other DNA
ggcgcgccagtcctgtgtttagcactggtgacaggctaaggatgcccttcaggtaccccgaggtaacacgcgacactcgggatctgagaaggggactggggcttgacacgccataggaggtttaaaaagcttctatgcctgaataggtgaccggaggtcggcacctttcctttacaattaatgaccctcgactcggaccgatg

SEQ ID NO: 11425 - DNA, 203 bp, synthetic construct
  source 1..203: mol_type = other DNA
ggcgcgccagtcctctctccaccactggtgacaggctaaggatgcccttcaggtaccccgaggtaacacgcgacactcgggatctgagaaggggactggggcttgccctcgtagtgggggtttaaaaagcttctatgcctgaataggtgaccggaggtcggcacctttcctttacaattaatgaccctcgactcggaccgatg

SEQ ID NO: 11426 - DNA, 203 bp, synthetic construct
  source 1..203: mol_type = other DNA
ggcgcgccagtcctttgtagtacactggtgacagttacctatcaagtatcaggtaccccgaggtaacacgcgacactcgggatctgagaaggggactggggcttctataaaagcgctcggtttaaaaagcttctatgcctgaataggtgaccggaggtcggcacctttcctttacaattaatgaccctcgactcggaccgatg

SEQ ID NO: 11427 - DNA, 203 bp, synthetic construct
  source 1..203: mol_type = other DNA
ggcgcgccagtcctctcggccacactgtaacgatggccggcgggcagcgtgcggcagtgcggagctcctgagaccggcgggcacacgggggtctgtggcccccgccgtagcagtggctgccgccgtcgcttggttcccgtcggtctgcgggaggcgggttatggcggcggcggcagtgagagctgtgacgactcggaccgatg

SEQ ID NO: 11428 - DNA, 203 bp, synthetic construct
  source 1..203: mol_type = other DNA
ggcgcgccagtcctatgagccccacttcctctgtaaagctctcaacccctgggaagcgaatgtctctcctgggaaagagccctcccatgcctagctgctgctcttagggaccctgtggctaggtgcgcggatggaaatccaggatctccgcctggttcggcccgcctgcctccactcctgcctctacccgactcggaccgatg

SEQ ID NO: 11429 - DNA, 203 bp, synthetic construct
  source 1..203: mol_type = other DNA
ggcgcgccagtcctatgggctgcacttcctctgtaaagctctcaaccctgtccccttccccctctctcctgggaaaagaaaaagaagcttctagctgctgctcttagggaccctgtggctaggtgcgcggatggaaatccaggatctccgcctggttcggcccgcctgcctccactcctgcctctacccgactcggaccgatg

SEQ ID NO: 11430 - DNA, 203 bp, synthetic construct
  source 1..203: mol_type = other DNA
ggcgcgccagtccttccaccatcacttcctctgtaaagctctcaaccctgtccccttccccctctctcctgggaaagagccctcccatgcctagctgctgctctcgtatgaatgtgttctaggtgcgcggatggaaatccaggatctccgcctggttcggcccgcctgcctccactcctgcctctacccgactcggaccgatg

SEQ ID NO: 11431 - DNA, 203 bp, synthetic construct
  source 1..203: mol_type = other DNA
ggcgcgccagtccttgcttgtgcacttcctctgtaaagctctcaaccctgtccccttccccctctctcctgggaaagagccctcccatgcctagctgctgctcttagggaccctgtggctaggtgcgcggatggaaatccaggatcataagtatacatctcccgcctgcctccactcctgcctctacccgactcggaccgatg

SEQ ID NO: 11432 - DNA, 203 bp, synthetic construct
  source 1..203: mol_type = other DNA
ggcgcgccagtcctcgctgacacacttcctctgtaaagctctcaaccctgtccccttccccctctctcctgggaaagagccctcccatgcctagctgctgctcttagggaccctgtggctaggtgcgcggatggaaatccaggatctccgcctggttcggaataagaaagcgttctcctgcctctacccgactcggaccgatg

SEQ ID NO: 11433 - DNA, 203 bp, synthetic construct
  source 1..203: mol_type = other DNA
ggcgcgccagtcctgttaagcccacttcctctgtaaagctctcaaccctgtccccttccccctctctcctgggaaagagccctcccatgcctagctgctgctcttagggaccctgtggctaggtgcgcggatggaaatccaggatctccgcctggttcggcccgcctgcctccaacgagtgagtagtacgactcggaccgatg

SEQ ID NO: 11434 - DNA, 203 bp, synthetic construct
  source 1..203: mol_type = other DNA
ggcgcgccagtcctcctaattccacttcctctgtaaagctctcaaccctgtccccttccccctctctcctgggaaagagccctcccatgcctagctgctgctcttagggaccctgtggctaggtgcgcggatggaaatccaggatctccgcctggttcggcccgcctgcctccactcctgcctctacccgactcggaccgatg

SEQ ID NO: 11435 - DNA, 203 bp, synthetic construct
  source 1..203: mol_type = other DNA
ggcgcgccagtcctgcccgcttcacttcctctgtaaagctctcaaccctgtccccttccccctctctcctgggaaagagccctcccatgcctagctgctgctcttagggaccctgtggctaggtgcgcggattagttgaattccgttccgcctggttcggcccgcctgcctccactcctgcctctacccgactcggaccgatg

SEQ ID NO: 11436 - DNA, 203 bp, synthetic construct
  source 1..203: mol_type = other DNA
ggcgcgccagtccttgaccgaacacttcctctgtaaagctctcaaccctgtccccttccccctctctcctgggaaagagccctcccatgcctagctgctgctcttagggaccctgtggtctaacatatcctcggaaatccaggatctccgcctggttcggcccgcctgcctccactcctgcctctacccgactcggaccgatg

SEQ ID NO: 11437 - DNA, 203 bp, synthetic construct
  source 1..203: mol_type = other DNA
ggcgcgccagtcctggaggcagcacttcctctgtaaagctctcaaccctgtccccttccccctctctcctgggaaagagccctcccatgctactacaggttagctagggaccctgtggctaggtgcgcggatggaaatccaggatctccgcctggttcggcccgcctgcctccactcctgcctctacccgactcggaccgatg

SEQ ID NO: 11438 - DNA, 203 bp, synthetic construct
  source 1..203: mol_type = other DNA
ggcgcgccagtcctcgcaatcgcacttcctctgtgttagaacgcgtgttgtccccttccccctctctcctgggaaagagccctcccatgcctagctgctgctcttagggaccctgtggctaggtgcgcggatggaaatccaggatctccgcctggttcggcccgcctgcctccactcctgcctctacccgactcggaccgatg

SEQ ID NO: 11439 - DNA, 203 bp, synthetic construct
  source 1..203: mol_type = other DNA
ggcgcgccagtcctccgtggtgcagacatgaggttcgcagtgcagtgagttcatgcaccttcttgccaagcctcagtctttgggatctggggaggccgcctggttttcctccctccttctgcacgtctgctggggtctcttcctctccaggccttgccgtccccctggcctctcttcccagctcacaccgactcggaccgatg

SEQ ID NO: 11440 - DNA, 203 bp, synthetic construct
  source 1..203: mol_type = other DNA
ggcgcgccagtcctcggcctcccagagagcgcaaggggcaaggatttcatgagcatcctcctctaaacgcgtgtcaagacaaaagatgcttcagctttggaaacttgttctcctgtgcggcgtgctcactgggacctcagagtctcttcttgacaatcttggcaatgacctaagcaatgtcgtggatacgactcggaccgatg

SEQ ID NO: 11441 - DNA, 203 bp, synthetic construct
  source 1..203: mol_type = other DNA
ggcgcgccagtcctccgggccccagagatacagctgccactcacacactcatccagacaaatcaaactagactcacatcattcggaaacaattctctcataatttaaagaaaaaatcataggccggacgggttagaaatccggtgcttgttcgtgatcagataacctccacaccagaatcatacaatccgactcggaccgatg

SEQ ID NO: 11442 - DNA, 203 bp, synthetic construct
  source 1..203: mol_type = other DNA
ggcgcgccagtcctgacggcggcagagatacagctgccactcacacactcatccagacaaatttcgggctcggatgatcattcggaaacaattctctcataatttaaagaaaaaatcataggccggacgggttagaaatccggtgcttgttcgtgatcagataacctccacaccagaatcatacaatccgactcggaccgatg

SEQ ID NO: 11443 - DNA, 203 bp, synthetic construct
  source 1..203: mol_type = other DNA
ggcgcgccagtcctcaggaaatcagagccctgcacccctaattcccggctcgtttgcaaatgtgccgtttccctccaccggcctggagtctcccagtcttgtcccggcagtgccgccctccccactaagacctaggcgcaaaggcttggctcatggttgacagctcagagagagaaagatctgagggacgactcggaccgatg

SEQ ID NO: 11444 - DNA, 203 bp, synthetic construct
  source 1..203: mol_type = other DNA
ggcgcgccagtcctgacgtgcccagagccctgcacccctaattcccggtggaaaactcctgttgccgtttccctccaccggcctggagtctcccagtcttgtcccggcagtgccgccctccccactaagacctaggcgcaaaggcttggctcatggttgacagctcagagagagaaagatctgagggacgactcggaccgatg

SEQ ID NO: 11445 - DNA, 203 bp, synthetic construct
  source 1..203: mol_type = other DNA
ggcgcgccagtcctatgtagaccagagccctgcagatgagtagtgttctggaaaactcctgttgccgtttccctccaccggcctggagtctcccagtcttgtcccggcagtgccgccctccccactaagacctaggcgcaaaggcttggctcatggttgacagctcagagagagaaagatctgagggacgactcggaccgatg

SEQ ID NO: 11446 - DNA, 203 bp, synthetic construct
  source 1..203: mol_type = other DNA
ggcgcgccagtcctgtctgagtcagaggatttatttagtcactggcaaacggaaagatggcgccggtttactggcaaacacaaattgaggtgggtccgggagcaaccaatgccactataaactttgaagcaggaattctggagtgctatgaaaggttttcatggcaaagagcccttgactatcctggtcgactcggaccgatg

SEQ ID NO: 11447 - DNA, 203 bp, synthetic construct
  source 1..203: mol_type = other DNA
ggcgcgccagtccttgtcccagcagaggatttatttagtcactggcaaacggaaagatggcggacaacatgaccacaacacaaattgagggccccttctagtacaccaatgccactataaactttgaagcaggaattctggagtgctatgaaaggttttcatggcaaagagcccttgactatcctggtcgactcggaccgatg

SEQ ID NO: 11448 - DNA, 203 bp, synthetic construct
  source 1..203: mol_type = other DNA
ggcgcgccagtcctatctaacacagaggatttatttagtcactggcaaacggaaagatggcggacaacatgaccacaacacaaattgaggtgggtccgggagcaaccaatgccactataaactttgaagcaggaattctggagtgctatgaaaggttttcatggcaaagagcccttgactatcctggtcgactcggaccgatg

SEQ ID NO: 11449 - DNA, 203 bp, synthetic construct
  source 1..203: mol_type = other DNA
ggcgcgccagtcctgcccttagcagaggatttatttagtcactggcaaacggaaagatggcggacaacatgaccacaacacaaattgaggtgggtccgggagcaaccaatgccactataaactttgaagcagttggcagcagagtgtatgaaaggttttcatggcaaagagcccttgactatcctggtcgactcggaccgatg

SEQ ID NO: 11450 - DNA, 203 bp, synthetic construct
  source 1..203: mol_type = other DNA
ggcgcgccagtcctattggacccagagtattgatgaggaaactgaagtttggagcgatcacatcattttcccaaggtaacacaagtggcaagacagccgggaacccctaccccatccccttattcagcacatgaaataaacaaggggcatccaaatcttgcggcaacgcccccgggacatgcatcgtccgactcggaccgatg

SEQ ID NO: 11451 - DNA, 203 bp, synthetic construct
  source 1..203: mol_type = other DNA
ggcgcgccagtcctaacattggcagagtattgatgaggaaactgaagtttggagcgatcacatcattttcccaaggtaacacaagtggcaagacagccgggaacccctaccccatccccttattcagcacatttttcccgtgtaatgcatccaaatcttgcggcaacgcccccgggacatgcatcgtccgactcggaccgatg

SEQ ID NO: 11452 - DNA, 203 bp, synthetic construct
  source 1..203: mol_type = other DNA
ggcgcgccagtcctggtttcggcagagtattgatgaggaaactgaagtttggagcgatcacatcattttcccaaggtaacacaagtggcaagacagccgggaactttaggtatcgagacttattcagcacatgaaataaacaaggggcatccaaatcttgcggcaacgcccccgggacatgcatcgtccgactcggaccgatg

SEQ ID NO: 11453 - DNA, 203 bp, synthetic construct
  source 1..203: mol_type = other DNA
ggcgcgccagtcctcagcgctacagagtctgagccgttcagaggctcatttgataaatagaagatttatttgggcttggtggtaagtgtgattttatgttttctttgattttcttgtagacttgttcctgacgctgctacaggagccctcactctgattccttcatttatttttccaggtaagcaaaccgactcggaccgatg

SEQ ID NO: 11454 - DNA, 203 bp, synthetic construct
  source 1..203: mol_type = other DNA
ggcgcgccagtcctctggataacagataagagccccaggccctgcagtcaactctgggaggcaacccagacacacgtcaggctgaacccaccccacatttctccctcgggaatctgattaaggcagtgattcttcattgcctgccctcctgtccacactcctgcctactgccacccacaagggtcatccgactcggaccgatg

SEQ ID NO: 11455 - DNA, 203 bp, synthetic construct
  source 1..203: mol_type = other DNA
ggcgcgccagtcctcgttgctgcagataagagccccaggccctgcagtcaactctgggaggccgtgggctggacttgacccaaatggtttccccacatttctccctcgggaatctgattaaggcagtgattcttcattgcctgccctcctgtccacactcctgcctactgccacccacaagggtcatccgactcggaccgatg

SEQ ID NO: 11456 - DNA, 203 bp, synthetic construct
  source 1..203: mol_type = other DNA
ggcgcgccagtccttctcagtccagataagagccccaggccctgcagtcaactctgggaggccgtgggctggactttcaggctgaacccaccccacatcatcgtttcgggaatctgattaaggcagtgattcttcattgcctgccctcctgtccacactcctgcccgtatggacccacaagggtcatccgactcggaccgatg

SEQ ID NO: 11457 - DNA, 203 bp, synthetic construct
  source 1..203: mol_type = other DNA
ggcgcgccagtccttgatggcgcagataagagccccaggccctgcagtcaactctgggaggccgtgggctggactttcaggctgaacccaccccacatttctccctcgggaatctgattaaggcagtgattcttcattgcctgcccgaaacagtcgtggtctgcctactgccacccacaagggtcatccgactcggaccgatg

SEQ ID NO: 11458 - DNA, 203 bp, synthetic construct
  source 1..203: mol_type = other DNA
ggcgcgccagtcctgagcggcacagataagagccccaggccctgcagtcaactctgggaggccgtgggctggactttcaggctgaacccaccccacatttctccctcgggaatctgattaaggcagtgattcttcattgcctgccctcctgtccacactcctgcccgtatggacccacaagggtcatccgactcggaccgatg

SEQ ID NO: 11459 - DNA, 203 bp, synthetic construct
  source 1..203: mol_type = other DNA
ggcgcgccagtccttgcgagtacagataagagccccaggccctgcagtcaactctgggaggccgtgggctggactttcaggctgaacccaggtactcaagtgtgctcgggaatctgattaaggcagtgattcttcattgcctgccctcctgtccacactcctgcctactgccacccacaagggtcatccgactcggaccgatg

SEQ ID NO: 11460 - DNA, 203 bp, synthetic construct
  source 1..203: mol_type = other DNA
ggcgcgccagtcctggagccgccagataagagccgtgccatgcaacagcaactctgggaggccgtgggctggactttcaggctgaacccaccccacatttctccctcgggaatctgattaaggcagtgattcttcattgcctgccctcctgtccacactcctgcctactgccacccacaagggtcatccgactcggaccgatg

SEQ ID NO: 11461 - DNA, 203 bp, synthetic construct
  source 1..203: mol_type = other DNA
ggcgcgccagtccttttgatgacagatcgtgctacggcttgatccgccagaagcggcaggcgcgggagcagcactgggaccggccgtctgccagcaggaggcggagcagccccagcaagaaccgcgggctctgcaacggcaacctggtggatatcttctccaaagtgcgcatcttcggcctcaagaagcgactcggaccgatg

SEQ ID NO: 11462 - DNA, 203 bp, synthetic construct
  source 1..203: mol_type = other DNA
ggcgcgccagtcctcggtcgagcagattattcctatgcatcctgccttcctcacccaggactggtctgagagggattcatgatggaagcactcatcgaggcgttcctggttctcgcctaaatgtggtcaacagtgtcagcagttcagaggacatcaagcccttaccagggcttcccgggattggaaaccgactcggaccgatg

SEQ ID NO: 11463 - DNA, 203 bp, synthetic construct
  source 1..203: mol_type = other DNA
ggcgcgccagtcctattccttccagattattcctatgcatcctgccttcctcacccaggactggtctgagagggattcatgatggaagcatgttcattctgtgacctggttctcgcctaaatgtggtcaacagtgtcagcagttcagaggacatcaagccagcggtccaatagaccgggattggaaaccgactcggaccgatg

SEQ ID NO: 11464 - DNA, 203 bp, synthetic construct
  source 1..203: mol_type = other DNA
ggcgcgccagtcctgttctaggcagattattccttccgtatgcctgaccctcacccaggactggtctgagagggattcatgatggaagcatgttcattctgtgacctggttctcgcctaaatgtggtcaacagtgtcagcagttcagaggacatcaagcccttaccagggcttcccgggattggaaaccgactcggaccgatg

SEQ ID NO: 11465 - DNA, 203 bp, synthetic construct
  source 1..203: mol_type = other DNA
ggcgcgccagtcctacatctgccagcagcctgcagccgccgccgggttgtgcctcagactgtcagataaatcggcgggccgggccggcgggtcggtgagcgcggcccgggccggacatggcggcgctctacgcctgcaccaagtgccaccagcgcttccccttcgaggcgctgtgggcacatagaagtcgactcggaccgatg

SEQ ID NO: 11466 - DNA, 203 bp, synthetic construct
  source 1..203: mol_type = other DNA
ggcgcgccagtcctaagaatgccagcagcctgcagccgccgccgggttgtgcctcagactgtcagataaatcggcgggccgggccggcggtatttcactgcttacccgggccggacatggcggcgctctacgcctgcaccaagtgccaccagcgcttccccttcgaggcgctgtctcaggggcagcagcgactcggaccgatg

SEQ ID NO: 11467 - DNA, 203 bp, synthetic construct
  source 1..203: mol_type = other DNA
ggcgcgccagtcctcgcagaatcagcagcctgcagccgccgccgggttgtgcctcagactgtcagataaatcggcgttggttaagtcaacgtcggtgagcgcggcccgggccggacatggcggcgctctacgcctgcaccaagtgccaccagcgcttccccttcgaggcgctgtctcaggggcagcagcgactcggaccgatg

SEQ ID NO: 11468 - DNA, 203 bp, synthetic construct
  source 1..203: mol_type = other DNA
ggcgcgccagtcctaaatcgaccagcatccaccgcgcggcccaggactcgagcatgccctaccgttgcgtgaggcgggtaaatgttcgcggaagcggcaaagacgacacggccttgtgggatggcggagtttaaggagaagcctgaggccccgactgagcagctggatgtcgcgtgcggccaggaaaacgactcggaccgatg

SEQ ID NO: 11469 - DNA, 203 bp, synthetic construct
  source 1..203: mol_type = other DNA
ggcgcgccagtccttaacgccccagcatccaccgcgcggcccaggactgtcagggtagtgggcgttgcgtgaggcgggtaaatgttcgcggaagcggcaaagacgacacggccttgtgggatggcggagtttaaggagaagcctgaggccccgactgagcagctggatgtcgcgccatctagaatttgcgactcggaccgatg

SEQ ID NO: 11470 - DNA, 203 bp, synthetic construct
  source 1..203: mol_type = other DNA
ggcgcgccagtcctcgtacgatcagcatccaccgcgcggcccaggactgtcagggtagtgggcgttgcgtgaggcgggtaaatgttcgcggaagcggcaaagacgacacggccttgtgggatggcggagtttaaggagaagcctgaggccccgactgagccaaacccaaagatatgcggccaggaaaacgactcggaccgatg

SEQ ID NO: 11471 - DNA, 203 bp, synthetic construct
  source 1..203: mol_type = other DNA
ggcgcgccagtcctgcgggtggcagcatccaccgcgcggcccaggactgtcagggtagtgggcgttgcgtgaggcgggtaaatgttcgcggaagcggcaaagacgacacggccttgtgggatggcggagtttaaggagaagcctgataattgcgtccgatagctggatgtcgcgtgcggccaggaaaacgactcggaccgatg

SEQ ID NO: 11472 - DNA, 203 bp, synthetic construct
  source 1..203: mol_type = other DNA
ggcgcgccagtcctccatcacacagcatccaccgcgcggcccaggactgtcagggtagtgggcgttgcgtgaggcgtagcgcccacactcgaagcggcaaagacgacacggccttgtgggatggcggagtttaaggagaagcctgaggccccgactgagcagctggatgtcgcgtgcggccaggaaaacgactcggaccgatg

SEQ ID NO: 11473 - DNA, 203 bp, synthetic construct
  source 1..203: mol_type = other DNA
ggcgcgccagtcctcagcgtatcagcatccaccgcgcggcccaggactgtcagggtagtggggagacaaactcaacggtaaatgttcgcggaagcggcaaagacgacacggccttgtgggatggcggagtttaaggagaagcctgaggccccgactgagcagctggatgtcgcgtgcggccaggaaaacgactcggaccgatg

SEQ ID NO: 11474 - DNA, 203 bp, synthetic construct
  source 1..203: mol_type = other DNA
ggcgcgccagtcctgaactgctcagcatcccagacagacttccagattccttacgtaggggaccaacacgtaggtgtatgggagaccacatcatttcatgacttatgtttgaggaacactaggctgttgtctagacgaggcaagctctggaaagcaacgccgagtctctgagaagagggagcataggccgactcggaccgatg

SEQ ID NO: 11475 - DNA, 203 bp, synthetic construct
  source 1..203: mol_type = other DNA
ggcgcgccagtcctcaccaaggcagcatcccagacagacttccagatttgaacatctaccccccaacacgtaggtggtgctctacgtgtgtcatttcatgacttatgtttgaggaacactaggctgttgtctagacgaggcaagctctggaaagcaacgccgagtctctgagaagagggagcataggccgactcggaccgatg

SEQ ID NO: 11476 - DNA, 203 bp, synthetic construct
  source 1..203: mol_type = other DNA
ggcgcgccagtcctacgactagcagcatcccagacagacttccagatttgaacatctaccccccaacacgtaggtgtatgggagaccacatcatttcatgacttatgtttgaggaacactaggctgttgtctagacgaggcaagcttcaccctaacggagcgagtctctgagaagagggagcataggccgactcggaccgatg

SEQ ID NO: 11477 - DNA, 203 bp, synthetic construct
  source 1..203: mol_type = other DNA
ggcgcgccagtcctaattacggcagcatcccagacagacttccagatttgaacatctaccccccaacacgtaggtgtatgggagaccacatcatttcatgacttgcaacgcgccccgtctaggctgttgtctagacgaggcaagctctggaaagcaacgccgagtctctgagaagagggagcataggccgactcggaccgatg

SEQ ID NO: 11478 - DNA, 203 bp, synthetic construct
  source 1..203: mol_type = other DNA
ggcgcgccagtcctaacctcctcagcatcccagatgtggcatatcgaatgaacatctaccccccaacacgtaggtgtatgggagaccacatcatttcatgacttatgtttgaggaacactaggctgttgtctagacgaggcaagctctggaaagcaacgccgagtctctgagaagagggagcataggccgactcggaccgatg

SEQ ID NO: 11479 - DNA, 203 bp, synthetic construct
  source 1..203: mol_type = other DNA
ggcgcgccagtccttataacctcagccccgggggcagggagagcctagattacggaagtaccgcgagcaaggagacttaggggatatcgcgtccggagctagctggatcctctaggcaggatggtgatgggaatctttgcaaattgtatcttctgtttgaaagtgaagtacttacctcagcagcagaacgactcggaccgatg

SEQ ID NO: 11480 - DNA, 203 bp, synthetic construct
  source 1..203: mol_type = other DNA
ggcgcgccagtcctaagggcgtcagccccgggggcagggagagcctagattacggaagtaccgcgagcaaggagcgcggaatcggggagcgtccggagctagctggatcctctaggcaggatggtgatgggaatctttgcaaattgtatcttctgtttgattccatttagtaagcctcagcagcagaacgactcggaccgatg

SEQ ID NO: 11481 - DNA, 203 bp, synthetic construct
  source 1..203: mol_type = other DNA
ggcgcgccagtcctttcagcctcagccccgggggcagggagagcctagattacggaagtaccgcgagcaaggagcgcggaatcggggagctgaaacctggtcaaggatcctctaggcaggatggtgatgggaatctttgcaaattgtatcttctgtttgaaagtgaagtacttacctcagcagcagaacgactcggaccgatg

SEQ ID NO: 11482 - DNA, 203 bp, synthetic construct
  source 1..203: mol_type = other DNA
ggcgcgccagtcctttgctaaccagcctagctaatggtggtggcgctttaggcagcctccacgcccaccacctcccagatagagcggcggcactgtagggaagaccggggaccggtcactaccaaggacgcagacctctttttgagtatcacgcctccggaagtagttgggcaagcccacctatatgtcgactcggaccgatg

SEQ ID NO: 11483 - DNA, 203 bp, synthetic construct
  source 1..203: mol_type = other DNA
ggcgcgccagtcctttcaaagtcagcgcacgtagtcctagcgtcgagccccctctgagtcaggaaacattttcagacctatggaaactacttcctgaaaacaacgttctgtcccccttgccgtcccaagcaatggatgatttgatgctgtccccggacgatattgaacaatggttcactgaagacccacgactcggaccgatg

SEQ ID NO: 11484 - DNA, 203 bp, synthetic construct
  source 1..203: mol_type = other DNA
ggcgcgccagtcctggtaacaccagcgtcatcaggcggacgccatggtaagcgcggacgccatggtaagcgcggacgccatggtaagcgcggacgccatggtaagcgcggacgccatggtaagcgcggacgccatggtaagcgcggacgccatggtaagcgcggacgccatgcacacggaccctgactcgactcggaccgatg

SEQ ID NO: 11485 - DNA, 203 bp, synthetic construct
  source 1..203: mol_type = other DNA
ggcgcgccagtccttactattccaggaagtggacggtgagttcgttggatggcttaagccctgagtacagggtagtcgtcagtggttcgacgccttggaataaaggtctcgagatgccacgtggacgagggcatgcccaaagcacatcttaacctgagcgggggtcgcccaggtaaaagcagttttaacgactcggaccgatg

SEQ ID NO: 11486 - DNA, 203 bp, synthetic construct
  source 1..203: mol_type = other DNA
ggcgcgccagtcctcgaacttacaggacccagacagagacacacggtcactgcagctgaagccgctgcccctgctaagtccctctgtccagaggctgggagagccaaggatcacgcagcaaggaagaaacagacccaggtgcagactcaggcaccaccaggaccagctgatcattccagcccacagcacgactcggaccgatg

SEQ ID NO: 11487 - DNA, 203 bp, synthetic construct
  source 1..203: mol_type = other DNA
ggcgcgccagtcctccggcactcaggacccagacagagacacacggtcactgcagctgaagccgctgcccctgctacagatgaagaaaaggaggctgggagagccaaggatcacgcagcaaggaagaaacagacccaggtgcagacgagacatgacagcagaccagctgatcattccagcccacagcacgactcggaccgatg

SEQ ID NO: 11488 - DNA, 203 bp, synthetic construct
  source 1..203: mol_type = other DNA
ggcgcgccagtcctggtcggaacaggacccagacagagacacacggtcactgcagctgaagccgctgcccctgctacagatgaagaaaaggaggctgggagagccaaggatcacgcagcaaggaagaaacagacccaggtgcagactcaggcaccaccagccgagttgagggcctccagcccacagcacgactcggaccgatg

SEQ ID NO: 11489 - DNA, 203 bp, synthetic construct
  source 1..203: mol_type = other DNA
ggcgcgccagtcctgaggctgtcaggacccagacagagacacacggtcactgcagctgaagccgctgcccctgctacagatgaagaaaaggaggctgggagagccaaggatcacgcagcaaggaagaaacagacccaggtgcagactcaggcaccaccaggaccagctgatcatattcattacaccttcgactcggaccgatg

SEQ ID NO: 11490 - DNA, 203 bp, synthetic construct
  source 1..203: mol_type = other DNA
ggcgcgccagtcctgcaccagtcaggacccagactattcgcggtaccgactgcagctgaagccgctgcccctgctacagatgaagaaaaggaggctgggagagccaaggatcacgcagcaaggaagaaacagacccaggtgcagactcaggcaccaccaggaccagctgatcattccagcccacagcacgactcggaccgatg

SEQ ID NO: 11491 - DNA, 203 bp, synthetic construct
  source 1..203: mol_type = other DNA
ggcgcgccagtcctcctctccgcaggaggaggagcccgggcgggcgaggggcggccggagagcgccagggcctgagctgccggagcggcgcctgtgagtgagtgcagaaagcaggcgcccgcgcgctagccggttactttttctgacgcacgccgcgctctctccctgggcgacctgcagtttgcaatcgactcggaccgatg

SEQ ID NO: 11492 - DNA, 203 bp, synthetic construct
  source 1..203: mol_type = other DNA
ggcgcgccagtcctcctacgcacaggaggaggagcccgggcgggcgaggggcggccggagagcgccagggcctgagctgccggagcggcgcctgtgagtgagtgcagaaagcaggcgcccgcgcgctagccgtggcaggagcagcccgcacgccgcgctctctccctgggcgacctgcagtttgcaatcgactcggaccgatg

SEQ ID NO: 11493 - DNA, 203 bp, synthetic construct
  source 1..203: mol_type = other DNA
ggcgcgccagtccttacttcttcaggaggcttctctgggtataaagcagctgaaatgtggagttcgacattaggagctgagagcgtgtccatgggcccagtgcctggcgtgtcctccctgggagcttgctggacgcatgaccaggattctgggagggcagaggacagaccacaggcacccaggataaccgactcggaccgatg

SEQ ID NO: 11494 - DNA, 203 bp, synthetic construct
  source 1..203: mol_type = other DNA
ggcgcgccagtccttcccgaggcaggaggcttctctgggtataaagcagctgaaatgtggagttcgacggtaggagctgagagcgtgtccatgggcccagtgcctggcgtgtcctccctgggagcttgctggacgcatgaccaggattctgggagggcagaggacagaccacaggcacccaggataaccgactcggaccgatg

SEQ ID NO: 11495 - DNA, 203 bp, synthetic construct
  source 1..203: mol_type = other DNA
ggcgcgccagtcctaaactaggcaggaggcttctctgggtataaagcagctgaaatgtggagtttcctcccaggagctgagagcgtgtccatgggcccagtgcctggcgtgtcctccccctttcaagcaactacgcatgaccaggattctgggagggcagaggacagaccacaggcacccaggataaccgactcggaccgatg

SEQ ID NO: 11496 - DNA, 203 bp, synthetic construct
  source 1..203: mol_type = other DNA
ggcgcgccagtccttagcaactcaggaggcttctctgggtataaagcagctgaaatgtggagtttcctcccaggagctgagagcgtgtccatgggcccagtgcctggcgtgtcctccctgggagcttgctggacgcatgaccaggattctgggagggcagaggacagaccacaggcacccaggataaccgactcggaccgatg

SEQ ID NO: 11497 - DNA, 203 bp, synthetic construct
  source 1..203: mol_type = other DNA
ggcgcgccagtcctaatccgagcaggaggcttctctgggtataaagcagctgaaatgtggagtttcctcccaggagctgagagcgtgtccatgggcccagtgcctggcgtgtcctccctgggagcttgctggacgcatgaccaggattctgggagggcagctatggttgtgttagcacccaggataaccgactcggaccgatg

SEQ ID NO: 11498 - DNA, 203 bp, synthetic construct
  source 1..203: mol_type = other DNA
ggcgcgccagtcctcggcagcgcaggaggcttctctgggtataaagcagctgaaatgtggagtttcctcccaggagctgagagcgtgtccatgggcccagtgcctggcgtgtcctccctgggagcttgctggttagtgtgttttacttctgggagggcagaggacagaccacaggcacccaggataaccgactcggaccgatg

SEQ ID NO: 11499 - DNA, 203 bp, synthetic construct
  source 1..203: mol_type = other DNA
ggcgcgccagtcctgttcataccaggaggcttctctgggtataaagcagctgaaatgtggagtttcctcccaggagtaccagtgcaacaaatgggcccagtgcctggcgtgtcctccctgggagcttgctggacgcatgaccaggattctgggagggcagaggacagaccacaggcacccaggataaccgactcggaccgatg

SEQ ID NO: 11500 - DNA, 203 bp, synthetic construct
  source 1..203: mol_type = other DNA
ggcgcgccagtcctcaaccacccaggaggcttctctgggtataaagcattcagctgtctttctttcctcccaggagctgagagcgtgtccatgggcccagtgcctggcgtgtcctccctgggagcttgctggacgcatgaccaggattctgggagggcagaggacagaccacaggcacccaggataaccgactcggaccgatg

SEQ ID NO: 11501 - DNA, 203 bp, synthetic construct
  source 1..203: mol_type = other DNA
ggcgcgccagtcctcagagagtcaggaggcttcttaccaacatgcaatgctgaaatgtggagtttcctcccaggagctgagagcgtgtccatgggcccagtgcctggcgtgtcctccctgggagcttgctggacgcatgaccaggattctgggagggcagaggacagaccacaggcacccaggataaccgactcggaccgatg

SEQ ID NO: 11502 - DNA, 203 bp, synthetic construct
  source 1..203: mol_type = other DNA
ggcgcgccagtcctgggactatcaggcaagattgaagtgaccctccctgggctgctttctttcgattatcatcagtgaccctaccccggctgctcttcccagcacaactccggtgcaaaggcttgggcatcctggtgctttgcctctagcccatgctccacagcgaggagagagaaaaccctgaggcacgactcggaccgatg

SEQ ID NO: 11503 - DNA, 203 bp, synthetic construct
  source 1..203: mol_type = other DNA
ggcgcgccagtcctgaagggaacagggccttgtgattaccctatctaaccgagggcaaggcagtggcggcggccgccccaacggagctgcagacgaaaggcaagaacggcgatggccgccgtaggtcagctaaagatcatcaccctggtaaaactttgccagagaacccagcaggattcaccagcacgcgactcggaccgatg

SEQ ID NO: 11504 - DNA, 203 bp, synthetic construct
  source 1..203: mol_type = other DNA
ggcgcgccagtcctggacgttccagggccttgtgcgacatgggctgcgagacatcaggctgggtggcggcggccgccccaacggagctgcagacgaaaggcaagaacggcgatggccgccgtaggtcagctaaagatcatcaccctggtaaaactttgccagagaacccagcaggattcaccagcacgcgactcggaccgatg

SEQ ID NO: 11505 - DNA, 203 bp, synthetic construct
  source 1..203: mol_type = other DNA
ggcgcgccagtcctatgacaaccagggccttgtgcgacatgggctgcgccgagggcaaggcatctctccatttaatcccaacggagctgcagacgaaaggcaagaacggcgatggccgccgtaggtcagctaaagatcatcaccctggtaaaactttgccagagaacccagcaggattcaccagcacgcgactcggaccgatg

SEQ ID NO: 11506 - DNA, 203 bp, synthetic construct
  source 1..203: mol_type = other DNA
ggcgcgccagtccttgcgtcgtcagggctgagggagctcaagtttcagcctgaggcatgggcacctgaaggtctcggacctgagacccgtggattctgtccagtacaccctgttgctccttctgcctcccctctcctgtattgaaagcgtttgtgttcatcttatcagggacctgaccctaagagaatcgactcggaccgatg

SEQ ID NO: 11507 - DNA, 203 bp, synthetic construct
  source 1..203: mol_type = other DNA
ggcgcgccagtcctacgatatgcagggctgagggagctcaagtttcagcctgaggcatgggccaggaggccatggtatggatgtcgttccggattctgtccagtacaccctgttgctccttctgcctcccctctcctgtattgaaagcgtttgtgttcatcttatcagggacctgaccctaagagaatcgactcggaccgatg

SEQ ID NO: 11508 - DNA, 203 bp, synthetic construct
  source 1..203: mol_type = other DNA
ggcgcgccagtcctgatttctacagggctgagggagctcaagtttcagcctgaggcatgggccaggaggccatggtgacctgagacccgtggattctgtccagtacaccctgttgctccttctgcctcccctctcctgtattgaaacatcactccgcacgcttatcagggacctgaccctaagagaatcgactcggaccgatg

SEQ ID NO: 11509 - DNA, 203 bp, synthetic construct
  source 1..203: mol_type = other DNA
ggcgcgccagtcctatctcaatcagggctgagggagctcaagtttcagcctgaggcatgggccaggaggccatggtgacctgagacccgtggattctgtccagtacaccctgttgctccttctgcctcccctctcctgtattgaaagcgtttgtgttcattgaccatatactaggaccctaagagaatcgactcggaccgatg

SEQ ID NO: 11510 - DNA, 203 bp, synthetic construct
  source 1..203: mol_type = other DNA
ggcgcgccagtcctcgctcgcccagggctgagggagctcaagtttcagcctgaggcatgggccaggaggccatggtgacctgagacccgtggattctgtccagtacaccctgttgctccttctgcctcccctgagagcagcgtgctgcgtttgtgttcatcttatcagggacctgaccctaagagaatcgactcggaccgatg

SEQ ID NO: 11511 - DNA, 203 bp, synthetic construct
  source 1..203: mol_type = other DNA
ggcgcgccagtcctcactttcccagggctgagggagctcaagtttcagcctgaggcatgggccaggaggccatggtgacctgagacccgtggattctgtccagtcactaaatccttctcttctgcctcccctctcctgtattgaaagcgtttgtgttcatcttatcagggacctgaccctaagagaatcgactcggaccgatg

SEQ ID NO: 11512 - DNA, 203 bp, synthetic construct
  source 1..203: mol_type = other DNA
ggcgcgccagtccttggccctacagggctgagggagctcaagtttcagttctgatagctattcaggaggccatggtgacctgagacccgtggattctgtccagtacaccctgttgctccttctgcctcccctctcctgtattgaaagcgtttgtgttcatcttatcagggacctgaccctaagagaatcgactcggaccgatg

SEQ ID NO: 11513 - DNA, 203 bp, synthetic construct
  source 1..203: mol_type = other DNA
ggcgcgccagtcctactgtaagcaggggaggcgcaaagcgttggttagcctgccccggggcgaagggtatgtggcgagacagagccctgcacccctaattcccggtggaaaactcctgttgccgtttccctccaccggcctggagtctcccagtcttgtcccggcagtgccgccctccccactaagaccgactcggaccgatg

SEQ ID NO: 11514 - DNA, 203 bp, synthetic construct
  source 1..203: mol_type = other DNA
ggcgcgccagtcctgaagaaggcaggggaggcgcctgtgaggcccggacctgccccggggcgaagggtatgtggcgagacagagccctgcacccctaattcccggtggaaaactcctgttgccgtttccctccaccggcctggagtctcccagtcttgtcccggcagtgccgccctccccactaagaccgactcggaccgatg

SEQ ID NO: 11515 - DNA, 203 bp, synthetic construct
  source 1..203: mol_type = other DNA
ggcgcgccagtccttgccacaccaggggaggcgcctgtgaggcccggacctgccccggggcgaagggtatgtggcgagacagagccctgcgtaggggtgctaatgtggaaaactcctgttgccgtttccctccaccggcctggagtctcccagtcttgtcccggcagtgccgccctccccactaagaccgactcggaccgatg

SEQ ID NO: 11516 - DNA, 203 bp, synthetic construct
  source 1..203: mol_type = other DNA
ggcgcgccagtccttgtattcccaggggaggcgcctgtgaggcccggaggccagggtaaaataagggtatgtggcgagacagagccctgcacccctaattcccggtggaaaactcctgttgccgtttccctccaccggcctggagtctcccagtcttgtcccggcagtgccgccctccccactaagaccgactcggaccgatg

SEQ ID NO: 11517 - DNA, 203 bp, synthetic construct
  source 1..203: mol_type = other DNA
ggcgcgccagtccttcggtaggcaggggcgccgccgccggcgctcgcaggccgcggatgaagaagaaaacccggcgccgctcgacccggagcgaggagttgacccggagcgaggagttgaccctgagtgaggaagcgacctggagtgaagaggcgacccacgccctaagaaattcccagggcgaagagcgactcggaccgatg

SEQ ID NO: 11518 - DNA, 203 bp, synthetic construct
  source 1..203: mol_type = other DNA
ggcgcgccagtccttcggcccacaggggcgccgccgccggcgctcgcaggccgcggatgaagaagaaaacccggcgccgctcgacccggagcgaggagttgacccggagcgaggagttgaccctgagtgaggaagcgacctggagtgaagaggcgacccagagtgaggaggcgaggacaccgatgagtcgactcggaccgatg

SEQ ID NO: 11519 - DNA, 203 bp, synthetic construct
  source 1..203: mol_type = other DNA
ggcgcgccagtcctccctgccgcaggggcgccgccgccggcgctcgcaggccgcggatgaagaagaaaacccggcgccgctcgacccggagcgaggagttgacccggagcgaggagttgaccctgagtgaggaagcgacctggagtgaagaggcgacccatttatcaatctacgcccagggcgaagagcgactcggaccgatg

SEQ ID NO: 11520 - DNA, 203 bp, synthetic construct
  source 1..203: mol_type = other DNA
ggcgcgccagtcctgacagggtcaggggcgccgccgccggcgctcgcaggccgcggatgaagaagaaaacccggcgccgctcgacccggagcgaggagttgacccggagcgaggagttgaccctgagtgaggcgagataactacaggaagaggcgacccagagtgaggaggcgacccagggcgaagagcgactcggaccgatg

SEQ ID NO: 11521 - DNA, 203 bp, synthetic construct
  source 1..203: mol_type = other DNA
ggcgcgccagtcctgggttgcgcaggggcgccgctagaatgttctcatggccgcggatgaagaagaaaacccggcgccgctcgacccggagcgaggagttgacccggagcgaggagttgaccctgagtgaggaagcgacctggagtgaagaggcgacccagagtgaggaggcgacccagggcgaagagcgactcggaccgatg

SEQ ID NO: 11522 - DNA, 203 bp, synthetic construct
  source 1..203: mol_type = other DNA
ggcgcgccagtcctgctagtatcaggtcaattatattcagtatggaaagaataaaagaactacggaacctgatgtcgcagtctcgcactcgcgagatactgacaaaaaccacagtggaccatatggccataattaagaagtacacatcggggagacaggaggtatctttaaagattaggatgaaatggcgactcggaccgatg

SEQ ID NO: 11523 - DNA, 203 bp, synthetic construct
  source 1..203: mol_type = other DNA
ggcgcgccagtcctggcgaagacaggtcaattatattcagtatggaaagaataaaagaactagcccgatctgctgggcagtctcgcactcgcgagatactgacaaaaaccacagtggaccatatggccataattaagaagtacacatcggggagacaggaaaagaacccgtcacttaggatgaaatggcgactcggaccgatg

SEQ ID NO: 11524 - DNA, 203 bp, synthetic construct
  source 1..203: mol_type = other DNA
ggcgcgccagtcctgagacgaacaggttcagaaaatttaaaaagtcttgcaccgcagtctctcgtcatttggtgcatacacgcagaagagaaagtgaaagatactgaaggagcaaaacaaatagtgcggagacatctagtggcagaaacaggaactgcagagaaaatgccaagcacaagtagaccaaccgactcggaccgatg

SEQ ID NO: 11525 - DNA, 203 bp, synthetic construct
  source 1..203: mol_type = other DNA
ggcgcgccagtcctagtgaattcaggttcagaaaatttaaaaagtctttttaatactgtctgcgtcatttggtgcatacacgcagaagagaaagtgaaagatactgaaggagcaaaacaaatagtgcggagatcagggtccctcttaacaggaactgcagagaaaatgccaagcacaagtagaccaaccgactcggaccgatg

SEQ ID NO: 11526 - DNA, 203 bp, synthetic construct
  source 1..203: mol_type = other DNA
ggcgcgccagtcctgtaagacacaggttcagaaaatttaaaaagtctttttaatactgtctgcgtcatttggtgcatacacgcagaagagaaagtgaaagatactgaaggagcaaaactttccagagcatcgcatctagtggcagaaacaggaactgcagagaaaatgccaagcacaagtagaccaaccgactcggaccgatg

SEQ ID NO: 11527 - DNA, 203 bp, synthetic construct
  source 1..203: mol_type = other DNA
ggcgcgccagtccttagaactacagtgaccgggtggtttgcttaggcgcagacggggaagcggagccaacatgccaacatatgttgctgaggtttgtcgcaaaacttatgtgaccccgcggagacccttcgagaaatctcgtctcgaccaagagctgaagctgatcggcgagtatgggctccggaacacgactcggaccgatg

SEQ ID NO: 11528 - DNA, 203 bp, synthetic construct
  source 1..203: mol_type = other DNA
ggcgcgccagtcctcttaccgtcagtgaccgggtggtttgcttaggcgcagacggggaagcggagccaacatgccagtggcccggagctgggtttgtcgcaaaaaacgcaacgtttttcggagacccttcgagaaatctcgtctcgaccaagagctgaagctgatcggcgagtatgggctccggaacacgactcggaccgatg

SEQ ID NO: 11529 - DNA, 203 bp, synthetic construct
  source 1..203: mol_type = other DNA
ggcgcgccagtccttgagataacagtgaccgggtggtttgcttaggcgcagacggggaagcggagccaacatgccagtggcccggagctgggtttgtcgcaaaacttatgtgaccccgcggagacccttcgagaaatctcgtctcgaccaagagctgaagctgatcggcgagtacctctctaacgtaccgactcggaccgatg

SEQ ID NO: 11530 - DNA, 203 bp, synthetic construct
  source 1..203: mol_type = other DNA
ggcgcgccagtcctaacgatttcagtgaccgggtggtttgcttaggcgcagacggggaagcggagccaacatgccagtggcccggagctgggtttgtcgcaaaacttatgtgaccccggatctgggacgtaggaaatctcgtctcgaccaagagctgaagctgatcggcgagtatgggctccggaacacgactcggaccgatg

SEQ ID NO: 11531 - DNA, 203 bp, synthetic construct
  source 1..203: mol_type = other DNA
ggcgcgccagtcctgaatcctccagtgcctccggaggaaatctgctcggtccccggcagccgccgcttcccctttgatgttttggtacgccgtgcgcatgcgcccgcgcacgttcgggctgcactgggcagactaagttggatctcctctcttcagtgaaaccctcaattccatcaaaaactaaagggcgactcggaccgatg

SEQ ID NO: 11532 - DNA, 203 bp, synthetic construct
  source 1..203: mol_type = other DNA
ggcgcgccagtcctagctgcggcagtgcctccggaggaaatctgctcggtccccggcagccgccgcttcccctttgatgttttggtacgccgtgcgcatgcgcctcacattagaattactgcactgggcagactaagttggatctcctctcttcagtgaaaccctcaattccatagggtgtgggtccacgactcggaccgatg

SEQ ID NO: 11533 - DNA, 203 bp, synthetic construct
  source 1..203: mol_type = other DNA
ggcgcgccagtcctcttatgtgcagtgcctccggaggaaatctgctcggtccccggcagccgccgcttcccctttgatgttttggtacgccgtgcgcatgcgcctcacattagaattactgcactgggcagactaagttggatctcctctcttcagtgaaaccctcaattccatcaaaaactaaagggcgactcggaccgatg

SEQ ID NO: 11534 - DNA, 203 bp, synthetic construct
  source 1..203: mol_type = other DNA
ggcgcgccagtccttaaacaatcagtgcctccggaggaaatctgctcggtccccggcagccgccgcttcccctttgatgttttggtacgccgtgcgcatgcgcctcacattagaattactgcactgggcagactaagttggatctcctctcttcagtgaaggttgtggccgagccaaaaactaaagggcgactcggaccgatg

SEQ ID NO: 11535 - DNA, 203 bp, synthetic construct
  source 1..203: mol_type = other DNA
ggcgcgccagtcctggagtagtcagtgcctccggaggaaatctgctcgtatgtaattgaatcccgcttcccctttgatgttttggtacgccgtgcgcatgcgcctcacattagaattactgcactgggcagactaagttggatctcctctcttcagtgaaaccctcaattccatcaaaaactaaagggcgactcggaccgatg

SEQ ID NO: 11536 - DNA, 203 bp, synthetic construct
  source 1..203: mol_type = other DNA
ggcgcgccagtcctctgtgaagcagtgcctccgggtcgctgtacaaacgtccccggcagccgccgcttcccctttgatgttttggtacgccgtgcgcatgcgcctcacattagaattactgcactgggcagactaagttggatctcctctcttcagtgaaaccctcaattccatcaaaaactaaagggcgactcggaccgatg

SEQ ID NO: 11537 - DNA, 203 bp, synthetic construct
  source 1..203: mol_type = other DNA
ggcgcgccagtccttcgttatacagttgctttctcgtggctctgcagcgagagcgcagagaagcagaggaccaagaggcagaatgccggcgctccaccgcccgagactgtgtttcctgtgagtccagatgtgtgatccagatatgctgcaatggtgacataaactgttgactgagactaggagcgtgccgactcggaccgatg

SEQ ID NO: 11538 - DNA, 203 bp, synthetic construct
  source 1..203: mol_type = other DNA
ggcgcgccagtcctgtcctacacagttggcccgtgtgaggagaaggccggggcagcggaggcttccggcggaaaatccaagaggaagaaggatctacggatatcgacgggtggagtctcacccgcacccaaccccacacccccccggaacctggactcccggaccttcatcaccattggagacagaaacgactcggaccgatg

SEQ ID NO: 11539 - DNA, 203 bp, synthetic construct
  source 1..203: mol_type = other DNA
ggcgcgccagtcctctctctcgcagttggcccgtgtgaggagaaggcctattacaattctctttccggcggaaaatccaagaggaagaaggatctacggatatcctgcatgtccaagccacccgcacccaaccccacacccccccggaacctggactcccggaccttcatcaccattggagacagaaacgactcggaccgatg

SEQ ID NO: 11540 - DNA, 203 bp, synthetic construct
  source 1..203: mol_type = other DNA
ggcgcgccagtcctacatggagcataacaaacacttcaacatcacagtacaggctgaatcatttcttcacatcatgctacccacacaactaagctagatccttaactcatagttacataaaaacctcaagtatcacaatcaaacacccgccgggggtccaattcacaaaattaacagctggggcaaatcgactcggaccgatg

SEQ ID NO: 11541 - DNA, 203 bp, synthetic construct
  source 1..203: mol_type = other DNA
ggcgcgccagtcctggcttggtcataacaaacacttcaacatcacagtacaggctgaatcatttcttcacatcatggctagttgcaggtgaagctagatccttaactcatagttacataaaaacctcaagtatcacaatcaaacactaaatcaacacatcattcacaaaattaacagctggggcaaatcgactcggaccgatg

SEQ ID NO: 11542 - DNA, 203 bp, synthetic construct
  source 1..203: mol_type = other DNA
ggcgcgccagtcctttgaagatcataagagtctaattcaccaaaaaagttgtggtaaaaatcttagttcatgtgaagaaatttcatgtgaatgttttagctatcaaacagtactgtcacctactcatgcacaaaactgcctcccaaagacttttcccaggtccctcgtatcaaaacattaagagtatacgactcggaccgatg

SEQ ID NO: 11543 - DNA, 203 bp, synthetic construct
  source 1..203: mol_type = other DNA
ggcgcgccagtccttatacacccataagagtctatcattgatttctttttgtggtaaaaatcacctggaccaatgcgaaatttcatgtgaatgttttagctatcaaacagtactgtcacctactcatgcacaaaactgcctcccaaagacttttcccaggtccctcgtatcaaaacattaagagtatacgactcggaccgatg

SEQ ID NO: 11544 - DNA, 203 bp, synthetic construct
  source 1..203: mol_type = other DNA
ggcgcgccagtccttcatcggacataagagtctatcattgatttctttttgtggtaaaaatcttagttcatgtgaagaaatttcatgtgaatgttttagctatcaaacagtactgtcacctactcatgcacaaaactgcctcccaaagacttttcccaggtccctcgtatcaaaacattaagagtatacgactcggaccgatg

SEQ ID NO: 11545 - DNA, 203 bp, synthetic construct
  source 1..203: mol_type = other DNA
ggcgcgccagtcctcagggtgccataagccaaattgtgagccatgatagtggcactgaatttctaaatacaagaaattgcttagacaattggtttagtatctgtatatgggcaatactctgtcctgcagtaggcagcatgtcagctgaaacaccaatcacggctccagctacggctcaggatctgcagcgactcggaccgatg

SEQ ID NO: 11546 - DNA, 203 bp, synthetic construct
  source 1..203: mol_type = other DNA
ggcgcgccagtcctagtatctgcataagccaaattgtgagccatgatagtggcactgaatttctaaatacaagaaattgcttagacaattttgcattcgctcagatatgggcaatactctgtcctgcagtaggcagcatgtcagctgaaacaccaatcacattgaatatcgatcctcaggatctgcagcgactcggaccgatg

SEQ ID NO: 11547 - DNA, 203 bp, synthetic construct
  source 1..203: mol_type = other DNA
ggcgcgccagtcctccttatctcataaggtatacgcactacggggtgaacggctactcactgcacgccatgaactcactcagcgccatgtacaacctgcaccagcaggcagcccagcaggcccagcatgcccccgactaccggccttcagtgcatgcgcttacattggctgagcgcctggctggctgtcgactcggaccgatg

SEQ ID NO: 11548 - DNA, 203 bp, synthetic construct
  source 1..203: mol_type = other DNA
ggcgcgccagtcctatccgcgtcatacaatgcacggcggggctgctcagtcctccaggcgtcggtactcagcggtgttggaacttcgttgcttgcttgcctgtgcgcgcgtgcgcggacatggcctcaaacgattatacccaacaagcaacccaaagctatggggcctaccccacccagcccgggcagcgactcggaccgatg

SEQ ID NO: 11549 - DNA, 203 bp, synthetic construct
  source 1..203: mol_type = other DNA
ggcgcgccagtcctgttcaattcatcctgggtcactaatgatgttaaggaaccagaacgttttcccctcctggactgttagtaacttagtctccctcctcccctaaccacccccgcccccccccaccccccgcagtaataaaggcccctgaacgtgtatgttggtctcccgggagctgcttgctgaagcgactcggaccgatg

SEQ ID NO: 11550 - DNA, 203 bp, synthetic construct
  source 1..203: mol_type = other DNA
ggcgcgccagtcctgggtagaacatcctgggtcagaggccgatccgcagaaccagaacgttttcccctcctggactgttagtaacttagtctccctcctcccctaaccacccccgcccggatatctaattgccagtaataaaggcccctgaacgtgtatgttggtctcccgggagctgcttgctgaagcgactcggaccgatg

SEQ ID NO: 11551 - DNA, 203 bp, synthetic construct
  source 1..203: mol_type = other DNA
ggcgcgccagtcctgaggttcgcatcctgggtcagaggccgatccgcagaaccagaacgttttcccctcctggactgttagtaacttagtctccctcctcccctcggggttgatctaaccccccaccccccgcagtaataaaggcccctgaacgtgtatgttggtctcccgggagctgcttgctgaagcgactcggaccgatg

SEQ ID NO: 11552 - DNA, 203 bp, synthetic construct
  source 1..203: mol_type = other DNA
ggcgcgccagtcctgggctgatcatctgcctgggatcatcaagccctaattagcccccaatcttaaattagggctgccgttttctgtttctccctgggctgcggaaagccagaagattttatctagcttatacaaggctgctggtgttccctctttttttccacgagggtgtttttggctgcaattgccgactcggaccgatg

SEQ ID NO: 11553 - DNA, 203 bp, synthetic construct
  source 1..203: mol_type = other DNA
ggcgcgccagtcctatatccttcatctgcctgggatcatcaagccctagaagctgggtttctttaaattagggctgccgttttctgtttctccctgggctgcggcggatagcttagcgttatctagcttatacaaggctgctggtgttccctctttttttccacgagggtgtttttggctgcaattgccgactcggaccgatg

SEQ ID NO: 11554 - DNA, 203 bp, synthetic construct
  source 1..203: mol_type = other DNA
ggcgcgccagtcctaggatagacatgaaatgtccagggattacgactcgcgtggtcggacagcacatgttagtcatgtattatggtgtttcccaacacgtatctttgctctagtattgaactttagtgatgagtgtacttggcatgtacacctgattagttagcccttgtggatacgccactgccgctcgactcggaccgatg

SEQ ID NO: 11555 - DNA, 203 bp, synthetic construct
  source 1..203: mol_type = other DNA
ggcgcgccagtcctatatgaaccatgagccggaacctatcaataacgtgcctcggggactgccagtgtgtggaggtgagctccgggattgccggcattcccgcttctgctggttgcttcatgctgcaggctgcggccgtcagccctcgctcgcattggtggcgctgaggtgccggggcagcaagtgaccgactcggaccgatg

SEQ ID NO: 11556 - DNA, 203 bp, synthetic construct
  source 1..203: mol_type = other DNA
ggcgcgccagtcctcgtgacgacatgagccggaagaccgtcccggatgaagctccactaatacagtgtgtggaggtgagctccgggattgccggcattcccgcttctgctggttgcttcatgctgcaggctgcggccgtcagccctcgctcgcattggtggcgctgaggtgccggggcagcaagtgaccgactcggaccgatg

SEQ ID NO: 11557 - DNA, 203 bp, synthetic construct
  source 1..203: mol_type = other DNA
ggcgcgccagtcctctgtttgacatgagccggaagaccgtcccggatggcctcggggactgccagtgtgtggaggtacttattacctgatccggcattcccgcttctgctggttgcttcatgctgcaggctgcggccgtcagccctcgctcgcattggtggcgctgaggtgccggggcagcaagtgaccgactcggaccgatg

SEQ ID NO: 11558 - DNA, 203 bp, synthetic construct
  source 1..203: mol_type = other DNA
ggcgcgccagtcctcgagcccgcatgagccggaagaccgtcccggatggcctcggggactgccagtgtgtggaggtgagctccgggattgccggcattcccgcttctgctggttgcttcatgctgcaggctgcggccgtcagccctcgctcgcattggtgaattgtgaccttgagggcagcaagtgaccgactcggaccgatg

SEQ ID NO: 11559 - DNA, 203 bp, synthetic construct
  source 1..203: mol_type = other DNA
ggcgcgccagtcctgccgtcctcatgagccggaagaccgtcccggatggcctcggggactgccagtgtgtggaggtgagctccgggattgccggcattcccgcttctgctggttgcttcatgctgcaggctgcggccgtcagccctcgctcgcattggtgcgagctcacacgatgggcagcaagtgaccgactcggaccgatg

SEQ ID NO: 11560 - DNA, 203 bp, synthetic construct
  source 1..203: mol_type = other DNA
ggcgcgccagtcctcaagcgatcatgagccggaagaccgtcccggatggcctcggggactgccagtgtgtggaggtgagctccgggattgccggcattcccgcttctgctggttgcttcatgctgcaggctgcggccgtcagccctcgctcgcattggtggcgctgaggtgccgactattttctcacacgactcggaccgatg

SEQ ID NO: 11561 - DNA, 203 bp, synthetic construct
  source 1..203: mol_type = other DNA
ggcgcgccagtcctcagtacagcatgagccggaagaccgtcccggatggcctcggggactgccagtgtgtggaggtgagctccgggattgccggcattcccgcttctgctggttgcttcatgctgcaggctgcggccgtcagccctcgctcgcattggtggcgctgaggtgccggggcagcaagtgaccgactcggaccgatg

SEQ ID NO: 11562 - DNA, 203 bp, synthetic construct
  source 1..203: mol_type = other DNA
ggcgcgccagtcctttggaatccatgagccggaagaccgtcccggatggcctcggggactgccagtgtgtggaggtgagctccgggattgccggcattcccgcttctgctggttgcttcatgctgcaggctggattttatctttaccgctcgcattggtggcgctgaggtgccggggcagcaagtgaccgactcggaccgatg

SEQ ID NO: 11563 - DNA, 203 bp, synthetic construct
  source 1..203: mol_type = other DNA
ggcgcgccagtcctgttcgcgacatgagccggaagaccgtcccggatggcctcggggactgccagtgtgtggaggtgagctccgggattgccggcattcccgcttctgctggttgcttcatgctgcaggctgtctgtacttcagaacgctcgcattggtggcgctgaggtgccggggcagcaagtgaccgactcggaccgatg

SEQ ID NO: 11564 - DNA, 203 bp, synthetic construct
  source 1..203: mol_type = other DNA
ggcgcgccagtccttgctcaaacatgagccggaagaccgtcccggatggcctcggggactgccagtgtgtggaggttgagagttttcaacccggcattcccgcttctgctggttgcttcatgctgcaggctgcggccgtcagccctcgctcgcattggtggcgctgaggtgccggggcagcaagtgaccgactcggaccgatg

SEQ ID NO: 11565 - DNA, 203 bp, synthetic construct
  source 1..203: mol_type = other DNA
ggcgcgccagtcctgcgatgcacatgccttacctcacgtgtaccagtttgctgagacacatgtctccgcccctgggtctggggaagaagtgtccggccagagtggcttacaagcggcttctgcggatggacctgcccgtcgcagatgacaacaccgtccacttcaattccaccctcatggctctgatccgactcggaccgatg

SEQ ID NO: 11566 - DNA, 203 bp, synthetic construct
  source 1..203: mol_type = other DNA
ggcgcgccagtcctaaccgtaacatgccttacctggacatgtatcagagaagcccggctgcctctccgcccctgggtctggggaagaagtgtccggccagagtggcttacaagcggcttctgcggatggacctgcccgtcgcagatgacaacaccgtccacttcaattccaccctcatggctctgatccgactcggaccgatg

SEQ ID NO: 11567 - DNA, 203 bp, synthetic construct
  source 1..203: mol_type = other DNA
ggcgcgccagtcctaggccaagcatgccttacctggacatgtatcagatgctgagacacatgtctccgcccctgggtctggggaagaagtgtccggccagagtgctacgatgaaccggtctgcggatggacctgcccgtcgcagatgacaacaccgtccacttcaattccaccctcatggctctgatccgactcggaccgatg

SEQ ID NO: 11568 - DNA, 203 bp, synthetic construct
  source 1..203: mol_type = other DNA
ggcgcgccagtcctataaatcccatgccttacctggacatgtatcagatgctgagacacatgtctccgcccctgggtctggggaagaagtgtccggccagagtggcttacaagcggctgagtgcataatctatgcccgtcgcagatgacaacaccgtccacttcaattccaccctcatggctctgatccgactcggaccgatg

SEQ ID NO: 11569 - DNA, 203 bp, synthetic construct
  source 1..203: mol_type = other DNA
ggcgcgccagtcctgcgttctgcatgccttacctggacatgtatcagatgctgagacacatgtctccgcccctgggtctggggaagaagtgtccggccagagtggcttacaagcggcttctgcggatggacctgcccgtcgcagatgacaacaccgtccacttcaattccacccctcataggacatcacgactcggaccgatg

SEQ ID NO: 11570 - DNA, 203 bp, synthetic construct
  source 1..203: mol_type = other DNA
ggcgcgccagtcctgtctacttcatgccttacctggacatgtatcagatgctgagacacatgtctccgcccctgggtctggggaagaagttgatccaggttccagcttacaagcggcttctgcggatggacctgcccgtcgcagatgacaacaccgtccacttcaattccaccctcatggctctgatccgactcggaccgatg

SEQ ID NO: 11571 - DNA, 203 bp, synthetic construct
  source 1..203: mol_type = other DNA
ggcgcgccagtcctcggccgttcatggccgagaggccggggcctccgggcggcgccgtgtccgcgaccgcgtaccctgacacccccgcggaattccctccgcacctccaggcgggtgcgatgcggcgccgctccaccttgactgataactgtctgtgcgccggcgcgttcggggccctggccgccgcccgactcggaccgatg

SEQ ID NO: 11572 - DNA, 203 bp, synthetic construct
  source 1..203: mol_type = other DNA
ggcgcgccagtccttccaaggccatggccgagaggccggggcctccgggcggcgccgtgtccgcgaccgcgtaccctgacacccccgcggaattccctccgcacctccaggcgggtgcgatgcggcgccgcttttggggcgtattcaactgtctgtgcgcaccgcaccaacaccccctggccgccgcccgactcggaccgatg

SEQ ID NO: 11573 - DNA, 203 bp, synthetic construct
  source 1..203: mol_type = other DNA
ggcgcgccagtcctacctatgacatggtgagaaaagggttgcggtaccttccagcaaggtcatacatgaaatcaagactggtggattggaaatgtatgtcccaggatggcaggccatgttccgctggatgcgcttccatgacctcggattgtggacaggagatcgcgatcttctgcccgaattcgtaacgactcggaccgatg

SEQ ID NO: 11574 - DNA, 203 bp, synthetic construct
  source 1..203: mol_type = other DNA
ggcgcgccagtcctctcagctgcatggtgagaaattttacagaaagatttccagcaaggtcatacatgaaatcaagactggtggattggaaatgtatgtcccaggatggcaggccatgccaattctttcaaccttccatgacctcggattgtggacaggagatcgcgatcttctgcccgaattcgtaacgactcggaccgatg

SEQ ID NO: 11575 - DNA, 203 bp, synthetic construct
  source 1..203: mol_type = other DNA
ggcgcgccagtccttgacttctcatggtgagaaattttacagaaagatttccagcaaggtcatacatgaaatcaagactggtggattggaaatgtatgtcccaggatggcaggccatgttccgctggatgcgcttccatgacctcggattgtggacaggagatcgcgatcttctgcccgaattcgtaacgactcggaccgatg

SEQ ID NO: 11576 - DNA, 203 bp, synthetic construct
  source 1..203: mol_type = other DNA
ggcgcgccagtcctattcgtagcatggttacccaatgcgcactcccgattccaataaacttgaatgtaaggcttgaaacagtggtctaggtgccctatttagggtgaggagcctagctggcagccccagtgaatcctctattggatagaaaccgctatatcgggtagctatagcagtcggatagtaatcgactcggaccgatg

SEQ ID NO: 11577 - DNA, 203 bp, synthetic construct
  source 1..203: mol_type = other DNA
ggcgcgccagtcctgtgaatggcatggttacccatcatttgaggaaatttccaataaacttgaatgtaaggcttgaaacagtggtctaggtgccctatttagggtgaggagcctagctggcagccccagtgaatcctctattggatagaaaccgctatatcgggtagctatagcagtcggatagtaatcgactcggaccgatg

SEQ ID NO: 11578 - DNA, 203 bp, synthetic construct
  source 1..203: mol_type = other DNA
ggcgcgccagtcctatgcggcgcatggttacccatcatttgaggaaatttccaataaacttgaatgtaaggcttgaaacagtggtctaggtgccctatttagggtgaggagcctagctggcagccccagtgaatcctctattggattagtttaatacctacgggtagctatagcagtcggatagtaatcgactcggaccgatg

SEQ ID NO: 11579 - DNA, 203 bp, synthetic construct
  source 1..203: mol_type = other DNA
ggcgcgccagtccttgggctcgcattcagcgcaacagccgtcggtcctctcgctttcccgtaggggccgtcggcgttcgtttgaaacgcggtccacccgtcccagcgtagccggcgctcttcggcgccgcgcgcaaacttcccgagccggcgggtgcgggcggtggcagcggggagtctcctatacgtcgactcggaccgatg

SEQ ID NO: 11580 - DNA, 203 bp, synthetic construct
  source 1..203: mol_type = other DNA
ggcgcgccagtcctctgccgggcattcagcgcaacagccgtcggtcctctcgctttcccgtaggggccgtcggcgttcgtttgaaacgcggtccacccgtcccagcgtagccggcgctcttcggcgccgcgcgcaaacttcccgagccggcgggtgcgggtatacctgtgtcaccccggatgggcgcccgactcggaccgatg

SEQ ID NO: 11581 - DNA, 203 bp, synthetic construct
  source 1..203: mol_type = other DNA
ggcgcgccagtcctaagccggtcattcatttctaccggtctctagtagtgcagcttcggctgagacacgtcccagtcttcctccgctgccgcccccgcaaggcttcgccgtcatcgaggccatttccagcgacttgtcgcacgcttttctatatacttcgttccccgccaaccgcaaccattgacgcccgactcggaccgatg

SEQ ID NO: 11582 - DNA, 203 bp, synthetic construct
  source 1..203: mol_type = other DNA
ggcgcgccagtcctcttggtaccattcatttctaccggtctctagtagtgcagcttcggctggtgtcatcggtgtccttcctccgctgccgcccccgcaaggcttcgccgtcatcgagctttcacatgcatccttgtcgcacgcttttctatatacttcgttccccgccaaccgcaaccattgacgcccgactcggaccgatg

SEQ ID NO: 11583 - DNA, 203 bp, synthetic construct
  source 1..203: mol_type = other DNA
ggcgcgccagtcctatttatgtcattcatttctaccggtctctagtagtgcagcttcggctggtgtcatcggtgtctgaatgatttaattgcccccgcaaggcttcgccgtcatcgaggccatttccagcgacttgtcgcacgcttttctatatacttcgttccccgccaaccgcaaccattgacgcccgactcggaccgatg

SEQ ID NO: 11584 - DNA, 203 bp, synthetic construct
  source 1..203: mol_type = other DNA
ggcgcgccagtccttggttcaacattcatttctaggttctctattatctgcagcttcggctggtgtcatcggtgtccttcctccgctgccgcccccgcaaggcttcgccgtcatcgaggccatttccagcgacttgtcgcacgcttttctatatacttcgttccccgccaaccgcaaccattgacgcccgactcggaccgatg

SEQ ID NO: 11585 - DNA, 203 bp, synthetic construct
  source 1..203: mol_type = other DNA
ggcgcgccagtcctaccttacgcatttgggccttacgagcccacaggccccggagtagcagcggggaggccgggagcccgcgggccggagccgcccggccgaggcgtgggggctgcggatgtactttgagactgggggcgacttgagcgttgagggcgcgcggggaggcgagccaccatgttcagccacgactcggaccgatg

SEQ ID NO: 11586 - DNA, 203 bp, synthetic construct
  source 1..203: mol_type = other DNA
ggcgcgccagtcctttactgtccatttgggccttacgagcccacaggccccggagtagcagctactgataacccttcccgcgggccggagccgcccggccgaggcgtgggggctgcggggccggcccatccgtgggggcgacttgagcgttgagggcgcgcggggaggcgagccaccatgttcagccacgactcggaccgatg

SEQ ID NO: 11587 - DNA, 203 bp, synthetic construct
  source 1..203: mol_type = other DNA
ggcgcgccagtcctactgtgcaccaaaacgaggggatatcagcttaccgaggccgcaggttttcctagtccctaccgatcgccccaagctgacatccccgggcccggaatgcggctctctgaccctctctgtgccctcccccgccccccgaaccaggcttggcgggcggaggcgccagcggatgtctccgactcggaccgatg

SEQ ID NO: 11588 - DNA, 203 bp, synthetic construct
  source 1..203: mol_type = other DNA
ggcgcgccagtcctctgctgaaccaaaacgaggggatatcagcttaccgaggccgcaggttttcctagtccctacctcatagatatgtaggacatccccgggcccggaatgcggctctctgaccctctctgtgccctcccccgcccatgatgtagttgcaggcgggcggaggcgccagcggatgtctccgactcggaccgatg

SEQ ID NO: 11589 - DNA, 203 bp, synthetic construct
  source 1..203: mol_type = other DNA
ggcgcgccagtcctgtaactgcccaaaacgaggggatatcagcttaccgaggccgcaggttttcctagtccctacctcatagatatgtaggacatccccgggcccggaatgcggctctctgaccctctctgtgccctcccccgccccccgaaccaggcttaaattaacactaacccagcggatgtctccgactcggaccgatg

SEQ ID NO: 11590 - DNA, 203 bp, synthetic construct
  source 1..203: mol_type = other DNA
ggcgcgccagtcctccgtaagaccaaaacgaggggatatcagcttaccgaggccgcaggttttcctagtccctacctcatagatatgtaggacatccccgggcccggaatgcggctctctgaccctctctgtgccctcccccgccccccgaaccaggcttggcgggcggaggcggttagacgacggcgcgactcggaccgatg

SEQ ID NO: 11591 - DNA, 203 bp, synthetic construct
  source 1..203: mol_type = other DNA
ggcgcgccagtcctcgggcgcaccaaaacgaggggatatcagcttaccgaggccgcaggttttcctagtccctacctcatagatatgtaggacatccccgggccgctctacatatgagctgaccctctctgtgccctcccccgccccccgaaccaggcttggcgggcggaggcgccagcggatgtctccgactcggaccgatg

SEQ ID NO: 11592 - DNA, 203 bp, synthetic construct
  source 1..203: mol_type = other DNA
ggcgcgccagtccttctagttgccaaaacgaggggatatcagcttacctgtagttggcccactcctagtccctacctcatagatatgtaggacatccccgggcccggaatgcggctctctgaccctctctgtgccctcccccgccccccgaaccaggcttggcgggcggaggcgccagcggatgtctccgactcggaccgatg

SEQ ID NO: 11593 - DNA, 203 bp, synthetic construct
  source 1..203: mol_type = other DNA
ggcgcgccagtccttcgcttcgccaaaatacctcattaccttaacgggttcagctgttaggattccagaaccttcttgaatggcaggccctgctctttgtcattttcctgctcatctactgcctgaccattatagggaatgttgtcatcatcaccgtggtgagccagggcctgcgactgcactcccctcgactcggaccgatg

SEQ ID NO: 11594 - DNA, 203 bp, synthetic construct
  source 1..203: mol_type = other DNA
ggcgcgccagtcctggaaagtgccaaaatacctccactgtgactaactttcagctgttaggaaagggcgtgtggggtgaatggcaggccctgctctttgtcattttcctgctcatctactgcctgaccattatagggaatgttgtcatcatcaccgtggtgagccagggcctgcgactgcactcccctcgactcggaccgatg

SEQ ID NO: 11595 - DNA, 203 bp, synthetic construct
  source 1..203: mol_type = other DNA
ggcgcgccagtcctttaaactcccaaaatacctccactgtgactaactttcagctgttaggattccagaaccttcttgaatggcaggccctgctctttgtcattttcctgctcatctactgcctgaccattatagggaatgttgtcatcatcaccgtggtcttggttacatactgactgcactcccctcgactcggaccgatg

SEQ ID NO: 11596 - DNA, 203 bp, synthetic construct
  source 1..203: mol_type = other DNA
ggcgcgccagtcctctttattgccaaaatacctccactgtgactaactttcagctgttaggattccagaaccttcttgaatggcaggccctgctctttgtcattttcctgctcatctactgcctgaccattatagggaatgttgtcatcatcaccgtggtgagccagggcctgcgactgagggatactcgactcggaccgatg

SEQ ID NO: 11597 - DNA, 203 bp, synthetic construct
  source 1..203: mol_type = other DNA
ggcgcgccagtcctgggaagctccaaaatacctccactgtgactaactttcagctgttaggattccagaaccttcttgaatggcaggccctgctctttgtcattttcctgctcatctactgcctgaccattatagggaatgttgtcatcatcaccgtggtgagccagggcctgcgactgcactcccctcgactcggaccgatg

SEQ ID NO: 11598 - DNA, 203 bp, synthetic construct
  source 1..203: mol_type = other DNA
ggcgcgccagtcctgatggtgaccaaaatacctccactgtgactaactttcagctgttaggattccagaaccttcttgaatggcaggccctgctctttgtcattttcctgctcatctactgcctgaccattatagggaatgttgtctagggagtaccctagagccagggcctgcgactgcactcccctcgactcggaccgatg

SEQ ID NO: 11599 - DNA, 203 bp, synthetic construct
  source 1..203: mol_type = other DNA
ggcgcgccagtcctggtatagcccaaaatacctccactgtgactaactttcagctgttaggattccagaaccttcttgaatggcaggccctgctctttgtcattttcctgctcatctagaaaagtgaggaactagggaatgttgtcatcatcaccgtggtgagccagggcctgcgactgcactcccctcgactcggaccgatg

SEQ ID NO: 11600 - DNA, 203 bp, synthetic construct
  source 1..203: mol_type = other DNA
ggcgcgccagtccttaatccagccaacagaaagtctgcaagcaatgccatgaggtcctgaccagagggtcttctgccaatgcctccaagtggtcaccacctcagaactataagaagcgaagtcggaagagataagccaagcaaaagcccagcacttcccagagccagggactgacacgacaagaccagcgactcggaccgatg

SEQ ID NO: 11601 - DNA, 203 bp, synthetic construct
  source 1..203: mol_type = other DNA
ggcgcgccagtccttttcgtccccaacagaaagtctgcaagcaatgccatgaggtcctgaccagagggtcttctgccaatgcctccaagtggtcaccacctcagaactataagaagcgtgtggcagccttggaagccaagcaaaagcccagcacttcccagagccagggactgacacgacaagaccagcgactcggaccgatg

SEQ ID NO: 11602 - DNA, 203 bp, synthetic construct
  source 1..203: mol_type = other DNA
ggcgcgccagtcctggccaaatccaacctactaacaggtgggtgggtagacctcagcaggaaactcagttcttctcatggggtttctctgagctccattcataccagaaagggagcaggagagagaggacaagtggatccaacagccttcgctccaggggaatcagggcatcgcctccttttctgggacgactcggaccgatg

SEQ ID NO: 11603 - DNA, 203 bp, synthetic construct
  source 1..203: mol_type = other DNA
ggcgcgccagtccttatggctgccaacctactaacaggtgggtgggtatggtgtgtggtttcactcagttcttctcatggggtttctctgagctccattcatacactgggtccttgcagagagagaggacaagtggatccaacagccttcgctccaggggaatcagggcatcgcctccttttctgggacgactcggaccgatg

SEQ ID NO: 11604 - DNA, 203 bp, synthetic construct
  source 1..203: mol_type = other DNA
ggcgcgccagtccttgtgtgggccaacctactaacaggtgggtgggtatggtgtgtggtttcactcagttcttctcatggggtttctctgagctccattcataccagaaagggagcagcgttcgcgttcagggtggatccaacagccttcgctccaggggaatcagggcatcgcctccttttctgggacgactcggaccgatg

SEQ ID NO: 11605 - DNA, 203 bp, synthetic construct
  source 1..203: mol_type = other DNA
ggcgcgccagtcctagaggagaccaacctactaacaggtgggtgggtatggtgtgtggtttcactcagttcttctcatggggtttctctgagctccattcataccagaaagggagcaggagagagaggacaagtggatccaacagccttcgctccaggggtgagcctaaccatgctccttttctgggacgactcggaccgatg

SEQ ID NO: 11606 - DNA, 203 bp, synthetic construct
  source 1..203: mol_type = other DNA
ggcgcgccagtcctcttgacagccaacctactaatgaacactcaacgttggtgtgtggtttcactcagttcttctcatggggtttctctgagctccattcataccagaaagggagcaggagagagaggacaagtggatccaacagccttcgctccaggggaatcagggcatcgcctccttttctgggacgactcggaccgatg

SEQ ID NO: 11607 - DNA, 203 bp, synthetic construct
  source 1..203: mol_type = other DNA
ggcgcgccagtcctcgagtaacccaactccacttatattggaagggatggacaggtggctcttgccctttagactacagttcccagcatgcccaggcgattgcgtcccagaaccgacgtcccaccgccttcccacatcggatcgcagggctcccaaaatggcctataacattcacgtgaatggagtcccgactcggaccgatg

SEQ ID NO: 11608 - DNA, 203 bp, synthetic construct
  source 1..203: mol_type = other DNA
ggcgcgccagtcctgtcaaatgccaactccactttgggctccctatcccttggacatatgtctgccctttagactacagttcccagcatgcccaggcgattgcgtcccagaaccgacgtcccaccgccttcccacatcggatcgcagggctcccaaaatggcctataacattcacgtgaatggagtcccgactcggaccgatg

SEQ ID NO: 11609 - DNA, 203 bp, synthetic construct
  source 1..203: mol_type = other DNA
ggcgcgccagtcctattacggaccaactccactttgggctccctatccggacaggtggctcttgccctttagactacagttcccagcatgcccaggcgattgcgtcccagaaccgacgtcccaccgccttcccacatcggatcgcagggctcccaaaatggcctataacattcatcgtcccctgcagtcgactcggaccgatg

SEQ ID NO: 11610 - DNA, 203 bp, synthetic construct
  source 1..203: mol_type = other DNA
ggcgcgccagtcctctacgcggccaactccactttgggctccctatccggacaggtggctcttgccctttagactacagttcccagcatgcccaggcgattgcgtcccagaaccgacgtcccaccgccttccgtagcaccggacacgggctcccaaaatggcctataacattcacgtgaatggagtcccgactcggaccgatg

SEQ ID NO: 11611 - DNA, 203 bp, synthetic construct
  source 1..203: mol_type = other DNA
ggcgcgccagtcctcgattccaccaagccccttgggtcgcgtatctggctggatccagcctctccgcatcttgatccaagtttgctagggaggaggcatccctacaccctatgactacaggcctgattctcttctttcagtcagggcgacccttgggcgctggagtacgcttgggactggggctgcgacgactcggaccgatg

SEQ ID NO: 11612 - DNA, 203 bp, synthetic construct
  source 1..203: mol_type = other DNA
ggcgcgccagtcctgtgcagagccaagccccttgggtcgcgtatctggctggatccagcctctccgcatcttgatcttttcccctcttctaggaggcatccctaataagctgcggacaaggcctgattctcttctttcagtcagggcgacccttgggcgctggagtacgcttgggactggggctgcgacgactcggaccgatg

SEQ ID NO: 11613 - DNA, 203 bp, synthetic construct
  source 1..203: mol_type = other DNA
ggcgcgccagtcctccatacggccaagccccttgggtcgcgtatctggctggatccagcctctccgcatcttgatcttttcccctcttctaggaggcatccctacaccctatgactacaggcctgattctcttctttcagtcagggcgacccttgggcgctggagtacgcttggactgtcaaagctatcgactcggaccgatg

SEQ ID NO: 11614 - DNA, 203 bp, synthetic construct
  source 1..203: mol_type = other DNA
ggcgcgccagtcctcggtcatcccaagccccttgggtcgcgtatctggctggatccagcctctccgcatcttgatcttttcccctcttctaggaggcatccctacaccctatgactacaggcctgattctcttctttcagtcagggcgacccttgggcgctggagtacgcttgggactggggctgcgacgactcggaccgatg

SEQ ID NO: 11615 - DNA, 203 bp, synthetic construct
  source 1..203: mol_type = other DNA
ggcgcgccagtccttattgtgcccaataaactcagtattaaggcttgttgtgttggacaaggtgccctatttagggtgaggagccttactctagttgggtcaacatcctccattggataggaacagctatattgggtagttgtagcagttgtattcaaatgaatgcagcgttccgaaatatcatacctcgactcggaccgatg

SEQ ID NO: 11616 - DNA, 203 bp, synthetic construct
  source 1..203: mol_type = other DNA
ggcgcgccagtccttctcctgaccaataaactctggtgtaaggcttagagtgatggtcgaggtgccctatttagggcattctagaaaaagggcagccccaccaaatcctctattggataggaacagctgtactgggcagttacagcagtcgtatggtaacacatgcggcgttccgaaataccatgcctcgactcggaccgatg

SEQ ID NO: 11617 - DNA, 203 bp, synthetic construct
  source 1..203: mol_type = other DNA
ggcgcgccagtccttttagctaccaataaactctggtgtaaggcttagagtgatggtcgaggtgccctatttagggtgaggagcctcggtggcagccccaccaaatcctctattggataggaacagctgtactgggcagttacagcagtcgtatggtaaccatgatccacacgagaaataccatgcctcgactcggaccgatg

SEQ ID NO: 11618 - DNA, 203 bp, synthetic construct
  source 1..203: mol_type = other DNA
ggcgcgccagtcctgaccatgtccaataaactctggtgtaaggcttagagtgatggtcgaggtgccctatttagggtgaggagcctcggtggcagccccaccaaatcctctattggataggaacagctgtactgggcagttacagcgcggcatcaaatggacatgcggcgttccgaaataccatgcctcgactcggaccgatg

SEQ ID NO: 11619 - DNA, 203 bp, synthetic construct
  source 1..203: mol_type = other DNA
ggcgcgccagtcctgccgcgggccaataaactctggtgtaaggcttagagtgatggtcgaggtgccctatttagggtgaggagcctcggtggcagccccaccaacaaggtgtagcagcaggaacagctgtactgggcagttacagcagtcgtatggtaacacatgcggcgttccgaaataccatgcctcgactcggaccgatg

SEQ ID NO: 11620 - DNA, 203 bp, synthetic construct
  source 1..203: mol_type = other DNA
ggcgcgccagtcctagttagcgccaataaactctggtgtaaggcttaggtatcctcctcccctgccctatttagggtgaggagcctcggtggcagccccaccaaatcctctattggataggaacagctgtactgggcagttacagcagtcgtatggtaacacatgcggcgttccgaaataccatgcctcgactcggaccgatg

SEQ ID NO: 11621 - DNA, 203 bp, synthetic construct
  source 1..203: mol_type = other DNA
ggcgcgccagtccttcacccgcccaataaacttgaatgtaaggcttgaaacagtggtctaggtgccctatttagggtgaggagcctagctggcagccccagtgaatcctctattggatagaaaccgctatatcgggtagctatagcagtcggatagtaatatatccggcgtttcgaaataccatacctcgactcggaccgatg

SEQ ID NO: 11622 - DNA, 203 bp, synthetic construct
  source 1..203: mol_type = other DNA
ggcgcgccagtcctcataaataccaataaacttgaatgtaaggcttgaaacagtggtctaggtgccctatttagggtgaggagcctagctggcagccccagtgaatcctctattggatagaaaccgctatatcgggtagctatagcagtcggatagtaatatatccggcgtttctcgcccgggagtggcgactcggaccgatg

SEQ ID NO: 11623 - DNA, 203 bp, synthetic construct
  source 1..203: mol_type = other DNA
ggcgcgccagtcctagtccgccccaataaacttggtgtcgtactccagaacagtggtctaggtgccctatttagggtgaggagcctagctggcagccccagtgaatcctctattggatagaaaccgctatatcgggtagctatagcagtcggatagtaatatatccggcgtttcgaaataccatacctcgactcggaccgatg

SEQ ID NO: 11624 - DNA, 203 bp, synthetic construct
  source 1..203: mol_type = other DNA
ggcgcgccagtcctgaacctggccaatcggtgtgctgccactgggccatggagactgtggcacagtagactgtagtgtgaggctcgcgggggcagtggccatggaggccgtgctgaacgagctggtgtctgtggaggacctgctgaagtttgaaaagaaatttcagtctgagaaggcagcaggctcggcgactcggaccgatg

SEQ ID NO: 11625 - DNA, 203 bp, synthetic construct
  source 1..203: mol_type = other DNA
ggcgcgccagtccttgaaaccaccacaagccacagcgctgagctgcaggcgcggcgaaacttccctctacccgcccggcccgcggcgcgcaccgttggcgctggacgcttcctccttggaagcgcctctccctcagttatggagaaaacttgtatagatgcacttcctcttacttcactccagatccgcgactcggaccgatg

SEQ ID NO: 11626 - DNA, 203 bp, synthetic construct
  source 1..203: mol_type = other DNA
ggcgcgccagtccttgttatggccacaagccacagcgctgagctgcaggcgcggcgaaacttccctctacccgcccggcccgcggcgcgcaccgttggcgctggacgcttcctccttggaagcgcctctccctcagttatggagaacctggtatgtacctcacttcctcttactatgaattcttcagacgactcggaccgatg

SEQ ID NO: 11627 - DNA, 203 bp, synthetic construct
  source 1..203: mol_type = other DNA
ggcgcgccagtcctgcccgtgaccacaagccacagcgctgagctgcaggcgcggcgaaacttccctctacccgcccggcccgcggcgcgcaccgttggcgctgggtctgggtctgccagaagcgcctctccctcagttatggagaaaacttgtatagatgcacttcctcttactatgaattcttcagacgactcggaccgatg

SEQ ID NO: 11628 - DNA, 203 bp, synthetic construct
  source 1..203: mol_type = other DNA
ggcgcgccagtccttcctggctccacaagccacagcgctgagctgcaggcgcggcgaaacttccctctacccgcccggcccgcggcgcgcggacagccgtgcttacgcttcctccttggaagcgcctctccctcagttatggagaaaacttgtatagatgcacttcctcttactatgaattcttcagacgactcggaccgatg

SEQ ID NO: 11629 - DNA, 203 bp, synthetic construct
  source 1..203: mol_type = other DNA
ggcgcgccagtccttgccgaccccacaagccacagcgctgagctgcaggcgcggcgaaacttccctctacccgccctagggttcaacgttaccgttggcgctggacgcttcctccttggaagcgcctctccctcagttatggagaaaacttgtatagatgcacttcctcttactatgaattcttcagacgactcggaccgatg

SEQ ID NO: 11630 - DNA, 203 bp, synthetic construct
  source 1..203: mol_type = other DNA
ggcgcgccagtcctgcgtgtaaccacaatgccgtggggcgggaagtccaggccccgcactcgatccacgctggctccctacggaggcccacctactcgaggcccaccgactcctactgcaatcagtactatgcgatcgtcctagagagtccattcagctgcacttccgcctcagtatggcatcacagccgactcggaccgatg

SEQ ID NO: 11631 - DNA, 203 bp, synthetic construct
  source 1..203: mol_type = other DNA
ggcgcgccagtcctgacaaaccccacacgggcccgtcatgtgtgcaaccccagcacggcgacagattgtgaggtgtcactttaaagtgacattgaaactggtacccacacactggtgacaggctaaggatgcccttcaggtaccccgaggtaacacgcgacactcgggatctgagaaggggactggggcgactcggaccgatg

SEQ ID NO: 11632 - DNA, 203 bp, synthetic construct
  source 1..203: mol_type = other DNA
ggcgcgccagtccttcagaagaccacacgggcccgtcatgtgtgcaaccccagcacggcgactttactgcgaaacccactttaaagtgacattgaaactggtacccacacactggtgaagttaggcatcacgccttcaggtaccccgaggtaacacgcgacactcgggatctgagaaggggactggggcgactcggaccgatg

SEQ ID NO: 11633 - DNA, 203 bp, synthetic construct
  source 1..203: mol_type = other DNA
ggcgcgccagtccttggactgaccacacgggcccgtcatgtgtgcaaccccagcacggcgactttactgcgaaacccactttaaagtgacattgaaactggtacccacacactggtgacaggctaaggatgcccttcaggtaccccgaggtaacacgcgacactcgggatctgatctataagggcttccgactcggaccgatg

SEQ ID NO: 11634 - DNA, 203 bp, synthetic construct
  source 1..203: mol_type = other DNA
ggcgcgccagtcctgtttggacccacacgggcccgtcatgtgtgcaaccccagcacggcgactttactgcgaaacccactttaaagtgacattgaaactggtactgtttagagccgaccaggctaaggatgcccttcaggtaccccgaggtaacacgcgacactcgggatctgagaaggggactggggcgactcggaccgatg

SEQ ID NO: 11635 - DNA, 203 bp, synthetic construct
  source 1..203: mol_type = other DNA
ggcgcgccagtcctgcagattcccacacgggcccgtcatgtgtgcaaccccagcacggcgactttactgcgaaacccactttaaagtgacgggatggaaatgttccacacactggtgacaggctaaggatgcccttcaggtaccccgaggtaacacgcgacactcgggatctgagaaggggactggggcgactcggaccgatg

SEQ ID NO: 11636 - DNA, 203 bp, synthetic construct
  source 1..203: mol_type = other DNA
ggcgcgccagtcctatggacgcccacacgggcccgtcatgtgtgcaacggtctgcgatgttgtttactgcgaaacccactttaaagtgacattgaaactggtacccacacactggtgacaggctaaggatgcccttcaggtaccccgaggtaacacgcgacactcgggatctgagaaggggactggggcgactcggaccgatg

SEQ ID NO: 11637 - DNA, 203 bp, synthetic construct
  source 1..203: mol_type = other DNA
ggcgcgccagtcctggctttcaccaccagcctcggccagctggttgtggaccagccgtgaccgacctatcaggtttcaacctcaccgtccaatgggctgcagccacctctctccagtgaggtctgagacccagccttaacgaggctacccccttccaggtccggccgtagcacctccgcgccgtcgcccgactcggaccgatg

SEQ ID NO: 11638 - DNA, 203 bp, synthetic construct
  source 1..203: mol_type = other DNA
ggcgcgccagtcctacagatagccaccagcctcggccagctggttgtggaccagccgtgacctggggcaacccagccaacctcaccgtccaatgggctgcagccacctctctccagtgaggtctgagacccagccttaacgaggctacccccttccaggaatcatgacagcacctccgcgccgtcgcccgactcggaccgatg

SEQ ID NO: 11639 - DNA, 203 bp, synthetic construct
  source 1..203: mol_type = other DNA
ggcgcgccagtccttgcgtatcccaccagcctcggccagctggttgtggaccagccgtgacctggggcaacccagccaacctcaccgtccaatgggctgcagccacctctctccagtgaggtctgagacccagccttaacgaggctgagtttgcgagttgccggccgtagcacctccgcgccgtcgcccgactcggaccgatg

SEQ ID NO: 11640 - DNA, 203 bp, synthetic construct
  source 1..203: mol_type = other DNA
ggcgcgccagtccttactaccaccaccagcctcggccagctggttgtggaccagccgtgacctggggcaacccagccaacctcaccgtccaatgggctgcagccacctctctccagtgtaccagtttgaggtgccttaacgaggctacccccttccaggtccggccgtagcacctccgcgccgtcgcccgactcggaccgatg

SEQ ID NO: 11641 - DNA, 203 bp, synthetic construct
  source 1..203: mol_type = other DNA
ggcgcgccagtcctgattagatccaccagcctcggccagctggttgtggaccagccgtgacctggggcaacccagccaacctcaccgtccaatgggctgcagccggtctgacattaccaggtctgagacccagccttaacgaggctacccccttccaggtccggccgtagcacctccgcgccgtcgcccgactcggaccgatg

SEQ ID NO: 11642 - DNA, 203 bp, synthetic construct
  source 1..203: mol_type = other DNA
ggcgcgccagtccttcggatacccacccctaatgagcgccgcggcctgtatttctagacctgcccttcgcctggttcgtggcgccttgtgaccccgggcccctgccgcctgcaagtcggaaattgcgctgtgctcctgtgctacggcctgtggctggactgcctgctgctgcccaactggctggcaagcgactcggaccgatg

SEQ ID NO: 11643 - DNA, 203 bp, synthetic construct
  source 1..203: mol_type = other DNA
ggcgcgccagtcctatagcaggccacggctagccttgacaaccgccagtgtgttcaagattcagaccagtgtttcaagaacacggatgcagcagcagctcttctggcctctcacgccatccaggggaccttgtcctaccctcttgtgtccgtcgtcagtgaatctctgactcgaaaaggtactcagctcgactcggaccgatg

SEQ ID NO: 11644 - DNA, 203 bp, synthetic construct
  source 1..203: mol_type = other DNA
ggcgcgccagtcctgacatattccactaccagccaacaagtcacgggcgtcgagacaactatttttgaggtatctgaggctaccccacagcactctctggcattggcaagactcgtggctgtgacccatgggcctctgaggaggcgttgtaagtccgcccagctccccacttgctgtgctctcactcacgactcggaccgatg

SEQ ID NO: 11645 - DNA, 203 bp, synthetic construct
  source 1..203: mol_type = other DNA
ggcgcgccagtcctgcctggtcccactaccagccggagccagggcctggtcgagacaactatttttgaggtatctgaggctaccccacagcactctctggcattataggcgaggacacctgtgacccatgggcctctgaggaggcgttgtaagtccgcccagctccccacttgctgtgctctcactcacgactcggaccgatg

SEQ ID NO: 11646 - DNA, 203 bp, synthetic construct
  source 1..203: mol_type = other DNA
ggcgcgccagtcctaagtctgaccactaccagccggagccagggcctggtcgagacaactatttttgaggtatctgaggctaccccacagcactctctggcattggcaagactcgtggctgtgacccatgggcctctgaggaggcgttgtaagtccgcccagctccccacttgcaagtaaggtgtaagcgactcggaccgatg

SEQ ID NO: 11647 - DNA, 203 bp, synthetic construct
  source 1..203: mol_type = other DNA
ggcgcgccagtcctagtctacaccactaccagccggagccagggcctggtcgagacaactatttttgaggtatctgaggctaccccacagcactctctggcattggcaagactcgtggctgtgacccatgggcctctgaggaggcgttgtaagtccgcccgatcgaggtgcatatgtgctctcactcacgactcggaccgatg

SEQ ID NO: 11648 - DNA, 203 bp, synthetic construct
  source 1..203: mol_type = other DNA
ggcgcgccagtcctatcaagagccactaccagccggagccagggcctggtcgagacaactatttttgaggtatctgaggctaccccacagcactctctggcattggcaagactcgtggtctgtctgggaaaacctctgaggaggcgttgtaagtccgcccagctccccacttgctgtgctctcactcacgactcggaccgatg

SEQ ID NO: 11649 - DNA, 203 bp, synthetic construct
  source 1..203: mol_type = other DNA
ggcgcgccagtcctataaagttccactaccagccggagccagggcctggtcgagacaactatttttgaggtatctgtctaacggagcatacactctctggcattggcaagactcgtggctgtgacccatgggcctctgaggaggcgttgtaagtccgcccagctccccacttgctgtgctctcactcacgactcggaccgatg

SEQ ID NO: 11650 - DNA, 203 bp, synthetic construct
  source 1..203: mol_type = other DNA
ggcgcgccagtcctctgcaataccagaactttacacagaaaaggtgctcaaaggatatttgtttaatgaatgtggtatgctgacatttaaacaggacaaaacttgtagaacttcatggaggaacacggagtgacccaaaccgaacatatggctaccatagaagcacatgcagtgctgggtggttgaagcgactcggaccgatg

SEQ ID NO: 11651 - DNA, 203 bp, synthetic construct
  source 1..203: mol_type = other DNA
ggcgcgccagtcctgaattccgccagaactttacacagaaaaggtgctcaaaggatatttgtttaatgaatgtggtatgctgacatttaaacaggacaaaacttgtagaacttcatggaggaacacggagtgacccaaaccgaacatatggctaccatagaagcacatgcagtggcccagcaagtgcacgactcggaccgatg

SEQ ID NO: 11652 - DNA, 203 bp, synthetic construct
  source 1..203: mol_type = other DNA
ggcgcgccagtccttcttcacgccagaactttacacagaaaaggtgctcaaaggatatttgtttaatgaatgtggtatgctgacatttaagttacctccgtagcgtagaacttcatggaggaacacggagtgacccaaaccgaacatatggctaccatagaagcacatgcagtggcccagcaagtgcacgactcggaccgatg

SEQ ID NO: 11653 - DNA, 203 bp, synthetic construct
  source 1..203: mol_type = other DNA
ggcgcgccagtcctaccaactgccagaagacagcggggcgttccttgctgcatttctattggttggcgtttgttactcccagccaatagaaagtgagcgcaactttttatgccaaaatggcgatgcctaccacctagaactggattgtgcgctggccgccaccgctgccacctgctcagagtgaaatacgactcggaccgatg

SEQ ID NO: 11654 - DNA, 203 bp, synthetic construct
  source 1..203: mol_type = other DNA
ggcgcgccagtcctaatcacttccagaagacagcggggcgttccttgctgcatttctattggttggcgtttgttactcccagccaatagaaagtgagcttcttgacaagtgccaaaattagccctaacgaggcctagaactggattgtgcgctggccgccaccgctgccacctgctcagagtgaaatacgactcggaccgatg

SEQ ID NO: 11655 - DNA, 203 bp, synthetic construct
  source 1..203: mol_type = other DNA
ggcgcgccagtccttgaaccacccagaatcaagtgttccgcgtgattgaagacaccccctcgcttcgagcctgtctgcacatccaataaaatagctggattataactcctcttctttctctgggggccgtggggtgggagctggggcgagaggtgccgttggcccccgttgcttttcctctgggaaggcgactcggaccgatg

SEQ ID NO: 11656 - DNA, 203 bp, synthetic construct
  source 1..203: mol_type = other DNA
ggcgcgccagtcctttgtcctgccagaatcaagtgttccgcgtgattgaagacaccccctcgtccaagaatgcaaacgggccgtggggttatagctggattataactcctcttctttctctgggggccgtggggtgggagctggggcgagaggtgccgttggcccccgttgcttttcctctgggaaggcgactcggaccgatg

SEQ ID NO: 11657 - DNA, 203 bp, synthetic construct
  source 1..203: mol_type = other DNA
ggcgcgccagtccttctctgagccagaatcaagtgttccgcgtgattgaagacaccccctcgtccaagaatgcaaagcacatccaataaaatagctggattataactcctcttctttcatccccaaggtataggtgggagctggggcgagaggtgccgttggcccccgttgcttttcctctgggaaggcgactcggaccgatg

SEQ ID NO: 11658 - DNA, 203 bp, synthetic construct
  source 1..203: mol_type = other DNA
ggcgcgccagtcctagattcgtccagaatcaagtgttccgcgtgattgaagacaccccctcgtccaagaatgcaaagcacatccaataaaatagctggattataactcctcttctttctctgggggccgtggggtgggagctggggcgagaggtgccgttggcccccgttgcttaattctatttcgcacgactcggaccgatg

SEQ ID NO: 11659 - DNA, 203 bp, synthetic construct
  source 1..203: mol_type = other DNA
ggcgcgccagtccttcgatcgtccagaatcaagtgttccgcgtgattgaagacaccccctcgtccaagaatgcaaagcacatccaataaaggcttacccacgccactcctcttctttctctgggggccgtggggtgggagctggggcgagaggtgccgttggcccccgttgcttttcctctgggaaggcgactcggaccgatg

SEQ ID NO: 11660 - DNA, 203 bp, synthetic construct
  source 1..203: mol_type = other DNA
ggcgcgccagtccttctatgctccagaatcaagtgttccgcgtgattgtcactcagttagactccaagaatgcaaagcacatccaataaaatagctggattataactcctcttctttctctgggggccgtggggtgggagctggggcgagaggtgccgttggcccccgttgcttttcctctgggaaggcgactcggaccgatg

SEQ ID NO: 11661 - DNA, 203 bp, synthetic construct
  source 1..203: mol_type = other DNA
ggcgcgccagtcctaatctttaccagacagtggctcagccttcaggacctgagcttccagcagccgaagacacctattcacacaagatggtaaaaacaaatcataggcgctgtcgcacaaaattcacagaagaacagttgaaaatcctcatcaataccttcaatcaaaagccttacccaggttatgctcgactcggaccgatg

SEQ ID NO: 11662 - DNA, 203 bp, synthetic construct
  source 1..203: mol_type = other DNA
ggcgcgccagtcctacttgtcaccagacagtggctcagccttcaggactctcttccagcatggccgaagacacctattcacacaagatggtaaaaacaaatcataggcgctgtcgcacaaaattcacagaagaacagttgaaaatcctcatcaataccttcaatcaaaagccttacccaggttatgctcgactcggaccgatg

SEQ ID NO: 11663 - DNA, 203 bp, synthetic construct
  source 1..203: mol_type = other DNA
ggcgcgccagtcctgtcgtcaaccagacagtggctcagccttcaggactctcttccagcatggccgaagacacctattcacacaagatggtaaaaacaaatcataggcgctgtcgcacaaaattcacagaagcttgtaacgtggaactcatcaataccttcaatcaaaagccttacccaggttatgctcgactcggaccgatg

SEQ ID NO: 11664 - DNA, 203 bp, synthetic construct
  source 1..203: mol_type = other DNA
ggcgcgccagtcctactccagcccagccttgaactcgctggacagagcgttgctttctctaagcctggaagtgcccgctgagaaagggagaagacagcagaggggttgccgagagcatatatcagagggaccccctgaagctggtggccactttcagacaaatacttcaaggagagaaaaaagctgttcgactcggaccgatg

SEQ ID NO: 11665 - DNA, 203 bp, synthetic construct
  source 1..203: mol_type = other DNA
ggcgcgccagtccttaaggaacccagccttgaactcgctggacagagctacagacctatggggcctggaagtgccccggagttcctcttcaagacagcagaggggttgccgagagcatatatcagagggaccccctgaagctggtggccactttcagacaaatacttcaaggagagaaaaaagctgttcgactcggaccgatg

SEQ ID NO: 11666 - DNA, 203 bp, synthetic construct
  source 1..203: mol_type = other DNA
ggcgcgccagtcctatcccgtgccagccttgaactcgctggacagagctacagacctatggggcctggaagtgcccgctgagaaagggagaagacagcagaggggttgccgagagcatatatcagagggaccccctgaagctggtggccactttcagacaaatacttcaaggaggcggtggcctcacgcgactcggaccgatg

SEQ ID NO: 11667 - DNA, 203 bp, synthetic construct
  source 1..203: mol_type = other DNA
ggcgcgccagtcctgcgctgggccagccttgaactcgctggacagagctacagacctatggggcctggaagtgcccgctgagaaagggagaagacagcagaggggttgccgagagcatatatcagagggaccccctgaagctggtggccactttcagacagtgctgcatgacctagaaaaaagctgttcgactcggaccgatg

SEQ ID NO: 11668 - DNA, 203 bp, synthetic construct
  source 1..203: mol_type = other DNA
ggcgcgccagtcctatgttccaccagccttgaactcgctggacagagctacagacctatggggcctggaagtgcccgctgagaaagggagaagacagcagagggtaccgttgcccgtaatatcagagggaccccctgaagctggtggccactttcagacaaatacttcaaggagagaaaaaagctgttcgactcggaccgatg

SEQ ID NO: 11669 - DNA, 203 bp, synthetic construct
  source 1..203: mol_type = other DNA
ggcgcgccagtcctcaccacaaccagctgattaccgacgagaattcaacctcttgagactggccgaaaggcagccacggggccaccaaggcggcgcagcgctgcatgcggcaaggggaaaaatccttcgggtgacccctggtggcaatcccttcccttaggagcatgagtgtggtcgacacattcacccgactcggaccgatg

SEQ ID NO: 11670 - DNA, 203 bp, synthetic construct
  source 1..203: mol_type = other DNA
ggcgcgccagtcctcgtttgttccagctgattacttgtcctgcgagttcctcttgagactggccgaaaggcagccacggggccaccaaggcggcgcagcgctgcatgcggcaaggggaaaaatccttcgggtagggttatcctcttatcccttcccttaggagcatgagtgtggtcgacacattcacccgactcggaccgatg

SEQ ID NO: 11671 - DNA, 203 bp, synthetic construct
  source 1..203: mol_type = other DNA
ggcgcgccagtcctaaatggcaccagctgattacttgtcctgcgagttcctcttgagactggccgaaaggcagccacggggccaccaaggcggcgcagcgctgcatgcggcaaggggaaaaatccttcgggtgacccctggtggcaatcccttcccttagatagggcgtgaacctcgacacattcacccgactcggaccgatg

SEQ ID NO: 11672 - DNA, 203 bp, synthetic construct
  source 1..203: mol_type = other DNA
ggcgcgccagtccttggcattcccagctgattacttgtcctgcgagttcctcttgagactggccgaaaggcagccacggggccaccaaggcggcgcagcgctgcatgcggcaaggggaaaaatccttcgggtgacccctggtggcaatcccttcccttaggagcatgagtgtgggtactgatgcagagcgactcggaccgatg

SEQ ID NO: 11673 - DNA, 203 bp, synthetic construct
  source 1..203: mol_type = other DNA
ggcgcgccagtcctcccaccgaccagctgattacttgtcctgcgagttcctcttgagactggccgaaaggcagccacggggccaccaaggcggcgcagcgctgcatgcggcaaggggactttaggagttcaggacccctggtggcaatcccttcccttaggagcatgagtgtggtcgacacattcacccgactcggaccgatg

SEQ ID NO: 11674 - DNA, 203 bp, synthetic construct
  source 1..203: mol_type = other DNA
ggcgcgccagtcctctcttctaccagctgattacttgtcctgcgagttcctcttgagactggccgaaaggcagccacggggccaccaaggcggcgcagcgctgctgcgtatgttttagaaaatccttcgggtgacccctggtggcaatcccttcccttaggagcatgagtgtggtcgacacattcacccgactcggaccgatg

SEQ ID NO: 11675 - DNA, 203 bp, synthetic construct
  source 1..203: mol_type = other DNA
ggcgcgccagtcctacatactcccaggccgccccgaggcttggggtctctcccactcccagagcgcccggggccgaacagcgggggcacacggggcgctgccgaagtgcaaggccacggccagagctcgagcccgacgcgctgtctggagtcgtaggaccctgacgtggctgaagcggccccgggagccgactcggaccgatg

SEQ ID NO: 11676 - DNA, 203 bp, synthetic construct
  source 1..203: mol_type = other DNA
ggcgcgccagtcctgagcattgccaggccgccccgaggcttggggtcttcgaaggataatcggcgcccggggccgaacagcgggggcacacggggcgctgccgaagtgcaaggccacggccagagctcgagcccgacgcgctgtctcttccgcggcttagctgacgtggctgaagcggccccgggagccgactcggaccgatg

SEQ ID NO: 11677 - DNA, 203 bp, synthetic construct
  source 1..203: mol_type = other DNA
ggcgcgccagtccttgtaagagccaggccgccccgaggcttggggtcttcgaaggataatcggcgcccggggccgatttcgctacaagagcggggcgctgccgaagtgcaaggccacggccagagctcgagcccgacgcgctgtctggagtcgtaggaccctgacgtggctgaagcggccccgggagccgactcggaccgatg

SEQ ID NO: 11678 - DNA, 203 bp, synthetic construct
  source 1..203: mol_type = other DNA
ggcgcgccagtcctggtgtacgccaggtgcgtacgcgacggagcggggtgtgaagatggcggacgaagaggccgagcaggagaggttgagttgcggcgaaggcggctgcgtcgcggagctgcagcgcctgggcgagcggctccaggagctggagctacagctgcgggagagccgggtaccggccgtggcgactcggaccgatg

SEQ ID NO: 11679 - DNA, 203 bp, synthetic construct
  source 1..203: mol_type = other DNA
ggcgcgccagtccttatgacacccaggtgcgtacgcgacggagcggggtgtgaagatggcggctcccagactatgacaggagaggttgagttgcggcgaaggcggctgcgtcgcggagctgcagcgcctgggcgagcggctccaggagctggagctacagctgcgggagagccgggtaccggccgtggcgactcggaccgatg

SEQ ID NO: 11680 - DNA, 203 bp, synthetic construct
  source 1..203: mol_type = other DNA
ggcgcgccagtcctgtcctggcccagttcccatgcgacaagaacagtttcgaatcggaagcttgcttaacgtagttctaacagttttttattagagagcagatctctgatgaacaaccaacggaaaaagacgggtcgaccgtctttcaatatgctgaaacgcgcgagaaaccgcgtgtcaactgtttccgactcggaccgatg

SEQ ID NO: 11681 - DNA, 203 bp, synthetic construct
  source 1..203: mol_type = other DNA
ggcgcgccagtcctacccaagtccatgagggggatccaatttaggaaacattctgtttaagagttgacaaggtctcaatgaataatggacaagcaacaattacaagaaatggaggaaggttcgaaatcaggtgtcgtcacttggaccgtgactacaccatgccactaccaaatgctactagtaatgatcgactcggaccgatg

SEQ ID NO: 11682 - DNA, 203 bp, synthetic construct
  source 1..203: mol_type = other DNA
ggcgcgccagtccttccactccccattggacctctcaagacttgattgatgcaattcaaaattttctacaacatctaggtattactgatgggcgcaggcttcagtatatattagtgtcataacactcaatcctaatgcttaccacatcatcaaactattaactcaaacaattcaagccatgggacaaacgactcggaccgatg

SEQ ID NO: 11683 - DNA, 203 bp, synthetic construct
  source 1..203: mol_type = other DNA
ggcgcgccagtcctcacggatgccattttgtgaagagacgaagactgactatcaggcagatgatttctggcctcgagccgcagtcagcttctccccgtagaacccggcagtaggagacttagaatcgaatctcttctccctcccgcctcctgtttttggctttttgagaaaccttatcatccaacacacgactcggaccgatg

SEQ ID NO: 11684 - DNA, 203 bp, synthetic construct
  source 1..203: mol_type = other DNA
ggcgcgccagtccttaaagtaaccattttgtgaagagacgaagactgagctgttttggctgcatttctggcctcgaatgcataaatcagcctccccgtagaacccggcagtaggagacttagaatcgaatctcttctccctcccgcctcctgtttttggctttttgagaaaccttatcatccaacacacgactcggaccgatg

SEQ ID NO: 11685 - DNA, 203 bp, synthetic construct
  source 1..203: mol_type = other DNA
ggcgcgccagtcctcgacacagccattttgtgaagagacgaagactgagctgttttggctgcatttctggcctcgagccgcagtcagcttctccccgtagaacccggcagtaggagacactcccctccgctgcttctccctcccgcctcctgtttttggctttttgagaaaccttatcatccaacacacgactcggaccgatg

SEQ ID NO: 11686 - DNA, 203 bp, synthetic construct
  source 1..203: mol_type = other DNA
ggcgcgccagtcctggttagtcccattttgtgaagagacgaagactgagctgttttggctgcatttctggcctcgagccgcagtcagcttctccccgtagaacccggcagtaggagacttagaatcgaatctcttctccctcccgcaaatgtagccctcatttttgagaaaccttatcatccaacacacgactcggaccgatg

SEQ ID NO: 11687 - DNA, 203 bp, synthetic construct
  source 1..203: mol_type = other DNA
ggcgcgccagtccttaggtggacccaatagatcactaatacatagcacttatttctcttgctttacggcaggtgaagtaagaagagccatcagaggggaaaagttattgtcctgctgcaactatccccaagctcataaagcacaggtaccatcacttcaatacctagccctagtagtagtacaacaaacgactcggaccgatg

SEQ ID NO: 11688 - DNA, 203 bp, synthetic construct
  source 1..203: mol_type = other DNA
ggcgcgccagtcctcgcgtggacccacccggcaggggaggcggcctaacgactctttcactgggtcgccatcttggtcccgggactccaaggaacttaggaatttagtctgcttaggtgagagtctgtaccacctgggaactgccaaagcaacacagtgtctgagaaaggtcctgttttgggccttctcgactcggaccgatg

SEQ ID NO: 11689 - DNA, 203 bp, synthetic construct
  source 1..203: mol_type = other DNA
ggcgcgccagtcctgatgccagcccacccggcaggggaggcggcctaagccacagcagcagcccaacaatctcctatcccgggactccaaggaacttaggaatttagtctgcttaggtgagagtctgtaccacctgggaactgccaaagcaacacagtgtctgagaaaggtcctgttttgggccttctcgactcggaccgatg

SEQ ID NO: 11690 - DNA, 203 bp, synthetic construct
  source 1..203: mol_type = other DNA
ggcgcgccagtcctggattatccccacccggcaggggaggcggcctaagccacagcagcagcggtcgccatcttggtcccgggactccaaggaacttaggaattctcctgttagcaaagagagtctgtaccacctgggaactgccaaagcaacacagtgtctgagaaaggtcctgttttgggccttctcgactcggaccgatg

SEQ ID NO: 11691 - DNA, 203 bp, synthetic construct
  source 1..203: mol_type = other DNA
ggcgcgccagtcctagaaccgacccacccggcagtatctagcttaatggccacagcagcagcggtcgccatcttggtcccgggactccaaggaacttaggaatttagtctgcttaggtgagagtctgtaccacctgggaactgccaaagcaacacagtgtctgagaaaggtcctgttttgggccttctcgactcggaccgatg

SEQ ID NO: 11692 - DNA, 203 bp, synthetic construct
  source 1..203: mol_type = other DNA
ggcgcgccagtcctaggagtgtcccattgttccactagaatgctcatagcaggctcctccggaagaccaggggcagacggggcggtggcggggtcgtgcccagtgggaggggtcgggtctgcccaatgggttctcccgggcggggggcggggctctatttcagcagctctcagggccttgggctcatccgactcggaccgatg

SEQ ID NO: 11693 - DNA, 203 bp, synthetic construct
  source 1..203: mol_type = other DNA
ggcgcgccagtccttcccataacccattgttccaggcaggattcagccatgtaacataagttaagaccaggggcagacggggcggtggcggggtcgtgcccagtgggaggggtcgggtctgcccaatgggttctcccgggcggggggcggggctctatttcagcagctctcagggccttgggctcatccgactcggaccgatg

SEQ ID NO: 11694 - DNA, 203 bp, synthetic construct
  source 1..203: mol_type = other DNA
ggcgcgccagtcctcccgagctcccattgttccaggcaggattcagccgcaggctcctccggaagaccaggggcagacggggcggtggcggggtcgtgcccagtgggaggggtcgggtctgcccaatgggttctcccgggcgggggagcccttagcgacccagcagctctcagggccttgggctcatccgactcggaccgatg

SEQ ID NO: 11695 - DNA, 203 bp, synthetic construct
  source 1..203: mol_type = other DNA
ggcgcgccagtcctggtccgtgcccattgttccaggcaggattcagccgcaggctcctccggaagaccaggggcagacggggcggtggcgtatgttaatagctggggaggggtcgggtctgcccaatgggttctcccgggcggggggcggggctctatttcagcagctctcagggccttgggctcatccgactcggaccgatg

SEQ ID NO: 11696 - DNA, 203 bp, synthetic construct
  source 1..203: mol_type = other DNA
ggcgcgccagtcctttatgtgacccattgttccaggcaggattcagccgcaggctcctccgggttcggttcctggcacggggcggtggcggggtcgtgcccagtgggaggggtcgggtctgcccaatgggttctcccgggcggggggcggggctctatttcagcagctctcagggccttgggctcatccgactcggaccgatg

SEQ ID NO: 11697 - DNA, 203 bp, synthetic construct
  source 1..203: mol_type = other DNA
ggcgcgccagtcctatgtgagaccccaacaatcgactcagcttcaaaaagtgcgctcgccgtcggctctacctgcgtgctttagctccttctcgcctgatccttctgtctctcccaaccccggacacccggcttcgactggttatatcttcggtgttcttttcctctcttcttctttcgcggttcagccgactcggaccgatg

SEQ ID NO: 11698 - DNA, 203 bp, synthetic construct
  source 1..203: mol_type = other DNA
ggcgcgccagtcctcagtatttccccaacaatcgctgtgtgccgctttagtgcgctcgccgtaatagtccgaccattgctttagctccttctcgcctgatccttctgtctctcccaaccccggacacccggcttcgactggttatatcttcggtgttcttttcctctcttcttctttcgcggttcagccgactcggaccgatg

SEQ ID NO: 11699 - DNA, 203 bp, synthetic construct
  source 1..203: mol_type = other DNA
ggcgcgccagtccttccctgtaccccaacaatcgctgtgtgccgctttagtgcgctcgccgtcggctctacctgcggctggctataatggctcgcctgatccttctgtctctcccaaccccggacacccggcttcgactggttatatcttcggtgttcttttcctctcttcttctttcgcggttcagccgactcggaccgatg

SEQ ID NO: 11700 - DNA, 203 bp, synthetic construct
  source 1..203: mol_type = other DNA
ggcgcgccagtcctctttggcgccccaacaatcgctgtgtgccgctttagtgcgctcgccgtcggctctacctgcgtgctttagctccttctcgcctgatccttctgtctctcccaacaagttttcagaaaattcgactggttatatcttcggtgttcttttcctctcttcttctttcgcggttcagccgactcggaccgatg

SEQ ID NO: 11701 - DNA, 203 bp, synthetic construct
  source 1..203: mol_type = other DNA
ggcgcgccagtccttatactgtccccaacaatcgctgtgtgccgctttagtgcgctcgccgtcggctctacctgcgtgctttagctccttctcgcctgatccttctgtctctcccaaccccggacacccggcaattcaactgctgctcttcggtgttcttttcctctcttcttctttcgcggttcagccgactcggaccgatg

SEQ ID NO: 11702 - DNA, 203 bp, synthetic construct
  source 1..203: mol_type = other DNA
ggcgcgccagtcctcggagaccccccaacaatcgctgtgtgccgctttagtgcgctcgccgtcggctctacctgcgtgctttagctccttctcgcctgatccttctgtctctcccaaccccggacacccggcttcgactggttatagtcatacatcaaagttcctctcttcttctttcgcggttcagccgactcggaccgatg

SEQ ID NO: 11703 - DNA, 203 bp, synthetic construct
  source 1..203: mol_type = other DNA
ggcgcgccagtcctaagagacaccccaacaatcgctgtgtgccgctttagtgcgctcgccgtcggctctacctgcgtgctttagctccttctcgcctgatccttctgtctctcccaaccccggacacccggcttcgactggttatatcttcggtgttcttttcctctcttcttcagcttgcagctgctcgactcggaccgatg

SEQ ID NO: 11704 - DNA, 203 bp, synthetic construct
  source 1..203: mol_type = other DNA
ggcgcgccagtcctgtacggccccccaacaatcgctgtgtgccgctttagtgcgctcgccgtcggctctacctgcgtgctttagctccttctcgcctgatccttctgtctctcccaaccccggacacccggcttcgactggttatatcttcggtgttcttttcctctcttcttctttcgcggttcagccgactcggaccgatg

SEQ ID NO: 11705 - DNA, 203 bp, synthetic construct
  source 1..203: mol_type = other DNA
ggcgcgccagtcctctgcacacccccaacaatcgctgtgtgccgctttagtgcgctcgccgtcggctctacctgcgtgctttagctccttgcgaatatgaaaccctgtctctcccaaccccggacacccggcttcgactggttatatcttcggtgttcttttcctctcttcttctttcgcggttcagccgactcggaccgatg

SEQ ID NO: 11706 - DNA, 203 bp, synthetic construct
  source 1..203: mol_type = other DNA
ggcgcgccagtccttcacgcatccccatgccttccctttcacgcttccgtcctgacgcaaacccattaaatttcgacgcactgcgggcttgtccttggccctgccctactcagtttcctgaagcatgcgcagttgcctttccgtcaattcctgtcctgggcgtacgtcaagatggcggcgtctgtattcgactcggaccgatg

SEQ ID NO: 11707 - DNA, 203 bp, synthetic construct
  source 1..203: mol_type = other DNA
ggcgcgccagtcctgtggaccaccccatgccttccctttcacgcttccgtcctgacgcaaacgtggggccgccttcattgaacaatcgacgtccttggccctgccctactcagtttcctgaagcatgcgcagttgcctttccgtcaattcctgtcctgggcgtacgtcaagatggcggcgtctgtattcgactcggaccgatg

SEQ ID NO: 11708 - DNA, 203 bp, synthetic construct
  source 1..203: mol_type = other DNA
ggcgcgccagtcctagtattaaccccatgccttccctttcacgcttccgtcctgacgcaaacgtggggccgccttccgcactgcgggcttgtccttggccctgccctactcagtttcctgaagcatgcgcagaccagccagtcaatattcctgtcctgggcgtacgtcaagatggcggcgtctgtattcgactcggaccgatg

SEQ ID NO: 11709 - DNA, 203 bp, synthetic construct
  source 1..203: mol_type = other DNA
ggcgcgccagtcctactgcgtgccccatgccttccctttcacgcttccgtcctgacgcaaacgtggggccgccttccgcactgcgggcttgtccttggccctgccctactcagtttcctgaagcatgcgcagttgcctttccgtcaattcctgtcctgggcgtacgtcaagatgaacatagtatagcacgactcggaccgatg

SEQ ID NO: 11710 - DNA, 203 bp, synthetic construct
  source 1..203: mol_type = other DNA
ggcgcgccagtccttaagattgccccatgccttccctttcacgcttccgtcctgacgcaaacgtggggccgccttccgcactgcgggcttgtccttggccctgcgtataatttcggtttgaagcatgcgcagttgcctttccgtcaattcctgtcctgggcgtacgtcaagatggcggcgtctgtattcgactcggaccgatg

SEQ ID NO: 11711 - DNA, 203 bp, synthetic construct
  source 1..203: mol_type = other DNA
ggcgcgccagtcctgcacctcaccccatgccttccctttcacgcttccgtcctgacgcaaacgtggggccgccttccgcactgcgggctttagtacaatatctgcctactcagtttcctgaagcatgcgcagttgcctttccgtcaattcctgtcctgggcgtacgtcaagatggcggcgtctgtattcgactcggaccgatg

SEQ ID NO: 11712 - DNA, 203 bp, synthetic construct
  source 1..203: mol_type = other DNA
ggcgcgccagtcctaggaacggccccatgccttcttcccggactcaatgtcctgacgcaaacgtggggccgccttccgcactgcgggcttgtccttggccctgccctactcagtttcctgaagcatgcgcagttgcctttccgtcaattcctgtcctgggcgtacgtcaagatggcggcgtctgtattcgactcggaccgatg

SEQ ID NO: 11713 - DNA, 203 bp, synthetic construct
  source 1..203: mol_type = other DNA
ggcgcgccagtcctgggagccacccccgccccccatgcgggaggttcctaataaaggcccctgaacgtgtatgttggtctcccgggagctgcttgctgaagatccgcgcccctgtcgccgtctggtaggagctgtttgcagggtcctaactcaatcggcttgttgtgatgcgtatccccgtagatgcccgactcggaccgatg

SEQ ID NO: 11714 - DNA, 203 bp, synthetic construct
  source 1..203: mol_type = other DNA
ggcgcgccagtcctgcggatctcccccggttgactaggagctggcggttttctacaacaaagggaagaccgacgcgatgaagcccagacctgcagggttcgtggataataaactcaagcagcgagtcatccagtaccttaccagtaacaaatgtggcaaatatgtggacattggagtcttagcgtctgcgactcggaccgatg

SEQ ID NO: 11715 - DNA, 203 bp, synthetic construct
  source 1..203: mol_type = other DNA
ggcgcgccagtcctattgtcttcccccggttgactaggagctgggggtccgagctgtggcttatgtccttcggttcatgaagcccagacctgcagggttcgtggataataaactcaagcagcgagtcatccagtaccttaccagtaacaaatgtggcaaatatgtggacattggagtcttagcgtctgcgactcggaccgatg

SEQ ID NO: 11716 - DNA, 203 bp, synthetic construct
  source 1..203: mol_type = other DNA
ggcgcgccagtcctcctgggtccccccggttgactaggagctgggggtccgagctgtggcttggaagaccgacgcgatgaagcccagacctgcagggttcgtggataataaactcaagcagcgagtcatccagtaccttaccagtacgcctccgctgtggtatgtggacattggagtcttagcgtctgcgactcggaccgatg

SEQ ID NO: 11717 - DNA, 203 bp, synthetic construct
  source 1..203: mol_type = other DNA
ggcgcgccagtccttttagggtcccccggttgactaggagctgggggtccgagctgtggcttggaagaccgacgcgcgtcccgaagttggtgcagggttcgtggataataaactcaagcagcgagtcatccagtaccttaccagtaacaaatgtggcaaatatgtggacattggagtcttagcgtctgcgactcggaccgatg

SEQ ID NO: 11718 - DNA, 203 bp, synthetic construct
  source 1..203: mol_type = other DNA
ggcgcgccagtcctattacatgccccggtcaccgcgaggatgtagcacccctgtgcttataacctgggatgggcacccctgccagtcctgctctgccgcctgccaccgctgcccgagcccgagtggttcactgcactgtgaaaacagattccagacgccgggaactcacgcctccaatcccagacgctcgactcggaccgatg

SEQ ID NO: 11719 - DNA, 203 bp, synthetic construct
  source 1..203: mol_type = other DNA
ggcgcgccagtcctccagctacccccggtcaccggccctgcccccgggattatctagacgcgcctgggatgggcacccctgccagtcctgctctgccgcctgccaccgctgcccgagcccgagtggttcactgcactgtgaaaacagattccagacgccgggaactcacgcctccaatcccagacgctcgactcggaccgatg

SEQ ID NO: 11720 - DNA, 203 bp, synthetic construct
  source 1..203: mol_type = other DNA
ggcgcgccagtcctctcccaaaccccggtcaccggccctgcccccgggccctgtgcttataaaagccctactaggaccctgccagtcctgctctgccgcctgccaccgctgcccgagcccgagtggttcactgcactgtgaaaacagattccagacgccgggaactcacgcctccaatcccagacgctcgactcggaccgatg

SEQ ID NO: 11721 - DNA, 203 bp, synthetic construct
  source 1..203: mol_type = other DNA
ggcgcgccagtcctgtgtttagccccggtcaccggccctgcccccgggccctgtgcttataacctgggatgggcacccctgccagtcctgaggccggaatctgtaccgctgcccgagcccgagtggttcactgcactgtgaaaacagattccagacgccgggaactcacgcctccaatcccagacgctcgactcggaccgatg

SEQ ID NO: 11722 - DNA, 203 bp, synthetic construct
  source 1..203: mol_type = other DNA
ggcgcgccagtcctgggtaaggccccggtcaccggccctgcccccgggccctgtgcttataacctgggatgggcacccctgccagtcctgctctgccgcctgccaccgctgcccgagcccgagtggttcactgcactgtgaaaacagattccagacgccgggaactcacgcctctccagggcttgtgacgactcggaccgatg

SEQ ID NO: 11723 - DNA, 203 bp, synthetic construct
  source 1..203: mol_type = other DNA
ggcgcgccagtcctatgggctgccccggtcaccggccctgcccccgggccctgtgcttataacctgggatgggcacccctgccagtcctgctctgccgcctgcctaattacggtattgccgagtggttcactgcactgtgaaaacagattccagacgccgggaactcacgcctccaatcccagacgctcgactcggaccgatg

SEQ ID NO: 11724 - DNA, 203 bp, synthetic construct
  source 1..203: mol_type = other DNA
ggcgcgccagtccttgcttgtgccccgtggccaaaagcccagtgtttacagcacctctcacatccaggacgaccccatcctggcgctcaccacctcggcgcctccttagtacgcattaggtggtaagccgagctctccctcggccttgttctgaatgcacacatgtctaggggctaaggatgtcctaccgactcggaccgatg

SEQ ID NO: 11725 - DNA, 203 bp, synthetic construct
  source 1..203: mol_type = other DNA
ggcgcgccagtcctccgtggtgccccgtggccaaaagcccagtgtttacagcacctctcacatccaggacgacccccgggccatcgcgcgtcttagtagtatggcttagtacgcattaggtggtaagccgagctctccctcggccttgttctgaatgcacacatgtctaggggctaaggatgtcctaccgactcggaccgatg

SEQ ID NO: 11726 - DNA, 203 bp, synthetic construct
  source 1..203: mol_type = other DNA
ggcgcgccagtcctcttcagatccccgtggccaatcatattcgtggatcagcacctctcacatccaggacgaccccatcctggcgctcactcttagtagtatggcttagtacgcattaggtggtaagccgagctctccctcggccttgttctgaatgcacacatgtctaggggctaaggatgtcctaccgactcggaccgatg

SEQ ID NO: 11727 - DNA, 203 bp, synthetic construct
  source 1..203: mol_type = other DNA
ggcgcgccagtcctcggcctccccccgttcttccaacatcctccgctggcgccgcccagccctgtcgccccccggaggtgatccctccctcctgcctgcccgccagcctgacctgtgcccggctcgcgggccgcagcctcggcccccgcgcgcccccggcagctctcggcgcgatgagcatagagacgcgactcggaccgatg

SEQ ID NO: 11728 - DNA, 203 bp, synthetic construct
  source 1..203: mol_type = other DNA
ggcgcgccagtcctgcgtaattccccgttcttccctgcggagtgcgctcatttataaccgagtgtcgccccccggaggtgatccctccctcctgcctgcccgccagcctgacctgtgcccggctcgcgggccgcagcctcggcccccgcgcgcccccggcagctctcggcgcgatgagcatagagacgcgactcggaccgatg

SEQ ID NO: 11729 - DNA, 203 bp, synthetic construct
  source 1..203: mol_type = other DNA
ggcgcgccagtcctccgggcccccccgttcttccctgcggagtgcgctgcgccgcccagccctgtcgccccccggaggtgatccctccctcctgcctgcccgccagcctgacctgtgcccggctcgcgggccgcagcctcggccccctactctaaattcgagctctcggcgcgatgagcatagagacgcgactcggaccgatg

SEQ ID NO: 11730 - DNA, 203 bp, synthetic construct
  source 1..203: mol_type = other DNA
ggcgcgccagtcctcgagatgcccccgttcttccctgcggagtgcgctgcgccgcccagccctgtcgccccccggaggtgatccctccctcctgcctgcccgccagcctgacctgtgctacctgataaccgagcagcctcggcccccgcgcgcccccggcagctctcggcgcgatgagcatagagacgcgactcggaccgatg

SEQ ID NO: 11731 - DNA, 203 bp, synthetic construct
  source 1..203: mol_type = other DNA
ggcgcgccagtcctcaggaaatcccctcccaaaccacctcccaaatgggagataatggggggccccggccttaccaatcagcggtggaaaggtccattgcaatccctccaggaagcggccggggcagccttgctctccatagacggctccccccggtggatcccgtggcgattcctgaaaaaagctgccgactcggaccgatg

SEQ ID NO: 11732 - DNA, 203 bp, synthetic construct
  source 1..203: mol_type = other DNA
ggcgcgccagtccttcatgtaccccctcccaaaccacctcccaaatggttctattataaactccccggccttaccaatcagcggtggaaaaagaagcccagtctcctccaggaagcggccggggcagccttgctctccatagacggctccccccggtggatcccgtggcgattcctgaaaaaagctgccgactcggaccgatg

SEQ ID NO: 11733 - DNA, 203 bp, synthetic construct
  source 1..203: mol_type = other DNA
ggcgcgccagtcctagacggttcccctcccaaaccacctcccaaatggttctattataaactccccggccttaccaatcagcggtggaaaggtccattgcaatccctccaggaagcggccggggcagccttgctctccatagacggctccccccggtggatcccgtggcgattcctgaaaaaagctgccgactcggaccgatg

SEQ ID NO: 11734 - DNA, 203 bp, synthetic construct
  source 1..203: mol_type = other DNA
ggcgcgccagtcctgtgtgctacccctcccaaaccacctcccaaatggttctattataaactccccggccttaccaatcagcggtggaaaggtccattgcaatccctccaggaagcggccggggcagccttgctctccatagacggtgagaaggaaaaattcccgtggcgattcctgaaaaaagctgccgactcggaccgatg

SEQ ID NO: 11735 - DNA, 203 bp, synthetic construct
  source 1..203: mol_type = other DNA
ggcgcgccagtcctatgtagaccccctctaggttgaaggatgcccagaaggtacccgcaggtaacaagagacactgtggatctgatctggggccacctacctctatcctggtgaggtggttaaaaaacgtctagtgggccaaacccaggggggatccctggtttccttattttagtgtaaatgtcattcgactcggaccgatg

SEQ ID NO: 11736 - DNA, 203 bp, synthetic construct
  source 1..203: mol_type = other DNA
ggcgcgccagtccttaattagacccgaaaacacacccaactccacacaaacacccacagcatccgagccctctacatcaaattccacccaaaatacccaatcacatgcttagttattcaaaaactacatcttagcagaaaaccgtgacctatcaagcaagtcacggtaacctaatggggcaaataacccgactcggaccgatg

SEQ ID NO: 11737 - DNA, 203 bp, synthetic construct
  source 1..203: mol_type = other DNA
ggcgcgccagtccttattaagtcccgaaaacacaggtgcgcgatagataacacccacagcatccgagccctctacatcaaattccacccaaaatacccaatcacatgcttagttattcaaaaactacatcttagcagaaaaccgtgacctatcaagcaagaacgaaattaaacctggggcaaataacccgactcggaccgatg

SEQ ID NO: 11738 - DNA, 203 bp, synthetic construct
  source 1..203: mol_type = other DNA
ggcgcgccagtcctcgataacgcccgatcgtaaactccatgtattggttacccatctgcatcgaaaactctccgaacactaggtgcagtaaggctttcatggagcccggcctatgaccgcgtacgtgtaccataggcagccccaaaaacacgtgtgaggagaaagtcccagtcactttgggcaaagtacgactcggaccgatg

SEQ ID NO: 11739 - DNA, 203 bp, synthetic construct
  source 1..203: mol_type = other DNA
ggcgcgccagtcctccaacggccccgatcgtaaactccatgtattggttacccatctgcatcgaaaactctccgaacactaggtgcagtaaggctttcatggagtggtttgctatttagcgtacgtgtaccataggcagccccaaatttgacgcacgattgaaagtcccagtcactttgggcaaagtacgactcggaccgatg

SEQ ID NO: 11740 - DNA, 203 bp, synthetic construct
  source 1..203: mol_type = other DNA
ggcgcgccagtccttcgagagacccgcaggacgcgcctcccagccagcccgactcctaggaggaggggaggcgggaaagcagctcaagccagtagattgcgttcgcccccagccccgccactcccaggctcctcgggactcggcgggtcctcctgggagtctcggaggggaccggctgtgcagacgcccgactcggaccgatg

SEQ ID NO: 11741 - DNA, 203 bp, synthetic construct
  source 1..203: mol_type = other DNA
ggcgcgccagtcctgctacggtcccgcaggacgcgcctcccagccagcccgactcctaggaggaggggaggcgggaaagcagctcaagcctcacccaccgccctaaatgtttttttctcactcccaggctcctcgggactcggcgggtcctcctgggagtctcggaggggaccggctgtgcagacgcccgactcggaccgatg

SEQ ID NO: 11742 - DNA, 203 bp, synthetic construct
  source 1..203: mol_type = other DNA
ggcgcgccagtcctcatttaaacccgcaggacgcgcctcccagccagcccgactcctaggaggaggggaggcgggaaagcagctcaagcctcacccaccgccctgcccccagccccgccactcccaggctcctcgggacaacaactaacctcctgggagtctcggaggggaccggctgtgcagacgcccgactcggaccgatg

SEQ ID NO: 11743 - DNA, 203 bp, synthetic construct
  source 1..203: mol_type = other DNA
ggcgcgccagtcctcagcgctacccgcaggacgcgcctcccagccagcccgactcctaggaggaggggaggcgggaaagcagctcaagcctcacccaccgccctgcccccagccccgccactcccaggctcctcgggactcggcgggtcctcctgggagtaattccatttcatagctgtgcagacgcccgactcggaccgatg

SEQ ID NO: 11744 - DNA, 203 bp, synthetic construct
  source 1..203: mol_type = other DNA
ggcgcgccagtcctgggaaatccccgcaggacgcgcctcccagccagcccgactcctaggaggaggggaggcgggaaagcagctcaagcctcacccaccgccctgcccccagccccgctttcttgctagctttcgggactcggcgggtcctcctgggagtctcggaggggaccggctgtgcagacgcccgactcggaccgatg

SEQ ID NO: 11745 - DNA, 203 bp, synthetic construct
  source 1..203: mol_type = other DNA
ggcgcgccagtccttctcagtccccgccgccatgacgctgcgcgcggccgtcttcgaccttgacggggtgctggcgacagtgatctaaggcggcgtcctcggccgcacggaggaggccctggcgctgcccaggacttctgaatgatgctttccagaaagggggaccagagggtgccactacccggcttcgactcggaccgatg

SEQ ID NO: 11746 - DNA, 203 bp, synthetic construct
  source 1..203: mol_type = other DNA
ggcgcgccagtcctcttcatcacccgccgccatgacgctgcgcgcggccgtcttcgaccttgacggggtgctggcgctgccagcggtgttcggcgtcctcggccgcacggaggaggccggtcttaccaaggcgacttctgaatgatgctttccagaaagggggaccagagggtgccactacccggcttcgactcggaccgatg

SEQ ID NO: 11747 - DNA, 203 bp, synthetic construct
  source 1..203: mol_type = other DNA
ggcgcgccagtcctaagctcgacccgccgccatgacgctgcgcgcggccgtcttcgaccttgcaaattaaaataatctgccagcggtgttcggcgtcctcggccgcacggaggaggccctggcgctgcccaggacttctgaatgatgctttccagaaagggggaccagagggtgccactacccggcttcgactcggaccgatg

SEQ ID NO: 11748 - DNA, 203 bp, synthetic construct
  source 1..203: mol_type = other DNA
ggcgcgccagtccttgcgagtacccgccgccatgacgctgcgcgcggctaatccatttgactacggggtgctggcgctgccagcggtgttcggcgtcctcggccgcacggaggaggccctggcgctgcccaggacttctgaatgatgctttccagaaagggggaccagagggtgccactacccggcttcgactcggaccgatg

SEQ ID NO: 11749 - DNA, 203 bp, synthetic construct
  source 1..203: mol_type = other DNA
ggcgcgccagtcctcgcgactgcccgcctgccggcctgcctgccacagccggactccgccaccagccctacgagatccgcctgtcattccctagcccagctcttgggaaactgcagaggggtccagaggatttgcagttctgaacctgcacactccagtctaggatctccgagcaagagcgtagcctccgactcggaccgatg

SEQ ID NO: 11750 - DNA, 203 bp, synthetic construct
  source 1..203: mol_type = other DNA
ggcgcgccagtcctcacgtcagcccgcctgccggcctgcctgccacagccggactccgccactccggtaggattccccgcctgtcattccctagcccagctcttgggaaactgcagagacaggggtgtccactgcagttctgaacctgcacactccagtctaggatctccgagcaagagcgtagcctccgactcggaccgatg

SEQ ID NO: 11751 - DNA, 203 bp, synthetic construct
  source 1..203: mol_type = other DNA
ggcgcgccagtcctggcccttacccgcctgccggcctgcctgccacagccggactccgccactccggtaggattccccgcctgtcattccctagcccagctcttgggaaactgcagaggggtccagaggattccggtccagcctggtgcacactccagtctaggatctccgagcaagagcgtagcctccgactcggaccgatg

SEQ ID NO: 11752 - DNA, 203 bp, synthetic construct
  source 1..203: mol_type = other DNA
ggcgcgccagtcctcggtcgagcccgcctgccggcctgcctgccacagccggactccgccactccggtaggattccccgcctgtcattccctagcccagctcttgggaaactgcagaggggtccagaggatttgcagttctgaacctgcacactccagtcatattcgctttgtgaagagcgtagcctccgactcggaccgatg

SEQ ID NO: 11753 - DNA, 203 bp, synthetic construct
  source 1..203: mol_type = other DNA
ggcgcgccagtcctattccttccccgcctgccggcctgcctgccacagccggactccgccactccggtaggattccgacgagcagccgttctagcccagctcttgggaaactgcagaggggtccagaggatttgcagttctgaacctgcacactccagtctaggatctccgagcaagagcgtagcctccgactcggaccgatg

SEQ ID NO: 11754 - DNA, 203 bp, synthetic construct
  source 1..203: mol_type = other DNA
ggcgcgccagtcctgttgcctccccgcctgccggcctgcctgccacagtattctcattgatgtccggtaggattccccgcctgtcattccctagcccagctcttgggaaactgcagaggggtccagaggatttgcagttctgaacctgcacactccagtctaggatctccgagcaagagcgtagcctccgactcggaccgatg

SEQ ID NO: 11755 - DNA, 203 bp, synthetic construct
  source 1..203: mol_type = other DNA
ggcgcgccagtcctgttctaggcccggaaatctgacaaagcctcttggccgtgttctgaacttgaagcctggaggagttctctgctcagcacagccaaggaacagaattagaagaaaaggaaccctggcctgaggcaggtgacaaacattaccaccccagctgtgcacgatgcagcagatgcaaccagcgactcggaccgatg

SEQ ID NO: 11756 - DNA, 203 bp, synthetic construct
  source 1..203: mol_type = other DNA
ggcgcgccagtcctacatctgccccggctcggggtccgggctggggaggggaacctgggcgcctgggacccgccgatgccccctgccccgcccggaggtgaaagcgggtgtgaggagcgcggcgcggcaggtcatattgaacattccagatacctatcatcctgacgacacacagataacagcaagatcgactcggaccgatg

SEQ ID NO: 11757 - DNA, 203 bp, synthetic construct
  source 1..203: mol_type = other DNA
ggcgcgccagtcctggatcaagcccggctcggggtccgggctggggaggggaacctgggcgcctgggacccgccgatgccccctgccccgcccggaggtgaaagcgggtgtgaggagcgcggcgcggcaggtcatattgaacattccagatacctatcattactcgatgctgttacgcctttttgacacgactcggaccgatg

SEQ ID NO: 11758 - DNA, 203 bp, synthetic construct
  source 1..203: mol_type = other DNA
ggcgcgccagtcctaagaatgccccggctcggggtccgggctggggaggggaacctgggcgcctgggacccgccgatgccccctgccccgtggacccagatgtacgggtgtgaggagcgcggcgcggcaggtcatattgaacattccagatacctatcattactcgatgctgttgataacagcaagatcgactcggaccgatg

SEQ ID NO: 11759 - DNA, 203 bp, synthetic construct
  source 1..203: mol_type = other DNA
ggcgcgccagtcctgtgttcgtcccggctcggggtccgggctggggaggggaacctgggcgcggttcgtataggcttgccccctgccccgcccggaggtgaaagcgggtgtgaggagcgcggcgcggcaggtcatattgaacattccagatacctatcattactcgatgctgttgataacagcaagatcgactcggaccgatg

SEQ ID NO: 11760 - DNA, 203 bp, synthetic construct
  source 1..203: mol_type = other DNA
ggcgcgccagtcctgctgttaacccggggccaacatacgccgtggagcgcagcaagggctagggcttcctgaacctctccgggagaggtcctagcaaccctcgcggcccgccctaggagcattgtcttcccggggaagacaaacaattgggggctcgtccgggatttgaattcctccattctcacattcgactcggaccgatg

SEQ ID NO: 11761 - DNA, 203 bp, synthetic construct
  source 1..203: mol_type = other DNA
ggcgcgccagtccttgggacagcccggggccaacatacgccgtggagcgcagcaagggctagggcttcctgaacctctccgggagaggtctattgctataggcaggcccgccctaggacagcacaaggggttgggaagacaaacaattgggggctcgtccgggatttgaattcctccattctcacattcgactcggaccgatg

SEQ ID NO: 11762 - DNA, 203 bp, synthetic construct
  source 1..203: mol_type = other DNA
ggcgcgccagtccttcatagtgcccggggccaacatacgccgtggagcgcagcaagggctagggcttcctgaacctctccgggagaggtctattgctataggcaggcccgccctaggagcattgtcttcccggggaagacaaacaacgctaactagcaatgggatttgaattcctccattctcacattcgactcggaccgatg

SEQ ID NO: 11763 - DNA, 203 bp, synthetic construct
  source 1..203: mol_type = other DNA
ggcgcgccagtcctcgtacgatcccggggccaacatacgccgtggagcgcagcaagggctagggcttcctgaacctctccgggagaggtctattgctataggcaggcccgccctaggagcattgtcttcccggggaagacaaacaattgggggctcgtccgggatttgaattcctccattctcacattcgactcggaccgatg

SEQ ID NO: 11764 - DNA, 203 bp, synthetic construct
  source 1..203: mol_type = other DNA
ggcgcgccagtcctgcgggtggcccggggccaacatacgccgtggagcgcagcaagggctagggcttcctgaacctctccgggagaggtctattgctataggcaggcccgccctaggagcattgtcttcccgttcggctaggcaggttgggggctcgtccgggatttgaattcctccattctcacattcgactcggaccgatg

SEQ ID NO: 11765 - DNA, 203 bp, synthetic construct
  source 1..203: mol_type = other DNA
ggcgcgccagtcctgaactgctccctaaccaacccagctggacactccctccctgcaccatgtcttacagttgtggcctgcccagcctgagctgccgcaccagctgctcctcccggccctgtgtgccccccagctgccacggctgcaccctgcccggggcctgcaacatccccgccaatgtgagcaaccgactcggaccgatg

SEQ ID NO: 11766 - DNA, 203 bp, synthetic construct
  source 1..203: mol_type = other DNA
ggcgcgccagtcctcaccaaggccctaactaggtacttgatcattatattaagaaaaacttaggatccaagaccataaatctaggatcctttacaatctcagaccctggtgcaaggttatatatagagcccaattctcctaattaaacagtgtctcaggttgacaaatggacaagttggatctagtcacgactcggaccgatg

SEQ ID NO: 11767 - DNA, 203 bp, synthetic construct
  source 1..203: mol_type = other DNA
ggcgcgccagtccttcctttgcccctaccccatccccttattcagcacatgaaataaacaaggggcatccaaatcttgcggcaacgcccccgggacatgcatcgcatagatcggatgatcaaaccccttatccctctggacagaatgcaggtccaaccacgctggtataccctcaaacccctcagacacgactcggaccgatg

SEQ ID NO: 11768 - DNA, 203 bp, synthetic construct
  source 1..203: mol_type = other DNA
ggcgcgccagtcctaattacggccctaccccatccccttattcagcacatgaaataaacaaggggcatccaaatcttgcggcaacgcccccgggacatgcatcgtcccctggactctcatgcggaagccgaacctctggacagaatgcaggtccaaccacgctggtataccctcaaacccctcagacacgactcggaccgatg

SEQ ID NO: 11769 - DNA, 203 bp, synthetic construct
  source 1..203: mol_type = other DNA
ggcgcgccagtcctggttccctccctaccccatccccttattcagcacatgaaataaacaaggggcatccaaatcttgcggcaacgcccccgggacatgcatcgtcccctggactctctcaaaccccttatccctctggacagaatgcaggtccaaccaccgcaactctagtcgaaacccctcagacacgactcggaccgatg

SEQ ID NO: 11770 - DNA, 203 bp, synthetic construct
  source 1..203: mol_type = other DNA
ggcgcgccagtccttgctatctccctaccccatccccttattcagcacatgaaataaacaaggggcatccaaatcttgcggcaacgcccccgggacatgcatcgtcccctggactctctcaaaccccttatccctctggacagaatgcaggtccaaccacgctggtataccctcgtttgtaatgctgtcgactcggaccgatg

SEQ ID NO: 11771 - DNA, 203 bp, synthetic construct
  source 1..203: mol_type = other DNA
ggcgcgccagtccttgctgctaccctaccccatccccttattcagcacatgaaataaacaaggggcatccaaatcttgcggcaacgcccccgggacatgcatcgtcccctggactctctcaaaccccttatccctctggacagaatgcaggtccaaccactgctccgacatggtaaacccctcagacacgactcggaccgatg

SEQ ID NO: 11772 - DNA, 203 bp, synthetic construct
  source 1..203: mol_type = other DNA
ggcgcgccagtcctattagcggccctaccccatccccttattcagcacatgaaataaacaagttaggcaacgcgagtgcggcaacgcccccgggacatgcatcgtcccctggactctctcaaaccccttatccctctggacagaatgcaggtccaaccacgctggtataccctcaaacccctcagacacgactcggaccgatg

SEQ ID NO: 11773 - DNA, 203 bp, synthetic construct
  source 1..203: mol_type = other DNA
ggcgcgccagtcctaagggcgtccctaccccatccccttattcagcaccgcgtgatccatcagggcatccaaatcttgcggcaacgcccccgggacatgcatcgtcccctggactctctcaaaccccttatccctctggacagaatgcaggtccaaccacgctggtataccctcaaacccctcagacacgactcggaccgatg

SEQ ID NO: 11774 - DNA, 203 bp, synthetic construct
  source 1..203: mol_type = other DNA
ggcgcgccagtcctttcagcctccctaccccatcgttcacgcacagttatgaaataaacaaggggcatccaaatcttgcggcaacgcccccgggacatgcatcgtcccctggactctctcaaaccccttatccctctggacagaatgcaggtccaaccacgctggtataccctcaaacccctcagacacgactcggaccgatg

SEQ ID NO: 11775 - DNA, 203 bp, synthetic construct
  source 1..203: mol_type = other DNA
ggcgcgccagtcctctccatagccctagagccatgcactaacaaatgcgtacccttcacggccagtttccattgccagctgtgtttctcgaaaaaggggctcggaatatcatatgagcgaaagggcagacgaagaaggactccaaggaaaactaagactccttcgccttctgcaccagacaagtgagtcgactcggaccgatg

SEQ ID NO: 11776 - DNA, 203 bp, synthetic construct
  source 1..203: mol_type = other DNA
ggcgcgccagtcctttgctaacccctagagccatgcactaacaaatgctattgtaagcgatgcagtttccattgccagctgtgtttctcgaaaaaggggctcggaatatcatatgagcatctcttagatgatagaaggactccaaggaaaactaagactccttcgccttctgcaccagacaagtgagtcgactcggaccgatg

SEQ ID NO: 11777 - DNA, 203 bp, synthetic construct
  source 1..203: mol_type = other DNA
ggcgcgccagtcctggctatacccctagagccatgcactaacaaatgctattgtaagcgatgcagtttccattgccagctgtgtttctcgaaaaaggggctcggctagcaggggtttggaaagggcagacgaagaaggactccaaggaaaactaagactccttcgccttctgcaccagacaagtgagtcgactcggaccgatg

SEQ ID NO: 11778 - DNA, 203 bp, synthetic construct
  source 1..203: mol_type = other DNA
ggcgcgccagtcctggtcggaaccctagagccatgcactaacaaatgctattgtaagcgatgtgccacgggcgaaaagctgtgtttctcgaaaaaggggctcggaatatcatatgagcgaaagggcagacgaagaaggactccaaggaaaactaagactccttcgccttctgcaccagacaagtgagtcgactcggaccgatg

SEQ ID NO: 11779 - DNA, 203 bp, synthetic construct
  source 1..203: mol_type = other DNA
ggcgcgccagtcctgcaccagtccctatcccgtgaccctgttcctccgcttcttcgttgggcgcatctcctggaactgggccgcgtccccgccgcctttccgtcatttcttcagatagctccccagctgtggaaaatgagcatcctcaagagaccccagagaatccatcggatttgtatacttccttccgactcggaccgatg

SEQ ID NO: 11780 - DNA, 203 bp, synthetic construct
  source 1..203: mol_type = other DNA
ggcgcgccagtcctgtttctggccctatcccgtgaccctgttcctccgcttcttcgttgggcgcatctcctggaactgggccgcgtccccgccgcctttccgtccagcggcgttcctcctccccagctgtggaaaatgagcatcctcaagagaccccagaatccaacaatagcgtgtatacttccttccgactcggaccgatg

SEQ ID NO: 11781 - DNA, 203 bp, synthetic construct
  source 1..203: mol_type = other DNA
ggcgcgccagtccttttctgcaccctatcccgtgaccctgttcctccgcttcttcgttgggcgcatctcctggaactgggccgcgtcccctagagtccatttatatttcttcagatagctccccagctgtggaaaatgagcatcctcaagagaccccagaatccaacaatagcgtgtatacttccttccgactcggaccgatg

SEQ ID NO: 11782 - DNA, 203 bp, synthetic construct
  source 1..203: mol_type = other DNA
ggcgcgccagtcctttctggaaccctatcccgtgctatgtgcgtgtaccttcttcgttgggcgcatctcctggaactgggccgcgtccccgccgcctttccgtcatttcttcagatagctccccagctgtggaaaatgagcatcctcaagagaccccagaatccaacaatagcgtgtatacttccttccgactcggaccgatg

SEQ ID NO: 11783 - DNA, 203 bp, synthetic construct
  source 1..203: mol_type = other DNA
ggcgcgccagtcctctgaggctccctgggccaggacgcctccctcattaagcgggaggacacgaccccagggcattgtgggaacactggccaggctggactttgccttcctcctcgtcctttagccgggagcctgtctttgcttgcctttgcctttgaggctctgtggctgtggggctgagtggcatccgactcggaccgatg

SEQ ID NO: 11784 - DNA, 203 bp, synthetic construct
  source 1..203: mol_type = other DNA
ggcgcgccagtcctattagaaaccctgggccaggcttggcagagagggaagcgggaggacacgaccccagggcattgtgggaacactggccaggctggactttgccttcctcctcgtcaaggcatttacttgctgtctttgcttgcctttgcctttgaggctctgtggctgtggggctgagtggcatccgactcggaccgatg

SEQ ID NO: 11785 - DNA, 203 bp, synthetic construct
  source 1..203: mol_type = other DNA
ggcgcgccagtcctagaattgcccctgggccaggcttggcagagagggaagcgggaggacacgaccccagggcattgtgggaacactggccaggctggactttgccttcctcctcgtcctttagccgggagcctgtctttgcttgcctttgcctttgaggctctgtggctgtggactgcccatttgaacgactcggaccgatg

SEQ ID NO: 11786 - DNA, 203 bp, synthetic construct
  source 1..203: mol_type = other DNA
ggcgcgccagtcctccctcaagccctgggccaggcttggcagagagggaagcgggaggacacgaccccagggcattgtgggaacactggccaggctggactttgccttcctcctcgtcctttagccgggagcctgtctttgcttgcctttgcctttgaggctctgtggctgtggggctgagtggcatccgactcggaccgatg

SEQ ID NO: 11787 - DNA, 203 bp, synthetic construct
  source 1..203: mol_type = other DNA
ggcgcgccagtccttacttcttccctgggccaggcttggcagagagggaagcgggaggacacgaccccagggcattgtgggaacactggccaggctggactttgccttcctcctcgtcctttagccgggagcctgtctttgcttgcctttgcctttgagggcagagacggcccaggctgagtggcatccgactcggaccgatg

SEQ ID NO: 11788 - DNA, 203 bp, synthetic construct
  source 1..203: mol_type = other DNA
ggcgcgccagtcctgtccctatccctgggccaggcttggcagagagggaagcgggaggacacgaccccagggcattgtgggaacactggccaggctggactttgccttcctcctcgtcctttagccgggagctctcgggattggagctttgcctttgaggctctgtggctgtggggctgagtggcatccgactcggaccgatg

SEQ ID NO: 11789 - DNA, 203 bp, synthetic construct
  source 1..203: mol_type = other DNA
ggcgcgccagtccttctgcattccctgggccaggcttggcagagagggaagcgggaggacacgaccccagggcattgtgggaacactggcgtcagccactagcaccttcctcctcgtcctttagccgggagcctgtctttgcttgcctttgcctttgaggctctgtggctgtggggctgagtggcatccgactcggaccgatg

SEQ ID NO: 11790 - DNA, 203 bp, synthetic construct
  source 1..203: mol_type = other DNA
ggcgcgccagtcctaatccgagccctgggtccatcacagtataaaatctgcaagtagtgctattgttggaatcaccgtacctatttaggtttacgctccaagatcggtggatagcagccctatcaatatctaggagaactgtgctatgtttagaagattaggtagtctctaaacagaacaatttacctcgactcggaccgatg

SEQ ID NO: 11791 - DNA, 203 bp, synthetic construct
  source 1..203: mol_type = other DNA
ggcgcgccagtcctgtacgtaacccttgcgcaattagggaacaaatccctctcagcgaaggccgaaaagaggctagccatgcccttagtaggactagcataatgaggggggtagcaacagtggtgagttcgttggatggcttaagccctgagtacagggtagtcgtcagtggttcgacgccttggaatcgactcggaccgatg

SEQ ID NO: 11792 - DNA, 203 bp, synthetic construct
  source 1..203: mol_type = other DNA
ggcgcgccagtcctcaaccaccccgacaatcccacagtcgtgctcatctttgtggtgagtatgttgctattatgttgttgttctactggttgctgtggcttctttagttgttttgcatcttctattagaggttgttgtgaatcaactaaacttccttattacgacgttgaaaagatccacatacagtacgactcggaccgatg

SEQ ID NO: 11793 - DNA, 203 bp, synthetic construct
  source 1..203: mol_type = other DNA
ggcgcgccagtcctgggactatccgagcagccggtcctccagtggctcatagatgttcagcatgtgggctcaaaatgacagaggctcacaggacacctgcatgcccaaggcactccaccgtatgtgatcaacctggatccagcagtacatgaagttccctttcctgccaatattggtgatgaaatttacgactcggaccgatg

SEQ ID NO: 11794 - DNA, 203 bp, synthetic construct
  source 1..203: mol_type = other DNA
ggcgcgccagtccttcgtatgtccgagcagccggtcctccagtggctccgctccccgttctctgtgggctcaaaatgacagaggctcacaggacacctgcatgcccaaggcactccaccgtatgtgatcaacctggatccagcagtacatgaagttccctgggtcaatctcggaggtgatgaaatttacgactcggaccgatg

SEQ ID NO: 11795 - DNA, 203 bp, synthetic construct
  source 1..203: mol_type = other DNA
ggcgcgccagtccttgtcaagcccgagcagccggtcctccagtggctccgctccccgttctctgtgggctcaaaatgacagaggctcacaggacacctgcatgcccaaggcactccaccgtatgtgatcaacctggatccagcagtacatgaagttccctttcctgccaatattggtgatgaaatttacgactcggaccgatg

SEQ ID NO: 11796 - DNA, 203 bp, synthetic construct
  source 1..203: mol_type = other DNA
ggcgcgccagtcctagaaagacccgagcagccggtcctccagtggctccgctccccgttctctgtgggctcaaaatgacagaggctcacaggacacctgcatgcccaaggcactccaccgtatgtgatcaacctggatccagcagtctggttgccgggacttcctgccaatattggtgatgaaatttacgactcggaccgatg

SEQ ID NO: 11797 - DNA, 203 bp, synthetic construct
  source 1..203: mol_type = other DNA
ggcgcgccagtcctgacccaacccgattatccatcgccatttcccctggtagacctggcagatgaggctagaaataccccactggcgacagtgttctagcctgcgtggctgcctgcacaccctatgggtgtgaagccaaacaatggacaaggtgtgaagagccccgtgtgctcgctttgagtcctccgcgactcggaccgatg

SEQ ID NO: 11798 - DNA, 203 bp, synthetic construct
  source 1..203: mol_type = other DNA
ggcgcgccagtcctatgacaacccgcccaagcgttttactttgcaaaagtttctgataggcggagcatctagtttcaacttccttttgcagcaagttctttcctgcactaatcacaattcttggaagaggagaactggacgttgtgaacagagttagctggtaaatgtcctcttaaaagatccaaaaacgactcggaccgatg

SEQ ID NO: 11799 - DNA, 203 bp, synthetic construct
  source 1..203: mol_type = other DNA
ggcgcgccagtcctacgatatgccgcccgagtggatgagcgagcgagcatagccacttttcagccgcggcccggtcaccaaccaggaccgggatcacgtggctcccagggctgggtgaagaagccgccgggaccgagcgcgccggagaggaggggcgcctggggacagaaggcgacgtcccctgaaatcgactcggaccgatg

SEQ ID NO: 11800 - DNA, 203 bp, synthetic construct
  source 1..203: mol_type = other DNA
ggcgcgccagtcctaataggccccgcccgagtggatgagcgagcgagcgacttgtgaaacacgccgcggcccggtcaccaaccaggaccgaagagtaactctcgccagggctgggtgaagaagccgccgggaccgagcgcgccggagaggaggggcgcctggggacagaaggcgacgtcccctgaaatcgactcggaccgatg

SEQ ID NO: 11801 - DNA, 203 bp, synthetic construct
  source 1..203: mol_type = other DNA
ggcgcgccagtccttcatcatcccgcccgagtggatgagcgagcgagcgacttgtgaaacacgccgcggcccggtcaccaaccaggaccgggatcacgtggctcccagggctgggtgaagaagccgccgggaccgagcgcgccggagaggaggggcgcctctaccgtattcttaacgtcccctgaaatcgactcggaccgatg

SEQ ID NO: 11802 - DNA, 203 bp, synthetic construct
  source 1..203: mol_type = other DNA
ggcgcgccagtcctccttagagccgcccgagtggatgagcgagcgagcgacttgtgaaacacgccgcggcccggtcaccaaccaggaccgggatcacgtggctcccagggctgggtgaagaagccgccgggaccgagcgcgccggagaggaggggcgcctggggacagaaggcgacgtcccctgaaatcgactcggaccgatg

SEQ ID NO: 11803 - DNA, 203 bp, synthetic construct
  source 1..203: mol_type = other DNA
ggcgcgccagtcctcgctcgccccgcccgagtggatgagcgagcgagcgacttgtgaaacacgccgcggcccggtcaccaaccaggaccgggatcacgtggctcccagggctgggtgaagaagccgccgggaccgagcgcgccggatgcacatccatggaggggacagaaggcgacgtcccctgaaatcgactcggaccgatg

SEQ ID NO: 11804 - DNA, 203 bp, synthetic construct
  source 1..203: mol_type = other DNA
ggcgcgccagtcctcactttccccgcccgagtggatgagcgagcgagcgacttgtgaaacacgccgcggcccggtcaccaaccaggaccgggatcacgtggctcccagggctgggtgacagttggaatgctcccgagcgcgccggagaggaggggcgcctggggacagaaggcgacgtcccctgaaatcgactcggaccgatg

SEQ ID NO: 11805 - DNA, 203 bp, synthetic construct
  source 1..203: mol_type = other DNA
ggcgcgccagtcctgagtgacgccgcccgagtggatgagcgagcgagcgacttgtgaaacacgccgcggcccggtcaccaaccaggaccgggatcacgtggctcgtccattccacatgagaagccgccgggaccgagcgcgccggagaggaggggcgcctggggacagaaggcgacgtcccctgaaatcgactcggaccgatg

SEQ ID NO: 11806 - DNA, 203 bp, synthetic construct
  source 1..203: mol_type = other DNA
ggcgcgccagtccttggccctaccgcccgagtggatgagcgagcgagcgacttgtgaaacacgccgcggcccggtcgattgaagtttttcggatcacgtggctcccagggctgggtgaagaagccgccgggaccgagcgcgccggagaggaggggcgcctggggacagaaggcgacgtcccctgaaatcgactcggaccgatg

SEQ ID NO: 11807 - DNA, 203 bp, synthetic construct
  source 1..203: mol_type = other DNA
ggcgcgccagtcctcgttacccccgccggggcagcctcgtctagcgcgcgccgcgcagacgcccccggagtcgccagctaccgcagccctcgccgcccagtgcccttcggcctcggggttaaaaaggattcaggtctccgcgaagcgggaaagcgcggcggccgccgggattcgggcgccgcggcagccgactcggaccgatg

SEQ ID NO: 11808 - DNA, 203 bp, synthetic construct
  source 1..203: mol_type = other DNA
ggcgcgccagtcctggagatcgccgccttctccggtcccctcctcggagtcattttttcctgttccccctctgccgccctttcctcacgcaaatttaagcaactttctcttggaagcgaaggtgtcggctatgagccggagcctccttccttgaatttctccgtggaggacccgccgcgccccccggccgactcggaccgatg

SEQ ID NO: 11809 - DNA, 203 bp, synthetic construct
  source 1..203: mol_type = other DNA
ggcgcgccagtcctcgaaaggaccgccttctccggtcccctcctcggagtcattttttcctgttccccctctgccgccctttcctcacgccccgggtgaggcaaaggctcccctcataaaggtgtcggctatgagccggagcctccttccttgaatttctccgtggaggacccgccgcgccccccggccgactcggaccgatg

SEQ ID NO: 11810 - DNA, 203 bp, synthetic construct
  source 1..203: mol_type = other DNA
ggcgcgccagtcctagaggtccccgccttctccggtcccctcctcggagtcattttttcctgttccccctctgccgccctttcctcacgccccgggtgaggcaattctcttggaagcgaaggtgtcggctatgagccggagcctccttccttgaatttctccgtggaggacccgataatatgagttatcgactcggaccgatg

SEQ ID NO: 11811 - DNA, 203 bp, synthetic construct
  source 1..203: mol_type = other DNA
ggcgcgccagtccttcggcccaccgccttctccggtcccctcctcggataagaacgcgaagattccccctctgccgccctttcctcacgccccgggtgaggcaattctcttggaagcgaaggtgtcggctatgagccggagcctccttccttgaatttctccgtggaggacccgccgcgccccccggccgactcggaccgatg

SEQ ID NO: 11812 - DNA, 203 bp, synthetic construct
  source 1..203: mol_type = other DNA
ggcgcgccagtcctccgtccgcccgccttgtccgattggcccgcacgcagtggcgccggtcacgtggggggcgacgtttcgcgccaatttcggttggccggccacagtccaccgcgcggagattctcagcttccccaggagcaagacctctgagcccgccaagcgcggccgcactatgtcgtaagcaccgactcggaccgatg

SEQ ID NO: 11813 - DNA, 203 bp, synthetic construct
  source 1..203: mol_type = other DNA
ggcgcgccagtccttggtggttccgcgcgcgcgccccaggccccggcccgggcctcggttccagaagggagaggagcccgccaaggcgcgcaagagagcgggctgcctcgcagtccgagccggagagggagcagcctatttttttcccccggacgggcctccgaaaccatgaactttctgctctcttgcgactcggaccgatg

SEQ ID NO: 11814 - DNA, 203 bp, synthetic construct
  source 1..203: mol_type = other DNA
ggcgcgccagtcctgctagtatccgcgcgcgcgccccaggccccggcccgggcctcggttccagaagggagaggagcccgccaaggcgcgcaagagagcgggctgcctcgcagtccgagccggagagggagcgcgagccgcgccggccccggacgggccttgcccttgtccctttttctgctctcttgcgactcggaccgatg

SEQ ID NO: 11815 - DNA, 203 bp, synthetic construct
  source 1..203: mol_type = other DNA
ggcgcgccagtcctataccggcccgcgcgcgcgccccaggccccggcccgggcctcggttccagaagggagaggagcccgccaaggcgcgcaagagagcgggctgcctcgcagtccgagccggagagggagcgcgagccgcgccgggtgttagacctggaccgaaaccatgaactttctgctctcttgcgactcggaccgatg

SEQ ID NO: 11816 - DNA, 203 bp, synthetic construct
  source 1..203: mol_type = other DNA
ggcgcgccagtcctgattgtagccgcgcgcgcgccccaggccccggcccgggcctcggttcctccctcttagttcacccgccaaggcgcgcaagagagcgggctgcctcgcagtccgagccggagagggagcgcgagccgcgccggccccggacgggcctccgaaaccatgaactttctgctctcttgcgactcggaccgatg

SEQ ID NO: 11817 - DNA, 203 bp, synthetic construct
  source 1..203: mol_type = other DNA
ggcgcgccagtcctgagacgaaccgcgcgcgcgccccaggccccggccgtccaagtaaagttagaagggagaggagcccgccaaggcgcgcaagagagcgggctgcctcgcagtccgagccggagagggagcgcgagccgcgccggccccggacgggcctccgaaaccatgaactttctgctctcttgcgactcggaccgatg

SEQ ID NO: 11818 - DNA, 203 bp, synthetic construct
  source 1..203: mol_type = other DNA
ggcgcgccagtcctcccttgcaccgcggccgcctcccgccagctcgccaatacatgtttttggcgcgtgagctcaggcgtccccgccccagcttttctcggaaccatgaaccccaactgcgcccggtgcggcaagatcgtgtatcccacggagaaggtgaactgtctggataagttctggcataaagccgactcggaccgatg

SEQ ID NO: 11819 - DNA, 203 bp, synthetic construct
  source 1..203: mol_type = other DNA
ggcgcgccagtcctttcttactccgcggccgcctcccgccagctcgcctcggggaacaggacgcgcgtgagctcaggcgtccccgccccagcttttctcggaaccatgaaccccaactgcgcccggtgcggcaagatcgtgtatcccacggagaaggtgaactgtctggataagttctggcataaagccgactcggaccgatg

SEQ ID NO: 11820 - DNA, 203 bp, synthetic construct
  source 1..203: mol_type = other DNA
ggcgcgccagtcctaccatcaaccgcggccgcctcccgccagctcgcctcggggaacaggacgcgcgtgagctcaggcgtccccgccccagcttttctcggaacggactctgagccaagcgcccggtgcggcaagatcgtgtatcccacggagaaggtgaactgtctggataagttctggcataaagccgactcggaccgatg

SEQ ID NO: 11821 - DNA, 203 bp, synthetic construct
  source 1..203: mol_type = other DNA
ggcgcgccagtcctcctaaaggccgcggtcggcggcagcgctctcctaagctctcgcggctgcgcttcggtcccggtatgaattgtttgccggggtagtgggtgctcctcggccccggacattgcaagccccagaaggcaagactaactcggtgttgctcctcccggcgctgacttcgaggcccggctcgactcggaccgatg

SEQ ID NO: 11822 - DNA, 203 bp, synthetic construct
  source 1..203: mol_type = other DNA
ggcgcgccagtcctagcccagaccgcggtcggcggcagcgctctcctaagctctcgcggctgtaaagtatagagtcacccgggccacccacggggtagtgggtgctcctcggccccggacattgcaagccccagaaggcaagactaactcggtgttgctcctcccggcgctgacttcgaggcccggctcgactcggaccgatg

SEQ ID NO: 11823 - DNA, 203 bp, synthetic construct
  source 1..203: mol_type = other DNA
ggcgcgccagtcctctgtgaagccgcggtcggcgtagttttcgctgctagctctcgcggctgcgcttcggtcccggacccgggccacccacggggtagtgggtgctcctcggccccggacattgcaagccccagaaggcaagactaactcggtgttgctcctcccggcgctgacttcgaggcccggctcgactcggaccgatg

SEQ ID NO: 11824 - DNA, 203 bp, synthetic construct
  source 1..203: mol_type = other DNA
ggcgcgccagtcctaacttgtcccgctgaagacctcggcctgttgttgtgaatcgccagacctttgtaacacccggaagtctgaagcatgtgtttgatgatctcagaggctcagtatccttgtcctgggttggagatagcactggggtcattctagtcttgactaccttccatggttttactaggtaacgactcggaccgatg

SEQ ID NO: 11825 - DNA, 203 bp, synthetic construct
  source 1..203: mol_type = other DNA
ggcgcgccagtcctcttccactccgctgaagacctcggcctgttgttgtgaatcgccagacctttgtaacacccggaagtctgaagcatgtgtttgatgatctcagaggctcagtatccttgtcctgggttggagatagcactggggtcattctagtcttgactaccttccatgtaccactggtaattcgactcggaccgatg

SEQ ID NO: 11826 - DNA, 203 bp, synthetic construct
  source 1..203: mol_type = other DNA
ggcgcgccagtcctgtcctacaccgctgaagacctcggcctgttgttgtgaatcgccagacctttgtaacacccggaagtctgaagcatgtgtttgatgatctcgtgtcgattcaccgcttgtcctgggttggagatagcactggggtcattctagtcttgactaccttccatgtaccactggtaattcgactcggaccgatg

SEQ ID NO: 11827 - DNA, 203 bp, synthetic construct
  source 1..203: mol_type = other DNA
ggcgcgccagtcctaagtgctcccgctgcaggtgtgcggcccagtccgagacagcagatgaggagactgtccttcctgtttcgcagatgaggaaactgaggcttagagaagtttggcaaattggctaagttcaggggcggtgactagggattagtgatatgcttttctaaagagtagaaaagtcgaagcgactcggaccgatg

SEQ ID NO: 11828 - DNA, 203 bp, synthetic construct
  source 1..203: mol_type = other DNA
ggcgcgccagtcctacatggagccgctgcaggtgtgcggcccagtccgagacagcagatgaggagactgtccttcctgtttcgcagatgaggaaactgaggcttagagaagtttggcaaattggctaagttcctacagctaattgtactgccccatgcccgcttttctaaagagtagaaaagtcgaagcgactcggaccgatg

SEQ ID NO: 11829 - DNA, 203 bp, synthetic construct
  source 1..203: mol_type = other DNA
ggcgcgccagtccttcacatccccgctgcaggtgtgcggcccagtccgagacagcagatgaggagactgtccttcctgtttcgcagatgaggaaactgaggcttagagaagtttggcaccccttactcaacactacagctaattgtgggattagtgatatgcttttctaaagagtagaaaagtcgaagcgactcggaccgatg

SEQ ID NO: 11830 - DNA, 203 bp, synthetic construct
  source 1..203: mol_type = other DNA
ggcgcgccagtcctgacagaagccgcttccagctctgttcttggcaagaagattctaatgcccaggaacatggcgctgctctgggggctcctggtgctcagctggtcctgcctgcaaggcccctgctccgtgttctcccctgtgagcgccatggagcccttgggccggcagctaactagcgggccgaacgactcggaccgatg

SEQ ID NO: 11831 - DNA, 203 bp, synthetic construct
  source 1..203: mol_type = other DNA
ggcgcgccagtcctcgatgcgcccggcacccagatcgcgcgagacagcggaaggagcaagagtgggaggcgcgcgcggaggccgcgacggacgcaagatggcgattaactggcgtaaactcgtcaatggccagcaaggaggggggtccgagccggcggcggcggcggcagtggtggcagcgggagacacgactcggaccgatg

SEQ ID NO: 11832 - DNA, 203 bp, synthetic construct
  source 1..203: mol_type = other DNA
ggcgcgccagtcctggctcctgccggcagtagagagcggactccagccggcggaccctgcagccctcgcctgggacagcggcgcgctgggcaggcgcccaagagagcatcgagcagcggaacccgcgaagccggcccgcagccgcgacccgcgcagcctgccgctctcccgccgatacctttcaactacgactcggaccgatg

SEQ ID NO: 11833 - DNA, 203 bp, synthetic construct
  source 1..203: mol_type = other DNA
ggcgcgccagtcctatccgcgtccggcccccaagtcccgcgcgggccgcgagaatagatcaagtcgggccagctgagctatcccgtcagaccgcgccagtttgaatgaaagctctacaagatggcggcggtcggggccgaggcgcgaggagcttggtgtgtgccttgcctagtttcacttgatactctcgactcggaccgatg

SEQ ID NO: 11834 - DNA, 203 bp, synthetic construct
  source 1..203: mol_type = other DNA
ggcgcgccagtcctccgaacttccggcccccaagtcccgcgcgggccggccaggggcggggcgtcgggccagctgagctatcccgtcagaccgcgccagtttgaatgaaagctctacaagatggcggcggtcggggccgaggcgcgaggagcttggtgtgcttgcctaggttggtcacttgatactctcgactcggaccgatg

SEQ ID NO: 11835 - DNA, 203 bp, synthetic construct
  source 1..203: mol_type = other DNA
ggcgcgccagtcctaatgagaaccggcccccaagtcccgcgcgggccggccaggggcggggcgtcgggccagctgagctatcccgtcagaccgcgccagtttgaatgaaagctctacaagatggcggcggtcggggccgaggcgcggcactgactaacgctgccttgcctagtttcacttgatactctcgactcggaccgatg

SEQ ID NO: 11836 - DNA, 203 bp, synthetic construct
  source 1..203: mol_type = other DNA
ggcgcgccagtcctgttcaattccggcccccaagtcccgcgcgggccggccaggggcggggcgtcgggccagctgagctatcccgtcagaccgcgccagtttgaatgaaagctctacaagatggcggcggtcttaattcttttcataggagcttggtgtgtgccttgcctagtttcacttgatactctcgactcggaccgatg

SEQ ID NO: 11837 - DNA, 203 bp, synthetic construct
  source 1..203: mol_type = other DNA
ggcgcgccagtcctgatgaatcccggcccccaagtcccgcgcgggccggccaggggcggggcgtcgggccagctgagctatcccgtcagatgctttggcaaacgatgaaagctctacaagatggcggcggtcggggccgaggcgcgaggagcttggtgtgtgccttgcctagtttcacttgatactctcgactcggaccgatg

SEQ ID NO: 11838 - DNA, 203 bp, synthetic construct
  source 1..203: mol_type = other DNA
ggcgcgccagtcctcatcccacccggccccgcagccccagcgccttccctgcgccctggtggggacagcagccaggaggacccggccctgccaagcgcctccgaccccgatcatgtttgggccccgaaccccgcgtggcgcccagcctggaagacccggcgggtaccccggccgtgggcgcgctcacccgactcggaccgatg

SEQ ID NO: 11839 - DNA, 203 bp, synthetic construct
  source 1..203: mol_type = other DNA
ggcgcgccagtcctgtattcacccggccccgcagccccagcgccttccctgcgccctggtggggacagcagccaggaggacccggccctgccaagcgcctccgattggaggagcccgcgggccccgaaccccgcgtggcgcccagcaacacctggatcttgggtaccccggccgtgggcgcgctcacccgactcggaccgatg

SEQ ID NO: 11840 - DNA, 203 bp, synthetic construct
  source 1..203: mol_type = other DNA
ggcgcgccagtcctagttaagaccggccccgcagccccagcgccttccctgcgccctggtggggacagcagccaggaggacccggccctgccaagcgcctccgattggaggagcccgcgggccccgaaccccgcgtggcgcccagcctggaagacgtatgcatgacagttcagtagggcgcgctcacccgactcggaccgatg

SEQ ID NO: 11841 - DNA, 203 bp, synthetic construct
  source 1..203: mol_type = other DNA
ggcgcgccagtcctcctctggaccgggaggcaggacagagcggggaaagtgcgcatgcgctgactgagaagaaatatggcttcacagaagcagatggaggtagtgaccaaaggaactgggttccggcgccgccccaagaccatcactggtcttgcggggacctgcgagctgctcagaggaggagatgccgactcggaccgatg

SEQ ID NO: 11842 - DNA, 203 bp, synthetic construct
  source 1..203: mol_type = other DNA
ggcgcgccagtccttcggcgtcccgggaggcaggacagagcggggaaagtgcgcatgcgctgactgagtcctcccatggcttcacagaagcagatggaggtagtatttccgttgttatggttccggcgccgccccaagaccatcacttacaccccggggacctgcgagctgctcagaggaggagatgccgactcggaccgatg

SEQ ID NO: 11843 - DNA, 203 bp, synthetic construct
  source 1..203: mol_type = other DNA
ggcgcgccagtcctgcttgaggccgggcgagcagagctgcgctgcgggcgtcctgggaagggagatccggagcgaatagggggcttcgcctctggcccagccctcccgctgatcccccagccaggggtccgcaacccttgccgcatccacgaaactttgcccatagcagcgggcgggcactttgcactcgactcggaccgatg

SEQ ID NO: 11844 - DNA, 203 bp, synthetic construct
  source 1..203: mol_type = other DNA
ggcgcgccagtcctgttcgcgaccgggcgagcagagctgcgctgcgggcgtcctgggaagggagatccggagcgaatagggggcttcgcctctggcccagccctcccgctgatccccccaggtcttacgtttaacccttgccgcatccacgaaactttgcccatagcagcgggcgggcactttgcactcgactcggaccgatg

SEQ ID NO: 11845 - DNA, 203 bp, synthetic construct
  source 1..203: mol_type = other DNA
ggcgcgccagtccttgctcaaaccgggcgagcaggctataaggcgatacgtcctgggaagggagatccggagcgaatagggggcttcgcctctggcccagccctcccgctgatcccccagccaggggtccgcaacccttgccgcatccacgaaactttgcccatagcagcgggcgggcactttgcactcgactcggaccgatg

SEQ ID NO: 11846 - DNA, 203 bp, synthetic construct
  source 1..203: mol_type = other DNA
ggcgcgccagtccttcaactggccggggcttagggaaggccgagccagaggcacggcgcctcgtcaaaggggctgcctggaggaggcagcctgtcagctggtgcatcagaggctgtggccaggccagctgggctcggggagcgccagcctgagaggagcgcgtgagcgtcgcgggagcctcgggcacccgactcggaccgatg

SEQ ID NO: 11847 - DNA, 203 bp, synthetic construct
  source 1..203: mol_type = other DNA
ggcgcgccagtcctaggccaagccggggcttagggaaggccgagccagcctgggtcaaagaagtcaaaggggctgcctggaggaggcagcctgtcagctggtgcatcagaggctgtggccaggccagctgggctcggggagcgccagcctgagaggagcgtcacccaaggaaccgagcctcgggcacccgactcggaccgatg

SEQ ID NO: 11848 - DNA, 203 bp, synthetic construct
  source 1..203: mol_type = other DNA
ggcgcgccagtcctgcgttctgccggggcttagggaaggccgagccagcctgggtcaaagaatgtgtctcaagatactggaggaggcagcctgtcagctggtgcatcagaggctgtggccaggccagctgggctcggggagcgccagcctgagaggagcgcgtgagcgtcgcgggagcctcgggcacccgactcggaccgatg

SEQ ID NO: 11849 - DNA, 203 bp, synthetic construct
  source 1..203: mol_type = other DNA
ggcgcgccagtcctctgtcagtccgggtcatgggagaaaccctgcgacaaaacctcctccttttccaagcggctgccgaagatggcggaggtgcaggtcctggtgcttgatggtcgaggccatctcctgggccgcctggcggccatcgtggctaaacagtgaagtacctggctttcctccgcaagcggcgactcggaccgatg

SEQ ID NO: 11850 - DNA, 203 bp, synthetic construct
  source 1..203: mol_type = other DNA
ggcgcgccagtcctgtcgatccccggtcccttttcgacaaggacagttccaaatcggaagcttgcttaacacagttctaacagtttgtttgaatagagagcagatctctggaaaaatgaaccaacgaaaaaaggtggttagaccacctttcaatatgctgaaacgcgagagaaaccgcgtatcaaccccgactcggaccgatg

SEQ ID NO: 11851 - DNA, 203 bp, synthetic construct
  source 1..203: mol_type = other DNA
ggcgcgccagtcctgtctacttccggttcggtcagctgcgcgcttcgcttctgcggctcagcctccagcccaggtggcgctgtggaccctgcagccgcggagcgaggcagcggggcggctccgtgaccacggcgggcggagcctaggactgagggcgatggctgctgtggccgtggctgttcgcgaggcgactcggaccgatg

SEQ ID NO: 11852 - DNA, 203 bp, synthetic construct
  source 1..203: mol_type = other DNA
ggcgcgccagtcctacactctaccgtaccttggctccgaggacgtggtgaaggagctgaagaaggctctgtgcaataagggggccgtcaatgataggctgcgctaccggaatgtcatccagcgagtgattagatctggctctcctggccatcaatacgctgtgcaaagactgctcagaccccaatccacgactcggaccgatg

SEQ ID NO: 11853 - DNA, 203 bp, synthetic construct
  source 1..203: mol_type = other DNA
ggcgcgccagtcctgagtacctccgtaccttggctccgaggacgtggtgaaggagctgaagaaggctctgtgcaatcctcacattcaagctgataggctgcgctaccggaatgtcatcatctagtgcccggtatctggctctcctggccatcaatacgctgtgcaaagactgctcagaccccaatccacgactcggaccgatg

SEQ ID NO: 11854 - DNA, 203 bp, synthetic construct
  source 1..203: mol_type = other DNA
ggcgcgccagtccttccaaggcccgtaccttggctccgaggacgtggtgaaggagctgaagaaggctctgtgcaatcctcacattcaagctgataggctgcgctaccggaatgtcatccagcgagtgattagatctggctctcctggccatcaatacgctgtgcaaagactgctggccaatgcgcagccgactcggaccgatg

SEQ ID NO: 11855 - DNA, 203 bp, synthetic construct
  source 1..203: mol_type = other DNA
ggcgcgccagtcctgttatccaccgtaccttggctccgaggacgtggtgaaggagctgaagaaggctctgtgcaatcctcacattcaagctgataggctgcgctaccggaatgtcatccagcgagtgattagatctggctctcctggccatcaatacgcttcttttgccgctagcagaccccaatccacgactcggaccgatg

SEQ ID NO: 11856 - DNA, 203 bp, synthetic construct
  source 1..203: mol_type = other DNA
ggcgcgccagtcctttcgctttccgtaccttggctccgaggacgtggtgaaggagctgaagaaggctctgtgcaatcctcacattcaagctgataggctgcgctaccggaatgtcatccagcgagtgattagccggtctgtcgaacgccatcaatacgctgtgcaaagactgctcagaccccaatccacgactcggaccgatg

SEQ ID NO: 11857 - DNA, 203 bp, synthetic construct
  source 1..203: mol_type = other DNA
ggcgcgccagtcctgctgggcgccgtcacgtactcgaggctagctggcccgatttctcctccgggtgatgcttttcctagattattctctgatttggtcgtattgggcgcctggtcaccagggctgcttttaactctggtaaagtggatattgttgccatcaatgaccccttcattgacctcaactaccgactcggaccgatg

SEQ ID NO: 11858 - DNA, 203 bp, synthetic construct
  source 1..203: mol_type = other DNA
ggcgcgccagtccttagcctttccgtcctttcaggtgtgtcgtaacgggcaactctgcagcggaaccgactactttgggtgtccgtgtttcattttattcctatactggctgcttatggtgacaattgagagattgttaccatatagctattggattggccatccggtgaccaatagagctattatatcgactcggaccgatg

SEQ ID NO: 11859 - DNA, 203 bp, synthetic construct
  source 1..203: mol_type = other DNA
ggcgcgccagtcctcacatacgccgtggatccacgtgctttttcttgtccaatgggagccggctcccgggcgcgaaggggcggggaggaaaggaacgactgtgcgtgacgaaatattcgggcgggacctgcaacgtccgacagaacgaggggacgtaacggaggcaggttggagccgctgccgtcgcccgactcggaccgatg

SEQ ID NO: 11860 - DNA, 203 bp, synthetic construct
  source 1..203: mol_type = other DNA
ggcgcgccagtcctctgatattccgtggatccacgtgctttttcttgtccaatgggagccggctcccgggcgcgaaggggcggggaggaaaggaacgactgtgctacgttgccagaaggggcgggacctgcaacgtccgacagaactcactagaagtttagaggcaggttggagccgctgccgtcgcccgactcggaccgatg

SEQ ID NO: 11861 - DNA, 203 bp, synthetic construct
  source 1..203: mol_type = other DNA
ggcgcgccagtcctttacaatgccgtggatccacgtgctttttcttgtccaatgggagccgggcggaattgagactggggcggggaggaaaggaacgactgtgctacgttgccagaaggggcgggacctgcaacgtccgacagaacgaggggacgtaacggaggcaggttggagccgctgccgtcgcccgactcggaccgatg

SEQ ID NO: 11862 - DNA, 203 bp, synthetic construct
  source 1..203: mol_type = other DNA
ggcgcgccagtcctacaactctccgtggtaaaggtggaaaaggtttgggtaagggaggagctaagcgtcatcgcaaggttttgcgcgataacatccagggcatcactaagccagctatccggcgccttgctcgtcgcggcggtgtcaagcgaatttctggccttatctatgagggataggccttctcacgactcggaccgatg

SEQ ID NO: 11863 - DNA, 203 bp, synthetic construct
  source 1..203: mol_type = other DNA
ggcgcgccagtcctatgcggcgccgtggtaaaggtggaaaaggtttgggtaagggaggagctaagcgtcatcgcaaggttttgcgcgataacatccagggcatcactaagccagctatgttttattacatcggtcgcggcggtgtcaagcgaatttctggccttatctatgaggagactcgtggtgttcgactcggaccgatg

SEQ ID NO: 11864 - DNA, 203 bp, synthetic construct
  source 1..203: mol_type = other DNA
ggcgcgccagtccttagtgaatccgtggtaaaggtggaaaaggtttgggtaagggaggagctgttatcgggactctggttttgcgcgataacatccagggcatcactaagccagctatccggcgccttgctcgtcgcggcggtgtcaagcgaatttctggccttatctatgaggagactcgtggtgttcgactcggaccgatg

SEQ ID NO: 11865 - DNA, 203 bp, synthetic construct
  source 1..203: mol_type = other DNA
ggcgcgccagtcctgctattggcctaaatgaggtagatgctacgtggacgagggcatgccaagacacaccttaaccctagcgggggtcgctagggtgaaatcacaccacgtgatgggagtacgacctgatagggcgctgcagaggcccactattaggctagtataaaaatctctgctgtacatggcaccgactcggaccgatg

SEQ ID NO: 11866 - DNA, 203 bp, synthetic construct
  source 1..203: mol_type = other DNA
ggcgcgccagtcctctgccgggcctactttcagaactcacatcctttattcaggcctcggtgggagagcagggggaggggagcaccatcttgcaacacatcagcacccttgagagcatatatcagagggaccccctgaagctggtggccactttcagacaaatacttcaaggagagaaaaaagctgttcgactcggaccgatg

SEQ ID NO: 11867 - DNA, 203 bp, synthetic construct
  source 1..203: mol_type = other DNA
ggcgcgccagtcctctaaatgtcctactttcagacactgtccagcaccagggcaaaggccgtggagagcagggggaggggagcaccatcttgcaacacatcagcacccttgagagcatatatcagagggaccccctgaagctggtggccactttcagacaaatacttcaaggagagaaaaaagctgttcgactcggaccgatg

SEQ ID NO: 11868 - DNA, 203 bp, synthetic construct
  source 1..203: mol_type = other DNA
ggcgcgccagtcctctgctcctcctactttcagacactgtccagcaccttcaggcctcggtgcccataacattaagggggagcaccatcttgcaacacatcagcacccttgagagcatatatcagagggaccccctgaagctggtggccactttcagacaaatacttcaaggagagaaaaaagctgttcgactcggaccgatg

SEQ ID NO: 11869 - DNA, 203 bp, synthetic construct
  source 1..203: mol_type = other DNA
ggcgcgccagtccttatccatgcctactttcagacactgtccagcaccttcaggcctcggtgggagagcagggggaggggagcaccatcttgcaacacatcagcacccttgagagcatatatcagagggaccccctgaagctggtgagacaggatcacgcaatacttcaaggagagaaaaaagctgttcgactcggaccgatg

SEQ ID NO: 11870 - DNA, 203 bp, synthetic construct
  source 1..203: mol_type = other DNA
ggcgcgccagtcctcttatacccctactttcagacactgtccagcaccttcaggcctcggtgggagagcagggggaggggagcaccatcttgcaacacatcagcacccttgagagcatatatcagagggaccccctgaagctggtggccactttcagacaaatacttcaaggagagaaaaaagctgttcgactcggaccgatg

SEQ ID NO: 11871 - DNA, 203 bp, synthetic construct
  source 1..203: mol_type = other DNA
ggcgcgccagtcctaagccggtcctactttcagacactgtccagcaccttcaggcctcggtgggagagcagggggaggggagcaccatcttgcaacacatcagcacccttgagagcatatatcagagggaccccctgaagctggtggccactttcagacaaatacttcaaggagttgggtttatgccgcgactcggaccgatg

SEQ ID NO: 11872 - DNA, 203 bp, synthetic construct
  source 1..203: mol_type = other DNA
ggcgcgccagtcctccgcaggtcctagcacgcggctatgggtgtgaagccaaacaatggacaaggtgtgaagagccccgtgtgctcgctttgagtcctccggcccctgaatgtggctaaccttaaccctgcagctagagcacgtaacccaatgtgtatctagtcgtaatgagcaattgcgggatgggacgactcggaccgatg

SEQ ID NO: 11873 - DNA, 203 bp, synthetic construct
  source 1..203: mol_type = other DNA
ggcgcgccagtcctggaacgcccctatttatgctgacagctataggctaacgcccataaagagcagctggggtattccttaggggctgagtctcctggtatccctaagactgggcttggcttaggcactgagattccttctggaaccccaacgccttcgagacggattccgacctgccggctggatggcgactcggaccgatg

SEQ ID NO: 11874 - DNA, 203 bp, synthetic construct
  source 1..203: mol_type = other DNA
ggcgcgccagtcctatatctaacctatttatgctgacagctataggctctgcagggccccagctgcgccatcgtaaccttaggggctgagtctcctggtatccctaagactgggcttggcttaggcactgagattccttctggaaccccaacgccttcgagacggattccgacctgccggctggatggcgactcggaccgatg

SEQ ID NO: 11875 - DNA, 203 bp, synthetic construct
  source 1..203: mol_type = other DNA
ggcgcgccagtccttacaggcacctatttatgctgacagctataggctctgcagggccccaggcagctggggtattccttaggggctgagcgcgtgacccggagtaagactgggcttggcttaggcactgagattccttctggaaccccaacgccttcgagacggattccgacctgccggctggatggcgactcggaccgatg

SEQ ID NO: 11876 - DNA, 203 bp, synthetic construct
  source 1..203: mol_type = other DNA
ggcgcgccagtcctatttatgtcctatttatgctgacagctataggctctgcagggccccaggcagctggggtattccttaggggctgagtctcctggtatccccgtactgatcgcctgcttaggcactgagattccttctggaaccccaacgccttcgagacggattccgacctgccggctggatggcgactcggaccgatg

SEQ ID NO: 11877 - DNA, 203 bp, synthetic construct
  source 1..203: mol_type = other DNA
ggcgcgccagtccttggttcaacctatttatgctgacagctataggctctgcagggccccaggcagctggggtattccttaggggctgagtctcctggtatccctaagactgggcttgctaactaagacccaattccttctggaaccccaacgccttcgagacggattccgacctgccggctggatggcgactcggaccgatg

SEQ ID NO: 11878 - DNA, 203 bp, synthetic construct
  source 1..203: mol_type = other DNA
ggcgcgccagtcctcacgcctccctatttatgctgacagctataggctctgcagggccccaggcagctggggtattccttaggggctgagtctcctggtatccctaagactgggcttggcttaggcactgagattccttctggaaccccaacgccttcgacttaaccgggagtgtgccggctggatggcgactcggaccgatg

SEQ ID NO: 11879 - DNA, 203 bp, synthetic construct
  source 1..203: mol_type = other DNA
ggcgcgccagtccttagatttccctatttatgctgacagctataggctctgcagggccccaggcagctggggtattccttaggggctgagtctcctggtatccctaagactgggcttggcttaggcactgagattccttctggaaccccaacgccttcgagacggattccgaccctattctcattgaacgactcggaccgatg

SEQ ID NO: 11880 - DNA, 203 bp, synthetic construct
  source 1..203: mol_type = other DNA
ggcgcgccagtcctgggtccgacctcagcggcttccgtcctgcagcaagtccggaagaaggtccgggggctggagtcctgggacctagctcgggaccggcctggagatggagttcgactgcgagggcctgagacggctgcttggcaagtacaagttcagggacctaactgtggagtcctactaatgatcgactcggaccgatg

SEQ ID NO: 11881 - DNA, 203 bp, synthetic construct
  source 1..203: mol_type = other DNA
ggcgcgccagtcctggcgggcacctcagcggcttccgtcctgcagcaagtccggaagaaggtccgggggctggagtcctgggacctagctcgggaccggcctggagatggagttcgactgcgagggcctgagcatttgaaggatggagtacaagttcagggacctaactgtggaagaactaaggaatgcgactcggaccgatg

SEQ ID NO: 11882 - DNA, 203 bp, synthetic construct
  source 1..203: mol_type = other DNA
ggcgcgccagtcctgcttaacacctcagcggctttatgaagtgcagctgtccggaagaaggtccgggggctggagtcctgggacctagctcgggaccggcctggagatggagttcgactgcgagggcctgagacggctgcttggcaagtacaagttcagggacctaactgtggaagaactaaggaatgcgactcggaccgatg

SEQ ID NO: 11883 - DNA, 203 bp, synthetic construct
  source 1..203: mol_type = other DNA
ggcgcgccagtcctggttgacccctctgagctattccagaagtagtgaggaggcttttttggaggcctaggcttttgcaaaaagctttgcaaagatggataaagcccctggtcagttcgaatctttgcagctaatggaccttctaggtcttgaaaggagtgcctgggggaatattcctctgatgagaacgactcggaccgatg

SEQ ID NO: 11884 - DNA, 203 bp, synthetic construct
  source 1..203: mol_type = other DNA
ggcgcgccagtccttctagttgcctctgagctattccagaagtagtgaggaggcttttttggaggcctaggcttttgcaaaaagctttgcaaagatggataaagttttaaacagagaggaatctttgcagctaatggaccttctagactggtccccttacgcctgggggaatattcctctgatgagaacgactcggaccgatg

SEQ ID NO: 11885 - DNA, 203 bp, synthetic construct
  source 1..203: mol_type = other DNA
ggcgcgccagtcctccacaccacctctgtagggaagccaagaatgtccaggaggtaccccttcctctcggaagggatctgacctggagacacatcacacgtgctaattctagagatgggtgtttaaaaattgttacagcttccccgaaccaagtggtcttggttttcactttttatcacactgtcaatcgactcggaccgatg

SEQ ID NO: 11886 - DNA, 203 bp, synthetic construct
  source 1..203: mol_type = other DNA
ggcgcgccagtcctgatggtgacctctgtagggaagccaagaatgtccaggaggtaccccttcctctcggaagggatctgacctggagacacatcacacgtgctttacacctgtgctttgtaggtgtttcgcttacagcttccccgaaccaagtggtcttggttttcactttttatcacactgtcaatcgactcggaccgatg

SEQ ID NO: 11887 - DNA, 203 bp, synthetic construct
  source 1..203: mol_type = other DNA
ggcgcgccagtcctgatcttatcctctgtagggaagccaagaatgtccaggaggtaccccttgtatatcatgaacctctgacctggagacacatcacacgtgctttacacctgtgcttgtgtttaaaaattgttacagcttccccgaaccaagtggtcttggttttcactttttatcacactgtcaatcgactcggaccgatg

SEQ ID NO: 11888 - DNA, 203 bp, synthetic construct
  source 1..203: mol_type = other DNA
ggcgcgccagtcctgactaatacctctgtagggactttgtactgactgaggaggtaccccttcctctcggaagggatctgacctggagacacatcacacgtgctttacacctgtgcttgtgtttaaaaattgttacagcttccccgaaccaagtggtcttggttttcactttttatcacactgtcaatcgactcggaccgatg

SEQ ID NO: 11889 - DNA, 203 bp, synthetic construct
  source 1..203: mol_type = other DNA
ggcgcgccagtcctcgcgctaacctgaagcggccgggccaggccctgcctcgatcctcagctcgtcctccccgccccgcaccggccttcactctggagcggccccggcagccgcagcaggggcggcggcggcggatcgaggagctccgtgtagaaggggcggagaggctgctgcagtcccgggacaggcgactcggaccgatg

SEQ ID NO: 11890 - DNA, 203 bp, synthetic construct
  source 1..203: mol_type = other DNA
ggcgcgccagtccttagtttctcctgaagcggccgggccaggccctgcctcgatcctcagctcgtcctccccgccccgcaccggccttcactctggagcggccccggcagccgcagcaggggcggcggcggcggatcgaggagctctccaggtcgtcccgggagaggctgctgctccagaactctgctcgactcggaccgatg

SEQ ID NO: 11891 - DNA, 203 bp, synthetic construct
  source 1..203: mol_type = other DNA
ggcgcgccagtcctggccaaatcctgaagcggccgggccaggccctgcctcgatcctcagctcgtcctccccgccccgcaccggccttcactctggagcggccccggcagccgcagcatacaaacattgcatggatcgaggagctctccaggtcgtcccgggagaggctgctgcagtcccgggacaggcgactcggaccgatg

SEQ ID NO: 11892 - DNA, 203 bp, synthetic construct
  source 1..203: mol_type = other DNA
ggcgcgccagtcctttctgttgcctgaagcggccgggccaggccctgcctcgatcctcagcttagatcttgtagatcgcaccggccttcactctggagcggccccggcagccgcagcaggggcggcggcggcggatcgaggagctctccaggtcgtcccgggagaggctgctgcagtcccgggacaggcgactcggaccgatg

SEQ ID NO: 11893 - DNA, 203 bp, synthetic construct
  source 1..203: mol_type = other DNA
ggcgcgccagtccttgaagagtcctgaatgcggctaaccttaaccctagagccttatgccacgatccagtggttgtaaggtcgtaatgagcaattccgggacgggaccgactactttgggtgtccgtgtttccgcacaacaacgtgattgtcttatggtcacagcatatatatacatatactgtgatccgactcggaccgatg

SEQ ID NO: 11894 - DNA, 203 bp, synthetic construct
  source 1..203: mol_type = other DNA
ggcgcgccagtcctcttgacagcctgaatgcggctaaccttaaccctagagccttatgccacgatccagtggttgtaaggtcgtaatgagcaattccgggacgggaccgactactttgggtgtccgtgtttctcatttttcttcatattgtcttatggtcacagcatatatatacatatactgtgatccgactcggaccgatg

SEQ ID NO: 11895 - DNA, 203 bp, synthetic construct
  source 1..203: mol_type = other DNA
ggcgcgccagtcctgtcaaatgcctgaatgcggctaaccttaaccctagagccttatgccacgatccagtggttgtaaggtcgtaatgagcaattccgggacgggaccgactactttgggtgtccgtgtttctcatttttcttcatattgtcttatggtctgcctcgcatgtctcatatactgtgatccgactcggaccgatg

SEQ ID NO: 11896 - DNA, 203 bp, synthetic construct
  source 1..203: mol_type = other DNA
ggcgcgccagtccttacgccctcctgaatgcggctaaccttaaccctagagccttatgccacgatccagtggttgtaaggtcgtaatgagcaattccgggacgggaccgactactttgggtgtccgtgtttctcatttttcttcatgacagtaatcctagacagcatatatatacatatactgtgatccgactcggaccgatg

SEQ ID NO: 11897 - DNA, 203 bp, synthetic construct
  source 1..203: mol_type = other DNA
ggcgcgccagtcctgacctgaacctgaatgcggctaaccttaaccctagagccttatgccacgatccagtggttgtaaggtcgtaatgaggtggatacacctatgaccgactactttgggtgtccgtgtttctcatttttcttcatattgtcttatggtcacagcatatatatacatatactgtgatccgactcggaccgatg

SEQ ID NO: 11898 - DNA, 203 bp, synthetic construct
  source 1..203: mol_type = other DNA
ggcgcgccagtcctagcacttgcctgaatgcggctaaccttaaccctatgaagagcaatgcagatccagtggttgtaaggtcgtaatgagcaattccgggacgggaccgactactttgggtgtccgtgtttctcatttttcttcatattgtcttatggtcacagcatatatatacatatactgtgatccgactcggaccgatg

SEQ ID NO: 11899 - DNA, 203 bp, synthetic construct
  source 1..203: mol_type = other DNA
ggcgcgccagtcctgcgcaacgcctgatgtcttcatcattctcaaattcttaggacggtcggattagtttgcctcagctctcggaattggccgcggaaaccgatctgcccgttgtgtttgtgaaacagagaaagataggcggccatggtccaaccttgaaggaggcagcccaatatggcaagaaggtgcgactcggaccgatg

SEQ ID NO: 11900 - DNA, 203 bp, synthetic construct
  source 1..203: mol_type = other DNA
ggcgcgccagtcctccgtctatcctgatgtcttcatcattctcaaattcttaggacggtcgggccctggaaggaacgctctcggaattggccgcggaaaccgatgacagatggagagatgtgaaacagagaaagataggcggccatggtccaaccttgaaggaggcagcccaatatggcaagaaggtgcgactcggaccgatg

SEQ ID NO: 11901 - DNA, 203 bp, synthetic construct
  source 1..203: mol_type = other DNA
ggcgcgccagtccttacggagtcctgatgtcttcatcattctcaaattcttaggacggtcgggccctggaaggaacgctctcggaattggggagacgcgatatgctgcccgttgtgtttgtgaaacagagaaagataggcggccatggtccaaccttgaaggaggcagcccaatatggcaagaaggtgcgactcggaccgatg

SEQ ID NO: 11902 - DNA, 203 bp, synthetic construct
  source 1..203: mol_type = other DNA
ggcgcgccagtcctgtgcagagcctgatgtcttcatcattctcaaatttgctcagtttgaatgccctggaaggaacgctctcggaattggccgcggaaaccgatctgcccgttgtgtttgtgaaacagagaaagataggcggccatggtccaaccttgaaggaggcagcccaatatggcaagaaggtgcgactcggaccgatg

SEQ ID NO: 11903 - DNA, 203 bp, synthetic construct
  source 1..203: mol_type = other DNA
ggcgcgccagtcctgtttgtctcctgatgtcttcgaagagggacgcaacttaggacggtcgggccctggaaggaacgctctcggaattggccgcggaaaccgatctgcccgttgtgtttgtgaaacagagaaagataggcggccatggtccaaccttgaaggaggcagcccaatatggcaagaaggtgcgactcggaccgatg

SEQ ID NO: 11904 - DNA, 203 bp, synthetic construct
  source 1..203: mol_type = other DNA
ggcgcgccagtcctctaaggtacctgccctccggcccctctgcagctagatttgtacgacgatctcggcaaacatactccacaaaagggggcttcagctccaactctgccagcggagggagtgggtcccaggcccgcaccagcttcagctcagtgacggtgtctcggagcagtggcagtggtggcgggcgactcggaccgatg

SEQ ID NO: 11905 - DNA, 203 bp, synthetic construct
  source 1..203: mol_type = other DNA
ggcgcgccagtcctaacactaccctgccctccggcccctctgcagctatgaggtcctccgtcgagatcggcgtgcgctccacaaaagggggcttcagctccaactctgccagcggagggagtgggtcccaggcccgcaccagcttcagctcagtgacggtgtctcggagcagtggcagtggtggcgggcgactcggaccgatg

SEQ ID NO: 11906 - DNA, 203 bp, synthetic construct
  source 1..203: mol_type = other DNA
ggcgcgccagtccttcgtgcggcctgccctccggcccctctgcagctatgaggtcctccgtctctcggcaaacatactccacaaaagggggcttcagctccaactctgccagcggagggagtgggtcccaggcccgcaccagcttcagctcagtgacggtgtctcggagcagtggcagtggtggcgggcgactcggaccgatg

SEQ ID NO: 11907 - DNA, 203 bp, synthetic construct
  source 1..203: mol_type = other DNA
ggcgcgccagtccttattgtgccctgccctccggcccctctgcagctatgaggtcctccgtctctcggcaaacatactccacaaaaggggttgggctagtggtttctgccagcggagggagtgggtcccaggcccgcaccagcttcagctcagtgacggtgtctcggagcagtggcagtggtggcgggcgactcggaccgatg

SEQ ID NO: 11908 - DNA, 203 bp, synthetic construct
  source 1..203: mol_type = other DNA
ggcgcgccagtcctcgcaaagccctgccctccggcccctctgcagctatgaggtcctccgtctctcggcaaacatagctatgtgttatccgcttcagctccaactctgccagcggagggagtgggtcccaggcccgcaccagcttcagctcagtgacggtgtctcggagcagtggcagtggtggcgggcgactcggaccgatg

SEQ ID NO: 11909 - DNA, 203 bp, synthetic construct
  source 1..203: mol_type = other DNA
ggcgcgccagtccttccttcagcctgccctccggcccctctgcagctatgaggtcctccgttgggactaccgcaccacttccaaaagggggcttcagctccaactctgccagcggagggagtgggtcccaggcccgcaccagcttcagctcagtgacggtgtctcggagcagtggcagtggtggcgggcgactcggaccgatg

SEQ ID NO: 11910 - DNA, 203 bp, synthetic construct
  source 1..203: mol_type = other DNA
ggcgcgccagtcctcctcaaaccctgccctccggggtggactgtttggtgaggtcctccgtctctcggcaaacatactccacaaaagggggcttcagctccaactctgccagcggagggagtgggtcccaggcccgcaccagcttcagctcagtgacggtgtctcggagcagtggcagtggtggcgggcgactcggaccgatg

SEQ ID NO: 11911 - DNA, 203 bp, synthetic construct
  source 1..203: mol_type = other DNA
ggcgcgccagtcctatcacgctcctggacatcaagattgccaagggaggagccgacaaacagataggttggagcatgctgcggaaggagatgatggcgatttggcccaatctgtcccagaagacgctagacctgctggtcacacctcacaagtccacggacctcaccgtggggaagatctacgcagcccgactcggaccgatg

SEQ ID NO: 11912 - DNA, 203 bp, synthetic construct
  source 1..203: mol_type = other DNA
ggcgcgccagtccttccaatttcctggacatcaagattgccaagggaggagccgacaaacagcagatggacgctgactgcttaggctcattgatggcgatttggcccaatctgtcccagaagacgctagacctgctggtcacacctcacaagtccacggacctcaccgtggggaagatctacgcagcccgactcggaccgatg

SEQ ID NO: 11913 - DNA, 203 bp, synthetic construct
  source 1..203: mol_type = other DNA
ggcgcgccagtcctcattgactcctggacatcaagattgccaagggaggagccgacaaacagcagatggacgctgagctgcggaaggagatgatggcgatttggcccaatctgtcccaatctgttaaccgtatgctggtcacacctcacaagtccacggacctcaccgtggggaagatctacgcagcccgactcggaccgatg

SEQ ID NO: 11914 - DNA, 203 bp, synthetic construct
  source 1..203: mol_type = other DNA
ggcgcgccagtcctagcgacctcctggacatcaagattgccaagggaggagccgacaaacagcagatggacgctgagctgcggaaggagatgatggcgatttggcccaatctgtcccagaagacgctagacctgctggtcacacctttggctatattatccctcaccgtggggaagatctacgcagcccgactcggaccgatg

SEQ ID NO: 11915 - DNA, 203 bp, synthetic construct
  source 1..203: mol_type = other DNA
ggcgcgccagtcctagttagcgcctggagatttgggcgtgcccccgcaagactgctagccgagtagtgttgggtcgcgaaaggccttgtggtactgcctgatagggtgcttgcgagtgagggtccttactcggtagaccgtgcaccatgagcacgaatcctaaacctcaaagaaaaaccaaacgtaaccgactcggaccgatg

SEQ ID NO: 11916 - DNA, 203 bp, synthetic construct
  source 1..203: mol_type = other DNA
ggcgcgccagtccttcgccaatcctggagatttgggcgtgcccccgcaagactgctagccgagtagtgttgggtcgcgaaaggccttgtggtactgcctgatagggtgcttgcgagtgccccgggaggtctcgtagaccgtgcaccatgagcacgaatcctaaacctcaaagaaaaaccaaacgtaaccgactcggaccgatg

SEQ ID NO: 11917 - DNA, 203 bp, synthetic construct
  source 1..203: mol_type = other DNA
ggcgcgccagtccttcacccgccctggagatttgggcgtgcccccgcaagactgctagccgagtagtgttgggtcgcgaaaggccttgtggtactgcctgatagggtgcttgcgagtgccccgggaggtctcgtagaccgtgcaccatgagcacgaatcctaaacctcaaagaattcattgggaagtacgactcggaccgatg

SEQ ID NO: 11918 - DNA, 203 bp, synthetic construct
  source 1..203: mol_type = other DNA
ggcgcgccagtcctcataaatacctggagatttgggcgtgcccccgcaagactgctagccgagtagtgttgggtcgcgaaaggccttgtggtactgcctgatagggtgcttgcgagtgccccgggaggtctcgtagaccgtgcaccgattaacacccgaataaacctcaaagaaaaaccaaacgtaaccgactcggaccgatg

SEQ ID NO: 11919 - DNA, 203 bp, synthetic construct
  source 1..203: mol_type = other DNA
ggcgcgccagtcctacattattcctggagatttgggcgtgcccccgcaagactgctagccgagtagtgttgggtcggtttctcagcaaaagtactgcctgatagggtgcttgcgagtgccccgggaggtctcgtagaccgtgcaccatgagcacgaatcctaaacctcaaagaaaaaccaaacgtaaccgactcggaccgatg

SEQ ID NO: 11920 - DNA, 203 bp, synthetic construct
  source 1..203: mol_type = other DNA
ggcgcgccagtcctagaagccgcctggagatttgtcatccgtaggcgcagactgctagccgagtagtgttgggtcgcgaaaggccttgtggtactgcctgatagggtgcttgcgagtgccccgggaggtctcgtagaccgtgcaccatgagcacgaatcctaaacctcaaagaaaaaccaaacgtaaccgactcggaccgatg

SEQ ID NO: 11921 - DNA, 203 bp, synthetic construct
  source 1..203: mol_type = other DNA
ggcgcgccagtcctagtccgcccctggtggcaatcccttcccttaggagcatgagtgtggtccgacacgatgggtcggcttggctgtggttgctggtttgcttccccctcgcggggggggtgctcttcaactcgcggcaccagtgcttcaatggggaccattatgtgctttccaattgttgttcccgacgactcggaccgatg

SEQ ID NO: 11922 - DNA, 203 bp, synthetic construct
  source 1..203: mol_type = other DNA
ggcgcgccagtcctgaacctggcctggtggcaatcccttcccttaggagcatgagtgtggtcgacacattcaccatacgcctcagagaaatgctggtttgcttccccctcgcggggggggtgctcttcaactcgcggcaccagtgcttcaatggggaccattatgtgctttccaattgttgttcccgacgactcggaccgatg

SEQ ID NO: 11923 - DNA, 203 bp, synthetic construct
  source 1..203: mol_type = other DNA
ggcgcgccagtcctagagtttacctggtggcaatcccttcccttaggagcatgagtgtggtcgacacattcaccatggcttggctgtggtactgcaccgagaagcccctcgcggggggggtgctcttcaactcgcggcaccagtgcttcaatggggaccattatgtgctttccaattgttgttcccgacgactcggaccgatg

SEQ ID NO: 11924 - DNA, 203 bp, synthetic construct
  source 1..203: mol_type = other DNA
ggcgcgccagtccttgaaaccacctggtggcaatcccttcccttaggagcatgagtgtggtcgacacattcaccatggcttggctgtggttgctggtttgcttccccctcgcggggggaagaacgcgttttacgcggcaccagtgcttcaatggggaccattatgtgctttccaattgttgttcccgacgactcggaccgatg

SEQ ID NO: 11925 - DNA, 203 bp, synthetic construct
  source 1..203: mol_type = other DNA
ggcgcgccagtcctgcagcctgcctggtggcaatcccttcccttaggagcatgagtgtggtcgacacattcaccatggcttggctgtggttgctggtttgcttccccctcgcggggggggtgctcttcaactatatttcagccgatttcaatggggaccattatgtgctttccaattgttgttcccgacgactcggaccgatg

SEQ ID NO: 11926 - DNA, 203 bp, synthetic construct
  source 1..203: mol_type = other DNA
ggcgcgccagtccttgttatggcctggtggcaatcccttcccttaggagcatgagtgtggtcgacacattcaccatggcttggctgtggttgctggtttgcttccccctcgcggggggggtgctcttcaactcgcggcaccagtgccattcgaattctgcttatgtgctttccaattgttgttcccgacgactcggaccgatg

SEQ ID NO: 11927 - DNA, 203 bp, synthetic construct
  source 1..203: mol_type = other DNA
ggcgcgccagtcctgcccgtgacctggtggcaatcccttcccttaggagcatgagtgtggtcgacacattcaccatggcttggctgtggttgctggtttgcttccccctcgcggggggggtgctcttcaactcgcggcaccagtgcttcaatggggaccattatgtgctttccaattgttgttcccgacgactcggaccgatg

SEQ ID NO: 11928 - DNA, 203 bp, synthetic construct
  source 1..203: mol_type = other DNA
ggcgcgccagtccttgacgggccctgtgaggaactactgtcttcacgcagaaagcgtctagccatggcgttagtatgagtgtcgtgcagcctccaggaccccccctcccgggagagccatagtggtctgcggaaccggtgagtacaccggaattgccaggacgaccgggtcctttcttggataaaccccgactcggaccgatg

SEQ ID NO: 11929 - DNA, 203 bp, synthetic construct
  source 1..203: mol_type = other DNA
ggcgcgccagtcctgcgtgtaacctgtgaggaactactgtcttcacgcagaaagcgtctagccatggcgttagtatgagtgtcgtgcagcctccaggaccccccctcccgggagagccatagtggtctgcggaaccggtgagtacaccggaattgccaggcgtcagaacaatgatcttggataaaccccgactcggaccgatg

SEQ ID NO: 11930 - DNA, 203 bp, synthetic construct
  source 1..203: mol_type = other DNA
ggcgcgccagtcctctcgttgtcctgtgaggaactactgtcttcacgcagaaagcgtctagccatggcgttagtatgagtgtcgtgcagcctccaggaccccccctcccgggagagcctcgacaagacagtaaaccggtgagtacaccggaattgccaggacgaccgggtcctttcttggataaaccccgactcggaccgatg

SEQ ID NO: 11931 - DNA, 203 bp, synthetic construct
  source 1..203: mol_type = other DNA
ggcgcgccagtccttcagaagacctgtgaggaactactgtcttcacgcagaaagcgtctagccatggcgttagtatgagtgtcgtgcagcctccaggaccccccgaggtccatcctgtatagtggtctgcggaaccggtgagtacaccggaattgccaggacgaccgggtcctttcttggataaaccccgactcggaccgatg

SEQ ID NO: 11932 - DNA, 203 bp, synthetic construct
  source 1..203: mol_type = other DNA
ggcgcgccagtccttggactgacctgtgaggaactactgtcttcacgcgacggtgtcgggtgcatggcgttagtatgagtgtcgtgcagcctccaggaccccccctcccgggagagccatagtggtctgcggaaccggtgagtacaccggaattgccaggacgaccgggtcctttcttggataaaccccgactcggaccgatg

SEQ ID NO: 11933 - DNA, 203 bp, synthetic construct
  source 1..203: mol_type = other DNA
ggcgcgccagtccttctaacgaccttaagtcataatgaatcaattatctgaattacttggatttgatcttaatccataaattataataaatatcaactagcaaatcaatgtcactaacaccattagttaatataaaacttgacagaagataaaaatggggcaaataaatcaattcagccgacccaacccgactcggaccgatg

SEQ ID NO: 11934 - DNA, 203 bp, synthetic construct
  source 1..203: mol_type = other DNA
ggcgcgccagtcctgtttggacccttctgatggtaccaccttttagagttcctcctgcagcagcctgcctgcagctgtcctggtagaacagtgtggacattgcagaagctgtcactgccccagaaagaaagcaccccagagccaaggcaaagagtcttgaaagcgccacaagcagcagctgctgagcccgactcggaccgatg

SEQ ID NO: 11935 - DNA, 203 bp, synthetic construct
  source 1..203: mol_type = other DNA
ggcgcgccagtcctgcagattcccttctgatggtgaatgggaactccccatgggtctggctcgcctgcctgcagctgtcctggtagaacagtgtggacattgcagaagctgtcactgccccagaaagaaagcaccccagagccaaggcaaagagtcttgaaagcgccacaagcagcagctgctgagcccgactcggaccgatg

SEQ ID NO: 11936 - DNA, 203 bp, synthetic construct
  source 1..203: mol_type = other DNA
ggcgcgccagtcctggctttcaccttctgatggtgaatgggaactcccttcctcctgcagcagcctgcctgcagctactagttctttctcgtgtggacattgcagaagctgtcactgccccagaaagaaagcaccccagagccaaggcaaagagtcttgaaagcgccacaagcagcagctgctgagcccgactcggaccgatg

SEQ ID NO: 11937 - DNA, 203 bp, synthetic construct
  source 1..203: mol_type = other DNA
ggcgcgccagtcctacagatagccttctgatggtgaatgggaactcccttcctcctgcagcagcctgcctgcagctgtcctggtagaacaagacaacatcattcgaagctgtcactgccccagaaagaaagcaccccagagccaaggcaaagagtcttgaaagcgccacaagcagcagctgctgagcccgactcggaccgatg

SEQ ID NO: 11938 - DNA, 203 bp, synthetic construct
  source 1..203: mol_type = other DNA
ggcgcgccagtccttgcgtatcccttctgatggtgaatgggaactcccttcctcctgcagcagcctgcctgcagctgtcctggtagaacagtgtggacattgcagaagctgtcactgccccagaaagaaagcaccccagagccaaggcaaagagtcttgaaagcgccacaagcatagctcctcacctgcgactcggaccgatg

SEQ ID NO: 11939 - DNA, 203 bp, synthetic construct
  source 1..203: mol_type = other DNA
ggcgcgccagtccttactaccaccttctgatggtgaatgggaactcccttcctcctgcagcagcctgcctgcagctgtcctggtagaacagtgtggacattgcagaagctgtcactgccccagaaagaaagcaccccagagccaagtgtcctgcctaccgaagcgccacaagcagcagctgctgagcccgactcggaccgatg

SEQ ID NO: 11940 - DNA, 203 bp, synthetic construct
  source 1..203: mol_type = other DNA
ggcgcgccagtcctgattagatccttctgatggtgaatgggaactcccttcctcctgcagcagcctgcctgcagctgtcctggtagaacagtgtggacattgcagaagctgtcactgccccagaaagaaagcttatatacttttgagcaaagagtcttgaaagcgccacaagcagcagctgctgagcccgactcggaccgatg

SEQ ID NO: 11941 - DNA, 203 bp, synthetic construct
  source 1..203: mol_type = other DNA
ggcgcgccagtcctatagcaggcctttcccctcccttccctatccccgacgaccggatcctgaggaggcagctgcggtggcagctgctgagttctcggtgaaggtatttcatttctcctgtcccctcccctccccaccccatctattaatattattcttttgaagattcttcgtacatgtcatagggtcgactcggaccgatg

SEQ ID NO: 11942 - DNA, 203 bp, synthetic construct
  source 1..203: mol_type = other DNA
ggcgcgccagtcctgcgttacccctttcccctcccttccctatccccgacgaccggatcctgaggaggcagctgcggtggcagctgctgagttctcggtgaaggtatttcatttctcctgtcccctcccctcgagcattataagcgtaatattattcttttgaagattcttcgttgtcaagccgccaacgactcggaccgatg

SEQ ID NO: 11943 - DNA, 203 bp, synthetic construct
  source 1..203: mol_type = other DNA
ggcgcgccagtcctaactatcgcctttcccctcccttccctatccccgacgaccggatcctgttctaaatatcctcgtggcagctgctgagttctcggtgaaggtatttcatttctcctgtcccctcccctccccaccccatctattaatattattcttttgaagattcttcgttgtcaagccgccaacgactcggaccgatg

SEQ ID NO: 11944 - DNA, 203 bp, synthetic construct
  source 1..203: mol_type = other DNA
ggcgcgccagtcctctcagagacgaacccactcagagcagcgatacctagggcggaagtgctctcggcggaagtgatcgctgtgtgaatcgtgggtgggatggccgcgggccgcctctttctaagtcggcttcgagcacccttcagttccatggccaagagcccactcgagggcgtttcctcctccagcgactcggaccgatg

SEQ ID NO: 11945 - DNA, 203 bp, synthetic construct
  source 1..203: mol_type = other DNA
ggcgcgccagtcctataaagttcgaatttagcgtttaaccctgcagctagagcacgtaacccaatgtgtatctagtcgtaatgagcaattgcgggatgggaccaactactttgggtgtccgtgtttcactttttcctttatatttgcttatggtgacaatatatacaatatatatattggcaccatggcgactcggaccgatg

SEQ ID NO: 11946 - DNA, 203 bp, synthetic construct
  source 1..203: mol_type = other DNA
ggcgcgccagtcctaaggagcgcgacacacatgttccatctgtctctgcctggcaggcgcacgcgcccagcaccctgcctccggcgatgccgccccagcccctctgatggccctcctctctgctgccactcattccagaacaggaggcatgagcccggaacgcgcttgcttttaggagacagccacttcgactcggaccgatg

SEQ ID NO: 11947 - DNA, 203 bp, synthetic construct
  source 1..203: mol_type = other DNA
ggcgcgccagtcctgaccactccgaccccagtcgatgtttcttagcggtcgtgtagttatttttatgtcataagtggataatttgttagctcctataacaaaagtctgttgcttgtgtttcacattttggatttcctaatataatgttctctttttagaaaaggtggacaagtcctattttcaagagacgactcggaccgatg

SEQ ID NO: 11948 - DNA, 203 bp, synthetic construct
  source 1..203: mol_type = other DNA
ggcgcgccagtcctgtcattctcgaccgcattgcaatccccagcagagacccagtgcatgtggcaggagcggtgagatcactgcctcacggcgatcctggactgacggtcacgactgcctaccctctaaccctgttctgagctgccccttgcccacacaccccaaacctgtgtgcaggatccgcctcccgactcggaccgatg

SEQ ID NO: 11949 - DNA, 203 bp, synthetic construct
  source 1..203: mol_type = other DNA
ggcgcgccagtcctctgcaatacgaccgcattgcggcttggttttctcacccagtgcatgtgaggaataattctccatcactgcctcacggcgatcctggactgacggtcacgactgcctaccctctaaccctgttctgagctgccccttgcccacacaccccaaacctgtgtgcaggatccgcctcccgactcggaccgatg

SEQ ID NO: 11950 - DNA, 203 bp, synthetic construct
  source 1..203: mol_type = other DNA
ggcgcgccagtcctacttcgaacgaccgcattgcggcttggttttctcacccagtgcatgtggcaggagcggtgagatcactgcctcacggcgatcctggactgacggtcacgactgcctaccctctaaccctgttctgagctgccccttgcccacacaccccaaacctgtgtgcaggatccgcctcccgactcggaccgatg

SEQ ID NO: 11951 - DNA, 203 bp, synthetic construct
  source 1..203: mol_type = other DNA
ggcgcgccagtcctctctgatccgaccgcattgcggcttggttttctcacccagtgcatgtggcaggagcggtgagatcactgcctcacggcgatcctggactgacggtcacgactgcctaccctctaaccctgttctgagctgccccttgcccacacaccccaaacctgtgtgtgaataaaagagagcgactcggaccgatg

SEQ ID NO: 11952 - DNA, 203 bp, synthetic construct
  source 1..203: mol_type = other DNA
ggcgcgccagtccttgcaggaccgaccgcattgcggcttggttttctcacccagtgcatgtggcaggagcggtgagatcactgcctcacggcgatcctggactgacggtcacgactgcctaccctctaaccctgttctgagctgccgtaaaatacagggtcccaaacctgtgtgcaggatccgcctcccgactcggaccgatg

SEQ ID NO: 11953 - DNA, 203 bp, synthetic construct
  source 1..203: mol_type = other DNA
ggcgcgccagtcctatccttcccgaccgcattgcggcttggttttctcacccagtgcatgtggcaggagcggtgagatcactgcctcacggcgatcctggactggaataattccaatactaccctctaaccctgttctgagctgccccttgcccacacaccccaaacctgtgtgcaggatccgcctcccgactcggaccgatg

SEQ ID NO: 11954 - DNA, 203 bp, synthetic construct
  source 1..203: mol_type = other DNA
ggcgcgccagtcctgattcgcccgaccgcattgcggcttggttttctcacccagtgcatgtggcaggagcggtgagcctctccagagtacgcgatcctggactgacggtcacgactgcctaccctctaaccctgttctgagctgccccttgcccacacaccccaaacctgtgtgcaggatccgcctcccgactcggaccgatg

SEQ ID NO: 11955 - DNA, 203 bp, synthetic construct
  source 1..203: mol_type = other DNA
ggcgcgccagtcctggatgggacgaccgcattgcggcttggttttctcggttcaaaatacacgcaggagcggtgagatcactgcctcacggcgatcctggactgacggtcacgactgcctaccctctaaccctgttctgagctgccccttgcccacacaccccaaacctgtgtgcaggatccgcctcccgactcggaccgatg

SEQ ID NO: 11956 - DNA, 203 bp, synthetic construct
  source 1..203: mol_type = other DNA
ggcgcgccagtcctaccaactgcgactcgccctcggccttccgcgccagccgcagccacagcattcctagactgtacagccacagccacagccacagccccaggcatagccttcggcacagccccggctccggctcctgcggcagctcctctgggcaccgtccctgcgccgacatcctggaggttgggcgactcggaccgatg

SEQ ID NO: 11957 - DNA, 203 bp, synthetic construct
  source 1..203: mol_type = other DNA
ggcgcgccagtcctggaatcaacgactcgccctcggccttccgcgccagccgcagccacagccgcaacgccacccgcagccacagccacagccacagccccaggcatagccttcggcacagccccggctccggctcctgcggcagctcctctgggcaccgtccctgcgccgacaatagacgtcaccctcgactcggaccgatg

SEQ ID NO: 11958 - DNA, 203 bp, synthetic construct
  source 1..203: mol_type = other DNA
ggcgcgccagtcctgcattgtacgactcgccctcggccttccgcgccagccgcagccacagccgcaacgccacccgcagccacagccacagccacagccccaggcatagccttcggcacagccccggctccggctcctgcggcagctcctctgggcaccgtccctgcgccgacatcctggaggttgggcgactcggaccgatg

SEQ ID NO: 11959 - DNA, 203 bp, synthetic construct
  source 1..203: mol_type = other DNA
ggcgcgccagtcctaactgattcgagatgccacgtggacgagggcatgcccaaagcacatcttaacctgagcgggggtcgcccaggtaaaagcagttttaaccgactgttacgaatacagcctgatagggtgggttttcattgggatgtattgctactaaaaatctctgctgtacatggcacatggagcgactcggaccgatg

SEQ ID NO: 11960 - DNA, 203 bp, synthetic construct
  source 1..203: mol_type = other DNA
ggcgcgccagtcctggcacacgcgatctcttgtcagatctcattaaataagcgtgcccatgtcaagattccctgttatccatgcttgtgagtgtggtttaatcataatcttgtattttactttccacacttttcatctctctgccagtgacgtgttggttgtcctcagcgtccctcccataggtcgcacgactcggaccgatg

SEQ ID NO: 11961 - DNA, 203 bp, synthetic construct
  source 1..203: mol_type = other DNA
ggcgcgccagtccttcgatcgtcgatctcttgtcagatctcattaaatctaaactttttaaacaagattccctgttatccatgcttgtgacctgacaaccgctttaatcttgtattttactttccacacttttcatctctctgccagtgacgtgttggttgtcctcagcgtccctcccataggtcgcacgactcggaccgatg

SEQ ID NO: 11962 - DNA, 203 bp, synthetic construct
  source 1..203: mol_type = other DNA
ggcgcgccagtcctgatccagacgatctcttgtcagatctcattaaatctaaactttttaaacaagattccctgttatccatgcttgtgagtgtggtttaatcacgcatggccggccgactttccacacttttcatctctctgccagtgacgtgttggttgtcctcagcgtccctcccataggtcgcacgactcggaccgatg

SEQ ID NO: 11963 - DNA, 203 bp, synthetic construct
  source 1..203: mol_type = other DNA
ggcgcgccagtccttggagtagcgatctcttgtccttagaatggttcgctaaactttttaaacaagattccctgttatccatgcttgtgagtgtggtttaatcataatcttgtattttactttccacacttttcatctctctgccagtgacgtgttggttgtcctcagcgtccctcccataggtcgcacgactcggaccgatg

SEQ ID NO: 11964 - DNA, 203 bp, synthetic construct
  source 1..203: mol_type = other DNA
ggcgcgccagtcctacttgtcacgattgtgttaggccgttctcagcgctgcccgaccccgctcgcgcgccctcccgccgccagtcccggcagcgccctcagttgtcctccgactcgccctcggccttccgcgccagccgcagccacagccgcaacgccacccgcagccacagccacagccacagcccccgactcggaccgatg

SEQ ID NO: 11965 - DNA, 203 bp, synthetic construct
  source 1..203: mol_type = other DNA
ggcgcgccagtccttttacgaccgatttaaactagccgccggcgctcgcaggccgcggatgaagaagaaaacccggcgccgctcgacccggagcgaggagttgacccggagcgaggagttgaccctgagtgaggaagcgacctggagtgaagaggcgacccagagtgaggaggcgacccagggcgaagcgactcggaccgatg

SEQ ID NO: 11966 - DNA, 203 bp, synthetic construct
  source 1..203: mol_type = other DNA
ggcgcgccagtcctgtcgtcaacgcaaagccggtggcgcccggaggctaagtctcagatcccgcccgcgtcagagcctcgccctgtcaccaggctggagtacagtggcgcgatctcggctcactgcaacttccacctgctgggttcaagcaattcttctgacctcagtgaccgaaggaagagaccaagcgactcggaccgatg

SEQ ID NO: 11967 - DNA, 203 bp, synthetic construct
  source 1..203: mol_type = other DNA
ggcgcgccagtccttttgtccccgcaaagccggtggcgcccggaggctctggtacccttctcgcccgcgtcagagcctcgccctgtcaccaggctggagtacagtggcgcgatctcggctcactgcaacttccacctgctgggttcaagcaattcttctgacctcagtgaccgaaggaagagaccaagcgactcggaccgatg

SEQ ID NO: 11968 - DNA, 203 bp, synthetic construct
  source 1..203: mol_type = other DNA
ggcgcgccagtcctcagacccacgcaaagccggtggcgcccggaggctgcacggagagcggtaagatttctgccctctcgccctgtcaccaggctggagtacagtggcgcgatctcggctcactgcaacttccacctgctgggttcaagcaattcttctgacctcagtgaccgaaggaagagaccaagcgactcggaccgatg

SEQ ID NO: 11969 - DNA, 203 bp, synthetic construct
  source 1..203: mol_type = other DNA
ggcgcgccagtcctcgcactgtcgcaaagccggtggcgcccggaggctgcacggagagcggtaatgaatatccgttctcgccctgtcaccaggctggagtacagtggcgcgatctcggctcactgcaacttccacctgctgggttcaagcaattcttctgacctcagtgaccgaaggaagagaccaagcgactcggaccgatg

SEQ ID NO: 11970 - DNA, 203 bp, synthetic construct
  source 1..203: mol_type = other DNA
ggcgcgccagtcctctactgcgcgcaaagccggtggcgcccggaggctgcacggagagcggtgcccgcgtcagagcaggaagtgacgcataggctggagtacagtggcgcgatctcggctcactgcaacttccacctgctgggttcaagcaattcttctgacctcagtgaccgaaggaagagaccaagcgactcggaccgatg

SEQ ID NO: 11971 - DNA, 203 bp, synthetic construct
  source 1..203: mol_type = other DNA
ggcgcgccagtcctatacgtctcgcaaagccggtggcgcccggaggctgcacggagagcggtgcccgcgtcagagcctcgccctgtcaccaggctggagtacagtggcgcgatctcggctcactgcaacttccacctgctgggttcaagcaattcttctggtaatgacatggctaggaagagaccaagcgactcggaccgatg

SEQ ID NO: 11972 - DNA, 203 bp, synthetic construct
  source 1..203: mol_type = other DNA
ggcgcgccagtcctatggctcccgcaaagccggtggcgcccggaggctgcacggagagcggtgcccgcgtcagagcctcgccctgtcaccaggctggagtacagtggcgcgatctcggctcactgcaacttccacctgctgggttcaagcaattcttctggtgaaccgataacgaggaagagaccaagcgactcggaccgatg

SEQ ID NO: 11973 - DNA, 203 bp, synthetic construct
  source 1..203: mol_type = other DNA
ggcgcgccagtcctggtgatatcgcaaagccggtggcgcccggaggctgcacggagagcggtgcccgcgtcagagcctcgccctgtcaccaggctggagtacagtggcgcgatctcggctcactgcaacttccacctgctgggttctttactgctgcagcacctcagtgaccgaaggaagagaccaagcgactcggaccgatg

SEQ ID NO: 11974 - DNA, 203 bp, synthetic construct
  source 1..203: mol_type = other DNA
ggcgcgccagtcctctccgtgccgcaaagccggtggcgcccggaggctgcacggagagcggtgcccgcgtcagagcctcgccctgtcaccaggctggagtacagtggcgcgatctcggctcactgcaacttctggtattcataactaagcaattcttctgacctcagtgaccgaaggaagagaccaagcgactcggaccgatg

SEQ ID NO: 11975 - DNA, 203 bp, synthetic construct
  source 1..203: mol_type = other DNA
ggcgcgccagtcctcatatcttcgcactgcttgacggcagcggtgtccgccccacggccggcgttgccggggtaacggcgagcgcgtggggccaagaaagaatacctcctctgaaaaagaaggagtagcagattccatgccccaaagaggaaaagaagagtgtatgagacttacgagtctccattgcccgactcggaccgatg

SEQ ID NO: 11976 - DNA, 203 bp, synthetic construct
  source 1..203: mol_type = other DNA
ggcgcgccagtcctcaccacaacgcactgcttgacggcagcggtgtccgccccacggccggcgttgccggggtaacggcgagcgcgtggggccaagaaagaatacctcctctgaaaaatggcagaagcagttttccatgccccaaagaggaaaagaagagtgtatgagacttactctcgaaggcatagcgactcggaccgatg

SEQ ID NO: 11977 - DNA, 203 bp, synthetic construct
  source 1..203: mol_type = other DNA
ggcgcgccagtcctcgtttgttcgcactgcttgacggcagcggtgtccgccccacggccggcgttgccggggtaacttaatcgagaacccgccaagaaagaatacctcctctgaaaaatggcagaagcagttttccatgccccaaagaggaaaagaagagtgtatgagacttacgagtctccattgcccgactcggaccgatg

SEQ ID NO: 11978 - DNA, 203 bp, synthetic construct
  source 1..203: mol_type = other DNA
ggcgcgccagtcctaaatggcacgcactgcttgacggcagcggtgtcctttaggaccaaatggttgccggggtaacggcgagcgcgtggggccaagaaagaatacctcctctgaaaaatggcagaagcagttttccatgccccaaagaggaaaagaagagtgtatgagacttacgagtctccattgcccgactcggaccgatg

SEQ ID NO: 11979 - DNA, 203 bp, synthetic construct
  source 1..203: mol_type = other DNA
ggcgcgccagtcctatggtagtcgcagtccagagggctgcgctgctcggggtaagtatccaaagaagggggtgacgctgggcagcggcgaggagcgcgccgctgcctctggcgggctttcggcttgaggggcaaggtgaagagcgcaccggccgtggggtttaccgagctggatttgtatgttgcacccgactcggaccgatg

SEQ ID NO: 11980 - DNA, 203 bp, synthetic construct
  source 1..203: mol_type = other DNA
ggcgcgccagtcctactctgttcgcagtccagagggctgcgctgctcgtcccctcggctggcagaagggggtgacgctgggcagcggcgacacatcgaggttcccctctggcgggctttcggcttgaggggcaaggtgaagagcgcaccggccgtggggtttaccgagctggatttgtatgttgcacccgactcggaccgatg

SEQ ID NO: 11981 - DNA, 203 bp, synthetic construct
  source 1..203: mol_type = other DNA
ggcgcgccagtccttttgaaatcgcagtccagagggctgcgctgctcgtcccctcggctggcagaagggggtgacgctgggcagcggcgaggagcgcgccgctgcctctggcgggctttcggcttgaggggcaaggtgaagagcgcaccggccgtggggtttaccgagctggatcccccataaatgttcgactcggaccgatg

SEQ ID NO: 11982 - DNA, 203 bp, synthetic construct
  source 1..203: mol_type = other DNA
ggcgcgccagtcctccggctgacgcagtccagagggctgcgctgctcgtcccctcggctggcagaagggggtgacgctgggcagcggcgaggagcgcgccgctgcctctggcgggctttcggcttgaggggcaaggtgaagagcgcaccggccgtggggtttaccgagctggatttgtatgttgcacccgactcggaccgatg

SEQ ID NO: 11983 - DNA, 203 bp, synthetic construct
  source 1..203: mol_type = other DNA
ggcgcgccagtcctccacttggcgcagtccagagggctgcgctgctcgtcccctcggctggcagaagggggtgacgggcttagctcatagggagcgcgccgctgcctctggcgggctttcggcttgaggggcaaggtgaagagcgcaccggccgtggggtttaccgagctggatttgtatgttgcacccgactcggaccgatg

SEQ ID NO: 11984 - DNA, 203 bp, synthetic construct
  source 1..203: mol_type = other DNA
ggcgcgccagtccttactctatcgccaacaaggcaatgtcaatcacttcttgtttactccgaaccccagaatccattaagaaaaacttaggagacaggtataatattctcatacctgtccattcaccttggacttaaagagagacaatcattcagccccgtccaagacacacctgagtggccagaacccgactcggaccgatg

SEQ ID NO: 11985 - DNA, 203 bp, synthetic construct
  source 1..203: mol_type = other DNA
ggcgcgccagtcctggcacggacgccaacaaggcaatgtcaatcacttgaatgcaggggtagaccccagaatccatgcgtctgggacatagagacaggtataatattctcatacctgtccattcaccttggacttaaagagagacaatcattcagccccgtccaagacacacctgagtggccagaacccgactcggaccgatg

SEQ ID NO: 11986 - DNA, 203 bp, synthetic construct
  source 1..203: mol_type = other DNA
ggcgcgccagtcctactggtttcgccaacaaggcaatgtcaatcacttgaatgcaggggtagaccccagaatccattaagaaaaacttagcttgggtcggattgattctcatacctgtccattcaccttggacttaaagagagacaatcattcagccccgtccaagacacacctgagtggccagaacccgactcggaccgatg

SEQ ID NO: 11987 - DNA, 203 bp, synthetic construct
  source 1..203: mol_type = other DNA
ggcgcgccagtccttgtaagagcgccaacaaggcaatgtcaatcacttgaatgcaggggtagaccccagaatccattaagaaaaacttaggagacaggtataatattctcatacctgtccattcaccttggacttaaagagagacaatcattcagccccgtccaagacacacctcgtccttagcccggcgactcggaccgatg

SEQ ID NO: 11988 - DNA, 203 bp, synthetic construct
  source 1..203: mol_type = other DNA
ggcgcgccagtcctagcgaaaccgccaacaaggcaatgtcaatcacttgaatgcaggggtagaccccagaatccattaagaaaaacttaggagacaggtataatattctcatacctgtccattcaccttggacttaaagagagacacaggacagtatggctccaagacacacctgagtggccagaacccgactcggaccgatg

SEQ ID NO: 11989 - DNA, 203 bp, synthetic construct
  source 1..203: mol_type = other DNA
ggcgcgccagtcctcctagtgacgccaacaaggcaatgtcaatcacttgaatgcaggggtagaccccagaatccattaagaaaaacttaggagacaggtataatccaacgggcttatcccattcaccttggacttaaagagagacaatcattcagccccgtccaagacacacctgagtggccagaacccgactcggaccgatg

SEQ ID NO: 11990 - DNA, 203 bp, synthetic construct
  source 1..203: mol_type = other DNA
ggcgcgccagtccttaataggccgccaacaaggctcgacgttatgggagaatgcaggggtagaccccagaatccattaagaaaaacttaggagacaggtataatattctcatacctgtccattcaccttggacttaaagagagacaatcattcagccccgtccaagacacacctgagtggccagaacccgactcggaccgatg

SEQ ID NO: 11991 - DNA, 203 bp, synthetic construct
  source 1..203: mol_type = other DNA
ggcgcgccagtccttatgacaccgccagtcggagcccccggcccagcgtggtccgcctccctctgggcgtccacctgcccggagtactgccagcgggcatgacctcattctgtacatagccgccgccggcgctcgcaggccgcggatgaagaagaaaacccggcgccgctcgacccggagcgaggagtcgactcggaccgatg

SEQ ID NO: 11992 - DNA, 203 bp, synthetic construct
  source 1..203: mol_type = other DNA
ggcgcgccagtccttatgtactcgccccgacccgcttactccgagtaaccgcgcctgccccgccaggcgaagcgaggcgacccgcgtgcggccatggcttcgctgctgggagcctacccttggcccgagggtctcgagtgcccggccctggacgccgagctgtcggatggacaatcgccgccggccgtcgactcggaccgatg

SEQ ID NO: 11993 - DNA, 203 bp, synthetic construct
  source 1..203: mol_type = other DNA
ggcgcgccagtcctcctataatcgccccgacccgtgcgagggccaggtaatgcttaaatttcccaggcgaagcgaggcgacccgcgtgcggccatggcttcgctgctgggagcctacccttggcccgagggtctcgagtgcccggccctggacgccgagctgtcggatggacaatcgccgccggccgtcgactcggaccgatg

SEQ ID NO: 11994 - DNA, 203 bp, synthetic construct
  source 1..203: mol_type = other DNA
ggcgcgccagtccttacaatgacgccccgacccgtgcgagggccaggtccgcgcctgccccgccaggcgaagcgagattgattaacccttgccatggcttcgctgctgggagcctacccttggcccgagggtctcgagtgcccggccctggacgccgagctgtcggatggacaatcgccgccggccgtcgactcggaccgatg

SEQ ID NO: 11995 - DNA, 203 bp, synthetic construct
  source 1..203: mol_type = other DNA
ggcgcgccagtccttccaaacgcgccctgcccccagccccgccactcccaggctcctcgggactcggcgggtcctcactcactcgaacccggggaccggctgtgcagagaacttcagccaaagcatctgagacgggaagcagaaaaaggagggacagtttggagaagaaaaacgcagctgtgtacgcccgactcggaccgatg

SEQ ID NO: 11996 - DNA, 203 bp, synthetic construct
  source 1..203: mol_type = other DNA
ggcgcgccagtcctagtagttccgccctgcccccagccccgccactcccaggctcctcgggactcggcgggtcctcctgggagtctcggaggggaccggctgtgcagagaacttcagccaaagcatctgagacgggaagcagaaaaaggagggacagtttcctattctctggtacagctgtgtacgcccgactcggaccgatg

SEQ ID NO: 11997 - DNA, 203 bp, synthetic construct
  source 1..203: mol_type = other DNA
ggcgcgccagtcctgttacaatcgccctgcccccagccccgccactcccaggctcctcgggactcggcgggtcctcctgggagtctcggaggggaccggctgtgcagagaacttcagccaaagcatctgagacgggaagcagaaaaaggagggacagtttggagaagaaaaacgcagctgtgtacgcccgactcggaccgatg

SEQ ID NO: 11998 - DNA, 203 bp, synthetic construct
  source 1..203: mol_type = other DNA
ggcgcgccagtcctgcgacagccgccctgcccccagccccgccactccggaaaagtgttcatctcggcgggtcctcctgggagtctcggaggggaccggctgtgcagagaacttcagccaaagcatctgagacgggaagcagaaaaaggagggacagtttggagaagaaaaacgcagctgtgtacgcccgactcggaccgatg

SEQ ID NO: 11999 - DNA, 203 bp, synthetic construct
  source 1..203: mol_type = other DNA
ggcgcgccagtcctcacggatgcgccgccatgctcttcttttttctataggtgctgctgctgaggaccttccagggccgcacgctgcggatcgtgcgcgagcactacctgcggccctgcgtgccctgccacagcccgctctgcccgcagcccgccgcctgcagccacgatgggaaactcttgtctagtcgactcggaccgatg

SEQ ID NO: 12000 - DNA, 203 bp, synthetic construct
  source 1..203: mol_type = other DNA
ggcgcgccagtcctttgacgcacgccgccatgctgcagaagcgggagaaggtgctgctgctgaggaccttccagggccgcacgctgcggagatcatcttccatttacctgcggccctgcgtgccctgccacagcccgctctgcccgcagcccgccgcctgcagccacgatgggaaactcttgtctagtcgactcggaccgatg

SEQ ID NO: 12001 - DNA, 203 bp, synthetic construct
  source 1..203: mol_type = other DNA
ggcgcgccagtcctcgacatttcgccgccatgctgcagaagcgggagaaggtgctgctgctgaggaccttccagggccgcacgctgcggatcgtgcgcgagcactacctgcggccctgcgtgccctgccacagcccgctctgcccgcagcccgccgcctgcagccacgatgggagctcgcgtcgagtgcgactcggaccgatg

SEQ ID NO: 12002 - DNA, 203 bp, synthetic construct
  source 1..203: mol_type = other DNA
ggcgcgccagtcctggttagtccgccgccatgctgcagaagcgggagaaggtgctgctgctgaggaccttccagggccgcacgctgcggatcgtgcgcgagcactacctgcggccctgcgtgccctgccacagcccgctctgcccgggaataattatggtcagccacgatgggaaactcttgtctagtcgactcggaccgatg

SEQ ID NO: 12003 - DNA, 203 bp, synthetic construct
  source 1..203: mol_type = other DNA
ggcgcgccagtcctgcgcccagcgccgccatgctgcagaagcgggagaaggtgctgctgctgaggaccttccagggccgcacgctgcggatcgtgcgcgagcactacctgcggccctgcgtgccctgccacatttactagaaaggtcagcccgccgcctgcagccacgatgggaaactcttgtctagtcgactcggaccgatg

SEQ ID NO: 12004 - DNA, 203 bp, synthetic construct
  source 1..203: mol_type = other DNA
ggcgcgccagtccttcaccgctcgccgccatgctgcagaagcgggagaaggtgctgctgctgaggaccttccagggccgcacgctgcggatcgtgcgcgagcactacctgcggccctggcattagctaattcgcccgctctgcccgcagcccgccgcctgcagccacgatgggaaactcttgtctagtcgactcggaccgatg

SEQ ID NO: 12005 - DNA, 203 bp, synthetic construct
  source 1..203: mol_type = other DNA
ggcgcgccagtcctacttataccgccgccgcagcaattactttgaggccccccgccgggtgcctaagcaggcccggcgcggccccaggacttgggaccctggaggactgacgctgctggcctgggcgtccccttccgctgagccatggcgactcccgacgtgagtgtgcacatggaggaggtggtggtcgactcggaccgatg

SEQ ID NO: 12006 - DNA, 203 bp, synthetic construct
  source 1..203: mol_type = other DNA
ggcgcgccagtcctggattatccgccgccgcagctcccgacgccgccgcccccgccgggtgcctaagcaggcccggcgcggccccaggacttgggaccctggaggactgacgctgctggcctgggcgtccccttccgctgagccatcctcctgtttctgctgagtgtgcacatggaggaggtggtggtcgactcggaccgatg

SEQ ID NO: 12007 - DNA, 203 bp, synthetic construct
  source 1..203: mol_type = other DNA
ggcgcgccagtcctagattaaacgccgccgcagctcccgacgccgccgcccccgccgggtgcctaagcaggcccggcgcggccccaggacttgggaccctggaggactgacgctgctggcctgggcgtccccttccgctgagccatggcgactcccgacgtgagtgtgcacatggaggaggtggtggtcgactcggaccgatg

SEQ ID NO: 12008 - DNA, 203 bp, synthetic construct
  source 1..203: mol_type = other DNA
ggcgcgccagtcctcactcgaacgccgccgcagctcccgacgccgccgcccgtcggcaccgcctaagcaggcccggcgcggccccaggacttgggaccctggaggactgacgctgctggcctgggcgtccccttccgctgagccatggcattgatggacgtgagtgtgcacatggaggaggtggtggtcgactcggaccgatg

SEQ ID NO: 12009 - DNA, 203 bp, synthetic construct
  source 1..203: mol_type = other DNA
ggcgcgccagtcctttctcggccgccgggcgcacacactcgcacccgcgcacgcaccgccagcaggcagcggccaccgccgcgatgctcgcccgcgggttggggaagtttcccgccggcctcggccgcgggcacccgtgctcccaggtgtagcgcccccggaatcgtttacgttccggcgcctccagccgactcggaccgatg

SEQ ID NO: 12010 - DNA, 203 bp, synthetic construct
  source 1..203: mol_type = other DNA
ggcgcgccagtcctgtgcgaatcgccgggcgcacacactcgcacccgcgcacgcaccgccagcaggcagcggccaccgccgcgatgctcgcccgcgggttggggaagtttcccgccggtaggccgaatactaacccgtgctcccaggtgtagcgcccccgcgcggcgcgggcggccggcgcctccagccgactcggaccgatg

SEQ ID NO: 12011 - DNA, 203 bp, synthetic construct
  source 1..203: mol_type = other DNA
ggcgcgccagtccttccctgtacgcctcggaattctccaaggattttctgccgtctcttggcaaaaatggcaaataatgatgctgttctgaagagactggagcagaagggtgcagaggcagatcaaatcattgaatatcttaagcagcaagtttctctacttaaggagaaagcaattttgcaggcaaccgactcggaccgatg

SEQ ID NO: 12012 - DNA, 203 bp, synthetic construct
  source 1..203: mol_type = other DNA
ggcgcgccagtccttatactgtcgcgaagacgcaaataaaaaatattgcatacgttgacgaaacaaattttcgttgcatacccaataaaagattattatattgcataccttttcttgccataccatttagccgatcaattgtgctcggcaacagtatatttgtggtgtgccaaccaacaaccaatgagcgactcggaccgatg

SEQ ID NO: 12013 - DNA, 203 bp, synthetic construct
  source 1..203: mol_type = other DNA
ggcgcgccagtcctaagagacacgcgccgggcgcagggagctgagtggacggctcgagacggcggcgcgtgcagcacacgggtgcgtttccgagttggcagagcagggctgcatttccagcaggagctgcgagcacagtgctggctcacaacaagatgctcaaggtgtcagccgtactgtgtgtgtgtcgactcggaccgatg

SEQ ID NO: 12014 - DNA, 203 bp, synthetic construct
  source 1..203: mol_type = other DNA
ggcgcgccagtcctggacaacccgcgccgggcgcagggagctgagtggacggctcgagacggcggcgcgtgcagcagctccagaaagcagcgagttggcagagcagggctgcatttccagcaggagctgcgagcacagtgctggctcacaacaagatgcttggcacacggcgtttactgtgtgtgtgtcgactcggaccgatg

SEQ ID NO: 12015 - DNA, 203 bp, synthetic construct
  source 1..203: mol_type = other DNA
ggcgcgccagtcctaattcgttcgcgccgggcgcagggagctgagtggacggctcgagacggcggcgcgtgcagcagctccagaaagcagcgagttggcagagcagggctgcatttccagcaggagctgcgagcacagtgctggctggtgctttcgaatgcaaggtgtcagccgtactgtgtgtgtgtcgactcggaccgatg

SEQ ID NO: 12016 - DNA, 203 bp, synthetic construct
  source 1..203: mol_type = other DNA
ggcgcgccagtcctccgctgcccgcgccgggcgcagggagctgagtggacggctcgagacggcggcgcgtgcagcagctccagaaagcagcgagttggcagagcagggctgcatttccttgccacatgataggcacagtgctggctcacaacaagatgctcaaggtgtcagccgtactgtgtgtgtgtcgactcggaccgatg

SEQ ID NO: 12017 - DNA, 203 bp, synthetic construct
  source 1..203: mol_type = other DNA
ggcgcgccagtcctagtattaacgcgccgggcgcagggagctgagtggctactcgttttgatcggcgcgtgcagcagctccagaaagcagcgagttggcagagcagggctgcatttccagcaggagctgcgagcacagtgctggctcacaacaagatgctcaaggtgtcagccgtactgtgtgtgtgtcgactcggaccgatg

SEQ ID NO: 12018 - DNA, 203 bp, synthetic construct
  source 1..203: mol_type = other DNA
ggcgcgccagtcctactgcgtgcgcgccgggcgccaaaccggatccaaacggctcgagacggcggcgcgtgcagcagctccagaaagcagcgagttggcagagcagggctgcatttccagcaggagctgcgagcacagtgctggctcacaacaagatgctcaaggtgtcagccgtactgtgtgtgtgtcgactcggaccgatg

SEQ ID NO: 12019 - DNA, 203 bp, synthetic construct
  source 1..203: mol_type = other DNA
ggcgcgccagtccttaagattgcgcgcgcgagagaagagagtattctcgcgagaagtccaggggtggccgtgatggcggcggcaggagcaggacctggccaggaagcgggtgccgggcctggcccaggagcgccaattcggagttaaggggcagaagagggggagatgaagccggtggcagcgggagccgactcggaccgatg

SEQ ID NO: 12020 - DNA, 203 bp, synthetic construct
  source 1..203: mol_type = other DNA
ggcgcgccagtcctgcacctcacgcgcgcgagagaagagagtattctcgcgagaagtccaggggtggccgtgatggcggcggcaggagcaggacctggccaggaagcgggtgccgggcctggcccaggagcggtcgcaaatgcaacaggggcagaagaggccacttaacttaaagtggcagcgggagccgactcggaccgatg

SEQ ID NO: 12021 - DNA, 203 bp, synthetic construct
  source 1..203: mol_type = other DNA
ggcgcgccagtcctgggagccacgcgcgcgagagaagagagtattctcgcgagaagtccaggggtggccgtgatggcggcggcaggagcaggacctggccaggaagcgggtgccgggcctggcccaggagcggtcgcaaatgcaacaggggcagaagagggggagatgaagccggtggcagcgggagccgactcggaccgatg

SEQ ID NO: 12022 - DNA, 203 bp, synthetic construct
  source 1..203: mol_type = other DNA
ggcgcgccagtccttgtcgtttcgcgctcacgtccgcgtccccaagggctgcgctccctcaagcgcagtgcccagaactcggagccagcccggcccgggggaccctgctggccaaggaggtcgtcagtccgggaaaccaccattatcccggaggaccgaagcttccggacgacgaggaaccgcccaaccgactcggaccgatg

SEQ ID NO: 12023 - DNA, 203 bp, synthetic construct
  source 1..203: mol_type = other DNA
ggcgcgccagtcctgcggatctcgcgctcacgtccgcgtccccaagggctgcgctccctcaagcgcagtgcccagaactcggagccagcccggcccgggggaccctgctggccaaggaggtcgtcagtccggtcttgtcttccagacccggaggaccgaagcttccggacgacgaggaaccgcccaaccgactcggaccgatg

SEQ ID NO: 12024 - DNA, 203 bp, synthetic construct
  source 1..203: mol_type = other DNA
ggcgcgccagtcctattgtcttcgcgctcacgtccgcgtccccaagggctgcgctccctcaagcgcagtgcccagaactcggagccagcccggcccgggggaccctgctggccaaggaggtcgtcagtccggtcttgtcttccagacccggaggaccgaagcttccggacgacgtacttatagggtctcgactcggaccgatg

SEQ ID NO: 12025 - DNA, 203 bp, synthetic construct
  source 1..203: mol_type = other DNA
ggcgcgccagtcctcacctggtcgcgctcacgtccgcgtccccaagggctgcgctccctcaagcgcagtgcccagaactcggagccagcccggcccgggggaccctgctggccaaggaggtcgtcagtccggtcttgtcttccagatgtcagtatttttggcttccggacgacgaggaaccgcccaaccgactcggaccgatg

SEQ ID NO: 12026 - DNA, 203 bp, synthetic construct
  source 1..203: mol_type = other DNA
ggcgcgccagtcctgttgtaaccgcgggcagcggagcgggcgccaggcacagaaccgtcccagcgctaccgggcgtcggccctgggcagtgacggggttcgggtgaccatggagagtgcgctcaccgcccgtgaccgggtgggggtgcaggatttcgtgctgctggagaacttcaccagcgaggccgccgactcggaccgatg

SEQ ID NO: 12027 - DNA, 203 bp, synthetic construct
  source 1..203: mol_type = other DNA
ggcgcgccagtcctgcgcatgccgcgggcagcggagcgggcgccaggccggccgggcaggatgcgctaccgggcgtcggccctgggcagtcgaatctaaactcggaccatggagagtgcgctcaccgcccgtgaccgggtgggggtgcaggatttcgtgctgctggagaacttcaccagcgaggccgccgactcggaccgatg

SEQ ID NO: 12028 - DNA, 203 bp, synthetic construct
  source 1..203: mol_type = other DNA
ggcgcgccagtcctgtgtttagcgcgggcagcggagcgggcgccaggccggccgggcaggatgcgctaccgggcgtttcgatgcccatacgacggggttcgggtgaccatggagagtgcgctcaccgcccgtgaccgggtgggggtgcaggatttcgtgctgctggagaacttcaccagcgaggccgccgactcggaccgatg

SEQ ID NO: 12029 - DNA, 203 bp, synthetic construct
  source 1..203: mol_type = other DNA
ggcgcgccagtcctgggtaaggcgcgggcagcggtctaattttgcaaacggccgggcaggatgcgctaccgggcgtcggccctgggcagtgacggggttcgggtgaccatggagagtgcgctcaccgcccgtgaccgggtgggggtgcaggatttcgtgctgctggagaacttcaccagcgaggccgccgactcggaccgatg

SEQ ID NO: 12030 - DNA, 203 bp, synthetic construct
  source 1..203: mol_type = other DNA
ggcgcgccagtcctcgtgtcatcgcggggaggggagggcgttagccagcgtggcgctggctcccggaatatggagccctgggcgcgggggcggcgtgtcaggtggttgcggagctggtaagaatcatattctaagaactcagccacgttaccgctttgattggtgctgggtcctgaacagaagatgtccgactcggaccgatg

SEQ ID NO: 12031 - DNA, 203 bp, synthetic construct
  source 1..203: mol_type = other DNA
ggcgcgccagtccttgcttgtgcgcggggaggggagggcgttagccagcgtggcgctggctcccggaatatggagccctgggcgcgggggcggcgtgtcaggtggttgcggagctggtaagaatcatattctaagaactcagccactcaggtatccaccatggtgctgggtccttgcggagttccaaacgactcggaccgatg

SEQ ID NO: 12032 - DNA, 203 bp, synthetic construct
  source 1..203: mol_type = other DNA
ggcgcgccagtcctggaggcagcgcggggaggggagggcgttagccagttattgttgtcaagccggaatatggagccctgggcgcgggggcggcgtgtcaggtggttgcggagctggtaagaatcatattctaagaactcagccactcaggtatccaccatggtgctgggtcctgaacagaagatgtccgactcggaccgatg

SEQ ID NO: 12033 - DNA, 203 bp, synthetic construct
  source 1..203: mol_type = other DNA
ggcgcgccagtcctcgcaatcgcgcggggaggggttaaataggtgagacgtggcgctggctcccggaatatggagccctgggcgcgggggcggcgtgtcaggtggttgcggagctggtaagaatcatattctaagaactcagccactcaggtatccaccatggtgctgggtcctgaacagaagatgtccgactcggaccgatg

SEQ ID NO: 12034 - DNA, 203 bp, synthetic construct
  source 1..203: mol_type = other DNA
ggcgcgccagtcctccgtggtgcgcggtaagcgcgacgaatgttcaggagctaaccgcacccggttcagctcgcctttcttggccagaggcgccggttggactcacgggcggggcatgatggtggtgggtacgggcacctcgctggcgctctcctccctcctgtccctgctgctctttgctgggatgccgactcggaccgatg

SEQ ID NO: 12035 - DNA, 203 bp, synthetic construct
  source 1..203: mol_type = other DNA
ggcgcgccagtcctcttcagatcgcggtaagcgctgacgcatgcgcatagctaaccgcacccggttcagctcgcctgcacctcggtcaggcgccggttggactcacgggcggggcatgatggtggtgggtacgggcacctcgctggcgctcgttctattcctgtccctgctgctctttgctgggatgccgactcggaccgatg

SEQ ID NO: 12036 - DNA, 203 bp, synthetic construct
  source 1..203: mol_type = other DNA
ggcgcgccagtcctcggcctcccgcggtaagcgctgacgcatgcgcatagctaaccgcacccggttcagctcgcctgcacctcggtcaggcgccggttggactcacgggcggggcatgatggtggtgggtacgggcacctcgctggcgctctcctccctcctgtccctgctgctctttgctgggatgccgactcggaccgatg

SEQ ID NO: 12037 - DNA, 203 bp, synthetic construct
  source 1..203: mol_type = other DNA
ggcgcgccagtcctgcgtaattcgcggtaagcgctgacgcatgcgcatagctaaccgcacccggttcagctcgcctttcttggccagaggcgccggttggactcacgggcggggcatgatggtggtgggtacataattaatttcaacgctctcctccctcctgtccctgctgctctttgctgggatgccgactcggaccgatg

SEQ ID NO: 12038 - DNA, 203 bp, synthetic construct
  source 1..203: mol_type = other DNA
ggcgcgccagtccttcaacctacgcggtaagcgctgacgcatgcgcatagctaaccgcacccggttcagctcgcctttcttggccagaggcgccggttggactcacgggcggggcatgatggtggtgggtacgggcacctcgctggcgctcgttctattcctgtccctgctgctctttgctgggatgccgactcggaccgatg

SEQ ID NO: 12039 - DNA, 203 bp, synthetic construct
  source 1..203: mol_type = other DNA
ggcgcgccagtcctaggcgtaccgcggtaagcgctgacgcatgcgcatagctaaccgcacccggttcagctcgcctttcttggccagaggcgccggttggactcacgggcggggcatgatggtggtgggtacgggcacctcgctggcgctctcctccctcctgtccctgctgctggagttcccctgctcgactcggaccgatg

SEQ ID NO: 12040 - DNA, 203 bp, synthetic construct
  source 1..203: mol_type = other DNA
ggcgcgccagtcctaaccgacgcgcggtaagcgctgacgcatgcgcatagctaaccgcacccggttcagctcgcctttcttggccagaggcgccggttggactcacgggcggggcatgatggtggtgggtacgggcacctcgctgggagcgatacgagctctgtccctgctgctctttgctgggatgccgactcggaccgatg

SEQ ID NO: 12041 - DNA, 203 bp, synthetic construct
  source 1..203: mol_type = other DNA
ggcgcgccagtcctgtgatacgcgcggtaagcgctgacgcatgcgcatagctaaccgcacccggttcagctcgcctttcttggccagaggtcagttgactgaaaacgggcggggcatgatggtggtgggtacgggcacctcgctggcgctctcctccctcctgtccctgctgctctttgctgggatgccgactcggaccgatg

SEQ ID NO: 12042 - DNA, 203 bp, synthetic construct
  source 1..203: mol_type = other DNA
ggcgcgccagtcctttcgtctgcgcggtaagcgctgacgcatgcgcatagctaaccgcacccttacgtatctctgattcttggccagaggcgccggttggactcacgggcggggcatgatggtggtgggtacgggcacctcgctggcgctctcctccctcctgtccctgctgctctttgctgggatgccgactcggaccgatg

SEQ ID NO: 12043 - DNA, 203 bp, synthetic construct
  source 1..203: mol_type = other DNA
ggcgcgccagtcctttcatgttcgcggtaagcgctgacgcatgcgcatgtgcgttgatgtttggttcagctcgcctttcttggccagaggcgccggttggactcacgggcggggcatgatggtggtgggtacgggcacctcgctggcgctctcctccctcctgtccctgctgctctttgctgggatgccgactcggaccgatg

SEQ ID NO: 12044 - DNA, 203 bp, synthetic construct
  source 1..203: mol_type = other DNA
ggcgcgccagtcctgacggcggcgctatactgaagacgaaacaaattttcgttgcatacccaataaaagattattatattgcatacccgtttttaataaaatacattgcataccctcttttaataaaaaatattgcatacgttgacgaaacaaattttcgttgcatacccaataaaagattattatatcgactcggaccgatg

SEQ ID NO: 12045 - DNA, 203 bp, synthetic construct
  source 1..203: mol_type = other DNA
ggcgcgccagtcctcaggaaatcgctcagcagggacgtatgacactccagctctgtggtatctgattgttgttgaaccgtctctaagacggtgatactataagtcgtggtttgtgtgtttgtttgttaccttgtgtttgttcgtcacttgtcgacagcgccctgcgaattggtgtacccacaccgcgccgactcggaccgatg

SEQ ID NO: 12046 - DNA, 203 bp, synthetic construct
  source 1..203: mol_type = other DNA
ggcgcgccagtccttccgacggcgctcagcaggggacgccctggtctgagctctgtggtatcaaggaagctgctcgccgtctctaagacggtgatactataagtcgtggtttgtgtgtttgtttgttaccttgtgtttgttcgtcacttgtcgacagcgccctgcgaattggtgtacccacaccgcgccgactcggaccgatg

SEQ ID NO: 12047 - DNA, 203 bp, synthetic construct
  source 1..203: mol_type = other DNA
ggcgcgccagtccttcatgtaccgctcagcaggggacgccctggtctgagctctgtggtatctgattgttgttgaaccgtctctaagacgaacgacgacggttacgtggtttgtgtgtttgtttgttaccttgtgtttgttcgtcacttgtcgacagcgccctgcgaattggtgtacccacaccgcgccgactcggaccgatg

SEQ ID NO: 12048 - DNA, 203 bp, synthetic construct
  source 1..203: mol_type = other DNA
ggcgcgccagtccttatgcttccgctcagcaggggacgccctggtctgagctctgtggtatctgattgttgttgaaccgtctctaagacggtgatactataagtcgtggtttgtgtgtttgtttgttaccttgtgtttgttcgtcacttgtcgacagcgcaagatcggggtacttacccacaccgcgccgactcggaccgatg

SEQ ID NO: 12049 - DNA, 203 bp, synthetic construct
  source 1..203: mol_type = other DNA
ggcgcgccagtccttgaatgtacgctcagcaggggacgccctggtctgagctctgtggtatctgattgttgttgaatgcggggagcacacgtgatactataagtcgtggtttgtgtgtttgtttgttaccttgtgtttgttcgtcacttgtcgacagcgccctgcgaattggtgtacccacaccgcgccgactcggaccgatg

SEQ ID NO: 12050 - DNA, 203 bp, synthetic construct
  source 1..203: mol_type = other DNA
ggcgcgccagtcctatgacctacgctcattctaaggcgggctcttgggtcttttttagcgccatctgctcgcggcgccgcctcctgctcctcccgctgctgctgccgctgccgccctgagtcactgcctgcgcagctccggccgcctggctccccatactagtcgccgatatttggagttcttacaaccgactcggaccgatg

SEQ ID NO: 12051 - DNA, 203 bp, synthetic construct
  source 1..203: mol_type = other DNA
ggcgcgccagtcctgtctgagtcgctccggcaaccttgttgtggaacgtgcgcgcaggctgggctgcaggctctcggctgcagcgctgggtgtcttcaggcctatggagagcagcttgcgtgggctgggcctgcagtacctggtttgcatagatgattggcaggtggatctaggatccggcttccaaccgactcggaccgatg

SEQ ID NO: 12052 - DNA, 203 bp, synthetic construct
  source 1..203: mol_type = other DNA
ggcgcgccagtccttgtcccagcgctccggcaacgccaaccgctccgcgagttatcttacaagctgcaggctctcggctgcagcgctgggtgtcttcaggcctatggagagcagcttgcgtgggctgggcctgcagtacctggtttgcatagatgattggcaggtggatctaggatccggcttccaaccgactcggaccgatg

SEQ ID NO: 12053 - DNA, 203 bp, synthetic construct
  source 1..203: mol_type = other DNA
ggcgcgccagtcctgcatgtcgcgctccggcaacgccaaccgctccgctgcgcgcaggctgggctgcaggctctcgaaactgtgaggacctgtcttcaggcctatggagagcagcttgcgtgggctgggcctgcagtacctggtttgcatagatgattggcaggtggatctaggatccggcttccaaccgactcggaccgatg

SEQ ID NO: 12054 - DNA, 203 bp, synthetic construct
  source 1..203: mol_type = other DNA
ggcgcgccagtcctgcccttagcgctccggcaacgccaaccgctccgctgcgcgcaggctgggctgcaggctctcggctgcagcgctgggtgtcttcaggcctatggagagcagcttgcgtgggctgggcctgcagtacctggtttagcagctaatgactcaggtggatctaggatccggcttccaaccgactcggaccgatg

SEQ ID NO: 12055 - DNA, 203 bp, synthetic construct
  source 1..203: mol_type = other DNA
ggcgcgccagtccttctatatccgctccggcaacgccaaccgctccgctgcgcgcaggctgggctgcaggctctcggctgcagcgctgggtgtcttcaggcctatggagagcagcttgcgtgggctgggcctgcagtacctggtttgcatagatgattggttaccaagaaccttatccggcttccaaccgactcggaccgatg

SEQ ID NO: 12056 - DNA, 203 bp, synthetic construct
  source 1..203: mol_type = other DNA
ggcgcgccagtccttattaagtcgctccggcaacgccaaccgctccgctgcgcgcaggctgggctgcaggctctcggctgcagcgctgggtgtcttcaggcctatggagagcagcttgtcctcatattctaagcagtacctggtttgcatagatgattggcaggtggatctaggatccggcttccaaccgactcggaccgatg

SEQ ID NO: 12057 - DNA, 203 bp, synthetic construct
  source 1..203: mol_type = other DNA
ggcgcgccagtcctaggctcttcgctccggcaacgccaaccgctccgctgcgcgcaggctggtgactttatgaaatgctgcagcgctgggtgtcttcaggcctatggagagcagcttgcgtgggctgggcctgcagtacctggtttgcatagatgattggcaggtggatctaggatccggcttccaaccgactcggaccgatg

SEQ ID NO: 12058 - DNA, 203 bp, synthetic construct
  source 1..203: mol_type = other DNA
ggcgcgccagtcctcgataacgcgctcctagagctcgggccgtggctccaactttggccaaccttttggctccgagggcagtcgctgggcttccgagaggggttcgggctgcgtaggggcgctttgttttgttcggttttgtttttttgagagtgcgagagaggcggtcgtgcagacccgggagaaagcgactcggaccgatg

SEQ ID NO: 12059 - DNA, 203 bp, synthetic construct
  source 1..203: mol_type = other DNA
ggcgcgccagtcctattggacccgctcctagagctcgggccgtggctcgtcggggtctgtgtcttttggctccgagggcagtcgctgggcttccgagaggggttcgggctgcgtaggggcgctttgttttgttcggttttgtttttaaattgacttataggaggcggtcgtgcagacccgggagaaagcgactcggaccgatg

SEQ ID NO: 12060 - DNA, 203 bp, synthetic construct
  source 1..203: mol_type = other DNA
ggcgcgccagtcctccaacggccgctcctagagctcgggccgtggctcgtcggggtctgtgtcttttggctccgagggcagtcgctgggcttccgagaggggttcgggctgcgtaggggcgctttgttttgttcggttttgtttttttgagagtgcgagacgcctctagaccgtgacccgggagaaagcgactcggaccgatg

SEQ ID NO: 12061 - DNA, 203 bp, synthetic construct
  source 1..203: mol_type = other DNA
ggcgcgccagtcctggtttcggcgctcctagagctcgggccgtggctcgtcggggtctgtgtcttttggctccgagggcagtcgctgggcttccgagaggggttcgggctgcgtagggtgataggtagccactcggttttgtttttttgagagtgcgagagaggcggtcgtgcagacccgggagaaagcgactcggaccgatg

SEQ ID NO: 12062 - DNA, 203 bp, synthetic construct
  source 1..203: mol_type = other DNA
ggcgcgccagtccttcgagagacgctgggtaaccgaggaagccttaaaggccgcgaggaggagggaaaaggcgagcaaaaaggaagagtgggaggaggaggggaagcggcgaaggaggaagaggaggaggaggaagaggggagcacaaaggatccaggtctcccgacgggaggttaataccaagaacccgactcggaccgatg

SEQ ID NO: 12063 - DNA, 203 bp, synthetic construct
  source 1..203: mol_type = other DNA
ggcgcgccagtcctgctacggtcgctgggtaacctctatccgagccgcggccgcgaggaggacaacggctttcgaaaaaaaggaagagtgggaggaggaggggaagcggcgaaggaggaagaggaggaggaggaagaggggagcacaaaggatccaggtctcccgacgggaggttaataccaagaacccgactcggaccgatg

SEQ ID NO: 12064 - DNA, 203 bp, synthetic construct
  source 1..203: mol_type = other DNA
ggcgcgccagtcctaatcgaaccgctgggtaacctctatccgagccgcggccgcgaggaggagggaaaaggcgagcaaaaaggaagagtgggaggaggaggggaagcggcgaaggaggaagaggaggaggaggaagaggggagcacaaaggatccaggtctcccgacgggaggttaataccaagaacccgactcggaccgatg

SEQ ID NO: 12065 - DNA, 203 bp, synthetic construct
  source 1..203: mol_type = other DNA
ggcgcgccagtcctctggataacgctgggtaacctctatccgagccgctcatagccccgtatgggaaaaggcgagcaaaaaggaagagtgggaggaggaggggaagcggcgaaggaggaagaggaggaggaggaagaggggagcacaaaggatccaggtctcccgacgggaggttaataccaagaacccgactcggaccgatg

SEQ ID NO: 12066 - DNA, 203 bp, synthetic construct
  source 1..203: mol_type = other DNA
ggcgcgccagtcctcgaagatgcggcatgcactgacctggctttaatttcagggaagagtcgcgcccccggggagggagcagcactggcccattctgcagatggggacatcgagtcacgggctggctacgaactcctcgggggcgaaggtggcggagagggatgggttccaggacgtcctggcgcccgcgactcggaccgatg

SEQ ID NO: 12067 - DNA, 203 bp, synthetic construct
  source 1..203: mol_type = other DNA
ggcgcgccagtcctggcatgtccggcatgcactgcgggccgccgggcctcagggaagagtcgcgcccccggggagggagcagcactggcccattctgcagatggggacatcgagtcacgggctggctacgaactcctcgggggcgaaggtggcggagagggatgggttccaggatccaagattatgaacgactcggaccgatg

SEQ ID NO: 12068 - DNA, 203 bp, synthetic construct
  source 1..203: mol_type = other DNA
ggcgcgccagtcctttctaaaccggcatgcactgcgggccgccgggcctcagggaagagtcgcgcccccggggagggagcagcactggcccattctgcagatggggacatcgagtcacgggctggctacgaactcctcgggggcgagttgcaaatgtcctgatgggttccaggacgtcctggcgcccgcgactcggaccgatg

SEQ ID NO: 12069 - DNA, 203 bp, synthetic construct
  source 1..203: mol_type = other DNA
ggcgcgccagtcctcacgtcagcggccccgcccccgccgttcgcgctccactgttagattccagccagcccccgaccccgggccacctgggcccccgggttccgccggcactctcgccaccaccgcgtgggtctgacaagatgtaccaggtcccactaccactggatcgggatgggaccctggtacggcgactcggaccgatg

SEQ ID NO: 12070 - DNA, 203 bp, synthetic construct
  source 1..203: mol_type = other DNA
ggcgcgccagtcctgctaagtacggccccgcccccgccgttcgcgctctgaccagcccgcagagccagcccccgaccccgggccacctgggcccccgggttccgagctgtggtattggaccaccgcgtgggtctgacaagatgtaccaggtcccactaccactggatcgggatgggaccctggtacggcgactcggaccgatg

SEQ ID NO: 12071 - DNA, 203 bp, synthetic construct
  source 1..203: mol_type = other DNA
ggcgcgccagtcctaaccagatcggccccgcccccgccgttcgcgctctgaccagcccgcagagccagcccccgaccccgggccacctgggcccccgggttccgccggcactctcgccaccaccgcgtgggtctgacaagatgtaccaggtcccactacccactccagccttaaggaccctggtacggcgactcggaccgatg

SEQ ID NO: 12072 - DNA, 203 bp, synthetic construct
  source 1..203: mol_type = other DNA
ggcgcgccagtccttctctagtcggccccgcccccgccgttcgcgctctgaccagcccgcagcatgtcaattaaggcccgggccacctgggcccccgggttccgccggcactctcgccaccaccgcgtgggtctgacaagatgtaccaggtcccactaccactggatcgggatgggaccctggtacggcgactcggaccgatg

SEQ ID NO: 12073 - DNA, 203 bp, synthetic construct
  source 1..203: mol_type = other DNA
ggcgcgccagtcctgtgttcgtcggcccgttaaatggccgccatgtgcttcccgaaggtcctctctgatgacatgaagaagctgaaggcccgaatgcaccaggccatagaaagattttatgataaaatgcaaaatgcagaatcaggacgtggacaggacgacttcaaagagggctacctggagacagtcgactcggaccgatg

SEQ ID NO: 12074 - DNA, 203 bp, synthetic construct
  source 1..203: mol_type = other DNA
ggcgcgccagtcctcgcagaatcggcgcggcaaattgcaacagtttggaagcaagtgctgtgtgtcctagtctaagggtttcgtgttccgtcacgagattccattctacaaacgccttactcgaggttccgtctcgtgtttgtgtggaagcaaagttctgtctttgtggaaaccagtaactgttcctacgactcggaccgatg

SEQ ID NO: 12075 - DNA, 203 bp, synthetic construct
  source 1..203: mol_type = other DNA
ggcgcgccagtccttcatagtgcggcggcggtagattagggccgcgggtcggagcactcaccgccgctgggggaccctgtcggaagcaactgccgccgccgcctctttcatctcttctggggcaggggccagccgtgctgcgccgccatccataagtagacctttttggagcctcaccagccaattcacgactcggaccgatg

SEQ ID NO: 12076 - DNA, 203 bp, synthetic construct
  source 1..203: mol_type = other DNA
ggcgcgccagtcctgaggcacccggcggcggtagattagggccgcgggtcggagcactcaccgccgctgggggacctgtaacatgagggatgccgccgccgcctctttcatctcttctggggcaggggccagggccaggttttacacatccataagtagacctttttggagcctcaccagccaattcacgactcggaccgatg

SEQ ID NO: 12077 - DNA, 203 bp, synthetic construct
  source 1..203: mol_type = other DNA
ggcgcgccagtcctttaggttccggctcccagggttttaaaaaatgtggggagccctggaggcgcagccccaccccggccggcgcggctcgctcccacgcccccgccgcggcctcgctggagcggacggactgagtcagagggggcgccagcgctgcaggagctgacatggacccaaatcctcgggcccgactcggaccgatg

SEQ ID NO: 12078 - DNA, 203 bp, synthetic construct
  source 1..203: mol_type = other DNA
ggcgcgccagtcctaacctcctcggctctccgcgccttcttttctccgcgcgcccggcgcgaagcctgcgattcgtgagccgagcgcagagcgcagagccgagtggcgcacgctgggcagtggcctgggcaaccccaaacgcagccagagccctcacccgagtccgctggcccgcgcactcccggacccgactcggaccgatg

SEQ ID NO: 12079 - DNA, 203 bp, synthetic construct
  source 1..203: mol_type = other DNA
ggcgcgccagtcctggttccctcggctctccgcgccttcttttctccgcgcgcccggcgcgaagcctgcgattcgtgagccgagcgcagagcgcagagccgagtggcgcacgctgggcagtggcctgggcaaccccaaacgcagccagagccctcacccgagtccgctggcccgcggggaagaggacccgactcggaccgatg

SEQ ID NO: 12080 - DNA, 203 bp, synthetic construct
  source 1..203: mol_type = other DNA
ggcgcgccagtccttataacctcggctctccgcgctcctccctctccgcgcgcccggcgcgaagcctgcgattcgtatcgtagcaatctcgcgcagagccgagtggcgcacgctgggcagtggcctgggcaaccccaaacgcagccagagccctcacccgagtccgctggcccgcgcactcccggacccgactcggaccgatg

SEQ ID NO: 12081 - DNA, 203 bp, synthetic construct
  source 1..203: mol_type = other DNA
ggcgcgccagtcctaagggcgtcggctctccgcgctcctccctctccgcgcgcccggcgcgaagcctgcgattcgtgagccgagcgcagagcgcagagccgagttcaatcgtgatattagtggcctgggcaaccccaaacgcagccagagccctcacccgagtccgctggcccgcgcactcccggacccgactcggaccgatg

SEQ ID NO: 12082 - DNA, 203 bp, synthetic construct
  source 1..203: mol_type = other DNA
ggcgcgccagtcctagatatcacggctctccgcgctcctccctctccgcgcgcccggcgcgaagcctgcgattcgtgagccgagcgcagattcggacctatgcgggcgcacgctgggcagtggcctgggcaaccccaaacgcagccagagccctcacccgagtccgctggcccgcgcactcccggacccgactcggaccgatg

SEQ ID NO: 12083 - DNA, 203 bp, synthetic construct
  source 1..203: mol_type = other DNA
ggcgcgccagtcctttgctaaccggctctgggtggccgaggcggcagctgcgcggcggcaccggggcggctgcggcgcgctcggagccccattttgctagcagacgggcagctcggtgtgcgcccccgcgagagccggggccccaggcccgccggacaccatgaaccacctgaacgtgctggccaaagcgactcggaccgatg

SEQ ID NO: 12084 - DNA, 203 bp, synthetic construct
  source 1..203: mol_type = other DNA
ggcgcgccagtcctctatcttccggctgcctggtccgccggaggaccacggctcgccagggctgcggaggaccgaccgtccccacgcctgccgccccgcgaccccgaccgccagcatgatcgccgcgcagctcctggcctattacttcacggagctgaaggatgaccaggtcaaaaagattgacaagtcgactcggaccgatg

SEQ ID NO: 12085 - DNA, 203 bp, synthetic construct
  source 1..203: mol_type = other DNA
ggcgcgccagtcctgcgcactacgggaaaagaccaacagaaagacttgaccctcttaggtgtcatacctaagatcagtgtgttttttgtgtccaattcttttatcaccaaaaaagagaagaaatattgcagtgaatgaagattcctctgcattttagcactgctttttcaactgtagttggcttttgacgactcggaccgatg

SEQ ID NO: 12086 - DNA, 203 bp, synthetic construct
  source 1..203: mol_type = other DNA
ggcgcgccagtccttacctgcgcgggactcctgctcctcacttgtgtccccaatggggctagctcgggtccacaacagctgccgatcaatggggtctttgtctttgtttcatgggtgtccagattttatcaattaaagcctgtgggaactgccagctcggcaagaggtaggcttggtctgcgccgatacgactcggaccgatg

SEQ ID NO: 12087 - DNA, 203 bp, synthetic construct
  source 1..203: mol_type = other DNA
ggcgcgccagtcctgcaccagtcgggagctttccggagctgctggtactcccgattggagacgtagaaccgttactctagtgcacggggcgcggccgccgtgaccctctcggggatcccacgatgttcttctacctgagcaagaaaatttccattcccaataacgtgaagctgcagtgtgtatcctggcgactcggaccgatg

SEQ ID NO: 12088 - DNA, 203 bp, synthetic construct
  source 1..203: mol_type = other DNA
ggcgcgccagtcctgtttctggcgggagctttccggagctgctggtactcccgattggagacgtagaaccgttacttgtcgagggccttagcggccgccgtgaccctctcggggatcccacgatgttcttctacctgagcaagaaaatttccattcccaataacgtgaagctgcagtgtgtatcctggcgactcggaccgatg

SEQ ID NO: 12089 - DNA, 203 bp, synthetic construct
  source 1..203: mol_type = other DNA
ggcgcgccagtccttttctgcacgggagctttccggagctgctggtactcccgattggagacgtagaaccgttacttgtcgagggccttagcggccgccgtgaccctctcggggatcccacgatgttcttctacctgagcaagaaaatttccattcccaataacgtgaagctgcttccatccgaagaccgactcggaccgatg

SEQ ID NO: 12090 - DNA, 203 bp, synthetic construct
  source 1..203: mol_type = other DNA
ggcgcgccagtcctcctctccgcgggagctttccggagctgctggtactcccgattggagacgtagaaccgttacttgtcgagggccttagcggccgccgtgaccctctcggggatcccacgatgttcttctacctgagcaagaaatgactagcaattggtaacgtgaagctgcagtgtgtatcctggcgactcggaccgatg

SEQ ID NO: 12091 - DNA, 203 bp, synthetic construct
  source 1..203: mol_type = other DNA
ggcgcgccagtcctttctggaacgggagctttccggagctgctggtactcccgattggagacgtagaaccgttacttgtcgagggccttagcggccgccgtgaccctctcggggatcccacgatgttcttctcaagttcgcctcctatttccattcccaataacgtgaagctgcagtgtgtatcctggcgactcggaccgatg

SEQ ID NO: 12092 - DNA, 203 bp, synthetic construct
  source 1..203: mol_type = other DNA
ggcgcgccagtcctattagaaacgggagggggaaggacccccaccgctgcccttcccggggaggcgggaaatgcatatccaggtatgttcccgcggcggcctacagccggggtagcccaagaaccttcgggtgagggcgggtggcattttcttttcctataccgatcatggcagtccttctgctcctacgactcggaccgatg

SEQ ID NO: 12093 - DNA, 203 bp, synthetic construct
  source 1..203: mol_type = other DNA
ggcgcgccagtccttacttcttcgggagggggaaggacccccaccgctgcccttcccggggaggcgggaaatgcatggggccacccagctccgcggcggcctacagccggggtagcccaagaaccttcgggtgagggcgggtggcattttcttttcctataccgatcatggcagtccttctgctcctacgactcggaccgatg

SEQ ID NO: 12094 - DNA, 203 bp, synthetic construct
  source 1..203: mol_type = other DNA
ggcgcgccagtccttggcgccgcgggagggggaaggacccccaccgctgcccttcccggggaggcgggaaatgcatggggccacccagctgtcacagccttcgaagccggggtagcccaagaaccttcgggtgagggcgggtggcattttcttttcctataccgatcatggcagtccttctgctcctacgactcggaccgatg

SEQ ID NO: 12095 - DNA, 203 bp, synthetic construct
  source 1..203: mol_type = other DNA
ggcgcgccagtcctaatccgagcgggagggggaattgtgtgtcagatggcccttcccggggaggcgggaaatgcatggggccacccagctccgcggcggcctacagccggggtagcccaagaaccttcgggtgagggcgggtggcattttcttttcctataccgatcatggcagtccttctgctcctacgactcggaccgatg

SEQ ID NO: 12096 - DNA, 203 bp, synthetic construct
  source 1..203: mol_type = other DNA
ggcgcgccagtcctcggcagcgcgggatgctgccttcccatatgaagcaatccttcaacaccgacttaggttcaattttctcatcatttactgttgtaattcaatcttactaaagttattccgatatttaagaaaaaataacctttatataatgtaacaatactattaagattatgatataggccagacgactcggaccgatg

SEQ ID NO: 12097 - DNA, 203 bp, synthetic construct
  source 1..203: mol_type = other DNA
ggcgcgccagtcctgtacgtaacgggcgcgcttccgcctgtgtggaggaaaccccacccaacggctgccacggcatggagaatggctccgcttctgttgcagctggcggtgctcggcgcggcgctggcggccgcagccctcgtactgatttccatcgttgcatttacaactgctacaaaaatgccagccgactcggaccgatg

SEQ ID NO: 12098 - DNA, 203 bp, synthetic construct
  source 1..203: mol_type = other DNA
ggcgcgccagtcctgttcataccgggcgcgcttccgcctgtgtggaggtgcgggattgggcgcaactagtgtaagaggagaatggctccgcttctgttgcagctggcggtgctcggcgcggcgctggcggccgcagccctcgtactgatttccatcgttgcatttacaactgctacaaaaatgccagccgactcggaccgatg

SEQ ID NO: 12099 - DNA, 203 bp, synthetic construct
  source 1..203: mol_type = other DNA
ggcgcgccagtcctcaaccacccgggcgcgcttccgcctgtgtggaggtgcgggattgggcgggctgccacggcataacagggaaaggttcttctgttgcagctggcggtgctcggcgcggcgctggcggccgcagccctcgtactgatttccatcgttgcatttacaactgctacaaaaatgccagccgactcggaccgatg

SEQ ID NO: 12100 - DNA, 203 bp, synthetic construct
  source 1..203: mol_type = other DNA
ggcgcgccagtccttcataaatcgggcgcgcttccgcctgtgtggaggtgcgggattgggcgggctgccacggcatggagaatggctccgcttctgttgcagctggcggtgctcggcggctgctgtttacaggcagccctcgtactgatttccatcgttgcatttacaactgctacaaaaatgccagccgactcggaccgatg

SEQ ID NO: 12101 - DNA, 203 bp, synthetic construct
  source 1..203: mol_type = other DNA
ggcgcgccagtcctcgctcgcccgggctgagtaaatgcaggatgaaataccgaaacgcggtctttctctagacgcgtcttgctgggagagtgtccgttgcttcccgtccgtgtcgcggccctgcggttggcggcctcctcgtggagcggagcaaggccaggcggcccctgctcgagtcccgcgtcgcccgactcggaccgatg

SEQ ID NO: 12102 - DNA, 203 bp, synthetic construct
  source 1..203: mol_type = other DNA
ggcgcgccagtcctgagtgacgcgggctgagtaataaattccccccgcaccgaaacgcggtctttctctagacgcgtcttgctgggagaggacttcgactaattcgtccgtgtcgcggccctgcggttggcggcctcctcgtggagcggagcaaggccaggcggcccctgctcgagtcccgcgtcgcccgactcggaccgatg

SEQ ID NO: 12103 - DNA, 203 bp, synthetic construct
  source 1..203: mol_type = other DNA
ggcgcgccagtcctactgtaagcgggctgagtaataaattccccccgcaccgaaacgcggtctttctctagacgcgtcttgctgggagagtgtccgttgcttcccgtccgtgtcgcggccctgcggttggcggcctcctcgtggagcggagcaaggccagttttagaactactaagtcccgcgtcgcccgactcggaccgatg

SEQ ID NO: 12104 - DNA, 203 bp, synthetic construct
  source 1..203: mol_type = other DNA
ggcgcgccagtcctctggaaggcgggctgagtaataaattccccccgcaccgaaacgcggtctttctctagacgcgtcttgctgggagagtgtccgttgcttcccgtccgtgtcgcggccctgcggttggcggcctcctcgtggagttccaattataatagcggcccctgctcgagtcccgcgtcgcccgactcggaccgatg

SEQ ID NO: 12105 - DNA, 203 bp, synthetic construct
  source 1..203: mol_type = other DNA
ggcgcgccagtccttcgggcttcgggctgagtaataaattccccccgccatttgctaatcattttctctagacgcgtcttgctgggagagtgtccgttgcttcccgtccgtgtcgcggccctgcggttggcggcctcctcgtggagcggagcaaggccaggcggcccctgctcgagtcccgcgtcgcccgactcggaccgatg

SEQ ID NO: 12106 - DNA, 203 bp, synthetic construct
  source 1..203: mol_type = other DNA
ggcgcgccagtcctgacgataacggggagctttctggcgcccgaacagggacctgaaagcgaaagggaaaccagaggagctctctcgacgcaggactcggcttgctgaagcgcgcacggcaagaggcgaggggcggcgactggtgagtacgccaaaaattttgactagcggaggctagaaggagagagcgactcggaccgatg

SEQ ID NO: 12107 - DNA, 203 bp, synthetic construct
  source 1..203: mol_type = other DNA
ggcgcgccagtccttgtattcccggtgcctaaggccgcgctgccgggctcgagcggaggcggcgcaggcgctgaggctggcgcggagcggctagaactagcgtagtgcggaaagcgctaggtccagccctgctgggagttttctgccacacagatttgcggaagaacctgaccgtggacgagggcacccgactcggaccgatg

SEQ ID NO: 12108 - DNA, 203 bp, synthetic construct
  source 1..203: mol_type = other DNA
ggcgcgccagtccttcggcccacggtggaaaggtccattgcaatccctccaggaagcggccgcatgctgacattagtccatagacggctccccccggtggatcccgtggcgattcctgaaaaaagctgcatgcccaagaccagacgccagcgaactcgccgagcacgccgcaacagaccaccaacacccgactcggaccgatg

SEQ ID NO: 12109 - DNA, 203 bp, synthetic construct
  source 1..203: mol_type = other DNA
ggcgcgccagtcctccctgccgcggtggaaaggtccattgcaatccctccaggaagcggccggggcagccttgctcctggcgcgtcaactcccccggtggatcccgtggcgattcctgaaaaaagctgcatgcccaagaccagacgccagcgaactcgccgagcacgccgcaacagaccaccaacacccgactcggaccgatg

SEQ ID NO: 12110 - DNA, 203 bp, synthetic construct
  source 1..203: mol_type = other DNA
ggcgcgccagtcctgacagggtcggtggaaaggtccattgcaatccctccaggaagcggccggggcagccttgctctccatagacggctccccccggtggatcccgtggcgattcctgaaaaaagctgcatgcccaagaccagacgagtctcggagttatgagcacgccgcaacagaccaccaacacccgactcggaccgatg

SEQ ID NO: 12111 - DNA, 203 bp, synthetic construct
  source 1..203: mol_type = other DNA
ggcgcgccagtcctgaattaatcggtggaaaggtccattgcaatccctccaggaagcggccggggcagccttgctctccatagacggctccccccggtggatcccgtggcgattcctgaaaaaagctgcatgcccaagaccagacgccagcgaactcgccgagcacgccgcaacagaccaccaacacccgactcggaccgatg

SEQ ID NO: 12112 - DNA, 203 bp, synthetic construct
  source 1..203: mol_type = other DNA
ggcgcgccagtcctccgtccgccggtggaaaggtccattgcaatccctccaggaagcggccggggcagccttgctctccatagacggctccccccggtggatcccgtggcgattcctgttgtccttgcacatcccaagaccagacgccagcgaactcgccgagcacgccgcaacagaccaccaacacccgactcggaccgatg

SEQ ID NO: 12113 - DNA, 203 bp, synthetic construct
  source 1..203: mol_type = other DNA
ggcgcgccagtcctcgacggcacggtggaaaggtccattgcaatccctccaggaagcggccggggcagccttgctctccatagacggctcggattctgtctatacgtggcgattcctgaaaaaagctgcatgcccaagaccagacgccagcgaactcgccgagcacgccgcaacagaccaccaacacccgactcggaccgatg

SEQ ID NO: 12114 - DNA, 203 bp, synthetic construct
  source 1..203: mol_type = other DNA
ggcgcgccagtcctgggttgcgcggtggagtccatccttgcggagctcgccgcctgattctaggctggtcactactccgagcctgtgacgtttgcggcagccaggccgtcgacgatgcccagtgaaactctctgggaaattgcaaaagctgaagtggaaaaaaggggaattaatggaagtgaaggtgacgactcggaccgatg

SEQ ID NO: 12115 - DNA, 203 bp, synthetic construct
  source 1..203: mol_type = other DNA
ggcgcgccagtcctttcattaacggtgttcctggcctcggcgctccggactcccaagtctccgccggaccctcctttggatattcctcgtgtctccgattctgagacagagggggaagacggtggggcctccccacctgccccgcagaagatgcagttctttggccgcctggtcaataccttcagtggcgactcggaccgatg

SEQ ID NO: 12116 - DNA, 203 bp, synthetic construct
  source 1..203: mol_type = other DNA
ggcgcgccagtcctcaaatcggcggttgcgggactattttgcaaatattttgagagacattgatttttctccccgtgctcccccgttcttccctgcggagtgcgctgcgccgcccagccctgtcgccccccggaggtgatccctccctcctgcctgcccgccagcctgacctgtgcccggctcgcgggcgactcggaccgatg

SEQ ID NO: 12117 - DNA, 203 bp, synthetic construct
  source 1..203: mol_type = other DNA
ggcgcgccagtccttattccgacgtagagggggttacgcgggtggctggacctacatgcttcctgctgtggctgtctcggaacccgtggtcctccgcttcatgattttctgccgtctcttggcaaaaatggcaaataatgatgctgttctgaagagactggagcagaagggtgcagaggcagatcaaacgactcggaccgatg

SEQ ID NO: 12118 - DNA, 203 bp, synthetic construct
  source 1..203: mol_type = other DNA
ggcgcgccagtccttggtggttcgtatattgtcgagcacagacagattgacctattggggtgtttcgcgagtgtgagagggaagcgccgcggcctgtatttctagacctgcccttcgcctggttcgtggcgccttgtgaccccgggcccctgccgcctgcaagtcggaaattgcgctgtgctcctgtgcgactcggaccgatg

SEQ ID NO: 12119 - DNA, 203 bp, synthetic construct
  source 1..203: mol_type = other DNA
ggcgcgccagtcctataccggccgtattcaacaaggggctgaaggatgcccagaaggtaccccattgtatgggatctgatctggggcctcggtgcacatgctttacatgtgtttagtcgaggttaaaaaacgatagtagtagtgctaccacggggacgtggttttcctttgaaaaacacgatgataatcgactcggaccgatg

SEQ ID NO: 12120 - DNA, 203 bp, synthetic construct
  source 1..203: mol_type = other DNA
ggcgcgccagtcctggcgaagacgtattcaacaaggggctgaaggatgcccagaaggtaccccattgtatgggatctgatctggggcctcggtgcacatgctttacatgtgtttagtcgaggttaaaaaacgtctaggccccccgaaccacggggacgtggttttcctttgaaaaacacgatgataatcgactcggaccgatg

SEQ ID NO: 12121 - DNA, 203 bp, synthetic construct
  source 1..203: mol_type = other DNA
ggcgcgccagtcctcgtagggccgtattcaacaatcatggcccacgaccccagaaggtaccccattgtatgggatctgatctggggcctcggtgcacatgctttacatgtgtttagtcgaggttaaaaaacgtctaggccccccgaaccacggggacgtggttttcctttgaaaaacacgatgataatcgactcggaccgatg

SEQ ID NO: 12122 - DNA, 203 bp, synthetic construct
  source 1..203: mol_type = other DNA
ggcgcgccagtccttctggagccgtctatctaaggaaaacagggtgggagagctgcctctctttgaacctctcccaggaccaactctaacccagggaggcaaacttggtcgatgtaagcggtggcttggagacagaatcatctaatggaaaagatacactagaaggtgctggggatacatcagaggtgcgactcggaccgatg

SEQ ID NO: 12123 - DNA, 203 bp, synthetic construct
  source 1..203: mol_type = other DNA
ggcgcgccagtcctagtgaattcgtgctgttcccgccaattcctgtggcttgagcctagcgagcgagttccgcgctcaatggagacgtttgaccccaccgagctgcccgagctgcttaaactttattaccggaggctctttccctactctcagtactatcgctggctcaactacggtggagtgataaacgactcggaccgatg

SEQ ID NO: 12124 - DNA, 203 bp, synthetic construct
  source 1..203: mol_type = other DNA
ggcgcgccagtcctacacgacccgtgctgttcccgccaattcctgtggtaatccttaccgtggcgagttccgcgctcaatggagacgtttatgggagaatctgagcccgagctgcttaaactttattaccggaggctctttccctactctcagtactatcgctggctcaactacggtggagtgataaacgactcggaccgatg

SEQ ID NO: 12125 - DNA, 203 bp, synthetic construct
  source 1..203: mol_type = other DNA
ggcgcgccagtccttagaactacgtgctgttcccgccaattcctgtggtaatccttaccgtggcgagttccgcgctcaatggagacgtttgaccccaccgagctgcccgagctgcttaaactttattaccgggacgcggccagtctctctcagtactatcgctggctcaactacggtggagtgataaacgactcggaccgatg

SEQ ID NO: 12126 - DNA, 203 bp, synthetic construct
  source 1..203: mol_type = other DNA
ggcgcgccagtcctttcttactcgtggtatgacagggtagcctggcagtgtcagaagtctgaacccagcatagtggtcagcaggcaggacgaatcacactgaatgcaaaccacagggtttcgcagcgtggtaaaagaaatcattgagtcccccgccttcagaagagggtgcattttcaggaggaagcgcgactcggaccgatg

SEQ ID NO: 12127 - DNA, 203 bp, synthetic construct
  source 1..203: mol_type = other DNA
ggcgcgccagtcctaacgatttcgtggtttgtgtcacgcgagacccgattgtgtttgttcgtcacttgtcgacagcgccctgcgaattggtgtacccacaccgcgcggcttgcgaataatactttggagagtcttttgcctccagtgtcttccgtttgtactcgtcctcctctccctctccggccgggcgactcggaccgatg

SEQ ID NO: 12128 - DNA, 203 bp, synthetic construct
  source 1..203: mol_type = other DNA
ggcgcgccagtccttgagtgatcgtggtttgtgtgtttgtttgttaccggtatagcaaaaagcacttgtcgacagcgccctgcgaattggtgtacccacaccgcgcggcttgcgaataatactttggagagtcttttgcctccagtgtcttccgtttgtactcgtcctcctctccctctccggccgggcgactcggaccgatg

SEQ ID NO: 12129 - DNA, 203 bp, synthetic construct
  source 1..203: mol_type = other DNA
ggcgcgccagtcctaccatcaacgtggtttgtgtgtttgtttgttaccttgtgtttgttcgtcacttgtcgacagcgccctgcgaattggcccggatgaggttggcggcttgcgaataatactttggagagtcttttgcctccagtgtcttccgtttgtactcgtcctcctctccctctccggccgggcgactcggaccgatg

SEQ ID NO: 12130 - DNA, 203 bp, synthetic construct
  source 1..203: mol_type = other DNA
ggcgcgccagtcctagctgcggcgtggtttgtgtgtttgtttgttaccttgtgtttgttcgtcacttgtcgacagcgccctgcgaattggtgtacccacaccgcgcggcttgcgaataatactttggagagtcttttgcctccagtgtcttccgtttgtactcgtcctcctctcttcaatgcttaccacgactcggaccgatg

SEQ ID NO: 12131 - DNA, 203 bp, synthetic construct
  source 1..203: mol_type = other DNA
ggcgcgccagtcctcttatgtgcgtggtttgtgtgtttgtttgttaccttgtgtttgttcgtcacttgtcgacagcgccctgcgaattggtgtacccacaccgcgcggcttgcgaataatactttggagagtcttttgcctccagtgtcttccgtttgtatagaagagaaaagtcctctccggccgggcgactcggaccgatg

SEQ ID NO: 12132 - DNA, 203 bp, synthetic construct
  source 1..203: mol_type = other DNA
ggcgcgccagtcctcctaaaggcgtgtgaggtctactggtttgctactttaccaactggtcccaggaccggcaggaaccaggaaaattcacccctgagaatattgaccccttcctatgctctcatctcatctattcattcgccagcatcgaaaacaacaaggttatcatcaaggacaagagtgaagtgcgactcggaccgatg

SEQ ID NO: 12133 - DNA, 203 bp, synthetic construct
  source 1..203: mol_type = other DNA
ggcgcgccagtccttcgttatacgttccctccctccggcgagggccgcctttataacaactgctcagagtgcgagggcgggatagctgtccaaggtctcccccaaggaatgtccctaagcctgctgccctcttgcgcgcgggaagcagcaccaagttcacggccaacgccttggcactagggtccagacgactcggaccgatg

SEQ ID NO: 12134 - DNA, 203 bp, synthetic construct
  source 1..203: mol_type = other DNA
ggcgcgccagtcctattcaccccgttccctccctccggcgagggccgcctttataacaactgctcagagtgcgagggcgggatagctgtccaaggtctcccccagcactgaggagctcgcctgctgccctcttgcgcgcgggaagcagcaccaagttcacggccaacgccttggcactagggtccagacgactcggaccgatg

SEQ ID NO: 12135 - DNA, 203 bp, synthetic construct
  source 1..203: mol_type = other DNA
ggcgcgccagtcctaacttgtccgttccctccctccggcgagggccgcctttataacaactgctcagagtgcgagggcgggatagctgtccaaggtctcccccagcactgaggagctcgcctgctgccctcttgcgcgcgggaagccagcatgttaaacgggccaacgccttggcactagggtccagacgactcggaccgatg

SEQ ID NO: 12136 - DNA, 203 bp, synthetic construct
  source 1..203: mol_type = other DNA
ggcgcgccagtcctaggtattgcgttccctccctccggcgagggccgcctttataacaactgtgggacaacatgaagcgggatagctgtccaaggtctcccccagcactgaggagctcgcctgctgccctcttgcgcgcgggaagcagcaccaagttcacggccaacgccttggcactagggtccagacgactcggaccgatg

SEQ ID NO: 12137 - DNA, 203 bp, synthetic construct
  source 1..203: mol_type = other DNA
ggcgcgccagtcctttgcgctccgttcgccccacatttgcaatcttacgggaccgcggcccaggctgaagctcagggccctgtctgctctgtggactcaacagtttgtggcaagacaagctcagaactgagaagctgtcaccacagtagcttggagctcggcggcacaaccagcaccatctggtcgcgcgactcggaccgatg

SEQ ID NO: 12138 - DNA, 203 bp, synthetic construct
  source 1..203: mol_type = other DNA
ggcgcgccagtcctgtcctacacgttcgccccacctggtatagaaatcgggaccgcggcccaggctgaagctcagggccctgtctgctctgtggactcaacagtttgtggcaagacaagctcagaactgagaagctgtcaccacagtagcttggagctcggcggcacaaccagcaccatctggtcgcgcgactcggaccgatg

SEQ ID NO: 12139 - DNA, 203 bp, synthetic construct
  source 1..203: mol_type = other DNA
ggcgcgccagtcctaatttcatcgttcgccccagggaccggcaggcgggggaccgcggcccaggctgaagctcagggccctgtctgctctgtggactcaacagtacactaactccaccgctcagaactgagaagctgtcaccacagtagcttggagctcggcggcacaaccagcaccatctggtcgcgcgactcggaccgatg

SEQ ID NO: 12140 - DNA, 203 bp, synthetic construct
  source 1..203: mol_type = other DNA
ggcgcgccagtcctgacgcgtacgttcgccccagggaccggcaggcgggggaccgcggcccaggctgaagctcagggccctgtctgctctgtggactcaacagtttgtggcaagacaagctcagaactgagaagctgtcaccacagtagcttggagctcgctaattgcttattgaccatctggtcgcgcgactcggaccgatg

SEQ ID NO: 12141 - DNA, 203 bp, synthetic construct
  source 1..203: mol_type = other DNA
ggcgcgccagtcctacggattacgttcgccccagggaccggcaggcgggggaccgcggcccaggctgaagctcagggccctgtctgctctgtggactcaacagtttgtggcaagacaagctcagaactgagaagctgtcaccacagtagcttggagctcggcggcacaaccagcaccatctggtcgcgcgactcggaccgatg

SEQ ID NO: 12142 - DNA, 203 bp, synthetic construct
  source 1..203: mol_type = other DNA
ggcgcgccagtccttcatcggacgttcgccccagggaccggcaggcgggggaccgcggcccatctgtcgcggagttgccctgtctgctctgtggactcaacagtttgtggcaagacaagctcagaactgagaagctgtcaccacagtagcttggagctcggcggcacaaccagcaccatctggtcgcgcgactcggaccgatg

SEQ ID NO: 12143 - DNA, 203 bp, synthetic construct
  source 1..203: mol_type = other DNA
ggcgcgccagtcctaccggcagcgttcgccccagggaccggcaggcgggtaggtagtaagtgggctgaagctcagggccctgtctgctctgtggactcaacagtttgtggcaagacaagctcagaactgagaagctgtcaccacagtagcttggagctcggcggcacaaccagcaccatctggtcgcgcgactcggaccgatg

SEQ ID NO: 12144 - DNA, 203 bp, synthetic construct
  source 1..203: mol_type = other DNA
ggcgcgccagtcctagatcacccgttgccaagggtgaatctagactgggctgttctctgtgttaaaccaatcagttgcgaccttctcttaacagtgtgaagtgagggggtctctctccctccttctccttcctctgtgattcaccttcctttttaccctgccctgcggcggctccgccccttaccttccgactcggaccgatg

SEQ ID NO: 12145 - DNA, 203 bp, synthetic construct
  source 1..203: mol_type = other DNA
ggcgcgccagtcctcgatgcgcctaaaggtctcccctcccacctgcatgctggattcggtaatggcctcagcccttgccaactctgcctcttcccccgctgactgggcctctgcagagatgtgggcagctggtcaggatggccattcgggctcagcacagcaacgcagcccagactcagactggggaacgactcggaccgatg

SEQ ID NO: 12146 - DNA, 203 bp, synthetic construct
  source 1..203: mol_type = other DNA
ggcgcgccagtcctacaagaatctaaaggtctcccctcccacctgcattgctctacaatctgtggcctcagcccttgccaactctgcctccgtgaagatcataagggcctctgcagagatgtgggcagctggtcaggatggccattcgggctcagcacagcaacgcagcccagactcagactggggaacgactcggaccgatg

SEQ ID NO: 12147 - DNA, 203 bp, synthetic construct
  source 1..203: mol_type = other DNA
ggcgcgccagtcctgcttcttcctaaaggtctcccctcccacctgcattgctctacaatctgtggcctcagcccttgccaactctgcctcttcccccgctgactgggcctctgcagagatgtgggcagctggtcaggatggccattcgggctcagcacagtggaaagtagttttctcagactggggaacgactcggaccgatg

SEQ ID NO: 12148 - DNA, 203 bp, synthetic construct
  source 1..203: mol_type = other DNA
ggcgcgccagtcctttgtatcgctaaagtaccgctcctacaggtacccgcacgtaaccttcagagagtgcggatctgagtaggagaccgtggtgcactgctttacagatgcagcccggtttaaaaagcgtctatgcccctacagggtagcggtgggccgcgccctttccttttaaaactacttgttctcgactcggaccgatg

SEQ ID NO: 12149 - DNA, 203 bp, synthetic construct
  source 1..203: mol_type = other DNA
ggcgcgccagtcctactatgacctaacatatgtcatggaggtggcagcgggtaccgagtggcggctgcagcagcgactcctctgagctgagtttgaggccgtccccgactccttcctcccccttccctcccccttttttttgttttccgttcccctttcccctcccttccctatccccgacgaccggacgactcggaccgatg

SEQ ID NO: 12150 - DNA, 203 bp, synthetic construct
  source 1..203: mol_type = other DNA
ggcgcgccagtcctccttatctctaactttaggtccaggagtgcgatcgcctgcggatctgcagctgggcaccggccgcaacgcccgccccgcgacggcagggaataaaggctcagggaccggcagttctactctagagcccaccagcctctcagagcctccggtgactggcctgtgtctccccctggcgactcggaccgatg

SEQ ID NO: 12151 - DNA, 203 bp, synthetic construct
  source 1..203: mol_type = other DNA
ggcgcgccagtcctcatcccacctacaggggagtaactcgaggaggcgaaagtcctggagcctccagagggctgtcggcgcagtagcagcgagcagcagagtccgcacgctccggcgaggggcagaagagcgcgagggagcgcggggcagcagaagcgagagccgagcgcggacccagccaggacccacgactcggaccgatg

SEQ ID NO: 12152 - DNA, 203 bp, synthetic construct
  source 1..203: mol_type = other DNA
ggcgcgccagtcctgtattcacctacaggggagttttgttgaagttgcaaagtcctggagcccgagagaacgaaatggcgcagtagcagcgagcagcagagtccgcacgctccggcgaggggcagaagagcgcgagggagcgcggggcagcagaagcgagagccgagcgcggacccagccaggacccacgactcggaccgatg

SEQ ID NO: 12153 - DNA, 203 bp, synthetic construct
  source 1..203: mol_type = other DNA
ggcgcgccagtcctgcaattccctacaggggagttttgttgaagttgccctcaatccccaaatccagagggctgtcggcgcagtagcagcgagcagcagagtccgcacgctccggcgaggggcagaagagcgcgagggagcgcggggcagcagaagcgagagccgagcgcggacccagccaggacccacgactcggaccgatg

SEQ ID NO: 12154 - DNA, 203 bp, synthetic construct
  source 1..203: mol_type = other DNA
ggcgcgccagtcctatatccttctacctattaaatattgccaaagggaaaaaggatagcccaaaggacaagaaaacacttctcactatgaattggtttggaagtaacttcttcaggtgtcctgaggatctttccttactcaacatatactcacctctgttgtcacacatgtcatctgaagatgaacatcgactcggaccgatg

SEQ ID NO: 12155 - DNA, 203 bp, synthetic construct
  source 1..203: mol_type = other DNA
ggcgcgccagtcctcctctggactaccttggctggattttggttacgctataattgtaactgttttctgtttggacaacatcaaaaacatccattgcacaatggggcagttcattagcttcatgcaagaaataccaacctttttgcaggaggctctgaacattgctcttgttgcagtcagtctcattgcgactcggaccgatg

SEQ ID NO: 12156 - DNA, 203 bp, synthetic construct
  source 1..203: mol_type = other DNA
ggcgcgccagtcctttgcgtgtctactagatgaaccggtgccaggttcttggagctgtgaggtgttcagcattatttaagatcacctatgcatcatctgaagccacagtcccaggtcatcttcatcaccttccccagtggaatgcctcctgtgttaaagcccacaacaacccctgtggaggaacaacccgactcggaccgatg

SEQ ID NO: 12157 - DNA, 203 bp, synthetic construct
  source 1..203: mol_type = other DNA
ggcgcgccagtcctaggatagactagactagcacgcagcgggcgggcactttgcactggaacttacaacacccgagcaaggacgcgactctcccgacgcggggaggctattctgcccatttggggacacttccccgccgctgccaggacccgcttctctgaaaggctctccttgcagctgcttagacgcgactcggaccgatg

SEQ ID NO: 12158 - DNA, 203 bp, synthetic construct
  source 1..203: mol_type = other DNA
ggcgcgccagtccttcggcgtcctagatccccgcaagctaggccagctcctcccactgcctcccttcctctttctcctcctcttactcctcagggaaatatgtgtggctgtctacaggatgggggacaccctgagccccggacatggcaaccacagagagagcagcccttttctttcccccttggaggcgactcggaccgatg

SEQ ID NO: 12159 - DNA, 203 bp, synthetic construct
  source 1..203: mol_type = other DNA
ggcgcgccagtcctggatgcttctagatccccgcaagctaggccagctcctcccactgcctcccttcctctttctcctcctcttactcctttccagccagacctgaatatatctatccatgggggacaccctgagccccggacatggcaaccacagagagagcagcccttttctttcccccttggaggcgactcggaccgatg

SEQ ID NO: 12160 - DNA, 203 bp, synthetic construct
  source 1..203: mol_type = other DNA
ggcgcgccagtcctatatgaacctagatccccgcaagctaggccagctcctcccactgcctcccttcctctttctcctcctcttactcctttccagccagaccttggctgtctacaggatgggggacaccctgagccccggacatgcacgagtggacctcagcagcccttttctttcccccttggaggcgactcggaccgatg

SEQ ID NO: 12161 - DNA, 203 bp, synthetic construct
  source 1..203: mol_type = other DNA
ggcgcgccagtcctcgtgacgactagatccccgcaagctaggccagctcctcccactgcctcccttcctctttctcctcctcttactcctttccagccagaccttggctgtctacaggatgggggacaccctgagccccggacatggcaaccacagagagagcagcccttttctacgatagaacttttcgactcggaccgatg

SEQ ID NO: 12162 - DNA, 203 bp, synthetic construct
  source 1..203: mol_type = other DNA
ggcgcgccagtcctatgttgttctagatccccgcaagctaggccagctcctcccactgcctcccttcctctttctctcttaaaactcaagttccagccagaccttggctgtctacaggatgggggacaccctgagccccggacatggcaaccacagagagagcagcccttttctttcccccttggaggcgactcggaccgatg

SEQ ID NO: 12163 - DNA, 203 bp, synthetic construct
  source 1..203: mol_type = other DNA
ggcgcgccagtcctcgagcccgctagatccccgcaagctaggccagctcctcccactgcctctaagtgagcacgcgctcctcttactcctttccagccagaccttggctgtctacaggatgggggacaccctgagccccggacatggcaaccacagagagagcagcccttttctttcccccttggaggcgactcggaccgatg

SEQ ID NO: 12164 - DNA, 203 bp, synthetic construct
  source 1..203: mol_type = other DNA
ggcgcgccagtcctcaagcgatctagatccccgcctagccccgaccggcctcccactgcctcccttcctctttctcctcctcttactcctttccagccagaccttggctgtctacaggatgggggacaccctgagccccggacatggcaaccacagagagagcagcccttttctttcccccttggaggcgactcggaccgatg

SEQ ID NO: 12165 - DNA, 203 bp, synthetic construct
  source 1..203: mol_type = other DNA
ggcgcgccagtcctcagtacagctagattgtgtagggtcctttcttggataaacccgctcaatgcctggagatttgggcgtgcccccgcaagactgctagccgagtagtgttgggtcgcgaaaggccttgtggtactgcctgatagggtgcttgcgagtgccccgggaggtctcgtagaccgtgcacccgactcggaccgatg

SEQ ID NO: 12166 - DNA, 203 bp, synthetic construct
  source 1..203: mol_type = other DNA
ggcgcgccagtcctttggaatcctagtattgaaccgacactcactcgttacttggcatgtacacctgattagttagcccttgtggatacgccactgccgctcaggtacagtaggacataccccaaatattgggttccactcgtagagaagaaaattagtggcgaaacgtacggtttatgtcaaaggagcgactcggaccgatg

SEQ ID NO: 12167 - DNA, 203 bp, synthetic construct
  source 1..203: mol_type = other DNA
ggcgcgccagtcctacggttatctagtattgaactttagtgatgagtgtacttggcatgtacacctgattagttagcccttgtggatacgccactgccgctcaggtacagtaggacataccccaaatattggagcttggagaagaggaagaaaattagtggcgaaacgtacggtttatgtcaaaggagcgactcggaccgatg

SEQ ID NO: 12168 - DNA, 203 bp, synthetic construct
  source 1..203: mol_type = other DNA
ggcgcgccagtcctgcgatgcactagtattgaactttagtgatgagtgtacttggcatgtacacctgattagttagcccttgtggatacgccactgccgctcaggtacagtaggacatctgatggcggaaacgttccactcgtagagaagaaaattagtggcgaaacgtacggtttatgtcaaaggagcgactcggaccgatg

SEQ ID NO: 12169 - DNA, 203 bp, synthetic construct
  source 1..203: mol_type = other DNA
ggcgcgccagtcctccaaccagctagtcatcaaaccagggtaacagaggagggagctgggtcctgtttactcccagtcctgccgatgaggattctgaccgtagacactgaattgtcccgtacctatccgtgctctttctgtgttctcaccagggctgagctcgaactgccacctctgccagcaggacccgactcggaccgatg

SEQ ID NO: 12170 - DNA, 203 bp, synthetic construct
  source 1..203: mol_type = other DNA
ggcgcgccagtcctaggccaagctagtcgaatacccccaagtcctgcaaaggggtgcaagcctagttccaaccctgccgggctgaggcatgagtaggggctgtatttgcgtgcaggcgggcccccaaagcttccactcgctgccttaaaacgccaacccagcctctcagacaatgctgccctcccactcgactcggaccgatg

SEQ ID NO: 12171 - DNA, 203 bp, synthetic construct
  source 1..203: mol_type = other DNA
ggcgcgccagtcctcgttctacctataatcagtgcacctgggcaaacgacgcccacgtacggtccacgtcgcccttcaatgtctctcttgaccaataggcgtagccggcgagttgacaaggaccagtgggggccgggggcttggagagggactccaagtcccgcccttcccggtgggccgggaaatgccgactcggaccgatg

SEQ ID NO: 12172 - DNA, 203 bp, synthetic construct
  source 1..203: mol_type = other DNA
ggcgcgccagtcctctgtcagtctatcagcccgctttaattgcaaacacaaagcgactgttgttgtgcaattaaaggatagtgatattaatgaaatggtgcttagtcttgttaggagtggtaagttgcttgtaaggggtaatggcaagtgtttgagttttagtaatcatttagtctcaactaaataaacgactcggaccgatg

SEQ ID NO: 12173 - DNA, 203 bp, synthetic construct
  source 1..203: mol_type = other DNA
ggcgcgccagtcctaagaggatctatgagaatgatgatgatgctacagactaaaatatatcgggaggaatttaacaggatacttggacaatagaagccagatcaaaagtaagaaaaacttagggtgaatgacaattcacagatcagctcaaccagacaccaccagcatacacgaaaccaaccttcacacgactcggaccgatg

SEQ ID NO: 12174 - DNA, 203 bp, synthetic construct
  source 1..203: mol_type = other DNA
ggcgcgccagtcctgagtacctctatgagaatgatgatgatgctacagcggctgcagggataggaggaatttaacaggatacttggacaacttgctagttccgcaaagtaagaaaaacttagggtgaatgacaattcacagatcagctcaaccagacaccaccagcatacacgaaaccaaccttcacacgactcggaccgatg

SEQ ID NO: 12175 - DNA, 203 bp, synthetic construct
  source 1..203: mol_type = other DNA
ggcgcgccagtcctcggccgttctatgagaatgatgatgatgctacagcggctgcagggataggaggaatttaacaggatacttggacaatagaagccagatcaaaagtaagaaaaacttagggtgaatgacaattcacagatcagctcaaccagacaccaccagcatacacgaaaccaaccttcacacgactcggaccgatg

SEQ ID NO: 12176 - DNA, 203 bp, synthetic construct
  source 1..203: mol_type = other DNA
ggcgcgccagtcctgagcgcacctatgagaatgatgatgatgctacagcggctgcagggataggaggaatttaacaggatacttggacaatagaagccagatcaaaagtaagaaaaacttagggtgaatgactcgcttgtttctgtctcaaccagacaccaccagcatacacgaaaccaaccttcacacgactcggaccgatg

SEQ ID NO: 12177 - DNA, 203 bp, synthetic construct
  source 1..203: mol_type = other DNA
ggcgcgccagtcctgctgggcgctcaacaaaaagccaccgacattaagagagagagtattgctgcttagttaactgcaggccctatttagaccccataattcttatctgcaacagcattcctgtatcatccagggcaccggtggacttggtgaggattgagttgacctcatcattagagaccagactccgactcggaccgatg

SEQ ID NO: 12178 - DNA, 203 bp, synthetic construct
  source 1..203: mol_type = other DNA
ggcgcgccagtcctcacatacgctcaacaaaaagccaccgacattaagagagagagtattgctgcttagttaactgcaggccctatttagggttaccgcccaggatctgcaacagcattcctgtatcatccagggcaccggtggacttggtgaggattgacggtctaaatgtcgtagagaccagactccgactcggaccgatg

SEQ ID NO: 12179 - DNA, 203 bp, synthetic construct
  source 1..203: mol_type = other DNA
ggcgcgccagtcctagcttcccctcaacaaaaagccaccgacattaagagagagagtattgctgcttagttaactgcaggccctatttagggttaccgcccaggatctgcaacagcattcctgtatcatccagggcaccggtggacttggtgaggattgagttgacctcatcatacacataattgaagcgactcggaccgatg

SEQ ID NO: 12180 - DNA, 203 bp, synthetic construct
  source 1..203: mol_type = other DNA
ggcgcgccagtcctgagtaaacctcaacaaaaagccaccgacattaagagagagagtattgctgcttagttaactgtttaggaagaccctggttaccgcccaggatctgcaacagcattcctgtatcatccagggcaccggtggacttggtgaggattgagttgacctcatcattagagaccagactccgactcggaccgatg

SEQ ID NO: 12181 - DNA, 203 bp, synthetic construct
  source 1..203: mol_type = other DNA
ggcgcgccagtcctgtaatggactcaccgaggcgagtcgctgtgtgttcctgcctccggcgatgccgccccagcccctctgatggccctcctctctgctgccactcattccagaacaggaggcatgagcccggaacgcgcttgcttttaggagacagccactttctgtgtggtacgctggattcaaggcgactcggaccgatg

SEQ ID NO: 12182 - DNA, 203 bp, synthetic construct
  source 1..203: mol_type = other DNA
ggcgcgccagtcctgtagaggcctcaccgaggcgcacgcgcccagcaccctgcctccggcgatgccgccccagcccctctgatggccctcctctctgctgccactcattccagaacaggaggcatgagcccggaacgcgcttgcttgacacgtgattgttctttctgtgtggtacgctggattcaaggcgactcggaccgatg

SEQ ID NO: 12183 - DNA, 203 bp, synthetic construct
  source 1..203: mol_type = other DNA
ggcgcgccagtcctaaagacgactcaccgaggcgcacgcgcccagcaccctgcctccggcgatgccgccccagcccctctgatggccctcctctctgctgccactcattccagaacaggaggcatgagcccggaacgcgcttgcttttaggagacagccactttctgtgtggtacgctggattcaaggcgactcggaccgatg

SEQ ID NO: 12184 - DNA, 203 bp, synthetic construct
  source 1..203: mol_type = other DNA
ggcgcgccagtcctaaacagtgctcaccgaggcgcacgcgcccagcaccctgcctccggcgatgccgccccagcccctctgatggccctctggatgatctatcgtcattccagaacaggaggcatgagcccggaacgcgcttgcttttaggagacagccactttctgtgtggtacgctggattcaaggcgactcggaccgatg

SEQ ID NO: 12185 - DNA, 203 bp, synthetic construct
  source 1..203: mol_type = other DNA
ggcgcgccagtcctctgccgggctcaccgaggcgcacgcgcccagcaccctgcctccggcgatgccgccccagcccgatacgccatttatctctctgctgccactcattccagaacaggaggcatgagcccggaacgcgcttgcttttaggagacagccactttctgtgtggtacgctggattcaaggcgactcggaccgatg

SEQ ID NO: 12186 - DNA, 203 bp, synthetic construct
  source 1..203: mol_type = other DNA
ggcgcgccagtcctctaaatgtctcaccgaggcgcacgcgcccagcacgtcagaatgaatcctgccgccccagcccctctgatggccctcctctctgctgccactcattccagaacaggaggcatgagcccggaacgcgcttgcttttaggagacagccactttctgtgtggtacgctggattcaaggcgactcggaccgatg

SEQ ID NO: 12187 - DNA, 203 bp, synthetic construct
  source 1..203: mol_type = other DNA
ggcgcgccagtcctccagtggtctcagtgccagaggaggggattcccggcgccgggggacagagccccttttttctgggcatacgttcttctttctgctggggagcctcttgtgtccagcctaggcccgcgtgcagcgccgacggatgaccgtcttcttggcaagaaagtgaataaacttaattgagacgactcggaccgatg

SEQ ID NO: 12188 - DNA, 203 bp, synthetic construct
  source 1..203: mol_type = other DNA
ggcgcgccagtcctaagccggtctcagtgccagaggaggggattcccggcgccgggggacagagccccttttttcttttgccgaaagaccctttctgctggggagcctcttgtgtccagcctaggcccgcgtgcagcgccgacggatgaccgtcttcttgcggtctggacaggaaaacttaattgagacgactcggaccgatg

SEQ ID NO: 12189 - DNA, 203 bp, synthetic construct
  source 1..203: mol_type = other DNA
ggcgcgccagtcctggaacgccctcagtgccagaggaggggattcccggcgccgggggacagctttataggggagctttgccgaaagaccctttctgctggggagcctcttgtgtccagcctaggcccgcgtgcagcgccgacggatgaccgtcttcttggcaagaaagtgaataaacttaattgagacgactcggaccgatg

SEQ ID NO: 12190 - DNA, 203 bp, synthetic construct
  source 1..203: mol_type = other DNA
ggcgcgccagtcctatatctaactcagtgccagatagtcaccaaggaagcgccgggggacagagccccttttttcttttgccgaaagaccctttctgctggggagcctcttgtgtccagcctaggcccgcgtgcagcgccgacggatgaccgtcttcttggcaagaaagtgaataaacttaattgagacgactcggaccgatg

SEQ ID NO: 12191 - DNA, 203 bp, synthetic construct
  source 1..203: mol_type = other DNA
ggcgcgccagtcctatttatgtctccagttgggacaagtcccaatccaagtgaacgtgtagcgccgcatttaaatgatgccgttcaatcatgagacataaagaaaaaatcaagccagaacaagcttaggatcacaatacaacacagaaccccagctgctatcataactgttctctggccgctcgaaagcgactcggaccgatg

SEQ ID NO: 12192 - DNA, 203 bp, synthetic construct
  source 1..203: mol_type = other DNA
ggcgcgccagtcctcacgcctcctccagttgggacaagtcccaatccatcattcgagaacaagccgcatttaaatgatgccgttcaatcatgagacataaagaaaaaatcaagccagaacaagcttaggatcacaatacaacacagaaccccagctgctacgcccgtgagctgttggccgctcgaaagcgactcggaccgatg

SEQ ID NO: 12193 - DNA, 203 bp, synthetic construct
  source 1..203: mol_type = other DNA
ggcgcgccagtcctcataacgcctccagttgggacaagtcccaatccatcattcgagaacaagccgcatttaaatgatgccgttcaatcatgagacataaagaaaaaatcaagccagaacaagcttaggatcacaatacaacacagctttaggctctgactcataactgttctctggccgctcgaaagcgactcggaccgatg

SEQ ID NO: 12194 - DNA, 203 bp, synthetic construct
  source 1..203: mol_type = other DNA
ggcgcgccagtcctgtcgcagcctccagttgggacaagtcccaatccatcattcgagaacaagccgcatttaaatgatgccgttcaatcatgagacataaagaagcgtgattagatcgacaagcttaggatcacaatacaacacagaaccccagctgctatcataactgttctctggccgctcgaaagcgactcggaccgatg

SEQ ID NO: 12195 - DNA, 203 bp, synthetic construct
  source 1..203: mol_type = other DNA
ggcgcgccagtcctgcacaggactccagttgggacaagtcccaatccatcattcgagaacaagccgcatttaaatggaagtcccagtgattgagacataaagaaaaaatcaagccagaacaagcttaggatcacaatacaacacagaaccccagctgctatcataactgttctctggccgctcgaaagcgactcggaccgatg

SEQ ID NO: 12196 - DNA, 203 bp, synthetic construct
  source 1..203: mol_type = other DNA
ggcgcgccagtcctttactgtcctcccctggtgcggcccgaggcaagcccaccgaggtgaccacccctcgacgccgcttggagatcccgggcatccaccctgcgccccgagcagctgatacccagggaggtgaattccgtatgagagggcgcggggtcgccggaagccaggcgggagccccggctgctcgactcggaccgatg

SEQ ID NO: 12197 - DNA, 203 bp, synthetic construct
  source 1..203: mol_type = other DNA
ggcgcgccagtcctctcgtgacctcccctggtgcggcccgaggcaagcccaccgaggtgaccacccctcgacgccgcttggagatcccggtgcgttttagccgaccccgagcagctgatacccagggaggtgtcaggacctgcccggggcgcggggtcgccggaagccaggcgggagccccggctgctcgactcggaccgatg

SEQ ID NO: 12198 - DNA, 203 bp, synthetic construct
  source 1..203: mol_type = other DNA
ggcgcgccagtcctcgggcgcactccctttctccctccatccttccacttcccctgctcggccccgccgtcaggcccacaggtgtcagattgccgtcatcaggttccccttctcccttcttggcactttcctttcgaaccatccttctggacaaactttgatggagaatttcacaccacgctggaaaacgactcggaccgatg

SEQ ID NO: 12199 - DNA, 203 bp, synthetic construct
  source 1..203: mol_type = other DNA
ggcgcgccagtccttcgcttcgctccctttctccctccatccttccacttcccctgctcggccccgccgtcaggccgggtcccccttccctgccgtcatcaggtgttagaaagtgaggcttggcactttcctttcgaaccatccttctggacaaactttgatggagaatttcacaccacgctggaaaacgactcggaccgatg

SEQ ID NO: 12200 - DNA, 203 bp, synthetic construct
  source 1..203: mol_type = other DNA
ggcgcgccagtcctcaactgacctccctttctccctccatccttccacttcccctgctcggccccgccgtcaggccgggtcccccttccctgccgtcatcaggttccccttctcccactgcaaggtcttcctttcgaaccatccacagaatgttgctttgatggagaatttcacaccacgctggaaaacgactcggaccgatg

SEQ ID NO: 12201 - DNA, 203 bp, synthetic construct
  source 1..203: mol_type = other DNA
ggcgcgccagtcctggaaagtgctccctttctccctccatccttccacttcccctgctcggccccgccgtcaggccgggtcccccttccctgccgtcatcaggttccccttctcccactgcaaggtcttcctttcgaaccatccttctggacaaactttgatggagaatttcacaccacgctggaaaacgactcggaccgatg

SEQ ID NO: 12202 - DNA, 203 bp, synthetic construct
  source 1..203: mol_type = other DNA
ggcgcgccagtcctgcctcactctccctttctccctccatccttccacttcccctgctcggccccgccgtcaggccgggtcccccttccctgccgtcatcaggttccccttctcccttagctatttaacttcttcgaaccatccttctggacaaactttgatggagaatttcacaccacgctggaaaacgactcggaccgatg

SEQ ID NO: 12203 - DNA, 203 bp, synthetic construct
  source 1..203: mol_type = other DNA
ggcgcgccagtcctgatcgccgctccctttctccctccatccttccacttcccctgctcggccccgccgtcaggccgggtcccccttccctgccgtcatcaggttccccttctcccttcttggcactttcctgaaatcaagatgcactggacaaactttgatggagaatttcacaccacgctggaaaacgactcggaccgatg

SEQ ID NO: 12204 - DNA, 203 bp, synthetic construct
  source 1..203: mol_type = other DNA
ggcgcgccagtccttgagcgtgctccctttctccctccatccttccacttcccctgctcggccccgccgtcaggccgggtcccccttccctgccgtcatcaggttccccttctcccttcttggcactttcctttcgaaccatccacagaatgttgctttgatggagaatttcacaccacgctggaaaacgactcggaccgatg

SEQ ID NO: 12205 - DNA, 203 bp, synthetic construct
  source 1..203: mol_type = other DNA
ggcgcgccagtcctcaatcattctccctttctccctccatccttccacttcccctgctcggccccgccgtcaggccgggtcccccttccctgccgtcatcaggttccccttctcccttcttggcactttcctttcgaaccatccttctggacaaactttgatggagaatttcacaccacgctggaaaacgactcggaccgatg

SEQ ID NO: 12206 - DNA, 203 bp, synthetic construct
  source 1..203: mol_type = other DNA
ggcgcgccagtcctccacaccactccctttctccctccatccttccacttcccctgctcggccccgccgtcaggccgggtcccccttccctgccgtcatcaggttccccttctcccttcttggcactttcctttcgaaccatccttctggacaaactttgatggagaatttcactaattcgattccctcgactcggaccgatg

SEQ ID NO: 12207 - DNA, 203 bp, synthetic construct
  source 1..203: mol_type = other DNA
ggcgcgccagtcctactcgctcctccctttctccctccatccttccacttcccctgctcggccccgccgtcaggccgggtcccccttccctgccgtcatcaggttccccttctcccttcttggcactttcctttcgaaccatccttctggacaaactttggaatccgtcgagtgaccacgctggaaaacgactcggaccgatg

SEQ ID NO: 12208 - DNA, 203 bp, synthetic construct
  source 1..203: mol_type = other DNA
ggcgcgccagtcctgggcgatactccctttctccctccatccttccacttcccctgctcggcgtgattaggttctggggtcccccttccctgccgtcatcaggttccccttctcccttcttggcactttcctttcgaaccatccttctggacaaactttgatggagaatttcacaccacgctggaaaacgactcggaccgatg

SEQ ID NO: 12209 - DNA, 203 bp, synthetic construct
  source 1..203: mol_type = other DNA
ggcgcgccagtcctgggaagctctccgacgtgcttactgttggcagcagcacaatgtttgggctaagacctggtcttgaaagcgccacaagcagcagctgctgagccatggctgaaggggaaatcaccaccttcacagccctgaccgagaagtttaatctgcctccagggaattacaagaagcccaaacgactcggaccgatg

SEQ ID NO: 12210 - DNA, 203 bp, synthetic construct
  source 1..203: mol_type = other DNA
ggcgcgccagtcctggccaaatctcctcctcgagcctgggaccgccgcgctcccgccgccgctatccaggtagagtactcccggcccgtgccgcgccctcccgcgtccgcagccggctcggcttcctgcccacccagacgtcgcttctcccgggctcccggtgtcggctccgcgcggagggagaggaacgactcggaccgatg

SEQ ID NO: 12211 - DNA, 203 bp, synthetic construct
  source 1..203: mol_type = other DNA
ggcgcgccagtccttgtgtgggctcctttcgaggccccatcaagaacacccaagtttgctcggtcatctgctgcgtcctcttcctgctcttcattctaggttacatcgtggtggggattgtggcctggttgtatggagacccccggcaagtcctctaccccaggaactctactggggcctactgtggccgactcggaccgatg

SEQ ID NO: 12212 - DNA, 203 bp, synthetic construct
  source 1..203: mol_type = other DNA
ggcgcgccagtcctagttggtactcctttcgaggccccatcaagaacagaagctgcacagatgtcatctgctgcgtaggaagggccacagtcattctaggttacatcgtggtggggattgtggcctggttgtatggagacccccggcaagtcctctaccccaggaactctactggggcctactgtggccgactcggaccgatg

SEQ ID NO: 12213 - DNA, 203 bp, synthetic construct
  source 1..203: mol_type = other DNA
ggcgcgccagtcctgaggagttctcctttcgaggccccatcaagaacagaagctgcacagatgtcatctgctgcgtcctcttcctgctcttcattctaggttacatcgtggtggggattgtggcctggttgtatggagacccccggcaagtcctctacccgttatgtatagtgagggcctactgtggccgactcggaccgatg

SEQ ID NO: 12214 - DNA, 203 bp, synthetic construct
  source 1..203: mol_type = other DNA
ggcgcgccagtccttgaagagtctcctttcgaggccccatcaagaacagaagctgcacagatgtcatctgctgcgtcctcttcctgctcttcattctaggttacatcgtggtggggattgtggcctggttgtatggagacccccgggggcaaagggctgtcaggaactctactggggcctactgtggccgactcggaccgatg

SEQ ID NO: 12215 - DNA, 203 bp, synthetic construct
  source 1..203: mol_type = other DNA
ggcgcgccagtcctcgagtaacctcctttcgaggccccatcaagaacagaagctgcacagatgtcatctgctgcgtcctcttcctgctcttcattctaggttacggtaataccaacggtgtggcctggttgtatggagacccccggcaagtcctctaccccaggaactctactggggcctactgtggccgactcggaccgatg

SEQ ID NO: 12216 - DNA, 203 bp, synthetic construct
  source 1..203: mol_type = other DNA
ggcgcgccagtcctgtcaaatgctcctttcgagggttttcaggaccttgaagctgcacagatgtcatctgctgcgtcctcttcctgctcttcattctaggttacatcgtggtggggattgtggcctggttgtatggagacccccggcaagtcctctaccccaggaactctactggggcctactgtggccgactcggaccgatg

SEQ ID NO: 12217 - DNA, 203 bp, synthetic construct
  source 1..203: mol_type = other DNA
ggcgcgccagtccttacgccctctcgaaggcaggagcgaccggcgcctcctcgaccctgactggagaaggaggaatcgcgccaggcggagcgtcaggtcccgttttcctctccggcgtctccaatacaaagattacggtgcagaaggaaattgcactcgtctcctccgcgcccccggtacccaacacacgactcggaccgatg

SEQ ID NO: 12218 - DNA, 203 bp, synthetic construct
  source 1..203: mol_type = other DNA
ggcgcgccagtcctgacctgaactcgaaggcaggagcgaccggcgcctttggctgaggaggaaagagcacctcccccgcgccaggcggagcgtcaggtcccgttttcctctccggcgtctccaatacaaagattacggtgcagaaggaaattgcactcgtctcctccgcgcccccggtacccaacacacgactcggaccgatg

SEQ ID NO: 12219 - DNA, 203 bp, synthetic construct
  source 1..203: mol_type = other DNA
ggcgcgccagtcctattacggactcgaaggcaggagcgaccggcgcctttggctgaggaggaggagaaggaggaatcgcgccaggcggagcgtcaggtcccgttttcctctccggcgttcatgggcacttagttacggtgcagaaggaaattgcactcgtctcctccgcgcccccggtacccaacacacgactcggaccgatg

SEQ ID NO: 12220 - DNA, 203 bp, synthetic construct
  source 1..203: mol_type = other DNA
ggcgcgccagtcctcgattccactcgcctgagggatgctggatctgcaatgatagaattggcctgccacagacattggtatttaagttgaagagcagaattcacaatgattctgctgcagagagctttaatgcactccccgtatgcgggcacagttcaattgcttcagggggaacacacagcagggagcgactcggaccgatg

SEQ ID NO: 12221 - DNA, 203 bp, synthetic construct
  source 1..203: mol_type = other DNA
ggcgcgccagtcctgtttgtctctcgcctgagggatgctggatctgcaatgatagaattggcctgccacagacattggtatttaagttgaagagcagaattcacaatgattctgctgcagagagctttaatggcaatgagactctggggcacagttcaatacagagtcaaatctcacacagcagggagcgactcggaccgatg

SEQ ID NO: 12222 - DNA, 203 bp, synthetic construct
  source 1..203: mol_type = other DNA
ggcgcgccagtcctctaaggtactcgcctgagggatgctggatctgcaatgatagaattggcctgccacagacattggtatttaagttgaagagcagaattcacaatgattctgctgcagagagctttaatggcaatgagactctggggcacagttcaattgcttcagggggaacacacagcagggagcgactcggaccgatg

SEQ ID NO: 12223 - DNA, 203 bp, synthetic construct
  source 1..203: mol_type = other DNA
ggcgcgccagtcctcggtcatcctcgcctgagggatgctggatctgcaatgatagaattggcctgccacagacattggtatttaagttgaagagcagaattcacccgccactaaaataagagagctttaatggcaatgagactctggggcacagttcaattgcttcagggggaacacacagcagggagcgactcggaccgatg

SEQ ID NO: 12224 - DNA, 203 bp, synthetic construct
  source 1..203: mol_type = other DNA
ggcgcgccagtcctcaattgtgctcgcctgagggatgctggatctgcaatgatagaattggcctgccacagacattggtatttaagttgagttcgtactggtgtaatgattctgctgcagagagctttaatggcaatgagactctggggcacagttcaattgcttcagggggaacacacagcagggagcgactcggaccgatg

SEQ ID NO: 12225 - DNA, 203 bp, synthetic construct
  source 1..203: mol_type = other DNA
ggcgcgccagtccttcgtgcggctcgcctgagggatgctggatctgcaatgatagaattggcgaaatgggctatccggtatttaagttgaagagcagaattcacaatgattctgctgcagagagctttaatggcaatgagactctggggcacagttcaattgcttcagggggaacacacagcagggagcgactcggaccgatg

SEQ ID NO: 12226 - DNA, 203 bp, synthetic construct
  source 1..203: mol_type = other DNA
ggcgcgccagtcctcgtgcagtctcgcctgagggatgctggatctgcatacgcgacgacaagctgccacagacattggtatttaagttgaagagcagaattcacaatgattctgctgcagagagctttaatggcaatgagactctggggcacagttcaattgcttcagggggaacacacagcagggagcgactcggaccgatg

SEQ ID NO: 12227 - DNA, 203 bp, synthetic construct
  source 1..203: mol_type = other DNA
ggcgcgccagtccttgcgttagctcgcctgaggggatagttccagtttatgatagaattggcctgccacagacattggtatttaagttgaagagcagaattcacaatgattctgctgcagagagctttaatggcaatgagactctggggcacagttcaattgcttcagggggaacacacagcagggagcgactcggaccgatg

SEQ ID NO: 12228 - DNA, 203 bp, synthetic construct
  source 1..203: mol_type = other DNA
ggcgcgccagtcctcgaggtatctcgcggctataaggggcggaggctgggcggcgttgctctgcgctctgcggctgacggcgcttttgtccgtaacgagcctctcctttcagaaggagaaggcagctctgtttctctgcagaggagtagggtcctttcagccatgaagcatgtgttgaacctctacctcgactcggaccgatg

SEQ ID NO: 12229 - DNA, 203 bp, synthetic construct
  source 1..203: mol_type = other DNA
ggcgcgccagtccttccttcagctcgcggctataaggggcggaggctgggcggcgttgctctgcgctctgcggctgacggcgcttttgtctccgggtccagaggcctttcagaaggagaaggcagctctgtttctctgcagaggagtagggtcctttcagagtccctagtcccattgaacctctacctcgactcggaccgatg

SEQ ID NO: 12230 - DNA, 203 bp, synthetic construct
  source 1..203: mol_type = other DNA
ggcgcgccagtcctcctcaaacctcgcggctataaggggcggaggctgggcggcgttgctctgcgctctgcggctgacggcgcttttgtctccgggtccagaggcctttcagaaggagaaggcagctctgtttctctgcagaggagtagggtcctttcagccatgaagcatgtgttgaacctctacctcgactcggaccgatg

SEQ ID NO: 12231 - DNA, 203 bp, synthetic construct
  source 1..203: mol_type = other DNA
ggcgcgccagtccttccaatttctcgcggctataaggggcggaggctgggcggcgttgctctgcgctctgcggctgacggcgcttttgtctccgggtccagagggggcctgttctttcaaggcagctctgtttctctgcagaggagtagggtcctttcagccatgaagcatgtgttgaacctctacctcgactcggaccgatg

SEQ ID NO: 12232 - DNA, 203 bp, synthetic construct
  source 1..203: mol_type = other DNA
ggcgcgccagtccttacgaaagctcgcggctcacggcgctcctggggcccatttacggtactcctgcccggcggccctatgccgggggtgccgctcagctggctctggacaagtcagattcccacccctctgacgctctgaccaggaaaaaaccggccaaggcggaatctaagtcctttgctgtgggacgactcggaccgatg

SEQ ID NO: 12233 - DNA, 203 bp, synthetic construct
  source 1..203: mol_type = other DNA
ggcgcgccagtcctacattattctcggcaggaagagaccgacccgccacccgccgtagcccgcgcgcccctggcactcaatccccgccatgtgggggctcctgctcgccctggccgccttcgcatgacaatacggcccggctctgggggcgcccaggaactcggtgctgggcctcgcgcagcccgggacgactcggaccgatg

SEQ ID NO: 12234 - DNA, 203 bp, synthetic construct
  source 1..203: mol_type = other DNA
ggcgcgccagtcctacgcgcctctcggcaggaagagaccgacccgccacccgccgtagcccgcgcgcccctggcactcaatccccgccatgtgggggctcctgctcgccctggccgccttcgcgccggccgtaatgattcagtaacgggcgcccaggaactcggtgctgggcctcgcgcagcccgggacgactcggaccgatg

SEQ ID NO: 12235 - DNA, 203 bp, synthetic construct
  source 1..203: mol_type = other DNA
ggcgcgccagtcctagaagccgctcggcaggaagagaccgacccgccacccgccgtagcccgcgcgcccctggcactcaatccccgccatgtgggggctcctgctcgccctggccgccttcgcgccggccgtcggcccggctctggatcattaagacttgtcggtgctgggcctcgcgcagcccgggacgactcggaccgatg

SEQ ID NO: 12236 - DNA, 203 bp, synthetic construct
  source 1..203: mol_type = other DNA
ggcgcgccagtcctgtactttgctcggcaggaagagaccgacccgccacccgccgtagcccgcgcgcccctggcactcaatccccgccatgtgggggctcctgctcgccctggccgccttcgcgccggccgtcggcccggctctgggggcgcccaggaacagatgctctaatgacgcgcagcccgggacgactcggaccgatg

SEQ ID NO: 12237 - DNA, 203 bp, synthetic construct
  source 1..203: mol_type = other DNA
ggcgcgccagtcctagtccgccctcggcaggaagagaccgacccgccacccgccgtagcccgcgcgcccctggcactcaatccccgccatgtgggggctcctgctcgccctggccgccttcgcgccggccgtcggcccggctctgggggcgcccaggaactcggtgctgggcctgcgtatcgtactagcgactcggaccgatg

SEQ ID NO: 12238 - DNA, 203 bp, synthetic construct
  source 1..203: mol_type = other DNA
ggcgcgccagtcctgcccgtgactcgtgtttatggggtttcccctggaaaatggtgagggacgattggcatgctacaggctgttgctgacggcaaggctcatttcactgagtcagtgaagccagtgctcgacctgacaaattcaatcctgtgtcgggtggaatgaataacatgtcttctgctgcgccccgactcggaccgatg

SEQ ID NO: 12239 - DNA, 203 bp, synthetic construct
  source 1..203: mol_type = other DNA
ggcgcgccagtccttcctggctctcgtgtttatggggtttcccctggactcgttcataacctcgggtcgtaagccgaggctgttgctgacggcaaggctcatttcactgagtcagtgaagccagtgctcgacctgacaaattcaatcctgtgtcgggtggaatgaataacatgtcttctgctgcgccccgactcggaccgatg

SEQ ID NO: 12240 - DNA, 203 bp, synthetic construct
  source 1..203: mol_type = other DNA
ggcgcgccagtcctgcgtgtaactcgtgtttatggggtttcccctggactcgttcataacctgattggcatgctacaggctgttgctgacggcaaggctcatttcactgagtcagtgaagccagtgctcgacctgacaaattcaatcctgtgtcgggtggttatggagcagaaccttctgctgcgccccgactcggaccgatg

SEQ ID NO: 12241 - DNA, 203 bp, synthetic construct
  source 1..203: mol_type = other DNA
ggcgcgccagtccttcagaagactcgtgtttatggggtttcccctggactcgttcataacctgattggcatgctacgattctcgcggagaggcaaggctcatttcactgagtcagtgaagccagtgctcgacctgacaaattcaatcctgtgtcgggtggaatgaataacatgtcttctgctgcgccccgactcggaccgatg

SEQ ID NO: 12242 - DNA, 203 bp, synthetic construct
  source 1..203: mol_type = other DNA
ggcgcgccagtcctatcttagcctctaagcgagctgtgtgtgggcggatgcgagtggccggagaccagggcccaacataaacaagctttggagacaaacaaccttatgacctgtcagccctgacaaaggtcagctagccccttgaggacatcagctttggcctcagggtcctaatggcagcagaaccacgactcggaccgatg

SEQ ID NO: 12243 - DNA, 203 bp, synthetic construct
  source 1..203: mol_type = other DNA
ggcgcgccagtcctctgtgggcctctaatggccatcctttccattggatcaaacccgctcaatgcctggagatttgggcgtgcccccgcaagactgctagccgagtagcgttgggttgcgaaaggccttgtggtactgcctgatagggtgcttgcgagtgccccgggaggtctcgtagaccgtgcaaccgactcggaccgatg

SEQ ID NO: 12244 - DNA, 203 bp, synthetic construct
  source 1..203: mol_type = other DNA
ggcgcgccagtcctggctttcactctcacgcattttagtgtcatgaattagtgtttcaaatcagttgcatatcaattaagaaaaacttaggagacaggtatagaacctctctttcagataactggtcaattaaggacagaaattctgtttctcaaatccgctagcctttgtcaatagatgagtggattcgactcggaccgatg

SEQ ID NO: 12245 - DNA, 203 bp, synthetic construct
  source 1..203: mol_type = other DNA
ggcgcgccagtcctgctctatactctcacgcattttagtgtcatgaattagtgtttcaaatcagttgcatatcaattaagaaaaacttaggagacaggtatagaacctctctttcagataactggtcaattaccccagagttgctcgtttctcaaatccgctagcctttgtcaaagaggacacaagcacgactcggaccgatg

SEQ ID NO: 12246 - DNA, 203 bp, synthetic construct
  source 1..203: mol_type = other DNA
ggcgcgccagtccttgtgaacactctgatcctctacaactcttgaaacacagatttcccacaagtctcctcttcgtcatcaagcaaccaccgcatccagcatcaagcccacctgaaatgcgacggtctccatctctggccgaacgatatcggtagttaattaaaacttagggtgcaagatcatccacacgactcggaccgatg

SEQ ID NO: 12247 - DNA, 203 bp, synthetic construct
  source 1..203: mol_type = other DNA
ggcgcgccagtcctgacatattctctgatcctctacaactcttgaaacacagatttcccacaagtctcctcttcgtgtctcttactattacgcatccagcatcaagcccacctgaaattgtctccggcttccctctggccgaacgatatcggtagttaattaaaacttagggtgcaagatcatccacacgactcggaccgatg

SEQ ID NO: 12248 - DNA, 203 bp, synthetic construct
  source 1..203: mol_type = other DNA
ggcgcgccagtcctgcctggtcctctgatcctctctgtggaaccgccaacagatttcccacaagtctcctcttcgtcatcaagcaaccaccgcatccagcatcaagcccacctgaaattgtctccggcttccctctggccgaacgatatcggtagttaattaaaacttagggtgcaagatcatccacacgactcggaccgatg

SEQ ID NO: 12249 - DNA, 203 bp, synthetic construct
  source 1..203: mol_type = other DNA
ggcgcgccagtcctaagtctgactctgcggccaaaagccacgtggataagatccacctttgtgtgcggtgcaacccagaagggggtcgaccttggtgacactctagtgaacccctgaatggcaatctcaagcgcctctgtagggaagccaagaatgtccaggaggtaccccttcctctcggaagggatcgactcggaccgatg

SEQ ID NO: 12250 - DNA, 203 bp, synthetic construct
  source 1..203: mol_type = other DNA
ggcgcgccagtcctagtctacactctgcggccaaaagccacgtggataagatccacctttgtgtgcggtgcaaccccagcaccctggtttcttggtgacactctagtgaacccctgaatggcaatctcaagcgcctctgtagggaaagactagcccggatggaggtaccccttcctctcggaagggatcgactcggaccgatg

SEQ ID NO: 12251 - DNA, 203 bp, synthetic construct
  source 1..203: mol_type = other DNA
ggcgcgccagtcctataaagttctctgcggccaaaagccacgtggataagatccacctttgtgtgcggtgcaaccccagcaccctggtttcttggtgacactctagtgaacccctgaatggcaatctcaagctttatccctacctcgccaagaatgtccaggaggtaccccttcctctcggaagggatcgactcggaccgatg

SEQ ID NO: 12252 - DNA, 203 bp, synthetic construct
  source 1..203: mol_type = other DNA
ggcgcgccagtcctaaggagcgctctgcggccaaaagccacgtggataagatccacctttgtgtgcggtgcaaccccagcaccctggtttcttggtgacactctcaaccggattgtcctggcaatctcaagcgcctctgtagggaagccaagaatgtccaggaggtaccccttcctctcggaagggatcgactcggaccgatg

SEQ ID NO: 12253 - DNA, 203 bp, synthetic construct
  source 1..203: mol_type = other DNA
ggcgcgccagtcctgtcattctctctgcggccaagcctactaatcgcgagatccacctttgtgtgcggtgcaaccccagcaccctggtttcttggtgacactctagtgaacccctgaatggcaatctcaagcgcctctgtagggaagccaagaatgtccaggaggtaccccttcctctcggaagggatcgactcggaccgatg

SEQ ID NO: 12254 - DNA, 203 bp, synthetic construct
  source 1..203: mol_type = other DNA
ggcgcgccagtcctctgcaatactcttatcccgcgtaccctgctctacttagatcttgtttatttgtagtttccttttcaagtcagtggatctcagcgatgtacgctcaatgattccaatttttctgttcttgccttcaggttgtctattacactttcatgtcctctggacttaactctgtttcccatcgactcggaccgatg

SEQ ID NO: 12255 - DNA, 203 bp, synthetic construct
  source 1..203: mol_type = other DNA
ggcgcgccagtcctcggatcgcctcttgagactggccgaaaggcagccacggggccaccaaggcggcgcagcgctgagaaactatctttcaaaaatccttcgggtgacccctggtggcaatcccttcccttaggagcatgagtgtggtcgacacattcaccatggcttggctgtggttgctggtttgccgactcggaccgatg

SEQ ID NO: 12256 - DNA, 203 bp, synthetic construct
  source 1..203: mol_type = other DNA
ggcgcgccagtccttgcaggacctcttgagactggccgaaaggcagccacggggccaccaaggcggcgcagcgctgcatgcggcaaggggaaaaatccttcgggtgacccctggtggcaatcccttcccttaggagcatgagtgtggtcgacacattcaccatggcttggctgtggttgctggtttgccgactcggaccgatg

SEQ ID NO: 12257 - DNA, 203 bp, synthetic construct
  source 1..203: mol_type = other DNA
ggcgcgccagtcctggatgggactcttgagactggccgaaaggcagccacggggccaccaaggcggcgcagcgctgcatgcggcaagggggtgttgagacaaattgacccctggtggcaatcccttcccttaggagcatgagtgtggtcgacacattcaccatggcttggctgtggttgctggtttgccgactcggaccgatg

SEQ ID NO: 12258 - DNA, 203 bp, synthetic construct
  source 1..203: mol_type = other DNA
ggcgcgccagtcctagccagcactgaaacaagaagtttgtgcctactcaacagctttgaaagagcacttcccaacgctgctagtagtcttataggcggcatcaactgtactgtgagattgcccggtacagcagcagttgtattctttattagcttggtagatcattttctctcgctcttttttttaatcgactcggaccgatg

SEQ ID NO: 12259 - DNA, 203 bp, synthetic construct
  source 1..203: mol_type = other DNA
ggcgcgccagtcctggaatcaactgaaacaagaagtttgtgcctactcaacagctttgaaagagcacttcccaacgctgctagtagtctttgttttcttcagtgctgtactgtgagattgcccggtacagcagcagttgtattcttccgacttggacgtcatcattttctctcgctcttttttttaatcgactcggaccgatg

SEQ ID NO: 12260 - DNA, 203 bp, synthetic construct
  source 1..203: mol_type = other DNA
ggcgcgccagtcctaatcacttctgaaacaagaagtttgtgcctactcaacagctttgaaagagcacttcccaacgctgctagtagtctttgttttcttcagtgctgtactgtgagattgcccggtacagcagcagttgtattctttattagcttggtagatcattttctctcggatgcccggccggccgactcggaccgatg

SEQ ID NO: 12261 - DNA, 203 bp, synthetic construct
  source 1..203: mol_type = other DNA
ggcgcgccagtcctcaggtacactgaatgtggctggatcgctaagcttagctagagcacgtaacccaatgtgtatctagtcgtaatgagcaattgcgggatgggaccaactactttgggtgtccgtgtttcactttttcctttatatttgcttatggtgacaatatatacaatatatatattggcacccgactcggaccgatg

SEQ ID NO: 12262 - DNA, 203 bp, synthetic construct
  source 1..203: mol_type = other DNA
ggcgcgccagtcctctatacaactgagcagccagtaggggagagagcaacccgttgggctttagcaccagctccctcctgcctgaagatgttccaccaaatttgggcagctctgctctacttctatggtattatccttaactccatctaccagtgccctgagcacagtcaactgacaactctgggcgtcgactcggaccgatg

SEQ ID NO: 12263 - DNA, 203 bp, synthetic construct
  source 1..203: mol_type = other DNA
ggcgcgccagtcctaacgcggcctgagcagccagtaggggagagagcagttaaggcacacagagcaccagctccctcctgcctgaagatgttccaccaaatttgccttctaacctgagacttctatggtattatccttaactccatctaccagtgccctgagcacagtcaactgacaactctgggcgtcgactcggaccgatg

SEQ ID NO: 12264 - DNA, 203 bp, synthetic construct
  source 1..203: mol_type = other DNA
ggcgcgccagtccttcgatcgtctgagcagccagtaggggagagagcagttaaggcacacagagcaccagctccctcctgcctgaagatgttccaccaaatttgggcagctctgctctacttctatggtattatccttaactccatagttgtaaaaatgtagcacagtcaactgacaactctgggcgtcgactcggaccgatg

SEQ ID NO: 12265 - DNA, 203 bp, synthetic construct
  source 1..203: mol_type = other DNA
ggcgcgccagtcctgatccagactgagcagccagtaggggagagagcagttaaggcacacagagcaccagctccctcctgcctgaagatgttccaccaaatttgggcagctctgctctacttctatggtattatccttaactccatctaccagtgccctgagcacagtcaactgacaactctgggcgtcgactcggaccgatg

SEQ ID NO: 12266 - DNA, 203 bp, synthetic construct
  source 1..203: mol_type = other DNA
ggcgcgccagtcctcccatttgctgagcagccagtaggggagagagcagttaaggcacacagagcaccagctccctcctgcctgaagatgttccaccaaatttgggcagctctgctctacttctatggtattatccttaactccatctaccagtgccctggattggccagctgtacaactctgggcgtcgactcggaccgatg

SEQ ID NO: 12267 - DNA, 203 bp, synthetic construct
  source 1..203: mol_type = other DNA
ggcgcgccagtcctgggccggcctgagcagccagtaggggagagagcagttaaggcacacagctgtggtttattaacctgcctgaagatgttccaccaaatttgggcagctctgctctacttctatggtattatccttaactccatctaccagtgccctgagcacagtcaactgacaactctgggcgtcgactcggaccgatg

SEQ ID NO: 12268 - DNA, 203 bp, synthetic construct
  source 1..203: mol_type = other DNA
ggcgcgccagtcctccagagaactgaggcccgggcactgagctgccataccccgaaagcaggatggagctggagtgaggtggaggggccgcaagctgctgaccggcgtgtggaacactggtggtttgcagatcactgaggctggacaacgttcatggctctcgggtagaacctagtgaaacggccagacgactcggaccgatg

SEQ ID NO: 12269 - DNA, 203 bp, synthetic construct
  source 1..203: mol_type = other DNA
ggcgcgccagtcctcagacccactgatattaatatccctgatttacccatttgtgtgtatgatccgctaccagttattttgcttggcattcttttgggcgttgcgattgtaattattgtagttttgttgttatattttatggtggaagcgcgccgctttttgcatgatgcttagaccataatctaaaccgactcggaccgatg

SEQ ID NO: 12270 - DNA, 203 bp, synthetic construct
  source 1..203: mol_type = other DNA
ggcgcgccagtccttacataacctgatattaatatccctgatttacccatttgtgtgtatgatccgctaccagttattttgcttggcattcttttgggcgttgcgattgtaattattgtagttttgttgttatattttatggtggataatgttactaggctgcatgatgcttaggatgacggtacgtgcgactcggaccgatg

SEQ ID NO: 12271 - DNA, 203 bp, synthetic construct
  source 1..203: mol_type = other DNA
ggcgcgccagtcctccgccatgctgcagccgccgattttaaatcagcgcagtcagcagctcggcgccacctccggtcggcgactgcggcgggctcgacgaggcggctgacggggcggcggcgggaagacggccgggtgcgccttggggtttagtggcggcttctccatgggtccagccagccgcttcccgactcggaccgatg

SEQ ID NO: 12272 - DNA, 203 bp, synthetic construct
  source 1..203: mol_type = other DNA
ggcgcgccagtcctatacgtctctgcagccgccgccgccggccgccttcagtcagcagctcggcgccacctccggtcggcgactgcggcgggctcgacgaggcggctgacggggcggcatacatttagtcttcgggtgcgccttggggtttagtggcggcttctccatgggtccagccagccgcttcccgactcggaccgatg

SEQ ID NO: 12273 - DNA, 203 bp, synthetic construct
  source 1..203: mol_type = other DNA
ggcgcgccagtcctctccgtgcctgcagccgccgccgccggccgccttcagtcagcagctcggcgccacctccggtcggcgactgcggcgggctcgacgaggcggctgacggggcggcggcgggaagacggccgggtgcgccttggggtttagtggcggcttctccatgggtccccgtgttgttccttcgactcggaccgatg

SEQ ID NO: 12274 - DNA, 203 bp, synthetic construct
  source 1..203: mol_type = other DNA
ggcgcgccagtcctgtttaaagctgccacagaaacgcttaggactcccattcccatggagaaactcctagatgaggttcttgcccccggtgggccttataacttaaccgtcggcagttgggtaagagaccacgtccgatcaattgtcgagggcgcgtgggaagtgcgcgatgttgttaccgctgcccacgactcggaccgatg

SEQ ID NO: 12275 - DNA, 203 bp, synthetic construct
  source 1..203: mol_type = other DNA
ggcgcgccagtcctatcccgtgctgccctaaaatagcttcccatgtgagggctagagaaaggaaaagattagacccgttgctacgctagaagagaaagtgaaggagggcaggggagggggacagcgagccattgagcgatctttgtcaagcatcccagaagactgcgccatggggctcagcgacggggcgactcggaccgatg

SEQ ID NO: 12276 - DNA, 203 bp, synthetic construct
  source 1..203: mol_type = other DNA
ggcgcgccagtcctatgttccactgccctaaaatagcttcccatgtgagggctagagaaaggaaaagattagaccctccctggatgagagagagaaagtgaaggagggcaggggagggggacagcgagccattgagcgatctttgtcaagcatcccagaactactgctagcaccgctcagcgacggggcgactcggaccgatg

SEQ ID NO: 12277 - DNA, 203 bp, synthetic construct
  source 1..203: mol_type = other DNA
ggcgcgccagtcctcaccacaactgccctaaaatagcttcccatgtgagggctagagaaaggaaaagattagaccctccctggatgagagagagaaagtgaaggtctcgccctccaacggacagcgagccattgagcgatctttgtcaagcatcccagaagactgcgccatggggctcagcgacggggcgactcggaccgatg

SEQ ID NO: 12278 - DNA, 203 bp, synthetic construct
  source 1..203: mol_type = other DNA
ggcgcgccagtcctcgtttgttctgccctaaaatagcttcccatgtgagggctagagaaaggcccgcggatatggttccctggatgagagagagaaagtgaaggagggcaggggagggggacagcgagccattgagcgatctttgtcaagcatcccagaagactgcgccatggggctcagcgacggggcgactcggaccgatg

SEQ ID NO: 12279 - DNA, 203 bp, synthetic construct
  source 1..203: mol_type = other DNA
ggcgcgccagtccttggcattcctgccctaaaatcatcaaggtcaactgggctagagaaaggaaaagattagaccctccctggatgagagagagaaagtgaaggagggcaggggagggggacagcgagccattgagcgatctttgtcaagcatcccagaagactgcgccatggggctcagcgacggggcgactcggaccgatg

SEQ ID NO: 12280 - DNA, 203 bp, synthetic construct
  source 1..203: mol_type = other DNA
ggcgcgccagtcctatggtagtctgccggccggcactagtctttgacgccgccccgcttccgcccgctgtcctgctgcacgaacccttccaactctcctttcctcccccacccttgagttacccctctgtctttcctgctgttgcgcgggtgctcccacagcggagcggagattacagagccgccgggcgactcggaccgatg

SEQ ID NO: 12281 - DNA, 203 bp, synthetic construct
  source 1..203: mol_type = other DNA
ggcgcgccagtcctactctgttctgccggccggcggccccgcgctcgcccgccccgcttccgaagatccgaggtgagcacgaacccttccaactctcctttcctcccccacccttgagttacccctctgtctttcctgctgttgcgcgggtgctcccacagcggagcggagattacagagccgccgggcgactcggaccgatg

SEQ ID NO: 12282 - DNA, 203 bp, synthetic construct
  source 1..203: mol_type = other DNA
ggcgcgccagtcctccggctgactgccggccggcggccccgcgctcgcccgccccgcttccgcccgctgtcctgctgcacgaacccttccaactctcctttcctcccccacccttgagttacccctctgtctttcctgctgttgcgcgggtgctcccacagcggagcggagattacagagccgccgggcgactcggaccgatg

SEQ ID NO: 12283 - DNA, 203 bp, synthetic construct
  source 1..203: mol_type = other DNA
ggcgcgccagtcctccacttggctgccggccggcggccccgcgctcgcccgccccgcttccgcccgctgtcctgctgcacgaacccttccttgctatacgcaaacccccacccttgagttacccctctgtctttcctgctgttgcgcgggtgctcccacagcggagcggagattacagagccgccgggcgactcggaccgatg

SEQ ID NO: 12284 - DNA, 203 bp, synthetic construct
  source 1..203: mol_type = other DNA
ggcgcgccagtcctaatattctctgccggccggcggccccgcgctcgcccgccccgcttccgcccgctgtcctgcttactttgattccataactctcctttcctcccccacccttgagttacccctctgtctttcctgctgttgcgcgggtgctcccacagcggagcggagattacagagccgccgggcgactcggaccgatg

SEQ ID NO: 12285 - DNA, 203 bp, synthetic construct
  source 1..203: mol_type = other DNA
ggcgcgccagtcctgagcattgctgccggccggcggccccgcgctcgcgttagagcgcagttcccgctgtcctgctgcacgaacccttccaactctcctttcctcccccacccttgagttacccctctgtctttcctgctgttgcgcgggtgctcccacagcggagcggagattacagagccgccgggcgactcggaccgatg

SEQ ID NO: 12286 - DNA, 203 bp, synthetic construct
  source 1..203: mol_type = other DNA
ggcgcgccagtcctccacccttctgctataagaaaggccttattaggacacatagttagccctaggtgtgaatatcaagcaggacataactgttatcaggtagaacaatacttggcactagcagcattaataacaccaaaaaagataaagccacctttgcctagtgttacgaaactgacagaggatagcgactcggaccgatg

SEQ ID NO: 12287 - DNA, 203 bp, synthetic construct
  source 1..203: mol_type = other DNA
ggcgcgccagtcctacccaagtctgcttatggtgacaattgagagattgttaccatatagctcaactgccatagtaccggtgaccaatagagctattatatatctctttgttgggtttataccacttagcttgaaagaggttaaaacattacaattcattgttaagttgaatacagcaaaatgggagccgactcggaccgatg

SEQ ID NO: 12288 - DNA, 203 bp, synthetic construct
  source 1..203: mol_type = other DNA
ggcgcgccagtccttatgtactctgcttatggtggttccgtgcgaccggttaccatatagctattggattggccatccggtgaccaatagagctattatatatctctttgttgggtttataccacttagcttgaaagaggttaaaacattacaattcattgttaagttgaatacagcaaaatgggagccgactcggaccgatg

SEQ ID NO: 12289 - DNA, 203 bp, synthetic construct
  source 1..203: mol_type = other DNA
ggcgcgccagtcctaggtccatctggctctggaggcgcaggtggtcctgacctcctccaggtatggtgcgcgctgttttctaatcacgtggctgccacccaggtaagaagaggccgctcttcctggggttgtttctccgtgtgacgtgtggcctttgagatcaactctcctgtaccagcgtaggccgccgactcggaccgatg

SEQ ID NO: 12290 - DNA, 203 bp, synthetic construct
  source 1..203: mol_type = other DNA
ggcgcgccagtcctgcatcgatctggctctggaggcgcaggtggtccttcttctactgtcacatggtgcgcgctgtggcgcctggttcccgctgccacccaggtaagaagaggccgctcttcctggggttgtttctccgtgtgacgtgtggcctttgagatcaactctcctgtaccagcgtaggccgccgactcggaccgatg

SEQ ID NO: 12291 - DNA, 203 bp, synthetic construct
  source 1..203: mol_type = other DNA
ggcgcgccagtccttccactccctggctctggaggcgcaggtggtccttcttctactgtcacatggtgcgcgctgttttctaatcacgtggctgccacccaggtaagaagaggccgctcttcctggggttgtgggggaacaatttatgtggcctttgagatcaactctcctgtaccagcgtaggccgccgactcggaccgatg

SEQ ID NO: 12292 - DNA, 203 bp, synthetic construct
  source 1..203: mol_type = other DNA
ggcgcgccagtcctgtaagcgtctggctgagcctatgtaattagccattccgagtcaccgcctgccgccgcgcccccggtttctataaattgagcccgcagcctcccgcttcgctctctgctcctcctgttcgacagtcagccgcatcttcttttgcgtcgccagccgagccacatcgctcagacacccgactcggaccgatg

SEQ ID NO: 12293 - DNA, 203 bp, synthetic construct
  source 1..203: mol_type = other DNA
ggcgcgccagtcctagtagttcctggctgagcctggcgggaggcggggagatgcattaacagtgccgccgcgcccccggtttctataaattgagcccgcagcctcccgcttcgctctctgctcctcctgttcgacagtcagccgcatcttcttttgcgtcgccagccgagccacatcgctcagacacccgactcggaccgatg

SEQ ID NO: 12294 - DNA, 203 bp, synthetic construct
  source 1..203: mol_type = other DNA
ggcgcgccagtcctccggtgtactggctgagcctggcgggaggcggggtccgagtcaccgcctgccgccgcgcccccggtttctataaattgagcccgcagcctcccgcttcgctctctgctcctcctgttcccagtcgtagtaagtcttcttttgcgtcgccagccgagccacatcgctcagacacccgactcggaccgatg

SEQ ID NO: 12295 - DNA, 203 bp, synthetic construct
  source 1..203: mol_type = other DNA
ggcgcgccagtccttaccgcagctggctgagcctggcgggaggcggggtccgagtcaccgcctgccgccgcgcccccggtttctataaattgagcccgcagcctcccgcttcgctctctgctcctcctgttcgacagtcagccgcatcttcttttgcgtcagttctactaagttatcgctcagacacccgactcggaccgatg

SEQ ID NO: 12296 - DNA, 203 bp, synthetic construct
  source 1..203: mol_type = other DNA
ggcgcgccagtccttgcaccggctgggtcgccagatttggttgtctttttttgaggccttgtgcgctgtacttctccaaatgggaaacaagcaagccaaagccccagaatcaaaagacagtccgagagccagcctgatcccagatgccacacatctagggccacagttctgtaagagctgctggttcgcgactcggaccgatg

SEQ ID NO: 12297 - DNA, 203 bp, synthetic construct
  source 1..203: mol_type = other DNA
ggcgcgccagtcctacttgggtctggtacttggtccaaggacgcagacctctttttgagtatcacgcctccggaagtagttgggcaagcccacctatatgtgttgggatggttggggttagccatccataccgtactgcctgatagggtccttgcgaggggatctgggagtctcgtagaccgtagcaccgactcggaccgatg

SEQ ID NO: 12298 - DNA, 203 bp, synthetic construct
  source 1..203: mol_type = other DNA
ggcgcgccagtcctaggagtgtctggtgctgctcataaaacagacatcaatccattgaatcaactgccagaccgaacaaacaaatgtccgtcagcggaaccaccaaccaatcaatcaaccaactgatccatcagcaacctgacgaaattaacaatatagtaacaaaaaaagaacaagatggggcaaatcgactcggaccgatg

SEQ ID NO: 12299 - DNA, 203 bp, synthetic construct
  source 1..203: mol_type = other DNA
ggcgcgccagtcctttctcggcctggttaccagcaacataggaaattgtcgttgaactacatgttgtaaggctttagagaaataagggagtgtcctatttaggaccgacaagagtcaaggcagccccaccaaaacctctagcgactaggaacagctatatcgggttgctatagcagtcaggatgtcatcgactcggaccgatg

SEQ ID NO: 12300 - DNA, 203 bp, synthetic construct
  source 1..203: mol_type = other DNA
ggcgcgccagtcctctttggcgctgtcctcgccgccgtcgcgggcagtaatccagtcataagtgacaagctagccggaggagcgcctaggaacccgagccggagctcagcgagcgcagcctgcacgcccgcctcgcgtcccgggggggtcccgcctcccaccccgcctctggacttgtctctttcccccgactcggaccgatg

SEQ ID NO: 12301 - DNA, 203 bp, synthetic construct
  source 1..203: mol_type = other DNA
ggcgcgccagtccttatactgtctgtcctcgccgccgtcgcgggcagtgtctagccaggcctcactgctgagcgttgaggagcgcctaggaacccgagccggagctcagcgagcgcagcctgcacgcccgcctcgcgtcccgggggggtcccgcctcccaccccgcctctggacttgtctctttcccccgactcggaccgatg

SEQ ID NO: 12302 - DNA, 203 bp, synthetic construct
  source 1..203: mol_type = other DNA
ggcgcgccagtcctcggagaccctgtcctcgccgccgtcgcgggcagtgtctagccaggccttgacaagctagccgataagttaggctcaaacccgagccggagctcagcgagcgcagcctgcacgcccgcctcgcgtcccgggggggtcccgcctcccaccccgcctctggacttgtctctttcccccgactcggaccgatg

SEQ ID NO: 12303 - DNA, 203 bp, synthetic construct
  source 1..203: mol_type = other DNA
ggcgcgccagtcctgtacggccctgtcctcgccgccgtcgcgggcagtgtctagccaggccttgacaagctagccggaggagcgcctaggaacccgagccggagctcagcgagcgcagcctgcacgcccgccggctactagccataggtcccgcctcccaccccgcctctggacttgtctctttcccccgactcggaccgatg

SEQ ID NO: 12304 - DNA, 203 bp, synthetic construct
  source 1..203: mol_type = other DNA
ggcgcgccagtcctaattcgttctgtcctcgccgccgtcgcgggcagtgtctagccaggccttgacaagctagccggaggagcgcctaggaacccgagccggagctcagcgagcgcagcctgcacgcccgcctcgcgtcccgggggttagaacagaaaatccccgcctctggacttgtctctttcccccgactcggaccgatg

SEQ ID NO: 12305 - DNA, 203 bp, synthetic construct
  source 1..203: mol_type = other DNA
ggcgcgccagtccttcacgcatctgtcctcgccgtgcctcacttattggtctagccaggccttgacaagctagccggaggagcgcctaggaacccgagccggagctcagcgagcgcagcctgcacgcccgcctcgcgtcccgggggggtcccgcctcccaccccgcctctggacttgtctctttcccccgactcggaccgatg

SEQ ID NO: 12306 - DNA, 203 bp, synthetic construct
  source 1..203: mol_type = other DNA
ggcgcgccagtcctgtggaccactgtgagatcaactacgatccttttatgggagctggggcagggactacgagagcagccagatgggctgaaagtggaactcaaggggtttctggcacctacctacctgcttcccgctggggggtggggagttggcccagagtcttaagattggggcagggtggagagcgactcggaccgatg

SEQ ID NO: 12307 - DNA, 203 bp, synthetic construct
  source 1..203: mol_type = other DNA
ggcgcgccagtcctagggctttctgtgagatcaagggtctcttaaggggttttcgaccacgtgggactacgagagcagccagatgggctgaaagtggaactcaaggggtttctggcacctacctacctgcttcccgctggggggtggggagttggcccagagtcttaagattggggcagggtggagagcgactcggaccgatg

SEQ ID NO: 12308 - DNA, 203 bp, synthetic construct
  source 1..203: mol_type = other DNA
ggcgcgccagtcctggtgtttcctgtgagatcaagggtctcttaagggtgggagctggggcagggactacgagagcagccagatgggctgaaagtggaactcaaggggtttctggcacctacctacctgcttcccgctggggggtggggagttggcccaggtaaacccagcgttggcagggtggagagcgactcggaccgatg

SEQ ID NO: 12309 - DNA, 203 bp, synthetic construct
  source 1..203: mol_type = other DNA
ggcgcgccagtcctaggaacggctgtgagatcaagggtctcttaagggtgggagctggggcagggactacgagagcagccagatgggctgaaagtggaactcaatttaacgtacatctctacctacctgcttcccgctggggggtggggagttggcccagagtcttaagattggggcagggtggagagcgactcggaccgatg

SEQ ID NO: 12310 - DNA, 203 bp, synthetic construct
  source 1..203: mol_type = other DNA
ggcgcgccagtcctagtttggcctgtgagatcaagggtctcttaagggtgggagctggggcagggactacgagagctcatgtgcccctgaaaagtggaactcaaggggtttctggcacctacctacctgcttcccgctggggggtggggagttggcccagagtcttaagattggggcagggtggagagcgactcggaccgatg

SEQ ID NO: 12311 - DNA, 203 bp, synthetic construct
  source 1..203: mol_type = other DNA
ggcgcgccagtcctatagtgctctgtgagattgcccggtacagcagcaccatgcacaggctctagcttggtagatcattttctctcgctcttttttttaatactagcaactttcatcctttgaaacgtgtgctgaaaaagaagaatcagcaaatactactgaaagtgcaatatttgagtatcactgcgcgactcggaccgatg

SEQ ID NO: 12312 - DNA, 203 bp, synthetic construct
  source 1..203: mol_type = other DNA
ggcgcgccagtcctagcaatatctgtgagattgcccggtacagcagcagttgtattctttatgtaaagacaccgctattttctctcgctcttttttttaatactagcaactttcatcctttgaaacgtgtgctgaaaaagaagaatcagcaaatactactgaaagtgcaatatttgagtatcactgcgcgactcggaccgatg

SEQ ID NO: 12313 - DNA, 203 bp, synthetic construct
  source 1..203: mol_type = other DNA
ggcgcgccagtcctcctggcgtctgtgagattgcccggtacagcagcagttgtattctttattagcttggtagatcattttctctcgctcttttttttaatactagcaactttcatcctttgaaacgtgtgctgaaaaagaagaatcagcaaatactactgaaagtgcaatattgctaagatctcaatcgactcggaccgatg

SEQ ID NO: 12314 - DNA, 203 bp, synthetic construct
  source 1..203: mol_type = other DNA
ggcgcgccagtcctgggctcccctgtgagccccggccccagccgcggacagacccgcggagtcgcctcccggcccacccgcccggccgcctgtttctttcgtttggacgggaccccggcgcccccaccccatccccgggagaactctaagaaggagctgatgtggaggagcagctgagacagttcaagcgactcggaccgatg

SEQ ID NO: 12315 - DNA, 203 bp, synthetic construct
  source 1..203: mol_type = other DNA
ggcgcgccagtccttttagggtctgtgagccccggccccagccgcggacagacccgcggagtcgcctcccggcccaggtagtaatggagagaggagcgggaggaggacgggaccccggcgcccccaccccatccccgggagaactctaagaaggagctgatgtggaggagcagctgagacagttcaagcgactcggaccgatg

SEQ ID NO: 12316 - DNA, 203 bp, synthetic construct
  source 1..203: mol_type = other DNA
ggcgcgccagtcctattacatgctgtgagccccggccccagccgcggacagacccgcggagtgaatggagtcggagcccgcccggccgccgaggagcgggaggaggacgggaccccggcgcccccaccccatccccgggagaactctaagaaggagctgatgtggaggagcagctgagacagttcaagcgactcggaccgatg

SEQ ID NO: 12317 - DNA, 203 bp, synthetic construct
  source 1..203: mol_type = other DNA
ggcgcgccagtcctccagctacctgtgagccccgtaatgcttactttccagacccgcggagtcgcctcccggcccacccgcccggccgccgaggagcgggaggaggacgggaccccggcgcccccaccccatccccgggagaactctaagaaggagctgatgtggaggagcagctgagacagttcaagcgactcggaccgatg

SEQ ID NO: 12318 - DNA, 203 bp, synthetic construct
  source 1..203: mol_type = other DNA
ggcgcgccagtccttccaccatctgtgcagtcagccttaaacactgactgcacccctcccagatttcttttacattcttcccgccagggcatcacacaatctcataaaatttatgtaatttcatttaattttagccacaaatcatcaaaatgacgaggattttgacagctttcaaagtggtgaggacacgactcggaccgatg

SEQ ID NO: 12319 - DNA, 203 bp, synthetic construct
  source 1..203: mol_type = other DNA
ggcgcgccagtcctcttccctgctgtggtaggggaatgccacctgtcatttgaggagcagccgtgtggtatgattgatgattcaacacgcgttctcgccaagtccagcaaggactacatcaatgctagttatattagaatagtcaattgtggagaagagtatttttatatcgctactcaaggaccactcgactcggaccgatg

SEQ ID NO: 12320 - DNA, 203 bp, synthetic construct
  source 1..203: mol_type = other DNA
ggcgcgccagtcctctttaagcctgtggtaggggcgacagtgtcgaatcctgaggagcagccgtgtggtatgattgatgattcaacacgcgttcctcttggaaaaagcaaggactacatcaatgctagttatattagaatagtcaattgtggagaagagtatttttatatcgctactcaaggaccactcgactcggaccgatg

SEQ ID NO: 12321 - DNA, 203 bp, synthetic construct
  source 1..203: mol_type = other DNA
ggcgcgccagtcctaggcgtacctgtgtgctaataacatcttcgaatgctgcaaatcgagttgctaggcaataaacacatttggattaattttaatcgttcgttgagcgattagcagagaactgaccagaacatgtctggtcgtaaagctcagggaaaaaccctgggcgtcaatatggtacgacgaggcgactcggaccgatg

SEQ ID NO: 12322 - DNA, 203 bp, synthetic construct
  source 1..203: mol_type = other DNA
ggcgcgccagtcctccgggcccctgtgtgctaattgaggtgcattggtctgcaaatcgagttgctaggcaataaacacatttggattaatcacttcacacgtccgagcgattagcagagaactgaccagaacatgtctggtcgtaaagctcagggaaaaaccctgggcgtcaatatggtacgacgaggcgactcggaccgatg

SEQ ID NO: 12323 - DNA, 203 bp, synthetic construct
  source 1..203: mol_type = other DNA
ggcgcgccagtcctgtgatacgctgtgtgctaattgaggtgcattggtctgcaaatcgagttgctaggcaataaacacatttggattaattttaatcgttcgttgagcgattagcagagaactgaccagaacatgtctggtcgtaaagctcagggaaaaaatgcctctcgactaatggtacgacgaggcgactcggaccgatg

SEQ ID NO: 12324 - DNA, 203 bp, synthetic construct
  source 1..203: mol_type = other DNA
ggcgcgccagtcctttcgtctgctgtgtgctaattgaggtgcattggtctgcaaatcgagttgctaggcaataaacacatttggattaattttaatcgttcgttgagcgattagcagagaactgaccagaacatgtctggtcgtaaagctcagggaaaaaccctgggcgtcaatatggtacgacgaggcgactcggaccgatg

SEQ ID NO: 12325 - DNA, 203 bp, synthetic construct
  source 1..203: mol_type = other DNA
ggcgcgccagtccttatgcttcctgttgctccttaaatactgaggggactgtattgaaagcgtttgtgttcatcttatcagggacctgaccctaagagaatccttcccctgccaaggcagttccagcccccagaactcatcaccccatctcctgaggtggttcctatcctccctctcttctcctcgcccgactcggaccgatg

SEQ ID NO: 12326 - DNA, 203 bp, synthetic construct
  source 1..203: mol_type = other DNA
ggcgcgccagtcctagacggttctgttgctccttctgcctcccctctcacagggcatgtctctttgtgttcatcttatcagggacctgaccctaagagaatccttcccctgccaaggcagttccagcccccagaactcatcaccccatctcctgaggtggttcctatcctccctctcttctcctcgcccgactcggaccgatg

SEQ ID NO: 12327 - DNA, 203 bp, synthetic construct
  source 1..203: mol_type = other DNA
ggcgcgccagtcctgtgtgctactgttgctccttctgcctcccctctcctgtattgaaagcgcgcactacacgagcatcagggacctgaccctaagagaatccttcccctgccaaggcagttccagcccccagaactcatcaccccatctcctgaggtggttcctatcctccctctcttctcctcgcccgactcggaccgatg

SEQ ID NO: 12328 - DNA, 203 bp, synthetic construct
  source 1..203: mol_type = other DNA
ggcgcgccagtcctacttaatgctgttgctccttctgcctcccctctcctgtattgaaagcgtttgtgttcatcttatcagggacctgaccctaagagaatccttcccctgccaaggcagttccagcccccagaactcatcaccccatctcctgaggtggttcctatcctccctctcttctcctcgcccgactcggaccgatg

SEQ ID NO: 12329 - DNA, 203 bp, synthetic construct
  source 1..203: mol_type = other DNA
ggcgcgccagtcctatgtagacctgttgctccttctgcctcccctctcctgtattgaaagcgtttgtgttcatcttatcagggacctgaccctaagagaatccttcccctgccaaggcagttccagcccccagaactcatcaccccgctaaacccacaatttcctatcctccctctcttctcctcgcccgactcggaccgatg

SEQ ID NO: 12330 - DNA, 203 bp, synthetic construct
  source 1..203: mol_type = other DNA
ggcgcgccagtcctatctaacactgtttcctcctcctccttctcctcctcctccgtgacctcctcctcctctttctcctgagaaacttcgccccagcggtgcggagcgccgctgcgcacaactactcatcttcaggcaggcggcgggcagcgggaggcggcagcccggtgcggtccccgcggctctcgcgactcggaccgatg

SEQ ID NO: 12331 - DNA, 203 bp, synthetic construct
  source 1..203: mol_type = other DNA
ggcgcgccagtcctttcgcgcgctgtttcctcctcctccttctcctcctcctccgtgacctcctcctcctctttctcctgagaaacttcgccccagcggtgcggagcgccgctgcgcagccggggagggacgcaggcaggcggcgggcagcgggaggcggacaggatccttctgccccgcggctctcgcgactcggaccgatg

SEQ ID NO: 12332 - DNA, 203 bp, synthetic construct
  source 1..203: mol_type = other DNA
ggcgcgccagtccttattaagtctgtttcctcctcctccttctcctcctcctccgtgacctcctcctcctctttctcctgagaaacttcgccccagcggtgcggttatagctgctcgcgccggggagggacgcaggcaggcggcgggcagcgggaggcggcagcccggtgcggtccccgcggctctcgcgactcggaccgatg

SEQ ID NO: 12333 - DNA, 203 bp, synthetic construct
  source 1..203: mol_type = other DNA
ggcgcgccagtcctctagttagcttacctgcaaccacgcgcccagcaccctgcctccggcgatgccgccccagcccctctgatggccctcctctctgctgccactcattccagaacaggaggcatgagcccggaacgcgcttgcttttaggagacagccactttctgtgtggtacgctggattcaaggcgactcggaccgatg

SEQ ID NO: 12334 - DNA, 203 bp, synthetic construct
  source 1..203: mol_type = other DNA
ggcgcgccagtcctattggacccttactaataataacgtgcctcatgaaataaagatccgaaaggaattggaataaaaatttcctgcgtctcatgccaagagggaaacaccagaatcaagtgttccgcgtgaagtgcacgcgagtgtcgtccaagaatgcaaagcacatccaataaaatagctggattcgactcggaccgatg

SEQ ID NO: 12335 - DNA, 203 bp, synthetic construct
  source 1..203: mol_type = other DNA
ggcgcgccagtcctatgcgcaacttactaataataacgtgcctcatgaaataaagatccgaaaggaattggaataaaaatttcctgcgtctcatgccaagagggttggcgtgactaatagtgttccgcgtgattgaagacaccccctcgtccaagaatgcaaagcacatccaataaaatagctggattcgactcggaccgatg

SEQ ID NO: 12336 - DNA, 203 bp, synthetic construct
  source 1..203: mol_type = other DNA
ggcgcgccagtccttgttcgcacttactaataataacgtgcctcatgaaataaagatccgaaaggaattggaataactgcgattcatccgtcatgccaagagggaaacaccagaatcaagtgttccgcgtgattgaagacaccccctcgtccaagaatgcaaagcacatccaataaaatagctggattcgactcggaccgatg

SEQ ID NO: 12337 - DNA, 203 bp, synthetic construct
  source 1..203: mol_type = other DNA
ggcgcgccagtcctgctacggtcttactaataataacgtgcctcatgattattcctcgtaccaggaattggaataaaaatttcctgcgtctcatgccaagagggaaacaccagaatcaagtgttccgcgtgattgaagacaccccctcgtccaagaatgcaaagcacatccaataaaatagctggattcgactcggaccgatg

SEQ ID NO: 12338 - DNA, 203 bp, synthetic construct
  source 1..203: mol_type = other DNA
ggcgcgccagtcctcatttaaacttatgtattgagactcattgccttgtgactttatattcacaaaactgctggaagacaatgatctggggtatcacattccctcttaggttaagtttcgcactactaggaatttttgcgaaaattcttaattccattcttatggtgtagtgtttgttcttttcaattcgactcggaccgatg

SEQ ID NO: 12339 - DNA, 203 bp, synthetic construct
  source 1..203: mol_type = other DNA
ggcgcgccagtcctgggaaatccttatgtattgatgagagccttaaaatgactttatattcacaaaactgctggaagacaatgatctggggtatcacattccctcttaggttaagtttcgcactactaggaatttttgcgaaaattcttaattccattcttatggtgtagtgtttgttcttttcaattcgactcggaccgatg

SEQ ID NO: 12340 - DNA, 203 bp, synthetic construct
  source 1..203: mol_type = other DNA
ggcgcgccagtcctttctaaaccttcaaaacaaatcatatcaatacaatatcaagtagtgtcgatgatctcattaggtactaatcctaacattgtgattcatcctgcattgagaaaagatttagaaaaaaacggtcaacccgcaatatatcctggggtcgtaacgtctcgtgaccctgccgttgcactcgactcggaccgatg

SEQ ID NO: 12341 - DNA, 203 bp, synthetic construct
  source 1..203: mol_type = other DNA
ggcgcgccagtcctcgcgactgcttcaaaacaaatcatatcaatacaatatcaagtagtgtcgatgatctcattaggtactaatcctaacattgtgattcatcctgcattgagaaaagggactatctgttcgtaaattaagaatgaatatcctggggtcgtaacgtctcgtgaccctgccgttgcactcgactcggaccgatg

SEQ ID NO: 12342 - DNA, 203 bp, synthetic construct
  source 1..203: mol_type = other DNA
ggcgcgccagtcctcggtcgagcttcccggaactggaaggttacattgattacccacctagtacaacatcttacgggaagagcatagtatttcctagaggaatagtctgcgtcgtcccaggtatcattggctctgaattaaatttgaacttgtcccctgaatagctacaggttttggaagctgaatcacgactcggaccgatg

SEQ ID NO: 12343 - DNA, 203 bp, synthetic construct
  source 1..203: mol_type = other DNA
ggcgcgccagtcctcggattcacttcccggaactggaaggttacattgattacccacctagtacaacatcttacgggaagagcatagtatttcctagaggaatatgaacataacaggacctgcgtgggccagctgaattaaatttgaacttgtcccctgaatagctacaggttttggaagctgaatcacgactcggaccgatg

SEQ ID NO: 12344 - DNA, 203 bp, synthetic construct
  source 1..203: mol_type = other DNA
ggcgcgccagtcctgttctaggcttcccggaactggaaggttacattggacgagatttgtcgacaacatcttacgggaagagcatagtatttcctagaggaatatgaacataacaggaaggtatcattggctctgaattaaatttgaacttgtcccctgaatagctacaggttttggaagctgaatcacgactcggaccgatg

SEQ ID NO: 12345 - DNA, 203 bp, synthetic construct
  source 1..203: mol_type = other DNA
ggcgcgccagtcctggatcaagcttcttccccggcctgatctgcgcagcccggcgggcgcccagaaggagcaggcggcgcgggggcgcgctgggcgggggaggcgtggccggagctgcaaaccaggattatgtgggactgctcggccgcctcctgcccggcgagcagctcaggtcctgggctgaagagcgactcggaccgatg

SEQ ID NO: 12346 - DNA, 203 bp, synthetic construct
  source 1..203: mol_type = other DNA
ggcgcgccagtcctgcgggtggcttcttccccggcctgatctgcgcagggtcttacagctatagaaggagcaggcggcgcgggggcgcgctgggcgggggaggcgtggccggagctgcggcggcaagcgggctgggactgctcggccgcctcctgcccggcgagcagctcaggtcctgggctgaagagcgactcggaccgatg

SEQ ID NO: 12347 - DNA, 203 bp, synthetic construct
  source 1..203: mol_type = other DNA
ggcgcgccagtcctgaggcacccttgaaaaactatgccccggcgggtccgccggccggaggcgggagtcacaggaagagccctccacaaaaggaggcctcggcggatcaggacagctgcaggcttctgccaggtgggtgtgcagactggtgagctgccagcaggggcccagacgcgccaggcctggagcgactcggaccgatg

SEQ ID NO: 12348 - DNA, 203 bp, synthetic construct
  source 1..203: mol_type = other DNA
ggcgcgccagtcctcaccaaggcttgaggcaagtcaccagcccctgatcatttcgcctaaaagagcaaggactagagttcctgacctccacctgttatagaacaccctgacctaatgttatcgcggaatgatgatatatgtatctacgggggcctggggctgggcgggctcctgcttctggcagtggtcgactcggaccgatg

SEQ ID NO: 12349 - DNA, 203 bp, synthetic construct
  source 1..203: mol_type = other DNA
ggcgcgccagtcctacgactagcttgaggcaagtcaccagcccctgatcatttcgcctaaaagagcaaggactagagttcctgacctccaggccagtccctgatccctgacctaatgttatcgcggaatgatgatatatgtatctacgggggcctggggctgggcgggctcctgcttctggcagtggtcgactcggaccgatg

SEQ ID NO: 12350 - DNA, 203 bp, synthetic construct
  source 1..203: mol_type = other DNA
ggcgcgccagtccttataacctcttgcagccaacttcccatcagatcaccctgctggacttgcagaccggaatggggctcgcctaaggagccgagcgctgcggaggctgctgcgtgttcacactattgcctcgggggctggagcgagatttccagggcgcagtcctccggggcgttacgccgggcatacgactcggaccgatg

SEQ ID NO: 12351 - DNA, 203 bp, synthetic construct
  source 1..203: mol_type = other DNA
ggcgcgccagtcctagtaaacccttgcagccaacttcccatcagatcaccctgctggacttgcagaccggaatggggctcgcctaaggagccgagcgctgcggaggctgctgcgtgttggatgggagtgggatcccctgtacctaggatttccagggcgcagtcctccggggcgttacgccgggcatacgactcggaccgatg

SEQ ID NO: 12352 - DNA, 203 bp, synthetic construct
  source 1..203: mol_type = other DNA
ggcgcgccagtcctaagggcgtcttgcagccaacttcccatcagatcataagcactactggacagaccggaatggggctcgcctaaggagccgagcgctgcggaggctgctgcgtgttggatgggagtgggagggggctggagcgagatttccagggcgcagtcctccggggcgttacgccgggcatacgactcggaccgatg

SEQ ID NO: 12353 - DNA, 203 bp, synthetic construct
  source 1..203: mol_type = other DNA
ggcgcgccagtcctcgaacttacttgcgaggtgatcagaaggcaaagatgtcggagcgaaaagtattaaacaaatactacccgccggactttgacccatcaaagatccccaaactcaagctccccaaagaccggcagtacgtggtgcggctgatggccccgaaattgtattcccgtaagacgtgcggacgactcggaccgatg

SEQ ID NO: 12354 - DNA, 203 bp, synthetic construct
  source 1..203: mol_type = other DNA
ggcgcgccagtcctccggcactcttgcgaggtgatcagaaggcaaagatgtcggagcgaaaagtattaaacaaatactacccgccggactttgacccatcaaagtggaagtgtggatggctccccaaagaccggcagtacgtggtgcggctgatggcccccttcaacatgaggtgtaagacgtgcggacgactcggaccgatg

SEQ ID NO: 12355 - DNA, 203 bp, synthetic construct
  source 1..203: mol_type = other DNA
ggcgcgccagtcctgaggctgtcttggacagtttgtttgccatggtgacataaaggggtgtagaggaaggaaggagcaagaccagcctgtagactgtgcccctggctgggcaaaagggccaggggcccggagccttccctccactgccctcgaacgcctcacttcctaagtctctgcatttctcagtccgactcggaccgatg

SEQ ID NO: 12356 - DNA, 203 bp, synthetic construct
  source 1..203: mol_type = other DNA
ggcgcgccagtcctcctacgcacttggcgacacatccaacacgataacctcgtttcaggtagattgttatctatggcacataagaaagctactcagtatgagagacatgtgtgatgccccctttgatgacaggctccgaagagaccaaaaggcattaaagggaagaggcagcacacttggactcgattcgactcggaccgatg

SEQ ID NO: 12357 - DNA, 203 bp, synthetic construct
  source 1..203: mol_type = other DNA
ggcgcgccagtcctcgtgtgcccttgtatcacttaggctatctcggtccccagagaagcctggacccacacgcgggctagatccagagaacctgacgacccggcgacggcgacgtctcttttgactaaaagacagtgtccagtgctccagcctaggagtctacggggaccgcctcccgcgccgccacccgactcggaccgatg

SEQ ID NO: 12358 - DNA, 203 bp, synthetic construct
  source 1..203: mol_type = other DNA
ggcgcgccagtccttacttcttcttgtgtcgaaataaaccacagcttgctccggctcattgccgttaaacatcattgttcttatttacaatcaaatcgctatcgccacaaggctagtgataataactaagggatacggtaagctggctccaacctaatctccataaacagtgtctaagacgaacctcacgactcggaccgatg

SEQ ID NO: 12359 - DNA, 203 bp, synthetic construct
  source 1..203: mol_type = other DNA
ggcgcgccagtccttctgcattcttgtgtcgaaataaaccacagcttgctccggctcattgccgttaaacatcattgttcttatttacaatcaaatcgctatcgccacaaggctagtgataataactaagggggcgaagtcaagccctccaacctaatctttcagcgtgtcccttaagacgaacctcacgactcggaccgatg

SEQ ID NO: 12360 - DNA, 203 bp, synthetic construct
  source 1..203: mol_type = other DNA
ggcgcgccagtcctcaaccaccctttatccgccctgtgaccgtgttggtcgctctgttaatgaaacaagccagactggttgggcattctacgtccgtgctaaacatggtgatttttctggtgttgcctctcaggagggtgttttgtcagaaagagagaagttgcttcatttaatctaaactaaacaaacgactcggaccgatg

SEQ ID NO: 12361 - DNA, 203 bp, synthetic construct
  source 1..203: mol_type = other DNA
ggcgcgccagtcctgaagggaacttttaaaaaaggtctccccagtgctagctgccgaagcacccagataagagctgcgaacttaactgctcggcagccccagcttcgcgccccgcccagtccctttcccctgctggggatcccccctcttccccgcccaccccttacccgcatgcagcccagcgccctcgactcggaccgatg

SEQ ID NO: 12362 - DNA, 203 bp, synthetic construct
  source 1..203: mol_type = other DNA
ggcgcgccagtccttcataaatcttttaaaaaaggtctccccagtgctagctgccgaagcacccagataagagctggacggaggctaaagcggcagccccagcttcgcgccccgcccagtccctttcccctgctggggatccccccgtagttggctgattcccttacccgcatgcagcccagcgccctcgactcggaccgatg

SEQ ID NO: 12363 - DNA, 203 bp, synthetic construct
  source 1..203: mol_type = other DNA
ggcgcgccagtccttgtcaagccttttaaaaaaggtctccccagtgctagctgccgaagcacccagataagagctggacggaggctaaagcggcagccccagcttcgcgccccgcccagtccctttcccctgctggggatcccccctcttccccgcccaccccttacccgcatgcagcccagcgccctcgactcggaccgatg

SEQ ID NO: 12364 - DNA, 203 bp, synthetic construct
  source 1..203: mol_type = other DNA
ggcgcgccagtcctatcgaggacttttaaaaaaggtctccccagtgctagctgccgaagcacccagataagagctggacggaggctaaagcggcagccccagcttcgcgccccgcccagtccctttcccctgctggggatcccccctcttccccgcccacgtgcgggaacggaccagcccagcgccctcgactcggaccgatg

SEQ ID NO: 12365 - DNA, 203 bp, synthetic construct
  source 1..203: mol_type = other DNA
ggcgcgccagtcctactaacatcttttaaaaaaggtctccccagtgctagctgccgaagcacgactgctcccagccgacggaggctaaagcggcagccccagcttcgcgccccgcccagtccctttcccctgctggggatcccccctcttccccgcccaccccttacccgcatgcagcccagcgccctcgactcggaccgatg

SEQ ID NO: 12366 - DNA, 203 bp, synthetic construct
  source 1..203: mol_type = other DNA
ggcgcgccagtccttgcgtcgtcttttattctgaccgccgccttcatgctgccggcgggctgctcgcgccggctggtggccgagctgcagggcgccctggacgcctgcgcacagcgacaattgcaattggagcagagcctgcgcgtttgccgtcggctgctgcatgcctgggaaccaactgggacccgcgactcggaccgatg

SEQ ID NO: 12367 - DNA, 203 bp, synthetic construct
  source 1..203: mol_type = other DNA
ggcgcgccagtcctgagtgacgctttttcttttttctcagcaaactgtacaaaaccaaatctctttttgattttcaaggaaactaggttcctgccaaattttgaatctggacaataaacagacactttgtcctagcatctttctggaatcatttcgggatgcaaattcactttcacacagaaacaggacgactcggaccgatg

SEQ ID NO: 12368 - DNA, 203 bp, synthetic construct
  source 1..203: mol_type = other DNA
ggcgcgccagtcctaggatgccctttttgctgatacttcatttctaatcttgtagaaaatttcagctgtagcccttggactagaagctgaaataacagaagctgtgtacgatgcattagggtattgaagaaaattaacttttgaattaaatatttggaatataaggaaataaggaaagttgactgaaacgactcggaccgatg

SEQ ID NO: 12369 - DNA, 203 bp, synthetic construct
  source 1..203: mol_type = other DNA
ggcgcgccagtcctggagatcgctttttgctgatacttcatttctaatcttgtagaaaatttcagctgtagccctttattatcttctcacaataacagaagctgtgtacgatgcattagggtattgaagaaaattaacttttgaattaaatatttggaatataaggaaataaggaaagttgactgaaacgactcggaccgatg

SEQ ID NO: 12370 - DNA, 203 bp, synthetic construct
  source 1..203: mol_type = other DNA
ggcgcgccagtcctcatgatcccttttttagcaaggcaatctgcaccaatgcaactttgtggtttttgtaatttctttattatttcaccttcggcttacgtttataaaagaggtatgcagttgtataagtcttatagtgaacaagttataccacccacttcagattatttaatctaaatctaaacattcgactcggaccgatg

SEQ ID NO: 12371 - DNA, 203 bp, synthetic construct
  source 1..203: mol_type = other DNA
ggcgcgccagtcctgcgggatcgaaaagagggatccgcaacccctccggctccctttccgcacgcctcgaggcggcggcggccaccgagacagcagcgcaccttcccccatcccttccccttatcccccagcccaaaagggcccggtctgcgccccacccccgcccgtccgcccgctacgccgccgcccgactcggaccgatg

SEQ ID NO: 12372 - DNA, 203 bp, synthetic construct
  source 1..203: mol_type = other DNA
ggcgcgccagtcctccgtccgcgaaaaggcttaggcagccagcctgtcgtaacgcgcaagtccgtggcggaaccgactactttgggtgtccgtgtttccttttattcttgaatggctgcttatggtgacaatcatagattgttatcataaagcgagttggattggccatccagtgtgaatcagattaacgactcggaccgatg

SEQ ID NO: 12373 - DNA, 203 bp, synthetic construct
  source 1..203: mol_type = other DNA
ggcgcgccagtcctgtcaccaggaaaatgaagatattcctgcatcgttacaaatagtgtaagaaacagtaagcccggaagtggtgttttgcgatttcgaggccgggctcgatcctcacctttcattgtcgataggggacattttgacactacctggaaaatgtcgtctgtgctcaaagcatttgagcgcgactcggaccgatg

SEQ ID NO: 12374 - DNA, 203 bp, synthetic construct
  source 1..203: mol_type = other DNA
ggcgcgccagtcctcgacggcagaaaatgaagatgggatgttggtagaacaaatagtgtaagaaacagtaagcccggaagtggtgttttgaccccatcttaagtggctcgatcctcacctttcattgtcgataggggacattttgacactacctggaaaatgtcgtctgtgctcaaagcatttgagcgcgactcggaccgatg

SEQ ID NO: 12375 - DNA, 203 bp, synthetic construct
  source 1..203: mol_type = other DNA
ggcgcgccagtcctttcattaagaaaatgaagatgggatgttggtagaacaaatagtgtaagaaacagtaagcccggaagtggtgttttgcgatttcgaggccgggctcgatcctcacctttcattgtcgataggggacattttgacactacctggaaaatgtcgtctgtgctcaaagcatttgagcgcgactcggaccgatg

SEQ ID NO: 12376 - DNA, 203 bp, synthetic construct
  source 1..203: mol_type = other DNA
ggcgcgccagtcctagtaaggtgaaaatgaagtggtgactcaaatcatcgaagaccctcgagattacataggtccggaacctatggccttcgtgaccgacctcgagtcagagtagttcaataaggacctatcaagtttgggcaatttttcgtccccgacaacgtcggtcgtcgtgtgcttaaagcatacgactcggaccgatg

SEQ ID NO: 12377 - DNA, 203 bp, synthetic construct
  source 1..203: mol_type = other DNA
ggcgcgccagtcctgtaagacagaaaccacggctaaccacaatcaagtcatactactagtcactatacaataatcaacaattttagtcaactgattaccaagatgttatcataggtccgaactgatcaatctaacaaaaaaactaaacgttccacaataaatcaacgttcaggccaaaatattcagcccgactcggaccgatg

SEQ ID NO: 12378 - DNA, 203 bp, synthetic construct
  source 1..203: mol_type = other DNA
ggcgcgccagtcctacacgaccgaaacgagattgtgaggtgcattggtctgcaaatcgagttgctaggcaataaacacatttggattaattttaatcgttcgttgagcgattagcagagaactgaccagaacatgtctggtcgtaaagctcagggaaaaaccctgggcgtcaatatggtacgacgaggcgactcggaccgatg

SEQ ID NO: 12379 - DNA, 203 bp, synthetic construct
  source 1..203: mol_type = other DNA
ggcgcgccagtccttgagtgatgaaagatggcggcgtctgtggtttgagccttcagtagcaggccagagtctgaacaagagctggggtggagggggcggggacctggggagcccggcgggtcgctatcgcggggggtactagtggcgccgccgccacagacaccaacgctgtcgccacctctgtagcccgactcggaccgatg

SEQ ID NO: 12380 - DNA, 203 bp, synthetic construct
  source 1..203: mol_type = other DNA
ggcgcgccagtcctaagaaattgaaaggaaccggaaacgggatggggagctggaccaggtgacagcggcatggacatatgccccaggctttcctgctggggtccatccatgagcctgccctgaaaacgtctcagccccagccctgccctggaagcttggctgagagcttcctggaggaggagcttcggcgactcggaccgatg

SEQ ID NO: 12381 - DNA, 203 bp, synthetic construct
  source 1..203: mol_type = other DNA
ggcgcgccagtccttcccgttcgaaaggaaccggaaacgggatggggagctggaccaggtgatcagcagcgcacattatgccccaggctttcctgctggggtccatccatgagcctgcaggtgccctcatggagccccagccctgccctggaagcttggctgagagcttcctggaggaggagcttcggcgactcggaccgatg

SEQ ID NO: 12382 - DNA, 203 bp, synthetic construct
  source 1..203: mol_type = other DNA
ggcgcgccagtcctcctaaagggaaaggaaccggaaacgggatggggattctccggccagaccagcggcatggacatatgccccaggctttcctgctggggtccatccatgagcctgcaggtgccctcatggagccccagccctgccctggaagcttggctgagagcttcctggaggaggagcttcggcgactcggaccgatg

SEQ ID NO: 12383 - DNA, 203 bp, synthetic construct
  source 1..203: mol_type = other DNA
ggcgcgccagtcctagcccagagaaaggaaccggccggctacatcatcgctggaccaggtgacagcggcatggacatatgccccaggctttcctgctggggtccatccatgagcctgcaggtgccctcatggagccccagccctgccctggaagcttggctgagagcttcctggaggaggagcttcggcgactcggaccgatg

SEQ ID NO: 12384 - DNA, 203 bp, synthetic construct
  source 1..203: mol_type = other DNA
ggcgcgccagtcctggagtagtgaaaggcccgccgggtgtttgccagcagcctgcactctcagaaatcagacttgagtggccggaacccttgagaccagaggcttaccatgctgctccctaggagggccaggaactgctgacgtgaccactggacagttattcgtgtctcttacaattaccaaacagacgactcggaccgatg

SEQ ID NO: 12385 - DNA, 203 bp, synthetic construct
  source 1..203: mol_type = other DNA
ggcgcgccagtccttcgttatagaaatccgcatagccaattcctgtggtaatccttaccgtggcgagttccgcgctcaatggagacgtttgaccccaccgagctgcccgagctgcttaaactttattaccggaggctctttccctactctcagtactatcgctggctcaactacggtggagtgataaacgactcggaccgatg

SEQ ID NO: 12386 - DNA, 203 bp, synthetic construct
  source 1..203: mol_type = other DNA
ggcgcgccagtcctagtgctgcgaaatttcgtcaagtttgtaaactggttaggcaagtgttgtattttctgtgtctaagcactggtgattctgttcactagtgcatacattgatatttaagtggtgttccgtcactgcttattgtggaagcaacgttctgggacaaatactttaaataactgctaacccgactcggaccgatg

SEQ ID NO: 12387 - DNA, 203 bp, synthetic construct
  source 1..203: mol_type = other DNA
ggcgcgccagtcctcttccactgaaatttcgtcaagtttgtaaactggttaggcaagtgttgtattttctgtgtctaagcactggtgattctgttcactagtgcatacattgatatttaagtggtgttccgttgtaaacagaacacgaagcaacgttctgtcgttgtggaaaccaataactgctaacccgactcggaccgatg

SEQ ID NO: 12388 - DNA, 203 bp, synthetic construct
  source 1..203: mol_type = other DNA
ggcgcgccagtcctaggtattggaaatttcgtcaagtttgtaaactggttaggcaagtgttgtattttctgtgtctaagcactggtgattctgttcactagtgcatacattgatatttccccaaccactttgcactgcttattgtggaagcaacgttctgtcgttgtggaaaccaataactgctaacccgactcggaccgatg

SEQ ID NO: 12389 - DNA, 203 bp, synthetic construct
  source 1..203: mol_type = other DNA
ggcgcgccagtcctctctctcggaaatttcgtcattcagccgtgagtcttaggcaagtgttgtattttctgtgtctaagcactggtgattctgttcactagtgcatacattgatatttaagtggtgttccgtcactgcttattgtggaagcaacgttctgtcgttgtggaaaccaataactgctaacccgactcggaccgatg

SEQ ID NO: 12390 - DNA, 203 bp, synthetic construct
  source 1..203: mol_type = other DNA
ggcgcgccagtcctaatttcatgaacagaccaccgattgccaagggaggagccgacaaacagcagatggacgctgagctgcggaaggagatgatggcgatttggcccaatctgtcccagaagacgctagacctgctggtcacacctcacaagtccacggacctcaccgtggggaagatctacgcagcccgactcggaccgatg

SEQ ID NO: 12391 - DNA, 203 bp, synthetic construct
  source 1..203: mol_type = other DNA
ggcgcgccagtcctaagtgctcgaacatatgggcgtctgagtgtgttgtgggggcaatataacaaaaaaacatgttatggtgccattaaaccgctgcatttcatcaaagtcaagttaattacctttacattttgatcctcttggatgtgaaaaaaactattaacatccctcaaaagactcaaggaaagcgactcggaccgatg

SEQ ID NO: 12392 - DNA, 203 bp, synthetic construct
  source 1..203: mol_type = other DNA
ggcgcgccagtcctacaagaatgaaccacaagttgggtagcctggcagtgtcagaagtctgaacccagcatagtggtcagcaggcaggacgaatcacactgaatgcaaaccacagggtttcgcagcgtggtacgtagcgggtgcatgtcccccgccttcagaagagggtgcattttcaggaggaagcgcgactcggaccgatg

SEQ ID NO: 12393 - DNA, 203 bp, synthetic construct
  source 1..203: mol_type = other DNA
ggcgcgccagtcctcggcgtgagaacgtgtgctgtcgcgcgagacagcggaaggagcaagagtgggaggcgcgcgcggaggccgcgacggacgcaagatggcgacggcgaccatagctctcgtcaatggccagcaaggaggggggtccgagccggcggcggcggcggcagtggtggcagcgggagacacgactcggaccgatg

SEQ ID NO: 12394 - DNA, 203 bp, synthetic construct
  source 1..203: mol_type = other DNA
ggcgcgccagtcctggctcctggaagaagtcaaacgtggtgtagtctgagattctctgggatataagaggcagccgaagagttcacaagtgtgaagcctggaagccggcgggtgccgctgtgtaggaaagaagctaaagcacttccagagcctgtccggagctcagaggttcggaagacttatcgacccgactcggaccgatg

SEQ ID NO: 12395 - DNA, 203 bp, synthetic construct
  source 1..203: mol_type = other DNA
ggcgcgccagtccttggtacgcgaagacaaacaacgtctgtagcgaccctttgcaggcagcggaaccccccacctggcgacaggtgcctctgcggccaaaagccacgtgtataagatacacctgcaaaggcggcacaaccccagtgccacgttgtgagttatggttacaaatccagagtcaaatggctcgactcggaccgatg

SEQ ID NO: 12396 - DNA, 203 bp, synthetic construct
  source 1..203: mol_type = other DNA
ggcgcgccagtcctgttcaattgaagacaaacaacgtctgtagcgaccctttgcaggcagcggaaccccccacctggcgacaggtgcctctgcggccaaaagccacgtgtataagatacacctgcaaaggcggcacaaccccagtgccacgttgtgagttggatagttgtggaatttagaggtgcttacgactcggaccgatg

SEQ ID NO: 12397 - DNA, 203 bp, synthetic construct
  source 1..203: mol_type = other DNA
ggcgcgccagtcctgatgaatcgaagacaaacaacgtctgtagcgaccctttgcaggcagcggaaccccccacctggcgacaggtgcctctgcggccaaaagccacgtgtataagatagggtcatccgttgagcacaaccccagtgccacgttgtgagttggatagttgtggaaagagtcaaatggctcgactcggaccgatg

SEQ ID NO: 12398 - DNA, 203 bp, synthetic construct
  source 1..203: mol_type = other DNA
ggcgcgccagtcctcatcccacgaagacaaacaacgtctgtagcgacctacaatccaaccacgaaccccccacctggcgacaggtgcctctgcggccaaaagccacgtgtataagatacacctgcaaaggcggcacaaccccagtgccacgttgtgagttggatagttgtggaaagagtcaaatggctcgactcggaccgatg

SEQ ID NO: 12399 - DNA, 203 bp, synthetic construct
  source 1..203: mol_type = other DNA
ggcgcgccagtcctgaggttcggaagccgcaaccggtttaagctatcgtaccattatgaaaacaattcttggttcttccgacatgtctacaggaaaagttttcatttccgtaaggcttgtcaaaatttagattgtaattgtttggggttttatgaatcttcagttgaagaatattaaactcagtgaaacgactcggaccgatg

SEQ ID NO: 12400 - DNA, 203 bp, synthetic construct
  source 1..203: mol_type = other DNA
ggcgcgccagtcctgggctgatgaagcgccccagccccgcagcgatcgcagattcggctttcaaacaaaagaggcgaagtaatctacacaaccgggacctcacccggtcctcgcagagttgcggccgcccgccccttcagccccggctctccgtatgcgcatgagcagaggcgcctccctctgttcctcgactcggaccgatg

SEQ ID NO: 12401 - DNA, 203 bp, synthetic construct
  source 1..203: mol_type = other DNA
ggcgcgccagtcctagaccctggaagcgccccagccccgcagcgatcgcagattcggctttcaaacaaaagaggcgccccggggggtgggaccgggacctcacccggtcctcgcagaggacttagtcaagagcccttcagccccggctctccgtatgcgcatgagcagaggcgcctccctctgttcctcgactcggaccgatg

SEQ ID NO: 12402 - DNA, 203 bp, synthetic construct
  source 1..203: mol_type = other DNA
ggcgcgccagtcctcgtgacgagaagctggcaacatgtcacacctggaaattgtttttcaacattaatactattatttggcagtaatccagattgcttttgccaccaacctgaagacatatagaggcagaaggacaggaataattctatttgtttcctgttttgaaacttccatggcgggcccccaagcgactcggaccgatg

SEQ ID NO: 12403 - DNA, 203 bp, synthetic construct
  source 1..203: mol_type = other DNA
ggcgcgccagtcctgcgaacccgaagctggcaacatgtcacacctggaggagcgacacggctattaatactattatttggcagtaatccagattgcttttgccaccaacctgaagacatatagaggcagaaggacaggaataattctatttgtttcctgttttgaaacttccatctgtaagtattgttcgactcggaccgatg

SEQ ID NO: 12404 - DNA, 203 bp, synthetic construct
  source 1..203: mol_type = other DNA
ggcgcgccagtcctcgagcccggaagcttctgcgaaacgtggacagtcccgactttcctccggactcctgcacgacctgctcctacagccggcgatccactcccggctgttcccccggagggtccagaggcctttcagaaggagaaggcagctctgtttctctgcagaggagtagggtcctttcagcccgactcggaccgatg

SEQ ID NO: 12405 - DNA, 203 bp, synthetic construct
  source 1..203: mol_type = other DNA
ggcgcgccagtcctgcttgagggaagcttctgcgctggtgcttagtaaccgactttcctccggactcctgcacgacctgctcctacagccggcgatccactcccggctgttcccccggagggtccagaggcctttcagaaggagaaacggtggtgtcccttctgcagaggagtagggtcctttcagcccgactcggaccgatg

SEQ ID NO: 12406 - DNA, 203 bp, synthetic construct
  source 1..203: mol_type = other DNA
ggcgcgccagtccttccacgtggaagcttctgcgctggtgcttagtaaccgactttcctccggactcctgcacgacctgctcctacagccggcgatccactcccggctgttcccccggagggtccagaggcctttcagaaggagaaggcagctctgtttctctgcagaggagtagggtcctttcagcccgactcggaccgatg

SEQ ID NO: 12407 - DNA, 203 bp, synthetic construct
  source 1..203: mol_type = other DNA
ggcgcgccagtcctgttcgcgagaagcttctgcgctggtgcttagtaaccgactttcctccggactcctgcacgacctgctcctacagccggcgatccactcccggctgttcccccggttatcgtctttaagtttcagaaggagaaggcagctctgtttctctgcagaggagtagggtcctttcagcccgactcggaccgatg

SEQ ID NO: 12408 - DNA, 203 bp, synthetic construct
  source 1..203: mol_type = other DNA
ggcgcgccagtcctgcctaagcgaagcttctgcgctggtgcttagtaaccgactttcctccggactcctgcacgactgctggggctctgtggcgatccactcccggctgttcccccggagggtccagaggcctttcagaaggagaaggcagctctgtttctctgcagaggagtagggtcctttcagcccgactcggaccgatg

SEQ ID NO: 12409 - DNA, 203 bp, synthetic construct
  source 1..203: mol_type = other DNA
ggcgcgccagtccttcaactgggaaggaggaggcacccacaggctgctgggaggagagcataaggaatctacttgaaaatggatcggtttatgttggattaaatgctgctctttgtggaggtcgtcacgtttgtctttttcgacgcatcttgaatgtgacaaaggctcgcatagctgctggcttaccacgactcggaccgatg

SEQ ID NO: 12410 - DNA, 203 bp, synthetic construct
  source 1..203: mol_type = other DNA
ggcgcgccagtcctaaccgtaagaaggaggaggcacccacaggctgctgggaggagagcataaggaatctacttgaaaatggatcggtttatgttggattaaatgctgctctttgtggcctcatagcaaacagtctttttcgacgcatcttgaatgtgaccccaagaatacgtactgctggcttaccacgactcggaccgatg

SEQ ID NO: 12411 - DNA, 203 bp, synthetic construct
  source 1..203: mol_type = other DNA
ggcgcgccagtcctacgaagaagaaggaggaggccatgcgccaaatgagggaggagagcataaggaatctacttgaaaatggatcggtttatgttggattaaatgctgctctttgtggcctcatagcaaacagtctttttcgacgcatcttgaatgtgacaaaggctcgcatagctgctggcttaccacgactcggaccgatg

SEQ ID NO: 12412 - DNA, 203 bp, synthetic construct
  source 1..203: mol_type = other DNA
ggcgcgccagtcctggcccgctgaatactgtaccttgatcttagggccaatcggtgctgccgaggtaactctctggtcctaggtggaggtgtaggggaggttgggccagggatgccttcactgtgtctctctggtcttgccaccccagaccgagggacacacaggcactgctgtctgcaacacaagcacgactcggaccgatg

SEQ ID NO: 12413 - DNA, 203 bp, synthetic construct
  source 1..203: mol_type = other DNA
ggcgcgccagtcctggtagattgaatactgtaccttgatcttagggcctggaaaaatcaggtaggtaactctctggtcctaggtggaggtgtaggggaggttgggccagggatgccttcactgtgtctctctggtcttgccaccccagaccgagggacacacaggcactgctgttccggcgtgcgtaccgactcggaccgatg

SEQ ID NO: 12414 - DNA, 203 bp, synthetic construct
  source 1..203: mol_type = other DNA
ggcgcgccagtccttccaaggcgaatactgtaccttgatcttagggcctggaaaaatcaggtaggtaactctctggtcctaggtggaggtgtaggggaggttgggccagggatgccttcactgtgtctctctggtcttgccaccccgccttatctctgggacaggcactgctgtctgcaacacaagcacgactcggaccgatg

SEQ ID NO: 12415 - DNA, 203 bp, synthetic construct
  source 1..203: mol_type = other DNA
ggcgcgccagtcctcgtggaaggaatggctgcttatggtgacaatcatagattgttatcataaagcgagttggattggccatccagtgtgaatcagattaattactcccttgtttgttggatccactcccgaaacgttttactcctatcgggcagctccctgtttgaagacaggatttcagtgtcacacgactcggaccgatg

SEQ ID NO: 12416 - DNA, 203 bp, synthetic construct
  source 1..203: mol_type = other DNA
ggcgcgccagtcctctcagctggaatggctgcttatggtgacaatcatagattgttatcataaagcgagttggattggccatccagtgtgaatcagattaattactcccttgtttgttggatccactcccgaaacgttttactccttaacttattgaaattgtttgaagacaggcgcggctgtgagatcgactcggaccgatg

SEQ ID NO: 12417 - DNA, 203 bp, synthetic construct
  source 1..203: mol_type = other DNA
ggcgcgccagtcctttcacatagaatggctgcttatggtgacaatcatagattgttatcataaagcgagttggattggccatccagtgtgccgggcgggccagcctcccttgtttgttggatccactcccgaaacgttttactccttaacttattgaaattgtttgaagacaggatttcagtgtcacacgactcggaccgatg

SEQ ID NO: 12418 - DNA, 203 bp, synthetic construct
  source 1..203: mol_type = other DNA
ggcgcgccagtcctattcgtaggaatggctgcttatggtgacaatcatagattgttatcataaagcgagttggattggccatccagtgtgcgattctgagcgccctcccttgtttgttggatccactcccgaaacgttttactccttaacttattgaaattgtttgaagacaggatttcagtgtcacacgactcggaccgatg

SEQ ID NO: 12419 - DNA, 203 bp, synthetic construct
  source 1..203: mol_type = other DNA
ggcgcgccagtcctgtagcaaagaatggctgcttatggtgacaatcatagattgttatcataaagcgagttggatttagggcttttctgaaatcagattaattactcccttgtttgttggatccactcccgaaacgttttactccttaacttattgaaattgtttgaagacaggatttcagtgtcacacgactcggaccgatg

SEQ ID NO: 12420 - DNA, 203 bp, synthetic construct
  source 1..203: mol_type = other DNA
ggcgcgccagtcctccgcaggtgaatttctgattgaggcgctaacagctaattccacaggagttgtaaggcagcctgtgcataaactgagacagaagtttctcctcagagactctctttttattattattattattattattggcacttggcagactgattcctcagaggaataccttgttgcttaagcgactcggaccgatg

SEQ ID NO: 12421 - DNA, 203 bp, synthetic construct
  source 1..203: mol_type = other DNA
ggcgcgccagtcctatttatgtgacaccaccagcatacacgaaaccaaccttcacagtggatacctcagcatccaaaactctccttcccgaatggatcaggatgccttcttttttgagagggatcctgaagccgaaggagaggcaccacgaaaacaagaaggttaactgttatgcatcggactccttgcgactcggaccgatg

SEQ ID NO: 12422 - DNA, 203 bp, synthetic construct
  source 1..203: mol_type = other DNA
ggcgcgccagtccttggttcaagacaccaccagcatacacgaaaccaaccttcacagtggatacctcagcatccaaaactctccttcccgaatggatcaggatgccttcttttttgagagggatcctgaagccgaaggagaggcaccacgaaaacaagaatcactctcagatgtatctttcagaagctcgactcggaccgatg

SEQ ID NO: 12423 - DNA, 203 bp, synthetic construct
  source 1..203: mol_type = other DNA
ggcgcgccagtcctcataacgcgacaccaccagcatacacgaaaccaaccttcacagtggatacctcagcatccaaaactctccttcccgaatggatcaggatgttgcggcgggatgaagggatcctgaagccgaaggagaggcaccacgaaaacaagaatcactctcagatgtcatcggactccttgcgactcggaccgatg

SEQ ID NO: 12424 - DNA, 203 bp, synthetic construct
  source 1..203: mol_type = other DNA
ggcgcgccagtcctaccttacggacaccaccagcatacacgaaaccaaccttcacagtggatacctcagcatccaaaactctccttcccggcacttaggtatgcccttcttttttgagagggatcctgaagccgaaggagaggcaccacgaaaacaagaatcactctcagatgtcatcggactccttgcgactcggaccgatg

SEQ ID NO: 12425 - DNA, 203 bp, synthetic construct
  source 1..203: mol_type = other DNA
ggcgcgccagtcctgcgaggaggacaccaccagcatacacgaaaccaaccttcacagtggatacctcagcatccaatcgaagagcgggtcaatggatcaggatgccttcttttttgagagggatcctgaagccgaaggagaggcaccacgaaaacaagaatcactctcagatgtcatcggactccttgcgactcggaccgatg

SEQ ID NO: 12426 - DNA, 203 bp, synthetic construct
  source 1..203: mol_type = other DNA
ggcgcgccagtcctgtcgcagcgacaccaccagcatacacgaaaccaaccttcacagtggatcaaatcctcatggcaactctccttcccgaatggatcaggatgccttcttttttgagagggatcctgaagccgaaggagaggcaccacgaaaacaagaatcactctcagatgtcatcggactccttgcgactcggaccgatg

SEQ ID NO: 12427 - DNA, 203 bp, synthetic construct
  source 1..203: mol_type = other DNA
ggcgcgccagtcctgcacaggagacaccaccagcatacacgaaaccaatgacatgttgtttcacctcagcatccaaaactctccttcccgaatggatcaggatgccttcttttttgagagggatcctgaagccgaaggagaggcaccacgaaaacaagaatcactctcagatgtcatcggactccttgcgactcggaccgatg

SEQ ID NO: 12428 - DNA, 203 bp, synthetic construct
  source 1..203: mol_type = other DNA
ggcgcgccagtcctctacgattgacaccaccagcggctgttcctgtccccttcacagtggatacctcagcatccaaaactctccttcccgaatggatcaggatgccttcttttttgagagggatcctgaagccgaaggagaggcaccacgaaaacaagaatcactctcagatgtcatcggactccttgcgactcggaccgatg

SEQ ID NO: 12429 - DNA, 203 bp, synthetic construct
  source 1..203: mol_type = other DNA
ggcgcgccagtcctgggtccgagacactgtcccatgggtgaagagttctgcagccttacagagactggaaaagaagcccaaaccaaggcccccagagaggtcccccaggcccctttgggtccctgagcctcagctggagatccggcgcaggagaccaacgcctgccatgctgttccggctctcagagccgactcggaccgatg

SEQ ID NO: 12430 - DNA, 203 bp, synthetic construct
  source 1..203: mol_type = other DNA
ggcgcgccagtcctgtccgtcggacataatggattccaacacgataacctcgtttcaggtagattgttatctatggcacataagaaagctactcagtatgagagacatgtgtgatgccaggagatcaactcagctccgaagagaccaaaaggcattaaagggaagaggcagcacacttggactcgattcgactcggaccgatg

SEQ ID NO: 12431 - DNA, 203 bp, synthetic construct
  source 1..203: mol_type = other DNA
ggcgcgccagtcctttactgtcgacataatggattccaacacgataacctcgtttcaggtagattgttatctatggcacataagaaagctactcagtatgagagacatgtgtgatgccccctttgatgacaggctccgaagagaccaaaaggcattaaagattcagttagctcaacttggactcgattcgactcggaccgatg

SEQ ID NO: 12432 - DNA, 203 bp, synthetic construct
  source 1..203: mol_type = other DNA
ggcgcgccagtcctggttgaccgacatggtgcgaagagtctattgagctagttggtagtcctccggcccctgaatgcggctaatcctaacatgcataggatatgcctcaagccagagggcagtgtgtcgtaacgggcaactctgcagcggaaccgactactttgggtgtccgtgtttcattttattcccgactcggaccgatg

SEQ ID NO: 12433 - DNA, 203 bp, synthetic construct
  source 1..203: mol_type = other DNA
ggcgcgccagtccttctagttggacatggtgcgaagagtctattgagctagttggtagtcctccggcccctgaatgcggctaatcctaactgcggagcacacaccctcaagccagagggcagtgtgtcgtaacgggcaactctgcaatcctgagcgtctgtttgggtgtccgtgtttcattttattcccgactcggaccgatg

SEQ ID NO: 12434 - DNA, 203 bp, synthetic construct
  source 1..203: mol_type = other DNA
ggcgcgccagtcctggaaagtggacatggtgcgaagagtctattgagctagttggtagtcctccggcccctgaatgcggctaatcctaactgcggagcacacaccctcaagccagagggcagtgtgtcgtaacgggcaactctgcagcggaaccgactactttgggtgtccgtgtttcattttattcccgactcggaccgatg

SEQ ID NO: 12435 - DNA, 203 bp, synthetic construct
  source 1..203: mol_type = other DNA
ggcgcgccagtcctcaatcattgacatggtgcgaagagtctattgagctagttggtagtcctggattgaagatcgtcggctaatcctaactgcggagcacacaccctcaagccagagggcagtgtgtcgtaacgggcaactctgcagcggaaccgactactttgggtgtccgtgtttcattttattcccgactcggaccgatg

SEQ ID NO: 12436 - DNA, 203 bp, synthetic construct
  source 1..203: mol_type = other DNA
ggcgcgccagtcctccacaccagacatggtgcgatcctctgtaacttgtagttggtagtcctccggcccctgaatgcggctaatcctaactgcggagcacacaccctcaagccagagggcagtgtgtcgtaacgggcaactctgcagcggaaccgactactttgggtgtccgtgtttcattttattcccgactcggaccgatg

SEQ ID NO: 12437 - DNA, 203 bp, synthetic construct
  source 1..203: mol_type = other DNA
ggcgcgccagtcctgggcgatagaccacgctggggtttgccatggtgacataaaggggtgtagaggaaggaaggagcaagaccagcctgtagactgtgcccctgaaaacttgggcaaaccaggggcccggagccttccctccactgccctcgaacgcctcacttcctaagtctctgcatttctcagtccgactcggaccgatg

SEQ ID NO: 12438 - DNA, 203 bp, synthetic construct
  source 1..203: mol_type = other DNA
ggcgcgccagtcctctttattggaccacgctggggtttgccatggtgacataaaggggtgtagaggaaggaaggagcaagaccagcctgtagactgtgcccctggctgggcaaaagggaacactattgtcgcccttccctccactgccctcgaacgcctcacttcctaagtctctgcatttctcagtccgactcggaccgatg

SEQ ID NO: 12439 - DNA, 203 bp, synthetic construct
  source 1..203: mol_type = other DNA
ggcgcgccagtcctgggaagctgaccacgctggggtttgccatggtgacataaaggggtgtagaggaaggaaggagcaagaccagcctgtagactgtgcccctggctgggcaaaagggccaggggcccggagaacaggtaatctccccctcgaacgcctcacttcctaagtctctgcatttctcagtccgactcggaccgatg

SEQ ID NO: 12440 - DNA, 203 bp, synthetic construct
  source 1..203: mol_type = other DNA
ggcgcgccagtcctgatcttatgaccacgctggggtttgccatggtgacataaaggggtgtagaggaaggaaggagcaagaccagcctgtagactgtgcccctggctgggcaaaagggccaggggcccggagccttccctccactgccctcgaacgcctcacttcctaagtctctgcatttctcagtccgactcggaccgatg

SEQ ID NO: 12441 - DNA, 203 bp, synthetic construct
  source 1..203: mol_type = other DNA
ggcgcgccagtcctgactaatagaccacgctggggtttgccatggtgacataaaggggtgtagaggaaggaaggagcaagaccagcctgtccgtgtaaagatctgctgggcaaaagggccaggggcccggagccttccctccactgccctcgaacgcctcacttcctaagtctctgcatttctcagtccgactcggaccgatg

SEQ ID NO: 12442 - DNA, 203 bp, synthetic construct
  source 1..203: mol_type = other DNA
ggcgcgccagtccttttcgtccgaccacgctggggtttgccatggtgacataaaggggtgtagaggaaggaaggagtcgatggcaaagacagactgtgcccctggctgggcaaaagggccaggggcccggagccttccctccactgccctcgaacgcctcacttcctaagtctctgcatttctcagtccgactcggaccgatg

SEQ ID NO: 12443 - DNA, 203 bp, synthetic construct
  source 1..203: mol_type = other DNA
ggcgcgccagtcctatcctaaggaccacgctggggtttgccatggtgatggtctcccagcctgaggaaggaaggagcaagaccagcctgtagactgtgcccctggctgggcaaaagggccaggggcccggagccttccctccactgccctcgaacgcctcacttcctaagtctctgcatttctcagtccgactcggaccgatg

SEQ ID NO: 12444 - DNA, 203 bp, synthetic construct
  source 1..203: mol_type = other DNA
ggcgcgccagtccttgtgtggggaccggtcactaccaaggacgcagacctctttttgagtatcacgcctccggaagtagttgggcaagcccacctatatgtgttccatgatgcacttctagccatccataccgtactgcctgatagggtccttgcgaggggatctgggagtctcgtagaccgtagcaccgactcggaccgatg

SEQ ID NO: 12445 - DNA, 203 bp, synthetic construct
  source 1..203: mol_type = other DNA
ggcgcgccagtcctagttggtagaccggtcactaccaaggacgcagacctctttttgagtatcacgcctccggaagtagttgggcaagcccacctatatgtgttgggatggttggggtcgcaaccagtaggtgtactgcctgatagggtccttgcgaggggatctgggagtctcgtagaccgtagcaccgactcggaccgatg

SEQ ID NO: 12446 - DNA, 203 bp, synthetic construct
  source 1..203: mol_type = other DNA
ggcgcgccagtcctagaggagagaccggtcactaccaaggacgcagacctctttttgagtatcacgcctccggaagtagttgggcaagcccacctatatgtgttgggatggttggggttagccatccatacccgtgccaggctcgcggtccttgcgaggggatctgggagtctcgtagaccgtagcaccgactcggaccgatg

SEQ ID NO: 12447 - DNA, 203 bp, synthetic construct
  source 1..203: mol_type = other DNA
ggcgcgccagtcctgtgtcgtcgaccggtcactaccaaggacgcagacctctttttgagtatcacgcctccggaagtagttgggcaagcccacctatatgtgttgggatggttggggttagccatccataccgtactgcctgatagatatgcctattattgatctgggagtctcgtagaccgtagcaccgactcggaccgatg

SEQ ID NO: 12448 - DNA, 203 bp, synthetic construct
  source 1..203: mol_type = other DNA
ggcgcgccagtcctgacctgaagaccggtcactaccaaggacgcagacctctttttgagtatggatatcatatttatagttgggcaagcccacctatatgtgttgggatggttggggttagccatccataccgtactgcctgatagggtccttgcgaggggatctgggagtctcgtagaccgtagcaccgactcggaccgatg

SEQ ID NO: 12449 - DNA, 203 bp, synthetic construct
  source 1..203: mol_type = other DNA
ggcgcgccagtcctagcacttggaccggtcactaccaaggacgcagactgggaggcctactgcacgcctccggaagtagttgggcaagcccacctatatgtgttgggatggttggggttagccatccataccgtactgcctgatagggtccttgcgaggggatctgggagtctcgtagaccgtagcaccgactcggaccgatg

SEQ ID NO: 12450 - DNA, 203 bp, synthetic construct
  source 1..203: mol_type = other DNA
ggcgcgccagtcctgcgcaagggaccggtcactatatgccggatgcggctctttttgagtatcacgcctccggaagtagttgggcaagcccacctatatgtgttgggatggttggggttagccatccataccgtactgcctgatagggtccttgcgaggggatctgggagtctcgtagaccgtagcaccgactcggaccgatg

SEQ ID NO: 12451 - DNA, 203 bp, synthetic construct
  source 1..203: mol_type = other DNA
ggcgcgccagtcctcaacgaaggaccggtcactatgtcatctatgtcactctttttgagtatcacgcctccggaagtagttgggcaagcccacctatatgtgttgggatggttggggttagccatccataccgtactgcctgatagggtccttgcgaggggatctgggagtctcgtagaccgtagcaccgactcggaccgatg

SEQ ID NO: 12452 - DNA, 203 bp, synthetic construct
  source 1..203: mol_type = other DNA
ggcgcgccagtccttaggatcagaccggtcggaacgagctgattgcccgctacatcaagctcaaatgcactggactccgcaccaggaagcaggtctccagccacatccaggtgctggctcgtcgcaaagctcgcgagatccaggccaagctaaaggaccaggcagctaaggacaaggccctgcagagccgactcggaccgatg

SEQ ID NO: 12453 - DNA, 203 bp, synthetic construct
  source 1..203: mol_type = other DNA
ggcgcgccagtcctattacggagaccggtcggaacgagctgattgcccgctacatcaagctccggacagggaagacccgcaccaggaagcaggtctccagccacatccaggtgctggcctccacgtgtcgatgcgagatccaggccaagctaaaggaccaggcagctaaggacaaggccctgcagagccgactcggaccgatg

SEQ ID NO: 12454 - DNA, 203 bp, synthetic construct
  source 1..203: mol_type = other DNA
ggcgcgccagtcctgtttgtctgaccggtcggaacgagctgattgcccgctacatcaagctccggacagggaagacccgcaccaggaagcgcaagatacaaacgatccaggtgctggctcgtcgcaaagctcgcgagatccaggccaagctaaaggaccaggcagctaaggacaaggccctgcagagccgactcggaccgatg

SEQ ID NO: 12455 - DNA, 203 bp, synthetic construct
  source 1..203: mol_type = other DNA
ggcgcgccagtcctcctcaaacgacctgagtaaatttaattgcaaacagtggcttgagcgatttgtgcaattaaaggatagtgatattaatgaaatggtgcttagtcttgttaggagtggtaagttgcttgtaaggggtaatggcaagtgtttgagttttagtaatcatttagtctcaactaaataaacgactcggaccgatg

SEQ ID NO: 12456 - DNA, 203 bp, synthetic construct
  source 1..203: mol_type = other DNA
ggcgcgccagtcctttatttatgacgcgaggctctgcggagaccaggagtcagactgtaggaaagttaaaaccatgacgtgtccccggtactcgccggccggagcccccggcttcccggggccgggggaccttagcggcacccacacacagcctactttccaagcggagccatgtctggtaacggcaacgactcggaccgatg

SEQ ID NO: 12457 - DNA, 203 bp, synthetic construct
  source 1..203: mol_type = other DNA
ggcgcgccagtcctgtagaactgacgcgaggctctgcggagaccaggagtcagactgtaggacgacctcgggtcccacgtgtccccggtactcgccggccggagaggaacctgggagagggccgggggaccttagcggcacccacacacagcctactttccaagcggagccatgtctggtaacggcaacgactcggaccgatg

SEQ ID NO: 12458 - DNA, 203 bp, synthetic construct
  source 1..203: mol_type = other DNA
ggcgcgccagtcctctaatgatgacgcgaggctctgcggagaccaggagtcagactgtaggacgacctcgggtcccacgtgtccccggtactcgccggccggagcccccggcttcccgactatcatctggtatagcggcacccacacacagcctactttccaagcggagccatgtctggtaacggcaacgactcggaccgatg

SEQ ID NO: 12459 - DNA, 203 bp, synthetic construct
  source 1..203: mol_type = other DNA
ggcgcgccagtcctacgcgcctgacgggacccgacggtgactgcgcaagcaaggaatagtgtctggagccggtccagctgaaggaagggtgagcagagagtgcaagcaggacccttgtcggtgggtgaacattttgctccaaaagggatccttggccctgcgcaggtggatttcagtgtgttctttggcgactcggaccgatg

SEQ ID NO: 12460 - DNA, 203 bp, synthetic construct
  source 1..203: mol_type = other DNA
ggcgcgccagtcctgaacctgggacgttagcgacaataaaattctgtacataaaagtcgaaagtattgctatagttaaggttgcgcttgcctatttaggcatacttctcaggatggcgcgttgcagtccaacaagatccagggactgtacagaattttcctatacctcgagtcgggtttggaatctaacgactcggaccgatg

SEQ ID NO: 12461 - DNA, 203 bp, synthetic construct
  source 1..203: mol_type = other DNA
ggcgcgccagtccttgaaaccagactccggctcggcgcactgcacagctctcttctctcgccgccgcccgagcgcacccttcagcccgcgcgccggccgtgagtcctcggtgctcgcccgccggccagacaaacagcccgcccgaccccgtcccgaccctggccgccccgagcggagcctggagcaaacgactcggaccgatg

SEQ ID NO: 12462 - DNA, 203 bp, synthetic construct
  source 1..203: mol_type = other DNA
ggcgcgccagtcctgcagcctggactcctatcgcggacccccaccgctgcccttcccggggaggcgggaaatgcatggggccacccagctccgcggcggcctacagccggggtagcccaagaaccttcgggtgagggcgggtggcattttcttttcctataccgatcatggcagtccttctgctcctacgactcggaccgatg

SEQ ID NO: 12463 - DNA, 203 bp, synthetic construct
  source 1..203: mol_type = other DNA
ggcgcgccagtccttgttatgggactgattcatcactgttttcttactcttagtctgagtgactgccaaggaaggcaaaggtagagcaactggatctctggctctccacatagcttctgatctcagaccttactaaaatgctttctgggcccaaggacaaagctcacatgaacaaatgattttgagtccgactcggaccgatg

SEQ ID NO: 12464 - DNA, 203 bp, synthetic construct
  source 1..203: mol_type = other DNA
ggcgcgccagtcctgcccgtgagacttattaggcggcgggaggcggggtccgagtcaccgcctgccgccgcgcccccggtttctataaattgagcccgcagcctcccgcttcgctctctgctcctcctgttcgacagtcagccgcatcttcttttgcgtcgccagccgagccacatcgctcagacacccgactcggaccgatg

SEQ ID NO: 12465 - DNA, 203 bp, synthetic construct
  source 1..203: mol_type = other DNA
ggcgcgccagtccttcctggctgacttgtcagcaccgtcaggtgacactatcctaaaggcagaagccttcaggtctgacccagccaatcaaagcattataccagaccatggaatgcataccaaacattattgacactaatgacacacaaaattggttttaagaaaaaccaagagaacaataggccagacgactcggaccgatg

SEQ ID NO: 12466 - DNA, 203 bp, synthetic construct
  source 1..203: mol_type = other DNA
ggcgcgccagtccttgccgaccgactttgaaatccaacccggtcacctacccgcgcgactgtcaaacgttggacgccgaaagccaagcgagtccccctgccgagctactcgcgtccgcctcctcccaagctgagctctgctccgcccacctgagtccttcgccagttaggaggaaacacagccgcttacgactcggaccgatg

SEQ ID NO: 12467 - DNA, 203 bp, synthetic construct
  source 1..203: mol_type = other DNA
ggcgcgccagtccttttagacggactttgaaatccaacccggtcacctacccgcgcgactgtgtccacggatggcacgaaagccaagcgagtccccctgccgagctactcgcgtccgcctcctcccaagctgagctctgctccgcccacctgagtccttcgccagttaggaggaaacacagccgcttacgactcggaccgatg

SEQ ID NO: 12468 - DNA, 203 bp, synthetic construct
  source 1..203: mol_type = other DNA
ggcgcgccagtcctaaacatacgactttgaaatccaacccggtcacctacccgcgcgactgtgtccacggatggcacgaaagccaagcgagtccccctgccgagctactcgcgtccgcctcctcccaagctgagctctgctccgcccacctgagtccttcgccagttaggaggatcgtagaaataacgcgactcggaccgatg

SEQ ID NO: 12469 - DNA, 203 bp, synthetic construct
  source 1..203: mol_type = other DNA
ggcgcgccagtccttttatcatgactttgaaatccaacccggtcacctacccgcgcgactgtgtccacggatggcacgaaagccaagcgagtccccctgccgagctactcgcgtccgcctcctcccaagctggagaagtagatttgcacctgagtccttcgccagttaggaggaaacacagccgcttacgactcggaccgatg

SEQ ID NO: 12470 - DNA, 203 bp, synthetic construct
  source 1..203: mol_type = other DNA
ggcgcgccagtcctgacaaaccgactttgaaatccaacccggtcacctacccgcgcgactgtgtccacggatggcacgaaagccaagcgagtccccctgccgagctactcgcgtccgctgaggtggccatccagctctgctccgcccacctgagtccttcgccagttaggaggaaacacagccgcttacgactcggaccgatg

SEQ ID NO: 12471 - DNA, 203 bp, synthetic construct
  source 1..203: mol_type = other DNA
ggcgcgccagtcctgcaaggttgacttttacatgcgccccagcccatgggccaggctgctcctggcagccttgatcagcgtcagcctctctgggaccttggcaaaccgctgcaagaaggccccagtgaagagctgcacggagtgtgtccgtgtggataaggactgcgcctactgcacagacgagatgtcgactcggaccgatg

SEQ ID NO: 12472 - DNA, 203 bp, synthetic construct
  source 1..203: mol_type = other DNA
ggcgcgccagtccttctaacgagagaaactccgtaggagtcatagcttaagcagatgaattagaaagaatcaggttacggcccggcggaaagaaaaagtacaggctaaaacatattgtgtgggcagcgaataaattggacagattcggattagcagagagcctgttggagtcaaaagagggttgtcaacgactcggaccgatg

SEQ ID NO: 12473 - DNA, 203 bp, synthetic construct
  source 1..203: mol_type = other DNA
ggcgcgccagtcctgtttccaagagaaactccgtcttgagagggaaaaaagcagatgaattagaaagaatcaggttacggcccggcggaaagaaaaagtacagggccgcgttcgagtggtgggcagcgaataaattggacagattcggattagcagagagcctgttggagtcaaaagagggttgtcaacgactcggaccgatg

SEQ ID NO: 12474 - DNA, 203 bp, synthetic construct
  source 1..203: mol_type = other DNA
ggcgcgccagtccttactaccagagaaactccgtcttgagagggaaaactttcatcacgcacgaaagaatcaggttacggcccggcggaaagaaaaagtacaggctaaaacatattgtgtgggcagcgaataaattggacagattcggattagcagagagcctgttggagtcaaaagagggttgtcaacgactcggaccgatg

SEQ ID NO: 12475 - DNA, 203 bp, synthetic construct
  source 1..203: mol_type = other DNA
ggcgcgccagtcctccatgtttgagaatcagatgcgcataagtagatgcgaattgcaaaaagattacgtaggtccggaaccactagattcggtgccggtaacgattccagttttatactatctgatcattctctatctctattaaggatatttctagtctaaagttcaaaatgtcaagtgttttaaagcgactcggaccgatg

SEQ ID NO: 12476 - DNA, 203 bp, synthetic construct
  source 1..203: mol_type = other DNA
ggcgcgccagtcctaagtctgagagaatcagatggcatcgttatatgacgaattgcaaaaagattacgtaggtccgagctattctcgcatggtgccggtaacgattccagttttatactatctgatcattctctatctctattaaggatatttctagtctaaagttcaaaatgtcaagtgttttaaagcgactcggaccgatg

SEQ ID NO: 12477 - DNA, 203 bp, synthetic construct
  source 1..203: mol_type = other DNA
ggcgcgccagtcctgaccactcgagaatcagatggcatcgttatatgatctgccttgccgctattacgtaggtccggaaccactagattcggtgccggtaacgattccagttttatactatctgatcattctctatctctattaaggatatttctagtctaaagttcaaaatgtcaagtgttttaaagcgactcggaccgatg

SEQ ID NO: 12478 - DNA, 203 bp, synthetic construct
  source 1..203: mol_type = other DNA
ggcgcgccagtcctgtcattctgagacccctttgtcatatcaatacaatatcaagtagtgtcgatgatctcattaggtactaatcctaacattgtgattcatcctgcattgagaaaagatttagaaaaaaactaaattaagaatgaatatcctggggtcgtaacgtctcgtgaccctgccgttgcactcgactcggaccgatg

SEQ ID NO: 12479 - DNA, 203 bp, synthetic construct
  source 1..203: mol_type = other DNA
ggcgcgccagtcctctctgatcgagacctggaatttccggtctggttggtctggggccccgcggagccaggttgataccctcacctcccaaccccaggccctcggatgcccagaacctcgttcgtaagttccggacttgttcttaatcgagggggtgctggggggaccctgatgtggcaccaaatgaacgactcggaccgatg

SEQ ID NO: 12480 - DNA, 203 bp, synthetic construct
  source 1..203: mol_type = other DNA
ggcgcgccagtccttcttcacggagacctggaatttccggtctggttggtctggggccccgcggagccaggttgataccctcacctcccaaccccaggccctcggatgcccagaacctgtaggccgcaccgtggacttgttcttaactagacctcacgacgggggaccctgatgtggcaccaaatgaacgactcggaccgatg

SEQ ID NO: 12481 - DNA, 203 bp, synthetic construct
  source 1..203: mol_type = other DNA
ggcgcgccagtccttgcaggacgagacctggaatttccggtctggttggtctggggccccgcggagccaggttgataccctcacctcccaaccccaggccctcggatgcccagaacctgtaggccgcaccgtggacttgttcttaatcgagggggtgctgcactacgtagcgcatggcaccaaatgaacgactcggaccgatg

SEQ ID NO: 12482 - DNA, 203 bp, synthetic construct
  source 1..203: mol_type = other DNA
ggcgcgccagtcctatccttccgagacctggaatttccggtctggttggtctggggccccgcggagccaggttgataccctcacctcccaaccccaggccctcggatgcccagaacctgtaggccgcaccgtggacttgttcttaatcgagggggtgctggggggaccctgatgtggcaccaaatgaacgactcggaccgatg

SEQ ID NO: 12483 - DNA, 203 bp, synthetic construct
  source 1..203: mol_type = other DNA
ggcgcgccagtcctggatgggagagacctggaatttccggtctggttggtctggggccccgcggagccaggttgataccctcacctcccattgttttaaatctagatgcccagaacctgtaggccgcaccgtggacttgttcttaatcgagggggtgctggggggaccctgatgtggcaccaaatgaacgactcggaccgatg

SEQ ID NO: 12484 - DNA, 203 bp, synthetic construct
  source 1..203: mol_type = other DNA
ggcgcgccagtcctaccaactggagagccaggagactctgatgatgaattctgaccagaaggcagtgaaattcctggcaaatttttacatcaatggaggcaaacactggacccatggtcacctgaggcagacacaaccagagcccacccagcccaaggcaaggcccagtcgtcggggcccggagccggcgactcggaccgatg

SEQ ID NO: 12485 - DNA, 203 bp, synthetic construct
  source 1..203: mol_type = other DNA
ggcgcgccagtcctacgctttcgagagccaggagactctgatgatgaattctgaccagaaggcagtgaaattcctggcaaatttttacatcaatggaggcaaacactggacccatggtcacctgaggcagacacaaccagagcccacccagcccaaggcatctgtgctgttgttgggcccggagccggcgactcggaccgatg

SEQ ID NO: 12486 - DNA, 203 bp, synthetic construct
  source 1..203: mol_type = other DNA
ggcgcgccagtcctacaagcgcgagatacactacaggcagtgagcgagcaggcggcaggcagggtccgtgcggagcaggcgagcgagcgggaagacgcagccaccttcctcaccagccagcccacagcggtttgttccccttctcgggagtgcgccaatgcctgggccgacccaaaccctgtccccaacgactcggaccgatg

SEQ ID NO: 12487 - DNA, 203 bp, synthetic construct
  source 1..203: mol_type = other DNA
ggcgcgccagtcctttaccacagagcagattcccacaactcccttggtacaataaaaaagacgagtatttacttttcattgaaagaatggagcttgcttgatatttcactagataaagaatttaaggcgagtatctatctttgttctccttggcaactgagagtctgcccttggaaacatcaggcacccgactcggaccgatg

SEQ ID NO: 12488 - DNA, 203 bp, synthetic construct
  source 1..203: mol_type = other DNA
ggcgcgccagtccttagccgccgagcccgttacccacctgggcaaacgacgcccacgtacggtccacgtcgcccttcaatgtctctcttgaccaataggcgtagccggcgagttgacaaggaccagtgggggaactcttaaaatgaagggactccaagtcccgcccttcccggtgggccgggaaatgccgactcggaccgatg

SEQ ID NO: 12489 - DNA, 203 bp, synthetic construct
  source 1..203: mol_type = other DNA
ggcgcgccagtcctcctggacagagcccgttacccacctgggcaaacgacgcccacgtacggtccacgtcgcccttcaatgtctctcttgaccaataggcgtagccggcgagttgacaaggaccagtgggggccgggggcttggagagggactccaagtctttatgggatgacggggccgggaaatgccgactcggaccgatg

SEQ ID NO: 12490 - DNA, 203 bp, synthetic construct
  source 1..203: mol_type = other DNA
ggcgcgccagtcctaactgattgagcccgttacccacctgggcaaacgacgcccacgtacggtccacgtcgcccttcaatgtctctcttgaccaataggcgtagccggcgagttgacaccctgaccgaaaccccgggggcttggagagggactccaagtcccgcccttcccggtgggccgggaaatgccgactcggaccgatg

SEQ ID NO: 12491 - DNA, 203 bp, synthetic construct
  source 1..203: mol_type = other DNA
ggcgcgccagtcctcaggtacagagcccgttacccacctgggcaaacgctttaggttatgcatccacgtcgcccttcaatgtctctcttgaccaataggcgtagccggcgagttgacaaggaccagtgggggccgggggcttggagagggactccaagtcccgcccttcccggtgggccgggaaatgccgactcggaccgatg

SEQ ID NO: 12492 - DNA, 203 bp, synthetic construct
  source 1..203: mol_type = other DNA
ggcgcgccagtcctccattagcgagcccgttaccgtagctcttgtctcacgcccacgtacggtccacgtcgcccttcaatgtctctcttgaccaataggcgtagccggcgagttgacaaggaccagtgggggccgggggcttggagagggactccaagtcccgcccttcccggtgggccgggaaatgccgactcggaccgatg

SEQ ID NO: 12493 - DNA, 203 bp, synthetic construct
  source 1..203: mol_type = other DNA
ggcgcgccagtcctggcacacggagccctgcacccctaattcccggtggaaaactcctgttgatccgcatggtgtacggcctggagtctcccagtcttgtcccggcagtgccgccctccccactaagacctaggcgcaaaggcttggctcatggttgacagctcagagagagaaagatctgagggaagcgactcggaccgatg

SEQ ID NO: 12494 - DNA, 203 bp, synthetic construct
  source 1..203: mol_type = other DNA
ggcgcgccagtcctaacgcggcgagccctgcacccctaattcccggtggaaaactcctgttgccgtttccctccaccggcctggagtctcagcacaagacaagtgcagtgccgccctccccactaagacctaggcgcaaaggcttggctcatggttgacagctcagagagagaaagatctgagggaagcgactcggaccgatg

SEQ ID NO: 12495 - DNA, 203 bp, synthetic construct
  source 1..203: mol_type = other DNA
ggcgcgccagtcctgatccagagagccctgcacccctaattcccggtggaaaactcctgttgccgtttccctccaccggcctggagtctcccagtcttgtcccggcagtgccgccctccccactaagacctaggcgcaaaggcttggctcatggttgacagctcagagagagaacctgggtcattgttcgactcggaccgatg

SEQ ID NO: 12496 - DNA, 203 bp, synthetic construct
  source 1..203: mol_type = other DNA
ggcgcgccagtccttacataacgagcctccagagggctgtcggcgcagtagcagcgagcagcagagtccgcacgctccggcgaggggcagaagagcgcgagggagcgcggggcagcagaagcgagagccgagcgcggacccagccaggacccacagccctccccagctgcccagatcctcttgattggcgactcggaccgatg

SEQ ID NO: 12497 - DNA, 203 bp, synthetic construct
  source 1..203: mol_type = other DNA
ggcgcgccagtccttcagtgccgagcctccagagggctgtcggcgcagtagcagcgagcagcagagtccgcacgctccggcgaggggcagaagagcgcgagggagcgcggggcagcagaagcgagagccgagcgcggacccagccaggacccacagccctccccagctgcccaggaagagccccagcccgactcggaccgatg

SEQ ID NO: 12498 - DNA, 203 bp, synthetic construct
  source 1..203: mol_type = other DNA
ggcgcgccagtcctcccaggccgagcctccagagggctgtcggcgcagtagcagcgagcagcagagtccgcacgctccggcgaggggcagaagagcgcgagggagcgcggggcagcaggctgtgatattccacgcggacccagccaggacccacagccctccccagctgcccaggaagagccccagcccgactcggaccgatg

SEQ ID NO: 12499 - DNA, 203 bp, synthetic construct
  source 1..203: mol_type = other DNA
ggcgcgccagtccttgggcaacgagcctccagagggctgtcggcgcagtagcagcgagcagcagagtccgcacgctccggcgaggggcaggttgttctctttcggcgcggggcagcagaagcgagagccgagcgcggacccagccaggacccacagccctccccagctgcccaggaagagccccagcccgactcggaccgatg

SEQ ID NO: 12500 - DNA, 203 bp, synthetic construct
  source 1..203: mol_type = other DNA
ggcgcgccagtccttggtgtccgagcctccagagggctgtcggcgcagtagcagcgagcagcttccagtcgtgtagccggcgaggggcagaagagcgcgagggagcgcggggcagcagaagcgagagccgagcgcggacccagccaggacccacagccctccccagctgcccaggaagagccccagcccgactcggaccgatg

SEQ ID NO: 12501 - DNA, 203 bp, synthetic construct
  source 1..203: mol_type = other DNA
ggcgcgccagtcctgcgctggggagcctggcgtggtagggctgtgctgcgcggtccttcccattcaccctagtctggcgctcgccggcgtgggcgggccggaccttcgccgcttccagagctacatcgttaagccgtcggaccacggcgcggcggccagttcctttatagttttgttcagaaaaacatcgactcggaccgatg

SEQ ID NO: 12502 - DNA, 203 bp, synthetic construct
  source 1..203: mol_type = other DNA
ggcgcgccagtcctcatatcttgagcctggcgtggtagggctgtgctgcgcggtccttcccattcaccctagtctggcgctcgccggcgtgggcgggccggaccttcgccgcttccaggaagggccacaacgcaacgacacaacgcgcgcggcggccagttcctttatagttttgttcagaaaaacatcgactcggaccgatg

SEQ ID NO: 12503 - DNA, 203 bp, synthetic construct
  source 1..203: mol_type = other DNA
ggcgcgccagtcctatgttccagagcctggcgtggtagggctgtgctgcgcggtccttcccattcaccctagtctggcgctcgccggcgtgggcgggccggaccttcgccgcttccaggaagggccacaacggccgtcggaccacggcgcggcggccagttcctttatagttttacaattggccgacgcgactcggaccgatg

SEQ ID NO: 12504 - DNA, 203 bp, synthetic construct
  source 1..203: mol_type = other DNA
ggcgcgccagtcctatggtagtgagcggttagagccaacaccactccctgcgagtggccggagaccagggcccaacataaacaagctttggagacaaacaaccttatgacctgtcagccctgacaaaggtcagctagccccttgaggacatcagctttggcctcagggtcctaatggcagcagaaccacgactcggaccgatg

SEQ ID NO: 12505 - DNA, 203 bp, synthetic construct
  source 1..203: mol_type = other DNA
ggcgcgccagtcctcccaccgagagcggttagagtgtgtgtgggcggatgcgagtggccggagaccagggcccaacataaacaagctttgctcctcgcagtgagtatgacctgtcagccctgacaaaggtcagctagccccttgaggacatcagctttggcctcagggtcctaatggcagcagaaccacgactcggaccgatg

SEQ ID NO: 12506 - DNA, 203 bp, synthetic construct
  source 1..203: mol_type = other DNA
ggcgcgccagtcctctcttctagagcggttagagtgtgtgtgggcggatgcgagtggccggagaccagggcccaacataaacaagctttggagacaaacaacctccgttttcagttttcctgacaaaggtcagctagccccttgaggacatcagctttggcctcagggtcctaatggcagcagaaccacgactcggaccgatg

SEQ ID NO: 12507 - DNA, 203 bp, synthetic construct
  source 1..203: mol_type = other DNA
ggcgcgccagtcctaatattctgagcggttagagtgtgtgtgggcggatgcgagtggccggagaccagggcccaacgagggtggttggacgagacaaacaaccttatgacctgtcagccctgacaaaggtcagctagccccttgaggacatcagctttggcctcagggtcctaatggcagcagaaccacgactcggaccgatg

SEQ ID NO: 12508 - DNA, 203 bp, synthetic construct
  source 1..203: mol_type = other DNA
ggcgcgccagtcctgagcattggagcggttagagtgtgtgtgggcggatgcgagtggccggattaacttcaaagctataaacaagctttggagacaaacaaccttatgacctgtcagccctgacaaaggtcagctagccccttgaggacatcagctttggcctcagggtcctaatggcagcagaaccacgactcggaccgatg

SEQ ID NO: 12509 - DNA, 203 bp, synthetic construct
  source 1..203: mol_type = other DNA
ggcgcgccagtcctggcacggagaggactcgggacagggaattggccctgggagaaaacgcgatccaacgccgatggacgccccgtgaaagccgtgccgacccttgggaggactgacaggtctagagacacgcgctgtctgttgtggtgggcctcccgggaataagtgaggggctctgtgtttcgaggcgactcggaccgatg

SEQ ID NO: 12510 - DNA, 203 bp, synthetic construct
  source 1..203: mol_type = other DNA
ggcgcgccagtcctacgtcgctgaggactcgggacagggaattggccctgggagaaaacgcgcggggggcgtccgagacgccccgtgaaagccgtgccgaccctataccacctaacttggtctagagacacgcgctgtctgttgtggtgggcctcccgggaataagtgaggggctctgtgtttcgaggcgactcggaccgatg

SEQ ID NO: 12511 - DNA, 203 bp, synthetic construct
  source 1..203: mol_type = other DNA
ggcgcgccagtccttgtaagaggaggactcgggacagggaattggccctgggagaaaacgcgcggggggcgtccgagacgccccgtgaaagccgtgccgacccttgggaggactgacaggtctagagacacgcgctgtctgttgtgcccccttatgatccaataagtgaggggctctgtgtttcgaggcgactcggaccgatg

SEQ ID NO: 12512 - DNA, 203 bp, synthetic construct
  source 1..203: mol_type = other DNA
ggcgcgccagtcctcctagtgagaggactcgggacagggaattggccctgggagaaaacgcgcggggggcgtccgagacgccccgtgaaagccgtgccgacccttgggaggactgacaggtctagagacacgtagccatcagcaatgtgggcctcccgggaataagtgaggggctctgtgtttcgaggcgactcggaccgatg

SEQ ID NO: 12513 - DNA, 203 bp, synthetic construct
  source 1..203: mol_type = other DNA
ggcgcgccagtccttaataggcgaggactcgggatgctccccgtctaatgggagaaaacgcgcggggggcgtccgagacgccccgtgaaagccgtgccgacccttgggaggactgacaggtctagagacacgcgctgtctgttgtggtgggcctcccgggaataagtgaggggctctgtgtttcgaggcgactcggaccgatg

SEQ ID NO: 12514 - DNA, 203 bp, synthetic construct
  source 1..203: mol_type = other DNA
ggcgcgccagtcctacaatggggaggagagactaccgtcctggagataacggttccacggaggcccaaggcgaaacggaaggatcctcatgtacaaaactgagcggaatggagctgtgagcacgcatcaggtatgtacatcataaaggcacgtagtagaggtcctcagccagcagagccacgttccttcgactcggaccgatg

SEQ ID NO: 12515 - DNA, 203 bp, synthetic construct
  source 1..203: mol_type = other DNA
ggcgcgccagtcctgctgaagtgaggagagactaccgtcctggagataacggttccacggaggcccaaggcgaaacggaaggatcctcatgtacaaaactgagcggaatggagctgtgagcacgcatcaggtgctgtttcaggcctggcacgtagtagagacgtatgatttcatgagccacgttccttcgactcggaccgatg

SEQ ID NO: 12516 - DNA, 203 bp, synthetic construct
  source 1..203: mol_type = other DNA
ggcgcgccagtccttatgacacgaggagagactaccgtcctggagataacggttccacggaggcccaaggcgaaacggaaggatcctcattggtgccgggagctggaatggagctgtgagcacgcatcaggtgctgtttcaggcctggcacgtagtagaggtcctcagccagcagagccacgttccttcgactcggaccgatg

SEQ ID NO: 12517 - DNA, 203 bp, synthetic construct
  source 1..203: mol_type = other DNA
ggcgcgccagtcctcgctgtaggaggagagactagttatgaattcgatacggttccacggaggcccaaggcgaaacggaaggatcctcatgtacaaaactgagcggaatggagctgtgagcacgcatcaggtgctgtttcaggcctggcacgtagtagaggtcctcagccagcagagccacgttccttcgactcggaccgatg

SEQ ID NO: 12518 - DNA, 203 bp, synthetic construct
  source 1..203: mol_type = other DNA
ggcgcgccagtcctcctataatgaggagggaagaggactccaagcgccatggccgctgccgcccgagcccgggtcgcgtacttgctgaggcaactgcaacgcgcagcgtgccagtgcccaactcattctcatactggaaggaaagcccctggactttcaccccaccaacgtccaacagattatgccttcgactcggaccgatg

SEQ ID NO: 12519 - DNA, 203 bp, synthetic construct
  source 1..203: mol_type = other DNA
ggcgcgccagtcctagctacaagaggagggaagaggactccaagcgccatggccgctgccgcccgagcccgggtcgcgtacttgctgaggcaactgcaacgcgcagcgtgccagtgcccaactcattctcatacttactcccaagcccctggactttcaccccaccaacgtccaacagattatgccttcgactcggaccgatg

SEQ ID NO: 12520 - DNA, 203 bp, synthetic construct
  source 1..203: mol_type = other DNA
ggcgcgccagtcctaggtccatgaggagggaagaggactccaagcgccatggccgctgccgcccgagcccgggtcgcgtacttgctgaggcaactgcaacgcgcagcgtgccagtgcccaactcattctcatacttactcccaagcccctggactttcaccttctgggaaaacaacagattatgccttcgactcggaccgatg

SEQ ID NO: 12521 - DNA, 203 bp, synthetic construct
  source 1..203: mol_type = other DNA
ggcgcgccagtccttgggaggtgaggagggaagaggactccaagcgccatggccgctgccgcccgagcccgggtcgcgtacttgctgaggcaactgcaacgcgcagcgtgccagtgcccaactcattctcatcaggtgaagttcaaccctggactttcaccttctgggaaaacaacagattatgccttcgactcggaccgatg

SEQ ID NO: 12522 - DNA, 203 bp, synthetic construct
  source 1..203: mol_type = other DNA
ggcgcgccagtcctacaatacagaggagggaagaggactccaagcgccatggccgctgccgcccgagcccgggtcgcgtacttgctgaggtcttgatcttatagagcgtgccagtgcccaactcattctcatacttactcccaagcccctggactttcaccttctgggaaaacaacagattatgccttcgactcggaccgatg

SEQ ID NO: 12523 - DNA, 203 bp, synthetic construct
  source 1..203: mol_type = other DNA
ggcgcgccagtcctagactcacgaggagggaagaggactccaagcgcctcattaagactgttccgagcccgggtcgcgtacttgctgaggcaactgcaacgcgcagcgtgccagtgcccaactcattctcatacttactcccaagcccctggactttcaccttctgggaaaacaacagattatgccttcgactcggaccgatg

SEQ ID NO: 12524 - DNA, 203 bp, synthetic construct
  source 1..203: mol_type = other DNA
ggcgcgccagtcctgtaagcgtgaggccgcggggacccggcggacttcggcgcgggctgggagagaccacccgcagtcccttcctccaggaacgattatcttttcgcggagactcgtccggcgctctccagccgccctggagcaactttgcttcgaagttccctgggcccgggcagggcccggcagcccgactcggaccgatg

SEQ ID NO: 12525 - DNA, 203 bp, synthetic construct
  source 1..203: mol_type = other DNA
ggcgcgccagtccttaccgcaggaggccgcggggacccggcggacttcggcgcgggctgggattttattgtgctcctcccttcctccagggctcgccccaggcccgcggagactcgtccggcgctctccagccgccctggagcaactttgcttcgaagttccctgggcccgggcagggcccggcagcccgactcggaccgatg

SEQ ID NO: 12526 - DNA, 203 bp, synthetic construct
  source 1..203: mol_type = other DNA
ggcgcgccagtccttaagtctagaggcgaagcttcagcatctcagacttcctgctcctgggcctgcccatccaaccagagcagcaaaacctgtgctatgccctgttcttggccatgtatcttaccaccctcctggggaacctcctcatcattgtcctcattcgactggactcccatctccacacgcctcgactcggaccgatg

SEQ ID NO: 12527 - DNA, 203 bp, synthetic construct
  source 1..203: mol_type = other DNA
ggcgcgccagtccttaaagtaagaggcgggacgcggggtgataacagcactacaaatacatagggcgggagctggggaggaggagcaggagaggcccacaggcttcatttggagtcaggcctggctgttgctcaggtgaccagcttgtgtctctgggagggcgctgctttccccggccacccggcgcgcgactcggaccgatg

SEQ ID NO: 12528 - DNA, 203 bp, synthetic construct
  source 1..203: mol_type = other DNA
ggcgcgccagtcctacttgggtgaggcgggacgcggggtgataacagctggctctggtgggcgggcgggagctggggaggaggagcaggacgctatattcctactcatttggagtcaggcctggctgttgctcaggtgaccagcttgtgtctctgggagggcgctgctttccccggccacccggcgcgcgactcggaccgatg

SEQ ID NO: 12529 - DNA, 203 bp, synthetic construct
  source 1..203: mol_type = other DNA
ggcgcgccagtcctggttagtcgaggcgggacgcggggtgataacagctggctctggtgggcgggcgggagctggggaggaggagcaggagaggcccacaggcttcatttggagtcaggcctggctgttgctcaggtgaccagcttgtgtctctgggagggcgctgctttccccggccacccggcgcgcgactcggaccgatg

SEQ ID NO: 12530 - DNA, 203 bp, synthetic construct
  source 1..203: mol_type = other DNA
ggcgcgccagtcctacttatacgaggctcacaccaaggcaggcggggtaccttccctagtccctgcactaggttggacagcccccattggctacaggaaagcgggaggggtgtgagtcccctactccctctttgcagtggccccagcccccttaccgtctgcctgggatctgagtacatattgcagtgcgactcggaccgatg

SEQ ID NO: 12531 - DNA, 203 bp, synthetic construct
  source 1..203: mol_type = other DNA
ggcgcgccagtccttaggtggagaggctcacacctttcatccttccccaccttcccggtgagttgcactaggttggacagcccccattggctacaggaaagcgggaggggtgtgagtccccatggttttctttgcagtggccccagcccccttaccgtctgcctgggatctgagtacatattgcagtgcgactcggaccgatg

SEQ ID NO: 12532 - DNA, 203 bp, synthetic construct
  source 1..203: mol_type = other DNA
ggcgcgccagtcctcaaagtcggaggctcacacctttcatccttccccaccttcccggtgagttgcactaggttggacagcccccattggctacaggaaagcgggaggggtgtgagtcccctactccctctttgcagtggccccagcccccttaccgtctgcctgggatctgagtacatattgcagtgcgactcggaccgatg

SEQ ID NO: 12533 - DNA, 203 bp, synthetic construct
  source 1..203: mol_type = other DNA
ggcgcgccagtcctcgcgtggagaggctcacacctttcatccttccccaccttccctagtccctgcactaggttggacagcccccattggctacaggaaagcggatccacgcgagagaccctactccctctttgcagtggccccagcccccttaccgtctgcctgggatctgagtacatattgcagtgcgactcggaccgatg

SEQ ID NO: 12534 - DNA, 203 bp, synthetic construct
  source 1..203: mol_type = other DNA
ggcgcgccagtcctgatgccaggaggctcacacctttcatccttccccaccttccctagtccctgcactaggttggacagcccccattggctacaggaaagcgggaggggtgtgagtcatacctgtagggcctgcagtggccccagcccccttaccgtctgcctgggatctgagtacatattgcagtgcgactcggaccgatg

SEQ ID NO: 12535 - DNA, 203 bp, synthetic construct
  source 1..203: mol_type = other DNA
ggcgcgccagtcctctgggtcggaggctcacacctttcatccttccccaccttccctagtccctgcactaggttggacagcccccattggctacaggaaagcgggaggggtgtgagtcccctactccctctttgcagtggccccagcccccttaccgtctcgtaactcatcatatacatattgcagtgcgactcggaccgatg

SEQ ID NO: 12536 - DNA, 203 bp, synthetic construct
  source 1..203: mol_type = other DNA
ggcgcgccagtcctatcatccggaggctcacacctttcatccttccccaccttccctagtccctgcactaggttggacagcccccattggctacaggaaagcgggaggggtgtgagtcccctactccctctttgcagtggccccagcccccttaccgtctgcctgggatctgagggataccactccgccgactcggaccgatg

SEQ ID NO: 12537 - DNA, 203 bp, synthetic construct
  source 1..203: mol_type = other DNA
ggcgcgccagtcctgataatcagaggctcacacctttcatccttccccaccttccctagtcctgcgtacgatacaaacagcccccattggctacaggaaagcgggaggggtgtgagtcccctactccctctttgcagtggccccagcccccttaccgtctgcctgggatctgagtacatattgcagtgcgactcggaccgatg

SEQ ID NO: 12538 - DNA, 203 bp, synthetic construct
  source 1..203: mol_type = other DNA
ggcgcgccagtcctagaaccgagaggctcacacctttcatccttccccgagccgaagctgtgctgcactaggttggacagcccccattggctacaggaaagcgggaggggtgtgagtcccctactccctctttgcagtggccccagcccccttaccgtctgcctgggatctgagtacatattgcagtgcgactcggaccgatg

SEQ ID NO: 12539 - DNA, 203 bp, synthetic construct
  source 1..203: mol_type = other DNA
ggcgcgccagtccttcccataagaggggggtagcaacagtggtgagttcgttggatggcttaagccctgagtacagggtagtcgtcagtggttcgacgccttggaataaaggtctcgagatgccacgtggacgagggcatgcccaaagcacatcttaacctgagcgggggtcgcccaggtaaaagcagcgactcggaccgatg

SEQ ID NO: 12540 - DNA, 203 bp, synthetic construct
  source 1..203: mol_type = other DNA
ggcgcgccagtcctcccgagctgaggggggtagcaacagtggtgagttcgttggatggcttaagccctgagtacagggtagtcgtcagtggttcgacgccttggaataaaggtctcgagatgccacgtggacgagggcatgcccaaagcacatcttaacctgagcgggggtcgctgcctacccctttacgactcggaccgatg

SEQ ID NO: 12541 - DNA, 203 bp, synthetic construct
  source 1..203: mol_type = other DNA
ggcgcgccagtcctctccaaccgaggggggtagcaacagtggtgagttcgttggatggcttaagccctgagtacagggtagtcgtcagtggttcgacgccttggaataaaggtctcgatcccgattaattctgagggcatgcccaaagcacatcttaacctgagcgggggtcgcccaggtaaaagcagcgactcggaccgatg

SEQ ID NO: 12542 - DNA, 203 bp, synthetic construct
  source 1..203: mol_type = other DNA
ggcgcgccagtccttagagcgcgaggggggtagcaacagtggtgagttcgttggatggcttaagccctgagtacagggtagtcgtcagtgtgcatggcagagacaataaaggtctcgagatgccacgtggacgagggcatgcccaaagcacatcttaacctgagcgggggtcgcccaggtaaaagcagcgactcggaccgatg

SEQ ID NO: 12543 - DNA, 203 bp, synthetic construct
  source 1..203: mol_type = other DNA
ggcgcgccagtcctggtccgtggaggggggtagcggtgtgttgagaggcgttggatggcttaagccctgagtacagggtagtcgtcagtggttcgacgccttggaataaaggtctcgagatgccacgtggacgagggcatgcccaaagcacatcttaacctgagcgggggtcgcccaggtaaaagcagcgactcggaccgatg

SEQ ID NO: 12544 - DNA, 203 bp, synthetic construct
  source 1..203: mol_type = other DNA
ggcgcgccagtcctagcgcgaggaggggtttcccgacgccctggtctgagctctgtggtatctgattgttgttgaaccgtctctaagacggtgatactataagtcgtggtttgtgtgtttgtttgttaccttgtgtttgttcgtcacttgtcgacagcgccctgcgaattggtgtacccacaccgcgccgactcggaccgatg

SEQ ID NO: 12545 - DNA, 203 bp, synthetic construct
  source 1..203: mol_type = other DNA
ggcgcgccagtcctatgtgagagaggttaagccgtcccgacgccgccgcccccgccgggtgcctaagcaggcccggcgcggccccaggacttgggaccctggaggactgacgctgctggcctgggcgtccccttccgctgagccatggcgactcccgacgtgagtgtgcacatggaggaggtggtggtcgactcggaccgatg

SEQ ID NO: 12546 - DNA, 203 bp, synthetic construct
  source 1..203: mol_type = other DNA
ggcgcgccagtcctcagtatttgaggttgcctaggcagaagcgggagaaggtgctgctgctgaggaccttccagggccgcacgctgcggatcgtgcgcgagcactacctgcggccctgcgtgccctgccacagcccgctctgcccgcagcccgccgcctgcagccacgatgggaaactcttgtctagtcgactcggaccgatg

SEQ ID NO: 12547 - DNA, 203 bp, synthetic construct
  source 1..203: mol_type = other DNA
ggcgcgccagtcctctttggcggagtcccctgggcgcccccacaccggatatatagaacctgggttcgcgacgcagccccccggccgtggatgctcactcgggctcgggatccgcccaggtagccggctcggacccaggtcctgcgcccaggtcctcccctgccccccagcgacggagccggggccggcgactcggaccgatg

SEQ ID NO: 12548 - DNA, 203 bp, synthetic construct
  source 1..203: mol_type = other DNA
ggcgcgccagtcctcataggaagagtcccctgggcgcccccacaccggtagacgcctcggctggttcgcgacgcagccccccggccgtggatgctcactcgggctcgggatccgcccaggtagccggctcggacccaggtcctgcgaagcatcgagattgtgccccccagcgacggagccggggccggcgactcggaccgatg

SEQ ID NO: 12549 - DNA, 203 bp, synthetic construct
  source 1..203: mol_type = other DNA
ggcgcgccagtcctctcaacatgagtcccctgggcgcccccacaccggtagacgcctcggctggttcgcgacgcagccccccggccgtggatgctcactcgggctcgggatccgcccaggtagccggctcggacccaggtcctgcgcccaggtcctcccctgccccccagcgacggagccggggccggcgactcggaccgatg

SEQ ID NO: 12550 - DNA, 203 bp, synthetic construct
  source 1..203: mol_type = other DNA
ggcgcgccagtcctggacaaccgagtcccctgggcgcccccacaccggtagacgcctcggctggttcgcgacgcagccccccggccgtggatgctcactcgggctcgggatccgcccatccgcagatagaaaacccaggtcctgcgcccaggtcctcccctgccccccagcgacggagccggggccggcgactcggaccgatg

SEQ ID NO: 12551 - DNA, 203 bp, synthetic construct
  source 1..203: mol_type = other DNA
ggcgcgccagtccttcacgcatgagtcccctgggtttagtttgtaacatagacgcctcggctggttcgcgacgcagccccccggccgtggatgctcactcgggctcgggatccgcccaggtagccggctcggacccaggtcctgcgcccaggtcctcccctgccccccagcgacggagccggggccggcgactcggaccgatg

SEQ ID NO: 12552 - DNA, 203 bp, synthetic construct
  source 1..203: mol_type = other DNA
ggcgcgccagtcctactgcgtggagtgtcagctctccatctgtctctgcctggcaggcgcacaacgtttttcgaaggcctccggcgatgccgccccagcccctctgatggccctcctctctgctgccactcattccagaacaggaggcatgagcccggaacgcgcttgcttttaggagacagccacttcgactcggaccgatg

SEQ ID NO: 12553 - DNA, 203 bp, synthetic construct
  source 1..203: mol_type = other DNA
ggcgcgccagtcctaaagcactgagtgtcagctctccatctgtctctgcctggcaggcgcacgcgcccagcaccctgcctccggcgatgccgccccagcccctcgtggttatagttagtctgctgccactcattccagaacaggaggcatgagcccggaacgcgcttgcttttaggagacagccacttcgactcggaccgatg

SEQ ID NO: 12554 - DNA, 203 bp, synthetic construct
  source 1..203: mol_type = other DNA
ggcgcgccagtcctctatagccgagtgtcagctctccatctgtctctgcctggcaggcgcacgcgcccagcaccctgcctccggcgatgccgccccagcccctctgatggccctcctcatccactgtcgaatttccagaacaggaggcatgagcccggaacgcgcttgcttttaggagacagccacttcgactcggaccgatg

SEQ ID NO: 12555 - DNA, 203 bp, synthetic construct
  source 1..203: mol_type = other DNA
ggcgcgccagtcctggtgtttcgagtgtcagctctccatctgtctctgcctggcaggcgcacgcgcccagcaccctgcctccggcgatgccgccccagcccctctgatggccctcctctctgctgccactcacgaacatctctactgcatgagcccggaacgcgcttgcttttaggagacagccacttcgactcggaccgatg

SEQ ID NO: 12556 - DNA, 203 bp, synthetic construct
  source 1..203: mol_type = other DNA
ggcgcgccagtcctgcacctcagagtgtcagctctccatctgtctctgcctggcaggcgcacgcgcccagcaccctgcctccggcgatgccgccccagcccctctgatggccctcctctctgctgccactcattccagaacaggaggcatgagcccggaacgcgcttgcttttaggagacagccacttcgactcggaccgatg

SEQ ID NO: 12557 - DNA, 203 bp, synthetic construct
  source 1..203: mol_type = other DNA
ggcgcgccagtcctgggagccagagtgtcagctctccatctgtctctgcctggcaggcgcacgcgcccagcaccctgcctccggcgatgccgccccagcccctctgatggccctcctctctgctgccactcattccagaacaggagtttactaggatcggcgcgcttgcttttaggagacagccacttcgactcggaccgatg

SEQ ID NO: 12558 - DNA, 203 bp, synthetic construct
  source 1..203: mol_type = other DNA
ggcgcgccagtcctagtttggcgagtgtcagctctccatctgtctctgcctggcaggcgcacgcgcccagcaccctgcctccggcgatgcttggggcctgaaattgatggccctcctctctgctgccactcattccagaacaggaggcatgagcccggaacgcgcttgcttttaggagacagccacttcgactcggaccgatg

SEQ ID NO: 12559 - DNA, 203 bp, synthetic construct
  source 1..203: mol_type = other DNA
ggcgcgccagtcctatagtgctgagtgtcagctctccatctgtctctgcctggcaggcgcacgcgcccagcacccttgaattctgcgatacgccccagcccctctgatggccctcctctctgctgccactcattccagaacaggaggcatgagcccggaacgcgcttgcttttaggagacagccacttcgactcggaccgatg

SEQ ID NO: 12560 - DNA, 203 bp, synthetic construct
  source 1..203: mol_type = other DNA
ggcgcgccagtcctcactgtgagatactcatcctacctgaatataaactgagataaatccagtaaagaaagtgtagccttccaacaccctgagtctatcattgatttctttttgtggtaaaaatcttagttcatgtgaagaaatttcatgtgaatgttttagctatcaaacagtactgtcacctactccgactcggaccgatg

SEQ ID NO: 12561 - DNA, 203 bp, synthetic construct
  source 1..203: mol_type = other DNA
ggcgcgccagtcctaccggtgcgatactcatcctacctgaatataaactgagataaatccagtaaagaaagtgtagtaaattctacataagagtctatcattgatttctttttgtggtgctctatcgcaacaatgtgaagaaatttcatgtgaatgttttagctatcaaacagtactgtcacctactccgactcggaccgatg

SEQ ID NO: 12562 - DNA, 203 bp, synthetic construct
  source 1..203: mol_type = other DNA
ggcgcgccagtcctgcgcatgcgatagcgcctttcccctaatgtagtacccacctgccaggtgtgaagtggagtgagcggatctccaatttggtctgttctgaactacaccatttactgctgtgaagaatgccctggaggcaagctggttacagccctgaccaggccctgcccgtgactctcgaccggcgactcggaccgatg

SEQ ID NO: 12563 - DNA, 203 bp, synthetic construct
  source 1..203: mol_type = other DNA
ggcgcgccagtcctcctgggtcgatagcgccttttgggatgcaggaaccccacctgccaggtgtgaagtggagtgactactgtaatcggatggtctgttctgaactacaccatttactgctgtgaagaatgccctggaggcaagctggttacagccctgaccaggccctgcccgtgactctcgaccggcgactcggaccgatg

SEQ ID NO: 12564 - DNA, 203 bp, synthetic construct
  source 1..203: mol_type = other DNA
ggcgcgccagtcctatggtgaggatagcgccttttgggatgcaggaaccccacctgccaggtgtgaagtggagtgagcggatctccaattgctgtgacataatcctacaccatttactgctgtgaagaatgccctggaggcaagctggttacagccctgaccaggccctgcccgtgactctcgaccggcgactcggaccgatg

SEQ ID NO: 12565 - DNA, 203 bp, synthetic construct
  source 1..203: mol_type = other DNA
ggcgcgccagtcctctcccaaagatagcgccttttgggatgcaggaaccccacctgccaggtgtgaagtggagtgagcggatctccaatttggtctgttctgaactacaccatttactgctgtgaagaatgccctggaggcaagctggttacagccctgaggtacgatatggaatgactctcgaccggcgactcggaccgatg

SEQ ID NO: 12566 - DNA, 203 bp, synthetic construct
  source 1..203: mol_type = other DNA
ggcgcgccagtcctttgtagtagatagcgccttttgggatgcaggaactgactgaatgtacagtgaagtggagtgagcggatctccaatttggtctgttctgaactacaccatttactgctgtgaagaatgccctggaggcaagctggttacagccctgaccaggccctgcccgtgactctcgaccggcgactcggaccgatg

SEQ ID NO: 12567 - DNA, 203 bp, synthetic construct
  source 1..203: mol_type = other DNA
ggcgcgccagtcctatgagcccgataggatgtgaaggctccgatttgtgaataggtttttatattcgaagtaggtagtattgcgcatactattaattccacaatacgtggtcttcgtcagttttttaggttgtttcgtccctatggaaatggctcttcggacctgagtacagtgggacaaccccaacgcgactcggaccgatg

SEQ ID NO: 12568 - DNA, 203 bp, synthetic construct
  source 1..203: mol_type = other DNA
ggcgcgccagtcctcgcaatcggatatagcacagggcttggttttctcacccagtgcatgtggcaggagcggtgagatcactgcctcacggcgatcctggactgacggtcacgactgcctaccctctaaccctgttctgagctgccccttgcccacacaccccaaacctgtgtgcaggatccgcctcccgactcggaccgatg

SEQ ID NO: 12569 - DNA, 203 bp, synthetic construct
  source 1..203: mol_type = other DNA
ggcgcgccagtcctcggcctccgatcccctgcagtcggcgggagtgttggaggtcggcgccgagtaaataagataccgccccccacgggaaggaagcacccccggtattaaaacgaacggggcggaaagaagccctcagtcgccggccgggaggcgagccgatgccgagctgctccacgtccaccatgcgactcggaccgatg

SEQ ID NO: 12570 - DNA, 203 bp, synthetic construct
  source 1..203: mol_type = other DNA
ggcgcgccagtcctgcgtaattgatcccctgcagtcggcgggagtgttggaggtcggcgccggcccccgccttccgcgccccccacgggaaggaagcacccccgaagaagtgtgcgtaggggcggaaagaagccctcagtcgccggccgggaggcgagccgatgccgagctgctccacgtccaccatgcgactcggaccgatg

SEQ ID NO: 12571 - DNA, 203 bp, synthetic construct
  source 1..203: mol_type = other DNA
ggcgcgccagtccttcaacctagatcccctgcagtcggcgggagtgttggaggtcggcgccggcccccgccttccgcgccccccacgggaaggaagcacccccggtattaaaacgaacctcctatgtcagtcccctcagtcgccggccgggaggcgagccgatgccgagctgctccacgtccaccatgcgactcggaccgatg

SEQ ID NO: 12572 - DNA, 203 bp, synthetic construct
  source 1..203: mol_type = other DNA
ggcgcgccagtcctcttccctggatcccctgcagtcggcgggagtgttggaggtcggcgccggcccccgccttccgcgccccccacgggaaggaagcacccccggtattaaaacgaacggggcggaaagaagccctcagtcgccggccgggaggcgagccataaattgcggtgcccacgtccaccatgcgactcggaccgatg

SEQ ID NO: 12573 - DNA, 203 bp, synthetic construct
  source 1..203: mol_type = other DNA
ggcgcgccagtcctccgggcccgatcccctgcagtcggcgggagtgttggaggtcggcgccggcccccgccttccgcgccccccacgggaaggaagcacccccggtattaaaacgaacggggcggaaagaagggtgactaatatctccgggaggcgagccgatgccgagctgctccacgtccaccatgcgactcggaccgatg

SEQ ID NO: 12574 - DNA, 203 bp, synthetic construct
  source 1..203: mol_type = other DNA
ggcgcgccagtcctttcatgttgatcgaagacccaccagcagatgaatggacaccttgaagcagaggagcagcaggaccagagatcacccctgacctgctacctcggccgccccggttgcttctattggtcaatccctttgggggtcggggcctggcctggcagtggtgtaagaaccacgtgcttccccgactcggaccgatg

SEQ ID NO: 12575 - DNA, 203 bp, synthetic construct
  source 1..203: mol_type = other DNA
ggcgcgccagtccttccgacgggatcgtgtggatgtctttgctgaccagacaaagcataccagatctcaccagagagtcctaggggactacagaaggaaaaagacaagaggcagtaggatatctgtgtgtcctcccgctgaccacacttcctttagtgacccgattgcctcctcaagtcgcagacactcgactcggaccgatg

SEQ ID NO: 12576 - DNA, 203 bp, synthetic construct
  source 1..203: mol_type = other DNA
ggcgcgccagtccttatgcttcgatgcgctaatatcctccagtggctccgctccccgttctctgtgggctcaaaatgacagaggctcacaggacacctgcatgcccaaggcactccaccgtatgtgatcaacctggatccagcagtacatgaagttccctttcctgccaatattggtgatgaaatttacgactcggaccgatg

SEQ ID NO: 12577 - DNA, 203 bp, synthetic construct
  source 1..203: mol_type = other DNA
ggcgcgccagtcctgtgtgctagatgtcctaacacggtttcgaaagcggcggcagcggcgctgagcgggtcccccccgcagactgagaagccgacccactacaggtacctgaaggagttcaggacggagcagtgccccctgttttcacagcacaagtgcgcgcagcaccggccgttcacctgcttccacgactcggaccgatg

SEQ ID NO: 12578 - DNA, 203 bp, synthetic construct
  source 1..203: mol_type = other DNA
ggcgcgccagtcctgacgtgccgattcagaccccctacgcgcgcgccaatctccacgacgccactatggttgatattacgtggggcctttaatcttacctactctaaccaggtcatcacccaccgttgtttcgccgcatctggtgggtacccaacttttgccattcgggagagccccagggtgcccgacgactcggaccgatg

SEQ ID NO: 12579 - DNA, 203 bp, synthetic construct
  source 1..203: mol_type = other DNA
ggcgcgccagtcctcaagttgagattcagaccccctacgcgcgcgccaatctccacgacgccgactaacgcccctggcttattttttccaaatcttacctactctaaccaggtcatcacccaccgttgtttcgccgcatctggtgggtacccaacttttgccattcgggagagccccagggtgcccgacgactcggaccgatg

SEQ ID NO: 12580 - DNA, 203 bp, synthetic construct
  source 1..203: mol_type = other DNA
ggcgcgccagtccttgaatgtagattcagaccccctacgcgcgcgccaatctccacgacgccgactaacgcccctgtacgtggggcctttaatcttacctactctaaccaggtcatcacccaccgttgtttcgccgcatctggtggaggatattaaacatccattcgggagagccccagggtgcccgacgactcggaccgatg

SEQ ID NO: 12581 - DNA, 203 bp, synthetic construct
  source 1..203: mol_type = other DNA
ggcgcgccagtcctatgtagacgattcagaccccctacgcgcgcgccaatctccacgacgccgactaacgcccctgtacgtggggcctttaatcttacctactctaaccaggtcatcacccaccgttgtttcgccgcatctggtgggtacccaacttttgccattcgggagagccccagggtgcccgacgactcggaccgatg

SEQ ID NO: 12582 - DNA, 203 bp, synthetic construct
  source 1..203: mol_type = other DNA
ggcgcgccagtcctgtctgagtgattcagaccccctacgcgcgcgccaatctccacgacgccgactaacgcccctgtacgtggggcctttaatcttacctactctaaccaggtcatcacccaccgttgtttcgccgcatctggtgggtacccaacttttgtttaaactagcttacccagggtgcccgacgactcggaccgatg

SEQ ID NO: 12583 - DNA, 203 bp, synthetic construct
  source 1..203: mol_type = other DNA
ggcgcgccagtcctttcgcgcggattcagacccctgttttcatgtggtatctccacgacgccgactaacgcccctgtacgtggggcctttaatcttacctactctaaccaggtcatcacccaccgttgtttcgccgcatctggtgggtacccaacttttgccattcgggagagccccagggtgcccgacgactcggaccgatg

SEQ ID NO: 12584 - DNA, 203 bp, synthetic construct
  source 1..203: mol_type = other DNA
ggcgcgccagtcctaactcctagattggctttttaagcacctcccccagttattcaagtttctggtctttaaaaaactctgtggcggtacggtaaccgaggaggttccagcgcggcggaagtacaagcgttaagggtgtgtgcgcaaggccagggccagaggggcacgtggcgccgggaggagagagacgactcggaccgatg

SEQ ID NO: 12585 - DNA, 203 bp, synthetic construct
  source 1..203: mol_type = other DNA
ggcgcgccagtccttattaagtgattggcttttttttttggcaaaccacaatcgtcgccgaatggtctttaaaaaactctgtggcggtacggtaaccgaggaggttccagcgcggcggaagtaccccgcgggtgggtgtgtgcgcaaggccagggccagaggggcacgtggcgccgggaggagagagacgactcggaccgatg

SEQ ID NO: 12586 - DNA, 203 bp, synthetic construct
  source 1..203: mol_type = other DNA
ggcgcgccagtcctctagttaggattggcttttttttttggcaaaccagttattcaagtttctggtctttaaaaaactctgtggcggtacggtaaccgaggaggttccagcgcggcggaagtaccccgcgggactaatacgtttgcaggccagggccagaggggcacgtggcgccgggaggagagagacgactcggaccgatg

SEQ ID NO: 12587 - DNA, 203 bp, synthetic construct
  source 1..203: mol_type = other DNA
ggcgcgccagtcctctgaagtcgattggcttttttttttggcaaaccagttattcaagtttctggtctttaaaaaactctgtggcggtacggtaaccgaggaggttccagcgcggcggaagtaccccgcgggtgggtgtgtgcgcaaggccagggccagacaatgcaacaattacgggaggagagagacgactcggaccgatg

SEQ ID NO: 12588 - DNA, 203 bp, synthetic construct
  source 1..203: mol_type = other DNA
ggcgcgccagtcctccaacggcgattggcttttttttttggcaaaccagttattcaagtttctggtctttaaaaaactctgtggcggtacggtaaccgaggaggttccagcgcggcggaagtaccccgcgggtgggtgtgtgcgcaaggccagggccagaggggcacgtggcgcttttttctatccaccgactcggaccgatg

SEQ ID NO: 12589 - DNA, 203 bp, synthetic construct
  source 1..203: mol_type = other DNA
ggcgcgccagtcctaacattgggattggcttttttttttggcaaaccagttattcaagtttctggtctttaaaaaactctgtggcggtacggtaaccgaggaggttccagcgcggcggaagtaccccgcgggtgggtgtgtgcgcactaggcaacatgttggggcacgtggcgccgggaggagagagacgactcggaccgatg

SEQ ID NO: 12590 - DNA, 203 bp, synthetic construct
  source 1..203: mol_type = other DNA
ggcgcgccagtccttgttgtaagattggcttttttttttggcaaaccagttattcaagtttctggtctttaaaaaactctgtggcggtacggtaaccgaggaggttccagcgcggcggcctctaaagtaccttgggtgtgtgcgcaaggccagggccagaggggcacgtggcgccgggaggagagagacgactcggaccgatg

SEQ ID NO: 12591 - DNA, 203 bp, synthetic construct
  source 1..203: mol_type = other DNA
ggcgcgccagtcctttattcgggatttcagagaggcttagggcaaacatcatttggccttaaatgggattctgtgagaggggatccctccattgacagctggactgttctttggggccttatgtggtgtttgcctctgaggtactcaggggcatttaggtttttcctcattcttaaataataatgaaccgactcggaccgatg

SEQ ID NO: 12592 - DNA, 203 bp, synthetic construct
  source 1..203: mol_type = other DNA
ggcgcgccagtcctatgcgcaagcaaaagggccactaatgttctattatccctccactgccctcgaacgcctcacttcctaagtctctgcatttctcagtcagtggacagcttttgggactcttgtgtgaggactttgggggaccaggccaggctgggcctctgctgattgagatcttgggatccagacgactcggaccgatg

SEQ ID NO: 12593 - DNA, 203 bp, synthetic construct
  source 1..203: mol_type = other DNA
ggcgcgccagtccttcgagagagcaaaagggccaggggcccggagccttccctccactgcccggcggactgaatggtcctaagtctctgcatttctcagtcagtggacagcttttgggactcttgtgtgaggactttgggggaccaggccaggctgggcctctgctgattgagatcttgggatccagacgactcggaccgatg

SEQ ID NO: 12594 - DNA, 203 bp, synthetic construct
  source 1..203: mol_type = other DNA
ggcgcgccagtcctgaaagctggcaaaagggccaggggcccggagccttccctccactgccctcgaacgcctcacttcctaagtctctgcatttctcagtcagtggacagcttttgggactcttgtgtgaggactttgggggaccactgtctagaactgatctgctgattgagatcttgggatccagacgactcggaccgatg

SEQ ID NO: 12595 - DNA, 203 bp, synthetic construct
  source 1..203: mol_type = other DNA
ggcgcgccagtccttcattcctgcaaaagggccaggggcccggagccttccctccactgccctcgaacgcctcacttcctaagtctctgcatttctcagtcagtggacagcttttgggttgaaacaaacgcaactttgggggaccaggccaggctgggcctctgctgattgagatcttgggatccagacgactcggaccgatg

SEQ ID NO: 12596 - DNA, 203 bp, synthetic construct
  source 1..203: mol_type = other DNA
ggcgcgccagtcctgtaaaccggcaaaagggccaggggcccggagccttccctccactgccctcgaacgcctcacttcctaagtctctgcatttctcagtcagtttcacctagacaacactcttgtgtgaggactttgggggaccaggccaggctgggcctctgctgattgagatcttgggatccagacgactcggaccgatg

SEQ ID NO: 12597 - DNA, 203 bp, synthetic construct
  source 1..203: mol_type = other DNA
ggcgcgccagtccttcctcttagcaaaattctgcctccaaggattttctgccgtctcttggcaaaaatggcaaataatgatgctgttctgaagagactggagcagaagggtgcagaggcagatcaaatcattgaatatcttaagcagcaagtttctctacttaaggagaaagcatagcaatcccttgtcgactcggaccgatg

SEQ ID NO: 12598 - DNA, 203 bp, synthetic construct
  source 1..203: mol_type = other DNA
ggcgcgccagtccttgatggcggcaaaattctgcctccaaggattttctgccgtctcttggcaaaaatggcaaataatgatgctgttctgaagagactggagcagaagggtgcagagggttcaacccggtgggaatatcttaagcagcaagtttctctacttaaggagaaagcaattttgcaggcaaccgactcggaccgatg

SEQ ID NO: 12599 - DNA, 203 bp, synthetic construct
  source 1..203: mol_type = other DNA
ggcgcgccagtcctgagcggcagcaaaattctgcctccaaggattttctgccgtctcttggcaaaaatggcaaataatgatgctgttctgaagagactggagcatccctcacggtcaacagatcaaatcattgaatatcttaagcagcaagtttctctacttaaggagaaagcaattttgcaggcaaccgactcggaccgatg

SEQ ID NO: 12600 - DNA, 203 bp, synthetic construct
  source 1..203: mol_type = other DNA
ggcgcgccagtcctggcatgtcgcaaaattctgcctccaaggattttctgccgtctcttggcaaaaatggcaaataatgatgctgttctggctgctaaacccatgaagggtgcagaggcagatcaaatcattgaatatcttaagcagcaagtttctctacttaaggagaaagcaattttgcaggcaaccgactcggaccgatg

SEQ ID NO: 12601 - DNA, 203 bp, synthetic construct
  source 1..203: mol_type = other DNA
ggcgcgccagtcctaagctcgagcaacgagagagggttagcagcagctatcgcagcgtcggatgttcagagcagcagaagccggcgtcgtcggatgttgtgttgcccgccaccatgagctacacaggctttgtccagggatctgaaaccactttgcagtcgacatactcggataccagcgctcagccccgactcggaccgatg

SEQ ID NO: 12602 - DNA, 203 bp, synthetic construct
  source 1..203: mol_type = other DNA
ggcgcgccagtccttgcgagtagcaagcgttttccccccggcccagcgtggtccgcctccctctgggcgtccacctgcccggagtactgccagcgggcatgaccgacccaccaggggcgccgccgccggcgctcgcaggccgcggatgaagaagaaaacccggcgccgctcgacccggagcgaggagtcgactcggaccgatg

SEQ ID NO: 12603 - DNA, 203 bp, synthetic construct
  source 1..203: mol_type = other DNA
ggcgcgccagtcctggagccgcgcaaggcatatcgcgcctgcgcggtggcccttccatcccggcagtcgtggctgcagcgctgaggcgagaggttggtgggtgtctccggccataatgacccaggctgagaagggtgatacggagaacggaaaggagaagggcggcgagaaggagaaggagcagcgcgcgactcggaccgatg

SEQ ID NO: 12604 - DNA, 203 bp, synthetic construct
  source 1..203: mol_type = other DNA
ggcgcgccagtcctcgcgactggcaaggcatatcgcgcctgcgcggtggcccttccatcccggcagtcgtggctgcagcgctgaggcgagaggttggtgggtgtctccggccataatgacccaggctgagaagggtgatacggaggcgtaccgcactcggggcggcgagaaggagaaggagcagcgcgcgactcggaccgatg

SEQ ID NO: 12605 - DNA, 203 bp, synthetic construct
  source 1..203: mol_type = other DNA
ggcgcgccagtccttttgatgagcacacctgtgtaatctaaaattgacatacctaattgattagttagatggaactacagtggattccataaggttcctgcctaccatcggctttaaagaaaaaaataggcccggacgggttagcaacaagcgactgccggtgccaacagcgcaatccacaatctacacgactcggaccgatg

SEQ ID NO: 12606 - DNA, 203 bp, synthetic construct
  source 1..203: mol_type = other DNA
ggcgcgccagtcctgctaagtagcaccttgccgcgatacgttaaaatatataacgtatttttaaaacttaggaaccaagacaaacacttttggtcttggtattggatcctcaagaaatatatcatcatgagtgatatctttgaagaggcggctagttttaggagttatcaatctaagttagggagagacgactcggaccgatg

SEQ ID NO: 12607 - DNA, 203 bp, synthetic construct
  source 1..203: mol_type = other DNA
ggcgcgccagtcctaaccagatgcacgtaaccttcagagagtgcggatctgagtaggagacccatcgtggtataactacagatgcagcccggtttaaaaagcgtctatgcccctacagggtagcggtgggccgcgccctttccttttaaaactacttgttctatggtgacaatggcaggaaacatgatcgactcggaccgatg

SEQ ID NO: 12608 - DNA, 203 bp, synthetic construct
  source 1..203: mol_type = other DNA
ggcgcgccagtcctctcttggggcacgtaaccttcagagagtgcggatctgagtaggagaccgtggtgcactgcttgcgcatcattattgggtttaaaaagcgtctatgcccctacagggtagcggtgggccgcgccctttccttttaaaactacttgttctatggtgacaatggcaggaaacatgatcgactcggaccgatg

SEQ ID NO: 12609 - DNA, 203 bp, synthetic construct
  source 1..203: mol_type = other DNA
ggcgcgccagtcctttcggcacgcacgtaaccttcagagagtgcggatctgagtaggagaccgtggtgcactgctttacagatgcagcccggtttaaaaagcgttgggcaaagatggtggtagcggtgggccgcgccctttccttttaaaactacttgttctatggtgacaatggcaggaaacatgatcgactcggaccgatg

SEQ ID NO: 12610 - DNA, 203 bp, synthetic construct
  source 1..203: mol_type = other DNA
ggcgcgccagtcctcacagttcgcagatggggggcttttagccacggtctctggtctgatgaagcagaaaagaagatgaggatcagggggggtagtccttttaggtcacgaatcaatatgttaaggatacctgtaagaaaggccttagtaggcctttctaagtctcctaaaggatgtgttcgaacaaccgactcggaccgatg

SEQ ID NO: 12611 - DNA, 203 bp, synthetic construct
  source 1..203: mol_type = other DNA
ggcgcgccagtcctacatctgcgcagatggggggcttttagccacggtctctggtctgatgaagcagaaaagaagatgaggatcagggggtcctcgggaacgctgtcacgaatcaatagagcggtacccatagtaagaaaggccttagtaggcctttctaagtctcctaaaggatgtgttcgaacaaccgactcggaccgatg

SEQ ID NO: 12612 - DNA, 203 bp, synthetic construct
  source 1..203: mol_type = other DNA
ggcgcgccagtcctaagaatgcgcagatggggggcttttagccacggtctctggtctgatgaagcagaaaagaagatgaggatcagggggtcctcgggaacgctgtcacgaatcaatatgttaaggatacctgtaagaaaggccttagtaggcctttctaagtctcctaaaggatgtgttcgaacaaccgactcggaccgatg

SEQ ID NO: 12613 - DNA, 203 bp, synthetic construct
  source 1..203: mol_type = other DNA
ggcgcgccagtcctaaatcgacgcagcagcgactaagggcgtaaacagttgaggccgtccccgactccttcctcccccttccctcccccttttttttgttttccgttcccctttcccctcccttccctatccccgacgaccggatcctgaggaggcagctgcggtggcagctgctgagttctcggtgacgactcggaccgatg

SEQ ID NO: 12614 - DNA, 203 bp, synthetic construct
  source 1..203: mol_type = other DNA
ggcgcgccagtccttgggacaggcagcagcgactcctctgagctgagtagtctcaaacggtggactccttcctcccccttccctcccccttttttttgttttccgttcccctttcccctcccttccctatccccgacgaccggatcctgaggaggcagctgcggtggcagctgctgagttctcggtgacgactcggaccgatg

SEQ ID NO: 12615 - DNA, 203 bp, synthetic construct
  source 1..203: mol_type = other DNA
ggcgcgccagtccttccgtaatgcagcagcgactcctctgagctgagtttgaggccgtccccgactccttcctcccccttccctcccccttttttttgttttccgttcccctttcccccgggggtatctcgaccgacgaccggatcctgaggaggcagctgcggtggcagctgctgagttctcggtgacgactcggaccgatg

SEQ ID NO: 12616 - DNA, 203 bp, synthetic construct
  source 1..203: mol_type = other DNA
ggcgcgccagtcctcgtacgatgcagcagcgactcctctgagctgagtttgaggccgtccccgactccttcctcccccttccctcccccttttttttgttttccgttcccctttcccctcccttccctatccccgacgaccggatcaacgcagactgaaggcggtggcagctgctgagttctcggtgacgactcggaccgatg

SEQ ID NO: 12617 - DNA, 203 bp, synthetic construct
  source 1..203: mol_type = other DNA
ggcgcgccagtcctgcgggtgggcagcagcgactcctctgagctgagtttgaggccgtccccgactccttcctcccccttccctcccccttttttttgttttccgttcccctttcccctcccttccctatccccgacgaccggatcctgaggaggcagctcgttccattagcagtgagttctcggtgacgactcggaccgatg

SEQ ID NO: 12618 - DNA, 203 bp, synthetic construct
  source 1..203: mol_type = other DNA
ggcgcgccagtcctgaggcaccgcagcagcgactcctctgagctgagtttgaggccgtccccgactccttcctcccccttccctcccccttttttttgttttccgttcccctttcccctcccttccctatccccgacgaccggatcctgaggaggcagctgcggtggcagctgctgagttctcggtgacgactcggaccgatg

SEQ ID NO: 12619 - DNA, 203 bp, synthetic construct
  source 1..203: mol_type = other DNA
ggcgcgccagtcctcagcgtatgcagcagcgactcctctgagctgagtttgaggccgtccccgactccttcctcccccttccctcccccttttttttgttttcctccggaagcgagtgtcccttccctatccccgacgaccggatcctgaggaggcagctgcggtggcagctgctgagttctcggtgacgactcggaccgatg

SEQ ID NO: 12620 - DNA, 203 bp, synthetic construct
  source 1..203: mol_type = other DNA
ggcgcgccagtcctaacggcccgcagccggccgtgcgcctgcgcggtgagtacatttctttcgcagtcgtggctgcagcgctgaggcgagaggttggtgggtgtctccggccataatgacccaggctgagaagggtgatacggagaacggaaaggagaagggcggcgagaaggagaaggagcagcgcgcgactcggaccgatg

SEQ ID NO: 12621 - DNA, 203 bp, synthetic construct
  source 1..203: mol_type = other DNA
ggcgcgccagtcctacgactaggcagccggccgtgcgcctgcgcggtggcccttccatcccggcagtcgtggctgcagcgctgaggcgagaggttggtgggtgtctccggccataatgacccaggctgagaaccccagcgattgctacggaaaggagaagggcggcgagaaggagaaggagcagcgcgcgactcggaccgatg

SEQ ID NO: 12622 - DNA, 203 bp, synthetic construct
  source 1..203: mol_type = other DNA
ggcgcgccagtcctttaggttcgcagccggccgtgcgcctgcgcggtggcccttccatcccggcagtcgtggctgcagcgctgaggcgagaggttggtgggtgtctccggccataatgacccaggctgagaagggtgatacggagagattcctcagaggcggcggcgagaaggagaaggagcagcgcgcgactcggaccgatg

SEQ ID NO: 12623 - DNA, 203 bp, synthetic construct
  source 1..203: mol_type = other DNA
ggcgcgccagtccttgctatctgcagccggccgtgcgcctgcgcggtggcccttccatcccggcagtcgtggctgccagtaaagacaagtaggttggtgggtgtctccggccataatgacccaggctgagaagggtgatacggagaacggaaaggagaagggcggcgagaaggagaaggagcagcgcgcgactcggaccgatg

SEQ ID NO: 12624 - DNA, 203 bp, synthetic construct
  source 1..203: mol_type = other DNA
ggcgcgccagtcctgctcagctgcagctgctgctacggctggactcgttcttttccatcagattcatcatcaacagcatggaagcgagaaaccaaacagctatttcaaaattccttctcctgggactgatagaggatccggaactgcagcccgtccttttcagcctgttcctgtccatgtacttggtccgactcggaccgatg

SEQ ID NO: 12625 - DNA, 203 bp, synthetic construct
  source 1..203: mol_type = other DNA
ggcgcgccagtcctcactgcatgcagctgctgcttacagattttattatcttttccatcagacgacgacgatgattcatggaagcgagaaaccaaacagctatttcaaaattccttctcctgggactgatagaggatccggaactgcagcccgtccttttcagcctgttcctgtccatgtacttggtccgactcggaccgatg

SEQ ID NO: 12626 - DNA, 203 bp, synthetic construct
  source 1..203: mol_type = other DNA
ggcgcgccagtcctaagggcgtgcagctgctgcttacagattttattatcttttccatcagattcatcatcaacagcatggaagcgagaaaccaaacagctattgaccggagatcctacctgggactgatagaggatccggaactgcagcccgtccttttcagcctgttcctgtccatgtacttggtccgactcggaccgatg

SEQ ID NO: 12627 - DNA, 203 bp, synthetic construct
  source 1..203: mol_type = other DNA
ggcgcgccagtcctggtaacacgcaggacagccccagcgagcctctggagtccctgtggcagaactcaaatggaagactccaggtactgtcccaggggagcagggtgtcacctccgttggatagagccggccaggttgcagcgcggacacactcgcaggtcgctgtggccccagcctcgcctgacagacgactcggaccgatg

SEQ ID NO: 12628 - DNA, 203 bp, synthetic construct
  source 1..203: mol_type = other DNA
ggcgcgccagtccttactattcgcaggacagccccagcgagcctctggagtccctgtggcagaactcaaatggaaggaggagcagctgcacccaggggagcagggtgtcacctccgttggatagagccggccaggttgcagcgcggacacactcgcaggtcgctgtggccccagcctcgcctgacagacgactcggaccgatg

SEQ ID NO: 12629 - DNA, 203 bp, synthetic construct
  source 1..203: mol_type = other DNA
ggcgcgccagtcctggctatacgcaggacagccccagcgagcctctggagtccctgtggcagaactcaaatggaaggaggagcagctgcacccaggggagcagggtgtcacctccgttggatagagccggccaggttgcagcgcggacacactcgcaggtgttccaaatatagtcctcgcctgacagacgactcggaccgatg

SEQ ID NO: 12630 - DNA, 203 bp, synthetic construct
  source 1..203: mol_type = other DNA
ggcgcgccagtcctgatacttggcaggtgttgcaagatactactgtccgggtgtgggcctcgctcaccggcggttggttcttcgacccgcaccagagcaccttctccaactgcttccacctctatgtgtggatcttcctgctcatctttcccttcttactgtacatggtcctgcctcccagcttgatgcgactcggaccgatg

SEQ ID NO: 12631 - DNA, 203 bp, synthetic construct
  source 1..203: mol_type = other DNA
ggcgcgccagtcctgcaccagtgcaggtgttgcagatcctgcgccaggcatctcataaagacctcaccggcggttggttcttcgacccgcaccagagcaccttctccaactgcttccacctctatgtgtggatcttcctgctcatctttcccttcttactgtacatggtcctgcctcccagcttgatgcgactcggaccgatg

SEQ ID NO: 12632 - DNA, 203 bp, synthetic construct
  source 1..203: mol_type = other DNA
ggcgcgccagtcctgacatcgagcaggtgttgcagatcctgcgccagggggtgtgggcctcgctcaattctaacgggttcttcgacccgcaccagagcaccttctccaactgcttccacctctatgtgtggatcttcctgctcatctttcccttcttactgtacatggtcctgcctcccagcttgatgcgactcggaccgatg

SEQ ID NO: 12633 - DNA, 203 bp, synthetic construct
  source 1..203: mol_type = other DNA
ggcgcgccagtcctacctagttgcaggtgttgcagatcctgcgccagggggtgtgggcctcgctcaccggcggttgcacaggaccgtaaaaccagagcaccttctccaactgcttccacctctatgtgtggatcttcctgctcatctttcccttcttactgtacatggtcctgcctcccagcttgatgcgactcggaccgatg

SEQ ID NO: 12634 - DNA, 203 bp, synthetic construct
  source 1..203: mol_type = other DNA
ggcgcgccagtcctcctctccggcaggtgttgcagatcctgcgccagggggtgtgggcctcgctcaccggcggttggttcttcgacccgcaccagagcaccttctccaactgcttccacctctatgtgtggatcttcctgctcatcgaattgggggattcgtacatggtcctgcctcccagcttgatgcgactcggaccgatg

SEQ ID NO: 12635 - DNA, 203 bp, synthetic construct
  source 1..203: mol_type = other DNA
ggcgcgccagtcctcctacgcagcaggtgttgcagatcctgcgccagggggtgtgggcctcgctcaccggcggttggttcttcgacccgcaccagagcaccttctccaactgcttccacctctatgtgtggatcttcctgctcatctttcccttcttactgtacatggtcctgctgggttcaagaggacgactcggaccgatg

SEQ ID NO: 12636 - DNA, 203 bp, synthetic construct
  source 1..203: mol_type = other DNA
ggcgcgccagtccttgatctgtgcaggtgttgcagatcctgcgccagggggtgtgggcctcgctcaccggcggttggttcttcgacccgcaccagagcaccttctccaactgcttccacctctatgtgtggatcttcctgctcatctttcccttcttacttgttcgtaggggaactcccagcttgatgcgactcggaccgatg

SEQ ID NO: 12637 - DNA, 203 bp, synthetic construct
  source 1..203: mol_type = other DNA
ggcgcgccagtcctctgaggctgcaggtgttgcagatcctgcgccagggggtgtgggcctcgctcaccggcggttggttcttcgacccgcaccagagcaccttctccaactgcttccagagagtatgcaacttcttcctgctcatctttcccttcttactgtacatggtcctgcctcccagcttgatgcgactcggaccgatg

SEQ ID NO: 12638 - DNA, 203 bp, synthetic construct
  source 1..203: mol_type = other DNA
ggcgcgccagtcctcgtgtgccgcaggtgttgcagatcctgcgccagggggtgtgggcctcgctcaccggcggttggttcttcgacccgcctagcgaaggaccgtccaactgcttccacctctatgtgtggatcttcctgctcatctttcccttcttactgtacatggtcctgcctcccagcttgatgcgactcggaccgatg

SEQ ID NO: 12639 - DNA, 203 bp, synthetic construct
  source 1..203: mol_type = other DNA
ggcgcgccagtccttcccgagggcataatctcctgaatcccgggtttgccatttaatcatacaacatccacacgggagacaccttctacttccccaacttccgcgcgtccggggcgcagcttcccgggctgccttcgctgtcctacccacgccgcgacaacgtgtgctccctgtcctggccgtcggcgcgactcggaccgatg

SEQ ID NO: 12640 - DNA, 203 bp, synthetic construct
  source 1..203: mol_type = other DNA
ggcgcgccagtcctaaactagggcataatctcctgaatcccgggtttgtggggccgctggtaaacatccacacgggagacaccttcccacaagccaacttccgcgcgtccggggcgcagcttcccgggctgccttcgctgtcctacccacgccgcgacaacgtgtgctccctgtcctggccgtcggcgcgactcggaccgatg

SEQ ID NO: 12641 - DNA, 203 bp, synthetic construct
  source 1..203: mol_type = other DNA
ggcgcgccagtccttggcgccggcataatctcctgaatcccgggtttgtggggccgctggtaaacatccacacgggagacaccttctacttccccaacttccgcatcgtatccctatggcttcccgggctgccttcgctgtcctacccacgccgcgacaacgtgtgctccctgtcctggccgtcggcgcgactcggaccgatg

SEQ ID NO: 12642 - DNA, 203 bp, synthetic construct
  source 1..203: mol_type = other DNA
ggcgcgccagtccttagcaactgcataatctcctgaatcccgggtttgtggggccgctggtaaacatccacacgggagacaccttctacttccccaacttccgcgcgtccggggcgcagcttcccgggctgccttcgctgtcctacccacgccgcgacaacgtgacacgattgtcctggccgtcggcgcgactcggaccgatg

SEQ ID NO: 12643 - DNA, 203 bp, synthetic construct
  source 1..203: mol_type = other DNA
ggcgcgccagtcctaatccgaggcataatctcctgaatcccgggtttgtggggccgctggtaaacatccacacgggagacaccttctacttccccaacttccgcgcgtccggggcgcagcttcccgggctgccttcgctgtcctacccacgccgcgacaacgtgtgctccctgtcctggccgtcggcgcgactcggaccgatg

SEQ ID NO: 12644 - DNA, 203 bp, synthetic construct
  source 1..203: mol_type = other DNA
ggcgcgccagtcctcggcagcggcataatctcctgaatcccgggtttgtggggccgctggtaaacatccacacgggagacaccttctacttccccaacttccgcgcgtccggggcgcagcttcccgggctgccttcgctgtcctacccacgccgcgacaacgtgtgctccctgtgtgacgatcgtcttcgactcggaccgatg

SEQ ID NO: 12645 - DNA, 203 bp, synthetic construct
  source 1..203: mol_type = other DNA
ggcgcgccagtcctgttcatacgcataatctcctgaatcccgggtttgtggggccgctggtaaacatccacacgggagacaccttctacttccccaacttccgcgcgtccggggcgcagcttcccgggctgccttcgctgtcctactgcatggcgttgtgcgtgtgctccctgtcctggccgtcggcgcgactcggaccgatg

SEQ ID NO: 12646 - DNA, 203 bp, synthetic construct
  source 1..203: mol_type = other DNA
ggcgcgccagtcctcaaccaccgcataatctcctgaatcccgggtttgtggggccgctggtaaacatccacacgggagacaccttctacttccccaacttccgcgcgtccggggcgcagcttcccgggctgcggcaagctaagctgccacgccgcgacaacgtgtgctccctgtcctggccgtcggcgcgactcggaccgatg

SEQ ID NO: 12647 - DNA, 203 bp, synthetic construct
  source 1..203: mol_type = other DNA
ggcgcgccagtcctggacgttcgcatacccaataaaagattattatatgtagccgtgtaccataataaaatacattgcataccctcttttaataaaaaatattgcatacgttgacgaaacaaattttcgttgcatacccaataaaagattattatattgcataccttttcttgccataccatttagcccgactcggaccgatg

SEQ ID NO: 12648 - DNA, 203 bp, synthetic construct
  source 1..203: mol_type = other DNA
ggcgcgccagtcctagtggccagcatacccaataaaagattattatattgcatacccgtttttaataaaatacattcgggcgagcggacaaataaaaaatattgcatacgttgacgaaacaaattttcgttgcatacccaataaaagattattatattgcataccttttcttgccataccatttagcccgactcggaccgatg

SEQ ID NO: 12649 - DNA, 203 bp, synthetic construct
  source 1..203: mol_type = other DNA
ggcgcgccagtccttcatcatcgcatgttacagaaaagcaccggttacccagcttggagacaacatgtggttcttgacaactctgctcctttgggttccagttgatgggcaagtggacaccacaaaggcagtgatcactttgcagcctccatgggtcagcgtgttccaagaggaaaccgtaaccttgccgactcggaccgatg

SEQ ID NO: 12650 - DNA, 203 bp, synthetic construct
  source 1..203: mol_type = other DNA
ggcgcgccagtcctccttagaggcatgttacagagaattgataatatgccagcttggagacaacatgtggttcttgacaactctgctcctttggggctggctactactgcaggtctccagcagagtcttcatggaaggagaacctctggccttgaggtgtcatgcgtggaaggataagctggtgtacacgactcggaccgatg

SEQ ID NO: 12651 - DNA, 203 bp, synthetic construct
  source 1..203: mol_type = other DNA
ggcgcgccagtcctcactttccgcatgttacagatttcacctggtgaaccagcttggagacaacatgtgggaacgccgctgtctgctcctttggggctggctactactgcaggtctccagcagagtcttcatggaaggagaacctctggccttgaggtgtcatgcgtggaaggataagctggtgtacacgactcggaccgatg

SEQ ID NO: 12652 - DNA, 203 bp, synthetic construct
  source 1..203: mol_type = other DNA
ggcgcgccagtcctgagtgacggcatgttacagatttcacctggtgaaccagcttggagacaacatgtggttcttgacaactctgctcctttggggctggctactactgcaggtctccagcagagtcttcatggaaggagaacctctggccttgaggtgtcatgcgtggaaggataagctggtgtacacgactcggaccgatg

SEQ ID NO: 12653 - DNA, 203 bp, synthetic construct
  source 1..203: mol_type = other DNA
ggcgcgccagtccttggccctagcatgttacagatttcactactcccaagtcgaactctcgtacatgtggttcttgacaactctgctcctttgggttccagttgatgggcaagtggacaccacaaaggcagtgatcactttgcagcctccatgggtcagcgtgttccaagaggaaaccgtaaccttgccgactcggaccgatg

SEQ ID NO: 12654 - DNA, 203 bp, synthetic construct
  source 1..203: mol_type = other DNA
ggcgcgccagtcctggcctatggcatgttacagatttcactactcccaccagcttggagacaacatgtggcaaacacgtcatctgctcctttgggttccagttgatgggcaagtggacaccacaaaggcagtgatcactttgcagcctccatgggtcagcgtgttccaagaggaaaccgtaaccttgccgactcggaccgatg

SEQ ID NO: 12655 - DNA, 203 bp, synthetic construct
  source 1..203: mol_type = other DNA
ggcgcgccagtcctctggaagggcatgttacagatttcactactcccaccagcttggagacaacatgtggttcttgacaactctgctcctacaacgagggtagcatgggcaagtggacaccacaaaggcagtgatcactttgcagcctccatgggtcagcgtgttccaagaggaaaccgtaaccttgccgactcggaccgatg

SEQ ID NO: 12656 - DNA, 203 bp, synthetic construct
  source 1..203: mol_type = other DNA
ggcgcgccagtccttcgggcttgcatgttacagatttcactactcccaccagcttggagacaacatgtggttcttgacaactctgctcctttggggctggctactactgcaggtctccagcagagtcttcatggaaggagaacctctggccttgaggtgtcatgcgtggaaggaagctagaaccgcttcgactcggaccgatg

SEQ ID NO: 12657 - DNA, 203 bp, synthetic construct
  source 1..203: mol_type = other DNA
ggcgcgccagtcctaggatgccgcatgttacagatttcactactcccaccagcttggagacaacatgtggttcttgacaactctgctcctttggggctggctactactgcaggtctcccatgttcagcattgggaaggagaacctctggccttgaggtgtcatgcgtggaaggataagctggtgtacacgactcggaccgatg

SEQ ID NO: 12658 - DNA, 203 bp, synthetic construct
  source 1..203: mol_type = other DNA
ggcgcgccagtcctggagatcggcatgttacagatttcactactcccaccagcttggagacaacatgtggttcttgacaactctgctcctttgggttccagttgatgggcaagtggacaccacaaaggcagtttctgggggcgccgctccatgggtcagcgtgttccaagaggaaaccgtaaccttgccgactcggaccgatg

SEQ ID NO: 12659 - DNA, 203 bp, synthetic construct
  source 1..203: mol_type = other DNA
ggcgcgccagtcctagaggtccgcatgttacagatttcactactcccaccagcttggagacaacatgtggttcttgctcgggaccaatgcttggggctggctactactgcaggtctccagcagagtcttcatggaaggagaacctctggccttgaggtgtcatgcgtggaaggataagctggtgtacacgactcggaccgatg

SEQ ID NO: 12660 - DNA, 203 bp, synthetic construct
  source 1..203: mol_type = other DNA
ggcgcgccagtcctggcgcattgcatgttacagatttcactactcccaccagcttggagacacggctccccgggacacaactctgctcctttggggctggctactactgcaggtctccagcagagtcttcatggaaggagaacctctggccttgaggtgtcatgcgtggaaggataagctggtgtacacgactcggaccgatg

SEQ ID NO: 12661 - DNA, 203 bp, synthetic construct
  source 1..203: mol_type = other DNA
ggcgcgccagtccttcggtagggcatgttacagatttcactactcccaccagcttggagacatgtccacaaggcccacaactctgctcctttgggttccagttgatgggcaagtggacaccacaaaggcagtgatcactttgcagcctccatgggtcagcgtgttccaagaggaaaccgtaaccttgccgactcggaccgatg

SEQ ID NO: 12662 - DNA, 203 bp, synthetic construct
  source 1..203: mol_type = other DNA
ggcgcgccagtcctcgttgtgtgcatgttacagatttcactactcccaggtataaactatggacatgtggttcttgacaactctgctcctttggggctggctactactgcaggtctccagcagagtcttcatggaaggagaacctctggccttgaggtgtcatgcgtggaaggataagctggtgtacacgactcggaccgatg

SEQ ID NO: 12663 - DNA, 203 bp, synthetic construct
  source 1..203: mol_type = other DNA
ggcgcgccagtccttagaaggggcattctgtgtttgacgcatgcgcatagctaaccgcacccggttcagctcgcctttcttggccagaggcgccggttggactcacgggcggggcatgatggtggtgggtacgggcacctcgctggcgctctcctccctcctgtccctgctgctctttgctgggatgccgactcggaccgatg

SEQ ID NO: 12664 - DNA, 203 bp, synthetic construct
  source 1..203: mol_type = other DNA
ggcgcgccagtccttcggcccagcattgcccccaaatgaggaggggggtgggcattgtccccgggtcttccaacggactgggcgttgctcccggacactgaggactggccccggggtctcgctcaccttcagcagcgtccaccgcctgccacagagcgttcgatcgctcgctgcctgagctcctggtgcgactcggaccgatg

SEQ ID NO: 12665 - DNA, 203 bp, synthetic construct
  source 1..203: mol_type = other DNA
ggcgcgccagtcctgaattaatgcattgcccccagtctcccccaaatttgggcattgtccccgggtcttccaacggactgggcgttgctcccggacactgaggactggccccggggtctcgctcaccttcagcagcgtccaccgccgcttgatccctaagcgatcgctcgctgcctgagctcctggtgcgactcggaccgatg

SEQ ID NO: 12666 - DNA, 203 bp, synthetic construct
  source 1..203: mol_type = other DNA
ggcgcgccagtcctgcgggatcgcattgcccccagtctcccccaaatttgggcattgtccccgggtcttccaacggactgggcgttgctcccggacactgaggactggccccggggtctcgctcaccttcagcagcgtccaccgcctgccacagagcgttcgatcgctcgctgctgtgtagaaaatcacgactcggaccgatg

SEQ ID NO: 12667 - DNA, 203 bp, synthetic construct
  source 1..203: mol_type = other DNA
ggcgcgccagtcctttcattaagccaaggaacttcagtgctgtgaactcacaactctaaggacgtggtttttcactcagtctccaggtgctgttactcaactcagtcctaggaacgtcgggtcctgggaaggagcccaagcgctcccagccagcttccaggcgctaagaaaccccggtgcttcccatccgactcggaccgatg

SEQ ID NO: 12668 - DNA, 203 bp, synthetic construct
  source 1..203: mol_type = other DNA
ggcgcgccagtcctaacgttcagccaaggaacttcagtgctgtgaactcacaactctaaggagccctccaaagttccagtctccaggtgctgttactcaactcagtcctaggaacgtcgggtcctgggaaggagcccaagcgctcccagccagcttccaggcgctaagaaacccttcattccgaaggtcgactcggaccgatg

SEQ ID NO: 12669 - DNA, 203 bp, synthetic construct
  source 1..203: mol_type = other DNA
ggcgcgccagtcctgctagtatgccaaggaacttcagtgctgtgaactcacaactctaaggagccctccaaagttccagtctccaggtgctgttactcaactcagtcctaggaacgtcgggtcctgggaaggcaggattttttggacagccagcttccaggcgctaagaaaccccggtgcttcccatccgactcggaccgatg

SEQ ID NO: 12670 - DNA, 203 bp, synthetic construct
  source 1..203: mol_type = other DNA
ggcgcgccagtcctaagcctcggccacccctcctagtctagtcgtgtaggtccgacccgcaagcaagggggcgggtccggctttgaaaagccggcgggtcgggccttgaggtggaaggcgggaaaatggcggattcctcggggcgaggcgctgggaagcctgcaaccggccccacaaattctagcagtcgactcggaccgatg

SEQ ID NO: 12671 - DNA, 203 bp, synthetic construct
  source 1..203: mol_type = other DNA
ggcgcgccagtcctgttggcatgccacccctcctgcgtctccacaaatggtccgacccgcaagcaagggggcgggtccggctttgaaaagccggcgggtcgggccttgaggtggaaggcgggaaaatggcggattcctcggggcgaggcgctgggaagccgtagcttactagttcaaattctagcagtcgactcggaccgatg

SEQ ID NO: 12672 - DNA, 203 bp, synthetic construct
  source 1..203: mol_type = other DNA
ggcgcgccagtccttctggagcgccacccctcctgcgtctccacaaatggtccgacccgcaagcaagggggcgggtccggctttgaaaagccggcgggtcgggccttgaggtggaaggcgggaaaatggcggattcctcggggcgaggcgctgggaagcctgcaaccggccccaacctaatacaagtgcgactcggaccgatg

SEQ ID NO: 12673 - DNA, 203 bp, synthetic construct
  source 1..203: mol_type = other DNA
ggcgcgccagtccttccgcgaagccacccctcctgcgtctccacaaatggtccgacccgcaagcaagggggcgggtccggctttgaaaagccggcgggtcgggctggaccaccccttacgggaaaatggcggattcctcggggcgaggcgctgggaagcctgcaaccggccccacaaattctagcagtcgactcggaccgatg

SEQ ID NO: 12674 - DNA, 203 bp, synthetic construct
  source 1..203: mol_type = other DNA
ggcgcgccagtcctacagccaagccacccctcctgcgtctccacaaatggtccgacccgcaagcaagggggcgggtccggctttgaaaagggcaataagtaatacttgaggtggaaggcgggaaaatggcggattcctcggggcgaggcgctgggaagcctgcaaccggccccacaaattctagcagtcgactcggaccgatg

SEQ ID NO: 12675 - DNA, 203 bp, synthetic construct
  source 1..203: mol_type = other DNA
ggcgcgccagtcctcccttgcagccacctccggtcggcgactgcggcgggctcgacgaggcgagccttcttcgcttggcgggaagacggccgggtgcgccttggggtttagtggcggcttctccatgggtccagccagccgcttccctgtgctgtgagtgtttccaccactccaggagacagcattcacgactcggaccgatg

SEQ ID NO: 12676 - DNA, 203 bp, synthetic construct
  source 1..203: mol_type = other DNA
ggcgcgccagtcctcttaccgtgccacctccggtcggcgactgcggcgggctcgacgaggcggctgacggggcggcggcgggaagacggcactagcatggcgttggtttagtggcggcttctccatgggtccagccagccgcttccctgtgctgtgagtgtttccaccactccaggagacagcattcacgactcggaccgatg

SEQ ID NO: 12677 - DNA, 203 bp, synthetic construct
  source 1..203: mol_type = other DNA
ggcgcgccagtcctcctttcacgccacctccggtcggcgactgcggcgggctcgacgaggcggctgacggggcggcggcgggaagacggccgggtgcgccttggggtttagtggcggcttctccatgggtccagccagccgcttccctgtgctgtgagtgtttccaccactccaggagacagcattcacgactcggaccgatg

SEQ ID NO: 12678 - DNA, 203 bp, synthetic construct
  source 1..203: mol_type = other DNA
ggcgcgccagtcctaacgatttgccacctccggtcggcgactgcggcgggctcgacgaggcggctgacggggcggcggcgggaagacggccgggtgcgccttggggtttagtggcggcttctccatgggtccagccagccgcttccgcagcggcgtttgctttccaccactccaggagacagcattcacgactcggaccgatg

SEQ ID NO: 12679 - DNA, 203 bp, synthetic construct
  source 1..203: mol_type = other DNA
ggcgcgccagtcctaccatcaagccacctccggtcggcgactgcggcgtaagtctacctaatgctgacggggcggcggcgggaagacggccgggtgcgccttggggtttagtggcggcttctccatgggtccagccagccgcttccctgtgctgtgagtgtttccaccactccaggagacagcattcacgactcggaccgatg

SEQ ID NO: 12680 - DNA, 203 bp, synthetic construct
  source 1..203: mol_type = other DNA
ggcgcgccagtcctgaatcctcgccaggaacgattactattcttggttctctggaattactcagtttcaaaagggaaaggagtttgagtttgtagaaggacaaggtgtgcctattgcaccaggagtcccagctactgaagctaaggggtactggtacagacacaacagacgttcttttaaaacagccgcgactcggaccgatg

SEQ ID NO: 12681 - DNA, 203 bp, synthetic construct
  source 1..203: mol_type = other DNA
ggcgcgccagtcctaatcgtgtgccaggacgaccgggtcctttcttggataaacccgctcaatgcctggagatttgggcgtgcccccgcaagactgctagccgagtagtgttgggtcgcgaaaggccttgtggtactgcctgatagggtgcttgcgagtgccccgggaggtctccggctgttaaaggacgactcggaccgatg

SEQ ID NO: 12682 - DNA, 203 bp, synthetic construct
  source 1..203: mol_type = other DNA
ggcgcgccagtcctggagtagtgccaggacgaccgggtcctttcttggataaacccgctcaatgcctggagatttgggcgtgcccccgcatccacttattaaaggtagtgttgggtcgcgaaaggccttgtggtactgcctgatagggtgcttgcgagtgccccgggaggtctcgtagaccgtgcacccgactcggaccgatg

SEQ ID NO: 12683 - DNA, 203 bp, synthetic construct
  source 1..203: mol_type = other DNA
ggcgcgccagtcctctgtgaaggccaggacgaccgggtcctttcttggtccgcggtcaggcgtgcctggagatttgggcgtgcccccgcaagactgctagccgagtagtgttgggtcgcgaaaggccttgtggtactgcctgatagggtgcttgcgagtgccccgggaggtctcgtagaccgtgcacccgactcggaccgatg

SEQ ID NO: 12684 - DNA, 203 bp, synthetic construct
  source 1..203: mol_type = other DNA
ggcgcgccagtcctgcagtcgagccatggtaagcatatgaattgaatcaagcgcggacgccatggtaagcgcggacgccatggtaagcgcggacgccatggtaagcgcggacgccatggtaagcgcggacgccatggtaagcgcggacgccatggtaagcgcggacgccatgcacacggaccctgactcgactcggaccgatg

SEQ ID NO: 12685 - DNA, 203 bp, synthetic construct
  source 1..203: mol_type = other DNA
ggcgcgccagtccttgaggtgggccatggtaagcgcggacgccatggtaagcgcggacgccatggtaagcgcggacgccatggtaagcgcggacgccatggtaagcgcggacgccatgcattcactattgaacatggtaagcgcggacgccatggtaagcgcggacgccatgcacacggaccctgactcgactcggaccgatg

SEQ ID NO: 12686 - DNA, 203 bp, synthetic construct
  source 1..203: mol_type = other DNA
ggcgcgccagtcctttgcgctcgccatggtaagcgcggacgccatggtaagcgcggacgccatggtaagcgcggacgccatggtaagcgcggacgccatggtaagcgcggacgccatggtaagcgcggacgccatggtaagcgcggtaaagcctagggatgcggacgccatgcacacggaccctgactcgactcggaccgatg

SEQ ID NO: 12687 - DNA, 203 bp, synthetic construct
  source 1..203: mol_type = other DNA
ggcgcgccagtcctgtcctacagccatggtaagcgcggacgccatggtaagcgcggacgccatggtaagcgcggacgccatggtaagcgcggacgccatggtaagcgcggacgccatggtaagcgcggacgctgatcattcaagcaacgccatggtaagcgcggacgccatgcacacggaccctgactcgactcggaccgatg

SEQ ID NO: 12688 - DNA, 203 bp, synthetic construct
  source 1..203: mol_type = other DNA
ggcgcgccagtcctaagtgctcgcccacgtacggtccacgtcgcccttcaatgtctctcttgaccaataggcgtagccggcgagttgacaaggaccagtgggggccgggcgggaggggacgcctgttgtgaagctgcccttcccggggaggcgggaaatgcatggggccacccagctccgcggcggcccgactcggaccgatg

SEQ ID NO: 12689 - DNA, 203 bp, synthetic construct
  source 1..203: mol_type = other DNA
ggcgcgccagtcctacatggaggcccacgtacggtccacgtcgcccttcaatgtctctcttgaccaataggcgtagccggcgagttgacaaggaccagtgggggccgggcgggagggggaaggacccccaccgctgcccttcccggggaggcgggaaatgcatggggccacccagctccgcggcggcccgactcggaccgatg

SEQ ID NO: 12690 - DNA, 203 bp, synthetic construct
  source 1..203: mol_type = other DNA
ggcgcgccagtcctgtgagtacgcccacgtacggtccacgtcgcccttcaatgtctctcttgaccaataggcgtagccggcgagttgacaaggaccagtggggggttacgatattaacgaaggacccccaccgctgcccttcccggggaggcgggaaatgcatggggccacccagctccgcggcggcccgactcggaccgatg

SEQ ID NO: 12691 - DNA, 203 bp, synthetic construct
  source 1..203: mol_type = other DNA
ggcgcgccagtcctagctggatgcccacgtacggtccacgtcgcccttcaatgtctctcttgaccaataggcgtagccggcgagttgacacttgtattaattctccgggcgggagggggaaggacccccaccgctgcccttcccggggaggcgggaaatgcatggggccacccagctccgcggcggcccgactcggaccgatg

SEQ ID NO: 12692 - DNA, 203 bp, synthetic construct
  source 1..203: mol_type = other DNA
ggcgcgccagtcctcagggtgcgcccattccctgaggtaaggaaggggccttaacctctgctggtgaccagaagcctgcatttctgcattctgcttaattccctttccttagatttgaaagaagccaacactaaaccacaaatatacaacaaggccattttctcaaacgagagtcagcctttaacgaacgactcggaccgatg

SEQ ID NO: 12693 - DNA, 203 bp, synthetic construct
  source 1..203: mol_type = other DNA
ggcgcgccagtcctaacagagcgccccactgcgcatggcacgttgcgtactcccctcccagcaaccggtctggcggcggcgcggcagtaaaactgaggaggcggagccaagacggtcggggctgcttgctaactccaggaacaggtttaagtttttgaaaacaccagtaaggcgcacagtaggaactccgactcggaccgatg

SEQ ID NO: 12694 - DNA, 203 bp, synthetic construct
  source 1..203: mol_type = other DNA
ggcgcgccagtcctcttgcgttgccccactgcgcatggcacgttgcgtactcccctcccagcaaccggtctggcggcggcgcggcagtaacctgacaacttaccagccaagacggtcggggctgcttgctaactccaggaacaggtttaagtttttgaaactgaagtaggcctacacagtaggaactccgactcggaccgatg

SEQ ID NO: 12695 - DNA, 203 bp, synthetic construct
  source 1..203: mol_type = other DNA
ggcgcgccagtcctccgaacttgccccactgcgcatggcacgttgcgtactcccctcccagcaaccggtctggcggtctgtaacggactgaactgaggaggcggagccaagacggtcggggctgcttgctaactccaggaacaggtttaagtttttgaaactgaagtaggcctacacagtaggaactccgactcggaccgatg

SEQ ID NO: 12696 - DNA, 203 bp, synthetic construct
  source 1..203: mol_type = other DNA
ggcgcgccagtcctaatgagaagccccactgcgccatagtacaattcaactcccctcccagcaaccggtctggcggcggcgcggcagtaaaactgaggaggcggagccaagacggtcggggctgcttgctaactccaggaacaggtttaagtttttgaaactgaagtaggcctacacagtaggaactccgactcggaccgatg

SEQ ID NO: 12697 - DNA, 203 bp, synthetic construct
  source 1..203: mol_type = other DNA
ggcgcgccagtcctcacgctgggccccctggctggttcggtgtcttttactggtaacgcccatgctcccagggggccctgacgccctggggcacttttgctctgcacaggaccacgctggggtttgccatggtgacataaaggggtgtagaggaaggaaggagcaagaccagcctgtagactgtgccccgactcggaccgatg

SEQ ID NO: 12698 - DNA, 203 bp, synthetic construct
  source 1..203: mol_type = other DNA
ggcgcgccagtcctcgtcagtagccccctggctggttcggtgtcttttgacctgctgttgacgagagggttttccgcctgacgccctggggcacttttgctctgcacaggaccacgctggggtttgccatggtgacataaaggggtgtagaggaaggaaggagcaagaccagcctgtagactgtgccccgactcggaccgatg

SEQ ID NO: 12699 - DNA, 203 bp, synthetic construct
  source 1..203: mol_type = other DNA
ggcgcgccagtcctttaaggaggccccctggctggttcggtgtcttttgacctgctgttgactgctcccagggggccctgacgccctggggcacttttgctctgacggaagagtactcggggtttgccatggtgacataaaggggtgtagaggaaggaaggagcaagaccagcctgtagactgtgccccgactcggaccgatg

SEQ ID NO: 12700 - DNA, 203 bp, synthetic construct
  source 1..203: mol_type = other DNA
ggcgcgccagtcctttgggactgccccctggctggttcggtgtcttttgacctgctgttgactgctcccagggggccctgacgccctggggcacttttgctctgcacaggaccacgctggggtttgccatggtgacataaaggggtcactttcgtcacgagagcaagaccagcctgtagactgtgccccgactcggaccgatg

SEQ ID NO: 12701 - DNA, 203 bp, synthetic construct
  source 1..203: mol_type = other DNA
ggcgcgccagtcctgggtagaagccccctggctggttcggtgtcttttgacctgctgttgactgctcccagggggccctgacgccctggggcacttttgctctgcacaggaccacgctggggtttgccatggtgacataaaggggtgtagaggaaggaaggagcaagaccagcctgtagactgtgccccgactcggaccgatg

SEQ ID NO: 12702 - DNA, 203 bp, synthetic construct
  source 1..203: mol_type = other DNA
ggcgcgccagtcctaagatcacgccccgacccgtgggtcccggccaccagcgccccagccccgaggctcagaagcggcaggcggaggcggggtccgggcgctatggccatgcccggcgggtctcacgcggctgcccctcgccccgcgcgccttcggtaggaccatgtgctttatcagctggcccggcccgactcggaccgatg

SEQ ID NO: 12703 - DNA, 203 bp, synthetic construct
  source 1..203: mol_type = other DNA
ggcgcgccagtcctaggatagagccccgcctcctgcaggcggcccggccaccaacagcatgtcggtgcatggtggggcggtctccttcggcaaccccggccgaacggccacccagaggctgtgctgagctggcgcagcggcagcagcatgagccggaccctcgcatcggccgtgcccctgtcgagtcccgactcggaccgatg

SEQ ID NO: 12704 - DNA, 203 bp, synthetic construct
  source 1..203: mol_type = other DNA
ggcgcgccagtcctatatgaacgccccgcctcctgcaggcggcccggcgcggtgtttacccgcggtgcatggtggggcggtctccttcggcaaccccggccgaacggccacccagaggctgtgctgagctggcgcagcggcagcagcatgagccggaccctcgcatcggccgtgagaaaagacctcgacgactcggaccgatg

SEQ ID NO: 12705 - DNA, 203 bp, synthetic construct
  source 1..203: mol_type = other DNA
ggcgcgccagtcctgccgtcctgcccgactcgccctcagaaactcactcccccatcgacgcaactttctcgtcgtgccccacaaaagtaaagcttggggacctggggggagccggaagtatcgcttcgagatccccaaatactatcggggaaacggaagtggccgtcggtggcagagacctgtcggcccgactcggaccgatg

SEQ ID NO: 12706 - DNA, 203 bp, synthetic construct
  source 1..203: mol_type = other DNA
ggcgcgccagtcctcagtacaggcccgactcgccctcagaaactcactgtttggggctgcggactttctcgtcgtgccccacaaaagtaaagcttggggacctgattatcaattaggttatcgcttcgagatccccaaatactatcggggaaacggaagtggccgtcggtggcagagacctgtcggcccgactcggaccgatg

SEQ ID NO: 12707 - DNA, 203 bp, synthetic construct
  source 1..203: mol_type = other DNA
ggcgcgccagtcctttggaatcgcccgactcgccctcagaaactcactgtttggggctgcggactttctcgtcgtgccccacaaaagtaaagcttggggacctggggggagccggaagtatcgcttcgagatccccaaatactatcggggaaacggaagtggccgtcggtggcagagacctgtcggcccgactcggaccgatg

SEQ ID NO: 12708 - DNA, 203 bp, synthetic construct
  source 1..203: mol_type = other DNA
ggcgcgccagtcctacggttatgcccgactcgccctcagaaactcactgtttggggctgcggcgaccgctaggcctccccacaaaagtaaagcttggggacctggggggagccggaagtatcgcttcgagatccccaaatactatcggggaaacggaagtggccgtcggtggcagagacctgtcggcccgactcggaccgatg

SEQ ID NO: 12709 - DNA, 203 bp, synthetic construct
  source 1..203: mol_type = other DNA
ggcgcgccagtccttgctcaaagcccgactcgccggtcttgtggtctagtttggggctgcggactttctcgtcgtgccccacaaaagtaaagcttggggacctggggggagccggaagtatcgcttcgagatccccaaatactatcggggaaacggaagtggccgtcggtggcagagacctgtcggcccgactcggaccgatg

SEQ ID NO: 12710 - DNA, 203 bp, synthetic construct
  source 1..203: mol_type = other DNA
ggcgcgccagtccttgaatacggcccggaaccacaactatagttctcagcccgaggcggcggggctcgcgcgggtggagccgcctcggcgttcgagcggggtgggggctgcccggttgagatttcccggcgggtcccggcctctgcgtgcacgcgcctgcgtgctcgcgctcgcggttctggcgctgccgactcggaccgatg

SEQ ID NO: 12711 - DNA, 203 bp, synthetic construct
  source 1..203: mol_type = other DNA
ggcgcgccagtccttcaactgggcccggaaccacgtgatgcaggaggtctaaataaacctttggctcgcgcgggtggagccgcctcggcgttcgagcggggtgggggctgcccggttgagatttcccggcgggtcccggcctctgcgtgcacgcgcctgcgtgctcgcgctcgcggttctggcgctgccgactcggaccgatg

SEQ ID NO: 12712 - DNA, 203 bp, synthetic construct
  source 1..203: mol_type = other DNA
ggcgcgccagtcctaaccgtaagcccggaaccacgtgatgcaggaggtgcccgaggcggcggggctcgcgcgggtggagccgcctcggcgcaatgcaacaccccgggctgcccggttgagatttcccggcgggtcccggcctctgcgtgcacgcgcctgcgtgctcgcgctcgcggttctggcgctgccgactcggaccgatg

SEQ ID NO: 12713 - DNA, 203 bp, synthetic construct
  source 1..203: mol_type = other DNA
ggcgcgccagtcctcgtcttgcgcccggaaccacgtgatgcaggaggtgcccgaggcggcggggctcgcgcgggtggagccgcctcggcgttcgagcggggtgggggctgcccggttgagatttcccggcgggtcccggcctctgcactacgcatagctagtgctcgcgctcgcggttctggcgctgccgactcggaccgatg

SEQ ID NO: 12714 - DNA, 203 bp, synthetic construct
  source 1..203: mol_type = other DNA
ggcgcgccagtcctccaaccaggcccggaaccacgtgatgcaggaggtgcccgaggcggcggggctcgcgcgggtggagccgcctcggcgttcgagcggggtgggggctgcccggttgagatttcccggcgggtcccggcctctgcgtgcacgcgcctgcagttgtcattgactggttctggcgctgccgactcggaccgatg

SEQ ID NO: 12715 - DNA, 203 bp, synthetic construct
  source 1..203: mol_type = other DNA
ggcgcgccagtcctaggccaaggcccggaaccacgtgatgcaggaggtgcccgaggcggcggggctcgcgcgggtggagccgcctcggcgttcgagcggggtgggggctgcccggttgagatttcccggcgggtcccggcctctgcgtgcacgcgcctgcgtgctcgcgctcgcggttctggcgctgccgactcggaccgatg

SEQ ID NO: 12716 - DNA, 203 bp, synthetic construct
  source 1..203: mol_type = other DNA
ggcgcgccagtcctgcgttctggcccggaaccacgtgatgcaggaggtgcccgaggcggcggggctcgcgcgggtggagccgcctcggcgttcgagcggggtggttatgtgagttcccagatttcccggcgggtcccggcctctgcgtgcacgcgcctgcgtgctcgcgctcgcggttctggcgctgccgactcggaccgatg

SEQ ID NO: 12717 - DNA, 203 bp, synthetic construct
  source 1..203: mol_type = other DNA
ggcgcgccagtcctgtcgatccgccctcacgctcagcaccccagcctgcctgcccgcccgcctgccctgccgctgcatatgacgggcttgtgtagcgcgggagcttctcgcagcgccccgggccttctcgtggtaccctgcctgctgcctttgcccccgcactgactgcccggctccagcagccatggcgactcggaccgatg

SEQ ID NO: 12718 - DNA, 203 bp, synthetic construct
  source 1..203: mol_type = other DNA
ggcgcgccagtcctggcccgctgccctcacgctcagcaccccagcctgcctgcccgcccgcctgccctgccgctgcccgctgtcacaccctgtagcgcgggagcgctctaatcaagggcgggccttctcgtggtaccctgcctgctgcctttgcccccgcactgactgcccggctccagcagccatggcgactcggaccgatg

SEQ ID NO: 12719 - DNA, 203 bp, synthetic construct
  source 1..203: mol_type = other DNA
ggcgcgccagtcctccagtatggccctcacgctcagcaccccagcctgcctgcccgcccgcctgccctgccgctgcccgctgtcacaccctgtagcgcgggagcttctcgcagcgccccgggccttctcgtggtaccctgcctgctgcctttgcccccgcactgactgcccggctccagcagccatggcgactcggaccgatg

SEQ ID NO: 12720 - DNA, 203 bp, synthetic construct
  source 1..203: mol_type = other DNA
ggcgcgccagtcctcggccgttgccctcacgctcagcaccccagcctgcctgcccgcccgcctgccctgccgctgcccgctgtcacaccctgtagcgcgggagcttctcgcagcgcccttaatgcatataatgtaccctgcctgctgcctttgcccccgcactgactgcccggctccagcagccatggcgactcggaccgatg

SEQ ID NO: 12721 - DNA, 203 bp, synthetic construct
  source 1..203: mol_type = other DNA
ggcgcgccagtccttccaaggcgccctcacgctcagcaccccagcctgtacctttcgtgtggtgccctgccgctgcccgctgtcacaccctgtagcgcgggagcttctcgcagcgccccgggccttctcgtggtaccctgcctgctgcctttgcccccgcactgactgcccggctccagcagccatggcgactcggaccgatg

SEQ ID NO: 12722 - DNA, 203 bp, synthetic construct
  source 1..203: mol_type = other DNA
ggcgcgccagtcctgttatccagccctcacgctctcgcttgagtgagccctgcccgcccgcctgccctgccgctgcccgctgtcacaccctgtagcgcgggagcttctcgcagcgccccgggccttctcgtggtaccctgcctgctgcctttgcccccgcactgactgcccggctccagcagccatggcgactcggaccgatg

SEQ ID NO: 12723 - DNA, 203 bp, synthetic construct
  source 1..203: mol_type = other DNA
ggcgcgccagtcctgagcgcacgccgattgatgtggagcaggtggtcacaaaccagtgattggcctgtcgtaacgcgcaagtccgtggcggaaccgactactttgggtgtccgtgtttccttttattttattgtggctgcttatggtgacaatcacagattgttatcataaagcgaattggattggcccgactcggaccgatg

SEQ ID NO: 12724 - DNA, 203 bp, synthetic construct
  source 1..203: mol_type = other DNA
ggcgcgccagtcctccaggctagccgcagtcagactggtatcagctcgcccctctgagtcaggaaacattttcagacctatggaaactacttcctgaaaacaacgttctgtcccccttgccgtcccaagcaatggatgatttgatgctgtccccggacgatattgaacaatggttcactgaagacccacgactcggaccgatg

SEQ ID NO: 12725 - DNA, 203 bp, synthetic construct
  source 1..203: mol_type = other DNA
ggcgcgccagtcctacgtcagggccgcagtcagatcctagcgtcgagccccctctgagtcaggaaacattttcagaatggaaccgtagttttcctgaaaacaacgttctgtcccccttgccgtcccaagcaatggatgatttgatgctgtccccggacgatattgaacaatggttcactgaagacccacgactcggaccgatg

SEQ ID NO: 12726 - DNA, 203 bp, synthetic construct
  source 1..203: mol_type = other DNA
ggcgcgccagtcctgctgggcggccgcagtcagatcctagcgtcgagccccctctgagtcaggaaacattttcagacctatggaaactacgcaggtttgcggcggttctgtcccccttgccgtcccaagcaatggatgatttgatgctgtccccggacgatattgaacaatggttcactgaagacccacgactcggaccgatg

SEQ ID NO: 12727 - DNA, 203 bp, synthetic construct
  source 1..203: mol_type = other DNA
ggcgcgccagtcctcgtggaaggccgcagtcagatcctagcgtcgagccccctctgagtcaggaaacattttcagacctatggaaactacttcctgaaaacaacgttctgtcccccttcggaataaggaaggtggatgatttgatgctgtccccggacgatattgaacaatggttcactgaagacccacgactcggaccgatg

SEQ ID NO: 12728 - DNA, 203 bp, synthetic construct
  source 1..203: mol_type = other DNA
ggcgcgccagtcctagcttcccgccgcagtcagatcctagcgtcgagccccctctgagtcaggaaacattttcagacctatggaaactacttcctgaaaacaacgttctgtcccccttgccgtcccaagcaatggatgatttgatgctgtccccggacgactaactgaccgttctcactgaagacccacgactcggaccgatg

SEQ ID NO: 12729 - DNA, 203 bp, synthetic construct
  source 1..203: mol_type = other DNA
ggcgcgccagtcctcagattaggccgcagtcagatcctagcgtcgagccccctctgagtcaggaaacattttcagacctatggaaactacttcctgaaaacaacgttctgtcccccttgccgtcccaagcaatggatgatttgatgctgtccccggacgatattgaacaatggtgagggccgtcaagccgactcggaccgatg

SEQ ID NO: 12730 - DNA, 203 bp, synthetic construct
  source 1..203: mol_type = other DNA
ggcgcgccagtcctgagtaaacgccgcagtcagatcctagcgtcgagccccctctgagtcagtctgaggaaatgttcctatggaaactacttcctgaaaacaacgttctgtcccccttgccgtcccaagcaatggatgatttgatgctgtccccggacgatattgaacaatggttcactgaagacccacgactcggaccgatg

SEQ ID NO: 12731 - DNA, 203 bp, synthetic construct
  source 1..203: mol_type = other DNA
ggcgcgccagtccttcgtagccgccgcggcagccgaagcgcagcgagagaacgcgccaccgcggggcccgggtgcaatagagatttggtacgccacctgcgcgcagcccgaggtgagcagtgagcggcgagcgggagggcagcgaggcgttcgcgggccccctcctgctgcccgggcccggcccgctccgactcggaccgatg

SEQ ID NO: 12732 - DNA, 203 bp, synthetic construct
  source 1..203: mol_type = other DNA
ggcgcgccagtccttagtgaatgccgcggcagccgaagcgcagcgagagaacgcgccaccgcggggcccgggtgcagctagcgaccctctcgccacctgcgcgcagcccgaggtgagcagtgagcggcgagccttccctgccgtcagcgttcgcgggccccctcctgctgcccgggcccggcccgctccgactcggaccgatg

SEQ ID NO: 12733 - DNA, 203 bp, synthetic construct
  source 1..203: mol_type = other DNA
ggcgcgccagtcctctaaatgtgccgcggggggtcaggtcagcttctaggcgtgcgctcccgacatgccccgccgcgcgccattaaccgccagatttgaatcgcgggacccgttggcagaggtggcggcggcggcatgggtgccccgacgttgccccctgcctggcagccctttctcaaggaccaccgcgactcggaccgatg

SEQ ID NO: 12734 - DNA, 203 bp, synthetic construct
  source 1..203: mol_type = other DNA
ggcgcgccagtcctccagtggtgccgcggggggtggaccgcctaagagggcgtgcgctcccgacatgccccgccgcgcgccattaaccgccagatttgaatcgcgggacccgttggcagaggtggcggcggcggcatgggtgccccgacgttgccccctgcctggcagccctttctcaaggaccaccgcgactcggaccgatg

SEQ ID NO: 12735 - DNA, 203 bp, synthetic construct
  source 1..203: mol_type = other DNA
ggcgcgccagtccttatccatggccgcggggggtggaccgcctaagagggcgtgcgctcccgacatgccccgccgcgcgccattaaccgccagatttgaatcgcgggacccgttggcagaggtggcggcggcggcatgggtgccccgacgttgccccctgcctggcagcccttttagtgcttaatgaccgactcggaccgatg

SEQ ID NO: 12736 - DNA, 203 bp, synthetic construct
  source 1..203: mol_type = other DNA
ggcgcgccagtccttaacacgtgccgcggggggtggaccgcctaagagggcgtgcgctcccgacatgccccgccgcgcgccattaaccgctgaccgattcagttgggacccgttggcagaggtggcggcggcggcatgggtgccccgacgttgccccctgcctggcagccctttctcaaggaccaccgcgactcggaccgatg

SEQ ID NO: 12737 - DNA, 203 bp, synthetic construct
  source 1..203: mol_type = other DNA
ggcgcgccagtcctcttggtacgccgcggggggtggaccgcctaagagggcgtgcgctcccgacatgccccgcggcctcagggctgtttgcagatttgaatcgcgggacccgttggcagaggtggcggcggcggcatgggtgccccgacgttgccccctgcctggcagccctttctcaaggaccaccgcgactcggaccgatg

SEQ ID NO: 12738 - DNA, 203 bp, synthetic construct
  source 1..203: mol_type = other DNA
ggcgcgccagtcctccgcaggtgccgcggggggtggaccgcctaagagttttctaagatttcacatgccccgccgcgcgccattaaccgccagatttgaatcgcgggacccgttggcagaggtggcggcggcggcatgggtgccccgacgttgccccctgcctggcagccctttctcaaggaccaccgcgactcggaccgatg

SEQ ID NO: 12739 - DNA, 203 bp, synthetic construct
  source 1..203: mol_type = other DNA
ggcgcgccagtcctatatctaagccgctcaccccgccgttctcagcgcattatcgtagatgccgcgcgccctcccgccgccagtcccggcagcgccctcagttgtcctccgactcgccctcggccttccgcgccagccgcagccacagccgcaacgccacccgcagccacagccacagccacagcccccgactcggaccgatg

SEQ ID NO: 12740 - DNA, 203 bp, synthetic construct
  source 1..203: mol_type = other DNA
ggcgcgccagtccttacaggcagccgctcaccccgccgttctcagcgctgcccgaccccgctaatctattactgtaccgccagtcccggcagcgccctcagttgtcctccgactcgccctcggccttccgcgccagccgcagccacagccgcaacgccacccgcagccacagccacagccacagcccccgactcggaccgatg

SEQ ID NO: 12741 - DNA, 203 bp, synthetic construct
  source 1..203: mol_type = other DNA
ggcgcgccagtcctatttatgtgccgctcaccccgccgttctcagcgctgcccgaccccgctcgcgcgccctcccgccgccagtcccggcagcgccctcagttgattattataatattctcggccttccgcgccagccgcagccacagccgcaacgccacccgcagccacagccacagccacagcccccgactcggaccgatg

SEQ ID NO: 12742 - DNA, 203 bp, synthetic construct
  source 1..203: mol_type = other DNA
ggcgcgccagtccttagatttcgccgctcaccccgccgttctcagcgctgcccgaccccgctcgcgcgccctcccgccgccagtcccggcagcgccctcagttgtcctccgactcgccctcggccttccgcgccagccgcagccacagccgcaacgccacttagtttgttgttaacagccacagcccccgactcggaccgatg

SEQ ID NO: 12743 - DNA, 203 bp, synthetic construct
  source 1..203: mol_type = other DNA
ggcgcgccagtcctatagcgtagccgctcaccccgccgttctcagcgctgcccgaccccgctcgcgcgccctcccgccgccagtcccggcagcgccctcagttgtcctccgactcgccctcggccttccgcgccagccgcagccactaaacactgtttgtccgcagccacagccacagccacagcccccgactcggaccgatg

SEQ ID NO: 12744 - DNA, 203 bp, synthetic construct
  source 1..203: mol_type = other DNA
ggcgcgccagtcctcataacgcgccgctcaccccgccgttctcagcgctgcccgaccccgctcgcgcgccctcccgccgccagtcccggcagcgccctcagttgtcctccgactcgccctcggccttccgcgtattttcagcaactagccgcaacgccacccgcagccacagccacagccacagcccccgactcggaccgatg

SEQ ID NO: 12745 - DNA, 203 bp, synthetic construct
  source 1..203: mol_type = other DNA
ggcgcgccagtcctgtcgcagcgccgctcaccccgccgttctcagcgctgcccgaccccgctcgcgcgccctcccgttaagtccgggttgagcgccctcagttgtcctccgactcgccctcggccttccgcgccagccgcagccacagccgcaacgccacccgcagccacagccacagccacagcccccgactcggaccgatg

SEQ ID NO: 12746 - DNA, 203 bp, synthetic construct
  source 1..203: mol_type = other DNA
ggcgcgccagtcctgcacaggagccgctgtttttagacattgacgttgaccccgaaagcaggatggagctggagtgaggtggaggggccgcaagctgctgaccggcgtgtggaacactggtggtttgcagatcactgaggctggacaacgttcatggctctcgggtagaacctagtgaaacggccagacgactcggaccgatg

SEQ ID NO: 12747 - DNA, 203 bp, synthetic construct
  source 1..203: mol_type = other DNA
ggcgcgccagtcctctacgattgccgctgtttttcactgagctgccataccccgaaagcaggatggagctggagtgaggtggaggggccgcaagctgctgaccgcgtaacaattgtagggtggtttgcagatcactgaggctggacaacgttcatggctctcgggtagaacctagtgaaacggccagacgactcggaccgatg

SEQ ID NO: 12748 - DNA, 203 bp, synthetic construct
  source 1..203: mol_type = other DNA
ggcgcgccagtcctggcgggcagccgctgtttttcactgagctgccataccccgaaagcaggatggagctggagtgaggtggaggggccgcaagctgctgaccggcgtgtggaacactggtggtttgcagatcactgaggctggacgtgtgcaggactggtcgggtagaacctagtgaaacggccagacgactcggaccgatg

SEQ ID NO: 12749 - DNA, 203 bp, synthetic construct
  source 1..203: mol_type = other DNA
ggcgcgccagtcctattcaggggccgctgtttttcactgagctgccataccccgaaagcaggatggagctggagtgttcgtcgatatattcaagctgctgaccggcgtgtggaacactggtggtttgcagatcactgaggctggacaacgttcatggctctcgggtagaacctagtgaaacggccagacgactcggaccgatg

SEQ ID NO: 12750 - DNA, 203 bp, synthetic construct
  source 1..203: mol_type = other DNA
ggcgcgccagtcctactgtgcagccgctgtttttcactgagctgccataccccgaaagcaggtacttatgcactgaaggtggaggggccgcaagctgctgaccggcgtgtggaacactggtggtttgcagatcactgaggctggacaacgttcatggctctcgggtagaacctagtgaaacggccagacgactcggaccgatg

SEQ ID NO: 12751 - DNA, 203 bp, synthetic construct
  source 1..203: mol_type = other DNA
ggcgcgccagtcctgcttaacagccgctgtttttcactgagctgccatcagttatttattatatggagctggagtgaggtggaggggccgcaagctgctgaccggcgtgtggaacactggtggtttgcagatcactgaggctggacaacgttcatggctctcgggtagaacctagtgaaacggccagacgactcggaccgatg

SEQ ID NO: 12752 - DNA, 203 bp, synthetic construct
  source 1..203: mol_type = other DNA
ggcgcgccagtcctggttgaccgccggcagaggggcgctaggccgccctcgatcccctcgccgcggtcccatggaggaggaggcgagccgcagcgccgcggcgacgaacccagggagtaatggattaaatgcgccgcctcctgacaagcgggagggatccgcggtggacccagggaagcggaggagcccgactcggaccgatg

SEQ ID NO: 12753 - DNA, 203 bp, synthetic construct
  source 1..203: mol_type = other DNA
ggcgcgccagtcctcaatcattgccggccaagacagcacagacagattgacctattggggtgagcgaatgacaaccgagggaagcgccgcggcctgtatttctagacctgcccttcgcctggttcgtggcgccttgtgaccccgggcccctgccgcctgcaagtcggaaattgcgctgtgctcctgtgcgactcggaccgatg

SEQ ID NO: 12754 - DNA, 203 bp, synthetic construct
  source 1..203: mol_type = other DNA
ggcgcgccagtcctactcgctcgccggccaagacagcacagacagattgacctattggggtgtttcgcgagtgtgagagggaagcgccgcggcctgtatttctagacctgcccttcgcctggttcgtggcgccttgtgaccccgggagaaacggtaagctaagtcggaaattgcgctgtgctcctgtgcgactcggaccgatg

SEQ ID NO: 12755 - DNA, 203 bp, synthetic construct
  source 1..203: mol_type = other DNA
ggcgcgccagtcctgggaagctgccggccaagacagcacagacagattgacctattggggtgtttcgcgagtgtgagagggaagcgccgcggcctgtatttctagacctgcccttcgcctggttcgtggcgctaatgtgtagatttcccctgccgcctgcaagtcggaaattgcgctgtgctcctgtgcgactcggaccgatg

SEQ ID NO: 12756 - DNA, 203 bp, synthetic construct
  source 1..203: mol_type = other DNA
ggcgcgccagtcctgatggtgagccggccaagacagcacagacagattgacctattggggtgtttcgcgagtgtgagagggaagcgccgcggcctgtatttctagacctgcccttcgcgcaccaacacagaacttgtgaccccgggcccctgccgcctgcaagtcggaaattgcgctgtgctcctgtgcgactcggaccgatg

SEQ ID NO: 12757 - DNA, 203 bp, synthetic construct
  source 1..203: mol_type = other DNA
ggcgcgccagtcctgatcttatgccggccaagacagcacagacagattgacctattggggtgtttcgcgagtgtgagagggaagcgccgcttggaaagacaaaggacctgcccttcgcctggttcgtggcgccttgtgaccccgggcccctgccgcctgcaagtcggaaattgcgctgtgctcctgtgcgactcggaccgatg

SEQ ID NO: 12758 - DNA, 203 bp, synthetic construct
  source 1..203: mol_type = other DNA
ggcgcgccagtcctatcctaaggccggcggctggcggaggagggagggcgagggcgggcgcgaatgtagacttaatcggaagagggaggagaggcgcggggagccaggcctcggggcctcggagcaaccacccgagcagacggagtacacggagcagcggccccggccccgccaacgctgccgccgggcgactcggaccgatg

SEQ ID NO: 12759 - DNA, 203 bp, synthetic construct
  source 1..203: mol_type = other DNA
ggcgcgccagtcctcctcgcaagccggcggctggcggaggagggagggcgagggcgggcgcgggccggcgggcgggcggaagagggaggagaggcgcggggagccaggcctcggggcctcggagcaaccaccgcctgctcttagtaacacggagcagcggccccggccccgccaacgctgccgccgggcgactcggaccgatg

SEQ ID NO: 12760 - DNA, 203 bp, synthetic construct
  source 1..203: mol_type = other DNA
ggcgcgccagtcctttctgttggccgggaagactctacggggataatcataaacccactctatgcccggccatttgggcgtgcccccgcaagactgctagccgagtagcgttgggttgcgaaaggccttgtggtactgcctgatagggtgcttgcgagtgccccgggaggtctcgtagaccgtgcacccgactcggaccgatg

SEQ ID NO: 12761 - DNA, 203 bp, synthetic construct
  source 1..203: mol_type = other DNA
ggcgcgccagtcctgtgtcgtcgccgggaagactgggtcctttcttggataaacccactctatgcccggccatttgggcgtgcccccgcaagactgctagccgacacaaaaccctaaccgaaaggccttgtggtactgcctgatagggtgcttgcgagtgccccgggaggtctcgtagaccgtgcacccgactcggaccgatg

SEQ ID NO: 12762 - DNA, 203 bp, synthetic construct
  source 1..203: mol_type = other DNA
ggcgcgccagtcctaccgcacagccgggaagactgggtcctttcttggataaacccactctatgcccggccatttgggcgtgcccccgcaagactgctagccgagtagcgttgggttgcgaaaggccttgtgcagggcgtactattggtgcttgcgagtgccccgggaggtctcgtagaccgtgcacccgactcggaccgatg

SEQ ID NO: 12763 - DNA, 203 bp, synthetic construct
  source 1..203: mol_type = other DNA
ggcgcgccagtcctgagatggcgccgggaagactgggtcctttcttggataaacccactctatgcccggccatttgggcgtgcccccgcaagactgctagccgagtagcgttgggttgcgaaaggccttgtggtactgcctgatagggtgcttgcgagtgaaaaactgtacaatgtagaccgtgcacccgactcggaccgatg

SEQ ID NO: 12764 - DNA, 203 bp, synthetic construct
  source 1..203: mol_type = other DNA
ggcgcgccagtccttgaagagtgccgggaagactgggtcctttcttggataaacccactctatgcccggccatttgggcgtgcccccgcaagactgctagccgagtagcgttgggttgcgaaaggccttgtggtactgcctgatagggtgcttgcgagtgccccgggaggtctctcgcggaccatgtacgactcggaccgatg

SEQ ID NO: 12765 - DNA, 203 bp, synthetic construct
  source 1..203: mol_type = other DNA
ggcgcgccagtcctcttgacaggccgggaagactgggtcctttcttggataaacccactctatgcccggccatttgggcgtgcccccgcaagactgctagccgagtagcgttgggttgcgaaaggccttgtggtactgcctgatagtcataaacactagaccccgggaggtctcgtagaccgtgcacccgactcggaccgatg

SEQ ID NO: 12766 - DNA, 203 bp, synthetic construct
  source 1..203: mol_type = other DNA
ggcgcgccagtccttacgccctgccgggaagactgggtcctttcttgggacgcataggcaattgcccggccatttgggcgtgcccccgcaagactgctagccgagtagcgttgggttgcgaaaggccttgtggtactgcctgatagggtgcttgcgagtgccccgggaggtctcgtagaccgtgcacccgactcggaccgatg

SEQ ID NO: 12767 - DNA, 203 bp, synthetic construct
  source 1..203: mol_type = other DNA
ggcgcgccagtcctgacctgaagccgggatgaccaatgttgagtcgaaattaacccgctcaatgcccggaaatttgggcgtgcccccgcaagactgctagccgagtagtgttgggtcgcgaaaggccttgcggtactgcctgatagggtgcttgcgagtgccccgggaggtctcgtagaccgtgcacccgactcggaccgatg

SEQ ID NO: 12768 - DNA, 203 bp, synthetic construct
  source 1..203: mol_type = other DNA
ggcgcgccagtcctcccggaacgccgggatgaccgggtcctttcttggataaacccgctcaaactgaatgccccgcggcgtgcccccgcgagactgctagccgagtagtgttgggtcgcgaaaggccttgtggtactgcctgatagggtgcttgcgagtgccccgggaggtctcgtagaccgtgcacccgactcggaccgatg

SEQ ID NO: 12769 - DNA, 203 bp, synthetic construct
  source 1..203: mol_type = other DNA
ggcgcgccagtcctgcgcaacggccgggatgaccgggtcctttcttggataaacccgctcaatgcccggagatttgggcgtgcccccgcgagactgctagccgagtagtgttgggtcgcgaaaggccttgtgagctacgggacgttggtgcttgcgagtgccccgggaggtctcgtagaccgtgcacccgactcggaccgatg

SEQ ID NO: 12770 - DNA, 203 bp, synthetic construct
  source 1..203: mol_type = other DNA
ggcgcgccagtcctattacggagccgggatgaccgggtcctttcttggataaacccgctcaatgcccggagatttgggcgtgcccccgcgagactgctagccgagtagtgttgggtcgcgaaaggccttgtggtactgcctgatagtaatagcttagagaccccgggaggtctcgtagaccgtgcacccgactcggaccgatg

SEQ ID NO: 12771 - DNA, 203 bp, synthetic construct
  source 1..203: mol_type = other DNA
ggcgcgccagtcctccgtctatgccgggatgaccgggtcctttcttggataaacccgctcaatgcccggagatttgggcgtgcccccgcggatgatacgcgtcggtagtgttgggtcgcgaaaggccttgtggtactgcctgatagggtgcttgcgagtgccccgggaggtctcgtagaccgtgcacccgactcggaccgatg

SEQ ID NO: 12772 - DNA, 203 bp, synthetic construct
  source 1..203: mol_type = other DNA
ggcgcgccagtcctcgattccagccgggatgaccgggtcctttcttggattaacccgctcaatgcccggaaatttgccgcatgagtgaggagactgctagccgagtagtgttgggtcgcgaaaggccttgcggtactgcctgatagggtgcttgcgagtgccccgggaggtctcgtagaccgtgcacccgactcggaccgatg

SEQ ID NO: 12773 - DNA, 203 bp, synthetic construct
  source 1..203: mol_type = other DNA
ggcgcgccagtcctgtttgtctgccgggatgaccgggtcctttcttggattaacccgctcaatgcccggaaatttgggcgtgcccccgcaagactgctagccgagtagtgttgggtcgcgaaaggccttgcgcctgaaaagctgcaggtgcttgcgagtgccccgggaggtctcgtagaccgtgcacccgactcggaccgatg

SEQ ID NO: 12774 - DNA, 203 bp, synthetic construct
  source 1..203: mol_type = other DNA
ggcgcgccagtcctaacactacgccgggatgaccgggtcctttcttggattaacccgctcaatgcccggaaatttgggcgtgcccccgcaagactgctagccgagtagtgttgggtcgcgaaaggccttgcggtactgcctgatagggtgcttgcgagtgaaggacattaaaaagtagaccgtgcacccgactcggaccgatg

SEQ ID NO: 12775 - DNA, 203 bp, synthetic construct
  source 1..203: mol_type = other DNA
ggcgcgccagtcctcaattgtggccgggatgaccgggtcctttcttggattaacccgctcaatgcccggaaatttgggcgtgcccccgcaagactgctagccgagtagtgttgggtcggtgtttctacccacgtactgcctgatagggtgcttgcgagtgccccgggaggtctcgtagaccgtgcacccgactcggaccgatg

SEQ ID NO: 12776 - DNA, 203 bp, synthetic construct
  source 1..203: mol_type = other DNA
ggcgcgccagtcctatacatgagccgggatgaccgggtcctttcttggattaacccgctcaatgcccggaaatttgggcgtgcccccgcagttggtaactttttgtagtgttgggtcgcgaaaggccttgcggtactgcctgatagggtgcttgcgagtgccccgggaggtctcgtagaccgtgcacccgactcggaccgatg

SEQ ID NO: 12777 - DNA, 203 bp, synthetic construct
  source 1..203: mol_type = other DNA
ggcgcgccagtcctcgtgcagtgccgggatgaccgggtcctttcttggtggctgataggggttgcccggaaatttgggcgtgcccccgcaagactgctagccgagtagtgttgggtcgcgaaaggccttgcggtactgcctgatagggtgcttgcgagtgccccgggaggtctcgtagaccgtgcacccgactcggaccgatg

SEQ ID NO: 12778 - DNA, 203 bp, synthetic construct
  source 1..203: mol_type = other DNA
ggcgcgccagtccttgcgttaggccgggatgaccttaatagacacgatataaacccgctcaatgcccggagatttgggcgtgcccccgcgagactgctagccgagtagtgttgggtcgcgaaaggccttgtggtactgcctgatagggtgcttgcgagtgccccgggaggtctcgtagaccgtgcacccgactcggaccgatg

SEQ ID NO: 12779 - DNA, 203 bp, synthetic construct
  source 1..203: mol_type = other DNA
ggcgcgccagtcctcgaggtatgccgggccccggatcgcccttttgatctccgtgccccgcgcgtcctgcgccgccgccaccgcctcctggggagacgcagccacttgcccgccatggatactcccagggtcctgctctcggccgtcttcctcatcagttttctgtgggatttgcccggtttccagcacgactcggaccgatg

SEQ ID NO: 12780 - DNA, 203 bp, synthetic construct
  source 1..203: mol_type = other DNA
ggcgcgccagtccttagggcaagccgggccccggccgctgtccagccgctccgtgccccgcgcgtcctgcgccgccgccaccgcctcctggggagacgcagccaaggtatgctgtgctatactcccagggtcctgctctcggccgtcttcctcatcagttttctgtgggatttgcccggtttccagcacgactcggaccgatg

SEQ ID NO: 12781 - DNA, 203 bp, synthetic construct
  source 1..203: mol_type = other DNA
ggcgcgccagtcctcctcaaacgccgggccccggccgctgtccagccgctccgtgccccgcgcgtcctgcgccgccgccaccgcctcctggggagacgcagccacttgcccgccatggatactcccagggtcctgctctcggccgtcttcctcatcagttcctgaaattgcccccccggtttccagcacgactcggaccgatg

SEQ ID NO: 12782 - DNA, 203 bp, synthetic construct
  source 1..203: mol_type = other DNA
ggcgcgccagtcctatcacgctgccgggccccggccgctgtccagccgctccgtgccccgcgcgtcctgcgccgccgccaccgcctcctggggagacgcagccacttgcccgccatggatactcccagggtcctgctctcggccgtcttcctcatcagttttctgtgggatttgcccggtttccagcacgactcggaccgatg

SEQ ID NO: 12783 - DNA, 203 bp, synthetic construct
  source 1..203: mol_type = other DNA
ggcgcgccagtcctttatttatgccgggccccggccgctgtccagccgctccgtgccccgcgcgtcctgcgccgccgccaccgcctcctggggagacgcagccacttgcccgccatggatactcccagggtcctgctctcggccgtgcatgcatcactcattctgtgggatttgcccggtttccagcacgactcggaccgatg

SEQ ID NO: 12784 - DNA, 203 bp, synthetic construct
  source 1..203: mol_type = other DNA
ggcgcgccagtcctcattgactgccgggccccggccgctgtccagccgctccgtgccccgcgcgtcctgcgccgccgccaccgcctcctggggagacgcagccacttgcccgccatggatactcccagggtcggtaatgtaataaacttcctcatcagttttctgtgggatttgcccggtttccagcacgactcggaccgatg

SEQ ID NO: 12785 - DNA, 203 bp, synthetic construct
  source 1..203: mol_type = other DNA
ggcgcgccagtcctctaatgatgccgggccccggccgctgtccagccgtgatcccgaggcttcgtcctgcgccgccgccaccgcctcctggggagacgcagccacttgcccgccatggatactcccagggtcctgctctcggccgtcttcctcatcagttttctgtgggatttgcccggtttccagcacgactcggaccgatg

SEQ ID NO: 12786 - DNA, 203 bp, synthetic construct
  source 1..203: mol_type = other DNA
ggcgcgccagtcctagcgacctgccgggggacgggtaaggggggggtgaagaaggggccggccttcaagcaagagccgttgtcctgttgcgccaccacgggctcgggagtaaaagtccctcgcaatttccgactgttggaagaactcgaagaaggccagaaaggagtaggagatggcacagttagctgcgactcggaccgatg

SEQ ID NO: 12787 - DNA, 203 bp, synthetic construct
  source 1..203: mol_type = other DNA
ggcgcgccagtccttttagctagccgggggacgggtaaggggggggtgaagaaggggccggccttcaagcaagagcgacgcaagatggcagccaccacgggctcgggagtaaaagtccaataggccgcgaatctgttggaagaactcgaagaaggccagaaaggagtaggagatggcacagttagctgcgactcggaccgatg

SEQ ID NO: 12788 - DNA, 203 bp, synthetic construct
  source 1..203: mol_type = other DNA
ggcgcgccagtcctgccgcggggccgggggacgggtaaggggggggtgaagaaggggccggccttcaagcaagagcgacgcaagatggcagccaccacgggctcgggagtaaaagtccctcgcaatttccgactgttggaagaactcgaagaaggccagaaaggagtaggagatggcacagttagctgcgactcggaccgatg

SEQ ID NO: 12789 - DNA, 203 bp, synthetic construct
  source 1..203: mol_type = other DNA
ggcgcgccagtcctagatcggggccgggggacgggtaaggggggggtgaagaaggggccggccttcaagcaagagcgacgcaagatggcagccaccacgggctcgggagtaaaagtccctcgcaatttccgactgttggaagaactcgaagaaggccagattctcaatatgtcgggcacagttagctgcgactcggaccgatg

SEQ ID NO: 12790 - DNA, 203 bp, synthetic construct
  source 1..203: mol_type = other DNA
ggcgcgccagtccttcgccaatgccgtattctgtgtcgacggcgccggcggctcctgcaggaggccactgtctgcagctcccgtgaagatgtccactccagacccacccctgggcggaactcctcggccaggtccttccccgggccctggcccttcccctggagccatgctgggccctagcccgggtccgactcggaccgatg

SEQ ID NO: 12791 - DNA, 203 bp, synthetic construct
  source 1..203: mol_type = other DNA
ggcgcgccagtccttcacccgcgcctacgattcccgattggcggacgctcctggcaggagagcgcggattggtcaggcacggagcaggaggcggggctgatagcccagcagcagcagcggcggcggcggctgcggagcgggtgtgaggcggctggaccgcgctgcaggcatccgcagggcgcggcaagcgactcggaccgatg

SEQ ID NO: 12792 - DNA, 203 bp, synthetic construct
  source 1..203: mol_type = other DNA
ggcgcgccagtcctgagctagtgcctccccgtatataagacttcgccgagcgctctcactcgcacaagtggaccggggtgttgggtgctagtcggcaccagaggcaagggtgcgaggaccacggccggctcgataaccctgagtgacctagggggtggcagcgggcagtgcggggcggcaaggcgacccgactcggaccgatg

SEQ ID NO: 12793 - DNA, 203 bp, synthetic construct
  source 1..203: mol_type = other DNA
ggcgcgccagtcctaatacccggcctccccgtatataagacttcgccggcaagcaattagatcacaagtggaccggggtgttgggtgctagtcggcaccagaggcaagggtgcgaggaccacggccggctcggacgtgtgaccgcgcctagggggtggcagcgggcagtgcggggcggcaaggcgacccgactcggaccgatg

SEQ ID NO: 12794 - DNA, 203 bp, synthetic construct
  source 1..203: mol_type = other DNA
ggcgcgccagtcctgtgatctcgcctccctgctgagctcgcggctcacgctgagagggacacgcagtgacgagcggccgaagcagctttgcggtgagagcacgctgggccgggggccgccgaatcagtctagggcgggtaacgccggactcgagggttttgtagtgcatccctgagcatgagcacagacgactcggaccgatg

SEQ ID NO: 12795 - DNA, 203 bp, synthetic construct
  source 1..203: mol_type = other DNA
ggcgcgccagtcctaaacatacgcctccctgctgagctcgcggctcacgctgagagggacacgcagtgacgagcggccgaagcagctttgcggtgagagcacgctgggccgggggccgggcgggagcctggtggcgggtaacgccggactcgagggttttgtagtgcatccctggcgcactcactgaccgactcggaccgatg

SEQ ID NO: 12796 - DNA, 203 bp, synthetic construct
  source 1..203: mol_type = other DNA
ggcgcgccagtcctgcgtgtaagcctccctgctgagctcgcggctcacgctgagagggacacgcagtgacgagcggtgttcaatctgggccggtgagagcacgctgggccgggggccgggcgggagcctggtggcgggtaacgccggactcgagggttttgtagtgcatccctgagcatgagcacagacgactcggaccgatg

SEQ ID NO: 12797 - DNA, 203 bp, synthetic construct
  source 1..203: mol_type = other DNA
ggcgcgccagtcctgacaaaccgcctccctgctggctatattaggtcggctgagagggacacgcagtgacgagcggccgaagcagctttgcggtgagagcacgctgggccgggggccgggcgggagcctggtggcgggtaacgccggactcgagggttttgtagtgcatccctgagcatgagcacagacgactcggaccgatg

SEQ ID NO: 12798 - DNA, 203 bp, synthetic construct
  source 1..203: mol_type = other DNA
ggcgcgccagtcctctcgttgtgcctcctgacgacgaggctagctggcccgatttctcctccgggtgatgcttttcctagattattctctgatttggtcgtattgggcgcctggtcaccagggctgcttttaactctggtaaagtggatattgttgccatcaatgaccccttcattgacctcaactaccgactcggaccgatg

SEQ ID NO: 12799 - DNA, 203 bp, synthetic construct
  source 1..203: mol_type = other DNA
ggcgcgccagtcctgtttccaagcctgacagccaggaccccaggcagcagcgagtgacaggacgtctggacccgcgcgccgctagcagctctgccgggccgcggcggtgatcgatgggactgattcactcatgacccagcgagtgagggcgcacagccgggacgccgaggcggcgggcgggagacccgcgactcggaccgatg

SEQ ID NO: 12800 - DNA, 203 bp, synthetic construct
  source 1..203: mol_type = other DNA
ggcgcgccagtcctttgctttagcctgacagccaggaccccaggcagcagcgagtgacaggacgtctggacccgcgcgccgctagcagctctgccgggccgcggcggtgatcgatggggagcggctggagcggacccagcgagtgagggcgcacagccggatttttttatttttgggcgggagacccgcgactcggaccgatg

SEQ ID NO: 12801 - DNA, 203 bp, synthetic construct
  source 1..203: mol_type = other DNA
ggcgcgccagtccttactaccagcctgacagccaggaccccaggcagcagcgagtgacaggacgtctggacccgcgcgccgctagcagctctgccgggccgcggcggtgatcgatggggagcggctggagcggacccagcgagtgagggcgcacagccgggacgccgaggcggcaaattaatcgattacgactcggaccgatg

SEQ ID NO: 12802 - DNA, 203 bp, synthetic construct
  source 1..203: mol_type = other DNA
ggcgcgccagtcctaactatcggcctggcaggcgcacgcgcccagcaccctgcctccggcgatgccgccccagcccctctgatggccctcctctctgctgccaccgcccatttcctgagaggcatgagcccggaacgcgcttgcttttaggagacagccactttctgtgtggtacgctggattcaaggcgactcggaccgatg

SEQ ID NO: 12803 - DNA, 203 bp, synthetic construct
  source 1..203: mol_type = other DNA
ggcgcgccagtcctccatgtttgcctggcaggcgcacgcgcccagcaccctgcctccggcgatgccgccccagcccctctgatggccctcctctctgctgccactcattccagaacaggaggcatgagcccggaacgcgcttgcttttaggagacagccactttctgtgtggtacgctggattcaaggcgactcggaccgatg

SEQ ID NO: 12804 - DNA, 203 bp, synthetic construct
  source 1..203: mol_type = other DNA
ggcgcgccagtcctaagtctgagcctggcaggcgcacgcgcccagcaccctgcctccggcgatgccgccccagcccctctgatggccctcctctctgctgccactcattccagaacaggaggcatgagcccggaacgcgcttgcttttaggagacagccactttctgtgtggtagcagaccgagctcacgactcggaccgatg

SEQ ID NO: 12805 - DNA, 203 bp, synthetic construct
  source 1..203: mol_type = other DNA
ggcgcgccagtcctctcagagagcctggcaggcgcacgcgcccagcaccctgcctccggcgatgccgccccagcccctctgatggccctcctctctgctgccactcattccagaacaggaggcatgagcccggaacgcgcttgcttttaggagacagccagcaagatatgtaagcgctggattcaaggcgactcggaccgatg

SEQ ID NO: 12806 - DNA, 203 bp, synthetic construct
  source 1..203: mol_type = other DNA
ggcgcgccagtcctagcagcttgcctggcaggcgcacgcgcccagcacgacagacgaataattgccgccccagcccctctgatggccctcctctctgctgccactcattccagaacaggaggcatgagcccggaacgcgcttgcttttaggagacagccactttctgtgtggtacgctggattcaaggcgactcggaccgatg

SEQ ID NO: 12807 - DNA, 203 bp, synthetic construct
  source 1..203: mol_type = other DNA
ggcgcgccagtcctgtcattctgcctgtgtgagctgacaaacttagtagtgtttgtgaggattaacaacaattaacacagtgcgagctgtttcttagcacgaagatctcgatgtctaagaaaccaggagggcccggcaagagccggcgaccaggccctgcaaaacgcggaatgccccgcgtgttgtcccgactcggaccgatg

SEQ ID NO: 12808 - DNA, 203 bp, synthetic construct
  source 1..203: mol_type = other DNA
ggcgcgccagtcctctgcaatagcctgtgtgagctgacaaacttagtagtgtttgtgaggattaacaacaattaacacagtgcgagctgtttcttagcacgaagatctcgatgtctaagaaaccaggagggcccggcaagagccgggctgtcaatatgctaaaacgcggaatgcaaatgagccatctgcgactcggaccgatg

SEQ ID NO: 12809 - DNA, 203 bp, synthetic construct
  source 1..203: mol_type = other DNA
ggcgcgccagtcctacttcgaagcctgtgtgagctgacaaacttagtagtgtttgtgaggattaacaacaattaacacagtgcgagctgtttcttagcacgaagatctcgatgtctaagaaaccaggagggcttccgcctttgattgctgtcaatatgctaaaacgcggaatgccccgcgtgttgtcccgactcggaccgatg

SEQ ID NO: 12810 - DNA, 203 bp, synthetic construct
  source 1..203: mol_type = other DNA
ggcgcgccagtcctctctgatcgcctgtgtgagctgacaaacttagtagtgtttgtgaggattaacaacaattaacacagtgcgagctgtttcttagcacgaagatctcgatgtctaattcttatcctactgccggcaagagccgggctgtcaatatgctaaaacgcggaatgccccgcgtgttgtcccgactcggaccgatg

SEQ ID NO: 12811 - DNA, 203 bp, synthetic construct
  source 1..203: mol_type = other DNA
ggcgcgccagtcctcaatgggtgccttacactccagagcaaatgtacggtgtcactctcgcagctgccacccgaccatgaccatcctgcaggccccgaccccggccccctccaccatcccgggaccccggcggggctccggtcctgagatcttcaccttcgaccctctcccggagcccgcagcggccccgactcggaccgatg

SEQ ID NO: 12812 - DNA, 203 bp, synthetic construct
  source 1..203: mol_type = other DNA
ggcgcgccagtcctgattcgccgccttacactccgctcggctcaccatgtgtcactctcgcacgacaattgtccgaatgaccatcctgcaggccccgaccccggccccctccaccatcccgggaccccggcggggctccggtcctgagatcttcaccttcgaccctctcccggagcccgcagcggccccgactcggaccgatg

SEQ ID NO: 12813 - DNA, 203 bp, synthetic construct
  source 1..203: mol_type = other DNA
ggcgcgccagtcctggatgggagccttacactccgctcggctcaccatgtgtcactctcgcagctgccacccgaccatgaccatcctgcaggccccgaccccggatgggcgacgttcaccgggaccccggcggggctccggtcctgagatcttcaccttcgaccctctcccggagcccgcagcggccccgactcggaccgatg

SEQ ID NO: 12814 - DNA, 203 bp, synthetic construct
  source 1..203: mol_type = other DNA
ggcgcgccagtcctcgatagatgccttacactccgctcggctcaccatgtgtcactctcgcagctgccacccgaccatgaccatcctgcaggccccgaccccggccccctccaccatcagttcctattcatcgggctccggtcctgagatcttcaccttcgaccctctcccggagcccgcagcggccccgactcggaccgatg

SEQ ID NO: 12815 - DNA, 203 bp, synthetic construct
  source 1..203: mol_type = other DNA
ggcgcgccagtcctttcatcgcgccttacactccgctcggctcaccatgtgtcactctcgcagctgccacccgaccatgaccatcctgcaggccccgaccccggccccctccaccatcccgggaccccggcggggctccggtcctgagatcttcaccttcattgacgggggtctgcccgcagcggccccgactcggaccgatg

SEQ ID NO: 12816 - DNA, 203 bp, synthetic construct
  source 1..203: mol_type = other DNA
ggcgcgccagtcctaccaactggccttacactccgctcggctcaccatgtgtcactctcgcagctgccacccgaccatgaccatcctgcaggccccgaccccggccccctccaccatcccgggaccccggcggggctccggtcctgagatcttcaccttcgaccctctcccggagcccgcagcggccccgactcggaccgatg

SEQ ID NO: 12817 - DNA, 203 bp, synthetic construct
  source 1..203: mol_type = other DNA
ggcgcgccagtcctaatcacttgcgaaccacgtctccggcagcctccagacagtttcttccgcttcctgtaccacccggctcaagtagcggacacggaacagggaactatcagcccgtcggcctccgggccctgcattctctagccatggaccgggaccttttgcggcagtcgctaaattgccacgggcgactcggaccgatg

SEQ ID NO: 12818 - DNA, 203 bp, synthetic construct
  source 1..203: mol_type = other DNA
ggcgcgccagtccttgtttaacgcgacatgaagtgcactacggggtgaacggctactcactgcacgccatgaactcactcagcgccatgtacaacctgcaccagcaggcagcccagcaggcccagcatgcccccgactaccggccttcagtgcatgcgcttacattggctgagcgcctggctgacatccgactcggaccgatg

SEQ ID NO: 12819 - DNA, 203 bp, synthetic construct
  source 1..203: mol_type = other DNA
ggcgcgccagtcctagttcctcgcgactagcctcccaagccagccacccagggcgagtcatcgacccaaaaggtcagaccgtctcacacaaacaatcccaagtactccgcgatggtgatccccctttttttaggaactgaaaccacggccctgacgtccctcccccctaggaacaggaacagctctcccgactcggaccgatg

SEQ ID NO: 12820 - DNA, 203 bp, synthetic construct
  source 1..203: mol_type = other DNA
ggcgcgccagtcctcctggacagcgactagcctcccaagccagccacccagggcgagtcatcgacccaaaaggtcagaccgtctcacacatcagccttggtcccaaggctctgacgtctccccctttttttaggaactgaaaccacggccctgacgtccctcccccctaggaacaggaacagctctcccgactcggaccgatg

SEQ ID NO: 12821 - DNA, 203 bp, synthetic construct
  source 1..203: mol_type = other DNA
ggcgcgccagtcctaactgattgcgagttggactgtgaagaaacatggcggccgcgacgttgacttcgaaattgtactccctgctgttccagtatcggattgtattcgccctcaccatcatcgtgggcgtcatgttcttcgagcgcgccttcgatcaaggcgcggacgctatctacgaccacatcaaccgactcggaccgatg

SEQ ID NO: 12822 - DNA, 203 bp, synthetic construct
  source 1..203: mol_type = other DNA
ggcgcgccagtcctttacctacgcgagttggactgtgaagaaacatggcggccgcgacgttgacttcgaaattgtactccctgctgttccgcaggacctccaccgctcaagattagggcatcgtgggcgtcatgttcttcgagcgcgccttcgatcaaggcgcggacgctatctacgaccacatcaaccgactcggaccgatg

SEQ ID NO: 12823 - DNA, 203 bp, synthetic construct
  source 1..203: mol_type = other DNA
ggcgcgccagtcctaacgcggcgcgagttggactgtgaagaaacatggcggccgcgacgttgacttcgaaattgtactccctgctgttccgcaggacctccaccttcgccctcaccattcaacgttctaatgtgttcttcgagcgcgccttcgatcaaggcgcggacgctatctacgaccacatcaaccgactcggaccgatg

SEQ ID NO: 12824 - DNA, 203 bp, synthetic construct
  source 1..203: mol_type = other DNA
ggcgcgccagtcctgatccagagcgagttggactgtgaagaaacatggcggccgcgacgttggtcgaagttcgtgcctccctgctgttccgcaggacctccaccttcgccctcaccatcatcgtgggcgtcatgttcttcgagcgcgccttcgatcaaggcgcggacgctatctacgaccacatcaaccgactcggaccgatg

SEQ ID NO: 12825 - DNA, 203 bp, synthetic construct
  source 1..203: mol_type = other DNA
ggcgcgccagtcctcccatttggcgagttggacttaatctggtgggtacggccgcgacgttgacttcgaaattgtactccctgctgttccgcaggacctccaccttcgccctcaccatcatcgtgggcgtcatgttcttcgagcgcgccttcgatcaaggcgcggacgctatctacgaccacatcaaccgactcggaccgatg

SEQ ID NO: 12826 - DNA, 203 bp, synthetic construct
  source 1..203: mol_type = other DNA
ggcgcgccagtcctgtcgtcaagcgcccgggggccatgcgggtgagccgcggctgcagaggcctgagcgcctgatcgccgcggacccgagccgagcccacccccctccccagccccccgttgatatgtactaggcggcgcgctcgatctacgcgtccggggccccgcggggccgggcccggagtcggccgactcggaccgatg

SEQ ID NO: 12827 - DNA, 203 bp, synthetic construct
  source 1..203: mol_type = other DNA
ggcgcgccagtcctctactgcggcgccggtaagtaagtacttgattttggtacctcgcgaggcaaatcatcctggtgagtggcgggacgctgccgggaagctccacctccgctcagcaggggacgccctggtctgagctctgtggtatctgattgttgttgaaccgtctctaagacggtgatactatacgactcggaccgatg

SEQ ID NO: 12828 - DNA, 203 bp, synthetic construct
  source 1..203: mol_type = other DNA
ggcgcgccagtccttacataacgcgccggtaagtaagtacttgattttggtacctcgcgagggtttgggaggatcgcctcccgctttacgtgccgggaagctccacctccgctcagcaggggacgccctggtctgagctctgtggtatctgattgttgttgaaccgtctctaagacggtgatactatacgactcggaccgatg

SEQ ID NO: 12829 - DNA, 203 bp, synthetic construct
  source 1..203: mol_type = other DNA
ggcgcgccagtcctaatggtcggcgccggtaagtaagtacttgattttggtacctcgcgagggtttgggaggatcggagtggcgggacgctgccgggaagctccacctccgctcagcaggggacgccctggtctgagctctgtggtatctgattgttgttgaaccgtctctaagacggtgatactatacgactcggaccgatg

SEQ ID NO: 12830 - DNA, 203 bp, synthetic construct
  source 1..203: mol_type = other DNA
ggcgcgccagtcctgaatgttagcgccggtaagtaagtacttgattttggtacctcgcgagggtttgggaggatcggagtggcgggacgctgccgggaagctccacctccgctcagcaggggacgccctggtctgagctctgtggtatctgattgttgttgaaccgtctctaagtaaagctccggcctcgactcggaccgatg

SEQ ID NO: 12831 - DNA, 203 bp, synthetic construct
  source 1..203: mol_type = other DNA
ggcgcgccagtccttggtgtccgcgcctgctgctgagcagatgcagtagccgaaactgcgcggaggcacagaggccggggagagcgttctgggtccgagggtccaggtaggggttgagccaccatctgaccgatgcgattcgaaaatcgccggttctgcaggcaccatgagccaggacaccgaggtggcgactcggaccgatg

SEQ ID NO: 12832 - DNA, 203 bp, synthetic construct
  source 1..203: mol_type = other DNA
ggcgcgccagtccttaaggaacgcgcctgctgctgagcagatgcagtagccgaaactgcgcggaggcacagaggccggggagagcgttctgggtccgagggtccaggtaggggttgagccaccatctgaccgcaagctgcgtcgtgtcgccggttctgcaggcaccatgagccaggacaccgaggtggcgactcggaccgatg

SEQ ID NO: 12833 - DNA, 203 bp, synthetic construct
  source 1..203: mol_type = other DNA
ggcgcgccagtcctgtttaaaggcgcctgctgctgagcagatgcagtagccgaaactgcgcggaggcacagaggccggggagagcgttctgggtccgagggtccaggtaggggttgagccaccatctgaccgcaagctgcgtcgtgtcgccggttctgcaggcaccatgagccattcggttcgatacacgactcggaccgatg

SEQ ID NO: 12834 - DNA, 203 bp, synthetic construct
  source 1..203: mol_type = other DNA
ggcgcgccagtcctatcccgtggcgcctgctgctgagcagatgcagtagccgaaactgcgcggaggcacagaggccggggagagcgttctgggtccgagggtccaggtaggggttgaggactttctaatggacaagctgcgtcgtgtcgccggttctgcaggcaccatgagccaggacaccgaggtggcgactcggaccgatg

SEQ ID NO: 12835 - DNA, 203 bp, synthetic construct
  source 1..203: mol_type = other DNA
ggcgcgccagtcctatgttccagcgcctgctgcttgcgcagacgcaccgccgaaactgcgcggaggcacagaggccggggagagcgttctgggtccgagggtccaggtaggggttgagccaccatctgaccgcaagctgcgtcgtgtcgccggttctgcaggcaccatgagccaggacaccgaggtggcgactcggaccgatg

SEQ ID NO: 12836 - DNA, 203 bp, synthetic construct
  source 1..203: mol_type = other DNA
ggcgcgccagtcctaatgctatgcgcgcccgacctccatcttcccggggccgcgccgcgcgcgcgcgcgggctttgggcgggaccctgcagaggcggcggggctccagtgggggctcctcctcggcctccccttcgggcgctctcgcgctaactgtgctcctccggggccctccgccacacgagagcccgactcggaccgatg

SEQ ID NO: 12837 - DNA, 203 bp, synthetic construct
  source 1..203: mol_type = other DNA
ggcgcgccagtccttactctatgcgctgcaaggacaaccggctggggtccttgcgcgccgcgcgaagtcccaatcaaccgactgcgccgcgtaagtgccgcctgccctgcgtgggtcgtgccagctcagcgggacaggtcctcgcctcggtccctcggacttagggagcgcggggcagaccctgagagcgactcggaccgatg

SEQ ID NO: 12838 - DNA, 203 bp, synthetic construct
  source 1..203: mol_type = other DNA
ggcgcgccagtccttagttgaggcgctgcaaggacaaccggctggggtccttgcgcgccgcggctcagggaggagcaccgactgcgccgcgtaagtgccgcctgccctgcgtgggtcgtgccagctcagcggccacctaaagaaaatcggtccctcggacttagggagcgcggggcagaccctgagagcgactcggaccgatg

SEQ ID NO: 12839 - DNA, 203 bp, synthetic construct
  source 1..203: mol_type = other DNA
ggcgcgccagtcctccacccttgcgctgcaaggacaaccggctggggttgcgctattggtttgctcagggaggagcaccgactgcgccgcgtaagtgccgcctgccctgcgtgggtcgtgccagctcagcgggacaggtcctcgcctcggtccctcggacttagggagcgcggggcagaccctgagagcgactcggaccgatg

SEQ ID NO: 12840 - DNA, 203 bp, synthetic construct
  source 1..203: mol_type = other DNA
ggcgcgccagtcctgccaagatgcgctggcctgctgccccggcgggtccgccggccggaggcgggagtcacaggaatgaatacgtgatgcaggaggcctcggcggatcaggacagctgcaggcttctgccaggtgggtgtgcagactggtgagctgccagcaggggcccagacgcgccaggcctggagcgactcggaccgatg

SEQ ID NO: 12841 - DNA, 203 bp, synthetic construct
  source 1..203: mol_type = other DNA
ggcgcgccagtccttccaaacggcgcttaagaggagggtcgggctcggccggggagtcccagtggcggaggctacgaaacttgggggagtgcacagaagaacttcgggagcgcacgcgggaccagggaccaggctgagactcggggcgccagtccgggcacccaggaatcagtacggccggagatgcccgactcggaccgatg

SEQ ID NO: 12842 - DNA, 203 bp, synthetic construct
  source 1..203: mol_type = other DNA
ggcgcgccagtcctaggaggtggcgcttaagaggagggtcgggctcggccggggagtcccagtggcggaggctacgtgtgcaatcatccggcacagaagaacttcgggagcgcacgcgggaccagggaccaggctgagactcggggcgccagtccgggcaggggcagcgggagccggccggagatgcccgactcggaccgatg

SEQ ID NO: 12843 - DNA, 203 bp, synthetic construct
  source 1..203: mol_type = other DNA
ggcgcgccagtcctgggcatcagcggaagcggcggcggcggcgaaggcaatcaagaaatctcctggagggccgggcaccgcggccatggagggtcaacgctggctgccgctggaggccaatcccgaggtcaccaaccagtttcttaaacaattaggtctacatcctaactggcaattcgttgatgtatcgactcggaccgatg

SEQ ID NO: 12844 - DNA, 203 bp, synthetic construct
  source 1..203: mol_type = other DNA
ggcgcgccagtccttaccgcaggcggaagcggcggcggcggcgaaggcggcggctgtcagagacctgtaatgctcgaccgcggccatggagggtcaacgctggctgccgctggaggccaatcccgaggtcaccaaccagtttcttaaacaattaggtctacatcctaactggcaattcgttgatgtatcgactcggaccgatg

SEQ ID NO: 12845 - DNA, 203 bp, synthetic construct
  source 1..203: mol_type = other DNA
ggcgcgccagtcctacttgggtgcggaagcggcggcggcggcgaaggcggcggctgtcagagctggagggccgggcaccgcggccatggagggtcaacgctggctgccgctggaggccaatcccgaggtcacgtcatgccacaactaacaattaggtctacatcctaactggcaattcgttgatgtatcgactcggaccgatg

SEQ ID NO: 12846 - DNA, 203 bp, synthetic construct
  source 1..203: mol_type = other DNA
ggcgcgccagtcctggttagtcgcggcactaaaacagccaggcactccctccctccctcccagcactatgccctacaacttctgcctgcccagcctgagctgccgcaccagctgctcctcccggccctgcgtgccccccagctgccacagctgcaccctgcccggggcctgcaacatccccgccaatgcgactcggaccgatg

SEQ ID NO: 12847 - DNA, 203 bp, synthetic construct
  source 1..203: mol_type = other DNA
ggcgcgccagtccttcaccgctgcggcggcgggaccggcagcagcagcagcagcagcagcagcaaccactagcctcctgccccgcggcgcccttcgtatgcggtcacgagccgctcaccccgccgttctcagcgctgcccgaccccgctcgcgcgccctcccgccgccagtcccggcagcgccctcagcgactcggaccgatg

SEQ ID NO: 12848 - DNA, 203 bp, synthetic construct
  source 1..203: mol_type = other DNA
ggcgcgccagtcctgatgccaggcggcggcgggaccggcagcagcagcagcagcagcagcagcaaccactagcctcctgccccgcggcgctgccgcacgagccccacgagccgctcaccccgccgttctcaggatgctgtcggtgagctcgcgcgccctcccgccgccagtcccggcagcgccctcagcgactcggaccgatg

SEQ ID NO: 12849 - DNA, 203 bp, synthetic construct
  source 1..203: mol_type = other DNA
ggcgcgccagtcctccagaaccgcggcggtggtggtggtggcggcggcggcggcgaagggggcggagaggaaggagcgcggcgggaccgggccgggacagcgcgcggccctcctggtaggattcgctccgcgcccgcggttgtagcagctgccgctgcagccatagcagcaggtcagtcattggcacccgactcggaccgatg

SEQ ID NO: 12850 - DNA, 203 bp, synthetic construct
  source 1..203: mol_type = other DNA
ggcgcgccagtcctagaaccgagcggcggtggtggtggtggcggcggcggcggcgaagggggcggagaggaaggagcgcggcgggaccgggccgggacagcgcgtactttgggctccgggattcgctccgcgcccgcggttgtagcagctgccgctgcagtatcgctttagtcacagtcattggcacccgactcggaccgatg

SEQ ID NO: 12851 - DNA, 203 bp, synthetic construct
  source 1..203: mol_type = other DNA
ggcgcgccagtcctagcctggggcggcggtggtggtggtggcggcggcggcggcgaagggggcggagaggaaggagcgcggcgggaccgggccgggacagcgcgtactttgggctccgggattcgctccgcgttatattgccagtgagctgccgctgcagccatagcagcaggtcagtcattggcacccgactcggaccgatg

SEQ ID NO: 12852 - DNA, 203 bp, synthetic construct
  source 1..203: mol_type = other DNA
ggcgcgccagtcctggtccgtggcggctggagcggacccagcgagtgagggcgcacagccgggacgccgaggcggcgggcgggagacccgagaagtgcaccatcgccctcggcgggacgtgacgcagcgcccggggcgcgggtgtatttgatatagtgtttgcaacaaattcgacccaggtgatcaaacgactcggaccgatg

SEQ ID NO: 12853 - DNA, 203 bp, synthetic construct
  source 1..203: mol_type = other DNA
ggcgcgccagtcctccgctgccgcggctggagcggacccagcgagtgatcctatcagtaatagacgccgaggcggcgggcgggagacccgcaccagcgcagccggccctcggcgggacgtgacgcagcgcccggggcgcgggtgtatttgatatagtgtttgcaacaaattcgacccaggtgatcaaacgactcggaccgatg

SEQ ID NO: 12854 - DNA, 203 bp, synthetic construct
  source 1..203: mol_type = other DNA
ggcgcgccagtcctgtggaccagcgggcgacactctcgggctcgcgcaagatagagcatgatcggcgcccgaggcctcgcgcgcccggagttgctggttctgtgaggtagcggcggcaacgaccatggaggccacgtcccgggaggcggcgccagcgaagagctcggcctcgggccccaacgctcccccgactcggaccgatg

SEQ ID NO: 12855 - DNA, 203 bp, synthetic construct
  source 1..203: mol_type = other DNA
ggcgcgccagtcctgcacctcagcgggcgacactctcgggctcgcgcacctccccaagatggcggcgcccgaggcctcgcgcgcccggagttgctggttctgtgaggtagcggcggcatgcggttatagcaacacgtcccgggaggcggcgccagcgaagagctcggcctcgggccccaacgctcccccgactcggaccgatg

SEQ ID NO: 12856 - DNA, 203 bp, synthetic construct
  source 1..203: mol_type = other DNA
ggcgcgccagtcctattcccatgcgggcgcggggctgaaggcggaaccacgacgggcagagagcacggagccgggaagcccctgggcgcccgtcggagggctatggagcagcggccgcggggctgcgcggcgagatgccacaatagcctcctggtgctgctgggggcccgggcccagggcggcactcgcgactcggaccgatg

SEQ ID NO: 12857 - DNA, 203 bp, synthetic construct
  source 1..203: mol_type = other DNA
ggcgcgccagtcctattgtcttgcgggcgggccccgtccatcctcagcgcagtcgtgttctccgagttcctgtctctctgccaacgccgcccggatggcttcccaaaaccgcgacccagccgccactagcgtcgccgccgcccgtaaaggagctgagccgagcgggggcgccgcccggggtccggtggcgactcggaccgatg

SEQ ID NO: 12858 - DNA, 203 bp, synthetic construct
  source 1..203: mol_type = other DNA
ggcgcgccagtcctgttgtaacgcgggcgggcccgcagtcctgcagttgcagtcgtgttctccgagttcctgtctctctgccaacgccgcccggatggcttcccaaaaccgcgacccacagcaacaacttcacgccgccgcccgtaaaggagctgagccgagcgggggcgccgcccggggtccggtggcgactcggaccgatg

SEQ ID NO: 12859 - DNA, 203 bp, synthetic construct
  source 1..203: mol_type = other DNA
ggcgcgccagtcctgcgcatgcgcgggcgggcccgcagtcctgcagttgcagtcgtgttctccgagttcctgtctctctgccaacgccgcccggatggcttcccaaaaccgcgacccagccgccactagcgtcgccgccgcccgtaaaggagctgagccgagcgggggcgccgcccggggtccggtggcgactcggaccgatg

SEQ ID NO: 12860 - DNA, 203 bp, synthetic construct
  source 1..203: mol_type = other DNA
ggcgcgccagtcctccagctacgcgggcgggcccgcagtcctgcagttgcagtcgtgttctccgagttcctgtctctctgccaacgccgcgtaatgataacttgaaaaccgcgacccagccgccactagcgtcgccgccgcccgtaaaggagctgagccgagcgggggcgccgcccggggtccggtggcgactcggaccgatg

SEQ ID NO: 12861 - DNA, 203 bp, synthetic construct
  source 1..203: mol_type = other DNA
ggcgcgccagtcctaccagttagcggggctgggaagtagtcgggcggggttgtgagacgccgcgctcagcttccatcgctgggcggtcaacaagtgcgggcctgctcagcaagctttaggcgcggagaccgcgaggcgaccgggagcggctgggttcccggctgcgcgcccttcggccaggccgggagcgactcggaccgatg

SEQ ID NO: 12862 - DNA, 203 bp, synthetic construct
  source 1..203: mol_type = other DNA
ggcgcgccagtcctgtgtttaggcggggctgggaagtagtcgggcggggttgtgagacgccgcgctcagcttccatcgctgggcggtcaacaagtgcgggcctggctcagcgcgggggggcgcggagaccgcatcttctaataagtcggctgggttcccggctgcgcgcccttcggccaggccgggagcgactcggaccgatg

SEQ ID NO: 12863 - DNA, 203 bp, synthetic construct
  source 1..203: mol_type = other DNA
ggcgcgccagtcctatgggctggcggggctgggaagtagtcgggcggggttgtgagacgccgcgctcagcttccatgttgtccgtcaacgcaagtgcgggcctggctcagcgcgggggggcgcggagaccgcgaggcgaccgggagcggctgggttcccggctgcgcgcccttcggccaggccgggagcgactcggaccgatg

SEQ ID NO: 12864 - DNA, 203 bp, synthetic construct
  source 1..203: mol_type = other DNA
ggcgcgccagtccttgcttgtggcggggctgggatcacaagttcgacagttgtgagacgccgcgctcagcttccatcgctgggcggtcaacaagtgcgggcctggctcagcgcgggggggcgcggagaccgcgaggcgaccgggagcggctgggttcccggctgcgcgcccttcggccaggccgggagcgactcggaccgatg

SEQ ID NO: 12865 - DNA, 203 bp, synthetic construct
  source 1..203: mol_type = other DNA
ggcgcgccagtcctaggcgtacgcgggtggacgctttttggagatctagatcattactatatgtgtctcctataatcacatcataggagtgaaccataatacacatctttgggtaggggaaggaaagtattgttgacgtactgattgatctgcttgagtcaaataatcagtcataacaattcaagaaacgactcggaccgatg

SEQ ID NO: 12866 - DNA, 203 bp, synthetic construct
  source 1..203: mol_type = other DNA
ggcgcgccagtcctaaccgacggcgggtgtaggattagtgtcatgaattagtgtttcaaatcagttgcatatcaattaagaaaaacttaggagacaggtatagaacctctctttcagataactggtcaattaaggacagaaattctgtttctcaaatccgctagcctttgtcaaagaggacacaagcacgactcggaccgatg

SEQ ID NO: 12867 - DNA, 203 bp, synthetic construct
  source 1..203: mol_type = other DNA
ggcgcgccagtcctcgagatgcgcggtccctgaggggcgggcggggcccgaccggcgctctgtgtggccgaggccacatcaagaactttacccggctaggccccgggcggctctagcccagggcggcccgcggggcgctgggcctggctcccggctccggtttccgggccggcgggtggccgctcacccgactcggaccgatg

SEQ ID NO: 12868 - DNA, 203 bp, synthetic construct
  source 1..203: mol_type = other DNA
ggcgcgccagtcctcaagttgagcgtagccgagacacacgcatggtgctccggaggcggcggcgggtgagctcaacttcgcacagcccttcccagctccagccccggctggcccggcacttctcggagggtcccggcagccgggaccagtgagtgcctctacggaccagcgccccggcgggcgggaagcgactcggaccgatg

SEQ ID NO: 12869 - DNA, 203 bp, synthetic construct
  source 1..203: mol_type = other DNA
ggcgcgccagtcctgtctgagtgcgtagccgagatcaggcgtacagagtccggaggcggcggcgggtgagctcaacttcgcacagcccttcccagctccagccccggctggcccggcacttctcggagggtcccggcagccgggaccagtgagtgcctctacggaccagcgcccatagctataatttacgactcggaccgatg

SEQ ID NO: 12870 - DNA, 203 bp, synthetic construct
  source 1..203: mol_type = other DNA
ggcgcgccagtccttattaagtgcgtattcaacaaggggctgaaggatgcccagaaggtaccaggaaccgaatttactgatctggggcctcggtgcacatgctttacatgtgtttagtcgaggttaaaaaacgtctaggccccccgaaccacggggacgtggttttcctttgaaaaacacgatgataacgactcggaccgatg

SEQ ID NO: 12871 - DNA, 203 bp, synthetic construct
  source 1..203: mol_type = other DNA
ggcgcgccagtcctaggctcttgcgtattcaacaaggggctgaaggatgcccagaaggtaccccattgtatgggatctgatctggggcctacaattcagcaggatacatgtgtttagtcgaggttaaaaaacgtctaggccccccgaaccacggggacgtggttttcctttgaaaaacacgatgataacgactcggaccgatg

SEQ ID NO: 12872 - DNA, 203 bp, synthetic construct
  source 1..203: mol_type = other DNA
ggcgcgccagtcctatgcgcaagcgtccggaaagctcagccgtgattgcacaagagagctacaagagcctggaagaagctgaagactgctaccctccatccttactcaccctggacctgagagacctcttcaatcaggtggagcaaggccctctcctgtcctgccccaaggctggcacagacttgagccgactcggaccgatg

SEQ ID NO: 12873 - DNA, 203 bp, synthetic construct
  source 1..203: mol_type = other DNA
ggcgcgccagtccttgttcgcagcgtccggaaagtcagtagaattcatcacaagagagctacaagagcctggaagaagctgaagactgctaccctccatccttactcaccctggacctcctcactgagggatatcaggtggagcaaggccctctcctgtcctgccccaaggctggcacagacttgagccgactcggaccgatg

SEQ ID NO: 12874 - DNA, 203 bp, synthetic construct
  source 1..203: mol_type = other DNA
ggcgcgccagtcctgctacggtgcgtccggaaagtcagtagaattcatcacaagagagctacaagagcctggaagaagctgaagactgctaccctccatccttactcaccctggacctgagagacctcttcaatcaggtggagcaaggccctctcctgtcctgccccaaggctggcacagacttgagccgactcggaccgatg

SEQ ID NO: 12875 - DNA, 203 bp, synthetic construct
  source 1..203: mol_type = other DNA
ggcgcgccagtcctcatttaaagcgtccggaaagtcagtagaattcatcacaagagagctacaagagcctggaagaagctgaagactgctaccctccatccttactcaccctggacctgagagacctcttcaatcaggtggagcaatcatactcaactgactgccccaaggctggcacagacttgagccgactcggaccgatg

SEQ ID NO: 12876 - DNA, 203 bp, synthetic construct
  source 1..203: mol_type = other DNA
ggcgcgccagtcctaatcgaacgcgtccggaaagtcagtagaattcatcacaagagagctacaagagcctggaagaagctgaagactgctcttgagacgagccgctcaccctggacctgagagacctcttcaatcaggtggagcaaggccctctcctgtcctgccccaaggctggcacagacttgagccgactcggaccgatg

SEQ ID NO: 12877 - DNA, 203 bp, synthetic construct
  source 1..203: mol_type = other DNA
ggcgcgccagtccttaaatggtgcgtccggaaagtcagtagaattcatggttgatctcagcaaagagcctggaagaagctgaagactgctaccctccatccttactcaccctggacctgagagacctcttcaatcaggtggagcaaggccctctcctgtcctgccccaaggctggcacagacttgagccgactcggaccgatg

SEQ ID NO: 12878 - DNA, 203 bp, synthetic construct
  source 1..203: mol_type = other DNA
ggcgcgccagtcctgggaaatcgcgtgcttaggcttttgaagatggcttcattttggtgggattctcagattggccgcaactggagcccatcctgtttgtctttatttttattttctactccctaactctctttggcaacaccatcatcatcgctctctcctggctagaccttcggctgcacacacctcgactcggaccgatg

SEQ ID NO: 12879 - DNA, 203 bp, synthetic construct
  source 1..203: mol_type = other DNA
ggcgcgccagtccttcctcttagcgttactcgacagaggagagcaagaaatggagccagtagatcctagactagagccctggaagcatccaggaagtcagcctaaaactgcttgtaccaattgctattgtaacgctctactgcgctattgccaagtttgtttcataacaaaagccttaggcatctcctcgactcggaccgatg

SEQ ID NO: 12880 - DNA, 203 bp, synthetic construct
  source 1..203: mol_type = other DNA
ggcgcgccagtcctgcccagtggctatcggacctcgcttaggactcccattcccatggagaaactcctagatgaggcatcatgagtgcaagggccttataacttaaccgtcggcagttgggtaagagaccacgtccgatcaattgtcgagggcgcgtgggaagtgcgcgatgttgttaccgctgcccacgactcggaccgatg

SEQ ID NO: 12881 - DNA, 203 bp, synthetic construct
  source 1..203: mol_type = other DNA
ggcgcgccagtcctttcggcacgctatcggacctcgcttaggactcccattcccatggagaaactcctagatgaggttcttgcccccggtgggccttataacttaaccgtcggcagttattgctctcgtagggtccgatcaattgtcgagggcgcgtgggaagtgcgcgatgttgttaccgctgcccacgactcggaccgatg

SEQ ID NO: 12882 - DNA, 203 bp, synthetic construct
  source 1..203: mol_type = other DNA
ggcgcgccagtcctcattctcagctatcggacctcgcttaggactcccattcccatggagaaactcctagatgaggttcttgcccccggtgggccttataacttaaccgtcggcagttgggtaagagaccacgtccgatcaattgtcgagggcgcgtgggaagtgcgcgatgttagactgcaacgggtcgactcggaccgatg

SEQ ID NO: 12883 - DNA, 203 bp, synthetic construct
  source 1..203: mol_type = other DNA
ggcgcgccagtcctcggaacaagctatcggacctcgcttaggactcccattcccatggagaaactcctagatgaggttcttgcccccggtgggccttataacttaaccgtcggcagttgggtaagagaccacgtccgatcaattgtttttctgcacacaaaagtgcgcgatgttgttaccgctgcccacgactcggaccgatg

SEQ ID NO: 12884 - DNA, 203 bp, synthetic construct
  source 1..203: mol_type = other DNA
ggcgcgccagtcctggatcaaggctatcggacctcgcttaggactcccattcccatggagaaactcctagatgaggttcttgcccccggtgggccttataacttcttaagactggaccgggtaagagaccacgtccgatcaattgtcgagggcgcgtgggaagtgcgcgatgttgttaccgctgcccacgactcggaccgatg

SEQ ID NO: 12885 - DNA, 203 bp, synthetic construct
  source 1..203: mol_type = other DNA
ggcgcgccagtcctatgcttgggctatcggacctcgcttaggactcccattcccatggagaaggcgtggacgacccttcttgcccccggtgggccttataacttaaccgtcggcagttgggtaagagaccacgtccgatcaattgtcgagggcgcgtgggaagtgcgcgatgttgttaccgctgcccacgactcggaccgatg

SEQ ID NO: 12886 - DNA, 203 bp, synthetic construct
  source 1..203: mol_type = other DNA
ggcgcgccagtcctaagaatgcgctatcggacctcgcttaggactccctccgtagcctccttactcctagatgaggttcttgcccccggtgggccttataacttaaccgtcggcagttgggtaagagaccacgtccgatcaattgtcgagggcgcgtgggaagtgcgcgatgttgttaccgctgcccacgactcggaccgatg

SEQ ID NO: 12887 - DNA, 203 bp, synthetic construct
  source 1..203: mol_type = other DNA
ggcgcgccagtcctgtgttcgtgctattttgcttccctattcagtctcccgtggcaaggaggtgtacagccctgactttcatagcctcggaggagaaggtcttggtggccgacaagtctggagacgtctactccttttcggtgctggagccacacgggtgtggccgtctagagctggggcacctgtctcgactcggaccgatg

SEQ ID NO: 12888 - DNA, 203 bp, synthetic construct
  source 1..203: mol_type = other DNA
ggcgcgccagtcctcgcagaatgctattttgctttaaccgatgacagaccgtggcaaggagggacgtgttggctcatttcatagcctcggaggagaaggtcttggtggccgacaagtctggagacgtctactccttttcggtgctggagccacacgggtgtggccgtctagagctggggcacctgtctcgactcggaccgatg

SEQ ID NO: 12889 - DNA, 203 bp, synthetic construct
  source 1..203: mol_type = other DNA
ggcgcgccagtcctgggcgcgtgctattttgctttaaccgatgacagaccgtggcaaggaggtgtacagccctgaccgcgtagaggaaccaggagaaggtcttggtggccgacaagtctggagacgtctactccttttcggtgctggagccacacgggtgtggccgtctagagctggggcacctgtctcgactcggaccgatg

SEQ ID NO: 12890 - DNA, 203 bp, synthetic construct
  source 1..203: mol_type = other DNA
ggcgcgccagtccttaacgcccgctattttgctttaaccgatgacagaccgtggcaaggaggtgtacagccctgactttcatagcctcggaggagaaggtcttggtggccgacaagtctggagacgtctactccttttcggtgctggagccacacgggtgtggccgtctagagctggggcacctgtctcgactcggaccgatg

SEQ ID NO: 12891 - DNA, 203 bp, synthetic construct
  source 1..203: mol_type = other DNA
ggcgcgccagtcctcgtacgatgctattttgctttaaccgatgacagaccgtggcaaggaggtgtacagccctgactttcatagcctcgggaagcccacagcgcgtggccgacaagtctggagacgtctactccttttcggtgctggagccacacgggtgtggccgtctagagctggggcacctgtctcgactcggaccgatg

SEQ ID NO: 12892 - DNA, 203 bp, synthetic construct
  source 1..203: mol_type = other DNA
ggcgcgccagtcctgcgggtgggctattttgctttaaccgatgacagaggtcccagtcatcatgtacagccctgactttcatagcctcggaggagaaggtcttggtggccgacaagtctggagacgtctactccttttcggtgctggagccacacgggtgtggccgtctagagctggggcacctgtctcgactcggaccgatg

SEQ ID NO: 12893 - DNA, 203 bp, synthetic construct
  source 1..203: mol_type = other DNA
ggcgcgccagtcctgaggcaccgctcagcgcgggaatataaacgagatgcgaggcgaccgggagcggctgggttcccggctgcgcgcccttcggccaggccgggagccgcgccagtcggagcccccggcccagcgtggtccgcctccctctgggcgtccacctgcccggagtactgccagcgggcatgcgactcggaccgatg

SEQ ID NO: 12894 - DNA, 203 bp, synthetic construct
  source 1..203: mol_type = other DNA
ggcgcgccagtccttcctttgcgctcagcgcgggggggcgcggagaccgcgaggcgaccgggagcggctgggttcctcttcctatttttctcggccaggccgggagccgcgccagtcggagcccccggcccagcgtggtccgcctccctctgggcgtccacctgcccggagtactgccagcgggcatgcgactcggaccgatg

SEQ ID NO: 12895 - DNA, 203 bp, synthetic construct
  source 1..203: mol_type = other DNA
ggcgcgccagtcctttaggttcgctcatctttgcggggttagctagccaaatctgtagccggtccttggcaagacagtagcttagagaaacgagatcgaatgcacccggaaggtggccaatttgtgcctcaactccttggccatctcctggctaccaaactcaagcgtttcctccttagcaaaggcggcgactcggaccgatg

SEQ ID NO: 12896 - DNA, 203 bp, synthetic construct
  source 1..203: mol_type = other DNA
ggcgcgccagtcctggttccctgctcatctttgcggggttagctagccgttgagtccaagtcggacaccaggaacagtagcttagagaaacgagatcgaatgcacccggaaggtggccaatttgtgcctcaactccttggccatctcctggctaccaaactcaagcgtttccgttgggaattgggcggcgactcggaccgatg

SEQ ID NO: 12897 - DNA, 203 bp, synthetic construct
  source 1..203: mol_type = other DNA
ggcgcgccagtccttgctgctagctcatctttgcggggttagctagccgttgagtccaagtctccttggcaagacagtagcttagagaaacgagatcgaatgcaaggactccccaaagaatttgtgcctcaactccttggccatctcctggctaccaaactcaagcgtttcctccttagcaaaggcggcgactcggaccgatg

SEQ ID NO: 12898 - DNA, 203 bp, synthetic construct
  source 1..203: mol_type = other DNA
ggcgcgccagtcctcactgcatgctcatctttgcggggttagctagccgttgagtccaagtctccttggcaagacagtagcttagagaaacgagatcgaatgcacccggaaggtggccaatttgtgcctcaactccttggccatctcctggctaccaaactcaagcgtttcctcagagctgttctttccgactcggaccgatg

SEQ ID NO: 12899 - DNA, 203 bp, synthetic construct
  source 1..203: mol_type = other DNA
ggcgcgccagtcctaagggcgtgctcatctttgcggggttagctagccgttgagtccaagtctccttggcaagacagtagcttagagaaacgagatcgaatgcacccggaaggtggccaatttgtgcctcaactccttggccatcttaattgggtagctgtcaagcgtttcctccttagcaaaggcggcgactcggaccgatg

SEQ ID NO: 12900 - DNA, 203 bp, synthetic construct
  source 1..203: mol_type = other DNA
ggcgcgccagtcctagatatcagctcatctttgcggggttagctagccgttgagtccaagtctccttggcaagacagtagcttagagaaacgagatcgaatgcacccggaaggtggccaatttgtgcctcaagcagcataggtgtccctggctaccaaactcaagcgtttcctccttagcaaaggcggcgactcggaccgatg

SEQ ID NO: 12901 - DNA, 203 bp, synthetic construct
  source 1..203: mol_type = other DNA
ggcgcgccagtcctttgctaacgctccgcggcggctgcgaaggcggcggctcctgccctctcgctttccctctcgcgtctctggctgcagaaagaagcttccgggcagtcaccttacaaggtgccatttccctctctgttgaagcaaaggccggggcagacctcctagtgaaaggaaagcaagccaggcgactcggaccgatg

SEQ ID NO: 12902 - DNA, 203 bp, synthetic construct
  source 1..203: mol_type = other DNA
ggcgcgccagtcctttcaaagtgctccgcggcggctgcgaaggcggcggctcctgccctctcgctttccctctcgcgtctctggctgcagaaagaagcttccggttctgaggtcctggaggtgccatttcccagggatggttgtgcaaggccggggcagacctcctagtgaaaggaaagcaagccaggcgactcggaccgatg

SEQ ID NO: 12903 - DNA, 203 bp, synthetic construct
  source 1..203: mol_type = other DNA
ggcgcgccagtcctgtttctgggctcgtctccgccggggacgtgctgcagcaacggctgcagggccgctaggccgactggcgccagacgcggcgcgtggccacgttggtggtgaccttccacgccaacttcatgatgtcacctagaggcctgctggagcgcgcgctcccgggccgagcgccgcgcgcccgactcggaccgatg

SEQ ID NO: 12904 - DNA, 203 bp, synthetic construct
  source 1..203: mol_type = other DNA
ggcgcgccagtccttttctgcagctcgtctccgccggggacgtgctgcagcaacggctgcagggccgctaggccgactggcgccagacgcggcgcgtggccacgttggtggtgaccttggtaagacggaaagactacgtgtggctgggcctgctggagcgcgcgctcccgggccgagcgccgcgcgcccgactcggaccgatg

SEQ ID NO: 12905 - DNA, 203 bp, synthetic construct
  source 1..203: mol_type = other DNA
ggcgcgccagtcctcctacgcagctcgttatctcccagcagtctcctctttacagaaaagagtaagagtactgaggaccgtcgcctctagtcgaagatgagccggcccgaaggaaggaaaaaccgcggggggagagaagaggttctcgagcagtgggtgagcggaagaaagaagttagaggaactcgacgactcggaccgatg

SEQ ID NO: 12906 - DNA, 203 bp, synthetic construct
  source 1..203: mol_type = other DNA
ggcgcgccagtcctccctcaaggctctcgggcaccctcacctgccggcgcccggccgcttacccggcagggcgtgcgcagggtagggtgcgggaccggggggacctggaggcagaggggagaaccggccgtccgcgccgcagcacactgcactatccttgctcagaccccgcgcggggcgccggctcccgactcggaccgatg

SEQ ID NO: 12907 - DNA, 203 bp, synthetic construct
  source 1..203: mol_type = other DNA
ggcgcgccagtcctaaactagggctctcgggcaccctcacctgccggcgcccggccgcttacccggcagggcgtgcgcagggtagggtgcgggaccggggggacctggaggcagaggggagaaccggccgtcgttagtcgcctgttgccgctgggagcgcctcagaccccgcgcggggcgccggctcccgactcggaccgatg

SEQ ID NO: 12908 - DNA, 203 bp, synthetic construct
  source 1..203: mol_type = other DNA
ggcgcgccagtcctgtacgtaagctgcgagccctgggccacgctggccgtgctggcagtgggccgcctcgatccctaaaacacgacatggttgaggctccaagaccagcaggtgaggcctcgcggcgctgaaaccgtgaggcccggaccacaggctccagatggaccctgggaaggacaaagagggggcgactcggaccgatg

SEQ ID NO: 12909 - DNA, 203 bp, synthetic construct
  source 1..203: mol_type = other DNA
ggcgcgccagtcctcaaccaccgctgcgagccctgggccacgctggccgtgctggcagtgggccgcctcgatccctctgcagtctttcccttgaggctccaagaatgcactcctttttctcgcggcgctgaaaccgtgaggcccggaccacaggctccagatggaccctgggaaggacaaagagggggcgactcggaccgatg

SEQ ID NO: 12910 - DNA, 203 bp, synthetic construct
  source 1..203: mol_type = other DNA
ggcgcgccagtccttcgtatgtgctgcgagccctgggccacgctggccgtgctggcagtggggactaaacggtttcctgcagtctttcccttgaggctccaagaccagcaggtgaggcctcgcggcgctgaaaccgtgaggcccggaccacaggctccagatggaccctgggaaggacaaagagggggcgactcggaccgatg

SEQ ID NO: 12911 - DNA, 203 bp, synthetic construct
  source 1..203: mol_type = other DNA
ggcgcgccagtcctatcgaggagctggagcgagtgagcagcgatacctagggcggaagtgctctcggcggaagtgatcgctgtgtgaatccacctctttgatctcgcgggccgcctctttctaagtcggcttcgagcacccttcagttccatggccaagagcccactcgagggcgtttcctcctccagcgactcggaccgatg

SEQ ID NO: 12912 - DNA, 203 bp, synthetic construct
  source 1..203: mol_type = other DNA
ggcgcgccagtcctactaacatgctggagcgagtgagcagcgatacctagggcggaagtgctctcggcggaagtgatcgctgtgtgaatcgtgggtgggatggccgcgggccgcctctaaaattaaattgcacgagcacccttcagttccatggccaagagcccactcgagggcgtttcctcctccagcgactcggaccgatg

SEQ ID NO: 12913 - DNA, 203 bp, synthetic construct
  source 1..203: mol_type = other DNA
ggcgcgccagtcctgacccaacgctggagcgagtgagcagcgatacctagggcggaagtgctctcggcggaagtgatcgctgtgtgaatcgtgggtgggatggccgcgggccgcctctttctaagtcggcttatttgcattagtgcttccatggccaagagcccactcgagggcgtttcctcctccagcgactcggaccgatg

SEQ ID NO: 12914 - DNA, 203 bp, synthetic construct
  source 1..203: mol_type = other DNA
ggcgcgccagtcctacgatatggctggagcgagtgagcagcgatacctagggcggaagtgctctcggcggaagtgatcgctgtgtgaatcgtgggtgggatggccgcgggccgcctctttctaagtcggcttcgagcacccttcagttccatggccaagagcccactcgagggccaaaagattgaggacgactcggaccgatg

SEQ ID NO: 12915 - DNA, 203 bp, synthetic construct
  source 1..203: mol_type = other DNA
ggcgcgccagtcctggcctatggctggggtgaccgggtcctttcttggagcaacccgctcaatacccagaaatttgggcgtgcccccgcgagatcactagccgagtagtgttgggtcgcgaaaggccttgtggtactgcctgatagggtgcttgcgagtgccccgggaggtctctagcgggcgtggcacgactcggaccgatg

SEQ ID NO: 12916 - DNA, 203 bp, synthetic construct
  source 1..203: mol_type = other DNA
ggcgcgccagtccttttgagtggctggggtgaccgggtcctttcttggttgccagtcagtgttacccagaaatttgggcgtgcccccgcgagatcactagccgagtagtgttgggtcgcgaaaggccttgtggtactgcctgatagggtgcttgcgagtgccccgggaggtctcgtagaccgtgcaaccgactcggaccgatg

SEQ ID NO: 12917 - DNA, 203 bp, synthetic construct
  source 1..203: mol_type = other DNA
ggcgcgccagtcctagaggtccgctggggtttggtgattcggaggcctggggtgcagacgcggcgtggctgtgagggtgaacgtcatcgccgggtgtgagggccggactcacactgggccgccgcggggctgtttccatcggtcactggattttctcctcttccggttcgggcctcagggtggccgaccgactcggaccgatg

SEQ ID NO: 12918 - DNA, 203 bp, synthetic construct
  source 1..203: mol_type = other DNA
ggcgcgccagtcctggcgcattgcttaatgattgagagctcccttctgataaagggagcctgggaggctgggtggaggagggagcagaaaaaacccaactcagcagatctgggaactgtgagagcggcaagcaggaactgtggtcagaggctgtgcgtcttggctggtagggcctgctcttttctacccgactcggaccgatg

SEQ ID NO: 12919 - DNA, 203 bp, synthetic construct
  source 1..203: mol_type = other DNA
ggcgcgccagtccttcggcccagcttaatgattgtccagaaggcggctataaagggagcctgggaggctgggtggaggagggagcagaaaaaacccaactcagcagatctgggaactgtgagagcggcaagcaggaactgtggtcagaggctgtgcgtctaaaacttcgcatggtgctcttttctacccgactcggaccgatg

SEQ ID NO: 12920 - DNA, 203 bp, synthetic construct
  source 1..203: mol_type = other DNA
ggcgcgccagtcctttgcacgggcttaatgattgtccagaaggcggctataaagggagcctgggaggctgggtggaggagggagcagaaaaaacccaactcagcagatctgggaactgtgagagcggcaagctattcggtactcgggaggctgtgcgtcttggctggtagggcctgctcttttctacccgactcggaccgatg

SEQ ID NO: 12921 - DNA, 203 bp, synthetic construct
  source 1..203: mol_type = other DNA
ggcgcgccagtcctcatgatccgcttaatgattgtccagaaggcggctataaagggagcctgggaggctgggtggaggagggagcagaaatctggggggcggcgagatctgggaactgtgagagcggcaagcaggaactgtggtcagaggctgtgcgtcttggctggtagggcctgctcttttctacccgactcggaccgatg

SEQ ID NO: 12922 - DNA, 203 bp, synthetic construct
  source 1..203: mol_type = other DNA
ggcgcgccagtcctgcgggatcgcttaatgattgtccagaaggcggctataaagggagcctgggaggctgggtggatatattcattcctcaaacccaactcagcagatctgggaactgtgagagcggcaagcaggaactgtggtcagaggctgtgcgtcttggctggtagggcctgctcttttctacccgactcggaccgatg

SEQ ID NO: 12923 - DNA, 203 bp, synthetic construct
  source 1..203: mol_type = other DNA
ggcgcgccagtcctccgtccgcgcttaatgattgtccagaaggcggctcgcttttccatgctggaggctgggtggaggagggagcagaaaaaacccaactcagcagatctgggaactgtgagagcggcaagcaggaactgtggtcagaggctgtgcgtcttggctggtagggcctgctcttttctacccgactcggaccgatg

SEQ ID NO: 12924 - DNA, 203 bp, synthetic construct
  source 1..203: mol_type = other DNA
ggcgcgccagtcctcttagtttgcttcatcctacagcgggcgccaggccggccgggcaggatgcgctaccgggcgtcggccctgggcagtgacggggttcgggtgaccatggagagtgcgctcaccgcccgtgaccgggtgggggtgcaggatttcgtgctgctggagaacttcaccagcgaggccgccgactcggaccgatg

SEQ ID NO: 12925 - DNA, 203 bp, synthetic construct
  source 1..203: mol_type = other DNA
ggcgcgccagtcctaacgttcagcttccccaaggtgcaggcgcggtgaaaccatcgagacggagggccagagagtcacggcggtgagagggctgagtgacgggttaccccaaaccatgtggctggaggcgcgagctggggttttcgtaacaccccagggcctgtaaggtttggtgtttccctttcaagcgactcggaccgatg

SEQ ID NO: 12926 - DNA, 203 bp, synthetic construct
  source 1..203: mol_type = other DNA
ggcgcgccagtcctgctagtatgcttccccaaggtgcaggcgcggtgaaaccatcgagacggagggccagagagtcacggcggtgagagggctgagtgacgggttaccccaaaccatgtggctggaggcgcgtcacccacaacatttaacaccccagggcctgtaaggtttggtgtttccctttcaagcgactcggaccgatg

SEQ ID NO: 12927 - DNA, 203 bp, synthetic construct
  source 1..203: mol_type = other DNA
ggcgcgccagtcctagtaaggtgcttccccaaggtgcaggcgcggtgaaaccatcgagacggagggccagagagtcttctgaacccatcagctgagtgacgggttaccccaaaccatgtggctggaggcgcgagctggggttttcgtaacaccccagggcctgtaaggtttggtgtttccctttcaagcgactcggaccgatg

SEQ ID NO: 12928 - DNA, 203 bp, synthetic construct
  source 1..203: mol_type = other DNA
ggcgcgccagtcctgagacgaagcttcttctgtaacgggagctggttgtgagtcaccaaggaaggcagcggcagctccactcagccagtacccagatacgctgggaaccttccccagccatggcttccctggggcagatcctcttctggagcataattagcatcatcattattctggctggagcaattcgactcggaccgatg

SEQ ID NO: 12929 - DNA, 203 bp, synthetic construct
  source 1..203: mol_type = other DNA
ggcgcgccagtcctaagcctcggctttcctccaacttgctgcgggtggatctccgctggacacaccgcctccgaggatcccgttgctccacaaggagggactttaagactacttctgatttgcaaagattgtctgtgctctgagcaggctgaagtgactggacgagacgcactgttggagaaataaaacgactcggaccgatg

SEQ ID NO: 12930 - DNA, 203 bp, synthetic construct
  source 1..203: mol_type = other DNA
ggcgcgccagtcctgttggcatgctttcctccaacttgctgcgggtggatctccgctggacacaccgcctccgaggcagtttgaaaattgcaaggagggactttaagactacttctgatttgcaaagattgtctgtgctctgagcaggctgaagtgactgtgaactttcggagtttggagaaataaaacgactcggaccgatg

SEQ ID NO: 12931 - DNA, 203 bp, synthetic construct
  source 1..203: mol_type = other DNA
ggcgcgccagtcctgtaagacagctttcctccaacttgctgcgggtggatctccgctggacacaccgcctccgaggcagtttgaaaattgcaaggagggactttcgaggcgtgcggactttgcaaagattgtctgtgctctgagcaggctgaagtgactggacgagacgcactgttggagaaataaaacgactcggaccgatg

SEQ ID NO: 12932 - DNA, 203 bp, synthetic construct
  source 1..203: mol_type = other DNA
ggcgcgccagtcctacacgaccgctttcctccaacttgctgcgggtggatctccgctggacacaccgcctccgaggcagtttgaaaattgtgcacgcactgaaaaagactacttctgatttgcaaagattgtctgtgctctgagcaggctgaagtgactggacgagacgcactgttggagaaataaaacgactcggaccgatg

SEQ ID NO: 12933 - DNA, 203 bp, synthetic construct
  source 1..203: mol_type = other DNA
ggcgcgccagtccttccgcgaagctttcctccaacttgctgcgggtggcaggtatggccgtgcaccgcctccgaggcagtttgaaaattgcaaggagggactttaagactacttctgatttgcaaagattgtctgtgctctgagcaggctgaagtgactggacgagacgcactgttggagaaataaaacgactcggaccgatg

SEQ ID NO: 12934 - DNA, 203 bp, synthetic construct
  source 1..203: mol_type = other DNA
ggcgcgccagtcctcctttcacggaaaactgcaccagggtaaaagaatttattttccttggcctgacccagaatcgggaagtgagcttagtcttatttcttttcctactcttggtgtaatatgattgggccatgggaaacctcctcatcatggtcactgttacctgtgaatctcgccttcacacgccccgactcggaccgatg

SEQ ID NO: 12935 - DNA, 203 bp, synthetic construct
  source 1..203: mol_type = other DNA
ggcgcgccagtccttgagtgatggaaaactgcaccagggtaaaagaatttattttccttggcctgacccagaatcgggaagtgagcttagtcttatttcttttcctactcttggtgtatgtgacaactttgctgggaaacctcctcatcatggtcactgttacctgtgaatctcgccttcacacgccccgactcggaccgatg

SEQ ID NO: 12936 - DNA, 203 bp, synthetic construct
  source 1..203: mol_type = other DNA
ggcgcgccagtcctaccatcaaggaaaactgcaccagggtaaaagaatttattttccttggcctgacccagaatcgggaagtgagcttagtcttatttcttttcctactcttggtgtatgtgacaactttgctgggaaacctcctcatcatggtcactgttacctgtgaatctctttgaacgctcttacgactcggaccgatg

SEQ ID NO: 12937 - DNA, 203 bp, synthetic construct
  source 1..203: mol_type = other DNA
ggcgcgccagtcctggagactaggaaaactgcacgccttattgctctgttattttccttggcctgacccagaatcgggaagtgagcttagtcttatttcttttcctactcttggtgtatgtgacaactttgctgggaaacctcctcatcatggtcactgttacctgtgaatctcgccttcacacgccccgactcggaccgatg

SEQ ID NO: 12938 - DNA, 203 bp, synthetic construct
  source 1..203: mol_type = other DNA
ggcgcgccagtcctaacttgtcggaaattatccgtactgtcttcacgcagaaagcgtctagccatggcgttagtatgagtgtcgtgcagcctccaggaccccccctcccgggagagccatagtggtctgcggaaccggtgagtacaccggaattgccaggacgaccgggtcctttcttggataaaccccgactcggaccgatg

SEQ ID NO: 12939 - DNA, 203 bp, synthetic construct
  source 1..203: mol_type = other DNA
ggcgcgccagtcctgaaaccctggacaatgaaataccgcccactcttacccccgccgcttctcgactctgttgttagccgaagactcgcctctcagccgcccgccgcacagacgcacgagtaaaaagtgcagctccatcggctgatcctcgctaagctccgactctgggcggcaccgggcgtcccacgcgactcggaccgatg

SEQ ID NO: 12940 - DNA, 203 bp, synthetic construct
  source 1..203: mol_type = other DNA
ggcgcgccagtcctaatttcatggacagattcggattagcagagagcctgttggagtcaaaacgctccgtaaccccaattcttacagttttagatccaatggtaccgacaggttcagaaaatttaaaaagtctttttaatactgtctgcgtcatttggtgcatacacgcagaagagaaagtgaaagatcgactcggaccgatg

SEQ ID NO: 12941 - DNA, 203 bp, synthetic construct
  source 1..203: mol_type = other DNA
ggcgcgccagtccttcactaaaggacagattcggattagcagagagcctgttggagtcaaaagagggttgtcaaaaaattcttacagttttagatccaatggtaccgacaggttcagaaaatttaaaaagtctttttaatactgtctgcgtcatttggtgcatacacgcagaagctccgcaaggtttccgactcggaccgatg

SEQ ID NO: 12942 - DNA, 203 bp, synthetic construct
  source 1..203: mol_type = other DNA
ggcgcgccagtcctctactagaggacatccctcaccggtgacggtggtccaggctgcgttggcggcctacctatggctaacgccatgggaatgcgcaatctgtgaaggtgtgaagagcctattgagctacataagaatcctccggcccctgaatgcggctaatcccaacctcggagcaggtggtcacacgactcggaccgatg

SEQ ID NO: 12943 - DNA, 203 bp, synthetic construct
  source 1..203: mol_type = other DNA
ggcgcgccagtcctcgtagcctggacatccctcaccggtgacggtggtccaggctgcgttggcggcctacctatggctaacgccatgggacgctagttgtgaacaaggtgtgaagagcagccgtcaagcgggaagaatcctccggcccctgaatgcggctaatcccaacctcggagcaggtggtcacacgactcggaccgatg

SEQ ID NO: 12944 - DNA, 203 bp, synthetic construct
  source 1..203: mol_type = other DNA
ggcgcgccagtcctaccggcagggacatccctcaccggtgacggtggtccaggctgcgttggcggcctacctatggctaacgccatgggacgctagttgtgaacaaggtgtgaagagcctattgagctacataagaatcctccggcccctgaatgcggctaatcccaacctcgggaggttcaactcttcgactcggaccgatg

SEQ ID NO: 12945 - DNA, 203 bp, synthetic construct
  source 1..203: mol_type = other DNA
ggcgcgccagtcctagatcaccggacatccctcaccggtgacggtggtccaggctgcgttggcggcctacctatggctaacgccatgggacgctagttgtgaacaaggtgtgaagagcctattgagctacataagaatcctccggcccctgaatgcggctcccagaccgagacaagcaggtggtcacacgactcggaccgatg

SEQ ID NO: 12946 - DNA, 203 bp, synthetic construct
  source 1..203: mol_type = other DNA
ggcgcgccagtcctacaagaatggacatcgaccattcccatcagatcaccctgctggacttgcagaccggaatggggctcgcctaaggagccgagcgctgcggaggctgctgcgtgttggatgggagtgggagggggctggagcgagatttccagggcgcagtcctccggggcgttacgccgggcatacgactcggaccgatg

SEQ ID NO: 12947 - DNA, 203 bp, synthetic construct
  source 1..203: mol_type = other DNA
ggcgcgccagtcctgactagggggacccgtagtgaacataggaaattgtcgttgaactacatgttgtaaggctttagagaaataagggagtgtcctatttaggatgaggtgctccggtggcagccccaccaaaacctctagcgactaggaacagctatatcgggttgctatagcagtcaggatgtcatcgactcggaccgatg

SEQ ID NO: 12948 - DNA, 203 bp, synthetic construct
  source 1..203: mol_type = other DNA
ggcgcgccagtcctcagggtgcggacctcgagcgaaagacgcccgcccgccgcccagccctcgcctccctgcccaccgggcccaccgcgccgccaccccgacccaagctatacaccagtgtccgctgcacaccagcttgttggcgtcttcgtcgccgcgctcgccccgggctactcctgcgcgccacacgactcggaccgatg

SEQ ID NO: 12949 - DNA, 203 bp, synthetic construct
  source 1..203: mol_type = other DNA
ggcgcgccagtcctttgtatcgggacctcgagcgaaagacgcccgcccgccgcccagccctcgcctccctgcccaccgggcccaccgcgccgccaccccgaccccgctgcgcacggcctgtccgctgcacaccagcttgttggcgtcttcgtcgccgcgcatagttaacctcggtcctgcgcgccacacgactcggaccgatg

SEQ ID NO: 12950 - DNA, 203 bp, synthetic construct
  source 1..203: mol_type = other DNA
ggcgcgccagtcctagtatctgggacctcgagcgaaagacgcccgcccgccgcccagccctcgcctccctgcccaccgggcccaccgcgccgccaccccgaccccgctgcgcacggcctgtccgctgcacaccagcttgttggcgtcttcgtcgccgcgctcgccccgggctaccatgcatgttgtttcgactcggaccgatg

SEQ ID NO: 12951 - DNA, 203 bp, synthetic construct
  source 1..203: mol_type = other DNA
ggcgcgccagtcctcttgcgttggacctcgagcgtcgtggtgggctgagccgcccagccctcgcctccctgcccaccgggcccaccgcgccgccaccccgaccccgctgcgcacggcctgtccgctgcacaccagcttgttggcgtcttcgtcgccgcgctcgccccgggctactcctgcgcgccacacgactcggaccgatg

SEQ ID NO: 12952 - DNA, 203 bp, synthetic construct
  source 1..203: mol_type = other DNA
ggcgcgccagtcctccgaacttggactctgtcttcagctggacactccctccctgcaccatgctaacttcgaactccctgcccagcctgagctgccgcaccagctgctcctcccggccctgtgtgccccccagctgccacggctgcaccctgcccggggcctgcaacatccccgccaatgtgagcaaccgactcggaccgatg

SEQ ID NO: 12953 - DNA, 203 bp, synthetic construct
  source 1..203: mol_type = other DNA
ggcgcgccagtcctttagttcaggactctgtcttcagctggacactccctccctgcaccatgtcttacagttgtggcctgcccagcctgacggatttgcaactttgctcctcccggccctgtgtgccccccagctgccacggctgcaccctgcccggggcctgcaacatccccgccaatgtgagcaaccgactcggaccgatg

SEQ ID NO: 12954 - DNA, 203 bp, synthetic construct
  source 1..203: mol_type = other DNA
ggcgcgccagtcctaatgagaaggactctgtcttcagctggacactccctccctgcaccatgtcttacagttgtggcctgcccagcctgagctgccgcaccagctgcattaatgggccctgtgtgccccccagctgccacggctgcaccctgcccggggcctgcaacatccccgccaatgtgagcaaccgactcggaccgatg

SEQ ID NO: 12955 - DNA, 203 bp, synthetic construct
  source 1..203: mol_type = other DNA
ggcgcgccagtcctcacgctggggactctgtcttcagctggacactccctccctgcaccatgtcttacagttgtggcctgcccagcctgagctgccgcaccagctgctcctcccggccctgtgtgccccccagctgccacggctgcaccctgcccggggcaccttcgcagtgtaccaatgtgagcaaccgactcggaccgatg

SEQ ID NO: 12956 - DNA, 203 bp, synthetic construct
  source 1..203: mol_type = other DNA
ggcgcgccagtcctgatgaatcggactctgtcttcagctggacactccctccctgcaccatgtcttacagttgtggcctgcccagcctgagctgccgcaccagctgctcctcccggccctgtgtgccccccagctgccacggctgcaccctgcccggggcctgcaacatccccggtctccctttttcacgactcggaccgatg

SEQ ID NO: 12957 - DNA, 203 bp, synthetic construct
  source 1..203: mol_type = other DNA
ggcgcgccagtcctttgggactggactctgtcttcagctggacactccctccctgcaccatgtcttacagttgtggttgtttagagacccgctgccgcaccagctgctcctcccggccctgtgtgccccccagctgccacggctgcaccctgcccggggcctgcaacatccccgccaatgtgagcaaccgactcggaccgatg

SEQ ID NO: 12958 - DNA, 203 bp, synthetic construct
  source 1..203: mol_type = other DNA
ggcgcgccagtcctcatcccacggactctgtcttcagctggacactcctagaacagtttcaatcttacagttgtggcctgcccagcctgagctgccgcaccagctgctcctcccggccctgtgtgccccccagctgccacggctgcaccctgcccggggcctgcaacatccccgccaatgtgagcaaccgactcggaccgatg

SEQ ID NO: 12959 - DNA, 203 bp, synthetic construct
  source 1..203: mol_type = other DNA
ggcgcgccagtcctgtattcacggactctgtcttcagctggatctcaggtccctgcaccatgtcttacagttgtggcctgcccagcctgagctgccgcaccagctgcattaatgggccctgtgtgccccccagctgccacggctgcaccctgcccggggcctgcaacatccccgccaatgtgagcaaccgactcggaccgatg

SEQ ID NO: 12960 - DNA, 203 bp, synthetic construct
  source 1..203: mol_type = other DNA
ggcgcgccagtcctgggtagaaggactctgtcttcagctggatctcaggtccctgcaccatgtcttacagttgtggcctgcccagcctgagctgccgcaccagctgctcctcccggccctgtgtgccccccagctgccacggctgcaccctgcccggggcctgcaacatccccgccaatgtgagcaaccgactcggaccgatg

SEQ ID NO: 12961 - DNA, 203 bp, synthetic construct
  source 1..203: mol_type = other DNA
ggcgcgccagtcctgaggttcgggactctgtctttgctaccctcacaactccctgcaccatgtcttacagttgtggcctgcccagcctgagctgccgcaccagctgctcctcccggccctgtgtgccccccagctgccacggctgcaccctgcccggggcctgcaacatccccgccaatgtgagcaaccgactcggaccgatg

SEQ ID NO: 12962 - DNA, 203 bp, synthetic construct
  source 1..203: mol_type = other DNA
ggcgcgccagtcctagttaagaggagagtagagcggagagaggaagtaagaagacgcctccgggtaagggacgcccctaacatccacggtaccaatgcgcgtactgtaaggaggagggacattggaagaagaactgtccaaaactcgtaagcggggcaaccccagtgttggtagaagaattacaatagcgactcggaccgatg

SEQ ID NO: 12963 - DNA, 203 bp, synthetic construct
  source 1..203: mol_type = other DNA
ggcgcgccagtcctagaccctgggagagtagagcggagagaggaagtaagaagacgcctccgggtaagggacgcccgcctttggggaaaaaccaatgcgcgtacaccctaacatctctacattggaagaagaactgtccaaaactcgtaagcggggcaaccccagtgttggtagaagaattacaatagcgactcggaccgatg

SEQ ID NO: 12964 - DNA, 203 bp, synthetic construct
  source 1..203: mol_type = other DNA
ggcgcgccagtccttcggcgtcggagccccgcgtgacgctcctctctcagtccaaaagcggcttttggttcggcgcagagagacccgggggtctagcttttcctcgaaaagcgccgccctgcccttggccccgagaacagacaaagagcaccgcagggccccgggtcgaacacccgctgaggccggcccgactcggaccgatg

SEQ ID NO: 12965 - DNA, 203 bp, synthetic construct
  source 1..203: mol_type = other DNA
ggcgcgccagtcctggatgcttggagccccgcgtgacgctcctctctcagtccaaaagcggcttttggttcggcgcagagagacccgggggtctagcttttcctcgaaaagcgccgccctgcccttggccccgagaacagacaaagagcaccgcagggccgatcacgctgggggatgatgaaattcgacgactcggaccgatg

SEQ ID NO: 12966 - DNA, 203 bp, synthetic construct
  source 1..203: mol_type = other DNA
ggcgcgccagtcctatatgaacggagccccgcgtgacgctcctctctcagtccaaaagcggcttttggttcggcgcagagagacccgggggtctagcttttcctcgaaaagcgccgccctgcccttggccccgagaacagacaaaggttggttttattgagatcacgctgggggcgctgaggccggcccgactcggaccgatg

SEQ ID NO: 12967 - DNA, 203 bp, synthetic construct
  source 1..203: mol_type = other DNA
ggcgcgccagtcctcgtgacgaggagccccgcgtgacgctcctctctcagtccaaaagcggcttttggttcggcgcagagagacccgggggtctagcttttcctcgaaaagcgccgccctgcccttggcccctcctgtgactgtccagcaccgcagggccgatcacgctgggggcgctgaggccggcccgactcggaccgatg

SEQ ID NO: 12968 - DNA, 203 bp, synthetic construct
  source 1..203: mol_type = other DNA
ggcgcgccagtcctatgttgttggagccccgcgtgacgctcctctctcctataggtgcacatttttggttcggcgcagagagacccgggggtctagcttttcctcgaaaagcgccgccctgcccttggccccgagaacagacaaagagcaccgcagggccgatcacgctgggggcgctgaggccggcccgactcggaccgatg

SEQ ID NO: 12969 - DNA, 203 bp, synthetic construct
  source 1..203: mol_type = other DNA
ggcgcgccagtccttccacgtgggagccgcgcagccctcggagcacgaatatatacagccctgctctgggacacacctccattggatttaaaagacagtcctcgtcagcactgactttcagctatggaatcgacggttgatgatgagcgttgtaggaatgaaatgaagatcgggtgaggagcaggacgcgactcggaccgatg

SEQ ID NO: 12970 - DNA, 203 bp, synthetic construct
  source 1..203: mol_type = other DNA
ggcgcgccagtcctcccttcgtggagccgcgcagccctcggagcacgaatatatacagccctgctctgggacacactgttggactcgaagaaagacagtcctcgtcagcactgactttcagctatggaatcgacggttgatgatgaagcgccggccgtgtaaatgaagatcgggtgaggagcaggacgcgactcggaccgatg

SEQ ID NO: 12971 - DNA, 203 bp, synthetic construct
  source 1..203: mol_type = other DNA
ggcgcgccagtcctcaagtcccggataggaggaatttaacaggatactgaacgtcgtatgttcagatcaaaagtaagaaaaacttagggtgaatgacaattcacagatcagctcaaccagacaccaccagcatacacgaaaccaaccttcacagtggatacctcagcatccaaaactctccttcccgacgactcggaccgatg

SEQ ID NO: 12972 - DNA, 203 bp, synthetic construct
  source 1..203: mol_type = other DNA
ggcgcgccagtcctgcgatgcaggataggaggaatttaacaggatacttggacaatagaagccagatcaaaagtaaagctttgagcaaaggaatgacaattcacagatcagctcaaccagacaccaccagcatacacgaaaccaaccttcacagtggatacctcagcatccaaaactctccttcccgacgactcggaccgatg

SEQ ID NO: 12973 - DNA, 203 bp, synthetic construct
  source 1..203: mol_type = other DNA
ggcgcgccagtcctccaaccagggataggaggaatttaacaggatacttggacaatagaagccagatcaaaagtaagaaaaacttagggtgaatgacaattcacagatcagctcaaccagacaccaccagcatacacgaaaccaaccttcacagtggatacctcagcatccaaaactctccttcccgacgactcggaccgatg

SEQ ID NO: 12974 - DNA, 203 bp, synthetic construct
  source 1..203: mol_type = other DNA
ggcgcgccagtcctgtctacttggatcacttgagatttcactcgattcgctgcagtgagccctgtttttgccaccacactccagcttgggattgattcctaaagactcatgttacgtgaggaagcagctcagaagaggaaaggaaaggagccaggcatggctcttcctcagatatctcttccaaatgccgactcggaccgatg

SEQ ID NO: 12975 - DNA, 203 bp, synthetic construct
  source 1..203: mol_type = other DNA
ggcgcgccagtcctaagaggatggatcacttgagccagggagttgaaggctgcagtgagcccgcaaaggattggaccactccagcttgggattgattcctaaagactcatgttacgtgaggaagcagctcagaagaggaaaggaaaggagccaggcatggctcttcctcagatatctcttccaaatgccgactcggaccgatg

SEQ ID NO: 12976 - DNA, 203 bp, synthetic construct
  source 1..203: mol_type = other DNA
ggcgcgccagtcctacactctaggatcacttgagccagggagttgaaggctgcagtgagccctgtttttgccaccacactccagcttgggattgattcctaaagactcatgttacgtgaggaagcagctcagaagaggaaaggaaaggagccaggcatggagtcggagagctattctcttccaaatgccgactcggaccgatg

SEQ ID NO: 12977 - DNA, 203 bp, synthetic construct
  source 1..203: mol_type = other DNA
ggcgcgccagtcctgttatccaggatcacttgagccagggagttgaaggctgcagtgagccctgtttttgccaccacactccagcttgggattgattcctaaagttaagatcaggccaaggaagcagctcagaagaggaaaggaaaggagccaggcatggctcttcctcagatatctcttccaaatgccgactcggaccgatg

SEQ ID NO: 12978 - DNA, 203 bp, synthetic construct
  source 1..203: mol_type = other DNA
ggcgcgccagtccttagcctttggatcctaggcaaattgtctacctttactggtcagcaagtcttttccacaatgagcaactcaaaggaaatccccagcttcagatggactcaatccctgagaagagggctcagtgagttcacaacaccggtgaagaccgatgttctgagggattgggtttgccagaccgactcggaccgatg

SEQ ID NO: 12979 - DNA, 203 bp, synthetic construct
  source 1..203: mol_type = other DNA
ggcgcgccagtcctgagtaaacggatcctaggcaaattgtctacctttcgatcatttacgaccttttccacaatgagcaactcaaaggaaatccccagcttcagatggactcaatccctgagaagagggctcagtgagttcacaacaccggtgaagaccgatgttctgagggatgccaaaatgatactcgactcggaccgatg

SEQ ID NO: 12980 - DNA, 203 bp, synthetic construct
  source 1..203: mol_type = other DNA
ggcgcgccagtcctctgatattggatcctaggcaatttggttgtctttaacgacctaaaatcgcgctgtacttctccaaatgggaaacaagcaagccaaagccccagaatcaaaagacagtccgagagccagcctgatcccagatgccacacatctagggccacagttctgtaagagctgctggttcgcgactcggaccgatg

SEQ ID NO: 12981 - DNA, 203 bp, synthetic construct
  source 1..203: mol_type = other DNA
ggcgcgccagtccttgacttctggatcctaggcaatttggttgtctttttttgaggccttgtgcgctgtacttctccaaatgggaaacaacttcattcgttagtcagaatcaaaagacagtccgagagccagcctgatcccagatgccacacatctagggccacagttctgtaagagctgctggttcgcgactcggaccgatg

SEQ ID NO: 12982 - DNA, 203 bp, synthetic construct
  source 1..203: mol_type = other DNA
ggcgcgccagtcctgtagcaaaggatcctaggcaatttggttgtctttttttgaggccttgtgcgctgtacttctccaaatgggaaacaagcaagccaaagccccagaatcaaaagactcatgagtcctacacctgatcccagatgccacacatctagggccacagttctgtaagagctgctggttcgcgactcggaccgatg

SEQ ID NO: 12983 - DNA, 203 bp, synthetic construct
  source 1..203: mol_type = other DNA
ggcgcgccagtcctgtaccgttggatcctaggcaatttggttgtctttttttgaggccttgtgcgctgtacttctcggcgccttgccggggcaagccaaagccccagaatcaaaagacagtccgagagccagcctgatcccagatgccacacatctagggccacagttctgtaagagctgctggttcgcgactcggaccgatg

SEQ ID NO: 12984 - DNA, 203 bp, synthetic construct
  source 1..203: mol_type = other DNA
ggcgcgccagtcctacaactctggatcctaggcaccaccagctctgacttcactgagcaactctattctagatcaaaatcaccagaacttctggcatggcacactccaaggaggttccaagctttagatggactcagtccttaaggagaggtttgagccaattcactcagactgtcaagtcagatgttcgactcggaccgatg

SEQ ID NO: 12985 - DNA, 203 bp, synthetic construct
  source 1..203: mol_type = other DNA
ggcgcgccagtccttcgtagccggatcctaggcatagtgtctaacactccgcgaattatgggctattctagatcaaaatcaccagaacttctggcatggcacactccaaggaggttccaagctttagatggactcagtccttaaggagaggtttgagccaattcactcagactgtcaagtcagatgttcgactcggaccgatg

SEQ ID NO: 12986 - DNA, 203 bp, synthetic construct
  source 1..203: mol_type = other DNA
ggcgcgccagtcctccgcgagcggatcctaggcatagtgtctaacactttcactgagcaactctattctagatcaaaatcaccagaacttctggcatggcacacgagttccttcaataaagctttagatggactcagtccttaaggagaggtttgagccaattcactcagactgtcaagtcagatgttcgactcggaccgatg

SEQ ID NO: 12987 - DNA, 203 bp, synthetic construct
  source 1..203: mol_type = other DNA
ggcgcgccagtcctgtagaggcggatcctaggcatagtgtctaacactttcactgagcaactctattctagatcaaaatcaccagaacttctggcatggcacactccaaggaggttccaagctttagatggactcagtccttaaggagaggtttgagccaattcactcagactgtcaagtcagatgttcgactcggaccgatg

SEQ ID NO: 12988 - DNA, 203 bp, synthetic construct
  source 1..203: mol_type = other DNA
ggcgcgccagtcctgctattggggatcctaggcatagtgtctaacactttcactgagcaactctattctagatcaaaatcaccagaacttctggcatggcacactccaaggaggttccaagctttagatggactcagtccttaaggtctccaccaccgtgattcactcagactgtcaagtcagatgttcgactcggaccgatg

SEQ ID NO: 12989 - DNA, 203 bp, synthetic construct
  source 1..203: mol_type = other DNA
ggcgcgccagtcctcttggtacggatcctaggcattaaggctatcttatttaattgtctttaattgcctcttgtgtcttctgtgcccctacgggaccctatcccgcgtaagcaatagactctagcagaccacatgttctgagggttctgaacatcatacctgcagctaaacatggaggaagacatagccgactcggaccgatg

SEQ ID NO: 12990 - DNA, 203 bp, synthetic construct
  source 1..203: mol_type = other DNA
ggcgcgccagtcctccgcaggtggatcctaggcattaaggctatcttatttaattgtctttataacgtcgcatcagcttctgtgcccctacgggaccctatcccatagcgaactgttgctctagcagaccacatgttctgagggttctgaacatcatacctgcagctaaacatggaggaagacatagccgactcggaccgatg

SEQ ID NO: 12991 - DNA, 203 bp, synthetic construct
  source 1..203: mol_type = other DNA
ggcgcgccagtcctatatctaaggatcctaggccgtcgttaagtttggatgtgctgtggtgaaggcgtgtaaaacgacggccagtgcgcacagtggatcctaggcgacacttggccatactctttagcacataagagttgaaagggcttattagaaagcacattcctgagaggtgcgagtttggacatcgactcggaccgatg

SEQ ID NO: 12992 - DNA, 203 bp, synthetic construct
  source 1..203: mol_type = other DNA
ggcgcgccagtccttacaggcaggatcctaggccgtcgttaagtttggatgtgctgtggtgaaggcgtgtaaaacgacggccagtgcgcacagtggatcctaggcgacacttggccatggatgaatatgtccaagagttgaaagggcttattagaaagcaatcgaaaagctatagcgagtttggacatcgactcggaccgatg

SEQ ID NO: 12993 - DNA, 203 bp, synthetic construct
  source 1..203: mol_type = other DNA
ggcgcgccagtcctttactgtcggatcctaggcgaaatttgacaatggatgaaaaagtctttgttttgaaagattttatcagaagacaagtgcctgacatacctgaactgtcttatcagaaggaggcattactttctcaagtcgaagtaccaatggtcttaacagagggcttcaagctcctatcatgccgactcggaccgatg

SEQ ID NO: 12994 - DNA, 203 bp, synthetic construct
  source 1..203: mol_type = other DNA
ggcgcgccagtcctattcagggggatcctaggcgaaatttgacaatggatgaaaaagtctttgttttgaaagattttatcagaagacaagtgcctgacatacctgaactgtcttatcagaaggaggcattactttctcaagtcgaatgcttgtactagaaaacagagggcttcaagctcctatcatgccgactcggaccgatg

SEQ ID NO: 12995 - DNA, 203 bp, synthetic construct
  source 1..203: mol_type = other DNA
ggcgcgccagtcctctgctgaaggatcctaggctattggattgcgctttgcttttgtcatttcctacctgttcgcaagttctttgttgtgtgcatacaacacaacaatctggcgatgagtgcctcaaaggaaataaaatcctttttgtggacacaatctttgaggagggaattatctggttactgctccgactcggaccgatg

SEQ ID NO: 12996 - DNA, 203 bp, synthetic construct
  source 1..203: mol_type = other DNA
ggcgcgccagtccttcgcttcgggatcctaggctattggattgcgctttgcttttgtcattttggcagatagtctcagttctttgttgtgtgcatacaacacaacaatctggcgatgagtgcctcaaaggaagagtggcatggagggtggacacaatctttgaggagggaattatctggttactgctccgactcggaccgatg

SEQ ID NO: 12997 - DNA, 203 bp, synthetic construct
  source 1..203: mol_type = other DNA
ggcgcgccagtcctggaaagtgggatcctaggctattggattgcgctttgcttttgtcattttggcagatagtctcttggtgcacggtgatgcatacaacacaacaatctggcgatgagtgcctcaaaggaaataaaatcctttttgtggacacaatctttgaggagggaattatctggttactgctccgactcggaccgatg

SEQ ID NO: 12998 - DNA, 203 bp, synthetic construct
  source 1..203: mol_type = other DNA
ggcgcgccagtcctgatcgccgggatggcgataggacagctataggctctgcagggccccaggcagctggggtattccttaggggctgagtctcctggtatccctaagactgggcttggcttaggcactgagattccttctggaaccccaacgccttcgagacggattccgacctgccggctggatggcgactcggaccgatg

SEQ ID NO: 12999 - DNA, 203 bp, synthetic construct
  source 1..203: mol_type = other DNA
ggcgcgccagtcctctttattgggatttggctccatggcttagggcaacatatctatgaaacttatggggatacttgggcaggagtggaagccataataagaattctgcaacaactgctgtttatccattttcagaattgggtgtcacgggtaatagtggggcgttactcgacagaggagagcaagaacgactcggaccgatg

SEQ ID NO: 13000 - DNA, 203 bp, synthetic construct
  source 1..203: mol_type = other DNA
ggcgcgccagtccttaatccagggatttggctccatggcttagggcaacatatctatgaaacttatggggatactttatgccaccgaaccgccataataagaattctgcaacaactgctgtttatccattttcagaattgggtgtcgacatagcagaataggcgttactcgacagaggagagcaagaacgactcggaccgatg

SEQ ID NO: 13001 - DNA, 203 bp, synthetic construct
  source 1..203: mol_type = other DNA
ggcgcgccagtccttttcgtccggcaagggggcgaccgatcttataacaagctcggcgttccagagagtggggagggggcaagtgtcagtcaggacgggagtccggcgggttacagcggaggcctaggtggcagacagggggcccgggccgctgcgtgttgtccacccaagatggagttcctcctgggcgactcggaccgatg

SEQ ID NO: 13002 - DNA, 203 bp, synthetic construct
  source 1..203: mol_type = other DNA
ggcgcgccagtcctacgccgacggcaagggggcggggccaaaggccctaagctcggcgttccagagagtggggagggggcaagtgtcagtcaggacgggagtccccacccgccggtgcgaggcctaggtggcagacagggggcccgggccgctgcgtgttgtccacccaagatggagttcctcctgggcgactcggaccgatg

SEQ ID NO: 13003 - DNA, 203 bp, synthetic construct
  source 1..203: mol_type = other DNA
ggcgcgccagtcctaatgtagaggcaagggggcggggccaaaggccctaagctcggcgttccagagagtggggagggggcaagtgtcagtcaggacgggagtccggcgggttacagcggaggcctaggtggcagacagggggcccgggccgctgcgtgttgtccacccaagatggagttcctcctgggcgactcggaccgatg

SEQ ID NO: 13004 - DNA, 203 bp, synthetic construct
  source 1..203: mol_type = other DNA
ggcgcgccagtcctcctcgcaaggcaagggggcggggccaaaggccctaagctcggcgttccagagagtggggagggggcaagtgtcagtcaggacgggagtccggcgggttacagcggaggcctaggtggcgatgtaactctgaaggccgctgcgtgttgtccacccaagatggagttcctcctgggcgactcggaccgatg

SEQ ID NO: 13005 - DNA, 203 bp, synthetic construct
  source 1..203: mol_type = other DNA
ggcgcgccagtccttgtgtgggggcaagggggcggggccaaaggccctcgtacttagccataagagagtggggagggggcaagtgtcagtcaggacgggagtccggcgggttacagcggaggcctaggtggcagacagggggcccgggccgctgcgtgttgtccacccaagatggagttcctcctgggcgactcggaccgatg

SEQ ID NO: 13006 - DNA, 203 bp, synthetic construct
  source 1..203: mol_type = other DNA
ggcgcgccagtcctagaggagaggcaataacatatatatgtcaaccctgctcattggtttaaggacctcacggagctgttgtgtgatcttgcgcgataaatgctgacgtgaaaacgttgcgtattgctacaacacttggttagctatttagctttactaatcaagacgccgtcgtgcagcccacaaaacgactcggaccgatg

SEQ ID NO: 13007 - DNA, 203 bp, synthetic construct
  source 1..203: mol_type = other DNA
ggcgcgccagtcctcgagtaacggcaataacatatatatgtcaaccctgctcattggtttaattgagcgcatttagtgttgtgtgatcttgcgcgataaatgctgacgtgaaaacgttgcgtattgctacaacacttggttagctatttagctttactaatcaagacgccgtcgatgcagaacaggtgcgactcggaccgatg

SEQ ID NO: 13008 - DNA, 203 bp, synthetic construct
  source 1..203: mol_type = other DNA
ggcgcgccagtcctgtcaaatgggcaataacatatatatgtcaaccctgctcattggtttaattgagcgcatttagtgttgtgtgatcttgcgcgataaatgctgacgtgaaaacgttgcgtattgctacaacacttggttagctatttagctttactaatcaagacgccgtcgtgcagcccacaaaacgactcggaccgatg

SEQ ID NO: 13009 - DNA, 203 bp, synthetic construct
  source 1..203: mol_type = other DNA
ggcgcgccagtcctgacctgaaggcacttgcaccgtgtggacagactcagaacgagataaataatccagtccctgttactccattttggccagaaattcaagacatttcaggtggcagaataaattcaatccttgtttctccatcttatcgagtagtagaagttagttacattctctttgaactcatccgactcggaccgatg

SEQ ID NO: 13010 - DNA, 203 bp, synthetic construct
  source 1..203: mol_type = other DNA
ggcgcgccagtcctgcgcaacgggcacttgcaccgtgtggacagactctccggttctggggaaatccagtccctgtgctatgtgcactcgcagaaattcaagacatttcaggtggcagaataaattcaatccttgtttctccatcttatcgagtagtagaagttagttacattctctttgaactcatccgactcggaccgatg

SEQ ID NO: 13011 - DNA, 203 bp, synthetic construct
  source 1..203: mol_type = other DNA
ggcgcgccagtcctaaggcatgggcacttgcaccgtgtggacagactctccggttctggggaaatccagtccctgttactccattttggcatagttgctggcttatttcaggtggcagaataaattcaatccttgtttctccatcttatcgagtagtagaagttagttacattctctttgaactcatccgactcggaccgatg

SEQ ID NO: 13012 - DNA, 203 bp, synthetic construct
  source 1..203: mol_type = other DNA
ggcgcgccagtcctgtggcttaggcacttgcaccgtgtggacagactctccggttctggggaaatccagtccctgttactccattttggccagaaattcaagacatttcaggtggcagaataaattcaatccttgtttctccatcttatcgagtagtagaagttagttacattctctttgaactcatccgactcggaccgatg

SEQ ID NO: 13013 - DNA, 203 bp, synthetic construct
  source 1..203: mol_type = other DNA
ggcgcgccagtcctcgcaaagcggcaggcgatccggggctcgcctccgtagatagggggcgccgcaggcgcgagctggccgcctcacacggagtcggcttgttaagtgcgcacgcgcgggagtttctggcagaaagcaggcgagcctgggccggcgcggggccttgtgggagggcttaaggaagtaaacgactcggaccgatg

SEQ ID NO: 13014 - DNA, 203 bp, synthetic construct
  source 1..203: mol_type = other DNA
ggcgcgccagtccttccttcagggcagtccatggaagccccatagaaacgaggcgtcacgtgccgaaaatccctttgcgtttcacagaaccatcctaaccatgggtgtagtatgggaatcgtgtatggggatgattaggatctctcgtagagggataggtgtgccattcaaatccagggagtactctgcgactcggaccgatg

SEQ ID NO: 13015 - DNA, 203 bp, synthetic construct
  source 1..203: mol_type = other DNA
ggcgcgccagtcctcctcaaacggccaaatacagaattttggatctccccccccccacccccctttggatcttgtcgggctttccacgtttcacttaaaaaaaattcttgtaacgtccaaggcaagctccccacgacccgaacacgcccagaggaaccttggggcctctggggacttggctagcaggtcgactcggaccgatg

SEQ ID NO: 13016 - DNA, 203 bp, synthetic construct
  source 1..203: mol_type = other DNA
ggcgcgccagtcctgtagaactggccaaccagaccctgggtggtgactttttcctgttgggaatcttcagccagatctcacaccctggccgcctctgcttgcttatcttcagtatatttttgatggctgtgtcttggaatattacaggccgctaataaccccacattgactcctctctgcatactccccgactcggaccgatg

SEQ ID NO: 13017 - DNA, 203 bp, synthetic construct
  source 1..203: mol_type = other DNA
ggcgcgccagtccttgaggcctggccaaccagaccctgggtggtgactttttcctgttgggaatcttcagccagatctcacaccctggccgcctctgcttgctttgggaagagcataatttgatggctgtgtcttggaatattacattgatacttctgatccacattgactcctctctgcatactccccgactcggaccgatg

SEQ ID NO: 13018 - DNA, 203 bp, synthetic construct
  source 1..203: mol_type = other DNA
ggcgcgccagtcctgccgcgggggccacgaatcatttgccatctcctccgtaccctcgaagcaatgtatggccctggtagtcagctgggaaagtctggcaataacagctgggctaaggaacgtggatgctcaattgcctgccaagggtctcttacttcagcccggctacatgcccccagcattggagacgactcggaccgatg

SEQ ID NO: 13019 - DNA, 203 bp, synthetic construct
  source 1..203: mol_type = other DNA
ggcgcgccagtcctagatcgggggccacgaatcatttgccatctcctctaccaaagactcaaaatgtatggccctgcactcagcgccctcaagtctggcaataacagctgggctaaggaacgtggatgctcaattgcctgccaagggtctcttacttcagcccggctacatgcccccagcattggagacgactcggaccgatg

SEQ ID NO: 13020 - DNA, 203 bp, synthetic construct
  source 1..203: mol_type = other DNA
ggcgcgccagtcctagttagcgggccacgaatcatttgccatctcctctaccaaagactcaaaatgtatggccctggtagtcagctgggaaagtctggcaataacagctgggctaaggaacgtggatgctcaattgcctgccaaggacggggactacacacccggctacatgcccccagcattggagacgactcggaccgatg

SEQ ID NO: 13021 - DNA, 203 bp, synthetic construct
  source 1..203: mol_type = other DNA
ggcgcgccagtccttcacccgcggccacgaatcatttgccatctcctctaccaaagactcaaaatgtatggccctggtagtcagctgggaaagtctggcaataacagctgggctaaggaacgtggatgctcagcgcgacagagtcagtctcttacttcagcccggctacatgcccccagcattggagacgactcggaccgatg

SEQ ID NO: 13022 - DNA, 203 bp, synthetic construct
  source 1..203: mol_type = other DNA
ggcgcgccagtcctcataaataggccacgaatcatttgccatctcctctaccaaagactcaaaatgtatggccctggtagtcagctgggaaagtctggcaataacagctgggctaagggctaaattcagagtattgcctgccaagggtctcttacttcagcccggctacatgcccccagcattggagacgactcggaccgatg

SEQ ID NO: 13023 - DNA, 203 bp, synthetic construct
  source 1..203: mol_type = other DNA
ggcgcgccagtcctacgcgcctggccacgaatcatttgccatctcctctaccaaagactcaagggtctgtcggacagtagtcagctgggaaagtctggcaataacagctgggctaaggaacgtggatgctcaattgcctgccaagggtctcttacttcagcccggctacatgcccccagcattggagacgactcggaccgatg

SEQ ID NO: 13024 - DNA, 203 bp, synthetic construct
  source 1..203: mol_type = other DNA
ggcgcgccagtcctagagtttaggccatcgctagcggcttgatccgccagaagcggcaggcgcgggagcagcactgggaccggccgtctgccagcaggaggcggagcagccccagcaagaaccgcgggctctgcaacggcaacctggtggatatcttctccaaagtgcgcatcttcggcctcaagaagcgactcggaccgatg

SEQ ID NO: 13025 - DNA, 203 bp, synthetic construct
  source 1..203: mol_type = other DNA
ggcgcgccagtcctaatacccgggccatcgctagcggcttgatccgccagaagcggcaggcgcgggagcagcactgggaccggccgtctgccagcaggaggcggagcagccccagcaagaaccgcgggctcttatcttctgcggccgtggatatcttctccaaagtgcgcatcttcggcctcaagaagcgactcggaccgatg

SEQ ID NO: 13026 - DNA, 203 bp, synthetic construct
  source 1..203: mol_type = other DNA
ggcgcgccagtccttgaaaccaggccatcgctagcggcttgatccgccagaagcggcaggcgcgggagcagcactgggaccggccgtctgccagcaggaggcggcagtttttggtttcgaaccgcgggctctgcaacggcaacctggtggatatcttctccaaagtgcgcatcttcggcctcaagaagcgactcggaccgatg

SEQ ID NO: 13027 - DNA, 203 bp, synthetic construct
  source 1..203: mol_type = other DNA
ggcgcgccagtcctgcagcctgggccatcgctagcggcttgatccgccagaagcggcaggcgcgggagcagcactgggaccggccgtctgtttagtcatcattcagcagccccagcaagaaccgcgggctctgcaacggcaacctggtggatatcttctccaaagtgcgcatcttcggcctcaagaagcgactcggaccgatg

SEQ ID NO: 13028 - DNA, 203 bp, synthetic construct
  source 1..203: mol_type = other DNA
ggcgcgccagtccttgttatggggccatcgctagcggcttgatccgccagaagcggcaggcgtcatctacttctaaggaccggccgtctgccagcaggaggcggagcagccccagcaagaaccgcgggctctgcaacggcaacctggtggatatcttctccaaagtgcgcatcttcggcctcaagaagcgactcggaccgatg

SEQ ID NO: 13029 - DNA, 203 bp, synthetic construct
  source 1..203: mol_type = other DNA
ggcgcgccagtcctgtgatctcggccatcgctagcggcttgatccgccttggtaattgcatacgggagcagcactgggaccggccgtctgccagcaggaggcggagcagccccagcaagaaccgcgggctctgcaacggcaacctggtggatatcttctccaaagtgcgcatcttcggcctcaagaagcgactcggaccgatg

SEQ ID NO: 13030 - DNA, 203 bp, synthetic construct
  source 1..203: mol_type = other DNA
ggcgcgccagtccttcctggctggccatgtcttaggacctgctgtccgacttacaggacatcagcgacagcgagaggaagaccagctcggccgagtcctcgtcagcagaatcaggctcaggttctgaggaagaagaggaggaggaggaagaggaggaggaggaagggagcaccagtgaagaatcagagcgactcggaccgatg

SEQ ID NO: 13031 - DNA, 203 bp, synthetic construct
  source 1..203: mol_type = other DNA
ggcgcgccagtccttttagacgggcccatcagttccaccccttgtagtgcatcactactgctattgagcaggctgctctagcagcggccaactctgcccttgcgaatgctgtggtagttaggccttttctctctcaccagcagattgagatccttattaacctaatgcaacctcgccagcttgttttccgactcggaccgatg

SEQ ID NO: 13032 - DNA, 203 bp, synthetic construct
  source 1..203: mol_type = other DNA
ggcgcgccagtccttgacgggcggcccatcagtttattaaggctcctggcatcactactgctattgagcaggctgccggcaacctttgggactctgcccttgcgaatgctgtggtagttaggccttttctctctcaccagcagattgagatccttattaacctaatgcaacctcgccagcttgttttccgactcggaccgatg

SEQ ID NO: 13033 - DNA, 203 bp, synthetic construct
  source 1..203: mol_type = other DNA
ggcgcgccagtcctgcgtgtaaggcccatcagtttattaaggctcctggcatcactactgctattgagcaggctgctctagcagcggccaactctgcccttgcgaatgctgtggtagtatccagcaaatatcctcaccagcagattgagatccttattaacctaatgcaacctcgccagcttgttttccgactcggaccgatg

SEQ ID NO: 13034 - DNA, 203 bp, synthetic construct
  source 1..203: mol_type = other DNA
ggcgcgccagtccttcagaagaggcccatcagtttattaaggctcctggcatcactactgctattgagcaggctgctctagcagcggccaactctgcccttgcgaatgctgtggtagttaggccttttctctctcaccagcagattttcgatggagaatgcctaatgcaacctcgccagcttgttttccgactcggaccgatg

SEQ ID NO: 13035 - DNA, 203 bp, synthetic construct
  source 1..203: mol_type = other DNA
ggcgcgccagtcctatcttagcggcccatcagtttattaaggctcctggcatcactactgctattgagcaggctgctctagcagcggccaactctgcccttgcgaatgctgtggtagttaggccttttctcttaactgcatgctcggagatccttattaacctaatgcaacctcgccagcttgttttccgactcggaccgatg

SEQ ID NO: 13036 - DNA, 203 bp, synthetic construct
  source 1..203: mol_type = other DNA
ggcgcgccagtcctgcaaggttggcccatcagtttattaaggctcctggcatcactactgcttccctcgttcgatgtctagcagcggccaactctgcccttgcgaatgctgtggtagttaggccttttctctctcaccagcagattgagatccttattaacctaatgcaacctcgccagcttgttttccgactcggaccgatg

SEQ ID NO: 13037 - DNA, 203 bp, synthetic construct
  source 1..203: mol_type = other DNA
ggcgcgccagtccttctaacgaggccccacagccaagatcacacttgtacaactgagttgtaagacgttcatcgccgtgttatccttgagtaaagaatgaactctggaagcccagccagggacaatgcaccttcacagagattctgcactaatctgagtgaaggtctaaggtttggaatctccccctccgactcggaccgatg

SEQ ID NO: 13038 - DNA, 203 bp, synthetic construct
  source 1..203: mol_type = other DNA
ggcgcgccagtcctacagatagggccccacagcccctgctgactcaaaacaactgagttgtaagacgttcatcgccgtgttatccttgagtaaagaatgaactctggaagcccagccagggacaatgcaccttcacagagattctgcactaatctgagtgaaggtctaaggtttggaatctccccctccgactcggaccgatg

SEQ ID NO: 13039 - DNA, 203 bp, synthetic construct
  source 1..203: mol_type = other DNA
ggcgcgccagtcctgctctataggccccacagcccctgctgactcaaaacaactgagttgtaagacgttcatcgccgtgttatccttgagtaaagaatgaactctggaagcccagccagggacaatgcaccttcacagagattctgcactaatctgagtgaaggtctaaggtttttgtcggaatttcacgactcggaccgatg

SEQ ID NO: 13040 - DNA, 203 bp, synthetic construct
  source 1..203: mol_type = other DNA
ggcgcgccagtcctggcggtgtggccccacagcccctgctgactcaaaacaactgagttgtaagacgttcatcgccgtgttatccttgagtaaagaatgaactctggaagcccagccagggacaatgcaccttcacagagattctgcactaatctgagtgcttaaaagcctaggggaatctccccctccgactcggaccgatg

SEQ ID NO: 13041 - DNA, 203 bp, synthetic construct
  source 1..203: mol_type = other DNA
ggcgcgccagtccttgtgaacaggccccagggtgtgcagccactgactacctcgtcttcctcggggtagggatgagggagggaggggcattgtgatgtacagggctgctctgtgagatcaagggtctcttaagggtgggagctggggcagggactacgagagcagccagatgggctgaaagtggaactcgactcggaccgatg

SEQ ID NO: 13042 - DNA, 203 bp, synthetic construct
  source 1..203: mol_type = other DNA
ggcgcgccagtccttcttacttggccccagggtgtgcagccactgacttggggactgctggtggggtagggatgagggagggaggggcattgtgatgtacagggagtaggccgtcttccaagggtctcttaagggtgggagctggggcagggactacgagagcagccagatgggctgaaagtggaactcgactcggaccgatg

SEQ ID NO: 13043 - DNA, 203 bp, synthetic construct
  source 1..203: mol_type = other DNA
ggcgcgccagtccttcggatacggccccagggtgtgcagccactgacttggggactgctggtggggtagggatgagggagggaggggcattgtgatgtacagggctgctctgtgagatcaagggtctcttaagggtgggagctggggcagggactacgagagcagccagatggggaatcgcccagctgcgactcggaccgatg

SEQ ID NO: 13044 - DNA, 203 bp, synthetic construct
  source 1..203: mol_type = other DNA
ggcgcgccagtcctgcgttaccggccccagggtgtgcagccactgacttggggactgctggtggggtagggatgagggagggaggggcattgtgatgtacagggctgctctgtgagatcaagggtctcttaataccaactcgcttcgcagggactacgagagcagccagatgggctgaaagtggaactcgactcggaccgatg

SEQ ID NO: 13045 - DNA, 203 bp, synthetic construct
  source 1..203: mol_type = other DNA
ggcgcgccagtcctgcctggtcggccccctttccacgcagaagagagagctacagatcgtctgctccctcagcctcgcccgagacccacttccccagtctcgcccgggtggaggtcgacgaggaggagacaagagtcacccttcctccaggcggcgccggccccctcacccgcgggtgtgtcctataacgactcggaccgatg

SEQ ID NO: 13046 - DNA, 203 bp, synthetic construct
  source 1..203: mol_type = other DNA
ggcgcgccagtcctaagtctgaggccccctttccttaacagtctcctcgctacagatcgtcactaaattcagcctcgcccgagacccacttccccagtctcgcccgggtggaggtcgacgaggaggagacaagagtcacccttcctccaggcggcgccggccccctcattatacctggtgtcctataacgactcggaccgatg

SEQ ID NO: 13047 - DNA, 203 bp, synthetic construct
  source 1..203: mol_type = other DNA
ggcgcgccagtcctctcagagaggccccctttccttaacagtctcctcgctacagatcgtctgctccctcagcctcaagatcctttaggatccccagtctcgcccgggtggaggtcgacgaggaggagacaagagtcacccttcctccaggcggcgccggccccctcacccgcgggtgtgtcctataacgactcggaccgatg

SEQ ID NO: 13048 - DNA, 203 bp, synthetic construct
  source 1..203: mol_type = other DNA
ggcgcgccagtcctagtctacaggccccctttccttaacagtctcctcgctacagatcgtctgctccctcagcctcgcccgagacccactgattacccggacatcgggtggaggtcgacgaggaggagacaagagtcacccttcctccaggcggcgccggccccctcacccgcgggtgtgtcctataacgactcggaccgatg

SEQ ID NO: 13049 - DNA, 203 bp, synthetic construct
  source 1..203: mol_type = other DNA
ggcgcgccagtcctactgccctggccccctttccttaacagtctcctcgctacagatcgtctgctccctcagcctcgcccgagacccacttccccagtctcgccatctatagaaaaaccgaggaggagacaagagtcacccttcctccaggcggcgccggccccctcacccgcgggtgtgtcctataacgactcggaccgatg

SEQ ID NO: 13050 - DNA, 203 bp, synthetic construct
  source 1..203: mol_type = other DNA
ggcgcgccagtcctagcagcttggccccctttccttaacagtctcctcgctacagatcgtctgctccctcagcctcgcccgagacccacttccccagtctcgcccgggtggaggtcgacgaggaggagacaagagtcacccttcctccaggcggcgccggccccctcacccgcgacgcgtcaaatattcgactcggaccgatg

SEQ ID NO: 13051 - DNA, 203 bp, synthetic construct
  source 1..203: mol_type = other DNA
ggcgcgccagtcctataaagttggccccctttccttaacagtctcctcgctacagatcgtctgctccctcagcctcgcccgagacccacttccccagtctcgcccgggtggaggtcgacgaggaggagacaagagtcacccttcctccaggcggcgccggccccctcacccgcgggtgtgtcctataacgactcggaccgatg

SEQ ID NO: 13052 - DNA, 203 bp, synthetic construct
  source 1..203: mol_type = other DNA
ggcgcgccagtcctcacgtagcggccccctttccttaacagtctcctcgctacagatcgtctgctccctcagcctcgcccgagacccacttccccagtctcgcccgggtggaggtcgacgaggaggagacaagagtcacccttcctttctatatgtaaatccccctcacccgcgggtgtgtcctataacgactcggaccgatg

SEQ ID NO: 13053 - DNA, 203 bp, synthetic construct
  source 1..203: mol_type = other DNA
ggcgcgccagtcctgaccactcggccccctttccttaacagtctcctcgctacagatcgtctgctccctcagcctcgcccgagacccacttccccagtctcgcccgggtggaggtcgagttctccccaggtcgagtcacccttcctccaggcggcgccggccccctcacccgcgggtgtgtcctataacgactcggaccgatg

SEQ ID NO: 13054 - DNA, 203 bp, synthetic construct
  source 1..203: mol_type = other DNA
ggcgcgccagtcctgtcattctggccccctttccttaacagtctcctcgctacagatcgtcttagtatgagaataagcccgagacccacttccccagtctcgcccgggtggaggtcgacgaggaggagacaagagtcacccttcctccaggcggcgccggccccctcacccgcgggtgtgtcctataacgactcggaccgatg

SEQ ID NO: 13055 - DNA, 203 bp, synthetic construct
  source 1..203: mol_type = other DNA
ggcgcgccagtcctctgcaataggccccctttccttaacagtctcctctggcatttcgcggagctccctcagcctcgcccgagacccacttccccagtctcgcccgggtggaggtcgacgaggaggagacaagagtcacccttcctccaggcggcgccggccccctcacccgcgggtgtgtcctataacgactcggaccgatg

SEQ ID NO: 13056 - DNA, 203 bp, synthetic construct
  source 1..203: mol_type = other DNA
ggcgcgccagtcctttcatcgcggccgccatgagttccaccttccagcttactggcttcccaggcatggagaaggcacatcactggatattcatcccattattggcagcctacatctccatacttcttggcaatggcactcttctctttctcatcaggaatgatcataacctccatgagcccatgtaccgactcggaccgatg

SEQ ID NO: 13057 - DNA, 203 bp, synthetic construct
  source 1..203: mol_type = other DNA
ggcgcgccagtcctaggtaactggccgctccgggcgccttctccctgccccgccgcgtctcgcctgcgcgggctccaagcgcagccttaaacttggaacttgtgtgaatcagcgccccgatcccgagagggctcttccttcggccccatcactcccacaatggaagggcggccgcctccggaaggccgcgactcggaccgatg

SEQ ID NO: 13058 - DNA, 203 bp, synthetic construct
  source 1..203: mol_type = other DNA
ggcgcgccagtcctgcattgtaggccgctccgggcgccttctccctgccccgccgcgtctcgcctgcgcgggctccaagcgcagccttaacaggctccgaaacttgaatcagcgccccacattgcgtccacatcttccttcggccccatcactcccacaatggaagggcggccgcctccggaaggccgcgactcggaccgatg

SEQ ID NO: 13059 - DNA, 203 bp, synthetic construct
  source 1..203: mol_type = other DNA
ggcgcgccagtcctacaagcgcggccgctccgggcgccttctccctgccccgccgcgtctcgcctgcgcgggctccaagcgcagccttaacaggctccgaaacttgaatcagcgccccgatcccgagagggctcttccttcggccccattcacgttacaatggaagggcggccgcctccggaaggccgcgactcggaccgatg

SEQ ID NO: 13060 - DNA, 203 bp, synthetic construct
  source 1..203: mol_type = other DNA
ggcgcgccagtcctcttactagggccggaacccttgagaccagaggctcttagcctattgagctaggagggccaggaactgctgacgtgaccactggacagttattcgtgtctcttacaattaccaaacagaatggacaagcttaataaaataaccgtccccgccagtcagaagttgaggcagcttcacgactcggaccgatg

SEQ ID NO: 13061 - DNA, 203 bp, synthetic construct
  source 1..203: mol_type = other DNA
ggcgcgccagtcctagttcctcggccggaacccttgagaccagaggcttaccatgctgctccctaggagggccaggaactgctgacgtgaaactaaagtgtggcttcgtgtctcttacaattaccaaacagaatggacaagcttaataaaataaccgtccccgccagtcagaagttgaggcagcttcacgactcggaccgatg

SEQ ID NO: 13062 - DNA, 203 bp, synthetic construct
  source 1..203: mol_type = other DNA
ggcgcgccagtcctcctggacaggccggaacccttgagaccagaggcttaccatgctgctccctaggagggccaggaactgctgacgtgaccactggacagttaagatcacaatgagaaattaccaaacagaatggacaagcttaataaaataaccgtccccgccagtcagaagttgaggcagcttcacgactcggaccgatg

SEQ ID NO: 13063 - DNA, 203 bp, synthetic construct
  source 1..203: mol_type = other DNA
ggcgcgccagtcctagattcgtggccggaacccttgagaccagaggcttaccatgctgctccctaggagggccaggaactgctgacgtgaccactggacagttattcgtgtctcttacaattaccaaacagaatggacaagcttaagtggcctgataataccgccagtcagaagttgaggcagcttcacgactcggaccgatg

SEQ ID NO: 13064 - DNA, 203 bp, synthetic construct
  source 1..203: mol_type = other DNA
ggcgcgccagtcctcataagcgggccggaacccttgagaccagaggcttaccatgctgctccctaggagggccaggaactgctgacgtgaccactggacagttattcgtgtctcttacaattaccaaacagaatggacaagcttaataaaataaccgtcctgttttcaagagtcttgaggcagcttcacgactcggaccgatg

SEQ ID NO: 13065 - DNA, 203 bp, synthetic construct
  source 1..203: mol_type = other DNA
ggcgcgccagtcctcaggtacaggccggaacccttgagaccagaggcttaccatgctgctccctaggagggccaggaactgctgacgtgaccactggacagttattcgtgtctcttacaattaccaaacagacattgatttaaatttaaaataaccgtccccgccagtcagaagttgaggcagcttcacgactcggaccgatg

SEQ ID NO: 13066 - DNA, 203 bp, synthetic construct
  source 1..203: mol_type = other DNA
ggcgcgccagtcctctatacaaggccggaacccttgagaccagaggcttaccatgctgctccctaggagggccaggcgtcaaaacaagctccactggacagttattcgtgtctcttacaattaccaaacagaatggacaagcttaataaaataaccgtccccgccagtcagaagttgaggcagcttcacgactcggaccgatg

SEQ ID NO: 13067 - DNA, 203 bp, synthetic construct
  source 1..203: mol_type = other DNA
ggcgcgccagtcctaacgcggcggccggcgggcgcttacgtttacagagagaggcgcggggagccaggcctcggggcctcggagcaaccacccgagcagacggagtacacggagcagcggccccggccccgccaacgctgccgccggctactccctcttgatgccctcccctttgcccctcactcaggcgactcggaccgatg

SEQ ID NO: 13068 - DNA, 203 bp, synthetic construct
  source 1..203: mol_type = other DNA
ggcgcgccagtccttcgatcgtggccggcgggcgggcggaagagggagagaccaaattataggccaggcctcggggcctcggagcaaccacccgagcagacggagtacacggagcagcggccccggccccgccaacgctgccgccggctactccctcttgatgccctcccctttgcccctcactcaggcgactcggaccgatg

SEQ ID NO: 13069 - DNA, 203 bp, synthetic construct
  source 1..203: mol_type = other DNA
ggcgcgccagtcctgatccagaggccggcgggcgggcggaagagggaggagaggcgcggggacgggtcgtagattacctcggagcaaccacccgagcagacggagtacacggagcagcggccccggccccgccaacgctgccgccggctactccctcttgatgccctcccctttgcccctcactcaggcgactcggaccgatg

SEQ ID NO: 13070 - DNA, 203 bp, synthetic construct
  source 1..203: mol_type = other DNA
ggcgcgccagtcctcccatttgggccggcgggcgggcggaagagggaggagaggcgcggggagccaggcctcggggcctcggagcaaccacccgagcagacggagtacacggagcagcccagagcctatgcacaacgctgccgccggctactccctcttgatgccctcccctttgcccctcactcaggcgactcggaccgatg

SEQ ID NO: 13071 - DNA, 203 bp, synthetic construct
  source 1..203: mol_type = other DNA
ggcgcgccagtcctaatctttaggccggcgggcgggcggaagagggaggagaggcgcggggagccaggcctcggggcctcggagcaaccacccgagcagacggagtacacggagcagcggccccggccccgccaacgctgccgccggcctgaatttcttgatgccctcccctttgcccctcactcaggcgactcggaccgatg

SEQ ID NO: 13072 - DNA, 203 bp, synthetic construct
  source 1..203: mol_type = other DNA
ggcgcgccagtcctgggccggcggccggcgggcgggcggaagagggaggagaggcgcggggagccaggcctcggggcctcggagcaaccacccgagcagacggagtacacggagcagcggccccggccccgccaacgctgccgccggctactccctcttgatgccctcccctttgcccctcactcaggcgactcggaccgatg

SEQ ID NO: 13073 - DNA, 203 bp, synthetic construct
  source 1..203: mol_type = other DNA
ggcgcgccagtccttttacgacggccggcgggcgggcggaagagggaggagaggcgcggggagccaggcctcggggcctcggagcaaccatgatctgctctttggtacacggagcagcggccccggccccgccaacgctgccgccggctactccctcttgatgccctcccctttgcccctcactcaggcgactcggaccgatg

SEQ ID NO: 13074 - DNA, 203 bp, synthetic construct
  source 1..203: mol_type = other DNA
ggcgcgccagtcctgtcgtcaaggcctgctgatgttatggtgacaattgagagattgttaccatatagctattggattggccatccggtgaccaatagagctattatatatctctttgttgggtttataccacttagcttgaaagaggttaaaacattacaattcattgttaagttgaatacagcaaacgactcggaccgatg

SEQ ID NO: 13075 - DNA, 203 bp, synthetic construct
  source 1..203: mol_type = other DNA
ggcgcgccagtccttacataacggcgagagcgtatggagccgagccgttagcgcgcgccgtcggtgagtcagtccgtccgtccgtccgtccgtcggggcgccgcagctcccgccaggcccagcggccccggcccctcgtctccccgcacccggagccaccaccattcttctaagttgccgcggcagcccgactcggaccgatg

SEQ ID NO: 13076 - DNA, 203 bp, synthetic construct
  source 1..203: mol_type = other DNA
ggcgcgccagtccttcagtgccggcgagagcgtatggagccgagccgttagcgcgcgccgtcggtgagtcagtccgtccgtccgtccgtccgtcggggcgccgcagctcccgccaggcccagcggccccggcccctcgtctccccgcacccggagccacccggtggagcgggccagaatatcaagtaacgactcggaccgatg

SEQ ID NO: 13077 - DNA, 203 bp, synthetic construct
  source 1..203: mol_type = other DNA
ggcgcgccagtcctccgccatgggcgagagcgtatggagccgagccgttagcgcgcgccgtcggtgagtcagtccgtccgtccgtccgtccgtcggggcgccgcagctcccgccaggcccagcggccccggctgtcatctctaggacacccggagccacccggtggagcgggccttgccgcggcagcccgactcggaccgatg

SEQ ID NO: 13078 - DNA, 203 bp, synthetic construct
  source 1..203: mol_type = other DNA
ggcgcgccagtcctatggctccggcgcggccggagagtataattcactgcgacggcgggccgcgcggcgcatttccgcctctggcgaatggctcgtctgtagtgcacgccgcgggcccagctgcgaccccggccccgcccccgggaccccggccatggacgaactgttccccctcatcttcccggcagcgactcggaccgatg

SEQ ID NO: 13079 - DNA, 203 bp, synthetic construct
  source 1..203: mol_type = other DNA
ggcgcgccagtcctcatatcttggcgcggccggattccgggcagtgactgacttaatccttacgcggcgcatttccgcctctggcgaatggctcgtctgtagtgcacgccgcgggcccagctgcgaccccggccccgcccccgggaccccggccatggacgaactgttccccctcatcttcccggcagcgactcggaccgatg

SEQ ID NO: 13080 - DNA, 203 bp, synthetic construct
  source 1..203: mol_type = other DNA
ggcgcgccagtccttttgaaatggcgctggcacctcctcttacagcttgctgatcgccagcttgggaaaaggccggagaaggtgaaattctgtggagcggttccggcgagagactttgtcagctcccgcacagtaacgtggaagtccaagaatccgagtggaggctcaccgaggcgaaggggccaacccgactcggaccgatg

SEQ ID NO: 13081 - DNA, 203 bp, synthetic construct
  source 1..203: mol_type = other DNA
ggcgcgccagtcctccggctgaggcgctggcacctcctcttacagcttgctgatcgccagcttgggaaaaggccggagaaggtgaaattctgtgtgctccctccggcgagagactttgtcagctcccgcacagtaacgtggaagtccaagaatccgagtggaggctcaccgaggcgaaggggccaacccgactcggaccgatg

SEQ ID NO: 13082 - DNA, 203 bp, synthetic construct
  source 1..203: mol_type = other DNA
ggcgcgccagtcctaatattctggcgctggcacctcctcttacagctttactcctgccagcttgggaaaaggccggagaaggtgaaattctgtgtgctccctcccttttctagaaaaatcagctcccgcacagtaacgtggaagtccaagaatccgagtggaggctcaccgaggcgaaggggccaacccgactcggaccgatg

SEQ ID NO: 13083 - DNA, 203 bp, synthetic construct
  source 1..203: mol_type = other DNA
ggcgcgccagtcctgagcattgggcgctggcacctcctcttacagctttactcctgccagcttgggaaaaggccggagaaggtgaaattctgtgtgctccctccggcgagagactttgcggagaggatatatgtaacgtggaagtccaagaatccgagtggaggctcaccgaggcgaaggggccaacccgactcggaccgatg

SEQ ID NO: 13084 - DNA, 203 bp, synthetic construct
  source 1..203: mol_type = other DNA
ggcgcgccagtccttagttgagggcgctggcacctcctcttacagctttactcctgccagcttgggaaaaggccggagaaggtgaaattctgtgtgctccctccggcgagagactttgtcagctcccgcacatggcatgcactacacaagaatccgagtggaggctcaccgaggcgaaggggccaacccgactcggaccgatg

SEQ ID NO: 13085 - DNA, 203 bp, synthetic construct
  source 1..203: mol_type = other DNA
ggcgcgccagtcctaacaacgtggcggcgcgcgggcgcctggggcgggacttccggcgcgctggagcgttttccggccgtgcgtttgtggccgtccggcctccctgacatgcagccctctggaccccgaggttggaccctactgtggagactagctgtgccggacactcttcaacctcctctggcttgcgactcggaccgatg

SEQ ID NO: 13086 - DNA, 203 bp, synthetic construct
  source 1..203: mol_type = other DNA
ggcgcgccagtcctggtgtacgggcggcgcgcgggcgcctggggcgggacttccggcgcgctggagcgttttccggggtaagacagtataccgtccggcctccctgacatgcagccctctggaccccgaggttggaccctactgtgacacacctaccatgcggacactcttcaacctcctctggcttgcgactcggaccgatg

SEQ ID NO: 13087 - DNA, 203 bp, synthetic construct
  source 1..203: mol_type = other DNA
ggcgcgccagtccttaaacgcgggcggcgcgcggtgcataccacttttacttccggcgcgctggagcgttttccggccgtgcgtttgtggccgtccggcctccctgacatgcagccctctggaccccgaggttggaccctactgtgacacacctaccatgcggacactcttcaacctcctctggcttgcgactcggaccgatg

SEQ ID NO: 13088 - DNA, 203 bp, synthetic construct
  source 1..203: mol_type = other DNA
ggcgcgccagtcctaggtccatggcggctgcagcaacctgcacagccggagagcgcagagaagcagaggaccaagaggcagaatgccggcgctccaccgcccgagactgtgtttcctgtgagtccagatgtgtgatccagatatgctgcaatggtgacataaactgttgactgagactaggagcgtgccgactcggaccgatg

SEQ ID NO: 13089 - DNA, 203 bp, synthetic construct
  source 1..203: mol_type = other DNA
ggcgcgccagtccttaacagcaggcggctgcagccgtggctctgcagcgagagcgcagagaagcagaggaccaagaggcagaatgccggcgctccaccgcccgagactgtgtttcctgtgagtccagatgtgcctatagatagctttgcaatggtgacataaactgttgactgagactaggagcgtgccgactcggaccgatg

SEQ ID NO: 13090 - DNA, 203 bp, synthetic construct
  source 1..203: mol_type = other DNA
ggcgcgccagtcctgttacaatggcgggaggcgcagccgggctgtcggtggacctgcccactaacttaacttataaggaggacgaggaggaggccgtccacgagcaatgccagcatgagagagacaggcagcttcaggcccaggacgaggagggaggcggccatgtccccgagcggccgaagcaggagcgactcggaccgatg

SEQ ID NO: 13091 - DNA, 203 bp, synthetic construct
  source 1..203: mol_type = other DNA
ggcgcgccagtcctggccacggggcgggaggcgcagccgggctgtcggtggacctgcccactgctcagtggagcgtggaggacgaggaggaggccgtccacgagcaatgccagcatgagagagacaggcagccagtttaatgtcttgaggagggaggcggccatgtccccgagcggccgaagcaggagcgactcggaccgatg

SEQ ID NO: 13092 - DNA, 203 bp, synthetic construct
  source 1..203: mol_type = other DNA
ggcgcgccagtcctgggcatcaggcgggaggcgcagccgggctgtcggtggacctgcccactgctcagtggagcgtggaggacgaggaggaggccgtccacgagcaatgccagcatgagagagacaggcagcttcaggcccaggacgaggagggaggcggccatgtccccgagcacagttgaagctgccgactcggaccgatg

SEQ ID NO: 13093 - DNA, 203 bp, synthetic construct
  source 1..203: mol_type = other DNA
ggcgcgccagtcctgcgacagcggcgggaggcgcagccgggctgtcggtggacctgcccactgctcagtggagcgtggaggacgaggaggaggccgtccacgagcaatgccagcatgagagagacaggcagcttcaggcccaggactgtcgcatgtaataccatgtccccgagcggccgaagcaggagcgactcggaccgatg

SEQ ID NO: 13094 - DNA, 203 bp, synthetic construct
  source 1..203: mol_type = other DNA
ggcgcgccagtccttaagtctaggcgggaggcgcagccgggctgtcggtggacctgcccactgctcagtggagcgtggaggacgaggaggaggccgtccacgagcaatgccagcatgatttgacagccacttttcaggcccaggacgaggagggaggcggccatgtccccgagcggccgaagcaggagcgactcggaccgatg

SEQ ID NO: 13095 - DNA, 203 bp, synthetic construct
  source 1..203: mol_type = other DNA
ggcgcgccagtccttgcaccggggcgtggccggagctgcggcggcaagcgggctgggactgcaattattaacatctcccggcgagcagctcagaccatgtcgcctgaagaatggacgtatctagtggttcttcttatctccatccccatcggcttcctctttaagaaagccggtcctgggctgaagagcgactcggaccgatg

SEQ ID NO: 13096 - DNA, 203 bp, synthetic construct
  source 1..203: mol_type = other DNA
ggcgcgccagtcctcgacatttggcgtggccggagctgcggcggcaagcgggctgggactgctcggccgcctcctgcccggcgagcagctcagaccatgtcgcctgaagaatggacgtatctagtggttcttcttatctccatccccatcggcttcctctttaagaaagccggtcctgggctgaagagcgactcggaccgatg

SEQ ID NO: 13097 - DNA, 203 bp, synthetic construct
  source 1..203: mol_type = other DNA
ggcgcgccagtcctggttagtcggcgtggccggagctgcggcggcaagcgggctgggactgctcggccgcctcctgcccggcgagcagctcagaccatgtcgcctgaagaatggacgtatctagtggttcttcttatctccatccccatcggcttcctctttaagaaagccggtgtctctggagcccccgactcggaccgatg

SEQ ID NO: 13098 - DNA, 203 bp, synthetic construct
  source 1..203: mol_type = other DNA
ggcgcgccagtcctcaaagcacggcgtggccggagctgcggcggcaagcgggctgggactgctcggccgcctcctgcccggcgagcagcttgtgtatacctctgtgaagaatggacgtatctagtggttcttcttatctccatccccatcggcttcctctttaagaaagccggtcctgggctgaagagcgactcggaccgatg

SEQ ID NO: 13099 - DNA, 203 bp, synthetic construct
  source 1..203: mol_type = other DNA
ggcgcgccagtcctcaaagtcgggcgtggccggatggcacctttgctacgggctgggactgctcggccgcctcctgcccggcgagcagctcagaccatgtcgcctgaagaatggacgtatctagtggttcttcttatctccatccccatcggcttcctctttaagaaagccggtcctgggctgaagagcgactcggaccgatg

SEQ ID NO: 13100 - DNA, 203 bp, synthetic construct
  source 1..203: mol_type = other DNA
ggcgcgccagtcctcaccctctggctcaccgcacgtgcaatgtaaggataaagaagcaacaaaactgacggaggagagggacggcagcctgaaccagagctctgggtaccgctatggcacagaccccacccctcagcactaccccagcttcggtgtgacctccatccccaactacaacaacttccacgcgactcggaccgatg

SEQ ID NO: 13101 - DNA, 203 bp, synthetic construct
  source 1..203: mol_type = other DNA
ggcgcgccagtcctggattatcggctccggccgcatcagtatatgccacgctcagcgccctctcaccgcccggctctgtgtgctccgggatggagcaggtgtgcagagggtgagaacccagctctgggaccaagtcacttgcttccttacttagcaagactatcgacttgagcaaacttggacctgggcgactcggaccgatg

SEQ ID NO: 13102 - DNA, 203 bp, synthetic construct
  source 1..203: mol_type = other DNA
ggcgcgccagtcctagattaaaggctccggccgcgcgccccgcccttgcgctcagcgccctctcaccgcccggctctgtgtgctccgggacttcctgatgtgtgagagggtgagaacccagctctgggaccaagtcacttgcttccttacttagcaagactatcgacttgagcaaacttggacctgggcgactcggaccgatg

SEQ ID NO: 13103 - DNA, 203 bp, synthetic construct
  source 1..203: mol_type = other DNA
ggcgcgccagtcctccagaaccggctccggccgcgcgccccgcccttgcgctcagcgccctctcaccgcccggctctgtgtgctccgggatggagcaggtgtgcagagggtgagaaccacatagccccgagcagtcacttgcttccttacttagcaagactatcgacttgagcaaacttggacctgggcgactcggaccgatg

SEQ ID NO: 13104 - DNA, 203 bp, synthetic construct
  source 1..203: mol_type = other DNA
ggcgcgccagtcctagaaccgaggctccggccgcgcgccccgcccttgcgctcagcgccctctcaccgcccggctctgtgtgctccgggatggagcaggtgtgcagagggtgagaacccagctctgggaccaagtcacttgcttccttacttagcaagactatcgacttgagcaaacttggacctgggcgactcggaccgatg

SEQ ID NO: 13105 - DNA, 203 bp, synthetic construct
  source 1..203: mol_type = other DNA
ggcgcgccagtcctagcctgggggctccggccgcgcgccccgcccttgcgctcagcgccctctcaccgcccggctctgtgtgctccgggatggagcaggtgtgcagagggtgagaacccagctctgggaccatcgtgacgatgaagttacttagcaagactatcgacttgagcaaacttggacctgggcgactcggaccgatg

SEQ ID NO: 13106 - DNA, 203 bp, synthetic construct
  source 1..203: mol_type = other DNA
ggcgcgccagtccttcccataaggctcggattccaagtcatcctatgctcccctcagctagcaggtgtgagcggctttctgcccgcagtctctacacagctcagcatcctgacgcctcctccccttgcaggggcgtgaagctacttcagactctgctgtgacgacttggccgccaggcaccgatcctccgactcggaccgatg

SEQ ID NO: 13107 - DNA, 203 bp, synthetic construct
  source 1..203: mol_type = other DNA
ggcgcgccagtcctcccgagctggctcggattccgcccgcgtgcgccaagggtcggcactcgaggtgtgagcggctttctgcccgcagtctctacacagctcagcatcctgacgcctcctccccttgcaggggcgtgaagctacttcagactctgctgtgacgacttggccgccaggcaccgatcctccgactcggaccgatg

SEQ ID NO: 13108 - DNA, 203 bp, synthetic construct
  source 1..203: mol_type = other DNA
ggcgcgccagtcctctccaaccggctcggattccgcccgcgtgcgccatcccctcagctagcaggtgtgagcggctttctgcccgcagtctctacacagctcagcatcctgacgcctcctccccttgcagggaatgtctcgagaaacagactctgctgtgacgacttggccgccaggcaccgatcctccgactcggaccgatg

SEQ ID NO: 13109 - DNA, 203 bp, synthetic construct
  source 1..203: mol_type = other DNA
ggcgcgccagtccttagagcgcggctcggattccgcccgcgtgcgccatcccctcagctagcaggtgtgagcggctttctgcccgcagtctctacacagctcagcatcctgacgcctcctccccttgcaggggcgtgaagctacttcagactctgctgtgacgacttggccgccaggcaccgatcctccgactcggaccgatg

SEQ ID NO: 13110 - DNA, 203 bp, synthetic construct
  source 1..203: mol_type = other DNA
ggcgcgccagtcctggtccgtgggctcggattccgcccgcgtgcgccatcccctcagctagcaggtgtgagcggctttctgcccgcagtctctacacagctcagcatcctgacgcctcctccccttgcaggggcgtgaagctacttcagactctgctgtgcaattaacaggaaaaggcaccgatcctccgactcggaccgatg

SEQ ID NO: 13111 - DNA, 203 bp, synthetic construct
  source 1..203: mol_type = other DNA
ggcgcgccagtcctatgtgagaggctcggattccgcccgcgtgcgccatcccctcagctagcccaaacagcgacagttctgcccgcagtctctacacagctcagcatcctgacgcctcctccccttgcaggggcgtgaagctacttcagactctgctgtgacgacttggccgccaggcaccgatcctccgactcggaccgatg

SEQ ID NO: 13112 - DNA, 203 bp, synthetic construct
  source 1..203: mol_type = other DNA
ggcgcgccagtcctggacaaccggctgcagcctgcaccgttgctgcccgctgcccaggacgctcaacccaccgttagagccagagtggtgcctcctacagaccaatctgcggccccaaggtggggggccctacagagatgctccgagagccaaggacatgaagaacaagctggggatcttcagacggccgactcggaccgatg

SEQ ID NO: 13113 - DNA, 203 bp, synthetic construct
  source 1..203: mol_type = other DNA
ggcgcgccagtcctccgctgccggctgcagtggcattcgtgctcctccagtgcgggttcccggggagggggcgtgcaggatcgggttgtggggggtgcgctgtagggctaaggagaagatgagctttggggggccctgaggaggaggggagtcaggattaaccgaggacagggtcgcagcgggggcatcgactcggaccgatg

SEQ ID NO: 13114 - DNA, 203 bp, synthetic construct
  source 1..203: mol_type = other DNA
ggcgcgccagtcctagtattaaggctgcagtggcgacgagcggaacggagtgcgggttcccggggagggggcgtgcaggatcgggttgtggggggtgcgctgtagggctaaggagaagatgagctttggggggccctgaggaggagtctgcagcaaccacaccgaggacagggtcgcagcgggggcatcgactcggaccgatg

SEQ ID NO: 13115 - DNA, 203 bp, synthetic construct
  source 1..203: mol_type = other DNA
ggcgcgccagtcctctatagccggctgcagtggcgacgagcggaacggagtgcgggttcccggggagggggcgtgcaggatcgggttgtggggggtgcgctgtatcctctgctcattcatgagctttggggggccctgaggaggaggggagtcaggattaaccgaggacagggtcgcagcgggggcatcgactcggaccgatg

SEQ ID NO: 13116 - DNA, 203 bp, synthetic construct
  source 1..203: mol_type = other DNA
ggcgcgccagtcctgcacctcaggctgcagtggcgacgagcggaacggagtgcgggttcccgttcgttcaatagtaaggatcgggttgtggggggtgcgctgtagggctaaggagaagatgagctttggggggccctgaggaggaggggagtcaggattaaccgaggacagggtcgcagcgggggcatcgactcggaccgatg

SEQ ID NO: 13117 - DNA, 203 bp, synthetic construct
  source 1..203: mol_type = other DNA
ggcgcgccagtcctaggaacggggctgcagtggcgacgagcggaacggcagtaaccgaggacgggagggggcgtgcaggatcgggttgtggggggtgcgctgtagggctaaggagaagatgagctttggggggccctgaggaggaggggagtcaggattaaccgaggacagggtcgcagcgggggcatcgactcggaccgatg

SEQ ID NO: 13118 - DNA, 203 bp, synthetic construct
  source 1..203: mol_type = other DNA
ggcgcgccagtcctatcgggtcggctggtcgatccgccatttcccctggtagacctggcagatgaggctagaaataccccactggcgacagtgttctagcctgcgtggctgcctgcacaccctatgggtgtgaagccaaacaatggacaaggtgtgaagagccccgtgtgctcgctttgagtcctccgcgactcggaccgatg

SEQ ID NO: 13119 - DNA, 203 bp, synthetic construct
  source 1..203: mol_type = other DNA
ggcgcgccagtcctcctgctcgggctggtcgatccgccatttcccctggtagacctggcagatgaggctagaaataccccactggcgacagtgttctagcctgcgtggctgcctgcacaccctatgggtgtgtttatccgacggtaacaaggtgtgaagagccccgtgtgctcgctttgagtcctccgcgactcggaccgatg

SEQ ID NO: 13120 - DNA, 203 bp, synthetic construct
  source 1..203: mol_type = other DNA
ggcgcgccagtcctcactgtgaggctggtcgatccgccatttcccctggtagacctggcagatgaggctagaaataccccactggcgacagtgttctagcctgctgttggcgtgaggaaccctatgggtgtgaagccaaacaatggacaaggtgtgaagagccccgtgtgctcgctttgagtcctccgcgactcggaccgatg

SEQ ID NO: 13121 - DNA, 203 bp, synthetic construct
  source 1..203: mol_type = other DNA
ggcgcgccagtcctcattaggaggctggtcgatccgccatttcccctggtagacctggcagatgaggctagaaataccccactggcgacatatgctgcagtgttgtggctgcctgcacaccctatgggtgtgaagccaaacaatggacaaggtgtgaagagccccgtgtgctcgctttgagtcctccgcgactcggaccgatg

SEQ ID NO: 13122 - DNA, 203 bp, synthetic construct
  source 1..203: mol_type = other DNA
ggcgcgccagtcctgttgtaacggcttgggtccagactgcgccacagcctctcgggagacgtgggccctcggaacctttttagtgccggactccgggccgcaggcagtcccgcggcagcaggatcacaggtggcagggactcagctcggaattctgtatacgggccaatttgtcatcccagtctttcacgactcggaccgatg

SEQ ID NO: 13123 - DNA, 203 bp, synthetic construct
  source 1..203: mol_type = other DNA
ggcgcgccagtcctgcgcatgcggcttgggtccagactgcgccacagcctctcgggagacgtgggccctcggaacctttttagtgccggactccgggccgcaggcagtcccgcggcagcaggatcacaggtggcagggactcagctcggaattctgtatagaaaaagcacctggatcccagtctttcacgactcggaccgatg

SEQ ID NO: 13124 - DNA, 203 bp, synthetic construct
  source 1..203: mol_type = other DNA
ggcgcgccagtcctcctgggtcggcttgggtccagactgcgccacagcctctcgggagacgtgggccctcggaacctttttagtgccggactccgggccgcaggcagtcccgcggcagcaggatcacaggtggcagggactcagctcggaattctgtatagaaaaagcacctggtatgtccatccagtcgactcggaccgatg

SEQ ID NO: 13125 - DNA, 203 bp, synthetic construct
  source 1..203: mol_type = other DNA
ggcgcgccagtcctatggtgagggcttgggtccagactgcgccacagcctctcgggagacgtgggccctcggaacctttttagtgccggactccgggccgcaggcagtcccgcggcagcaggatcacaggtggcagggactcagcttaatccatctgcctgaaaaagcacctggatcccagtctttcacgactcggaccgatg

SEQ ID NO: 13126 - DNA, 203 bp, synthetic construct
  source 1..203: mol_type = other DNA
ggcgcgccagtcctattacatgggcttgggtccatttctacttgagcgctctcgggagacgtgggccctcggaacctttttagtgccggactccgggccgcaggcagtcccgcggcagcaggatcacaggtggcagggactcagctcggaattctgtatagaaaaagcacctggatcccagtctttcacgactcggaccgatg

SEQ ID NO: 13127 - DNA, 203 bp, synthetic construct
  source 1..203: mol_type = other DNA
ggcgcgccagtcctccagctacggctttctgcccgcagtctctacacagctcagcatcctgaaagaaaacagatacgcaggggcgtgaagctacttcagactctgctgtgacgacttggccgccaggcaccgatcctccccggtgagaaggtccacgaatcttactgcagacagatttgctcagcgcgcgactcggaccgatg

SEQ ID NO: 13128 - DNA, 203 bp, synthetic construct
  source 1..203: mol_type = other DNA
ggcgcgccagtcctctcccaaaggctttctgcccgcagtctctacacagctcagcatcctgacgcctcctccccttgcaggggcgtgaagctacttcagactctagaaatcgcttgctgccgccaggcaccgatcctccccggtgagaaggtccacgaatcttactgcagacagatttgctcagcgcgcgactcggaccgatg

SEQ ID NO: 13129 - DNA, 203 bp, synthetic construct
  source 1..203: mol_type = other DNA
ggcgcgccagtcctttgtagtaggctttctgcccgcagtctctacacagctcagcatcctgacgcctcctccccttgcaggggcgtgaagctacttcagactctgctgtgacgacttggccgccaggcaccgatcctccccggtgagaaggtccacgaattactggcggtctgaatttgctcagcgcgcgactcggaccgatg

SEQ ID NO: 13130 - DNA, 203 bp, synthetic construct
  source 1..203: mol_type = other DNA
ggcgcgccagtcctctcggccaggctttctgcccgcagtctctacacagctcagcatcctgacgcctcctccccttgcaggggcgtgaagctacttcagactctgctgtgacgacttggccgccaggcaccgatcctccccggtgatttaacgtcgattacttactgcagacagatttgctcagcgcgcgactcggaccgatg

SEQ ID NO: 13131 - DNA, 203 bp, synthetic construct
  source 1..203: mol_type = other DNA
ggcgcgccagtcctatgagcccggctttctgcccgcagtctctacacagctcagcatcctgacgcctcctccccttgcaggggcgtgaagtgctcctcctagtagctgtgacgacttggccgccaggcaccgatcctccccggtgagaaggtccacgaatcttactgcagacagatttgctcagcgcgcgactcggaccgatg

SEQ ID NO: 13132 - DNA, 203 bp, synthetic construct
  source 1..203: mol_type = other DNA
ggcgcgccagtcctcgtgtcatggctttctgcccgcagtctctacacagctcagcatcctgacgcctcctcccctttatcatagtatgttctacttcagactctgctgtgacgacttggccgccaggcaccgatcctccccggtgagaaggtccacgaatcttactgcagacagatttgctcagcgcgcgactcggaccgatg

SEQ ID NO: 13133 - DNA, 203 bp, synthetic construct
  source 1..203: mol_type = other DNA
ggcgcgccagtcctatgggctgggctttctgcccgcagtctctacacattaagttgcgtcagcgcctcctccccttgcaggggcgtgaagctacttcagactctgctgtgacgacttggccgccaggcaccgatcctccccggtgagaaggtccacgaatcttactgcagacagatttgctcagcgcgcgactcggaccgatg

SEQ ID NO: 13134 - DNA, 203 bp, synthetic construct
  source 1..203: mol_type = other DNA
ggcgcgccagtccttccaccatggctttctgccctacacacgactgatgctcagcatcctgacgcctcctccccttgcaggggcgtgaagctacttcagactctgctgtgacgacttggccgccaggcaccgatcctccccggtgagaaggtccacgaatcttactgcagacagatttgctcagcgcgcgactcggaccgatg

SEQ ID NO: 13135 - DNA, 203 bp, synthetic construct
  source 1..203: mol_type = other DNA
ggcgcgccagtcctccgtggtggggaaacgcacctgattttttacttattagtttgttttttctttaacctttcagcatcacagaggaagtagactgatattaacaatacttactaataataacgtgcctcatgaaataaagatccttgctccgggctcctaaaaatttcctgcgtctcatgccaagacgactcggaccgatg

SEQ ID NO: 13136 - DNA, 203 bp, synthetic construct
  source 1..203: mol_type = other DNA
ggcgcgccagtcctgaatatccgggaaacgcacctgattttttacttattagtttgttttttctttaacctttcagcatcacagaggaagtagactgatattaacaatacttactaatgcctgttactaatgtgaaataaagatccgaaaggaattggaataaaaatttcctgcgtctcatgccaagacgactcggaccgatg

SEQ ID NO: 13137 - DNA, 203 bp, synthetic construct
  source 1..203: mol_type = other DNA
ggcgcgccagtcctcttcagatgggaaacgcacctgattttttacttattagtttgttttttctttaacctttcagcatcacagaggaagtagactgatattaatgcgctactggtcgaataacgtgcctcatgaaataaagatccgaaaggaattggaataaaaatttcctgcgtctcatgccaagacgactcggaccgatg

SEQ ID NO: 13138 - DNA, 203 bp, synthetic construct
  source 1..203: mol_type = other DNA
ggcgcgccagtcctgcgtaattgggaatgtgagggtcgccggaagtgccaccgagaagcgccggcctcggggctgtctacagcggcccgggagaggctgtggtggccccgagcgcgagtgtgtaggtgacaggacagcggccaggcccgcccctcccctcgtgatggtcattgtcctccagagcagtgcgactcggaccgatg

SEQ ID NO: 13139 - DNA, 203 bp, synthetic construct
  source 1..203: mol_type = other DNA
ggcgcgccagtccttcaacctagggaccgctgcatgtatcctcagctcctaacactgtgtctggtacacattgtttgatggttttgatgtttcagattcgttatatttcacaaacacaaggcttgccagctgaatatcttctcagtgccggaacaaaaacaaccaggtttttcaacagagatcctaatcgactcggaccgatg

SEQ ID NO: 13140 - DNA, 203 bp, synthetic construct
  source 1..203: mol_type = other DNA
ggcgcgccagtcctcttccctggggagagccatacgtagggttaatcgcggtgagtacaccggaattgccaggacgaccgggtcctttcttggataaacccgctcaatgcctggagatttgggcgtgcccccgcaagactgctagccgagtagtgttgggtcgcgaaaggccttgtggtactgcctgacgactcggaccgatg

SEQ ID NO: 13141 - DNA, 203 bp, synthetic construct
  source 1..203: mol_type = other DNA
ggcgcgccagtcctctttaagcgggagagccatagtggtctgcggaaccggtgagtacaccgcgtcgagtttaggtaccgggtcctttcttggataaacccgctcaatgcctggagatttgggcgtgcccccgcaagactgctagccgagtagtgttgggtcgcgaaaggccttgtggtactgcctgacgactcggaccgatg

SEQ ID NO: 13142 - DNA, 203 bp, synthetic construct
  source 1..203: mol_type = other DNA
ggcgcgccagtcctaaccgacggggagagccatagtggtctgcggaaccggtgagtacaccggaattgccaggacgaccgggtcctttcttggataaacccgctattacttcatcatgttgggcgtgcccccgcaagactgctagccgagtagtgttgggtcgcgaaaggccttgtggtactgcctgacgactcggaccgatg

SEQ ID NO: 13143 - DNA, 203 bp, synthetic construct
  source 1..203: mol_type = other DNA
ggcgcgccagtcctagacggttgggagatttgagagaaagactccagaagcccgcggggagagcaggggttctggggaagataaagcccttcatccaggatcccatgactcgtcgttcatgagatggaccaaacgcccccggcgcgtcctgaatatctggtctcagggattcgaactccccctgtgagcgactcggaccgatg

SEQ ID NO: 13144 - DNA, 203 bp, synthetic construct
  source 1..203: mol_type = other DNA
ggcgcgccagtcctcaagttgagggagatttgagagaaagactccagaagcccgcggggagagcaggggttctggggaagataaagcccttcatccaggatccctctgtgaccataagatgagatggaccaaacgcccccggcgcgtcctgaatatctggtctcagggattcgaactccccctgtgagcgactcggaccgatg

SEQ ID NO: 13145 - DNA, 203 bp, synthetic construct
  source 1..203: mol_type = other DNA
ggcgcgccagtcctttcgcgcggggatcctaggcatttttggttgcgcaattcaagtgtcctatttaaaatgggacaaatagtgacattcttccaggaagtgcctcatgtaatagaagaggtgatgaacattgttctcattgcactgtctgtactagcagctgatccttagacatacaattttgcaaccgactcggaccgatg

SEQ ID NO: 13146 - DNA, 203 bp, synthetic construct
  source 1..203: mol_type = other DNA
ggcgcgccagtccttattaagtgggatcctaggcatttttggttgcgcaattcaagtgtcctcaccttccaattctaaatagtgacattcttccaggaagtgcctcatgtaatagaagaggtgatgaacattgttctcattgcactgtctgtactagcagtgctgaaaggtctgtacaattttgcaaccgactcggaccgatg

SEQ ID NO: 13147 - DNA, 203 bp, synthetic construct
  source 1..203: mol_type = other DNA
ggcgcgccagtcctccaacggcgggatcctaggcgttttttagtcacgcttaaatctttgattgcgtcaatcatgggtcaattgttcagcttttttgaagaagttccgaatatcatccatgaggctatcaacatagctctgatagcagtgagcttaattgagatagaagctattatgattaacttgtgcgactcggaccgatg

SEQ ID NO: 13148 - DNA, 203 bp, synthetic construct
  source 1..203: mol_type = other DNA
ggcgcgccagtcctaacattgggggatcctaggcgttttttagtcacgcttaaatctttgattgcgtcaatcatgggtcaattgttcagcttttttgaagaagttccgaatatcatccatgaggctatcaacatagctctgatagcagtgagcttaattgctgccttgaaagggatgattaacttgtgcgactcggaccgatg

SEQ ID NO: 13149 - DNA, 203 bp, synthetic construct
  source 1..203: mol_type = other DNA
ggcgcgccagtcctggtttcgggggatcctaggcgttttttagtcacgcttaaatctttgattgcgtcaatcatgggtcaattgttcagcttttttgaagaagttccgaatatcatccatgaggctatcaacatagctctgatagctccaccgcgcgcacctgccttgaaagggatgattaacttgtgcgactcggaccgatg

SEQ ID NO: 13150 - DNA, 203 bp, synthetic construct
  source 1..203: mol_type = other DNA
ggcgcgccagtccttcattcctgggcagagagagggacgccccctcctcctccccgcctcttgtgaggcgcgcggagccgcctcccctgggtcaggtctgatgggccggtgggcgcgctagtggtggccgccaccgccgaaaccgtcgacctcctgggccagtccaatagtatgagccccgcggcagccgactcggaccgatg

SEQ ID NO: 13151 - DNA, 203 bp, synthetic construct
  source 1..203: mol_type = other DNA
ggcgcgccagtcctgggaaatcgggcagagagagggacgccccctcctcctccccgcctcttgtgaggcgcgcggagccgcctcccctgggtcaggtctgatgggccggtgggcgcgctagtggtggccgccaccgccgaaaccgtgacggggggtaatgccagttccgcgtccagccccgcggcagccgactcggaccgatg

SEQ ID NO: 13152 - DNA, 203 bp, synthetic construct
  source 1..203: mol_type = other DNA
ggcgcgccagtccttctcagtcgggcataaaacacgcctccacccctgccctcctcaggccccctccgcctccacccctgccctcctcaggccccctgcgtccccgcctcgtcctcctcaggccccctccgcctccggctccgtcctcctctggccccctccgcccccggccccggccccacggcgggcgactcggaccgatg

SEQ ID NO: 13153 - DNA, 203 bp, synthetic construct
  source 1..203: mol_type = other DNA
ggcgcgccagtccttgatggcggggcccaagcgtaaccaggctcttctgattggccggtgtacttcagtttccgtccaaggtccgcctcctacctccttctgcttcggtccttaggataagaccatggccttgagagcatgtggctgctgatatgagttgagatgcctcattcccaaagtggacaacacgactcggaccgatg

SEQ ID NO: 13154 - DNA, 203 bp, synthetic construct
  source 1..203: mol_type = other DNA
ggcgcgccagtcctgagcggcagggcccaagcgtaaccaggctcttctgattggccggtgtacttcagtttccgtccaaggtccgcctcctacctccttctgcttcggtccttaggataagaccatggccttgagagcatgtggcttgatcatcttccgaagatgcctcattccacgtcatatattgccgactcggaccgatg

SEQ ID NO: 13155 - DNA, 203 bp, synthetic construct
  source 1..203: mol_type = other DNA
ggcgcgccagtcctggcatgtcgggcccaagcgtaaccaggctcttctgattggccggtgtacttcagtttccgtccaaggtccgcctcctacctccttctgcttcggtccttaggataagaccatggccttgagagcatgtggcttgatcatcttccgaagatgcctcattcccaaagtggacaacacgactcggaccgatg

SEQ ID NO: 13156 - DNA, 203 bp, synthetic construct
  source 1..203: mol_type = other DNA
ggcgcgccagtcctcttcatcagggcccaagcgtaaccaggctcttctgattggccggtgtacttcagtttccgtccaaggtccgcctcctacctccttctgcttcggtccttaggataagaccatggccttttcgcttcaattgatgatcatcttccgaagatgcctcattcccaaagtggacaacacgactcggaccgatg

SEQ ID NO: 13157 - DNA, 203 bp, synthetic construct
  source 1..203: mol_type = other DNA
ggcgcgccagtcctggagccgcgggcccaagcgtaaccaggctcttctgattggccggtgtatcggttaggtttcgcaaggtccgcctcctacctccttctgcttcggtccttaggataagaccatggccttgagagcatgtggcttgatcatcttccgaagatgcctcattcccaaagtggacaacacgactcggaccgatg

SEQ ID NO: 13158 - DNA, 203 bp, synthetic construct
  source 1..203: mol_type = other DNA
ggcgcgccagtcctcgcgactggggcccaagcgtaaccaggctcttctttgccataacacctcttcagtttccgtccaaggtccgcctcctacctccttctgcttcggtccttaggataagaccatggccttgagagcatgtggcttgatcatcttccgaagatgcctcattcccaaagtggacaacacgactcggaccgatg

SEQ ID NO: 13159 - DNA, 203 bp, synthetic construct
  source 1..203: mol_type = other DNA
ggcgcgccagtcctggcccttagggcgggcggccgcagagcagcaccggccgtggctccggtagcagcaagttcgaaccccgctcccgctaatagggccactcggctccttcggcccttgggcctccaaacaccagtccccggcagctcgttgcgcattgcgctctccccgccaccaggatgccggtacgactcggaccgatg

SEQ ID NO: 13160 - DNA, 203 bp, synthetic construct
  source 1..203: mol_type = other DNA
ggcgcgccagtcctgttctagggggcgggcggccgcagagcagcaccgtatccttaaggcaaagcagcaagttcgaaccccgctcccgctccgcttcggttctcgctccttcggcccttgggcctccaaacaccagtccccggcagctcgttgcgcattgcgctctccccgccaccaggatgccggtacgactcggaccgatg

SEQ ID NO: 13161 - DNA, 203 bp, synthetic construct
  source 1..203: mol_type = other DNA
ggcgcgccagtcctgcccagtggggcgtggcgttacagagcctctagcgctgggtgttggggacctgacgctatggagctctcggagtttaacctaattgtagcgtgagtggggggttcctgctgcgggatgagaacgtagacgccagtggctcactcgctcctggcaccttccctttcaggctccagcgactcggaccgatg

SEQ ID NO: 13162 - DNA, 203 bp, synthetic construct
  source 1..203: mol_type = other DNA
ggcgcgccagtcctcattctcagggcgtggcgttacagagcctctagcgctgggtgttggggacctgacgctatggagctctcggagttttgtgggggacggctgtgagtggggggttcctgctgcgggatgagaacgtagacgccagtggctcactcgctcctggcaccttccctttcaggctccagcgactcggaccgatg

SEQ ID NO: 13163 - DNA, 203 bp, synthetic construct
  source 1..203: mol_type = other DNA
ggcgcgccagtccttgtaattagggcgtggcgttacagagcctctagcgctgggtgttggggacctgacgctatggagctctcggagttttgtgggggacggctgtgagtggggggttcctgctgcgggatgagaacgtagacgccagtggctcactcgctcctggcaccttcctaggaccatagttacgactcggaccgatg

SEQ ID NO: 13164 - DNA, 203 bp, synthetic construct
  source 1..203: mol_type = other DNA
ggcgcgccagtcctcacagttcgggcgtggcgttacagagcctctagcgctgggtgttggggacctgacgctatggagctctcggagttttgtgggggacggctgtgagtggggggttcctgctgcgggatgagaacgtagacgccgtgctgaagtgtcgtcctggcaccttccctttcaggctccagcgactcggaccgatg

SEQ ID NO: 13165 - DNA, 203 bp, synthetic construct
  source 1..203: mol_type = other DNA
ggcgcgccagtcctgtgttcgtgggcgtggcgttctcttaatctgctggctgggtgttggggacctgacgctatggagctctcggagttttgtgggggacggctgtgagtggggggttcctgctgcgggatgagaacgtagacgccagtggctcactcgctcctggcaccttccctttcaggctccagcgactcggaccgatg

SEQ ID NO: 13166 - DNA, 203 bp, synthetic construct
  source 1..203: mol_type = other DNA
ggcgcgccagtcctcgcagaatgggctaaggatgggaactgatggttagcacgtaaccttcagagagtgcggatctgagtaggagaccgtggtgcactgctttacagatgcagcccggtttaaaaagcgtctatgcccctacagggtagcggtgggccgcgccctttccttttaaaactacttgttctcgactcggaccgatg

SEQ ID NO: 13167 - DNA, 203 bp, synthetic construct
  source 1..203: mol_type = other DNA
ggcgcgccagtcctgggcgcgtgggctaaggatgtcctacaggtaccccacaaatgaaaattgagagtgcggatctgagtaggagaccgtggtgcactgctttacagatgcagcccggtttaaaaagcgtctatgcccctacagggtagcggtgggccgcgccctttccttttaaaactacttgttctcgactcggaccgatg

SEQ ID NO: 13168 - DNA, 203 bp, synthetic construct
  source 1..203: mol_type = other DNA
ggcgcgccagtcctcgtggttagggctaaggatgtcctacaggtacccgcacgtaaccttcaattgtgagctcggcgagtaggagaccgtggtgcactgctttacagatgcagcccggtttaaaaagcgtctatgcccctacagggtagcggtgggccgcgccctttccttttaaaactacttgttctcgactcggaccgatg

SEQ ID NO: 13169 - DNA, 203 bp, synthetic construct
  source 1..203: mol_type = other DNA
ggcgcgccagtccttaacgcccgggctaaggatgtcctacaggtacccgcacgtaaccttcagagagtgcggatctgagtaggagaccgtggtgcactgctttacagatgcagcccggtttaaaaagcgtctatgcccctacagggtagcggtgggccgcgccctttccttttaaaactacttgttctcgactcggaccgatg

SEQ ID NO: 13170 - DNA, 203 bp, synthetic construct
  source 1..203: mol_type = other DNA
ggcgcgccagtcctgaggcaccgggctccgggatctggtcgttagggtcaggtgagaaagcgagacaggcaggtagggaaatcgtgaggtgagcgtggtcctagctccttgtggcagagcctagagagaaggcgaggacgctgaagaaccaggcggacagctggcagagagagaagttggctagcatgcgactcggaccgatg

SEQ ID NO: 13171 - DNA, 203 bp, synthetic construct
  source 1..203: mol_type = other DNA
ggcgcgccagtcctccatcacagggctccgggatgaaaggagggaacgcaggtgagaaagcgagacaggcaggtagccggtgttcactcggagcgtggtcctagctccttgtggcagagcctagagagaaggcgaggacgctgaagaaccaggcggacagctggcagagagagaagttggctagcatgcgactcggaccgatg

SEQ ID NO: 13172 - DNA, 203 bp, synthetic construct
  source 1..203: mol_type = other DNA
ggcgcgccagtcctttgtcaccgggctccgggatgaaaggagggaacgcaggtgagaaagcgagacaggcaggtagggaaatcgtgaggtgagcgtggtcctagctccttgtggcagagcctagagagaaggcgaggacgctgaagaaccaggcggacagtcttatcttgtttcagttggctagcatgcgactcggaccgatg

SEQ ID NO: 13173 - DNA, 203 bp, synthetic construct
  source 1..203: mol_type = other DNA
ggcgcgccagtcctacgactaggggctccgggatgaaaggagggaacgcaggtgagaaagcgagacaggcaggtagggaaatcgtgaggttccttgctcgtactctccttgtggcagagcctagagagaaggcgaggacgctgaagaaccaggcggacagctggcagagagagaagttggctagcatgcgactcggaccgatg

SEQ ID NO: 13174 - DNA, 203 bp, synthetic construct
  source 1..203: mol_type = other DNA
ggcgcgccagtccttttcacaagggctccgggatgaaaggagggaacgttacgctacgttaaagacaggcaggtagggaaatcgtgaggtgagcgtggtcctagctccttgtggcagagcctagagagaaggcgaggacgctgaagaaccaggcggacagctggcagagagagaagttggctagcatgcgactcggaccgatg

SEQ ID NO: 13175 - DNA, 203 bp, synthetic construct
  source 1..203: mol_type = other DNA
ggcgcgccagtcctgagagtttggggaggttggggacgggcctggcagttgtgaactcgaacctgccgctgtcgccgcggcggggcggggagcgagagtgggccgcggaggccggccttcgggctccatggacgggcgccgcgtccagaatggtggacgagcagagcagaggaagaaccgatgctggacgactcggaccgatg

SEQ ID NO: 13176 - DNA, 203 bp, synthetic construct
  source 1..203: mol_type = other DNA
ggcgcgccagtcctttcagcctggggcagacagcgccggtggtgttcagtacgccacaagcgacacaaatgaacaccgtcataatcatgagccagcacttctaccctagccgggcccagcccccgagcagtgcagcctcccgagtgcagagtgcagcccctgcccgccctggcccagctgcccatgtccgactcggaccgatg

SEQ ID NO: 13177 - DNA, 203 bp, synthetic construct
  source 1..203: mol_type = other DNA
ggcgcgccagtcctcgcctactggggcagacagcgccggtggtgttcagtacgccacaagcgacacaaatgaacacgccttctcagcccccgtctataggtggtcctagccgggcccagcccccgagcagtgcagcctcccgagtgcagagtgcagcccctgcccgccctggcccagctgcccatgtccgactcggaccgatg

SEQ ID NO: 13178 - DNA, 203 bp, synthetic construct
  source 1..203: mol_type = other DNA
ggcgcgccagtcctctccatagggggcagacagcgccggtggtgttcagtacgccacaagcgacacaaatgaacacgccttctcagccccgccagcacttctaccctagccgggcccagcccccgagcagtgcagcctcccgagtgcagagtgcagccccattatatgtcaatgcagctgcccatgtccgactcggaccgatg

SEQ ID NO: 13179 - DNA, 203 bp, synthetic construct
  source 1..203: mol_type = other DNA
ggcgcgccagtcctttgctaacggggcagacagcgccggtggtgttcagtacgccacaagcgacacaaatgaacacgccttctcagccccgccagcacttctaccctagccgggcccagcccccgagcagtgcagcctcccgagtgcagagtgcagcccctgcccgccctggcccagctgcccatgtccgactcggaccgatg

SEQ ID NO: 13180 - DNA, 203 bp, synthetic construct
  source 1..203: mol_type = other DNA
ggcgcgccagtcctggtaacacggggcagacagcgccggtggtgttcagtacgccacaagcgacacaaatgaacacgccttctcagccccgccagcacttctaccctagccgggcccagcccccgagcagtgcagcctcccgagtggcttcctgcaagagtgcccgccctggcccagctgcccatgtccgactcggaccgatg

SEQ ID NO: 13181 - DNA, 203 bp, synthetic construct
  source 1..203: mol_type = other DNA
ggcgcgccagtcctcgaacttaggggcagacagcgccggtggtgttcagtacgccacaagcgacacaaatgaacacgccttctcagccccgccagcacttctacgagcctgtttgatcgcccccgagcagtgcagcctcccgagtgcagagtgcagcccctgcccgccctggcccagctgcccatgtccgactcggaccgatg

SEQ ID NO: 13182 - DNA, 203 bp, synthetic construct
  source 1..203: mol_type = other DNA
ggcgcgccagtcctcataatatggggccacagcccgggctggggggagccggggtgcaagagggcaggctggatcaccggattagacgcgggaccgggctccgagtgtcaacgagagctagagacatgaggctgagctggttccgggtcctgacagtactgtccatctgcctgagcgccgtggccacgcgactcggaccgatg

SEQ ID NO: 13183 - DNA, 203 bp, synthetic construct
  source 1..203: mol_type = other DNA
ggcgcgccagtcctctatcttcggggccacagcccgggctggggggagccggggtgcaagagggcaggctggatcaggccgggcagaaggggaccgggctccgagtgtcaacgagagctagagacatgaggcaatttattgcaaatgtcctgacagtactgtccatctgcctgagcgccgtggccacgcgactcggaccgatg

SEQ ID NO: 13184 - DNA, 203 bp, synthetic construct
  source 1..203: mol_type = other DNA
ggcgcgccagtcctgtttctggggggccgcgcgtccaggcggcgagcggaagtgggtgtgagagcggaagtggccgataccttgtctttcctgggcggggaccgggcttgtcggtgaagcggcagtggcggcggcggcggcggctcggcaggcgggttcaggcttcgggggccagccgccgccatgatcgactcggaccgatg

SEQ ID NO: 13185 - DNA, 203 bp, synthetic construct
  source 1..203: mol_type = other DNA
ggcgcgccagtcctctgaggctggggccgcgcgtccaggcggcgagcggaagtgggtgtgagagcggaagtggccggctagagccgggggctgggcggggaccgggcttgtcggtgaagcggcagtggcggcggcggcggcggctctaatacaatccggcggcttcgggggccagccgccgccatgatcgactcggaccgatg

SEQ ID NO: 13186 - DNA, 203 bp, synthetic construct
  source 1..203: mol_type = other DNA
ggcgcgccagtccttacttcttggggccgcgcgtgttcttcttacttagaagtgggtgtgagagcggaagtggccggctagagccgggggctgggcggggaccgggcttgtcggtgaagcggcagtggcggcggcggcggcggctcggcaggcgggttcaggcttcgggggccagccgccgccatgatcgactcggaccgatg

SEQ ID NO: 13187 - DNA, 203 bp, synthetic construct
  source 1..203: mol_type = other DNA
ggcgcgccagtcctcggcagcgggggccgggcggccggcgcccccggctgctcccgccgccgcccggacccgcgccccgccggggcagcggtggtgagagccccgactccccggacgccgcccgccgtgccatggggttcccggccaatcgaaaatcagccgcgctgtgctgcggcctcctggccccgcgactcggaccgatg

SEQ ID NO: 13188 - DNA, 203 bp, synthetic construct
  source 1..203: mol_type = other DNA
ggcgcgccagtccttcgtatgtggggcgcatcccctggcgactcctcccgttccctcttccgcttgcgctgccgcaaacttgcattagcgctggagcgcaccttcatcgccatcaagccggacggcgtgcagcgcggcctggtgggcgagatcatcaagcgcttcgagcagaagggattccgcctcgtcgactcggaccgatg

SEQ ID NO: 13189 - DNA, 203 bp, synthetic construct
  source 1..203: mol_type = other DNA
ggcgcgccagtcctagaaagacggggcgcatcccctggcgactcctcccgttccctcttccgcttgcgctgccgcaggaccatggccaacctggagcgcaccttcatcgccatcaagccggacggcgtgcagcgcggcctggtgggcgagatcatcaagctacgttgatcagctggattccgcctcgtcgactcggaccgatg

SEQ ID NO: 13190 - DNA, 203 bp, synthetic construct
  source 1..203: mol_type = other DNA
ggcgcgccagtcctatcgaggaggggcgcatcccctggcgactcctcccgttccctcttccgcttgcgctgccgcaggaccatggccaacctggagcgcaccttcatcgccatcaagccggacggcgtgcagcgcggcctggtgggttttcgatcattttgcttcgagcagaagggattccgcctcgtcgactcggaccgatg

SEQ ID NO: 13191 - DNA, 203 bp, synthetic construct
  source 1..203: mol_type = other DNA
ggcgcgccagtcctactaacatggggcgcatcccctggcgactcctcccgttccctcttccgcttgcgctgccgcaggaccatggccaacctggagcgcaccttcatcgccatcaagccggacggcgtgcaggtttaagctaaatccgagatcatcaagcgcttcgagcagaagggattccgcctcgtcgactcggaccgatg

SEQ ID NO: 13192 - DNA, 203 bp, synthetic construct
  source 1..203: mol_type = other DNA
ggcgcgccagtcctaataggccggggcgcatcccctggcgactcctccttacggtggcctatcttgcgctgccgcaggaccatggccaacctggagcgcaccttcatcgccatcaagccggacggcgtgcagcgcggcctggtgggcgagatcatcaagcgcttcgagcagaagggattccgcctcgtcgactcggaccgatg

SEQ ID NO: 13193 - DNA, 203 bp, synthetic construct
  source 1..203: mol_type = other DNA
ggcgcgccagtcctgatttctagggggtccgggagtctgctatgtgggcggaggtctagtgattccccgggataagcctcactcgtcccctctcggggggcggaacacccacctgctagccccgctgctctctttgctttcctcctcgcttcggtctcccccaactcctagcatcccctcctatcgctcgactcggaccgatg

SEQ ID NO: 13194 - DNA, 203 bp, synthetic construct
  source 1..203: mol_type = other DNA
ggcgcgccagtccttcatcatcgggggtccgggagtctgctatgtggggacgataagtcgaggctgaaaactgtcccctcactcgtcccctctcggggggcggaacacccacctgctagccccgctgctctctttgctttcctcctcgcttcggtctcccccaactcctagcatcccctcctatcgctcgactcggaccgatg

SEQ ID NO: 13195 - DNA, 203 bp, synthetic construct
  source 1..203: mol_type = other DNA
ggcgcgccagtcctccttagaggggggtccgggagtctgctatgtggggacgataagtcgagttccccgggataagcctcactcgtcccccgggaactcagcagacacccacctgctagccccgctgctctctttgctttcctcctcgcttcggtctcccccaactcctagcatcccctcctatcgctcgactcggaccgatg

SEQ ID NO: 13196 - DNA, 203 bp, synthetic construct
  source 1..203: mol_type = other DNA
ggcgcgccagtcctcgctcgccgggggtccgggagtctgctatgtggggacgataagtcgagttccccgggataagcctcactcgtcccctctcggggggcggaacacccacctgctagccccgctgctctctttgctttcctcctcgcttcggtctcccaatttggagttttgcccctcctatcgctcgactcggaccgatg

SEQ ID NO: 13197 - DNA, 203 bp, synthetic construct
  source 1..203: mol_type = other DNA
ggcgcgccagtcctggcctatggggggtccgggagtctgctatgtggggacgataagtcgagttccccgggataagcctcactcgtcccctctcggggggcggaacacccacctgctatgagattcaaagaatttgctttcctcctcgcttcggtctcccccaactcctagcatcccctcctatcgctcgactcggaccgatg

SEQ ID NO: 13198 - DNA, 203 bp, synthetic construct
  source 1..203: mol_type = other DNA
ggcgcgccagtcctaatttaccgggggtccgggatatcctggaccaaagacgataagtcgagttccccgggataagcctcactcgtcccctctcggggggcggaacacccacctgctagccccgctgctctctttgctttcctcctcgcttcggtctcccccaactcctagcatcccctcctatcgctcgactcggaccgatg

SEQ ID NO: 13199 - DNA, 203 bp, synthetic construct
  source 1..203: mol_type = other DNA
ggcgcgccagtcctgactctgcggggtatactggcaaacttgcacattcggaaaaaatggggcaaataagaatttgataagtgctatttaagtctaaccttttcaatcagaaatggggtgcaattcactgagcatgataaaggttagattacaaaatttatttgacaatgacgaagtagcattgttaacgactcggaccgatg

SEQ ID NO: 13200 - DNA, 203 bp, synthetic construct
  source 1..203: mol_type = other DNA
ggcgcgccagtcctcgttacccggggtcgactgccgctgcggtgcatgagggcgcatgcgcagcggggccgtgggtgtacgcggcgcagcgcggcagtcctgatggcccggcatgggttaccgctgctgcccctgctgtcgctcctggtcggcgcgtggctcaagctaggaaatggacaggctactagcgactcggaccgatg

SEQ ID NO: 13201 - DNA, 203 bp, synthetic construct
  source 1..203: mol_type = other DNA
ggcgcgccagtcctgcgggatcgggtagcccaagaaccttcgggtgagattttactcttacatcttttcctataccgatcatggcagtccttctgctcctactcgtggtggaggccggggctattttagccccggccacccatgcttgtagcgcgaaagggcaatatttcctcacaaactgttgcgcccgactcggaccgatg

SEQ ID NO: 13202 - DNA, 203 bp, synthetic construct
  source 1..203: mol_type = other DNA
ggcgcgccagtcctccgtccgcgggtagcccaagaaccttcgggtgagggcgggtggcatttcggacaaggggtttgatcatggcagtccttctgctcctactcgtggtggaggccggggctattttagccccggccacccatgcttgtagcgcgaaagggcaatatttcctcacaaactgttgcgcccgactcggaccgatg

SEQ ID NO: 13203 - DNA, 203 bp, synthetic construct
  source 1..203: mol_type = other DNA
ggcgcgccagtcctcttagtttgggtagcccaagaaccttcgggtgagggcgggtggcattttcttttcctataccgatcatggcagtccttctgctcctactccgatgaagcagataggctattttagccccggccacccatgcttgtagcgcgaaagggcaatatttcctcacaaactgttgcgcccgactcggaccgatg

SEQ ID NO: 13204 - DNA, 203 bp, synthetic construct
  source 1..203: mol_type = other DNA
ggcgcgccagtcctgtataagagggtagcccaagaaccttcgggtgagggcgggtggcattttcttttcctataccgatcatggcagtccttctgctcctactcgtggtggaggccggggctattttagcccttcgtgttgtgaggtgtagcgcgaaagggcaatatttcctcacaaactgttgcgcccgactcggaccgatg

SEQ ID NO: 13205 - DNA, 203 bp, synthetic construct
  source 1..203: mol_type = other DNA
ggcgcgccagtccttggtggttgggtagcccaagaaccttcgggtgagggcgggtggcattttcttttcctataccgatcatggcagtccttctgctcctactcgtggtggaggccggtctgtgaggccgtacggccacccatgcttgtagcgcgaaagggcaatatttcctcacaaactgttgcgcccgactcggaccgatg

SEQ ID NO: 13206 - DNA, 203 bp, synthetic construct
  source 1..203: mol_type = other DNA
ggcgcgccagtcctcagacgtggggtccgccgcgagaatattcaacttaggtttgtccccgccgccccgacgcttccgccgggtccgtcggcacgtcggccctgcctcccggaccaccctgcggggcgcaccagcgatctggggtgcggggctcggcctccctgcgctcctggctgacggtcttaacccgactcggaccgatg

SEQ ID NO: 13207 - DNA, 203 bp, synthetic construct
  source 1..203: mol_type = other DNA
ggcgcgccagtcctggcgaagagggtccgccgcggtcgaggatcctggaggtttgtccccgccgccccgacgcttccgccgggtccgtcggcacgtcggccctgcctcccggaccaccctgcggggcgcaccagcgatctggggtgcggggctcggcctccctgcgctcctggctgacggtcttaacccgactcggaccgatg

SEQ ID NO: 13208 - DNA, 203 bp, synthetic construct
  source 1..203: mol_type = other DNA
ggcgcgccagtcctgattgtaggggtccgccgcggtcgaggatcctggaggtttgtccccgccgccccgacgcttccgccgggtccgtcggcacgtcggccctgcctcccggaccaccctgcggggcgcaccagcgatctggggtgcggggctcggcctctaatatacaggctttgacggtcttaacccgactcggaccgatg

SEQ ID NO: 13209 - DNA, 203 bp, synthetic construct
  source 1..203: mol_type = other DNA
ggcgcgccagtcctagggagtcgggtccgccgcggtcgaggatcctgggacaaaaggagtcacgccccgacgcttccgccgggtccgtcggcacgtcggccctgcctcccggaccaccctgcggggcgcaccagcgatctggggtgcggggctcggcctccctgcgctcctggctgacggtcttaacccgactcggaccgatg

SEQ ID NO: 13210 - DNA, 203 bp, synthetic construct
  source 1..203: mol_type = other DNA
ggcgcgccagtcctgttggcatgggtgtaaactagcgccgccgggtgttactttgccccgccggcggggcggtcagcctcctgtcaccgcctgttccggctatggtcccgtccggtgttctgtaagttggcaacctaggctcctgacgcgaccctggtcctgatggcggcggcgacggccgcggcagccgactcggaccgatg

SEQ ID NO: 13211 - DNA, 203 bp, synthetic construct
  source 1..203: mol_type = other DNA
ggcgcgccagtcctgtaagacagggttctacttgagatttccctcgtggtgccagggtccggcgagcatcacgccgaggcccattttccagacgaccacgacgacagaatatattgttactctggcgccccttaccagcttccagtctctcgaggtggccagtgtggtgcttggtccttgtttccaggcgactcggaccgatg

SEQ ID NO: 13212 - DNA, 203 bp, synthetic construct
  source 1..203: mol_type = other DNA
ggcgcgccagtcctacagccaagggttctacttgagatttccctcgtggtgccagggtccggcgagcatcacgccgaggcccattttccagacgaccacgacgaggccggggtcacgaactctggcgccccttaccagcttccagtctctcgaggtggccagtgtggtgcttggtccttgtttccaggcgactcggaccgatg

SEQ ID NO: 13213 - DNA, 203 bp, synthetic construct
  source 1..203: mol_type = other DNA
ggcgcgccagtcctgaagttacgggttctacttgagatttccctcgtggtgccagggtccggcgagcatcacgccgaggcccattttccagacgaccacgacgaggccggggtcacgaactctggcgccccttaccagcttccagtctctcgaggtggccctctgtccatggaatccttgtttccaggcgactcggaccgatg

SEQ ID NO: 13214 - DNA, 203 bp, synthetic construct
  source 1..203: mol_type = other DNA
ggcgcgccagtcctcccttgcagggttctacttgagatttccctcgtggtgccagggtccggcgagcatcacgccgaggcccattttccagacgaccacgacgaggccggggtcacgaactctggcgccccttaccagcttccagttatatagacccttgagtgtggtgcttggtccttgtttccaggcgactcggaccgatg

SEQ ID NO: 13215 - DNA, 203 bp, synthetic construct
  source 1..203: mol_type = other DNA
ggcgcgccagtcctcttaccgtgggttctacttgagatttccctcgtggtgccagggtccggcgagcatcacgccgtttatacacgatatgacgaccacgacgaggccggggtcacgaactctggcgccccttaccagcttccagtctctcgaggtggccagtgtggtgcttggtccttgtttccaggcgactcggaccgatg

SEQ ID NO: 13216 - DNA, 203 bp, synthetic construct
  source 1..203: mol_type = other DNA
ggcgcgccagtccttgagataagggttctacttgttgcgatatgatgagtgccagggtccggcgagcatcacgccgaggcccattttccagacgaccacgacgaggccggggtcacgaactctggcgccccttaccagcttccagtctctcgaggtggccagtgtggtgcttggtccttgtttccaggcgactcggaccgatg

SEQ ID NO: 13217 - DNA, 203 bp, synthetic construct
  source 1..203: mol_type = other DNA
ggcgcgccagtcctataagttggggttgctgacgaaaagagaaaaaatcagtgatctgtgtcgagggcaatattgcaagtgggaagacgacatgcctggaattcttctccaacgcgacagacgtcgaggtgttaacggagcctgtgtccaagtggagaaatgtccgtggccacaatcctctgggcctgcgactcggaccgatg

SEQ ID NO: 13218 - DNA, 203 bp, synthetic construct
  source 1..203: mol_type = other DNA
ggcgcgccagtccttgagtgatggtaaggagaggaggttacggggaacgacgcgctgctttcatgccctttcttgttctaccttcatcggccgaggtggacacccttaacacctcagaccctccggcccctgaagcatggccagcagcggcatggctgacagcgccaaccacctgcccttctttttcgcgactcggaccgatg

SEQ ID NO: 13219 - DNA, 203 bp, synthetic construct
  source 1..203: mol_type = other DNA
ggcgcgccagtcctaccatcaaggtaaggagaggaggttacggggaacgacgcgctgctttcatgccctttcttgttctaccttcatcggccgaggtggacacctgcgcaggtgtgtgattctttctatgctaagcatggccagcagcggcatggctgacagcgccaaccacctgcccttctttttcgcgactcggaccgatg

SEQ ID NO: 13220 - DNA, 203 bp, synthetic construct
  source 1..203: mol_type = other DNA
ggcgcgccagtcctgaatcctcggtaaggagaggaggttacggggaacgacgcgctgctttcatgccctttcttgttctaccttcatcggccgaggtggacacctgcgcaggtgtgtgccctccggcccctgaagcatggccagcagcggcatggctgacagcgccaaccacctgcccttctttttcgcgactcggaccgatg

SEQ ID NO: 13221 - DNA, 203 bp, synthetic construct
  source 1..203: mol_type = other DNA
ggcgcgccagtcctggagactaggtaaggagaggaggttacggggaacgacgcgctgctttcatgccctttcttgttctaccttcatcggccgaggtggacacctgcgcaggtgtgtgccctccggcccctgaagcatggccagcagcggcatggctgacttgtatcggactaagcccttctttttcgcgactcggaccgatg

SEQ ID NO: 13222 - DNA, 203 bp, synthetic construct
  source 1..203: mol_type = other DNA
ggcgcgccagtcctagctgcggggtaaggagaggaggttacggggaacgacgcgctgctttcatgccctttcttgttctaccttcatcggccgaggtggacacctgcgcaggtgtgtgccctccggcccctgaagcatggccagcattaattgccaccctagcgccaaccacctgcccttctttttcgcgactcggaccgatg

SEQ ID NO: 13223 - DNA, 203 bp, synthetic construct
  source 1..203: mol_type = other DNA
ggcgcgccagtcctcttatgtgggtaaggagaggaggttacggggaacgacgcgctgctttcatgccctttcttgttctaccttcatcggccgaggtggacacctgcgcaggtgtgtgccctccggcccctggtttggtcgacattgcggcatggctgacagcgccaaccacctgcccttctttttcgcgactcggaccgatg

SEQ ID NO: 13224 - DNA, 203 bp, synthetic construct
  source 1..203: mol_type = other DNA
ggcgcgccagtccttaaacaatggtaaggagaggaggttacggggaacgacgcgctgctttctgctggacgtaatctctaccttcatcggccgaggtggacacctgcgcaggtgtgtgccctccggcccctgaagcatggccagcagcggcatggctgacagcgccaaccacctgcccttctttttcgcgactcggaccgatg

SEQ ID NO: 13225 - DNA, 203 bp, synthetic construct
  source 1..203: mol_type = other DNA
ggcgcgccagtccttcccgttcggtacggggcgtctgtgtgccgctttagtgcgctcgccgtcggctctacctgcgtgctttagctccttctcgcctgatccttctgtctctcccaaccccggacacccggcttcgactggttatatcttcggtgttcttttcctctcttcttctttcgcggttcagccgactcggaccgatg

SEQ ID NO: 13226 - DNA, 203 bp, synthetic construct
  source 1..203: mol_type = other DNA
ggcgcgccagtcctggagtagtggtagattttgtgctacattcactctttatggtaaatccaaacattatgataaaccaggctcccgccaaaatggtttcacagcattcgctaatactgtagaggatgctgttaacaaactggttttcttagctgttgactttattacctggcgcagacaggagttaacgactcggaccgatg

SEQ ID NO: 13227 - DNA, 203 bp, synthetic construct
  source 1..203: mol_type = other DNA
ggcgcgccagtcctcttccactggtagattttgtgctacattcactctttatggtaaatccatcggccggagacggtattttggagtaataaatggtttcacagcattcgctaatactgtagaggatgctgttaacaaactggttttcttagctgttgactttattacctggcgcagacaggagttaacgactcggaccgatg

SEQ ID NO: 13228 - DNA, 203 bp, synthetic construct
  source 1..203: mol_type = other DNA
ggcgcgccagtcctaggtattgggtagcaacagtggtgagttcgttggatggcttaagccctccagcggttaggtacgtcagtggttcgacgccttggaataaaggtctcgagatgccacgtggacgagggcatgcccaaagcacatcttaacctgagcgggggtcgcccaggtaaaagcagttttaacgactcggaccgatg

SEQ ID NO: 13229 - DNA, 203 bp, synthetic construct
  source 1..203: mol_type = other DNA
ggcgcgccagtcctgaaaccctggtagcaacagtggtgagttcgttggatggcttaagccctgagtacagggtagtcgtcagtggttcgacgccttggaataaaggtctcgagatgccacgtggacgagggcatgcccaaagcacatcttaacctgagcgggggtcgcccaggtggctaatacagccccgactcggaccgatg

SEQ ID NO: 13230 - DNA, 203 bp, synthetic construct
  source 1..203: mol_type = other DNA
ggcgcgccagtcctacggattaggtagcaacagtggtgagttcgttggcatctcgtttaagagagtacagggtagtcgtcagtggttcgacgccttggaataaaggtctcgagatgccacgtggacgagggcatgcccaaagcacatcttaacctgagcgggggtcgcccaggtaaaagcagttttaacgactcggaccgatg

SEQ ID NO: 13231 - DNA, 203 bp, synthetic construct
  source 1..203: mol_type = other DNA
ggcgcgccagtcctgtgagtacggtatcgattcgcctcgcagagttgcggccgcccgccccttcagccccggctctccgtatgcgcatgagcagaggcgcctccctctgttcctcccaaggctaaactttctaattcccttctttgggctcgggggctcccggagcagggcgagagctcgcgtcgccgcgactcggaccgatg

SEQ ID NO: 13232 - DNA, 203 bp, synthetic construct
  source 1..203: mol_type = other DNA
ggcgcgccagtcctttgaagatggtcaagtgttcggtctaatatagtctgtgtgacctgcaggcattttgtgaaaagggtaaagtatgaaagctactctcagaaaagtacttatgtattgatgagagccttaaaatgactttatattcacaaaactgctggaagacaatgatctggggtatcacattccgactcggaccgatg

SEQ ID NO: 13233 - DNA, 203 bp, synthetic construct
  source 1..203: mol_type = other DNA
ggcgcgccagtcctggcagtaaggtccttttgtgcctgggcggaactcctcggccaggtccttccccgggccctggcccttcccctggagccatgctgggccctagcccgggtccctcgccgggctccgcccacagcatgatggggcccagcccagggccgccctcagcaggacaccccatccccacccgactcggaccgatg

SEQ ID NO: 13234 - DNA, 203 bp, synthetic construct
  source 1..203: mol_type = other DNA
ggcgcgccagtcctaccggcagggtctggcatctacaaagcctcttggccgtgttctgaacttgaagcctggaggagttctctgctcagcacagccaaggaacagaattagaagaaaaggaaccctggcctgaggcaggtgacaaacattaccaccccagctgtgcacgatgcagcagatgcaaccagcgactcggaccgatg

SEQ ID NO: 13235 - DNA, 203 bp, synthetic construct
  source 1..203: mol_type = other DNA
ggcgcgccagtcctagtgggacggtctggcatctacaaagcctcttggccgtgttctgaacttgaagcctggaggagttctctgctcagcacagccaaggaacagaattagaagaaaaggaaccctggcctgaggcaggtgacaaacattaccaccccaggacacacgacccatgcagatgcaaccagcgactcggaccgatg

SEQ ID NO: 13236 - DNA, 203 bp, synthetic construct
  source 1..203: mol_type = other DNA
ggcgcgccagtccttcccacctggtctggcatctacaaagcctcttggccgtgttctgaacttgaagcctggaggagttctctgctcagcacagccaaggaacagaattagaagaaaaggaaccctggcctggcttccaactatcgcattaccaccccagctgtgcacgatgcagcagatgcaaccagcgactcggaccgatg

SEQ ID NO: 13237 - DNA, 203 bp, synthetic construct
  source 1..203: mol_type = other DNA
ggcgcgccagtccttatacgtaggtctggcatctacaaagcctcttggccgtgttctgaacttgaagcctggaggagttctctgctcagcacagccaaggaacagaattagaagaaaatccggtagtagtgcaggcaggtgacaaacattaccaccccagctgtgcacgatgcagcagatgcaaccagcgactcggaccgatg

SEQ ID NO: 13238 - DNA, 203 bp, synthetic construct
  source 1..203: mol_type = other DNA
ggcgcgccagtcctacaagaatggtctggcatctacaaagcctcttggccgtgttctgaacttgaagcctggaggagttctctgctcagcgacaaaggttcctggaattagaagaaaaggaaccctggcctgaggcaggtgacaaacattaccaccccagctgtgcacgatgcagcagatgcaaccagcgactcggaccgatg

SEQ ID NO: 13239 - DNA, 203 bp, synthetic construct
  source 1..203: mol_type = other DNA
ggcgcgccagtcctcggcgtgaggtgataattcaggccccgcgctcgcccgccccgcttccgcccgctgtcctgctgcacgaacccttccaactctcctttcctcccccacccttgagttacccctctgtctttcctgctgttgcgcgggtgctcccacagcggagcggagattacagagccgccgggcgactcggaccgatg

SEQ ID NO: 13240 - DNA, 203 bp, synthetic construct
  source 1..203: mol_type = other DNA
ggcgcgccagtcctactatgacggtgcaagtactttgtacctataaacgtgcctttttagataagttagatgttaatagtggttttgctgtttttgttaagtctaaagttggtaactatcgtttaccgtctagtaaacctagtggtatggatactgccttgttaagagcttaaactcctcactccgcacgactcggaccgatg

SEQ ID NO: 13241 - DNA, 203 bp, synthetic construct
  source 1..203: mol_type = other DNA
ggcgcgccagtccttggtacgcggtgctggtcctagggaagctcaagtcactttgtaaccgagtgattgcacatgatttcctggccttcattctgcaccggctctctctgccccgtgaccgacaggccttggtcaaaaagcatgcccagacctttttggccctctgtgctacagattatacctttgcccgactcggaccgatg

SEQ ID NO: 13242 - DNA, 203 bp, synthetic construct
  source 1..203: mol_type = other DNA
ggcgcgccagtcctaatgagaaggtgctggtcctagggaagctcaagtgggacctggctgctgtgattgcacatgaccctagaaggcagcttctgcaccggctctctctgccccgtgaccgacaggccttggtcaaaaagcatgcccagacctttttggccctctgtgctacagattatacctttgcccgactcggaccgatg

SEQ ID NO: 13243 - DNA, 203 bp, synthetic construct
  source 1..203: mol_type = other DNA
ggcgcgccagtcctgttcaattggtgctggtcctagggaagctcaagtgggacctggctgctgtgattgcacatgatttcctggccttcagcggatcaatcacgtctctgccccgtgaccgacaggccttggtcaaaaagcatgcccagacctttttggccctctgtgctacagattatacctttgcccgactcggaccgatg

SEQ ID NO: 13244 - DNA, 203 bp, synthetic construct
  source 1..203: mol_type = other DNA
ggcgcgccagtcctcacgctggggtgctggtcctagggaagctcaagtgggacctggctgctgtgattgcacatgatttcctggccttcattctgcaccggctcgggggagtggaccgccgacaggccttggtcaaaaagcatgcccagacctttttggccctctgtgctacagattatacctttgcccgactcggaccgatg

SEQ ID NO: 13245 - DNA, 203 bp, synthetic construct
  source 1..203: mol_type = other DNA
ggcgcgccagtcctgatgaatcggtgctggtcctagggaagctcaagtgggacctggctgctgtgattgcacatgatttcctggccttcattctgcaccggctctctctgccccgtgaccgacaggccttggattggcgcgcgtagcagacctttttggccctctgtgctacagattatacctttgcccgactcggaccgatg

SEQ ID NO: 13246 - DNA, 203 bp, synthetic construct
  source 1..203: mol_type = other DNA
ggcgcgccagtcctttaaggagggtgctggtcctagggaagctcaagtgggacctggctgctgtgattgcacatgatttcctggccttcattctgcaccggctctctctgccccgtgaccgacaggccttggtcaaaaagcatgccacacgggccggcttcctctgtgctacagattatacctttgcccgactcggaccgatg

SEQ ID NO: 13247 - DNA, 203 bp, synthetic construct
  source 1..203: mol_type = other DNA
ggcgcgccagtcctcgggtttgggtgctggtcctagggaagctcaagtgggacctggctgctgtgattgcacatgatttcctggccttcattctgcaccggctctctctgccccgtgaccgacaggccttggtcaaaaagcatgcccagacctttttggccctctgtgctacagattatacctttgcccgactcggaccgatg

SEQ ID NO: 13248 - DNA, 203 bp, synthetic construct
  source 1..203: mol_type = other DNA
ggcgcgccagtcctttgggactggtgctggtcctagggaagctcaagtgggacctggctgctgtgattgcacatgatttcctggccttcattctgcaccggctctctctgccccgtgaccgacaggccttggtcaaaaagcatgcccagacctttttggccctctgtgctacagcgctccgaagatatcgactcggaccgatg

SEQ ID NO: 13249 - DNA, 203 bp, synthetic construct
  source 1..203: mol_type = other DNA
ggcgcgccagtcctgggtagaaggtgctggtcctccctcgagaaggtggggacctggctgctgtgattgcacatgatttcctggccttcattctgcaccggctctctctgccccgtgaccgacaggccttggtcaaaaagcatgcccagacctttttggccctctgtgctacagattatacctttgcccgactcggaccgatg

SEQ ID NO: 13250 - DNA, 203 bp, synthetic construct
  source 1..203: mol_type = other DNA
ggcgcgccagtcctgaggttcgggtgcttagccgcgttttactgtcagctcgacttcggagaggcagcgcggttcctctgggtgcttccgcctccccttctcctgcttctccagcctcttcggcctcctcgcccgccgcgggaacccgagaccccagtgtatgccccacccctgaccccgctcgcgaccgactcggaccgatg

SEQ ID NO: 13251 - DNA, 203 bp, synthetic construct
  source 1..203: mol_type = other DNA
ggcgcgccagtcctagttaagaggtgcttagccggcgccagaccgaccctcgacttcggagaggcagcgcggttcctctgggtgcttccgaagattaagaagaggcttctccagcctcttcggcctcctcgcccgccgcgggaacccgagaccccagtgtatgccccacccctgaccccgctcgcgaccgactcggaccgatg

SEQ ID NO: 13252 - DNA, 203 bp, synthetic construct
  source 1..203: mol_type = other DNA
ggcgcgccagtcctagaccctgggtgcttagccggcgccagaccgaccctcgacttcggagaggcagcgcggttcctctgggtgcttccgcctccccttctcctcggggcagtatactttcggcctcctcgcccgccgcgggaacccgagaccccagtgtatgccccacccctgaccccgctcgcgaccgactcggaccgatg

SEQ ID NO: 13253 - DNA, 203 bp, synthetic construct
  source 1..203: mol_type = other DNA
ggcgcgccagtccttttgtataggtgcttagccggcgccagaccgaccctcgacttcggagaggcagcgcggttcctctgggtgcttccgcctccccttctcctgcttctccagcctccggtatggtgcactccgccgcgggaacccgagaccccagtgtatgccccacccctgaccccgctcgcgaccgactcggaccgatg

SEQ ID NO: 13254 - DNA, 203 bp, synthetic construct
  source 1..203: mol_type = other DNA
ggcgcgccagtcctgcaattccggtgcttagccggcgccagaccgaccctcgacttcggagaggcagcgcggttcctctgggtgcttccgcctccccttctcctgcttctccagcctcttcggcctcctcgcccgccgcgggaacccgagaccccagtgtgcatattggtaggcaccccgctcgcgaccgactcggaccgatg

SEQ ID NO: 13255 - DNA, 203 bp, synthetic construct
  source 1..203: mol_type = other DNA
ggcgcgccagtccttgaccattggtgcttagccggcgccagaccgaccctcgacttcggagaggcagcgcggttcctctgggtgcttccgcctccccttctcctgcttctccagcctcttcggcctcctcgcccgccgcgggaaccgtgtgtatgtcgtaatgccccacccctgaccccgctcgcgaccgactcggaccgatg

SEQ ID NO: 13256 - DNA, 203 bp, synthetic construct
  source 1..203: mol_type = other DNA
ggcgcgccagtcctatatccttggtgcttagccggcgccagaccgaccctcgacttcggagatctttactctactgtctgggtgcttccgcctccccttctcctgcttctccagcctcttcggcctcctcgcccgccgcgggaacccgagaccccagtgtatgccccacccctgaccccgctcgcgaccgactcggaccgatg

SEQ ID NO: 13257 - DNA, 203 bp, synthetic construct
  source 1..203: mol_type = other DNA
ggcgcgccagtcctctcgaattggtggagttctccttcccactcgcctcagatagattctgtctgacgggcagtggcgagctgtggtggcaggcggagagggcttcctcctccaagtcttggatcacctttgacctgaagaacaaggaagtgtctgtaaaacgggttacccaggaccctaagctccagcgactcggaccgatg

SEQ ID NO: 13258 - DNA, 203 bp, synthetic construct
  source 1..203: mol_type = other DNA
ggcgcgccagtcctttgcgtgtggtggagttctccttcccactcgcctttacagttgaaaagctgacgggcagtggatgatcccccatctaggcggagagggcttcctcctccaagtcttggatcacctttgacctgaagaacaaggaagtgtctgtaaaacgggttacccaggaccctaagctccagcgactcggaccgatg

SEQ ID NO: 13259 - DNA, 203 bp, synthetic construct
  source 1..203: mol_type = other DNA
ggcgcgccagtcctggatgcttggtggagttctccttcccactcgcctttacagttgaaaagctgacgggcagtggcgagctgtggtggcaggcggagagggcttcctcctccaagtcttggatcacctttgacctgaagaacaagacttgaataccttcacgggttacccaggaccctaagctccagcgactcggaccgatg

SEQ ID NO: 13260 - DNA, 203 bp, synthetic construct
  source 1..203: mol_type = other DNA
ggcgcgccagtcctatatgaacggtggagttctccttcccactcgcctttacagttgaaaagctgacgggcagtggcgagctgtggtggcaggcggagagggcttcctcctccaagtcttggatcacctttgacctgaagaacaaggaagtgtctgtaaaacgggttacccagggtagcgctagggcacgactcggaccgatg

SEQ ID NO: 13261 - DNA, 203 bp, synthetic construct
  source 1..203: mol_type = other DNA
ggcgcgccagtcctactgtcgcggtggagttctccttcccactcgcctttacagttgaaaagctgacgggcagtggcgagctgtggtggcgtaacatcccactatcctcctccaagtcttggatcacctttgacctgaagaacaaggaagtgtctgtaaaacgggttacccaggaccctaagctccagcgactcggaccgatg

SEQ ID NO: 13262 - DNA, 203 bp, synthetic construct
  source 1..203: mol_type = other DNA
ggcgcgccagtcctcgagcccgggtggcggctcggctactgctcgtggaggggaatacaggccaatatcttgttttaatgcagggttgctggggctgggcccagaagcagcagcaccagggaagaggattcgaaaaccctctctcttgtatgagggctttgagagccccacaatggcttcggtgcctgcgactcggaccgatg

SEQ ID NO: 13263 - DNA, 203 bp, synthetic construct
  source 1..203: mol_type = other DNA
ggcgcgccagtcctgccgtcctggtggcggctcggctactgctcgtggaggggaatacaggctccctggggaagggaatgcagggttgctacttggcaagaagaaagcagcagcaccagggaagaggattcgaaaaccctctctcttgtatgagggctttgagagccccacaatggcttcggtgcctgcgactcggaccgatg

SEQ ID NO: 13264 - DNA, 203 bp, synthetic construct
  source 1..203: mol_type = other DNA
ggcgcgccagtcctcaagcgatggtggcggctcggctactgctcgtggaggggaatacaggctccctggggaagggaatgcagggttgctggggctgggcccagaagcagcagcaccaactgctgctggagtaaaaccctctctcttgtatgagggctttgagagccccacaatggcttcggtgcctgcgactcggaccgatg

SEQ ID NO: 13265 - DNA, 203 bp, synthetic construct
  source 1..203: mol_type = other DNA
ggcgcgccagtcctcagtacagggtggcggctcggctactgctcgtggaggggaatacaggctccctggggaagggaatgcagggttgctggggctgggcccagaagcagcagcaccagggaagaggattcgaaaaccctctctctacctacgactggcagagagccccacaatggcttcggtgcctgcgactcggaccgatg

SEQ ID NO: 13266 - DNA, 203 bp, synthetic construct
  source 1..203: mol_type = other DNA
ggcgcgccagtccttgctcaaaggtgtacagttcggcgcccgaacagggacctgaaagcgaaagggaaaccagaggagctctctcgacgcaggactcggcttgctgaagcgcgcacggcaagaggcgaggggcggcgactggtgagtacgccaaaaattttgactagcggaggctagaaggagagagacgactcggaccgatg

SEQ ID NO: 13267 - DNA, 203 bp, synthetic construct
  source 1..203: mol_type = other DNA
ggcgcgccagtccttgaatacgggtgtatgtcgtacccgtccccttccccaccctctggcccccaccttcttggaggcgacaacccccgggaggcattagaagggatttttcccgcaggttgcgaagggaagcaaacttggtggcaacttgcctcccggtgcgggcgtctctcccccaccgtctcaaccgactcggaccgatg

SEQ ID NO: 13268 - DNA, 203 bp, synthetic construct
  source 1..203: mol_type = other DNA
ggcgcgccagtcctataaatccggtgtgcaaatcacgcctggcagcccctgcccacagtacccgaagatggcaggccttgttcccttcacctaaattcataaacgcttagacgcatctttctgatgctgatttgtttctcttttcagtaagtgtggacctttgtgtaccagagagaacatcatggtggcgactcggaccgatg

SEQ ID NO: 13269 - DNA, 203 bp, synthetic construct
  source 1..203: mol_type = other DNA
ggcgcgccagtcctcgttctacggtgtgcaaatcacgcctggcagcccctgcccacagtacccgaagatggcaggccttgttcccttcactggccgcacccgcgctgggtgtagtggcttctgatgctgatttgtttctcttttcagtaagtgtggacctttgtgtaccagagagaacatcatggtggcgactcggaccgatg

SEQ ID NO: 13270 - DNA, 203 bp, synthetic construct
  source 1..203: mol_type = other DNA
ggcgcgccagtcctacgaagaaggtgtgcaaatcacgcctggcagcccctgcccacagtacccgaagatggcaggcggacgcgaaggggtctaaattcataaacctgggtgtagtggcttctgatgctgatttgtttctcttttcagtaagtgtggacctttgtgtaccagagagaacatcatggtggcgactcggaccgatg

SEQ ID NO: 13271 - DNA, 203 bp, synthetic construct
  source 1..203: mol_type = other DNA
ggcgcgccagtcctgcgttctgggtgtgcaaatcacgcctggcagcccctgcccacagtaccgtgcacatcagccacttgttcccttcacctaaattcataaacctgggtgtagtggcttctgatgctgatttgtttctcttttcagtaagtgtggacctttgtgtaccagagagaacatcatggtggcgactcggaccgatg

SEQ ID NO: 13272 - DNA, 203 bp, synthetic construct
  source 1..203: mol_type = other DNA
ggcgcgccagtcctttcgctttggttacccatagtccatccgttgaagcaataaactcagtattaaggcttgttgtgttggacaaggtgccctatttagggtgaggagccttactggcagccccagtgaatcctccattggataggaacagctatattgggtagttgtagcagttgtattcaaatgaacgactcggaccgatg

SEQ ID NO: 13273 - DNA, 203 bp, synthetic construct
  source 1..203: mol_type = other DNA
ggcgcgccagtcctccaggctaggttacccatcattagaggaaatttccaataaactctggtcctgatacatctaggatggtcgaggtgccctatttagggtgaggagcctcggtggcagccccaccaaatcctctattggataggaacagctgtactgggcagttacagcagtcgtatggtaacacacgactcggaccgatg

SEQ ID NO: 13274 - DNA, 203 bp, synthetic construct
  source 1..203: mol_type = other DNA
ggcgcgccagtcctgctgggcgggttacccatcattagaggaaatttccaataaactctggtgtaaggcttagagtgatggtcgaggtgccctatttagggtgaggagcctcggtggcagccccaccaaatcctctattggataggaacagctgtactggattaagtgcaaccccgtatggtaacacacgactcggaccgatg

SEQ ID NO: 13275 - DNA, 203 bp, synthetic construct
  source 1..203: mol_type = other DNA
ggcgcgccagtcctacctatgaggttacccatcattagaggaaatttccaataaactctggtgtaaggcttagagtgatggtcgaggtgccctatttagggtgaggagcctcggtggcagccccaccaaatcctctattggataggcttttgcacctatcgcagttacagcagtcgtatggtaacacacgactcggaccgatg

SEQ ID NO: 13276 - DNA, 203 bp, synthetic construct
  source 1..203: mol_type = other DNA
ggcgcgccagtcctgagtaaacggttacccatcattagaggaaatttcggtccccaaagcaagtaaggcttagagtgatggtcgaggtgccctatttagggtgaggagcctcggtggcagccccaccaaatcctctattggataggaacagctgtactgggcagttacagcagtcgtatggtaacacacgactcggaccgatg

SEQ ID NO: 13277 - DNA, 203 bp, synthetic construct
  source 1..203: mol_type = other DNA
ggcgcgccagtcctgagaccggggttcgaagtaaagcgaccggcgcctttggctgaggaggaggagaaggaggaatcgcgccaggcggagcgtcaggtcccgttttcctctccggcgtctccaatacaaagattacggtgcagaaggaaattgcactcgtctcctccgcgcccccggtacccaacacacgactcggaccgatg

SEQ ID NO: 13278 - DNA, 203 bp, synthetic construct
  source 1..203: mol_type = other DNA
ggcgcgccagtcctattcgtagggttctccgcccctgccactgggccatggagactgtggcacagtagactgtagtgtgaggctcgcgggggcagtggccatggaggccgtgctgaacgagctggtgtctgtggaggacctgctgaagtttgaaaagaaatttcagtctgagaaggcagcaggctcggcgactcggaccgatg

SEQ ID NO: 13279 - DNA, 203 bp, synthetic construct
  source 1..203: mol_type = other DNA
ggcgcgccagtcctacaactctggttctccgcccctgccactgggccatggagactgtggcacagtagactgtagtgtgaggctcgcgggggcagtggccatggccttatccacccgagagctggtgtctgtggaggacctgctgaagtttgaaaagaaatttcagtctgagaaggcagcaggctcggcgactcggaccgatg

SEQ ID NO: 13280 - DNA, 203 bp, synthetic construct
  source 1..203: mol_type = other DNA
ggcgcgccagtcctgtaatggaggttctccgcccgatagctgataagttggagactgtggcacagtagactgtagtgtgaggctcgcgggggcagtggccatggaggccgtgctgaacgagctggtgtctgtggaggacctgctgaagtttgaaaagaaatttcagtctgagaaggcagcaggctcggcgactcggaccgatg

SEQ ID NO: 13281 - DNA, 203 bp, synthetic construct
  source 1..203: mol_type = other DNA
ggcgcgccagtcctaaacagtgggttgatgaaatgatatggactcaaaaagaattaaaagaagctttgtccgatgggatagtgaagtctcacaccaacatttacaattgttatttagatgcaccgttctcagtatatgtcaaggcttacttaagttagtaaaaacacatcagagtgggataagtgacacgactcggaccgatg

SEQ ID NO: 13282 - DNA, 203 bp, synthetic construct
  source 1..203: mol_type = other DNA
ggcgcgccagtccttagctctgggttgtgcatttatagtcccaaatcttttgtggtgagtatgttgctattatgttgttgttctactggttgctgtggcttctttagttgttttgcatcttctattagaggttgttgtgaatcaactaaacttccttattacgacgttgaaaagatccacatacagtacgactcggaccgatg

SEQ ID NO: 13283 - DNA, 203 bp, synthetic construct
  source 1..203: mol_type = other DNA
ggcgcgccagtcctcttggtacggttgtgcatttcagtcgtgctcatctttgtggtgagtatgttgctattatgttgttgttctactggttgctgtggcttctttagttgttttgcatcttctattagaggttgttgtgaatcaactaaacttccttattacgacgttgaaaagggtgcaccgattgtcgactcggaccgatg

SEQ ID NO: 13284 - DNA, 203 bp, synthetic construct
  source 1..203: mol_type = other DNA
ggcgcgccagtcctggaacgccggttgtgcatttcagtcgtgctcatctttgtggtgagtatgttgctattatgtttgataaggcggcactgctgtggcttctttagttgttttgcatcttctattagaggttgttgtgaatcaactaaacttccttattacgacgttgaaaagatccacatacagtacgactcggaccgatg

SEQ ID NO: 13285 - DNA, 203 bp, synthetic construct
  source 1..203: mol_type = other DNA
ggcgcgccagtccttacaggcagtaaaaaaacagctcaacgcctttttcgacaccagcggcggcttttgctgcaattttgtgaaggggaagatactgttgacgggaaacgcaaaaaaccagaaaggttaactgaaaaaccagaaagttaactggtaagtttagtctttttgtcttttatttcaggtcccgactcggaccgatg

SEQ ID NO: 13286 - DNA, 203 bp, synthetic construct
  source 1..203: mol_type = other DNA
ggcgcgccagtcctgcacaggagtaaaaaaacagctcaacgcctttttgtgtttgttttagagcttttgctgcaattttgtgaaggggaagatactgttgacggttccgcatgggtgacagaaaggttaactgaaaaaccagaaagttaactggtaagtttagtctttttgtcttttatttcaggtcccgactcggaccgatg

SEQ ID NO: 13287 - DNA, 203 bp, synthetic construct
  source 1..203: mol_type = other DNA
ggcgcgccagtcctgggtccgagtaacagcactgaaagcggtgtatcaagcatgacggccgtgggaactcctccttggtaacaaggacccacggggccaaaagccacgcccacacgggcccgtcatgtgtgcaaccccagcacggcgactttactgcgaaacccactttaaagtgacattgaaactggcgactcggaccgatg

SEQ ID NO: 13288 - DNA, 203 bp, synthetic construct
  source 1..203: mol_type = other DNA
ggcgcgccagtcctggtacctagtaacagcactgttgcttcgtagcggagcatgacggccgtatctcaaggcgtcaggtaacaaggacccacggggccaaaagccacgcccacacgggcccgtcatgtgtgcaaccccagcacggcgactttactgcgaaacccactttaaagtgacattgaaactggcgactcggaccgatg

SEQ ID NO: 13289 - DNA, 203 bp, synthetic construct
  source 1..203: mol_type = other DNA
ggcgcgccagtcctgtccgtcggtaacagcactgttgcttcgtagcggagcatgacggccgtgggaactcctccttctagctggcattttacggggccaaaagccacgcccacacgggcccgtcatgtgtgcaaccccagcacggcgactttactgcgaaacccactttaaagtgacattgaaactggcgactcggaccgatg

SEQ ID NO: 13290 - DNA, 203 bp, synthetic construct
  source 1..203: mol_type = other DNA
ggcgcgccagtcctggcgggcagtaacagcactgttgcttcgtagcggagcatgacggccgtgggaactcctccttggtaacaaggacccacggggccaaaagccacgcccacacgggcccgtcatgtgtgcaaccccagcacggcccgcccgggaaacgacccactttaaagtgacattgaaactggcgactcggaccgatg

SEQ ID NO: 13291 - DNA, 203 bp, synthetic construct
  source 1..203: mol_type = other DNA
ggcgcgccagtcctactgtgcagtaacagcactgttgcttcgtagcggagcatgacggccgtgggaactcctccttggtaacaaggacccacggggccaaaagccacgcccacacgggtatcgacatgcgagaaccccagcacggcgactttactgcgaaacccactttaaagtgacattgaaactggcgactcggaccgatg

SEQ ID NO: 13292 - DNA, 203 bp, synthetic construct
  source 1..203: mol_type = other DNA
ggcgcgccagtcctctgctgaagtaacagcactgttgcttcgtagcggcagcaacgccaaaagggaactcctccttggtaacaaggacccacggggccaaaagccacgcccacacgggcccgtcatgtgtgcaaccccagcacggcgactttactgcgaaacccactttaaagtgacattgaaactggcgactcggaccgatg

SEQ ID NO: 13293 - DNA, 203 bp, synthetic construct
  source 1..203: mol_type = other DNA
ggcgcgccagtccttcgcttcggtaacgtccaaggcaagctccccacgacccgaacacgcccagaggaaccttggggcctctggggacttggctagcaggtattcatgctagcctggaccatttttcagatttagccttcagaagaggatctgggaaagcctttggattatacttgtcgcagccggcccgactcggaccgatg

SEQ ID NO: 13294 - DNA, 203 bp, synthetic construct
  source 1..203: mol_type = other DNA
ggcgcgccagtcctggaaagtggtaacgtccaaggcaagctccccacgacccgaacacgcccagaggaaccttggggcctctggggacttggctagcaggtattgccttacagaattcccatttttcagatttagccttcagaagaggatctgggaaagcctttggattatactgaaactcattcaagcgactcggaccgatg

SEQ ID NO: 13295 - DNA, 203 bp, synthetic construct
  source 1..203: mol_type = other DNA
ggcgcgccagtcctgcctcactgtaacgtccaaggcaagctccccacgacccgaacacgcccagaggaaccttgggtaggtcccccttgcggctagcaggtattcatgctagcctggaccatttttcagatttagccttcagaagaggatctgggaaagcctttggattatactgaaactcattcaagcgactcggaccgatg

SEQ ID NO: 13296 - DNA, 203 bp, synthetic construct
  source 1..203: mol_type = other DNA
ggcgcgccagtcctccacaccagtaactgagagggtactgtgatctgcccaaagtcctaatgtgcagtcaggtgaatttattgaaaaatttgaggctcctggtggtgcaaatcaaagaactgctcctcagtggatgttgcctttacttctaggcctgtacggaagtgttacttctgctctaaaagcttcgactcggaccgatg

SEQ ID NO: 13297 - DNA, 203 bp, synthetic construct
  source 1..203: mol_type = other DNA
ggcgcgccagtcctttaaactcgtaactgagaggtgggaagctcaaagccaaagtcctaatgtgcagtcaggtgaaggatacactttccgtgaggctcctggtggtgcaaatcaaagaactgctcctcagtggatgttgcctttacttctaggcctgtacggaagtgttacttctgctctaaaagcttcgactcggaccgatg

SEQ ID NO: 13298 - DNA, 203 bp, synthetic construct
  source 1..203: mol_type = other DNA
ggcgcgccagtcctgatggtgagtaactgagaggtgggaagctcaaagccaaagtcctaatgtgcagtcaggtgaatttattgaaaaatttgaggctcctggtggtgcaaatcaaagaactgctcctcagtggatgttgcctttacggtccttgtccgtgggaagtgttacttctgctctaaaagcttcgactcggaccgatg

SEQ ID NO: 13299 - DNA, 203 bp, synthetic construct
  source 1..203: mol_type = other DNA
ggcgcgccagtcctgactaatagtaactgagaggtgggaagctcaaagccaaagtcctaatgtgcagtcaggtgaatttattgaaaaatttgaggctcctggtggtgcaaatcaaagactctggtaggccacgatgttgcctttacttctaggcctgtacggaagtgttacttctgctctaaaagcttcgactcggaccgatg

SEQ ID NO: 13300 - DNA, 203 bp, synthetic construct
  source 1..203: mol_type = other DNA
ggcgcgccagtcctaccgcacagtaccttccgtgattcagtatggaaagaataaaagaactacggaacctgatgtcgcagtctcgcactcgcgagatactgacaaaaaccacagtggaccatatggccataattaagaagtacacatcggggagacaggaaaagaacccgtcacttaggatgaaatggcgactcggaccgatg

SEQ ID NO: 13301 - DNA, 203 bp, synthetic construct
  source 1..203: mol_type = other DNA
ggcgcgccagtcctgagatggcgtagacaaagacgttctgcctaaagctgaattcccagcgctttggcttctctgagttggggttgtgtataggggtcttcgaacagttccggaaccagccagcagcctttaattcttgggcggaccacggccggttctgtgttcttggctaagatgagcagccaccacgactcggaccgatg

SEQ ID NO: 13302 - DNA, 203 bp, synthetic construct
  source 1..203: mol_type = other DNA
ggcgcgccagtcctcccggaacgtagatatagtcaatcaactggtctgacaagtcataccccaaacaatccaaatctggaatcacctgttcgctcagtagtaattatcgaatggggcgtacactaacctcgtctgtactgtctgaaagtggtcaggattgattgacagttattatttatctttaagcacgactcggaccgatg

SEQ ID NO: 13303 - DNA, 203 bp, synthetic construct
  source 1..203: mol_type = other DNA
ggcgcgccagtcctaaggcatggtagatatagtccccggtacccgtgcacaagtcataccccaaacaatccaaatctggaatcacctgttcgctcagtagtaatatcttggcaaacactacactaacctcgtctgtactgtctgaaagtggtcaggattgattgacagttattatttatctttaagcacgactcggaccgatg

SEQ ID NO: 13304 - DNA, 203 bp, synthetic construct
  source 1..203: mol_type = other DNA
ggcgcgccagtccttaggatcagtagatgcagctatgttgtaaggctttagagaaataagggagtgtcctatttaggatgaggtgctccggtggcagccccaccaaaacctctagcgactaggaacagctatatcgggttgctatagcagtcaggatgtcattctggcgttccgaaatacccaaacctcgactcggaccgatg

SEQ ID NO: 13305 - DNA, 203 bp, synthetic construct
  source 1..203: mol_type = other DNA
ggcgcgccagtcctattacggagtagcaagtgaagccctgcccccgggccctgtgcttataacctgggatgggcacccctgccagtcctgctctgccgcctgccaccgctgcccgagcccgagtggttcactgcactgtgaaaacagattccagacgccgggaactcacgcctccaatcccagacgctcgactcggaccgatg

SEQ ID NO: 13306 - DNA, 203 bp, synthetic construct
  source 1..203: mol_type = other DNA
ggcgcgccagtcctccgtctatgtaggacataccccaaatattgggttccactcgtagagaagaaaattagtggcgaaacgtacggtttaccgtgttccctcctgtgattttaattgcacctgaagcaaccctaggtcttccctttgatgtgagctaataaggagtaaccgattcttacaatgtgatccgactcggaccgatg

SEQ ID NO: 13307 - DNA, 203 bp, synthetic construct
  source 1..203: mol_type = other DNA
ggcgcgccagtcctaacactacgtaggacataccccaaatattgggttccactcgtagagaagaaaattagtggcgaaacgtacggtttatgtcaaaggagaaggtgattttaattgcacctgaagcaaccctaggtcttccctttgatgtgagctaatattcgtcgttgttcacttacaatgtgatccgactcggaccgatg

SEQ ID NO: 13308 - DNA, 203 bp, synthetic construct
  source 1..203: mol_type = other DNA
ggcgcgccagtcctcggtcatcgtaggacataccccaaatattgggttccactcgtagagaagaaaattagtggcgccggtgcgaacgagtgtcaaaggagaaggtgattttaattgcacctgaagcaaccctaggtcttccctttgatgtgagctaataaggagtaaccgattcttacaatgtgatccgactcggaccgatg

SEQ ID NO: 13309 - DNA, 203 bp, synthetic construct
  source 1..203: mol_type = other DNA
ggcgcgccagtcctcaattgtggtaggacatacctattgctaaatacgccactcgtagagaagaaaattagtggcgaaacgtacggtttatgtcaaaggagaaggtgattttaattgcacctgaagcaaccctaggtcttccctttgatgtgagctaataaggagtaaccgattcttacaatgtgatccgactcggaccgatg

SEQ ID NO: 13310 - DNA, 203 bp, synthetic construct
  source 1..203: mol_type = other DNA
ggcgcgccagtccttccttcaggtatatgcatgtatgtgtatgtgtatatatgtatgtgtgtgtatgtatatgtgtgtgtatgtgtatgtgtgtgtgtatgtgtgtgtgtatgtatgtatgtatgtatatgtcagtgggttggcgccacatattggtttttttaatcatttgagagttagttgaagatcgactcggaccgatg

SEQ ID NO: 13311 - DNA, 203 bp, synthetic construct
  source 1..203: mol_type = other DNA
ggcgcgccagtccttagggcaagtatatgcatgtatgtgtatgtgtatatatgtatgtgtgtgtatgtatatgtgtgtgtatgtgtatgtgtgtgtgtatgtgtgtgtgtatgtatgtgctaccactatatgattatacacatatacacatattggtttttttaatcatttgagagttagttgaagatcgactcggaccgatg

SEQ ID NO: 13312 - DNA, 203 bp, synthetic construct
  source 1..203: mol_type = other DNA
ggcgcgccagtcctatcacgctgtatatgcatgtatgtgtatgtgtatatatgtatgtgtgtgtatgtatatgtgttgtatccgtccacagtgtgtgtatgtgtgtgtgtatgtatgtatgtatgtatatgtattatacacatatacacatattggtttttttaatcatttgagagttagttgaagatcgactcggaccgatg

SEQ ID NO: 13313 - DNA, 203 bp, synthetic construct
  source 1..203: mol_type = other DNA
ggcgcgccagtcctttatttatgtatatgcatgtatgtgtatgtgtatgggccggcagtaaagtatgtatatgtgtgtgtatgtgtatgtgtgtgtgtatgtgtgtgtgtatgtatgtatgtatgtatatgtattatacacatatacacatattggtttttttaatcatttgagagttagttgaagatcgactcggaccgatg

SEQ ID NO: 13314 - DNA, 203 bp, synthetic construct
  source 1..203: mol_type = other DNA
ggcgcgccagtcctctaatgatgtatcctatgagcgccggcgctcgcaggccgcggatgaagaagaaaacccggcgccgctcgacccggagcgaggagttgacccggagcgaggagttgaccctgagtgaggaagcgacctggagtgaagaggcgacccagagtgaggaggcgacccagggcgaagagcgactcggaccgatg

SEQ ID NO: 13315 - DNA, 203 bp, synthetic construct
  source 1..203: mol_type = other DNA
ggcgcgccagtccttctcctgagtatgggaatcggcatgaacttactctaggatctctcgtagagggataggtgtgccattcaaatccagggagtactctggctctgacattgggacatttgatgtaaccggacctggttcagtatccgggttgtcctgtattgttacggtgtatccgtcttggcacacgactcggaccgatg

SEQ ID NO: 13316 - DNA, 203 bp, synthetic construct
  source 1..203: mol_type = other DNA
ggcgcgccagtcctgaccatgtgtatgggaatcgtgtatggggatgattaggatctctcgtagagggataggtgtgccattcaaatccagggagtactctggctctgacattgggacatttgatgtaaccggacctggttcagtatccgggttgtcctgtattgttacggtgtatccgtcttggcacacgactcggaccgatg

SEQ ID NO: 13317 - DNA, 203 bp, synthetic construct
  source 1..203: mol_type = other DNA
ggcgcgccagtccttacgaaaggtatgggaatcgtgtatggggatgattaggatctctcgtatgtttcgcctccaaccattcaaatccagggagtactctggctctgacattgggacatttgatgtaaccggacctggttcagtatccgggttgtcctgtattgttacggtgtatccgtcttggcacacgactcggaccgatg

SEQ ID NO: 13318 - DNA, 203 bp, synthetic construct
  source 1..203: mol_type = other DNA
ggcgcgccagtccttgaaaccagtcatcgtaatatagccatagtggcgagctccctgggtggtctaagtcctgagtacaggacagtcgtcagtagttcgacgtgagcagaagcccacctcgagatgctacgtggacgagggcatgccaagacacaccttaaccctagcgggggtcgctagggtgaaatcgactcggaccgatg

SEQ ID NO: 13319 - DNA, 203 bp, synthetic construct
  source 1..203: mol_type = other DNA
ggcgcgccagtccttcctggctgtccacgatgcagccccggggccccgccgcgggaccgcgagccttgtgtgagcggaggggtgcccggccccgcgggagccggcgatcctgaggctacgacctttcggaagcacctgcctccgtcaccagcgcaagcttttccaacacccctgagtacgatacacaccgactcggaccgatg

SEQ ID NO: 13320 - DNA, 203 bp, synthetic construct
  source 1..203: mol_type = other DNA
ggcgcgccagtcctaaacatacgtccacgatgcagccccggggccccgccgcgggaccgcgagccttgtgtgagcggaggggtgcccggccccgcgggagccggcgatcctgaggctacgacctttcggaaggttacaagctttaaaccagcgcaagcttttccaacacccctgctccgcccttcttgcgactcggaccgatg

SEQ ID NO: 13321 - DNA, 203 bp, synthetic construct
  source 1..203: mol_type = other DNA
ggcgcgccagtcctgcgtgtaagtccacgatgcagccccggggccccgccgcgggaccgcgagccttgtgtgagcggaggggtgcccggcgataattcttaatccgatcctgaggctacgacctttcggaagcacctgcctccgtcaccagcgcaagcttttccaacacccctgctccgcccttcttgcgactcggaccgatg

SEQ ID NO: 13322 - DNA, 203 bp, synthetic construct
  source 1..203: mol_type = other DNA
ggcgcgccagtcctgacaaaccgtccacgatgcagccccggggccccggaatttttgtaaacgccttgtgtgagcggaggggtgcccggccccgcgggagccggcgatcctgaggctacgacctttcggaagcacctgcctccgtcaccagcgcaagcttttccaacacccctgctccgcccttcttgcgactcggaccgatg

SEQ ID NO: 13323 - DNA, 203 bp, synthetic construct
  source 1..203: mol_type = other DNA
ggcgcgccagtcctctcgttgtgtccactaccttaactagctcgctgacccgttgtcccaaggcttcccagagcgaacctgtgcggctgcaggcaccggcgcgtcgagtttccggcgtccggaaggaccgagctcttctcgcggatccagtgttccgtttccagcccccaatctcagagcggagccgacgactcggaccgatg

SEQ ID NO: 13324 - DNA, 203 bp, synthetic construct
  source 1..203: mol_type = other DNA
ggcgcgccagtccttcagaagagtccactacctttttcgagagtgactcccgttgtcccaaggcttcccagagcgaacctgtgcggctgcaggcaccggcgcgtaataacataataccccggaaggaccgagctcttctcgcggatccagtgttccgtttccagcccccaatctcagagcggagccgacgactcggaccgatg

SEQ ID NO: 13325 - DNA, 203 bp, synthetic construct
  source 1..203: mol_type = other DNA
ggcgcgccagtcctgcagattcgtccactacctttttcgagagtgactcccgttgtcccaaggcttcccagagcgaacctgtgcggctgcgccttggtaattagcgagtttccggcgtccggaaggaccgagctcttctcgcggatccagtgttccgtttccagcccccaatctcagagcggagccgacgactcggaccgatg

SEQ ID NO: 13326 - DNA, 203 bp, synthetic construct
  source 1..203: mol_type = other DNA
ggcgcgccagtcctgattagatgtccgcaaagccggtggcgcccggaggctgcacggagagcggtgcccgcgtcagtgaccgaaggaagagaccaagatgaatgatcgttagtcagtcaagtttggcgtggtggtggttggtgttggccgagccggctccgtgcggatgagggacttgcggaatccaccgactcggaccgatg

SEQ ID NO: 13327 - DNA, 203 bp, synthetic construct
  source 1..203: mol_type = other DNA
ggcgcgccagtcctgacatattgtcctgaagctcgactgcccggaaaggttcatgcaccttcttgccaagcctcagtctttgggatctggggaggccgcctggttttcctccctccttctgcacgtctgctggggtctcttcctctccaggccttgccgtccccctggcctctcttcccagctcacaccgactcggaccgatg

SEQ ID NO: 13328 - DNA, 203 bp, synthetic construct
  source 1..203: mol_type = other DNA
ggcgcgccagtcctgcgttaccgtcctgaagctctcgcagtgcagtgagttcatgcaccttcccaggtctagcacttctttgggatctggggaggccgcctggttttcctccctccttctgcacgtctgctggggtctcttcctctccaggccttgccgtccccctggcctctcttcccagctcacaccgactcggaccgatg

SEQ ID NO: 13329 - DNA, 203 bp, synthetic construct
  source 1..203: mol_type = other DNA
ggcgcgccagtcctgcctggtcgtcctgaagctctcgcagtgcagtgagttcatgcaccttcttgccaagcctcagtctttgggatctggggaggccgcctggtgggtgaagtcgaggctgcacgtctgctggggtctcttcctctccaggccttgccgtccccctggcctctcttcccagctcacaccgactcggaccgatg

SEQ ID NO: 13330 - DNA, 203 bp, synthetic construct
  source 1..203: mol_type = other DNA
ggcgcgccagtcctaagtctgagtcctgaagctctcgcagtgcagtgagttcatgcaccttcttgccaagcctcagtctttgggatctggggaggccgcctggttttcctccctccttctgcacgtctgctgcctcggtgattaagccaggccttgccgtccccctggcctctcttcccagctcacaccgactcggaccgatg

SEQ ID NO: 13331 - DNA, 203 bp, synthetic construct
  source 1..203: mol_type = other DNA
ggcgcgccagtcctagtctacagtcctgaagctctcgcagtgcagtgagttcatgcaccttcttgccaagcctcagtctttgggatctggggaggccgcctggttttcctccctccttctgcacgtctgctggggtctcttcctctccaggccttgccgtccccctggcctctccctgatcggttattcgactcggaccgatg

SEQ ID NO: 13332 - DNA, 203 bp, synthetic construct
  source 1..203: mol_type = other DNA
ggcgcgccagtcctactgccctgtcctgaagctctcgcagtgcagtgagttcatgcaccttcttgccaagcctcagtctttgggatctggggaggccgcctggttttcctccctccttctgcacgtctgctggggtctcttcctctccaggccttgccgtccccctggcctctcttcccagctcacaccgactcggaccgatg

SEQ ID NO: 13333 - DNA, 203 bp, synthetic construct
  source 1..203: mol_type = other DNA
ggcgcgccagtcctatcaagaggtcctgaagctctcgcagtgcagtgagttcatgcaccttcttgccaagcctcagtctttgggatctggggaggccgcctggttttcctccctccttctgcacgtctgctggggtctcttcctctttcacataactatcccccctggcctctcttcccagctcacaccgactcggaccgatg

SEQ ID NO: 13334 - DNA, 203 bp, synthetic construct
  source 1..203: mol_type = other DNA
ggcgcgccagtcctagcagcttgtcctgaagctctcgcagtgcagtgagttcatgcaccttcttgccaagcctcagtctttgggatctggtcttataaatgttatttcctccctccttctgcacgtctgctggggtctcttcctctccaggccttgccgtccccctggcctctcttcccagctcacaccgactcggaccgatg

SEQ ID NO: 13335 - DNA, 203 bp, synthetic construct
  source 1..203: mol_type = other DNA
ggcgcgccagtcctggacccatgtcctggcagcagcctctgacctgtccaggtgccctgtccagctgactgcaaggacagagaggagtcctgcccagctcttggatcagtctgctggccgaggagcccggtgataagtccaacagtcctggagcccagcctgccccgaggaggccccggctcagagcccgactcggaccgatg

SEQ ID NO: 13336 - DNA, 203 bp, synthetic construct
  source 1..203: mol_type = other DNA
ggcgcgccagtcctgaccactcgtcctggcagcagcctctgacctgtccaggtgccctgtccagctgactgcaaggacagagaggagtcctgcccagctcttggatcagtctgctggccgaggagcccggtggagccaggggtgaccctggagcccagcctgccccgaggaggcaagacactgccaatcgactcggaccgatg

SEQ ID NO: 13337 - DNA, 203 bp, synthetic construct
  source 1..203: mol_type = other DNA
ggcgcgccagtcctgtcattctgtcctggcagcagcctctgacctgtccaggtgccctgtccagctgactgcaaggacagagaggagtcctgcccagctcttggatcagtctgctggccgaggagcccggtggagccaggggtgaccctggagcccagcctgccccgaggaggccccggctcagagcccgactcggaccgatg

SEQ ID NO: 13338 - DNA, 203 bp, synthetic construct
  source 1..203: mol_type = other DNA
ggcgcgccagtccttcttcacggtcctggcagcagcctctgacctgtctttcccgggcagttagctgactgcaaggacagagaggagtcctgcccagctcttggatcagtctgctggccgaggagcccggtggagccaggggtgaccctggagcccagcctgccccgaggaggccccggctcagagcccgactcggaccgatg

SEQ ID NO: 13339 - DNA, 203 bp, synthetic construct
  source 1..203: mol_type = other DNA
ggcgcgccagtcctttcatcgcgtcgagccgcgctcacctcgggctcccgctccgtctccacctccgcctttgccctggcggcgcgaccccgtcccgggcgcggcccccagcagtcgcgcgccgttagcctcgcgcccgccgcgcacaatcattagcatacgatgggggccgccgccggccggagccccgactcggaccgatg

SEQ ID NO: 13340 - DNA, 203 bp, synthetic construct
  source 1..203: mol_type = other DNA
ggcgcgccagtccttaacgatagtcgccgccgcagtcctcgccgcagtcgccgccgccgccgccgccgccgccgctgctcctccgcctggaagactagtctaagccgcagccatgagcgtgctcggccccggtggagcccgcagtcctctagattagtctccaccgccgtccaggacccacttgcagccgactcggaccgatg

SEQ ID NO: 13341 - DNA, 203 bp, synthetic construct
  source 1..203: mol_type = other DNA
ggcgcgccagtccttgaaccacgtcgccgccgcagtcctcgccgcagtcgccgccgccgccgccgccgccgccgctgctcctccgcctggcctgggccgtctgcccgcagccatgagcgtgctcggccccggtggagcccgcagtcctctagattagtctccaccgccgtccagccggagtaccttttcgactcggaccgatg

SEQ ID NO: 13342 - DNA, 203 bp, synthetic construct
  source 1..203: mol_type = other DNA
ggcgcgccagtcctcctggacagtcgccgccgcagtcctcgccgcagttattaatattcgtcccgccgccgccgctgctcctccgcctggcctgggccgtctgcccgcagccatgagcgtgctcggccccggtggagcccgcagtcctctagattagtctccaccgccgtccaggacccacttgcagccgactcggaccgatg

SEQ ID NO: 13343 - DNA, 203 bp, synthetic construct
  source 1..203: mol_type = other DNA
ggcgcgccagtcctagattcgtgtcggagaccgggcgcgggagcccaggccagctttggggttgtccctggacttgtcttggttccagaacctgacgacccggcgacggcgacgtctcttttgactaaaagacagtgtccagtgctccagcctaggagtctacggggaccgcctcccgcgccgccacccgactcggaccgatg

SEQ ID NO: 13344 - DNA, 203 bp, synthetic construct
  source 1..203: mol_type = other DNA
ggcgcgccagtcctcataagcggtctacgtggacatgtcctctgtaggtctttgagggagctaagctcaacgtagttctaacagttttttaattagagagcagatctctgatgaataaccaacggaaaaaggcgaaaaacacgcctttcaatatgctgaaacgcgagagaaaccgcgtgtcgactgtgcgactcggaccgatg

SEQ ID NO: 13345 - DNA, 203 bp, synthetic construct
  source 1..203: mol_type = other DNA
ggcgcgccagtccttcgatcgtgtctacgtggaccgacaaagacagattctttgagggagctaagctcaacgtagttctaacagttttttaattagagagcagatctctgatgaataaccaacggaaaaaggcgaaaaacacgcctttcaatatgctgaaacgcgagagaaaccgcgtgtcgactgtgcgactcggaccgatg

SEQ ID NO: 13346 - DNA, 203 bp, synthetic construct
  source 1..203: mol_type = other DNA
ggcgcgccagtcctcggctagggtctacgtggaccgacaaagacagattctttgagggagctaagctcaacgtagttctaacagttttttctaagcccgtttagtctctgatgaataaccaacggaaaaaggcgaaaaacacgcctttcaatatgctgaaacgcgagagaaaccgcgtgtcgactgtgcgactcggaccgatg

SEQ ID NO: 13347 - DNA, 203 bp, synthetic construct
  source 1..203: mol_type = other DNA
ggcgcgccagtcctaatctttagtctacgtggaccgacaaagacagattctttgagggagctcccgatccgtgctctctaacagttttttaattagagagcagatctctgatgaataaccaacggaaaaaggcgaaaaacacgcctttcaatatgctgaaacgcgagagaaaccgcgtgtcgactgtgcgactcggaccgatg

SEQ ID NO: 13348 - DNA, 203 bp, synthetic construct
  source 1..203: mol_type = other DNA
ggcgcgccagtcctataatatcgtctacgtggaccgacaagaacagttatacgctacttaaatgcttaacgtagttctaacagttttttattagagagcagatctctgatgaacaaccaacggaaaaagacgggtcgaccgtctttcaatatgctgaaacgcgcgagaaaccgcgtgtcaactgtttccgactcggaccgatg

SEQ ID NO: 13349 - DNA, 203 bp, synthetic construct
  source 1..203: mol_type = other DNA
ggcgcgccagtcctgggccggcgtctacgtggaccgacaagaacagttcttttaaatttaaatgcttaacgtagtgctgacagttttttattagagagcagatctctgatgaacaaccaacggaagaagacgggaaaaccgtctatcaatatgctgaaacgcgtgagaaaccgtgtgtcaactggatccgactcggaccgatg

SEQ ID NO: 13350 - DNA, 203 bp, synthetic construct
  source 1..203: mol_type = other DNA
ggcgcgccagtcctctactgcggtctacgtggaccgacaagaacagtttcgaatcggaagcttgcttaacgtagtttccgttacccgcctttagagagcagatctctgatgaacaaccaacggaaaaagacgggtcgaccgtctttcaatatgctgaaacgcgcgagaaaccgcgtgtcaactgtttccgactcggaccgatg

SEQ ID NO: 13351 - DNA, 203 bp, synthetic construct
  source 1..203: mol_type = other DNA
ggcgcgccagtccttcagtgccgtctacgtggaccgacaagaacagtttcgactcggaagcttgcttaacgtagtgctgacagttttttacattgactagccagtctgatgaacaaccaacggaagaagacgggaaaaccgtctatcaatatgctgaaacgcgtgagaaaccgtgtgtcaactggatccgactcggaccgatg

SEQ ID NO: 13352 - DNA, 203 bp, synthetic construct
  source 1..203: mol_type = other DNA
ggcgcgccagtcctatacgtctgtctacgtggaccgacaagaacagtttcgactcggaagcttgcttaacgtagtgctgacagttttttattagagagcagatctctgatgaacaaccttgttctccgtggtggaaaaccgtctatcaatatgctgaaacgcgtgagaaaccgtgtgtcaactggatccgactcggaccgatg

SEQ ID NO: 13353 - DNA, 203 bp, synthetic construct
  source 1..203: mol_type = other DNA
ggcgcgccagtccttgggcaacgtctacgtggacgtggcgatgggtaatcgaatcggaagcttgcttaacgtagttctaacagttttttattagagagcagatctctgatgaacaaccaacggaaaaagacgggtcgaccgtctttcaatatgctgaaacgcgcgagaaaccgcgtgtcaactgtttccgactcggaccgatg

SEQ ID NO: 13354 - DNA, 203 bp, synthetic construct
  source 1..203: mol_type = other DNA
ggcgcgccagtcctctccgtgcgtctagggctatgtaactttcacgcctataagttgagattttcacaacttgaacccatttacaaacatgggcaattcaaaatctaaatccaacccatccagttcctcagagtctcaaaaaggggcaccaacagtcacagaatttaggaggactgccattcacagtccgactcggaccgatg

SEQ ID NO: 13355 - DNA, 203 bp, synthetic construct
  source 1..203: mol_type = other DNA
ggcgcgccagtccttggtgtccgtctccctcctcccctaaccaccccccgaagtgggtcaaacccgcagtaataaaggcccctgaacgtgtatgttggtctcccgggagctgcttgctgaagatccgcgcccctgtcgccgtctggtaggagctgtttgcagggtcctaactcaatcggcttgttgtgcgactcggaccgatg

SEQ ID NO: 13356 - DNA, 203 bp, synthetic construct
  source 1..203: mol_type = other DNA
ggcgcgccagtcctcaccacaagtctgacgccagggagctggagcaccgtgaggaagaagcgaggttctttttaagagttcagctgcgagatatcaaacaaagaattactctgtacaaagccagaacacatatatcaaagtaatcctgaagtatcagaacaaaataataggctgtaacagaggaggaacgactcggaccgatg

SEQ ID NO: 13357 - DNA, 203 bp, synthetic construct
  source 1..203: mol_type = other DNA
ggcgcgccagtcctaatgctatgtctgtgtggaccgacaaggacagttaggggctacctcaatgcttaacacagttctaacagtttgtttgaatagagagcagatctctggaaaaatgaaccaacgaaaaaaggtggttagaccacctttcaatatgctgaaacgcgagagaaaccgcgtatcaaccccgactcggaccgatg

SEQ ID NO: 13358 - DNA, 203 bp, synthetic construct
  source 1..203: mol_type = other DNA
ggcgcgccagtcctaaatggcagtctgtgtggaccgacaaggacagttccaaatcggaagcttgcttaacacagttctaacagtttgtttcttacactgagccttctctggaaaaatgaaccaacgaaaaaaggtggttagaccacctttcaatatgctgaaacgcgagagaaaccgcgtatcaaccccgactcggaccgatg

SEQ ID NO: 13359 - DNA, 203 bp, synthetic construct
  source 1..203: mol_type = other DNA
ggcgcgccagtccttggcattcgtctgtgtggaccgacaaggacagttccaaatcggaagcttgcttaacacagttctaacagtttgtttgaatagagagcagagtgtacatcctgataaccaacgaaaaaaggtggttagaccacctttcaatatgctgaaacgcgagagaaaccgcgtatcaaccccgactcggaccgatg

SEQ ID NO: 13360 - DNA, 203 bp, synthetic construct
  source 1..203: mol_type = other DNA
ggcgcgccagtcctgagcattggtctgttctgaactacaccatttactgctgtgaagaatgccctggaggcaagctggttacagccctgaccaggccctgcccgtgactctcgaccggcgcagggtcaaaaaagtatatcttccgtgcaggaacgcgggagcgtttcttttccttttgtactgacatgcgactcggaccgatg

SEQ ID NO: 13361 - DNA, 203 bp, synthetic construct
  source 1..203: mol_type = other DNA
ggcgcgccagtcctggcacggagtctgttctgaactacaccatttactgctgtgaagaatgccctggaggcaagctggttacagccctgaccaggccctgcccgtgactctcgaccggcgcagggtcaaaaattgtctaagcagcagcaggaacgcgggagcgtttcttttcctacctgcaccgttctcgactcggaccgatg

SEQ ID NO: 13362 - DNA, 203 bp, synthetic construct
  source 1..203: mol_type = other DNA
ggcgcgccagtcctacgtcgctgtctgttctgaactacaccatttactgctgtgaagaatgccctggaggcaagctggttacagccctgaccaggccctgcccgtgactctcgaccggcgcagggtcaaaaattgtctaagcagcagcaggaacgcgggataagccagccaaactttgtactgacatgcgactcggaccgatg

SEQ ID NO: 13363 - DNA, 203 bp, synthetic construct
  source 1..203: mol_type = other DNA
ggcgcgccagtccttagttgaggtctgttctgaactacaccatttactgctgtgaagaatgccctggaggcaagctggttacagccctgataccaggagagagttgactctcgaccggcgcagggtcaaaaattgtctaagcagcagcaggaacgcgggagcgtttcttttccttttgtactgacatgcgactcggaccgatg

SEQ ID NO: 13364 - DNA, 203 bp, synthetic construct
  source 1..203: mol_type = other DNA
ggcgcgccagtccttgtaagaggtctgttctgaactacaccatttactgctgtgaagaatgcgggctgtatggctgggttacagccctgaccaggccctgcccgtgactctcgaccggcgcagggtcaaaaattgtctaagcagcagcaggaacgcgggagcgtttcttttccttttgtactgacatgcgactcggaccgatg

SEQ ID NO: 13365 - DNA, 203 bp, synthetic construct
  source 1..203: mol_type = other DNA
ggcgcgccagtcctgattgcgtgtctgttctgaactacaccatttacttactcccccctgttcctggaggcaagctggttacagccctgaccaggccctgcccgtgactctcgaccggcgcagggtcaaaaattgtctaagcagcagcaggaacgcgggagcgtttcttttccttttgtactgacatgcgactcggaccgatg

SEQ ID NO: 13366 - DNA, 203 bp, synthetic construct
  source 1..203: mol_type = other DNA
ggcgcgccagtccttaaacgcggtctgttgtgtgactctggtaactagagatccctcagaccgaccccacggagaaggaaaatctctagcagtggcgcccgaacagggacctgaaagcgaaagggaaaccagaggagctctctcgacgcaggactcggcttgctgaagcgcgcacggcaagaggcgagcgactcggaccgatg

SEQ ID NO: 13367 - DNA, 203 bp, synthetic construct
  source 1..203: mol_type = other DNA
ggcgcgccagtcctgtcctggcgtgaacttgcctctctcaacaaaaagccaccgacattaagagagagagtattgcactggcccattgctcaggccctatttagggttaccgcccaggatctgcaacagcattcctgtatcatccagggcaccggtggacttggtgaggattgagttgacctcatcatcgactcggaccgatg

SEQ ID NO: 13368 - DNA, 203 bp, synthetic construct
  source 1..203: mol_type = other DNA
ggcgcgccagtcctagctacaagtgaacttgcctctctcaacaaaaagccaccgacattaagagagagagtattgctgcttagttaactgcaggccctatttagtccccaatttgtctatctgcaacagcattcctgtatcatccagggcaccggtggacttggtgaggattgagttgacctcatcatcgactcggaccgatg

SEQ ID NO: 13369 - DNA, 203 bp, synthetic construct
  source 1..203: mol_type = other DNA
ggcgcgccagtcctgaaacatagtgaacttgcctgcggatcgtgcgtcccaccgacattaagagagagagtattgctgcttagttaactgcaggccctatttagggttaccgcccaggatctgcaacagcattcctgtatcatccagggcaccggtggacttggtgaggattgagttgacctcatcatcgactcggaccgatg

SEQ ID NO: 13370 - DNA, 203 bp, synthetic construct
  source 1..203: mol_type = other DNA
ggcgcgccagtccttaacagcagtgaagggtgagatcgggaaacaaagggtatggccccctagttcccaaagggagcagggagatgggaatagaattgaaggtacagacctcctctgatgggaggaggaatatttaggtaattgtggagactttctcctgtgtgatgaaggcggcagacactgtgatccgactcggaccgatg

SEQ ID NO: 13371 - DNA, 203 bp, synthetic construct
  source 1..203: mol_type = other DNA
ggcgcgccagtcctacaatacagtgaagggtgagatcgggaaacaaagggtatggccccctagttcccaaagggagcagggagatgggaatagaattgaaggtaggttttaggctactattagcttaagtgttttaggtaattgtggagactttctcctgtgtgatgaaggcggcagacactgtgatccgactcggaccgatg

SEQ ID NO: 13372 - DNA, 203 bp, synthetic construct
  source 1..203: mol_type = other DNA
ggcgcgccagtcctgtaagcgtgtgaagggtgagatcgggaaacaaagggtatggccccctagttcccaaagggagcagggagatgggaatagaattgaaggtaggttttaggctacttgggaggaggaatatttaggtaattgtggagactttctcctgtgtgatgaaggcgggctggtgaagttagcgactcggaccgatg

SEQ ID NO: 13373 - DNA, 203 bp, synthetic construct
  source 1..203: mol_type = other DNA
ggcgcgccagtcctgttacaatgtgaagggtgagatcgggaaacaaagtacccccagtgagcgttcccaaagggagcagggagatgggaatagaattgaaggtaggttttaggctacttgggaggaggaatatttaggtaattgtggagactttctcctgtgtgatgaaggcggcagacactgtgatccgactcggaccgatg

SEQ ID NO: 13374 - DNA, 203 bp, synthetic construct
  source 1..203: mol_type = other DNA
ggcgcgccagtcctggccacgggtgatctgattagaagtaagaaaattcctagttataatatcgacgcgttataatcatttttaagacccttagttatttagctttaccgcccaggatggggtgcagcgttcctgcaatatccagggcacctaggtgcagccttgtagttttagtggactttaggctacgactcggaccgatg

SEQ ID NO: 13375 - DNA, 203 bp, synthetic construct
  source 1..203: mol_type = other DNA
ggcgcgccagtcctgggcatcagtgatctgattagaagtaagaaaattcctagttataatatttttaatactgctacatttttaagacccttagttatttagctcccggtaagcctggggggtgcagcgttcctgcaatatccagggcacctaggtgcagccttgtagttttagtggactttaggctacgactcggaccgatg

SEQ ID NO: 13376 - DNA, 203 bp, synthetic construct
  source 1..203: mol_type = other DNA
ggcgcgccagtccttgcaccgggtgatctgattagaagtaagaaaattcctagttataatatttttaatactgctaggagcccttctttgttagttatttagctttaccgcccaggatggggtgcagcgttcctgcaatatccagggcacctaggtgcagccttgtagttttagtggactttaggctacgactcggaccgatg

SEQ ID NO: 13377 - DNA, 203 bp, synthetic construct
  source 1..203: mol_type = other DNA
ggcgcgccagtcctacttgggtgtgatctgattagaagtaagaaaatttgcctagcattaggttttaatactgctacatttttaagacccttagttatttagctttaccgcccaggatggggtgcagcgttcctgcaatatccagggcacctaggtgcagccttgtagttttagtggactttaggctacgactcggaccgatg

SEQ ID NO: 13378 - DNA, 203 bp, synthetic construct
  source 1..203: mol_type = other DNA
ggcgcgccagtcctcgacacaggtgatctgattatgttggttgcgcaacctagttataatatttttaatactgctacatttttaagacccttagttatttagctttaccgcccaggatggggtgcagcgttcctgcaatatccagggcacctaggtgcagccttgtagttttagtggactttaggctacgactcggaccgatg

SEQ ID NO: 13379 - DNA, 203 bp, synthetic construct
  source 1..203: mol_type = other DNA
ggcgcgccagtcctgcgcccaggtgatcttgcttccttatacaattttctaccaccgtacctaaggaagtagtgctatcttaataattaggttaactatttagttttactgttcaggatgcctattggcagccccataatatccaggacaccctctctgcttcttatatgattaggttgtcatttagacgactcggaccgatg

SEQ ID NO: 13380 - DNA, 203 bp, synthetic construct
  source 1..203: mol_type = other DNA
ggcgcgccagtcctcaaagcacgtgatcttgcttccttatacaattttgagaggttaataagaaggaagtagtgctatcttaataattaggttaactatttagttttactgttcaggagtttggcgatggtacccataatatccaggacaccctctctgcttcttatatgattaggttgtcatttagacgactcggaccgatg

SEQ ID NO: 13381 - DNA, 203 bp, synthetic construct
  source 1..203: mol_type = other DNA
ggcgcgccagtcctcaaagtcggtgatcttgcttccttatacaattttgagaggttaataagaaggaagtagtgctatcttaataattaggttaactatttagttttactgttcaggatgcctattggcagccccataatatccaggacaccctctctgcttcttatatgattataggaagggcatttcgactcggaccgatg

SEQ ID NO: 13382 - DNA, 203 bp, synthetic construct
  source 1..203: mol_type = other DNA
ggcgcgccagtcctcgcgtggagtgatcttgcttccttatacaattttgagaggttaataagaaggaagtagtgctatcttaataattaggttaactatttagttttactgttcaggatgcctattggcagccccataatatccagtcgtagggtgggtattcttatatgattaggttgtcatttagacgactcggaccgatg

SEQ ID NO: 13383 - DNA, 203 bp, synthetic construct
  source 1..203: mol_type = other DNA
ggcgcgccagtcctccagaaccgtgatcttgcttgcggaggcaaaatttgcacagtataaaatctgcaagtagtgctattgttggaatcaccgtacctatttaggtttacgctccaagatcggtggatagcagccctatcaatatcccttcctctgagaatatgtttagaagattaggtagtctctaacgactcggaccgatg

SEQ ID NO: 13384 - DNA, 203 bp, synthetic construct
  source 1..203: mol_type = other DNA
ggcgcgccagtcctagaaccgagtgatcttgcttgcggaggcaaaatttgcacagtataaaatctgcaagtagtgctattgttggaatcaccgtacctatttaggtttacgctccaagatcggtggatagcagccctatcaatatctaggagaactgtgctatgtttagaagattaggtagtctctaacgactcggaccgatg

SEQ ID NO: 13385 - DNA, 203 bp, synthetic construct
  source 1..203: mol_type = other DNA
ggcgcgccagtcctaggagtgtgtgatcttgcttgcggaggcaaaatttgcacagtataaaatctgcaagtagtgctattgttggaatcattccgtaacgggttgtttacgctccaagatcggtggatagcagccctatcaatatctaggagaactgtgctatgtttagaagattaggtagtctctaacgactcggaccgatg

SEQ ID NO: 13386 - DNA, 203 bp, synthetic construct
  source 1..203: mol_type = other DNA
ggcgcgccagtcctctccaaccgtgatgctgggcgagagagagccgccgcgccggagcctccttctttcctgcctctgattccgggctgtcatggcgacccccaacaatctgacccccaccaactgcagctggtggcccatctccgacgaacccgaatgggcggccaagccagcggaggcccccgacgcgactcggaccgatg

SEQ ID NO: 13387 - DNA, 203 bp, synthetic construct
  source 1..203: mol_type = other DNA
ggcgcgccagtcctgtgcgaatgtgatgctgggcgagagagagccgccgcgccggagcctccttctttcctgcctctgattccgggctgtcatggcgacccccaacaatctgacccccaccaactgcagctggtggcccatctccgcgctggagagcgatagttagtgttgcctggaggcccccgacgcgactcggaccgatg

SEQ ID NO: 13388 - DNA, 203 bp, synthetic construct
  source 1..203: mol_type = other DNA
ggcgcgccagtccttagagcgcgtgatgctgggcgagagagagccgccgcgccggagcctccttctttcctgcctctgattccgggctgtcatggcgacccccaacaatctgacccccaccaactgcagctggtggcccatctccgcgctggagagcgatgcggccaagccagcggaggcccccgacgcgactcggaccgatg

SEQ ID NO: 13389 - DNA, 203 bp, synthetic construct
  source 1..203: mol_type = other DNA
ggcgcgccagtcctggtccgtggtgatgctgggcgagagagagccgccgcgccggagcctccttctttcctgcctctgattccgggctgtcatggcgacccccaacaatctgacccccaccaactgcagctgtctaagtcgtataccgctggagagcgatgcggccaagccagcggaggcccccgacgcgactcggaccgatg

SEQ ID NO: 13390 - DNA, 203 bp, synthetic construct
  source 1..203: mol_type = other DNA
ggcgcgccagtcctagcgcgaggtgatgctgggcgagagagagccgccgcgccggagcctccttctttcctgcctctgattccgggctgtcatggcgacccccaacaatctgacccccctaggtgctgctacgtggcccatctccgcgctggagagcgatgcggccaagccagcggaggcccccgacgcgactcggaccgatg

SEQ ID NO: 13391 - DNA, 203 bp, synthetic construct
  source 1..203: mol_type = other DNA
ggcgcgccagtcctcagtatttgtgattagaacggtggctgagtccctggcggggcgcggcggtggaaggtgtcgcgtacgggcttcccgagctgacgtggcttgaattgggaggggggcagctggagcctcaggcggcagcgcttctagaaatgctgagccgattatcaggattagcaaatgttgttcgactcggaccgatg

SEQ ID NO: 13392 - DNA, 203 bp, synthetic construct
  source 1..203: mol_type = other DNA
ggcgcgccagtccttccctgtagtgcactattcaacgggagatctattttccccttcgtcgatgttggagtgtcggctctcctgctagcagccggatgctggggacaagtcaccctcaccgttacggtaacagcggcaacactccttttttgccactatgcctacatggttcccggttggcaagctgacgactcggaccgatg

SEQ ID NO: 13393 - DNA, 203 bp, synthetic construct
  source 1..203: mol_type = other DNA
ggcgcgccagtcctctttggcggtgcactattcacactcgcgcgaggcaggattacttattgtgttggagtgtcggctctcctgctagcagccggatgctggggacaagtcaccctcaccgttacggtaacagcggcaacactccttttttgccactatgcctacatggttcccggttggcaagctgacgactcggaccgatg

SEQ ID NO: 13394 - DNA, 203 bp, synthetic construct
  source 1..203: mol_type = other DNA
ggcgcgccagtcctggacaaccgtgcactattcacactcgcgcgaggcttccccttcgtcgatgttggagtgtcggctctcctgctagcagccggatgctggggtgccactcttagtcccgttacggtaacagcggcaacactccttttttgccactatgcctacatggttcccggttggcaagctgacgactcggaccgatg

SEQ ID NO: 13395 - DNA, 203 bp, synthetic construct
  source 1..203: mol_type = other DNA
ggcgcgccagtcctccgctgccgtgcactattcacactcgcgcgaggcttccccttcgtcgatgttggagtgtcggtgtcagctacgtaggccggatgctggggacaagtcaccctcaccgttacggtaacagcggcaacactccttttttgccactatgcctacatggttcccggttggcaagctgacgactcggaccgatg

SEQ ID NO: 13396 - DNA, 203 bp, synthetic construct
  source 1..203: mol_type = other DNA
ggcgcgccagtcctctatagccgtggcaagacaagctcagaactgagaagctgtcaccacagttctggaggctgggaagttcaagatcaaagtgccagcagattcagtgtcatgtgaggacgtgcttcctgcttcatagataagagtagcttggagctcgatacgttgcgactgaccatctggtcgcgcgactcggaccgatg

SEQ ID NO: 13397 - DNA, 203 bp, synthetic construct
  source 1..203: mol_type = other DNA
ggcgcgccagtcctggtgtttcgtggcaagacaagctcagaactgagaagctgtcaccacagttctggaggctgggaagttcaagatcaaagtgccagcagattcagtgtcatgtgaggacgtgcttcctgcttcatagataagagtagcttggagctcggcggcacaaccagcaccatctggtcgcgcgactcggaccgatg

SEQ ID NO: 13398 - DNA, 203 bp, synthetic construct
  source 1..203: mol_type = other DNA
ggcgcgccagtccttaagattggtggcaagacaagctcagaactgagaagctgtcaccacagttctggaggctgggaagttcaagatcaaagtgccagcagattcagtgtcatgtgaggacgtgcttcctgcttcatagataagagtagcttggagctcggcggcacaaccagctaatcgcaagtatccgactcggaccgatg

SEQ ID NO: 13399 - DNA, 203 bp, synthetic construct
  source 1..203: mol_type = other DNA
ggcgcgccagtcctaggaacgggtggcaagacaagctcagaactgagaagctgtcaccacagttctggaggctgggaagttcaagatcaagtattggatgatgccagtgtcatgtgaggacgtgcttcctgcttcatagataagagtagcttggagctcggcggcacaaccagcaccatctggtcgcgcgactcggaccgatg

SEQ ID NO: 13400 - DNA, 203 bp, synthetic construct
  source 1..203: mol_type = other DNA
ggcgcgccagtcctgggagccagtggcaagacaagctcagaactgagaagctgtcaccacagttctggaggctgggctcacttccgaactagtgccagcagattcagtgtcatgtgaggacgtgcttcctgcttcatagataagagtagcttggagctcggcggcacaaccagcaccatctggtcgcgcgactcggaccgatg

SEQ ID NO: 13401 - DNA, 203 bp, synthetic construct
  source 1..203: mol_type = other DNA
ggcgcgccagtcctagtttggcgtggcaagacaagctcagaactgagatctacgtgtggagtttctggaggctgggaagttcaagatcaaagtgccagcagattcagtgtcatgtgaggacgtgcttcctgcttcatagataagagtagcttggagctcggcggcacaaccagcaccatctggtcgcgcgactcggaccgatg

SEQ ID NO: 13402 - DNA, 203 bp, synthetic construct
  source 1..203: mol_type = other DNA
ggcgcgccagtcctcactgtgagtggcagggacaaccacaaccacaacggccgggggaggagaaggcggcagcggcgattctaggcggcccaggcggcggggaggaggagaaggaggagggtggcggccgggcttggcttcggctctcgataacaacttgggcggcgcgacccggggaaccggcattgcgactcggaccgatg

SEQ ID NO: 13403 - DNA, 203 bp, synthetic construct
  source 1..203: mol_type = other DNA
ggcgcgccagtcctgcggatctgtggcagggacaaccacaaccacaacggccgggggaggaggccatacgccatttgattctaggcggcccaggcggcggggaggaggagaaggaggagggtggcggccgggcttggcttcggctccttgaggagttggcggcggcgcgacccggggaaccggcattgcgactcggaccgatg

SEQ ID NO: 13404 - DNA, 203 bp, synthetic construct
  source 1..203: mol_type = other DNA
ggcgcgccagtcctattgtcttgtggcagggacaggtgagcagtttttggccgggggaggagaaggcggcagcggcgattctaggcggcccaggcggcggggaggaggagaaggaggagggtggcggccgggcttggcttcggctccttgaggagttggcggcggcgcgacccggggaaccggcattgcgactcggaccgatg

SEQ ID NO: 13405 - DNA, 203 bp, synthetic construct
  source 1..203: mol_type = other DNA
ggcgcgccagtcctctcccaaagtggctgggctgctcgggttagatcgtcaggtgagggaggccacccatcaagaagcgaaggaagtgctggagtcgtgtgttttggctgcgcgtgatcctgcgtgggtcgggaggtgtttctgtgaaaagcctaaagattagactgtaagaaaagaaaatagaagcccgactcggaccgatg

SEQ ID NO: 13406 - DNA, 203 bp, synthetic construct
  source 1..203: mol_type = other DNA
ggcgcgccagtcctctctccacgtgggcatgggagtcagctgcacagtcactcgggaagatggaaccaatcgcagaggacttctattactaaccgatcacatgatgtcacccagacatcaggcatacccactagtgtgaaatagacatcagaattaagaaaaacgtagggtccaagtggtttcccgttcgactcggaccgatg

SEQ ID NO: 13407 - DNA, 203 bp, synthetic construct
  source 1..203: mol_type = other DNA
ggcgcgccagtcctttgtagtagtgggcatgggagtcagctgcacagtcactcgggaagatggaaccaatcgcagatagggctgccagtgaaccgatcacatgagtaatgagtttaggcaggcatacccactagtgtgaaatagacatcagaattaagaaaaacgtagggtccaagtggtttcccgttcgactcggaccgatg

SEQ ID NO: 13408 - DNA, 203 bp, synthetic construct
  source 1..203: mol_type = other DNA
ggcgcgccagtcctgcccgcttgtggtggtggtggaaggggggaggtgctagcagggccagccttgaactcgctggacagagctacagacctatggggcctggaagtgcccgctgagaaagggagaagacagagttttttaatgtcaggtgaggggttgcctccgaggcaacctccaagtcccagatccgactcggaccgatg

SEQ ID NO: 13409 - DNA, 203 bp, synthetic construct
  source 1..203: mol_type = other DNA
ggcgcgccagtcctggaggcaggtggtggtggtggaaggggggaggtgctagcagggccagccttgaactcgctggacagagctacagacctatggggcctggaagtgcccgctgagaaagggagaagacagcagaggggttgccgaggtgaggggttgcctccgaggcaaccttggtagggagacgacgactcggaccgatg

SEQ ID NO: 13410 - DNA, 203 bp, synthetic construct
  source 1..203: mol_type = other DNA
ggcgcgccagtcctcggcctccgtggtggtggtggaaggggggaggtgctagcagggccagccttgaactcgctggcacttaggtacagtctatggggcctggaagtgcccgctgagaaagggagaagacagcagaggggttgccgaggtgaggggttgcctccgaggcaacctccaagtcccagatccgactcggaccgatg

SEQ ID NO: 13411 - DNA, 203 bp, synthetic construct
  source 1..203: mol_type = other DNA
ggcgcgccagtcctcttccctggtgtaaatccaggctcgaaccctactgcgaggtggagagcctcttaaccggatgctacgggtgatgactgggaggaggagaaaaattacctctttatcttgcatgaacatcttaattttcaggaccagaggagcgagagcagcaagaaccacacccagcagcaatgcgactcggaccgatg

SEQ ID NO: 13412 - DNA, 203 bp, synthetic construct
  source 1..203: mol_type = other DNA
ggcgcgccagtcctctttaagcgtgtaaatccagttagaccaaaatgacgcgttcccctctgctcttaaccggatgctacgggtgatgactgggaggaggagaaaaattacctctttatcttgcatgaacatcttaattttcaggaccagaggagcgagagcagcaagaaccacacccagcagcaatgcgactcggaccgatg

SEQ ID NO: 13413 - DNA, 203 bp, synthetic construct
  source 1..203: mol_type = other DNA
ggcgcgccagtcctaggcgtacgtgtaaatccagttagaccaaaatgagcgaggtggagagcctcttaaccggatgctacgggtgatgacaatccatcctgcgcaaattacctctttatcttgcatgaacatcttaattttcaggaccagaggagcgagagcagcaagaaccacacccagcagcaatgcgactcggaccgatg

SEQ ID NO: 13414 - DNA, 203 bp, synthetic construct
  source 1..203: mol_type = other DNA
ggcgcgccagtcctccgggcccgtgtaaatccagttagaccaaaatgagcgaggtggagagcctcttaaccggatgctacgggtgatgactgggaggaggagaaaaattacctctttatcttgcatgaacatcttaattttcaggaccagaggagcgagaatctagtagcttgaacccagcagcaatgcgactcggaccgatg

SEQ ID NO: 13415 - DNA, 203 bp, synthetic construct
  source 1..203: mol_type = other DNA
ggcgcgccagtccttatcataggtgtgagagggaagcgccgcggcctgcgcagacgaggggtcccttcgcctggttcgtggcgccttgtgaccccgggcccctgccgcctgcaagtcggaaattgcgctgtgctcctgtgctacggcctgtggctggactgcctgctgctgcccaactggctggcaagcgactcggaccgatg

SEQ ID NO: 13416 - DNA, 203 bp, synthetic construct
  source 1..203: mol_type = other DNA
ggcgcgccagtcctgacgtgccgtgtgagagggaagcgccgcggcctgtatttctagacctgcccttcgcctggttcgtggcgccttgtgaccccgggcccctgaacaggcattaaacgaaattgcgctgtgctcctgtgctacggcctgtggctggactgcctgctgctgcccaactggctggcaagcgactcggaccgatg

SEQ ID NO: 13417 - DNA, 203 bp, synthetic construct
  source 1..203: mol_type = other DNA
ggcgcgccagtcctatgacctagtgtgagagggaagcgccgcggcctgtatttctagacctgcccttcgcctggttcgtggcgccttgtgaccccgggcccctgccgcctgcaagtcggaaattgcgctgtgctcctgtgctacggcctgtggctggactgcctgctgctgccccgtcaatgccttgccgactcggaccgatg

SEQ ID NO: 13418 - DNA, 203 bp, synthetic construct
  source 1..203: mol_type = other DNA
ggcgcgccagtcctgtctgagtgtgtgagagggaagcgccgcggcctgtatttctagacctgcccttcgcctggttcgtggcgccttgtgaccccgggcccctgccgcctgcaagtcggaaattgcgctgtgctcctgtgctacggcctgtggctggactgcctgctgctgcccgctaaaaacattttcgactcggaccgatg

SEQ ID NO: 13419 - DNA, 203 bp, synthetic construct
  source 1..203: mol_type = other DNA
ggcgcgccagtcctatctaacagtgtgagagggaagcgccgcggcctgtatttctagacctgcccttcgcctggttcgtggcgccttgtgaccccgggcccctgccgcctgcaagtcggaaattgcgctgtgtcgtatctggttaccctgtggctggactgcctgctgctgcccaactggctggcaagcgactcggaccgatg

SEQ ID NO: 13420 - DNA, 203 bp, synthetic construct
  source 1..203: mol_type = other DNA
ggcgcgccagtcctgtctgcccgtgtgagagggaagcgccgcggcctgtatttctagacctgcccttcgcctggttcgtggcgccttgtgtttattacggggatccgcctgcaagtcggaaattgcgctgtgctcctgtgctacggcctgtggctggactgcctgctgctgcccaactggctggcaagcgactcggaccgatg

SEQ ID NO: 13421 - DNA, 203 bp, synthetic construct
  source 1..203: mol_type = other DNA
ggcgcgccagtcctaactcctagtgtgagagggaagcgccgcggcctgtatttctagacctgcccttcgcctggttgtcacgagaaaagaaccccgggcccctgccgcctgcaagtcggaaattgcgctgtgctcctgtgctacggcctgtggctggactgcctgctgctgcccaactggctggcaagcgactcggaccgatg

SEQ ID NO: 13422 - DNA, 203 bp, synthetic construct
  source 1..203: mol_type = other DNA
ggcgcgccagtcctgcacacacgtgtgagagggatatagacgaattcttatttctagacctgcccttcgcctggttcgtggcgccttgtgaccccgggcccctgccgcctgcaagtcggaaattgcgctgtgctcctgtgctacggcctgtggctggactgcctgctgctgcccaactggctggcaagcgactcggaccgatg

SEQ ID NO: 13423 - DNA, 203 bp, synthetic construct
  source 1..203: mol_type = other DNA
ggcgcgccagtcctccaacggcgtgtgatcttgcgcgataaatgctgacgtgaaaacgttgcgtattgctacaacacttggttagctatttagctttactaatcaagacgccgtcgtgcagcccacaaaagtctagatacgtcacaggagagcatacgctaggtcgcgttgactgctgaatgtgtcatcgactcggaccgatg

SEQ ID NO: 13424 - DNA, 203 bp, synthetic construct
  source 1..203: mol_type = other DNA
ggcgcgccagtccttaaatggtgttaagtttcgcactactaggaatttttgcgaaaattcttaattccattcttatggtgtagtgtttgttcttttcaattggggcgtatctctctttcgcagagaccctggcccaaccctgaaatgaataaaattttactggtcgcgcgtctcaatcgaccttctagcgactcggaccgatg

SEQ ID NO: 13425 - DNA, 203 bp, synthetic construct
  source 1..203: mol_type = other DNA
ggcgcgccagtcctgggaaatcgttaagtttcgcactactaggaatttttgcgaaaattcttaattccattcttatggtgtagtgtttgttcttttcaattggggcgtatctctctttcgcagagaccctggcccaaccctgaaattcgagcggcgagggaaaaattcatcgaaaatcgaccttctagcgactcggaccgatg

SEQ ID NO: 13426 - DNA, 203 bp, synthetic construct
  source 1..203: mol_type = other DNA
ggcgcgccagtcctcacgtcaggttaccctccttagtttagctgtgagctcccttctccggtagctcctacccctgcctgtgcgggcctcgtccccgcgcccagccctcggtgctgcctccgacagcgccgcgctctctcagccgcccccctgcccctcgggcccccctctctgctgcccctggcgcccgactcggaccgatg

SEQ ID NO: 13427 - DNA, 203 bp, synthetic construct
  source 1..203: mol_type = other DNA
ggcgcgccagtcctggcccttagttaccctccttccggacagcaccccctcccttctccggtagctcctacccctgcctgtgcgggcctcccaaagatttaagaccctcggtgctgcctccgacagcgccgcgctctctcagccgcccccctgcccctcgggcccccctctctgctgcccctggcgcccgactcggaccgatg

SEQ ID NO: 13428 - DNA, 203 bp, synthetic construct
  source 1..203: mol_type = other DNA
ggcgcgccagtcctgctaagtagttaccctccttccggacagcaccccctcccttctccggtagctcctacccctgcctgtgcgggcctcgtccccgcgcccagattgtaccttacaatccgacagcgccgcgctctctcagccgcccccctgcccctcgggcccccctctctgctgcccctggcgcccgactcggaccgatg

SEQ ID NO: 13429 - DNA, 203 bp, synthetic construct
  source 1..203: mol_type = other DNA
ggcgcgccagtcctcggtcgaggttaccctccttccggacagcaccccctcccttctccggtagctcctacccctgcctgtgcgggcctcgtccccgcgcccagccctcggtgctgcccttactctgcgatagctctctcagccgcccccctgcccctcgggcccccctctctgctgcccctggcgcccgactcggaccgatg

SEQ ID NO: 13430 - DNA, 203 bp, synthetic construct
  source 1..203: mol_type = other DNA
ggcgcgccagtcctagtcatctgttaccctccttccggacagcaccccctcccttctccggtagctcctacccctgcctgtgcgggcctcgtccccgcgcccagccctcggtgctgcctccgacagcgccgcatggagcggattctccccctgcccctcgggcccccctctctgctgcccctggcgcccgactcggaccgatg

SEQ ID NO: 13431 - DNA, 203 bp, synthetic construct
  source 1..203: mol_type = other DNA
ggcgcgccagtcctaaccagatgttaccctccttccggacagcaccccctcccttctccggtagctcctacccctgcctgtgcgggcctcgtccccgcgcccagccctcggtgctgcctccgacagcgccgcgctctctcagccgcccccctgcccctcgctaagtagaaatgcctgcccctggcgcccgactcggaccgatg

SEQ ID NO: 13432 - DNA, 203 bp, synthetic construct
  source 1..203: mol_type = other DNA
ggcgcgccagtcctgttgcctcgttaccctccttccggacagcaccccctcccttctccggtagctcctacccctgcctgtgcgggcctcgtccccgcgcccagccctcggtgctgcctccgacagcgccgcgctctctcagccgcttagtctgatacgcggcccccctctctgctgcccctggcgcccgactcggaccgatg

SEQ ID NO: 13433 - DNA, 203 bp, synthetic construct
  source 1..203: mol_type = other DNA
ggcgcgccagtcctcggattcagttaccctccttccggacagcaccccctcccttctccggtagctcctacccctgttaacagcttgaaggtccccgcgcccagccctcggtgctgcctccgacagcgccgcgctctctcagccgcccccctgcccctcgggcccccctctctgctgcccctggcgcccgactcggaccgatg

SEQ ID NO: 13434 - DNA, 203 bp, synthetic construct
  source 1..203: mol_type = other DNA
ggcgcgccagtccttctctagtgttaccctccttccggacagcaccccctcccttctccggtcatctactttgggtcctgtgcgggcctcgtccccgcgcccagccctcggtgctgcctccgacagcgccgcgctctctcagccgcccccctgcccctcgggcccccctctctgctgcccctggcgcccgactcggaccgatg

SEQ ID NO: 13435 - DNA, 203 bp, synthetic construct
  source 1..203: mol_type = other DNA
ggcgcgccagtcctgttctagggttaccctccttccggacagcaccccgggttccggtgaacagctcctacccctgcctgtgcgggcctcgtccccgcgcccagccctcggtgctgcctccgacagcgccgcgctctctcagccgcccccctgcccctcgggcccccctctctgctgcccctggcgcccgactcggaccgatg

SEQ ID NO: 13436 - DNA, 203 bp, synthetic construct
  source 1..203: mol_type = other DNA
ggcgcgccagtcctcacagttcgttccatgccccgcaaaggtggctctgcagcataatttaggcattggaggagctgtggttgtaacactctacaagatgggttttccggaagccgccagttcttttagaactcatcaaattgaagctgttccaaccagctctgcaagtgatggatttaaggcaaatccgactcggaccgatg

SEQ ID NO: 13437 - DNA, 203 bp, synthetic construct
  source 1..203: mol_type = other DNA
ggcgcgccagtcctggatcaaggttccccaacttcctcggcgctccggactcccaagtctccgccggaccctcctttggatattcctcgtgtctccgattctgacgttttttaccggtacggtggggcctccccacctgccccgcagaagatgcagttctttggccgcctggtcaataccttcagtggcgactcggaccgatg

SEQ ID NO: 13438 - DNA, 203 bp, synthetic construct
  source 1..203: mol_type = other DNA
ggcgcgccagtcctgtgttcgtgttccccaacttcctcggcgctccggactcccaagtctccgccggaccctcctttggatattcctcgtgtctccgattctgagacagagggggaagacggtggggcctccccacctgccccgcagaagatgcagttctttggccgcctggtcgtagatacactatacgactcggaccgatg

SEQ ID NO: 13439 - DNA, 203 bp, synthetic construct
  source 1..203: mol_type = other DNA
ggcgcgccagtcctgggcgcgtgttccccaacttcctcggcgctccggactcccaagtctccgccggaccctcctttggatattcctcgtgtctccgattctgagacagagggggaagacggtggggcctccgggaggatgagcacgaagatgcagttctttggccgcctggtcaataccttcagtggcgactcggaccgatg

SEQ ID NO: 13440 - DNA, 203 bp, synthetic construct
  source 1..203: mol_type = other DNA
ggcgcgccagtccttgggacaggttccccaacttttaaacaaggtgacactcccaagtctccgccggaccctcctttggatattcctcgtgtctccgattctgagacagagggggaagacggtggggcctccccacctgccccgcagaagatgcagttctttggccgcctggtcaataccttcagtggcgactcggaccgatg

SEQ ID NO: 13441 - DNA, 203 bp, synthetic construct
  source 1..203: mol_type = other DNA
ggcgcgccagtccttaacgcccgttcttaaacggcgtgacgcggtgcctggcgccgagcctcccaagatggcggtgtgcatcgcggtgattgccaaggagaattaccccctctacattcgcagcacccctacggagaacgagctgaagttccactacatggtgcacacatctctggacgtggtggatgcgactcggaccgatg

SEQ ID NO: 13442 - DNA, 203 bp, synthetic construct
  source 1..203: mol_type = other DNA
ggcgcgccagtcctgaggtcatgttgaagcattacaggccaggtctctgcctcggaagaagagctgaggtttgccatccagaacaagcacctctgccaccggatgtcctctgcgctggaatcagtcactgtcagcgacagacccctcggggtgtccatcacaaaagccgaggtagcccctgaagaagacgactcggaccgatg

SEQ ID NO: 13443 - DNA, 203 bp, synthetic construct
  source 1..203: mol_type = other DNA
ggcgcgccagtcctaattacgggttgattttttatttactttgcaaaacgcgtccgccattcgagcatctagtttcaacttccttttgcagcaagttctttcctgcactaatcacaattcttggaagaggagaactggacgttgtgaacagagttagctggtaaatgtcctcttaaaagatccaaaaacgactcggaccgatg

SEQ ID NO: 13444 - DNA, 203 bp, synthetic construct
  source 1..203: mol_type = other DNA
ggcgcgccagtcctattagcgggttgattttttatttactttgcaaaagtttctgataggcgtctttatatagggaaacttccttttgcagcaagttctttcctgcactaatcacaattcttggaagaggagaactggacgttgtgaacagagttagctggtaaatgtcctcttaaaagatccaaaaacgactcggaccgatg

SEQ ID NO: 13445 - DNA, 203 bp, synthetic construct
  source 1..203: mol_type = other DNA
ggcgcgccagtcctttgctaacgttgcaagcctaatgctcacctgcagagacagaattcctgagtgaacgaacagagcagctcctcttccatctccagaaatgacctccaccttcaacccccgagaatgtaagaaacagctcgtctaagggcaaaactatggcttcttcctgcgaattgagaaggacacgactcggaccgatg

SEQ ID NO: 13446 - DNA, 203 bp, synthetic construct
  source 1..203: mol_type = other DNA
ggcgcgccagtcctgcgcactagtttcccctggactcgttcataacctgattggcatgctacaggctgttgctgacggcaaggctcatttcactgagtcagtgaagccagtgctcgacctgacaaattcaatgggtgtggttcattaatgaataacatgtcttctgctgcgcccatgggttcgcgacccgactcggaccgatg

SEQ ID NO: 13447 - DNA, 203 bp, synthetic construct
  source 1..203: mol_type = other DNA
ggcgcgccagtccttacctgcggtttcccctggactcgttcataacctgattggcatgctacaggctgttgctgacggcaaggctcatttcactgagtcagtgaagccagtgctcgactaacagctgatttgcctgtgtcgggtggaatgaataacatgtcttctgctgcgcccatgggttcgcgacccgactcggaccgatg

SEQ ID NO: 13448 - DNA, 203 bp, synthetic construct
  source 1..203: mol_type = other DNA
ggcgcgccagtcctgatacttggtttcccctggactcgttcataacctgattggcatgctacaggctgttgctgacggcaaggctcattttcaaccagatcattagccagtgctcgacctgacaaattcaatcctgtgtcgggtggaatgaataacatgtcttctgctgcgcccatgggttcgcgacccgactcggaccgatg

SEQ ID NO: 13449 - DNA, 203 bp, synthetic construct
  source 1..203: mol_type = other DNA
ggcgcgccagtcctgtttctgggtttggtgcgtcgcgcttcaatcaccgcgagtttacgcgggccagttgttgctggtcgcatgggagctgctgctaaataatttctgctcagccatgtcgccggctccagatgcagccccggctcctgcgtcgatctccctgtttgacctcagcgcggatgctccggcgactcggaccgatg

SEQ ID NO: 13450 - DNA, 203 bp, synthetic construct
  source 1..203: mol_type = other DNA
ggcgcgccagtcctcctctccggtttggtgcgtcttctaagggcgtgggcgagtttacgcgggccagttgttgctggtcgcatgggagctatctagttcctggatctgctcagccatgtcgccggctccagatgcagccccggctcctgcgtcgatctccctgtttgacctcagcgcggatgctccggcgactcggaccgatg

SEQ ID NO: 13451 - DNA, 203 bp, synthetic construct
  source 1..203: mol_type = other DNA
ggcgcgccagtcctattagaaagtttggtgcgtcttctaagggcgtgggcgagtttacgcgggccagttgttgctggtcgcatgggagctgctgctaaataatttctgctcagccatgtcgccggctccagatgcagccccggctcctgcgtcgatctccctgtttgacctcaggatcatcctcgtctcgactcggaccgatg

SEQ ID NO: 13452 - DNA, 203 bp, synthetic construct
  source 1..203: mol_type = other DNA
ggcgcgccagtccttacttcttgtttggtgcgtcttctaagggcgtggtgagtgagcaattcgccagttgttgctggtcgcatgggagctgctgctaaataatttctgctcagccatgtcgccggctccagatgcagccccggctcctgcgtcgatctccctgtttgacctcagcgcggatgctccggcgactcggaccgatg

SEQ ID NO: 13453 - DNA, 203 bp, synthetic construct
  source 1..203: mol_type = other DNA
ggcgcgccagtccttctgcattgttttgaaactgacttccagagctccactgcctccctgcaccatgccctacaacttctgcctgcccagcctgagctgccgcaccagctgcgttagatggccctgtgtgccccccagctgccacggctacaccctgcccggggcctgcaacatccctgccaatgtgacgactcggaccgatg

SEQ ID NO: 13454 - DNA, 203 bp, synthetic construct
  source 1..203: mol_type = other DNA
ggcgcgccagtccttggcgccggttttgaaactgacttccagagctccactgcctccctgcaccatgccctacaacttctgcctgcccagcctgagctgccgcaccagctgctcctccatcgtgcaaacctaccccagctgccacggctacaccctgcccggggcctgcaacatccctgccaatgtgacgactcggaccgatg

SEQ ID NO: 13455 - DNA, 203 bp, synthetic construct
  source 1..203: mol_type = other DNA
ggcgcgccagtcctaatccgaggttttgaaactgacttccagagctccactgcctccctgcaccatgccctacaacttctgcctgcccagcctgagctgccgcaccagctgctcctcccggccctgtgtgccccccagctgccacggcactcttttgcccggggcctgcaacatccctgccaatgtgacgactcggaccgatg

SEQ ID NO: 13456 - DNA, 203 bp, synthetic construct
  source 1..203: mol_type = other DNA
ggcgcgccagtcctgtacgtaagttttgaaactgacttccagagctccactgcctccctgcaccatgccctacaacttctgcctgcccagcctgagctgccgcaccagctgctcctcccggccctgtgtgccccccagctgccacggctacaccctgcccggggcctgcaacataggaagtttctgtccgactcggaccgatg

SEQ ID NO: 13457 - DNA, 203 bp, synthetic construct
  source 1..203: mol_type = other DNA
ggcgcgccagtcctgttcatacgttttgaaactgacttccagagctccactgcctccctgcaccatgccctacaacttctgcctgcccagcctgagctgccgcaccagctgctcctcccggccctgtgtgccccccagctgccacggctacaccctgcccggggcctgcaacatccctgccaatgtgacgactcggaccgatg

SEQ ID NO: 13458 - DNA, 203 bp, synthetic construct
  source 1..203: mol_type = other DNA
ggcgcgccagtcctcagagagtgttttgaaactgacttccagagctccactgcctccctgcaccatgccctacaacttctgcctgcccagcctgagctgccgcagtctactgatacagcggccctgtgtgccccccagctgccacggctacaccctgcccggggcctgcaacatccctgccaatgtgacgactcggaccgatg

SEQ ID NO: 13459 - DNA, 203 bp, synthetic construct
  source 1..203: mol_type = other DNA
ggcgcgccagtcctggacgttcgttttgaaactgacttccagagctcctgccggagttacatccatgccctacaacttctgcctgcccagcctgagctgccgcaccagctgctcctcccggccctgtgtgccccccagctgccacggctacaccctgcccggggcctgcaacatccctgccaatgtgacgactcggaccgatg

SEQ ID NO: 13460 - DNA, 203 bp, synthetic construct
  source 1..203: mol_type = other DNA
ggcgcgccagtcctcaagacttgttttgaaactggtccatgattagtaactgcctccctgcaccatgccctacaacttctgcctgcccagcctgagctgccgcaccagctgctcctcccggccctgtgtgccccccagctgccacggctacaccctgcccggggcctgcaacatccctgccaatgtgacgactcggaccgatg

SEQ ID NO: 13461 - DNA, 203 bp, synthetic construct
  source 1..203: mol_type = other DNA
ggcgcgccagtccttcgtatgttaaaagctgtccgcgcgggagcccagcaagttcgcttcactgtccctggacttgtcttggttccagaacctgacgacccggcgacggcgacgtctcttttgactaaaagacagtgtccagtgctccagcctaggagtctacggggaccgcctcccgcgccgccacccgactcggaccgatg

SEQ ID NO: 13462 - DNA, 203 bp, synthetic construct
  source 1..203: mol_type = other DNA
ggcgcgccagtcctgacccaactaaaagctgtccgcgcgggagcccaggccagctttggggttgtccctggacttgtcttggttccagaacctgacgacccggcgacggcgacgtctcttttgactaaaagacagtgtccagtgctccagcctaggagtctacggggaccgcctcccgcgccgccacccgactcggaccgatg

SEQ ID NO: 13463 - DNA, 203 bp, synthetic construct
  source 1..203: mol_type = other DNA
ggcgcgccagtcctgaagaaggtaaacaggctctcgcgatcactaccaggccgtggcaggctggctgggtaccggctgtcgctgacccaggagaagctgcctgtctacatcagcctgggctgcagcgcgctgccgccgcggggccggcagagcagaactcctctagggaacctggatgggaaacagcccgactcggaccgatg

SEQ ID NO: 13464 - DNA, 203 bp, synthetic construct
  source 1..203: mol_type = other DNA
ggcgcgccagtcctgtcgggagtaaacaggctctgtatccgtggcagcggccgtggcaggctggctgggtaccggctgtcgctgacccaggagaagctgcctgtctacatcagcctgggctgcagcgcgctgccgccgcggggccggcagagcagaactcctctagggaacctggatgggaaacagcccgactcggaccgatg

SEQ ID NO: 13465 - DNA, 203 bp, synthetic construct
  source 1..203: mol_type = other DNA
ggcgcgccagtcctggagatcgtaaacaggctctgtatccgtggcagcggccgtggcaggctggctgggtaccggctgtcgctgacccaggagaagctgcctgtctacatcagcctgggctgcagcgcgctgtgagtatatacgtcgcagagcagaactcctctagggaacctggatgggaaacagcccgactcggaccgatg

SEQ ID NO: 13466 - DNA, 203 bp, synthetic construct
  source 1..203: mol_type = other DNA
ggcgcgccagtcctcgaaaggataaacaggctctgtatccgtggcagcggccgtggcaggctggctgggtgggttaatgcgctgacccaggagaagctgcctgtctacatcagcctgggctgcagcgcgctgccgccgcggggccggcagagcagaactcctctagggaacctggatgggaaacagcccgactcggaccgatg

SEQ ID NO: 13467 - DNA, 203 bp, synthetic construct
  source 1..203: mol_type = other DNA
ggcgcgccagtccttgtccggttaaacaggctctgtatccgtggcagctttgtgccagctaaggctgggtaccggctgtcgctgacccaggagaagctgcctgtctacatcagcctgggctgcagcgcgctgccgccgcggggccggcagagcagaactcctctagggaacctggatgggaaacagcccgactcggaccgatg

SEQ ID NO: 13468 - DNA, 203 bp, synthetic construct
  source 1..203: mol_type = other DNA
ggcgcgccagtcctagaggtcctaaacaggctctgtatccgtggccctaagacgggcaggctggctgggtaccggctgtcgctgacccaggagaagctgcctgtctacatcagcctgggctgcagcgcgctgccgccgcggggccggcagagcagaactcctctagggaacctggatgggaaacagcccgactcggaccgatg

SEQ ID NO: 13469 - DNA, 203 bp, synthetic construct
  source 1..203: mol_type = other DNA
ggcgcgccagtccttacccggataaacaggctctgtatccgtggccctaagacgggcaggctggctgggtgggttaatgcgctgacccaggagaagctgcctgtctacatcagcctgggctgcagcgcgctgccgccgcggggccggcagagcagaactcctctagggaacctggatgggaaacagcccgactcggaccgatg

SEQ ID NO: 13470 - DNA, 203 bp, synthetic construct
  source 1..203: mol_type = other DNA
ggcgcgccagtcctggcgcatttaaactgtgccgtgtggtgagagagttcgtcgtcctcggcttctcatccctggccaggctgcagcagctgctctttgttatcttcctgctcctctacctgttcactctgggcaccaatgcaatcatcatttccaccattgtgctggacagagcccttcatactccccgactcggaccgatg

SEQ ID NO: 13471 - DNA, 203 bp, synthetic construct
  source 1..203: mol_type = other DNA
ggcgcgccagtcctttgcacggtaaagaacaggaaaaagagaaaaaatcagtgatctgtgtcgagggcaatattgcaagtgggaagacgacatgcctggaattcttctccaacgcgacagacgtcgaggtgttaacggagcctgtgtccaagtggagaaatgtccgtggccacagattcagttaaaaccgactcggaccgatg

SEQ ID NO: 13472 - DNA, 203 bp, synthetic construct
  source 1..203: mol_type = other DNA
ggcgcgccagtcctcatgatcctaaagaacaggaaaaagagaaaaaatcagtgatctgtgtcgagggcaatattgcaagtgggaagacgagcatttcccttacattctccaacgcgacagacgtcgaggtgttaacggagcctgtgtccaagtggagaaatgtccgtggccacaatcctctgggcctgcgactcggaccgatg

SEQ ID NO: 13473 - DNA, 203 bp, synthetic construct
  source 1..203: mol_type = other DNA
ggcgcgccagtcctgtcaccagtaaagaacaggatttcccccgttgcacagtgatctgtgtcgagggcaatattgcaagtgggaagacgacatgcctggaattcttctccaacgcgacagacgtcgaggtgttaacggagcctgtgtccaagtggagaaatgtccgtggccacaatcctctgggcctgcgactcggaccgatg

SEQ ID NO: 13474 - DNA, 203 bp, synthetic construct
  source 1..203: mol_type = other DNA
ggcgcgccagtcctataccggctaaagatgaggtttttgctaaatttttttgagtttatatttgtatgtcttatgctgaaaaatcttgtttcctaattagtaacgggcgatgaaggacgatgggtaaatattttagggccgattctttggttttatagccaagataccctgttgataaagtcttgtggcgactcggaccgatg

SEQ ID NO: 13475 - DNA, 203 bp, synthetic construct
  source 1..203: mol_type = other DNA
ggcgcgccagtcctaagcctcgtaaatattactttcctcaaaaagagaaaacaaaaatgctagattttactttatgacttgaatgatgtggtaatgtcgaactctagtatttagaattagaatgtttcttagcggtcgtgtagttatttttatgtcataacctaggcgcagaccagctcctataacaacgactcggaccgatg

SEQ ID NO: 13476 - DNA, 203 bp, synthetic construct
  source 1..203: mol_type = other DNA
ggcgcgccagtcctgtaagacataaatcccacgagggtcctttcttggattaacccgctcaatgcccggaaatttgggcgtgcccccgcaagactgctagccgagtagtgttgggtcgcgaaaggccttgcggtactgcctgatagggtgcttgcgagtgccccgggaggtctcgtagaccgtgcacccgactcggaccgatg

SEQ ID NO: 13477 - DNA, 203 bp, synthetic construct
  source 1..203: mol_type = other DNA
ggcgcgccagtcctacacgacctaaatcccggccgatatggactcaaaaagaattaaaagaagctttgtccgatgggatagtgaagtctcacaccaacatttacaattgttatttagaaaacatagaaattatatatgtcaaggcttacttaagttagtaaaaacacatcagagtgggataagtgacacgactcggaccgatg

SEQ ID NO: 13478 - DNA, 203 bp, synthetic construct
  source 1..203: mol_type = other DNA
ggcgcgccagtcctaacgattttaaattcccgcttaagttggctggtactgccgtaataaatttaagagcagaccatgcagccatgtatctttattcccttcttgaaaagggtaaactacttattagagatacaaataaagaagttttcgttggtgacagtttggttaatgtaatctaaactttaaaacgactcggaccgatg

SEQ ID NO: 13479 - DNA, 203 bp, synthetic construct
  source 1..203: mol_type = other DNA
ggcgcgccagtcctaccatcaataaccttacactgtaaggggggggtgaagaaggggccggccttcaagcaagagcgacgcaagatggcagccaccacgggctcgggagtaaaagtccctcgcaatttccgactgttggaagaactcgaagaaggccagaaaggagtaggagatggcacagttagctgcgactcggaccgatg

SEQ ID NO: 13480 - DNA, 203 bp, synthetic construct
  source 1..203: mol_type = other DNA
ggcgcgccagtccttgaggtggtaagacacttgctgtcctaacacctgctataggctatccactgcatcatctctcctgccatacttcctactcacatcatatctattttaaagaaaaaataggcccgaacactaatcgtgccggcagtgccactgcacacacaacactacacagcaccggactgtgccgactcggaccgatg

SEQ ID NO: 13481 - DNA, 203 bp, synthetic construct
  source 1..203: mol_type = other DNA
ggcgcgccagtcctcttccacttaagacacttgctgtcctaacacctgctataggctatccactgcatcatctctcctgccatacttcctactcacatcatatctattttaaagaaaaaataggcccgaacactaatcgtgccggctaacttctgtgcatcacaacactacacatacaatacactacacgactcggaccgatg

SEQ ID NO: 13482 - DNA, 203 bp, synthetic construct
  source 1..203: mol_type = other DNA
ggcgcgccagtcctgaaacccttaagacacttgctgtcctaacacctgctataggctatccactgcatcatctctcggcggtggtcatagactcacatcatatctattttaaagaaaaaataggcccgaacactaatcgtgccggcagtgccactgcacacacaacactacacatacaatacactacacgactcggaccgatg

SEQ ID NO: 13483 - DNA, 203 bp, synthetic construct
  source 1..203: mol_type = other DNA
ggcgcgccagtcctctctctcgtaagacacttgctgtcctaacacctggcgattttaccattctgcatcatctctcctgccatacttcctactcacatcatatctattttaaagaaaaaataggcccgaacactaatcgtgccggcagtgccactgcacacacaacactacacatacaatacactacacgactcggaccgatg

SEQ ID NO: 13484 - DNA, 203 bp, synthetic construct
  source 1..203: mol_type = other DNA
ggcgcgccagtcctaagtgctctaagatcgacaccggcgactgcggcgggctcgacgaggcggctgacggggcggcggcgggaagacggccgggtgcgccttggggtttagtggcggcttctccatgggtccagccagccgcttccctgtgctgtgagtgtttccaccactccaggagacagcattcacgactcggaccgatg

SEQ ID NO: 13485 - DNA, 203 bp, synthetic construct
  source 1..203: mol_type = other DNA
ggcgcgccagtcctacggattataagcctgagaaaggttacggggaacgacgcgctgctttcatgccctttcttgttctaccttcatcggccgaggtggacacctgcgcaggtgtgtgccctccggcccctgaagcatggccagcagcggcatggctgacagcgccaaccacctgcccttctttttcgcgactcggaccgatg

SEQ ID NO: 13486 - DNA, 203 bp, synthetic construct
  source 1..203: mol_type = other DNA
ggcgcgccagtcctagatcacctaaggataatggggcaggattcagccgcaggctcctccggaagaccaggggcagacggggcggtggcggggtcgtgcccagtgggaggggtcgggtctgcccaatgggttctcccgggcggggggcggggctctatttcagcagctctcagggccttgggctcatccgactcggaccgatg

SEQ ID NO: 13487 - DNA, 203 bp, synthetic construct
  source 1..203: mol_type = other DNA
ggcgcgccagtcctcgatgcgctaaggccaatacacgggagctggttgtgagtcaccaaggaaggcagcggcagctccactcagccagtacccagatacgctgggaaccttccccagcacccaagatttactggcagatcctcttctggagcataattagcatcatcattattctggctggagcaattcgactcggaccgatg

SEQ ID NO: 13488 - DNA, 203 bp, synthetic construct
  source 1..203: mol_type = other DNA
ggcgcgccagtccttcccaccttaaggccaatacacgggagctggttgtgagtcaccaaggaaggcagcggcagctccactcagccagtacccagatacgctgggaaccttccccagccatggcttccctggggcagatcctcttccctgtgggctggttcatcatcattattctggctggagcaattcgactcggaccgatg

SEQ ID NO: 13489 - DNA, 203 bp, synthetic construct
  source 1..203: mol_type = other DNA
ggcgcgccagtcctgactagggtaaggccaatacacgggagctggttgtgagtcaccaaggaaggcagcggcagctccactcagccagtacccagatacgctgggaaccttccccagccatggcttccctggtcgcagggaggacttggagcataattagcatcatcattattctggctggagcaattcgactcggaccgatg

SEQ ID NO: 13490 - DNA, 203 bp, synthetic construct
  source 1..203: mol_type = other DNA
ggcgcgccagtcctggctcctgtaaggccaatacacgggagctggttgtgagtcaccaaggaaggcagcggcagctccactcagccagtataacctccactgacgaaccttccccagccatggcttccctggggcagatcctcttctggagcataattagcatcatcattattctggctggagcaattcgactcggaccgatg

SEQ ID NO: 13491 - DNA, 203 bp, synthetic construct
  source 1..203: mol_type = other DNA
ggcgcgccagtcctcgtcgtcgtaaggccaatactgattgtgaaaagctgagtcaccaaggaaggcagcggcagctccactcagccagtacccagatacgctgggaaccttccccagccatggcttccctggggcagatcctcttctggagcataattagcatcatcattattctggctggagcaattcgactcggaccgatg

SEQ ID NO: 13492 - DNA, 203 bp, synthetic construct
  source 1..203: mol_type = other DNA
ggcgcgccagtcctagtatctgtaagggggcggggcagtctctacacagctcagcatcctgacgcctcctccccttgcaggggcgtgaagctacttcagactctgctgtgacgacttggccgccaggcaccgatcctccccggtgagaaggtccacgaatcttactgcagacagatttgctcagcgcgcgactcggaccgatg

SEQ ID NO: 13493 - DNA, 203 bp, synthetic construct
  source 1..203: mol_type = other DNA
ggcgcgccagtcctactatgactaaggtgatccacccgtcggtcccccgggagccctggaggcgcagccccaccccggccggcgcggctcgctcccacgcccccgccgcggcctcgctggagcggacggactgagtcagagggggcgccagcgctgcaggagctgacatggacccaaatcctcgggcccgactcggaccgatg

SEQ ID NO: 13494 - DNA, 203 bp, synthetic construct
  source 1..203: mol_type = other DNA
ggcgcgccagtcctatccgcgttaatagctttcaacagagcggggaaagtgcgcatgcgctgactgagtcctcccatggcttcacagaagcagatggaggtagtgaccaaaggaactgggttccggcgccgccccaagaccatcacttacaccccggggacctgcgagctgctcagaggaggagatgccgactcggaccgatg

SEQ ID NO: 13495 - DNA, 203 bp, synthetic construct
  source 1..203: mol_type = other DNA
ggcgcgccagtcctcatcccactaatcctgttgcgtttgtgcctactcaacagctttgaaagagcacttcccaacgctgctagtagtctttgttttcttcagtgctgtactgtgagattgcccggtacagcagcagttgtattctttattagcttggtagatcattttctctcgctcttttttttaatcgactcggaccgatg

SEQ ID NO: 13496 - DNA, 203 bp, synthetic construct
  source 1..203: mol_type = other DNA
ggcgcgccagtcctgggtttgctaatttttgggtactctgcgtcctcgcctcaccagatggagaggagaaaacctatggtggctgtgaaggacctgatgccatgtatgtcaaattgatatcatctgatggccatgaatttattgtaaaaagagaacatgcattaacatcaggcacgataaaagccatgcgactcggaccgatg

SEQ ID NO: 13497 - DNA, 203 bp, synthetic construct
  source 1..203: mol_type = other DNA
ggcgcgccagtcctatatcctttacacacctgtgatagctatccaagcgttttcttgacaggataagcgatactagtggttttgctgtttatgttaagtccaaagtcggtaattaccgactgccatcaacccaaaagggttctggcatggacaccgcattgttgagaaataatatctaaattttaaggcgactcggaccgatg

SEQ ID NO: 13498 - DNA, 203 bp, synthetic construct
  source 1..203: mol_type = other DNA
ggcgcgccagtcctcgtgacgatacacacctgtgcacatataagcgtggttttcttgacaggataagcgatactagtggttttgctgtttatgttaagtccaaatagacagtacgggaactgccatcaacccaaaagggttctggcatggacaccgcattgttgagaaataatatctaaattttaaggcgactcggaccgatg

SEQ ID NO: 13499 - DNA, 203 bp, synthetic construct
  source 1..203: mol_type = other DNA
ggcgcgccagtcctctgtttgatacacacctgtgcacatataagcgtggttttcttgacaggataagcgatactagtggttttgctgtttggtggtcactagctgtcggtaattaccgactgccatcaacccaaaagggttctggcatggacaccgcattgttgagaaataatatctaaattttaaggcgactcggaccgatg

SEQ ID NO: 13500 - DNA, 203 bp, synthetic construct
  source 1..203: mol_type = other DNA
ggcgcgccagtcctatgttgtttacagcacagatcaggtgaggagcacaccaaggagtgattacctggggcgctgttgttttctctttcccaacaagattatcatttcctttaaaaaaaatagttatcctggggcatacagccataccattctgaaggtgtcttatctcctctgatctagagagcacccgactcggaccgatg

SEQ ID NO: 13501 - DNA, 203 bp, synthetic construct
  source 1..203: mol_type = other DNA
ggcgcgccagtcctgccgtccttacagcacagatcaggtgaggagcacaccaaggagtgatttttaaaacttactctgttttctctttccatttctccagggggtttcctttaaaaaaaatagttatcctggggcatacagccataccattctgaaggtgtcttatctcctctgatctagagagcacccgactcggaccgatg

SEQ ID NO: 13502 - DNA, 203 bp, synthetic construct
  source 1..203: mol_type = other DNA
ggcgcgccagtcctcaagcgattacagcacagatcaggtgaggagcacaccaaggagtgatttttaaaacttactctgttttctctttcccaacaagattatcaggctaaaagtctttaatagttatcctggggcatacagccataccattctgaaggtgtcttatctcctctgatctagagagcacccgactcggaccgatg

SEQ ID NO: 13503 - DNA, 203 bp, synthetic construct
  source 1..203: mol_type = other DNA
ggcgcgccagtccttccacgtgtacagcacagatcaggtgaggagcacaccaaggagtgatttttaaaacttactctgttttctctttcccaacaagattatcatttcctttaaaaaaaatagttatcctggggcatacagccataccattctgaaggtgtcttatctcctctgtgtgtccccagtgtcgactcggaccgatg

SEQ ID NO: 13504 - DNA, 203 bp, synthetic construct
  source 1..203: mol_type = other DNA
ggcgcgccagtcctcccttcgttacagcacagatcaggtgaggagcactaagtaagaatccatttaaaacttactctgttttctctttcccaacaagattatcatttcctttaaaaaaaatagttatcctggggcatacagccataccattctgaaggtgtcttatctcctctgatctagagagcacccgactcggaccgatg

SEQ ID NO: 13505 - DNA, 203 bp, synthetic construct
  source 1..203: mol_type = other DNA
ggcgcgccagtcctgcctaagctacagccaacatgaaggggggaggtgctagcagggccagccttgaactcgctggacagagctacagacctatggggcctggaagtgcccgctgagaaagggagaagacagcagaggggttgccgaggtgaggggttgcctccgaggcaacctccaagtcccagatccgactcggaccgatg

SEQ ID NO: 13506 - DNA, 203 bp, synthetic construct
  source 1..203: mol_type = other DNA
ggcgcgccagtccttgaatacgtaccaattgctattgtaaaaagtgttaaaacatcgcaaccgtttgtttcataacaaaagccttaggcatctcctatggcaggaagaagcggagacagcgacgaagagctcatcagaacagtcagactcatcaagcttctctatcaaagcagtaagtagtacatgtacgactcggaccgatg

SEQ ID NO: 13507 - DNA, 203 bp, synthetic construct
  source 1..203: mol_type = other DNA
ggcgcgccagtcctaaccgtaataccaattgctattgtaaaaagtgttgctttcattgccaagtttgtttcataacaaaagccttaggcatctcctatggcaggaagaagcggagacagcgacgaagagctcatcagaacagtcagactcatcaagcttctctatcaaagcagtggtcgtggggcccccgactcggaccgatg

SEQ ID NO: 13508 - DNA, 203 bp, synthetic construct
  source 1..203: mol_type = other DNA
ggcgcgccagtcctgtcgatcctacctttaaagcggggcccggagccttccctccactgccctcgaacgcctcacttcctaagtctctgcatttctcagtcagtggacagcttttgggactcttgtgtgaggactttgggggaccaggccaggctgggcctctgctgattgagatcttgggatccagacgactcggaccgatg

SEQ ID NO: 13509 - DNA, 203 bp, synthetic construct
  source 1..203: mol_type = other DNA
ggcgcgccagtcctggcccgcttacgcattaggtcccttcggtgagcatccctcggccttgttctgaatgcacacatgtctaggggctaaggatgtcctacaggtacccgcacgtaaccttcagagagtgcggatctgagtaggagaccgtggtgcactgctttacagatgcagcccggtttaaaaagcgactcggaccgatg

SEQ ID NO: 13510 - DNA, 203 bp, synthetic construct
  source 1..203: mol_type = other DNA
ggcgcgccagtcctccagtatgtacgcattaggtggtaagccgagctctccctcggccttgttctgaatgcacacaaactgttctaaatgggatgtcctacaggtacccgcacgtaaccttcagagagtgcggatctgagtaggagaccgtggtgcactgctttacagatgcagcccggtttaaaaagcgactcggaccgatg

SEQ ID NO: 13511 - DNA, 203 bp, synthetic construct
  source 1..203: mol_type = other DNA
ggcgcgccagtcctgagtaccttacgcattaggtggtaagccgagctctccctcggccttgttctgaatgcacacatgtctaggggctaactcccaagccggcctacccgcacgtaaccttcagagagtgcggatctgagtaggagaccgtggtgcactgctttacagatgcagcccggtttaaaaagcgactcggaccgatg

SEQ ID NO: 13512 - DNA, 203 bp, synthetic construct
  source 1..203: mol_type = other DNA
ggcgcgccagtccttccaaggctacgcattaggtggtaagccgagctctccctcggccttgttctgaatgcacacatgtctaggggctaaggatgtcctacaggtacccgcacgtaaccttcagagagtgcgatcggcgaccttgcaccgtggtgcactgctttacagatgcagcccggtttaaaaagcgactcggaccgatg

SEQ ID NO: 13513 - DNA, 203 bp, synthetic construct
  source 1..203: mol_type = other DNA
ggcgcgccagtcctttcgcttttacgcattaggtggtaagccgagctctccctcggccttgttctgaatgcacacatgtctaggggctaaggatgtcctacaggtacccgcacgtaaccttcagagagtgcggatctgagtaggagaccgtggtgcactgctttacagatgcagcccggtttaaaaagcgactcggaccgatg

SEQ ID NO: 13514 - DNA, 203 bp, synthetic construct
  source 1..203: mol_type = other DNA
ggcgcgccagtcctccaggctatacgcattaggtggtaagccgagctctccctcggccttgttctgaatgcacacatgtctaggggctaaggatgtcctacaggtacccgcacgtaaccttcagagagtgcggatctgagtaggagttgccctcatgaaactttacagatgcagcccggtttaaaaagcgactcggaccgatg

SEQ ID NO: 13515 - DNA, 203 bp, synthetic construct
  source 1..203: mol_type = other DNA
ggcgcgccagtcctagcttccctactgatccaaaatggaagactttgtgcgacagtgcttcaatccaatgattgtcgagcttgcggaaaagacaatgaaggaatatggggaagacccgaaaattgaaacaaataagttcgctgcaatatgcacacacttagaagtctgcttcatgtattcagacttcccgactcggaccgatg

SEQ ID NO: 13516 - DNA, 203 bp, synthetic construct
  source 1..203: mol_type = other DNA
ggcgcgccagtcctgtagcaaatactttccggtagcggtgccagggcagtggcctaatacggaactccatttcccgcatgcagggcgattggccgctgaactcagaagcgggaggccggttccggttgcatcagcgagggattcacggcgaaatgagactgttcgtgagtgatggcgtcccgggttgccgactcggaccgatg

SEQ ID NO: 13517 - DNA, 203 bp, synthetic construct
  source 1..203: mol_type = other DNA
ggcgcgccagtcctccgcgagctactttccggtagcggtgccagggcagtggcctaatacggggggtgcaacgattgcgtgcctcgcggaggccgctgaactcagaagcgggaggccggttccggttgcatcagcgagggattcacggcgaaatgagactgttcgtgagtgatggcgtcccgggttgccgactcggaccgatg

SEQ ID NO: 13518 - DNA, 203 bp, synthetic construct
  source 1..203: mol_type = other DNA
ggcgcgccagtccttagtgaattactttccggtagcggtgccagggcataatttagcactaaaactccatttcccggcgtgcctcgcggaggccgctgaactcagaagcgggaggccggttccggttgcatcagcgagggattcacggcgaaatgagactgttcgtgagtgatggcgtcccgggttgccgactcggaccgatg

SEQ ID NO: 13519 - DNA, 203 bp, synthetic construct
  source 1..203: mol_type = other DNA
ggcgcgccagtcctgtagaggctagaaaccagccaggccaatgtgggaaaaaggatagcccaaaggacaagaaaacacttctcactatgaattggtttggaagtaacttcttcaggtgtcctgaggatctttccttactcaacataggggagactctgttgtcacacatgtcatctgaagatgaacatcgactcggaccgatg

SEQ ID NO: 13520 - DNA, 203 bp, synthetic construct
  source 1..203: mol_type = other DNA
ggcgcgccagtcctcgcaagtttagaaaccagcttattgccaaagggaaaaaggatagcccaaaggacaagaaaacacttctcactatgaattggtttggaagtaacttcttcaggtgcggaagcttatgcgccttactcaacatatactcacctctgttgtcacacatgtcatctgaagatgaacatcgactcggaccgatg

SEQ ID NO: 13521 - DNA, 203 bp, synthetic construct
  source 1..203: mol_type = other DNA
ggcgcgccagtcctagtgcaaatagaaaccagcttattgccaaagggagtctccgagctatcaaggacaagaaaacacttctcactatgaattggtttggaagtaacttcttcaggtgtcctgaggatctttccttactcaacatatactcacctctgttgtcacacatgtcatctgaagatgaacatcgactcggaccgatg

SEQ ID NO: 13522 - DNA, 203 bp, synthetic construct
  source 1..203: mol_type = other DNA
ggcgcgccagtccttaacacgttagaacatacgggagacgaagactgagctgttttggctgcatttctggcctcgagccgcagtcagcttctccccgtagaacccggcagtaggagacttagaatcgaatctcttctccctcccgcctcctgtttttggctttttgagaaaccttatcatccaacacacgactcggaccgatg

SEQ ID NO: 13523 - DNA, 203 bp, synthetic construct
  source 1..203: mol_type = other DNA
ggcgcgccagtcctccgcaggttagactctggtaacaactcttgaaacacagatttcccacaagtctcctcttcgtcatcaagcaaccaccgcatccagcatcaagcccacctgaaattgtctccggcttccctctggccgaacgatatcggtagttaattaaaacttagggtgcaagatcatccacacgactcggaccgatg

SEQ ID NO: 13524 - DNA, 203 bp, synthetic construct
  source 1..203: mol_type = other DNA
ggcgcgccagtcctggaacgcctagagctgtaatgccagctggttgtggaccagccgtgacctggggcaacccagccaacctcaccgtccaatgggctgcagccacctctctccagtgaggtctgagacccagccttaacgaggctacccccttccaggtccggccgtagcacctccgcgccgtcgcccgactcggaccgatg

SEQ ID NO: 13525 - DNA, 203 bp, synthetic construct
  source 1..203: mol_type = other DNA
ggcgcgccagtccttagatttctagattaaacataatcatgcaaaatcactattttgtactactaactcattaagaaaaacttaggatccaagagatttactctaggatctcctattacagagtatgagacatagttgagagttcaacttgcaaaactctaaccttcactctaataacaattcatccacgactcggaccgatg

SEQ ID NO: 13526 - DNA, 203 bp, synthetic construct
  source 1..203: mol_type = other DNA
ggcgcgccagtcctatagcgtatagattaaacataatcatgcaaaatcactattttgtactactaactcattaagaaaaacttaggatccaagagatttactcttcacggaatacgatagcttagcagtcattagttgagagttcaacttgcaaaactctaaccttcactctaataacaattcatccacgactcggaccgatg

SEQ ID NO: 13527 - DNA, 203 bp, synthetic construct
  source 1..203: mol_type = other DNA
ggcgcgccagtcctgtcgcagctagattaaacataatcatgcaaaatcgggcaagacctaagctaactcattaagaaaaacttaggatccaagagatttactctaggatctcctattaagcttagcagtcattagttgagagttcaacttgcaaaactctaaccttcactctaataacaattcatccacgactcggaccgatg

SEQ ID NO: 13528 - DNA, 203 bp, synthetic construct
  source 1..203: mol_type = other DNA
ggcgcgccagtcctctacgatttagattcgcgaatcgggccgtggctcgtcggggtctgtgtcttttggctccgagggcagtcgctgggcttccgagaggggttcgggctgcgtaggggcgctttgttttgttcggttttgtttttttgagagtgcgagagaggcggtcgtgcagacccgggagaaagcgactcggaccgatg

SEQ ID NO: 13529 - DNA, 203 bp, synthetic construct
  source 1..203: mol_type = other DNA
ggcgcgccagtcctgggtccgatagattctatcttccacatcgctgtccccacccagccagggcagcgccagcactagctcagacgcaaggacggaaccgctggactccaggttccttgcctgggagtaggagaaatccacctgctgggggctgagtgtggcctgagggacaggccctgggtcccgggcgactcggaccgatg

SEQ ID NO: 13530 - DNA, 203 bp, synthetic construct
  source 1..203: mol_type = other DNA
ggcgcgccagtcctgcttaacatagccacgaggacgagaagaagggagccggaggagctggtcgctgtcggctaagcaagattggagctactcgtcgtccacctccagctcgcgtaagggtggctgtgcgactgcggccatttgtgtcacagcgtatcctagcaagtgatcccccctgtgtgcggggccgactcggaccgatg

SEQ ID NO: 13531 - DNA, 203 bp, synthetic construct
  source 1..203: mol_type = other DNA
ggcgcgccagtcctctcgtgactagccacgaggacgagaagaagggagccggaggagctggtcgctgtcggctaagcaagattggagctatcttggtcggtatcccagctcgcgtaagggtggctgtgcgactgcggccatttgtggatggaacagcgggagcaagtgatcccccctgtgtgcggggccgactcggaccgatg

SEQ ID NO: 13532 - DNA, 203 bp, synthetic construct
  source 1..203: mol_type = other DNA
ggcgcgccagtcctgtaactgctagccacgaggacgagaagaagggaggttccccttgcaaccgctgtcggctaagcaagattggagctactcgtcgtccacctccagctcgcgtaagggtggctgtgcgactgcggccatttgtggatggaacagcgggagcaagtgatcccccctgtgtgcggggccgactcggaccgatg

SEQ ID NO: 13533 - DNA, 203 bp, synthetic construct
  source 1..203: mol_type = other DNA
ggcgcgccagtccttatataggtagccacgaggagcgatcaggccttaccggaggagctggtcgctgtcggctaagcaagattggagctactcgtcgtccacctccagctcgcgtaagggtggctgtgcgactgcggccatttgtggatggaacagcgggagcaagtgatcccccctgtgtgcggggccgactcggaccgatg

SEQ ID NO: 13534 - DNA, 203 bp, synthetic construct
  source 1..203: mol_type = other DNA
ggcgcgccagtcctccgtaagatagcctccccctggcgtgcccccgcaagactgctagccgagtagtgttgggtcgcgaaaggccttgtggtactgcctgatagggtgcttgcgagtgccccgggaggtctcgtagaccgtgcaccatgagcacgaatcctaaacctcaaagaaaaaccaaacgtaaccgactcggaccgatg

SEQ ID NO: 13535 - DNA, 203 bp, synthetic construct
  source 1..203: mol_type = other DNA
ggcgcgccagtcctggttgacctagcgcaggagaaggctatctcggtccccagagaagcctgcgataggtgagtttctagatccagagaacctgacgacccggcgacggcgacgtctcttttgactaaaagacagtgtccagtgctccagcctaggagtctacggggaccgcctcccgcgccgccacccgactcggaccgatg

SEQ ID NO: 13536 - DNA, 203 bp, synthetic construct
  source 1..203: mol_type = other DNA
ggcgcgccagtcctcaactgactagcgcaggagaaggctatctcggtccccagagaagcctggacccacacgcgggctagatccagagaacctgacgacccggcgacggcgacgtctcttttgactaaaagacagtgtccagtgctccagcctaggagtctacggggaccgcctcccgcgccgccacccgactcggaccgatg

SEQ ID NO: 13537 - DNA, 203 bp, synthetic construct
  source 1..203: mol_type = other DNA
ggcgcgccagtcctggaaagtgtagcgcaggagaaggctatctcggtccccagagaagcctggacccacacgcgggctagatccagagaacctgacgacccggcgacggcgacgtctcttttgactaaaagacagtgtccagtgctccagcctaggagtctacggggaccgcctgattgatgttttgacgactcggaccgatg

SEQ ID NO: 13538 - DNA, 203 bp, synthetic construct
  source 1..203: mol_type = other DNA
ggcgcgccagtcctccacaccatagcgcaggagaaggctatctcggtcgatgtttggattccgacccacacgcgggctagatccagagaacctgacgacccggcgacggcgacgtctcttttgactaaaagacagtgtccagtgctccagcctaggagtctacggggaccgcctcccgcgccgccacccgactcggaccgatg

SEQ ID NO: 13539 - DNA, 203 bp, synthetic construct
  source 1..203: mol_type = other DNA
ggcgcgccagtcctactcgctctagcgcaggagattatgtgggtccgacccagagaagcctggacccacacgcgggctagatccagagaacctgacgacccggcgacggcgacgtctcttttgactaaaagacagtgtccagtgctccagcctaggagtctacggggaccgcctcccgcgccgccacccgactcggaccgatg

SEQ ID NO: 13540 - DNA, 203 bp, synthetic construct
  source 1..203: mol_type = other DNA
ggcgcgccagtcctgggcgatataggatctgtgggactgcgccacagcctctcgggagacgtgggccctcggaacctttttagtgccggactccgggccgcaggcagtcccgcggcagcaggatcacaggtggcagggactcagctcggaattctgtatagaaaaagcacctggatcccagtctttcacgactcggaccgatg

SEQ ID NO: 13541 - DNA, 203 bp, synthetic construct
  source 1..203: mol_type = other DNA
ggcgcgccagtcctggtatagctaggccacgtaggcccgtaagatattataactattttattatattttattcaccccccacattaatcccagttaaagctttataactataagtaagccgtgccgaaacgttaatcggtcgctagacctaatcgccgccttagtttaattttccaaaatttatttttcgactcggaccgatg

SEQ ID NO: 13542 - DNA, 203 bp, synthetic construct
  source 1..203: mol_type = other DNA
ggcgcgccagtcctctcaattataggctacgggtaggggacgcgcatataatacttctatgaagagatgccttggatagggtaacagcggcggatattggtgagttgttaagacaaaaaccattcaacgccggaggactgactctcatccagtggatgcattgagtggattgactgtcagggctgtctcgactcggaccgatg

SEQ ID NO: 13543 - DNA, 203 bp, synthetic construct
  source 1..203: mol_type = other DNA
ggcgcgccagtccttacgcccttaggttataatgttaggactataaaaattagcttaatgcatttagtaatttaaggcttagttatttaactttacttatcaagatggccgttggcagccccacgaaatctagattagtccgaatgtcctattttgattacccttcggcggcactcagaaactcacctcgactcggaccgatg

SEQ ID NO: 13544 - DNA, 203 bp, synthetic construct
  source 1..203: mol_type = other DNA
ggcgcgccagtcctgtggcttatagtgtgtattacaataattaaactaattaagctttgtttcacttgccatatgttttgtaatagaacaccactcattgaacgtaaaaatgtgtaccacatttaccaatcatatatgcacatagaccctttccctaaacgagttattgatttctaaactaaacgacacgactcggaccgatg

SEQ ID NO: 13545 - DNA, 203 bp, synthetic construct
  source 1..203: mol_type = other DNA
ggcgcgccagtcctcaattgtgtagttgaacgaatgggctccctatccggacaggtggctcttgccctttagactacagttcccagcatgcccaggcgattgcgtcccagaaccgacgtcccaccgccttcccacatcggatcgcagggctcccaaaatggcctataacattcacgtgaatggagtcccgactcggaccgatg

SEQ ID NO: 13546 - DNA, 203 bp, synthetic construct
  source 1..203: mol_type = other DNA
ggcgcgccagtccttcgtgcggtataagatacacctgcaaaggcggcacaaccccagtgccacgttgtgagttggatagttgtggaaagaccgccgatcggacgctcaagcgtattcaacaaggggctgaaggatgcccagaaggtaccccattgtatgggatctgatctggggcctcggtgcacatgcgactcggaccgatg

SEQ ID NO: 13547 - DNA, 203 bp, synthetic construct
  source 1..203: mol_type = other DNA
ggcgcgccagtccttgcgttagtataagatacacctgcaaaggcggcacaaccccagtgccacgttgtgagttggatagttgtggaaagagtcaaatggctctcctcaagcgtattcaacaaggggctgaagcgcctggtcccaaaaccccattgtatgggatctgatctggggcctcggtgcacatgcgactcggaccgatg

SEQ ID NO: 13548 - DNA, 203 bp, synthetic construct
  source 1..203: mol_type = other DNA
ggcgcgccagtcctcgaggtattataagatacacctgcaaaggcggcacaaccccagtgccacgttgtgagttggatagttgtggaaagagtcaaatggctctcctcaagcgtattcaacaaggggctgaaggatgcccagaaggtaccccattgtatggctatattcgccatccctcggtgcacatgcgactcggaccgatg

SEQ ID NO: 13549 - DNA, 203 bp, synthetic construct
  source 1..203: mol_type = other DNA
ggcgcgccagtccttccttcagtataagatacacctgcaaaggcggcacaaccccagtgccacgttgtgagttggatagttgtggaaagagtcaaatggctctcctcaagcgtattcaacaaggggctgaaggatgcccagaaggttaaaaccgcagcaagatctgatctggggcctcggtgcacatgcgactcggaccgatg

SEQ ID NO: 13550 - DNA, 203 bp, synthetic construct
  source 1..203: mol_type = other DNA
ggcgcgccagtcctcctcaaactataagatacacctgcaaaggcggcacaaccccagtgccagacatcacaggttttagttgtggaaagagtcaaatggctctcctcaagcgtattcaacaaggggctgaaggatgcccagaaggtaccccattgtatgggatctgatctggggcctcggtgcacatgcgactcggaccgatg

SEQ ID NO: 13551 - DNA, 203 bp, synthetic construct
  source 1..203: mol_type = other DNA
ggcgcgccagtccttccaattttataagatacactccatgctcgctttcaaccccagtgccacgttgtgagttggatagttgtggaaagagtcaaatggctctcctcaagcgtattcaacaaggggctgaaggatgcccagaaggtaccccattgtatgggatctgatctggggcctcggtgcacatgcgactcggaccgatg

SEQ ID NO: 13552 - DNA, 203 bp, synthetic construct
  source 1..203: mol_type = other DNA
ggcgcgccagtccttctcctgatatacaattttgagaggttaataagaaggaagtagtgctatcttaataattaggttaactatttagttttactgttcaggatgcctattggcagccagccgtcgctatatacaccctctctgcttcttatatgattaggttgtcatttagaataagaaaataacctcgactcggaccgatg

SEQ ID NO: 13553 - DNA, 203 bp, synthetic construct
  source 1..203: mol_type = other DNA
ggcgcgccagtcctacattatttatactggctgcttatggtgacaattgagagattgttaccatatagctattggattggccatccggtgaccaatagagctattatatatctctttgttgggtttataccacttagcttgaaagaggttaaaacattactcaagtccccactattgaatacagcaaacgactcggaccgatg

SEQ ID NO: 13554 - DNA, 203 bp, synthetic construct
  source 1..203: mol_type = other DNA
ggcgcgccagtcctagaagccgtatactggctgcttatggtgacaattgagagattgttaccatatagctattggattggccatccggtgctggcatctcggcctatatatctctttgttgggtttataccacttagcttgaaagaggttaaaacattacaattcattgttaagttgaatacagcaaacgactcggaccgatg

SEQ ID NO: 13555 - DNA, 203 bp, synthetic construct
  source 1..203: mol_type = other DNA
ggcgcgccagtcctgtactttgtatactggctgcttatggtgacaattgagagattgttacccctcgaactcctctttggccatccggtgaccaatagagctattatatatctctttgttgggtttataccacttagcttgaaagaggttaaaacattacaattcattgttaagttgaatacagcaaacgactcggaccgatg

SEQ ID NO: 13556 - DNA, 203 bp, synthetic construct
  source 1..203: mol_type = other DNA
ggcgcgccagtcctgaacctggtatagttaaggttgcgcttgcctattgttatgcgacatcgaggatggcgcgttgcagtccaacaagatccagggactgtacagaattttcctatacctcgagtcgggtttggaatctaaggttgactcgctgtaaataatgtaaatatgaaacaaatgaatgtaaacgactcggaccgatg

SEQ ID NO: 13557 - DNA, 203 bp, synthetic construct
  source 1..203: mol_type = other DNA
ggcgcgccagtcctgcagcctgtatagttaaggttgcgcttgcctatttaggcatacttctcaggatggcgcgttgcagtccaacaagatccagggactgtacagaattttcctatacctcgagtcgggtttccgtatatgctcaaactcgctgtaaataatgtaaatatgaaacaaatgaatgtaaacgactcggaccgatg

SEQ ID NO: 13558 - DNA, 203 bp, synthetic construct
  source 1..203: mol_type = other DNA
ggcgcgccagtcctgtgatctctatagttaaggttgcgcttgcctatttaggcatacttctcaggatggcgcgttgcagtccaacaagatccagggactgtacagaattttcctatacctcgagtcgggtttggaatctaaggttgactcgctgtaaataatgtaaatatgaaatgctaattctacggcgactcggaccgatg

SEQ ID NO: 13559 - DNA, 203 bp, synthetic construct
  source 1..203: mol_type = other DNA
ggcgcgccagtcctaaacatactatcagcggatgttgtcctgcgagttcctcttgagactggccgaaaggcagccacggggccaccaaggcggcgcagcgctgcatgcggcaaggggaaaaatccttcgggtgacccctggtggcaatcccttcccttaggagcatgagtgtggtcgacacattcacccgactcggaccgatg

SEQ ID NO: 13560 - DNA, 203 bp, synthetic construct
  source 1..203: mol_type = other DNA
ggcgcgccagtcctgcgtgtaatatcgaaggctccggcagcggtgtccgccccacggccggcgttgccggggtaacggcgagcgcgtggggccaagaaagaatacctcctctgaaaaatggcagaagcagttttccatgccccaaagaggaaaagaagagtgtatgagacttacgagtctccattgcccgactcggaccgatg

SEQ ID NO: 13561 - DNA, 203 bp, synthetic construct
  source 1..203: mol_type = other DNA
ggcgcgccagtccttttatcattatctggtcggtcatctctgtaacctaagcgtgtgatgtcaattggtctttaaaactcctcaatgcaccgggcgcggtggctcacgcctgtaatcccagcactttgggaggccgaggcgggcagatcacgaggtcaggaaatcgagaccatcttggctaacaagaacgactcggaccgatg

SEQ ID NO: 13562 - DNA, 203 bp, synthetic construct
  source 1..203: mol_type = other DNA
ggcgcgccagtccttcagaagatatctggtcggtcatctctgtaacctccctaccaaggactaattggtctttaaaactcctcaatgcaccgggcgcggtggctcacgcctgtaatcccagcactttgggaggccgaggcgggcagatcacgaggtcaggttcagcgccatcggttggctaacaagaacgactcggaccgatg

SEQ ID NO: 13563 - DNA, 203 bp, synthetic construct
  source 1..203: mol_type = other DNA
ggcgcgccagtcctctgtgggctatctggtcggtcatctctgtaacctccctaccaaggactaattggtctttaaaactcctcaatgcaccgggcgcggtggctcacgcctgtaatcccagcactttgggagtgttcatgaattccatcacgaggtcaggaaatcgagaccatcttggctaacaagaacgactcggaccgatg

SEQ ID NO: 13564 - DNA, 203 bp, synthetic construct
  source 1..203: mol_type = other DNA
ggcgcgccagtcctgcagattctatctggtcggtcatctctgtaacctccctaccaaggactttacatataagttgactcctcaatgcaccgggcgcggtggctcacgcctgtaatcccagcactttgggaggccgaggcgggcagatcacgaggtcaggaaatcgagaccatcttggctaacaagaacgactcggaccgatg

SEQ ID NO: 13565 - DNA, 203 bp, synthetic construct
  source 1..203: mol_type = other DNA
ggcgcgccagtcctatggacgctatctggtcggtgtggataccttgacccctaccaaggactaattggtctttaaaactcctcaatgcaccgggcgcggtggctcacgcctgtaatcccagcactttgggaggccgaggcgggcagatcacgaggtcaggaaatcgagaccatcttggctaacaagaacgactcggaccgatg

SEQ ID NO: 13566 - DNA, 203 bp, synthetic construct
  source 1..203: mol_type = other DNA
ggcgcgccagtcctgtttccaatatgctaaggggactcgtctccacctcgtaaaggaaactccccaagggaatccctgtcccctattttcaatgtaccagcaaattccaagacagtcctagcctatagaactcctacctcccatcccctgaggtggtccccattcctccctcccttcctccccccgcccgactcggaccgatg

SEQ ID NO: 13567 - DNA, 203 bp, synthetic construct
  source 1..203: mol_type = other DNA
ggcgcgccagtccttgcgtatctatgctaaggggactcgtctccacctcgtaaaggaaactccccaagggaatccctgtcccctattttcctatccttctacccgaagttagtttgattagcctatagaactcctacctcccatcccctgaggtggtccccattcctccctcccttcctccccccgcccgactcggaccgatg

SEQ ID NO: 13568 - DNA, 203 bp, synthetic construct
  source 1..203: mol_type = other DNA
ggcgcgccagtcctttgctttatatgctaaggggactcgtctccacctcgtaaaggaaactccccaagggaatccctgtcccctattttcctatccttctacccttccaagacagtccatataacgccttagcctacctcccatcccctgaggtggtccccattcctccctcccttcctccccccgcccgactcggaccgatg

SEQ ID NO: 13569 - DNA, 203 bp, synthetic construct
  source 1..203: mol_type = other DNA
ggcgcgccagtccttactaccatatgctaaggggactcgtctccacctcgtaaaggaaactccccaagggaatccctgtcccctattttcctatccttctacccttccaagacagtcctagcctatagaactcctacctcccatcccctgaggtggtcccaggcttgattgtgattcctccccccgcccgactcggaccgatg

SEQ ID NO: 13570 - DNA, 203 bp, synthetic construct
  source 1..203: mol_type = other DNA
ggcgcgccagtcctgattagattatgctaaggggactcgtctccacctcgtaaaggaaactccccaagggaatccctgtcccctattttcctatccttctacccttccaagacagtcctagcctatagaactcctacctcccatcccctgaggtggtccccattcctccctcccagatgggtagtcatcgactcggaccgatg

SEQ ID NO: 13571 - DNA, 203 bp, synthetic construct
  source 1..203: mol_type = other DNA
ggcgcgccagtccttcttactttatgctaaggggactcgtctccaccttaatgcattgttatcccaagggaatccctgtcccctattttcctatccttctacccttccaagacagtcctagcctatagaactcctacctcccatcccctgaggtggtccccattcctccctcccttcctccccccgcccgactcggaccgatg

SEQ ID NO: 13572 - DNA, 203 bp, synthetic construct
  source 1..203: mol_type = other DNA
ggcgcgccagtcctgacatatttatgtatgtatgacgcaggtcccggcatacacatatacacatattggtttttttaatcatttgagagttagttgaagataaaaacccatcacccctaaatgtattccaaagaataagaacattgttttatacatagcacacttaacaaaatcaagaaatttaacatcgactcggaccgatg

SEQ ID NO: 13573 - DNA, 203 bp, synthetic construct
  source 1..203: mol_type = other DNA
ggcgcgccagtcctagtctacatatgtatgtatgtatgtatatgtattatacacatatacacatattggtttttttaatcatttgagagttagttgaagataaaaacccatcaccccttgcatagaatttcggaataagaacattgttttatacatagcacacttaacaaaatcaagaaatttaacatcgactcggaccgatg

SEQ ID NO: 13574 - DNA, 203 bp, synthetic construct
  source 1..203: mol_type = other DNA
ggcgcgccagtcctataaagtttatgtatgtatgtatgtatatgtattcacacttagccacgatattggtttttttaatcatttgagagttagttgaagataaaaacccatcacccctaaatgtattccaaagaataagaacattgttttatacatagcacacttaacaaaatcaagaaatttaacatcgactcggaccgatg

SEQ ID NO: 13575 - DNA, 203 bp, synthetic construct
  source 1..203: mol_type = other DNA
ggcgcgccagtcctaaggagcgtatgtgaggggactgtttcctcttctttagcttcttccaccagaagggcctccaggattttgacactctgctcctgagtggtgatggaaatactctctacgtgggggctcgagaagccattctggccttggatatccaggatccaggggtccccaggctaaagaaccgactcggaccgatg

SEQ ID NO: 13576 - DNA, 203 bp, synthetic construct
  source 1..203: mol_type = other DNA
ggcgcgccagtcctggacccattatgtgaggggatgaacgtagggcaccctttcaaggtaggcagaagggcctccaggattttgacactctgctcctgagtggtgatggaaatactctctacgtgggggctcgagaagccattctggccttggatatccaggatccaggggtccccaggctaaagaaccgactcggaccgatg

SEQ ID NO: 13577 - DNA, 203 bp, synthetic construct
  source 1..203: mol_type = other DNA
ggcgcgccagtcctgaccactctatgtgaggggatgaacgtagggcacttagcttcttccaccagaagggcctccaggattttgacactctgctcctgagtggtagcaacgcctggtcctacgtgggggctcgagaagccattctggccttggatatccaggatccaggggtccccaggctaaagaaccgactcggaccgatg

SEQ ID NO: 13578 - DNA, 203 bp, synthetic construct
  source 1..203: mol_type = other DNA
ggcgcgccagtcctgtcattcttatgtgaggggatgaacgtagggcacttagcttcttccaccagaagggcctccaggattttgacactctgctcctgagtggtgatggaaatactctctacgtgggggctcactcgaatgcggcagccttggatatccaggatccaggggtccccaggctaaagaaccgactcggaccgatg

SEQ ID NO: 13579 - DNA, 203 bp, synthetic construct
  source 1..203: mol_type = other DNA
ggcgcgccagtccttgcaggactatgtgaggggatgaacgtagggcacttagcttcttccacgcttctaaagatgtggattttgacactctgctcctgagtggtgatggaaatactctctacgtgggggctcgagaagccattctggccttggatatccaggatccaggggtccccaggctaaagaaccgactcggaccgatg

SEQ ID NO: 13580 - DNA, 203 bp, synthetic construct
  source 1..203: mol_type = other DNA
ggcgcgccagtcctatccactatatgttgaatgaggtgtatcaaactaaggagaccttctaacagccaggtcataggaatataaataaaaataagaataaaattgattccatcggaagattcatttcaagaagtgatcaaatcaaagcggttggcagacctaccaatcatataccacaagactcgacacgactcggaccgatg

SEQ ID NO: 13581 - DNA, 203 bp, synthetic construct
  source 1..203: mol_type = other DNA
ggcgcgccagtcctggaatcaatatgttgaatgaggtgtatcaaactatttgagaaggagcccagccaggtcataggaatataaataaaaataagaataaaattgattccatcggaagattcatttcaagaagtgatcaaatcaaagcggttggcagacctaccaatcatataccacaagactcgacacgactcggaccgatg

SEQ ID NO: 13582 - DNA, 203 bp, synthetic construct
  source 1..203: mol_type = other DNA
ggcgcgccagtcctaacgcggctattcatttgatgggtaaatattttagggccgattctttggttttatagccaagataccctgttgataaagtcttgtgggaggggcggattttaaagcttattttgaagctttttaaaaaagacatccttacctgttttaactgtagattatattaacttaaatagcgactcggaccgatg

SEQ ID NO: 13583 - DNA, 203 bp, synthetic construct
  source 1..203: mol_type = other DNA
ggcgcgccagtccttctatgcttattcgatttggcagcgagcctctggagtccctgtggcagaactcaaatggaaggaggagcagctgcacccaggggagcagggtgtcacctccgttggatagagccggccaggttgcagcgcggacacactcgcaggtcgctgtggccccagcctcgcctgacagacgactcggaccgatg

SEQ ID NO: 13584 - DNA, 203 bp, synthetic construct
  source 1..203: mol_type = other DNA
ggcgcgccagtccttggagtagtattggctgcttatggtgacaatcaaaaagttgttaccatatagctattggattggccatccggtgtgcaacagggcaattgtttacctatttattggttttgtaccattatcactgaagtctgtgatcactctcaaattcattttgaccctcaacacaatcaaaccgactcggaccgatg

SEQ ID NO: 13585 - DNA, 203 bp, synthetic construct
  source 1..203: mol_type = other DNA
ggcgcgccagtccttttacgactattggctgcttatggtgacaatcaaaaagttgttaccatatagctattggattggccatccggtgtgcaacagggcaattgtttacctatttattggttttgtaccattgaagggtctaggattgatcactctcaaattcattttgaccctcaacacaatcaaaccgactcggaccgatg

SEQ ID NO: 13586 - DNA, 203 bp, synthetic construct
  source 1..203: mol_type = other DNA
ggcgcgccagtcctgtcgtcaatattggctgcttatggtgacaatcaaaaagttgttaccatcctagagacatgggggccatccggtgtgcaacagggcaattgtttacctatttattggttttgtaccattatcactgaagtctgtgatcactctcaaattcattttgaccctcaacacaatcaaaccgactcggaccgatg

SEQ ID NO: 13587 - DNA, 203 bp, synthetic construct
  source 1..203: mol_type = other DNA
ggcgcgccagtccttttgtccctattggctgcttatggtgacaatcaattctagcggcaacaatagctattggattggccatccggtgtgcaacagggcaattgtttacctatttattggttttgtaccattatcactgaagtctgtgatcactctcaaattcattttgaccctcaacacaatcaaaccgactcggaccgatg

SEQ ID NO: 13588 - DNA, 203 bp, synthetic construct
  source 1..203: mol_type = other DNA
ggcgcgccagtcctatacgtcttatttctcaactaacgacttgtacgttgctcttagaggactagcaaccgttatactcagcctttctagaaaggttgagttatataacggtgaatgtgtatacttgttttgtgaacacccagctgttggaatagtcaacacagatttcaaattagaaatccactaagcgactcggaccgatg

SEQ ID NO: 13589 - DNA, 203 bp, synthetic construct
  source 1..203: mol_type = other DNA
ggcgcgccagtccttaaggaactcaacaacatcaataaaacagacatcaatccattgaatcaactgccagaccgaacaaacaaatgtccgtcagcggaaccaccaaccaatcaatcaaccaactgatccatcagcaacctgacgaaattaacaatatagtccatgttgtcctgaaagatggggcaaatcgactcggaccgatg

SEQ ID NO: 13590 - DNA, 203 bp, synthetic construct
  source 1..203: mol_type = other DNA
ggcgcgccagtccttggcattctcaagccctccggtagagaagccaagaatgtcctgaaggtaccccgcgcgcgggatctgatcaggagaccaattggcagtgctttacgctgccactttggtttaaaaactagtgacttcctaggaaaccaagtggtcttggttttccaattttgttgactgacaatcgactcggaccgatg

SEQ ID NO: 13591 - DNA, 203 bp, synthetic construct
  source 1..203: mol_type = other DNA
ggcgcgccagtcctactctgtttcaagccctccggtagagaagccaagaatgtcctgaaggtaccccgcgcgcgggatctgatcaggagaccaattggcagtgctttacgctgccactttggtttaaaaactgtcacagcttctccaaaccaagtggtcttggttttccaatttgaggcggaacagcgcgactcggaccgatg

SEQ ID NO: 13592 - DNA, 203 bp, synthetic construct
  source 1..203: mol_type = other DNA
ggcgcgccagtcctcccaccgatcaagccctccggtagagaagccaagaatgtcctgaaggtaccccgcgcgcgggatctgatcaggagaccaattggcagtgctttacgctgccactttggtttaaaaactgtcacagcttctccaaaccaagtggtcttggttttccaattttgttgactgacaatcgactcggaccgatg

SEQ ID NO: 13593 - DNA, 203 bp, synthetic construct
  source 1..203: mol_type = other DNA
ggcgcgccagtcctctcttctatcaagccctccggtagagaagccaagaatgtcctgaaggtaccccgcgcgcgggatctgatcaggagaccaattggcagtgctttacgctgccactttggtttaaaaactgtcacagcttctccttcagcgagatggctggttttccaattttgttgactgacaatcgactcggaccgatg

SEQ ID NO: 13594 - DNA, 203 bp, synthetic construct
  source 1..203: mol_type = other DNA
ggcgcgccagtcctagacaatatcaagccctccggtagagaagccaagaatgtcctgaaggtaccccgcgcgcggggctccgcagtattcccaattggcagtgctttacgctgccactttggtttaaaaactgtcacagcttctccaaaccaagtggtcttggttttccaattttgttgactgacaatcgactcggaccgatg

SEQ ID NO: 13595 - DNA, 203 bp, synthetic construct
  source 1..203: mol_type = other DNA
ggcgcgccagtcctgagcattgtcaatgacctgttttcttctgtaaccacaggttcggtggtgagaggaagcctcgcagaatccagcagaatcctcacagaatccagcagcagctctgctggggacatggtccatggtgcaacccacagcaaagccctgacctgacctcctgatgctcaggagaagcccgactcggaccgatg

SEQ ID NO: 13596 - DNA, 203 bp, synthetic construct
  source 1..203: mol_type = other DNA
ggcgcgccagtcctggcacggatcaatgacctgttttcttctgtaaccacaggttcggtggtgagaggaagcctcgcagaatccagcagaatcctcacagaatccagcagcagctctgctggggacatggtccatggtgcaacccatctggtgcataccgcctgacctcctgatgctcaggagaagcccgactcggaccgatg

SEQ ID NO: 13597 - DNA, 203 bp, synthetic construct
  source 1..203: mol_type = other DNA
ggcgcgccagtcctactggttttcaatgacctgttttcttctgtaaccacaggttcggtggtgagaggaagcctcgcagaatccagcagaatcctcacagaatccagcagcagctctgctggggacatggtctcgtacaaggaagtcagcaaagccctgacctgacctcctgatgctcaggagaagcccgactcggaccgatg

SEQ ID NO: 13598 - DNA, 203 bp, synthetic construct
  source 1..203: mol_type = other DNA
ggcgcgccagtccttgtaagagtcaatgacctgttttcttctgtaaccacaggttcggtggtgagaggaagcctcgcagaatccagcagacgttgtcgttcgaacagcagcagctctgctggggacatggtccatggtgcaacccacagcaaagccctgacctgacctcctgatgctcaggagaagcccgactcggaccgatg

SEQ ID NO: 13599 - DNA, 203 bp, synthetic construct
  source 1..203: mol_type = other DNA
ggcgcgccagtccttaaacgcgtcacatcaccagtgtatcctcagctcctaacactgtgtctggtacacattgtttgatggttttgatgtttcagattcgttatatttcacaaacacaaggcttgccagctgaatatcttctcagtgccggaacaaaaaccttggtagcccgatacagagatcctaatcgactcggaccgatg

SEQ ID NO: 13600 - DNA, 203 bp, synthetic construct
  source 1..203: mol_type = other DNA
ggcgcgccagtcctgtcctggctcacatcaccagtgtatcctcagctctcctacgccaacacggtacacattgtttgatggttttgatgtttcagattcgttatatttcacaaacacaaggcttgccagctgaatatcttctcagtgccggaacaaaaacaaccaggtttttcaacagagatcctaatcgactcggaccgatg

SEQ ID NO: 13601 - DNA, 203 bp, synthetic construct
  source 1..203: mol_type = other DNA
ggcgcgccagtcctgccaagattcaccagagcggaacaagaaagagaacggccaccggggtcggctgggacagactgcgggcacgtccccttccagaggctttaactgaaaaatagaacccaggaaggtgtggacactgccagcggctgcagccgacttggaatgacctgggagacaaatacaacagccgactcggaccgatg

SEQ ID NO: 13602 - DNA, 203 bp, synthetic construct
  source 1..203: mol_type = other DNA
ggcgcgccagtccttccaaacgtcactcccagactccttgcggagctcaaaatacctacgacggctggtcactactccgagcctgtgacgtttgcggcagccaggccgtcgacgatgcccagtgaaactctctgggaaattgcaaaagctgaagtggaaaaaaggggaattaatggaagtgaaggtgacgactcggaccgatg

SEQ ID NO: 13603 - DNA, 203 bp, synthetic construct
  source 1..203: mol_type = other DNA
ggcgcgccagtcctagtagttctcactcccagactccttgcggagctcgccgcctgattctaggctggtcactactagatattcaccgactttgcggcagccaggccgtcgacgatgcccagtgaaactctctgggaaattgcaaaagctgaagtggaaaaaaggggaattaatggaagtgaaggtgacgactcggaccgatg

SEQ ID NO: 13604 - DNA, 203 bp, synthetic construct
  source 1..203: mol_type = other DNA
ggcgcgccagtcctgttacaattcactcccagactccttgcggagctcgccgcctgattctaggctggtcactactccgagcctgtgacggccaataaccagccgccgtcgacgatgcccagtgaaactctctgggaaattgcaaaagctgaagtggaaaaaaggggaattaatggaagtgaaggtgacgactcggaccgatg

SEQ ID NO: 13605 - DNA, 203 bp, synthetic construct
  source 1..203: mol_type = other DNA
ggcgcgccagtcctggccacggtcactcccagactccttgcggagctcgccgcctgattctaggctggtcactactccgagcctgtgacgtttgcggcagccaggccgtcgacgatgcccagtgaaactctctgggaaattgcaaaagctgaagtggaaaaaaggggaattaatggaagtgaaggtgacgactcggaccgatg

SEQ ID NO: 13606 - DNA, 203 bp, synthetic construct
  source 1..203: mol_type = other DNA
ggcgcgccagtcctgggcatcatcactcccagactccttgcggagctcgccgcctgattctaggctggtcactactccgagcctgtgacgtttgcggcagccaggccgtcgacgatgcccagtgaaactctctgggaaattgcaaatcacagccatatctaaaggggaattaatggaagtgaaggtgacgactcggaccgatg

SEQ ID NO: 13607 - DNA, 203 bp, synthetic construct
  source 1..203: mol_type = other DNA
ggcgcgccagtccttaagtctatcactctcataatcctcttacagctttactcctgccagcttgggaaaaggccggagaaggtgaaattctgtgtgctccctccggcgagagactttgtcagctcccgcacagtaacgtggaagtccaagaatccgagtggaggctcaccgaggcgaaggggccaacccgactcggaccgatg

SEQ ID NO: 13608 - DNA, 203 bp, synthetic construct
  source 1..203: mol_type = other DNA
ggcgcgccagtcctcacggatgtcactgctatagagaaatttgcttaagacctacatgcttcctgctgtggctgtctcggaacccgtggtcctccgcttcatgattttctgccgtctcttggcaaaaatggcaaataatgatgctgttctgaagagactggagcagaagggtgcagaggcagatcaaacgactcggaccgatg

SEQ ID NO: 13609 - DNA, 203 bp, synthetic construct
  source 1..203: mol_type = other DNA
ggcgcgccagtccttaaagtaatcactgctatagtacgcgggtggctgactggcagataagactgctgtggctgtctcggaacccgtggtcctccgcttcatgattttctgccgtctcttggcaaaaatggcaaataatgatgctgttctgaagagactggagcagaagggtgcagaggcagatcaaacgactcggaccgatg

SEQ ID NO: 13610 - DNA, 203 bp, synthetic construct
  source 1..203: mol_type = other DNA
ggcgcgccagtccttgcaccggtcactgctatagtacgcgggtggctggacctacatgcttcctgctgtggctgtctcggaacccgtggtcctccgcttcatgacagcggcgtcaaatttggcaaaaatggcaaataatgatgctgttctgaagagactggagcagaagggtgcagaggcagatcaaacgactcggaccgatg

SEQ ID NO: 13611 - DNA, 203 bp, synthetic construct
  source 1..203: mol_type = other DNA
ggcgcgccagtcctacttgggttcactgctatagtacgcgggtggctggacctacatgcttcctgctgtggctgtctcggaacccgtggtcctccgcttcatgattttctgccgtctccatcagttgccactaaataatgatgctgttctgaagagactggagcagaagggtgcagaggcagatcaaacgactcggaccgatg

SEQ ID NO: 13612 - DNA, 203 bp, synthetic construct
  source 1..203: mol_type = other DNA
ggcgcgccagtccttcaccgcttcactgctatagtacgcgggtggctggacctacatgcttcctgctgtggctgtctcggaacccgtggtcctccgcttcatgattttctgccgtctcttggcaaaaatggctcggcgatgacgccttctgaagagactggagcagaagggtgcagaggcagatcaaacgactcggaccgatg

SEQ ID NO: 13613 - DNA, 203 bp, synthetic construct
  source 1..203: mol_type = other DNA
ggcgcgccagtcctcaaagcactcactgctatagtacgcgggtggctggacctacatgcttctcatgcaacacccatcggaacccgtggtcctccgcttcatgattttctgccgtctcttggcaaaaatggcaaataatgatgctgttctgaagagactggagcagaagggtgcagaggcagatcaaacgactcggaccgatg

SEQ ID NO: 13614 - DNA, 203 bp, synthetic construct
  source 1..203: mol_type = other DNA
ggcgcgccagtcctacttatactcacttctaactgcgataaatgctgacgtgaaaacgttgcgtattgctacaacacttggttagctatttagctttactaatcaagacgccgtcgtgcagcccacaaaagtctagatacgtcacaggagagcatacgctaggtcgcgttgactatccttatatatgacgactcggaccgatg

SEQ ID NO: 13615 - DNA, 203 bp, synthetic construct
  source 1..203: mol_type = other DNA
ggcgcgccagtcctggattatctcagccgcccgagggcgctgcgctgagccttacactctatgattgctcctaccgactcccatgaggaagtgcgatcgggaacctcctatatacttccgtttgcctcgcggtttctttctttccgcgccgatagcgctcacgcaagcatggttggatcgatagtcttcgactcggaccgatg

SEQ ID NO: 13616 - DNA, 203 bp, synthetic construct
  source 1..203: mol_type = other DNA
ggcgcgccagtcctatcatccgtcagccgcccgagggcgctgcgctgagccttacactctatgattgctcctaccgactcccatgaggaagtgcgatcgggaacctcctatatacttccgtttgcctcgcggtttctttctttccgtttatcggcattgaacgcaagcatggttaacgtccctaaaaccgactcggaccgatg

SEQ ID NO: 13617 - DNA, 203 bp, synthetic construct
  source 1..203: mol_type = other DNA
ggcgcgccagtccttcaggacgtcagccgcccgagggcgctgcgctgagccttacactctatgattgctcctaccgactcccatgaggaagtgcgatcgggaacctcctatatacttcttccgtggcgcatttttctttctttccgcgccgatagcgctcacgcaagcatggttaacgtccctaaaaccgactcggaccgatg

SEQ ID NO: 13618 - DNA, 203 bp, synthetic construct
  source 1..203: mol_type = other DNA
ggcgcgccagtcctgataatcatcagccgcccgagggcgctgcgctgagccttacactctattgcattctactttcactcccatgaggaagtgcgatcgggaacctcctatatacttccgtttgcctcgcggtttctttctttccgcgccgatagcgctcacgcaagcatggttaacgtccctaaaaccgactcggaccgatg

SEQ ID NO: 13619 - DNA, 203 bp, synthetic construct
  source 1..203: mol_type = other DNA
ggcgcgccagtccttcccataatcagccggcgccgcgaatgttcaagttactttgccccgccggcggggcggtcagcctcctgtcaccgcctgttccggctatggtcccgtccggtgttctgtaagttggcaacctaggctcctgacgcgaccctggtcctgatggcggcggcgacggccgcggcagccgactcggaccgatg

SEQ ID NO: 13620 - DNA, 203 bp, synthetic construct
  source 1..203: mol_type = other DNA
ggcgcgccagtccttagagcgctcagccggcgccgcgccgccgggtgttactttgccccgccggcggggcggtcagcctcctgtcaccgcctgttccggctatggtcccgtccggtgttctgtaagttggcaacctaggctcctgacgcgaccctggtcctgatggcggcggcgacggccgcggcagccgactcggaccgatg

SEQ ID NO: 13621 - DNA, 203 bp, synthetic construct
  source 1..203: mol_type = other DNA
ggcgcgccagtcctcagtattttcagccggcgccgcgccgccgggtgttactttgccccgcctctaacctaacacccctcctgtcaccgcctgttccggctatggtcccgtccggtgttctgtaagttggcaacctaggctcctgacgcgaccctggtcctgatggcggcggcgacggccgcggcagccgactcggaccgatg

SEQ ID NO: 13622 - DNA, 203 bp, synthetic construct
  source 1..203: mol_type = other DNA
ggcgcgccagtccttatactgttcagcgagcgcagcctgcacgcccgcctcgcgtcccgggggggtcccgcctcccaccccgcctctggacttgtctctttccccgcgcgcgcggacagagccggcgtttaggcccgagcgagcccaatttttctacctggggaagacaacgcgggcaccgattcgcccgactcggaccgatg

SEQ ID NO: 13623 - DNA, 203 bp, synthetic construct
  source 1..203: mol_type = other DNA
ggcgcgccagtcctaagagacatcagcgagcgcagcctgcacgcccgcctcgcgtcccgggggggtcccgcctcccaccccgcctctggacttgtctctttccccgcgcgcgcggacagagccggcgtttaggcccgagcgagcccgggggccgccggccgggaagacaacgcgtagtttagagacgtcgactcggaccgatg

SEQ ID NO: 13624 - DNA, 203 bp, synthetic construct
  source 1..203: mol_type = other DNA
ggcgcgccagtcctgtacggcctcagcgagcgcagcctgcacgcccgcctcgcgtcccgggggggtcccgcctcccaccccgcctctggacttgtctctttccccgcgcgcgcggacagagccggcgtttagtaggcctgctctatgggggccgccggccgggaagacaacgcgggcaccgattcgcccgactcggaccgatg

SEQ ID NO: 13625 - DNA, 203 bp, synthetic construct
  source 1..203: mol_type = other DNA
ggcgcgccagtcctaattcgtttcagcgagcgcagcctgcacgcccgcctcgcgtcccgggggggtcccgcctcccttagatttgactcgcttgtctctttccccgcgcgcgcggacagagccggcgtttaggcccgagcgagcccgggggccgccggccgggaagacaacgcgggcaccgattcgcccgactcggaccgatg

SEQ ID NO: 13626 - DNA, 203 bp, synthetic construct
  source 1..203: mol_type = other DNA
ggcgcgccagtcctagggcttttcaggccccctccgcctccacccctgccctcctcaggccccctccgcctccacccctgccctcctcaggccccctgcgtcccaaggcttcggagtccaggccccctccgcctccggctccgtcctcctctggccccctccgcccccggccccggccccacggcgggcgactcggaccgatg

SEQ ID NO: 13627 - DNA, 203 bp, synthetic construct
  source 1..203: mol_type = other DNA
ggcgcgccagtcctagtattaatcaggccccctccgcctccacccctgccctcctcaggccccctccgcctccacccctgccctcctcaggccccctgcgtccccgcctcgtcctcctcaggccccctccgcctccggctccgtccgggcggtattgggcccgcccccggccccggccccacggcgggcgactcggaccgatg

SEQ ID NO: 13628 - DNA, 203 bp, synthetic construct
  source 1..203: mol_type = other DNA
ggcgcgccagtcctaaagcacttcaggccccctccgcctccacccctgccctcctcaggccccctccgcctccacccctgccctcctcaggccccctgcgtccccgcctcgtcctcctcaggccccctccgcctccggctccgtcctcctctggccccctccgcccccggccccggccccacggcgggcgactcggaccgatg

SEQ ID NO: 13629 - DNA, 203 bp, synthetic construct
  source 1..203: mol_type = other DNA
ggcgcgccagtcctctatagcctcaggccccctccgcctccacccctgccctcctcaggccccctccgcctccacccctgccctcctcaggccccctgcgtccccgcctcgtcctcctcaggccccctccgcctccggctccgtcctcctctggccccctccgcccccggccccttgttggtaagaatcgactcggaccgatg

SEQ ID NO: 13630 - DNA, 203 bp, synthetic construct
  source 1..203: mol_type = other DNA
ggcgcgccagtcctaggaacggtcaggccccctccgcctccacccctgccctcctcaggcccgagtttgaatactgcctgccctcctcaggccccctgcgtccccgcctcgtcctcctcaggccccctccgcctccggctccgtcctcctctggccccctccgcccccggccccggccccacggcgggcgactcggaccgatg

SEQ ID NO: 13631 - DNA, 203 bp, synthetic construct
  source 1..203: mol_type = other DNA
ggcgcgccagtcctgggagccatcaggccccctccgcctccacccctggatcgtgtgactatcctccgcctccacccctgccctcctcaggccccctgcgtccccgcctcgtcctcctcaggccccctccgcctccggctccgtcctcctctggccccctccgcccccggccccggccccacggcgggcgactcggaccgatg

SEQ ID NO: 13632 - DNA, 203 bp, synthetic construct
  source 1..203: mol_type = other DNA
ggcgcgccagtcctagtttggctcaggccccctctttacggtaaaaccccctcctcaggccccctccgcctccacccctgccctcctcaggccccctgcgtccccgcctcgtcctcctcaggccccctccgcctccggctccgtcctcctctggccccctccgcccccggccccggccccacggcgggcgactcggaccgatg

SEQ ID NO: 13633 - DNA, 203 bp, synthetic construct
  source 1..203: mol_type = other DNA
ggcgcgccagtcctaccggtgctcaggcggaaggagcagtcctctgaagcttgaggagcctctagaactatgagcccgaggccttcccctctcccagagcgcagaggctttgaaggctacctctgggaagccaaaacgaccgcttggctgcgggagctgaaactgcgccatcgtcactgtcggcggcccgactcggaccgatg

SEQ ID NO: 13634 - DNA, 203 bp, synthetic construct
  source 1..203: mol_type = other DNA
ggcgcgccagtcctttagccgatcaggcggaaggagcagtcctctgaagcttgaggagcctctagaactatgagcccgaggccttcccctctcccagagcgcagaggctttgaaggctacctctgggaagccgctcaccgtcggaagctgcgggagctgaaactgcgccatcgtactccagcatttggcgactcggaccgatg

SEQ ID NO: 13635 - DNA, 203 bp, synthetic construct
  source 1..203: mol_type = other DNA
ggcgcgccagtcctcctgggtctcaggcggaaggagcagtcctctgaagcttgaggagcctctagaactatgagcccgaggccttcccctctcccagagcgcagaggctttgaaggctacctctgggaagccgctcaccgtcggaattcaaccattgctcaactgcgccatcgtcactgtcggcggcccgactcggaccgatg

SEQ ID NO: 13636 - DNA, 203 bp, synthetic construct
  source 1..203: mol_type = other DNA
ggcgcgccagtcctgggctccctcaggcggaaggagcagtcctctgaagcttgaggagcctctagaactatgagcccgaggccttcccctctcccagagcgcaggtcgagacggattgacctctgggaagccgctcaccgtcggaagctgcgggagctgaaactgcgccatcgtcactgtcggcggcccgactcggaccgatg

SEQ ID NO: 13637 - DNA, 203 bp, synthetic construct
  source 1..203: mol_type = other DNA
ggcgcgccagtcctgtgtttagtcatcgtgcgtcagagtgagcccggatggggcggcgggctaataatcgagggttgctgatccgagccgagcgggccgtatctccttgtcggcgccgctgattcccggctctgcggaggcctctaggcagccgcgcagcttccgtgtttgctgcgcccgcactgcgacgactcggaccgatg

SEQ ID NO: 13638 - DNA, 203 bp, synthetic construct
  source 1..203: mol_type = other DNA
ggcgcgccagtcctctcggccatcatcgtgcgtcagagtgagcccggatggggcggcgggcttcgggagcgcccgggctgatccgagccgagcgggccgtatctccttgtcggcgccgctgattcccggctcgtgtcgtatactgtggcagccgcgcagcttccgtgtttgctgcgcccgcactgcgacgactcggaccgatg

SEQ ID NO: 13639 - DNA, 203 bp, synthetic construct
  source 1..203: mol_type = other DNA
ggcgcgccagtcctgggtaaggtcatcgtgcgtcagagtgagcccggatggggcggcgggcttcgggagcgcccgggctgatccgagccgagcgggccgtatctccttgtcggcgccgctgattcccggctctgcggaggcctctactactgtaacatagttccgtgtttgctgcgcccgcactgcgacgactcggaccgatg

SEQ ID NO: 13640 - DNA, 203 bp, synthetic construct
  source 1..203: mol_type = other DNA
ggcgcgccagtcctatgagccctcatcgtgcgtcagagtgagcccggatggggcggcgggcttcgggagcgcccgggctgatccgagccgagcgggccgtatctccttgtcggcgccgctgattcccggctctgcggaggcctctaggcagccgcgcagccaggtctgcaataacgcccgcactgcgacgactcggaccgatg

SEQ ID NO: 13641 - DNA, 203 bp, synthetic construct
  source 1..203: mol_type = other DNA
ggcgcgccagtcctcgtgtcattcatcgtgcgtcagagtgagcccggatggggcggcgggcttcgggagcgcccgggctgatccgagccgagcgggccgtatctccttgtcggcgccgctgattcccggctctgcggaggcctctaggcagccgcgcagcttccgtgtttgctgcgcccgcactgcgacgactcggaccgatg

SEQ ID NO: 13642 - DNA, 203 bp, synthetic construct
  source 1..203: mol_type = other DNA
ggcgcgccagtccttccaccattcatcgtgcgtcagagtgagcccggatggggcggcgggcttcgggagcgcccgggctgatccgagccggcttatgtcctaagccttgtcggcgccgctgattcccggctctgcggaggcctctaggcagccgcgcagcttccgtgtttgctgcgcccgcactgcgacgactcggaccgatg

SEQ ID NO: 13643 - DNA, 203 bp, synthetic construct
  source 1..203: mol_type = other DNA
ggcgcgccagtccttgaccgaatcatgggttcggtggtggtggcgcttatcaatcgaaggcggcccaccacctcccagatagagcggcggcactgtagggaagaccggggaccggtcactaccaaggacgcagacctctttttgagtatcacgcctccggaagtagttgggcaagcccacctatatgtcgactcggaccgatg

SEQ ID NO: 13644 - DNA, 203 bp, synthetic construct
  source 1..203: mol_type = other DNA
ggcgcgccagtcctggaggcagtcatgggttcggtggtggtggcgctttaggcagcctccacgcccaccacctcccagatagagcggcggcactgtagggaagaccggggaccggtcactaccaaggacgcagacctctttttgagacgtggaggcgtacaagtagttgggcaagcccacctatatgtcgactcggaccgatg

SEQ ID NO: 13645 - DNA, 203 bp, synthetic construct
  source 1..203: mol_type = other DNA
ggcgcgccagtcctgcgtaatttcatgggttcggtggtggtggcgctttaggcagcctccacgcccaccacctcccagatagagcggcggcactgtagggaagattctactaaccgtgctaccaaggacgcagacctctttttgagtatcacgcctccggaagtagttgggcaagcccacctatatgtcgactcggaccgatg

SEQ ID NO: 13646 - DNA, 203 bp, synthetic construct
  source 1..203: mol_type = other DNA
ggcgcgccagtcctccgggccctcattcattcaacaaatacgaatgtgcagcggtgctggggtcatgatggctcggtgggcagcgaggggaaactttaatcaagggagcacagtgcggattctattctgaaagtcaagaagacatcatccggaatattgccaggcacctcgcccaggtcggggacagccgactcggaccgatg

SEQ ID NO: 13647 - DNA, 203 bp, synthetic construct
  source 1..203: mol_type = other DNA
ggcgcgccagtcctttcgtctgtcattcattcaacaaatacgaatgtgcagcggtgctggggtcatgatggctcggtgggcagcgaggggccgggccggctggaggagcacagtgcggattctattctgaaagtcaagaagacatcatccggaatattgccaggcacctcgccccatcttaacctcttcgactcggaccgatg

SEQ ID NO: 13648 - DNA, 203 bp, synthetic construct
  source 1..203: mol_type = other DNA
ggcgcgccagtccttatcatagtcattcattcaagcctactaggctaccagcggtgctggggtcatgatggctcggtgggcagcgaggggccgggccggctggaggagcacagtgcggattctattctgaaagtcaagaagacatcatccggaatattgccaggcacctcgcccaggtcggggacagccgactcggaccgatg

SEQ ID NO: 13649 - DNA, 203 bp, synthetic construct
  source 1..203: mol_type = other DNA
ggcgcgccagtcctgtgtgctatccacaggcctatgctgtgatatctggggctcctgctgctatagctggatttgcagctttactgcaaactgtgactggtgtgagcgctgttgctcaagtggggtatagatcaaccttatcggatgatcacaaagtttctactgttggtttatatcaacaaccaggacgactcggaccgatg

SEQ ID NO: 13650 - DNA, 203 bp, synthetic construct
  source 1..203: mol_type = other DNA
ggcgcgccagtcctacttaatgtccacaggcctatgctgtgatatctggggctcctgctgctatagctggatttgcagctttactgcaaactgtgactggtgtgagcgctgttgctcaagtggggtatagattttttagtgactgggatcacaaagtttctactgttggtttatcatccgtgtatccgcgactcggaccgatg

SEQ ID NO: 13651 - DNA, 203 bp, synthetic construct
  source 1..203: mol_type = other DNA
ggcgcgccagtcctgcatgtcgtccacaggcctatgctgtgatatctggggctcctgctgctccctaatccgactgagctttactgcaaactgtgactggtgtgagcgctgttgctcaagtggggtatagattttttagtgactgggatcacaaagtttctactgttggtttatatcaacaaccaggacgactcggaccgatg

SEQ ID NO: 13652 - DNA, 203 bp, synthetic construct
  source 1..203: mol_type = other DNA
ggcgcgccagtcctatctaacatccagacccacccctgggcggaactcctcggccaggtcctggagtcccgtaacacccttcccctggagccatgctgggccctagcccgggtccctcgccgggctccgcccacagcatgatggggcccagcccagggccgccctcagcaggacaccccatccccacccgactcggaccgatg

SEQ ID NO: 13653 - DNA, 203 bp, synthetic construct
  source 1..203: mol_type = other DNA
ggcgcgccagtcctttcgcgcgtccagacccacccctgggcggaactcctcggccaggtccttccccgggccctggcccttcccctggagccatgctgggccctagcccgggtccctcgccgggctccgcccacagcatgatggggaaggttatgtttttgccctcagcaggacaccccatccccacccgactcggaccgatg

SEQ ID NO: 13654 - DNA, 203 bp, synthetic construct
  source 1..203: mol_type = other DNA
ggcgcgccagtcctaactcctatccagacccacccctgggcggaactcctcggccaggtccttccccgggccctggcccttcccctggagccatgctgggccctagcccgggtccctcgccgggctccgcccacagcatgatggggcccagcccagggcctagacagcagtcgaaccccatccccacccgactcggaccgatg

SEQ ID NO: 13655 - DNA, 203 bp, synthetic construct
  source 1..203: mol_type = other DNA
ggcgcgccagtccttattaagttccagacccacccctgggcggaactcctcggccaggtccttccccgggccctggcccttcccctggagccatgctgggccctagcccgggtccctcttgtcaggggcgttacagcatgatggggcccagcccagggccgccctcagcaggacaccccatccccacccgactcggaccgatg

SEQ ID NO: 13656 - DNA, 203 bp, synthetic construct
  source 1..203: mol_type = other DNA
ggcgcgccagtcctcgataacgtccagacccacccctgggcggaactcctcggccaggtccttccccgggccctgggagacaagagacgtccatgctgggccctagcccgggtccctcgccgggctccgcccacagcatgatggggcccagcccagggccgccctcagcaggacaccccatccccacccgactcggaccgatg

SEQ ID NO: 13657 - DNA, 203 bp, synthetic construct
  source 1..203: mol_type = other DNA
ggcgcgccagtcctattggacctccatgatttttcatcatagtggaaagctgttctctgtgttaaaccaatcagttgcgaccttctcttaacagtgtgaagtgagggggtctctctccctccttctccttcctctgtgattcaccttcctttttaccctgccctgcggcggctccgccccttaccttccgactcggaccgatg

SEQ ID NO: 13658 - DNA, 203 bp, synthetic construct
  source 1..203: mol_type = other DNA
ggcgcgccagtcctaacattggtccatgattttttgaatctagactgggctgttctctgtgtagccgtcccatccggcgaccttctcttaacagtgtgaagtgagggggtctctctccctccttctccttcctctgtgattcaccttcctttttaccctgccctgcggcggctccgccccttaccttccgactcggaccgatg

SEQ ID NO: 13659 - DNA, 203 bp, synthetic construct
  source 1..203: mol_type = other DNA
ggcgcgccagtccttgttgtaatccatgattttttgaatctagactgggctgttctctgtgttaaaccaatcagttaattgtcaagtgacacagtgtgaagtgagggggtctctctccctccttctccttcctctgtgattcaccttcctttttaccctgccctgcggcggctccgccccttaccttccgactcggaccgatg

SEQ ID NO: 13660 - DNA, 203 bp, synthetic construct
  source 1..203: mol_type = other DNA
ggcgcgccagtcctggtttcggtccatgattttttgaatctagactgggctgttctctgtgttaaaccaatcagttgcgaccttctcttaacagtgtgaagtgaaatccggaaggaaactccttctccttcctctgtgattcaccttcctttttaccctgccctgcggcggctccgccccttaccttccgactcggaccgatg

SEQ ID NO: 13661 - DNA, 203 bp, synthetic construct
  source 1..203: mol_type = other DNA
ggcgcgccagtcctttattcggtccatgattttttgaatctagactgggctgttctctgtgttaaaccaatcagttgcgaccttctcttaacagtgtgaagtgagggggtctctctccctccttctccttccgagagaggcggaggtcctttttaccctgccctgcggcggctccgccccttaccttccgactcggaccgatg

SEQ ID NO: 13662 - DNA, 203 bp, synthetic construct
  source 1..203: mol_type = other DNA
ggcgcgccagtccttgttcgcatccatgattttttgaatctagactgggctgttctctgtgttaaaccaatcagttgcgaccttctcttaacagtgtgaagtgagggggtctctctccctccttctccttcctctgtgattcaccttcctttttaccctgccctgcggcggctccgccccttaccttccgactcggaccgatg

SEQ ID NO: 13663 - DNA, 203 bp, synthetic construct
  source 1..203: mol_type = other DNA
ggcgcgccagtccttcgagagatccatgattttttgaatctagactgggctgttctctgtgttaaaccaatcagttgcgaccttctcttaacagtgtgaagtgagggggtctctctccctccttctccttcctctgtgattcaccttcctttttaccctgccctgcggcggctctaatagcgcgggggcgactcggaccgatg

SEQ ID NO: 13664 - DNA, 203 bp, synthetic construct
  source 1..203: mol_type = other DNA
ggcgcgccagtcctgctacggttccatgattttttgaatctagactgggctgttctctgtgttaaaccaatcagttgcgaccttctcttaacagtgtgaagtgagggggtctctctccctccttctccttcctctgtgattcaccttcctttttaccctggggcaacttcataacgccccttaccttccgactcggaccgatg

SEQ ID NO: 13665 - DNA, 203 bp, synthetic construct
  source 1..203: mol_type = other DNA
ggcgcgccagtccttcattccttcccaactgctagtggctgagtccctggcggggcgcggcggtggaaggtgtcgcgtacgggcttcccgagctgacgtggcttcgcgacttgcttctgcagctggagcctcaggcggcagcgcttctagaaatgctgagccgattatcaggattagcaaatgttgttcgactcggaccgatg

SEQ ID NO: 13666 - DNA, 203 bp, synthetic construct
  source 1..203: mol_type = other DNA
ggcgcgccagtcctgtaaaccgtcccaactgctagtggctgagtccctggcggggcgcggcggtggaaggtgtcgcgtacgggcttcccgagctgacgtggcttgaattgggaggggggcagctggagcctcaggcggcagcgcttaggatccattgcttccgattatcaggattagcaaatgttgttcgactcggaccgatg

SEQ ID NO: 13667 - DNA, 203 bp, synthetic construct
  source 1..203: mol_type = other DNA
ggcgcgccagtcctcgttgctgtcccaactgctagtggctgagtccctggcggggcgcggcggtggaaggtgtcgcgtacgggcttcccgagctgacgtggcttgaattgggaggggggcagctggagcctcgctttcagcgtggcctagaaatgctgagccgattatcaggattagcaaatgttgttcgactcggaccgatg

SEQ ID NO: 13668 - DNA, 203 bp, synthetic construct
  source 1..203: mol_type = other DNA
ggcgcgccagtcctgagcggcatcccgtcggagtccggtctctagtagtgcagcttcggctggtgtcatcggtgtccttcctccgctgccgcccccgcaaggcttcgccgtcatcgaggccatttccagcgacttgtcgcacgcttttctatatacttcgttccccgccaaccgcaaccattgacgcccgactcggaccgatg

SEQ ID NO: 13669 - DNA, 203 bp, synthetic construct
  source 1..203: mol_type = other DNA
ggcgcgccagtcctggcatgtctccctagagcagacagtcaattgtagagcctgcactctcagaaatcagacttgagtggccggaacccttgagaccagaggcttaccatgctgctccctaggagggccaggaactgctgacgtgaccactggacagttattcgtgtctcttacaattaccaaacagacgactcggaccgatg

SEQ ID NO: 13670 - DNA, 203 bp, synthetic construct
  source 1..203: mol_type = other DNA
ggcgcgccagtccttgcgagtatccctagagcaggggtgtttgccagcagcctgcactctcagaaatcagacttgagtggccggaacccttgagaccagaggctacattgaaatacagctaggagggccaggaactgctgacgtgaccactggacagttattcgtgtctcttacaattaccaaacagacgactcggaccgatg

SEQ ID NO: 13671 - DNA, 203 bp, synthetic construct
  source 1..203: mol_type = other DNA
ggcgcgccagtcctagtcatcttccctagcttgactctcaacaaaaagccaccgacattaagagagagagtattgctgcttagttaactgcaggccctatttagggttaccgcccaggatctgcaacagcattcctgtatcatccagggcaccggtggacttggtgaggattgagttgacctcatcatcgactcggaccgatg

SEQ ID NO: 13672 - DNA, 203 bp, synthetic construct
  source 1..203: mol_type = other DNA
ggcgcgccagtcctaaccagattccctctccttacctgcgtcctcgggggcgtgcgcaccaccccccctcccgcctaggaggggggagggccccctcttggccaatcgtcggctacgatttaaactcccctggagactgcggctactgccaccgccttgcctccactgcctcttcgcgcagcacacagcgactcggaccgatg

SEQ ID NO: 13673 - DNA, 203 bp, synthetic construct
  source 1..203: mol_type = other DNA
ggcgcgccagtcctattccttctccctctccttacctgcgtcctcgggggcgtgcgcaccaccccccctcccgcctaggaggggggagggccccctcttggccaccgccttcgcggcctttaaactcccctgctatactgttactatgccaccgccttgcctccactgcctcttcgcgcagcacacagcgactcggaccgatg

SEQ ID NO: 13674 - DNA, 203 bp, synthetic construct
  source 1..203: mol_type = other DNA
ggcgcgccagtcctgttgcctctccctctccttacctgcgtcctcgggggcgtgcgcaccaccccccctcccgcctaggaggggggagggccccctcttggccaccgccttcgcggcctttaaactcccctggagactgcggcagtaagtaccgccttgcctccactgcctcttcgcgcagcacacagcgactcggaccgatg

SEQ ID NO: 13675 - DNA, 203 bp, synthetic construct
  source 1..203: mol_type = other DNA
ggcgcgccagtcctatgcattttccctctccttacctgcgtcctcgggggcgtgcgcaccaccccccctcccgcctaggaggggggagggccccctcttggccaccgccttcgcggcctttatgaggggctggagactgcggcagtaagtaccgccttgcctccactgcctcttcgcgcagcacacagcgactcggaccgatg

SEQ ID NO: 13676 - DNA, 203 bp, synthetic construct
  source 1..203: mol_type = other DNA
ggcgcgccagtcctttcggcactccctctccttacctgcgtcctcgggggcgtgcgcaccaccccccctcccgcctaggaggggggagggccccctcttggccaccgccttcgcggcctttatgaggggctggagactgcggctactgccaccgccttgcctccactgcctcttcgcgcagcacacagcgactcggaccgatg

SEQ ID NO: 13677 - DNA, 203 bp, synthetic construct
  source 1..203: mol_type = other DNA
ggcgcgccagtcctcattctcatccctctccttacctgcgtcctcgggggcgtgcgcaccaccccccctcccgcctaggaggggggagggtaaagaaccatgacccgccttcgcggcctttaaactcccctggagactgcggctactgccaccgccttgcctccactgcctcttcgcgcagcacacagcgactcggaccgatg

SEQ ID NO: 13678 - DNA, 203 bp, synthetic construct
  source 1..203: mol_type = other DNA
ggcgcgccagtccttgtaattatccctctccttacctgcgtcctcgggggcgtgcgcaccaccccccctcccgccttcatctatactttcccccctcttggccaccgccttcgcggcctttaaactcccctggagactgcggctactgccaccgccttgcctccactgcctcttcgcgcagcacacagcgactcggaccgatg

SEQ ID NO: 13679 - DNA, 203 bp, synthetic construct
  source 1..203: mol_type = other DNA
ggcgcgccagtcctcacagttctccctctccttacctgcgtcctcgggggcgtgcgcaccacgattggagaataaaaggaggggggagggccccctcttggccaccgccttcgcggcctttaaactcccctggagactgcggctactgccaccgccttgcctccactgcctcttcgcgcagcacacagcgactcggaccgatg

SEQ ID NO: 13680 - DNA, 203 bp, synthetic construct
  source 1..203: mol_type = other DNA
ggcgcgccagtcctacatctgctccctctccttagggagacaagatcaggcgtgcgcaccaccccccctcccgcctaggaggggggagggccccctcttggccaccgccttcgcggcctttaaactcccctggagactgcggctactgccaccgccttgcctccactgcctcttcgcgcagcacacagcgactcggaccgatg

SEQ ID NO: 13681 - DNA, 203 bp, synthetic construct
  source 1..203: mol_type = other DNA
ggcgcgccagtcctatgcttggtcccttacacatatgattatgtagcgtgcttattagtagtagatacatctaaatgtacaggacttaggataagttttgattatataagataggatgtgaaggctccgatttgtgaataggtttttatattcgaagtaggtagtattgcgcatactattaattccaccgactcggaccgatg

SEQ ID NO: 13682 - DNA, 203 bp, synthetic construct
  source 1..203: mol_type = other DNA
ggcgcgccagtcctgggcgcgttcccttacacatatgattatgtagcgtgcttattagtagtagatacatctaaattctacaacgacctaataagttttgattatataagataggatgtgaaggctccgatttgtgaataggttttggccaatcctcggcgtagtattgcgcatactattaattccaccgactcggaccgatg

SEQ ID NO: 13683 - DNA, 203 bp, synthetic construct
  source 1..203: mol_type = other DNA
ggcgcgccagtcctcgtacgattccgacctgggaccgacaatagacttgagcaatgtttgctgtcttccattggagtgactgaatttctacatgacggctttttgacaagacttaaaacctgtcttggatagagaatatttagccatttacctaaaaatggtattttttacatgcaatgcatgtggtgcgactcggaccgatg

SEQ ID NO: 13684 - DNA, 203 bp, synthetic construct
  source 1..203: mol_type = other DNA
ggcgcgccagtcctgcagtgagtccgacctgggaggctggggctcagagagcaatgtttgctgtcttccattggagatgaatctaccgcgcatgacggctttttgacaagacttaaaacctgtcttggatagagaatatttagccatttacctaaaaatggtattttttacatgcaatgcatgtggtgcgactcggaccgatg

SEQ ID NO: 13685 - DNA, 203 bp, synthetic construct
  source 1..203: mol_type = other DNA
ggcgcgccagtcctaacctccttccgatggcaatccaagcccttcacaagtctatacaacatccgagtacctatcacaacctccatctccatccaacacaacaaaccagtagtcattaaaaagcgtattatttaccctgcgtccctccaaatcaaccagaatcaaaatcaactctggggcaaataacacgactcggaccgatg

SEQ ID NO: 13686 - DNA, 203 bp, synthetic construct
  source 1..203: mol_type = other DNA
ggcgcgccagtcctattaggggtccggactcttcccgcaacccctccgagaggtccggtattcgcctcgaggcggcggcggccaccgagacagcagcgcaccttcccccatcccttccccttatcccccagcccaaaagggcccggtctgcgccccacccccgcccgtccgcccgctacgccgccgcccgactcggaccgatg

SEQ ID NO: 13687 - DNA, 203 bp, synthetic construct
  source 1..203: mol_type = other DNA
ggcgcgccagtcctagatatcatccggactcttcccgcaacccctccggctccctttccgcacgcctcgaggcggcggcggccaccgagacagcagcgcaccttcccccatcccttccccttatcccccagcccaaaagggcccggtctgcgccccacccccgcccgtccgcccgctacgccgccgcccgactcggaccgatg

SEQ ID NO: 13688 - DNA, 203 bp, synthetic construct
  source 1..203: mol_type = other DNA
ggcgcgccagtcctgctgagactccggactcttcccgcaacccctccggctccctttccgcacgcctcgaggcggcggcggccaccgagacagcagcgcaccttcccccatcccttccccttatcccccagcccaaaagggcccggtctgcgccccacccccgcccgtccgccctgcgtcggtaacggcgactcggaccgatg

SEQ ID NO: 13689 - DNA, 203 bp, synthetic construct
  source 1..203: mol_type = other DNA
ggcgcgccagtcctttcagccttccggactcttcccgcaacccctccggctccctttccgcacgcctcgaggcggcggcggccaccgagacagcagcgcaccttcccccatcccttccccttatcccccagcccaaaagggcccggtctgcgccccacccgaagtacaggataagctacgccgccgcccgactcggaccgatg

SEQ ID NO: 13690 - DNA, 203 bp, synthetic construct
  source 1..203: mol_type = other DNA
ggcgcgccagtcctcgcctacttccggactcttcccgcaacccctccggctccctttccgcacgcctcgaggcggcggcggccaccgagacagcagcgcaccttcccccatcccttccccttatcccccagctgttgccccataattctgcgccccacccccgcccgtccgcccgctacgccgccgcccgactcggaccgatg

SEQ ID NO: 13691 - DNA, 203 bp, synthetic construct
  source 1..203: mol_type = other DNA
ggcgcgccagtcctttcaaagttccggactcttcccgcaacccctccggctccctttccgcacgcctcgaggcggcggcggccaccgagagtttctacggttaacccccatcccttccccttatcccccagcccaaaagggcccggtctgcgccccacccccgcccgtccgcccgctacgccgccgcccgactcggaccgatg

SEQ ID NO: 13692 - DNA, 203 bp, synthetic construct
  source 1..203: mol_type = other DNA
ggcgcgccagtcctttggttgctccggactcttcccgcaacccctccggctccctttccgcatcaaggtctcgaaaggcggccaccgagacagcagcgcaccttcccccatcccttccccttatcccccagcccaaaagggcccggtctgcgccccacccccgcccgtccgcccgctacgccgccgcccgactcggaccgatg

SEQ ID NO: 13693 - DNA, 203 bp, synthetic construct
  source 1..203: mol_type = other DNA
ggcgcgccagtcctgcaccagttccgttgattagcctaattcccggtggaaaactcctgttgccgtttccctccaccggcctggagtctcccagtcttgtcccggcagtgccgccctccccactaagacctaggcgcaaaggcttggctcatggttgacagctcagagagagaaagatctgagggaagcgactcggaccgatg

SEQ ID NO: 13694 - DNA, 203 bp, synthetic construct
  source 1..203: mol_type = other DNA
ggcgcgccagtcctgacatcgatcctaagtggtcgactcaaccgttaccagtgtctctgagcttctggcaagtatgaggcaaggatttcacagaagaacttggagcaaaaattcccactgtcatagctataggctgtccagtcttgagggagctgcaggaacaggaaaaagagaccttcagagaagaccgactcggaccgatg

SEQ ID NO: 13695 - DNA, 203 bp, synthetic construct
  source 1..203: mol_type = other DNA
ggcgcgccagtcctctgaggcttcctaagtggtctggaacctaacctgcagtgtctctgagcttctggcaagtatgaggcaaggatttcacagaagaacttggagcaaaaattcccactgtcatagctataggctgtccagtcttgcttccaaccgcattacaggaaaaagagaccttcagagaagaccgactcggaccgatg

SEQ ID NO: 13696 - DNA, 203 bp, synthetic construct
  source 1..203: mol_type = other DNA
ggcgcgccagtcctccctcaagtcctcaaggtttagagacacacggtcactgcagctgaagccgctgcccctgctacagatgaagaaaaggaggctgggagagccaaggatcacgcagcaaggaagaaacagacccaggtgcagactcaggcaccaccaggaccagctgatcattccagcccacagcacgactcggaccgatg

SEQ ID NO: 13697 - DNA, 203 bp, synthetic construct
  source 1..203: mol_type = other DNA
ggcgcgccagtccttcccgaggtcctcagacccggcccggtcttcgcgcccggactcctggcatgccgtggttcaccactcaccgctctgacgggtgcagacgcgggagttgtcccagactgtggagtggcgggcacggccccagccccccttcccttccctgaccccttcttgccatcgccccagaccgactcggaccgatg

SEQ ID NO: 13698 - DNA, 203 bp, synthetic construct
  source 1..203: mol_type = other DNA
ggcgcgccagtccttctgcatttcctcagacccggcccggtcttcgcgcccggactcctggcgccagcgctaggcgcactcaccgctctgacgggtgcagacgcgggagttgtcccagactgtggagtggcgaagtgccagttttacccccttcccttccctgaccccttcttgccatcgccccagaccgactcggaccgatg

SEQ ID NO: 13699 - DNA, 203 bp, synthetic construct
  source 1..203: mol_type = other DNA
ggcgcgccagtccttggcgccgtcctcagacccggcccggtcttcgcgcccggactcctggcgccagcgctaggcgcactcaccgctctgacgggtgcagacgcgggagttgtcccagactgtggagtggcgggcacggccccagccccccttcccttccctgaccccttcttgccatcgccccagaccgactcggaccgatg

SEQ ID NO: 13700 - DNA, 203 bp, synthetic construct
  source 1..203: mol_type = other DNA
ggcgcgccagtcctaatccgagtcctcagacccggcccggtcttcgcgcccggactcctggcgccagcgctaggcgcactcaccgctctgacgggtgcagacgcgggagttgtcccagactgtggagtggcgggcacggccccagccccccttcccttccgaattgggaagagaccatcgccccagaccgactcggaccgatg

SEQ ID NO: 13701 - DNA, 203 bp, synthetic construct
  source 1..203: mol_type = other DNA
ggcgcgccagtcctcggcagcgtcctcagacccggcccggtcttcgcgcccggactcctggcgccagcgctaggcgcactcaccgctctgacgggtgcagacgcgggagttgtcccagactgtggagtggcgggcacggccccagcgtagagggtaacagctgaccccttcttgccatcgccccagaccgactcggaccgatg

SEQ ID NO: 13702 - DNA, 203 bp, synthetic construct
  source 1..203: mol_type = other DNA
ggcgcgccagtcctgtacgtaatcctcagacccggcccggtcttcgcgcccggactcctggcgccagcgctaggcgcactcaccgctctgacgggtgcagacgcgggagttgtcccagggatcatccccaatggcacggccccagccccccttcccttccctgaccccttcttgccatcgccccagaccgactcggaccgatg

SEQ ID NO: 13703 - DNA, 203 bp, synthetic construct
  source 1..203: mol_type = other DNA
ggcgcgccagtcctgttcatactcctcagacccggcccggtcttcgcgcccggactcctggcgccagcgctaggcgcactcaccgctctgcacttgaattttatgggagttgtcccagactgtggagtggcgggcacggccccagccccccttcccttccctgaccccttcttgccatcgccccagaccgactcggaccgatg

SEQ ID NO: 13704 - DNA, 203 bp, synthetic construct
  source 1..203: mol_type = other DNA
ggcgcgccagtcctcaaccacctcctcagacccggcccggtcttcgcggggtccactgcatggccagcgctaggcgcactcaccgctctgacgggtgcagacgcgggagttgtcccagactgtggagtggcgggcacggccccagccccccttcccttccctgaccccttcttgccatcgccccagaccgactcggaccgatg

SEQ ID NO: 13705 - DNA, 203 bp, synthetic construct
  source 1..203: mol_type = other DNA
ggcgcgccagtcctccttagagtcctggctgcggggcgagccgggcgtctgctgcagcggccgcggtggctgaggaggcccgagaggagtcggtggcagcggcggcggcgggaccggcagcagcagcagcagcagcagcagcagcaaccactagcctcctgccccgcggcgctgccgcacgagccccacgactcggaccgatg

SEQ ID NO: 13706 - DNA, 203 bp, synthetic construct
  source 1..203: mol_type = other DNA
ggcgcgccagtcctcactttcctcctggctgcggggcgagccgggcgtctgctgcagcggccgcggtggctgaggaggcccgagaggagtcggtggcagcggcggcggcgggaccggcccttaatatttttccagcagcagcagcaaccactagcctcctgccccgcggcgctgccgcacgagccccacgactcggaccgatg

SEQ ID NO: 13707 - DNA, 203 bp, synthetic construct
  source 1..203: mol_type = other DNA
ggcgcgccagtcctctggaaggtccttgaacttttggccgccatgtgcttcccgaaggtcctactgctcacgcaacagaagctgaaggcccgaatgcaccaggccatagaaagattttatgataaaatgcaaaatgcagaatcaggacgtggacaggacgacttcaaagagggctacctggagacagtcgactcggaccgatg

SEQ ID NO: 13708 - DNA, 203 bp, synthetic construct
  source 1..203: mol_type = other DNA
ggcgcgccagtcctgaagaaggtccttgaacttttggccgccatgtgcttcccgaaggtcctctctgatgacatgaagaagctgaaggcccgaatgcaccaggccatagaaagattttatgataaaatgcaaaatgcagaatcaggacgtggacaggacgacttcaaagagggctacctggagacagtcgactcggaccgatg

SEQ ID NO: 13709 - DNA, 203 bp, synthetic construct
  source 1..203: mol_type = other DNA
ggcgcgccagtccttggacccttcgcaagctcttaaatttgacaatggatgaaaaagtctttgttttgaaagattttatcagaagacaagtgcctgacatacctgaactgtcttatcagaaggaggcattactttctcaagtcgaagtaccaatggtcttaacagagggcttcaagctcctatcatgccgactcggaccgatg

SEQ ID NO: 13710 - DNA, 203 bp, synthetic construct
  source 1..203: mol_type = other DNA
ggcgcgccagtcctgtcgggagtcgcactttcaaaaggaacaagatatgtgctgaagtccagataacagccaagcaacctgaccaagaactaccaactctattctatagactaaaaagtcgccattttagttatataaaaatcaagttagaataagaattaaatcaatcaagaacgggacaaataaaacgactcggaccgatg

SEQ ID NO: 13711 - DNA, 203 bp, synthetic construct
  source 1..203: mol_type = other DNA
ggcgcgccagtcctcgaaaggatcgccgccacctccgcctcttcagtctcctggtcttcgtcctgctcgcgctgaccacctctcagggaaagggggggacataggggcgtcgcggggccccggcgaatgcgccccccgccgcctctcgggctgcgccgcctcgcggggatgaagcaccggccgtgaagcgactcggaccgatg

SEQ ID NO: 13712 - DNA, 203 bp, synthetic construct
  source 1..203: mol_type = other DNA
ggcgcgccagtccttgtccggttcgccgccacctccgcctcttcagtctcctggtcttcgtcgccgctctctctctcacctctcagggaaagggggggacatagacagtcaagtacctcccggcgaatgcgccccccgccgcctctcgggctgcgccgcctcgcggggatgaagcaccggccgtgaagcgactcggaccgatg

SEQ ID NO: 13713 - DNA, 203 bp, synthetic construct
  source 1..203: mol_type = other DNA
ggcgcgccagtcctggcgcatttcgccgccacctccgcctcttcagtctcctggtcttcgtcgccgctctctctctcacctctcagggaaagggggggacataggggcgtcgcggggccccggcgaatgcgccccccgccgcctctaaaatacacgtatttcgcggggatgaagcaccggccgtgaagcgactcggaccgatg

SEQ ID NO: 13714 - DNA, 203 bp, synthetic construct
  source 1..203: mol_type = other DNA
ggcgcgccagtcctccctgccgtcgccgccacctccgcctcttcagtctcctggtcttcgtcgccgctctctctctgcaacactcttatgagggggggacataggggcgtcgcggggccccggcgaatgcgccccccgccgcctctcgggctgcgccgcctcgcggggatgaagcaccggccgtgaagcgactcggaccgatg

SEQ ID NO: 13715 - DNA, 203 bp, synthetic construct
  source 1..203: mol_type = other DNA
ggcgcgccagtcctcttagttttcgcgcttcccctccctccggggctgggcctgccccggccgtcgcggagcctcccctcccaccgtccgtgagtgtacgcgcccggccgccgcctccaggcagcccggagcaacccggcgcccggccccgctgggcgcagcactccgtcggcgttattacacctaatcgactcggaccgatg

SEQ ID NO: 13716 - DNA, 203 bp, synthetic construct
  source 1..203: mol_type = other DNA
ggcgcgccagtcctgggttgcgtcgcgcttcccctccctccggggctgggcctgccccggccgtcgcggagcctcccctcccaccgtccgtgagtgtacgcgcccggccgccgcctccaggcagcccggagccgtatccgtatgatccccgctgggcgcagcactccgtcggcggcggcggcggcgcgcgactcggaccgatg

SEQ ID NO: 13717 - DNA, 203 bp, synthetic construct
  source 1..203: mol_type = other DNA
ggcgcgccagtcctgctagtattcggattaatactggaaacttctcctcccattcctgtgagggctacctgtgctactcaggctactcccgtggtggctcctcgtaccccagcaacctggtctacagcactgaacctttgatctcccagcacctgccagctgggttcctctctctgcaagggctttcacgactcggaccgatg

SEQ ID NO: 13718 - DNA, 203 bp, synthetic construct
  source 1..203: mol_type = other DNA
ggcgcgccagtcctgagacgaatcgtcacatcgtggtaaacaggctctgtatccgtggcagcggccgtggcaggctggctgggtaccggctgtcgctgacccaggagaagctgcctgtctacatcagcctgggctgcagcgcgctgccgccgcggggccggcagccatggccaaggacatcctgggtgcgactcggaccgatg

SEQ ID NO: 13719 - DNA, 203 bp, synthetic construct
  source 1..203: mol_type = other DNA
ggcgcgccagtcctggacttgatcgtccgcctaaacggttcgagagttaccgcgtctcttcctttctgggctcggacctaggtcgcggcgacatggccaaacgtaccaagaaagtcgggatcgtcggtaaatacgggacccgctatggggcctccctccggaaaatggtgaagaaaattgaaatcagccgactcggaccgatg

SEQ ID NO: 13720 - DNA, 203 bp, synthetic construct
  source 1..203: mol_type = other DNA
ggcgcgccagtcctaagcctcgtcgtccgcctaataccgcgcctgcgcaccgcgtctcttccggctgttcaagattcctaggtcgcggcgacatggccaaacgtaccaagaaagtcgggatcgtcggtaaatacgggacccgctatggggcctccctccggaaaatggtgaagaaaattgaaatcagccgactcggaccgatg

SEQ ID NO: 13721 - DNA, 203 bp, synthetic construct
  source 1..203: mol_type = other DNA
ggcgcgccagtcctcgtagggctcgtccgcctaataccgcgcctgcgcaccgcgtctcttcctttctgggctcggacctaggtcgcggcgacatggccaaacgtaccaagaaagtcgggatcgtcggtaaatacgggacccgctatggggcctccctccgaccgggatattgtgaaattgaaatcagccgactcggaccgatg

SEQ ID NO: 13722 - DNA, 203 bp, synthetic construct
  source 1..203: mol_type = other DNA
ggcgcgccagtcctgttggcattcgtccgcctaataccgcgcctgcgcaccgcgtctcttcctttctgggctcggacctaggtcgcggcgacatggccaaacgtaccaagaaagtcgggatcgtcggtaaatacgggacccgctatggggcctccctccggaaaatggtgaagagtgaaatgtggcttcgactcggaccgatg

SEQ ID NO: 13723 - DNA, 203 bp, synthetic construct
  source 1..203: mol_type = other DNA
ggcgcgccagtcctagtgaatttcgtccgcctaataccgcgcctgcgcaccgcgtctcttcctttctgggctcggacctaggtcgcggcgacatggccaaacgtaccaagaaagtcgggatcgtcggtaaatcgtcacgagcgagcggggcctccctccggaaaatggtgaagaaaattgaaatcagccgactcggaccgatg

SEQ ID NO: 13724 - DNA, 203 bp, synthetic construct
  source 1..203: mol_type = other DNA
ggcgcgccagtccttccgcgaatcgtccgcctaataccgcgcctgcgcaccgcgtctcttcctttctgggctcggagtccaacgagacttacatggccaaacgtaccaagaaagtcgggatcgtcggtaaatacgggacccgctatggggcctccctccggaaaatggtgaagaaaattgaaatcagccgactcggaccgatg

SEQ ID NO: 13725 - DNA, 203 bp, synthetic construct
  source 1..203: mol_type = other DNA
ggcgcgccagtcctacagccaatcgtccgcctaataccgcgcctgcgccataacctcgcctatttctgggctcggacctaggtcgcggcgacatggccaaacgtaccaagaaagtcgggatcgtcggtaaatacgggacccgctatggggcctccctccggaaaatggtgaagaaaattgaaatcagccgactcggaccgatg

SEQ ID NO: 13726 - DNA, 203 bp, synthetic construct
  source 1..203: mol_type = other DNA
ggcgcgccagtccttgagtgattcgttagtcagagtgggcggagccgcccgcgggcacctgctatagctcttccatccgcgtcgctgaggggtagcgatgcgggctccggggatgaggtcgcggccggcgggtcccgcgctgttgctgctgctgctcttcctcggagcggccgagtcggtgcgtcgggcgactcggaccgatg

SEQ ID NO: 13727 - DNA, 203 bp, synthetic construct
  source 1..203: mol_type = other DNA
ggcgcgccagtccttaaacaattcgttgaactacatgttgtaaggctttagagaaataagggagtgtcctatttaggatgaggtgctccggtggcagccccaccaaaacctctagcgactaggaacagctatatcgggttgctatagcagtcaggatgtcgcgtaaatcggtgtaaatacccaaacctcgactcggaccgatg

SEQ ID NO: 13728 - DNA, 203 bp, synthetic construct
  source 1..203: mol_type = other DNA
ggcgcgccagtcctaagaaatttcgttgaactacatgttgtaaggctttagagaaataagggagtgtcctatttaggatgaggtgctccggtggcagccccaccaaaacctctagcgactaggaacagctatgagcctggctgcgtgcagtcaggatgtcattctggcgttccgaaatacccaaacctcgactcggaccgatg

SEQ ID NO: 13729 - DNA, 203 bp, synthetic construct
  source 1..203: mol_type = other DNA
ggcgcgccagtcctggagtagttcgttgaactactatcgaacgcctgctagagaaataagggagtgtcctatttaggatgaggtgctccggtggcagccccaccaaaacctctagcgactaggaacagctatatcgggttgctatagcagtcaggatgtcattctggcgttccgaaatacccaaacctcgactcggaccgatg

SEQ ID NO: 13730 - DNA, 203 bp, synthetic construct
  source 1..203: mol_type = other DNA
ggcgcgccagtcctctgtgaagtctaatgcttagcgccgttcgcgctctgaccagcccgcagagccagcccccgaccccgggccacctgggcccccgggttccgccggcactctcgccaccaccgcgtgggtctgacaagatgtaccaggtcccactaccactggatcgggatgggaccctggtacggcgactcggaccgatg

SEQ ID NO: 13731 - DNA, 203 bp, synthetic construct
  source 1..203: mol_type = other DNA
ggcgcgccagtcctaggtattgtctcacaaggactgggtgaagagttctgcagccttacagagactggaaaagaagcccaaaccaaggcccccagagaggtcccccaggcccctttggaaagggaccgtgaggctggagatccggcgcaggagaccaacgcctgccatgctgttccggctctcagagccgactcggaccgatg

SEQ ID NO: 13732 - DNA, 203 bp, synthetic construct
  source 1..203: mol_type = other DNA
ggcgcgccagtcctttgcgctctctcacaaggactgggtgaagagttctgcagccttacagagactggaaaagaagcccaaaccaaggcccccagagaggtcccccaggcccctttgggtccctgagcctcagctggagatccggcattactctggcgaccctgccatgctgttccggctctcagagccgactcggaccgatg

SEQ ID NO: 13733 - DNA, 203 bp, synthetic construct
  source 1..203: mol_type = other DNA
ggcgcgccagtcctaagtgctctctcacaaggactgggtgaagagttctgcagccttacagagactggaaaagaagtattttgtctacggcccagagaggtcccccaggcccctttgggtccctgagcctcagctggagatccggcgcaggagaccaacgcctgccatgctgttccggctctcagagccgactcggaccgatg

SEQ ID NO: 13734 - DNA, 203 bp, synthetic construct
  source 1..203: mol_type = other DNA
ggcgcgccagtcctagatcacctctgacatggtgctgttcatggcggtagctagctggtagtcctccggcccctgaatgcggctaatcctaactgcggagcacatgctcacaaaccagtgggtggtgtgtcgtaacgggcaactctgcagcggaaccgactactttgggtgtccgtgtttccttttatcgactcggaccgatg

SEQ ID NO: 13735 - DNA, 203 bp, synthetic construct
  source 1..203: mol_type = other DNA
ggcgcgccagtccttcccaccttctgacatggtgtgaagagcctattgagctagctggtagtcctccggcccctgaatgcggctaatcctaactgcggagcacatgctcacaaaccagtgggtggtgtgtcgacgatccaggaaaagcagcggaaccgactactttgggtgtccgtgtttccttttatcgactcggaccgatg

SEQ ID NO: 13736 - DNA, 203 bp, synthetic construct
  source 1..203: mol_type = other DNA
ggcgcgccagtcctcggcgtgatctgacatggtgtgaagagcctattgagctagctggtagtcctccggcccctgaatgcggctaatcctgttaaaacttttgttgctcacaaaccagtgggtggtgtgtcgtaacgggcaactctgcagcggaaccgactactttgggtgtccgtgtttccttttatcgactcggaccgatg

SEQ ID NO: 13737 - DNA, 203 bp, synthetic construct
  source 1..203: mol_type = other DNA
ggcgcgccagtcctaacagagctctgctgccgccaccgcccactcttacccccgccgcttctcgactctgttgttagccgaagactcgcctctcagccgcccgccgcacagacgcacgagtaaaaagtgcagctccatcggctgatagaatagtcaacttgactctgggcggcaccgggcgtcccacgcgactcggaccgatg

SEQ ID NO: 13738 - DNA, 203 bp, synthetic construct
  source 1..203: mol_type = other DNA
ggcgcgccagtcctttgtatcgtctgctgccgccaccgcccactcttacccccgccgcttctcgactctgttgttagccgaagactcgcctctcagccgcccgccgcacagacgcacgagtaaaaagtgcagctccatcggctgatcctcgctaagctccgactctgggcggcaccgggcgtcccacgcgactcggaccgatg

SEQ ID NO: 13739 - DNA, 203 bp, synthetic construct
  source 1..203: mol_type = other DNA
ggcgcgccagtcctactatgactctgctgccgccaccgcccactcttacccccgccgcttctcgactctgttgttagccgaagactcgcctctcagccgcccgccgcacagacgcacgagtaaaaagtgcagctccatcggctgatcctcgctaagctcctgagggttctaagtccgggcgtcccacgcgactcggaccgatg

SEQ ID NO: 13740 - DNA, 203 bp, synthetic construct
  source 1..203: mol_type = other DNA
ggcgcgccagtcctcttgcgtttctgctgccgccaccgcccactcttacccccgccgcttctcgactctgttgttagccgaagactcgcctctcagccgcccgcgctggttggtataaagtaaaaagtgcagctccatcggctgatcctcgctaagctccgactctgggcggcaccgggcgtcccacgcgactcggaccgatg

SEQ ID NO: 13741 - DNA, 203 bp, synthetic construct
  source 1..203: mol_type = other DNA
ggcgcgccagtcctttagttcatctgctgccgccaccgcccactcttacccccgccgcttctgctaatcaaaacatgccgaagactcgcctctcagccgcccgccgcacagacgcacgagtaaaaagtgcagctccatcggctgatcctcgctaagctccgactctgggcggcaccgggcgtcccacgcgactcggaccgatg

SEQ ID NO: 13742 - DNA, 203 bp, synthetic construct
  source 1..203: mol_type = other DNA
ggcgcgccagtcctaatgagaatctgctgccgcctggataacacagatcccccgccgcttctcgactctgttgttagccgaagactcgcctctcagccgcccgccgcacagacgcacgagtaaaaagtgcagctccatcggctgatcctcgctaagctccgactctgggcggcaccgggcgtcccacgcgactcggaccgatg

SEQ ID NO: 13743 - DNA, 203 bp, synthetic construct
  source 1..203: mol_type = other DNA
ggcgcgccagtcctagttaagatcttgctttcgtaataaaattctgtacataaaagtcgaaagtattgctatagttttcagcaaaaacaactatttaggcatacttctcaggatggcgcgttgcagtccaacaagatccagggactgtacagaattttcctatacctcgagtcgggtttggaatctaacgactcggaccgatg

SEQ ID NO: 13744 - DNA, 203 bp, synthetic construct
  source 1..203: mol_type = other DNA
ggcgcgccagtcctgggtttgctctttcagatttggaactgtatctgtatggaaacaacagagttttcttgaagtacaactaaggacaggtcaccactaggcactaacatcgctgactcagcacccgccactgatggtctatctgatgctgaaaatgtctctagttttttgacaacggctaaataacccgactcggaccgatg

SEQ ID NO: 13745 - DNA, 203 bp, synthetic construct
  source 1..203: mol_type = other DNA
ggcgcgccagtcctttgcgtgttctttcagatttggaactgtatctgtatggaaacaacagagttttcttgaagtacaactaaggacaggtcaccactaggcactaacatcgctgacttgcatgattatggagatggtctatctgatgctgaaaatgtctggcccaccccaggtacggctaaataacccgactcggaccgatg

SEQ ID NO: 13746 - DNA, 203 bp, synthetic construct
  source 1..203: mol_type = other DNA
ggcgcgccagtccttcggcgtctctttcagatttggaactgtatctgtatggaaacaacagatcacaggattcagccaactaaggacaggtcaccactaggcactaacatcgctgacttgcatgattatggagatggtctatctgatgctgaaaatgtctctagttttttgacaacggctaaataacccgactcggaccgatg

SEQ ID NO: 13747 - DNA, 203 bp, synthetic construct
  source 1..203: mol_type = other DNA
ggcgcgccagtcctggatgctttctttcagatttggaactgtatctgttcatgcgaggttatgttttcttgaagtacaactaaggacaggtcaccactaggcactaacatcgctgacttgcatgattatggagatggtctatctgatgctgaaaatgtctctagttttttgacaacggctaaataacccgactcggaccgatg

SEQ ID NO: 13748 - DNA, 203 bp, synthetic construct
  source 1..203: mol_type = other DNA
ggcgcgccagtcctccttcctatgaaaatgccgtcggtttcgaaagcgaaatataacaatacgagcgggtcccccccgcagactgagaagccgacccactacaggtacctgaaggagttcaggacggagcagtgccccctgttttcacagcacaagtgcgcgcagcaccggccgttcacctgcttccacgactcggaccgatg

SEQ ID NO: 13749 - DNA, 203 bp, synthetic construct
  source 1..203: mol_type = other DNA
ggcgcgccagtcctgcgaaccctgaaaatgccgtcggtttcgaaagcggcggcagcggcgctgagcgggtcccccccgcagactgagaagccgacccactacaggtacctgaaggagttcaggacggagcagtgccccctgttttcacagcacaagtgcgcgcagcaccggccgacatgaccagatttcgactcggaccgatg

SEQ ID NO: 13750 - DNA, 203 bp, synthetic construct
  source 1..203: mol_type = other DNA
ggcgcgccagtcctgccgtccttgaaaatgccgtcggtttcgaaagcggcggcagcggcgctgagcgggtcccccccgcagactgagaagccgacccactacagtagaggttttcgcatcaggacggagcagtgccccctgttttcacagcacaagtgcgcgcagcaccggccgttcacctgcttccacgactcggaccgatg

SEQ ID NO: 13751 - DNA, 203 bp, synthetic construct
  source 1..203: mol_type = other DNA
ggcgcgccagtcctcaagcgattgaaaatgccgtcggtttcgaaagcggcggcagcggcgctgagcgggtcccccccgcagactgagaagggcgttgcaatgccgtacctgaaggagttcaggacggagcagtgccccctgttttcacagcacaagtgcgcgcagcaccggccgttcacctgcttccacgactcggaccgatg

SEQ ID NO: 13752 - DNA, 203 bp, synthetic construct
  source 1..203: mol_type = other DNA
ggcgcgccagtcctgcttgaggtgaaaatgccgtgttccgtctgccatgcggcagcggcgctgagcgggtcccccccgcagactgagaagccgacccactacaggtacctgaaggagttcaggacggagcagtgccccctgttttcacagcacaagtgcgcgcagcaccggccgttcacctgcttccacgactcggaccgatg

SEQ ID NO: 13753 - DNA, 203 bp, synthetic construct
  source 1..203: mol_type = other DNA
ggcgcgccagtcctcacatgtatgaaaccggaaactgcggagtgcgctgcgccgcccagccctgtcgccccccggaggtgatccctccctcctgcctgcccgccagcctgacctgtgcccggctcgcgggccgcagcctcggcccccgcgcgcccccggcagctctcggcgcgatgagcatagagacgcgactcggaccgatg

SEQ ID NO: 13754 - DNA, 203 bp, synthetic construct
  source 1..203: mol_type = other DNA
ggcgcgccagtcctcccttcgttgaagtagacttgggccaggccctgcctcgatcctcagctcgtcctccccgccccgcaccggccttcactctggagcggccccggcagccgcagcaggggcggcggcggcggatcgaggagctctccaggtcgtcccgggagaggctgctgcagtcccgggacaggcgactcggaccgatg

SEQ ID NO: 13755 - DNA, 203 bp, synthetic construct
  source 1..203: mol_type = other DNA
ggcgcgccagtcctgcctaagctgaattcattttaagtctaacgagacattctcaggaactccagaccttcctatttatgttgttttttgtattctatggaggaatcgtgtttggaaaccttcttattgtcataacagtggtatctgactcccaccttcactctcccatgtacttcctgctagccaaccgactcggaccgatg

SEQ ID NO: 13756 - DNA, 203 bp, synthetic construct
  source 1..203: mol_type = other DNA
ggcgcgccagtccttgctcaaatgaattcatttttctgggtctctctgattctcaggaactccagaccttcctattccgaagtagaaacctattctatggaggaatcgtgtttggaaaccttcttattgtcataacagtggtatctgactcccaccttcactctcccatgtacttcctgctagccaaccgactcggaccgatg

SEQ ID NO: 13757 - DNA, 203 bp, synthetic construct
  source 1..203: mol_type = other DNA
ggcgcgccagtccttgaatacgtgaattcatttttctgggtctctctgattctcaggaactccagaccttcctatttatgttgttttttggcccgacgcatcttatcgtgtttggaaaccttcttattgtcataacagtggtatctgactcccaccttcactctcccatgtacttcctgctagccaaccgactcggaccgatg

SEQ ID NO: 13758 - DNA, 203 bp, synthetic construct
  source 1..203: mol_type = other DNA
ggcgcgccagtccttcaactggtgaattcatttttctgggtctctctgattctcaggaactccagaccttcctatttatgttgttttttgtattctatggaggaatcgtgtttggaaaccttcttattgtcacggatagtcatagcgactcccaccttcactctcccatgtacttcctgctagccaaccgactcggaccgatg

SEQ ID NO: 13759 - DNA, 203 bp, synthetic construct
  source 1..203: mol_type = other DNA
ggcgcgccagtcctcaagtccctgaattcatttttctgggtctctctgattctcaggaactccagaccttcctatttatgttgttttttgtattctatggaggaatcgtgtttggaaaccttcttattgtcataacagtggtatctacgaaaaaccttcactctcccatgacagatttgctagccaaccgactcggaccgatg

SEQ ID NO: 13760 - DNA, 203 bp, synthetic construct
  source 1..203: mol_type = other DNA
ggcgcgccagtcctataaatcctgaattcatttttctgggtctctctgattctcaggaactccagaccttcctatttatgttgttttttgtattctatggaggaatcgtgtttggaaaccttcttattgtcataacagtggtatctttggtttctaactcctctcccatgtacttcctgctagccaaccgactcggaccgatg

SEQ ID NO: 13761 - DNA, 203 bp, synthetic construct
  source 1..203: mol_type = other DNA
ggcgcgccagtcctgcgttctgtgaattcatttttctgggtctctctgattctcaggaactcgcttttagagccggtatgttgttttttgtattctatggaggaatcgtgtttggaaaccttcttattgtcataacagtggtatctgactcccaccttcactctcccatgtacttcctgctagccaaccgactcggaccgatg

SEQ ID NO: 13762 - DNA, 203 bp, synthetic construct
  source 1..203: mol_type = other DNA
ggcgcgccagtcctgtcgatcctgaattcatttttctgggtctctctgattctcagggactccagaccttcctatttatgttgttttttgatcagagccattttatcgtgtttggaaaccttcttattgtcataacagtggtatctgactcccaccttcactctcccatgtacttcctgctagccaaccgactcggaccgatg

SEQ ID NO: 13763 - DNA, 203 bp, synthetic construct
  source 1..203: mol_type = other DNA
ggcgcgccagtcctgtctactttgaattcatttttctgggtctctctgattctcagggactccagaccttcctatttatgttgttttttgtattctatggaggaatcgtgtttggaaaaacgagcggatcagtaacagtggtatctgactcccaccttcactctcccatgtacttcctgctagccaaccgactcggaccgatg

SEQ ID NO: 13764 - DNA, 203 bp, synthetic construct
  source 1..203: mol_type = other DNA
ggcgcgccagtcctccaggctatgaattcatttttctgggtctctctgtgcgcacacggactcagaccttcctatttatgttgttttttgtattctatggaggaatcgtgtttggaaaccttcttattgtcataacagtggtatctgactcccaccttcactctcccatgtacttcctgctagccaaccgactcggaccgatg

SEQ ID NO: 13765 - DNA, 203 bp, synthetic construct
  source 1..203: mol_type = other DNA
ggcgcgccagtcctacgtcaggtgacatcgctaggaagcgcagcgagagaacgcgccaccgcggggcccgggtgcagctagcgaccctctcgccacctgcgcgcagcccgaggtgagcagtgagcggcgagcgggagggcagcgaggcgttcgcgggccccctcctgctgcccgggcccggcccgctccgactcggaccgatg

SEQ ID NO: 13766 - DNA, 203 bp, synthetic construct
  source 1..203: mol_type = other DNA
ggcgcgccagtcctcgtggaagtgacgcccaggtctcgggttagatcgtcaggtgagggaggaagggatagccagcgcgaaggaagtgctggagtcgtgtgttttggctgcgcgtgatcctgcgtgggtcgggaggtgtttctgtgaaaagcctaaagattagactgtaagaaaagaaaatagaagcccgactcggaccgatg

SEQ ID NO: 13767 - DNA, 203 bp, synthetic construct
  source 1..203: mol_type = other DNA
ggcgcgccagtcctggcggctctgacggaggcgccgctgccagggggcgtgcggcagcgcgggaataagccttaaagcggcggcggcggaggcggcggcggcggcggcggcggcggcggctgggcctcgagcgcccgcagcccacctctcgggggcgggctcccggcgctagcagggctgaagagaagcgactcggaccgatg

SEQ ID NO: 13768 - DNA, 203 bp, synthetic construct
  source 1..203: mol_type = other DNA
ggcgcgccagtcctattcgtagtgacttctcagggatgtaaccggacctggttcagtatccgggttgtcctgtattgttacggtgtatccgtcttggcacactgaaagggtatttttgggtaatcctttcctactgcctgatagggtggcgtgcccggccacgagagattaagggtagcaatttaaaccgactcggaccgatg

SEQ ID NO: 13769 - DNA, 203 bp, synthetic construct
  source 1..203: mol_type = other DNA
ggcgcgccagtcctgtaccgtttgaggaacactaatggtggcgacgcccgaggcaagctctggaaagcaacgccgagtctctgagaagagggagcataggctgtgctgatttaaaaacagaaaatgcaaagttggactgaaaatatcccacgtcttctaagcaatctgcttaaggcttccaaacttaccgactcggaccgatg

SEQ ID NO: 13770 - DNA, 203 bp, synthetic construct
  source 1..203: mol_type = other DNA
ggcgcgccagtcctcaacctaatgaggaacactaggctgttgtctagacgaggcaagctctggaaagcaacgccgagtctctgagaagagcagttcagtaactagctgatttaaaaacagaaaatgcaaagttggactgaaaatatcccacgtcttctaagcaatctgcttaaggcttccaaacttaccgactcggaccgatg

SEQ ID NO: 13771 - DNA, 203 bp, synthetic construct
  source 1..203: mol_type = other DNA
ggcgcgccagtccttcgtagcctgaggaacactaggctgttgtctagacgaggcaagctctggaaagcaacgccgagtctctgagaagagggagcataggctgtgctgatttaaaaacagaaaatgcaaagttggactgaaaatatatgcatgtcagccggcaatctgcttaaggcttccaaacttaccgactcggaccgatg

SEQ ID NO: 13772 - DNA, 203 bp, synthetic construct
  source 1..203: mol_type = other DNA
ggcgcgccagtcctctgccgggtgaggctcagctaattgacctcaagaaagcaatcatccgcagtgcaatttgatcaagaaacacccaattacactacactggtatgacactgtactaaccctgagggttttagaaaaaacgattaacgataaataagccgtggggtcttgtgttacctgaggcagcccgactcggaccgatg

SEQ ID NO: 13773 - DNA, 203 bp, synthetic construct
  source 1..203: mol_type = other DNA
ggcgcgccagtccttatccatgtgaggctcagctaattgacctcaagaaagcaatcatccgcagtgcaatttgatcgtcttggttgtccgtacactacactggtatgacactgtactaaccctgagggttttagaaaaaacgattaacgataaataagcccgaacactacacactacctgaggcagcccgactcggaccgatg

SEQ ID NO: 13774 - DNA, 203 bp, synthetic construct
  source 1..203: mol_type = other DNA
ggcgcgccagtccttaacacgttgaggtcctctccagcaagctacacaaagtatagatatttgtgcctaatgcaaaaagctatatttacacatttcaagagagggtgcacttgctggggggaggacatgggccgggaaggattggaagaccaaggacctccccctcctccccctccaggtctagtctacgactcggaccgatg

SEQ ID NO: 13775 - DNA, 203 bp, synthetic construct
  source 1..203: mol_type = other DNA
ggcgcgccagtcctagcgtgtttgagtaggttggattcgttaaactcacggacagaagcgctggtcggcgtctggcggttattgttcaaaactacaactccattttgacactttctcacttgtaccgatcttcagacgccctccttcttcatgagaatgatgccatccataagatctgtgcaaaactgcgactcggaccgatg

SEQ ID NO: 13776 - DNA, 203 bp, synthetic construct
  source 1..203: mol_type = other DNA
ggcgcgccagtccttacaggcatgagtaggttggtccgaagtttgaaccggacagaagcgctggtcggcgtctggcggttattgttcaaaactacaactccattttgacactttctcacttgtaccgatcttagtttctatgttgccttcatgagaatgatgccatccataagatctgtgcaaaactgcgactcggaccgatg

SEQ ID NO: 13777 - DNA, 203 bp, synthetic construct
  source 1..203: mol_type = other DNA
ggcgcgccagtcctcacgcctctgagtaggttggtccgaagtttgaaccggacagaagcgctggtcggcgtctggcggttattgttcaaaactacaactccattttgacactttctcacttgtaccgatcttcagacgccctccttcttcatgagaatgatgccatccataagaatccaaggccgggccgactcggaccgatg

SEQ ID NO: 13778 - DNA, 203 bp, synthetic construct
  source 1..203: mol_type = other DNA
ggcgcgccagtcctcataacgctgagtaggttggtccgaagtttgaaccggacagaagcgctggtcggcgtctggctaccgggtcaacccactacaactccattttgacactttctcacttgtaccgatcttcagacgccctccttcttcatgagaatgatgccatccataagatctgtgcaaaactgcgactcggaccgatg

SEQ ID NO: 13779 - DNA, 203 bp, synthetic construct
  source 1..203: mol_type = other DNA
ggcgcgccagtcctaccttacgtgagtaggttggtccgaagtttgaacgcacggctccttggggtcggcgtctggcggttattgttcaaaactacaactccattttgacactttctcacttgtaccgatcttcagacgccctccttcttcatgagaatgatgccatccataagatctgtgcaaaactgcgactcggaccgatg

SEQ ID NO: 13780 - DNA, 203 bp, synthetic construct
  source 1..203: mol_type = other DNA
ggcgcgccagtcctgcacaggatgatcccccagccaggggtccgcaacaacgtggtacgtgtcgaaactttgcccatagcagcgggcgggcactttgcactggaacttacaacacccgagcaaggacgcgactctcccgacgcggggaggctattctgcccatttggggacacttccccgccgctgcccgactcggaccgatg

SEQ ID NO: 13781 - DNA, 203 bp, synthetic construct
  source 1..203: mol_type = other DNA
ggcgcgccagtcctggcgggcatgatcccccagccaggggtccgcaacccttgccgcatccacgaaactttgcccatagcagcgggcgggcactttgcactggaacttacaacacccgagcaaggacgcgactctcccgacgcggggaggctattctgcccatttggggacactcgatgtggaacaaacgactcggaccgatg

SEQ ID NO: 13782 - DNA, 203 bp, synthetic construct
  source 1..203: mol_type = other DNA
ggcgcgccagtcctgttgggtatgatcccccagccaggggtccgcaacccttgccgcatccacgaaactttgcccatagcagcgggcgggcactttgcactggataggcactggggtcagcaaggacgcgactctcccgacgcggggaggctattctgcccatttggggacacttccccgccgctgcccgactcggaccgatg

SEQ ID NO: 13783 - DNA, 203 bp, synthetic construct
  source 1..203: mol_type = other DNA
ggcgcgccagtcctgcttaacatgatcccccagcggttatcgttggcgccttgccgcatccacgaaactttgcccatagcagcgggcgggcactttgcactggaacttacaacacccgagcaaggacgcgactctcccgacgcggggaggctattctgcccatttggggacacttccccgccgctgcccgactcggaccgatg

SEQ ID NO: 13784 - DNA, 203 bp, synthetic construct
  source 1..203: mol_type = other DNA
ggcgcgccagtcctctcgtgactgatcgttgagctaggggagagagcagttaaggcacacagagcaccagctccctcctgcctgaagatgttccaccaaatttgggcagctctgctctacttctatggtattatccttaactccatctaccagtgccctgagcacagtcaactgacaactctgggcgtcgactcggaccgatg

SEQ ID NO: 13785 - DNA, 203 bp, synthetic construct
  source 1..203: mol_type = other DNA
ggcgcgccagtcctcaatcatttgatggcgtcaaaagacgtcgttcctactgctgctagcagtgaaaatgctaacaacaatagtagtattaagtctcgtctattccaattggctttatgttcaggtggggctacgtccccacccaactcgataaagataaccaaccaagatatggctctggggctgatcgactcggaccgatg

SEQ ID NO: 13786 - DNA, 203 bp, synthetic construct
  source 1..203: mol_type = other DNA
ggcgcgccagtcctccacaccatgatggcgtcaaaagacgtcgttcctactgctgctagcagtgaaaatgctaacaacaatagtagtattaagtctcgtctattggcgagactcaagggttcaggtggggctacgtccccacccaactcgataaagataaccaaccaagatatggctctggggctgatcgactcggaccgatg

SEQ ID NO: 13787 - DNA, 203 bp, synthetic construct
  source 1..203: mol_type = other DNA
ggcgcgccagtcctctttattgtgatggcgtcaaaagacgtcgttcctactgctgctagcagtgaaaatgctaacaacaatagtagtattaagtctcgtctattggcgagactcaagggttcaggtggggctttcagtatgaattgctcgataaagataaccaaccaagatatggctctggggctgatcgactcggaccgatg

SEQ ID NO: 13788 - DNA, 203 bp, synthetic construct
  source 1..203: mol_type = other DNA
ggcgcgccagtcctgggaagcttgatggcgtcaaaagacgtcgttcctactgctgctagcagtgaaaatgctaacaacaatagtagtattaagtctcgtctattggcgagactcaaggtgaacatcacattaacgtccccacccaactcgataaagataaccaaccaagatatggctctggggctgatcgactcggaccgatg

SEQ ID NO: 13789 - DNA, 203 bp, synthetic construct
  source 1..203: mol_type = other DNA
ggcgcgccagtccttttcgtcctgcaaattagactccttgcggagctcgccgcctgattctaggctggtcacacgataaagcctgtgacgtttgcggcagccaggccgtcgacgatgcccagtgaaactctctgggaaattgcaaaagctgaagtggaaaaaaggggaattaatggaagtgaaggtgacgactcggaccgatg

SEQ ID NO: 13790 - DNA, 203 bp, synthetic construct
  source 1..203: mol_type = other DNA
ggcgcgccagtcctacgtaccgtgcaaggagacgccgccgccttcatgctgccggcgggctgacgcataaacacattggccgagctgcagggcgccctggacgcctgcgcacagcgacaattgcaattggagcagagcctgcgcgtttgccgtcggctgctgcatgcctgggaaccaactgggacccgcgactcggaccgatg

SEQ ID NO: 13791 - DNA, 203 bp, synthetic construct
  source 1..203: mol_type = other DNA
ggcgcgccagtcctctcaattatgcaaggagacgccgccgccttcatgctgccggcgggctgctcgcgccggctggtggccgagctgcagggcgccctggacgcaacgttgttcgttaaattgcaattggagcagagcctgcgcgtttgccgtcggctgctgcatgcctgggaaccaactgggacccgcgactcggaccgatg

SEQ ID NO: 13792 - DNA, 203 bp, synthetic construct
  source 1..203: mol_type = other DNA
ggcgcgccagtcctggccaaattgcaaggagacgccgccgccttcatgctgccggcgggctgctcgcgccggctggtggccgagctgcagggcgccctggacgcctgcgcacagcgacaattgcaattggagcagagcctgcgcgtttgccgtcggctgctgcatgcctgggaaccaactgggacccgcgactcggaccgatg

SEQ ID NO: 13793 - DNA, 203 bp, synthetic construct
  source 1..203: mol_type = other DNA
ggcgcgccagtcctttctgttgtgcaaggagacgccgccgccttcatgctgccggcgggctgctcgcgccggctggtggccgagctgcagggcgccctggacgcctgcgcacagcgacttggaatgcaaacccagagcctgcgcgtttgccgtcggctgctgcatgcctgggaaccaactgggacccgcgactcggaccgatg

SEQ ID NO: 13794 - DNA, 203 bp, synthetic construct
  source 1..203: mol_type = other DNA
ggcgcgccagtcctgtgtcgtctgcaaggagacgccgccgccttcatgctgtgcatctagtgctcgcgccggctggtggccgagctgcagggcgccctggacgcctgcgcacagcgacaattgcaattggagcagagcctgcgcgtttgccgtcggctgctgcatgcctgggaaccaactgggacccgcgactcggaccgatg

SEQ ID NO: 13795 - DNA, 203 bp, synthetic construct
  source 1..203: mol_type = other DNA
ggcgcgccagtcctgagatggctgcaattgaagtaggcacatgtcgaattgctactgttgaaggcctaacaacctctgaggcaattgctgctataggcctcactccacaggcctatgctgtgatatctggggctcctgctgctatagctggatttgcagctttactgcaaactgtgactggtgtgagccgactcggaccgatg

SEQ ID NO: 13796 - DNA, 203 bp, synthetic construct
  source 1..203: mol_type = other DNA
ggcgcgccagtcctgaggagtttgcaattgaagtgcaacttgcatctgagtgacgctcgcttggcctaacaacctctgaggcaattgctgctataggcctcactccacaggcctatgctgtgatatctggggctcctgctgctatagctggatttgcagctttactgcaaactgtgactggtgtgagccgactcggaccgatg

SEQ ID NO: 13797 - DNA, 203 bp, synthetic construct
  source 1..203: mol_type = other DNA
ggcgcgccagtccttgaagagttgcaattgaagtgcaacttgcatctgttgctactgttgaacagaatcagggaggtgaggcaattgctgctataggcctcactccacaggcctatgctgtgatatctggggctcctgctgctatagctggatttgcagctttactgcaaactgtgactggtgtgagccgactcggaccgatg

SEQ ID NO: 13798 - DNA, 203 bp, synthetic construct
  source 1..203: mol_type = other DNA
ggcgcgccagtccttacgcccttgcaattgaagtgcaacttgcatctgttgctactgttgaaggcctaacaacctctgaggcaattgctgctataggcctcactccacaggcctatgctgtgatatctggggctcctgctgctataatatccccgttttgtttactgcaaactgtgactggtgtgagccgactcggaccgatg

SEQ ID NO: 13799 - DNA, 203 bp, synthetic construct
  source 1..203: mol_type = other DNA
ggcgcgccagtcctagcacttgtgcaattgaagtgcaacttgcatctgttgctactgttgaaggcctaacaacctctgaggcaattgctgctataggcctcactccacaggcctatgctgtgatatctggggctcctgctgctatagctggatttgcagctttactgcaaactgtgactggtgtgagccgactcggaccgatg

SEQ ID NO: 13800 - DNA, 203 bp, synthetic construct
  source 1..203: mol_type = other DNA
ggcgcgccagtcctgcgcaacgtgcaattgaagtgcaacttgcatctgttgctactgttgaaggcctaacaacctctgaggcaattgctgctataggcctcactccacaggcctatgctgtgatatctgggggatggaagcggggggctggatttgcagctttactgcaaactgtgactggtgtgagccgactcggaccgatg

SEQ ID NO: 13801 - DNA, 203 bp, synthetic construct
  source 1..203: mol_type = other DNA
ggcgcgccagtcctaaggcatgtgcacactcggactgggtataaagcagctgaaatgtggagtttcctcccaggagctgagagcgtgtccatgggcccagtgcctggcgtgtcctccctgggagcttgctggacgcatgaccaggattctgggagggcagaggacagaccacaggcacccaggataaccgactcggaccgatg

SEQ ID NO: 13802 - DNA, 203 bp, synthetic construct
  source 1..203: mol_type = other DNA
ggcgcgccagtcctctaaggtatgcacagctaagacgtcgcgcttgcgcaggcgctcggcgctacccaacctacagagccaagatggcgcataggggttctccaggctgcagttggcgccttatcagtatctaagcggagtgttttggaaggagttaaggggctgtggcaaacgccctctccgccgtccgactcggaccgatg

SEQ ID NO: 13803 - DNA, 203 bp, synthetic construct
  source 1..203: mol_type = other DNA
ggcgcgccagtcctaacactactgcacagctaagacgtcgcgcttgcggtattagcaatgtgagaggcctgcgggaagccaagatggcgcataggggttctccaggctgcagttggcgccttatcagtatctaagcggagtgttttggaaggagttaaggggctgtggcaaacgccctctccgccgtccgactcggaccgatg

SEQ ID NO: 13804 - DNA, 203 bp, synthetic construct
  source 1..203: mol_type = other DNA
ggcgcgccagtcctccatacggtgcacagctaagtgcctcgaagccgacaggcgctcggcgcagaggcctgcgggaagccaagatggcgcataggggttctccaggctgcagttggcgccttatcagtatctaagcggagtgttttggaaggagttaaggggctgtggcaaacgccctctccgccgtccgactcggaccgatg

SEQ ID NO: 13805 - DNA, 203 bp, synthetic construct
  source 1..203: mol_type = other DNA
ggcgcgccagtcctcaattgtgtgcacttcagagcgggatgtaaccgccacgtggcattgccaacaaggagaagaactccttgcccagctgcaccgacccctagagccatgcactaacaaatgctattgtaagcgatgcagtttccattgccagctgtgtttctcgaaaaaggggctcggaatatcatcgactcggaccgatg

SEQ ID NO: 13806 - DNA, 203 bp, synthetic construct
  source 1..203: mol_type = other DNA
ggcgcgccagtcctatacatgatgcacttcagagcgggatgtaaccgctcaagaattggctaaacaaggagaagaaactaacagaatatagcaccgacccctagagccatgcactaacaaatgctattgtaagcgatgcagtttccattgccagctgtgtttctcgaaaaaggggctcggaatatcatcgactcggaccgatg

SEQ ID NO: 13807 - DNA, 203 bp, synthetic construct
  source 1..203: mol_type = other DNA
ggcgcgccagtcctcgtgcagttgcacttcagagcgggatgtaaccgctcaagaattggctaaacaaggagaagaactccttgcccagctgcaccgacccctagagccatgcactaacaaatgctattgtaagcgatgcagtttccattgccagctgtgtgaacaaccgcgctagctcggaatatcatcgactcggaccgatg

SEQ ID NO: 13808 - DNA, 203 bp, synthetic construct
  source 1..203: mol_type = other DNA
ggcgcgccagtccttagggcaatgcacttcagagcgggatgtaaccgctcaagaattggctaaacaaggagaagaactccttgcccagctttcgatcgtaaccaagccatgcactaacaaatgctattgtaagcgatgcagtttccattgccagctgtgtttctcgaaaaaggggctcggaatatcatcgactcggaccgatg

SEQ ID NO: 13809 - DNA, 203 bp, synthetic construct
  source 1..203: mol_type = other DNA
ggcgcgccagtcctatcacgcttgcacttcagaggccaggcaggtgaatcaagaattggctaaacaaggagaagaactccttgcccagctgcaccgacccctagagccatgcactaacaaatgctattgtaagcgatgcagtttccattgccagctgtgtttctcgaaaaaggggctcggaatatcatcgactcggaccgatg

SEQ ID NO: 13810 - DNA, 203 bp, synthetic construct
  source 1..203: mol_type = other DNA
ggcgcgccagtcctgtagaacttgcagcagcagctcttctggcctctcacgccatccaggggaccttgtcctaccctcttgtgtccgtcgtcagtgaatctctgactcgaaaaggtacagccgaagatagcatacttgctgttgccgttgtcattatcctgtttattatcttgctgggagttatcatgcgactcggaccgatg

SEQ ID NO: 13811 - DNA, 203 bp, synthetic construct
  source 1..203: mol_type = other DNA
ggcgcgccagtcctctaatgattgcagcagcagctcttctggcctctcacgccatccaggggaccttgtcctaccctcttgtgtccgtcgtcagtgaatctctgactcgaaaaggtactcagcttctctatcgtgcgatgcaacgtgttgtcattatcctgtttattatcttgctgggagttatcatgcgactcggaccgatg

SEQ ID NO: 13812 - DNA, 203 bp, synthetic construct
  source 1..203: mol_type = other DNA
ggcgcgccagtccttatctcgctgcagcagcagctcttctggcctctcacgccatccaggggaccttgtcctaccctcttgtgtccgtcgtcagtgaatctctgactcgaaaaggtactcagcttctctatctacttgctgttgccgttgtcattatcctgtttattatcttgccacactcatggtgacgactcggaccgatg

SEQ ID NO: 13813 - DNA, 203 bp, synthetic construct
  source 1..203: mol_type = other DNA
ggcgcgccagtccttttagctatgcagcagcagctcttctggcctctcacgccatccaggggaccttgtcctaccctcttgtgtccgtcgtcagtgaatctctgcagaagttgacacatcagcttctctatctacttgctgttgccgttgtcattatcctgtttattatcttgctgggagttatcatgcgactcggaccgatg

SEQ ID NO: 13814 - DNA, 203 bp, synthetic construct
  source 1..203: mol_type = other DNA
ggcgcgccagtccttgcctccatgcagcagcagctcttctggcctctcttttagatacttacaccttgtcctaccctcttgtgtccgtcgtcagtgaatctctgactcgaaaaggtactcagcttctctatctacttgctgttgccgttgtcattatcctgtttattatcttgctgggagttatcatgcgactcggaccgatg

SEQ ID NO: 13815 - DNA, 203 bp, synthetic construct
  source 1..203: mol_type = other DNA
ggcgcgccagtcctgaacgagctgcagtcaagttgaccaagaagcgggactcagttcgagagcctctgtcggatgccagcctggacctgcagacggttatccgcacctcacccagctccctcgtagctttcatcaactcgcgatgcacatctccaggaggctcctacggtcatctctccattggcacccgactcggaccgatg

SEQ ID NO: 13816 - DNA, 203 bp, synthetic construct
  source 1..203: mol_type = other DNA
ggcgcgccagtcctgaacctggtgcagtcaagttgaccaagaagcgggcactgtccatctcacctctgtcggatgccagcctggacctgcagacggttatccgcacctcacccagctccctcgtagctttcatcaactcgcgatgcacatctccaggaggctcctacggtcatcaggaagacttaggtcgactcggaccgatg

SEQ ID NO: 13817 - DNA, 203 bp, synthetic construct
  source 1..203: mol_type = other DNA
ggcgcgccagtccttgaaaccatgcagtcaagttgaccaagaagcgggcactgtccatctcacctctgtcggatgccagcctggacctgcagacggttatccgcacctcacccagctccctcgtagctttcatcaactcgcgatgcgaccgcagtatcccctcctacggtcatctctccattggcacccgactcggaccgatg

SEQ ID NO: 13818 - DNA, 203 bp, synthetic construct
  source 1..203: mol_type = other DNA
ggcgcgccagtcctgcagcctgtgcagtcaagttgaccaagaagcgggcactgtccatctcacctctgtcggatgccagcctggacctgcagacggttatccgcacctcacccagctcgtgatgccaccatttcaactcgcgatgcacatctccaggaggctcctacggtcatctctccattggcacccgactcggaccgatg

SEQ ID NO: 13819 - DNA, 203 bp, synthetic construct
  source 1..203: mol_type = other DNA
ggcgcgccagtccttgttatggtgcagtcaagttgaccaagaagcgggcactgtccatctcacctctgtcggatgccagcctggacctgcagacggttatccgcgatagcagtttgctcctcgtagctttcatcaactcgcgatgcacatctccaggaggctcctacggtcatctctccattggcacccgactcggaccgatg

SEQ ID NO: 13820 - DNA, 203 bp, synthetic construct
  source 1..203: mol_type = other DNA
ggcgcgccagtcctgtgatctctgcagtcaagttgaccaagaagcgggcactgtccatctcacctctgtcggatgccagcctggacctgcgcttctagtaatagacctcacccagctccctcgtagctttcatcaactcgcgatgcacatctccaggaggctcctacggtcatctctccattggcacccgactcggaccgatg

SEQ ID NO: 13821 - DNA, 203 bp, synthetic construct
  source 1..203: mol_type = other DNA
ggcgcgccagtcctgcccgtgatgcagtcaagttgaccaagaagcgggcactgtccatctcacctctgtcggatgcgccagcttgaggtaagacggttatccgcacctcacccagctccctcgtagctttcatcaactcgcgatgcacatctccaggaggctcctacggtcatctctccattggcacccgactcggaccgatg

SEQ ID NO: 13822 - DNA, 203 bp, synthetic construct
  source 1..203: mol_type = other DNA
ggcgcgccagtccttgccgacctgcagtctcctcaggccttattaggacacatagttagccctaggtgtgaatatcaagcaggacataacaaggtaggatctctacaatacttggcactagcagcattaataacaccaaaaaagataaagccacctttgcctagtgttacgaaactgacagaggatagcgactcggaccgatg

SEQ ID NO: 13823 - DNA, 203 bp, synthetic construct
  source 1..203: mol_type = other DNA
ggcgcgccagtccttttagacgtgcagtgcggagccatgtcagcaagaaggccccgcactcgatccacgctggctccctacggaggcccacctactcgaggcccaccgactcctactgcaatcagtactatgcgatcgtcctagagagtccattcagctgcacttccgcctcagtatggcatcacagccgactcggaccgatg

SEQ ID NO: 13824 - DNA, 203 bp, synthetic construct
  source 1..203: mol_type = other DNA
ggcgcgccagtcctaaacatactgcagtgcggagggggcgggaagtccaggccccgcactcgatccacgctggctcaacctctgttagtccctactcgaggcccaccgactcctactgcaatcagtactatgcgatcgtcctagagagtccattcagctgcacttccgcctcagtatggcatcacagccgactcggaccgatg

SEQ ID NO: 13825 - DNA, 203 bp, synthetic construct
  source 1..203: mol_type = other DNA
ggcgcgccagtcctgctctatatgcatactttttagagaaaccaaataattttttattgcatacccgtttttaataaaatacattgcataccctcttttaataaaaaatattgcatactttgacgaaacaaattttcgttgcatacccaataaaagattattatattgcatacctcgagactggccgccgactcggaccgatg

SEQ ID NO: 13826 - DNA, 203 bp, synthetic construct
  source 1..203: mol_type = other DNA
ggcgcgccagtcctccatgttttgccaggtaacgccaagccagccacccagggcgagtcatcgacccaaaaggtcagaccgtctcacacaaacaatcccaagtaaaggctctgacgtctccccctttttttaggaactgaaaccacggccctgacgtccctcccccctaggaacaggaacagctctcccgactcggaccgatg

SEQ ID NO: 13827 - DNA, 203 bp, synthetic construct
  source 1..203: mol_type = other DNA
ggcgcgccagtcctctcagagatgcccctgctctgcactctcaggacaaagttgctcttactccaaaaagatggacccaggtccgaaggggcactgccactgtggggggcatggccatcctccaggtcactgcgggccaccccctggccatggcccagggccctgcgggccacccccccaccatggtccgactcggaccgatg

SEQ ID NO: 13828 - DNA, 203 bp, synthetic construct
  source 1..203: mol_type = other DNA
ggcgcgccagtcctagtctacatgcccctgctctgcactctcaggtatcgagattctggctcccaaaaagatggacccaggtccgaaggggcactgccactgtggggggcatggccatcctccaggtcactgcgggccaccccctggccatggcccagggccctgcgggccacccccccaccatggtccgactcggaccgatg

SEQ ID NO: 13829 - DNA, 203 bp, synthetic construct
  source 1..203: mol_type = other DNA
ggcgcgccagtcctactgcccttgcccctgctctgcactctcaggtattccctgctctcctgaacaaaagatggacccaggtccgaaggggcactgccactgtggggggcatggccatcctccaggtcactgcgggccaccccctggccatggcccagggccctgcgggccacccccccaccatggtccgactcggaccgatg

SEQ ID NO: 13830 - DNA, 203 bp, synthetic construct
  source 1..203: mol_type = other DNA
ggcgcgccagtcctagcagctttgcccctgctctgcactctcaggtattccctgctcttactccaaaaagatggacccaggtccgaaggggcactgccactgtgatacctcgcctagacctccaggtcactgcgggccaccccctggccatggcccagggccctgcgggccacccccccaccatggtccgactcggaccgatg

SEQ ID NO: 13831 - DNA, 203 bp, synthetic construct
  source 1..203: mol_type = other DNA
ggcgcgccagtcctataaagtttgcccctgctctgcactctcaggtattccctgctcttactccaaaaagatggacccaggtccgaaggggcactgccactgtggggggcatggccatagaagtatctttgccgggccaccccctggccatggcccagggccctgcgggccacccccccaccatggtccgactcggaccgatg

SEQ ID NO: 13832 - DNA, 203 bp, synthetic construct
  source 1..203: mol_type = other DNA
ggcgcgccagtcctggacccattgcccctgctctgcactctcaggtattccctgctcttactccaaaaagatggacccaggtccgaaggggcactgccactgtggggggcatggccatcctccaggtcactgcgggccaccccctggccatggcccagggaaagctcctaggtgcccccaccatggtccgactcggaccgatg

SEQ ID NO: 13833 - DNA, 203 bp, synthetic construct
  source 1..203: mol_type = other DNA
ggcgcgccagtcctacttcgaatgccgccatgcaagggctgttctcacacggctactcactgcacgccatgaactcactcagcgccatgtacaacctgcaccagcaggcagcccagcaggcccagcatgcccccgactaccggccttcagtgcatgcgcttacattggctgagcgcctggctggctgtcgactcggaccgatg

SEQ ID NO: 13834 - DNA, 203 bp, synthetic construct
  source 1..203: mol_type = other DNA
ggcgcgccagtcctcaatgggttgccgccatgcagcactacggggtgaacggcacgattgtgcacgccatgaactcactcagcgccatgtacaacctgcaccagcaggcagcccagcaggcccagcatgcccccgactaccggccttcagtgcatgcgcttacattggctgagcgcctggctggctgtcgactcggaccgatg

SEQ ID NO: 13835 - DNA, 203 bp, synthetic construct
  source 1..203: mol_type = other DNA
ggcgcgccagtcctggatgggatgccgccatgcagcactacggggtgaacggctactcactgcacgccatgaactcactcagcgccatgtacaacctgcaccagcaggcagcccagcacttagtttcctaagccgactaccggccttcagtgcatgcgcttacattggctgagcgcctggctgacatccgactcggaccgatg

SEQ ID NO: 13836 - DNA, 203 bp, synthetic construct
  source 1..203: mol_type = other DNA
ggcgcgccagtcctacgctttctgccgccatgcagcactacggggtgaacggctactcactgcacgccatgaactcactcagcgccatgtacaacctgcaccagcaggcagcccagcaggcccagcatgcccccgactaccggccttcagtgcatgcgctgggtgcattgcgtagcctggctgacatccgactcggaccgatg

SEQ ID NO: 13837 - DNA, 203 bp, synthetic construct
  source 1..203: mol_type = other DNA
ggcgcgccagtcctagccagcatgccgccatgcagcactacggggtgaacggctactcactgcacgccatgaactcactcagcgccatgtacaacctgcaccagcaggcagcccagcaggcccagcatgcccccgactaccggccttcagtgcatgcgcttacattggctgagcagaaattctgggctcgactcggaccgatg

SEQ ID NO: 13838 - DNA, 203 bp, synthetic construct
  source 1..203: mol_type = other DNA
ggcgcgccagtcctaggtaacttgccgccatgcagcactacggggtgaacggctactcactgcacgccatgaactcactcagcgccatgtacaacctgcaccagcaggcagcccagcaggcccagcatgcccccgactaccggccttcagtgcatgcgcttacattggctgagcagtcacggtcagaccgactcggaccgatg

SEQ ID NO: 13839 - DNA, 203 bp, synthetic construct
  source 1..203: mol_type = other DNA
ggcgcgccagtccttaacgatatgccgccatgcagcactacggggtgaacggctactcactgcacgccatgaactcactcagcgccatgtacaacctgcaccagcaggcagcccagcaggcccagcatgccctatttgcagatttatcagtgcatgcgcttacattggctgagcgcctggctgacatccgactcggaccgatg

SEQ ID NO: 13840 - DNA, 203 bp, synthetic construct
  source 1..203: mol_type = other DNA
ggcgcgccagtcctacaagcgctgccgccatgcagcactacggggtgaacggctactcactgcacgccatgaactcactcagcgccatgtacaacctgcaccaggcaaattagtcagtggcccagcatgcccccgactaccggccttcagtgcatgcgcttacattggctgagcgcctggctggctgtcgactcggaccgatg

SEQ ID NO: 13841 - DNA, 203 bp, synthetic construct
  source 1..203: mol_type = other DNA
ggcgcgccagtccttctctgagtgccgccatgcagcactacggggtgaacggctactcactgcacgccatgaactccacagagaaggaaaacaacctgcaccagcaggcagcccagcaggcccagcatgcccccgactaccggccttcagtgcatgcgcttacattggctgagcgcctggctgacatccgactcggaccgatg

SEQ ID NO: 13842 - DNA, 203 bp, synthetic construct
  source 1..203: mol_type = other DNA
ggcgcgccagtccttagccgcctgccgccatgcagcactacggggtgaacggctactcactgcacgccatgaactcgagaccaaatcctcacaacctgcaccagcaggcagcccagcaggcccagcatgcccccgactaccggccttcagtgcatgcgcttacattggctgagcgcctggctggctgtcgactcggaccgatg

SEQ ID NO: 13843 - DNA, 203 bp, synthetic construct
  source 1..203: mol_type = other DNA
ggcgcgccagtcctcttactagtgccgccatgcagcactacggggtgaacggctactcactggtaaaggctccgcaactcagcgccatgtacaacctgcaccagcaggcagcccagcaggcccagcatgcccccgactaccggccttcagtgcatgcgcttacattggctgagcgcctggctggctgtcgactcggaccgatg

SEQ ID NO: 13844 - DNA, 203 bp, synthetic construct
  source 1..203: mol_type = other DNA
ggcgcgccagtcctcctggacatgccgccatgcagcactacggggtgatgcaactggtggcacacgccatgaactcactcagcgccatgtacaacctgcaccagcaggcagcccagcaggcccagcatgcccccgactaccggccttcagtgcatgcgcttacattggctgagcgcctggctggctgtcgactcggaccgatg

SEQ ID NO: 13845 - DNA, 203 bp, synthetic construct
  source 1..203: mol_type = other DNA
ggcgcgccagtcctagattcgttgccggttttgcgacccagcgagtgagggcgcacagccgggacgccgaggcggcgggcgggagacccgcaccagcgcagccggccctcggcgggacgtgacgcagcgcccggggcgcgggtgtatttgatatagtgtttgcaacaaattcgacccaggtgatcaaacgactcggaccgatg

SEQ ID NO: 13846 - DNA, 203 bp, synthetic construct
  source 1..203: mol_type = other DNA
ggcgcgccagtcctcaggtacatgcctgcacaccctatgggtgtgaagccaaacaatggacaaggtgtgaagagccccgtgtgctcgctttgagtcctccggcccctgaatgtggctaaccttaaccctgcagctagagcacgtaaatgtgcagcgcggcagtcgtaatgagcaattgcgggatgggacgactcggaccgatg

SEQ ID NO: 13847 - DNA, 203 bp, synthetic construct
  source 1..203: mol_type = other DNA
ggcgcgccagtcctggcacacgtgcctgcacaccctatgggtgtgaagccaaacaatggacaaggtgtgaagagccccgtgtgctcgctttgagtcctccggcccctgaatgtggctaaccttaaccctgcagctagagcacgtaacccaatgtgtatctgccacccgaccatcattgcgggatgggacgactcggaccgatg

SEQ ID NO: 13848 - DNA, 203 bp, synthetic construct
  source 1..203: mol_type = other DNA
ggcgcgccagtcctaacgcggctgcctgcacaccctatgggtgtgaagccaaacaatggacaaggtgtgaagagccccgtgtgctcgctttgagtcctccggcccctgaatgtggctagttcacgagtgtgtgctagagcacgtaacccaatgtgtatctagtcgtaatgagcaattgcgggatgggacgactcggaccgatg

SEQ ID NO: 13849 - DNA, 203 bp, synthetic construct
  source 1..203: mol_type = other DNA
ggcgcgccagtccttcgatcgttgcctgcacaccctatgggtgtgaagccaaacaatggacaaggtgtgaagagccccgtgtgctcgctttgagtcctccggccgacttggtgactggaccttaaccctgcagctagagcacgtaacccaatgtgtatctagtcgtaatgagcaattgcgggatgggacgactcggaccgatg

SEQ ID NO: 13850 - DNA, 203 bp, synthetic construct
  source 1..203: mol_type = other DNA
ggcgcgccagtccttctatgcttgcctgcacaccctatgggtgtgaagccaaacaatggacacaccaaatgtctagccgtgtgctcgctttgagtcctccggcccctgaatgtggctaaccttaaccctgcagctagagcacgtaacccaatgtgtatctagtcgtaatgagcaattgcgggatgggacgactcggaccgatg

SEQ ID NO: 13851 - DNA, 203 bp, synthetic construct
  source 1..203: mol_type = other DNA
ggcgcgccagtcctcccatttgtgcctgcacaccgccgtcaatgctgcccaaacaatggacaaggtgtgaagagccccgtgtgctcgctttgagtcctccggcccctgaatgtggctaaccttaaccctgcagctagagcacgtaacccaatgtgtatctagtcgtaatgagcaattgcgggatgggacgactcggaccgatg

SEQ ID NO: 13852 - DNA, 203 bp, synthetic construct
  source 1..203: mol_type = other DNA
ggcgcgccagtcctaatctttatgcctgccacttccggctcctgcgtcgctccggaagcctgactagattctctcacttggtaatccagattcggctaggaaaagacaagctttccagagaatgtttcagagaaagttacgtggagcgtgggcgtttcgcagactcctaagagaccttcagagaagaccgactcggaccgatg

SEQ ID NO: 13853 - DNA, 203 bp, synthetic construct
  source 1..203: mol_type = other DNA
ggcgcgccagtccttcagtgcctgcctgggcagagggaggtgacgcgcggtgtggggaaagcctttaacttggcctctggcagccgatttaacccgagcgagcaggtctttgctattttcatcatctgtagaaacgggagttgcgaggcggatgagtgactgcaggtcgtccttctgcatctattgagcgactcggaccgatg

SEQ ID NO: 13854 - DNA, 203 bp, synthetic construct
  source 1..203: mol_type = other DNA
ggcgcgccagtcctccgccatgtgcctgggcagagggaggtgacgcgcggtgtggggaaagcctttaacttggcctctggcagccgatttaacccgagcgagcaggtctttgctattttcatcatctgtagatggatatcacctccggcggatgagtgactgcaggtcgtccttggtggaaggaaccacgactcggaccgatg

SEQ ID NO: 13855 - DNA, 203 bp, synthetic construct
  source 1..203: mol_type = other DNA
ggcgcgccagtcctatacgtcttgcctgggcagagggaggtgacgcgcttcaccacagcctgctttaacttggcctctggcagccgatttaacccgagcgagcaggtctttgctattttcatcatctgtagaaacgggagttgcgaggcggatgagtgactgcaggtcgtccttggtggaaggaaccacgactcggaccgatg

SEQ ID NO: 13856 - DNA, 203 bp, synthetic construct
  source 1..203: mol_type = other DNA
ggcgcgccagtcctatggctcctgcctgggcagatatcccactgttttggtgtggggaaagcctttaacttggcctctggcagccgatttaacccgagcgagcaggtctttgctattttcatcatctgtagaaacgggagttgcgaggcggatgagtgactgcaggtcgtccttggtggaaggaaccacgactcggaccgatg

SEQ ID NO: 13857 - DNA, 203 bp, synthetic construct
  source 1..203: mol_type = other DNA
ggcgcgccagtccttgggcaactgcgcaccagaaatgcatcctgccttcctcacccaggactggtctgagagggattcatgatggaagcatgttcattctgtgacctggttctcgcctaaatgtggtcaacagtgtcagcagttcagaggacatcaagcccttaccagggcttcccgggattggaaaccgactcggaccgatg

SEQ ID NO: 13858 - DNA, 203 bp, synthetic construct
  source 1..203: mol_type = other DNA
ggcgcgccagtcctcaccacaatgcgcaccttccctgtaagagagcttgccagcagagagtgctctgagcactgaaactcagaggagagaatctgtctcccaggtctgctgatagacgtgggtgtgtattgaagaagaacaatctctaaacagagtcaactataactactaactccagagattaccagcgactcggaccgatg

SEQ ID NO: 13859 - DNA, 203 bp, synthetic construct
  source 1..203: mol_type = other DNA
ggcgcgccagtccttggcattctgcgcaccttccctgtaagagagcttgccagcagagagtgctctgagcactgaactgattctctagagatctgtctcccaggtctgctgatagacggtaacagaatcaccagaagaacaatctctaaacagagtcaactataactactaactccagagattaccagcgactcggaccgatg

SEQ ID NO: 13860 - DNA, 203 bp, synthetic construct
  source 1..203: mol_type = other DNA
ggcgcgccagtcctctcttctatgcgcaccttccgccgtcattcctaagccagcagagagtgctctgagcactgaaactcagaggagagaatctgtctcccaggtctgctgatagacggtaacagaatcaccagaagaacaatctctaaacagagtcaactataactactaactccagagattaccagcgactcggaccgatg

SEQ ID NO: 13861 - DNA, 203 bp, synthetic construct
  source 1..203: mol_type = other DNA
ggcgcgccagtcctccacttggtgcgccggagggagggtgggaatgtctgcacgtgggtctgggtgtgagctgtctgagagtctggatgtatggctgtggaagtccaggagcagtggccttgtttgccagcagccggatgcccgggcccactgggcgggcggcccaggaaaaaggggatgagcagactcgactcggaccgatg

SEQ ID NO: 13862 - DNA, 203 bp, synthetic construct
  source 1..203: mol_type = other DNA
ggcgcgccagtcctacgtcgcttgcgccggagggttaaaacagtctggtgcacgtgggtctgggtgtgagctgtctgagagtctggatgtatggctgtggaagtccaggagcagtggccttgtttgccagcagccggatgcccgggcccactgggcgggccagtggccgcctgcgggatgagcagactcgactcggaccgatg

SEQ ID NO: 13863 - DNA, 203 bp, synthetic construct
  source 1..203: mol_type = other DNA
ggcgcgccagtccttgtaagagtgcgcctgcccccaggctagcgtttggactgttttgttttccagtatgtacgaaggcaggaagattgcacaagtcagggggcgtttccaatcgggtgtcaattttggatctccccccccccacccccctttggatcttgtcgggctttccacgtttcacttaaaaacgactcggaccgatg

SEQ ID NO: 13864 - DNA, 203 bp, synthetic construct
  source 1..203: mol_type = other DNA
ggcgcgccagtcctagcgaaactgcgcctgcccccaggctagcgtttggactgttttgtttttggcggaactaccgggcaggaagattgcacaagtcagggggcgtttccaatcgggtgtcaattttggatcgggtaaaatggtggcccctttggatcttgtcgggctttccacgtttcacttaaaaacgactcggaccgatg

SEQ ID NO: 13865 - DNA, 203 bp, synthetic construct
  source 1..203: mol_type = other DNA
ggcgcgccagtcctcctagtgatgcgcctgcccccaggctagcgtttggactgttttgtttttggcggaactaccgggcaggaagattgcacaagtcagggggcgtttccaatcgggtgtcaattttggatctccccccccccacccccctttggatcttgtcgggctttccacaggattggagcggccgactcggaccgatg

SEQ ID NO: 13866 - DNA, 203 bp, synthetic construct
  source 1..203: mol_type = other DNA
ggcgcgccagtcctccaccctttgcgcctgcccccaggctagcgtttggactgttttgtttttggcggaactaccgggcaggaagattgcacaagtcagggggcgtttccaatcgggtgtcaattttggatctccccccccccacccccctttggatcttgtcgggctttccacgtttcacttaaaaacgactcggaccgatg

SEQ ID NO: 13867 - DNA, 203 bp, synthetic construct
  source 1..203: mol_type = other DNA
ggcgcgccagtcctaacaacgttgcgcctgcccccaggctagcgtttggactgttttgtttttggcggaactaccgggcaggaagattgcacaagtcagggggcgtttccaatcgggttaagtgaaatagcttccccccccccacccccctttggatcttgtcgggctttccacgtttcacttaaaaacgactcggaccgatg

SEQ ID NO: 13868 - DNA, 203 bp, synthetic construct
  source 1..203: mol_type = other DNA
ggcgcgccagtcctgcatcgattgcggtgcggagactccatgaggcccctcggcgagcttgtctgagtggaggcggcgggcgcaggactcgggtggaagggggccagcttgggggcgaggagtggacccgccacgggagctttgtcaataagcccacgcggggctggctgcatcccaacgacaaagtccgactcggaccgatg

SEQ ID NO: 13869 - DNA, 203 bp, synthetic construct
  source 1..203: mol_type = other DNA
ggcgcgccagtccttccactcctgcggtgcggagactccatgaggccctggacatgaacaagctgagtggaggcggcgggcgcaggactcgggtggaagggggccagcttgggggcgaacgtgcttagttatacgggagctttgtcaataagcccacgcggggctggctgcatcccaacgacaaagtccgactcggaccgatg

SEQ ID NO: 13870 - DNA, 203 bp, synthetic construct
  source 1..203: mol_type = other DNA
ggcgcgccagtccttaacagcatgcggtgcggagactccatgaggccctggacatgaacaagctgagtggaggcggcgggcgcaggactcgggtggaagggggccagcttgggggcgaggagtggacccgccacgggagctttgtcaataagcccacgcgacttcctgcttcagccaacgacaaagtccgactcggaccgatg

SEQ ID NO: 13871 - DNA, 203 bp, synthetic construct
  source 1..203: mol_type = other DNA
ggcgcgccagtcctttccctggtgcggtgcggagactccatgaggccctggacatgaacaagctgagtggaggcggcgggcgcaggactcgggtggaagggggcttatccaatcctagggagtggacccgccacgggagctttgtcaataagcccacgcggggctggctgcatcccaacgacaaagtccgactcggaccgatg

SEQ ID NO: 13872 - DNA, 203 bp, synthetic construct
  source 1..203: mol_type = other DNA
ggcgcgccagtcctgtaagcgttgcggtgcggagactccatgaggccctggacatgaacaagggacaatctaagttcgggcgcaggactcgggtggaagggggccagcttgggggcgaggagtggacccgccacgggagctttgtcaataagcccacgcggggctggctgcatcccaacgacaaagtccgactcggaccgatg

SEQ ID NO: 13873 - DNA, 203 bp, synthetic construct
  source 1..203: mol_type = other DNA
ggcgcgccagtcctggccacggtgcgtcgccctcggatccgaaacgcaggccaactcgaccacagatgctctgaacgttcttctcatcatcgtggatgacctgcagggtcgagatccttgttatggggataagctggtgaggtccccaaatattgaccaactggcatcccacagcctcctcttccagacgactcggaccgatg

SEQ ID NO: 13874 - DNA, 203 bp, synthetic construct
  source 1..203: mol_type = other DNA
ggcgcgccagtcctccggtgtatgcgtcgccctcggatccgaaacgcaggccaactcgaccacagatgctctgaacgttcttctcatcatcgtggatgacctgcgcccctccctgggcgtaacattaatattgctggtgaggtccccaaatattgaccaactggcatcccacagcctcctcttccagacgactcggaccgatg

SEQ ID NO: 13875 - DNA, 203 bp, synthetic construct
  source 1..203: mol_type = other DNA
ggcgcgccagtcctgggcatcatgcgtcgccctcggatccgaaacgcaggccaactcgaccacagatgctctgaacgttcttctcatcatcgtggatgacctgcgcccctccctgggctgttatggggataacacacctctcgtatcaaatattgaccaactggcatcccacagcctcctcttccagacgactcggaccgatg

SEQ ID NO: 13876 - DNA, 203 bp, synthetic construct
  source 1..203: mol_type = other DNA
ggcgcgccagtccttaccgcagtgcgtcgccctcggatccgaaacgcaggccaactcgaccacagatgctctgaacgttcttctcatcatcgtggatgacctgcgcccctccctgggctgttatggggataagctggtgaggtccccaaatattgaccaaaacctgagtacttacctcctcttccagacgactcggaccgatg

SEQ ID NO: 13877 - DNA, 203 bp, synthetic construct
  source 1..203: mol_type = other DNA
ggcgcgccagtcctttgacgcatgcgtcgccctcggatccgaaacgcattgtcgtggtttagcagatgctctgaacgttcttctcatcatcgtggatgacctgcgcccctccctgggctgttatggggataagctggtgaggtccccaaatattgaccaactggcatcccacagcctcctcttccagacgactcggaccgatg

SEQ ID NO: 13878 - DNA, 203 bp, synthetic construct
  source 1..203: mol_type = other DNA
ggcgcgccagtccttgcaccggtgctaatatctggagagagagccgccgcgccggagcctccttctttcctgcctctgattccgggctgtcatggcgacccccaacaatctgacccccaccaactgcagctggtggcccatctccgcgctggagagcgatgcggccaagccagcggaggcccccgacgcgactcggaccgatg

SEQ ID NO: 13879 - DNA, 203 bp, synthetic construct
  source 1..203: mol_type = other DNA
ggcgcgccagtcctacttgggttgctactcctgtcgcgatgaaccacgagtttcattgtggtataaatggaatagcaggtgttgtcaggtacaaggtttgtagcttgccaatatgttcattaccaacactgcagattcccattgagttggtgggggttttgttacctttgttttttttctcagcaaaacgactcggaccgatg

SEQ ID NO: 13880 - DNA, 203 bp, synthetic construct
  source 1..203: mol_type = other DNA
ggcgcgccagtcctcgacacagtgctactcctgtgataggtttatcttagtttcattgtggtataaatggaatagcaggtgttgtcaggtacaaggtttgtagccctgtggataccggattaccaacactgcagattcccattgagttggtgggggttttgttacctttgttttttttctcagcaaaacgactcggaccgatg

SEQ ID NO: 13881 - DNA, 203 bp, synthetic construct
  source 1..203: mol_type = other DNA
ggcgcgccagtcctgcgcccagtgctactcctgtgataggtttatcttagtttcattgtggtataaatggaatagcaggtgttgtcaggtacaaggtttgtagcttgccaatatgttcattaccaacactgcagattcccattgagttggtgggggttttgttacctttgttttcacctcagctcgggcgactcggaccgatg

SEQ ID NO: 13882 - DNA, 203 bp, synthetic construct
  source 1..203: mol_type = other DNA
ggcgcgccagtcctcgcgtggatgctactcctgtgataggtttatcttcccacggccacataataaatggaatagcaggtgttgtcaggtacaaggtttgtagcttgccaatatgttcattaccaacactgcagattcccattgagttggtgggggttttgttacctttgttttttttctcagcaaaacgactcggaccgatg

SEQ ID NO: 13883 - DNA, 203 bp, synthetic construct
  source 1..203: mol_type = other DNA
ggcgcgccagtcctgatgccagtgctactgcccccggtggcgaaaaacgggaacagcggggcaaacagtgagtggggttcagcgtagactctggaccaggagaggcccgcggtgaccgaggcctgggccccggaaaccaatagagccatggcgactccctctgctgccttcgaggcccttatgaatggcgactcggaccgatg

SEQ ID NO: 13884 - DNA, 203 bp, synthetic construct
  source 1..203: mol_type = other DNA
ggcgcgccagtcctcaccctcttgctactgccccgaacccgcgctgcaaaagggttaccctaaaacagtgagtggggttcagcgtagactctggaccaggagaggcccgcggtgaccgaggcctgggccccggaaaccaatagagccatggcgactccctctgctgccttcgaggcccttatgaatggcgactcggaccgatg

SEQ ID NO: 13885 - DNA, 203 bp, synthetic construct
  source 1..203: mol_type = other DNA
ggcgcgccagtcctcccgagcttgcttcaacacccaggccaggtctctgcctcggaagaagaaggtgtcaaccaattccagaacaagcacctctgccaccggatgtcctctgcgctggaatcagtcactgtcagcgacagacccctcggggtgtccatcacaaaagccgaggtagcccctgaagaagacgactcggaccgatg

SEQ ID NO: 13886 - DNA, 203 bp, synthetic construct
  source 1..203: mol_type = other DNA
ggcgcgccagtcctctatgccttgcttcaacacccaggccaggtctctgcctcggaagaagagctgaggtttgccatccagaacaagcacctctgccaccggatgtcctctgcgctggaatcagtcactgtcagcgacagaccccttctaaacgttcattcaaaagccgaggtagcccctgaagaagacgactcggaccgatg

SEQ ID NO: 13887 - DNA, 203 bp, synthetic construct
  source 1..203: mol_type = other DNA
ggcgcgccagtcctatgtgagatgcttcaacaccgccaaatacgaatagcctcggaagaagagctgaggtttgccatccagaacaagcacctctgccaccggatgtcctctgcgctggaatcagtcactgtcagcgacagacccctcggggtgtccatcacaaaagccgaggtagcccctgaagaagacgactcggaccgatg

SEQ ID NO: 13888 - DNA, 203 bp, synthetic construct
  source 1..203: mol_type = other DNA
ggcgcgccagtcctctttggcgtggagtcaggaactaaagaatagtgctgttagcttgctcaatgccacagccatagcagtagctgagggcgggatcttccacttagaagtagtacaaggagcttgtagagctattcgccacatacctagaagaataagacagggcttggaaaggattttgctataagcgactcggaccgatg

SEQ ID NO: 13889 - DNA, 203 bp, synthetic construct
  source 1..203: mol_type = other DNA
ggcgcgccagtcctaattcgtttggagtcaggaagatgcttccctatgtgttagcttgctcaatgccacagccatagcagtagctgaggggacagatagggttatagaagtagtacaaggagcttgtagagctattcgccacatacctagaagaataagacagggcttggaaaggattttgctataagcgactcggaccgatg

SEQ ID NO: 13890 - DNA, 203 bp, synthetic construct
  source 1..203: mol_type = other DNA
ggcgcgccagtcctctatagcctggataattttccgtgaaactggatgatctttgaatattaaatgaaaggagactagaataacagtctcttgactattcatgagtactaaagtctgagagcattctttcttggtgtgcaaatcacgcctggcagcccctgcccacagtacccgaagatggcaggcctcgactcggaccgatg

SEQ ID NO: 13891 - DNA, 203 bp, synthetic construct
  source 1..203: mol_type = other DNA
ggcgcgccagtcctatagtgcttggatcctaggcgattttggttacgcccggcgccgtgggcttttctgtttggacaacatcaaaaacatccattgcacaatggggcagttcattagcttcatgcaagaaataccaacctttttgcaggaggctctgaacattgctcttgttgcagtcagtctcattgcgactcggaccgatg

SEQ ID NO: 13892 - DNA, 203 bp, synthetic construct
  source 1..203: mol_type = other DNA
ggcgcgccagtcctatcgggtctggatcctaggcgattttggttacgctataattgtaactgttttctgtttggacaacatcaaaaacatccattgcacaatggggcagttcattagcccatctaggttgggaccaacctttttgcaggaggctctgaacattgctcttgttgcagtcagtctcattgcgactcggaccgatg

SEQ ID NO: 13893 - DNA, 203 bp, synthetic construct
  source 1..203: mol_type = other DNA
ggcgcgccagtcctcctggcgttggatcctaggcgattttggttacgctataattgtaactgttttctgtttggacaacatcaaaaacatccattgcacaatggggcagttcattagcttcatgcaagaaataccaacctttttgctaacccaaagtggtattgctcttgttgcagtcagtctcattgcgactcggaccgatg

SEQ ID NO: 13894 - DNA, 203 bp, synthetic construct
  source 1..203: mol_type = other DNA
ggcgcgccagtcctaccggtgctggatcctaggcgtaactagatcaagttttgctgagtaaaattttaaacacattgagtatccgtgcaagacagcgcagagctccccacaatgggcaactgcaataagcctcccaagaggcctcccaacacacaaacatataggtgaagcgagtcagcagagttcagcgactcggaccgatg

SEQ ID NO: 13895 - DNA, 203 bp, synthetic construct
  source 1..203: mol_type = other DNA
ggcgcgccagtcctgttgtaactggatcctaggcgtaactagatcaagttttgctgagtaaaattttaaacacattgagtatccgtgcaagacagcgcagagctccccacaatgggcaactgcaataagcctcccaagaggcctcccaacacacaaacatcatccaaccaaccctcagcagagttcagcgactcggaccgatg

SEQ ID NO: 13896 - DNA, 203 bp, synthetic construct
  source 1..203: mol_type = other DNA
ggcgcgccagtcctatggtgagtggatcctaggcgtaactagatcaagttttgctgagtaaaattttaaacacattgagtatccgtgcaagacagcgcagagctccccacaatgggcacgcagtcatccgtacccaagaggcctcccaacacacaaacatcatccaaccaaccctcagcagagttcagcgactcggaccgatg

SEQ ID NO: 13897 - DNA, 203 bp, synthetic construct
  source 1..203: mol_type = other DNA
ggcgcgccagtcctgggctccctggatcctaggcgtaactagatcaagttttgctgagtaaaattttaaacacattgagtatccgtgcaagacagcgcagagctttgactgtgatcatactgcaataagcctcccaagaggcctcccaacacacaaacatcatccaaccaaccctcagcagagttcagcgactcggaccgatg

SEQ ID NO: 13898 - DNA, 203 bp, synthetic construct
  source 1..203: mol_type = other DNA
ggcgcgccagtcctgcccgctttggcacaaagggactgttttcttactcttagtctgagtgactgccaaggaaggcaaaggtagagcaactggatctctggctctccacatagcttctgatctcagaccttactaaaatgctttctgggcccaaggacaaagctcacatgaacatcaacaaagccaaacgactcggaccgatg

SEQ ID NO: 13899 - DNA, 203 bp, synthetic construct
  source 1..203: mol_type = other DNA
ggcgcgccagtccttgaccgaatggcacaaagggactgttttcttactcttagtctgagtgactgccaaggaaggcaaaggtagagcaactggatctctggctctccacatagcttctgatctcagaccttactaaaatgctttctgggcccaaggacaacatcgtagacggacaatgattttgagtccgactcggaccgatg

SEQ ID NO: 13900 - DNA, 203 bp, synthetic construct
  source 1..203: mol_type = other DNA
ggcgcgccagtcctaggcgtactggcaccctgaccatggaaccctgaagtggcagtgacttctagagctcagtggcagaccccacgaccctcttcgagccttcctccccctcccaccaccagctttcaagctcccagagggaggggtggggaggggatcctgatctcacagggcagggggcttccatccgactcggaccgatg

SEQ ID NO: 13901 - DNA, 203 bp, synthetic construct
  source 1..203: mol_type = other DNA
ggcgcgccagtcctgacggcggtggcaccctgaccatggaaccctgaagtggcagtgacttctagagctcagtggcagaccccacgacccttcctcccccttcctccccctcccaccaccagctttcaagctttattttaagcacctggggaggggatcctgatctcacagggcagggggcttccatccgactcggaccgatg

SEQ ID NO: 13902 - DNA, 203 bp, synthetic construct
  source 1..203: mol_type = other DNA
ggcgcgccagtccttccgacggtggcaccctgacggctattgagattcgtggcagtgacttctagagctcagtggcagaccccacgacccttcctcccccttcctccccctcccaccaccagctttcaagctcccagagggaggggtggggaggggatcctgatctcacagggcagggggcttccatccgactcggaccgatg

SEQ ID NO: 13903 - DNA, 203 bp, synthetic construct
  source 1..203: mol_type = other DNA
ggcgcgccagtcctgcccttagtggcggcgaacgcacttccggcgtgtgtccttacgggtgcgtccgggcggctgcttgcaggtgccacccagcgggttccagcttgtttgctgcataacaacgtttctaactggcgggcaaggggtccggctggagccgggcggctctcctccagctccttctcggccgactcggaccgatg

SEQ ID NO: 13904 - DNA, 203 bp, synthetic construct
  source 1..203: mol_type = other DNA
ggcgcgccagtcctaactcctatggcggcgaacgcacttccggcgtgtgtccttacgggtgcgtccgggcggctgcttgcaggtgccacccagcgggttccagcttgtttgctgcatagattacaacggtgatggcgggcaagcgggtttctgcccaaacggcggctctcctccagctccttctcggccgactcggaccgatg

SEQ ID NO: 13905 - DNA, 203 bp, synthetic construct
  source 1..203: mol_type = other DNA
ggcgcgccagtcctgccgccactggcggcgaacgcacttccggcgtgtgtccttacgggtgctgggacaatcggctttgcaggtgccacccagcgggttccagcttgtttgctgcatagattacaacggtgatggcgggcaaggggtccggctggagccgggcggctctcctccagctccttctcggccgactcggaccgatg

SEQ ID NO: 13906 - DNA, 203 bp, synthetic construct
  source 1..203: mol_type = other DNA
ggcgcgccagtcctccaacggctggctaacgccaatcacgtgggagcctgaacaaggtgtgaagagcctattgagctacataagaatcctccggcccctgaatgcggctaatcccaacctcggagcaggtggtcacaaaccagtgattggcctgtcgtaacgcgcaagtccgtggcggaaccgactaccgactcggaccgatg

SEQ ID NO: 13907 - DNA, 203 bp, synthetic construct
  source 1..203: mol_type = other DNA
ggcgcgccagtcctggtttcggtggctaacgccatgggacgctagttgtgaacaaggtgtgaagagcctattgagctacataagaatcctccggcccctgaatgaaaggtgattgtctctcggagcaggtggtcacaaaccagtgattggcctgtcgtaacgcgcaagtccgtggcggaaccgactaccgactcggaccgatg

SEQ ID NO: 13908 - DNA, 203 bp, synthetic construct
  source 1..203: mol_type = other DNA
ggcgcgccagtcctttattcggtggctaacgccatgggacgctagttgtgaacaaggtgtgaagagcctattgagctacataagaatcctccggcccctgaatgcggctaatcccaacctcggagcaggtggcatttctttgaaccttggcctgtcgtaacgcgcaagtccgtggcggaaccgactaccgactcggaccgatg

SEQ ID NO: 13909 - DNA, 203 bp, synthetic construct
  source 1..203: mol_type = other DNA
ggcgcgccagtccttagtaatgtggctaacgccatgggacgctagttgtgaacaaggtgtgaccccaggtcgactatacataagaatcctccggcccctgaatgcggctaatcccaacctcggagcaggtggtcacaaaccagtgattggcctgtcgtaacgcgcaagtccgtggcggaaccgactaccgactcggaccgatg

SEQ ID NO: 13910 - DNA, 203 bp, synthetic construct
  source 1..203: mol_type = other DNA
ggcgcgccagtcctcagcgctatggctgcttatgagttgtccttatagttgttatcataaagcgaattggattggccatccggtgaaagtgagactcattatctatctgtttgctggatccgctccattgagtgtgtttactctaagtacaatttcaacagttatttcaatcagacaattgtatcatacgactcggaccgatg

SEQ ID NO: 13911 - DNA, 203 bp, synthetic construct
  source 1..203: mol_type = other DNA
ggcgcgccagtccttctcagtctggctgcttatggtgacaatcaaaaagttgttaccatatagctattggattggccatccggtgtgcaacagggcaattgtttacctatttattggttttgtaccattatcgaaattacggtacctcactctcaaattcattttgaccctcaacacaatcaaacatgcgactcggaccgatg

SEQ ID NO: 13912 - DNA, 203 bp, synthetic construct
  source 1..203: mol_type = other DNA
ggcgcgccagtccttctagcactggctgcttatggtgacaatcaaaaagttgttaccatatagctattggattggccatccggtgtgcaagtatcattaacaaaacctatttattggttttgtaccattatcactgaagtctgtgatcactctcaaattcattttgaccctcaacacaatcaaacatgcgactcggaccgatg

SEQ ID NO: 13913 - DNA, 203 bp, synthetic construct
  source 1..203: mol_type = other DNA
ggcgcgccagtcctgagcggcatggctgcttatggtgacaatcacagattgttatcataaagcgaattggattggccatccggtgaaagtatattcagacccagatctgtttgctggatccgctccattgagtgtgtttactctaagtacaatttcaacagttatttcaatcagacaattgtatcatacgactcggaccgatg

SEQ ID NO: 13914 - DNA, 203 bp, synthetic construct
  source 1..203: mol_type = other DNA
ggcgcgccagtcctggagccgctggctgcttatggtgacaatcacagattgttatcataaagcgaattggattggccatccggtgaaagtgagactcattatctatctgtttgctggatccgctccattgagtgtgtttactctaatactgcggagtttcgttatttcaatcagacaattgtatcatacgactcggaccgatg

SEQ ID NO: 13915 - DNA, 203 bp, synthetic construct
  source 1..203: mol_type = other DNA
ggcgcgccagtcctggcccttatggctgcttatgtctgtgcggcgggggttgttaccatatagctattggattggccatccggtgtgcaacagggcaattgtttacctatttattggttttgtaccattatcactgaagtctgtgatcactctcaaattcattttgaccctcaacacaatcaaacatgcgactcggaccgatg

SEQ ID NO: 13916 - DNA, 203 bp, synthetic construct
  source 1..203: mol_type = other DNA
ggcgcgccagtcctgctaagtatggctgtggcacacccaccggtggcacacccctccctcgggtccagttcagcccacagactcctgggacagtgaaggcactaccagcctctcctttgaggagtgttgcagcctttctgtgtgccagatgcctagtgaagaaaagctgaaaccctggagctttgtgccgactcggaccgatg

SEQ ID NO: 13917 - DNA, 203 bp, synthetic construct
  source 1..203: mol_type = other DNA
ggcgcgccagtccttctctagttggctgtggcacacccaccggtggcacacccctccctcgggtccagttcagccctacagtgggcttttggagagccagggccccagcctctcctttgaggagtgttgcagcctttctgtgtgccagatgcctagtgaagaaaagctgaaaccctggagctttgtgccgactcggaccgatg

SEQ ID NO: 13918 - DNA, 203 bp, synthetic construct
  source 1..203: mol_type = other DNA
ggcgcgccagtcctgttctaggtggctgtggcacacccaccggtggcacacccctccctcggtcgagtcatcatatacagactcctgggaggagagccagggccccagcctctcctttgaggagtgttgcagcctttctgtgtgccagatgcctagtgaagaaaagctgaaaccctggagctttgtgccgactcggaccgatg

SEQ ID NO: 13919 - DNA, 203 bp, synthetic construct
  source 1..203: mol_type = other DNA
ggcgcgccagtcctatgcattttggctgtggcaccagacagaagcagccacccctccctcgggtccagttcagcccacagactcctgggaggagagccagggccccagcctctcctttgaggagtgttgcagcctttctgtgtgccagatgcctagtgaagaaaagctgaaaccctggagctttgtgccgactcggaccgatg

SEQ ID NO: 13920 - DNA, 203 bp, synthetic construct
  source 1..203: mol_type = other DNA
ggcgcgccagtcctcattctcatgggacgccatcaataacaattggctctgtctctctcaccattgcaacagtatgcttcctcatgcagattgccatcctggtaactactgtgacattgcattttaagcaacatgagtgcgactcccccgcgagcaaccaagtaatgccgtgtgaaccaataataatacgactcggaccgatg

SEQ ID NO: 13921 - DNA, 203 bp, synthetic construct
  source 1..203: mol_type = other DNA
ggcgcgccagtccttgtaattatgggcgacagggccagcagtctcctcacagtgatcggatataagagtactgaggaccgtcgcctctagtcgaagatgagccggcccgaaggaaggaaaaaccgcggggggagagaagaggttctcgagcagtgggtgagcggaagaaagaagttagaggaactcgacgactcggaccgatg

SEQ ID NO: 13922 - DNA, 203 bp, synthetic construct
  source 1..203: mol_type = other DNA
ggcgcgccagtcctcacagttctgggcgacagggccagcagtctcctctttacagaaaagagggcctcagacagataccgtcgcctctagtcgaagatgagccggcccgaaggaaggaaaaaccgcggggggagagaagaggttctcgagcagtgggtgagcggaagaaagaagttagaggaactcgacgactcggaccgatg

SEQ ID NO: 13923 - DNA, 203 bp, synthetic construct
  source 1..203: mol_type = other DNA
ggcgcgccagtcctaagaatgctgggcgacagggccagcagtctcctctttacagaaaagagtaagagtactgaggaccgtcgcctctagtcgaagatgagccggcccgaaggaaggaaaaaccgcggggggagagaagaggttctcgagcagtgggtgagcggaagaaagaagttagaggaactcgacgactcggaccgatg

SEQ ID NO: 13924 - DNA, 203 bp, synthetic construct
  source 1..203: mol_type = other DNA
ggcgcgccagtcctgctgttaatgggcgacaggggggaggtatgatgttttacagaaaagagtaagagtactgaggaccgtcgcctctagtcgaagatgagccggcccgaaggaaggaaaaaccgcggggggagagaagaggttctcgagcagtgggtgagcggaagaaagaagttagaggaactcgacgactcggaccgatg

SEQ ID NO: 13925 - DNA, 203 bp, synthetic construct
  source 1..203: mol_type = other DNA
ggcgcgccagtcctaaatcgactggggagggggactgttttgtaacatccacgcagtacaccccaatctcccagttcatttcctaatccttaaactccggtttcaaactccctcgctttgctcttcagttgcaggttccgatctttgggtactccaggagctgttctatagcccctgcttctggacctcgactcggaccgatg

SEQ ID NO: 13926 - DNA, 203 bp, synthetic construct
  source 1..203: mol_type = other DNA
ggcgcgccagtcctgcgggtggtggggagggggagaacaagtattatcccacgcagtacaccccaatctcccagttcatttcctaatccttaaactccggtttcaaactccctcgctttgctcttcagttgcaggttccgatctttgggtactccaggagctgttctatagcccctgcttctggacctcgactcggaccgatg

SEQ ID NO: 13927 - DNA, 203 bp, synthetic construct
  source 1..203: mol_type = other DNA
ggcgcgccagtcctgcagtgagtggggagggggagaacaagtattatcccacgcagtacaccccaatctcccagttcatttcctaatccttaaactccggtttcaaactccctcgctttgctcttcagttgcaggttccgatctttgggtactccaggagctgttctatagcccgactgggacagtgacgactcggaccgatg

SEQ ID NO: 13928 - DNA, 203 bp, synthetic construct
  source 1..203: mol_type = other DNA
ggcgcgccagtcctcagcgtattggggagggggagaacaagtattatcccacgcagtacaccgagcggcatggaggcatttcctaatccttaaactccggtttcaaactccctcgctttgctcttcagttgcaggttccgatctttgggtactccaggagctgttctatagcccctgcttctggacctcgactcggaccgatg

SEQ ID NO: 13929 - DNA, 203 bp, synthetic construct
  source 1..203: mol_type = other DNA
ggcgcgccagtcctcaccaaggtggggcgatcctaccctgttcctccgcttcttcgttgggcgcatctcctggaactgggccgcgtccccgccgcctttccgtcatttcttcagatagctccccagctgtggaaaatgagcatcctcaagagaccccagaatccaacaatagcgtgtatacttccttccgactcggaccgatg

SEQ ID NO: 13930 - DNA, 203 bp, synthetic construct
  source 1..203: mol_type = other DNA
ggcgcgccagtcctttgtcacctggggtttcggtggtgaaaaaagtttttccccggggtctgggggtgacattgcaccgcgcccctcgtggggtcgcgttgccaccccacgcggactccccagctcgcgcgcccctcccatttgcctgtcctggtcaggcccccaccccccttcccacctgaccagcccgactcggaccgatg

SEQ ID NO: 13931 - DNA, 203 bp, synthetic construct
  source 1..203: mol_type = other DNA
ggcgcgccagtcctaacggccctggggtttcggttcccccccttccccgcttatccacgtacggggtgacattgcaccgcgcccctcgtggggtcgcgttgccaccccacgcggactccccagctcgcgcgcccctcccatttgcctgtcctggtcaggcccccaccccccttcccacctgaccagcccgactcggaccgatg

SEQ ID NO: 13932 - DNA, 203 bp, synthetic construct
  source 1..203: mol_type = other DNA
ggcgcgccagtcctgaggtcattggggtttcggttcccccccttccccttccccggggtctgattcgacgtcattgccgcgcccctcgtggggtcgcgttgccaccccacgcggactccccagctcgcgcgcccctcccatttgcctgtcctggtcaggcccccaccccccttcccacctgaccagcccgactcggaccgatg

SEQ ID NO: 13933 - DNA, 203 bp, synthetic construct
  source 1..203: mol_type = other DNA
ggcgcgccagtccttcctttgctggggtttcggttcccccccttccccttccccggggtctgggggtgacattgcaccgcgcccctcgtggggtcgcgttgccaccccacgcggactccccagctcgcgcgcccctcccatttgccacaaaactgttataccccaccccccttcccacctgaccagcccgactcggaccgatg

SEQ ID NO: 13934 - DNA, 203 bp, synthetic construct
  source 1..203: mol_type = other DNA
ggcgcgccagtcctaattacggtggggtttcggttcccccccttccccttccccggggtctgggggtgacattgcaccgcgcccctcgtggggtcgcgttgccaccccacgcggactccccagctcgcgcgcccctcccatttgcctgtcctggtcaggcccccaccccccttcccacctgaccagcccgactcggaccgatg

SEQ ID NO: 13935 - DNA, 203 bp, synthetic construct
  source 1..203: mol_type = other DNA
ggcgcgccagtcctggttcccttggggtttcggttcccccccttccccttccccggggtctgggggtgacattgcaccgcgcccctcgtggggtcgcgttgccattgatacgttctcgcccagctcgcgcgcccctcccatttgcctgtcctggtcaggcccccaccccccttcccacctgaccagcccgactcggaccgatg

SEQ ID NO: 13936 - DNA, 203 bp, synthetic construct
  source 1..203: mol_type = other DNA
ggcgcgccagtcctgagagttttggggtttcggttcccccccttccccttccccggggtctgggggtgacattgcagacgtgggggatcagggtcgcgttgccaccccacgcggactccccagctcgcgcgcccctcccatttgcctgtcctggtcaggcccccaccccccttcccacctgaccagcccgactcggaccgatg

SEQ ID NO: 13937 - DNA, 203 bp, synthetic construct
  source 1..203: mol_type = other DNA
ggcgcgccagtccttgctatcttgggtctagacaacttgatcattataaggctggtttgcatggatccaagaccataaatctaggatcctttacaatctcagaccctggtgcaaggttatatatagagcccaattctcctaattaaacagtgtctcaggttgacaaatggacaagttggatctagtcacgactcggaccgatg

SEQ ID NO: 13938 - DNA, 203 bp, synthetic construct
  source 1..203: mol_type = other DNA
ggcgcgccagtcctttcaaagttggtaacaggttaatactagcatacagagggagctgggtcctgtttactcccagtcctgccgatgaggattctgaccgtagacactgaattgtcccgtacctatccgtgctctttctgtgttctcaccagggctgagctcgaactgccacctctgccagcaggacccgactcggaccgatg

SEQ ID NO: 13939 - DNA, 203 bp, synthetic construct
  source 1..203: mol_type = other DNA
ggcgcgccagtcctggtaacactggtaacaggttccagggtaacagagacattcatcatcaactgtttactcccagtcctgccgatgaggattctgaccgtagacactgaattgtcccgtacctatccgtgctctttctgtgttctcaccagggctgagctcgaactgccacctctgccagcaggacccgactcggaccgatg

SEQ ID NO: 13940 - DNA, 203 bp, synthetic construct
  source 1..203: mol_type = other DNA
ggcgcgccagtcctcgaacttatggtaacaggttccagggtaacagaggagggagctgggtcctgtttactcccagtcctgccgatgaggattctgaccgtagacactgaattgtcccgtacctatccgtgcagacatccacaatccaccagggctgagctcgaactgccacctctgccagcaggacccgactcggaccgatg

SEQ ID NO: 13941 - DNA, 203 bp, synthetic construct
  source 1..203: mol_type = other DNA
ggcgcgccagtcctccggcacttggtaacaggttccagggtaacagaggagggagctgggtcctgtttactcccagtcctgccgatgaggattctgaccgtagacactgaattgtcccgtacctatccgtgctctttctgtgttctcaccagggctgagctcgaactgccacctaacaatctgccgtgcgactcggaccgatg

SEQ ID NO: 13942 - DNA, 203 bp, synthetic construct
  source 1..203: mol_type = other DNA
ggcgcgccagtcctggtcggaatggtaacaggttccagggtaacagaggagggagctgggtcctgtttactcccagtcctgccgatgaggattctgaccgtagacactgaattgtcccgtacctatccgtgctctttctgtgttctcaccagggctgagctcgaactgccacctctgccagcaggacccgactcggaccgatg

SEQ ID NO: 13943 - DNA, 203 bp, synthetic construct
  source 1..203: mol_type = other DNA
ggcgcgccagtcctgaggctgttggtaacaggttccagggtaacagaggagggagctgggtcctgtttactcccagtcctgccgatgaggattctgaccgtagattggtcgcgtataggtacctatccgtgctctttctgtgttctcaccagggctgagctcgaactgccacctctgccagcaggacccgactcggaccgatg

SEQ ID NO: 13944 - DNA, 203 bp, synthetic construct
  source 1..203: mol_type = other DNA
ggcgcgccagtcctgacatcgatggtattttttgggcctcgtgcttcgtggtgggagacccaggtcgaggtccgggtggggccggtgaggccgaataaaagcaaaggtgttggctcgggcctcttcgcgtggccggtgacgccttggctcccccgcaggtccggccgtagcacctccgcgccgtcgcccgactcggaccgatg

SEQ ID NO: 13945 - DNA, 203 bp, synthetic construct
  source 1..203: mol_type = other DNA
ggcgcgccagtcctcctctccgtggtattttttgggcctcgtgcttcgtggtgggagacccaggtcgaggtccgggtggggccggtgaggggttgggcgtcgggaggtgttggctcgggcctcttcgcgtggccggtgacgccttggctcccccgcaggttttatacatatcaatccgcgccgtcgcccgactcggaccgatg

SEQ ID NO: 13946 - DNA, 203 bp, synthetic construct
  source 1..203: mol_type = other DNA
ggcgcgccagtcctcctacgcatggtattttttgggcctcgtgcttcgtggtgggagacccaggtcgaggtccgggtggggccggtgaggggttgggcgtcgggaggtgttggctcggtaggacgtcttcatccggtgacgccttggctcccccgcaggtccggccgtagcacctccgcgccgtcgcccgactcggaccgatg

SEQ ID NO: 13947 - DNA, 203 bp, synthetic construct
  source 1..203: mol_type = other DNA
ggcgcgccagtcctattagaaatggtggggcgtcgttccgcgtgattgaagacaccccctcgtccaagaatgcaaagcacatccaataaaatagctggattataactcctcttctttctctgggggccgtggggtgggagctggggcgagaggtgccgttggcccccgttgcttttcctctgggaaggcgactcggaccgatg

SEQ ID NO: 13948 - DNA, 203 bp, synthetic construct
  source 1..203: mol_type = other DNA
ggcgcgccagtcctagaattgctggttcattagcaagcccagtgtttacagcacctctcacatccaggacgaccccatcctggcgctcactcttagtagtatggcttagtacgcattaggtggtaagccgagctctccctcggccttgttctgaatgcacacatgtctaggggctaaggatgtcctaccgactcggaccgatg

SEQ ID NO: 13949 - DNA, 203 bp, synthetic construct
  source 1..203: mol_type = other DNA
ggcgcgccagtcctccctcaagtggttttaacaggggtcctttcttggataaacccgctcaatgcccggagatttgggcgtgcccccgcgagactgctagccgagtagtgttgggtcgcgaaaggccttgtggtactgcctgatagggtgcttgcgagtgccccgggaggtctcgtagaccgtgcacccgactcggaccgatg

SEQ ID NO: 13950 - DNA, 203 bp, synthetic construct
  source 1..203: mol_type = other DNA
ggcgcgccagtccttacttctttgtaaggcccacctcatggtaaatcgaggtacccgcaggtaacaagagacactgtggatctgatctggggccacctacctctatcctggtgaggtggttaaaaaacgtctagtgggccaaacccaggggggatccctggtttccttattttagtgtaaatgtcattcgactcggaccgatg

SEQ ID NO: 13951 - DNA, 203 bp, synthetic construct
  source 1..203: mol_type = other DNA
ggcgcgccagtccttcccgaggtgtaaggcccacgaaggatgcccagaaggtacccgcaggtaacaagagacactgattcgtgaccagctggccacctacctctatcctggtgaggtggttaaaaaacgtctagtgggccaaacccaggggggatccctggtttccttattttagtgtaaatgtcattcgactcggaccgatg

SEQ ID NO: 13952 - DNA, 203 bp, synthetic construct
  source 1..203: mol_type = other DNA
ggcgcgccagtccttctgcatttgtaaggcccacgaaggatgcccagaaggtacccgcaggtaacaagagacactgtggatctgatctggggccacctacctctatcctggtgaggtggttaaaaaacgtctagtgggccaaacccaggggggatccctggtttccttattttaccagcgcacgttcccgactcggaccgatg

SEQ ID NO: 13953 - DNA, 203 bp, synthetic construct
  source 1..203: mol_type = other DNA
ggcgcgccagtcctgttcatactgtaaggcccacgaaggatgcccagaaggtacccgcaggttgtgtagagtcgattggatctgatctggggccacctacctctatcctggtgaggtggttaaaaaacgtctagtgggccaaacccaggggggatccctggtttccttattttagtgtaaatgtcattcgactcggaccgatg

SEQ ID NO: 13954 - DNA, 203 bp, synthetic construct
  source 1..203: mol_type = other DNA
ggcgcgccagtcctggacgttctgtaggcgcttatacagattttattatcttttccatcagattcatcatcaacagcatggaagcgagaaaccaaacagctatttcaaaattccttctcctgggactgatagaggatccggaactgcagcccgtccttttcagcctgttcctgtccatgtacttggtccgactcggaccgatg

SEQ ID NO: 13955 - DNA, 203 bp, synthetic construct
  source 1..203: mol_type = other DNA
ggcgcgccagtcctagtggccatgtcagagtgtctgggaagctcaaagccaaagtcctaatgtgcagtcaggtgaatttattgaaaaatttgaggctcctggtggtgcaaatcaaagaactgctcctcagtggatgttgcctttacttctaggcctgtacggaagtgttacttctgctctaaaagcttcgactcggaccgatg

SEQ ID NO: 13956 - DNA, 203 bp, synthetic construct
  source 1..203: mol_type = other DNA
ggcgcgccagtccttcgtatgttgtccatcgttaaaacgggatggggagctggaccaggtgacagcggcatggacatatgccccaggctttcctgctggggtccatccatgagcctgcaggtgccctcatggagccccagccctgccctggaagcttggctgagagcttcctggaggaggagcttcggcgactcggaccgatg

SEQ ID NO: 13957 - DNA, 203 bp, synthetic construct
  source 1..203: mol_type = other DNA
ggcgcgccagtcctagaaagactgtcccatttatccgtcaggtgacactatcctaaaggcagaagccttcaggtctgacccagccaatcaaagcattataccagaccatggaatgcataccaaacattattgacactaatgacacaagcccccttaaggcagaaaaaccaagagaacaataggccagacgactcggaccgatg

SEQ ID NO: 13958 - DNA, 203 bp, synthetic construct
  source 1..203: mol_type = other DNA
ggcgcgccagtcctactaacattgtcccatttatccgtcaggtgacactatcctaaaggcagaagccttcaggtctgacccagccaatcaaagcattataccagaccatggaatgcataccaaacattattgacactaatgacacacaaaattggttttaagaaaaaccaagagtgggtcgtttatctcgactcggaccgatg

SEQ ID NO: 13959 - DNA, 203 bp, synthetic construct
  source 1..203: mol_type = other DNA
ggcgcgccagtcctgacccaactgtcccatttatccgtcaggtgacactatcctaaaggcagaagccttcaggtctgacccagccaatcaaagcattataccagaccatggaatgcataccaaacattattgacactaatgacacacaaaattggttttatacgcctgtgcccaaacaataggccagacgactcggaccgatg

SEQ ID NO: 13960 - DNA, 203 bp, synthetic construct
  source 1..203: mol_type = other DNA
ggcgcgccagtcctcactttcctgtctgtggtaagtaggcagcctccagacagtttcttccgcttcctgtaccacccggctcaagtagcggaaggcctcagacctcctatcagcccgtcggcctccgggccctgcattctctagccatggaccgggaccttttgcggcagtcgctaaattgccacgggcgactcggaccgatg

SEQ ID NO: 13961 - DNA, 203 bp, synthetic construct
  source 1..203: mol_type = other DNA
ggcgcgccagtcctgagtgacgtgtctgtggtaagtaggcagcctccagacagtttcttccgcttcctgtaccacccggctcaagtagcggacacggaacagggaactatcagcccgtcggcctccgggccctgcattctctagccatggaccgggaccttttgcggcagtcgctaaattgccacgggcgactcggaccgatg

SEQ ID NO: 13962 - DNA, 203 bp, synthetic construct
  source 1..203: mol_type = other DNA
ggcgcgccagtccttggccctatgtctgtgtactgtgattgattataggacagtttcttccgcttcctgtaccacccggctcaagtagcggacacggaacagggaactatcagcccgtcggcctccgggccctgcattctctagccatggaccgggaccttttgcggcagtcgctaaattgccacgggcgactcggaccgatg

SEQ ID NO: 13963 - DNA, 203 bp, synthetic construct
  source 1..203: mol_type = other DNA
ggcgcgccagtccttttgagtgtgtctgtgtacttccggcagcctccagacagtttcttccgcttcctgtaccacccggctcaagtagcggacacggaacagggaactatcagcccgtcggcctccgggccctgcattctctagccatggaccgggaccttttgcggcagtcgcgcccagaatggtcacgactcggaccgatg

SEQ ID NO: 13964 - DNA, 203 bp, synthetic construct
  source 1..203: mol_type = other DNA
ggcgcgccagtccttcgggctttgtctgtgtacttccggcagcctccagacagtttcttccgcttcctgtaccacccggctcaagtagcggacacggaacagggaactatcagcccgtcggcctccgggccctgcattctctagccatggaccgggaccttttgcggcagtcgctaaattgccacgggcgactcggaccgatg

SEQ ID NO: 13965 - DNA, 203 bp, synthetic construct
  source 1..203: mol_type = other DNA
ggcgcgccagtccttgccacactgtctgtgtacttccggcagcctccagacagtttcttccgcttcctgtaccacccggctcaagtagcggacacggaacagggcctagggcagggtacggcctccgggccctgcattctctagccatggaccgggaccttttgcggcagtcgctaaattgccacgggcgactcggaccgatg

SEQ ID NO: 13966 - DNA, 203 bp, synthetic construct
  source 1..203: mol_type = other DNA
ggcgcgccagtcctaggatgcctgtctgtgtacttccggcagcctccagacagtttcttccgcttcctgtaccaccgccgggtttgtattgacacggaacagggaactatcagcccgtcggcctccgggccctgcattctctagccatggaccgggaccttttgcggcagtcgctaaattgccacgggcgactcggaccgatg

SEQ ID NO: 13967 - DNA, 203 bp, synthetic construct
  source 1..203: mol_type = other DNA
ggcgcgccagtccttgtattcctgtgagcatgagaccagtcttcaatgttagatcttgtttatttgtagtttccttttcaagtcagtggatctcagcgatgtacgctcaatgattccaatttttctgttcttgccttcaggttgtctattacactttcatgtcctctggacttaactctgtttcccatcgactcggaccgatg

SEQ ID NO: 13968 - DNA, 203 bp, synthetic construct
  source 1..203: mol_type = other DNA
ggcgcgccagtcctggagatcgtgtgagcatgaggtaccctgctctacttagatcttgtttatttgtagtttccttggttgtgacaatagtctcagcgatgtacgctcaatgattccaatttttctgttcttgccttcaggttgtctattacactttcatgtcctctggacttaactctgtttcccatcgactcggaccgatg

SEQ ID NO: 13969 - DNA, 203 bp, synthetic construct
  source 1..203: mol_type = other DNA
ggcgcgccagtccttgtccggttgtgagcatgaggtaccctgctctacttagatcttgtttatttgtagtttccttttcaagtcagtggatctcagcgatgtacgctcaatgattccaatttttctgttcttgccttcaggttgtcagcacgtagcagcagtcctctggacttaactctgtttcccatcgactcggaccgatg

SEQ ID NO: 13970 - DNA, 203 bp, synthetic construct
  source 1..203: mol_type = other DNA
ggcgcgccagtcctagaggtcctgtgagcatgaggtaccctgctctacttagatcttgtttatttgtagtttccttttcaagtcagtggatctcagcgatgtacgctcaatgattccaatttttctgttcttgccttcaggttgtctattacactttcatgtcctctggacttaactctgtttcccatcgactcggaccgatg

SEQ ID NO: 13971 - DNA, 203 bp, synthetic construct
  source 1..203: mol_type = other DNA
ggcgcgccagtcctcgttgtgttgtgagcatgaggtaccctgctctacttagatcttgtttatttgtagtttccttttcaagtcagtggatctcagcgatgtacgctcaatgattccacgcccctccacgccgccttcaggttgtctattacactttcatgtcctctggacttaactctgtttcccatcgactcggaccgatg

SEQ ID NO: 13972 - DNA, 203 bp, synthetic construct
  source 1..203: mol_type = other DNA
ggcgcgccagtcctccctgccgtgtgatcttattaaaattaggttaaatttcgaggttaaaaatagttttaatattatacgttagaatctggtcttgtatatttatacttaccacacaagatggaccggagcagccctccaatatctagtgtaccctcgtgctcgctcaaacattaagtggtgttgtgcgactcggaccgatg

SEQ ID NO: 13973 - DNA, 203 bp, synthetic construct
  source 1..203: mol_type = other DNA
ggcgcgccagtcctcgacggcatgtgatcttattaaaattaggttaaatttcgaggttaaaaatagttttaatattgctatagtcttagaggtcttgtatattttgctaactgcttacagatggaccggagcagccctccaatatctagtgtaccctcgtgctcgctcaaacattaagtggtgttgtgcgactcggaccgatg

SEQ ID NO: 13974 - DNA, 203 bp, synthetic construct
  source 1..203: mol_type = other DNA
ggcgcgccagtcctataccggctgtgcagacatcctaatacatagcacttatttctcttgctttacggcaggtgaagtaagaagagccatcagaggggaaaagttattgtcctgctgcaactatccccaagctcataaagcacaggtaccatcacttcaatacctagccctagttcgttattgtttgccgactcggaccgatg

SEQ ID NO: 13975 - DNA, 203 bp, synthetic construct
  source 1..203: mol_type = other DNA
ggcgcgccagtcctgagacgaatgtggattccatgcctctgacctgtccaggtgccctgtccagctgactgcaaggacagagaggagtcctgcccagctcttggatcagtctgctggccgaggagcccggtggagccaggggtgaccctggagcccagcctgccccgaggaggccccggctcagagcccgactcggaccgatg

SEQ ID NO: 13976 - DNA, 203 bp, synthetic construct
  source 1..203: mol_type = other DNA
ggcgcgccagtcctccaatctctgtgtattgtgtcgcgcgataaaggttagcatcgaatatcgttggagaattccaaattctacctgtgctaaccagattgaccatcacttgagtcatagtgcatgtagcgggagaccctatgggcgtgtctcaatttttatcgattattaagaaaaaacaggccagacgactcggaccgatg

SEQ ID NO: 13977 - DNA, 203 bp, synthetic construct
  source 1..203: mol_type = other DNA
ggcgcgccagtcctgttggcattgtgtattgtgtttatattatggaactagcatcgaatatcgttggagaattccaaattctacctgtgcgtggactcaaacgaatcacttgagtcatagtgcatgtagcgggagaccctatgggcgtgtctcaatttttatcgattattaagaaaaaacaggccagacgactcggaccgatg

SEQ ID NO: 13978 - DNA, 203 bp, synthetic construct
  source 1..203: mol_type = other DNA
ggcgcgccagtcctgtaagacatgtgtattgtgtttatattatggaactagcatcgaatatcgttggagaattccaaattctacctgtgctaaccagattgaccatcacttgagtcatagtgcatgtagcgggagaccctatgggcgtgtctcaatttttatcgattattaagagtggcagcaaagtccgactcggaccgatg

SEQ ID NO: 13979 - DNA, 203 bp, synthetic construct
  source 1..203: mol_type = other DNA
ggcgcgccagtcctcccttgcatgtgtattgtgtttatattatggaactagcatcgaatatcgttggagaattccatggcaccgactacgtaaccagattgaccatcacttgagtcatagtgcatgtagcgggagaccctatgggcgtgtctcaatttttatcgattattaagaaaaaacaggccagacgactcggaccgatg

SEQ ID NO: 13980 - DNA, 203 bp, synthetic construct
  source 1..203: mol_type = other DNA
ggcgcgccagtccttagaactatgttatctcggagttcggtgtcttttgacctgctgttgactgctcccagggggccctgacgccctggggcacttttgctctgcacaggaccacgctggggtttgccatggtgacataaaggggtgtagaggaaggaaggagcaagaccagcctgtagactgtgccccgactcggaccgatg

SEQ ID NO: 13981 - DNA, 203 bp, synthetic construct
  source 1..203: mol_type = other DNA
ggcgcgccagtcctgaatcctctgtttcatttcaggaagatatatgcgtcaggaaaatttctatcttcttttgtattatcaaggagatatttggagcagagtcatttgctaagaagggataaaataaaaaatggcatattcttggcaaacggatccaaatcctaatgaatcacacgaaaagcagtatgcgactcggaccgatg

SEQ ID NO: 13982 - DNA, 203 bp, synthetic construct
  source 1..203: mol_type = other DNA
ggcgcgccagtcctcttatgtgtgtttctggaaacatgatttgtttgatgtgttcaagattcagaccagtgtttcaagaacacggatgcagcagcagctcttctggcctctcacgccatccaggggaccttgtcctaccctcttgtgtccgtcgtcagtgaatctctgactcgaaaaggtactcagctcgactcggaccgatg

SEQ ID NO: 13983 - DNA, 203 bp, synthetic construct
  source 1..203: mol_type = other DNA
ggcgcgccagtcctaatcgtgttgtttctggaaattgacaaccgccagaccccgaggtcccgagaccagtgtttcaagaacacggatgcagcagcagctcttctggcctctcacgccatccaggggaccttgtcctaccctcttgtgtccgtcgtcagtgaatctctgactcgaaaaggtactcagctcgactcggaccgatg

SEQ ID NO: 13984 - DNA, 203 bp, synthetic construct
  source 1..203: mol_type = other DNA
ggcgcgccagtcctagcccagatgtttctggaaattgacaaccgccagtgtgttcaagattcagaccagtgtttcaagaacacggatgcagcagcagctcttctggcctctcacgccaaggccttatggcaatcctaccctcttgtgtccgtcgtcagtgaatctctgactcgaaaaggtactcagctcgactcggaccgatg

SEQ ID NO: 13985 - DNA, 203 bp, synthetic construct
  source 1..203: mol_type = other DNA
ggcgcgccagtcctggagtagttgtttctggaaattgacaaccgccagtgtgttcaagattcagaccagtgtttcaagaacacggatgcagcagcagctcttctggcctctcacgccactgtaaacgttagttcctaccctcttgtgtccgtcgtcagtgaatctctgactcgaaaaggtactcagctcgactcggaccgatg

SEQ ID NO: 13986 - DNA, 203 bp, synthetic construct
  source 1..203: mol_type = other DNA
ggcgcgccagtccttatcggattgtttctggaaattgacaaccgccagtgtgttcaagattcagaccagtgtttcaagaacacggatgcagcagcagctcttctggcctctcacgccatccaggggaccttgtcctaccctcttgtccaaacacctgcaaaatctctgactcgaaaaggtactcagctcgactcggaccgatg

SEQ ID NO: 13987 - DNA, 203 bp, synthetic construct
  source 1..203: mol_type = other DNA
ggcgcgccagtcctgcagtcgatgtttctggaaattgacaaccgccagtgtgttcaagattcagaccagtgtttcaagaacacggatgcagcagcagctcttctggcctctcacgccatccaggggaccttgtcctaccctcttgtgtccgtcgtcagtgaatctctgactcgaaaaggtactcagctcgactcggaccgatg

SEQ ID NO: 13988 - DNA, 203 bp, synthetic construct
  source 1..203: mol_type = other DNA
ggcgcgccagtcctagtgctgctgtttctggaaattgacaaccgccagtgtgttcaagattcagaccagtgtttcaagaacacggatgcagcagcagctcttctggcctctcacgccatccaggggaccttgtcctaccctcttgtgtccgtcgtcagtgaatctctgactcgactttagcgattatacgactcggaccgatg

SEQ ID NO: 13989 - DNA, 203 bp, synthetic construct
  source 1..203: mol_type = other DNA
ggcgcgccagtcctaacttgtctgtttctggaaattgacaaccgccagtgtgttcaagattcagaccagtgtttcaagaacacggatgcagcagcagctcttctggcctctcacgccatccaggggaccttgtcctaccctcttgtgtccgtcgtcagtgctatgtgttgaacgaaaggtactcagctcgactcggaccgatg

SEQ ID NO: 13990 - DNA, 203 bp, synthetic construct
  source 1..203: mol_type = other DNA
ggcgcgccagtcctcttccacttgtttctggaaattgacaaccgccagtgtgttcaagattcagaccagtgtttcaagaacacggatgcagcagcagctcttctggcctctcacgccatccaggggaccttgtcctaccctcttgttatgtcgcggcaataatctctgactcgaaaaggtactcagctcgactcggaccgatg

SEQ ID NO: 13991 - DNA, 203 bp, synthetic construct
  source 1..203: mol_type = other DNA
ggcgcgccagtcctaggtattgtgtttctggaaattgacaaccgccagtgtgttcaagattcagaccagtgtttcaagaacacggatgcagcagcagctcttcttattgtgagacgactccaggggaccttgtcctaccctcttgtgtccgtcgtcagtgaatctctgactcgaaaaggtactcagctcgactcggaccgatg

SEQ ID NO: 13992 - DNA, 203 bp, synthetic construct
  source 1..203: mol_type = other DNA
ggcgcgccagtcctgtcctacatgtttctggaaattgacaaccgccagtgtgttcaagattcagaccagtgtttcacttggttccgacaggcagcagctcttctggcctctcacgccatccaggggaccttgtcctaccctcttgtgtccgtcgtcagtgaatctctgactcgaaaaggtactcagctcgactcggaccgatg

SEQ ID NO: 13993 - DNA, 203 bp, synthetic construct
  source 1..203: mol_type = other DNA
ggcgcgccagtcctctctctcgtgtttctggaaattgacaaccgccagtgtgttcaagattcgagttgtgaacgagagaacacggatgcagcagcagctcttctggcctctcacgccatccaggggaccttgtcctaccctcttgtgtccgtcgtcagtgaatctctgactcgaaaaggtactcagctcgactcggaccgatg

SEQ ID NO: 13994 - DNA, 203 bp, synthetic construct
  source 1..203: mol_type = other DNA
ggcgcgccagtcctggtgctcatgttttggcttgcgagctgattgcccgctacatcaagctccggacagggaagacccgcaccaggaagcaggtctccagccacatccaggtgctggctcgtcgcaaagctcgcgagatccaggccaagctaaaggaccaggcagctaaggacaaggccctgcagagccgactcggaccgatg

SEQ ID NO: 13995 - DNA, 203 bp, synthetic construct
  source 1..203: mol_type = other DNA
ggcgcgccagtcctgacgcgtattaacgtggagccaagtaaacctgaattctggatatctcagggagctggcgatcataaattcaagttagcaaaagaaaaaaaaattgaaatgcttctctagataatgcttaaaggaccctgcagcagttcttggtattggacatagcatctcagctgttgcctcctcgactcggaccgatg

SEQ ID NO: 13996 - DNA, 203 bp, synthetic construct
  source 1..203: mol_type = other DNA
ggcgcgccagtcctggcttggtttaacgtggagccaagtaaacctgaattctggatatctcattttctaacttcggataaattcaagttagcaaaagaaaaaaaaattgaaatgcttctctagataatgcttgttctctgtaaatacagttcttggtattggacatagcatctcagctgttgcctcctcgactcggaccgatg

SEQ ID NO: 13997 - DNA, 203 bp, synthetic construct
  source 1..203: mol_type = other DNA
ggcgcgccagtcctctactagattaagaaaaactagtactaataccatttgattatgccaattttctcgagaaatcattcaattgaccatagactgaaagcgttgttacctagttcttcagaagagatcttattagaattaatttatatgatctaattcccttaaaaactgaataccaaaaaacaaaacgactcggaccgatg

SEQ ID NO: 13998 - DNA, 203 bp, synthetic construct
  source 1..203: mol_type = other DNA
ggcgcgccagtcctgactagggttaagaaaaacttaggacccaagtcctttaaacgtgcatgattgagatagtcagtggaacacagccggttgaatactagtgagtaaattaggagtagtagtattgaaccacctcatatcttatttcttctgaactgcattaaaatttgtacccaggatataacaaccgactcggaccgatg

SEQ ID NO: 13999 - DNA, 203 bp, synthetic construct
  source 1..203: mol_type = other DNA
ggcgcgccagtcctcttgcgttttaagaaaaacttaggacccaggtccttgattatgccaattttctcgagaaatctcgggtcctcgttaagactgaaagcgttgttacctagttcttcagaagagatcttattagaattaatttatatgatctaattcccttaaaaactgaataccaaaaaacaaaacgactcggaccgatg

SEQ ID NO: 14000 - DNA, 203 bp, synthetic construct
  source 1..203: mol_type = other DNA
ggcgcgccagtcctcgggtttgttaaggtgtcgtaacgtctcgtgacaccgggttcagttcagtcgagtggtggcgacccaatttaacacccattcttatataagaacacagtataatttaatcacaaaagacctcaaaaactgacacagcttgatccactcaacatataattgtaagattaataatacgactcggaccgatg

SEQ ID NO: 14001 - DNA, 203 bp, synthetic construct
  source 1..203: mol_type = other DNA
ggcgcgccagtcctcatcccacttaaggtgtcgtccttagcgcaacacccgggttcagttcaaatatcgacctctaacccaatttaacacccattcttatataagaacacagtataatttaatcacaaaagacctcaaaaactgacacagcttgatccactcaacatataattgtaagattaataatacgactcggaccgatg

SEQ ID NO: 14002 - DNA, 203 bp, synthetic construct
  source 1..203: mol_type = other DNA
ggcgcgccagtcctctcgaattttaatattcatttgtttaaatcttattttatttttaagctcaaactgcttaagacacttaggtggtaataaagtgaaataattttttgcaaaggggtttcctcgatttggagctttttttttcttccaccgtcatttctaactcttaaaaccaactcagttccatccgactcggaccgatg

SEQ ID NO: 14003 - DNA, 203 bp, synthetic construct
  source 1..203: mol_type = other DNA
ggcgcgccagtcctggatgcttttacatgctgcgttcccctgcctcagcttcctgagtagctgggattacaggctctgtgtgctccgggatggagcaggtgtgcagagggtgagaacccagctctgggaccaagtcacttgcttccttacttagcaagactatcgacttgagcaaacttggacctgggcgactcggaccgatg

SEQ ID NO: 14004 - DNA, 203 bp, synthetic construct
  source 1..203: mol_type = other DNA
ggcgcgccagtcctccttcctattacattgtacggctcaggaccgtggggagttggctgaaggacttggggagcccagaagctgccaccgaaccaagaaccacctctgtgcagaaaagcaaccaccttgttctctattctgctgcccgagacaaccacatcctcctcctcctacacccaaaggctccccgactcggaccgatg

SEQ ID NO: 14005 - DNA, 203 bp, synthetic construct
  source 1..203: mol_type = other DNA
ggcgcgccagtcctatatgaacttacgaagaaagtgtcccaaggcttcccagagcgaacctgtgcggctgcaggcaccggcgcgtcgagtttccggcgtccggaaggaccgagctcttctcgcggatccagtgttccgtttccagcccccaatctcagagcggagccgacagagagcagggaaccggccgactcggaccgatg

SEQ ID NO: 14006 - DNA, 203 bp, synthetic construct
  source 1..203: mol_type = other DNA
ggcgcgccagtcctgcctaagcttagttcccaggaacagaagtactgcgaatcttgtggcctcattctgaacaaaagggattagagaagaaaaatctcttgatataaggcttgaaagcaagggcaggcaatcttggttgtgaatattttctgatttttccagaaatcaagcagaagattgagctgctgcgactcggaccgatg

SEQ ID NO: 14007 - DNA, 203 bp, synthetic construct
  source 1..203: mol_type = other DNA
ggcgcgccagtccttgaatacgttatagcaaagttccatgggtccagccagccgcttccctgtgctgtgagtgtttccaccactccaggagacagcattcagagttgaccttgtgagagctggccataatttaattccatctctaggttttctgtcttattgtttcagaggcacatcgagaaccaacccgactcggaccgatg

SEQ ID NO: 14008 - DNA, 203 bp, synthetic construct
  source 1..203: mol_type = other DNA
ggcgcgccagtccttcaactggttatgaatacagggaccgcctaagagggcgtgcgctcccgacatgccccgccgcgcgccattaaccgccagatttgaatcgcgggacccgttggcagaggtggcggcggcggcatgggtgccccgacgttgccccctgcctggcagccctttctcaaggaccaccgcgactcggaccgatg

SEQ ID NO: 14009 - DNA, 203 bp, synthetic construct
  source 1..203: mol_type = other DNA
ggcgcgccagtcctataaatccttattgcatacccgtttttaataaaatacattgcataccctcttttaataaaaaatattgcatactttactcgttgcttgcgtcgttgcatacccaataaaagattattatattgcatacccgtttttaataaaatacattgcataccctcttttaataaaaaatacgactcggaccgatg

SEQ ID NO: 14010 - DNA, 203 bp, synthetic construct
  source 1..203: mol_type = other DNA
ggcgcgccagtcctacgtcaggttatttctgttgtttttgttgtattgttgagtcttcttgtgttttgttgtctttctacaggttgttgtggttgttgcaattgtttaacttcatcaatgcgaggctgttgtgattgtggttcaactaaacttccttattgtattagcagggtcgtccacgttcaatacgactcggaccgatg

SEQ ID NO: 14011 - DNA, 203 bp, synthetic construct
  source 1..203: mol_type = other DNA
ggcgcgccagtcctgctgggcgttatttctgttgtttttgttgtattgttgagtcttcttgtgttttgttgtcttttgtagaaaatggtaggttgttgcaattgtttaacttcatcaatgcgaggctgttgtgattgtggttcaactaaacttccttattacgaatttgaaaaggtccacgttcaatacgactcggaccgatg

SEQ ID NO: 14012 - DNA, 203 bp, synthetic construct
  source 1..203: mol_type = other DNA
ggcgcgccagtcctacctatgattcagtacgccaactattgtttgcgggaacacgccttctcagccccgccagcacttctaccctagccgggcccagcccccgagcagtgcagcctcccgagtgcagagtgcagcccctgcccgccctggcccagctgcccatgtctaccctgctggatcccaagtaacgactcggaccgatg

SEQ ID NO: 14013 - DNA, 203 bp, synthetic construct
  source 1..203: mol_type = other DNA
ggcgcgccagtcctcacatacgttcagtacgccacaagcgacacaaatgaacacgccttctcagccccgccagcacgagcggggcgttacggcccagcccccgagcagtgcagcctcccgagtgcagagtgcagcccctgcccgccctggcccagctgcccatgtctaccctgctggatcccaagtaacgactcggaccgatg

SEQ ID NO: 14014 - DNA, 203 bp, synthetic construct
  source 1..203: mol_type = other DNA
ggcgcgccagtcctagcttcccttcagtacgccacaagcgacacaaatgaacacgccttctcagccccgccagcacttctaccctagccgggcccagcccccgagcagtgcagcctcccgagtgcagagtgcagcccctgcccgccaccttgtttactttcatgtctaccctgctggatcccaagtaacgactcggaccgatg

SEQ ID NO: 14015 - DNA, 203 bp, synthetic construct
  source 1..203: mol_type = other DNA
ggcgcgccagtcctcagattagttcagtacgccacaagcgacacaaatgaacacgccttctcagccccgccagcacttctaccctagccgggcccagcccccgagcagtgcagcctcccgagtgcagagtgcagcccctgcccgccctggcccagctgcccatgtctaccctgcccacgtgtgctgcccgactcggaccgatg

SEQ ID NO: 14016 - DNA, 203 bp, synthetic construct
  source 1..203: mol_type = other DNA
ggcgcgccagtcctctcagctgttcagtacgccacaagcgacacaaatgaacacgccttctcagccccgccagcacttctaccctagccgggcccagcccccgagcagtgcagcctcccgagtgcagagtgcagcccctgcccgccctggcccagctgcccatgtctaccctgctggatcccaagtaacgactcggaccgatg

SEQ ID NO: 14017 - DNA, 203 bp, synthetic construct
  source 1..203: mol_type = other DNA
ggcgcgccagtccttgacttctttcagtacgccacaagcgacacaaatgaacacgccttctcagccccgccagcacttctaccctagccgggcccagcccccgagcagtgcagcctccgagagaaccccgagagcccctgcccgccctggcccagctgcccatgtctaccctgctggatcccaagtaacgactcggaccgatg

SEQ ID NO: 14018 - DNA, 203 bp, synthetic construct
  source 1..203: mol_type = other DNA
ggcgcgccagtcctgagaccggttcagtacgccacaagcgacacaaatgaacacgccttctcagccccgccagcacttctaccctagccgggcccagcccccgatgcaatacagtcgtcgagtgcagagtgcagcccctgcccgccctggcccagctgcccatgtctaccctgctggatcccaagtaacgactcggaccgatg

SEQ ID NO: 14019 - DNA, 203 bp, synthetic construct
  source 1..203: mol_type = other DNA
ggcgcgccagtcctggcggctcttcagtacgccacaagcgacacaaatgaacacgccttctcctataaattctagattctaccctagccgggcccagcccccgagcagtgcagcctcccgagtgcagagtgcagcccctgcccgccctggcccagctgcccatgtctaccctgctggatcccaagtaacgactcggaccgatg

SEQ ID NO: 14020 - DNA, 203 bp, synthetic construct
  source 1..203: mol_type = other DNA
ggcgcgccagtcctttcacatattcagtacgccacaagcgacacaaattcgtcttaaagaggagccccgccagcacttctaccctagccgggcccagcccccgagcagtgcagcctcccgagtgcagagtgcagcccctgcccgccctggcccagctgcccatgtctaccctgctggatcccaagtaacgactcggaccgatg

SEQ ID NO: 14021 - DNA, 203 bp, synthetic construct
  source 1..203: mol_type = other DNA
ggcgcgccagtcctattcgtagttcatcattctcaaattcttaggacgcggcctgttctttgggaacgctctcggaattggccgcggaaaccgatctgcccgttgtgtttgtgaaacagagaaagataggcggccatggtccaaccttgaaggcttatcaggagggcagacttcaaaagctactaaaacgactcggaccgatg

SEQ ID NO: 14022 - DNA, 203 bp, synthetic construct
  source 1..203: mol_type = other DNA
ggcgcgccagtcctcagctatcttcatcattctcaaattcttaggacggtcgggccctggaaggaacgctctcggaattggccgcggaaaccgatctgcccgttgtgtttgtgaaacagagaaagataggcggccatggtccaaccggatgcatacccttggagggcagacttcaaaagctactaaaacgactcggaccgatg

SEQ ID NO: 14023 - DNA, 203 bp, synthetic construct
  source 1..203: mol_type = other DNA
ggcgcgccagtccttatccatgttcattggacactggtgcgagccggtgatgccactcaacaatttctccaacatcttaacatccctgaagatatatatacaatatatatattagtgtcataatgcttggccataacgattctatatcatccaaccataaaactatcttaataaggttatgggacaaacgactcggaccgatg

SEQ ID NO: 14024 - DNA, 203 bp, synthetic construct
  source 1..203: mol_type = other DNA
ggcgcgccagtcctagcgtgttttcctcccaaggctaaactttctaataggacagccctacgtcgggggctcccggagcagggcgagagctcgcgtcgccggaaaggaagacgggaagaaagggcaggcggctcggcgggcgtcttctccactcctctgccgcgtccccgtggctgcagggagccggccgactcggaccgatg

SEQ ID NO: 14025 - DNA, 203 bp, synthetic construct
  source 1..203: mol_type = other DNA
ggcgcgccagtcctcataacgcttcctcccaaggctaaactttctaattcccttctttgggctcgggggctcccgggatcaccgtctgcgtcgcgtcgccggaaaggaagacgggaagaaagggcaggcggctcggcgggcgtcttctccactcctctgccgcgtccccgtggctgcagggagccggccgactcggaccgatg

SEQ ID NO: 14026 - DNA, 203 bp, synthetic construct
  source 1..203: mol_type = other DNA
ggcgcgccagtcctgcacaggattccttagtgactctaaataaagtaacagcagacatcgggctggggagtgactccgtgtgtgcccggccctcgtctcaccgcataaagtcttttgactcccttggatcacagtctttgcacactcggacttcaaaactagatgctcttagcaatcggagtttggaccgactcggaccgatg

SEQ ID NO: 14027 - DNA, 203 bp, synthetic construct
  source 1..203: mol_type = other DNA
ggcgcgccagtcctgggtccgattccttagtgactctaaataaagtaacagcagacatcgggctggggagtgactccgtgtgtgcccggccctcgtctcaccgcataaagtcttttgactcccttggatcacagtctttgcacactcggacttcaaaactgttccagggccagttatatctccacatacgactcggaccgatg

SEQ ID NO: 14028 - DNA, 203 bp, synthetic construct
  source 1..203: mol_type = other DNA
ggcgcgccagtcctgtccgtcgttccttagtgactctaaataaagtaacagcagacatcgggctggggagtgactccgtgtgtgcccggccctcgtctcaccgcataaagtcttttgactcccttggatcacgagaacgattgtgacggacttcaaaactgttccagggccagtatcggagtttggaccgactcggaccgatg

SEQ ID NO: 14029 - DNA, 203 bp, synthetic construct
  source 1..203: mol_type = other DNA
ggcgcgccagtcctgttgggtattccttagtgactctaaataaagtaagttttctggcacaactggggagtgactccgtgtgtgcccggccctcgtctcaccgcataaagtcttttgactcccttggatcacagtctttgcacactcggacttcaaaactgttccagggccagtatcggagtttggaccgactcggaccgatg

SEQ ID NO: 14030 - DNA, 203 bp, synthetic construct
  source 1..203: mol_type = other DNA
ggcgcgccagtcctgcctcactttcgacgcaggaggcggggctgctcagtcctccaggcgtcggtactcagcggtgaaatccagcatagccttgcttgcctgtgcgcgcgtgcgcggacatggcctcaaacgattatacccaacaagcaacccaaagctatggggcctaccccacccagcccgggcagcgactcggaccgatg

SEQ ID NO: 14031 - DNA, 203 bp, synthetic construct
  source 1..203: mol_type = other DNA
ggcgcgccagtccttgagcgtgttcgacgcaggaggcggggctgctcagtcctccaggcgtcggtactcagcggtgttggaacttcgttgcttgcttgcctgtgcgcgcgtgcgcggacatggcctcaaacgattatacccaacaacttctggtccctattggggcctaccccacccagcccgggcagcgactcggaccgatg

SEQ ID NO: 14032 - DNA, 203 bp, synthetic construct
  source 1..203: mol_type = other DNA
ggcgcgccagtcctactcgctcttcgacgcaggaggcggggctgctcagtcctccaggcgtcggtactcagcggtgttggaacttcgttgcttgcttgcctgtgcgcgcgtgcgcggacatggcctcaaacgattatacccaacaagcaacccaaagctatggggcctaccccatttttaaattatgtcgactcggaccgatg

SEQ ID NO: 14033 - DNA, 203 bp, synthetic construct
  source 1..203: mol_type = other DNA
ggcgcgccagtcctctttattgttcgacgcaggaggcggggctgctcagtcctccaggcgtcggtactcagcggtgttggaacttcgttgcttgcttgcctgtgtctcttacgctattcatggcctcaaacgattatacccaacaagcaacccaaagctatggggcctaccccacccagcccgggcagcgactcggaccgatg

SEQ ID NO: 14034 - DNA, 203 bp, synthetic construct
  source 1..203: mol_type = other DNA
ggcgcgccagtcctgggaagctttcgacgcaggaggcggggctgctcatgaaaggtctgcagggtactcagcggtgttggaacttcgttgcttgcttgcctgtgcgcgcgtgcgcggacatggcctcaaacgattatacccaacaagcaacccaaagctatggggcctaccccacccagcccgggcagcgactcggaccgatg

SEQ ID NO: 14035 - DNA, 203 bp, synthetic construct
  source 1..203: mol_type = other DNA
ggcgcgccagtcctgatcttatttcgcagctgttgtggtgtgtcgtaacgggcaactctgcagcggaaccgactactttgggtgtccgtgtttccttttattcctatattggctgcttatggtgacaatcaaaaagttgttaccatatagctattggattggccatccggtgtgcaacagggcaattgcgactcggaccgatg

SEQ ID NO: 14036 - DNA, 203 bp, synthetic construct
  source 1..203: mol_type = other DNA
ggcgcgccagtccttttcgtccttcgggctgggagcgtgctttccacgacggtgacacgcttccctggattggcagccagactgccttccgggtcactgccatggaggagccgcagtcagatcctagcgtcgagccccctctgagtatatgccaggacggagacctatggaaactacttcctgaaaaccgactcggaccgatg

SEQ ID NO: 14037 - DNA, 203 bp, synthetic construct
  source 1..203: mol_type = other DNA
ggcgcgccagtcctatcctaagttcgggctgggagcgtgctttccacgacggtgacacgcttccctggattggcagccagactgccttccgggtcactgccatggaggagccgcagtcagatcctagcgtcgagccccctctgagtcaggaaacattttcagacctatggaaacactgcttattcccgcgactcggaccgatg

SEQ ID NO: 14038 - DNA, 203 bp, synthetic construct
  source 1..203: mol_type = other DNA
ggcgcgccagtcctacgccgacttcgggctgggagcgtgctttccacgacggtgacacgcttccctggattggcagccagactgccttccgggtcactgccatggaggagccgcagtcagatcctagcgtcgagccccctctgagtcaggaaacattttcagacctatggaaactacttcctgaaaaccgactcggaccgatg

SEQ ID NO: 14039 - DNA, 203 bp, synthetic construct
  source 1..203: mol_type = other DNA
ggcgcgccagtcctacgtaccgttcgggctgggagcgtgctttccacgacggtgacacgcttccctggattggcagccagactgccttccgggtcactgccatggaggagccgcagtcagatcctagcgtcgagccccctctgagtcaggaaacattttcgcgtggcaccgccatacttcctgaaaaccgactcggaccgatg

SEQ ID NO: 14040 - DNA, 203 bp, synthetic construct
  source 1..203: mol_type = other DNA
ggcgcgccagtccttagtttctttcgggctgggagcgtgctttccacgacggtgacacgctttagctcgcgtttctccagactgccttccgggtcactgccatggaggagccgcagtcagatcctagcgtcgagccccctctgagtcaggaaacattttcagacctatggaaactacttcctgaaaaccgactcggaccgatg

SEQ ID NO: 14041 - DNA, 203 bp, synthetic construct
  source 1..203: mol_type = other DNA
ggcgcgccagtcctggccaaatttcgggctgggagcgtgctttccacgcgtaaactctatgcccctggattggcagccagactgccttccgggtcactgccatggaggagccgcagtcagatcctagcgtcgagccccctctgagtcaggaaacattttcagacctatggaaactacttcctgaaaaccgactcggaccgatg

SEQ ID NO: 14042 - DNA, 203 bp, synthetic construct
  source 1..203: mol_type = other DNA
ggcgcgccagtccttgtgtgggttctacatgtagaattaagttacaaaaaaacatgggacaagtgaaaatgtctcttcaagggattcacctgagtgatctatcatacaagcatgctatattaaaagagtctcagtatacaataaagagagatgtaggcacaacaacagcagtgacaccctcatcattgcgactcggaccgatg

SEQ ID NO: 14043 - DNA, 203 bp, synthetic construct
  source 1..203: mol_type = other DNA
ggcgcgccagtcctttctgttgttctcatgctatagtagtcgggcggggttgtgagacgccgcgctcagcttccatcgctgggcggtcaacaagtgcgggcctggctcagcgcgggggggcgcggagaccgcgaggcgaccgggagcggctgggttcccggctgcgcgcccttcggccaggccgggagcgactcggaccgatg

SEQ ID NO: 14044 - DNA, 203 bp, synthetic construct
  source 1..203: mol_type = other DNA
ggcgcgccagtcctgtgtcgtcttctctagtgcagtgcctggagatgaccaccaaacggaaaatcatcggccgtctggtgccatgccgataaaatttgatatccgaagaaatcatctcagttttagattactcccactgcagtcttcagcaggtgccaaaggaggtctttaacttcgaacgaacattacgactcggaccgatg

SEQ ID NO: 14045 - DNA, 203 bp, synthetic construct
  source 1..203: mol_type = other DNA
ggcgcgccagtcctgacctgaattctctagtgcagtgcctggagatgaccaccaaacggaaaatcccgttgtaactggtgccatgccgatgtttccgaggtgaagaagaaatcatctcagttttagatccacataactgcagtcttcagcaggtgccaaaggaggtctttaacttcgaacgaacattacgactcggaccgatg

SEQ ID NO: 14046 - DNA, 203 bp, synthetic construct
  source 1..203: mol_type = other DNA
ggcgcgccagtcctcccggaacttctctagtgcagtgcctggagatgaccaccaaacggaaaatcccgttgtaactggtgccatgccgatgtttccgaggtgaagaagaaatcatctcagttttagattactcccactgcagtcttcagcaggtgccaaaggaggtctttaacttcgaacgaacattacgactcggaccgatg

SEQ ID NO: 14047 - DNA, 203 bp, synthetic construct
  source 1..203: mol_type = other DNA
ggcgcgccagtcctgcgcaacgttctctagtgcagtgcctggagatgagttgatggacctggatcatcggccgtctggtgccatgccgatgtttccgaggtgaagaagaaatcatctcagttttagattactcccactgcagtcttcagcaggtgccaaaggaggtctttaacttcgaacgaacattacgactcggaccgatg

SEQ ID NO: 14048 - DNA, 203 bp, synthetic construct
  source 1..203: mol_type = other DNA
ggcgcgccagtcctctacgcggttctgctacagaacaactcccttggtacaataaaaaagacgagtatttacttttcattgaaagaatggagcttgcttgatatttcactagataaagaatttaaggcgagtatctatctttgttccttcgttactaacggagtctgcccttggaaacatcaggcacccgactcggaccgatg

SEQ ID NO: 14049 - DNA, 203 bp, synthetic construct
  source 1..203: mol_type = other DNA
ggcgcgccagtcctgtggcttattctgctacagaacaactcccttggtacaataaaaaagacgagtatttacttttcattgaaagaatggagcttgcttgatatttcactagataaagaatttaaggcgagtatctatctttgttctccttggcaactgagagtctgcccttggaaacatcaggcacccgactcggaccgatg

SEQ ID NO: 14050 - DNA, 203 bp, synthetic construct
  source 1..203: mol_type = other DNA
ggcgcgccagtcctgtgcagagttctgctacagaacaactcccttggtacaataaaaaagacgagtatttacttttcattgaaagaatggagcttgcttgatatttcactagataaaggtgagcttagttacatctatctttgttctccttggcaactgagagtctgcccttggaaacatcaggcacccgactcggaccgatg

SEQ ID NO: 14051 - DNA, 203 bp, synthetic construct
  source 1..203: mol_type = other DNA
ggcgcgccagtcctaacactacttctgctacagaactgggtatttggtacaataaaaaagacgagtatttacttttcattgaaagaatggagcttgcttgatatttcactagataaagaatttaaggcgagtatctatctttgttccatagccgcgatgagagtctgcccttggaaacatcaggcacccgactcggaccgatg

SEQ ID NO: 14052 - DNA, 203 bp, synthetic construct
  source 1..203: mol_type = other DNA
ggcgcgccagtcctccatacggttctgctacagaactgggtatttggtacaataaaaaagacgagtatttacttttcattgaaagaatggagcttgcttgatatttcactagataaagaatttaaggcgagtatctatctttgttctccttggcaactgagagtctgcccttggaaacatcaggcacccgactcggaccgatg

SEQ ID NO: 14053 - DNA, 203 bp, synthetic construct
  source 1..203: mol_type = other DNA
ggcgcgccagtcctcaattgtgttctggcacctacctacctgcttcccctacctttccccttagttggcccagagtcttaagattggggcagggtggagaggtgggctcttcctgcttcccactcatcttatagctttctttccccagatccgaattcgagatccaaaccaaggaggaaaggatatcacgactcggaccgatg

SEQ ID NO: 14054 - DNA, 203 bp, synthetic construct
  source 1..203: mol_type = other DNA
ggcgcgccagtccttcgtgcggttctggcacctacctacctgcttcccgctggggggtggggagttggcccagagtcttaagattggggcagggtggagaggtgggctcttcctgcttcccactcatcttatagctttctttccccagatccgaattcgagatccaaaccaaggaggaaaggatatcacgactcggaccgatg

SEQ ID NO: 14055 - DNA, 203 bp, synthetic construct
  source 1..203: mol_type = other DNA
ggcgcgccagtccttattgtgcttctggcacctacctacctgcttcccgctggggggtggggagttggcccagagtcttaagattggggcagggtggagaggtgggctcttcctgcttcccactcatcttatcctcggtggattgtagatccgaattcgagatccaaaccaaggaggaaaggatatcacgactcggaccgatg

SEQ ID NO: 14056 - DNA, 203 bp, synthetic construct
  source 1..203: mol_type = other DNA
ggcgcgccagtcctcctcaaacttctggcacctacctacctgcttcccgctggggggtggggtccctcaagttgcacttaagattggggcagggtggagaggtgggctcttcctgcttcccactcatcttatagctttctttccccagatccgaattcgagatccaaaccaaggaggaaaggatatcacgactcggaccgatg

SEQ ID NO: 14057 - DNA, 203 bp, synthetic construct
  source 1..203: mol_type = other DNA
ggcgcgccagtcctgtagaactttctgtccctccacccgtccccttccccaccctctggcccccaccttcttggaggcgacaacccccggcctagtgctcccaagatttttcccgcaggttgcgaagggaagcaaacttggtggcaacttgcctcccggtgcgggcgtctctcccccaccgtctcaaccgactcggaccgatg

SEQ ID NO: 14058 - DNA, 203 bp, synthetic construct
  source 1..203: mol_type = other DNA
ggcgcgccagtccttctcctgattctgtccctccacccgtccccttccccaccctctggcccccaccttcttggaggcgacaacccccgggaggcattagaagggatttttcccgcagacattcgcaaacgacaaacttggtggcaacttgcctcccggtgcgggcgtctctcccccaccgtctcaaccgactcggaccgatg

SEQ ID NO: 14059 - DNA, 203 bp, synthetic construct
  source 1..203: mol_type = other DNA
ggcgcgccagtcctagcgacctttctgtccctccacccgtccccttccccaccctctggcccccaccttcttggaggcgacaacccccgggaggcattagaagggatttttcccgcaggttgcgaagggaagcaaacttggtggcaacttgcctcccggtatctcgtatcgcaacccaccgtctcaaccgactcggaccgatg

SEQ ID NO: 14060 - DNA, 203 bp, synthetic construct
  source 1..203: mol_type = other DNA
ggcgcgccagtccttgaggcctttctgtccctccacccgtccccttccccaccctctggcccccaccttcttggaggcgacaacccccgggaggcattagaagggatttttcccgcaggttgcgaagggaagcaaacttggtggcaacttgcctcccggtgcgggcgtctctccaaactatagcatgacgactcggaccgatg

SEQ ID NO: 14061 - DNA, 203 bp, synthetic construct
  source 1..203: mol_type = other DNA
ggcgcgccagtccttgcctccattctgtccctcccgatcaggtacaagccaccctctggcccccaccttcttggaggcgacaacccccgggaggcattagaagggatttttcccgcaggttgcgaagggaagcaaacttggtggcaacttgcctcccggtgcgggcgtctctcccccaccgtctcaaccgactcggaccgatg

SEQ ID NO: 14062 - DNA, 203 bp, synthetic construct
  source 1..203: mol_type = other DNA
ggcgcgccagtcctcgcattacttcttcttccagaacacctctgaaagcttggtcaagggtacattttttttcattttcactgccaggtaactgactgaaggcagtcaacaacggcttgatatttttgttattcaaggcttctctgacgacgagaacgggtcgcgtccgcgcctccggcaaactgaaacgactcggaccgatg

SEQ ID NO: 14063 - DNA, 203 bp, synthetic construct
  source 1..203: mol_type = other DNA
ggcgcgccagtcctgagctagtttcttcttccagaacacctctgaaagcttggtcaagggtacattttttttcattttcactgccaggtatacccgacctccaggtcaacaacggcttgatatttttgttattcaaggcttctctggtagatttcgtaaatcgcgtccgcgcctccggcaaactgaaacgactcggaccgatg

SEQ ID NO: 14064 - DNA, 203 bp, synthetic construct
  source 1..203: mol_type = other DNA
ggcgcgccagtcctagaagccgttcttcttccagttgcttagctcgcccttggtcaagggtacattttttttcattttcactgccaggtaactgactgaaggcagtcaacaacggcttgatatttttgttattcaaggcttctctggtagatttcgtaaatcgcgtccgcgcctccggcaaactgaaacgactcggaccgatg

SEQ ID NO: 14065 - DNA, 203 bp, synthetic construct
  source 1..203: mol_type = other DNA
ggcgcgccagtcctgtactttgttctttaataccgaagggggatcttgggtgaaggtcagggcttgggcgctagctctccgaggcctgttctgaatcggtctccagaaatgctttgggttcatctttcattgctgcaaggaacttccatgcctctaacactcatcttcaaaagactgggactgctgagcgactcggaccgatg

SEQ ID NO: 14066 - DNA, 203 bp, synthetic construct
  source 1..203: mol_type = other DNA
ggcgcgccagtcctagtccgccttgaaaaggttacccaccccccgcagtaataaaggcccctgaacgtgtatgttggtctcccgggagctgcttgctgaagatccgcgcccctgtcgccgtctggtaggagctgtttgcagggtcctaactcaatcggcttgttgtgatgcgtatccccgtagatgcccgactcggaccgatg

SEQ ID NO: 14067 - DNA, 203 bp, synthetic construct
  source 1..203: mol_type = other DNA
ggcgcgccagtccttgaaaccattgaaattggctggcactgctgttgttaatttaagaccagatcaattaaatgatttagtttattctctgcccactttcctataattattagttcgcgatacgcgtaaagagatttttgttggtgatagtcttgtaaatacttgttagatctcattaaatctaaactcgactcggaccgatg

SEQ ID NO: 14068 - DNA, 203 bp, synthetic construct
  source 1..203: mol_type = other DNA
ggcgcgccagtcctgtttggacttgaagtgaagcattctatgaatgtgagctgaagaaatgaggacctcagttgggtgcaggtcattttacctgggacaaatacctaaaagaaacatgttcagtcccagcgcctgtccattgcttcaagcagtcctacacacctccaagcaacgagttcaagatcagtcgactcggaccgatg

SEQ ID NO: 14069 - DNA, 203 bp, synthetic construct
  source 1..203: mol_type = other DNA
ggcgcgccagtcctgcagattcttgaagtgaagcattctatgaatgtggagactttgcggcgatgaaatgaaataatgcaggtcattttacctgggacaaatacctaaaagaaacatgttcagtcccagcgcctgtccattgcttcaagcagtcctacacacctccaagcaacgagttcaagatcagtcgactcggaccgatg

SEQ ID NO: 14070 - DNA, 203 bp, synthetic construct
  source 1..203: mol_type = other DNA
ggcgcgccagtccttactaccattgcaatcaggtagctcgcggctcacgctgagagggacacgcagtgacgagcggccgaagcagctttgcggtgagagcacgctgggccgggggccgggcgggagcctggtggcgggtaacgccggactcgagggttttgtagtgcatccctgagcatgagcacagacgactcggaccgatg

SEQ ID NO: 14071 - DNA, 203 bp, synthetic construct
  source 1..203: mol_type = other DNA
ggcgcgccagtcctgattagatttgcatagaatggcggatggacctgcccgtcgcagatgacaacaccgtccacttcaattccaccctcatggctctgatccgcacagccctggacatcaagattgccaagggaggagccgacaaacagcagatggacgctgagctgcggaaggagatgatggcgattcgactcggaccgatg

SEQ ID NO: 14072 - DNA, 203 bp, synthetic construct
  source 1..203: mol_type = other DNA
ggcgcgccagtccttcttacttttgcctgttccactaggaatattgtttgcaaggcacaaggtgtcttttggtagtgagcgcgctctgcgcatgcgcaggtccaacattactgaggcacccagcagccgactaagttgcattccttgaatcttcgcagaaaagacaattcttttaatcagagttagtacgactcggaccgatg

SEQ ID NO: 14073 - DNA, 203 bp, synthetic construct
  source 1..203: mol_type = other DNA
ggcgcgccagtcctctcagagattgctgcatttcccacacggccataatgttactcccagccaatagaaagtgagcttcttgacaagtgccaaaatggcgatgcctaccacctagaactggattgtgcgctccatttctttcacctcaaagctggccgccaccgctgccacctgctcagagtgaaatacgactcggaccgatg

SEQ ID NO: 14074 - DNA, 203 bp, synthetic construct
  source 1..203: mol_type = other DNA
ggcgcgccagtcctagcagcttttgctgcatttctattggttggcgtttgttactcccagccaatagaaagtgagcccaccccgccatgccaaaatggcgatgcctaccacctagaactggattgtgcgctccatttctttcacctcaaagctggccgccaccgctgccacctgctcagagtgaaatacgactcggaccgatg

SEQ ID NO: 14075 - DNA, 203 bp, synthetic construct
  source 1..203: mol_type = other DNA
ggcgcgccagtcctctgcaatattgctgcatttctattggttggcgtttgttactcccagccaatagaaagtgagcttcttgacaagtgccaaaatggcgatgcctaccacctagaactggattgtgcgctctcgacagaggtgtccaaagctggccgccaccgctgccacctgctcagagtgaaatacgactcggaccgatg

SEQ ID NO: 14076 - DNA, 203 bp, synthetic construct
  source 1..203: mol_type = other DNA
ggcgcgccagtcctcggatcgcttgctgcatttctattggttggcgtttgttactcccagccaatagaaagtgagcttcttgacaagtgcttggtcaagccctgctaccacctagaactggattgtgcgctccatttctttcacctcaaagctggccgccaccgctgccacctgctcagagtgaaatacgactcggaccgatg

SEQ ID NO: 14077 - DNA, 203 bp, synthetic construct
  source 1..203: mol_type = other DNA
ggcgcgccagtcctctctgatcttgcttactctcgccggggcctccgggcggcgccgtgtccgcgaccgcgtaccctgacacccccgcggaattccctccgcacctccaggcgggtgcgatgcggcgccgcttttggggcgtattcaactgtctgtgcgccggcgcgttcggggccctggccgccgcccgactcggaccgatg

SEQ ID NO: 14078 - DNA, 203 bp, synthetic construct
  source 1..203: mol_type = other DNA
ggcgcgccagtcctgattcgccttggacaaatcaaaattataatttggttcagggcctccctccagcgacggccgaactgggctagccatgcccatagtaggactagcaaaacggagggactagccatagtggcgagctccctgggatcaaccgtggtctagtacaggacagtcgtcagtagttcgaccgactcggaccgatg

SEQ ID NO: 14079 - DNA, 203 bp, synthetic construct
  source 1..203: mol_type = other DNA
ggcgcgccagtcctcgatagatttggacaaatcaaaattataatttggttcagggcctccctccagcgacggccgaactgggctagccatgcccatagtaggactagcaaaacggagggactagccatagtggcgagctccctgggtggtctaagtcctgagtacaggacagtctggttccaactctgcgactcggaccgatg

SEQ ID NO: 14080 - DNA, 203 bp, synthetic construct
  source 1..203: mol_type = other DNA
ggcgcgccagtcctatccactattggacaaatcaaaattataatttggttcagggcctccctccagcgacggccgaactgggctagccatgcccatagtaggactagcaaaacggagggactagccatagtggcgagctccctgggtggtctaagtcctgcagtttaattgtatgtcagtagttcgaccgactcggaccgatg

SEQ ID NO: 14081 - DNA, 203 bp, synthetic construct
  source 1..203: mol_type = other DNA
ggcgcgccagtcctttcatcgcttggacaaatcaaaattataatttggttcagggcctccctccagcgacggccgaactgggctagccatgcccatagtaggactagcaaaacggaggttgagctggaccgtgcgagctccctgggtggtctaagtcctgagtacaggacagtcgtcagtagttcgaccgactcggaccgatg

SEQ ID NO: 14082 - DNA, 203 bp, synthetic construct
  source 1..203: mol_type = other DNA
ggcgcgccagtcctaggtaactttggagagttattgcgagggccaggtccgcgcctgccccgccaggcgaagcgaggcgacccgcgtgcggccatggcttcgctgctgggagcctacccttggcccgagggtctcgagtgcccggccctggacgccgagctgtcggatggacaatcgccgccggccgtcgactcggaccgatg

SEQ ID NO: 14083 - DNA, 203 bp, synthetic construct
  source 1..203: mol_type = other DNA
ggcgcgccagtcctgcattgtattggagtgaatgggaccccaggcagcagcgagtgacaggacgtctggacccgcgcgccgctagcagctctgccgggccgcggcggtgatcgatggggagcggctggagcggacccagcgagtgagggcgcacagccgggacgccgaggcggcgggcgggagacccgcgactcggaccgatg

SEQ ID NO: 14084 - DNA, 203 bp, synthetic construct
  source 1..203: mol_type = other DNA
ggcgcgccagtcctaatcacttttggatctttggcctgctgactcaaaacaactgagttgtaagacgttcatcgccgtgttatccttgagtaaagaatgaactctggaagcccagccagggacaatgcaccttcacagagattctgcactaatctgagtgaaggtctaaggtttggaatctccccctccgactcggaccgatg

SEQ ID NO: 14085 - DNA, 203 bp, synthetic construct
  source 1..203: mol_type = other DNA
ggcgcgccagtcctacaagcgcttgggagcgccagttccgtctgtgtgttcgagtggacaaaatggcgaagatcgccaagactcacgaagatattgaagcacagattcgagaaattcaaggcaagaaggcagaatccatgcttcggcaaggagtgggcctcgattctacaggttattatgaccaggaacgactcggaccgatg

SEQ ID NO: 14086 - DNA, 203 bp, synthetic construct
  source 1..203: mol_type = other DNA
ggcgcgccagtccttctctgagttgggagcgccagttccgtctgtgtgttcgagtggacaaaatggcgaagatcgccaagactcacgaagatattgaagcacagattcgagaaattcaaggcaagaaggcagctcttgatgaagctgttacttatctgggcgattctacaggttattatgaccaggaacgactcggaccgatg

SEQ ID NO: 14087 - DNA, 203 bp, synthetic construct
  source 1..203: mol_type = other DNA
ggcgcgccagtcctagttcctcttgggagcgccagttccgtctgtgtgttcgagtggacaaaatggcgaagatcgccaagactcacgaagtgtgccctcacttaattcgagaaattcaaggcaagaaggcagctcttgatgaagctcaaggagtgggcctcgattctacaggttattatgaccaggaacgactcggaccgatg

SEQ ID NO: 14088 - DNA, 203 bp, synthetic construct
  source 1..203: mol_type = other DNA
ggcgcgccagtcctcctggacattgggagcgccagttccgtctgtgtgttcgagtggacaaagcctacgccggtaacaagactcacgaagatattgaagcacagattcgagaaattcaaggcaagaaggcagctcttgatgaagctcaaggagtgggcctcgattctacaggttattatgaccaggaacgactcggaccgatg

SEQ ID NO: 14089 - DNA, 203 bp, synthetic construct
  source 1..203: mol_type = other DNA
ggcgcgccagtcctttacctacttgggcagagggactcttacaatgtagattgcggcggcccgcagcgggataaccttgaggctgaggcagtggctccttgcacagcagctgcacgcgccgtggctccggatctcttcgtctttgcagcgtagcccgagtcggtcagcgccggaggacctcagcagcccgactcggaccgatg

SEQ ID NO: 14090 - DNA, 203 bp, synthetic construct
  source 1..203: mol_type = other DNA
ggcgcgccagtcctggcacacgttgggcagagggcggggcggcggagggattgcggcggcccgcagcgggataacccaattatgtgtagggtggctccttgcacagcagctgcacgcgccgtggctccggatctcttcgtctttgcagcgtagcccgagtcggtcagcgccggaggacctcagcagcccgactcggaccgatg

SEQ ID NO: 14091 - DNA, 203 bp, synthetic construct
  source 1..203: mol_type = other DNA
ggcgcgccagtcctcccatttgttgggcagagggcggggcggcggagggattgcggcggcccgcagcgggataaccttgaggctgaggcagtggctccttgcacagcagctgcacgcgccgtggctccggatctcttcgtctttgcagcgtagcccgagtataatcctatgcagggacctcagcagcccgactcggaccgatg

SEQ ID NO: 14092 - DNA, 203 bp, synthetic construct
  source 1..203: mol_type = other DNA
ggcgcgccagtcctgggccggcttgggcagagggcggggcggcggagggattgcggcggcccgcagcgggataaccttgaggctgaggcagtggctccttgcacagcagctgcacgcgccgtggctccggatctcttcgtctttgcgtaaactgtacccgcggtcagcgccggaggacctcagcagcccgactcggaccgatg

SEQ ID NO: 14093 - DNA, 203 bp, synthetic construct
  source 1..203: mol_type = other DNA
ggcgcgccagtccttggagtagttgggcagagggcggggcggcggagggattgcggcggcccgcagcgggataaccttgaggctgaggcagtggctccttgcacagcagctgcacgcgtaaatttcatttcactcttcgtctttgcagcgtagcccgagtcggtcagcgccggaggacctcagcagcccgactcggaccgatg

SEQ ID NO: 14094 - DNA, 203 bp, synthetic construct
  source 1..203: mol_type = other DNA
ggcgcgccagtcctgtcgtcaattgggcagagggcggggcggcggagggattgcggcggcccgcagcgggataaccttgaggctgaggcatatcaattggatttagcagctgcacgcgccgtggctccggatctcttcgtctttgcagcgtagcccgagtcggtcagcgccggaggacctcagcagcccgactcggaccgatg

SEQ ID NO: 14095 - DNA, 203 bp, synthetic construct
  source 1..203: mol_type = other DNA
ggcgcgccagtcctctactgcgttggtgggggagccctgccctcctggacttaataagtgaggcactagaacgatcatgaacttctgaagggacccagctttctttgtgtgctccaagtgatttgcacaaataataatatatatatttattgaaggagagaatcagagcaagtgataatcaagttactcgactcggaccgatg

SEQ ID NO: 14096 - DNA, 203 bp, synthetic construct
  source 1..203: mol_type = other DNA
ggcgcgccagtccttgggcaacttggttttatttattcctccttcaacaaaagaaagccccagcgctctagagctcagctgacgggaaagggggtgcgcagcctcgagtttgagagctacccggagctccaagacaggggtgggttccagctgcccgcacgccccgaccttccatcgtaggccggacccgactcggaccgatg

SEQ ID NO: 14097 - DNA, 203 bp, synthetic construct
  source 1..203: mol_type = other DNA
ggcgcgccagtccttggtgtccttggttttatttcaagaagtcgatcaaaaagaaagccccagcgctctagagctcagctgacgggaaagggggtgcgcagcctcgagtttgagagctacccggagctccaaaggtaactgttccaccagctgcccgcacgccccgaccttccatcgtaggccggacccgactcggaccgatg

SEQ ID NO: 14098 - DNA, 203 bp, synthetic construct
  source 1..203: mol_type = other DNA
ggcgcgccagtcctactccagcttggttttatttcaagaagtcgatcaaaaagaaagccccagcgctctagagctcagctgacgggaaagggggtgcgcagcctcgagtttgagagctacccggagctccaagacaggggtgggttccagctgcccgcacgccccgaccttccacacatccaaatggtcgactcggaccgatg

SEQ ID NO: 14099 - DNA, 203 bp, synthetic construct
  source 1..203: mol_type = other DNA
ggcgcgccagtccttggcattcttgtattgctcttttttatatgttgttgtactggttgtggttctgcatgttttagtaaatgtcataattgttgtgatgagtatggtggtcatcatgattttgttatcaaaacatctcatgatgattagaatctcttgtcagatctcattaaacgcggttaccgggccgactcggaccgatg

SEQ ID NO: 14100 - DNA, 203 bp, synthetic construct
  source 1..203: mol_type = other DNA
ggcgcgccagtccttttgaaatttgtggggtagttcggcgggagtgttggaggtcggcgccggcccccgccttccgcgccccccacgggaaggaagcacccccggtattaaaacgaacggggcggaaagaagccctcagtcgccggccgggaggcgagccgatgccgagctgctccacgtccaccatgcgactcggaccgatg

SEQ ID NO: 14101 - DNA, 203 bp, synthetic construct
  source 1..203: mol_type = other DNA
ggcgcgccagtcctccggctgattgtgttggcaaatcaggcagcgcgtctgattcaattgtgttttacttgtcattatttttttagtaggacattatatcaaccagtttataaaatttttcttgcttaccaagattatatgcaaatagcacctgttccagctgaagtactaaatgtctaaactaaacgcgactcggaccgatg

SEQ ID NO: 14102 - DNA, 203 bp, synthetic construct
  source 1..203: mol_type = other DNA
ggcgcgccagtcctccaattaattgtgttggcaatgacctttattaaactgattcaattgtggggccaaaccacaaatttttttagtaggacattatatcaaccagtttataaaatttttcttgcttaccaagattatatgcaaatagcacctgttccagctgaagtactaaatgtctaaactaaacgcgactcggaccgatg

SEQ ID NO: 14103 - DNA, 203 bp, synthetic construct
  source 1..203: mol_type = other DNA
ggcgcgccagtcctccacttggttgtgttggcaatgacctttattaaactgattcaattgtgttttacttgtcattatttttttagtaggacattatatcaaccagtttataaaatttttcttgcttaccaagattatatgcaaatagcacctgttccagagatccctgactgggtctaaactaaacgcgactcggaccgatg

SEQ ID NO: 14104 - DNA, 203 bp, synthetic construct
  source 1..203: mol_type = other DNA
ggcgcgccagtcctgattgcgtttgttaagagaggcaggcggcccggcgcggtgtttacccgcggtgcatggtggggcggtctccttcggcaaccccggccgaacggccacccagaggctgtgctgagctggcgcagcggcagcagcatgagccggaccctcgcatcggccgtgcccctgtcgagtcccgactcggaccgatg

SEQ ID NO: 14105 - DNA, 203 bp, synthetic construct
  source 1..203: mol_type = other DNA
ggcgcgccagtcctagcgaaacttgttagatcttaggccgcatcgctatttataaaaacatccactccctgtaatctatgcttgtgggcgtagatttttcatagtggtgtttatattcatttctgctgttaacagctttcagccagggacgtgttgtatcctaggcagtggcccgcccataggtcacacgactcggaccgatg

SEQ ID NO: 14106 - DNA, 203 bp, synthetic construct
  source 1..203: mol_type = other DNA
ggcgcgccagtccttccggtcattgttagatctttttgtaatctaaacccatcgtccggtcacactccctgtaatctatgcttgtgggcgtagatttttcatagtggtgtttatattcatttctgctgttaacagctttcagccagggacgtgttgtatcctaggcagtggcccgcccataggtcacacgactcggaccgatg

SEQ ID NO: 14107 - DNA, 203 bp, synthetic construct
  source 1..203: mol_type = other DNA
ggcgcgccagtccttaaacgcgttgttagatctttttgtaatctaaactttataaaaacatccactccctgtaatctatgcttgtgggcgtagatttttcatagtggtgtttatattcatttctgctgttaacagctttcagccagtattagccaagcagctaggcagtggcccgcccataggtcacacgactcggaccgatg

SEQ ID NO: 14108 - DNA, 203 bp, synthetic construct
  source 1..203: mol_type = other DNA
ggcgcgccagtcctggaagaacttgtttttcccgcgaaactcggcggctgagcgtggaggttcttgtctcccctggtttgtgaagtgcggaaaaccagaggcgcttgtcgtgatttcatcgacgatcctggcattttctacagcgacagcttcgggggcgacgcccaggccgacgaggggcaggcccgcgactcggaccgatg

SEQ ID NO: 14109 - DNA, 203 bp, synthetic construct
  source 1..203: mol_type = other DNA
ggcgcgccagtcctaggtccatttgtttttcccgtcgccggtaagacttgagcgtggaggttcttgtctcccctggtttgtgaagtgcggaaaaccagaggcgcagtcatgtcgggattcgacgatcctggcattttctacagcgacagcttcgggggcgacgcccaggccgacgaggggcaggcccgcgactcggaccgatg

SEQ ID NO: 14110 - DNA, 203 bp, synthetic construct
  source 1..203: mol_type = other DNA
ggcgcgccagtcctttccctggtttaaaaacagaaaatgcaaagttggactgaaaatatccccacaagctgtttttatctgcttaaggcttccaaacttaccttaatttggtaagaaaataagctgccctatttttctttcttcttctcttacaactggaagcagccatttccccaaaccaccaccatcgactcggaccgatg

SEQ ID NO: 14111 - DNA, 203 bp, synthetic construct
  source 1..203: mol_type = other DNA
ggcgcgccagtcctggccacggtttacttctgtccgacagcgtgacgacgctagcctcggcttgggtaaggcgaggcggaattaaaccccgctccgagagcggcagcttcgcgcgcggtgcgctcggcctatgcctgccccgaggggcgtctggtaggcaccccgccctctcccgcagctcgaccccccgactcggaccgatg

SEQ ID NO: 14112 - DNA, 203 bp, synthetic construct
  source 1..203: mol_type = other DNA
ggcgcgccagtcctccggtgtatttacttctgtctcgtctgccccaacattcgtggcacaaatgggtaaggcgaggcggaattaaaccccgctccgagagcggcagcttcgcgcgcggtgcgctcggcctatgcctgccccgaggggcgtctggtaggcaccccgccctctcccgcagctcgaccccccgactcggaccgatg

SEQ ID NO: 14113 - DNA, 203 bp, synthetic construct
  source 1..203: mol_type = other DNA
ggcgcgccagtcctgggcatcatttacttctgtctcgtctgccccaaccgctagcctcggctgcccgttccacgctcggaattaaaccccgctccgagagcggcagcttcgcgcgcggtgcgctcggcctatgcctgccccgaggggcgtctggtaggcaccccgccctctcccgcagctcgaccccccgactcggaccgatg

SEQ ID NO: 14114 - DNA, 203 bp, synthetic construct
  source 1..203: mol_type = other DNA
ggcgcgccagtccttaccgcagtttacttctgtctcgtctgccccaaccgctagcctcggcttgggtaaggcgaggaatttaacccgggagctccgagagcggcagcttcgcgcgcggtgcgctcggcctatgcctgccccgaggggcgtctggtaggcaccccgccctctcccgcagctcgaccccccgactcggaccgatg

SEQ ID NO: 14115 - DNA, 203 bp, synthetic construct
  source 1..203: mol_type = other DNA
ggcgcgccagtccttaagtctatttacttctgtctcgtctgccccaaccgctagcctcggcttgggtaaggcgaggcggaattaaaccccgctccgagagcggcagcttcgcgcgcggcaattcttagtccggcctgccccgaggggcgtctggtaggcaccccgccctctcccgcagctcgaccccccgactcggaccgatg

SEQ ID NO: 14116 - DNA, 203 bp, synthetic construct
  source 1..203: mol_type = other DNA
ggcgcgccagtcctcacggatgtttacttctgtctcgtctgccccaaccgctagcctcggcttgggtaaggcgaggcggaattaaaccccgctccgagagcggcagcttcgcgcgcggtgcgctcggcctataaggcttagtccttgcgtctggtaggcaccccgccctctcccgcagctcgaccccccgactcggaccgatg

SEQ ID NO: 14117 - DNA, 203 bp, synthetic construct
  source 1..203: mol_type = other DNA
ggcgcgccagtccttaaagtaatttacttctgtctcgtctgccccaaccgctagcctcggcttgggtaaggcgaggcggaattaaaccccgctccgagagcggcagcttcgcgcgcggtgcgctcggcctatgcctgccccgagggaaagtaaaggcaacccccgccctctcccgcagctcgaccccccgactcggaccgatg

SEQ ID NO: 14118 - DNA, 203 bp, synthetic construct
  source 1..203: mol_type = other DNA
ggcgcgccagtccttgcaccggtttacttctgtctcgtctgccccaaccgctagcctcggcttgggtaaggcgaggcggaattaaaccccgctccgagagcggcagcttcgcgcgcggtgcgctcggcctatgcctgccccgaggggcgtctggtaggcaccccgccctctcccgcagctcgaccccccgactcggaccgatg

SEQ ID NO: 14119 - DNA, 203 bp, synthetic construct
  source 1..203: mol_type = other DNA
ggcgcgccagtcctacttgggttttacttctgtctcgtctgccccaaccgctagcctcggcttgggtaaggcgaggcggaattaaaccccgctccgagagcggcagcttcgcgcgcggtgcgctcggcctatgcctgccccgaggggcgtctggtaggcagatatgttcggggtgcagctcgaccccccgactcggaccgatg

SEQ ID NO: 14120 - DNA, 203 bp, synthetic construct
  source 1..203: mol_type = other DNA
ggcgcgccagtcctcgacacagtttacttctgtctcgtctgccccaaccgctagcctcggcttgggtaaggcgaggcggaattaaaccccgctccgagagcggcgatactcaaacatatgcgctcggcctatgcctgccccgaggggcgtctggtaggcaccccgccctctcccgcagctcgaccccccgactcggaccgatg

SEQ ID NO: 14121 - DNA, 203 bp, synthetic construct
  source 1..203: mol_type = other DNA
ggcgcgccagtcctgcgcccagtttagaagaggataaaagaatcagagctggaatgaaacacacaagaggaccaagtgcctttattccagagaaggaagttgtccaagcaaacacagtggatgaacgtactaactttcttgtggaagaatactctacatccggtcgtctggacaacatcacacaggtccgactcggaccgatg

SEQ ID NO: 14122 - DNA, 203 bp, synthetic construct
  source 1..203: mol_type = other DNA
ggcgcgccagtcctctgggtcgtttagaattagaatgtttcttagcgggaacccccactcaattatgtcataagtggataatttgttagctcctataacaaaagtctgttgcttgtgtttcacattttggatttcctaatataatgttctctttttagaaaaggtggacaagtcctattttcaagagacgactcggaccgatg

SEQ ID NO: 14123 - DNA, 203 bp, synthetic construct
  source 1..203: mol_type = other DNA
ggcgcgccagtccttcaggacgtttagaattagaatgtttcttagcggtcgtgtagttatttttatgtcataagtgccctgccgcgcctatcctataacaaaagtctgttgcttgtgtttcacattttggatttcctaatataatgttctctttttagaaaaggtggacaagtcctattttcaagagacgactcggaccgatg

SEQ ID NO: 14124 - DNA, 203 bp, synthetic construct
  source 1..203: mol_type = other DNA
ggcgcgccagtcctttctcggctttataacggtcgctaaggatgcccttcaggtaccccgaggtaacacgcgacactcgggatctgagaaggggactggggcttctataaaagcgctcggtttaaaaagcttctatgcctgaataggtgaccggaggtcggcacctttcctttacaattaatgaccctcgactcggaccgatg

SEQ ID NO: 14125 - DNA, 203 bp, synthetic construct
  source 1..203: mol_type = other DNA
ggcgcgccagtcctctccaacctttatcgaaggaggagctgctggtactcccgattggagacgtagaaccgttacttgtcgagggccttagcggccgccgtgaccctctcggggatcccacgatgttcttctacctgagcaagaaaatttccattcccaataacgtgaagctgcagtgtgtatcctggcgactcggaccgatg

SEQ ID NO: 14126 - DNA, 203 bp, synthetic construct
  source 1..203: mol_type = other DNA
ggcgcgccagtcctgtgcgaattttcaacaccagcgaacggcgacagatcattttggtgggattctcagattggccgcaactggagcccatcctgtttgtctttatttttattttctactccctaactctctttggcaacaccatcatcatcgctctctcctggctagaccttcggctgcacacacctcgactcggaccgatg

SEQ ID NO: 14127 - DNA, 203 bp, synthetic construct
  source 1..203: mol_type = other DNA
ggcgcgccagtcctagcgcgagtttcaacaccagttttgaagatggcttcattttggtgggattctcagattggccgcaactggagcccaagactagctataggatttttattttctactccctaactctctttggcaacaccatcatcatcgctctctcctggctagaccttcggctgcacacacctcgactcggaccgatg

SEQ ID NO: 14128 - DNA, 203 bp, synthetic construct
  source 1..203: mol_type = other DNA
ggcgcgccagtcctttatgtgatttcaacaccagttttgaagatggcttcattttggtgggattctcagattggccgcaactggagcccatcctgtttgtctttatttttattttctactccctaactctctaaacttgataatcaatcatcgctctctcctggctagaccttcggctgcacacacctcgactcggaccgatg

SEQ ID NO: 14129 - DNA, 203 bp, synthetic construct
  source 1..203: mol_type = other DNA
ggcgcgccagtcctatgtgagatttcaacaccagttttgaagatggcttcattttggtgggattctcagattggccgcaactggagcccatcctgtttgtctttatttttattttctactccctaactctctttggcaacaccatcatcatcgctctctcctggctagaccttccctacaggtattgccgactcggaccgatg

SEQ ID NO: 14130 - DNA, 203 bp, synthetic construct
  source 1..203: mol_type = other DNA
ggcgcgccagtcctctttggcgtttcaacaccagttttgaagatggcttcattttggtgggattctcagattggccgcaactggagcccatcctgtttgtctttatttttattttctactccctaactctctttggcaacaccatcccttattggggtcactggctagaccttcggctgcacacacctcgactcggaccgatg

SEQ ID NO: 14131 - DNA, 203 bp, synthetic construct
  source 1..203: mol_type = other DNA
ggcgcgccagtcctaattcgtttttcaagggataagaaaccctgcgacaaaacctcctccttttccaagcggctgccgaagatggcggaggtgcaggtcctggtgcttgatggtcgaggccatctcctgggccgcctggcggccatttgacaccttataggaagtacctggctttcctccgcaagcggcgactcggaccgatg

SEQ ID NO: 14132 - DNA, 203 bp, synthetic construct
  source 1..203: mol_type = other DNA
ggcgcgccagtcctagtattaatttcaagggatagctgggtggtatgtaaaacctcctccttttccaagcggctgccgaagatggcggaggtgcaggtcctggtgcttgatggtcgaggccatctcctgggccgcctggcggccatcgtggctaaacagtgaagtacctggctttcctccgcaagcggcgactcggaccgatg

SEQ ID NO: 14133 - DNA, 203 bp, synthetic construct
  source 1..203: mol_type = other DNA
ggcgcgccagtcctggtgtttctttcagcagcagaaagctatgccaagagtttgaaagaaagcaataaaattaacttttcttcattaggactcacagatgaagaaaaagaggctgcagaacactttctaaatgtgagtgacgacagtcaaaatgattatgagtaattaaaaaaggcattaggccacgtcgactcggaccgatg

SEQ ID NO: 14134 - DNA, 203 bp, synthetic construct
  source 1..203: mol_type = other DNA
ggcgcgccagtcctaggaacggtttcagcagcagaaagctatgccaagagtttgaaagaaagcaataaaattaacttttcttcattaggactcacagatgaagaaaaagaggctgcagtggtaaaatagttagtgagtgacgacagtcaaaatgattatgagtaattaaaaaagtgggacaagtcaaacgactcggaccgatg

SEQ ID NO: 14135 - DNA, 203 bp, synthetic construct
  source 1..203: mol_type = other DNA
ggcgcgccagtcctcacaagactttcatttgcaagttggagaacgagtatggccggctgacctgctttgccttgctggaccctagatatcacactctgaacaaggtcttgaagcatgaaaaaacaccgctgttccgtaaccaggtcatcattcctctggtgttgtctccagaccgagatgaagatctccgactcggaccgatg

SEQ ID NO: 14136 - DNA, 203 bp, synthetic construct
  source 1..203: mol_type = other DNA
ggcgcgccagtccttgtcgttttttcatttgcaagttggagaacgagtatggccggctgacctgctttgccttgctttctggacagctgaacactctgaacaaggtcttgaagcatgaaaaaacaccgctgttccgtaaccaggtcggaggcgtcggtaagttgtctccagaccgagatgaagatctccgactcggaccgatg

SEQ ID NO: 14137 - DNA, 203 bp, synthetic construct
  source 1..203: mol_type = other DNA
ggcgcgccagtcctttagccgatttccacacctggttgctgactaattatccgaagacacaagcatacttctgcctgctggggagcctggggactttccacaccctaactgacacacattccacagctggttctttccgcctcagaaggtacctaaccaagttcctctttcagaggttatttcaggcccgactcggaccgatg

SEQ ID NO: 14138 - DNA, 203 bp, synthetic construct
  source 1..203: mol_type = other DNA
ggcgcgccagtcctctcccaaatttccacacctggttgctgactaattgagatgcatgctttgcatacttctgcctgctggggagcctggggactttccacacctccctaaggtggggttccacagctggttctttccgcctcagaaggtacctaaccaagttcctctttcagaggttatttcaggcccgactcggaccgatg

SEQ ID NO: 14139 - DNA, 203 bp, synthetic construct
  source 1..203: mol_type = other DNA
ggcgcgccagtcctgtgtttagtttccacacctgtacatgattactgggagatgcatgctttgcatacttctgcctgctggggagcctggggactttccacaccctaactgacacacattccacagctggttctttccgcctcagaaggtacctaaccaagttcctctttcagaggttatttcaggcccgactcggaccgatg

SEQ ID NO: 14140 - DNA, 203 bp, synthetic construct
  source 1..203: mol_type = other DNA
ggcgcgccagtcctatgggctgtttctgatcagttaccaatctgtacatcaacacacaacaccaacagaagaccaacaaacaaaccaactcacccatccaaccaaacatctatacgccaatcagccaatccaaaactagccacccggaaaaaatagatactatagttacaaaaactatgcttatccgacgactcggaccgatg

SEQ ID NO: 14141 - DNA, 203 bp, synthetic construct
  source 1..203: mol_type = other DNA
ggcgcgccagtcctggaggcagtttgcaattttaagccagtgtttgggtttgagagacattgatttttctccccgtgctcccccgttcttccctgcggagtgcgctgcgccgcccagccctgtcgccccccggaggtgatccctccctcctgcctgcccgccagcctgacctgtgcccggctcgcgggcgactcggaccgatg

SEQ ID NO: 14142 - DNA, 203 bp, synthetic construct
  source 1..203: mol_type = other DNA
ggcgcgccagtcctctttaagctttgcaattttatattttgcaaatattttgagagacattgatttttctccccgtgctcccccgttcttccctgcggagtgcgctgcgccgcccagctaacaacaaaaatcgaggtgatccctccctcctgcctgcccgccagcctgacctgtgcccggctcgcgggcgactcggaccgatg

SEQ ID NO: 14143 - DNA, 203 bp, synthetic construct
  source 1..203: mol_type = other DNA
ggcgcgccagtcctaggcgtactttgcaattttatattttgcaaatattttgagagacattgatttttctccccgtgctcccccgttcttccctgcggagtgcggaaacttagtggttcctgtcgccccccggaggtgatccctccctcctgcctgcccgccagcctgacctgtgcccggctcgcgggcgactcggaccgatg

SEQ ID NO: 14144 - DNA, 203 bp, synthetic construct
  source 1..203: mol_type = other DNA
ggcgcgccagtcctccgggccctttgcctgctgccttccaagccaagcgctttaacaggagagcgtactgcggtcagtgcagcgagaggatatggggcctcgcgaggcaaggctacaggtgcatcaactgcaaactgctggtccataagcgctgccacggcctcgtcccgctgacctgcaggaagcatcgactcggaccgatg

SEQ ID NO: 14145 - DNA, 203 bp, synthetic construct
  source 1..203: mol_type = other DNA
ggcgcgccagtcctttcgtctgtttgccttggttaagccccatagaaacgaggcgtcacgtgccgaaaatccctttgcgtttcacagaaccatcctaaccatgggtgtagtatgggaactacaagccccttagattaggatctctcgtagagggataggtgtgccattcaaatccagggagtactctgcgactcggaccgatg

SEQ ID NO: 14146 - DNA, 203 bp, synthetic construct
  source 1..203: mol_type = other DNA
ggcgcgccagtcctgacggcggtttgccttggttaagccccatagaaacgaggcgtcacgtgccgaaaatccctttgcgtttcacagaaccatcctaaccatgggtgtagtatgggaatcgtgtatggggatgattaggatctctcgtagagggataggtgtgccattcaaatccagggagtactctgcgactcggaccgatg

SEQ ID NO: 14147 - DNA, 203 bp, synthetic construct
  source 1..203: mol_type = other DNA
ggcgcgccagtcctcaggaaattttgccttggttaagccccatagaaacgaggcgtcacgtgccgaaaatccctttgcgtttcacagaaccatcctaaccatgggtgtagtatgggaatcgtgtatggggatgattaggatctctcgtagagggataggtgtgccattcaaatctcacatactggacccgactcggaccgatg

SEQ ID NO: 14148 - DNA, 203 bp, synthetic construct
  source 1..203: mol_type = other DNA
ggcgcgccagtccttatgcttctttgccttggttaagccccatagaaacgaggcgtcacgtggattcttcagggccgcgtttcacagaaccatcctaaccatgggtgtagtatgggaatcgtgtatggggatgattaggatctctcgtagagggataggtgtgccattcaaatccagggagtactctgcgactcggaccgatg

SEQ ID NO: 14149 - DNA, 203 bp, synthetic construct
  source 1..203: mol_type = other DNA
ggcgcgccagtcctgtgtgctatttgccttggttttagtatggtatctcgaggcgtcacgtgccgaaaatccctttgcgtttcacagaaccatcctaaccatgggtgtagtatgggaatcgtgtatggggatgattaggatctctcgtagagggataggtgtgccattcaaatccagggagtactctgcgactcggaccgatg

SEQ ID NO: 14150 - DNA, 203 bp, synthetic construct
  source 1..203: mol_type = other DNA
ggcgcgccagtcctcaagttgatttgcttctcactttacattacgtaggtcatcggagcatgatagtaataattttggtgttgtaactagttttactacttatggtaatactgtttctgaggctgtgtctagattagttgaatcagcttctgaatttattgtttggcgtgcagaggcacttaataagtcgactcggaccgatg

SEQ ID NO: 14151 - DNA, 203 bp, synthetic construct
  source 1..203: mol_type = other DNA
ggcgcgccagtccttgaatgtatttgcttctcactttacattacgtagtcacgatatttcccatagtaataattttggtgttgtaactagacaggactaagtgcgtaatactgtttctgaggctgtgtctagattagttgaatcagcttctgaatttattgtttggcgtgcagaggcacttaataagtcgactcggaccgatg

SEQ ID NO: 14152 - DNA, 203 bp, synthetic construct
  source 1..203: mol_type = other DNA
ggcgcgccagtcctcgataacgtttgtctttactaggccaccgtctcgtcagcgttacggagtattttgtccgcctgccgccgccgtcccagatattaatcacggagttccagggagaaggaacttgtgaaatgggggagccggctggggttgccggcaccatggagtcaccttttagcccgggactccgactcggaccgatg

SEQ ID NO: 14153 - DNA, 203 bp, synthetic construct
  source 1..203: mol_type = other DNA
ggcgcgccagtcctgccgccactttgtctttactaggccaccgtctcgtcagcgttacggagtattttgtccgcctgccgccgccgtcccagatattaatcacggagttccagggagaaggaacttgtgaaatgggggagccggctggggttgccggcacgccacttatcgagattagcccgggactccgactcggaccgatg

SEQ ID NO: 14154 - DNA, 203 bp, synthetic construct
  source 1..203: mol_type = other DNA
ggcgcgccagtcctccaacggctttgtctttactctcagtatccaaactcagcgttacggagtattttgtccgcctgccgccgccgtcccagatattaatcacggagttccagggagaaggaacttgtgaaatgggggagccggctggggttgccggcaccatggagtcaccttttagcccgggactccgactcggaccgatg

SEQ ID NO: 14155 - DNA, 203 bp, synthetic construct
  source 1..203: mol_type = other DNA
ggcgcgccagtcctaacattggtttgtgtgtttggactagcggcaccatttgttcgtcacttgtcgacagcgccctgcgaattggtgtacccacaccgcgcggcttgcgaataatactttggagagtcttttgcctccagtgtcttccgtttgtactcgtcctcctctccctctccggccgggatgggcgactcggaccgatg

SEQ ID NO: 14156 - DNA, 203 bp, synthetic construct
  source 1..203: mol_type = other DNA
ggcgcgccagtccttgttgtaatttgtgtgtttgtttgttaccttgtgagacaattaacaaggtcgacagcgccctgcgaattggtgtacccacaccgcgcggcttgcgaataatactttggagagtcttttgcctccagtgtcttccgtttgtactcgtcctcctctccctctccggccgggatgggcgactcggaccgatg

SEQ ID NO: 14157 - DNA, 203 bp, synthetic construct
  source 1..203: mol_type = other DNA
ggcgcgccagtcctggtttcggtttgtgtgtttgtttgttaccttgtgtttgttcgtcacttcgtttgtaacaatcgcgaattggtgtacccacaccgcgcggcttgcgaataatactttggagagtcttttgcctccagtgtcttccgtttgtactcgtcctcctctccctctccggccgggatgggcgactcggaccgatg

SEQ ID NO: 14158 - DNA, 203 bp, synthetic construct
  source 1..203: mol_type = other DNA
ggcgcgccagtcctttattcggtttgtgtgtttgtttgttaccttgtgtttgttcgtcacttgtcgacagcgccctgcgaattggtgtacccacaccgcgcggcgatgtgggctcggcttggagagtcttttgcctccagtgtcttccgtttgtactcgtcctcctctccctctccggccgggatgggcgactcggaccgatg

SEQ ID NO: 14159 - DNA, 203 bp, synthetic construct
  source 1..203: mol_type = other DNA
ggcgcgccagtccttcgagagatttgtgtgtttgtttgttaccttgtgtttgttcgtcacttgtcgacagcgccctgcgaattggtgtacccacaccgcgcggcttgcgaataatactttggagagtcttttgcctccagtgtcttccgtttgtactcgtaacatgtcgaggtcccggccgggatgggcgactcggaccgatg

SEQ ID NO: 14160 - DNA, 203 bp, synthetic construct
  source 1..203: mol_type = other DNA
ggcgcgccagtcctgaaagctgtttgtgtgtttgtttgttaccttgtgtttgttcgtcacttgtcgacagcgccctgcgaattggtgtacccacaccgcgcggcttgcgaataatactttggagagtcttttgcctccagtgtcttccgtttgtactcgtcctcctctccctcttgtaaacaagcccacgactcggaccgatg

SEQ ID NO: 14161 - DNA, 203 bp, synthetic construct
  source 1..203: mol_type = other DNA
ggcgcgccagtcctcatttaaatttgtgtgtttgtttgttaccttgtgtttgttcgtcacttgtcgacagcgccctgcgaattggtgtacccacaccgcgcggcttgcgaataatactttggagagtcttttgcctccagtgtcttgtaaagcctacgagcctcctctccctctccggccgggatgggcgactcggaccgatg

SEQ ID NO: 14162 - DNA, 203 bp, synthetic construct
  source 1..203: mol_type = other DNA
ggcgcgccagtcctaatcgaactttgttcaccacatcagtcaccctttattctggtcccatgcgtcctctgcccaagaaacacgtagaacccatggcagtgcgacagctgcttcttggcaactccaccatgatcaggcacacttgtcccatgtctgtcccgttgagccggcaagtcaaggaagttgctcgactcggaccgatg

SEQ ID NO: 14163 - DNA, 203 bp, synthetic construct
  source 1..203: mol_type = other DNA
ggcgcgccagtccttcattccttttgttcaccaccattcctggtgcccattctggtcccatgatagagagtgaagcgaaacacgtagaacccatggcagtgcgacagctgcttcttggcaactccaccatgatcaggcacacttgtcccatgtctgtcccgttgagccggcaagtcaaggaagttgctcgactcggaccgatg

SEQ ID NO: 14164 - DNA, 203 bp, synthetic construct
  source 1..203: mol_type = other DNA
ggcgcgccagtcctgtaaaccgtttgttcaccaccattcctggtgcccattctggtcccatgcgtcctctgcccaagaaacacgtagaacccatggcagtgcgaagcacctgagactacaactccaccatgatcaggcacacttgtcccatgtctgtcccgttgagccggcaagtcaaggaagttgctcgactcggaccgatg

SEQ ID NO: 14165 - DNA, 203 bp, synthetic construct
  source 1..203: mol_type = other DNA
ggcgcgccagtccttctcagtctttgttcaccaccattcctggtgcccattctggtcccatgcgtcctctgcccaagaaacacgtagaacccatggcagtgcgacagctgcttcttggcaactccaccatgatcaggcacacttgtttgtccctgaaaaggttgagccggcaagtcaaggaagttgctcgactcggaccgatg

SEQ ID NO: 14166 - DNA, 203 bp, synthetic construct
  source 1..203: mol_type = other DNA
ggcgcgccagtcctcgaagatgtttgttcaccaccattcctggtgcccattctggtcccatgcgtcctctgcccaagaaacacgtagaacccatggcagtgcgacagctgcttcttggtggacggggacgcttcaggcacacttgtcccatgtctgtcccgttgagccggcaagtcaaggaagttgctcgactcggaccgatg

SEQ ID NO: 14167 - DNA, 203 bp, synthetic construct
  source 1..203: mol_type = other DNA
ggcgcgccagtccttcctcttatttgttcaccaccattcctggtgcccattctggtcccatgcgtcctctgcccaatttggttcctacttccatggcagtgcgacagctgcttcttggcaactccaccatgatcaggcacacttgtcccatgtctgtcccgttgagccggcaagtcaaggaagttgctcgactcggaccgatg

SEQ ID NO: 14168 - DNA, 203 bp, synthetic construct
  source 1..203: mol_type = other DNA
ggcgcgccagtccttgatggcgtttgttcaccaccattcctggtgccccggagtaagttcgccgtcctctgcccaagaaacacgtagaacccatggcagtgcgacagctgcttcttggcaactccaccatgatcaggcacacttgtcccatgtctgtcccgttgagccggcaagtcaaggaagttgctcgactcggaccgatg

SEQ ID NO: 14169 - DNA, 203 bp, synthetic construct
  source 1..203: mol_type = other DNA
ggcgcgccagtcctagtcatctttttacagatatgtctgctatgtggggacgataagtcgagttccccgggataagcctcactcgtcccctctcggggggcggaacacccacctgctagccccgctgctctctttgctttcctcctcgcttcggtctcccccaactcctagcatcccctcctatcgctcgactcggaccgatg

SEQ ID NO: 14170 - DNA, 203 bp, synthetic construct
  source 1..203: mol_type = other DNA
ggcgcgccagtccttgtaattattttacttctgaacgaaatggagaaagatcgggtagtaggcttcagacttgaacaagaaactgggtctcactatgttgcccaggttgatattgaactcctggactcaagcaaccctccctctttggcctctgaaagtactgggattacaagcataagccaccgggccgactcggaccgatg

SEQ ID NO: 14171 - DNA, 203 bp, synthetic construct
  source 1..203: mol_type = other DNA
ggcgcgccagtcctacatctgcttttagatttaagtaagtttgaatgtaaacataaagccactgttgttgttacaccagctcgcgccctcgtaaatgatatggttttgagtttgattaagagtggtaggttgttgttacgcaataatggtcgttttggtggttttagtaatcatttagtctcaactaacgactcggaccgatg

SEQ ID NO: 14172 - DNA, 203 bp, synthetic construct
  source 1..203: mol_type = other DNA
ggcgcgccagtcctaagaatgcttttagatttaagtaagtttgaatgtaaacataaagccactgttgttgttacacttaaagatagtgatgtaaatgatatggttttgagtttgattaagagtggtaggttgttgttacgcaataagctcgtgaagttccgttttagtaatcatttagtctcaactaacgactcggaccgatg

SEQ ID NO: 14173 - DNA, 203 bp, synthetic construct
  source 1..203: mol_type = other DNA
ggcgcgccagtcctcgtggttattttagatttaagtaagtttgaatgtaaacataaagccactgttgttgttacacttaaagatagtgatgtaaatgatatggttttgagtttgattattctcccaccagacttgttacgcaataatggtcgttttggtggttttagtaatcatttagtctcaactaacgactcggaccgatg

SEQ ID NO: 14174 - DNA, 203 bp, synthetic construct
  source 1..203: mol_type = other DNA
ggcgcgccagtccttcatagtgttttataataatcgccggcgctcgcaggccgcggatgaagaagaaaacccggcgccgctcgacccggagcgaggagttgacccggagcgaggagttgaccctgagtgaggaagcgacctggagtgaagaggcgacccagagtgaggaggcgacccagggcgaagagcgactcggaccgatg

SEQ ID NO: 14175 - DNA, 203 bp, synthetic construct
  source 1..203: mol_type = other DNA
ggcgcgccagtccttaacgcccttttgaagtattatttttatgaatcaagccctggaaaaggacaagatatttgaaatgctctcgtaaagtaatggagaacttcacagttgctactcctgtgataggtttatcttagtttcattgtggtataaatggaatagcaggtgttgtcaggtacaaggtttgtcgactcggaccgatg

SEQ ID NO: 14176 - DNA, 203 bp, synthetic construct
  source 1..203: mol_type = other DNA
ggcgcgccagtcctgaggcaccttttgaagtattatttttatgaatcaagccctggaaaaggacaagatatttgaatgaaatagcacccataatggagaacttcacagttgctactcctgtgataggtttatcttagtttcattgtggtataaatggaatagcaggtgttgtcaggtacaaggtttgtcgactcggaccgatg

SEQ ID NO: 14177 - DNA, 203 bp, synthetic construct
  source 1..203: mol_type = other DNA
ggcgcgccagtcctcaccaaggttttgaagtattatttttatgaatcaagccctggaaaaggcgccaggccccttctgaaatagcacccataatggagaacttcacagttgctactcctgtgataggtttatcttagtttcattgtggtataaatggaatagcaggtgttgtcaggtacaaggtttgtcgactcggaccgatg

SEQ ID NO: 14178 - DNA, 203 bp, synthetic construct
  source 1..203: mol_type = other DNA
ggcgcgccagtcctttgtcaccttttgaagtattccgcaacaagcaacagccctggaaaaggacaagatatttgaatgaaatagcacccataatggagaacttcacagttgctactcctgtgataggtttatcttagtttcattgtggtataaatggaatagcaggtgttgtcaggtacaaggtttgtcgactcggaccgatg

SEQ ID NO: 14179 - DNA, 203 bp, synthetic construct
  source 1..203: mol_type = other DNA
ggcgcgccagtcctgctcagcttttttcatctaacctctgagctgagtttgaggccgtccccgactccttcctcccccttccctcccccttttttttgttttccgttcccctttcccctcccttccctatccccgacgaccggatcctgaggaggcagctgcggtggcagctgctgagttctcggtgacgactcggaccgatg

SEQ ID NO: 14180 - DNA, 203 bp, synthetic construct
  source 1..203: mol_type = other DNA
ggcgcgccagtcctaggctcttctaacaatttccggcgggtgagattttcccggcgggtattctatagccggcgggtggcaaaataccggcgggttaggaggagccggcgggtgaacaaattccggcgggttacatttagccggcgggtatgaaaattccggcgggtaatgtatatccggcgggttttcgactcggaccgatg

SEQ ID NO: 14181 - DNA, 203 bp, synthetic construct
  source 1..203: mol_type = other DNA
ggcgcgccagtcctagtaaagttgagaaaaacaccggccgtcattaagaaaccggccgtttcgtagtgaccggccgttggaaggagaccggccgtttcagcttgaccggccgtttgttacttaccggccgttttttgaaaaccggccgtacaaggtagaccggccgtatatccaaaaccggccgtgatcgactcggaccgatg

SEQ ID NO: 14182 - DNA, 203 bp, synthetic construct
  source 1..203: mol_type = other DNA
ggcgcgccagtcctagctctgtatagaaaaactatgaagaacattaagaagatctttctttcgtagtgttcttttactggaaggagtactcccatttcagcttgtactcccaattgttactttactccccctttttgaaatactcccacacaaggtagtactcccttatatccaaatactcccttgatcgactcggaccgatg

SEQ ID NO: 14183 - DNA, 203 bp, synthetic construct
  source 1..203: mol_type = other DNA
ggcgcgccagtccttgacgattctagaaaaactatgaagaacattaagaagatctttctttcgtagtgttcttttactggaaggagtattccaatttcagcttgttggattaattgttacttaaattgtcctttttgaaaccggcgggtacaaggtagccggcgggtatatccaaaccggcgggtgatcgactcggaccgatg

SEQ ID NO: 14184 - DNA, 203 bp, synthetic construct
  source 1..203: mol_type = other DNA
ggcgcgccagtcctaggcttacaaagaaaaactatgaagaacattaagaagatctttctttcgtagtgttcttttactggaaggagtattccaatttcagcttgttggattaattgttacttaaattgtcctttttgaaattaattcacacaaggtagccggcgggtatatccaaaccggcgggtgatcgactcggaccgatg

SEQ ID NO: 14185 - DNA, 203 bp, synthetic construct
  source 1..203: mol_type = other DNA
ggcgcgccagtcctacttaagcctagaaaaactatgaagaacattaagaagatctttctttcgtagtgttcttttactggaaggagtattccaatttcagcttgttggattaattgttacttaaattgtcctttttgaaattaattcacacaaggtagcgtcaattcctttacaaaataaattttgatcgactcggaccgatg

SEQ ID NO: 14186 - DNA, 203 bp, synthetic construct
  source 1..203: mol_type = other DNA
ggcgcgccagtccttggtgagccaagaaaaactatgaagaacattaagaagatctttctttcgtagtgttcttttactggaaggagtattccaatttcagcttgttggattaattgttacttaaattgtcctttttgaaattaattcacacaaggtagtactcccttatatccaaatactcccttgatcgactcggaccgatg

SEQ ID NO: 14187 - DNA, 203 bp, synthetic construct
  source 1..203: mol_type = other DNA
ggcgcgccagtccttagtttgcaaagaaaaactatgaagaacattaagaagatctttctttcgtagtgttcttttactggaaggagtattccaatttcagcttgttggattaattgttacttaaattgtcctttttgaaattaattcacacaaggtagtttaaatttatatccaaattcttggcaaatcgactcggaccgatg

SEQ ID NO: 14188 - DNA, 203 bp, synthetic construct
  source 1..203: mol_type = other DNA
ggcgcgccagtcctaacgaaagagagacagggaacctgagcaaccaggcaaagaagacacctagggatcgtcaattcctttaagaccgtcaattcctttaataccgtcaattcctttaccatcgtcaattcctttatccccgtcaattcctttacagacgtcaattcctttaagccctagataactagcgactcggaccgatg

SEQ ID NO: 14189 - DNA, 203 bp, synthetic construct
  source 1..203: mol_type = other DNA
ggcgcgccagtcctaacagacagtagacagggaacctgagcaaccaggcaaagaagacacctagggatggaagacctccactagacaaagaccagtgcgcataccacggaatcgagaaccatcacggaatcgagaatccccacggaatcgagaacagacacggaatcgagaaagccctagataactagcgactcggaccgatg

SEQ ID NO: 14190 - DNA, 203 bp, synthetic construct
  source 1..203: mol_type = other DNA
ggcgcgccagtccttgtaaaccgtagacagggaacctgagcaaccaggcaaagaagacacctagggatggaagacctccactagacaaagaccagtgcgcatactactcccagaagggccattactcccgagaatgtccctactcccaacacgtcagatactcccaggttctagcctactcccactagcgactcggaccgatg

SEQ ID NO: 14191 - DNA, 203 bp, synthetic construct
  source 1..203: mol_type = other DNA
ggcgcgccagtcctctaagattctagacagggaacctgagcaaccaggcaaagaagacacctagggatggaagacctccactagacaaagaccagtgcgcatactgtaaagagaagggccattgggcaagagaatgtcccccggcgggtcacgtcagaccggcgggtgttctagccccggcgggttagcgactcggaccgatg

SEQ ID NO: 14192 - DNA, 203 bp, synthetic construct
  source 1..203: mol_type = other DNA
ggcgcgccagtcctaccaacctttagacagggaacctgagcaaccaggcaaagaagacacctagggatggaagacctccactagacaaagaccagtgcgcatactgtaaagagaagggccattgggcaagagaatgtccccgaaaaaaacacgtcagaccggcgggtgttctagccccggcgggttagcgactcggaccgatg

SEQ ID NO: 14193 - DNA, 203 bp, synthetic construct
  source 1..203: mol_type = other DNA
ggcgcgccagtccttacaaaggttagacagggaacctgagcaaccaggcaaagaagacacctagggatggaagacctccactagacaaagaccagtgcgcatactgtaaagagaagggccattgggcaagagaatgtccccgaaaaaaacacgtcagagaagccaaggttctagccctagataactagcgactcggaccgatg

SEQ ID NO: 14194 - DNA, 203 bp, synthetic construct
  source 1..203: mol_type = other DNA
ggcgcgccagtccttagtcagactagacagggaacctgagcaaccaggcaaagaagacacctagggatggaagacctccactagacaaagaccagtgcgcatactgtaaagagaagggccattgggcaagagaatgtccctactcccaacacgtcagatactcccaggttctagcctactcccactagcgactcggaccgatg

SEQ ID NO: 14195 - DNA, 203 bp, synthetic construct
  source 1..203: mol_type = other DNA
ggcgcgccagtcctcagctgaggtagacagggaacctgagcaaccaggcaaagaagacacctagggatggaagacctccactagacaaagaccagtgcgcatactgtaaagagaagggccattgggcaagagaatgtcccttcttggcaaacgtcagattcttggcaaatctagccttcttggcaaagcgactcggaccgatg

SEQ ID NO: 14196 - DNA, 203 bp, synthetic construct
  source 1..203: mol_type = other DNA
ggcgcgccagtccttgcttaagcaagacagggaacctgagcaaccaggcaaagaagacacctagggatggaagacctccactagacaccggccgttgcgcatacaccggccgtaagggccataccggccgtgaatgtcccaccggccgtcacgtcagaaccggccgtgttctagccaccggccgttagcgactcggaccgatg

SEQ ID NO: 14197 - DNA, 203 bp, synthetic construct
  source 1..203: mol_type = other DNA
ggcgcgccagtcctaaccttcttgagacagggaacctgagcaaccaggcaaagaagacacctagggatggaagacctccactagacccggcgggttgcgcatacccggcgggtaagggccatccggcgggtgaatgtcccccggcgggtcacgtcagaccggcgggtgttctagccccggcgggttagcgactcggaccgatg

SEQ ID NO: 14198 - DNA, 203 bp, synthetic construct
  source 1..203: mol_type = other DNA
ggcgcgccagtcctaatggtagttagacagggaacctgagcaaccaggcaaagaagacacctagggatggaagacctccactagaccgtcaattcctttaataccgtcaattcctttaccatcgtcaattcctttatccccgtcaattcctttacagacgtcaattcctttaagccctagataactagcgactcggaccgatg

SEQ ID NO: 14199 - DNA, 203 bp, synthetic construct
  source 1..203: mol_type = other DNA
ggcgcgccagtccttaacagagttagacagggaacctgagcaaccaggcaaagaagacacctagggatggaagacctccactagacttcttggcaaacgcatacttcttggcaaagggccatttcttggcaaaatgtcccttcttggcaaacgtcagattcttggcaaatctagccttcttggcaaagcgactcggaccgatg

SEQ ID NO: 14200 - DNA, 203 bp, synthetic construct
  source 1..203: mol_type = other DNA
ggcgcgccagtcctcactagcttaagacagggaacctgagcaaccaggcatactccccacctagggattactcccctccactagactactcccagtgcgcatactactcccagaagggccattactcccgagaatgtccctactcccaacacgtcagatactcccaggttctagcctactcccactagcgactcggaccgatg

SEQ ID NO: 14201 - DNA, 203 bp, synthetic construct
  source 1..203: mol_type = other DNA
ggcgcgccagtccttagcttgctgagacagggaacctgagcaaccaggcattcttggcaaatagggatttcttggcaaaactagacttcttggcaaacgcatacttcttggcaaagggccatttcttggcaaaatgtcccttcttggcaaacgtcagattcttggcaaatctagccttcttggcaaagcgactcggaccgatg

SEQ ID NO: 14202 - DNA, 203 bp, synthetic construct
  source 1..203: mol_type = other DNA
ggcgcgccagtcctcaggactcgtagacagggccggcgggtaaccaggcaccggcgggtcctagggatccggcgggtccactagacccggcgggttgcgcatacccggcgggtaagggccatccggcgggtgaatgtcccccggcgggtcacgtcagaccggcgggtgttctagccccggcgggttagcgactcggaccgatg

SEQ ID NO: 14203 - DNA, 203 bp, synthetic construct
  source 1..203: mol_type = other DNA
ggcgcgccagtcctcagactgctgagacagggcgtcaattcctttaggcacgtcaattcctttaggatcgtcaattcctttaagaccgtcaattcctttaataccgtcaattcctttaccatcgtcaattcctttatccccgtcaattcctttacagacgtcaattcctttaagccctagataactagcgactcggaccgatg

SEQ ID NO: 14204 - DNA, 203 bp, synthetic construct
  source 1..203: mol_type = other DNA
ggcgcgccagtccttgcagtagctagacagggtactcccgcaaccaggcatactccccacctagggattactcccctccactagactactcccagtgcgcatactactcccagaagggccattactcccgagaatgtccctactcccaacacgtcagatactcccaggttctagcctactcccactagcgactcggaccgatg

SEQ ID NO: 14205 - DNA, 203 bp, synthetic construct
  source 1..203: mol_type = other DNA
ggcgcgccagtcctagactgtgctagacagggttcttggcaaaccaggcattcttggcaaatagggatttcttggcaaaactagacttcttggcaaacgcatacttcttggcaaagggccatttcttggcaaaatgtcccttcttggcaaacgtcagattcttggcaaatctagccttcttggcaaagcgactcggaccgatg

SEQ ID NO: 14206 - DNA, 203 bp, synthetic construct
  source 1..203: mol_type = other DNA
ggcgcgccagtcctaaaactctcaagcagccgcacggaatcgagaacacacacggaatcgagaaaagccacggaatcgagaatgtgcacggaatcgagaattcccacggaatcgagaatgcgcacggaatcgagaaaaagcacggaatcgagaaacaccacggaatcgagaatgcagcatgtcttcaacgactcggaccgatg

SEQ ID NO: 14207 - DNA, 203 bp, synthetic construct
  source 1..203: mol_type = other DNA
ggcgcgccagtcctagtagctaaaagcagccgcgtcaattcctttacacacgtcaattcctttaaagccgtcaattcctttatgtgcgtcaattcctttattcccgtcaattcctttatgcgcgtcaattcctttaaaagcgtcaattcctttaacaccgtcaattcctttatgcagcatgtcttcaacgactcggaccgatg

SEQ ID NO: 14208 - DNA, 203 bp, synthetic construct
  source 1..203: mol_type = other DNA
ggcgcgccagtcctcaactgctaaagcagccgggaacagctctgaccacacacggaatcgagaaaagccacggaatcgagaatgtgcacggaatcgagaattcccacggaatcgagaatgcgcacggaatcgagaaaaagcacggaatcgagaaacaccacggaatcgagaatgcagcatgtcttcaacgactcggaccgatg

SEQ ID NO: 14209 - DNA, 203 bp, synthetic construct
  source 1..203: mol_type = other DNA
ggcgcgccagtcctaatggactggagcagccgggaacagctctgaccacacgtcaattcctttaaagccgtcaattcctttatgtgcgtcaattcctttattcccgtcaattcctttatgcgcgtcaattcctttaaaagcgtcaattcctttaacaccgtcaattcctttatgcagcatgtcttcaacgactcggaccgatg

SEQ ID NO: 14210 - DNA, 203 bp, synthetic construct
  source 1..203: mol_type = other DNA
ggcgcgccagtcctatgaggactgagcagccgggaacagctctgaccacagtggttccggggagaagccacggaatcgagaatgtgcacggaatcgagaattcccacggaatcgagaatgcgcacggaatcgagaaaaagcacggaatcgagaaacaccacggaatcgagaatgcagcatgtcttcaacgactcggaccgatg

SEQ ID NO: 14211 - DNA, 203 bp, synthetic construct
  source 1..203: mol_type = other DNA
ggcgcgccagtccttaactggactagcagccgggaacagctctgaccacagtggttccggggagaagccgtcaattcctttatgtgcgtcaattcctttattcccgtcaattcctttatgcgcgtcaattcctttaaaagcgtcaattcctttaacaccgtcaattcctttatgcagcatgtcttcaacgactcggaccgatg

SEQ ID NO: 14212 - DNA, 203 bp, synthetic construct
  source 1..203: mol_type = other DNA
ggcgcgccagtccttcgctacgttagcagccgggaacagctctgaccacagtggttccggggagaagcctttccaggacccatgtgtaggcacaactgttttccctgatcaggatacttgcggcactcaacagaggaaagaaattcctaagggaacacccggcgggtagtactgcaccggcgggtcaacgactcggaccgatg

SEQ ID NO: 14213 - DNA, 203 bp, synthetic construct
  source 1..203: mol_type = other DNA
ggcgcgccagtcctttaaagtgtaagcagccgggaacagctctgaccacagtggttccggggagaagcctttccaggacccatgtgtaggcacaactgttttccctgatcaggatacttgcggcactcaacagaggaaagaaattcctaagggaacacttcttggcaaatactgcattcttggcaaaacgactcggaccgatg

SEQ ID NO: 14214 - DNA, 203 bp, synthetic construct
  source 1..203: mol_type = other DNA
ggcgcgccagtcctacgttcaagtagcagccgggaacagctctgaccacagtggttccggggagaagcctttccaggacccatgtgtaggcacaactgttttccctgatcaggatacttgcggcactcaacagaggaaagcacggaatcgagaaacaccacggaatcgagaatgcagcatgtcttcaacgactcggaccgatg

SEQ ID NO: 14215 - DNA, 203 bp, synthetic construct
  source 1..203: mol_type = other DNA
ggcgcgccagtcctatggatacaaagcagccgggaacagctctgaccacagtggttccggggagaagcctttccaggacccatgtgtaggcacaactgttttccctgatcaggatacttgcggcactcaacagaggaaagcgtcaattcctttaacaccgtcaattcctttatgcagcatgtcttcaacgactcggaccgatg

SEQ ID NO: 14216 - DNA, 203 bp, synthetic construct
  source 1..203: mol_type = other DNA
ggcgcgccagtccttgtgcagtgtagcagccgggaacagctctgaccacagtggttccggggagaagcctttccaggacccatgtgtaggcacaactgttttccctgatcaggatacttgcggcactcaacagaggaaagtactccctaagggaacactactcccaaagtactgcatactcccttcaacgactcggaccgatg

SEQ ID NO: 14217 - DNA, 203 bp, synthetic construct
  source 1..203: mol_type = other DNA
ggcgcgccagtccttaaggttaggagcagccgggaacagctctgaccacattcttggcaaagagaagcttcttggcaaaccatgtgttcttggcaaagttttccttcttggcaaaacttgcgttcttggcaaaaggaaagttcttggcaaaggaacacttcttggcaaatactgcattcttggcaaaacgactcggaccgatg

SEQ ID NO: 14218 - DNA, 203 bp, synthetic construct
  source 1..203: mol_type = other DNA
ggcgcgccagtcctttgcaaaaggagcagccgtactcccctctgaccacatactccccggggagaagctactcccggacccatgtgtactcccaactgttttcctactcccggatacttgcgtactcccacagaggaaagtactccctaagggaacactactcccaaagtactgcatactcccttcaacgactcggaccgatg

SEQ ID NO: 14219 - DNA, 203 bp, synthetic construct
  source 1..203: mol_type = other DNA
ggcgcgccagtcctacatggtaggagcagccgttcttggcaaagaccacattcttggcaaagagaagcttcttggcaaaccatgtgttcttggcaaagttttccttcttggcaaaacttgcgttcttggcaaaaggaaagttcttggcaaaggaacacttcttggcaaatactgcattcttggcaaaacgactcggaccgatg

SEQ ID NO: 14220 - DNA, 203 bp, synthetic construct
  source 1..203: mol_type = other DNA
ggcgcgccagtccttagctaagtgagcctcctcacggaatcgagaacctacacggaatcgagaaaggacacggaatcgagaattaacacggaatcgagaagagccacggaatcgagaacaagcacggaatcgagaaccctcacggaatcgagaacaatcacggaatcgagaatgaccagtcacagattcgactcggaccgatg

SEQ ID NO: 14221 - DNA, 203 bp, synthetic construct
  source 1..203: mol_type = other DNA
ggcgcgccagtccttccagtgcatagcctcctcgtcaattcctttacctacgtcaattcctttaaggacgtcaattcctttattaacgtcaattcctttagagccgtcaattcctttacaagcgtcaattcctttaccctcgtcaattcctttacaatcgtcaattcctttatgaccagtcacagattcgactcggaccgatg

SEQ ID NO: 14222 - DNA, 203 bp, synthetic construct
  source 1..203: mol_type = other DNA
ggcgcgccagtcctacctcaagtgagcctcctgttgcacggtcttgcctaaccggccgtctccaaggaaccggccgtcataattaaaccggccgtatgtcgagcaccggccgtaagaccaagaccggccgtaagcgccctaccggccgtacatccaataccggccgtatgtttgacaccggccgtattcgactcggaccgatg

SEQ ID NO: 14223 - DNA, 203 bp, synthetic construct
  source 1..203: mol_type = other DNA
ggcgcgccagtcctctaaggtccaagcctcctgttgcacggtcttgcctaaggtgaagcctccaaggaagccattagcataattaaacaaccaccatgtcgagcaaaaaggcaaagaccaagaccaccaagaagcgccctaccggccgtacatccaataccggccgtatgtttgacaccggccgtattcgactcggaccgatg

SEQ ID NO: 14224 - DNA, 203 bp, synthetic construct
  source 1..203: mol_type = other DNA
ggcgcgccagtcctagtctttcatagcctcctgttgcacggtcttgcctaaggtgaagcctccaaggaagccattagcataattaaacaaccaccatgtcgagcaaaaaggcaaagaccaagaccaccaagaagcgccctcagcgtgcaacatccaatcacggaatcgagaatgaccagtcacagattcgactcggaccgatg

SEQ ID NO: 14225 - DNA, 203 bp, synthetic construct
  source 1..203: mol_type = other DNA
ggcgcgccagtcctctgactaggtagcctcctgttgcacggtcttgcctaaggtgaagcctccaaggaagccattagcataattaaacaaccaccatgtcgagcaaaaaggcaaagaccaagaccaccaagaagcgccctcagcgtgcaacatccaatgtgtttgccatgtttgaccagtcacagattcgactcggaccgatg

SEQ ID NO: 14226 - DNA, 203 bp, synthetic construct
  source 1..203: mol_type = other DNA
ggcgcgccagtcctctgacggtgaagcctcctgttgcacggtcttgcctaaggtgaagcctccaaggaagccattagcataattaaacaaccaccatgtcgagcaaaaaggcaaagaccaagaccaccaagaagcgccctcagcgtgcaacatccaatgtgtttgccatgtttgacccggcgggtattcgactcggaccgatg

SEQ ID NO: 14227 - DNA, 203 bp, synthetic construct
  source 1..203: mol_type = other DNA
ggcgcgccagtcctctttcttcagagcctcctgttgcacggtcttgcctaaggtgaagcctccaaggaagccattagcataattaaacaaccaccatgtcgagcaaaaaggcaaagaccaagaccggccgtaagcgccctaccggccgtacatccaataccggccgtatgtttgacaccggccgtattcgactcggaccgatg

SEQ ID NO: 14228 - DNA, 203 bp, synthetic construct
  source 1..203: mol_type = other DNA
ggcgcgccagtccttgtccaagaaagcctcctgttgcacggtcttgcctaaggtgaagcctccaaggaagccattagcataattaaacaaccaccatgtcgagcaaaaaggcaaagaccaagccggcgggtaagcgccctccggcgggtacatccaatccggcgggtatgtttgacccggcgggtattcgactcggaccgatg

SEQ ID NO: 14229 - DNA, 203 bp, synthetic construct
  source 1..203: mol_type = other DNA
ggcgcgccagtccttacagttaagagcctcctgttgcacggtcttgcctaaggtgaagcctccaaggaagccattagcataattaaacaaccaccatgtcgagccgtcaattcctttacaagcgtcaattcctttaccctcgtcaattcctttacaatcgtcaattcctttatgaccagtcacagattcgactcggaccgatg

SEQ ID NO: 14230 - DNA, 203 bp, synthetic construct
  source 1..203: mol_type = other DNA
ggcgcgccagtcctatccttgccaagcctcctgttgcacggtcttgcctaaggtgaagcctccaaggaagccattagcataattaacacggaatcgagaagagccacggaatcgagaacaagcacggaatcgagaaccctcacggaatcgagaacaatcacggaatcgagaatgaccagtcacagattcgactcggaccgatg

SEQ ID NO: 14231 - DNA, 203 bp, synthetic construct
  source 1..203: mol_type = other DNA
ggcgcgccagtcctcttaaggcgtagcctcctgttgcacggtcttgcctaaggtgaagcctccaaggacacggaatcgagaattaacacggaatcgagaagagccacggaatcgagaacaagcacggaatcgagaaccctcacggaatcgagaacaatcacggaatcgagaatgaccagtcacagattcgactcggaccgatg

SEQ ID NO: 14232 - DNA, 203 bp, synthetic construct
  source 1..203: mol_type = other DNA
ggcgcgccagtcctatcacaaaggagcctcctgttgcacggtcttgcctatactcccgcctccaaggatactcccagcataattaatactcccccatgtcgagctactccccaaagaccaagtactcccagaagcgcccttactccccaacatccaattactcccccatgtttgactactcccagattcgactcggaccgatg

SEQ ID NO: 14233 - DNA, 203 bp, synthetic construct
  source 1..203: mol_type = other DNA
ggcgcgccagtcctagaaaggtttaggcgcttacagtgcaccaagatggccgcccccgtggatctagagctgaagaaggccttcacagagcttcaagccaaagttactcccactcaacagaatactcccctcgcagacattactcccgaacagctaaatactcccaaaaagcatgctactcccacagacgactcggaccgatg

SEQ ID NO: 14234 - DNA, 203 bp, synthetic construct
  source 1..203: mol_type = other DNA
ggcgcgccagtcctcaaccggtataggcgcttacagtgcaccaagatggccgcccccgtggatctagagctgaagaaggccttcacagagcttcaagccaaagttattgacactcaacagaaggtgaagctcgcagacatacagattgaacagctaaacacggaatcgagaaatgcacatcttacagacgactcggaccgatg

SEQ ID NO: 14235 - DNA, 203 bp, synthetic construct
  source 1..203: mol_type = other DNA
ggcgcgccagtccttgacgaccagaggcgcttacagtgcaccaagatggccgcccccgtggatctagagctgaagaaggccttcacagagcttcaagccaaagttattgacactcaacagaaggtgaagctcgcagacatacagattgaacagctaaatactcccaaaaagcatgctactcccacagacgactcggaccgatg

SEQ ID NO: 14236 - DNA, 203 bp, synthetic construct
  source 1..203: mol_type = other DNA
ggcgcgccagtcctctggtacttgaggcgcttacagtgcaccaagatggccgcccccgtggatctagagctgaagaaggccttcacagagcttcaagccaaagttattgacactcaacagaaggtgaagctcgcagacatacagattgaacagctaaattcttggcaaaagcatgcttcttggcaaaacgactcggaccgatg

SEQ ID NO: 14237 - DNA, 203 bp, synthetic construct
  source 1..203: mol_type = other DNA
ggcgcgccagtccttggtaggataaggcgcttacagtgcaccaagatggccgcccccgtggatctagagctgaagaaggccttcacagagcttcaagccaaagttattgacactcaacagaaggtgaagctcgcagacatccggcgggtacagctaaaccggcgggtaaagcatgcccggcgggtagacgactcggaccgatg

SEQ ID NO: 14238 - DNA, 203 bp, synthetic construct
  source 1..203: mol_type = other DNA
ggcgcgccagtccttctttgagctaggcgcttacagtgcaccaagatggccgcccccgtggatctagagctgaagaaggccttcacagagcttcaagccaaagttattgacactcaacagaaggtgaagctcgcagacatcgtcaattcctttataaacgtcaattcctttaatgcacatcttacagacgactcggaccgatg

SEQ ID NO: 14239 - DNA, 203 bp, synthetic construct
  source 1..203: mol_type = other DNA
ggcgcgccagtcctagtctcaaaaaggcgcttacagtgcaccaagatggccgcccccgtggatctagagctgaagaaggccttcacagagcttcaagccaaagttattgacactcaacagaaggtgaagctcgcagacattactcccgaacagctaaatactcccaaaaagcatgctactcccacagacgactcggaccgatg

SEQ ID NO: 14240 - DNA, 203 bp, synthetic construct
  source 1..203: mol_type = other DNA
ggcgcgccagtcctctcaaaactaaggcgcttacagtgcaccaagatggccgcccccgtggatctagagctgaagaaggccttcacagagcttcaagccaaagttattgacactcaacagaaggtgaagctcgcagacatttcttggcaaaagctaaattcttggcaaaagcatgcttcttggcaaaacgactcggaccgatg

SEQ ID NO: 14241 - DNA, 203 bp, synthetic construct
  source 1..203: mol_type = other DNA
ggcgcgccagtcctaatacagcgaaggcgcttacagtgcaccaagatggccgcccccgtggatctagagctgaagaaggccttcacagagcttcaagccaaagttattgacactcaacagaatactcccctcgcagacattactcccgaacagctaaatactcccaaaaagcatgctactcccacagacgactcggaccgatg

SEQ ID NO: 14242 - DNA, 203 bp, synthetic construct
  source 1..203: mol_type = other DNA
ggcgcgccagtcctagctgctgtgaggcgcttacagtgcaccaagatggccgcccccgtggatctagatactcccaaggccttcactactccccaagccaaagttactcccactcaacagaatactcccctcgcagacattactcccgaacagctaaatactcccaaaaagcatgctactcccacagacgactcggaccgatg

SEQ ID NO: 14243 - DNA, 203 bp, synthetic construct
  source 1..203: mol_type = other DNA
ggcgcgccagtcctatcagattcaaggcgcttacagtgcaccaagatggccgtcaattcctttatagacgtcaattcctttatcaccgtcaattcctttaaagtcgtcaattcctttaagaacgtcaattcctttaacatcgtcaattcctttataaacgtcaattcctttaatgcacatcttacagacgactcggaccgatg

SEQ ID NO: 14244 - DNA, 203 bp, synthetic construct
  source 1..203: mol_type = other DNA
ggcgcgccagtccttgttactggaaggcgcttacagtgcaccaagatggcttcttggcaaaatctagattcttggcaaaccttcacttcttggcaaaccaaagtttcttggcaaaaacagaattcttggcaaacagacatttcttggcaaaagctaaattcttggcaaaagcatgcttcttggcaaaacgactcggaccgatg

SEQ ID NO: 14245 - DNA, 203 bp, synthetic construct
  source 1..203: mol_type = other DNA
ggcgcgccagtcctagtatggtcaaggcgcttccggcgggtcaagatggcccggcgggtggatctagaccggcgggtggccttcacccggcgggtagccaaagtccggcgggttcaacagaaccggcgggtcgcagacatccggcgggtacagctaaaccggcgggtaaagcatgcccggcgggtagacgactcggaccgatg

SEQ ID NO: 14246 - DNA, 203 bp, synthetic construct
  source 1..203: mol_type = other DNA
ggcgcgccagtcctacgcttacttaggctgccaccggccgtcccccagctaccggccgtgtccctctcaccggccgtctccatccgaccggccgttgcccagggaccggccgtagatgtcgcaccggccgtgcctgtgtcaccggccgttcgttggccaccggccgtccaccagagaccggccgttgacgactcggaccgatg

SEQ ID NO: 14247 - DNA, 203 bp, synthetic construct
  source 1..203: mol_type = other DNA
ggcgcgccagtcctccttacttgtaggctgcccacggaatcgagaaagctcacggaatcgagaatctccacggaatcgagaatccgcacggaatcgagaaacggcacggaatcgagaatcgccacggaatcgagaatgtccacggaatcgagaaggcccacggaatcgagaaagaggacagacgttgacgactcggaccgatg

SEQ ID NO: 14248 - DNA, 203 bp, synthetic construct
  source 1..203: mol_type = other DNA
ggcgcgccagtcctaggttacttgaggctgccccggcgggtcccccagctccggcgggtgtccctctcccggcgggtctccatccgccggcgggttgcccacggccggcgggtagatgtcgcccggcgggtgcctgtgtcccggcgggttcgttggccccggcgggtccaccagagccggcgggttgacgactcggaccgatg

SEQ ID NO: 14249 - DNA, 203 bp, synthetic construct
  source 1..203: mol_type = other DNA
ggcgcgccagtccttgaggtttagaggctgcccgtcaattcctttaagctcgtcaattcctttatctccgtcaattcctttatccgcgtcaattcctttaacggcgtcaattcctttatcgccgtcaattcctttatgtccgtcaattcctttaggcccgtcaattcctttaagaggacagacgttgacgactcggaccgatg

SEQ ID NO: 14250 - DNA, 203 bp, synthetic construct
  source 1..203: mol_type = other DNA
ggcgcgccagtcctaaccgttaggaggctgccggcttaggacccccagctaccggccgtgtccctctcaccggccgtctccatccgaccggccgttgcccagggaccggccgtagatgtcgcaccggccgtgcctgtgtcaccggccgttcgttggccaccggccgtccaccagagaccggccgttgacgactcggaccgatg

SEQ ID NO: 14251 - DNA, 203 bp, synthetic construct
  source 1..203: mol_type = other DNA
ggcgcgccagtcctcactgaggtgaggctgccggcttaggacccccagctccgacgtaagtccctctccacggaatcgagaatccgcacggaatcgagaaacggcacggaatcgagaatcgccacggaatcgagaatgtccacggaatcgagaaggcccacggaatcgagaaagaggacagacgttgacgactcggaccgatg

SEQ ID NO: 14252 - DNA, 203 bp, synthetic construct
  source 1..203: mol_type = other DNA
ggcgcgccagtcctaacctcagttaggctgccggcttaggacccccagctccgacgtaagtccctctcgtgcgccacctccatccgaccggccgttgcccagggaccggccgtagatgtcgcaccggccgtgcctgtgtcaccggccgttcgttggccaccggccgtccaccagagaccggccgttgacgactcggaccgatg

SEQ ID NO: 14253 - DNA, 203 bp, synthetic construct
  source 1..203: mol_type = other DNA
ggcgcgccagtcctctacactgagaggctgccggcttaggacccccagctccgacgtaagtccctctcgtgcgccacctccatccgcacggaatcgagaaacggcacggaatcgagaatcgccacggaatcgagaatgtccacggaatcgagaaggcccacggaatcgagaaagaggacagacgttgacgactcggaccgatg

SEQ ID NO: 14254 - DNA, 203 bp, synthetic construct
  source 1..203: mol_type = other DNA
ggcgcgccagtcctcttcactctcaggctgccggcttaggacccccagctccgacgtaagtccctctcgtgcgccacctccatccgctgcccctctgcccacgggccgggctcagatgtcgcaccggccgtgcctgtgtcaccggccgttcgttggccaccggccgtccaccagagaccggccgttgacgactcggaccgatg

SEQ ID NO: 14255 - DNA, 203 bp, synthetic construct
  source 1..203: mol_type = other DNA
ggcgcgccagtccttgtaacggtcaggctgccggcttaggacccccagctccgacgtaagtccctctcgtgcgccacctccatccgctgcccctctgcccacgggccgggctcagatgtcgccacggaatcgagaatgtccacggaatcgagaaggcccacggaatcgagaaagaggacagacgttgacgactcggaccgatg

SEQ ID NO: 14256 - DNA, 203 bp, synthetic construct
  source 1..203: mol_type = other DNA
ggcgcgccagtcctgactcgtctaaggctgccggcttaggacccccagctccgacgtaagtccctctcgtgcgccacctccatccgctgcccctctgcccacgggccgggctcagatgtcgcccggcgggtgcctgtgtcccggcgggttcgttggccccggcgggtccaccagagccggcgggttgacgactcggaccgatg

SEQ ID NO: 14257 - DNA, 203 bp, synthetic construct
  source 1..203: mol_type = other DNA
ggcgcgccagtcctcaggactgtcaggctgccggcttaggacccccagctccgacgtaagtccctctcgtgcgccacctccatccgctgcccctctgcccacgggccgggctcagatgtcgccctctggtcgcctgtgtcaccggccgttcgttggccaccggccgtccaccagagaccggccgttgacgactcggaccgatg

SEQ ID NO: 14258 - DNA, 203 bp, synthetic construct
  source 1..203: mol_type = other DNA
ggcgcgccagtcctgacgcttgaaaggctgccggcttaggacccccagctccgacgtaagtccctctcgtgcgccacctccatccgctgcccctctgcccacgggccgggctcagatgtcgccctctggtcgcctgtgtccacggaatcgagaaggcccacggaatcgagaaagaggacagacgttgacgactcggaccgatg

SEQ ID NO: 14259 - DNA, 203 bp, synthetic construct
  source 1..203: mol_type = other DNA
ggcgcgccagtcctgacctttgtcaggctgccggcttaggacccccagctccgacgtaagtccctctcgtgcgccacctccatccgctgcccctctgcccacgggccgggctcagatgtcgccctctggtcgcctgtgtcttctcaccatcgttggccccggcgggtccaccagagccggcgggttgacgactcggaccgatg

SEQ ID NO: 14260 - DNA, 203 bp, synthetic construct
  source 1..203: mol_type = other DNA
ggcgcgccagtccttcagaacgtcaggctgccggcttaggacccccagctccgacgtaagtccctctcgtgcgccacctccatccgctgcccctctgcccacgggccgggctcagatgtcgccctctggtcgcctgtgtcttctcaccatcgttggcctactcccccccaccagagtactcccgttgacgactcggaccgatg

SEQ ID NO: 14261 - DNA, 203 bp, synthetic construct
  source 1..203: mol_type = other DNA
ggcgcgccagtcctacagctagtcaggctgccggcttaggacccccagctccgacgtaagtccctctcgtgcgccacctccatccgctgcccctctgcccacgggccgggctcagatgtcgccctctggtcgcctgtgtcttctcaccatcgttggcctgattctccccaccagagaccggccgttgacgactcggaccgatg

SEQ ID NO: 14262 - DNA, 203 bp, synthetic construct
  source 1..203: mol_type = other DNA
ggcgcgccagtcctgaccggtcataggctgccggcttaggacccccagctccgacgtaagtccctctcgtgcgccacctccatccgctgcccctctgcccacgggccgggctcagatgtcgccctctggtcgcctgtgtcttctcaccatcgttggcctgattctccccaccagagccggcgggttgacgactcggaccgatg

SEQ ID NO: 14263 - DNA, 203 bp, synthetic construct
  source 1..203: mol_type = other DNA
ggcgcgccagtcctatgacagctcaggctgccggcttaggacccccagctccgacgtaagtccctctcgtgcgccacctccatccgctgcccctctgcccacgggccgggctcagatgtcgccctctggtcgcctgtgtcttctcaccatcgttggcctgattctccccaccagaggacagacgttgacgactcggaccgatg

SEQ ID NO: 14264 - DNA, 203 bp, synthetic construct
  source 1..203: mol_type = other DNA
ggcgcgccagtcctgaaccttgctaggctgccggcttaggacccccagctccgacgtaagtccctctcgtgcgccacctccatccgctgcccctctgcccacgggccgggctcagatgtcgccctctggtcgcctgtgtcttctcaccatcgttggcctgattctccccaccagagtactcccgttgacgactcggaccgatg

SEQ ID NO: 14265 - DNA, 203 bp, synthetic construct
  source 1..203: mol_type = other DNA
ggcgcgccagtcctgagctcaagaaggctgccggcttaggacccccagctccgacgtaagtccctctcgtgcgccacctccatccgctgcccctctgcccacgggccgggctcagatgtcgccctctggtcgcctgtgtcttctcaccatcgttggccttcttggcaaaaccagagttcttggcaaaacgactcggaccgatg

SEQ ID NO: 14266 - DNA, 203 bp, synthetic construct
  source 1..203: mol_type = other DNA
ggcgcgccagtcctatccaagctcaggctgccggcttaggacccccagctccgacgtaagtccctctcgtgcgccacctccatccgctgcccctctgcccacgggccgggctcagatgtcgccgtcaattcctttatgtccgtcaattcctttaggcccgtcaattcctttaagaggacagacgttgacgactcggaccgatg

SEQ ID NO: 14267 - DNA, 203 bp, synthetic construct
  source 1..203: mol_type = other DNA
ggcgcgccagtcctgagctgagtaaggctgccggcttaggacccccagctccgacgtaagtccctctcgtgcgccacctccatccgctgcccctctgcccacgggccgggctcagatgtcgctactccctcgcctgtgtctactccccatcgttggcctactcccccccaccagagtactcccgttgacgactcggaccgatg

SEQ ID NO: 14268 - DNA, 203 bp, synthetic construct
  source 1..203: mol_type = other DNA
ggcgcgccagtcctgagctgtatcaggctgccggcttaggacccccagctccgacgtaagtccctctcgtgcgccacctccatccgctgcccctctgcccacggtactccctcagatgtcgctactccctcgcctgtgtctactccccatcgttggcctactcccccccaccagagtactcccgttgacgactcggaccgatg

SEQ ID NO: 14269 - DNA, 203 bp, synthetic construct
  source 1..203: mol_type = other DNA
ggcgcgccagtcctgaacctctgtaggctgccggcttaggacccccagctccgacgtaagtccctctcgtgcgccacctccatccgctgcccctctgcccacggttcttggcaaaatgtcgcttcttggcaaactgtgtcttcttggcaaagttggccttcttggcaaaaccagagttcttggcaaaacgactcggaccgatg

SEQ ID NO: 14270 - DNA, 203 bp, synthetic construct
  source 1..203: mol_type = other DNA
ggcgcgccagtcctgagcagtttgaggctgccggcttaggacccccagctccgacgtaagtccctctcgtgcgccacctccatccgtactccctctgcccacggtactccctcagatgtcgctactccctcgcctgtgtctactccccatcgttggcctactcccccccaccagagtactcccgttgacgactcggaccgatg

SEQ ID NO: 14271 - DNA, 203 bp, synthetic construct
  source 1..203: mol_type = other DNA
ggcgcgccagtcctgactgagctcaggctgccggcttaggacccccagctccgacgtaagtccctctcgtgcgccacctccatccgttcttggcaaacccacggttcttggcaaaatgtcgcttcttggcaaactgtgtcttcttggcaaagttggccttcttggcaaaaccagagttcttggcaaaacgactcggaccgatg

SEQ ID NO: 14272 - DNA, 203 bp, synthetic construct
  source 1..203: mol_type = other DNA
ggcgcgccagtcctgagttaccgtaggctgccggcttaggacccccagctccgacgtaagtccctctcttcttggcaaaccatccgttcttggcaaacccacggttcttggcaaaatgtcgcttcttggcaaactgtgtcttcttggcaaagttggccttcttggcaaaaccagagttcttggcaaaacgactcggaccgatg

SEQ ID NO: 14273 - DNA, 203 bp, synthetic construct
  source 1..203: mol_type = other DNA
ggcgcgccagtcctcaaaaccgtcaggctgccggcttaggacccccagctcgtcaattcctttatctccgtcaattcctttatccgcgtcaattcctttaacggcgtcaattcctttatcgccgtcaattcctttatgtccgtcaattcctttaggcccgtcaattcctttaagaggacagacgttgacgactcggaccgatg

SEQ ID NO: 14274 - DNA, 203 bp, synthetic construct
  source 1..203: mol_type = other DNA
ggcgcgccagtcctgacctctgctaggctgccggcttaggacccccagcttactcccaagtccctctctactcccacctccatccgtactccctctgcccacggtactccctcagatgtcgctactccctcgcctgtgtctactccccatcgttggcctactcccccccaccagagtactcccgttgacgactcggaccgatg

SEQ ID NO: 14275 - DNA, 203 bp, synthetic construct
  source 1..203: mol_type = other DNA
ggcgcgccagtcctgactcagagaaggctgccggcttaggacccccagctttcttggcaaaccctctcttcttggcaaaccatccgttcttggcaaacccacggttcttggcaaaatgtcgcttcttggcaaactgtgtcttcttggcaaagttggccttcttggcaaaaccagagttcttggcaaaacgactcggaccgatg

SEQ ID NO: 14276 - DNA, 203 bp, synthetic construct
  source 1..203: mol_type = other DNA
ggcgcgccagtcctgacggtcattaggctgcctactcccgacccccagcttactcccaagtccctctctactcccacctccatccgtactccctctgcccacggtactccctcagatgtcgctactccctcgcctgtgtctactccccatcgttggcctactcccccccaccagagtactcccgttgacgactcggaccgatg

SEQ ID NO: 14277 - DNA, 203 bp, synthetic construct
  source 1..203: mol_type = other DNA
ggcgcgccagtcctcttcaacgtcatatttgaaccggccgttgtatgattaccggccgtgagacaggaaccggccgtaagatggcaaccggccgttctaattagaccggccgttaattttctaccggccgtagtttgttcaccggccgtaacctgcttaccggccgtatcagaaagaccggccgtggacgactcggaccgatg

SEQ ID NO: 14278 - DNA, 203 bp, synthetic construct
  source 1..203: mol_type = other DNA
ggcgcgccagtcctccaactggtcatatttgacacggaatcgagaagattcacggaatcgagaaaggacacggaatcgagaaggcacacggaatcgagaattagcacggaatcgagaattctcacggaatcgagaagttccacggaatcgagaagcttcacggaatcgagaaaaagacatccttcggacgactcggaccgatg

SEQ ID NO: 14279 - DNA, 203 bp, synthetic construct
  source 1..203: mol_type = other DNA
ggcgcgccagtcctcatgaccttaatatttgattcttggcaaatatgattttcttggcaaagacaggattcttggcaaagatggcattcttggcaaataattagttcttggcaaaattttctttcttggcaaatttgttcttcttggcaaacctgcttttcttggcaaacagaaagttcttggcaaaacgactcggaccgatg

SEQ ID NO: 14280 - DNA, 203 bp, synthetic construct
  source 1..203: mol_type = other DNA
ggcgcgccagtcctacggtcatgaatatttgattttttgcatgtatgattaccggccgtgagacaggaaccggccgtaagatggcaaccggccgttctaattagaccggccgttaattttctaccggccgtagtttgttcaccggccgtaacctgcttaccggccgtatcagaaagaccggccgtggacgactcggaccgatg

SEQ ID NO: 14281 - DNA, 203 bp, synthetic construct
  source 1..203: mol_type = other DNA
ggcgcgccagtcctttgagtgagtatatttgattttttgcatgtatgattataccatgagagacaggattaatatagaagatggcaaggcaaatttctaattagaccggccgttaattttctaccggccgtagtttgttcaccggccgtaacctgcttaccggccgtatcagaaagaccggccgtggacgactcggaccgatg

SEQ ID NO: 14282 - DNA, 203 bp, synthetic construct
  source 1..203: mol_type = other DNA
ggcgcgccagtcctgaacagtctcatatttgattttttgcatgtatgattataccatgagagacaggattaatatagaagatggcaaggcaaatttctaattagagggaatattaattttctacaaaataaagtttgttcatcaatacaaacctgcttcacggaatcgagaaaaagacatccttcggacgactcggaccgatg

SEQ ID NO: 14283 - DNA, 203 bp, synthetic construct
  source 1..203: mol_type = other DNA
ggcgcgccagtccttaaactcatgatatttgattttttgcatgtatgattataccatgagagacaggattaatatagaagatggcaaggcaaatttctaattagagggaatattaattttctacaaaataaagtttgttcccggcgggtaacctgcttccggcgggtatcagaaagccggcgggtggacgactcggaccgatg

SEQ ID NO: 14284 - DNA, 203 bp, synthetic construct
  source 1..203: mol_type = other DNA
ggcgcgccagtccttcactacactatatttgattttttgcatgtatgattataccatgagagacaggattaatatagaagatggcaaggcaaatttctaattagagggaatattaattttctcgtcaattcctttagttccgtcaattcctttagcttcgtcaattcctttaaaagacatccttcggacgactcggaccgatg

SEQ ID NO: 14285 - DNA, 203 bp, synthetic construct
  source 1..203: mol_type = other DNA
ggcgcgccagtccttgtagtgaatatatttgattttttgcatgtatgattttcttggcaaagacaggattcttggcaaagatggcattcttggcaaataattagttcttggcaaaattttctttcttggcaaatttgttcttcttggcaaacctgcttttcttggcaaacagaaagttcttggcaaaacgactcggaccgatg

SEQ ID NO: 14286 - DNA, 203 bp, synthetic construct
  source 1..203: mol_type = other DNA
ggcgcgccagtcctaactacactgatgatcttaagtagataagtgctgttaccggccgttcaacagaaaccggccgttacgtctttaccggccgtaagaacacaaccggccgtatgctctcaaccggccgttttttatttaccggccgtggaaagctcaccggccgttacgaatagaccggccgttatcgactcggaccgatg

SEQ ID NO: 14287 - DNA, 203 bp, synthetic construct
  source 1..203: mol_type = other DNA
ggcgcgccagtcctactacaactgatgatcttaagtagataagtgctgttcgtcaattcctttaagaacgtcaattcctttactttcgtcaattcctttacacacgtcaattcctttactcacgtcaattcctttaatttcgtcaattcctttagctccgtcaattcctttaatagccaaccctttatcgactcggaccgatg

SEQ ID NO: 14288 - DNA, 203 bp, synthetic construct
  source 1..203: mol_type = other DNA
ggcgcgccagtcctacgttaactaatgatcttaagtagataagtgctgttgcttgtagttcaacagaaagctttgagtacgtctttccggcgggtaagaacacaccggcgggtatgctctcaccggcgggttttttatttccggcgggtggaaagctcccggcgggttacgaatagccggcgggttatcgactcggaccgatg

SEQ ID NO: 14289 - DNA, 203 bp, synthetic construct
  source 1..203: mol_type = other DNA
ggcgcgccagtccttaagagtattatgatcttaagtagataagtgctgttgcttgtagttcaacagaaagctttgagtacgtctttcgtcaattcctttacacacgtcaattcctttactcacgtcaattcctttaatttcgtcaattcctttagctccgtcaattcctttaatagccaaccctttatcgactcggaccgatg

SEQ ID NO: 14290 - DNA, 203 bp, synthetic construct
  source 1..203: mol_type = other DNA
ggcgcgccagtccttttactgtgtatgatcttaagtagataagtgctgttgcttgtagttcaacagaaagctttgagtacgtctttcttgcgagaaagaacacatgcattcttatgctctcaattctattatttttattttgggcgaaaggaaagctctactcccagtacgaatagtactccctttatcgactcggaccgatg

SEQ ID NO: 14291 - DNA, 203 bp, synthetic construct
  source 1..203: mol_type = other DNA
ggcgcgccagtcctaggactgtgaatgatcttaagtagataagtgctgttgcttgtagttcaacagaaagctttgagtacgtctttcttgcgagaaagaacacatgcattcttatgctctcaattctattatttttattttgggcgaaaggaaagctctcacgcgagtacgaatagaccggccgttatcgactcggaccgatg

SEQ ID NO: 14292 - DNA, 203 bp, synthetic construct
  source 1..203: mol_type = other DNA
ggcgcgccagtccttaaactttggatgatcttaagtagataagtgctgttgcttgtagttcaacagaaagctttgagtacgtctttcttgcgagaaagaacacatgcattcttatgctctcaattctattatttttatttttcttggcaaaaaagctcttcttggcaaacgaatagttcttggcaaatcgactcggaccgatg

SEQ ID NO: 14293 - DNA, 203 bp, synthetic construct
  source 1..203: mol_type = other DNA
ggcgcgccagtcctactgctttggatgatcttaagtagataagtgctgttgcttgtagttcaacagaaagctttgagtacgtctttcttgcgagaaagaacacatgcattcttatgctctcaccggcgggttttttatttccggcgggtggaaagctcccggcgggttacgaatagccggcgggttatcgactcggaccgatg

SEQ ID NO: 14294 - DNA, 203 bp, synthetic construct
  source 1..203: mol_type = other DNA
ggcgcgccagtcctaacctttggtatgatcttaagtagataagtgctgttgcttgtagttcaacagaaagctttgagtacgtctttcttgcgagaaagaacacatgcattcttatgctctcacgtcaattcctttaatttcgtcaattcctttagctccgtcaattcctttaatagccaaccctttatcgactcggaccgatg

SEQ ID NO: 14295 - DNA, 203 bp, synthetic construct
  source 1..203: mol_type = other DNA
ggcgcgccagtcctagtccaggttatgatcttaagtagataagtgctgttgcttgtagttcaacagaaagctttgagtacgtctttttcttggcaaagaacacattcttggcaaagctctcattcttggcaaatttatttttcttggcaaaaaagctcttcttggcaaacgaatagttcttggcaaatcgactcggaccgatg

SEQ ID NO: 14296 - DNA, 203 bp, synthetic construct
  source 1..203: mol_type = other DNA
ggcgcgccagtccttctaacactaatgatcttaagtagataagtgctgttgcttgtagttcaacagaaccggcgggttacgtctttccggcgggtaagaacacaccggcgggtatgctctcaccggcgggttttttatttccggcgggtggaaagctcccggcgggttacgaatagccggcgggttatcgactcggaccgatg

SEQ ID NO: 14297 - DNA, 203 bp, synthetic construct
  source 1..203: mol_type = other DNA
ggcgcgccagtcctacgactgttcatgatcttaagtagataagtgctgtttactcccgttcaacagaatactcccagtacgtcttttactcccgaaagaacacatactcccttatgctctcatactccctatttttattttactcccaaggaaagctctactcccagtacgaatagtactccctttatcgactcggaccgatg

SEQ ID NO: 14298 - DNA, 203 bp, synthetic construct
  source 1..203: mol_type = other DNA
ggcgcgccagtcctgagaactggtatgatcttaccggccgtagtgctgttaccggccgttcaacagaaaccggccgttacgtctttaccggccgtaagaacacaaccggccgtatgctctcaaccggccgttttttatttaccggccgtggaaagctcaccggccgttacgaatagaccggccgttatcgactcggaccgatg

SEQ ID NO: 14299 - DNA, 203 bp, synthetic construct
  source 1..203: mol_type = other DNA
ggcgcgccagtccttaccactaggatgatcttcacggaatcgagaatgttcacggaatcgagaaagaacacggaatcgagaactttcacggaatcgagaacacacacggaatcgagaactcacacggaatcgagaaatttcacggaatcgagaagctccacggaatcgagaaatagccaaccctttatcgactcggaccgatg

SEQ ID NO: 14300 - DNA, 203 bp, synthetic construct
  source 1..203: mol_type = other DNA
ggcgcgccagtcctatcagtggtcatgatcttccggcgggtagtgctgttccggcgggttcaacagaaccggcgggttacgtctttccggcgggtaagaacacaccggcgggtatgctctcaccggcgggttttttatttccggcgggtggaaagctcccggcgggttacgaatagccggcgggttatcgactcggaccgatg

SEQ ID NO: 14301 - DNA, 203 bp, synthetic construct
  source 1..203: mol_type = other DNA
ggcgcgccagtcctcacagtggttatgatcttcgtcaattcctttatgttcgtcaattcctttaagaacgtcaattcctttactttcgtcaattcctttacacacgtcaattcctttactcacgtcaattcctttaatttcgtcaattcctttagctccgtcaattcctttaatagccaaccctttatcgactcggaccgatg

SEQ ID NO: 14302 - DNA, 203 bp, synthetic construct
  source 1..203: mol_type = other DNA
ggcgcgccagtccttgtagtggtaatgatctttactccctaagtgctgtttactcccgttcaacagaatactcccagtacgtcttttactcccgaaagaacacatactcccttatgctctcatactccctatttttattttactcccaaggaaagctctactcccagtacgaatagtactccctttatcgactcggaccgatg

SEQ ID NO: 14303 - DNA, 203 bp, synthetic construct
  source 1..203: mol_type = other DNA
ggcgcgccagtcctttggtgactgatttgacccgaggcttcttagaagaattcttggcaaatccaagtttcttggcaaaatgtgctttcttggcaaaagaatgattcttggcaaaaaaaattttcttggcaaattttattttcttggcaaagctgaaattcttggcaaacgaaatcttcttggcaaaacgactcggaccgatg

SEQ ID NO: 14304 - DNA, 203 bp, synthetic construct
  source 1..203: mol_type = other DNA
ggcgcgccagtcctacgtactcgtatttgacccgaggcttcttagaagaattttttaacattccaagtttatctaatagatgtgctatgaagagaacagaatgaaccggccgtaaaaaaattaccggccgtatttttattaccggccgtgagctgaaaaccggccgtggcgaaatcaccggccgtaaacgactcggaccgatg

SEQ ID NO: 14305 - DNA, 203 bp, synthetic construct
  source 1..203: mol_type = other DNA
ggcgcgccagtcctttcaaccggtatttgacccgaggcttcttagaagaattttttaacattccaagtttatctaatagatgtgctatgaagagaacagaatgacacggaatcgagaaaattcacggaatcgagaatattcacggaatcgagaagaaacacggaatcgagaaaatcaaaattcataaacgactcggaccgatg

SEQ ID NO: 14306 - DNA, 203 bp, synthetic construct
  source 1..203: mol_type = other DNA
ggcgcgccagtcctccatgaagatatttgacccgaggcttcttagaagaattttttaacattccaagtttatctaatagatgtgctatgaagagaacagaatgatactcccttaaaaaaatttactcccttatttttatttactcccatgagctgaaatactcccgtggcgaaatctactcccataaacgactcggaccgatg

SEQ ID NO: 14307 - DNA, 203 bp, synthetic construct
  source 1..203: mol_type = other DNA
ggcgcgccagtccttcgtcacaagatttgacccgaggcttcttagaagaattttttaacattccaagtttatctaatagatgtgctatgaagagaacagaatgatgggactttaaaaaaattaccggccgtatttttattaccggccgtgagctgaaaaccggccgtggcgaaatcaccggccgtaaacgactcggaccgatg

SEQ ID NO: 14308 - DNA, 203 bp, synthetic construct
  source 1..203: mol_type = other DNA
ggcgcgccagtcctagaccgagttatttgacccgaggcttcttagaagaattttttaacattccaagtttatctaatagatgtgctatgaagagaacagaatgatgggactttaaaaaaatttttacagttatttttattcgtcaattcctttagaaacgtcaattcctttaaatcaaaattcataaacgactcggaccgatg

SEQ ID NO: 14309 - DNA, 203 bp, synthetic construct
  source 1..203: mol_type = other DNA
ggcgcgccagtccttaaaccactaatttgacccgaggcttcttagaagaattttttaacattccaagtttatctaatagatgtgcttactcccgaacagaatgatactcccttaaaaaaatttactcccttatttttatttactcccatgagctgaaatactcccgtggcgaaatctactcccataaacgactcggaccgatg

SEQ ID NO: 14310 - DNA, 203 bp, synthetic construct
  source 1..203: mol_type = other DNA
ggcgcgccagtcctgattctgaggatttgaccttcttggcaaaagaagaattcttggcaaatccaagtttcttggcaaaatgtgctttcttggcaaaagaatgattcttggcaaaaaaaattttcttggcaaattttattttcttggcaaagctgaaattcttggcaaacgaaatcttcttggcaaaacgactcggaccgatg

SEQ ID NO: 14311 - DNA, 203 bp, synthetic construct
  source 1..203: mol_type = other DNA
ggcgcgccagtcctcctcaagcttcaaagagcagttctgtcaaagaaaacaacataaatcaggtacagaatttcagagtgggatataccggccgtagtgtgaagaccggccgtcattaaaccaccggccgttagaactgaaccggccgtaagaaaattaccggccgtttaaaactgaccggccgtatccgactcggaccgatg

SEQ ID NO: 14312 - DNA, 203 bp, synthetic construct
  source 1..203: mol_type = other DNA
ggcgcgccagtcctatgtgcacaacaaagagcagttctgtcaaagaaaacaacataaatcaggtacagaatttcagagtgggatatcagatctttagtgtgaagatacatctacattaaaccaggaatcactagaactgacacggaatcgagaaaattcacggaatcgagaaactgtgaaggttgatccgactcggaccgatg

SEQ ID NO: 14313 - DNA, 203 bp, synthetic construct
  source 1..203: mol_type = other DNA
ggcgcgccagtcctcaaaggtgttcaaagagcagttctgtcaaagaaaacaacataaatcaggtacagaatttcagagtgggatatcagatctttagtgtgaagatacatctacattaaaccaggaatcactagaactgacatttggacaagaaaattccggcgggtttaaaactgccggcgggtatccgactcggaccgatg

SEQ ID NO: 14314 - DNA, 203 bp, synthetic construct
  source 1..203: mol_type = other DNA
ggcgcgccagtcctgagaagtactcaaagagcagttctgtcaaagaaaacccggcgggtcaggtacagccggcgggtgtgggatatccggcgggtagtgtgaagccggcgggtcattaaaccccggcgggttagaactgaccggcgggtaagaaaattccggcgggtttaaaactgccggcgggtatccgactcggaccgatg

SEQ ID NO: 14315 - DNA, 203 bp, synthetic construct
  source 1..203: mol_type = other DNA
ggcgcgccagtcctgaccaacttacaaagagccgtcaattcctttaaaaccgtcaattcctttaacagcgtcaattcctttaatatcgtcaattcctttagaagcgtcaattcctttaaacccgtcaattcctttactgacgtcaattcctttaaattcgtcaattcctttaactgtgaaggttgatccgactcggaccgatg

SEQ ID NO: 14316 - DNA, 203 bp, synthetic construct
  source 1..203: mol_type = other DNA
ggcgcgccagtcctgaggtagtttcaccggccgttgtgttcactagcaacctcaaacagacaccatggtgcatctgactcctgaggagaagtctgccgttactgccctgtggggcaaggtgaacgtggatgaagttggtggtgaggccctgggcaggctgctggtggtctaccccgtcaattcctttacgactcggaccgatg

SEQ ID NO: 14317 - DNA, 203 bp, synthetic construct
  source 1..203: mol_type = other DNA
ggcgcgccagtcctgacgttgtatcaccggccgttgtgttcactagcaacctcaaacagacaccatggtgcatctgactcctgaggagaagtctgccgttactgccctgtggggcaaggtgaacgtggatgaagttggtggtgaggccctgggcaggctgctggtggtctacccttggacccagaggtcgactcggaccgatg

SEQ ID NO: 14318 - DNA, 203 bp, synthetic construct
  source 1..203: mol_type = other DNA
ggcgcgccagtccttttgagtcgtcattggctcgtcaattcctttattgacgtcaattcctttaatagcgtcaattcctttaatcccgtcaattcctttactatcgtcaattcctttattggcgtcaattcctttaattacgtcaattcctttactctcgtcaattcctttacactcaatacagcaaacgactcggaccgatg

SEQ ID NO: 14319 - DNA, 203 bp, synthetic construct
  source 1..203: mol_type = other DNA
ggcgcgccagtccttttgtaagcacattggctgcttatggtgacaattgacaaattgttaccatatagcgtcaattcctttaatcccgtcaattcctttactatcgtcaattcctttattggcgtcaattcctttaattacgtcaattcctttactctcgtcaattcctttacactcaatacagcaaacgactcggaccgatg

SEQ ID NO: 14320 - DNA, 203 bp, synthetic construct
  source 1..203: mol_type = other DNA
ggcgcgccagtcctctgcagtacacattggctgcttatggtgacaattgacaaattgttaccatatagctattggattggccatccggtgacaaacagagctatcgtcaattcctttattggcgtcaattcctttaattacgtcaattcctttactctcgtcaattcctttacactcaatacagcaaacgactcggaccgatg

SEQ ID NO: 14321 - DNA, 203 bp, synthetic construct
  source 1..203: mol_type = other DNA
ggcgcgccagtccttctacagcatcattggctgcttatggtgacaattgacaaattgttaccatatagctattggattggccatccggtgacaaacagagctattgtttacttgtttgttggcacggaatcgagaaattacacggaatcgagaactctcacggaatcgagaacactcaatacagcaaacgactcggaccgatg

SEQ ID NO: 14322 - DNA, 203 bp, synthetic construct
  source 1..203: mol_type = other DNA
ggcgcgccagtccttgtgctgtagcattggctgcttatggtgacaattgacaaattgttaccatatagctattggattggccatccggtgacaaacagagctattgtttacttgtttgttggcgtcaattcctttaattacgtcaattcctttactctcgtcaattcctttacactcaatacagcaaacgactcggaccgatg

SEQ ID NO: 14323 - DNA, 203 bp, synthetic construct
  source 1..203: mol_type = other DNA
ggcgcgccagtcctgaatctcactcattggctgcttatggtgacaattgacaaattgttaccatatagctattggattggccatccggtgacaaacagagctattgtttacttgtttgttggtttcataccattaaattacaaggtcttagaaactctcaactttattttgacactcaatacagcaaacgactcggaccgatg

SEQ ID NO: 14324 - DNA, 203 bp, synthetic construct
  source 1..203: mol_type = other DNA
ggcgcgccagtcctagtgctgtcacattggctgcttatggtgacaattgacaaattgttaccatatagctattggattggccatccggtgacaaacagagctattgtttacttgtttgttggtttcataccattaaattacaaggtcttagaaactctcaactttattttgacactccggcgggtaaacgactcggaccgatg

SEQ ID NO: 14325 - DNA, 203 bp, synthetic construct
  source 1..203: mol_type = other DNA
ggcgcgccagtcctgacgttgaggcattggctgcttatggtgacaattgacaaattgttaccatatagctattggattggccatccggtgacaaacagagctattgtttacttgtttgttggtttcataccattaaattacaaggtcttagaaactctccggcgggttttgacactccggcgggtaaacgactcggaccgatg

SEQ ID NO: 14326 - DNA, 203 bp, synthetic construct
  source 1..203: mol_type = other DNA
ggcgcgccagtcctaatcagttttcattggctgcttatggtgacaattgacaaattgttaccatatagctattggattggccatccggtgacaaacagagctattgtttacttgtttgttggtttcataccattaaattacaaggtcttagaaactctttcttggcaaatgacactttcttggcaaaacgactcggaccgatg

SEQ ID NO: 14327 - DNA, 203 bp, synthetic construct
  source 1..203: mol_type = other DNA
ggcgcgccagtcctctcaaggccacattggctgcttatggtgacaattgacaaattgttaccatatagctattggattggccatccggtgacaaacagagctattgtttacttgtttgttggtttcataccattaaattacgtcaattcctttactctcgtcaattcctttacactcaatacagcaaacgactcggaccgatg

SEQ ID NO: 14328 - DNA, 203 bp, synthetic construct
  source 1..203: mol_type = other DNA
ggcgcgccagtcctcagtttctgcccacggaatcgagaatcactagcaacctcaaacagacaccatggtgcatctgactcctgaggagaagtctgccgttactgccctgtggggcaaggtgaacgtggatgaagttggtggtgaggccctgggcaggctgctggtggtctacccttggaaccggccgtcgactcggaccgatg

SEQ ID NO: 14329 - DNA, 203 bp, synthetic construct
  source 1..203: mol_type = other DNA
ggcgcgccagtcctaatgtacagcccatgatgcctcgctcccatcagccgaccggccgtccacatgaaaccggccgtcaagaagcgaccggccgtattgatgaaaccggccgtgaaatagacaccggccgtgaacaagccaccggccgtattttgaaaaccggccgtaaatataacaccggccgtcaacgactcggaccgatg

SEQ ID NO: 14330 - DNA, 203 bp, synthetic construct
  source 1..203: mol_type = other DNA
ggcgcgccagtcctctaagagtgcccatgatgcctcgctcccatcagccgccgccgccgccacatgaaaaagaacagcaagaagcgattgaacacattgatgaagtacaaaatgaaatagacaccggccgtgaacaagccaccggccgtattttgaaaaccggccgtaaatataacaccggccgtcaacgactcggaccgatg

SEQ ID NO: 14331 - DNA, 203 bp, synthetic construct
  source 1..203: mol_type = other DNA
ggcgcgccagtcctacgttcttgcccatgatgcctcgctcccatcagccgccgccgccgccacatgaaaaagaacagcaagaagcgattgaacacattgatgaagtacaaaatgaaatagacagacttaatgaacaagccagtgaggagattttgaaacgtcaattcctttataacaaactccgccaacgactcggaccgatg

SEQ ID NO: 14332 - DNA, 203 bp, synthetic construct
  source 1..203: mol_type = other DNA
ggcgcgccagtcctaaagtgttgcccatgatgcctcgctcccatcagccgccgccgccgccacatgaaaaagaacagcaagaagcgattgaacacattgatgaagtacaaaatgaaatagacagacttaatgaacaagccagtgaggagattttgaaagtagaacagaaatataacccggcgggtcaacgactcggaccgatg

SEQ ID NO: 14333 - DNA, 203 bp, synthetic construct
  source 1..203: mol_type = other DNA
ggcgcgccagtccttagtttgagcccatgatgcctcgctcccatcagccgccgccgccgccacatgaaaaagaacagcaagaagcgattgaacacattgatgaagtacaaaatgaaatagacagacttaatgaacaagcctactcccagattttgaaatactcccagaaatataactactcccgccaacgactcggaccgatg

SEQ ID NO: 14334 - DNA, 203 bp, synthetic construct
  source 1..203: mol_type = other DNA
ggcgcgccagtcctaggtttgtgcccatgatgcctcgctcccatcagccgccgccgccgccacatgaaaaagaacagcaagaagcgccggcgggtattgatgaaccggcgggtgaaatagacccggcgggtgaacaagccccggcgggtattttgaaaccggcgggtaaatataacccggcgggtcaacgactcggaccgatg

SEQ ID NO: 14335 - DNA, 203 bp, synthetic construct
  source 1..203: mol_type = other DNA
ggcgcgccagtcctagaagcaggcccatgatgcctcgctcccatcagccgccgccgccgccacatgaacgtcaattcctttaagcgcgtcaattcctttatgaacgtcaattcctttaagaccgtcaattcctttaagcccgtcaattcctttagaaacgtcaattcctttataacaaactccgccaacgactcggaccgatg

SEQ ID NO: 14336 - DNA, 203 bp, synthetic construct
  source 1..203: mol_type = other DNA
ggcgcgccagtcctgctagtctgtccatgatgcctcgctcccatcagccgcgtcaattcctttatgaacgtcaattcctttaagcgcgtcaattcctttatgaacgtcaattcctttaagaccgtcaattcctttaagcccgtcaattcctttagaaacgtcaattcctttataacaaactccgccaacgactcggaccgatg

SEQ ID NO: 14337 - DNA, 203 bp, synthetic construct
  source 1..203: mol_type = other DNA
ggcgcgccagtcctgcttgagcttcccactatcacggaatcgagaaagttcacggaatcgagaacgaacacggaatcgagaaccaccacggaatcgagaagctacacggaatcgagaaaaaacacggaatcgagaacccgcacggaatcgagaaccttcacggaatcgagaaggtggtagctgcaacccgactcggaccgatg

SEQ ID NO: 14338 - DNA, 203 bp, synthetic construct
  source 1..203: mol_type = other DNA
ggcgcgccagtcctgcctcttaagcccactatccggcgggtctccgagttccggcgggtatggccgaaccggcgggttggggccacccggcgggtgccgtgctaccggcgggtaggggaaaaccggcgggtgtgaccccgccggcgggtccctcccttccggcgggtagtgtggtgccggcgggtacccgactcggaccgatg

SEQ ID NO: 14339 - DNA, 203 bp, synthetic construct
  source 1..203: mol_type = other DNA
ggcgcgccagtcctgctcgtcaggcccactattgttgtgggctccgagttcctctagggatggccgaaaggcagccatggggccaccacggaatcgagaagctacacggaatcgagaaaaaacacggaatcgagaacccgcacggaatcgagaaccttcacggaatcgagaaggtggtagctgcaacccgactcggaccgatg

SEQ ID NO: 14340 - DNA, 203 bp, synthetic construct
  source 1..203: mol_type = other DNA
ggcgcgccagtcctgcctaactctcccactattgttgtgggctccgagttcctctagggatggccgaaaggcagccatggggccacccaggcggcgccgtgctacacggaatcgagaaaaaacacggaatcgagaacccgcacggaatcgagaaccttcacggaatcgagaaggtggtagctgcaacccgactcggaccgatg

SEQ ID NO: 14341 - DNA, 203 bp, synthetic construct
  source 1..203: mol_type = other DNA
ggcgcgccagtcctgcacagtagccccactattgttgtgggctccgagttcctctagggatggccgaaaggcagccatggggccacccaggcggcgccgtgctacaggcggcaaggggaaaaatccttcgggtgaccccgcgtcaattcctttaccttcgtcaattcctttaggtggtagctgcaacccgactcggaccgatg

SEQ ID NO: 14342 - DNA, 203 bp, synthetic construct
  source 1..203: mol_type = other DNA
ggcgcgccagtcctgcaccttcaacccactattgttgtgggctccgagttcctctagggatggccgaaaggcagccatggggccacccaggcggcgccgtgctacaggcggcaaggggaaaaatccttcgggtgaccccgggtggcattccctcccttaccggccgtagtgtggtgaccggccgtacccgactcggaccgatg

SEQ ID NO: 14343 - DNA, 203 bp, synthetic construct
  source 1..203: mol_type = other DNA
ggcgcgccagtcctgctactctagcccactattgttgtgggctccgagttcctctagggatggccgaaaggcagccatggggccacccaggcggcgccgtgctacaggcggcaaggggaaaaatccttcgggtgaccccgggtggcattccctcccttagcagcatgagtgtggtgtactccccaacccgactcggaccgatg

SEQ ID NO: 14344 - DNA, 203 bp, synthetic construct
  source 1..203: mol_type = other DNA
ggcgcgccagtcctgctcaagttgcccactattgttgtgggctccgagttcctctagggatggccgaaaggcagccatggggccacccaggcggcgccgtgctacaggcggcaaggggaaaaatccttcgggtgaccccgggtggcattccctccctttactccctgagtgtggtgtactccccaacccgactcggaccgatg

SEQ ID NO: 14345 - DNA, 203 bp, synthetic construct
  source 1..203: mol_type = other DNA
ggcgcgccagtcctgcctagtagtcccactattgttgtgggctccgagttcctctagggatggccgaaaggcagccatggggccacccaggcggcgccgtgctacaggcggcaaggggaaaaatccttcgggtgaccccgggtggcattccctcccttttcttggcaaatgtggtgttcttggcaaaccgactcggaccgatg

SEQ ID NO: 14346 - DNA, 203 bp, synthetic construct
  source 1..203: mol_type = other DNA
ggcgcgccagtcctgctctgcaagcccactattgttgtgggctccgagttcctctagggatggccgaaaggcagccatggggccacccaggcggcgccgtgctacaggcggcaaggggaaaaatccttcgggtgaccccgtactcccttccctccctttactccctgagtgtggtgtactccccaacccgactcggaccgatg

SEQ ID NO: 14347 - DNA, 203 bp, synthetic construct
  source 1..203: mol_type = other DNA
ggcgcgccagtcctgctcacctggcccactattgttgtgggctccgagttcctctagggatggccgaaaggcagccatggggccacccaggcggcgccgtgctacaggcggcaaggggaaaatactcccgggtgaccccgtactcccttccctccctttactccctgagtgtggtgtactccccaacccgactcggaccgatg

SEQ ID NO: 14348 - DNA, 203 bp, synthetic construct
  source 1..203: mol_type = other DNA
ggcgcgccagtcctgctcttaagacccactattgttgtgggctccgagttcctctagggatggccgaaaggcagccatggggccacccaggcggcgccgtgctacgtcaattcctttaaaaacgtcaattcctttacccgcgtcaattcctttaccttcgtcaattcctttaggtggtagctgcaacccgactcggaccgatg

SEQ ID NO: 14349 - DNA, 203 bp, synthetic construct
  source 1..203: mol_type = other DNA
ggcgcgccagtcctgcagtatgcacccactattgttgtgggctccgagttcctctagggatggccgaaaggcagccatggggccacccaggcggcgccgtgctatactccccaaggggaaaatactcccgggtgaccccgtactcccttccctccctttactccctgagtgtggtgtactccccaacccgactcggaccgatg

SEQ ID NO: 14350 - DNA, 203 bp, synthetic construct
  source 1..203: mol_type = other DNA
ggcgcgccagtcctagagccttcacccactattgttgtgggctccgagttcctctagggatggccgaacgtcaattcctttaccaccgtcaattcctttagctacgtcaattcctttaaaaacgtcaattcctttacccgcgtcaattcctttaccttcgtcaattcctttaggtggtagctgcaacccgactcggaccgatg

SEQ ID NO: 14351 - DNA, 203 bp, synthetic construct
  source 1..203: mol_type = other DNA
ggcgcgccagtcctgaagccttttcccactattgttgtgggctccgagttcgtcaattcctttacgaacgtcaattcctttaccaccgtcaattcctttagctacgtcaattcctttaaaaacgtcaattcctttacccgcgtcaattcctttaccttcgtcaattcctttaggtggtagctgcaacccgactcggaccgatg

SEQ ID NO: 14352 - DNA, 203 bp, synthetic construct
  source 1..203: mol_type = other DNA
ggcgcgccagtcctacaagtgctccccactatttcttggcaaaccgagttttcttggcaaaggccgaattcttggcaaagggccacttcttggcaaacgtgctattcttggcaaagggaaaattcttggcaaagaccccgttcttggcaaactcccttttcttggcaaatgtggtgttcttggcaaaccgactcggaccgatg

SEQ ID NO: 14353 - DNA, 203 bp, synthetic construct
  source 1..203: mol_type = other DNA
ggcgcgccagtcctaaagaaggatcccggcgggttgtgttcactagcaacctcaaacagacaccatggtgcatctgactcctgaggagaagtctgccgttactgccctgtggggcaaggtgaacgtggatgaagttggtggtgaggccctgggcaggctgctggtggtctaccccgtcaattcctttacgactcggaccgatg

SEQ ID NO: 14354 - DNA, 203 bp, synthetic construct
  source 1..203: mol_type = other DNA
ggcgcgccagtcctctctggactgcccggcgggttgtgttcactagcaacctcaaacagacaccatggtgcatctgactcctgaggagaagtctgccgttactgccctgtggggcaaggtgaacgtggatgaagttggtggtgaggccctgggcaggctgctggtggtctacccttggacctactccccgactcggaccgatg

SEQ ID NO: 14355 - DNA, 203 bp, synthetic construct
  source 1..203: mol_type = other DNA
ggcgcgccagtccttcaacgtaggccgcccgccacggaatcgagaacccccacggaatcgagaacccccacggaatcgagaaccttcacggaatcgagaactcgcacggaatcgagaaggctcacggaatcgagaagtgacacggaatcgagaaactccacggaatcgagaacagaacactgctcgaccgactcggaccgatg

SEQ ID NO: 14356 - DNA, 203 bp, synthetic construct
  source 1..203: mol_type = other DNA
ggcgcgccagtcctgagttctgtcccgcccgcccctattgttccgcccccaccggccgtcccttccccaccggccgtgctccccttaccggccgtgtcgcctcgaccggccgttttttggctaccggccgtaaccagtgaaccggccgttgaccactcaccggccgtctccccagaaccggccgtgaccgactcggaccgatg

SEQ ID NO: 14357 - DNA, 203 bp, synthetic construct
  source 1..203: mol_type = other DNA
ggcgcgccagtcctagctgtacacccgcccgcccctattgttccgccccccgtcaattcctttacccccgtcaattcctttaccttcgtcaattcctttactcgcgtcaattcctttaggctcgtcaattcctttagtgacgtcaattcctttaactccgtcaattcctttacagaacactgctcgaccgactcggaccgatg

SEQ ID NO: 14358 - DNA, 203 bp, synthetic construct
  source 1..203: mol_type = other DNA
ggcgcgccagtcctgtagtgctaaccgcccgcccctattgttccgcccccggcctcccgcccttccccccggcgggtgctccccttccggcgggtgtcgcctcgccggcgggttttttggctccggcgggtaaccagtgaccggcgggttgaccactcccggcgggtctccccagaccggcgggtgaccgactcggaccgatg

SEQ ID NO: 14359 - DNA, 203 bp, synthetic construct
  source 1..203: mol_type = other DNA
ggcgcgccagtcctgtgctctcgtccgcccgcccctattgttccgcccccggcctcccgcccttccccttcccgcccgctccccttaccggccgtgtcgcctcgaccggccgttttttggctaccggccgtaaccagtgaaccggccgttgaccactcaccggccgtctccccagaaccggccgtgaccgactcggaccgatg

SEQ ID NO: 14360 - DNA, 203 bp, synthetic construct
  source 1..203: mol_type = other DNA
ggcgcgccagtcctctgtgtacacccgcccgcccctattgttccgcccccggcctcccgcccttccccttcccgcccgctcccctttactccccagtcgcctcgtactcccagtttttggcttactcccccaaccagtgatactccccttgaccactctactcccagctccccagatactccctcgaccgactcggaccgatg

SEQ ID NO: 14361 - DNA, 203 bp, synthetic construct
  source 1..203: mol_type = other DNA
ggcgcgccagtcctgtgaatgttgccgcccgcccctattgttccgcccccggcctcccgcccttccccttcccgcccgctccccttttcccctcagtcgcctcgaccggccgttttttggctaccggccgtaaccagtgaaccggccgttgaccactcaccggccgtctccccagaaccggccgtgaccgactcggaccgatg

SEQ ID NO: 14362 - DNA, 203 bp, synthetic construct
  source 1..203: mol_type = other DNA
ggcgcgccagtcctgaccgagaacccgcccgcccctattgttccgcccccggcctcccgcccttccccttcccgcccgctccccttttcccctcagtcgcctcgcgcctgcagtttttggctccggcgggtaaccagtgaccggcgggttgaccactcccggcgggtctccccagaccggcgggtgaccgactcggaccgatg

SEQ ID NO: 14363 - DNA, 203 bp, synthetic construct
  source 1..203: mol_type = other DNA
ggcgcgccagtcctgttactggacccgcccgcccctattgttccgcccccggcctcccgcccttccccttcccgcccgctccccttttcccctcagtcgcctcgcgcctgcagtttttggctttcacccccaaccagtgaaccggccgttgaccactcaccggccgtctccccagaaccggccgtgaccgactcggaccgatg

SEQ ID NO: 14364 - DNA, 203 bp, synthetic construct
  source 1..203: mol_type = other DNA
ggcgcgccagtcctgtctacccagccgcccgcccctattgttccgcccccggcctcccgcccttccccttcccgcccgctccccttttcccctcagtcgcctcgcgcctgcagtttttggctttcacccccaaccagtgaccaaagacttgaccactcaaagtccagctccccagaccggcgggtgaccgactcggaccgatg

SEQ ID NO: 14365 - DNA, 203 bp, synthetic construct
  source 1..203: mol_type = other DNA
ggcgcgccagtcctgttgtaactgccgcccgcccctattgttccgcccccggcctcccgcccttccccttcccgcccgctccccttttcccctcagtcgcctcgcgcctgcagtttttggctttcacccccaaccagtgaccaaagacttgaccactccacggaatcgagaacagaacactgctcgaccgactcggaccgatg

SEQ ID NO: 14366 - DNA, 203 bp, synthetic construct
  source 1..203: mol_type = other DNA
ggcgcgccagtcctgtggttgactccgcccgcccctattgttccgcccccggcctcccgcccttccccttcccgcccgctccccttttcccctcagtcgcctcgcgcctgcagtttttggctttcacccccaaccagtgaccaaagacttgaccactctactcccagctccccagatactccctcgaccgactcggaccgatg

SEQ ID NO: 14367 - DNA, 203 bp, synthetic construct
  source 1..203: mol_type = other DNA
ggcgcgccagtcctatgagttgacccgcccgcccctattgttccgcccccggcctcccgcccttccccttcccgcccgctccccttttcccctcagtcgcctcgcgcctgcagtttttggctttcacccccaaccagtgaccaaagacttgaccactcttcttggcaaaccccagattcttggcaaaccgactcggaccgatg

SEQ ID NO: 14368 - DNA, 203 bp, synthetic construct
  source 1..203: mol_type = other DNA
ggcgcgccagtcctgtgaatcagtccgcccgcccctattgttccgcccccggcctcccgcccttccccttcccgcccgctccccttttcccctcagtcgcctcgtactcccagtttttggcttactcccccaaccagtgatactccccttgaccactctactcccagctccccagatactccctcgaccgactcggaccgatg

SEQ ID NO: 14369 - DNA, 203 bp, synthetic construct
  source 1..203: mol_type = other DNA
ggcgcgccagtcctctgacaaaacccgcccgcccctattgttccgccccctactccccgcccttcccctactcccccgctcccctttactccccagtcgcctcgtactcccagtttttggcttactcccccaaccagtgatactccccttgaccactctactcccagctccccagatactccctcgaccgactcggaccgatg

SEQ ID NO: 14370 - DNA, 203 bp, synthetic construct
  source 1..203: mol_type = other DNA
ggcgcgccagtcctcagtaactacccgcccgcccctattgttccgcccccttcttggcaaacttccccttcttggcaaatccccttttcttggcaaacgcctcgttcttggcaaatttggctttcttggcaaaccagtgattcttggcaaaaccactcttcttggcaaaccccagattcttggcaaaccgactcggaccgatg

SEQ ID NO: 14371 - DNA, 203 bp, synthetic construct
  source 1..203: mol_type = other DNA
ggcgcgccagtcctgtcacagttgccgcccgcccggcgggttccgcccccccggcgggtcccttccccccggcgggtgctccccttccggcgggtgtcgcctcgccggcgggttttttggctccggcgggtaaccagtgaccggcgggttgaccactcccggcgggtctccccagaccggcgggtgaccgactcggaccgatg

SEQ ID NO: 14372 - DNA, 203 bp, synthetic construct
  source 1..203: mol_type = other DNA
ggcgcgccagtcctgagaccagacccgcccgccgtcaattcctttacccccgtcaattcctttacccccgtcaattcctttaccttcgtcaattcctttactcgcgtcaattcctttaggctcgtcaattcctttagtgacgtcaattcctttaactccgtcaattcctttacagaacactgctcgaccgactcggaccgatg

SEQ ID NO: 14373 - DNA, 203 bp, synthetic construct
  source 1..203: mol_type = other DNA
ggcgcgccagtcctgtcaagcgttccgcccgctactcccgttccgccccctactccccgcccttcccctactcccccgctcccctttactccccagtcgcctcgtactcccagtttttggcttactcccccaaccagtgatactccccttgaccactctactcccagctccccagatactccctcgaccgactcggaccgatg

SEQ ID NO: 14374 - DNA, 203 bp, synthetic construct
  source 1..203: mol_type = other DNA
ggcgcgccagtcctccagagaaacccgcccgcttcttggcaaacgcccccttcttggcaaacttccccttcttggcaaatccccttttcttggcaaacgcctcgttcttggcaaatttggctttcttggcaaaccagtgattcttggcaaaaccactcttcttggcaaaccccagattcttggcaaaccgactcggaccgatg

SEQ ID NO: 14375 - DNA, 203 bp, synthetic construct
  source 1..203: mol_type = other DNA
ggcgcgccagtcctgtagaccgacccgtcaattcctttatcactagcaacctcaaacagacaccatggtgcatctgactcctgaggagaagtctgccgttactgccctgtggggcaaggtgaacgtggatgaagttggtggtgaggccctgggcaggctgctggtggtctacccttggaccggcgggtcgactcggaccgatg

SEQ ID NO: 14376 - DNA, 203 bp, synthetic construct
  source 1..203: mol_type = other DNA
ggcgcgccagtcctgttcaagaaccgagatgccatgtggacgagggcgtgcacggaatcgagaataaccacggaatcgagaacttgcacggaatcgagaagttacacggaatcgagaaagtacacggaatcgagaagttgcacggaatcgagaaaccacacggaatcgagaactgctgtacatggcaccgactcggaccgatg

SEQ ID NO: 14377 - DNA, 203 bp, synthetic construct
  source 1..203: mol_type = other DNA
ggcgcgccagtcctgtcctgtcagcgagatgccatgtggacgagggcgtgcccacggtgtatcttaacccaggcgggggccgcttgggtgaaatagggttgttaccggcgggtttgggagtaccggcgggtagggtgttgccggcgggtgctacaccaccggcgggtaaactctgcccggcgggtcaccgactcggaccgatg

SEQ ID NO: 14378 - DNA, 203 bp, synthetic construct
  source 1..203: mol_type = other DNA
ggcgcgccagtcctttcacttgaccgagatgccatgtggacgagggcgtgcccacggtgtatcttaacccaggcgggggccgcttgggtgaaatagggttgttacgtcaattcctttaagtacgtcaattcctttagttgcgtcaattcctttaaccacgtcaattcctttactgctgtacatggcaccgactcggaccgatg

SEQ ID NO: 14379 - DNA, 203 bp, synthetic construct
  source 1..203: mol_type = other DNA
ggcgcgccagtcctgtctctgttacgagatgccatgtggacgagggcgtgcccacggtgtatcttaacccaggcgggggccgcttgggtgaaatagggttgttatacaagcctttgggagtaaccggccgtagggtgttgaccggccgtgctacaccaaccggccgtaaactctgcaccggccgtcaccgactcggaccgatg

SEQ ID NO: 14380 - DNA, 203 bp, synthetic construct
  source 1..203: mol_type = other DNA
ggcgcgccagtcctgtgagagcctcgagatgccatgtggacgagggcgtgcccacggtgtatcttaacccaggcgggggccgcttgggtgaaatagggttgttatacaagcctttgggagtacacggaatcgagaagttgcacggaatcgagaaaccacacggaatcgagaactgctgtacatggcaccgactcggaccgatg

SEQ ID NO: 14381 - DNA, 203 bp, synthetic construct
  source 1..203: mol_type = other DNA
ggcgcgccagtcctgtccactagtcgagatgccatgtggacgagggcgtgcccacggtgtatcttaacccaggcgggggccgcttgggtgaaatagggttgttatacaagcctttgggagtacagcctgatagggtgttgcagagacctgctacaccaccggcgggtaaactctgcccggcgggtcaccgactcggaccgatg

SEQ ID NO: 14382 - DNA, 203 bp, synthetic construct
  source 1..203: mol_type = other DNA
ggcgcgccagtcctgtgaccaaagcgagatgccatgtggacgagggcgtgcccacggtgtatcttaacccaggcgggggccgcttgggtgaaatagggttgttatacaagcctttgggagtacagcctgatagggtgttgcagagacctgctacaccacgtcaattcctttactgctgtacatggcaccgactcggaccgatg

SEQ ID NO: 14383 - DNA, 203 bp, synthetic construct
  source 1..203: mol_type = other DNA
ggcgcgccagtcctgagtagataccgagatgccatgtggacgagggcgtgcccacggtgtatcttaacccaggcgggggccgcttgggtgaaatagggttgttatacaagcctttgggagtacagcctgatagggtgttgcagagacctgctacaccactagtataaaaactctgcccggcgggtcaccgactcggaccgatg

SEQ ID NO: 14384 - DNA, 203 bp, synthetic construct
  source 1..203: mol_type = other DNA
ggcgcgccagtcctgtgaccggttcgagatgccatgtggacgagggcgtgcccacggtgtatcttaacccaggcgggggccgcttgggtgaaatagggttgttatacaagcctttgggagtacagcctgatagggtgttgcagagacctgctacaccattcttggcaaaactctgcttcttggcaaaccgactcggaccgatg

SEQ ID NO: 14385 - DNA, 203 bp, synthetic construct
  source 1..203: mol_type = other DNA
ggcgcgccagtcctgtcaacgtaccgagatgccatgtggacgagggcgtgcccacggtgtatcttaacccaggcgggggccgcttgggtgaaatagggttgttatacaagcctttgggagtacgtcaattcctttagttgcgtcaattcctttaaccacgtcaattcctttactgctgtacatggcaccgactcggaccgatg

SEQ ID NO: 14386 - DNA, 203 bp, synthetic construct
  source 1..203: mol_type = other DNA
ggcgcgccagtcctgcagtcagaccgagatgccatgtggacgagggcgtgcccacggtgtatcttaaccgtcaattcctttacttgcgtcaattcctttagttacgtcaattcctttaagtacgtcaattcctttagttgcgtcaattcctttaaccacgtcaattcctttactgctgtacatggcaccgactcggaccgatg

SEQ ID NO: 14387 - DNA, 203 bp, synthetic construct
  source 1..203: mol_type = other DNA
ggcgcgccagtcctagtatgcaaccgagatgccatgtggacgagggcgtgcccacggtgtatcttaacttcttggcaaaccgcttgttcttggcaaagttgttattcttggcaaagggagtattcttggcaaaggtgttgttcttggcaaatacaccattcttggcaaaactctgcttcttggcaaaccgactcggaccgatg

SEQ ID NO: 14388 - DNA, 203 bp, synthetic construct
  source 1..203: mol_type = other DNA
ggcgcgccagtccttgaatcctaccgagatgccatgtggacgagggcgtgttcttggcaaatcttaacttcttggcaaaccgcttgttcttggcaaagttgttattcttggcaaagggagtattcttggcaaaggtgttgttcttggcaaatacaccattcttggcaaaactctgcttcttggcaaaccgactcggaccgatg

SEQ ID NO: 14389 - DNA, 203 bp, synthetic construct
  source 1..203: mol_type = other DNA
ggcgcgccagtcctcagaagttaccgccgggcaccggccgtgagcgtgagaccggccgtgcgttgcgtaccggccgttctgtgagcaccggccgtatacaccataccggccgttcaccctccaccggccgtaaaatttataccggccgtgttatcattaccggccgttggtggcagaccggccgtaggcgactcggaccgatg

SEQ ID NO: 14390 - DNA, 203 bp, synthetic construct
  source 1..203: mol_type = other DNA
ggcgcgccagtccttgtcttggaccgccgggccacggaatcgagaatgagcacggaatcgagaagcgtcacggaatcgagaagagccacggaatcgagaaccatcacggaatcgagaactcccacggaatcgagaattatcacggaatcgagaacattcacggaatcgagaagcagacatgtccaaggcgactcggaccgatg

SEQ ID NO: 14391 - DNA, 203 bp, synthetic construct
  source 1..203: mol_type = other DNA
ggcgcgccagtcctgttaacagaccgccgggcccggcgggtgagcgtgagccggcgggtgcgttgcgtccggcgggttctgtgagcccggcgggtatacaccatccggcgggttcaccctccccggcgggtaaaatttatccggcgggtgttatcattccggcgggttggtggcagccggcgggtaggcgactcggaccgatg

SEQ ID NO: 14392 - DNA, 203 bp, synthetic construct
  source 1..203: mol_type = other DNA
ggcgcgccagtccttgcaagtaaccgccgggcctacagcgggagcgtgagaccggccgtgcgttgcgtaccggccgttctgtgagcaccggccgtatacaccataccggccgttcaccctccaccggccgtaaaatttataccggccgtgttatcattaccggccgttggtggcagaccggccgtaggcgactcggaccgatg

SEQ ID NO: 14393 - DNA, 203 bp, synthetic construct
  source 1..203: mol_type = other DNA
ggcgcgccagtccttaagtaggaccgccgggcctacagcgggagcgtgagcacggaatcgagaagcgtcacggaatcgagaagagccacggaatcgagaaccatcacggaatcgagaactcccacggaatcgagaattatcacggaatcgagaacattcacggaatcgagaagcagacatgtccaaggcgactcggaccgatg

SEQ ID NO: 14394 - DNA, 203 bp, synthetic construct
  source 1..203: mol_type = other DNA
ggcgcgccagtcctgtaactacagcgccgggcctacagcgggagcgtgagcgtcaattcctttagcgtcgtcaattcctttagagccgtcaattcctttaccatcgtcaattcctttactcccgtcaattcctttattatcgtcaattcctttacattcgtcaattcctttagcagacatgtccaaggcgactcggaccgatg

SEQ ID NO: 14395 - DNA, 203 bp, synthetic construct
  source 1..203: mol_type = other DNA
ggcgcgccagtcctgttcagagaacgccgggcctacagcgggagcgtgaggaaagccgtgcgttgcgtaccggccgttctgtgagcaccggccgtatacaccataccggccgttcaccctccaccggccgtaaaatttataccggccgtgttatcattaccggccgttggtggcagaccggccgtaggcgactcggaccgatg

SEQ ID NO: 14396 - DNA, 203 bp, synthetic construct
  source 1..203: mol_type = other DNA
ggcgcgccagtcctatcggtgaaccgccgggcctacagcgggagcgtgaggaaagccgtgcgttgcgtcgtcaattcctttagagccgtcaattcctttaccatcgtcaattcctttactcccgtcaattcctttattatcgtcaattcctttacattcgtcaattcctttagcagacatgtccaaggcgactcggaccgatg

SEQ ID NO: 14397 - DNA, 203 bp, synthetic construct
  source 1..203: mol_type = other DNA
ggcgcgccagtcctctaagttcaccgccgggcctacagcgggagcgtgaggaaagccgtgcgttgcgttactccccatctgtgagctactcccgtatacaccattactcccgctcaccctcctactcccaaaaaatttattactcccaagttatcatttactcccaatggtggcagtactccccaaggcgactcggaccgatg

SEQ ID NO: 14398 - DNA, 203 bp, synthetic construct
  source 1..203: mol_type = other DNA
ggcgcgccagtcctcaagaatcatcgccgggcctacagcgggagcgtgaggaaagccgtgcgttgcgttccaaggcatctgtgagcccgcggagtatacaccatcacggaatcgagaactcccacggaatcgagaattatcacggaatcgagaacattcacggaatcgagaagcagacatgtccaaggcgactcggaccgatg

SEQ ID NO: 14399 - DNA, 203 bp, synthetic construct
  source 1..203: mol_type = other DNA
ggcgcgccagtcctcaacgagttacgccgggcctacagcgggagcgtgaggaaagccgtgcgttgcgttccaaggcatctgtgagcccgcggagtatacaccatcgtcaattcctttactcccgtcaattcctttattatcgtcaattcctttacattcgtcaattcctttagcagacatgtccaaggcgactcggaccgatg

SEQ ID NO: 14400 - DNA, 203 bp, synthetic construct
  source 1..203: mol_type = other DNA
ggcgcgccagtcctccaacgatctcgccgggcctacagcgggagcgtgaggaaagccgtgcgttgcgttccaaggcatctgtgagcccgcggagtatacaccatgagcaaagctcaccctcccacggaatcgagaattatcacggaatcgagaacattcacggaatcgagaagcagacatgtccaaggcgactcggaccgatg

SEQ ID NO: 14401 - DNA, 203 bp, synthetic construct
  source 1..203: mol_type = other DNA
ggcgcgccagtcctctcttcaaagcgccgggcctacagcgggagcgtgaggaaagccgtgcgttgcgttccaaggcatctgtgagcccgcggagtatacaccatgagcaaagctcaccctcccgagttgaaaaaatttatcgtcaattcctttacattcgtcaattcctttagcagacatgtccaaggcgactcggaccgatg

SEQ ID NO: 14402 - DNA, 203 bp, synthetic construct
  source 1..203: mol_type = other DNA
ggcgcgccagtcctctcaccatgtcgccgggcctacagcgggagcgtgaggaaagccgtgcgttgcgttccaaggcatctgtgagcccgcggagtatacaccatgagcaaagctcaccctcccgagttgaaaaaatttatggacaagaagttatcattccggcgggttggtggcagccggcgggtaggcgactcggaccgatg

SEQ ID NO: 14403 - DNA, 203 bp, synthetic construct
  source 1..203: mol_type = other DNA
ggcgcgccagtcctctagagtaaacgccgggcctacagcgggagcgtgaggaaagccgtgcgttgcgttccaaggcatctgtgagcccgcggagtatacaccatgagcaaagctcaccctcccgagttgaaaaaatttatggacaagaagttatcattcgtcaattcctttagcagacatgtccaaggcgactcggaccgatg

SEQ ID NO: 14404 - DNA, 203 bp, synthetic construct
  source 1..203: mol_type = other DNA
ggcgcgccagtcctctgagcctaccgccgggcctacagcgggagcgtgaggaaagccgtgcgttgcgttccaaggcatctgtgagcccgcggagtatacaccatgagcaaagctcaccctcccgagttgaaaaaatttatggacaagaagttatcattgaaattaaatggtggcagaccggccgtaggcgactcggaccgatg

SEQ ID NO: 14405 - DNA, 203 bp, synthetic construct
  source 1..203: mol_type = other DNA
ggcgcgccagtccttcaaagagatcgccgggcctacagcgggagcgtgaggaaagccgtgcgttgcgttccaaggcatctgtgagcccgcggagtatacaccatgagcaaagctcaccctcccgagttgaaaaaatttatggacaagaagttatcattgaaattaaatggtggcagccggcgggtaggcgactcggaccgatg

SEQ ID NO: 14406 - DNA, 203 bp, synthetic construct
  source 1..203: mol_type = other DNA
ggcgcgccagtccttgaagacgaccgccgggcctacagcgggagcgtgaggaaagccgtgcgttgcgttccaaggcatctgtgagcccgcggagtatacaccatgagcaaagctcaccctcccgagttgaaaaaatttattactcccaagttatcatttactcccaatggtggcagtactccccaaggcgactcggaccgatg

SEQ ID NO: 14407 - DNA, 203 bp, synthetic construct
  source 1..203: mol_type = other DNA
ggcgcgccagtcctgatcacaagtcgccgggcctacagcgggagcgtgaggaaagccgtgcgttgcgttccaaggcatctgtgagcccgcggagtatacaccatgagcaaagctcaccctcccgagttgaaaaaatttatttcttggcaaatatcattttcttggcaaagtggcagttcttggcaaagcgactcggaccgatg

SEQ ID NO: 14408 - DNA, 203 bp, synthetic construct
  source 1..203: mol_type = other DNA
ggcgcgccagtcctacgctagacacgccgggcctacagcgggagcgtgaggaaagccgtgcgttgcgttccaaggcatctgtgagcccgcggagtatacaccattactcccgctcaccctcctactcccaaaaaatttattactcccaagttatcatttactcccaatggtggcagtactccccaaggcgactcggaccgatg

SEQ ID NO: 14409 - DNA, 203 bp, synthetic construct
  source 1..203: mol_type = other DNA
ggcgcgccagtccttaactagcgtcgccgggcctacagcgggagcgtgaggaaagccgtgcgttgcgttccaaggcatctgtgagcccgcggagtatacaccatttcttggcaaaaccctccttcttggcaaaaatttatttcttggcaaatatcattttcttggcaaagtggcagttcttggcaaagcgactcggaccgatg

SEQ ID NO: 14410 - DNA, 203 bp, synthetic construct
  source 1..203: mol_type = other DNA
ggcgcgccagtcctagagtcctagcgccgggcctacagcgggagcgtgaggaaagccgtgcgttgcgttccaaggcatctgtgagcccggcgggtatacaccatccggcgggttcaccctccccggcgggtaaaatttatccggcgggtgttatcattccggcgggttggtggcagccggcgggtaggcgactcggaccgatg

SEQ ID NO: 14411 - DNA, 203 bp, synthetic construct
  source 1..203: mol_type = other DNA
ggcgcgccagtcctcagagtcctacgccgggcctacagcgggagcgtgaggaaagccgtgcgttgcgttccaaggcatctgtgagccgtcaattcctttaccatcgtcaattcctttactcccgtcaattcctttattatcgtcaattcctttacattcgtcaattcctttagcagacatgtccaaggcgactcggaccgatg

SEQ ID NO: 14412 - DNA, 203 bp, synthetic construct
  source 1..203: mol_type = other DNA
ggcgcgccagtcctaaaccgttcactccggaaaccggccgtagaattcataccggccgtgaatttttaaccggccgtacaaaaagaaccggccgttgccgaaacaccggccgtttagagaataccggccgtaaaagagaaaccggccgtaaggaaaagaccggccgtgaacgtgaaaccggccgtctacgactcggaccgatg

SEQ ID NO: 14413 - DNA, 203 bp, synthetic construct
  source 1..203: mol_type = other DNA
ggcgcgccagtcctaccgttcatactccggaaagtgataacagaattcataccggccgtgaatttttaaccggccgtacaaaaagaaccggccgttgccgaaacaccggccgtttagagaataccggccgtaaaagagaaaccggccgtaaggaaaagaccggccgtgaacgtgaaaccggccgtctacgactcggaccgatg

SEQ ID NO: 14414 - DNA, 203 bp, synthetic construct
  source 1..203: mol_type = other DNA
ggcgcgccagtcctatggtcacagctccggaaagtgataacagaattcatcgtcaattcctttatttacgtcaattcctttaaagacgtcaattcctttaaaaccgtcaattcctttagaatcgtcaattcctttaagaacgtcaattcctttaaaagcgtcaattcctttatgaaaaggaagagctacgactcggaccgatg

SEQ ID NO: 14415 - DNA, 203 bp, synthetic construct
  source 1..203: mol_type = other DNA
ggcgcgccagtcctagctaacgtactccggaaagtgataacagaattcattgaagtggagaatttttaaagaaggtaacaaaaagagaaagaaaatgccgaaaccaggcacaattagagaatgaaaagaagaaaagagaaatagcagaaaaggaaaaggaaagaatagaacgtgaaccggcgggtctacgactcggaccgatg

SEQ ID NO: 14416 - DNA, 203 bp, synthetic construct
  source 1..203: mol_type = other DNA
ggcgcgccagtcctttgttcagtgctccggaaagtgataacagaattcattgaagtggagaatttttaaagaaggtaacaaaaagagaaagaaaatgccgaaaccaggcacaattagagaatgaaaagaagaaaagagaaatagcagaaaaggaaaaggaaagaatagaacgtgaattcttggcaaaacgactcggaccgatg

SEQ ID NO: 14417 - DNA, 203 bp, synthetic construct
  source 1..203: mol_type = other DNA
ggcgcgccagtcctctcaactgaactccggaaagtgataacagaattcattgaagtggagaatttttaaagaaggtaacaaaaagagaaagaaaatgccgaaaccaggcacaattagagaatgaaaagaagaaaagagaacgtcaattcctttaaaagcgtcaattcctttatgaaaaggaagagctacgactcggaccgatg

SEQ ID NO: 14418 - DNA, 203 bp, synthetic construct
  source 1..203: mol_type = other DNA
ggcgcgccagtcctagagactgaactccggaaagtgataacagaattcattgaagtggagaatttttaaagaaggtaacaaaaagagaaagaaaatgccgaaaccaggcacaattagagaatgaaaagaagaaaagagaattcttggcaaaggaaaagttcttggcaaaacgtgaattcttggcaaaacgactcggaccgatg

SEQ ID NO: 14419 - DNA, 203 bp, synthetic construct
  source 1..203: mol_type = other DNA
ggcgcgccagtcctgagtactgaactccggaaagtgataacagaattcattgaagtggagaatttttaaagaaggtaacaaaaagagaaagaaaatgccgaaaccgtcaattcctttagaatcgtcaattcctttaagaacgtcaattcctttaaaagcgtcaattcctttatgaaaaggaagagctacgactcggaccgatg

SEQ ID NO: 14420 - DNA, 203 bp, synthetic construct
  source 1..203: mol_type = other DNA
ggcgcgccagtccttcactgaaagctccggaaagtgataacagaattcattgaagtggagaatttttaaagaaggtaacaaaaagagaaagaaaatgccgaaacttcttggcaaaagagaatttcttggcaaaaagagaattcttggcaaaggaaaagttcttggcaaaacgtgaattcttggcaaaacgactcggaccgatg

SEQ ID NO: 14421 - DNA, 203 bp, synthetic construct
  source 1..203: mol_type = other DNA
ggcgcgccagtcctcccaacggtcctccggaaagtgataacagaattcattgaagtggagaatttttaaagaaggtaacaaaaagatactcccaatgccgaaactactcccaattagagaattactcccagaaaagagaatactcccaaaaggaaaagtactccctagaacgtgaatactcccagctacgactcggaccgatg

SEQ ID NO: 14422 - DNA, 203 bp, synthetic construct
  source 1..203: mol_type = other DNA
ggcgcgccagtcctgttgggtcagctccggaaagtgataacagaattcattgaagtggagaatttttaccggcgggtacaaaaagaccggcgggttgccgaaacccggcgggtttagagaatccggcgggtaaaagagaaccggcgggtaaggaaaagccggcgggtgaacgtgaaccggcgggtctacgactcggaccgatg

SEQ ID NO: 14423 - DNA, 203 bp, synthetic construct
  source 1..203: mol_type = other DNA
ggcgcgccagtcctaaagagagacctccggaattcttggcaaaaattcatttcttggcaaaatttttattcttggcaaaaaaaagattcttggcaaaccgaaacttcttggcaaaagagaatttcttggcaaaaagagaattcttggcaaaggaaaagttcttggcaaaacgtgaattcttggcaaaacgactcggaccgatg

SEQ ID NO: 14424 - DNA, 203 bp, synthetic construct
  source 1..203: mol_type = other DNA
ggcgcgccagtccttccacggtgcctgaagtgacaagccacgctgcttctcacggaatcgagaaccaacacggaatcgagaacccccacggaatcgagaagtcacacggaatcgagaacgttcacggaatcgagaaccaccacggaatcgagaaggatcacggaatcgagaaaacagaaagtaaaaaacgactcggaccgatg

SEQ ID NO: 14425 - DNA, 203 bp, synthetic construct
  source 1..203: mol_type = other DNA
ggcgcgccagtcctactcaccttactgaagtgacaagccacgctgcttctccggcgggtgctgaccaaccggcgggtatccaccccccggcgggtctcaggtcaccggcgggtgccctcgttccggcgggttatccccacccggcgggtggtgaggatccggcgggtcactcaacaccggcgggtaaacgactcggaccgatg

SEQ ID NO: 14426 - DNA, 203 bp, synthetic construct
  source 1..203: mol_type = other DNA
ggcgcgccagtcctacccaagcgactgaagtgacaagccacgctgcttctggagccaaagctgaccaacgtcaattcctttacccccgtcaattcctttagtcacgtcaattcctttacgttcgtcaattcctttaccaccgtcaattcctttaggatcgtcaattcctttaaacagaaagtaaaaaacgactcggaccgatg

SEQ ID NO: 14427 - DNA, 203 bp, synthetic construct
  source 1..203: mol_type = other DNA
ggcgcgccagtcctcccaagcttgctgaagtgacaagccacgctgcttctggagccaaagctgaccaagaagaacaaatccaccccaccggccgtctcaggtcaaccggccgtgccctcgttaccggccgttatccccacaccggccgtggtgaggataccggccgtcactcaacaaccggccgtaaacgactcggaccgatg

SEQ ID NO: 14428 - DNA, 203 bp, synthetic construct
  source 1..203: mol_type = other DNA
ggcgcgccagtcctgacccaagtcctgaagtgacaagccacgctgcttctggagccaaagctgaccaagaagaacaaatccaccccagatctagactcaggtcaaccggccgtgccctcgttaccggccgttatccccacaccggccgtggtgaggataccggccgtcactcaacaaccggccgtaaacgactcggaccgatg

SEQ ID NO: 14429 - DNA, 203 bp, synthetic construct
  source 1..203: mol_type = other DNA
ggcgcgccagtcctattcttgggtctgaagtgacaagccacgctgcttctggagccaaagctgaccaagaagaacaaatccaccccagatctagactcaggtcacctcctgaagccctcgttaccggccgttatccccacaccggccgtggtgaggataccggccgtcactcaacaaccggccgtaaacgactcggaccgatg

SEQ ID NO: 14430 - DNA, 203 bp, synthetic construct
  source 1..203: mol_type = other DNA
ggcgcgccagtcctagactacggtctgaagtgacaagccacgctgcttctggagccaaagctgaccaagaagaacaaatccaccccagatctagactcaggtcacctcctgaagccctcgttcagggtcgatatccccacatcaaggacggtgaggatcttaaagaccactcaacatactcccaaaaacgactcggaccgatg

SEQ ID NO: 14431 - DNA, 203 bp, synthetic construct
  source 1..203: mol_type = other DNA
ggcgcgccagtcctctaccgtaagctgaagtgacaagccacgctgcttctggagccaaagctgaccaagaagaacaaatccaccccagatctagactcaggtcacctcctgaagccctcgttcagggtcgatatccccactactcccacggtgaggattactcccaccactcaacatactcccaaaaacgactcggaccgatg

SEQ ID NO: 14432 - DNA, 203 bp, synthetic construct
  source 1..203: mol_type = other DNA
ggcgcgccagtcctctacggttaactgaagtgacaagccacgctgcttctggagccaaagctgaccaagaagaacaaatccaccccagatctagactcaggtcacctcctgaagccctcgttccggcgggttatccccacccggcgggtggtgaggatccggcgggtcactcaacaccggcgggtaaacgactcggaccgatg

SEQ ID NO: 14433 - DNA, 203 bp, synthetic construct
  source 1..203: mol_type = other DNA
ggcgcgccagtcctaatgcacattctgaagtgacaagccacgctgcttctggagccaaagctgaccaagaagaacaaatccaccccagatctagactcaggtcacgtcaattcctttacgttcgtcaattcctttaccaccgtcaattcctttaggatcgtcaattcctttaaacagaaagtaaaaaacgactcggaccgatg

SEQ ID NO: 14434 - DNA, 203 bp, synthetic construct
  source 1..203: mol_type = other DNA
ggcgcgccagtcctcagcagcctactgaagtgacaagccacgctgcttctggagccaaagctgaccaagaagaacaaatccacccccacggaatcgagaagtcacacggaatcgagaacgttcacggaatcgagaaccaccacggaatcgagaaggatcacggaatcgagaaaacagaaagtaaaaaacgactcggaccgatg

SEQ ID NO: 14435 - DNA, 203 bp, synthetic construct
  source 1..203: mol_type = other DNA
ggcgcgccagtcctaactttacttctgaagtgacaagccacgctgcttctggagccaaagctgaccaagaagaacaaatccacccctactcccgactcaggtcatactcccaagccctcgtttactcccgatatccccactactcccacggtgaggattactcccaccactcaacatactcccaaaaacgactcggaccgatg

SEQ ID NO: 14436 - DNA, 203 bp, synthetic construct
  source 1..203: mol_type = other DNA
ggcgcgccagtcctacttgggtctctgaagtgacaagccacgctgcttcttactcccaagctgaccaatactcccaaatccacccctactcccgactcaggtcatactcccaagccctcgtttactcccgatatccccactactcccacggtgaggattactcccaccactcaacatactcccaaaaacgactcggaccgatg

SEQ ID NO: 14437 - DNA, 203 bp, synthetic construct
  source 1..203: mol_type = other DNA
ggcgcgccagtcctagcacggtctctgaagtgcacggaatcgagaattctcacggaatcgagaaccaacacggaatcgagaacccccacggaatcgagaagtcacacggaatcgagaacgttcacggaatcgagaaccaccacggaatcgagaaggatcacggaatcgagaaaacagaaagtaaaaaacgactcggaccgatg

SEQ ID NO: 14438 - DNA, 203 bp, synthetic construct
  source 1..203: mol_type = other DNA
ggcgcgccagtcctacagaccgtactgaagtgttcttggcaaatgcttctttcttggcaaatgaccaattcttggcaaaccaccccttcttggcaaacaggtcattcttggcaaacctcgttttcttggcaaatccccacttcttggcaaatgaggatttcttggcaaactcaacattcttggcaaaacgactcggaccgatg

SEQ ID NO: 14439 - DNA, 203 bp, synthetic construct
  source 1..203: mol_type = other DNA
ggcgcgccagtcctccaccatgaactgacacaaccggccgtactagcaacctcaaacagacaccatggtgcatctgactcctgaggagaagtctgccgttactgccctgtggggcaaggtgaacgtggatgaagttggtggtgaggccctgggcaggctgctggtggtctaccccgtcaattcctttacgactcggaccgatg

SEQ ID NO: 14440 - DNA, 203 bp, synthetic construct
  source 1..203: mol_type = other DNA
ggcgcgccagtcctttttcaaaagctgacacaaccggccgtactagcaacctcaaacagacaccatggtgcatctgactcctgaggagaagtctgccgttactgccctgtggggcaaggtgaacgtggatgaagttggtggtgaggccctgggcaggctgctggtggtctacccttggacccagaggtcgactcggaccgatg

SEQ ID NO: 14441 - DNA, 203 bp, synthetic construct
  source 1..203: mol_type = other DNA
ggcgcgccagtcctagtaactgtactgacacaaccggccgtactagcaacctcaaacagacaccatggtgcatctgactcctgaggagaagtctgccgttactgccctgtggggcaaggtgaacgtggatgaagttggtggtgaggccctgggcaggctgctggtggtctacccttggacctactccccgactcggaccgatg

SEQ ID NO: 14442 - DNA, 203 bp, synthetic construct
  source 1..203: mol_type = other DNA
ggcgcgccagtccttctctgtagactgacacaaccgtcaattcctttaacctcaaacagacaccatggtgcatctgactcctgaggagaagtctgccgttactgccctgtggggcaaggtgaacgtggatgaagttggtggtgaggccctgggcaggctgctggtggtctaccccacggaatcgagaacgactcggaccgatg

SEQ ID NO: 14443 - DNA, 203 bp, synthetic construct
  source 1..203: mol_type = other DNA
ggcgcgccagtcctacgatacccactgacacaaccgtcaattcctttaacctcaaacagacaccatggtgcatctgactcctgaggagaagtctgccgttactgccctgtggggcaaggtgaacgtggatgaagttggtggtgaggccctgggcaggctgctggtggtctaccccgtcaattcctttacgactcggaccgatg

SEQ ID NO: 14444 - DNA, 203 bp, synthetic construct
  source 1..203: mol_type = other DNA
ggcgcgccagtcctacgtttcgttctgacacaaccgtcaattcctttaacctcaaacagacaccatggtgcatctgactcctgaggagaagtctgccgttactgccctgtggggcaaggtgaacgtggatgaagttggtggtgaggccctgggcaggctgctggtggtctacccttggacccagaggtcgactcggaccgatg

SEQ ID NO: 14445 - DNA, 203 bp, synthetic construct
  source 1..203: mol_type = other DNA
ggcgcgccagtcctttagctgcacctgacacaaccgtcaattcctttaacctcaaacagacaccatggtgcatctgactcctgaggagaagtctgccgttactgccctgtggggcaaggtgaacgtggatgaagttggtggtgaggccctgggcaggctgctggtggtctacccttggacctactccccgactcggaccgatg

SEQ ID NO: 14446 - DNA, 203 bp, synthetic construct
  source 1..203: mol_type = other DNA
ggcgcgccagtccttgcagctctgctgacacaactaccggccgtagcaacctcaaacagacaccatggtgcatctgactcctgaggagaagtctgccgttactgccctgtggggcaaggtgaacgtggatgaagttggtggtgaggccctgggcaggctgctggtggtctacccttgttcttggcaaacgactcggaccgatg

SEQ ID NO: 14447 - DNA, 203 bp, synthetic construct
  source 1..203: mol_type = other DNA
ggcgcgccagtcctgtgcagctgcctgacacaactactcccactagcaacctcaaacagacaccatggtgcatctgactcctgaggagaagtctgccgttactgccctgtggggcaaggtgaacgtggatgaagttggtggtgaggccctgggcaggctgctggtggtctaccccacggaatcgagaacgactcggaccgatg

SEQ ID NO: 14448 - DNA, 203 bp, synthetic construct
  source 1..203: mol_type = other DNA
ggcgcgccagtccttctacaaggcctgacacaactactcccactagcaacctcaaacagacaccatggtgcatctgactcctgaggagaagtctgccgttactgccctgtggggcaaggtgaacgtggatgaagttggtggtgaggccctgggcaggctgctggtggtctacccttggacctactccccgactcggaccgatg

SEQ ID NO: 14449 - DNA, 203 bp, synthetic construct
  source 1..203: mol_type = other DNA
ggcgcgccagtcctccacctgcacctgacacaactccggcgggtagcaacctcaaacagacaccatggtgcatctgactcctgaggagaagtctgccgttactgccctgtggggcaaggtgaacgtggatgaagttggtggtgaggccctgggcaggctgctggtggtctacccttgttcttggcaaacgactcggaccgatg

SEQ ID NO: 14450 - DNA, 203 bp, synthetic construct
  source 1..203: mol_type = other DNA
ggcgcgccagtcctttcatactaactgacacaactgtgtaccggccgtacctcaaacagacaccatggtgcatctgactcctgaggagaagtctgccgttactgccctgtggggcaaggtgaacgtggatgaagttggtggtgaggccctgggcaggctgctggtggtctaccccacggaatcgagaacgactcggaccgatg

SEQ ID NO: 14451 - DNA, 203 bp, synthetic construct
  source 1..203: mol_type = other DNA
ggcgcgccagtcctaatactagctctgacacaactgtgtaccggccgtacctcaaacagacaccatggtgcatctgactcctgaggagaagtctgccgttactgccctgtggggcaaggtgaacgtggatgaagttggtggtgaggccctgggcaggctgctggtggtctaccccgtcaattcctttacgactcggaccgatg

SEQ ID NO: 14452 - DNA, 203 bp, synthetic construct
  source 1..203: mol_type = other DNA
ggcgcgccagtcctaggtgagtggctgacacaactgtgtaccggccgtacctcaaacagacaccatggtgcatctgactcctgaggagaagtctgccgttactgccctgtggggcaaggtgaacgtggatgaagttggtggtgaggccctgggcaggctgctggtggtctacccttggacccagaggtcgactcggaccgatg

SEQ ID NO: 14453 - DNA, 203 bp, synthetic construct
  source 1..203: mol_type = other DNA
ggcgcgccagtcctgaaactgcatctgacacaactgtgtcacggaatcgagaaaaacagacaccatggtgcatctgactcctgaggagaagtctgccgttactgccctgtggggcaaggtgaacgtggatgaagttggtggtgaggccctgggcaggctgctggtggtctacccttggaaccggccgtcgactcggaccgatg

SEQ ID NO: 14454 - DNA, 203 bp, synthetic construct
  source 1..203: mol_type = other DNA
ggcgcgccagtcctccaagcctgtctgacacaactgtgtcacggaatcgagaaaaacagacaccatggtgcatctgactcctgaggagaagtctgccgttactgccctgtggggcaaggtgaacgtggatgaagttggtggtgaggccctgggcaggctgctggtggtctacccttggaccggcgggtcgactcggaccgatg

SEQ ID NO: 14455 - DNA, 203 bp, synthetic construct
  source 1..203: mol_type = other DNA
ggcgcgccagtcctcctctctcgtctgacacaactgtgtccggcgggtacctcaaacagacaccatggtgcatctgactcctgaggagaagtctgccgttactgccctgtggggcaaggtgaacgtggatgaagttggtggtgaggccctgggcaggctgctggtggtctaccccgtcaattcctttacgactcggaccgatg

SEQ ID NO: 14456 - DNA, 203 bp, synthetic construct
  source 1..203: mol_type = other DNA
ggcgcgccagtccttaggatcaagctgacacaactgtgtccggcgggtacctcaaacagacaccatggtgcatctgactcctgaggagaagtctgccgttactgccctgtggggcaaggtgaacgtggatgaagttggtggtgaggccctgggcaggctgctggtggtctacccttggacccagaggtcgactcggaccgatg

SEQ ID NO: 14457 - DNA, 203 bp, synthetic construct
  source 1..203: mol_type = other DNA
ggcgcgccagtcctgacgacacctctgacacaactgtgtccggcgggtacctcaaacagacaccatggtgcatctgactcctgaggagaagtctgccgttactgccctgtggggcaaggtgaacgtggatgaagttggtggtgaggccctgggcaggctgctggtggtctacccttggacctactccccgactcggaccgatg

SEQ ID NO: 14458 - DNA, 203 bp, synthetic construct
  source 1..203: mol_type = other DNA
ggcgcgccagtcctttcaacgaaactgacacaactgtgtcgtcaattcctttaaaacagacaccatggtgcatctgactcctgaggagaagtctgccgttactgccctgtggggcaaggtgaacgtggatgaagttggtggtgaggccctgggcaggctgctggtggtctacccttggaccggcgggtcgactcggaccgatg

SEQ ID NO: 14459 - DNA, 203 bp, synthetic construct
  source 1..203: mol_type = other DNA
ggcgcgccagtcctacaccgaactctgacacaactgtgttactccccaacctcaaacagacaccatggtgcatctgactcctgaggagaagtctgccgttactgccctgtggggcaaggtgaacgtggatgaagttggtggtgaggccctgggcaggctgctggtggtctacccttggaaccggccgtcgactcggaccgatg

SEQ ID NO: 14460 - DNA, 203 bp, synthetic construct
  source 1..203: mol_type = other DNA
ggcgcgccagtcctacgttcggtgctgacacaactgtgttactccccaacctcaaacagacaccatggtgcatctgactcctgaggagaagtctgccgttactgccctgtggggcaaggtgaacgtggatgaagttggtggtgaggccctgggcaggctgctggtggtctacccttggaccggcgggtcgactcggaccgatg

SEQ ID NO: 14461 - DNA, 203 bp, synthetic construct
  source 1..203: mol_type = other DNA
ggcgcgccagtcctaattcggtgtctgacacaactgtgttcaaccggccgttcaaacagacaccatggtgcatctgactcctgaggagaagtctgccgttactgccctgtggggcaaggtgaacgtggatgaagttggtggtgaggccctgggcaggctgctggtggtctacccttgttcttggcaaacgactcggaccgatg

SEQ ID NO: 14462 - DNA, 203 bp, synthetic construct
  source 1..203: mol_type = other DNA
ggcgcgccagtccttaaccttggactgacacaactgtgttcaccggcgggttcaaacagacaccatggtgcatctgactcctgaggagaagtctgccgttactgccctgtggggcaaggtgaacgtggatgaagttggtggtgaggccctgggcaggctgctggtggtctacccttgttcttggcaaacgactcggaccgatg

SEQ ID NO: 14463 - DNA, 203 bp, synthetic construct
  source 1..203: mol_type = other DNA
ggcgcgccagtccttttgaggcagctgacacaactgtgttcactaaagccgcaggctccactcctggtggtgcccttccgtcaattcctttaagtttcagctttgcaaccatactccccccggaacccaaagactttggtttcccggaagctgcccggcgggtcatgggaataacgccgccgcgaggtcgactcggaccgatg

SEQ ID NO: 14464 - DNA, 203 bp, synthetic construct
  source 1..203: mol_type = other DNA
ggcgcgccagtcctaactgaggcactgacacaactgtgttcactaccggccgtaaacagacaccatggtgcatctgactcctgaggagaagtctgccgttactgccctgtggggcaaggtgaacgtggatgaagttggtggtgaggccctgggcaggctgctggtggtctacccttggaaccggccgtcgactcggaccgatg

SEQ ID NO: 14465 - DNA, 203 bp, synthetic construct
  source 1..203: mol_type = other DNA
ggcgcgccagtccttttgtgaggcctgacacaactgtgttcactaccggccgtaaacagacaccatggtgcatctgactcctgaggagaagtctgccgttactgccctgtggggcaaggtgaacgtggatgaagttggtggtgaggccctgggcaggctgctggtggtctacccttggaccggcgggtcgactcggaccgatg

SEQ ID NO: 14466 - DNA, 203 bp, synthetic construct
  source 1..203: mol_type = other DNA
ggcgcgccagtcctgcctcatggtctgacacaactgtgttcactacggaactacgacggtatctgatcgtcttcgaacctccgactttcgttcttgattaatgaaaacattcttggcaaatgctttcgctctggtccgtcttgcgccggtccaagaatttcacctctagcggcgcaatacgaagaggtcgactcggaccgatg

SEQ ID NO: 14467 - DNA, 203 bp, synthetic construct
  source 1..203: mol_type = other DNA
ggcgcgccagtcctacgcctcagtctgacacaactgtgttcactagaccggccgtacagacaccatggtgcatctgactcctgaggagaagtctgccgttactgccctgtggggcaaggtgaacgtggatgaagttggtggtgaggccctgggcaggctgctggtggtctaccccacggaatcgagaacgactcggaccgatg

SEQ ID NO: 14468 - DNA, 203 bp, synthetic construct
  source 1..203: mol_type = other DNA
ggcgcgccagtcctgacgaagttcctgacacaactgtgttcactagaccggccgtacagacaccatggtgcatctgactcctgaggagaagtctgccgttactgccctgtggggcaaggtgaacgtggatgaagttggtggtgaggccctgggcaggctgctggtggtctacccttggacctactccccgactcggaccgatg

SEQ ID NO: 14469 - DNA, 203 bp, synthetic construct
  source 1..203: mol_type = other DNA
ggcgcgccagtccttgtacgttgtctgacacaactgtgttcactagcaacaccggccgtacaccatggaccggccgtctcctgaggaccggccgtccgttactgaccggccgtgcaaggtgaaccggccgtaagttggtggtgaggccctgggcaggctgctggtggtctacccttggacccagaggtcgactcggaccgatg

SEQ ID NO: 14470 - DNA, 203 bp, synthetic construct
  source 1..203: mol_type = other DNA
ggcgcgccagtcctaatcacctgtctgacacaactgtgttcactagcaacaccggccgtacaccatggaccggccgtctcctgaggaccggccgtccgttactgaccggccgtgcaaggtgaacgtggatgaagttggtgaccggccgttgggcaggcaccggccgttctacccttaccggccgtggtcgactcggaccgatg

SEQ ID NO: 14471 - DNA, 203 bp, synthetic construct
  source 1..203: mol_type = other DNA
ggcgcgccagtcctgcttgaggacctgacacaactgtgttcactagcaacaccggccgtacaccatggaccggccgtctcctgaggaccggccgtccgttactgaccggccgtgcaaggtgaacgtggatgaagttggtgaccggccgttgggcaggctgctggtggtctacccttggacccagaggtcgactcggaccgatg

SEQ ID NO: 14472 - DNA, 203 bp, synthetic construct
  source 1..203: mol_type = other DNA
ggcgcgccagtcctaacgaactctctgacacaactgtgttcactagcaacaccggccgtacaccatggaccggccgtctcctgaggaccggccgtccgttactgccctgtggggcaaggtgaaccggccgtaagttggtgaccggccgttgggcaggcaccggccgttctacccttaccggccgtggtcgactcggaccgatg

SEQ ID NO: 14473 - DNA, 203 bp, synthetic construct
  source 1..203: mol_type = other DNA
ggcgcgccagtcctgtcatacccactgacacaactgtgttcactagcaacaccggccgtacaccatggaccggccgtctcctgaggaccggccgtccgttactgccctgtggggcaaggtgaaccggccgtaagttggtgaccggccgttgggcaggctgctggtggtctacccttggacccagaggtcgactcggaccgatg

SEQ ID NO: 14474 - DNA, 203 bp, synthetic construct
  source 1..203: mol_type = other DNA
ggcgcgccagtccttattctttagctgacacaactgtgttcactagcaacaccggccgtacaccatggaccggccgtctcctgaggaccggccgtccgttactgccctgtggggcaaggtgaaccggccgtaagttggtggtgaggccctgggcaggcaccggccgttctacccttggacccagaggtcgactcggaccgatg

SEQ ID NO: 14475 - DNA, 203 bp, synthetic construct
  source 1..203: mol_type = other DNA
ggcgcgccagtcctcccattcgtactgacacaactgtgttcactagcaacaccggccgtacaccatggaccggccgtctcctgaggaccggccgtccgttactgccctgtggggcaaggtgaacgtggatgaagttggtgaccggccgttgggcaggcaccggccgttctacccttaccggccgtggtcgactcggaccgatg

SEQ ID NO: 14476 - DNA, 203 bp, synthetic construct
  source 1..203: mol_type = other DNA
ggcgcgccagtcctagtgcaactactgacacaactgtgttcactagcaacaccggccgtacaccatggaccggccgtctcctgaggaccggccgtccgttactgccctgtggggcaaggtgaacgtggatgaagttggtgaccggccgttgggcaggcaccggccgttctacccttggacccagaggtcgactcggaccgatg

SEQ ID NO: 14477 - DNA, 203 bp, synthetic construct
  source 1..203: mol_type = other DNA
ggcgcgccagtcctctgcaacttactgacacaactgtgttcactagcaacaccggccgtacaccatggaccggccgtctcctgaggaccggccgtccgttactgccctgtggggcaaggtgaacgtggatgaagttggtgaccggccgttgggcaggctgctggtggtctacccttggacccagaggtcgactcggaccgatg

SEQ ID NO: 14478 - DNA, 203 bp, synthetic construct
  source 1..203: mol_type = other DNA
ggcgcgccagtcctctaacctctcctgacacaactgtgttcactagcaacaccggccgtacaccatggaccggccgtctcctgaggaccggccgtccgttactgccctgtggggcaaggtgaacgtggatgaagttggtggtgaggccctgggcaggctgctggtggtctacccttggacccagaggtcgactcggaccgatg

SEQ ID NO: 14479 - DNA, 203 bp, synthetic construct
  source 1..203: mol_type = other DNA
ggcgcgccagtccttgtctcagtcctgacacaactgtgttcactagcaacaccggccgtacaccatggaccggccgtctcctgaggagaagtctgccgttactgaccggccgtgcaaggtgaaccggccgtaagttggtgaccggccgttgggcaggcaccggccgttctacccttaccggccgtggtcgactcggaccgatg

SEQ ID NO: 14480 - DNA, 203 bp, synthetic construct
  source 1..203: mol_type = other DNA
ggcgcgccagtcctacatgagacactgacacaactgtgttcactagcaacaccggccgtacaccatggaccggccgtctcctgaggagaagtctgccgttactgaccggccgtgcaaggtgaaccggccgtaagttggtgaccggccgttgggcaggcaccggccgttctacccttggacccagaggtcgactcggaccgatg

SEQ ID NO: 14481 - DNA, 203 bp, synthetic construct
  source 1..203: mol_type = other DNA
ggcgcgccagtccttaacggtgtactgacacaactgtgttcactagcaacaccggccgtacaccatggaccggccgtctcctgaggagaagtctgccgttactgaccggccgtgcaaggtgaaccggccgtaagttggtgaccggccgttgggcaggctgctggtggtctacccttaccggccgtggtcgactcggaccgatg

SEQ ID NO: 14482 - DNA, 203 bp, synthetic construct
  source 1..203: mol_type = other DNA
ggcgcgccagtccttcgatcatggctgacacaactgtgttcactagcaacaccggccgtacaccatggaccggccgtctcctgaggagaagtctgccgttactgaccggccgtgcaaggtgaaccggccgtaagttggtgaccggccgttgggcaggctgctggtggtctacccttggacccagaggtcgactcggaccgatg

SEQ ID NO: 14483 - DNA, 203 bp, synthetic construct
  source 1..203: mol_type = other DNA
ggcgcgccagtcctacaacagtttctgacacaactgtgttcactagcaacaccggccgtacaccatggaccggccgtctcctgaggagaagtctgccgttactgaccggccgtgcaaggtgaaccggccgtaagttggtggtgaggccctgggcaggctgctggtggtctacccttggacccagaggtcgactcggaccgatg

SEQ ID NO: 14484 - DNA, 203 bp, synthetic construct
  source 1..203: mol_type = other DNA
ggcgcgccagtccttgaatgctctctgacacaactgtgttcactagcaacaccggccgtacaccatggaccggccgtctcctgaggagaagtctgccgttactgaccggccgtgcaaggtgaacgtggatgaagttggtgaccggccgttgggcaggcaccggccgttctacccttggacccagaggtcgactcggaccgatg

SEQ ID NO: 14485 - DNA, 203 bp, synthetic construct
  source 1..203: mol_type = other DNA
ggcgcgccagtcctctttgaaaacctgacacaactgtgttcactagcaacaccggccgtacaccatggaccggccgtctcctgaggagaagtctgccgttactgaccggccgtgcaaggtgaacgtggatgaagttggtgaccggccgttgggcaggctgctggtggtctacccttggacccagaggtcgactcggaccgatg

SEQ ID NO: 14486 - DNA, 203 bp, synthetic construct
  source 1..203: mol_type = other DNA
ggcgcgccagtcctagtacttaacctgacacaactgtgttcactagcaacaccggccgtacaccatggaccggccgtctcctgaggagaagtctgccgttactgaccggccgtgcaaggtgaacgtggatgaagttggtggtgaggccctgggcaggctgctggtggtctacccttggacccagaggtcgactcggaccgatg

SEQ ID NO: 14487 - DNA, 203 bp, synthetic construct
  source 1..203: mol_type = other DNA
ggcgcgccagtcctaacaaagtacctgacacaactgtgttcactagcaacaccggccgtacaccatggaccggccgtctcctgaggagaagtctgccgttactgccctgtggggcaaggtgaaccggccgtaagttggtgaccggccgttgggcaggctgctggtggtctacccttaccggccgtggtcgactcggaccgatg

SEQ ID NO: 14488 - DNA, 203 bp, synthetic construct
  source 1..203: mol_type = other DNA
ggcgcgccagtcctgaatcttcttctgacacaactgtgttcactagcaacaccggccgtacaccatggaccggccgtctcctgaggagaagtctgccgttactgccctgtggggcaaggtgaacgtggatgaagttggtgaccggccgttgggcaggcaccggccgttctacccttggacccagaggtcgactcggaccgatg

SEQ ID NO: 14489 - DNA, 203 bp, synthetic construct
  source 1..203: mol_type = other DNA
ggcgcgccagtcctgttgtagtatctgacacaactgtgttcactagcaacaccggccgtacaccatggaccggccgtctcctgaggagaagtctgccgttactgccctgtggggcaaggtgaacgtggatgaagttggtgaccggccgttgggcaggctgctggtggtctacccttggacccagaggtcgactcggaccgatg

SEQ ID NO: 14490 - DNA, 203 bp, synthetic construct
  source 1..203: mol_type = other DNA
ggcgcgccagtccttattcttagcctgacacaactgtgttcactagcaacaccggccgtacaccatggtgcatctgactcctgaggaccggccgtccgttactgaccggccgtgcaaggtgaaccggccgtaagttggtgaccggccgttgggcaggcaccggccgttctacccttaccggccgtggtcgactcggaccgatg

SEQ ID NO: 14491 - DNA, 203 bp, synthetic construct
  source 1..203: mol_type = other DNA
ggcgcgccagtcctgtcttttcaactgacacaactgtgttcactagcaacaccggccgtacaccatggtgcatctgactcctgaggaccggccgtccgttactgaccggccgtgcaaggtgaaccggccgtaagttggtgaccggccgttgggcaggctgctggtggtctacccttaccggccgtggtcgactcggaccgatg

SEQ ID NO: 14492 - DNA, 203 bp, synthetic construct
  source 1..203: mol_type = other DNA
ggcgcgccagtccttaagttactcctgacacaactgtgttcactagcaacaccggccgtacaccatggtgcatctgactcctgaggaccggccgtccgttactgaccggccgtgcaaggtgaaccggccgtaagttggtggtgaggccctgggcaggctgctggtggtctacccttaccggccgtggtcgactcggaccgatg

SEQ ID NO: 14493 - DNA, 203 bp, synthetic construct
  source 1..203: mol_type = other DNA
ggcgcgccagtccttaactcaaacctgacacaactgtgttcactagcaacaccggccgtacaccatggtgcatctgactcctgaggaccggccgtccgttactgaccggccgtgcaaggtgaaccggccgtaagttggtggtgaggccctgggcaggctgctggtggtctacccttggacccagaggtcgactcggaccgatg

SEQ ID NO: 14494 - DNA, 203 bp, synthetic construct
  source 1..203: mol_type = other DNA
ggcgcgccagtcctatgtagaaacctgacacaactgtgttcactagcaacaccggccgtacaccatggtgcatctgactcctgaggaccggccgtccgttactgaccggccgtgcaaggtgaacgtggatgaagttggtgaccggccgttgggcaggcaccggccgttctacccttggacccagaggtcgactcggaccgatg

SEQ ID NO: 14495 - DNA, 203 bp, synthetic construct
  source 1..203: mol_type = other DNA
ggcgcgccagtcctacgaaggatcctgacacaactgtgttcactagcaacaccggccgtacaccatggtgcatctgactcctgaggaccggccgtccgttactgaccggccgtgcaaggtgaacgtggatgaagttggtgaccggccgttgggcaggctgctggtggtctacccttggacccagaggtcgactcggaccgatg

SEQ ID NO: 14496 - DNA, 203 bp, synthetic construct
  source 1..203: mol_type = other DNA
ggcgcgccagtcctcttcatacagctgacacaactgtgttcactagcaacaccggccgtacaccatggtgcatctgactcctgaggaccggccgtccgttactgccctgtggggcaaggtgaaccggccgtaagttggtggtgaggccctgggcaggcaccggccgttctacccttaccggccgtggtcgactcggaccgatg

SEQ ID NO: 14497 - DNA, 203 bp, synthetic construct
  source 1..203: mol_type = other DNA
ggcgcgccagtccttcgttgtatgctgacacaactgtgttcactagcaacaccggccgtacaccatggtgcatctgactcctgaggaccggccgtccgttactgccctgtggggcaaggtgaaccggccgtaagttggtggtgaggccctgggcaggcaccggccgttctacccttggacccagaggtcgactcggaccgatg

SEQ ID NO: 14498 - DNA, 203 bp, synthetic construct
  source 1..203: mol_type = other DNA
ggcgcgccagtcctctctgtatggctgacacaactgtgttcactagcaacaccggccgtacaccatggtgcatctgactcctgaggaccggccgtccgttactgccctgtggggcaaggtgaaccggccgtaagttggtggtgaggccctgggcaggctgctggtggtctacccttaccggccgtggtcgactcggaccgatg

SEQ ID NO: 14499 - DNA, 203 bp, synthetic construct
  source 1..203: mol_type = other DNA
ggcgcgccagtcctatgtatgtagctgacacaactgtgttcactagcaacaccggccgtacaccatggtgcatctgactcctgaggaccggccgtccgttactgccctgtggggcaaggtgaaccggccgtaagttggtggtgaggccctgggcaggctgctggtggtctacccttggacccagaggtcgactcggaccgatg

SEQ ID NO: 14500 - DNA, 203 bp, synthetic construct
  source 1..203: mol_type = other DNA
ggcgcgccagtccttgtatgagatctgacacaactgtgttcactagcaacaccggccgtacaccatggtgcatctgactcctgaggaccggccgtccgttactgccctgtggggcaaggtgaacgtggatgaagttggtgaccggccgttgggcaggcaccggccgttctacccttggacccagaggtcgactcggaccgatg

SEQ ID NO: 14501 - DNA, 203 bp, synthetic construct
  source 1..203: mol_type = other DNA
ggcgcgccagtccttgtatgaagactgacacaactgtgttcactagcaacaccggccgtacaccatggtgcatctgactcctgaggaccggccgtccgttactgccctgtggggcaaggtgaacgtggatgaagttggtgaccggccgttgggcaggctgctggtggtctacccttaccggccgtggtcgactcggaccgatg

SEQ ID NO: 14502 - DNA, 203 bp, synthetic construct
  source 1..203: mol_type = other DNA
ggcgcgccagtcctatcagacgaactgacacaactgtgttcactagcaacaccggccgtacaccatggtgcatctgactcctgaggaccggccgtccgttactgccctgtggggcaaggtgaacgtggatgaagttggtggtgaggccctgggcaggcaccggccgttctacccttggacccagaggtcgactcggaccgatg

SEQ ID NO: 14503 - DNA, 203 bp, synthetic construct
  source 1..203: mol_type = other DNA
ggcgcgccagtccttcagaagttactgacacaactgtgttcactagcaacaccggccgtacaccatggtgcatctgactcctgaggaccggccgtccgttactgccctgtggggcaaggtgaacgtggatgaagttggtggtgaggccctgggcaggctgctggtggtctacccttggacccagaggtcgactcggaccgatg

SEQ ID NO: 14504 - DNA, 203 bp, synthetic construct
  source 1..203: mol_type = other DNA
ggcgcgccagtcctactggtaggactgacacaactgtgttcactagcaacaccggccgtacaccatggtgcatctgactcctgaggagaagtctgccgttactgaccggccgtgcaaggtgaaccggccgtaagttggtgaccggccgttgggcaggctgctggtggtctacccttaccggccgtggtcgactcggaccgatg

SEQ ID NO: 14505 - DNA, 203 bp, synthetic construct
  source 1..203: mol_type = other DNA
ggcgcgccagtcctaggatacctcctgacacaactgtgttcactagcaacaccggccgtacaccatggtgcatctgactcctgaggagaagtctgccgttactgaccggccgtgcaaggtgaaccggccgtaagttggtggtgaggccctgggcaggcaccggccgttctacccttggacccagaggtcgactcggaccgatg

SEQ ID NO: 14506 - DNA, 203 bp, synthetic construct
  source 1..203: mol_type = other DNA
ggcgcgccagtcctgaggtatgacctgacacaactgtgttcactagcaacaccggccgtacaccatggtgcatctgactcctgaggagaagtctgccgttactgaccggccgtgcaaggtgaaccggccgtaagttggtggtgaggccctgggcaggctgctggtggtctacccttggacccagaggtcgactcggaccgatg

SEQ ID NO: 14507 - DNA, 203 bp, synthetic construct
  source 1..203: mol_type = other DNA
ggcgcgccagtcctgtgctgaactctgacacaactgtgttcactagcaacaccggccgtacaccatggtgcatctgactcctgaggagaagtctgccgttactgaccggccgtgcaaggtgaacgtggatgaagttggtgaccggccgttgggcaggctgctggtggtctacccttggacccagaggtcgactcggaccgatg

SEQ ID NO: 14508 - DNA, 203 bp, synthetic construct
  source 1..203: mol_type = other DNA
ggcgcgccagtcctgcagttcacactgacacaactgtgttcactagcaacaccggccgtacaccatggtgcatctgactcctgaggagaagtctgccgttactgaccggccgtgcaaggtgaacgtggatgaagttggtggtgaggccctgggcaggcaccggccgttctacccttggacccagaggtcgactcggaccgatg

SEQ ID NO: 14509 - DNA, 203 bp, synthetic construct
  source 1..203: mol_type = other DNA
ggcgcgccagtcctcagcagttctctgacacaactgtgttcactagcaacaccggccgtacaccatggtgcatctgactcctgaggagaagtctgccgttactgaccggccgtgcaaggtgaacgtggatgaagttggtggtgaggccctgggcaggctgctggtggtctacccttaccggccgtggtcgactcggaccgatg

SEQ ID NO: 14510 - DNA, 203 bp, synthetic construct
  source 1..203: mol_type = other DNA
ggcgcgccagtcctctaccagtagctgacacaactgtgttcactagcaacaccggccgtacaccatggtgcatctgactcctgaggagaagtctgccgttactgccctgtggggcaaggtgaaccggccgtaagttggtgaccggccgttgggcaggcaccggccgttctacccttaccggccgtggtcgactcggaccgatg

SEQ ID NO: 14511 - DNA, 203 bp, synthetic construct
  source 1..203: mol_type = other DNA
ggcgcgccagtcctcctgctgacactgacacaactgtgttcactagcaacaccggccgtacaccatggtgcatctgactcctgaggagaagtctgccgttactgccctgtggggcaaggtgaaccggccgtaagttggtgaccggccgttgggcaggcaccggccgttctacccttggacccagaggtcgactcggaccgatg

SEQ ID NO: 14512 - DNA, 203 bp, synthetic construct
  source 1..203: mol_type = other DNA
ggcgcgccagtccttgtcagcattctgacacaactgtgttcactagcaacaccggccgtacaccatggtgcatctgactcctgaggagaagtctgccgttactgccctgtggggcaaggtgaaccggccgtaagttggtgaccggccgttgggcaggctgctggtggtctacccttaccggccgtggtcgactcggaccgatg

SEQ ID NO: 14513 - DNA, 203 bp, synthetic construct
  source 1..203: mol_type = other DNA
ggcgcgccagtcctctaggtgactctgacacaactgtgttcactagcaacaccggccgtacaccatggtgcatctgactcctgaggagaagtctgccgttactgccctgtggggcaaggtgaaccggccgtaagttggtgaccggccgttgggcaggctgctggtggtctacccttggacccagaggtcgactcggaccgatg

SEQ ID NO: 14514 - DNA, 203 bp, synthetic construct
  source 1..203: mol_type = other DNA
ggcgcgccagtccttagagtgcagctgacacaactgtgttcactagcaacaccggccgtacaccatggtgcatctgactcctgaggagaagtctgccgttactgccctgtggggcaaggtgaaccggccgtaagttggtggtgaggccctgggcaggcaccggccgttctacccttggacccagaggtcgactcggaccgatg

SEQ ID NO: 14515 - DNA, 203 bp, synthetic construct
  source 1..203: mol_type = other DNA
ggcgcgccagtcctgtggtgattcctgacacaactgtgttcactagcaacaccggccgtacaccatggtgcatctgactcctgaggagaagtctgccgttactgccctgtggggcaaggtgaaccggccgtaagttggtggtgaggccctgggcaggctgctggtggtctacccttggacccagaggtcgactcggaccgatg

SEQ ID NO: 14516 - DNA, 203 bp, synthetic construct
  source 1..203: mol_type = other DNA
ggcgcgccagtccttctgaagacactgacacaactgtgttcactagcaacaccggccgtacaccatggtgcatctgactcctgaggagaagtctgccgttactgccctgtggggcaaggtgaacgtggatgaagttggtgaccggccgttgggcaggctgctggtggtctacccttaccggccgtggtcgactcggaccgatg

SEQ ID NO: 14517 - DNA, 203 bp, synthetic construct
  source 1..203: mol_type = other DNA
ggcgcgccagtccttctgaagtacctgacacaactgtgttcactagcaacaccggccgtacaccatggtgcatctgactcctgaggagaagtctgccgttactgccctgtggggcaaggtgaacgtggatgaagttggtggtgaggccctgggcaggcaccggccgttctacccttggacccagaggtcgactcggaccgatg

SEQ ID NO: 14518 - DNA, 203 bp, synthetic construct
  source 1..203: mol_type = other DNA
ggcgcgccagtccttctgttctggctgacacaactgtgttcactagcaacaccggccgtacaccatggtgcatctgactcctgaggagaagtctgccgttactgccctgtggggcaaggtgaacgtggatgaagttggtggtgaggccctgggcaggctgctggtggtctacccttggacccagaggtcgactcggaccgatg

SEQ ID NO: 14519 - DNA, 203 bp, synthetic construct
  source 1..203: mol_type = other DNA
ggcgcgccagtcctcttgttcagactgacacaactgtgttcactagcaaccacggaatcgagaaatggcacggaatcgagaagaggagaagtctgccgttactgcacggaatcgagaagtgaacgtggatgaagttggtgcacggaatcgagaaaggccacggaatcgagaaccttggacccagaggtcgactcggaccgatg

SEQ ID NO: 14520 - DNA, 203 bp, synthetic construct
  source 1..203: mol_type = other DNA
ggcgcgccagtcctaccactcagactgacacaactgtgttcactagcaaccacggaatcgagaaatggcacggaatcgagaagaggagaagtctgccgttactgcacggaatcgagaagtgaacgtggatgaagttggtggtgaggccctgggcaggccacggaatcgagaaccttggacccagaggtcgactcggaccgatg

SEQ ID NO: 14521 - DNA, 203 bp, synthetic construct
  source 1..203: mol_type = other DNA
ggcgcgccagtccttacaacctggctgacacaactgtgttcactagcaaccacggaatcgagaaatggcacggaatcgagaagaggagaagtctgccgttactgcacggaatcgagaagtgacacggaatcgagaaggtggtgaggccctgggcaggccacggaatcgagaaccttggacccagaggtcgactcggaccgatg

SEQ ID NO: 14522 - DNA, 203 bp, synthetic construct
  source 1..203: mol_type = other DNA
ggcgcgccagtccttgtaggctttctgacacaactgtgttcactagcaaccacggaatcgagaaatggcacggaatcgagaagaggagaagtctgccgttactgcacggaatcgagaagtgacacggaatcgagaaggtggtgaggccctgggcaggctgctggtggtctacccttggacccagaggtcgactcggaccgatg

SEQ ID NO: 14523 - DNA, 203 bp, synthetic construct
  source 1..203: mol_type = other DNA
ggcgcgccagtcctgagcaactggctgacacaactgtgttcactagcaaccacggaatcgagaaatggcacggaatcgagaagaggagaagtctgccgttactgccctgtggggcaaggtgaacgtggatgaagttggtgcacggaatcgagaaaggctgctggtggtctacccttggacccagaggtcgactcggaccgatg

SEQ ID NO: 14524 - DNA, 203 bp, synthetic construct
  source 1..203: mol_type = other DNA
ggcgcgccagtcctaggtttcaagctgacacaactgtgttcactagcaaccacggaatcgagaaatggcacggaatcgagaagaggagaagtctgccgttactgccctgtggggcaaggtgacacggaatcgagaaggtggtgaggccctgggcaggccacggaatcgagaaccttggacccagaggtcgactcggaccgatg

SEQ ID NO: 14525 - DNA, 203 bp, synthetic construct
  source 1..203: mol_type = other DNA
ggcgcgccagtcctcttttcagcactgacacaactgtgttcactagcaaccacggaatcgagaaatggcacggaatcgagaagaggcacggaatcgagaaactgcacggaatcgagaagtgacacggaatcgagaaggtgcacggaatcgagaaaggctgctggtggtctacccttggacccagaggtcgactcggaccgatg

SEQ ID NO: 14526 - DNA, 203 bp, synthetic construct
  source 1..203: mol_type = other DNA
ggcgcgccagtccttaactctcaactgacacaactgtgttcactagcaaccacggaatcgagaaatggcacggaatcgagaagaggcacggaatcgagaaactgcacggaatcgagaagtgacacggaatcgagaaggtggtgaggccctgggcaggccacggaatcgagaaccttggacccagaggtcgactcggaccgatg

SEQ ID NO: 14527 - DNA, 203 bp, synthetic construct
  source 1..203: mol_type = other DNA
ggcgcgccagtcctggcaacgagcctgacacaactgtgttcactagcaaccacggaatcgagaaatggcacggaatcgagaagaggcacggaatcgagaaactgccctgtggggcaaggtgaacgtggatgaagttggtgcacggaatcgagaaaggctgctggtggtctacccttggacccagaggtcgactcggaccgatg

SEQ ID NO: 14528 - DNA, 203 bp, synthetic construct
  source 1..203: mol_type = other DNA
ggcgcgccagtcctggcactgtgcctgacacaactgtgttcactagcaaccacggaatcgagaaatggcacggaatcgagaagaggcacggaatcgagaaactgccctgtggggcaaggtgaacgtggatgaagttggtggtgaggccctgggcaggctgctggtggtctacccttggacccagaggtcgactcggaccgatg

SEQ ID NO: 14529 - DNA, 203 bp, synthetic construct
  source 1..203: mol_type = other DNA
ggcgcgccagtcctggacggtcacctgacacaactgtgttcactagcaaccacggaatcgagaaatggcacggaatcgagaagaggcacggaatcgagaaactgccctgtggggcaaggtgacacggaatcgagaaggtgcacggaatcgagaaaggccacggaatcgagaaccttggacccagaggtcgactcggaccgatg

SEQ ID NO: 14530 - DNA, 203 bp, synthetic construct
  source 1..203: mol_type = other DNA
ggcgcgccagtcctgtgaccgtccctgacacaactgtgttcactagcaaccacggaatcgagaaatggtgcatctgactcctgaggagaagtctgccgttactgcacggaatcgagaagtgaacgtggatgaagttggtgcacggaatcgagaaaggctgctggtggtctacccttggacccagaggtcgactcggaccgatg

SEQ ID NO: 14531 - DNA, 203 bp, synthetic construct
  source 1..203: mol_type = other DNA
ggcgcgccagtcctcaaggctttcctgacacaactgtgttcactagcaaccacggaatcgagaaatggtgcatctgactcctgaggagaagtctgccgttactgcacggaatcgagaagtgacacggaatcgagaaggtgcacggaatcgagaaaggctgctggtggtctacccttggacccagaggtcgactcggaccgatg

SEQ ID NO: 14532 - DNA, 203 bp, synthetic construct
  source 1..203: mol_type = other DNA
ggcgcgccagtcctacaaagccttctgacacaactgtgttcactagcaaccacggaatcgagaaatggtgcatctgactcctgaggagaagtctgccgttactgcacggaatcgagaagtgacacggaatcgagaaggtggtgaggccctgggcaggccacggaatcgagaaccttggacccagaggtcgactcggaccgatg

SEQ ID NO: 14533 - DNA, 203 bp, synthetic construct
  source 1..203: mol_type = other DNA
ggcgcgccagtcctacaacggtccctgacacaactgtgttcactagcaaccacggaatcgagaaatggtgcatctgactcctgaggagaagtctgccgttactgccctgtggggcaaggtgacacggaatcgagaaggtgcacggaatcgagaaaggccacggaatcgagaaccttggacccagaggtcgactcggaccgatg

SEQ ID NO: 14534 - DNA, 203 bp, synthetic construct
  source 1..203: mol_type = other DNA
ggcgcgccagtcctgtagctcaccctgacacaactgtgttcactagcaaccacggaatcgagaaatggtgcatctgactcctgaggagaagtctgccgttactgccctgtggggcaaggtgacacggaatcgagaaggtgcacggaatcgagaaaggctgctggtggtctacccttggacccagaggtcgactcggaccgatg

SEQ ID NO: 14535 - DNA, 203 bp, synthetic construct
  source 1..203: mol_type = other DNA
ggcgcgccagtcctgtcacctaccctgacacaactgtgttcactagcaaccacggaatcgagaaatggtgcatctgactcctgaggcacggaatcgagaaactgcacggaatcgagaagtgaacgtggatgaagttggtgcacggaatcgagaaaggccacggaatcgagaaccttggacccagaggtcgactcggaccgatg

SEQ ID NO: 14536 - DNA, 203 bp, synthetic construct
  source 1..203: mol_type = other DNA
ggcgcgccagtccttgagcagtccctgacacaactgtgttcactagcaaccacggaatcgagaaatggtgcatctgactcctgaggcacggaatcgagaaactgcacggaatcgagaagtgaacgtggatgaagttggtgcacggaatcgagaaaggctgctggtggtctacccttggacccagaggtcgactcggaccgatg

SEQ ID NO: 14537 - DNA, 203 bp, synthetic construct
  source 1..203: mol_type = other DNA
ggcgcgccagtcctctgaaaggccctgacacaactgtgttcactagcaaccacggaatcgagaaatggtgcatctgactcctgaggcacggaatcgagaaactgcacggaatcgagaagtgacacggaatcgagaaggtggtgaggccctgggcaggccacggaatcgagaaccttggacccagaggtcgactcggaccgatg

SEQ ID NO: 14538 - DNA, 203 bp, synthetic construct
  source 1..203: mol_type = other DNA
ggcgcgccagtcctggctctgcaactgacacaactgtgttcactagcaaccacggaatcgagaaatggtgcatctgactcctgaggcacggaatcgagaaactgccctgtggggcaaggtgaacgtggatgaagttggtggtgaggccctgggcaggccacggaatcgagaaccttggacccagaggtcgactcggaccgatg

SEQ ID NO: 14539 - DNA, 203 bp, synthetic construct
  source 1..203: mol_type = other DNA
ggcgcgccagtcctatccaggaccctgacacaactgtgttcactagcaaccacggaatcgagaaatggtgcatctgactcctgaggcacggaatcgagaaactgccctgtggggcaaggtgacacggaatcgagaaggtggtgaggccctgggcaggccacggaatcgagaaccttggacccagaggtcgactcggaccgatg

SEQ ID NO: 14540 - DNA, 203 bp, synthetic construct
  source 1..203: mol_type = other DNA
ggcgcgccagtcctactgaaggccctgacacaactgtgttcactagcaaccaggagcgagcgaccaaaggaaccataactgatttaatgagccattcgcagtttcactgtaccggccgtgcgtactcagacatgcatggcttaatctttgagacaagcatatgctactggcaggatcgacccagaggtcgactcggaccgatg

SEQ ID NO: 14541 - DNA, 203 bp, synthetic construct
  source 1..203: mol_type = other DNA
ggcgcgccagtcctctacagagccctgacacaactgtgttcactagcaaccccggcgggtcaccatggtgcatctgactcctgaggagaagtctgccgttactgccctgtggggcaaggtgaacgtggatgaagttggtggtgaggccctgggcaggctgctggtggtctacccttggaaccggccgtcgactcggaccgatg

SEQ ID NO: 14542 - DNA, 203 bp, synthetic construct
  source 1..203: mol_type = other DNA
ggcgcgccagtcctggcactcaacctgacacaactgtgttcactagcaacccggcgggtacaccatggccggcgggtctcctgaggagaagtctgccgttactgccctgtggggcaaggtgaccggcgggtaagttggtgccggcgggttgggcaggctgctggtggtctacccttccggcgggtggtcgactcggaccgatg

SEQ ID NO: 14543 - DNA, 203 bp, synthetic construct
  source 1..203: mol_type = other DNA
ggcgcgccagtcctggtgtagagcctgacacaactgtgttcactagcaacccggcgggtacaccatggccggcgggtctcctgaggagaagtctgccgttactgccctgtggggcaaggtgaccggcgggtaagttggtggtgaggccctgggcaggctgctggtggtctacccttggacccagaggtcgactcggaccgatg

SEQ ID NO: 14544 - DNA, 203 bp, synthetic construct
  source 1..203: mol_type = other DNA
ggcgcgccagtcctggtttcggtcctgacacaactgtgttcactagcaacccggcgggtacaccatggccggcgggtctcctgaggagaagtctgccgttactgccggcgggtgcaaggtgaacgtggatgaagttggtgccggcgggttgggcaggcccggcgggttctacccttccggcgggtggtcgactcggaccgatg

SEQ ID NO: 14545 - DNA, 203 bp, synthetic construct
  source 1..203: mol_type = other DNA
ggcgcgccagtcctggttggactgctgacacaactgtgttcactagcaacccggcgggtacaccatggccggcgggtctcctgaggagaagtctgccgttactgccggcgggtgcaaggtgaacgtggatgaagttggtggtgaggccctgggcaggcccggcgggttctacccttggacccagaggtcgactcggaccgatg

SEQ ID NO: 14546 - DNA, 203 bp, synthetic construct
  source 1..203: mol_type = other DNA
ggcgcgccagtcctgacatgacgactgacacaactgtgttcactagcaacccggcgggtacaccatggccggcgggtctcctgaggagaagtctgccgttactgccggcgggtgcaaggtgaacgtggatgaagttggtggtgaggccctgggcaggctgctggtggtctacccttccggcgggtggtcgactcggaccgatg

SEQ ID NO: 14547 - DNA, 203 bp, synthetic construct
  source 1..203: mol_type = other DNA
ggcgcgccagtcctcctctttgtgctgacacaactgtgttcactagcaacccggcgggtacaccatggccggcgggtctcctgaggagaagtctgccgttactgccggcgggtgcaaggtgaacgtggatgaagttggtggtgaggccctgggcaggctgctggtggtctacccttggacccagaggtcgactcggaccgatg

SEQ ID NO: 14548 - DNA, 203 bp, synthetic construct
  source 1..203: mol_type = other DNA
ggcgcgccagtccttcgtagaggtctgacacaactgtgttcactagcaacccggcgggtacaccatggccggcgggtctcctgaggagaagtctgccgttactgccggcgggtgcaaggtgaccggcgggtaagttggtgccggcgggttgggcaggctgctggtggtctacccttccggcgggtggtcgactcggaccgatg

SEQ ID NO: 14549 - DNA, 203 bp, synthetic construct
  source 1..203: mol_type = other DNA
ggcgcgccagtcctatcgtagtacctgacacaactgtgttcactagcaacccggcgggtacaccatggccggcgggtctcctgaggagaagtctgccgttactgccggcgggtgcaaggtgaccggcgggtaagttggtgccggcgggttgggcaggctgctggtggtctacccttggacccagaggtcgactcggaccgatg

SEQ ID NO: 14550 - DNA, 203 bp, synthetic construct
  source 1..203: mol_type = other DNA
ggcgcgccagtcctgctctacgaactgacacaactgtgttcactagcaacccggcgggtacaccatggccggcgggtctcctgaggccggcgggtccgttactgccctgtggggcaaggtgaacgtggatgaagttggtgccggcgggttgggcaggcccggcgggttctacccttggacccagaggtcgactcggaccgatg

SEQ ID NO: 14551 - DNA, 203 bp, synthetic construct
  source 1..203: mol_type = other DNA
ggcgcgccagtcctccacctgtgtctgacacaactgtgttcactagcaacccggcgggtacaccatggccggcgggtctcctgaggccggcgggtccgttactgccctgtggggcaaggtgaccggcgggtaagttggtgccggcgggttgggcaggcccggcgggttctacccttccggcgggtggtcgactcggaccgatg

SEQ ID NO: 14552 - DNA, 203 bp, synthetic construct
  source 1..203: mol_type = other DNA
ggcgcgccagtcctcctgtgtttgctgacacaactgtgttcactagcaacccggcgggtacaccatggccggcgggtctcctgaggccggcgggtccgttactgccctgtggggcaaggtgaccggcgggtaagttggtgccggcgggttgggcaggctgctggtggtctacccttccggcgggtggtcgactcggaccgatg

SEQ ID NO: 14553 - DNA, 203 bp, synthetic construct
  source 1..203: mol_type = other DNA
ggcgcgccagtcctatgtgtccttctgacacaactgtgttcactagcaacccggcgggtacaccatggccggcgggtctcctgaggccggcgggtccgttactgccctgtggggcaaggtgaccggcgggtaagttggtggtgaggccctgggcaggcccggcgggttctacccttggacccagaggtcgactcggaccgatg

SEQ ID NO: 14554 - DNA, 203 bp, synthetic construct
  source 1..203: mol_type = other DNA
ggcgcgccagtcctaggacacaggctgacacaactgtgttcactagcaacccggcgggtacaccatggccggcgggtctcctgaggccggcgggtccgttactgccctgtggggcaaggtgaccggcgggtaagttggtggtgaggccctgggcaggctgctggtggtctacccttggacccagaggtcgactcggaccgatg

SEQ ID NO: 14555 - DNA, 203 bp, synthetic construct
  source 1..203: mol_type = other DNA
ggcgcgccagtcctgtcgtcatgtctgacacaactgtgttcactagcaacccggcgggtacaccatggccggcgggtctcctgaggccggcgggtccgttactgccggcgggtgcaaggtgaacgtggatgaagttggtggtgaggccctgggcaggcccggcgggttctacccttggacccagaggtcgactcggaccgatg

SEQ ID NO: 14556 - DNA, 203 bp, synthetic construct
  source 1..203: mol_type = other DNA
ggcgcgccagtcctacagttgattctgacacaactgtgttcactagcaacccggcgggtacaccatggccggcgggtctcctgaggccggcgggtccgttactgccggcgggtgcaaggtgaccggcgggtaagttggtgccggcgggttgggcaggcccggcgggttctacccttccggcgggtggtcgactcggaccgatg

SEQ ID NO: 14557 - DNA, 203 bp, synthetic construct
  source 1..203: mol_type = other DNA
ggcgcgccagtccttaggatcgtcctgacacaactgtgttcactagcaacccggcgggtacaccatggccggcgggtctcctgaggccggcgggtccgttactgccggcgggtgcaaggtgaccggcgggtaagttggtggtgaggccctgggcaggcccggcgggttctacccttccggcgggtggtcgactcggaccgatg

SEQ ID NO: 14558 - DNA, 203 bp, synthetic construct
  source 1..203: mol_type = other DNA
ggcgcgccagtccttgcttgggtcctgacacaactgtgttcactagcaacccggcgggtacaccatggccggcgggtctcctgaggccggcgggtccgttactgccggcgggtgcaaggtgaccggcgggtaagttggtggtgaggccctgggcaggctgctggtggtctacccttccggcgggtggtcgactcggaccgatg

SEQ ID NO: 14559 - DNA, 203 bp, synthetic construct
  source 1..203: mol_type = other DNA
ggcgcgccagtcctctagacaggactgacacaactgtgttcactagcaacccggcgggtacaccatggtgcatctgactcctgaggagaagtctgccgttactgccctgtggggcaaggtgaacgtggatgaagttggtggtgaggccctgggcaggcccggcgggttctacccttccggcgggtggtcgactcggaccgatg

SEQ ID NO: 14560 - DNA, 203 bp, synthetic construct
  source 1..203: mol_type = other DNA
ggcgcgccagtcctggtacggtgactgacacaactgtgttcactagcaacccggcgggtacaccatggtgcatctgactcctgaggagaagtctgccgttactgccctgtggggcaaggtgaccggcgggtaagttggtgccggcgggttgggcaggcccggcgggttctacccttggacccagaggtcgactcggaccgatg

SEQ ID NO: 14561 - DNA, 203 bp, synthetic construct
  source 1..203: mol_type = other DNA
ggcgcgccagtccttacactgcctctgacacaactgtgttcactagcaacccggcgggtacaccatggtgcatctgactcctgaggagaagtctgccgttactgccggcgggtgcaaggtgaacgtggatgaagttggtgccggcgggttgggcaggcccggcgggttctacccttggacccagaggtcgactcggaccgatg

SEQ ID NO: 14562 - DNA, 203 bp, synthetic construct
  source 1..203: mol_type = other DNA
ggcgcgccagtcctcaggctgttcctgacacaactgtgttcactagcaacccggcgggtacaccatggtgcatctgactcctgaggagaagtctgccgttactgccggcgggtgcaaggtgaacgtggatgaagttggtgccggcgggttgggcaggctgctggtggtctacccttccggcgggtggtcgactcggaccgatg

SEQ ID NO: 14563 - DNA, 203 bp, synthetic construct
  source 1..203: mol_type = other DNA
ggcgcgccagtcctaggcagtcttctgacacaactgtgttcactagcaacccggcgggtacaccatggtgcatctgactcctgaggagaagtctgccgttactgccggcgggtgcaaggtgaacgtggatgaagttggtgccggcgggttgggcaggctgctggtggtctacccttggacccagaggtcgactcggaccgatg

SEQ ID NO: 14564 - DNA, 203 bp, synthetic construct
  source 1..203: mol_type = other DNA
ggcgcgccagtccttcatggtggactgacacaactgtgttcactagcaacccggcgggtacaccatggtgcatctgactcctgaggagaagtctgccgttactgccggcgggtgcaaggtgaacgtggatgaagttggtggtgaggccctgggcaggcccggcgggttctacccttggacccagaggtcgactcggaccgatg

SEQ ID NO: 14565 - DNA, 203 bp, synthetic construct
  source 1..203: mol_type = other DNA
ggcgcgccagtcctagtagagaacctgacacaactgtgttcactagcaacccggcgggtacaccatggtgcatctgactcctgaggagaagtctgccgttactgccggcgggtgcaaggtgaccggcgggtaagttggtgccggcgggttgggcaggcccggcgggttctacccttggacccagaggtcgactcggaccgatg

SEQ ID NO: 14566 - DNA, 203 bp, synthetic construct
  source 1..203: mol_type = other DNA
ggcgcgccagtccttgagtccactctgacacaactgtgttcactagcaacccggcgggtacaccatggtgcatctgactcctgaggagaagtctgccgttactgccggcgggtgcaaggtgaccggcgggtaagttggtgccggcgggttgggcaggctgctggtggtctacccttccggcgggtggtcgactcggaccgatg

SEQ ID NO: 14567 - DNA, 203 bp, synthetic construct
  source 1..203: mol_type = other DNA
ggcgcgccagtccttttgtgacctctgacacaactgtgttcactagcaacccggcgggtacaccatggtgcatctgactcctgaggagaagtctgccgttactgccggcgggtgcaaggtgaccggcgggtaagttggtggtgaggccctgggcaggcccggcgggttctacccttccggcgggtggtcgactcggaccgatg

SEQ ID NO: 14568 - DNA, 203 bp, synthetic construct
  source 1..203: mol_type = other DNA
ggcgcgccagtcctacaggcttacctgacacaactgtgttcactagcaacccggcgggtacaccatggtgcatctgactcctgaggccggcgggtccgttactgccctgtggggcaaggtgaacgtggatgaagttggtgccggcgggttgggcaggctgctggtggtctacccttggacccagaggtcgactcggaccgatg

SEQ ID NO: 14569 - DNA, 203 bp, synthetic construct
  source 1..203: mol_type = other DNA
ggcgcgccagtccttaagcctgacctgacacaactgtgttcactagcaacccggcgggtacaccatggtgcatctgactcctgaggccggcgggtccgttactgccctgtggggcaaggtgaacgtggatgaagttggtggtgaggccctgggcaggcccggcgggttctacccttccggcgggtggtcgactcggaccgatg

SEQ ID NO: 14570 - DNA, 203 bp, synthetic construct
  source 1..203: mol_type = other DNA
ggcgcgccagtccttacagacaacctgacacaactgtgttcactagcaacccggcgggtacaccatggtgcatctgactcctgaggccggcgggtccgttactgccggcgggtgcaaggtgaacgtggatgaagttggtgccggcgggttgggcaggctgctggtggtctacccttggacccagaggtcgactcggaccgatg

SEQ ID NO: 14571 - DNA, 203 bp, synthetic construct
  source 1..203: mol_type = other DNA
ggcgcgccagtcctcttgtctgaactgacacaactgtgttcactagcaacccggcgggtacaccatggtgcatctgactcctgaggccggcgggtccgttactgccggcgggtgcaaggtgaacgtggatgaagttggtggtgaggccctgggcaggcccggcgggttctacccttggacccagaggtcgactcggaccgatg

SEQ ID NO: 14572 - DNA, 203 bp, synthetic construct
  source 1..203: mol_type = other DNA
ggcgcgccagtcctaacccatgatctgacacaactgtgttcactagcaacccggcgggtacaccatggtgcatctgactcctgaggccggcgggtccgttactgccggcgggtgcaaggtgaccggcgggtaagttggtgccggcgggttgggcaggcccggcgggttctacccttccggcgggtggtcgactcggaccgatg

SEQ ID NO: 14573 - DNA, 203 bp, synthetic construct
  source 1..203: mol_type = other DNA
ggcgcgccagtcctaccgagcctgctgacacaactgtgttcactagcaacccggcgggtacaccatggtgcatctgactcctgaggccggcgggtccgttactgccggcgggtgcaaggtgaccggcgggtaagttggtgccggcgggttgggcaggctgctggtggtctacccttccggcgggtggtcgactcggaccgatg

SEQ ID NO: 14574 - DNA, 203 bp, synthetic construct
  source 1..203: mol_type = other DNA
ggcgcgccagtcctacctaagcagctgacacaactgtgttcactagcaacccggcgggtacaccatggtgcatctgactcctgaggccggcgggtccgttactgccggcgggtgcaaggtgaccggcgggtaagttggtgccggcgggttgggcaggctgctggtggtctacccttggacccagaggtcgactcggaccgatg

SEQ ID NO: 14575 - DNA, 203 bp, synthetic construct
  source 1..203: mol_type = other DNA
ggcgcgccagtcctgtgagaagttctgacacaactgtgttcactagcaacccgtcaattcctttatggtgcatctgactcctgaggagaagtctgccgttactgccctgtggggcaaggtgaacgtggatgaagttggtggtgaggccctgggcaggctgctggtggtctacccttgttcttggcaaacgactcggaccgatg

SEQ ID NO: 14576 - DNA, 203 bp, synthetic construct
  source 1..203: mol_type = other DNA
ggcgcgccagtcctcttagaccacctgacacaactgtgttcactagcaaccgtcaattcctttaatggcgtcaattcctttagaggagaagtctgccgttactgccctgtggggcaaggtgaacgtggatgaagttggtggtgaggccctgggcaggccgtcaattcctttaccttggacccagaggtcgactcggaccgatg

SEQ ID NO: 14577 - DNA, 203 bp, synthetic construct
  source 1..203: mol_type = other DNA
ggcgcgccagtccttcagcttagactgacacaactgtgttcactagcaaccgtcaattcctttaatggcgtcaattcctttagaggagaagtctgccgttactgccctgtggggcaaggtgacgtcaattcctttaggtggtgaggccctgggcaggctgctggtggtctacccttggacccagaggtcgactcggaccgatg

SEQ ID NO: 14578 - DNA, 203 bp, synthetic construct
  source 1..203: mol_type = other DNA
ggcgcgccagtcctccacttctagctgacacaactgtgttcactagcaaccgtcaattcctttaatggcgtcaattcctttagaggagaagtctgccgttactgcgtcaattcctttagtgaacgtggatgaagttggtggtgaggccctgggcaggctgctggtggtctacccttggacccagaggtcgactcggaccgatg

SEQ ID NO: 14579 - DNA, 203 bp, synthetic construct
  source 1..203: mol_type = other DNA
ggcgcgccagtcctagtttgggtactgacacaactgtgttcactagcaaccgtcaattcctttaatggcgtcaattcctttagaggagaagtctgccgttactgcgtcaattcctttagtgacgtcaattcctttaggtggtgaggccctgggcaggctgctggtggtctacccttggacccagaggtcgactcggaccgatg

SEQ ID NO: 14580 - DNA, 203 bp, synthetic construct
  source 1..203: mol_type = other DNA
ggcgcgccagtcctcaacagtgacctgacacaactgtgttcactagcaaccgtcaattcctttaatggcgtcaattcctttagaggcgtcaattcctttaactgccctgtggggcaaggtgaacgtggatgaagttggtgcgtcaattcctttaaggctgctggtggtctacccttggacccagaggtcgactcggaccgatg

SEQ ID NO: 14581 - DNA, 203 bp, synthetic construct
  source 1..203: mol_type = other DNA
ggcgcgccagtcctccacttcggtctgacacaactgtgttcactagcaaccgtcaattcctttaatggcgtcaattcctttagaggcgtcaattcctttaactgccctgtggggcaaggtgacgtcaattcctttaggtgcgtcaattcctttaaggccgtcaattcctttaccttggacccagaggtcgactcggaccgatg

SEQ ID NO: 14582 - DNA, 203 bp, synthetic construct
  source 1..203: mol_type = other DNA
ggcgcgccagtcctttgtagcgttctgacacaactgtgttcactagcaaccgtcaattcctttaatggcgtcaattcctttagaggcgtcaattcctttaactgccctgtggggcaaggtgacgtcaattcctttaggtggtgaggccctgggcaggccgtcaattcctttaccttggacccagaggtcgactcggaccgatg

SEQ ID NO: 14583 - DNA, 203 bp, synthetic construct
  source 1..203: mol_type = other DNA
ggcgcgccagtcctaacgctactcctgacacaactgtgttcactagcaaccgtcaattcctttaatggcgtcaattcctttagaggcgtcaattcctttaactgccctgtggggcaaggtgacgtcaattcctttaggtggtgaggccctgggcaggctgctggtggtctacccttggacccagaggtcgactcggaccgatg

SEQ ID NO: 14584 - DNA, 203 bp, synthetic construct
  source 1..203: mol_type = other DNA
ggcgcgccagtcctcagatcagtgctgacacaactgtgttcactagcaaccgtcaattcctttaatggcgtcaattcctttagaggcgtcaattcctttaactgcgtcaattcctttagtgaacgtggatgaagttggtggtgaggccctgggcaggccgtcaattcctttaccttggacccagaggtcgactcggaccgatg

SEQ ID NO: 14585 - DNA, 203 bp, synthetic construct
  source 1..203: mol_type = other DNA
ggcgcgccagtccttcttgacgatctgacacaactgtgttcactagcaaccgtcaattcctttaatggcgtcaattcctttagaggcgtcaattcctttaactgcgtcaattcctttagtgacgtcaattcctttaggtggtgaggccctgggcaggctgctggtggtctacccttggacccagaggtcgactcggaccgatg

SEQ ID NO: 14586 - DNA, 203 bp, synthetic construct
  source 1..203: mol_type = other DNA
ggcgcgccagtcctctgatcaagactgacacaactgtgttcactagcaaccgtcaattcctttaatggtgcatctgactcctgaggagaagtctgccgttactgccctgtggggcaaggtgaacgtggatgaagttggtgcgtcaattcctttaaggctgctggtggtctacccttggacccagaggtcgactcggaccgatg

SEQ ID NO: 14587 - DNA, 203 bp, synthetic construct
  source 1..203: mol_type = other DNA
ggcgcgccagtccttgaacaacgactgacacaactgtgttcactagcaaccgtcaattcctttaatggtgcatctgactcctgaggagaagtctgccgttactgccctgtggggcaaggtgacgtcaattcctttaggtgcgtcaattcctttaaggccgtcaattcctttaccttggacccagaggtcgactcggaccgatg

SEQ ID NO: 14588 - DNA, 203 bp, synthetic construct
  source 1..203: mol_type = other DNA
ggcgcgccagtccttactgggtctctgacacaactgtgttcactagcaaccgtcaattcctttaatggtgcatctgactcctgaggagaagtctgccgttactgccctgtggggcaaggtgacgtcaattcctttaggtgcgtcaattcctttaaggctgctggtggtctacccttggacccagaggtcgactcggaccgatg

SEQ ID NO: 14589 - DNA, 203 bp, synthetic construct
  source 1..203: mol_type = other DNA
ggcgcgccagtcctggtaactgggctgacacaactgtgttcactagcaaccgtcaattcctttaatggtgcatctgactcctgaggagaagtctgccgttactgccctgtggggcaaggtgacgtcaattcctttaggtggtgaggccctgggcaggccgtcaattcctttaccttggacccagaggtcgactcggaccgatg

SEQ ID NO: 14590 - DNA, 203 bp, synthetic construct
  source 1..203: mol_type = other DNA
ggcgcgccagtcctcactgggttcctgacacaactgtgttcactagcaaccgtcaattcctttaatggtgcatctgactcctgaggagaagtctgccgttactgccctgtggggcaaggtgacgtcaattcctttaggtggtgaggccctgggcaggctgctggtggtctacccttggacccagaggtcgactcggaccgatg

SEQ ID NO: 14591 - DNA, 203 bp, synthetic construct
  source 1..203: mol_type = other DNA
ggcgcgccagtcctcccagtttgcctgacacaactgtgttcactagcaaccgtcaattcctttaatggtgcatctgactcctgaggagaagtctgccgttactgcgtcaattcctttagtgacgtcaattcctttaggtgcgtcaattcctttaaggccgtcaattcctttaccttggacccagaggtcgactcggaccgatg

SEQ ID NO: 14592 - DNA, 203 bp, synthetic construct
  source 1..203: mol_type = other DNA
ggcgcgccagtcctgaccgtttctctgacacaactgtgttcactagcaaccgtcaattcctttaatggtgcatctgactcctgaggcgtcaattcctttaactgccctgtggggcaaggtgaacgtggatgaagttggtgcgtcaattcctttaaggccgtcaattcctttaccttggacccagaggtcgactcggaccgatg

SEQ ID NO: 14593 - DNA, 203 bp, synthetic construct
  source 1..203: mol_type = other DNA
ggcgcgccagtccttgtgaactagctgacacaactgtgttcactagcaaccgtcaattcctttaatggtgcatctgactcctgaggcgtcaattcctttaactgccctgtggggcaaggtgacgtcaattcctttaggtgcgtcaattcctttaaggccgtcaattcctttaccttggacccagaggtcgactcggaccgatg

SEQ ID NO: 14594 - DNA, 203 bp, synthetic construct
  source 1..203: mol_type = other DNA
ggcgcgccagtcctctgaactaggctgacacaactgtgttcactagcaaccgtcaattcctttaatggtgcatctgactcctgaggcgtcaattcctttaactgccctgtggggcaaggtgacgtcaattcctttaggtgcgtcaattcctttaaggctgctggtggtctacccttggacccagaggtcgactcggaccgatg

SEQ ID NO: 14595 - DNA, 203 bp, synthetic construct
  source 1..203: mol_type = other DNA
ggcgcgccagtcctacgctcaccactgacacaactgtgttcactagcaaccgtcaattcctttaatggtgcatctgactcctgaggcgtcaattcctttaactgcgtcaattcctttagtgaacgtggatgaagttggtgcgtcaattcctttaaggccgtcaattcctttaccttggacccagaggtcgactcggaccgatg

SEQ ID NO: 14596 - DNA, 203 bp, synthetic construct
  source 1..203: mol_type = other DNA
ggcgcgccagtcctatgggttaaactgacacaactgtgttcactagcaaccgtcaattcctttaatggtgcatctgactcctgaggcgtcaattcctttaactgcgtcaattcctttagtgaacgtggatgaagttggtgcgtcaattcctttaaggctgctggtggtctacccttggacccagaggtcgactcggaccgatg

SEQ ID NO: 14597 - DNA, 203 bp, synthetic construct
  source 1..203: mol_type = other DNA
ggcgcgccagtcctagttaaaggactgacacaactgtgttcactagcaaccgtcaattcctttaatggtgcatctgactcctgaggcgtcaattcctttaactgcgtcaattcctttagtgaacgtggatgaagttggtggtgaggccctgggcaggccgtcaattcctttaccttggacccagaggtcgactcggaccgatg

SEQ ID NO: 14598 - DNA, 203 bp, synthetic construct
  source 1..203: mol_type = other DNA
ggcgcgccagtcctacgtaactcgctgacacaactgtgttcactagcaaccgtcaattcctttaatggtgcatctgactcctgaggcgtcaattcctttaactgcgtcaattcctttagtgacgtcaattcctttaggtggtgaggccctgggcaggctgctggtggtctacccttggacccagaggtcgactcggaccgatg

SEQ ID NO: 14599 - DNA, 203 bp, synthetic construct
  source 1..203: mol_type = other DNA
ggcgcgccagtcctggtagtctcgctgacacaactgtgttcactagcaacctacgacggtatctgatcgtcttcgaacctccgactttcgttcttgattaatgaaaacattcttggcaaatgctttcgctctggtccgtcttgcgccggtccaagaatttcacctctagcggcgcaagacccagaggtcgactcggaccgatg

SEQ ID NO: 14600 - DNA, 203 bp, synthetic construct
  source 1..203: mol_type = other DNA
ggcgcgccagtcctttcaagctcgctgacacaactgtgttcactagcaacctacgacggtatctgatcgtcttcgaacctccgactttcgttcttgattaatgaaaacattcttggcaaatgctttcgctctggtccgtcttgcgccggtccaagaatttcacctctagcggcgcaggacccagaggtcgactcggaccgatg

SEQ ID NO: 14601 - DNA, 203 bp, synthetic construct
  source 1..203: mol_type = other DNA
ggcgcgccagtcctgaacttgtcgctgacacaactgtgttcactagcaacctcaaacaaccggccgtgtgcatctgactcctgaggagaagtctgccgttactgccctgtggggcaaggtgaacgtggatgaagttggtggtgaggccctgggcaggctgctggtggtctacccttggaaccggccgtcgactcggaccgatg

SEQ ID NO: 14602 - DNA, 203 bp, synthetic construct
  source 1..203: mol_type = other DNA
ggcgcgccagtcctttgagtatcgctgacacaactgtgttcactagcaacctcaaacaaccggccgtgtgcatctgactcctgaggagaagtctgccgttactgccctgtggggcaaggtgaacgtggatgaagttggtggtgaggccctgggcaggctgctggtggtctacccttggaccggcgggtcgactcggaccgatg

SEQ ID NO: 14603 - DNA, 203 bp, synthetic construct
  source 1..203: mol_type = other DNA
ggcgcgccagtcctcgaggttgtcctgacacaactgtgttcactagcaacctcaaacaagcgaccaaaggaaccataactgatttaatgagccattcgcagtttcactgtaccggccgtgcgtactcagacatgcatggcttaatctttgagacaagcatatgctactggacccttggacccagaggtcgactcggaccgatg

SEQ ID NO: 14604 - DNA, 203 bp, synthetic construct
  source 1..203: mol_type = other DNA
ggcgcgccagtcctcgacgagcctctgacacaactgtgttcactagcaacctcaaacacacggaatcgagaatctgactcctgaggagaagtctgccgttactgccctgtggggcaaggtgaacgtggatgaagttggtggtgaggccctgggcaggctgctggtggtctacccttgttcttggcaaacgactcggaccgatg

SEQ ID NO: 14605 - DNA, 203 bp, synthetic construct
  source 1..203: mol_type = other DNA
ggcgcgccagtcctgtagctgtcgctgacacaactgtgttcactagcaacctcaaacacactcctggtggtgcccttccgtcaattcctttaagtttcagctttgcaaccatactccccccggaacccaaagactttggtttcccggaagctgcccggcgggtcatgggaacccttggacccagaggtcgactcggaccgatg

SEQ ID NO: 14606 - DNA, 203 bp, synthetic construct
  source 1..203: mol_type = other DNA
ggcgcgccagtcctcgagctctcactgacacaactgtgttcactagcaacctcaaacacgtgttgagtcaaattaagccgcaggctccactcctggtggtgcccttccgtcaattcctttaagtttcagctttgcaaccatactccccccggaacccaaagactttggttacccttggacccagaggtcgactcggaccgatg

SEQ ID NO: 14607 - DNA, 203 bp, synthetic construct
  source 1..203: mol_type = other DNA
ggcgcgccagtcctcgagttttcgctgacacaactgtgttcactagcaacctcaaacagaaccggccgtgcatctgactcctgaggagaagtctgccgttactgccctgtggggcaaggtgaacgtggatgaagttggtggtgaggccctgggcaggctgctggtggtctacccttggacctactccccgactcggaccgatg

SEQ ID NO: 14608 - DNA, 203 bp, synthetic construct
  source 1..203: mol_type = other DNA
ggcgcgccagtcctcgactcttacctgacacaactgtgttcactagcaacctcaaacagacaaccaaaggaaccataactgatttaatgagccattcgcagtttcactgtaccggccgtgcgtactcagacatgcatggcttaatctttgagacaagcatatgctagtctacccttggacccagaggtcgactcggaccgatg

SEQ ID NO: 14609 - DNA, 203 bp, synthetic construct
  source 1..203: mol_type = other DNA
ggcgcgccagtcctcgacaacgttctgacacaactgtgttcactagcaacctcaaacagacacaccatactccccccggaacccaaagactttggtttcccggaagctgcccggcgggtcatgggaataacgccgccgcatcgccggtcggcatcgtttatggtcggtctacccttggacccagaggtcgactcggaccgatg

SEQ ID NO: 14610 - DNA, 203 bp, synthetic construct
  source 1..203: mol_type = other DNA
ggcgcgccagtcctgagcctctcgctgacacaactgtgttcactagcaacctcaaacagacacacggaatcgagaaactcctgaggagaagtctgccgttactgccctgtggggcaaggtgaacgtggatgaagttggtggtgaggccctgggcaggctgctggtggtctaccccacggaatcgagaacgactcggaccgatg

SEQ ID NO: 14611 - DNA, 203 bp, synthetic construct
  source 1..203: mol_type = other DNA
ggcgcgccagtcctcgaatcctggctgacacaactgtgttcactagcaacctcaaacagacaccaatcgtcttcgaacctccgactttcgttcttgattaatgaaaacattcttggcaaatgctttcgctctggtccgtcttgcgccggtccaagaatttcacgtggtctacccttggacccagaggtcgactcggaccgatg

SEQ ID NO: 14612 - DNA, 203 bp, synthetic construct
  source 1..203: mol_type = other DNA
ggcgcgccagtccttcgctcgtcgctgacacaactgtgttcactagcaacctcaaacagacaccacacggaatcgagaacctgaggagaagtctgccgttactgccctgtggggcaaggtgaacgtggatgaagttggtggtgaggccctgggcaggctgctggtggtctacccttgttcttggcaaacgactcggaccgatg

SEQ ID NO: 14613 - DNA, 203 bp, synthetic construct
  source 1..203: mol_type = other DNA
ggcgcgccagtcctcgatcggtcactgacacaactgtgttcactagcaacctcaaacagacaccacatactccccccggaacccaaagactttggtttcccggaagctgcccggcgggtcatgggaataacgccgccgcatcgccggtcggcatcgtttatgggtggtctacccttggacccagaggtcgactcggaccgatg

SEQ ID NO: 14614 - DNA, 203 bp, synthetic construct
  source 1..203: mol_type = other DNA
ggcgcgccagtcctcgaagcttagctgacacaactgtgttcactagcaacctcaaacagacaccaccggcgggttgactcctgaggagaagtctgccgttactgccctgtggggcaaggtgaacgtggatgaagttggtggtgaggccctgggcaggctgctggtggtctacccttggaaccggccgtcgactcggaccgatg

SEQ ID NO: 14615 - DNA, 203 bp, synthetic construct
  source 1..203: mol_type = other DNA
ggcgcgccagtcctcgacttgtatctgacacaactgtgttcactagcaacctcaaacagacaccaggtggtgcccttccgtcaattcctttaagtttcagctttgcaaccatactccccccggaacccaaagactttggtttcccggaagctgcccggcgggtgtggtctacccttggacccagaggtcgactcggaccgatg

SEQ ID NO: 14616 - DNA, 203 bp, synthetic construct
  source 1..203: mol_type = other DNA
ggcgcgccagtcctcgacgaactactgacacaactgtgttcactagcaacctcaaacagacaccatgaccggccgtactcctgaggagaagtctgccgttactgccctgtggggcaaggtgaacgtggatgaagttggtggtgaggccctgggcaggctgctggtggtctacccttggacccagaggtcgactcggaccgatg

SEQ ID NO: 14617 - DNA, 203 bp, synthetic construct
  source 1..203: mol_type = other DNA
ggcgcgccagtcctggcaacttcgctgacacaactgtgttcactagcaacctcaaacagacaccatgaggaaccataactgatttaatgagccattcgcagtttcactgtaccggccgtgcgtactcagacatgcatggcttaatctttgagacaagcatatggtggtctacccttggacccagaggtcgactcggaccgatg

SEQ ID NO: 14618 - DNA, 203 bp, synthetic construct
  source 1..203: mol_type = other DNA
ggcgcgccagtcctcgactggacactgacacaactgtgttcactagcaacctcaaacagacaccatgcgtcaattcctttatgaggagaagtctgccgttactgccctgtggggcaaggtgaacgtggatgaagttggtggtgaggccctgggcaggctgctggtggtctacccttggaaccggccgtcgactcggaccgatg

SEQ ID NO: 14619 - DNA, 203 bp, synthetic construct
  source 1..203: mol_type = other DNA
ggcgcgccagtcctcgacttcattctgacacaactgtgttcactagcaacctcaaacagacaccatggaccggccgtctcctgaggaccggccgtccgttactgaccggccgtgcaaggtgaaccggccgtaagttggtgaccggccgttgggcaggcaccggccgttctacccttggacccagaggtcgactcggaccgatg

SEQ ID NO: 14620 - DNA, 203 bp, synthetic construct
  source 1..203: mol_type = other DNA
ggcgcgccagtcctccactttcttctgacacaactgtgttcactagcaacctcaaacagacaccatggaccggccgtctcctgaggaccggccgtccgttactgaccggccgtgcaaggtgaaccggccgtaagttggtggtgaggccctgggcaggctgctggtggtctacccttaccggccgtggtcgactcggaccgatg

SEQ ID NO: 14621 - DNA, 203 bp, synthetic construct
  source 1..203: mol_type = other DNA
ggcgcgccagtcctaaatcacagcctgacacaactgtgttcactagcaacctcaaacagacaccatggaccggccgtctcctgaggaccggccgtccgttactgaccggccgtgcaaggtgaacgtggatgaagttggtgaccggccgttgggcaggcaccggccgttctacccttaccggccgtggtcgactcggaccgatg

SEQ ID NO: 14622 - DNA, 203 bp, synthetic construct
  source 1..203: mol_type = other DNA
ggcgcgccagtcctcagcaaatgactgacacaactgtgttcactagcaacctcaaacagacaccatggaccggccgtctcctgaggaccggccgtccgttactgaccggccgtgcaaggtgaacgtggatgaagttggtgaccggccgttgggcaggcaccggccgttctacccttggacccagaggtcgactcggaccgatg

SEQ ID NO: 14623 - DNA, 203 bp, synthetic construct
  source 1..203: mol_type = other DNA
ggcgcgccagtcctagcaaaatgcctgacacaactgtgttcactagcaacctcaaacagacaccatggaccggccgtctcctgaggaccggccgtccgttactgaccggccgtgcaaggtgaacgtggatgaagttggtggtgaggccctgggcaggcaccggccgttctacccttggacccagaggtcgactcggaccgatg

SEQ ID NO: 14624 - DNA, 203 bp, synthetic construct
  source 1..203: mol_type = other DNA
ggcgcgccagtcctacagaaatcactgacacaactgtgttcactagcaacctcaaacagacaccatggaccggccgtctcctgaggaccggccgtccgttactgccctgtggggcaaggtgaaccggccgtaagttggtgaccggccgttgggcaggcaccggccgttctacccttaccggccgtggtcgactcggaccgatg

SEQ ID NO: 14625 - DNA, 203 bp, synthetic construct
  source 1..203: mol_type = other DNA
ggcgcgccagtcctatgaaaatcgctgacacaactgtgttcactagcaacctcaaacagacaccatggaccggccgtctcctgaggaccggccgtccgttactgccctgtggggcaaggtgaaccggccgtaagttggtggtgaggccctgggcaggctgctggtggtctacccttggacccagaggtcgactcggaccgatg

SEQ ID NO: 14626 - DNA, 203 bp, synthetic construct
  source 1..203: mol_type = other DNA
ggcgcgccagtccttctcacaaatctgacacaactgtgttcactagcaacctcaaacagacaccatggaccggccgtctcctgaggaccggccgtccgttactgccctgtggggcaaggtgaacgtggatgaagttggtggtgaggccctgggcaggcaccggccgttctacccttaccggccgtggtcgactcggaccgatg

SEQ ID NO: 14627 - DNA, 203 bp, synthetic construct
  source 1..203: mol_type = other DNA
ggcgcgccagtcctaaatcgattcctgacacaactgtgttcactagcaacctcaaacagacaccatggaccggccgtctcctgaggagaagtctgccgttactgaccggccgtgcaaggtgaaccggccgtaagttggtgaccggccgttgggcaggctgctggtggtctacccttaccggccgtggtcgactcggaccgatg

SEQ ID NO: 14628 - DNA, 203 bp, synthetic construct
  source 1..203: mol_type = other DNA
ggcgcgccagtcctcaacaaatcgctgacacaactgtgttcactagcaacctcaaacagacaccatggaccggccgtctcctgaggagaagtctgccgttactgaccggccgtgcaaggtgaaccggccgtaagttggtgaccggccgttgggcaggctgctggtggtctacccttggacccagaggtcgactcggaccgatg

SEQ ID NO: 14629 - DNA, 203 bp, synthetic construct
  source 1..203: mol_type = other DNA
ggcgcgccagtcctctcaaatggtctgacacaactgtgttcactagcaacctcaaacagacaccatggaccggccgtctcctgaggagaagtctgccgttactgaccggccgtgcaaggtgaacgtggatgaagttggtgaccggccgttgggcaggcaccggccgttctacccttaccggccgtggtcgactcggaccgatg

SEQ ID NO: 14630 - DNA, 203 bp, synthetic construct
  source 1..203: mol_type = other DNA
ggcgcgccagtcctagctcattttctgacacaactgtgttcactagcaacctcaaacagacaccatggaccggccgtctcctgaggagaagtctgccgttactgaccggccgtgcaaggtgaacgtggatgaagttggtgaccggccgttgggcaggctgctggtggtctacccttaccggccgtggtcgactcggaccgatg

SEQ ID NO: 14631 - DNA, 203 bp, synthetic construct
  source 1..203: mol_type = other DNA
ggcgcgccagtcctcctcagatttctgacacaactgtgttcactagcaacctcaaacagacaccatggaccggccgtctcctgaggagaagtctgccgttactgaccggccgtgcaaggtgaacgtggatgaagttggtggtgaggccctgggcaggcaccggccgttctacccttaccggccgtggtcgactcggaccgatg

SEQ ID NO: 14632 - DNA, 203 bp, synthetic construct
  source 1..203: mol_type = other DNA
ggcgcgccagtccttacttgatttctgacacaactgtgttcactagcaacctcaaacagacaccatggaccggccgtctcctgaggagaagtctgccgttactgccctgtggggcaaggtgaaccggccgtaagttggtgaccggccgttgggcaggctgctggtggtctacccttggacccagaggtcgactcggaccgatg

SEQ ID NO: 14633 - DNA, 203 bp, synthetic construct
  source 1..203: mol_type = other DNA
ggcgcgccagtcctaacatttgaactgacacaactgtgttcactagcaacctcaaacagacaccatggaccggccgtctcctgaggagaagtctgccgttactgccctgtggggcaaggtgaaccggccgtaagttggtggtgaggccctgggcaggcaccggccgttctacccttaccggccgtggtcgactcggaccgatg

SEQ ID NO: 14634 - DNA, 203 bp, synthetic construct
  source 1..203: mol_type = other DNA
ggcgcgccagtcctcatttctttgctgacacaactgtgttcactagcaacctcaaacagacaccatggaccggccgtctcctgaggagaagtctgccgttactgccctgtggggcaaggtgaacgtggatgaagttggtgaccggccgttgggcaggctgctggtggtctacccttggacccagaggtcgactcggaccgatg

SEQ ID NO: 14635 - DNA, 203 bp, synthetic construct
  source 1..203: mol_type = other DNA
ggcgcgccagtcctgtgatttcacctgacacaactgtgttcactagcaacctcaaacagacaccatggaccggccgtctcctgaggagaagtctgccgttactgccctgtggggcaaggtgaacgtggatgaagttggtggtgaggccctgggcaggcaccggccgttctacccttggacccagaggtcgactcggaccgatg

SEQ ID NO: 14636 - DNA, 203 bp, synthetic construct
  source 1..203: mol_type = other DNA
ggcgcgccagtcctcatttcacttctgacacaactgtgttcactagcaacctcaaacagacaccatggaccggccgtctcctgaggagaagtctgccgttactgccctgtggggcaaggtgaacgtggatgaagttggtggtgaggccctgggcaggctgctggtggtctacccttaccggccgtggtcgactcggaccgatg

SEQ ID NO: 14637 - DNA, 203 bp, synthetic construct
  source 1..203: mol_type = other DNA
ggcgcgccagtccttgcaacatttctgacacaactgtgttcactagcaacctcaaacagacaccatggcacggaatcgagaagaggagaagtctgccgttactgcacggaatcgagaagtgaacgtggatgaagttggtgcacggaatcgagaaaggctgctggtggtctacccttggacccagaggtcgactcggaccgatg

SEQ ID NO: 14638 - DNA, 203 bp, synthetic construct
  source 1..203: mol_type = other DNA
ggcgcgccagtcctagattttcgtctgacacaactgtgttcactagcaacctcaaacagacaccatggcacggaatcgagaagaggagaagtctgccgttactgcacggaatcgagaagtgaacgtggatgaagttggtggtgaggccctgggcaggccacggaatcgagaaccttggacccagaggtcgactcggaccgatg

SEQ ID NO: 14639 - DNA, 203 bp, synthetic construct
  source 1..203: mol_type = other DNA
ggcgcgccagtcctccaagatttcctgacacaactgtgttcactagcaacctcaaacagacaccatggcacggaatcgagaagaggagaagtctgccgttactgcacggaatcgagaagtgacacggaatcgagaaggtggtgaggccctgggcaggctgctggtggtctacccttggacccagaggtcgactcggaccgatg

SEQ ID NO: 14640 - DNA, 203 bp, synthetic construct
  source 1..203: mol_type = other DNA
ggcgcgccagtcctcgacctacaactgacacaactgtgttcactagcaacctcaaacagacaccatggcacggaatcgagaagaggagaagtctgccgttactgccctgtggggcaaggtgacacggaatcgagaaggtgcacggaatcgagaaaggctgctggtggtctacccttggacccagaggtcgactcggaccgatg

SEQ ID NO: 14641 - DNA, 203 bp, synthetic construct
  source 1..203: mol_type = other DNA
ggcgcgccagtcctccaaccagtgctgacacaactgtgttcactagcaacctcaaacagacaccatggcacggaatcgagaagaggagaagtctgccgttactgccctgtggggcaaggtgacacggaatcgagaaggtggtgaggccctgggcaggctgctggtggtctacccttggacccagaggtcgactcggaccgatg

SEQ ID NO: 14642 - DNA, 203 bp, synthetic construct
  source 1..203: mol_type = other DNA
ggcgcgccagtcctggctacatggctgacacaactgtgttcactagcaacctcaaacagacaccatggcacggaatcgagaagaggcacggaatcgagaaactgcacggaatcgagaagtgacacggaatcgagaaggtgcacggaatcgagaaaggctgctggtggtctacccttggacccagaggtcgactcggaccgatg

SEQ ID NO: 14643 - DNA, 203 bp, synthetic construct
  source 1..203: mol_type = other DNA
ggcgcgccagtcctactacatgagctgacacaactgtgttcactagcaacctcaaacagacaccatggcacggaatcgagaagaggcacggaatcgagaaactgcacggaatcgagaagtgacacggaatcgagaaggtggtgaggccctgggcaggctgctggtggtctacccttggacccagaggtcgactcggaccgatg

SEQ ID NO: 14644 - DNA, 203 bp, synthetic construct
  source 1..203: mol_type = other DNA
ggcgcgccagtccttggtatgcgactgacacaactgtgttcactagcaacctcaaacagacaccatggcacggaatcgagaagaggcacggaatcgagaaactgccctgtggggcaaggtgaacgtggatgaagttggtggtgaggccctgggcaggctgctggtggtctacccttggacccagaggtcgactcggaccgatg

SEQ ID NO: 14645 - DNA, 203 bp, synthetic construct
  source 1..203: mol_type = other DNA
ggcgcgccagtcctacgagcagcactgacacaactgtgttcactagcaacctcaaacagacaccatggccggcgggtctcctgaggagaagtctgccgttactgccctgtggggcaaggtgaacgtggatgaagttggtgccggcgggttgggcaggctgctggtggtctacccttggacccagaggtcgactcggaccgatg

SEQ ID NO: 14646 - DNA, 203 bp, synthetic construct
  source 1..203: mol_type = other DNA
ggcgcgccagtcctgtgcagcatactgacacaactgtgttcactagcaacctcaaacagacaccatggccggcgggtctcctgaggagaagtctgccgttactgccctgtggggcaaggtgaacgtggatgaagttggtggtgaggccctgggcaggctgctggtggtctacccttccggcgggtggtcgactcggaccgatg

SEQ ID NO: 14647 - DNA, 203 bp, synthetic construct
  source 1..203: mol_type = other DNA
ggcgcgccagtccttcttcgttggctgacacaactgtgttcactagcaacctcaaacagacaccatggccggcgggtctcctgaggagaagtctgccgttactgccctgtggggcaaggtgaccggcgggtaagttggtggtgaggccctgggcaggcccggcgggttctacccttccggcgggtggtcgactcggaccgatg

SEQ ID NO: 14648 - DNA, 203 bp, synthetic construct
  source 1..203: mol_type = other DNA
ggcgcgccagtcctatccaacagtctgacacaactgtgttcactagcaacctcaaacagacaccatggccggcgggtctcctgaggagaagtctgccgttactgccctgtggggcaaggtgaccggcgggtaagttggtggtgaggccctgggcaggcccggcgggttctacccttggacccagaggtcgactcggaccgatg

SEQ ID NO: 14649 - DNA, 203 bp, synthetic construct
  source 1..203: mol_type = other DNA
ggcgcgccagtcctcacacttaacctgacacaactgtgttcactagcaacctcaaacagacaccatggccggcgggtctcctgaggagaagtctgccgttactgccctgtggggcaaggtgaccggcgggtaagttggtggtgaggccctgggcaggctgctggtggtctacccttccggcgggtggtcgactcggaccgatg

SEQ ID NO: 14650 - DNA, 203 bp, synthetic construct
  source 1..203: mol_type = other DNA
ggcgcgccagtcctttaggcctcgctgacacaactgtgttcactagcaacctcaaacagacaccatggccggcgggtctcctgaggagaagtctgccgttactgccggcgggtgcaaggtgaacgtggatgaagttggtgccggcgggttgggcaggcccggcgggttctacccttccggcgggtggtcgactcggaccgatg

SEQ ID NO: 14651 - DNA, 203 bp, synthetic construct
  source 1..203: mol_type = other DNA
ggcgcgccagtcctgttaggcctcctgacacaactgtgttcactagcaacctcaaacagacaccatggccggcgggtctcctgaggagaagtctgccgttactgccggcgggtgcaaggtgaacgtggatgaagttggtgccggcgggttgggcaggcccggcgggttctacccttggacccagaggtcgactcggaccgatg

SEQ ID NO: 14652 - DNA, 203 bp, synthetic construct
  source 1..203: mol_type = other DNA
ggcgcgccagtcctggcctagtggctgacacaactgtgttcactagcaacctcaaacagacaccatggccggcgggtctcctgaggagaagtctgccgttactgccggcgggtgcaaggtgaacgtggatgaagttggtgccggcgggttgggcaggctgctggtggtctacccttggacccagaggtcgactcggaccgatg

SEQ ID NO: 14653 - DNA, 203 bp, synthetic construct
  source 1..203: mol_type = other DNA
ggcgcgccagtcctttaagcacttctgacacaactgtgttcactagcaacctcaaacagacaccatggccggcgggtctcctgaggagaagtctgccgttactgccggcgggtgcaaggtgaacgtggatgaagttggtggtgaggccctgggcaggctgctggtggtctacccttccggcgggtggtcgactcggaccgatg

SEQ ID NO: 14654 - DNA, 203 bp, synthetic construct
  source 1..203: mol_type = other DNA
ggcgcgccagtccttgtgcttgtactgacacaactgtgttcactagcaacctcaaacagacaccatggccggcgggtctcctgaggagaagtctgccgttactgccggcgggtgcaaggtgaccggcgggtaagttggtgccggcgggttgggcaggcccggcgggttctacccttccggcgggtggtcgactcggaccgatg

SEQ ID NO: 14655 - DNA, 203 bp, synthetic construct
  source 1..203: mol_type = other DNA
ggcgcgccagtcctatgtgcttacctgacacaactgtgttcactagcaacctcaaacagacaccatggccggcgggtctcctgaggagaagtctgccgttactgccggcgggtgcaaggtgaccggcgggtaagttggtgccggcgggttgggcaggctgctggtggtctacccttggacccagaggtcgactcggaccgatg

SEQ ID NO: 14656 - DNA, 203 bp, synthetic construct
  source 1..203: mol_type = other DNA
ggcgcgccagtcctgtgcttgtaactgacacaactgtgttcactagcaacctcaaacagacaccatggccggcgggtctcctgaggagaagtctgccgttactgccggcgggtgcaaggtgaccggcgggtaagttggtggtgaggccctgggcaggcccggcgggttctacccttccggcgggtggtcgactcggaccgatg

SEQ ID NO: 14657 - DNA, 203 bp, synthetic construct
  source 1..203: mol_type = other DNA
ggcgcgccagtcctagtgcttttcctgacacaactgtgttcactagcaacctcaaacagacaccatggccggcgggtctcctgaggccggcgggtccgttactgccctgtggggcaaggtgaacgtggatgaagttggtgccggcgggttgggcaggcccggcgggttctacccttccggcgggtggtcgactcggaccgatg

SEQ ID NO: 14658 - DNA, 203 bp, synthetic construct
  source 1..203: mol_type = other DNA
ggcgcgccagtcctgtaagcaccactgacacaactgtgttcactagcaacctcaaacagacaccatggccggcgggtctcctgaggccggcgggtccgttactgccctgtggggcaaggtgaacgtggatgaagttggtgccggcgggttgggcaggcccggcgggttctacccttggacccagaggtcgactcggaccgatg

SEQ ID NO: 14659 - DNA, 203 bp, synthetic construct
  source 1..203: mol_type = other DNA
ggcgcgccagtccttaggttagttctgacacaactgtgttcactagcaacctcaaacagacaccatggccggcgggtctcctgaggccggcgggtccgttactgccctgtggggcaaggtgaccggcgggtaagttggtgccggcgggttgggcaggctgctggtggtctacccttccggcgggtggtcgactcggaccgatg

SEQ ID NO: 14660 - DNA, 203 bp, synthetic construct
  source 1..203: mol_type = other DNA
ggcgcgccagtcctatactgaggactgacacaactgtgttcactagcaacctcaaacagacaccatggccggcgggtctcctgaggccggcgggtccgttactgccctgtggggcaaggtgaccggcgggtaagttggtgccggcgggttgggcaggctgctggtggtctacccttggacccagaggtcgactcggaccgatg

SEQ ID NO: 14661 - DNA, 203 bp, synthetic construct
  source 1..203: mol_type = other DNA
ggcgcgccagtcctaatcacttagctgacacaactgtgttcactagcaacctcaaacagacaccatggccggcgggtctcctgaggccggcgggtccgttactgccggcgggtgcaaggtgaacgtggatgaagttggtgccggcgggttgggcaggcccggcgggttctacccttggacccagaggtcgactcggaccgatg

SEQ ID NO: 14662 - DNA, 203 bp, synthetic construct
  source 1..203: mol_type = other DNA
ggcgcgccagtcctcacgcctagcctgacacaactgtgttcactagcaacctcaaacagacaccatggccggcgggtctcctgaggccggcgggtccgttactgccggcgggtgcaaggtgaacgtggatgaagttggtggtgaggccctgggcaggctgctggtggtctacccttccggcgggtggtcgactcggaccgatg

SEQ ID NO: 14663 - DNA, 203 bp, synthetic construct
  source 1..203: mol_type = other DNA
ggcgcgccagtccttactgagcgactgacacaactgtgttcactagcaacctcaaacagacaccatggccggcgggtctcctgaggccggcgggtccgttactgccggcgggtgcaaggtgaccggcgggtaagttggtgccggcgggttgggcaggcccggcgggttctacccttccggcgggtggtcgactcggaccgatg

SEQ ID NO: 14664 - DNA, 203 bp, synthetic construct
  source 1..203: mol_type = other DNA
ggcgcgccagtcctgatcaaccgtctgacacaactgtgttcactagcaacctcaaacagacaccatggccggcgggtctcctgaggccggcgggtccgttactgccggcgggtgcaaggtgaccggcgggtaagttggtgccggcgggttgggcaggcccggcgggttctacccttccggcgggtggtcgactcggaccgatg

SEQ ID NO: 14665 - DNA, 203 bp, synthetic construct
  source 1..203: mol_type = other DNA
ggcgcgccagtccttctgcaacacctgacacaactgtgttcactagcaacctcaaacagacaccatggccggcgggtctcctgaggccggcgggtccgttactgccggcgggtgcaaggtgaccggcgggtaagttggtgccggcgggttgggcaggcccggcgggttctacccttccggcgggtggtcgactcggaccgatg

SEQ ID NO: 14666 - DNA, 203 bp, synthetic construct
  source 1..203: mol_type = other DNA
ggcgcgccagtcctcctgtaaaccctgacacaactgtgttcactagcaacctcaaacagacaccatggccggcgggtctcctgaggccggcgggtccgttactgccggcgggtgcaaggtgaccggcgggtaagttggtgccggcgggttgggcaggcccggcgggttctacccttccggcgggtggtcgactcggaccgatg

SEQ ID NO: 14667 - DNA, 203 bp, synthetic construct
  source 1..203: mol_type = other DNA
ggcgcgccagtcctcaagtgaaccctgacacaactgtgttcactagcaacctcaaacagacaccatggccggcgggtctcctgaggccggcgggtccgttactgccggcgggtgcaaggtgaccggcgggtaagttggtggtgaggccctgggcaggcccggcgggttctacccttccggcgggtggtcgactcggaccgatg

SEQ ID NO: 14668 - DNA, 203 bp, synthetic construct
  source 1..203: mol_type = other DNA
ggcgcgccagtcctggctaaccttctgacacaactgtgttcactagcaacctcaaacagacaccatggcgtcaattcctttagaggagaagtctgccgttactgccctgtggggcaaggtgaacgtggatgaagttggtgcgtcaattcctttaaggctgctggtggtctacccttggacccagaggtcgactcggaccgatg

SEQ ID NO: 14669 - DNA, 203 bp, synthetic construct
  source 1..203: mol_type = other DNA
ggcgcgccagtcctaagagtgtccctgacacaactgtgttcactagcaacctcaaacagacaccatggcgtcaattcctttagaggagaagtctgccgttactgcgtcaattcctttagtgaacgtggatgaagttggtgcgtcaattcctttaaggctgctggtggtctacccttggacccagaggtcgactcggaccgatg

SEQ ID NO: 14670 - DNA, 203 bp, synthetic construct
  source 1..203: mol_type = other DNA
ggcgcgccagtccttgaggtaaccctgacacaactgtgttcactagcaacctcaaacagacaccatggcgtcaattcctttagaggagaagtctgccgttactgcgtcaattcctttagtgacgtcaattcctttaggtgcgtcaattcctttaaggctgctggtggtctacccttggacccagaggtcgactcggaccgatg

SEQ ID NO: 14671 - DNA, 203 bp, synthetic construct
  source 1..203: mol_type = other DNA
ggcgcgccagtcctggcaacagatctgacacaactgtgttcactagcaacctcaaacagacaccatggcgtcaattcctttagaggagaagtctgccgttactgcgtcaattcctttagtgacgtcaattcctttaggtggtgaggccctgggcaggctgctggtggtctacccttggacccagaggtcgactcggaccgatg

SEQ ID NO: 14672 - DNA, 203 bp, synthetic construct
  source 1..203: mol_type = other DNA
ggcgcgccagtcctggtcaaagctctgacacaactgtgttcactagcaacctcaaacagacaccatggcgtcaattcctttagaggcgtcaattcctttaactgccctgtggggcaaggtgacgtcaattcctttaggtgcgtcaattcctttaaggccgtcaattcctttaccttggacccagaggtcgactcggaccgatg

SEQ ID NO: 14673 - DNA, 203 bp, synthetic construct
  source 1..203: mol_type = other DNA
ggcgcgccagtcctggttcttgacctgacacaactgtgttcactagcaacctcaaacagacaccatggcgtcaattcctttagaggcgtcaattcctttaactgccctgtggggcaaggtgacgtcaattcctttaggtggtgaggccctgggcaggccgtcaattcctttaccttggacccagaggtcgactcggaccgatg

SEQ ID NO: 14674 - DNA, 203 bp, synthetic construct
  source 1..203: mol_type = other DNA
ggcgcgccagtcctggtttgcagtctgacacaactgtgttcactagcaacctcaaacagacaccatggcgtcaattcctttagaggcgtcaattcctttaactgcgtcaattcctttagtgacgtcaattcctttaggtgcgtcaattcctttaaggccgtcaattcctttaccttggacccagaggtcgactcggaccgatg

SEQ ID NO: 14675 - DNA, 203 bp, synthetic construct
  source 1..203: mol_type = other DNA
ggcgcgccagtcctggttaaccagctgacacaactgtgttcactagcaacctcaaacagacaccatggggaaccataactgatttaatgagccattcgcagtttcactgtaccggccgtgcgtactcagacatgcatggcttaatctttgagacaagcatctggtggtctacccttggacccagaggtcgactcggaccgatg

SEQ ID NO: 14676 - DNA, 203 bp, synthetic construct
  source 1..203: mol_type = other DNA
ggcgcgccagtcctggctaaaggtctgacacaactgtgttcactagcaacctcaaacagacaccatggggtgcccttccgtcaattcctttaagtttcagctttgcaaccatactccccccggaacccaaagactttggtttcccggaagctgcccggcgctggtggtctacccttggacccagaggtcgactcggaccgatg

SEQ ID NO: 14677 - DNA, 203 bp, synthetic construct
  source 1..203: mol_type = other DNA
ggcgcgccagtcctggtttctgagctgacacaactgtgttcactagcaacctcaaacagacaccatggtaaattaagccgcaggctccactcctggtggtgcccttccgtcaattcctttaagtttcagctttgcaaccatactccccccggaacccaagctggtggtctacccttggacccagaggtcgactcggaccgatg

SEQ ID NO: 14678 - DNA, 203 bp, synthetic construct
  source 1..203: mol_type = other DNA
ggcgcgccagtcctggacaaactgctgacacaactgtgttcactagcaacctcaaacagacaccatggtactcccgactcctgaggagaagtctgccgttactgccctgtggggcaaggtgaacgtggatgaagttggtggtgaggccctgggcaggctactcccggtctaccctttactcccgaggtcgactcggaccgatg

SEQ ID NO: 14679 - DNA, 203 bp, synthetic construct
  source 1..203: mol_type = other DNA
ggcgcgccagtcctggactgtcttctgacacaactgtgttcactagcaacctcaaacagacaccatggtactcccgactcctgaggagaagtctgccgttactgccctgtggggcaaggtgaacgtggatgaagttggtgtactccccctgggcaggctactcccggtctacccttggacccagaggtcgactcggaccgatg

SEQ ID NO: 14680 - DNA, 203 bp, synthetic construct
  source 1..203: mol_type = other DNA
ggcgcgccagtcctagtcgataccctgacacaactgtgttcactagcaacctcaaacagacaccatggtactcccgactcctgaggagaagtctgccgttactgccctgtggggcaaggtgatactccctgaagttggtggtgaggccctgggcaggctgctggtggtctaccctttactcccgaggtcgactcggaccgatg

SEQ ID NO: 14681 - DNA, 203 bp, synthetic construct
  source 1..203: mol_type = other DNA
ggcgcgccagtcctgtagtcgatactgacacaactgtgttcactagcaacctcaaacagacaccatggtactcccgactcctgaggagaagtctgccgttactgccctgtggggcaaggtgatactccctgaagttggtgtactccccctgggcaggctgctggtggtctacccttggacccagaggtcgactcggaccgatg

SEQ ID NO: 14682 - DNA, 203 bp, synthetic construct
  source 1..203: mol_type = other DNA
ggcgcgccagtccttcgactgtcactgacacaactgtgttcactagcaacctcaaacagacaccatggtactcccgactcctgaggagaagtctgccgttactgtactcccgggcaaggtgaacgtggatgaagttggtggtgaggccctgggcaggctactcccggtctacccttggacccagaggtcgactcggaccgatg

SEQ ID NO: 14683 - DNA, 203 bp, synthetic construct
  source 1..203: mol_type = other DNA
ggcgcgccagtcctagcgttttgcctgacacaactgtgttcactagcaacctcaaacagacaccatggtactcccgactcctgaggagaagtctgccgttactgtactcccgggcaaggtgaacgtggatgaagttggtgtactccccctgggcaggctactcccggtctaccctttactcccgaggtcgactcggaccgatg

SEQ ID NO: 14684 - DNA, 203 bp, synthetic construct
  source 1..203: mol_type = other DNA
ggcgcgccagtcctaacagcgtttctgacacaactgtgttcactagcaacctcaaacagacaccatggtactcccgactcctgaggagaagtctgccgttactgtactcccgggcaaggtgaacgtggatgaagttggtgtactccccctgggcaggctgctggtggtctaccctttactcccgaggtcgactcggaccgatg

SEQ ID NO: 14685 - DNA, 203 bp, synthetic construct
  source 1..203: mol_type = other DNA
ggcgcgccagtcctaaacgctcgtctgacacaactgtgttcactagcaacctcaaacagacaccatggtactcccgactcctgaggagaagtctgccgttactgtactcccgggcaaggtgatactccctgaagttggtggtgaggccctgggcaggctgctggtggtctaccctttactcccgaggtcgactcggaccgatg

SEQ ID NO: 14686 - DNA, 203 bp, synthetic construct
  source 1..203: mol_type = other DNA
ggcgcgccagtcctgtgggtctacctgacacaactgtgttcactagcaacctcaaacagacaccatggtactcccgactcctgaggagaagtctgccgttactgtactcccgggcaaggtgatactccctgaagttggtgtactccccctgggcaggctactcccggtctacccttggacccagaggtcgactcggaccgatg

SEQ ID NO: 14687 - DNA, 203 bp, synthetic construct
  source 1..203: mol_type = other DNA
ggcgcgccagtcctggttgcaccactgacacaactgtgttcactagcaacctcaaacagacaccatggtactcccgactcctgaggtactccctgccgttactgccctgtggggcaaggtgaacgtggatgaagttggtggtgaggccctgggcaggctactcccggtctaccctttactcccgaggtcgactcggaccgatg

SEQ ID NO: 14688 - DNA, 203 bp, synthetic construct
  source 1..203: mol_type = other DNA
ggcgcgccagtcctgaggtacacactgacacaactgtgttcactagcaacctcaaacagacaccatggtactcccgactcctgaggtactccctgccgttactgccctgtggggcaaggtgaacgtggatgaagttggtgtactccccctgggcaggctgctggtggtctacccttggacccagaggtcgactcggaccgatg

SEQ ID NO: 14689 - DNA, 203 bp, synthetic construct
  source 1..203: mol_type = other DNA
ggcgcgccagtcctgctcaaaattctgacacaactgtgttcactagcaacctcaaacagacaccatggtactcccgactcctgaggtactccctgccgttactgccctgtggggcaaggtgatactccctgaagttggtggtgaggccctgggcaggctactcccggtctaccctttactcccgaggtcgactcggaccgatg

SEQ ID NO: 14690 - DNA, 203 bp, synthetic construct
  source 1..203: mol_type = other DNA
ggcgcgccagtcctccaccaaattctgacacaactgtgttcactagcaacctcaaacagacaccatggtactcccgactcctgaggtactccctgccgttactgccctgtggggcaaggtgatactccctgaagttggtggtgaggccctgggcaggctgctggtggtctaccctttactcccgaggtcgactcggaccgatg

SEQ ID NO: 14691 - DNA, 203 bp, synthetic construct
  source 1..203: mol_type = other DNA
ggcgcgccagtccttgtagaaattctgacacaactgtgttcactagcaacctcaaacagacaccatggtactcccgactcctgaggtactccctgccgttactgccctgtggggcaaggtgatactccctgaagttggtgtactccccctgggcaggctactcccggtctaccctttactcccgaggtcgactcggaccgatg

SEQ ID NO: 14692 - DNA, 203 bp, synthetic construct
  source 1..203: mol_type = other DNA
ggcgcgccagtccttagaacttgcctgacacaactgtgttcactagcaacctcaaacagacaccatggtactcccgactcctgaggtactccctgccgttactgtactcccgggcaaggtgatactccctgaagttggtgtactccccctgggcaggctgctggtggtctaccctttactcccgaggtcgactcggaccgatg

SEQ ID NO: 14693 - DNA, 203 bp, synthetic construct
  source 1..203: mol_type = other DNA
ggcgcgccagtcctctagaacttcctgacacaactgtgttcactagcaacctcaaacagacaccatggtatcgctccaccaactaagaacggccatgcaccaccacccacggaatcgagaaagagctatcaatctgtcaatcctgtccgtgtccgggccgctggtggtctacccttggacccagaggtcgactcggaccgatg

SEQ ID NO: 14694 - DNA, 203 bp, synthetic construct
  source 1..203: mol_type = other DNA
ggcgcgccagtcctaatctgacgtctgacacaactgtgttcactagcaacctcaaacagacaccatggtcacggaatcgagaaaggagaagtctgccgttactgccctgtggggcaaggtgaacgtggatgaagttggtggtgaggccctgggcaggctgctggtggtctacccttggacctactccccgactcggaccgatg

SEQ ID NO: 14695 - DNA, 203 bp, synthetic construct
  source 1..203: mol_type = other DNA
ggcgcgccagtccttgctcggtgactgacacaactgtgttcactagcaacctcaaacagacaccatggtcgtcaattcctttaaggagaagtctgccgttactgccctgtggggcaaggtgaacgtggatgaagttggtggtgaggccctgggcaggctgctggtggtctacccttggacccagaggtcgactcggaccgatg

SEQ ID NO: 14696 - DNA, 203 bp, synthetic construct
  source 1..203: mol_type = other DNA
ggcgcgccagtcctgacaacattcctgacacaactgtgttcactagcaacctcaaacagacaccatggtgcacacggaatcgagaaagaagtctgccgttactgccctgtggggcaaggtgaacgtggatgaagttggtggtgaggccctgggcaggctgctggtggtctacccttgttcttggcaaacgactcggaccgatg

SEQ ID NO: 14697 - DNA, 203 bp, synthetic construct
  source 1..203: mol_type = other DNA
ggcgcgccagtcctgtgtaccatgctgacacaactgtgttcactagcaacctcaaacagacaccatggtgcacgtcaattcctttaagaagtctgccgttactgccctgtggggcaaggtgaacgtggatgaagttggtggtgaggccctgggcaggctgctggtggtctacccttgttcttggcaaacgactcggaccgatg

SEQ ID NO: 14698 - DNA, 203 bp, synthetic construct
  source 1..203: mol_type = other DNA
ggcgcgccagtcctgcacgatcgtctgacacaactgtgttcactagcaacctcaaacagacaccatggtgcatcaccggccgtaggagaagtctgccgttactgccctgtggggcaaggtgaacgtggatgaagttggtggtgaggccctgggcaggctgctggtggtctacccttggacccagaggtcgactcggaccgatg

SEQ ID NO: 14699 - DNA, 203 bp, synthetic construct
  source 1..203: mol_type = other DNA
ggcgcgccagtcctatcacgatacctgacacaactgtgttcactagcaacctcaaacagacaccatggtgcatcaccggccgtaggagaagtctgccgttactgccctgtggggcaaggtgaacgtggatgaagttggtggtgaggccctgggcaggctgctggtggtctacccttggacctactccccgactcggaccgatg

SEQ ID NO: 14700 - DNA, 203 bp, synthetic construct
  source 1..203: mol_type = other DNA
ggcgcgccagtcctgacgtcactactgacacaactgtgttcactagcaacctcaaacagacaccatggtgcatcataactgatttaatgagccattcgcagtttcactgtaccggccgtgcgtactcagacatgcatggcttaatctttgagacaggctgctggtggtctacccttggacccagaggtcgactcggaccgatg

SEQ ID NO: 14701 - DNA, 203 bp, synthetic construct
  source 1..203: mol_type = other DNA
ggcgcgccagtcctactctcgtgtctgacacaactgtgttcactagcaacctcaaacagacaccatggtgcatcccggcgggtaggagaagtctgccgttactgccctgtggggcaaggtgaacgtggatgaagttggtggtgaggccctgggcaggctgctggtggtctaccccacggaatcgagaacgactcggaccgatg

SEQ ID NO: 14702 - DNA, 203 bp, synthetic construct
  source 1..203: mol_type = other DNA
ggcgcgccagtcctcaactcgtgactgacacaactgtgttcactagcaacctcaaacagacaccatggtgcatcccggcgggtaggagaagtctgccgttactgccctgtggggcaaggtgaacgtggatgaagttggtggtgaggccctgggcaggctgctggtggtctaccccgtcaattcctttacgactcggaccgatg

SEQ ID NO: 14703 - DNA, 203 bp, synthetic construct
  source 1..203: mol_type = other DNA
ggcgcgccagtccttgagctcgtgctgacacaactgtgttcactagcaacctcaaacagacaccatggtgcatccgtcaattcctttaaagtctgccgttactgccctgtggggcaaggtgaacgtggatgaagttggtggtgaggccctgggcaggctgctggtggtctacccttggaaccggccgtcgactcggaccgatg

SEQ ID NO: 14704 - DNA, 203 bp, synthetic construct
  source 1..203: mol_type = other DNA
ggcgcgccagtcctcacgagctagctgacacaactgtgttcactagcaacctcaaacagacaccatggtgcatccgtcaattcctttaaagtctgccgttactgccctgtggggcaaggtgaacgtggatgaagttggtggtgaggccctgggcaggctgctggtggtctacccttggaccggcgggtcgactcggaccgatg

SEQ ID NO: 14705 - DNA, 203 bp, synthetic construct
  source 1..203: mol_type = other DNA
ggcgcgccagtccttaagcacgagctgacacaactgtgttcactagcaacctcaaacagacaccatggtgcatccttccgtcaattcctttaagtttcagctttgcaaccatactccccccggaacccaaagactttggtttcccggaagctgcaggctgctggtggtctacccttggacccagaggtcgactcggaccgatg

SEQ ID NO: 14706 - DNA, 203 bp, synthetic construct
  source 1..203: mol_type = other DNA
ggcgcgccagtcctcacgagtttcctgacacaactgtgttcactagcaacctcaaacagacaccatggtgcatccttccgtcaattcctttaagtttcagctttgcaaccatactccccccggaacccaaagactttggtttcccggaagctgccggctgctggtggtctacccttggacccagaggtcgactcggaccgatg

SEQ ID NO: 14707 - DNA, 203 bp, synthetic construct
  source 1..203: mol_type = other DNA
ggcgcgccagtccttcacgagtatctgacacaactgtgttcactagcaacctcaaacagacaccatggtgcatctaacctccgactttcgttcttgattaatgaaaacattcttggcaaatgctttcgctctggtccgtcttgcgccggtccacaggctgctggtggtctacccttggacccagaggtcgactcggaccgatg

SEQ ID NO: 14708 - DNA, 203 bp, synthetic construct
  source 1..203: mol_type = other DNA
ggcgcgccagtccttctgttgagcctgacacaactgtgttcactagcaacctcaaacagacaccatggtgcatctagccgcaggctccactcctggtggtgcccttccgtcaattcctttaagtttcagctttgcaaccatactccccccggacaggctgctggtggtctacccttggacccagaggtcgactcggaccgatg

SEQ ID NO: 14709 - DNA, 203 bp, synthetic construct
  source 1..203: mol_type = other DNA
ggcgcgccagtccttatgcacggtctgacacaactgtgttcactagcaacctcaaacagacaccatggtgcatctccaccaactaagaacggccatgcaccaccacccacggaatcgagaaagagctatcaatctgtcaatcctgtccgtgtccgggctgctggtggtctacccttggacccagaggtcgactcggaccgatg

SEQ ID NO: 14710 - DNA, 203 bp, synthetic construct
  source 1..203: mol_type = other DNA
ggcgcgccagtcctaaggctcggtctgacacaactgtgttcactagcaacctcaaacagacaccatggtgcatctgacccaactaagaacggccatgcaccaccacccacggaatcgagaaagagctatcaatctgtcaatcctgtccgtgggcaggctgctggtggtctacccttggacccagaggtcgactcggaccgatg

SEQ ID NO: 14711 - DNA, 203 bp, synthetic construct
  source 1..203: mol_type = other DNA
ggcgcgccagtcctacggtctaaactgacacaactgtgttcactagcaacctcaaacagacaccatggtgcatctgaccggcgggtagaagtctgccgttactgccctgtggggcaaggtgaacgtggatgaagttggtggtgaggccctgggcaggctgctggtggtctacccttgttcttggcaaacgactcggaccgatg

SEQ ID NO: 14712 - DNA, 203 bp, synthetic construct
  source 1..203: mol_type = other DNA
ggcgcgccagtcctctttagagtactgacacaactgtgttcactagcaacctcaaacagacaccatggtgcatctgacctccgactttcgttcttgattaatgaaaacattcttggcaaatgctttcgctctggtccgtcttgcgccggtcggcaggctgctggtggtctacccttggacccagaggtcgactcggaccgatg

SEQ ID NO: 14713 - DNA, 203 bp, synthetic construct
  source 1..203: mol_type = other DNA
ggcgcgccagtcctagtctaaaggctgacacaactgtgttcactagcaacctcaaacagacaccatggtgcatctgacctgatttaatgagccattcgcagtttcactgtaccggccgtgcgtactcagacatgcatggcttaatctttggggcaggctgctggtggtctacccttggacccagaggtcgactcggaccgatg

SEQ ID NO: 14714 - DNA, 203 bp, synthetic construct
  source 1..203: mol_type = other DNA
ggcgcgccagtcctataccatgttctgacacaactgtgttcactagcaacctcaaacagacaccatggtgcatctgactaacccaaagactttggtttcccggaagctgcccggcgggtcatgggaataacgccgccgcatcgccggtctgggcaggctgctggtggtctacccttggacccagaggtcgactcggaccgatg

SEQ ID NO: 14715 - DNA, 203 bp, synthetic construct
  source 1..203: mol_type = other DNA
ggcgcgccagtccttccagaaacgctgacacaactgtgttcactagcaacctcaaacagacaccatggtgcatctgactaccggccgtaagtctgccgttactgccctgtggggcaaggtgaacgtggatgaagttggtggtgaggccctgggcaggctgctggtggtctacccttggaaccggccgtcgactcggaccgatg

SEQ ID NO: 14716 - DNA, 203 bp, synthetic construct
  source 1..203: mol_type = other DNA
ggcgcgccagtcctccagtgcacgctgacacaactgtgttcactagcaacctcaaacagacaccatggtgcatctgactccaccggccgtgtctgccgttactgccctgtggggcaaggtgaacgtggatgaagttggtggtgaggccctgggcaggctgctggtggtctaccccgtcaattcctttacgactcggaccgatg

SEQ ID NO: 14717 - DNA, 203 bp, synthetic construct
  source 1..203: mol_type = other DNA
ggcgcgccagtcctctcagagacgctgacacaactgtgttcactagcaacctcaaacagacaccatggtgcatctgactccaccggccgtgtctgccgttactgccctgtggggcaaggtgaacgtggatgaagttggtggtgaggccctgggcaggctgctggtggtctacccttggacctactccccgactcggaccgatg

SEQ ID NO: 14718 - DNA, 203 bp, synthetic construct
  source 1..203: mol_type = other DNA
ggcgcgccagtcctcgttagtttactgacacaactgtgttcactagcaacctcaaacagacaccatggtgcatctgactccatttaatgagccattcgcagtttcactgtaccggccgtgcgtactcagacatgcatggcttaatctcctgggcaggctgctggtggtctacccttggacccagaggtcgactcggaccgatg

SEQ ID NO: 14719 - DNA, 203 bp, synthetic construct
  source 1..203: mol_type = other DNA
ggcgcgccagtcctcgtcgtctacctgacacaactgtgttcactagcaacctcaaacagacaccatggtgcatctgactcccacggaatcgagaaccgttactgccctgtggggcaaggtgaacgtggatgaagttggtggtgaggccctgggcaggctgctggtggtctacccttggaaccggccgtcgactcggaccgatg

SEQ ID NO: 14720 - DNA, 203 bp, synthetic construct
  source 1..203: mol_type = other DNA
ggcgcgccagtcctcgacaagacgctgacacaactgtgttcactagcaacctcaaacagacaccatggtgcatctgactcccacggaatcgagaaccgttactgccctgtggggcaaggtgaacgtggatgaagttggtggtgaggccctgggcaggctgctggtggtctacccttggaccggcgggtcgactcggaccgatg

SEQ ID NO: 14721 - DNA, 203 bp, synthetic construct
  source 1..203: mol_type = other DNA
ggcgcgccagtcctacgcctgacgctgacacaactgtgttcactagcaacctcaaacagacaccatggtgcatctgactcccccaaagactttggtttcccggaagctgcccggcgggtcatgggaataacgccgccgcatcgccggcctgggcaggctgctggtggtctacccttggacccagaggtcgactcggaccgatg

SEQ ID NO: 14722 - DNA, 203 bp, synthetic construct
  source 1..203: mol_type = other DNA
ggcgcgccagtcctaatcttaacgctgacacaactgtgttcactagcaacctcaaacagacaccatggtgcatctgactcccgactttcgttcttgattaatgaaaacattcttggcaaatgctttcgctctggtccgtcttgcgcccctgggcaggctgctggtggtctacccttggacccagaggtcgactcggaccgatg

SEQ ID NO: 14723 - DNA, 203 bp, synthetic construct
  source 1..203: mol_type = other DNA
ggcgcgccagtcctgagctttacgctgacacaactgtgttcactagcaacctcaaacagacaccatggtgcatctgactcctactcccaagtctgccgttactgccctgtggggcaaggtgaacgtggatgaagttggtggtgaggccctgggcaggctgctggtggtctacccttggaccggcgggtcgactcggaccgatg

SEQ ID NO: 14724 - DNA, 203 bp, synthetic construct
  source 1..203: mol_type = other DNA
ggcgcgccagtcctcgtgctcacgctgacacaactgtgttcactagcaacctcaaacagacaccatggtgcatctgactcctgaccggcgggttgccgttactgccctgtggggcaaggtgaacgtggatgaagttggtggtgaggccctgggcaggctgctggtggtctacccttgttcttggcaaacgactcggaccgatg

SEQ ID NO: 14725 - DNA, 203 bp, synthetic construct
  source 1..203: mol_type = other DNA
ggcgcgccagtcctcgtcagcacgctgacacaactgtgttcactagcaacctcaaacagacaccatggtgcatctgactcctgactccactcctggtggtgcccttccgtcaattcctttaagtttcagctttgcaaccatactggccctgggcaggctgctggtggtctacccttggacccagaggtcgactcggaccgatg

SEQ ID NO: 14726 - DNA, 203 bp, synthetic construct
  source 1..203: mol_type = other DNA
ggcgcgccagtcctgaatcagacgctgacacaactgtgttcactagcaacctcaaacagacaccatggtgcatctgactcctgagaatgagccattcgcagtttcactgtaccggccgtgcgtactcagacatgcatggcttaaggccctgggcaggctgctggtggtctacccttggacccagaggtcgactcggaccgatg

SEQ ID NO: 14727 - DNA, 203 bp, synthetic construct
  source 1..203: mol_type = other DNA
ggcgcgccagtcctcactctaacgctgacacaactgtgttcactagcaacctcaaacagacaccatggtgcatctgactcctgagagaacggccatgcaccaccacccacggaatcgagaaagagctatcaatctgtcaatccaggccctgggcaggctgctggtggtctacccttggacccagaggtcgactcggaccgatg

SEQ ID NO: 14728 - DNA, 203 bp, synthetic construct
  source 1..203: mol_type = other DNA
ggcgcgccagtcctcgtacacattctgacacaactgtgttcactagcaacctcaaacagacaccatggtgcatctgactcctgaggaaacggccatgcaccaccacccacggaatcgagaaagagctatcaatctgtcaattgaggccctgggcaggctgctggtggtctacccttggacccagaggtcgactcggaccgatg

SEQ ID NO: 14729 - DNA, 203 bp, synthetic construct
  source 1..203: mol_type = other DNA
ggcgcgccagtcctgttgtgaacgctgacacaactgtgttcactagcaacctcaaacagacaccatggtgcatctgactcctgaggaacggaatcgagaaactgaacggaatcgagaagtgaaacggaatcgagaaggtgaacggaatcgagaaaggcaacggaatcgagaaccttggacccagaggtcgactcggaccgatg

SEQ ID NO: 14730 - DNA, 203 bp, synthetic construct
  source 1..203: mol_type = other DNA
ggcgcgccagtcctcgtcttctggctgacacaactgtgttcactagcaacctcaaacagacaccatggtgcatctgactcctgaggaactccctgccgttactgaactcccgggcaaggtgaaactccctgaagttggtgaactccccctgggcaggcaactcccggtctacccttggacccagaggtcgactcggaccgatg

SEQ ID NO: 14731 - DNA, 203 bp, synthetic construct
  source 1..203: mol_type = other DNA
ggcgcgccagtcctcgtcaccttcctgacacaactgtgttcactagcaacctcaaacagacaccatggtgcatctgactcctgaggaccgagcgtccgttactgaccgagcgtgcaaggtgaaccgagcgtaagttggtgaccgagcgttgggcaggcaccgagcgttctacccttggacccagaggtcgactcggaccgatg

SEQ ID NO: 14732 - DNA, 203 bp, synthetic construct
  source 1..203: mol_type = other DNA
ggcgcgccagtcctggttagtacgctgacacaactgtgttcactagcaacctcaaacagacaccatggtgcatctgactcctgaggaccgatcgtccgttactgaccgatcgtgcaaggtgaaccgatcgtaagttggtgaccgatcgttgggcaggcaccgatcgttctacccttggacccagaggtcgactcggaccgatg

SEQ ID NO: 14733 - DNA, 203 bp, synthetic construct
  source 1..203: mol_type = other DNA
ggcgcgccagtcctcgttaactcgctgacacaactgtgttcactagcaacctcaaacagacaccatggtgcatctgactcctgaggaccgcacgtccgttactgaccgcacgtgcaaggtgaaccgcacgtaagttggtgaccgcacgttgggcaggcaccgcacgttctacccttggacccagaggtcgactcggaccgatg

SEQ ID NO: 14734 - DNA, 203 bp, synthetic construct
  source 1..203: mol_type = other DNA
ggcgcgccagtccttacccaaacgctgacacaactgtgttcactagcaacctcaaacagacaccatggtgcatctgactcctgaggaccgcccgtccgttactgaccgcccgtgcaaggtgaaccgcccgtaagttggtgaccgcccgttgggcaggcaccgcccgttctacccttggacccagaggtcgactcggaccgatg

SEQ ID NO: 14735 - DNA, 203 bp, synthetic construct
  source 1..203: mol_type = other DNA
ggcgcgccagtcctcgtttgaacactgacacaactgtgttcactagcaacctcaaacagacaccatggtgcatctgactcctgaggaccgctcgtccgttactgaccgctcgtgcaaggtgaaccgctcgtaagttggtgaccgctcgttgggcaggcaccgctcgttctacccttggacccagaggtcgactcggaccgatg

SEQ ID NO: 14736 - DNA, 203 bp, synthetic construct
  source 1..203: mol_type = other DNA
ggcgcgccagtcctcgtagtcgagctgacacaactgtgttcactagcaacctcaaacagacaccatggtgcatctgactcctgaggaccggacgtccgttactgaccggacgtgcaaggtgaaccggacgtaagttggtgaccggacgttgggcaggcaccggacgttctacccttggacccagaggtcgactcggaccgatg

SEQ ID NO: 14737 - DNA, 203 bp, synthetic construct
  source 1..203: mol_type = other DNA
ggcgcgccagtccttggtagaaccctgacacaactgtgttcactagcaacctcaaacagacaccatggtgcatctgactcctgaggaccggccaaccgttactgaccggccaagcaaggtgaaccggccaaaagttggtgaccggccaatgggcaggcaccggccaatctacccttggacccagaggtcgactcggaccgatg

SEQ ID NO: 14738 - DNA, 203 bp, synthetic construct
  source 1..203: mol_type = other DNA
ggcgcgccagtcctgaatacagcgctgacacaactgtgttcactagcaacctcaaacagacaccatggtgcatctgactcctgaggaccggccacccgttactgaccggccacgcaaggtgaaccggccacaagttggtgaccggccactgggcaggcaccggccactctacccttggacccagaggtcgactcggaccgatg

SEQ ID NO: 14739 - DNA, 203 bp, synthetic construct
  source 1..203: mol_type = other DNA
ggcgcgccagtccttcttacagcgctgacacaactgtgttcactagcaacctcaaacagacaccatggtgcatctgactcctgaggaccggccagccgttactgaccggccaggcaaggtgaaccggccagaagttggtgaccggccagtgggcaggcaccggccagtctacccttggacccagaggtcgactcggaccgatg

SEQ ID NO: 14740 - DNA, 203 bp, synthetic construct
  source 1..203: mol_type = other DNA
ggcgcgccagtcctgcaccaagcgctgacacaactgtgttcactagcaacctcaaacagacaccatggtgcatctgactcctgaggaccggccatccgttactgaccggccatgcaaggtgaaccggccataagttggtgaccggccattgggcaggcaccggccattctacccttggacccagaggtcgactcggaccgatg

SEQ ID NO: 14741 - DNA, 203 bp, synthetic construct
  source 1..203: mol_type = other DNA
ggcgcgccagtccttgggtctgcgctgacacaactgtgttcactagcaacctcaaacagacaccatggtgcatctgactcctgaggaccggccccccgttactgaccggccccgcaaggtgaaccggccccaagttggtgaccggcccctgggcaggcaccggcccctctacccttggacccagaggtcgactcggaccgatg

SEQ ID NO: 14742 - DNA, 203 bp, synthetic construct
  source 1..203: mol_type = other DNA
ggcgcgccagtcctcctacaagcgctgacacaactgtgttcactagcaacctcaaacagacaccatggtgcatctgactcctgaggaccggccctccgttactgaccggccctgcaaggtgaaccggccctaagttggtgaccggcccttgggcaggcaccggcccttctacccttggacccagaggtcgactcggaccgatg

SEQ ID NO: 14743 - DNA, 203 bp, synthetic construct
  source 1..203: mol_type = other DNA
ggcgcgccagtcctctgtgaggcgctgacacaactgtgttcactagcaacctcaaacagacaccatggtgcatctgactcctgaggaccggccggccgttactgaccggccgggcaaggtgaaccggccggaagttggtgaccggccggtgggcaggcaccggccggtctacccttggacccagaggtcgactcggaccgatg

SEQ ID NO: 14744 - DNA, 203 bp, synthetic construct
  source 1..203: mol_type = other DNA
ggcgcgccagtcctacggtaagcgctgacacaactgtgttcactagcaacctcaaacagacaccatggtgcatctgactcctgaggaccggccgtccgttactgaccggccgtgcaaggtgaaccggccgtaagttggtgaccggccgttgggcaggcaccggccgttctacccttaccggccgtggtcgactcggaccgatg

SEQ ID NO: 14745 - DNA, 203 bp, synthetic construct
  source 1..203: mol_type = other DNA
ggcgcgccagtccttaaactagcgctgacacaactgtgttcactagcaacctcaaacagacaccatggtgcatctgactcctgaggaccggccgtccgttactgaccggccgtgcaaggtgaaccggccgtaagttggtggtgaggccctgggcaggcaccggccgttctacccttggacccagaggtcgactcggaccgatg

SEQ ID NO: 14746 - DNA, 203 bp, synthetic construct
  source 1..203: mol_type = other DNA
ggcgcgccagtcctactttaggcgctgacacaactgtgttcactagcaacctcaaacagacaccatggtgcatctgactcctgaggaccggccgtccgttactgaccggccgtgcaaggtgaacgtggatgaagttggtgaccggccgttgggcaggcaccggccgttctacccttaccggccgtggtcgactcggaccgatg

SEQ ID NO: 14747 - DNA, 203 bp, synthetic construct
  source 1..203: mol_type = other DNA
ggcgcgccagtcctcaacgttgcgctgacacaactgtgttcactagcaacctcaaacagacaccatggtgcatctgactcctgaggaccggccgtccgttactgaccggccgtgcaaggtgaacgtggatgaagttggtggtgaggccctgggcaggcaccggccgttctacccttaccggccgtggtcgactcggaccgatg

SEQ ID NO: 14748 - DNA, 203 bp, synthetic construct
  source 1..203: mol_type = other DNA
ggcgcgccagtcctgtatgctgcgctgacacaactgtgttcactagcaacctcaaacagacaccatggtgcatctgactcctgaggaccggccgtccgttactgaccggccgtgcaaggtgaacgtggatgaagttggtggtgaggccctgggcaggctgctggtggtctacccttggacccagaggtcgactcggaccgatg

SEQ ID NO: 14749 - DNA, 203 bp, synthetic construct
  source 1..203: mol_type = other DNA
ggcgcgccagtcctgcttgaagcgctgacacaactgtgttcactagcaacctcaaacagacaccatggtgcatctgactcctgaggaccggccgtccgttactgccctgtggggcaaggtgaaccggccgtaagttggtgaccggccgttgggcaggcaccggccgttctacccttaccggccgtggtcgactcggaccgatg

SEQ ID NO: 14750 - DNA, 203 bp, synthetic construct
  source 1..203: mol_type = other DNA
ggcgcgccagtccttggtctagcgctgacacaactgtgttcactagcaacctcaaacagacaccatggtgcatctgactcctgaggaccggccgtccgttactgccctgtggggcaaggtgaaccggccgtaagttggtgaccggccgttgggcaggcaccggccgttctacccttggacccagaggtcgactcggaccgatg

SEQ ID NO: 14751 - DNA, 203 bp, synthetic construct
  source 1..203: mol_type = other DNA
ggcgcgccagtcctcgcattcaggctgacacaactgtgttcactagcaacctcaaacagacaccatggtgcatctgactcctgaggaccggccgtccgttactgccctgtggggcaaggtgaaccggccgtaagttggtgaccggccgttgggcaggctgctggtggtctacccttaccggccgtggtcgactcggaccgatg

SEQ ID NO: 14752 - DNA, 203 bp, synthetic construct
  source 1..203: mol_type = other DNA
ggcgcgccagtcctcgctaggatcctgacacaactgtgttcactagcaacctcaaacagacaccatggtgcatctgactcctgaggaccggccgtccgttactgccctgtggggcaaggtgaacgtggatgaagttggtgaccggccgttgggcaggcaccggccgttctacccttggacccagaggtcgactcggaccgatg

SEQ ID NO: 14753 - DNA, 203 bp, synthetic construct
  source 1..203: mol_type = other DNA
ggcgcgccagtcctcgctgagtatctgacacaactgtgttcactagcaacctcaaacagacaccatggtgcatctgactcctgaggaccggccgtccgttactgccctgtggggcaaggtgaacgtggatgaagttggtgaccggccgttgggcaggctgctggtggtctacccttggacccagaggtcgactcggaccgatg

SEQ ID NO: 14754 - DNA, 203 bp, synthetic construct
  source 1..203: mol_type = other DNA
ggcgcgccagtcctcgcaaagtaactgacacaactgtgttcactagcaacctcaaacagacaccatggtgcatctgactcctgaggaccggccgtccgttactgccctgtggggcaaggtgaacgtggatgaagttggtggtgaggccctgggcaggcaccggccgttctacccttaccggccgtggtcgactcggaccgatg

SEQ ID NO: 14755 - DNA, 203 bp, synthetic construct
  source 1..203: mol_type = other DNA
ggcgcgccagtcctcgcaaagcctctgacacaactgtgttcactagcaacctcaaacagacaccatggtgcatctgactcctgaggaccggccgtccgttactgccctgtggggcaaggtgaacgtggatgaagttggtggtgaggccctgggcaggctgctggtggtctacccttggaccggcgggtcgactcggaccgatg

SEQ ID NO: 14756 - DNA, 203 bp, synthetic construct
  source 1..203: mol_type = other DNA
ggcgcgccagtcctcgcttcatttctgacacaactgtgttcactagcaacctcaaacagacaccatggtgcatctgactcctgaggaccggcctcccgttactgaccggcctcgcaaggtgaaccggcctcaagttggtgaccggcctctgggcaggcaccggcctctctacccttggacccagaggtcgactcggaccgatg

SEQ ID NO: 14757 - DNA, 203 bp, synthetic construct
  source 1..203: mol_type = other DNA
ggcgcgccagtcctcgctacacagctgacacaactgtgttcactagcaacctcaaacagacaccatggtgcatctgactcctgaggaccggcctgccgttactgaccggcctggcaaggtgaaccggcctgaagttggtgaccggcctgtgggcaggcaccggcctgtctacccttggacccagaggtcgactcggaccgatg

SEQ ID NO: 14758 - DNA, 203 bp, synthetic construct
  source 1..203: mol_type = other DNA
ggcgcgccagtcctcgctgaaaggctgacacaactgtgttcactagcaacctcaaacagacaccatggtgcatctgactcctgaggaccggcgatccgttactgaccggcgatgcaaggtgaaccggcgataagttggtgaccggcgattgggcaggcaccggcgattctacccttggacccagaggtcgactcggaccgatg

SEQ ID NO: 14759 - DNA, 203 bp, synthetic construct
  source 1..203: mol_type = other DNA
ggcgcgccagtcctcgcctagtccctgacacaactgtgttcactagcaacctcaaacagacaccatggtgcatctgactcctgaggaccggcgctccgttactgaccggcgctgcaaggtgaaccggcgctaagttggtgaccggcgcttgggcaggcaccggcgcttctacccttggacccagaggtcgactcggaccgatg

SEQ ID NO: 14760 - DNA, 203 bp, synthetic construct
  source 1..203: mol_type = other DNA
ggcgcgccagtcctcgcagtaagtctgacacaactgtgttcactagcaacctcaaacagacaccatggtgcatctgactcctgaggaccggctatccgttactgaccggctatgcaaggtgaaccggctataagttggtgaccggctattgggcaggcaccggctattctacccttggacccagaggtcgactcggaccgatg

SEQ ID NO: 14761 - DNA, 203 bp, synthetic construct
  source 1..203: mol_type = other DNA
ggcgcgccagtcctcgctttgagtctgacacaactgtgttcactagcaacctcaaacagacaccatggtgcatctgactcctgaggaccggctctccgttactgaccggctctgcaaggtgaaccggctctaagttggtgaccggctcttgggcaggcaccggctcttctacccttggacccagaggtcgactcggaccgatg

SEQ ID NO: 14762 - DNA, 203 bp, synthetic construct
  source 1..203: mol_type = other DNA
ggcgcgccagtcctcgcactgaatctgacacaactgtgttcactagcaacctcaaacagacaccatggtgcatctgactcctgaggaccggctgtccgttactgaccggctgtgcaaggtgaaccggctgtaagttggtgaccggctgttgggcaggcaccggctgttctacccttggacccagaggtcgactcggaccgatg

SEQ ID NO: 14763 - DNA, 203 bp, synthetic construct
  source 1..203: mol_type = other DNA
ggcgcgccagtcctcgctgacaaactgacacaactgtgttcactagcaacctcaaacagacaccatggtgcatctgactcctgaggaccggctttccgttactgaccggctttgcaaggtgaaccggctttaagttggtgaccggcttttgggcaggcaccggcttttctacccttggacccagaggtcgactcggaccgatg

SEQ ID NO: 14764 - DNA, 203 bp, synthetic construct
  source 1..203: mol_type = other DNA
ggcgcgccagtcctcgctaccgttctgacacaactgtgttcactagcaacctcaaacagacaccatggtgcatctgactcctgaggaccgtccgtccgttactgaccgtccgtgcaaggtgaaccgtccgtaagttggtgaccgtccgttgggcaggcaccgtccgttctacccttggacccagaggtcgactcggaccgatg

SEQ ID NO: 14765 - DNA, 203 bp, synthetic construct
  source 1..203: mol_type = other DNA
ggcgcgccagtcctgttagttcaactgacacaactgtgttcactagcaacctcaaacagacaccatggtgcatctgactcctgaggaccgttcgtccgttactgaccgttcgtgcaaggtgaaccgttcgtaagttggtgaccgttcgttgggcaggcaccgttcgttctacccttggacccagaggtcgactcggaccgatg

SEQ ID NO: 14766 - DNA, 203 bp, synthetic construct
  source 1..203: mol_type = other DNA
ggcgcgccagtccttaacgaggcactgacacaactgtgttcactagcaacctcaaacagacaccatggtgcatctgactcctgaggacctccctgccgttactgacctcccgggcaaggtgaacctccctgaagttggtgacctccccctgggcaggcacctcccggtctacccttggacccagaggtcgactcggaccgatg

SEQ ID NO: 14767 - DNA, 203 bp, synthetic construct
  source 1..203: mol_type = other DNA
ggcgcgccagtcctagcttcgttactgacacaactgtgttcactagcaacctcaaacagacaccatggtgcatctgactcctgaggaccttggcaaagttactgaccttggcaaaaaggtgaaccttggcaaagttggtgaccttggcaaaggcaggcaccttggcaaatacccttggacccagaggtcgactcggaccgatg

SEQ ID NO: 14768 - DNA, 203 bp, synthetic construct
  source 1..203: mol_type = other DNA
ggcgcgccagtccttcgttagttcctgacacaactgtgttcactagcaacctcaaacagacaccatggtgcatctgactcctgaggacggcgggtccgttactgacggcgggtgcaaggtgaacggcgggtaagttggtgacggcgggttgggcaggcacggcgggttctacccttggacccagaggtcgactcggaccgatg

SEQ ID NO: 14769 - DNA, 203 bp, synthetic construct
  source 1..203: mol_type = other DNA
ggcgcgccagtcctgtttaacgatctgacacaactgtgttcactagcaacctcaaacagacaccatggtgcatctgactcctgaggacgggccgtccgttactgacgggccgtgcaaggtgaacgggccgtaagttggtgacgggccgttgggcaggcacgggccgttctacccttggacccagaggtcgactcggaccgatg

SEQ ID NO: 14770 - DNA, 203 bp, synthetic construct
  source 1..203: mol_type = other DNA
ggcgcgccagtcctcttctcgttactgacacaactgtgttcactagcaacctcaaacagacaccatggtgcatctgactcctgaggactagccgtccgttactgactagccgtgcaaggtgaactagccgtaagttggtgactagccgttgggcaggcactagccgttctacccttggacccagaggtcgactcggaccgatg

SEQ ID NO: 14771 - DNA, 203 bp, synthetic construct
  source 1..203: mol_type = other DNA
ggcgcgccagtcctgttcgttacgctgacacaactgtgttcactagcaacctcaaacagacaccatggtgcatctgactcctgaggactcgccgtccgttactgactcgccgtgcaaggtgaactcgccgtaagttggtgactcgccgttgggcaggcactcgccgttctacccttggacccagaggtcgactcggaccgatg

SEQ ID NO: 14772 - DNA, 203 bp, synthetic construct
  source 1..203: mol_type = other DNA
ggcgcgccagtccttaacgagtggctgacacaactgtgttcactagcaacctcaaacagacaccatggtgcatctgactcctgaggactttaagtttcagctttgcaaccatactccccccggaacccaaagactttggtttgaggccctgggcaggctgctggtggtctacccttggacccagaggtcgactcggaccgatg

SEQ ID NO: 14773 - DNA, 203 bp, synthetic construct
  source 1..203: mol_type = other DNA
ggcgcgccagtcctaaatgcagaactgacacaactgtgttcactagcaacctcaaacagacaccatggtgcatctgactcctgaggagaacgtcaattcctttaccctgtggggcaaggtgaacgtggatgaagttggtggtgaggccctgggcaggctgctggtggtctaccccacggaatcgagaacgactcggaccgatg

SEQ ID NO: 14774 - DNA, 203 bp, synthetic construct
  source 1..203: mol_type = other DNA
ggcgcgccagtcctaatgcgtttgctgacacaactgtgttcactagcaacctcaaacagacaccatggtgcatctgactcctgaggagaacgtcaattcctttaccctgtggggcaaggtgaacgtggatgaagttggtggtgaggccctgggcaggctgctggtggtctaccccgtcaattcctttacgactcggaccgatg

SEQ ID NO: 14775 - DNA, 203 bp, synthetic construct
  source 1..203: mol_type = other DNA
ggcgcgccagtcctcgacctagtcctgacacaactgtgttcactagcaacctcaaacagacaccatggtgcatctgactcctgaggagaagaccggccgtactgccctgtggggcaaggtgaacgtggatgaagttggtggtgaggccctgggcaggctgctggtggtctacccttgttcttggcaaacgactcggaccgatg

SEQ ID NO: 14776 - DNA, 203 bp, synthetic construct
  source 1..203: mol_type = other DNA
ggcgcgccagtcctagacctagcactgacacaactgtgttcactagcaacctcaaacagacaccatggtgcatctgactcctgaggagaagccattcgcagtttcactgtaccggccgtgcgtactcagacatgcatggggtgaggccctgggcaggctgctggtggtctacccttggacccagaggtcgactcggaccgatg

SEQ ID NO: 14777 - DNA, 203 bp, synthetic construct
  source 1..203: mol_type = other DNA
ggcgcgccagtccttgattttcagctgacacaactgtgttcactagcaacctcaaacagacaccatggtgcatctgactcctgaggagaagcctggtggtgcccttccgtcaattcctttaagtttcagctttgcaagtggtgaggccctgggcaggctgctggtggtctacccttggacccagaggtcgactcggaccgatg

SEQ ID NO: 14778 - DNA, 203 bp, synthetic construct
  source 1..203: mol_type = other DNA
ggcgcgccagtccttatgattttcctgacacaactgtgttcactagcaacctcaaacagacaccatggtgcatctgactcctgaggagaaggccatgcaccaccacccacggaatcgagaaagagctatcaatctgtctggtgaggccctgggcaggctgctggtggtctacccttggacccagaggtcgactcggaccgatg

SEQ ID NO: 14779 - DNA, 203 bp, synthetic construct
  source 1..203: mol_type = other DNA
ggcgcgccagtcctcacgttaacactgacacaactgtgttcactagcaacctcaaacagacaccatggtgcatctgactcctgaggagaaggccatgcaccaccacccacggaatcgagaaagagctatcaatctgtgtggtgaggccctgggcaggctgctggtggtctacccttggacccagaggtcgactcggaccgatg

SEQ ID NO: 14780 - DNA, 203 bp, synthetic construct
  source 1..203: mol_type = other DNA
ggcgcgccagtcctcacgtttgccctgacacaactgtgttcactagcaacctcaaacagacaccatggtgcatctgactcctgaggagaagtcaccggccgttgccctgtggggcaaggtgaacgtggatgaagttggtggtgaggccctgggcaggctgctggtggtctacccttggaaccggccgtcgactcggaccgatg

SEQ ID NO: 14781 - DNA, 203 bp, synthetic construct
  source 1..203: mol_type = other DNA
ggcgcgccagtcctacaaatgccactgacacaactgtgttcactagcaacctcaaacagacaccatggtgcatctgactcctgaggagaagtcattcgcagtttcactgtaccggccgtgcgtactcagacatgcaggtggtgaggccctgggcaggctgctggtggtctacccttggacccagaggtcgactcggaccgatg

SEQ ID NO: 14782 - DNA, 203 bp, synthetic construct
  source 1..203: mol_type = other DNA
ggcgcgccagtcctaacatgcaagctgacacaactgtgttcactagcaacctcaaacagacaccatggtgcatctgactcctgaggagaagtccacggaatcgagaatgtggggcaaggtgaacgtggatgaagttggtggtgaggccctgggcaggctgctggtggtctacccttgttcttggcaaacgactcggaccgatg

SEQ ID NO: 14783 - DNA, 203 bp, synthetic construct
  source 1..203: mol_type = other DNA
ggcgcgccagtcctcgacatgcagctgacacaactgtgttcactagcaacctcaaacagacaccatggtgcatctgactcctgaggagaagtccatgcaccaccacccacggaatcgagaaagagctatcaatctgggtggtgaggccctgggcaggctgctggtggtctacccttggacccagaggtcgactcggaccgatg

SEQ ID NO: 14784 - DNA, 203 bp, synthetic construct
  source 1..203: mol_type = other DNA
ggcgcgccagtcctaacaccacgtctgacacaactgtgttcactagcaacctcaaacagacaccatggtgcatctgactcctgaggagaagtccgtcaattcctttatgtggggcaaggtgaacgtggatgaagttggtggtgaggccctgggcaggctgctggtggtctacccttgttcttggcaaacgactcggaccgatg

SEQ ID NO: 14785 - DNA, 203 bp, synthetic construct
  source 1..203: mol_type = other DNA
ggcgcgccagtcctttgcacgttcctgacacaactgtgttcactagcaacctcaaacagacaccatggtgcatctgactcctgaggagaagtctactcccactgccctgtggggcaaggtgaacgtggatgaagttggtggtgaggccctgggcaggctgctggtggtctacccttgttcttggcaaacgactcggaccgatg

SEQ ID NO: 14786 - DNA, 203 bp, synthetic construct
  source 1..203: mol_type = other DNA
ggcgcgccagtcctaacgtgcattctgacacaactgtgttcactagcaacctcaaacagacaccatggtgcatctgactcctgaggagaagtctgaccggccgtccctgtggggcaaggtgaacgtggatgaagttggtggtgaggccctgggcaggctgctggtggtctaccccacggaatcgagaacgactcggaccgatg

SEQ ID NO: 14787 - DNA, 203 bp, synthetic construct
  source 1..203: mol_type = other DNA
ggcgcgccagtccttgtctaacgcctgacacaactgtgttcactagcaacctcaaacagacaccatggtgcatctgactcctgaggagaagtctgcattaatgaaaacattcttggcaaatgctttcgctctagttggtggtgaggccctgggcaggctgctggtggtctacccttggacccagaggtcgactcggaccgatg

SEQ ID NO: 14788 - DNA, 203 bp, synthetic construct
  source 1..203: mol_type = other DNA
ggcgcgccagtcctacggttaaacctgacacaactgtgttcactagcaacctcaaacagacaccatggtgcatctgactcctgaggagaagtctgcccgtcaattcctttagggcaaggtgaacgtggatgaagttggtggtgaggccctgggcaggctgctggtggtctaccccacggaatcgagaacgactcggaccgatg

SEQ ID NO: 14789 - DNA, 203 bp, synthetic construct
  source 1..203: mol_type = other DNA
ggcgcgccagtcctcaggctttagctgacacaactgtgttcactagcaacctcaaacagacaccatggtgcatctgactcctgaggagaagtctgcccgtcaattcctttagggcaaggtgaacgtggatgaagttggtggtgaggccctgggcaggctgctggtggtctaccccgtcaattcctttacgactcggaccgatg

SEQ ID NO: 14790 - DNA, 203 bp, synthetic construct
  source 1..203: mol_type = other DNA
ggcgcgccagtcctacgtaaagccctgacacaactgtgttcactagcaacctcaaacagacaccatggtgcatctgactcctgaggagaagtctgcccgtcaattcctttagggcaaggtgaacgtggatgaagttggtggtgaggccctgggcaggctgctggtggtctacccttggacccagaggtcgactcggaccgatg

SEQ ID NO: 14791 - DNA, 203 bp, synthetic construct
  source 1..203: mol_type = other DNA
ggcgcgccagtcctaacgcagctgctgacacaactgtgttcactagcaacctcaaacagacaccatggtgcatctgactcctgaggagaagtctgcccgtcaattcctttagggcaaggtgaacgtggatgaagttggtggtgaggccctgggcaggctgctggtggtctacccttggacctactccccgactcggaccgatg

SEQ ID NO: 14792 - DNA, 203 bp, synthetic construct
  source 1..203: mol_type = other DNA
ggcgcgccagtcctcgtcctgcgtctgacacaactgtgttcactagcaacctcaaacagacaccatggtgcatctgactcctgaggagaagtctgccgaccaccacccacggaatcgagaaagagctatcgaagttggtggtgaggccctgggcaggctgctggtggtctacccttggacccagaggtcgactcggaccgatg

SEQ ID NO: 14793 - DNA, 203 bp, synthetic construct
  source 1..203: mol_type = other DNA
ggcgcgccagtccttgacatactcctgacacaactgtgttcactagcaacctcaaacagacaccatggtgcatctgactcctgaggagaagtctgccgagctttgcaaccatactccccccggaacccaagaagttggtggtgaggccctgggcaggctgctggtggtctacccttggacccagaggtcgactcggaccgatg

SEQ ID NO: 14794 - DNA, 203 bp, synthetic construct
  source 1..203: mol_type = other DNA
ggcgcgccagtccttagaggctagctgacacaactgtgttcactagcaacctcaaacagacaccatggtgcatctgactcctgaggagaagtctgccgcccggaagctgcccggcgggtcatgggaataagaagttggtggtgaggccctgggcaggctgctggtggtctacccttggacccagaggtcgactcggaccgatg

SEQ ID NO: 14795 - DNA, 203 bp, synthetic construct
  source 1..203: mol_type = other DNA
ggcgcgccagtcctgaccagtacactgacacaactgtgttcactagcaacctcaaacagacaccatggtgcatctgactcctgaggagaagtctgccgccggcgggttgtggggcaaggtgaacgtggatgaagttggtggtgaggccctgggcaggctgctggtggtctacccttgttcttggcaaacgactcggaccgatg

SEQ ID NO: 14796 - DNA, 203 bp, synthetic construct
  source 1..203: mol_type = other DNA
ggcgcgccagtcctattttgcagcctgacacaactgtgttcactagcaacctcaaacagacaccatggtgcatctgactcctgaggagaagtctgccggtgcccttccgtcaattcctttaagtttcagctaagttggtggtgaggccctgggcaggctgctggtggtctacccttggacccagaggtcgactcggaccgatg

SEQ ID NO: 14797 - DNA, 203 bp, synthetic construct
  source 1..203: mol_type = other DNA
ggcgcgccagtcctttaagcgtatctgacacaactgtgttcactagcaacctcaaacagacaccatggtgcatctgactcctgaggagaagtctgccgtagtttcactgtaccggccgtgcgtactcagtgaagttggtggtgaggccctgggcaggctgctggtggtctacccttggacccagaggtcgactcggaccgatg

SEQ ID NO: 14798 - DNA, 203 bp, synthetic construct
  source 1..203: mol_type = other DNA
ggcgcgccagtcctgcctgtgacactgacacaactgtgttcactagcaacctcaaacagacaccatggtgcatctgactcctgaggagaagtctgccgttacaccggccgtgggcaaggtgaacgtggatgaagttggtggtgaggccctgggcaggctgctggtggtctacccttggacctactccccgactcggaccgatg

SEQ ID NO: 14799 - DNA, 203 bp, synthetic construct
  source 1..203: mol_type = other DNA
ggcgcgccagtcctaatgtcacatctgacacaactgtgttcactagcaacctcaaacagacaccatggtgcatctgactcctgaggagaagtctgccgttacccggcgggtgggcaaggtgaacgtggatgaagttggtggtgaggccctgggcaggctgctggtggtctaccccacggaatcgagaacgactcggaccgatg

SEQ ID NO: 14800 - DNA, 203 bp, synthetic construct
  source 1..203: mol_type = other DNA
ggcgcgccagtcctcacacaggtcctgacacaactgtgttcactagcaacctcaaacagacaccatggtgcatctgactcctgaggagaagtctgccgttacccggcgggtgggcaaggtgaacgtggatgaagttggtggtgaggccctgggcaggctgctggtggtctacccttggacctactccccgactcggaccgatg

SEQ ID NO: 14801 - DNA, 203 bp, synthetic construct
  source 1..203: mol_type = other DNA
ggcgcgccagtcctccacacagctctgacacaactgtgttcactagcaacctcaaacagacaccatggtgcatctgactcctgaggagaagtctgccgttacccttccgtcaattcctttaagtttcgatgaagttggtggtgaggccctgggcaggctgctggtggtctacccttggacccagaggtcgactcggaccgatg

SEQ ID NO: 14802 - DNA, 203 bp, synthetic construct
  source 1..203: mol_type = other DNA
ggcgcgccagtcctaccttgtgtgctgacacaactgtgttcactagcaacctcaaacagacaccatggtgcatctgactcctgaggagaagtctgccgttaccggccgttggggcaaggtgaacgtggatgaagttggtggtgaggccctgggcaggctgctggtggtctacccttggaaccggccgtcgactcggaccgatg

SEQ ID NO: 14803 - DNA, 203 bp, synthetic construct
  source 1..203: mol_type = other DNA
ggcgcgccagtcctactgtgtgacctgacacaactgtgttcactagcaacctcaaacagacaccatggtgcatctgactcctgaggagaagtctgccgttaccgtcaattcctttaaggtgaacgtggatgaagttggtggtgaggccctgggcaggctgctggtggtctacccttggaaccggccgtcgactcggaccgatg

SEQ ID NO: 14804 - DNA, 203 bp, synthetic construct
  source 1..203: mol_type = other DNA
ggcgcgccagtccttatgtgtgatctgacacaactgtgttcactagcaacctcaaacagacaccatggtgcatctgactcctgaggagaagtctgccgttaccgtcaattcctttaaggtgaacgtggatgaagttggtggtgaggccctgggcaggctgctggtggtctacccttggaccggcgggtcgactcggaccgatg

SEQ ID NO: 14805 - DNA, 203 bp, synthetic construct
  source 1..203: mol_type = other DNA
ggcgcgccagtcctcagacgtacactgacacaactgtgttcactagcaacctcaaacagacaccatggtgcatctgactcctgaggagaagtctgccgttactactccctggggcaaggtgaacgtggatgaagttggtggtgaggccctgggcaggctgctggtggtctacccttggaaccggccgtcgactcggaccgatg

SEQ ID NO: 14806 - DNA, 203 bp, synthetic construct
  source 1..203: mol_type = other DNA
ggcgcgccagtcctagtagacgtactgacacaactgtgttcactagcaacctcaaacagacaccatggtgcatctgactcctgaggagaagtctgccgttactcacccacggaatcgagaaagagtggatgaagttggtggtgaggccctgggcaggctgctggtggtctacccttggacccagaggtcgactcggaccgatg

SEQ ID NO: 14807 - DNA, 203 bp, synthetic construct
  source 1..203: mol_type = other DNA
ggcgcgccagtcctacgtctacgtctgacacaactgtgttcactagcaacctcaaacagacaccatggtgcatctgactcctgaggagaagtctgccgttactcttccgtcaattcctttaagtttggatgaagttggtggtgaggccctgggcaggctgctggtggtctacccttggacccagaggtcgactcggaccgatg

SEQ ID NO: 14808 - DNA, 203 bp, synthetic construct
  source 1..203: mol_type = other DNA
ggcgcgccagtcctcgctacgtctctgacacaactgtgttcactagcaacctcaaacagacaccatggtgcatctgactcctgaggagaagtctgccgttactgaccggccgtgcaaggtgaaccggccgtaagttggtgaccggccgttgggcaggcaccggccgttctacccttaccggccgtggtcgactcggaccgatg

SEQ ID NO: 14809 - DNA, 203 bp, synthetic construct
  source 1..203: mol_type = other DNA
ggcgcgccagtccttcacagacgtctgacacaactgtgttcactagcaacctcaaacagacaccatggtgcatctgactcctgaggagaagtctgccgttactgaccggccgtgcaaggtgaaccggccgtaagttggtgaccggccgttgggcaggcaccggccgttctacccttggacccagaggtcgactcggaccgatg

SEQ ID NO: 14810 - DNA, 203 bp, synthetic construct
  source 1..203: mol_type = other DNA
ggcgcgccagtcctctaagacgtactgacacaactgtgttcactagcaacctcaaacagacaccatggtgcatctgactcctgaggagaagtctgccgttactgaccggccgtgcaaggtgaaccggccgtaagttggtgaccggccgttgggcaggctgctggtggtctacccttaccggccgtggtcgactcggaccgatg

SEQ ID NO: 14811 - DNA, 203 bp, synthetic construct
  source 1..203: mol_type = other DNA
ggcgcgccagtcctagacgttgttctgacacaactgtgttcactagcaacctcaaacagacaccatggtgcatctgactcctgaggagaagtctgccgttactgaccggccgtgcaaggtgaaccggccgtaagttggtgaccggccgttgggcaggctgctggtggtctacccttggacccagaggtcgactcggaccgatg

SEQ ID NO: 14812 - DNA, 203 bp, synthetic construct
  source 1..203: mol_type = other DNA
ggcgcgccagtcctaagagacgttctgacacaactgtgttcactagcaacctcaaacagacaccatggtgcatctgactcctgaggagaagtctgccgttactgaccggccgtgcaaggtgaaccggccgtaagttggtggtgaggccctgggcaggcaccggccgttctacccttaccggccgtggtcgactcggaccgatg

SEQ ID NO: 14813 - DNA, 203 bp, synthetic construct
  source 1..203: mol_type = other DNA
ggcgcgccagtccttgaacgtcttctgacacaactgtgttcactagcaacctcaaacagacaccatggtgcatctgactcctgaggagaagtctgccgttactgaccggccgtgcaaggtgaaccggccgtaagttggtggtgaggccctgggcaggcaccggccgttctacccttggacccagaggtcgactcggaccgatg

SEQ ID NO: 14814 - DNA, 203 bp, synthetic construct
  source 1..203: mol_type = other DNA
ggcgcgccagtcctaacgtctggactgacacaactgtgttcactagcaacctcaaacagacaccatggtgcatctgactcctgaggagaagtctgccgttactgaccggccgtgcaaggtgaaccggccgtaagttggtggtgaggccctgggcaggctgctggtggtctacccttggacccagaggtcgactcggaccgatg

SEQ ID NO: 14815 - DNA, 203 bp, synthetic construct
  source 1..203: mol_type = other DNA
ggcgcgccagtcctgacacagtccctgacacaactgtgttcactagcaacctcaaacagacaccatggtgcatctgactcctgaggagaagtctgccgttactgaccggccgtgcaaggtgaacgtggatgaagttggtgaccggccgttgggcaggcaccggccgttctacccttaccggccgtggtcgactcggaccgatg

SEQ ID NO: 14816 - DNA, 203 bp, synthetic construct
  source 1..203: mol_type = other DNA
ggcgcgccagtcctagttttgaaactgacacaactgtgttcactagcaacctcaaacagacaccatggtgcatctgactcctgaggagaagtctgccgttactgaccggccgtgcaaggtgaacgtggatgaagttggtgaccggccgttgggcaggcaccggccgttctacccttggacccagaggtcgactcggaccgatg

SEQ ID NO: 14817 - DNA, 203 bp, synthetic construct
  source 1..203: mol_type = other DNA
ggcgcgccagtcctttgaagcgacctgacacaactgtgttcactagcaacctcaaacagacaccatggtgcatctgactcctgaggagaagtctgccgttactgaccggccgtgcaaggtgaacgtggatgaagttggtggtgaggccctgggcaggcaccggccgttctacccttggacccagaggtcgactcggaccgatg

SEQ ID NO: 14818 - DNA, 203 bp, synthetic construct
  source 1..203: mol_type = other DNA
ggcgcgccagtcctactgtcgccactgacacaactgtgttcactagcaacctcaaacagacaccatggtgcatctgactcctgaggagaagtctgccgttactgacggccggtgcaaggtgaacggccggtaagttggtgacggccggttgggcaggcacggccggttctacccttggacccagaggtcgactcggaccgatg

SEQ ID NO: 14819 - DNA, 203 bp, synthetic construct
  source 1..203: mol_type = other DNA
ggcgcgccagtcctgcgacttggtctgacacaactgtgttcactagcaacctcaaacagacaccatggtgcatctgactcctgaggagaagtctgccgttactgcacggaatcgagaagtgaacgtggatgaagttggtgcacggaatcgagaaaggccacggaatcgagaaccttggacccagaggtcgactcggaccgatg

SEQ ID NO: 14820 - DNA, 203 bp, synthetic construct
  source 1..203: mol_type = other DNA
ggcgcgccagtcctagagtcgcctctgacacaactgtgttcactagcaacctcaaacagacaccatggtgcatctgactcctgaggagaagtctgccgttactgcacggaatcgagaagtgaacgtggatgaagttggtgcacggaatcgagaaaggctgctggtggtctacccttggacccagaggtcgactcggaccgatg

SEQ ID NO: 14821 - DNA, 203 bp, synthetic construct
  source 1..203: mol_type = other DNA
ggcgcgccagtccttaagtcgctactgacacaactgtgttcactagcaacctcaaacagacaccatggtgcatctgactcctgaggagaagtctgccgttactgcacggaatcgagaagtgacacggaatcgagaaggtgcacggaatcgagaaaggccacggaatcgagaaccttggacccagaggtcgactcggaccgatg

SEQ ID NO: 14822 - DNA, 203 bp, synthetic construct
  source 1..203: mol_type = other DNA
ggcgcgccagtcctaaggcgactactgacacaactgtgttcactagcaacctcaaacagacaccatggtgcatctgactcctgaggagaagtctgccgttactgcacggaatcgagaagtgacacggaatcgagaaggtggtgaggccctgggcaggctgctggtggtctacccttggacccagaggtcgactcggaccgatg

SEQ ID NO: 14823 - DNA, 203 bp, synthetic construct
  source 1..203: mol_type = other DNA
ggcgcgccagtcctatgaagtcgcctgacacaactgtgttcactagcaacctcaaacagacaccatggtgcatctgactcctgaggagaagtctgccgttactgcactgtaccggccgtgcgtcgtggatgaagttggtggtgaggccctgggcaggctgctggtggtctacccttggacccagaggtcgactcggaccgatg

SEQ ID NO: 14824 - DNA, 203 bp, synthetic construct
  source 1..203: mol_type = other DNA
ggcgcgccagtcctcgagcgacagctgacacaactgtgttcactagcaacctcaaacagacaccatggtgcatctgactcctgaggagaagtctgccgttactgccccacggaatcgagaaaacgtggatgaagttggtggtgaggccctgggcaggctgctggtggtctacccttgttcttggcaaacgactcggaccgatg

SEQ ID NO: 14825 - DNA, 203 bp, synthetic construct
  source 1..203: mol_type = other DNA
ggcgcgccagtccttgaatgtcgcctgacacaactgtgttcactagcaacctcaaacagacaccatggtgcatctgactcctgaggagaagtctgccgttactgccccattcttggcaaataacgtggatgaagttggtggtgaggccctgggcaggctgctggtggtctacccttggacccagaggtcgactcggaccgatg

SEQ ID NO: 14826 - DNA, 203 bp, synthetic construct
  source 1..203: mol_type = other DNA
ggcgcgccagtcctggcgaccatactgacacaactgtgttcactagcaacctcaaacagacaccatggtgcatctgactcctgaggagaagtctgccgttactgccccgtcaattcctttaaacgtggatgaagttggtggtgaggccctgggcaggctgctggtggtctacccttgttcttggcaaacgactcggaccgatg

SEQ ID NO: 14827 - DNA, 203 bp, synthetic construct
  source 1..203: mol_type = other DNA
ggcgcgccagtcctgtgtcgctcactgacacaactgtgttcactagcaacctcaaacagacaccatggtgcatctgactcctgaggagaagtctgccgttactgccctgaccggccgtgtgaacgtggatgaagttggtggtgaggccctgggcaggctgctggtggtctaccccacggaatcgagaacgactcggaccgatg

SEQ ID NO: 14828 - DNA, 203 bp, synthetic construct
  source 1..203: mol_type = other DNA
ggcgcgccagtcctaggcgaccacctgacacaactgtgttcactagcaacctcaaacagacaccatggtgcatctgactcctgaggagaagtctgccgttactgccctgaccggccgtgtgaacgtggatgaagttggtggtgaggccctgggcaggctgctggtggtctaccccgtcaattcctttacgactcggaccgatg

SEQ ID NO: 14829 - DNA, 203 bp, synthetic construct
  source 1..203: mol_type = other DNA
ggcgcgccagtcctatcgaccaccctgacacaactgtgttcactagcaacctcaaacagacaccatggtgcatctgactcctgaggagaagtctgccgttactgccctgcatactcccctgaacgtggatgaagttggtggtgaggccctgggcaggctgctggtggtctacccttggacccagaggtcgactcggaccgatg

SEQ ID NO: 14830 - DNA, 203 bp, synthetic construct
  source 1..203: mol_type = other DNA
ggcgcgccagtcctaagtggtcgactgacacaactgtgttcactagcaacctcaaacagacaccatggtgcatctgactcctgaggagaagtctgccgttactgccctgcccggcgggtcatacgtggatgaagttggtggtgaggccctgggcaggctgctggtggtctacccttggacccagaggtcgactcggaccgatg

SEQ ID NO: 14831 - DNA, 203 bp, synthetic construct
  source 1..203: mol_type = other DNA
ggcgcgccagtcctggtcgactaactgacacaactgtgttcactagcaacctcaaacagacaccatggtgcatctgactcctgaggagaagtctgccgttactgccctgcccggcgggtcgaacgtggatgaagttggtggtgaggccctgggcaggctgctggtggtctacccttggacccagaggtcgactcggaccgatg

SEQ ID NO: 14832 - DNA, 203 bp, synthetic construct
  source 1..203: mol_type = other DNA
ggcgcgccagtcctctggtcgatcctgacacaactgtgttcactagcaacctcaaacagacaccatggtgcatctgactcctgaggagaagtctgccgttactgccctgcccggcgggttgaacgtggatgaagttggtggtgaggccctgggcaggctgctggtggtctacccttggacccagaggtcgactcggaccgatg

SEQ ID NO: 14833 - DNA, 203 bp, synthetic construct
  source 1..203: mol_type = other DNA
ggcgcgccagtccttcacctagagctgacacaactgtgttcactagcaacctcaaacagacaccatggtgcatctgactcctgaggagaagtctgccgttactgccctgcggaatcgagtgaacgtggatgaagttggtggtgaggccctgggcaggctgctggtggtctacccttggacccagaggtcgactcggaccgatg

SEQ ID NO: 14834 - DNA, 203 bp, synthetic construct
  source 1..203: mol_type = other DNA
ggcgcgccagtcctaactagaaaactgacacaactgtgttcactagcaacctcaaacagacaccatggtgcatctgactcctgaggagaagtctgccgttactgccctgcgtcaattcctttacgtggatgaagttggtggtgaggccctgggcaggctgctggtggtctacccttggaccggcgggtcgactcggaccgatg

SEQ ID NO: 14835 - DNA, 203 bp, synthetic construct
  source 1..203: mol_type = other DNA
ggcgcgccagtcctgtactagaatctgacacaactgtgttcactagcaacctcaaacagacaccatggtgcatctgactcctgaggagaagtctgccgttactgccctgtaccggccgtgcgacgtggatgaagttggtggtgaggccctgggcaggctgctggtggtctacccttggacccagaggtcgactcggaccgatg

SEQ ID NO: 14836 - DNA, 203 bp, synthetic construct
  source 1..203: mol_type = other DNA
ggcgcgccagtcctagcgactagactgacacaactgtgttcactagcaacctcaaacagacaccatggtgcatctgactcctgaggagaagtctgccgttactgccctgtactcccaggtgaacgtggatgaagttggtggtgaggccctgggcaggctgctggtggtctacccttggaaccggccgtcgactcggaccgatg

SEQ ID NO: 14837 - DNA, 203 bp, synthetic construct
  source 1..203: mol_type = other DNA
ggcgcgccagtccttacttctagtctgacacaactgtgttcactagcaacctcaaacagacaccatggtgcatctgactcctgaggagaagtctgccgttactgccctgtgcgtcaattcctttatggatgaagttggtggtgaggccctgggcaggctgctggtggtctaccccgtcaattcctttacgactcggaccgatg

SEQ ID NO: 14838 - DNA, 203 bp, synthetic construct
  source 1..203: mol_type = other DNA
ggcgcgccagtccttactctaggcctgacacaactgtgttcactagcaacctcaaacagacaccatggtgcatctgactcctgaggagaagtctgccgttactgccctgtgcgtcaattcctttatggatgaagttggtggtgaggccctgggcaggctgctggtggtctacccttggacccagaggtcgactcggaccgatg

SEQ ID NO: 14839 - DNA, 203 bp, synthetic construct
  source 1..203: mol_type = other DNA
ggcgcgccagtccttctagttacgctgacacaactgtgttcactagcaacctcaaacagacaccatggtgcatctgactcctgaggagaagtctgccgttactgccctgtgcttggcggtgaacgtggatgaagttggtggtgaggccctgggcaggctgctggtggtctacccttggacccagaggtcgactcggaccgatg

SEQ ID NO: 14840 - DNA, 203 bp, synthetic construct
  source 1..203: mol_type = other DNA
ggcgcgccagtccttctaggtcaactgacacaactgtgttcactagcaacctcaaacagacaccatggtgcatctgactcctgaggagaagtctgccgttactgccctgtggaccggccgtaacgtggatgaagttggtggtgaggccctgggcaggctgctggtggtctacccttgttcttggcaaacgactcggaccgatg

SEQ ID NO: 14841 - DNA, 203 bp, synthetic construct
  source 1..203: mol_type = other DNA
ggcgcgccagtccttcaggtgagtctgacacaactgtgttcactagcaacctcaaacagacaccatggtgcatctgactcctgaggagaagtctgccgttactgccctgtggggaccggccgtcgtggatgaagttggtggtgaggccctgggcaggctgctggtggtctacccttggaccggcgggtcgactcggaccgatg

SEQ ID NO: 14842 - DNA, 203 bp, synthetic construct
  source 1..203: mol_type = other DNA
ggcgcgccagtcctatcaggtctactgacacaactgtgttcactagcaacctcaaacagacaccatggtgcatctgactcctgaggagaagtctgccgttactgccctgtggggcaaccggccgttggatgaagttggtggtgaggccctgggcaggctgctggtggtctaccccgtcaattcctttacgactcggaccgatg

SEQ ID NO: 14843 - DNA, 203 bp, synthetic construct
  source 1..203: mol_type = other DNA
ggcgcgccagtcctaaacctgatcctgacacaactgtgttcactagcaacctcaaacagacaccatggtgcatctgactcctgaggagaagtctgccgttactgccctgtggggcaaccggccgttggatgaagttggtggtgaggccctgggcaggctgctggtggtctacccttggacccagaggtcgactcggaccgatg

SEQ ID NO: 14844 - DNA, 203 bp, synthetic construct
  source 1..203: mol_type = other DNA
ggcgcgccagtcctacctgaagaactgacacaactgtgttcactagcaacctcaaacagacaccatggtgcatctgactcctgaggagaagtctgccgttactgccctgtggggcaaccggccgttggatgaagttggtggtgaggccctgggcaggctgctggtggtctacccttggacctactccccgactcggaccgatg

SEQ ID NO: 14845 - DNA, 203 bp, synthetic construct
  source 1..203: mol_type = other DNA
ggcgcgccagtcctggtagaacgtctgacacaactgtgttcactagcaacctcaaacagacaccatggtgcatctgactcctgaggagaagtctgccgttactgccctgtggggcaaggaccggccgtatgaagttggtggtgaggccctgggcaggctgctggtggtctacccttgttcttggcaaacgactcggaccgatg

SEQ ID NO: 14846 - DNA, 203 bp, synthetic construct
  source 1..203: mol_type = other DNA
ggcgcgccagtcctcgttctagcactgacacaactgtgttcactagcaacctcaaacagacaccatggtgcatctgactcctgaggagaagtctgccgttactgccctgtggggcaaggccggcgggtatgaagttggtggtgaggccctgggcaggctgctggtggtctacccttgttcttggcaaacgactcggaccgatg

SEQ ID NO: 14847 - DNA, 203 bp, synthetic construct
  source 1..203: mol_type = other DNA
ggcgcgccagtccttaaagcgttcctgacacaactgtgttcactagcaacctcaaacagacaccatggtgcatctgactcctgaggagaagtctgccgttactgccctgtggggcaaggtgaaaccggccgtagttggtggtgaggccctgggcaggctgctggtggtctaccccacggaatcgagaacgactcggaccgatg

SEQ ID NO: 14848 - DNA, 203 bp, synthetic construct
  source 1..203: mol_type = other DNA
ggcgcgccagtcctactgcagaacctgacacaactgtgttcactagcaacctcaaacagacaccatggtgcatctgactcctgaggagaagtctgccgttactgccctgtggggcaaggtgaacacggaatcgagaagtggtgaggccctgggcaggctgctggtggtctacccttggaaccggccgtcgactcggaccgatg

SEQ ID NO: 14849 - DNA, 203 bp, synthetic construct
  source 1..203: mol_type = other DNA
ggcgcgccagtcctcccgaccgtgctgacacaactgtgttcactagcaacctcaaacagacaccatggtgcatctgactcctgaggagaagtctgccgttactgccctgtggggcaaggtgaaccggccgtaagttggtgaccggccgttgggcaggctgctggtggtctacccttaccggccgtggtcgactcggaccgatg

SEQ ID NO: 14850 - DNA, 203 bp, synthetic construct
  source 1..203: mol_type = other DNA
ggcgcgccagtccttcgtctcgggctgacacaactgtgttcactagcaacctcaaacagacaccatggtgcatctgactcctgaggagaagtctgccgttactgccctgtggggcaaggtgaaccggccgtaagttggtgaccggccgttgggcaggctgctggtggtctacccttggacccagaggtcgactcggaccgatg

SEQ ID NO: 14851 - DNA, 203 bp, synthetic construct
  source 1..203: mol_type = other DNA
ggcgcgccagtcctcccgaggtgactgacacaactgtgttcactagcaacctcaaacagacaccatggtgcatctgactcctgaggagaagtctgccgttactgccctgtggggcaaggtgaaccggccgtaagttggtggtgaggccctgggcaggcaccggccgttctacccttggacccagaggtcgactcggaccgatg

SEQ ID NO: 14852 - DNA, 203 bp, synthetic construct
  source 1..203: mol_type = other DNA
ggcgcgccagtcctcccgattcgtctgacacaactgtgttcactagcaacctcaaacagacaccatggtgcatctgactcctgaggagaagtctgccgttactgccctgtggggcaaggtgaaccggccgtaagttggtggtgaggccctgggcaggctgctggtggtctacccttaccggccgtggtcgactcggaccgatg

SEQ ID NO: 14853 - DNA, 203 bp, synthetic construct
  source 1..203: mol_type = other DNA
ggcgcgccagtccttagtcatttcctgacacaactgtgttcactagcaacctcaaacagacaccatggtgcatctgactcctgaggagaagtctgccgttactgccctgtggggcaaggtgaaccggcgggtagttggtggtgaggccctgggcaggctgctggtggtctacccttggacccagaggtcgactcggaccgatg

SEQ ID NO: 14854 - DNA, 203 bp, synthetic construct
  source 1..203: mol_type = other DNA
ggcgcgccagtcctaatgttgactctgacacaactgtgttcactagcaacctcaaacagacaccatggtgcatctgactcctgaggagaagtctgccgttactgccctgtggggcaaggtgaaccggcgggtagttggtggtgaggccctgggcaggctgctggtggtctacccttggacctactccccgactcggaccgatg

SEQ ID NO: 14855 - DNA, 203 bp, synthetic construct
  source 1..203: mol_type = other DNA
ggcgcgccagtcctgtgagttaagctgacacaactgtgttcactagcaacctcaaacagacaccatggtgcatctgactcctgaggagaagtctgccgttactgccctgtggggcaaggtgaacgcacggaatcgagaaggtgaggccctgggcaggctgctggtggtctacccttggacctactccccgactcggaccgatg

SEQ ID NO: 14856 - DNA, 203 bp, synthetic construct
  source 1..203: mol_type = other DNA
ggcgcgccagtcctctctgtcacgctgacacaactgtgttcactagcaacctcaaacagacaccatggtgcatctgactcctgaggagaagtctgccgttactgccctgtggggcaaggtgaacgcgtcaattcctttaggtgaggccctgggcaggctgctggtggtctaccccacggaatcgagaacgactcggaccgatg

SEQ ID NO: 14857 - DNA, 203 bp, synthetic construct
  source 1..203: mol_type = other DNA
ggcgcgccagtcctagagtgacccctgacacaactgtgttcactagcaacctcaaacagacaccatggtgcatctgactcctgaggagaagtctgccgttactgccctgtggggcaaggtgaacgtaccggccgttggtggtgaggccctgggcaggctgctggtggtctacccttgttcttggcaaacgactcggaccgatg

SEQ ID NO: 14858 - DNA, 203 bp, synthetic construct
  source 1..203: mol_type = other DNA
ggcgcgccagtcctgcctagacccctgacacaactgtgttcactagcaacctcaaacagacaccatggtgcatctgactcctgaggagaagtctgccgttactgccctgtggggcaaggtgaacgtactcccagttggtggtgaggccctgggcaggctgctggtggtctacccttggacccagaggtcgactcggaccgatg

SEQ ID NO: 14859 - DNA, 203 bp, synthetic construct
  source 1..203: mol_type = other DNA
ggcgcgccagtcctggcaggacccctgacacaactgtgttcactagcaacctcaaacagacaccatggtgcatctgactcctgaggagaagtctgccgttactgccctgtggggcaaggtgaacgtggaccggccgtgtggtgaggccctgggcaggctgctggtggtctacccttggaccggcgggtcgactcggaccgatg

SEQ ID NO: 14860 - DNA, 203 bp, synthetic construct
  source 1..203: mol_type = other DNA
ggcgcgccagtcctgggtccactactgacacaactgtgttcactagcaacctcaaacagacaccatggtgcatctgactcctgaggagaagtctgccgttactgccctgtggggcaaggtgaacgtggataccggccgtggtgaggccctgggcaggctgctggtggtctacccttggacctactccccgactcggaccgatg

SEQ ID NO: 14861 - DNA, 203 bp, synthetic construct
  source 1..203: mol_type = other DNA
ggcgcgccagtcctgggtctcgttctgacacaactgtgttcactagcaacctcaaacagacaccatggtgcatctgactcctgaggagaagtctgccgttactgccctgtggggcaaggtgaacgtggatccggcgggtggtgaggccctgggcaggctgctggtggtctaccccgtcaattcctttacgactcggaccgatg

SEQ ID NO: 14862 - DNA, 203 bp, synthetic construct
  source 1..203: mol_type = other DNA
ggcgcgccagtcctttgacttgcgctgacacaactgtgttcactagcaacctcaaacagacaccatggtgcatctgactcctgaggagaagtctgccgttactgccctgtggggcaaggtgaacgtggatgaagtccggcgggtggccctgggcaggctgctggtggtctacccttggaccggcgggtcgactcggaccgatg

SEQ ID NO: 14863 - DNA, 203 bp, synthetic construct
  source 1..203: mol_type = other DNA
ggcgcgccagtccttaagtcagagctgacacaactgtgttcactagcaacctcaaacagacaccatggtgcatctgactcctgaggagaagtctgccgttactgccctgtggggcaaggtgaacgtggatgaagttactcccgaggccctgggcaggctgctggtggtctacccttgttcttggcaaacgactcggaccgatg

SEQ ID NO: 14864 - DNA, 203 bp, synthetic construct
  source 1..203: mol_type = other DNA
ggcgcgccagtcctcgtgacttagctgacacaactgtgttcactagcaacctcaaacagacaccatggtgcatctgactcctgaggagaagtctgccgttactgccctgtggggcaaggtgaacgtggatgaagttgcacggaatcgagaaggcaggctgctggtggtctacccttggaaccggccgtcgactcggaccgatg

SEQ ID NO: 14865 - DNA, 203 bp, synthetic construct
  source 1..203: mol_type = other DNA
ggcgcgccagtcctaagtcaggccctgacacaactgtgttcactagcaacctcaaacagacaccatggtgcatctgactcctgaggagaagtctgccgttactgccctgtggggcaaggtgaacgtggatgaagttgcacggaatcgagaaggcaggctgctggtggtctacccttggaccggcgggtcgactcggaccgatg

SEQ ID NO: 14866 - DNA, 203 bp, synthetic construct
  source 1..203: mol_type = other DNA
ggcgcgccagtccttatgacttctctgacacaactgtgttcactagcaacctcaaacagacaccatggtgcatctgactcctgaggagaagtctgccgttactgccctgtggggcaaggtgaacgtggatgaagttgccggcgggtccctgggcaggctgctggtggtctaccccgtcaattcctttacgactcggaccgatg

SEQ ID NO: 14867 - DNA, 203 bp, synthetic construct
  source 1..203: mol_type = other DNA
ggcgcgccagtcctcttaagtcaactgacacaactgtgttcactagcaacctcaaacagacaccatggtgcatctgactcctgaggagaagtctgccgttactgccctgtggggcaaggtgaacgtggatgaagttgccggcgggtccctgggcaggctgctggtggtctacccttggacccagaggtcgactcggaccgatg

SEQ ID NO: 14868 - DNA, 203 bp, synthetic construct
  source 1..203: mol_type = other DNA
ggcgcgccagtcctcagaatcttcctgacacaactgtgttcactagcaacctcaaacagacaccatggtgcatctgactcctgaggagaagtctgccgttactgccctgtggggcaaggtgaacgtggatgaagttgcgtcaattcctttaggcaggctgctggtggtctacccttggaccggcgggtcgactcggaccgatg

SEQ ID NO: 14869 - DNA, 203 bp, synthetic construct
  source 1..203: mol_type = other DNA
ggcgcgccagtcctctgctgactactgacacaactgtgttcactagcaacctcaaacagacaccatggtgcatctgactcctgaggagaagtctgccgttactgccctgtggggcaaggtgaacgtggatgaagttggtcgtcaattcctttacaggctgctggtggtctaccccacggaatcgagaacgactcggaccgatg

SEQ ID NO: 14870 - DNA, 203 bp, synthetic construct
  source 1..203: mol_type = other DNA
ggcgcgccagtcctcaagtattctctgacacaactgtgttcactagcaacctcaaacagacaccatggtgcatctgactcctgaggagaagtctgccgttactgccctgtggggcaaggtgaacgtggatgaagttggtgaccggccgttgggcaggcaccggccgttctacccttaccggccgtggtcgactcggaccgatg

SEQ ID NO: 14871 - DNA, 203 bp, synthetic construct
  source 1..203: mol_type = other DNA
ggcgcgccagtcctgctaagtatgctgacacaactgtgttcactagcaacctcaaacagacaccatggtgcatctgactcctgaggagaagtctgccgttactgccctgtggggcaaggtgaacgtggatgaagttggtgaccggccgttgggcaggcaccggccgttctacccttggacccagaggtcgactcggaccgatg

SEQ ID NO: 14872 - DNA, 203 bp, synthetic construct
  source 1..203: mol_type = other DNA
ggcgcgccagtcctcatactttcgctgacacaactgtgttcactagcaacctcaaacagacaccatggtgcatctgactcctgaggagaagtctgccgttactgccctgtggggcaaggtgaacgtggatgaagttggtgaccggccgttgggcaggctgctggtggtctacccttgttcttggcaaacgactcggaccgatg

SEQ ID NO: 14873 - DNA, 203 bp, synthetic construct
  source 1..203: mol_type = other DNA
ggcgcgccagtcctcatacttggtctgacacaactgtgttcactagcaacctcaaacagacaccatggtgcatctgactcctgaggagaagtctgccgttactgccctgtggggcaaggtgaacgtggatgaagttggtgcacggaatcgagaaaggccacggaatcgagaaccttggacccagaggtcgactcggaccgatg

SEQ ID NO: 14874 - DNA, 203 bp, synthetic construct
  source 1..203: mol_type = other DNA
ggcgcgccagtcctacgatactttctgacacaactgtgttcactagcaacctcaaacagacaccatggtgcatctgactcctgaggagaagtctgccgttactgccctgtggggcaaggtgaacgtggatgaagttggtgcacggaatcgagaaaggctgctggtggtctacccttggacccagaggtcgactcggaccgatg

SEQ ID NO: 14875 - DNA, 203 bp, synthetic construct
  source 1..203: mol_type = other DNA
ggcgcgccagtcctgtttgtatccctgacacaactgtgttcactagcaacctcaaacagacaccatggtgcatctgactcctgaggagaagtctgccgttactgccctgtggggcaaggtgaacgtggatgaagttggtgccggcgggttgggcaggcccggcgggttctacccttccggcgggtggtcgactcggaccgatg

SEQ ID NO: 14876 - DNA, 203 bp, synthetic construct
  source 1..203: mol_type = other DNA
ggcgcgccagtcctatctgaaaccctgacacaactgtgttcactagcaacctcaaacagacaccatggtgcatctgactcctgaggagaagtctgccgttactgccctgtggggcaaggtgaacgtggatgaagttggtgccggcgggttgggcaggcccggcgggttctacccttccggcgggtggtcgactcggaccgatg

SEQ ID NO: 14877 - DNA, 203 bp, synthetic construct
  source 1..203: mol_type = other DNA
ggcgcgccagtcctgatacttaccctgacacaactgtgttcactagcaacctcaaacagacaccatggtgcatctgactcctgaggagaagtctgccgttactgccctgtggggcaaggtgaacgtggatgaagttggtgccggcgggttgggcaggcccggcgggttctacccttccggcgggtggtcgactcggaccgatg

SEQ ID NO: 14878 - DNA, 203 bp, synthetic construct
  source 1..203: mol_type = other DNA
ggcgcgccagtcctaacagttaccctgacacaactgtgttcactagcaacctcaaacagacaccatggtgcatctgactcctgaggagaagtctgccgttactgccctgtggggcaaggtgaacgtggatgaagttggtgccggcgggttgggcaggcccggcgggttctacccttccggcgggtggtcgactcggaccgatg

SEQ ID NO: 14879 - DNA, 203 bp, synthetic construct
  source 1..203: mol_type = other DNA
ggcgcgccagtcctttactagaccctgacacaactgtgttcactagcaacctcaaacagacaccatggtgcatctgactcctgaggagaagtctgccgttactgccctgtggggcaaggtgaacgtggatgaagttggtgccggcgggttgggcaggcccggcgggttctacccttccggcgggtggtcgactcggaccgatg

SEQ ID NO: 14880 - DNA, 203 bp, synthetic construct
  source 1..203: mol_type = other DNA
ggcgcgccagtcctaattctgtccctgacacaactgtgttcactagcaacctcaaacagacaccatggtgcatctgactcctgaggagaagtctgccgttactgccctgtggggcaaggtgaacgtggatgaagttggtgccggcgggttgggcaggcccggcgggttctacccttccggcgggtggtcgactcggaccgatg

SEQ ID NO: 14881 - DNA, 203 bp, synthetic construct
  source 1..203: mol_type = other DNA
ggcgcgccagtcctggtcaagtatctgacacaactgtgttcactagcaacctcaaacagacaccatggtgcatctgactcctgaggagaagtctgccgttactgccctgtggggcaaggtgaacgtggatgaagttggtggggagtacctgggcaggcgggagtaggtctacccttggacccagaggtcgactcggaccgatg

SEQ ID NO: 14882 - DNA, 203 bp, synthetic construct
  source 1..203: mol_type = other DNA
ggcgcgccagtcctggttgtaagactgacacaactgtgttcactagcaacctcaaacagacaccatggtgcatctgactcctgaggagaagtctgccgttactgccctgtggggcaaggtgaacgtggatgaagttggtggtcacggaatcgagaagctgctggtggtctacccttgttcttggcaaacgactcggaccgatg

SEQ ID NO: 14883 - DNA, 203 bp, synthetic construct
  source 1..203: mol_type = other DNA
ggcgcgccagtcctggtgaagattctgacacaactgtgttcactagcaacctcaaacagacaccatggtgcatctgactcctgaggagaagtctgccgttactgccctgtggggcaaggtgaacgtggatgaagttggtggtcgtcaattcctttagctgctggtggtctacccttgttcttggcaaacgactcggaccgatg

SEQ ID NO: 14884 - DNA, 203 bp, synthetic construct
  source 1..203: mol_type = other DNA
ggcgcgccagtccttcttgatctactgacacaactgtgttcactagcaacctcaaacagacaccatggtgcatctgactcctgaggagaagtctgccgttactgccctgtggggcaaggtgaacgtggatgaagttggtggtgaaccggccgtcaggctgctggtggtctaccccacggaatcgagaacgactcggaccgatg

SEQ ID NO: 14885 - DNA, 203 bp, synthetic construct
  source 1..203: mol_type = other DNA
ggcgcgccagtcctatgtgatctactgacacaactgtgttcactagcaacctcaaacagacaccatggtgcatctgactcctgaggagaagtctgccgttactgccctgtggggcaaggtgaacgtggatgaagttggtggtgaaccggccgtcaggctgctggtggtctacccttggacctactccccgactcggaccgatg

SEQ ID NO: 14886 - DNA, 203 bp, synthetic construct
  source 1..203: mol_type = other DNA
ggcgcgccagtcctggcttcacccctgacacaactgtgttcactagcaacctcaaacagacaccatggtgcatctgactcctgaggagaagtctgccgttactgccctgtggggcaaggtgaacgtggatgaagttggtggtgacacggaatcgagaatgctggtggtctacccttggaaccggccgtcgactcggaccgatg

SEQ ID NO: 14887 - DNA, 203 bp, synthetic construct
  source 1..203: mol_type = other DNA
ggcgcgccagtcctgttcacccacctgacacaactgtgttcactagcaacctcaaacagacaccatggtgcatctgactcctgaggagaagtctgccgttactgccctgtggggcaaggtgaacgtggatgaagttggtggtgacacggaatcgagaatgctggtggtctacccttggaccggcgggtcgactcggaccgatg

SEQ ID NO: 14888 - DNA, 203 bp, synthetic construct
  source 1..203: mol_type = other DNA
ggcgcgccagtcctaacctagcagctgacacaactgtgttcactagcaacctcaaacagacaccatggtgcatctgactcctgaggagaagtctgccgttactgccctgtggggcaaggtgaacgtggatgaagttggtggtgaccggcgggtcaggctgctggtggtctacccttggacccagaggtcgactcggaccgatg

SEQ ID NO: 14889 - DNA, 203 bp, synthetic construct
  source 1..203: mol_type = other DNA
ggcgcgccagtccttaaccgagccctgacacaactgtgttcactagcaacctcaaacagacaccatggtgcatctgactcctgaggagaagtctgccgttactgccctgtggggcaaggtgaacgtggatgaagttggtggtgacgtcaattcctttatgctggtggtctacccttggaccggcgggtcgactcggaccgatg

SEQ ID NO: 14890 - DNA, 203 bp, synthetic construct
  source 1..203: mol_type = other DNA
ggcgcgccagtcctcgacgtcctgctgacacaactgtgttcactagcaacctcaaacagacaccatggtgcatctgactcctgaggagaagtctgccgttactgccctgtggggcaaggtgaacgtggatgaagttggtggtgaggcccccggcgggttgctggtggtctacccttggaaccggccgtcgactcggaccgatg

SEQ ID NO: 14891 - DNA, 203 bp, synthetic construct
  source 1..203: mol_type = other DNA
ggcgcgccagtcctggacgtttcgctgacacaactgtgttcactagcaacctcaaacagacaccatggtgcatctgactcctgaggagaagtctgccgttactgccctgtggggcaaggtgaacgtggatgaagttggtggtgaggccctactcccgctgctggtggtctacccttgttcttggcaaacgactcggaccgatg

SEQ ID NO: 14892 - DNA, 203 bp, synthetic construct
  source 1..203: mol_type = other DNA
ggcgcgccagtcctggacgttctactgacacaactgtgttcactagcaacctcaaacagacaccatggtgcatctgactcctgaggagaagtctgccgttactgccctgtggggcaaggtgaacgtggatgaagttggtggtgaggccctgaccggccgtctggtggtctaccccgtcaattcctttacgactcggaccgatg

SEQ ID NO: 14893 - DNA, 203 bp, synthetic construct
  source 1..203: mol_type = other DNA
ggcgcgccagtcctctggtagtaactgacacaactgtgttcactagcaacctcaaacagacaccatggtgcatctgactcctgaggagaagtctgccgttactgccctgtggggcaaggtgaacgtggatgaagttggtggtgaggccctgcacggaatcgagaaggtctacccttggaaccggccgtcgactcggaccgatg

SEQ ID NO: 14894 - DNA, 203 bp, synthetic construct
  source 1..203: mol_type = other DNA
ggcgcgccagtcctagaggtagtactgacacaactgtgttcactagcaacctcaaacagacaccatggtgcatctgactcctgaggagaagtctgccgttactgccctgtggggcaaggtgaacgtggatgaagttggtggtgaggccctgcacggaatcgagaaggtctacccttggaccggcgggtcgactcggaccgatg

SEQ ID NO: 14895 - DNA, 203 bp, synthetic construct
  source 1..203: mol_type = other DNA
ggcgcgccagtcctcgtgaatgaactgacacaactgtgttcactagcaacctcaaacagacaccatggtgcatctgactcctgaggagaagtctgccgttactgccctgtggggcaaggtgaacgtggatgaagttggtggtgaggccctgccggcgggtctggtggtctacccttggacctactccccgactcggaccgatg

SEQ ID NO: 14896 - DNA, 203 bp, synthetic construct
  source 1..203: mol_type = other DNA
ggcgcgccagtccttgtctcgtgcctgacacaactgtgttcactagcaacctcaaacagacaccatggtgcatctgactcctgaggagaagtctgccgttactgccctgtggggcaaggtgaacgtggatgaagttggtggtgaggccctgggcaccggccgtgtggtctacccttgttcttggcaaacgactcggaccgatg

SEQ ID NO: 14897 - DNA, 203 bp, synthetic construct
  source 1..203: mol_type = other DNA
ggcgcgccagtcctaggctgcgaactgacacaactgtgttcactagcaacctcaaacagacaccatggtgcatctgactcctgaggagaagtctgccgttactgccctgtggggcaaggtgaacgtggatgaagttggtggtgaggccctgggcaggcacccgccggtctacccttggacccagaggtcgactcggaccgatg

SEQ ID NO: 14898 - DNA, 203 bp, synthetic construct
  source 1..203: mol_type = other DNA
ggcgcgccagtcctaccaagcgaactgacacaactgtgttcactagcaacctcaaacagacaccatggtgcatctgactcctgaggagaagtctgccgttactgccctgtggggcaaggtgaacgtggatgaagttggtggtgaggccctgggcaggcaccggccgttctaccccacggaatcgagaacgactcggaccgatg

SEQ ID NO: 14899 - DNA, 203 bp, synthetic construct
  source 1..203: mol_type = other DNA
ggcgcgccagtcctaatgcgaatcctgacacaactgtgttcactagcaacctcaaacagacaccatggtgcatctgactcctgaggagaagtctgccgttactgccctgtggggcaaggtgaacgtggatgaagttggtggtgaggccctgggcaggcaccggccgttctacccttggacccagaggtcgactcggaccgatg

SEQ ID NO: 14900 - DNA, 203 bp, synthetic construct
  source 1..203: mol_type = other DNA
ggcgcgccagtcctcaggcgaactctgacacaactgtgttcactagcaacctcaaacagacaccatggtgcatctgactcctgaggagaagtctgccgttactgccctgtggggcaaggtgaacgtggatgaagttggtggtgaggccctgggcaggccacggaatcgagaaccttggaccggcgggtcgactcggaccgatg

SEQ ID NO: 14901 - DNA, 203 bp, synthetic construct
  source 1..203: mol_type = other DNA
ggcgcgccagtccttggcgaagtcctgacacaactgtgttcactagcaacctcaaacagacaccatggtgcatctgactcctgaggagaagtctgccgttactgccctgtggggcaaggtgaacgtggatgaagttggtggtgaggccctgggcaggcccggcgggttctaccccacggaatcgagaacgactcggaccgatg

SEQ ID NO: 14902 - DNA, 203 bp, synthetic construct
  source 1..203: mol_type = other DNA
ggcgcgccagtcctaaaagcgaagctgacacaactgtgttcactagcaacctcaaacagacaccatggtgcatctgactcctgaggagaagtctgccgttactgccctgtggggcaaggtgaacgtggatgaagttggtggtgaggccctgggcaggcccggcgggttctacccttccggcgggtggtcgactcggaccgatg

SEQ ID NO: 14903 - DNA, 203 bp, synthetic construct
  source 1..203: mol_type = other DNA
ggcgcgccagtcctctcttcgccactgacacaactgtgttcactagcaacctcaaacagacaccatggtgcatctgactcctgaggagaagtctgccgttactgccctgtggggcaaggtgaacgtggatgaagttggtggtgaggccctgggcaggcccggcgggttctacccttccggcgggtggtcgactcggaccgatg

SEQ ID NO: 14904 - DNA, 203 bp, synthetic construct
  source 1..203: mol_type = other DNA
ggcgcgccagtcctacgctttcgcctgacacaactgtgttcactagcaacctcaaacagacaccatggtgcatctgactcctgaggagaagtctgccgttactgccctgtggggcaaggtgaacgtggatgaagttggtggtgaggccctgggcaggcccggcgggttctacccttccggcgggtggtcgactcggaccgatg

SEQ ID NO: 14905 - DNA, 203 bp, synthetic construct
  source 1..203: mol_type = other DNA
ggcgcgccagtcctcttcgctgtgctgacacaactgtgttcactagcaacctcaaacagacaccatggtgcatctgactcctgaggagaagtctgccgttactgccctgtggggcaaggtgaacgtggatgaagttggtggtgaggccctgggcaggcccggcgggttctacccttccggcgggtggtcgactcggaccgatg

SEQ ID NO: 14906 - DNA, 203 bp, synthetic construct
  source 1..203: mol_type = other DNA
ggcgcgccagtcctcgttcgctgcctgacacaactgtgttcactagcaacctcaaacagacaccatggtgcatctgactcctgaggagaagtctgccgttactgccctgtggggcaaggtgaacgtggatgaagttggtggtgaggccctgggcaggcccggcgggttctacccttccggcgggtggtcgactcggaccgatg

SEQ ID NO: 14907 - DNA, 203 bp, synthetic construct
  source 1..203: mol_type = other DNA
ggcgcgccagtcctaggattcgctctgacacaactgtgttcactagcaacctcaaacagacaccatggtgcatctgactcctgaggagaagtctgccgttactgccctgtggggcaaggtgaacgtggatgaagttggtggtgaggccctgggcaggcccggcgggttctacccttccggcgggtggtcgactcggaccgatg

SEQ ID NO: 14908 - DNA, 203 bp, synthetic construct
  source 1..203: mol_type = other DNA
ggcgcgccagtcctatttcgctcgctgacacaactgtgttcactagcaacctcaaacagacaccatggtgcatctgactcctgaggagaagtctgccgttactgccctgtggggcaaggtgaacgtggatgaagttggtggtgaggccctgggcaggccgtcaattcctttaccttggacccagaggtcgactcggaccgatg

SEQ ID NO: 14909 - DNA, 203 bp, synthetic construct
  source 1..203: mol_type = other DNA
ggcgcgccagtcctaaattcgcttctgacacaactgtgttcactagcaacctcaaacagacaccatggtgcatctgactcctgaggagaagtctgccgttactgccctgtggggcaaggtgaacgtggatgaagttggtggtgaggccctgggcaggctactcccggtctacccttggacccagaggtcgactcggaccgatg

SEQ ID NO: 14910 - DNA, 203 bp, synthetic construct
  source 1..203: mol_type = other DNA
ggcgcgccagtcctggatttcgctctgacacaactgtgttcactagcaacctcaaacagacaccatggtgcatctgactcctgaggagaagtctgccgttactgccctgtggggcaaggtgaacgtggatgaagttggtggtgaggccctgggcaggctactcccggtctacccttggaccggcgggtcgactcggaccgatg

SEQ ID NO: 14911 - DNA, 203 bp, synthetic construct
  source 1..203: mol_type = other DNA
ggcgcgccagtcctcttcgctagtctgacacaactgtgttcactagcaacctcaaacagacaccatggtgcatctgactcctgaggagaagtctgccgttactgccctgtggggcaaggtgaacgtggatgaagttggtggtgaggccctgggcaggctactcccggtctaccctttactcccgaggtcgactcggaccgatg

SEQ ID NO: 14912 - DNA, 203 bp, synthetic construct
  source 1..203: mol_type = other DNA
ggcgcgccagtcctttgtcatgggctgacacaactgtgttcactagcaacctcaaacagacaccatggtgcatctgactcctgaggagaagtctgccgttactgccctgtggggcaaggtgaacgtggatgaagttggtggtgaggccctgggcaggctgcacggaatcgagaattggacctactccccgactcggaccgatg

SEQ ID NO: 14913 - DNA, 203 bp, synthetic construct
  source 1..203: mol_type = other DNA
ggcgcgccagtccttgtaggtgccctgacacaactgtgttcactagcaacctcaaacagacaccatggtgcatctgactcctgaggagaagtctgccgttactgccctgtggggcaaggtgaacgtggatgaagttggtggtgaggccctgggcaggctgcccggcgggtacccttgttcttggcaaacgactcggaccgatg

SEQ ID NO: 14914 - DNA, 203 bp, synthetic construct
  source 1..203: mol_type = other DNA
ggcgcgccagtcctgtgacgttctctgacacaactgtgttcactagcaacctcaaacagacaccatggtgcatctgactcctgaggagaagtctgccgttactgccctgtggggcaaggtgaacgtggatgaagttggtggtgaggccctgggcaggctgcgtcaattcctttacacggaatcgagaacgactcggaccgatg

SEQ ID NO: 14915 - DNA, 203 bp, synthetic construct
  source 1..203: mol_type = other DNA
ggcgcgccagtcctaccttacgcactgacacaactgtgttcactagcaacctcaaacagacaccatggtgcatctgactcctgaggagaagtctgccgttactgccctgtggggcaaggtgaacgtggatgaagttggtggtgaggccctgggcaggctgctgaccggccgtccttggaaccggccgtcgactcggaccgatg

SEQ ID NO: 14916 - DNA, 203 bp, synthetic construct
  source 1..203: mol_type = other DNA
ggcgcgccagtcctcttacgctctctgacacaactgtgttcactagcaacctcaaacagacaccatggtgcatctgactcctgaggagaagtctgccgttactgccctgtggggcaaggtgaacgtggatgaagttggtggtgaggccctgggcaggctgctgcacggaatcgagaattcttggcaaacgactcggaccgatg

SEQ ID NO: 14917 - DNA, 203 bp, synthetic construct
  source 1..203: mol_type = other DNA
ggcgcgccagtccttgctgtgttcctgacacaactgtgttcactagcaacctcaaacagacaccatggtgcatctgactcctgaggagaagtctgccgttactgccctgtggggcaaggtgaacgtggatgaagttggtggtgaggccctgggcaggctgctggtcacggaatcgagaaccggcgggtcgactcggaccgatg

SEQ ID NO: 14918 - DNA, 203 bp, synthetic construct
  source 1..203: mol_type = other DNA
ggcgcgccagtccttatcgtgttactgacacaactgtgttcactagcaacctcaaacagacaccatggtgcatctgactcctgaggagaagtctgccgttactgccctgtggggcaaggtgaacgtggatgaagttggtggtgaggccctgggcaggctgctggtccggcgggtttggacccagaggtcgactcggaccgatg

SEQ ID NO: 14919 - DNA, 203 bp, synthetic construct
  source 1..203: mol_type = other DNA
ggcgcgccagtcctaacacgatcgctgacacaactgtgttcactagcaacctcaaacagacaccatggtgcatctgactcctgaggagaagtctgccgttactgccctgtggggcaaggtgaacgtggatgaagttggtggtgaggccctgggcaggctgctggtcgtcaattcctttaccggcgggtcgactcggaccgatg

SEQ ID NO: 14920 - DNA, 203 bp, synthetic construct
  source 1..203: mol_type = other DNA
ggcgcgccagtcctgacctaagaactgacacaactgtgttcactagcaacctcaaacagacaccatggtgcatctgactcctgaggagaagtctgccgttactgccctgtggggcaaggtgaacgtggatgaagttggtggtgaggccctgggcaggctgctggtggcgtcaattcctttatactccccgactcggaccgatg

SEQ ID NO: 14921 - DNA, 203 bp, synthetic construct
  source 1..203: mol_type = other DNA
ggcgcgccagtccttcagcctaccctgacacaactgtgttcactagcaacctcaaacagacaccatggtgcatctgactcctgaggagaagtctgccgttactgccctgtggggcaaggtgaacgtggatgaagttggtggtgaggccctgggcaggctgctggtggtactcccttggacctactccccgactcggaccgatg

SEQ ID NO: 14922 - DNA, 203 bp, synthetic construct
  source 1..203: mol_type = other DNA
ggcgcgccagtcctctttcagcctctgacacaactgtgttcactagcaacctcaaacagacaccatggtgcatctgactcctgaggagaagtctgccgttactgccctgtggggcaaggtgaacgtggatgaagttggtggtgaggccctgggcaggctgctggtggtctaccccgtcaattcctttacgactcggaccgatg

SEQ ID NO: 14923 - DNA, 203 bp, synthetic construct
  source 1..203: mol_type = other DNA
ggcgcgccagtcctgtaagtcatgctgacacaactgtgttcactagcaacctcaaacagacaccatggtgcatctgactcctgaggagaagtctgccgttactgccctgtggggcaaggtgaacgtggatgaagttggtggtgaggccctgggcaggctgctggtggtctaccctactccctactccccgactcggaccgatg

SEQ ID NO: 14924 - DNA, 203 bp, synthetic construct
  source 1..203: mol_type = other DNA
ggcgcgccagtcctagaacctgtgctgacacaactgtgttcactagcaacctcaaacagacaccatggtgcatctgactcctgaggagaagtctgccgttactgccctgtggggcaaggtgaacgtggatgaagttggtggtgaggccctgggcaggctgctggtggtctacccttccggcgggtggtcgactcggaccgatg

SEQ ID NO: 14925 - DNA, 203 bp, synthetic construct
  source 1..203: mol_type = other DNA
ggcgcgccagtcctttgaggttcactgacacaactgtgttcactagcaacctcaaacagacaccatggtgcatctgactcctgaggagaagtctgccgttactgccctgtggggcaaggtgaacgtggatgaagttggtggtgaggccctgggcaggctgctggtggtctacccttccggcgggtggtcgactcggaccgatg

SEQ ID NO: 14926 - DNA, 203 bp, synthetic construct
  source 1..203: mol_type = other DNA
ggcgcgccagtcctgaccgaaacactgacacaactgtgttcactagcaacctcaaacagacaccatggtgcatctgactcctgaggagaagtctgccgttactgccctgtggggcaaggtgaacgtggatgaagttggtggtgaggccctgggcaggctgctggtggtctacccttccggcgggtggtcgactcggaccgatg

SEQ ID NO: 14927 - DNA, 203 bp, synthetic construct
  source 1..203: mol_type = other DNA
ggcgcgccagtcctcgtgtacccactgacacaactgtgttcactagcaacctcaaacagacaccatggtgcatctgactcctgaggagaagtctgccgttactgccctgtggggcaaggtgaacgtggatgaagttggtggtgaggccctgggcaggctgctggtggtctacccttccggcgggtggtcgactcggaccgatg

SEQ ID NO: 14928 - DNA, 203 bp, synthetic construct
  source 1..203: mol_type = other DNA
ggcgcgccagtcctgtcaacacgtctgacacaactgtgttcactagcaacctcaaacagacaccatggtgcatctgactcctgaggagaagtctgccgttactgccctgtggggcaaggtgaacgtggatgaagttggtggtgaggccctgggcaggctgctggtggtctacccttggacccagaggtcgactcggaccgatg

SEQ ID NO: 14929 - DNA, 203 bp, synthetic construct
  source 1..203: mol_type = other DNA
ggcgcgccagtcctccagtgttgactgacacaactgtgttcactagcaacctcaaacagacaccatggtgcatctgactcctgaggagaagtctgccgttactgccctgtggggcaaggtgaacgtggatgaagttggtggtgaggccctgggcaggctgctggtggtctacccttggacccagaggtcgactcggaccgatg

SEQ ID NO: 14930 - DNA, 203 bp, synthetic construct
  source 1..203: mol_type = other DNA
ggcgcgccagtccttcaacacttactgacacaactgtgttcactagcaacctcaaacagacaccatggtgcatctgactcctgaggagaagtctgccgttactgccctgtggggcaaggtgaacgtggatgaagttggtggtgaggccctgggcaggctgctggtggtctacccttggacccagaggtcgactcggaccgatg

SEQ ID NO: 14931 - DNA, 203 bp, synthetic construct
  source 1..203: mol_type = other DNA
ggcgcgccagtcctttgtaaacccctgacacaactgtgttcactagcaacctcaaacagacaccatggtgcatctgactcctgaggagaagtctgccgttactgccctgtggggcaaggtgaacgtggatgaagttggtggtgaggccctgggcaggctgctggtggtctacccttggacccagaggtcgactcggaccgatg

SEQ ID NO: 14932 - DNA, 203 bp, synthetic construct
  source 1..203: mol_type = other DNA
ggcgcgccagtccttgtggtagaactgacacaactgtgttcactagcaacctcaaacagacaccatggtgcatctgactcctgaggagaagtctgccgttactgccctgtggggcaaggtgaacgtggatgaagttggtggtgaggccctgggcaggctgctggtggtctacccttggacccagaggtcgactcggaccgatg

SEQ ID NO: 14933 - DNA, 203 bp, synthetic construct
  source 1..203: mol_type = other DNA
ggcgcgccagtcctgctggactttctgacacaactgtgttcactagcaacctcaaacagacaccatggtgcatctgactcctgaggagaagtctgccgttactgccctgtggggcaaggtgaacgtggatgaagttggtggtgaggccctgggcaggctgctggtggtctactactcccaccggccgtcgactcggaccgatg

SEQ ID NO: 14934 - DNA, 203 bp, synthetic construct
  source 1..203: mol_type = other DNA
ggcgcgccagtcctagttggtcccctgacacaactgtgttcactagcaacctcaaacagacaccatggtgcatctgactcctgaggagaagtctgccgttactgccctgtggggcaaggtgaacgtggatgaagttggtggtgaggccctgggcaggctgctggtggtctccggcgggtaccggccgtcgactcggaccgatg

SEQ ID NO: 14935 - DNA, 203 bp, synthetic construct
  source 1..203: mol_type = other DNA
ggcgcgccagtccttagaagtcccctgacacaactgtgttcactagcaacctcaaacagacaccatggtgcatctgactcctgaggagaagtctgccgttactgccctgtggggcaaggtgaacgtggatgaagttggtggtgaggccctgggcaggctgctggtggtttcttggcaaaaccggccgtcgactcggaccgatg

SEQ ID NO: 14936 - DNA, 203 bp, synthetic construct
  source 1..203: mol_type = other DNA
ggcgcgccagtccttcccaaccgtctgacacaactgtgttcactagcaacctcaaacagacaccatggtgcatctgactcctgaggagaagtctgccgttactgccctgtggggcaaggtgaacgtggatgaagttggtggtgaggccctgggcaggctgctggttactcccccttggaaccggccgtcgactcggaccgatg

SEQ ID NO: 14937 - DNA, 203 bp, synthetic construct
  source 1..203: mol_type = other DNA
ggcgcgccagtcctatcccaaggactgacacaactgtgttcactagcaacctcaaacagacaccatggtgcatctgactcctgaggagaagtctgccgttactgccctgtggggcaaggtgaacgtggatgaagttggtggtgaggccctgggcaggctgctgttcttggcaaattggacccagaggtcgactcggaccgatg

SEQ ID NO: 14938 - DNA, 203 bp, synthetic construct
  source 1..203: mol_type = other DNA
ggcgcgccagtcctgcatgatcccctgacacaactgtgttcactagcaacctcaaacagacaccatggtgcatctgactcctgaggagaagtctgccgttactgccctgtggggcaaggtgaacgtggatgaagttggtggtgaggccctgggcaggctgctgttcttggcaaattggacctactccccgactcggaccgatg

SEQ ID NO: 14939 - DNA, 203 bp, synthetic construct
  source 1..203: mol_type = other DNA
ggcgcgccagtcctgggatcctaactgacacaactgtgttcactagcaacctcaaacagacaccatggtgcatctgactcctgaggagaagtctgccgttactgccctgtggggcaaggtgaacgtggatgaagttggtggtgaggccctgggcaggctgtactccctctaccccgtcaattcctttacgactcggaccgatg

SEQ ID NO: 14940 - DNA, 203 bp, synthetic construct
  source 1..203: mol_type = other DNA
ggcgcgccagtcctttgggacctcctgacacaactgtgttcactagcaacctcaaacagacaccatggtgcatctgactcctgaggagaagtctgccgttactgccctgtggggcaaggtgaacgtggatgaagttggtggtgaggccctgggcaggcttctcgattccgtgccttggacccagaggtcgactcggaccgatg

SEQ ID NO: 14941 - DNA, 203 bp, synthetic construct
  source 1..203: mol_type = other DNA
ggcgcgccagtcctatttgggaccctgacacaactgtgttcactagcaacctcaaacagacaccatggtgcatctgactcctgaggagaagtctgccgttactgccctgtggggcaaggtgaacgtggatgaagttggtggtgaggccctgggcagttcttggcaaatctacccttggacccagaggtcgactcggaccgatg

SEQ ID NO: 14942 - DNA, 203 bp, synthetic construct
  source 1..203: mol_type = other DNA
ggcgcgccagtcctgggatactcgctgacacaactgtgttcactagcaacctcaaacagacaccatggtgcatctgactcctgaggagaagtctgccgttactgccctgtggggcaaggtgaacgtggatgaagttggtggtgaggccctgggcccggcgggtgtggtctacccttgttcttggcaaacgactcggaccgatg

SEQ ID NO: 14943 - DNA, 203 bp, synthetic construct
  source 1..203: mol_type = other DNA
ggcgcgccagtcctagagcgttgtctgacacaactgtgttcactagcaacctcaaacagacaccatggtgcatctgactcctgaggagaagtctgccgttactgccctgtggggcaaggtgaacgtggatgaagttggtggtgaggccctgggcgtcaattcctttatctacccttggacccagaggtcgactcggaccgatg

SEQ ID NO: 14944 - DNA, 203 bp, synthetic construct
  source 1..203: mol_type = other DNA
ggcgcgccagtcctggcgttgaacctgacacaactgtgttcactagcaacctcaaacagacaccatggtgcatctgactcctgaggagaagtctgccgttactgccctgtggggcaaggtgaacgtggatgaagttggtggtgaggccctgggcttcttggcaaaggtctacccttggaaccggccgtcgactcggaccgatg

SEQ ID NO: 14945 - DNA, 203 bp, synthetic construct
  source 1..203: mol_type = other DNA
ggcgcgccagtccttgtcgtgagcctgacacaactgtgttcactagcaacctcaaacagacaccatggtgcatctgactcctgaggagaagtctgccgttactgccctgtggggcaaggtgaacgtggatgaagttggtggtgaggccctgggtactcccctggtggtctaccccgtcaattcctttacgactcggaccgatg

SEQ ID NO: 14946 - DNA, 203 bp, synthetic construct
  source 1..203: mol_type = other DNA
ggcgcgccagtcctacacgacgaactgacacaactgtgttcactagcaacctcaaacagacaccatggtgcatctgactcctgaggagaagtctgccgttactgccctgtggggcaaggtgaacgtggatgaagttggtggtgaggcccttcttggcaaactggtggtctaccccacggaatcgagaacgactcggaccgatg

SEQ ID NO: 14947 - DNA, 203 bp, synthetic construct
  source 1..203: mol_type = other DNA
ggcgcgccagtcctcacgactgggctgacacaactgtgttcactagcaacctcaaacagacaccatggtgcatctgactcctgaggagaagtctgccgttactgccctgtggggcaaggtgaacgtggatgaagttggtggtgaggcccttcttggcaaactggtggtctacccttggacctactccccgactcggaccgatg

SEQ ID NO: 14948 - DNA, 203 bp, synthetic construct
  source 1..203: mol_type = other DNA
ggcgcgccagtcctacctgtcgtgctgacacaactgtgttcactagcaacctcaaacagacaccatggtgcatctgactcctgaggagaagtctgccgttactgccctgtggggcaaggtgaacgtggatgaagttggtggtgaggcgtcaattcctttactggtggtctaccccgtcaattcctttacgactcggaccgatg

SEQ ID NO: 14949 - DNA, 203 bp, synthetic construct
  source 1..203: mol_type = other DNA
ggcgcgccagtccttgcggtctttctgacacaactgtgttcactagcaacctcaaacagacaccatggtgcatctgactcctgaggagaagtctgccgttactgccctgtggggcaaggtgaacgtggatgaagttggtggtgaggcttcttggcaaatgctggtggtctacccttggaccggcgggtcgactcggaccgatg

SEQ ID NO: 14950 - DNA, 203 bp, synthetic construct
  source 1..203: mol_type = other DNA
ggcgcgccagtccttcgcggtctactgacacaactgtgttcactagcaacctcaaacagacaccatggtgcatctgactcctgaggagaagtctgccgttactgccctgtggggcaaggtgaacgtggatgaagttggtggtgaggtactccccaggctgctggtggtctaccccgtcaattcctttacgactcggaccgatg

SEQ ID NO: 14951 - DNA, 203 bp, synthetic construct
  source 1..203: mol_type = other DNA
ggcgcgccagtccttgcggttgcactgacacaactgtgttcactagcaacctcaaacagacaccatggtgcatctgactcctgaggagaagtctgccgttactgccctgtggggcaaggtgaacgtggatgaagttggtggtgagttcttggcaaagctgctggtggtctacccttgttcttggcaaacgactcggaccgatg

SEQ ID NO: 14952 - DNA, 203 bp, synthetic construct
  source 1..203: mol_type = other DNA
ggcgcgccagtcctgcggttaggtctgacacaactgtgttcactagcaacctcaaacagacaccatggtgcatctgactcctgaggagaagtctgccgttactgccctgtggggcaaggtgaacgtggatgaagttggtggtgatactcccggcaggctgctggtggtctacccttggaaccggccgtcgactcggaccgatg

SEQ ID NO: 14953 - DNA, 203 bp, synthetic construct
  source 1..203: mol_type = other DNA
ggcgcgccagtcctgcggtttgccctgacacaactgtgttcactagcaacctcaaacagacaccatggtgcatctgactcctgaggagaagtctgccgttactgccctgtggggcaaggtgaacgtggatgaagttggtggttactccctgggcaggctgctggtggtctacccttgttcttggcaaacgactcggaccgatg

SEQ ID NO: 14954 - DNA, 203 bp, synthetic construct
  source 1..203: mol_type = other DNA
ggcgcgccagtcctagttagcggtctgacacaactgtgttcactagcaacctcaaacagacaccatggtgcatctgactcctgaggagaagtctgccgttactgccctgtggggcaaggtgaacgtggatgaagttggtgtactccccctgggcaggctactcccggtctacccttggacccagaggtcgactcggaccgatg

SEQ ID NO: 14955 - DNA, 203 bp, synthetic construct
  source 1..203: mol_type = other DNA
ggcgcgccagtcctctgagcggtcctgacacaactgtgttcactagcaacctcaaacagacaccatggtgcatctgactcctgaggagaagtctgccgttactgccctgtggggcaaggtgaacgtggatgaagttggtgttcttggcaaaggcaggctgctggtggtctacccttggaaccggccgtcgactcggaccgatg

SEQ ID NO: 14956 - DNA, 203 bp, synthetic construct
  source 1..203: mol_type = other DNA
ggcgcgccagtcctcagcggtttcctgacacaactgtgttcactagcaacctcaaacagacaccatggtgcatctgactcctgaggagaagtctgccgttactgccctgtggggcaaggtgaacgtggatgaagttggtgttcttggcaaaggcaggctgctggtggtctacccttggaccggcgggtcgactcggaccgatg

SEQ ID NO: 14957 - DNA, 203 bp, synthetic construct
  source 1..203: mol_type = other DNA
ggcgcgccagtccttagaccgcatctgacacaactgtgttcactagcaacctcaaacagacaccatggtgcatctgactcctgaggagaagtctgccgttactgccctgtggggcaaggtgaacgtggatgaagttggttactcccccctgggcaggctgctggtggtctaccccacggaatcgagaacgactcggaccgatg

SEQ ID NO: 14958 - DNA, 203 bp, synthetic construct
  source 1..203: mol_type = other DNA
ggcgcgccagtccttaccgcttgactgacacaactgtgttcactagcaacctcaaacagacaccatggtgcatctgactcctgaggagaagtctgccgttactgccctgtggggcaaggtgaacgtggatgaagttggttactcccccctgggcaggctgctggtggtctacccttggacccagaggtcgactcggaccgatg

SEQ ID NO: 14959 - DNA, 203 bp, synthetic construct
  source 1..203: mol_type = other DNA
ggcgcgccagtccttaccgcaactctgacacaactgtgttcactagcaacctcaaacagacaccatggtgcatctgactcctgaggagaagtctgccgttactgccctgtggggcaaggtgaacgtggatgaagttggttcttggcaaatgggcaggctgctggtggtctacccttgttcttggcaaacgactcggaccgatg

SEQ ID NO: 14960 - DNA, 203 bp, synthetic construct
  source 1..203: mol_type = other DNA
ggcgcgccagtcctataccgcttcctgacacaactgtgttcactagcaacctcaaacagacaccatggtgcatctgactcctgaggagaagtctgccgttactgccctgtggggcaaggtgaacgtggatgaagttgtactcccggccctgggcaggctgctggtggtctacccttggaccggcgggtcgactcggaccgatg

SEQ ID NO: 14961 - DNA, 203 bp, synthetic construct
  source 1..203: mol_type = other DNA
ggcgcgccagtcctcgcaaccgcactgacacaactgtgttcactagcaacctcaaacagacaccatggtgcatctgactcctgaggagaagtctgccgttactgccctgtggggcaaggtgaacgtggatgaagtttcttggcaaaccctgggcaggctgctggtggtctaccccgtcaattcctttacgactcggaccgatg

SEQ ID NO: 14962 - DNA, 203 bp, synthetic construct
  source 1..203: mol_type = other DNA
ggcgcgccagtcctagtcaccgcgctgacacaactgtgttcactagcaacctcaaacagacaccatggtgcatctgactcctgaggagaagtctgccgttactgccctgtggggcaaggtgaacgtggatgacacggaatcgagaaccctgggcaggctgctggtggtctaccccgtcaattcctttacgactcggaccgatg

SEQ ID NO: 14963 - DNA, 203 bp, synthetic construct
  source 1..203: mol_type = other DNA
ggcgcgccagtcctcgaccgctttctgacacaactgtgttcactagcaacctcaaacagacaccatggtgcatctgactcctgaggagaagtctgccgttactgccctgtggggcaaggtgaacgtggatgacacggaatcgagaaccctgggcaggctgctggtggtctacccttggacctactccccgactcggaccgatg

SEQ ID NO: 14964 - DNA, 203 bp, synthetic construct
  source 1..203: mol_type = other DNA
ggcgcgccagtcctgtaccgcacactgacacaactgtgttcactagcaacctcaaacagacaccatggtgcatctgactcctgaggagaagtctgccgttactgccctgtggggcaaggtgaacgtggatgatactcccggtgaggccctgggcaggctgctggtggtctaccccgtcaattcctttacgactcggaccgatg

SEQ ID NO: 14965 - DNA, 203 bp, synthetic construct
  source 1..203: mol_type = other DNA
ggcgcgccagtccttagtgaccgcctgacacaactgtgttcactagcaacctcaaacagacaccatggtgcatctgactcctgaggagaagtctgccgttactgccctgtggggcaaggtgaacgtggatgatactcccggtgaggccctgggcaggctgctggtggtctacccttggacctactccccgactcggaccgatg

SEQ ID NO: 14966 - DNA, 203 bp, synthetic construct
  source 1..203: mol_type = other DNA
ggcgcgccagtcctccattctgcactgacacaactgtgttcactagcaacctcaaacagacaccatggtgcatctgactcctgaggagaagtctgccgttactgccctgtggggcaaggtgaacgtggccggcgggtgtggtgaggccctgggcaggctgctggtggtctacccttggaccggcgggtcgactcggaccgatg

SEQ ID NO: 14967 - DNA, 203 bp, synthetic construct
  source 1..203: mol_type = other DNA
ggcgcgccagtcctccagaatgacctgacacaactgtgttcactagcaacctcaaacagacaccatggtgcatctgactcctgaggagaagtctgccgttactgccctgtggggcaaggtgaacgtggtactccctggtggtgaggccctgggcaggctgctggtggtctacccttgttcttggcaaacgactcggaccgatg

SEQ ID NO: 14968 - DNA, 203 bp, synthetic construct
  source 1..203: mol_type = other DNA
ggcgcgccagtcctgtacacacagctgacacaactgtgttcactagcaacctcaaacagacaccatggtgcatctgactcctgaggagaagtctgccgttactgccctgtggggcaaggtgaacgtggttcttggcaaaggtgaggccctgggcaggctgctggtggtctacccttggacctactccccgactcggaccgatg

SEQ ID NO: 14969 - DNA, 203 bp, synthetic construct
  source 1..203: mol_type = other DNA
ggcgcgccagtccttttgaattcgctgacacaactgtgttcactagcaacctcaaacagacaccatggtgcatctgactcctgaggagaagtctgccgttactgccctgtggggcaaggtgaacgtttcttggcaaagtggtgaggccctgggcaggctgctggtggtctacccttggaaccggccgtcgactcggaccgatg

SEQ ID NO: 14970 - DNA, 203 bp, synthetic construct
  source 1..203: mol_type = other DNA
ggcgcgccagtccttaaagtctacctgacacaactgtgttcactagcaacctcaaacagacaccatggtgcatctgactcctgaggagaagtctgccgttactgccctgtggggcaaggtgacacggaatcgagaaggtgcacggaatcgagaaaggccacggaatcgagaaccttggacccagaggtcgactcggaccgatg

SEQ ID NO: 14971 - DNA, 203 bp, synthetic construct
  source 1..203: mol_type = other DNA
ggcgcgccagtcctgtcaaagtctctgacacaactgtgttcactagcaacctcaaacagacaccatggtgcatctgactcctgaggagaagtctgccgttactgccctgtggggcaaggtgacacggaatcgagaaggtgcacggaatcgagaaaggctgctggtggtctacccttggacccagaggtcgactcggaccgatg

SEQ ID NO: 14972 - DNA, 203 bp, synthetic construct
  source 1..203: mol_type = other DNA
ggcgcgccagtcctgctgaagtctctgacacaactgtgttcactagcaacctcaaacagacaccatggtgcatctgactcctgaggagaagtctgccgttactgccctgtggggcaaggtgacacggaatcgagaaggtggtgaggccctgggcaggctgctggtggtctacccttggacccagaggtcgactcggaccgatg

SEQ ID NO: 14973 - DNA, 203 bp, synthetic construct
  source 1..203: mol_type = other DNA
ggcgcgccagtcctcaagtctacactgacacaactgtgttcactagcaacctcaaacagacaccatggtgcatctgactcctgaggagaagtctgccgttactgccctgtggggcaaggtgaccggccgtgaagttggtggtgaggccctgggcaggctgctggtggtctacccttggaccggcgggtcgactcggaccgatg

SEQ ID NO: 14974 - DNA, 203 bp, synthetic construct
  source 1..203: mol_type = other DNA
ggcgcgccagtcctagctagacttctgacacaactgtgttcactagcaacctcaaacagacaccatggtgcatctgactcctgaggagaagtctgccgttactgccctgtggggcaaggtgaccggcgggtaagttggtgccggcgggttgggcaggcccggcgggttctacccttccggcgggtggtcgactcggaccgatg

SEQ ID NO: 14975 - DNA, 203 bp, synthetic construct
  source 1..203: mol_type = other DNA
ggcgcgccagtcctgggtacgcttctgacacaactgtgttcactagcaacctcaaacagacaccatggtgcatctgactcctgaggagaagtctgccgttactgccctgtggggcaaggtgaccggcgggtaagttggtgccggcgggttgggcaggcccggcgggttctacccttccggcgggtggtcgactcggaccgatg

SEQ ID NO: 14976 - DNA, 203 bp, synthetic construct
  source 1..203: mol_type = other DNA
ggcgcgccagtccttgagtacgccctgacacaactgtgttcactagcaacctcaaacagacaccatggtgcatctgactcctgaggagaagtctgccgttactgccctgtggggcaaggtgaccggcgggtaagttggtgccggcgggttgggcaggctgctggtggtctacccttccggcgggtggtcgactcggaccgatg

SEQ ID NO: 14977 - DNA, 203 bp, synthetic construct
  source 1..203: mol_type = other DNA
ggcgcgccagtccttagagtgtgactgacacaactgtgttcactagcaacctcaaacagacaccatggtgcatctgactcctgaggagaagtctgccgttactgccctgtggggcaaggtgaccggcgggtaagttggtggtgaggccctgggcaggcccggcgggttctacccttccggcgggtggtcgactcggaccgatg

SEQ ID NO: 14978 - DNA, 203 bp, synthetic construct
  source 1..203: mol_type = other DNA
ggcgcgccagtcctattgcggtggctgacacaactgtgttcactagcaacctcaaacagacaccatggtgcatctgactcctgaggagaagtctgccgttactgccctgtggggcaaggtgatactccctgaagttggtgtactccccctgggcaggctactcccggtctacccttggacccagaggtcgactcggaccgatg

SEQ ID NO: 14979 - DNA, 203 bp, synthetic construct
  source 1..203: mol_type = other DNA
ggcgcgccagtcctaattgaacgtctgacacaactgtgttcactagcaacctcaaacagacaccatggtgcatctgactcctgaggagaagtctgccgttactgccctgtggggcaaggtgatactccctgaagttggtgtactccccctgggcaggctgctggtggtctacccttggacccagaggtcgactcggaccgatg

SEQ ID NO: 14980 - DNA, 203 bp, synthetic construct
  source 1..203: mol_type = other DNA
ggcgcgccagtcctgctcattgacctgacacaactgtgttcactagcaacctcaaacagacaccatggtgcatctgactcctgaggagaagtctgccgttactgccctgtggggcaaggtgattcttggcaaagttggtggtgaggccctgggcaggctgctggtggtctacccttggacccagaggtcgactcggaccgatg

SEQ ID NO: 14981 - DNA, 203 bp, synthetic construct
  source 1..203: mol_type = other DNA
ggcgcgccagtcctcaattctcgtctgacacaactgtgttcactagcaacctcaaacagacaccatggtgcatctgactcctgaggagaagtctgccgttactgccctgtggggcaaggtgcacggaatcgagaatggtggtgaggccctgggcaggctgctggtggtctacccttgttcttggcaaacgactcggaccgatg

SEQ ID NO: 14982 - DNA, 203 bp, synthetic construct
  source 1..203: mol_type = other DNA
ggcgcgccagtcctttcattgcagctgacacaactgtgttcactagcaacctcaaacagacaccatggtgcatctgactcctgaggagaagtctgccgttactgccctgtggggcaaggtgcgtcaattcctttatggtggtgaggccctgggcaggctgctggtggtctacccttgttcttggcaaacgactcggaccgatg

SEQ ID NO: 14983 - DNA, 203 bp, synthetic construct
  source 1..203: mol_type = other DNA
ggcgcgccagtcctggtgatcaatctgacacaactgtgttcactagcaacctcaaacagacaccatggtgcatctgactcctgaggagaagtctgccgttactgccctgtggggcaaggtgtactcccatgaagttggtggtgaggccctgggcaggctgctggtggtctacccttgttcttggcaaacgactcggaccgatg

SEQ ID NO: 14984 - DNA, 203 bp, synthetic construct
  source 1..203: mol_type = other DNA
ggcgcgccagtcctatcagaattgctgacacaactgtgttcactagcaacctcaaacagacaccatggtgcatctgactcctgaggagaagtctgccgttactgccctgtggggcaaggtgttcttggcaaaagttggtggtgaggccctgggcaggctgctggtggtctaccccgtcaattcctttacgactcggaccgatg

SEQ ID NO: 14985 - DNA, 203 bp, synthetic construct
  source 1..203: mol_type = other DNA
ggcgcgccagtcctggtcaattcgctgacacaactgtgttcactagcaacctcaaacagacaccatggtgcatctgactcctgaggagaagtctgccgttactgccctgtggggcaagtactccctggatgaagttggtggtgaggccctgggcaggctgctggtggtctaccccgtcaattcctttacgactcggaccgatg

SEQ ID NO: 14986 - DNA, 203 bp, synthetic construct
  source 1..203: mol_type = other DNA
ggcgcgccagtcctacttcaattcctgacacaactgtgttcactagcaacctcaaacagacaccatggtgcatctgactcctgaggagaagtctgccgttactgccctgtggggcaagtactccctggatgaagttggtggtgaggccctgggcaggctgctggtggtctacccttggacccagaggtcgactcggaccgatg

SEQ ID NO: 14987 - DNA, 203 bp, synthetic construct
  source 1..203: mol_type = other DNA
ggcgcgccagtcctgaggattgatctgacacaactgtgttcactagcaacctcaaacagacaccatggtgcatctgactcctgaggagaagtctgccgttactgccctgtggggcaattcttggcaaaatgaagttggtggtgaggccctgggcaggctgctggtggtctacccttgttcttggcaaacgactcggaccgatg

SEQ ID NO: 14988 - DNA, 203 bp, synthetic construct
  source 1..203: mol_type = other DNA
ggcgcgccagtcctacaatctaagctgacacaactgtgttcactagcaacctcaaacagacaccatggtgcatctgactcctgaggagaagtctgccgttactgccctgtggggcacacggaatcgagaagaagttggtggtgaggccctgggcaggctgctggtggtctacccttggaaccggccgtcgactcggaccgatg

SEQ ID NO: 14989 - DNA, 203 bp, synthetic construct
  source 1..203: mol_type = other DNA
ggcgcgccagtcctccacattgatctgacacaactgtgttcactagcaacctcaaacagacaccatggtgcatctgactcctgaggagaagtctgccgttactgccctgtggggcacacggaatcgagaagaagttggtggtgaggccctgggcaggctgctggtggtctacccttggaccggcgggtcgactcggaccgatg

SEQ ID NO: 14990 - DNA, 203 bp, synthetic construct
  source 1..203: mol_type = other DNA
ggcgcgccagtcctctcagcaatgctgacacaactgtgttcactagcaacctcaaacagacaccatggtgcatctgactcctgaggagaagtctgccgttactgccctgtggggcacgtcaattcctttagaagttggtggtgaggccctgggcaggctgctggtggtctacccttggaccggcgggtcgactcggaccgatg

SEQ ID NO: 14991 - DNA, 203 bp, synthetic construct
  source 1..203: mol_type = other DNA
ggcgcgccagtcctaacgatcaatctgacacaactgtgttcactagcaacctcaaacagacaccatggtgcatctgactcctgaggagaagtctgccgttactgccctgtggttcttggcaaacgtggatgaagttggtggtgaggccctgggcaggctgctggtggtctacccttggaccggcgggtcgactcggaccgatg

SEQ ID NO: 14992 - DNA, 203 bp, synthetic construct
  source 1..203: mol_type = other DNA
ggcgcgccagtccttctgattgctctgacacaactgtgttcactagcaacctcaaacagacaccatggtgcatctgactcctgaggagaagtctgccgttactgccctgtgtactcccgtgaacgtggatgaagttggtggtgaggccctgggcaggctgctggtggtctaccccacggaatcgagaacgactcggaccgatg

SEQ ID NO: 14993 - DNA, 203 bp, synthetic construct
  source 1..203: mol_type = other DNA
ggcgcgccagtccttcgctcaatgctgacacaactgtgttcactagcaacctcaaacagacaccatggtgcatctgactcctgaggagaagtctgccgttactgccctgtgtactcccgtgaacgtggatgaagttggtggtgaggccctgggcaggctgctggtggtctaccccgtcaattcctttacgactcggaccgatg

SEQ ID NO: 14994 - DNA, 203 bp, synthetic construct
  source 1..203: mol_type = other DNA
ggcgcgccagtcctttcattgattctgacacaactgtgttcactagcaacctcaaacagacaccatggtgcatctgactcctgaggagaagtctgccgttactgccctgtgtactcccgtgaacgtggatgaagttggtggtgaggccctgggcaggctgctggtggtctacccttggacccagaggtcgactcggaccgatg

SEQ ID NO: 14995 - DNA, 203 bp, synthetic construct
  source 1..203: mol_type = other DNA
ggcgcgccagtcctactgtattgcctgacacaactgtgttcactagcaacctcaaacagacaccatggtgcatctgactcctgaggagaagtctgccgttactgccctgtgtactccggtgaacgtggatgaagttggtggtgaggccctgggcaggctgctggtggtctacccttggacccagaggtcgactcggaccgatg

SEQ ID NO: 14996 - DNA, 203 bp, synthetic construct
  source 1..203: mol_type = other DNA
ggcgcgccagtcctcagagcaattctgacacaactgtgttcactagcaacctcaaacagacaccatggtgcatctgactcctgaggagaagtctgccgttactgcccttcttggcaaagtgaacgtggatgaagttggtggtgaggccctgggcaggctgctggtggtctaccccacggaatcgagaacgactcggaccgatg

SEQ ID NO: 14997 - DNA, 203 bp, synthetic construct
  source 1..203: mol_type = other DNA
ggcgcgccagtcctcgcaatactcctgacacaactgtgttcactagcaacctcaaacagacaccatggtgcatctgactcctgaggagaagtctgccgttactgccggcgggtgcaaggtgaacgtggatgaagttggtggtgaggccctgggcaggcccggcgggttctacccttccggcgggtggtcgactcggaccgatg

SEQ ID NO: 14998 - DNA, 203 bp, synthetic construct
  source 1..203: mol_type = other DNA
ggcgcgccagtcctgatcgattgtctgacacaactgtgttcactagcaacctcaaacagacaccatggtgcatctgactcctgaggagaagtctgccgttactgccggcgggtgcaaggtgaccggcgggtaagttggtgccggcgggttgggcaggcccggcgggttctacccttccggcgggtggtcgactcggaccgatg

SEQ ID NO: 14999 - DNA, 203 bp, synthetic construct
  source 1..203: mol_type = other DNA
ggcgcgccagtcctacattgaggtctgacacaactgtgttcactagcaacctcaaacagacaccatggtgcatctgactcctgaggagaagtctgccgttactgccggcgggtgcaaggtgaccggcgggtaagttggtgccggcgggttgggcaggcccggcgggttctacccttccggcgggtggtcgactcggaccgatg

SEQ ID NO: 15000 - DNA, 203 bp, synthetic construct
  source 1..203: mol_type = other DNA
ggcgcgccagtcctattgatcacactgacacaactgtgttcactagcaacctcaaacagacaccatggtgcatctgactcctgaggagaagtctgccgttactgccggcgggtgcaaggtgaccggcgggtaagttggtgccggcgggttgggcaggcccggcgggttctacccttccggcgggtggtcgactcggaccgatg

SEQ ID NO: 15001 - DNA, 203 bp, synthetic construct
  source 1..203: mol_type = other DNA
ggcgcgccagtcctcagcattgttctgacacaactgtgttcactagcaacctcaaacagacaccatggtgcatctgactcctgaggagaagtctgccgttactgccggcgggtgcaaggtgaccggcgggtaagttggtgccggcgggttgggcaggcccggcgggttctacccttccggcgggtggtcgactcggaccgatg

SEQ ID NO: 15002 - DNA, 203 bp, synthetic construct
  source 1..203: mol_type = other DNA
ggcgcgccagtccttattgcatttctgacacaactgtgttcactagcaacctcaaacagacaccatggtgcatctgactcctgaggagaagtctgccgttactgccggcgggtgcaaggtgaccggcgggtaagttggtgccggcgggttgggcaggctgctggtggtctacccttggacccagaggtcgactcggaccgatg

SEQ ID NO: 15003 - DNA, 203 bp, synthetic construct
  source 1..203: mol_type = other DNA
ggcgcgccagtcctacttgcaatgctgacacaactgtgttcactagcaacctcaaacagacaccatggtgcatctgactcctgaggagaagtctgccgttactgcgtcaattcctttagtgaacgtggatgaagttggtgcgtcaattcctttaaggctgctggtggtctacccttggacccagaggtcgactcggaccgatg

SEQ ID NO: 15004 - DNA, 203 bp, synthetic construct
  source 1..203: mol_type = other DNA
ggcgcgccagtcctggtattgccactgacacaactgtgttcactagcaacctcaaacagacaccatggtgcatctgactcctgaggagaagtctgccgttactgcgtcaattcctttagtgaacgtggatgaagttggtggtgaggccctgggcaggctgctggtggtctaccccgtcaattcctttacgactcggaccgatg

SEQ ID NO: 15005 - DNA, 203 bp, synthetic construct
  source 1..203: mol_type = other DNA
ggcgcgccagtcctttacacattgctgacacaactgtgttcactagcaacctcaaacagacaccatggtgcatctgactcctgaggagaagtctgccgttactgcgtcaattcctttagtgaacgtggatgaagttggtggtgaggccctgggcaggctgctggtggtctacccttggacccagaggtcgactcggaccgatg

SEQ ID NO: 15006 - DNA, 203 bp, synthetic construct
  source 1..203: mol_type = other DNA
ggcgcgccagtcctgggtcaattcctgacacaactgtgttcactagcaacctcaaacagacaccatggtgcatctgactcctgaggagaagtctgccgttactgcgtcaattcctttagtgacgtcaattcctttaggtggtgaggccctgggcaggctgctggtggtctacccttggacccagaggtcgactcggaccgatg

SEQ ID NO: 15007 - DNA, 203 bp, synthetic construct
  source 1..203: mol_type = other DNA
ggcgcgccagtccttgcattgagactgacacaactgtgttcactagcaacctcaaacagacaccatggtgcatctgactcctgaggagaagtctgccgttactgtactcccgggcaaggtgaacgtggatgaagttggtggtgaggccctgggcaggctactcccggtctacccttggacccagaggtcgactcggaccgatg

SEQ ID NO: 15008 - DNA, 203 bp, synthetic construct
  source 1..203: mol_type = other DNA
ggcgcgccagtccttcaatttgaactgacacaactgtgttcactagcaacctcaaacagacaccatggtgcatctgactcctgaggagaagtctgccgttactgtactcccgggcaaggtgaacgtggatgaagttggtggtgaggccctgggcaggctactcccggtctaccctttactcccgaggtcgactcggaccgatg

SEQ ID NO: 15009 - DNA, 203 bp, synthetic construct
  source 1..203: mol_type = other DNA
ggcgcgccagtcctaacagcaatactgacacaactgtgttcactagcaacctcaaacagacaccatggtgcatctgactcctgaggagaagtctgccgttactgtactcccgggcaaggtgaacgtggatgaagttggtggtgaggccctgggcaggctgctggtggtctaccccacggaatcgagaacgactcggaccgatg

SEQ ID NO: 15010 - DNA, 203 bp, synthetic construct
  source 1..203: mol_type = other DNA
ggcgcgccagtcctgcaatctcttctgacacaactgtgttcactagcaacctcaaacagacaccatggtgcatctgactcctgaggagaagtctgccgttactgtactcccgggcaaggtgaacgtggatgaagttggtggtgaggccctgggcaggctgctggtggtctacccttggacctactccccgactcggaccgatg

SEQ ID NO: 15011 - DNA, 203 bp, synthetic construct
  source 1..203: mol_type = other DNA
ggcgcgccagtcctcaatcgttgcctgacacaactgtgttcactagcaacctcaaacagacaccatggtgcatctgactcctgaggagaagtctgccgttactgtactcccgggcaaggtgaacgtggatgaagttggtgtactccccctgggcaggctactcccggtctaccctttactcccgaggtcgactcggaccgatg

SEQ ID NO: 15012 - DNA, 203 bp, synthetic construct
  source 1..203: mol_type = other DNA
ggcgcgccagtcctattgcaacgcctgacacaactgtgttcactagcaacctcaaacagacaccatggtgcatctgactcctgaggagaagtctgccgttactgtactcccgggcaaggtgatactccctgaagttggtggtgaggccctgggcaggctactcccggtctaccctttactcccgaggtcgactcggaccgatg

SEQ ID NO: 15013 - DNA, 203 bp, synthetic construct
  source 1..203: mol_type = other DNA
ggcgcgccagtccttagtccattgctgacacaactgtgttcactagcaacctcaaacagacaccatggtgcatctgactcctgaggagaagtctgccgttactgtactcccgggcaaggtgatactccctgaagttggtgtactccccctgggcaggctactcccggtctaccctttactcccgaggtcgactcggaccgatg

SEQ ID NO: 15014 - DNA, 203 bp, synthetic construct
  source 1..203: mol_type = other DNA
ggcgcgccagtcctcctgattgtcctgacacaactgtgttcactagcaacctcaaacagacaccatggtgcatctgactcctgaggagaagtctgccgttactgtactcccgggcaaggtgatactccctgaagttggtgtactccccctgggcaggctgctggtggtctaccctttactcccgaggtcgactcggaccgatg

SEQ ID NO: 15015 - DNA, 203 bp, synthetic construct
  source 1..203: mol_type = other DNA
ggcgcgccagtcctgtcgtaagagctgacacaactgtgttcactagcaacctcaaacagacaccatggtgcatctgactcctgaggagaagtctgccgttactgttcttggcaaaaaggtgattcttggcaaagttggtgttcttggcaaaggcaggctgctggtggtctacccttggacccagaggtcgactcggaccgatg

SEQ ID NO: 15016 - DNA, 203 bp, synthetic construct
  source 1..203: mol_type = other DNA
ggcgcgccagtcctgtattcgtaactgacacaactgtgttcactagcaacctcaaacagacaccatggtgcatctgactcctgaggagaagtctgccgttactgttcttggcaaaaaggtgattcttggcaaagttggtgttcttggcaaaggcaggcttcttggcaaatacccttggacccagaggtcgactcggaccgatg

SEQ ID NO: 15017 - DNA, 203 bp, synthetic construct
  source 1..203: mol_type = other DNA
ggcgcgccagtcctttcgtaacccctgacacaactgtgttcactagcaacctcaaacagacaccatggtgcatctgactcctgaggagaagtctgccgttactgtttgccaagaaaaggtgatttgccaagaagttggtgtttgccaagaaggcaggctttgccaagaatacccttggacccagaggtcgactcggaccgatg

SEQ ID NO: 15018 - DNA, 203 bp, synthetic construct
  source 1..203: mol_type = other DNA
ggcgcgccagtcctacgttcgtaactgacacaactgtgttcactagcaacctcaaacagacaccatggtgcatctgactcctgaggagaagtctgccgttacttcactgtaccggccgtgcgtactggatgaagttggtggtgaggccctgggcaggctgctggtggtctacccttggacccagaggtcgactcggaccgatg

SEQ ID NO: 15019 - DNA, 203 bp, synthetic construct
  source 1..203: mol_type = other DNA
ggcgcgccagtcctgggtcgtaaactgacacaactgtgttcactagcaacctcaaacagacaccatggtgcatctgactcctgaggagaagtctgccgttacttgcaaccatactccccccggaatggatgaagttggtggtgaggccctgggcaggctgctggtggtctacccttggacccagaggtcgactcggaccgatg

SEQ ID NO: 15020 - DNA, 203 bp, synthetic construct
  source 1..203: mol_type = other DNA
ggcgcgccagtcctcttacgacgactgacacaactgtgttcactagcaacctcaaacagacaccatggtgcatctgactcctgaggagaagtctgccgttcgtcaattcctttacaaggtgaacgtggatgaagttggtggtgaggccctgggcaggctgctggtggtctacccttgttcttggcaaacgactcggaccgatg

SEQ ID NO: 15021 - DNA, 203 bp, synthetic construct
  source 1..203: mol_type = other DNA
ggcgcgccagtcctagtatcgacgctgacacaactgtgttcactagcaacctcaaacagacaccatggtgcatctgactcctgaggagaagtctgccgttgcccttccgtcaattcctttaagtttcaatgaagttggtggtgaggccctgggcaggctgctggtggtctacccttggacccagaggtcgactcggaccgatg

SEQ ID NO: 15022 - DNA, 203 bp, synthetic construct
  source 1..203: mol_type = other DNA
ggcgcgccagtcctacgtcgactcctgacacaactgtgttcactagcaacctcaaacagacaccatggtgcatctgactcctgaggagaagtctgccgtttactccctgtggggcaaggtgaacgtggatgaagttggtggtgaggccctgggcaggctgctggtggtctacccttgttcttggcaaacgactcggaccgatg

SEQ ID NO: 15023 - DNA, 203 bp, synthetic construct
  source 1..203: mol_type = other DNA
ggcgcgccagtcctaagcaaggttctgacacaactgtgttcactagcaacctcaaacagacaccatggtgcatctgactcctgaggagaagtctgcctactcccccctgtggggcaaggtgaacgtggatgaagttggtggtgaggccctgggcaggctgctggtggtctaccccacggaatcgagaacgactcggaccgatg

SEQ ID NO: 15024 - DNA, 203 bp, synthetic construct
  source 1..203: mol_type = other DNA
ggcgcgccagtcctacagaagcaactgacacaactgtgttcactagcaacctcaaacagacaccatggtgcatctgactcctgaggagaagtctgcctcccggaagctgcccggcgggtcatgggaataacaagttggtggtgaggccctgggcaggctgctggtggtctacccttggacccagaggtcgactcggaccgatg

SEQ ID NO: 15025 - DNA, 203 bp, synthetic construct
  source 1..203: mol_type = other DNA
ggcgcgccagtcctccaagcaatcctgacacaactgtgttcactagcaacctcaaacagacaccatggtgcatctgactcctgaggagaagtctgcgcaccaccacccacggaatcgagaaagagctatcaaagttggtggtgaggccctgggcaggctgctggtggtctacccttggacccagaggtcgactcggaccgatg

SEQ ID NO: 15026 - DNA, 203 bp, synthetic construct
  source 1..203: mol_type = other DNA
ggcgcgccagtccttattgcttggctgacacaactgtgttcactagcaacctcaaacagacaccatggtgcatctgactcctgaggagaagtctgctcagctttgcaaccatactccccccggaacccaaagagttggtggtgaggccctgggcaggctgctggtggtctacccttggacccagaggtcgactcggaccgatg

SEQ ID NO: 15027 - DNA, 203 bp, synthetic construct
  source 1..203: mol_type = other DNA
ggcgcgccagtcctaatttgcttactgacacaactgtgttcactagcaacctcaaacagacaccatggtgcatctgactcctgaggagaagtctgctggtgcccttccgtcaattcctttaagtttcagcttagttggtggtgaggccctgggcaggctgctggtggtctacccttggacccagaggtcgactcggaccgatg

SEQ ID NO: 15028 - DNA, 203 bp, synthetic construct
  source 1..203: mol_type = other DNA
ggcgcgccagtcctccttgcttcactgacacaactgtgttcactagcaacctcaaacagacaccatggtgcatctgactcctgaggagaagtctgcttcccggaagctgcccggcgggtcatgggaataacgagttggtggtgaggccctgggcaggctgctggtggtctacccttggacccagaggtcgactcggaccgatg

SEQ ID NO: 15029 - DNA, 203 bp, synthetic construct
  source 1..203: mol_type = other DNA
ggcgcgccagtcctatgattgcttctgacacaactgtgttcactagcaacctcaaacagacaccatggtgcatctgactcctgaggagaagtctgcttcttggcaaatgtggggcaaggtgaacgtggatgaagttggtggtgaggccctgggcaggctgctggtggtctacccttgttcttggcaaacgactcggaccgatg

SEQ ID NO: 15030 - DNA, 203 bp, synthetic construct
  source 1..203: mol_type = other DNA
ggcgcgccagtcctaagaaatggactgacacaactgtgttcactagcaacctcaaacagacaccatggtgcatctgactcctgaggagaagtcttcttggcaaaccctgtggggcaaggtgaacgtggatgaagttggtggtgaggccctgggcaggctgctggtggtctaccccacggaatcgagaacgactcggaccgatg

SEQ ID NO: 15031 - DNA, 203 bp, synthetic construct
  source 1..203: mol_type = other DNA
ggcgcgccagtccttgtactgcccctgacacaactgtgttcactagcaacctcaaacagacaccatggtgcatctgactcctgaggagaagtcttttcagctttgcaaccatactccccccggaacccaaagacttggtggtgaggccctgggcaggctgctggtggtctacccttggacccagaggtcgactcggaccgatg

SEQ ID NO: 15032 - DNA, 203 bp, synthetic construct
  source 1..203: mol_type = other DNA
ggcgcgccagtcctgggctcagcactgacacaactgtgttcactagcaacctcaaacagacaccatggtgcatctgactcctgaggagaatactcccgttactgccctgtggggcaaggtgaacgtggatgaagttggtggtgaggccctgggcaggctgctggtggtctaccccgtcaattcctttacgactcggaccgatg

SEQ ID NO: 15033 - DNA, 203 bp, synthetic construct
  source 1..203: mol_type = other DNA
ggcgcgccagtcctgggctacgtcctgacacaactgtgttcactagcaacctcaaacagacaccatggtgcatctgactcctgaggagaatcctggtggtgcccttccgtcaattcctttaagtttcagctttgcaactggtgaggccctgggcaggctgctggtggtctacccttggacccagaggtcgactcggaccgatg

SEQ ID NO: 15034 - DNA, 203 bp, synthetic construct
  source 1..203: mol_type = other DNA
ggcgcgccagtcctgggcagcactctgacacaactgtgttcactagcaacctcaaacagacaccatggtgcatctgactcctgaggagaattcttgattaatgaaaacattcttggcaaatgctttcgctctggtccgtggtgaggccctgggcaggctgctggtggtctacccttggacccagaggtcgactcggaccgatg

SEQ ID NO: 15035 - DNA, 203 bp, synthetic construct
  source 1..203: mol_type = other DNA
ggcgcgccagtcctaccacgttgtctgacacaactgtgttcactagcaacctcaaacagacaccatggtgcatctgactcctgaggagaccggccgtgttactgccctgtggggcaaggtgaacgtggatgaagttggtggtgaggccctgggcaggctgctggtggtctacccttggacccagaggtcgactcggaccgatg

SEQ ID NO: 15036 - DNA, 203 bp, synthetic construct
  source 1..203: mol_type = other DNA
ggcgcgccagtcctctgaaactctctgacacaactgtgttcactagcaacctcaaacagacaccatggtgcatctgactcctgaggagactcctggtggtgcccttccgtcaattcctttaagtttcagctttgcaaccagtgaggccctgggcaggctgctggtggtctacccttggacccagaggtcgactcggaccgatg

SEQ ID NO: 15037 - DNA, 203 bp, synthetic construct
  source 1..203: mol_type = other DNA
ggcgcgccagtcctatccacgaagctgacacaactgtgttcactagcaacctcaaacagacaccatggtgcatctgactcctgaggagactttggtttcccggaagctgcccggcgggtcatgggaataacgccgccgcatcgaggccctgggcaggctgctggtggtctacccttggacccagaggtcgactcggaccgatg

SEQ ID NO: 15038 - DNA, 203 bp, synthetic construct
  source 1..203: mol_type = other DNA
ggcgcgccagtccttccacgaagactgacacaactgtgttcactagcaacctcaaacagacaccatggtgcatctgactcctgaggagattaagtttcagctttgcaaccatactccccccggaacccaaagactttggggtgaggccctgggcaggctgctggtggtctacccttggacccagaggtcgactcggaccgatg

SEQ ID NO: 15039 - DNA, 203 bp, synthetic construct
  source 1..203: mol_type = other DNA
ggcgcgccagtcctagttcgtgttctgacacaactgtgttcactagcaacctcaaacagacaccatggtgcatctgactcctgaggagcacggaatcgagaatgccctgtggggcaaggtgaacgtggatgaagttggtggtgaggccctgggcaggctgctggtggtctacccttggaccggcgggtcgactcggaccgatg

SEQ ID NO: 15040 - DNA, 203 bp, synthetic construct
  source 1..203: mol_type = other DNA
ggcgcgccagtcctacgcactgcgctgacacaactgtgttcactagcaacctcaaacagacaccatggtgcatctgactcctgaggagctccctgccgttactgagctcccgggcaaggtgaagctccctgaagttggtgagctccccctgggcaggcagctcccggtctacccttggacccagaggtcgactcggaccgatg

SEQ ID NO: 15041 - DNA, 203 bp, synthetic construct
  source 1..203: mol_type = other DNA
ggcgcgccagtcctcttgctgcatctgacacaactgtgttcactagcaacctcaaacagacaccatggtgcatctgactcctgaggagggcgggtccgttactgagggcgggtgcaaggtgaagggcgggtaagttggtgagggcgggttgggcaggcagggcgggttctacccttggacccagaggtcgactcggaccgatg

SEQ ID NO: 15042 - DNA, 203 bp, synthetic construct
  source 1..203: mol_type = other DNA
ggcgcgccagtcctcttgttacacctgacacaactgtgttcactagcaacctcaaacagacaccatggtgcatctgactcctgaggagtactcccccgttactgccctgtggggcaaggtgaacgtggatgaagttggtggtgaggccctgggcaggctgctggtggtctacccttggaccggcgggtcgactcggaccgatg

SEQ ID NO: 15043 - DNA, 203 bp, synthetic construct
  source 1..203: mol_type = other DNA
ggcgcgccagtcctagtgtaagagctgacacaactgtgttcactagcaacctcaaacagacaccatggtgcatctgactcctgaggagtcaattcctttaactgagtcaattcctttagtgaagtcaattcctttaggtgagtcaattcctttaaggcagtcaattcctttaccttggacccagaggtcgactcggaccgatg

SEQ ID NO: 15044 - DNA, 203 bp, synthetic construct
  source 1..203: mol_type = other DNA
ggcgcgccagtcctcgagcgtatgctgacacaactgtgttcactagcaacctcaaacagacaccatggtgcatctgactcctgaggatcggccgtccgttactgatcggccgtgcaaggtgaatcggccgtaagttggtgatcggccgttgggcaggcatcggccgttctacccttggacccagaggtcgactcggaccgatg

SEQ ID NO: 15045 - DNA, 203 bp, synthetic construct
  source 1..203: mol_type = other DNA
ggcgcgccagtcctttcatacgctctgacacaactgtgttcactagcaacctcaaacagacaccatggtgcatctgactcctgaggatcgttcttgattaatgaaaacattcttggcaaatgctttcgctctggtccgtcttgaggccctgggcaggctgctggtggtctacccttggacccagaggtcgactcggaccgatg

SEQ ID NO: 15046 - DNA, 203 bp, synthetic construct
  source 1..203: mol_type = other DNA
ggcgcgccagtcctacagtacgggctgacacaactgtgttcactagcaacctcaaacagacaccatggtgcatctgactcctgaggattcaattcctttaactgattcaattcctttagtgaattcaattcctttaggtgattcaattcctttaaggcattcaattcctttaccttggacccagaggtcgactcggaccgatg

SEQ ID NO: 15047 - DNA, 203 bp, synthetic construct
  source 1..203: mol_type = other DNA
ggcgcgccagtcctcaccaacgggctgacacaactgtgttcactagcaacctcaaacagacaccatggtgcatctgactcctgaggcaacgaatcgagaaactgcaacgaatcgagaagtgacaacgaatcgagaaggtgcaacgaatcgagaaaggccaacgaatcgagaaccttggacccagaggtcgactcggaccgatg

SEQ ID NO: 15048 - DNA, 203 bp, synthetic construct
  source 1..203: mol_type = other DNA
ggcgcgccagtcctcccgtttggactgacacaactgtgttcactagcaacctcaaacagacaccatggtgcatctgactcctgaggcacagaatcgagaaactgcacagaatcgagaagtgacacagaatcgagaaggtgcacagaatcgagaaaggccacagaatcgagaaccttggacccagaggtcgactcggaccgatg

SEQ ID NO: 15049 - DNA, 203 bp, synthetic construct
  source 1..203: mol_type = other DNA
ggcgcgccagtcctagtcgacgggctgacacaactgtgttcactagcaacctcaaacagacaccatggtgcatctgactcctgaggcacgaaatcgagaaactgcacgaaatcgagaagtgacacgaaatcgagaaggtgcacgaaatcgagaaaggccacgaaatcgagaaccttggacccagaggtcgactcggaccgatg

SEQ ID NO: 15050 - DNA, 203 bp, synthetic construct
  source 1..203: mol_type = other DNA
ggcgcgccagtcctcccgttaaagctgacacaactgtgttcactagcaacctcaaacagacaccatggtgcatctgactcctgaggcacgatatcgagaaactgcacgatatcgagaagtgacacgatatcgagaaggtgcacgatatcgagaaaggccacgatatcgagaaccttggacccagaggtcgactcggaccgatg

SEQ ID NO: 15051 - DNA, 203 bp, synthetic construct
  source 1..203: mol_type = other DNA
ggcgcgccagtcctgcttctaactctgacacaactgtgttcactagcaacctcaaacagacaccatggtgcatctgactcctgaggcacggaaccgagaaactgcacggaaccgagaagtgacacggaaccgagaaggtgcacggaaccgagaaaggccacggaaccgagaaccttggacccagaggtcgactcggaccgatg

SEQ ID NO: 15052 - DNA, 203 bp, synthetic construct
  source 1..203: mol_type = other DNA
ggcgcgccagtcctttagaatggtctgacacaactgtgttcactagcaacctcaaacagacaccatggtgcatctgactcctgaggcacggaatcaagaaactgcacggaatcaagaagtgacacggaatcaagaaggtgcacggaatcaagaaaggccacggaatcaagaaccttggacccagaggtcgactcggaccgatg

SEQ ID NO: 15053 - DNA, 203 bp, synthetic construct
  source 1..203: mol_type = other DNA
ggcgcgccagtcctcgccttagaactgacacaactgtgttcactagcaacctcaaacagacaccatggtgcatctgactcctgaggcacggaatcgagaaactgcacggaatcgagaagtgaacgtggatgaagttggtgcacggaatcgagaaaggccacggaatcgagaaccttggacccagaggtcgactcggaccgatg

SEQ ID NO: 15054 - DNA, 203 bp, synthetic construct
  source 1..203: mol_type = other DNA
ggcgcgccagtcctttagaaacacctgacacaactgtgttcactagcaacctcaaacagacaccatggtgcatctgactcctgaggcacggaatcgagaaactgcacggaatcgagaagtgacacggaatcgagaaggtgcacggaatcgagaaaggccacggaatcgagaaccttggacccagaggtcgactcggaccgatg

SEQ ID NO: 15055 - DNA, 203 bp, synthetic construct
  source 1..203: mol_type = other DNA
ggcgcgccagtcctagtgtgtacgctgacacaactgtgttcactagcaacctcaaacagacaccatggtgcatctgactcctgaggcacggaatcgagaaactgcacggaatcgagaagtgacacggaatcgagaaggtggtgaggccctgggcaggccacggaatcgagaaccttggacccagaggtcgactcggaccgatg

SEQ ID NO: 15056 - DNA, 203 bp, synthetic construct
  source 1..203: mol_type = other DNA
ggcgcgccagtcctagtgcacgtcctgacacaactgtgttcactagcaacctcaaacagacaccatggtgcatctgactcctgaggcacggaatcgagaaactgccctgtggggcaaggtgaacgtggatgaagttggtgcacggaatcgagaaaggccacggaatcgagaaccttggacccagaggtcgactcggaccgatg

SEQ ID NO: 15057 - DNA, 203 bp, synthetic construct
  source 1..203: mol_type = other DNA
ggcgcgccagtcctaaacaaggccctgacacaactgtgttcactagcaacctcaaacagacaccatggtgcatctgactcctgaggcacggaatcgagaaactgccctgtggggcaaggtgacacggaatcgagaaggtgcacggaatcgagaaaggctgctggtggtctacccttggacccagaggtcgactcggaccgatg

SEQ ID NO: 15058 - DNA, 203 bp, synthetic construct
  source 1..203: mol_type = other DNA
ggcgcgccagtcctatcatgcagtctgacacaactgtgttcactagcaacctcaaacagacaccatggtgcatctgactcctgaggcacggaatcgagagactgcacggaatcgagaggtgacacggaatcgagagggtgcacggaatcgagagaggccacggaatcgagagccttggacccagaggtcgactcggaccgatg

SEQ ID NO: 15059 - DNA, 203 bp, synthetic construct
  source 1..203: mol_type = other DNA
ggcgcgccagtcctgtaaagactgctgacacaactgtgttcactagcaacctcaaacagacaccatggtgcatctgactcctgaggcacggaatcgagctactgcacggaatcgagctgtgacacggaatcgagctggtgcacggaatcgagctaggccacggaatcgagctccttggacccagaggtcgactcggaccgatg

SEQ ID NO: 15060 - DNA, 203 bp, synthetic construct
  source 1..203: mol_type = other DNA
ggcgcgccagtcctggcctgggacctgacacaactgtgttcactagcaacctcaaacagacaccatggtgcatctgactcctgaggcacggaatcgaggcactgcacggaatcgaggcgtgacacggaatcgaggcggtgcacggaatcgaggcaggccacggaatcgaggcccttggacccagaggtcgactcggaccgatg

SEQ ID NO: 15061 - DNA, 203 bp, synthetic construct
  source 1..203: mol_type = other DNA
ggcgcgccagtcctatacgtgcttctgacacaactgtgttcactagcaacctcaaacagacaccatggtgcatctgactcctgaggcacggaatcgaggtactgcacggaatcgaggtgtgacacggaatcgaggtggtgcacggaatcgaggtaggccacggaatcgaggtccttggacccagaggtcgactcggaccgatg

SEQ ID NO: 15062 - DNA, 203 bp, synthetic construct
  source 1..203: mol_type = other DNA
ggcgcgccagtcctgtaaatgactctgacacaactgtgttcactagcaacctcaaacagacaccatggtgcatctgactcctgaggcacggaatcgcgaaactgcacggaatcgcgaagtgacacggaatcgcgaaggtgcacggaatcgcgaaaggccacggaatcgcgaaccttggacccagaggtcgactcggaccgatg

SEQ ID NO: 15063 - DNA, 203 bp, synthetic construct
  source 1..203: mol_type = other DNA
ggcgcgccagtccttaaatctctgctgacacaactgtgttcactagcaacctcaaacagacaccatggtgcatctgactcctgaggcacggaatcgggaaactgcacggaatcgggaagtgacacggaatcgggaaggtgcacggaatcgggaaaggccacggaatcgggaaccttggacccagaggtcgactcggaccgatg

SEQ ID NO: 15064 - DNA, 203 bp, synthetic construct
  source 1..203: mol_type = other DNA
ggcgcgccagtcctagatttaggactgacacaactgtgttcactagcaacctcaaacagacaccatggtgcatctgactcctgaggcacggaatcgtgaaactgcacggaatcgtgaagtgacacggaatcgtgaaggtgcacggaatcgtgaaaggccacggaatcgtgaaccttggacccagaggtcgactcggaccgatg

SEQ ID NO: 15065 - DNA, 203 bp, synthetic construct
  source 1..203: mol_type = other DNA
ggcgcgccagtcctcatttacttcctgacacaactgtgttcactagcaacctcaaacagacaccatggtgcatctgactcctgaggcacggaatggagaaactgcacggaatggagaagtgacacggaatggagaaggtgcacggaatggagaaaggccacggaatggagaaccttggacccagaggtcgactcggaccgatg

SEQ ID NO: 15066 - DNA, 203 bp, synthetic construct
  source 1..203: mol_type = other DNA
ggcgcgccagtcctctctaaatcgctgacacaactgtgttcactagcaacctcaaacagacaccatggtgcatctgactcctgaggcacggaattaagaaactgcacggaattaagaagtgacacggaattaagaaggtgcacggaattaagaaaggccacggaattaagaaccttggacccagaggtcgactcggaccgatg

SEQ ID NO: 15067 - DNA, 203 bp, synthetic construct
  source 1..203: mol_type = other DNA
ggcgcgccagtcctaatttaggacctgacacaactgtgttcactagcaacctcaaacagacaccatggtgcatctgactcctgaggcacggaattgagaaactgcacggaattgagaagtgacacggaattgagaaggtgcacggaattgagaaaggccacggaattgagaaccttggacccagaggtcgactcggaccgatg

SEQ ID NO: 15068 - DNA, 203 bp, synthetic construct
  source 1..203: mol_type = other DNA
ggcgcgccagtcctgaaagtgattctgacacaactgtgttcactagcaacctcaaacagacaccatggtgcatctgactcctgaggcacggccgtccgttactgcacggccgtgcaaggtgacacggccgtaagttggtgcacggccgttgggcaggccacggccgttctacccttggacccagaggtcgactcggaccgatg

SEQ ID NO: 15069 - DNA, 203 bp, synthetic construct
  source 1..203: mol_type = other DNA
ggcgcgccagtcctcgttcaagatctgacacaactgtgttcactagcaacctcaaacagacaccatggtgcatctgactcctgaggcacgggatcgagaaactgcacgggatcgagaagtgacacgggatcgagaaggtgcacgggatcgagaaaggccacgggatcgagaaccttggacccagaggtcgactcggaccgatg

SEQ ID NO: 15070 - DNA, 203 bp, synthetic construct
  source 1..203: mol_type = other DNA
ggcgcgccagtcctagatttggttctgacacaactgtgttcactagcaacctcaaacagacaccatggtgcatctgactcctgaggcactccctgccgttactgcactcccgggcaaggtgacactccctgaagttggtgcactccccctgggcaggccactcccggtctacccttggacccagaggtcgactcggaccgatg

SEQ ID NO: 15071 - DNA, 203 bp, synthetic construct
  source 1..203: mol_type = other DNA
ggcgcgccagtccttttaaccaacctgacacaactgtgttcactagcaacctcaaacagacaccatggtgcatctgactcctgaggcagagaatcgagaaactgcagagaatcgagaagtgacagagaatcgagaaggtgcagagaatcgagaaaggccagagaatcgagaaccttggacccagaggtcgactcggaccgatg

SEQ ID NO: 15072 - DNA, 203 bp, synthetic construct
  source 1..203: mol_type = other DNA
ggcgcgccagtcctccaaccaagtctgacacaactgtgttcactagcaacctcaaacagacaccatggtgcatctgactcctgaggcagcgaatcgagaaactgcagcgaatcgagaagtgacagcgaatcgagaaggtgcagcgaatcgagaaaggccagcgaatcgagaaccttggacccagaggtcgactcggaccgatg

SEQ ID NO: 15073 - DNA, 203 bp, synthetic construct
  source 1..203: mol_type = other DNA
ggcgcgccagtccttctgcgagcgctgacacaactgtgttcactagcaacctcaaacagacaccatggtgcatctgactcctgaggcatggaatcgagaaactgcatggaatcgagaagtgacatggaatcgagaaggtgcatggaatcgagaaaggccatggaatcgagaaccttggacccagaggtcgactcggaccgatg

SEQ ID NO: 15074 - DNA, 203 bp, synthetic construct
  source 1..203: mol_type = other DNA
ggcgcgccagtccttgcgaggacgctgacacaactgtgttcactagcaacctcaaacagacaccatggtgcatctgactcctgaggcattgaatcgagaaactgcattgaatcgagaagtgacattgaatcgagaaggtgcattgaatcgagaaaggccattgaatcgagaaccttggacccagaggtcgactcggaccgatg

SEQ ID NO: 15075 - DNA, 203 bp, synthetic construct
  source 1..203: mol_type = other DNA
ggcgcgccagtccttctttgcgagctgacacaactgtgttcactagcaacctcaaacagacaccatggtgcatctgactcctgaggccatcgggtccgttactgccatcgggtgcaaggtgaccatcgggtaagttggtgccatcgggttgggcaggcccatcgggttctacccttggacccagaggtcgactcggaccgatg

SEQ ID NO: 15076 - DNA, 203 bp, synthetic construct
  source 1..203: mol_type = other DNA
ggcgcgccagtcctggcgagctaactgacacaactgtgttcactagcaacctcaaacagacaccatggtgcatctgactcctgaggccctccctgccgttactgccctcccgggcaaggtgaccctccctgaagttggtgccctccccctgggcaggcccctcccggtctacccttggacccagaggtcgactcggaccgatg

SEQ ID NO: 15077 - DNA, 203 bp, synthetic construct
  source 1..203: mol_type = other DNA
ggcgcgccagtcctaagagcgagtctgacacaactgtgttcactagcaacctcaaacagacaccatggtgcatctgactcctgaggccctcgggtccgttactgccctcgggtgcaaggtgaccctcgggtaagttggtgccctcgggttgggcaggcccctcgggttctacccttggacccagaggtcgactcggaccgatg

SEQ ID NO: 15078 - DNA, 203 bp, synthetic construct
  source 1..203: mol_type = other DNA
ggcgcgccagtcctgcctgcgagcctgacacaactgtgttcactagcaacctcaaacagacaccatggtgcatctgactcctgaggccgacgggtccgttactgccgacgggtgcaaggtgaccgacgggtaagttggtgccgacgggttgggcaggcccgacgggttctacccttggacccagaggtcgactcggaccgatg

SEQ ID NO: 15079 - DNA, 203 bp, synthetic construct
  source 1..203: mol_type = other DNA
ggcgcgccagtcctgtgctgcgagctgacacaactgtgttcactagcaacctcaaacagacaccatggtgcatctgactcctgaggccggaaggtccgttactgccggaaggtgcaaggtgaccggaaggtaagttggtgccggaaggttgggcaggcccggaaggttctacccttggacccagaggtcgactcggaccgatg

SEQ ID NO: 15080 - DNA, 203 bp, synthetic construct
  source 1..203: mol_type = other DNA
ggcgcgccagtcctctcgcaaactctgacacaactgtgttcactagcaacctcaaacagacaccatggtgcatctgactcctgaggccggatggtccgttactgccggatggtgcaaggtgaccggatggtaagttggtgccggatggttgggcaggcccggatggttctacccttggacccagaggtcgactcggaccgatg

SEQ ID NO: 15081 - DNA, 203 bp, synthetic construct
  source 1..203: mol_type = other DNA
ggcgcgccagtcctgtgacctcgcctgacacaactgtgttcactagcaacctcaaacagacaccatggtgcatctgactcctgaggccggcaggtccgttactgccggcaggtgcaaggtgaccggcaggtaagttggtgccggcaggttgggcaggcccggcaggttctacccttggacccagaggtcgactcggaccgatg

SEQ ID NO: 15082 - DNA, 203 bp, synthetic construct
  source 1..203: mol_type = other DNA
ggcgcgccagtccttcactcgcatctgacacaactgtgttcactagcaacctcaaacagacaccatggtgcatctgactcctgaggccggcgcatccgttactgccggcgcatgcaaggtgaccggcgcataagttggtgccggcgcattgggcaggcccggcgcattctacccttggacccagaggtcgactcggaccgatg

SEQ ID NO: 15083 - DNA, 203 bp, synthetic construct
  source 1..203: mol_type = other DNA
ggcgcgccagtcctaggcctcgccctgacacaactgtgttcactagcaacctcaaacagacaccatggtgcatctgactcctgaggccggcgcctccgttactgccggcgcctgcaaggtgaccggcgcctaagttggtgccggcgccttgggcaggcccggcgccttctacccttggacccagaggtcgactcggaccgatg

SEQ ID NO: 15084 - DNA, 203 bp, synthetic construct
  source 1..203: mol_type = other DNA
ggcgcgccagtcctcctctcgctcctgacacaactgtgttcactagcaacctcaaacagacaccatggtgcatctgactcctgaggccggcgcgtccgttactgccggcgcgtgcaaggtgaccggcgcgtaagttggtgccggcgcgttgggcaggcccggcgcgttctacccttggacccagaggtcgactcggaccgatg

SEQ ID NO: 15085 - DNA, 203 bp, synthetic construct
  source 1..203: mol_type = other DNA
ggcgcgccagtcctcccgtctcgcctgacacaactgtgttcactagcaacctcaaacagacaccatggtgcatctgactcctgaggccggcggaaccgttactgccggcggaagcaaggtgaccggcggaaaagttggtgccggcggaatgggcaggcccggcggaatctacccttggacccagaggtcgactcggaccgatg

SEQ ID NO: 15086 - DNA, 203 bp, synthetic construct
  source 1..203: mol_type = other DNA
ggcgcgccagtcctctactcgcagctgacacaactgtgttcactagcaacctcaaacagacaccatggtgcatctgactcctgaggccggcggccccgttactgccggcggccgcaaggtgaccggcggccaagttggtgccggcggcctgggcaggcccggcggcctctacccttggacccagaggtcgactcggaccgatg

SEQ ID NO: 15087 - DNA, 203 bp, synthetic construct
  source 1..203: mol_type = other DNA
ggcgcgccagtcctcccagacgacctgacacaactgtgttcactagcaacctcaaacagacaccatggtgcatctgactcctgaggccggcgggtccgttactgccctgtggggcaaggtgaacgtggatgaagttggtggtgaggccctgggcaggctgctggtggtctacccttggaaccggccgtcgactcggaccgatg

SEQ ID NO: 15088 - DNA, 203 bp, synthetic construct
  source 1..203: mol_type = other DNA
ggcgcgccagtcctcccagagccactgacacaactgtgttcactagcaacctcaaacagacaccatggtgcatctgactcctgaggccggcgggtccgttactgccctgtggggcaaggtgaccggcgggtaagttggtgccggcgggttgggcaggcccggcgggttctacccttggacccagaggtcgactcggaccgatg

SEQ ID NO: 15089 - DNA, 203 bp, synthetic construct
  source 1..203: mol_type = other DNA
ggcgcgccagtcctcggtgaccagctgacacaactgtgttcactagcaacctcaaacagacaccatggtgcatctgactcctgaggccggcgggtccgttactgccctgtggggcaaggtgaccggcgggtaagttggtggtgaggccctgggcaggctgctggtggtctacccttccggcgggtggtcgactcggaccgatg

SEQ ID NO: 15090 - DNA, 203 bp, synthetic construct
  source 1..203: mol_type = other DNA
ggcgcgccagtcctcggcggttgtctgacacaactgtgttcactagcaacctcaaacagacaccatggtgcatctgactcctgaggccggcgggtccgttactgccctgtggggcaaggtgaccggcgggtaagttggtggtgaggccctgggcaggctgctggtggtctacccttggacccagaggtcgactcggaccgatg

SEQ ID NO: 15091 - DNA, 203 bp, synthetic construct
  source 1..203: mol_type = other DNA
ggcgcgccagtcctcggtctgcccctgacacaactgtgttcactagcaacctcaaacagacaccatggtgcatctgactcctgaggccggcgggtccgttactgccggcgggtgcaaggtgaacgtggatgaagttggtggtgaggccctgggcaggcccggcgggttctacccttggacccagaggtcgactcggaccgatg

SEQ ID NO: 15092 - DNA, 203 bp, synthetic construct
  source 1..203: mol_type = other DNA
ggcgcgccagtcctgcaaggaccgctgacacaactgtgttcactagcaacctcaaacagacaccatggtgcatctgactcctgaggccggcgggtccgttactgccggcgggtgcaaggtgaccggcgggtaagttggtgccggcgggttgggcaggcccggcgggttctacccttccggcgggtggtcgactcggaccgatg

SEQ ID NO: 15093 - DNA, 203 bp, synthetic construct
  source 1..203: mol_type = other DNA
ggcgcgccagtcctgtacgtagcgctgacacaactgtgttcactagcaacctcaaacagacaccatggtgcatctgactcctgaggccggcgggtccgttactgccggcgggtgcaaggtgaccggcgggtaagttggtgccggcgggttgggcaggcccggcgggttctacccttccggcgggtggtcgactcggaccgatg

SEQ ID NO: 15094 - DNA, 203 bp, synthetic construct
  source 1..203: mol_type = other DNA
ggcgcgccagtccttgttaagtgactgacacaactgtgttcactagcaacctcaaacagacaccatggtgcatctgactcctgaggccggcgggtccgttactgccggcgggtgcaaggtgaccggcgggtaagttggtgccggcgggttgggcaggcccggcgggttctacccttccggcgggtggtcgactcggaccgatg

SEQ ID NO: 15095 - DNA, 203 bp, synthetic construct
  source 1..203: mol_type = other DNA
ggcgcgccagtccttttaaggatactgacacaactgtgttcactagcaacctcaaacagacaccatggtgcatctgactcctgaggccggcgggtccgttactgccggcgggtgcaaggtgaccggcgggtaagttggtgccggcgggttgggcaggcccggcgggttctacccttccggcgggtggtcgactcggaccgatg

SEQ ID NO: 15096 - DNA, 203 bp, synthetic construct
  source 1..203: mol_type = other DNA
ggcgcgccagtcctgtttaagacactgacacaactgtgttcactagcaacctcaaacagacaccatggtgcatctgactcctgaggccggcgggtccgttactgccggcgggtgcaaggtgaccggcgggtaagttggtgccggcgggttgggcaggcccggcgggttctacccttccggcgggtggtcgactcggaccgatg

SEQ ID NO: 15097 - DNA, 203 bp, synthetic construct
  source 1..203: mol_type = other DNA
ggcgcgccagtcctcgacttaaagctgacacaactgtgttcactagcaacctcaaacagacaccatggtgcatctgactcctgaggccggcgggtccgttactgccggcgggtgcaaggtgaccggcgggtaagttggtgccggcgggttgggcaggcccggcgggttctacccttccggcgggtggtcgactcggaccgatg

SEQ ID NO: 15098 - DNA, 203 bp, synthetic construct
  source 1..203: mol_type = other DNA
ggcgcgccagtcctcttaaagtttctgacacaactgtgttcactagcaacctcaaacagacaccatggtgcatctgactcctgaggccggcgggtccgttactgccggcgggtgcaaggtgaccggcgggtaagttggtgccggcgggttgggcaggcccggcgggttctacccttccggcgggtggtcgactcggaccgatg

SEQ ID NO: 15099 - DNA, 203 bp, synthetic construct
  source 1..203: mol_type = other DNA
ggcgcgccagtcctatgctgcagactgacacaactgtgttcactagcaacctcaaacagacaccatggtgcatctgactcctgaggccggcggtaccgttactgccggcggtagcaaggtgaccggcggtaaagttggtgccggcggtatgggcaggcccggcggtatctacccttggacccagaggtcgactcggaccgatg

SEQ ID NO: 15100 - DNA, 203 bp, synthetic construct
  source 1..203: mol_type = other DNA
ggcgcgccagtcctgaatgtccaactgacacaactgtgttcactagcaacctcaaacagacaccatggtgcatctgactcctgaggccggcggtcccgttactgccggcggtcgcaaggtgaccggcggtcaagttggtgccggcggtctgggcaggcccggcggtctctacccttggacccagaggtcgactcggaccgatg

SEQ ID NO: 15101 - DNA, 203 bp, synthetic construct
  source 1..203: mol_type = other DNA
ggcgcgccagtcctcacgaaaggtctgacacaactgtgttcactagcaacctcaaacagacaccatggtgcatctgactcctgaggccggcgtctccgttactgccggcgtctgcaaggtgaccggcgtctaagttggtgccggcgtcttgggcaggcccggcgtcttctacccttggacccagaggtcgactcggaccgatg

SEQ ID NO: 15102 - DNA, 203 bp, synthetic construct
  source 1..203: mol_type = other DNA
ggcgcgccagtcctaatcacgaaactgacacaactgtgttcactagcaacctcaaacagacaccatggtgcatctgactcctgaggccggcgtgtccgttactgccggcgtgtgcaaggtgaccggcgtgtaagttggtgccggcgtgttgggcaggcccggcgtgttctacccttggacccagaggtcgactcggaccgatg

SEQ ID NO: 15103 - DNA, 203 bp, synthetic construct
  source 1..203: mol_type = other DNA
ggcgcgccagtcctgactttcgtgctgacacaactgtgttcactagcaacctcaaacagacaccatggtgcatctgactcctgaggccggcgtttccgttactgccggcgtttgcaaggtgaccggcgtttaagttggtgccggcgttttgggcaggcccggcgttttctacccttggacccagaggtcgactcggaccgatg

SEQ ID NO: 15104 - DNA, 203 bp, synthetic construct
  source 1..203: mol_type = other DNA
ggcgcgccagtcctcgatttcgtgctgacacaactgtgttcactagcaacctcaaacagacaccatggtgcatctgactcctgaggccggctggtccgttactgccggctggtgcaaggtgaccggctggtaagttggtgccggctggttgggcaggcccggctggttctacccttggacccagaggtcgactcggaccgatg

SEQ ID NO: 15105 - DNA, 203 bp, synthetic construct
  source 1..203: mol_type = other DNA
ggcgcgccagtcctacctggatcactgacacaactgtgttcactagcaacctcaaacagacaccatggtgcatctgactcctgaggccggggggtccgttactgccggggggtgcaaggtgaccggggggtaagttggtgccggggggttgggcaggcccggggggttctacccttggacccagaggtcgactcggaccgatg

SEQ ID NO: 15106 - DNA, 203 bp, synthetic construct
  source 1..203: mol_type = other DNA
ggcgcgccagtcctcttacatgtcctgacacaactgtgttcactagcaacctcaaacagacaccatggtgcatctgactcctgaggcctacgggtccgttactgcctacgggtgcaaggtgacctacgggtaagttggtgcctacgggttgggcaggccctacgggttctacccttggacccagaggtcgactcggaccgatg

SEQ ID NO: 15107 - DNA, 203 bp, synthetic construct
  source 1..203: mol_type = other DNA
ggcgcgccagtccttcttacatgcctgacacaactgtgttcactagcaacctcaaacagacaccatggtgcatctgactcctgaggcctcaattcctttaactgcctcaattcctttagtgacctcaattcctttaggtgcctcaattcctttaaggccctcaattcctttaccttggacccagaggtcgactcggaccgatg

SEQ ID NO: 15108 - DNA, 203 bp, synthetic construct
  source 1..203: mol_type = other DNA
ggcgcgccagtcctttacagatcactgacacaactgtgttcactagcaacctcaaacagacaccatggtgcatctgactcctgaggcctgcgggtccgttactgcctgcgggtgcaaggtgacctgcgggtaagttggtgcctgcgggttgggcaggccctgcgggttctacccttggacccagaggtcgactcggaccgatg

SEQ ID NO: 15109 - DNA, 203 bp, synthetic construct
  source 1..203: mol_type = other DNA
ggcgcgccagtccttctacagatcctgacacaactgtgttcactagcaacctcaaacagacaccatggtgcatctgactcctgaggccttcgggtccgttactgccttcgggtgcaaggtgaccttcgggtaagttggtgccttcgggttgggcaggcccttcgggttctacccttggacccagaggtcgactcggaccgatg

SEQ ID NO: 15110 - DNA, 203 bp, synthetic construct
  source 1..203: mol_type = other DNA
ggcgcgccagtcctagcattgcccctgacacaactgtgttcactagcaacctcaaacagacaccatggtgcatctgactcctgaggcgacaattcctttaactgcgacaattcctttagtgacgacaattcctttaggtgcgacaattcctttaaggccgacaattcctttaccttggacccagaggtcgactcggaccgatg

SEQ ID NO: 15111 - DNA, 203 bp, synthetic construct
  source 1..203: mol_type = other DNA
ggcgcgccagtcctgaagtactgtctgacacaactgtgttcactagcaacctcaaacagacaccatggtgcatctgactcctgaggcgcggaatcgagaaactgcgcggaatcgagaagtgacgcggaatcgagaaggtgcgcggaatcgagaaaggccgcggaatcgagaaccttggacccagaggtcgactcggaccgatg

SEQ ID NO: 15112 - DNA, 203 bp, synthetic construct
  source 1..203: mol_type = other DNA
ggcgcgccagtccttaggtgtagtctgacacaactgtgttcactagcaacctcaaacagacaccatggtgcatctgactcctgaggcgctccctgccgttactgcgctcccgggcaaggtgacgctccctgaagttggtgcgctccccctgggcaggccgctcccggtctacccttggacccagaggtcgactcggaccgatg

SEQ ID NO: 15113 - DNA, 203 bp, synthetic construct
  source 1..203: mol_type = other DNA
ggcgcgccagtcctgcttacacctctgacacaactgtgttcactagcaacctcaaacagacaccatggtgcatctgactcctgaggcgcttggcaaagttactgcgcttggcaaaaaggtgacgcttggcaaagttggtgcgcttggcaaaggcaggccgcttggcaaatacccttggacccagaggtcgactcggaccgatg

SEQ ID NO: 15114 - DNA, 203 bp, synthetic construct
  source 1..203: mol_type = other DNA
ggcgcgccagtcctgcatatgtggctgacacaactgtgttcactagcaacctcaaacagacaccatggtgcatctgactcctgaggcgtcaaagcctttaactgcgtcaaagcctttagtgacgtcaaagcctttaggtgcgtcaaagcctttaaggccgtcaaagcctttaccttggacccagaggtcgactcggaccgatg

SEQ ID NO: 15115 - DNA, 203 bp, synthetic construct
  source 1..203: mol_type = other DNA
ggcgcgccagtcctgatatcttacctgacacaactgtgttcactagcaacctcaaacagacaccatggtgcatctgactcctgaggcgtcaaatcctttaactgcgtcaaatcctttagtgacgtcaaatcctttaggtgcgtcaaatcctttaaggccgtcaaatcctttaccttggacccagaggtcgactcggaccgatg

SEQ ID NO: 15116 - DNA, 203 bp, synthetic construct
  source 1..203: mol_type = other DNA
ggcgcgccagtcctggcagaatatctgacacaactgtgttcactagcaacctcaaacagacaccatggtgcatctgactcctgaggcgtcaacacctttaactgcgtcaacacctttagtgacgtcaacacctttaggtgcgtcaacacctttaaggccgtcaacacctttaccttggacccagaggtcgactcggaccgatg

SEQ ID NO: 15117 - DNA, 203 bp, synthetic construct
  source 1..203: mol_type = other DNA
ggcgcgccagtcctatatcgtgccctgacacaactgtgttcactagcaacctcaaacagacaccatggtgcatctgactcctgaggcgtcaacccctttaactgcgtcaacccctttagtgacgtcaacccctttaggtgcgtcaacccctttaaggccgtcaacccctttaccttggacccagaggtcgactcggaccgatg

SEQ ID NO: 15118 - DNA, 203 bp, synthetic construct
  source 1..203: mol_type = other DNA
ggcgcgccagtcctgaatattgccctgacacaactgtgttcactagcaacctcaaacagacaccatggtgcatctgactcctgaggcgtcaacgcctttaactgcgtcaacgcctttagtgacgtcaacgcctttaggtgcgtcaacgcctttaaggccgtcaacgcctttaccttggacccagaggtcgactcggaccgatg

SEQ ID NO: 15119 - DNA, 203 bp, synthetic construct
  source 1..203: mol_type = other DNA
ggcgcgccagtccttgcatatcccctgacacaactgtgttcactagcaacctcaaacagacaccatggtgcatctgactcctgaggcgtcaagacctttaactgcgtcaagacctttagtgacgtcaagacctttaggtgcgtcaagacctttaaggccgtcaagacctttaccttggacccagaggtcgactcggaccgatg

SEQ ID NO: 15120 - DNA, 203 bp, synthetic construct
  source 1..203: mol_type = other DNA
ggcgcgccagtccttacaatatgcctgacacaactgtgttcactagcaacctcaaacagacaccatggtgcatctgactcctgaggcgtcaaggcctttaactgcgtcaaggcctttagtgacgtcaaggcctttaggtgcgtcaaggcctttaaggccgtcaaggcctttaccttggacccagaggtcgactcggaccgatg

SEQ ID NO: 15121 - DNA, 203 bp, synthetic construct
  source 1..203: mol_type = other DNA
ggcgcgccagtcctgatatgcgaactgacacaactgtgttcactagcaacctcaaacagacaccatggtgcatctgactcctgaggcgtcaatacctttaactgcgtcaatacctttagtgacgtcaatacctttaggtgcgtcaatacctttaaggccgtcaatacctttaccttggacccagaggtcgactcggaccgatg

SEQ ID NO: 15122 - DNA, 203 bp, synthetic construct
  source 1..203: mol_type = other DNA
ggcgcgccagtccttctcatattgctgacacaactgtgttcactagcaacctcaaacagacaccatggtgcatctgactcctgaggcgtcaatccctttaactgcgtcaatccctttagtgacgtcaatccctttaggtgcgtcaatccctttaaggccgtcaatccctttaccttggacccagaggtcgactcggaccgatg

SEQ ID NO: 15123 - DNA, 203 bp, synthetic construct
  source 1..203: mol_type = other DNA
ggcgcgccagtcctaggatattgtctgacacaactgtgttcactagcaacctcaaacagacaccatggtgcatctgactcctgaggcgtcaattccgataactgcgtcaattccgatagtgacgtcaattccgataggtgcgtcaattccgataaggccgtcaattccgataccttggacccagaggtcgactcggaccgatg

SEQ ID NO: 15124 - DNA, 203 bp, synthetic construct
  source 1..203: mol_type = other DNA
ggcgcgccagtcctaccgcatatcctgacacaactgtgttcactagcaacctcaaacagacaccatggtgcatctgactcctgaggcgtcaattccgttaactgcgtcaattccgttagtgacgtcaattccgttaggtgcgtcaattccgttaaggccgtcaattccgttaccttggacccagaggtcgactcggaccgatg

SEQ ID NO: 15125 - DNA, 203 bp, synthetic construct
  source 1..203: mol_type = other DNA
ggcgcgccagtcctcgatattcacctgacacaactgtgttcactagcaacctcaaacagacaccatggtgcatctgactcctgaggcgtcaattccttaaactgcgtcaattccttaagtgacgtcaattccttaaggtgcgtcaattccttaaaggccgtcaattccttaaccttggacccagaggtcgactcggaccgatg

SEQ ID NO: 15126 - DNA, 203 bp, synthetic construct
  source 1..203: mol_type = other DNA
ggcgcgccagtcctatatcttaacctgacacaactgtgttcactagcaacctcaaacagacaccatggtgcatctgactcctgaggcgtcaattccttacactgcgtcaattccttacgtgacgtcaattccttacggtgcgtcaattccttacaggccgtcaattccttacccttggacccagaggtcgactcggaccgatg

SEQ ID NO: 15127 - DNA, 203 bp, synthetic construct
  source 1..203: mol_type = other DNA
ggcgcgccagtcctgggatatccactgacacaactgtgttcactagcaacctcaaacagacaccatggtgcatctgactcctgaggcgtcaattccttgcactgcgtcaattccttgcgtgacgtcaattccttgcggtgcgtcaattccttgcaggccgtcaattccttgcccttggacccagaggtcgactcggaccgatg

SEQ ID NO: 15128 - DNA, 203 bp, synthetic construct
  source 1..203: mol_type = other DNA
ggcgcgccagtccttacacatattctgacacaactgtgttcactagcaacctcaaacagacaccatggtgcatctgactcctgaggcgtcaattccttgtactgcgtcaattccttgtgtgacgtcaattccttgtggtgcgtcaattccttgtaggccgtcaattccttgtccttggacccagaggtcgactcggaccgatg

SEQ ID NO: 15129 - DNA, 203 bp, synthetic construct
  source 1..203: mol_type = other DNA
ggcgcgccagtcctctgcatatccctgacacaactgtgttcactagcaacctcaaacagacaccatggtgcatctgactcctgaggcgtcaattcctttaactgccctgtggggcaaggtgaacgtggatgaagttggtgcgtcaattcctttaaggccgtcaattcctttaccttggacccagaggtcgactcggaccgatg

SEQ ID NO: 15130 - DNA, 203 bp, synthetic construct
  source 1..203: mol_type = other DNA
ggcgcgccagtccttcgatatcgtctgacacaactgtgttcactagcaacctcaaacagacaccatggtgcatctgactcctgaggcgtcaattcctttaactgccctgtggggcaaggtgaacgtggatgaagttggtgcgtcaattcctttaaggctgctggtggtctacccttggacccagaggtcgactcggaccgatg

SEQ ID NO: 15131 - DNA, 203 bp, synthetic construct
  source 1..203: mol_type = other DNA
ggcgcgccagtcctatatctacttctgacacaactgtgttcactagcaacctcaaacagacaccatggtgcatctgactcctgaggcgtcaattcctttaactgccctgtggggcaaggtgacgtcaattcctttaggtggtgaggccctgggcaggctgctggtggtctacccttggacccagaggtcgactcggaccgatg

SEQ ID NO: 15132 - DNA, 203 bp, synthetic construct
  source 1..203: mol_type = other DNA
ggcgcgccagtcctatatgttctcctgacacaactgtgttcactagcaacctcaaacagacaccatggtgcatctgactcctgaggcgtcaattcctttaactgcgtcaattcctttagtgaacgtggatgaagttggtgcgtcaattcctttaaggccgtcaattcctttaccttggacccagaggtcgactcggaccgatg

SEQ ID NO: 15133 - DNA, 203 bp, synthetic construct
  source 1..203: mol_type = other DNA
ggcgcgccagtcctcggcactggactgacacaactgtgttcactagcaacctcaaacagacaccatggtgcatctgactcctgaggcgtcaattcctttcactgcgtcaattcctttcgtgacgtcaattcctttcggtgcgtcaattcctttcaggccgtcaattcctttcccttggacccagaggtcgactcggaccgatg

SEQ ID NO: 15134 - DNA, 203 bp, synthetic construct
  source 1..203: mol_type = other DNA
ggcgcgccagtcctcggcagtcccctgacacaactgtgttcactagcaacctcaaacagacaccatggtgcatctgactcctgaggcgtcaattccttttactgcgtcaattccttttgtgacgtcaattccttttggtgcgtcaattccttttaggccgtcaattccttttccttggacccagaggtcgactcggaccgatg

SEQ ID NO: 15135 - DNA, 203 bp, synthetic construct
  source 1..203: mol_type = other DNA
ggcgcgccagtcctcgtaacaggtctgacacaactgtgttcactagcaacctcaaacagacaccatggtgcatctgactcctgaggcgtcaattcgtttaactgcgtcaattcgtttagtgacgtcaattcgtttaggtgcgtcaattcgtttaaggccgtcaattcgtttaccttggacccagaggtcgactcggaccgatg

SEQ ID NO: 15136 - DNA, 203 bp, synthetic construct
  source 1..203: mol_type = other DNA
ggcgcgccagtcctagtcgatctgctgacacaactgtgttcactagcaacctcaaacagacaccatggtgcatctgactcctgaggcgtcaattgctttaactgcgtcaattgctttagtgacgtcaattgctttaggtgcgtcaattgctttaaggccgtcaattgctttaccttggacccagaggtcgactcggaccgatg

SEQ ID NO: 15137 - DNA, 203 bp, synthetic construct
  source 1..203: mol_type = other DNA
ggcgcgccagtcctaagtcgatctctgacacaactgtgttcactagcaacctcaaacagacaccatggtgcatctgactcctgaggcgtcaattggtttaactgcgtcaattggtttagtgacgtcaattggtttaggtgcgtcaattggtttaaggccgtcaattggtttaccttggacccagaggtcgactcggaccgatg

SEQ ID NO: 15138 - DNA, 203 bp, synthetic construct
  source 1..203: mol_type = other DNA
ggcgcgccagtcctcccgatcgacctgacacaactgtgttcactagcaacctcaaacagacaccatggtgcatctgactcctgaggcgtcaattgttttaactgcgtcaattgttttagtgacgtcaattgttttaggtgcgtcaattgttttaaggccgtcaattgttttaccttggacccagaggtcgactcggaccgatg

SEQ ID NO: 15139 - DNA, 203 bp, synthetic construct
  source 1..203: mol_type = other DNA
ggcgcgccagtccttgcgatattgctgacacaactgtgttcactagcaacctcaaacagacaccatggtgcatctgactcctgaggcgtcccttcctttaactgcgtcccttcctttagtgacgtcccttcctttaggtgcgtcccttcctttaaggccgtcccttcctttaccttggacccagaggtcgactcggaccgatg

SEQ ID NO: 15140 - DNA, 203 bp, synthetic construct
  source 1..203: mol_type = other DNA
ggcgcgccagtcctggtgcgatcgctgacacaactgtgttcactagcaacctcaaacagacaccatggtgcatctgactcctgaggcgtcctttcctttaactgcgtcctttcctttagtgacgtcctttcctttaggtgcgtcctttcctttaaggccgtcctttcctttaccttggacccagaggtcgactcggaccgatg

SEQ ID NO: 15141 - DNA, 203 bp, synthetic construct
  source 1..203: mol_type = other DNA
ggcgcgccagtcctaaaggcgattctgacacaactgtgttcactagcaacctcaaacagacaccatggtgcatctgactcctgaggcgtcgtttcctttaactgcgtcgtttcctttagtgacgtcgtttcctttaggtgcgtcgtttcctttaaggccgtcgtttcctttaccttggacccagaggtcgactcggaccgatg

SEQ ID NO: 15142 - DNA, 203 bp, synthetic construct
  source 1..203: mol_type = other DNA
ggcgcgccagtcctctagcgattgctgacacaactgtgttcactagcaacctcaaacagacaccatggtgcatctgactcctgaggcgtctattcctttaactgcgtctattcctttagtgacgtctattcctttaggtgcgtctattcctttaaggccgtctattcctttaccttggacccagaggtcgactcggaccgatg

SEQ ID NO: 15143 - DNA, 203 bp, synthetic construct
  source 1..203: mol_type = other DNA
ggcgcgccagtcctatcgctcgtgctgacacaactgtgttcactagcaacctcaaacagacaccatggtgcatctgactcctgaggcgttaattcctttaactgcgttaattcctttagtgacgttaattcctttaggtgcgttaattcctttaaggccgttaattcctttaccttggacccagaggtcgactcggaccgatg

SEQ ID NO: 15144 - DNA, 203 bp, synthetic construct
  source 1..203: mol_type = other DNA
ggcgcgccagtcctctgatcgccgctgacacaactgtgttcactagcaacctcaaacagacaccatggtgcatctgactcctgaggctcggccgtccgttactgctcggccgtgcaaggtgactcggccgtaagttggtgctcggccgttgggcaggcctcggccgttctacccttggacccagaggtcgactcggaccgatg

SEQ ID NO: 15145 - DNA, 203 bp, synthetic construct
  source 1..203: mol_type = other DNA
ggcgcgccagtccttgatcgcagactgacacaactgtgttcactagcaacctcaaacagacaccatggtgcatctgactcctgagggacggccgtccgttactggacggccgtgcaaggtgagacggccgtaagttggtggacggccgttgggcaggcgacggccgttctacccttggacccagaggtcgactcggaccgatg

SEQ ID NO: 15146 - DNA, 203 bp, synthetic construct
  source 1..203: mol_type = other DNA
ggcgcgccagtcctagcgtaggtgctgacacaactgtgttcactagcaacctcaaacagacaccatggtgcatctgactcctgagggatcaattcctttaactggatcaattcctttagtgagatcaattcctttaggtggatcaattcctttaaggcgatcaattcctttaccttggacccagaggtcgactcggaccgatg

SEQ ID NO: 15147 - DNA, 203 bp, synthetic construct
  source 1..203: mol_type = other DNA
ggcgcgccagtcctaactgcgtagctgacacaactgtgttcactagcaacctcaaacagacaccatggtgcatctgactcctgagggccggccgtccgttactggccggccgtgcaaggtgagccggccgtaagttggtggccggccgttgggcaggcgccggccgttctacccttggacccagaggtcgactcggaccgatg

SEQ ID NO: 15148 - DNA, 203 bp, synthetic construct
  source 1..203: mol_type = other DNA
ggcgcgccagtcctggcgtagcttctgacacaactgtgttcactagcaacctcaaacagacaccatggtgcatctgactcctgagggcggcgggtccgttactggcggcgggtgcaaggtgagcggcgggtaagttggtggcggcgggttgggcaggcgcggcgggttctacccttggacccagaggtcgactcggaccgatg

SEQ ID NO: 15149 - DNA, 203 bp, synthetic construct
  source 1..203: mol_type = other DNA
ggcgcgccagtccttgcgtagtaactgacacaactgtgttcactagcaacctcaaacagacaccatggtgcatctgactcctgaggggcggccgtccgttactgggcggccgtgcaaggtgaggcggccgtaagttggtgggcggccgttgggcaggcggcggccgttctacccttggacccagaggtcgactcggaccgatg

SEQ ID NO: 15150 - DNA, 203 bp, synthetic construct
  source 1..203: mol_type = other DNA
ggcgcgccagtcctcaaattcaacctgacacaactgtgttcactagcaacctcaaacagacaccatggtgcatctgactcctgagggtcggaatcgagaaactggtcggaatcgagaagtgagtcggaatcgagaaggtggtcggaatcgagaaaggcgtcggaatcgagaaccttggacccagaggtcgactcggaccgatg

SEQ ID NO: 15151 - DNA, 203 bp, synthetic construct
  source 1..203: mol_type = other DNA
ggcgcgccagtcctgcgtgttgtcctgacacaactgtgttcactagcaacctcaaacagacaccatggtgcatctgactcctgagggtcggccgtccgttactggtcggccgtgcaaggtgagtcggccgtaagttggtggtcggccgttgggcaggcgtcggccgttctacccttggacccagaggtcgactcggaccgatg

SEQ ID NO: 15152 - DNA, 203 bp, synthetic construct
  source 1..203: mol_type = other DNA
ggcgcgccagtcctgcgtgttagactgacacaactgtgttcactagcaacctcaaacagacaccatggtgcatctgactcctgagggtcttggcaaagttactggtcttggcaaaaaggtgagtcttggcaaagttggtggtcttggcaaaggcaggcgtcttggcaaatacccttggacccagaggtcgactcggaccgatg

SEQ ID NO: 15153 - DNA, 203 bp, synthetic construct
  source 1..203: mol_type = other DNA
ggcgcgccagtcctcctgggcgtcctgacacaactgtgttcactagcaacctcaaacagacaccatggtgcatctgactcctgaggtaccccctgccgttactgtacccccgggcaaggtgataccccctgaagttggtgtaccccccctgggcaggctacccccggtctacccttggacccagaggtcgactcggaccgatg

SEQ ID NO: 15154 - DNA, 203 bp, synthetic construct
  source 1..203: mol_type = other DNA
ggcgcgccagtccttcttgggccgctgacacaactgtgttcactagcaacctcaaacagacaccatggtgcatctgactcctgaggtacggccgtccgttactgtacggccgtgcaaggtgatacggccgtaagttggtgtacggccgttgggcaggctacggccgttctacccttggacccagaggtcgactcggaccgatg

SEQ ID NO: 15155 - DNA, 203 bp, synthetic construct
  source 1..203: mol_type = other DNA
ggcgcgccagtcctaagagcccaactgacacaactgtgttcactagcaacctcaaacagacaccatggtgcatctgactcctgaggtactcaatgccgttactgtactcaagggcaaggtgatactcaatgaagttggtgtactcaacctgggcaggctactcaaggtctacccttggacccagaggtcgactcggaccgatg

SEQ ID NO: 15156 - DNA, 203 bp, synthetic construct
  source 1..203: mol_type = other DNA
ggcgcgccagtcctcgttgggccactgacacaactgtgttcactagcaacctcaaacagacaccatggtgcatctgactcctgaggtactcagtgccgttactgtactcaggggcaaggtgatactcagtgaagttggtgtactcagcctgggcaggctactcagggtctacccttggacccagaggtcgactcggaccgatg

SEQ ID NO: 15157 - DNA, 203 bp, synthetic construct
  source 1..203: mol_type = other DNA
ggcgcgccagtcctttgcccatgactgacacaactgtgttcactagcaacctcaaacagacaccatggtgcatctgactcctgaggtactccatgccgttactgtactccagggcaaggtgatactccatgaagttggtgtactccacctgggcaggctactccaggtctacccttggacccagaggtcgactcggaccgatg

SEQ ID NO: 15158 - DNA, 203 bp, synthetic construct
  source 1..203: mol_type = other DNA
ggcgcgccagtcctgagcccatatctgacacaactgtgttcactagcaacctcaaacagacaccatggtgcatctgactcctgaggtactccctgccgttactgccctgtggggcaaggtgaacgtggatgaagttggtggtgaggccctgggcaggctactcccggtctaccctttactcccgaggtcgactcggaccgatg

SEQ ID NO: 15159 - DNA, 203 bp, synthetic construct
  source 1..203: mol_type = other DNA
ggcgcgccagtcctacgcccaaatctgacacaactgtgttcactagcaacctcaaacagacaccatggtgcatctgactcctgaggtactccctgccgttactgccctgtggggcaaggtgaacgtggatgaagttggtggtgaggccctgggcaggctgctggtggtctaccctttactcccgaggtcgactcggaccgatg

SEQ ID NO: 15160 - DNA, 203 bp, synthetic construct
  source 1..203: mol_type = other DNA
ggcgcgccagtccttgaactgggcctgacacaactgtgttcactagcaacctcaaacagacaccatggtgcatctgactcctgaggtactccctgccgttactgccctgtggggcaaggtgaacgtggatgaagttggtgtactccccctgggcaggctactcccggtctacccttggacccagaggtcgactcggaccgatg

SEQ ID NO: 15161 - DNA, 203 bp, synthetic construct
  source 1..203: mol_type = other DNA
ggcgcgccagtcctgctcagcccactgacacaactgtgttcactagcaacctcaaacagacaccatggtgcatctgactcctgaggtactccctgccgttactgccctgtggggcaaggtgaacgtggatgaagttggtgtactccccctgggcaggctgctggtggtctaccctttactcccgaggtcgactcggaccgatg

SEQ ID NO: 15162 - DNA, 203 bp, synthetic construct
  source 1..203: mol_type = other DNA
ggcgcgccagtcctactactgggcctgacacaactgtgttcactagcaacctcaaacagacaccatggtgcatctgactcctgaggtactccctgccgttactgccctgtggggcaaggtgatactccctgaagttggtggtgaggccctgggcaggctactcccggtctacccttggacccagaggtcgactcggaccgatg

SEQ ID NO: 15163 - DNA, 203 bp, synthetic construct
  source 1..203: mol_type = other DNA
ggcgcgccagtcctatatgcccagctgacacaactgtgttcactagcaacctcaaacagacaccatggtgcatctgactcctgaggtactccctgccgttactgccctgtggggcaaggtgatactccctgaagttggtggtgaggccctgggcaggctgctggtggtctacccttggacccagaggtcgactcggaccgatg

SEQ ID NO: 15164 - DNA, 203 bp, synthetic construct
  source 1..203: mol_type = other DNA
ggcgcgccagtccttgtttgcccactgacacaactgtgttcactagcaacctcaaacagacaccatggtgcatctgactcctgaggtactccctgccgttactgccctgtggggcaaggtgatactccctgaagttggtgtactccccctgggcaggctgctggtggtctacccttggacccagaggtcgactcggaccgatg

SEQ ID NO: 15165 - DNA, 203 bp, synthetic construct
  source 1..203: mol_type = other DNA
ggcgcgccagtccttcatgggcatctgacacaactgtgttcactagcaacctcaaacagacaccatggtgcatctgactcctgaggtactccctgccgttactgtactcccgggcaaggtgaacgtggatgaagttggtggtgaggccctgggcaggctactcccggtctaccctttactcccgaggtcgactcggaccgatg

SEQ ID NO: 15166 - DNA, 203 bp, synthetic construct
  source 1..203: mol_type = other DNA
ggcgcgccagtccttgaatgggcactgacacaactgtgttcactagcaacctcaaacagacaccatggtgcatctgactcctgaggtactccctgccgttactgtactcccgggcaaggtgaacgtggatgaagttggtgtactccccctgggcaggctactcccggtctacccttggacccagaggtcgactcggaccgatg

SEQ ID NO: 15167 - DNA, 203 bp, synthetic construct
  source 1..203: mol_type = other DNA
ggcgcgccagtcctgtagcccatgctgacacaactgtgttcactagcaacctcaaacagacaccatggtgcatctgactcctgaggtactccctgccgttactgtactcccgggcaaggtgaacgtggatgaagttggtgtactccccctgggcaggctactcccggtctaccctttactcccgaggtcgactcggaccgatg

SEQ ID NO: 15168 - DNA, 203 bp, synthetic construct
  source 1..203: mol_type = other DNA
ggcgcgccagtcctctgggcctgtctgacacaactgtgttcactagcaacctcaaacagacaccatggtgcatctgactcctgaggtactccctgccgttactgtactcccgggcaaggtgaacgtggatgaagttggtgtactccccctgggcaggctgctggtggtctacccttggacccagaggtcgactcggaccgatg

SEQ ID NO: 15169 - DNA, 203 bp, synthetic construct
  source 1..203: mol_type = other DNA
ggcgcgccagtcctgctgcccaagctgacacaactgtgttcactagcaacctcaaacagacaccatggtgcatctgactcctgaggtactccctgccgttactgtactcccgggcaaggtgaacgtggatgaagttggtgtactccccctgggcaggctgctggtggtctaccctttactcccgaggtcgactcggaccgatg

SEQ ID NO: 15170 - DNA, 203 bp, synthetic construct
  source 1..203: mol_type = other DNA
ggcgcgccagtcctactaagattcctgacacaactgtgttcactagcaacctcaaacagacaccatggtgcatctgactcctgaggtactccctgccgttactgtactcccgggcaaggtgatactccctgaagttggtggtgaggccctgggcaggctactcccggtctaccctttactcccgaggtcgactcggaccgatg

SEQ ID NO: 15171 - DNA, 203 bp, synthetic construct
  source 1..203: mol_type = other DNA
ggcgcgccagtcctcgactaaggcctgacacaactgtgttcactagcaacctcaaacagacaccatggtgcatctgactcctgaggtactccctgccgttactgtactcccgggcaaggtgatactccctgaagttggtgtactccccctgggcaggctactcccggtctacccttggacccagaggtcgactcggaccgatg

SEQ ID NO: 15172 - DNA, 203 bp, synthetic construct
  source 1..203: mol_type = other DNA
ggcgcgccagtcctgctactaagcctgacacaactgtgttcactagcaacctcaaacagacaccatggtgcatctgactcctgaggtactccctgccgttactgtactcccgggcaaggtgatactccctgaagttggtgtactccccctgggcaggctgctggtggtctacccttggacccagaggtcgactcggaccgatg

SEQ ID NO: 15173 - DNA, 203 bp, synthetic construct
  source 1..203: mol_type = other DNA
ggcgcgccagtcctcttagttgcgctgacacaactgtgttcactagcaacctcaaacagacaccatggtgcatctgactcctgaggtactccgtgccgttactgtactccggggcaaggtgatactccgtgaagttggtgtactccgcctgggcaggctactccgggtctacccttggacccagaggtcgactcggaccgatg

SEQ ID NO: 15174 - DNA, 203 bp, synthetic construct
  source 1..203: mol_type = other DNA
ggcgcgccagtcctttcttagtgactgacacaactgtgttcactagcaacctcaaacagacaccatggtgcatctgactcctgaggtactccttgccgttactgtactcctgggcaaggtgatactccttgaagttggtgtactcctcctgggcaggctactcctggtctacccttggacccagaggtcgactcggaccgatg

SEQ ID NO: 15175 - DNA, 203 bp, synthetic construct
  source 1..203: mol_type = other DNA
ggcgcgccagtcctcttagtgtatctgacacaactgtgttcactagcaacctcaaacagacaccatggtgcatctgactcctgaggtactctctgccgttactgtactctcgggcaaggtgatactctctgaagttggtgtactctccctgggcaggctactctcggtctacccttggacccagaggtcgactcggaccgatg

SEQ ID NO: 15176 - DNA, 203 bp, synthetic construct
  source 1..203: mol_type = other DNA
ggcgcgccagtcctagctttgacgctgacacaactgtgttcactagcaacctcaaacagacaccatggtgcatctgactcctgaggtactggctgccgttactgtactggcgggcaaggtgatactggctgaagttggtgtactggccctgggcaggctactggcggtctacccttggacccagaggtcgactcggaccgatg

SEQ ID NO: 15177 - DNA, 203 bp, synthetic construct
  source 1..203: mol_type = other DNA
ggcgcgccagtcctcttgcttttgctgacacaactgtgttcactagcaacctcaaacagacaccatggtgcatctgactcctgaggtacttactgccgttactgtacttacgggcaaggtgatacttactgaagttggtgtacttaccctgggcaggctacttacggtctacccttggacccagaggtcgactcggaccgatg

SEQ ID NO: 15178 - DNA, 203 bp, synthetic construct
  source 1..203: mol_type = other DNA
ggcgcgccagtcctcaaggtgtccctgacacaactgtgttcactagcaacctcaaacagacaccatggtgcatctgactcctgaggtacttcctgccgttactgtacttccgggcaaggtgatacttcctgaagttggtgtacttcccctgggcaggctacttccggtctacccttggacccagaggtcgactcggaccgatg

SEQ ID NO: 15179 - DNA, 203 bp, synthetic construct
  source 1..203: mol_type = other DNA
ggcgcgccagtcctgcgcttgcgactgacacaactgtgttcactagcaacctcaaacagacaccatggtgcatctgactcctgaggtactttctgccgttactgtactttcgggcaaggtgatactttctgaagttggtgtactttccctgggcaggctactttcggtctacccttggacccagaggtcgactcggaccgatg

SEQ ID NO: 15180 - DNA, 203 bp, synthetic construct
  source 1..203: mol_type = other DNA
ggcgcgccagtccttagaagcgctctgacacaactgtgttcactagcaacctcaaacagacaccatggtgcatctgactcctgaggtagcccctgccgttactgtagccccgggcaaggtgatagcccctgaagttggtgtagcccccctgggcaggctagccccggtctacccttggacccagaggtcgactcggaccgatg

SEQ ID NO: 15181 - DNA, 203 bp, synthetic construct
  source 1..203: mol_type = other DNA
ggcgcgccagtcctagtcaagcgcctgacacaactgtgttcactagcaacctcaaacagacaccatggtgcatctgactcctgaggtaggccctgccgttactgtaggcccgggcaaggtgataggccctgaagttggtgtaggccccctgggcaggctaggcccggtctacccttggacccagaggtcgactcggaccgatg

SEQ ID NO: 15182 - DNA, 203 bp, synthetic construct
  source 1..203: mol_type = other DNA
ggcgcgccagtcctcccgaagcgcctgacacaactgtgttcactagcaacctcaaacagacaccatggtgcatctgactcctgaggtagtccctgccgttactgtagtcccgggcaaggtgatagtccctgaagttggtgtagtccccctgggcaggctagtcccggtctacccttggacccagaggtcgactcggaccgatg

SEQ ID NO: 15183 - DNA, 203 bp, synthetic construct
  source 1..203: mol_type = other DNA
ggcgcgccagtcctttgcgatcttctgacacaactgtgttcactagcaacctcaaacagacaccatggtgcatctgactcctgaggtataccctgccgttactgtatacccgggcaaggtgatataccctgaagttggtgtataccccctgggcaggctatacccggtctacccttggacccagaggtcgactcggaccgatg

SEQ ID NO: 15184 - DNA, 203 bp, synthetic construct
  source 1..203: mol_type = other DNA
ggcgcgccagtcctcgagcctcaactgacacaactgtgttcactagcaacctcaaacagacaccatggtgcatctgactcctgaggtatcaattcctttaactgtatcaattcctttagtgatatcaattcctttaggtgtatcaattcctttaaggctatcaattcctttaccttggacccagaggtcgactcggaccgatg

SEQ ID NO: 15185 - DNA, 203 bp, synthetic construct
  source 1..203: mol_type = other DNA
ggcgcgccagtcctcctgacgtccctgacacaactgtgttcactagcaacctcaaacagacaccatggtgcatctgactcctgaggtatcccctgccgttactgtatccccgggcaaggtgatatcccctgaagttggtgtatcccccctgggcaggctatccccggtctacccttggacccagaggtcgactcggaccgatg

SEQ ID NO: 15186 - DNA, 203 bp, synthetic construct
  source 1..203: mol_type = other DNA
ggcgcgccagtccttatgaccatgctgacacaactgtgttcactagcaacctcaaacagacaccatggtgcatctgactcctgaggtatgccctgccgttactgtatgcccgggcaaggtgatatgccctgaagttggtgtatgccccctgggcaggctatgcccggtctacccttggacccagaggtcgactcggaccgatg

SEQ ID NO: 15187 - DNA, 203 bp, synthetic construct
  source 1..203: mol_type = other DNA
ggcgcgccagtcctttggacgtggctgacacaactgtgttcactagcaacctcaaacagacaccatggtgcatctgactcctgaggtccggccgtccgttactgtccggccgtgcaaggtgatccggccgtaagttggtgtccggccgttgggcaggctccggccgttctacccttggacccagaggtcgactcggaccgatg

SEQ ID NO: 15188 - DNA, 203 bp, synthetic construct
  source 1..203: mol_type = other DNA
ggcgcgccagtccttccacgtccactgacacaactgtgttcactagcaacctcaaacagacaccatggtgcatctgactcctgaggtcctccctgccgttactgtcctcccgggcaaggtgatcctccctgaagttggtgtcctccccctgggcaggctcctcccggtctacccttggacccagaggtcgactcggaccgatg

SEQ ID NO: 15189 - DNA, 203 bp, synthetic construct
  source 1..203: mol_type = other DNA
ggcgcgccagtccttcgtcggtacctgacacaactgtgttcactagcaacctcaaacagacaccatggtgcatctgactcctgaggtgcggaatcgagaaactgtgcggaatcgagaagtgatgcggaatcgagaaggtgtgcggaatcgagaaaggctgcggaatcgagaaccttggacccagaggtcgactcggaccgatg

SEQ ID NO: 15190 - DNA, 203 bp, synthetic construct
  source 1..203: mol_type = other DNA
ggcgcgccagtccttaccgatccactgacacaactgtgttcactagcaacctcaaacagacaccatggtgcatctgactcctgaggtgcttggcaaagttactgtgcttggcaaaaaggtgatgcttggcaaagttggtgtgcttggcaaaggcaggctgcttggcaaatacccttggacccagaggtcgactcggaccgatg

SEQ ID NO: 15191 - DNA, 203 bp, synthetic construct
  source 1..203: mol_type = other DNA
ggcgcgccagtcctgtaccgaaatctgacacaactgtgttcactagcaacctcaaacagacaccatggtgcatctgactcctgaggtgtcaattcctttaactgtgtcaattcctttagtgatgtcaattcctttaggtgtgtcaattcctttaaggctgtcaattcctttaccttggacccagaggtcgactcggaccgatg

SEQ ID NO: 15192 - DNA, 203 bp, synthetic construct
  source 1..203: mol_type = other DNA
ggcgcgccagtcctaataccgaacctgacacaactgtgttcactagcaacctcaaacagacaccatggtgcatctgactcctgaggttactggcaaagttactgttactggcaaaaaggtgattactggcaaagttggtgttactggcaaaggcaggcttactggcaaatacccttggacccagaggtcgactcggaccgatg

SEQ ID NO: 15193 - DNA, 203 bp, synthetic construct
  source 1..203: mol_type = other DNA
ggcgcgccagtcctcgtgcaccatctgacacaactgtgttcactagcaacctcaaacagacaccatggtgcatctgactcctgaggttcgtggcaaagttactgttcgtggcaaaaaggtgattcgtggcaaagttggtgttcgtggcaaaggcaggcttcgtggcaaatacccttggacccagaggtcgactcggaccgatg

SEQ ID NO: 15194 - DNA, 203 bp, synthetic construct
  source 1..203: mol_type = other DNA
ggcgcgccagtcctacgttgaacgctgacacaactgtgttcactagcaacctcaaacagacaccatggtgcatctgactcctgaggttctaagcaaagttactgttctaagcaaaaaggtgattctaagcaaagttggtgttctaagcaaaggcaggcttctaagcaaatacccttggacccagaggtcgactcggaccgatg

SEQ ID NO: 15195 - DNA, 203 bp, synthetic construct
  source 1..203: mol_type = other DNA
ggcgcgccagtccttgggtgtgaactgacacaactgtgttcactagcaacctcaaacagacaccatggtgcatctgactcctgaggttctatgcaaagttactgttctatgcaaaaaggtgattctatgcaaagttggtgttctatgcaaaggcaggcttctatgcaaatacccttggacccagaggtcgactcggaccgatg

SEQ ID NO: 15196 - DNA, 203 bp, synthetic construct
  source 1..203: mol_type = other DNA
ggcgcgccagtcctatgggtgtcgctgacacaactgtgttcactagcaacctcaaacagacaccatggtgcatctgactcctgaggttctcagcaaagttactgttctcagcaaaaaggtgattctcagcaaagttggtgttctcagcaaaggcaggcttctcagcaaatacccttggacccagaggtcgactcggaccgatg

SEQ ID NO: 15197 - DNA, 203 bp, synthetic construct
  source 1..203: mol_type = other DNA
ggcgcgccagtccttactgacgtactgacacaactgtgttcactagcaacctcaaacagacaccatggtgcatctgactcctgaggttctccctgccgttactgttctcccgggcaaggtgattctccctgaagttggtgttctccccctgggcaggcttctcccggtctacccttggacccagaggtcgactcggaccgatg

SEQ ID NO: 15198 - DNA, 203 bp, synthetic construct
  source 1..203: mol_type = other DNA
ggcgcgccagtcctgctacattttctgacacaactgtgttcactagcaacctcaaacagacaccatggtgcatctgactcctgaggttctccgcaaagttactgttctccgcaaaaaggtgattctccgcaaagttggtgttctccgcaaaggcaggcttctccgcaaatacccttggacccagaggtcgactcggaccgatg

SEQ ID NO: 15199 - DNA, 203 bp, synthetic construct
  source 1..203: mol_type = other DNA
ggcgcgccagtcctcagatccagcctgacacaactgtgttcactagcaacctcaaacagacaccatggtgcatctgactcctgaggttctcgattccgtgactgttctcgattccgtggtgattctcgattccgtgggtgttctcgattccgtgaggcttctcgattccgtgccttggacccagaggtcgactcggaccgatg

SEQ ID NO: 15200 - DNA, 203 bp, synthetic construct
  source 1..203: mol_type = other DNA
ggcgcgccagtcctgtgacagcaactgacacaactgtgttcactagcaacctcaaacagacaccatggtgcatctgactcctgaggttctgggcaaagttactgttctgggcaaaaaggtgattctgggcaaagttggtgttctgggcaaaggcaggcttctgggcaaatacccttggacccagaggtcgactcggaccgatg

SEQ ID NO: 15201 - DNA, 203 bp, synthetic construct
  source 1..203: mol_type = other DNA
ggcgcgccagtccttgtctggaccctgacacaactgtgttcactagcaacctcaaacagacaccatggtgcatctgactcctgaggttcttagcaaagttactgttcttagcaaaaaggtgattcttagcaaagttggtgttcttagcaaaggcaggcttcttagcaaatacccttggacccagaggtcgactcggaccgatg

SEQ ID NO: 15202 - DNA, 203 bp, synthetic construct
  source 1..203: mol_type = other DNA
ggcgcgccagtccttcgcccaggtctgacacaactgtgttcactagcaacctcaaacagacaccatggtgcatctgactcctgaggttcttcgcaaagttactgttcttcgcaaaaaggtgattcttcgcaaagttggtgttcttcgcaaaggcaggcttcttcgcaaatacccttggacccagaggtcgactcggaccgatg

SEQ ID NO: 15203 - DNA, 203 bp, synthetic construct
  source 1..203: mol_type = other DNA
ggcgcgccagtcctttcgcccaagctgacacaactgtgttcactagcaacctcaaacagacaccatggtgcatctgactcctgaggttcttgacaaagttactgttcttgacaaaaaggtgattcttgacaaagttggtgttcttgacaaaggcaggcttcttgacaaatacccttggacccagaggtcgactcggaccgatg

SEQ ID NO: 15204 - DNA, 203 bp, synthetic construct
  source 1..203: mol_type = other DNA
ggcgcgccagtcctcaggtcgcccctgacacaactgtgttcactagcaacctcaaacagacaccatggtgcatctgactcctgaggttcttgagaaagttactgttcttgagaaaaaggtgattcttgagaaagttggtgttcttgagaaaggcaggcttcttgagaaatacccttggacccagaggtcgactcggaccgatg

SEQ ID NO: 15205 - DNA, 203 bp, synthetic construct
  source 1..203: mol_type = other DNA
ggcgcgccagtccttgggcgatcactgacacaactgtgttcactagcaacctcaaacagacaccatggtgcatctgactcctgaggttcttgcgaaagttactgttcttgcgaaaaaggtgattcttgcgaaagttggtgttcttgcgaaaggcaggcttcttgcgaaatacccttggacccagaggtcgactcggaccgatg

SEQ ID NO: 15206 - DNA, 203 bp, synthetic construct
  source 1..203: mol_type = other DNA
ggcgcgccagtcctcgaccacaatctgacacaactgtgttcactagcaacctcaaacagacaccatggtgcatctgactcctgaggttcttggcaaagttactgccctgtggggcaaggtgaacgtggatgaagttggtggtgaggccctgggcaggctgctggtggtctaccccacggaatcgagaacgactcggaccgatg

SEQ ID NO: 15207 - DNA, 203 bp, synthetic construct
  source 1..203: mol_type = other DNA
ggcgcgccagtcctcaccacaatgctgacacaactgtgttcactagcaacctcaaacagacaccatggtgcatctgactcctgaggttcttggcaaagttactgccctgtggggcaaggtgaacgtggatgaagttggtggtgaggccctgggcaggctgctggtggtctaccccgtcaattcctttacgactcggaccgatg

SEQ ID NO: 15208 - DNA, 203 bp, synthetic construct
  source 1..203: mol_type = other DNA
ggcgcgccagtccttcacccgaaactgacacaactgtgttcactagcaacctcaaacagacaccatggtgcatctgactcctgaggttcttggcaaagttactgccctgtggggcaaggtgaacgtggatgaagttggtggtgaggccctgggcaggctgctggtggtctacccttggacccagaggtcgactcggaccgatg

SEQ ID NO: 15209 - DNA, 203 bp, synthetic construct
  source 1..203: mol_type = other DNA
ggcgcgccagtcctactacgggtactgacacaactgtgttcactagcaacctcaaacagacaccatggtgcatctgactcctgaggttcttggcaaagttactgccctgtggggcaaggtgaacgtggatgaagttggtggtgaggccctgggcaggctgctggtggtctacccttggacctactccccgactcggaccgatg

SEQ ID NO: 15210 - DNA, 203 bp, synthetic construct
  source 1..203: mol_type = other DNA
ggcgcgccagtcctaacgggttaactgacacaactgtgttcactagcaacctcaaacagacaccatggtgcatctgactcctgaggttcttggcaaagttactgccctgtggggcaaggtgattcttggcaaagttggtgttcttggcaaaggcaggctgctggtggtctacccttggacccagaggtcgactcggaccgatg

SEQ ID NO: 15211 - DNA, 203 bp, synthetic construct
  source 1..203: mol_type = other DNA
ggcgcgccagtcctacccgtcagcctgacacaactgtgttcactagcaacctcaaacagacaccatggtgcatctgactcctgaggttcttggcaaagttactgttcttggcaaaaaggtgaacgtggatgaagttggtggtgaggccctgggcaggcttcttggcaaatacccttggacccagaggtcgactcggaccgatg

SEQ ID NO: 15212 - DNA, 203 bp, synthetic construct
  source 1..203: mol_type = other DNA
ggcgcgccagtcctcgtcgggtttctgacacaactgtgttcactagcaacctcaaacagacaccatggtgcatctgactcctgaggttcttggcaaagttactgttcttggcaaaaaggtgattcttggcaaagttggtggtgaggccctgggcaggctgctggtggtctacccttggacccagaggtcgactcggaccgatg

SEQ ID NO: 15213 - DNA, 203 bp, synthetic construct
  source 1..203: mol_type = other DNA
ggcgcgccagtcctgaaacccgtgctgacacaactgtgttcactagcaacctcaaacagacaccatggtgcatctgactcctgaggttcttggcaaagttactgttcttggcaaaaaggtgattcttggcaaagttggtggtgaggccctgggcaggcttcttggcaaatacccttggacccagaggtcgactcggaccgatg

SEQ ID NO: 15214 - DNA, 203 bp, synthetic construct
  source 1..203: mol_type = other DNA
ggcgcgccagtcctgcgacccgtactgacacaactgtgttcactagcaacctcaaacagacaccatggtgcatctgactcctgaggttcttggcaaagttactgttcttggcaaaaaggtgattcttggcaaagttggtgttcttggcaaaggcaggctgctggtggtctacccttggacccagaggtcgactcggaccgatg

SEQ ID NO: 15215 - DNA, 203 bp, synthetic construct
  source 1..203: mol_type = other DNA
ggcgcgccagtcctccttcgggtgctgacacaactgtgttcactagcaacctcaaacagacaccatggtgcatctgactcctgaggttcttggcaaggttactgttcttggcaagaaggtgattcttggcaaggttggtgttcttggcaagggcaggcttcttggcaagtacccttggacccagaggtcgactcggaccgatg

SEQ ID NO: 15216 - DNA, 203 bp, synthetic construct
  source 1..203: mol_type = other DNA
ggcgcgccagtcctaaacgggtttctgacacaactgtgttcactagcaacctcaaacagacaccatggtgcatctgactcctgaggttcttggcacagttactgttcttggcacaaaggtgattcttggcacagttggtgttcttggcacaggcaggcttcttggcacatacccttggacccagaggtcgactcggaccgatg

SEQ ID NO: 15217 - DNA, 203 bp, synthetic construct
  source 1..203: mol_type = other DNA
ggcgcgccagtcctcacccgtactctgacacaactgtgttcactagcaacctcaaacagacaccatggtgcatctgactcctgaggttcttggcaccgttactgttcttggcaccaaggtgattcttggcaccgttggtgttcttggcaccggcaggcttcttggcacctacccttggacccagaggtcgactcggaccgatg

SEQ ID NO: 15218 - DNA, 203 bp, synthetic construct
  source 1..203: mol_type = other DNA
ggcgcgccagtcctgtaacgggtcctgacacaactgtgttcactagcaacctcaaacagacaccatggtgcatctgactcctgaggttcttggcactgttactgttcttggcactaaggtgattcttggcactgttggtgttcttggcactggcaggcttcttggcacttacccttggacccagaggtcgactcggaccgatg

SEQ ID NO: 15219 - DNA, 203 bp, synthetic construct
  source 1..203: mol_type = other DNA
ggcgcgccagtcctgtttcgggtactgacacaactgtgttcactagcaacctcaaacagacaccatggtgcatctgactcctgaggttcttggcagagttactgttcttggcagaaaggtgattcttggcagagttggtgttcttggcagaggcaggcttcttggcagatacccttggacccagaggtcgactcggaccgatg

SEQ ID NO: 15220 - DNA, 203 bp, synthetic construct
  source 1..203: mol_type = other DNA
ggcgcgccagtcctacccgaaatcctgacacaactgtgttcactagcaacctcaaacagacaccatggtgcatctgactcctgaggttcttggcagggttactgttcttggcaggaaggtgattcttggcagggttggtgttcttggcaggggcaggcttcttggcaggtacccttggacccagaggtcgactcggaccgatg

SEQ ID NO: 15221 - DNA, 203 bp, synthetic construct
  source 1..203: mol_type = other DNA
ggcgcgccagtcctttgatctggactgacacaactgtgttcactagcaacctcaaacagacaccatggtgcatctgactcctgaggttcttggcatagttactgttcttggcataaaggtgattcttggcatagttggtgttcttggcataggcaggcttcttggcatatacccttggacccagaggtcgactcggaccgatg

SEQ ID NO: 15222 - DNA, 203 bp, synthetic construct
  source 1..203: mol_type = other DNA
ggcgcgccagtcctcggtacgtagctgacacaactgtgttcactagcaacctcaaacagacaccatggtgcatctgactcctgaggttcttggccaagttactgttcttggccaaaaggtgattcttggccaagttggtgttcttggccaaggcaggcttcttggccaatacccttggacccagaggtcgactcggaccgatg

SEQ ID NO: 15223 - DNA, 203 bp, synthetic construct
  source 1..203: mol_type = other DNA
ggcgcgccagtcctcggcatacacctgacacaactgtgttcactagcaacctcaaacagacaccatggtgcatctgactcctgaggttcttggcccagttactgttcttggcccaaaggtgattcttggcccagttggtgttcttggcccaggcaggcttcttggcccatacccttggacccagaggtcgactcggaccgatg

SEQ ID NO: 15224 - DNA, 203 bp, synthetic construct
  source 1..203: mol_type = other DNA
ggcgcgccagtcctgtgtaagccgctgacacaactgtgttcactagcaacctcaaacagacaccatggtgcatctgactcctgaggttcttggcgcagttactgttcttggcgcaaaggtgattcttggcgcagttggtgttcttggcgcaggcaggcttcttggcgcatacccttggacccagaggtcgactcggaccgatg

SEQ ID NO: 15225 - DNA, 203 bp, synthetic construct
  source 1..203: mol_type = other DNA
ggcgcgccagtcctcggttgtccactgacacaactgtgttcactagcaacctcaaacagacaccatggtgcatctgactcctgaggttcttggcggagttactgttcttggcggaaaggtgattcttggcggagttggtgttcttggcggaggcaggcttcttggcggatacccttggacccagaggtcgactcggaccgatg

SEQ ID NO: 15226 - DNA, 203 bp, synthetic construct
  source 1..203: mol_type = other DNA
ggcgcgccagtcctcggctaaccactgacacaactgtgttcactagcaacctcaaacagacaccatggtgcatctgactcctgaggttcttggctcagttactgttcttggctcaaaggtgattcttggctcagttggtgttcttggctcaggcaggcttcttggctcatacccttggacccagaggtcgactcggaccgatg

SEQ ID NO: 15227 - DNA, 203 bp, synthetic construct
  source 1..203: mol_type = other DNA
ggcgcgccagtcctcggttggtctctgacacaactgtgttcactagcaacctcaaacagacaccatggtgcatctgactcctgaggttcttgggaaagttactgttcttgggaaaaaggtgattcttgggaaagttggtgttcttgggaaaggcaggcttcttgggaaatacccttggacccagaggtcgactcggaccgatg

SEQ ID NO: 15228 - DNA, 203 bp, synthetic construct
  source 1..203: mol_type = other DNA
ggcgcgccagtccttgcaacaccgctgacacaactgtgttcactagcaacctcaaacagacaccatggtgcatctgactcctgaggttcttggtaaagttactgttcttggtaaaaaggtgattcttggtaaagttggtgttcttggtaaaggcaggcttcttggtaaatacccttggacccagaggtcgactcggaccgatg

SEQ ID NO: 15229 - DNA, 203 bp, synthetic construct
  source 1..203: mol_type = other DNA
ggcgcgccagtcctcggcgtagtactgacacaactgtgttcactagcaacctcaaacagacaccatggtgcatctgactcctgaggttcttgttaaagttactgttcttgttaaaaaggtgattcttgttaaagttggtgttcttgttaaaggcaggcttcttgttaaatacccttggacccagaggtcgactcggaccgatg

SEQ ID NO: 15230 - DNA, 203 bp, synthetic construct
  source 1..203: mol_type = other DNA
ggcgcgccagtcctaaaaccgccgctgacacaactgtgttcactagcaacctcaaacagacaccatggtgcatctgactcctgaggtttatggcaaagttactgtttatggcaaaaaggtgatttatggcaaagttggtgtttatggcaaaggcaggctttatggcaaatacccttggacccagaggtcgactcggaccgatg

SEQ ID NO: 15231 - DNA, 203 bp, synthetic construct
  source 1..203: mol_type = other DNA
ggcgcgccagtcctttagacgtaactgacacaactgtgttcactagcaacctcaaacagacaccatggtgcatctgactcctgaggtttgccaagaagttactgtttgccaagaaaaggtgatttgccaagaagttggtgtttgccaagaaggcaggctttgccaagaatacccttggacccagaggtcgactcggaccgatg

SEQ ID NO: 15232 - DNA, 203 bp, synthetic construct
  source 1..203: mol_type = other DNA
ggcgcgccagtcctcgacgtaagactgacacaactgtgttcactagcaacctcaaacagacaccatggtgcatctgactcctgaggtttgtggcaaagttactgtttgtggcaaaaaggtgatttgtggcaaagttggtgtttgtggcaaaggcaggctttgtggcaaatacccttggacccagaggtcgactcggaccgatg

SEQ ID NO: 15233 - DNA, 203 bp, synthetic construct
  source 1..203: mol_type = other DNA
ggcgcgccagtcctcgtaggacatctgacacaactgtgttcactagcaacctcaaacagacaccatggtgcatctgactcctgattcctttaagtttcagctttgcaaccatactccccccggaacccaaagactttggtttcccgccctgggcaggctgctggtggtctacccttggacccagaggtcgactcggaccgatg

SEQ ID NO: 15234 - DNA, 203 bp, synthetic construct
  source 1..203: mol_type = other DNA
ggcgcgccagtcctccaagatcggctgacacaactgtgttcactagcaacctcaaacagacaccatggtgcatctgactcctgattcttggcaaaccgttactgccctgtggggcaaggtgaacgtggatgaagttggtggtgaggccctgggcaggctgctggtggtctacccttggaccggcgggtcgactcggaccgatg

SEQ ID NO: 15235 - DNA, 203 bp, synthetic construct
  source 1..203: mol_type = other DNA
ggcgcgccagtcctgcagtatcggctgacacaactgtgttcactagcaacctcaaacagacaccatggtgcatctgactcctgcacggaatcgagaagttactgccctgtggggcaaggtgaacgtggatgaagttggtggtgaggccctgggcaggctgctggtggtctacccttggacctactccccgactcggaccgatg

SEQ ID NO: 15236 - DNA, 203 bp, synthetic construct
  source 1..203: mol_type = other DNA
ggcgcgccagtcctcagcggtcggctgacacaactgtgttcactagcaacctcaaacagacaccatggtgcatctgactcctgcgtcaattcctttagttactgccctgtggggcaaggtgaacgtggatgaagttggtggtgaggccctgggcaggctgctggtggtctaccccgtcaattcctttacgactcggaccgatg

SEQ ID NO: 15237 - DNA, 203 bp, synthetic construct
  source 1..203: mol_type = other DNA
ggcgcgccagtcctgaatgatcggctgacacaactgtgttcactagcaacctcaaacagacaccatggtgcatctgactcctggctccactcctggtggtgcccttccgtcaattcctttaagtttcagctttgcaaccatactccccctgggcaggctgctggtggtctacccttggacccagaggtcgactcggaccgatg

SEQ ID NO: 15238 - DNA, 203 bp, synthetic construct
  source 1..203: mol_type = other DNA
ggcgcgccagtcctttactctcggctgacacaactgtgttcactagcaacctcaaacagacaccatggtgcatctgactcctggctccactcctggtggtgcccttccgtcaattcctttaagtttcagctttgcaaccatactcgccctgggcaggctgctggtggtctacccttggacccagaggtcgactcggaccgatg

SEQ ID NO: 15239 - DNA, 203 bp, synthetic construct
  source 1..203: mol_type = other DNA
ggcgcgccagtcctagaacgtcggctgacacaactgtgttcactagcaacctcaaacagacaccatggtgcatctgactcctgtactcccgtctgccgttactgccctgtggggcaaggtgaacgtggatgaagttggtggtgaggccctgggcaggctgctggtggtctaccccacggaatcgagaacgactcggaccgatg

SEQ ID NO: 15240 - DNA, 203 bp, synthetic construct
  source 1..203: mol_type = other DNA
ggcgcgccagtcctgacacctcggctgacacaactgtgttcactagcaacctcaaacagacaccatggtgcatctgactcctgtactcccgtctgccgttactgccctgtggggcaaggtgaacgtggatgaagttggtggtgaggccctgggcaggctgctggtggtctacccttggacccagaggtcgactcggaccgatg

SEQ ID NO: 15241 - DNA, 203 bp, synthetic construct
  source 1..203: mol_type = other DNA
ggcgcgccagtcctccgatcaacgctgacacaactgtgttcactagcaacctcaaacagacaccatggtgcatctgactttcttggcaaagtctgccgttactgccctgtggggcaaggtgaacgtggatgaagttggtggtgaggccctgggcaggctgctggtggtctaccccgtcaattcctttacgactcggaccgatg

SEQ ID NO: 15242 - DNA, 203 bp, synthetic construct
  source 1..203: mol_type = other DNA
ggcgcgccagtcctccgaagttgtctgacacaactgtgttcactagcaacctcaaacagacaccatggtgcatctgactttcttggcaaagtctgccgttactgccctgtggggcaaggtgaacgtggatgaagttggtggtgaggccctgggcaggctgctggtggtctacccttggacccagaggtcgactcggaccgatg

SEQ ID NO: 15243 - DNA, 203 bp, synthetic construct
  source 1..203: mol_type = other DNA
ggcgcgccagtcctccgacccgagctgacacaactgtgttcactagcaacctcaaacagacaccatggtgcatctgactttcttggcaaagtctgccgttactgccctgtggggcaaggtgaacgtggatgaagttggtggtgaggccctgggcaggctgctggtggtctacccttggacctactccccgactcggaccgatg

SEQ ID NO: 15244 - DNA, 203 bp, synthetic construct
  source 1..203: mol_type = other DNA
ggcgcgccagtcctgctggtgaacctgacacaactgtgttcactagcaacctcaaacagacaccatggtgcatctgcacggaatcgagaagtctgccgttactgccctgtggggcaaggtgaacgtggatgaagttggtggtgaggccctgggcaggctgctggtggtctaccccgtcaattcctttacgactcggaccgatg

SEQ ID NO: 15245 - DNA, 203 bp, synthetic construct
  source 1..203: mol_type = other DNA
ggcgcgccagtccttaaatccaggctgacacaactgtgttcactagcaacctcaaacagacaccatggtgcatctgcacggaatcgagaagtctgccgttactgccctgtggggcaaggtgaacgtggatgaagttggtggtgaggccctgggcaggctgctggtggtctacccttggacctactccccgactcggaccgatg

SEQ ID NO: 15246 - DNA, 203 bp, synthetic construct
  source 1..203: mol_type = other DNA
ggcgcgccagtcctactaggacgcctgacacaactgtgttcactagcaacctcaaacagacaccatggtgcatctgcgtcaattcctttagtctgccgttactgccctgtggggcaaggtgaacgtggatgaagttggtggtgaggccctgggcaggctgctggtggtctaccccacggaatcgagaacgactcggaccgatg

SEQ ID NO: 15247 - DNA, 203 bp, synthetic construct
  source 1..203: mol_type = other DNA
ggcgcgccagtcctactggacgcactgacacaactgtgttcactagcaacctcaaacagacaccatggtgcatctgcgtcaattcctttagtctgccgttactgccctgtggggcaaggtgaacgtggatgaagttggtggtgaggccctgggcaggctgctggtggtctaccccgtcaattcctttacgactcggaccgatg

SEQ ID NO: 15248 - DNA, 203 bp, synthetic construct
  source 1..203: mol_type = other DNA
ggcgcgccagtccttggacgctaactgacacaactgtgttcactagcaacctcaaacagacaccatggtgcatctgcgtcaattcctttagtctgccgttactgccctgtggggcaaggtgaacgtggatgaagttggtggtgaggccctgggcaggctgctggtggtctacccttggacccagaggtcgactcggaccgatg

SEQ ID NO: 15249 - DNA, 203 bp, synthetic construct
  source 1..203: mol_type = other DNA
ggcgcgccagtcctgcgtcccagactgacacaactgtgttcactagcaacctcaaacagacaccatggtgcatctgtactcccaggagaagtctgccgttactgccctgtggggcaaggtgaacgtggatgaagttggtggtgaggccctgggcaggctgctggtggtctacccttggacctactccccgactcggaccgatg

SEQ ID NO: 15250 - DNA, 203 bp, synthetic construct
  source 1..203: mol_type = other DNA
ggcgcgccagtcctggatccaagactgacacaactgtgttcactagcaacctcaaacagacaccatggtgcattaagccgcaggctccactcctggtggtgcccttccgtcaattcctttaagtttcagctttgcaaccatactccccccggaacccctgctggtggtctacccttggacccagaggtcgactcggaccgatg

SEQ ID NO: 15251 - DNA, 203 bp, synthetic construct
  source 1..203: mol_type = other DNA
ggcgcgccagtcctatacccgagcctgacacaactgtgttcactagcaacctcaaacagacaccatggtgcgcccttccgtcaattcctttaagtttcagctttgcaaccatactccccccggaacccaaagactttggtttcccggaagctgcccgctgctggtggtctacccttggacccagaggtcgactcggaccgatg

SEQ ID NO: 15252 - DNA, 203 bp, synthetic construct
  source 1..203: mol_type = other DNA
ggcgcgccagtccttcacgcttcgctgacacaactgtgttcactagcaacctcaaacagacaccatggtgtgcccttccgtcaattcctttaagtttcagctttgcaaccatactccccccggaacccaaagactttggtttcccggaagctgcccggcgctggtggtctacccttggacccagaggtcgactcggaccgatg

SEQ ID NO: 15253 - DNA, 203 bp, synthetic construct
  source 1..203: mol_type = other DNA
ggcgcgccagtcctatcacgcttgctgacacaactgtgttcactagcaacctcaaacagacaccatggtgttcttggcaaatgaggagaagtctgccgttactgccctgtggggcaaggtgaacgtggatgaagttggtggtgaggccctgggcaggctgctggtggtctacccttggaccggcgggtcgactcggaccgatg

SEQ ID NO: 15254 - DNA, 203 bp, synthetic construct
  source 1..203: mol_type = other DNA
ggcgcgccagtcctccgaggttcgctgacacaactgtgttcactagcaacctcaaacagacaccatggttcttggcaaacctgaggagaagtctgccgttactgccctgtggggcaaggtgaacgtggatgaagttggtggtgaggccctgggcaggctgctggtggtctacccttgttcttggcaaacgactcggaccgatg

SEQ ID NO: 15255 - DNA, 203 bp, synthetic construct
  source 1..203: mol_type = other DNA
ggcgcgccagtccttgtagaacacctgacacaactgtgttcactagcaacctcaaacagacaccatggttcttggcaaacctgaggagaagtctgccgttactgccctgtggggcaaggtgaacgtggatgaagttggtgttcttggcaaaggcaggcttcttggcaaatacccttggacccagaggtcgactcggaccgatg

SEQ ID NO: 15256 - DNA, 203 bp, synthetic construct
  source 1..203: mol_type = other DNA
ggcgcgccagtcctcagagatcacctgacacaactgtgttcactagcaacctcaaacagacaccatggttcttggcaaacctgaggagaagtctgccgttactgccctgtggggcaaggtgattcttggcaaagttggtggtgaggccctgggcaggctgctggtggtctacccttggacccagaggtcgactcggaccgatg

SEQ ID NO: 15257 - DNA, 203 bp, synthetic construct
  source 1..203: mol_type = other DNA
ggcgcgccagtcctgaaatgctcgctgacacaactgtgttcactagcaacctcaaacagacaccatggttcttggcaaacctgaggagaagtctgccgttactgccctgtggggcaaggtgattcttggcaaagttggtggtgaggccctgggcaggcttcttggcaaatacccttggacccagaggtcgactcggaccgatg

SEQ ID NO: 15258 - DNA, 203 bp, synthetic construct
  source 1..203: mol_type = other DNA
ggcgcgccagtcctacgaaatgctctgacacaactgtgttcactagcaacctcaaacagacaccatggttcttggcaaacctgaggagaagtctgccgttactgccctgtggggcaaggtgattcttggcaaagttggtgttcttggcaaaggcaggctgctggtggtctacccttggacccagaggtcgactcggaccgatg

SEQ ID NO: 15259 - DNA, 203 bp, synthetic construct
  source 1..203: mol_type = other DNA
ggcgcgccagtcctacagcccagcctgacacaactgtgttcactagcaacctcaaacagacaccatggttcttggcaaacctgaggagaagtctgccgttactgttcttggcaaaaaggtgattcttggcaaagttggtggtgaggccctgggcaggctgctggtggtctacccttggacccagaggtcgactcggaccgatg

SEQ ID NO: 15260 - DNA, 203 bp, synthetic construct
  source 1..203: mol_type = other DNA
ggcgcgccagtcctcacctaccctctgacacaactgtgttcactagcaacctcaaacagacaccatggttcttggcaaacctgaggagaagtctgccgttactgttcttggcaaaaaggtgattcttggcaaagttggtgttcttggcaaaggcaggcttcttggcaaatacccttggacccagaggtcgactcggaccgatg

SEQ ID NO: 15261 - DNA, 203 bp, synthetic construct
  source 1..203: mol_type = other DNA
ggcgcgccagtcctcaaccctgcactgacacaactgtgttcactagcaacctcaaacagacaccatggttcttggcaaacctgaggttcttggcaaagttactgccctgtggggcaaggtgattcttggcaaagttggtggtgaggccctgggcaggctgctggtggtctacccttggacccagaggtcgactcggaccgatg

SEQ ID NO: 15262 - DNA, 203 bp, synthetic construct
  source 1..203: mol_type = other DNA
ggcgcgccagtcctagggtgctgcctgacacaactgtgttcactagcaacctcaaacagacaccatggttcttggcaaacctgaggttcttggcaaagttactgttcttggcaaaaaggtgaacgtggatgaagttggtggtgaggccctgggcaggctgctggtggtctacccttggacccagaggtcgactcggaccgatg

SEQ ID NO: 15263 - DNA, 203 bp, synthetic construct
  source 1..203: mol_type = other DNA
ggcgcgccagtcctaactttagggctgacacaactgtgttcactagcaacctcaaacagacaccatggttcttggcaaacctgaggttcttggcaaagttactgttcttggcaaaaaggtgaacgtggatgaagttggtggtgaggccctgggcaggcttcttggcaaatacccttggacccagaggtcgactcggaccgatg

SEQ ID NO: 15264 - DNA, 203 bp, synthetic construct
  source 1..203: mol_type = other DNA
ggcgcgccagtcctccctaagttactgacacaactgtgttcactagcaacctcaaacagacaccatggttcttggcaaacctgaggttcttggcaaagttactgttcttggcaaaaaggtgattcttggcaaagttggtggtgaggccctgggcaggcttcttggcaaatacccttggacccagaggtcgactcggaccgatg

SEQ ID NO: 15265 - DNA, 203 bp, synthetic construct
  source 1..203: mol_type = other DNA
ggcgcgccagtccttgtctgagggctgacacaactgtgttcactagcaacctcaaacagacaccatgtactccccccggaacccaaagactttggtttcccggaagctgcccggcgggtcatgggaataacgccgccgcatcgccggtcggcatcgtttattggtggtctacccttggacccagaggtcgactcggaccgatg

SEQ ID NO: 15266 - DNA, 203 bp, synthetic construct
  source 1..203: mol_type = other DNA
ggcgcgccagtcctttgcgtagggctgacacaactgtgttcactagcaacctcaaacagacaccatgtactccctgactcctgaggagaagtctgccgttactgccctgtggggcaaggtgaacgtggatgaagttggtggtgaggccctgggcaggctgctggtggtctacccttggaccggcgggtcgactcggaccgatg

SEQ ID NO: 15267 - DNA, 203 bp, synthetic construct
  source 1..203: mol_type = other DNA
ggcgcgccagtcctaagggtatctctgacacaactgtgttcactagcaacctcaaacagacaccatgtcaaattaagccgcaggctccactcctggtggtgcccttccgtcaattcctttaagtttcagctttgcaaccatactccccccggaacccaaagaggtggtctacccttggacccagaggtcgactcggaccgatg

SEQ ID NO: 15268 - DNA, 203 bp, synthetic construct
  source 1..203: mol_type = other DNA
ggcgcgccagtcctagagggtcatctgacacaactgtgttcactagcaacctcaaacagacaccatgtcaaattaagccgcaggctccactcctggtggtgcccttccgtcaattcctttaagtttcagctttgcaaccatactccccccggaacccaaagtggtggtctacccttggacccagaggtcgactcggaccgatg

SEQ ID NO: 15269 - DNA, 203 bp, synthetic construct
  source 1..203: mol_type = other DNA
ggcgcgccagtcctgcagagggttctgacacaactgtgttcactagcaacctcaaacagacaccatgtggtgcccttccgtcaattcctttaagtttcagctttgcaaccatactccccccggaacccaaagactttggtttcccggaagctgcccggcgggggtggtctacccttggacccagaggtcgactcggaccgatg

SEQ ID NO: 15270 - DNA, 203 bp, synthetic construct
  source 1..203: mol_type = other DNA
ggcgcgccagtcctccgagggtgcctgacacaactgtgttcactagcaacctcaaacagacacgtcaattcctttaactcctgaggagaagtctgccgttactgccctgtggggcaaggtgaacgtggatgaagttggtggtgaggccctgggcaggctgctggtggtctaccccacggaatcgagaacgactcggaccgatg

SEQ ID NO: 15271 - DNA, 203 bp, synthetic construct
  source 1..203: mol_type = other DNA
ggcgcgccagtcctcagtcccttcctgacacaactgtgttcactagcaacctcaaacagacacgtcaattcctttaactcctgaggagaagtctgccgttactgccctgtggggcaaggtgaacgtggatgaagttggtggtgaggccctgggcaggctgctggtggtctaccccgtcaattcctttacgactcggaccgatg

SEQ ID NO: 15272 - DNA, 203 bp, synthetic construct
  source 1..203: mol_type = other DNA
ggcgcgccagtccttagggttgtactgacacaactgtgttcactagcaacctcaaacagacacttcttggcaaatgactcctgaggagaagtctgccgttactgccctgtggggcaaggtgaacgtggatgaagttggtggtgaggccctgggcaggctgctggtggtctacccttggaccggcgggtcgactcggaccgatg

SEQ ID NO: 15273 - DNA, 203 bp, synthetic construct
  source 1..203: mol_type = other DNA
ggcgcgccagtcctggtcccttggctgacacaactgtgttcactagcaacctcaaacagacatactcccgcatctgactcctgaggagaagtctgccgttactgccctgtggggcaaggtgaacgtggatgaagttggtggtgaggccctgggcaggctgctggtggtctaccccacggaatcgagaacgactcggaccgatg

SEQ ID NO: 15274 - DNA, 203 bp, synthetic construct
  source 1..203: mol_type = other DNA
ggcgcgccagtccttagggactgactgacacaactgtgttcactagcaacctcaaacagacatactcccgcatctgactcctgaggagaagtctgccgttactgccctgtggggcaaggtgaacgtggatgaagttggtggtgaggccctgggcaggctgctggtggtctacccttggacccagaggtcgactcggaccgatg

SEQ ID NO: 15275 - DNA, 203 bp, synthetic construct
  source 1..203: mol_type = other DNA
ggcgcgccagtcctggtctaccctctgacacaactgtgttcactagcaacctcaaacagaccaaccatactccccccggaacccaaagactttggtttcccggaagctgcccggcgggtcatgggaataacgccgccgcatcgccggtcggcatcgtttatggtcggtctacccttggacccagaggtcgactcggaccgatg

SEQ ID NO: 15276 - DNA, 203 bp, synthetic construct
  source 1..203: mol_type = other DNA
ggcgcgccagtccttgctagagggctgacacaactgtgttcactagcaacctcaaacagaccggcgggtgcatctgactcctgaggagaagtctgccgttactgccctgtggggcaaggtgaacgtggatgaagttggtggtgaggccctgggcaggctgctggtggtctaccccgtcaattcctttacgactcggaccgatg

SEQ ID NO: 15277 - DNA, 203 bp, synthetic construct
  source 1..203: mol_type = other DNA
ggcgcgccagtcctccctcgcacactgacacaactgtgttcactagcaacctcaaacagaccggcgggtgcatctgactcctgaggagaagtctgccgttactgccctgtggggcaaggtgaacgtggatgaagttggtggtgaggccctgggcaggctgctggtggtctacccttggacccagaggtcgactcggaccgatg

SEQ ID NO: 15278 - DNA, 203 bp, synthetic construct
  source 1..203: mol_type = other DNA
ggcgcgccagtcctctaccgagggctgacacaactgtgttcactagcaacctcaaacagaccggcgggtgcatctgactcctgaggagaagtctgccgttactgccctgtggggcaaggtgaacgtggatgaagttggtggtgaggccctgggcaggctgctggtggtctacccttggacctactccccgactcggaccgatg

SEQ ID NO: 15279 - DNA, 203 bp, synthetic construct
  source 1..203: mol_type = other DNA
ggcgcgccagtcctcccttaaagactgacacaactgtgttcactagcaacctcaaacagacgtcaattcctttatgactcctgaggagaagtctgccgttactgccctgtggggcaaggtgaacgtggatgaagttggtggtgaggccctgggcaggctgctggtggtctacccttggaccggcgggtcgactcggaccgatg

SEQ ID NO: 15280 - DNA, 203 bp, synthetic construct
  source 1..203: mol_type = other DNA
ggcgcgccagtcctccctagtaagctgacacaactgtgttcactagcaacctcaaacagacgttgagtcaaattaagccgcaggctccactcctggtggtgcccttccgtcaattcctttaagtttcagctttgcaaccatactccccccggaacccaaagactttgtctacccttggacccagaggtcgactcggaccgatg

SEQ ID NO: 15281 - DNA, 203 bp, synthetic construct
  source 1..203: mol_type = other DNA
ggcgcgccagtcctcagggtgcttctgacacaactgtgttcactagcaacctcaaacagagcaaccatactccccccggaacccaaagactttggtttcccggaagctgcccggcgggtcatgggaataacgccgccgcatcgccggtcggcatcgtttatggtcggactacccttggacccagaggtcgactcggaccgatg

SEQ ID NO: 15282 - DNA, 203 bp, synthetic construct
  source 1..203: mol_type = other DNA
ggcgcgccagtcctacgtagggatctgacacaactgtgttcactagcaacctcaaacaggcgaccaaaggaaccataactgatttaatgagccattcgcagtttcactgtaccggccgtgcgtactcagacatgcatggcttaatctttgagacaagcatatgctactgtacccttggacccagaggtcgactcggaccgatg

SEQ ID NO: 15283 - DNA, 203 bp, synthetic construct
  source 1..203: mol_type = other DNA
ggcgcgccagtcctgagaaaccctctgacacaactgtgttcactagcaacctcaaacattcttggcaaagcatctgactcctgaggagaagtctgccgttactgccctgtggggcaaggtgaacgtggatgaagttggtggtgaggccctgggcaggctgctggtggtctaccccgtcaattcctttacgactcggaccgatg

SEQ ID NO: 15284 - DNA, 203 bp, synthetic construct
  source 1..203: mol_type = other DNA
ggcgcgccagtcctccctgttaggctgacacaactgtgttcactagcaacctcaaacattcttggcaaagcatctgactcctgaggagaagtctgccgttactgccctgtggggcaaggtgaacgtggatgaagttggtggtgaggccctgggcaggctgctggtggtctacccttggacccagaggtcgactcggaccgatg

SEQ ID NO: 15285 - DNA, 203 bp, synthetic construct
  source 1..203: mol_type = other DNA
ggcgcgccagtcctagggacagtcctgacacaactgtgttcactagcaacctcaaacattcttggcaaagcatctgactcctgaggagaagtctgccgttactgccctgtggggcaaggtgaacgtggatgaagttggtggtgaggccctgggcaggctgctggtggtctacccttggacctactccccgactcggaccgatg

SEQ ID NO: 15286 - DNA, 203 bp, synthetic construct
  source 1..203: mol_type = other DNA
ggcgcgccagtccttccctactgactgacacaactgtgttcactagcaacctcaaacccgtgttgagtcaaattaagccgcaggctccactcctggtggtgcccttccgtcaattcctttaagtttcagctttgcaaccatactccccccggaacccaaagactttggtttcccttggacccagaggtcgactcggaccgatg

SEQ ID NO: 15287 - DNA, 203 bp, synthetic construct
  source 1..203: mol_type = other DNA
ggcgcgccagtcctccctacgcatctgacacaactgtgttcactagcaacctcaaacgagcgaccaaaggaaccataactgatttaatgagccattcgcagtttcactgtaccggccgtgcgtactcagacatgcatggcttaatctttgagacaagcatatgctactggccccttggacccagaggtcgactcggaccgatg

SEQ ID NO: 15288 - DNA, 203 bp, synthetic construct
  source 1..203: mol_type = other DNA
ggcgcgccagtcctccctactacactgacacaactgtgttcactagcaacctcaaacggtatctgatcgtcttcgaacctccgactttcgttcttgattaatgaaaacattcttggcaaatgctttcgctctggtccgtcttgcgccggtccaagaatttcacctctagcgcccttggacccagaggtcgactcggaccgatg

SEQ ID NO: 15289 - DNA, 203 bp, synthetic construct
  source 1..203: mol_type = other DNA
ggcgcgccagtcctaagggtagagctgacacaactgtgttcactagcaacctcaacacggaatcgagaagcatctgactcctgaggagaagtctgccgttactgccctgtggggcaaggtgaacgtggatgaagttggtggtgaggccctgggcaggctgctggtggtctaccccacggaatcgagaacgactcggaccgatg

SEQ ID NO: 15290 - DNA, 203 bp, synthetic construct
  source 1..203: mol_type = other DNA
ggcgcgccagtcctccctcttgtactgacacaactgtgttcactagcaacctcaacgtcaattcctttagcatctgactcctgaggagaagtctgccgttactgccctgtggggcaaggtgaacgtggatgaagttggtggtgaggccctgggcaggctgctggtggtctacccttggacctactccccgactcggaccgatg

SEQ ID NO: 15291 - DNA, 203 bp, synthetic construct
  source 1..203: mol_type = other DNA
ggcgcgccagtcctgtccctagtactgacacaactgtgttcactagcaacctcaagcgagcgaccaaaggaaccataactgatttaatgagccattcgcagtttcactgtaccggccgtgcgtactcagacatgcatggcttaatctttgagacaagcatatgctactggcagcttggacccagaggtcgactcggaccgatg

SEQ ID NO: 15292 - DNA, 203 bp, synthetic construct
  source 1..203: mol_type = other DNA
ggcgcgccagtcctcccttgttctctgacacaactgtgttcactagcaacctcaagctttgcaaccatactccccccggaacccaaagactttggtttcccggaagctgcccggcgggtcatgggaataacgccgccgcatcgccggtcggcatcgtttatggtcggaactaccttggacccagaggtcgactcggaccgatg

SEQ ID NO: 15293 - DNA, 203 bp, synthetic construct
  source 1..203: mol_type = other DNA
ggcgcgccagtcctatgtcccttgctgacacaactgtgttcactagcaacctcaatactcccccatggtgcatctgactcctgaggagaagtctgccgttactgccctgtggggcaaggtgaacgtggatgaagttggtggtgaggccctgggcaggctgctggtggtctacccttggacctactccccgactcggaccgatg

SEQ ID NO: 15294 - DNA, 203 bp, synthetic construct
  source 1..203: mol_type = other DNA
ggcgcgccagtcctgtggtaccctctgacacaactgtgttcactagcaacctcaatcccgtgttgagtcaaattaagccgcaggctccactcctggtggtgcccttccgtcaattcctttaagtttcagctttgcaaccatactccccccggaacccaaagactttggtttcccttggacccagaggtcgactcggaccgatg

SEQ ID NO: 15295 - DNA, 203 bp, synthetic construct
  source 1..203: mol_type = other DNA
ggcgcgccagtcctaccgaagggtctgacacaactgtgttcactagcaacctcaccggccgtccatggtgcatctgactcctgaggagaagtctgccgttactgccctgtggggcaaggtgaacgtggatgaagttggtggtgaggccctgggcaggctgctggtggtctaccccgtcaattcctttacgactcggaccgatg

SEQ ID NO: 15296 - DNA, 203 bp, synthetic construct
  source 1..203: mol_type = other DNA
ggcgcgccagtcctcaccctctctctgacacaactgtgttcactagcaacctcaccggccgtccatggtgcatctgactcctgaggagaagtctgccgttactgccctgtggggcaaggtgaacgtggatgaagttggtggtgaggccctgggcaggctgctggtggtctacccttggacctactccccgactcggaccgatg

SEQ ID NO: 15297 - DNA, 203 bp, synthetic construct
  source 1..203: mol_type = other DNA
ggcgcgccagtccttaaaccctgcctgacacaactgtgttcactagcaacctcagacggtatctgatcgtcttcgaacctccgactttcgttcttgattaatgaaaacattcttggcaaatgctttcgctctggtccgtcttgcgccggtccaagaatttcacctctagcggcgttggacccagaggtcgactcggaccgatg

SEQ ID NO: 15298 - DNA, 203 bp, synthetic construct
  source 1..203: mol_type = other DNA
ggcgcgccagtcctcagggtttgactgacacaactgtgttcactagcaacctcattcttggcaaatggtgcatctgactcctgaggagaagtctgccgttactgccctgtggggcaaggtgaacgtggatgaagttggtggtgaggccctgggcaggctgctggtggtctacccttgttcttggcaaacgactcggaccgatg

SEQ ID NO: 15299 - DNA, 203 bp, synthetic construct
  source 1..203: mol_type = other DNA
ggcgcgccagtcctacgtgtcgccctgacacaactgtgttcactagcaacctcccggcgggtccatggtgcatctgactcctgaggagaagtctgccgttactgccctgtggggcaaggtgaacgtggatgaagttggtggtgaggccctgggcaggctgctggtggtctacccttggacccagaggtcgactcggaccgatg

SEQ ID NO: 15300 - DNA, 203 bp, synthetic construct
  source 1..203: mol_type = other DNA
ggcgcgccagtcctgcgtgtcccactgacacaactgtgttcactagcaacctcccggcgggtccatggtgcatctgactcctgaggagaagtctgccgttactgccctgtggggcaaggtgaacgtggatgaagttggtggtgaggccctgggcaggctgctggtggtctacccttggacctactccccgactcggaccgatg

SEQ ID NO: 15301 - DNA, 203 bp, synthetic construct
  source 1..203: mol_type = other DNA
ggcgcgccagtcctgacacggtttctgacacaactgtgttcactagcaacctcggaattaaccagacaaatcgctccaccaactaagaacggccatgcaccaccacccacggaatcgagaaagagctatcaatctgtcaatcctgtccgtgtccgggccgggtgaggtttcccgtgggacccagaggtcgactcggaccgatg

SEQ ID NO: 15302 - DNA, 203 bp, synthetic construct
  source 1..203: mol_type = other DNA
ggcgcgccagtcctgcgctaccacctgacacaactgtgttcactagcaacctctttcccgtgttgagtcaaattaagccgcaggctccactcctggtggtgcccttccgtcaattcctttaagtttcagctttgcaaccatactccccccggaacccaaagactttggtttcccgtggacccagaggtcgactcggaccgatg

SEQ ID NO: 15303 - DNA, 203 bp, synthetic construct
  source 1..203: mol_type = other DNA
ggcgcgccagtccttgcgtagcgcctgacacaactgtgttcactagcaacctggagcgagcgaccaaaggaaccataactgatttaatgagccattcgcagtttcactgtaccggccgtgcgtactcagacatgcatggcttaatctttgagacaagcatatgctactggcaggatggacccagaggtcgactcggaccgatg

SEQ ID NO: 15304 - DNA, 203 bp, synthetic construct
  source 1..203: mol_type = other DNA
ggcgcgccagtccttgtagcgcttctgacacaactgtgttcactagcaacctgtttcccgtgttgagtcaaattaagccgcaggctccactcctggtggtgcccttccgtcaattcctttaagtttcagctttgcaaccatactccccccggaacccaaagactttggtttcccggggacccagaggtcgactcggaccgatg

SEQ ID NO: 15305 - DNA, 203 bp, synthetic construct
  source 1..203: mol_type = other DNA
ggcgcgccagtccttctgcatgaactgacacaactgtgttcactagcaaccttcttggcaaaccatggtgcatctgactcctgaggagaagtctgccgttactgccctgtggggcaaggtgaacgtggatgaagttggtggtgaggccctgggcaggctgctggtggtctaccccacggaatcgagaacgactcggaccgatg

SEQ ID NO: 15306 - DNA, 203 bp, synthetic construct
  source 1..203: mol_type = other DNA
ggcgcgccagtcctattgtagttactgacacaactgtgttcactagcaaccttcttggcaaaccatggtgcatctgactcctgaggagaagtctgccgttactgccctgtggggcaaggtgaacgtggatgaagttggtggtgaggccctgggcaggctgctggtggtctacccttggacctactccccgactcggaccgatg

SEQ ID NO: 15307 - DNA, 203 bp, synthetic construct
  source 1..203: mol_type = other DNA
ggcgcgccagtcctattgtcgtgcctgacacaactgtgttcactagcaacgaggagcgagcgaccaaaggaaccataactgatttaatgagccattcgcagtttcactgtaccggccgtgcgtactcagacatgcatggcttaatctttgagacaagcatatgctactggcaggatcaacccagaggtcgactcggaccgatg

SEQ ID NO: 15308 - DNA, 203 bp, synthetic construct
  source 1..203: mol_type = other DNA
ggcgcgccagtcctggtcctaaccctgacacaactgtgttcactagcaactactcccagacaccatggtactcccgactcctgaggagaagtctgccgttactgccctgtggggcaaggtgaacgtggatgaagttggtgtactccccctgggcaggctactcccggtctaccctttactcccgaggtcgactcggaccgatg

SEQ ID NO: 15309 - DNA, 203 bp, synthetic construct
  source 1..203: mol_type = other DNA
ggcgcgccagtcctcgagatcgaactgacacaactgtgttcactagcaactactcccagacaccatggtactcccgactcctgaggagaagtctgccgttactgccctgtggggcaaggtgatactccctgaagttggtggtgaggccctgggcaggctactcccggtctacccttggacccagaggtcgactcggaccgatg

SEQ ID NO: 15310 - DNA, 203 bp, synthetic construct
  source 1..203: mol_type = other DNA
ggcgcgccagtcctgacgatctcgctgacacaactgtgttcactagcaactactcccagacaccatggtactcccgactcctgaggagaagtctgccgttactgccctgtggggcaaggtgatactccctgaagttggtggtgaggccctgggcaggctactcccggtctaccctttactcccgaggtcgactcggaccgatg

SEQ ID NO: 15311 - DNA, 203 bp, synthetic construct
  source 1..203: mol_type = other DNA
ggcgcgccagtcctgcaacgcaatctgacacaactgtgttcactagcaactactcccagacaccatggtactcccgactcctgaggagaagtctgccgttactgccctgtggggcaaggtgatactccctgaagttggtggtgaggccctgggcaggctgctggtggtctacccttggacccagaggtcgactcggaccgatg

SEQ ID NO: 15312 - DNA, 203 bp, synthetic construct
  source 1..203: mol_type = other DNA
ggcgcgccagtccttagattgcgtctgacacaactgtgttcactagcaactactcccagacaccatggtactcccgactcctgaggagaagtctgccgttactgtactcccgggcaaggtgaacgtggatgaagttggtggtgaggccctgggcaggctactcccggtctaccctttactcccgaggtcgactcggaccgatg

SEQ ID NO: 15313 - DNA, 203 bp, synthetic construct
  source 1..203: mol_type = other DNA
ggcgcgccagtcctgatcgggtaactgacacaactgtgttcactagcaactactcccagacaccatggtactcccgactcctgaggagaagtctgccgttactgtactcccgggcaaggtgaacgtggatgaagttggtgtactccccctgggcaggctactcccggtctaccctttactcccgaggtcgactcggaccgatg

SEQ ID NO: 15314 - DNA, 203 bp, synthetic construct
  source 1..203: mol_type = other DNA
ggcgcgccagtcctgcgcattgtgctgacacaactgtgttcactagcaactactcccagacaccatggtactcccgactcctgaggagaagtctgccgttactgtactcccgggcaaggtgatactccctgaagttggtggtgaggccctgggcaggctgctggtggtctacccttggacccagaggtcgactcggaccgatg

SEQ ID NO: 15315 - DNA, 203 bp, synthetic construct
  source 1..203: mol_type = other DNA
ggcgcgccagtcctctgaatgcgcctgacacaactgtgttcactagcaactactcccagacaccatggtactcccgactcctgaggagaagtctgccgttactgtactcccgggcaaggtgatactccctgaagttggtggtgaggccctgggcaggctgctggtggtctaccctttactcccgaggtcgactcggaccgatg

SEQ ID NO: 15316 - DNA, 203 bp, synthetic construct
  source 1..203: mol_type = other DNA
ggcgcgccagtcctacgtcaatcactgacacaactgtgttcactagcaactactcccagacaccatggtactcccgactcctgaggagaagtctgccgttactgtactcccgggcaaggtgatactccctgaagttggtgtactccccctgggcaggctgctggtggtctacccttggacccagaggtcgactcggaccgatg

SEQ ID NO: 15317 - DNA, 203 bp, synthetic construct
  source 1..203: mol_type = other DNA
ggcgcgccagtcctaatgattgacctgacacaactgtgttcactagcaactactcccagacaccatggtactcccgactcctgaggagaagtctgccgttactgtactcccgggcaaggtgatactccctgaagttggtgtactccccctgggcaggctgctggtggtctaccctttactcccgaggtcgactcggaccgatg

SEQ ID NO: 15318 - DNA, 203 bp, synthetic construct
  source 1..203: mol_type = other DNA
ggcgcgccagtccttctagctggactgacacaactgtgttcactagcaactactcccagacaccatggtactcccgactcctgaggtactccctgccgttactgccctgtggggcaaggtgaacgtggatgaagttggtgtactccccctgggcaggctgctggtggtctacccttggacccagaggtcgactcggaccgatg

SEQ ID NO: 15319 - DNA, 203 bp, synthetic construct
  source 1..203: mol_type = other DNA
ggcgcgccagtcctcagtagctggctgacacaactgtgttcactagcaactactcccagacaccatggtactcccgactcctgaggtactccctgccgttactgccctgtggggcaaggtgaacgtggatgaagttggtgtactccccctgggcaggctgctggtggtctaccctttactcccgaggtcgactcggaccgatg

SEQ ID NO: 15320 - DNA, 203 bp, synthetic construct
  source 1..203: mol_type = other DNA
ggcgcgccagtcctgtaagctggactgacacaactgtgttcactagcaactactcccagacaccatggtactcccgactcctgaggtactccctgccgttactgccctgtggggcaaggtgatactccctgaagttggtggtgaggccctgggcaggctactcccggtctaccctttactcccgaggtcgactcggaccgatg

SEQ ID NO: 15321 - DNA, 203 bp, synthetic construct
  source 1..203: mol_type = other DNA
ggcgcgccagtccttcagagctggctgacacaactgtgttcactagcaactactcccagacaccatggtactcccgactcctgaggtactccctgccgttactgccctgtggggcaaggtgatactccctgaagttggtggtgaggccctgggcaggctgctggtggtctaccctttactcccgaggtcgactcggaccgatg

SEQ ID NO: 15322 - DNA, 203 bp, synthetic construct
  source 1..203: mol_type = other DNA
ggcgcgccagtcctctcgacgtcactgacacaactgtgttcactagcaactactcccagacaccatggtactcccgactcctgaggtactccctgccgttactgccctgtggggcaaggtgatactccctgaagttggtgtactccccctgggcaggctgctggtggtctacccttggacccagaggtcgactcggaccgatg

SEQ ID NO: 15323 - DNA, 203 bp, synthetic construct
  source 1..203: mol_type = other DNA
ggcgcgccagtcctgcccggtaacctgacacaactgtgttcactagcaactactcccagacaccatggtactcccgactcctgaggtactccctgccgttactgccctgtggggcaaggtgatactccctgaagttggtgtactccccctgggcaggctgctggtggtctaccctttactcccgaggtcgactcggaccgatg

SEQ ID NO: 15324 - DNA, 203 bp, synthetic construct
  source 1..203: mol_type = other DNA
ggcgcgccagtcctcgcccgagatctgacacaactgtgttcactagcaactactcccagacaccatggtactcccgactcctgaggtactccctgccgttactgtactcccgggcaaggtgaacgtggatgaagttggtggtgaggccctgggcaggctactcccggtctacccttggacccagaggtcgactcggaccgatg

SEQ ID NO: 15325 - DNA, 203 bp, synthetic construct
  source 1..203: mol_type = other DNA
ggcgcgccagtccttgcccgttcactgacacaactgtgttcactagcaactactcccagacaccatggtactcccgactcctgaggtactccctgccgttactgtactcccgggcaaggtgaacgtggatgaagttggtggtgaggccctgggcaggctactcccggtctaccctttactcccgaggtcgactcggaccgatg

SEQ ID NO: 15326 - DNA, 203 bp, synthetic construct
  source 1..203: mol_type = other DNA
ggcgcgccagtcctagcccgatccctgacacaactgtgttcactagcaactactcccagacaccatggtactcccgactcctgaggtactccctgccgttactgtactcccgggcaaggtgaacgtggatgaagttggtggtgaggccctgggcaggctgctggtggtctacccttggacccagaggtcgactcggaccgatg

SEQ ID NO: 15327 - DNA, 203 bp, synthetic construct
  source 1..203: mol_type = other DNA
ggcgcgccagtcctcagcccgtgcctgacacaactgtgttcactagcaactactcccagacaccatggtactcccgactcctgaggtactccctgccgttactgtactcccgggcaaggtgaacgtggatgaagttggtggtgaggccctgggcaggctgctggtggtctaccctttactcccgaggtcgactcggaccgatg

SEQ ID NO: 15328 - DNA, 203 bp, synthetic construct
  source 1..203: mol_type = other DNA
ggcgcgccagtcctgagcccgatcctgacacaactgtgttcactagcaactactcccagacaccatggtactcccgactcctgaggtactccctgccgttactgtactcccgggcaaggtgaacgtggatgaagttggtgtactccccctgggcaggctactcccggtctacccttggacccagaggtcgactcggaccgatg

SEQ ID NO: 15329 - DNA, 203 bp, synthetic construct
  source 1..203: mol_type = other DNA
ggcgcgccagtcctttagcccgatctgacacaactgtgttcactagcaactactcccagacaccatggtactcccgactcctgaggtactccctgccgttactgtactcccgggcaaggtgatactccctgaagttggtggtgaggccctgggcaggctgctggtggtctaccctttactcccgaggtcgactcggaccgatg

SEQ ID NO: 15330 - DNA, 203 bp, synthetic construct
  source 1..203: mol_type = other DNA
ggcgcgccagtccttaggcccgaactgacacaactgtgttcactagcaactactcccagacaccatggtactcccgactcctgaggtactccctgccgttactgtactcccgggcaaggtgatactccctgaagttggtgtactccccctgggcaggctactcccggtctacccttggacccagaggtcgactcggaccgatg

SEQ ID NO: 15331 - DNA, 203 bp, synthetic construct
  source 1..203: mol_type = other DNA
ggcgcgccagtcctacgcccgtttctgacacaactgtgttcactagcaactactcccagacaccatggtactcccgactcctgaggtactccctgccgttactgtactcccgggcaaggtgatactccctgaagttggtgtactccccctgggcaggctactcccggtctaccctttactcccgaggtcgactcggaccgatg

SEQ ID NO: 15332 - DNA, 203 bp, synthetic construct
  source 1..203: mol_type = other DNA
ggcgcgccagtcctgcccgtcgctctgacacaactgtgttcactagcaactactcccagacaccatggtgcatctgactcctgaggagaagtctgccgttactgccctgtggggcaaggtgaacgtggatgaagttggtggtgaggccctgggcaggctactcccggtctaccctttactcccgaggtcgactcggaccgatg

SEQ ID NO: 15333 - DNA, 203 bp, synthetic construct
  source 1..203: mol_type = other DNA
ggcgcgccagtcctgcccgacctgctgacacaactgtgttcactagcaactactcccagacaccatggtgcatctgactcctgaggagaagtctgccgttactgccctgtggggcaaggtgaacgtggatgaagttggtggtgaggccctgggcaggctgctggtggtctacccttggacccagaggtcgactcggaccgatg

SEQ ID NO: 15334 - DNA, 203 bp, synthetic construct
  source 1..203: mol_type = other DNA
ggcgcgccagtcctgcccgtacacctgacacaactgtgttcactagcaactactcccagacaccatggtgcatctgactcctgaggagaagtctgccgttactgccctgtggggcaaggtgaacgtggatgaagttggtggtgaggccctgggcaggctgctggtggtctaccctttactcccgaggtcgactcggaccgatg

SEQ ID NO: 15335 - DNA, 203 bp, synthetic construct
  source 1..203: mol_type = other DNA
ggcgcgccagtccttactcgggcgctgacacaactgtgttcactagcaactactcccagacaccatggtgcatctgactcctgaggagaagtctgccgttactgccctgtggggcaaggtgaacgtggatgaagttggtgtactccccctgggcaggctactcccggtctaccctttactcccgaggtcgactcggaccgatg

SEQ ID NO: 15336 - DNA, 203 bp, synthetic construct
  source 1..203: mol_type = other DNA
ggcgcgccagtccttggtcgggctctgacacaactgtgttcactagcaactactcccagacaccatggtgcatctgactcctgaggagaagtctgccgttactgccctgtggggcaaggtgatactccctgaagttggtggtgaggccctgggcaggctgctggtggtctacccttggacccagaggtcgactcggaccgatg

SEQ ID NO: 15337 - DNA, 203 bp, synthetic construct
  source 1..203: mol_type = other DNA
ggcgcgccagtcctaggacgggccctgacacaactgtgttcactagcaactactcccagacaccatggtgcatctgactcctgaggagaagtctgccgttactgccctgtggggcaaggtgatactccctgaagttggtggtgaggccctgggcaggctgctggtggtctaccctttactcccgaggtcgactcggaccgatg

SEQ ID NO: 15338 - DNA, 203 bp, synthetic construct
  source 1..203: mol_type = other DNA
ggcgcgccagtcctacgggcaaccctgacacaactgtgttcactagcaactactcccagacaccatggtgcatctgactcctgaggagaagtctgccgttactgccctgtggggcaaggtgatactccctgaagttggtgtactccccctgggcaggctactcccggtctaccctttactcccgaggtcgactcggaccgatg

SEQ ID NO: 15339 - DNA, 203 bp, synthetic construct
  source 1..203: mol_type = other DNA
ggcgcgccagtcctggacacgggcctgacacaactgtgttcactagcaactactcccagacaccatggtgcatctgactcctgaggagaagtctgccgttactgccctgtggggcaaggtgatactccctgaagttggtgtactccccctgggcaggctgctggtggtctacccttggacccagaggtcgactcggaccgatg

SEQ ID NO: 15340 - DNA, 203 bp, synthetic construct
  source 1..203: mol_type = other DNA
ggcgcgccagtcctacgggcgtatctgacacaactgtgttcactagcaactactcccagacaccatggtgcatctgactcctgaggagaagtctgccgttactgtactcccgggcaaggtgaacgtggatgaagttggtggtgaggccctgggcaggctgctggtggtctaccctttactcccgaggtcgactcggaccgatg

SEQ ID NO: 15341 - DNA, 203 bp, synthetic construct
  source 1..203: mol_type = other DNA
ggcgcgccagtcctctcgggcggtctgacacaactgtgttcactagcaactactcccagacaccatggtgcatctgactcctgaggagaagtctgccgttactgtactcccgggcaaggtgaacgtggatgaagttggtgtactccccctgggcaggctactcccggtctacccttggacccagaggtcgactcggaccgatg

SEQ ID NO: 15342 - DNA, 203 bp, synthetic construct
  source 1..203: mol_type = other DNA
ggcgcgccagtcctgcgggcggtactgacacaactgtgttcactagcaactactcccagacaccatggtgcatctgactcctgaggagaagtctgccgttactgtactcccgggcaaggtgaacgtggatgaagttggtgtactccccctgggcaggctactcccggtctaccctttactcccgaggtcgactcggaccgatg

SEQ ID NO: 15343 - DNA, 203 bp, synthetic construct
  source 1..203: mol_type = other DNA
ggcgcgccagtcctttcgggccttctgacacaactgtgttcactagcaactactcccagacaccatggtgcatctgactcctgaggagaagtctgccgttactgtactcccgggcaaggtgaacgtggatgaagttggtgtactccccctgggcaggctgctggtggtctacccttggacccagaggtcgactcggaccgatg

SEQ ID NO: 15344 - DNA, 203 bp, synthetic construct
  source 1..203: mol_type = other DNA
ggcgcgccagtccttacgctagagctgacacaactgtgttcactagcaactactcccagacaccatggtgcatctgactcctgaggagaagtctgccgttactgtactcccgggcaaggtgaacgtggatgaagttggtgtactccccctgggcaggctgctggtggtctaccctttactcccgaggtcgactcggaccgatg

SEQ ID NO: 15345 - DNA, 203 bp, synthetic construct
  source 1..203: mol_type = other DNA
ggcgcgccagtcctctcgtagcatctgacacaactgtgttcactagcaactactcccagacaccatggtgcatctgactcctgaggagaagtctgccgttactgtactcccgggcaaggtgatactccctgaagttggtggtgaggccctgggcaggctgctggtggtctaccctttactcccgaggtcgactcggaccgatg

SEQ ID NO: 15346 - DNA, 203 bp, synthetic construct
  source 1..203: mol_type = other DNA
ggcgcgccagtcctatgctactagctgacacaactgtgttcactagcaactactcccagacaccatggtgcatctgactcctgaggagaagtctgccgttactgtactcccgggcaaggtgatactccctgaagttggtgtactccccctgggcaggctactcccggtctaccctttactcccgaggtcgactcggaccgatg

SEQ ID NO: 15347 - DNA, 203 bp, synthetic construct
  source 1..203: mol_type = other DNA
ggcgcgccagtcctttgaatgctactgacacaactgtgttcactagcaactactcccagacaccatggtgcatctgactcctgaggagaagtctgccgttactgtactcccgggcaaggtgatactccctgaagttggtgtactccccctgggcaggctgctggtggtctacccttggacccagaggtcgactcggaccgatg

SEQ ID NO: 15348 - DNA, 203 bp, synthetic construct
  source 1..203: mol_type = other DNA
ggcgcgccagtcctactcatgctactgacacaactgtgttcactagcaactactcccagacaccatggtgcatctgactcctgaggtactccctgccgttactgccctgtggggcaaggtgaacgtggatgaagttggtggtgaggccctgggcaggctactcccggtctacccttggacccagaggtcgactcggaccgatg

SEQ ID NO: 15349 - DNA, 203 bp, synthetic construct
  source 1..203: mol_type = other DNA
ggcgcgccagtcctatgctaggacctgacacaactgtgttcactagcaactactcccagacaccatggtgcatctgactcctgaggtactccctgccgttactgccctgtggggcaaggtgaacgtggatgaagttggtggtgaggccctgggcaggctactcccggtctaccctttactcccgaggtcgactcggaccgatg

SEQ ID NO: 15350 - DNA, 203 bp, synthetic construct
  source 1..203: mol_type = other DNA
ggcgcgccagtccttagcatacgcctgacacaactgtgttcactagcaactactcccagacaccatggtgcatctgactcctgaggtactccctgccgttactgccctgtggggcaaggtgaacgtggatgaagttggtggtgaggccctgggcaggctgctggtggtctacccttggacccagaggtcgactcggaccgatg

SEQ ID NO: 15351 - DNA, 203 bp, synthetic construct
  source 1..203: mol_type = other DNA
ggcgcgccagtcctagaaagaatgctgacacaactgtgttcactagcaactactcccagacaccatggtgcatctgactcctgaggtactccctgccgttactgccctgtggggcaaggtgaacgtggatgaagttggtgtactccccctgggcaggctactcccggtctaccctttactcccgaggtcgactcggaccgatg

SEQ ID NO: 15352 - DNA, 203 bp, synthetic construct
  source 1..203: mol_type = other DNA
ggcgcgccagtcctacattcttcgctgacacaactgtgttcactagcaactactcccagacaccatggtgcatctgactcctgaggtactccctgccgttactgccctgtggggcaaggtgaacgtggatgaagttggtgtactccccctgggcaggctgctggtggtctacccttggacccagaggtcgactcggaccgatg

SEQ ID NO: 15353 - DNA, 203 bp, synthetic construct
  source 1..203: mol_type = other DNA
ggcgcgccagtcctccattcttttctgacacaactgtgttcactagcaactactcccagacaccatggtgcatctgactcctgaggtactccctgccgttactgccctgtggggcaaggtgaacgtggatgaagttggtgtactccccctgggcaggctgctggtggtctaccctttactcccgaggtcgactcggaccgatg

SEQ ID NO: 15354 - DNA, 203 bp, synthetic construct
  source 1..203: mol_type = other DNA
ggcgcgccagtcctcccatgtgtcctgacacaactgtgttcactagcaactactcccagacaccatggtgcatctgactcctgaggtactccctgccgttactgccctgtggggcaaggtgatactccctgaagttggtggtgaggccctgggcaggctactcccggtctaccctttactcccgaggtcgactcggaccgatg

SEQ ID NO: 15355 - DNA, 203 bp, synthetic construct
  source 1..203: mol_type = other DNA
ggcgcgccagtcctgagcatgtgcctgacacaactgtgttcactagcaactactcccagacaccatggtgcatctgactcctgaggtactccctgccgttactgccctgtggggcaaggtgatactccctgaagttggtggtgaggccctgggcaggctgctggtggtctacccttggacccagaggtcgactcggaccgatg

SEQ ID NO: 15356 - DNA, 203 bp, synthetic construct
  source 1..203: mol_type = other DNA
ggcgcgccagtcctgctcatgtgtctgacacaactgtgttcactagcaactactcccagacaccatggtgcatctgactcctgaggtactccctgccgttactgccctgtggggcaaggtgatactccctgaagttggtgtactccccctgggcaggctactcccggtctacccttggacccagaggtcgactcggaccgatg

SEQ ID NO: 15357 - DNA, 203 bp, synthetic construct
  source 1..203: mol_type = other DNA
ggcgcgccagtccttacatgtggactgacacaactgtgttcactagcaactactcccagacaccatggtgcatctgactcctgaggtactccctgccgttactgccctgtggggcaaggtgatactccctgaagttggtgtactccccctgggcaggctactcccggtctaccctttactcccgaggtcgactcggaccgatg

SEQ ID NO: 15358 - DNA, 203 bp, synthetic construct
  source 1..203: mol_type = other DNA
ggcgcgccagtcctcatgtgcatactgacacaactgtgttcactagcaactactcccagacaccatggtgcatctgactcctgaggtactccctgccgttactgccctgtggggcaaggtgatactccctgaagttggtgtactccccctgggcaggctgctggtggtctacccttggacccagaggtcgactcggaccgatg

SEQ ID NO: 15359 - DNA, 203 bp, synthetic construct
  source 1..203: mol_type = other DNA
ggcgcgccagtcctcttcatgtgcctgacacaactgtgttcactagcaactactcccagacaccatggtgcatctgactcctgaggtactccctgccgttactgtactcccgggcaaggtgaacgtggatgaagttggtggtgaggccctgggcaggctactcccggtctacccttggacccagaggtcgactcggaccgatg

SEQ ID NO: 15360 - DNA, 203 bp, synthetic construct
  source 1..203: mol_type = other DNA
ggcgcgccagtccttcacatgtgcctgacacaactgtgttcactagcaactactcccagacaccatggtgcatctgactcctgaggtactccctgccgttactgtactcccgggcaaggtgaacgtggatgaagttggtggtgaggccctgggcaggctactcccggtctaccctttactcccgaggtcgactcggaccgatg

SEQ ID NO: 15361 - DNA, 203 bp, synthetic construct
  source 1..203: mol_type = other DNA
ggcgcgccagtcctcacatggtacctgacacaactgtgttcactagcaactactcccagacaccatggtgcatctgactcctgaggtactccctgccgttactgtactcccgggcaaggtgaacgtggatgaagttggtggtgaggccctgggcaggctgctggtggtctaccctttactcccgaggtcgactcggaccgatg

SEQ ID NO: 15362 - DNA, 203 bp, synthetic construct
  source 1..203: mol_type = other DNA
ggcgcgccagtcctacacatggacctgacacaactgtgttcactagcaactactcccagacaccatggtgcatctgactcctgaggtactccctgccgttactgtactcccgggcaaggtgaacgtggatgaagttggtgtactccccctgggcaggctactcccggtctacccttggacccagaggtcgactcggaccgatg

SEQ ID NO: 15363 - DNA, 203 bp, synthetic construct
  source 1..203: mol_type = other DNA
ggcgcgccagtccttctgcacatgctgacacaactgtgttcactagcaactactcccagacaccatggtgcatctgactcctgaggtactccctgccgttactgtactcccgggcaaggtgaacgtggatgaagttggtgtactccccctgggcaggctactcccggtctaccctttactcccgaggtcgactcggaccgatg

SEQ ID NO: 15364 - DNA, 203 bp, synthetic construct
  source 1..203: mol_type = other DNA
ggcgcgccagtcctctacacatgtctgacacaactgtgttcactagcaactactcccagacaccatggtgcatctgactcctgaggtactccctgccgttactgtactcccgggcaaggtgaacgtggatgaagttggtgtactccccctgggcaggctgctggtggtctacccttggacccagaggtcgactcggaccgatg

SEQ ID NO: 15365 - DNA, 203 bp, synthetic construct
  source 1..203: mol_type = other DNA
ggcgcgccagtcctataccacatgctgacacaactgtgttcactagcaactactcccagacaccatggtgcatctgactcctgaggtactccctgccgttactgtactcccgggcaaggtgatactccctgaagttggtggtgaggccctgggcaggctactcccggtctacccttggacccagaggtcgactcggaccgatg

SEQ ID NO: 15366 - DNA, 203 bp, synthetic construct
  source 1..203: mol_type = other DNA
ggcgcgccagtccttccacatgtcctgacacaactgtgttcactagcaactactcccagacaccatggtgcatctgactcctgaggtactccctgccgttactgtactcccgggcaaggtgatactccctgaagttggtggtgaggccctgggcaggctactcccggtctaccctttactcccgaggtcgactcggaccgatg

SEQ ID NO: 15367 - DNA, 203 bp, synthetic construct
  source 1..203: mol_type = other DNA
ggcgcgccagtcctgtcacatgggctgacacaactgtgttcactagcaactactcccagacaccatggtgcatctgactcctgaggtactccctgccgttactgtactcccgggcaaggtgatactccctgaagttggtggtgaggccctgggcaggctgctggtggtctacccttggacccagaggtcgactcggaccgatg

SEQ ID NO: 15368 - DNA, 203 bp, synthetic construct
  source 1..203: mol_type = other DNA
ggcgcgccagtcctccacatgtaactgacacaactgtgttcactagcaactactcccagacaccatggtgcatctgactcctgaggtactccctgccgttactgtactcccgggcaaggtgatactccctgaagttggtggtgaggccctgggcaggctgctggtggtctaccctttactcccgaggtcgactcggaccgatg

SEQ ID NO: 15369 - DNA, 203 bp, synthetic construct
  source 1..203: mol_type = other DNA
ggcgcgccagtccttttaaacctcctgacacaactgtgttcactagcaactactcccagacaccatggtgcatctgactcctgaggtactccctgccgttactgtactcccgggcaaggtgatactccctgaagttggtgtactccccctgggcaggctactcccggtctaccctttactcccgaggtcgactcggaccgatg

SEQ ID NO: 15370 - DNA, 203 bp, synthetic construct
  source 1..203: mol_type = other DNA
ggcgcgccagtcctatgagcgtgcctgacacaactgtgttcactagcaacttcttggcaaaaccatggtgcatctgactcctgaggagaagtctgccgttactgccctgtggggcaaggtgaacgtggatgaagttggtgttcttggcaaaggcaggcttcttggcaaatacccttggacccagaggtcgactcggaccgatg

SEQ ID NO: 15371 - DNA, 203 bp, synthetic construct
  source 1..203: mol_type = other DNA
ggcgcgccagtcctattgcgtgcactgacacaactgtgttcactagcaacttcttggcaaaaccatggtgcatctgactcctgaggagaagtctgccgttactgccctgtggggcaaggtgattcttggcaaagttggtgttcttggcaaaggcaggcttcttggcaaatacccttggacccagaggtcgactcggaccgatg

SEQ ID NO: 15372 - DNA, 203 bp, synthetic construct
  source 1..203: mol_type = other DNA
ggcgcgccagtccttagcacgcacctgacacaactgtgttcactagcaacttcttggcaaaaccatggtgcatctgactcctgaggagaagtctgccgttactgttcttggcaaaaaggtgaacgtggatgaagttggtggtgaggccctgggcaggcttcttggcaaatacccttggacccagaggtcgactcggaccgatg

SEQ ID NO: 15373 - DNA, 203 bp, synthetic construct
  source 1..203: mol_type = other DNA
ggcgcgccagtccttttagcacgcctgacacaactgtgttcactagcaacttcttggcaaaaccatggtgcatctgactcctgaggagaagtctgccgttactgttcttggcaaaaaggtgaacgtggatgaagttggtgttcttggcaaaggcaggctgctggtggtctacccttggacccagaggtcgactcggaccgatg

SEQ ID NO: 15374 - DNA, 203 bp, synthetic construct
  source 1..203: mol_type = other DNA
ggcgcgccagtcctgagcacgctactgacacaactgtgttcactagcaacttcttggcaaaaccatggtgcatctgactcctgaggagaagtctgccgttactgttcttggcaaaaaggtgattcttggcaaagttggtggtgaggccctgggcaggcttcttggcaaatacccttggacccagaggtcgactcggaccgatg

SEQ ID NO: 15375 - DNA, 203 bp, synthetic construct
  source 1..203: mol_type = other DNA
ggcgcgccagtcctatatgtggtgctgacacaactgtgttcactagcaacttcttggcaaaaccatggtgcatctgactcctgaggttcttggcaaagttactgccctgtggggcaaggtgaacgtggatgaagttggtggtgaggccctgggcaggctgctggtggtctacccttggacccagaggtcgactcggaccgatg

SEQ ID NO: 15376 - DNA, 203 bp, synthetic construct
  source 1..203: mol_type = other DNA
ggcgcgccagtcctgttggatcccctgacacaactgtgttcactagcaacttcttggcaaaaccatggtgcatctgactcctgaggttcttggcaaagttactgccctgtggggcaaggtgaacgtggatgaagttggtgttcttggcaaaggcaggctgctggtggtctacccttggacccagaggtcgactcggaccgatg

SEQ ID NO: 15377 - DNA, 203 bp, synthetic construct
  source 1..203: mol_type = other DNA
ggcgcgccagtcctaatttgaaacctgacacaactgtgttcactagcaacttcttggcaaaaccatggtgcatctgactcctgaggttcttggcaaagttactgccctgtggggcaaggtgaacgtggatgaagttggtgttcttggcaaaggcaggcttcttggcaaatacccttggacccagaggtcgactcggaccgatg

SEQ ID NO: 15378 - DNA, 203 bp, synthetic construct
  source 1..203: mol_type = other DNA
ggcgcgccagtccttgctgattcgctgacacaactgtgttcactagcaacttcttggcaaaaccatggtgcatctgactcctgaggttcttggcaaagttactgccctgtggggcaaggtgattcttggcaaagttggtggtgaggccctgggcaggcttcttggcaaatacccttggacccagaggtcgactcggaccgatg

SEQ ID NO: 15379 - DNA, 203 bp, synthetic construct
  source 1..203: mol_type = other DNA
ggcgcgccagtcctgctgcagtagctgacacaactgtgttcactagcaacttcttggcaaaaccatggtgcatctgactcctgaggttcttggcaaagttactgccctgtggggcaaggtgattcttggcaaagttggtgttcttggcaaaggcaggctgctggtggtctacccttggacccagaggtcgactcggaccgatg

SEQ ID NO: 15380 - DNA, 203 bp, synthetic construct
  source 1..203: mol_type = other DNA
ggcgcgccagtcctgttttaagctctgacacaactgtgttcactagcaacttcttggcaaaaccatggtgcatctgactcctgaggttcttggcaaagttactgttcttggcaaaaaggtgaacgtggatgaagttggtggtgaggccctgggcaggcttcttggcaaatacccttggacccagaggtcgactcggaccgatg

SEQ ID NO: 15381 - DNA, 203 bp, synthetic construct
  source 1..203: mol_type = other DNA
ggcgcgccagtcctaagattttagctgacacaactgtgttcactagcaacttcttggcaaaaccatggtgcatctgactcctgaggttcttggcaaagttactgttcttggcaaaaaggtgaacgtggatgaagttggtgttcttggcaaaggcaggcttcttggcaaatacccttggacccagaggtcgactcggaccgatg

SEQ ID NO: 15382 - DNA, 203 bp, synthetic construct
  source 1..203: mol_type = other DNA
ggcgcgccagtcctattttactggctgacacaactgtgttcactagcaacttcttggcaaaaccatggttcttggcaaacctgaggagaagtctgccgttactgccctgtggggcaaggtgaacgtggatgaagttggtgttcttggcaaaggcaggctgctggtggtctacccttggacccagaggtcgactcggaccgatg

SEQ ID NO: 15383 - DNA, 203 bp, synthetic construct
  source 1..203: mol_type = other DNA
ggcgcgccagtcctcgttttaaatctgacacaactgtgttcactagcaacttcttggcaaaaccatggttcttggcaaacctgaggagaagtctgccgttactgttcttggcaaaaaggtgaacgtggatgaagttggtggtgaggccctgggcaggcttcttggcaaatacccttggacccagaggtcgactcggaccgatg

SEQ ID NO: 15384 - DNA, 203 bp, synthetic construct
  source 1..203: mol_type = other DNA
ggcgcgccagtccttaaaatcgttctgacacaactgtgttcactagcaacttcttggcaaaaccatggttcttggcaaacctgaggagaagtctgccgttactgttcttggcaaaaaggtgaacgtggatgaagttggtgttcttggcaaaggcaggctgctggtggtctacccttggacccagaggtcgactcggaccgatg

SEQ ID NO: 15385 - DNA, 203 bp, synthetic construct
  source 1..203: mol_type = other DNA
ggcgcgccagtcctagttaaaatcctgacacaactgtgttcactagcaacttcttggcaaaaccatggttcttggcaaacctgaggagaagtctgccgttactgttcttggcaaaaaggtgaacgtggatgaagttggtgttcttggcaaaggcaggcttcttggcaaatacccttggacccagaggtcgactcggaccgatg

SEQ ID NO: 15386 - DNA, 203 bp, synthetic construct
  source 1..203: mol_type = other DNA
ggcgcgccagtcctgtgttaaaagctgacacaactgtgttcactagcaacttcttggcaaaaccatggttcttggcaaacctgaggagaagtctgccgttactgttcttggcaaaaaggtgattcttggcaaagttggtgttcttggcaaaggcaggctgctggtggtctacccttggacccagaggtcgactcggaccgatg

SEQ ID NO: 15387 - DNA, 203 bp, synthetic construct
  source 1..203: mol_type = other DNA
ggcgcgccagtccttaaaattgacctgacacaactgtgttcactagcaacttcttggcaaaaccatggttcttggcaaacctgaggagaagtctgccgttactgttcttggcaaaaaggtgattcttggcaaagttggtgttcttggcaaaggcaggcttcttggcaaatacccttggacccagaggtcgactcggaccgatg

SEQ ID NO: 15388 - DNA, 203 bp, synthetic construct
  source 1..203: mol_type = other DNA
ggcgcgccagtcctcctaaaagtcctgacacaactgtgttcactagcaacttcttggcaaaaccatggttcttggcaaacctgaggttcttggcaaagttactgccctgtggggcaaggtgaacgtggatgaagttggtggtgaggccctgggcaggctgctggtggtctacccttggacccagaggtcgactcggaccgatg

SEQ ID NO: 15389 - DNA, 203 bp, synthetic construct
  source 1..203: mol_type = other DNA
ggcgcgccagtcctgaatctaaaactgacacaactgtgttcactagcaacttcttggcaaaaccatggttcttggcaaacctgaggttcttggcaaagttactgccctgtggggcaaggtgaacgtggatgaagttggtggtgaggccctgggcaggcttcttggcaaatacccttggacccagaggtcgactcggaccgatg

SEQ ID NO: 15390 - DNA, 203 bp, synthetic construct
  source 1..203: mol_type = other DNA
ggcgcgccagtccttagtaaaagtctgacacaactgtgttcactagcaacttcttggcaaaaccatggttcttggcaaacctgaggttcttggcaaagttactgccctgtggggcaaggtgaacgtggatgaagttggtgttcttggcaaaggcaggctgctggtggtctacccttggacccagaggtcgactcggaccgatg

SEQ ID NO: 15391 - DNA, 203 bp, synthetic construct
  source 1..203: mol_type = other DNA
ggcgcgccagtccttaggttaaaactgacacaactgtgttcactagcaacttcttggcaaaaccatggttcttggcaaacctgaggttcttggcaaagttactgttcttggcaaaaaggtgaacgtggatgaagttggtggtgaggccctgggcaggctgctggtggtctacccttggacccagaggtcgactcggaccgatg

SEQ ID NO: 15392 - DNA, 203 bp, synthetic construct
  source 1..203: mol_type = other DNA
ggcgcgccagtccttaaaagcagtctgacacaactgtgttcactagcaacttcttggcaaaaccatggttcttggcaaacctgaggttcttggcaaagttactgttcttggcaaaaaggtgaacgtggatgaagttggtggtgaggccctgggcaggcttcttggcaaatacccttggacccagaggtcgactcggaccgatg

SEQ ID NO: 15393 - DNA, 203 bp, synthetic construct
  source 1..203: mol_type = other DNA
ggcgcgccagtccttaaaagattgctgacacaactgtgttcactagcaacttcttggcaaaaccatggttcttggcaaacctgaggttcttggcaaagttactgttcttggcaaaaaggtgattcttggcaaagttggtggtgaggccctgggcaggcttcttggcaaatacccttggacccagaggtcgactcggaccgatg

SEQ ID NO: 15394 - DNA, 203 bp, synthetic construct
  source 1..203: mol_type = other DNA
ggcgcgccagtcctttaacatggactgacacaactgtgttcactagcaacttcttggcaaaaccatggttcttggcaaacctgaggttcttggcaaagttactgttcttggcaaaaaggtgattcttggcaaagttggtgttcttggcaaaggcaggcttcttggcaaatacccttttcttggcaaatcgactcggaccgatg

SEQ ID NO: 15395 - DNA, 203 bp, synthetic construct
  source 1..203: mol_type = other DNA
ggcgcgccagtccttatgttacgtctgacacaactgtgttcactagcaagtttcagctttgcaaccatactccccccggaacccaaagactttggtttcccggaagctgcccggcgggtcatgggaataacgccgccgcatcgccggtcggcatcgtttatggtcggaactacgacggtatcagaggtcgactcggaccgatg

SEQ ID NO: 15396 - DNA, 203 bp, synthetic construct
  source 1..203: mol_type = other DNA
ggcgcgccagtcctatgttactctctgacacaactgtgttcactagcaattcttggcaaacaccatggtgcatctgactcctgaggagaagtctgccgttactgccctgtggggcaaggtgaacgtggatgaagttggtggtgaggccctgggcaggctgctggtggtctacccttggaaccggccgtcgactcggaccgatg

SEQ ID NO: 15397 - DNA, 203 bp, synthetic construct
  source 1..203: mol_type = other DNA
ggcgcgccagtcctaccatgttacctgacacaactgtgttcactagcacacggaatcgagaaccatggtgcatctgactcctgaggagaagtctgccgttactgccctgtggggcaaggtgaacgtggatgaagttggtggtgaggccctgggcaggctgctggtggtctaccccgtcaattcctttacgactcggaccgatg

SEQ ID NO: 15398 - DNA, 203 bp, synthetic construct
  source 1..203: mol_type = other DNA
ggcgcgccagtcctaaagcgctctctgacacaactgtgttcactagcaccgcaggctccactcctggtggtgcccttccgtcaattcctttaagtttcagctttgcaaccatactccccccggaacccaaagactttggtttcccggaagctgcccggcgggtcatgggaataacgccgcccagaggtcgactcggaccgatg

SEQ ID NO: 15399 - DNA, 203 bp, synthetic construct
  source 1..203: mol_type = other DNA
ggcgcgccagtcctagcgctcaccctgacacaactgtgttcactagcacgtcaattcctttaccatggtgcatctgactcctgaggagaagtctgccgttactgccctgtggggcaaggtgaacgtggatgaagttggtggtgaggccctgggcaggctgctggtggtctaccccgtcaattcctttacgactcggaccgatg

SEQ ID NO: 15400 - DNA, 203 bp, synthetic construct
  source 1..203: mol_type = other DNA
ggcgcgccagtcctagggtcgttcctgacacaactgtgttcactagcacgtcaattcctttaccatggtgcatctgactcctgaggagaagtctgccgttactgccctgtggggcaaggtgaacgtggatgaagttggtggtgaggccctgggcaggctgctggtggtctacccttggacctactccccgactcggaccgatg

SEQ ID NO: 15401 - DNA, 203 bp, synthetic construct
  source 1..203: mol_type = other DNA
ggcgcgccagtcctgtctcgttcgctgacacaactgtgttcactagcatactcccacagacaccatggtgcatctgactcctgaggagaagtctgccgttactgccctgtggggcaaggtgaacgtggatgaagttggtggtgaggccctgggcaggctgctggtggtctacccttggacccagaggtcgactcggaccgatg

SEQ ID NO: 15402 - DNA, 203 bp, synthetic construct
  source 1..203: mol_type = other DNA
ggcgcgccagtcctcgaacgagccctgacacaactgtgttcactagcatgaggtttcccgtgttgagtcaaattaagccgcaggctccactcctggtggtgcccttccgtcaattcctttaagtttcagctttgcaaccatactccccccggaacccaaagactttggtttcccggaagcccagaggtcgactcggaccgatg

SEQ ID NO: 15403 - DNA, 203 bp, synthetic construct
  source 1..203: mol_type = other DNA
ggcgcgccagtcctatcgttcaagctgacacaactgtgttcactagccggcgggtacagacaccatggtgcatctgactcctgaggagaagtctgccgttactgccctgtggggcaaggtgaacgtggatgaagttggtggtgaggccctgggcaggctgctggtggtctaccccacggaatcgagaacgactcggaccgatg

SEQ ID NO: 15404 - DNA, 203 bp, synthetic construct
  source 1..203: mol_type = other DNA
ggcgcgccagtccttagaacgatcctgacacaactgtgttcactagccggcgggtacagacaccatggtgcatctgactcctgaggagaagtctgccgttactgccctgtggggcaaggtgaacgtggatgaagttggtggtgaggccctgggcaggctgctggtggtctacccttggacctactccccgactcggaccgatg

SEQ ID NO: 15405 - DNA, 203 bp, synthetic construct
  source 1..203: mol_type = other DNA
ggcgcgccagtcctgcgaacgagtctgacacaactgtgttcactagcgaactacgacggtatctgatcgtcttcgaacctccgactttcgttcttgattaatgaaaacattcttggcaaatgctttcgctctggtccgtcttgcgccggtccaagaatttcacctctagcggcgcaatacgcagaggtcgactcggaccgatg

SEQ ID NO: 15406 - DNA, 203 bp, synthetic construct
  source 1..203: mol_type = other DNA
ggcgcgccagtccttcctgaccggctgacacaactgtgttcactagggtgaggtttcccgtgttgagtcaaattaagccgcaggctccactcctggtggtgcccttccgtcaattcctttaagtttcagctttgcaaccatactccccccggaacccaaagactttggtttcccggaagctgagaggtcgactcggaccgatg

SEQ ID NO: 15407 - DNA, 203 bp, synthetic construct
  source 1..203: mol_type = other DNA
ggcgcgccagtcctgaaacaccggctgacacaactgtgttcactataggagaggagcgagcgaccaaaggaaccataactgatttaatgagccattcgcagtttcactgtaccggccgtgcgtactcagacatgcatggcttaatctttgagacaagcatatgctactggcaggatcaaccaggaggtcgactcggaccgatg

SEQ ID NO: 15408 - DNA, 203 bp, synthetic construct
  source 1..203: mol_type = other DNA
ggcgcgccagtcctcaacgcccttctgacacaactgtgttcactccggcgggtaaacagacaccatggtgcatctgactcctgaggagaagtctgccgttactgccctgtggggcaaggtgaacgtggatgaagttggtggtgaggccctgggcaggctgctggtggtctacccttggaaccggccgtcgactcggaccgatg

SEQ ID NO: 15409 - DNA, 203 bp, synthetic construct
  source 1..203: mol_type = other DNA
ggcgcgccagtcctagccctctgcctgacacaactgtgttcactcgggtgaggtttcccgtgttgagtcaaattaagccgcaggctccactcctggtggtgcccttccgtcaattcctttaagtttcagctttgcaaccatactccccccggaacccaaagactttggtttcccggaagctgccaggtcgactcggaccgatg

SEQ ID NO: 15410 - DNA, 203 bp, synthetic construct
  source 1..203: mol_type = other DNA
ggcgcgccagtcctcgcccttacgctgacacaactgtgttcacttactccctcaaacagacaccatggtgcatctgactcctgaggagaagtctgccgttactgccctgtggggcaaggtgaacgtggatgaagttggtggtgaggccctgggcaggctgctggtggtctacccttgttcttggcaaacgactcggaccgatg

SEQ ID NO: 15411 - DNA, 203 bp, synthetic construct
  source 1..203: mol_type = other DNA
ggcgcgccagtcctggccctcacactgacacaactgtgttcactttcttggcaaaacagacaccatggtgcatctgactcctgaggagaagtctgccgttactgccctgtggggcaaggtgaacgtggatgaagttggtggtgaggccctgggcaggctgctggtggtctaccccacggaatcgagaacgactcggaccgatg

SEQ ID NO: 15412 - DNA, 203 bp, synthetic construct
  source 1..203: mol_type = other DNA
ggcgcgccagtcctaggccctcaactgacacaactgtgttcacttttaagtttcagctttgcaaccatactccccccggaacccaaagactttggtttcccggaagctgcccggcgggtcatgggaataacgccgccgcatcgccggtcggcatcgtttatggtcggaactacgacggtatctgaggtcgactcggaccgatg

SEQ ID NO: 15413 - DNA, 203 bp, synthetic construct
  source 1..203: mol_type = other DNA
ggcgcgccagtcctgtagccctctctgacacaactgtgttcattcttggcaaaaaacagacaccatggtgcatctgactcctgaggagaagtctgccgttactgccctgtggggcaaggtgaacgtggatgaagttggtggtgaggccctgggcaggctgctggtggtctacccttggaccggcgggtcgactcggaccgatg

SEQ ID NO: 15414 - DNA, 203 bp, synthetic construct
  source 1..203: mol_type = other DNA
ggcgcgccagtcctaggccctttcctgacacaactgtgttccacggaatcgagaaacagacaccatggtgcatctgactcctgaggagaagtctgccgttactgccctgtggggcaaggtgaacgtggatgaagttggtggtgaggccctgggcaggctgctggtggtctaccccacggaatcgagaacgactcggaccgatg

SEQ ID NO: 15415 - DNA, 203 bp, synthetic construct
  source 1..203: mol_type = other DNA
ggcgcgccagtcctagagagggcgctgacacaactgtgttccacggaatcgagaaacagacaccatggtgcatctgactcctgaggagaagtctgccgttactgccctgtggggcaaggtgaacgtggatgaagttggtggtgaggccctgggcaggctgctggtggtctaccccgtcaattcctttacgactcggaccgatg

SEQ ID NO: 15416 - DNA, 203 bp, synthetic construct
  source 1..203: mol_type = other DNA
ggcgcgccagtcctaagggcaggcctgacacaactgtgttccacggaatcgagaaacagacaccatggtgcatctgactcctgaggagaagtctgccgttactgccctgtggggcaaggtgaacgtggatgaagttggtggtgaggccctgggcaggctgctggtggtctacccttggacccagaggtcgactcggaccgatg

SEQ ID NO: 15417 - DNA, 203 bp, synthetic construct
  source 1..203: mol_type = other DNA
ggcgcgccagtcctgcagggcccactgacacaactgtgttccgtcaattcctttaacagacaccatggtgcatctgactcctgaggagaagtctgccgttactgccctgtggggcaaggtgaacgtggatgaagttggtggtgaggccctgggcaggctgctggtggtctaccccgtcaattcctttacgactcggaccgatg

SEQ ID NO: 15418 - DNA, 203 bp, synthetic construct
  source 1..203: mol_type = other DNA
ggcgcgccagtccttctaagggcgctgacacaactgtgttctactcccacctcaaacagacaccatggtgcatctgactcctgaggagaagtctgccgttactgccctgtggggcaaggtgaacgtggatgaagttggtggtgaggccctgggcaggctgctggtggtctacccttggacccagaggtcgactcggaccgatg

SEQ ID NO: 15419 - DNA, 203 bp, synthetic construct
  source 1..203: mol_type = other DNA
ggcgcgccagtcctttgcagggcgctgacacaactgtttcttggcaaaacctcaaacagacaccatggtgcatctgactcctgaggagaagtctgccgttactgccctgtggggcaaggtgaacgtggatgaagttggtggtgaggccctgggcaggctgctggtggtctaccccgtcaattcctttacgactcggaccgatg

SEQ ID NO: 15420 - DNA, 203 bp, synthetic construct
  source 1..203: mol_type = other DNA
ggcgcgccagtcctcgaagggccgctgacacacacggaatcgagaacaaccacggaatcgagaaatggcacggaatcgagaagaggagaagtctgccgttactgcacggaatcgagaagtgaacgtggatgaagttggtgcacggaatcgagaaaggccacggaatcgagaaccttggacccagaggtcgactcggaccgatg

SEQ ID NO: 15421 - DNA, 203 bp, synthetic construct
  source 1..203: mol_type = other DNA
ggcgcgccagtcctcaaagggcgtctgacacacacggaatcgagaacaaccacggaatcgagaaatggcacggaatcgagaagaggagaagtctgccgttactgcacggaatcgagaagtgaacgtggatgaagttggtggtgaggccctgggcaggctgctggtggtctacccttggacccagaggtcgactcggaccgatg

SEQ ID NO: 15422 - DNA, 203 bp, synthetic construct
  source 1..203: mol_type = other DNA
ggcgcgccagtcctttgtcaagatctgacacacacggaatcgagaacaaccacggaatcgagaaatggcacggaatcgagaagaggagaagtctgccgttactgccctgtggggcaaggtgacacggaatcgagaaggtgcacggaatcgagaaaggccacggaatcgagaaccttggacccagaggtcgactcggaccgatg

SEQ ID NO: 15423 - DNA, 203 bp, synthetic construct
  source 1..203: mol_type = other DNA
ggcgcgccagtcctgatcttgacactgacacacacggaatcgagaacaaccacggaatcgagaaatggcacggaatcgagaagaggagaagtctgccgttactgccctgtggggcaaggtgacacggaatcgagaaggtgcacggaatcgagaaaggctgctggtggtctacccttggacccagaggtcgactcggaccgatg

SEQ ID NO: 15424 - DNA, 203 bp, synthetic construct
  source 1..203: mol_type = other DNA
ggcgcgccagtcctactgtcaacgctgacacacacggaatcgagaacaaccacggaatcgagaaatggcacggaatcgagaagaggagaagtctgccgttactgccctgtggggcaaggtgacacggaatcgagaaggtggtgaggccctgggcaggctgctggtggtctacccttggacccagaggtcgactcggaccgatg

SEQ ID NO: 15425 - DNA, 203 bp, synthetic construct
  source 1..203: mol_type = other DNA
ggcgcgccagtccttatgtcaactctgacacacacggaatcgagaacaaccacggaatcgagaaatggcacggaatcgagaagaggcacggaatcgagaaactgcacggaatcgagaagtgaacgtggatgaagttggtgcacggaatcgagaaaggccacggaatcgagaaccttggacccagaggtcgactcggaccgatg

SEQ ID NO: 15426 - DNA, 203 bp, synthetic construct
  source 1..203: mol_type = other DNA
ggcgcgccagtcctctgtcaaggactgacacacacggaatcgagaacaaccacggaatcgagaaatggcacggaatcgagaagaggcacggaatcgagaaactgcacggaatcgagaagtgaacgtggatgaagttggtggtgaggccctgggcaggccacggaatcgagaaccttggacccagaggtcgactcggaccgatg

SEQ ID NO: 15427 - DNA, 203 bp, synthetic construct
  source 1..203: mol_type = other DNA
ggcgcgccagtcctgcgtcgtgttctgacacacacggaatcgagaacaaccacggaatcgagaaatggcacggaatcgagaagaggcacggaatcgagaaactgcacggaatcgagaagtgacacggaatcgagaaggtggtgaggccctgggcaggccacggaatcgagaaccttggacccagaggtcgactcggaccgatg

SEQ ID NO: 15428 - DNA, 203 bp, synthetic construct
  source 1..203: mol_type = other DNA
ggcgcgccagtccttcgacgcaccctgacacacacggaatcgagaacaaccacggaatcgagaaatggcacggaatcgagaagaggcacggaatcgagaaactgccctgtggggcaaggtgaacgtggatgaagttggtggtgaggccctgggcaggccacggaatcgagaaccttggacccagaggtcgactcggaccgatg

SEQ ID NO: 15429 - DNA, 203 bp, synthetic construct
  source 1..203: mol_type = other DNA
ggcgcgccagtcctttagcgacgcctgacacacacggaatcgagaacaaccacggaatcgagaaatggcacggaatcgagaagaggcacggaatcgagaaactgccctgtggggcaaggtgacacggaatcgagaaggtgcacggaatcgagaaaggccacggaatcgagaaccttggacccagaggtcgactcggaccgatg

SEQ ID NO: 15430 - DNA, 203 bp, synthetic construct
  source 1..203: mol_type = other DNA
ggcgcgccagtcctgcaacgacgcctgacacacacggaatcgagaacaaccacggaatcgagaaatggcacggaatcgagaagaggcacggaatcgagaaactgccctgtggggcaaggtgacacggaatcgagaaggtgcacggaatcgagaaaggctgctggtggtctacccttggacccagaggtcgactcggaccgatg

SEQ ID NO: 15431 - DNA, 203 bp, synthetic construct
  source 1..203: mol_type = other DNA
ggcgcgccagtcctgattcaggttctgacacacacggaatcgagaacaaccacggaatcgagaaatggtgcatctgactcctgaggagaagtctgccgttactgcacggaatcgagaagtgaacgtggatgaagttggtgcacggaatcgagaaaggctgctggtggtctacccttggacccagaggtcgactcggaccgatg

SEQ ID NO: 15432 - DNA, 203 bp, synthetic construct
  source 1..203: mol_type = other DNA
ggcgcgccagtcctgtgttctctactgacacacacggaatcgagaacaaccacggaatcgagaaatggtgcatctgactcctgaggagaagtctgccgttactgcacggaatcgagaagtgacacggaatcgagaaggtggtgaggccctgggcaggctgctggtggtctacccttggacccagaggtcgactcggaccgatg

SEQ ID NO: 15433 - DNA, 203 bp, synthetic construct
  source 1..203: mol_type = other DNA
ggcgcgccagtcctagactaaattctgacacacacggaatcgagaacaaccacggaatcgagaaatggtgcatctgactcctgaggagaagtctgccgttactgccctgtggggcaaggtgaacgtggatgaagttggtgcacggaatcgagaaaggctgctggtggtctacccttggacccagaggtcgactcggaccgatg

SEQ ID NO: 15434 - DNA, 203 bp, synthetic construct
  source 1..203: mol_type = other DNA
ggcgcgccagtcctggatactaaactgacacacacggaatcgagaacaaccacggaatcgagaaatggtgcatctgactcctgaggagaagtctgccgttactgccctgtggggcaaggtgaacgtggatgaagttggtggtgaggccctgggcaggccacggaatcgagaaccttggacccagaggtcgactcggaccgatg

SEQ ID NO: 15435 - DNA, 203 bp, synthetic construct
  source 1..203: mol_type = other DNA
ggcgcgccagtcctgtttagtcgcctgacacacacggaatcgagaacaaccacggaatcgagaaatggtgcatctgactcctgaggagaagtctgccgttactgccctgtggggcaaggtgacacggaatcgagaaggtggtgaggccctgggcaggccacggaatcgagaaccttggacccagaggtcgactcggaccgatg

SEQ ID NO: 15436 - DNA, 203 bp, synthetic construct
  source 1..203: mol_type = other DNA
ggcgcgccagtcctaattttagtcctgacacacacggaatcgagaacaaccacggaatcgagaaatggtgcatctgactcctgaggcacggaatcgagaaactgcacggaatcgagaagtgaacgtggatgaagttggtggtgaggccctgggcaggctgctggtggtctacccttggacccagaggtcgactcggaccgatg

SEQ ID NO: 15437 - DNA, 203 bp, synthetic construct
  source 1..203: mol_type = other DNA
ggcgcgccagtcctcacttcacacctgacacacacggaatcgagaacaaccacggaatcgagaaatggtgcatctgactcctgaggcacggaatcgagaaactgcacggaatcgagaagtgacacggaatcgagaaggtggtgaggccctgggcaggctgctggtggtctacccttggacccagaggtcgactcggaccgatg

SEQ ID NO: 15438 - DNA, 203 bp, synthetic construct
  source 1..203: mol_type = other DNA
ggcgcgccagtcctgatcccgtccctgacacacacggaatcgagaacaaccacggaatcgagaaatggtgcatctgactcctgaggcacggaatcgagaaactgccctgtggggcaaggtgaacgtggatgaagttggtgcacggaatcgagaaaggctgctggtggtctacccttggacccagaggtcgactcggaccgatg

SEQ ID NO: 15439 - DNA, 203 bp, synthetic construct
  source 1..203: mol_type = other DNA
ggcgcgccagtcctagtcccgtgactgacacacacggaatcgagaacaaccacggaatcgagaaatggtgcatctgactcctgaggcacggaatcgagaaactgccctgtggggcaaggtgacacggaatcgagaaggtgcacggaatcgagaaaggccacggaatcgagaaccttggacccagaggtcgactcggaccgatg

SEQ ID NO: 15440 - DNA, 203 bp, synthetic construct
  source 1..203: mol_type = other DNA
ggcgcgccagtcctgtcccgatctctgacacacacggaatcgagaacaaccacggaatcgagaaatggtgcatctgactcctgaggcacggaatcgagaaactgccctgtggggcaaggtgacacggaatcgagaaggtgcacggaatcgagaaaggctgctggtggtctacccttggacccagaggtcgactcggaccgatg

SEQ ID NO: 15441 - DNA, 203 bp, synthetic construct
  source 1..203: mol_type = other DNA
ggcgcgccagtccttcaatcccgtctgacacacacggaatcgagaacaaccacggaatcgagaaatggtgcatctgactcctgaggcacggaatcgagaaactgccctgtggggcaaggtgacacggaatcgagaaggtggtgaggccctgggcaggctgctggtggtctacccttggacccagaggtcgactcggaccgatg

SEQ ID NO: 15442 - DNA, 203 bp, synthetic construct
  source 1..203: mol_type = other DNA
ggcgcgccagtcctttgtcccgagctgacacacacggaatcgagaacaacctcaaacagacaccatggcacggaatcgagaagaggagaagtctgccgttactgcacggaatcgagaagtgaacgtggatgaagttggtgcacggaatcgagaaaggctgctggtggtctacccttggacccagaggtcgactcggaccgatg

SEQ ID NO: 15443 - DNA, 203 bp, synthetic construct
  source 1..203: mol_type = other DNA
ggcgcgccagtccttatcgggattctgacacacacggaatcgagaacaacctcaaacagacaccatggcacggaatcgagaagaggagaagtctgccgttactgcacggaatcgagaagtgacacggaatcgagaaggtgcacggaatcgagaaaggccacggaatcgagaaccttggacccagaggtcgactcggaccgatg

SEQ ID NO: 15444 - DNA, 203 bp, synthetic construct
  source 1..203: mol_type = other DNA
ggcgcgccagtcctttgcacgggactgacacacacggaatcgagaacaacctcaaacagacaccatggcacggaatcgagaagaggagaagtctgccgttactgcacggaatcgagaagtgacacggaatcgagaaggtggtgaggccctgggcaggccacggaatcgagaaccttggacccagaggtcgactcggaccgatg

SEQ ID NO: 15445 - DNA, 203 bp, synthetic construct
  source 1..203: mol_type = other DNA
ggcgcgccagtcctatcgggatatctgacacacacggaatcgagaacaacctcaaacagacaccatggcacggaatcgagaagaggagaagtctgccgttactgcacggaatcgagaagtgacacggaatcgagaaggtggtgaggccctgggcaggctgctggtggtctacccttggacccagaggtcgactcggaccgatg

SEQ ID NO: 15446 - DNA, 203 bp, synthetic construct
  source 1..203: mol_type = other DNA
ggcgcgccagtccttcaccgggacctgacacacacggaatcgagaacaacctcaaacagacaccatggcacggaatcgagaagaggagaagtctgccgttactgccctgtggggcaaggtgaacgtggatgaagttggtggtgaggccctgggcaggccacggaatcgagaaccttggacccagaggtcgactcggaccgatg

SEQ ID NO: 15447 - DNA, 203 bp, synthetic construct
  source 1..203: mol_type = other DNA
ggcgcgccagtcctgtcgggacctctgacacacacggaatcgagaacaacctcaaacagacaccatggcacggaatcgagaagaggagaagtctgccgttactgccctgtggggcaaggtgaacgtggatgaagttggtggtgaggccctgggcaggctgctggtggtctacccttggacccagaggtcgactcggaccgatg

SEQ ID NO: 15448 - DNA, 203 bp, synthetic construct
  source 1..203: mol_type = other DNA
ggcgcgccagtcctggtcgggatcctgacacacacggaatcgagaacaacctcaaacagacaccatggcacggaatcgagaagaggagaagtctgccgttactgccctgtggggcaaggtgacacggaatcgagaaggtgcacggaatcgagaaaggccacggaatcgagaaccttggacccagaggtcgactcggaccgatg

SEQ ID NO: 15449 - DNA, 203 bp, synthetic construct
  source 1..203: mol_type = other DNA
ggcgcgccagtcctctcttacggtctgacacacacggaatcgagaacaacctcaaacagacaccatggcacggaatcgagaagaggcacggaatcgagaaactgcacggaatcgagaagtgaacgtggatgaagttggtgcacggaatcgagaaaggctgctggtggtctacccttggacccagaggtcgactcggaccgatg

SEQ ID NO: 15450 - DNA, 203 bp, synthetic construct
  source 1..203: mol_type = other DNA
ggcgcgccagtcctaggcatgtaactgacacacacggaatcgagaacaacctcaaacagacaccatggcacggaatcgagaagaggcacggaatcgagaaactgcacggaatcgagaagtgacacggaatcgagaaggtgcacggaatcgagaaaggccacggaatcgagaaccttggacccagaggtcgactcggaccgatg

SEQ ID NO: 15451 - DNA, 203 bp, synthetic construct
  source 1..203: mol_type = other DNA
ggcgcgccagtcctatgaggcattctgacacacacggaatcgagaacaacctcaaacagacaccatggcacggaatcgagaagaggcacggaatcgagaaactgccctgtggggcaaggtgaacgtggatgaagttggtgcacggaatcgagaaaggctgctggtggtctacccttggacccagaggtcgactcggaccgatg

SEQ ID NO: 15452 - DNA, 203 bp, synthetic construct
  source 1..203: mol_type = other DNA
ggcgcgccagtccttgaggcatttctgacacacacggaatcgagaacaacctcaaacagacaccatggcacggaatcgagaagaggcacggaatcgagaaactgccctgtggggcaaggtgaacgtggatgaagttggtggtgaggccctgggcaggccacggaatcgagaaccttggacccagaggtcgactcggaccgatg

SEQ ID NO: 15453 - DNA, 203 bp, synthetic construct
  source 1..203: mol_type = other DNA
ggcgcgccagtccttctgggttcactgacacacacggaatcgagaacaacctcaaacagacaccatggtgcatctgactcctgaggagaagtctgccgttactgcacggaatcgagaagtgaacgtggatgaagttggtgcacggaatcgagaaaggccacggaatcgagaaccttggacccagaggtcgactcggaccgatg

SEQ ID NO: 15454 - DNA, 203 bp, synthetic construct
  source 1..203: mol_type = other DNA
ggcgcgccagtccttttgaaccctctgacacacacggaatcgagaacaacctcaaacagacaccatggtgcatctgactcctgaggagaagtctgccgttactgcacggaatcgagaagtgaacgtggatgaagttggtgcacggaatcgagaaaggctgctggtggtctacccttggacccagaggtcgactcggaccgatg

SEQ ID NO: 15455 - DNA, 203 bp, synthetic construct
  source 1..203: mol_type = other DNA
ggcgcgccagtcctacacgttacactgacacacacggaatcgagaacaacctcaaacagacaccatggtgcatctgactcctgaggagaagtctgccgttactgcacggaatcgagaagtgaacgtggatgaagttggtggtgaggccctgggcaggccacggaatcgagaaccttggacccagaggtcgactcggaccgatg

SEQ ID NO: 15456 - DNA, 203 bp, synthetic construct
  source 1..203: mol_type = other DNA
ggcgcgccagtcctacacgttctgctgacacacacggaatcgagaacaacctcaaacagacaccatggtgcatctgactcctgaggagaagtctgccgttactgcacggaatcgagaagtgaacgtggatgaagttggtggtgaggccctgggcaggctgctggtggtctacccttggacccagaggtcgactcggaccgatg

SEQ ID NO: 15457 - DNA, 203 bp, synthetic construct
  source 1..203: mol_type = other DNA
ggcgcgccagtcctctgaacgtgtctgacacacacggaatcgagaacaacctcaaacagacaccatggtgcatctgactcctgaggagaagtctgccgttactgcacggaatcgagaagtgacacggaatcgagaaggtgcacggaatcgagaaaggctgctggtggtctacccttggacccagaggtcgactcggaccgatg

SEQ ID NO: 15458 - DNA, 203 bp, synthetic construct
  source 1..203: mol_type = other DNA
ggcgcgccagtccttcgcactttgctgacacacacggaatcgagaacaacctcaaacagacaccatggtgcatctgactcctgaggagaagtctgccgttactgccctgtggggcaaggtgaacgtggatgaagttggtgcacggaatcgagaaaggctgctggtggtctacccttggacccagaggtcgactcggaccgatg

SEQ ID NO: 15459 - DNA, 203 bp, synthetic construct
  source 1..203: mol_type = other DNA
ggcgcgccagtcctcccgggacgactgacacacacggaatcgagaacaacctcaaacagacaccatggtgcatctgactcctgaggagaagtctgccgttactgccctgtggggcaaggtgaacgtggatgaagttggtggtgaggccctgggcaggccacggaatcgagaaccttggacccagaggtcgactcggaccgatg

SEQ ID NO: 15460 - DNA, 203 bp, synthetic construct
  source 1..203: mol_type = other DNA
ggcgcgccagtcctcaggacgagcctgacacacacggaatcgagaacaacctcaaacagacaccatggtgcatctgactcctgaggagaagtctgccgttactgccctgtggggcaaggtgacacggaatcgagaaggtggtgaggccctgggcaggctgctggtggtctacccttggacccagaggtcgactcggaccgatg

SEQ ID NO: 15461 - DNA, 203 bp, synthetic construct
  source 1..203: mol_type = other DNA
ggcgcgccagtccttgtaagaactctgacacacacggaatcgagaacaacctcaaacagacaccatggtgcatctgactcctgaggcacggaatcgagaaactgcacggaatcgagaagtgaacgtggatgaagttggtgcacggaatcgagaaaggccacggaatcgagaaccttggacccagaggtcgactcggaccgatg

SEQ ID NO: 15462 - DNA, 203 bp, synthetic construct
  source 1..203: mol_type = other DNA
ggcgcgccagtcctcttgaaacggctgacacacacggaatcgagaacaacctcaaacagacaccatggtgcatctgactcctgaggcacggaatcgagaaactgcacggaatcgagaagtgaacgtggatgaagttggtgcacggaatcgagaaaggctgctggtggtctacccttggacccagaggtcgactcggaccgatg

SEQ ID NO: 15463 - DNA, 203 bp, synthetic construct
  source 1..203: mol_type = other DNA
ggcgcgccagtcctttgaccacggctgacacacacggaatcgagaacaacctcaaacagacaccatggtgcatctgactcctgaggcacggaatcgagaaactgcacggaatcgagaagtgaacgtggatgaagttggtggtgaggccctgggcaggccacggaatcgagaaccttggacccagaggtcgactcggaccgatg

SEQ ID NO: 15464 - DNA, 203 bp, synthetic construct
  source 1..203: mol_type = other DNA
ggcgcgccagtcctgcggtcacggctgacacacacggaatcgagaacaacctcaaacagacaccatggtgcatctgactcctgaggcacggaatcgagaaactgcacggaatcgagaagtgacacggaatcgagaaggtggtgaggccctgggcaggccacggaatcgagaaccttggacccagaggtcgactcggaccgatg

SEQ ID NO: 15465 - DNA, 203 bp, synthetic construct
  source 1..203: mol_type = other DNA
ggcgcgccagtcctagctgcacggctgacacacacggaatcgagaacaacctcaaacagacaccatggtgcatctgactcctgaggcacggaatcgagaaactgcacggaatcgagaagtgacacggaatcgagaaggtggtgaggccctgggcaggctgctggtggtctacccttggacccagaggtcgactcggaccgatg

SEQ ID NO: 15466 - DNA, 203 bp, synthetic construct
  source 1..203: mol_type = other DNA
ggcgcgccagtcctacagctacggctgacacacacggaatcgagaacaacctcaaacagacaccatggtgcatctgactcctgaggcacggaatcgagaaactgccctgtggggcaaggtgaacgtggatgaagttggtggtgaggccctgggcaggccacggaatcgagaaccttggacccagaggtcgactcggaccgatg

SEQ ID NO: 15467 - DNA, 203 bp, synthetic construct
  source 1..203: mol_type = other DNA
ggcgcgccagtcctaaattcacggctgacacacacggaatcgagaacaacctcaaacagacaccatggtgcatctgactcctgaggcacggaatcgagaaactgccctgtggggcaaggtgacacggaatcgagaaggtggtgaggccctgggcaggctgctggtggtctacccttggacccagaggtcgactcggaccgatg

SEQ ID NO: 15468 - DNA, 203 bp, synthetic construct
  source 1..203: mol_type = other DNA
ggcgcgccagtcctttggatacggctgacacaccggcgggtactagcaacccggcgggtacaccatggccggcgggtctcctgaggccggcgggtccgttactgccggcgggtgcaaggtgaccggcgggtaagttggtgccggcgggttgggcaggcccggcgggttctacccttccggcgggtggtcgactcggaccgatg

SEQ ID NO: 15469 - DNA, 203 bp, synthetic construct
  source 1..203: mol_type = other DNA
ggcgcgccagtcctccgtggttaactgacacaccggcgggtactagcaacccggcgggtacaccatggccggcgggtctcctgaggccggcgggtccgttactgccggcgggtgcaaggtgaccggcgggtaagttggtgccggcgggttgggcaggcccggcgggttctacccttccggcgggtggtcgactcggaccgatg

SEQ ID NO: 15470 - DNA, 203 bp, synthetic construct
  source 1..203: mol_type = other DNA
ggcgcgccagtcctccgttagtatctgacacaccggcgggtactagcaacccggcgggtacaccatggccggcgggtctcctgaggccggcgggtccgttactgccggcgggtgcaaggtgaccggcgggtaagttggtgccggcgggttgggcaggcccggcgggttctacccttccggcgggtggtcgactcggaccgatg

SEQ ID NO: 15471 - DNA, 203 bp, synthetic construct
  source 1..203: mol_type = other DNA
ggcgcgccagtcctccgtgaacttctgacacaccggcgggtactagcaacccggcgggtacaccatggccggcgggtctcctgaggccggcgggtccgttactgccggcgggtgcaaggtgaccggcgggtaagttggtgccggcgggttgggcaggcccggcgggttctacccttccggcgggtggtcgactcggaccgatg

SEQ ID NO: 15472 - DNA, 203 bp, synthetic construct
  source 1..203: mol_type = other DNA
ggcgcgccagtcctccgtcgatcgctgacacaccggcgggtactagcaacccggcgggtacaccatggccggcgggtctcctgaggccggcgggtccgttactgccggcgggtgcaaggtgaccggcgggtaagttggtgccggcgggttgggcaggcccggcgggttctacccttccggcgggtggtcgactcggaccgatg

SEQ ID NO: 15473 - DNA, 203 bp, synthetic construct
  source 1..203: mol_type = other DNA
ggcgcgccagtcctccgtctaggcctgacacaccggcgggtactagcaacccggcgggtacaccatggccggcgggtctcctgaggccggcgggtccgttactgccggcgggtgcaaggtgaccggcgggtaagttggtgccggcgggttgggcaggcccggcgggttctacccttccggcgggtggtcgactcggaccgatg

SEQ ID NO: 15474 - DNA, 203 bp, synthetic construct
  source 1..203: mol_type = other DNA
ggcgcgccagtcctccgtgcaccactgacacaccggcgggtactagcaacccggcgggtacaccatggccggcgggtctcctgaggccggcgggtccgttactgccggcgggtgcaaggtgaccggcgggtaagttggtgccggcgggttgggcaggcccggcgggttctacccttccggcgggtggtcgactcggaccgatg

SEQ ID NO: 15475 - DNA, 203 bp, synthetic construct
  source 1..203: mol_type = other DNA
ggcgcgccagtcctccgttgtcttctgacacaccggcgggtactagcaacctcaaacagacaccatggtgcatctgactcctgaggagaagtctgccgttactgccctgtggggcaaggtgaacgtggatgaagttggtggtgaggccctgggcaggctgctggtggtctaccccacggaatcgagaacgactcggaccgatg

SEQ ID NO: 15476 - DNA, 203 bp, synthetic construct
  source 1..203: mol_type = other DNA
ggcgcgccagtccttgtcttgcggctgacacacgtcaattcctttacaaccgtcaattcctttaatggcgtcaattcctttagaggagaagtctgccgttactgcgtcaattcctttagtgaacgtggatgaagttggtggtgaggccctgggcaggccgtcaattcctttaccttggacccagaggtcgactcggaccgatg

SEQ ID NO: 15477 - DNA, 203 bp, synthetic construct
  source 1..203: mol_type = other DNA
ggcgcgccagtcctcgtgaggcggctgacacacgtcaattcctttacaaccgtcaattcctttaatggcgtcaattcctttagaggagaagtctgccgttactgcgtcaattcctttagtgacgtcaattcctttaggtggtgaggccctgggcaggccgtcaattcctttaccttggacccagaggtcgactcggaccgatg

SEQ ID NO: 15478 - DNA, 203 bp, synthetic construct
  source 1..203: mol_type = other DNA
ggcgcgccagtcctccgcagacctctgacacacgtcaattcctttacaaccgtcaattcctttaatggcgtcaattcctttagaggagaagtctgccgttactgcgtcaattcctttagtgacgtcaattcctttaggtggtgaggccctgggcaggctgctggtggtctacccttggacccagaggtcgactcggaccgatg

SEQ ID NO: 15479 - DNA, 203 bp, synthetic construct
  source 1..203: mol_type = other DNA
ggcgcgccagtcctccgctgctgtctgacacacgtcaattcctttacaaccgtcaattcctttaatggcgtcaattcctttagaggcgtcaattcctttaactgccctgtggggcaaggtgaacgtggatgaagttggtgcgtcaattcctttaaggctgctggtggtctacccttggacccagaggtcgactcggaccgatg

SEQ ID NO: 15480 - DNA, 203 bp, synthetic construct
  source 1..203: mol_type = other DNA
ggcgcgccagtcctccgcaagcaactgacacacgtcaattcctttacaaccgtcaattcctttaatggcgtcaattcctttagaggcgtcaattcctttaactgccctgtggggcaaggtgaacgtggatgaagttggtggtgaggccctgggcaggctgctggtggtctacccttggacccagaggtcgactcggaccgatg

SEQ ID NO: 15481 - DNA, 203 bp, synthetic construct
  source 1..203: mol_type = other DNA
ggcgcgccagtcctccgccttttactgacacacgtcaattcctttacaaccgtcaattcctttaatggcgtcaattcctttagaggcgtcaattcctttaactgccctgtggggcaaggtgacgtcaattcctttaggtggtgaggccctgggcaggccgtcaattcctttaccttggacccagaggtcgactcggaccgatg

SEQ ID NO: 15482 - DNA, 203 bp, synthetic construct
  source 1..203: mol_type = other DNA
ggcgcgccagtcctgggatccaccctgacacacgtcaattcctttacaaccgtcaattcctttaatggcgtcaattcctttagaggcgtcaattcctttaactgcgtcaattcctttagtgacgtcaattcctttaggtgcgtcaattcctttaaggctgctggtggtctacccttggacccagaggtcgactcggaccgatg

SEQ ID NO: 15483 - DNA, 203 bp, synthetic construct
  source 1..203: mol_type = other DNA
ggcgcgccagtcctacaagacattctgacacacgtcaattcctttacaaccgtcaattcctttaatggtgcatctgactcctgaggagaagtctgccgttactgccctgtggggcaaggtgaacgtggatgaagttggtgcgtcaattcctttaaggctgctggtggtctacccttggacccagaggtcgactcggaccgatg

SEQ ID NO: 15484 - DNA, 203 bp, synthetic construct
  source 1..203: mol_type = other DNA
ggcgcgccagtcctatgtctggacctgacacacgtcaattcctttacaaccgtcaattcctttaatggtgcatctgactcctgaggagaagtctgccgttactgccctgtggggcaaggtgaacgtggatgaagttggtggtgaggccctgggcaggccgtcaattcctttaccttggacccagaggtcgactcggaccgatg

SEQ ID NO: 15485 - DNA, 203 bp, synthetic construct
  source 1..203: mol_type = other DNA
ggcgcgccagtcctcatgtcttgcctgacacacgtcaattcctttacaaccgtcaattcctttaatggtgcatctgactcctgaggagaagtctgccgttactgccctgtggggcaaggtgaacgtggatgaagttggtggtgaggccctgggcaggctgctggtggtctacccttggacccagaggtcgactcggaccgatg

SEQ ID NO: 15486 - DNA, 203 bp, synthetic construct
  source 1..203: mol_type = other DNA
ggcgcgccagtccttatgtctgtactgacacacgtcaattcctttacaaccgtcaattcctttaatggtgcatctgactcctgaggagaagtctgccgttactgccctgtggggcaaggtgacgtcaattcctttaggtggtgaggccctgggcaggccgtcaattcctttaccttggacccagaggtcgactcggaccgatg

SEQ ID NO: 15487 - DNA, 203 bp, synthetic construct
  source 1..203: mol_type = other DNA
ggcgcgccagtcctagacatgtctctgacacacgtcaattcctttacaaccgtcaattcctttaatggtgcatctgactcctgaggagaagtctgccgttactgccctgtggggcaaggtgacgtcaattcctttaggtggtgaggccctgggcaggctgctggtggtctacccttggacccagaggtcgactcggaccgatg

SEQ ID NO: 15488 - DNA, 203 bp, synthetic construct
  source 1..203: mol_type = other DNA
ggcgcgccagtccttatgtctaacctgacacacgtcaattcctttacaaccgtcaattcctttaatggtgcatctgactcctgaggagaagtctgccgttactgcgtcaattcctttagtgaacgtggatgaagttggtgcgtcaattcctttaaggctgctggtggtctacccttggacccagaggtcgactcggaccgatg

SEQ ID NO: 15489 - DNA, 203 bp, synthetic construct
  source 1..203: mol_type = other DNA
ggcgcgccagtcctgtctgtcatactgacacacgtcaattcctttacaaccgtcaattcctttaatggtgcatctgactcctgaggagaagtctgccgttactgcgtcaattcctttagtgaacgtggatgaagttggtggtgaggccctgggcaggccgtcaattcctttaccttggacccagaggtcgactcggaccgatg

SEQ ID NO: 15490 - DNA, 203 bp, synthetic construct
  source 1..203: mol_type = other DNA
ggcgcgccagtcctcgtaatgtcactgacacacgtcaattcctttacaaccgtcaattcctttaatggtgcatctgactcctgaggagaagtctgccgttactgcgtcaattcctttagtgacgtcaattcctttaggtgcgtcaattcctttaaggctgctggtggtctacccttggacccagaggtcgactcggaccgatg

SEQ ID NO: 15491 - DNA, 203 bp, synthetic construct
  source 1..203: mol_type = other DNA
ggcgcgccagtcctgcgattagcactgacacacgtcaattcctttacaaccgtcaattcctttaatggtgcatctgactcctgaggagaagtctgccgttactgcgtcaattcctttagtgacgtcaattcctttaggtggtgaggccctgggcaggccgtcaattcctttaccttggacccagaggtcgactcggaccgatg

SEQ ID NO: 15492 - DNA, 203 bp, synthetic construct
  source 1..203: mol_type = other DNA
ggcgcgccagtcctgtatccattactgacacacgtcaattcctttacaaccgtcaattcctttaatggtgcatctgactcctgaggcgtcaattcctttaactgccctgtggggcaaggtgaacgtggatgaagttggtgcgtcaattcctttaaggccgtcaattcctttaccttggacccagaggtcgactcggaccgatg

SEQ ID NO: 15493 - DNA, 203 bp, synthetic construct
  source 1..203: mol_type = other DNA
ggcgcgccagtcctatcctaatccctgacacacgtcaattcctttacaaccgtcaattcctttaatggtgcatctgactcctgaggcgtcaattcctttaactgccctgtggggcaaggtgaacgtggatgaagttggtgcgtcaattcctttaaggctgctggtggtctacccttggacccagaggtcgactcggaccgatg

SEQ ID NO: 15494 - DNA, 203 bp, synthetic construct
  source 1..203: mol_type = other DNA
ggcgcgccagtcctttcattagggctgacacacgtcaattcctttacaaccgtcaattcctttaatggtgcatctgactcctgaggcgtcaattcctttaactgccctgtggggcaaggtgaacgtggatgaagttggtggtgaggccctgggcaggctgctggtggtctacccttggacccagaggtcgactcggaccgatg

SEQ ID NO: 15495 - DNA, 203 bp, synthetic construct
  source 1..203: mol_type = other DNA
ggcgcgccagtcctaaagcgtaatctgacacacgtcaattcctttacaaccgtcaattcctttaatggtgcatctgactcctgaggcgtcaattcctttaactgcgtcaattcctttagtgaacgtggatgaagttggtgcgtcaattcctttaaggccgtcaattcctttaccttggacccagaggtcgactcggaccgatg

SEQ ID NO: 15496 - DNA, 203 bp, synthetic construct
  source 1..203: mol_type = other DNA
ggcgcgccagtccttagattagagctgacacacgtcaattcctttacaaccgtcaattcctttaatggtgcatctgactcctgaggcgtcaattcctttaactgcgtcaattcctttagtgaacgtggatgaagttggtgcgtcaattcctttaaggctgctggtggtctacccttggacccagaggtcgactcggaccgatg

SEQ ID NO: 15497 - DNA, 203 bp, synthetic construct
  source 1..203: mol_type = other DNA
ggcgcgccagtcctcctggattacctgacacacgtcaattcctttacaaccgtcaattcctttaatggtgcatctgactcctgaggcgtcaattcctttaactgcgtcaattcctttagtgaacgtggatgaagttggtggtgaggccctgggcaggccgtcaattcctttaccttggacccagaggtcgactcggaccgatg

SEQ ID NO: 15498 - DNA, 203 bp, synthetic construct
  source 1..203: mol_type = other DNA
ggcgcgccagtcctctggtctaatctgacacacgtcaattcctttacaaccgtcaattcctttaatggtgcatctgactcctgaggcgtcaattcctttaactgcgtcaattcctttagtgaacgtggatgaagttggtggtgaggccctgggcaggctgctggtggtctacccttggacccagaggtcgactcggaccgatg

SEQ ID NO: 15499 - DNA, 203 bp, synthetic construct
  source 1..203: mol_type = other DNA
ggcgcgccagtcctaagctctaatctgacacacgtcaattcctttacaaccgtcaattcctttaatggtgcatctgactcctgaggcgtcaattcctttaactgcgtcaattcctttagtgacgtcaattcctttaggtggtgaggccctgggcaggccgtcaattcctttaccttggacccagaggtcgactcggaccgatg

SEQ ID NO: 15500 - DNA, 203 bp, synthetic construct
  source 1..203: mol_type = other DNA
ggcgcgccagtcctaactaatggtctgacacacgtcaattcctttacaaccgtcaattcctttaatggtgcatctgactcctgaggcgtcaattcctttaactgcgtcaattcctttagtgacgtcaattcctttaggtggtgaggccctgggcaggctgctggtggtctacccttggacccagaggtcgactcggaccgatg

SEQ ID NO: 15501 - DNA, 203 bp, synthetic construct
  source 1..203: mol_type = other DNA
ggcgcgccagtcctaccagtaatgctgacacacgtcaattcctttacaacctcaaacagacaccatggcgtcaattcctttagaggagaagtctgccgttactgccctgtggggcaaggtgaacgtggatgaagttggtgcgtcaattcctttaaggccgtcaattcctttaccttggacccagaggtcgactcggaccgatg

SEQ ID NO: 15502 - DNA, 203 bp, synthetic construct
  source 1..203: mol_type = other DNA
ggcgcgccagtccttcattactacctgacacacgtcaattcctttacaacctcaaacagacaccatggcgtcaattcctttagaggagaagtctgccgttactgccctgtggggcaaggtgaacgtggatgaagttggtgcgtcaattcctttaaggctgctggtggtctacccttggacccagaggtcgactcggaccgatg

SEQ ID NO: 15503 - DNA, 203 bp, synthetic construct
  source 1..203: mol_type = other DNA
ggcgcgccagtcctagtttgtaatctgacacacgtcaattcctttacaacctcaaacagacaccatggcgtcaattcctttagaggagaagtctgccgttactgccctgtggggcaaggtgaacgtggatgaagttggtggtgaggccctgggcaggctgctggtggtctacccttggacccagaggtcgactcggaccgatg

SEQ ID NO: 15504 - DNA, 203 bp, synthetic construct
  source 1..203: mol_type = other DNA
ggcgcgccagtcctaccctcattactgacacacgtcaattcctttacaacctcaaacagacaccatggcgtcaattcctttagaggagaagtctgccgttactgcgtcaattcctttagtgaacgtggatgaagttggtgcgtcaattcctttaaggctgctggtggtctacccttggacccagaggtcgactcggaccgatg

SEQ ID NO: 15505 - DNA, 203 bp, synthetic construct
  source 1..203: mol_type = other DNA
ggcgcgccagtcctagagtaatgtctgacacacgtcaattcctttacaacctcaaacagacaccatggcgtcaattcctttagaggagaagtctgccgttactgcgtcaattcctttagtgaacgtggatgaagttggtggtgaggccctgggcaggccgtcaattcctttaccttggacccagaggtcgactcggaccgatg

SEQ ID NO: 15506 - DNA, 203 bp, synthetic construct
  source 1..203: mol_type = other DNA
ggcgcgccagtcctctactaatgactgacacacgtcaattcctttacaacctcaaacagacaccatggcgtcaattcctttagaggagaagtctgccgttactgcgtcaattcctttagtgaacgtggatgaagttggtggtgaggccctgggcaggctgctggtggtctacccttggacccagaggtcgactcggaccgatg

SEQ ID NO: 15507 - DNA, 203 bp, synthetic construct
  source 1..203: mol_type = other DNA
ggcgcgccagtcctgggcattagtctgacacacgtcaattcctttacaacctcaaacagacaccatggcgtcaattcctttagaggagaagtctgccgttactgcgtcaattcctttagtgacgtcaattcctttaggtgcgtcaattcctttaaggctgctggtggtctacccttggacccagaggtcgactcggaccgatg

SEQ ID NO: 15508 - DNA, 203 bp, synthetic construct
  source 1..203: mol_type = other DNA
ggcgcgccagtcctctctcattagctgacacacgtcaattcctttacaacctcaaacagacaccatggcgtcaattcctttagaggcgtcaattcctttaactgccctgtggggcaaggtgaacgtggatgaagttggtgcgtcaattcctttaaggctgctggtggtctacccttggacccagaggtcgactcggaccgatg

SEQ ID NO: 15509 - DNA, 203 bp, synthetic construct
  source 1..203: mol_type = other DNA
ggcgcgccagtcctgttaatcgtgctgacacacgtcaattcctttacaacctcaaacagacaccatggcgtcaattcctttagaggcgtcaattcctttaactgccctgtggggcaaggtgacgtcaattcctttaggtgcgtcaattcctttaaggccgtcaattcctttaccttggacccagaggtcgactcggaccgatg

SEQ ID NO: 15510 - DNA, 203 bp, synthetic construct
  source 1..203: mol_type = other DNA
ggcgcgccagtcctattactcagcctgacacacgtcaattcctttacaacctcaaacagacaccatggcgtcaattcctttagaggcgtcaattcctttaactgccctgtggggcaaggtgacgtcaattcctttaggtgcgtcaattcctttaaggctgctggtggtctacccttggacccagaggtcgactcggaccgatg

SEQ ID NO: 15511 - DNA, 203 bp, synthetic construct
  source 1..203: mol_type = other DNA
ggcgcgccagtcctgtaatcactcctgacacacgtcaattcctttacaacctcaaacagacaccatggcgtcaattcctttagaggcgtcaattcctttaactgccctgtggggcaaggtgacgtcaattcctttaggtggtgaggccctgggcaggccgtcaattcctttaccttggacccagaggtcgactcggaccgatg

SEQ ID NO: 15512 - DNA, 203 bp, synthetic construct
  source 1..203: mol_type = other DNA
ggcgcgccagtccttccacattaactgacacacgtcaattcctttacaacctcaaacagacaccatggcgtcaattcctttagaggcgtcaattcctttaactgcgtcaattcctttagtgaacgtggatgaagttggtggtgaggccctgggcaggccgtcaattcctttaccttggacccagaggtcgactcggaccgatg

SEQ ID NO: 15513 - DNA, 203 bp, synthetic construct
  source 1..203: mol_type = other DNA
ggcgcgccagtcctgactaatctgctgacacacgtcaattcctttacaacctcaaacagacaccatggcgtcaattcctttagaggcgtcaattcctttaactgcgtcaattcctttagtgacgtcaattcctttaggtgcgtcaattcctttaaggctgctggtggtctacccttggacccagaggtcgactcggaccgatg

SEQ ID NO: 15514 - DNA, 203 bp, synthetic construct
  source 1..203: mol_type = other DNA
ggcgcgccagtcctttaatcgcaactgacacacgtcaattcctttacaacctcaaacagacaccatggcgtcaattcctttagaggcgtcaattcctttaactgcgtcaattcctttagtgacgtcaattcctttaggtggtgaggccctgggcaggccgtcaattcctttaccttggacccagaggtcgactcggaccgatg

SEQ ID NO: 15515 - DNA, 203 bp, synthetic construct
  source 1..203: mol_type = other DNA
ggcgcgccagtcctagtaatcgtcctgacacacgtcaattcctttacaacctcaaacagacaccatggcgtcaattcctttagaggcgtcaattcctttaactgcgtcaattcctttagtgacgtcaattcctttaggtggtgaggccctgggcaggctgctggtggtctacccttggacccagaggtcgactcggaccgatg

SEQ ID NO: 15516 - DNA, 203 bp, synthetic construct
  source 1..203: mol_type = other DNA
ggcgcgccagtcctatcgactaatctgacacacgtcaattcctttacaacctcaaacagacaccatggtgcatctgactcctgaggagaagtctgccgttactgccctgtggggcaaggtgaacgtggatgaagttggtgcgtcaattcctttaaggccgtcaattcctttaccttggacccagaggtcgactcggaccgatg

SEQ ID NO: 15517 - DNA, 203 bp, synthetic construct
  source 1..203: mol_type = other DNA
ggcgcgccagtcctccaaggattactgacacacgtcaattcctttacaacctcaaacagacaccatggtgcatctgactcctgaggagaagtctgccgttactgcgtcaattcctttagtgaacgtggatgaagttggtgcgtcaattcctttaaggccgtcaattcctttaccttggacccagaggtcgactcggaccgatg

SEQ ID NO: 15518 - DNA, 203 bp, synthetic construct
  source 1..203: mol_type = other DNA
ggcgcgccagtcctgattagggacctgacacacgtcaattcctttacaacctcaaacagacaccatggtgcatctgactcctgaggcgtcaattcctttaactgccctgtggggcaaggtgaacgtggatgaagttggtggtgaggccctgggcaggccgtcaattcctttaccttggacccagaggtcgactcggaccgatg

SEQ ID NO: 15519 - DNA, 203 bp, synthetic construct
  source 1..203: mol_type = other DNA
ggcgcgccagtccttccttgtaatctgacacacgtcaattcctttacaacctcaaacagacaccatggtgcatctgactcctgaggcgtcaattcctttaactgccctgtggggcaaggtgacgtcaattcctttaggtgcgtcaattcctttaaggctgctggtggtctacccttggacccagaggtcgactcggaccgatg

SEQ ID NO: 15520 - DNA, 203 bp, synthetic construct
  source 1..203: mol_type = other DNA
ggcgcgccagtcctcgtaacattactgacacacgtcaattcctttacaacctcaaacagacaccatggtgcatctgactcctgaggcgtcaattcctttaactgcgtcaattcctttagtgacgtcaattcctttaggtgcgtcaattcctttaaggccgtcaattcctttaccttggacccagaggtcgactcggaccgatg

SEQ ID NO: 15521 - DNA, 203 bp, synthetic construct
  source 1..203: mol_type = other DNA
ggcgcgccagtccttgattacctcctgacacacgtcaattcctttacaacctcaaacagacaccatggtgcatctgactcctgaggcgtcaattcctttaactgcgtcaattcctttagtgacgtcaattcctttaggtggtgaggccctgggcaggctgctggtggtctacccttggacccagaggtcgactcggaccgatg

SEQ ID NO: 15522 - DNA, 203 bp, synthetic construct
  source 1..203: mol_type = other DNA
ggcgcgccagtcctccctaatgaactgacacatactccctcactagcaactactcccagacaccatggtactcccgactcctgaggtactccctgccgttactgtactcccgggcaaggtgatactccctgaagttggtgtactccccctgggcaggctactcccggtctaccctttactcccgaggtcgactcggaccgatg

SEQ ID NO: 15523 - DNA, 203 bp, synthetic construct
  source 1..203: mol_type = other DNA
ggcgcgccagtcctctaactaatgctgacacattcttggcaaatagcaacctcaaacagacaccatggtgcatctgactcctgaggagaagtctgccgttactgccctgtggggcaaggtgaacgtggatgaagttggtggtgaggccctgggcaggctgctggtggtctacccttggacccagaggtcgactcggaccgatg

SEQ ID NO: 15524 - DNA, 203 bp, synthetic construct
  source 1..203: mol_type = other DNA
ggcgcgccagtcctcagcgtaatgctgacacattcttggcaaatagcaacctcaaacagacaccatggtgcatctgactcctgaggagaagtctgccgttactgccctgtggggcaaggtgaacgtggatgaagttggtggtgaggccctgggcaggcttcttggcaaatacccttggacccagaggtcgactcggaccgatg

SEQ ID NO: 15525 - DNA, 203 bp, synthetic construct
  source 1..203: mol_type = other DNA
ggcgcgccagtcctgcattagtgtctgacacattcttggcaaatagcaacctcaaacagacaccatggtgcatctgactcctgaggagaagtctgccgttactgccctgtggggcaaggtgaacgtggatgaagttggtgttcttggcaaaggcaggctgctggtggtctacccttggacccagaggtcgactcggaccgatg

SEQ ID NO: 15526 - DNA, 203 bp, synthetic construct
  source 1..203: mol_type = other DNA
ggcgcgccagtcctgagcgttaatctgacacattcttggcaaatagcaacctcaaacagacaccatggtgcatctgactcctgaggagaagtctgccgttactgccctgtggggcaaggtgattcttggcaaagttggtggtgaggccctgggcaggctgctggtggtctacccttggacccagaggtcgactcggaccgatg

SEQ ID NO: 15527 - DNA, 203 bp, synthetic construct
  source 1..203: mol_type = other DNA
ggcgcgccagtcctgcgacgattactgacacattcttggcaaatagcaacctcaaacagacaccatggtgcatctgactcctgaggagaagtctgccgttactgttcttggcaaaaaggtgaacgtggatgaagttggtggtgaggccctgggcaggcttcttggcaaatacccttggacccagaggtcgactcggaccgatg

SEQ ID NO: 15528 - DNA, 203 bp, synthetic construct
  source 1..203: mol_type = other DNA
ggcgcgccagtccttaatcttcacctgacacattcttggcaaatagcaacctcaaacagacaccatggtgcatctgactcctgaggagaagtctgccgttactgttcttggcaaaaaggtgaacgtggatgaagttggtgttcttggcaaaggcaggctgctggtggtctacccttggacccagaggtcgactcggaccgatg

SEQ ID NO: 15529 - DNA, 203 bp, synthetic construct
  source 1..203: mol_type = other DNA
ggcgcgccagtcctcagattactcctgacacattcttggcaaatagcaacctcaaacagacaccatggtgcatctgactcctgaggagaagtctgccgttactgttcttggcaaaaaggtgaacgtggatgaagttggtgttcttggcaaaggcaggcttcttggcaaatacccttggacccagaggtcgactcggaccgatg

SEQ ID NO: 15530 - DNA, 203 bp, synthetic construct
  source 1..203: mol_type = other DNA
ggcgcgccagtccttgtagattaactgacacattcttggcaaatagcaacctcaaacagacaccatggtgcatctgactcctgaggagaagtctgccgttactgttcttggcaaaaaggtgattcttggcaaagttggtggtgaggccctgggcaggctgctggtggtctacccttggacccagaggtcgactcggaccgatg

SEQ ID NO: 15531 - DNA, 203 bp, synthetic construct
  source 1..203: mol_type = other DNA
ggcgcgccagtccttctaatgaacctgacacattcttggcaaatagcaacctcaaacagacaccatggtgcatctgactcctgaggttcttggcaaagttactgccctgtggggcaaggtgaacgtggatgaagttggtggtgaggccctgggcaggctgctggtggtctacccttggacccagaggtcgactcggaccgatg

SEQ ID NO: 15532 - DNA, 203 bp, synthetic construct
  source 1..203: mol_type = other DNA
ggcgcgccagtcctattagttagtctgacacattcttggcaaatagcaacctcaaacagacaccatggtgcatctgactcctgaggttcttggcaaagttactgccctgtggggcaaggtgaacgtggatgaagttggtggtgaggccctgggcaggcttcttggcaaatacccttggacccagaggtcgactcggaccgatg

SEQ ID NO: 15533 - DNA, 203 bp, synthetic construct
  source 1..203: mol_type = other DNA
ggcgcgccagtccttggtaatcggctgacacattcttggcaaatagcaacctcaaacagacaccatggtgcatctgactcctgaggttcttggcaaagttactgttcttggcaaaaaggtgaacgtggatgaagttggtgttcttggcaaaggcaggctgctggtggtctacccttggacccagaggtcgactcggaccgatg

SEQ ID NO: 15534 - DNA, 203 bp, synthetic construct
  source 1..203: mol_type = other DNA
ggcgcgccagtcctatccattacactgacacattcttggcaaatagcaacctcaaacagacaccatggtgcatctgactcctgaggttcttggcaaagttactgttcttggcaaaaaggtgattcttggcaaagttggtggtgaggccctgggcaggctgctggtggtctacccttggacccagaggtcgactcggaccgatg

SEQ ID NO: 15535 - DNA, 203 bp, synthetic construct
  source 1..203: mol_type = other DNA
ggcgcgccagtccttgattagcgactgacacattcttggcaaatagcaacctcaaacagacaccatggttcttggcaaacctgaggagaagtctgccgttactgttcttggcaaaaaggtgaacgtggatgaagttggtgttcttggcaaaggcaggcttcttggcaaatacccttggacccagaggtcgactcggaccgatg

SEQ ID NO: 15536 - DNA, 203 bp, synthetic construct
  source 1..203: mol_type = other DNA
ggcgcgccagtcctgtggtaatggctgacacattcttggcaaatagcaacctcaaacagacaccatggttcttggcaaacctgaggagaagtctgccgttactgttcttggcaaaaaggtgattcttggcaaagttggtggtgaggccctgggcaggctgctggtggtctacccttggacccagaggtcgactcggaccgatg

SEQ ID NO: 15537 - DNA, 203 bp, synthetic construct
  source 1..203: mol_type = other DNA
ggcgcgccagtcctcgtcattaccctgacacattcttggcaaatagcaacctcaaacagacaccatggttcttggcaaacctgaggagaagtctgccgttactgttcttggcaaaaaggtgattcttggcaaagttggtgttcttggcaaaggcaggctgctggtggtctacccttggacccagaggtcgactcggaccgatg

SEQ ID NO: 15538 - DNA, 203 bp, synthetic construct
  source 1..203: mol_type = other DNA
ggcgcgccagtcctcaggattaacctgacacattcttggcaaatagcaacctcaaacagacaccatggttcttggcaaacctgaggttcttggcaaagttactgccctgtggggcaaggtgaacgtggatgaagttggtggtgaggccctgggcaggctgctggtggtctacccttggacccagaggtcgactcggaccgatg

SEQ ID NO: 15539 - DNA, 203 bp, synthetic construct
  source 1..203: mol_type = other DNA
ggcgcgccagtcctcgtggtaatcctgacacattcttggcaaatagcaacctcaaacagacaccatggttcttggcaaacctgaggttcttggcaaagttactgccctgtggggcaaggtgaacgtggatgaagttggtggtgaggccctgggcaggcttcttggcaaatacccttggacccagaggtcgactcggaccgatg

SEQ ID NO: 15540 - DNA, 203 bp, synthetic construct
  source 1..203: mol_type = other DNA
ggcgcgccagtcctattaggcccactgacacattcttggcaaatagcaacctcaaacagacaccatggttcttggcaaacctgaggttcttggcaaagttactgccctgtggggcaaggtgattcttggcaaagttggtggtgaggccctgggcaggctgctggtggtctacccttggacccagaggtcgactcggaccgatg

SEQ ID NO: 15541 - DNA, 203 bp, synthetic construct
  source 1..203: mol_type = other DNA
ggcgcgccagtccttacattaacgctgacacattcttggcaaatagcaacctcaaacagacaccatggttcttggcaaacctgaggttcttggcaaagttactgccctgtggggcaaggtgattcttggcaaagttggtgttcttggcaaaggcaggcttcttggcaaatacccttggacccagaggtcgactcggaccgatg

SEQ ID NO: 15542 - DNA, 203 bp, synthetic construct
  source 1..203: mol_type = other DNA
ggcgcgccagtcctattactagtcctgacacattcttggcaaatagcaacctcaaacagacaccatggttcttggcaaacctgaggttcttggcaaagttactgttcttggcaaaaaggtgaacgtggatgaagttggtggtgaggccctgggcaggctgctggtggtctacccttggacccagaggtcgactcggaccgatg

SEQ ID NO: 15543 - DNA, 203 bp, synthetic construct
  source 1..203: mol_type = other DNA
ggcgcgccagtccttgttaatgccctgacacattcttggcaaatagcaacctcaaacagacaccatggttcttggcaaacctgaggttcttggcaaagttactgttcttggcaaaaaggtgaacgtggatgaagttggtgttcttggcaaaggcaggctgctggtggtctacccttggacccagaggtcgactcggaccgatg

SEQ ID NO: 15544 - DNA, 203 bp, synthetic construct
  source 1..203: mol_type = other DNA
ggcgcgccagtccttttgcgctcactgacacattcttggcaaatagcaacttcttggcaaaaccatggtgcatctgactcctgaggagaagtctgccgttactgccctgtggggcaaggtgaacgtggatgaagttggtgttcttggcaaaggcaggcttcttggcaaatacccttggacccagaggtcgactcggaccgatg

SEQ ID NO: 15545 - DNA, 203 bp, synthetic construct
  source 1..203: mol_type = other DNA
ggcgcgccagtcctagttgcgctactgacacattcttggcaaatagcaacttcttggcaaaaccatggtgcatctgactcctgaggagaagtctgccgttactgccctgtggggcaaggtgattcttggcaaagttggtggtgaggccctgggcaggcttcttggcaaatacccttggacccagaggtcgactcggaccgatg

SEQ ID NO: 15546 - DNA, 203 bp, synthetic construct
  source 1..203: mol_type = other DNA
ggcgcgccagtcctgttgcgcattctgacacattcttggcaaatagcaacttcttggcaaaaccatggtgcatctgactcctgaggagaagtctgccgttactgccctgtggggcaaggtgattcttggcaaagttggtgttcttggcaaaggcaggctgctggtggtctacccttggacccagaggtcgactcggaccgatg

SEQ ID NO: 15547 - DNA, 203 bp, synthetic construct
  source 1..203: mol_type = other DNA
ggcgcgccagtcctatgcgcaacactgacacattcttggcaaatagcaacttcttggcaaaaccatggtgcatctgactcctgaggagaagtctgccgttactgttcttggcaaaaaggtgaacgtggatgaagttggtgttcttggcaaaggcaggctgctggtggtctacccttggacccagaggtcgactcggaccgatg

SEQ ID NO: 15548 - DNA, 203 bp, synthetic construct
  source 1..203: mol_type = other DNA
ggcgcgccagtcctccagcgaacactgacacattcttggcaaatagcaacttcttggcaaaaccatggtgcatctgactcctgaggagaagtctgccgttactgttcttggcaaaaaggtgattcttggcaaagttggtggtgaggccctgggcaggcttcttggcaaatacccttggacccagaggtcgactcggaccgatg

SEQ ID NO: 15549 - DNA, 203 bp, synthetic construct
  source 1..203: mol_type = other DNA
ggcgcgccagtcctcccagcgtacctgacacattcttggcaaatagcaacttcttggcaaaaccatggtgcatctgactcctgaggttcttggcaaagttactgccctgtggggcaaggtgaacgtggatgaagttggtggtgaggccctgggcaggctgctggtggtctacccttggacccagaggtcgactcggaccgatg

SEQ ID NO: 15550 - DNA, 203 bp, synthetic construct
  source 1..203: mol_type = other DNA
ggcgcgccagtcctagtcgctggtctgacacattcttggcaaatagcaacttcttggcaaaaccatggtgcatctgactcctgaggttcttggcaaagttactgccctgtggggcaaggtgaacgtggatgaagttggtggtgaggccctgggcaggcttcttggcaaatacccttggacccagaggtcgactcggaccgatg

SEQ ID NO: 15551 - DNA, 203 bp, synthetic construct
  source 1..203: mol_type = other DNA
ggcgcgccagtcctccagcggtagctgacacattcttggcaaatagcaacttcttggcaaaaccatggtgcatctgactcctgaggttcttggcaaagttactgccctgtggggcaaggtgattcttggcaaagttggtggtgaggccctgggcaggctgctggtggtctacccttggacccagaggtcgactcggaccgatg

SEQ ID NO: 15552 - DNA, 203 bp, synthetic construct
  source 1..203: mol_type = other DNA
ggcgcgccagtcctccagcgtagcctgacacattcttggcaaatagcaacttcttggcaaaaccatggtgcatctgactcctgaggttcttggcaaagttactgccctgtggggcaaggtgattcttggcaaagttggtgttcttggcaaaggcaggctgctggtggtctacccttggacccagaggtcgactcggaccgatg

SEQ ID NO: 15553 - DNA, 203 bp, synthetic construct
  source 1..203: mol_type = other DNA
ggcgcgccagtcctagaattgaatctgacacattcttggcaaatagcaacttcttggcaaaaccatggtgcatctgactcctgaggttcttggcaaagttactgccctgtggggcaaggtgattcttggcaaagttggtgttcttggcaaaggcaggcttcttggcaaatacccttggacccagaggtcgactcggaccgatg

SEQ ID NO: 15554 - DNA, 203 bp, synthetic construct
  source 1..203: mol_type = other DNA
ggcgcgccagtcctgacgcagactctgacacattcttggcaaatagcaacttcttggcaaaaccatggtgcatctgactcctgaggttcttggcaaagttactgttcttggcaaaaaggtgattcttggcaaagttggtggtgaggccctgggcaggcttcttggcaaatacccttggacccagaggtcgactcggaccgatg

SEQ ID NO: 15555 - DNA, 203 bp, synthetic construct
  source 1..203: mol_type = other DNA
ggcgcgccagtccttttggatcaactgacacattcttggcaaatagcaacttcttggcaaaaccatggttcttggcaaacctgaggagaagtctgccgttactgccctgtggggcaaggtgaacgtggatgaagttggtgttcttggcaaaggcaggctgctggtggtctacccttggacccagaggtcgactcggaccgatg

SEQ ID NO: 15556 - DNA, 203 bp, synthetic construct
  source 1..203: mol_type = other DNA
ggcgcgccagtccttgagcgtggactgacacattcttggcaaatagcaacttcttggcaaaaccatggttcttggcaaacctgaggagaagtctgccgttactgccctgtggggcaaggtgattcttggcaaagttggtgttcttggcaaaggcaggctgctggtggtctacccttggacccagaggtcgactcggaccgatg

SEQ ID NO: 15557 - DNA, 203 bp, synthetic construct
  source 1..203: mol_type = other DNA
ggcgcgccagtcctttgcgtggacctgacacattcttggcaaatagcaacttcttggcaaaaccatggttcttggcaaacctgaggagaagtctgccgttactgttcttggcaaaaaggtgaacgtggatgaagttggtggtgaggccctgggcaggcttcttggcaaatacccttggacccagaggtcgactcggaccgatg

SEQ ID NO: 15558 - DNA, 203 bp, synthetic construct
  source 1..203: mol_type = other DNA
ggcgcgccagtccttatgagatcgctgacacattcttggcaaatagcaacttcttggcaaaaccatggttcttggcaaacctgaggagaagtctgccgttactgttcttggcaaaaaggtgaacgtggatgaagttggtgttcttggcaaaggcaggcttcttggcaaatacccttggacccagaggtcgactcggaccgatg

SEQ ID NO: 15559 - DNA, 203 bp, synthetic construct
  source 1..203: mol_type = other DNA
ggcgcgccagtccttggatctcaactgacacattcttggcaaatagcaacttcttggcaaaaccatggttcttggcaaacctgaggagaagtctgccgttactgttcttggcaaaaaggtgattcttggcaaagttggtggtgaggccctgggcaggcttcttggcaaatacccttggacccagaggtcgactcggaccgatg

SEQ ID NO: 15560 - DNA, 203 bp, synthetic construct
  source 1..203: mol_type = other DNA
ggcgcgccagtccttgcgatctcactgacacattcttggcaaatagcaacttcttggcaaaaccatggttcttggcaaacctgaggagaagtctgccgttactgttcttggcaaaaaggtgattcttggcaaagttggtgttcttggcaaaggcaggctgctggtggtctacccttggacccagaggtcgactcggaccgatg

SEQ ID NO: 15561 - DNA, 203 bp, synthetic construct
  source 1..203: mol_type = other DNA
ggcgcgccagtcctcgtagaccctctgacacattcttggcaaatagcaacttcttggcaaaaccatggttcttggcaaacctgaggttcttggcaaagttactgccctgtggggcaaggtgaacgtggatgaagttggtggtgaggccctgggcaggcttcttggcaaatacccttggacccagaggtcgactcggaccgatg

SEQ ID NO: 15562 - DNA, 203 bp, synthetic construct
  source 1..203: mol_type = other DNA
ggcgcgccagtcctctgcctgaacctgacacattcttggcaaatagcaacttcttggcaaaaccatggttcttggcaaacctgaggttcttggcaaagttactgccctgtggggcaaggtgattcttggcaaagttggtgttcttggcaaaggcaggcttcttggcaaatacccttggacccagaggtcgactcggaccgatg

SEQ ID NO: 15563 - DNA, 203 bp, synthetic construct
  source 1..203: mol_type = other DNA
ggcgcgccagtccttgcctgggcgctgacacattcttggcaaatagcaacttcttggcaaaaccatggttcttggcaaacctgaggttcttggcaaagttactgttcttggcaaaaaggtgaacgtggatgaagttggtggtgaggccctgggcaggctgctggtggtctacccttggacccagaggtcgactcggaccgatg

SEQ ID NO: 15564 - DNA, 203 bp, synthetic construct
  source 1..203: mol_type = other DNA
ggcgcgccagtccttgcctgaatgctgacacattcttggcaaatagcaacttcttggcaaaaccatggttcttggcaaacctgaggttcttggcaaagttactgttcttggcaaaaaggtgaacgtggatgaagttggtgttcttggcaaaggcaggcttcttggcaaatacccttggacccagaggtcgactcggaccgatg

SEQ ID NO: 15565 - DNA, 203 bp, synthetic construct
  source 1..203: mol_type = other DNA
ggcgcgccagtcctcatgcctgatctgacacattcttggcaaatagcaacttcttggcaaaaccatggttcttggcaaacctgaggttcttggcaaagttactgttcttggcaaaaaggtgattcttggcaaagttggtggtgaggccctgggcaggctgctggtggtctacccttggacccagaggtcgactcggaccgatg

SEQ ID NO: 15566 - DNA, 203 bp, synthetic construct
  source 1..203: mol_type = other DNA
ggcgcgccagtcctgcctgcctgtctgacacattcttggcaaatagcaacttcttggcaaaaccatggttcttggcaaacctgaggttcttggcaaagttactgttcttggcaaaaaggtgattcttggcaaagttggtgttcttggcaaaggcaggcttcttggcaaatacccttggacccagaggtcgactcggaccgatg

SEQ ID NO: 15567 - DNA, 203 bp, synthetic construct
  source 1..203: mol_type = other DNA
ggcgcgccagtcctcaggcagtggctgacaccggcgggttcactagcaacctcaaacagacaccatggtgcatctgactcctgaggagaagtctgccgttactgccctgtggggcaaggtgaacgtggatgaagttggtggtgaggccctgggcaggctgctggtggtctacccttggaaccggccgtcgactcggaccgatg

SEQ ID NO: 15568 - DNA, 203 bp, synthetic construct
  source 1..203: mol_type = other DNA
ggcgcgccagtcctgactttaccgctgacatactcccgttcactagcaacctcaaacagacaccatggtgcatctgactcctgaggagaagtctgccgttactgccctgtggggcaaggtgaacgtggatgaagttggtggtgaggccctgggcaggctgctggtggtctacccttgttcttggcaaacgactcggaccgatg

SEQ ID NO: 15569 - DNA, 203 bp, synthetic construct
  source 1..203: mol_type = other DNA
ggcgcgccagtcctcggtacatgactgacattcttggcaaaactagcaacctcaaacagacaccatggtgcatctgactcctgaggagaagtctgccgttactgccctgtggggcaaggtgaacgtggatgaagttggtggtgaggccctgggcaggctgctggtggtctaccccgtcaattcctttacgactcggaccgatg

SEQ ID NO: 15570 - DNA, 203 bp, synthetic construct
  source 1..203: mol_type = other DNA
ggcgcgccagtcctcggtgtgaatctgacattcttggcaaaactagcaacctcaaacagacaccatggtgcatctgactcctgaggagaagtctgccgttactgccctgtggggcaaggtgaacgtggatgaagttggtggtgaggccctgggcaggctgctggtggtctacccttggacctactccccgactcggaccgatg

SEQ ID NO: 15571 - DNA, 203 bp, synthetic construct
  source 1..203: mol_type = other DNA
ggcgcgccagtcctcggtatctcactgcacggaatcgagaaactagcaacctcaaacagacaccatggtgcatctgactcctgaggagaagtctgccgttactgccctgtggggcaaggtgaacgtggatgaagttggtggtgaggccctgggcaggctgctggtggtctaccccgtcaattcctttacgactcggaccgatg

SEQ ID NO: 15572 - DNA, 203 bp, synthetic construct
  source 1..203: mol_type = other DNA
ggcgcgccagtcctcggctcaaatctgcctttagggcggagccggctcccaccggccgtagtctggggaccggccgtggacggtccaccggccgtcggccgtttaccggccgtgctggctgtaccggccgttcgcggccgaccggccgtcgctcctggaccggccgtagcgcgacaaccggccgtagccgactcggaccgatg

SEQ ID NO: 15573 - DNA, 203 bp, synthetic construct
  source 1..203: mol_type = other DNA
ggcgcgccagtcctcatgcgatttctgcctttagggcggagccggctcccgctctcctcagtctgcggcacggaatcgagaagtcccacggaatcgagaagtttcacggaatcgagaactgtcacggaatcgagaagccgcacggaatcgagaactggcacggaatcgagaagacaccatgtcggagccgactcggaccgatg

SEQ ID NO: 15574 - DNA, 203 bp, synthetic construct
  source 1..203: mol_type = other DNA
ggcgcgccagtcctcgcatggttactgcctttagggcggagccggctcccgctctcctcagtctgcggcgtcaattcctttagtcccgtcaattcctttagtttcgtcaattcctttactgtcgtcaattcctttagccgcgtcaattcctttactggcgtcaattcctttagacaccatgtcggagccgactcggaccgatg

SEQ ID NO: 15575 - DNA, 203 bp, synthetic construct
  source 1..203: mol_type = other DNA
ggcgcgccagtcctcgcatgatccctgcctttagggcggagccggctcccgctctcctcagtctgcggtactcccgcggacggtcctactcccggcggccgttttactcccttgctggctgttactcccagtcgcggccgtactcccatcgctcctggtactccccgagcgcgacatactcccggagccgactcggaccgatg

SEQ ID NO: 15576 - DNA, 203 bp, synthetic construct
  source 1..203: mol_type = other DNA
ggcgcgccagtccttcgcatgaatctgcctttagggcggagccggctcccgctctcctcagtctgcggtgggctagcggagggtccggcttccggcggccgtttaccggccgtgctggctgtaccggccgttcgcggccgaccggccgtcgctcctggaccggccgtagcgcgacaaccggccgtagccgactcggaccgatg

SEQ ID NO: 15577 - DNA, 203 bp, synthetic construct
  source 1..203: mol_type = other DNA
ggcgcgccagtccttcacgcatgtctgcctttagggcggagccggctcccgctctcctcagtctgcggtgggctagcggagggtccggcttccggcggccgtttctgtctcttgctggctgtcgtcaattcctttagccgcgtcaattcctttactggcgtcaattcctttagacaccatgtcggagccgactcggaccgatg

SEQ ID NO: 15578 - DNA, 203 bp, synthetic construct
  source 1..203: mol_type = other DNA
ggcgcgccagtcctcttgtcaattctgcctttagggcggagccggctcccgctctcctcagtctgcggtgggctagcggagggtccggcttccggcggccgtttctgtctcttgctggctgtctcgctgagtcgcggccgaccggccgtcgctcctggaccggccgtagcgcgacaaccggccgtagccgactcggaccgatg

SEQ ID NO: 15579 - DNA, 203 bp, synthetic construct
  source 1..203: mol_type = other DNA
ggcgcgccagtcctaattgacaacctgcctttagggcggagccggctcccgctctcctcagtctgcggtgggctagcggagggtccggcttccggcggccgtttctgtctcttgctggctgtctcgctgagtcgcggccgcacggaatcgagaactggcacggaatcgagaagacaccatgtcggagccgactcggaccgatg

SEQ ID NO: 15580 - DNA, 203 bp, synthetic construct
  source 1..203: mol_type = other DNA
ggcgcgccagtcctcattacgtttctgcctttagggcggagccggctcccgctctcctcagtctgcggtgggctagcggagggtccggcttccggcggccgtttctgtctcttgctggctgtctcgctgagtcgcggccgccttctcatcgctcctggaaggtcccgagcgcgacaaccggccgtagccgactcggaccgatg

SEQ ID NO: 15581 - DNA, 203 bp, synthetic construct
  source 1..203: mol_type = other DNA
ggcgcgccagtcctcctttacgttctgcctttagggcggagccggctcccgctctcctcagtctgcggtgggctagcggagggtccggcttccggcggccgtttctgtctcttgctggctgtctcgctgagtcgcggccgccttctcatcgctcctggaaggtcccgagcgcgacatactcccggagccgactcggaccgatg

SEQ ID NO: 15582 - DNA, 203 bp, synthetic construct
  source 1..203: mol_type = other DNA
ggcgcgccagtcctcacgtaagtactgcctttagggcggagccggctcccgctctcctcagtctgcggtgggctagcggagggtccggcttccggcggccgtttctgtctcttgctggctgtctcgctgagtcgcggccgccttctcatcgctcctggaccggccgtagcgcgacaaccggccgtagccgactcggaccgatg

SEQ ID NO: 15583 - DNA, 203 bp, synthetic construct
  source 1..203: mol_type = other DNA
ggcgcgccagtcctacgcacgtagctgcctttagggcggagccggctcccgctctcctcagtctgcggtgggctagcggagggtccggcttccggcggccgtttctgtctcttgctggctgtctcgctgagtcgcggccgccttctcatcgctcctggcgtcaattcctttagacaccatgtcggagccgactcggaccgatg

SEQ ID NO: 15584 - DNA, 203 bp, synthetic construct
  source 1..203: mol_type = other DNA
ggcgcgccagtcctcctcgcacgactgcctttagggcggagccggctcccgctctcctcagtctgcggtgggctagcggagggtccggcttccggcggccgtttctgtctcttgctggctgtctcgctgagtcgcggccgccttctcatcgctcctggtactccccgagcgcgacatactcccggagccgactcggaccgatg

SEQ ID NO: 15585 - DNA, 203 bp, synthetic construct
  source 1..203: mol_type = other DNA
ggcgcgccagtcctccgcacgatcctgcctttagggcggagccggctcccgctctcctcagtctgcggtgggctagcggagggtccggcttccggcggccgtttctgtctcttgctggctgtctcgctgagtcgcggccgcgtcaattcctttactggcgtcaattcctttagacaccatgtcggagccgactcggaccgatg

SEQ ID NO: 15586 - DNA, 203 bp, synthetic construct
  source 1..203: mol_type = other DNA
ggcgcgccagtcctcgcacgacggctgcctttagggcggagccggctcccgctctcctcagtctgcggtgggctagcggagggtccggcttccggcggccgtttctgtctcttgctggctgtctcgctgagtcgcggccgttcttggcaaactcctggttcttggcaaacgcgacattcttggcaaaccgactcggaccgatg

SEQ ID NO: 15587 - DNA, 203 bp, synthetic construct
  source 1..203: mol_type = other DNA
ggcgcgccagtcctcgtgcgttggctgcctttagggcggagccggctcccgctctcctcagtctgcggtgggctagcggagggtccggcttccggcggccgtttctgtctcttgctggctgtttcttggcaaagcggccgttcttggcaaactcctggttcttggcaaacgcgacattcttggcaaaccgactcggaccgatg

SEQ ID NO: 15588 - DNA, 203 bp, synthetic construct
  source 1..203: mol_type = other DNA
ggcgcgccagtccttaccgtgcgtctgcctttagggcggagccggctcccgctctcctcagtctgcggtgggctagcggagggtccggcttccggcggccgtttttcttggcaaatggctgtttcttggcaaagcggccgttcttggcaaactcctggttcttggcaaacgcgacattcttggcaaaccgactcggaccgatg

SEQ ID NO: 15589 - DNA, 203 bp, synthetic construct
  source 1..203: mol_type = other DNA
ggcgcgccagtcctgagacgtgcgctgcctttagggcggagccggctcccgctctcctcagtctgcggttcttggcaaaacggtccttcttggcaaagccgtttttcttggcaaatggctgtttcttggcaaagcggccgttcttggcaaactcctggttcttggcaaacgcgacattcttggcaaaccgactcggaccgatg

SEQ ID NO: 15590 - DNA, 203 bp, synthetic construct
  source 1..203: mol_type = other DNA
ggcgcgccagtcctcgtgcgtaacctgcctttagggcggagccggctccctactccctcagtctgcggtactcccgcggacggtcctactcccggcggccgttttactcccttgctggctgttactcccagtcgcggccgtactcccatcgctcctggtactccccgagcgcgacatactcccggagccgactcggaccgatg

SEQ ID NO: 15591 - DNA, 203 bp, synthetic construct
  source 1..203: mol_type = other DNA
ggcgcgccagtcctgattgtgaccctgccttttactcccagccggctccctactccctcagtctgcggtactcccgcggacggtcctactcccggcggccgttttactcccttgctggctgttactcccagtcgcggccgtactcccatcgctcctggtactccccgagcgcgacatactcccggagccgactcggaccgatg

SEQ ID NO: 15592 - DNA, 203 bp, synthetic construct
  source 1..203: mol_type = other DNA
ggcgcgccagtcctttcacaatgcctgcctttttcttggcaaaggctcccttcttggcaaatctgcggttcttggcaaaacggtccttcttggcaaagccgtttttcttggcaaatggctgtttcttggcaaagcggccgttcttggcaaactcctggttcttggcaaacgcgacattcttggcaaaccgactcggaccgatg

SEQ ID NO: 15593 - DNA, 203 bp, synthetic construct
  source 1..203: mol_type = other DNA
ggcgcgccagtcctgcgctgatcgctgcgtcaattcctttaactagcaacctcaaacagacaccatggtgcatctgactcctgaggagaagtctgccgttactgccctgtggggcaaggtgaacgtggatgaagttggtggtgaggccctgggcaggctgctggtggtctacccttggacccagaggtcgactcggaccgatg

SEQ ID NO: 15594 - DNA, 203 bp, synthetic construct
  source 1..203: mol_type = other DNA
ggcgcgccagtcctttcagcgctactgcgtcaattcctttaactagcaacctcaaacagacaccatggtgcatctgactcctgaggagaagtctgccgttactgccctgtggggcaaggtgaacgtggatgaagttggtggtgaggccctgggcaggctgctggtggtctacccttggacctactccccgactcggaccgatg

SEQ ID NO: 15595 - DNA, 203 bp, synthetic construct
  source 1..203: mol_type = other DNA
ggcgcgccagtcctggcgctgagtctgtactccctgtgttcactagcaacctcaaacagacaccatggtgcatctgactcctgaggagaagtctgccgttactgccctgtggggcaaggtgaacgtggatgaagttggtggtgaggccctgggcaggctgctggtggtctaccccacggaatcgagaacgactcggaccgatg

SEQ ID NO: 15596 - DNA, 203 bp, synthetic construct
  source 1..203: mol_type = other DNA
ggcgcgccagtcctcgcgctgtccctgtactccctgtgttcactagcaacctcaaacagacaccatggtgcatctgactcctgaggagaagtctgccgttactgccctgtggggcaaggtgaacgtggatgaagttggtggtgaggccctgggcaggctgctggtggtctaccccgtcaattcctttacgactcggaccgatg

SEQ ID NO: 15597 - DNA, 203 bp, synthetic construct
  source 1..203: mol_type = other DNA
ggcgcgccagtcctcgtcgaatccgaacaaaaccggcgggtaaaacaagaccggcgggtggaagaaaaccggcgggttacacaaaaccggcgggtgaaaaaaggccggcgggtaaaacggagccggcgggtaaaatttaaccggcgggtgaatttaaaccggcgggtaacaccaagccggcgggtaaacgactcggaccgatg

SEQ ID NO: 15598 - DNA, 203 bp, synthetic construct
  source 1..203: mol_type = other DNA
ggcgcgccagtccttcaaattcgagaacaaaagcaaaaacaaaaacaagaacaaaaaagggaagaaaaacaaaagtatacacaaaaaccaaaaaagaaaaaaggccagagacaaaaacggagccggcgggtaaaatttaaccggcgggtgaatttaaaccggcgggtaacaccaagccggcgggtaaacgactcggaccgatg

SEQ ID NO: 15599 - DNA, 203 bp, synthetic construct
  source 1..203: mol_type = other DNA
ggcgcgccagtcctgtgctaccgagaacaaaagcaaaaacaaaaacaagaacaaaaaagggaagaaaaacaaaagtatacacaaaaaccaaaaaagaaaaaaggtactccccaaaaacggagtactccccaaaaatttaatactccccagaatttaaatactccctaaacaccaagtactccccaaaacgactcggaccgatg

SEQ ID NO: 15600 - DNA, 203 bp, synthetic construct
  source 1..203: mol_type = other DNA
ggcgcgccagtcctgctggaccgagaacaaaagcaaaaacaaaaacaagaacaaaaaagggaagaaaaacaaaagtatacacaaaacacggaatcgagaaaaggcacggaatcgagaaggagcacggaatcgagaattaacacggaatcgagaataaacacggaatcgagaacaagatagagacaaaacgactcggaccgatg

SEQ ID NO: 15601 - DNA, 203 bp, synthetic construct
  source 1..203: mol_type = other DNA
ggcgcgccagtcctgggcactcgggaacaaaagcaaaaacaaaaacaagaacaaaaaagggaagaaaatactccctatacacaaaatactcccaagaaaaaaggtactccccaaaaacggagtactccccaaaaatttaatactccccagaatttaaatactccctaaacaccaagtactccccaaaacgactcggaccgatg

SEQ ID NO: 15602 - DNA, 203 bp, synthetic construct
  source 1..203: mol_type = other DNA
ggcgcgccagtcctccctgtgcccgaacaaaagcaaaaacaaaaacaagaacaaaaaagggaagaaaattcttggcaaacacaaaattcttggcaaaaaaaaggttcttggcaaaaacggagttcttggcaaaaatttaattcttggcaaaatttaaattcttggcaaacaccaagttcttggcaaaacgactcggaccgatg

SEQ ID NO: 15603 - DNA, 203 bp, synthetic construct
  source 1..203: mol_type = other DNA
ggcgcgccagtcctagtgccctgcgaacaaaagcaaaaacaaaaacaagacacggaatcgagaaaaaacacggaatcgagaaaaaacacggaatcgagaaaaggcacggaatcgagaaggagcacggaatcgagaattaacacggaatcgagaataaacacggaatcgagaacaagatagagacaaaacgactcggaccgatg

SEQ ID NO: 15604 - DNA, 203 bp, synthetic construct
  source 1..203: mol_type = other DNA
ggcgcgccagtcctactaagtcccgaacaaaagcaaaaacaaaaacaagattcttggcaaaaagaaaattcttggcaaacacaaaattcttggcaaaaaaaaggttcttggcaaaaacggagttcttggcaaaaatttaattcttggcaaaatttaaattcttggcaaacaccaagttcttggcaaaacgactcggaccgatg

SEQ ID NO: 15605 - DNA, 203 bp, synthetic construct
  source 1..203: mol_type = other DNA
ggcgcgccagtccttggacttaaagaacaaaattcttggcaaaaacaagattcttggcaaaaagaaaattcttggcaaacacaaaattcttggcaaaaaaaaggttcttggcaaaaacggagttcttggcaaaaatttaattcttggcaaaatttaaattcttggcaaacaccaagttcttggcaaaacgactcggaccgatg

SEQ ID NO: 15606 - DNA, 203 bp, synthetic construct
  source 1..203: mol_type = other DNA
ggcgcgccagtcctagggacttacgagatacacacggaatcgagaaactccacggaatcgagaaaactcacggaatcgagaacggacacggaatcgagaaaattcacggaatcgagaataggcacggaatcgagaaaatccacggaatcgagaagatccacggaatcgagaaccagaatcatacaatccgactcggaccgatg

SEQ ID NO: 15607 - DNA, 203 bp, synthetic construct
  source 1..203: mol_type = other DNA
ggcgcgccagtccttaatcccagtgagatacaccggcgggtcacacactcccggcgggtaatcaaactccggcgggttcattgggaccggcgggtctcataattccggcgggtaatcataggccggcgggtttagaaatcccggcgggtttcgtgatcccggcgggtccacaccagccggcgggtatccgactcggaccgatg

SEQ ID NO: 15608 - DNA, 203 bp, synthetic construct
  source 1..203: mol_type = other DNA
ggcgcgccagtcctgttaatcccagagatacacgtcaattcctttaactccgtcaattcctttaaactcgtcaattcctttacggacgtcaattcctttaaattcgtcaattcctttataggcgtcaattcctttaaatccgtcaattcctttagatccgtcaattcctttaccagaatcatacaatccgactcggaccgatg

SEQ ID NO: 15609 - DNA, 203 bp, synthetic construct
  source 1..203: mol_type = other DNA
ggcgcgccagtcctagggattagggagatacagctgccactcacacactcaccggccgtaatcaaactaccggccgttcattcggaaccggccgtctcataattaccggccgtaatcataggaccggccgtttagaaatcaccggccgtttcgtgatcaccggccgtccacaccagaccggccgtatccgactcggaccgatg

SEQ ID NO: 15610 - DNA, 203 bp, synthetic construct
  source 1..203: mol_type = other DNA
ggcgcgccagtccttaccagggacgagatacagctgccactcacacactcatccagacaaatcaaactagactcacatcattcggaaacaattctctcataatttaaagaaaaaatcataggccggacgggttagaaatcccggcgggtttcgtgatcccggcgggtccacaccagccggcgggtatccgactcggaccgatg

SEQ ID NO: 15611 - DNA, 203 bp, synthetic construct
  source 1..203: mol_type = other DNA
ggcgcgccagtccttccagggtcggagatacagctgccactcacacactcatccagacaaatcaaactagactcacatcattcggaaacaattctctcataatttaaagaaaaaatcataggccggacgggttagaaatccggtgcttgttcgtgatcaccggccgtccacaccagaccggccgtatccgactcggaccgatg

SEQ ID NO: 15612 - DNA, 203 bp, synthetic construct
  source 1..203: mol_type = other DNA
ggcgcgccagtccttccctggtaagagatacagctgccactcacacactcatccagacaaatcaaactagactcacatcattcggaaacaattctctcataatttaaagaaaaaatcataggccggacgggttagaaatccggtgcttgttcgtgatccacggaatcgagaaccagaatcatacaatccgactcggaccgatg

SEQ ID NO: 15613 - DNA, 203 bp, synthetic construct
  source 1..203: mol_type = other DNA
ggcgcgccagtccttctaggctgggagatacagctgccactcacacactcatccagacaaatcaaactagactcacatcattcggaaacaattctctcataatttaaagaaaaaatcataggccggacgggttagaaatccgtcaattcctttagatccgtcaattcctttaccagaatcatacaatccgactcggaccgatg

SEQ ID NO: 15614 - DNA, 203 bp, synthetic construct
  source 1..203: mol_type = other DNA
ggcgcgccagtcctggtgacgttagagatacagctgccactcacacactcatccagacaaatcaaactagactcacatcattcggaaacaattctctcataatttaaagaaaaaatcataggccggacgggttagaaatcttcttggcaaacgtgatcttcttggcaaaacaccagttcttggcaaaccgactcggaccgatg

SEQ ID NO: 15615 - DNA, 203 bp, synthetic construct
  source 1..203: mol_type = other DNA
ggcgcgccagtcctggctgggtaagagatacagctgccactcacacactcatccagacaaatcaaactagactcacatcattcggaaacaattctctcataatttaaagaaaaaatcataggccggcgggtttagaaatcccggcgggtttcgtgatcccggcgggtccacaccagccggcgggtatccgactcggaccgatg

SEQ ID NO: 15616 - DNA, 203 bp, synthetic construct
  source 1..203: mol_type = other DNA
ggcgcgccagtcctttacccagctgagatacagctgccactcacacactcatccagacaaatcaaactagactcacatcattcggaaacaattctctcataatttaaagaaaaaatcataggcgtcaattcctttaaatccgtcaattcctttagatccgtcaattcctttaccagaatcatacaatccgactcggaccgatg

SEQ ID NO: 15617 - DNA, 203 bp, synthetic construct
  source 1..203: mol_type = other DNA
ggcgcgccagtccttgcctgcagcgagatacagctgccactcacacactcatccagacaaatcaaactagactcacatcattcggaaacaattctctcataatttactcccaaaatcataggtactcccggttagaaatctactccctgttcgtgatctactcccctccacaccagtactccccaatccgactcggaccgatg

SEQ ID NO: 15618 - DNA, 203 bp, synthetic construct
  source 1..203: mol_type = other DNA
ggcgcgccagtccttcacacgaccgagatacagctgccactcacacactcatccagacaaatcaaactagactcacatcattcggacacggaatcgagaaaattcacggaatcgagaataggcacggaatcgagaaaatccacggaatcgagaagatccacggaatcgagaaccagaatcatacaatccgactcggaccgatg

SEQ ID NO: 15619 - DNA, 203 bp, synthetic construct
  source 1..203: mol_type = other DNA
ggcgcgccagtcctactcacacgtgagatacagctgccactcacacactcatccagacaaatcaaactagactcacatcattcggacgtcaattcctttaaattcgtcaattcctttataggcgtcaattcctttaaatccgtcaattcctttagatccgtcaattcctttaccagaatcatacaatccgactcggaccgatg

SEQ ID NO: 15620 - DNA, 203 bp, synthetic construct
  source 1..203: mol_type = other DNA
ggcgcgccagtcctgcgcacacgcgagatacagctgccactcacacactcatccagacaaatcaaactccggcgggttcattgggaccggcgggtctcataattccggcgggtaatcataggccggcgggtttagaaatcccggcgggtttcgtgatcccggcgggtccacaccagccggcgggtatccgactcggaccgatg

SEQ ID NO: 15621 - DNA, 203 bp, synthetic construct
  source 1..203: mol_type = other DNA
ggcgcgccagtcctatacacacgcgagatacagctgccactcacacactcatccagacaaatcaaactcgtcaattcctttacggacgtcaattcctttaaattcgtcaattcctttataggcgtcaattcctttaaatccgtcaattcctttagatccgtcaattcctttaccagaatcatacaatccgactcggaccgatg

SEQ ID NO: 15622 - DNA, 203 bp, synthetic construct
  source 1..203: mol_type = other DNA
ggcgcgccagtcctcgtgtgtgctgagatacagctgccactcacacactcatccagacaaatcaaacttactccccatcattcggatactcccctctcataatttactcccaaaatcataggtactcccggttagaaatctactccctgttcgtgatctactcccctccacaccagtactccccaatccgactcggaccgatg

SEQ ID NO: 15623 - DNA, 203 bp, synthetic construct
  source 1..203: mol_type = other DNA
ggcgcgccagtcctcgtgtgacgagagatacattcttggcaaacacactcttcttggcaaatcaaactttcttggcaaaattcggattcttggcaaacataattttcttggcaaatcataggttcttggcaaaagaaatcttcttggcaaacgtgatcttcttggcaaaacaccagttcttggcaaaccgactcggaccgatg

SEQ ID NO: 15624 - DNA, 203 bp, synthetic construct
  source 1..203: mol_type = other DNA
ggcgcgccagtcctagcgtgtgcagatgccggcacggaatcgagaacgtccacggaatcgagaaccctcacggaatcgagaaattacacggaatcgagaacggacacggaatcgagaaccgacacggaatcgagaactggcacggaatcgagaattcgcacggaatcgagaacaagtaagacccaatccgactcggaccgatg

SEQ ID NO: 15625 - DNA, 203 bp, synthetic construct
  source 1..203: mol_type = other DNA
ggcgcgccagtcctatcgtgtggtgatgccggccggcgggtaccgccgtcccggcgggtcggttccctccggcgggttcccgattaccggcgggtccgcagggaccggcgggtaccacccgaccggcgggtgactcctggccggcgggtctcatttcgccggcgggtttactcaagccggcgggtatccgactcggaccgatg

SEQ ID NO: 15626 - DNA, 203 bp, synthetic construct
  source 1..203: mol_type = other DNA
ggcgcgccagtcctgacatattgcgatgccggcctccgtggaccgccgtcccctgtaaccggttccctcacggaatcgagaaattacacggaatcgagaacggacacggaatcgagaaccgacacggaatcgagaactggcacggaatcgagaattcgcacggaatcgagaacaagtaagacccaatccgactcggaccgatg

SEQ ID NO: 15627 - DNA, 203 bp, synthetic construct
  source 1..203: mol_type = other DNA
ggcgcgccagtcctagaagccgctgatgccggcctccgtggaccgccgtcccctgtaaccggttccctgcacggccgtcccgattaaccgattccccgcacggaaccggccgtaccacccgaaccggccgtgactcctggaccggccgtctcatttcgaccggccgtttactcaagaccggccgtatccgactcggaccgatg

SEQ ID NO: 15628 - DNA, 203 bp, synthetic construct
  source 1..203: mol_type = other DNA
ggcgcgccagtcctctcaagccgcgatgccggcctccgtggaccgccgtcccctgtaaccggttccctgcacggccgtcccgattaaccgattccccgcacggacgtcaattcctttaccgacgtcaattcctttactggcgtcaattcctttattcgcgtcaattcctttacaagtaagacccaatccgactcggaccgatg

SEQ ID NO: 15629 - DNA, 203 bp, synthetic construct
  source 1..203: mol_type = other DNA
ggcgcgccagtcctgccgcaatgcgatgccggcctccgtggaccgccgtcccctgtaaccggttccctgcacggccgtcccgattaaccgattccccgcacggagcaccgcggaccacccgaaccggccgtgactcctggaccggccgtctcatttcgaccggccgtttactcaagaccggccgtatccgactcggaccgatg

SEQ ID NO: 15630 - DNA, 203 bp, synthetic construct
  source 1..203: mol_type = other DNA
ggcgcgccagtcctccctgccgctgatgccggcctccgtggaccgccgtcccctgtaaccggttccctgcacggccgtcccgattaaccgattccccgcacggagcaccgcggaccacccgaccgcgagccgactcctggaccggccgtctcatttcgaccggccgtttactcaagaccggccgtatccgactcggaccgatg

SEQ ID NO: 15631 - DNA, 203 bp, synthetic construct
  source 1..203: mol_type = other DNA
ggcgcgccagtcctcgtgccgccagatgccggcctccgtggaccgccgtcccctgtaaccggttccctgcacggccgtcccgattaaccgattccccgcacggagcaccgcggaccacccgaccgcgagccgactcctggagttcgttcctcatttcgacggcggcattactcaagtaagacccaatccgactcggaccgatg

SEQ ID NO: 15632 - DNA, 203 bp, synthetic construct
  source 1..203: mol_type = other DNA
ggcgcgccagtcctatgccgctaagatgccggcctccgtggaccgccgtcccctgtaaccggttccctgcacggccgtcccgattaaccgattccccgcacggagcaccgcggaccacccgaccgcgagccgactcctggagttcgttcctcatttcgacggcggcattactcaagttcttggcaaaccgactcggaccgatg

SEQ ID NO: 15633 - DNA, 203 bp, synthetic construct
  source 1..203: mol_type = other DNA
ggcgcgccagtcctcgccgcatatgatgccggcctccgtggaccgccgtcccctgtaaccggttccctgcacggccgtcccgattaaccgattccccgcacggagcaccgcggaccacccgaccgcgagccgactcctggagttcgttcctcatttcgcacggaatcgagaacaagtaagacccaatccgactcggaccgatg

SEQ ID NO: 15634 - DNA, 203 bp, synthetic construct
  source 1..203: mol_type = other DNA
ggcgcgccagtcctctaagccgccgatgccggcctccgtggaccgccgtcccctgtaaccggttccctgcacggccgtcccgattaaccgattccccgcacggagcaccgcggaccacccgaccgcgagccgactcctggcacggaatcgagaattcgcacggaatcgagaacaagtaagacccaatccgactcggaccgatg

SEQ ID NO: 15635 - DNA, 203 bp, synthetic construct
  source 1..203: mol_type = other DNA
ggcgcgccagtcctgccgcggtcagatgccggcctccgtggaccgccgtcccctgtaaccggttccctgcacggccgtcccgattaaccgattccccgcacggagcaccgcggaccacccgaccgcgagccgactcctggcgtcaattcctttattcgcgtcaattcctttacaagtaagacccaatccgactcggaccgatg

SEQ ID NO: 15636 - DNA, 203 bp, synthetic construct
  source 1..203: mol_type = other DNA
ggcgcgccagtcctagctgccgccgatgccggcctccgtggaccgccgtcccctgtaaccggttccctgcacggccgtcccgattaaccgattccccgcacggagcaccgcggaccacccgaccgcgagccgactcctggttcttggcaaacatttcgttcttggcaaaactcaagttcttggcaaaccgactcggaccgatg

SEQ ID NO: 15637 - DNA, 203 bp, synthetic construct
  source 1..203: mol_type = other DNA
ggcgcgccagtcctgccgcatgaggatgccggcctccgtggaccgccgtcccctgtaaccggttccctgcacggccgtcccgattaaccgattccccgcacggagcaccgcggaccacccgaccggcgggtgactcctggccggcgggtctcatttcgccggcgggtttactcaagccggcgggtatccgactcggaccgatg

SEQ ID NO: 15638 - DNA, 203 bp, synthetic construct
  source 1..203: mol_type = other DNA
ggcgcgccagtcctgccgcaaacggatgccggcctccgtggaccgccgtcccctgtaaccggttccctgcacggccgtcccgattaaccgattccccgcacggagcaccgcggaccacccgacgtcaattcctttactggcgtcaattcctttattcgcgtcaattcctttacaagtaagacccaatccgactcggaccgatg

SEQ ID NO: 15639 - DNA, 203 bp, synthetic construct
  source 1..203: mol_type = other DNA
ggcgcgccagtccttttgccgctagatgccggcctccgtggaccgccgtcccctgtaaccggttccctgcacggccgtcccgattaaccgattccccgcacggagcaccgcggaccacccgatactcccccgactcctggtactccctcctcatttcgtactccccattactcaagtactccccaatccgactcggaccgatg

SEQ ID NO: 15640 - DNA, 203 bp, synthetic construct
  source 1..203: mol_type = other DNA
ggcgcgccagtcctgtgcggcaacgatgccggcctccgtggaccgccgtcccctgtaaccggttccctgcacggccgtcccgattaaccgattccccgcacggatactcccggaccacccgatactcccccgactcctggtactccctcctcatttcgtactccccattactcaagtactccccaatccgactcggaccgatg

SEQ ID NO: 15641 - DNA, 203 bp, synthetic construct
  source 1..203: mol_type = other DNA
ggcgcgccagtccttggcggctcagatgccggcctccgtggaccgccgtcccctgtaaccggttccctgcacggccgtcccgattaccggcgggtccgcagggaccggcgggtaccacccgaccggcgggtgactcctggccggcgggtctcatttcgccggcgggtttactcaagccggcgggtatccgactcggaccgatg

SEQ ID NO: 15642 - DNA, 203 bp, synthetic construct
  source 1..203: mol_type = other DNA
ggcgcgccagtccttgcggcgaacgatgccggcctccgtggaccgccgtcccctgtaaccggttccctgcacggccgtcccgattacgtcaattcctttacggacgtcaattcctttaccgacgtcaattcctttactggcgtcaattcctttattcgcgtcaattcctttacaagtaagacccaatccgactcggaccgatg

SEQ ID NO: 15643 - DNA, 203 bp, synthetic construct
  source 1..203: mol_type = other DNA
ggcgcgccagtcctcgctgcggcagatgccggcctccgtggaccgccgtcccctgtaaccggttccctgcacggccgtcccgattattcttggcaaagcacggattcttggcaaacacccgattcttggcaaactcctggttcttggcaaacatttcgttcttggcaaaactcaagttcttggcaaaccgactcggaccgatg

SEQ ID NO: 15644 - DNA, 203 bp, synthetic construct
  source 1..203: mol_type = other DNA
ggcgcgccagtcctagagcggcacgatgccggcctccgtggaccgccgtctactcccaccggttcccttactccccgtcccgattatactcccccccgcacggatactcccggaccacccgatactcccccgactcctggtactccctcctcatttcgtactccccattactcaagtactccccaatccgactcggaccgatg

SEQ ID NO: 15645 - DNA, 203 bp, synthetic construct
  source 1..203: mol_type = other DNA
ggcgcgccagtcctgctaagcggcgatgcgggaccggccgtaccgccgtcaccggccgtcggttccctaccggccgttcccgattaaccggccgtccgcacggaaccggccgtaccacccgaaccggccgtgactcctggaccggccgtctcatttcgaccggccgtttactcaagaccggccgtatccgactcggaccgatg

SEQ ID NO: 15646 - DNA, 203 bp, synthetic construct
  source 1..203: mol_type = other DNA
ggcgcgccagtccttgcggcactcgcagtcctcacggaatcgagaagcagcacggaatcgagaattcccacggaatcgagaatccgcacggaatcgagaagctgcacggaatcgagaaagtgcacggaatcgagaaccttcacggaatcgagaacgtgcacggaatcgagaacgacggcgaggtccgacgactcggaccgatg

SEQ ID NO: 15647 - DNA, 203 bp, synthetic construct
  source 1..203: mol_type = other DNA
ggcgcgccagtcctaaaggcggcagcagtcctgggctgtacccggcgcagaccggccgtgctgcttccaccggccgtgtatctccgaccggccgtgggctgctgaccggccgtgaggaagtgaccggccgtgccgaccttaccggccgtctgggcgtgaccggccgtgcctccgacaccggccgtcgacgactcggaccgatg

SEQ ID NO: 15648 - DNA, 203 bp, synthetic construct
  source 1..203: mol_type = other DNA
ggcgcgccagtcctcgaggcggctgcagtcctgggctgtacccggcgcagcacggaatcgagaattcccacggaatcgagaatccgcacggaatcgagaagctgcacggaatcgagaaagtgcacggaatcgagaaccttcacggaatcgagaacgtgcacggaatcgagaacgacggcgaggtccgacgactcggaccgatg

SEQ ID NO: 15649 - DNA, 203 bp, synthetic construct
  source 1..203: mol_type = other DNA
ggcgcgccagtcctggatctagtagcagtcctgggctgtacccggcgcagctgggagcggctgcttcccgtcaattcctttatccgcgtcaattcctttagctgcgtcaattcctttaagtgcgtcaattcctttaccttcgtcaattcctttacgtgcgtcaattcctttacgacggcgaggtccgacgactcggaccgatg

SEQ ID NO: 15650 - DNA, 203 bp, synthetic construct
  source 1..203: mol_type = other DNA
ggcgcgccagtcctactagatcctgcagtcctgggctgtacccggcgcagctgggagcggctgcttcctactccctcgtatctccgtactccctggggctgctgtactcccgcgaggaagtgtactcccccgccgacctttactccctgctgggcgtgtactcccaggcctccgactactccctccgacgactcggaccgatg

SEQ ID NO: 15651 - DNA, 203 bp, synthetic construct
  source 1..203: mol_type = other DNA
ggcgcgccagtcctgacccgctgagcagtcctgggctgtacccggcgcagctgggagcggctgcttcctccggggtcgtatctccgcccggcatggggctgctgcacggaatcgagaaagtgcacggaatcgagaaccttcacggaatcgagaacgtgcacggaatcgagaacgacggcgaggtccgacgactcggaccgatg

SEQ ID NO: 15652 - DNA, 203 bp, synthetic construct
  source 1..203: mol_type = other DNA
ggcgcgccagtccttgcgtcgattgcagtcctgggctgtacccggcgcagctgggagcggctgcttcctccggggtcgtatctccgcccggcatggggctgctggacctttgcgaggaagtgtactcccccgccgacctttactccctgctgggcgtgtactcccaggcctccgactactccctccgacgactcggaccgatg

SEQ ID NO: 15653 - DNA, 203 bp, synthetic construct
  source 1..203: mol_type = other DNA
ggcgcgccagtcctctacgtcaccgcagtcctgggctgtacccggcgcagctgggagcggctgcttcctccggggtcgtatctccgcccggcatggggctgctggacctttgcgaggaagtgttcggcaccgccgaccttaccggccgtctgggcgtgaccggccgtgcctccgacaccggccgtcgacgactcggaccgatg

SEQ ID NO: 15654 - DNA, 203 bp, synthetic construct
  source 1..203: mol_type = other DNA
ggcgcgccagtccttgacgtagtggcagtcctgggctgtacccggcgcagctgggagcggctgcttcctccggggtcgtatctccgcccggcatggggctgctggacctttgcgaggaagtgttcggcaccgccgaccttcacggaatcgagaacgtgcacggaatcgagaacgacggcgaggtccgacgactcggaccgatg

SEQ ID NO: 15655 - DNA, 203 bp, synthetic construct
  source 1..203: mol_type = other DNA
ggcgcgccagtcctccaagcgcctgcagtcctgggctgtacccggcgcagctgggagcggctgcttcctccggggtcgtatctccgcccggcatggggctgctggacctttgcgaggaagtgttcggcaccgccgacctttaccgggtgctgggcgtgcgacgcgaggcctccgacttcttggcaaaacgactcggaccgatg

SEQ ID NO: 15656 - DNA, 203 bp, synthetic construct
  source 1..203: mol_type = other DNA
ggcgcgccagtccttctcaggcgcgcagtcctgggctgtacccggcgcagctgggagcggctgcttcctccggggtcgtatctccgcccggcatggggctgctggacctttgcgaggaagtgttcggcaccgccgacctttaccgggtgctgggcgtgtactcccaggcctccgactactccctccgacgactcggaccgatg

SEQ ID NO: 15657 - DNA, 203 bp, synthetic construct
  source 1..203: mol_type = other DNA
ggcgcgccagtcctacaggcgctggcagtcctgggctgtacccggcgcagctgggagcggctgcttcctccggggtcgtatctccgcccggcatggggctgctggacctttgcgaggaagtgttcggcaccgccgaccttttcttggcaaagggcgtgttcttggcaaactccgacttcttggcaaaacgactcggaccgatg

SEQ ID NO: 15658 - DNA, 203 bp, synthetic construct
  source 1..203: mol_type = other DNA
ggcgcgccagtcctttagcgctaggcagtcctgggctgtacccggcgcagctgggagcggctgcttcctccggggtcgtatctccgcccggcatggggctgctggacctttgcgaggaagtgttcttggcaaacgaccttttcttggcaaagggcgtgttcttggcaaactccgacttcttggcaaaacgactcggaccgatg

SEQ ID NO: 15659 - DNA, 203 bp, synthetic construct
  source 1..203: mol_type = other DNA
ggcgcgccagtcctagtcctatcggcagtcctgggctgtacccggcgcagctgggagcggctgcttcctccggggtcgtatctccgtactccctggggctgctgtactcccgcgaggaagtgtactcccccgccgacctttactccctgctgggcgtgtactcccaggcctccgactactccctccgacgactcggaccgatg

SEQ ID NO: 15660 - DNA, 203 bp, synthetic construct
  source 1..203: mol_type = other DNA
ggcgcgccagtcctacctatcttagcagtcctgggctgtacccggcgcagctgggagcggctgcttcctccggggtcgtatctccgttcttggcaaagctgctgttcttggcaaaggaagtgttcttggcaaacgaccttttcttggcaaagggcgtgttcttggcaaactccgacttcttggcaaaacgactcggaccgatg

SEQ ID NO: 15661 - DNA, 203 bp, synthetic construct
  source 1..203: mol_type = other DNA
ggcgcgccagtcctctatggtcaggcagtccttactcccacccggcgcagtactccccggctgcttcctactccctcgtatctccgtactccctggggctgctgtactcccgcgaggaagtgtactcccccgccgacctttactccctgctgggcgtgtactcccaggcctccgactactccctccgacgactcggaccgatg

SEQ ID NO: 15662 - DNA, 203 bp, synthetic construct
  source 1..203: mol_type = other DNA
ggcgcgccagtcctaggctatgtagcagtcctttcttggcaaaggcgcagttcttggcaaatgcttccttcttggcaaaatctccgttcttggcaaagctgctgttcttggcaaaggaagtgttcttggcaaacgaccttttcttggcaaagggcgtgttcttggcaaactccgacttcttggcaaaacgactcggaccgatg

SEQ ID NO: 15663 - DNA, 203 bp, synthetic construct
  source 1..203: mol_type = other DNA
ggcgcgccagtcctaacctctatcgcccgttaaccggccgtgcaaacgacaccggccgtcggtccacgaccggccgtaatgtctctaccggccgttaggcgtagaccggccgttgacaaggaaccggccgtgccgggggcaccggccgtgactccaagaccggccgttcccggtggaccggccgttgccgactcggaccgatg

SEQ ID NO: 15664 - DNA, 203 bp, synthetic construct
  source 1..203: mol_type = other DNA
ggcgcgccagtcctctatccaaatgcccgttacccacctgggcaaacgacgcccacgtacggtccacgtactccctcaatgtctcttactcccaataggcgtagtactcccgttgacaaggatactcccgggccgggggctactcccgggactccaagtactccccttcccggtggtactcccaatgccgactcggaccgatg

SEQ ID NO: 15665 - DNA, 203 bp, synthetic construct
  source 1..203: mol_type = other DNA
ggcgcgccagtcctactatctggtgcccgttacccacctgggcaaacgacgcccacgtacggtccacgtcgcccttcaatgtctctaccggccgttaggcgtagaccggccgttgacaaggaaccggccgtgccgggggcaccggccgtgactccaagaccggccgttcccggtggaccggccgttgccgactcggaccgatg

SEQ ID NO: 15666 - DNA, 203 bp, synthetic construct
  source 1..203: mol_type = other DNA
ggcgcgccagtccttgctatgtaagcccgttacccacctgggcaaacgacgcccacgtacggtccacgtcgcccttcaatgtctctcgtcaattcctttagtagcgtcaattcctttaaggacgtcaattcctttagggccgtcaattcctttacaagcgtcaattcctttagtgggccgggaaatgccgactcggaccgatg

SEQ ID NO: 15667 - DNA, 203 bp, synthetic construct
  source 1..203: mol_type = other DNA
ggcgcgccagtcctgtcattctatgcccgttacccacctgggcaaacgacgcccacgtacggtccacgtcgcccttcaatgtctctcttgaccaataggcgtagaccggccgttgacaaggaaccggccgtgccgggggcaccggccgtgactccaagaccggccgttcccggtggaccggccgttgccgactcggaccgatg

SEQ ID NO: 15668 - DNA, 203 bp, synthetic construct
  source 1..203: mol_type = other DNA
ggcgcgccagtcctactatgtatcgcccgttacccacctgggcaaacgacgcccacgtacggtccacgtcgcccttcaatgtctctcttgaccaataggcgtagcacggaatcgagaaaggacacggaatcgagaagggccacggaatcgagaacaagcacggaatcgagaagtgggccgggaaatgccgactcggaccgatg

SEQ ID NO: 15669 - DNA, 203 bp, synthetic construct
  source 1..203: mol_type = other DNA
ggcgcgccagtccttagtagctatgcccgttacccacctgggcaaacgacgcccacgtacggtccacgtcgcccttcaatgtctctcttgaccaataggcgtagccggcgagttgacaaggaaccggccgtgccgggggcaccggccgtgactccaagaccggccgttcccggtggaccggccgttgccgactcggaccgatg

SEQ ID NO: 15670 - DNA, 203 bp, synthetic construct
  source 1..203: mol_type = other DNA
ggcgcgccagtcctcggccctattgcccgttacccacctgggcaaacgacgcccacgtacggtccacgtcgcccttcaatgtctctcttgaccaataggcgtagccggcgagttgacaaggaccagtgggggccgggggcccggcgggtgactccaagccggcgggttcccggtggccggcgggttgccgactcggaccgatg

SEQ ID NO: 15671 - DNA, 203 bp, synthetic construct
  source 1..203: mol_type = other DNA
ggcgcgccagtccttgctattgacgcccgttacccacctgggcaaacgacgcccacgtacggtccacgtcgcccttcaatgtctctcttgaccaataggcgtagccggcgagttgacaaggaccagtgggggccgggggcttggagagggactccaagcgtcaattcctttagtgggccgggaaatgccgactcggaccgatg

SEQ ID NO: 15672 - DNA, 203 bp, synthetic construct
  source 1..203: mol_type = other DNA
ggcgcgccagtcctcctgggctatgcccgttacccacctgggcaaacgacgcccacgtacggtccacgtcgcccttcaatgtctctcttgaccaataggcgtagccggcgagttgacaaggaccagtgggggccgggggcttggagagggactccaagtcccgcccttcccggtggaccggccgttgccgactcggaccgatg

SEQ ID NO: 15673 - DNA, 203 bp, synthetic construct
  source 1..203: mol_type = other DNA
ggcgcgccagtcctgaccctattggcccgttacccacctgggcaaacgacgcccacgtacggtccacgtcgcccttcaatgtctctcttgaccaataggcgtagccggcgagttgacaaggaccagtgggggccgggggcttggagagggactccaagtcccgcccttcccggtggccggcgggttgccgactcggaccgatg

SEQ ID NO: 15674 - DNA, 203 bp, synthetic construct
  source 1..203: mol_type = other DNA
ggcgcgccagtccttctatgtgcagcccgttacccacctgggcaaacgacgcccacgtacggtccacgtcgcccttcaatgtctctcttgaccaataggcgtagccggcgagttgacaaggaccagtgggggccgggggcttggagagggactccaagtcccgcccttcccggtgggccgggaaatgccgactcggaccgatg

SEQ ID NO: 15675 - DNA, 203 bp, synthetic construct
  source 1..203: mol_type = other DNA
ggcgcgccagtcctgtaggctatcgcccgttacccacctgggcaaacgacgcccacgtacggtccacgtcgcccttcaatgtctctcttgaccaataggcgtagccggcgagttgacaaggaccagtgggggccgggggcttggagagggactccaagtcccgcccttcccggtggtactcccaatgccgactcggaccgatg

SEQ ID NO: 15676 - DNA, 203 bp, synthetic construct
  source 1..203: mol_type = other DNA
ggcgcgccagtcctttctatgacagcccgttacccacctgggcaaacgacgcccacgtacggtccacgtcgcccttcaatgtctctcttgaccaataggcgtagccggcgagttgacaaggacgtcaattcctttagggccgtcaattcctttacaagcgtcaattcctttagtgggccgggaaatgccgactcggaccgatg

SEQ ID NO: 15677 - DNA, 203 bp, synthetic construct
  source 1..203: mol_type = other DNA
ggcgcgccagtcctcactctattcgcccgttacccacctgggcaaacgacgcccacgtacggtccacgtcgcccttcaatgtctctcttgaccaataggcgtagccggcgagttgacaaggatactcccgggccgggggctactcccgggactccaagtactccccttcccggtggtactcccaatgccgactcggaccgatg

SEQ ID NO: 15678 - DNA, 203 bp, synthetic construct
  source 1..203: mol_type = other DNA
ggcgcgccagtcctatgctatcgggcccgttacccacctgggcaaacgacgcccacgtacggtccacgtcgcccttcaatgtctctcttgaccaataggcgtagttcttggcaaaacaaggattcttggcaaacgggggcttcttggcaaactccaagttcttggcaaaccggtggttcttggcaaaccgactcggaccgatg

SEQ ID NO: 15679 - DNA, 203 bp, synthetic construct
  source 1..203: mol_type = other DNA
ggcgcgccagtcctatgactatccgcccgttacccacctgggcaaacgacgcccacgtacggtccacgtcgcccttcaatgtctcttactcccaataggcgtagtactcccgttgacaaggatactcccgggccgggggctactcccgggactccaagtactccccttcccggtggtactcccaatgccgactcggaccgatg

SEQ ID NO: 15680 - DNA, 203 bp, synthetic construct
  source 1..203: mol_type = other DNA
ggcgcgccagtcctcctatcctttgcccgttacccacctgggcaaacgactactccctacggtccacgtactccctcaatgtctcttactcccaataggcgtagtactcccgttgacaaggatactcccgggccgggggctactcccgggactccaagtactccccttcccggtggtactcccaatgccgactcggaccgatg

SEQ ID NO: 15681 - DNA, 203 bp, synthetic construct
  source 1..203: mol_type = other DNA
ggcgcgccagtccttcgactatgtgcccgttatactcccgggcaaacgactactccctacggtccacgtactccctcaatgtctcttactcccaataggcgtagtactcccgttgacaaggatactcccgggccgggggctactcccgggactccaagtactccccttcccggtggtactcccaatgccgactcggaccgatg

SEQ ID NO: 15682 - DNA, 203 bp, synthetic construct
  source 1..203: mol_type = other DNA
ggcgcgccagtcctgtaacctattgcccgttattcttggcaaaaaacgacttcttggcaaagtccacgttcttggcaaatgtctctttcttggcaaaggcgtagttcttggcaaaacaaggattcttggcaaacgggggcttcttggcaaactccaagttcttggcaaaccggtggttcttggcaaaccgactcggaccgatg

SEQ ID NO: 15683 - DNA, 203 bp, synthetic construct
  source 1..203: mol_type = other DNA
ggcgcgccagtcctagcactatgtggacccgccaccccagagtcaagctgagggcatcggcatgccgcaccggccgtgatcaggacaccggccgttcgggcagtaccggccgtggccttttcaccggccgttccttccgcaccggccgtactctcagcaccggccgtctgattgtcaccggccgtatacgactcggaccgatg

SEQ ID NO: 15684 - DNA, 203 bp, synthetic construct
  source 1..203: mol_type = other DNA
ggcgcgccagtcctctgctatggtggacccgccaccccagagtcaagctgagggcatcggcatgccgcagggaagacgatcaggactgtttttaatcgggcagtcacggaatcgagaatttccacggaatcgagaaccgccacggaatcgagaacagccacggaatcgagaatgtcctgggtcacatacgactcggaccgatg

SEQ ID NO: 15685 - DNA, 203 bp, synthetic construct
  source 1..203: mol_type = other DNA
ggcgcgccagtcctgctatcgcatggacccgccaccccagagtcaagctgagggcatcggcatgccgcagggaagacgatcaggactgtttttaatcgggcagtcgcgcggatggccttttcaccggccgttccttccgcaccggccgtactctcagcaccggccgtctgattgtcaccggccgtatacgactcggaccgatg

SEQ ID NO: 15686 - DNA, 203 bp, synthetic construct
  source 1..203: mol_type = other DNA
ggcgcgccagtcctctattcgttcggacccgccaccccagagtcaagctgagggcatcggcatgccgcagggaagacgatcaggactgtttttaatcgggcagtcgcgcggatggccttttcccggcgggttccttccgcccggcgggtactctcagcccggcgggtctgattgtcccggcgggtatacgactcggaccgatg

SEQ ID NO: 15687 - DNA, 203 bp, synthetic construct
  source 1..203: mol_type = other DNA
ggcgcgccagtccttctcgctatgggacccgccaccccagagtcaagctgagggcatcggcatgccgcagggaagacgatcaggactgtttttaatcgggcagtcgcgcggatggccttttccctctcgcctccttccgcaccggccgtactctcagcaccggccgtctgattgtcaccggccgtatacgactcggaccgatg

SEQ ID NO: 15688 - DNA, 203 bp, synthetic construct
  source 1..203: mol_type = other DNA
ggcgcgccagtcctaactatggatggacccgccaccccagagtcaagctgagggcatcggcatgccgcagggaagacgatcaggactgtttttaatcgggcagtcgcgcggatggccttttccctctcgcctccttccgccacggaatcgagaacagccacggaatcgagaatgtcctgggtcacatacgactcggaccgatg

SEQ ID NO: 15689 - DNA, 203 bp, synthetic construct
  source 1..203: mol_type = other DNA
ggcgcgccagtcctcctatgaaggggacccgccaccccagagtcaagctgagggcatcggcatgccgcagggaagacgatcaggactgtttttaatcgggcagtcgcgcggatggccttttccctctcgcctccttccgccccgcccccactctcagcaccggccgtctgattgtcaccggccgtatacgactcggaccgatg

SEQ ID NO: 15690 - DNA, 203 bp, synthetic construct
  source 1..203: mol_type = other DNA
ggcgcgccagtcctccctatgtgtggacccgccaccccagagtcaagctgagggcatcggcatgccgcagggaagacgatcaggactgtttttaatcgggcagtcgcgcggatggccttttccctctcgcctccttccgccccgcccccactctcagccacggaatcgagaatgtcctgggtcacatacgactcggaccgatg

SEQ ID NO: 15691 - DNA, 203 bp, synthetic construct
  source 1..203: mol_type = other DNA
ggcgcgccagtcctactatgttggggacccgccaccccagagtcaagctgagggcatcggcatgccgcagggaagacgatcaggactgtttttaatcgggcagtcgcgcggatggccttttccctctcgcctccttccgccccgcccccactctcagcccggcgggtctgattgtcccggcgggtatacgactcggaccgatg

SEQ ID NO: 15692 - DNA, 203 bp, synthetic construct
  source 1..203: mol_type = other DNA
ggcgcgccagtcctcactatgattggacccgccaccccagagtcaagctgagggcatcggcatgccgcagggaagacgatcaggactgtttttaatcgggcagtcgcgcggatggccttttccctctcgcctccttccgccgtcaattcctttacagccgtcaattcctttatgtcctgggtcacatacgactcggaccgatg

SEQ ID NO: 15693 - DNA, 203 bp, synthetic construct
  source 1..203: mol_type = other DNA
ggcgcgccagtcctctatctgattggacccgccaccccagagtcaagctgagggcatcggcatgccgctactcccacgatcaggactactcccaatcgggcagttactcccatggccttttctactccccctccttccgctactcccccactctcagctactccccgctgattgtctactcccacatacgactcggaccgatg

SEQ ID NO: 15694 - DNA, 203 bp, synthetic construct
  source 1..203: mol_type = other DNA
ggcgcgccagtcctgaacgctattggacccgccaccccagagtcaagctgccggcgggtgcatgccgcccggcgggtgatcaggacccggcgggttcgggcagtccggcgggtggccttttcccggcgggttccttccgcccggcgggtactctcagcccggcgggtctgattgtcccggcgggtatacgactcggaccgatg

SEQ ID NO: 15695 - DNA, 203 bp, synthetic construct
  source 1..203: mol_type = other DNA
ggcgcgccagtcctgctctatccaggacccgccaccccagagtcaagctgcgtcaattcctttaccgccgtcaattcctttaggaccgtcaattcctttacagtcgtcaattcctttatttccgtcaattcctttaccgccgtcaattcctttacagccgtcaattcctttatgtcctgggtcacatacgactcggaccgatg

SEQ ID NO: 15696 - DNA, 203 bp, synthetic construct
  source 1..203: mol_type = other DNA
ggcgcgccagtcctctattctcaaggacccgccgtcaattcctttagctgcgtcaattcctttaccgccgtcaattcctttaggaccgtcaattcctttacagtcgtcaattcctttatttccgtcaattcctttaccgccgtcaattcctttacagccgtcaattcctttatgtcctgggtcacatacgactcggaccgatg

SEQ ID NO: 15697 - DNA, 203 bp, synthetic construct
  source 1..203: mol_type = other DNA
ggcgcgccagtcctctattgagcgggacccgctactcccgagtcaagctgtactccccggcatgccgctactcccacgatcaggactactcccaatcgggcagttactcccatggccttttctactccccctccttccgctactcccccactctcagctactccccgctgattgtctactcccacatacgactcggaccgatg

SEQ ID NO: 15698 - DNA, 203 bp, synthetic construct
  source 1..203: mol_type = other DNA
ggcgcgccagtcctgcttctatgagggccgcgaccggccgtcgcttccgcaccggccgtggcgggggaaccggccgtcggtctcagaccggccgtccagctctcaccggccgttcttccgccaccggccgttcgcgtttcaccggccgtcgcaatggaaccggccgtcgccgcgctaccggccgtcaacgactcggaccgatg

SEQ ID NO: 15699 - DNA, 203 bp, synthetic construct
  source 1..203: mol_type = other DNA
ggcgcgccagtcctgacctattcggggccgcgcgcgcgcgccgcgtaggagaggagcgagcgaccaaaggaaccataactgatttaatgagccattcgcagtttcactgtaccggccgtgcgtactcagacatgcatggcttaatctttgagacaagcatatgctactggcaggatcaaccaggacaacgactcggaccgatg

SEQ ID NO: 15700 - DNA, 203 bp, synthetic construct
  source 1..203: mol_type = other DNA
ggcgcgccagtcctctttctatgtgggccgcgcgcgcgcgccgctaagccgcaggctccactcctggtggtgcccttccgtcaattcctttaagtttcagctttgcaaccatactccccccggaacccaaagactttggtttcccggaagctgcccggcgggtcatgggaataacgccgccgcgacaacgactcggaccgatg

SEQ ID NO: 15701 - DNA, 203 bp, synthetic construct
  source 1..203: mol_type = other DNA
ggcgcgccagtcctcgctattcgggggccgcgcgcgcgcgccgctcggaactacgacggtatctgatcgtcttcgaacctccgactttcgttcttgattaatgaaaacattcttggcaaatgctttcgctctggtccgtcttgcgccggtccaagaatttcacctctagcggcgcaatacgaatacaacgactcggaccgatg

SEQ ID NO: 15702 - DNA, 203 bp, synthetic construct
  source 1..203: mol_type = other DNA
ggcgcgccagtcctgatcatagtcgggccgcgcgcgcgcgccgcttcaagtttcagctttgcaaccatactccccccggaacccaaagactttggtttcccggaagctgcccggcgggtcatgggaataacgccgccgcatcgccggtcggcatcgtttatggtcggaactacgacggtatttgacaacgactcggaccgatg

SEQ ID NO: 15703 - DNA, 203 bp, synthetic construct
  source 1..203: mol_type = other DNA
ggcgcgccagtcctttgggatagagggccgcgcgcgcgcgccgcttccaactacgacggtatctgatcgtcttcgaacctccgactttcgttcttgattaatgaaaacattcttggcaaatgctttcgctctggtccgtcttgcgccggtccaagaatttcacctctagcggcgcaatacattgacaacgactcggaccgatg

SEQ ID NO: 15704 - DNA, 203 bp, synthetic construct
  source 1..203: mol_type = other DNA
ggcgcgccagtcctatagtagctcgggccgcgcgcgcgcgccgcttccagtttcagctttgcaaccatactccccccggaacccaaagactttggtttcccggaagctgcccggcgggtcatgggaataacgccgccgcatcgccggtcggcatcgtttatggtcggaactacgacggtaattgacaacgactcggaccgatg

SEQ ID NO: 15705 - DNA, 203 bp, synthetic construct
  source 1..203: mol_type = other DNA
ggcgcgccagtccttaatcatagggggccgcgcgcgcgcgccgcttccgagaggagcgagcgaccaaaggaaccataactgatttaatgagccattcgcagtttcactgtaccggccgtgcgtactcagacatgcatggcttaatctttgagacaagcatatgctactggcaggatcaacattgacaacgactcggaccgatg

SEQ ID NO: 15706 - DNA, 203 bp, synthetic construct
  source 1..203: mol_type = other DNA
ggcgcgccagtcctcatagagtgtgggccgcgcgcgcgcgccgcttccgcaggtttcccgtgttgagtcaaattaagccgcaggctccactcctggtggtgcccttccgtcaattcctttaagtttcagctttgcaaccatactccccccggaacccaaagactttggtttcccggaatcattgacaacgactcggaccgatg

SEQ ID NO: 15707 - DNA, 203 bp, synthetic construct
  source 1..203: mol_type = other DNA
ggcgcgccagtccttgagatagacgggccgcgcgcgcgcgccgcttccgccacggaatcgagaagggacacggaatcgagaatcagcacggaatcgagaatctccacggaatcgagaacgcccacggaatcgagaatttccacggaatcgagaatggacacggaatcgagaacgctggtcattgacaacgactcggaccgatg

SEQ ID NO: 15708 - DNA, 203 bp, synthetic construct
  source 1..203: mol_type = other DNA
ggcgcgccagtcctacgggatagcgggccgcgcgcgcgcgccgcttccgcgcaggctccactcctggtggtgcccttccgtcaattcctttaagtttcagctttgcaaccatactccccccggaacccaaagactttggtttcccggaagctgcccggcgggtcatgggaataacgccgcattgacaacgactcggaccgatg

SEQ ID NO: 15709 - DNA, 203 bp, synthetic construct
  source 1..203: mol_type = other DNA
ggcgcgccagtccttcataggatcgggccgcgcgcgcgcgccgcttccgctactcccacggcgggggatactcccgtcggtctcagtactccctgccagctctctactcccgttcttccgcctactccccgtcgcgtttctactcccgtcgcaatggatactcccatcgccgcgcttactcccgacaacgactcggaccgatg

SEQ ID NO: 15710 - DNA, 203 bp, synthetic construct
  source 1..203: mol_type = other DNA
ggcgcgccagtcctgttgagataggggccgcgcgcgcgcgccgcttccgcttaaaaattaaccagacaaatcgctccaccaactaagaacggccatgcaccaccacccacggaatcgagaaagagctatcaatctgtcaatcctgtccgtgtccgggccgggtgaggtttcccgctggtcattgacaacgactcggaccgatg

SEQ ID NO: 15711 - DNA, 203 bp, synthetic construct
  source 1..203: mol_type = other DNA
ggcgcgccagtcctaatagctacggggccgcgcgcgcgcgccgcttccgcttaaaacggtatctgatcgtcttcgaacctccgactttcgttcttgattaatgaaaacattcttggcaaatgctttcgctctggtccgtcttgcgccggtccaagaatttcacctctagcggcgctggtcattgacaacgactcggaccgatg

SEQ ID NO: 15712 - DNA, 203 bp, synthetic construct
  source 1..203: mol_type = other DNA
ggcgcgccagtcctccaggatagagggccgcgcgcgcgcgccgcttccgcttaaactccactcctggtggtgcccttccgtcaattcctttaagtttcagctttgcaaccatactccccccggaacccaaagactttggtttcccggaagctgcccggcgggtcatgggaatagctggtcattgacaacgactcggaccgatg

SEQ ID NO: 15713 - DNA, 203 bp, synthetic construct
  source 1..203: mol_type = other DNA
ggcgcgccagtccttaacgcataggggccgcgcgcgcgcgccgcttccgcttaaataacggcaaccatactccccccggaacccaaagactttggtttcccggaagctgcccggcgggtcatgggaataacgccgccgcatcgccggtcggcatcgtttatggtcggcgccgcgctggtcattgacaacgactcggaccgatg

SEQ ID NO: 15714 - DNA, 203 bp, synthetic construct
  source 1..203: mol_type = other DNA
ggcgcgccagtcctatagctcttagggccgcgcgcgcgcgccgcttccgcttaaataacggcaccaaaggaaccataactgatttaatgagccattcgcagtttcactgtaccggccgtgcgtactcagacatgcatggcttaatctttgagacaagcatatgctatcgccgcgctggtcattgacaacgactcggaccgatg

SEQ ID NO: 15715 - DNA, 203 bp, synthetic construct
  source 1..203: mol_type = other DNA
ggcgcgccagtcctggatagtctagggccgcgcgcgcgcgccgcttccgcttaaataacggcgaccatactccccccggaacccaaagactttggtttcccggaagctgcccggcgggtcatgggaataacgccgccgcatcgccggtcggcatcgtttatggtcatcgccgcgctggtcattgacaacgactcggaccgatg

SEQ ID NO: 15716 - DNA, 203 bp, synthetic construct
  source 1..203: mol_type = other DNA
ggcgcgccagtcctatagtgcgaggggccgcgcgcgcgcgccgcttccgcttaaataacggcgggaaaggaaccataactgatttaatgagccattcgcagtttcactgtaccggccgtgcgtactcagacatgcatggcttaatctttgagacaagcatatgagatcgccgcgctggtcattgacaacgactcggaccgatg

SEQ ID NO: 15717 - DNA, 203 bp, synthetic construct
  source 1..203: mol_type = other DNA
ggcgcgccagtcctaataggactagggccgcgcgcgcgcgccgcttccgcttaaataacggcgggacaaatcgctccaccaactaagaacggccatgcaccaccacccacggaatcgagaaagagctatcaatctgtcaatcctgtccgtgtccgggccgggtggatcgccgcgctggtcattgacaacgactcggaccgatg

SEQ ID NO: 15718 - DNA, 203 bp, synthetic construct
  source 1..203: mol_type = other DNA
ggcgcgccagtcctacatagtcgcgggccgcgcgcgcgcgccgcttccgcttaaataacggcgggcatactccccccggaacccaaagactttggtttcccggaagctgcccggcgggtcatgggaataacgccgccgcatcgccggtcggcatcgtttatggagatcgccgcgctggtcattgacaacgactcggaccgatg

SEQ ID NO: 15719 - DNA, 203 bp, synthetic construct
  source 1..203: mol_type = other DNA
ggcgcgccagtcctcaataggtctgggccgcgcgcgcgcgccgcttccgcttaaataacggcggggaaggaaccataactgatttaatgagccattcgcagtttcactgtaccggccgtgcgtactcagacatgcatggcttaatctttgagacaagcatatgagatcgccgcgctggtcattgacaacgactcggaccgatg

SEQ ID NO: 15720 - DNA, 203 bp, synthetic construct
  source 1..203: mol_type = other DNA
ggcgcgccagtcctgtgagatagcgggccgcgcgcgcgcgccgcttccgcttaaataacggcggggcaaatcgctccaccaactaagaacggccatgcaccaccacccacggaatcgagaaagagctatcaatctgtcaatcctgtccgtgtccgggccggggagatcgccgcgctggtcattgacaacgactcggaccgatg

SEQ ID NO: 15721 - DNA, 203 bp, synthetic construct
  source 1..203: mol_type = other DNA
ggcgcgccagtcctatagcatagtgggccgcgcgcgcgcgccgcttccgcttaaataacggcgggggaactccccccggaacccaaagactttggtttcccggaagctgcccggcgggtcatgggaataacgccgccgcatcgccggtcggcatcgtttaaagagatcgccgcgctggtcattgacaacgactcggaccgatg

SEQ ID NO: 15722 - DNA, 203 bp, synthetic construct
  source 1..203: mol_type = other DNA
ggcgcgccagtccttcatagcactgggccgcgcgcgcgcgccgcttccgcttaaataacggcgggggacaaattaagccgcaggctccactcctggtggtgcccttccgtcaattcctttaagtttcagctttgcaaccatactccccccggaacccaaaaagagatcgccgcgctggtcattgacaacgactcggaccgatg

SEQ ID NO: 15723 - DNA, 203 bp, synthetic construct
  source 1..203: mol_type = other DNA
ggcgcgccagtcctatagatacccgggccgcgcgcgcgcgccgcttccgcttaaataacggcgggggaccggcgggtcggtctcagccggcgggtccagctctcccggcgggttcttccgccccggcgggttcgcgtttcccggcgggtcgcaatggaccggcgggtcgccgcgctccggcgggtcaacgactcggaccgatg

SEQ ID NO: 15724 - DNA, 203 bp, synthetic construct
  source 1..203: mol_type = other DNA
ggcgcgccagtcctctcaatagttgggccgcgcgcgcgcgccgcttccgcttaaataacggcgggggagatcgctccaccaactaagaacggccatgcaccaccacccacggaatcgagaaagagctatcaatctgtcaatcctgtccgtgtccgggccgaagagatcgccgcgctggtcattgacaacgactcggaccgatg

SEQ ID NO: 15725 - DNA, 203 bp, synthetic construct
  source 1..203: mol_type = other DNA
ggcgcgccagtcctcatagcctaggggccgcgcgcgcgcgccgcttccgcttaaataacggcgggggaggccgcataactgatttaatgagccattcgcagtttcactgtaccggccgtgcgtactcagacatgcatggcttaatctttgagacaggaagaagagatcgccgcgctggtcattgacaacgactcggaccgatg

SEQ ID NO: 15726 - DNA, 203 bp, synthetic construct
  source 1..203: mol_type = other DNA
ggcgcgccagtcctaagaagataggggccgcgcgcgcgcgccgcttccgcttaaataacggcgggggaggccgccccggaacccaaagactttggtttcccggaagctgcccggcgggtcatgggaataacgccgccgcatcgccggtcggcatcggaagaagagatcgccgcgctggtcattgacaacgactcggaccgatg

SEQ ID NO: 15727 - DNA, 203 bp, synthetic construct
  source 1..203: mol_type = other DNA
ggcgcgccagtcctatagagcatggggccgcgcgcgcgcgccgcttccgcttaaataacggcgggggaggccgcgaacctccgactttcgttcttgattaatgaaaacattcttggcaaatgctttcgctctggtccgtcttgcgccggtccaatggaagaagagatcgccgcgctggtcattgacaacgactcggaccgatg

SEQ ID NO: 15728 - DNA, 203 bp, synthetic construct
  source 1..203: mol_type = other DNA
ggcgcgccagtccttgcttcataggggccgcgcgcgcgcgccgcttccgcttaaataacggcgggggaggccgcgccggaacccaaagactttggtttcccggaagctgcccggcgggtcatgggaataacgccgccgcatcgccggtcggcaatggaagaagagatcgccgcgctggtcattgacaacgactcggaccgatg

SEQ ID NO: 15729 - DNA, 203 bp, synthetic construct
  source 1..203: mol_type = other DNA
ggcgcgccagtcctcagttcataggggccgcgcgcgcgcgccgcttccgcttaaataacggcgggggaggccgcggcaccaactaagaacggccatgcaccaccacccacggaatcgagaaagagctatcaatctgtcaatcctgtccgtgtaatggaagaagagatcgccgcgctggtcattgacaacgactcggaccgatg

SEQ ID NO: 15730 - DNA, 203 bp, synthetic construct
  source 1..203: mol_type = other DNA
ggcgcgccagtcctaatagtgccagggccgcgcgcgcgcgccgcttccgcttaaataacggcgggggaggccgcgggccgcaggctccactcctggtggtgcccttccgtcaattcctttaagtttcagctttgcaaccatactccccccggaatggaagaagagatcgccgcgctggtcattgacaacgactcggaccgatg

SEQ ID NO: 15731 - DNA, 203 bp, synthetic construct
  source 1..203: mol_type = other DNA
ggcgcgccagtcctatagcgggttgggccgcgcgcgcgcgccgcttccgcttaaataacggcgggggaggccgcggtcggaactaagaacggccatgcaccaccacccacggaatcgagaaagagctatcaatctgtcaatcctgtcctcgcaatggaagaagagatcgccgcgctggtcattgacaacgactcggaccgatg

SEQ ID NO: 15732 - DNA, 203 bp, synthetic construct
  source 1..203: mol_type = other DNA
ggcgcgccagtcctatagggacaagggccgcgcgcgcgcgccgcttccgcttaaataacggcgggggaggccgcggtcggcaggctccactcctggtggtgcccttccgtcaattcctttaagtttcagctttgcaaccatactcccctcgcaatggaagaagagatcgccgcgctggtcattgacaacgactcggaccgatg

SEQ ID NO: 15733 - DNA, 203 bp, synthetic construct
  source 1..203: mol_type = other DNA
ggcgcgccagtcctcaatagagtggggccgcgcgcgcgcgccgcttccgcttaaataacggcgggggaggccgcggtcgggatttaatgagccattcgcagtttcactgtaccggccgtgcgtactcagacatgcatggcttaatctttcgcaatggaagaagagatcgccgcgctggtcattgacaacgactcggaccgatg

SEQ ID NO: 15734 - DNA, 203 bp, synthetic construct
  source 1..203: mol_type = other DNA
ggcgcgccagtcctcatagtacaagggccgcgcgcgcgcgccgcttccgcttaaataacggcgggggaggccgcggtcggtactaagaacggccatgcaccaccacccacggaatcgagaaagagctatcaatctgtcaatcctgtcgtcgcaatggaagaagagatcgccgcgctggtcattgacaacgactcggaccgatg

SEQ ID NO: 15735 - DNA, 203 bp, synthetic construct
  source 1..203: mol_type = other DNA
ggcgcgccagtcctataggtcctggggccgcgcgcgcgcgccgcttccgcttaaataacggcgggggaggccgcggtcggtaggctccactcctggtggtgcccttccgtcaattcctttaagtttcagctttgcaaccatactcccgtcgcaatggaagaagagatcgccgcgctggtcattgacaacgactcggaccgatg

SEQ ID NO: 15736 - DNA, 203 bp, synthetic construct
  source 1..203: mol_type = other DNA
ggcgcgccagtcctgcacataggagggccgcgcgcgcgcgccgcttccgcttaaataacggcgggggaggccgcggtcggtatttaatgagccattcgcagtttcactgtaccggccgtgcgtactcagacatgcatggcttaatctgtcgcaatggaagaagagatcgccgcgctggtcattgacaacgactcggaccgatg

SEQ ID NO: 15737 - DNA, 203 bp, synthetic construct
  source 1..203: mol_type = other DNA
ggcgcgccagtcctaatagtaatcgggccgcgcgcgcgcgccgcttccgcttaaataacggcgggggaggccgcggtcggtctcagaccggccgtccagctctcaccggccgttcttccgccaccggccgttcgcgtttcaccggccgtcgcaatggaaccggccgtcgccgcgctaccggccgtcaacgactcggaccgatg

SEQ ID NO: 15738 - DNA, 203 bp, synthetic construct
  source 1..203: mol_type = other DNA
ggcgcgccagtcctatagtagggagggccgcgcgcgcgcgccgcttccgcttaaataacggcgggggaggccgcggtcggtctcagaccggccgtccagctctcaccggccgttcttccgccaccggccgttcgcgtttcaccggccgtcgcaatggaaccggccgtcgccgcgctggtcattgacaacgactcggaccgatg

SEQ ID NO: 15739 - DNA, 203 bp, synthetic construct
  source 1..203: mol_type = other DNA
ggcgcgccagtcctccgatttggggggccgcgcgcgcgcgccgcttccgcttaaataacggcgggggaggccgcggtcggtctcagatgagccattcgcagtttcactgtaccggccgtgcgtactcagacatgcatggctttgccggtcgcaatggaagaagagatcgccgcgctggtcattgacaacgactcggaccgatg

SEQ ID NO: 15740 - DNA, 203 bp, synthetic construct
  source 1..203: mol_type = other DNA
ggcgcgccagtcctcacacgtcaagggccgcgcgcgcgcgccgcttccgcttaaataacggcgggggaggccgcggtcggtctcagccggcgggtccagctctcccggcgggttcttccgccccggcgggttcgcgtttcccggcgggtcgcaatggaccggcgggtcgccgcgctggtcattgacaacgactcggaccgatg

SEQ ID NO: 15741 - DNA, 203 bp, synthetic construct
  source 1..203: mol_type = other DNA
ggcgcgccagtcctcgtgacgtgtgggccgcgcgcgcgcgccgcttccgcttaaataacggcgggggaggccgcggtcggtctcaggggagtatgccagctctcgggagtagttcttccgccgggagtacgtcgcgtttcgggagtagtcgcaatggagggagtaatcgccgcgctggtcattgacaacgactcggaccgatg

SEQ ID NO: 15742 - DNA, 203 bp, synthetic construct
  source 1..203: mol_type = other DNA
ggcgcgccagtcctacagttactagggccgcgcgcgcgcgccgcttccgcttaaataacggcgggggaggccgcggtcggtctcagtactccctgccagctctctactcccgttcttccgcctactccccgtcgcgtttctactcccgtcgcaatggatactcccatcgccgcgctggtcattgacaacgactcggaccgatg

SEQ ID NO: 15743 - DNA, 203 bp, synthetic construct
  source 1..203: mol_type = other DNA
ggcgcgccagtccttggttaccatgggccgcgcgcgcgcgccgcttccgcttaaataacggcgggggaggccgcggtcggtctcagtactccctgccagctctctactcccgttcttccgcctactccccgtcgcgtttctactcccgtcgcaatggatactcccatcgccgcgcttactcccgacaacgactcggaccgatg

SEQ ID NO: 15744 - DNA, 203 bp, synthetic construct
  source 1..203: mol_type = other DNA
ggcgcgccagtccttgtagtaacagggccgcgcgcgcgcgccgcttccgcttaaataacggcgggggaggccgcggtcggtctcagtcactttggtttcccggaagctgcccggcgggtcatgggaataacgccgccgcatctgccggtcgcaatggaagaagagatcgccgcgctggtcattgacaacgactcggaccgatg

SEQ ID NO: 15745 - DNA, 203 bp, synthetic construct
  source 1..203: mol_type = other DNA
ggcgcgccagtcctgtattgtaaagggccgcgcgcgcgcgccgcttccgcttaaataacggcgggggaggccgcggtcggtctcagtcgccaagtttcagctttgcaaccatactccccccggaacccaaagactttttctctgccggtcgcaatggaagaagagatcgccgcgctggtcattgacaacgactcggaccgatg

SEQ ID NO: 15746 - DNA, 203 bp, synthetic construct
  source 1..203: mol_type = other DNA
ggcgcgccagtcctgctattgtaagggccgcgcgcgcgcgccgcttccgcttaaataacggcgggggaggccgcggtcggtctcagtcgcccctggtggtgcccttccgtcaattcctttaagtttcagctttgcaattctctgccggtcgcaatggaagaagagatcgccgcgctggtcattgacaacgactcggaccgatg

SEQ ID NO: 15747 - DNA, 203 bp, synthetic construct
  source 1..203: mol_type = other DNA
ggcgcgccagtcctgccttgcgcggggccgcgcgcgcgcgccgcttccgcttaaataacggcgggggaggccgcggtcggtctcagtcgccgctatgcaccaccacccacggaatcgagaaagagctatcaatccgtttctctgccggtcgcaatggaagaagagatcgccgcgctggtcattgacaacgactcggaccgatg

SEQ ID NO: 15748 - DNA, 203 bp, synthetic construct
  source 1..203: mol_type = other DNA
ggcgcgccagtcctctcaaatacagggccgcgcgcgcgcgccgcttccgcttaaataacggcgggggaggccgcggtcggtctcagtcgccgctgccagcgtttcactgtaccggccgtgcgtactcaccgtcgcgtttctctgccggtcgcaatggaagaagagatcgccgcgctggtcattgacaacgactcggaccgatg

SEQ ID NO: 15749 - DNA, 203 bp, synthetic construct
  source 1..203: mol_type = other DNA
ggcgcgccagtcctgtcaaaataggggccgcgcgcgcgcgccgcttccgcttaaataacggcgggggaggccgcggtcggtctcagtcgccgctgccagctcccacccacggaatcgagaaagagccgccgtcgcgtttctctgccggtcgcaatggaagaagagatcgccgcgctggtcattgacaacgactcggaccgatg

SEQ ID NO: 15750 - DNA, 203 bp, synthetic construct
  source 1..203: mol_type = other DNA
ggcgcgccagtcctgcaaatacatgggccgcgcgcgcgcgccgcttccgcttaaataacggcgggggaggccgcggtcggtctcagtcgccgctgccagctcccttccgtcaattcctttaagtttcgccgtcgcgtttctctgccggtcgcaatggaagaagagatcgccgcgctggtcattgacaacgactcggaccgatg

SEQ ID NO: 15751 - DNA, 203 bp, synthetic construct
  source 1..203: mol_type = other DNA
ggcgcgccagtcctcaaatattgagggccgcgcgcgcgcgccgcttccgcttaaataacggcgggggaggccgcggtcggtctcagtcgccgctgccagctctcaaacattcttggcaaatgcttccgccgtcgcgtttctctgccggtcgcaatggaagaagagatcgccgcgctggtcattgacaacgactcggaccgatg

SEQ ID NO: 15752 - DNA, 203 bp, synthetic construct
  source 1..203: mol_type = other DNA
ggcgcgccagtcctactaaatacggggccgcgcgcgcgcgccgcttccgcttaaataacggcgggggaggccgcggtcggtctcagtcgccgctgccagctctcacccacggaatcgagaaagatccgccgtcgcgtttctctgccggtcgcaatggaagaagagatcgccgcgctggtcattgacaacgactcggaccgatg

SEQ ID NO: 15753 - DNA, 203 bp, synthetic construct
  source 1..203: mol_type = other DNA
ggcgcgccagtcctgggtaaatatgggccgcgcgcgcgcgccgcttccgcttaaataacggcgggggaggccgcggtcggtctcagtcgccgctgccagctctcaccggccgttcttccgccaccggccgttcgcgtttcaccggccgtcgcaatggaaccggccgtcgccgcgctaccggccgtcaacgactcggaccgatg

SEQ ID NO: 15754 - DNA, 203 bp, synthetic construct
  source 1..203: mol_type = other DNA
ggcgcgccagtcctcaaatactaggggccgcgcgcgcgcgccgcttccgcttaaataacggcgggggaggccgcggtcggtctcagtcgccgctgccagctctcaccggccgttcttccgccaccggccgttcgcgtttcaccggccgtcgcaatggaaccggccgtcgccgcgctggtcattgacaacgactcggaccgatg

SEQ ID NO: 15755 - DNA, 203 bp, synthetic construct
  source 1..203: mol_type = other DNA
ggcgcgccagtcctccctaaatacgggccgcgcgcgcgcgccgcttccgcttaaataacggcgggggaggccgcggtcggtctcagtcgccgctgccagctctcacggccggttcttccgccacggccggttcgcgtttcacggccggtcgcaatggaacggccggtcgccgcgctggtcattgacaacgactcggaccgatg

SEQ ID NO: 15756 - DNA, 203 bp, synthetic construct
  source 1..203: mol_type = other DNA
ggcgcgccagtcctggcctaaatagggccgcgcgcgcgcgccgcttccgcttaaataacggcgggggaggccgcggtcggtctcagtcgccgctgccagctctcccggcgggttcttccgccccggcgggttcgcgtttcccggcgggtcgcaatggaccggcgggtcgccgcgctccggcgggtcaacgactcggaccgatg

SEQ ID NO: 15757 - DNA, 203 bp, synthetic construct
  source 1..203: mol_type = other DNA
ggcgcgccagtccttatttagcgcgggccgcgcgcgcgcgccgcttccgcttaaataacggcgggggaggccgcggtcggtctcagtcgccgctgccagctctcgcaaccatactcccccccgctccgccgtcgcgtttctctgccggtcgcaatggaagaagagatcgccgcgctggtcattgacaacgactcggaccgatg

SEQ ID NO: 15758 - DNA, 203 bp, synthetic construct
  source 1..203: mol_type = other DNA
ggcgcgccagtccttacgctatttgggccgcgcgcgcgcgccgcttccgcttaaataacggcgggggaggccgcggtcggtctcagtcgccgctgccagctctcgcacgcccggcgggtcccgctccgccgtcgcgtttctctgccggtcgcaatggaagaagagatcgccgcgctggtcattgacaacgactcggaccgatg

SEQ ID NO: 15759 - DNA, 203 bp, synthetic construct
  source 1..203: mol_type = other DNA
ggcgcgccagtcctcgggttggacgggccgcgcgcgcgcgccgcttccgcttaaataacggcgggggaggccgcggtcggtctcagtcgccgctgccagctctcgcactctgattctccgccgctccgccgtcgcgtttctctgccggtcgcaatggaagaagagatcgccgcgctggtcattgacaacgactcggaccgatg

SEQ ID NO: 15760 - DNA, 203 bp, synthetic construct
  source 1..203: mol_type = other DNA
ggcgcgccagtcctgactcgtaccgggccgcgcgcgcgcgccgcttccgcttaaataacggcgggggaggccgcggtcggtctcagtcgccgctgccagctctcgcactctgttcttccgccgctccgccgtcgcgtttcttcttggcaaacaatggattcttggcaaaccgcgctttcttggcaaaacgactcggaccgatg

SEQ ID NO: 15761 - DNA, 203 bp, synthetic construct
  source 1..203: mol_type = other DNA
ggcgcgccagtcctctcgtacacggggccgcgcgcgcgcgccgcttccgcttaaataacggcgggggaggccgcggtcggtctcagtcgccgctgccagctctcgcactctgttcttccgcctactccccgtcgcgtttctactcccgtcgcaatggatactcccatcgccgcgcttactcccgacaacgactcggaccgatg

SEQ ID NO: 15762 - DNA, 203 bp, synthetic construct
  source 1..203: mol_type = other DNA
ggcgcgccagtcctagtcgtacgtgggccgcgcgcgcgcgccgcttccgcttaaataacggcgggggaggccgcggtcggtctcagtcgccgctgccagctctcgcactctgttcttccgccttcttggcaaagcgtttcttcttggcaaacaatggattcttggcaaaccgcgctttcttggcaaaacgactcggaccgatg

SEQ ID NO: 15763 - DNA, 203 bp, synthetic construct
  source 1..203: mol_type = other DNA
ggcgcgccagtcctgtacggttctgggccgcgcgcgcgcgccgcttccgcttaaataacggcgggggaggccgcggtcggtctcagtcgccgctgccagctctcttcttggcaaattccgccttcttggcaaagcgtttcttcttggcaaacaatggattcttggcaaaccgcgctttcttggcaaaacgactcggaccgatg

SEQ ID NO: 15764 - DNA, 203 bp, synthetic construct
  source 1..203: mol_type = other DNA
ggcgcgccagtcctgtctgaaccggggccgcgcgcgcgcgccgcttccgcttaaataacggcgggggaggccgcggtcggtctcagtcgccgctgccagctcttcactgtaccggccgtgcgtacccgccgtcgcgtttctctgccggtcgcaatggaagaagagatcgccgcgctggtcattgacaacgactcggaccgatg

SEQ ID NO: 15765 - DNA, 203 bp, synthetic construct
  source 1..203: mol_type = other DNA
ggcgcgccagtcctacgagaaccggggccgcgcgcgcgcgccgcttccgcttaaataacggcgggggaggccgcggtcggtctcagtcgccgctgccagctcttcactgtaccggccgtgcgtactcgccgtcgcgtttctctgccggtcgcaatggaagaagagatcgccgcgctggtcattgacaacgactcggaccgatg

SEQ ID NO: 15766 - DNA, 203 bp, synthetic construct
  source 1..203: mol_type = other DNA
ggcgcgccagtcctgtgaaccgcggggccgcgcgcgcgcgccgcttccgcttaaataacggcgggggaggccgcggtcggtctcagtcgccgctgccagctggaagctgcccggcgggtcatgggaagccgtcgcgtttctctgccggtcgcaatggaagaagagatcgccgcgctggtcattgacaacgactcggaccgatg

SEQ ID NO: 15767 - DNA, 203 bp, synthetic construct
  source 1..203: mol_type = other DNA
ggcgcgccagtcctgagccgacgcgggccgcgcgcgcgcgccgcttccgcttaaataacggcgggggaggccgcggtcggtctcagtcgccgctgccagtgcccttccgtcaattcctttaagtttcagcgtcgcgtttctctgccggtcgcaatggaagaagagatcgccgcgctggtcattgacaacgactcggaccgatg

SEQ ID NO: 15768 - DNA, 203 bp, synthetic construct
  source 1..203: mol_type = other DNA
ggcgcgccagtcctagccgacgttgggccgcgcgcgcgcgccgcttccgcttaaataacggcgggggaggccgcggtcggtctcagtcgccgctgccataatgaaaacattcttggcaaatgctttcgctgtcgcgtttctctgccggtcgcaatggaagaagagatcgccgcgctggtcattgacaacgactcggaccgatg

SEQ ID NO: 15769 - DNA, 203 bp, synthetic construct
  source 1..203: mol_type = other DNA
ggcgcgccagtcctagtgccgaaggggccgcgcgcgcgcgccgcttccgcttaaataacggcgggggaggccgcggtcggtctcagtcgccgctgccgcagtttcactgtaccggccgtgcgtactcagactcgcgtttctctgccggtcgcaatggaagaagagatcgccgcgctggtcattgacaacgactcggaccgatg

SEQ ID NO: 15770 - DNA, 203 bp, synthetic construct
  source 1..203: mol_type = other DNA
ggcgcgccagtccttttcgccgaagggccgcgcgcgcgcgccgcttccgcttaaataacggcgggggaggccgcggtcggtctcagtcgccgctgcctcccggaagctgcccggcgggtcatgggaataactcgcgtttctctgccggtcgcaatggaagaagagatcgccgcgctggtcattgacaacgactcggaccgatg

SEQ ID NO: 15771 - DNA, 203 bp, synthetic construct
  source 1..203: mol_type = other DNA
ggcgcgccagtcctagccgattgagggccgcgcgcgcgcgccgcttccgcttaaataacggcgggggaggccgcggtcggtctcagtcgccgctgccttaatgaaaacattcttggcaaatgctttcgctctcgcgtttctctgccggtcgcaatggaagaagagatcgccgcgctggtcattgacaacgactcggaccgatg

SEQ ID NO: 15772 - DNA, 203 bp, synthetic construct
  source 1..203: mol_type = other DNA
ggcgcgccagtcctacgtgccgaagggccgcgcgcgcgcgccgcttccgcttaaataacggcgggggaggccgcggtcggtctcagtcgccgctgcgcaccaccacccacggaatcgagaaagagctatcaacgcgtttctctgccggtcgcaatggaagaagagatcgccgcgctggtcattgacaacgactcggaccgatg

SEQ ID NO: 15773 - DNA, 203 bp, synthetic construct
  source 1..203: mol_type = other DNA
ggcgcgccagtccttcgccgagtggggccgcgcgcgcgcgccgcttccgcttaaataacggcgggggaggccgcggtcggtctcagtcgccgctgctggtgcccttccgtcaattcctttaagtttcagcttcgcgtttctctgccggtcgcaatggaagaagagatcgccgcgctggtcattgacaacgactcggaccgatg

SEQ ID NO: 15774 - DNA, 203 bp, synthetic construct
  source 1..203: mol_type = other DNA
ggcgcgccagtccttgtcagccgagggccgcgcgcgcgcgccgcttccgcttaaataacggcgggggaggccgcggtcggtctcagtcgccgctgcttcccggaagctgcccggcgggtcatgggaataacgcgcgtttctctgccggtcgcaatggaagaagagatcgccgcgctggtcattgacaacgactcggaccgatg

SEQ ID NO: 15775 - DNA, 203 bp, synthetic construct
  source 1..203: mol_type = other DNA
ggcgcgccagtcctgccgagttcggggccgcgcgcgcgcgccgcttccgcttaaataacggcgggggaggccgcggtcggtctcagtcgccgctggattaatgaaaacattcttggcaaatgctttcgctctggcgtttctctgccggtcgcaatggaagaagagatcgccgcgctggtcattgacaacgactcggaccgatg

SEQ ID NO: 15776 - DNA, 203 bp, synthetic construct
  source 1..203: mol_type = other DNA
ggcgcgccagtcctttagccgactgggccgcgcgcgcgcgccgcttccgcttaaataacggcgggggaggccgcggtcggtctcagtcgccgctggtggtgcccttccgtcaattcctttaagtttcagctttgcatttctctgccggtcgcaatggaagaagagatcgccgcgctggtcattgacaacgactcggaccgatg

SEQ ID NO: 15777 - DNA, 203 bp, synthetic construct
  source 1..203: mol_type = other DNA
ggcgcgccagtcctgccgaatagggggccgcgcgcgcgcgccgcttccgcttaaataacggcgggggaggccgcggtcggtctcagtcgccgctttcgcagtttcactgtaccggccgtgcgtactcagacatgcgtttctctgccggtcgcaatggaagaagagatcgccgcgctggtcattgacaacgactcggaccgatg

SEQ ID NO: 15778 - DNA, 203 bp, synthetic construct
  source 1..203: mol_type = other DNA
ggcgcgccagtcctgaaagccgatgggccgcgcgcgcgcgccgcttccgcttaaataacggcgggggaggccgcggtcggtctcagtcgccgtggtttcccggaagctgcccggcgggtcatgggaataacgccgctttctctgccggtcgcaatggaagaagagatcgccgcgctggtcattgacaacgactcggaccgatg

SEQ ID NO: 15779 - DNA, 203 bp, synthetic construct
  source 1..203: mol_type = other DNA
ggcgcgccagtcctgccgatcagtgggccgcgcgcgcgcgccgcttccgcttaaataacggcgggggaggccgcggtcggtctcagtcgcctcttgattaatgaaaacattcttggcaaatgctttcgctctggtccttctctgccggtcgcaatggaagaagagatcgccgcgctggtcattgacaacgactcggaccgatg

SEQ ID NO: 15780 - DNA, 203 bp, synthetic construct
  source 1..203: mol_type = other DNA
ggcgcgccagtccttgccgaaaatgggccgcgcgcgcgcgccgcttccgcttaaataacggcgggggaggccgcggtcggtctcagtcgcggccatgcaccaccacccacggaatcgagaaagagctatcaatctgtcactctgccggtcgcaatggaagaagagatcgccgcgctggtcattgacaacgactcggaccgatg

SEQ ID NO: 15781 - DNA, 203 bp, synthetic construct
  source 1..203: mol_type = other DNA
ggcgcgccagtccttcggcagagtgggccgcgcgcgcgcgccgcttccgcttaaataacggcgggggaggccgcggtcggtctcagtcgctttggtttcccggaagctgcccggcgggtcatgggaataacgccgccgtctctgccggtcgcaatggaagaagagatcgccgcgctggtcattgacaacgactcggaccgatg

SEQ ID NO: 15782 - DNA, 203 bp, synthetic construct
  source 1..203: mol_type = other DNA
ggcgcgccagtcctgtcggcatacgggccgcgcgcgcgcgccgcttccgcttaaataacggcgggggaggccgcggtcggtctcagtttgccaagaaagctctctttgccaagaattccgcctttgccaagaagcgtttctttgccaagaacaatggatttgccaagaaccgcgctggtcattgacaacgactcggaccgatg

SEQ ID NO: 15783 - DNA, 203 bp, synthetic construct
  source 1..203: mol_type = other DNA
ggcgcgccagtcctaagtcggcatgggccgcgcgcgcgcgccgcttccgcttaaataacggcgggggaggccgcggtcggtctcttcctttaagtttcagctttgcaaccatactccccccggaacccaaagactttggtttccccggtcgcaatggaagaagagatcgccgcgctggtcattgacaacgactcggaccgatg

SEQ ID NO: 15784 - DNA, 203 bp, synthetic construct
  source 1..203: mol_type = other DNA
ggcgcgccagtcctgtcggctacggggccgcgcgcgcgcgccgcttccgcttaaataacggcgggggaggccgcggtcgtgatttaatgagccattcgcagtttcactgtaccggccgtgcgtactcagacatgcatggcttaatctttcgcaatggaagaagagatcgccgcgctggtcattgacaacgactcggaccgatg

SEQ ID NO: 15785 - DNA, 203 bp, synthetic construct
  source 1..203: mol_type = other DNA
ggcgcgccagtcctacacctcggcgggccgcgcgcgcgcgccgcttccgcttaaataacggcgggggaggccgcggtggaacccaaagactttggtttcccggaagctgcccggcgggtcatgggaataacgccgccgcatcgccggtcggcaatggaagaagagatcgccgcgctggtcattgacaacgactcggaccgatg

SEQ ID NO: 15786 - DNA, 203 bp, synthetic construct
  source 1..203: mol_type = other DNA
ggcgcgccagtccttgggctcggcgggccgcgcgcgcgcgccgcttccgcttaaataacggcgggggaggccgtaagccgcaggctccactcctggtggtgcccttccgtcaattcctttaagtttcagctttgcaaccatactccccccggaacggaagaagagatcgccgcgctggtcattgacaacgactcggaccgatg

SEQ ID NO: 15787 - DNA, 203 bp, synthetic construct
  source 1..203: mol_type = other DNA
ggcgcgccagtccttatcggcaaggggccgcgcgcgcgcgccgcttccgcttaaataacggcgggggaggcgcccttccgtcaattcctttaagtttcagctttgcaaccatactccccccggaacccaaagactttggtttcccggaagctgcccgaagaagagatcgccgcgctggtcattgacaacgactcggaccgatg

SEQ ID NO: 15788 - DNA, 203 bp, synthetic construct
  source 1..203: mol_type = other DNA
ggcgcgccagtcctgcttcggcacgggccgcgcgcgcgcgccgcttccgcttaaataacggcgggggaggcttcgaacctccgactttcgttcttgattaatgaaaacattcttggcaaatgctttcgctctggtccgtcttgcgccggtccaagaatagaagagatcgccgcgctggtcattgacaacgactcggaccgatg

SEQ ID NO: 15789 - DNA, 203 bp, synthetic construct
  source 1..203: mol_type = other DNA
ggcgcgccagtcctcccgctaccggggccgcgcgcgcgcgccgcttccgcttaaataacggcgggggtggtgcccttccgtcaattcctttaagtttcagctttgcaaccatactccccccggaacccaaagactttggtttcccggaagctgcccggcggagagatcgccgcgctggtcattgacaacgactcggaccgatg

SEQ ID NO: 15790 - DNA, 203 bp, synthetic construct
  source 1..203: mol_type = other DNA
ggcgcgccagtcctcacacccttagggccgcgcgcgcgcgccgcttccgcttaaataacggcgggggtggtgcccttccgtcaattcctttaagtttcagctttgcaaccatactccccccggaacccaaagactttggtttcccggaagctgcccggcgggtagatcgccgcgctggtcattgacaacgactcggaccgatg

SEQ ID NO: 15791 - DNA, 203 bp, synthetic construct
  source 1..203: mol_type = other DNA
ggcgcgccagtcctaaagcccgttgggccgcgcgcgcgcgccgcttccgcttaaataacggcgtgagtcaaattaagccgcaggctccactcctggtggtgcccttccgtcaattcctttaagtttcagctttgcaaccatactccccccggaacccaaagacttatcgccgcgctggtcattgacaacgactcggaccgatg

SEQ ID NO: 15792 - DNA, 203 bp, synthetic construct
  source 1..203: mol_type = other DNA
ggcgcgccagtcctgttcgggcttgggccgcgcgcgcgcgccgcttccgcttaaataacgggaccaaaggaaccataactgatttaatgagccattcgcagtttcactgtaccggccgtgcgtactcagacatgcatggcttaatctttgagacaagcatatgctaccgccgcgctggtcattgacaacgactcggaccgatg

SEQ ID NO: 15793 - DNA, 203 bp, synthetic construct
  source 1..203: mol_type = other DNA
ggcgcgccagtcctctttctcgcggggccgcgcgcgcgcgccgcttccgcttaaataacgtgttgagtcaaattaagccgcaggctccactcctggtggtgcccttccgtcaattcctttaagtttcagctttgcaaccatactccccccggaacccaaagactttggttcgcgctggtcattgacaacgactcggaccgatg

SEQ ID NO: 15794 - DNA, 203 bp, synthetic construct
  source 1..203: mol_type = other DNA
ggcgcgccagtcctcacctcgcgggggccgcgcgcgcgcgccgcttccgcttaaataactgcaaccatactccccccggaacccaaagactttggtttcccggaagctgcccggcgggtcatgggaataacgccgccgcatcgccggtcggcatcgtttatggtcggaaccgcgctggtcattgacaacgactcggaccgatg

SEQ ID NO: 15795 - DNA, 203 bp, synthetic construct
  source 1..203: mol_type = other DNA
ggcgcgccagtcctgaccgcgagagggccgcgcgcgcgcgccgcttccgcttaaataccactcctggtggtgcccttccgtcaattcctttaagtttcagctttgcaaccatactccccccggaacccaaagactttggtttcccggaagctgcccggcgggtcatgggaagcgctggtcattgacaacgactcggaccgatg

SEQ ID NO: 15796 - DNA, 203 bp, synthetic construct
  source 1..203: mol_type = other DNA
ggcgcgccagtcctacgcgagtgagggccgcgcgcgcgcgccgcttccgcttaaataccgtgttgagtcaaattaagccgcaggctccactcctggtggtgcccttccgtcaattcctttaagtttcagctttgcaaccatactccccccggaacccaaagactttggtttgcgctggtcattgacaacgactcggaccgatg

SEQ ID NO: 15797 - DNA, 203 bp, synthetic construct
  source 1..203: mol_type = other DNA
ggcgcgccagtcctacgcgagaacgggccgcgcgcgcgcgccgcttccgcttaaatagagcgaccaaaggaaccataactgatttaatgagccattcgcagtttcactgtaccggccgtgcgtactcagacatgcatggcttaatctttgagacaagcatatgctactggcgcgctggtcattgacaacgactcggaccgatg

SEQ ID NO: 15798 - DNA, 203 bp, synthetic construct
  source 1..203: mol_type = other DNA
ggcgcgccagtcctgacacaccatgggccgcgcgcgcgcgccgcttccgcttaaatcccgtgttgagtcaaattaagccgcaggctccactcctggtggtgcccttccgtcaattcctttaagtttcagctttgcaaccatactccccccggaacccaaagactttggtttccgctggtcattgacaacgactcggaccgatg

SEQ ID NO: 15799 - DNA, 203 bp, synthetic construct
  source 1..203: mol_type = other DNA
ggcgcgccagtcctgtgtcagtaggggccgcgcgcgcgcgccgcttccgcttaaatcgagcgaccaaaggaaccataactgatttaatgagccattcgcagtttcactgtaccggccgtgcgtactcagacatgcatggcttaatctttgagacaagcatatgctactggcacgctggtcattgacaacgactcggaccgatg

SEQ ID NO: 15800 - DNA, 203 bp, synthetic construct
  source 1..203: mol_type = other DNA
ggcgcgccagtcctacaggtgtcagggccgcgcgcgcgcgccgcttccgcttaagacggtatctgatcgtcttcgaacctccgactttcgttcttgattaatgaaaacattcttggcaaatgctttcgctctggtccgtcttgcgccggtccaagaatttcacctctagcggcgctggtcattgacaacgactcggaccgatg

SEQ ID NO: 15801 - DNA, 203 bp, synthetic construct
  source 1..203: mol_type = other DNA
ggcgcgccagtccttgtgtcaccggggccgcgcgcgcgcgccgcttccgcttacagctttgcaaccatactccccccggaacccaaagactttggtttcccggaagctgcccggcgggtcatgggaataacgccgccgcatcgccggtcggcatcgtttatggtcggaactacgatggtcattgacaacgactcggaccgatg

SEQ ID NO: 15802 - DNA, 203 bp, synthetic construct
  source 1..203: mol_type = other DNA
ggcgcgccagtcctttgacaccacgggccgcgcgcgcgcgccgcttccgcttacgacggtatctgatcgtcttcgaacctccgactttcgttcttgattaatgaaaacattcttggcaaatgctttcgctctggtccgtcttgcgccggtccaagaatttcacctctagcggcgctggtcattgacaacgactcggaccgatg

SEQ ID NO: 15803 - DNA, 203 bp, synthetic construct
  source 1..203: mol_type = other DNA
ggcgcgccagtcctatgacactgcgggccgcgcgcgcgcgccgcttccgcttagagcgagcgaccaaaggaaccataactgatttaatgagccattcgcagtttcactgtaccggccgtgcgtactcagacatgcatggcttaatctttgagacaagcatatgctactggcaggatggtcattgacaacgactcggaccgatg

SEQ ID NO: 15804 - DNA, 203 bp, synthetic construct
  source 1..203: mol_type = other DNA
ggcgcgccagtcctgcgcaggacggggccgcgcgcgcgcgccgcttccggaggtttcccgtgttgagtcaaattaagccgcaggctccactcctggtggtgcccttccgtcaattcctttaagtttcagctttgcaaccatactccccccggaacccaaagactttggtttcccggaagcattgacaacgactcggaccgatg

SEQ ID NO: 15805 - DNA, 203 bp, synthetic construct
  source 1..203: mol_type = other DNA
ggcgcgccagtcctagcgcaggccgggccgcgcgcgcgcgccgcttcctgaggtttcccgtgttgagtcaaattaagccgcaggctccactcctggtggtgcccttccgtcaattcctttaagtttcagctttgcaaccatactccccccggaacccaaagactttggtttcccggaagcattgacaacgactcggaccgatg

SEQ ID NO: 15806 - DNA, 203 bp, synthetic construct
  source 1..203: mol_type = other DNA
ggcgcgccagtcctattctgcgccgggccgcgcgcgcgcgccgcttcgtgaggtttcccgtgttgagtcaaattaagccgcaggctccactcctggtggtgcccttccgtcaattcctttaagtttcagctttgcaaccatactccccccggaacccaaagactttggtttcccggaagctttgacaacgactcggaccgatg

SEQ ID NO: 15807 - DNA, 203 bp, synthetic construct
  source 1..203: mol_type = other DNA
ggcgcgccagtccttatgctgcgcgggccgcgcgcgcgcgccgcttggtgaggtttcccgtgttgagtcaaattaagccgcaggctccactcctggtggtgcccttccgtcaattcctttaagtttcagctttgcaaccatactccccccggaacccaaagactttggtttcccggaagctgtgacaacgactcggaccgatg

SEQ ID NO: 15808 - DNA, 203 bp, synthetic construct
  source 1..203: mol_type = other DNA
ggcgcgccagtcctccagtgggtggggccgcgcgtcaattcctttaccgccgtcaattcctttagggacgtcaattcctttatcagcgtcaattcctttatctccgtcaattcctttacgcccgtcaattcctttatttccgtcaattcctttatggacgtcaattcctttacgctggtcattgacaacgactcggaccgatg

SEQ ID NO: 15809 - DNA, 203 bp, synthetic construct
  source 1..203: mol_type = other DNA
ggcgcgccagtcctaagtgggtcagggccgcgtactcccgccgcttccgctactcccacggcgggggatactcccgtcggtctcagtactccctgccagctctctactcccgttcttccgcctactccccgtcgcgtttctactcccgtcgcaatggatactcccatcgccgcgcttactcccgacaacgactcggaccgatg

SEQ ID NO: 15810 - DNA, 203 bp, synthetic construct
  source 1..203: mol_type = other DNA
ggcgcgccagtcctcccactgcgtgttgtgttagttgtgttagtgtaggagaggagcgagcgaccaaaggaaccataactgatttaatgagccattcgcagtttcactgtaccggccgtgcgtactcagacatgcatggcttaatctttgagacaagcatatgctactggcaggatcaaccaggtagtcgactcggaccgatg

SEQ ID NO: 15811 - DNA, 203 bp, synthetic construct
  source 1..203: mol_type = other DNA
ggcgcgccagtcctcgatagtggggttgtgttagttgtgttagttaagccgcaggctccactcctggtggtgcccttccgtcaattcctttaagtttcagctttgcaaccatactccccccggaacccaaagactttggtttcccggaagctgcccggcgggtcatgggaataacgccgccgcatagtcgactcggaccgatg

SEQ ID NO: 15812 - DNA, 203 bp, synthetic construct
  source 1..203: mol_type = other DNA
ggcgcgccagtcctcgggcccactgttgtgttagttgtgttagttaagccgcaggctccactcctggtggtgcccttccgtcaattcctttaagtttcagctttgcaaccatactccccccggaacccaaagactttggtttcccggaagctgcccggcgggtcatgggaataacgccgccgcttagtcgactcggaccgatg

SEQ ID NO: 15813 - DNA, 203 bp, synthetic construct
  source 1..203: mol_type = other DNA
ggcgcgccagtcctaagcccacttgttgtgttagttgtgttagttcggaactacgacggtatctgatcgtcttcgaacctccgactttcgttcttgattaatgaaaacattcttggcaaatgctttcgctctggtccgtcttgcgccggtccaagaatttcacctctagcggcgcaatacgaattagtcgactcggaccgatg

SEQ ID NO: 15814 - DNA, 203 bp, synthetic construct
  source 1..203: mol_type = other DNA
ggcgcgccagtcctagtgggacttgttgtgttagttgtgttagttgggaactacgacggtatctgatcgtcttcgaacctccgactttcgttcttgattaatgaaaacattcttggcaaatgctttcgctctggtccgtcttgcgccggtccaagaatttcacctctagcggcgcaatacgagttagtcgactcggaccgatg

SEQ ID NO: 15815 - DNA, 203 bp, synthetic construct
  source 1..203: mol_type = other DNA
ggcgcgccagtcctacgcgctgacgttgtgttagttgtgttagttgtaagtttcagctttgcaaccatactccccccggaacccaaagactttggtttcccggaagctgcccggcgggtcatgggaataacgccgccgcatcgccggtcggcatcgtttatggtcggaactacgacggtatcgttagtcgactcggaccgatg

SEQ ID NO: 15816 - DNA, 203 bp, synthetic construct
  source 1..203: mol_type = other DNA
ggcgcgccagtccttcgccctagagttgtgttagttgtgttagttgtgccgcaggctccactcctggtggtgcccttccgtcaattcctttaagtttcagctttgcaaccatactccccccggaacccaaagactttggtttcccggaagctgcccggcgggtcatgggaataacgccgcgtgttagtcgactcggaccgatg

SEQ ID NO: 15817 - DNA, 203 bp, synthetic construct
  source 1..203: mol_type = other DNA
ggcgcgccagtcctaccggtgctagttgtgttagttgtgttagttgtgtgtttcagctttgcaaccatactccccccggaacccaaagactttggtttcccggaagctgcccggcgggtcatgggaataacgccgccgcatcgccggtcggcatcgtttatggtcggaactacgacggttgtgttagtcgactcggaccgatg

SEQ ID NO: 15818 - DNA, 203 bp, synthetic construct
  source 1..203: mol_type = other DNA
ggcgcgccagtccttcgtgcgtcagttgtgttagttgtgttagttgtgttagacgacggtatctgatcgtcttcgaacctccgactttcgttcttgattaatgaaaacattcttggcaaatgctttcgctctggtccgtcttgcgccggtccaagaatttcacctctagcggcgcaagttgtgttagtcgactcggaccgatg

SEQ ID NO: 15819 - DNA, 203 bp, synthetic construct
  source 1..203: mol_type = other DNA
ggcgcgccagtccttgcgtcacgagttgtgttagttgtgttagttgtgttagggagcgagcgaccaaaggaaccataactgatttaatgagccattcgcagtttcactgtaccggccgtgcgtactcagacatgcatggcttaatctttgagacaagcatatgctactggcaggatagttgtgttagtcgactcggaccgatg

SEQ ID NO: 15820 - DNA, 203 bp, synthetic construct
  source 1..203: mol_type = other DNA
ggcgcgccagtcctgcgtgacgctgttgtgttagttgtgttagttgtgttagtcagctttgcaaccatactccccccggaacccaaagactttggtttcccggaagctgcccggcgggtcatgggaataacgccgccgcatcgccggtcggcatcgtttatggtcggaactacgatagttgtgttagtcgactcggaccgatg

SEQ ID NO: 15821 - DNA, 203 bp, synthetic construct
  source 1..203: mol_type = other DNA
ggcgcgccagtcctcaagcgtcacgttgtgttagttgtgttagttgtgttagtcgacggtatctgatcgtcttcgaacctccgactttcgttcttgattaatgaaaacattcttggcaaatgctttcgctctggtccgtcttgcgccggtccaagaatttcacctctagcggcgctagttgtgttagtcgactcggaccgatg

SEQ ID NO: 15822 - DNA, 203 bp, synthetic construct
  source 1..203: mol_type = other DNA
ggcgcgccagtcctgtgacgcagagttgtgttagttgtgttagttgtgttagttgaattaaccagacaaatcgctccaccaactaagaacggccatgcaccaccacccacggaatcgagaaagagctatcaatctgtcaatcctgtccgtgtccgggccgggtgaggtttcccgttagttgtgttagtcgactcggaccgatg

SEQ ID NO: 15823 - DNA, 203 bp, synthetic construct
  source 1..203: mol_type = other DNA
ggcgcgccagtcctctctcgcgttgttgtgttagttgtgttagttgtgttagttggctttgcaaccatactccccccggaacccaaagactttggtttcccggaagctgcccggcgggtcatgggaataacgccgccgcatcgccggtcggcatcgtttatggtcggaactacgttagttgtgttagtcgactcggaccgatg

SEQ ID NO: 15824 - DNA, 203 bp, synthetic construct
  source 1..203: mol_type = other DNA
ggcgcgccagtccttctaacgcgggttgtgttagttgtgttagttgtgttagttgtcgagcgaccaaaggaaccataactgatttaatgagccattcgcagtttcactgtaccggccgtgcgtactcagacatgcatggcttaatctttgagacaagcatatgctactggcatgttagttgtgttagtcgactcggaccgatg

SEQ ID NO: 15825 - DNA, 203 bp, synthetic construct
  source 1..203: mol_type = other DNA
ggcgcgccagtccttaacgcgagtgttgtgttagttgtgttagttgtgttagttgtctttgcaaccatactccccccggaacccaaagactttggtttcccggaagctgcccggcgggtcatgggaataacgccgccgcatcgccggtcggcatcgtttatggtcggaactatgttagttgtgttagtcgactcggaccgatg

SEQ ID NO: 15826 - DNA, 203 bp, synthetic construct
  source 1..203: mol_type = other DNA
ggcgcgccagtcctcgcaacgcgggttgtgttagttgtgttagttgtgttagttgtgccactcctggtggtgcccttccgtcaattcctttaagtttcagctttgcaaccatactccccccggaacccaaagactttggtttcccggaagctgcccggcgggtcatgggaagtgttagttgtgttagtcgactcggaccgatg

SEQ ID NO: 15827 - DNA, 203 bp, synthetic construct
  source 1..203: mol_type = other DNA
ggcgcgccagtccttcaacgcgcagttgtgttagttgtgttagttgtgttagttgtgccgtgttgagtcaaattaagccgcaggctccactcctggtggtgcccttccgtcaattcctttaagtttcagctttgcaaccatactccccccggaacccaaagactttggtttgtgttagttgtgttagtcgactcggaccgatg

SEQ ID NO: 15828 - DNA, 203 bp, synthetic construct
  source 1..203: mol_type = other DNA
ggcgcgccagtccttggcgcaggagttgtgttagttgtgttagttgtgttagttgtgttaaccagacaaatcgctccaccaactaagaacggccatgcaccaccacccacggaatcgagaaagagctatcaatctgtcaatcctgtccgtgtccgggccgggtgaggtttcgtgttagttgtgttagtcgactcggaccgatg

SEQ ID NO: 15829 - DNA, 203 bp, synthetic construct
  source 1..203: mol_type = other DNA
ggcgcgccagtccttggcgcgttagttgtgttagttgtgttagttgtgttagttgtgttaaccagacaaatcgctccaccaactaagaacggccatgcaccaccacccacggaatcgagaaagagctatcaatctgtcaatcctgtccgtgtccgggccgggtgaggttttgtgttagttgtgttagtcgactcggaccgatg

SEQ ID NO: 15830 - DNA, 203 bp, synthetic construct
  source 1..203: mol_type = other DNA
ggcgcgccagtccttgtgccacgtgttgtgttagttgtgttagttgtgttagttgtgttaatctgatcgtcttcgaacctccgactttcgttcttgattaatgaaaacattcttggcaaatgctttcgctctggtccgtcttgcgccggtccaagaatttcacctctagttgtgttagttgtgttagtcgactcggaccgatg

SEQ ID NO: 15831 - DNA, 203 bp, synthetic construct
  source 1..203: mol_type = other DNA
ggcgcgccagtcctgtatgccaccgttgtgttagttgtgttagttgtgttagttgtgttacgaccaaaggaaccataactgatttaatgagccattcgcagtttcactgtaccggccgtgcgtactcagacatgcatggcttaatctttgagacaagcatatgctactgttgtgttagttgtgttagtcgactcggaccgatg

SEQ ID NO: 15832 - DNA, 203 bp, synthetic construct
  source 1..203: mol_type = other DNA
ggcgcgccagtcctgaagtggctcgttgtgttagttgtgttagttgtgttagttgtgttagcaaccatactccccccggaacccaaagactttggtttcccggaagctgcccggcgggtcatgggaataacgccgccgcatcgccggtcggcatcgtttatggtcggagttgtgttagttgtgttagtcgactcggaccgatg

SEQ ID NO: 15833 - DNA, 203 bp, synthetic construct
  source 1..203: mol_type = other DNA
ggcgcgccagtcctgccaccatttgttgtgttagttgtgttagttgtgttagttgtgttagtcagacaaatcgctccaccaactaagaacggccatgcaccaccacccacggaatcgagaaagagctatcaatctgtcaatcctgtccgtgtccgggccgggtgagtagttgtgttagttgtgttagtcgactcggaccgatg

SEQ ID NO: 15834 - DNA, 203 bp, synthetic construct
  source 1..203: mol_type = other DNA
ggcgcgccagtcctagccacgccggttgtgttagttgtgttagttgtgttagttgtgttagtcctggtggtgcccttccgtcaattcctttaagtttcagctttgcaaccatactccccccggaacccaaagactttggtttcccggaagctgcccggcgggtcattagttgtgttagttgtgttagtcgactcggaccgatg

SEQ ID NO: 15835 - DNA, 203 bp, synthetic construct
  source 1..203: mol_type = other DNA
ggcgcgccagtcctagtggcattcgttgtgttagttgtgttagttgtgttagttgtgttagttagacaaatcgctccaccaactaagaacggccatgcaccaccacccacggaatcgagaaagagctatcaatctgtcaatcctgtccgtgtccgggccgggtgattagttgtgttagttgtgttagtcgactcggaccgatg

SEQ ID NO: 15836 - DNA, 203 bp, synthetic construct
  source 1..203: mol_type = other DNA
ggcgcgccagtcctaagtggccctgttgtgttagttgtgttagttgtgttagttgtgttagttgcaaaggaaccataactgatttaatgagccattcgcagtttcactgtaccggccgtgcgtactcagacatgcatggcttaatctttgagacaagcatatgcgttagttgtgttagttgtgttagtcgactcggaccgatg

SEQ ID NO: 15837 - DNA, 203 bp, synthetic construct
  source 1..203: mol_type = other DNA
ggcgcgccagtcctggtggccctagttgtgttagttgtgttagttgtgttagttgtgttagttggacaaatcgctccaccaactaagaacggccatgcaccaccacccacggaatcgagaaagagctatcaatctgtcaatcctgtccgtgtccgggccgggtggttagttgtgttagttgtgttagtcgactcggaccgatg

SEQ ID NO: 15838 - DNA, 203 bp, synthetic construct
  source 1..203: mol_type = other DNA
ggcgcgccagtcctgggccaccttgttgtgttagttgtgttagttgtgttagttgtgttagttgtgatactccccccggaacccaaagactttggtttcccggaagctgcccggcgggtcatgggaataacgccgccgcatcgccggtcggcatcgtttatggtgttagttgtgttagttgtgttagtcgactcggaccgatg

SEQ ID NO: 15839 - DNA, 203 bp, synthetic construct
  source 1..203: mol_type = other DNA
ggcgcgccagtcctcctagccactgttgtgttagttgtgttagttgtgttagttgtgttagttgtggtggtgcccttccgtcaattcctttaagtttcagctttgcaaccatactccccccggaacccaaagactttggtttcccggaagctgcccggcgggttgttagttgtgttagttgtgttagtcgactcggaccgatg

SEQ ID NO: 15840 - DNA, 203 bp, synthetic construct
  source 1..203: mol_type = other DNA
ggcgcgccagtcctgtggcacttcgttgtgttagttgtgttagttgtgttagttgtgttagttgtgtaggaaccataactgatttaatgagccattcgcagtttcactgtaccggccgtgcgtactcagacatgcatggcttaatctttgagacaagcatatgtgttagttgtgttagttgtgttagtcgactcggaccgatg

SEQ ID NO: 15841 - DNA, 203 bp, synthetic construct
  source 1..203: mol_type = other DNA
ggcgcgccagtcctccagtggcccgttgtgttagttgtgttagttgtgttagttgtgttagttgtgtcgtcttcgaacctccgactttcgttcttgattaatgaaaacattcttggcaaatgctttcgctctggtccgtcttgcgccggtccaagaatttcagtgttagttgtgttagttgtgttagtcgactcggaccgatg

SEQ ID NO: 15842 - DNA, 203 bp, synthetic construct
  source 1..203: mol_type = other DNA
ggcgcgccagtcctatcgtggcaggttgtgttagttgtgttagttgtgttagttgtgttagttgtgttaatcgctccaccaactaagaacggccatgcaccaccacccacggaatcgagaaagagctatcaatctgtcaatcctgtccgtgtccgggccgttgtgttagttgtgttagttgtgttagtcgactcggaccgatg

SEQ ID NO: 15843 - DNA, 203 bp, synthetic construct
  source 1..203: mol_type = other DNA
ggcgcgccagtcctaccgagtggcgttgtgttagttgtgttagttgtgttagttgtgttagttgtgttaccggccgtagttgtgttaccggccgtagttgtgttaccggccgtagttgtgttaccggccgtagttgtgttaccggccgtagttgtgttaccggccgtagttgtgttaccggccgtagtcgactcggaccgatg

SEQ ID NO: 15844 - DNA, 203 bp, synthetic construct
  source 1..203: mol_type = other DNA
ggcgcgccagtcctccttagtggcgttgtgttagttgtgttagttgtgttagttgtgttagttgtgttagaaccataactgatttaatgagccattcgcagtttcactgtaccggccgtgcgtactcagacatgcatggcttaatctttgagacaagcagttgtgttagttgtgttagttgtgttagtcgactcggaccgatg

SEQ ID NO: 15845 - DNA, 203 bp, synthetic construct
  source 1..203: mol_type = other DNA
ggcgcgccagtcctgcagtgccacgttgtgttagttgtgttagttgtgttagttgtgttagttgtgttagtattaagccgcaggctccactcctggtggtgcccttccgtcaattcctttaagtttcagctttgcaaccatactccccccggaaccctagttgtgttagttgtgttagttgtgttagtcgactcggaccgatg

SEQ ID NO: 15846 - DNA, 203 bp, synthetic construct
  source 1..203: mol_type = other DNA
ggcgcgccagtcctcgaagtggccgttgtgttagttgtgttagttgtgttagttgtgttagttgtgttagtccccccggaacccaaagactttggtttcccggaagctgcccggcgggtcatgggaataacgccgccgcatcgccggtcggcatcgttagttgtgttagttgtgttagttgtgttagtcgactcggaccgatg

SEQ ID NO: 15847 - DNA, 203 bp, synthetic construct
  source 1..203: mol_type = other DNA
ggcgcgccagtccttacccgtggcgttgtgttagttgtgttagttgtgttagttgtgttagttgtgttagtgcccttccgtcaattcctttaagtttcagctttgcaaccatactccccccggaacccaaagactttggtttcccggaagctgcccggagttgtgttagttgtgttagttgtgttagtcgactcggaccgatg

SEQ ID NO: 15848 - DNA, 203 bp, synthetic construct
  source 1..203: mol_type = other DNA
ggcgcgccagtccttttacgtggcgttgtgttagttgtgttagttgtgttagttgtgttagttgtgttagtgcccttccgtcaattcctttaagtttcagctttgcaaccatactccccccggaacccaaagactttggtttcccggaagctgcccgtagttgtgttagttgtgttagttgtgttagtcgactcggaccgatg

SEQ ID NO: 15849 - DNA, 203 bp, synthetic construct
  source 1..203: mol_type = other DNA
ggcgcgccagtcctcatgggtggcgttgtgttagttgtgttagttgtgttagttgtgttagttgtgttagttccataactgatttaatgagccattcgcagtttcactgtaccggccgtgcgtactcagacatgcatggcttaatctttgagacaattagttgtgttagttgtgttagttgtgttagtcgactcggaccgatg

SEQ ID NO: 15850 - DNA, 203 bp, synthetic construct
  source 1..203: mol_type = other DNA
ggcgcgccagtccttagccaccctgttgtgttagttgtgttagttgtgttagttgtgttagttgtgttagttcccccggaacccaaagactttggtttcccggaagctgcccggcgggtcatgggaataacgccgccgcatcgccggtcggcatcgttagttgtgttagttgtgttagttgtgttagtcgactcggaccgatg

SEQ ID NO: 15851 - DNA, 203 bp, synthetic construct
  source 1..203: mol_type = other DNA
ggcgcgccagtccttcgaactacggttgtgttagttgtgttagttgtgttagttgtgttagttgtgttagttcccttccgtcaattcctttaagtttcagctttgcaaccatactccccccggaacccaaagactttggtttcccggaagctgcccttagttgtgttagttgtgttagttgtgttagtcgactcggaccgatg

SEQ ID NO: 15852 - DNA, 203 bp, synthetic construct
  source 1..203: mol_type = other DNA
ggcgcgccagtccttcgaacgtttgttgtgttagttgtgttagttgtgttagttgtgttagttgtgttagttgcgaacctccgactttcgttcttgattaatgaaaacattcttggcaaatgctttcgctctggtccgtcttgcgccggtccaaggttagttgtgttagttgtgttagttgtgttagtcgactcggaccgatg

SEQ ID NO: 15853 - DNA, 203 bp, synthetic construct
  source 1..203: mol_type = other DNA
ggcgcgccagtccttcgaacctgagttgtgttagttgtgttagttgtgttagttgtgttagttgtgttagttgtaagccgcaggctccactcctggtggtgcccttccgtcaattcctttaagtttcagctttgcaaccatactccccccggaacgttagttgtgttagttgtgttagttgtgttagtcgactcggaccgatg

SEQ ID NO: 15854 - DNA, 203 bp, synthetic construct
  source 1..203: mol_type = other DNA
ggcgcgccagtcctctgttcgactgttgtgttagttgtgttagttgtgttagttgtgttagttgtgttagttgtgaacctccgactttcgttcttgattaatgaaaacattcttggcaaatgctttcgctctggtccgtcttgcgccggtccagtgttagttgtgttagttgtgttagttgtgttagtcgactcggaccgatg

SEQ ID NO: 15855 - DNA, 203 bp, synthetic construct
  source 1..203: mol_type = other DNA
ggcgcgccagtcctgtccgtcccggttgtgttagttgtgttagttgtgttagttgtgttagttgtgttagttgtgtaactgatttaatgagccattcgcagtttcactgtaccggccgtgcgtactcagacatgcatggcttaatctttgagtgtgttagttgtgttagttgtgttagttgtgttagtcgactcggaccgatg

SEQ ID NO: 15856 - DNA, 203 bp, synthetic construct
  source 1..203: mol_type = other DNA
ggcgcgccagtccttgtccggtcggttgtgttagttgtgttagttgtgttagttgtgttagttgtgttagttgtgtacctccgactttcgttcttgattaatgaaaacattcttggcaaatgctttcgctctggtccgtcttgcgccggtcctgtgttagttgtgttagttgtgttagttgtgttagtcgactcggaccgatg

SEQ ID NO: 15857 - DNA, 203 bp, synthetic construct
  source 1..203: mol_type = other DNA
ggcgcgccagtcctagctgtccgagttgtgttagttgtgttagttgtgttagttgtgttagttgtgttagttgtgtcggaacccaaagactttggtttcccggaagctgcccggcgggtcatgggaataacgccgccgcatcgccggtcggctgtgttagttgtgttagttgtgttagttgtgttagtcgactcggaccgatg

SEQ ID NO: 15858 - DNA, 203 bp, synthetic construct
  source 1..203: mol_type = other DNA
ggcgcgccagtcctaagtccggttgttgtgttagttgtgttagttgtgttagttgtgttagttgtgttagttgtgtgccgcaggctccactcctggtggtgcccttccgtcaattcctttaagtttcagctttgcaaccatactccccccggtgtgttagttgtgttagttgtgttagttgtgttagtcgactcggaccgatg

SEQ ID NO: 15859 - DNA, 203 bp, synthetic construct
  source 1..203: mol_type = other DNA
ggcgcgccagtcctcgtccgctaggttgtgttagttgtgttagttgtgttagttgtgttagttgtgttagttgtgttaccaactaagaacggccatgcaccaccacccacggaatcgagaaagagctatcaatctgtcaatcctgtccgtgttgtgttagttgtgttagttgtgttagttgtgttagtcgactcggaccgatg

SEQ ID NO: 15860 - DNA, 203 bp, synthetic construct
  source 1..203: mol_type = other DNA
ggcgcgccagtcctggtccgtggcgttgtgttagttgtgttagttgtgttagttgtgttagttgtgttagttgtgttacgcaggctccactcctggtggtgcccttccgtcaattcctttaagtttcagctttgcaaccatactccccccgttgtgttagttgtgttagttgtgttagttgtgttagtcgactcggaccgatg

SEQ ID NO: 15861 - DNA, 203 bp, synthetic construct
  source 1..203: mol_type = other DNA
ggcgcgccagtcctgtggtccgccgttgtgttagttgtgttagttgtgttagttgtgttagttgtgttagttgtgttactccgactttcgttcttgattaatgaaaacattcttggcaaatgctttcgctctggtccgtcttgcgccggtgttgtgttagttgtgttagttgtgttagttgtgttagtcgactcggaccgatg

SEQ ID NO: 15862 - DNA, 203 bp, synthetic construct
  source 1..203: mol_type = other DNA
ggcgcgccagtcctacagcgtccggttgtgttagttgtgttagttgtgttagttgtgttagttgtgttagttgtgttactgatttaatgagccattcgcagtttcactgtaccggccgtgcgtactcagacatgcatggcttaatctttggttgtgttagttgtgttagttgtgttagttgtgttagtcgactcggaccgatg

SEQ ID NO: 15863 - DNA, 203 bp, synthetic construct
  source 1..203: mol_type = other DNA
ggcgcgccagtcctagtccgaaaggttgtgttagttgtgttagttgtgttagttgtgttagttgtgttagttgtgttagaacccaaagactttggtttcccggaagctgcccggcgggtcatgggaataacgccgccgcatcgccggtcagttgtgttagttgtgttagttgtgttagttgtgttagtcgactcggaccgatg

SEQ ID NO: 15864 - DNA, 203 bp, synthetic construct
  source 1..203: mol_type = other DNA
ggcgcgccagtcctgcgtccgttggttgtgttagttgtgttagttgtgttagttgtgttagttgtgttagttgtgttaggcaggctccactcctggtggtgcccttccgtcaattcctttaagtttcagctttgcaaccatactcccccagttgtgttagttgtgttagttgtgttagttgtgttagtcgactcggaccgatg

SEQ ID NO: 15865 - DNA, 203 bp, synthetic construct
  source 1..203: mol_type = other DNA
ggcgcgccagtccttgtccgagctgttgtgttagttgtgttagttgtgttagttgtgttagttgtgttagttgtgttaggtcaattcctttaagtttcagctttgcaaccatactccccccggaacccaaagactttggtttcccggaaagttgtgttagttgtgttagttgtgttagttgtgttagtcgactcggaccgatg

SEQ ID NO: 15866 - DNA, 203 bp, synthetic construct
  source 1..203: mol_type = other DNA
ggcgcgccagtcctttgtccgatagttgtgttagttgtgttagttgtgttagttgtgttagttgtgttagttgtgttagtaactaagaacggccatgcaccaccacccacggaatcgagaaagagctatcaatctgtcaatcctgtcctagttgtgttagttgtgttagttgtgttagttgtgttagtcgactcggaccgatg

SEQ ID NO: 15867 - DNA, 203 bp, synthetic construct
  source 1..203: mol_type = other DNA
ggcgcgccagtcctgtccgggacggttgtgttagttgtgttagttgtgttagttgtgttagttgtgttagttgtgttagtacccaaagactttggtttcccggaagctgcccggcgggtcatgggaataacgccgccgcatcgccggttagttgtgttagttgtgttagttgtgttagttgtgttagtcgactcggaccgatg

SEQ ID NO: 15868 - DNA, 203 bp, synthetic construct
  source 1..203: mol_type = other DNA
ggcgcgccagtcctacagtccgctgttgtgttagttgtgttagttgtgttagttgtgttagttgtgttagttgtgttagtcaggctccactcctggtggtgcccttccgtcaattcctttaagtttcagctttgcaaccatactcccctagttgtgttagttgtgttagttgtgttagttgtgttagtcgactcggaccgatg

SEQ ID NO: 15869 - DNA, 203 bp, synthetic construct
  source 1..203: mol_type = other DNA
ggcgcgccagtcctccgtccgggagttgtgttagttgtgttagttgtgttagttgtgttagttgtgttagttgtgttagtccgactttcgttcttgattaatgaaaacattcttggcaaatgctttcgctctggtccgtcttgcgccggagttgtgttagttgtgttagttgtgttagttgtgttagtcgactcggaccgatg

SEQ ID NO: 15870 - DNA, 203 bp, synthetic construct
  source 1..203: mol_type = other DNA
ggcgcgccagtcctcaattgtccggttgtgttagttgtgttagttgtgttagttgtgttagttgtgttagttgtgttagtgatttaatgagccattcgcagtttcactgtaccggccgtgcgtactcagacatgcatggcttaatctttagttgtgttagttgtgttagttgtgttagttgtgttagtcgactcggaccgatg

SEQ ID NO: 15871 - DNA, 203 bp, synthetic construct
  source 1..203: mol_type = other DNA
ggcgcgccagtcctgcagtccgtggttgtgttagttgtgttagttgtgttagttgtgttagttgtgttagttgtgttagttactaagaacggccatgcaccaccacccacggaatcgagaaagagctatcaatctgtcaatcctgtcttagttgtgttagttgtgttagttgtgttagttgtgttagtcgactcggaccgatg

SEQ ID NO: 15872 - DNA, 203 bp, synthetic construct
  source 1..203: mol_type = other DNA
ggcgcgccagtcctgagagtccgtgttgtgttagttgtgttagttgtgttagttgtgttagttgtgttagttgtgttagttaggctccactcctggtggtgcccttccgtcaattcctttaagtttcagctttgcaaccatactcccttagttgtgttagttgtgttagttgtgttagttgtgttagtcgactcggaccgatg

SEQ ID NO: 15873 - DNA, 203 bp, synthetic construct
  source 1..203: mol_type = other DNA
ggcgcgccagtcctgacgtccgcagttgtgttagttgtgttagttgtgttagttgtgttagttgtgttagttgtgttagttcaattcctttaagtttcagctttgcaaccatactccccccggaacccaaagactttggtttcccggttagttgtgttagttgtgttagttgtgttagttgtgttagtcgactcggaccgatg

SEQ ID NO: 15874 - DNA, 203 bp, synthetic construct
  source 1..203: mol_type = other DNA
ggcgcgccagtcctgtgttgtccggttgtgttagttgtgttagttgtgttagttgtgttagttgtgttagttgtgttagttgggctccactcctggtggtgcccttccgtcaattcctttaagtttcagctttgcaaccatactccgttagttgtgttagttgtgttagttgtgttagttgtgttagtcgactcggaccgatg

SEQ ID NO: 15875 - DNA, 203 bp, synthetic construct
  source 1..203: mol_type = other DNA
ggcgcgccagtcctgtccgaggctgttgtgttagttgtgttagttgtgttagttgtgttagttgtgttagttgtgttagttgtattcctttaagtttcagctttgcaaccatactccccccggaacccaaagactttggtttccctgttagttgtgttagttgtgttagttgtgttagttgtgttagtcgactcggaccgatg

SEQ ID NO: 15876 - DNA, 203 bp, synthetic construct
  source 1..203: mol_type = other DNA
ggcgcgccagtccttacggacccggttgtgttagttgtgttagttgtgttagttgtgttagttgtgttagttgtgttagttgtgaagaacggccatgcaccaccacccacggaatcgagaaagagctatcaatctgtcaatcctgtgttagttgtgttagttgtgttagttgtgttagttgtgttagtcgactcggaccgatg

SEQ ID NO: 15877 - DNA, 203 bp, synthetic construct
  source 1..203: mol_type = other DNA
ggcgcgccagtcctacggacaggggttgtgttagttgtgttagttgtgttagttgtgttagttgtgttagttgtgttagttgtgctccactcctggtggtgcccttccgtcaattcctttaagtttcagctttgcaaccatactctgttagttgtgttagttgtgttagttgtgttagttgtgttagtcgactcggaccgatg

SEQ ID NO: 15878 - DNA, 203 bp, synthetic construct
  source 1..203: mol_type = other DNA
ggcgcgccagtcctagctacggacgttgtgttagttgtgttagttgtgttagttgtgttagttgtgttagttgtgttagttgtgctccactcctggtggtgcccttccgtcaattcctttaagtttcagctttgcaaccatactgtgttagttgtgttagttgtgttagttgtgttagttgtgttagtcgactcggaccgatg

SEQ ID NO: 15879 - DNA, 203 bp, synthetic construct
  source 1..203: mol_type = other DNA
ggcgcgccagtcctcggactaaccgttgtgttagttgtgttagttgtgttagttgtgttagttgtgttagttgtgttagttgtgctttcgttcttgattaatgaaaacattcttggcaaatgctttcgctctggtccgtcttgcgtgttagttgtgttagttgtgttagttgtgttagttgtgttagtcgactcggaccgatg

SEQ ID NO: 15880 - DNA, 203 bp, synthetic construct
  source 1..203: mol_type = other DNA
ggcgcgccagtcctacggaccacggttgtgttagttgtgttagttgtgttagttgtgttagttgtgttagttgtgttagttgtgtaagactttggtttcccggaagctgcccggcgggtcatgggaataacgccgccgcatcgtgtgttagttgtgttagttgtgttagttgtgttagttgtgttagtcgactcggaccgatg

SEQ ID NO: 15881 - DNA, 203 bp, synthetic construct
  source 1..203: mol_type = other DNA
ggcgcgccagtccttgcggacgctgttgtgttagttgtgttagttgtgttagttgtgttagttgtgttagttgtgttagttgtgtaatgagccattcgcagtttcactgtaccggccgtgcgtactcagacatgcatggcttatgtgttagttgtgttagttgtgttagttgtgttagttgtgttagtcgactcggaccgatg

SEQ ID NO: 15882 - DNA, 203 bp, synthetic construct
  source 1..203: mol_type = other DNA
ggcgcgccagtccttgttcggacagttgtgttagttgtgttagttgtgttagttgtgttagttgtgttagttgtgttagttgtgtagaacggccatgcaccaccacccacggaatcgagaaagagctatcaatctgtcaatcctgtgttagttgtgttagttgtgttagttgtgttagttgtgttagtcgactcggaccgatg

SEQ ID NO: 15883 - DNA, 203 bp, synthetic construct
  source 1..203: mol_type = other DNA
ggcgcgccagtccttagcggacgtgttgtgttagttgtgttagttgtgttagttgtgttagttgtgttagttgtgttagttgtgttaaacggccatgcaccaccacccacggaatcgagaaagagctatcaatctgtcaatgttgtgttagttgtgttagttgtgttagttgtgttagttgtgttagtcgactcggaccgatg

SEQ ID NO: 15884 - DNA, 203 bp, synthetic construct
  source 1..203: mol_type = other DNA
ggcgcgccagtcctaaccggaccagttgtgttagttgtgttagttgtgttagttgtgttagttgtgttagttgtgttagttgtgttacactcctggtggtgcccttccgtcaattcctttaagtttcagctttgcaaccatgttgtgttagttgtgttagttgtgttagttgtgttagttgtgttagtcgactcggaccgatg

SEQ ID NO: 15885 - DNA, 203 bp, synthetic construct
  source 1..203: mol_type = other DNA
ggcgcgccagtcctcggacgagttgttgtgttagttgtgttagttgtgttagttgtgttagttgtgttagttgtgttagttgtgttacccgccggagttgtgttacccgccggagttgtgttacccgccggagttgtgttacccgccggagttgtgttacccgccggagttgtgttagttgtgttagtcgactcggaccgatg

SEQ ID NO: 15886 - DNA, 203 bp, synthetic construct
  source 1..203: mol_type = other DNA
ggcgcgccagtcctctatcggacggttgtgttagttgtgttagttgtgttagttgtgttagttgtgttagttgtgttagttgtgttagtcggccatgcaccaccacccacggaatcgagaaagagctatcaatctgtcatagttgtgttagttgtgttagttgtgttagttgtgttagttgtgttagtcgactcggaccgatg

SEQ ID NO: 15887 - DNA, 203 bp, synthetic construct
  source 1..203: mol_type = other DNA
ggcgcgccagtcctacggacgttagttgtgttagttgtgttagttgtgttagttgtgttagttgtgttagttgtgttagttgtgttagttgaagtttcagctttgcaaccatactccccccggaacccaaagactttgttagttgtgttagttgtgttagttgtgttagttgtgttagttgtgttagtcgactcggaccgatg

SEQ ID NO: 15888 - DNA, 203 bp, synthetic construct
  source 1..203: mol_type = other DNA
ggcgcgccagtcctcaccggacttgttgtgttagttgtgttagttgtgttagttgtgttagttgtgttagttgtgttagttgtgttagttgcctggtggtgcccttccgtcaattcctttaagtttcagctttgcaagttagttgtgttagttgtgttagttgtgttagttgtgttagttgtgttagtcgactcggaccgatg

SEQ ID NO: 15889 - DNA, 203 bp, synthetic construct
  source 1..203: mol_type = other DNA
ggcgcgccagtcctgcggcggactgttgtgttagttgtgttagttgtgttagttgtgttagttgtgttagttgtgttagttgtgttagttggccatgcaccaccacccacggaatcgagaaagagctatcaatctgtcttagttgtgttagttgtgttagttgtgttagttgtgttagttgtgttagtcgactcggaccgatg

SEQ ID NO: 15890 - DNA, 203 bp, synthetic construct
  source 1..203: mol_type = other DNA
ggcgcgccagtcctcgtcacggacgttgtgttagttgtgttagttgtgttagttgtgttagttgtgttagttgtgttagttgtgttagttgtagtttcagctttgcaaccatactccccccggaacccaaagactttgttagttgtgttagttgtgttagttgtgttagttgtgttagttgtgttagtcgactcggaccgatg

SEQ ID NO: 15891 - DNA, 203 bp, synthetic construct
  source 1..203: mol_type = other DNA
ggcgcgccagtcctcaacggacgagttgtgttagttgtgttagttgtgttagttgtgttagttgtgttagttgtgttagttgtgttagttgtcattcgcagtttcactgtaccggccgtgcgtactcagacatgcatgttagttgtgttagttgtgttagttgtgttagttgtgttagttgtgttagtcgactcggaccgatg

SEQ ID NO: 15892 - DNA, 203 bp, synthetic construct
  source 1..203: mol_type = other DNA
ggcgcgccagtcctcaaagcggacgttgtgttagttgtgttagttgtgttagttgtgttagttgtgttagttgtgttagttgtgttagttgtctggtggtgcccttccgtcaattcctttaagtttcagctttgcatgttagttgtgttagttgtgttagttgtgttagttgtgttagttgtgttagtcgactcggaccgatg

SEQ ID NO: 15893 - DNA, 203 bp, synthetic construct
  source 1..203: mol_type = other DNA
ggcgcgccagtcctaatgcggacggttgtgttagttgtgttagttgtgttagttgtgttagttgtgttagttgtgttagttgtgttagttgtgcatgcaccaccacccacggaatcgagaaagagctatcaatctgtgttagttgtgttagttgtgttagttgtgttagttgtgttagttgtgttagtcgactcggaccgatg

SEQ ID NO: 15894 - DNA, 203 bp, synthetic construct
  source 1..203: mol_type = other DNA
ggcgcgccagtcctagtacgcacagttgtgttagttgtgttagttgtgttagttgtgttagttgtgttagttgtgttagttgtgttagttgtgtatgcaccaccacccacggaatcgagaaagagctatcaatctgtgttagttgtgttagttgtgttagttgtgttagttgtgttagttgtgttagtcgactcggaccgatg

SEQ ID NO: 15895 - DNA, 203 bp, synthetic construct
  source 1..203: mol_type = other DNA
ggcgcgccagtcctacgcacagaagttgtgttagttgtgttagttgtgttagttgtgttagttgtgttagttgtgttagttgtgttagttgtgtggtggtgcccttccgtcaattcctttaagtttcagctttgcgtgttagttgtgttagttgtgttagttgtgttagttgtgttagttgtgttagtcgactcggaccgatg

SEQ ID NO: 15896 - DNA, 203 bp, synthetic construct
  source 1..203: mol_type = other DNA
ggcgcgccagtccttaattagtccgttgtgttagttgtgttagttgtgttagttgtgttagttgtgttagttgtgttagttgtgttagttgtgttaggcagtttcactgtaccggccgtgcgtactcagacagttgtgttagttgtgttagttgtgttagttgtgttagttgtgttagttgtgttagtcgactcggaccgatg

SEQ ID NO: 15897 - DNA, 203 bp, synthetic construct
  source 1..203: mol_type = other DNA
ggcgcgccagtcctgttaatttctgttgtgttagttgtgttagttgtgttagttgtgttagttgtgttagttgtgttagttgtgttagttgtgttagggtgcccttccgtcaattcctttaagtttcagctagttgtgttagttgtgttagttgtgttagttgtgttagttgtgttagttgtgttagtcgactcggaccgatg

SEQ ID NO: 15898 - DNA, 203 bp, synthetic construct
  source 1..203: mol_type = other DNA
ggcgcgccagtcctttcgtaattagttgtgttagttgtgttagttgtgttagttgtgttagttgtgttagttgtgttagttgtgttagttgtgttagttccggaagctgcccggcgggtcatgggaatattagttgtgttagttgtgttagttgtgttagttgtgttagttgtgttagttgtgttagtcgactcggaccgatg

SEQ ID NO: 15899 - DNA, 203 bp, synthetic construct
  source 1..203: mol_type = other DNA
ggcgcgccagtcctgcgttaatttgttgtgttagttgtgttagttgtgttagttgtgttagttgtgttagttgtgttagttgtgttagttgtgttagttgctttgcaaccatactccccccggaacccgttagttgtgttagttgtgttagttgtgttagttgtgttagttgtgttagttgtgttagtcgactcggaccgatg

SEQ ID NO: 15900 - DNA, 203 bp, synthetic construct
  source 1..203: mol_type = other DNA
ggcgcgccagtcctctctaattttgttgtgttagttgtgttagttgtgttagttgtgttagttgtgttagttgtgttagttgtgttagttgtgttagttgtgccacccacggaatcgagaaagagcgtgttagttgtgttagttgtgttagttgtgttagttgtgttagttgtgttagttgtgttagtcgactcggaccgatg

SEQ ID NO: 15901 - DNA, 203 bp, synthetic construct
  source 1..203: mol_type = other DNA
ggcgcgccagtccttaatttcacggttgtgttagttgtgttagttgtgttagttgtgttagttgtgttagttgtgttagttgtgttagttgtgttagttgtgccttccgtcaattcctttaagtttgtgttagttgtgttagttgtgttagttgtgttagttgtgttagttgtgttagttgtgttagtcgactcggaccgatg

SEQ ID NO: 15902 - DNA, 203 bp, synthetic construct
  source 1..203: mol_type = other DNA
ggcgcgccagtcctctcttagatcgttgtgttagttgtgttagttgtgttagttgtgttagttgtgttagttgtgttagttgtgttagttgtgttagttgtgtaaaacattcttggcaaatgctttgtgttagttgtgttagttgtgttagttgtgttagttgtgttagttgtgttagttgtgttagtcgactcggaccgatg

SEQ ID NO: 15903 - DNA, 203 bp, synthetic construct
  source 1..203: mol_type = other DNA
ggcgcgccagtcctagggcgttaggttgtgttagttgtgttagttgtgttagttgtgttagttgtgttagttgtgttagttgtgttagttgtgttagttgtgttacaaccatactccccccgggttgtgttagttgtgttagttgtgttagttgtgttagttgtgttagttgtgttagttgtgttagtcgactcggaccgatg

SEQ ID NO: 15904 - DNA, 203 bp, synthetic construct
  source 1..203: mol_type = other DNA
ggcgcgccagtcctagaggcgttagttgtgttagttgtgttagttgtgttagttgtgttagttgtgttagttgtgttagttgtgttagttgtgttagttgtgttacccacggaatcgagaaaggttgtgttagttgtgttagttgtgttagttgtgttagttgtgttagttgtgttagttgtgttagtcgactcggaccgatg

SEQ ID NO: 15905 - DNA, 203 bp, synthetic construct
  source 1..203: mol_type = other DNA
ggcgcgccagtccttcaggctccagttgtgttagttgtgttagttgtgttagttgtgttagttgtgttagttgtgttagttgtgttagttgtgttagttgtgttaccggccgtagttgtgttaccggccgtagttgtgttaccggccgtagttgtgttaccggccgtagttgtgttagttgtgttagtcgactcggaccgatg

SEQ ID NO: 15906 - DNA, 203 bp, synthetic construct
  source 1..203: mol_type = other DNA
ggcgcgccagtcctcgctccactcgttgtgttagttgtgttagttgtgttagttgtgttagttgtgttagttgtgttagttgtgttagttgtgttagttgtgttagccgtcaattcctttaaagttgtgttagttgtgttagttgtgttagttgtgttagttgtgttagttgtgttagttgtgttagtcgactcggaccgatg

SEQ ID NO: 15907 - DNA, 203 bp, synthetic construct
  source 1..203: mol_type = other DNA
ggcgcgccagtcctctccagcgctgttgtgttagttgtgttagttgtgttagttgtgttagttgtgttagttgtgttagttgtgttagttgtgttagttgtgttagctgcccggcgggtcatagttgtgttagttgtgttagttgtgttagttgtgttagttgtgttagttgtgttagttgtgttagtcgactcggaccgatg

SEQ ID NO: 15908 - DNA, 203 bp, synthetic construct
  source 1..203: mol_type = other DNA
ggcgcgccagtcctgaatgctccagttgtgttagttgtgttagttgtgttagttgtgttagttgtgttagttgtgttagttgtgttagttgtgttagttgtgttagctgtaccggccgtgcgagttgtgttagttgtgttagttgtgttagttgtgttagttgtgttagttgtgttagttgtgttagtcgactcggaccgatg

SEQ ID NO: 15909 - DNA, 203 bp, synthetic construct
  source 1..203: mol_type = other DNA
ggcgcgccagtcctgtctccacatgttgtgttagttgtgttagttgtgttagttgtgttagttgtgttagttgtgttagttgtgttagttgtgttagttgtgttagttgcccggcgggtgttagttgtgttagttgtgttagttgtgttagttgtgttagttgtgttagttgtgttagttgtgttagtcgactcggaccgatg

SEQ ID NO: 15910 - DNA, 203 bp, synthetic construct
  source 1..203: mol_type = other DNA
ggcgcgccagtcctgctccaggtcgttgtgttagttgtgttagttgtgttagttgtgttagttgtgttagttgtgttagttgtgttagttgtgttagttgtgttagttgtatactccctgttagttgtgttagttgtgttagttgtgttagttgtgttagttgtgttagttgtgttagttgtgttagtcgactcggaccgatg

SEQ ID NO: 15911 - DNA, 203 bp, synthetic construct
  source 1..203: mol_type = other DNA
ggcgcgccagtccttctccagctggttgtgttagttgtgttagttgtgttagttgtgttagttgtgttagttgtgttagttgtgttagttgtgttagttgtgttagttgtcaattccttgttagttgtgttagttgtgttagttgtgttagttgtgttagttgtgttagttgtgttagttgtgttagtcgactcggaccgatg

SEQ ID NO: 15912 - DNA, 203 bp, synthetic construct
  source 1..203: mol_type = other DNA
ggcgcgccagtcctgctcctgtcggttgtgttagttgtgttagttgtgttagttgtgttagttgtgttagttgtgttagttgtgttagttgtgttagttgtgttagttgtccggcgggtgttagttgtgttagttgtgttagttgtgttagttgtgttagttgtgttagttgtgttagttgtgttagtcgactcggaccgatg

SEQ ID NO: 15913 - DNA, 203 bp, synthetic construct
  source 1..203: mol_type = other DNA
ggcgcgccagtcctgcagctccctgttgtgttagttgtgttagttgtgttagttgtgttagttgtgttagttgtgttagttgtgttagttgtgttagttgtgttagttgtgcggcgggtgttagttgtgttagttgtgttagttgtgttagttgtgttagttgtgttagttgtgttagttgtgttagtcgactcggaccgatg

SEQ ID NO: 15914 - DNA, 203 bp, synthetic construct
  source 1..203: mol_type = other DNA
ggcgcgccagtcctatctccaccggttgtgttagttgtgttagttgtgttagttgtgttagttgtgttagttgtgttagttgtgttagttgtgttagttgtgttagttgtgcttggcgtgttagttgtgttagttgtgttagttgtgttagttgtgttagttgtgttagttgtgttagttgtgttagtcgactcggaccgatg

SEQ ID NO: 15915 - DNA, 203 bp, synthetic construct
  source 1..203: mol_type = other DNA
ggcgcgccagtcctagctcctcacgttgtgttagttgtgttagttgtgttagttgtgttagttgtgttagttgtgttagttgtgttagttgtgttagttgtgttagttgtggaatcggtgttagttgtgttagttgtgttagttgtgttagttgtgttagttgtgttagttgtgttagttgtgttagtcgactcggaccgatg

SEQ ID NO: 15916 - DNA, 203 bp, synthetic construct
  source 1..203: mol_type = other DNA
ggcgcgccagtcctctccataccagttgtgttagttgtgttagttgtgttagttgtgttagttgtgttagttgtgttagttgtgttagttgtgttagttgtgttagttgtgtactctgtgttagttgtgttagttgtgttagttgtgttagttgtgttagttgtgttagttgtgttagttgtgttagtcgactcggaccgatg

SEQ ID NO: 15917 - DNA, 203 bp, synthetic construct
  source 1..203: mol_type = other DNA
ggcgcgccagtcctctcctaacgggttgtgttagttgtgttagttgtgttagttgtgttagttgtgttagttgtgttagttgtgttagttgtgttagttgtgttagttgtgtattctgtgttagttgtgttagttgtgttagttgtgttagttgtgttagttgtgttagttgtgttagttgtgttagtcgactcggaccgatg

SEQ ID NO: 15918 - DNA, 203 bp, synthetic construct
  source 1..203: mol_type = other DNA
ggcgcgccagtcctaggtcactccgttgtgttagttgtgttagttgtgttagttgtgttagttgtgttagttgtgttagttgtgttagttgtgttagttgtgttagttgtgtcggctgtgttagttgtgttagttgtgttagttgtgttagttgtgttagttgtgttagttgtgttagttgtgttagtcgactcggaccgatg

SEQ ID NO: 15919 - DNA, 203 bp, synthetic construct
  source 1..203: mol_type = other DNA
ggcgcgccagtcctagtttgctccgttgtgttagttgtgttagttgtgttagttgtgttagttgtgttagttgtgttagttgtgttagttgtgttagttgtgttagttgtgttagttgtgttaccggccgtagttgtgttaccggccgtagttgtgttaccggccgtagttgtgttaccggccgtagtcgactcggaccgatg

SEQ ID NO: 15920 - DNA, 203 bp, synthetic construct
  source 1..203: mol_type = other DNA
ggcgcgccagtccttgctccaggagttgtgttagttgtgttagttgtgttagttgtgttagttgtgttagttgtgttagttgtgttagttgtgttagttgtgttagttgtgttagttgtgttacggccggtagttgtgttacggccggtagttgtgttacggccggtagttgtgttagttgtgttagtcgactcggaccgatg

SEQ ID NO: 15921 - DNA, 203 bp, synthetic construct
  source 1..203: mol_type = other DNA
ggcgcgccagtcctagtgctccaggttgtgttagttgtgttagttgtgttagttgtgttagttgtgttagttgtgttagttgtgttagttgtgttagttgtgttagttgtgttagttgtgttagttgtgttagttgtgttacccgccggagttgtgttacccgccggagttgtgttagttgtgttagtcgactcggaccgatg

SEQ ID NO: 15922 - DNA, 203 bp, synthetic construct
  source 1..203: mol_type = other DNA
ggcgcgccagtcctgatcgctcctgttgtgttagttgtgttagttgtgttagttgtgttagttgtgttagttgtgttagttgtgttagttgtgttagttgtgttagttgtgttagttgtgttagttgtgttagttgtgttaccggccgtagttgtgttaccggccgtagttgtgttaccggccgtagtcgactcggaccgatg

SEQ ID NO: 15923 - DNA, 203 bp, synthetic construct
  source 1..203: mol_type = other DNA
ggcgcgccagtcctgggctccattgttgtgttagttgtgttagttgtgttagttgtgttagttgtgttagttgtgttagttgtgttagttgtgttagttgtgttagttgtgttagttgtgttagttgtgttagttgtgttacggccggtagttgtgttacggccggtagttgtgttagttgtgttagtcgactcggaccgatg

SEQ ID NO: 15924 - DNA, 203 bp, synthetic construct
  source 1..203: mol_type = other DNA
ggcgcgccagtccttctccacgaggttgtgttagttgtgttagttgtgttagttgtgttagttgtgttagttgtgttagttgtgttagttgtgttagttgtgttagttgtgttagttgtgttagttgtgttagttgtgttagttgtgttagttgtgttaccggccgtagttgtgttaccggccgtagtcgactcggaccgatg

SEQ ID NO: 15925 - DNA, 203 bp, synthetic construct
  source 1..203: mol_type = other DNA
ggcgcgccagtccttctccatacggttgtgttagttgtgttagttgtgttagttgtgttagttgtgttagttgtgttagttgtgttagttgtgttagttgtgttagttgtgttagttgtgttagttgtgttagttgtgttagttgtgttagttgtgttccggcgggtagttgtgttccggcgggtagtcgactcggaccgatg

SEQ ID NO: 15926 - DNA, 203 bp, synthetic construct
  source 1..203: mol_type = other DNA
ggcgcgccagtcctgggtggctccgttgtgttagttgtgttagttgtgttagttgtgttagttgtgttagttgtgttagttgtgttagttgtgttagttgtgttagttgtgttagttgtgttagttgtgttagttgtgttagttgtgttagttgtgtttactcccttagttgtgttagttgtgttagtcgactcggaccgatg

SEQ ID NO: 15927 - DNA, 203 bp, synthetic construct
  source 1..203: mol_type = other DNA
ggcgcgccagtcctgctcctagaagttgtgttagttgtgttagttgtgttagttgtgttagttgtgttagttgtgttagttgtgttagttgtgttagttgtgttagttgtgttagttgtgttagttgtgttagttgtgttagttgtgttagttgtgtttactcccttagttgtgtttactcccttagtcgactcggaccgatg

SEQ ID NO: 15928 - DNA, 203 bp, synthetic construct
  source 1..203: mol_type = other DNA
ggcgcgccagtcctaggttctcccgttgtgttagttgtgttagttgtgttagttgtgttagttgtgttagttgtgttagttgtgttagttgtgttagttgtgttagttgtgttagttgtgttagttgtgttagttgtgttagttgtgttagttgtgttttcttggcaaattgtgttagttgtgttagtcgactcggaccgatg

SEQ ID NO: 15929 - DNA, 203 bp, synthetic construct
  source 1..203: mol_type = other DNA
ggcgcgccagtcctcaagctcctcgttgtgttagttgtgttagttgtgttagttgtgttagttgtgttagttgtgttagttgtgttagttgtgttagttgtgttagttgtgttagttgtgttagttgtgttagttgtgttcacggaatcgagaatgttcacggaatcgagaatgttagttgtgttagtcgactcggaccgatg

SEQ ID NO: 15930 - DNA, 203 bp, synthetic construct
  source 1..203: mol_type = other DNA
ggcgcgccagtcctctccaagtatgttgtgttagttgtgttagttgtgttagttgtgttagttgtgttagttgtgttagttgtgttagttgtgttagttgtgttagttgtgttagttgtgttagttgtgttagttgtgttccggcgggtagttgtgttccggcgggtagttgtgttccggcgggtagtcgactcggaccgatg

SEQ ID NO: 15931 - DNA, 203 bp, synthetic construct
  source 1..203: mol_type = other DNA
ggcgcgccagtcctatctccatgcgttgtgttagttgtgttagttgtgttagttgtgttagttgtgttagttgtgttagttgtgttagttgtgttagttgtgttagttgtgttagttgtgttagttgtgttagttgtgtttaaaggaattgacgtgtttaaaggaattgacgtgttagttgtgttagtcgactcggaccgatg

SEQ ID NO: 15932 - DNA, 203 bp, synthetic construct
  source 1..203: mol_type = other DNA
ggcgcgccagtccttacgcactccgttgtgttagttgtgttagttgtgttagttgtgttagttgtgttagttgtgttagttgtgttagttgtgttagttgtgttagttgtgttagttgtgttagttgtgttagttgtgtttactcccttagttgtgtttactcccttagttgtgttagttgtgttagtcgactcggaccgatg

SEQ ID NO: 15933 - DNA, 203 bp, synthetic construct
  source 1..203: mol_type = other DNA
ggcgcgccagtcctatctctccaagttgtgttagttgtgttagttgtgttagttgtgttagttgtgttagttgtgttagttgtgttagttgtgttagttgtgttagttgtgttagttgtgttagttgtgttagttgtgtttactcccttagttgtgtttactcccttagttgtgtttactcccttagtcgactcggaccgatg

SEQ ID NO: 15934 - DNA, 203 bp, synthetic construct
  source 1..203: mol_type = other DNA
ggcgcgccagtcctcctgctccacgttgtgttagttgtgttagttgtgttagttgtgttagttgtgttagttgtgttagttgtgttagttgtgttagttgtgttagttgtgttagttgtgttagttgtgttagttgtgttttctcgattccgtgtgttttctcgattccgtgtgttagttgtgttagtcgactcggaccgatg

SEQ ID NO: 15935 - DNA, 203 bp, synthetic construct
  source 1..203: mol_type = other DNA
ggcgcgccagtcctctcctctgacgttgtgttagttgtgttagttgtgttagttgtgttagttgtgttagttgtgttagttgtgttagttgtgttagttgtgttagttgtgttagttgtgttagttgtgttagttgtgttttcttggcaaattgtgttttcttggcaaattgtgttagttgtgttagtcgactcggaccgatg

SEQ ID NO: 15936 - DNA, 203 bp, synthetic construct
  source 1..203: mol_type = other DNA
ggcgcgccagtcctctcccagtgagttgtgttagttgtgttagttgtgttagttgtgttagttgtgttagttgtgttagttgtgttagttgtgttagttgtgttagttgtgttagttgtgtttaaaggaattgacgtgtttaaaggaattgacgtgtttaaaggaattgacgtgttagttgtgttagtcgactcggaccgatg

SEQ ID NO: 15937 - DNA, 203 bp, synthetic construct
  source 1..203: mol_type = other DNA
ggcgcgccagtcctctgccactccgttgtgttagttgtgttagttgtgttagttgtgttagttgtgttagttgtgttagttgtgttagttgtgttagttgtgttagttgtgttagttgtgttttcttggcaaattgtgttttcttggcaaattgtgttttcttggcaaattgtgttagttgtgttagtcgactcggaccgatg

SEQ ID NO: 15938 - DNA, 203 bp, synthetic construct
  source 1..203: mol_type = other DNA
ggcgcgccagtcctcagtggagacgttgtgttagttgtgttagttgtgttagttgtgttagttgtgttagttgtgttagttgtgttagttgtgttagttgtgttcactgtaccggccgtgcgtactgtgttagttgtgttagttgtgttagttgtgttagttgtgttagttgtgttagttgtgttagtcgactcggaccgatg

SEQ ID NO: 15939 - DNA, 203 bp, synthetic construct
  source 1..203: mol_type = other DNA
ggcgcgccagtcctggagcacgatgttgtgttagttgtgttagttgtgttagttgtgttagttgtgttagttgtgttagttgtgttagttgtgttagttgtgttcactgtaccggccgtgcgtattgtgttagttgtgttagttgtgttagttgtgttagttgtgttagttgtgttagttgtgttagtcgactcggaccgatg

SEQ ID NO: 15940 - DNA, 203 bp, synthetic construct
  source 1..203: mol_type = other DNA
ggcgcgccagtcctggagtgcgttgttgtgttagttgtgttagttgtgttagttgtgttagttgtgttagttgtgttagttgtgttagttgtgttagttgtgttttccgtcaattcctttaagtttgtgttagttgtgttagttgtgttagttgtgttagttgtgttagttgtgttagttgtgttagtcgactcggaccgatg

SEQ ID NO: 15941 - DNA, 203 bp, synthetic construct
  source 1..203: mol_type = other DNA
ggcgcgccagtcctgggaggccctgttgtgttagttgtgttagttgtgttagttgtgttagttgtgttagttgtgttagttgtgttagttgtgttagttgtgttttctcgattccgtgtgttttctcgattccgtgtgttttctcgattccgtgtgttttctcgattccgtgtgttagttgtgttagtcgactcggaccgatg

SEQ ID NO: 15942 - DNA, 203 bp, synthetic construct
  source 1..203: mol_type = other DNA
ggcgcgccagtcctgaggagctttgttgtgttagttgtgttagttgtgttagttgtgttagttgtgttagttgtgttagttgtgttagttgtgttagttgtgttttcttggcaaattgtgttttcttggcaaattgtgttttcttggcaaattgtgttttcttggcaaattgtgttagttgtgttagtcgactcggaccgatg

SEQ ID NO: 15943 - DNA, 203 bp, synthetic construct
  source 1..203: mol_type = other DNA
ggcgcgccagtcctcatacgggaggttgtgttagttgtgttagttgtgttagttgtgttagttgtgttagttgtgttagttgtgttagttgtgttagttgttttgcaaccatactccccccggaacctgttagttgtgttagttgtgttagttgtgttagttgtgttagttgtgttagttgtgttagtcgactcggaccgatg

SEQ ID NO: 15944 - DNA, 203 bp, synthetic construct
  source 1..203: mol_type = other DNA
ggcgcgccagtcctaacgggaggggttgtgttagttgtgttagttgtgttagttgtgttagttgtgttagttgtgttagttgtgttagttgtgttattcccggaagctgcccggcgggtcatgggaataacggttgtgttagttgtgttagttgtgttagttgtgttagttgtgttagttgtgttagtcgactcggaccgatg

SEQ ID NO: 15945 - DNA, 203 bp, synthetic construct
  source 1..203: mol_type = other DNA
ggcgcgccagtcctactgggagccgttgtgttagttgtgttagttgtgttagttgtgttagttgtgttagttgtgttagttgtgttagttgtgttgattaatgaaaacattcttggcaaatgctttcgctctgttgtgttagttgtgttagttgtgttagttgtgttagttgtgttagttgtgttagtcgactcggaccgatg

SEQ ID NO: 15946 - DNA, 203 bp, synthetic construct
  source 1..203: mol_type = other DNA
ggcgcgccagtcctgggagactgtgttgtgttagttgtgttagttgtgttagttgtgttagttgtgttagttgtgttagttgtgttagttgtgtttcgcagtttcactgtaccggccgtgcgtactcagacatgtgtgttagttgtgttagttgtgttagttgtgttagttgtgttagttgtgttagtcgactcggaccgatg

SEQ ID NO: 15947 - DNA, 203 bp, synthetic construct
  source 1..203: mol_type = other DNA
ggcgcgccagtcctggagctaatggttgtgttagttgtgttagttgtgttagttgtgttagttgtgttagttgtgttagttgtgttagttgtgtttcgcagtttcactgtaccggccgtgcgtactcagacatttgtgttagttgtgttagttgtgttagttgtgttagttgtgttagttgtgttagtcgactcggaccgatg

SEQ ID NO: 15948 - DNA, 203 bp, synthetic construct
  source 1..203: mol_type = other DNA
ggcgcgccagtcctaggagagggcgttgtgttagttgtgttagttgtgttagttgtgttagttgtgttagttgtgttagttgtgttagttgtgtttgcaccaccacccacggaatcgagaaagagctatcaatttgtgttagttgtgttagttgtgttagttgtgttagttgtgttagttgtgttagtcgactcggaccgatg

SEQ ID NO: 15949 - DNA, 203 bp, synthetic construct
  source 1..203: mol_type = other DNA
ggcgcgccagtcctaggtaggagcgttgtgttagttgtgttagttgtgttagttgtgttagttgtgttagttgtgttagttgtgttagttgtgtttttcccggaagctgcccggcgggtcatgggaataacgcttgtgttagttgtgttagttgtgttagttgtgttagttgtgttagttgtgttagtcgactcggaccgatg

SEQ ID NO: 15950 - DNA, 203 bp, synthetic construct
  source 1..203: mol_type = other DNA
ggcgcgccagtcctggagtcgcacgttgtgttagttgtgttagttgtgttagttgtgttagttgtgttagttgtgttagttgtgttagttgttggtttcccggaagctgcccggcgggtcatgggaataacgccgccgttagttgtgttagttgtgttagttgtgttagttgtgttagttgtgttagtcgactcggaccgatg

SEQ ID NO: 15951 - DNA, 203 bp, synthetic construct
  source 1..203: mol_type = other DNA
ggcgcgccagtccttgacaggagcgttgtgttagttgtgttagttgtgttagttgtgttagttgtgttagttgtgttagttgtgttagtttaagtttcagctttgcaaccatactccccccggaacccaaagactttgttagttgtgttagttgtgttagttgtgttagttgtgttagttgtgttagtcgactcggaccgatg

SEQ ID NO: 15952 - DNA, 203 bp, synthetic construct
  source 1..203: mol_type = other DNA
ggcgcgccagtcctccgaggagatgttgtgttagttgtgttagttgtgttagttgtgttagttgtgttagttgtgttagttgtgttagtttcctggtggtgcccttccgtcaattcctttaagtttcagctttgcaacttagttgtgttagttgtgttagttgtgttagttgtgttagttgtgttagtcgactcggaccgatg

SEQ ID NO: 15953 - DNA, 203 bp, synthetic construct
  source 1..203: mol_type = other DNA
ggcgcgccagtcctggagccgcttgttgtgttagttgtgttagttgtgttagttgtgttagttgtgttagttgtgttagttgtgttatcgttcttgattaatgaaaacattcttggcaaatgctttcgctctggtccgtctgttgtgttagttgtgttagttgtgttagttgtgttagttgtgttagtcgactcggaccgatg

SEQ ID NO: 15954 - DNA, 203 bp, synthetic construct
  source 1..203: mol_type = other DNA
ggcgcgccagtcctaggagctgcggttgtgttagttgtgttagttgtgttagttgtgttagttgtgttagttgtgttagttgtgttatgagccattcgcagtttcactgtaccggccgtgcgtactcagacatgcatggctgttgtgttagttgtgttagttgtgttagttgtgttagttgtgttagtcgactcggaccgatg

SEQ ID NO: 15955 - DNA, 203 bp, synthetic construct
  source 1..203: mol_type = other DNA
ggcgcgccagtcctttaggagcgcgttgtgttagttgtgttagttgtgttagttgtgttagttgtgttagttgtgttagttgtgttatgagccattcgcagtttcactgtaccggccgtgcgtactcagacatgcatggcttttgtgttagttgtgttagttgtgttagttgtgttagttgtgttagtcgactcggaccgatg

SEQ ID NO: 15956 - DNA, 203 bp, synthetic construct
  source 1..203: mol_type = other DNA
ggcgcgccagtcctcaataggagcgttgtgttagttgtgttagttgtgttagttgtgttagttgtgttagttgtgttagttgtgttcacggaatcgagaatgttcacggaatcgagaatgttcacggaatcgagaatgttcacggaatcgagaatgttcacggaatcgagaatgttagttgtgttagtcgactcggaccgatg

SEQ ID NO: 15957 - DNA, 203 bp, synthetic construct
  source 1..203: mol_type = other DNA
ggcgcgccagtcctgtccaaggaggttgtgttagttgtgttagttgtgttagttgtgttagttgtgttagttgtgttagttgtgttccactcctggtggtgcccttccgtcaattcctttaagtttcagctttgcaaccatattgtgttagttgtgttagttgtgttagttgtgttagttgtgttagtcgactcggaccgatg

SEQ ID NO: 15958 - DNA, 203 bp, synthetic construct
  source 1..203: mol_type = other DNA
ggcgcgccagtcctgctggagccggttgtgttagttgtgttagttgtgttagttgtgttagttgtgttagttgtgttagttgtgttccggcgggtagttgtgttccggcgggtagttgtgttccggcgggtagttgtgttccggcgggtagttgtgttccggcgggtagttgtgttagttgtgttagtcgactcggaccgatg

SEQ ID NO: 15959 - DNA, 203 bp, synthetic construct
  source 1..203: mol_type = other DNA
ggcgcgccagtcctgcaggagcatgttgtgttagttgtgttagttgtgttagttgtgttagttgtgttagttgtgttagttgtgttccggcgggtagttgtgttccggcgggtagttgtgttccggcgggtagttgtgttccggcgggtagttgtgttccggcgggtagttgtgttccggcgggtagtcgactcggaccgatg

SEQ ID NO: 15960 - DNA, 203 bp, synthetic construct
  source 1..203: mol_type = other DNA
ggcgcgccagtcctatggagaggtgttgtgttagttgtgttagttgtgttagttgtgttagttgtgttagttgtgttagttgtgttcctttaagtttcagctttgcaaccatactccccccggaacccaaagactttggtttttgtgttagttgtgttagttgtgttagttgtgttagttgtgttagtcgactcggaccgatg

SEQ ID NO: 15961 - DNA, 203 bp, synthetic construct
  source 1..203: mol_type = other DNA
ggcgcgccagtcctacgtcaggaggttgtgttagttgtgttagttgtgttagttgtgttagttgtgttagttgtgttagttgtgtttactcccttagttgtgtttactcccttagttgtgtttactcccttagttgtgtttactcccttagttgtgtttactcccttagttgtgttagttgtgttagtcgactcggaccgatg

SEQ ID NO: 15962 - DNA, 203 bp, synthetic construct
  source 1..203: mol_type = other DNA
ggcgcgccagtcctcatgtggagcgttgtgttagttgtgttagttgtgttagttgtgttagttgtgttagttgtgttagttgtttaatgagccattcgcagtttcactgtaccggccgtgcgtactcagacatgcatggcttaatcgttagttgtgttagttgtgttagttgtgttagttgtgttagtcgactcggaccgatg

SEQ ID NO: 15963 - DNA, 203 bp, synthetic construct
  source 1..203: mol_type = other DNA
ggcgcgccagtccttctggtggaggttgtgttagttgtgttagttgtgttagttgtgttagttgtgttagttgtgttccgtcaattcctttaagtttcagctttgcaaccatactccccccggaacccaaagactttggtttcccggaagctggtgttagttgtgttagttgtgttagttgtgttagtcgactcggaccgatg

SEQ ID NO: 15964 - DNA, 203 bp, synthetic construct
  source 1..203: mol_type = other DNA
ggcgcgccagtccttagcgcacaagttgtgttagttgtgttagttgtgttagttgtgttagttgtgttagttgttccaccaactaagaacggccatgcaccaccacccacggaatcgagaaagagctatcaatctgtcaatcctgtccgtgtcctgttagttgtgttagttgtgttagttgtgttagtcgactcggaccgatg

SEQ ID NO: 15965 - DNA, 203 bp, synthetic construct
  source 1..203: mol_type = other DNA
ggcgcgccagtccttgtgcgctacgttgtgttagttgtgttagttgtgttagttgtgttagttgtgttatcttcgaacctccgactttcgttcttgattaatgaaaacattcttggcaaatgctttcgctctggtccgtcttgcgccggtccaagaattgttgtgttagttgtgttagttgtgttagtcgactcggaccgatg

SEQ ID NO: 15966 - DNA, 203 bp, synthetic construct
  source 1..203: mol_type = other DNA
ggcgcgccagtccttcgtagcgcagttgtgttagttgtgttagttgtgttagttgtgttagttgtgttcaaattaagccgcaggctccactcctggtggtgcccttccgtcaattcctttaagtttcagctttgcaaccatactccccccggaacccaaagtgtgttagttgtgttagttgtgttagtcgactcggaccgatg

SEQ ID NO: 15967 - DNA, 203 bp, synthetic construct
  source 1..203: mol_type = other DNA
ggcgcgccagtcctcattgtatgcgttgtgttagttgtgttagttgtgttagttgtgttagttgtgttccggcgggtagttgtgttccggcgggtagttgtgttccggcgggtagttgtgttccggcgggtagttgtgttccggcgggtagttgtgttccggcgggtagttgtgttccggcgggtagtcgactcggaccgatg

SEQ ID NO: 15968 - DNA, 203 bp, synthetic construct
  source 1..203: mol_type = other DNA
ggcgcgccagtcctacattgtattgttgtgttagttgtgttagttgtgttagttgtgttagttgtgttggtgcccttccgtcaattcctttaagtttcagctttgcaaccatactccccccggaacccaaagactttggtttcccggaagctgcccggcggtgtgttagttgtgttagttgtgttagtcgactcggaccgatg

SEQ ID NO: 15969 - DNA, 203 bp, synthetic construct
  source 1..203: mol_type = other DNA
ggcgcgccagtcctatacaatcatgttgtgttagttgtgttagttgtgttagttgtgttagtttgatcgtcttcgaacctccgactttcgttcttgattaatgaaaacattcttggcaaatgctttcgctctggtccgtcttgcgccggtccaagaatttcacctttagttgtgttagttgtgttagtcgactcggaccgatg

SEQ ID NO: 15970 - DNA, 203 bp, synthetic construct
  source 1..203: mol_type = other DNA
ggcgcgccagtcctccaggtacaagttgtgttagttgtgttagttgtgttagttgtgtttatctgatcgtcttcgaacctccgactttcgttcttgattaatgaaaacattcttggcaaatgctttcgctctggtccgtcttgcgccggtccaagaatttcacctctagttgtgttagttgtgttagtcgactcggaccgatg

SEQ ID NO: 15971 - DNA, 203 bp, synthetic construct
  source 1..203: mol_type = other DNA
ggcgcgccagtcctacaggtaagcgttgtgttagttgtgttagttgtgttagttttcccgtgttgagtcaaattaagccgcaggctccactcctggtggtgcccttccgtcaattcctttaagtttcagctttgcaaccatactccccccggaacccaaagactttggtttcccgtagttgtgttagtcgactcggaccgatg

SEQ ID NO: 15972 - DNA, 203 bp, synthetic construct
  source 1..203: mol_type = other DNA
ggcgcgccagtcctagacaggtaggttgtgttagttgtgttagttgtgttatacgacggtatctgatcgtcttcgaacctccgactttcgttcttgattaatgaaaacattcttggcaaatgctttcgctctggtccgtcttgcgccggtccaagaatttcacctctagcggcgcaagttgtgttagtcgactcggaccgatg

SEQ ID NO: 15973 - DNA, 203 bp, synthetic construct
  source 1..203: mol_type = other DNA
ggcgcgccagtccttgccttttgggttgtgttagttgtgttagttgtgttcacggaatcgagaatgttcacggaatcgagaatgttcacggaatcgagaatgttcacggaatcgagaatgttcacggaatcgagaatgttcacggaatcgagaatgttcacggaatcgagaatgttagttgtgttagtcgactcggaccgatg

SEQ ID NO: 15974 - DNA, 203 bp, synthetic construct
  source 1..203: mol_type = other DNA
ggcgcgccagtcctcctcctctgcgttgtgttagttgtgttagttgtgttctacgacggtatctgatcgtcttcgaacctccgactttcgttcttgattaatgaaaacattcttggcaaatgctttcgctctggtccgtcttgcgccggtccaagaatttcacctctagcggcgcaatttgtgttagtcgactcggaccgatg

SEQ ID NO: 15975 - DNA, 203 bp, synthetic construct
  source 1..203: mol_type = other DNA
ggcgcgccagtcctaaggcagtctgttgtgttagttgtgttagttgtgttgcaggctccactcctggtggtgcccttccgtcaattcctttaagtttcagctttgcaaccatactccccccggaacccaaagactttggtttcccggaagctgcccggcgggtcatgggaataacgccttgtgttagtcgactcggaccgatg

SEQ ID NO: 15976 - DNA, 203 bp, synthetic construct
  source 1..203: mol_type = other DNA
ggcgcgccagtcctattgtgccacgttgtgttagttgtgttagttgtgtttactcccttagttgtgtttactcccttagttgtgtttactcccttagttgtgtttactcccttagttgtgtttactcccttagttgtgtttactcccttagttgtgtttactcccttagttgtgtttactcccttagtcgactcggaccgatg

SEQ ID NO: 15977 - DNA, 203 bp, synthetic construct
  source 1..203: mol_type = other DNA
ggcgcgccagtccttatgcctattgttgtgttagttgtgttagttgtgtttttcagctttgcaaccatactccccccggaacccaaagactttggtttcccggaagctgcccggcgggtcatgggaataacgccgccgcatcgccggtcggcatcgtttatggtcggaactacgacggttgtgttagtcgactcggaccgatg

SEQ ID NO: 15978 - DNA, 203 bp, synthetic construct
  source 1..203: mol_type = other DNA
ggcgcgccagtcctgactaggcaagttgtgttcgtcaattcctttatgttcgtcaattcctttatgttcgtcaattcctttatgttcgtcaattcctttatgttcgtcaattcctttatgttcgtcaattcctttatgttcgtcaattcctttatgttcgtcaattcctttatgttagttgtgttagtcgactcggaccgatg

SEQ ID NO: 15979 - DNA, 203 bp, synthetic construct
  source 1..203: mol_type = other DNA
ggcgcgccagtcctctcctcctatgttgtgtttactcccttagttgtgtttactcccttagttgtgtttactcccttagttgtgtttactcccttagttgtgtttactcccttagttgtgtttactcccttagttgtgtttactcccttagttgtgtttactcccttagttgtgtttactcccttagtcgactcggaccgatg

SEQ ID NO: 15980 - DNA, 203 bp, synthetic construct
  source 1..203: mol_type = other DNA
ggcgcgccagtcctttaggcagcctaccggccgtctgacatttctgacatttctgacatttctgacatttctgacatttctgacatttctgacatttctgacatttctgacatttctgacatttctgacatttctgacatttctgacatttctgacatttctgacatttctgacatttctgacatttccgactcggaccgatg

SEQ ID NO: 15981 - DNA, 203 bp, synthetic construct
  source 1..203: mol_type = other DNA
ggcgcgccagtcctcttacctgggtaccggccgtctgacatttctgacatttctgacatttctgacatttctgacatttctgacatttctgacatttctgacatttctgacatttctgacatttctgacatttctgacatttctgacatttctgacatttctgacatttctgacatttctgtactccccgactcggaccgatg

SEQ ID NO: 15982 - DNA, 203 bp, synthetic construct
  source 1..203: mol_type = other DNA
ggcgcgccagtcctgaccctcctataccggccgtctgacatttctgacatttctgacatttctgacatttctgacatttctgacatttctgacatttctgacatttctgacatttctgacatttctgacatttctgacatttctgacatttctgacatttctgacatttctgaccacggaatcgagaacgactcggaccgatg

SEQ ID NO: 15983 - DNA, 203 bp, synthetic construct
  source 1..203: mol_type = other DNA
ggcgcgccagtcctcctccatagctaccggccgtctgacatttctgacatttctgacatttctgacatttctgacatttctgacatttctgacatttctgacatttctgacatttctgacatttctgacatttctgacatttctgacatttctgacatttctgacatttctgaccgtcaattcctttacgactcggaccgatg

SEQ ID NO: 15984 - DNA, 203 bp, synthetic construct
  source 1..203: mol_type = other DNA
ggcgcgccagtcctatgcctatggtcacggaatcgagaaatttctgacatttctgacatttctgacatttctgacatttctgacatttctgacatttctgacatttctgacatttctgacatttctgacatttctgacatttctgacatttctgacatttctgacatttctgacatttcccggcgggtcgactcggaccgatg

SEQ ID NO: 15985 - DNA, 203 bp, synthetic construct
  source 1..203: mol_type = other DNA
ggcgcgccagtcctctgccttcaatcccactcaaaatccaaaatcactaccagccactatctgctagaccggcgggtcgaataggtccggcgggtcaaaatatgccggcgggtgacattagtccggcgggtatcaatctcccggcgggtttataccgcccggcgggtacatatactccggcgggtaaacgactcggaccgatg

SEQ ID NO: 15986 - DNA, 203 bp, synthetic construct
  source 1..203: mol_type = other DNA
ggcgcgccagtcctcaggaggtgttcccactcaaaatccaaaatcactaccagccactatctgctagacctagagtgcgaataggtaaataaaaccaaaatatgccggcgggtgacattagtccggcgggtatcaatctcccggcgggtttataccgcccggcgggtacatatactccggcgggtaaacgactcggaccgatg

SEQ ID NO: 15987 - DNA, 203 bp, synthetic construct
  source 1..203: mol_type = other DNA
ggcgcgccagtcctgcaatacctgtcccactcaaaatccaaaatcactaccagccactatctgctagacctagagtgcgaataggtaaataaaaccaaaatatggggtaaatagacattagtaccggccgtatcaatctcaccggccgtttataccgcaccggccgtacatatactaccggccgtaaacgactcggaccgatg

SEQ ID NO: 15988 - DNA, 203 bp, synthetic construct
  source 1..203: mol_type = other DNA
ggcgcgccagtcctttgcctacagtcccactcaaaatccaaaatcactaccagccactatctgctagacctagagtgcgaataggtaaataaaaccaaaatatggggtaaatagacattagttagagttcaatcaatctcaacaaccatttataccgcaccggccgtacatatactaccggccgtaaacgactcggaccgatg

SEQ ID NO: 15989 - DNA, 203 bp, synthetic construct
  source 1..203: mol_type = other DNA
ggcgcgccagtccttcaaggaggctcccactcaaaatccaaaatcactaccagccactatctgctagacctagagtgcgaataggtaaataaaaccaaaatatggggtaaatagacattagttagagttcaatcaatctcaacaaccatttataccgccaattcaatacatatactaccggccgtaaacgactcggaccgatg

SEQ ID NO: 15990 - DNA, 203 bp, synthetic construct
  source 1..203: mol_type = other DNA
ggcgcgccagtcctgtttacctgttcccactcaaaatccaaaatcactaccagccactatctgctagacctagagtgcgaataggtaaataaaaccaaaatatggggtaaatagacattagttagagttcaatcaatctcaacaaccatttataccgcccggcgggtacatatactccggcgggtaaacgactcggaccgatg

SEQ ID NO: 15991 - DNA, 203 bp, synthetic construct
  source 1..203: mol_type = other DNA
ggcgcgccagtcctcaaaggcaattcccactcaaaatccaaaatcactaccagccactatctgctagacctagagtgcgaataggtaaataaaaccaaaatatggggtaaatagacattagttagagttcaatcaatctccacggaatcgagaaccgccacggaatcgagaatactataaatcttaaacgactcggaccgatg

SEQ ID NO: 15992 - DNA, 203 bp, synthetic construct
  source 1..203: mol_type = other DNA
ggcgcgccagtcctagagtacctgtcccactcaaaatccaaaatcactaccagccactatctgctagacctagagtgcgaataggtaaataaaaccaaaatatggggtaaatagacattagttagagttcaatcaatctctactcccatttataccgctactcccatacatatacttactcccttaaacgactcggaccgatg

SEQ ID NO: 15993 - DNA, 203 bp, synthetic construct
  source 1..203: mol_type = other DNA
ggcgcgccagtcctacgtggaggatcccactcaaaatccaaaatcactaccagccactatctgctagacctagagtgcgaataggtaaataaaaccaaaatatggggtaaatagacattagttagagttcaatcaatctcttcttggcaaaataccgcttcttggcaaaatatactttcttggcaaaacgactcggaccgatg

SEQ ID NO: 15994 - DNA, 203 bp, synthetic construct
  source 1..203: mol_type = other DNA
ggcgcgccagtccttcaaaaggcatcccactcaaaatccaaaatcactaccagccactatctgctagacctagagtgcgaataggttactcccaccaaaatatgtactccctagacattagttactccccaatcaatctctactcccatttataccgctactcccatacatatacttactcccttaaacgactcggaccgatg

SEQ ID NO: 15995 - DNA, 203 bp, synthetic construct
  source 1..203: mol_type = other DNA
ggcgcgccagtcctaatcctccattcccactccacggaatcgagaactaccacggaatcgagaatagacacggaatcgagaaaggtcacggaatcgagaatatgcacggaatcgagaatagtcacggaatcgagaatctccacggaatcgagaaccgccacggaatcgagaatactataaatcttaaacgactcggaccgatg

SEQ ID NO: 15996 - DNA, 203 bp, synthetic construct
  source 1..203: mol_type = other DNA
ggcgcgccagtcctcggtttcatatccggcgggtctgacatttctgacatttctgacatttctgacatttctgacatttctgacatttctgacatttctgacatttctgacatttctgacatttctgacatttctgacatttctgacatttctgacatttctgacatttctgacatttctgtactccccgactcggaccgatg

SEQ ID NO: 15997 - DNA, 203 bp, synthetic construct
  source 1..203: mol_type = other DNA
ggcgcgccagtcctgggagttgcctccggcgggtctgacatttctgacatttctgacatttctgacatttctgacatttctgacatttctgacatttctgacatttctgacatttctgacatttctgacatttctgacatttctgacatttctgacatttctgacatttctgaccacggaatcgagaacgactcggaccgatg

SEQ ID NO: 15998 - DNA, 203 bp, synthetic construct
  source 1..203: mol_type = other DNA
ggcgcgccagtcctcacgggagtctccttcctaccggccgtgcctgggccaccggccgttgctgtggaaccggccgtggggccctgaccggccgtctgagcaccaccggccgtagcctgcctaccggccgtacccctagcaccggccgtggggaggcaaccggccgtaggccaggcaccggccgtggtcgactcggaccgatg

SEQ ID NO: 15999 - DNA, 203 bp, synthetic construct
  source 1..203: mol_type = other DNA
ggcgcgccagtcctcgacgggagttccttcctcacggaatcgagaaggcccacggaatcgagaatggacacggaatcgagaacctgcacggaatcgagaacacccacggaatcgagaagcctcacggaatcgagaatagccacggaatcgagaaggcacacggaatcgagaaaggctacctcgggggtcgactcggaccgatg

SEQ ID NO: 16000 - DNA, 203 bp, synthetic construct
  source 1..203: mol_type = other DNA
ggcgcgccagtcctactccctgtgtccttcctccggcgggtgcctgggccccggcgggttgctgtggaccggcgggtggggccctgccggcgggtctgagcaccccggcgggtagcctgcctccggcgggtacccctagcccggcgggtggggaggcaccggcgggtaggccaggcccggcgggtggtcgactcggaccgatg

SEQ ID NO: 16001 - DNA, 203 bp, synthetic construct
  source 1..203: mol_type = other DNA
ggcgcgccagtcctattactcccgtccttcctctgcacctggcctgggccacacccaagtgctgtggacgtcaattcctttacctgcgtcaattcctttacacccgtcaattcctttagcctcgtcaattcctttatagccgtcaattcctttaggcacgtcaattcctttaaggctacctcgggggtcgactcggaccgatg

SEQ ID NO: 16002 - DNA, 203 bp, synthetic construct
  source 1..203: mol_type = other DNA
ggcgcgccagtcctatcgtttgactccttcctctgcacctggcctgggccacacccaagtgctgtggactggcccgaggggccctgcacgtggccctgagcacccacggaatcgagaagcctcacggaatcgagaatagccacggaatcgagaaggcacacggaatcgagaaaggctacctcgggggtcgactcggaccgatg

SEQ ID NO: 16003 - DNA, 203 bp, synthetic construct
  source 1..203: mol_type = other DNA
ggcgcgccagtccttgaaacgagttccttcctctgcacctggcctgggccacacccaagtgctgtggactggcccgaggggccctgcacgtggccctgagcacctactcccgtagcctgccttactcccagacccctagctactcccaaggggaggcatactcccgcaggccaggctactcccggggtcgactcggaccgatg

SEQ ID NO: 16004 - DNA, 203 bp, synthetic construct
  source 1..203: mol_type = other DNA
ggcgcgccagtcctgaaacgactttccttcctctgcacctggcctgggccacacccaagtgctgtggactggcccgaggggccctgcacgtggccctgagcacctctcagcgtagcctgcctagtccctagacccctagcaccggccgtggggaggcaaccggccgtaggccaggcaccggccgtggtcgactcggaccgatg

SEQ ID NO: 16005 - DNA, 203 bp, synthetic construct
  source 1..203: mol_type = other DNA
ggcgcgccagtcctagtcgtttggtccttcctctgcacctggcctgggccacacccaagtgctgtggactggcccgaggggccctgcacgtggccctgagcacctctcagcgtagcctgcctagtccctagacccctagccagctccaaggggaggcacctccaagcaggccaggctactcccggggtcgactcggaccgatg

SEQ ID NO: 16006 - DNA, 203 bp, synthetic construct
  source 1..203: mol_type = other DNA
ggcgcgccagtcctcaaacgaggttccttcctctgcacctggcctgggccacacccaagtgctgtggactggcccgaggggccctgcacgtggccctgagcacctctcagcgtagcctgcctagtccctagacccctagccagctccaaggggaggcacgtcaattcctttaaggctacctcgggggtcgactcggaccgatg

SEQ ID NO: 16007 - DNA, 203 bp, synthetic construct
  source 1..203: mol_type = other DNA
ggcgcgccagtcctgcaaaacgactccttcctctgcacctggcctgggccacacccaagtgctgtggactggcccgaggggccctgcacgtggccctgagcacctctcagcgtagcctgcctagtccctagacccctagccagctccaaggggaggcattcttggcaaagccaggcttcttggcaaatcgactcggaccgatg

SEQ ID NO: 16008 - DNA, 203 bp, synthetic construct
  source 1..203: mol_type = other DNA
ggcgcgccagtcctcgagtcgttttccttcctctgcacctggcctgggccacacccaagtgctgtggactggcccgaggggccctgcacgtggccctgagcacctctcagcgtagcctgcctagtccctagacccctagccgtcaattcctttaggcacgtcaattcctttaaggctacctcgggggtcgactcggaccgatg

SEQ ID NO: 16009 - DNA, 203 bp, synthetic construct
  source 1..203: mol_type = other DNA
ggcgcgccagtcctcgaaacgaactccttcctctgcacctggcctgggccacacccaagtgctgtggactggcccgaggggccctgcacgtggccctgagcacctctcagcgtagcctgcctagtccctagacccctagctactcccaaggggaggcatactcccgcaggccaggctactcccggggtcgactcggaccgatg

SEQ ID NO: 16010 - DNA, 203 bp, synthetic construct
  source 1..203: mol_type = other DNA
ggcgcgccagtccttgcaaacgattccttcctctgcacctggcctgggccacacccaagtgctgtggactggcccgaggggccctgcacgtggccctgagcacctctcagcgtagcctgcctcacggaatcgagaatagccacggaatcgagaaggcacacggaatcgagaaaggctacctcgggggtcgactcggaccgatg

SEQ ID NO: 16011 - DNA, 203 bp, synthetic construct
  source 1..203: mol_type = other DNA
ggcgcgccagtcctcgctggtcaatccttcctctgcacctggcctgggccacacccaagtgctgtggactggcccgaggggccctgcacgtggccctgagcacctctcagcgtagcctgcctcgtcaattcctttatagccgtcaattcctttaggcacgtcaattcctttaaggctacctcgggggtcgactcggaccgatg

SEQ ID NO: 16012 - DNA, 203 bp, synthetic construct
  source 1..203: mol_type = other DNA
ggcgcgccagtccttaccagctgctccttcctctgcacctggcctgggccacacccaagtgctgtggactggcccgaggggccctgccggcgggtctgagcaccccggcgggtagcctgcctccggcgggtacccctagcccggcgggtggggaggcaccggcgggtaggccaggcccggcgggtggtcgactcggaccgatg

SEQ ID NO: 16013 - DNA, 203 bp, synthetic construct
  source 1..203: mol_type = other DNA
ggcgcgccagtcctgtgattaaggtccttcctctgcacctggcctgggccacacccaagtgctgtggattcttggcaaaggccctgttcttggcaaagagcaccttcttggcaaacctgcctttcttggcaaaccctagcttcttggcaaaggaggcattcttggcaaagccaggcttcttggcaaatcgactcggaccgatg

SEQ ID NO: 16014 - DNA, 203 bp, synthetic construct
  source 1..203: mol_type = other DNA
ggcgcgccagtccttcttaatttgtctcacggaatcgagaattctgacatttctgacatttctgacatttctgacatttctgacatttctgacatttctgacatttctgacatttctgacatttctgacatttctgacatttctgacatttctgacatttctgacatttctgacatttctgacatttccgactcggaccgatg

SEQ ID NO: 16015 - DNA, 203 bp, synthetic construct
  source 1..203: mol_type = other DNA
ggcgcgccagtcctcttaatgccgtctcacggaatcgagaattctgacatttctgacatttctgacatttctgacatttctgacatttctgacatttctgacatttctgacatttctgacatttctgacatttctgacatttctgacatttctgacatttctgacatttctgacatttctgtactccccgactcggaccgatg

SEQ ID NO: 16016 - DNA, 203 bp, synthetic construct
  source 1..203: mol_type = other DNA
ggcgcgccagtcctggatctcccatctcgtcaattcctttattctgacatttctgacatttctgacatttctgacatttctgacatttctgacatttctgacatttctgacatttctgacatttctgacatttctgacatttctgacatttctgacatttctgacatttctgaccgtcaattcctttacgactcggaccgatg

SEQ ID NO: 16017 - DNA, 203 bp, synthetic construct
  source 1..203: mol_type = other DNA
ggcgcgccagtccttctagcgccctctgacaccggccgtatttctgacatttctgacatttctgacatttctgacatttctgacatttctgacatttctgacatttctgacatttctgacatttctgacatttctgacatttctgacatttctgacatttctgacatttctgacatttcccggcgggtcgactcggaccgatg

SEQ ID NO: 16018 - DNA, 203 bp, synthetic construct
  source 1..203: mol_type = other DNA
ggcgcgccagtcctgggcgcatgttctgacataccggccgtttctgacataccggccgtttctgacataccggccgtttctgacataccggccgtttctgacataccggccgtttctgacataccggccgtttctgacataccggccgtttctgacataccggccgtttctgacataccggccgtttccgactcggaccgatg

SEQ ID NO: 16019 - DNA, 203 bp, synthetic construct
  source 1..203: mol_type = other DNA
ggcgcgccagtccttggcgccctctctgacataccggccgtttctgacatttctgacatttctgacatttctgacatttctgacatttctgacatttctgacatttctgacatttctgacatttctgacatttctgacatttctgacatttctgacatttctgacatttctgacatttctgacatttccgactcggaccgatg

SEQ ID NO: 16020 - DNA, 203 bp, synthetic construct
  source 1..203: mol_type = other DNA
ggcgcgccagtcctgcgcccaacctctgacataccggccgtttctgacatttctgacatttctgacatttctgacatttctgacatttctgacatttctgacatttctgacatttctgacatttctgacatttctgacatttctgacatttctgacatttctgacatttctgacatttctgtactccccgactcggaccgatg

SEQ ID NO: 16021 - DNA, 203 bp, synthetic construct
  source 1..203: mol_type = other DNA
ggcgcgccagtcctgcgccctgtctctgacatcacggaatcgagaaacatcacggaatcgagaaacatcacggaatcgagaaacatcacggaatcgagaaacatcacggaatcgagaaacatcacggaatcgagaaacatcacggaatcgagaaacatttctgacatttctgacatttctgacatttccgactcggaccgatg

SEQ ID NO: 16022 - DNA, 203 bp, synthetic construct
  source 1..203: mol_type = other DNA
ggcgcgccagtcctgagattgttctctgacatcacggaatcgagaaacatcacggaatcgagaaacatcacggaatcgagaaacatcacggaatcgagaaacatttctgacatttctgacatcacggaatcgagaaacatcacggaatcgagaaacatttctgacatttctgacatttctgacatttccgactcggaccgatg

SEQ ID NO: 16023 - DNA, 203 bp, synthetic construct
  source 1..203: mol_type = other DNA
ggcgcgccagtcctcgaacaatgctctgacatcacggaatcgagaaacatcacggaatcgagaaacatcacggaatcgagaaacatcacggaatcgagaaacatttctgacatttctgacatcacggaatcgagaaacatttctgacatttctgacatcacggaatcgagaaacatttctgacatttccgactcggaccgatg

SEQ ID NO: 16024 - DNA, 203 bp, synthetic construct
  source 1..203: mol_type = other DNA
ggcgcgccagtcctactcgccaactctgacatcacggaatcgagaaacatcacggaatcgagaaacatcacggaatcgagaaacatttctgacatttctgacatcacggaatcgagaaacatcacggaatcgagaaacatttctgacatttctgacatttctgacatttctgacatttctgacatttccgactcggaccgatg

SEQ ID NO: 16025 - DNA, 203 bp, synthetic construct
  source 1..203: mol_type = other DNA
ggcgcgccagtcctacgttggccttctgacatcacggaatcgagaaacatcacggaatcgagaaacatcacggaatcgagaaacatttctgacatttctgacatcacggaatcgagaaacatttctgacatttctgacatttctgacatttctgacatcacggaatcgagaaacatttctgacatttccgactcggaccgatg

SEQ ID NO: 16026 - DNA, 203 bp, synthetic construct
  source 1..203: mol_type = other DNA
ggcgcgccagtcctttggcgaaagtctgacatcacggaatcgagaaacatcacggaatcgagaaacatcacggaatcgagaaacatttctgacatttctgacatttctgacatttctgacatcacggaatcgagaaacatcacggaatcgagaaacatttctgacatttctgacatttctgacatttccgactcggaccgatg

SEQ ID NO: 16027 - DNA, 203 bp, synthetic construct
  source 1..203: mol_type = other DNA
ggcgcgccagtccttggccaaccctctgacatcacggaatcgagaaacatcacggaatcgagaaacatcacggaatcgagaaacatttctgacatttctgacatttctgacatttctgacatcacggaatcgagaaacatttctgacatttctgacatcacggaatcgagaaacatttctgacatttccgactcggaccgatg

SEQ ID NO: 16028 - DNA, 203 bp, synthetic construct
  source 1..203: mol_type = other DNA
ggcgcgccagtcctgttggcgctctctgacatcacggaatcgagaaacatcacggaatcgagaaacatcacggaatcgagaaacatttctgacatttctgacatttctgacatttctgacatcacggaatcgagaaacatttctgacatttctgacatttctgacatttctgacatttctgacatttccgactcggaccgatg

SEQ ID NO: 16029 - DNA, 203 bp, synthetic construct
  source 1..203: mol_type = other DNA
ggcgcgccagtcctaagccaaatatctgacatcacggaatcgagaaacatcacggaatcgagaaacatcacggaatcgagaaacatttctgacatttctgacatttctgacatttctgacatttctgacatttctgacatttctgacatttctgacatttctgacatttctgacatttctgacatttccgactcggaccgatg

SEQ ID NO: 16030 - DNA, 203 bp, synthetic construct
  source 1..203: mol_type = other DNA
ggcgcgccagtcctggccaaaccctctgacatcacggaatcgagaaacatcacggaatcgagaaacatttctgacatttctgacatcacggaatcgagaaacatcacggaatcgagaaacatttctgacatttctgacatcacggaatcgagaaacatttctgacatttctgacatttctgacatttccgactcggaccgatg

SEQ ID NO: 16031 - DNA, 203 bp, synthetic construct
  source 1..203: mol_type = other DNA
ggcgcgccagtcctatttggcgactctgacatcacggaatcgagaaacatcacggaatcgagaaacatttctgacatttctgacatcacggaatcgagaaacatcacggaatcgagaaacatttctgacatttctgacatttctgacatttctgacatttctgacatttctgacatttctgacatttccgactcggaccgatg

SEQ ID NO: 16032 - DNA, 203 bp, synthetic construct
  source 1..203: mol_type = other DNA
ggcgcgccagtcctcgttggcgcgtctgacatcacggaatcgagaaacatcacggaatcgagaaacatttctgacatttctgacatcacggaatcgagaaacatttctgacatttctgacatcacggaatcgagaaacatcacggaatcgagaaacatttctgacatttctgacatttctgacatttccgactcggaccgatg

SEQ ID NO: 16033 - DNA, 203 bp, synthetic construct
  source 1..203: mol_type = other DNA
ggcgcgccagtccttcttgccaaatctgacatcacggaatcgagaaacatttctgacatttctgacatcacggaatcgagaaacatcacggaatcgagaaacatcacggaatcgagaaacatcacggaatcgagaaacatcacggaatcgagaaacatttctgacatttctgacatttctgacatttccgactcggaccgatg

SEQ ID NO: 16034 - DNA, 203 bp, synthetic construct
  source 1..203: mol_type = other DNA
ggcgcgccagtcctttggctgccatctgacatcacggaatcgagaaacatttctgacatttctgacatcacggaatcgagaaacatcacggaatcgagaaacatttctgacatttctgacatcacggaatcgagaaacatcacggaatcgagaaacatcacggaatcgagaaacatttctgacatttccgactcggaccgatg

SEQ ID NO: 16035 - DNA, 203 bp, synthetic construct
  source 1..203: mol_type = other DNA
ggcgcgccagtccttttggcctgatctgacatcacggaatcgagaaacatttctgacatttctgacatcacggaatcgagaaacatcacggaatcgagaaacatttctgacatttctgacatcacggaatcgagaaacatttctgacatttctgacatcacggaatcgagaaacatttctgacatttccgactcggaccgatg

SEQ ID NO: 16036 - DNA, 203 bp, synthetic construct
  source 1..203: mol_type = other DNA
ggcgcgccagtcctgccaaacttctctgacatcacggaatcgagaaacatttctgacatttctgacatcacggaatcgagaaacatcacggaatcgagaaacatttctgacatttctgacatcacggaatcgagaaacatttctgacatttctgacatttctgacatttctgacatttctgacatttccgactcggaccgatg

SEQ ID NO: 16037 - DNA, 203 bp, synthetic construct
  source 1..203: mol_type = other DNA
ggcgcgccagtcctagtgagacactctgacatcacggaatcgagaaacatttctgacatttctgacatcacggaatcgagaaacatttctgacatttctgacatcacggaatcgagaaacatcacggaatcgagaaacatttctgacatttctgacatcacggaatcgagaaacatttctgacatttccgactcggaccgatg

SEQ ID NO: 16038 - DNA, 203 bp, synthetic construct
  source 1..203: mol_type = other DNA
ggcgcgccagtcctgtctgtgtcttctgacatcacggaatcgagaaacatttctgacatttctgacatcacggaatcgagaaacatttctgacatttctgacatttctgacatttctgacatcacggaatcgagaaacatttctgacatttctgacatcacggaatcgagaaacatttctgacatttccgactcggaccgatg

SEQ ID NO: 16039 - DNA, 203 bp, synthetic construct
  source 1..203: mol_type = other DNA
ggcgcgccagtcctccgtgtctgatctgacatcacggaatcgagaaacatttctgacatttctgacatttctgacatttctgacatcacggaatcgagaaacatcacggaatcgagaaacatttctgacatttctgacatcacggaatcgagaaacatcacggaatcgagaaacatttctgacatttccgactcggaccgatg

SEQ ID NO: 16040 - DNA, 203 bp, synthetic construct
  source 1..203: mol_type = other DNA
ggcgcgccagtcctactgtgtctatctgacatcacggaatcgagaaacatttctgacatttctgacatttctgacatttctgacatcacggaatcgagaaacatcacggaatcgagaaacatttctgacatttctgacatttctgacatttctgacatcacggaatcgagaaacatttctgacatttccgactcggaccgatg

SEQ ID NO: 16041 - DNA, 203 bp, synthetic construct
  source 1..203: mol_type = other DNA
ggcgcgccagtcctagtgtctgtgtctgacatcacggaatcgagaaacatttctgacatttctgacatttctgacatttctgacatcacggaatcgagaaacatcacggaatcgagaaacatttctgacatttctgacatttctgacatttctgacatttctgacatttctgacatttctgacatttccgactcggaccgatg

SEQ ID NO: 16042 - DNA, 203 bp, synthetic construct
  source 1..203: mol_type = other DNA
ggcgcgccagtcctctcgcgcccatctgacatcacggaatcgagaaacatttctgacatttctgacatttctgacatttctgacatttctgacatttctgacatcacggaatcgagaaacatttctgacatttctgacatttctgacatttctgacatttctgacatttctgacatttctgacatttccgactcggaccgatg

SEQ ID NO: 16043 - DNA, 203 bp, synthetic construct
  source 1..203: mol_type = other DNA
ggcgcgccagtccttatcgcgggatctgacatcacggaatcgagaaacatttctgacatttctgacatttctgacatttctgacatttctgacatttctgacatttctgacatttctgacatttctgacatttctgacatcacggaatcgagaaacatcacggaatcgagaaacatttctgacatttccgactcggaccgatg

SEQ ID NO: 16044 - DNA, 203 bp, synthetic construct
  source 1..203: mol_type = other DNA
ggcgcgccagtcctctcgcgggactctgacatcacggaatcgagaaacatttctgacatttctgacatttctgacatttctgacatttctgacatttctgacatttctgacatttctgacatttctgacatttctgacatttctgacatttctgacatttctgacatttctgacatttctgacatttccgactcggaccgatg

SEQ ID NO: 16045 - DNA, 203 bp, synthetic construct
  source 1..203: mol_type = other DNA
ggcgcgccagtcctctgcccgcgttctgacatccggcgggtttctgacatccggcgggtttctgacatccggcgggtttctgacatccggcgggtttctgacatccggcgggtttctgacatccggcgggtttctgacatccggcgggtttctgacatccggcgggtttctgacatccggcgggtttccgactcggaccgatg

SEQ ID NO: 16046 - DNA, 203 bp, synthetic construct
  source 1..203: mol_type = other DNA
ggcgcgccagtcctgcccgcctaatctgacatccggcgggtttctgacatccggcgggtttctgacatccggcgggtttctgacatccggcgggtttctgacatccggcgggtttctgacatccggcgggtttctgacatccggcgggtttctgacatccggcgggtttctgacatccggcgggtttccgactcggaccgatg

SEQ ID NO: 16047 - DNA, 203 bp, synthetic construct
  source 1..203: mol_type = other DNA
ggcgcgccagtcctaggcgggtcctctgacatccggcgggtttctgacatccggcgggtttctgacatccggcgggtttctgacatccggcgggtttctgacatccggcgggtttctgacatccggcgggtttctgacatccggcgggtttctgacatccggcgggtttctgacatccggcgggtttccgactcggaccgatg

SEQ ID NO: 16048 - DNA, 203 bp, synthetic construct
  source 1..203: mol_type = other DNA
ggcgcgccagtcctagttagatcatctgacatccggcgggtttctgacatccggcgggtttctgacatccggcgggtttctgacatccggcgggtttctgacatccggcgggtttctgacatccggcgggtttctgacatccggcgggtttctgacatccggcgggtttctgacatccggcgggtttccgactcggaccgatg

SEQ ID NO: 16049 - DNA, 203 bp, synthetic construct
  source 1..203: mol_type = other DNA
ggcgcgccagtcctgagccgggcttctgacatccggcgggtttctgacatccggcgggtttctgacatccggcgggtttctgacatccggcgggtttctgacatccggcgggtttctgacatccggcgggtttctgacatccggcgggtttctgacatccggcgggtttctgacatccggcgggtttccgactcggaccgatg

SEQ ID NO: 16050 - DNA, 203 bp, synthetic construct
  source 1..203: mol_type = other DNA
ggcgcgccagtcctcgccggtctctctgacatccggcgggtttctgacatttctgacatttctgacatttctgacatttctgacatttctgacatttctgacatttctgacatttctgacatttctgacatttctgacatttctgacatttctgacatttctgacatttctgacatttctgacatttccgactcggaccgatg

SEQ ID NO: 16051 - DNA, 203 bp, synthetic construct
  source 1..203: mol_type = other DNA
ggcgcgccagtccttacttgccggtctgacatcgtcaattcctttaacatcgtcaattcctttaacatcgtcaattcctttaacatcgtcaattcctttaacatcgtcaattcctttaacatcgtcaattcctttaacatcgtcaattcctttaacatttctgacatttctgacatttctgacatttccgactcggaccgatg

SEQ ID NO: 16052 - DNA, 203 bp, synthetic construct
  source 1..203: mol_type = other DNA
ggcgcgccagtcctctggtgccggtctgacatcgtcaattcctttaacatcgtcaattcctttaacatcgtcaattcctttaacatcgtcaattcctttaacatcgtcaattcctttaacatcgtcaattcctttaacatttctgacatttctgacatttctgacatttctgacatttctgacatttccgactcggaccgatg

SEQ ID NO: 16053 - DNA, 203 bp, synthetic construct
  source 1..203: mol_type = other DNA
ggcgcgccagtccttgccggtcgttctgacatcgtcaattcctttaacatcgtcaattcctttaacatcgtcaattcctttaacatcgtcaattcctttaacatcgtcaattcctttaacatttctgacatttctgacatcgtcaattcctttaacatttctgacatttctgacatttctgacatttccgactcggaccgatg

SEQ ID NO: 16054 - DNA, 203 bp, synthetic construct
  source 1..203: mol_type = other DNA
ggcgcgccagtcctaggcagccggtctgacatcgtcaattcctttaacatcgtcaattcctttaacatcgtcaattcctttaacatcgtcaattcctttaacatttctgacatttctgacatcgtcaattcctttaacatcgtcaattcctttaacatcgtcaattcctttaacatttctgacatttccgactcggaccgatg

SEQ ID NO: 16055 - DNA, 203 bp, synthetic construct
  source 1..203: mol_type = other DNA
ggcgcgccagtcctgataccggcgtctgacatcgtcaattcctttaacatcgtcaattcctttaacatcgtcaattcctttaacatcgtcaattcctttaacatttctgacatttctgacatcgtcaattcctttaacatttctgacatttctgacatcgtcaattcctttaacatttctgacatttccgactcggaccgatg

SEQ ID NO: 16056 - DNA, 203 bp, synthetic construct
  source 1..203: mol_type = other DNA
ggcgcgccagtcctccggctaatctctgacatcgtcaattcctttaacatcgtcaattcctttaacatcgtcaattcctttaacatcgtcaattcctttaacatttctgacatttctgacatcgtcaattcctttaacatttctgacatttctgacatttctgacatttctgacatttctgacatttccgactcggaccgatg

SEQ ID NO: 16057 - DNA, 203 bp, synthetic construct
  source 1..203: mol_type = other DNA
ggcgcgccagtccttcgccggcattctgacatcgtcaattcctttaacatcgtcaattcctttaacatcgtcaattcctttaacatcgtcaattcctttaacatttctgacatttctgacatttctgacatttctgacatcgtcaattcctttaacatcgtcaattcctttaacatttctgacatttccgactcggaccgatg

SEQ ID NO: 16058 - DNA, 203 bp, synthetic construct
  source 1..203: mol_type = other DNA
ggcgcgccagtcctacgtaccggctctgacatcgtcaattcctttaacatcgtcaattcctttaacatcgtcaattcctttaacatcgtcaattcctttaacatttctgacatttctgacatttctgacatttctgacatttctgacatttctgacatcgtcaattcctttaacatttctgacatttccgactcggaccgatg

SEQ ID NO: 16059 - DNA, 203 bp, synthetic construct
  source 1..203: mol_type = other DNA
ggcgcgccagtcctaccgtccggctctgacatcgtcaattcctttaacatcgtcaattcctttaacatcgtcaattcctttaacatttctgacatttctgacatcgtcaattcctttaacatcgtcaattcctttaacatcgtcaattcctttaacatttctgacatttctgacatttctgacatttccgactcggaccgatg

SEQ ID NO: 16060 - DNA, 203 bp, synthetic construct
  source 1..203: mol_type = other DNA
ggcgcgccagtcctaacaaccggctctgacatcgtcaattcctttaacatcgtcaattcctttaacatcgtcaattcctttaacatttctgacatttctgacatcgtcaattcctttaacatcgtcaattcctttaacatttctgacatttctgacatcgtcaattcctttaacatttctgacatttccgactcggaccgatg

SEQ ID NO: 16061 - DNA, 203 bp, synthetic construct
  source 1..203: mol_type = other DNA
ggcgcgccagtcctcgccggcacttctgacatcgtcaattcctttaacatcgtcaattcctttaacatcgtcaattcctttaacatttctgacatttctgacatcgtcaattcctttaacatcgtcaattcctttaacatttctgacatttctgacatttctgacatttctgacatttctgacatttccgactcggaccgatg

SEQ ID NO: 16062 - DNA, 203 bp, synthetic construct
  source 1..203: mol_type = other DNA
ggcgcgccagtcctgaagccggcttctgacatcgtcaattcctttaacatcgtcaattcctttaacatcgtcaattcctttaacatttctgacatttctgacatcgtcaattcctttaacatttctgacatttctgacatttctgacatttctgacatttctgacatttctgacatttctgacatttccgactcggaccgatg

SEQ ID NO: 16063 - DNA, 203 bp, synthetic construct
  source 1..203: mol_type = other DNA
ggcgcgccagtcctttcgagcgggtctgacatcgtcaattcctttaacatcgtcaattcctttaacatcgtcaattcctttaacatttctgacatttctgacatttctgacatttctgacatttctgacatttctgacatcgtcaattcctttaacatttctgacatttctgacatttctgacatttccgactcggaccgatg

SEQ ID NO: 16064 - DNA, 203 bp, synthetic construct
  source 1..203: mol_type = other DNA
ggcgcgccagtcctatcgagctgttctgacatcgtcaattcctttaacatcgtcaattcctttaacatttctgacatttctgacatcgtcaattcctttaacatcgtcaattcctttaacatttctgacatttctgacatcgtcaattcctttaacatcgtcaattcctttaacatttctgacatttccgactcggaccgatg

SEQ ID NO: 16065 - DNA, 203 bp, synthetic construct
  source 1..203: mol_type = other DNA
ggcgcgccagtcctttcgagcttatctgacatcgtcaattcctttaacatcgtcaattcctttaacatttctgacatttctgacatcgtcaattcctttaacatcgtcaattcctttaacatttctgacatttctgacatcgtcaattcctttaacatttctgacatttctgacatttctgacatttccgactcggaccgatg

SEQ ID NO: 16066 - DNA, 203 bp, synthetic construct
  source 1..203: mol_type = other DNA
ggcgcgccagtccttatcgagctctctgacatcgtcaattcctttaacatcgtcaattcctttaacatttctgacatttctgacatcgtcaattcctttaacatcgtcaattcctttaacatttctgacatttctgacatttctgacatttctgacatcgtcaattcctttaacatttctgacatttccgactcggaccgatg

SEQ ID NO: 16067 - DNA, 203 bp, synthetic construct
  source 1..203: mol_type = other DNA
ggcgcgccagtcctaagctcgacgtctgacatcgtcaattcctttaacatcgtcaattcctttaacatttctgacatttctgacatcgtcaattcctttaacatttctgacatttctgacatcgtcaattcctttaacatttctgacatttctgacatttctgacatttctgacatttctgacatttccgactcggaccgatg

SEQ ID NO: 16068 - DNA, 203 bp, synthetic construct
  source 1..203: mol_type = other DNA
ggcgcgccagtcctggctcgaccatctgacatcgtcaattcctttaacatcgtcaattcctttaacatttctgacatttctgacatcgtcaattcctttaacatttctgacatttctgacatttctgacatttctgacatcgtcaattcctttaacatcgtcaattcctttaacatttctgacatttccgactcggaccgatg

SEQ ID NO: 16069 - DNA, 203 bp, synthetic construct
  source 1..203: mol_type = other DNA
ggcgcgccagtcctgagacgctgctctgacatcgtcaattcctttaacatcgtcaattcctttaacatttctgacatttctgacatttctgacatttctgacatttctgacatttctgacatcgtcaattcctttaacatttctgacatttctgacatcgtcaattcctttaacatttctgacatttccgactcggaccgatg

SEQ ID NO: 16070 - DNA, 203 bp, synthetic construct
  source 1..203: mol_type = other DNA
ggcgcgccagtcctatagcgtctatctgacatcgtcaattcctttaacatcgtcaattcctttaacatttctgacatttctgacatttctgacatttctgacatttctgacatttctgacatttctgacatttctgacatcgtcaattcctttaacatttctgacatttctgacatttctgacatttccgactcggaccgatg

SEQ ID NO: 16071 - DNA, 203 bp, synthetic construct
  source 1..203: mol_type = other DNA
ggcgcgccagtccttgcgtctaagtctgacatcgtcaattcctttaacatcgtcaattcctttaacatttctgacatttctgacatttctgacatttctgacatttctgacatttctgacatttctgacatttctgacatttctgacatttctgacatcgtcaattcctttaacatttctgacatttccgactcggaccgatg

SEQ ID NO: 16072 - DNA, 203 bp, synthetic construct
  source 1..203: mol_type = other DNA
ggcgcgccagtcctcgggcgtctttctgacatcgtcaattcctttaacatttctgacatttctgacatcgtcaattcctttaacatcgtcaattcctttaacatcgtcaattcctttaacatttctgacatttctgacatcgtcaattcctttaacatttctgacatttctgacatttctgacatttccgactcggaccgatg

SEQ ID NO: 16073 - DNA, 203 bp, synthetic construct
  source 1..203: mol_type = other DNA
ggcgcgccagtcctgcgtctttaatctgacatcgtcaattcctttaacatttctgacatttctgacatcgtcaattcctttaacatcgtcaattcctttaacatcgtcaattcctttaacatttctgacatttctgacatttctgacatttctgacatttctgacatttctgacatttctgacatttccgactcggaccgatg

SEQ ID NO: 16074 - DNA, 203 bp, synthetic construct
  source 1..203: mol_type = other DNA
ggcgcgccagtcctacaggcaaaatctgacatcgtcaattcctttaacatttctgacatttctgacatcgtcaattcctttaacatcgtcaattcctttaacatttctgacatttctgacatcgtcaattcctttaacatcgtcaattcctttaacatttctgacatttctgacatttctgacatttccgactcggaccgatg

SEQ ID NO: 16075 - DNA, 203 bp, synthetic construct
  source 1..203: mol_type = other DNA
ggcgcgccagtcctaccgatcggatctgacatcgtcaattcctttaacatttctgacatttctgacatcgtcaattcctttaacatcgtcaattcctttaacatttctgacatttctgacatttctgacatttctgacatcgtcaattcctttaacatttctgacatttctgacatttctgacatttccgactcggaccgatg

SEQ ID NO: 16076 - DNA, 203 bp, synthetic construct
  source 1..203: mol_type = other DNA
ggcgcgccagtcctacatgtcggatctgacatcgtcaattcctttaacatttctgacatttctgacatcgtcaattcctttaacatcgtcaattcctttaacatttctgacatttctgacatttctgacatttctgacatttctgacatttctgacatcgtcaattcctttaacatttctgacatttccgactcggaccgatg

SEQ ID NO: 16077 - DNA, 203 bp, synthetic construct
  source 1..203: mol_type = other DNA
ggcgcgccagtcctcctactcggatctgacatcgtcaattcctttaacatttctgacatttctgacatcgtcaattcctttaacatttctgacatttctgacatcgtcaattcctttaacatcgtcaattcctttaacatcgtcaattcctttaacatcgtcaattcctttaacatttctgacatttccgactcggaccgatg

SEQ ID NO: 16078 - DNA, 203 bp, synthetic construct
  source 1..203: mol_type = other DNA
ggcgcgccagtcctcgatctcggatctgacatcgtcaattcctttaacatttctgacatttctgacatcgtcaattcctttaacatttctgacatttctgacatcgtcaattcctttaacatcgtcaattcctttaacatttctgacatttctgacatttctgacatttctgacatttctgacatttccgactcggaccgatg

SEQ ID NO: 16079 - DNA, 203 bp, synthetic construct
  source 1..203: mol_type = other DNA
ggcgcgccagtccttccgaatgcctctgacatcgtcaattcctttaacatttctgacatttctgacatcgtcaattcctttaacatttctgacatttctgacatcgtcaattcctttaacatttctgacatttctgacatcgtcaattcctttaacatttctgacatttctgacatttctgacatttccgactcggaccgatg

SEQ ID NO: 16080 - DNA, 203 bp, synthetic construct
  source 1..203: mol_type = other DNA
ggcgcgccagtcctgtagctcggatctgacatcgtcaattcctttaacatttctgacatttctgacatcgtcaattcctttaacatttctgacatttctgacatttctgacatttctgacatcgtcaattcctttaacatcgtcaattcctttaacatcgtcaattcctttaacatttctgacatttccgactcggaccgatg

SEQ ID NO: 16081 - DNA, 203 bp, synthetic construct
  source 1..203: mol_type = other DNA
ggcgcgccagtccttccgacgccctctgacatcgtcaattcctttaacatttctgacatttctgacatcgtcaattcctttaacatttctgacatttctgacatttctgacatttctgacatttctgacatttctgacatcgtcaattcctttaacatcgtcaattcctttaacatttctgacatttccgactcggaccgatg

SEQ ID NO: 16082 - DNA, 203 bp, synthetic construct
  source 1..203: mol_type = other DNA
ggcgcgccagtcctcgtcgccggatctgacatcgtcaattcctttaacatttctgacatttctgacatcgtcaattcctttaacatttctgacatttctgacatttctgacatttctgacatttctgacatttctgacatttctgacatttctgacatcgtcaattcctttaacatttctgacatttccgactcggaccgatg

SEQ ID NO: 16083 - DNA, 203 bp, synthetic construct
  source 1..203: mol_type = other DNA
ggcgcgccagtccttccggtctgatctgacatcgtcaattcctttaacatttctgacatttctgacatcgtcaattcctttaacatttctgacatttctgacatttctgacatttctgacatttctgacatttctgacatttctgacatttctgacatttctgacatttctgacatttctgacatttccgactcggaccgatg

SEQ ID NO: 16084 - DNA, 203 bp, synthetic construct
  source 1..203: mol_type = other DNA
ggcgcgccagtcctaagtgcgccctctgacatcgtcaattcctttaacatttctgacatttctgacatttctgacatttctgacatcgtcaattcctttaacatcgtcaattcctttaacatttctgacatttctgacatttctgacatttctgacatcgtcaattcctttaacatttctgacatttccgactcggaccgatg

SEQ ID NO: 16085 - DNA, 203 bp, synthetic construct
  source 1..203: mol_type = other DNA
ggcgcgccagtcctcgtagatagttctgacatcgtcaattcctttaacatttctgacatttctgacatttctgacatttctgacatcgtcaattcctttaacatttctgacatttctgacatcgtcaattcctttaacatcgtcaattcctttaacatttctgacatttctgacatttctgacatttccgactcggaccgatg

SEQ ID NO: 16086 - DNA, 203 bp, synthetic construct
  source 1..203: mol_type = other DNA
ggcgcgccagtccttaacaatctttctgacatcgtcaattcctttaacatttctgacatttctgacatttctgacatttctgacatcgtcaattcctttaacatttctgacatttctgacatcgtcaattcctttaacatttctgacatttctgacatcgtcaattcctttaacatttctgacatttccgactcggaccgatg

SEQ ID NO: 16087 - DNA, 203 bp, synthetic construct
  source 1..203: mol_type = other DNA
ggcgcgccagtcctctaacaatcgtctgacatcgtcaattcctttaacatttctgacatttctgacatttctgacatttctgacatcgtcaattcctttaacatttctgacatttctgacatttctgacatttctgacatcgtcaattcctttaacatcgtcaattcctttaacatttctgacatttccgactcggaccgatg

SEQ ID NO: 16088 - DNA, 203 bp, synthetic construct
  source 1..203: mol_type = other DNA
ggcgcgccagtcctccttgtgggttctgacatcgtcaattcctttaacatttctgacatttctgacatttctgacatttctgacatcgtcaattcctttaacatttctgacatttctgacatttctgacatttctgacatttctgacatttctgacatcgtcaattcctttaacatttctgacatttccgactcggaccgatg

SEQ ID NO: 16089 - DNA, 203 bp, synthetic construct
  source 1..203: mol_type = other DNA
ggcgcgccagtccttaacccacattctgacatcgtcaattcctttaacatttctgacatttctgacatttctgacatttctgacatttctgacatttctgacatcgtcaattcctttaacatcgtcaattcctttaacatcgtcaattcctttaacatttctgacatttctgacatttctgacatttccgactcggaccgatg

SEQ ID NO: 16090 - DNA, 203 bp, synthetic construct
  source 1..203: mol_type = other DNA
ggcgcgccagtcctttgttgccgttctgacatcgtcaattcctttaacatttctgacatttctgacatttctgacatttctgacatttctgacatttctgacatcgtcaattcctttaacatttctgacatttctgacatcgtcaattcctttaacatcgtcaattcctttaacatttctgacatttccgactcggaccgatg

SEQ ID NO: 16091 - DNA, 203 bp, synthetic construct
  source 1..203: mol_type = other DNA
ggcgcgccagtccttacggctccctctgacatcgtcaattcctttaacatttctgacatttctgacatttctgacatttctgacatttctgacatttctgacatttctgacatttctgacatcgtcaattcctttaacatcgtcaattcctttaacatcgtcaattcctttaacatttctgacatttccgactcggaccgatg

SEQ ID NO: 16092 - DNA, 203 bp, synthetic construct
  source 1..203: mol_type = other DNA
ggcgcgccagtcctccgaggccgttctgacatcgtcaattcctttaacatttctgacatttctgacatttctgacatttctgacatttctgacatttctgacatttctgacatttctgacatcgtcaattcctttaacatttctgacatttctgacatcgtcaattcctttaacatttctgacatttccgactcggaccgatg

SEQ ID NO: 16093 - DNA, 203 bp, synthetic construct
  source 1..203: mol_type = other DNA
ggcgcgccagtcctggccacggcttctgacatcgtcaattcctttaacatttctgacatttctgacatttctgacatttctgacatttctgacatttctgacatttctgacatttctgacatcgtcaattcctttaacatttctgacatttctgacatttctgacatttctgacatttctgacatttccgactcggaccgatg

SEQ ID NO: 16094 - DNA, 203 bp, synthetic construct
  source 1..203: mol_type = other DNA
ggcgcgccagtcctttggccgtattctgacatcgtcaattcctttaacatttctgacatttctgacatttctgacatttctgacatttctgacatttctgacatttctgacatttctgacatttctgacatttctgacatttctgacatttctgacatttctgacatttctgacatttctgacatttccgactcggaccgatg

SEQ ID NO: 16095 - DNA, 203 bp, synthetic construct
  source 1..203: mol_type = other DNA
ggcgcgccagtccttggacggcagtctgacattactcccatttctgacattactcccatttctgacattactcccatttctgacattactcccatttctgacattactcccatttctgacattactcccatttctgacattactcccatttctgacattactcccatttctgacattactcccatttccgactcggaccgatg

SEQ ID NO: 16096 - DNA, 203 bp, synthetic construct
  source 1..203: mol_type = other DNA
ggcgcgccagtcctaggtacggcatctgacattactcccatttctgacatttctgacatttctgacatttctgacatttctgacatttctgacatttctgacatttctgacatttctgacatttctgacatttctgacatttctgacatttctgacatttctgacatttctgacatttcaccggccgtcgactcggaccgatg

SEQ ID NO: 16097 - DNA, 203 bp, synthetic construct
  source 1..203: mol_type = other DNA
ggcgcgccagtcctatgccgtcgttctgacattactcccatttctgacatttctgacatttctgacatttctgacatttctgacatttctgacatttctgacatttctgacatttctgacatttctgacatttctgacatttctgacatttctgacatttctgacatttctgacatttcccggcgggtcgactcggaccgatg

SEQ ID NO: 16098 - DNA, 203 bp, synthetic construct
  source 1..203: mol_type = other DNA
ggcgcgccagtcctgccgtacacttctgacatttcaccggccgttgacatttctgacatttctgacatttctgacatttctgacatttctgacatttctgacatttctgacatttctgacatttctgacatttctgacatttctgacatttctgacatttctgacatttctgacattttcttggcaaacgactcggaccgatg

SEQ ID NO: 16099 - DNA, 203 bp, synthetic construct
  source 1..203: mol_type = other DNA
ggcgcgccagtcctctacagccgttctgacatttcacggaatcgagaaatttctgacatttctgacatttctgacatttctgacatttctgacatttctgacatttctgacatttctgacatttctgacatttctgacatttctgacatttctgacatttctgacatttctgacatttctgtactccccgactcggaccgatg

SEQ ID NO: 16100 - DNA, 203 bp, synthetic construct
  source 1..203: mol_type = other DNA
ggcgcgccagtcctgccgtagatatctgacatttcacggaatcgagaaatttctgacatttctgacatttctgacatttctgacatttctgacatttctgacatttctgacatttctgacatttctgacatttctgacatttctgacatttctgacatttctgacatttctgaccacggaatcgagaacgactcggaccgatg

SEQ ID NO: 16101 - DNA, 203 bp, synthetic construct
  source 1..203: mol_type = other DNA
ggcgcgccagtcctaacggcacgatctgacatttcccggcgggttgacatttctgacatttctgacatttctgacatttctgacatttctgacatttctgacatttctgacatttctgacatttctgacatttctgacatttctgacatttctgacatttctgacatttctgacattttcttggcaaacgactcggaccgatg

SEQ ID NO: 16102 - DNA, 203 bp, synthetic construct
  source 1..203: mol_type = other DNA
ggcgcgccagtcctagagaacggctctgacatttctgacaccggccgtatttctgacatttctgacatttctgacatttctgacatttctgacatttctgacatttctgacatttctgacatttctgacatttctgacatttctgacatttctgacatttctgacatttctgacatttctgtactccccgactcggaccgatg

SEQ ID NO: 16103 - DNA, 203 bp, synthetic construct
  source 1..203: mol_type = other DNA
ggcgcgccagtccttagaaacggctctgacatttctgacatcacggaatcgagaaacatttctgacatttctgacatttctgacatttctgacatttctgacatttctgacatttctgacatttctgacatttctgacatttctgacatttctgacatttctgacatttctgacatttctgacatttccgactcggaccgatg

SEQ ID NO: 16104 - DNA, 203 bp, synthetic construct
  source 1..203: mol_type = other DNA
ggcgcgccagtcctagaggccgtgtctgacatttctgacatcacggaatcgagaaacatttctgacatttctgacatttctgacatttctgacatttctgacatttctgacatttctgacatttctgacatttctgacatttctgacatttctgacatttctgacatttctgacatttctgtactccccgactcggaccgatg

SEQ ID NO: 16105 - DNA, 203 bp, synthetic construct
  source 1..203: mol_type = other DNA
ggcgcgccagtcctgccgtgttgttctgacatttctgacatcgtcaattcctttaacatttctgacatttctgacatttctgacatttctgacatttctgacatttctgacatttctgacatttctgacatttctgacatttctgacatttctgacatttctgacatttctgacatttctgacatttccgactcggaccgatg

SEQ ID NO: 16106 - DNA, 203 bp, synthetic construct
  source 1..203: mol_type = other DNA
ggcgcgccagtcctggccgtgtcatctgacatttctgacatcgtcaattcctttaacatttctgacatttctgacatttctgacatttctgacatttctgacatttctgacatttctgacatttctgacatttctgacatttctgacatttctgacatttctgacatttctgacatttctgtactccccgactcggaccgatg

SEQ ID NO: 16107 - DNA, 203 bp, synthetic construct
  source 1..203: mol_type = other DNA
ggcgcgccagtcctagtgccgttttctgacatttctgacatcgtcaattcctttaacatttctgacatttctgacatttctgacatttctgacatttctgacatttctgacatttctgacatttctgacatttctgacatttctgacatttctgacatttctgacatttctgaccacggaatcgagaacgactcggaccgatg

SEQ ID NO: 16108 - DNA, 203 bp, synthetic construct
  source 1..203: mol_type = other DNA
ggcgcgccagtcctgtaacggcggtctgacatttctgacatcgtcaattcctttaacatttctgacatttctgacatttctgacatttctgacatttctgacatttctgacatttctgacatttctgacatttctgacatttctgacatttctgacatttctgacatttctgaccgtcaattcctttacgactcggaccgatg

SEQ ID NO: 16109 - DNA, 203 bp, synthetic construct
  source 1..203: mol_type = other DNA
ggcgcgccagtcctgattgccgtatctgacatttctgacattactcccatttctgacatttctgacatttctgacatttctgacatttctgacatttctgacatttctgacatttctgacatttctgacatttctgacatttctgacatttctgacatttctgacatttctgacatttctgacatttccgactcggaccgatg

SEQ ID NO: 16110 - DNA, 203 bp, synthetic construct
  source 1..203: mol_type = other DNA
ggcgcgccagtcctcaaggacggctctgacatttctgacattccggcgggttctgacatttctgacatttctgacatttctgacatttctgacatttctgacatttctgacatttctgacatttctgacatttctgacatttctgacatttctgacatttctgacatttctgacattttcttggcaaacgactcggaccgatg

SEQ ID NO: 16111 - DNA, 203 bp, synthetic construct
  source 1..203: mol_type = other DNA
ggcgcgccagtcctcgctgacggctctgacatttctgacatttcaccggccgttgacatttctgacatttctgacatttctgacatttctgacatttctgacatttctgacatttctgacatttctgacatttctgacatttctgacatttctgacatttctgacatttctgacatttcaccggccgtcgactcggaccgatg

SEQ ID NO: 16112 - DNA, 203 bp, synthetic construct
  source 1..203: mol_type = other DNA
ggcgcgccagtcctcttgccgtactctgacatttctgacatttccacggaatcgagaatttctgacatttctgacatttctgacatttctgacatttctgacatttctgacatttctgacatttctgacatttctgacatttctgacatttctgacatttctgacatttctgacattttcttggcaaacgactcggaccgatg

SEQ ID NO: 16113 - DNA, 203 bp, synthetic construct
  source 1..203: mol_type = other DNA
ggcgcgccagtcctctcacacggctctgacatttctgacatttcccggcgggttgacatttctgacatttctgacatttctgacatttctgacatttctgacatttctgacatttctgacatttctgacatttctgacatttctgacatttctgacatttctgacatttctgacatttcccggcgggtcgactcggaccgatg

SEQ ID NO: 16114 - DNA, 203 bp, synthetic construct
  source 1..203: mol_type = other DNA
ggcgcgccagtcctcaacggctgttctgacatttctgacatttccgtcaattcctttatttctgacatttctgacatttctgacatttctgacatttctgacatttctgacatttctgacatttctgacatttctgacatttctgacatttctgacatttctgacatttctgacattttcttggcaaacgactcggaccgatg

SEQ ID NO: 16115 - DNA, 203 bp, synthetic construct
  source 1..203: mol_type = other DNA
ggcgcgccagtccttcacggcaaatctgacatttctgacatttctcggaactacgacggtatctgatcgtcttcgaacctccgactttcgttcttgattaatgaaaacattcttggcaaatgctttcgctctggtccgtcttgcgccggtccaagaatttcacctctagcggcgcaatacgaattttccgactcggaccgatg

SEQ ID NO: 16116 - DNA, 203 bp, synthetic construct
  source 1..203: mol_type = other DNA
ggcgcgccagtccttgcacggcgttctgacatttctgacatttctgaaagtttcagctttgcaaccatactccccccggaacccaaagactttggtttcccggaagctgcccggcgggtcatgggaataacgccgccgcatcgccggtcggcatcgtttatggtcggaactacgacggtatacatttccgactcggaccgatg

SEQ ID NO: 16117 - DNA, 203 bp, synthetic construct
  source 1..203: mol_type = other DNA
ggcgcgccagtcctcctgaacggctctgacatttctgacatttctgacaaccggccgttttctgacatttctgacatttctgacatttctgacatttctgacatttctgacatttctgacatttctgacatttctgacatttctgacatttctgacatttctgacatttctgacattttcttggcaaacgactcggaccgatg

SEQ ID NO: 16118 - DNA, 203 bp, synthetic construct
  source 1..203: mol_type = other DNA
ggcgcgccagtcctctgtgccgtgtctgacatttctgacatttctgacaactacgacggtatctgatcgtcttcgaacctccgactttcgttcttgattaatgaaaacattcttggcaaatgctttcgctctggtccgtcttgcgccggtccaagaatttcacctctagcggcgcaatacgacatttccgactcggaccgatg

SEQ ID NO: 16119 - DNA, 203 bp, synthetic construct
  source 1..203: mol_type = other DNA
ggcgcgccagtcctcgtggccgtttctgacatttctgacatttctgacaagaggagcgagcgaccaaaggaaccataactgatttaatgagccattcgcagtttcactgtaccggccgtgcgtactcagacatgcatggcttaatctttgagacaagcatatgctactggcaggatcaatgacatttccgactcggaccgatg

SEQ ID NO: 16120 - DNA, 203 bp, synthetic construct
  source 1..203: mol_type = other DNA
ggcgcgccagtcctgccgtatgtttctgacatttctgacatttctgacaccggcgggttttctgacatttctgacatttctgacatttctgacatttctgacatttctgacatttctgacatttctgacatttctgacatttctgacatttctgacatttctgacatttctgacattttcttggcaaacgactcggaccgatg

SEQ ID NO: 16121 - DNA, 203 bp, synthetic construct
  source 1..203: mol_type = other DNA
ggcgcgccagtcctagacggcgtctctgacatttctgacatttctgacagtttcagctttgcaaccatactccccccggaacccaaagactttggtttcccggaagctgcccggcgggtcatgggaataacgccgccgcatcgccggtcggcatcgtttatggtcggaactacgacggttgacatttccgactcggaccgatg

SEQ ID NO: 16122 - DNA, 203 bp, synthetic construct
  source 1..203: mol_type = other DNA
ggcgcgccagtcctatacggctggtctgacatttctgacatttctgacataccggccgtttctgacataccggccgtttctgacataccggccgtttctgacataccggccgtttctgacataccggccgtttctgacatttctgacatttctgacatttctgacatttctgacataccggccgtttccgactcggaccgatg

SEQ ID NO: 16123 - DNA, 203 bp, synthetic construct
  source 1..203: mol_type = other DNA
ggcgcgccagtccttgccgtaggctctgacatttctgacatttctgacataccggccgtttctgacataccggccgtttctgacataccggccgtttctgacataccggccgtttctgacatttctgacatttctgacataccggccgtttctgacataccggccgtttctgacataccggccgtttccgactcggaccgatg

SEQ ID NO: 16124 - DNA, 203 bp, synthetic construct
  source 1..203: mol_type = other DNA
ggcgcgccagtccttacggctaaatctgacatttctgacatttctgacataccggccgtttctgacataccggccgtttctgacataccggccgtttctgacataccggccgtttctgacatttctgacatttctgacataccggccgtttctgacataccggccgtttctgacatttctgacatttccgactcggaccgatg

SEQ ID NO: 16125 - DNA, 203 bp, synthetic construct
  source 1..203: mol_type = other DNA
ggcgcgccagtccttaacggcccatctgacatttctgacatttctgacataccggccgtttctgacataccggccgtttctgacataccggccgtttctgacataccggccgtttctgacatttctgacatttctgacatttctgacatttctgacatttctgacatttctgacatttctgacatttccgactcggaccgatg

SEQ ID NO: 16126 - DNA, 203 bp, synthetic construct
  source 1..203: mol_type = other DNA
ggcgcgccagtcctgcttagccgttctgacatttctgacatttctgacataccggccgtttctgacataccggccgtttctgacataccggccgtttctgacatttctgacatttctgacataccggccgtttctgacataccggccgtttctgacataccggccgtttctgacataccggccgtttccgactcggaccgatg

SEQ ID NO: 16127 - DNA, 203 bp, synthetic construct
  source 1..203: mol_type = other DNA
ggcgcgccagtcctctacggcatttctgacatttctgacatttctgacataccggccgtttctgacataccggccgtttctgacataccggccgtttctgacatttctgacatttctgacataccggccgtttctgacataccggccgtttctgacataccggccgtttctgacatttctgacatttccgactcggaccgatg

SEQ ID NO: 16128 - DNA, 203 bp, synthetic construct
  source 1..203: mol_type = other DNA
ggcgcgccagtcctgccgtgaacctctgacatttctgacatttctgacataccggccgtttctgacataccggccgtttctgacataccggccgtttctgacatttctgacatttctgacataccggccgtttctgacatttctgacatttctgacataccggccgtttctgacataccggccgtttccgactcggaccgatg

SEQ ID NO: 16129 - DNA, 203 bp, synthetic construct
  source 1..203: mol_type = other DNA
ggcgcgccagtcctgcagacggcgtctgacatttctgacatttctgacataccggccgtttctgacataccggccgtttctgacataccggccgtttctgacatttctgacatttctgacataccggccgtttctgacatttctgacatttctgacatttctgacatttctgacatttctgacatttccgactcggaccgatg

SEQ ID NO: 16130 - DNA, 203 bp, synthetic construct
  source 1..203: mol_type = other DNA
ggcgcgccagtcctcgtgacggcgtctgacatttctgacatttctgacataccggccgtttctgacataccggccgtttctgacataccggccgtttctgacatttctgacatttctgacatttctgacatttctgacataccggccgtttctgacataccggccgtttctgacataccggccgtttccgactcggaccgatg

SEQ ID NO: 16131 - DNA, 203 bp, synthetic construct
  source 1..203: mol_type = other DNA
ggcgcgccagtcctatatgccgtttctgacatttctgacatttctgacataccggccgtttctgacataccggccgtttctgacataccggccgtttctgacatttctgacatttctgacatttctgacatttctgacataccggccgtttctgacatttctgacatttctgacataccggccgtttccgactcggaccgatg

SEQ ID NO: 16132 - DNA, 203 bp, synthetic construct
  source 1..203: mol_type = other DNA
ggcgcgccagtcctacggcacacctctgacatttctgacatttctgacataccggccgtttctgacataccggccgtttctgacataccggccgtttctgacatttctgacatttctgacatttctgacatttctgacataccggccgtttctgacatttctgacatttctgacatttctgacatttccgactcggaccgatg

SEQ ID NO: 16133 - DNA, 203 bp, synthetic construct
  source 1..203: mol_type = other DNA
ggcgcgccagtcctcccttgccgttctgacatttctgacatttctgacataccggccgtttctgacataccggccgtttctgacataccggccgtttctgacatttctgacatttctgacatttctgacatttctgacatttctgacatttctgacatttctgacatttctgacataccggccgtttccgactcggaccgatg

SEQ ID NO: 16134 - DNA, 203 bp, synthetic construct
  source 1..203: mol_type = other DNA
ggcgcgccagtcctcgccgtgctatctgacatttctgacatttctgacataccggccgtttctgacataccggccgtttctgacatttctgacatttctgacataccggccgtttctgacataccggccgtttctgacataccggccgtttctgacataccggccgtttctgacataccggccgtttccgactcggaccgatg

SEQ ID NO: 16135 - DNA, 203 bp, synthetic construct
  source 1..203: mol_type = other DNA
ggcgcgccagtcctcaggtgggtctctgacatttctgacatttctgacataccggccgtttctgacataccggccgtttctgacatttctgacatttctgacataccggccgtttctgacataccggccgtttctgacataccggccgtttctgacataccggccgtttctgacatttctgacatttccgactcggaccgatg

SEQ ID NO: 16136 - DNA, 203 bp, synthetic construct
  source 1..203: mol_type = other DNA
ggcgcgccagtcctatggtgggcctctgacatttctgacatttctgacataccggccgtttctgacataccggccgtttctgacatttctgacatttctgacataccggccgtttctgacataccggccgtttctgacataccggccgtttctgacatttctgacatttctgacatttctgacatttccgactcggaccgatg

SEQ ID NO: 16137 - DNA, 203 bp, synthetic construct
  source 1..203: mol_type = other DNA
ggcgcgccagtcctcttggtgggctctgacatttctgacatttctgacataccggccgtttctgacataccggccgtttctgacatttctgacatttctgacataccggccgtttctgacataccggccgtttctgacatttctgacatttctgacatttctgacatttctgacataccggccgtttccgactcggaccgatg

SEQ ID NO: 16138 - DNA, 203 bp, synthetic construct
  source 1..203: mol_type = other DNA
ggcgcgccagtcctgttagggccgtctgacatttctgacatttctgacataccggccgtttctgacataccggccgtttctgacatttctgacatttctgacataccggccgtttctgacatttctgacatttctgacatttctgacatttctgacatttctgacatttctgacataccggccgtttccgactcggaccgatg

SEQ ID NO: 16139 - DNA, 203 bp, synthetic construct
  source 1..203: mol_type = other DNA
ggcgcgccagtcctttgccctaagtctgacatttctgacatttctgacataccggccgtttctgacataccggccgtttctgacatttctgacatttctgacataccggccgtttctgacatttctgacatttctgacatttctgacatttctgacatttctgacatttctgacatttctgacatttccgactcggaccgatg

SEQ ID NO: 16140 - DNA, 203 bp, synthetic construct
  source 1..203: mol_type = other DNA
ggcgcgccagtcctgccctaatcatctgacatttctgacatttctgacataccggccgtttctgacataccggccgtttctgacatttctgacatttctgacatttctgacatttctgacataccggccgtttctgacataccggccgtttctgacataccggccgtttctgacatttctgacatttccgactcggaccgatg

SEQ ID NO: 16141 - DNA, 203 bp, synthetic construct
  source 1..203: mol_type = other DNA
ggcgcgccagtcctttgttagggctctgacatttctgacatttctgacataccggccgtttctgacataccggccgtttctgacatttctgacatttctgacatttctgacatttctgacataccggccgtttctgacataccggccgtttctgacatttctgacatttctgacatttctgacatttccgactcggaccgatg

SEQ ID NO: 16142 - DNA, 203 bp, synthetic construct
  source 1..203: mol_type = other DNA
ggcgcgccagtcctagtatcccggtctgacatttctgacatttctgacataccggccgtttctgacataccggccgtttctgacatttctgacatttctgacatttctgacatttctgacataccggccgtttctgacatttctgacatttctgacataccggccgtttctgacatttctgacatttccgactcggaccgatg

SEQ ID NO: 16143 - DNA, 203 bp, synthetic construct
  source 1..203: mol_type = other DNA
ggcgcgccagtcctctttgcccggtctgacatttctgacatttctgacataccggccgtttctgacataccggccgtttctgacatttctgacatttctgacatttctgacatttctgacataccggccgtttctgacatttctgacatttctgacatttctgacatttctgacataccggccgtttccgactcggaccgatg

SEQ ID NO: 16144 - DNA, 203 bp, synthetic construct
  source 1..203: mol_type = other DNA
ggcgcgccagtcctttgggcccggtctgacatttctgacatttctgacataccggccgtttctgacataccggccgtttctgacatttctgacatttctgacatttctgacatttctgacatttctgacatttctgacataccggccgtttctgacataccggccgtttctgacataccggccgtttccgactcggaccgatg

SEQ ID NO: 16145 - DNA, 203 bp, synthetic construct
  source 1..203: mol_type = other DNA
ggcgcgccagtcctaagcgcgctgtctgacatttctgacatttctgacataccggccgtttctgacataccggccgtttctgacatttctgacatttctgacatttctgacatttctgacatttctgacatttctgacatttctgacatttctgacataccggccgtttctgacatttctgacatttccgactcggaccgatg

SEQ ID NO: 16146 - DNA, 203 bp, synthetic construct
  source 1..203: mol_type = other DNA
ggcgcgccagtcctagaggcgcgctctgacatttctgacatttctgacataccggccgtttctgacataccggccgtttctgacatttctgacatttctgacatttctgacatttctgacatttctgacatttctgacatttctgacatttctgacatttctgacatttctgacataccggccgtttccgactcggaccgatg

SEQ ID NO: 16147 - DNA, 203 bp, synthetic construct
  source 1..203: mol_type = other DNA
ggcgcgccagtcctcaactgactctctgacatttctgacatttctgacataccggccgtttctgacataccggccgtttctgacatttctgacatttctgacatttctgacatttctgacatttctgacatttctgacatttctgacatttctgacatttctgacatttctgacatttctgacatttccgactcggaccgatg

SEQ ID NO: 16148 - DNA, 203 bp, synthetic construct
  source 1..203: mol_type = other DNA
ggcgcgccagtcctcatgagtcagtctgacatttctgacatttctgacataccggccgtttctgacatttctgacatttctgacataccggccgtttctgacataccggccgtttctgacataccggccgtttctgacataccggccgtttctgacataccggccgtttctgacataccggccgtttccgactcggaccgatg

SEQ ID NO: 16149 - DNA, 203 bp, synthetic construct
  source 1..203: mol_type = other DNA
ggcgcgccagtcctgagtcatggatctgacatttctgacatttctgacataccggccgtttctgacatttctgacatttctgacataccggccgtttctgacataccggccgtttctgacataccggccgtttctgacataccggccgtttctgacataccggccgtttctgacatttctgacatttccgactcggaccgatg

SEQ ID NO: 16150 - DNA, 203 bp, synthetic construct
  source 1..203: mol_type = other DNA
ggcgcgccagtcctatctgactcgtctgacatttctgacatttctgacataccggccgtttctgacatttctgacatttctgacataccggccgtttctgacataccggccgtttctgacataccggccgtttctgacataccggccgtttctgacatttctgacatttctgacataccggccgtttccgactcggaccgatg

SEQ ID NO: 16151 - DNA, 203 bp, synthetic construct
  source 1..203: mol_type = other DNA
ggcgcgccagtccttgactcaagatctgacatttctgacatttctgacataccggccgtttctgacatttctgacatttctgacataccggccgtttctgacataccggccgtttctgacataccggccgtttctgacatttctgacatttctgacataccggccgtttctgacataccggccgtttccgactcggaccgatg

SEQ ID NO: 16152 - DNA, 203 bp, synthetic construct
  source 1..203: mol_type = other DNA
ggcgcgccagtcctggagtcatattctgacatttctgacatttctgacataccggccgtttctgacatttctgacatttctgacataccggccgtttctgacataccggccgtttctgacataccggccgtttctgacatttctgacatttctgacatttctgacatttctgacataccggccgtttccgactcggaccgatg

SEQ ID NO: 16153 - DNA, 203 bp, synthetic construct
  source 1..203: mol_type = other DNA
ggcgcgccagtccttgactcactttctgacatttctgacatttctgacataccggccgtttctgacatttctgacatttctgacataccggccgtttctgacataccggccgtttctgacatttctgacatttctgacataccggccgtttctgacataccggccgtttctgacatttctgacatttccgactcggaccgatg

SEQ ID NO: 16154 - DNA, 203 bp, synthetic construct
  source 1..203: mol_type = other DNA
ggcgcgccagtcctgagtcagcactctgacatttctgacatttctgacataccggccgtttctgacatttctgacatttctgacataccggccgtttctgacataccggccgtttctgacatttctgacatttctgacataccggccgtttctgacatttctgacatttctgacataccggccgtttccgactcggaccgatg

SEQ ID NO: 16155 - DNA, 203 bp, synthetic construct
  source 1..203: mol_type = other DNA
ggcgcgccagtcctagagtcagtttctgacatttctgacatttctgacataccggccgtttctgacatttctgacatttctgacataccggccgtttctgacataccggccgtttctgacatttctgacatttctgacatttctgacatttctgacataccggccgtttctgacataccggccgtttccgactcggaccgatg

SEQ ID NO: 16156 - DNA, 203 bp, synthetic construct
  source 1..203: mol_type = other DNA
ggcgcgccagtccttgcgagtcagtctgacatttctgacatttctgacataccggccgtttctgacatttctgacatttctgacataccggccgtttctgacataccggccgtttctgacatttctgacatttctgacatttctgacatttctgacataccggccgtttctgacatttctgacatttccgactcggaccgatg

SEQ ID NO: 16157 - DNA, 203 bp, synthetic construct
  source 1..203: mol_type = other DNA
ggcgcgccagtcctcgagtcagcgtctgacatttctgacatttctgacataccggccgtttctgacatttctgacatttctgacataccggccgtttctgacataccggccgtttctgacatttctgacatttctgacatttctgacatttctgacatttctgacatttctgacatttctgacatttccgactcggaccgatg

SEQ ID NO: 16158 - DNA, 203 bp, synthetic construct
  source 1..203: mol_type = other DNA
ggcgcgccagtcctccgagtcatttctgacatttctgacatttctgacataccggccgtttctgacatttctgacatttctgacataccggccgtttctgacatttctgacatttctgacataccggccgtttctgacataccggccgtttctgacataccggccgtttctgacatttctgacatttccgactcggaccgatg

SEQ ID NO: 16159 - DNA, 203 bp, synthetic construct
  source 1..203: mol_type = other DNA
ggcgcgccagtcctgcgtcgaaggtctgacatttctgacatttctgacataccggccgtttctgacatttctgacatttctgacataccggccgtttctgacatttctgacatttctgacataccggccgtttctgacataccggccgtttctgacatttctgacatttctgacatttctgacatttccgactcggaccgatg

SEQ ID NO: 16160 - DNA, 203 bp, synthetic construct
  source 1..203: mol_type = other DNA
ggcgcgccagtcctagctcgaagttctgacatttctgacatttctgacataccggccgtttctgacatttctgacatttctgacataccggccgtttctgacatttctgacatttctgacataccggccgtttctgacatttctgacatttctgacataccggccgtttctgacataccggccgtttccgactcggaccgatg

SEQ ID NO: 16161 - DNA, 203 bp, synthetic construct
  source 1..203: mol_type = other DNA
ggcgcgccagtcctctcgaaggtttctgacatttctgacatttctgacataccggccgtttctgacatttctgacatttctgacataccggccgtttctgacatttctgacatttctgacataccggccgtttctgacatttctgacatttctgacatttctgacatttctgacataccggccgtttccgactcggaccgatg

SEQ ID NO: 16162 - DNA, 203 bp, synthetic construct
  source 1..203: mol_type = other DNA
ggcgcgccagtcctccagtcgaagtctgacatttctgacatttctgacataccggccgtttctgacatttctgacatttctgacataccggccgtttctgacatttctgacatttctgacataccggccgtttctgacatttctgacatttctgacatttctgacatttctgacatttctgacatttccgactcggaccgatg

SEQ ID NO: 16163 - DNA, 203 bp, synthetic construct
  source 1..203: mol_type = other DNA
ggcgcgccagtcctcaatcgaaagtctgacatttctgacatttctgacataccggccgtttctgacatttctgacatttctgacatttctgacatttctgacataccggccgtttctgacataccggccgtttctgacatttctgacatttctgacataccggccgtttctgacatttctgacatttccgactcggaccgatg

SEQ ID NO: 16164 - DNA, 203 bp, synthetic construct
  source 1..203: mol_type = other DNA
ggcgcgccagtcctgtcgaaaatctctgacatttctgacatttctgacataccggccgtttctgacatttctgacatttctgacatttctgacatttctgacataccggccgtttctgacataccggccgtttctgacatttctgacatttctgacatttctgacatttctgacataccggccgtttccgactcggaccgatg

SEQ ID NO: 16165 - DNA, 203 bp, synthetic construct
  source 1..203: mol_type = other DNA
ggcgcgccagtccttcgaaaagcgtctgacatttctgacatttctgacataccggccgtttctgacatttctgacatttctgacatttctgacatttctgacataccggccgtttctgacataccggccgtttctgacatttctgacatttctgacatttctgacatttctgacatttctgacatttccgactcggaccgatg

SEQ ID NO: 16166 - DNA, 203 bp, synthetic construct
  source 1..203: mol_type = other DNA
ggcgcgccagtccttatcgaaatgtctgacatttctgacatttctgacataccggccgtttctgacatttctgacatttctgacatttctgacatttctgacataccggccgtttctgacatttctgacatttctgacataccggccgtttctgacataccggccgtttctgacatttctgacatttccgactcggaccgatg

SEQ ID NO: 16167 - DNA, 203 bp, synthetic construct
  source 1..203: mol_type = other DNA
ggcgcgccagtcctaatttcgatctctgacatttctgacatttctgacataccggccgtttctgacatttctgacatttctgacatttctgacatttctgacataccggccgtttctgacatttctgacatttctgacatttctgacatttctgacataccggccgtttctgacatttctgacatttccgactcggaccgatg

SEQ ID NO: 16168 - DNA, 203 bp, synthetic construct
  source 1..203: mol_type = other DNA
ggcgcgccagtcctatttcgattttctgacatttctgacatttctgacataccggccgtttctgacatttctgacatttctgacatttctgacatttctgacataccggccgtttctgacatttctgacatttctgacatttctgacatttctgacatttctgacatttctgacatttctgacatttccgactcggaccgatg

SEQ ID NO: 16169 - DNA, 203 bp, synthetic construct
  source 1..203: mol_type = other DNA
ggcgcgccagtcctgtacattctgtctgacatttctgacatttctgacataccggccgtttctgacatttctgacatttctgacatttctgacatttctgacatttctgacatttctgacataccggccgtttctgacataccggccgtttctgacatttctgacatttctgacataccggccgtttccgactcggaccgatg

SEQ ID NO: 16170 - DNA, 203 bp, synthetic construct
  source 1..203: mol_type = other DNA
ggcgcgccagtcctgcgccgtcactctgacatttctgacatttctgacataccggccgtttctgacatttctgacatttctgacatttctgacatttctgacatttctgacatttctgacataccggccgtttctgacatttctgacatttctgacataccggccgtttctgacatttctgacatttccgactcggaccgatg

SEQ ID NO: 16171 - DNA, 203 bp, synthetic construct
  source 1..203: mol_type = other DNA
ggcgcgccagtcctcggcgctctgtctgacatttctgacatttctgacatcacggaatcgagaaacatcacggaatcgagaaacatcacggaatcgagaaacatcacggaatcgagaaacatcacggaatcgagaaacatcacggaatcgagaaacatttctgacatttctgacatttctgacatttccgactcggaccgatg

SEQ ID NO: 16172 - DNA, 203 bp, synthetic construct
  source 1..203: mol_type = other DNA
ggcgcgccagtcctcagtcgcgagtctgacatttctgacatttctgacatcacggaatcgagaaacatcacggaatcgagaaacatcacggaatcgagaaacatttctgacatttctgacatcacggaatcgagaaacatcacggaatcgagaaacatttctgacatttctgacatttctgacatttccgactcggaccgatg

SEQ ID NO: 16173 - DNA, 203 bp, synthetic construct
  source 1..203: mol_type = other DNA
ggcgcgccagtccttcgcgacggctctgacatttctgacatttctgacatcacggaatcgagaaacatcacggaatcgagaaacatttctgacatttctgacatcacggaatcgagaaacatttctgacatttctgacatcacggaatcgagaaacatcacggaatcgagaaacatttctgacatttccgactcggaccgatg

SEQ ID NO: 16174 - DNA, 203 bp, synthetic construct
  source 1..203: mol_type = other DNA
ggcgcgccagtccttcgtgtaatctctgacatttctgacatttctgacatcacggaatcgagaaacatcacggaatcgagaaacatttctgacatttctgacatttctgacatttctgacatttctgacatttctgacatcacggaatcgagaaacatttctgacatttctgacatttctgacatttccgactcggaccgatg

SEQ ID NO: 16175 - DNA, 203 bp, synthetic construct
  source 1..203: mol_type = other DNA
ggcgcgccagtccttatccgaccatctgacatttctgacatttctgacatcacggaatcgagaaacatcacggaatcgagaaacatttctgacatttctgacatttctgacatttctgacatttctgacatttctgacatttctgacatttctgacatttctgacatttctgacatttctgacatttccgactcggaccgatg

SEQ ID NO: 16176 - DNA, 203 bp, synthetic construct
  source 1..203: mol_type = other DNA
ggcgcgccagtcctcgcggatacttctgacatttctgacatttctgacatcacggaatcgagaaacatttctgacatttctgacatcacggaatcgagaaacatcacggaatcgagaaacatcacggaatcgagaaacatttctgacatttctgacatcacggaatcgagaaacatttctgacatttccgactcggaccgatg

SEQ ID NO: 16177 - DNA, 203 bp, synthetic construct
  source 1..203: mol_type = other DNA
ggcgcgccagtccttatcggatactctgacatttctgacatttctgacatcacggaatcgagaaacatttctgacatttctgacatcacggaatcgagaaacatcacggaatcgagaaacatttctgacatttctgacatcacggaatcgagaaacatttctgacatttctgacatttctgacatttccgactcggaccgatg

SEQ ID NO: 16178 - DNA, 203 bp, synthetic construct
  source 1..203: mol_type = other DNA
ggcgcgccagtcctatccgcaagctctgacatttctgacatttctgacatcacggaatcgagaaacatttctgacatttctgacatcacggaatcgagaaacatcacggaatcgagaaacatttctgacatttctgacatttctgacatttctgacatcacggaatcgagaaacatttctgacatttccgactcggaccgatg

SEQ ID NO: 16179 - DNA, 203 bp, synthetic construct
  source 1..203: mol_type = other DNA
ggcgcgccagtcctccggattgagtctgacatttctgacatttctgacatcacggaatcgagaaacatttctgacatttctgacatttctgacatttctgacatcacggaatcgagaaacatcacggaatcgagaaacatttctgacatttctgacatttctgacatttctgacatttctgacatttccgactcggaccgatg

SEQ ID NO: 16180 - DNA, 203 bp, synthetic construct
  source 1..203: mol_type = other DNA
ggcgcgccagtcctcggatctgtatctgacatttctgacatttctgacatcacggaatcgagaaacatttctgacatttctgacatttctgacatttctgacatcacggaatcgagaaacatttctgacatttctgacatttctgacatttctgacatcacggaatcgagaaacatttctgacatttccgactcggaccgatg

SEQ ID NO: 16181 - DNA, 203 bp, synthetic construct
  source 1..203: mol_type = other DNA
ggcgcgccagtcctaaatccgggatctgacatttctgacatttctgacatcacggaatcgagaaacatttctgacatttctgacatttctgacatttctgacatcacggaatcgagaaacatttctgacatttctgacatttctgacatttctgacatttctgacatttctgacatttctgacatttccgactcggaccgatg

SEQ ID NO: 16182 - DNA, 203 bp, synthetic construct
  source 1..203: mol_type = other DNA
ggcgcgccagtcctatccggtggatctgacatttctgacatttctgacatcacggaatcgagaaacatttctgacatttctgacatttctgacatttctgacatttctgacatttctgacatttctgacatttctgacatcacggaatcgagaaacatttctgacatttctgacatttctgacatttccgactcggaccgatg

SEQ ID NO: 16183 - DNA, 203 bp, synthetic construct
  source 1..203: mol_type = other DNA
ggcgcgccagtccttcaggcggattctgacatttctgacatttctgacatccggcgggtttctgacatccggcgggtttctgacatccggcgggtttctgacatccggcgggtttctgacatccggcgggtttctgacatccggcgggtttctgacatccggcgggtttctgacatccggcgggtttccgactcggaccgatg

SEQ ID NO: 16184 - DNA, 203 bp, synthetic construct
  source 1..203: mol_type = other DNA
ggcgcgccagtcctcaatccgtcgtctgacatttctgacatttctgacatccggcgggtttctgacatccggcgggtttctgacatccggcgggtttctgacatccggcgggtttctgacatccggcgggtttctgacatccggcgggtttctgacatccggcgggtttctgacatccggcgggtttccgactcggaccgatg

SEQ ID NO: 16185 - DNA, 203 bp, synthetic construct
  source 1..203: mol_type = other DNA
ggcgcgccagtccttatccgattgtctgacatttctgacatttctgacatccggcgggtttctgacatccggcgggtttctgacatccggcgggtttctgacatccggcgggtttctgacatccggcgggtttctgacatccggcgggtttctgacatccggcgggtttctgacatccggcgggtttccgactcggaccgatg

SEQ ID NO: 16186 - DNA, 203 bp, synthetic construct
  source 1..203: mol_type = other DNA
ggcgcgccagtcctatccgttgcctctgacatttctgacatttctgacatccggcgggtttctgacatccggcgggtttctgacatccggcgggtttctgacatccggcgggtttctgacatccggcgggtttctgacatccggcgggtttctgacatccggcgggtttctgacatttctgacatttccgactcggaccgatg

SEQ ID NO: 16187 - DNA, 203 bp, synthetic construct
  source 1..203: mol_type = other DNA
ggcgcgccagtcctacaaatccggtctgacatttctgacatttctgacatccggcgggtttctgacatccggcgggtttctgacatccggcgggtttctgacatccggcgggtttctgacatccggcgggtttctgacatccggcgggtttctgacatttctgacatttctgacatccggcgggtttccgactcggaccgatg

SEQ ID NO: 16188 - DNA, 203 bp, synthetic construct
  source 1..203: mol_type = other DNA
ggcgcgccagtcctgatccgtatttctgacatttctgacatttctgacatccggcgggtttctgacatccggcgggtttctgacatccggcgggtttctgacatccggcgggtttctgacatccggcgggtttctgacatccggcgggtttctgacatttctgacatttctgacatttctgacatttccgactcggaccgatg

SEQ ID NO: 16189 - DNA, 203 bp, synthetic construct
  source 1..203: mol_type = other DNA
ggcgcgccagtcctgccggatacatctgacatttctgacatttctgacatccggcgggtttctgacatccggcgggtttctgacatccggcgggtttctgacatccggcgggtttctgacatccggcgggtttctgacatttctgacatttctgacatccggcgggtttctgacatccggcgggtttccgactcggaccgatg

SEQ ID NO: 16190 - DNA, 203 bp, synthetic construct
  source 1..203: mol_type = other DNA
ggcgcgccagtcctaacggtctgttctgacatttctgacatttctgacatccggcgggtttctgacatccggcgggtttctgacatccggcgggtttctgacatccggcgggtttctgacatttctgacatttctgacatttctgacatttctgacatccggcgggtttctgacatttctgacatttccgactcggaccgatg

SEQ ID NO: 16191 - DNA, 203 bp, synthetic construct
  source 1..203: mol_type = other DNA
ggcgcgccagtcctagcttctggttctgacatttctgacatttctgacatccggcgggtttctgacatccggcgggtttctgacatccggcgggtttctgacatccggcgggtttctgacatttctgacatttctgacatttctgacatttctgacatttctgacatttctgacatccggcgggtttccgactcggaccgatg

SEQ ID NO: 16192 - DNA, 203 bp, synthetic construct
  source 1..203: mol_type = other DNA
ggcgcgccagtcctaggtcaagtttctgacatttctgacatttctgacatccggcgggtttctgacatccggcgggtttctgacatccggcgggtttctgacatttctgacatttctgacatccggcgggtttctgacatttctgacatttctgacatttctgacatttctgacatccggcgggtttccgactcggaccgatg

SEQ ID NO: 16193 - DNA, 203 bp, synthetic construct
  source 1..203: mol_type = other DNA
ggcgcgccagtccttgctcaggattctgacatttctgacatttctgacatccggcgggtttctgacatccggcgggtttctgacatccggcgggtttctgacatttctgacatttctgacatttctgacatttctgacatttctgacatttctgacatccggcgggtttctgacatttctgacatttccgactcggaccgatg

SEQ ID NO: 16194 - DNA, 203 bp, synthetic construct
  source 1..203: mol_type = other DNA
ggcgcgccagtccttgtctgcaaatctgacatttctgacatttctgacatccggcgggtttctgacatccggcgggtttctgacatccggcgggtttctgacatttctgacatttctgacatttctgacatttctgacatttctgacatttctgacatttctgacatttctgacatccggcgggtttccgactcggaccgatg

SEQ ID NO: 16195 - DNA, 203 bp, synthetic construct
  source 1..203: mol_type = other DNA
ggcgcgccagtccttaggtcaccatctgacatttctgacatttctgacatccggcgggtttctgacatccggcgggtttctgacatccggcgggtttctgacatttctgacatttctgacatttctgacatttctgacatttctgacatttctgacatttctgacatttctgacatttctgacatttccgactcggaccgatg

SEQ ID NO: 16196 - DNA, 203 bp, synthetic construct
  source 1..203: mol_type = other DNA
ggcgcgccagtccttgtaccgtcatctgacatttctgacatttctgacatccggcgggtttctgacatccggcgggtttctgacatttctgacatttctgacatccggcgggtttctgacatccggcgggtttctgacatccggcgggtttctgacatccggcgggtttctgacatccggcgggtttccgactcggaccgatg

SEQ ID NO: 16197 - DNA, 203 bp, synthetic construct
  source 1..203: mol_type = other DNA
ggcgcgccagtcctttgagcttgttctgacatttctgacatttctgacatccggcgggtttctgacatccggcgggtttctgacatttctgacatttctgacatccggcgggtttctgacatccggcgggtttctgacatccggcgggtttctgacatccggcgggtttctgacatttctgacatttccgactcggaccgatg

SEQ ID NO: 16198 - DNA, 203 bp, synthetic construct
  source 1..203: mol_type = other DNA
ggcgcgccagtcctaagagcttgatctgacatttctgacatttctgacatccggcgggtttctgacatccggcgggtttctgacatttctgacatttctgacatccggcgggtttctgacatccggcgggtttctgacatccggcgggtttctgacatttctgacatttctgacatccggcgggtttccgactcggaccgatg

SEQ ID NO: 16199 - DNA, 203 bp, synthetic construct
  source 1..203: mol_type = other DNA
ggcgcgccagtcctaagcctgagatctgacatttctgacatttctgacatccggcgggtttctgacatccggcgggtttctgacatttctgacatttctgacatccggcgggtttctgacatccggcgggtttctgacatccggcgggtttctgacatttctgacatttctgacatttctgacatttccgactcggaccgatg

SEQ ID NO: 16200 - DNA, 203 bp, synthetic construct
  source 1..203: mol_type = other DNA
ggcgcgccagtccttcaccgtctgtctgacatttctgacatttctgacatccggcgggtttctgacatccggcgggtttctgacatttctgacatttctgacatccggcgggtttctgacatccggcgggtttctgacatttctgacatttctgacatccggcgggtttctgacatttctgacatttccgactcggaccgatg

SEQ ID NO: 16201 - DNA, 203 bp, synthetic construct
  source 1..203: mol_type = other DNA
ggcgcgccagtcctatcagtctagtctgacatttctgacatttctgacatccggcgggtttctgacatccggcgggtttctgacatttctgacatttctgacatccggcgggtttctgacatccggcgggtttctgacatttctgacatttctgacatttctgacatttctgacatttctgacatttccgactcggaccgatg

SEQ ID NO: 16202 - DNA, 203 bp, synthetic construct
  source 1..203: mol_type = other DNA
ggcgcgccagtcctagctgacctgtctgacatttctgacatttctgacatccggcgggtttctgacatccggcgggtttctgacatttctgacatttctgacatccggcgggtttctgacatttctgacatttctgacatttctgacatttctgacatccggcgggtttctgacatccggcgggtttccgactcggaccgatg

SEQ ID NO: 16203 - DNA, 203 bp, synthetic construct
  source 1..203: mol_type = other DNA
ggcgcgccagtccttgacggtttgtctgacatttctgacatttctgacatccggcgggtttctgacatccggcgggtttctgacatttctgacatttctgacatccggcgggtttctgacatttctgacatttctgacatttctgacatttctgacatttctgacatttctgacatccggcgggtttccgactcggaccgatg

SEQ ID NO: 16204 - DNA, 203 bp, synthetic construct
  source 1..203: mol_type = other DNA
ggcgcgccagtcctacactagctgtctgacatttctgacatttctgacatccggcgggtttctgacatccggcgggtttctgacatttctgacatttctgacatttctgacatttctgacatccggcgggtttctgacatccggcgggtttctgacatccggcgggtttctgacatttctgacatttccgactcggaccgatg

SEQ ID NO: 16205 - DNA, 203 bp, synthetic construct
  source 1..203: mol_type = other DNA
ggcgcgccagtcctcttcgtctgatctgacatttctgacatttctgacatccggcgggtttctgacatccggcgggtttctgacatttctgacatttctgacatttctgacatttctgacatccggcgggtttctgacatttctgacatttctgacatccggcgggtttctgacatttctgacatttccgactcggaccgatg

SEQ ID NO: 16206 - DNA, 203 bp, synthetic construct
  source 1..203: mol_type = other DNA
ggcgcgccagtcctcataccgtcttctgacatttctgacatttctgacatccggcgggtttctgacatccggcgggtttctgacatttctgacatttctgacatttctgacatttctgacatccggcgggtttctgacatttctgacatttctgacatttctgacatttctgacatccggcgggtttccgactcggaccgatg

SEQ ID NO: 16207 - DNA, 203 bp, synthetic construct
  source 1..203: mol_type = other DNA
ggcgcgccagtcctcttgactggttctgacatttctgacatttctgacatccggcgggtttctgacatccggcgggtttctgacatttctgacatttctgacatttctgacatttctgacatttctgacatttctgacatccggcgggtttctgacatccggcgggtttctgacatttctgacatttccgactcggaccgatg

SEQ ID NO: 16208 - DNA, 203 bp, synthetic construct
  source 1..203: mol_type = other DNA
ggcgcgccagtcctcttcaagacttctgacatttctgacatttctgacatccggcgggtttctgacatccggcgggtttctgacatttctgacatttctgacatttctgacatttctgacatttctgacatttctgacatttctgacatttctgacatttctgacatttctgacatccggcgggtttccgactcggaccgatg

SEQ ID NO: 16209 - DNA, 203 bp, synthetic construct
  source 1..203: mol_type = other DNA
ggcgcgccagtccttattcaagcttctgacatttctgacatttctgacatccggcgggtttctgacatttctgacatttctgacatccggcgggtttctgacatccggcgggtttctgacatccggcgggtttctgacatttctgacatttctgacatccggcgggtttctgacatttctgacatttccgactcggaccgatg

SEQ ID NO: 16210 - DNA, 203 bp, synthetic construct
  source 1..203: mol_type = other DNA
ggcgcgccagtccttgagtttacatctgacatttctgacatttctgacatccggcgggtttctgacatttctgacatttctgacatccggcgggtttctgacatccggcgggtttctgacatccggcgggtttctgacatttctgacatttctgacatttctgacatttctgacatccggcgggtttccgactcggaccgatg

SEQ ID NO: 16211 - DNA, 203 bp, synthetic construct
  source 1..203: mol_type = other DNA
ggcgcgccagtcctagtgagaatatctgacatttctgacatttctgacatccggcgggtttctgacatttctgacatttctgacatccggcgggtttctgacatccggcgggtttctgacatttctgacatttctgacatccggcgggtttctgacatccggcgggtttctgacatccggcgggtttccgactcggaccgatg

SEQ ID NO: 16212 - DNA, 203 bp, synthetic construct
  source 1..203: mol_type = other DNA
ggcgcgccagtcctttgtagactatctgacatttctgacatttctgacatccggcgggtttctgacatttctgacatttctgacatccggcgggtttctgacatccggcgggtttctgacatttctgacatttctgacatccggcgggtttctgacatttctgacatttctgacatttctgacatttccgactcggaccgatg

SEQ ID NO: 16213 - DNA, 203 bp, synthetic construct
  source 1..203: mol_type = other DNA
ggcgcgccagtccttaaagaccattctgacatttctgacatttctgacatccggcgggtttctgacatttctgacatttctgacatccggcgggtttctgacatccggcgggtttctgacatttctgacatttctgacatttctgacatttctgacatccggcgggtttctgacatttctgacatttccgactcggaccgatg

SEQ ID NO: 16214 - DNA, 203 bp, synthetic construct
  source 1..203: mol_type = other DNA
ggcgcgccagtcctagcctaagattctgacatttctgacatttctgacatccggcgggtttctgacatttctgacatttctgacatccggcgggtttctgacatttctgacatttctgacatccggcgggtttctgacatccggcgggtttctgacatccggcgggtttctgacatccggcgggtttccgactcggaccgatg

SEQ ID NO: 16215 - DNA, 203 bp, synthetic construct
  source 1..203: mol_type = other DNA
ggcgcgccagtcctctactgtctgtctgacatttctgacatttctgacatccggcgggtttctgacatttctgacatttctgacatccggcgggtttctgacatttctgacatttctgacatccggcgggtttctgacatttctgacatttctgacatttctgacatttctgacatccggcgggtttccgactcggaccgatg

SEQ ID NO: 16216 - DNA, 203 bp, synthetic construct
  source 1..203: mol_type = other DNA
ggcgcgccagtcctctcacaagattctgacatttctgacatttctgacatccggcgggtttctgacatttctgacatttctgacatccggcgggtttctgacatttctgacatttctgacatccggcgggtttctgacatttctgacatttctgacatttctgacatttctgacatttctgacatttccgactcggaccgatg

SEQ ID NO: 16217 - DNA, 203 bp, synthetic construct
  source 1..203: mol_type = other DNA
ggcgcgccagtcctaattctctgatctgacatttctgacatttctgacatccggcgggtttctgacatttctgacatttctgacatccggcgggtttctgacatttctgacatttctgacatttctgacatttctgacatccggcgggtttctgacatccggcgggtttctgacatccggcgggtttccgactcggaccgatg

SEQ ID NO: 16218 - DNA, 203 bp, synthetic construct
  source 1..203: mol_type = other DNA
ggcgcgccagtcctacgactagtgtctgacatttctgacatttctgacatccggcgggtttctgacatttctgacatttctgacatccggcgggtttctgacatttctgacatttctgacatttctgacatttctgacatccggcgggtttctgacatttctgacatttctgacatttctgacatttccgactcggaccgatg

SEQ ID NO: 16219 - DNA, 203 bp, synthetic construct
  source 1..203: mol_type = other DNA
ggcgcgccagtcctacgacaaggttctgacatttctgacatttctgacatccggcgggtttctgacatttctgacatttctgacatccggcgggtttctgacatttctgacatttctgacatttctgacatttctgacatttctgacatttctgacatccggcgggtttctgacatccggcgggtttccgactcggaccgatg

SEQ ID NO: 16220 - DNA, 203 bp, synthetic construct
  source 1..203: mol_type = other DNA
ggcgcgccagtccttagccttcgttctgacatttctgacatttctgacatccggcgggtttctgacatttctgacatttctgacatccggcgggtttctgacatttctgacatttctgacatttctgacatttctgacatttctgacatttctgacatccggcgggtttctgacatttctgacatttccgactcggaccgatg

SEQ ID NO: 16221 - DNA, 203 bp, synthetic construct
  source 1..203: mol_type = other DNA
ggcgcgccagtccttgcactggtgtctgacatttctgacatttctgacatccggcgggtttctgacatttctgacatttctgacatttctgacatttctgacatccggcgggtttctgacatccggcgggtttctgacatccggcgggtttctgacatccggcgggtttctgacatccggcgggtttccgactcggaccgatg

SEQ ID NO: 16222 - DNA, 203 bp, synthetic construct
  source 1..203: mol_type = other DNA
ggcgcgccagtcctcttcttgcgatctgacatttctgacatttctgacatccggcgggtttctgacatttctgacatttctgacatttctgacatttctgacatccggcgggtttctgacatccggcgggtttctgacatttctgacatttctgacatttctgacatttctgacatccggcgggtttccgactcggaccgatg

SEQ ID NO: 16223 - DNA, 203 bp, synthetic construct
  source 1..203: mol_type = other DNA
ggcgcgccagtcctcacaacttgatctgacatttctgacatttctgacatccggcgggtttctgacatttctgacatttctgacatttctgacatttctgacatccggcgggtttctgacatttctgacatttctgacatccggcgggtttctgacatccggcgggtttctgacatccggcgggtttccgactcggaccgatg

SEQ ID NO: 16224 - DNA, 203 bp, synthetic construct
  source 1..203: mol_type = other DNA
ggcgcgccagtcctttacaaggattctgacatttctgacatttctgacatccggcgggtttctgacatttctgacatttctgacatttctgacatttctgacatccggcgggtttctgacatttctgacatttctgacatccggcgggtttctgacatttctgacatttctgacatccggcgggtttccgactcggaccgatg

SEQ ID NO: 16225 - DNA, 203 bp, synthetic construct
  source 1..203: mol_type = other DNA
ggcgcgccagtccttagtttgcaatctgacatttctgacatttctgacatccggcgggtttctgacatttctgacatttctgacatttctgacatttctgacatccggcgggtttctgacatttctgacatttctgacatccggcgggtttctgacatttctgacatttctgacatttctgacatttccgactcggaccgatg

SEQ ID NO: 16226 - DNA, 203 bp, synthetic construct
  source 1..203: mol_type = other DNA
ggcgcgccagtccttcaagtgtagtctgacatttctgacatttctgacatccggcgggtttctgacatttctgacatttctgacatttctgacatttctgacatccggcgggtttctgacatttctgacatttctgacatttctgacatttctgacatccggcgggtttctgacatttctgacatttccgactcggaccgatg

SEQ ID NO: 16227 - DNA, 203 bp, synthetic construct
  source 1..203: mol_type = other DNA
ggcgcgccagtcctagaatcagagtctgacatttctgacatttctgacatccggcgggtttctgacatttctgacatttctgacatttctgacatttctgacatccggcgggtttctgacatttctgacatttctgacatttctgacatttctgacatttctgacatttctgacatttctgacatttccgactcggaccgatg

SEQ ID NO: 16228 - DNA, 203 bp, synthetic construct
  source 1..203: mol_type = other DNA
ggcgcgccagtcctcacttgcacttctgacatttctgacatttctgacatccggcgggtttctgacatttctgacatttctgacatttctgacatttctgacatttctgacatttctgacatccggcgggtttctgacatccggcgggtttctgacatccggcgggtttctgacatccggcgggtttccgactcggaccgatg

SEQ ID NO: 16229 - DNA, 203 bp, synthetic construct
  source 1..203: mol_type = other DNA
ggcgcgccagtccttcagtcgtcatctgacatttctgacatttctgacatccggcgggtttctgacatttctgacatttctgacatttctgacatttctgacatttctgacatttctgacatccggcgggtttctgacatttctgacatttctgacatttctgacatttctgacatccggcgggtttccgactcggaccgatg

SEQ ID NO: 16230 - DNA, 203 bp, synthetic construct
  source 1..203: mol_type = other DNA
ggcgcgccagtcctaacgaaagagtctgacatttctgacatttctgacatccggcgggtttctgacatttctgacatttctgacatttctgacatttctgacatttctgacatttctgacatttctgacatttctgacatccggcgggtttctgacatttctgacatttctgacatccggcgggtttccgactcggaccgatg

SEQ ID NO: 16231 - DNA, 203 bp, synthetic construct
  source 1..203: mol_type = other DNA
ggcgcgccagtcctaacagacagttctgacatttctgacatttctgacatccggcgggtttctgacatttctgacatttctgacatttctgacatttctgacatttctgacatttctgacatttctgacatttctgacatttctgacatttctgacatccggcgggtttctgacatccggcgggtttccgactcggaccgatg

SEQ ID NO: 16232 - DNA, 203 bp, synthetic construct
  source 1..203: mol_type = other DNA
ggcgcgccagtcctaatcttgcaatctgacatttctgacatttctgacatccggcgggtttctgacatttctgacatttctgacatttctgacatttctgacatttctgacatttctgacatttctgacatttctgacatttctgacatttctgacatccggcgggtttctgacatttctgacatttccgactcggaccgatg

SEQ ID NO: 16233 - DNA, 203 bp, synthetic construct
  source 1..203: mol_type = other DNA
ggcgcgccagtccttgtaaaccgttctgacatttctgacatttctgacatccggcgggtttctgacatttctgacatttctgacatttctgacatttctgacatttctgacatttctgacatttctgacatttctgacatttctgacatttctgacatttctgacatttctgacatttctgacatttccgactcggaccgatg

SEQ ID NO: 16234 - DNA, 203 bp, synthetic construct
  source 1..203: mol_type = other DNA
ggcgcgccagtcctaactgatccttctgacatttctgacatttctgacatcgtcaattcctttaacatcgtcaattcctttaacatcgtcaattcctttaacatcgtcaattcctttaacatcgtcaattcctttaacatcgtcaattcctttaacatcgtcaattcctttaacatttctgacatttccgactcggaccgatg

SEQ ID NO: 16235 - DNA, 203 bp, synthetic construct
  source 1..203: mol_type = other DNA
ggcgcgccagtccttgatcagttttctgacatttctgacatttctgacatcgtcaattcctttaacatcgtcaattcctttaacatcgtcaattcctttaacatcgtcaattcctttaacatcgtcaattcctttaacatcgtcaattcctttaacatttctgacatttctgacatttctgacatttccgactcggaccgatg

SEQ ID NO: 16236 - DNA, 203 bp, synthetic construct
  source 1..203: mol_type = other DNA
ggcgcgccagtcctttctggtacatctgacatttctgacatttctgacatcgtcaattcctttaacatcgtcaattcctttaacatcgtcaattcctttaacatcgtcaattcctttaacatcgtcaattcctttaacatttctgacatttctgacatcgtcaattcctttaacatttctgacatttccgactcggaccgatg

SEQ ID NO: 16237 - DNA, 203 bp, synthetic construct
  source 1..203: mol_type = other DNA
ggcgcgccagtcctcttagctctatctgacatttctgacatttctgacatcgtcaattcctttaacatcgtcaattcctttaacatcgtcaattcctttaacatcgtcaattcctttaacatttctgacatttctgacatcgtcaattcctttaacatcgtcaattcctttaacatttctgacatttccgactcggaccgatg

SEQ ID NO: 16238 - DNA, 203 bp, synthetic construct
  source 1..203: mol_type = other DNA
ggcgcgccagtcctctaagattcttctgacatttctgacatttctgacatcgtcaattcctttaacatcgtcaattcctttaacatcgtcaattcctttaacatcgtcaattcctttaacatttctgacatttctgacatttctgacatttctgacatttctgacatttctgacatttctgacatttccgactcggaccgatg

SEQ ID NO: 16239 - DNA, 203 bp, synthetic construct
  source 1..203: mol_type = other DNA
ggcgcgccagtcctttaacagctttctgacatttctgacatttctgacatcgtcaattcctttaacatcgtcaattcctttaacatcgtcaattcctttaacatttctgacatttctgacatcgtcaattcctttaacatcgtcaattcctttaacatcgtcaattcctttaacatttctgacatttccgactcggaccgatg

SEQ ID NO: 16240 - DNA, 203 bp, synthetic construct
  source 1..203: mol_type = other DNA
ggcgcgccagtcctatggtagccatctgacatttctgacatttctgacatcgtcaattcctttaacatcgtcaattcctttaacatcgtcaattcctttaacatttctgacatttctgacatcgtcaattcctttaacatcgtcaattcctttaacatttctgacatttctgacatttctgacatttccgactcggaccgatg

SEQ ID NO: 16241 - DNA, 203 bp, synthetic construct
  source 1..203: mol_type = other DNA
ggcgcgccagtcctaccaaccttttctgacatttctgacatttctgacatcgtcaattcctttaacatcgtcaattcctttaacatcgtcaattcctttaacatttctgacatttctgacatcgtcaattcctttaacatttctgacatttctgacatcgtcaattcctttaacatttctgacatttccgactcggaccgatg

SEQ ID NO: 16242 - DNA, 203 bp, synthetic construct
  source 1..203: mol_type = other DNA
ggcgcgccagtcctatggttaagatctgacatttctgacatttctgacatcgtcaattcctttaacatcgtcaattcctttaacatcgtcaattcctttaacatttctgacatttctgacatttctgacatttctgacatcgtcaattcctttaacatcgtcaattcctttaacatttctgacatttccgactcggaccgatg

SEQ ID NO: 16243 - DNA, 203 bp, synthetic construct
  source 1..203: mol_type = other DNA
ggcgcgccagtccttgcttgactatctgacatttctgacatttctgacatcgtcaattcctttaacatcgtcaattcctttaacatcgtcaattcctttaacatttctgacatttctgacatttctgacatttctgacatttctgacatttctgacatttctgacatttctgacatttctgacatttccgactcggaccgatg

SEQ ID NO: 16244 - DNA, 203 bp, synthetic construct
  source 1..203: mol_type = other DNA
ggcgcgccagtccttgctcagatatctgacatttctgacatttctgacatcgtcaattcctttaacatcgtcaattcctttaacatttctgacatttctgacatcgtcaattcctttaacatcgtcaattcctttaacatcgtcaattcctttaacatcgtcaattcctttaacatttctgacatttccgactcggaccgatg

SEQ ID NO: 16245 - DNA, 203 bp, synthetic construct
  source 1..203: mol_type = other DNA
ggcgcgccagtcctaaagaggttatctgacatttctgacatttctgacatcgtcaattcctttaacatcgtcaattcctttaacatttctgacatttctgacatcgtcaattcctttaacatcgtcaattcctttaacatttctgacatttctgacatttctgacatttctgacatttctgacatttccgactcggaccgatg

SEQ ID NO: 16246 - DNA, 203 bp, synthetic construct
  source 1..203: mol_type = other DNA
ggcgcgccagtccttagtcagacttctgacatttctgacatttctgacatcgtcaattcctttaacatcgtcaattcctttaacatttctgacatttctgacatcgtcaattcctttaacatttctgacatttctgacatcgtcaattcctttaacatcgtcaattcctttaacatttctgacatttccgactcggaccgatg

SEQ ID NO: 16247 - DNA, 203 bp, synthetic construct
  source 1..203: mol_type = other DNA
ggcgcgccagtcctagtgacctcttctgacatttctgacatttctgacatcgtcaattcctttaacatcgtcaattcctttaacatttctgacatttctgacatcgtcaattcctttaacatttctgacatttctgacatttctgacatttctgacatcgtcaattcctttaacatttctgacatttccgactcggaccgatg

SEQ ID NO: 16248 - DNA, 203 bp, synthetic construct
  source 1..203: mol_type = other DNA
ggcgcgccagtccttgcttaagcatctgacatttctgacatttctgacatcgtcaattcctttaacatcgtcaattcctttaacatttctgacatttctgacatttctgacatttctgacatcgtcaattcctttaacatcgtcaattcctttaacatcgtcaattcctttaacatttctgacatttccgactcggaccgatg

SEQ ID NO: 16249 - DNA, 203 bp, synthetic construct
  source 1..203: mol_type = other DNA
ggcgcgccagtccttgagaggtcatctgacatttctgacatttctgacatcgtcaattcctttaacatcgtcaattcctttaacatttctgacatttctgacatttctgacatttctgacatcgtcaattcctttaacatcgtcaattcctttaacatttctgacatttctgacatttctgacatttccgactcggaccgatg

SEQ ID NO: 16250 - DNA, 203 bp, synthetic construct
  source 1..203: mol_type = other DNA
ggcgcgccagtcctaaccttcttgtctgacatttctgacatttctgacatcgtcaattcctttaacatcgtcaattcctttaacatttctgacatttctgacatttctgacatttctgacatcgtcaattcctttaacatttctgacatttctgacatcgtcaattcctttaacatttctgacatttccgactcggaccgatg

SEQ ID NO: 16251 - DNA, 203 bp, synthetic construct
  source 1..203: mol_type = other DNA
ggcgcgccagtccttacagagtagtctgacatttctgacatttctgacatcgtcaattcctttaacatcgtcaattcctttaacatttctgacatttctgacatttctgacatttctgacatttctgacatttctgacatcgtcaattcctttaacatcgtcaattcctttaacatttctgacatttccgactcggaccgatg

SEQ ID NO: 16252 - DNA, 203 bp, synthetic construct
  source 1..203: mol_type = other DNA
ggcgcgccagtcctaaggtgagtgtctgacatttctgacatttctgacatcgtcaattcctttaacatcgtcaattcctttaacatttctgacatttctgacatttctgacatttctgacatttctgacatttctgacatttctgacatttctgacatcgtcaattcctttaacatttctgacatttccgactcggaccgatg

SEQ ID NO: 16253 - DNA, 203 bp, synthetic construct
  source 1..203: mol_type = other DNA
ggcgcgccagtcctatcttagctttctgacatttctgacatttctgacatcgtcaattcctttaacatttctgacatttctgacatcgtcaattcctttaacatcgtcaattcctttaacatcgtcaattcctttaacatttctgacatttctgacatcgtcaattcctttaacatttctgacatttccgactcggaccgatg

SEQ ID NO: 16254 - DNA, 203 bp, synthetic construct
  source 1..203: mol_type = other DNA
ggcgcgccagtcctcactagcttatctgacatttctgacatttctgacatcgtcaattcctttaacatttctgacatttctgacatcgtcaattcctttaacatcgtcaattcctttaacatttctgacatttctgacatcgtcaattcctttaacatcgtcaattcctttaacatttctgacatttccgactcggaccgatg

SEQ ID NO: 16255 - DNA, 203 bp, synthetic construct
  source 1..203: mol_type = other DNA
ggcgcgccagtccttagcttgctgtctgacatttctgacatttctgacatcgtcaattcctttaacatttctgacatttctgacatcgtcaattcctttaacatcgtcaattcctttaacatttctgacatttctgacatcgtcaattcctttaacatttctgacatttctgacatttctgacatttccgactcggaccgatg

SEQ ID NO: 16256 - DNA, 203 bp, synthetic construct
  source 1..203: mol_type = other DNA
ggcgcgccagtcctcaggactcgttctgacatttctgacatttctgacatcgtcaattcctttaacatttctgacatttctgacatcgtcaattcctttaacatttctgacatttctgacatcgtcaattcctttaacatcgtcaattcctttaacatcgtcaattcctttaacatttctgacatttccgactcggaccgatg

SEQ ID NO: 16257 - DNA, 203 bp, synthetic construct
  source 1..203: mol_type = other DNA
ggcgcgccagtccttgcagtagcttctgacatttctgacatttctgacatcgtcaattcctttaacatttctgacatttctgacatcgtcaattcctttaacatttctgacatttctgacatcgtcaattcctttaacatttctgacatttctgacatcgtcaattcctttaacatttctgacatttccgactcggaccgatg

SEQ ID NO: 16258 - DNA, 203 bp, synthetic construct
  source 1..203: mol_type = other DNA
ggcgcgccagtcctagactgtgcttctgacatttctgacatttctgacatcgtcaattcctttaacatttctgacatttctgacatcgtcaattcctttaacatttctgacatttctgacatcgtcaattcctttaacatttctgacatttctgacatttctgacatttctgacatttctgacatttccgactcggaccgatg

SEQ ID NO: 16259 - DNA, 203 bp, synthetic construct
  source 1..203: mol_type = other DNA
ggcgcgccagtcctaaaactctcatctgacatttctgacatttctgacatcgtcaattcctttaacatttctgacatttctgacatcgtcaattcctttaacatttctgacatttctgacatttctgacatttctgacatcgtcaattcctttaacatttctgacatttctgacatttctgacatttccgactcggaccgatg

SEQ ID NO: 16260 - DNA, 203 bp, synthetic construct
  source 1..203: mol_type = other DNA
ggcgcgccagtcctaagtaggacttctgacatttctgacatttctgacatcgtcaattcctttaacatttctgacatttctgacatcgtcaattcctttaacatttctgacatttctgacatttctgacatttctgacatttctgacatttctgacatcgtcaattcctttaacatttctgacatttccgactcggaccgatg

SEQ ID NO: 16261 - DNA, 203 bp, synthetic construct
  source 1..203: mol_type = other DNA
ggcgcgccagtcctatgaggactgtctgacatttctgacatttctgacatcgtcaattcctttaacatttctgacatttctgacatttctgacatttctgacatcgtcaattcctttaacatttctgacatttctgacatcgtcaattcctttaacatttctgacatttctgacatttctgacatttccgactcggaccgatg

SEQ ID NO: 16262 - DNA, 203 bp, synthetic construct
  source 1..203: mol_type = other DNA
ggcgcgccagtcctcaacactctgtctgacatttctgacatttctgacatcgtcaattcctttaacatttctgacatttctgacatttctgacatttctgacatcgtcaattcctttaacatttctgacatttctgacatttctgacatttctgacatcgtcaattcctttaacatttctgacatttccgactcggaccgatg

SEQ ID NO: 16263 - DNA, 203 bp, synthetic construct
  source 1..203: mol_type = other DNA
ggcgcgccagtccttaactggacttctgacatttctgacatttctgacatcgtcaattcctttaacatttctgacatttctgacatttctgacatttctgacatcgtcaattcctttaacatttctgacatttctgacatttctgacatttctgacatttctgacatttctgacatttctgacatttccgactcggaccgatg

SEQ ID NO: 16264 - DNA, 203 bp, synthetic construct
  source 1..203: mol_type = other DNA
ggcgcgccagtcctagcagtccattctgacatttctgacatttctgacatcgtcaattcctttaacatttctgacatttctgacatttctgacatttctgacatttctgacatttctgacatttctgacatttctgacatcgtcaattcctttaacatcgtcaattcctttaacatttctgacatttccgactcggaccgatg

SEQ ID NO: 16265 - DNA, 203 bp, synthetic construct
  source 1..203: mol_type = other DNA
ggcgcgccagtcctacatactgtgtctgacatttctgacatttctgacatgcaggctccactcctggtggtgcccttccgtcaattcctttaagtttcagctttgcaaccatactccccccggaacccaaagactttggtttcccggaagctgcccggcgggtcatgggaataacgccctgacatttccgactcggaccgatg

SEQ ID NO: 16266 - DNA, 203 bp, synthetic construct
  source 1..203: mol_type = other DNA
ggcgcgccagtcctacatgatcattctgacatttctgacatttctgacattaccggccgttctgacatttctgacatttctgacatttctgacatttctgacatttctgacatttctgacatttctgacatttctgacatttctgacatttctgacatttctgacatttctgacatttcaccggccgtcgactcggaccgatg

SEQ ID NO: 16267 - DNA, 203 bp, synthetic construct
  source 1..203: mol_type = other DNA
ggcgcgccagtcctaaagctaaagtctgacatttctgacatttctgacattaccggccgttctgacatttctgacatttctgacatttctgacatttctgacatttctgacatttctgacatttctgacatttctgacatttctgacatttctgacatttctgacatttctgacatttcccggcgggtcgactcggaccgatg

SEQ ID NO: 16268 - DNA, 203 bp, synthetic construct
  source 1..203: mol_type = other DNA
ggcgcgccagtcctaccagaactttctgacatttctgacatttctgacattactcccatttctgacattactcccatttctgacattactcccatttctgacattactcccatttctgacattactcccatttctgacattactcccatttctgacattactcccatttctgacattactcccatttccgactcggaccgatg

SEQ ID NO: 16269 - DNA, 203 bp, synthetic construct
  source 1..203: mol_type = other DNA
ggcgcgccagtccttaaggttgattctgacatttctgacatttctgacattactcccatttctgacattactcccatttctgacattactcccatttctgacattactcccatttctgacattactcccatttctgacattactcccatttctgacatttctgacatttctgacatttctgacatttccgactcggaccgatg

SEQ ID NO: 16270 - DNA, 203 bp, synthetic construct
  source 1..203: mol_type = other DNA
ggcgcgccagtccttatgctcatatctgacatttctgacatttctgacattactcccatttctgacattactcccatttctgacattactcccatttctgacattactcccatttctgacattactcccatttctgacatttctgacatttctgacattactcccatttctgacatttctgacatttccgactcggaccgatg

SEQ ID NO: 16271 - DNA, 203 bp, synthetic construct
  source 1..203: mol_type = other DNA
ggcgcgccagtccttatgagcaaatctgacatttctgacatttctgacattactcccatttctgacattactcccatttctgacattactcccatttctgacattactcccatttctgacattactcccatttctgacatttctgacatttctgacatttctgacatttctgacattactcccatttccgactcggaccgatg

SEQ ID NO: 16272 - DNA, 203 bp, synthetic construct
  source 1..203: mol_type = other DNA
ggcgcgccagtcctttaagtgccatctgacatttctgacatttctgacattactcccatttctgacattactcccatttctgacattactcccatttctgacattactcccatttctgacatttctgacatttctgacattactcccatttctgacattactcccatttctgacattactcccatttccgactcggaccgatg

SEQ ID NO: 16273 - DNA, 203 bp, synthetic construct
  source 1..203: mol_type = other DNA
ggcgcgccagtcctatacagtttatctgacatttctgacatttctgacattactcccatttctgacattactcccatttctgacattactcccatttctgacattactcccatttctgacatttctgacatttctgacattactcccatttctgacattactcccatttctgacatttctgacatttccgactcggaccgatg

SEQ ID NO: 16274 - DNA, 203 bp, synthetic construct
  source 1..203: mol_type = other DNA
ggcgcgccagtcctttaaagtgtatctgacatttctgacatttctgacattactcccatttctgacattactcccatttctgacattactcccatttctgacattactcccatttctgacatttctgacatttctgacattactcccatttctgacatttctgacatttctgacattactcccatttccgactcggaccgatg

SEQ ID NO: 16275 - DNA, 203 bp, synthetic construct
  source 1..203: mol_type = other DNA
ggcgcgccagtccttatgaatctatctgacatttctgacatttctgacattactcccatttctgacattactcccatttctgacattactcccatttctgacattactcccatttctgacatttctgacatttctgacattactcccatttctgacatttctgacatttctgacatttctgacatttccgactcggaccgatg

SEQ ID NO: 16276 - DNA, 203 bp, synthetic construct
  source 1..203: mol_type = other DNA
ggcgcgccagtcctcctttcgtcttctgacatttctgacatttctgacattactcccatttctgacattactcccatttctgacattactcccatttctgacatttctgacatttctgacattactcccatttctgacattactcccatttctgacatttctgacatttctgacattactcccatttccgactcggaccgatg

SEQ ID NO: 16277 - DNA, 203 bp, synthetic construct
  source 1..203: mol_type = other DNA
ggcgcgccagtcctccttgagaaatctgacatttctgacatttctgacattactcccatttctgacattactcccatttctgacattactcccatttctgacatttctgacatttctgacattactcccatttctgacattactcccatttctgacatttctgacatttctgacatttctgacatttccgactcggaccgatg

SEQ ID NO: 16278 - DNA, 203 bp, synthetic construct
  source 1..203: mol_type = other DNA
ggcgcgccagtcctagcaagtaggtctgacatttctgacatttctgacattactcccatttctgacattactcccatttctgacattactcccatttctgacatttctgacatttctgacattactcccatttctgacatttctgacatttctgacattactcccatttctgacattactcccatttccgactcggaccgatg

SEQ ID NO: 16279 - DNA, 203 bp, synthetic construct
  source 1..203: mol_type = other DNA
ggcgcgccagtcctaacgacaaggtctgacatttctgacatttctgacattactcccatttctgacattactcccatttctgacattactcccatttctgacatttctgacatttctgacattactcccatttctgacatttctgacatttctgacattactcccatttctgacatttctgacatttccgactcggaccgatg

SEQ ID NO: 16280 - DNA, 203 bp, synthetic construct
  source 1..203: mol_type = other DNA
ggcgcgccagtcctacctactaggtctgacatttctgacatttctgacattactcccatttctgacattactcccatttctgacattactcccatttctgacatttctgacatttctgacattactcccatttctgacatttctgacatttctgacatttctgacatttctgacatttctgacatttccgactcggaccgatg

SEQ ID NO: 16281 - DNA, 203 bp, synthetic construct
  source 1..203: mol_type = other DNA
ggcgcgccagtccttaaggttaggtctgacatttctgacatttctgacattactcccatttctgacattactcccatttctgacattactcccatttctgacatttctgacatttctgacatttctgacatttctgacattactcccatttctgacattactcccatttctgacatttctgacatttccgactcggaccgatg

SEQ ID NO: 16282 - DNA, 203 bp, synthetic construct
  source 1..203: mol_type = other DNA
ggcgcgccagtcctacactctgaatctgacatttctgacatttctgacattactcccatttctgacattactcccatttctgacattactcccatttctgacatttctgacatttctgacatttctgacatttctgacatttctgacatttctgacattactcccatttctgacattactcccatttccgactcggaccgatg

SEQ ID NO: 16283 - DNA, 203 bp, synthetic construct
  source 1..203: mol_type = other DNA
ggcgcgccagtccttccagtgcattctgacatttctgacatttctgacattactcccatttctgacattactcccatttctgacattactcccatttctgacatttctgacatttctgacatttctgacatttctgacatttctgacatttctgacatttctgacatttctgacatttctgacatttccgactcggaccgatg

SEQ ID NO: 16284 - DNA, 203 bp, synthetic construct
  source 1..203: mol_type = other DNA
ggcgcgccagtcctacctcaagtgtctgacatttctgacatttctgacattactcccatttctgacattactcccatttctgacatttctgacatttctgacattactcccatttctgacattactcccatttctgacattactcccatttctgacattactcccatttctgacattactcccatttccgactcggaccgatg

SEQ ID NO: 16285 - DNA, 203 bp, synthetic construct
  source 1..203: mol_type = other DNA
ggcgcgccagtcctaaggtcctgttctgacatttctgacatttctgacattactcccatttctgacattactcccatttctgacatttctgacatttctgacattactcccatttctgacattactcccatttctgacattactcccatttctgacattactcccatttctgacatttctgacatttccgactcggaccgatg

SEQ ID NO: 16286 - DNA, 203 bp, synthetic construct
  source 1..203: mol_type = other DNA
ggcgcgccagtccttgtaaaggcttctgacatttctgacatttctgacattactcccatttctgacattactcccatttctgacatttctgacatttctgacattactcccatttctgacattactcccatttctgacatttctgacatttctgacattactcccatttctgacattactcccatttccgactcggaccgatg

SEQ ID NO: 16287 - DNA, 203 bp, synthetic construct
  source 1..203: mol_type = other DNA
ggcgcgccagtcctagtctttcattctgacatttctgacatttctgacattactcccatttctgacattactcccatttctgacatttctgacatttctgacattactcccatttctgacattactcccatttctgacatttctgacatttctgacattactcccatttctgacatttctgacatttccgactcggaccgatg

SEQ ID NO: 16288 - DNA, 203 bp, synthetic construct
  source 1..203: mol_type = other DNA
ggcgcgccagtcctaaacactgcttctgacatttctgacatttctgacattactcccatttctgacattactcccatttctgacatttctgacatttctgacattactcccatttctgacattactcccatttctgacatttctgacatttctgacatttctgacatttctgacattactcccatttccgactcggaccgatg

SEQ ID NO: 16289 - DNA, 203 bp, synthetic construct
  source 1..203: mol_type = other DNA
ggcgcgccagtcctctgtaaggattctgacatttctgacatttctgacattactcccatttctgacattactcccatttctgacatttctgacatttctgacattactcccatttctgacattactcccatttctgacatttctgacatttctgacatttctgacatttctgacatttctgacatttccgactcggaccgatg

SEQ ID NO: 16290 - DNA, 203 bp, synthetic construct
  source 1..203: mol_type = other DNA
ggcgcgccagtcctctgtctgtattctgacatttctgacatttctgacattactcccatttctgacattactcccatttctgacatttctgacatttctgacattactcccatttctgacatttctgacatttctgacattactcccatttctgacattactcccatttctgacattactcccatttccgactcggaccgatg

SEQ ID NO: 16291 - DNA, 203 bp, synthetic construct
  source 1..203: mol_type = other DNA
ggcgcgccagtcctctgacggtgatctgacatttctgacatttctgacattactcccatttctgacattactcccatttctgacatttctgacatttctgacattactcccatttctgacatttctgacatttctgacattactcccatttctgacatttctgacatttctgacattactcccatttccgactcggaccgatg

SEQ ID NO: 16292 - DNA, 203 bp, synthetic construct
  source 1..203: mol_type = other DNA
ggcgcgccagtcctaggtcttcagtctgacatttctgacatttctgacattactcccatttctgacattactcccatttctgacatttctgacatttctgacatttctgacatttctgacattactcccatttctgacattactcccatttctgacattactcccatttctgacatttctgacatttccgactcggaccgatg

SEQ ID NO: 16293 - DNA, 203 bp, synthetic construct
  source 1..203: mol_type = other DNA
ggcgcgccagtcctctttcttcagtctgacatttctgacatttctgacattactcccatttctgacattactcccatttctgacatttctgacatttctgacatttctgacatttctgacattactcccatttctgacattactcccatttctgacatttctgacatttctgacatttctgacatttccgactcggaccgatg

SEQ ID NO: 16294 - DNA, 203 bp, synthetic construct
  source 1..203: mol_type = other DNA
ggcgcgccagtcctaatcggtcagtctgacatttctgacatttctgacattactcccatttctgacattactcccatttctgacatttctgacatttctgacatttctgacatttctgacattactcccatttctgacatttctgacatttctgacattactcccatttctgacattactcccatttccgactcggaccgatg

SEQ ID NO: 16295 - DNA, 203 bp, synthetic construct
  source 1..203: mol_type = other DNA
ggcgcgccagtccttgtccaagaatctgacatttctgacatttctgacattactcccatttctgacattactcccatttctgacatttctgacatttctgacatttctgacatttctgacattactcccatttctgacatttctgacatttctgacattactcccatttctgacatttctgacatttccgactcggaccgatg

SEQ ID NO: 16296 - DNA, 203 bp, synthetic construct
  source 1..203: mol_type = other DNA
ggcgcgccagtcctagtcaactgatctgacatttctgacatttctgacattactcccatttctgacattactcccatttctgacatttctgacatttctgacatttctgacatttctgacattactcccatttctgacatttctgacatttctgacatttctgacatttctgacattactcccatttccgactcggaccgatg

SEQ ID NO: 16297 - DNA, 203 bp, synthetic construct
  source 1..203: mol_type = other DNA
ggcgcgccagtcctagtgaagccatctgacatttctgacatttctgacattactcccatttctgacattactcccatttctgacatttctgacatttctgacatttctgacatttctgacatttctgacatttctgacattactcccatttctgacatttctgacatttctgacattactcccatttccgactcggaccgatg

SEQ ID NO: 16298 - DNA, 203 bp, synthetic construct
  source 1..203: mol_type = other DNA
ggcgcgccagtccttacagttaagtctgacatttctgacatttctgacattactcccatttctgacattactcccatttctgacatttctgacatttctgacatttctgacatttctgacatttctgacatttctgacatttctgacatttctgacattactcccatttctgacattactcccatttccgactcggaccgatg

SEQ ID NO: 16299 - DNA, 203 bp, synthetic construct
  source 1..203: mol_type = other DNA
ggcgcgccagtcctatccttgccatctgacatttctgacatttctgacattactcccatttctgacatttctgacatttctgacattactcccatttctgacattactcccatttctgacattactcccatttctgacattactcccatttctgacattactcccatttctgacattactcccatttccgactcggaccgatg

SEQ ID NO: 16300 - DNA, 203 bp, synthetic construct
  source 1..203: mol_type = other DNA
ggcgcgccagtcctatcaaaggattctgacatttctgacatttctgacattactcccatttctgacatttctgacatttctgacattactcccatttctgacattactcccatttctgacattactcccatttctgacattactcccatttctgacattactcccatttctgacatttctgacatttccgactcggaccgatg

SEQ ID NO: 16301 - DNA, 203 bp, synthetic construct
  source 1..203: mol_type = other DNA
ggcgcgccagtcctctagtgagtttctgacatttctgacatttctgacattactcccatttctgacatttctgacatttctgacattactcccatttctgacattactcccatttctgacattactcccatttctgacattactcccatttctgacatttctgacatttctgacattactcccatttccgactcggaccgatg

SEQ ID NO: 16302 - DNA, 203 bp, synthetic construct
  source 1..203: mol_type = other DNA
ggcgcgccagtcctcagcagagcatctgacatttctgacatttctgacattactcccatttctgacatttctgacatttctgacattactcccatttctgacattactcccatttctgacattactcccatttctgacatttctgacatttctgacattactcccatttctgacattactcccatttccgactcggaccgatg

SEQ ID NO: 16303 - DNA, 203 bp, synthetic construct
  source 1..203: mol_type = other DNA
ggcgcgccagtcctccagtgagaatctgacatttctgacatttctgacattactcccatttctgacatttctgacatttctgacattactcccatttctgacattactcccatttctgacatttctgacatttctgacattactcccatttctgacattactcccatttctgacattactcccatttccgactcggaccgatg

SEQ ID NO: 16304 - DNA, 203 bp, synthetic construct
  source 1..203: mol_type = other DNA
ggcgcgccagtcctagatacactatctgacatttctgacatttctgacattactcccatttctgacatttctgacatttctgacattactcccatttctgacattactcccatttctgacatttctgacatttctgacattactcccatttctgacatttctgacatttctgacattactcccatttccgactcggaccgatg

SEQ ID NO: 16305 - DNA, 203 bp, synthetic construct
  source 1..203: mol_type = other DNA
ggcgcgccagtcctatcacaaaggtctgacatttctgacatttctgacattactcccatttctgacatttctgacatttctgacattactcccatttctgacattactcccatttctgacatttctgacatttctgacatttctgacatttctgacattactcccatttctgacatttctgacatttccgactcggaccgatg

SEQ ID NO: 16306 - DNA, 203 bp, synthetic construct
  source 1..203: mol_type = other DNA
ggcgcgccagtcctacctgttcgttctgacatttctgacatttctgacattactcccatttctgacatttctgacatttctgacattactcccatttctgacatttctgacatttctgacattactcccatttctgacattactcccatttctgacattactcccatttctgacatttctgacatttccgactcggaccgatg

SEQ ID NO: 16307 - DNA, 203 bp, synthetic construct
  source 1..203: mol_type = other DNA
ggcgcgccagtcctatccactgtttctgacatttctgacatttctgacattactcccatttctgacatttctgacatttctgacattactcccatttctgacatttctgacatttctgacattactcccatttctgacatttctgacatttctgacattactcccatttctgacattactcccatttccgactcggaccgatg

SEQ ID NO: 16308 - DNA, 203 bp, synthetic construct
  source 1..203: mol_type = other DNA
ggcgcgccagtcctcctttacaggtctgacatttctgacatttctgacattactcccatttctgacatttctgacatttctgacattactcccatttctgacatttctgacatttctgacattactcccatttctgacatttctgacatttctgacatttctgacatttctgacattactcccatttccgactcggaccgatg

SEQ ID NO: 16309 - DNA, 203 bp, synthetic construct
  source 1..203: mol_type = other DNA
ggcgcgccagtcctcctgatcatttctgacatttctgacatttctgacattactcccatttctgacatttctgacatttctgacattactcccatttctgacatttctgacatttctgacatttctgacatttctgacattactcccatttctgacattactcccatttctgacattactcccatttccgactcggaccgatg

SEQ ID NO: 16310 - DNA, 203 bp, synthetic construct
  source 1..203: mol_type = other DNA
ggcgcgccagtcctcctttctgattctgacatttctgacatttctgacattactcccatttctgacatttctgacatttctgacattactcccatttctgacatttctgacatttctgacatttctgacatttctgacatttctgacatttctgacattactcccatttctgacattactcccatttccgactcggaccgatg

SEQ ID NO: 16311 - DNA, 203 bp, synthetic construct
  source 1..203: mol_type = other DNA
ggcgcgccagtcctctcactctgatctgacatttctgacatttctgacattactcccatttctgacatttctgacatttctgacattactcccatttctgacatttctgacatttctgacatttctgacatttctgacatttctgacatttctgacatttctgacatttctgacattactcccatttccgactcggaccgatg

SEQ ID NO: 16312 - DNA, 203 bp, synthetic construct
  source 1..203: mol_type = other DNA
ggcgcgccagtcctatcagagatttctgacatttctgacatttctgacattactcccatttctgacatttctgacatttctgacattactcccatttctgacatttctgacatttctgacatttctgacatttctgacatttctgacatttctgacatttctgacatttctgacatttctgacatttccgactcggaccgatg

SEQ ID NO: 16313 - DNA, 203 bp, synthetic construct
  source 1..203: mol_type = other DNA
ggcgcgccagtcctatgaccagattctgacatttctgacatttctgacattactcccatttctgacatttctgacatttctgacatttctgacatttctgacattactcccatttctgacattactcccatttctgacattactcccatttctgacattactcccatttctgacattactcccatttccgactcggaccgatg

SEQ ID NO: 16314 - DNA, 203 bp, synthetic construct
  source 1..203: mol_type = other DNA
ggcgcgccagtcctcaagattctatctgacatttctgacatttctgacattactcccatttctgacatttctgacatttctgacatttctgacatttctgacattactcccatttctgacattactcccatttctgacattactcccatttctgacattactcccatttctgacatttctgacatttccgactcggaccgatg

SEQ ID NO: 16315 - DNA, 203 bp, synthetic construct
  source 1..203: mol_type = other DNA
ggcgcgccagtcctaacgcttacttctgacatttctgacatttctgacattactcccatttctgacatttctgacatttctgacatttctgacatttctgacattactcccatttctgacattactcccatttctgacatttctgacatttctgacattactcccatttctgacatttctgacatttccgactcggaccgatg

SEQ ID NO: 16316 - DNA, 203 bp, synthetic construct
  source 1..203: mol_type = other DNA
ggcgcgccagtcctccaaaagatttctgacatttctgacatttctgacattactcccatttctgacatttctgacatttctgacatttctgacatttctgacattactcccatttctgacatttctgacatttctgacattactcccatttctgacattactcccatttctgacattactcccatttccgactcggaccgatg

SEQ ID NO: 16317 - DNA, 203 bp, synthetic construct
  source 1..203: mol_type = other DNA
ggcgcgccagtcctttaagttttgtctgacatttctgacatttctgacattactcccatttctgacatttctgacatttctgacatttctgacatttctgacattactcccatttctgacatttctgacatttctgacattactcccatttctgacatttctgacatttctgacattactcccatttccgactcggaccgatg

SEQ ID NO: 16318 - DNA, 203 bp, synthetic construct
  source 1..203: mol_type = other DNA
ggcgcgccagtccttgcttactgttctgacatttctgacatttctgacattactcccatttctgacatttctgacatttctgacatttctgacatttctgacattactcccatttctgacatttctgacatttctgacatttctgacatttctgacatttctgacatttctgacattactcccatttccgactcggaccgatg

SEQ ID NO: 16319 - DNA, 203 bp, synthetic construct
  source 1..203: mol_type = other DNA
ggcgcgccagtccttggtaggatatctgacatttctgacatttctgacattactcccatttctgacatttctgacatttctgacatttctgacatttctgacattactcccatttctgacatttctgacatttctgacatttctgacatttctgacatttctgacatttctgacatttctgacatttccgactcggaccgatg

SEQ ID NO: 16320 - DNA, 203 bp, synthetic construct
  source 1..203: mol_type = other DNA
ggcgcgccagtccttctttgagcttctgacatttctgacatttctgacattactcccatttctgacatttctgacatttctgacatttctgacatttctgacatttctgacatttctgacattactcccatttctgacattactcccatttctgacattactcccatttctgacattactcccatttccgactcggaccgatg

SEQ ID NO: 16321 - DNA, 203 bp, synthetic construct
  source 1..203: mol_type = other DNA
ggcgcgccagtcctctcaaaactatctgacatttctgacatttctgacattactcccatttctgacatttctgacatttctgacatttctgacatttctgacatttctgacatttctgacattactcccatttctgacattactcccatttctgacatttctgacatttctgacattactcccatttccgactcggaccgatg

SEQ ID NO: 16322 - DNA, 203 bp, synthetic construct
  source 1..203: mol_type = other DNA
ggcgcgccagtcctaatacagcgatctgacatttctgacatttctgacattactcccatttctgacatttctgacatttctgacatttctgacatttctgacatttctgacatttctgacattactcccatttctgacattactcccatttctgacatttctgacatttctgacatttctgacatttccgactcggaccgatg

SEQ ID NO: 16323 - DNA, 203 bp, synthetic construct
  source 1..203: mol_type = other DNA
ggcgcgccagtccttcatggtttttctgacatttctgacatttctgacattactcccatttctgacatttctgacatttctgacatttctgacatttctgacatttctgacatttctgacattactcccatttctgacatttctgacatttctgacattactcccatttctgacattactcccatttccgactcggaccgatg

SEQ ID NO: 16324 - DNA, 203 bp, synthetic construct
  source 1..203: mol_type = other DNA
ggcgcgccagtcctctgagaacaatctgacatttctgacatttctgacattactcccatttctgacatttctgacatttctgacatttctgacatttctgacatttctgacatttctgacatttctgacatttctgacatttctgacatttctgacatttctgacatttctgacattactcccatttccgactcggaccgatg

SEQ ID NO: 16325 - DNA, 203 bp, synthetic construct
  source 1..203: mol_type = other DNA
ggcgcgccagtccttgttactggatctgacatttctgacatttctgacattactcccatttctgacatttctgacatttctgacatttctgacatttctgacatttctgacatttctgacatttctgacatttctgacatttctgacatttctgacatttctgacatttctgacatttctgacatttccgactcggaccgatg

SEQ ID NO: 16326 - DNA, 203 bp, synthetic construct
  source 1..203: mol_type = other DNA
ggcgcgccagtcctcttgcacaaatctgacatttctgacatttctgacattaggagcgagcgaccaaaggaaccataactgatttaatgagccattcgcagtttcactgtaccggccgtgcgtactcagacatgcatggcttaatctttgagacaagcatatgctactggcaggatctctgacatttccgactcggaccgatg

SEQ ID NO: 16327 - DNA, 203 bp, synthetic construct
  source 1..203: mol_type = other DNA
ggcgcgccagtccttccatgagagtctgacatttctgacatttctgacattccggcgggttctgacatttctgacatttctgacatttctgacatttctgacatttctgacatttctgacatttctgacatttctgacatttctgacatttctgacatttctgacatttctgacatttcaccggccgtcgactcggaccgatg

SEQ ID NO: 16328 - DNA, 203 bp, synthetic construct
  source 1..203: mol_type = other DNA
ggcgcgccagtcctagtccatggatctgacatttctgacatttctgacattccggcgggttctgacatttctgacatttctgacatttctgacatttctgacatttctgacatttctgacatttctgacatttctgacatttctgacatttctgacatttctgacatttctgacatttcccggcgggtcgactcggaccgatg

SEQ ID NO: 16329 - DNA, 203 bp, synthetic construct
  source 1..203: mol_type = other DNA
ggcgcgccagtcctcaagtaactgtctgacatttctgacatttctgacattcgtcaattcctttacatttctgacatttctgacatttctgacatttctgacatttctgacatttctgacatttctgacatttctgacatttctgacatttctgacatttctgacatttctgacattttcttggcaaacgactcggaccgatg

SEQ ID NO: 16330 - DNA, 203 bp, synthetic construct
  source 1..203: mol_type = other DNA
ggcgcgccagtcctacgcttactttctgacatttctgacatttctgacattcttggcaaatctgacatttctgacatttctgacatttctgacatttctgacatttctgacatttctgacatttctgacatttctgacatttctgacatttctgacatttctgacatttctgacatttcaccggccgtcgactcggaccgatg

SEQ ID NO: 16331 - DNA, 203 bp, synthetic construct
  source 1..203: mol_type = other DNA
ggcgcgccagtcctaaccgttaggtctgacatttctgacatttctgacatttacgacggtatctgatcgtcttcgaacctccgactttcgttcttgattaatgaaaacattcttggcaaatgctttcgctctggtccgtcttgcgccggtccaagaatttcacctctagcggcgcattctgacatttccgactcggaccgatg

SEQ ID NO: 16332 - DNA, 203 bp, synthetic construct
  source 1..203: mol_type = other DNA
ggcgcgccagtcctcactcagtcttctgacatttctgacatttctgacatttaggctccactcctggtggtgcccttccgtcaattcctttaagtttcagctttgcaaccatactccccccggaacccaaagactttggtttcccggaagctgcccggcgggtcatgggaataacgttctgacatttccgactcggaccgatg

SEQ ID NO: 16333 - DNA, 203 bp, synthetic construct
  source 1..203: mol_type = other DNA
ggcgcgccagtcctactcagtgcatctgacatttctgacatttctgacatttcaccggccgttgacatttctgacatttctgacatttctgacatttctgacatttctgacatttctgacatttctgacatttctgacatttctgacatttctgacatttctgacatttctgacatttctgtactccccgactcggaccgatg

SEQ ID NO: 16334 - DNA, 203 bp, synthetic construct
  source 1..203: mol_type = other DNA
ggcgcgccagtcctaaactgagattctgacatttctgacatttctgacatttcaccggccgttgacatttctgacatttctgacatttctgacatttctgacatttctgacatttctgacatttctgacatttctgacatttctgacatttctgacatttctgacatttctgaccacggaatcgagaacgactcggaccgatg

SEQ ID NO: 16335 - DNA, 203 bp, synthetic construct
  source 1..203: mol_type = other DNA
ggcgcgccagtcctaacctcagtttctgacatttctgacatttctgacatttcaccggccgttgacatttctgacatttctgacatttctgacatttctgacatttctgacatttctgacatttctgacatttctgacatttctgacatttctgacatttctgacatttctgaccgtcaattcctttacgactcggaccgatg

SEQ ID NO: 16336 - DNA, 203 bp, synthetic construct
  source 1..203: mol_type = other DNA
ggcgcgccagtcctctttgaggtctctgacatttctgacatttctgacatttcccggcgggttgacatttctgacatttctgacatttctgacatttctgacatttctgacatttctgacatttctgacatttctgacatttctgacatttctgacatttctgacatttctgacatttctgacatttccgactcggaccgatg

SEQ ID NO: 16337 - DNA, 203 bp, synthetic construct
  source 1..203: mol_type = other DNA
ggcgcgccagtcctgaaaggtccttctgacatttctgacatttctgacatttcccggcgggttgacatttctgacatttctgacatttctgacatttctgacatttctgacatttctgacatttctgacatttctgacatttctgacatttctgacatttctgacatttctgacatttctgtactccccgactcggaccgatg

SEQ ID NO: 16338 - DNA, 203 bp, synthetic construct
  source 1..203: mol_type = other DNA
ggcgcgccagtcctaacgagcgtctctgacatttctgacatttctgacatttcccggcgggttgacatttctgacatttctgacatttctgacatttctgacatttctgacatttctgacatttctgacatttctgacatttctgacatttctgacatttctgacatttctgaccacggaatcgagaacgactcggaccgatg

SEQ ID NO: 16339 - DNA, 203 bp, synthetic construct
  source 1..203: mol_type = other DNA
ggcgcgccagtcctgagaccgacttctgacatttctgacatttctgacatttcggaattaaccagacaaatcgctccaccaactaagaacggccatgcaccaccacccacggaatcgagaaagagctatcaatctgtcaatcctgtccgtgtccgggccgggtgaggtttcccgtgttctgacatttccgactcggaccgatg

SEQ ID NO: 16340 - DNA, 203 bp, synthetic construct
  source 1..203: mol_type = other DNA
ggcgcgccagtcctgaccggtcattctgacatttctgacatttctgacatttctgaattaaccagacaaatcgctccaccaactaagaacggccatgcaccaccacccacggaatcgagaaagagctatcaatctgtcaatcctgtccgtgtccgggccgggtgaggtttccccatttctgacatttccgactcggaccgatg

SEQ ID NO: 16341 - DNA, 203 bp, synthetic construct
  source 1..203: mol_type = other DNA
ggcgcgccagtcctgaaccttgcttctgacatttctgacatttctgacatttctgacaaccggccgttttctgacatttctgacatttctgacatttctgacatttctgacatttctgacatttctgacatttctgacatttctgacatttctgacatttctgacatttctgacatttcaccggccgtcgactcggaccgatg

SEQ ID NO: 16342 - DNA, 203 bp, synthetic construct
  source 1..203: mol_type = other DNA
ggcgcgccagtcctgagctgtatctctgacatttctgacatttctgacatttctgacacgtcaattcctttagacatttctgacatttctgacatttctgacatttctgacatttctgacatttctgacatttctgacatttctgacatttctgacatttctgacatttctgacattttcttggcaaacgactcggaccgatg

SEQ ID NO: 16343 - DNA, 203 bp, synthetic construct
  source 1..203: mol_type = other DNA
ggcgcgccagtcctgagttaccgttctgacatttctgacatttctgacatttctgacatactcctggtggtgcccttccgtcaattcctttaagtttcagctttgcaaccatactccccccggaacccaaagactttggtttcccggaagctgcccggcgggtcatgggctgacatttctgacatttccgactcggaccgatg

SEQ ID NO: 16344 - DNA, 203 bp, synthetic construct
  source 1..203: mol_type = other DNA
ggcgcgccagtcctacgacctctctctgacatttctgacatttctgacatttctgacatgcgaccaaaggaaccataactgatttaatgagccattcgcagtttcactgtaccggccgtgcgtactcagacatgcatggcttaatctttgagacaagcatatgctactgctgacatttctgacatttccgactcggaccgatg

SEQ ID NO: 16345 - DNA, 203 bp, synthetic construct
  source 1..203: mol_type = other DNA
ggcgcgccagtcctgacctctgcttctgacatttctgacatttctgacatttctgacattaccagacaaatcgctccaccaactaagaacggccatgcaccaccacccacggaatcgagaaagagctatcaatctgtcaatcctgtccgtgtccgggccgggtgaggttctgacatttctgacatttccgactcggaccgatg

SEQ ID NO: 16346 - DNA, 203 bp, synthetic construct
  source 1..203: mol_type = other DNA
ggcgcgccagtcctgactcagagatctgacatttctgacatttctgacatttctgacattaccggccgttctgacatttctgacatttctgacatttctgacatttctgacatttctgacatttctgacatttctgacatttctgacatttctgacatttctgacatttctgacatttctgacatttccgactcggaccgatg

SEQ ID NO: 16347 - DNA, 203 bp, synthetic construct
  source 1..203: mol_type = other DNA
ggcgcgccagtcctgacggtcatttctgacatttctgacatttctgacatttctgacattaccggccgttctgacatttctgacatttctgacatttctgacatttctgacatttctgacatttctgacatttctgacatttctgacatttctgacatttctgacatttctgacatttctgtactccccgactcggaccgatg

SEQ ID NO: 16348 - DNA, 203 bp, synthetic construct
  source 1..203: mol_type = other DNA
ggcgcgccagtcctgagcagctcatctgacatttctgacatttctgacatttctgacattcacggaatcgagaacatttctgacatttctgacatttctgacatttctgacatttctgacatttctgacatttctgacatttctgacatttctgacatttctgacatttctgacatttcccggcgggtcgactcggaccgatg

SEQ ID NO: 16349 - DNA, 203 bp, synthetic construct
  source 1..203: mol_type = other DNA
ggcgcgccagtcctacggtcatgatctgacatttctgacatttctgacatttctgacattccggcgggttctgacatttctgacatttctgacatttctgacatttctgacatttctgacatttctgacatttctgacatttctgacatttctgacatttctgacatttctgacatttctgtactccccgactcggaccgatg

SEQ ID NO: 16350 - DNA, 203 bp, synthetic construct
  source 1..203: mol_type = other DNA
ggcgcgccagtccttggattctgttctgacatttctgacatttctgacatttctgacattccggcgggttctgacatttctgacatttctgacatttctgacatttctgacatttctgacatttctgacatttctgacatttctgacatttctgacatttctgacatttctgaccacggaatcgagaacgactcggaccgatg

SEQ ID NO: 16351 - DNA, 203 bp, synthetic construct
  source 1..203: mol_type = other DNA
ggcgcgccagtcctcagaagagtctctgacatttctgacatttctgacatttctgacattcgtcaattcctttacatttctgacatttctgacatttctgacatttctgacatttctgacatttctgacatttctgacatttctgacatttctgacatttctgacatttctgacatttcccggcgggtcgactcggaccgatg

SEQ ID NO: 16352 - DNA, 203 bp, synthetic construct
  source 1..203: mol_type = other DNA
ggcgcgccagtcctttgagtgagttctgacatttctgacatttctgacatttctgacattcttggcaaatctgacatttctgacatttctgacatttctgacatttctgacatttctgacatttctgacatttctgacatttctgacatttctgacatttctgacatttctgacatttctgacatttccgactcggaccgatg

SEQ ID NO: 16353 - DNA, 203 bp, synthetic construct
  source 1..203: mol_type = other DNA
ggcgcgccagtcctgaacagtctctctgacatttctgacatttctgacatttctgacattcttggcaaatctgacatttctgacatttctgacatttctgacatttctgacatttctgacatttctgacatttctgacatttctgacatttctgacatttctgacatttctgaccgtcaattcctttacgactcggaccgatg

SEQ ID NO: 16354 - DNA, 203 bp, synthetic construct
  source 1..203: mol_type = other DNA
ggcgcgccagtcctagagtagtcatctgacatttctgacatttctgacatttctgacatttactccctttctgacatttctgacatttctgacatttctgacatttctgacatttctgacatttctgacatttctgacatttctgacatttctgacatttctgacatttctgacatttcaccggccgtcgactcggaccgatg

SEQ ID NO: 16355 - DNA, 203 bp, synthetic construct
  source 1..203: mol_type = other DNA
ggcgcgccagtcctttaactagtttctgacatttctgacatttctgacatttctgacatttccgtcaattcctttatttctgacatttctgacatttctgacatttctgacatttctgacatttctgacatttctgacatttctgacatttctgacatttctgacatttctgacatttctgtactccccgactcggaccgatg

SEQ ID NO: 16356 - DNA, 203 bp, synthetic construct
  source 1..203: mol_type = other DNA
ggcgcgccagtccttgactactcatctgacatttctgacatttctgacatttctgacatttctagacaaatcgctccaccaactaagaacggccatgcaccaccacccacggaatcgagaaagagctatcaatctgtcaatcctgtccgtgtccgggccgggtgaatttctgacatttctgacatttccgactcggaccgatg

SEQ ID NO: 16357 - DNA, 203 bp, synthetic construct
  source 1..203: mol_type = other DNA
ggcgcgccagtcctttcaagaagttctgacatttctgacatttctgacatttctgacatttctccaaaggaaccataactgatttaatgagccattcgcagtttcactgtaccggccgtgcgtactcagacatgcatggcttaatctttgagacaagcatatgctatttctgacatttctgacatttccgactcggaccgatg

SEQ ID NO: 16358 - DNA, 203 bp, synthetic construct
  source 1..203: mol_type = other DNA
ggcgcgccagtcctctacttaacatctgacatttctgacatttctgacatttctgacatttctccggcgggtgacatttctgacatttctgacatttctgacatttctgacatttctgacatttctgacatttctgacatttctgacatttctgacatttctgacatttctgacattttcttggcaaacgactcggaccgatg

SEQ ID NO: 16359 - DNA, 203 bp, synthetic construct
  source 1..203: mol_type = other DNA
ggcgcgccagtccttgagtagagttctgacatttctgacatttctgacatttctgacatttctgaaccggccgtcatttctgacatttctgacatttctgacatttctgacatttctgacatttctgacatttctgacatttctgacatttctgacatttctgacatttctgacatttcccggcgggtcgactcggaccgatg

SEQ ID NO: 16360 - DNA, 203 bp, synthetic construct
  source 1..203: mol_type = other DNA
ggcgcgccagtcctcctactactttctgacatttctgacatttctgacatttctgacatttctgaagtcaaattaagccgcaggctccactcctggtggtgcccttccgtcaattcctttaagtttcagctttgcaaccatactccccccggaacccaaagacacatttctgacatttctgacatttccgactcggaccgatg

SEQ ID NO: 16361 - DNA, 203 bp, synthetic construct
  source 1..203: mol_type = other DNA
ggcgcgccagtcctctctgaagtttctgacatttctgacatttctgacatttctgacatttctgacaaccggccgttttctgacatttctgacatttctgacatttctgacatttctgacatttctgacatttctgacatttctgacatttctgacatttctgacatttctgaccacggaatcgagaacgactcggaccgatg

SEQ ID NO: 16362 - DNA, 203 bp, synthetic construct
  source 1..203: mol_type = other DNA
ggcgcgccagtcctaacttctctatctgacatttctgacatttctgacatttctgacatttctgacacacggaatcgagaagacatttctgacatttctgacatttctgacatttctgacatttctgacatttctgacatttctgacatttctgacatttctgacatttctgacatttcaccggccgtcgactcggaccgatg

SEQ ID NO: 16363 - DNA, 203 bp, synthetic construct
  source 1..203: mol_type = other DNA
ggcgcgccagtcctaggtctgttgtctgacatttctgacatttctgacatttctgacatttctgacaccggcgggttttctgacatttctgacatttctgacatttctgacatttctgacatttctgacatttctgacatttctgacatttctgacatttctgacatttctgaccgtcaattcctttacgactcggaccgatg

SEQ ID NO: 16364 - DNA, 203 bp, synthetic construct
  source 1..203: mol_type = other DNA
ggcgcgccagtcctccaacaggcttctgacatttctgacatttctgacatttctgacatttctgacacggaatcgagaactgacatttctgacatttctgacatttctgacatttctgacatttctgacatttctgacatttctgacatttctgacatttctgacatttctgacattttcttggcaaacgactcggaccgatg

SEQ ID NO: 16365 - DNA, 203 bp, synthetic construct
  source 1..203: mol_type = other DNA
ggcgcgccagtccttagttaagaatctgacatttctgacatttctgacatttctgacatttctgacacgtcaattcctttagacatttctgacatttctgacatttctgacatttctgacatttctgacatttctgacatttctgacatttctgacatttctgacatttctgacatttcccggcgggtcgactcggaccgatg

SEQ ID NO: 16366 - DNA, 203 bp, synthetic construct
  source 1..203: mol_type = other DNA
ggcgcgccagtccttagatacaagtctgacatttctgacatttctgacatttctgacatttctgacataccggccgtttctgacataccggccgtttctgacataccggccgtttctgacataccggccgtttctgacataccggccgtttctgacataccggccgtttctgacatttctgacatttccgactcggaccgatg

SEQ ID NO: 16367 - DNA, 203 bp, synthetic construct
  source 1..203: mol_type = other DNA
ggcgcgccagtcctacaaagtacttctgacatttctgacatttctgacatttctgacatttctgacataccggccgtttctgacataccggccgtttctgacataccggccgtttctgacataccggccgtttctgacatttctgacatttctgacataccggccgtttctgacataccggccgtttccgactcggaccgatg

SEQ ID NO: 16368 - DNA, 203 bp, synthetic construct
  source 1..203: mol_type = other DNA
ggcgcgccagtcctaaagtaccattctgacatttctgacatttctgacatttctgacatttctgacataccggccgtttctgacataccggccgtttctgacataccggccgtttctgacatttctgacatttctgacataccggccgtttctgacatttctgacatttctgacataccggccgtttccgactcggaccgatg

SEQ ID NO: 16369 - DNA, 203 bp, synthetic construct
  source 1..203: mol_type = other DNA
ggcgcgccagtcctactgctttggtctgacatttctgacatttctgacatttctgacatttctgacataccggccgtttctgacataccggccgtttctgacatttctgacatttctgacataccggccgtttctgacataccggccgtttctgacataccggccgtttctgacatttctgacatttccgactcggaccgatg

SEQ ID NO: 16370 - DNA, 203 bp, synthetic construct
  source 1..203: mol_type = other DNA
ggcgcgccagtcctaacctttggttctgacatttctgacatttctgacatttctgacatttctgacataccggccgtttctgacataccggccgtttctgacatttctgacatttctgacataccggccgtttctgacataccggccgtttctgacatttctgacatttctgacataccggccgtttccgactcggaccgatg

SEQ ID NO: 16371 - DNA, 203 bp, synthetic construct
  source 1..203: mol_type = other DNA
ggcgcgccagtcctcaactacaggtctgacatttctgacatttctgacatttctgacatttctgacataccggccgtttctgacataccggccgtttctgacatttctgacatttctgacataccggccgtttctgacatttctgacatttctgacataccggccgtttctgacatttctgacatttccgactcggaccgatg

SEQ ID NO: 16372 - DNA, 203 bp, synthetic construct
  source 1..203: mol_type = other DNA
ggcgcgccagtcctgagctactcttctgacatttctgacatttctgacatttctgacatttctgacataccggccgtttctgacataccggccgtttctgacatttctgacatttctgacataccggccgtttctgacatttctgacatttctgacatttctgacatttctgacataccggccgtttccgactcggaccgatg

SEQ ID NO: 16373 - DNA, 203 bp, synthetic construct
  source 1..203: mol_type = other DNA
ggcgcgccagtcctagtccaggtttctgacatttctgacatttctgacatttctgacatttctgacataccggccgtttctgacataccggccgtttctgacatttctgacatttctgacataccggccgtttctgacatttctgacatttctgacatttctgacatttctgacatttctgacatttccgactcggaccgatg

SEQ ID NO: 16374 - DNA, 203 bp, synthetic construct
  source 1..203: mol_type = other DNA
ggcgcgccagtcctaaaagtacattctgacatttctgacatttctgacatttctgacatttctgacataccggccgtttctgacataccggccgtttctgacatttctgacatttctgacatttctgacatttctgacatttctgacatttctgacataccggccgtttctgacataccggccgtttccgactcggaccgatg

SEQ ID NO: 16375 - DNA, 203 bp, synthetic construct
  source 1..203: mol_type = other DNA
ggcgcgccagtcctacgactgttctctgacatttctgacatttctgacatttctgacatttctgacataccggccgtttctgacataccggccgtttctgacatttctgacatttctgacatttctgacatttctgacatttctgacatttctgacataccggccgtttctgacatttctgacatttccgactcggaccgatg

SEQ ID NO: 16376 - DNA, 203 bp, synthetic construct
  source 1..203: mol_type = other DNA
ggcgcgccagtcctgaatctggtgtctgacatttctgacatttctgacatttctgacatttctgacataccggccgtttctgacataccggccgtttctgacatttctgacatttctgacatttctgacatttctgacatttctgacatttctgacatttctgacatttctgacataccggccgtttccgactcggaccgatg

SEQ ID NO: 16377 - DNA, 203 bp, synthetic construct
  source 1..203: mol_type = other DNA
ggcgcgccagtcctcacagtggtttctgacatttctgacatttctgacatttctgacatttctgacataccggccgtttctgacatttctgacatttctgacataccggccgtttctgacataccggccgtttctgacataccggccgtttctgacatttctgacatttctgacataccggccgtttccgactcggaccgatg

SEQ ID NO: 16378 - DNA, 203 bp, synthetic construct
  source 1..203: mol_type = other DNA
ggcgcgccagtcctagtggtgctgtctgacatttctgacatttctgacatttctgacatttctgacataccggccgtttctgacatttctgacatttctgacataccggccgtttctgacataccggccgtttctgacatttctgacatttctgacataccggccgtttctgacataccggccgtttccgactcggaccgatg

SEQ ID NO: 16379 - DNA, 203 bp, synthetic construct
  source 1..203: mol_type = other DNA
ggcgcgccagtccttgaccacttctctgacatttctgacatttctgacatttctgacatttctgacataccggccgtttctgacatttctgacatttctgacataccggccgtttctgacataccggccgtttctgacatttctgacatttctgacataccggccgtttctgacatttctgacatttccgactcggaccgatg

SEQ ID NO: 16380 - DNA, 203 bp, synthetic construct
  source 1..203: mol_type = other DNA
ggcgcgccagtcctcaagagtggttctgacatttctgacatttctgacatttctgacatttctgacataccggccgtttctgacatttctgacatttctgacataccggccgtttctgacataccggccgtttctgacatttctgacatttctgacatttctgacatttctgacataccggccgtttccgactcggaccgatg

SEQ ID NO: 16381 - DNA, 203 bp, synthetic construct
  source 1..203: mol_type = other DNA
ggcgcgccagtccttcaagttctttctgacatttctgacatttctgacatttctgacatttctgacataccggccgtttctgacatttctgacatttctgacataccggccgtttctgacatttctgacatttctgacataccggccgtttctgacatttctgacatttctgacataccggccgtttccgactcggaccgatg

SEQ ID NO: 16382 - DNA, 203 bp, synthetic construct
  source 1..203: mol_type = other DNA
ggcgcgccagtcctttgtaccagttctgacatttctgacatttctgacatttctgacatttctgacataccggccgtttctgacatttctgacatttctgacataccggccgtttctgacatttctgacatttctgacataccggccgtttctgacatttctgacatttctgacatttctgacatttccgactcggaccgatg

SEQ ID NO: 16383 - DNA, 203 bp, synthetic construct
  source 1..203: mol_type = other DNA
ggcgcgccagtcctttggtgactgtctgacatttctgacatttctgacatttctgacatttctgacataccggccgtttctgacatttctgacatttctgacataccggccgtttctgacatttctgacatttctgacatttctgacatttctgacataccggccgtttctgacatttctgacatttccgactcggaccgatg

SEQ ID NO: 16384 - DNA, 203 bp, synthetic construct
  source 1..203: mol_type = other DNA
ggcgcgccagtcctagagctctggtctgacatttctgacatttctgacatttctgacatttctgacataccggccgtttctgacatttctgacatttctgacataccggccgtttctgacatttctgacatttctgacatttctgacatttctgacatttctgacatttctgacataccggccgtttccgactcggaccgatg

SEQ ID NO: 16385 - DNA, 203 bp, synthetic construct
  source 1..203: mol_type = other DNA
ggcgcgccagtcctatgagtacgttctgacatttctgacatttctgacatttctgacatttctgacataccggccgtttctgacatttctgacatttctgacatttctgacatttctgacataccggccgtttctgacataccggccgtttctgacataccggccgtttctgacatttctgacatttccgactcggaccgatg

SEQ ID NO: 16386 - DNA, 203 bp, synthetic construct
  source 1..203: mol_type = other DNA
ggcgcgccagtcctacgtactcgttctgacatttctgacatttctgacatttctgacatttctgacataccggccgtttctgacatttctgacatttctgacatttctgacatttctgacataccggccgtttctgacatttctgacatttctgacataccggccgtttctgacataccggccgtttccgactcggaccgatg

SEQ ID NO: 16387 - DNA, 203 bp, synthetic construct
  source 1..203: mol_type = other DNA
ggcgcgccagtcctttcaaccggttctgacatttctgacatttctgacatttctgacatttctgacataccggccgtttctgacatttctgacatttctgacatttctgacatttctgacataccggccgtttctgacatttctgacatttctgacataccggccgtttctgacatttctgacatttccgactcggaccgatg

SEQ ID NO: 16388 - DNA, 203 bp, synthetic construct
  source 1..203: mol_type = other DNA
ggcgcgccagtcctccatgaagattctgacatttctgacatttctgacatttctgacatttctgacataccggccgtttctgacatttctgacatttctgacatttctgacatttctgacatttctgacatttctgacataccggccgtttctgacataccggccgtttctgacataccggccgtttccgactcggaccgatg

SEQ ID NO: 16389 - DNA, 203 bp, synthetic construct
  source 1..203: mol_type = other DNA
ggcgcgccagtccttgaatcttcatctgacatttctgacatttctgacatttctgacatttctgacataccggccgtttctgacatttctgacatttctgacatttctgacatttctgacatttctgacatttctgacataccggccgtttctgacatttctgacatttctgacataccggccgtttccgactcggaccgatg

SEQ ID NO: 16390 - DNA, 203 bp, synthetic construct
  source 1..203: mol_type = other DNA
ggcgcgccagtcctttgaaagacttctgacatttctgacatttctgacatttctgacatttctgacataccggccgtttctgacatttctgacatttctgacatttctgacatttctgacatttctgacatttctgacataccggccgtttctgacatttctgacatttctgacatttctgacatttccgactcggaccgatg

SEQ ID NO: 16391 - DNA, 203 bp, synthetic construct
  source 1..203: mol_type = other DNA
ggcgcgccagtcctttagcctaaatctgacatttctgacatttctgacatttctgacatttctgacataccggccgtttctgacatttctgacatttctgacatttctgacatttctgacatttctgacatttctgacatttctgacatttctgacataccggccgtttctgacataccggccgtttccgactcggaccgatg

SEQ ID NO: 16392 - DNA, 203 bp, synthetic construct
  source 1..203: mol_type = other DNA
ggcgcgccagtcctacgtagacagtctgacatttctgacatttctgacatttctgacatttctgacataccggccgtttctgacatttctgacatttctgacatttctgacatttctgacatttctgacatttctgacatttctgacatttctgacataccggccgtttctgacatttctgacatttccgactcggaccgatg

SEQ ID NO: 16393 - DNA, 203 bp, synthetic construct
  source 1..203: mol_type = other DNA
ggcgcgccagtcctactgaccgagtctgacatttctgacatttctgacatttctgacatttctgacatactccccatttctgacatttctgacatttctgacatttctgacatttctgacatttctgacatttctgacatttctgacatttctgacatttctgacatttctgacatttcccggcgggtcgactcggaccgatg

SEQ ID NO: 16394 - DNA, 203 bp, synthetic construct
  source 1..203: mol_type = other DNA
ggcgcgccagtcctaagctagagttctgacatttctgacatttctgacatttctgacatttctgacatactccccccggaacccaaagactttggtttcccggaagctgcccggcgggtcatgggaataacgccgccgcatcgccggtcggcatcgtttattgacatttctgacatttctgacatttccgactcggaccgatg

SEQ ID NO: 16395 - DNA, 203 bp, synthetic construct
  source 1..203: mol_type = other DNA
ggcgcgccagtccttggcctgatttctgacatttctgacatttctgacatttctgacatttctgacatcacggaatcgagaaacatcacggaatcgagaaacatcacggaatcgagaaacatcacggaatcgagaaacatttctgacatttctgacatttctgacatttctgacatttctgacatttccgactcggaccgatg

SEQ ID NO: 16396 - DNA, 203 bp, synthetic construct
  source 1..203: mol_type = other DNA
ggcgcgccagtccttaaaccactatctgacatttctgacatttctgacatttctgacatttctgacatcacggaatcgagaaacatcacggaatcgagaaacatttctgacatttctgacatttctgacatttctgacatcacggaatcgagaaacatttctgacatttctgacatttctgacatttccgactcggaccgatg

SEQ ID NO: 16397 - DNA, 203 bp, synthetic construct
  source 1..203: mol_type = other DNA
ggcgcgccagtcctactagtggtttctgacatttctgacatttctgacatttctgacatttctgacatcacggaatcgagaaacatcacggaatcgagaaacatttctgacatttctgacatttctgacatttctgacatttctgacatttctgacatcacggaatcgagaaacatttctgacatttccgactcggaccgatg

SEQ ID NO: 16398 - DNA, 203 bp, synthetic construct
  source 1..203: mol_type = other DNA
ggcgcgccagtcctcctcagcatatctgacatttctgacatttctgacatttctgacatttctgacatcacggaatcgagaaacatttctgacatttctgacatcacggaatcgagaaacatttctgacatttctgacatcacggaatcgagaaacatttctgacatttctgacatttctgacatttccgactcggaccgatg

SEQ ID NO: 16399 - DNA, 203 bp, synthetic construct
  source 1..203: mol_type = other DNA
ggcgcgccagtcctcaaaggtgtttctgacatttctgacatttctgacatttctgacatttctgacatcacggaatcgagaaacatttctgacatttctgacatttctgacatttctgacatttctgacatttctgacatcacggaatcgagaaacatcacggaatcgagaaacatttctgacatttccgactcggaccgatg

SEQ ID NO: 16400 - DNA, 203 bp, synthetic construct
  source 1..203: mol_type = other DNA
ggcgcgccagtcctctacaccatgtctgacatttctgacatttctgacatttctgacatttctgacatcacggaatcgagaaacatttctgacatttctgacatttctgacatttctgacatttctgacatttctgacatcacggaatcgagaaacatttctgacatttctgacatttctgacatttccgactcggaccgatg

SEQ ID NO: 16401 - DNA, 203 bp, synthetic construct
  source 1..203: mol_type = other DNA
ggcgcgccagtcctattcttcatgtctgacatttctgacatttctgacatttctgacatttctgacatccggcgggtttctgacatccggcgggtttctgacatccggcgggtttctgacatccggcgggtttctgacatccggcgggtttctgacatccggcgggtttctgacatccggcgggtttccgactcggaccgatg

SEQ ID NO: 16402 - DNA, 203 bp, synthetic construct
  source 1..203: mol_type = other DNA
ggcgcgccagtcctcttactgatctctgacatttctgacatttctgacatttctgacatttctgacatccggcgggtttctgacatccggcgggtttctgacatccggcgggtttctgacatccggcgggtttctgacatccggcgggtttctgacatccggcgggtttctgacatccggcgggtttccgactcggaccgatg

SEQ ID NO: 16403 - DNA, 203 bp, synthetic construct
  source 1..203: mol_type = other DNA
ggcgcgccagtcctaagagaactctctgacatttctgacatttctgacatttctgacatttctgacatccggcgggtttctgacatccggcgggtttctgacatccggcgggtttctgacatccggcgggtttctgacatccggcgggtttctgacatccggcgggtttctgacatccggcgggtttccgactcggaccgatg

SEQ ID NO: 16404 - DNA, 203 bp, synthetic construct
  source 1..203: mol_type = other DNA
ggcgcgccagtccttcaactactctctgacatttctgacatttctgacatttctgacatttctgacatccggcgggtttctgacatccggcgggtttctgacatccggcgggtttctgacatccggcgggtttctgacatccggcgggtttctgacatccggcgggtttctgacatccggcgggtttccgactcggaccgatg

SEQ ID NO: 16405 - DNA, 203 bp, synthetic construct
  source 1..203: mol_type = other DNA
ggcgcgccagtcctcacttgtatctctgacatttctgacatttctgacatttctgacatttctgacatccggcgggtttctgacatccggcgggtttctgacatccggcgggtttctgacatccggcgggtttctgacatccggcgggtttctgacatccggcgggtttctgacatccggcgggtttccgactcggaccgatg

SEQ ID NO: 16406 - DNA, 203 bp, synthetic construct
  source 1..203: mol_type = other DNA
ggcgcgccagtccttatgaaggtctctgacatttctgacatttctgacatttctgacatttctgacatccggcgggtttctgacatccggcgggtttctgacatccggcgggtttctgacatccggcgggtttctgacatccggcgggtttctgacatccggcgggtttctgacatccggcgggtttccgactcggaccgatg

SEQ ID NO: 16407 - DNA, 203 bp, synthetic construct
  source 1..203: mol_type = other DNA
ggcgcgccagtcctgagattctgatctgacatttctgacatttctgacatttctgacatttctgacatccggcgggtttctgacatccggcgggtttctgacatccggcgggtttctgacatccggcgggtttctgacatttctgacatttctgacatccggcgggtttctgacatttctgacatttccgactcggaccgatg

SEQ ID NO: 16408 - DNA, 203 bp, synthetic construct
  source 1..203: mol_type = other DNA
ggcgcgccagtcctttacactgtctctgacatttctgacatttctgacatttctgacatttctgacatccggcgggtttctgacatccggcgggtttctgacatccggcgggtttctgacatccggcgggtttctgacatttctgacatttctgacatttctgacatttctgacatttctgacatttccgactcggaccgatg

SEQ ID NO: 16409 - DNA, 203 bp, synthetic construct
  source 1..203: mol_type = other DNA
ggcgcgccagtccttgagttgttctctgacatttctgacatttctgacatttctgacatttctgacatccggcgggtttctgacatccggcgggtttctgacatccggcgggtttctgacatttctgacatttctgacatttctgacatttctgacatttctgacatttctgacatccggcgggtttccgactcggaccgatg

SEQ ID NO: 16410 - DNA, 203 bp, synthetic construct
  source 1..203: mol_type = other DNA
ggcgcgccagtcctgacagtatgatctgacatttctgacatttctgacatttctgacatttctgacatccggcgggtttctgacatccggcgggtttctgacatccggcgggtttctgacatttctgacatttctgacatttctgacatttctgacatttctgacatttctgacatttctgacatttccgactcggaccgatg

SEQ ID NO: 16411 - DNA, 203 bp, synthetic construct
  source 1..203: mol_type = other DNA
ggcgcgccagtccttaaaggtctctctgacatttctgacatttctgacatttctgacatttctgacatccggcgggtttctgacatccggcgggtttctgacatttctgacatttctgacatccggcgggtttctgacatccggcgggtttctgacatccggcgggtttctgacatttctgacatttccgactcggaccgatg

SEQ ID NO: 16412 - DNA, 203 bp, synthetic construct
  source 1..203: mol_type = other DNA
ggcgcgccagtcctgacttgtaagtctgacatttctgacatttctgacatttctgacatttctgacatccggcgggtttctgacatccggcgggtttctgacatttctgacatttctgacatccggcgggtttctgacatccggcgggtttctgacatttctgacatttctgacatccggcgggtttccgactcggaccgatg

SEQ ID NO: 16413 - DNA, 203 bp, synthetic construct
  source 1..203: mol_type = other DNA
ggcgcgccagtcctgactttgacttctgacatttctgacatttctgacatttctgacatttctgacatccggcgggtttctgacatccggcgggtttctgacatttctgacatttctgacatccggcgggtttctgacatccggcgggtttctgacatttctgacatttctgacatttctgacatttccgactcggaccgatg

SEQ ID NO: 16414 - DNA, 203 bp, synthetic construct
  source 1..203: mol_type = other DNA
ggcgcgccagtcctaactacgttctctgacatttctgacatttctgacatttctgacatttctgacatccggcgggtttctgacatccggcgggtttctgacatttctgacatttctgacatccggcgggtttctgacatttctgacatttctgacatccggcgggtttctgacatccggcgggtttccgactcggaccgatg

SEQ ID NO: 16415 - DNA, 203 bp, synthetic construct
  source 1..203: mol_type = other DNA
ggcgcgccagtcctgacgtactaatctgacatttctgacatttctgacatttctgacatttctgacatccggcgggtttctgacatccggcgggtttctgacatttctgacatttctgacatccggcgggtttctgacatttctgacatttctgacatccggcgggtttctgacatttctgacatttccgactcggaccgatg

SEQ ID NO: 16416 - DNA, 203 bp, synthetic construct
  source 1..203: mol_type = other DNA
ggcgcgccagtcctgaccaacttatctgacatttctgacatttctgacatttctgacatttctgacatccggcgggtttctgacatccggcgggtttctgacatttctgacatttctgacatccggcgggtttctgacatttctgacatttctgacatttctgacatttctgacatccggcgggtttccgactcggaccgatg

SEQ ID NO: 16417 - DNA, 203 bp, synthetic construct
  source 1..203: mol_type = other DNA
ggcgcgccagtcctgaggtagttttctgacatttctgacatttctgacatttctgacatttctgacatccggcgggtttctgacatccggcgggtttctgacatttctgacatttctgacatttctgacatttctgacatccggcgggtttctgacatttctgacatttctgacatccggcgggtttccgactcggaccgatg

SEQ ID NO: 16418 - DNA, 203 bp, synthetic construct
  source 1..203: mol_type = other DNA
ggcgcgccagtcctgacgttgtattctgacatttctgacatttctgacatttctgacatttctgacatccggcgggtttctgacatccggcgggtttctgacatttctgacatttctgacatttctgacatttctgacatccggcgggtttctgacatttctgacatttctgacatttctgacatttccgactcggaccgatg

SEQ ID NO: 16419 - DNA, 203 bp, synthetic construct
  source 1..203: mol_type = other DNA
ggcgcgccagtcctcttcacctcttctgacatttctgacatttctgacatttctgacatttctgacatccggcgggtttctgacatccggcgggtttctgacatttctgacatttctgacatttctgacatttctgacatttctgacatttctgacatttctgacatttctgacatccggcgggtttccgactcggaccgatg

SEQ ID NO: 16420 - DNA, 203 bp, synthetic construct
  source 1..203: mol_type = other DNA
ggcgcgccagtccttttgagtcgttctgacatttctgacatttctgacatttctgacatttctgacatccggcgggtttctgacatttctgacatttctgacatccggcgggtttctgacatccggcgggtttctgacatccggcgggtttctgacatccggcgggtttctgacatccggcgggtttccgactcggaccgatg

SEQ ID NO: 16421 - DNA, 203 bp, synthetic construct
  source 1..203: mol_type = other DNA
ggcgcgccagtcctaacaggtgagtctgacatttctgacatttctgacatttctgacatttctgacatccggcgggtttctgacatttctgacatttctgacatccggcgggtttctgacatccggcgggtttctgacatttctgacatttctgacatttctgacatttctgacatccggcgggtttccgactcggaccgatg

SEQ ID NO: 16422 - DNA, 203 bp, synthetic construct
  source 1..203: mol_type = other DNA
ggcgcgccagtcctctgttagaggtctgacatttctgacatttctgacatttctgacatttctgacatccggcgggtttctgacatttctgacatttctgacatccggcgggtttctgacatccggcgggtttctgacatttctgacatttctgacatttctgacatttctgacatttctgacatttccgactcggaccgatg

SEQ ID NO: 16423 - DNA, 203 bp, synthetic construct
  source 1..203: mol_type = other DNA
ggcgcgccagtcctctctgtgcagtctgacatttctgacatttctgacatttctgacatttctgacatccggcgggtttctgacatttctgacatttctgacatccggcgggtttctgacatttctgacatttctgacatccggcgggtttctgacatccggcgggtttctgacatttctgacatttccgactcggaccgatg

SEQ ID NO: 16424 - DNA, 203 bp, synthetic construct
  source 1..203: mol_type = other DNA
ggcgcgccagtcctttcagaacgttctgacatttctgacatttctgacatttctgacatttctgacatccggcgggtttctgacatttctgacatttctgacatttctgacatttctgacatccggcgggtttctgacatttctgacatttctgacatccggcgggtttctgacatccggcgggtttccgactcggaccgatg

SEQ ID NO: 16425 - DNA, 203 bp, synthetic construct
  source 1..203: mol_type = other DNA
ggcgcgccagtcctgaatctcacttctgacatttctgacatttctgacatttctgacatttctgacatccggcgggtttctgacatttctgacatttctgacatttctgacatttctgacatttctgacatttctgacatccggcgggtttctgacatccggcgggtttctgacatccggcgggtttccgactcggaccgatg

SEQ ID NO: 16426 - DNA, 203 bp, synthetic construct
  source 1..203: mol_type = other DNA
ggcgcgccagtccttcaaggcgtttctgacatttctgacatttctgacatttctgacatttctgacatccggcgggtttctgacatttctgacatttctgacatttctgacatttctgacatttctgacatttctgacatccggcgggtttctgacatttctgacatttctgacatccggcgggtttccgactcggaccgatg

SEQ ID NO: 16427 - DNA, 203 bp, synthetic construct
  source 1..203: mol_type = other DNA
ggcgcgccagtcctcaagaacatttctgacatttctgacatttctgacatttctgacatttctgacatccggcgggtttctgacatttctgacatttctgacatttctgacatttctgacatttctgacatttctgacatttctgacatttctgacatccggcgggtttctgacatccggcgggtttccgactcggaccgatg

SEQ ID NO: 16428 - DNA, 203 bp, synthetic construct
  source 1..203: mol_type = other DNA
ggcgcgccagtcctgacgttgaggtctgacatttctgacatttctgacatttctgacatttctgacatccggcgggtttctgacatttctgacatttctgacatttctgacatttctgacatttctgacatttctgacatttctgacatttctgacatccggcgggtttctgacatttctgacatttccgactcggaccgatg

SEQ ID NO: 16429 - DNA, 203 bp, synthetic construct
  source 1..203: mol_type = other DNA
ggcgcgccagtccttggcctttgatctgacatttctgacatttctgacatttctgacatttctgacatcgtcaattcctttaacatcgtcaattcctttaacatcgtcaattcctttaacatcgtcaattcctttaacatttctgacatttctgacatcgtcaattcctttaacatttctgacatttccgactcggaccgatg

SEQ ID NO: 16430 - DNA, 203 bp, synthetic construct
  source 1..203: mol_type = other DNA
ggcgcgccagtcctctcaaggccatctgacatttctgacatttctgacatttctgacatttctgacatcgtcaattcctttaacatcgtcaattcctttaacatcgtcaattcctttaacatcgtcaattcctttaacatttctgacatttctgacatttctgacatttctgacatttctgacatttccgactcggaccgatg

SEQ ID NO: 16431 - DNA, 203 bp, synthetic construct
  source 1..203: mol_type = other DNA
ggcgcgccagtccttccaccgacttctgacatttctgacatttctgacatttctgacatttctgacatcgtcaattcctttaacatcgtcaattcctttaacatcgtcaattcctttaacatttctgacatttctgacatttctgacatttctgacatttctgacatttctgacatttctgacatttccgactcggaccgatg

SEQ ID NO: 16432 - DNA, 203 bp, synthetic construct
  source 1..203: mol_type = other DNA
ggcgcgccagtcctatggactctatctgacatttctgacatttctgacatttctgacatttctgacatcgtcaattcctttaacatcgtcaattcctttaacatttctgacatttctgacatcgtcaattcctttaacatttctgacatttctgacatttctgacatttctgacatttctgacatttccgactcggaccgatg

SEQ ID NO: 16433 - DNA, 203 bp, synthetic construct
  source 1..203: mol_type = other DNA
ggcgcgccagtcctttaggactaatctgacatttctgacatttctgacatttctgacatttctgacatcgtcaattcctttaacatcgtcaattcctttaacatttctgacatttctgacatttctgacatttctgacatttctgacatttctgacatttctgacatttctgacatttctgacatttccgactcggaccgatg

SEQ ID NO: 16434 - DNA, 203 bp, synthetic construct
  source 1..203: mol_type = other DNA
ggcgcgccagtcctacgtttctggtctgacatttctgacatttctgacatttctgacatttctgacatcgtcaattcctttaacatttctgacatttctgacatcgtcaattcctttaacatcgtcaattcctttaacatcgtcaattcctttaacatttctgacatttctgacatttctgacatttccgactcggaccgatg

SEQ ID NO: 16435 - DNA, 203 bp, synthetic construct
  source 1..203: mol_type = other DNA
ggcgcgccagtcctcagtttctgctctgacatttctgacatttctgacatttctgacatttctgacatcgtcaattcctttaacatttctgacatttctgacatcgtcaattcctttaacatcgtcaattcctttaacatttctgacatttctgacatcgtcaattcctttaacatttctgacatttccgactcggaccgatg

SEQ ID NO: 16436 - DNA, 203 bp, synthetic construct
  source 1..203: mol_type = other DNA
ggcgcgccagtcctacgatacagctctgacatttctgacatttctgacatttctgacatttctgacatcgtcaattcctttaacatttctgacatttctgacatcgtcaattcctttaacatttctgacatttctgacatcgtcaattcctttaacatcgtcaattcctttaacatttctgacatttccgactcggaccgatg

SEQ ID NO: 16437 - DNA, 203 bp, synthetic construct
  source 1..203: mol_type = other DNA
ggcgcgccagtcctctctaactgctctgacatttctgacatttctgacatttctgacatttctgacatcgtcaattcctttaacatttctgacatttctgacatcgtcaattcctttaacatttctgacatttctgacatttctgacatttctgacatcgtcaattcctttaacatttctgacatttccgactcggaccgatg

SEQ ID NO: 16438 - DNA, 203 bp, synthetic construct
  source 1..203: mol_type = other DNA
ggcgcgccagtcctatgaaaaggctctgacatttctgacatttctgacatttctgacatttctgacatcgtcaattcctttaacatttctgacatttctgacatttctgacatttctgacatcgtcaattcctttaacatcgtcaattcctttaacatttctgacatttctgacatttctgacatttccgactcggaccgatg

SEQ ID NO: 16439 - DNA, 203 bp, synthetic construct
  source 1..203: mol_type = other DNA
ggcgcgccagtcctacctgtaggctctgacatttctgacatttctgacatttctgacatttctgacatcgtcaattcctttaacatttctgacatttctgacatttctgacatttctgacatcgtcaattcctttaacatttctgacatttctgacatttctgacatttctgacatttctgacatttccgactcggaccgatg

SEQ ID NO: 16440 - DNA, 203 bp, synthetic construct
  source 1..203: mol_type = other DNA
ggcgcgccagtcctctaagagtgctctgacatttctgacatttctgacatttctgacatttctgacatcgtcaattcctttaacatttctgacatttctgacatttctgacatttctgacatttctgacatttctgacatttctgacatttctgacatcgtcaattcctttaacatttctgacatttccgactcggaccgatg

SEQ ID NO: 16441 - DNA, 203 bp, synthetic construct
  source 1..203: mol_type = other DNA
ggcgcgccagtcctgagactgagctctgacatttctgacatttctgacatttctgacatttctgacattactcccatttctgacattactcccatttctgacattactcccatttctgacattactcccatttctgacatttctgacatttctgacattactcccatttctgacattactcccatttccgactcggaccgatg

SEQ ID NO: 16442 - DNA, 203 bp, synthetic construct
  source 1..203: mol_type = other DNA
ggcgcgccagtcctcttcagaagctctgacatttctgacatttctgacatttctgacatttctgacattactcccatttctgacattactcccatttctgacattactcccatttctgacattactcccatttctgacatttctgacatttctgacattactcccatttctgacatttctgacatttccgactcggaccgatg

SEQ ID NO: 16443 - DNA, 203 bp, synthetic construct
  source 1..203: mol_type = other DNA
ggcgcgccagtccttgacgaaagctctgacatttctgacatttctgacatttctgacatttctgacattactcccatttctgacattactcccatttctgacattactcccatttctgacattactcccatttctgacatttctgacatttctgacatttctgacatttctgacattactcccatttccgactcggaccgatg

SEQ ID NO: 16444 - DNA, 203 bp, synthetic construct
  source 1..203: mol_type = other DNA
ggcgcgccagtcctagaccggtgctctgacatttctgacatttctgacatttctgacatttctgacattactcccatttctgacattactcccatttctgacattactcccatttctgacattactcccatttctgacatttctgacatttctgacatttctgacatttctgacatttctgacatttccgactcggaccgatg

SEQ ID NO: 16445 - DNA, 203 bp, synthetic construct
  source 1..203: mol_type = other DNA
ggcgcgccagtccttagtttgagctctgacatttctgacatttctgacatttctgacatttctgacattactcccatttctgacattactcccatttctgacattactcccatttctgacatttctgacatttctgacattactcccatttctgacattactcccatttctgacatttctgacatttccgactcggaccgatg

SEQ ID NO: 16446 - DNA, 203 bp, synthetic construct
  source 1..203: mol_type = other DNA
ggcgcgccagtcctatgcactagctctgacatttctgacatttctgacatttctgacatttctgacattactcccatttctgacattactcccatttctgacattactcccatttctgacatttctgacatttctgacatttctgacatttctgacattactcccatttctgacattactcccatttccgactcggaccgatg

SEQ ID NO: 16447 - DNA, 203 bp, synthetic construct
  source 1..203: mol_type = other DNA
ggcgcgccagtcctgaacacctgctctgacatttctgacatttctgacatttctgacatttctgacattactcccatttctgacattactcccatttctgacattactcccatttctgacatttctgacatttctgacatttctgacatttctgacatttctgacatttctgacattactcccatttccgactcggaccgatg

SEQ ID NO: 16448 - DNA, 203 bp, synthetic construct
  source 1..203: mol_type = other DNA
ggcgcgccagtcctgactctcagctctgacatttctgacatttctgacatttctgacatttctgacattactcccatttctgacattactcccatttctgacattactcccatttctgacatttctgacatttctgacatttctgacatttctgacatttctgacatttctgacatttctgacatttccgactcggaccgatg

SEQ ID NO: 16449 - DNA, 203 bp, synthetic construct
  source 1..203: mol_type = other DNA
ggcgcgccagtcctacacagaggctctgacatttctgacatttctgacatttctgacatttctgacattactcccatttctgacattactcccatttctgacatttctgacatttctgacatttctgacatttctgacattactcccatttctgacattactcccatttctgacatttctgacatttccgactcggaccgatg

SEQ ID NO: 16450 - DNA, 203 bp, synthetic construct
  source 1..203: mol_type = other DNA
ggcgcgccagtcctgctgagagtatctgacatttctgacatttctgacatttctgacatttctgacattactcccatttctgacattactcccatttctgacatttctgacatttctgacatttctgacatttctgacattactcccatttctgacatttctgacatttctgacatttctgacatttccgactcggaccgatg

SEQ ID NO: 16451 - DNA, 203 bp, synthetic construct
  source 1..203: mol_type = other DNA
ggcgcgccagtcctgctagtctgttctgacatttctgacatttctgacatttctgacatttctgacattactcccatttctgacattactcccatttctgacatttctgacatttctgacatttctgacatttctgacatttctgacatttctgacatttctgacatttctgacattactcccatttccgactcggaccgatg

SEQ ID NO: 16452 - DNA, 203 bp, synthetic construct
  source 1..203: mol_type = other DNA
ggcgcgccagtcctgcagtacagctctgacatttctgacatttctgacatttctgacatttctgacattactcccatttctgacatttctgacatttctgacattactcccatttctgacattactcccatttctgacattactcccatttctgacattactcccatttctgacatttctgacatttccgactcggaccgatg

SEQ ID NO: 16453 - DNA, 203 bp, synthetic construct
  source 1..203: mol_type = other DNA
ggcgcgccagtcctgcaaccgtcatctgacatttctgacatttctgacatttctgacatttctgacattactcccatttctgacatttctgacatttctgacattactcccatttctgacattactcccatttctgacattactcccatttctgacatttctgacatttctgacattactcccatttccgactcggaccgatg

SEQ ID NO: 16454 - DNA, 203 bp, synthetic construct
  source 1..203: mol_type = other DNA
ggcgcgccagtcctgcttgagctttctgacatttctgacatttctgacatttctgacatttctgacattactcccatttctgacatttctgacatttctgacattactcccatttctgacattactcccatttctgacatttctgacatttctgacattactcccatttctgacatttctgacatttccgactcggaccgatg

SEQ ID NO: 16455 - DNA, 203 bp, synthetic construct
  source 1..203: mol_type = other DNA
ggcgcgccagtcctgcctcttaagtctgacatttctgacatttctgacatttctgacatttctgacattactcccatttctgacatttctgacatttctgacattactcccatttctgacattactcccatttctgacatttctgacatttctgacatttctgacatttctgacattactcccatttccgactcggaccgatg

SEQ ID NO: 16456 - DNA, 203 bp, synthetic construct
  source 1..203: mol_type = other DNA
ggcgcgccagtcctgctaagacgatctgacatttctgacatttctgacatttctgacatttctgacattactcccatttctgacatttctgacatttctgacattactcccatttctgacatttctgacatttctgacattactcccatttctgacatttctgacatttctgacatttctgacatttccgactcggaccgatg

SEQ ID NO: 16457 - DNA, 203 bp, synthetic construct
  source 1..203: mol_type = other DNA
ggcgcgccagtcctgcaacgtttctctgacatttctgacatttctgacatttctgacatttctgacattactcccatttctgacatttctgacatttctgacattactcccatttctgacatttctgacatttctgacatttctgacatttctgacattactcccatttctgacattactcccatttccgactcggaccgatg

SEQ ID NO: 16458 - DNA, 203 bp, synthetic construct
  source 1..203: mol_type = other DNA
ggcgcgccagtcctgctcgtcaggtctgacatttctgacatttctgacatttctgacatttctgacattactcccatttctgacatttctgacatttctgacattactcccatttctgacatttctgacatttctgacatttctgacatttctgacatttctgacatttctgacattactcccatttccgactcggaccgatg

SEQ ID NO: 16459 - DNA, 203 bp, synthetic construct
  source 1..203: mol_type = other DNA
ggcgcgccagtcctgcctgaccaatctgacatttctgacatttctgacatttctgacatttctgacattactcccatttctgacatttctgacatttctgacatttctgacatttctgacattactcccatttctgacattactcccatttctgacattactcccatttctgacatttctgacatttccgactcggaccgatg

SEQ ID NO: 16460 - DNA, 203 bp, synthetic construct
  source 1..203: mol_type = other DNA
ggcgcgccagtcctgcaaaggccttctgacatttctgacatttctgacatttctgacatttctgacattactcccatttctgacatttctgacatttctgacatttctgacatttctgacattactcccatttctgacattactcccatttctgacatttctgacatttctgacatttctgacatttccgactcggaccgatg

SEQ ID NO: 16461 - DNA, 203 bp, synthetic construct
  source 1..203: mol_type = other DNA
ggcgcgccagtcctgccttcagcttctgacatttctgacatttctgacatttctgacatttctgacattactcccatttctgacatttctgacatttctgacatttctgacatttctgacattactcccatttctgacatttctgacatttctgacatttctgacatttctgacatttctgacatttccgactcggaccgatg

SEQ ID NO: 16462 - DNA, 203 bp, synthetic construct
  source 1..203: mol_type = other DNA
ggcgcgccagtcctgctgaatggttctgacatttctgacatttctgacatttctgacatttctgacattactcccatttctgacatttctgacatttctgacatttctgacatttctgacatttctgacatttctgacattactcccatttctgacattactcccatttctgacattactcccatttccgactcggaccgatg

SEQ ID NO: 16463 - DNA, 203 bp, synthetic construct
  source 1..203: mol_type = other DNA
ggcgcgccagtcctgctactctagtctgacatttctgacatttctgacatttctgacatttctgacattactcccatttctgacatttctgacatttctgacatttctgacatttctgacatttctgacatttctgacattactcccatttctgacatttctgacatttctgacattactcccatttccgactcggaccgatg

SEQ ID NO: 16464 - DNA, 203 bp, synthetic construct
  source 1..203: mol_type = other DNA
ggcgcgccagtcctgctaacctcttctgacatttctgacatttctgacatttctgacatttctgacattactcccatttctgacatttctgacatttctgacatttctgacatttctgacatttctgacatttctgacatttctgacatttctgacattactcccatttctgacatttctgacatttccgactcggaccgatg

SEQ ID NO: 16465 - DNA, 203 bp, synthetic construct
  source 1..203: mol_type = other DNA
ggcgcgccagtcctgccttactgctctgacatttctgacatttctgacatttctgacatttctgacattactcccatttctgacatttctgacatttctgacatttctgacatttctgacatttctgacatttctgacatttctgacatttctgacatttctgacatttctgacattactcccatttccgactcggaccgatg

SEQ ID NO: 16466 - DNA, 203 bp, synthetic construct
  source 1..203: mol_type = other DNA
ggcgcgccagtcctgctcaagttgtctgacatttctgacatttctgacatttctgacatttctgacattactcccatttctgacatttctgacatttctgacatttctgacatttctgacatttctgacatttctgacatttctgacatttctgacatttctgacatttctgacatttctgacatttccgactcggaccgatg

SEQ ID NO: 16467 - DNA, 203 bp, synthetic construct
  source 1..203: mol_type = other DNA
ggcgcgccagtcctgctctgcaagtctgacatttctgacatttctgacatttctgacatttctgacattcacggaatcgagaacatttctgacatttctgacatttctgacatttctgacatttctgacatttctgacatttctgacatttctgacatttctgacatttctgacatttctgacatttccgactcggaccgatg

SEQ ID NO: 16468 - DNA, 203 bp, synthetic construct
  source 1..203: mol_type = other DNA
ggcgcgccagtcctgctaaaggattctgacatttctgacatttctgacatttctgacatttctgacattcacggaatcgagaacatttctgacatttctgacatttctgacatttctgacatttctgacatttctgacatttctgacatttctgacatttctgacatttctgaccgtcaattcctttacgactcggaccgatg

SEQ ID NO: 16469 - DNA, 203 bp, synthetic construct
  source 1..203: mol_type = other DNA
ggcgcgccagtcctgctcttaagatctgacatttctgacatttctgacatttctgacatttctgacattctccccccggaacccaaagactttggtttcccggaagctgcccggcgggtcatgggaataacgccgccgcatcgccggtcggcatcgttttctgacatttctgacatttctgacatttccgactcggaccgatg

SEQ ID NO: 16470 - DNA, 203 bp, synthetic construct
  source 1..203: mol_type = other DNA
ggcgcgccagtcctgcagtatgcatctgacatttctgacatttctgacatttctgacatttctgacattgaaccataactgatttaatgagccattcgcagtttcactgtaccggccgtgcgtactcagacatgcatggcttaatctttgagacaagcatctgacatttctgacatttctgacatttccgactcggaccgatg

SEQ ID NO: 16471 - DNA, 203 bp, synthetic construct
  source 1..203: mol_type = other DNA
ggcgcgccagtcctctgaatgaaatctgacatttctgacatttctgacatttctgacatttctgacatttaccggccgtctgacatttctgacatttctgacatttctgacatttctgacatttctgacatttctgacatttctgacatttctgacatttctgacatttctgacattttcttggcaaacgactcggaccgatg

SEQ ID NO: 16472 - DNA, 203 bp, synthetic construct
  source 1..203: mol_type = other DNA
ggcgcgccagtcctgagaatcgtatctgacatttctgacatttctgacatttctgacatttctgacatttactccctttctgacatttctgacatttctgacatttctgacatttctgacatttctgacatttctgacatttctgacatttctgacatttctgacatttctgacatttctgtactccccgactcggaccgatg

SEQ ID NO: 16473 - DNA, 203 bp, synthetic construct
  source 1..203: mol_type = other DNA
ggcgcgccagtcctgagtgaactgtctgacatttctgacatttctgacatttctgacatttctgacatttcaccataactgatttaatgagccattcgcagtttcactgtaccggccgtgcgtactcagacatgcatggcttaatctttgagacaagtttctgacatttctgacatttctgacatttccgactcggaccgatg

SEQ ID NO: 16474 - DNA, 203 bp, synthetic construct
  source 1..203: mol_type = other DNA
ggcgcgccagtcctaacagttctttctgacatttctgacatttctgacatttctgacatttctgacatttcattaagccgcaggctccactcctggtggtgcccttccgtcaattcctttaagtttcagctttgcaaccatactccccccggaaccctttctgacatttctgacatttctgacatttccgactcggaccgatg

SEQ ID NO: 16475 - DNA, 203 bp, synthetic construct
  source 1..203: mol_type = other DNA
ggcgcgccagtcctacaagtgctctctgacatttctgacatttctgacatttctgacatttctgacatttcgcccttccgtcaattcctttaagtttcagctttgcaaccatactccccccggaacccaaagactttggtttcccggaagctgcccgtttctgacatttctgacatttctgacatttccgactcggaccgatg

SEQ ID NO: 16476 - DNA, 203 bp, synthetic construct
  source 1..203: mol_type = other DNA
ggcgcgccagtccttcaacgtaggtctgacatttctgacatttctgacatttctgacatttctgacatttctcccttccgtcaattcctttaagtttcagctttgcaaccatactccccccggaacccaaagactttggtttcccggaagctgcccatttctgacatttctgacatttctgacatttccgactcggaccgatg

SEQ ID NO: 16477 - DNA, 203 bp, synthetic construct
  source 1..203: mol_type = other DNA
ggcgcgccagtcctttgacctttatctgacatttctgacatttctgacatttctgacatttctgacatttctccggcgggtgacatttctgacatttctgacatttctgacatttctgacatttctgacatttctgacatttctgacatttctgacatttctgacatttctgacatttcccggcgggtcgactcggaccgatg

SEQ ID NO: 16478 - DNA, 203 bp, synthetic construct
  source 1..203: mol_type = other DNA
ggcgcgccagtcctaagctaacactctgacatttctgacatttctgacatttctgacatttctgacatttctcgtcaattcctttattctgacatttctgacatttctgacatttctgacatttctgacatttctgacatttctgacatttctgacatttctgacatttctgacattttcttggcaaacgactcggaccgatg

SEQ ID NO: 16479 - DNA, 203 bp, synthetic construct
  source 1..203: mol_type = other DNA
ggcgcgccagtcctgtagtgctaatctgacatttctgacatttctgacatttctgacatttctgacatttctgaaccggccgtcatttctgacatttctgacatttctgacatttctgacatttctgacatttctgacatttctgacatttctgacatttctgacatttctgaccacggaatcgagaacgactcggaccgatg

SEQ ID NO: 16480 - DNA, 203 bp, synthetic construct
  source 1..203: mol_type = other DNA
ggcgcgccagtcctgtaaagtggttctgacatttctgacatttctgacatttctgacatttctgacatttctgacacaccaactaagaacggccatgcaccaccacccacggaatcgagaaagagctatcaatctgtcaatcctgtccgtgttgacatttctgacatttctgacatttctgacatttccgactcggaccgatg

SEQ ID NO: 16481 - DNA, 203 bp, synthetic construct
  source 1..203: mol_type = other DNA
ggcgcgccagtcctctgtgtacactctgacatttctgacatttctgacatttctgacatttctgacatttctgacacacggaatcgagaagacatttctgacatttctgacatttctgacatttctgacatttctgacatttctgacatttctgacatttctgacatttctgacatttctgacatttccgactcggaccgatg

SEQ ID NO: 16482 - DNA, 203 bp, synthetic construct
  source 1..203: mol_type = other DNA
ggcgcgccagtcctgtgaatgttgtctgacatttctgacatttctgacatttctgacatttctgacatttctgacacacggaatcgagaagacatttctgacatttctgacatttctgacatttctgacatttctgacatttctgacatttctgacatttctgacatttctgacatttctgtactccccgactcggaccgatg

SEQ ID NO: 16483 - DNA, 203 bp, synthetic construct
  source 1..203: mol_type = other DNA
ggcgcgccagtcctgtctgagaaatctgacatttctgacatttctgacatttctgacatttctgacatttctgacacggaatcgagaactgacatttctgacatttctgacatttctgacatttctgacatttctgacatttctgacatttctgacatttctgacatttctgacatttcaccggccgtcgactcggaccgatg

SEQ ID NO: 16484 - DNA, 203 bp, synthetic construct
  source 1..203: mol_type = other DNA
ggcgcgccagtcctgaccgagaactctgacatttctgacatttctgacatttctgacatttctgacatttctgacacggaatcgagaactgacatttctgacatttctgacatttctgacatttctgacatttctgacatttctgacatttctgacatttctgacatttctgacatttcccggcgggtcgactcggaccgatg

SEQ ID NO: 16485 - DNA, 203 bp, synthetic construct
  source 1..203: mol_type = other DNA
ggcgcgccagtcctgtctcatgactctgacatttctgacatttctgacatttctgacatttctgacatttctgacacgtcaattcctttagacatttctgacatttctgacatttctgacatttctgacatttctgacatttctgacatttctgacatttctgacatttctgaccgtcaattcctttacgactcggaccgatg

SEQ ID NO: 16486 - DNA, 203 bp, synthetic construct
  source 1..203: mol_type = other DNA
ggcgcgccagtcctctaagaagactctgacatttctgacatttctgacatttctgacatttctgacatttctgacagccgcaggctccactcctggtggtgcccttccgtcaattcctttaagtttcagctttgcaaccatactccccccggagacatttctgacatttctgacatttctgacatttccgactcggaccgatg

SEQ ID NO: 16487 - DNA, 203 bp, synthetic construct
  source 1..203: mol_type = other DNA
ggcgcgccagtcctgtaacggtattctgacatttctgacatttctgacatttctgacatttctgacatttctgacataccggccgtttctgacatttctgacatttctgacatttctgacatttctgacatttctgacatttctgacatttctgacatttctgacatttctgacattttcttggcaaacgactcggaccgatg

SEQ ID NO: 16488 - DNA, 203 bp, synthetic construct
  source 1..203: mol_type = other DNA
ggcgcgccagtcctgtccagaggctctgacatttctgacatttctgacatttctgacatttctgacatttctgacatactccccatttctgacatttctgacatttctgacatttctgacatttctgacatttctgacatttctgacatttctgacatttctgacatttctgacatttctgtactccccgactcggaccgatg

SEQ ID NO: 16489 - DNA, 203 bp, synthetic construct
  source 1..203: mol_type = other DNA
ggcgcgccagtcctgtagttagcttctgacatttctgacatttctgacatttctgacatttctgacatttctgacatactgatttaatgagccattcgcagtttcactgtaccggccgtgcgtactcagacatgcatggcttaatctttgactgacatttctgacatttctgacatttctgacatttccgactcggaccgatg

SEQ ID NO: 16490 - DNA, 203 bp, synthetic construct
  source 1..203: mol_type = other DNA
ggcgcgccagtcctgtggttgacttctgacatttctgacatttctgacatttctgacatttctgacatttctgacatccgcaggctccactcctggtggtgcccttccgtcaattcctttaagtttcagctttgcaaccatactccccccgctgacatttctgacatttctgacatttctgacatttccgactcggaccgatg

SEQ ID NO: 16491 - DNA, 203 bp, synthetic construct
  source 1..203: mol_type = other DNA
ggcgcgccagtcctctgacaaaactctgacatttctgacatttctgacatttctgacatttctgacatttctgacatttaacccaaagactttggtttcccggaagctgcccggcgggtcatgggaataacgccgccgcatcgccggtcttctgacatttctgacatttctgacatttctgacatttccgactcggaccgatg

SEQ ID NO: 16492 - DNA, 203 bp, synthetic construct
  source 1..203: mol_type = other DNA
ggcgcgccagtcctcagtaactactctgacatttctgacatttctgacatttctgacatttctgacatttctgacatttaccggccgtctgacatttctgacatttctgacatttctgacatttctgacatttctgacatttctgacatttctgacatttctgacatttctgacatttcaccggccgtcgactcggaccgatg

SEQ ID NO: 16493 - DNA, 203 bp, synthetic construct
  source 1..203: mol_type = other DNA
ggcgcgccagtcctgtgaactgtctctgacatttctgacatttctgacatttctgacatttctgacatttctgacatttcccgactttcgttcttgattaatgaaaacattcttggcaaatgctttcgctctggtccgtcttgcgccgtttctgacatttctgacatttctgacatttctgacatttccgactcggaccgatg

SEQ ID NO: 16494 - DNA, 203 bp, synthetic construct
  source 1..203: mol_type = other DNA
ggcgcgccagtcctgttcaagaactctgacatttctgacatttctgacatttctgacatttctgacatttctgacatttcgatttaatgagccattcgcagtttcactgtaccggccgtgcgtactcagacatgcatggcttaatctttttctgacatttctgacatttctgacatttctgacatttccgactcggaccgatg

SEQ ID NO: 16495 - DNA, 203 bp, synthetic construct
  source 1..203: mol_type = other DNA
ggcgcgccagtcctctaacgttactctgacatttctgacatttctgacatttctgacatttctgacatttctgacatttctaggctccactcctggtggtgcccttccgtcaattcctttaagtttcagctttgcaaccatactcccatttctgacatttctgacatttctgacatttctgacatttccgactcggaccgatg

SEQ ID NO: 16496 - DNA, 203 bp, synthetic construct
  source 1..203: mol_type = other DNA
ggcgcgccagtcctgtgagagccttctgacatttctgacatttctgacatttctgacatttctgacatttctgacatttctcccaaagactttggtttcccggaagctgcccggcgggtcatgggaataacgccgccgcatcgccggatttctgacatttctgacatttctgacatttctgacatttccgactcggaccgatg

SEQ ID NO: 16497 - DNA, 203 bp, synthetic construct
  source 1..203: mol_type = other DNA
ggcgcgccagtcctgtatggttgctctgacatttctgacatttctgacatttctgacatttctgacatttctgacatttctccggcgggtgacatttctgacatttctgacatttctgacatttctgacatttctgacatttctgacatttctgacatttctgacatttctgacatttctgacatttccgactcggaccgatg

SEQ ID NO: 16498 - DNA, 203 bp, synthetic construct
  source 1..203: mol_type = other DNA
ggcgcgccagtcctcagtccaaactctgacatttctgacatttctgacatttctgacatttctgacatttctgacatttctccggcgggtgacatttctgacatttctgacatttctgacatttctgacatttctgacatttctgacatttctgacatttctgacatttctgacatttctgtactccccgactcggaccgatg

SEQ ID NO: 16499 - DNA, 203 bp, synthetic construct
  source 1..203: mol_type = other DNA
ggcgcgccagtcctcctcggtcactctgacatttctgacatttctgacatttctgacatttctgacatttctgacatttctccggcgggtgacatttctgacatttctgacatttctgacatttctgacatttctgacatttctgacatttctgacatttctgacatttctgaccgtcaattcctttacgactcggaccgatg

SEQ ID NO: 16500 - DNA, 203 bp, synthetic construct
  source 1..203: mol_type = other DNA
ggcgcgccagtcctgagtagatactctgacatttctgacatttctgacatttctgacatttctgacatttctgacatttctgaactttcgttcttgattaatgaaaacattcttggcaaatgctttcgctctggtccgtcttgcgacatttctgacatttctgacatttctgacatttctgacatttccgactcggaccgatg

SEQ ID NO: 16501 - DNA, 203 bp, synthetic construct
  source 1..203: mol_type = other DNA
ggcgcgccagtcctgttcaccatttctgacatttctgacatttctgacatttctgacatttctgacatttctgacatttctgacaaagactttggtttcccggaagctgcccggcgggtcatgggaataacgccgccgcatcgccacatttctgacatttctgacatttctgacatttctgacatttccgactcggaccgatg

SEQ ID NO: 16502 - DNA, 203 bp, synthetic construct
  source 1..203: mol_type = other DNA
ggcgcgccagtcctcctctgctactctgacatttctgacatttctgacatttctgacatttctgacatttctgacatttctgacaaagactttggtttcccggaagctgcccggcgggtcatgggaataacgccgccgcatcgcgacatttctgacatttctgacatttctgacatttctgacatttccgactcggaccgatg

SEQ ID NO: 16503 - DNA, 203 bp, synthetic construct
  source 1..203: mol_type = other DNA
ggcgcgccagtcctgtgaccggtttctgacatttctgacatttctgacatttctgacatttctgacatttctgacatttctgacaaagactttggtttcccggaagctgcccggcgggtcatgggaataacgccgccgcatcgtgacatttctgacatttctgacatttctgacatttctgacatttccgactcggaccgatg

SEQ ID NO: 16504 - DNA, 203 bp, synthetic construct
  source 1..203: mol_type = other DNA
ggcgcgccagtcctactagtagactctgacatttctgacatttctgacatttctgacatttctgacatttctgacatttctgacaaatgagccattcgcagtttcactgtaccggccgtgcgtactcagacatgcatggcttatgacatttctgacatttctgacatttctgacatttctgacatttccgactcggaccgatg

SEQ ID NO: 16505 - DNA, 203 bp, synthetic construct
  source 1..203: mol_type = other DNA
ggcgcgccagtcctgactctgtactctgacatttctgacatttctgacatttctgacatttctgacatttctgacatttctgacaagaacggccatgcaccaccacccacggaatcgagaaagagctatcaatctgtcaatcctgacatttctgacatttctgacatttctgacatttctgacatttccgactcggaccgatg

SEQ ID NO: 16506 - DNA, 203 bp, synthetic construct
  source 1..203: mol_type = other DNA
ggcgcgccagtcctgctgaacaactctgacatttctgacatttctgacatttctgacatttctgacatttctgacatttctgacaccggccgtatttctgacatttctgacatttctgacatttctgacatttctgacatttctgacatttctgacatttctgacatttctgacattttcttggcaaacgactcggaccgatg

SEQ ID NO: 16507 - DNA, 203 bp, synthetic construct
  source 1..203: mol_type = other DNA
ggcgcgccagtcctgagtggtcactctgacatttctgacatttctgacatttctgacatttctgacatttctgacatttctgacacggaatcgagaactgacatttctgacatttctgacatttctgacatttctgacatttctgacatttctgacatttctgacatttctgacatttctgacatttccgactcggaccgatg

SEQ ID NO: 16508 - DNA, 203 bp, synthetic construct
  source 1..203: mol_type = other DNA
ggcgcgccagtcctgtcaacgtactctgacatttctgacatttctgacatttctgacatttctgacatttctgacatttctgacacggaatcgagaactgacatttctgacatttctgacatttctgacatttctgacatttctgacatttctgacatttctgacatttctgaccacggaatcgagaacgactcggaccgatg

SEQ ID NO: 16509 - DNA, 203 bp, synthetic construct
  source 1..203: mol_type = other DNA
ggcgcgccagtccttgctgagcactctgacatttctgacatttctgacatttctgacatttctgacatttctgacatttctgacataacggaatcgagaaacataacggaatcgagaaacataacggaatcgagaaacataacggaatcgagaaacataacggaatcgagaaacatttctgacatttccgactcggaccgatg

SEQ ID NO: 16510 - DNA, 203 bp, synthetic construct
  source 1..203: mol_type = other DNA
ggcgcgccagtcctgtgagtactctctgacatttctgacatttctgacatttctgacatttctgacatttctgacatttctgacataaggcgggtttctgacataaggcgggtttctgacataaggcgggtttctgacataaggcgggtttctgacataaggcgggtttctgacatttctgacatttccgactcggaccgatg

SEQ ID NO: 16511 - DNA, 203 bp, synthetic construct
  source 1..203: mol_type = other DNA
ggcgcgccagtccttgaatcctactctgacatttctgacatttctgacatttctgacatttctgacatttctgacatttctgacatacccgccgtttctgacatacccgccgtttctgacatacccgccgtttctgacatacccgccgtttctgacatacccgccgtttctgacatttctgacatttccgactcggaccgatg

SEQ ID NO: 16512 - DNA, 203 bp, synthetic construct
  source 1..203: mol_type = other DNA
ggcgcgccagtcctagtggtcaactctgacatttctgacatttctgacatttctgacatttctgacatttctgacatttctgacataccgatcgtttctgacataccgatcgtttctgacataccgatcgtttctgacataccgatcgtttctgacataccgatcgtttctgacatttctgacatttccgactcggaccgatg

SEQ ID NO: 16513 - DNA, 203 bp, synthetic construct
  source 1..203: mol_type = other DNA
ggcgcgccagtcctcagaagttactctgacatttctgacatttctgacatttctgacatttctgacatttctgacatttctgacataccgcacgtttctgacataccgcacgtttctgacataccgcacgtttctgacataccgcacgtttctgacataccgcacgtttctgacatttctgacatttccgactcggaccgatg

SEQ ID NO: 16514 - DNA, 203 bp, synthetic construct
  source 1..203: mol_type = other DNA
ggcgcgccagtcctgttaacagactctgacatttctgacatttctgacatttctgacatttctgacatttctgacatttctgacataccgcgcgtttctgacataccgcgcgtttctgacataccgcgcgtttctgacataccgcgcgtttctgacataccgcgcgtttctgacatttctgacatttccgactcggaccgatg

SEQ ID NO: 16515 - DNA, 203 bp, synthetic construct
  source 1..203: mol_type = other DNA
ggcgcgccagtccttgagcaccactctgacatttctgacatttctgacatttctgacatttctgacatttctgacatttctgacataccgctcgtttctgacataccgctcgtttctgacataccgctcgtttctgacataccgctcgtttctgacataccgctcgtttctgacatttctgacatttccgactcggaccgatg

SEQ ID NO: 16516 - DNA, 203 bp, synthetic construct
  source 1..203: mol_type = other DNA
ggcgcgccagtccttgcaagtaactctgacatttctgacatttctgacatttctgacatttctgacatttctgacatttctgacataccggaatcgagaaacataccggaatcgagaaacataccggaatcgagaaacataccggaatcgagaaacataccggaatcgagaaacatttctgacatttccgactcggaccgatg

SEQ ID NO: 16517 - DNA, 203 bp, synthetic construct
  source 1..203: mol_type = other DNA
ggcgcgccagtcctgtcagtagattctgacatttctgacatttctgacatttctgacatttctgacatttctgacatttctgacataccggccaattctgacataccggccaattctgacataccggccaattctgacataccggccaattctgacataccggccaattctgacatttctgacatttccgactcggaccgatg

SEQ ID NO: 16518 - DNA, 203 bp, synthetic construct
  source 1..203: mol_type = other DNA
ggcgcgccagtcctctaagttcactctgacatttctgacatttctgacatttctgacatttctgacatttctgacatttctgacataccggccagttctgacataccggccagttctgacataccggccagttctgacataccggccagttctgacataccggccagttctgacatttctgacatttccgactcggaccgatg

SEQ ID NO: 16519 - DNA, 203 bp, synthetic construct
  source 1..203: mol_type = other DNA
ggcgcgccagtcctattctgttcatctgacatttctgacatttctgacatttctgacatttctgacatttctgacatttctgacataccggccccttctgacataccggccccttctgacataccggccccttctgacataccggccccttctgacataccggccccttctgacatttctgacatttccgactcggaccgatg

SEQ ID NO: 16520 - DNA, 203 bp, synthetic construct
  source 1..203: mol_type = other DNA
ggcgcgccagtcctcaacgaatactctgacatttctgacatttctgacatttctgacatttctgacatttctgacatttctgacataccggccgcttctgacataccggccgcttctgacataccggccgcttctgacataccggccgcttctgacataccggccgcttctgacatttctgacatttccgactcggaccgatg

SEQ ID NO: 16521 - DNA, 203 bp, synthetic construct
  source 1..203: mol_type = other DNA
ggcgcgccagtcctatgaatcgaatctgacatttctgacatttctgacatttctgacatttctgacatttctgacatttctgacataccggccgtttctgacataccggccgtttctgacataccggccgtttctgacataccggccgtttctgacatttctgacatttctgacataccggccgtttccgactcggaccgatg

SEQ ID NO: 16522 - DNA, 203 bp, synthetic construct
  source 1..203: mol_type = other DNA
ggcgcgccagtcctgtttgaactctctgacatttctgacatttctgacatttctgacatttctgacatttctgacatttctgacataccggccgtttctgacataccggccgtttctgacataccggccgtttctgacatttctgacatttctgacatttctgacatttctgacataccggccgtttccgactcggaccgatg

SEQ ID NO: 16523 - DNA, 203 bp, synthetic construct
  source 1..203: mol_type = other DNA
ggcgcgccagtcctctcaccatgttctgacatttctgacatttctgacatttctgacatttctgacatttctgacatttctgacataccggccgtttctgacataccggccgtttctgacataccggccgtttctgacatttctgacatttctgacatttctgacatttctgacatttctgacatttccgactcggaccgatg

SEQ ID NO: 16524 - DNA, 203 bp, synthetic construct
  source 1..203: mol_type = other DNA
ggcgcgccagtcctttaggctcactctgacatttctgacatttctgacatttctgacatttctgacatttctgacatttctgacataccggccgtttctgacataccggccgtttctgacatttctgacatttctgacataccggccgtttctgacataccggccgtttctgacatttctgacatttccgactcggaccgatg

SEQ ID NO: 16525 - DNA, 203 bp, synthetic construct
  source 1..203: mol_type = other DNA
ggcgcgccagtcctcatgctctggtctgacatttctgacatttctgacatttctgacatttctgacatttctgacatttctgacataccggccgtttctgacataccggccgtttctgacatttctgacatttctgacatttctgacatttctgacataccggccgtttctgacatttctgacatttccgactcggaccgatg

SEQ ID NO: 16526 - DNA, 203 bp, synthetic construct
  source 1..203: mol_type = other DNA
ggcgcgccagtcctcacagcatggtctgacatttctgacatttctgacatttctgacatttctgacatttctgacatttctgacataccggccgtttctgacataccggccgtttctgacatttctgacatttctgacatttctgacatttctgacatttctgacatttctgacatttctgacatttccgactcggaccgatg

SEQ ID NO: 16527 - DNA, 203 bp, synthetic construct
  source 1..203: mol_type = other DNA
ggcgcgccagtccttgaagacgactctgacatttctgacatttctgacatttctgacatttctgacatttctgacatttctgacataccggccgtttctgacatttctgacatttctgacataccggccgtttctgacataccggccgtttctgacataccggccgtttctgacataccggccgtttccgactcggaccgatg

SEQ ID NO: 16528 - DNA, 203 bp, synthetic construct
  source 1..203: mol_type = other DNA
ggcgcgccagtcctgatcacaagttctgacatttctgacatttctgacatttctgacatttctgacatttctgacatttctgacataccggccgtttctgacatttctgacatttctgacataccggccgtttctgacataccggccgtttctgacataccggccgtttctgacatttctgacatttccgactcggaccgatg

SEQ ID NO: 16529 - DNA, 203 bp, synthetic construct
  source 1..203: mol_type = other DNA
ggcgcgccagtcctatcatggtgctctgacatttctgacatttctgacatttctgacatttctgacatttctgacatttctgacataccggccgtttctgacatttctgacatttctgacataccggccgtttctgacataccggccgtttctgacatttctgacatttctgacatttctgacatttccgactcggaccgatg

SEQ ID NO: 16530 - DNA, 203 bp, synthetic construct
  source 1..203: mol_type = other DNA
ggcgcgccagtccttcagcaagcatctgacatttctgacatttctgacatttctgacatttctgacatttctgacatttctgacataccggccgtttctgacatttctgacatttctgacataccggccgtttctgacatttctgacatttctgacataccggccgtttctgacataccggccgtttccgactcggaccgatg

SEQ ID NO: 16531 - DNA, 203 bp, synthetic construct
  source 1..203: mol_type = other DNA
ggcgcgccagtcctagagtcctagtctgacatttctgacatttctgacatttctgacatttctgacatttctgacatttctgacataccggccgtttctgacatttctgacatttctgacataccggccgtttctgacatttctgacatttctgacatttctgacatttctgacatttctgacatttccgactcggaccgatg

SEQ ID NO: 16532 - DNA, 203 bp, synthetic construct
  source 1..203: mol_type = other DNA
ggcgcgccagtcctcagagtcctatctgacatttctgacatttctgacatttctgacatttctgacatttctgacatttctgacataccggccgtttctgacatttctgacatttctgacatttctgacatttctgacataccggccgtttctgacataccggccgtttctgacataccggccgtttccgactcggaccgatg

SEQ ID NO: 16533 - DNA, 203 bp, synthetic construct
  source 1..203: mol_type = other DNA
ggcgcgccagtcctccaaagtgcatctgacatttctgacatttctgacatttctgacatttctgacatttctgacatttctgacataccggccgtttctgacatttctgacatttctgacatttctgacatttctgacataccggccgtttctgacataccggccgtttctgacatttctgacatttccgactcggaccgatg

SEQ ID NO: 16534 - DNA, 203 bp, synthetic construct
  source 1..203: mol_type = other DNA
ggcgcgccagtcctgtgcacttcttctgacatttctgacatttctgacatttctgacatttctgacatttctgacatttctgacataccggccgtttctgacatttctgacatttctgacatttctgacatttctgacataccggccgtttctgacatttctgacatttctgacataccggccgtttccgactcggaccgatg

SEQ ID NO: 16535 - DNA, 203 bp, synthetic construct
  source 1..203: mol_type = other DNA
ggcgcgccagtcctaccgtcagtgtctgacatttctgacatttctgacatttctgacatttctgacatttctgacatttctgacataccggccgtttctgacatttctgacatttctgacatttctgacatttctgacatttctgacatttctgacataccggccgtttctgacataccggccgtttccgactcggaccgatg

SEQ ID NO: 16536 - DNA, 203 bp, synthetic construct
  source 1..203: mol_type = other DNA
ggcgcgccagtcctaccgttcatatctgacatttctgacatttctgacatttctgacatttctgacatttctgacatttctgacataccggcctcttctgacataccggcctcttctgacataccggcctcttctgacataccggcctcttctgacataccggcctcttctgacatttctgacatttccgactcggaccgatg

SEQ ID NO: 16537 - DNA, 203 bp, synthetic construct
  source 1..203: mol_type = other DNA
ggcgcgccagtcctagcaccgttctctgacatttctgacatttctgacatttctgacatttctgacatttctgacatttctgacataccggcctgttctgacataccggcctgttctgacataccggcctgttctgacataccggcctgttctgacataccggcctgttctgacatttctgacatttccgactcggaccgatg

SEQ ID NO: 16538 - DNA, 203 bp, synthetic construct
  source 1..203: mol_type = other DNA
ggcgcgccagtcctgctgtgaccatctgacatttctgacatttctgacatttctgacatttctgacatttctgacatttctgacataccggcggtttctgacataccggcggtttctgacataccggcggtttctgacataccggcggtttctgacataccggcggtttctgacatttctgacatttccgactcggaccgatg

SEQ ID NO: 16539 - DNA, 203 bp, synthetic construct
  source 1..203: mol_type = other DNA
ggcgcgccagtccttgtgaccgactctgacatttctgacatttctgacatttctgacatttctgacatttctgacatttctgacataccggcgttttctgacataccggcgttttctgacataccggcgttttctgacataccggcgttttctgacataccggcgttttctgacatttctgacatttccgactcggaccgatg

SEQ ID NO: 16540 - DNA, 203 bp, synthetic construct
  source 1..203: mol_type = other DNA
ggcgcgccagtcctgaggtcacactctgacatttctgacatttctgacatttctgacatttctgacatttctgacatttctgacataccggctctttctgacataccggctctttctgacataccggctctttctgacataccggctctttctgacataccggctctttctgacatttctgacatttccgactcggaccgatg

SEQ ID NO: 16541 - DNA, 203 bp, synthetic construct
  source 1..203: mol_type = other DNA
ggcgcgccagtcctcatgttcgtttctgacatttctgacatttctgacatttctgacatttctgacatttctgacatttctgacataccggctgtttctgacataccggctgtttctgacataccggctgtttctgacataccggctgtttctgacataccggctgtttctgacatttctgacatttccgactcggaccgatg

SEQ ID NO: 16542 - DNA, 203 bp, synthetic construct
  source 1..203: mol_type = other DNA
ggcgcgccagtcctaatgagcctttctgacatttctgacatttctgacatttctgacatttctgacatttctgacatttctgacataccgtgcgtttctgacataccgtgcgtttctgacataccgtgcgtttctgacataccgtgcgtttctgacataccgtgcgtttctgacatttctgacatttccgactcggaccgatg

SEQ ID NO: 16543 - DNA, 203 bp, synthetic construct
  source 1..203: mol_type = other DNA
ggcgcgccagtccttacgttcttatctgacatttctgacatttctgacatttctgacatttctgacatttctgacatttctgacatacgcgccgtttctgacatacgcgccgtttctgacatacgcgccgtttctgacatacgcgccgtttctgacatacgcgccgtttctgacatttctgacatttccgactcggaccgatg

SEQ ID NO: 16544 - DNA, 203 bp, synthetic construct
  source 1..203: mol_type = other DNA
ggcgcgccagtcctagctaacgtatctgacatttctgacatttctgacatttctgacatttctgacatttctgacatttctgacatacggccggtttctgacatacggccggtttctgacatacggccggtttctgacatacggccggtttctgacatacggccggtttctgacatttctgacatttccgactcggaccgatg

SEQ ID NO: 16545 - DNA, 203 bp, synthetic construct
  source 1..203: mol_type = other DNA
ggcgcgccagtcctttggactgaatctgacatttctgacatttctgacatttctgacatttctgacatttctgacatttctgacatacgtgccgtttctgacatacgtgccgtttctgacatacgtgccgtttctgacatacgtgccgtttctgacatacgtgccgtttctgacatttctgacatttccgactcggaccgatg

SEQ ID NO: 16546 - DNA, 203 bp, synthetic construct
  source 1..203: mol_type = other DNA
ggcgcgccagtcctttcagtgtactctgacatttctgacatttctgacatttctgacatttctgacatttctgacatttctgacatactcgccgtttctgacatactcgccgtttctgacatactcgccgtttctgacatactcgccgtttctgacatactcgccgtttctgacatttctgacatttccgactcggaccgatg

SEQ ID NO: 16547 - DNA, 203 bp, synthetic construct
  source 1..203: mol_type = other DNA
ggcgcgccagtcctttactgaatttctgacatttctgacatttctgacatttctgacatttctgacatttctgacatttctgacatagcggccgtttctgacatagcggccgtttctgacatagcggccgtttctgacatagcggccgtttctgacatagcggccgtttctgacatttctgacatttccgactcggaccgatg

SEQ ID NO: 16548 - DNA, 203 bp, synthetic construct
  source 1..203: mol_type = other DNA
ggcgcgccagtcctacccaactggtctgacatttctgacatttctgacatttctgacatttctgacatttctgacatttctgacatatctcccatttctgacatatctcccatttctgacatatctcccatttctgacatatctcccatttctgacatatctcccatttctgacatttctgacatttccgactcggaccgatg

SEQ ID NO: 16549 - DNA, 203 bp, synthetic construct
  source 1..203: mol_type = other DNA
ggcgcgccagtcctgttgggtcagtctgacatttctgacatttctgacatttctgacatttctgacatttctgacatttctgacatatgagccattcgcagtttcactgtaccggccgtgcgtactcagacatgcatggcttctgacatttctgacatttctgacatttctgacatttctgacatttccgactcggaccgatg

SEQ ID NO: 16550 - DNA, 203 bp, synthetic construct
  source 1..203: mol_type = other DNA
ggcgcgccagtcctaaagagagactctgacatttctgacatttctgacatttctgacatttctgacatttctgacatttctgacatcacgaaatcgagaaacatcacgaaatcgagaaacatcacgaaatcgagaaacatcacgaaatcgagaaacatcacgaaatcgagaaacatttctgacatttccgactcggaccgatg

SEQ ID NO: 16551 - DNA, 203 bp, synthetic construct
  source 1..203: mol_type = other DNA
ggcgcgccagtcctagtcacagtttctgacatttctgacatttctgacatttctgacatttctgacatttctgacatttctgacatcacggaatcaagaaacatcacggaatcaagaaacatcacggaatcaagaaacatcacggaatcaagaaacatcacggaatcaagaaacatttctgacatttccgactcggaccgatg

SEQ ID NO: 16552 - DNA, 203 bp, synthetic construct
  source 1..203: mol_type = other DNA
ggcgcgccagtcctaatcagagcttctgacatttctgacatttctgacatttctgacatttctgacatttctgacatttctgacatcacggaatccagaaacatcacggaatccagaaacatcacggaatccagaaacatcacggaatccagaaacatcacggaatccagaaacatttctgacatttccgactcggaccgatg

SEQ ID NO: 16553 - DNA, 203 bp, synthetic construct
  source 1..203: mol_type = other DNA
ggcgcgccagtcctgaccaccgtgtctgacatttctgacatttctgacatttctgacatttctgacatttctgacatttctgacatcacggaatcgaaaaacatcacggaatcgaaaaacatcacggaatcgaaaaacatcacggaatcgaaaaacatcacggaatcgaaaaacatttctgacatttccgactcggaccgatg

SEQ ID NO: 16554 - DNA, 203 bp, synthetic construct
  source 1..203: mol_type = other DNA
ggcgcgccagtcctacggtggttttctgacatttctgacatttctgacatttctgacatttctgacatttctgacatttctgacatcacggaatcgacaaacatcacggaatcgacaaacatcacggaatcgacaaacatcacggaatcgacaaacatcacggaatcgacaaacatttctgacatttccgactcggaccgatg

SEQ ID NO: 16555 - DNA, 203 bp, synthetic construct
  source 1..203: mol_type = other DNA
ggcgcgccagtccttccaggtggttctgacatttctgacatttctgacatttctgacatttctgacatttctgacatttctgacatcacggaatcgagaaacatcacggaatcgagaaacatcacggaatcgagaaacatcacggaatcgagaaacatcacggaatcgagaaacatttctgacatttccgactcggaccgatg

SEQ ID NO: 16556 - DNA, 203 bp, synthetic construct
  source 1..203: mol_type = other DNA
ggcgcgccagtccttttggtgaaatctgacatttctgacatttctgacatttctgacatttctgacatttctgacatttctgacatcacggaatcgagaaacatcacggaatcgagaaacatcacggaatcgagaaacatttctgacatttctgacatcacggaatcgagaaacatttctgacatttccgactcggaccgatg

SEQ ID NO: 16557 - DNA, 203 bp, synthetic construct
  source 1..203: mol_type = other DNA
ggcgcgccagtccttaaccgtaactctgacatttctgacatttctgacatttctgacatttctgacatttctgacatttctgacatcacggaatcgagaaacatcacggaatcgagaaacatttctgacatttctgacatttctgacatttctgacatttctgacatttctgacatttctgacatttccgactcggaccgatg

SEQ ID NO: 16558 - DNA, 203 bp, synthetic construct
  source 1..203: mol_type = other DNA
ggcgcgccagtcctaccgtagccttctgacatttctgacatttctgacatttctgacatttctgacatttctgacatttctgacatcacggaatcgagaaacatttctgacatttctgacatcacggaatcgagaaacatttctgacatttctgacatttctgacatttctgacatttctgacatttccgactcggaccgatg

SEQ ID NO: 16559 - DNA, 203 bp, synthetic construct
  source 1..203: mol_type = other DNA
ggcgcgccagtcctctacggttaatctgacatttctgacatttctgacatttctgacatttctgacatttctgacatttctgacatcacggaatcgagaaacatttctgacatttctgacatttctgacatttctgacatttctgacatttctgacatcacggaatcgagaaacatttctgacatttccgactcggaccgatg

SEQ ID NO: 16560 - DNA, 203 bp, synthetic construct
  source 1..203: mol_type = other DNA
ggcgcgccagtcctcaaagagacttctgacatttctgacatttctgacatttctgacatttctgacatttctgacatttctgacatcacggaatcgagaaacatttctgacatttctgacatttctgacatttctgacatttctgacatttctgacatttctgacatttctgacatttctgacatttccgactcggaccgatg

SEQ ID NO: 16561 - DNA, 203 bp, synthetic construct
  source 1..203: mol_type = other DNA
ggcgcgccagtcctaatgcacatttctgacatttctgacatttctgacatttctgacatttctgacatttctgacatttctgacatcacggaatcgagagacatcacggaatcgagagacatcacggaatcgagagacatcacggaatcgagagacatcacggaatcgagagacatttctgacatttccgactcggaccgatg

SEQ ID NO: 16562 - DNA, 203 bp, synthetic construct
  source 1..203: mol_type = other DNA
ggcgcgccagtcctccagaagtgttctgacatttctgacatttctgacatttctgacatttctgacatttctgacatttctgacatcacggaatcgagggacatcacggaatcgagggacatcacggaatcgagggacatcacggaatcgagggacatcacggaatcgagggacatttctgacatttccgactcggaccgatg

SEQ ID NO: 16563 - DNA, 203 bp, synthetic construct
  source 1..203: mol_type = other DNA
ggcgcgccagtcctacttgggtcttctgacatttctgacatttctgacatttctgacatttctgacatttctgacatttctgacatcacggaatcgagtaacatcacggaatcgagtaacatcacggaatcgagtaacatcacggaatcgagtaacatcacggaatcgagtaacatttctgacatttccgactcggaccgatg

SEQ ID NO: 16564 - DNA, 203 bp, synthetic construct
  source 1..203: mol_type = other DNA
ggcgcgccagtcctgctacccatttctgacatttctgacatttctgacatttctgacatttctgacatttctgacatttctgacatcacggaatcggaaaacatcacggaatcggaaaacatcacggaatcggaaaacatcacggaatcggaaaacatcacggaatcggaaaacatttctgacatttccgactcggaccgatg

SEQ ID NO: 16565 - DNA, 203 bp, synthetic construct
  source 1..203: mol_type = other DNA
ggcgcgccagtccttgcaagcctttctgacatttctgacatttctgacatttctgacatttctgacatttctgacatttctgacatcacggaatcgtgaaacatcacggaatcgtgaaacatcacggaatcgtgaaacatcacggaatcgtgaaacatcacggaatcgtgaaacatttctgacatttccgactcggaccgatg

SEQ ID NO: 16566 - DNA, 203 bp, synthetic construct
  source 1..203: mol_type = other DNA
ggcgcgccagtcctacgtttcgtttctgacatttctgacatttctgacatttctgacatttctgacatttctgacatttctgacatcacggaatgtagaaacatcacggaatgtagaaacatcacggaatgtagaaacatcacggaatgtagaaacatcacggaatgtagaaacatttctgacatttccgactcggaccgatg

SEQ ID NO: 16567 - DNA, 203 bp, synthetic construct
  source 1..203: mol_type = other DNA
ggcgcgccagtcctttagctgcactctgacatttctgacatttctgacatttctgacatttctgacatttctgacatttctgacatcacggaattaagaaacatcacggaattaagaaacatcacggaattaagaaacatcacggaattaagaaacatcacggaattaagaaacatttctgacatttccgactcggaccgatg

SEQ ID NO: 16568 - DNA, 203 bp, synthetic construct
  source 1..203: mol_type = other DNA
ggcgcgccagtccttatgcagttgtctgacatttctgacatttctgacatttctgacatttctgacatttctgacatttctgacatcacggcatcgagaaacatcacggcatcgagaaacatcacggcatcgagaaacatcacggcatcgagaaacatcacggcatcgagaaacatttctgacatttccgactcggaccgatg

SEQ ID NO: 16569 - DNA, 203 bp, synthetic construct
  source 1..203: mol_type = other DNA
ggcgcgccagtcctgaaactgcattctgacatttctgacatttctgacatttctgacatttctgacatttctgacatttctgacatcacggccgtttctgacatcacggccgtttctgacatcacggccgtttctgacatcacggccgtttctgacatcacggccgtttctgacatttctgacatttccgactcggaccgatg

SEQ ID NO: 16570 - DNA, 203 bp, synthetic construct
  source 1..203: mol_type = other DNA
ggcgcgccagtcctccaagcctgttctgacatttctgacatttctgacatttctgacatttctgacatttctgacatttctgacatcacgggatcgagaaacatcacgggatcgagaaacatcacgggatcgagaaacatcacgggatcgagaaacatcacgggatcgagaaacatttctgacatttccgactcggaccgatg

SEQ ID NO: 16571 - DNA, 203 bp, synthetic construct
  source 1..203: mol_type = other DNA
ggcgcgccagtccttaggatcaagtctgacatttctgacatttctgacatttctgacatttctgacatttctgacatttctgacatcacgtcatcgagaaacatcacgtcatcgagaaacatcacgtcatcgagaaacatcacgtcatcgagaaacatcacgtcatcgagaaacatttctgacatttccgactcggaccgatg

SEQ ID NO: 16572 - DNA, 203 bp, synthetic construct
  source 1..203: mol_type = other DNA
ggcgcgccagtcctttcaacgaaatctgacatttctgacatttctgacatttctgacatttctgacatttctgacatttctgacatcactcccatttctgacatcactcccatttctgacatcactcccatttctgacatcactcccatttctgacatcactcccatttctgacatttctgacatttccgactcggaccgatg

SEQ ID NO: 16573 - DNA, 203 bp, synthetic construct
  source 1..203: mol_type = other DNA
ggcgcgccagtcctacaccgaacttctgacatttctgacatttctgacatttctgacatttctgacatttctgacatttctgacatcactgaatcgagaaacatcactgaatcgagaaacatcactgaatcgagaaacatcactgaatcgagaaacatcactgaatcgagaaacatttctgacatttccgactcggaccgatg

SEQ ID NO: 16574 - DNA, 203 bp, synthetic construct
  source 1..203: mol_type = other DNA
ggcgcgccagtcctaactgaggcatctgacatttctgacatttctgacatttctgacatttctgacatttctgacatttctgacatcagggaatcgagaaacatcagggaatcgagaaacatcagggaatcgagaaacatcagggaatcgagaaacatcagggaatcgagaaacatttctgacatttccgactcggaccgatg

SEQ ID NO: 16575 - DNA, 203 bp, synthetic construct
  source 1..203: mol_type = other DNA
ggcgcgccagtcctgacgaagttctctgacatttctgacatttctgacatttctgacatttctgacatttctgacatttctgacatcattgaatcgagaaacatcattgaatcgagaaacatcattgaatcgagaaacatcattgaatcgagaaacatcattgaatcgagaaacatttctgacatttccgactcggaccgatg

SEQ ID NO: 16576 - DNA, 203 bp, synthetic construct
  source 1..203: mol_type = other DNA
ggcgcgccagtcctcaaccgagtatctgacatttctgacatttctgacatttctgacatttctgacatttctgacatttctgacatcccggccgtttctgacatcccggccgtttctgacatcccggccgtttctgacatcccggccgtttctgacatcccggccgtttctgacatttctgacatttccgactcggaccgatg

SEQ ID NO: 16577 - DNA, 203 bp, synthetic construct
  source 1..203: mol_type = other DNA
ggcgcgccagtcctcactagtgattctgacatttctgacatttctgacatttctgacatttctgacatttctgacatttctgacatccgccgggtttctgacatccgccgggtttctgacatccgccgggtttctgacatccgccgggtttctgacatccgccgggtttctgacatttctgacatttccgactcggaccgatg

SEQ ID NO: 16578 - DNA, 203 bp, synthetic construct
  source 1..203: mol_type = other DNA
ggcgcgccagtcctttcggtccaatctgacatttctgacatttctgacatttctgacatttctgacatttctgacatttctgacatccggatggtttctgacatccggatggtttctgacatccggatggtttctgacatccggatggtttctgacatccggatggtttctgacatttctgacatttccgactcggaccgatg

SEQ ID NO: 16579 - DNA, 203 bp, synthetic construct
  source 1..203: mol_type = other DNA
ggcgcgccagtcctaggtctgacttctgacatttctgacatttctgacatttctgacatttctgacatttctgacatttctgacatccggcgactttctgacatccggcgactttctgacatccggcgactttctgacatccggcgactttctgacatccggcgactttctgacatttctgacatttccgactcggaccgatg

SEQ ID NO: 16580 - DNA, 203 bp, synthetic construct
  source 1..203: mol_type = other DNA
ggcgcgccagtcctagtgcaactatctgacatttctgacatttctgacatttctgacatttctgacatttctgacatttctgacatccggcggacttctgacatccggcggacttctgacatccggcggacttctgacatccggcggacttctgacatccggcggacttctgacatttctgacatttccgactcggaccgatg

SEQ ID NO: 16581 - DNA, 203 bp, synthetic construct
  source 1..203: mol_type = other DNA
ggcgcgccagtccttccaactagttctgacatttctgacatttctgacatttctgacatttctgacatttctgacatttctgacatccggcggccttctgacatccggcggccttctgacatccggcggccttctgacatccggcggccttctgacatccggcggccttctgacatttctgacatttccgactcggaccgatg

SEQ ID NO: 16582 - DNA, 203 bp, synthetic construct
  source 1..203: mol_type = other DNA
ggcgcgccagtcctacatgagacatctgacatttctgacatttctgacatttctgacatttctgacatttctgacatttctgacatccggcgggcttctgacatccggcgggcttctgacatccggcgggcttctgacatccggcgggcttctgacatccggcgggcttctgacatttctgacatttccgactcggaccgatg

SEQ ID NO: 16583 - DNA, 203 bp, synthetic construct
  source 1..203: mol_type = other DNA
ggcgcgccagtccttaacggtgtatctgacatttctgacatttctgacatttctgacatttctgacatttctgacatttctgacatccggcggggttctgacatccggcggggttctgacatccggcggggttctgacatccggcggggttctgacatccggcggggttctgacatttctgacatttccgactcggaccgatg

SEQ ID NO: 16584 - DNA, 203 bp, synthetic construct
  source 1..203: mol_type = other DNA
ggcgcgccagtcctttcgatcgattctgacatttctgacatttctgacatttctgacatttctgacatttctgacatttctgacatccggcgggtttctgacatccggcgggtttctgacatccggcgggtttctgacatccggcgggtttctgacatccggcgggtttctgacatccggcgggtttccgactcggaccgatg

SEQ ID NO: 16585 - DNA, 203 bp, synthetic construct
  source 1..203: mol_type = other DNA
ggcgcgccagtcctctgttgtcactctgacatttctgacatttctgacatttctgacatttctgacatttctgacatttctgacatccggcgggtttctgacatccggcgggtttctgacatccggcgggtttctgacatccggcgggtttctgacatccggcgggtttctgacatccggcgggtttccgactcggaccgatg

SEQ ID NO: 16586 - DNA, 203 bp, synthetic construct
  source 1..203: mol_type = other DNA
ggcgcgccagtcctacaacagttttctgacatttctgacatttctgacatttctgacatttctgacatttctgacatttctgacatccggcgggtttctgacatccggcgggtttctgacatccggcgggtttctgacatccggcgggtttctgacatccggcgggtttctgacatccggcgggtttccgactcggaccgatg

SEQ ID NO: 16587 - DNA, 203 bp, synthetic construct
  source 1..203: mol_type = other DNA
ggcgcgccagtcctagcattcacatctgacatttctgacatttctgacatttctgacatttctgacatttctgacatttctgacatccggcgggtttctgacatccggcgggtttctgacatccggcgggtttctgacatccggcgggtttctgacatccggcgggtttctgacatccggcgggtttccgactcggaccgatg

SEQ ID NO: 16588 - DNA, 203 bp, synthetic construct
  source 1..203: mol_type = other DNA
ggcgcgccagtccttgaagttaactctgacatttctgacatttctgacatttctgacatttctgacatttctgacatttctgacatccggcgggtttctgacatccggcgggtttctgacatccggcgggtttctgacatccggcgggtttctgacatccggcgggtttctgacatccggcgggtttccgactcggaccgatg

SEQ ID NO: 16589 - DNA, 203 bp, synthetic construct
  source 1..203: mol_type = other DNA
ggcgcgccagtcctgtgaagtttatctgacatttctgacatttctgacatttctgacatttctgacatttctgacatttctgacatccggcgggtttctgacatccggcgggtttctgacatccggcgggtttctgacatccggcgggtttctgacatttctgacatttctgacatccggcgggtttccgactcggaccgatg

SEQ ID NO: 16590 - DNA, 203 bp, synthetic construct
  source 1..203: mol_type = other DNA
ggcgcgccagtcctgttgtagtattctgacatttctgacatttctgacatttctgacatttctgacatttctgacatttctgacatccggcgggtttctgacatccggcgggtttctgacatttctgacatttctgacatccggcgggtttctgacatccggcgggtttctgacatttctgacatttccgactcggaccgatg

SEQ ID NO: 16591 - DNA, 203 bp, synthetic construct
  source 1..203: mol_type = other DNA
ggcgcgccagtcctgttttgtacttctgacatttctgacatttctgacatttctgacatttctgacatttctgacatttctgacatccggcgggtttctgacatccggcgggtttctgacatttctgacatttctgacatccggcgggtttctgacatttctgacatttctgacatttctgacatttccgactcggaccgatg

SEQ ID NO: 16592 - DNA, 203 bp, synthetic construct
  source 1..203: mol_type = other DNA
ggcgcgccagtcctgcaaagaatttctgacatttctgacatttctgacatttctgacatttctgacatttctgacatttctgacatccggcgggtttctgacatttctgacatttctgacatccggcgggtttctgacatccggcgggtttctgacatttctgacatttctgacatccggcgggtttccgactcggaccgatg

SEQ ID NO: 16593 - DNA, 203 bp, synthetic construct
  source 1..203: mol_type = other DNA
ggcgcgccagtcctatgtagaaactctgacatttctgacatttctgacatttctgacatttctgacatttctgacatttctgacatccggcgggtttctgacatttctgacatttctgacatccggcgggtttctgacatttctgacatttctgacatttctgacatttctgacatttctgacatttccgactcggaccgatg

SEQ ID NO: 16594 - DNA, 203 bp, synthetic construct
  source 1..203: mol_type = other DNA
ggcgcgccagtcctccttgtagaatctgacatttctgacatttctgacatttctgacatttctgacatttctgacatttctgacatccggcgggtttctgacatttctgacatttctgacatttctgacatttctgacatccggcgggtttctgacatccggcgggtttctgacatccggcgggtttccgactcggaccgatg

SEQ ID NO: 16595 - DNA, 203 bp, synthetic construct
  source 1..203: mol_type = other DNA
ggcgcgccagtcctgcatacattctctgacatttctgacatttctgacatttctgacatttctgacatttctgacatttctgacatccggcgggtttctgacatttctgacatttctgacatttctgacatttctgacatttctgacatttctgacatccggcgggtttctgacatttctgacatttccgactcggaccgatg

SEQ ID NO: 16596 - DNA, 203 bp, synthetic construct
  source 1..203: mol_type = other DNA
ggcgcgccagtcctcatacagaaatctgacatttctgacatttctgacatttctgacatttctgacatttctgacatttctgacatccggcgggtttctgacatttctgacatttctgacatttctgacatttctgacatttctgacatttctgacatttctgacatttctgacatttcccggcgggtcgactcggaccgatg

SEQ ID NO: 16597 - DNA, 203 bp, synthetic construct
  source 1..203: mol_type = other DNA
ggcgcgccagtccttcgttgtatgtctgacatttctgacatttctgacatttctgacatttctgacatttctgacatttctgacatccggcggtcttctgacatccggcggtcttctgacatccggcggtcttctgacatccggcggtcttctgacatccggcggtcttctgacatttctgacatttccgactcggaccgatg

SEQ ID NO: 16598 - DNA, 203 bp, synthetic construct
  source 1..203: mol_type = other DNA
ggcgcgccagtcctatgtatgtagtctgacatttctgacatttctgacatttctgacatttctgacatttctgacatttctgacatccggcggttttctgacatccggcggttttctgacatccggcggttttctgacatccggcggttttctgacatccggcggttttctgacatttctgacatttccgactcggaccgatg

SEQ ID NO: 16599 - DNA, 203 bp, synthetic construct
  source 1..203: mol_type = other DNA
ggcgcgccagtcctaatctgtatgtctgacatttctgacatttctgacatttctgacatttctgacatttctgacatttctgacatccggctggtttctgacatccggctggtttctgacatccggctggtttctgacatccggctggtttctgacatccggctggtttctgacatttctgacatttccgactcggaccgatg

SEQ ID NO: 16600 - DNA, 203 bp, synthetic construct
  source 1..203: mol_type = other DNA
ggcgcgccagtcctatcagacgaatctgacatttctgacatttctgacatttctgacatttctgacatttctgacatttctgacatccgggaggtttctgacatccgggaggtttctgacatccgggaggtttctgacatccgggaggtttctgacatccgggaggtttctgacatttctgacatttccgactcggaccgatg

SEQ ID NO: 16601 - DNA, 203 bp, synthetic construct
  source 1..203: mol_type = other DNA
ggcgcgccagtcctactggtaggatctgacatttctgacatttctgacatttctgacatttctgacatttctgacatttctgacatccggtcggtttctgacatccggtcggtttctgacatccggtcggtttctgacatccggtcggtttctgacatccggtcggtttctgacatttctgacatttccgactcggaccgatg

SEQ ID NO: 16602 - DNA, 203 bp, synthetic construct
  source 1..203: mol_type = other DNA
ggcgcgccagtcctgatacctctttctgacatttctgacatttctgacatttctgacatttctgacatttctgacatttctgacatccggttggtttctgacatccggttggtttctgacatccggttggtttctgacatccggttggtttctgacatccggttggtttctgacatttctgacatttccgactcggaccgatg

SEQ ID NO: 16603 - DNA, 203 bp, synthetic construct
  source 1..203: mol_type = other DNA
ggcgcgccagtcctaggatacctctctgacatttctgacatttctgacatttctgacatttctgacatttctgacatttctgacatccgtcgggtttctgacatccgtcgggtttctgacatccgtcgggtttctgacatccgtcgggtttctgacatccgtcgggtttctgacatttctgacatttccgactcggaccgatg

SEQ ID NO: 16604 - DNA, 203 bp, synthetic construct
  source 1..203: mol_type = other DNA
ggcgcgccagtcctactcagcgtctctgacatttctgacatttctgacatttctgacatttctgacatttctgacatttctgacatcctccgggtttctgacatcctccgggtttctgacatcctccgggtttctgacatcctccgggtttctgacatcctccgggtttctgacatttctgacatttccgactcggaccgatg

SEQ ID NO: 16605 - DNA, 203 bp, synthetic construct
  source 1..203: mol_type = other DNA
ggcgcgccagtcctgcagttcacatctgacatttctgacatttctgacatttctgacatttctgacatttctgacatttctgacatcgacaattcctttaacatcgacaattcctttaacatcgacaattcctttaacatcgacaattcctttaacatcgacaattcctttaacatttctgacatttccgactcggaccgatg

SEQ ID NO: 16606 - DNA, 203 bp, synthetic construct
  source 1..203: mol_type = other DNA
ggcgcgccagtcctcctgctgacatctgacatttctgacatttctgacatttctgacatttctgacatttctgacatttctgacatcgccaattcctttaacatcgccaattcctttaacatcgccaattcctttaacatcgccaattcctttaacatcgccaattcctttaacatttctgacatttccgactcggaccgatg

SEQ ID NO: 16607 - DNA, 203 bp, synthetic construct
  source 1..203: mol_type = other DNA
ggcgcgccagtccttgtcagcatttctgacatttctgacatttctgacatttctgacatttctgacatttctgacatttctgacatcgcgaattcctttaacatcgcgaattcctttaacatcgcgaattcctttaacatcgcgaattcctttaacatcgcgaattcctttaacatttctgacatttccgactcggaccgatg

SEQ ID NO: 16608 - DNA, 203 bp, synthetic construct
  source 1..203: mol_type = other DNA
ggcgcgccagtccttcgcaagatatctgacatttctgacatttctgacatttctgacatttctgacatttctgacatttctgacatcgctcccatttctgacatcgctcccatttctgacatcgctcccatttctgacatcgctcccatttctgacatcgctcccatttctgacatttctgacatttccgactcggaccgatg

SEQ ID NO: 16609 - DNA, 203 bp, synthetic construct
  source 1..203: mol_type = other DNA
ggcgcgccagtcctgtggtgattctctgacatttctgacatttctgacatttctgacatttctgacatttctgacatttctgacatcgcttggcaaactgacatcgcttggcaaactgacatcgcttggcaaactgacatcgcttggcaaactgacatcgcttggcaaactgacatttctgacatttccgactcggaccgatg

SEQ ID NO: 16610 - DNA, 203 bp, synthetic construct
  source 1..203: mol_type = other DNA
ggcgcgccagtccttctgtgcatttctgacatttctgacatttctgacatttctgacatttctgacatttctgacatttctgacatcggcaattcctttaacatcggcaattcctttaacatcggcaattcctttaacatcggcaattcctttaacatcggcaattcctttaacatttctgacatttccgactcggaccgatg

SEQ ID NO: 16611 - DNA, 203 bp, synthetic construct
  source 1..203: mol_type = other DNA
ggcgcgccagtcctcttgttcagatctgacatttctgacatttctgacatttctgacatttctgacatttctgacatttctgacatcgtcaacgcctttaacatcgtcaacgcctttaacatcgtcaacgcctttaacatcgtcaacgcctttaacatcgtcaacgcctttaacatttctgacatttccgactcggaccgatg

SEQ ID NO: 16612 - DNA, 203 bp, synthetic construct
  source 1..203: mol_type = other DNA
ggcgcgccagtcctaccactcagatctgacatttctgacatttctgacatttctgacatttctgacatttctgacatttctgacatcgtcaagacctttaacatcgtcaagacctttaacatcgtcaagacctttaacatcgtcaagacctttaacatcgtcaagacctttaacatttctgacatttccgactcggaccgatg

SEQ ID NO: 16613 - DNA, 203 bp, synthetic construct
  source 1..203: mol_type = other DNA
ggcgcgccagtcctccaggcttcttctgacatttctgacatttctgacatttctgacatttctgacatttctgacatttctgacatcgtcaaggcctttaacatcgtcaaggcctttaacatcgtcaaggcctttaacatcgtcaaggcctttaacatcgtcaaggcctttaacatttctgacatttccgactcggaccgatg

SEQ ID NO: 16614 - DNA, 203 bp, synthetic construct
  source 1..203: mol_type = other DNA
ggcgcgccagtccttacaacctggtctgacatttctgacatttctgacatttctgacatttctgacatttctgacatttctgacatcgtcaatacctttaacatcgtcaatacctttaacatcgtcaatacctttaacatcgtcaatacctttaacatcgtcaatacctttaacatttctgacatttccgactcggaccgatg

SEQ ID NO: 16615 - DNA, 203 bp, synthetic construct
  source 1..203: mol_type = other DNA
ggcgcgccagtccttgagcaactgtctgacatttctgacatttctgacatttctgacatttctgacatttctgacatttctgacatcgtcaatgcctttaacatcgtcaatgcctttaacatcgtcaatgcctttaacatcgtcaatgcctttaacatcgtcaatgcctttaacatttctgacatttccgactcggaccgatg

SEQ ID NO: 16616 - DNA, 203 bp, synthetic construct
  source 1..203: mol_type = other DNA
ggcgcgccagtcctcatgaggccatctgacatttctgacatttctgacatttctgacatttctgacatttctgacatttctgacatcgtcaattagtttaacatcgtcaattagtttaacatcgtcaattagtttaacatcgtcaattagtttaacatcgtcaattagtttaacatttctgacatttccgactcggaccgatg

SEQ ID NO: 16617 - DNA, 203 bp, synthetic construct
  source 1..203: mol_type = other DNA
ggcgcgccagtccttctgacgatttctgacatttctgacatttctgacatttctgacatttctgacatttctgacatttctgacatcgtcaattcatttaacatcgtcaattcatttaacatcgtcaattcatttaacatcgtcaattcatttaacatcgtcaattcatttaacatttctgacatttccgactcggaccgatg

SEQ ID NO: 16618 - DNA, 203 bp, synthetic construct
  source 1..203: mol_type = other DNA
ggcgcgccagtcctaggtttcaagtctgacatttctgacatttctgacatttctgacatttctgacatttctgacatttctgacatcgtcaattccaataacatcgtcaattccaataacatcgtcaattccaataacatcgtcaattccaataacatcgtcaattccaataacatttctgacatttccgactcggaccgatg

SEQ ID NO: 16619 - DNA, 203 bp, synthetic construct
  source 1..203: mol_type = other DNA
ggcgcgccagtcctaatacgttgctctgacatttctgacatttctgacatttctgacatttctgacatttctgacatttctgacatcgtcaattcccgtaacatcgtcaattcccgtaacatcgtcaattcccgtaacatcgtcaattcccgtaacatcgtcaattcccgtaacatttctgacatttccgactcggaccgatg

SEQ ID NO: 16620 - DNA, 203 bp, synthetic construct
  source 1..203: mol_type = other DNA
ggcgcgccagtcctggcaacgagctctgacatttctgacatttctgacatttctgacatttctgacatttctgacatttctgacatcgtcaattccgttaacatcgtcaattccgttaacatcgtcaattccgttaacatcgtcaattccgttaacatcgtcaattccgttaacatttctgacatttccgactcggaccgatg

SEQ ID NO: 16621 - DNA, 203 bp, synthetic construct
  source 1..203: mol_type = other DNA
ggcgcgccagtcctctttgtaacatctgacatttctgacatttctgacatttctgacatttctgacatttctgacatttctgacatcgtcaattccttctacatcgtcaattccttctacatcgtcaattccttctacatcgtcaattccttctacatcgtcaattccttctacatttctgacatttccgactcggaccgatg

SEQ ID NO: 16622 - DNA, 203 bp, synthetic construct
  source 1..203: mol_type = other DNA
ggcgcgccagtcctacaaagcctttctgacatttctgacatttctgacatttctgacatttctgacatttctgacatttctgacatcgtcaattccttgcacatcgtcaattccttgcacatcgtcaattccttgcacatcgtcaattccttgcacatcgtcaattccttgcacatttctgacatttccgactcggaccgatg

SEQ ID NO: 16623 - DNA, 203 bp, synthetic construct
  source 1..203: mol_type = other DNA
ggcgcgccagtcctgacgaaagcctctgacatttctgacatttctgacatttctgacatttctgacatttctgacatttctgacatcgtcaattcctttaacatcgtcaattcctttaacatcgtcaattcctttaacatcgtcaattcctttaacatcgtcaattcctttaacatttctgacatttccgactcggaccgatg

SEQ ID NO: 16624 - DNA, 203 bp, synthetic construct
  source 1..203: mol_type = other DNA
ggcgcgccagtcctctgaaaggcctctgacatttctgacatttctgacatttctgacatttctgacatttctgacatttctgacatcgtcaattcctttaacatttctgacatttctgacatttctgacatttctgacatcgtcaattcctttaacatttctgacatttctgacatttctgacatttccgactcggaccgatg

SEQ ID NO: 16625 - DNA, 203 bp, synthetic construct
  source 1..203: mol_type = other DNA
ggcgcgccagtcctggctctgcaatctgacatttctgacatttctgacatttctgacatttctgacatttctgacatttctgacatcgtcaattcctttcacatcgtcaattcctttcacatcgtcaattcctttcacatcgtcaattcctttcacatcgtcaattcctttcacatttctgacatttccgactcggaccgatg

SEQ ID NO: 16626 - DNA, 203 bp, synthetic construct
  source 1..203: mol_type = other DNA
ggcgcgccagtcctggcctcacaatctgacatttctgacatttctgacatttctgacatttctgacatttctgacatttctgacatcgtcaattccttttacatcgtcaattccttttacatcgtcaattccttttacatcgtcaattccttttacatcgtcaattccttttacatttctgacatttccgactcggaccgatg

SEQ ID NO: 16627 - DNA, 203 bp, synthetic construct
  source 1..203: mol_type = other DNA
ggcgcgccagtcctgaagaccacctctgacatttctgacatttctgacatttctgacatttctgacatttctgacatttctgacatcgtcccttcctttaacatcgtcccttcctttaacatcgtcccttcctttaacatcgtcccttcctttaacatcgtcccttcctttaacatttctgacatttccgactcggaccgatg

SEQ ID NO: 16628 - DNA, 203 bp, synthetic construct
  source 1..203: mol_type = other DNA
ggcgcgccagtcctcacactagcctctgacatttctgacatttctgacatttctgacatttctgacatttctgacatttctgacatcgtccgttcctttaacatcgtccgttcctttaacatcgtccgttcctttaacatcgtccgttcctttaacatcgtccgttcctttaacatttctgacatttccgactcggaccgatg

SEQ ID NO: 16629 - DNA, 203 bp, synthetic construct
  source 1..203: mol_type = other DNA
ggcgcgccagtcctggtgtcctactctgacatttctgacatttctgacatttctgacatttctgacatttctgacatttctgacatcgtcgattcctttaacatcgtcgattcctttaacatcgtcgattcctttaacatcgtcgattcctttaacatcgtcgattcctttaacatttctgacatttccgactcggaccgatg

SEQ ID NO: 16630 - DNA, 203 bp, synthetic construct
  source 1..203: mol_type = other DNA
ggcgcgccagtcctggttctgctctctgacatttctgacatttctgacatttctgacatttctgacatttctgacatttctgacatcgtcggttcctttaacatcgtcggttcctttaacatcgtcggttcctttaacatcgtcggttcctttaacatcgtcggttcctttaacatttctgacatttccgactcggaccgatg

SEQ ID NO: 16631 - DNA, 203 bp, synthetic construct
  source 1..203: mol_type = other DNA
ggcgcgccagtcctggtgctctgttctgacatttctgacatttctgacatttctgacatttctgacatttctgacatttctgacatcgtcgtttcctttaacatcgtcgtttcctttaacatcgtcgtttcctttaacatcgtcgtttcctttaacatcgtcgtttcctttaacatttctgacatttccgactcggaccgatg

SEQ ID NO: 16632 - DNA, 203 bp, synthetic construct
  source 1..203: mol_type = other DNA
ggcgcgccagtcctggtagccttctctgacatttctgacatttctgacatttctgacatttctgacatttctgacatttctgacatcgtctattcctttaacatcgtctattcctttaacatcgtctattcctttaacatcgtctattcctttaacatcgtctattcctttaacatttctgacatttccgactcggaccgatg

SEQ ID NO: 16633 - DNA, 203 bp, synthetic construct
  source 1..203: mol_type = other DNA
ggcgcgccagtcctggtgtagagctctgacatttctgacatttctgacatttctgacatttctgacatttctgacatttctgacatcgtctgttcctttaacatcgtctgttcctttaacatcgtctgttcctttaacatcgtctgttcctttaacatcgtctgttcctttaacatttctgacatttccgactcggaccgatg

SEQ ID NO: 16634 - DNA, 203 bp, synthetic construct
  source 1..203: mol_type = other DNA
ggcgcgccagtcctggtttcggtctctgacatttctgacatttctgacatttctgacatttctgacatttctgacatttctgacatcgtcttttcctttaacatcgtcttttcctttaacatcgtcttttcctttaacatcgtcttttcctttaacatcgtcttttcctttaacatttctgacatttccgactcggaccgatg

SEQ ID NO: 16635 - DNA, 203 bp, synthetic construct
  source 1..203: mol_type = other DNA
ggcgcgccagtcctggactgagtctctgacatttctgacatttctgacatttctgacatttctgacatttctgacatttctgacatctcggccgtttctgacatctcggccgtttctgacatctcggccgtttctgacatctcggccgtttctgacatctcggccgtttctgacatttctgacatttccgactcggaccgatg

SEQ ID NO: 16636 - DNA, 203 bp, synthetic construct
  source 1..203: mol_type = other DNA
ggcgcgccagtcctgacatgacgatctgacatttctgacatttctgacatttctgacatttctgacatttctgacatttctgacatctcttggcaaactgacatctcttggcaaactgacatctcttggcaaactgacatctcttggcaaactgacatctcttggcaaactgacatttctgacatttccgactcggaccgatg

SEQ ID NO: 16637 - DNA, 203 bp, synthetic construct
  source 1..203: mol_type = other DNA
ggcgcgccagtcctcctctttgtgtctgacatttctgacatttctgacatttctgacatttctgacatttctgacatttctgacatctggcgggtttctgacatctggcgggtttctgacatctggcgggtttctgacatctggcgggtttctgacatctggcgggtttctgacatttctgacatttccgactcggaccgatg

SEQ ID NO: 16638 - DNA, 203 bp, synthetic construct
  source 1..203: mol_type = other DNA
ggcgcgccagtcctagaatctttttctgacatttctgacatttctgacatttctgacatttctgacatttctgacatttctgacatcttcaattcctttaacatcttcaattcctttaacatcttcaattcctttaacatcttcaattcctttaacatcttcaattcctttaacatttctgacatttccgactcggaccgatg

SEQ ID NO: 16639 - DNA, 203 bp, synthetic construct
  source 1..203: mol_type = other DNA
ggcgcgccagtcctctctcgtagctctgacatttctgacatttctgacatttctgacatttctgacatttctgacatttctgacatgatcaattcctttaacatgatcaattcctttaacatgatcaattcctttaacatgatcaattcctttaacatgatcaattcctttaacatttctgacatttccgactcggaccgatg

SEQ ID NO: 16640 - DNA, 203 bp, synthetic construct
  source 1..203: mol_type = other DNA
ggcgcgccagtcctgctctacgaatctgacatttctgacatttctgacatttctgacatttctgacatttctgacatttctgacatgccggccgtttctgacatgccggccgtttctgacatgccggccgtttctgacatgccggccgtttctgacatgccggccgtttctgacatttctgacatttccgactcggaccgatg

SEQ ID NO: 16641 - DNA, 203 bp, synthetic construct
  source 1..203: mol_type = other DNA
ggcgcgccagtcctcctacgaatctctgacatttctgacatttctgacatttctgacatttctgacatttctgacatttctgacatgcggcgggtttctgacatgcggcgggtttctgacatgcggcgggtttctgacatgcggcgggtttctgacatgcggcgggtttctgacatttctgacatttccgactcggaccgatg

SEQ ID NO: 16642 - DNA, 203 bp, synthetic construct
  source 1..203: mol_type = other DNA
ggcgcgccagtcctttcactacgatctgacatttctgacatttctgacatttctgacatttctgacatttctgacatttctgacatgctcaattcctttaacatgctcaattcctttaacatgctcaattcctttaacatgctcaattcctttaacatgctcaattcctttaacatttctgacatttccgactcggaccgatg

SEQ ID NO: 16643 - DNA, 203 bp, synthetic construct
  source 1..203: mol_type = other DNA
ggcgcgccagtccttccatggacctctgacatttctgacatttctgacatttctgacatttctgacatttctgacatttctgacatggtcaattcctttaacatggtcaattcctttaacatggtcaattcctttaacatggtcaattcctttaacatggtcaattcctttaacatttctgacatttccgactcggaccgatg

SEQ ID NO: 16644 - DNA, 203 bp, synthetic construct
  source 1..203: mol_type = other DNA
ggcgcgccagtcctatgtgtcctttctgacatttctgacatttctgacatttctgacatttctgacatttctgacatttctgacatgtcggaatcgagaaacatgtcggaatcgagaaacatgtcggaatcgagaaacatgtcggaatcgagaaacatgtcggaatcgagaaacatttctgacatttccgactcggaccgatg

SEQ ID NO: 16645 - DNA, 203 bp, synthetic construct
  source 1..203: mol_type = other DNA
ggcgcgccagtcctacactgcagttctgacatttctgacatttctgacatttctgacatttctgacatttctgacatttctgacatgtggcgggtttctgacatgtggcgggtttctgacatgtggcgggtttctgacatgtggcgggtttctgacatgtggcgggtttctgacatttctgacatttccgactcggaccgatg

SEQ ID NO: 16646 - DNA, 203 bp, synthetic construct
  source 1..203: mol_type = other DNA
ggcgcgccagtcctgtcgtcatgttctgacatttctgacatttctgacatttctgacatttctgacatttctgacatttctgacattaaccccatttctgacattaaccccatttctgacattaaccccatttctgacattaaccccatttctgacattaaccccatttctgacatttctgacatttccgactcggaccgatg

SEQ ID NO: 16647 - DNA, 203 bp, synthetic construct
  source 1..203: mol_type = other DNA
ggcgcgccagtcctcagtcaccattctgacatttctgacatttctgacatttctgacatttctgacatttctgacatttctgacattaacggccatgcaccaccacccacggaatcgagaaagagctatcaatctgtcaattctgacatttctgacatttctgacatttctgacatttctgacatttccgactcggaccgatg

SEQ ID NO: 16648 - DNA, 203 bp, synthetic construct
  source 1..203: mol_type = other DNA
ggcgcgccagtcctgatcaagcagtctgacatttctgacatttctgacatttctgacatttctgacatttctgacatttctgacattaagcccatttctgacattaagcccatttctgacattaagcccatttctgacattaagcccatttctgacattaagcccatttctgacatttctgacatttccgactcggaccgatg

SEQ ID NO: 16649 - DNA, 203 bp, synthetic construct
  source 1..203: mol_type = other DNA
ggcgcgccagtccttgtaacaaggtctgacatttctgacatttctgacatttctgacatttctgacatttctgacatttctgacattaatcccatttctgacattaatcccatttctgacattaatcccatttctgacattaatcccatttctgacattaatcccatttctgacatttctgacatttccgactcggaccgatg

SEQ ID NO: 16650 - DNA, 203 bp, synthetic construct
  source 1..203: mol_type = other DNA
ggcgcgccagtcctgccttgttaatctgacatttctgacatttctgacatttctgacatttctgacatttctgacatttctgacattacggaatcgagaaacattacggaatcgagaaacattacggaatcgagaaacattacggaatcgagaaacattacggaatcgagaaacatttctgacatttccgactcggaccgatg

SEQ ID NO: 16651 - DNA, 203 bp, synthetic construct
  source 1..203: mol_type = other DNA
ggcgcgccagtcctacagttgatttctgacatttctgacatttctgacatttctgacatttctgacatttctgacatttctgacattactagcatttctgacattactagcatttctgacattactagcatttctgacattactagcatttctgacattactagcatttctgacatttctgacatttccgactcggaccgatg

SEQ ID NO: 16652 - DNA, 203 bp, synthetic construct
  source 1..203: mol_type = other DNA
ggcgcgccagtcctttgctagagatctgacatttctgacatttctgacatttctgacatttctgacatttctgacatttctgacattactcagatttctgacattactcagatttctgacattactcagatttctgacattactcagatttctgacattactcagatttctgacatttctgacatttccgactcggaccgatg

SEQ ID NO: 16653 - DNA, 203 bp, synthetic construct
  source 1..203: mol_type = other DNA
ggcgcgccagtccttctagcaaactctgacatttctgacatttctgacatttctgacatttctgacatttctgacatttctgacattactcccatttctgacattactcccatttctgacattactcccatttctgacattactcccatttctgacattactcccatttctgacattactcccatttccgactcggaccgatg

SEQ ID NO: 16654 - DNA, 203 bp, synthetic construct
  source 1..203: mol_type = other DNA
ggcgcgccagtcctgtagcaaacatctgacatttctgacatttctgacatttctgacatttctgacatttctgacatttctgacattactcccatttctgacattactcccatttctgacattactcccatttctgacattactcccatttctgacattactcccatttctgacatttctgacatttccgactcggaccgatg

SEQ ID NO: 16655 - DNA, 203 bp, synthetic construct
  source 1..203: mol_type = other DNA
ggcgcgccagtcctttaaagctaatctgacatttctgacatttctgacatttctgacatttctgacatttctgacatttctgacattactcccatttctgacattactcccatttctgacattactcccatttctgacattactcccatttctgacatttctgacatttctgacatttctgacatttccgactcggaccgatg

SEQ ID NO: 16656 - DNA, 203 bp, synthetic construct
  source 1..203: mol_type = other DNA
ggcgcgccagtccttaggatcgtctctgacatttctgacatttctgacatttctgacatttctgacatttctgacatttctgacattactcccatttctgacattactcccatttctgacattactcccatttctgacatttctgacatttctgacattactcccatttctgacattactcccatttccgactcggaccgatg

SEQ ID NO: 16657 - DNA, 203 bp, synthetic construct
  source 1..203: mol_type = other DNA
ggcgcgccagtcctggatcgtcagtctgacatttctgacatttctgacatttctgacatttctgacatttctgacatttctgacattactcccatttctgacattactcccatttctgacattactcccatttctgacatttctgacatttctgacattactcccatttctgacatttctgacatttccgactcggaccgatg

SEQ ID NO: 16658 - DNA, 203 bp, synthetic construct
  source 1..203: mol_type = other DNA
ggcgcgccagtccttgcttgggtctctgacatttctgacatttctgacatttctgacatttctgacatttctgacatttctgacattactcccatttctgacattactcccatttctgacattactcccatttctgacatttctgacatttctgacatttctgacatttctgacattactcccatttccgactcggaccgatg

SEQ ID NO: 16659 - DNA, 203 bp, synthetic construct
  source 1..203: mol_type = other DNA
ggcgcgccagtccttctcttacagtctgacatttctgacatttctgacatttctgacatttctgacatttctgacatttctgacattactcccatttctgacattactcccatttctgacattactcccatttctgacatttctgacatttctgacatttctgacatttctgacatttctgacatttccgactcggaccgatg

SEQ ID NO: 16660 - DNA, 203 bp, synthetic construct
  source 1..203: mol_type = other DNA
ggcgcgccagtccttcctgtgaactctgacatttctgacatttctgacatttctgacatttctgacatttctgacatttctgacattactcccatttctgacattactcccatttctgacatttctgacatttctgacattactcccatttctgacatttctgacatttctgacattactcccatttccgactcggaccgatg

SEQ ID NO: 16661 - DNA, 203 bp, synthetic construct
  source 1..203: mol_type = other DNA
ggcgcgccagtcctgaaaccgtactctgacatttctgacatttctgacatttctgacatttctgacatttctgacatttctgacattactcccatttctgacattactcccatttctgacatttctgacatttctgacatttctgacatttctgacatttctgacatttctgacattactcccatttccgactcggaccgatg

SEQ ID NO: 16662 - DNA, 203 bp, synthetic construct
  source 1..203: mol_type = other DNA
ggcgcgccagtcctgtacggtgagtctgacatttctgacatttctgacatttctgacatttctgacatttctgacatttctgacattactcccatttctgacattactcccatttctgacatttctgacatttctgacatttctgacatttctgacatttctgacatttctgacatttctgacatttccgactcggaccgatg

SEQ ID NO: 16663 - DNA, 203 bp, synthetic construct
  source 1..203: mol_type = other DNA
ggcgcgccagtccttagtacggtatctgacatttctgacatttctgacatttctgacatttctgacatttctgacatttctgacattactcccatttctgacatttctgacatttctgacattactcccatttctgacattactcccatttctgacattactcccatttctgacattactcccatttccgactcggaccgatg

SEQ ID NO: 16664 - DNA, 203 bp, synthetic construct
  source 1..203: mol_type = other DNA
ggcgcgccagtcctggtacggtgatctgacatttctgacatttctgacatttctgacatttctgacatttctgacatttctgacattactcccatttctgacatttctgacatttctgacattactcccatttctgacattactcccatttctgacattactcccatttctgacatttctgacatttccgactcggaccgatg

SEQ ID NO: 16665 - DNA, 203 bp, synthetic construct
  source 1..203: mol_type = other DNA
ggcgcgccagtccttcaggacacatctgacatttctgacatttctgacatttctgacatttctgacatttctgacatttctgacattactcccatttctgacatttctgacatttctgacattactcccatttctgacattactcccatttctgacatttctgacatttctgacattactcccatttccgactcggaccgatg

SEQ ID NO: 16666 - DNA, 203 bp, synthetic construct
  source 1..203: mol_type = other DNA
ggcgcgccagtcctggcagtcgtatctgacatttctgacatttctgacatttctgacatttctgacatttctgacatttctgacattactcccatttctgacatttctgacatttctgacattactcccatttctgacattactcccatttctgacatttctgacatttctgacatttctgacatttccgactcggaccgatg

SEQ ID NO: 16667 - DNA, 203 bp, synthetic construct
  source 1..203: mol_type = other DNA
ggcgcgccagtcctccaggctgtatctgacatttctgacatttctgacatttctgacatttctgacatttctgacatttctgacattactcccatttctgacatttctgacatttctgacattactcccatttctgacatttctgacatttctgacattactcccatttctgacattactcccatttccgactcggaccgatg

SEQ ID NO: 16668 - DNA, 203 bp, synthetic construct
  source 1..203: mol_type = other DNA
ggcgcgccagtcctcctcactgcctctgacatttctgacatttctgacatttctgacatttctgacatttctgacatttctgacattactcccatttctgacatttctgacatttctgacattactcccatttctgacatttctgacatttctgacattactcccatttctgacatttctgacatttccgactcggaccgatg

SEQ ID NO: 16669 - DNA, 203 bp, synthetic construct
  source 1..203: mol_type = other DNA
ggcgcgccagtccttaggctgtgttctgacatttctgacatttctgacatttctgacatttctgacatttctgacatttctgacattactcccatttctgacatttctgacatttctgacattactcccatttctgacatttctgacatttctgacatttctgacatttctgacattactcccatttccgactcggaccgatg

SEQ ID NO: 16670 - DNA, 203 bp, synthetic construct
  source 1..203: mol_type = other DNA
ggcgcgccagtcctggctgtcaggtctgacatttctgacatttctgacatttctgacatttctgacatttctgacatttctgacattactcccatttctgacatttctgacatttctgacatttctgacatttctgacattactcccatttctgacattactcccatttctgacattactcccatttccgactcggaccgatg

SEQ ID NO: 16671 - DNA, 203 bp, synthetic construct
  source 1..203: mol_type = other DNA
ggcgcgccagtccttacactgccttctgacatttctgacatttctgacatttctgacatttctgacatttctgacatttctgacattactcccatttctgacatttctgacatttctgacatttctgacatttctgacattactcccatttctgacattactcccatttctgacatttctgacatttccgactcggaccgatg

SEQ ID NO: 16672 - DNA, 203 bp, synthetic construct
  source 1..203: mol_type = other DNA
ggcgcgccagtcctaggcagtctttctgacatttctgacatttctgacatttctgacatttctgacatttctgacatttctgacattactcccatttctgacatttctgacatttctgacatttctgacatttctgacattactcccatttctgacatttctgacatttctgacatttctgacatttccgactcggaccgatg

SEQ ID NO: 16673 - DNA, 203 bp, synthetic construct
  source 1..203: mol_type = other DNA
ggcgcgccagtccttcatggtggatctgacatttctgacatttctgacatttctgacatttctgacatttctgacatttctgacattactcccatttctgacatttctgacatttctgacatttctgacatttctgacatttctgacatttctgacattactcccatttctgacatttctgacatttccgactcggaccgatg

SEQ ID NO: 16674 - DNA, 203 bp, synthetic construct
  source 1..203: mol_type = other DNA
ggcgcgccagtcctttaaggatcttctgacatttctgacatttctgacatttctgacatttctgacatttctgacatttctgacattactcccatttctgacatttctgacatttctgacatttctgacatttctgacatttctgacatttctgacatttctgacatttctgacattactcccatttccgactcggaccgatg

SEQ ID NO: 16675 - DNA, 203 bp, synthetic construct
  source 1..203: mol_type = other DNA
ggcgcgccagtcctctctaccagatctgacatttctgacatttctgacatttctgacatttctgacatttctgacatttctgacattactcgtatttctgacattactcgtatttctgacattactcgtatttctgacattactcgtatttctgacattactcgtatttctgacatttctgacatttccgactcggaccgatg

SEQ ID NO: 16676 - DNA, 203 bp, synthetic construct
  source 1..203: mol_type = other DNA
ggcgcgccagtcctacaggcttactctgacatttctgacatttctgacatttctgacatttctgacatttctgacatttctgacattactgacatttctgacattactgacatttctgacattactgacatttctgacattactgacatttctgacattactgacatttctgacatttctgacatttccgactcggaccgatg

SEQ ID NO: 16677 - DNA, 203 bp, synthetic construct
  source 1..203: mol_type = other DNA
ggcgcgccagtcctaggacaacagtctgacatttctgacatttctgacatttctgacatttctgacatttctgacatttctgacattacttggcaaactgacattacttggcaaactgacattacttggcaaactgacattacttggcaaactgacattacttggcaaactgacatttctgacatttccgactcggaccgatg

SEQ ID NO: 16678 - DNA, 203 bp, synthetic construct
  source 1..203: mol_type = other DNA
ggcgcgccagtcctgctacgagtttctgacatttctgacatttctgacatttctgacatttctgacatttctgacatttctgacattactttcatttctgacattactttcatttctgacattactttcatttctgacattactttcatttctgacattactttcatttctgacatttctgacatttccgactcggaccgatg

SEQ ID NO: 16679 - DNA, 203 bp, synthetic construct
  source 1..203: mol_type = other DNA
ggcgcgccagtcctcctgagacaatctgacatttctgacatttctgacatttctgacatttctgacatttctgacatttctgacattagccccatttctgacattagccccatttctgacattagccccatttctgacattagccccatttctgacattagccccatttctgacatttctgacatttccgactcggaccgatg

SEQ ID NO: 16680 - DNA, 203 bp, synthetic construct
  source 1..203: mol_type = other DNA
ggcgcgccagtcctgtagacaacttctgacatttctgacatttctgacatttctgacatttctgacatttctgacatttctgacattaggcccatttctgacattaggcccatttctgacattaggcccatttctgacattaggcccatttctgacattaggcccatttctgacatttctgacatttccgactcggaccgatg

SEQ ID NO: 16681 - DNA, 203 bp, synthetic construct
  source 1..203: mol_type = other DNA
ggcgcgccagtccttcagacaagctctgacatttctgacatttctgacatttctgacatttctgacatttctgacatttctgacattaggcgggtttctgacattaggcgggtttctgacattaggcgggtttctgacattaggcgggtttctgacattaggcgggtttctgacatttctgacatttccgactcggaccgatg

SEQ ID NO: 16682 - DNA, 203 bp, synthetic construct
  source 1..203: mol_type = other DNA
ggcgcgccagtcctcatgggtatttctgacatttctgacatttctgacatttctgacatttctgacatttctgacatttctgacattccggaatcgagaaacattccggaatcgagaaacattccggaatcgagaaacattccggaatcgagaaacattccggaatcgagaaacatttctgacatttccgactcggaccgatg

SEQ ID NO: 16683 - DNA, 203 bp, synthetic construct
  source 1..203: mol_type = other DNA
ggcgcgccagtcctgtcatgttcatctgacatttctgacatttctgacatttctgacatttctgacatttctgacatttctgacattcctcccatttctgacattcctcccatttctgacattcctcccatttctgacattcctcccatttctgacattcctcccatttctgacatttctgacatttccgactcggaccgatg

SEQ ID NO: 16684 - DNA, 203 bp, synthetic construct
  source 1..203: mol_type = other DNA
ggcgcgccagtcctgtgagaagtttctgacatttctgacatttctgacatttctgacatttctgacatttctgacatttctgacattgcggccgtttctgacattgcggccgtttctgacattgcggccgtttctgacattgcggccgtttctgacattgcggccgtttctgacatttctgacatttccgactcggaccgatg

SEQ ID NO: 16685 - DNA, 203 bp, synthetic construct
  source 1..203: mol_type = other DNA
ggcgcgccagtcctgtatctaagttctgacatttctgacatttctgacatttctgacatttctgacatttctgacatttctgacattgctcccatttctgacattgctcccatttctgacattgctcccatttctgacattgctcccatttctgacattgctcccatttctgacatttctgacatttccgactcggaccgatg

SEQ ID NO: 16686 - DNA, 203 bp, synthetic construct
  source 1..203: mol_type = other DNA
ggcgcgccagtccttctaagctcatctgacatttctgacatttctgacatttctgacatttctgacatttctgacatttctgacattgggcgggtttctgacattgggcgggtttctgacattgggcgggtttctgacattgggcgggtttctgacattgggcgggtttctgacatttctgacatttccgactcggaccgatg

SEQ ID NO: 16687 - DNA, 203 bp, synthetic construct
  source 1..203: mol_type = other DNA
ggcgcgccagtcctaatctaaggatctgacatttctgacatttctgacatttctgacatttctgacatttctgacatttctgacattgtcaattcctttaacattgtcaattcctttaacattgtcaattcctttaacattgtcaattcctttaacattgtcaattcctttaacatttctgacatttccgactcggaccgatg

SEQ ID NO: 16688 - DNA, 203 bp, synthetic construct
  source 1..203: mol_type = other DNA
ggcgcgccagtcctccacttagactctgacatttctgacatttctgacatttctgacatttctgacatttctgacatttctgacatttaccggccgtctgacatttctgacatttctgacatttctgacatttctgacatttctgacatttctgacatttctgacatttctgacatttctgtactccccgactcggaccgatg

SEQ ID NO: 16689 - DNA, 203 bp, synthetic construct
  source 1..203: mol_type = other DNA
ggcgcgccagtccttcttagactgtctgacatttctgacatttctgacatttctgacatttctgacatttctgacatttctgacatttaccggccgtctgacatttctgacatttctgacatttctgacatttctgacatttctgacatttctgacatttctgacatttctgaccacggaatcgagaacgactcggaccgatg

SEQ ID NO: 16690 - DNA, 203 bp, synthetic construct
  source 1..203: mol_type = other DNA
ggcgcgccagtccttcttagagactctgacatttctgacatttctgacatttctgacatttctgacatttctgacatttctgacatttaccggccgtctgacatttctgacatttctgacatttctgacatttctgacatttctgacatttctgacatttctgacatttctgaccgtcaattcctttacgactcggaccgatg

SEQ ID NO: 16691 - DNA, 203 bp, synthetic construct
  source 1..203: mol_type = other DNA
ggcgcgccagtcctccaccgtgcctctgacatttctgacatttctgacatttctgacatttctgacatttctgacatttctgacatttactggcaaactgacatttactggcaaactgacatttactggcaaactgacatttactggcaaactgacatttactggcaaactgacatttctgacatttccgactcggaccgatg

SEQ ID NO: 16692 - DNA, 203 bp, synthetic construct
  source 1..203: mol_type = other DNA
ggcgcgccagtcctagtttgggtatctgacatttctgacatttctgacatttctgacatttctgacatttctgacatttctgacatttcagccattcgcagtttcactgtaccggccgtgcgtactcagacatgcatggtttctgacatttctgacatttctgacatttctgacatttctgacatttccgactcggaccgatg

SEQ ID NO: 16693 - DNA, 203 bp, synthetic construct
  source 1..203: mol_type = other DNA
ggcgcgccagtcctcaacagtgactctgacatttctgacatttctgacatttctgacatttctgacatttctgacatttctgacatttccggccatgcaccaccacccacggaatcgagaaagagctatcaatctgtcatttctgacatttctgacatttctgacatttctgacatttctgacatttccgactcggaccgatg

SEQ ID NO: 16694 - DNA, 203 bp, synthetic construct
  source 1..203: mol_type = other DNA
ggcgcgccagtcctttgaacagcatctgacatttctgacatttctgacatttctgacatttctgacatttctgacatttctgacatttccggcgggtctgacatttctgacatttctgacatttctgacatttctgacatttctgacatttctgacatttctgacatttctgacatttctgtactccccgactcggaccgatg

SEQ ID NO: 16695 - DNA, 203 bp, synthetic construct
  source 1..203: mol_type = other DNA
ggcgcgccagtcctaacgctactctctgacatttctgacatttctgacatttctgacatttctgacatttctgacatttctgacatttcctggcaaactgacatttcctggcaaactgacatttcctggcaaactgacatttcctggcaaactgacatttcctggcaaactgacatttctgacatttccgactcggaccgatg

SEQ ID NO: 16696 - DNA, 203 bp, synthetic construct
  source 1..203: mol_type = other DNA
ggcgcgccagtcctcagatcagtgtctgacatttctgacatttctgacatttctgacatttctgacatttctgacatttctgacatttcggccgtttctgacatttcggccgtttctgacatttcggccgtttctgacatttcggccgtttctgacatttcggccgtttctgacatttctgacatttccgactcggaccgatg

SEQ ID NO: 16697 - DNA, 203 bp, synthetic construct
  source 1..203: mol_type = other DNA
ggcgcgccagtcctgactgcagtctctgacatttctgacatttctgacatttctgacatttctgacatttctgacatttctgacatttcgtcaattcctttaatttctgacatttctgacatttctgacatttctgacatttctgacatttctgacatttctgacatttctgacatttcaccggccgtcgactcggaccgatg

SEQ ID NO: 16698 - DNA, 203 bp, synthetic construct
  source 1..203: mol_type = other DNA
ggcgcgccagtcctcttaacacattctgacatttctgacatttctgacatttctgacatttctgacatttctgacatttctgacatttcgtcaattcctttaatttctgacatttctgacatttctgacatttctgacatttctgacatttctgacatttctgacatttctgacatttcccggcgggtcgactcggaccgatg

SEQ ID NO: 16699 - DNA, 203 bp, synthetic construct
  source 1..203: mol_type = other DNA
ggcgcgccagtcctaggttgacgatctgacatttctgacatttctgacatttctgacatttctgacatttctgacatttctgacatttcgttcttgattaatgaaaacattcttggcaaatgctttcgctctggtccgtcttctgacatttctgacatttctgacatttctgacatttctgacatttccgactcggaccgatg

SEQ ID NO: 16700 - DNA, 203 bp, synthetic construct
  source 1..203: mol_type = other DNA
ggcgcgccagtcctctcgtcaacctctgacatttctgacatttctgacatttctgacatttctgacatttctgacatttctgacatttcgttcttgattaatgaaaacattcttggcaaatgctttcgctctggtccgttttctgacatttctgacatttctgacatttctgacatttctgacatttccgactcggaccgatg

SEQ ID NO: 16701 - DNA, 203 bp, synthetic construct
  source 1..203: mol_type = other DNA
ggcgcgccagtcctgaggatcacttctgacatttctgacatttctgacatttctgacatttctgacatttctgacatttctgacatttctaggcaaactgacatttctaggcaaactgacatttctaggcaaactgacatttctaggcaaactgacatttctaggcaaactgacatttctgacatttccgactcggaccgatg

SEQ ID NO: 16702 - DNA, 203 bp, synthetic construct
  source 1..203: mol_type = other DNA
ggcgcgccagtcctcactgggttctctgacatttctgacatttctgacatttctgacatttctgacatttctgacatttctgacatttctcacggaatcgagaattctgacatttctgacatttctgacatttctgacatttctgacatttctgacatttctgacatttctgaccacggaatcgagaacgactcggaccgatg

SEQ ID NO: 16703 - DNA, 203 bp, synthetic construct
  source 1..203: mol_type = other DNA
ggcgcgccagtcctgacccagtattctgacatttctgacatttctgacatttctgacatttctgacatttctgacatttctgacatttctcacggaatcgagaattctgacatttctgacatttctgacatttctgacatttctgacatttctgacatttctgacatttctgaccgtcaattcctttacgactcggaccgatg

SEQ ID NO: 16704 - DNA, 203 bp, synthetic construct
  source 1..203: mol_type = other DNA
ggcgcgccagtcctacccagtatgtctgacatttctgacatttctgacatttctgacatttctgacatttctgacatttctgacatttctcagcaaactgacatttctcagcaaactgacatttctcagcaaactgacatttctcagcaaactgacatttctcagcaaactgacatttctgacatttccgactcggaccgatg

SEQ ID NO: 16705 - DNA, 203 bp, synthetic construct
  source 1..203: mol_type = other DNA
ggcgcgccagtcctcccagtttgctctgacatttctgacatttctgacatttctgacatttctgacatttctgacatttctgacatttctcgattccgtgacatttctcgattccgtgacatttctcgattccgtgacatttctcgattccgtgacatttctcgattccgtgacatttctgacatttccgactcggaccgatg

SEQ ID NO: 16706 - DNA, 203 bp, synthetic construct
  source 1..203: mol_type = other DNA
ggcgcgccagtcctgatcctgaactctgacatttctgacatttctgacatttctgacatttctgacatttctgacatttctgacatttctcggcaaactgacatttctcggcaaactgacatttctcggcaaactgacatttctcggcaaactgacatttctcggcaaactgacatttctgacatttccgactcggaccgatg

SEQ ID NO: 16707 - DNA, 203 bp, synthetic construct
  source 1..203: mol_type = other DNA
ggcgcgccagtcctaaacggtgcctctgacatttctgacatttctgacatttctgacatttctgacatttctgacatttctgacatttctgaagtttcagctttgcaaccatactccccccggaacccaaagacttacatttctgacatttctgacatttctgacatttctgacatttctgacatttccgactcggaccgatg

SEQ ID NO: 16708 - DNA, 203 bp, synthetic construct
  source 1..203: mol_type = other DNA
ggcgcgccagtcctagagaggatctctgacatttctgacatttctgacatttctgacatttctgacatttctgacatttctgacatttctgacaccggccgtatttctgacatttctgacatttctgacatttctgacatttctgacatttctgacatttctgacatttctgacatttcccggcgggtcgactcggaccgatg

SEQ ID NO: 16709 - DNA, 203 bp, synthetic construct
  source 1..203: mol_type = other DNA
ggcgcgccagtcctatgggttaaatctgacatttctgacatttctgacatttctgacatttctgacatttctgacatttctgacatttctgacagtttcccggaagctgcccggcgggtcatgggaataacgcctgacatttctgacatttctgacatttctgacatttctgacatttctgacatttccgactcggaccgatg

SEQ ID NO: 16710 - DNA, 203 bp, synthetic construct
  source 1..203: mol_type = other DNA
ggcgcgccagtcctagttaaaggatctgacatttctgacatttctgacatttctgacatttctgacatttctgacatttctgacatttctgacataccggccgtttctgacatttctgacatttctgacatttctgacatttctgacatttctgacatttctgacatttctgacatttctgacatttccgactcggaccgatg

SEQ ID NO: 16711 - DNA, 203 bp, synthetic construct
  source 1..203: mol_type = other DNA
ggcgcgccagtcctcgaaaactgttctgacatttctgacatttctgacatttctgacatttctgacatttctgacatttctgacatttctgacatccggcgggtttctgacatttctgacatttctgacatttctgacatttctgacatttctgacatttctgacatttctgacatttctgtactccccgactcggaccgatg

SEQ ID NO: 16712 - DNA, 203 bp, synthetic construct
  source 1..203: mol_type = other DNA
ggcgcgccagtccttgtatcctcgtctgacatttctgacatttctgacatttctgacatttctgacatttctgacatttctgacatttctgacatccggcgggtttctgacatttctgacatttctgacatttctgacatttctgacatttctgacatttctgacatttctgaccgtcaattcctttacgactcggaccgatg

SEQ ID NO: 16713 - DNA, 203 bp, synthetic construct
  source 1..203: mol_type = other DNA
ggcgcgccagtcctcgaaaaccagtctgacatttctgacatttctgacatttctgacatttctgacatttctgacatttctgacatttctgacatcgtcaattcctttaacatttctgacatttctgacatttctgacatttctgacatttctgacatttctgacatttctgacatttcaccggccgtcgactcggaccgatg

SEQ ID NO: 16714 - DNA, 203 bp, synthetic construct
  source 1..203: mol_type = other DNA
ggcgcgccagtcctggaccactcgtctgacatttctgacatttctgacatttctgacatttctgacatttctgacatttctgacatttctgacatgattaatgaaaacattcttggcaaatgctttcgctctgctgacatttctgacatttctgacatttctgacatttctgacatttctgacatttccgactcggaccgatg

SEQ ID NO: 16715 - DNA, 203 bp, synthetic construct
  source 1..203: mol_type = other DNA
ggcgcgccagtcctttgagtatcgtctgacatttctgacatttctgacatttctgacatttctgacatttctgacatttctgacatttctgacatgtggtgcccttccgtcaattcctttaagtttcagctttctgacatttctgacatttctgacatttctgacatttctgacatttctgacatttccgactcggaccgatg

SEQ ID NO: 16716 - DNA, 203 bp, synthetic construct
  source 1..203: mol_type = other DNA
ggcgcgccagtcctttactgctcgtctgacatttctgacatttctgacatttctgacatttctgacatttctgacatttctgacatttctgacattcgcagtttcactgtaccggccgtgcgtactcagacatctgacatttctgacatttctgacatttctgacatttctgacatttctgacatttccgactcggaccgatg

SEQ ID NO: 16717 - DNA, 203 bp, synthetic construct
  source 1..203: mol_type = other DNA
ggcgcgccagtcctcgaagcagtttctgacatttctgacatttctgacatttctgacatttctgacatttctgacatttctgacatttctgacattcgcagtttcactgtaccggccgtgcgtactcagacatgcgacatttctgacatttctgacatttctgacatttctgacatttctgacatttccgactcggaccgatg

SEQ ID NO: 16718 - DNA, 203 bp, synthetic construct
  source 1..203: mol_type = other DNA
ggcgcgccagtcctgttggactcgtctgacatttctgacatttctgacatttctgacatttctgacatttctgacatttctgacatttctgacattgcaccaccacccacggaatcgagaaagagctatcaatctgacatttctgacatttctgacatttctgacatttctgacatttctgacatttccgactcggaccgatg

SEQ ID NO: 16719 - DNA, 203 bp, synthetic construct
  source 1..203: mol_type = other DNA
ggcgcgccagtcctatccacctcgtctgacatttctgacatttctgacatttctgacatttctgacatttctgacatttctgacatttctgacatttcaccggccgttgacatttctgacatttctgacatttctgacatttctgacatttctgacatttctgacatttctgacattttcttggcaaacgactcggaccgatg

SEQ ID NO: 16720 - DNA, 203 bp, synthetic construct
  source 1..203: mol_type = other DNA
ggcgcgccagtcctgaggccttcgtctgacatttctgacatttctgacatttctgacatttctgacatttctgacatttctgacatttctgacatttcacggaatcgagaaatttctgacatttctgacatttctgacatttctgacatttctgacatttctgacatttctgaccacggaatcgagaacgactcggaccgatg

SEQ ID NO: 16721 - DNA, 203 bp, synthetic construct
  source 1..203: mol_type = other DNA
ggcgcgccagtcctcgacaacgtttctgacatttctgacatttctgacatttctgacatttctgacatttctgacatttctgacatttctgacatttcagctttgcaaccatactccccccggaacccaaagtctgacatttctgacatttctgacatttctgacatttctgacatttctgacatttccgactcggaccgatg

SEQ ID NO: 16722 - DNA, 203 bp, synthetic construct
  source 1..203: mol_type = other DNA
ggcgcgccagtcctcgactctgtgtctgacatttctgacatttctgacatttctgacatttctgacatttctgacatttctgacatttctgacatttcagctttgcaaccatactccccccggaacccaaattctgacatttctgacatttctgacatttctgacatttctgacatttctgacatttccgactcggaccgatg

SEQ ID NO: 16723 - DNA, 203 bp, synthetic construct
  source 1..203: mol_type = other DNA
ggcgcgccagtcctctgttgctcgtctgacatttctgacatttctgacatttctgacatttctgacatttctgacatttctgacatttctgacatttcccggcgggttgacatttctgacatttctgacatttctgacatttctgacatttctgacatttctgacatttctgacattttcttggcaaacgactcggaccgatg

SEQ ID NO: 16724 - DNA, 203 bp, synthetic construct
  source 1..203: mol_type = other DNA
ggcgcgccagtcctcgagttcacctctgacatttctgacatttctgacatttctgacatttctgacatttctgacatttctgacatttctgacatttcgtgcccttccgtcaattcctttaagtttcagctttctgacatttctgacatttctgacatttctgacatttctgacatttctgacatttccgactcggaccgatg

SEQ ID NO: 16725 - DNA, 203 bp, synthetic construct
  source 1..203: mol_type = other DNA
ggcgcgccagtcctcgaatcctggtctgacatttctgacatttctgacatttctgacatttctgacatttctgacatttctgacatttctgacatttctaatgaaaacattcttggcaaatgctttcgcttttctgacatttctgacatttctgacatttctgacatttctgacatttctgacatttccgactcggaccgatg

SEQ ID NO: 16726 - DNA, 203 bp, synthetic construct
  source 1..203: mol_type = other DNA
ggcgcgccagtcctcgatacgttatctgacatttctgacatttctgacatttctgacatttctgacatttctgacatttctgacatttctgacatttctgaaccacccacggaatcgagaaagagctacatttctgacatttctgacatttctgacatttctgacatttctgacatttctgacatttccgactcggaccgatg

SEQ ID NO: 16727 - DNA, 203 bp, synthetic construct
  source 1..203: mol_type = other DNA
ggcgcgccagtccttgctctgtcgtctgacatttctgacatttctgacatttctgacatttctgacatttctgacatttctgacatttctgacatttctgacatacccgccggttctgacatacccgccggttctgacatacccgccggttctgacatacccgccggttctgacatttctgacatttccgactcggaccgatg

SEQ ID NO: 16728 - DNA, 203 bp, synthetic construct
  source 1..203: mol_type = other DNA
ggcgcgccagtcctcacaacgtcgtctgacatttctgacatttctgacatttctgacatttctgacatttctgacatttctgacatttctgacatttctgacataccggccgtttctgacataccggccgtttctgacatttctgacatttctgacataccggccgtttctgacataccggccgtttccgactcggaccgatg

SEQ ID NO: 16729 - DNA, 203 bp, synthetic construct
  source 1..203: mol_type = other DNA
ggcgcgccagtcctcgagcaagtttctgacatttctgacatttctgacatttctgacatttctgacatttctgacatttctgacatttctgacatttctgacataccggccgtttctgacatttctgacatttctgacataccggccgtttctgacatttctgacatttctgacataccggccgtttccgactcggaccgatg

SEQ ID NO: 16730 - DNA, 203 bp, synthetic construct
  source 1..203: mol_type = other DNA
ggcgcgccagtcctcgagttgaggtctgacatttctgacatttctgacatttctgacatttctgacatttctgacatttctgacatttctgacatttctgacataccggccgtttctgacatttctgacatttctgacatttctgacatttctgacatttctgacatttctgacataccggccgtttccgactcggaccgatg

SEQ ID NO: 16731 - DNA, 203 bp, synthetic construct
  source 1..203: mol_type = other DNA
ggcgcgccagtcctgttttgaatatctgacatttctgacatttctgacatttctgacatttctgacatttctgacatttctgacatttctgacatttctgacataccggccgtttctgacatttctgacatttctgacatttctgacatttctgacatttctgacatttctgacatttctgacatttccgactcggaccgatg

SEQ ID NO: 16732 - DNA, 203 bp, synthetic construct
  source 1..203: mol_type = other DNA
ggcgcgccagtcctgtttaacttatctgacatttctgacatttctgacatttctgacatttctgacatttctgacatttctgacatttctgacatttctgacatacggccggtttctgacatacggccggtttctgacatacggccggtttctgacatacggccggtttctgacatttctgacatttccgactcggaccgatg

SEQ ID NO: 16733 - DNA, 203 bp, synthetic construct
  source 1..203: mol_type = other DNA
ggcgcgccagtcctccactttctttctgacatttctgacatttctgacatttctgacatttctgacatttctgacatttctgacatttctgacatttctgacatagctgcccggcgggtcatggctgacatttctgacatttctgacatttctgacatttctgacatttctgacatttctgacatttccgactcggaccgatg

SEQ ID NO: 16734 - DNA, 203 bp, synthetic construct
  source 1..203: mol_type = other DNA
ggcgcgccagtcctaaatcacagctctgacatttctgacatttctgacatttctgacatttctgacatttctgacatttctgacatttctgacatttctgacatcacggaatcgagaaacatcacggaatcgagaaacatcacggaatcgagaaacatttctgacatttctgacatttctgacatttccgactcggaccgatg

SEQ ID NO: 16735 - DNA, 203 bp, synthetic construct
  source 1..203: mol_type = other DNA
ggcgcgccagtcctagcaaaatgctctgacatttctgacatttctgacatttctgacatttctgacatttctgacatttctgacatttctgacatttctgacatcacggaatcgagaaacatttctgacatttctgacatttctgacatttctgacatcacggaatcgagaaacatttctgacatttccgactcggaccgatg

SEQ ID NO: 16736 - DNA, 203 bp, synthetic construct
  source 1..203: mol_type = other DNA
ggcgcgccagtcctaaatctctagtctgacatttctgacatttctgacatttctgacatttctgacatttctgacatttctgacatttctgacatttctgacatcacggaatcgagaaacatttctgacatttctgacatttctgacatttctgacatttctgacatttctgacatttctgacatttccgactcggaccgatg

SEQ ID NO: 16737 - DNA, 203 bp, synthetic construct
  source 1..203: mol_type = other DNA
ggcgcgccagtccttgcacaaatgtctgacatttctgacatttctgacatttctgacatttctgacatttctgacatttctgacatttctgacatttctgacatcacggaatcgagaaacatttctgacatttctgacatttctgacatttctgacatttctgacatttctgacatttctgtactccccgactcggaccgatg

SEQ ID NO: 16738 - DNA, 203 bp, synthetic construct
  source 1..203: mol_type = other DNA
ggcgcgccagtcctcttgcaaatctctgacatttctgacatttctgacatttctgacatttctgacatttctgacatttctgacatttctgacatttctgacatccggcgggtttctgacatccggcgggtttctgacatccggcgggtttctgacatccggcgggtttctgacatccggcgggtttccgactcggaccgatg

SEQ ID NO: 16739 - DNA, 203 bp, synthetic construct
  source 1..203: mol_type = other DNA
ggcgcgccagtcctgctagaaatctctgacatttctgacatttctgacatttctgacatttctgacatttctgacatttctgacatttctgacatttctgacatccggcgggtttctgacatccggcgggtttctgacatccggcgggtttctgacatccggcgggtttctgacatccggcgggtttccgactcggaccgatg

SEQ ID NO: 16740 - DNA, 203 bp, synthetic construct
  source 1..203: mol_type = other DNA
ggcgcgccagtcctaaatgagttgtctgacatttctgacatttctgacatttctgacatttctgacatttctgacatttctgacatttctgacatttctgacatccggcgggtttctgacatccggcgggtttctgacatccggcgggtttctgacatccggcgggtttctgacatccggcgggtttccgactcggaccgatg

SEQ ID NO: 16741 - DNA, 203 bp, synthetic construct
  source 1..203: mol_type = other DNA
ggcgcgccagtcctcctgaaaatgtctgacatttctgacatttctgacatttctgacatttctgacatttctgacatttctgacatttctgacatttctgacatccggcgggtttctgacatccggcgggtttctgacatccggcgggtttctgacatttctgacatttctgacatccggcgggtttccgactcggaccgatg

SEQ ID NO: 16742 - DNA, 203 bp, synthetic construct
  source 1..203: mol_type = other DNA
ggcgcgccagtccttgctgaaatctctgacatttctgacatttctgacatttctgacatttctgacatttctgacatttctgacatttctgacatttctgacatccggcgggtttctgacatccggcgggtttctgacatttctgacatttctgacatccggcgggtttctgacatttctgacatttccgactcggaccgatg

SEQ ID NO: 16743 - DNA, 203 bp, synthetic construct
  source 1..203: mol_type = other DNA
ggcgcgccagtcctctcaaatggttctgacatttctgacatttctgacatttctgacatttctgacatttctgacatttctgacatttctgacatttctgacatccggcgggtttctgacatccggcgggtttctgacatttctgacatttctgacatttctgacatttctgacatccggcgggtttccgactcggaccgatg

SEQ ID NO: 16744 - DNA, 203 bp, synthetic construct
  source 1..203: mol_type = other DNA
ggcgcgccagtcctcagatttgattctgacatttctgacatttctgacatttctgacatttctgacatttctgacatttctgacatttctgacatttctgacatccggcgggtttctgacatttctgacatttctgacatccggcgggtttctgacatttctgacatttctgacatttctgacatttccgactcggaccgatg

SEQ ID NO: 16745 - DNA, 203 bp, synthetic construct
  source 1..203: mol_type = other DNA
ggcgcgccagtcctgaatgatttctctgacatttctgacatttctgacatttctgacatttctgacatttctgacatttctgacatttctgacatttctgacatccggcgggtttctgacatttctgacatttctgacatttctgacatttctgacatttctgacatttctgacatccggcgggtttccgactcggaccgatg

SEQ ID NO: 16746 - DNA, 203 bp, synthetic construct
  source 1..203: mol_type = other DNA
ggcgcgccagtcctgatttcacaatctgacatttctgacatttctgacatttctgacatttctgacatttctgacatttctgacatttctgacatttctgacatcgtcaattcctttaacatcgtcaattcctttaacatcgtcaattcctttaacatcgtcaattcctttaacatttctgacatttccgactcggaccgatg

SEQ ID NO: 16747 - DNA, 203 bp, synthetic construct
  source 1..203: mol_type = other DNA
ggcgcgccagtccttacttgattttctgacatttctgacatttctgacatttctgacatttctgacatttctgacatttctgacatttctgacatttctgacatcgtcaattcctttaacatcgtcaattcctttaacatcgtcaattcctttaacatttctgacatttctgacatttctgacatttccgactcggaccgatg

SEQ ID NO: 16748 - DNA, 203 bp, synthetic construct
  source 1..203: mol_type = other DNA
ggcgcgccagtcctatttgatcagtctgacatttctgacatttctgacatttctgacatttctgacatttctgacatttctgacatttctgacatttctgacatcgtcaattcctttaacatttctgacatttctgacatttctgacatttctgacatcgtcaattcctttaacatttctgacatttccgactcggaccgatg

SEQ ID NO: 16749 - DNA, 203 bp, synthetic construct
  source 1..203: mol_type = other DNA
ggcgcgccagtcctgtgatttcactctgacatttctgacatttctgacatttctgacatttctgacatttctgacatttctgacatttctgacatttctgacatgcaaccatactccccccggaatgacatttctgacatttctgacatttctgacatttctgacatttctgacatttctgacatttccgactcggaccgatg

SEQ ID NO: 16750 - DNA, 203 bp, synthetic construct
  source 1..203: mol_type = other DNA
ggcgcgccagtcctgcagatttgttctgacatttctgacatttctgacatttctgacatttctgacatttctgacatttctgacatttctgacatttctgacattactcccatttctgacattactcccatttctgacattactcccatttctgacatttctgacatttctgacattactcccatttccgactcggaccgatg

SEQ ID NO: 16751 - DNA, 203 bp, synthetic construct
  source 1..203: mol_type = other DNA
ggcgcgccagtcctttagatttggtctgacatttctgacatttctgacatttctgacatttctgacatttctgacatttctgacatttctgacatttctgacattactcccatttctgacattactcccatttctgacatttctgacatttctgacattactcccatttctgacatttctgacatttccgactcggaccgatg

SEQ ID NO: 16752 - DNA, 203 bp, synthetic construct
  source 1..203: mol_type = other DNA
ggcgcgccagtccttaggatttcgtctgacatttctgacatttctgacatttctgacatttctgacatttctgacatttctgacatttctgacatttctgacattactcccatttctgacatttctgacatttctgacattactcccatttctgacattactcccatttctgacattactcccatttccgactcggaccgatg

SEQ ID NO: 16753 - DNA, 203 bp, synthetic construct
  source 1..203: mol_type = other DNA
ggcgcgccagtcctagaacactagtctgacatttctgacatttctgacatttctgacatttctgacatttctgacatttctgacatttctgacatttctgacattactcccatttctgacatttctgacatttctgacattactcccatttctgacattactcccatttctgacatttctgacatttccgactcggaccgatg

SEQ ID NO: 16754 - DNA, 203 bp, synthetic construct
  source 1..203: mol_type = other DNA
ggcgcgccagtccttgatcctacatctgacatttctgacatttctgacatttctgacatttctgacatttctgacatttctgacatttctgacatttctgacattactcccatttctgacatttctgacatttctgacattactcccatttctgacatttctgacatttctgacattactcccatttccgactcggaccgatg

SEQ ID NO: 16755 - DNA, 203 bp, synthetic construct
  source 1..203: mol_type = other DNA
ggcgcgccagtcctcgacctacaatctgacatttctgacatttctgacatttctgacatttctgacatttctgacatttctgacatttctgacatttctgacattactcccatttctgacatttctgacatttctgacatttctgacatttctgacattactcccatttctgacattactcccatttccgactcggaccgatg

SEQ ID NO: 16756 - DNA, 203 bp, synthetic construct
  source 1..203: mol_type = other DNA
ggcgcgccagtcctccaaccagtgtctgacatttctgacatttctgacatttctgacatttctgacatttctgacatttctgacatttctgacatttctgacattactcccatttctgacatttctgacatttctgacatttctgacatttctgacatttctgacatttctgacattactcccatttccgactcggaccgatg

SEQ ID NO: 16757 - DNA, 203 bp, synthetic construct
  source 1..203: mol_type = other DNA
ggcgcgccagtcctcatgtatgcatctgacatttctgacatttctgacatttctgacatttctgacatttctgacatttctgacatttctgacatttctgacattactgtaccggccgtgcgttctgacatttctgacatttctgacatttctgacatttctgacatttctgacatttctgacatttccgactcggaccgatg

SEQ ID NO: 16758 - DNA, 203 bp, synthetic construct
  source 1..203: mol_type = other DNA
ggcgcgccagtcctactacatgagtctgacatttctgacatttctgacatttctgacatttctgacatttctgacatttctgacatttctgacatttctgacattccggcgggttctgacatttctgacatttctgacatttctgacatttctgacatttctgacatttctgacattttcttggcaaacgactcggaccgatg

SEQ ID NO: 16759 - DNA, 203 bp, synthetic construct
  source 1..203: mol_type = other DNA
ggcgcgccagtccttacaggttggtctgacatttctgacatttctgacatttctgacatttctgacatttctgacatttctgacatttctgacatttctgacatttaaccatactccccccgttctgacatttctgacatttctgacatttctgacatttctgacatttctgacatttctgacatttccgactcggaccgatg

SEQ ID NO: 16760 - DNA, 203 bp, synthetic construct
  source 1..203: mol_type = other DNA
ggcgcgccagtccttcgcaggtggtctgacatttctgacatttctgacatttctgacatttctgacatttctgacatttctgacatttctgacatttctgacatttcaccggccgttgacatttctgacatttctgacatttctgacatttctgacatttctgacatttctgacatttcccggcgggtcgactcggaccgatg

SEQ ID NO: 16761 - DNA, 203 bp, synthetic construct
  source 1..203: mol_type = other DNA
ggcgcgccagtcctgtcactcatttctgacatttctgacatttctgacatttctgacatttctgacatttctgacatttctgacatttctgacatttctgacatttccacggaatcgagaatttctgacatttctgacatttctgacatttctgacatttctgacatttctgacatttctgacatttccgactcggaccgatg

SEQ ID NO: 16762 - DNA, 203 bp, synthetic construct
  source 1..203: mol_type = other DNA
ggcgcgccagtcctacgagcagcatctgacatttctgacatttctgacatttctgacatttctgacatttctgacatttctgacatttctgacatttctgacatttcccggcgggttgacatttctgacatttctgacatttctgacatttctgacatttctgacatttctgacatttcaccggccgtcgactcggaccgatg

SEQ ID NO: 16763 - DNA, 203 bp, synthetic construct
  source 1..203: mol_type = other DNA
ggcgcgccagtcctgtgcagcatatctgacatttctgacatttctgacatttctgacatttctgacatttctgacatttctgacatttctgacatttctgacatttccgtcaattcctttaattctgacatttctgacatttctgacatttctgacatttctgacatttctgacatttctgacatttccgactcggaccgatg

SEQ ID NO: 16764 - DNA, 203 bp, synthetic construct
  source 1..203: mol_type = other DNA
ggcgcgccagtcctatccaacagttctgacatttctgacatttctgacatttctgacatttctgacatttctgacatttctgacatttctgacatttctgacatttctcgattccgtgacatttctcgattccgtgacatttctcgattccgtgacatttctcgattccgtgacatttctgacatttccgactcggaccgatg

SEQ ID NO: 16765 - DNA, 203 bp, synthetic construct
  source 1..203: mol_type = other DNA
ggcgcgccagtcctgttaggcctctctgacatttctgacatttctgacatttctgacatttctgacatttctgacatttctgacatttctgacatttctgacatttctgacaaccggccgttttctgacatttctgacatttctgacatttctgacatttctgacatttctgacattttcttggcaaacgactcggaccgatg

SEQ ID NO: 16766 - DNA, 203 bp, synthetic construct
  source 1..203: mol_type = other DNA
ggcgcgccagtcctgagctttctatctgacatttctgacatttctgacatttctgacatttctgacatttctgacatttctgacatttctgacatttctgacatttctgacaattcctacatttctgacatttctgacatttctgacatttctgacatttctgacatttctgacatttctgacatttccgactcggaccgatg

SEQ ID NO: 16767 - DNA, 203 bp, synthetic construct
  source 1..203: mol_type = other DNA
ggcgcgccagtccttaacttgaaatctgacatttctgacatttctgacatttctgacatttctgacatttctgacatttctgacatttctgacatttctgacatttctgacaattctgacatttctgacatttctgacatttctgacatttctgacatttctgacatttctgacatttctgacatttccgactcggaccgatg

SEQ ID NO: 16768 - DNA, 203 bp, synthetic construct
  source 1..203: mol_type = other DNA
ggcgcgccagtcctcaagcacttgtctgacatttctgacatttctgacatttctgacatttctgacatttctgacatttctgacatttctgacatttctgacatttctgacatatctgacatttctgacatttctgacatttctgacatttctgacatttctgacatttctgacatttctgacatttccgactcggaccgatg

SEQ ID NO: 16769 - DNA, 203 bp, synthetic construct
  source 1..203: mol_type = other DNA
ggcgcgccagtcctatgtgcttactctgacatttctgacatttctgacatttctgacatttctgacatttctgacatttctgacatttctgacatttctgacatttctgacatgcctgacatttctgacatttctgacatttctgacatttctgacatttctgacatttctgacatttctgacatttccgactcggaccgatg

SEQ ID NO: 16770 - DNA, 203 bp, synthetic construct
  source 1..203: mol_type = other DNA
ggcgcgccagtcctcatgaagcactctgacatttctgacatttctgacatttctgacatttctgacatttctgacatttctgacatttctgacatttctgacatttctgacattaccggccgttctgacatttctgacatttctgacatttctgacatttctgacatttctgacatttcaccggccgtcgactcggaccgatg

SEQ ID NO: 16771 - DNA, 203 bp, synthetic construct
  source 1..203: mol_type = other DNA
ggcgcgccagtcctagtgcttttctctgacatttctgacatttctgacatttctgacatttctgacatttctgacatttctgacatttctgacatttctgacatttctgacattccggcgggttctgacatttctgacatttctgacatttctgacatttctgacatttctgacatttcaccggccgtcgactcggaccgatg

SEQ ID NO: 16772 - DNA, 203 bp, synthetic construct
  source 1..203: mol_type = other DNA
ggcgcgccagtcctgagtgctttatctgacatttctgacatttctgacatttctgacatttctgacatttctgacatttctgacatttctgacatttctgacatttctgacattcgtcaattcctttacatttctgacatttctgacatttctgacatttctgacatttctgacattttcttggcaaacgactcggaccgatg

SEQ ID NO: 16773 - DNA, 203 bp, synthetic construct
  source 1..203: mol_type = other DNA
ggcgcgccagtcctactaacaagatctgacatttctgacatttctgacatttctgacatttctgacatttctgacatttctgacatttctgacatttctgacatttctgacattcttggcaaatctgacatttctgacatttctgacatttctgacatttctgacatttctgacatttcaccggccgtcgactcggaccgatg

SEQ ID NO: 16774 - DNA, 203 bp, synthetic construct
  source 1..203: mol_type = other DNA
ggcgcgccagtccttagttagtagtctgacatttctgacatttctgacatttctgacatttctgacatttctgacatttctgacatttctgacatttctgacatttctgacattggtgacatttctgacatttctgacatttctgacatttctgacatttctgacatttctgacatttctgacatttccgactcggaccgatg

SEQ ID NO: 16775 - DNA, 203 bp, synthetic construct
  source 1..203: mol_type = other DNA
ggcgcgccagtccttactaacaggtctgacatttctgacatttctgacatttctgacatttctgacatttctgacatttctgacatttctgacatttctgacatttctgacatttactccctttctgacatttctgacatttctgacatttctgacatttctgacatttctgacattttcttggcaaacgactcggaccgatg

SEQ ID NO: 16776 - DNA, 203 bp, synthetic construct
  source 1..203: mol_type = other DNA
ggcgcgccagtcctctgtactaactctgacatttctgacatttctgacatttctgacatttctgacatttctgacatttctgacatttctgacatttctgacatttctgacatttcaccggccgttgacatttctgacatttctgacatttctgacatttctgacatttctgacatttctgtactccccgactcggaccgatg

SEQ ID NO: 16777 - DNA, 203 bp, synthetic construct
  source 1..203: mol_type = other DNA
ggcgcgccagtccttcctcaaaattctgacatttctgacatttctgacatttctgacatttctgacatttctgacatttctgacatttctgacatttctgacatttctgacatttccacggaatcgagaatttctgacatttctgacatttctgacatttctgacatttctgacatttcaccggccgtcgactcggaccgatg

SEQ ID NO: 16778 - DNA, 203 bp, synthetic construct
  source 1..203: mol_type = other DNA
ggcgcgccagtccttcctctgcagtctgacatttctgacatttctgacatttctgacatttctgacatttctgacatttctgacatttctgacatttctgacatttctgacatttcccggcgggttgacatttctgacatttctgacatttctgacatttctgacatttctgacatttctgtactccccgactcggaccgatg

SEQ ID NO: 16779 - DNA, 203 bp, synthetic construct
  source 1..203: mol_type = other DNA
ggcgcgccagtcctaactcggttatctgacatttctgacatttctgacatttctgacatttctgacatttctgacatttctgacatttctgacatttctgacatttctgacatttccgtcaattcctttatttctgacatttctgacatttctgacatttctgacatttctgacatttcaccggccgtcgactcggaccgatg

SEQ ID NO: 16780 - DNA, 203 bp, synthetic construct
  source 1..203: mol_type = other DNA
ggcgcgccagtcctcactcagcagtctgacatttctgacatttctgacatttctgacatttctgacatttctgacatttctgacatttctgacatttctgacatttctgacatttctactccctctgacatttctgacatttctgacatttctgacatttctgacatttctgacatttcaccggccgtcgactcggaccgatg

SEQ ID NO: 16781 - DNA, 203 bp, synthetic construct
  source 1..203: mol_type = other DNA
ggcgcgccagtcctcacgcctagctctgacatttctgacatttctgacatttctgacatttctgacatttctgacatttctgacatttctgacatttctgacatttctgacatttctgaaccggccgtcatttctgacatttctgacatttctgacatttctgacatttctgacattttcttggcaaacgactcggaccgatg

SEQ ID NO: 16782 - DNA, 203 bp, synthetic construct
  source 1..203: mol_type = other DNA
ggcgcgccagtcctatggacttcgtctgacatttctgacatttctgacatttctgacatttctgacatttctgacatttctgacatttctgacatttctgacatttctgacatttctgacaaccggccgttttctgacatttctgacatttctgacatttctgacatttctgacatttcccggcgggtcgactcggaccgatg

SEQ ID NO: 16783 - DNA, 203 bp, synthetic construct
  source 1..203: mol_type = other DNA
ggcgcgccagtcctttgagacccatctgacatttctgacatttctgacatttctgacatttctgacatttctgacatttctgacatttctgacatttctgacatttctgacatttctgacataccggccgtttctgacataccggccgtttctgacatttctgacatttctgacataccggccgtttccgactcggaccgatg

SEQ ID NO: 16784 - DNA, 203 bp, synthetic construct
  source 1..203: mol_type = other DNA
ggcgcgccagtccttgttcgtcactctgacatttctgacatttctgacatttctgacatttctgacatttctgacatttctgacatttctgacatttctgacatttctgacatttctgacataccggccgtttctgacatttctgacatttctgacataccggccgtttctgacataccggccgtttccgactcggaccgatg

SEQ ID NO: 16785 - DNA, 203 bp, synthetic construct
  source 1..203: mol_type = other DNA
ggcgcgccagtcctgatcaaccgttctgacatttctgacatttctgacatttctgacatttctgacatttctgacatttctgacatttctgacatttctgacatttctgacatttctgacataccggccgtttctgacatttctgacatttctgacataccggccgtttctgacatttctgacatttccgactcggaccgatg

SEQ ID NO: 16786 - DNA, 203 bp, synthetic construct
  source 1..203: mol_type = other DNA
ggcgcgccagtcctcagcttaacctctgacatttctgacatttctgacatttctgacatttctgacatttctgacatttctgacatttctgacatttctgacatttctgacatttctgacatcacggaatcgagaaacatcacggaatcgagaaacatttctgacatttctgacatttctgacatttccgactcggaccgatg

SEQ ID NO: 16787 - DNA, 203 bp, synthetic construct
  source 1..203: mol_type = other DNA
ggcgcgccagtcctggcagtattctctgacatttctgacatttctgacatttctgacatttctgacatttctgacatttctgacatttctgacatttctgacatttctgacatttctgacatcacggaatcgagaaacatttctgacatttctgacatcacggaatcgagaaacatttctgacatttccgactcggaccgatg

SEQ ID NO: 16788 - DNA, 203 bp, synthetic construct
  source 1..203: mol_type = other DNA
ggcgcgccagtcctcaagtgaacctctgacatttctgacatttctgacatttctgacatttctgacatttctgacatttctgacatttctgacatttctgacatttctgacatttctgacatcacggaatcgagaaacatttctgacatttctgacatttctgacatttctgacatttctgacatttccgactcggaccgatg

SEQ ID NO: 16789 - DNA, 203 bp, synthetic construct
  source 1..203: mol_type = other DNA
ggcgcgccagtccttctctaagcctctgacatttctgacatttctgacatttctgacatttctgacatttctgacatttctgacatttctgacatttctgacatttctgacatttctgacatccggcgggtttctgacatccggcgggtttctgacatccggcgggtttctgacatccggcgggtttccgactcggaccgatg

SEQ ID NO: 16790 - DNA, 203 bp, synthetic construct
  source 1..203: mol_type = other DNA
ggcgcgccagtcctacagtgtacctctgacatttctgacatttctgacatttctgacatttctgacatttctgacatttctgacatttctgacatttctgacatttctgacatttctgacatccggcgggtttctgacatccggcgggtttctgacatccggcgggtttctgacatccggcgggtttccgactcggaccgatg

SEQ ID NO: 16791 - DNA, 203 bp, synthetic construct
  source 1..203: mol_type = other DNA
ggcgcgccagtcctttgcaacacctctgacatttctgacatttctgacatttctgacatttctgacatttctgacatttctgacatttctgacatttctgacatttctgacatttctgacatccggcgggtttctgacatccggcgggtttctgacatccggcgggtttctgacatccggcgggtttccgactcggaccgatg

SEQ ID NO: 16792 - DNA, 203 bp, synthetic construct
  source 1..203: mol_type = other DNA
ggcgcgccagtccttgcaaagacctctgacatttctgacatttctgacatttctgacatttctgacatttctgacatttctgacatttctgacatttctgacatttctgacatttctgacatccggcgggtttctgacatccggcgggtttctgacatccggcgggtttctgacatccggcgggtttccgactcggaccgatg

SEQ ID NO: 16793 - DNA, 203 bp, synthetic construct
  source 1..203: mol_type = other DNA
ggcgcgccagtcctctgagaatcctctgacatttctgacatttctgacatttctgacatttctgacatttctgacatttctgacatttctgacatttctgacatttctgacatttctgacatccggcgggtttctgacatccggcgggtttctgacatccggcgggtttctgacatccggcgggtttccgactcggaccgatg

SEQ ID NO: 16794 - DNA, 203 bp, synthetic construct
  source 1..203: mol_type = other DNA
ggcgcgccagtcctggtaactacctctgacatttctgacatttctgacatttctgacatttctgacatttctgacatttctgacatttctgacatttctgacatttctgacatttctgacatccggcgggtttctgacatttctgacatttctgacatccggcgggtttctgacatccggcgggtttccgactcggaccgatg

SEQ ID NO: 16795 - DNA, 203 bp, synthetic construct
  source 1..203: mol_type = other DNA
ggcgcgccagtcctggtctaagactctgacatttctgacatttctgacatttctgacatttctgacatttctgacatttctgacatttctgacatttctgacatttctgacatttctgacatccggcgggtttctgacatttctgacatttctgacatccggcgggtttctgacatttctgacatttccgactcggaccgatg

SEQ ID NO: 16796 - DNA, 203 bp, synthetic construct
  source 1..203: mol_type = other DNA
ggcgcgccagtcctggcctgaaattctgacatttctgacatttctgacatttctgacatttctgacatttctgacatttctgacatttctgacatttctgacatttctgacatttctgacatccggcgggtttctgacatttctgacatttctgacatttctgacatttctgacatccggcgggtttccgactcggaccgatg

SEQ ID NO: 16797 - DNA, 203 bp, synthetic construct
  source 1..203: mol_type = other DNA
ggcgcgccagtcctggtcaaagcttctgacatttctgacatttctgacatttctgacatttctgacatttctgacatttctgacatttctgacatttctgacatttctgacatttctgacatcgtcaattcctttaacatcgtcaattcctttaacatcgtcaattcctttaacatttctgacatttccgactcggaccgatg

SEQ ID NO: 16798 - DNA, 203 bp, synthetic construct
  source 1..203: mol_type = other DNA
ggcgcgccagtcctggtcctttcatctgacatttctgacatttctgacatttctgacatttctgacatttctgacatttctgacatttctgacatttctgacatttctgacatttctgacatgggagtaatttctgacatgggagtaatttctgacatgggagtaatttctgacatttctgacatttccgactcggaccgatg

SEQ ID NO: 16799 - DNA, 203 bp, synthetic construct
  source 1..203: mol_type = other DNA
ggcgcgccagtcctggtaagcttgtctgacatttctgacatttctgacatttctgacatttctgacatttctgacatttctgacatttctgacatttctgacatttctgacatttctgacattactcccatttctgacattactcccatttctgacattactcccatttctgacatttctgacatttccgactcggaccgatg

SEQ ID NO: 16800 - DNA, 203 bp, synthetic construct
  source 1..203: mol_type = other DNA
ggcgcgccagtcctggctaaaggttctgacatttctgacatttctgacatttctgacatttctgacatttctgacatttctgacatttctgacatttctgacatttctgacatttctgacattactcccatttctgacattactcccatttctgacatttctgacatttctgacatttctgacatttccgactcggaccgatg

SEQ ID NO: 16801 - DNA, 203 bp, synthetic construct
  source 1..203: mol_type = other DNA
ggcgcgccagtcctggactgtctttctgacatttctgacatttctgacatttctgacatttctgacatttctgacatttctgacatttctgacatttctgacatttctgacatttctgacattccggcgggttctgacatttctgacatttctgacatttctgacatttctgacatttctgacatttccgactcggaccgatg

SEQ ID NO: 16802 - DNA, 203 bp, synthetic construct
  source 1..203: mol_type = other DNA
ggcgcgccagtccttacagtcgattctgacatttctgacatttctgacatttctgacatttctgacatttctgacatttctgacatttctgacatttctgacatttctgacatttctgacattcttggcaaatctgacatttctgacatttctgacatttctgacatttctgacatttctgacatttccgactcggaccgatg

SEQ ID NO: 16803 - DNA, 203 bp, synthetic construct
  source 1..203: mol_type = other DNA
ggcgcgccagtcctttgagtcgagtctgacatttctgacatttctgacatttctgacatttctgacatttctgacatttctgacatttctgacatttctgacatttctgacatttctgacattcttggcaaatctgacatttctgacatttctgacatttctgacatttctgaccacggaatcgagaacgactcggaccgatg

SEQ ID NO: 16804 - DNA, 203 bp, synthetic construct
  source 1..203: mol_type = other DNA
ggcgcgccagtcctcagtcgactttctgacatttctgacatttctgacatttctgacatttctgacatttctgacatttctgacatttctgacatttctgacatttctgacatttctgacatttactccctttctgacatttctgacatttctgacatttctgacatttctgacatttcccggcgggtcgactcggaccgatg

SEQ ID NO: 16805 - DNA, 203 bp, synthetic construct
  source 1..203: mol_type = other DNA
ggcgcgccagtccttcgactgtcatctgacatttctgacatttctgacatttctgacatttctgacatttctgacatttctgacatttctgacatttctgacatttctgacatttctgacatttccacggaatcgagaatttctgacatttctgacatttctgacatttctgacatttctgacatttccgactcggaccgatg

SEQ ID NO: 16806 - DNA, 203 bp, synthetic construct
  source 1..203: mol_type = other DNA
ggcgcgccagtccttggaccaacatctgacatttctgacatttctgacatttctgacatttctgacatttctgacatttctgacatttctgacatttctgacatttctgacatttctgacatttccgtcaattcctttatttctgacatttctgacatttctgacatttctgacatttctgacatttccgactcggaccgatg

SEQ ID NO: 16807 - DNA, 203 bp, synthetic construct
  source 1..203: mol_type = other DNA
ggcgcgccagtcctggcgtttgcttctgacatttctgacatttctgacatttctgacatttctgacatttctgacatttctgacatttctgacatttctgacatttctgacatttctgacatttctaccggccgtgacatttctgacatttctgacatttctgacatttctgacattttcttggcaaacgactcggaccgatg

SEQ ID NO: 16808 - DNA, 203 bp, synthetic construct
  source 1..203: mol_type = other DNA
ggcgcgccagtcctaaacgctcgttctgacatttctgacatttctgacatttctgacatttctgacatttctgacatttctgacatttctgacatttctgacatttctgacatttctgacatttctactccctctgacatttctgacatttctgacatttctgacatttctgaccacggaatcgagaacgactcggaccgatg

SEQ ID NO: 16809 - DNA, 203 bp, synthetic construct
  source 1..203: mol_type = other DNA
ggcgcgccagtcctcgaagtaccttctgacatttctgacatttctgacatttctgacatttctgacatttctgacatttctgacatttctgacatttctgacatttctgacatttctgacatttctgacaaccggccgttttctgacatttctgacatttctgacatttctgaccacggaatcgagaacgactcggaccgatg

SEQ ID NO: 16810 - DNA, 203 bp, synthetic construct
  source 1..203: mol_type = other DNA
ggcgcgccagtcctactgtacctctctgacatttctgacatttctgacatttctgacatttctgacatttctgacatttctgacatttctgacatttctgacatttctgacatttctgacatttctgacacacggaatcgagaagacatttctgacatttctgacatttctgacatttcaccggccgtcgactcggaccgatg

SEQ ID NO: 16811 - DNA, 203 bp, synthetic construct
  source 1..203: mol_type = other DNA
ggcgcgccagtcctaaaattcgtctctgacatttctgacatttctgacatttctgacatttctgacatttctgacatttctgacatttctgacatttctgacatttctgacatttctgacatttctgacaccggcgggttttctgacatttctgacatttctgacatttctgacatttctgacatttccgactcggaccgatg

SEQ ID NO: 16812 - DNA, 203 bp, synthetic construct
  source 1..203: mol_type = other DNA
ggcgcgccagtcctccaccaaatttctgacatttctgacatttctgacatttctgacatttctgacatttctgacatttctgacatttctgacatttctgacatttctgacatttctgacatttctgacacggaatcgagaactgacatttctgacatttctgacatttctgacattttcttggcaaacgactcggaccgatg

SEQ ID NO: 16813 - DNA, 203 bp, synthetic construct
  source 1..203: mol_type = other DNA
ggcgcgccagtccttgtagaaatttctgacatttctgacatttctgacatttctgacatttctgacatttctgacatttctgacatttctgacatttctgacatttctgacatttctgacatttctgacacgtcaattcctttagacatttctgacatttctgacatttctgacatttcccggcgggtcgactcggaccgatg

SEQ ID NO: 16814 - DNA, 203 bp, synthetic construct
  source 1..203: mol_type = other DNA
ggcgcgccagtcctgcaagaattttctgacatttctgacatttctgacatttctgacatttctgacatttctgacatttctgacatttctgacatttctgacatttctgacatttctgacatttctgacatactccccatttctgacatttctgacatttctgacatttctgacatttcccggcgggtcgactcggaccgatg

SEQ ID NO: 16815 - DNA, 203 bp, synthetic construct
  source 1..203: mol_type = other DNA
ggcgcgccagtcctcacggtggactctgacatttctgacatttctgacatttctgacatttctgacatttctgacatttctgacatttctgacatttctgacatttctgacatttctgacatttctgacattcgtcaattcctttacatttctgacatttctgacatttctgaccgtcaattcctttacgactcggaccgatg

SEQ ID NO: 16816 - DNA, 203 bp, synthetic construct
  source 1..203: mol_type = other DNA
ggcgcgccagtcctatgcaccgtgtctgacatttctgacatttctgacatttctgacatttctgacatttctgacatttctgacatttctgacatttctgacatttctgacatttctgacatttctgacatttaccggccgtctgacatttctgacatttctgacatttctgacattttcttggcaaacgactcggaccgatg

SEQ ID NO: 16817 - DNA, 203 bp, synthetic construct
  source 1..203: mol_type = other DNA
ggcgcgccagtcctctgcaccgactctgacatttctgacatttctgacatttctgacatttctgacatttctgacatttctgacatttctgacatttctgacatttctgacatttctgacatttctgacatttactccctttctgacatttctgacatttctgacatttctgacatttctgtactccccgactcggaccgatg

SEQ ID NO: 16818 - DNA, 203 bp, synthetic construct
  source 1..203: mol_type = other DNA
ggcgcgccagtccttttcacaccatctgacatttctgacatttctgacatttctgacatttctgacatttctgacatttctgacatttctgacatttctgacatttctgacatttctgacatttctgacatttactccctttctgacatttctgacatttctgacatttctgaccacggaatcgagaacgactcggaccgatg

SEQ ID NO: 16819 - DNA, 203 bp, synthetic construct
  source 1..203: mol_type = other DNA
ggcgcgccagtcctaacagaagattctgacatttctgacatttctgacatttctgacatttctgacatttctgacatttctgacatttctgacatttctgacatttctgacatttctgacatttctgacatttctaccggccgtgacatttctgacatttctgacatttctgacatttcaccggccgtcgactcggaccgatg

SEQ ID NO: 16820 - DNA, 203 bp, synthetic construct
  source 1..203: mol_type = other DNA
ggcgcgccagtccttagaacttgctctgacatttctgacatttctgacatttctgacatttctgacatttctgacatttctgacatttctgacatttctgacatttctgacatttctgacatttctgacatttctaccggccgtgacatttctgacatttctgacatttctgacatttcccggcgggtcgactcggaccgatg

SEQ ID NO: 16821 - DNA, 203 bp, synthetic construct
  source 1..203: mol_type = other DNA
ggcgcgccagtcctctagaacttctctgacatttctgacatttctgacatttctgacatttctgacatttctgacatttctgacatttctgacatttctgacatttctgacatttctgacatttctgacatttctcacggaatcgagaattctgacatttctgacatttctgacattttcttggcaaacgactcggaccgatg

SEQ ID NO: 16822 - DNA, 203 bp, synthetic construct
  source 1..203: mol_type = other DNA
ggcgcgccagtcctcgaaatttcttctgacatttctgacatttctgacatttctgacatttctgacatttctgacatttctgacatttctgacatttctgacatttctgacatttctgacatttctgacatttctccggcgggtgacatttctgacatttctgacatttctgacatttcaccggccgtcgactcggaccgatg

SEQ ID NO: 16823 - DNA, 203 bp, synthetic construct
  source 1..203: mol_type = other DNA
ggcgcgccagtcctggttgacgtttctgacatttctgacatttctgacatttctgacatttctgacatttctgacatttctgacatttctgacatttctgacatttctgacatttctgacatttctgacatttctcgtcaattcctttattctgacatttctgacatttctgacattttcttggcaaacgactcggaccgatg

SEQ ID NO: 16824 - DNA, 203 bp, synthetic construct
  source 1..203: mol_type = other DNA
ggcgcgccagtcctctgttttcgttctgacatttctgacatttctgacatttctgacatttctgacatttctgacatttctgacatttctgacatttctgacatttctgacatttctgacatttctgacatttctgacacgtcaattcctttagacatttctgacatttctgacatttctgtactccccgactcggaccgatg

SEQ ID NO: 16825 - DNA, 203 bp, synthetic construct
  source 1..203: mol_type = other DNA
ggcgcgccagtccttcacaaagtatctgacatttctgacatttctgacatttctgacatttctgacatttctgacatttctgacatttctgacatttctgacatttctgacatttctgacatttctgacatttctgacacgtcaattcctttagacatttctgacatttctgaccgtcaattcctttacgactcggaccgatg

SEQ ID NO: 16826 - DNA, 203 bp, synthetic construct
  source 1..203: mol_type = other DNA
ggcgcgccagtcctcttgtagaactctgacatttctgacatttctgacatttctgacatttctgacatttctgacatttctgacatttctgacatttctgacatttctgacatttctgacatttctgacatttctgacatacccgccggttctgacatacccgccggttctgacatttctgacatttccgactcggaccgatg

SEQ ID NO: 16827 - DNA, 203 bp, synthetic construct
  source 1..203: mol_type = other DNA
ggcgcgccagtcctggcaggttactctgacatttctgacatttctgacatttctgacatttctgacatttctgacatttctgacatttctgacatttctgacatttctgacatttctgacatttctgacatttctgacataccggccgtttctgacatttctgacatttctgacataccggccgtttccgactcggaccgatg

SEQ ID NO: 16828 - DNA, 203 bp, synthetic construct
  source 1..203: mol_type = other DNA
ggcgcgccagtcctaacctacctctctgacatttctgacatttctgacatttctgacatttctgacatttctgacatttctgacatttctgacatttctgacatttctgacatttctgacatttctgacatttctgacataccggccgtttctgacatttctgacatttctgacattttcttggcaaacgactcggaccgatg

SEQ ID NO: 16829 - DNA, 203 bp, synthetic construct
  source 1..203: mol_type = other DNA
ggcgcgccagtccttagtaggttgtctgacatttctgacatttctgacatttctgacatttctgacatttctgacatttctgacatttctgacatttctgacatttctgacatttctgacatttctgacatttctgacatactccccatttctgacatttctgacatttctgacatttctgacatttccgactcggaccgatg

SEQ ID NO: 16830 - DNA, 203 bp, synthetic construct
  source 1..203: mol_type = other DNA
ggcgcgccagtcctgcacgatcgttctgacatttctgacatttctgacatttctgacatttctgacatttctgacatttctgacatttctgacatttctgacatttctgacatttctgacatttctgacatttctgacatactccccatttctgacatttctgacatttctgaccgtcaattcctttacgactcggaccgatg

SEQ ID NO: 16831 - DNA, 203 bp, synthetic construct
  source 1..203: mol_type = other DNA
ggcgcgccagtcctgacgtcactatctgacatttctgacatttctgacatttctgacatttctgacatttctgacatttctgacatttctgacatttctgacatttctgacatttctgacatttctgacatttctgacatcacggaatcgagaaacatttctgacatttctgacatttctgacatttccgactcggaccgatg

SEQ ID NO: 16832 - DNA, 203 bp, synthetic construct
  source 1..203: mol_type = other DNA
ggcgcgccagtcctagtcctcgtgtctgacatttctgacatttctgacatttctgacatttctgacatttctgacatttctgacatttctgacatttctgacatttctgacatttctgacatttctgacatttctgacatccggcgggtttctgacatccggcgggtttctgacatccggcgggtttccgactcggaccgatg

SEQ ID NO: 16833 - DNA, 203 bp, synthetic construct
  source 1..203: mol_type = other DNA
ggcgcgccagtcctctcgtgagcatctgacatttctgacatttctgacatttctgacatttctgacatttctgacatttctgacatttctgacatttctgacatttctgacatttctgacatttctgacatttctgacatccggcgggtttctgacatccggcgggtttctgacatccggcgggtttccgactcggaccgatg

SEQ ID NO: 16834 - DNA, 203 bp, synthetic construct
  source 1..203: mol_type = other DNA
ggcgcgccagtcctgtgctcgtggtctgacatttctgacatttctgacatttctgacatttctgacatttctgacatttctgacatttctgacatttctgacatttctgacatttctgacatttctgacatttctgacatccggcgggtttctgacatccggcgggtttctgacatccggcgggtttccgactcggaccgatg

SEQ ID NO: 16835 - DNA, 203 bp, synthetic construct
  source 1..203: mol_type = other DNA
ggcgcgccagtcctccacgagcagtctgacatttctgacatttctgacatttctgacatttctgacatttctgacatttctgacatttctgacatttctgacatttctgacatttctgacatttctgacatttctgacatccggcgggtttctgacatccggcgggtttctgacatccggcgggtttccgactcggaccgatg

SEQ ID NO: 16836 - DNA, 203 bp, synthetic construct
  source 1..203: mol_type = other DNA
ggcgcgccagtccttctgttgagctctgacatttctgacatttctgacatttctgacatttctgacatttctgacatttctgacatttctgacatttctgacatttctgacatttctgacatttctgacatttctgacatccggcgggtttctgacatttctgacatttctgacatttctgacatttccgactcggaccgatg

SEQ ID NO: 16837 - DNA, 203 bp, synthetic construct
  source 1..203: mol_type = other DNA
ggcgcgccagtccttatgcacggttctgacatttctgacatttctgacatttctgacatttctgacatttctgacatttctgacatttctgacatttctgacatttctgacatttctgacatttctgacatttctgacatcgtcaattcctttaacatcgtcaattcctttaacatttctgacatttccgactcggaccgatg

SEQ ID NO: 16838 - DNA, 203 bp, synthetic construct
  source 1..203: mol_type = other DNA
ggcgcgccagtccttcgatttctatctgacatttctgacatttctgacatttctgacatttctgacatttctgacatttctgacatttctgacatttctgacatttctgacatttctgacatttctgacatttctgacattactcccatttctgacattactcccatttctgacattactcccatttccgactcggaccgatg

SEQ ID NO: 16839 - DNA, 203 bp, synthetic construct
  source 1..203: mol_type = other DNA
ggcgcgccagtcctccactttagatctgacatttctgacatttctgacatttctgacatttctgacatttctgacatttctgacatttctgacatttctgacatttctgacatttctgacatttctgacatttctgacattactcccatttctgacatttctgacatttctgacattactcccatttccgactcggaccgatg

SEQ ID NO: 16840 - DNA, 203 bp, synthetic construct
  source 1..203: mol_type = other DNA
ggcgcgccagtcctataccatgtttctgacatttctgacatttctgacatttctgacatttctgacatttctgacatttctgacatttctgacatttctgacatttctgacatttctgacatttctgacatttctgacatttctaccggccgtgacatttctgacatttctgacatttctgtactccccgactcggaccgatg

SEQ ID NO: 16841 - DNA, 203 bp, synthetic construct
  source 1..203: mol_type = other DNA
ggcgcgccagtccttccagaaacgtctgacatttctgacatttctgacatttctgacatttctgacatttctgacatttctgacatttctgacatttctgacatttctgacatttctgacatttctgacatttctgacatttctaccggccgtgacatttctgacatttctgaccacggaatcgagaacgactcggaccgatg

SEQ ID NO: 16842 - DNA, 203 bp, synthetic construct
  source 1..203: mol_type = other DNA
ggcgcgccagtcctggtcatgacgtctgacatttctgacatttctgacatttctgacatttctgacatttctgacatttctgacatttctgacatttctgacatttctgacatttctgacatttctgacatttctgacatttctcacggaatcgagaattctgacatttctgacatttcccggcgggtcgactcggaccgatg

SEQ ID NO: 16843 - DNA, 203 bp, synthetic construct
  source 1..203: mol_type = other DNA
ggcgcgccagtcctcgtagcaagatctgacatttctgacatttctgacatttctgacatttctgacatttctgacatttctgacatttctgacatttctgacatttctgacatttctgacatttctgacatttctgacatttctccggcgggtgacatttctgacatttctgacatttctgacatttccgactcggaccgatg

SEQ ID NO: 16844 - DNA, 203 bp, synthetic construct
  source 1..203: mol_type = other DNA
ggcgcgccagtcctttcttgaacgtctgacatttctgacatttctgacatttctgacatttctgacatttctgacatttctgacatttctgacatttctgacatttctgacatttctgacatttctgacatttctgacatttctcgattccgtgacatttctcgattccgtgacatttctgacatttccgactcggaccgatg

SEQ ID NO: 16845 - DNA, 203 bp, synthetic construct
  source 1..203: mol_type = other DNA
ggcgcgccagtcctcgtcttgacttctgacatttctgacatttctgacatttctgacatttctgacatttctgacatttctgacatttctgacatttctgacatttctgacatttctgacatttctgacatttctgacatttctcgtcaattcctttattctgacatttctgacatttcccggcgggtcgactcggaccgatg

SEQ ID NO: 16846 - DNA, 203 bp, synthetic construct
  source 1..203: mol_type = other DNA
ggcgcgccagtcctcgacaagacgtctgacatttctgacatttctgacatttctgacatttctgacatttctgacatttctgacatttctgacatttctgacatttctgacatttctgacatttctgacatttctgacatttctgacacggaatcgagaactgacatttctgaccgtcaattcctttacgactcggaccgatg

SEQ ID NO: 16847 - DNA, 203 bp, synthetic construct
  source 1..203: mol_type = other DNA
ggcgcgccagtcctcgtctcggtttctgacatttctgacatttctgacatttctgacatttctgacatttctgacatttctgacatttctgacatttctgacatttctgacatttctgacatttctgacatttctgacatttctgacatccggcgggtttctgacatttctgacatttcccggcgggtcgactcggaccgatg

SEQ ID NO: 16848 - DNA, 203 bp, synthetic construct
  source 1..203: mol_type = other DNA
ggcgcgccagtcctaatcttaacgtctgacatttctgacatttctgacatttctgacatttctgacatttctgacatttctgacatttctgacatttctgacatttctgacatttctgacatttctgacatttctgacatttctgacatcgtcaattcctttaacatttctgacattttcttggcaaacgactcggaccgatg

SEQ ID NO: 16849 - DNA, 203 bp, synthetic construct
  source 1..203: mol_type = other DNA
ggcgcgccagtcctcgttgactgttctgacatttctgacatttctgacatttctgacatttctgacatttctgacatttctgacatttctgacatttctgacatttctgacatttctgacatttctgacatttctgacatttctgacatttaccggccgtctgacatttctgacatttctgacatttccgactcggaccgatg

SEQ ID NO: 16850 - DNA, 203 bp, synthetic construct
  source 1..203: mol_type = other DNA
ggcgcgccagtcctgtcttagacgtctgacatttctgacatttctgacatttctgacatttctgacatttctgacatttctgacatttctgacatttctgacatttctgacatttctgacatttctgacatttctgacatttctgacatttaccggccgtctgacatttctgacatttctgtactccccgactcggaccgatg

SEQ ID NO: 16851 - DNA, 203 bp, synthetic construct
  source 1..203: mol_type = other DNA
ggcgcgccagtcctctgtgcaacgtctgacatttctgacatttctgacatttctgacatttctgacatttctgacatttctgacatttctgacatttctgacatttctgacatttctgacatttctgacatttctgacatttctgacatttaccggccgtctgacatttctgaccgtcaattcctttacgactcggaccgatg

SEQ ID NO: 16852 - DNA, 203 bp, synthetic construct
  source 1..203: mol_type = other DNA
ggcgcgccagtcctgacatggacgtctgacatttctgacatttctgacatttctgacatttctgacatttctgacatttctgacatttctgacatttctgacatttctgacatttctgacatttctgacatttctgacatttctgacatttccggcgggtctgacatttctgaccgtcaattcctttacgactcggaccgatg

SEQ ID NO: 16853 - DNA, 203 bp, synthetic construct
  source 1..203: mol_type = other DNA
ggcgcgccagtcctcgttcacttatctgacatttctgacatttctgacatttctgacatttctgacatttctgacatttctgacatttctgacatttctgacatttctgacatttctgacatttctgacatttctgacatttctgacatttctcacggaatcgagaattctgaccacggaatcgagaacgactcggaccgatg

SEQ ID NO: 16854 - DNA, 203 bp, synthetic construct
  source 1..203: mol_type = other DNA
ggcgcgccagtcctgaatcagacgtctgacatttctgacatttctgacatttctgacatttctgacatttctgacatttctgacatttctgacatttctgacatttctgacatttctgacatttctgacatttctgacatttctgacatttctcgtcaattcctttattctgacatttctgtactccccgactcggaccgatg

SEQ ID NO: 16855 - DNA, 203 bp, synthetic construct
  source 1..203: mol_type = other DNA
ggcgcgccagtcctcgtaaagtgctctgacatttctgacatttctgacatttctgacatttctgacatttctgacatttctgacatttctgacatttctgacatttctgacatttctgacatttctgacatttctgacatttctgacatttctgacaccggccgtatttctgacatttcccggcgggtcgactcggaccgatg

SEQ ID NO: 16856 - DNA, 203 bp, synthetic construct
  source 1..203: mol_type = other DNA
ggcgcgccagtcctcaggactacgtctgacatttctgacatttctgacatttctgacatttctgacatttctgacatttctgacatttctgacatttctgacatttctgacatttctgacatttctgacatttctgacatttctgacatttctgacatcacggaatcgagaaacatttcaccggccgtcgactcggaccgatg

SEQ ID NO: 16857 - DNA, 203 bp, synthetic construct
  source 1..203: mol_type = other DNA
ggcgcgccagtcctgactgttacgtctgacatttctgacatttctgacatttctgacatttctgacatttctgacatttctgacatttctgacatttctgacatttctgacatttctgacatttctgacatttctgacatttctgacatttctgacatccggcgggtttctgacatccggcgggtttccgactcggaccgatg

SEQ ID NO: 16858 - DNA, 203 bp, synthetic construct
  source 1..203: mol_type = other DNA
ggcgcgccagtcctcgtcaccttctctgacatttctgacatttctgacatttctgacatttctgacatttctgacatttctgacatttctgacatttctgacatttctgacatttctgacatttctgacatttctgacatttctgacatttctgacatccggcgggtttctgacatccggcgggtttccgactcggaccgatg

SEQ ID NO: 16859 - DNA, 203 bp, synthetic construct
  source 1..203: mol_type = other DNA
ggcgcgccagtcctcgttaactcgtctgacatttctgacatttctgacatttctgacatttctgacatttctgacatttctgacatttctgacatttctgacatttctgacatttctgacatttctgacatttctgacatttctgacatttctgacatccggcgggtttctgacatccggcgggtttccgactcggaccgatg

SEQ ID NO: 16860 - DNA, 203 bp, synthetic construct
  source 1..203: mol_type = other DNA
ggcgcgccagtcctcgtagtcgagtctgacatttctgacatttctgacatttctgacatttctgacatttctgacatttctgacatttctgacatttctgacatttctgacatttctgacatttctgacatttctgacatttctgacatttctgacatccggcgggtttctgacatccggcgggtttccgactcggaccgatg

SEQ ID NO: 16861 - DNA, 203 bp, synthetic construct
  source 1..203: mol_type = other DNA
ggcgcgccagtcctgcaccaagcgtctgacatttctgacatttctgacatttctgacatttctgacatttctgacatttctgacatttctgacatttctgacatttctgacatttctgacatttctgacatttctgacatttctgacatttctgacatccggcgggtttctgaccgtcaattcctttacgactcggaccgatg

SEQ ID NO: 16862 - DNA, 203 bp, synthetic construct
  source 1..203: mol_type = other DNA
ggcgcgccagtcctgctgtctgcgtctgacatttctgacatttctgacatttctgacatttctgacatttctgacatttctgacatttctgacatttctgacatttctgacatttctgacatttctgacatttctgacatttctgacatttctgacatcgtcaattcctttaacatttcaccggccgtcgactcggaccgatg

SEQ ID NO: 16863 - DNA, 203 bp, synthetic construct
  source 1..203: mol_type = other DNA
ggcgcgccagtccttgggtctgcgtctgacatttctgacatttctgacatttctgacatttctgacatttctgacatttctgacatttctgacatttctgacatttctgacatttctgacatttctgacatttctgacatttctgacatttctgacatcgtcaattcctttaacatttcccggcgggtcgactcggaccgatg

SEQ ID NO: 16864 - DNA, 203 bp, synthetic construct
  source 1..203: mol_type = other DNA
ggcgcgccagtccttgctactgcgtctgacatttctgacatttctgacatttctgacatttctgacatttctgacatttctgacatttctgacatttctgacatttctgacatttctgacatttctgacatttctgacatttctgacatttctgacatcgtcaattcctttaacatttctgacatttccgactcggaccgatg

SEQ ID NO: 16865 - DNA, 203 bp, synthetic construct
  source 1..203: mol_type = other DNA
ggcgcgccagtcctcctacaagcgtctgacatttctgacatttctgacatttctgacatttctgacatttctgacatttctgacatttctgacatttctgacatttctgacatttctgacatttctgacatttctgacatttctgacatttctgacatgggagtaatttctgacatttctgacatttccgactcggaccgatg

SEQ ID NO: 16866 - DNA, 203 bp, synthetic construct
  source 1..203: mol_type = other DNA
ggcgcgccagtcctcttgttagcgtctgacatttctgacatttctgacatttctgacatttctgacatttctgacatttctgacatttctgacatttctgacatttctgacatttctgacatttctgacatttctgacatttctgacatttctgacatttcacggaatcgagaaatttctgacatttccgactcggaccgatg

SEQ ID NO: 16867 - DNA, 203 bp, synthetic construct
  source 1..203: mol_type = other DNA
ggcgcgccagtcctctcaagagcgtctgacatttctgacatttctgacatttctgacatttctgacatttctgacatttctgacatttctgacatttctgacatttctgacatttctgacatttctgacatttctgacatttctgacatttctgacatttcacggaatcgagaaatttctgtactccccgactcggaccgatg

SEQ ID NO: 16868 - DNA, 203 bp, synthetic construct
  source 1..203: mol_type = other DNA
ggcgcgccagtccttcgctttgcgtctgacatttctgacatttctgacatttctgacatttctgacatttctgacatttctgacatttctgacatttctgacatttctgacatttctgacatttctgacatttctgacatttctgacatttctgacatttcgtcaattcctttacgtcaattcctttacgactcggaccgatg

SEQ ID NO: 16869 - DNA, 203 bp, synthetic construct
  source 1..203: mol_type = other DNA
ggcgcgccagtcctcgctctaagatctgacatttctgacatttctgacatttctgacatttctgacatttctgacatttctgacatttctgacatttctgacatttctgacatttctgacatttctgacatttctgacatttctgacatttctgacatttctgacatcgtcaattcctttaacatttccgactcggaccgatg

SEQ ID NO: 16870 - DNA, 203 bp, synthetic construct
  source 1..203: mol_type = other DNA
ggcgcgccagtcctcgctaggatctctgacatttctgacatttctgacatttctgacatttctgacatttctgacatttctgacatttctgacatttctgacatttctgacatttctgacatttctgacatttctgacatttctgacatttctgacatttctgacattactccccgtcaattcctttacgactcggaccgatg

SEQ ID NO: 16871 - DNA, 203 bp, synthetic construct
  source 1..203: mol_type = other DNA
ggcgcgccagtcctcgcctcgtagtctgacatttctgacatttctgacatttctgacatttctgacatttctgacatttctgacatttctgacatttctgacatttctgacatttctgacatttctgacatttctgacatttctgacatttctgacatttctgacatttcaccggccgtccggcgggtcgactcggaccgatg

SEQ ID NO: 16872 - DNA, 203 bp, synthetic construct
  source 1..203: mol_type = other DNA
ggcgcgccagtcctcgctcagcgttctgacatttctgacatttctgacatttctgacatttctgacatttctgacatttctgacatttctgacatttctgacatttctgacatttctgacatttctgacatttctgacatttctgacatttctgacatttctgacatttctactcccttcttggcaaacgactcggaccgatg

SEQ ID NO: 16873 - DNA, 203 bp, synthetic construct
  source 1..203: mol_type = other DNA
ggcgcgccagtcctcgcctttcgttctgacatttctgacatttctgacatttctgacatttctgacatttctgacatttctgacatttctgacatttctgacatttctgacatttctgacatttctgacatttctgacatttctgacatttctgacatttctgacatttctgacatccggcgggtttccgactcggaccgatg

SEQ ID NO: 16874 - DNA, 203 bp, synthetic construct
  source 1..203: mol_type = other DNA
ggcgcgccagtcctcgcctagtcctctgacatttctgacatttctgacatttctgacatttctgacatttctgacatttctgacatttctgacatttctgacatttctgacatttctgacatttctgacatttctgacatttctgacatttctgacatttctgacatttctgacatccggcgggtttccgactcggaccgatg

SEQ ID NO: 16875 - DNA, 203 bp, synthetic construct
  source 1..203: mol_type = other DNA
ggcgcgccagtcctcgctttgagttctgacatttctgacatttctgacatttctgacatttctgacatttctgacatttctgacatttctgacatttctgacatttctgacatttctgacatttctgacatttctgacatttctgacatttctgacatttctgacatttctgacatccggcgggtttccgactcggaccgatg

SEQ ID NO: 16876 - DNA, 203 bp, synthetic construct
  source 1..203: mol_type = other DNA
ggcgcgccagtcctcgctgacaaatctgacatttctgacatttctgacatttctgacatttctgacatttctgacatttctgacatttctgacatttctgacatttctgacatttctgacatttctgacatttctgacatttctgacatttctgacatttctgacatttctgacatccggcgggtttccgactcggaccgatg

SEQ ID NO: 16877 - DNA, 203 bp, synthetic construct
  source 1..203: mol_type = other DNA
ggcgcgccagtcctcgctaccgtttctgacatttctgacatttctgacatttctgacatttctgacatttctgacatttctgacatttctgacatttctgacatttctgacatttctgacatttctgacatttctgacatttctgacatttctgacatttctgacatttctgacatccggcgggtttccgactcggaccgatg

SEQ ID NO: 16878 - DNA, 203 bp, synthetic construct
  source 1..203: mol_type = other DNA
ggcgcgccagtcctacaactcacgtctgacatttctgacatttctgacatttctgacatttctgacatttctgacatttctgacatttctgacatttctgacatttctgacatttctgacatttctgacatttctgacatttctgacatttctgacatttctgacatttctgacattactcccatttccgactcggaccgatg

SEQ ID NO: 16879 - DNA, 203 bp, synthetic construct
  source 1..203: mol_type = other DNA
ggcgcgccagtccttaacgaggcatctgacatttctgacatttctgacatttctgacatttctgacatttctgacatttctgacatttctgacatttctgacatttctgacatttctgacatttctgacatttctgacatttctgacatttctgacatttctgacatttctgacatttcccggcgggtcgactcggaccgatg

SEQ ID NO: 16880 - DNA, 203 bp, synthetic construct
  source 1..203: mol_type = other DNA
ggcgcgccagtcctagcttcgttatctgacatttctgacatttctgacatttctgacatttctgacatttctgacatttctgacatttctgacatttctgacatttctgacatttctgacatttctgacatttctgacatttctgacatttctgacatttctgacatttctgacatttctgacatttccgactcggaccgatg

SEQ ID NO: 16881 - DNA, 203 bp, synthetic construct
  source 1..203: mol_type = other DNA
ggcgcgccagtccttctttaacgatctgacatttctgacatttctgacatttctgacatttctgacatttctgacatttctgacatttctgacatttctgacatttctgacatttctgacatttctgacatttctgacatttctgacatttctgacatttctgacatttctgacatttctgacatttccgactcggaccgatg

SEQ ID NO: 16882 - DNA, 203 bp, synthetic construct
  source 1..203: mol_type = other DNA
ggcgcgccagtcctcttctcgttatctgacatttctgacatttctgacatttctgacatttctgacatttctgacatttctgacatttctgacatttctgacatttctgacatttctgacatttctgacatttctgacatttctgacatttctgacatttctgacatttctgacatttctgacatttccgactcggaccgatg

SEQ ID NO: 16883 - DNA, 203 bp, synthetic construct
  source 1..203: mol_type = other DNA
ggcgcgccagtccttaacgacatttctgacatttctgacatttctgacatttctgacatttctgacatttctgacatttctgacatttctgacatttctgacatttctgacatttctgacatttctgacatttctgacatttctgacatttctgacatttctgacatttctgacatttctgacatttccgactcggaccgatg

SEQ ID NO: 16884 - DNA, 203 bp, synthetic construct
  source 1..203: mol_type = other DNA
ggcgcgccagtccttaacgagtggtctgacatttctgacatttctgacatttctgacatttctgacatttctgacatttctgacatttctgacatttctgacatttctgacatttctgacatttctgacatttctgacatttctgacatttctgacatttctgacatttctgacatttctgacatttccgactcggaccgatg

SEQ ID NO: 16885 - DNA, 203 bp, synthetic construct
  source 1..203: mol_type = other DNA
ggcgcgccagtcctgcaaacgcactctgacatttctgacatttctgacatttctgacatttctgacatttctgacatttctgacatttctgacatttctgacatttctgacatttctgacatttctgacatttctgacatttctgacatttctgacatttctgacatttctgaccgtcaattcctttacgactcggaccgatg

SEQ ID NO: 16886 - DNA, 203 bp, synthetic construct
  source 1..203: mol_type = other DNA
ggcgcgccagtcctcgacctagtctctgacatttctgacatttctgacatttctgacatttctgacatttctgacatttctgacatttctgacatttctgacatttctgacatttctgacatttctgacatttctgacatttctgacatttctgacatttctgacatttctgactactccctactccccgactcggaccgatg

SEQ ID NO: 16887 - DNA, 203 bp, synthetic construct
  source 1..203: mol_type = other DNA
ggcgcgccagtcctcacgttaacatctgacatttctgacatttctgacatttctgacatttctgacatttctgacatttctgacatttctgacatttctgacatttctgacatttctgacatttctgacatttctgacatttctgacatttctgacatttctgacatttcttcttggcaaatactccccgactcggaccgatg

SEQ ID NO: 16888 - DNA, 203 bp, synthetic construct
  source 1..203: mol_type = other DNA
ggcgcgccagtcctgctaccacgttctgacatttctgacatttctgacatttctgacatttctgacatttctgacatttctgacatttctgacatttctgacatttctgacatttctgacatttctgacatttctgacatttctgacatttctgacatttctgactactcccacatttcaccggccgtcgactcggaccgatg

SEQ ID NO: 16889 - DNA, 203 bp, synthetic construct
  source 1..203: mol_type = other DNA
ggcgcgccagtcctttaaacgtgctctgacatttctgacatttctgacatttctgacatttctgacatttctgacatttctgacatttctgacatttctgacatttctgacatttctgacatttctgacatttctgacatttctgacatttctgacatttctgcacggaatcgagaattcttggcaaacgactcggaccgatg

SEQ ID NO: 16890 - DNA, 203 bp, synthetic construct
  source 1..203: mol_type = other DNA
ggcgcgccagtcctaacgtgcatttctgacatttctgacatttctgacatttctgacatttctgacatttctgacatttctgacatttctgacatttctgacatttctgacatttctgacatttctgacatttctgacatttctgacatttctgacatttctgccggcgggtacatttcaccggccgtcgactcggaccgatg

SEQ ID NO: 16891 - DNA, 203 bp, synthetic construct
  source 1..203: mol_type = other DNA
ggcgcgccagtcctacgtgcttcttctgacatttctgacatttctgacatttctgacatttctgacatttctgacatttctgacatttctgacatttctgacatttctgacatttctgacatttctgacatttctgacatttctgacatttctgacatttctgccggcgggtacatttcccggcgggtcgactcggaccgatg

SEQ ID NO: 16892 - DNA, 203 bp, synthetic construct
  source 1..203: mol_type = other DNA
ggcgcgccagtccttgcgttaaggtctgacatttctgacatttctgacatttctgacatttctgacatttctgacatttctgacatttctgacatttctgacatttctgacatttctgacatttctgacatttctgacatttctgacatttctgacatttctgtactccctgacattttcttggcaaacgactcggaccgatg

SEQ ID NO: 16893 - DNA, 203 bp, synthetic construct
  source 1..203: mol_type = other DNA
ggcgcgccagtcctttaacgcatttctgacatttctgacatttctgacatttctgacatttctgacatttctgacatttctgacatttctgacatttctgacatttctgacatttctgacatttctgacatttctgacatttctgacatttctgacatttctgttcttggcaaaatttctgacatttccgactcggaccgatg

SEQ ID NO: 16894 - DNA, 203 bp, synthetic construct
  source 1..203: mol_type = other DNA
ggcgcgccagtccttgtctaacgctctgacatttctgacatttctgacatttctgacatttctgacatttctgacatttctgacatttctgacatttctgacatttctgacatttctgacatttctgacatttctgacatttctgacatttctgacatttctgttcttggcaaacacggaatcgagaacgactcggaccgatg

SEQ ID NO: 16895 - DNA, 203 bp, synthetic construct
  source 1..203: mol_type = other DNA
ggcgcgccagtcctctgctgtgcgtctgacatttctgacatttctgacatttctgacatttctgacatttctgacatttctgacatttctgacatttctgacatttctgacatttctgacatttctgacatttctgacatttctgacatttctgacatttcttcttggcaaaacatttcccggcgggtcgactcggaccgatg

SEQ ID NO: 16896 - DNA, 203 bp, synthetic construct
  source 1..203: mol_type = other DNA
ggcgcgccagtccttgacatactctctgacatttctgacatttctgacatttctgacatttctgacatttctgacatttctgacatttctgacatttctgacatttctgacatttctgacatttctgacatttctgacatttctgacatttctgacccggcgggtatttctgacatttcaccggccgtcgactcggaccgatg

SEQ ID NO: 16897 - DNA, 203 bp, synthetic construct
  source 1..203: mol_type = other DNA
ggcgcgccagtcctgaccagtacatctgacatttctgacatttctgacatttctgacatttctgacatttctgacatttctgacatttctgacatttctgacatttctgacatttctgacatttctgacatttctgacatttctgacatttctgactactcccacatttctgacattttcttggcaaacgactcggaccgatg

SEQ ID NO: 16898 - DNA, 203 bp, synthetic construct
  source 1..203: mol_type = other DNA
ggcgcgccagtcctcgtctacagctctgacatttctgacatttctgacatttctgacatttctgacatttctgacatttctgacatttctgacatttctgacatttctgacatttctgacatttctgacatttctgacatttctgacatttctgacttcttggcaaattctgacatttctgacatttccgactcggaccgatg

SEQ ID NO: 16899 - DNA, 203 bp, synthetic construct
  source 1..203: mol_type = other DNA
ggcgcgccagtcctagacctgggttctgacatttctgacatttctgacatttctgacatttctgacatttctgacatttctgacatttctgacatttctgacatttctgacatttctgacatttctgacatttctgacatttctgacatttctgacttcttggcaaattctgacatttctgtactccccgactcggaccgatg

SEQ ID NO: 16900 - DNA, 203 bp, synthetic construct
  source 1..203: mol_type = other DNA
ggcgcgccagtcctgcagcctgggtctgacatttctgacatttctgacatttctgacatttctgacatttctgacatttctgacatttctgacatttctgacatttctgacatttctgacatttctgacatttctgacatttctgacatttctgacttcttggcaaattctgaccgtcaattcctttacgactcggaccgatg

SEQ ID NO: 16901 - DNA, 203 bp, synthetic construct
  source 1..203: mol_type = other DNA
ggcgcgccagtcctacccaggttctctgacatttctgacatttctgacatttctgacatttctgacatttctgacatttctgacatttctgacatttctgacatttctgacatttctgacatttctgacatttctgacatttctgacatttctgccggcgggtacatttctgacattttcttggcaaacgactcggaccgatg

SEQ ID NO: 16902 - DNA, 203 bp, synthetic construct
  source 1..203: mol_type = other DNA
ggcgcgccagtcctcattctactatctgacatttctgacatttctgacatttctgacatttctgacatttctgacatttctgacatttctgacatttctgacatttctgacatttctgacatttctgacatttctgacatttctgacatttcttactcccctgacatttctgaccgtcaattcctttacgactcggaccgatg

SEQ ID NO: 16903 - DNA, 203 bp, synthetic construct
  source 1..203: mol_type = other DNA
ggcgcgccagtcctggatcttgggtctgacatttctgacatttctgacatttctgacatttctgacatttctgacatttctgacatttctgacatttctgacatttctgacatttctgacatttctgacatttctgacatttctgacatttcttggcaaactgacatttctgacatttctgacatttccgactcggaccgatg

SEQ ID NO: 16904 - DNA, 203 bp, synthetic construct
  source 1..203: mol_type = other DNA
ggcgcgccagtcctgtctgacagttctgacatttctgacatttctgacatttctgacatttctgacatttctgacatttctgacatttctgacatttctgacatttctgacatttctgacatttctgacatttctgacatttctgacattttactcccttctgacatttctgacatttcaccggccgtcgactcggaccgatg

SEQ ID NO: 16905 - DNA, 203 bp, synthetic construct
  source 1..203: mol_type = other DNA
ggcgcgccagtcctcagtctgacatctgacatttctgacatttctgacatttctgacatttctgacatttctgacatttctgacatttctgacatttctgacatttctgacatttctgacatttctgacatttctgacatttctgacattttactcccttctgacatttctgacatttcccggcgggtcgactcggaccgatg

SEQ ID NO: 16906 - DNA, 203 bp, synthetic construct
  source 1..203: mol_type = other DNA
ggcgcgccagtccttgtcagacagtctgacatttctgacatttctgacatttctgacatttctgacatttctgacatttctgacatttctgacatttctgacatttctgacatttctgacatttctgacatttctgacatttctgacccggcgggtatttctgacatttctgacattttcttggcaaacgactcggaccgatg

SEQ ID NO: 16907 - DNA, 203 bp, synthetic construct
  source 1..203: mol_type = other DNA
ggcgcgccagtcctacgtctacgttctgacatttctgacatttctgacatttctgacatttctgacatttctgacatttctgacatttctgacatttctgacatttctgacatttctgacatttctgacatttctgacatttcttggcaaactgacatttcttggcaaactgacatttcttggcaaaccgactcggaccgatg

SEQ ID NO: 16908 - DNA, 203 bp, synthetic construct
  source 1..203: mol_type = other DNA
ggcgcgccagtccttgttagacgttctgacatttctgacatttctgacatttctgacatttctgacatttctgacatttctgacatttctgacatttctgacatttctgacatttctgacatttctgacatttctgacattttactcccttctgacatttctgacatttctgacattttcttggcaaacgactcggaccgatg

SEQ ID NO: 16909 - DNA, 203 bp, synthetic construct
  source 1..203: mol_type = other DNA
ggcgcgccagtcctagacgtacagtctgacatttctgacatttctgacatttctgacatttctgacatttctgacatttctgacatttctgacatttctgacatttctgacatttctgacatttctgacatttctgaccggcgggtcatttctgacatttctgacatttctgaccgtcaattcctttacgactcggaccgatg

SEQ ID NO: 16910 - DNA, 203 bp, synthetic construct
  source 1..203: mol_type = other DNA
ggcgcgccagtcctagttttgaaatctgacatttctgacatttctgacatttctgacatttctgacatttctgacatttctgacatttctgacatttctgacatttctgacatttctgacatttctgacatttctgacttcttggcaaattctgacatttctgacatttctgacattttcttggcaaacgactcggaccgatg

SEQ ID NO: 16911 - DNA, 203 bp, synthetic construct
  source 1..203: mol_type = other DNA
ggcgcgccagtcctctggatcggttctgacatttctgacatttctgacatttctgacatttctgacatttctgacatttctgacatttctgacatttctgacatttctgacatttctgacatttctgacatttctgatactcccgacatttctgacatttctgacatttctgacatttcaccggccgtcgactcggaccgatg

SEQ ID NO: 16912 - DNA, 203 bp, synthetic construct
  source 1..203: mol_type = other DNA
ggcgcgccagtccttgcgaccttctctgacatttctgacatttctgacatttctgacatttctgacatttctgacatttctgacatttctgacatttctgacatttctgacatttctgacatttctgacatttcttactcccctgacatttctgacatttctgacatttctgacattttcttggcaaacgactcggaccgatg

SEQ ID NO: 16913 - DNA, 203 bp, synthetic construct
  source 1..203: mol_type = other DNA
ggcgcgccagtcctctctagcgactctgacatttctgacatttctgacatttctgacatttctgacatttctgacatttctgacatttctgacatttctgacatttctgacatttctgacatttctgacatttttcttggcaaagacatttctgacatttctgacatttctgacatttcccggcgggtcgactcggaccgatg

SEQ ID NO: 16914 - DNA, 203 bp, synthetic construct
  source 1..203: mol_type = other DNA
ggcgcgccagtcctgcgacttggttctgacatttctgacatttctgacatttctgacatttctgacatttctgacatttctgacatttctgacatttctgacatttctgacatttctgacatttctgaccggcgggtcatttctgacatttctgacatttctgacatttctgacatttcaccggccgtcgactcggaccgatg

SEQ ID NO: 16915 - DNA, 203 bp, synthetic construct
  source 1..203: mol_type = other DNA
ggcgcgccagtcctagagtcgccttctgacatttctgacatttctgacatttctgacatttctgacatttctgacatttctgacatttctgacatttctgacatttctgacatttctgacatttctgaccggcgggtcatttctgacatttctgacatttctgacatttctgacatttcccggcgggtcgactcggaccgatg

SEQ ID NO: 16916 - DNA, 203 bp, synthetic construct
  source 1..203: mol_type = other DNA
ggcgcgccagtcctcgacgtcgcttctgacatttctgacatttctgacatttctgacatttctgacatttctgacatttctgacatttctgacatttctgacatttctgacatttctgacatttctgacgtcaattcctttactgacatttctgacatttctgacatttctgacattttcttggcaaacgactcggaccgatg

SEQ ID NO: 16917 - DNA, 203 bp, synthetic construct
  source 1..203: mol_type = other DNA
ggcgcgccagtccttaagtcgctatctgacatttctgacatttctgacatttctgacatttctgacatttctgacatttctgacatttctgacatttctgacatttctgacatttctgacatttctgattcttggcaaatttctgacatttctgacatttctgacatttctgaccgtcaattcctttacgactcggaccgatg

SEQ ID NO: 16918 - DNA, 203 bp, synthetic construct
  source 1..203: mol_type = other DNA
ggcgcgccagtcctctgcgacatgtctgacatttctgacatttctgacatttctgacatttctgacatttctgacatttctgacatttctgacatttctgacatttctgacatttctgacatttcttggcaaactgacatttctgacatttctgacatttcttggcaaactgacatttctgacatttccgactcggaccgatg

SEQ ID NO: 16919 - DNA, 203 bp, synthetic construct
  source 1..203: mol_type = other DNA
ggcgcgccagtcctcacctgtcgctctgacatttctgacatttctgacatttctgacatttctgacatttctgacatttctgacatttctgacatttctgacatttctgacatttctgattcttggcaaatttctgacatttctgacatttctgacatttctgacatttctgacatttcccggcgggtcgactcggaccgatg

SEQ ID NO: 16920 - DNA, 203 bp, synthetic construct
  source 1..203: mol_type = other DNA
ggcgcgccagtcctcgagcgacagtctgacatttctgacatttctgacatttctgacatttctgacatttctgacatttctgacatttctgacatttctgacatttctgacatttctgcacggaatcgagaatctgacatttctgacatttctgacatttctgacatttctgacatttctgacatttccgactcggaccgatg

SEQ ID NO: 16921 - DNA, 203 bp, synthetic construct
  source 1..203: mol_type = other DNA
ggcgcgccagtccttgaatgtcgctctgacatttctgacatttctgacatttctgacatttctgacatttctgacatttctgacatttctgacatttctgacatttctgacatttctgcacggaatcgagaatctgacatttctgacatttctgacatttctgacatttctgaccacggaatcgagaacgactcggaccgatg

SEQ ID NO: 16922 - DNA, 203 bp, synthetic construct
  source 1..203: mol_type = other DNA
ggcgcgccagtcctgttggtcgcctctgacatttctgacatttctgacatttctgacatttctgacatttctgacatttctgacatttctgacatttctgacatttctgacatttctgcgtcaattcctttatctgacatttctgacatttctgacatttctgacatttctgacatttctgacatttccgactcggaccgatg

SEQ ID NO: 16923 - DNA, 203 bp, synthetic construct
  source 1..203: mol_type = other DNA
ggcgcgccagtcctgtcgctctaatctgacatttctgacatttctgacatttctgacatttctgacatttctgacatttctgacatttctgacatttctgacatttctgacatttctgcgtcaattcctttatctgacatttctgacatttctgacatttctgacatttctgaccgtcaattcctttacgactcggaccgatg

SEQ ID NO: 16924 - DNA, 203 bp, synthetic construct
  source 1..203: mol_type = other DNA
ggcgcgccagtcctgtcgctgatctctgacatttctgacatttctgacatttctgacatttctgacatttctgacatttctgacatttctgacatttctgacatttctgacatttctgtactccctgacatttctgacatttctgacatttctgacatttctgacatttctgaccgtcaattcctttacgactcggaccgatg

SEQ ID NO: 16925 - DNA, 203 bp, synthetic construct
  source 1..203: mol_type = other DNA
ggcgcgccagtcctgtgtcgctcatctgacatttctgacatttctgacatttctgacatttctgacatttctgacatttctgacatttctgacatttctgacatttctgacatttctttcttggcaaacatttctgacatttctgacatttctgacatttctgacatttctgacattttcttggcaaacgactcggaccgatg

SEQ ID NO: 16926 - DNA, 203 bp, synthetic construct
  source 1..203: mol_type = other DNA
ggcgcgccagtcctaatgtcgtagtctgacatttctgacatttctgacatttctgacatttctgacatttctgacatttctgacatttctgacatttctgacatttctgaccacggaatcgagaatgacatttctgacatttctgacatttctgacatttctgacatttctgacatttctgacatttccgactcggaccgatg

SEQ ID NO: 16927 - DNA, 203 bp, synthetic construct
  source 1..203: mol_type = other DNA
ggcgcgccagtcctcgcctagaattctgacatttctgacatttctgacatttctgacatttctgacatttctgacatttctgacatttctgacatttctgacatttctgaccgtcaattcctttatgacatttctgacatttctgacatttctgacatttctgacatttctgacatttctgtactccccgactcggaccgatg

SEQ ID NO: 16928 - DNA, 203 bp, synthetic construct
  source 1..203: mol_type = other DNA
ggcgcgccagtcctcctagacggttctgacatttctgacatttctgacatttctgacatttctgacatttctgacatttctgacatttctgacatttctgacatttctgattcttggcaaatttctgacatttctgacatttctgacatttctgacatttctgacatttctgacattttcttggcaaacgactcggaccgatg

SEQ ID NO: 16929 - DNA, 203 bp, synthetic construct
  source 1..203: mol_type = other DNA
ggcgcgccagtccttctttctaggtctgacatttctgacatttctgacatttctgacatttctgacatttctgacatttctgacatttctgacatttctgacatttctgcacggaatcgagaatctgacatttctgacatttctgacatttctgacatttctgacatttctgacatttcccggcgggtcgactcggaccgatg

SEQ ID NO: 16930 - DNA, 203 bp, synthetic construct
  source 1..203: mol_type = other DNA
ggcgcgccagtcctcgtctagtgttctgacatttctgacatttctgacatttctgacatttctgacatttctgacatttctgacatttctgacatttctgacatttctgcatactcccccatttctgacatttctgacatttctgacatttctgacatttctgacatttctgacatttctgacatttccgactcggaccgatg

SEQ ID NO: 16931 - DNA, 203 bp, synthetic construct
  source 1..203: mol_type = other DNA
ggcgcgccagtcctgcttctagtctctgacatttctgacatttctgacatttctgacatttctgacatttctgacatttctgacatttctgacatttctgacatttctgcgtcaattcctttatctgacatttctgacatttctgacatttctgacatttctgacatttctgacatttcccggcgggtcgactcggaccgatg

SEQ ID NO: 16932 - DNA, 203 bp, synthetic construct
  source 1..203: mol_type = other DNA
ggcgcgccagtcctatctagttggtctgacatttctgacatttctgacatttctgacatttctgacatttctgacatttctgacatttctgacatttctgacatttctgtaccggccgtgcgttctgacatttctgacatttctgacatttctgacatttctgacatttctgacatttctgacatttccgactcggaccgatg

SEQ ID NO: 16933 - DNA, 203 bp, synthetic construct
  source 1..203: mol_type = other DNA
ggcgcgccagtcctcttctaggcgtctgacatttctgacatttctgacatttctgacatttctgacatttctgacatttctgacatttctgacatttctgacatttctgtaccggccgtgctttctgacatttctgacatttctgacatttctgacatttctgacatttctgacatttctgacatttccgactcggaccgatg

SEQ ID NO: 16934 - DNA, 203 bp, synthetic construct
  source 1..203: mol_type = other DNA
ggcgcgccagtcctggtttagcgttctgacatttctgacatttctgacatttctgacatttctgacatttctgacatttctgacatttctgacatttctgacatttctgttcttggcaacatttctgacatttctgacatttctgacatttctgacatttctgacatttctgacatttctgacatttccgactcggaccgatg

SEQ ID NO: 16935 - DNA, 203 bp, synthetic construct
  source 1..203: mol_type = other DNA
ggcgcgccagtccttagtcaggtgtctgacatttctgacatttctgacatttctgacatttctgacatttctgacatttctgacatttctgacatttctgacatttcttcttggcaaaacatttctgacatttctgacatttctgacatttctgacatttctgacatttctgacatttctgacatttccgactcggaccgatg

SEQ ID NO: 16936 - DNA, 203 bp, synthetic construct
  source 1..203: mol_type = other DNA
ggcgcgccagtcctggtcaggtcctctgacatttctgacatttctgacatttctgacatttctgacatttctgacatttctgacatttctgacatttctgacatttcttggcaaactgacatttctgacatttctgacatttctgacatttctgacatttctgacatttctgacatttctgacatttccgactcggaccgatg

SEQ ID NO: 16937 - DNA, 203 bp, synthetic construct
  source 1..203: mol_type = other DNA
ggcgcgccagtcctaaacctgatctctgacatttctgacatttctgacatttctgacatttctgacatttctgacatttctgacatttctgacatttctgacatttcttggcaaactgacatttctgacatttctgacatttcttggcaaactgacatttctgacatttctgacatttctgacatttccgactcggaccgatg

SEQ ID NO: 16938 - DNA, 203 bp, synthetic construct
  source 1..203: mol_type = other DNA
ggcgcgccagtcctacctgaagaatctgacatttctgacatttctgacatttctgacatttctgacatttctgacatttctgacatttctgacatttctgacatttcttggcaaactgacatttctgacatttctgacatttcttggcaaactgacatttcttggcaaactgacatttctgacatttccgactcggaccgatg

SEQ ID NO: 16939 - DNA, 203 bp, synthetic construct
  source 1..203: mol_type = other DNA
ggcgcgccagtcctctggtgcatttctgacatttctgacatttctgacatttctgacatttctgacatttctgacatttctgacatttctgacatttctgacattttcttggcaaatgacatttctgacatttctgacatttctgacatttctgacatttctgacatttctgacatttcaccggccgtcgactcggaccgatg

SEQ ID NO: 16940 - DNA, 203 bp, synthetic construct
  source 1..203: mol_type = other DNA
ggcgcgccagtcctaatgcaccactctgacatttctgacatttctgacatttctgacatttctgacatttctgacatttctgacatttctgacatttctgacattttcttggcaaatgacatttctgacatttctgacatttctgacatttctgacatttctgacatttctgacatttcccggcgggtcgactcggaccgatg

SEQ ID NO: 16941 - DNA, 203 bp, synthetic construct
  source 1..203: mol_type = other DNA
ggcgcgccagtcctgactagaacgtctgacatttctgacatttctgacatttctgacatttctgacatttctgacatttctgacatttctgacatttctgacattttgccaagaactgacattttgccaagaactgacattttgccaagaactgacattttgccaagaactgacatttctgacatttccgactcggaccgatg

SEQ ID NO: 16942 - DNA, 203 bp, synthetic construct
  source 1..203: mol_type = other DNA
ggcgcgccagtcctggtagaacgttctgacatttctgacatttctgacatttctgacatttctgacatttctgacatttctgacatttctgacatttctgaccacggaatcgagaatgacatttctgacatttctgacatttctgacatttctgacatttctgacatttctgacatttcaccggccgtcgactcggaccgatg

SEQ ID NO: 16943 - DNA, 203 bp, synthetic construct
  source 1..203: mol_type = other DNA
ggcgcgccagtcctcgttctagcatctgacatttctgacatttctgacatttctgacatttctgacatttctgacatttctgacatttctgacatttctgaccacggaatcgagaatgacatttctgacatttctgacatttctgacatttctgacatttctgacatttctgacatttcccggcgggtcgactcggaccgatg

SEQ ID NO: 16944 - DNA, 203 bp, synthetic construct
  source 1..203: mol_type = other DNA
ggcgcgccagtcctattttcagtttctgacatttctgacatttctgacatttctgacatttctgacatttctgacatttctgacatttctgacatttctgacccggcgggtatttctgacatttctgacatttctgacatttctgacatttctgacatttctgacatttctgaccacggaatcgagaacgactcggaccgatg

SEQ ID NO: 16945 - DNA, 203 bp, synthetic construct
  source 1..203: mol_type = other DNA
ggcgcgccagtcctgtatgtcgggtctgacatttctgacatttctgacatttctgacatttctgacatttctgacatttctgacatttctgacatttctgacccttccgtcaattcctttaagtttgacatttctgacatttctgacatttctgacatttctgacatttctgacatttctgacatttccgactcggaccgatg

SEQ ID NO: 16946 - DNA, 203 bp, synthetic construct
  source 1..203: mol_type = other DNA
ggcgcgccagtcctaaagaccgggtctgacatttctgacatttctgacatttctgacatttctgacatttctgacatttctgacatttctgacatttctgaccggccgtacatttctgacatttctgacatttctgacatttctgacatttctgacatttctgacatttctgacatttcccggcgggtcgactcggaccgatg

SEQ ID NO: 16947 - DNA, 203 bp, synthetic construct
  source 1..203: mol_type = other DNA
ggcgcgccagtccttcgtctcgggtctgacatttctgacatttctgacatttctgacatttctgacatttctgacatttctgacatttctgacatttctgaccgtcaattcctttatgacatttctgacatttctgacatttctgacatttctgacatttctgacatttctgacatttcccggcgggtcgactcggaccgatg

SEQ ID NO: 16948 - DNA, 203 bp, synthetic construct
  source 1..203: mol_type = other DNA
ggcgcgccagtccttagtcatttctctgacatttctgacatttctgacatttctgacatttctgacatttctgacatttctgacatttctgacatttctgaggaagctgcccggcgggtcatgggaaacatttctgacatttctgacatttctgacatttctgacatttctgacatttctgacatttccgactcggaccgatg

SEQ ID NO: 16949 - DNA, 203 bp, synthetic construct
  source 1..203: mol_type = other DNA
ggcgcgccagtccttacagtgctctctgacatttctgacatttctgacatttctgacatttctgacatttctgacatttctgacatttctgacatttctgatttgcaaccatactccccccggaaccacatttctgacatttctgacatttctgacatttctgacatttctgacatttctgacatttccgactcggaccgatg

SEQ ID NO: 16950 - DNA, 203 bp, synthetic construct
  source 1..203: mol_type = other DNA
ggcgcgccagtcctgtgagttaagtctgacatttctgacatttctgacatttctgacatttctgacatttctgacatttctgacatttctgacatttctgcaccacccacggaatcgagaaagagctacatttctgacatttctgacatttctgacatttctgacatttctgacatttctgacatttccgactcggaccgatg

SEQ ID NO: 16951 - DNA, 203 bp, synthetic construct
  source 1..203: mol_type = other DNA
ggcgcgccagtccttttggtcacgtctgacatttctgacatttctgacatttctgacatttctgacatttctgacatttctgacatttctgacatttctgccggcgggtacatttctgacatttctgacatttctgacatttctgacatttctgacatttctgacatttctgacatttcaccggccgtcgactcggaccgatg

SEQ ID NO: 16952 - DNA, 203 bp, synthetic construct
  source 1..203: mol_type = other DNA
ggcgcgccagtcctgtcactaccctctgacatttctgacatttctgacatttctgacatttctgacatttctgacatttctgacatttctgacatttctgctttgcaaccatactccccccggaaccccatttctgacatttctgacatttctgacatttctgacatttctgacatttctgacatttccgactcggaccgatg

SEQ ID NO: 16953 - DNA, 203 bp, synthetic construct
  source 1..203: mol_type = other DNA
ggcgcgccagtcctaacgagaccctctgacatttctgacatttctgacatttctgacatttctgacatttctgacatttctgacatttctgacatttctgtactccctgacatttctgacatttctgacatttctgacatttctgacatttctgacatttctgacatttctgacattttcttggcaaacgactcggaccgatg

SEQ ID NO: 16954 - DNA, 203 bp, synthetic construct
  source 1..203: mol_type = other DNA
ggcgcgccagtcctatcatgaccctctgacatttctgacatttctgacatttctgacatttctgacatttctgacatttctgacatttctgacatttctgttcttggcaaaatttctgacatttctgacatttctgacatttctgacatttctgacatttctgacatttctgacatttctgacatttccgactcggaccgatg

SEQ ID NO: 16955 - DNA, 203 bp, synthetic construct
  source 1..203: mol_type = other DNA
ggcgcgccagtcctggcaggaccctctgacatttctgacatttctgacatttctgacatttctgacatttctgacatttctgacatttctgacatttcttcttggcaaaacatttctgacatttctgacatttctgacatttctgacatttctgacatttctgacatttctgacatttcaccggccgtcgactcggaccgatg

SEQ ID NO: 16956 - DNA, 203 bp, synthetic construct
  source 1..203: mol_type = other DNA
ggcgcgccagtcctcctttgaccctctgacatttctgacatttctgacatttctgacatttctgacatttctgacatttctgacatttctgacatttcttgcccttccgtcaattcctttaagtttcagatttctgacatttctgacatttctgacatttctgacatttctgacatttctgacatttccgactcggaccgatg

SEQ ID NO: 16957 - DNA, 203 bp, synthetic construct
  source 1..203: mol_type = other DNA
ggcgcgccagtcctgggttaagtgtctgacatttctgacatttctgacatttctgacatttctgacatttctgacatttctgacatttctgacattttactcccttctgacatttctgacatttctgacatttctgacatttctgacatttctgacatttctgacatttctgacatttctgacatttccgactcggaccgatg

SEQ ID NO: 16958 - DNA, 203 bp, synthetic construct
  source 1..203: mol_type = other DNA
ggcgcgccagtcctgggtgacctctctgacatttctgacatttctgacatttctgacatttctgacatttctgacatttctgacatttctgacattttactcccttctgacatttctgacatttctgacatttctgacatttctgacatttctgacatttctgacatttctgacatttctgtactccccgactcggaccgatg

SEQ ID NO: 16959 - DNA, 203 bp, synthetic construct
  source 1..203: mol_type = other DNA
ggcgcgccagtcctgggtagcctgtctgacatttctgacatttctgacatttctgacatttctgacatttctgacatttctgacatttctgacattttactcccttctgacatttctgacatttctgacatttctgacatttctgacatttctgacatttctgacatttctgaccacggaatcgagaacgactcggaccgatg

SEQ ID NO: 16960 - DNA, 203 bp, synthetic construct
  source 1..203: mol_type = other DNA
ggcgcgccagtcctcctgcacttctctgacatttctgacatttctgacatttctgacatttctgacatttctgacatttctgacatttctgacattttcttggcaaatgacatttctgacatttctgacatttctgacatttctgacatttctgacatttctgacatttctgacattttcttggcaaacgactcggaccgatg

SEQ ID NO: 16961 - DNA, 203 bp, synthetic construct
  source 1..203: mol_type = other DNA
ggcgcgccagtccttactagcgtgtctgacatttctgacatttctgacatttctgacatttctgacatttctgacatttctgacatttctgacatttttaatgaaaacattcttggcaaatgctttcgctcttctgacatttctgacatttctgacatttctgacatttctgacatttctgacatttccgactcggaccgatg

SEQ ID NO: 16962 - DNA, 203 bp, synthetic construct
  source 1..203: mol_type = other DNA
ggcgcgccagtcctgcagtgactttctgacatttctgacatttctgacatttctgacatttctgacatttctgacatttctgacatttctgaccacggaatcgagaatgacatttctgacatttctgacatttctgacatttctgacatttctgacatttctgacatttctgacattttcttggcaaacgactcggaccgatg

SEQ ID NO: 16963 - DNA, 203 bp, synthetic construct
  source 1..203: mol_type = other DNA
ggcgcgccagtcctgggttgactttctgacatttctgacatttctgacatttctgacatttctgacatttctgacatttctgacatttctgaccatgcaccaccacccacggaatcgagaaagagctatcaatctgacatttctgacatttctgacatttctgacatttctgacatttctgacatttccgactcggaccgatg

SEQ ID NO: 16964 - DNA, 203 bp, synthetic construct
  source 1..203: mol_type = other DNA
ggcgcgccagtcctggctaagtcatctgacatttctgacatttctgacatttctgacatttctgacatttctgacatttctgacatttctgacggtttcccggaagctgcccggcgggtcatgggaataacgccggacatttctgacatttctgacatttctgacatttctgacatttctgacatttccgactcggaccgatg

SEQ ID NO: 16965 - DNA, 203 bp, synthetic construct
  source 1..203: mol_type = other DNA
ggcgcgccagtccttggcaagtcatctgacatttctgacatttctgacatttctgacatttctgacatttctgacatttctgacatttctgactggtggtgcccttccgtcaattcctttaagtttcagctttgcaacatttctgacatttctgacatttctgacatttctgacatttctgacatttccgactcggaccgatg

SEQ ID NO: 16966 - DNA, 203 bp, synthetic construct
  source 1..203: mol_type = other DNA
ggcgcgccagtccttgttgacttgtctgacatttctgacatttctgacatttctgacatttctgacatttctgacatttctgacatttctgacttcttggcaaattctgacatttctgacatttctgacatttctgacatttctgacatttctgacatttctgacatttctgacatttctgacatttccgactcggaccgatg

SEQ ID NO: 16967 - DNA, 203 bp, synthetic construct
  source 1..203: mol_type = other DNA
ggcgcgccagtcctaagtcaggcctctgacatttctgacatttctgacatttctgacatttctgacatttctgacatttctgacatttctgacttcttggcaaattctgacatttctgacatttctgacatttctgacatttctgacatttctgacatttctgacatttctgaccacggaatcgagaacgactcggaccgatg

SEQ ID NO: 16968 - DNA, 203 bp, synthetic construct
  source 1..203: mol_type = other DNA
ggcgcgccagtcctacgatctttatctgacatttctgacatttctgacatttctgacatttctgacatttctgacatttctgacatttctgatggtttcccggaagctgcccggcgggtcatgggaataacgccgcacatttctgacatttctgacatttctgacatttctgacatttctgacatttccgactcggaccgatg

SEQ ID NO: 16969 - DNA, 203 bp, synthetic construct
  source 1..203: mol_type = other DNA
ggcgcgccagtccttttgcacacctctgacatttctgacatttctgacatttctgacatttctgacatttctgacatttctgacatttctgccggcgggtacatttctgacatttctgacatttctgacatttctgacatttctgacatttctgacatttctgacatttctgacattttcttggcaaacgactcggaccgatg

SEQ ID NO: 16970 - DNA, 203 bp, synthetic construct
  source 1..203: mol_type = other DNA
ggcgcgccagtccttgcacactactctgacatttctgacatttctgacatttctgacatttctgacatttctgacatttctgacatttctgcctggtggtgcccttccgtcaattcctttaagtttcagctttgcaacatttctgacatttctgacatttctgacatttctgacatttctgacatttccgactcggaccgatg

SEQ ID NO: 16971 - DNA, 203 bp, synthetic construct
  source 1..203: mol_type = other DNA
ggcgcgccagtcctgtctggtttatctgacatttctgacatttctgacatttctgacatttctgacatttctgacatttctgacatttctgcgcaaactgacatttctgcgcaaactgacatttctgcgcaaactgacatttctgcgcaaactgacatttctgcgcaaactgacatttctgacatttccgactcggaccgatg

SEQ ID NO: 16972 - DNA, 203 bp, synthetic construct
  source 1..203: mol_type = other DNA
ggcgcgccagtcctaaagtatgaatctgacatttctgacatttctgacatttctgacatttctgacatttctgacatttctgacatttctgtgcaaactgacatttctgtgcaaactgacatttctgtgcaaactgacatttctgtgcaaactgacatttctgtgcaaactgacatttctgacatttccgactcggaccgatg

SEQ ID NO: 16973 - DNA, 203 bp, synthetic construct
  source 1..203: mol_type = other DNA
ggcgcgccagtccttaagtatgggtctgacatttctgacatttctgacatttctgacatttctgacatttctgacatttctgacatttctgttcttggcaaaatttctgacatttctgacatttctgacatttctgacatttctgacatttctgacatttctgacatttctgacatttcaccggccgtcgactcggaccgatg

SEQ ID NO: 16974 - DNA, 203 bp, synthetic construct
  source 1..203: mol_type = other DNA
ggcgcgccagtcctacgacagatatctgacatttctgacatttctgacatttctgacatttctgacatttctgacatttctgacatttcttagcaaactgacatttcttagcaaactgacatttcttagcaaactgacatttcttagcaaactgacatttcttagcaaactgacatttctgacatttccgactcggaccgatg

SEQ ID NO: 16975 - DNA, 203 bp, synthetic construct
  source 1..203: mol_type = other DNA
ggcgcgccagtcctgtttgtatcctctgacatttctgacatttctgacatttctgacatttctgacatttctgacatttctgacatttcttcctggtggtgcccttccgtcaattcctttaagtttcagctttgcaacatttctgacatttctgacatttctgacatttctgacatttctgacatttccgactcggaccgatg

SEQ ID NO: 16976 - DNA, 203 bp, synthetic construct
  source 1..203: mol_type = other DNA
ggcgcgccagtccttttagagacctctgacatttctgacatttctgacatttctgacatttctgacatttctgacatttctgacatttcttcgcaaactgacatttcttcgcaaactgacatttcttcgcaaactgacatttcttcgcaaactgacatttcttcgcaaactgacatttctgacatttccgactcggaccgatg

SEQ ID NO: 16977 - DNA, 203 bp, synthetic construct
  source 1..203: mol_type = other DNA
ggcgcgccagtccttgaacatacctctgacatttctgacatttctgacatttctgacatttctgacatttctgacatttctgacatttcttgaaaaactgacatttcttgaaaaactgacatttcttgaaaaactgacatttcttgaaaaactgacatttcttgaaaaactgacatttctgacatttccgactcggaccgatg

SEQ ID NO: 16978 - DNA, 203 bp, synthetic construct
  source 1..203: mol_type = other DNA
ggcgcgccagtcctgatacttacctctgacatttctgacatttctgacatttctgacatttctgacatttctgacatttctgacatttcttgagaaactgacatttcttgagaaactgacatttcttgagaaactgacatttcttgagaaactgacatttcttgagaaactgacatttctgacatttccgactcggaccgatg

SEQ ID NO: 16979 - DNA, 203 bp, synthetic construct
  source 1..203: mol_type = other DNA
ggcgcgccagtccttactgtaacctctgacatttctgacatttctgacatttctgacatttctgacatttctgacatttctgacatttcttgcaaaactgacatttcttgcaaaactgacatttcttgcaaaactgacatttcttgcaaaactgacatttcttgcaaaactgacatttctgacatttccgactcggaccgatg

SEQ ID NO: 16980 - DNA, 203 bp, synthetic construct
  source 1..203: mol_type = other DNA
ggcgcgccagtcctaaacagatcctctgacatttctgacatttctgacatttctgacatttctgacatttctgacatttctgacatttcttggcaaactgacatttctgacatttctgacatttctgacatttctgacatttctgacatttctgacatttctgacatttctgaccacggaatcgagaacgactcggaccgatg

SEQ ID NO: 16981 - DNA, 203 bp, synthetic construct
  source 1..203: mol_type = other DNA
ggcgcgccagtcctggtaacgaattctgacatttctgacatttctgacatttctgacatttctgacatttctgacatttctgacatttcttggcaaactgacatttctgacatttctgacatttcttggcaaactgacatttctgacatttctgacatttctgacatttctgacatttctgacatttccgactcggaccgatg

SEQ ID NO: 16982 - DNA, 203 bp, synthetic construct
  source 1..203: mol_type = other DNA
ggcgcgccagtcctggtaagaatctctgacatttctgacatttctgacatttctgacatttctgacatttctgacatttctgacatttcttggcaaactgacatttctgacatttctgacatttcttggcaaactgacatttcttggcaaactgacatttcttggcaaactgacatttctgacatttccgactcggaccgatg

SEQ ID NO: 16983 - DNA, 203 bp, synthetic construct
  source 1..203: mol_type = other DNA
ggcgcgccagtcctggttcatgtatctgacatttctgacatttctgacatttctgacatttctgacatttctgacatttctgacatttcttggcaaactgacatttcttggcaaactgacatttctgacatttctgacatttctgacatttctgacatttctgacatttctgacatttctgacatttccgactcggaccgatg

SEQ ID NO: 16984 - DNA, 203 bp, synthetic construct
  source 1..203: mol_type = other DNA
ggcgcgccagtcctatgtgatctatctgacatttctgacatttctgacatttctgacatttctgacatttctgacatttctgacatttcttggcaaactgacatttcttggcaaactgacatttcttggcaaactgacatttcttggcaaactgacatttcttggcaaactgacatttcttggcaaaccgactcggaccgatg

SEQ ID NO: 16985 - DNA, 203 bp, synthetic construct
  source 1..203: mol_type = other DNA
ggcgcgccagtcctggcttcaccctctgacatttctgacatttctgacatttctgacatttctgacatttctgacatttctgacatttcttggcaacctgacatttcttggcaacctgacatttcttggcaacctgacatttcttggcaacctgacatttcttggcaacctgacatttctgacatttccgactcggaccgatg

SEQ ID NO: 16986 - DNA, 203 bp, synthetic construct
  source 1..203: mol_type = other DNA
ggcgcgccagtcctgttcacccactctgacatttctgacatttctgacatttctgacatttctgacatttctgacatttctgacatttcttggcaagctgacatttcttggcaagctgacatttcttggcaagctgacatttcttggcaagctgacatttcttggcaagctgacatttctgacatttccgactcggaccgatg

SEQ ID NO: 16987 - DNA, 203 bp, synthetic construct
  source 1..203: mol_type = other DNA
ggcgcgccagtcctagagttaacgtctgacatttctgacatttctgacatttctgacatttctgacatttctgacatttctgacatttcttggcaatctgacatttcttggcaatctgacatttcttggcaatctgacatttcttggcaatctgacatttcttggcaatctgacatttctgacatttccgactcggaccgatg

SEQ ID NO: 16988 - DNA, 203 bp, synthetic construct
  source 1..203: mol_type = other DNA
ggcgcgccagtcctgaaacctagatctgacatttctgacatttctgacatttctgacatttctgacatttctgacatttctgacatttcttggcacactgacatttcttggcacactgacatttcttggcacactgacatttcttggcacactgacatttcttggcacactgacatttctgacatttccgactcggaccgatg

SEQ ID NO: 16989 - DNA, 203 bp, synthetic construct
  source 1..203: mol_type = other DNA
ggcgcgccagtcctaacctagcagtctgacatttctgacatttctgacatttctgacatttctgacatttctgacatttctgacatttcttggcaccctgacatttcttggcaccctgacatttcttggcaccctgacatttcttggcaccctgacatttcttggcaccctgacatttctgacatttccgactcggaccgatg

SEQ ID NO: 16990 - DNA, 203 bp, synthetic construct
  source 1..203: mol_type = other DNA
ggcgcgccagtcctagcaacctagtctgacatttctgacatttctgacatttctgacatttctgacatttctgacatttctgacatttcttggcactctgacatttcttggcactctgacatttcttggcactctgacatttcttggcactctgacatttcttggcactctgacatttctgacatttccgactcggaccgatg

SEQ ID NO: 16991 - DNA, 203 bp, synthetic construct
  source 1..203: mol_type = other DNA
ggcgcgccagtccttaaccgagcctctgacatttctgacatttctgacatttctgacatttctgacatttctgacatttctgacatttcttggcagactgacatttcttggcagactgacatttcttggcagactgacatttcttggcagactgacatttcttggcagactgacatttctgacatttccgactcggaccgatg

SEQ ID NO: 16992 - DNA, 203 bp, synthetic construct
  source 1..203: mol_type = other DNA
ggcgcgccagtcctcgcaagttgctctgacatttctgacatttctgacatttctgacatttctgacatttctgacatttctgacatttcttggcaggctgacatttcttggcaggctgacatttcttggcaggctgacatttcttggcaggctgacatttcttggcaggctgacatttctgacatttccgactcggaccgatg

SEQ ID NO: 16993 - DNA, 203 bp, synthetic construct
  source 1..203: mol_type = other DNA
ggcgcgccagtcctgcaacttgcgtctgacatttctgacatttctgacatttctgacatttctgacatttctgacatttctgacatttcttggcagtctgacatttcttggcagtctgacatttcttggcagtctgacatttcttggcagtctgacatttcttggcagtctgacatttctgacatttccgactcggaccgatg

SEQ ID NO: 16994 - DNA, 203 bp, synthetic construct
  source 1..203: mol_type = other DNA
ggcgcgccagtcctagcaggacgttctgacatttctgacatttctgacatttctgacatttctgacatttctgacatttctgacatttcttggcatgctgacatttcttggcatgctgacatttcttggcatgctgacatttcttggcatgctgacatttcttggcatgctgacatttctgacatttccgactcggaccgatg

SEQ ID NO: 16995 - DNA, 203 bp, synthetic construct
  source 1..203: mol_type = other DNA
ggcgcgccagtcctgacgtccaactctgacatttctgacatttctgacatttctgacatttctgacatttctgacatttctgacatttcttggccaactgacatttcttggccaactgacatttcttggccaactgacatttcttggccaactgacatttcttggccaactgacatttctgacatttccgactcggaccgatg

SEQ ID NO: 16996 - DNA, 203 bp, synthetic construct
  source 1..203: mol_type = other DNA
ggcgcgccagtcctcgacgtcctgtctgacatttctgacatttctgacatttctgacatttctgacatttctgacatttctgacatttcttggcccactgacatttcttggcccactgacatttcttggcccactgacatttcttggcccactgacatttcttggcccactgacatttctgacatttccgactcggaccgatg

SEQ ID NO: 16997 - DNA, 203 bp, synthetic construct
  source 1..203: mol_type = other DNA
ggcgcgccagtcctaagacgtccttctgacatttctgacatttctgacatttctgacatttctgacatttctgacatttctgacatttcttggccgactgacatttcttggccgactgacatttcttggccgactgacatttcttggccgactgacatttcttggccgactgacatttctgacatttccgactcggaccgatg

SEQ ID NO: 16998 - DNA, 203 bp, synthetic construct
  source 1..203: mol_type = other DNA
ggcgcgccagtcctgaggacgtcttctgacatttctgacatttctgacatttctgacatttctgacatttctgacatttctgacatttcttggcgaactgacatttcttggcgaactgacatttcttggcgaactgacatttcttggcgaactgacatttcttggcgaactgacatttctgacatttccgactcggaccgatg

SEQ ID NO: 16999 - DNA, 203 bp, synthetic construct
  source 1..203: mol_type = other DNA
ggcgcgccagtcctggacgtttcgtctgacatttctgacatttctgacatttctgacatttctgacatttctgacatttctgacatttcttggcgcactgacatttcttggcgcactgacatttcttggcgcactgacatttcttggcgcactgacatttcttggcgcactgacatttctgacatttccgactcggaccgatg

SEQ ID NO: 17000 - DNA, 203 bp, synthetic construct
  source 1..203: mol_type = other DNA
ggcgcgccagtcctggtagtaggctctgacatttctgacatttctgacatttctgacatttctgacatttctgacatttctgacatttcttggctcactgacatttcttggctcactgacatttcttggctcactgacatttcttggctcactgacatttcttggctcactgacatttctgacatttccgactcggaccgatg

SEQ ID NO: 17001 - DNA, 203 bp, synthetic construct
  source 1..203: mol_type = other DNA
ggcgcgccagtccttggattcacgtctgacatttctgacatttctgacatttctgacatttctgacatttctgacatttctgacatttcttgggaaactgacatttcttgggaaactgacatttcttgggaaactgacatttcttgggaaactgacatttcttgggaaactgacatttctgacatttccgactcggaccgatg

SEQ ID NO: 17002 - DNA, 203 bp, synthetic construct
  source 1..203: mol_type = other DNA
ggcgcgccagtcctcgtgaatacgtctgacatttctgacatttctgacatttctgacatttctgacatttctgacatttctgacatttcttgtgaaactgacatttcttgtgaaactgacatttcttgtgaaactgacatttcttgtgaaactgacatttcttgtgaaactgacatttctgacatttccgactcggaccgatg

SEQ ID NO: 17003 - DNA, 203 bp, synthetic construct
  source 1..203: mol_type = other DNA
ggcgcgccagtcctgtgcgaatactctgacatttctgacatttctgacatttctgacatttctgacatttctgacatttctgacatttggcgggtttctgacatttggcgggtttctgacatttggcgggtttctgacatttggcgggtttctgacatttggcgggtttctgacatttctgacatttccgactcggaccgatg

SEQ ID NO: 17004 - DNA, 203 bp, synthetic construct
  source 1..203: mol_type = other DNA
ggcgcgccagtcctagcgaatgtctctgacatttctgacatttctgacatttctgacatttctgacatttctgacatttctgacattttactcccttctgacatttctgacatttctgacatttctgacatttctgacatttctgacatttctgacatttctgacatttctgacatttcccggcgggtcgactcggaccgatg

SEQ ID NO: 17005 - DNA, 203 bp, synthetic construct
  source 1..203: mol_type = other DNA
ggcgcgccagtcctaggctgcgaatctgacatttctgacatttctgacatttctgacatttctgacatttctgacatttctgacattttatggcaaactgacattttatggcaaactgacattttatggcaaactgacattttatggcaaactgacattttatggcaaactgacatttctgacatttccgactcggaccgatg

SEQ ID NO: 17006 - DNA, 203 bp, synthetic construct
  source 1..203: mol_type = other DNA
ggcgcgccagtccttctgcgaagctctgacatttctgacatttctgacatttctgacatttctgacatttctgacatttctgacattttgccaagaactgacattttgccaagaactgacattttgccaagaactgacattttgccaagaactgacattttgccaagaactgacatttctgacatttccgactcggaccgatg

SEQ ID NO: 17007 - DNA, 203 bp, synthetic construct
  source 1..203: mol_type = other DNA
ggcgcgccagtccttgcttgcgaatctgacatttctgacatttctgacatttctgacatttctgacatttctgacatttctgacccggcgggtatttctgacatttctgacatttctgacatttctgacatttctgacatttctgacatttctgacatttctgacatttctgacattttcttggcaaacgactcggaccgatg

SEQ ID NO: 17008 - DNA, 203 bp, synthetic construct
  source 1..203: mol_type = other DNA
ggcgcgccagtcctactgcgaaaatctgacatttctgacatttctgacatttctgacatttctgacatttctgacatttctgacctccactcctggtggtgcccttccgtcaattcctttaagtttcagctttgcaaccatactgacatttctgacatttctgacatttctgacatttctgacatttccgactcggaccgatg

SEQ ID NO: 17009 - DNA, 203 bp, synthetic construct
  source 1..203: mol_type = other DNA
ggcgcgccagtccttggcgaagtctctgacatttctgacatttctgacatttctgacatttctgacatttctgacatttctgacgtcaattcctttactgacatttctgacatttctgacatttctgacatttctgacatttctgacatttctgacatttctgacatttctgacatttctgacatttccgactcggaccgatg

SEQ ID NO: 17010 - DNA, 203 bp, synthetic construct
  source 1..203: mol_type = other DNA
ggcgcgccagtcctaagcgaaaattctgacatttctgacatttctgacatttctgacatttctgacatttctgacatttctgacgtcaattcctttactgacatttctgacatttctgacatttctgacatttctgacatttctgacatttctgacatttctgacatttctgaccgtcaattcctttacgactcggaccgatg

SEQ ID NO: 17011 - DNA, 203 bp, synthetic construct
  source 1..203: mol_type = other DNA
ggcgcgccagtcctggttcgctcttctgacatttctgacatttctgacatttctgacatttctgacatttctgacatttctgacttcctttaagtttcagctttgcaaccatactccccccggaacccaaagactttggtttccgacatttctgacatttctgacatttctgacatttctgacatttccgactcggaccgatg

SEQ ID NO: 17012 - DNA, 203 bp, synthetic construct
  source 1..203: mol_type = other DNA
ggcgcgccagtcctaagttcgcagtctgacatttctgacatttctgacatttctgacatttctgacatttctgacatttctgacttcttggcaaattctgacatttctgacatttctgacatttctgacatttctgacatttctgacatttctgacatttctgacatttctgacatttcaccggccgtcgactcggaccgatg

SEQ ID NO: 17013 - DNA, 203 bp, synthetic construct
  source 1..203: mol_type = other DNA
ggcgcgccagtcctacgctttcgctctgacatttctgacatttctgacatttctgacatttctgacatttctgacatttctgatactcccgacatttctgacatttctgacatttctgacatttctgacatttctgacatttctgacatttctgacatttctgacatttctgacatttctgtactccccgactcggaccgatg

SEQ ID NO: 17014 - DNA, 203 bp, synthetic construct
  source 1..203: mol_type = other DNA
ggcgcgccagtcctaggattcgcttctgacatttctgacatttctgacatttctgacatttctgacatttctgacatttctggactttcgttcttgattaatgaaaacattcttggcaaatgctttcgctctggtccgtcttgcgccatttctgacatttctgacatttctgacatttctgacatttccgactcggaccgatg

SEQ ID NO: 17015 - DNA, 203 bp, synthetic construct
  source 1..203: mol_type = other DNA
ggcgcgccagtcctctgcttcgcctctgacatttctgacatttctgacatttctgacatttctgacatttctgacatttctgggctccactcctggtggtgcccttccgtcaattcctttaagtttcagctttgcaaccatactcccatttctgacatttctgacatttctgacatttctgacatttccgactcggaccgatg

SEQ ID NO: 17016 - DNA, 203 bp, synthetic construct
  source 1..203: mol_type = other DNA
ggcgcgccagtcctatttcgctcgtctgacatttctgacatttctgacatttctgacatttctgacatttctgacatttcttactcccctgacatttctgacatttctgacatttctgacatttctgacatttctgacatttctgacatttctgacatttctgacatttctgacatttcaccggccgtcgactcggaccgatg

SEQ ID NO: 17017 - DNA, 203 bp, synthetic construct
  source 1..203: mol_type = other DNA
ggcgcgccagtcctctctttcgcatctgacatttctgacatttctgacatttctgacatttctgacatttctgacatttcttggcaaactgacatttctgacatttctgacatttctgacatttctgacatttctgacatttctgacatttctgacatttctgacatttctgacatttcaccggccgtcgactcggaccgatg

SEQ ID NO: 17018 - DNA, 203 bp, synthetic construct
  source 1..203: mol_type = other DNA
ggcgcgccagtcctggtcattcgctctgacatttctgacatttctgacatttctgacatttctgacatttctgacatttcttggcaaactgacatttctgacatttctgacatttctgacatttctgacatttctgacatttctgacatttctgacatttctgacatttctgacatttcccggcgggtcgactcggaccgatg

SEQ ID NO: 17019 - DNA, 203 bp, synthetic construct
  source 1..203: mol_type = other DNA
ggcgcgccagtcctggatttcgcttctgacatttctgacatttctgacatttctgacatttctgacatttctgacattttactcccttctgacatttctgacatttctgacatttctgacatttctgacatttctgacatttctgacatttctgacatttctgacatttctgacattttcttggcaaacgactcggaccgatg

SEQ ID NO: 17020 - DNA, 203 bp, synthetic construct
  source 1..203: mol_type = other DNA
ggcgcgccagtcctcttcgctagttctgacatttctgacatttctgacatttctgacatttctgacatttctgacattttccgactttcgttcttgattaatgaaaacattcttggcaaatgctttcgctctggtccgtcttgcgccggttctgacatttctgacatttctgacatttctgacatttccgactcggaccgatg

SEQ ID NO: 17021 - DNA, 203 bp, synthetic construct
  source 1..203: mol_type = other DNA
ggcgcgccagtcctaatgcaagtgtctgacatttctgacatttctgacatttctgacatttctgacatttctgacatttttcttggcaaagacatttctgacatttctgacatttctgacatttctgacatttctgacatttctgacatttctgacatttctgacatttctgacatttctgtactccccgactcggaccgatg

SEQ ID NO: 17022 - DNA, 203 bp, synthetic construct
  source 1..203: mol_type = other DNA
ggcgcgccagtcctttgtcatgggtctgacatttctgacatttctgacatttctgacatttctgacatttctgacatttttcttggcaaagacatttctgacatttctgacatttctgacatttctgacatttctgacatttctgacatttctgacatttctgacatttctgaccgtcaattcctttacgactcggaccgatg

SEQ ID NO: 17023 - DNA, 203 bp, synthetic construct
  source 1..203: mol_type = other DNA
ggcgcgccagtcctgtgacgttcttctgacatttctgacatttctgacatttctgacatttctgacatttctgacccggaacccaaagactttggtttcccggaagctgcccggcgggtcatgggaataacgccgccgcatcgccggtcggcagacatttctgacatttctgacatttctgacatttccgactcggaccgatg

SEQ ID NO: 17024 - DNA, 203 bp, synthetic construct
  source 1..203: mol_type = other DNA
ggcgcgccagtcctgagcgtaagctctgacatttctgacatttctgacatttctgacatttctgacatttctgaccggcgggtcatttctgacatttctgacatttctgacatttctgacatttctgacatttctgacatttctgacatttctgacatttctgacatttctgacatttctgtactccccgactcggaccgatg

SEQ ID NO: 17025 - DNA, 203 bp, synthetic construct
  source 1..203: mol_type = other DNA
ggcgcgccagtcctgctttacgcctctgacatttctgacatttctgacatttctgacatttctgacatttctgaccggcgggtcatttctgacatttctgacatttctgacatttctgacatttctgacatttctgacatttctgacatttctgacatttctgacatttctgaccgtcaattcctttacgactcggaccgatg

SEQ ID NO: 17026 - DNA, 203 bp, synthetic construct
  source 1..203: mol_type = other DNA
ggcgcgccagtcctcttacgctcttctgacatttctgacatttctgacatttctgacatttctgacatttctgacgtcaattcctttactgacatttctgacatttctgacatttctgacatttctgacatttctgacatttctgacatttctgacatttctgacatttctgacatttcaccggccgtcgactcggaccgatg

SEQ ID NO: 17027 - DNA, 203 bp, synthetic construct
  source 1..203: mol_type = other DNA
ggcgcgccagtccttcttacgccatctgacatttctgacatttctgacatttctgacatttctgacatttctgacgtcaattcctttactgacatttctgacatttctgacatttctgacatttctgacatttctgacatttctgacatttctgacatttctgacatttctgacatttcccggcgggtcgactcggaccgatg

SEQ ID NO: 17028 - DNA, 203 bp, synthetic construct
  source 1..203: mol_type = other DNA
ggcgcgccagtcctcccgaaatggtctgacatttctgacatttctgacatttctgacatttctgacatttctgacttccgtcaattcctttaagtttcagctttgcaaccatactccccccggaacccaaagactttggtttcccggaagctgcacatttctgacatttctgacatttctgacatttccgactcggaccgatg

SEQ ID NO: 17029 - DNA, 203 bp, synthetic construct
  source 1..203: mol_type = other DNA
ggcgcgccagtcctagaattcgggtctgacatttctgacatttctgacatttctgacatttctgacatttctgacttccgtcaattcctttaagtttcagctttgcaaccatactccccccggaacccaaagactttggtttcccggaagctggacatttctgacatttctgacatttctgacatttccgactcggaccgatg

SEQ ID NO: 17030 - DNA, 203 bp, synthetic construct
  source 1..203: mol_type = other DNA
ggcgcgccagtcctaatgacatgatctgacatttctgacatttctgacatttctgacatttctgacatttctgatactcccgacatttctgacatttctgacatttctgacatttctgacatttctgacatttctgacatttctgacatttctgacatttctgacatttctgacatttcccggcgggtcgactcggaccgatg

SEQ ID NO: 17031 - DNA, 203 bp, synthetic construct
  source 1..203: mol_type = other DNA
ggcgcgccagtccttgctgtgttctctgacatttctgacatttctgacatttctgacatttctgacatttctgatccaccaactaagaacggccatgcaccaccacccacggaatcgagaaagagctatcaatctgtcaatcctgtccgtgtccacatttctgacatttctgacatttctgacatttccgactcggaccgatg

SEQ ID NO: 17032 - DNA, 203 bp, synthetic construct
  source 1..203: mol_type = other DNA
ggcgcgccagtcctctcgtgttggtctgacatttctgacatttctgacatttctgacatttctgacatttctgcgaacctccgactttcgttcttgattaatgaaaacattcttggcaaatgctttcgctctggtccgtcttgcgccggtccaagcatttctgacatttctgacatttctgacatttccgactcggaccgatg

SEQ ID NO: 17033 - DNA, 203 bp, synthetic construct
  source 1..203: mol_type = other DNA
ggcgcgccagtcctaacacgatcgtctgacatttctgacatttctgacatttctgacatttctgacatttctgctccaccaactaagaacggccatgcaccaccacccacggaatcgagaaagagctatcaatctgtcaatcctgtccgtgtccggatttctgacatttctgacatttctgacatttccgactcggaccgatg

SEQ ID NO: 17034 - DNA, 203 bp, synthetic construct
  source 1..203: mol_type = other DNA
ggcgcgccagtcctagacctaaggtctgacatttctgacatttctgacatttctgacatttctgacatttcttcgaacctccgactttcgttcttgattaatgaaaacattcttggcaaatgctttcgctctggtccgtcttgcgccggtccaagaatttctgacatttctgacatttctgacatttccgactcggaccgatg

SEQ ID NO: 17035 - DNA, 203 bp, synthetic construct
  source 1..203: mol_type = other DNA
ggcgcgccagtccttggctgattttctgacatttctgacatttctgacatttctgacatttctgacatttcttggcaaactgacatttctgacatttctgacatttctgacatttctgacatttctgacatttctgacatttcttggcaaactgacatttctgacatttctgacatttctgacatttccgactcggaccgatg

SEQ ID NO: 17036 - DNA, 203 bp, synthetic construct
  source 1..203: mol_type = other DNA
ggcgcgccagtccttggcagaccatctgacatttctgacatttctgacatttctgacatttctgacatttcttggcaaactgacatttctgacatttctgacatttctgacatttctgacatttcttggcaaactgacatttcttggcaaactgacatttcttggcaaactgacatttctgacatttccgactcggaccgatg

SEQ ID NO: 17037 - DNA, 203 bp, synthetic construct
  source 1..203: mol_type = other DNA
ggcgcgccagtcctctttcagccttctgacatttctgacatttctgacatttctgacatttctgacatttcttggcaaactgacatttctgacatttctgacatttcttggcaaactgacatttctgacatttctgacatttctgacatttctgacatttcttggcaaactgacatttctgacatttccgactcggaccgatg

SEQ ID NO: 17038 - DNA, 203 bp, synthetic construct
  source 1..203: mol_type = other DNA
ggcgcgccagtcctacctcagccatctgacatttctgacatttctgacatttctgacatttctgacatttcttggcaaactgacatttctgacatttctgacatttcttggcaaactgacatttctgacatttctgacatttcttggcaaactgacatttcttggcaaactgacatttctgacatttccgactcggaccgatg

SEQ ID NO: 17039 - DNA, 203 bp, synthetic construct
  source 1..203: mol_type = other DNA
ggcgcgccagtcctgcactgcacctctgacatttctgacatttctgacatttctgacatttctgacatttcttggcaaactgacatttctgacatttctgacatttcttggcaaactgacatttcttggcaaactgacatttctgacatttctgacatttctgacatttctgacatttctgacatttccgactcggaccgatg

SEQ ID NO: 17040 - DNA, 203 bp, synthetic construct
  source 1..203: mol_type = other DNA
ggcgcgccagtcctgtaagtcatgtctgacatttctgacatttctgacatttctgacatttctgacatttcttggcaaactgacatttctgacatttctgacatttcttggcaaactgacatttcttggcaaactgacatttctgacatttctgacatttcttggcaaactgacatttctgacatttccgactcggaccgatg

SEQ ID NO: 17041 - DNA, 203 bp, synthetic construct
  source 1..203: mol_type = other DNA
ggcgcgccagtcctagaaccttgctctgacatttctgacatttctgacatttctgacatttctgacatttcttggcaaactgacatttctgacatttctgacatttcttggcaaactgacatttcttggcaaactgacatttcttggcaaactgacatttctgacatttctgacatttctgacatttccgactcggaccgatg

SEQ ID NO: 17042 - DNA, 203 bp, synthetic construct
  source 1..203: mol_type = other DNA
ggcgcgccagtcctagaacctgtgtctgacatttctgacatttctgacatttctgacatttctgacatttcttggcaaactgacatttcttggcaaactgacatttctgacatttctgacatttctgacatttctgacatttctgacatttctgacatttctgacatttctgacatttctgacatttccgactcggaccgatg

SEQ ID NO: 17043 - DNA, 203 bp, synthetic construct
  source 1..203: mol_type = other DNA
ggcgcgccagtcctgaccgaaacatctgacatttctgacatttctgacatttctgacatttctgacatttcttggcaaactgacatttcttggcaaactgacatttctgacatttctgacatttcttggcaaactgacatttcttggcaaactgacatttctgacatttctgacatttctgacatttccgactcggaccgatg

SEQ ID NO: 17044 - DNA, 203 bp, synthetic construct
  source 1..203: mol_type = other DNA
ggcgcgccagtcctgttgatcctttctgacatttctgacatttctgacatttctgacatttctgacatttcttggcaaactgacatttcttggcaaactgacatttctgacatttctgacatttcttggcaaactgacatttcttggcaaactgacatttcttggcaaactgacatttctgacatttccgactcggaccgatg

SEQ ID NO: 17045 - DNA, 203 bp, synthetic construct
  source 1..203: mol_type = other DNA
ggcgcgccagtcctaaccgtgtattctgacatttctgacatttctgacatttctgacatttctgacatttcttggcaaactgacatttcttggcaaactgacatttcttggcaaactgacatttctgacatttctgacatttcttggcaaactgacatttctgacatttctgacatttctgacatttccgactcggaccgatg

SEQ ID NO: 17046 - DNA, 203 bp, synthetic construct
  source 1..203: mol_type = other DNA
ggcgcgccagtcctcgtgtacccatctgacatttctgacatttctgacatttctgacatttctgacatttcttggcaaactgacatttcttggcaaactgacatttcttggcaaactgacatttctgacatttctgacatttcttggcaaactgacatttcttggcaaactgacatttctgacatttccgactcggaccgatg

SEQ ID NO: 17047 - DNA, 203 bp, synthetic construct
  source 1..203: mol_type = other DNA
ggcgcgccagtcctcgtgtatctgtctgacatttctgacatttctgacatttctgacatttctgacatttctttaagccgcaggctccactcctggtggtgcccttccgtcaattcctttaagtttcagctttgcaaccatactccccccggaaccatttctgacatttctgacatttctgacatttccgactcggaccgatg

SEQ ID NO: 17048 - DNA, 203 bp, synthetic construct
  source 1..203: mol_type = other DNA
ggcgcgccagtcctgtcaacacgttctgacatttctgacatttctgacatttctgacatttctgacatttctttcttggcaaacatttctgacatttctgacatttctgacatttctgacatttctgacatttctgacatttctgacatttctgacatttctgacatttctgacatttctgtactccccgactcggaccgatg

SEQ ID NO: 17049 - DNA, 203 bp, synthetic construct
  source 1..203: mol_type = other DNA
ggcgcgccagtcctagtgttgatctctgacatttctgacatttctgacatttctgacatttctgacatttctttcttggcaaacatttctgacatttctgacatttctgacatttctgacatttctgacatttctgacatttctgacatttctgacatttctgacatttctgaccgtcaattcctttacgactcggaccgatg

SEQ ID NO: 17050 - DNA, 203 bp, synthetic construct
  source 1..203: mol_type = other DNA
ggcgcgccagtcctatgctgcttttctgacatttctgacatttctgacatttctgacatttctgacgtggtgcccttccgtcaattcctttaagtttcagctttgcaaccatactccccccggaacccaaagactttggtttcccggaagctgcccggcggggacatttctgacatttctgacatttccgactcggaccgatg

SEQ ID NO: 17051 - DNA, 203 bp, synthetic construct
  source 1..203: mol_type = other DNA
ggcgcgccagtccttgagtgcatgtctgacatttctgacatttctgacatttctgacatttctgatactcccgacatttctgacatttctgacatttctgacatttctgacatttctgacatttctgacatttctgacatttctgacatttctgacatttctgacatttctgacattttcttggcaaacgactcggaccgatg

SEQ ID NO: 17052 - DNA, 203 bp, synthetic construct
  source 1..203: mol_type = other DNA
ggcgcgccagtcctgctggacttttctgacatttctgacatttctgacatttctgacatttctgattcttggcaaatttctgacatttctgacatttctgacatttctgacatttctgacatttctgacatttctgacatttctgacatttctgacatttctgacatttctgaccgtcaattcctttacgactcggaccgatg

SEQ ID NO: 17053 - DNA, 203 bp, synthetic construct
  source 1..203: mol_type = other DNA
ggcgcgccagtcctgggtcccaactctgacatttctgacatttctgacatttctgacatttctgcaaaggaaccataactgatttaatgagccattcgcagtttcactgtaccggccgtgcgtactcagacatgcatggcttaatctttgagacaagcatatgccatttctgacatttctgacatttccgactcggaccgatg

SEQ ID NO: 17054 - DNA, 203 bp, synthetic construct
  source 1..203: mol_type = other DNA
ggcgcgccagtccttcccaaccgttctgacatttctgacatttctgacatttctgacatttctttcttggcaaacatttctgacatttctgacatttctgacatttctgacatttctgacatttctgacatttctgacatttctgacatttctgacatttctgacatttctgacatttcaccggccgtcgactcggaccgatg

SEQ ID NO: 17055 - DNA, 203 bp, synthetic construct
  source 1..203: mol_type = other DNA
ggcgcgccagtccttcccaggacttctgacatttctgacatttctgacatttctgacatttctttcttggcaaacatttctgacatttctgacatttctgacatttctgacatttctgacatttctgacatttctgacatttctgacatttctgacatttctgacatttctgacatttcccggcgggtcgactcggaccgatg

SEQ ID NO: 17056 - DNA, 203 bp, synthetic construct
  source 1..203: mol_type = other DNA
ggcgcgccagtcctcgtcccaacttctgacatttctgacatttctgacatttctgacatttgaccaaaggaaccataactgatttaatgagccattcgcagtttcactgtaccggccgtgcgtactcagacatgcatggcttaatctttgagacaagcatatgctacttctgacatttctgacatttccgactcggaccgatg

SEQ ID NO: 17057 - DNA, 203 bp, synthetic construct
  source 1..203: mol_type = other DNA
ggcgcgccagtcctatcccaaggatctgacatttctgacatttctgacatttctgacattttcctggtggtgcccttccgtcaattcctttaagtttcagctttgcaaccatactccccccggaacccaaagactttggtttcccggaagctgcccggcgggtcatgttctgacatttctgacatttccgactcggaccgatg

SEQ ID NO: 17058 - DNA, 203 bp, synthetic construct
  source 1..203: mol_type = other DNA
ggcgcgccagtcctttgggacctctctgacatttctgacatttctgacatttctgacgagcgaccaaaggaaccataactgatttaatgagccattcgcagtttcactgtaccggccgtgcgtactcagacatgcatggcttaatctttgagacaagcatatgctactggcgacatttctgacatttccgactcggaccgatg

SEQ ID NO: 17059 - DNA, 203 bp, synthetic construct
  source 1..203: mol_type = other DNA
ggcgcgccagtcctacctgggatatctgacatttctgacatttctgacatttctgacggtatctgatcgtcttcgaacctccgactttcgttcttgattaatgaaaacattcttggcaaatgctttcgctctggtccgtcttgcgccggtccaagaatttcacctctagcggccatttctgacatttccgactcggaccgatg

SEQ ID NO: 17060 - DNA, 203 bp, synthetic construct
  source 1..203: mol_type = other DNA
ggcgcgccagtcctctcatgggattctgacatttctgacatttctgacatttctgatccactcctggtggtgcccttccgtcaattcctttaagtttcagctttgcaaccatactccccccggaacccaaagactttggtttcccggaagctgcccggcgggtcatgggaatacatttctgacatttccgactcggaccgatg

SEQ ID NO: 17061 - DNA, 203 bp, synthetic construct
  source 1..203: mol_type = other DNA
ggcgcgccagtcctgcaacgctgatctgacatttctgacatttctgacatttctgcgtcaattcctttatctgacatttctgacatttctgacatttctgacatttctgacatttctgacatttctgacatttctgacatttctgacatttctgacatttctgacatttctgaccacggaatcgagaacgactcggaccgatg

SEQ ID NO: 17062 - DNA, 203 bp, synthetic construct
  source 1..203: mol_type = other DNA
ggcgcgccagtccttgtcgtgagctctgacatttctgacatttctgacatttctgctccactcctggtggtgcccttccgtcaattcctttaagtttcagctttgcaaccatactccccccggaacccaaagactttggtttcccggaagctgcccggcgggtcatgggaataaatttctgacatttccgactcggaccgatg

SEQ ID NO: 17063 - DNA, 203 bp, synthetic construct
  source 1..203: mol_type = other DNA
ggcgcgccagtcctacacgacgaatctgacatttctgacatttctgacatttctgtactccctgacatttctgacatttctgacatttctgacatttctgacatttctgacatttctgacatttctgacatttctgacatttctgacatttctgacatttctgacatttctgaccacggaatcgagaacgactcggaccgatg

SEQ ID NO: 17064 - DNA, 203 bp, synthetic construct
  source 1..203: mol_type = other DNA
ggcgcgccagtccttgcggttgcatctgacatttctgacatttctgacatttcttggcaaactgacatttctgacatttctgacatttctgacatttctgacatttcttggcaaactgacatttctgacatttctgacatttcttggcaaactgacatttcttggcaaactgacatttctgacatttccgactcggaccgatg

SEQ ID NO: 17065 - DNA, 203 bp, synthetic construct
  source 1..203: mol_type = other DNA
ggcgcgccagtcctgcggttaggttctgacatttctgacatttctgacatttcttggcaaactgacatttctgacatttctgacatttctgacatttctgacatttcttggcaaactgacatttcttggcaaactgacatttctgacatttctgacatttctgacatttctgacatttctgacatttccgactcggaccgatg

SEQ ID NO: 17066 - DNA, 203 bp, synthetic construct
  source 1..203: mol_type = other DNA
ggcgcgccagtcctgcggtttgcctctgacatttctgacatttctgacatttcttggcaaactgacatttctgacatttctgacatttctgacatttctgacatttcttggcaaactgacatttcttggcaaactgacatttcttggcaaactgacatttctgacatttctgacatttctgacatttccgactcggaccgatg

SEQ ID NO: 17067 - DNA, 203 bp, synthetic construct
  source 1..203: mol_type = other DNA
ggcgcgccagtcctagttagcggttctgacatttctgacatttctgacatttcttggcaaactgacatttctgacatttctgacatttcttggcaaactgacatttctgacatttctgacatttcttggcaaactgacatttctgacatttctgacatttctgacatttctgacatttctgacatttccgactcggaccgatg

SEQ ID NO: 17068 - DNA, 203 bp, synthetic construct
  source 1..203: mol_type = other DNA
ggcgcgccagtccttgagcggtattctgacatttctgacatttctgacatttcttggcaaactgacatttctgacatttctgacatttcttggcaaactgacatttctgacatttctgacatttcttggcaaactgacatttctgacatttctgacatttcttggcaaactgacatttctgacatttccgactcggaccgatg

SEQ ID NO: 17069 - DNA, 203 bp, synthetic construct
  source 1..203: mol_type = other DNA
ggcgcgccagtcctctagcggtgctctgacatttctgacatttctgacatttcttggcaaactgacatttctgacatttctgacatttcttggcaaactgacatttctgacatttctgacatttcttggcaaactgacatttcttggcaaactgacatttctgacatttctgacatttctgacatttccgactcggaccgatg

SEQ ID NO: 17070 - DNA, 203 bp, synthetic construct
  source 1..203: mol_type = other DNA
ggcgcgccagtcctcagcggtgattctgacatttctgacatttctgacatttcttggcaaactgacatttctgacatttctgacatttcttggcaaactgacatttctgacatttctgacatttcttggcaaactgacatttcttggcaaactgacatttcttggcaaactgacatttctgacatttccgactcggaccgatg

SEQ ID NO: 17071 - DNA, 203 bp, synthetic construct
  source 1..203: mol_type = other DNA
ggcgcgccagtcctctgagcggtctctgacatttctgacatttctgacatttcttggcaaactgacatttctgacatttctgacatttcttggcaaactgacatttcttggcaaactgacatttctgacatttctgacatttctgacatttctgacatttcttggcaaactgacatttctgacatttccgactcggaccgatg

SEQ ID NO: 17072 - DNA, 203 bp, synthetic construct
  source 1..203: mol_type = other DNA
ggcgcgccagtcctaagcggtacttctgacatttctgacatttctgacatttcttggcaaactgacatttctgacatttctgacatttcttggcaaactgacatttcttggcaaactgacatttctgacatttctgacatttcttggcaaactgacatttctgacatttctgacatttctgacatttccgactcggaccgatg

SEQ ID NO: 17073 - DNA, 203 bp, synthetic construct
  source 1..203: mol_type = other DNA
ggcgcgccagtccttagaccgcattctgacatttctgacatttctgacatttcttggcaaactgacatttctgacatttctgacatttcttggcaaactgacatttcttggcaaactgacatttcttggcaaactgacatttcttggcaaactgacatttcttggcaaactgacatttctgacatttccgactcggaccgatg

SEQ ID NO: 17074 - DNA, 203 bp, synthetic construct
  source 1..203: mol_type = other DNA
ggcgcgccagtcctggcctaccgctctgacatttctgacatttctgacatttcttggcaaactgacatttcttggcaaactgacatttctgacatttctgacatttctgacatttctgacatttctgacatttctgacatttctgacatttctgacatttctgacatttctgacatttctgacatttccgactcggaccgatg

SEQ ID NO: 17075 - DNA, 203 bp, synthetic construct
  source 1..203: mol_type = other DNA
ggcgcgccagtcctaccgcaagattctgacatttctgacatttctgacatttcttggcaaactgacatttcttggcaaactgacatttctgacatttctgacatttctgacatttctgacatttcttggcaaactgacatttctgacatttctgacatttctgacatttctgacatttctgacatttccgactcggaccgatg

SEQ ID NO: 17076 - DNA, 203 bp, synthetic construct
  source 1..203: mol_type = other DNA
ggcgcgccagtccttgagaccgcgtctgacatttctgacatttctgacatttcttggcaaactgacatttcttggcaaactgacatttctgacatttctgacatttctgacatttctgacatttcttggcaaactgacatttcttggcaaactgacatttctgacatttctgacatttctgacatttccgactcggaccgatg

SEQ ID NO: 17077 - DNA, 203 bp, synthetic construct
  source 1..203: mol_type = other DNA
ggcgcgccagtccttaccgcactgtctgacatttctgacatttctgacatttcttggcaaactgacatttcttggcaaactgacatttctgacatttctgacatttcttggcaaactgacatttctgacatttctgacatttctgacatttctgacatttctgacatttctgacatttctgacatttccgactcggaccgatg

SEQ ID NO: 17078 - DNA, 203 bp, synthetic construct
  source 1..203: mol_type = other DNA
ggcgcgccagtcctatcaccgctgtctgacatttctgacatttctgacatttcttggcaaactgacatttcttggcaaactgacatttctgacatttctgacatttcttggcaaactgacatttcttggcaaactgacatttctgacatttctgacatttctgacatttctgacatttctgacatttccgactcggaccgatg

SEQ ID NO: 17079 - DNA, 203 bp, synthetic construct
  source 1..203: mol_type = other DNA
ggcgcgccagtcctagtcaccgcgtctgacatttctgacatttctgacatttcttggcaaactgacatttcttggcaaactgacatttctgacatttctgacatttcttggcaaactgacatttcttggcaaactgacatttctgacatttctgacatttcttggcaaactgacatttctgacatttccgactcggaccgatg

SEQ ID NO: 17080 - DNA, 203 bp, synthetic construct
  source 1..203: mol_type = other DNA
ggcgcgccagtcctcgaccgcttttctgacatttctgacatttctgacatttcttggcaaactgacatttcttggcaaactgacatttctgacatttctgacatttcttggcaaactgacatttcttggcaaactgacatttcttggcaaactgacatttcttggcaaactgacatttctgacatttccgactcggaccgatg

SEQ ID NO: 17081 - DNA, 203 bp, synthetic construct
  source 1..203: mol_type = other DNA
ggcgcgccagtcctgtaccgcacatctgacatttctgacatttctgacatttcttggcaaactgacatttcttggcaaactgacatttcttggcaaactgacatttctgacatttctgacatttcttggcaaactgacatttctgacatttctgacatttcttggcaaactgacatttctgacatttccgactcggaccgatg

SEQ ID NO: 17082 - DNA, 203 bp, synthetic construct
  source 1..203: mol_type = other DNA
ggcgcgccagtcctcgaataccgctctgacatttctgacatttctgacatttcttggcaaactgacatttcttggcaaactgacatttcttggcaaactgacatttctgacatttctgacatttcttggcaaactgacatttcttggcaaactgacatttctgacatttctgacatttctgacatttccgactcggaccgatg

SEQ ID NO: 17083 - DNA, 203 bp, synthetic construct
  source 1..203: mol_type = other DNA
ggcgcgccagtcctcgcaccttactctgacatttctgacatttctgacatttcttggcaaactgacatttcttggcaaactgacatttcttggcaaactgacatttcttggcaaactgacatttctgacatttctgacatttctgacatttctgacatttcttggcaaactgacatttctgacatttccgactcggaccgatg

SEQ ID NO: 17084 - DNA, 203 bp, synthetic construct
  source 1..203: mol_type = other DNA
ggcgcgccagtcctccagaatgactctgacatttctgacatttctgacatttcttggcaaactgacatttcttggcaaactgacatttcttggcaaactgacatttcttggcaaactgacatttcttggcaaactgacatttcttggcaaactgacatttcttggcaaactgacatttctgacatttccgactcggaccgatg

SEQ ID NO: 17085 - DNA, 203 bp, synthetic construct
  source 1..203: mol_type = other DNA
ggcgcgccagtccttaaagtctactctgacatttctgacatttctgacattttcttggcaaatgacatttctgacatttctgacatttctgacatttctgacatttctgacatttctgacatttctgacatttctgacatttctgacatttctgacatttctgacatttctgacatttctgacatttccgactcggaccgatg

SEQ ID NO: 17086 - DNA, 203 bp, synthetic construct
  source 1..203: mol_type = other DNA
ggcgcgccagtcctgtcaaagtcttctgacatttctgacatttctgacattttcttggcaaatgacatttctgacatttctgacatttctgacatttctgacatttctgacatttctgacatttctgacatttctgacatttctgacatttctgacatttctgacatttctgacatttctgtactccccgactcggaccgatg

SEQ ID NO: 17087 - DNA, 203 bp, synthetic construct
  source 1..203: mol_type = other DNA
ggcgcgccagtcctttaagacttctctgacatttctgacatttctgaccacggaatcgagaatgacatttctgacatttctgacatttctgacatttctgacatttctgacatttctgacatttctgacatttctgacatttctgacatttctgacatttctgacatttctgaccgtcaattcctttacgactcggaccgatg

SEQ ID NO: 17088 - DNA, 203 bp, synthetic construct
  source 1..203: mol_type = other DNA
ggcgcgccagtccttgtaagtctctctgacatttctgacatttctgaccggccgtacatttctgacatttctgacatttctgacatttctgacatttctgacatttctgacatttctgacatttctgacatttctgacatttctgacatttctgacatttctgacatttctgaccacggaatcgagaacgactcggaccgatg

SEQ ID NO: 17089 - DNA, 203 bp, synthetic construct
  source 1..203: mol_type = other DNA
ggcgcgccagtcctaagtctttggtctgacatttctgacatttctgaccggccgtacatttctgacatttctgacatttctgacatttctgacatttctgacatttctgacatttctgacatttctgacatttctgacatttctgacatttctgacatttctgacatttctgaccgtcaattcctttacgactcggaccgatg

SEQ ID NO: 17090 - DNA, 203 bp, synthetic construct
  source 1..203: mol_type = other DNA
ggcgcgccagtcctgtagcgtacttctgacatttctgacatttctgactactcccacatttctgacatttctgacatttctgacatttctgacatttctgacatttctgacatttctgacatttctgacatttctgacatttctgacatttctgacatttctgacatttctgacatttctgacatttccgactcggaccgatg

SEQ ID NO: 17091 - DNA, 203 bp, synthetic construct
  source 1..203: mol_type = other DNA
ggcgcgccagtcctgttagcaatttctgacatttctgacatttctgaggagaggagcgagcgaccaaaggaaccataactgatttaatgagccattcgcagtttcactgtaccggccgtgcgtactcagacatgcatggcttaatctttgagacaagcatatgctactggcaggatcaaccacatttccgactcggaccgatg

SEQ ID NO: 17092 - DNA, 203 bp, synthetic construct
  source 1..203: mol_type = other DNA
ggcgcgccagtccttattgaacagtctgacatttctgacatttctgattcttggcaaatttctgacatttctgacatttctgacatttctgacatttctgacatttctgacatttctgacatttctgacatttctgacatttctgacatttctgacatttctgacatttctgacattttcttggcaaacgactcggaccgatg

SEQ ID NO: 17093 - DNA, 203 bp, synthetic construct
  source 1..203: mol_type = other DNA
ggcgcgccagtcctatgcaatgcatctgacatttctgacatttctgcacggaatcgagaatctgacatttctgacatttctgacatttctgacatttctgacatttctgacatttctgacatttctgacatttctgacatttctgacatttctgacatttctgacatttctgacatttcaccggccgtcgactcggaccgatg

SEQ ID NO: 17094 - DNA, 203 bp, synthetic construct
  source 1..203: mol_type = other DNA
ggcgcgccagtcctcaatcatttttctgacatttctgacatttctgccggcgggtacatttctgacatttctgacatttctgacatttctgacatttctgacatttctgacatttctgacatttctgacatttctgacatttctgacatttctgacatttctgacatttctgacatttctgtactccccgactcggaccgatg

SEQ ID NO: 17095 - DNA, 203 bp, synthetic construct
  source 1..203: mol_type = other DNA
ggcgcgccagtcctgcattgaacttctgacatttctgacatttctgccggcgggtacatttctgacatttctgacatttctgacatttctgacatttctgacatttctgacatttctgacatttctgacatttctgacatttctgacatttctgacatttctgacatttctgaccacggaatcgagaacgactcggaccgatg

SEQ ID NO: 17096 - DNA, 203 bp, synthetic construct
  source 1..203: mol_type = other DNA
ggcgcgccagtcctattgaaagaatctgacatttctgacatttctgcgtcaattcctttatctgacatttctgacatttctgacatttctgacatttctgacatttctgacatttctgacatttctgacatttctgacatttctgacatttctgacatttctgacatttctgacatttcaccggccgtcgactcggaccgatg

SEQ ID NO: 17097 - DNA, 203 bp, synthetic construct
  source 1..203: mol_type = other DNA
ggcgcgccagtcctattgcggtggtctgacatttctgacatttctgcgttatcggaattaaccagacaaatcgctccaccaactaagaacggccatgcaccaccacccacggaatcgagaaagagctatcaatctgtcaatcctgtccgtgtccgggccgggtgaggtttcccgtgttgagtcatttccgactcggaccgatg

SEQ ID NO: 17098 - DNA, 203 bp, synthetic construct
  source 1..203: mol_type = other DNA
ggcgcgccagtcctcattgctgcgtctgacatttctgacatttctgtactccctgacatttctgacatttctgacatttctgacatttctgacatttctgacatttctgacatttctgacatttctgacatttctgacatttctgacatttctgacatttctgacatttctgacatttcaccggccgtcgactcggaccgatg

SEQ ID NO: 17099 - DNA, 203 bp, synthetic construct
  source 1..203: mol_type = other DNA
ggcgcgccagtcctgctcattgactctgacatttctgacatttctgtactccctgacatttctgacatttctgacatttctgacatttctgacatttctgacatttctgacatttctgacatttctgacatttctgacatttctgacatttctgacatttctgacatttctgacatttcccggcgggtcgactcggaccgatg

SEQ ID NO: 17100 - DNA, 203 bp, synthetic construct
  source 1..203: mol_type = other DNA
ggcgcgccagtccttgcaatgcactctgacatttctgacatttcttaggagaggagcgagcgaccaaaggaaccataactgatttaatgagccattcgcagtttcactgtaccggccgtgcgtactcagacatgcatggcttaatctttgagacaagcatatgctactggcaggatcaaccagatttccgactcggaccgatg

SEQ ID NO: 17101 - DNA, 203 bp, synthetic construct
  source 1..203: mol_type = other DNA
ggcgcgccagtcctaaaaccattgtctgacatttctgacatttcttcttggcaaaacatttctgacatttctgacatttctgacatttctgacatttctgacatttctgacatttctgacatttctgacatttctgacatttctgacatttctgacatttctgacatttctgaccacggaatcgagaacgactcggaccgatg

SEQ ID NO: 17102 - DNA, 203 bp, synthetic construct
  source 1..203: mol_type = other DNA
ggcgcgccagtcctatcagaattgtctgacatttctgaccacggaatcgagaatgacatttctgacatttctgacatttctgacatttctgacatttctgacatttctgacatttctgacatttctgacatttctgacatttctgacatttctgacatttctgacatttctgacatttcccggcgggtcgactcggaccgatg

SEQ ID NO: 17103 - DNA, 203 bp, synthetic construct
  source 1..203: mol_type = other DNA
ggcgcgccagtccttgcatgcaattctgacatttctgacccggcgggtatttctgacatttctgacatttctgacatttctgacatttctgacatttctgacatttctgacatttctgacatttctgacatttctgacatttctgacatttctgacatttctgacatttctgacatttctgtactccccgactcggaccgatg

SEQ ID NO: 17104 - DNA, 203 bp, synthetic construct
  source 1..203: mol_type = other DNA
ggcgcgccagtcctggtcaattcgtctgacatttctgaccggccgtacatttctgacatttctgacatttctgacatttctgacatttctgacatttctgacatttctgacatttctgacatttctgacatttctgacatttctgacatttctgacatttctgacatttctgacatttcccggcgggtcgactcggaccgatg

SEQ ID NO: 17105 - DNA, 203 bp, synthetic construct
  source 1..203: mol_type = other DNA
ggcgcgccagtcctacaatctaagtctgacatttctgactactcccacatttctgacatttctgacatttctgacatttctgacatttctgacatttctgacatttctgacatttctgacatttctgacatttctgacatttctgacatttctgacatttctgacatttctgacatttcccggcgggtcgactcggaccgatg

SEQ ID NO: 17106 - DNA, 203 bp, synthetic construct
  source 1..203: mol_type = other DNA
ggcgcgccagtcctccacattgattctgacatttctgcacggaatcgagaatctgacatttctgacatttctgacatttctgacatttctgacatttctgacatttctgacatttctgacatttctgacatttctgacatttctgacatttctgacatttctgacatttctgacattttcttggcaaacgactcggaccgatg

SEQ ID NO: 17107 - DNA, 203 bp, synthetic construct
  source 1..203: mol_type = other DNA
ggcgcgccagtcctcttcaaattgtctgacatttctgccggcgggtacatttctgacatttctgacatttctgacatttctgacatttctgacatttctgacatttctgacatttctgacatttctgacatttctgacatttctgacatttctgacatttctgacatttctgacatttcccggcgggtcgactcggaccgatg

SEQ ID NO: 17108 - DNA, 203 bp, synthetic construct
  source 1..203: mol_type = other DNA
ggcgcgccagtcctgtcaattcagtctgacatttctgtactccctgacatttctgacatttctgacatttctgacatttctgacatttctgacatttctgacatttctgacatttctgacatttctgacatttctgacatttctgacatttctgacatttctgacatttctgacattttcttggcaaacgactcggaccgatg

SEQ ID NO: 17109 - DNA, 203 bp, synthetic construct
  source 1..203: mol_type = other DNA
ggcgcgccagtcctgagcaatcattctgacatttcttcttggcaaaacatttctgacatttctgacatttctgacatttctgacatttctgacatttctgacatttctgacatttctgacatttctgacatttctgacatttctgacatttctgacatttctgacatttctgacatttcaccggccgtcgactcggaccgatg

SEQ ID NO: 17110 - DNA, 203 bp, synthetic construct
  source 1..203: mol_type = other DNA
ggcgcgccagtcctggctgcaatatctgacatttcttggcaaactgacatttctgacatttctgacatttctgacatttctgacatttctgacatttctgacatttctgacatttctgacatttctgacatttctgacatttctgacatttctgacatttctgacatttctgacatttctgacatttccgactcggaccgatg

SEQ ID NO: 17111 - DNA, 203 bp, synthetic construct
  source 1..203: mol_type = other DNA
ggcgcgccagtccttcaatggtattctgacatttcttggcaaactgacatttctgacatttctgacatttctgacatttctgacatttctgacatttctgacatttctgacatttctgacatttcttggcaaactgacatttctgacatttctgacatttctgacatttctgacatttctgacatttccgactcggaccgatg

SEQ ID NO: 17112 - DNA, 203 bp, synthetic construct
  source 1..203: mol_type = other DNA
ggcgcgccagtcctcaatactacctctgacatttcttggcaaactgacatttctgacatttctgacatttctgacatttctgacatttctgacatttctgacatttctgacatttctgacatttcttggcaaactgacatttcttggcaaactgacatttctgacatttctgacatttctgacatttccgactcggaccgatg

SEQ ID NO: 17113 - DNA, 203 bp, synthetic construct
  source 1..203: mol_type = other DNA
ggcgcgccagtccttcgctcaatgtctgacatttcttggcaaactgacatttctgacatttctgacatttctgacatttctgacatttctgacatttctgacatttcttggcaaactgacatttcttggcaaactgacatttcttggcaaactgacatttcttggcaaactgacatttctgacatttccgactcggaccgatg

SEQ ID NO: 17114 - DNA, 203 bp, synthetic construct
  source 1..203: mol_type = other DNA
ggcgcgccagtcctttcattgatttctgacatttcttggcaaactgacatttctgacatttctgacatttctgacatttctgacatttcttggcaaactgacatttctgacatttctgacatttctgacatttctgacatttctgacatttctgacatttctgacatttctgacatttctgacatttccgactcggaccgatg

SEQ ID NO: 17115 - DNA, 203 bp, synthetic construct
  source 1..203: mol_type = other DNA
ggcgcgccagtcctactgtattgctctgacatttcttggcaaactgacatttctgacatttctgacatttctgacatttctgacatttcttggcaaactgacatttctgacatttctgacatttctgacatttctgacatttcttggcaaactgacatttctgacatttctgacatttctgacatttccgactcggaccgatg

SEQ ID NO: 17116 - DNA, 203 bp, synthetic construct
  source 1..203: mol_type = other DNA
ggcgcgccagtcctaaattgagtatctgacatttcttggcaaactgacatttctgacatttctgacatttctgacatttctgacatttcttggcaaactgacatttctgacatttctgacatttcttggcaaactgacatttctgacatttctgacatttcttggcaaactgacatttctgacatttccgactcggaccgatg

SEQ ID NO: 17117 - DNA, 203 bp, synthetic construct
  source 1..203: mol_type = other DNA
ggcgcgccagtcctattgcacttgtctgacatttcttggcaaactgacatttctgacatttctgacatttctgacatttctgacatttcttggcaaactgacatttcttggcaaactgacatttctgacatttctgacatttctgacatttctgacatttcttggcaaactgacatttctgacatttccgactcggaccgatg

SEQ ID NO: 17118 - DNA, 203 bp, synthetic construct
  source 1..203: mol_type = other DNA
ggcgcgccagtcctcaatcttgattctgacatttcttggcaaactgacatttctgacatttctgacatttctgacatttctgacatttcttggcaaactgacatttcttggcaaactgacatttcttggcaaactgacatttctgacatttctgacatttcttggcaaactgacatttctgacatttccgactcggaccgatg

SEQ ID NO: 17119 - DNA, 203 bp, synthetic construct
  source 1..203: mol_type = other DNA
ggcgcgccagtcctcgcaatactctctgacatttcttggcaaactgacatttctgacatttctgacatttctgacatttctgacatttcttggcaaactgacatttcttggcaaactgacatttcttggcaaactgacatttcttggcaaactgacatttctgacatttctgacatttctgacatttccgactcggaccgatg

SEQ ID NO: 17120 - DNA, 203 bp, synthetic construct
  source 1..203: mol_type = other DNA
ggcgcgccagtccttcgtgattgctctgacatttcttggcaaactgacatttctgacatttctgacatttcttggcaaactgacatttctgacatttctgacatttctgacatttctgacatttctgacatttctgacatttctgacatttctgacatttcttggcaaactgacatttctgacatttccgactcggaccgatg

SEQ ID NO: 17121 - DNA, 203 bp, synthetic construct
  source 1..203: mol_type = other DNA
ggcgcgccagtcctaaacttcaattctgacatttcttggcaaactgacatttctgacatttctgacatttcttggcaaactgacatttctgacatttctgacatttctgacatttctgacatttctgacatttctgacatttcttggcaaactgacatttcttggcaaactgacatttctgacatttccgactcggaccgatg

SEQ ID NO: 17122 - DNA, 203 bp, synthetic construct
  source 1..203: mol_type = other DNA
ggcgcgccagtcctcaatggatcctctgacatttcttggcaaactgacatttctgacatttctgacatttcttggcaaactgacatttctgacatttctgacatttctgacatttctgacatttcttggcaaactgacatttctgacatttctgacatttctgacatttctgacatttctgacatttccgactcggaccgatg

SEQ ID NO: 17123 - DNA, 203 bp, synthetic construct
  source 1..203: mol_type = other DNA
ggcgcgccagtcctgatcgattgttctgacatttcttggcaaactgacatttctgacatttctgacatttcttggcaaactgacatttctgacatttctgacatttcttggcaaactgacatttctgacatttctgacatttctgacatttctgacatttctgacatttctgacatttctgacatttccgactcggaccgatg

SEQ ID NO: 17124 - DNA, 203 bp, synthetic construct
  source 1..203: mol_type = other DNA
ggcgcgccagtcctcgattgcaagtctgacatttcttggcaaactgacatttctgacatttctgacatttcttggcaaactgacatttctgacatttctgacatttcttggcaaactgacatttctgacatttctgacatttctgacatttctgacatttcttggcaaactgacatttctgacatttccgactcggaccgatg

SEQ ID NO: 17125 - DNA, 203 bp, synthetic construct
  source 1..203: mol_type = other DNA
ggcgcgccagtcctacattgaggttctgacatttcttggcaaactgacatttctgacatttctgacatttcttggcaaactgacatttctgacatttctgacatttcttggcaaactgacatttctgacatttctgacatttcttggcaaactgacatttctgacatttctgacatttctgacatttccgactcggaccgatg

SEQ ID NO: 17126 - DNA, 203 bp, synthetic construct
  source 1..203: mol_type = other DNA
ggcgcgccagtcctttacattgcttctgacatttcttggcaaactgacatttctgacatttctgacatttcttggcaaactgacatttctgacatttctgacatttcttggcaaactgacatttctgacatttctgacatttcttggcaaactgacatttcttggcaaactgacatttctgacatttccgactcggaccgatg

SEQ ID NO: 17127 - DNA, 203 bp, synthetic construct
  source 1..203: mol_type = other DNA
ggcgcgccagtcctaattgagatatctgacatttcttggcaaactgacatttctgacatttctgacatttcttggcaaactgacatttcttggcaaactgacatttctgacatttctgacatttctgacatttctgacatttctgacatttctgacatttctgacatttctgacatttctgacatttccgactcggaccgatg

SEQ ID NO: 17128 - DNA, 203 bp, synthetic construct
  source 1..203: mol_type = other DNA
ggcgcgccagtcctcttgcaatcatctgacatttcttggcaaactgacatttctgacatttctgacatttcttggcaaactgacatttcttggcaaactgacatttctgacatttctgacatttctgacatttctgacatttctgacatttctgacatttcttggcaaactgacatttctgacatttccgactcggaccgatg

SEQ ID NO: 17129 - DNA, 203 bp, synthetic construct
  source 1..203: mol_type = other DNA
ggcgcgccagtcctattgacggtatctgacatttcttggcaaactgacatttctgacatttctgacatttcttggcaaactgacatttcttggcaaactgacatttcttggcaaactgacatttctgacatttctgacatttctgacatttctgacatttctgacatttctgacatttctgacatttccgactcggaccgatg

SEQ ID NO: 17130 - DNA, 203 bp, synthetic construct
  source 1..203: mol_type = other DNA
ggcgcgccagtcctgtcaatcgactctgacatttcttggcaaactgacatttctgacatttctgacatttcttggcaaactgacatttcttggcaaactgacatttcttggcaaactgacatttcttggcaaactgacatttctgacatttctgacatttcttggcaaactgacatttctgacatttccgactcggaccgatg

SEQ ID NO: 17131 - DNA, 203 bp, synthetic construct
  source 1..203: mol_type = other DNA
ggcgcgccagtcctggtattgccatctgacatttcttggcaaactgacatttctgacatttctgacatttcttggcaaactgacatttcttggcaaactgacatttcttggcaaactgacatttcttggcaaactgacatttcttggcaaactgacatttctgacatttctgacatttctgacatttccgactcggaccgatg

SEQ ID NO: 17132 - DNA, 203 bp, synthetic construct
  source 1..203: mol_type = other DNA
ggcgcgccagtcctttacacattgtctgacatttcttggcaaactgacatttctgacatttctgacatttcttggcaaactgacatttcttggcaaactgacatttcttggcaaactgacatttcttggcaaactgacatttcttggcaaactgacatttcttggcaaactgacatttctgacatttccgactcggaccgatg

SEQ ID NO: 17133 - DNA, 203 bp, synthetic construct
  source 1..203: mol_type = other DNA
ggcgcgccagtcctcaatacacgatctgacatttcttggcaaactgacatttcttggcaaactgacatttctgacatttctgacatttctgacatttctgacatttctgacatttctgacatttctgacatttctgacatttcttggcaaactgacatttctgacatttctgacatttctgacatttccgactcggaccgatg

SEQ ID NO: 17134 - DNA, 203 bp, synthetic construct
  source 1..203: mol_type = other DNA
ggcgcgccagtcctgggtcaattctctgacatttcttggcaaactgacatttcttggcaaactgacatttctgacatttctgacatttctgacatttctgacatttctgacatttctgacatttcttggcaaactgacatttctgacatttctgacatttctgacatttctgacatttctgacatttccgactcggaccgatg

SEQ ID NO: 17135 - DNA, 203 bp, synthetic construct
  source 1..203: mol_type = other DNA
ggcgcgccagtcctaacagcaatatctgacatttcttggcaaactgacatttcttggcaaactgacatttctgacatttctgacatttctgacatttctgacatttcttggcaaactgacatttcttggcaaactgacatttctgacatttctgacatttcttggcaaactgacatttctgacatttccgactcggaccgatg

SEQ ID NO: 17136 - DNA, 203 bp, synthetic construct
  source 1..203: mol_type = other DNA
ggcgcgccagtcctgctcaattgctctgacatttcttggcaaactgacatttcttggcaaactgacatttctgacatttctgacatttctgacatttctgacatttcttggcaaactgacatttcttggcaaactgacatttcttggcaaactgacatttcttggcaaactgacatttctgacatttccgactcggaccgatg

SEQ ID NO: 17137 - DNA, 203 bp, synthetic construct
  source 1..203: mol_type = other DNA
ggcgcgccagtcctgcaatctctttctgacatttcttggcaaactgacatttcttggcaaactgacatttctgacatttctgacatttcttggcaaactgacatttctgacatttctgacatttctgacatttctgacatttctgacatttctgacatttctgacatttctgacatttctgacatttccgactcggaccgatg

SEQ ID NO: 17138 - DNA, 203 bp, synthetic construct
  source 1..203: mol_type = other DNA
ggcgcgccagtcctattgaccagttctgacatttcttggcaaactgacatttcttggcaaactgacatttctgacatttctgacatttcttggcaaactgacatttctgacatttctgacatttctgacatttctgacatttctgacatttctgacatttcttggcaaactgacatttctgacatttccgactcggaccgatg

SEQ ID NO: 17139 - DNA, 203 bp, synthetic construct
  source 1..203: mol_type = other DNA
ggcgcgccagtcctcaatcgttgctctgacatttcttggcaaactgacatttcttggcaaactgacatttctgacatttctgacatttcttggcaaactgacatttctgacatttctgacatttctgacatttctgacatttcttggcaaactgacatttcttggcaaactgacatttctgacatttccgactcggaccgatg

SEQ ID NO: 17140 - DNA, 203 bp, synthetic construct
  source 1..203: mol_type = other DNA
ggcgcgccagtcctctcattgaactctgacatttcttggcaaactgacatttcttggcaaactgacatttctgacatttctgacatttcttggcaaactgacatttctgacatttctgacatttcttggcaaactgacatttctgacatttctgacatttctgacatttctgacatttctgacatttccgactcggaccgatg

SEQ ID NO: 17141 - DNA, 203 bp, synthetic construct
  source 1..203: mol_type = other DNA
ggcgcgccagtcctacaagattgatctgacatttcttggcaaactgacatttcttggcaaactgacatttctgacatttctgacatttcttggcaaactgacatttcttggcaaactgacatttcttggcaaactgacatttctgacatttctgacatttctgacatttctgacatttctgacatttccgactcggaccgatg

SEQ ID NO: 17142 - DNA, 203 bp, synthetic construct
  source 1..203: mol_type = other DNA
ggcgcgccagtcctaacaatctgatctgacatttcttggcaaactgacatttcttggcaaactgacatttctgacatttctgacatttcttggcaaactgacatttcttggcaaactgacatttcttggcaaactgacatttcttggcaaactgacatttctgacatttctgacatttctgacatttccgactcggaccgatg

SEQ ID NO: 17143 - DNA, 203 bp, synthetic construct
  source 1..203: mol_type = other DNA
ggcgcgccagtccttatgtcattgtctgacatttcttggcaaactgacatttcttggcaaactgacatttctgacatttctgacatttcttggcaaactgacatttcttggcaaactgacatttcttggcaaactgacatttcttggcaaactgacatttcttggcaaactgacatttctgacatttccgactcggaccgatg

SEQ ID NO: 17144 - DNA, 203 bp, synthetic construct
  source 1..203: mol_type = other DNA
ggcgcgccagtcctttcgtaaccctctgacatttcttggcaaactgacatttcttggcaaactgacatttcttggcaaactgacatttctgacatttctgacatttcttggcaaactgacatttctgacatttctgacatttctgacatttctgacatttcttggcaaactgacatttctgacatttccgactcggaccgatg

SEQ ID NO: 17145 - DNA, 203 bp, synthetic construct
  source 1..203: mol_type = other DNA
ggcgcgccagtcctgggtcgtaaatctgacatttcttggcaaactgacatttcttggcaaactgacatttcttggcaaactgacatttctgacatttctgacatttcttggcaaactgacatttcttggcaaactgacatttctgacatttctgacatttctgacatttctgacatttctgacatttccgactcggaccgatg

SEQ ID NO: 17146 - DNA, 203 bp, synthetic construct
  source 1..203: mol_type = other DNA
ggcgcgccagtccttcttacgaagtctgacatttcttggcaaactgacatttcttggcaaactgacatttcttggcaaactgacatttctgacatttctgacatttcttggcaaactgacatttcttggcaaactgacatttctgacatttctgacatttcttggcaaactgacatttctgacatttccgactcggaccgatg

SEQ ID NO: 17147 - DNA, 203 bp, synthetic construct
  source 1..203: mol_type = other DNA
ggcgcgccagtcctgttacgagcatctgacatttcttggcaaactgacatttcttggcaaactgacatttcttggcaaactgacatttctgacatttctgacatttcttggcaaactgacatttcttggcaaactgacatttcttggcaaactgacatttctgacatttctgacatttctgacatttccgactcggaccgatg

SEQ ID NO: 17148 - DNA, 203 bp, synthetic construct
  source 1..203: mol_type = other DNA
ggcgcgccagtcctcactttacgatctgacatttcttggcaaactgacatttcttggcaaactgacatttcttggcaaactgacatttcttggcaaactgacatttctgacatttctgacatttcttggcaaactgacatttcttggcaaactgacatttctgacatttctgacatttctgacatttccgactcggaccgatg

SEQ ID NO: 17149 - DNA, 203 bp, synthetic construct
  source 1..203: mol_type = other DNA
ggcgcgccagtcctcccatgcagatctgacatttcttggcaaactgacatttcttggcaaactgacatttcttggcaaactgacatttcttggcaaactgacatttcttggcaaactgacatttctgacatttctgacatttctgacatttctgacatttctgacatttctgacatttctgacatttccgactcggaccgatg

SEQ ID NO: 17150 - DNA, 203 bp, synthetic construct
  source 1..203: mol_type = other DNA
ggcgcgccagtcctaagatcaaggtctgacatttcttggcaaactgacatttcttggcaaactgacatttcttggcaaactgacatttcttggcaaactgacatttcttggcaaactgacatttctgacatttctgacatttctgacatttctgacatttcttggcaaactgacatttctgacatttccgactcggaccgatg

SEQ ID NO: 17151 - DNA, 203 bp, synthetic construct
  source 1..203: mol_type = other DNA
ggcgcgccagtcctaaatcgacgttctgacatttcttggcaaactgacatttcttggcaaactgacatttcttggcaaactgacatttcttggcaaactgacatttcttggcaaactgacatttctgacatttctgacatttcttggcaaactgacatttctgacatttctgacatttctgacatttccgactcggaccgatg

SEQ ID NO: 17152 - DNA, 203 bp, synthetic construct
  source 1..203: mol_type = other DNA
ggcgcgccagtcctacgtcgactctctgacatttcttggcaaactgacatttcttggcaaactgacatttcttggcaaactgacatttcttggcaaactgacatttcttggcaaactgacatttcttggcaaactgacatttcttggcaaactgacatttctgacatttctgacatttctgacatttccgactcggaccgatg

SEQ ID NO: 17153 - DNA, 203 bp, synthetic construct
  source 1..203: mol_type = other DNA
ggcgcgccagtccttcgtcgattttctgacatttcttggcaaactgacatttcttggcaaactgacatttcttggcaaactgacatttcttggcaaactgacatttcttggcaaactgacatttcttggcaaactgacatttcttggcaaactgacatttcttggcaaactgacatttcttggcaaaccgactcggaccgatg

SEQ ID NO: 17154 - DNA, 203 bp, synthetic construct
  source 1..203: mol_type = other DNA
ggcgcgccagtcctactaccgccttctgacattttactcccttctgacatttctgacatttctgacatttctgacatttctgacatttctgacatttctgacatttctgacatttctgacatttctgacatttctgacatttctgacatttctgacatttctgacatttctgacatttctgacatttccgactcggaccgatg

SEQ ID NO: 17155 - DNA, 203 bp, synthetic construct
  source 1..203: mol_type = other DNA
ggcgcgccagtcctttgctttgattctgaccgtcaattcctttatgacatttctgacatttctgacatttctgacatttctgacatttctgacatttctgacatttctgacatttctgacatttctgacatttctgacatttctgacatttctgacatttctgacatttctgacattttcttggcaaacgactcggaccgatg

SEQ ID NO: 17156 - DNA, 203 bp, synthetic construct
  source 1..203: mol_type = other DNA
ggcgcgccagtccttcatgtcgagtctgttcttggcaaaatttctgacatttctgacatttctgacatttctgacatttctgacatttctgacatttctgacatttctgacatttctgacatttctgacatttctgacatttctgacatttctgacatttctgacatttctgacatttcccggcgggtcgactcggaccgatg

SEQ ID NO: 17157 - DNA, 203 bp, synthetic construct
  source 1..203: mol_type = other DNA
ggcgcgccagtcctctgtcgaccctcttactcccctgacatttctgacatttctgacatttctgacatttctgacatttctgacatttctgacatttctgacatttctgacatttctgacatttctgacatttctgacatttctgacatttctgacatttctgacatttctgaccacggaatcgagaacgactcggaccgatg

SEQ ID NO: 17158 - DNA, 203 bp, synthetic construct
  source 1..203: mol_type = other DNA
ggcgcgccagtcctagtatgtcgatgtgtaaacacggaatcgagaattcacacggaatcgagaaggaacacggaatcgagaactgccacggaatcgagaagcagcacggaatcgagaaggttcacggaatcgagaaaggccacggaatcgagaatagtcacggaatcgagaatctcttttttggcatccgactcggaccgatg

SEQ ID NO: 17159 - DNA, 203 bp, synthetic construct
  source 1..203: mol_type = other DNA
ggcgcgccagtccttactcagccctgtgtaaagatgcagtgtaaggttcaagtgccaaatccctggaacacggaatcgagaactgccacggaatcgagaagcagcacggaatcgagaaggttcacggaatcgagaaaggccacggaatcgagaatagtcacggaatcgagaatctcttttttggcatccgactcggaccgatg

SEQ ID NO: 17160 - DNA, 203 bp, synthetic construct
  source 1..203: mol_type = other DNA
ggcgcgccagtcctacagcagccctgtgtaaagatgcagtgtaaggttcaagtgccaaatccctggaaccggcgggtctctactgcccggcgggtgctgtgcagccggcgggtacttcggttccggcgggtagcacaggcccggcgggtacgggtagtccggcgggtcatcctctcccggcgggtatccgactcggaccgatg

SEQ ID NO: 17161 - DNA, 203 bp, synthetic construct
  source 1..203: mol_type = other DNA
ggcgcgccagtcctgtcgcagccctgtgtaaagatgcagtgtaaggttcaagtgccaaatccctggaaggagtgaccctctactgcaccggccgtgctgtgcagaccggccgtacttcggttaccggccgtagcacaggcaccggccgtacgggtagtaccggccgtcatcctctcaccggccgtatccgactcggaccgatg

SEQ ID NO: 17162 - DNA, 203 bp, synthetic construct
  source 1..203: mol_type = other DNA
ggcgcgccagtcctgacaaggccctgtgtaaagatgcagtgtaaggttcaagtgccaaatccctggaaggagtgaccctctactgccacggaatcgagaagcagcacggaatcgagaaggttcacggaatcgagaaaggccacggaatcgagaatagtcacggaatcgagaatctcttttttggcatccgactcggaccgatg

SEQ ID NO: 17163 - DNA, 203 bp, synthetic construct
  source 1..203: mol_type = other DNA
ggcgcgccagtcctggttacgccctgtgtaaagatgcagtgtaaggttcaagtgccaaatccctggaaggagtgaccctctactgccctaggaatgctgtgcagaccggccgtacttcggttaccggccgtagcacaggcaccggccgtacgggtagtaccggccgtcatcctctcaccggccgtatccgactcggaccgatg

SEQ ID NO: 17164 - DNA, 203 bp, synthetic construct
  source 1..203: mol_type = other DNA
ggcgcgccagtcctgggcctggtctgtgtaaagatgcagtgtaaggttcaagtgccaaatccctggaaggagtgaccctctactgccctaggaatgctgtgcaggtacccccaacttcggttcacggaatcgagaaaggccacggaatcgagaatagtcacggaatcgagaatctcttttttggcatccgactcggaccgatg

SEQ ID NO: 17165 - DNA, 203 bp, synthetic construct
  source 1..203: mol_type = other DNA
ggcgcgccagtcctgggctcagcatgtgtaaagatgcagtgtaaggttcaagtgccaaatccctggaaggagtgaccctctactgccctaggaatgctgtgcaggtacccccaacttcggttccggcgggtagcacaggcccggcgggtacgggtagtccggcgggtcatcctctcccggcgggtatccgactcggaccgatg

SEQ ID NO: 17166 - DNA, 203 bp, synthetic construct
  source 1..203: mol_type = other DNA
ggcgcgccagtcctgggctacgtctgtgtaaagatgcagtgtaaggttcaagtgccaaatccctggaaggagtgaccctctactgccctaggaatgctgtgcaggtacccccaacttcggttggggatctgagcacaggccacggaatcgagaatagtcacggaatcgagaatctcttttttggcatccgactcggaccgatg

SEQ ID NO: 17167 - DNA, 203 bp, synthetic construct
  source 1..203: mol_type = other DNA
ggcgcgccagtcctgggctaggcttgtgtaaagatgcagtgtaaggttcaagtgccaaatccctggaaggagtgaccctctactgccctaggaatgctgtgcaggtacccccaacttcggttggggatctgagcacaggccgtcaattcctttatagtcgtcaattcctttatctcttttttggcatccgactcggaccgatg

SEQ ID NO: 17168 - DNA, 203 bp, synthetic construct
  source 1..203: mol_type = other DNA
ggcgcgccagtcctccacgttaagtgtgtaaagatgcagtgtaaggttcaagtgccaaatccctggaaggagtgaccctctactgccctaggaatgctgtgcaggtacccccaacttcggttggggatctgagcacaggctaattgtctacgggtagtcacggaatcgagaatctcttttttggcatccgactcggaccgatg

SEQ ID NO: 17169 - DNA, 203 bp, synthetic construct
  source 1..203: mol_type = other DNA
ggcgcgccagtcctaccacgttgttgtgtaaagatgcagtgtaaggttcaagtgccaaatccctggaaggagtgaccctctactgccctaggaatgctgtgcaggtacccccaacttcggttggggatctgagcacaggctaattgtctacgggtagtccggcgggtcatcctctcccggcgggtatccgactcggaccgatg

SEQ ID NO: 17170 - DNA, 203 bp, synthetic construct
  source 1..203: mol_type = other DNA
ggcgcgccagtccttccagtttcatgtgtaaagatgcagtgtaaggttcaagtgccaaatccctggaaggagtgaccctctactgccctaggaatgctgtgcaggtacccccaacttcggttggggatctgagcacaggctaattgtctacgggtagtcgtcaattcctttatctcttttttggcatccgactcggaccgatg

SEQ ID NO: 17171 - DNA, 203 bp, synthetic construct
  source 1..203: mol_type = other DNA
ggcgcgccagtccttgaaactttgtgtgtaaagatgcagtgtaaggttcaagtgccaaatccctggaaggagtgaccctctactgccctaggaatgctgtgcaggtacccccaacttcggttggggatctgagcacaggctaattgtctacgggtagttactccccccatcctctctactcccgcatccgactcggaccgatg

SEQ ID NO: 17172 - DNA, 203 bp, synthetic construct
  source 1..203: mol_type = other DNA
ggcgcgccagtcctcattgaaacttgtgtaaagatgcagtgtaaggttcaagtgccaaatccctggaaggagtgaccctctactgccctaggaatgctgtgcaggtacccccaacttcggttggggatctgagcacaggctaattgtctacgggtagtttcatttcccatcctctcaccggccgtatccgactcggaccgatg

SEQ ID NO: 17173 - DNA, 203 bp, synthetic construct
  source 1..203: mol_type = other DNA
ggcgcgccagtcctctgaaactcttgtgtaaagatgcagtgtaaggttcaagtgccaaatccctggaaggagtgaccctctactgccctaggaatgctgtgcaggtacccccaacttcggttggggatctgagcacaggctaattgtctacgggtagtttcatttcccatcctctcccggcgggtatccgactcggaccgatg

SEQ ID NO: 17174 - DNA, 203 bp, synthetic construct
  source 1..203: mol_type = other DNA
ggcgcgccagtccttgaaatgacatgtgtaaagatgcagtgtaaggttcaagtgccaaatccctggaaggagtgaccctctactgccctaggaatgctgtgcaggtacccccaacttcggttggggatctgagcacaggctaattgtctacgggtagtttcatttcccatcctctctactcccgcatccgactcggaccgatg

SEQ ID NO: 17175 - DNA, 203 bp, synthetic construct
  source 1..203: mol_type = other DNA
ggcgcgccagtcctagcctgcacgtgtgtaaagatgcagtgtaaggttcaagtgccaaatccctggaaggagtgaccctctactgccctaggaatgctgtgcaggtacccccaacttcggttggggatctgagcacaggctaattgtctacgggtagtttcatttcccatcctctcttcttggcaaaccgactcggaccgatg

SEQ ID NO: 17176 - DNA, 203 bp, synthetic construct
  source 1..203: mol_type = other DNA
ggcgcgccagtcctatccacgaagtgtgtaaagatgcagtgtaaggttcaagtgccaaatccctggaaggagtgaccctctactgccctaggaatgctgtgcaggtacccccaacttcggttggggatctgagcacaggctaattgtctacgggtagtttcatttcccatcctctcttttttggcatccgactcggaccgatg

SEQ ID NO: 17177 - DNA, 203 bp, synthetic construct
  source 1..203: mol_type = other DNA
ggcgcgccagtcctagttcacgaatgtgtaaagatgcagtgtaaggttcaagtgccaaatccctggaaggagtgaccctctactgccctaggaatgctgtgcaggtacccccaacttcggttggggatctgagcacaggctaattgtctacgggtagtttcttggcaaatcctctcttcttggcaaaccgactcggaccgatg

SEQ ID NO: 17178 - DNA, 203 bp, synthetic construct
  source 1..203: mol_type = other DNA
ggcgcgccagtccttagttcgtgatgtgtaaagatgcagtgtaaggttcaagtgccaaatccctggaaggagtgaccctctactgccctaggaatgctgtgcaggtacccccaacttcggttggggatctgagcacaggctactcccctacgggtagttactccccccatcctctctactcccgcatccgactcggaccgatg

SEQ ID NO: 17179 - DNA, 203 bp, synthetic construct
  source 1..203: mol_type = other DNA
ggcgcgccagtccttattcgtggatgtgtaaagatgcagtgtaaggttcaagtgccaaatccctggaaggagtgaccctctactgccctaggaatgctgtgcaggtacccccaacttcggttggggatctgagcacaggcttcttggcaaagggtagtttcttggcaaatcctctcttcttggcaaaccgactcggaccgatg

SEQ ID NO: 17180 - DNA, 203 bp, synthetic construct
  source 1..203: mol_type = other DNA
ggcgcgccagtccttccacgaagatgtgtaaagatgcagtgtaaggttcaagtgccaaatccctggaaggagtgaccctctactgccctaggaatgctgtgcaggtacccccaacttcggtttactccctgagcacaggctactcccctacgggtagttactccccccatcctctctactcccgcatccgactcggaccgatg

SEQ ID NO: 17181 - DNA, 203 bp, synthetic construct
  source 1..203: mol_type = other DNA
ggcgcgccagtcctcattcgtgcttgtgtaaagatgcagtgtaaggttcaagtgccaaatccctggaaggagtgaccctctactgccgtcaattcctttagcagcgtcaattcctttaggttcgtcaattcctttaaggccgtcaattcctttatagtcgtcaattcctttatctcttttttggcatccgactcggaccgatg

SEQ ID NO: 17182 - DNA, 203 bp, synthetic construct
  source 1..203: mol_type = other DNA
ggcgcgccagtccttggcactaactgtgtaaagatgcagtgtaaggttcacacggaatcgagaaggaacacggaatcgagaactgccacggaatcgagaagcagcacggaatcgagaaggttcacggaatcgagaaaggccacggaatcgagaatagtcacggaatcgagaatctcttttttggcatccgactcggaccgatg

SEQ ID NO: 17183 - DNA, 203 bp, synthetic construct
  source 1..203: mol_type = other DNA
ggcgcgccagtcctacgcaccagatgtgtaaagatgcagtgtaaggttcatactcccaatccctggaatactcccccctctactgctactcccatgctgtgcagtactccccaacttcggtttactccctgagcacaggctactcccctacgggtagttactccccccatcctctctactcccgcatccgactcggaccgatg

SEQ ID NO: 17184 - DNA, 203 bp, synthetic construct
  source 1..203: mol_type = other DNA
ggcgcgccagtcctacgcactgcgtgtgtaaagatgcagtgtaaggttcattcttggcaaacctggaattcttggcaaactactgcttcttggcaaatgtgcagttcttggcaaattcggttttcttggcaaacacaggcttcttggcaaagggtagtttcttggcaaatcctctcttcttggcaaaccgactcggaccgatg

SEQ ID NO: 17185 - DNA, 203 bp, synthetic construct
  source 1..203: mol_type = other DNA
ggcgcgccagtcctaacgcactagtgtgtaaatactccctgtaaggttcatactcccaatccctggaatactcccccctctactgctactcccatgctgtgcagtactccccaacttcggtttactccctgagcacaggctactcccctacgggtagttactccccccatcctctctactcccgcatccgactcggaccgatg

SEQ ID NO: 17186 - DNA, 203 bp, synthetic construct
  source 1..203: mol_type = other DNA
ggcgcgccagtcctcttgttacacttacttcaaccggccgtcaggtcaaaaccggccgtggcgcacctaccggccgtctgacacataccggccgtgcaccagcaaccggccgtacgctgacaaccggccgtagcgacttgaccggccgtaatttggctaccggccgtgagagccccaccggccgtagacgactcggaccgatg

SEQ ID NO: 17187 - DNA, 203 bp, synthetic construct
  source 1..203: mol_type = other DNA
ggcgcgccagtcctttcatacgctttacttcacactcagtccaggtcaaacgtcaattcctttaacctcgtcaattcctttaacatcgtcaattcctttaagcacgtcaattcctttagacacgtcaattcctttacttgcgtcaattcctttaggctcgtcaattcctttaccccgacaactgaagacgactcggaccgatg

SEQ ID NO: 17188 - DNA, 203 bp, synthetic construct
  source 1..203: mol_type = other DNA
ggcgcgccagtccttacgtcaggtttacttcacactcagtccaggtcaaaggtaaatcaggcgcacctcgtcaattcctttaacatcgtcaattcctttaagcacgtcaattcctttagacacgtcaattcctttacttgcgtcaattcctttaggctcgtcaattcctttaccccgacaactgaagacgactcggaccgatg

SEQ ID NO: 17189 - DNA, 203 bp, synthetic construct
  source 1..203: mol_type = other DNA
ggcgcgccagtcctacagtacgggttacttcacactcagtccaggtcaaaggtaaatcaggcgcaccttactcccacctgacacattactccccagcaccagcatactcccgaacgctgacatactcccgaagcgacttgtactcccccaatttggcttactcccctgagagcccctactcccgaagacgactcggaccgatg

SEQ ID NO: 17190 - DNA, 203 bp, synthetic construct
  source 1..203: mol_type = other DNA
ggcgcgccagtccttgttaacgggttacttcacactcagtccaggtcaaaggtaaatcaggcgcaccttggcaccacctgacacatccggcgggtgcaccagcaccggcgggtacgctgacaccggcgggtagcgacttgccggcgggtaatttggctccggcgggtgagagccccccggcgggtagacgactcggaccgatg

SEQ ID NO: 17191 - DNA, 203 bp, synthetic construct
  source 1..203: mol_type = other DNA
ggcgcgccagtcctagtcgacgggttacttcacactcagtccaggtcaaaggtaaatcaggcgcaccttggcaccacctgacacattgtacaccagcaccagcacacggaatcgagaagacacacggaatcgagaacttgcacggaatcgagaaggctcacggaatcgagaaccccgacaactgaagacgactcggaccgatg

SEQ ID NO: 17192 - DNA, 203 bp, synthetic construct
  source 1..203: mol_type = other DNA
ggcgcgccagtcctcccgtagctgttacttcacactcagtccaggtcaaaggtaaatcaggcgcaccttggcaccacctgacacattgtacaccagcaccagcaccggcgggtacgctgacaccggcgggtagcgacttgccggcgggtaatttggctccggcgggtgagagccccccggcgggtagacgactcggaccgatg

SEQ ID NO: 17193 - DNA, 203 bp, synthetic construct
  source 1..203: mol_type = other DNA
ggcgcgccagtcctcgtgcacgggttacttcacactcagtccaggtcaaaggtaaatcaggcgcaccttggcaccacctgacacattgtacaccagcaccagcacctgacagaacgctgacaaccggccgtagcgacttgaccggccgtaatttggctaccggccgtgagagccccaccggccgtagacgactcggaccgatg

SEQ ID NO: 17194 - DNA, 203 bp, synthetic construct
  source 1..203: mol_type = other DNA
ggcgcgccagtcctgcctttagaattacttcacactcagtccaggtcaaaggtaaatcaggcgcaccttggcaccacctgacacattgtacaccagcaccagcacctgacagaacgctgacagaagtcagaagcgacttgatcgcctccaatttggctaccggccgtgagagccccaccggccgtagacgactcggaccgatg

SEQ ID NO: 17195 - DNA, 203 bp, synthetic construct
  source 1..203: mol_type = other DNA
ggcgcgccagtcctcttctaactcttacttcacactcagtccaggtcaaaggtaaatcaggcgcaccttggcaccacctgacacattgtacaccagcaccagcacctgacagaacgctgacagaagtcagaagcgacttgatcgcctccaatttggctccggcgggtgagagccccccggcgggtagacgactcggaccgatg

SEQ ID NO: 17196 - DNA, 203 bp, synthetic construct
  source 1..203: mol_type = other DNA
ggcgcgccagtcctatacttctaattacttcacactcagtccaggtcaaaggtaaatcaggcgcaccttggcaccacctgacacattgtacaccagcaccagcacctgacagaacgctgacagaagtcagaagcgacttgatcgcctccaatttggcttactcccctgagagcccctactcccgaagacgactcggaccgatg

SEQ ID NO: 17197 - DNA, 203 bp, synthetic construct
  source 1..203: mol_type = other DNA
ggcgcgccagtcctttagaaggccttacttcacactcagtccaggtcaaaggtaaatcaggcgcaccttggcaccacctgacacattgtacaccagcaccagcacctgacagaacgctgacagaagtcagaagcgacttgatcgcctccaatttggctttcttggcaaagagccccttcttggcaaaacgactcggaccgatg

SEQ ID NO: 17198 - DNA, 203 bp, synthetic construct
  source 1..203: mol_type = other DNA
ggcgcgccagtcctctggtgtgtattacttcacactcagtccaggtcaaaggtaaatcaggcgcaccttggcaccacctgacacattgtacaccagcaccagcacctgacagaacgctgacattcttggcaaacgacttgttcttggcaaatttggctttcttggcaaagagccccttcttggcaaaacgactcggaccgatg

SEQ ID NO: 17199 - DNA, 203 bp, synthetic construct
  source 1..203: mol_type = other DNA
ggcgcgccagtcctagtgtgtacgttacttcacactcagtccaggtcaaaggtaaatcaggcgcaccttggcaccacctgacacattgtacaccagcaccagcacgtcaattcctttagacacgtcaattcctttacttgcgtcaattcctttaggctcgtcaattcctttaccccgacaactgaagacgactcggaccgatg

SEQ ID NO: 17200 - DNA, 203 bp, synthetic construct
  source 1..203: mol_type = other DNA
ggcgcgccagtcctccacgacgtgttacttcacactcagtccaggtcaaatactccccaggcgcaccttactcccacctgacacattactccccagcaccagcatactcccgaacgctgacatactcccgaagcgacttgtactcccccaatttggcttactcccctgagagcccctactcccgaagacgactcggaccgatg

SEQ ID NO: 17201 - DNA, 203 bp, synthetic construct
  source 1..203: mol_type = other DNA
ggcgcgccagtcctaaacaaggccttacttcacgtcaattcctttacaaacgtcaattcctttaacctcgtcaattcctttaacatcgtcaattcctttaagcacgtcaattcctttagacacgtcaattcctttacttgcgtcaattcctttaggctcgtcaattcctttaccccgacaactgaagacgactcggaccgatg

SEQ ID NO: 17202 - DNA, 20 bp, synthetic construct
  source 1..20: mol_type = other DNA
cgggtggagcccattgacgt

SEQ ID NO: 17203 - DNA, 20 bp, synthetic construct
  source 1..20: mol_type = other DNA
cttcactctcctgtaaaacg

SEQ ID NO: 17204 - DNA, 20 bp, synthetic construct
  source 1..20: mol_type = other DNA
gacaccaccatgaccggctc

SEQ ID NO: 17205 - DNA, 20 bp, synthetic construct
  source 1..20: mol_type = other DNA
gagagcgactttcaaactcg

SEQ ID NO: 17206 - DNA, 20 bp, synthetic construct
  source 1..20: mol_type = other DNA
cccgcgtgtgtgcgcctaat

SEQ ID NO: 17207 - DNA, 20 bp, synthetic construct
  source 1..20: mol_type = other DNA
ggctgaaggccgactgtgat

SEQ ID NO: 17208 - DNA, 20 bp, synthetic construct
  source 1..20: mol_type = other DNA
attggttggcggacggtgcg

SEQ ID NO: 17209 - DNA, 20 bp, synthetic construct
  source 1..20: mol_type = other DNA
cctccttcgccccggggccc

SEQ ID NO: 17210 - DNA, 20 bp, synthetic construct
  source 1..20: mol_type = other DNA
taagtgtttccggtggattc

SEQ ID NO: 17211 - DNA, 20 bp, synthetic construct
  source 1..20: mol_type = other DNA
aaccttgccgtgctggaatt

SEQ ID NO: 17212 - DNA, 20 bp, synthetic construct
  source 1..20: mol_type = other DNA
ctggcgtcacccctctgctc

SEQ ID NO: 17213 - DNA, 20 bp, synthetic construct
  source 1..20: mol_type = other DNA
cggctgaaggaggccccagg

SEQ ID NO: 17214 - DNA, 20 bp, synthetic construct
  source 1..20: mol_type = other DNA
catgttgagggggggaccgc

SEQ ID NO: 17215 - DNA, 20 bp, synthetic construct
  source 1..20: mol_type = other DNA
cttgaaactgcggctcggga

SEQ ID NO: 17216 - DNA, 20 bp, synthetic construct
  source 1..20: mol_type = other DNA
gcgcgctcgcatccccaaga

SEQ ID NO: 17217 - DNA, 20 bp, synthetic construct
  source 1..20: mol_type = other DNA
cctacggaggtggcagccat

SEQ ID NO: 17218 - DNA, 20 bp, synthetic construct
  source 1..20: mol_type = other DNA
ctggatggagcctttctctg

SEQ ID NO: 17219 - DNA, 20 bp, synthetic construct
  source 1..20: mol_type = other DNA
agattgtgggcggctgtgtc

SEQ ID NO: 17220 - DNA, 20 bp, synthetic construct
  source 1..20: mol_type = other DNA
tctgactccacatccagtcc

SEQ ID NO: 17221 - DNA, 20 bp, synthetic construct
  source 1..20: mol_type = other DNA
gtctcctgcgctcctgctgg

SEQ ID NO: 17222 - DNA, 20 bp, synthetic construct
  source 1..20: mol_type = other DNA
ctcatccgggttcccgggac

SEQ ID NO: 17223 - DNA, 20 bp, synthetic construct
  source 1..20: mol_type = other DNA
cctcacactcggtgcccgga

SEQ ID NO: 17224 - DNA, 20 bp, synthetic construct
  source 1..20: mol_type = other DNA
gcccgctgccctttgcctcc

SEQ ID NO: 17225 - DNA, 20 bp, synthetic construct
  source 1..20: mol_type = other DNA
aggggctgtgggcgcgcagc

SEQ ID NO: 17226 - DNA, 20 bp, synthetic construct
  source 1..20: mol_type = other DNA
acgctcccgggtcacgtgac

SEQ ID NO: 17227 - DNA, 20 bp, synthetic construct
  source 1..20: mol_type = other DNA
catgtacagtcctccccagt

SEQ ID NO: 17228 - DNA, 20 bp, synthetic construct
  source 1..20: mol_type = other DNA
aggcggcggcgcgaggcagt

SEQ ID NO: 17229 - DNA, 20 bp, synthetic construct
  source 1..20: mol_type = other DNA
aagcgatcccctcgccccag

SEQ ID NO: 17230 - DNA, 20 bp, synthetic construct
  source 1..20: mol_type = other DNA
ggacttggaacacctgtaac

SEQ ID NO: 17231 - DNA, 20 bp, synthetic construct
  source 1..20: mol_type = other DNA
cagaaggcgcagccatgaat

SEQ ID NO: 17232 - DNA, 20 bp, synthetic construct
  source 1..20: mol_type = other DNA
cagggcaggggtcctccgcc

SEQ ID NO: 17233 - DNA, 20 bp, synthetic construct
  source 1..20: mol_type = other DNA
cgagtgtggccaagggtgcc

SEQ ID NO: 17234 - DNA, 20 bp, synthetic construct
  source 1..20: mol_type = other DNA
tctggacccatccagctgag

SEQ ID NO: 17235 - DNA, 20 bp, synthetic construct
  source 1..20: mol_type = other DNA
ggcggcgccaccctccgggg

SEQ ID NO: 17236 - DNA, 20 bp, synthetic construct
  source 1..20: mol_type = other DNA
cggaggccaggagctcaacc

SEQ ID NO: 17237 - DNA, 20 bp, synthetic construct
  source 1..20: mol_type = other DNA
cggtcacctgtctccggtgg

SEQ ID NO: 17238 - DNA, 20 bp, synthetic construct
  source 1..20: mol_type = other DNA
gcttcgagcagggcatcgga

SEQ ID NO: 17239 - DNA, 20 bp, synthetic construct
  source 1..20: mol_type = other DNA
aagttgcacggtgaattggc

SEQ ID NO: 17240 - DNA, 20 bp, synthetic construct
  source 1..20: mol_type = other DNA
gtgcaggagtcctggggcat

SEQ ID NO: 17241 - DNA, 20 bp, synthetic construct
  source 1..20: mol_type = other DNA
cagttatcattagtctgcaa

SEQ ID NO: 17242 - DNA, 20 bp, synthetic construct
  source 1..20: mol_type = other DNA
agcgaaaagtattaaacaaa

SEQ ID NO: 17243 - DNA, 20 bp, synthetic construct
  source 1..20: mol_type = other DNA
ctgcctgctcccccgcccca

SEQ ID NO: 17244 - DNA, 20 bp, synthetic construct
  source 1..20: mol_type = other DNA
cagcgctgcgtcggcagtac

SEQ ID NO: 17245 - DNA, 20 bp, synthetic construct
  source 1..20: mol_type = other DNA
ccagctccttgcccagacca

SEQ ID NO: 17246 - DNA, 20 bp, synthetic construct
  source 1..20: mol_type = other DNA
gcatcttcttgcagattcca

SEQ ID NO: 17247 - DNA, 20 bp, synthetic construct
  source 1..20: mol_type = other DNA
gccagcccttttcccgaccc

SEQ ID NO: 17248 - DNA, 20 bp, synthetic construct
  source 1..20: mol_type = other DNA
ccaaccatggtgaacttggg

SEQ ID NO: 17249 - DNA, 20 bp, synthetic construct
  source 1..20: mol_type = other DNA
cccggacggcctcaccatga

SEQ ID NO: 17250 - DNA, 20 bp, synthetic construct
  source 1..20: mol_type = other DNA
aggctagaggctgcgcaagc

SEQ ID NO: 17251 - DNA, 20 bp, synthetic construct
  source 1..20: mol_type = other DNA
ccttgcgcaccaggaagtga

SEQ ID NO: 17252 - DNA, 20 bp, synthetic construct
  source 1..20: mol_type = other DNA
tcaccgtgttagccaagatg

SEQ ID NO: 17253 - DNA, 20 bp, synthetic construct
  source 1..20: mol_type = other DNA
tgtctggccttttgtccttg

SEQ ID NO: 17254 - DNA, 20 bp, synthetic construct
  source 1..20: mol_type = other DNA
cacacaccaccttacccctc

SEQ ID NO: 17255 - DNA, 20 bp, synthetic construct
  source 1..20: mol_type = other DNA
ccgcgttggctgggtggcct

SEQ ID NO: 17256 - DNA, 20 bp, synthetic construct
  source 1..20: mol_type = other DNA
aggtaacttccagggtgcgc

SEQ ID NO: 17257 - DNA, 20 bp, synthetic construct
  source 1..20: mol_type = other DNA
tctaagccgggcgcctcacc

SEQ ID NO: 17258 - DNA, 20 bp, synthetic construct
  source 1..20: mol_type = other DNA
tcggttggcgcgcaacgggt

SEQ ID NO: 17259 - DNA, 20 bp, synthetic construct
  source 1..20: mol_type = other DNA
tggcccgagagggatcccgg

SEQ ID NO: 17260 - DNA, 20 bp, synthetic construct
  source 1..20: mol_type = other DNA
cagccagggcagcgccagca

SEQ ID NO: 17261 - DNA, 20 bp, synthetic construct
  source 1..20: mol_type = other DNA
gctgctgcggttacctggat

SEQ ID NO: 17262 - DNA, 20 bp, synthetic construct
  source 1..20: mol_type = other DNA
ggcaagcggcgggaggggaa

SEQ ID NO: 17263 - DNA, 20 bp, synthetic construct
  source 1..20: mol_type = other DNA
aaggagaactacattcctca

SEQ ID NO: 17264 - DNA, 20 bp, synthetic construct
  source 1..20: mol_type = other DNA
ctggtgccacagcagctgag

SEQ ID NO: 17265 - DNA, 20 bp, synthetic construct
  source 1..20: mol_type = other DNA
ctggcagcggcgaggacccg

SEQ ID NO: 17266 - DNA, 20 bp, synthetic construct
  source 1..20: mol_type = other DNA
accgggtacccgggctatgg

SEQ ID NO: 17267 - DNA, 20 bp, synthetic construct
  source 1..20: mol_type = other DNA
aacagactccggcccactcc

SEQ ID NO: 17268 - DNA, 20 bp, synthetic construct
  source 1..20: mol_type = other DNA
agttcggggaagctgtacgc

SEQ ID NO: 17269 - DNA, 20 bp, synthetic construct
  source 1..20: mol_type = other DNA
cctttgctttcagccggact

SEQ ID NO: 17270 - DNA, 20 bp, synthetic construct
  source 1..20: mol_type = other DNA
caagatggcggcgcccgagg

SEQ ID NO: 17271 - DNA, 20 bp, synthetic construct
  source 1..20: mol_type = other DNA
gaggctctgtacctgcagtg

SEQ ID NO: 17272 - DNA, 20 bp, synthetic construct
  source 1..20: mol_type = other DNA
taaacaaggggcatccaaat

SEQ ID NO: 17273 - DNA, 20 bp, synthetic construct
  source 1..20: mol_type = other DNA
catcagtcttaccgaagcca

SEQ ID NO: 17274 - DNA, 20 bp, synthetic construct
  source 1..20: mol_type = other DNA
ggaagatggaactcattgtc

SEQ ID NO: 17275 - DNA, 20 bp, synthetic construct
  source 1..20: mol_type = other DNA
atccattttaatctgcgggg

SEQ ID NO: 17276 - DNA, 20 bp, synthetic construct
  source 1..20: mol_type = other DNA
catggcctagtaactgtccg

SEQ ID NO: 17277 - DNA, 20 bp, synthetic construct
  source 1..20: mol_type = other DNA
ccggttcgcgtctctctgct

SEQ ID NO: 17278 - DNA, 20 bp, synthetic construct
  source 1..20: mol_type = other DNA
gctcggctccgctccaatcc

SEQ ID NO: 17279 - DNA, 20 bp, synthetic construct
  source 1..20: mol_type = other DNA
ctgagagccatgtcggccag

SEQ ID NO: 17280 - DNA, 20 bp, synthetic construct
  source 1..20: mol_type = other DNA
agagaagtccggatcgtggt

SEQ ID NO: 17281 - DNA, 20 bp, synthetic construct
  source 1..20: mol_type = other DNA
gtgtggacgctgtgtatgaa

SEQ ID NO: 17282 - DNA, 20 bp, synthetic construct
  source 1..20: mol_type = other DNA
cccaaagccctgagattaca

SEQ ID NO: 17283 - DNA, 20 bp, synthetic construct
  source 1..20: mol_type = other DNA
ctgtgacactgctgctccct

SEQ ID NO: 17284 - DNA, 20 bp, synthetic construct
  source 1..20: mol_type = other DNA
gcttggcgatgcccagcaga

SEQ ID NO: 17285 - DNA, 20 bp, synthetic construct
  source 1..20: mol_type = other DNA
tcactccctgaggcagtggc

SEQ ID NO: 17286 - DNA, 20 bp, synthetic construct
  source 1..20: mol_type = other DNA
ctgcgccccggctgcgctcc

SEQ ID NO: 17287 - DNA, 20 bp, synthetic construct
  source 1..20: mol_type = other DNA
cagcctgggcggggccgcag

SEQ ID NO: 17288 - DNA, 20 bp, synthetic construct
  source 1..20: mol_type = other DNA
gcagagcgtcctagcagtgt

SEQ ID NO: 17289 - DNA, 20 bp, synthetic construct
  source 1..20: mol_type = other DNA
ctctgtgggcggccgccggg

SEQ ID NO: 17290 - DNA, 20 bp, synthetic construct
  source 1..20: mol_type = other DNA
cagcagagccgagccggccg

SEQ ID NO: 17291 - DNA, 20 bp, synthetic construct
  source 1..20: mol_type = other DNA
ggcatccggggcagtaaaac

SEQ ID NO: 17292 - DNA, 20 bp, synthetic construct
  source 1..20: mol_type = other DNA
ctgcgtccgacccccggccg

SEQ ID NO: 17293 - DNA, 20 bp, synthetic construct
  source 1..20: mol_type = other DNA
gcacctgatctttctcatcc

SEQ ID NO: 17294 - DNA, 20 bp, synthetic construct
  source 1..20: mol_type = other DNA
gcggctccaggcacccaaca

SEQ ID NO: 17295 - DNA, 20 bp, synthetic construct
  source 1..20: mol_type = other DNA
ccgggcggcaacctttgcag

SEQ ID NO: 17296 - DNA, 20 bp, synthetic construct
  source 1..20: mol_type = other DNA
ggccgcaggtgtatttacgg

SEQ ID NO: 17297 - DNA, 20 bp, synthetic construct
  source 1..20: mol_type = other DNA
aatggaatcggaaggaagaa

SEQ ID NO: 17298 - DNA, 20 bp, synthetic construct
  source 1..20: mol_type = other DNA
ggaagccagaccagagagcg

SEQ ID NO: 17299 - DNA, 20 bp, synthetic construct
  source 1..20: mol_type = other DNA
tgaggccctcaggtctctgc

SEQ ID NO: 17300 - DNA, 20 bp, synthetic construct
  source 1..20: mol_type = other DNA
gcgcaaccggaactagcctt

SEQ ID NO: 17301 - DNA, 20 bp, synthetic construct
  source 1..20: mol_type = other DNA
agaccatggcgaaagccggg

SEQ ID NO: 17302 - DNA, 20 bp, synthetic construct
  source 1..20: mol_type = other DNA
gcccctctcctgtctggagg

SEQ ID NO: 17303 - DNA, 20 bp, synthetic construct
  source 1..20: mol_type = other DNA
tgcacccacatccttctttc

SEQ ID NO: 17304 - DNA, 20 bp, synthetic construct
  source 1..20: mol_type = other DNA
tggttctaaagagtggtgag

SEQ ID NO: 17305 - DNA, 20 bp, synthetic construct
  source 1..20: mol_type = other DNA
gtctggagaaaaatgacctt

SEQ ID NO: 17306 - DNA, 20 bp, synthetic construct
  source 1..20: mol_type = other DNA
ttgtacggcggcttctcgcg

SEQ ID NO: 17307 - DNA, 20 bp, synthetic construct
  source 1..20: mol_type = other DNA
agctcccgccccggaagcgg

SEQ ID NO: 17308 - DNA, 20 bp, synthetic construct
  source 1..20: mol_type = other DNA
tgcgcgggtatctctgaagt

SEQ ID NO: 17309 - DNA, 20 bp, synthetic construct
  source 1..20: mol_type = other DNA
ttgtttgagtttcttcacac

SEQ ID NO: 17310 - DNA, 20 bp, synthetic construct
  source 1..20: mol_type = other DNA
caggaagatggcggcctctg

SEQ ID NO: 17311 - DNA, 20 bp, synthetic construct
  source 1..20: mol_type = other DNA
tgccaacccagcagccggct

SEQ ID NO: 17312 - DNA, 20 bp, synthetic construct
  source 1..20: mol_type = other DNA
tggtatattcaaggttggat

SEQ ID NO: 17313 - DNA, 20 bp, synthetic construct
  source 1..20: mol_type = other DNA
cccagcaacagttactcaaa

SEQ ID NO: 17314 - DNA, 20 bp, synthetic construct
  source 1..20: mol_type = other DNA
ggtggggtgtgtgtgtcaaa

SEQ ID NO: 17315 - DNA, 20 bp, synthetic construct
  source 1..20: mol_type = other DNA
gagcccatacttgctctttt

SEQ ID NO: 17316 - DNA, 20 bp, synthetic construct
  source 1..20: mol_type = other DNA
ggtgagagagtgagggggaa

SEQ ID NO: 17317 - DNA, 20 bp, synthetic construct
  source 1..20: mol_type = other DNA
tgccagctgagtcgtgggca

SEQ ID NO: 17318 - DNA, 20 bp, synthetic construct
  source 1..20: mol_type = other DNA
gagttacgattcaaactgaa

SEQ ID NO: 17319 - DNA, 20 bp, synthetic construct
  source 1..20: mol_type = other DNA
cagccccgactgctcctcct

SEQ ID NO: 17320 - DNA, 20 bp, synthetic construct
  source 1..20: mol_type = other DNA
tcttgggggctggaggacgt

SEQ ID NO: 17321 - DNA, 20 bp, synthetic construct
  source 1..20: mol_type = other DNA
gagcggagcccggtgacagg

SEQ ID NO: 17322 - DNA, 20 bp, synthetic construct
  source 1..20: mol_type = other DNA
ctacagcagcttcggcggcg

SEQ ID NO: 17323 - DNA, 20 bp, synthetic construct
  source 1..20: mol_type = other DNA
gccggactctatggggcggg

SEQ ID NO: 17324 - DNA, 20 bp, synthetic construct
  source 1..20: mol_type = other DNA
gaaagaggggaagagtatta

SEQ ID NO: 17325 - DNA, 20 bp, synthetic construct
  source 1..20: mol_type = other DNA
gtgaagcgatagcgttttgc

SEQ ID NO: 17326 - DNA, 20 bp, synthetic construct
  source 1..20: mol_type = other DNA
ccccggaagaggtagctcac

SEQ ID NO: 17327 - DNA, 20 bp, synthetic construct
  source 1..20: mol_type = other DNA
cagagccggtgtctccgcct

SEQ ID NO: 17328 - DNA, 20 bp, synthetic construct
  source 1..20: mol_type = other DNA
agctgtagtgcttctgggca

SEQ ID NO: 17329 - DNA, 20 bp, synthetic construct
  source 1..20: mol_type = other DNA
cggtcccggggccccctggg

SEQ ID NO: 17330 - DNA, 20 bp, synthetic construct
  source 1..20: mol_type = other DNA
cagtgaagccgccggcacct

SEQ ID NO: 17331 - DNA, 20 bp, synthetic construct
  source 1..20: mol_type = other DNA
cttcccgccaggcaagtgcc

SEQ ID NO: 17332 - DNA, 20 bp, synthetic construct
  source 1..20: mol_type = other DNA
cgagggaggtcttgctggag

SEQ ID NO: 17333 - DNA, 20 bp, synthetic construct
  source 1..20: mol_type = other DNA
cagccttcagctgcctgtgt

SEQ ID NO: 17334 - DNA, 20 bp, synthetic construct
  source 1..20: mol_type = other DNA
gctgaccgttttttgtggtg

SEQ ID NO: 17335 - DNA, 20 bp, synthetic construct
  source 1..20: mol_type = other DNA
ttgtcctgctggtccacgcc

SEQ ID NO: 17336 - DNA, 20 bp, synthetic construct
  source 1..20: mol_type = other DNA
agggagaatggcggcgcccg

SEQ ID NO: 17337 - DNA, 20 bp, synthetic construct
  source 1..20: mol_type = other DNA
gggggactctccaggaagaa

SEQ ID NO: 17338 - DNA, 20 bp, synthetic construct
  source 1..20: mol_type = other DNA
tgcgggggaggctgcccgga

SEQ ID NO: 17339 - DNA, 20 bp, synthetic construct
  source 1..20: mol_type = other DNA
gccacctttagccgccagga

SEQ ID NO: 17340 - DNA, 20 bp, synthetic construct
  source 1..20: mol_type = other DNA
gatgagaccggtgcgactca

SEQ ID NO: 17341 - DNA, 20 bp, synthetic construct
  source 1..20: mol_type = other DNA
gtgggcgcggccgggaagct

SEQ ID NO: 17342 - DNA, 20 bp, synthetic construct
  source 1..20: mol_type = other DNA
ccttcccgcggaatcggcgc

SEQ ID NO: 17343 - DNA, 20 bp, synthetic construct
  source 1..20: mol_type = other DNA
cccgcgctcccctcctcccc

SEQ ID NO: 17344 - DNA, 20 bp, synthetic construct
  source 1..20: mol_type = other DNA
gagggaatctgataaagaca

SEQ ID NO: 17345 - DNA, 20 bp, synthetic construct
  source 1..20: mol_type = other DNA
ccggtgcgttaccggcagct

SEQ ID NO: 17346 - DNA, 20 bp, synthetic construct
  source 1..20: mol_type = other DNA
aaagtttgaatcagcttctc

SEQ ID NO: 17347 - DNA, 20 bp, synthetic construct
  source 1..20: mol_type = other DNA
gtccttcctaggactgactt

SEQ ID NO: 17348 - DNA, 20 bp, synthetic construct
  source 1..20: mol_type = other DNA
ctccacaccccttgcgcccg

SEQ ID NO: 17349 - DNA, 20 bp, synthetic construct
  source 1..20: mol_type = other DNA
agtgccctctgcagctgaat

SEQ ID NO: 17350 - DNA, 20 bp, synthetic construct
  source 1..20: mol_type = other DNA
tgttgcagggagtgagggca

SEQ ID NO: 17351 - DNA, 20 bp, synthetic construct
  source 1..20: mol_type = other DNA
cgctgttcagtgccggtgtt

SEQ ID NO: 17352 - DNA, 20 bp, synthetic construct
  source 1..20: mol_type = other DNA
ccgggccctcccctcaggaa

SEQ ID NO: 17353 - DNA, 20 bp, synthetic construct
  source 1..20: mol_type = other DNA
ctccccaccaccaccatctc

SEQ ID NO: 17354 - DNA, 20 bp, synthetic construct
  source 1..20: mol_type = other DNA
atttcattttcctcaagttt

SEQ ID NO: 17355 - DNA, 20 bp, synthetic construct
  source 1..20: mol_type = other DNA
aaccgtcatgtttctgggga

SEQ ID NO: 17356 - DNA, 20 bp, synthetic construct
  source 1..20: mol_type = other DNA
cagcagaggagactgcagac

SEQ ID NO: 17357 - DNA, 20 bp, synthetic construct
  source 1..20: mol_type = other DNA
gacccaaccgcagtgaaggg

SEQ ID NO: 17358 - DNA, 20 bp, synthetic construct
  source 1..20: mol_type = other DNA
tcacctcaagctgtcccctc

SEQ ID NO: 17359 - DNA, 20 bp, synthetic construct
  source 1..20: mol_type = other DNA
cgaaggccccgcccctcaca

SEQ ID NO: 17360 - DNA, 20 bp, synthetic construct
  source 1..20: mol_type = other DNA
atttgttgtctgcccacttt

SEQ ID NO: 17361 - DNA, 20 bp, synthetic construct
  source 1..20: mol_type = other DNA
taccaagcgcctgtgtctgg

SEQ ID NO: 17362 - DNA, 20 bp, synthetic construct
  source 1..20: mol_type = other DNA
cttggtgaggtgactcgcgg

SEQ ID NO: 17363 - DNA, 20 bp, synthetic construct
  source 1..20: mol_type = other DNA
ttgaacccaaagtggatgat

SEQ ID NO: 17364 - DNA, 20 bp, synthetic construct
  source 1..20: mol_type = other DNA
ggcagccagggtggggccca

SEQ ID NO: 17365 - DNA, 20 bp, synthetic construct
  source 1..20: mol_type = other DNA
tgggccagcgggggcgccgc

SEQ ID NO: 17366 - DNA, 20 bp, synthetic construct
  source 1..20: mol_type = other DNA
tgcggcgccgcgcggtgagg

SEQ ID NO: 17367 - DNA, 20 bp, synthetic construct
  source 1..20: mol_type = other DNA
gaggcagtggaggctgaggc

SEQ ID NO: 17368 - DNA, 20 bp, synthetic construct
  source 1..20: mol_type = other DNA
aaatcaatataacctcttct

SEQ ID NO: 17369 - DNA, 20 bp, synthetic construct
  source 1..20: mol_type = other DNA
cctataccagcttccttaca

SEQ ID NO: 17370 - DNA, 20 bp, synthetic construct
  source 1..20: mol_type = other DNA
cagctacggcgaggaggggc

SEQ ID NO: 17371 - DNA, 20 bp, synthetic construct
  source 1..20: mol_type = other DNA
gccaccgagacgcgcagagg

SEQ ID NO: 17372 - DNA, 20 bp, synthetic construct
  source 1..20: mol_type = other DNA
ggaggacaacaaagggccgc

SEQ ID NO: 17373 - DNA, 20 bp, synthetic construct
  source 1..20: mol_type = other DNA
tcactctggaggatggggtg

SEQ ID NO: 17374 - DNA, 20 bp, synthetic construct
  source 1..20: mol_type = other DNA
gcgtatcatctgcgtttcta

SEQ ID NO: 17375 - DNA, 20 bp, synthetic construct
  source 1..20: mol_type = other DNA
ccctgtccggccagcccctc

SEQ ID NO: 17376 - DNA, 20 bp, synthetic construct
  source 1..20: mol_type = other DNA
ccagagatggcagtgagcga

SEQ ID NO: 17377 - DNA, 20 bp, synthetic construct
  source 1..20: mol_type = other DNA
ctaggaaaggctgcttcgcc

SEQ ID NO: 17378 - DNA, 20 bp, synthetic construct
  source 1..20: mol_type = other DNA
ttttctttgatacgggagtt

SEQ ID NO: 17379 - DNA, 20 bp, synthetic construct
  source 1..20: mol_type = other DNA
gccccgccagctgggccaaa

SEQ ID NO: 17380 - DNA, 20 bp, synthetic construct
  source 1..20: mol_type = other DNA
ctgtgaacactatagcgctg

SEQ ID NO: 17381 - DNA, 20 bp, synthetic construct
  source 1..20: mol_type = other DNA
tccttagccctgcccctctc

SEQ ID NO: 17382 - DNA, 20 bp, synthetic construct
  source 1..20: mol_type = other DNA
tcggcgctcaggaagcatgg

SEQ ID NO: 17383 - DNA, 20 bp, synthetic construct
  source 1..20: mol_type = other DNA
ctgatggcttcctccaaccc

SEQ ID NO: 17384 - DNA, 20 bp, synthetic construct
  source 1..20: mol_type = other DNA
ttcggtggtgaacgagtctc

SEQ ID NO: 17385 - DNA, 20 bp, synthetic construct
  source 1..20: mol_type = other DNA
gcctgcaccggtcaggcagt

SEQ ID NO: 17386 - DNA, 20 bp, synthetic construct
  source 1..20: mol_type = other DNA
cttgctgcccctttccagcc

SEQ ID NO: 17387 - DNA, 20 bp, synthetic construct
  source 1..20: mol_type = other DNA
gccaggaggaagggcagctt

SEQ ID NO: 17388 - DNA, 20 bp, synthetic construct
  source 1..20: mol_type = other DNA
ttgcggggcgcgcgccagcc

SEQ ID NO: 17389 - DNA, 20 bp, synthetic construct
  source 1..20: mol_type = other DNA
tgtgcagcaatggccaagat

SEQ ID NO: 17390 - DNA, 20 bp, synthetic construct
  source 1..20: mol_type = other DNA
gcagtcaccgcggagcagac

SEQ ID NO: 17391 - DNA, 20 bp, synthetic construct
  source 1..20: mol_type = other DNA
ccctgtcaactgagaattaa

SEQ ID NO: 17392 - DNA, 20 bp, synthetic construct
  source 1..20: mol_type = other DNA
agcgctgcaaggacaaccgg

SEQ ID NO: 17393 - DNA, 20 bp, synthetic construct
  source 1..20: mol_type = other DNA
gagagagaatgtcttttcga

SEQ ID NO: 17394 - DNA, 20 bp, synthetic construct
  source 1..20: mol_type = other DNA
cgcttctgtcagctctccct

SEQ ID NO: 17395 - DNA, 20 bp, synthetic construct
  source 1..20: mol_type = other DNA
tgctgaaaatccgaagtgcc

SEQ ID NO: 17396 - DNA, 20 bp, synthetic construct
  source 1..20: mol_type = other DNA
cccatgtgctgaaaatccga

SEQ ID NO: 17397 - DNA, 20 bp, synthetic construct
  source 1..20: mol_type = other DNA
tccaagtctccttggcaaga

SEQ ID NO: 17398 - DNA, 20 bp, synthetic construct
  source 1..20: mol_type = other DNA
ggtggtagtggcagtgttcg

SEQ ID NO: 17399 - DNA, 20 bp, synthetic construct
  source 1..20: mol_type = other DNA
taggaggggccgtcaggcgg

SEQ ID NO: 17400 - DNA, 20 bp, synthetic construct
  source 1..20: mol_type = other DNA
aaaaactttataaacccccc

SEQ ID NO: 17401 - DNA, 20 bp, synthetic construct
  source 1..20: mol_type = other DNA
tcactgccatccccgctgtc

SEQ ID NO: 17402 - DNA, 20 bp, synthetic construct
  source 1..20: mol_type = other DNA
gcgctagcgtccgggaccgg

SEQ ID NO: 17403 - DNA, 20 bp, synthetic construct
  source 1..20: mol_type = other DNA
agtcggcgcctcgggttcct

SEQ ID NO: 17404 - DNA, 20 bp, synthetic construct
  source 1..20: mol_type = other DNA
gtcctctcccgccctacagg

SEQ ID NO: 17405 - DNA, 20 bp, synthetic construct
  source 1..20: mol_type = other DNA
gaagagggcaccctccgcca

SEQ ID NO: 17406 - DNA, 20 bp, synthetic construct
  source 1..20: mol_type = other DNA
accatccccttgccccgccc

SEQ ID NO: 17407 - DNA, 20 bp, synthetic construct
  source 1..20: mol_type = other DNA
tacctcctgggcagtgagct

SEQ ID NO: 17408 - DNA, 20 bp, synthetic construct
  source 1..20: mol_type = other DNA
cgccttccgctcgtgggagt

SEQ ID NO: 17409 - DNA, 20 bp, synthetic construct
  source 1..20: mol_type = other DNA
cgggaagggatggatcgctg

SEQ ID NO: 17410 - DNA, 20 bp, synthetic construct
  source 1..20: mol_type = other DNA
catgctggtcctttatggac

SEQ ID NO: 17411 - DNA, 20 bp, synthetic construct
  source 1..20: mol_type = other DNA
aggaccgttacgtttcccgg

SEQ ID NO: 17412 - DNA, 20 bp, synthetic construct
  source 1..20: mol_type = other DNA
ccacggcggaggcgctgggt

SEQ ID NO: 17413 - DNA, 20 bp, synthetic construct
  source 1..20: mol_type = other DNA
ccaagggttggctgactgca

SEQ ID NO: 17414 - DNA, 20 bp, synthetic construct
  source 1..20: mol_type = other DNA
ccaagcttctgggtatttct

SEQ ID NO: 17415 - DNA, 20 bp, synthetic construct
  source 1..20: mol_type = other DNA
tcccggcgctccctccccga

SEQ ID NO: 17416 - DNA, 20 bp, synthetic construct
  source 1..20: mol_type = other DNA
atgcctagcccacaccagtt

SEQ ID NO: 17417 - DNA, 20 bp, synthetic construct
  source 1..20: mol_type = other DNA
cttcactggggcagtctctg

SEQ ID NO: 17418 - DNA, 20 bp, synthetic construct
  source 1..20: mol_type = other DNA
gcgggggtagttacggtgtt

SEQ ID NO: 17419 - DNA, 20 bp, synthetic construct
  source 1..20: mol_type = other DNA
aggacccggaggacgtccgg

SEQ ID NO: 17420 - DNA, 20 bp, synthetic construct
  source 1..20: mol_type = other DNA
cacagccacagcccctgact

SEQ ID NO: 17421 - DNA, 20 bp, synthetic construct
  source 1..20: mol_type = other DNA
gttaagtgactcacccaagg

SEQ ID NO: 17422 - DNA, 20 bp, synthetic construct
  source 1..20: mol_type = other DNA
acgggagcatcctgcaccgt

SEQ ID NO: 17423 - DNA, 20 bp, synthetic construct
  source 1..20: mol_type = other DNA
ctgggtggggtccgcgcagc

SEQ ID NO: 17424 - DNA, 20 bp, synthetic construct
  source 1..20: mol_type = other DNA
caggaggccatgtcgggtga

SEQ ID NO: 17425 - DNA, 20 bp, synthetic construct
  source 1..20: mol_type = other DNA
gcggcagcgccactcgggcg

SEQ ID NO: 17426 - DNA, 20 bp, synthetic construct
  source 1..20: mol_type = other DNA
gggtgggtggggccaggagg

SEQ ID NO: 17427 - DNA, 20 bp, synthetic construct
  source 1..20: mol_type = other DNA
aatgacagaggctcacagga

SEQ ID NO: 17428 - DNA, 20 bp, synthetic construct
  source 1..20: mol_type = other DNA
tcaccacattttagtgagaa

SEQ ID NO: 17429 - DNA, 20 bp, synthetic construct
  source 1..20: mol_type = other DNA
cacttcaccctctcgcctcg

SEQ ID NO: 17430 - DNA, 20 bp, synthetic construct
  source 1..20: mol_type = other DNA
cttctccctcccctccagaa

SEQ ID NO: 17431 - DNA, 20 bp, synthetic construct
  source 1..20: mol_type = other DNA
tgaagagaatttggattcat

SEQ ID NO: 17432 - DNA, 20 bp, synthetic construct
  source 1..20: mol_type = other DNA
gcgcagaccgagcatccgcg

SEQ ID NO: 17433 - DNA, 20 bp, synthetic construct
  source 1..20: mol_type = other DNA
taaactctcagagtaactgt

SEQ ID NO: 17434 - DNA, 20 bp, synthetic construct
  source 1..20: mol_type = other DNA
tgcaaaaagaaaaagagacg

SEQ ID NO: 17435 - DNA, 20 bp, synthetic construct
  source 1..20: mol_type = other DNA
gctaccgagcggtgccaggc

SEQ ID NO: 17436 - DNA, 20 bp, synthetic construct
  source 1..20: mol_type = other DNA
ggcaccttccactagcaaca

SEQ ID NO: 17437 - DNA, 20 bp, synthetic construct
  source 1..20: mol_type = other DNA
ctcgcagcgttgctcacaga

SEQ ID NO: 17438 - DNA, 20 bp, synthetic construct
  source 1..20: mol_type = other DNA
ccgcgcggagcccaccattg

SEQ ID NO: 17439 - DNA, 20 bp, synthetic construct
  source 1..20: mol_type = other DNA
cttgcggcgctggaggagct

SEQ ID NO: 17440 - DNA, 20 bp, synthetic construct
  source 1..20: mol_type = other DNA
ggtccaccacgccttccacc

SEQ ID NO: 17441 - DNA, 20 bp, synthetic construct
  source 1..20: mol_type = other DNA
cccacccctttctttttgag

SEQ ID NO: 17442 - DNA, 20 bp, synthetic construct
  source 1..20: mol_type = other DNA
tacaaataggaatagggtac

SEQ ID NO: 17443 - DNA, 20 bp, synthetic construct
  source 1..20: mol_type = other DNA
tgggcctcccaaaagacagt

SEQ ID NO: 17444 - DNA, 20 bp, synthetic construct
  source 1..20: mol_type = other DNA
ctctttccctgctgattcca

SEQ ID NO: 17445 - DNA, 20 bp, synthetic construct
  source 1..20: mol_type = other DNA
agcccggggcggcccagtcg

SEQ ID NO: 17446 - DNA, 20 bp, synthetic construct
  source 1..20: mol_type = other DNA
agcggggagtcgaggcggcg

SEQ ID NO: 17447 - DNA, 20 bp, synthetic construct
  source 1..20: mol_type = other DNA
tttgtctgtaggagcagcgg

SEQ ID NO: 17448 - DNA, 20 bp, synthetic construct
  source 1..20: mol_type = other DNA
caacaccaaaacgcatccac

SEQ ID NO: 17449 - DNA, 20 bp, synthetic construct
  source 1..20: mol_type = other DNA
gcacagctgggacctcctct

SEQ ID NO: 17450 - DNA, 20 bp, synthetic construct
  source 1..20: mol_type = other DNA
tgctccccgccgcttccgtt

SEQ ID NO: 17451 - DNA, 20 bp, synthetic construct
  source 1..20: mol_type = other DNA
gagcgcccgccgctgcattt

SEQ ID NO: 17452 - DNA, 20 bp, synthetic construct
  source 1..20: mol_type = other DNA
aggtcgagagagggatgcga

SEQ ID NO: 17453 - DNA, 20 bp, synthetic construct
  source 1..20: mol_type = other DNA
ctttccggacgccacgtgca

SEQ ID NO: 17454 - DNA, 20 bp, synthetic construct
  source 1..20: mol_type = other DNA
ccggcgttgctgtagcgcgt

SEQ ID NO: 17455 - DNA, 20 bp, synthetic construct
  source 1..20: mol_type = other DNA
gctaccgcgtctgctggacg

SEQ ID NO: 17456 - DNA, 20 bp, synthetic construct
  source 1..20: mol_type = other DNA
caggggcctctcacgtgacc

SEQ ID NO: 17457 - DNA, 20 bp, synthetic construct
  source 1..20: mol_type = other DNA
actccagtgcgcccccaacc

SEQ ID NO: 17458 - DNA, 20 bp, synthetic construct
  source 1..20: mol_type = other DNA
ttcactcctccattgtctgc

SEQ ID NO: 17459 - DNA, 20 bp, synthetic construct
  source 1..20: mol_type = other DNA
gtccttcactcctccattgt

SEQ ID NO: 17460 - DNA, 20 bp, synthetic construct
  source 1..20: mol_type = other DNA
gggcgtgtggccgcgggttt

SEQ ID NO: 17461 - DNA, 20 bp, synthetic construct
  source 1..20: mol_type = other DNA
cctgaccccctccccccgct

SEQ ID NO: 17462 - DNA, 20 bp, synthetic construct
  source 1..20: mol_type = other DNA
cacctgctgtggttatgatg

SEQ ID NO: 17463 - DNA, 20 bp, synthetic construct
  source 1..20: mol_type = other DNA
agaggccgagtctccgaggg

SEQ ID NO: 17464 - DNA, 20 bp, synthetic construct
  source 1..20: mol_type = other DNA
cggtagttccgccgggtctg

SEQ ID NO: 17465 - DNA, 20 bp, synthetic construct
  source 1..20: mol_type = other DNA
cgccaatgatgagctggatt

SEQ ID NO: 17466 - DNA, 20 bp, synthetic construct
  source 1..20: mol_type = other DNA
aagaatccaggttttgaggt

SEQ ID NO: 17467 - DNA, 20 bp, synthetic construct
  source 1..20: mol_type = other DNA
ctgccacctttgcctcctgg

SEQ ID NO: 17468 - DNA, 20 bp, synthetic construct
  source 1..20: mol_type = other DNA
ggggctgcccacgccccctt

SEQ ID NO: 17469 - DNA, 20 bp, synthetic construct
  source 1..20: mol_type = other DNA
agggtgtcgccgctgtgccg

SEQ ID NO: 17470 - DNA, 20 bp, synthetic construct
  source 1..20: mol_type = other DNA
gggacacggagccgcgagga

SEQ ID NO: 17471 - DNA, 20 bp, synthetic construct
  source 1..20: mol_type = other DNA
aatcttgggttgtatctccc

SEQ ID NO: 17472 - DNA, 20 bp, synthetic construct
  source 1..20: mol_type = other DNA
ctgggccaatatggcagcgc

SEQ ID NO: 17473 - DNA, 20 bp, synthetic construct
  source 1..20: mol_type = other DNA
taggggaggccacgggcttg

SEQ ID NO: 17474 - DNA, 20 bp, synthetic construct
  source 1..20: mol_type = other DNA
atggtgaattcgggcctctc

SEQ ID NO: 17475 - DNA, 20 bp, synthetic construct
  source 1..20: mol_type = other DNA
agccccagacacggaccccg

SEQ ID NO: 17476 - DNA, 20 bp, synthetic construct
  source 1..20: mol_type = other DNA
gagcagaccttccctggagc

SEQ ID NO: 17477 - DNA, 20 bp, synthetic construct
  source 1..20: mol_type = other DNA
gggccaaggccagggcctga

SEQ ID NO: 17478 - DNA, 20 bp, synthetic construct
  source 1..20: mol_type = other DNA
tctttccgccagtttttgta

SEQ ID NO: 17479 - DNA, 20 bp, synthetic construct
  source 1..20: mol_type = other DNA
ggctgaaccgcccggctgag

SEQ ID NO: 17480 - DNA, 20 bp, synthetic construct
  source 1..20: mol_type = other DNA
ccgtggcggggatgctgcga

SEQ ID NO: 17481 - DNA, 20 bp, synthetic construct
  source 1..20: mol_type = other DNA
ccctcggctgctgcagggat

SEQ ID NO: 17482 - DNA, 20 bp, synthetic construct
  source 1..20: mol_type = other DNA
gagctactgagggtctaagt

SEQ ID NO: 17483 - DNA, 20 bp, synthetic construct
  source 1..20: mol_type = other DNA
cggcggagagtgcggcatgc

SEQ ID NO: 17484 - DNA, 20 bp, synthetic construct
  source 1..20: mol_type = other DNA
tgaagctccctgtggcctgg

SEQ ID NO: 17485 - DNA, 20 bp, synthetic construct
  source 1..20: mol_type = other DNA
cgcagggagctggatggaga

SEQ ID NO: 17486 - DNA, 20 bp, synthetic construct
  source 1..20: mol_type = other DNA
gcgacccggcctcctagggg

SEQ ID NO: 17487 - DNA, 20 bp, synthetic construct
  source 1..20: mol_type = other DNA
gtcgtggtccagacagttta

SEQ ID NO: 17488 - DNA, 20 bp, synthetic construct
  source 1..20: mol_type = other DNA
gacaggaagcactttggtcc

SEQ ID NO: 17489 - DNA, 20 bp, synthetic construct
  source 1..20: mol_type = other DNA
agctgactcctgctgggccc

SEQ ID NO: 17490 - DNA, 20 bp, synthetic construct
  source 1..20: mol_type = other DNA
tagccgctgcctcctcctac

SEQ ID NO: 17491 - DNA, 20 bp, synthetic construct
  source 1..20: mol_type = other DNA
ctttttctcccgaaggaaga

SEQ ID NO: 17492 - DNA, 20 bp, synthetic construct
  source 1..20: mol_type = other DNA
gcgactctgtactccctgct

SEQ ID NO: 17493 - DNA, 20 bp, synthetic construct
  source 1..20: mol_type = other DNA
aactgtcatcgataggaata

SEQ ID NO: 17494 - DNA, 20 bp, synthetic construct
  source 1..20: mol_type = other DNA
caggctgagtgctgcggcgc

SEQ ID NO: 17495 - DNA, 20 bp, synthetic construct
  source 1..20: mol_type = other DNA
cggggagagcaggggttctg

SEQ ID NO: 17496 - DNA, 20 bp, synthetic construct
  source 1..20: mol_type = other DNA
ctcgccgtcggctctacctg

SEQ ID NO: 17497 - DNA, 20 bp, synthetic construct
  source 1..20: mol_type = other DNA
aggggaggagccgggtccac

SEQ ID NO: 17498 - DNA, 20 bp, synthetic construct
  source 1..20: mol_type = other DNA
gaggtgcaggtcgaagaggc

SEQ ID NO: 17499 - DNA, 20 bp, synthetic construct
  source 1..20: mol_type = other DNA
tccgaagcatggcgccggcg

SEQ ID NO: 17500 - DNA, 20 bp, synthetic construct
  source 1..20: mol_type = other DNA
gccactgtccggccacagcc

SEQ ID NO: 17501 - DNA, 20 bp, synthetic construct
  source 1..20: mol_type = other DNA
cttgggggatcgccgcggct

SEQ ID NO: 17502 - DNA, 20 bp, synthetic construct
  source 1..20: mol_type = other DNA
ttaaagtgcttccgcatggt

SEQ ID NO: 17503 - DNA, 20 bp, synthetic construct
  source 1..20: mol_type = other DNA
cagctctgctgagagagtgc

SEQ ID NO: 17504 - DNA, 20 bp, synthetic construct
  source 1..20: mol_type = other DNA
tccagctccagggacctgtc

SEQ ID NO: 17505 - DNA, 20 bp, synthetic construct
  source 1..20: mol_type = other DNA
tccctgcaacccggccggcg

SEQ ID NO: 17506 - DNA, 20 bp, synthetic construct
  source 1..20: mol_type = other DNA
caagactcccgtagtcccca

SEQ ID NO: 17507 - DNA, 20 bp, synthetic construct
  source 1..20: mol_type = other DNA
gtacaattggctgaggcgct

SEQ ID NO: 17508 - DNA, 20 bp, synthetic construct
  source 1..20: mol_type = other DNA
accagggcgcatgcgtaaca

SEQ ID NO: 17509 - DNA, 20 bp, synthetic construct
  source 1..20: mol_type = other DNA
ccggtgtacttcagtttccg

SEQ ID NO: 17510 - DNA, 20 bp, synthetic construct
  source 1..20: mol_type = other DNA
cgcgtcgactgcccagagtc

SEQ ID NO: 17511 - DNA, 20 bp, synthetic construct
  source 1..20: mol_type = other DNA
tttggggttgtccctggact

SEQ ID NO: 17512 - DNA, 20 bp, synthetic construct
  source 1..20: mol_type = other DNA
tgcagcccgttcgctcacac

SEQ ID NO: 17513 - DNA, 20 bp, synthetic construct
  source 1..20: mol_type = other DNA
gtcccggcatcggccaagat

SEQ ID NO: 17514 - DNA, 20 bp, synthetic construct
  source 1..20: mol_type = other DNA
acgctctgtccctgcgtgac

SEQ ID NO: 17515 - DNA, 20 bp, synthetic construct
  source 1..20: mol_type = other DNA
cgggcggcggtgaccccggc

SEQ ID NO: 17516 - DNA, 20 bp, synthetic construct
  source 1..20: mol_type = other DNA
ccgcacgggggccgcggcca

SEQ ID NO: 17517 - DNA, 20 bp, synthetic construct
  source 1..20: mol_type = other DNA
ggcctttcctaggaggtaac

SEQ ID NO: 17518 - DNA, 20 bp, synthetic construct
  source 1..20: mol_type = other DNA
ggacgccatggtaagcgcgg

SEQ ID NO: 17519 - DNA, 20 bp, synthetic construct
  source 1..20: mol_type = other DNA
ttaccggcggattaagctcg

SEQ ID NO: 17520 - DNA, 20 bp, synthetic construct
  source 1..20: mol_type = other DNA
tgtcgaaggaccaaaggcga

SEQ ID NO: 17521 - DNA, 20 bp, synthetic construct
  source 1..20: mol_type = other DNA
tggagcgcggcggaggtgag

SEQ ID NO: 17522 - DNA, 20 bp, synthetic construct
  source 1..20: mol_type = other DNA
tcaaccctcccggaagtgag

SEQ ID NO: 17523 - DNA, 20 bp, synthetic construct
  source 1..20: mol_type = other DNA
agaaatgaatgaaatgaaat

SEQ ID NO: 17524 - DNA, 20 bp, synthetic construct
  source 1..20: mol_type = other DNA
aagaagctgctgacatcctg

SEQ ID NO: 17525 - DNA, 20 bp, synthetic construct
  source 1..20: mol_type = other DNA
gccgcagtgacccagtaatg

SEQ ID NO: 17526 - DNA, 20 bp, synthetic construct
  source 1..20: mol_type = other DNA
tccggcgccagctacgccgc

SEQ ID NO: 17527 - DNA, 20 bp, synthetic construct
  source 1..20: mol_type = other DNA
gcgcttccctggtcaggcac

SEQ ID NO: 17528 - DNA, 20 bp, synthetic construct
  source 1..20: mol_type = other DNA
tagtttgcggcatcctgtgg

SEQ ID NO: 17529 - DNA, 20 bp, synthetic construct
  source 1..20: mol_type = other DNA
ggcagagaaacagctggaaa

SEQ ID NO: 17530 - DNA, 20 bp, synthetic construct
  source 1..20: mol_type = other DNA
aggcggtcagcctgcagcat

SEQ ID NO: 17531 - DNA, 20 bp, synthetic construct
  source 1..20: mol_type = other DNA
atcttcgggctgtcagagtt

SEQ ID NO: 17532 - DNA, 20 bp, synthetic construct
  source 1..20: mol_type = other DNA
ccgcggaagatgagcagcag

SEQ ID NO: 17533 - DNA, 20 bp, synthetic construct
  source 1..20: mol_type = other DNA
agcggcctggcgtcggcgct

SEQ ID NO: 17534 - DNA, 20 bp, synthetic construct
  source 1..20: mol_type = other DNA
cggcggtggtggctgagtcc

SEQ ID NO: 17535 - DNA, 20 bp, synthetic construct
  source 1..20: mol_type = other DNA
tgccacctccctctttcttc

SEQ ID NO: 17536 - DNA, 20 bp, synthetic construct
  source 1..20: mol_type = other DNA
gtgccctaggctcggccggc

SEQ ID NO: 17537 - DNA, 20 bp, synthetic construct
  source 1..20: mol_type = other DNA
ggcctctctgagcccggctt

SEQ ID NO: 17538 - DNA, 20 bp, synthetic construct
  source 1..20: mol_type = other DNA
ccgagctgcatcttagggag

SEQ ID NO: 17539 - DNA, 20 bp, synthetic construct
  source 1..20: mol_type = other DNA
aaaacgagtttttcacgact

SEQ ID NO: 17540 - DNA, 20 bp, synthetic construct
  source 1..20: mol_type = other DNA
ctggcggccgggtaagggtc

SEQ ID NO: 17541 - DNA, 20 bp, synthetic construct
  source 1..20: mol_type = other DNA
gccggccctgcgcctcccgc

SEQ ID NO: 17542 - DNA, 20 bp, synthetic construct
  source 1..20: mol_type = other DNA
cggtgcgggagaggggttgg

SEQ ID NO: 17543 - DNA, 20 bp, synthetic construct
  source 1..20: mol_type = other DNA
tggcctggagggagacctcg

SEQ ID NO: 17544 - DNA, 20 bp, synthetic construct
  source 1..20: mol_type = other DNA
cactcaccgccgctggggga

SEQ ID NO: 17545 - DNA, 20 bp, synthetic construct
  source 1..20: mol_type = other DNA
aagccccgggaccgccccgc

SEQ ID NO: 17546 - DNA, 20 bp, synthetic construct
  source 1..20: mol_type = other DNA
gaggctccatctccattctg

SEQ ID NO: 17547 - DNA, 20 bp, synthetic construct
  source 1..20: mol_type = other DNA
gtcccccagagtctccaact

SEQ ID NO: 17548 - DNA, 20 bp, synthetic construct
  source 1..20: mol_type = other DNA
gcaggggtggttggtgtcaa

SEQ ID NO: 17549 - DNA, 20 bp, synthetic construct
  source 1..20: mol_type = other DNA
gaggtgctgtgcaggaggcg

SEQ ID NO: 17550 - DNA, 20 bp, synthetic construct
  source 1..20: mol_type = other DNA
aaggggtcctccctgcgcca

SEQ ID NO: 17551 - DNA, 20 bp, synthetic construct
  source 1..20: mol_type = other DNA
ttgctgaggaggcggattag

SEQ ID NO: 17552 - DNA, 20 bp, synthetic construct
  source 1..20: mol_type = other DNA
tccccctcatttgcagatgc

SEQ ID NO: 17553 - DNA, 20 bp, synthetic construct
  source 1..20: mol_type = other DNA
tggcggcagtggcgtcactt

SEQ ID NO: 17554 - DNA, 20 bp, synthetic construct
  source 1..20: mol_type = other DNA
gtttcctgccagtcgggagg

SEQ ID NO: 17555 - DNA, 20 bp, synthetic construct
  source 1..20: mol_type = other DNA
cgtattgagaggagatacac

SEQ ID NO: 17556 - DNA, 20 bp, synthetic construct
  source 1..20: mol_type = other DNA
actccggccttccctgccct

SEQ ID NO: 17557 - DNA, 20 bp, synthetic construct
  source 1..20: mol_type = other DNA
agttcgacggtaaacgaccc

SEQ ID NO: 17558 - DNA, 20 bp, synthetic construct
  source 1..20: mol_type = other DNA
cccccgggggaggccatgaa

SEQ ID NO: 17559 - DNA, 20 bp, synthetic construct
  source 1..20: mol_type = other DNA
attcgaagctacttcacagt

SEQ ID NO: 17560 - DNA, 20 bp, synthetic construct
  source 1..20: mol_type = other DNA
gtgcacatggggtgttggag

SEQ ID NO: 17561 - DNA, 20 bp, synthetic construct
  source 1..20: mol_type = other DNA
agagctggggtcgtggcggc

SEQ ID NO: 17562 - DNA, 20 bp, synthetic construct
  source 1..20: mol_type = other DNA
gggtgaggagctggtggcgt

SEQ ID NO: 17563 - DNA, 20 bp, synthetic construct
  source 1..20: mol_type = other DNA
accctagtgacaggagccga

SEQ ID NO: 17564 - DNA, 20 bp, synthetic construct
  source 1..20: mol_type = other DNA
gaggcagcggagacagaggc

SEQ ID NO: 17565 - DNA, 20 bp, synthetic construct
  source 1..20: mol_type = other DNA
gcacgcagtccgacttggcc

SEQ ID NO: 17566 - DNA, 20 bp, synthetic construct
  source 1..20: mol_type = other DNA
gcgacccccgggcggggcca

SEQ ID NO: 17567 - DNA, 20 bp, synthetic construct
  source 1..20: mol_type = other DNA
agagccggagccgtggcctg

SEQ ID NO: 17568 - DNA, 20 bp, synthetic construct
  source 1..20: mol_type = other DNA
caagcgccggcgttctctgc

SEQ ID NO: 17569 - DNA, 20 bp, synthetic construct
  source 1..20: mol_type = other DNA
tgggcagagggattggcaag

SEQ ID NO: 17570 - DNA, 20 bp, synthetic construct
  source 1..20: mol_type = other DNA
ggcgcagtaaacagtctcct

SEQ ID NO: 17571 - DNA, 20 bp, synthetic construct
  source 1..20: mol_type = other DNA
tttgggattctggaattcga

SEQ ID NO: 17572 - DNA, 20 bp, synthetic construct
  source 1..20: mol_type = other DNA
ttgagtcgggcaaggaagag

SEQ ID NO: 17573 - DNA, 20 bp, synthetic construct
  source 1..20: mol_type = other DNA
cctttgtcaagtcatcccct

SEQ ID NO: 17574 - DNA, 20 bp, synthetic construct
  source 1..20: mol_type = other DNA
gatcctgaggaggcagctgc

SEQ ID NO: 17575 - DNA, 20 bp, synthetic construct
  source 1..20: mol_type = other DNA
ccgggagcggcggcggccat

SEQ ID NO: 17576 - DNA, 20 bp, synthetic construct
  source 1..20: mol_type = other DNA
aggagcatcagaccacagat

SEQ ID NO: 17577 - DNA, 20 bp, synthetic construct
  source 1..20: mol_type = other DNA
cgtccctcgcacacgcagag

SEQ ID NO: 17578 - DNA, 20 bp, synthetic construct
  source 1..20: mol_type = other DNA
gcgagctagccagcaggcat

SEQ ID NO: 17579 - DNA, 20 bp, synthetic construct
  source 1..20: mol_type = other DNA
ggggcgggccacagtctcca

SEQ ID NO: 17580 - DNA, 20 bp, synthetic construct
  source 1..20: mol_type = other DNA
tcggaagcctaggaggctgg

SEQ ID NO: 17581 - DNA, 20 bp, synthetic construct
  source 1..20: mol_type = other DNA
ggagcctctagaactatgag

SEQ ID NO: 17582 - DNA, 20 bp, synthetic construct
  source 1..20: mol_type = other DNA
attgcctattggcctgtgct

SEQ ID NO: 17583 - DNA, 20 bp, synthetic construct
  source 1..20: mol_type = other DNA
ctgaaataacagaagctgtg

SEQ ID NO: 17584 - DNA, 20 bp, synthetic construct
  source 1..20: mol_type = other DNA
gtcactgcgccggggtagtg

SEQ ID NO: 17585 - DNA, 20 bp, synthetic construct
  source 1..20: mol_type = other DNA
cgtaagtccctctcgtgcgc

SEQ ID NO: 17586 - DNA, 20 bp, synthetic construct
  source 1..20: mol_type = other DNA
gcgtccctctctccacgagg

SEQ ID NO: 17587 - DNA, 20 bp, synthetic construct
  source 1..20: mol_type = other DNA
ctggagccagactgtggtct

SEQ ID NO: 17588 - DNA, 20 bp, synthetic construct
  source 1..20: mol_type = other DNA
gcctcagtctccccagctct

SEQ ID NO: 17589 - DNA, 20 bp, synthetic construct
  source 1..20: mol_type = other DNA
cctttgccccctcacacctc

SEQ ID NO: 17590 - DNA, 20 bp, synthetic construct
  source 1..20: mol_type = other DNA
agcctggacccttagcggtg

SEQ ID NO: 17591 - DNA, 20 bp, synthetic construct
  source 1..20: mol_type = other DNA
aaccaattagtgacaacact

SEQ ID NO: 17592 - DNA, 20 bp, synthetic construct
  source 1..20: mol_type = other DNA
caggactttagccggttgag

SEQ ID NO: 17593 - DNA, 20 bp, synthetic construct
  source 1..20: mol_type = other DNA
tggacttgcagaccggaatg

SEQ ID NO: 17594 - DNA, 20 bp, synthetic construct
  source 1..20: mol_type = other DNA
caacccactttccgcgggga

SEQ ID NO: 17595 - DNA, 20 bp, synthetic construct
  source 1..20: mol_type = other DNA
tgctccccgcgccaccctcc

SEQ ID NO: 17596 - DNA, 20 bp, synthetic construct
  source 1..20: mol_type = other DNA
actgcagcccagtgctgaat

SEQ ID NO: 17597 - DNA, 20 bp, synthetic construct
  source 1..20: mol_type = other DNA
taaaggcttgtctttcccct

SEQ ID NO: 17598 - DNA, 20 bp, synthetic construct
  source 1..20: mol_type = other DNA
ctgagtgactgccaaggaag

SEQ ID NO: 17599 - DNA, 20 bp, synthetic construct
  source 1..20: mol_type = other DNA
ctctcggcgctcactgctct

SEQ ID NO: 17600 - DNA, 20 bp, synthetic construct
  source 1..20: mol_type = other DNA
ccggcgggcccagtgttgga

SEQ ID NO: 17601 - DNA, 20 bp, synthetic construct
  source 1..20: mol_type = other DNA
cagcccaaaagggcccggtc

SEQ ID NO: 17602 - DNA, 20 bp, synthetic construct
  source 1..20: mol_type = other DNA
caggtctctgacttcgggct

SEQ ID NO: 17603 - DNA, 20 bp, synthetic construct
  source 1..20: mol_type = other DNA
tttgccgggtgcttcagatc

SEQ ID NO: 17604 - DNA, 20 bp, synthetic construct
  source 1..20: mol_type = other DNA
cctcgccagccaggtgctcg

SEQ ID NO: 17605 - DNA, 20 bp, synthetic construct
  source 1..20: mol_type = other DNA
actgtgaaccaggagtgagt

SEQ ID NO: 17606 - DNA, 20 bp, synthetic construct
  source 1..20: mol_type = other DNA
tagtcgaccgtgtccgcgcg

SEQ ID NO: 17607 - DNA, 20 bp, synthetic construct
  source 1..20: mol_type = other DNA
cttctttgcggctcggccat

SEQ ID NO: 17608 - DNA, 20 bp, synthetic construct
  source 1..20: mol_type = other DNA
tctccagtcctgacgacacc

SEQ ID NO: 17609 - DNA, 20 bp, synthetic construct
  source 1..20: mol_type = other DNA
tcgcaagctgaaaatcttgc

SEQ ID NO: 17610 - DNA, 20 bp, synthetic construct
  source 1..20: mol_type = other DNA
ttccctcttgtcgcccaggc

SEQ ID NO: 17611 - DNA, 20 bp, synthetic construct
  source 1..20: mol_type = other DNA
cccgcggtggcgggggttgg

SEQ ID NO: 17612 - DNA, 20 bp, synthetic construct
  source 1..20: mol_type = other DNA
aattttatttcagggtaaac

SEQ ID NO: 17613 - DNA, 20 bp, synthetic construct
  source 1..20: mol_type = other DNA
agaagcttataaaatagctt

SEQ ID NO: 17614 - DNA, 20 bp, synthetic construct
  source 1..20: mol_type = other DNA
cgggcggcggctgtgttgcg

SEQ ID NO: 17615 - DNA, 20 bp, synthetic construct
  source 1..20: mol_type = other DNA
ggagccagcgcggagcacct

SEQ ID NO: 17616 - DNA, 20 bp, synthetic construct
  source 1..20: mol_type = other DNA
gggagggagagagagcgcgc

SEQ ID NO: 17617 - DNA, 20 bp, synthetic construct
  source 1..20: mol_type = other DNA
cccttgcttaaaaaatttta

SEQ ID NO: 17618 - DNA, 20 bp, synthetic construct
  source 1..20: mol_type = other DNA
agatggcagccccgggggac

SEQ ID NO: 17619 - DNA, 20 bp, synthetic construct
  source 1..20: mol_type = other DNA
tcccgcaacccgataccatc

SEQ ID NO: 17620 - DNA, 20 bp, synthetic construct
  source 1..20: mol_type = other DNA
cctccaccgggccttgcagg

SEQ ID NO: 17621 - DNA, 20 bp, synthetic construct
  source 1..20: mol_type = other DNA
tgacccccgagaaggaggct

SEQ ID NO: 17622 - DNA, 20 bp, synthetic construct
  source 1..20: mol_type = other DNA
accccttcctcgggtttagg

SEQ ID NO: 17623 - DNA, 20 bp, synthetic construct
  source 1..20: mol_type = other DNA
ggcctgaggctgctcccgga

SEQ ID NO: 17624 - DNA, 20 bp, synthetic construct
  source 1..20: mol_type = other DNA
cccgaccgcattttacgtgg

SEQ ID NO: 17625 - DNA, 20 bp, synthetic construct
  source 1..20: mol_type = other DNA
ctcctctcagatttgtgtgc

SEQ ID NO: 17626 - DNA, 20 bp, synthetic construct
  source 1..20: mol_type = other DNA
ctgctttcatgccctttctt

SEQ ID NO: 17627 - DNA, 20 bp, synthetic construct
  source 1..20: mol_type = other DNA
gcgctggccagagatgcctg

SEQ ID NO: 17628 - DNA, 20 bp, synthetic construct
  source 1..20: mol_type = other DNA
tactgggattctctgaccga

SEQ ID NO: 17629 - DNA, 20 bp, synthetic construct
  source 1..20: mol_type = other DNA
ccctgctttctgcattcttc

SEQ ID NO: 17630 - DNA, 20 bp, synthetic construct
  source 1..20: mol_type = other DNA
gttagcccgtcagtccctgc

SEQ ID NO: 17631 - DNA, 20 bp, synthetic construct
  source 1..20: mol_type = other DNA
gcgacactatccgtgcggcc

SEQ ID NO: 17632 - DNA, 20 bp, synthetic construct
  source 1..20: mol_type = other DNA
ggcggcgacctggtcgcaag

SEQ ID NO: 17633 - DNA, 20 bp, synthetic construct
  source 1..20: mol_type = other DNA
ctgctgtttctcagacagca

SEQ ID NO: 17634 - DNA, 20 bp, synthetic construct
  source 1..20: mol_type = other DNA
caggcggttgcgttccccgt

SEQ ID NO: 17635 - DNA, 20 bp, synthetic construct
  source 1..20: mol_type = other DNA
gcgtcgcgccctggggccgg

SEQ ID NO: 17636 - DNA, 20 bp, synthetic construct
  source 1..20: mol_type = other DNA
gagtggaatggccgcgggcg

SEQ ID NO: 17637 - DNA, 20 bp, synthetic construct
  source 1..20: mol_type = other DNA
gctgtctccctcggcctgtg

SEQ ID NO: 17638 - DNA, 20 bp, synthetic construct
  source 1..20: mol_type = other DNA
cgcttccgcccgctgtcctg

SEQ ID NO: 17639 - DNA, 20 bp, synthetic construct
  source 1..20: mol_type = other DNA
ggaggatatacctttttttc

SEQ ID NO: 17640 - DNA, 20 bp, synthetic construct
  source 1..20: mol_type = other DNA
cgagtccgaccccgcccttc

SEQ ID NO: 17641 - DNA, 20 bp, synthetic construct
  source 1..20: mol_type = other DNA
ggtgcttgcgtgtggtggtg

SEQ ID NO: 17642 - DNA, 20 bp, synthetic construct
  source 1..20: mol_type = other DNA
gaagacttacaggcagagag

SEQ ID NO: 17643 - DNA, 20 bp, synthetic construct
  source 1..20: mol_type = other DNA
actaatggaagaaatctgct

SEQ ID NO: 17644 - DNA, 20 bp, synthetic construct
  source 1..20: mol_type = other DNA
ccccgagaagccgtccagga

SEQ ID NO: 17645 - DNA, 20 bp, synthetic construct
  source 1..20: mol_type = other DNA
ctgagaagtaaatggtattt

SEQ ID NO: 17646 - DNA, 20 bp, synthetic construct
  source 1..20: mol_type = other DNA
aagcgagccgggctacgggg

SEQ ID NO: 17647 - DNA, 20 bp, synthetic construct
  source 1..20: mol_type = other DNA
tctcgggagatgcaggatgt

SEQ ID NO: 17648 - DNA, 20 bp, synthetic construct
  source 1..20: mol_type = other DNA
ttggcatcgccactctgggc

SEQ ID NO: 17649 - DNA, 20 bp, synthetic construct
  source 1..20: mol_type = other DNA
gtaacggcttggtaattatg

SEQ ID NO: 17650 - DNA, 20 bp, synthetic construct
  source 1..20: mol_type = other DNA
cccaaggggttttaggaaag

SEQ ID NO: 17651 - DNA, 20 bp, synthetic construct
  source 1..20: mol_type = other DNA
gggccggccttcaagcaaga

SEQ ID NO: 17652 - DNA, 20 bp, synthetic construct
  source 1..20: mol_type = other DNA
tcctaagcttctggcaagta

SEQ ID NO: 17653 - DNA, 20 bp, synthetic construct
  source 1..20: mol_type = other DNA
gaagcctgcgagttccggaa

SEQ ID NO: 17654 - DNA, 20 bp, synthetic construct
  source 1..20: mol_type = other DNA
ctcggcgctcgggttacccc

SEQ ID NO: 17655 - DNA, 20 bp, synthetic construct
  source 1..20: mol_type = other DNA
gcccttctccgagctgtgcg

SEQ ID NO: 17656 - DNA, 20 bp, synthetic construct
  source 1..20: mol_type = other DNA
tgtgacggcgcgtttctatt

SEQ ID NO: 17657 - DNA, 20 bp, synthetic construct
  source 1..20: mol_type = other DNA
gatggcggcctcatgcttgg

SEQ ID NO: 17658 - DNA, 20 bp, synthetic construct
  source 1..20: mol_type = other DNA
cgcgcccctagaacgctttg

SEQ ID NO: 17659 - DNA, 20 bp, synthetic construct
  source 1..20: mol_type = other DNA
aaacagaaattccaccagcc

SEQ ID NO: 17660 - DNA, 20 bp, synthetic construct
  source 1..20: mol_type = other DNA
gggtccctgagcctcagctg

SEQ ID NO: 17661 - DNA, 20 bp, synthetic construct
  source 1..20: mol_type = other DNA
catgaggggtgacagaggcc

SEQ ID NO: 17662 - DNA, 20 bp, synthetic construct
  source 1..20: mol_type = other DNA
cggtggaaccgaggagaacg

SEQ ID NO: 17663 - DNA, 20 bp, synthetic construct
  source 1..20: mol_type = other DNA
ccctcccgggctgcggctgc

SEQ ID NO: 17664 - DNA, 20 bp, synthetic construct
  source 1..20: mol_type = other DNA
ccagcagcggcagcgggagc

SEQ ID NO: 17665 - DNA, 20 bp, synthetic construct
  source 1..20: mol_type = other DNA
cccttagtgagctgtatttt

SEQ ID NO: 17666 - DNA, 20 bp, synthetic construct
  source 1..20: mol_type = other DNA
gcgattctctgctgccagag

SEQ ID NO: 17667 - DNA, 20 bp, synthetic construct
  source 1..20: mol_type = other DNA
ggttttgctcagattggtgt

SEQ ID NO: 17668 - DNA, 20 bp, synthetic construct
  source 1..20: mol_type = other DNA
cagggaactaccttgagtat

SEQ ID NO: 17669 - DNA, 20 bp, synthetic construct
  source 1..20: mol_type = other DNA
ctccctttctcctcctcctc

SEQ ID NO: 17670 - DNA, 20 bp, synthetic construct
  source 1..20: mol_type = other DNA
gtgacttcccccaaccgcag

SEQ ID NO: 17671 - DNA, 20 bp, synthetic construct
  source 1..20: mol_type = other DNA
tcacagctgctgttgtctgc

SEQ ID NO: 17672 - DNA, 20 bp, synthetic construct
  source 1..20: mol_type = other DNA
ctgggacgggggaaaggaga

SEQ ID NO: 17673 - DNA, 20 bp, synthetic construct
  source 1..20: mol_type = other DNA
gggagtgtctgggcgctcag

SEQ ID NO: 17674 - DNA, 20 bp, synthetic construct
  source 1..20: mol_type = other DNA
gggactgccagtgtgtggag

SEQ ID NO: 17675 - DNA, 20 bp, synthetic construct
  source 1..20: mol_type = other DNA
ccttccgggtcactgccatg

SEQ ID NO: 17676 - DNA, 20 bp, synthetic construct
  source 1..20: mol_type = other DNA
tcctgcctggattccacagc

SEQ ID NO: 17677 - DNA, 20 bp, synthetic construct
  source 1..20: mol_type = other DNA
tggtgatcactaggtgccaa

SEQ ID NO: 17678 - DNA, 20 bp, synthetic construct
  source 1..20: mol_type = other DNA
cagatctcgcgaggttcagg

SEQ ID NO: 17679 - DNA, 20 bp, synthetic construct
  source 1..20: mol_type = other DNA
gcggtagtgacggtggcgtt

SEQ ID NO: 17680 - DNA, 20 bp, synthetic construct
  source 1..20: mol_type = other DNA
tctcggaacgcgccgcagaa

SEQ ID NO: 17681 - DNA, 20 bp, synthetic construct
  source 1..20: mol_type = other DNA
caagtttagggaagtgaaag

SEQ ID NO: 17682 - DNA, 20 bp, synthetic construct
  source 1..20: mol_type = other DNA
caatcttcgctcctccaatc

SEQ ID NO: 17683 - DNA, 20 bp, synthetic construct
  source 1..20: mol_type = other DNA
ccatcatggcggatcaaggt

SEQ ID NO: 17684 - DNA, 20 bp, synthetic construct
  source 1..20: mol_type = other DNA
cgcgccggagcgggaccgac

SEQ ID NO: 17685 - DNA, 20 bp, synthetic construct
  source 1..20: mol_type = other DNA
acccacataaaatctacgag

SEQ ID NO: 17686 - DNA, 20 bp, synthetic construct
  source 1..20: mol_type = other DNA
tctccaggagcaacctctac

SEQ ID NO: 17687 - DNA, 20 bp, synthetic construct
  source 1..20: mol_type = other DNA
acagaatggctgcacattaa

SEQ ID NO: 17688 - DNA, 20 bp, synthetic construct
  source 1..20: mol_type = other DNA
cccgggtctcggacaggcgg

SEQ ID NO: 17689 - DNA, 20 bp, synthetic construct
  source 1..20: mol_type = other DNA
cctcgggagtaaatatcttc

SEQ ID NO: 17690 - DNA, 20 bp, synthetic construct
  source 1..20: mol_type = other DNA
tgcaagcctagttccaaccc

SEQ ID NO: 17691 - DNA, 20 bp, synthetic construct
  source 1..20: mol_type = other DNA
gccttgtctacctcttgccc

SEQ ID NO: 17692 - DNA, 20 bp, synthetic construct
  source 1..20: mol_type = other DNA
ttcccttccgcccccttctc

SEQ ID NO: 17693 - DNA, 20 bp, synthetic construct
  source 1..20: mol_type = other DNA
cggagtgttggtgagtgacg

SEQ ID NO: 17694 - DNA, 20 bp, synthetic construct
  source 1..20: mol_type = other DNA
gactctatatatacagaggg

SEQ ID NO: 17695 - DNA, 20 bp, synthetic construct
  source 1..20: mol_type = other DNA
gagggagcttcctagctggg

SEQ ID NO: 17696 - DNA, 20 bp, synthetic construct
  source 1..20: mol_type = other DNA
cccgggaggagagggcggag

SEQ ID NO: 17697 - DNA, 20 bp, synthetic construct
  source 1..20: mol_type = other DNA
ggacgggagccggaccctgg

SEQ ID NO: 17698 - DNA, 20 bp, synthetic construct
  source 1..20: mol_type = other DNA
acctcccccagaggctgcag

SEQ ID NO: 17699 - DNA, 20 bp, synthetic construct
  source 1..20: mol_type = other DNA
cccggacatgatggcacatg

SEQ ID NO: 17700 - DNA, 20 bp, synthetic construct
  source 1..20: mol_type = other DNA
gggcacgacgagaaagtccg

SEQ ID NO: 17701 - DNA, 20 bp, synthetic construct
  source 1..20: mol_type = other DNA
gcacacagagcaccagctcc

SEQ ID NO: 17702 - DNA, 20 bp, synthetic construct
  source 1..20: mol_type = other DNA
ctcccagggcgatgcaaagc

SEQ ID NO: 17703 - DNA, 20 bp, synthetic construct
  source 1..20: mol_type = other DNA
agcggagagcaaagtgggct

SEQ ID NO: 17704 - DNA, 20 bp, synthetic construct
  source 1..20: mol_type = other DNA
accctgtgcagccaggagcc

SEQ ID NO: 17705 - DNA, 20 bp, synthetic construct
  source 1..20: mol_type = other DNA
tcatgctcgcttcacggagg

SEQ ID NO: 17706 - DNA, 20 bp, synthetic construct
  source 1..20: mol_type = other DNA
ggacagggaagggttaaagg

SEQ ID NO: 17707 - DNA, 20 bp, synthetic construct
  source 1..20: mol_type = other DNA
ttctcggagagcacggaact

SEQ ID NO: 17708 - DNA, 20 bp, synthetic construct
  source 1..20: mol_type = other DNA
cacgcctgccaggagcaagc

SEQ ID NO: 17709 - DNA, 20 bp, synthetic construct
  source 1..20: mol_type = other DNA
ggcaatggggaactctgagg

SEQ ID NO: 17710 - DNA, 20 bp, synthetic construct
  source 1..20: mol_type = other DNA
cacagacatctcctttcccg

SEQ ID NO: 17711 - DNA, 20 bp, synthetic construct
  source 1..20: mol_type = other DNA
ctgtaggacgacctcgggtc

SEQ ID NO: 17712 - DNA, 20 bp, synthetic construct
  source 1..20: mol_type = other DNA
taacggcaatgcggctgcaa

SEQ ID NO: 17713 - DNA, 20 bp, synthetic construct
  source 1..20: mol_type = other DNA
ccagcatcttggcctctgtg

SEQ ID NO: 17714 - DNA, 20 bp, synthetic construct
  source 1..20: mol_type = other DNA
gatagctgcttggtctgaag

SEQ ID NO: 17715 - DNA, 20 bp, synthetic construct
  source 1..20: mol_type = other DNA
aggaggagatcatcgagctc

SEQ ID NO: 17716 - DNA, 20 bp, synthetic construct
  source 1..20: mol_type = other DNA
gtcagcagaagagataaaag

SEQ ID NO: 17717 - DNA, 20 bp, synthetic construct
  source 1..20: mol_type = other DNA
tcaggctccgtgctgttgga

SEQ ID NO: 17718 - DNA, 20 bp, synthetic construct
  source 1..20: mol_type = other DNA
gaagaaggcaggggccctta

SEQ ID NO: 17719 - DNA, 20 bp, synthetic construct
  source 1..20: mol_type = other DNA
acggccctgaccgcccgcgg

SEQ ID NO: 17720 - DNA, 20 bp, synthetic construct
  source 1..20: mol_type = other DNA
ggcgccgacatcgcgacagc

SEQ ID NO: 17721 - DNA, 20 bp, synthetic construct
  source 1..20: mol_type = other DNA
cccgggtgctactttatggg

SEQ ID NO: 17722 - DNA, 20 bp, synthetic construct
  source 1..20: mol_type = other DNA
ataagtaatgactttcagtg

SEQ ID NO: 17723 - DNA, 20 bp, synthetic construct
  source 1..20: mol_type = other DNA
cctcgcagctcgcattcgga

SEQ ID NO: 17724 - DNA, 20 bp, synthetic construct
  source 1..20: mol_type = other DNA
acccctcggtggagataaag

SEQ ID NO: 17725 - DNA, 20 bp, synthetic construct
  source 1..20: mol_type = other DNA
tgtcgctgaagcagatgagt

SEQ ID NO: 17726 - DNA, 20 bp, synthetic construct
  source 1..20: mol_type = other DNA
gcgtagcgccagggcctgag

SEQ ID NO: 17727 - DNA, 20 bp, synthetic construct
  source 1..20: mol_type = other DNA
gctgggcggatggagcagga

SEQ ID NO: 17728 - DNA, 20 bp, synthetic construct
  source 1..20: mol_type = other DNA
ccgggaagatggcggccgtg

SEQ ID NO: 17729 - DNA, 20 bp, synthetic construct
  source 1..20: mol_type = other DNA
gtggggtacgagcttcctgc

SEQ ID NO: 17730 - DNA, 20 bp, synthetic construct
  source 1..20: mol_type = other DNA
gtccagagtccagggactcg

SEQ ID NO: 17731 - DNA, 20 bp, synthetic construct
  source 1..20: mol_type = other DNA
ggagagactaccgtcctgga

SEQ ID NO: 17732 - DNA, 20 bp, synthetic construct
  source 1..20: mol_type = other DNA
cccagcaaagagcaacacag

SEQ ID NO: 17733 - DNA, 20 bp, synthetic construct
  source 1..20: mol_type = other DNA
ctgatttttagaactccaca

SEQ ID NO: 17734 - DNA, 20 bp, synthetic construct
  source 1..20: mol_type = other DNA
aaaaatcaactgccctgctg

SEQ ID NO: 17735 - DNA, 20 bp, synthetic construct
  source 1..20: mol_type = other DNA
ctatcgcctccctctagtct

SEQ ID NO: 17736 - DNA, 20 bp, synthetic construct
  source 1..20: mol_type = other DNA
taaatgaacttgtctggttt

SEQ ID NO: 17737 - DNA, 20 bp, synthetic construct
  source 1..20: mol_type = other DNA
gggtgaccttggttaatatt

SEQ ID NO: 17738 - DNA, 20 bp, synthetic construct
  source 1..20: mol_type = other DNA
gcgggccgcgcggcgcattt

SEQ ID NO: 17739 - DNA, 20 bp, synthetic construct
  source 1..20: mol_type = other DNA
gaggggcggcaacctcctgc

SEQ ID NO: 17740 - DNA, 20 bp, synthetic construct
  source 1..20: mol_type = other DNA
ctgctgctgctcactcagtt

SEQ ID NO: 17741 - DNA, 20 bp, synthetic construct
  source 1..20: mol_type = other DNA
ttctgagccaggtacaatga

SEQ ID NO: 17742 - DNA, 20 bp, synthetic construct
  source 1..20: mol_type = other DNA
ttgaggagagcttgaggaga

SEQ ID NO: 17743 - DNA, 20 bp, synthetic construct
  source 1..20: mol_type = other DNA
gcacattcggcccccgcgac

SEQ ID NO: 17744 - DNA, 20 bp, synthetic construct
  source 1..20: mol_type = other DNA
tggctttgtgagtgcgggca

SEQ ID NO: 17745 - DNA, 20 bp, synthetic construct
  source 1..20: mol_type = other DNA
gcattccccacacaacaccc

SEQ ID NO: 17746 - DNA, 20 bp, synthetic construct
  source 1..20: mol_type = other DNA
cccccgagcacgaagttggc

SEQ ID NO: 17747 - DNA, 20 bp, synthetic construct
  source 1..20: mol_type = other DNA
aaactgggctcccactcagc

SEQ ID NO: 17748 - DNA, 20 bp, synthetic construct
  source 1..20: mol_type = other DNA
ctgcacctcaaccgtgcgga

SEQ ID NO: 17749 - DNA, 20 bp, synthetic construct
  source 1..20: mol_type = other DNA
cagacccgccgccatgacgc

SEQ ID NO: 17750 - DNA, 20 bp, synthetic construct
  source 1..20: mol_type = other DNA
agggcgaggggcggggagcg

SEQ ID NO: 17751 - DNA, 20 bp, synthetic construct
  source 1..20: mol_type = other DNA
acacctgaaagcagcaccaa

SEQ ID NO: 17752 - DNA, 20 bp, synthetic construct
  source 1..20: mol_type = other DNA
cagcgacagagccaaaatca

SEQ ID NO: 17753 - DNA, 20 bp, synthetic construct
  source 1..20: mol_type = other DNA
cttggtgcccacctgtgcgc

SEQ ID NO: 17754 - DNA, 20 bp, synthetic construct
  source 1..20: mol_type = other DNA
cccaggccgcggcccagctg

SEQ ID NO: 17755 - DNA, 20 bp, synthetic construct
  source 1..20: mol_type = other DNA
gacgtcgccgagcgcgaggg

SEQ ID NO: 17756 - DNA, 20 bp, synthetic construct
  source 1..20: mol_type = other DNA
cgtcacgggcctcagctggg

SEQ ID NO: 17757 - DNA, 20 bp, synthetic construct
  source 1..20: mol_type = other DNA
cccgagggacgagtgacagc

SEQ ID NO: 17758 - DNA, 20 bp, synthetic construct
  source 1..20: mol_type = other DNA
accgccgctccggcctcccg

SEQ ID NO: 17759 - DNA, 20 bp, synthetic construct
  source 1..20: mol_type = other DNA
gggtctgactgacttgcagc

SEQ ID NO: 17760 - DNA, 20 bp, synthetic construct
  source 1..20: mol_type = other DNA
ggaaaatcctgttgtgaata

SEQ ID NO: 17761 - DNA, 20 bp, synthetic construct
  source 1..20: mol_type = other DNA
tcatttatctttattcttaa

SEQ ID NO: 17762 - DNA, 20 bp, synthetic construct
  source 1..20: mol_type = other DNA
cactgtgagcgattcggaaa

SEQ ID NO: 17763 - DNA, 20 bp, synthetic construct
  source 1..20: mol_type = other DNA
cgggtgtcgagggcgggttg

SEQ ID NO: 17764 - DNA, 20 bp, synthetic construct
  source 1..20: mol_type = other DNA
aggctgagaagatcgtgagg

SEQ ID NO: 17765 - DNA, 20 bp, synthetic construct
  source 1..20: mol_type = other DNA
gaggagctaagcgtcatcgc

SEQ ID NO: 17766 - DNA, 20 bp, synthetic construct
  source 1..20: mol_type = other DNA
acgcagcgagcgatcggccg

SEQ ID NO: 17767 - DNA, 20 bp, synthetic construct
  source 1..20: mol_type = other DNA
tgcgctcggctccgcctggt

SEQ ID NO: 17768 - DNA, 20 bp, synthetic construct
  source 1..20: mol_type = other DNA
ctggtgactcggctgcagaa

SEQ ID NO: 17769 - DNA, 20 bp, synthetic construct
  source 1..20: mol_type = other DNA
ggctgtgggtgccgctgagc

SEQ ID NO: 17770 - DNA, 20 bp, synthetic construct
  source 1..20: mol_type = other DNA
agatgaagctgaacatctcc

SEQ ID NO: 17771 - DNA, 20 bp, synthetic construct
  source 1..20: mol_type = other DNA
gccccccgtcccggcccccc

SEQ ID NO: 17772 - DNA, 20 bp, synthetic construct
  source 1..20: mol_type = other DNA
ttttcgctcgtcgactgcgg

SEQ ID NO: 17773 - DNA, 20 bp, synthetic construct
  source 1..20: mol_type = other DNA
actgcttacccacaatctgc

SEQ ID NO: 17774 - DNA, 20 bp, synthetic construct
  source 1..20: mol_type = other DNA
cccggaagtggcctgaaggc

SEQ ID NO: 17775 - DNA, 20 bp, synthetic construct
  source 1..20: mol_type = other DNA
gcctctctcttgctgcctag

SEQ ID NO: 17776 - DNA, 20 bp, synthetic construct
  source 1..20: mol_type = other DNA
ccgccatgagggagatcgtg

SEQ ID NO: 17777 - DNA, 20 bp, synthetic construct
  source 1..20: mol_type = other DNA
gtctgtggtggcgcgggcga

SEQ ID NO: 17778 - DNA, 20 bp, synthetic construct
  source 1..20: mol_type = other DNA
tcctctcaccggcccctgga

SEQ ID NO: 17779 - DNA, 20 bp, synthetic construct
  source 1..20: mol_type = other DNA
gactcaagttcttcagttca

SEQ ID NO: 17780 - DNA, 20 bp, synthetic construct
  source 1..20: mol_type = other DNA
tctgcttagcgacttggggt

SEQ ID NO: 17781 - DNA, 20 bp, synthetic construct
  source 1..20: mol_type = other DNA
cccacgacatcttcgcaggg

SEQ ID NO: 17782 - DNA, 20 bp, synthetic construct
  source 1..20: mol_type = other DNA
ccggcgccggaagtgagctg

SEQ ID NO: 17783 - DNA, 20 bp, synthetic construct
  source 1..20: mol_type = other DNA
ttgcgacataggccgagcag

SEQ ID NO: 17784 - DNA, 20 bp, synthetic construct
  source 1..20: mol_type = other DNA
gttcgcggagttcgcccgct

SEQ ID NO: 17785 - DNA, 20 bp, synthetic construct
  source 1..20: mol_type = other DNA
agggagctgagtgtttacag

SEQ ID NO: 17786 - DNA, 20 bp, synthetic construct
  source 1..20: mol_type = other DNA
gggccaaacgccggcctaga

SEQ ID NO: 17787 - DNA, 20 bp, synthetic construct
  source 1..20: mol_type = other DNA
gtctttctcaacggcaaatt

SEQ ID NO: 17788 - DNA, 20 bp, synthetic construct
  source 1..20: mol_type = other DNA
cgcgctgagaccgggaccgg

SEQ ID NO: 17789 - DNA, 20 bp, synthetic construct
  source 1..20: mol_type = other DNA
gaagctaaggctgcgttggg

SEQ ID NO: 17790 - DNA, 20 bp, synthetic construct
  source 1..20: mol_type = other DNA
agctcagcccagcccagccc

SEQ ID NO: 17791 - DNA, 20 bp, synthetic construct
  source 1..20: mol_type = other DNA
gagcggctgcttcctccggg

SEQ ID NO: 17792 - DNA, 20 bp, synthetic construct
  source 1..20: mol_type = other DNA
cctatgcagcctggtttcta

SEQ ID NO: 17793 - DNA, 20 bp, synthetic construct
  source 1..20: mol_type = other DNA
ggcccacagtcaccgccgct

SEQ ID NO: 17794 - DNA, 20 bp, synthetic construct
  source 1..20: mol_type = other DNA
agctggaacccatctcccgt

SEQ ID NO: 17795 - DNA, 20 bp, synthetic construct
  source 1..20: mol_type = other DNA
cgccgctgtccccgctgcgc

SEQ ID NO: 17796 - DNA, 20 bp, synthetic construct
  source 1..20: mol_type = other DNA
actctctttgtgggcaacct

SEQ ID NO: 17797 - DNA, 20 bp, synthetic construct
  source 1..20: mol_type = other DNA
gggcctgggaggcggcccgg

SEQ ID NO: 17798 - DNA, 20 bp, synthetic construct
  source 1..20: mol_type = other DNA
ctccccgcctcgcagagttg

SEQ ID NO: 17799 - DNA, 20 bp, synthetic construct
  source 1..20: mol_type = other DNA
ctccagacccgcacgccgcg

SEQ ID NO: 17800 - DNA, 20 bp, synthetic construct
  source 1..20: mol_type = other DNA
ctcccaaccccaagagccca

SEQ ID NO: 17801 - DNA, 20 bp, synthetic construct
  source 1..20: mol_type = other DNA
acccgctttcctcaactctc

SEQ ID NO: 17802 - DNA, 20 bp, synthetic construct
  source 1..20: mol_type = other DNA
gtggtggcggctgaggcggc

SEQ ID NO: 17803 - DNA, 20 bp, synthetic construct
  source 1..20: mol_type = other DNA
gcagcggctagggcggcggt

SEQ ID NO: 17804 - DNA, 20 bp, synthetic construct
  source 1..20: mol_type = other DNA
agcagccaacacaccagccc

SEQ ID NO: 17805 - DNA, 20 bp, synthetic construct
  source 1..20: mol_type = other DNA
ttaaagttcctcgtaatttt

SEQ ID NO: 17806 - DNA, 20 bp, synthetic construct
  source 1..20: mol_type = other DNA
gcagcacacatcggtccacc

SEQ ID NO: 17807 - DNA, 20 bp, synthetic construct
  source 1..20: mol_type = other DNA
gaacttttgctgaagcgaag

SEQ ID NO: 17808 - DNA, 20 bp, synthetic construct
  source 1..20: mol_type = other DNA
acacgggctcattgcggtgt

SEQ ID NO: 17809 - DNA, 20 bp, synthetic construct
  source 1..20: mol_type = other DNA
ggttccaagaaggctgtgac

SEQ ID NO: 17810 - DNA, 20 bp, synthetic construct
  source 1..20: mol_type = other DNA
aaatggcgcctccggccccc

SEQ ID NO: 17811 - DNA, 20 bp, synthetic construct
  source 1..20: mol_type = other DNA
tgcctggagggcgggaggga

SEQ ID NO: 17812 - DNA, 20 bp, synthetic construct
  source 1..20: mol_type = other DNA
gagccagagtctgtcaggcg

SEQ ID NO: 17813 - DNA, 20 bp, synthetic construct
  source 1..20: mol_type = other DNA
ccttcgcggtgcccactcca

SEQ ID NO: 17814 - DNA, 20 bp, synthetic construct
  source 1..20: mol_type = other DNA
ccagctcccaggaaagctgg

SEQ ID NO: 17815 - DNA, 20 bp, synthetic construct
  source 1..20: mol_type = other DNA
caactggcacaagcgccgca

SEQ ID NO: 17816 - DNA, 20 bp, synthetic construct
  source 1..20: mol_type = other DNA
gtcggaagggcgtcgcgcgg

SEQ ID NO: 17817 - DNA, 20 bp, synthetic construct
  source 1..20: mol_type = other DNA
gatggacgtactggtgtctg

SEQ ID NO: 17818 - DNA, 20 bp, synthetic construct
  source 1..20: mol_type = other DNA
ggatgtgggcggtcgcagct

SEQ ID NO: 17819 - DNA, 20 bp, synthetic construct
  source 1..20: mol_type = other DNA
cagctggttgtgggagagtt

SEQ ID NO: 17820 - DNA, 20 bp, synthetic construct
  source 1..20: mol_type = other DNA
ggtcccgggcgcgtttcggg

SEQ ID NO: 17821 - DNA, 20 bp, synthetic construct
  source 1..20: mol_type = other DNA
caccacagtaggtccctcgg

SEQ ID NO: 17822 - DNA, 20 bp, synthetic construct
  source 1..20: mol_type = other DNA
catgcatgctcccgggaagg

SEQ ID NO: 17823 - DNA, 20 bp, synthetic construct
  source 1..20: mol_type = other DNA
ctttcctcgcacagccaggc

SEQ ID NO: 17824 - DNA, 20 bp, synthetic construct
  source 1..20: mol_type = other DNA
aaaacgcgcggggggcgtcc

SEQ ID NO: 17825 - DNA, 20 bp, synthetic construct
  source 1..20: mol_type = other DNA
ccgagctgtcgccgccgccg

SEQ ID NO: 17826 - DNA, 20 bp, synthetic construct
  source 1..20: mol_type = other DNA
acgaccacgcctgtgccgct

SEQ ID NO: 17827 - DNA, 20 bp, synthetic construct
  source 1..20: mol_type = other DNA
gctccgaccgcgagcgtctc

SEQ ID NO: 17828 - DNA, 20 bp, synthetic construct
  source 1..20: mol_type = other DNA
tccagaggccatggacaggc

SEQ ID NO: 17829 - DNA, 20 bp, synthetic construct
  source 1..20: mol_type = other DNA
gcggacgccatggcgaccaa

SEQ ID NO: 17830 - DNA, 20 bp, synthetic construct
  source 1..20: mol_type = other DNA
cgacttccctaagggcattt

SEQ ID NO: 17831 - DNA, 20 bp, synthetic construct
  source 1..20: mol_type = other DNA
ccatgaagttcaatcccttc

SEQ ID NO: 17832 - DNA, 20 bp, synthetic construct
  source 1..20: mol_type = other DNA
cagccatgtctctagtgatc

SEQ ID NO: 17833 - DNA, 20 bp, synthetic construct
  source 1..20: mol_type = other DNA
ggatccctagatcccgtggg

SEQ ID NO: 17834 - DNA, 20 bp, synthetic construct
  source 1..20: mol_type = other DNA
tgggtttggctggcctcgat

SEQ ID NO: 17835 - DNA, 20 bp, synthetic construct
  source 1..20: mol_type = other DNA
ggaaacggggaagtcaggtg

SEQ ID NO: 17836 - DNA, 20 bp, synthetic construct
  source 1..20: mol_type = other DNA
aggccaagtcgcgctcgtcc

SEQ ID NO: 17837 - DNA, 20 bp, synthetic construct
  source 1..20: mol_type = other DNA
actctcttccagcctccgac

SEQ ID NO: 17838 - DNA, 20 bp, synthetic construct
  source 1..20: mol_type = other DNA
tggaaggaggggccgtgagg

SEQ ID NO: 17839 - DNA, 20 bp, synthetic construct
  source 1..20: mol_type = other DNA
cggttgctgcttgctgtgag

SEQ ID NO: 17840 - DNA, 20 bp, synthetic construct
  source 1..20: mol_type = other DNA
tctcgcggggcggctgcggt

SEQ ID NO: 17841 - DNA, 20 bp, synthetic construct
  source 1..20: mol_type = other DNA
gggcggagaggcggcggtgg

SEQ ID NO: 17842 - DNA, 20 bp, synthetic construct
  source 1..20: mol_type = other DNA
gttcatttgagtagatcgga

SEQ ID NO: 17843 - DNA, 20 bp, synthetic construct
  source 1..20: mol_type = other DNA
cccaatccttcgccatccga

SEQ ID NO: 17844 - DNA, 20 bp, synthetic construct
  source 1..20: mol_type = other DNA
agggttggtgggagttgcga

SEQ ID NO: 17845 - DNA, 20 bp, synthetic construct
  source 1..20: mol_type = other DNA
agtcagagttgagagacaga

SEQ ID NO: 17846 - DNA, 20 bp, synthetic construct
  source 1..20: mol_type = other DNA
tccgacccccatttcggctg

SEQ ID NO: 17847 - DNA, 20 bp, synthetic construct
  source 1..20: mol_type = other DNA
ccctgtcgccaccgaggtcg

SEQ ID NO: 17848 - DNA, 20 bp, synthetic construct
  source 1..20: mol_type = other DNA
cggacgccgggaggaggaga

SEQ ID NO: 17849 - DNA, 20 bp, synthetic construct
  source 1..20: mol_type = other DNA
gctattccgctgtaacagct

SEQ ID NO: 17850 - DNA, 20 bp, synthetic construct
  source 1..20: mol_type = other DNA
tagcgagcgagctcccaggc

SEQ ID NO: 17851 - DNA, 20 bp, synthetic construct
  source 1..20: mol_type = other DNA
cgacctcgcgagccttccgc

SEQ ID NO: 17852 - DNA, 20 bp, synthetic construct
  source 1..20: mol_type = other DNA
gcttgtggcgtctccgccgc

SEQ ID NO: 17853 - DNA, 20 bp, synthetic construct
  source 1..20: mol_type = other DNA
tcccgacccctgggagcgcc

SEQ ID NO: 17854 - DNA, 20 bp, synthetic construct
  source 1..20: mol_type = other DNA
tgatcagatccgccccggct

SEQ ID NO: 17855 - DNA, 20 bp, synthetic construct
  source 1..20: mol_type = other DNA
tctcaaactgtgagtaacta

SEQ ID NO: 17856 - DNA, 20 bp, synthetic construct
  source 1..20: mol_type = other DNA
ccgttagcggcgttggggtt

SEQ ID NO: 17857 - DNA, 20 bp, synthetic construct
  source 1..20: mol_type = other DNA
caaggttgaggccgagttcc

SEQ ID NO: 17858 - DNA, 20 bp, synthetic construct
  source 1..20: mol_type = other DNA
tcctcgcttcctccgcggtc

SEQ ID NO: 17859 - DNA, 20 bp, synthetic construct
  source 1..20: mol_type = other DNA
tgatgcttccctgctccctc

SEQ ID NO: 17860 - DNA, 20 bp, synthetic construct
  source 1..20: mol_type = other DNA
gcaccctcgcgggcggaccc

SEQ ID NO: 17861 - DNA, 20 bp, synthetic construct
  source 1..20: mol_type = other DNA
gaagcggcgtcggcggctgg

SEQ ID NO: 17862 - DNA, 20 bp, synthetic construct
  source 1..20: mol_type = other DNA
aaatggcggcctacctgcag

SEQ ID NO: 17863 - DNA, 20 bp, synthetic construct
  source 1..20: mol_type = other DNA
ctgcagcgcggagcagaaag

SEQ ID NO: 17864 - DNA, 20 bp, synthetic construct
  source 1..20: mol_type = other DNA
cggtgtgggcgcaggctgca

SEQ ID NO: 17865 - DNA, 20 bp, synthetic construct
  source 1..20: mol_type = other DNA
tcccttcttcctctcccttt

SEQ ID NO: 17866 - DNA, 20 bp, synthetic construct
  source 1..20: mol_type = other DNA
cccgactctgtcctggacag

SEQ ID NO: 17867 - DNA, 20 bp, synthetic construct
  source 1..20: mol_type = other DNA
ggttctggaaacgccgggag

SEQ ID NO: 17868 - DNA, 20 bp, synthetic construct
  source 1..20: mol_type = other DNA
cgccggtgtccgcccgtgtc

SEQ ID NO: 17869 - DNA, 20 bp, synthetic construct
  source 1..20: mol_type = other DNA
ttcaggaaagcaagcagccc

SEQ ID NO: 17870 - DNA, 20 bp, synthetic construct
  source 1..20: mol_type = other DNA
gcgattgagtggccgaggaa

SEQ ID NO: 17871 - DNA, 20 bp, synthetic construct
  source 1..20: mol_type = other DNA
aaaatgacgaacacaaaggg

SEQ ID NO: 17872 - DNA, 20 bp, synthetic construct
  source 1..20: mol_type = other DNA
gattgtggtgttcagcatta

SEQ ID NO: 17873 - DNA, 20 bp, synthetic construct
  source 1..20: mol_type = other DNA
ctgtggagagccgggtgcga

SEQ ID NO: 17874 - DNA, 20 bp, synthetic construct
  source 1..20: mol_type = other DNA
ggaggacttgcaacactccg

SEQ ID NO: 17875 - DNA, 20 bp, synthetic construct
  source 1..20: mol_type = other DNA
tccatccatcttaaaggaag

SEQ ID NO: 17876 - DNA, 20 bp, synthetic construct
  source 1..20: mol_type = other DNA
ggcggcggcggcggtggctg

SEQ ID NO: 17877 - DNA, 20 bp, synthetic construct
  source 1..20: mol_type = other DNA
cccggatgtcagccccccgc

SEQ ID NO: 17878 - DNA, 20 bp, synthetic construct
  source 1..20: mol_type = other DNA
agtgttagcggggaacgctg

SEQ ID NO: 17879 - DNA, 20 bp, synthetic construct
  source 1..20: mol_type = other DNA
gcctccgccgcggctcgtgg

SEQ ID NO: 17880 - DNA, 20 bp, synthetic construct
  source 1..20: mol_type = other DNA
tctagacttcagtttcagtt

SEQ ID NO: 17881 - DNA, 20 bp, synthetic construct
  source 1..20: mol_type = other DNA
gaactgagaattacaccatc

SEQ ID NO: 17882 - DNA, 20 bp, synthetic construct
  source 1..20: mol_type = other DNA
ctggaacttccgcctggcag

SEQ ID NO: 17883 - DNA, 20 bp, synthetic construct
  source 1..20: mol_type = other DNA
cgcctcttgtgaggcgcgcg

SEQ ID NO: 17884 - DNA, 20 bp, synthetic construct
  source 1..20: mol_type = other DNA
aggcccgggtgcgaggaggg

SEQ ID NO: 17885 - DNA, 20 bp, synthetic construct
  source 1..20: mol_type = other DNA
tgctcaaaccgagttctgga

SEQ ID NO: 17886 - DNA, 20 bp, synthetic construct
  source 1..20: mol_type = other DNA
gtcgcaaatcctcctaagcc

SEQ ID NO: 17887 - DNA, 20 bp, synthetic construct
  source 1..20: mol_type = other DNA
tctagaaccgtagccagaca

SEQ ID NO: 17888 - DNA, 20 bp, synthetic construct
  source 1..20: mol_type = other DNA
ggctccttcctgcggtgctt

SEQ ID NO: 17889 - DNA, 20 bp, synthetic construct
  source 1..20: mol_type = other DNA
tcgcaccaaaaccgtgaaga

SEQ ID NO: 17890 - DNA, 20 bp, synthetic construct
  source 1..20: mol_type = other DNA
caaccagctagcgtgcaagg

SEQ ID NO: 17891 - DNA, 20 bp, synthetic construct
  source 1..20: mol_type = other DNA
tctccgcgcctgacccctcc

SEQ ID NO: 17892 - DNA, 20 bp, synthetic construct
  source 1..20: mol_type = other DNA
cgtgctctcgcgagatttgg

SEQ ID NO: 17893 - DNA, 20 bp, synthetic construct
  source 1..20: mol_type = other DNA
tccctcgggtccagttcagc

SEQ ID NO: 17894 - DNA, 20 bp, synthetic construct
  source 1..20: mol_type = other DNA
agtagctcctgggacatcgc

SEQ ID NO: 17895 - DNA, 20 bp, synthetic construct
  source 1..20: mol_type = other DNA
atttcaagagtggccaggtg

SEQ ID NO: 17896 - DNA, 20 bp, synthetic construct
  source 1..20: mol_type = other DNA
gagctccgcgtgtagctacg

SEQ ID NO: 17897 - DNA, 20 bp, synthetic construct
  source 1..20: mol_type = other DNA
agaaacataagtcccgcgcg

SEQ ID NO: 17898 - DNA, 20 bp, synthetic construct
  source 1..20: mol_type = other DNA
atgctttgttaacagtgaag

SEQ ID NO: 17899 - DNA, 20 bp, synthetic construct
  source 1..20: mol_type = other DNA
atggcgacggagcatcccga

SEQ ID NO: 17900 - DNA, 20 bp, synthetic construct
  source 1..20: mol_type = other DNA
ccgcgctcggcacgacatga

SEQ ID NO: 17901 - DNA, 20 bp, synthetic construct
  source 1..20: mol_type = other DNA
gtgagggacaagcgtttgcc

SEQ ID NO: 17902 - DNA, 20 bp, synthetic construct
  source 1..20: mol_type = other DNA
gctggcgaggcgcgtgggac

SEQ ID NO: 17903 - DNA, 20 bp, synthetic construct
  source 1..20: mol_type = other DNA
ggaactgggactccctgtgg

SEQ ID NO: 17904 - DNA, 20 bp, synthetic construct
  source 1..20: mol_type = other DNA
tctctcgccaggcgtcctcg

SEQ ID NO: 17905 - DNA, 20 bp, synthetic construct
  source 1..20: mol_type = other DNA
gcggcggcggcggctgcagc

SEQ ID NO: 17906 - DNA, 20 bp, synthetic construct
  source 1..20: mol_type = other DNA
ttgtgtagcctgaggcggcg

SEQ ID NO: 17907 - DNA, 20 bp, synthetic construct
  source 1..20: mol_type = other DNA
gaacctcaagagagggaggt

SEQ ID NO: 17908 - DNA, 20 bp, synthetic construct
  source 1..20: mol_type = other DNA
cccaggggccggcgcacgaa

SEQ ID NO: 17909 - DNA, 20 bp, synthetic construct
  source 1..20: mol_type = other DNA
agagaaggtctcattcggtg

SEQ ID NO: 17910 - DNA, 20 bp, synthetic construct
  source 1..20: mol_type = other DNA
caccatcgagccgggaagat

SEQ ID NO: 17911 - DNA, 20 bp, synthetic construct
  source 1..20: mol_type = other DNA
ggccgcaccgtgtgggctgt

SEQ ID NO: 17912 - DNA, 20 bp, synthetic construct
  source 1..20: mol_type = other DNA
ggcgcctggctgccaggcta

SEQ ID NO: 17913 - DNA, 20 bp, synthetic construct
  source 1..20: mol_type = other DNA
ccgagcgaacttggcccagg

SEQ ID NO: 17914 - DNA, 20 bp, synthetic construct
  source 1..20: mol_type = other DNA
gagccggggtcccggtagct

SEQ ID NO: 17915 - DNA, 20 bp, synthetic construct
  source 1..20: mol_type = other DNA
tggcacgggttcgcacaccc

SEQ ID NO: 17916 - DNA, 20 bp, synthetic construct
  source 1..20: mol_type = other DNA
aacattgaccaccacacact

SEQ ID NO: 17917 - DNA, 20 bp, synthetic construct
  source 1..20: mol_type = other DNA
gcgagccggaggaggccgcg

SEQ ID NO: 17918 - DNA, 20 bp, synthetic construct
  source 1..20: mol_type = other DNA
cccctcgcccttggcagcct

SEQ ID NO: 17919 - DNA, 20 bp, synthetic construct
  source 1..20: mol_type = other DNA
ccccgggagccgcactccag

SEQ ID NO: 17920 - DNA, 20 bp, synthetic construct
  source 1..20: mol_type = other DNA
ctgacggattcgtactacaa

SEQ ID NO: 17921 - DNA, 20 bp, synthetic construct
  source 1..20: mol_type = other DNA
cagagaggcgctgctgacac

SEQ ID NO: 17922 - DNA, 20 bp, synthetic construct
  source 1..20: mol_type = other DNA
agggccggggtcttgggagt

SEQ ID NO: 17923 - DNA, 20 bp, synthetic construct
  source 1..20: mol_type = other DNA
ctgaactggctcctggggcc

SEQ ID NO: 17924 - DNA, 20 bp, synthetic construct
  source 1..20: mol_type = other DNA
ctccctagccgatgggaaat

SEQ ID NO: 17925 - DNA, 20 bp, synthetic construct
  source 1..20: mol_type = other DNA
tacactggctttttgattct

SEQ ID NO: 17926 - DNA, 20 bp, synthetic construct
  source 1..20: mol_type = other DNA
gaggaagggagggggagaga

SEQ ID NO: 17927 - DNA, 20 bp, synthetic construct
  source 1..20: mol_type = other DNA
ccttgcttgctcgcgctttc

SEQ ID NO: 17928 - DNA, 20 bp, synthetic construct
  source 1..20: mol_type = other DNA
agtggactccggggctccta

SEQ ID NO: 17929 - DNA, 20 bp, synthetic construct
  source 1..20: mol_type = other DNA
ggagacccccacattcaaga

SEQ ID NO: 17930 - DNA, 20 bp, synthetic construct
  source 1..20: mol_type = other DNA
ctgtgaggtgttcagcatta

SEQ ID NO: 17931 - DNA, 20 bp, synthetic construct
  source 1..20: mol_type = other DNA
ctctcctccttccccgctgc

SEQ ID NO: 17932 - DNA, 20 bp, synthetic construct
  source 1..20: mol_type = other DNA
gtccggactctttttcctct

SEQ ID NO: 17933 - DNA, 20 bp, synthetic construct
  source 1..20: mol_type = other DNA
ggaggctgcccttcggggtc

SEQ ID NO: 17934 - DNA, 20 bp, synthetic construct
  source 1..20: mol_type = other DNA
atatttgagtaaagtgagtt

SEQ ID NO: 17935 - DNA, 20 bp, synthetic construct
  source 1..20: mol_type = other DNA
gcgtgggccaaacctgcgcc

SEQ ID NO: 17936 - DNA, 20 bp, synthetic construct
  source 1..20: mol_type = other DNA
cccagataatcttccaatgg

SEQ ID NO: 17937 - DNA, 20 bp, synthetic construct
  source 1..20: mol_type = other DNA
accgggagacaggagcgggg

SEQ ID NO: 17938 - DNA, 20 bp, synthetic construct
  source 1..20: mol_type = other DNA
accttccaggactgggccca

SEQ ID NO: 17939 - DNA, 20 bp, synthetic construct
  source 1..20: mol_type = other DNA
gcgggtgacgcgacgacggc

SEQ ID NO: 17940 - DNA, 20 bp, synthetic construct
  source 1..20: mol_type = other DNA
catcgcgggaggcgcatggc

SEQ ID NO: 17941 - DNA, 20 bp, synthetic construct
  source 1..20: mol_type = other DNA
agctcagctgatcggttgcc

SEQ ID NO: 17942 - DNA, 20 bp, synthetic construct
  source 1..20: mol_type = other DNA
actgccgtgatgctgaagtt

SEQ ID NO: 17943 - DNA, 20 bp, synthetic construct
  source 1..20: mol_type = other DNA
ggcgacggcgaggagatagt

SEQ ID NO: 17944 - DNA, 20 bp, synthetic construct
  source 1..20: mol_type = other DNA
cgcctcctgacaagcgggag

SEQ ID NO: 17945 - DNA, 20 bp, synthetic construct
  source 1..20: mol_type = other DNA
tgcgaccgtatccgctagcg

SEQ ID NO: 17946 - DNA, 20 bp, synthetic construct
  source 1..20: mol_type = other DNA
aatcaggtaggtaactctct

SEQ ID NO: 17947 - DNA, 20 bp, synthetic construct
  source 1..20: mol_type = other DNA
gtgggagtggagtggagcgg

SEQ ID NO: 17948 - DNA, 20 bp, synthetic construct
  source 1..20: mol_type = other DNA
aacaactgctcagagtgcga

SEQ ID NO: 17949 - DNA, 20 bp, synthetic construct
  source 1..20: mol_type = other DNA
ggtgtgtttatatgcctgac

SEQ ID NO: 17950 - DNA, 20 bp, synthetic construct
  source 1..20: mol_type = other DNA
cgcctcgctcctcttcaggg

SEQ ID NO: 17951 - DNA, 20 bp, synthetic construct
  source 1..20: mol_type = other DNA
cacgctctgcgaggccttga

SEQ ID NO: 17952 - DNA, 20 bp, synthetic construct
  source 1..20: mol_type = other DNA
gccccgcctgagctcaggag

SEQ ID NO: 17953 - DNA, 20 bp, synthetic construct
  source 1..20: mol_type = other DNA
ctcgagcagtctctggaaca

SEQ ID NO: 17954 - DNA, 20 bp, synthetic construct
  source 1..20: mol_type = other DNA
aagaagaagagggggaggag

SEQ ID NO: 17955 - DNA, 20 bp, synthetic construct
  source 1..20: mol_type = other DNA
cgcgtcacgcggtggtgaat

SEQ ID NO: 17956 - DNA, 20 bp, synthetic construct
  source 1..20: mol_type = other DNA
gaagtggtcccgcagaggcg

SEQ ID NO: 17957 - DNA, 20 bp, synthetic construct
  source 1..20: mol_type = other DNA
cagcgctgccatggctgggg

SEQ ID NO: 17958 - DNA, 20 bp, synthetic construct
  source 1..20: mol_type = other DNA
ccagatcttttctcggatcc

SEQ ID NO: 17959 - DNA, 20 bp, synthetic construct
  source 1..20: mol_type = other DNA
gagacatccaggagggcgac

SEQ ID NO: 17960 - DNA, 20 bp, synthetic construct
  source 1..20: mol_type = other DNA
ccaccgtccgggagccgccg

SEQ ID NO: 17961 - DNA, 20 bp, synthetic construct
  source 1..20: mol_type = other DNA
tttgggggcttggcttagcg

SEQ ID NO: 17962 - DNA, 20 bp, synthetic construct
  source 1..20: mol_type = other DNA
ttggtctcaggtgtggactc

SEQ ID NO: 17963 - DNA, 20 bp, synthetic construct
  source 1..20: mol_type = other DNA
ggctgccgggagagatgctg

SEQ ID NO: 17964 - DNA, 20 bp, synthetic construct
  source 1..20: mol_type = other DNA
gaaggcagagtatgtgcatc

SEQ ID NO: 17965 - DNA, 20 bp, synthetic construct
  source 1..20: mol_type = other DNA
gcgccagcgctgcatccctg

SEQ ID NO: 17966 - DNA, 20 bp, synthetic construct
  source 1..20: mol_type = other DNA
agatccttgttgccgtccct

SEQ ID NO: 17967 - DNA, 20 bp, synthetic construct
  source 1..20: mol_type = other DNA
agccttcgtccctgcggtgc

SEQ ID NO: 17968 - DNA, 20 bp, synthetic construct
  source 1..20: mol_type = other DNA
ccagcgtccgaacgggcaga

SEQ ID NO: 17969 - DNA, 20 bp, synthetic construct
  source 1..20: mol_type = other DNA
gccccctagttcccaaaggg

SEQ ID NO: 17970 - DNA, 20 bp, synthetic construct
  source 1..20: mol_type = other DNA
ctgtttctttctttcttcct

SEQ ID NO: 17971 - DNA, 20 bp, synthetic construct
  source 1..20: mol_type = other DNA
tggagccctgacattgctgc

SEQ ID NO: 17972 - DNA, 20 bp, synthetic construct
  source 1..20: mol_type = other DNA
tccgtcttccttctgactgg

SEQ ID NO: 17973 - DNA, 20 bp, synthetic construct
  source 1..20: mol_type = other DNA
cctgtctgtggcaccagaca

SEQ ID NO: 17974 - DNA, 20 bp, synthetic construct
  source 1..20: mol_type = other DNA
tcccgggcagaaaggcgaca

SEQ ID NO: 17975 - DNA, 20 bp, synthetic construct
  source 1..20: mol_type = other DNA
ccagcgtcctgtcgcctcct

SEQ ID NO: 17976 - DNA, 20 bp, synthetic construct
  source 1..20: mol_type = other DNA
ctgcctcatggaaatgcctt

SEQ ID NO: 17977 - DNA, 20 bp, synthetic construct
  source 1..20: mol_type = other DNA
accggccgcgggcataaaag

SEQ ID NO: 17978 - DNA, 20 bp, synthetic construct
  source 1..20: mol_type = other DNA
cacggcccatgtgtcgcact

SEQ ID NO: 17979 - DNA, 20 bp, synthetic construct
  source 1..20: mol_type = other DNA
ggaggccgcgcccgggaccc

SEQ ID NO: 17980 - DNA, 20 bp, synthetic construct
  source 1..20: mol_type = other DNA
aggtgcggaccttaaactca

SEQ ID NO: 17981 - DNA, 20 bp, synthetic construct
  source 1..20: mol_type = other DNA
agccacgggcccacgcccgc

SEQ ID NO: 17982 - DNA, 20 bp, synthetic construct
  source 1..20: mol_type = other DNA
gctcggggcgacgcggcgct

SEQ ID NO: 17983 - DNA, 20 bp, synthetic construct
  source 1..20: mol_type = other DNA
tctttcttaaaggactgatt

SEQ ID NO: 17984 - DNA, 20 bp, synthetic construct
  source 1..20: mol_type = other DNA
ctcgcaggcgccctcagatc

SEQ ID NO: 17985 - DNA, 20 bp, synthetic construct
  source 1..20: mol_type = other DNA
ctccaactccagttctttcc

SEQ ID NO: 17986 - DNA, 20 bp, synthetic construct
  source 1..20: mol_type = other DNA
ggagccagacgtgtggagtc

SEQ ID NO: 17987 - DNA, 20 bp, synthetic construct
  source 1..20: mol_type = other DNA
ggcaactcccacgcaggccg

SEQ ID NO: 17988 - DNA, 20 bp, synthetic construct
  source 1..20: mol_type = other DNA
gcgccgccccgcctcctgtc

SEQ ID NO: 17989 - DNA, 20 bp, synthetic construct
  source 1..20: mol_type = other DNA
gctggaggcatgcccacagc

SEQ ID NO: 17990 - DNA, 20 bp, synthetic construct
  source 1..20: mol_type = other DNA
gagtgcggcgcagcgcagct

SEQ ID NO: 17991 - DNA, 20 bp, synthetic construct
  source 1..20: mol_type = other DNA
gtccttccgaggtgaaggaa

SEQ ID NO: 17992 - DNA, 20 bp, synthetic construct
  source 1..20: mol_type = other DNA
gagtagtctgcctgaccacc

SEQ ID NO: 17993 - DNA, 20 bp, synthetic construct
  source 1..20: mol_type = other DNA
ctcaggcgttgctgtttctt

SEQ ID NO: 17994 - DNA, 20 bp, synthetic construct
  source 1..20: mol_type = other DNA
cctcgcagagttgtttctcg

SEQ ID NO: 17995 - DNA, 20 bp, synthetic construct
  source 1..20: mol_type = other DNA
cctccagccagtgctgacca

SEQ ID NO: 17996 - DNA, 20 bp, synthetic construct
  source 1..20: mol_type = other DNA
gcgcctatcgctggctcttg

SEQ ID NO: 17997 - DNA, 20 bp, synthetic construct
  source 1..20: mol_type = other DNA
ctcagtccatcagggggggg

SEQ ID NO: 17998 - DNA, 20 bp, synthetic construct
  source 1..20: mol_type = other DNA
ccagaactagtggcgggctg

SEQ ID NO: 17999 - DNA, 20 bp, synthetic construct
  source 1..20: mol_type = other DNA
tcaggggacaggccaaccca

SEQ ID NO: 18000 - DNA, 20 bp, synthetic construct
  source 1..20: mol_type = other DNA
tggcggcggtggcggctgcg

SEQ ID NO: 18001 - DNA, 20 bp, synthetic construct
  source 1..20: mol_type = other DNA
gtcctcccgggcagaaaggc

SEQ ID NO: 18002 - DNA, 20 bp, synthetic construct
  source 1..20: mol_type = other DNA
ttctgaggccttcccagcta

SEQ ID NO: 18003 - DNA, 20 bp, synthetic construct
  source 1..20: mol_type = other DNA
gaaggcggacggcgagcgcc

SEQ ID NO: 18004 - DNA, 20 bp, synthetic construct
  source 1..20: mol_type = other DNA
gagggaggagaactgggggc

SEQ ID NO: 18005 - DNA, 20 bp, synthetic construct
  source 1..20: mol_type = other DNA
tcgaggctcctcccgctgcg

SEQ ID NO: 18006 - DNA, 20 bp, synthetic construct
  source 1..20: mol_type = other DNA
cacagctggttggcgtcgcc

SEQ ID NO: 18007 - DNA, 20 bp, synthetic construct
  source 1..20: mol_type = other DNA
tcctgcctcccggcctggtc

SEQ ID NO: 18008 - DNA, 20 bp, synthetic construct
  source 1..20: mol_type = other DNA
gtcctggtccacgagttgga

SEQ ID NO: 18009 - DNA, 20 bp, synthetic construct
  source 1..20: mol_type = other DNA
ttccccgtaggcagcccgcc

SEQ ID NO: 18010 - DNA, 20 bp, synthetic construct
  source 1..20: mol_type = other DNA
ttccagtggctcgcaagcct

SEQ ID NO: 18011 - DNA, 20 bp, synthetic construct
  source 1..20: mol_type = other DNA
agccctcaggcgaacctctc

SEQ ID NO: 18012 - DNA, 20 bp, synthetic construct
  source 1..20: mol_type = other DNA
aaaagctcctaggtgcgcgg

SEQ ID NO: 18013 - DNA, 20 bp, synthetic construct
  source 1..20: mol_type = other DNA
gttgtgcatccagaggtgga

SEQ ID NO: 18014 - DNA, 20 bp, synthetic construct
  source 1..20: mol_type = other DNA
gtccctgactttatatggct

SEQ ID NO: 18015 - DNA, 20 bp, synthetic construct
  source 1..20: mol_type = other DNA
ccgtttgtcccttgcggtac

SEQ ID NO: 18016 - DNA, 20 bp, synthetic construct
  source 1..20: mol_type = other DNA
cgagccctgcgagggccgat

SEQ ID NO: 18017 - DNA, 20 bp, synthetic construct
  source 1..20: mol_type = other DNA
gcaccttcttgccaagcctc

SEQ ID NO: 18018 - DNA, 20 bp, synthetic construct
  source 1..20: mol_type = other DNA
acaaaccccacccacaaagc

SEQ ID NO: 18019 - DNA, 20 bp, synthetic construct
  source 1..20: mol_type = other DNA
ggcgagcaacgctggagcat

SEQ ID NO: 18020 - DNA, 20 bp, synthetic construct
  source 1..20: mol_type = other DNA
tgccggcagctcttgacccg

SEQ ID NO: 18021 - DNA, 20 bp, synthetic construct
  source 1..20: mol_type = other DNA
ggccggtgagctcactagct

SEQ ID NO: 18022 - DNA, 20 bp, synthetic construct
  source 1..20: mol_type = other DNA
ggcgctggtgtaggctccaa

SEQ ID NO: 18023 - DNA, 20 bp, synthetic construct
  source 1..20: mol_type = other DNA
ctctgggccgccacctccgc

SEQ ID NO: 18024 - DNA, 20 bp, synthetic construct
  source 1..20: mol_type = other DNA
cactccgaagtggcagcagc

SEQ ID NO: 18025 - DNA, 20 bp, synthetic construct
  source 1..20: mol_type = other DNA
tcaatttggtactctgtaac

SEQ ID NO: 18026 - DNA, 20 bp, synthetic construct
  source 1..20: mol_type = other DNA
gcttctttgtttcgtgaaga

SEQ ID NO: 18027 - DNA, 20 bp, synthetic construct
  source 1..20: mol_type = other DNA
aggaacgccggctcttcgcc

SEQ ID NO: 18028 - DNA, 20 bp, synthetic construct
  source 1..20: mol_type = other DNA
gacagggaacagccagacga

SEQ ID NO: 18029 - DNA, 20 bp, synthetic construct
  source 1..20: mol_type = other DNA
tggcagtgcgggcagagccc

SEQ ID NO: 18030 - DNA, 20 bp, synthetic construct
  source 1..20: mol_type = other DNA
ccatccccgtaatcagtgaa

SEQ ID NO: 18031 - DNA, 20 bp, synthetic construct
  source 1..20: mol_type = other DNA
agagctgtccccggttctcc

SEQ ID NO: 18032 - DNA, 20 bp, synthetic construct
  source 1..20: mol_type = other DNA
tgcactgcagcgtagccgct

SEQ ID NO: 18033 - DNA, 20 bp, synthetic construct
  source 1..20: mol_type = other DNA
ttaatgcgaagagggggagg

SEQ ID NO: 18034 - DNA, 20 bp, synthetic construct
  source 1..20: mol_type = other DNA
cactctcagaaatcagactt

SEQ ID NO: 18035 - DNA, 20 bp, synthetic construct
  source 1..20: mol_type = other DNA
ggatctttgtcgctagctcc

SEQ ID NO: 18036 - DNA, 20 bp, synthetic construct
  source 1..20: mol_type = other DNA
gtagttccacctcccgccgc

SEQ ID NO: 18037 - DNA, 20 bp, synthetic construct
  source 1..20: mol_type = other DNA
ggaggggaaggcgcgaggtt

SEQ ID NO: 18038 - DNA, 20 bp, synthetic construct
  source 1..20: mol_type = other DNA
tcttgctgctcccctgaggt

SEQ ID NO: 18039 - DNA, 20 bp, synthetic construct
  source 1..20: mol_type = other DNA
cgccgcgtcgccggtgcctg

SEQ ID NO: 18040 - DNA, 20 bp, synthetic construct
  source 1..20: mol_type = other DNA
ccccagtcgtcgtcacacac

SEQ ID NO: 18041 - DNA, 20 bp, synthetic construct
  source 1..20: mol_type = other DNA
ctcctgctctggggtagtac

SEQ ID NO: 18042 - DNA, 20 bp, synthetic construct
  source 1..20: mol_type = other DNA
ccgtctcctgcgcctcccag

SEQ ID NO: 18043 - DNA, 20 bp, synthetic construct
  source 1..20: mol_type = other DNA
acatcgggctggggagtgac

SEQ ID NO: 18044 - DNA, 20 bp, synthetic construct
  source 1..20: mol_type = other DNA
acgcaaacgtggggccgcct

SEQ ID NO: 18045 - DNA, 20 bp, synthetic construct
  source 1..20: mol_type = other DNA
aggccctgcttagcccttcc

SEQ ID NO: 18046 - DNA, 20 bp, synthetic construct
  source 1..20: mol_type = other DNA
gcggggtcgcagggttggga

SEQ ID NO: 18047 - DNA, 20 bp, synthetic construct
  source 1..20: mol_type = other DNA
ctgcctcagccactgcctcc

SEQ ID NO: 18048 - DNA, 20 bp, synthetic construct
  source 1..20: mol_type = other DNA
gcctaaccctccttctcttc

SEQ ID NO: 18049 - DNA, 20 bp, synthetic construct
  source 1..20: mol_type = other DNA
ggcggccgaaccctccgcaa

SEQ ID NO: 18050 - DNA, 20 bp, synthetic construct
  source 1..20: mol_type = other DNA
cttcgccccggagctggccc

SEQ ID NO: 18051 - DNA, 20 bp, synthetic construct
  source 1..20: mol_type = other DNA
ttcaaaaaacccgcacacac

SEQ ID NO: 18052 - DNA, 20 bp, synthetic construct
  source 1..20: mol_type = other DNA
cctgctgcgggggaccgcgc

SEQ ID NO: 18053 - DNA, 20 bp, synthetic construct
  source 1..20: mol_type = other DNA
ggccgggctcggggacgccc

SEQ ID NO: 18054 - DNA, 20 bp, synthetic construct
  source 1..20: mol_type = other DNA
tccgcgcaaactctggcttc

SEQ ID NO: 18055 - DNA, 20 bp, synthetic construct
  source 1..20: mol_type = other DNA
agtgctgcgcgggaaggcac

SEQ ID NO: 18056 - DNA, 20 bp, synthetic construct
  source 1..20: mol_type = other DNA
cgcgaggagctagagagagc

SEQ ID NO: 18057 - DNA, 20 bp, synthetic construct
  source 1..20: mol_type = other DNA
ccccaggacttctgtgactc

SEQ ID NO: 18058 - DNA, 20 bp, synthetic construct
  source 1..20: mol_type = other DNA
gccgtagggcggtcagaagg

SEQ ID NO: 18059 - DNA, 20 bp, synthetic construct
  source 1..20: mol_type = other DNA
ggcggtgagagaggcggggg

SEQ ID NO: 18060 - DNA, 20 bp, synthetic construct
  source 1..20: mol_type = other DNA
gatggcggctgcgtcggggt

SEQ ID NO: 18061 - DNA, 20 bp, synthetic construct
  source 1..20: mol_type = other DNA
cgccccccggcaaactttcg

SEQ ID NO: 18062 - DNA, 20 bp, synthetic construct
  source 1..20: mol_type = other DNA
ccaaaatggcgcgggtgctg

SEQ ID NO: 18063 - DNA, 20 bp, synthetic construct
  source 1..20: mol_type = other DNA
gactctcaaaaggaaatagg

SEQ ID NO: 18064 - DNA, 20 bp, synthetic construct
  source 1..20: mol_type = other DNA
tccgccctcacagccaccgc

SEQ ID NO: 18065 - DNA, 20 bp, synthetic construct
  source 1..20: mol_type = other DNA
ggggaccgaacgagcagccc

SEQ ID NO: 18066 - DNA, 20 bp, synthetic construct
  source 1..20: mol_type = other DNA
gattctctcccaggccacaa

SEQ ID NO: 18067 - DNA, 20 bp, synthetic construct
  source 1..20: mol_type = other DNA
tccggcagctactggtcatg

SEQ ID NO: 18068 - DNA, 20 bp, synthetic construct
  source 1..20: mol_type = other DNA
tggctgctgtgattgcacat

SEQ ID NO: 18069 - DNA, 20 bp, synthetic construct
  source 1..20: mol_type = other DNA
gtgcgcgcctgggacctgaa

SEQ ID NO: 18070 - DNA, 20 bp, synthetic construct
  source 1..20: mol_type = other DNA
tggcccgagccagcatgatc

SEQ ID NO: 18071 - DNA, 20 bp, synthetic construct
  source 1..20: mol_type = other DNA
ccacgtgcgaaagccccgga

SEQ ID NO: 18072 - DNA, 20 bp, synthetic construct
  source 1..20: mol_type = other DNA
acggcttccccacgggagga

SEQ ID NO: 18073 - DNA, 20 bp, synthetic construct
  source 1..20: mol_type = other DNA
gctggccgccttggcgctgc

SEQ ID NO: 18074 - DNA, 20 bp, synthetic construct
  source 1..20: mol_type = other DNA
gctttctgccccttctctcg

SEQ ID NO: 18075 - DNA, 20 bp, synthetic construct
  source 1..20: mol_type = other DNA
caggggcacgagccgggggc

SEQ ID NO: 18076 - DNA, 20 bp, synthetic construct
  source 1..20: mol_type = other DNA
tcccgcgacagcaagaggcc

SEQ ID NO: 18077 - DNA, 20 bp, synthetic construct
  source 1..20: mol_type = other DNA
ttctgccaagatcggaactg

SEQ ID NO: 18078 - DNA, 20 bp, synthetic construct
  source 1..20: mol_type = other DNA
ctgccttatgctgtctcatc

SEQ ID NO: 18079 - DNA, 20 bp, synthetic construct
  source 1..20: mol_type = other DNA
cctcgcctggctcccagctg

SEQ ID NO: 18080 - DNA, 20 bp, synthetic construct
  source 1..20: mol_type = other DNA
actgcctcccttcctctttc

SEQ ID NO: 18081 - DNA, 20 bp, synthetic construct
  source 1..20: mol_type = other DNA
gaccgcctcgcggctgcttc

SEQ ID NO: 18082 - DNA, 20 bp, synthetic construct
  source 1..20: mol_type = other DNA
ggcgttctagcgcatcgcgg

SEQ ID NO: 18083 - DNA, 20 bp, synthetic construct
  source 1..20: mol_type = other DNA
gaagcggaggttccgggctc

SEQ ID NO: 18084 - DNA, 20 bp, synthetic construct
  source 1..20: mol_type = other DNA
ccgacgcttccgccgggtcc

SEQ ID NO: 18085 - DNA, 20 bp, synthetic construct
  source 1..20: mol_type = other DNA
cacgccggctcttcccgggg

SEQ ID NO: 18086 - DNA, 20 bp, synthetic construct
  source 1..20: mol_type = other DNA
catgtataagctggcctcct

SEQ ID NO: 18087 - DNA, 20 bp, synthetic construct
  source 1..20: mol_type = other DNA
gggaatcgcagtggccgagg

SEQ ID NO: 18088 - DNA, 20 bp, synthetic construct
  source 1..20: mol_type = other DNA
cagcagggtccaggggtaga

SEQ ID NO: 18089 - DNA, 20 bp, synthetic construct
  source 1..20: mol_type = other DNA
gcaggttttcctagtcccta

SEQ ID NO: 18090 - DNA, 20 bp, synthetic construct
  source 1..20: mol_type = other DNA
gcgaacccgcgtgcaacctg

SEQ ID NO: 18091 - DNA, 20 bp, synthetic construct
  source 1..20: mol_type = other DNA
cgcttccgtctccgccgggg

SEQ ID NO: 18092 - DNA, 20 bp, synthetic construct
  source 1..20: mol_type = other DNA
gtggcgcgcgggtccggcgg

SEQ ID NO: 18093 - DNA, 20 bp, synthetic construct
  source 1..20: mol_type = other DNA
caaattttgccacattaaca

SEQ ID NO: 18094 - DNA, 20 bp, synthetic construct
  source 1..20: mol_type = other DNA
gacctgctcggctggaacgt

SEQ ID NO: 18095 - DNA, 20 bp, synthetic construct
  source 1..20: mol_type = other DNA
ccgaggtgctaggagttgcc

SEQ ID NO: 18096 - DNA, 20 bp, synthetic construct
  source 1..20: mol_type = other DNA
gcttcacttgtggcaagatc

SEQ ID NO: 18097 - DNA, 20 bp, synthetic construct
  source 1..20: mol_type = other DNA
tctggcggagggaggtgttt

SEQ ID NO: 18098 - DNA, 20 bp, synthetic construct
  source 1..20: mol_type = other DNA
cctaattcgggaaacgtgca

SEQ ID NO: 18099 - DNA, 20 bp, synthetic construct
  source 1..20: mol_type = other DNA
tgggcctccttgcgtttccg

SEQ ID NO: 18100 - DNA, 20 bp, synthetic construct
  source 1..20: mol_type = other DNA
ccgccatggaagacacgccg

SEQ ID NO: 18101 - DNA, 20 bp, synthetic construct
  source 1..20: mol_type = other DNA
tgctgcctgccgggcagatg

SEQ ID NO: 18102 - DNA, 20 bp, synthetic construct
  source 1..20: mol_type = other DNA
attttgacaatgtcaagatt

SEQ ID NO: 18103 - DNA, 20 bp, synthetic construct
  source 1..20: mol_type = other DNA
ccggacgaggctcgctgcgc

SEQ ID NO: 18104 - DNA, 20 bp, synthetic construct
  source 1..20: mol_type = other DNA
tctccggtagctcctacccc

SEQ ID NO: 18105 - DNA, 20 bp, synthetic construct
  source 1..20: mol_type = other DNA
gcgcgcgcgaggccttggga

SEQ ID NO: 18106 - DNA, 20 bp, synthetic construct
  source 1..20: mol_type = other DNA
gtggcgttggtgggaagcgc

SEQ ID NO: 18107 - DNA, 20 bp, synthetic construct
  source 1..20: mol_type = other DNA
cgattggaacgcctccccat

SEQ ID NO: 18108 - DNA, 20 bp, synthetic construct
  source 1..20: mol_type = other DNA
ggaaaggcctggccgagagc

SEQ ID NO: 18109 - DNA, 20 bp, synthetic construct
  source 1..20: mol_type = other DNA
gccgtggctccgacttgggc

SEQ ID NO: 18110 - DNA, 20 bp, synthetic construct
  source 1..20: mol_type = other DNA
gattacgtacagagcgagtc

SEQ ID NO: 18111 - DNA, 20 bp, synthetic construct
  source 1..20: mol_type = other DNA
gcgcagcttgcagaggtctc

SEQ ID NO: 18112 - DNA, 20 bp, synthetic construct
  source 1..20: mol_type = other DNA
acatgcgcaatagcgagacg

SEQ ID NO: 18113 - DNA, 20 bp, synthetic construct
  source 1..20: mol_type = other DNA
gaaaatttcagctgtagccc

SEQ ID NO: 18114 - DNA, 20 bp, synthetic construct
  source 1..20: mol_type = other DNA
cccctccggctagctcgctg

SEQ ID NO: 18115 - DNA, 20 bp, synthetic construct
  source 1..20: mol_type = other DNA
gtcaaactcccgcagacttc

SEQ ID NO: 18116 - DNA, 20 bp, synthetic construct
  source 1..20: mol_type = other DNA
actatctttctagacaaggc

SEQ ID NO: 18117 - DNA, 20 bp, synthetic construct
  source 1..20: mol_type = other DNA
gggagcgcgagagccccccg

SEQ ID NO: 18118 - DNA, 20 bp, synthetic construct
  source 1..20: mol_type = other DNA
cccaggaggcctggcgggcc

SEQ ID NO: 18119 - DNA, 20 bp, synthetic construct
  source 1..20: mol_type = other DNA
agactcggcggtcgccacct

SEQ ID NO: 18120 - DNA, 20 bp, synthetic construct
  source 1..20: mol_type = other DNA
ccaggggatttcaaagagct

SEQ ID NO: 18121 - DNA, 20 bp, synthetic construct
  source 1..20: mol_type = other DNA
cgccaatcttcgaacgcagg

SEQ ID NO: 18122 - DNA, 20 bp, synthetic construct
  source 1..20: mol_type = other DNA
gtgtcttctggttggagtct

SEQ ID NO: 18123 - DNA, 20 bp, synthetic construct
  source 1..20: mol_type = other DNA
ggaggaggaggagatgactg

SEQ ID NO: 18124 - DNA, 20 bp, synthetic construct
  source 1..20: mol_type = other DNA
gccccgcgccgcttctccct

SEQ ID NO: 18125 - DNA, 20 bp, synthetic construct
  source 1..20: mol_type = other DNA
caaagaagaaccatgaggct

SEQ ID NO: 18126 - DNA, 20 bp, synthetic construct
  source 1..20: mol_type = other DNA
tcgttaactaattcaacaaa

SEQ ID NO: 18127 - DNA, 20 bp, synthetic construct
  source 1..20: mol_type = other DNA
tcgcagtcggctggcggcga

SEQ ID NO: 18128 - DNA, 20 bp, synthetic construct
  source 1..20: mol_type = other DNA
ccccgagtggaggtcggctg

SEQ ID NO: 18129 - DNA, 20 bp, synthetic construct
  source 1..20: mol_type = other DNA
gactcgcgctccggctgctg

SEQ ID NO: 18130 - DNA, 20 bp, synthetic construct
  source 1..20: mol_type = other DNA
tcaaccagctactcattgga

SEQ ID NO: 18131 - DNA, 20 bp, synthetic construct
  source 1..20: mol_type = other DNA
ttttttctccccccttctct

SEQ ID NO: 18132 - DNA, 20 bp, synthetic construct
  source 1..20: mol_type = other DNA
ctgtctgggtactgccagcc

SEQ ID NO: 18133 - DNA, 20 bp, synthetic construct
  source 1..20: mol_type = other DNA
ccacctgccctgcgccatct

SEQ ID NO: 18134 - DNA, 20 bp, synthetic construct
  source 1..20: mol_type = other DNA
ggggacagccgggcaagcag

SEQ ID NO: 18135 - DNA, 20 bp, synthetic construct
  source 1..20: mol_type = other DNA
ccctttcgggaggaagtttt

SEQ ID NO: 18136 - DNA, 20 bp, synthetic construct
  source 1..20: mol_type = other DNA
gcaaacacagcttccaaacc

SEQ ID NO: 18137 - DNA, 20 bp, synthetic construct
  source 1..20: mol_type = other DNA
tctatttccggtgtattgta

SEQ ID NO: 18138 - DNA, 20 bp, synthetic construct
  source 1..20: mol_type = other DNA
ttagcgccatctgctcgcgg

SEQ ID NO: 18139 - DNA, 20 bp, synthetic construct
  source 1..20: mol_type = other DNA
gcggttagggctgtgtaggg

SEQ ID NO: 18140 - DNA, 20 bp, synthetic construct
  source 1..20: mol_type = other DNA
tgtctcaagaatcagagtcg

SEQ ID NO: 18141 - DNA, 20 bp, synthetic construct
  source 1..20: mol_type = other DNA
aaccccggcagccctacaca

SEQ ID NO: 18142 - DNA, 20 bp, synthetic construct
  source 1..20: mol_type = other DNA
ccggagccgactacggagga

SEQ ID NO: 18143 - DNA, 20 bp, synthetic construct
  source 1..20: mol_type = other DNA
ccaagcatgccctgctctct

SEQ ID NO: 18144 - DNA, 20 bp, synthetic construct
  source 1..20: mol_type = other DNA
gacctggatgccctgctctc

SEQ ID NO: 18145 - DNA, 20 bp, synthetic construct
  source 1..20: mol_type = other DNA
tagacttcgggctccttgag

SEQ ID NO: 18146 - DNA, 20 bp, synthetic construct
  source 1..20: mol_type = other DNA
ctaccacctcgcacatgcca

SEQ ID NO: 18147 - DNA, 20 bp, synthetic construct
  source 1..20: mol_type = other DNA
taacagcagcctgcctgcag

SEQ ID NO: 18148 - DNA, 20 bp, synthetic construct
  source 1..20: mol_type = other DNA
gggccgcccccgaggaggtg

SEQ ID NO: 18149 - DNA, 20 bp, synthetic construct
  source 1..20: mol_type = other DNA
tctgggaacgaggcactagg

SEQ ID NO: 18150 - DNA, 20 bp, synthetic construct
  source 1..20: mol_type = other DNA
gtgctgctgctgcttctgag

SEQ ID NO: 18151 - DNA, 20 bp, synthetic construct
  source 1..20: mol_type = other DNA
caaccccctcagaccactct

SEQ ID NO: 18152 - DNA, 20 bp, synthetic construct
  source 1..20: mol_type = other DNA
ccaatcaggcgcggagggcg

SEQ ID NO: 18153 - DNA, 20 bp, synthetic construct
  source 1..20: mol_type = other DNA
cgtccttcctcagccgcggg

SEQ ID NO: 18154 - DNA, 20 bp, synthetic construct
  source 1..20: mol_type = other DNA
taaagtagtcgcggagacgg

SEQ ID NO: 18155 - DNA, 20 bp, synthetic construct
  source 1..20: mol_type = other DNA
acagctgtcggaaggtggcg

SEQ ID NO: 18156 - DNA, 20 bp, synthetic construct
  source 1..20: mol_type = other DNA
tttccttcggcttccgttct

SEQ ID NO: 18157 - DNA, 20 bp, synthetic construct
  source 1..20: mol_type = other DNA
agagcctgaaaaaggactgc

SEQ ID NO: 18158 - DNA, 20 bp, synthetic construct
  source 1..20: mol_type = other DNA
catgcaggcgcagcagctgc

SEQ ID NO: 18159 - DNA, 20 bp, synthetic construct
  source 1..20: mol_type = other DNA
tttgtgtagtgccttggagc

SEQ ID NO: 18160 - DNA, 20 bp, synthetic construct
  source 1..20: mol_type = other DNA
ttggagacccgaggaaagcc

SEQ ID NO: 18161 - DNA, 20 bp, synthetic construct
  source 1..20: mol_type = other DNA
gctctggctgtttaaaagct

SEQ ID NO: 18162 - DNA, 20 bp, synthetic construct
  source 1..20: mol_type = other DNA
cccttctcggcagtggtacc

SEQ ID NO: 18163 - DNA, 20 bp, synthetic construct
  source 1..20: mol_type = other DNA
ctccagagacctcctagagc

SEQ ID NO: 18164 - DNA, 20 bp, synthetic construct
  source 1..20: mol_type = other DNA
gctgtgggaataagatggcg

SEQ ID NO: 18165 - DNA, 20 bp, synthetic construct
  source 1..20: mol_type = other DNA
ttcggctggtgtcatcggtg

SEQ ID NO: 18166 - DNA, 20 bp, synthetic construct
  source 1..20: mol_type = other DNA
ggcgcggcaggaggacgagg

SEQ ID NO: 18167 - DNA, 20 bp, synthetic construct
  source 1..20: mol_type = other DNA
gtctgcgcggggccgctgac

SEQ ID NO: 18168 - DNA, 20 bp, synthetic construct
  source 1..20: mol_type = other DNA
accctccgacatgatatctc

SEQ ID NO: 18169 - DNA, 20 bp, synthetic construct
  source 1..20: mol_type = other DNA
tccgccccgcagcgccggag

SEQ ID NO: 18170 - DNA, 20 bp, synthetic construct
  source 1..20: mol_type = other DNA
gaccatggctgacgttttcc

SEQ ID NO: 18171 - DNA, 20 bp, synthetic construct
  source 1..20: mol_type = other DNA
aaatctcgtttctcttggac

SEQ ID NO: 18172 - DNA, 20 bp, synthetic construct
  source 1..20: mol_type = other DNA
tcccgccccgcggcagccct

SEQ ID NO: 18173 - DNA, 20 bp, synthetic construct
  source 1..20: mol_type = other DNA
tcctgagctgcgccgtgcca

SEQ ID NO: 18174 - DNA, 20 bp, synthetic construct
  source 1..20: mol_type = other DNA
caccgtggagagcgcggtcc

SEQ ID NO: 18175 - DNA, 20 bp, synthetic construct
  source 1..20: mol_type = other DNA
caatcactttcttcatcatc

SEQ ID NO: 18176 - DNA, 20 bp, synthetic construct
  source 1..20: mol_type = other DNA
gggggaaaggctgtttccaa

SEQ ID NO: 18177 - DNA, 20 bp, synthetic construct
  source 1..20: mol_type = other DNA
tccggcgaagttaaaccctc

SEQ ID NO: 18178 - DNA, 20 bp, synthetic construct
  source 1..20: mol_type = other DNA
gtagatccctcccgttagct

SEQ ID NO: 18179 - DNA, 20 bp, synthetic construct
  source 1..20: mol_type = other DNA
gctggccggtctgcctccgg

SEQ ID NO: 18180 - DNA, 20 bp, synthetic construct
  source 1..20: mol_type = other DNA
agccgctcgccttcctttca

SEQ ID NO: 18181 - DNA, 20 bp, synthetic construct
  source 1..20: mol_type = other DNA
aaaggtgaagcaggacatgc

SEQ ID NO: 18182 - DNA, 20 bp, synthetic construct
  source 1..20: mol_type = other DNA
gaaggtctcattcggtgttt

SEQ ID NO: 18183 - DNA, 20 bp, synthetic construct
  source 1..20: mol_type = other DNA
tccgcgggtggcaagcgggc

SEQ ID NO: 18184 - DNA, 20 bp, synthetic construct
  source 1..20: mol_type = other DNA
gctagtttctctaagccatc

SEQ ID NO: 18185 - DNA, 20 bp, synthetic construct
  source 1..20: mol_type = other DNA
cctaaatccaggcagggaaa

SEQ ID NO: 18186 - DNA, 20 bp, synthetic construct
  source 1..20: mol_type = other DNA
taaacccgcgcgcccgccag

SEQ ID NO: 18187 - DNA, 20 bp, synthetic construct
  source 1..20: mol_type = other DNA
tcgctccgaggtccccgcgc

SEQ ID NO: 18188 - DNA, 20 bp, synthetic construct
  source 1..20: mol_type = other DNA
taaggcggcacagggccgag

SEQ ID NO: 18189 - DNA, 20 bp, synthetic construct
  source 1..20: mol_type = other DNA
cttgttcagggctggtgggg

SEQ ID NO: 18190 - DNA, 20 bp, synthetic construct
  source 1..20: mol_type = other DNA
ccctaaagacgctagcgctg

SEQ ID NO: 18191 - DNA, 20 bp, synthetic construct
  source 1..20: mol_type = other DNA
cgcagtttgccggccgccat

SEQ ID NO: 18192 - DNA, 20 bp, synthetic construct
  source 1..20: mol_type = other DNA
ggagctgtgaggcagtgctg

SEQ ID NO: 18193 - DNA, 20 bp, synthetic construct
  source 1..20: mol_type = other DNA
ggattgaggcgccgccattt

SEQ ID NO: 18194 - DNA, 20 bp, synthetic construct
  source 1..20: mol_type = other DNA
cctcgtgcgcccccgccccc

SEQ ID NO: 18195 - DNA, 20 bp, synthetic construct
  source 1..20: mol_type = other DNA
tctcggcccttgacttctac

SEQ ID NO: 18196 - DNA, 20 bp, synthetic construct
  source 1..20: mol_type = other DNA
tatcagcacagcacttcttg

SEQ ID NO: 18197 - DNA, 20 bp, synthetic construct
  source 1..20: mol_type = other DNA
acaatctgtggcctcagccc

SEQ ID NO: 18198 - DNA, 20 bp, synthetic construct
  source 1..20: mol_type = other DNA
tccgagtttggtgttttgca

SEQ ID NO: 18199 - DNA, 20 bp, synthetic construct
  source 1..20: mol_type = other DNA
gggccacgtgataagcccgg

SEQ ID NO: 18200 - DNA, 20 bp, synthetic construct
  source 1..20: mol_type = other DNA
acctgggcttggtcgcctcc

SEQ ID NO: 18201 - DNA, 20 bp, synthetic construct
  source 1..20: mol_type = other DNA
acccctccccccgccttccc

SEQ ID NO: 18202 - DNA, 20 bp, synthetic construct
  source 1..20: mol_type = other DNA
agctaaggcaccccagccgg

SEQ ID NO: 18203 - DNA, 20 bp, synthetic construct
  source 1..20: mol_type = other DNA
gcagcgcttgagggtagcgg

SEQ ID NO: 18204 - DNA, 20 bp, synthetic construct
  source 1..20: mol_type = other DNA
ccgcgcgcgtcgcaacggag

SEQ ID NO: 18205 - DNA, 20 bp, synthetic construct
  source 1..20: mol_type = other DNA
gggaccaccgggggtggtga

SEQ ID NO: 18206 - DNA, 20 bp, synthetic construct
  source 1..20: mol_type = other DNA
caggaggcgtgcgtggcagg

SEQ ID NO: 18207 - DNA, 20 bp, synthetic construct
  source 1..20: mol_type = other DNA
cgtgcgtgaggcgtttactg

SEQ ID NO: 18208 - DNA, 20 bp, synthetic construct
  source 1..20: mol_type = other DNA
tccctccgggctcaagttgc

SEQ ID NO: 18209 - DNA, 20 bp, synthetic construct
  source 1..20: mol_type = other DNA
tgctctgcggctcagggagc

SEQ ID NO: 18210 - DNA, 20 bp, synthetic construct
  source 1..20: mol_type = other DNA
cgccacgcgcatatccctgc

SEQ ID NO: 18211 - DNA, 20 bp, synthetic construct
  source 1..20: mol_type = other DNA
cgagaagtcaagttctcatg

SEQ ID NO: 18212 - DNA, 20 bp, synthetic construct
  source 1..20: mol_type = other DNA
cctctttccctaagcagcct

SEQ ID NO: 18213 - DNA, 20 bp, synthetic construct
  source 1..20: mol_type = other DNA
agggcctgactttgggagcc

SEQ ID NO: 18214 - DNA, 20 bp, synthetic construct
  source 1..20: mol_type = other DNA
agacccagagggagggagga

SEQ ID NO: 18215 - DNA, 20 bp, synthetic construct
  source 1..20: mol_type = other DNA
agttctcccaaaatccaccg

SEQ ID NO: 18216 - DNA, 20 bp, synthetic construct
  source 1..20: mol_type = other DNA
gcctttgtgccatccgggtc

SEQ ID NO: 18217 - DNA, 20 bp, synthetic construct
  source 1..20: mol_type = other DNA
tctacccaagctccctcagc

SEQ ID NO: 18218 - DNA, 20 bp, synthetic construct
  source 1..20: mol_type = other DNA
gtgtcggtcgcctagtctgg

SEQ ID NO: 18219 - DNA, 20 bp, synthetic construct
  source 1..20: mol_type = other DNA
tcgcctagtctggagaacta

SEQ ID NO: 18220 - DNA, 20 bp, synthetic construct
  source 1..20: mol_type = other DNA
tgaacaagctgagtggaggc

SEQ ID NO: 18221 - DNA, 20 bp, synthetic construct
  source 1..20: mol_type = other DNA
tcctcccccctgttccccgc

SEQ ID NO: 18222 - DNA, 20 bp, synthetic construct
  source 1..20: mol_type = other DNA
ctttttgaacccacttattg

SEQ ID NO: 18223 - DNA, 20 bp, synthetic construct
  source 1..20: mol_type = other DNA
ctgtgtctggtacacattgt

SEQ ID NO: 18224 - DNA, 20 bp, synthetic construct
  source 1..20: mol_type = other DNA
ccgcttctcgactctgttgt

SEQ ID NO: 18225 - DNA, 20 bp, synthetic construct
  source 1..20: mol_type = other DNA
ctgtactgacgcgccctcgc

SEQ ID NO: 18226 - DNA, 20 bp, synthetic construct
  source 1..20: mol_type = other DNA
ctgcttggtcgcgtctgagg

SEQ ID NO: 18227 - DNA, 20 bp, synthetic construct
  source 1..20: mol_type = other DNA
gtgttctacgaagtctcttt

SEQ ID NO: 18228 - DNA, 20 bp, synthetic construct
  source 1..20: mol_type = other DNA
tccggcgatgccgccccagc

SEQ ID NO: 18229 - DNA, 20 bp, synthetic construct
  source 1..20: mol_type = other DNA
gcagctcggagcctgtggcg

SEQ ID NO: 18230 - DNA, 20 bp, synthetic construct
  source 1..20: mol_type = other DNA
gagtgagaaagagaaatctg

SEQ ID NO: 18231 - DNA, 20 bp, synthetic construct
  source 1..20: mol_type = other DNA
tagacctgcccttcgcctgg

SEQ ID NO: 18232 - DNA, 20 bp, synthetic construct
  source 1..20: mol_type = other DNA
gccagtcctttggctccgtt

SEQ ID NO: 18233 - DNA, 20 bp, synthetic construct
  source 1..20: mol_type = other DNA
tctcccgctccgtctcacac

SEQ ID NO: 18234 - DNA, 20 bp, synthetic construct
  source 1..20: mol_type = other DNA
ccaggcgccgcgaggcactg

SEQ ID NO: 18235 - DNA, 20 bp, synthetic construct
  source 1..20: mol_type = other DNA
catggtctcgccctagggag

SEQ ID NO: 18236 - DNA, 20 bp, synthetic construct
  source 1..20: mol_type = other DNA
ctctacgctcggcctcgatc

SEQ ID NO: 18237 - DNA, 20 bp, synthetic construct
  source 1..20: mol_type = other DNA
gggccgcagtgaccaacccc

SEQ ID NO: 18238 - DNA, 20 bp, synthetic construct
  source 1..20: mol_type = other DNA
acagcgccaagagcggcggc

SEQ ID NO: 18239 - DNA, 20 bp, synthetic construct
  source 1..20: mol_type = other DNA
aggggtgttcggccaggggc

SEQ ID NO: 18240 - DNA, 20 bp, synthetic construct
  source 1..20: mol_type = other DNA
ggagtaagcggcgcggtagc

SEQ ID NO: 18241 - DNA, 20 bp, synthetic construct
  source 1..20: mol_type = other DNA
agctgggggcccagctccgg

SEQ ID NO: 18242 - DNA, 20 bp, synthetic construct
  source 1..20: mol_type = other DNA
tggtgggcgggcgggagctg

SEQ ID NO: 18243 - DNA, 20 bp, synthetic construct
  source 1..20: mol_type = other DNA
ggctgcagcggggtgagcgg

SEQ ID NO: 18244 - DNA, 20 bp, synthetic construct
  source 1..20: mol_type = other DNA
tgccgggaagtgatccccaa

SEQ ID NO: 18245 - DNA, 20 bp, synthetic construct
  source 1..20: mol_type = other DNA
aggcagggtgagagttcccc

SEQ ID NO: 18246 - DNA, 20 bp, synthetic construct
  source 1..20: mol_type = other DNA
tgtgtttccaaaatggcggc

SEQ ID NO: 18247 - DNA, 20 bp, synthetic construct
  source 1..20: mol_type = other DNA
ggggctggcaggaggggagg

SEQ ID NO: 18248 - DNA, 20 bp, synthetic construct
  source 1..20: mol_type = other DNA
gtgaacagtggctgacaaca

SEQ ID NO: 18249 - DNA, 20 bp, synthetic construct
  source 1..20: mol_type = other DNA
ctgctgtgacgcgcggacag

SEQ ID NO: 18250 - DNA, 20 bp, synthetic construct
  source 1..20: mol_type = other DNA
gaagcgctggtcggcgtctg

SEQ ID NO: 18251 - DNA, 20 bp, synthetic construct
  source 1..20: mol_type = other DNA
cggcggcggcggcgtcggcg

SEQ ID NO: 18252 - DNA, 20 bp, synthetic construct
  source 1..20: mol_type = other DNA
gggcgaggaggttcccgtgg

SEQ ID NO: 18253 - DNA, 20 bp, synthetic construct
  source 1..20: mol_type = other DNA
acctcagcgcgagcgccagg

SEQ ID NO: 18254 - DNA, 20 bp, synthetic construct
  source 1..20: mol_type = other DNA
cgctctgagccctgccacca

SEQ ID NO: 18255 - DNA, 20 bp, synthetic construct
  source 1..20: mol_type = other DNA
gagatgaaatgcgaccgggt

SEQ ID NO: 18256 - DNA, 20 bp, synthetic construct
  source 1..20: mol_type = other DNA
ccgccgcaccgctgggggcc

SEQ ID NO: 18257 - DNA, 20 bp, synthetic construct
  source 1..20: mol_type = other DNA
tgtgggcgcggcagggcgca

SEQ ID NO: 18258 - DNA, 20 bp, synthetic construct
  source 1..20: mol_type = other DNA
ctggggagggctgtgcctga

SEQ ID NO: 18259 - DNA, 20 bp, synthetic construct
  source 1..20: mol_type = other DNA
tccggacatctccctgggag

SEQ ID NO: 18260 - DNA, 20 bp, synthetic construct
  source 1..20: mol_type = other DNA
ggccgcccgggacgagctcg

SEQ ID NO: 18261 - DNA, 20 bp, synthetic construct
  source 1..20: mol_type = other DNA
tgtcccctgcctctggggcc

SEQ ID NO: 18262 - DNA, 20 bp, synthetic construct
  source 1..20: mol_type = other DNA
tctctcgttttcggacggct

SEQ ID NO: 18263 - DNA, 20 bp, synthetic construct
  source 1..20: mol_type = other DNA
cgcgacggctgcagaacatc

SEQ ID NO: 18264 - DNA, 20 bp, synthetic construct
  source 1..20: mol_type = other DNA
atctcctgtctccgccgcct

SEQ ID NO: 18265 - DNA, 20 bp, synthetic construct
  source 1..20: mol_type = other DNA
cgtgctgttctgcggcaagg

SEQ ID NO: 18266 - DNA, 20 bp, synthetic construct
  source 1..20: mol_type = other DNA
cttgttcagcagaacaggtg

SEQ ID NO: 18267 - DNA, 20 bp, synthetic construct
  source 1..20: mol_type = other DNA
gcgggtatcatgggtgctgt

SEQ ID NO: 18268 - DNA, 20 bp, synthetic construct
  source 1..20: mol_type = other DNA
tgagattggcgaggggagag

SEQ ID NO: 18269 - DNA, 20 bp, synthetic construct
  source 1..20: mol_type = other DNA
aatggccgtggagcagcccc

SEQ ID NO: 18270 - DNA, 20 bp, synthetic construct
  source 1..20: mol_type = other DNA
gtggcctcgctccccgcccg

SEQ ID NO: 18271 - DNA, 20 bp, synthetic construct
  source 1..20: mol_type = other DNA
agagctacaagagcctggaa

SEQ ID NO: 18272 - DNA, 20 bp, synthetic construct
  source 1..20: mol_type = other DNA
taggctcccctgtgacagcc

SEQ ID NO: 18273 - DNA, 20 bp, synthetic construct
  source 1..20: mol_type = other DNA
aatttgcaacctccgctgcc

SEQ ID NO: 18274 - DNA, 20 bp, synthetic construct
  source 1..20: mol_type = other DNA
ggtagatccatggcttcctg

SEQ ID NO: 18275 - DNA, 20 bp, synthetic construct
  source 1..20: mol_type = other DNA
gagcgccgcgtcgggagcgg

SEQ ID NO: 18276 - DNA, 20 bp, synthetic construct
  source 1..20: mol_type = other DNA
tcatgctgtgcaaaaacttg

SEQ ID NO: 18277 - DNA, 20 bp, synthetic construct
  source 1..20: mol_type = other DNA
tggccgccgagcgggatctg

SEQ ID NO: 18278 - DNA, 20 bp, synthetic construct
  source 1..20: mol_type = other DNA
agccagagagaagaagataa

SEQ ID NO: 18279 - DNA, 20 bp, synthetic construct
  source 1..20: mol_type = other DNA
cctcattgcccagcggaccc

SEQ ID NO: 18280 - DNA, 20 bp, synthetic construct
  source 1..20: mol_type = other DNA
accccgaggtggctgaggct

SEQ ID NO: 18281 - DNA, 20 bp, synthetic construct
  source 1..20: mol_type = other DNA
gtgatggcggggccggtgaa

SEQ ID NO: 18282 - DNA, 20 bp, synthetic construct
  source 1..20: mol_type = other DNA
gcacagatgtcatctgctgc

SEQ ID NO: 18283 - DNA, 20 bp, synthetic construct
  source 1..20: mol_type = other DNA
cgctccggacgggcgacggt

SEQ ID NO: 18284 - DNA, 20 bp, synthetic construct
  source 1..20: mol_type = other DNA
tgcttcgggcttccacctca

SEQ ID NO: 18285 - DNA, 20 bp, synthetic construct
  source 1..20: mol_type = other DNA
gctccagtgccaaaacttcc

SEQ ID NO: 18286 - DNA, 20 bp, synthetic construct
  source 1..20: mol_type = other DNA
aacgagagactgcttgctgc

SEQ ID NO: 18287 - DNA, 20 bp, synthetic construct
  source 1..20: mol_type = other DNA
gaagtggtcgtttattggct

SEQ ID NO: 18288 - DNA, 20 bp, synthetic construct
  source 1..20: mol_type = other DNA
caggcgtcggtactcagcgg

SEQ ID NO: 18289 - DNA, 20 bp, synthetic construct
  source 1..20: mol_type = other DNA
ggcgggcggaaaccggtctc

SEQ ID NO: 18290 - DNA, 20 bp, synthetic construct
  source 1..20: mol_type = other DNA
gttcctccccagctcgaatg

SEQ ID NO: 18291 - DNA, 20 bp, synthetic construct
  source 1..20: mol_type = other DNA
taggagtcggcgattaagga

SEQ ID NO: 18292 - DNA, 20 bp, synthetic construct
  source 1..20: mol_type = other DNA
gcgcaccgctccgagggcca

SEQ ID NO: 18293 - DNA, 20 bp, synthetic construct
  source 1..20: mol_type = other DNA
tcattcctcccagggacccc

SEQ ID NO: 18294 - DNA, 20 bp, synthetic construct
  source 1..20: mol_type = other DNA
gcgaaagagcagcagaagtg

SEQ ID NO: 18295 - DNA, 20 bp, synthetic construct
  source 1..20: mol_type = other DNA
ctgcgttcggacccagaccc

SEQ ID NO: 18296 - DNA, 20 bp, synthetic construct
  source 1..20: mol_type = other DNA
gagcggaggaggaggaggag

SEQ ID NO: 18297 - DNA, 20 bp, synthetic construct
  source 1..20: mol_type = other DNA
aacgtcaggccacccgccgc

SEQ ID NO: 18298 - DNA, 20 bp, synthetic construct
  source 1..20: mol_type = other DNA
gaggaagtcggacgtgggcg

SEQ ID NO: 18299 - DNA, 20 bp, synthetic construct
  source 1..20: mol_type = other DNA
cacctagtacaacatcttac

SEQ ID NO: 18300 - DNA, 20 bp, synthetic construct
  source 1..20: mol_type = other DNA
ggatgaggcagaagattcag

SEQ ID NO: 18301 - DNA, 20 bp, synthetic construct
  source 1..20: mol_type = other DNA
gctggctcacaacaagatgc

SEQ ID NO: 18302 - DNA, 20 bp, synthetic construct
  source 1..20: mol_type = other DNA
acggacgtggctcgagtttc

SEQ ID NO: 18303 - DNA, 20 bp, synthetic construct
  source 1..20: mol_type = other DNA
ccggtcccttgcagcgctgc

SEQ ID NO: 18304 - DNA, 20 bp, synthetic construct
  source 1..20: mol_type = other DNA
cgcagcgcctacgggagtcc

SEQ ID NO: 18305 - DNA, 20 bp, synthetic construct
  source 1..20: mol_type = other DNA
taaccttcctgaagaggaca

SEQ ID NO: 18306 - DNA, 20 bp, synthetic construct
  source 1..20: mol_type = other DNA
tccggctcccacccgacgct

SEQ ID NO: 18307 - DNA, 20 bp, synthetic construct
  source 1..20: mol_type = other DNA
gaatgccactagagggtctg

SEQ ID NO: 18308 - DNA, 20 bp, synthetic construct
  source 1..20: mol_type = other DNA
attagggttgggagcaggaa

SEQ ID NO: 18309 - DNA, 20 bp, synthetic construct
  source 1..20: mol_type = other DNA
cggctgcgtggggctcggcc

SEQ ID NO: 18310 - DNA, 20 bp, synthetic construct
  source 1..20: mol_type = other DNA
agaaggccttggctccttga

SEQ ID NO: 18311 - DNA, 20 bp, synthetic construct
  source 1..20: mol_type = other DNA
ctgctctgcttccttcccat

SEQ ID NO: 18312 - DNA, 20 bp, synthetic construct
  source 1..20: mol_type = other DNA
aaggtcctctctgatgacat

SEQ ID NO: 18313 - DNA, 20 bp, synthetic construct
  source 1..20: mol_type = other DNA
aggacccgccccggccttga

SEQ ID NO: 18314 - DNA, 20 bp, synthetic construct
  source 1..20: mol_type = other DNA
cgaggcagcagttgcggccg

SEQ ID NO: 18315 - DNA, 20 bp, synthetic construct
  source 1..20: mol_type = other DNA
aagacggctcggatgccggc

SEQ ID NO: 18316 - DNA, 20 bp, synthetic construct
  source 1..20: mol_type = other DNA
gctgggctgggctgggctgg

SEQ ID NO: 18317 - DNA, 20 bp, synthetic construct
  source 1..20: mol_type = other DNA
tccacctgggaccggccggg

SEQ ID NO: 18318 - DNA, 20 bp, synthetic construct
  source 1..20: mol_type = other DNA
cttgaagcagaggagcagca

SEQ ID NO: 18319 - DNA, 20 bp, synthetic construct
  source 1..20: mol_type = other DNA
cggtctcgcatcggcggcga

SEQ ID NO: 18320 - DNA, 20 bp, synthetic construct
  source 1..20: mol_type = other DNA
gagggccagagactaagtta

SEQ ID NO: 18321 - DNA, 20 bp, synthetic construct
  source 1..20: mol_type = other DNA
gctccggcagcgttcctggg

SEQ ID NO: 18322 - DNA, 20 bp, synthetic construct
  source 1..20: mol_type = other DNA
gtgttgctccggcagcgttc

SEQ ID NO: 18323 - DNA, 20 bp, synthetic construct
  source 1..20: mol_type = other DNA
cggagggatctccgtggggc

SEQ ID NO: 18324 - DNA, 20 bp, synthetic construct
  source 1..20: mol_type = other DNA
ctgtgttttcttggttcagc

SEQ ID NO: 18325 - DNA, 20 bp, synthetic construct
  source 1..20: mol_type = other DNA
ttgtccttgggctgcctgtt

SEQ ID NO: 18326 - DNA, 20 bp, synthetic construct
  source 1..20: mol_type = other DNA
ctaccgtcgcggccgccgta

SEQ ID NO: 18327 - DNA, 20 bp, synthetic construct
  source 1..20: mol_type = other DNA
cggcagacaacaggggaccc

SEQ ID NO: 18328 - DNA, 20 bp, synthetic construct
  source 1..20: mol_type = other DNA
tggagacctgatttctaact

SEQ ID NO: 18329 - DNA, 20 bp, synthetic construct
  source 1..20: mol_type = other DNA
tcacgtcgcactcctcgcag

SEQ ID NO: 18330 - DNA, 20 bp, synthetic construct
  source 1..20: mol_type = other DNA
tcggactcgcgcccgtgggc

SEQ ID NO: 18331 - DNA, 20 bp, synthetic construct
  source 1..20: mol_type = other DNA
aagaagctggcggccgacgc

SEQ ID NO: 18332 - DNA, 20 bp, synthetic construct
  source 1..20: mol_type = other DNA
gctggaggcagtttctggtg

SEQ ID NO: 18333 - DNA, 20 bp, synthetic construct
  source 1..20: mol_type = other DNA
ccccatctccacttcctccc

SEQ ID NO: 18334 - DNA, 20 bp, synthetic construct
  source 1..20: mol_type = other DNA
gggcggcggcggtagctgcg

SEQ ID NO: 18335 - DNA, 20 bp, synthetic construct
  source 1..20: mol_type = other DNA
ccagggtcgtcaggggtgta

SEQ ID NO: 18336 - DNA, 20 bp, synthetic construct
  source 1..20: mol_type = other DNA
gctgggaaaaagaccaacag

SEQ ID NO: 18337 - DNA, 20 bp, synthetic construct
  source 1..20: mol_type = other DNA
tctcccgtcagaccttcctg

SEQ ID NO: 18338 - DNA, 20 bp, synthetic construct
  source 1..20: mol_type = other DNA
gcggtcgcccccttgggaaa

SEQ ID NO: 18339 - DNA, 20 bp, synthetic construct
  source 1..20: mol_type = other DNA
actcactccatggctgcagc

SEQ ID NO: 18340 - DNA, 20 bp, synthetic construct
  source 1..20: mol_type = other DNA
gcgccccaggccggcaggcg

SEQ ID NO: 18341 - DNA, 20 bp, synthetic construct
  source 1..20: mol_type = other DNA
agccgcgcgagtcgtagtgt

SEQ ID NO: 18342 - DNA, 20 bp, synthetic construct
  source 1..20: mol_type = other DNA
cgagggcagtaggctctcgg

SEQ ID NO: 18343 - DNA, 20 bp, synthetic construct
  source 1..20: mol_type = other DNA
agggctacgatgagctgcag

SEQ ID NO: 18344 - DNA, 20 bp, synthetic construct
  source 1..20: mol_type = other DNA
tgatccgattctttccagcg

SEQ ID NO: 18345 - DNA, 20 bp, synthetic construct
  source 1..20: mol_type = other DNA
tttttaagctcccctgagcc

SEQ ID NO: 18346 - DNA, 20 bp, synthetic construct
  source 1..20: mol_type = other DNA
ggcgtccgccacccgtctca

SEQ ID NO: 18347 - DNA, 20 bp, synthetic construct
  source 1..20: mol_type = other DNA
aggaaggctgtagtgtcggg

SEQ ID NO: 18348 - DNA, 20 bp, synthetic construct
  source 1..20: mol_type = other DNA
cggatcctcgctgctgctgc

SEQ ID NO: 18349 - DNA, 20 bp, synthetic construct
  source 1..20: mol_type = other DNA
ggctcagcctccagcccagg

SEQ ID NO: 18350 - DNA, 20 bp, synthetic construct
  source 1..20: mol_type = other DNA
aggcagaggaggctcagcgc

SEQ ID NO: 18351 - DNA, 20 bp, synthetic construct
  source 1..20: mol_type = other DNA
aaggtttccctgggcgttcc

SEQ ID NO: 18352 - DNA, 20 bp, synthetic construct
  source 1..20: mol_type = other DNA
aacgctacgatgcctgaacc

SEQ ID NO: 18353 - DNA, 20 bp, synthetic construct
  source 1..20: mol_type = other DNA
aaaaggaagcaaatgagctg

SEQ ID NO: 18354 - DNA, 20 bp, synthetic construct
  source 1..20: mol_type = other DNA
gcagccggaagggggaagtg

SEQ ID NO: 18355 - DNA, 20 bp, synthetic construct
  source 1..20: mol_type = other DNA
ccgctggccgcctcctgaca

SEQ ID NO: 18356 - DNA, 20 bp, synthetic construct
  source 1..20: mol_type = other DNA
actgcacggacccagggaac

SEQ ID NO: 18357 - DNA, 20 bp, synthetic construct
  source 1..20: mol_type = other DNA
cagcagggagaggctgagcc

SEQ ID NO: 18358 - DNA, 20 bp, synthetic construct
  source 1..20: mol_type = other DNA
caaaccctcctgcctccacc

SEQ ID NO: 18359 - DNA, 20 bp, synthetic construct
  source 1..20: mol_type = other DNA
gccagcctgaggctgggctg

SEQ ID NO: 18360 - DNA, 20 bp, synthetic construct
  source 1..20: mol_type = other DNA
ggcccactgctcagtggagc

SEQ ID NO: 18361 - DNA, 20 bp, synthetic construct
  source 1..20: mol_type = other DNA
cgcggcagccgaacaaagga

SEQ ID NO: 18362 - DNA, 20 bp, synthetic construct
  source 1..20: mol_type = other DNA
cgcccatctagctaacccga

SEQ ID NO: 18363 - DNA, 20 bp, synthetic construct
  source 1..20: mol_type = other DNA
gacctatagaggtatttcct

SEQ ID NO: 18364 - DNA, 20 bp, synthetic construct
  source 1..20: mol_type = other DNA
cggaggtgggggggggacgg

SEQ ID NO: 18365 - DNA, 20 bp, synthetic construct
  source 1..20: mol_type = other DNA
ccgcggcggagccaggccgg

SEQ ID NO: 18366 - DNA, 20 bp, synthetic construct
  source 1..20: mol_type = other DNA
gagcaggcagctgggggtgg

SEQ ID NO: 18367 - DNA, 20 bp, synthetic construct
  source 1..20: mol_type = other DNA
cgaaacttccctctacccgc

SEQ ID NO: 18368 - DNA, 20 bp, synthetic construct
  source 1..20: mol_type = other DNA
ttttcctgcgcaggagccgc

SEQ ID NO: 18369 - DNA, 20 bp, synthetic construct
  source 1..20: mol_type = other DNA
caagacggggcccgggcttt

SEQ ID NO: 18370 - DNA, 20 bp, synthetic construct
  source 1..20: mol_type = other DNA
tgctgctcagctcctcagct

SEQ ID NO: 18371 - DNA, 20 bp, synthetic construct
  source 1..20: mol_type = other DNA
cggcgcgagaagcggcggcc

SEQ ID NO: 18372 - DNA, 20 bp, synthetic construct
  source 1..20: mol_type = other DNA
ggagctgcggcgctggctac

SEQ ID NO: 18373 - DNA, 20 bp, synthetic construct
  source 1..20: mol_type = other DNA
caggccgggccaggctctct

SEQ ID NO: 18374 - DNA, 20 bp, synthetic construct
  source 1..20: mol_type = other DNA
gggctgtgtggccaaatctg

SEQ ID NO: 18375 - DNA, 20 bp, synthetic construct
  source 1..20: mol_type = other DNA
atatcttcctgcttctagtc

SEQ ID NO: 18376 - DNA, 20 bp, synthetic construct
  source 1..20: mol_type = other DNA
tggagccggccggcgctcac

SEQ ID NO: 18377 - DNA, 20 bp, synthetic construct
  source 1..20: mol_type = other DNA
ttggcgtggtgggcgactct

SEQ ID NO: 18378 - DNA, 20 bp, synthetic construct
  source 1..20: mol_type = other DNA
ctttggtttccgggtcggtt

SEQ ID NO: 18379 - DNA, 20 bp, synthetic construct
  source 1..20: mol_type = other DNA
ggcgcgggcggcgcggacag

SEQ ID NO: 18380 - DNA, 20 bp, synthetic construct
  source 1..20: mol_type = other DNA
gagccgggcggcgcaggcgc

SEQ ID NO: 18381 - DNA, 20 bp, synthetic construct
  source 1..20: mol_type = other DNA
cggcggcagcggaggaggag

SEQ ID NO: 18382 - DNA, 20 bp, synthetic construct
  source 1..20: mol_type = other DNA
tcctccggctttttcctccc

SEQ ID NO: 18383 - DNA, 20 bp, synthetic construct
  source 1..20: mol_type = other DNA
cgtgtcagtggcgctagcgg

SEQ ID NO: 18384 - DNA, 20 bp, synthetic construct
  source 1..20: mol_type = other DNA
ggatgcagaaagcctcagtg

SEQ ID NO: 18385 - DNA, 20 bp, synthetic construct
  source 1..20: mol_type = other DNA
ggcgcgaggcctgtgggccc

SEQ ID NO: 18386 - DNA, 20 bp, synthetic construct
  source 1..20: mol_type = other DNA
agctccaagtcctcacacag

SEQ ID NO: 18387 - DNA, 20 bp, synthetic construct
  source 1..20: mol_type = other DNA
agcagaggactttttagctg

SEQ ID NO: 18388 - DNA, 20 bp, synthetic construct
  source 1..20: mol_type = other DNA
ggcagctgcgggctccgcgc

SEQ ID NO: 18389 - DNA, 20 bp, synthetic construct
  source 1..20: mol_type = other DNA
ggcctatgtcttgactccgt

SEQ ID NO: 18390 - DNA, 20 bp, synthetic construct
  source 1..20: mol_type = other DNA
ttcggggtcaagccccagag

SEQ ID NO: 18391 - DNA, 20 bp, synthetic construct
  source 1..20: mol_type = other DNA
ggcctgctgtaggaaaatgc

SEQ ID NO: 18392 - DNA, 20 bp, synthetic construct
  source 1..20: mol_type = other DNA
ggaggggcaaaagctgaggg

SEQ ID NO: 18393 - DNA, 20 bp, synthetic construct
  source 1..20: mol_type = other DNA
cctcaccgggctgactagcc

SEQ ID NO: 18394 - DNA, 20 bp, synthetic construct
  source 1..20: mol_type = other DNA
ggcgtctcttcttctaactg

SEQ ID NO: 18395 - DNA, 20 bp, synthetic construct
  source 1..20: mol_type = other DNA
tgggagctgtttctcctggg

SEQ ID NO: 18396 - DNA, 20 bp, synthetic construct
  source 1..20: mol_type = other DNA
tagccacaatgcttaactgc

SEQ ID NO: 18397 - DNA, 20 bp, synthetic construct
  source 1..20: mol_type = other DNA
gtcaggctttcttcggtgga

SEQ ID NO: 18398 - DNA, 20 bp, synthetic construct
  source 1..20: mol_type = other DNA
cctgaactgaagagctgtgt

SEQ ID NO: 18399 - DNA, 20 bp, synthetic construct
  source 1..20: mol_type = other DNA
ggttgcccccgcgggcgtca

SEQ ID NO: 18400 - DNA, 20 bp, synthetic construct
  source 1..20: mol_type = other DNA
gcagaagctgtgacacgtgc

SEQ ID NO: 18401 - DNA, 20 bp, synthetic construct
  source 1..20: mol_type = other DNA
aggtccggattgcacgtgga

SEQ ID NO: 18402 - DNA, 20 bp, synthetic construct
  source 1..20: mol_type = other DNA
ccgcctccccgcgagtattt

SEQ ID NO: 18403 - DNA, 20 bp, synthetic construct
  source 1..20: mol_type = other DNA
gcggttgccgtggggaccgg

SEQ ID NO: 18404 - DNA, 20 bp, synthetic construct
  source 1..20: mol_type = other DNA
agggcgcctttcgattgcat

SEQ ID NO: 18405 - DNA, 20 bp, synthetic construct
  source 1..20: mol_type = other DNA
ggcgtggtgcatggctgtaa

SEQ ID NO: 18406 - DNA, 20 bp, synthetic construct
  source 1..20: mol_type = other DNA
aggtctgacaagatgtacca

SEQ ID NO: 18407 - DNA, 20 bp, synthetic construct
  source 1..20: mol_type = other DNA
gagctgggagaaggcagtga

SEQ ID NO: 18408 - DNA, 20 bp, synthetic construct
  source 1..20: mol_type = other DNA
cgcgcattggggacttgact

SEQ ID NO: 18409 - DNA, 20 bp, synthetic construct
  source 1..20: mol_type = other DNA
caggggacccagccaggggg

SEQ ID NO: 18410 - DNA, 20 bp, synthetic construct
  source 1..20: mol_type = other DNA
ccgcgctgcgaggcggaggt

SEQ ID NO: 18411 - DNA, 20 bp, synthetic construct
  source 1..20: mol_type = other DNA
tctgggatgtgcctcaccgg

SEQ ID NO: 18412 - DNA, 20 bp, synthetic construct
  source 1..20: mol_type = other DNA
taccccatgtctcaccacga

SEQ ID NO: 18413 - DNA, 20 bp, synthetic construct
  source 1..20: mol_type = other DNA
aagtgggtacgcaggggcgc

SEQ ID NO: 18414 - DNA, 20 bp, synthetic construct
  source 1..20: mol_type = other DNA
gaagctgctgttagctcgcc

SEQ ID NO: 18415 - DNA, 20 bp, synthetic construct
  source 1..20: mol_type = other DNA
cgggcactccagcgaccgtg

SEQ ID NO: 18416 - DNA, 20 bp, synthetic construct
  source 1..20: mol_type = other DNA
tcagcactgaaaccccgtcc

SEQ ID NO: 18417 - DNA, 20 bp, synthetic construct
  source 1..20: mol_type = other DNA
gggcctccgggacaagttgg

SEQ ID NO: 18418 - DNA, 20 bp, synthetic construct
  source 1..20: mol_type = other DNA
ctcgtgatccgcccgccttg

SEQ ID NO: 18419 - DNA, 20 bp, synthetic construct
  source 1..20: mol_type = other DNA
ggcgggcttcgggagcgccc

SEQ ID NO: 18420 - DNA, 20 bp, synthetic construct
  source 1..20: mol_type = other DNA
ttttcctgttccccctctgc

SEQ ID NO: 18421 - DNA, 20 bp, synthetic construct
  source 1..20: mol_type = other DNA
tgaggcgtagggggtggcgc

SEQ ID NO: 18422 - DNA, 20 bp, synthetic construct
  source 1..20: mol_type = other DNA
gacaaaacctcctccttttc

SEQ ID NO: 18423 - DNA, 20 bp, synthetic construct
  source 1..20: mol_type = other DNA
ttcgttcgagaacaactgtg

SEQ ID NO: 18424 - DNA, 20 bp, synthetic construct
  source 1..20: mol_type = other DNA
tcctccttttccaagcggct

SEQ ID NO: 18425 - DNA, 20 bp, synthetic construct
  source 1..20: mol_type = other DNA
accacacccaagtagctgcc

SEQ ID NO: 18426 - DNA, 20 bp, synthetic construct
  source 1..20: mol_type = other DNA
catagtgaccgtccgctcgc

SEQ ID NO: 18427 - DNA, 20 bp, synthetic construct
  source 1..20: mol_type = other DNA
gctactctgagaagaagaca

SEQ ID NO: 18428 - DNA, 20 bp, synthetic construct
  source 1..20: mol_type = other DNA
tcttgtgggctgaggggcag

SEQ ID NO: 18429 - DNA, 20 bp, synthetic construct
  source 1..20: mol_type = other DNA
cgcagtccctcaagcctgtg

SEQ ID NO: 18430 - DNA, 20 bp, synthetic construct
  source 1..20: mol_type = other DNA
gctgtgctctcactcaatgc

SEQ ID NO: 18431 - DNA, 20 bp, synthetic construct
  source 1..20: mol_type = other DNA
gagaaaggagctcccgggat

SEQ ID NO: 18432 - DNA, 20 bp, synthetic construct
  source 1..20: mol_type = other DNA
ctgacactggccctgaatca

SEQ ID NO: 18433 - DNA, 20 bp, synthetic construct
  source 1..20: mol_type = other DNA
aatcagggctggagggggca

SEQ ID NO: 18434 - DNA, 20 bp, synthetic construct
  source 1..20: mol_type = other DNA
acaactatttttgaggtatc

SEQ ID NO: 18435 - DNA, 20 bp, synthetic construct
  source 1..20: mol_type = other DNA
ttgggaagatggcggctgtg

SEQ ID NO: 18436 - DNA, 20 bp, synthetic construct
  source 1..20: mol_type = other DNA
cgccgcggcgcctgcgcggt

SEQ ID NO: 18437 - DNA, 20 bp, synthetic construct
  source 1..20: mol_type = other DNA
cgggcctggcctcccgataa

SEQ ID NO: 18438 - DNA, 20 bp, synthetic construct
  source 1..20: mol_type = other DNA
gtcccttgcggcggcgggag

SEQ ID NO: 18439 - DNA, 20 bp, synthetic construct
  source 1..20: mol_type = other DNA
gggaagaggctgagcccggc

SEQ ID NO: 18440 - DNA, 20 bp, synthetic construct
  source 1..20: mol_type = other DNA
ccaggcagctggcgctggag

SEQ ID NO: 18441 - DNA, 20 bp, synthetic construct
  source 1..20: mol_type = other DNA
cgcccttccaggagatgggt

SEQ ID NO: 18442 - DNA, 20 bp, synthetic construct
  source 1..20: mol_type = other DNA
cccggcctcagctctccgcc

SEQ ID NO: 18443 - DNA, 20 bp, synthetic construct
  source 1..20: mol_type = other DNA
ggcttttcatggggccgagc

SEQ ID NO: 18444 - DNA, 20 bp, synthetic construct
  source 1..20: mol_type = other DNA
cgggagcgcccttccaggag

SEQ ID NO: 18445 - DNA, 20 bp, synthetic construct
  source 1..20: mol_type = other DNA
aagggaagccctcgagggcc

SEQ ID NO: 18446 - DNA, 20 bp, synthetic construct
  source 1..20: mol_type = other DNA
tcccggctaccccccggacg

SEQ ID NO: 18447 - DNA, 20 bp, synthetic construct
  source 1..20: mol_type = other DNA
tgctctctctcgctgggtcg

SEQ ID NO: 18448 - DNA, 20 bp, synthetic construct
  source 1..20: mol_type = other DNA
acagccctgctctgggacac

SEQ ID NO: 18449 - DNA, 20 bp, synthetic construct
  source 1..20: mol_type = other DNA
tcctgagtcagaccataatc

SEQ ID NO: 18450 - DNA, 20 bp, synthetic construct
  source 1..20: mol_type = other DNA
ctaccctcacgtgtctggtt

SEQ ID NO: 18451 - DNA, 20 bp, synthetic construct
  source 1..20: mol_type = other DNA
ccgtcccactctgccctgtt

SEQ ID NO: 18452 - DNA, 20 bp, synthetic construct
  source 1..20: mol_type = other DNA
cgcttgccgcgtcctcccat

SEQ ID NO: 18453 - DNA, 20 bp, synthetic construct
  source 1..20: mol_type = other DNA
agtgtctgggcgggaagccg

SEQ ID NO: 18454 - DNA, 20 bp, synthetic construct
  source 1..20: mol_type = other DNA
ggcctcccgcagggcccact

SEQ ID NO: 18455 - DNA, 20 bp, synthetic construct
  source 1..20: mol_type = other DNA
agagcggtgcccgcgtcaga

SEQ ID NO: 18456 - DNA, 20 bp, synthetic construct
  source 1..20: mol_type = other DNA
caaagctcacggaagacaaa

SEQ ID NO: 18457 - DNA, 20 bp, synthetic construct
  source 1..20: mol_type = other DNA
cgatagctgcttcgggattg

SEQ ID NO: 18458 - DNA, 20 bp, synthetic construct
  source 1..20: mol_type = other DNA
ccaggaactgaccctgctct

SEQ ID NO: 18459 - DNA, 20 bp, synthetic construct
  source 1..20: mol_type = other DNA
cctttcgtttttttaaagaa

SEQ ID NO: 18460 - DNA, 20 bp, synthetic construct
  source 1..20: mol_type = other DNA
catcggcatgccgcagggaa

SEQ ID NO: 18461 - DNA, 20 bp, synthetic construct
  source 1..20: mol_type = other DNA
ggcgactacggctggtgtgg

SEQ ID NO: 18462 - DNA, 20 bp, synthetic construct
  source 1..20: mol_type = other DNA
gacgctgccggcggagacgg

SEQ ID NO: 18463 - DNA, 20 bp, synthetic construct
  source 1..20: mol_type = other DNA
cagcttcagatcactgtatc

SEQ ID NO: 18464 - DNA, 20 bp, synthetic construct
  source 1..20: mol_type = other DNA
ttcctgccggggcggcccca

SEQ ID NO: 18465 - DNA, 20 bp, synthetic construct
  source 1..20: mol_type = other DNA
actgggatacccttagactg

SEQ ID NO: 18466 - DNA, 20 bp, synthetic construct
  source 1..20: mol_type = other DNA
caggacgcggggtgggggac

SEQ ID NO: 18467 - DNA, 20 bp, synthetic construct
  source 1..20: mol_type = other DNA
cgcggttttcttaactttag

SEQ ID NO: 18468 - DNA, 20 bp, synthetic construct
  source 1..20: mol_type = other DNA
atggagaagccgcggcggag

SEQ ID NO: 18469 - DNA, 20 bp, synthetic construct
  source 1..20: mol_type = other DNA
tctctgcagcccagcaccag

SEQ ID NO: 18470 - DNA, 20 bp, synthetic construct
  source 1..20: mol_type = other DNA
ctggtatccctaagactggg

SEQ ID NO: 18471 - DNA, 20 bp, synthetic construct
  source 1..20: mol_type = other DNA
gagacaccccgtttcgtagt

SEQ ID NO: 18472 - DNA, 20 bp, synthetic construct
  source 1..20: mol_type = other DNA
cgcactgagcctaagcagcc

SEQ ID NO: 18473 - DNA, 20 bp, synthetic construct
  source 1..20: mol_type = other DNA
gcgcggctgaggcgcggcgg

SEQ ID NO: 18474 - DNA, 20 bp, synthetic construct
  source 1..20: mol_type = other DNA
cccaagacatctctgcacag

SEQ ID NO: 18475 - DNA, 20 bp, synthetic construct
  source 1..20: mol_type = other DNA
gccgcccggtgcactgtgga

SEQ ID NO: 18476 - DNA, 20 bp, synthetic construct
  source 1..20: mol_type = other DNA
ctgtatgatccaaggtaccc

SEQ ID NO: 18477 - DNA, 20 bp, synthetic construct
  source 1..20: mol_type = other DNA
cggcggcgggaacccggata

SEQ ID NO: 18478 - DNA, 20 bp, synthetic construct
  source 1..20: mol_type = other DNA
ggaccgcgtcctgcgccgga

SEQ ID NO: 18479 - DNA, 20 bp, synthetic construct
  source 1..20: mol_type = other DNA
gcctcattccttagctgggg

SEQ ID NO: 18480 - DNA, 20 bp, synthetic construct
  source 1..20: mol_type = other DNA
tgctgctgaggcgtgagaat

SEQ ID NO: 18481 - DNA, 20 bp, synthetic construct
  source 1..20: mol_type = other DNA
gggggctggggcatggtcta

SEQ ID NO: 18482 - DNA, 20 bp, synthetic construct
  source 1..20: mol_type = other DNA
gtgtacgcccgcagagccgc

SEQ ID NO: 18483 - DNA, 20 bp, synthetic construct
  source 1..20: mol_type = other DNA
gatcaccttgggatgatggt

SEQ ID NO: 18484 - DNA, 20 bp, synthetic construct
  source 1..20: mol_type = other DNA
gggtgcagtgagacaccagg

SEQ ID NO: 18485 - DNA, 20 bp, synthetic construct
  source 1..20: mol_type = other DNA
cggactgggcccagcttgtc

SEQ ID NO: 18486 - DNA, 20 bp, synthetic construct
  source 1..20: mol_type = other DNA
accctgtgatctgcaagtcc

SEQ ID NO: 18487 - DNA, 20 bp, synthetic construct
  source 1..20: mol_type = other DNA
ttggagctctgcgtctcgtc

SEQ ID NO: 18488 - DNA, 20 bp, synthetic construct
  source 1..20: mol_type = other DNA
cttttccgcgttctccaact

SEQ ID NO: 18489 - DNA, 20 bp, synthetic construct
  source 1..20: mol_type = other DNA
ggcggctcctccctccgcag

SEQ ID NO: 18490 - DNA, 20 bp, synthetic construct
  source 1..20: mol_type = other DNA
gctctgtgacctgcgggtat

SEQ ID NO: 18491 - DNA, 20 bp, synthetic construct
  source 1..20: mol_type = other DNA
aatgcctctctaaaacatga

SEQ ID NO: 18492 - DNA, 20 bp, synthetic construct
  source 1..20: mol_type = other DNA
gaccgcgggcgagtgcagcc

SEQ ID NO: 18493 - DNA, 20 bp, synthetic construct
  source 1..20: mol_type = other DNA
catctgcctctaggtcccat

SEQ ID NO: 18494 - DNA, 20 bp, synthetic construct
  source 1..20: mol_type = other DNA
cgcgcgcctacactcccgtg

SEQ ID NO: 18495 - DNA, 20 bp, synthetic construct
  source 1..20: mol_type = other DNA
gtcgtcgcagagcacagcct

SEQ ID NO: 18496 - DNA, 20 bp, synthetic construct
  source 1..20: mol_type = other DNA
cttgcttggcccgtccggcg

SEQ ID NO: 18497 - DNA, 20 bp, synthetic construct
  source 1..20: mol_type = other DNA
gccaagagcactgcatgagc

SEQ ID NO: 18498 - DNA, 20 bp, synthetic construct
  source 1..20: mol_type = other DNA
gcgagacttcctgctcatct

SEQ ID NO: 18499 - DNA, 20 bp, synthetic construct
  source 1..20: mol_type = other DNA
cgagacggagggccagagag

SEQ ID NO: 18500 - DNA, 20 bp, synthetic construct
  source 1..20: mol_type = other DNA
agccctccctagcatcacca

SEQ ID NO: 18501 - DNA, 20 bp, synthetic construct
  source 1..20: mol_type = other DNA
gcctcgggaggtggtggagt

SEQ ID NO: 18502 - DNA, 20 bp, synthetic construct
  source 1..20: mol_type = other DNA
cggcctccgtcacagccacc

SEQ ID NO: 18503 - DNA, 20 bp, synthetic construct
  source 1..20: mol_type = other DNA
tccttagccaaatctactga

SEQ ID NO: 18504 - DNA, 20 bp, synthetic construct
  source 1..20: mol_type = other DNA
tgtcgtccgctctctctgcc

SEQ ID NO: 18505 - DNA, 20 bp, synthetic construct
  source 1..20: mol_type = other DNA
accgtgttgcattcatcttt

SEQ ID NO: 18506 - DNA, 20 bp, synthetic construct
  source 1..20: mol_type = other DNA
agctgccgggacggtcccca

SEQ ID NO: 18507 - DNA, 20 bp, synthetic construct
  source 1..20: mol_type = other DNA
gtggcagcggccgtggcagg

SEQ ID NO: 18508 - DNA, 20 bp, synthetic construct
  source 1..20: mol_type = other DNA
ccggggcagaagtgctggtc

SEQ ID NO: 18509 - DNA, 20 bp, synthetic construct
  source 1..20: mol_type = other DNA
tcaccgcctgccgccgcgcc

SEQ ID NO: 18510 - DNA, 20 bp, synthetic construct
  source 1..20: mol_type = other DNA
aacctgttccaccttctcca

SEQ ID NO: 18511 - DNA, 20 bp, synthetic construct
  source 1..20: mol_type = other DNA
cgagcggcgctccaaaaccc

SEQ ID NO: 18512 - DNA, 20 bp, synthetic construct
  source 1..20: mol_type = other DNA
cttccccaaatcccgtaatc

SEQ ID NO: 18513 - DNA, 20 bp, synthetic construct
  source 1..20: mol_type = other DNA
gggatgccgcgcgccgcgcg

SEQ ID NO: 18514 - DNA, 20 bp, synthetic construct
  source 1..20: mol_type = other DNA
ggcggagaagactcgaacgg

SEQ ID NO: 18515 - DNA, 20 bp, synthetic construct
  source 1..20: mol_type = other DNA
gcctcccctcggaactcggg

SEQ ID NO: 18516 - DNA, 20 bp, synthetic construct
  source 1..20: mol_type = other DNA
gctgactggcgggtggggtt

SEQ ID NO: 18517 - DNA, 20 bp, synthetic construct
  source 1..20: mol_type = other DNA
gagttgctcagtggctctgc

SEQ ID NO: 18518 - DNA, 20 bp, synthetic construct
  source 1..20: mol_type = other DNA
ccggcggtggacccacgagc

SEQ ID NO: 18519 - DNA, 20 bp, synthetic construct
  source 1..20: mol_type = other DNA
gaacatggcggcccccgagt

SEQ ID NO: 18520 - DNA, 20 bp, synthetic construct
  source 1..20: mol_type = other DNA
gagtggaaagctgctgctga

SEQ ID NO: 18521 - DNA, 20 bp, synthetic construct
  source 1..20: mol_type = other DNA
tgcaggaggtggcactcctg

SEQ ID NO: 18522 - DNA, 20 bp, synthetic construct
  source 1..20: mol_type = other DNA
cccggtaaaggcctccgtgt

SEQ ID NO: 18523 - DNA, 20 bp, synthetic construct
  source 1..20: mol_type = other DNA
ggagcgccccgccccctccc

SEQ ID NO: 18524 - DNA, 20 bp, synthetic construct
  source 1..20: mol_type = other DNA
gtctccgccttctgcatcgc

SEQ ID NO: 18525 - DNA, 20 bp, synthetic construct
  source 1..20: mol_type = other DNA
aggagaatgaaaggttgcag

SEQ ID NO: 18526 - DNA, 20 bp, synthetic construct
  source 1..20: mol_type = other DNA
tgaagctagaatctcagaag

SEQ ID NO: 18527 - DNA, 20 bp, synthetic construct
  source 1..20: mol_type = other DNA
ttcagtatttgttattgtga

SEQ ID NO: 18528 - DNA, 20 bp, synthetic construct
  source 1..20: mol_type = other DNA
cgcggggtccgctatggcgg

SEQ ID NO: 18529 - DNA, 20 bp, synthetic construct
  source 1..20: mol_type = other DNA
ggaggaggtactcgccttac

SEQ ID NO: 18530 - DNA, 20 bp, synthetic construct
  source 1..20: mol_type = other DNA
actcttcagtctttgcaggc

SEQ ID NO: 18531 - DNA, 20 bp, synthetic construct
  source 1..20: mol_type = other DNA
gtcatcaggcaggtactaga

SEQ ID NO: 18532 - DNA, 20 bp, synthetic construct
  source 1..20: mol_type = other DNA
aagggctcgagacgcagccg

SEQ ID NO: 18533 - DNA, 20 bp, synthetic construct
  source 1..20: mol_type = other DNA
acaaatttttatgtggaggc

SEQ ID NO: 18534 - DNA, 20 bp, synthetic construct
  source 1..20: mol_type = other DNA
ctgcaacgtgtctctggggc

SEQ ID NO: 18535 - DNA, 20 bp, synthetic construct
  source 1..20: mol_type = other DNA
gcgcacgcatcctgcccgcg

SEQ ID NO: 18536 - DNA, 20 bp, synthetic construct
  source 1..20: mol_type = other DNA
cgcgaagagccctctgtacc

SEQ ID NO: 18537 - DNA, 20 bp, synthetic construct
  source 1..20: mol_type = other DNA
gcgcggcggtggaaggtgtc

SEQ ID NO: 18538 - DNA, 20 bp, synthetic construct
  source 1..20: mol_type = other DNA
ggctgcacgcggtgaagaaa

SEQ ID NO: 18539 - DNA, 20 bp, synthetic construct
  source 1..20: mol_type = other DNA
agccggggagccgccgccgc

SEQ ID NO: 18540 - DNA, 20 bp, synthetic construct
  source 1..20: mol_type = other DNA
accgttcttattgctggcgg

SEQ ID NO: 18541 - DNA, 20 bp, synthetic construct
  source 1..20: mol_type = other DNA
aggtcccggcaaccgcaggc

SEQ ID NO: 18542 - DNA, 20 bp, synthetic construct
  source 1..20: mol_type = other DNA
gatggcggcttcctagtgag

SEQ ID NO: 18543 - DNA, 20 bp, synthetic construct
  source 1..20: mol_type = other DNA
ggcctcctgacctttcacac

SEQ ID NO: 18544 - DNA, 20 bp, synthetic construct
  source 1..20: mol_type = other DNA
gtggggcggtggcgtcccac

SEQ ID NO: 18545 - DNA, 20 bp, synthetic construct
  source 1..20: mol_type = other DNA
gagggagcccagtggaggcg

SEQ ID NO: 18546 - DNA, 20 bp, synthetic construct
  source 1..20: mol_type = other DNA
ttttgtcaaagaggcctcct

SEQ ID NO: 18547 - DNA, 20 bp, synthetic construct
  source 1..20: mol_type = other DNA
tcacagccagtgcaccggag

SEQ ID NO: 18548 - DNA, 20 bp, synthetic construct
  source 1..20: mol_type = other DNA
gagttgtaagacgttcatcg

SEQ ID NO: 18549 - DNA, 20 bp, synthetic construct
  source 1..20: mol_type = other DNA
ccggttgtcctcttcgctgc

SEQ ID NO: 18550 - DNA, 20 bp, synthetic construct
  source 1..20: mol_type = other DNA
ttacgcgggccagttgttgc

SEQ ID NO: 18551 - DNA, 20 bp, synthetic construct
  source 1..20: mol_type = other DNA
cagccggggactctgcgcct

SEQ ID NO: 18552 - DNA, 20 bp, synthetic construct
  source 1..20: mol_type = other DNA
gggagccgcggacaagccca

SEQ ID NO: 18553 - DNA, 20 bp, synthetic construct
  source 1..20: mol_type = other DNA
ggcccccagcgtgttgaccg

SEQ ID NO: 18554 - DNA, 20 bp, synthetic construct
  source 1..20: mol_type = other DNA
agcagcggcggacgctctgc

SEQ ID NO: 18555 - DNA, 20 bp, synthetic construct
  source 1..20: mol_type = other DNA
gttgctctgcgctctgcggc

SEQ ID NO: 18556 - DNA, 20 bp, synthetic construct
  source 1..20: mol_type = other DNA
tttccggataacgactacag

SEQ ID NO: 18557 - DNA, 20 bp, synthetic construct
  source 1..20: mol_type = other DNA
ttttccatttacctccgctg

SEQ ID NO: 18558 - DNA, 20 bp, synthetic construct
  source 1..20: mol_type = other DNA
ggagacgtgggccctcggaa

SEQ ID NO: 18559 - DNA, 20 bp, synthetic construct
  source 1..20: mol_type = other DNA
agctctgtgtgatttctgga

SEQ ID NO: 18560 - DNA, 20 bp, synthetic construct
  source 1..20: mol_type = other DNA
cagaaccagcaaaaccagaa

SEQ ID NO: 18561 - DNA, 20 bp, synthetic construct
  source 1..20: mol_type = other DNA
gggaggcctggctgtgtgga

SEQ ID NO: 18562 - DNA, 20 bp, synthetic construct
  source 1..20: mol_type = other DNA
cccagacagagtgtccccac

SEQ ID NO: 18563 - DNA, 20 bp, synthetic construct
  source 1..20: mol_type = other DNA
agcagcaggcgagcctcggc

SEQ ID NO: 18564 - DNA, 20 bp, synthetic construct
  source 1..20: mol_type = other DNA
ttccggggagaagcctttcc

SEQ ID NO: 18565 - DNA, 20 bp, synthetic construct
  source 1..20: mol_type = other DNA
aaagataggaactgacagga

SEQ ID NO: 18566 - DNA, 20 bp, synthetic construct
  source 1..20: mol_type = other DNA
tccgctgggctgcagggact

SEQ ID NO: 18567 - DNA, 20 bp, synthetic construct
  source 1..20: mol_type = other DNA
agtgcaatggcgctatctcg

SEQ ID NO: 18568 - DNA, 20 bp, synthetic construct
  source 1..20: mol_type = other DNA
gtagcggcggcggctcgggc

SEQ ID NO: 18569 - DNA, 20 bp, synthetic construct
  source 1..20: mol_type = other DNA
gaccccaccccctggctacc

SEQ ID NO: 18570 - DNA, 20 bp, synthetic construct
  source 1..20: mol_type = other DNA
gcgcagctctggtacaccgg

SEQ ID NO: 18571 - DNA, 20 bp, synthetic construct
  source 1..20: mol_type = other DNA
tgcgcagtggcgtccgctgt

SEQ ID NO: 18572 - DNA, 20 bp, synthetic construct
  source 1..20: mol_type = other DNA
tccggcggagcgcgcctccc

SEQ ID NO: 18573 - DNA, 20 bp, synthetic construct
  source 1..20: mol_type = other DNA
cttccgggcaaacgaccatc

SEQ ID NO: 18574 - DNA, 20 bp, synthetic construct
  source 1..20: mol_type = other DNA
aagagcggcgcgacgtgagc

SEQ ID NO: 18575 - DNA, 20 bp, synthetic construct
  source 1..20: mol_type = other DNA
ctagcactagaaggtgaggc

SEQ ID NO: 18576 - DNA, 20 bp, synthetic construct
  source 1..20: mol_type = other DNA
ccgcggacgtccttgtgggc

SEQ ID NO: 18577 - DNA, 20 bp, synthetic construct
  source 1..20: mol_type = other DNA
tcctcccgccggcgctgggc

SEQ ID NO: 18578 - DNA, 20 bp, synthetic construct
  source 1..20: mol_type = other DNA
gcggtggggggaaagcggcc

SEQ ID NO: 18579 - DNA, 20 bp, synthetic construct
  source 1..20: mol_type = other DNA
tctggctataaaaatgctat

SEQ ID NO: 18580 - DNA, 20 bp, synthetic construct
  source 1..20: mol_type = other DNA
ccgccccgcccgcggctgct

SEQ ID NO: 18581 - DNA, 20 bp, synthetic construct
  source 1..20: mol_type = other DNA
acgtagctgcccttcagcca

SEQ ID NO: 18582 - DNA, 20 bp, synthetic construct
  source 1..20: mol_type = other DNA
tttttgcatttttcctccca

SEQ ID NO: 18583 - DNA, 20 bp, synthetic construct
  source 1..20: mol_type = other DNA
aactgcccaggagtgagtag

SEQ ID NO: 18584 - DNA, 20 bp, synthetic construct
  source 1..20: mol_type = other DNA
cttggtggttttgctgcagc

SEQ ID NO: 18585 - DNA, 20 bp, synthetic construct
  source 1..20: mol_type = other DNA
ctggccttccatctctctca

SEQ ID NO: 18586 - DNA, 20 bp, synthetic construct
  source 1..20: mol_type = other DNA
caccctcactggctgtcgct

SEQ ID NO: 18587 - DNA, 20 bp, synthetic construct
  source 1..20: mol_type = other DNA
gccttccatctctctcagac

SEQ ID NO: 18588 - DNA, 20 bp, synthetic construct
  source 1..20: mol_type = other DNA
aatcagactccaagcagcga

SEQ ID NO: 18589 - DNA, 20 bp, synthetic construct
  source 1..20: mol_type = other DNA
tctcagacaccaagctgcag

SEQ ID NO: 18590 - DNA, 20 bp, synthetic construct
  source 1..20: mol_type = other DNA
taacactgccccaagtgaaa

SEQ ID NO: 18591 - DNA, 20 bp, synthetic construct
  source 1..20: mol_type = other DNA
taattaagcaagagaaactg

SEQ ID NO: 18592 - DNA, 20 bp, synthetic construct
  source 1..20: mol_type = other DNA
tagagacaaaatatcagtgt

SEQ ID NO: 18593 - DNA, 20 bp, synthetic construct
  source 1..20: mol_type = other DNA
tccttgaccacaacaaagat

SEQ ID NO: 18594 - DNA, 20 bp, synthetic construct
  source 1..20: mol_type = other DNA
gattcttctgcctcagcctc

SEQ ID NO: 18595 - DNA, 20 bp, synthetic construct
  source 1..20: mol_type = other DNA
ccatcattctccacccagct

SEQ ID NO: 18596 - DNA, 20 bp, synthetic construct
  source 1..20: mol_type = other DNA
ccagcttgcctcctcttgag

SEQ ID NO: 18597 - DNA, 20 bp, synthetic construct
  source 1..20: mol_type = other DNA
tgcgcgctgggcggaaagga

SEQ ID NO: 18598 - DNA, 20 bp, synthetic construct
  source 1..20: mol_type = other DNA
gttaatggcttttctgcacg

SEQ ID NO: 18599 - DNA, 20 bp, synthetic construct
  source 1..20: mol_type = other DNA
taccaaatcactggacctta

SEQ ID NO: 18600 - DNA, 20 bp, synthetic construct
  source 1..20: mol_type = other DNA
cctgtcgcagccgcgccgcc

SEQ ID NO: 18601 - DNA, 20 bp, synthetic construct
  source 1..20: mol_type = other DNA
attcccgaagggcaagaagt

SEQ ID NO: 18602 - DNA, 20 bp, synthetic construct
  source 1..20: mol_type = other DNA
ccaggacctgcaggaaggga

SEQ ID NO: 18603 - DNA, 20 bp, synthetic construct
  source 1..20: mol_type = other DNA
tcccccactggaaaggattc

SEQ ID NO: 18604 - DNA, 20 bp, synthetic construct
  source 1..20: mol_type = other DNA
ggcagcatcactgtgcctgt

SEQ ID NO: 18605 - DNA, 20 bp, synthetic construct
  source 1..20: mol_type = other DNA
gggggagaccagcgcaggtc

SEQ ID NO: 18606 - DNA, 20 bp, synthetic construct
  source 1..20: mol_type = other DNA
ccttgggttcgggtgaaagc

SEQ ID NO: 18607 - DNA, 20 bp, synthetic construct
  source 1..20: mol_type = other DNA
tcaggctccataatgggaga

SEQ ID NO: 18608 - DNA, 20 bp, synthetic construct
  source 1..20: mol_type = other DNA
agcaacaaaactgacggagg

SEQ ID NO: 18609 - DNA, 20 bp, synthetic construct
  source 1..20: mol_type = other DNA
gctacagttaattaatcctt

SEQ ID NO: 18610 - DNA, 20 bp, synthetic construct
  source 1..20: mol_type = other DNA
ccatctcacctctgtcggat

SEQ ID NO: 18611 - DNA, 20 bp, synthetic construct
  source 1..20: mol_type = other DNA
aggtcacagggcaccgctgg

SEQ ID NO: 18612 - DNA, 20 bp, synthetic construct
  source 1..20: mol_type = other DNA
ggtcgcgcggctcgcgcagg

SEQ ID NO: 18613 - DNA, 20 bp, synthetic construct
  source 1..20: mol_type = other DNA
tccccctctcctccatcccc

SEQ ID NO: 18614 - DNA, 20 bp, synthetic construct
  source 1..20: mol_type = other DNA
cttccccctctctcctggga

SEQ ID NO: 18615 - DNA, 20 bp, synthetic construct
  source 1..20: mol_type = other DNA
gcccggttggccaccccgtt

SEQ ID NO: 18616 - DNA, 20 bp, synthetic construct
  source 1..20: mol_type = other DNA
ctgagcctgaactaggagca

SEQ ID NO: 18617 - DNA, 20 bp, synthetic construct
  source 1..20: mol_type = other DNA
aggttcttcttgaggaaact

SEQ ID NO: 18618 - DNA, 20 bp, synthetic construct
  source 1..20: mol_type = other DNA
gggtttgaatgtgccccggc

SEQ ID NO: 18619 - DNA, 20 bp, synthetic construct
  source 1..20: mol_type = other DNA
gcctgaagaccaaggagtgg

SEQ ID NO: 18620 - DNA, 20 bp, synthetic construct
  source 1..20: mol_type = other DNA
gtacatcccctcctccccca

SEQ ID NO: 18621 - DNA, 20 bp, synthetic construct
  source 1..20: mol_type = other DNA
aacggagaaaagaagccgtg

SEQ ID NO: 18622 - DNA, 20 bp, synthetic construct
  source 1..20: mol_type = other DNA
gcgtcccgccagaacgatcg

SEQ ID NO: 18623 - DNA, 20 bp, synthetic construct
  source 1..20: mol_type = other DNA
cagcgtcctaggactcacct

SEQ ID NO: 18624 - DNA, 20 bp, synthetic construct
  source 1..20: mol_type = other DNA
cgcagcgatcgcgagcgtgt

SEQ ID NO: 18625 - DNA, 20 bp, synthetic construct
  source 1..20: mol_type = other DNA
cgtactcgtgcgcctcgctt

SEQ ID NO: 18626 - DNA, 20 bp, synthetic construct
  source 1..20: mol_type = other DNA
cgccccatcctgtctgtccg

SEQ ID NO: 18627 - DNA, 20 bp, synthetic construct
  source 1..20: mol_type = other DNA
ttcctttagcccgctggcgc

SEQ ID NO: 18628 - DNA, 20 bp, synthetic construct
  source 1..20: mol_type = other DNA
gtgagagggaggctccccat

SEQ ID NO: 18629 - DNA, 20 bp, synthetic construct
  source 1..20: mol_type = other DNA
tcaagctccggacagggaag

SEQ ID NO: 18630 - DNA, 20 bp, synthetic construct
  source 1..20: mol_type = other DNA
ccaaagctgaccaagaagaa

SEQ ID NO: 18631 - DNA, 20 bp, synthetic construct
  source 1..20: mol_type = other DNA
gcctgggtgcagcagtgtgc

SEQ ID NO: 18632 - DNA, 20 bp, synthetic construct
  source 1..20: mol_type = other DNA
tcgtggcgtgtgcggtttcg

SEQ ID NO: 18633 - DNA, 20 bp, synthetic construct
  source 1..20: mol_type = other DNA
cagcacctcctcgccagcag

SEQ ID NO: 18634 - DNA, 20 bp, synthetic construct
  source 1..20: mol_type = other DNA
gccagttcaaagccctgctg

SEQ ID NO: 18635 - DNA, 20 bp, synthetic construct
  source 1..20: mol_type = other DNA
tggcgcttgggtactggctg

SEQ ID NO: 18636 - DNA, 20 bp, synthetic construct
  source 1..20: mol_type = other DNA
catcttggctcactgcagtg

SEQ ID NO: 18637 - DNA, 20 bp, synthetic construct
  source 1..20: mol_type = other DNA
tgtgctgagcggcgggactg

SEQ ID NO: 18638 - DNA, 20 bp, synthetic construct
  source 1..20: mol_type = other DNA
agggggagctggaggctgga

SEQ ID NO: 18639 - DNA, 20 bp, synthetic construct
  source 1..20: mol_type = other DNA
ttctcgtgagcttaggccgc

SEQ ID NO: 18640 - DNA, 20 bp, synthetic construct
  source 1..20: mol_type = other DNA
acaccatggtcaactcctgt

SEQ ID NO: 18641 - DNA, 20 bp, synthetic construct
  source 1..20: mol_type = other DNA
acttttaagtttttccgctt

SEQ ID NO: 18642 - DNA, 20 bp, synthetic construct
  source 1..20: mol_type = other DNA
aggaccacgcaggaggtggt

SEQ ID NO: 18643 - DNA, 20 bp, synthetic construct
  source 1..20: mol_type = other DNA
ccccgcctccacgtgagagc

SEQ ID NO: 18644 - DNA, 20 bp, synthetic construct
  source 1..20: mol_type = other DNA
aggcggggctgctaggcctc

SEQ ID NO: 18645 - DNA, 20 bp, synthetic construct
  source 1..20: mol_type = other DNA
gaaaactacccctaaaagcc

SEQ ID NO: 18646 - DNA, 20 bp, synthetic construct
  source 1..20: mol_type = other DNA
gggcgtggtgtcctggtgct

SEQ ID NO: 18647 - DNA, 20 bp, synthetic construct
  source 1..20: mol_type = other DNA
cccttcggacctcgtctccc

SEQ ID NO: 18648 - DNA, 20 bp, synthetic construct
  source 1..20: mol_type = other DNA
cagtagtaatttgagcctct

SEQ ID NO: 18649 - DNA, 20 bp, synthetic construct
  source 1..20: mol_type = other DNA
ccagctgcagagagcttcag

SEQ ID NO: 18650 - DNA, 20 bp, synthetic construct
  source 1..20: mol_type = other DNA
ttgcaaggaagggcgagatt

SEQ ID NO: 18651 - DNA, 20 bp, synthetic construct
  source 1..20: mol_type = other DNA
cgtggtggtgcaggcgagac

SEQ ID NO: 18652 - DNA, 20 bp, synthetic construct
  source 1..20: mol_type = other DNA
tcaagtgttgcggagatagg

SEQ ID NO: 18653 - DNA, 20 bp, synthetic construct
  source 1..20: mol_type = other DNA
aagatggcggctgctgtagg

SEQ ID NO: 18654 - DNA, 20 bp, synthetic construct
  source 1..20: mol_type = other DNA
acctcgcacagcctctccca

SEQ ID NO: 18655 - DNA, 20 bp, synthetic construct
  source 1..20: mol_type = other DNA
tgagcttcagggaaaagaag

SEQ ID NO: 18656 - DNA, 20 bp, synthetic construct
  source 1..20: mol_type = other DNA
ggtgacgctgctgctggggc

SEQ ID NO: 18657 - DNA, 20 bp, synthetic construct
  source 1..20: mol_type = other DNA
cagctaacctctaatgggag

SEQ ID NO: 18658 - DNA, 20 bp, synthetic construct
  source 1..20: mol_type = other DNA
cagccgctacttaagaggct

SEQ ID NO: 18659 - DNA, 20 bp, synthetic construct
  source 1..20: mol_type = other DNA
tgcaccctcgcacccacacc

SEQ ID NO: 18660 - DNA, 20 bp, synthetic construct
  source 1..20: mol_type = other DNA
cccgcggtcctccgtcggtt

SEQ ID NO: 18661 - DNA, 20 bp, synthetic construct
  source 1..20: mol_type = other DNA
accgacaaccaagaccccgc

SEQ ID NO: 18662 - DNA, 20 bp, synthetic construct
  source 1..20: mol_type = other DNA
ccagaatggctactctgatc

SEQ ID NO: 18663 - DNA, 20 bp, synthetic construct
  source 1..20: mol_type = other DNA
agaggtctgtacctcgaggg

SEQ ID NO: 18664 - DNA, 20 bp, synthetic construct
  source 1..20: mol_type = other DNA
cagtcgccccgacgctagtg

SEQ ID NO: 18665 - DNA, 20 bp, synthetic construct
  source 1..20: mol_type = other DNA
gtcctttgcatctgcacgtg

SEQ ID NO: 18666 - DNA, 20 bp, synthetic construct
  source 1..20: mol_type = other DNA
caccctctcccctcgtccac

SEQ ID NO: 18667 - DNA, 20 bp, synthetic construct
  source 1..20: mol_type = other DNA
tggacaaaatggcgaagatc

SEQ ID NO: 18668 - DNA, 20 bp, synthetic construct
  source 1..20: mol_type = other DNA
ctttatctcctgactcacgg

SEQ ID NO: 18669 - DNA, 20 bp, synthetic construct
  source 1..20: mol_type = other DNA
ggggctgcttagatgcgcca

SEQ ID NO: 18670 - DNA, 20 bp, synthetic construct
  source 1..20: mol_type = other DNA
gagcgccggagcggagggag

SEQ ID NO: 18671 - DNA, 20 bp, synthetic construct
  source 1..20: mol_type = other DNA
ccatggccgcctctcccgga

SEQ ID NO: 18672 - DNA, 20 bp, synthetic construct
  source 1..20: mol_type = other DNA
gataatcggcgcccggggcc

SEQ ID NO: 18673 - DNA, 20 bp, synthetic construct
  source 1..20: mol_type = other DNA
actgtgcacgagcgaagggt

SEQ ID NO: 18674 - DNA, 20 bp, synthetic construct
  source 1..20: mol_type = other DNA
cggtagtcgattggtcaagt

SEQ ID NO: 18675 - DNA, 20 bp, synthetic construct
  source 1..20: mol_type = other DNA
tcctgctcggcggagtggtg

SEQ ID NO: 18676 - DNA, 20 bp, synthetic construct
  source 1..20: mol_type = other DNA
actgtcacatggtgcgcgct

SEQ ID NO: 18677 - DNA, 20 bp, synthetic construct
  source 1..20: mol_type = other DNA
tccgtccgctcgccgcaccg

SEQ ID NO: 18678 - DNA, 20 bp, synthetic construct
  source 1..20: mol_type = other DNA
cgggtttgatatttgacaaa

SEQ ID NO: 18679 - DNA, 20 bp, synthetic construct
  source 1..20: mol_type = other DNA
cctctacccacccgccgcac

SEQ ID NO: 18680 - DNA, 20 bp, synthetic construct
  source 1..20: mol_type = other DNA
ggcggcgaggagagcggtgc

SEQ ID NO: 18681 - DNA, 20 bp, synthetic construct
  source 1..20: mol_type = other DNA
ggactcgagtctcaaccggg

SEQ ID NO: 18682 - DNA, 20 bp, synthetic construct
  source 1..20: mol_type = other DNA
gttggtcctggagcggcgca

SEQ ID NO: 18683 - DNA, 20 bp, synthetic construct
  source 1..20: mol_type = other DNA
cgagcagcagagtccgcacg

SEQ ID NO: 18684 - DNA, 20 bp, synthetic construct
  source 1..20: mol_type = other DNA
cgtgcacattgctttgcttg

SEQ ID NO: 18685 - DNA, 20 bp, synthetic construct
  source 1..20: mol_type = other DNA
cggtagcgggagcggagagc

SEQ ID NO: 18686 - DNA, 20 bp, synthetic construct
  source 1..20: mol_type = other DNA
ccctcggagtcaccgtggcc

SEQ ID NO: 18687 - DNA, 20 bp, synthetic construct
  source 1..20: mol_type = other DNA
gcgcggcatagcccggctcg

SEQ ID NO: 18688 - DNA, 20 bp, synthetic construct
  source 1..20: mol_type = other DNA
ttctttcggttctacctggg

SEQ ID NO: 18689 - DNA, 20 bp, synthetic construct
  source 1..20: mol_type = other DNA
cggacgcagtctggccgcca

SEQ ID NO: 18690 - DNA, 20 bp, synthetic construct
  source 1..20: mol_type = other DNA
ggctctcggctgcagcgctg

SEQ ID NO: 18691 - DNA, 20 bp, synthetic construct
  source 1..20: mol_type = other DNA
cggcgcaggggcggagcgaa

SEQ ID NO: 18692 - DNA, 20 bp, synthetic construct
  source 1..20: mol_type = other DNA
aacaaaaagcaacacccccc

SEQ ID NO: 18693 - DNA, 20 bp, synthetic construct
  source 1..20: mol_type = other DNA
cccatcacttaataaatagc

SEQ ID NO: 18694 - DNA, 20 bp, synthetic construct
  source 1..20: mol_type = other DNA
ttcactgccataaatgtggg

SEQ ID NO: 18695 - DNA, 20 bp, synthetic construct
  source 1..20: mol_type = other DNA
cagccattccgaaggtcaag

SEQ ID NO: 18696 - DNA, 20 bp, synthetic construct
  source 1..20: mol_type = other DNA
ggatgatccatcggtccacg

SEQ ID NO: 18697 - DNA, 20 bp, synthetic construct
  source 1..20: mol_type = other DNA
caccaaagattgagacggac

SEQ ID NO: 18698 - DNA, 20 bp, synthetic construct
  source 1..20: mol_type = other DNA
tgaaagaagagatggagaaa

SEQ ID NO: 18699 - DNA, 20 bp, synthetic construct
  source 1..20: mol_type = other DNA
ggcggtgccccataggatgt

SEQ ID NO: 18700 - DNA, 20 bp, synthetic construct
  source 1..20: mol_type = other DNA
cgaaacacagagtagtgtcc

SEQ ID NO: 18701 - DNA, 20 bp, synthetic construct
  source 1..20: mol_type = other DNA
caaaaacaagtcccatgtcc

SEQ ID NO: 18702 - DNA, 20 bp, synthetic construct
  source 1..20: mol_type = other DNA
agtagactccttcgaacgta

SEQ ID NO: 18703 - DNA, 20 bp, synthetic construct
  source 1..20: mol_type = other DNA
ctaaagacattgtcaccgag

SEQ ID NO: 18704 - DNA, 20 bp, synthetic construct
  source 1..20: mol_type = other DNA
gcttaagaatttaagctctg

SEQ ID NO: 18705 - DNA, 20 bp, synthetic construct
  source 1..20: mol_type = other DNA
tgtgtgtgtgtgtgtgtgtg

SEQ ID NO: 18706 - DNA, 20 bp, synthetic construct
  source 1..20: mol_type = other DNA
cccatcctctctctgtgccc

SEQ ID NO: 18707 - DNA, 20 bp, synthetic construct
  source 1..20: mol_type = other DNA
caagatggctattggtctgc

SEQ ID NO: 18708 - DNA, 20 bp, synthetic construct
  source 1..20: mol_type = other DNA
actcttaagtgcataatgat

SEQ ID NO: 18709 - DNA, 20 bp, synthetic construct
  source 1..20: mol_type = other DNA
ggtgctcacagaaccctttt

SEQ ID NO: 18710 - DNA, 20 bp, synthetic construct
  source 1..20: mol_type = other DNA
aactacccaactatgttgtg

SEQ ID NO: 18711 - DNA, 20 bp, synthetic construct
  source 1..20: mol_type = other DNA
tgaaaagctgtgtcgtgttc

SEQ ID NO: 18712 - DNA, 20 bp, synthetic construct
  source 1..20: mol_type = other DNA
tgtgatccctacctgctccc

SEQ ID NO: 18713 - DNA, 20 bp, synthetic construct
  source 1..20: mol_type = other DNA
cctggactaccagcggatgt

SEQ ID NO: 18714 - DNA, 20 bp, synthetic construct
  source 1..20: mol_type = other DNA
gatcctggattacaaggatt

SEQ ID NO: 18715 - DNA, 20 bp, synthetic construct
  source 1..20: mol_type = other DNA
agggtaccaggatgttcggg

SEQ ID NO: 18716 - DNA, 20 bp, synthetic construct
  source 1..20: mol_type = other DNA
ccaggcaccagaccccagcg

SEQ ID NO: 18717 - DNA, 20 bp, synthetic construct
  source 1..20: mol_type = other DNA
atggcgtagaaatttctatg

SEQ ID NO: 18718 - DNA, 20 bp, synthetic construct
  source 1..20: mol_type = other DNA
tttgtcctgctgtgttgcag

SEQ ID NO: 18719 - DNA, 20 bp, synthetic construct
  source 1..20: mol_type = other DNA
caagtagaatagtttctgag

SEQ ID NO: 18720 - DNA, 20 bp, synthetic construct
  source 1..20: mol_type = other DNA
gtgtgtgtgtgtgtgtgtgt

SEQ ID NO: 18721 - DNA, 20 bp, synthetic construct
  source 1..20: mol_type = other DNA
cctcttccttggtctacata

SEQ ID NO: 18722 - DNA, 20 bp, synthetic construct
  source 1..20: mol_type = other DNA
atgtccatcctggtcacagc

SEQ ID NO: 18723 - DNA, 20 bp, synthetic construct
  source 1..20: mol_type = other DNA
tgggaacatttgacttcctt

SEQ ID NO: 18724 - DNA, 20 bp, synthetic construct
  source 1..20: mol_type = other DNA
gcacagctagctatgcatct

SEQ ID NO: 18725 - DNA, 20 bp, synthetic construct
  source 1..20: mol_type = other DNA
agacaggtgaccgctccagg

SEQ ID NO: 18726 - DNA, 20 bp, synthetic construct
  source 1..20: mol_type = other DNA
ctgtacttcctatgccagcc

SEQ ID NO: 18727 - DNA, 20 bp, synthetic construct
  source 1..20: mol_type = other DNA
tctggtgggcgggcgggagc

SEQ ID NO: 18728 - DNA, 20 bp, synthetic construct
  source 1..20: mol_type = other DNA
gtggattgacaccacggctt

SEQ ID NO: 18729 - DNA, 20 bp, synthetic construct
  source 1..20: mol_type = other DNA
tgcagacaccatcaaggacc

SEQ ID NO: 18730 - DNA, 20 bp, synthetic construct
  source 1..20: mol_type = other DNA
gcgcgagggggaccagctga

SEQ ID NO: 18731 - DNA, 20 bp, synthetic construct
  source 1..20: mol_type = other DNA
gtgtccgggatgtgtggcca

SEQ ID NO: 18732 - DNA, 20 bp, synthetic construct
  source 1..20: mol_type = other DNA
ttacccatgactcagcctgg

SEQ ID NO: 18733 - DNA, 20 bp, synthetic construct
  source 1..20: mol_type = other DNA
gtagctgaggactggtctga

SEQ ID NO: 18734 - DNA, 20 bp, synthetic construct
  source 1..20: mol_type = other DNA
tacacagctatggaataccg

SEQ ID NO: 18735 - DNA, 20 bp, synthetic construct
  source 1..20: mol_type = other DNA
tttctggatgtattgattca

SEQ ID NO: 18736 - DNA, 20 bp, synthetic construct
  source 1..20: mol_type = other DNA
tatattcccccaaaagccaa

SEQ ID NO: 18737 - DNA, 20 bp, synthetic construct
  source 1..20: mol_type = other DNA
agcgcttagatatggtgccg

SEQ ID NO: 18738 - DNA, 20 bp, synthetic construct
  source 1..20: mol_type = other DNA
ctggtgcctctcggctgccc

SEQ ID NO: 18739 - DNA, 20 bp, synthetic construct
  source 1..20: mol_type = other DNA
agaccatggatcacaaccgg

SEQ ID NO: 18740 - DNA, 20 bp, synthetic construct
  source 1..20: mol_type = other DNA
ggcgaagggtatgtggcgag

SEQ ID NO: 18741 - DNA, 20 bp, synthetic construct
  source 1..20: mol_type = other DNA
gatcattcccttttagaagg

SEQ ID NO: 18742 - DNA, 20 bp, synthetic construct
  source 1..20: mol_type = other DNA
gtgcagtattgcattcatta

SEQ ID NO: 18743 - DNA, 20 bp, synthetic construct
  source 1..20: mol_type = other DNA
tcctcctgcctcagcctccc

SEQ ID NO: 18744 - DNA, 20 bp, synthetic construct
  source 1..20: mol_type = other DNA
atatgagccactggcctggc

SEQ ID NO: 18745 - DNA, 20 bp, synthetic construct
  source 1..20: mol_type = other DNA
agccttgaatggcccttgtc

SEQ ID NO: 18746 - DNA, 20 bp, synthetic construct
  source 1..20: mol_type = other DNA
ctcgagccactcccaggacg

SEQ ID NO: 18747 - DNA, 20 bp, synthetic construct
  source 1..20: mol_type = other DNA
agtggcgcggaccttcattt

SEQ ID NO: 18748 - DNA, 20 bp, synthetic construct
  source 1..20: mol_type = other DNA
cctgaccagccatgggggct

SEQ ID NO: 18749 - DNA, 20 bp, synthetic construct
  source 1..20: mol_type = other DNA
tcttggtccatgtgaccgac

SEQ ID NO: 18750 - DNA, 20 bp, synthetic construct
  source 1..20: mol_type = other DNA
ataccttttggggagttgtg

SEQ ID NO: 18751 - DNA, 20 bp, synthetic construct
  source 1..20: mol_type = other DNA
taccctaaactgcctttttt

SEQ ID NO: 18752 - DNA, 20 bp, synthetic construct
  source 1..20: mol_type = other DNA
gtttgggaactggcattact

SEQ ID NO: 18753 - DNA, 20 bp, synthetic construct
  source 1..20: mol_type = other DNA
ggactcagcattgcaaccat

SEQ ID NO: 18754 - DNA, 20 bp, synthetic construct
  source 1..20: mol_type = other DNA
ttctgtccagatgttgaatt

SEQ ID NO: 18755 - DNA, 20 bp, synthetic construct
  source 1..20: mol_type = other DNA
aagaaggggaaagaccaatc

SEQ ID NO: 18756 - DNA, 20 bp, synthetic construct
  source 1..20: mol_type = other DNA
cctacatatgagacaacata

SEQ ID NO: 18757 - DNA, 20 bp, synthetic construct
  source 1..20: mol_type = other DNA
tttggaaaacatatgtgatg

SEQ ID NO: 18758 - DNA, 20 bp, synthetic construct
  source 1..20: mol_type = other DNA
aaaagctattagaagtaaag

SEQ ID NO: 18759 - DNA, 20 bp, synthetic construct
  source 1..20: mol_type = other DNA
ctcttcggtgctaggaaaga

SEQ ID NO: 18760 - DNA, 20 bp, synthetic construct
  source 1..20: mol_type = other DNA
tatacccagccatgaaacaa

SEQ ID NO: 18761 - DNA, 20 bp, synthetic construct
  source 1..20: mol_type = other DNA
tttcaatgtatgtttccatt

SEQ ID NO: 18762 - DNA, 20 bp, synthetic construct
  source 1..20: mol_type = other DNA
agccttttcctaatgcagct

SEQ ID NO: 18763 - DNA, 20 bp, synthetic construct
  source 1..20: mol_type = other DNA
acgggaggccttcacatatt

SEQ ID NO: 18764 - DNA, 20 bp, synthetic construct
  source 1..20: mol_type = other DNA
cctgtctacctttcatgacc

SEQ ID NO: 18765 - DNA, 20 bp, synthetic construct
  source 1..20: mol_type = other DNA
accccaaatttggacttttg

SEQ ID NO: 18766 - DNA, 20 bp, synthetic construct
  source 1..20: mol_type = other DNA
ggaccaccaagaaggcccgg

SEQ ID NO: 18767 - DNA, 20 bp, synthetic construct
  source 1..20: mol_type = other DNA
gaaatcaatggctatacatt

SEQ ID NO: 18768 - DNA, 20 bp, synthetic construct
  source 1..20: mol_type = other DNA
gccaatcagccacccccttt

SEQ ID NO: 18769 - DNA, 20 bp, synthetic construct
  source 1..20: mol_type = other DNA
gaacatggatgttgatatat

SEQ ID NO: 18770 - DNA, 20 bp, synthetic construct
  source 1..20: mol_type = other DNA
ggtgaggtagagctgcaatg

SEQ ID NO: 18771 - DNA, 20 bp, synthetic construct
  source 1..20: mol_type = other DNA
atgagtaaagaaagagatgt

SEQ ID NO: 18772 - DNA, 20 bp, synthetic construct
  source 1..20: mol_type = other DNA
tccattaactttggaccatg

SEQ ID NO: 18773 - DNA, 20 bp, synthetic construct
  source 1..20: mol_type = other DNA
atttccttctgtgggcattg

SEQ ID NO: 18774 - DNA, 20 bp, synthetic construct
  source 1..20: mol_type = other DNA
ctttccctgcccggtcccga

SEQ ID NO: 18775 - DNA, 20 bp, synthetic construct
  source 1..20: mol_type = other DNA
acagttcagaaaagaaaatc

SEQ ID NO: 18776 - DNA, 20 bp, synthetic construct
  source 1..20: mol_type = other DNA
tgtgatgttcaatgtaaagc

SEQ ID NO: 18777 - DNA, 20 bp, synthetic construct
  source 1..20: mol_type = other DNA
gtagaagcagaaaattctaa

SEQ ID NO: 18778 - DNA, 20 bp, synthetic construct
  source 1..20: mol_type = other DNA
tttgaagaaatcaagttcag

SEQ ID NO: 18779 - DNA, 20 bp, synthetic construct
  source 1..20: mol_type = other DNA
actgacttggactttcctga

SEQ ID NO: 18780 - DNA, 20 bp, synthetic construct
  source 1..20: mol_type = other DNA
caaggaaaaagtaaaagaag

SEQ ID NO: 18781 - DNA, 20 bp, synthetic construct
  source 1..20: mol_type = other DNA
gccgtgagtcctcggtgctc

SEQ ID NO: 18782 - DNA, 20 bp, synthetic construct
  source 1..20: mol_type = other DNA
gtattagcagagccacaggc

SEQ ID NO: 18783 - DNA, 20 bp, synthetic construct
  source 1..20: mol_type = other DNA
ccccctcctcactggccctt

SEQ ID NO: 18784 - DNA, 20 bp, synthetic construct
  source 1..20: mol_type = other DNA
acctctagaatcccagcagc

SEQ ID NO: 18785 - DNA, 20 bp, synthetic construct
  source 1..20: mol_type = other DNA
tcaccacgtgcagtatctca

SEQ ID NO: 18786 - DNA, 20 bp, synthetic construct
  source 1..20: mol_type = other DNA
ggttaggactctccactcaa

SEQ ID NO: 18787 - DNA, 20 bp, synthetic construct
  source 1..20: mol_type = other DNA
gctgcaaagtgccgaaacaa

SEQ ID NO: 18788 - DNA, 20 bp, synthetic construct
  source 1..20: mol_type = other DNA
tttctctgaagaagagggtc

SEQ ID NO: 18789 - DNA, 20 bp, synthetic construct
  source 1..20: mol_type = other DNA
ttgcttgtcccccaggagtc

SEQ ID NO: 18790 - DNA, 20 bp, synthetic construct
  source 1..20: mol_type = other DNA
gcctgcagtgattcagcagg

SEQ ID NO: 18791 - DNA, 20 bp, synthetic construct
  source 1..20: mol_type = other DNA
gcttgtcagcaagaggagga

SEQ ID NO: 18792 - DNA, 20 bp, synthetic construct
  source 1..20: mol_type = other DNA
ctaggctggaagagccaaag

SEQ ID NO: 18793 - DNA, 20 bp, synthetic construct
  source 1..20: mol_type = other DNA
tccctaatcacgtggtgaat

SEQ ID NO: 18794 - DNA, 20 bp, synthetic construct
  source 1..20: mol_type = other DNA
tttttgaagccatccgcaga

SEQ ID NO: 18795 - DNA, 20 bp, synthetic construct
  source 1..20: mol_type = other DNA
atccacctctcctttttgcc

SEQ ID NO: 18796 - DNA, 20 bp, synthetic construct
  source 1..20: mol_type = other DNA
cattcttctgctgggtgcca

SEQ ID NO: 18797 - DNA, 20 bp, synthetic construct
  source 1..20: mol_type = other DNA
gagctaggggtgcctgtaag

SEQ ID NO: 18798 - DNA, 20 bp, synthetic construct
  source 1..20: mol_type = other DNA
tttaaagagacatcatcctg

SEQ ID NO: 18799 - DNA, 20 bp, synthetic construct
  source 1..20: mol_type = other DNA
ttcccacccctaataacatt

SEQ ID NO: 18800 - DNA, 20 bp, synthetic construct
  source 1..20: mol_type = other DNA
aacactattgtgctgtttgc

SEQ ID NO: 18801 - DNA, 20 bp, synthetic construct
  source 1..20: mol_type = other DNA
ttttgctcaggttgtaccca

SEQ ID NO: 18802 - DNA, 20 bp, synthetic construct
  source 1..20: mol_type = other DNA
gaccctgaaggatgaatatg

SEQ ID NO: 18803 - DNA, 20 bp, synthetic construct
  source 1..20: mol_type = other DNA
ggacaatgtggatactcatc

SEQ ID NO: 18804 - DNA, 20 bp, synthetic construct
  source 1..20: mol_type = other DNA
gctgtctgctaagttcctgc

SEQ ID NO: 18805 - DNA, 20 bp, synthetic construct
  source 1..20: mol_type = other DNA
gtcgccctctggctcgcacg

SEQ ID NO: 18806 - DNA, 20 bp, synthetic construct
  source 1..20: mol_type = other DNA
catacctcacttgggggagc

SEQ ID NO: 18807 - DNA, 20 bp, synthetic construct
  source 1..20: mol_type = other DNA
ttaagcattggattaacgga

SEQ ID NO: 18808 - DNA, 20 bp, synthetic construct
  source 1..20: mol_type = other DNA
ctgcagaaagagcttgcaga

SEQ ID NO: 18809 - DNA, 20 bp, synthetic construct
  source 1..20: mol_type = other DNA
tctatcactaatatctttgg

SEQ ID NO: 18810 - DNA, 20 bp, synthetic construct
  source 1..20: mol_type = other DNA
ttactggccactggaggcat

SEQ ID NO: 18811 - DNA, 20 bp, synthetic construct
  source 1..20: mol_type = other DNA
tgggctcctgcagccctgtc

SEQ ID NO: 18812 - DNA, 20 bp, synthetic construct
  source 1..20: mol_type = other DNA
cttagcagaggctcaggttc

SEQ ID NO: 18813 - DNA, 20 bp, synthetic construct
  source 1..20: mol_type = other DNA
gctctctttcccccacaaaa

SEQ ID NO: 18814 - DNA, 20 bp, synthetic construct
  source 1..20: mol_type = other DNA
gtgaagaggcgacccagagt

SEQ ID NO: 18815 - DNA, 20 bp, synthetic construct
  source 1..20: mol_type = other DNA
ttacctcccagcagggcagc

SEQ ID NO: 18816 - DNA, 20 bp, synthetic construct
  source 1..20: mol_type = other DNA
agctctaatttgccttgggc

SEQ ID NO: 18817 - DNA, 20 bp, synthetic construct
  source 1..20: mol_type = other DNA
ataagtagaccacttatccc

SEQ ID NO: 18818 - DNA, 20 bp, synthetic construct
  source 1..20: mol_type = other DNA
tacgcccctgcactccagcc

SEQ ID NO: 18819 - DNA, 20 bp, synthetic construct
  source 1..20: mol_type = other DNA
tgcgctataactctacctaa

SEQ ID NO: 18820 - DNA, 20 bp, synthetic construct
  source 1..20: mol_type = other DNA
ctctagctcccacttcctct

SEQ ID NO: 18821 - DNA, 20 bp, synthetic construct
  source 1..20: mol_type = other DNA
atttgttggctgtctgctgt

SEQ ID NO: 18822 - DNA, 20 bp, synthetic construct
  source 1..20: mol_type = other DNA
tcctaatttttactccctct

SEQ ID NO: 18823 - DNA, 20 bp, synthetic construct
  source 1..20: mol_type = other DNA
gcggggcctgcgctcagccc

SEQ ID NO: 18824 - DNA, 20 bp, synthetic construct
  source 1..20: mol_type = other DNA
gctgggtaggtgcacttggt

SEQ ID NO: 18825 - DNA, 20 bp, synthetic construct
  source 1..20: mol_type = other DNA
tcagagtgagcccggatggg

SEQ ID NO: 18826 - DNA, 20 bp, synthetic construct
  source 1..20: mol_type = other DNA
gtagctttattcagaatctg

SEQ ID NO: 18827 - DNA, 20 bp, synthetic construct
  source 1..20: mol_type = other DNA
tcgaggactaacccctacag

SEQ ID NO: 18828 - DNA, 20 bp, synthetic construct
  source 1..20: mol_type = other DNA
tgggaaccaaaggatgatgc

SEQ ID NO: 18829 - DNA, 20 bp, synthetic construct
  source 1..20: mol_type = other DNA
tgttgaacacttgaagccat

SEQ ID NO: 18830 - DNA, 20 bp, synthetic construct
  source 1..20: mol_type = other DNA
gcctgcaccccggagcggat

SEQ ID NO: 18831 - DNA, 20 bp, synthetic construct
  source 1..20: mol_type = other DNA
cagtgaatgtgtctggacct

SEQ ID NO: 18832 - DNA, 20 bp, synthetic construct
  source 1..20: mol_type = other DNA
agctgcagggtggattgtta

SEQ ID NO: 18833 - DNA, 20 bp, synthetic construct
  source 1..20: mol_type = other DNA
cagaatgcttcaagtgtttg

SEQ ID NO: 18834 - DNA, 20 bp, synthetic construct
  source 1..20: mol_type = other DNA
atccagtaataaaatggaag

SEQ ID NO: 18835 - DNA, 20 bp, synthetic construct
  source 1..20: mol_type = other DNA
cctgcactctcagaaatcag

SEQ ID NO: 18836 - DNA, 20 bp, synthetic construct
  source 1..20: mol_type = other DNA
gactatgaaaatccagatga

SEQ ID NO: 18837 - DNA, 20 bp, synthetic construct
  source 1..20: mol_type = other DNA
tccccacccttcagcaagac

SEQ ID NO: 18838 - DNA, 20 bp, synthetic construct
  source 1..20: mol_type = other DNA
gaaaactatattcatcccac

SEQ ID NO: 18839 - DNA, 20 bp, synthetic construct
  source 1..20: mol_type = other DNA
ttgccacgggccgggaaaaa

SEQ ID NO: 18840 - DNA, 20 bp, synthetic construct
  source 1..20: mol_type = other DNA
tggttggtgttggccgagcc

SEQ ID NO: 18841 - DNA, 20 bp, synthetic construct
  source 1..20: mol_type = other DNA
tgatggaggaattcgctttc

SEQ ID NO: 18842 - DNA, 20 bp, synthetic construct
  source 1..20: mol_type = other DNA
gagaagggagctcgggagca

SEQ ID NO: 18843 - DNA, 20 bp, synthetic construct
  source 1..20: mol_type = other DNA
gtcattggcggccgctcagg

SEQ ID NO: 18844 - DNA, 20 bp, synthetic construct
  source 1..20: mol_type = other DNA
aaaaggacctggtctaaaac

SEQ ID NO: 18845 - DNA, 20 bp, synthetic construct
  source 1..20: mol_type = other DNA
agcgaattgcatcgtcctcg

SEQ ID NO: 18846 - DNA, 20 bp, synthetic construct
  source 1..20: mol_type = other DNA
tggctggaatgtcatggact

SEQ ID NO: 18847 - DNA, 20 bp, synthetic construct
  source 1..20: mol_type = other DNA
tgggaccaaatgtcagccct

SEQ ID NO: 18848 - DNA, 20 bp, synthetic construct
  source 1..20: mol_type = other DNA
ccccctcatcatcatcggct

SEQ ID NO: 18849 - DNA, 20 bp, synthetic construct
  source 1..20: mol_type = other DNA
ggaggtggcagaagtgagtc

SEQ ID NO: 18850 - DNA, 20 bp, synthetic construct
  source 1..20: mol_type = other DNA
gggcgaggccgagcgaggca

SEQ ID NO: 18851 - DNA, 20 bp, synthetic construct
  source 1..20: mol_type = other DNA
ccagagcccagccaagatgg

SEQ ID NO: 18852 - DNA, 20 bp, synthetic construct
  source 1..20: mol_type = other DNA
cgaccgtggggaagacggcc

SEQ ID NO: 18853 - DNA, 20 bp, synthetic construct
  source 1..20: mol_type = other DNA
tgtgcagcccaacgcacctc

SEQ ID NO: 18854 - DNA, 20 bp, synthetic construct
  source 1..20: mol_type = other DNA
ccccttcttctttgtcaata

SEQ ID NO: 18855 - DNA, 20 bp, synthetic construct
  source 1..20: mol_type = other DNA
gtaccgcatgtggcagttcg

SEQ ID NO: 18856 - DNA, 20 bp, synthetic construct
  source 1..20: mol_type = other DNA
gctgaaagtcatggcttttg

SEQ ID NO: 18857 - DNA, 20 bp, synthetic construct
  source 1..20: mol_type = other DNA
agatgagttccaaatcactg

SEQ ID NO: 18858 - DNA, 20 bp, synthetic construct
  source 1..20: mol_type = other DNA
gatgatcatggagtactacc

SEQ ID NO: 18859 - DNA, 20 bp, synthetic construct
  source 1..20: mol_type = other DNA
ctccgacagcgagcactacc

SEQ ID NO: 18860 - DNA, 20 bp, synthetic construct
  source 1..20: mol_type = other DNA
cagcgagggccgagagcaca

SEQ ID NO: 18861 - DNA, 20 bp, synthetic construct
  source 1..20: mol_type = other DNA
caggatggagaggcgggtcc

SEQ ID NO: 18862 - DNA, 20 bp, synthetic construct
  source 1..20: mol_type = other DNA
acaccagctcctgtgctgcg

SEQ ID NO: 18863 - DNA, 20 bp, synthetic construct
  source 1..20: mol_type = other DNA
cgccacctggatgctggagg

SEQ ID NO: 18864 - DNA, 20 bp, synthetic construct
  source 1..20: mol_type = other DNA
cgtggacatctgagggcgcc

SEQ ID NO: 18865 - DNA, 20 bp, synthetic construct
  source 1..20: mol_type = other DNA
ccgaggggaaggggcggtgc

SEQ ID NO: 18866 - DNA, 20 bp, synthetic construct
  source 1..20: mol_type = other DNA
tggggcaagggcacaagtcc

SEQ ID NO: 18867 - DNA, 20 bp, synthetic construct
  source 1..20: mol_type = other DNA
aaagggaccgcttggagcag

SEQ ID NO: 18868 - DNA, 20 bp, synthetic construct
  source 1..20: mol_type = other DNA
acagcgacaaagtgaaagcc

SEQ ID NO: 18869 - DNA, 20 bp, synthetic construct
  source 1..20: mol_type = other DNA
tggcgcgggagtacggatcc

SEQ ID NO: 18870 - DNA, 20 bp, synthetic construct
  source 1..20: mol_type = other DNA
attcggaaatcgatcagatc

SEQ ID NO: 18871 - DNA, 20 bp, synthetic construct
  source 1..20: mol_type = other DNA
tcatgaacaagttcctgacc

SEQ ID NO: 18872 - DNA, 20 bp, synthetic construct
  source 1..20: mol_type = other DNA
tggtcccctctcctctccgc

SEQ ID NO: 18873 - DNA, 20 bp, synthetic construct
  source 1..20: mol_type = other DNA
cgggctgcgtaggggcgctt

SEQ ID NO: 18874 - DNA, 20 bp, synthetic construct
  source 1..20: mol_type = other DNA
caatgcgcaggaataaggaa

SEQ ID NO: 18875 - DNA, 20 bp, synthetic construct
  source 1..20: mol_type = other DNA
cgctaagctccagtcggcgc

SEQ ID NO: 18876 - DNA, 20 bp, synthetic construct
  source 1..20: mol_type = other DNA
actctggagctcccattctt

SEQ ID NO: 18877 - DNA, 20 bp, synthetic construct
  source 1..20: mol_type = other DNA
cttccctgtctgatccttag

SEQ ID NO: 18878 - DNA, 20 bp, synthetic construct
  source 1..20: mol_type = other DNA
tggcatggcaatggttagag

SEQ ID NO: 18879 - DNA, 20 bp, synthetic construct
  source 1..20: mol_type = other DNA
aaggagccaggagttaatac

SEQ ID NO: 18880 - DNA, 20 bp, synthetic construct
  source 1..20: mol_type = other DNA
tcacctggaaggggagttac

SEQ ID NO: 18881 - DNA, 20 bp, synthetic construct
  source 1..20: mol_type = other DNA
gcagaaagctgaggaggctg

SEQ ID NO: 18882 - DNA, 20 bp, synthetic construct
  source 1..20: mol_type = other DNA
ggtcaccaaggggcagctgg

SEQ ID NO: 18883 - DNA, 20 bp, synthetic construct
  source 1..20: mol_type = other DNA
tcatcaagacctgtggaaga

SEQ ID NO: 18884 - DNA, 20 bp, synthetic construct
  source 1..20: mol_type = other DNA
tttggccctcctgacccaga

SEQ ID NO: 18885 - DNA, 20 bp, synthetic construct
  source 1..20: mol_type = other DNA
ggagctagagaagtgtaggt

SEQ ID NO: 18886 - DNA, 20 bp, synthetic construct
  source 1..20: mol_type = other DNA
gaggagagaccaggagctga

SEQ ID NO: 18887 - DNA, 20 bp, synthetic construct
  source 1..20: mol_type = other DNA
cctcctcctgtcccagcgag

SEQ ID NO: 18888 - DNA, 20 bp, synthetic construct
  source 1..20: mol_type = other DNA
ggcccagggacaggaggaga

SEQ ID NO: 18889 - DNA, 20 bp, synthetic construct
  source 1..20: mol_type = other DNA
ggaggtgctgggagacctaa

SEQ ID NO: 18890 - DNA, 20 bp, synthetic construct
  source 1..20: mol_type = other DNA
ggcactctccctagcgcaga

SEQ ID NO: 18891 - DNA, 20 bp, synthetic construct
  source 1..20: mol_type = other DNA
cacagcagaactggggtcca

SEQ ID NO: 18892 - DNA, 20 bp, synthetic construct
  source 1..20: mol_type = other DNA
ggcagagacccgcaggctgg

SEQ ID NO: 18893 - DNA, 20 bp, synthetic construct
  source 1..20: mol_type = other DNA
gtttgccaaaggaaaagcct

SEQ ID NO: 18894 - DNA, 20 bp, synthetic construct
  source 1..20: mol_type = other DNA
tagagagagcgcgctctgct

SEQ ID NO: 18895 - DNA, 20 bp, synthetic construct
  source 1..20: mol_type = other DNA
tttatttatttttcgttttt

SEQ ID NO: 18896 - DNA, 20 bp, synthetic construct
  source 1..20: mol_type = other DNA
cagcagctctgaatcttctg

SEQ ID NO: 18897 - DNA, 20 bp, synthetic construct
  source 1..20: mol_type = other DNA
tcggaagccggcaccctcaa

SEQ ID NO: 18898 - DNA, 20 bp, synthetic construct
  source 1..20: mol_type = other DNA
tgatttcaagtccaaccata

SEQ ID NO: 18899 - DNA, 20 bp, synthetic construct
  source 1..20: mol_type = other DNA
gctagagcctttccttctcc

SEQ ID NO: 18900 - DNA, 20 bp, synthetic construct
  source 1..20: mol_type = other DNA
ctctgcttctgagagtgaaa

SEQ ID NO: 18901 - DNA, 20 bp, synthetic construct
  source 1..20: mol_type = other DNA
agcacgtgatgctgagctgg

SEQ ID NO: 18902 - DNA, 20 bp, synthetic construct
  source 1..20: mol_type = other DNA
gatttatgaacatggctatg

SEQ ID NO: 18903 - DNA, 20 bp, synthetic construct
  source 1..20: mol_type = other DNA
tattacagcaggaagtgaac

SEQ ID NO: 18904 - DNA, 20 bp, synthetic construct
  source 1..20: mol_type = other DNA
agaagaggagcaaaagaaga

SEQ ID NO: 18905 - DNA, 20 bp, synthetic construct
  source 1..20: mol_type = other DNA
gcgacatatggatgcccacc

SEQ ID NO: 18906 - DNA, 20 bp, synthetic construct
  source 1..20: mol_type = other DNA
ccaccagcaggatttccgac

SEQ ID NO: 18907 - DNA, 20 bp, synthetic construct
  source 1..20: mol_type = other DNA
tttgacgggcacttggagga

SEQ ID NO: 18908 - DNA, 20 bp, synthetic construct
  source 1..20: mol_type = other DNA
ggacctggtgaacagtgtgt

SEQ ID NO: 18909 - DNA, 20 bp, synthetic construct
  source 1..20: mol_type = other DNA
atgtgaaacctgtgggtggg

SEQ ID NO: 18910 - DNA, 20 bp, synthetic construct
  source 1..20: mol_type = other DNA
tggctgactgagtactgtga

SEQ ID NO: 18911 - DNA, 20 bp, synthetic construct
  source 1..20: mol_type = other DNA
ggagaaggggatgcagaggc

SEQ ID NO: 18912 - DNA, 20 bp, synthetic construct
  source 1..20: mol_type = other DNA
ctatggccttagaaaagggc

SEQ ID NO: 18913 - DNA, 20 bp, synthetic construct
  source 1..20: mol_type = other DNA
tgcaggcgcagccgcggcga

SEQ ID NO: 18914 - DNA, 20 bp, synthetic construct
  source 1..20: mol_type = other DNA
ggcagccatgtccatgggcc

SEQ ID NO: 18915 - DNA, 20 bp, synthetic construct
  source 1..20: mol_type = other DNA
gagcaccggccagatgcagt

SEQ ID NO: 18916 - DNA, 20 bp, synthetic construct
  source 1..20: mol_type = other DNA
caagatcaccatcgtggcag

SEQ ID NO: 18917 - DNA, 20 bp, synthetic construct
  source 1..20: mol_type = other DNA
gcagctgctggggggcgcgc

SEQ ID NO: 18918 - DNA, 20 bp, synthetic construct
  source 1..20: mol_type = other DNA
ggggcccagggaccaacctg

SEQ ID NO: 18919 - DNA, 20 bp, synthetic construct
  source 1..20: mol_type = other DNA
aaaaatggaaattttcaaga

SEQ ID NO: 18920 - DNA, 20 bp, synthetic construct
  source 1..20: mol_type = other DNA
ggctggctaccaagagttta

SEQ ID NO: 18921 - DNA, 20 bp, synthetic construct
  source 1..20: mol_type = other DNA
ttttgatcgcgggaggaccg

SEQ ID NO: 18922 - DNA, 20 bp, synthetic construct
  source 1..20: mol_type = other DNA
ggcagaatcagcctgttttg

SEQ ID NO: 18923 - DNA, 20 bp, synthetic construct
  source 1..20: mol_type = other DNA
agttccacccagaggtcacc

SEQ ID NO: 18924 - DNA, 20 bp, synthetic construct
  source 1..20: mol_type = other DNA
tgttttcagataaactaaat

SEQ ID NO: 18925 - DNA, 20 bp, synthetic construct
  source 1..20: mol_type = other DNA
ttgtggctcctgcccagaca

SEQ ID NO: 18926 - DNA, 20 bp, synthetic construct
  source 1..20: mol_type = other DNA
caaactatctctatgttacc

SEQ ID NO: 18927 - DNA, 20 bp, synthetic construct
  source 1..20: mol_type = other DNA
ggccttcctatgttttgagt

SEQ ID NO: 18928 - DNA, 20 bp, synthetic construct
  source 1..20: mol_type = other DNA
tgcagaaatctcgcaaggtg

SEQ ID NO: 18929 - DNA, 20 bp, synthetic construct
  source 1..20: mol_type = other DNA
ttctttttgagatggagtca

SEQ ID NO: 18930 - DNA, 20 bp, synthetic construct
  source 1..20: mol_type = other DNA
atttgattggtgtgctgtct

SEQ ID NO: 18931 - DNA, 20 bp, synthetic construct
  source 1..20: mol_type = other DNA
gctgacaaaatttgttgaag

SEQ ID NO: 18932 - DNA, 20 bp, synthetic construct
  source 1..20: mol_type = other DNA
gaaggatgctacccggaaga

SEQ ID NO: 18933 - DNA, 20 bp, synthetic construct
  source 1..20: mol_type = other DNA
gctcaacgccaacaatgtcc

SEQ ID NO: 18934 - DNA, 20 bp, synthetic construct
  source 1..20: mol_type = other DNA
agctgttgatagtggaatcc

SEQ ID NO: 18935 - DNA, 20 bp, synthetic construct
  source 1..20: mol_type = other DNA
aagttgagaaatgtgacaga

SEQ ID NO: 18936 - DNA, 20 bp, synthetic construct
  source 1..20: mol_type = other DNA
aagtaaggttcattccctta

SEQ ID NO: 18937 - DNA, 20 bp, synthetic construct
  source 1..20: mol_type = other DNA
actagcgcaggagaaggcta

SEQ ID NO: 18938 - DNA, 20 bp, synthetic construct
  source 1..20: mol_type = other DNA
accacagagattaacttcaa

SEQ ID NO: 18939 - DNA, 20 bp, synthetic construct
  source 1..20: mol_type = other DNA
gaactgatcctgaccatgac

SEQ ID NO: 18940 - DNA, 20 bp, synthetic construct
  source 1..20: mol_type = other DNA
cagtcacttctgggggtcac

SEQ ID NO: 18941 - DNA, 20 bp, synthetic construct
  source 1..20: mol_type = other DNA
gttccgtacagggtataaaa

SEQ ID NO: 18942 - DNA, 20 bp, synthetic construct
  source 1..20: mol_type = other DNA
gaccaacgatggggaactga

SEQ ID NO: 18943 - DNA, 20 bp, synthetic construct
  source 1..20: mol_type = other DNA
gctccccttaccccagtcac

SEQ ID NO: 18944 - DNA, 20 bp, synthetic construct
  source 1..20: mol_type = other DNA
ggcggctcgagctcctggaa

SEQ ID NO: 18945 - DNA, 20 bp, synthetic construct
  source 1..20: mol_type = other DNA
tctccggtcccctcctcgga

SEQ ID NO: 18946 - DNA, 20 bp, synthetic construct
  source 1..20: mol_type = other DNA
tttctatacagcagcaacaa

SEQ ID NO: 18947 - DNA, 20 bp, synthetic construct
  source 1..20: mol_type = other DNA
tcatcatctagccaggcatg

SEQ ID NO: 18948 - DNA, 20 bp, synthetic construct
  source 1..20: mol_type = other DNA
tggaagttgctctcaaggga

SEQ ID NO: 18949 - DNA, 20 bp, synthetic construct
  source 1..20: mol_type = other DNA
cctcctcacaaggtttcctg

SEQ ID NO: 18950 - DNA, 20 bp, synthetic construct
  source 1..20: mol_type = other DNA
ggcaagtggcatctgaattt

SEQ ID NO: 18951 - DNA, 20 bp, synthetic construct
  source 1..20: mol_type = other DNA
gcgcgccacaatgagctccc

SEQ ID NO: 18952 - DNA, 20 bp, synthetic construct
  source 1..20: mol_type = other DNA
catggaggaccaggacggcc

SEQ ID NO: 18953 - DNA, 20 bp, synthetic construct
  source 1..20: mol_type = other DNA
tattgttcaaacaacttcat

SEQ ID NO: 18954 - DNA, 20 bp, synthetic construct
  source 1..20: mol_type = other DNA
gaacgtcatgatgatccagt

SEQ ID NO: 18955 - DNA, 20 bp, synthetic construct
  source 1..20: mol_type = other DNA
cgcggagctggccgctggat

SEQ ID NO: 18956 - DNA, 20 bp, synthetic construct
  source 1..20: mol_type = other DNA
tccttacttagcaagactat

SEQ ID NO: 18957 - DNA, 20 bp, synthetic construct
  source 1..20: mol_type = other DNA
ggtgtagaggcccctgccag

SEQ ID NO: 18958 - DNA, 20 bp, synthetic construct
  source 1..20: mol_type = other DNA
gaagctggcaccacagttcc

SEQ ID NO: 18959 - DNA, 20 bp, synthetic construct
  source 1..20: mol_type = other DNA
gcctgggttggcacctactt

SEQ ID NO: 18960 - DNA, 20 bp, synthetic construct
  source 1..20: mol_type = other DNA
gaggatcccaatgcgcctcc

SEQ ID NO: 18961 - DNA, 20 bp, synthetic construct
  source 1..20: mol_type = other DNA
tggtgttgtctgtggagacc

SEQ ID NO: 18962 - DNA, 20 bp, synthetic construct
  source 1..20: mol_type = other DNA
ccagggtgtttcaaacttag

SEQ ID NO: 18963 - DNA, 20 bp, synthetic construct
  source 1..20: mol_type = other DNA
aggggctggaagctggaggg

SEQ ID NO: 18964 - DNA, 20 bp, synthetic construct
  source 1..20: mol_type = other DNA
actgctctccagagggcatt

SEQ ID NO: 18965 - DNA, 20 bp, synthetic construct
  source 1..20: mol_type = other DNA
ttcgcgccgaatccccgggg

SEQ ID NO: 18966 - DNA, 20 bp, synthetic construct
  source 1..20: mol_type = other DNA
ctgctgctgcccctctgggg

SEQ ID NO: 18967 - DNA, 20 bp, synthetic construct
  source 1..20: mol_type = other DNA
attcctgatggcacggctgt

SEQ ID NO: 18968 - DNA, 20 bp, synthetic construct
  source 1..20: mol_type = other DNA
gctgcggatgaacctgtgac

SEQ ID NO: 18969 - DNA, 20 bp, synthetic construct
  source 1..20: mol_type = other DNA
atcgccaataagaagccccc

SEQ ID NO: 18970 - DNA, 20 bp, synthetic construct
  source 1..20: mol_type = other DNA
ccagtcagggatcctgttcc

SEQ ID NO: 18971 - DNA, 20 bp, synthetic construct
  source 1..20: mol_type = other DNA
gcagttgctacccctcccac

SEQ ID NO: 18972 - DNA, 20 bp, synthetic construct
  source 1..20: mol_type = other DNA
actgacaagctgaagctgac

SEQ ID NO: 18973 - DNA, 20 bp, synthetic construct
  source 1..20: mol_type = other DNA
atcactgtgacgggctctgg

SEQ ID NO: 18974 - DNA, 20 bp, synthetic construct
  source 1..20: mol_type = other DNA
gaggagaaggctcccctacc

SEQ ID NO: 18975 - DNA, 20 bp, synthetic construct
  source 1..20: mol_type = other DNA
cgtcccaagaacatgacccc

SEQ ID NO: 18976 - DNA, 20 bp, synthetic construct
  source 1..20: mol_type = other DNA
agtggaggtggagggagcga

SEQ ID NO: 18977 - DNA, 20 bp, synthetic construct
  source 1..20: mol_type = other DNA
cccacgaccaaggggtcttc

SEQ ID NO: 18978 - DNA, 20 bp, synthetic construct
  source 1..20: mol_type = other DNA
tacagcagtttgtacgagct

SEQ ID NO: 18979 - DNA, 20 bp, synthetic construct
  source 1..20: mol_type = other DNA
tccccagggggtactctgga

SEQ ID NO: 18980 - DNA, 20 bp, synthetic construct
  source 1..20: mol_type = other DNA
tcccttggggtgccgagtgg

SEQ ID NO: 18981 - DNA, 20 bp, synthetic construct
  source 1..20: mol_type = other DNA
gaggaagatcatggactgtc

SEQ ID NO: 18982 - DNA, 20 bp, synthetic construct
  source 1..20: mol_type = other DNA
ggactgtggttggatttatg

SEQ ID NO: 18983 - DNA, 20 bp, synthetic construct
  source 1..20: mol_type = other DNA
aagatatttgaatgaaatag

SEQ ID NO: 18984 - DNA, 20 bp, synthetic construct
  source 1..20: mol_type = other DNA
acctgcgtcaggtggcagtt

SEQ ID NO: 18985 - DNA, 20 bp, synthetic construct
  source 1..20: mol_type = other DNA
ttctggtcttaagtataatg

SEQ ID NO: 18986 - DNA, 20 bp, synthetic construct
  source 1..20: mol_type = other DNA
ccagaaagtccatatgctgt

SEQ ID NO: 18987 - DNA, 20 bp, synthetic construct
  source 1..20: mol_type = other DNA
cctagccattgctgatgttt

SEQ ID NO: 18988 - DNA, 20 bp, synthetic construct
  source 1..20: mol_type = other DNA
tgtccagtggctgaagcccc

SEQ ID NO: 18989 - DNA, 20 bp, synthetic construct
  source 1..20: mol_type = other DNA
agaccctaaagggattgttc

SEQ ID NO: 18990 - DNA, 20 bp, synthetic construct
  source 1..20: mol_type = other DNA
agaagacatttgggaataca

SEQ ID NO: 18991 - DNA, 20 bp, synthetic construct
  source 1..20: mol_type = other DNA
ggctggtgatcatcctttta

SEQ ID NO: 18992 - DNA, 20 bp, synthetic construct
  source 1..20: mol_type = other DNA
caagcttcatgtgcaagaac

SEQ ID NO: 18993 - DNA, 20 bp, synthetic construct
  source 1..20: mol_type = other DNA
tccctgggacccttaatttc

SEQ ID NO: 18994 - DNA, 20 bp, synthetic construct
  source 1..20: mol_type = other DNA
tccagactataaaagcggct

SEQ ID NO: 18995 - DNA, 20 bp, synthetic construct
  source 1..20: mol_type = other DNA
cttgatgagctgcctaaatt

SEQ ID NO: 18996 - DNA, 20 bp, synthetic construct
  source 1..20: mol_type = other DNA
agaggcgatgggcctatttg

SEQ ID NO: 18997 - DNA, 20 bp, synthetic construct
  source 1..20: mol_type = other DNA
attgcaacacctggaagact

SEQ ID NO: 18998 - DNA, 20 bp, synthetic construct
  source 1..20: mol_type = other DNA
gcgacttggccaaaagaagt

SEQ ID NO: 18999 - DNA, 20 bp, synthetic construct
  source 1..20: mol_type = other DNA
agtgagaaggagaataaaac

SEQ ID NO: 19000 - DNA, 20 bp, synthetic construct
  source 1..20: mol_type = other DNA
attgctacagatgtggcctc

SEQ ID NO: 19001 - DNA, 20 bp, synthetic construct
  source 1..20: mol_type = other DNA
taaattctgattattaaact

SEQ ID NO: 19002 - DNA, 20 bp, synthetic construct
  source 1..20: mol_type = other DNA
gagccagcacgatggtccta

SEQ ID NO: 19003 - DNA, 20 bp, synthetic construct
  source 1..20: mol_type = other DNA
agcactctgccgctcaagag

SEQ ID NO: 19004 - DNA, 20 bp, synthetic construct
  source 1..20: mol_type = other DNA
ctgcagtaccccactctacg

SEQ ID NO: 19005 - DNA, 20 bp, synthetic construct
  source 1..20: mol_type = other DNA
cgtgttcaacttccccgtct

SEQ ID NO: 19006 - DNA, 20 bp, synthetic construct
  source 1..20: mol_type = other DNA
tggtacattgcttggctggc

SEQ ID NO: 19007 - DNA, 20 bp, synthetic construct
  source 1..20: mol_type = other DNA
tacagcctacccatgcaggg

SEQ ID NO: 19008 - DNA, 20 bp, synthetic construct
  source 1..20: mol_type = other DNA
tttcctcatgattttttctc

SEQ ID NO: 19009 - DNA, 20 bp, synthetic construct
  source 1..20: mol_type = other DNA
gtgcagcctcccgagtgcag

SEQ ID NO: 19010 - DNA, 20 bp, synthetic construct
  source 1..20: mol_type = other DNA
agtaccctgtgcagccagga

SEQ ID NO: 19011 - DNA, 20 bp, synthetic construct
  source 1..20: mol_type = other DNA
ggtcacagggagcaatcatt

SEQ ID NO: 19012 - DNA, 20 bp, synthetic construct
  source 1..20: mol_type = other DNA
tggcatctcacacagtggaa

SEQ ID NO: 19013 - DNA, 20 bp, synthetic construct
  source 1..20: mol_type = other DNA
tggacaaggccaataaaaca

SEQ ID NO: 19014 - DNA, 20 bp, synthetic construct
  source 1..20: mol_type = other DNA
cccaggacctattccgcagg

SEQ ID NO: 19015 - DNA, 20 bp, synthetic construct
  source 1..20: mol_type = other DNA
cggcagaggaacgaggacgc

SEQ ID NO: 19016 - DNA, 20 bp, synthetic construct
  source 1..20: mol_type = other DNA
tggatgatggtggctggaac

SEQ ID NO: 19017 - DNA, 20 bp, synthetic construct
  source 1..20: mol_type = other DNA
tgaagcgagaagctgcccta

SEQ ID NO: 19018 - DNA, 20 bp, synthetic construct
  source 1..20: mol_type = other DNA
tacggcatggtgtcgagtct

SEQ ID NO: 19019 - DNA, 20 bp, synthetic construct
  source 1..20: mol_type = other DNA
tgtggcgagaagccgggctt

SEQ ID NO: 19020 - DNA, 20 bp, synthetic construct
  source 1..20: mol_type = other DNA
agggcagcagtaaccagcgg

SEQ ID NO: 19021 - DNA, 20 bp, synthetic construct
  source 1..20: mol_type = other DNA
tgcagaaatacctgtgtgac

SEQ ID NO: 19022 - DNA, 20 bp, synthetic construct
  source 1..20: mol_type = other DNA
agcagcggcggtggcagtgg

SEQ ID NO: 19023 - DNA, 20 bp, synthetic construct
  source 1..20: mol_type = other DNA
ctggccttttagggcctgac

SEQ ID NO: 19024 - DNA, 20 bp, synthetic construct
  source 1..20: mol_type = other DNA
acaggggcgttccacatacg

SEQ ID NO: 19025 - DNA, 20 bp, synthetic construct
  source 1..20: mol_type = other DNA
gaaccagccaccccagattg

SEQ ID NO: 19026 - DNA, 20 bp, synthetic construct
  source 1..20: mol_type = other DNA
gccccaggttgctgtcattg

SEQ ID NO: 19027 - DNA, 20 bp, synthetic construct
  source 1..20: mol_type = other DNA
agtcctctctattcctgggg

SEQ ID NO: 19028 - DNA, 20 bp, synthetic construct
  source 1..20: mol_type = other DNA
gttttcttccagtcctctcc

SEQ ID NO: 19029 - DNA, 20 bp, synthetic construct
  source 1..20: mol_type = other DNA
tgcccaacctgaggaactgc

SEQ ID NO: 19030 - DNA, 20 bp, synthetic construct
  source 1..20: mol_type = other DNA
gaggagacggaaaattaagg

SEQ ID NO: 19031 - DNA, 20 bp, synthetic construct
  source 1..20: mol_type = other DNA
gccagagggattgccacata

SEQ ID NO: 19032 - DNA, 20 bp, synthetic construct
  source 1..20: mol_type = other DNA
tgagaaggccatttcagagc

SEQ ID NO: 19033 - DNA, 20 bp, synthetic construct
  source 1..20: mol_type = other DNA
tcctccaggccctcccatca

SEQ ID NO: 19034 - DNA, 20 bp, synthetic construct
  source 1..20: mol_type = other DNA
tagcctcacggaggatcggg

SEQ ID NO: 19035 - DNA, 20 bp, synthetic construct
  source 1..20: mol_type = other DNA
attggctgaggacatggaaa

SEQ ID NO: 19036 - DNA, 20 bp, synthetic construct
  source 1..20: mol_type = other DNA
cctgtgcaaaagcatgggtc

SEQ ID NO: 19037 - DNA, 20 bp, synthetic construct
  source 1..20: mol_type = other DNA
acagagatatattatatata

SEQ ID NO: 19038 - DNA, 20 bp, synthetic construct
  source 1..20: mol_type = other DNA
cattcggggagactctggtg

SEQ ID NO: 19039 - DNA, 20 bp, synthetic construct
  source 1..20: mol_type = other DNA
tgtgctccttgatgttaagt

SEQ ID NO: 19040 - DNA, 20 bp, synthetic construct
  source 1..20: mol_type = other DNA
ctgctcctatggctcaaggg

SEQ ID NO: 19041 - DNA, 20 bp, synthetic construct
  source 1..20: mol_type = other DNA
ttgtgactgaatatctaaat

SEQ ID NO: 19042 - DNA, 20 bp, synthetic construct
  source 1..20: mol_type = other DNA
cttttgttcccaggaaggga

SEQ ID NO: 19043 - DNA, 20 bp, synthetic construct
  source 1..20: mol_type = other DNA
tttcggagagacctcatcta

SEQ ID NO: 19044 - DNA, 20 bp, synthetic construct
  source 1..20: mol_type = other DNA
caaacgaaaaagaacgacat

SEQ ID NO: 19045 - DNA, 20 bp, synthetic construct
  source 1..20: mol_type = other DNA
tctatgataagcgtgaaaat

SEQ ID NO: 19046 - DNA, 20 bp, synthetic construct
  source 1..20: mol_type = other DNA
ctcccacacaatcgcagttt

SEQ ID NO: 19047 - DNA, 20 bp, synthetic construct
  source 1..20: mol_type = other DNA
ctcgtgccatcatttcagag

SEQ ID NO: 19048 - DNA, 20 bp, synthetic construct
  source 1..20: mol_type = other DNA
atcacgttgatctacaagtc

SEQ ID NO: 19049 - DNA, 20 bp, synthetic construct
  source 1..20: mol_type = other DNA
gcaggtccaaccacgctggt

SEQ ID NO: 19050 - DNA, 20 bp, synthetic construct
  source 1..20: mol_type = other DNA
aatcagcacatcatgatggt

SEQ ID NO: 19051 - DNA, 20 bp, synthetic construct
  source 1..20: mol_type = other DNA
ggaggtggcagcagaaatcc

SEQ ID NO: 19052 - DNA, 20 bp, synthetic construct
  source 1..20: mol_type = other DNA
gacagggagtttctgctgga

SEQ ID NO: 19053 - DNA, 20 bp, synthetic construct
  source 1..20: mol_type = other DNA
gattttggaaggcagacacc

SEQ ID NO: 19054 - DNA, 20 bp, synthetic construct
  source 1..20: mol_type = other DNA
gctattgatgaacccagttt

SEQ ID NO: 19055 - DNA, 20 bp, synthetic construct
  source 1..20: mol_type = other DNA
gtgaagctgctaaagaacca

SEQ ID NO: 19056 - DNA, 20 bp, synthetic construct
  source 1..20: mol_type = other DNA
gatgccttacggtcaagtgc

SEQ ID NO: 19057 - DNA, 20 bp, synthetic construct
  source 1..20: mol_type = other DNA
cggccaaatactttcatgag

SEQ ID NO: 19058 - DNA, 20 bp, synthetic construct
  source 1..20: mol_type = other DNA
gtggagtccaccctggaaag

SEQ ID NO: 19059 - DNA, 20 bp, synthetic construct
  source 1..20: mol_type = other DNA
gctgaactggtgacccccat

SEQ ID NO: 19060 - DNA, 20 bp, synthetic construct
  source 1..20: mol_type = other DNA
atcacagtgcagcaaggcca

SEQ ID NO: 19061 - DNA, 20 bp, synthetic construct
  source 1..20: mol_type = other DNA
cgaatcttcactcccgctgt

SEQ ID NO: 19062 - DNA, 20 bp, synthetic construct
  source 1..20: mol_type = other DNA
actgcagtgtaccaggctaa

SEQ ID NO: 19063 - DNA, 20 bp, synthetic construct
  source 1..20: mol_type = other DNA
cctggaccaggacctgggga

SEQ ID NO: 19064 - DNA, 20 bp, synthetic construct
  source 1..20: mol_type = other DNA
agcgaccagaagcaagagga

SEQ ID NO: 19065 - DNA, 20 bp, synthetic construct
  source 1..20: mol_type = other DNA
tcttctgttgctcgaagtac

SEQ ID NO: 19066 - DNA, 20 bp, synthetic construct
  source 1..20: mol_type = other DNA
acaccagcctttgctgattt

SEQ ID NO: 19067 - DNA, 20 bp, synthetic construct
  source 1..20: mol_type = other DNA
gttgggtcacgaagatctca

SEQ ID NO: 19068 - DNA, 20 bp, synthetic construct
  source 1..20: mol_type = other DNA
aggcttcatgatgaactgga

SEQ ID NO: 19069 - DNA, 20 bp, synthetic construct
  source 1..20: mol_type = other DNA
gcagatcaagggcctaaaac

SEQ ID NO: 19070 - DNA, 20 bp, synthetic construct
  source 1..20: mol_type = other DNA
caacctccagcaccctcagg

SEQ ID NO: 19071 - DNA, 20 bp, synthetic construct
  source 1..20: mol_type = other DNA
aatcagtctcaagaagagca

SEQ ID NO: 19072 - DNA, 20 bp, synthetic construct
  source 1..20: mol_type = other DNA
ctttatgcactacaagcatc

SEQ ID NO: 19073 - DNA, 20 bp, synthetic construct
  source 1..20: mol_type = other DNA
gagtgggagaggggaaagag

SEQ ID NO: 19074 - DNA, 20 bp, synthetic construct
  source 1..20: mol_type = other DNA
aagtggagaagaacaagtac

SEQ ID NO: 19075 - DNA, 20 bp, synthetic construct
  source 1..20: mol_type = other DNA
tcggagactatggcctcgcc

SEQ ID NO: 19076 - DNA, 20 bp, synthetic construct
  source 1..20: mol_type = other DNA
atctattttttctaaaacat

SEQ ID NO: 19077 - DNA, 20 bp, synthetic construct
  source 1..20: mol_type = other DNA
ttgtcttagctacctgtgta

SEQ ID NO: 19078 - DNA, 20 bp, synthetic construct
  source 1..20: mol_type = other DNA
gatgcgaatgatcctgtcac

SEQ ID NO: 19079 - DNA, 20 bp, synthetic construct
  source 1..20: mol_type = other DNA
tactgaccctgagcaacccc

SEQ ID NO: 19080 - DNA, 20 bp, synthetic construct
  source 1..20: mol_type = other DNA
ggccctttgaccagggcagc

SEQ ID NO: 19081 - DNA, 20 bp, synthetic construct
  source 1..20: mol_type = other DNA
gtgacgtggacctggatccc

SEQ ID NO: 19082 - DNA, 20 bp, synthetic construct
  source 1..20: mol_type = other DNA
cccacctgtgggagttcatc

SEQ ID NO: 19083 - DNA, 20 bp, synthetic construct
  source 1..20: mol_type = other DNA
aaaccttcctgggaggacag

SEQ ID NO: 19084 - DNA, 20 bp, synthetic construct
  source 1..20: mol_type = other DNA
caggccctccagtgggctga

SEQ ID NO: 19085 - DNA, 20 bp, synthetic construct
  source 1..20: mol_type = other DNA
caatcgattccagaactatt

SEQ ID NO: 19086 - DNA, 20 bp, synthetic construct
  source 1..20: mol_type = other DNA
gatacccctcgacgaggatg

SEQ ID NO: 19087 - DNA, 20 bp, synthetic construct
  source 1..20: mol_type = other DNA
gttcctcagcctccgctacc

SEQ ID NO: 19088 - DNA, 20 bp, synthetic construct
  source 1..20: mol_type = other DNA
cctcgcctggagccccgagg

SEQ ID NO: 19089 - DNA, 20 bp, synthetic construct
  source 1..20: mol_type = other DNA
tcagaaagcccggaggctgt

SEQ ID NO: 19090 - DNA, 20 bp, synthetic construct
  source 1..20: mol_type = other DNA
catccggctttcctgactct

SEQ ID NO: 19091 - DNA, 20 bp, synthetic construct
  source 1..20: mol_type = other DNA
aggcttcatctccggctcca

SEQ ID NO: 19092 - DNA, 20 bp, synthetic construct
  source 1..20: mol_type = other DNA
cccttccgtccccttttgcc

SEQ ID NO: 19093 - DNA, 20 bp, synthetic construct
  source 1..20: mol_type = other DNA
ctccagtgtctccactgtgg

SEQ ID NO: 19094 - DNA, 20 bp, synthetic construct
  source 1..20: mol_type = other DNA
tgtcacctgcatctcctttt

SEQ ID NO: 19095 - DNA, 20 bp, synthetic construct
  source 1..20: mol_type = other DNA
ggattgctggggaccctcaa

SEQ ID NO: 19096 - DNA, 20 bp, synthetic construct
  source 1..20: mol_type = other DNA
aatgtccacctcctgggttc

SEQ ID NO: 19097 - DNA, 20 bp, synthetic construct
  source 1..20: mol_type = other DNA
cctctagcgctgggtgttgg

SEQ ID NO: 19098 - DNA, 20 bp, synthetic construct
  source 1..20: mol_type = other DNA
gcctctggaaggggctgggg

SEQ ID NO: 19099 - DNA, 20 bp, synthetic construct
  source 1..20: mol_type = other DNA
cgtgaagtcagtcaacaaaa

SEQ ID NO: 19100 - DNA, 20 bp, synthetic construct
  source 1..20: mol_type = other DNA
aaggagcagggtcctggtcc

SEQ ID NO: 19101 - DNA, 20 bp, synthetic construct
  source 1..20: mol_type = other DNA
tctctaacatatgatactga

SEQ ID NO: 19102 - DNA, 20 bp, synthetic construct
  source 1..20: mol_type = other DNA
acatgctctagtttattaac

SEQ ID NO: 19103 - DNA, 20 bp, synthetic construct
  source 1..20: mol_type = other DNA
ggctaagtgggacattagta

SEQ ID NO: 19104 - DNA, 20 bp, synthetic construct
  source 1..20: mol_type = other DNA
acaaagaaatccccccttca

SEQ ID NO: 19105 - DNA, 20 bp, synthetic construct
  source 1..20: mol_type = other DNA
tctgcagttccatcaggtcc

SEQ ID NO: 19106 - DNA, 20 bp, synthetic construct
  source 1..20: mol_type = other DNA
ctacctgagcattcaggcag

SEQ ID NO: 19107 - DNA, 20 bp, synthetic construct
  source 1..20: mol_type = other DNA
gttaataatagtattttaga

SEQ ID NO: 19108 - DNA, 20 bp, synthetic construct
  source 1..20: mol_type = other DNA
taaacacagactttgtaggt

SEQ ID NO: 19109 - DNA, 20 bp, synthetic construct
  source 1..20: mol_type = other DNA
gcggagcaagtacaatgatg

SEQ ID NO: 19110 - DNA, 20 bp, synthetic construct
  source 1..20: mol_type = other DNA
acggagaacgctccaggagg

SEQ ID NO: 19111 - DNA, 20 bp, synthetic construct
  source 1..20: mol_type = other DNA
ggttataataaagatataaa

SEQ ID NO: 19112 - DNA, 20 bp, synthetic construct
  source 1..20: mol_type = other DNA
agggttggacctaatgcccc

SEQ ID NO: 19113 - DNA, 20 bp, synthetic construct
  source 1..20: mol_type = other DNA
actgcataattctgaagtta

SEQ ID NO: 19114 - DNA, 20 bp, synthetic construct
  source 1..20: mol_type = other DNA
cagatttgcacaaaaagata

SEQ ID NO: 19115 - DNA, 20 bp, synthetic construct
  source 1..20: mol_type = other DNA
taatatatagcatttatggt

SEQ ID NO: 19116 - DNA, 20 bp, synthetic construct
  source 1..20: mol_type = other DNA
ttggttttgttttttgagtc

SEQ ID NO: 19117 - DNA, 20 bp, synthetic construct
  source 1..20: mol_type = other DNA
aaacagaaattggtaccttg

SEQ ID NO: 19118 - DNA, 20 bp, synthetic construct
  source 1..20: mol_type = other DNA
cccggtggctgtcagtcaaa

SEQ ID NO: 19119 - DNA, 20 bp, synthetic construct
  source 1..20: mol_type = other DNA
caagtacactgggaacactt

SEQ ID NO: 19120 - DNA, 20 bp, synthetic construct
  source 1..20: mol_type = other DNA
gctttgcacgtgcctgggca

SEQ ID NO: 19121 - DNA, 20 bp, synthetic construct
  source 1..20: mol_type = other DNA
gaccacacagaactatgatg

SEQ ID NO: 19122 - DNA, 20 bp, synthetic construct
  source 1..20: mol_type = other DNA
atggacatgcattgcctact

SEQ ID NO: 19123 - DNA, 20 bp, synthetic construct
  source 1..20: mol_type = other DNA
ttcagagactgggacgtttt

SEQ ID NO: 19124 - DNA, 20 bp, synthetic construct
  source 1..20: mol_type = other DNA
tcagcccaactcccacccca

SEQ ID NO: 19125 - DNA, 20 bp, synthetic construct
  source 1..20: mol_type = other DNA
ccagctcatcagcatccagc

SEQ ID NO: 19126 - DNA, 20 bp, synthetic construct
  source 1..20: mol_type = other DNA
ggtctcctgggtctcagctt

SEQ ID NO: 19127 - DNA, 20 bp, synthetic construct
  source 1..20: mol_type = other DNA
ggatggggagcagagtttga

SEQ ID NO: 19128 - DNA, 20 bp, synthetic construct
  source 1..20: mol_type = other DNA
cacagaactcaaccttcctg

SEQ ID NO: 19129 - DNA, 20 bp, synthetic construct
  source 1..20: mol_type = other DNA
gcagcctgggagctctattc

SEQ ID NO: 19130 - DNA, 20 bp, synthetic construct
  source 1..20: mol_type = other DNA
ctctgataccatcatcccag

SEQ ID NO: 19131 - DNA, 20 bp, synthetic construct
  source 1..20: mol_type = other DNA
cgaacaacatgagagcacac

SEQ ID NO: 19132 - DNA, 20 bp, synthetic construct
  source 1..20: mol_type = other DNA
acctcgagaagatcgggtgc

SEQ ID NO: 19133 - DNA, 20 bp, synthetic construct
  source 1..20: mol_type = other DNA
cactgtgtatgctgtcactg

SEQ ID NO: 19134 - DNA, 20 bp, synthetic construct
  source 1..20: mol_type = other DNA
agttgtcaccactctggaga

SEQ ID NO: 19135 - DNA, 20 bp, synthetic construct
  source 1..20: mol_type = other DNA
tgtcagaagctacaccatca

SEQ ID NO: 19136 - DNA, 20 bp, synthetic construct
  source 1..20: mol_type = other DNA
atggcagccgccacgtgcca

SEQ ID NO: 19137 - DNA, 20 bp, synthetic construct
  source 1..20: mol_type = other DNA
cacttctggtcagcaaccca

SEQ ID NO: 19138 - DNA, 20 bp, synthetic construct
  source 1..20: mol_type = other DNA
tcacctgtacccacagggtc

SEQ ID NO: 19139 - DNA, 20 bp, synthetic construct
  source 1..20: mol_type = other DNA
taccagtgccactctgacag

SEQ ID NO: 19140 - DNA, 20 bp, synthetic construct
  source 1..20: mol_type = other DNA
ggagtttcctgagggttttc

SEQ ID NO: 19141 - DNA, 20 bp, synthetic construct
  source 1..20: mol_type = other DNA
atctcttcactaatggagat

SEQ ID NO: 19142 - DNA, 20 bp, synthetic construct
  source 1..20: mol_type = other DNA
gccgagagtcgtcggggttt

SEQ ID NO: 19143 - DNA, 20 bp, synthetic construct
  source 1..20: mol_type = other DNA
cgcctctccttagtcgccgc

SEQ ID NO: 19144 - DNA, 20 bp, synthetic construct
  source 1..20: mol_type = other DNA
aatgtgaatcagtcactact

SEQ ID NO: 19145 - DNA, 20 bp, synthetic construct
  source 1..20: mol_type = other DNA
gaatatctctttgacaagca

SEQ ID NO: 19146 - DNA, 20 bp, synthetic construct
  source 1..20: mol_type = other DNA
ttgggcagtatactaaggtg

SEQ ID NO: 19147 - DNA, 20 bp, synthetic construct
  source 1..20: mol_type = other DNA
gttacagtggttatagccag

SEQ ID NO: 19148 - DNA, 20 bp, synthetic construct
  source 1..20: mol_type = other DNA
gccgagggcgaggaggaccc

SEQ ID NO: 19149 - DNA, 20 bp, synthetic construct
  source 1..20: mol_type = other DNA
tgcatccttgaatcttgggt

SEQ ID NO: 19150 - DNA, 20 bp, synthetic construct
  source 1..20: mol_type = other DNA
ttcctgggtttcagtacttg

SEQ ID NO: 19151 - DNA, 20 bp, synthetic construct
  source 1..20: mol_type = other DNA
gtctcactctcacccaggct

SEQ ID NO: 19152 - DNA, 20 bp, synthetic construct
  source 1..20: mol_type = other DNA
gcggcgcctgtgagtgagtg

SEQ ID NO: 19153 - DNA, 20 bp, synthetic construct
  source 1..20: mol_type = other DNA
taagtcaacttatttgtttt

SEQ ID NO: 19154 - DNA, 20 bp, synthetic construct
  source 1..20: mol_type = other DNA
atcccatcaccatcttccag

SEQ ID NO: 19155 - DNA, 20 bp, synthetic construct
  source 1..20: mol_type = other DNA
tggatggcccctccgggaaa

SEQ ID NO: 19156 - DNA, 20 bp, synthetic construct
  source 1..20: mol_type = other DNA
acgaccactttgtcaagctc

SEQ ID NO: 19157 - DNA, 20 bp, synthetic construct
  source 1..20: mol_type = other DNA
ctcagtcccccaccacactg

SEQ ID NO: 19158 - DNA, 20 bp, synthetic construct
  source 1..20: mol_type = other DNA
ggtagagcggccgccatgtt

SEQ ID NO: 19159 - DNA, 20 bp, synthetic construct
  source 1..20: mol_type = other DNA
agattattctctgatttggt

SEQ ID NO: 19160 - DNA, 20 bp, synthetic construct
  source 1..20: mol_type = other DNA
acgggaagcttgtcatcaat

SEQ ID NO: 19161 - DNA, 20 bp, synthetic construct
  source 1..20: mol_type = other DNA
ccatcactgccacccagaag

SEQ ID NO: 19162 - DNA, 20 bp, synthetic construct
  source 1..20: mol_type = other DNA
cactgctggggagtccctgc

SEQ ID NO: 19163 - DNA, 20 bp, synthetic construct
  source 1..20: mol_type = other DNA
aaaggctaagctaaggtcaa

SEQ ID NO: 19164 - DNA, 20 bp, synthetic construct
  source 1..20: mol_type = other DNA
tttattttcataacagcatg

SEQ ID NO: 19165 - DNA, 20 bp, synthetic construct
  source 1..20: mol_type = other DNA
ggatgttatcgctattgaat

SEQ ID NO: 19166 - DNA, 20 bp, synthetic construct
  source 1..20: mol_type = other DNA
cacgggctggaagagacatg

SEQ ID NO: 19167 - DNA, 20 bp, synthetic construct
  source 1..20: mol_type = other DNA
ctattccacacattttcagc

SEQ ID NO: 19168 - DNA, 20 bp, synthetic construct
  source 1..20: mol_type = other DNA
cccaaagtgctgggatgaca

SEQ ID NO: 19169 - DNA, 20 bp, synthetic construct
  source 1..20: mol_type = other DNA
ctcagcagctccccagcacc

SEQ ID NO: 19170 - DNA, 20 bp, synthetic construct
  source 1..20: mol_type = other DNA
cttcaaattcctggggctga

SEQ ID NO: 19171 - DNA, 20 bp, synthetic construct
  source 1..20: mol_type = other DNA
tgaaagaatcttccaattct

SEQ ID NO: 19172 - DNA, 20 bp, synthetic construct
  source 1..20: mol_type = other DNA
ttctggaacaagatagagtg

SEQ ID NO: 19173 - DNA, 20 bp, synthetic construct
  source 1..20: mol_type = other DNA
aagtgcctggagtatcttct

SEQ ID NO: 19174 - DNA, 20 bp, synthetic construct
  source 1..20: mol_type = other DNA
tgaaaaagtctggcaagctg

SEQ ID NO: 19175 - DNA, 20 bp, synthetic construct
  source 1..20: mol_type = other DNA
ctaatgaaacttgtaccgtg

SEQ ID NO: 19176 - DNA, 20 bp, synthetic construct
  source 1..20: mol_type = other DNA
ggctgcagtgagccatgatc

SEQ ID NO: 19177 - DNA, 20 bp, synthetic construct
  source 1..20: mol_type = other DNA
gcatatcttctccagaagtc

SEQ ID NO: 19178 - DNA, 20 bp, synthetic construct
  source 1..20: mol_type = other DNA
ttttatttgcattttattga

SEQ ID NO: 19179 - DNA, 20 bp, synthetic construct
  source 1..20: mol_type = other DNA
gatggaaaggaaacaagaaa

SEQ ID NO: 19180 - DNA, 20 bp, synthetic construct
  source 1..20: mol_type = other DNA
tgtccagatgggagtcccat

SEQ ID NO: 19181 - DNA, 20 bp, synthetic construct
  source 1..20: mol_type = other DNA
gggtggatcacctgaggtca

SEQ ID NO: 19182 - DNA, 20 bp, synthetic construct
  source 1..20: mol_type = other DNA
agtatggctctgacatctct

SEQ ID NO: 19183 - DNA, 20 bp, synthetic construct
  source 1..20: mol_type = other DNA
agaagccaactagccaacac

SEQ ID NO: 19184 - DNA, 20 bp, synthetic construct
  source 1..20: mol_type = other DNA
ctcattttacattttaaagt

SEQ ID NO: 19185 - DNA, 20 bp, synthetic construct
  source 1..20: mol_type = other DNA
ctgcagtgcgaagaaactga

SEQ ID NO: 19186 - DNA, 20 bp, synthetic construct
  source 1..20: mol_type = other DNA
tcttggtctgatccacgctg

SEQ ID NO: 19187 - DNA, 20 bp, synthetic construct
  source 1..20: mol_type = other DNA
ctctgtccagcccacagcaa

SEQ ID NO: 19188 - DNA, 20 bp, synthetic construct
  source 1..20: mol_type = other DNA
tcagcatcagcccatcatca

SEQ ID NO: 19189 - DNA, 20 bp, synthetic construct
  source 1..20: mol_type = other DNA
ctcttctttgagcagccctt

SEQ ID NO: 19190 - DNA, 20 bp, synthetic construct
  source 1..20: mol_type = other DNA
aggtctcctgagcaataaga

SEQ ID NO: 19191 - DNA, 20 bp, synthetic construct
  source 1..20: mol_type = other DNA
catctgctgcaccagttcct

SEQ ID NO: 19192 - DNA, 20 bp, synthetic construct
  source 1..20: mol_type = other DNA
ataatgctgtaccgattgta

SEQ ID NO: 19193 - DNA, 20 bp, synthetic construct
  source 1..20: mol_type = other DNA
ggccggcgctggttgaacag

SEQ ID NO: 19194 - DNA, 20 bp, synthetic construct
  source 1..20: mol_type = other DNA
ccctaagttgttcaccggga

SEQ ID NO: 19195 - DNA, 20 bp, synthetic construct
  source 1..20: mol_type = other DNA
gtaagaaatgagatgcagga

SEQ ID NO: 19196 - DNA, 20 bp, synthetic construct
  source 1..20: mol_type = other DNA
gggtcacagtgacctgacct

SEQ ID NO: 19197 - DNA, 20 bp, synthetic construct
  source 1..20: mol_type = other DNA
ggtgatattattttcagtgc

SEQ ID NO: 19198 - DNA, 20 bp, synthetic construct
  source 1..20: mol_type = other DNA
acataatatggtaaaatgta

SEQ ID NO: 19199 - DNA, 20 bp, synthetic construct
  source 1..20: mol_type = other DNA
ggctcatcggggatgcggcc

SEQ ID NO: 19200 - DNA, 20 bp, synthetic construct
  source 1..20: mol_type = other DNA
acaagggggagaccaaggca

SEQ ID NO: 19201 - DNA, 20 bp, synthetic construct
  source 1..20: mol_type = other DNA
tgttggggcgcttcgagctg

SEQ ID NO: 19202 - DNA, 20 bp, synthetic construct
  source 1..20: mol_type = other DNA
gagggtctgggtcaggcccc

SEQ ID NO: 19203 - DNA, 20 bp, synthetic construct
  source 1..20: mol_type = other DNA
tttccggtttctacatgcag

SEQ ID NO: 19204 - DNA, 20 bp, synthetic construct
  source 1..20: mol_type = other DNA
tctacatgcagagatgaatt

SEQ ID NO: 19205 - DNA, 20 bp, synthetic construct
  source 1..20: mol_type = other DNA
tacggcctgtggctggactg

SEQ ID NO: 19206 - DNA, 20 bp, synthetic construct
  source 1..20: mol_type = other DNA
gtattcttcgagtgacagct

SEQ ID NO: 19207 - DNA, 20 bp, synthetic construct
  source 1..20: mol_type = other DNA
tggaaagctatgcctattct

SEQ ID NO: 19208 - DNA, 20 bp, synthetic construct
  source 1..20: mol_type = other DNA
taatctaagaaaaggggaga

SEQ ID NO: 19209 - DNA, 20 bp, synthetic construct
  source 1..20: mol_type = other DNA
agctgcttggattctctgag

SEQ ID NO: 19210 - DNA, 20 bp, synthetic construct
  source 1..20: mol_type = other DNA
ggtgacattgaaactacact

SEQ ID NO: 19211 - DNA, 20 bp, synthetic construct
  source 1..20: mol_type = other DNA
ggttaaatggtagttagcaa

SEQ ID NO: 19212 - DNA, 20 bp, synthetic construct
  source 1..20: mol_type = other DNA
ttagacgcaccccggtgagc

SEQ ID NO: 19213 - DNA, 20 bp, synthetic construct
  source 1..20: mol_type = other DNA
gggaccgcggcttctacttc

SEQ ID NO: 19214 - DNA, 20 bp, synthetic construct
  source 1..20: mol_type = other DNA
ccacccaagaccccgcccac

SEQ ID NO: 19215 - DNA, 20 bp, synthetic construct
  source 1..20: mol_type = other DNA
cttctcctgacccagtcccc

SEQ ID NO: 19216 - DNA, 20 bp, synthetic construct
  source 1..20: mol_type = other DNA
gaattttcagggtaaactgg

SEQ ID NO: 19217 - DNA, 20 bp, synthetic construct
  source 1..20: mol_type = other DNA
cacacaaacgcacagcacac

SEQ ID NO: 19218 - DNA, 20 bp, synthetic construct
  source 1..20: mol_type = other DNA
ggctggcctccttggcgcct

SEQ ID NO: 19219 - DNA, 20 bp, synthetic construct
  source 1..20: mol_type = other DNA
agcctgactccctggtgtgc

SEQ ID NO: 19220 - DNA, 20 bp, synthetic construct
  source 1..20: mol_type = other DNA
ccctcggtgacatcttgccc

SEQ ID NO: 19221 - DNA, 20 bp, synthetic construct
  source 1..20: mol_type = other DNA
cgtgcctagtcgtggctctc

SEQ ID NO: 19222 - DNA, 20 bp, synthetic construct
  source 1..20: mol_type = other DNA
ccagctgccccagcggcctc

SEQ ID NO: 19223 - DNA, 20 bp, synthetic construct
  source 1..20: mol_type = other DNA
gccccctgcccagcctgccc

SEQ ID NO: 19224 - DNA, 20 bp, synthetic construct
  source 1..20: mol_type = other DNA
caatggggaagtcgatgctg

SEQ ID NO: 19225 - DNA, 20 bp, synthetic construct
  source 1..20: mol_type = other DNA
gcagccgtggcatcgttgag

SEQ ID NO: 19226 - DNA, 20 bp, synthetic construct
  source 1..20: mol_type = other DNA
agcagtccacccagcgcctg

SEQ ID NO: 19227 - DNA, 20 bp, synthetic construct
  source 1..20: mol_type = other DNA
atcggaagtgagcaaaactg

SEQ ID NO: 19228 - DNA, 20 bp, synthetic construct
  source 1..20: mol_type = other DNA
ctcctcggccccctccatcg

SEQ ID NO: 19229 - DNA, 20 bp, synthetic construct
  source 1..20: mol_type = other DNA
ggctcctcactcccttttcc

SEQ ID NO: 19230 - DNA, 20 bp, synthetic construct
  source 1..20: mol_type = other DNA
acacacaaagacacagcaca

SEQ ID NO: 19231 - DNA, 20 bp, synthetic construct
  source 1..20: mol_type = other DNA
cgatgctccccataccccac

SEQ ID NO: 19232 - DNA, 20 bp, synthetic construct
  source 1..20: mol_type = other DNA
ggagggggctcctggctggc

SEQ ID NO: 19233 - DNA, 20 bp, synthetic construct
  source 1..20: mol_type = other DNA
ggcgcctagggctgcggcag

SEQ ID NO: 19234 - DNA, 20 bp, synthetic construct
  source 1..20: mol_type = other DNA
cagtcgcagagggtccctcg

SEQ ID NO: 19235 - DNA, 20 bp, synthetic construct
  source 1..20: mol_type = other DNA
gttatattctgcctcgccgg

SEQ ID NO: 19236 - DNA, 20 bp, synthetic construct
  source 1..20: mol_type = other DNA
gtcttcagtggggggccccc

SEQ ID NO: 19237 - DNA, 20 bp, synthetic construct
  source 1..20: mol_type = other DNA
ctgctcctgctgcagctgct

SEQ ID NO: 19238 - DNA, 20 bp, synthetic construct
  source 1..20: mol_type = other DNA
ggaactcctgaatttgtaac

SEQ ID NO: 19239 - DNA, 20 bp, synthetic construct
  source 1..20: mol_type = other DNA
ttggtggatgactccgatcc

SEQ ID NO: 19240 - DNA, 20 bp, synthetic construct
  source 1..20: mol_type = other DNA
tccgcgctggtccgccatgc

SEQ ID NO: 19241 - DNA, 20 bp, synthetic construct
  source 1..20: mol_type = other DNA
agacacacaccgagagctac

SEQ ID NO: 19242 - DNA, 20 bp, synthetic construct
  source 1..20: mol_type = other DNA
aaaagcctccagctgtccac

SEQ ID NO: 19243 - DNA, 20 bp, synthetic construct
  source 1..20: mol_type = other DNA
acttactttgagtttgaaac

SEQ ID NO: 19244 - DNA, 20 bp, synthetic construct
  source 1..20: mol_type = other DNA
tgcaatcctctcccttacat

SEQ ID NO: 19245 - DNA, 20 bp, synthetic construct
  source 1..20: mol_type = other DNA
tccaccaggatcacgtttga

SEQ ID NO: 19246 - DNA, 20 bp, synthetic construct
  source 1..20: mol_type = other DNA
acgcagtatgcctgcccacc

SEQ ID NO: 19247 - DNA, 20 bp, synthetic construct
  source 1..20: mol_type = other DNA
gctggcactgagccgtgccc

SEQ ID NO: 19248 - DNA, 20 bp, synthetic construct
  source 1..20: mol_type = other DNA
cgattcacctgcagcgagag

SEQ ID NO: 19249 - DNA, 20 bp, synthetic construct
  source 1..20: mol_type = other DNA
tccttaagtggcagggcggg

SEQ ID NO: 19250 - DNA, 20 bp, synthetic construct
  source 1..20: mol_type = other DNA
cagctggtgtacaaggatgg

SEQ ID NO: 19251 - DNA, 20 bp, synthetic construct
  source 1..20: mol_type = other DNA
tccacgagcacctttaaggt

SEQ ID NO: 19252 - DNA, 20 bp, synthetic construct
  source 1..20: mol_type = other DNA
caggatgaagcggtcgtttt

SEQ ID NO: 19253 - DNA, 20 bp, synthetic construct
  source 1..20: mol_type = other DNA
gacagctgcacttactactt

SEQ ID NO: 19254 - DNA, 20 bp, synthetic construct
  source 1..20: mol_type = other DNA
gacaactacctgtatgagat

SEQ ID NO: 19255 - DNA, 20 bp, synthetic construct
  source 1..20: mol_type = other DNA
gcctcttcctctaagtgcgg

SEQ ID NO: 19256 - DNA, 20 bp, synthetic construct
  source 1..20: mol_type = other DNA
gacagcgagaatcccgggga

SEQ ID NO: 19257 - DNA, 20 bp, synthetic construct
  source 1..20: mol_type = other DNA
tccctgcatggggatgacca

SEQ ID NO: 19258 - DNA, 20 bp, synthetic construct
  source 1..20: mol_type = other DNA
gcgaggaaagggaagtccag

SEQ ID NO: 19259 - DNA, 20 bp, synthetic construct
  source 1..20: mol_type = other DNA
actgtgcttatttttttaag

SEQ ID NO: 19260 - DNA, 20 bp, synthetic construct
  source 1..20: mol_type = other DNA
aggaggagggaggccaggcg

SEQ ID NO: 19261 - DNA, 20 bp, synthetic construct
  source 1..20: mol_type = other DNA
ccggtttggctggcttgttt

SEQ ID NO: 19262 - DNA, 20 bp, synthetic construct
  source 1..20: mol_type = other DNA
gcagtgtaactgcatagttt

SEQ ID NO: 19263 - DNA, 20 bp, synthetic construct
  source 1..20: mol_type = other DNA
gctaggaagtctggtgcagt

SEQ ID NO: 19264 - DNA, 20 bp, synthetic construct
  source 1..20: mol_type = other DNA
tacccaagtaaaagtaacct

SEQ ID NO: 19265 - DNA, 20 bp, synthetic construct
  source 1..20: mol_type = other DNA
cggctttcaaacaaaagagg

SEQ ID NO: 19266 - DNA, 20 bp, synthetic construct
  source 1..20: mol_type = other DNA
ggctcccggagcagggcgag

SEQ ID NO: 19267 - DNA, 20 bp, synthetic construct
  source 1..20: mol_type = other DNA
cttcatatgcaattcccaag

SEQ ID NO: 19268 - DNA, 20 bp, synthetic construct
  source 1..20: mol_type = other DNA
caacgaagtggaacctggtt

SEQ ID NO: 19269 - DNA, 20 bp, synthetic construct
  source 1..20: mol_type = other DNA
gtttttcattgacaacatac

SEQ ID NO: 19270 - DNA, 20 bp, synthetic construct
  source 1..20: mol_type = other DNA
tgccttctgcaatcccgtca

SEQ ID NO: 19271 - DNA, 20 bp, synthetic construct
  source 1..20: mol_type = other DNA
ctacaccatgggtcataact

SEQ ID NO: 19272 - DNA, 20 bp, synthetic construct
  source 1..20: mol_type = other DNA
ggaaggggaacactgtcagt

SEQ ID NO: 19273 - DNA, 20 bp, synthetic construct
  source 1..20: mol_type = other DNA
cttctggggagaccccgacg

SEQ ID NO: 19274 - DNA, 20 bp, synthetic construct
  source 1..20: mol_type = other DNA
ctgccaccagtgctttgctc

SEQ ID NO: 19275 - DNA, 20 bp, synthetic construct
  source 1..20: mol_type = other DNA
gagccccgcagcagagccac

SEQ ID NO: 19276 - DNA, 20 bp, synthetic construct
  source 1..20: mol_type = other DNA
cctagacaacactgtgaaag

SEQ ID NO: 19277 - DNA, 20 bp, synthetic construct
  source 1..20: mol_type = other DNA
atgtggcgggccaaactgca

SEQ ID NO: 19278 - DNA, 20 bp, synthetic construct
  source 1..20: mol_type = other DNA
tgaagtattgaaaatggaga

SEQ ID NO: 19279 - DNA, 20 bp, synthetic construct
  source 1..20: mol_type = other DNA
tgcaacagatgttaaagtca

SEQ ID NO: 19280 - DNA, 20 bp, synthetic construct
  source 1..20: mol_type = other DNA
caacgcgtcccagcgcatca

SEQ ID NO: 19281 - DNA, 20 bp, synthetic construct
  source 1..20: mol_type = other DNA
cccttccaactctcctttcc

SEQ ID NO: 19282 - DNA, 20 bp, synthetic construct
  source 1..20: mol_type = other DNA
cccttgtctccgggtggtgt

SEQ ID NO: 19283 - DNA, 20 bp, synthetic construct
  source 1..20: mol_type = other DNA
cctcagcatgaacagagaaa

SEQ ID NO: 19284 - DNA, 20 bp, synthetic construct
  source 1..20: mol_type = other DNA
gagcatcttgcatccaaacc

SEQ ID NO: 19285 - DNA, 20 bp, synthetic construct
  source 1..20: mol_type = other DNA
ctaaagcttttatttaacag

SEQ ID NO: 19286 - DNA, 20 bp, synthetic construct
  source 1..20: mol_type = other DNA
tcttcttttctttttttaaa

SEQ ID NO: 19287 - DNA, 20 bp, synthetic construct
  source 1..20: mol_type = other DNA
cgcagaagaaaggcggagaa

SEQ ID NO: 19288 - DNA, 20 bp, synthetic construct
  source 1..20: mol_type = other DNA
gtgcccgtggtgcagccatc

SEQ ID NO: 19289 - DNA, 20 bp, synthetic construct
  source 1..20: mol_type = other DNA
tctccgggtggtgttggaca

SEQ ID NO: 19290 - DNA, 20 bp, synthetic construct
  source 1..20: mol_type = other DNA
atggtggaaaacgaagctca

SEQ ID NO: 19291 - DNA, 20 bp, synthetic construct
  source 1..20: mol_type = other DNA
tatgggggttctggagagcg

SEQ ID NO: 19292 - DNA, 20 bp, synthetic construct
  source 1..20: mol_type = other DNA
gcagggtgcaaccgagctgg

SEQ ID NO: 19293 - DNA, 20 bp, synthetic construct
  source 1..20: mol_type = other DNA
gctatactcctggcctgtgc

SEQ ID NO: 19294 - DNA, 20 bp, synthetic construct
  source 1..20: mol_type = other DNA
ccgccgggatgctgctgagc

SEQ ID NO: 19295 - DNA, 20 bp, synthetic construct
  source 1..20: mol_type = other DNA
ctcccatgaggctcctggca

SEQ ID NO: 19296 - DNA, 20 bp, synthetic construct
  source 1..20: mol_type = other DNA
caccttggagctattcacag

SEQ ID NO: 19297 - DNA, 20 bp, synthetic construct
  source 1..20: mol_type = other DNA
cctccgtgccctgcatctca

SEQ ID NO: 19298 - DNA, 20 bp, synthetic construct
  source 1..20: mol_type = other DNA
tgctgctatgaagggcaact

SEQ ID NO: 19299 - DNA, 20 bp, synthetic construct
  source 1..20: mol_type = other DNA
cagcaaacaggcattctcac

SEQ ID NO: 19300 - DNA, 20 bp, synthetic construct
  source 1..20: mol_type = other DNA
cccatccctcctccagatgc

SEQ ID NO: 19301 - DNA, 20 bp, synthetic construct
  source 1..20: mol_type = other DNA
gagcctcctccaaaactgcc

SEQ ID NO: 19302 - DNA, 20 bp, synthetic construct
  source 1..20: mol_type = other DNA
acagcatgtgccaagattct

SEQ ID NO: 19303 - DNA, 20 bp, synthetic construct
  source 1..20: mol_type = other DNA
ggctgctcccacctggctct

SEQ ID NO: 19304 - DNA, 20 bp, synthetic construct
  source 1..20: mol_type = other DNA
aagaggggatgagttgtgtg

SEQ ID NO: 19305 - DNA, 20 bp, synthetic construct
  source 1..20: mol_type = other DNA
ctgggccgtggagcctatgg

SEQ ID NO: 19306 - DNA, 20 bp, synthetic construct
  source 1..20: mol_type = other DNA
gtgatccacagagatgtgaa

SEQ ID NO: 19307 - DNA, 20 bp, synthetic construct
  source 1..20: mol_type = other DNA
ggctacaatgtcaagtccga

SEQ ID NO: 19308 - DNA, 20 bp, synthetic construct
  source 1..20: mol_type = other DNA
actgctcagtgcctgaggaa

SEQ ID NO: 19309 - DNA, 20 bp, synthetic construct
  source 1..20: mol_type = other DNA
gagccccacagccccatctg

SEQ ID NO: 19310 - DNA, 20 bp, synthetic construct
  source 1..20: mol_type = other DNA
tcggccccaccagtgcctct

SEQ ID NO: 19311 - DNA, 20 bp, synthetic construct
  source 1..20: mol_type = other DNA
aaacagggcctctgcggagc

SEQ ID NO: 19312 - DNA, 20 bp, synthetic construct
  source 1..20: mol_type = other DNA
ctagggtaccagcaggcaga

SEQ ID NO: 19313 - DNA, 20 bp, synthetic construct
  source 1..20: mol_type = other DNA
cagaggtgctcatcagcact

SEQ ID NO: 19314 - DNA, 20 bp, synthetic construct
  source 1..20: mol_type = other DNA
ctctagccgacattgttttg

SEQ ID NO: 19315 - DNA, 20 bp, synthetic construct
  source 1..20: mol_type = other DNA
tgcctgtggctggagaaagg

SEQ ID NO: 19316 - DNA, 20 bp, synthetic construct
  source 1..20: mol_type = other DNA
cagcaacagagaccaaggct

SEQ ID NO: 19317 - DNA, 20 bp, synthetic construct
  source 1..20: mol_type = other DNA
tgaaacgaggttttgtgctg

SEQ ID NO: 19318 - DNA, 20 bp, synthetic construct
  source 1..20: mol_type = other DNA
agcctcagtgtaaagtctgc

SEQ ID NO: 19319 - DNA, 20 bp, synthetic construct
  source 1..20: mol_type = other DNA
tctttgggggctatgtgcct

SEQ ID NO: 19320 - DNA, 20 bp, synthetic construct
  source 1..20: mol_type = other DNA
agccacagcagatacaagcg

SEQ ID NO: 19321 - DNA, 20 bp, synthetic construct
  source 1..20: mol_type = other DNA
ctccgcccacactggcctca

SEQ ID NO: 19322 - DNA, 20 bp, synthetic construct
  source 1..20: mol_type = other DNA
tctgttccccttcgggtcca

SEQ ID NO: 19323 - DNA, 20 bp, synthetic construct
  source 1..20: mol_type = other DNA
tggggagcagccgctgtggg

SEQ ID NO: 19324 - DNA, 20 bp, synthetic construct
  source 1..20: mol_type = other DNA
ccctgctgcgccgcgcctgg

SEQ ID NO: 19325 - DNA, 20 bp, synthetic construct
  source 1..20: mol_type = other DNA
tgagcttcctgaccatcccg

SEQ ID NO: 19326 - DNA, 20 bp, synthetic construct
  source 1..20: mol_type = other DNA
cccttcggtactgggcctcc

SEQ ID NO: 19327 - DNA, 20 bp, synthetic construct
  source 1..20: mol_type = other DNA
tgccagctggtcccgggaat

SEQ ID NO: 19328 - DNA, 20 bp, synthetic construct
  source 1..20: mol_type = other DNA
ctgggagtgggaagcctctt

SEQ ID NO: 19329 - DNA, 20 bp, synthetic construct
  source 1..20: mol_type = other DNA
acaggcccgttcttccgcta

SEQ ID NO: 19330 - DNA, 20 bp, synthetic construct
  source 1..20: mol_type = other DNA
ttctacgcccgcccgctgcc

SEQ ID NO: 19331 - DNA, 20 bp, synthetic construct
  source 1..20: mol_type = other DNA
gactgggtgcactggttcct

SEQ ID NO: 19332 - DNA, 20 bp, synthetic construct
  source 1..20: mol_type = other DNA
tccccagctaaataccctgc

SEQ ID NO: 19333 - DNA, 20 bp, synthetic construct
  source 1..20: mol_type = other DNA
ggggcccctgggcagtgggt

SEQ ID NO: 19334 - DNA, 20 bp, synthetic construct
  source 1..20: mol_type = other DNA
ctggaggaagctgccaagga

SEQ ID NO: 19335 - DNA, 20 bp, synthetic construct
  source 1..20: mol_type = other DNA
gcggcctctggggtccgtgc

SEQ ID NO: 19336 - DNA, 20 bp, synthetic construct
  source 1..20: mol_type = other DNA
atgcccgacaaatgcaaatg

SEQ ID NO: 19337 - DNA, 20 bp, synthetic construct
  source 1..20: mol_type = other DNA
gtctatgaggtcatctccaa

SEQ ID NO: 19338 - DNA, 20 bp, synthetic construct
  source 1..20: mol_type = other DNA
cagcttctgaagtttgtgga

SEQ ID NO: 19339 - DNA, 20 bp, synthetic construct
  source 1..20: mol_type = other DNA
gacttcatgcccaccatctt

SEQ ID NO: 19340 - DNA, 20 bp, synthetic construct
  source 1..20: mol_type = other DNA
gaagccctcagcaagatgaa

SEQ ID NO: 19341 - DNA, 20 bp, synthetic construct
  source 1..20: mol_type = other DNA
ctcaagcgccgctttgccat

SEQ ID NO: 19342 - DNA, 20 bp, synthetic construct
  source 1..20: mol_type = other DNA
tggccaggctggcacatacc

SEQ ID NO: 19343 - DNA, 20 bp, synthetic construct
  source 1..20: mol_type = other DNA
ccccacccttgcccgcggca

SEQ ID NO: 19344 - DNA, 20 bp, synthetic construct
  source 1..20: mol_type = other DNA
gccccaagcctttgcagccc

SEQ ID NO: 19345 - DNA, 20 bp, synthetic construct
  source 1..20: mol_type = other DNA
aggacaacatagacgaggat

SEQ ID NO: 19346 - DNA, 20 bp, synthetic construct
  source 1..20: mol_type = other DNA
cccacctccccgtgcagcag

SEQ ID NO: 19347 - DNA, 20 bp, synthetic construct
  source 1..20: mol_type = other DNA
tccagactgtgaaccacgtt

SEQ ID NO: 19348 - DNA, 20 bp, synthetic construct
  source 1..20: mol_type = other DNA
tggtcaccatgccctccttc

SEQ ID NO: 19349 - DNA, 20 bp, synthetic construct
  source 1..20: mol_type = other DNA
gtgcgatgtggacgtcacgc

SEQ ID NO: 19350 - DNA, 20 bp, synthetic construct
  source 1..20: mol_type = other DNA
ccactgggcccctgtcccca

SEQ ID NO: 19351 - DNA, 20 bp, synthetic construct
  source 1..20: mol_type = other DNA
cctcctgcagtttgggagac

SEQ ID NO: 19352 - DNA, 20 bp, synthetic construct
  source 1..20: mol_type = other DNA
gcttctgctccagccccttt

SEQ ID NO: 19353 - DNA, 20 bp, synthetic construct
  source 1..20: mol_type = other DNA
ttcctgttccctcctggtcc

SEQ ID NO: 19354 - DNA, 20 bp, synthetic construct
  source 1..20: mol_type = other DNA
tgctattcccattgtgacag

SEQ ID NO: 19355 - DNA, 20 bp, synthetic construct
  source 1..20: mol_type = other DNA
cccccagcatcgggggcctg

SEQ ID NO: 19356 - DNA, 20 bp, synthetic construct
  source 1..20: mol_type = other DNA
cccactgttaacaacgacta

SEQ ID NO: 19357 - DNA, 20 bp, synthetic construct
  source 1..20: mol_type = other DNA
ttcaaacatgcacttgcagc

SEQ ID NO: 19358 - DNA, 20 bp, synthetic construct
  source 1..20: mol_type = other DNA
caagaggtggaatctccaac

SEQ ID NO: 19359 - DNA, 20 bp, synthetic construct
  source 1..20: mol_type = other DNA
ctcaaagcatttacagtacc

SEQ ID NO: 19360 - DNA, 20 bp, synthetic construct
  source 1..20: mol_type = other DNA
tccagaaaagcattatggtt

SEQ ID NO: 19361 - DNA, 20 bp, synthetic construct
  source 1..20: mol_type = other DNA
tatacaagcatgcgttgcac

SEQ ID NO: 19362 - DNA, 20 bp, synthetic construct
  source 1..20: mol_type = other DNA
actggggagacagaaactgt

SEQ ID NO: 19363 - DNA, 20 bp, synthetic construct
  source 1..20: mol_type = other DNA
ctagggtggaagagccgggc

SEQ ID NO: 19364 - DNA, 20 bp, synthetic construct
  source 1..20: mol_type = other DNA
tgcactggaacttacaacac

SEQ ID NO: 19365 - DNA, 20 bp, synthetic construct
  source 1..20: mol_type = other DNA
gtttcatctgcgacccggac

SEQ ID NO: 19366 - DNA, 20 bp, synthetic construct
  source 1..20: mol_type = other DNA
ccacctccagcttgtacctg

SEQ ID NO: 19367 - DNA, 20 bp, synthetic construct
  source 1..20: mol_type = other DNA
ccccgcagggcagccccgag

SEQ ID NO: 19368 - DNA, 20 bp, synthetic construct
  source 1..20: mol_type = other DNA
gcaaacctcctcacagccca

SEQ ID NO: 19369 - DNA, 20 bp, synthetic construct
  source 1..20: mol_type = other DNA
ggtcctcggacaccgaggag

SEQ ID NO: 19370 - DNA, 20 bp, synthetic construct
  source 1..20: mol_type = other DNA
aggtactataaaccctaatt

SEQ ID NO: 19371 - DNA, 20 bp, synthetic construct
  source 1..20: mol_type = other DNA
gccgatatttggagttctta

SEQ ID NO: 19372 - DNA, 20 bp, synthetic construct
  source 1..20: mol_type = other DNA
attcctgaattttggttaac

SEQ ID NO: 19373 - DNA, 20 bp, synthetic construct
  source 1..20: mol_type = other DNA
acaaatgaagtgctgacaaa

SEQ ID NO: 19374 - DNA, 20 bp, synthetic construct
  source 1..20: mol_type = other DNA
gggacagttcgtactgtgac

SEQ ID NO: 19375 - DNA, 20 bp, synthetic construct
  source 1..20: mol_type = other DNA
ttacataaaggggatgtggt

SEQ ID NO: 19376 - DNA, 20 bp, synthetic construct
  source 1..20: mol_type = other DNA
atcacttataaagaaaactg

SEQ ID NO: 19377 - DNA, 20 bp, synthetic construct
  source 1..20: mol_type = other DNA
atatggtaaggcccctaaaa

SEQ ID NO: 19378 - DNA, 20 bp, synthetic construct
  source 1..20: mol_type = other DNA
agcctccccaaaggcagctc

SEQ ID NO: 19379 - DNA, 20 bp, synthetic construct
  source 1..20: mol_type = other DNA
agtgactttgaacagcttcc

SEQ ID NO: 19380 - DNA, 20 bp, synthetic construct
  source 1..20: mol_type = other DNA
acaacacgatgccatgagct

SEQ ID NO: 19381 - DNA, 20 bp, synthetic construct
  source 1..20: mol_type = other DNA
aggccattcagaaaaagctt

SEQ ID NO: 19382 - DNA, 20 bp, synthetic construct
  source 1..20: mol_type = other DNA
tcttacctctttgactgaac

SEQ ID NO: 19383 - DNA, 20 bp, synthetic construct
  source 1..20: mol_type = other DNA
gaggccgcagtggcagcttc

SEQ ID NO: 19384 - DNA, 20 bp, synthetic construct
  source 1..20: mol_type = other DNA
gtccaagatgctaatggcct

SEQ ID NO: 19385 - DNA, 20 bp, synthetic construct
  source 1..20: mol_type = other DNA
gtagctgaattcacctgact

SEQ ID NO: 19386 - DNA, 20 bp, synthetic construct
  source 1..20: mol_type = other DNA
ccgagcatagtatgctgagt

SEQ ID NO: 19387 - DNA, 20 bp, synthetic construct
  source 1..20: mol_type = other DNA
tcataccagggtcatgcgtt

SEQ ID NO: 19388 - DNA, 20 bp, synthetic construct
  source 1..20: mol_type = other DNA
ggtctgccagctgagatgct

SEQ ID NO: 19389 - DNA, 20 bp, synthetic construct
  source 1..20: mol_type = other DNA
aattttctctactgtctgta

SEQ ID NO: 19390 - DNA, 20 bp, synthetic construct
  source 1..20: mol_type = other DNA
aacagctgagggtgtttgct

SEQ ID NO: 19391 - DNA, 20 bp, synthetic construct
  source 1..20: mol_type = other DNA
taggcctcagcccaggtcct

SEQ ID NO: 19392 - DNA, 20 bp, synthetic construct
  source 1..20: mol_type = other DNA
cggccacctacatgttccac

SEQ ID NO: 19393 - DNA, 20 bp, synthetic construct
  source 1..20: mol_type = other DNA
gcatcagcgtgcaccgctac

SEQ ID NO: 19394 - DNA, 20 bp, synthetic construct
  source 1..20: mol_type = other DNA
atgacaccactcggcctgaa

SEQ ID NO: 19395 - DNA, 20 bp, synthetic construct
  source 1..20: mol_type = other DNA
tccgcaccatagctgtggtg

SEQ ID NO: 19396 - DNA, 20 bp, synthetic construct
  source 1..20: mol_type = other DNA
atcctgtgctctacttgctc

SEQ ID NO: 19397 - DNA, 20 bp, synthetic construct
  source 1..20: mol_type = other DNA
gtgacctcatctctcataac

SEQ ID NO: 19398 - DNA, 20 bp, synthetic construct
  source 1..20: mol_type = other DNA
ttgtttctgttccttcctgg

SEQ ID NO: 19399 - DNA, 20 bp, synthetic construct
  source 1..20: mol_type = other DNA
agcttggctcgtggaagaag

SEQ ID NO: 19400 - DNA, 20 bp, synthetic construct
  source 1..20: mol_type = other DNA
tgctgcaacaaccgcaacgt

SEQ ID NO: 19401 - DNA, 20 bp, synthetic construct
  source 1..20: mol_type = other DNA
cgctgtggactgtcctgagg

SEQ ID NO: 19402 - DNA, 20 bp, synthetic construct
  source 1..20: mol_type = other DNA
aaacaccagtcacctcgtct

SEQ ID NO: 19403 - DNA, 20 bp, synthetic construct
  source 1..20: mol_type = other DNA
tatgacaatttctggcagat

SEQ ID NO: 19404 - DNA, 20 bp, synthetic construct
  source 1..20: mol_type = other DNA
ctcgtgggctgggaatgggg

SEQ ID NO: 19405 - DNA, 20 bp, synthetic construct
  source 1..20: mol_type = other DNA
cccgcccccctacccggccc

SEQ ID NO: 19406 - DNA, 20 bp, synthetic construct
  source 1..20: mol_type = other DNA
gccggccatgatcgccgagt

SEQ ID NO: 19407 - DNA, 20 bp, synthetic construct
  source 1..20: mol_type = other DNA
gcgacctgtccaggtgagaa

SEQ ID NO: 19408 - DNA, 20 bp, synthetic construct
  source 1..20: mol_type = other DNA
tcgggtgaccattcggacgg

SEQ ID NO: 19409 - DNA, 20 bp, synthetic construct
  source 1..20: mol_type = other DNA
gggtccttggagtgataata

SEQ ID NO: 19410 - DNA, 20 bp, synthetic construct
  source 1..20: mol_type = other DNA
gaactccatcgccatcttct

SEQ ID NO: 19411 - DNA, 20 bp, synthetic construct
  source 1..20: mol_type = other DNA
gcctgatccctgaacccctg

SEQ ID NO: 19412 - DNA, 20 bp, synthetic construct
  source 1..20: mol_type = other DNA
tgattcacctcttcctctgg

SEQ ID NO: 19413 - DNA, 20 bp, synthetic construct
  source 1..20: mol_type = other DNA
gggacacctgggagaaggtc

SEQ ID NO: 19414 - DNA, 20 bp, synthetic construct
  source 1..20: mol_type = other DNA
ccctggggtgggatctgagc

SEQ ID NO: 19415 - DNA, 20 bp, synthetic construct
  source 1..20: mol_type = other DNA
tggaatcctgaagtgcctgc

SEQ ID NO: 19416 - DNA, 20 bp, synthetic construct
  source 1..20: mol_type = other DNA
tggcatggttttgctgaatt

SEQ ID NO: 19417 - DNA, 20 bp, synthetic construct
  source 1..20: mol_type = other DNA
cacaccataggatgtgagca

SEQ ID NO: 19418 - DNA, 20 bp, synthetic construct
  source 1..20: mol_type = other DNA
tgacataatatgataatgtg

SEQ ID NO: 19419 - DNA, 20 bp, synthetic construct
  source 1..20: mol_type = other DNA
cttaaaagtaaattcagact

SEQ ID NO: 19420 - DNA, 20 bp, synthetic construct
  source 1..20: mol_type = other DNA
caccatgcctggctaatttt

SEQ ID NO: 19421 - DNA, 20 bp, synthetic construct
  source 1..20: mol_type = other DNA
tgaggtgttcttagaagggt

SEQ ID NO: 19422 - DNA, 20 bp, synthetic construct
  source 1..20: mol_type = other DNA
cagattcggctaggaaaaga

SEQ ID NO: 19423 - DNA, 20 bp, synthetic construct
  source 1..20: mol_type = other DNA
gattaattttttgattttcc

SEQ ID NO: 19424 - DNA, 20 bp, synthetic construct
  source 1..20: mol_type = other DNA
tagtcatcctaagtatacca

SEQ ID NO: 19425 - DNA, 20 bp, synthetic construct
  source 1..20: mol_type = other DNA
tgattcagagctgtcattct

SEQ ID NO: 19426 - DNA, 20 bp, synthetic construct
  source 1..20: mol_type = other DNA
ttctgtaattttaaaacatt

SEQ ID NO: 19427 - DNA, 20 bp, synthetic construct
  source 1..20: mol_type = other DNA
gtgagaaagggcctcaccca

SEQ ID NO: 19428 - DNA, 20 bp, synthetic construct
  source 1..20: mol_type = other DNA
tgctgttgtcagtattactc

SEQ ID NO: 19429 - DNA, 20 bp, synthetic construct
  source 1..20: mol_type = other DNA
tgcacattcctgaaccagcc

SEQ ID NO: 19430 - DNA, 20 bp, synthetic construct
  source 1..20: mol_type = other DNA
actagttagagtctacattt

SEQ ID NO: 19431 - DNA, 20 bp, synthetic construct
  source 1..20: mol_type = other DNA
gctcgcgcgccctcccgccg

SEQ ID NO: 19432 - DNA, 20 bp, synthetic construct
  source 1..20: mol_type = other DNA
tcctctgggcaccgtccctg

SEQ ID NO: 19433 - DNA, 20 bp, synthetic construct
  source 1..20: mol_type = other DNA
ggcagcggcggcttcggctc

SEQ ID NO: 19434 - DNA, 20 bp, synthetic construct
  source 1..20: mol_type = other DNA
gtcattaggctcctggactg

SEQ ID NO: 19435 - DNA, 20 bp, synthetic construct
  source 1..20: mol_type = other DNA
gataggccaaccttcgaaga

SEQ ID NO: 19436 - DNA, 20 bp, synthetic construct
  source 1..20: mol_type = other DNA
tctccagcttcccgagtacc

SEQ ID NO: 19437 - DNA, 20 bp, synthetic construct
  source 1..20: mol_type = other DNA
tcttctcataggtgtccagc

SEQ ID NO: 19438 - DNA, 20 bp, synthetic construct
  source 1..20: mol_type = other DNA
ccaccacatctacggactgc

SEQ ID NO: 19439 - DNA, 20 bp, synthetic construct
  source 1..20: mol_type = other DNA
cgagcctgctgtcattgaga

SEQ ID NO: 19440 - DNA, 20 bp, synthetic construct
  source 1..20: mol_type = other DNA
atcacctgaggccaggaatt

SEQ ID NO: 19441 - DNA, 20 bp, synthetic construct
  source 1..20: mol_type = other DNA
ccgtggctccggatctcttc

SEQ ID NO: 19442 - DNA, 20 bp, synthetic construct
  source 1..20: mol_type = other DNA
tcgggctgaaggcagtgatg

SEQ ID NO: 19443 - DNA, 20 bp, synthetic construct
  source 1..20: mol_type = other DNA
ccagacagctcgtcaggccc

SEQ ID NO: 19444 - DNA, 20 bp, synthetic construct
  source 1..20: mol_type = other DNA
agggaagaagatcaacgcct

SEQ ID NO: 19445 - DNA, 20 bp, synthetic construct
  source 1..20: mol_type = other DNA
tgtgtgtactctgtccagtt

SEQ ID NO: 19446 - DNA, 20 bp, synthetic construct
  source 1..20: mol_type = other DNA
cagctgtcctgcagcaaaca

SEQ ID NO: 19447 - DNA, 20 bp, synthetic construct
  source 1..20: mol_type = other DNA
gggcgtctgggatgcagtgg

SEQ ID NO: 19448 - DNA, 20 bp, synthetic construct
  source 1..20: mol_type = other DNA
catggctgacacattcctgg

SEQ ID NO: 19449 - DNA, 20 bp, synthetic construct
  source 1..20: mol_type = other DNA
aactcatgagtaccatgcgg

SEQ ID NO: 19450 - DNA, 20 bp, synthetic construct
  source 1..20: mol_type = other DNA
cgtggacctccgggtgaact

SEQ ID NO: 19451 - DNA, 20 bp, synthetic construct
  source 1..20: mol_type = other DNA
aagagttaggggccttaggg

SEQ ID NO: 19452 - DNA, 20 bp, synthetic construct
  source 1..20: mol_type = other DNA
agcgctctcactcgcacaag

SEQ ID NO: 19453 - DNA, 20 bp, synthetic construct
  source 1..20: mol_type = other DNA
tcaggcagattgtgtctgga

SEQ ID NO: 19454 - DNA, 20 bp, synthetic construct
  source 1..20: mol_type = other DNA
caagggttcttcggggatgt

SEQ ID NO: 19455 - DNA, 20 bp, synthetic construct
  source 1..20: mol_type = other DNA
acatgagcctccttccagac

SEQ ID NO: 19456 - DNA, 20 bp, synthetic construct
  source 1..20: mol_type = other DNA
ggatatctacaactttcagg

SEQ ID NO: 19457 - DNA, 20 bp, synthetic construct
  source 1..20: mol_type = other DNA
aagaatgatctagagtatgt

SEQ ID NO: 19458 - DNA, 20 bp, synthetic construct
  source 1..20: mol_type = other DNA
gggggaccgcggcccaggct

SEQ ID NO: 19459 - DNA, 20 bp, synthetic construct
  source 1..20: mol_type = other DNA
ctccccactcgaggccggcg

SEQ ID NO: 19460 - DNA, 20 bp, synthetic construct
  source 1..20: mol_type = other DNA
ggacacgctttcaccagctt

SEQ ID NO: 19461 - DNA, 20 bp, synthetic construct
  source 1..20: mol_type = other DNA
tatggagacactgtgtatgg

SEQ ID NO: 19462 - DNA, 20 bp, synthetic construct
  source 1..20: mol_type = other DNA
tgattttgccatgaagttca

SEQ ID NO: 19463 - DNA, 20 bp, synthetic construct
  source 1..20: mol_type = other DNA
catgctgctttttaatcata

SEQ ID NO: 19464 - DNA, 20 bp, synthetic construct
  source 1..20: mol_type = other DNA
aaaattagccgggtgtggtg

SEQ ID NO: 19465 - DNA, 20 bp, synthetic construct
  source 1..20: mol_type = other DNA
gttatgttgcttttaaagat

SEQ ID NO: 19466 - DNA, 20 bp, synthetic construct
  source 1..20: mol_type = other DNA
tactctgcaggctgaggtgg

SEQ ID NO: 19467 - DNA, 20 bp, synthetic construct
  source 1..20: mol_type = other DNA
gtcaacaagatccaggggct

SEQ ID NO: 19468 - DNA, 20 bp, synthetic construct
  source 1..20: mol_type = other DNA
ctgaaagtcactcgacattg

SEQ ID NO: 19469 - DNA, 20 bp, synthetic construct
  source 1..20: mol_type = other DNA
cagttacagcggcaggagcg

SEQ ID NO: 19470 - DNA, 20 bp, synthetic construct
  source 1..20: mol_type = other DNA
gttgtctggaggttccaggg

SEQ ID NO: 19471 - DNA, 20 bp, synthetic construct
  source 1..20: mol_type = other DNA
ggccaccttcaacagctggt

SEQ ID NO: 19472 - DNA, 20 bp, synthetic construct
  source 1..20: mol_type = other DNA
ccaccacctgaaggctcatg

SEQ ID NO: 19473 - DNA, 20 bp, synthetic construct
  source 1..20: mol_type = other DNA
aaatacactgcgtacacgtg

SEQ ID NO: 19474 - DNA, 20 bp, synthetic construct
  source 1..20: mol_type = other DNA
tagataagagtagcttggag

SEQ ID NO: 19475 - DNA, 20 bp, synthetic construct
  source 1..20: mol_type = other DNA
atttcacaagtgcctttctg

SEQ ID NO: 19476 - DNA, 20 bp, synthetic construct
  source 1..20: mol_type = other DNA
tcactgctgccagtgcacgt

SEQ ID NO: 19477 - DNA, 20 bp, synthetic construct
  source 1..20: mol_type = other DNA
caagaagacggagtcggatg

SEQ ID NO: 19478 - DNA, 20 bp, synthetic construct
  source 1..20: mol_type = other DNA
tagagcttggacagtctgag

SEQ ID NO: 19479 - DNA, 20 bp, synthetic construct
  source 1..20: mol_type = other DNA
ggaatggtggtgttcttagg

SEQ ID NO: 19480 - DNA, 20 bp, synthetic construct
  source 1..20: mol_type = other DNA
ttcatagcctgggctgggtg

SEQ ID NO: 19481 - DNA, 20 bp, synthetic construct
  source 1..20: mol_type = other DNA
aggaccaccgcctccaggga

SEQ ID NO: 19482 - DNA, 20 bp, synthetic construct
  source 1..20: mol_type = other DNA
tgacagagttagattccacc

SEQ ID NO: 19483 - DNA, 20 bp, synthetic construct
  source 1..20: mol_type = other DNA
ccaggagtgtcggagcacat

SEQ ID NO: 19484 - DNA, 20 bp, synthetic construct
  source 1..20: mol_type = other DNA
gcagacaaggcacccttctg

SEQ ID NO: 19485 - DNA, 20 bp, synthetic construct
  source 1..20: mol_type = other DNA
agcaagcccaatgcacccag

SEQ ID NO: 19486 - DNA, 20 bp, synthetic construct
  source 1..20: mol_type = other DNA
tggatgccatggctctgggc

SEQ ID NO: 19487 - DNA, 20 bp, synthetic construct
  source 1..20: mol_type = other DNA
gccatctcaccaaaggatta

SEQ ID NO: 19488 - DNA, 20 bp, synthetic construct
  source 1..20: mol_type = other DNA
tggaaattactgccctcctg

SEQ ID NO: 19489 - DNA, 20 bp, synthetic construct
  source 1..20: mol_type = other DNA
cgtgcttcgcccggcagtgt

SEQ ID NO: 19490 - DNA, 20 bp, synthetic construct
  source 1..20: mol_type = other DNA
acaccccagcgcagacacgc

SEQ ID NO: 19491 - DNA, 20 bp, synthetic construct
  source 1..20: mol_type = other DNA
acagatgcagtgcaagctgt

SEQ ID NO: 19492 - DNA, 20 bp, synthetic construct
  source 1..20: mol_type = other DNA
ggcccagatgcagatcgaca

SEQ ID NO: 19493 - DNA, 20 bp, synthetic construct
  source 1..20: mol_type = other DNA
ctcatcatattgatgagcga

SEQ ID NO: 19494 - DNA, 20 bp, synthetic construct
  source 1..20: mol_type = other DNA
acacccttcccaccctgctg

SEQ ID NO: 19495 - DNA, 20 bp, synthetic construct
  source 1..20: mol_type = other DNA
gcacactggagtggacgcct

SEQ ID NO: 19496 - DNA, 20 bp, synthetic construct
  source 1..20: mol_type = other DNA
ctgtgccgtccacacctcta

SEQ ID NO: 19497 - DNA, 20 bp, synthetic construct
  source 1..20: mol_type = other DNA
gctttaagccttagccagct

SEQ ID NO: 19498 - DNA, 20 bp, synthetic construct
  source 1..20: mol_type = other DNA
ccggcctcacccccacgagc

SEQ ID NO: 19499 - DNA, 20 bp, synthetic construct
  source 1..20: mol_type = other DNA
ccaagttcctatagaagagc

SEQ ID NO: 19500 - DNA, 20 bp, synthetic construct
  source 1..20: mol_type = other DNA
gaaccgaaactctggcagct

SEQ ID NO: 19501 - DNA, 20 bp, synthetic construct
  source 1..20: mol_type = other DNA
tggggaaggaacgctgtcag

SEQ ID NO: 19502 - DNA, 20 bp, synthetic construct
  source 1..20: mol_type = other DNA
tgagcccatgctgatggagt

SEQ ID NO: 19503 - DNA, 20 bp, synthetic construct
  source 1..20: mol_type = other DNA
cagaagcaggctggaggtaa

SEQ ID NO: 19504 - DNA, 20 bp, synthetic construct
  source 1..20: mol_type = other DNA
ggccaacaaaaaagacctgc

SEQ ID NO: 19505 - DNA, 20 bp, synthetic construct
  source 1..20: mol_type = other DNA
cagagtgtgtggctgtgtgt

SEQ ID NO: 19506 - DNA, 20 bp, synthetic construct
  source 1..20: mol_type = other DNA
gagcaagaggtgtcggaggt

SEQ ID NO: 19507 - DNA, 20 bp, synthetic construct
  source 1..20: mol_type = other DNA
gaagatgtcctcttagtgct

SEQ ID NO: 19508 - DNA, 20 bp, synthetic construct
  source 1..20: mol_type = other DNA
aaactatgtgcagaatctaa

SEQ ID NO: 19509 - DNA, 20 bp, synthetic construct
  source 1..20: mol_type = other DNA
tgtccagtttgtattaaaaa

SEQ ID NO: 19510 - DNA, 20 bp, synthetic construct
  source 1..20: mol_type = other DNA
gtctttgggccctccagttt

SEQ ID NO: 19511 - DNA, 20 bp, synthetic construct
  source 1..20: mol_type = other DNA
gacccaggtcttcaagctgg

SEQ ID NO: 19512 - DNA, 20 bp, synthetic construct
  source 1..20: mol_type = other DNA
tgtagacagtggctgccttc

SEQ ID NO: 19513 - DNA, 20 bp, synthetic construct
  source 1..20: mol_type = other DNA
taatggatttctgttgtgtt

SEQ ID NO: 19514 - DNA, 20 bp, synthetic construct
  source 1..20: mol_type = other DNA
tgttacgggagataattgtg

SEQ ID NO: 19515 - DNA, 20 bp, synthetic construct
  source 1..20: mol_type = other DNA
atacaaggcagatccaacca

SEQ ID NO: 19516 - DNA, 20 bp, synthetic construct
  source 1..20: mol_type = other DNA
tgacagcgttcagcgacccg

SEQ ID NO: 19517 - DNA, 20 bp, synthetic construct
  source 1..20: mol_type = other DNA
accccggctcgtcgcaagcg

SEQ ID NO: 19518 - DNA, 20 bp, synthetic construct
  source 1..20: mol_type = other DNA
accccagcctcccgaaccag

SEQ ID NO: 19519 - DNA, 20 bp, synthetic construct
  source 1..20: mol_type = other DNA
gtgatcgcttggttatccag

SEQ ID NO: 19520 - DNA, 20 bp, synthetic construct
  source 1..20: mol_type = other DNA
acttcctccttaaaacagag

SEQ ID NO: 19521 - DNA, 20 bp, synthetic construct
  source 1..20: mol_type = other DNA
ctcaacaacatctttgtgtt

SEQ ID NO: 19522 - DNA, 20 bp, synthetic construct
  source 1..20: mol_type = other DNA
cccactttctccctcctcct

SEQ ID NO: 19523 - DNA, 20 bp, synthetic construct
  source 1..20: mol_type = other DNA
gccaaccatattggatctgc

SEQ ID NO: 19524 - DNA, 20 bp, synthetic construct
  source 1..20: mol_type = other DNA
tgtttaccgtagcgtataca

SEQ ID NO: 19525 - DNA, 20 bp, synthetic construct
  source 1..20: mol_type = other DNA
tataaaatattgttaatgcc

SEQ ID NO: 19526 - DNA, 20 bp, synthetic construct
  source 1..20: mol_type = other DNA
gagagaatatcccagaaccc

SEQ ID NO: 19527 - DNA, 20 bp, synthetic construct
  source 1..20: mol_type = other DNA
ccagatggcactctggtcac

SEQ ID NO: 19528 - DNA, 20 bp, synthetic construct
  source 1..20: mol_type = other DNA
taataggatttttagacact

SEQ ID NO: 19529 - DNA, 20 bp, synthetic construct
  source 1..20: mol_type = other DNA
gtcaatttgcctctgtgtgc

SEQ ID NO: 19530 - DNA, 20 bp, synthetic construct
  source 1..20: mol_type = other DNA
aacgtacctcttaaaattcg

SEQ ID NO: 19531 - DNA, 20 bp, synthetic construct
  source 1..20: mol_type = other DNA
ctggagaaaaatgaaggaaa

SEQ ID NO: 19532 - DNA, 20 bp, synthetic construct
  source 1..20: mol_type = other DNA
ggtatctttttattcattgc

SEQ ID NO: 19533 - DNA, 20 bp, synthetic construct
  source 1..20: mol_type = other DNA
ccagttcttcccccttcaca

SEQ ID NO: 19534 - DNA, 20 bp, synthetic construct
  source 1..20: mol_type = other DNA
tcgggtgggccgcctcccct

SEQ ID NO: 19535 - DNA, 20 bp, synthetic construct
  source 1..20: mol_type = other DNA
tgtcaaaagaaacacttgga

SEQ ID NO: 19536 - DNA, 20 bp, synthetic construct
  source 1..20: mol_type = other DNA
tactcaaggagctccaagaa

SEQ ID NO: 19537 - DNA, 20 bp, synthetic construct
  source 1..20: mol_type = other DNA
tgccaggcaactcagcaagc

SEQ ID NO: 19538 - DNA, 20 bp, synthetic construct
  source 1..20: mol_type = other DNA
gagaccttttgtcatcccat

SEQ ID NO: 19539 - DNA, 20 bp, synthetic construct
  source 1..20: mol_type = other DNA
cccacctccacctcagcatt

SEQ ID NO: 19540 - DNA, 20 bp, synthetic construct
  source 1..20: mol_type = other DNA
agaagagtggaaacatcttg

SEQ ID NO: 19541 - DNA, 20 bp, synthetic construct
  source 1..20: mol_type = other DNA
cagcagccactctaggcagc

SEQ ID NO: 19542 - DNA, 20 bp, synthetic construct
  source 1..20: mol_type = other DNA
aattatcctatttcagtact

SEQ ID NO: 19543 - DNA, 20 bp, synthetic construct
  source 1..20: mol_type = other DNA
cggaattttgaaaagcacca

SEQ ID NO: 19544 - DNA, 20 bp, synthetic construct
  source 1..20: mol_type = other DNA
tctgcatagaggcaatccta

SEQ ID NO: 19545 - DNA, 20 bp, synthetic construct
  source 1..20: mol_type = other DNA
gtgaaaacaaatacaaaaaa

SEQ ID NO: 19546 - DNA, 20 bp, synthetic construct
  source 1..20: mol_type = other DNA
tgtgagaatataatttgtag

SEQ ID NO: 19547 - DNA, 20 bp, synthetic construct
  source 1..20: mol_type = other DNA
ctgttgaaatgcagatttga

SEQ ID NO: 19548 - DNA, 20 bp, synthetic construct
  source 1..20: mol_type = other DNA
cgtccccggtgtgccatggt

SEQ ID NO: 19549 - DNA, 20 bp, synthetic construct
  source 1..20: mol_type = other DNA
agctcattcataaggggatg

SEQ ID NO: 19550 - DNA, 20 bp, synthetic construct
  source 1..20: mol_type = other DNA
tctagtttccttcttgtgcc

SEQ ID NO: 19551 - DNA, 20 bp, synthetic construct
  source 1..20: mol_type = other DNA
cacttttcctccctctcccg

SEQ ID NO: 19552 - DNA, 20 bp, synthetic construct
  source 1..20: mol_type = other DNA
tttggcaatgacatttcacc

SEQ ID NO: 19553 - DNA, 20 bp, synthetic construct
  source 1..20: mol_type = other DNA
cgtgagctcctccactgcgc

SEQ ID NO: 19554 - DNA, 20 bp, synthetic construct
  source 1..20: mol_type = other DNA
ggctttgacagagagccttt

SEQ ID NO: 19555 - DNA, 20 bp, synthetic construct
  source 1..20: mol_type = other DNA
gccaagatggagcgcacggt

SEQ ID NO: 19556 - DNA, 20 bp, synthetic construct
  source 1..20: mol_type = other DNA
aaagactgggagaagcacca

SEQ ID NO: 19557 - DNA, 20 bp, synthetic construct
  source 1..20: mol_type = other DNA
cttctccaaatacatataca

SEQ ID NO: 19558 - DNA, 20 bp, synthetic construct
  source 1..20: mol_type = other DNA
gaaagcacataaccaggctc

SEQ ID NO: 19559 - DNA, 20 bp, synthetic construct
  source 1..20: mol_type = other DNA
acccacacgtctttatctct

SEQ ID NO: 19560 - DNA, 20 bp, synthetic construct
  source 1..20: mol_type = other DNA
ttcctcttcctccttcccct

SEQ ID NO: 19561 - DNA, 20 bp, synthetic construct
  source 1..20: mol_type = other DNA
attggatagaattgaatggt

SEQ ID NO: 19562 - DNA, 20 bp, synthetic construct
  source 1..20: mol_type = other DNA
ccatcctccatggtgctgaa

SEQ ID NO: 19563 - DNA, 20 bp, synthetic construct
  source 1..20: mol_type = other DNA
ggaggagaattactaccttc

SEQ ID NO: 19564 - DNA, 20 bp, synthetic construct
  source 1..20: mol_type = other DNA
gtcaggttgcttggctgcct

SEQ ID NO: 19565 - DNA, 20 bp, synthetic construct
  source 1..20: mol_type = other DNA
tatctcctctgacacatatt

SEQ ID NO: 19566 - DNA, 20 bp, synthetic construct
  source 1..20: mol_type = other DNA
actctaaaagtcaaatcttc

SEQ ID NO: 19567 - DNA, 20 bp, synthetic construct
  source 1..20: mol_type = other DNA
aagcacaggaccccaggaac

SEQ ID NO: 19568 - DNA, 20 bp, synthetic construct
  source 1..20: mol_type = other DNA
ctcatttcatttgcccagcc

SEQ ID NO: 19569 - DNA, 20 bp, synthetic construct
  source 1..20: mol_type = other DNA
ttgtgattccaaagaatccc

SEQ ID NO: 19570 - DNA, 20 bp, synthetic construct
  source 1..20: mol_type = other DNA
gcttcctcaagcaaggccat

SEQ ID NO: 19571 - DNA, 20 bp, synthetic construct
  source 1..20: mol_type = other DNA
tgctttcatcctgtggcctc

SEQ ID NO: 19572 - DNA, 20 bp, synthetic construct
  source 1..20: mol_type = other DNA
tgaatgccttccacgtgatg

SEQ ID NO: 19573 - DNA, 20 bp, synthetic construct
  source 1..20: mol_type = other DNA
cagcgcctgtccattgcttc

SEQ ID NO: 19574 - DNA, 20 bp, synthetic construct
  source 1..20: mol_type = other DNA
atgacttctggcggctggtt

SEQ ID NO: 19575 - DNA, 20 bp, synthetic construct
  source 1..20: mol_type = other DNA
gggggcgtaaaccaggaaag

SEQ ID NO: 19576 - DNA, 20 bp, synthetic construct
  source 1..20: mol_type = other DNA
gtgcctctgtggtgttgcag

SEQ ID NO: 19577 - DNA, 20 bp, synthetic construct
  source 1..20: mol_type = other DNA
tccgcttcctggagaaactc

SEQ ID NO: 19578 - DNA, 20 bp, synthetic construct
  source 1..20: mol_type = other DNA
cacactcagactcaatggac

SEQ ID NO: 19579 - DNA, 20 bp, synthetic construct
  source 1..20: mol_type = other DNA
gccttgaccacatcactcca

SEQ ID NO: 19580 - DNA, 20 bp, synthetic construct
  source 1..20: mol_type = other DNA
cggaaggccaagaaggcgct

SEQ ID NO: 19581 - DNA, 20 bp, synthetic construct
  source 1..20: mol_type = other DNA
cattcttgtgagccaaacct

SEQ ID NO: 19582 - DNA, 20 bp, synthetic construct
  source 1..20: mol_type = other DNA
caagaagaagctccaaagca

SEQ ID NO: 19583 - DNA, 20 bp, synthetic construct
  source 1..20: mol_type = other DNA
cgcctgcagctggcattggt

SEQ ID NO: 19584 - DNA, 20 bp, synthetic construct
  source 1..20: mol_type = other DNA
ctcaacaactttttgcaggg

SEQ ID NO: 19585 - DNA, 20 bp, synthetic construct
  source 1..20: mol_type = other DNA
cccaaagcttccactcgctg

SEQ ID NO: 19586 - DNA, 20 bp, synthetic construct
  source 1..20: mol_type = other DNA
atcgtctttggtgtggcgct

SEQ ID NO: 19587 - DNA, 20 bp, synthetic construct
  source 1..20: mol_type = other DNA
ttactctttgcccgccttgg

SEQ ID NO: 19588 - DNA, 20 bp, synthetic construct
  source 1..20: mol_type = other DNA
aatgtagaaggtgacgctct

SEQ ID NO: 19589 - DNA, 20 bp, synthetic construct
  source 1..20: mol_type = other DNA
ctccaggacaggagatctgg

SEQ ID NO: 19590 - DNA, 20 bp, synthetic construct
  source 1..20: mol_type = other DNA
tacgtcccaccctgtcccca

SEQ ID NO: 19591 - DNA, 20 bp, synthetic construct
  source 1..20: mol_type = other DNA
tcccggacaccagaccaccg

SEQ ID NO: 19592 - DNA, 20 bp, synthetic construct
  source 1..20: mol_type = other DNA
gcgtccgggatctgcgccac

SEQ ID NO: 19593 - DNA, 20 bp, synthetic construct
  source 1..20: mol_type = other DNA
cggttcccgggaccaggtgc

SEQ ID NO: 19594 - DNA, 20 bp, synthetic construct
  source 1..20: mol_type = other DNA
gcgtctgctgcggatgatca

SEQ ID NO: 19595 - DNA, 20 bp, synthetic construct
  source 1..20: mol_type = other DNA
ggacggtgccgcgctcttcc

SEQ ID NO: 19596 - DNA, 20 bp, synthetic construct
  source 1..20: mol_type = other DNA
agtcaacctcccggtcgacc

SEQ ID NO: 19597 - DNA, 20 bp, synthetic construct
  source 1..20: mol_type = other DNA
gaggaatggataaatggatg

SEQ ID NO: 19598 - DNA, 20 bp, synthetic construct
  source 1..20: mol_type = other DNA
gatgtgtgtgtgcacgtgtg

SEQ ID NO: 19599 - DNA, 20 bp, synthetic construct
  source 1..20: mol_type = other DNA
gggcaacctggcgggtctga

SEQ ID NO: 19600 - DNA, 20 bp, synthetic construct
  source 1..20: mol_type = other DNA
ggctaaaaaaaagagcatcc

SEQ ID NO: 19601 - DNA, 20 bp, synthetic construct
  source 1..20: mol_type = other DNA
tgagattggcctggatgcag

SEQ ID NO: 19602 - DNA, 20 bp, synthetic construct
  source 1..20: mol_type = other DNA
ttcccaggccctttggcttc

SEQ ID NO: 19603 - DNA, 20 bp, synthetic construct
  source 1..20: mol_type = other DNA
cttgcggcgcgaaaaaggcg

SEQ ID NO: 19604 - DNA, 20 bp, synthetic construct
  source 1..20: mol_type = other DNA
ccccttgcccacacacccca

SEQ ID NO: 19605 - DNA, 20 bp, synthetic construct
  source 1..20: mol_type = other DNA
ttacccaggctggtcttcaa

SEQ ID NO: 19606 - DNA, 20 bp, synthetic construct
  source 1..20: mol_type = other DNA
ctaagttcacgggcctgtcc

SEQ ID NO: 19607 - DNA, 20 bp, synthetic construct
  source 1..20: mol_type = other DNA
agtggtggcacacgggcgcc

SEQ ID NO: 19608 - DNA, 20 bp, synthetic construct
  source 1..20: mol_type = other DNA
ccccgcagccaacgggccgc

SEQ ID NO: 19609 - DNA, 20 bp, synthetic construct
  source 1..20: mol_type = other DNA
accctgtggagatcctgcag

SEQ ID NO: 19610 - DNA, 20 bp, synthetic construct
  source 1..20: mol_type = other DNA
gcattctccagcatgccaag

SEQ ID NO: 19611 - DNA, 20 bp, synthetic construct
  source 1..20: mol_type = other DNA
aggggtaccgcaagctcatc

SEQ ID NO: 19612 - DNA, 20 bp, synthetic construct
  source 1..20: mol_type = other DNA
tgtacaacaacaacctgaac

SEQ ID NO: 19613 - DNA, 20 bp, synthetic construct
  source 1..20: mol_type = other DNA
agggcggccggcggcggccg

SEQ ID NO: 19614 - DNA, 20 bp, synthetic construct
  source 1..20: mol_type = other DNA
agaattccgaattggggaac

SEQ ID NO: 19615 - DNA, 20 bp, synthetic construct
  source 1..20: mol_type = other DNA
ggggaggcgccgggaagtcg

SEQ ID NO: 19616 - DNA, 20 bp, synthetic construct
  source 1..20: mol_type = other DNA
agaagctgattcccccgcag

SEQ ID NO: 19617 - DNA, 20 bp, synthetic construct
  source 1..20: mol_type = other DNA
ggctggtgtccctgtacaac

SEQ ID NO: 19618 - DNA, 20 bp, synthetic construct
  source 1..20: mol_type = other DNA
ttgacaagtgggccccctcc

SEQ ID NO: 19619 - DNA, 20 bp, synthetic construct
  source 1..20: mol_type = other DNA
acatcgaggagtccttttcc

SEQ ID NO: 19620 - DNA, 20 bp, synthetic construct
  source 1..20: mol_type = other DNA
aggagccacctctaaaggag

SEQ ID NO: 19621 - DNA, 20 bp, synthetic construct
  source 1..20: mol_type = other DNA
aacaagaggaggaccgctca

SEQ ID NO: 19622 - DNA, 20 bp, synthetic construct
  source 1..20: mol_type = other DNA
ttggagtcactgtagttaag

SEQ ID NO: 19623 - DNA, 20 bp, synthetic construct
  source 1..20: mol_type = other DNA
cggcggcccatgaacgcctt

SEQ ID NO: 19624 - DNA, 20 bp, synthetic construct
  source 1..20: mol_type = other DNA
cagcacatgcaggactaccc

SEQ ID NO: 19625 - DNA, 20 bp, synthetic construct
  source 1..20: mol_type = other DNA
ttctcctccccctgccagga

SEQ ID NO: 19626 - DNA, 20 bp, synthetic construct
  source 1..20: mol_type = other DNA
ccacgttccagcccctgcag

SEQ ID NO: 19627 - DNA, 20 bp, synthetic construct
  source 1..20: mol_type = other DNA
tctgtagattcaaaaggtgc

SEQ ID NO: 19628 - DNA, 20 bp, synthetic construct
  source 1..20: mol_type = other DNA
ttcctcaccagccaggtcct

SEQ ID NO: 19629 - DNA, 20 bp, synthetic construct
  source 1..20: mol_type = other DNA
ctctggcagatgagcgtgaa

SEQ ID NO: 19630 - DNA, 20 bp, synthetic construct
  source 1..20: mol_type = other DNA
attttgacaaactaaagaaa

SEQ ID NO: 19631 - DNA, 20 bp, synthetic construct
  source 1..20: mol_type = other DNA
cctgggaaagactggaaaaa

SEQ ID NO: 19632 - DNA, 20 bp, synthetic construct
  source 1..20: mol_type = other DNA
accttcctgcagttgaggcc

SEQ ID NO: 19633 - DNA, 20 bp, synthetic construct
  source 1..20: mol_type = other DNA
aatacctactggaactgctc

SEQ ID NO: 19634 - DNA, 20 bp, synthetic construct
  source 1..20: mol_type = other DNA
cggctgagcgcagggcccgt

SEQ ID NO: 19635 - DNA, 20 bp, synthetic construct
  source 1..20: mol_type = other DNA
acgagatgagcggccgcagt

SEQ ID NO: 19636 - DNA, 20 bp, synthetic construct
  source 1..20: mol_type = other DNA
cctccctgctgcaccagttc

SEQ ID NO: 19637 - DNA, 20 bp, synthetic construct
  source 1..20: mol_type = other DNA
acacgctgcacgaacaagcc

SEQ ID NO: 19638 - DNA, 20 bp, synthetic construct
  source 1..20: mol_type = other DNA
atgcctgtgagctctggatc

SEQ ID NO: 19639 - DNA, 20 bp, synthetic construct
  source 1..20: mol_type = other DNA
acagcggccacccaagtgag

SEQ ID NO: 19640 - DNA, 20 bp, synthetic construct
  source 1..20: mol_type = other DNA
ccaaggtcatcgagtccacc

SEQ ID NO: 19641 - DNA, 20 bp, synthetic construct
  source 1..20: mol_type = other DNA
tcctgtctcggctggccgag

SEQ ID NO: 19642 - DNA, 20 bp, synthetic construct
  source 1..20: mol_type = other DNA
caaacaccctgaccgaggct

SEQ ID NO: 19643 - DNA, 20 bp, synthetic construct
  source 1..20: mol_type = other DNA
ctggatggaacgagctccac

SEQ ID NO: 19644 - DNA, 20 bp, synthetic construct
  source 1..20: mol_type = other DNA
tccaaagccaagcccaggcc

SEQ ID NO: 19645 - DNA, 20 bp, synthetic construct
  source 1..20: mol_type = other DNA
gcagcagcctcagcgctgag

SEQ ID NO: 19646 - DNA, 20 bp, synthetic construct
  source 1..20: mol_type = other DNA
tgcggcagtccaaagtggat

SEQ ID NO: 19647 - DNA, 20 bp, synthetic construct
  source 1..20: mol_type = other DNA
actatgagcatgtcacgatg

SEQ ID NO: 19648 - DNA, 20 bp, synthetic construct
  source 1..20: mol_type = other DNA
tgcacactacatttgagcat

SEQ ID NO: 19649 - DNA, 20 bp, synthetic construct
  source 1..20: mol_type = other DNA
tccatcagttctcaagagac

SEQ ID NO: 19650 - DNA, 20 bp, synthetic construct
  source 1..20: mol_type = other DNA
aacagggatctccacggatg

SEQ ID NO: 19651 - DNA, 20 bp, synthetic construct
  source 1..20: mol_type = other DNA
ctacagaccaaaccatttgt

SEQ ID NO: 19652 - DNA, 20 bp, synthetic construct
  source 1..20: mol_type = other DNA
gagacctcaccatcctctcc

SEQ ID NO: 19653 - DNA, 20 bp, synthetic construct
  source 1..20: mol_type = other DNA
tggcaataagttcataccag

SEQ ID NO: 19654 - DNA, 20 bp, synthetic construct
  source 1..20: mol_type = other DNA
ttgttgccataatgctgtgc

SEQ ID NO: 19655 - DNA, 20 bp, synthetic construct
  source 1..20: mol_type = other DNA
gttgggatgcatcttctgat

SEQ ID NO: 19656 - DNA, 20 bp, synthetic construct
  source 1..20: mol_type = other DNA
cgtggcatgcttaggattgg

SEQ ID NO: 19657 - DNA, 20 bp, synthetic construct
  source 1..20: mol_type = other DNA
actctcttgcagccaacttc

SEQ ID NO: 19658 - DNA, 20 bp, synthetic construct
  source 1..20: mol_type = other DNA
gaattgcagaggacgtctag

SEQ ID NO: 19659 - DNA, 20 bp, synthetic construct
  source 1..20: mol_type = other DNA
tgccggatcacagacctgta

SEQ ID NO: 19660 - DNA, 20 bp, synthetic construct
  source 1..20: mol_type = other DNA
gaagtgctgctcttcaccat

SEQ ID NO: 19661 - DNA, 20 bp, synthetic construct
  source 1..20: mol_type = other DNA
gaacagctcgcccgcagatt

SEQ ID NO: 19662 - DNA, 20 bp, synthetic construct
  source 1..20: mol_type = other DNA
caggctgtggtagccgtggc

SEQ ID NO: 19663 - DNA, 20 bp, synthetic construct
  source 1..20: mol_type = other DNA
gcaacagacggggaaggtta

SEQ ID NO: 19664 - DNA, 20 bp, synthetic construct
  source 1..20: mol_type = other DNA
tggatacgggagaaggagaa

SEQ ID NO: 19665 - DNA, 20 bp, synthetic construct
  source 1..20: mol_type = other DNA
atcgaggagcggtataagga

SEQ ID NO: 19666 - DNA, 20 bp, synthetic construct
  source 1..20: mol_type = other DNA
ctggttgacaggaagaagga

SEQ ID NO: 19667 - DNA, 20 bp, synthetic construct
  source 1..20: mol_type = other DNA
cggaggctggtgagcgatgg

SEQ ID NO: 19668 - DNA, 20 bp, synthetic construct
  source 1..20: mol_type = other DNA
gctgtggtgaaggagaaact

SEQ ID NO: 19669 - DNA, 20 bp, synthetic construct
  source 1..20: mol_type = other DNA
ttaataaagaaaaatcagac

SEQ ID NO: 19670 - DNA, 20 bp, synthetic construct
  source 1..20: mol_type = other DNA
agacacaggttattccagct

SEQ ID NO: 19671 - DNA, 20 bp, synthetic construct
  source 1..20: mol_type = other DNA
ataggccagagcgtggacga

SEQ ID NO: 19672 - DNA, 20 bp, synthetic construct
  source 1..20: mol_type = other DNA
cccgagccgagcacgaaggt

SEQ ID NO: 19673 - DNA, 20 bp, synthetic construct
  source 1..20: mol_type = other DNA
cttgcacagatgttgcagcc

SEQ ID NO: 19674 - DNA, 20 bp, synthetic construct
  source 1..20: mol_type = other DNA
ttggattaatcttctgattc

SEQ ID NO: 19675 - DNA, 20 bp, synthetic construct
  source 1..20: mol_type = other DNA
aagagaagcaacgtgggggg

SEQ ID NO: 19676 - DNA, 20 bp, synthetic construct
  source 1..20: mol_type = other DNA
aacagcgggctggggcagcc

SEQ ID NO: 19677 - DNA, 20 bp, synthetic construct
  source 1..20: mol_type = other DNA
cagagctacagacctatggg

SEQ ID NO: 19678 - DNA, 20 bp, synthetic construct
  source 1..20: mol_type = other DNA
tttccccaacacctgcggca

SEQ ID NO: 19679 - DNA, 20 bp, synthetic construct
  source 1..20: mol_type = other DNA
cacatcagcacccttgagag

SEQ ID NO: 19680 - DNA, 20 bp, synthetic construct
  source 1..20: mol_type = other DNA
ctagtgctgaagaggatcca

SEQ ID NO: 19681 - DNA, 20 bp, synthetic construct
  source 1..20: mol_type = other DNA
cgggcatcgctgactggccg

SEQ ID NO: 19682 - DNA, 20 bp, synthetic construct
  source 1..20: mol_type = other DNA
cggtgtgagcggaagggcac

SEQ ID NO: 19683 - DNA, 20 bp, synthetic construct
  source 1..20: mol_type = other DNA
aaacagtacgttactagcct

SEQ ID NO: 19684 - DNA, 20 bp, synthetic construct
  source 1..20: mol_type = other DNA
ctgggggaccgaatccggga

SEQ ID NO: 19685 - DNA, 20 bp, synthetic construct
  source 1..20: mol_type = other DNA
ttccaggagcctcacctgca

SEQ ID NO: 19686 - DNA, 20 bp, synthetic construct
  source 1..20: mol_type = other DNA
ccagtgacagcgtttcctca

SEQ ID NO: 19687 - DNA, 20 bp, synthetic construct
  source 1..20: mol_type = other DNA
atctcaatgtcccacatgga

SEQ ID NO: 19688 - DNA, 20 bp, synthetic construct
  source 1..20: mol_type = other DNA
tcaggaggaaaagactaaca

SEQ ID NO: 19689 - DNA, 20 bp, synthetic construct
  source 1..20: mol_type = other DNA
acagagctctctgagggtga

SEQ ID NO: 19690 - DNA, 20 bp, synthetic construct
  source 1..20: mol_type = other DNA
gggccctgcctgctgcatct

SEQ ID NO: 19691 - DNA, 20 bp, synthetic construct
  source 1..20: mol_type = other DNA
gagcttgagcccaagacccg

SEQ ID NO: 19692 - DNA, 20 bp, synthetic construct
  source 1..20: mol_type = other DNA
gccaagcctccgctggtcag

SEQ ID NO: 19693 - DNA, 20 bp, synthetic construct
  source 1..20: mol_type = other DNA
aagatcttcaatgacaacag

SEQ ID NO: 19694 - DNA, 20 bp, synthetic construct
  source 1..20: mol_type = other DNA
caaccacttcctaccccaga

SEQ ID NO: 19695 - DNA, 20 bp, synthetic construct
  source 1..20: mol_type = other DNA
gtcaacgtgttgtcagcctt

SEQ ID NO: 19696 - DNA, 20 bp, synthetic construct
  source 1..20: mol_type = other DNA
acgcacgcacacacacatac

SEQ ID NO: 19697 - DNA, 20 bp, synthetic construct
  source 1..20: mol_type = other DNA
atgcaaaagtacaagggctg

SEQ ID NO: 19698 - DNA, 20 bp, synthetic construct
  source 1..20: mol_type = other DNA
gggctatcccgacccggcgg

SEQ ID NO: 19699 - DNA, 20 bp, synthetic construct
  source 1..20: mol_type = other DNA
cggcgctcggcttcctcctg

SEQ ID NO: 19700 - DNA, 20 bp, synthetic construct
  source 1..20: mol_type = other DNA
aggcagagtcgggggccttg

SEQ ID NO: 19701 - DNA, 20 bp, synthetic construct
  source 1..20: mol_type = other DNA
aggggggatgtcacacgcag

SEQ ID NO: 19702 - DNA, 20 bp, synthetic construct
  source 1..20: mol_type = other DNA
catttctatgtgtaatttct

SEQ ID NO: 19703 - DNA, 20 bp, synthetic construct
  source 1..20: mol_type = other DNA
ctcttctggagtagggggtc

SEQ ID NO: 19704 - DNA, 20 bp, synthetic construct
  source 1..20: mol_type = other DNA
acttgttcctggggaatgcc

SEQ ID NO: 19705 - DNA, 20 bp, synthetic construct
  source 1..20: mol_type = other DNA
gcaagatctggggctgcaga

SEQ ID NO: 19706 - DNA, 20 bp, synthetic construct
  source 1..20: mol_type = other DNA
aaagctaaagcaataacatt

SEQ ID NO: 19707 - DNA, 20 bp, synthetic construct
  source 1..20: mol_type = other DNA
tgacggttgaggacttcaac

SEQ ID NO: 19708 - DNA, 20 bp, synthetic construct
  source 1..20: mol_type = other DNA
gctgtgctgagacagctgtc

SEQ ID NO: 19709 - DNA, 20 bp, synthetic construct
  source 1..20: mol_type = other DNA
cactccaggacttgcagacg

SEQ ID NO: 19710 - DNA, 20 bp, synthetic construct
  source 1..20: mol_type = other DNA
gtctggtgggcagtgtcctc

SEQ ID NO: 19711 - DNA, 20 bp, synthetic construct
  source 1..20: mol_type = other DNA
ccggggacaagaaggagccg

SEQ ID NO: 19712 - DNA, 20 bp, synthetic construct
  source 1..20: mol_type = other DNA
cgtacgggcctagcccggcc

SEQ ID NO: 19713 - DNA, 20 bp, synthetic construct
  source 1..20: mol_type = other DNA
gccagtgcgcatgcgcgagt

SEQ ID NO: 19714 - DNA, 20 bp, synthetic construct
  source 1..20: mol_type = other DNA
cgtgacggtgggggacttcc

SEQ ID NO: 19715 - DNA, 20 bp, synthetic construct
  source 1..20: mol_type = other DNA
gctcagccactgactgcccc

SEQ ID NO: 19716 - DNA, 20 bp, synthetic construct
  source 1..20: mol_type = other DNA
tggtgaccctgggcgtctga

SEQ ID NO: 19717 - DNA, 20 bp, synthetic construct
  source 1..20: mol_type = other DNA
agtgcctgagagacaagtgt

SEQ ID NO: 19718 - DNA, 20 bp, synthetic construct
  source 1..20: mol_type = other DNA
tgccctccacctggcctgct

SEQ ID NO: 19719 - DNA, 20 bp, synthetic construct
  source 1..20: mol_type = other DNA
cgggagctgctggaggagat

SEQ ID NO: 19720 - DNA, 20 bp, synthetic construct
  source 1..20: mol_type = other DNA
acacggggcactgccgagtg

SEQ ID NO: 19721 - DNA, 20 bp, synthetic construct
  source 1..20: mol_type = other DNA
actctgaaccctgaagcatc

SEQ ID NO: 19722 - DNA, 20 bp, synthetic construct
  source 1..20: mol_type = other DNA
accaccactgcctgactgcc

SEQ ID NO: 19723 - DNA, 20 bp, synthetic construct
  source 1..20: mol_type = other DNA
gacacttcagatctgaggtt

SEQ ID NO: 19724 - DNA, 20 bp, synthetic construct
  source 1..20: mol_type = other DNA
tttccttgggccttcaaact

SEQ ID NO: 19725 - DNA, 20 bp, synthetic construct
  source 1..20: mol_type = other DNA
ctgcaggccaggggcctggc

SEQ ID NO: 19726 - DNA, 20 bp, synthetic construct
  source 1..20: mol_type = other DNA
acagtgctttccaggtggat

SEQ ID NO: 19727 - DNA, 20 bp, synthetic construct
  source 1..20: mol_type = other DNA
ggctccctcggccaaaggac

SEQ ID NO: 19728 - DNA, 20 bp, synthetic construct
  source 1..20: mol_type = other DNA
attacaccattattgagaat

SEQ ID NO: 19729 - DNA, 20 bp, synthetic construct
  source 1..20: mol_type = other DNA
gtacgaagatggagaagcac

SEQ ID NO: 19730 - DNA, 20 bp, synthetic construct
  source 1..20: mol_type = other DNA
tgaaggaaccaaatccaatt

SEQ ID NO: 19731 - DNA, 20 bp, synthetic construct
  source 1..20: mol_type = other DNA
aggcttgggggttttcaatg

SEQ ID NO: 19732 - DNA, 20 bp, synthetic construct
  source 1..20: mol_type = other DNA
ctgaaccaagatgtaaaaca

SEQ ID NO: 19733 - DNA, 20 bp, synthetic construct
  source 1..20: mol_type = other DNA
caccaagacagtgctgagat

SEQ ID NO: 19734 - DNA, 20 bp, synthetic construct
  source 1..20: mol_type = other DNA
taaaaaaaaaaaaaaaaaaa

SEQ ID NO: 19735 - DNA, 20 bp, synthetic construct
  source 1..20: mol_type = other DNA
cccactgcccttaaaataag

SEQ ID NO: 19736 - DNA, 20 bp, synthetic construct
  source 1..20: mol_type = other DNA
ttgatgctgaagctgttgtt

SEQ ID NO: 19737 - DNA, 20 bp, synthetic construct
  source 1..20: mol_type = other DNA
tgggtgagtcctatgtgatt

SEQ ID NO: 19738 - DNA, 20 bp, synthetic construct
  source 1..20: mol_type = other DNA
aaaacgagtacccttaaaat

SEQ ID NO: 19739 - DNA, 20 bp, synthetic construct
  source 1..20: mol_type = other DNA
ccgcgcgctgattgctgtgg

SEQ ID NO: 19740 - DNA, 20 bp, synthetic construct
  source 1..20: mol_type = other DNA
tttagccactgcaggtccag

SEQ ID NO: 19741 - DNA, 20 bp, synthetic construct
  source 1..20: mol_type = other DNA
ttctgtggtccagttttcat

SEQ ID NO: 19742 - DNA, 20 bp, synthetic construct
  source 1..20: mol_type = other DNA
aaatccaatttctccaccaa

SEQ ID NO: 19743 - DNA, 20 bp, synthetic construct
  source 1..20: mol_type = other DNA
aaacagcagtgctgcccaca

SEQ ID NO: 19744 - DNA, 20 bp, synthetic construct
  source 1..20: mol_type = other DNA
cacactttacagttttaata

SEQ ID NO: 19745 - DNA, 20 bp, synthetic construct
  source 1..20: mol_type = other DNA
gtgacttgcacgtactcccc

SEQ ID NO: 19746 - DNA, 20 bp, synthetic construct
  source 1..20: mol_type = other DNA
gagcgctgctcagatagcga

SEQ ID NO: 19747 - DNA, 20 bp, synthetic construct
  source 1..20: mol_type = other DNA
tgtaacagttcctgcatggg

SEQ ID NO: 19748 - DNA, 20 bp, synthetic construct
  source 1..20: mol_type = other DNA
gcatttgcacctacctcaca

SEQ ID NO: 19749 - DNA, 20 bp, synthetic construct
  source 1..20: mol_type = other DNA
ttttttcttttttttttttt

SEQ ID NO: 19750 - DNA, 20 bp, synthetic construct
  source 1..20: mol_type = other DNA
cagccaacttttgcatgttt

SEQ ID NO: 19751 - DNA, 20 bp, synthetic construct
  source 1..20: mol_type = other DNA
acctgccctgtgcagctgtg

SEQ ID NO: 19752 - DNA, 20 bp, synthetic construct
  source 1..20: mol_type = other DNA
aaaaagggtcagtctacctc

SEQ ID NO: 19753 - DNA, 20 bp, synthetic construct
  source 1..20: mol_type = other DNA
gtcagaagcacccaggactt

SEQ ID NO: 19754 - DNA, 20 bp, synthetic construct
  source 1..20: mol_type = other DNA
cttggtgaaccttagtacct

SEQ ID NO: 19755 - DNA, 20 bp, synthetic construct
  source 1..20: mol_type = other DNA
ttgcccaggctggagtggag

SEQ ID NO: 19756 - DNA, 20 bp, synthetic construct
  source 1..20: mol_type = other DNA
catcgccttgagctgcccac

SEQ ID NO: 19757 - DNA, 20 bp, synthetic construct
  source 1..20: mol_type = other DNA
gctgcctccgacagcgccgc

SEQ ID NO: 19758 - DNA, 20 bp, synthetic construct
  source 1..20: mol_type = other DNA
ctgcatcacggagcactggg

SEQ ID NO: 19759 - DNA, 20 bp, synthetic construct
  source 1..20: mol_type = other DNA
accctgccaggcgcacgaca

SEQ ID NO: 19760 - DNA, 20 bp, synthetic construct
  source 1..20: mol_type = other DNA
cgagcgggaacacaccgaag

SEQ ID NO: 19761 - DNA, 20 bp, synthetic construct
  source 1..20: mol_type = other DNA
gctgaccgacatcgagcaga

SEQ ID NO: 19762 - DNA, 20 bp, synthetic construct
  source 1..20: mol_type = other DNA
atatgaagacttcccgacct

SEQ ID NO: 19763 - DNA, 20 bp, synthetic construct
  source 1..20: mol_type = other DNA
gcccagccgcggcttctact

SEQ ID NO: 19764 - DNA, 20 bp, synthetic construct
  source 1..20: mol_type = other DNA
agatagaagacctggactcc

SEQ ID NO: 19765 - DNA, 20 bp, synthetic construct
  source 1..20: mol_type = other DNA
ccccagtagctctgaacaag

SEQ ID NO: 19766 - DNA, 20 bp, synthetic construct
  source 1..20: mol_type = other DNA
gcaggaagccactatgccag

SEQ ID NO: 19767 - DNA, 20 bp, synthetic construct
  source 1..20: mol_type = other DNA
agccagaagattttatctag

SEQ ID NO: 19768 - DNA, 20 bp, synthetic construct
  source 1..20: mol_type = other DNA
ttgcgcttagtgtcctacat

SEQ ID NO: 19769 - DNA, 20 bp, synthetic construct
  source 1..20: mol_type = other DNA
tagtactgtgcctctttctt

SEQ ID NO: 19770 - DNA, 20 bp, synthetic construct
  source 1..20: mol_type = other DNA
gaagtaaatccttgttcact

SEQ ID NO: 19771 - DNA, 20 bp, synthetic construct
  source 1..20: mol_type = other DNA
ggggcgtgatttgactgcat

SEQ ID NO: 19772 - DNA, 20 bp, synthetic construct
  source 1..20: mol_type = other DNA
cggagcgtcaggtcccgttt

SEQ ID NO: 19773 - DNA, 20 bp, synthetic construct
  source 1..20: mol_type = other DNA
cccggcaatgttccctcgaa

SEQ ID NO: 19774 - DNA, 20 bp, synthetic construct
  source 1..20: mol_type = other DNA
acaaagcctgaacctccttt

SEQ ID NO: 19775 - DNA, 20 bp, synthetic construct
  source 1..20: mol_type = other DNA
cccagtatctagaaaactct

SEQ ID NO: 19776 - DNA, 20 bp, synthetic construct
  source 1..20: mol_type = other DNA
gctaccatattctcaggcgg

SEQ ID NO: 19777 - DNA, 20 bp, synthetic construct
  source 1..20: mol_type = other DNA
tcttcaaacagcaatgtcct

SEQ ID NO: 19778 - DNA, 20 bp, synthetic construct
  source 1..20: mol_type = other DNA
tttcccgttgaaggtgctac

SEQ ID NO: 19779 - DNA, 20 bp, synthetic construct
  source 1..20: mol_type = other DNA
caaagaactaatagagaaaa

SEQ ID NO: 19780 - DNA, 20 bp, synthetic construct
  source 1..20: mol_type = other DNA
ctcaggaccaaccgcatagc

SEQ ID NO: 19781 - DNA, 20 bp, synthetic construct
  source 1..20: mol_type = other DNA
ggcagtggaatgattggaaa

SEQ ID NO: 19782 - DNA, 20 bp, synthetic construct
  source 1..20: mol_type = other DNA
gaaagagatgatctcttaca

SEQ ID NO: 19783 - DNA, 20 bp, synthetic construct
  source 1..20: mol_type = other DNA
tctaaggcttgtcttaagtc

SEQ ID NO: 19784 - DNA, 20 bp, synthetic construct
  source 1..20: mol_type = other DNA
atgatggatggctcactgcc

SEQ ID NO: 19785 - DNA, 20 bp, synthetic construct
  source 1..20: mol_type = other DNA
atggtcactctgtggtcatc

SEQ ID NO: 19786 - DNA, 20 bp, synthetic construct
  source 1..20: mol_type = other DNA
ggacaccaggccgactcaga

SEQ ID NO: 19787 - DNA, 20 bp, synthetic construct
  source 1..20: mol_type = other DNA
atgaagaacagaccaatgtg

SEQ ID NO: 19788 - DNA, 20 bp, synthetic construct
  source 1..20: mol_type = other DNA
tgggctttcacgtactgggt

SEQ ID NO: 19789 - DNA, 20 bp, synthetic construct
  source 1..20: mol_type = other DNA
aggctggctgctgaggttaa

SEQ ID NO: 19790 - DNA, 20 bp, synthetic construct
  source 1..20: mol_type = other DNA
ttggaggctatgtaggcttg

SEQ ID NO: 19791 - DNA, 20 bp, synthetic construct
  source 1..20: mol_type = other DNA
ttaaggtctgtttaggaagg

SEQ ID NO: 19792 - DNA, 20 bp, synthetic construct
  source 1..20: mol_type = other DNA
tctcagttgcagcactgagt

SEQ ID NO: 19793 - DNA, 20 bp, synthetic construct
  source 1..20: mol_type = other DNA
taggttgccagggctgcacg

SEQ ID NO: 19794 - DNA, 20 bp, synthetic construct
  source 1..20: mol_type = other DNA
ctgaaggagggcctgatgtc

SEQ ID NO: 19795 - DNA, 20 bp, synthetic construct
  source 1..20: mol_type = other DNA
gaccaggacatggccaacaa

SEQ ID NO: 19796 - DNA, 20 bp, synthetic construct
  source 1..20: mol_type = other DNA
catagttacttttggccatt

SEQ ID NO: 19797 - DNA, 20 bp, synthetic construct
  source 1..20: mol_type = other DNA
accaaaaagcagctggacag

SEQ ID NO: 19798 - DNA, 20 bp, synthetic construct
  source 1..20: mol_type = other DNA
ccaaatccaaggcgaagttt

SEQ ID NO: 19799 - DNA, 20 bp, synthetic construct
  source 1..20: mol_type = other DNA
caccattatttgtcatggag

SEQ ID NO: 19800 - DNA, 20 bp, synthetic construct
  source 1..20: mol_type = other DNA
taggcagcagagcccctgac

SEQ ID NO: 19801 - DNA, 20 bp, synthetic construct
  source 1..20: mol_type = other DNA
tgaaattagaacagtaggcg

SEQ ID NO: 19802 - DNA, 20 bp, synthetic construct
  source 1..20: mol_type = other DNA
gaagtaccttatgagccata

SEQ ID NO: 19803 - DNA, 20 bp, synthetic construct
  source 1..20: mol_type = other DNA
aatgtctatgcagatggtag

SEQ ID NO: 19804 - DNA, 20 bp, synthetic construct
  source 1..20: mol_type = other DNA
cactcatgccaagtttcaga

SEQ ID NO: 19805 - DNA, 20 bp, synthetic construct
  source 1..20: mol_type = other DNA
gtaccaggagaacaaacggg

SEQ ID NO: 19806 - DNA, 20 bp, synthetic construct
  source 1..20: mol_type = other DNA
agtgaataaactcaattgtc

SEQ ID NO: 19807 - DNA, 20 bp, synthetic construct
  source 1..20: mol_type = other DNA
tggcagattatgaagcacgg

SEQ ID NO: 19808 - DNA, 20 bp, synthetic construct
  source 1..20: mol_type = other DNA
atgctaaatggtatccaggg

SEQ ID NO: 19809 - DNA, 20 bp, synthetic construct
  source 1..20: mol_type = other DNA
aagctatacgaatggggttc

SEQ ID NO: 19810 - DNA, 20 bp, synthetic construct
  source 1..20: mol_type = other DNA
tttttatgtcttaatctaac

SEQ ID NO: 19811 - DNA, 20 bp, synthetic construct
  source 1..20: mol_type = other DNA
cttttcagataggcttaaca

SEQ ID NO: 19812 - DNA, 20 bp, synthetic construct
  source 1..20: mol_type = other DNA
tttcttttaaagttataaac

SEQ ID NO: 19813 - DNA, 20 bp, synthetic construct
  source 1..20: mol_type = other DNA
gaattttttataagtatgta

SEQ ID NO: 19814 - DNA, 20 bp, synthetic construct
  source 1..20: mol_type = other DNA
gaatagttgtttaaatattt

SEQ ID NO: 19815 - DNA, 20 bp, synthetic construct
  source 1..20: mol_type = other DNA
ctcaaggactgaattgtttt

SEQ ID NO: 19816 - DNA, 20 bp, synthetic construct
  source 1..20: mol_type = other DNA
tgtttctcatagataagata

SEQ ID NO: 19817 - DNA, 20 bp, synthetic construct
  source 1..20: mol_type = other DNA
gctcatgcctgtaatcccag

SEQ ID NO: 19818 - DNA, 20 bp, synthetic construct
  source 1..20: mol_type = other DNA
tattgtattaggtattaaag

SEQ ID NO: 19819 - DNA, 20 bp, synthetic construct
  source 1..20: mol_type = other DNA
cacatgcagactatcttttg

SEQ ID NO: 19820 - DNA, 20 bp, synthetic construct
  source 1..20: mol_type = other DNA
caaattcaacaaatcttcca

SEQ ID NO: 19821 - DNA, 20 bp, synthetic construct
  source 1..20: mol_type = other DNA
agtcaagtcagacttcatta

SEQ ID NO: 19822 - DNA, 20 bp, synthetic construct
  source 1..20: mol_type = other DNA
gattctcatatcatcttgta

SEQ ID NO: 19823 - DNA, 20 bp, synthetic construct
  source 1..20: mol_type = other DNA
ttggaaattataaaaatatt

SEQ ID NO: 19824 - DNA, 20 bp, synthetic construct
  source 1..20: mol_type = other DNA
gtttcaccatgttggccagg

SEQ ID NO: 19825 - DNA, 20 bp, synthetic construct
  source 1..20: mol_type = other DNA
ttgatcatttgcaaagtcaa

SEQ ID NO: 19826 - DNA, 20 bp, synthetic construct
  source 1..20: mol_type = other DNA
agggtagagtgggtgtagtg

SEQ ID NO: 19827 - DNA, 20 bp, synthetic construct
  source 1..20: mol_type = other DNA
gtttcacatgatataccctt

SEQ ID NO: 19828 - DNA, 20 bp, synthetic construct
  source 1..20: mol_type = other DNA
ttcatctgtgaaaggaaaat

SEQ ID NO: 19829 - DNA, 20 bp, synthetic construct
  source 1..20: mol_type = other DNA
ctactaaaaatacaaaatta

SEQ ID NO: 19830 - DNA, 20 bp, synthetic construct
  source 1..20: mol_type = other DNA
cagagtgagaccccatctct

SEQ ID NO: 19831 - DNA, 20 bp, synthetic construct
  source 1..20: mol_type = other DNA
gaatttcttcctcagcataa

SEQ ID NO: 19832 - DNA, 20 bp, synthetic construct
  source 1..20: mol_type = other DNA
tgaaaaacttcaccaagcta

SEQ ID NO: 19833 - DNA, 20 bp, synthetic construct
  source 1..20: mol_type = other DNA
aaaaaaagcaattattttta

SEQ ID NO: 19834 - DNA, 20 bp, synthetic construct
  source 1..20: mol_type = other DNA
ggagcctgaggtgggaggat

SEQ ID NO: 19835 - DNA, 20 bp, synthetic construct
  source 1..20: mol_type = other DNA
aatttctgacctcaagtgat

SEQ ID NO: 19836 - DNA, 20 bp, synthetic construct
  source 1..20: mol_type = other DNA
acatatggaggctcctgtca

SEQ ID NO: 19837 - DNA, 20 bp, synthetic construct
  source 1..20: mol_type = other DNA
caaaaccacatctaagagaa

SEQ ID NO: 19838 - DNA, 20 bp, synthetic construct
  source 1..20: mol_type = other DNA
ctgttaaaccaaaatatttt

SEQ ID NO: 19839 - DNA, 20 bp, synthetic construct
  source 1..20: mol_type = other DNA
gtgccagacactgttctgga

SEQ ID NO: 19840 - DNA, 20 bp, synthetic construct
  source 1..20: mol_type = other DNA
ctgaatgaaatggacatttt

SEQ ID NO: 19841 - DNA, 20 bp, synthetic construct
  source 1..20: mol_type = other DNA
tgccattttcctcaccagta

SEQ ID NO: 19842 - DNA, 20 bp, synthetic construct
  source 1..20: mol_type = other DNA
gttcccaatgtccttctagt

SEQ ID NO: 19843 - DNA, 20 bp, synthetic construct
  source 1..20: mol_type = other DNA
atgacagagtgagacttcat

SEQ ID NO: 19844 - DNA, 20 bp, synthetic construct
  source 1..20: mol_type = other DNA
ttacggcagcatacgacctg

SEQ ID NO: 19845 - DNA, 20 bp, synthetic construct
  source 1..20: mol_type = other DNA
tcattggaatggtaagagtt

SEQ ID NO: 19846 - DNA, 20 bp, synthetic construct
  source 1..20: mol_type = other DNA
aacggccagaatgaattcta

SEQ ID NO: 19847 - DNA, 20 bp, synthetic construct
  source 1..20: mol_type = other DNA
gagccgccagagcgatcccc

SEQ ID NO: 19848 - DNA, 20 bp, synthetic construct
  source 1..20: mol_type = other DNA
cgctcagccctacatccagc

SEQ ID NO: 19849 - DNA, 20 bp, synthetic construct
  source 1..20: mol_type = other DNA
catgaaccccgcgagcatgg

SEQ ID NO: 19850 - DNA, 20 bp, synthetic construct
  source 1..20: mol_type = other DNA
aaagaggccataccctggag

SEQ ID NO: 19851 - DNA, 20 bp, synthetic construct
  source 1..20: mol_type = other DNA
ccccacggtcaacatggggc

SEQ ID NO: 19852 - DNA, 20 bp, synthetic construct
  source 1..20: mol_type = other DNA
catgacccctgggagcagca

SEQ ID NO: 19853 - DNA, 20 bp, synthetic construct
  source 1..20: mol_type = other DNA
ccgcctggagcacaacctgg

SEQ ID NO: 19854 - DNA, 20 bp, synthetic construct
  source 1..20: mol_type = other DNA
actcctcaagaagcgcctcc

SEQ ID NO: 19855 - DNA, 20 bp, synthetic construct
  source 1..20: mol_type = other DNA
cgagctcctgtcttatctgg

SEQ ID NO: 19856 - DNA, 20 bp, synthetic construct
  source 1..20: mol_type = other DNA
taagccaagataccccataa

SEQ ID NO: 19857 - DNA, 20 bp, synthetic construct
  source 1..20: mol_type = other DNA
tggggaacagagagagcagg

SEQ ID NO: 19858 - DNA, 20 bp, synthetic construct
  source 1..20: mol_type = other DNA
agaaaccagagcccagggca

SEQ ID NO: 19859 - DNA, 20 bp, synthetic construct
  source 1..20: mol_type = other DNA
agcctaccctgcctgcactc

SEQ ID NO: 19860 - DNA, 20 bp, synthetic construct
  source 1..20: mol_type = other DNA
ccgtgagccacatggcctag

SEQ ID NO: 19861 - DNA, 20 bp, synthetic construct
  source 1..20: mol_type = other DNA
tgacttccagtcactgtccc

SEQ ID NO: 19862 - DNA, 20 bp, synthetic construct
  source 1..20: mol_type = other DNA
agatgccttccttaggagtt

SEQ ID NO: 19863 - DNA, 20 bp, synthetic construct
  source 1..20: mol_type = other DNA
gcaaccatctctgggctcag

SEQ ID NO: 19864 - DNA, 20 bp, synthetic construct
  source 1..20: mol_type = other DNA
tgcaagccacttttccatgc

SEQ ID NO: 19865 - DNA, 20 bp, synthetic construct
  source 1..20: mol_type = other DNA
tattttttaagaaactgcta

SEQ ID NO: 19866 - DNA, 20 bp, synthetic construct
  source 1..20: mol_type = other DNA
actgttatctttttgatgga

SEQ ID NO: 19867 - DNA, 20 bp, synthetic construct
  source 1..20: mol_type = other DNA
ctgtgccaggagctgttctt

SEQ ID NO: 19868 - DNA, 20 bp, synthetic construct
  source 1..20: mol_type = other DNA
ctaaagagcttagtttgccc

SEQ ID NO: 19869 - DNA, 20 bp, synthetic construct
  source 1..20: mol_type = other DNA
cgctccgccaatacaataga

SEQ ID NO: 19870 - DNA, 20 bp, synthetic construct
  source 1..20: mol_type = other DNA
gcttaggtatctgtgctgtg

SEQ ID NO: 19871 - DNA, 20 bp, synthetic construct
  source 1..20: mol_type = other DNA
aggcttggaaccagcacagc

SEQ ID NO: 19872 - DNA, 20 bp, synthetic construct
  source 1..20: mol_type = other DNA
ccaagtgctgttcaactcag

SEQ ID NO: 19873 - DNA, 20 bp, synthetic construct
  source 1..20: mol_type = other DNA
ggttgtgtagatgtggccgg

SEQ ID NO: 19874 - DNA, 20 bp, synthetic construct
  source 1..20: mol_type = other DNA
gcctttccagaccggagacg

SEQ ID NO: 19875 - DNA, 20 bp, synthetic construct
  source 1..20: mol_type = other DNA
cagccaaaacctgctaagtc

SEQ ID NO: 19876 - DNA, 20 bp, synthetic construct
  source 1..20: mol_type = other DNA
gtttcaagtgatcctcccgc

SEQ ID NO: 19877 - DNA, 20 bp, synthetic construct
  source 1..20: mol_type = other DNA
tgcccctccctccgggtgga

SEQ ID NO: 19878 - DNA, 20 bp, synthetic construct
  source 1..20: mol_type = other DNA
cggcgaggtgaaggccgacc

SEQ ID NO: 19879 - DNA, 20 bp, synthetic construct
  source 1..20: mol_type = other DNA
tcttagatctcgttttgagg

SEQ ID NO: 19880 - DNA, 20 bp, synthetic construct
  source 1..20: mol_type = other DNA
atcccccacagaagccccct

SEQ ID NO: 19881 - DNA, 20 bp, synthetic construct
  source 1..20: mol_type = other DNA
ccctgaggccggcccgcgtc

SEQ ID NO: 19882 - DNA, 20 bp, synthetic construct
  source 1..20: mol_type = other DNA
ctgacgggtgacgccagcgg

SEQ ID NO: 19883 - DNA, 20 bp, synthetic construct
  source 1..20: mol_type = other DNA
accttagacaaggaaagttt

SEQ ID NO: 19884 - DNA, 20 bp, synthetic construct
  source 1..20: mol_type = other DNA
ctggcagagcctgtagttgg

SEQ ID NO: 19885 - DNA, 20 bp, synthetic construct
  source 1..20: mol_type = other DNA
agttgtctctgatcacttgt

SEQ ID NO: 19886 - DNA, 20 bp, synthetic construct
  source 1..20: mol_type = other DNA
ccaaaaataatccggagaca

SEQ ID NO: 19887 - DNA, 20 bp, synthetic construct
  source 1..20: mol_type = other DNA
ccatttgaccagaacgtgtg

SEQ ID NO: 19888 - DNA, 20 bp, synthetic construct
  source 1..20: mol_type = other DNA
tcgacccagcttgaggtctc

SEQ ID NO: 19889 - DNA, 20 bp, synthetic construct
  source 1..20: mol_type = other DNA
gcgcgcggggcgcccccgcg

SEQ ID NO: 19890 - DNA, 20 bp, synthetic construct
  source 1..20: mol_type = other DNA
agctccggccccgccgttcc

SEQ ID NO: 19891 - DNA, 20 bp, synthetic construct
  source 1..20: mol_type = other DNA
ggctctgacgcggcgcccca

SEQ ID NO: 19892 - DNA, 20 bp, synthetic construct
  source 1..20: mol_type = other DNA
tctccagcttgcatggcctg

SEQ ID NO: 19893 - DNA, 20 bp, synthetic construct
  source 1..20: mol_type = other DNA
aggaaggaacgctcgagatt

SEQ ID NO: 19894 - DNA, 20 bp, synthetic construct
  source 1..20: mol_type = other DNA
cagagatcccggtcctccgg

SEQ ID NO: 19895 - DNA, 20 bp, synthetic construct
  source 1..20: mol_type = other DNA
gcgaaggtgtcgctgccaag

SEQ ID NO: 19896 - DNA, 20 bp, synthetic construct
  source 1..20: mol_type = other DNA
cgggcactgccccaggtctt

SEQ ID NO: 19897 - DNA, 20 bp, synthetic construct
  source 1..20: mol_type = other DNA
agattttggagcggagcgtt

SEQ ID NO: 19898 - DNA, 20 bp, synthetic construct
  source 1..20: mol_type = other DNA
tgctcgcgttcgcaagctcc

SEQ ID NO: 19899 - DNA, 20 bp, synthetic construct
  source 1..20: mol_type = other DNA
ccggggctgaggctggggct

SEQ ID NO: 19900 - DNA, 20 bp, synthetic construct
  source 1..20: mol_type = other DNA
cccgagcatgagcagagatc

SEQ ID NO: 19901 - DNA, 20 bp, synthetic construct
  source 1..20: mol_type = other DNA
cccggcttcagcggcaccgc

SEQ ID NO: 19902 - DNA, 20 bp, synthetic construct
  source 1..20: mol_type = other DNA
tggcaaagacacgctggctg

SEQ ID NO: 19903 - DNA, 20 bp, synthetic construct
  source 1..20: mol_type = other DNA
aaagaatggagaattattga

SEQ ID NO: 19904 - DNA, 20 bp, synthetic construct
  source 1..20: mol_type = other DNA
gctgacaccgacccaacgtc

SEQ ID NO: 19905 - DNA, 20 bp, synthetic construct
  source 1..20: mol_type = other DNA
aagtgtaattctggaccaat

SEQ ID NO: 19906 - DNA, 20 bp, synthetic construct
  source 1..20: mol_type = other DNA
agccgtagtcttggcccacg

SEQ ID NO: 19907 - DNA, 20 bp, synthetic construct
  source 1..20: mol_type = other DNA
gtagctcggcagccctgcca

SEQ ID NO: 19908 - DNA, 20 bp, synthetic construct
  source 1..20: mol_type = other DNA
aaccctacagcttggggcct

SEQ ID NO: 19909 - DNA, 20 bp, synthetic construct
  source 1..20: mol_type = other DNA
caggcgactgaagacgatgg

SEQ ID NO: 19910 - DNA, 20 bp, synthetic construct
  source 1..20: mol_type = other DNA
ggggctgtttttcaactcct

SEQ ID NO: 19911 - DNA, 20 bp, synthetic construct
  source 1..20: mol_type = other DNA
gtggacacaattctcacctg

SEQ ID NO: 19912 - DNA, 20 bp, synthetic construct
  source 1..20: mol_type = other DNA
ggagctctggaggctgggct

SEQ ID NO: 19913 - DNA, 20 bp, synthetic construct
  source 1..20: mol_type = other DNA
acaatgaaagtcgctgaaga

SEQ ID NO: 19914 - DNA, 20 bp, synthetic construct
  source 1..20: mol_type = other DNA
ggcaccaagagagtggacgc

SEQ ID NO: 19915 - DNA, 20 bp, synthetic construct
  source 1..20: mol_type = other DNA
tccaaggaggtggctgtgca

SEQ ID NO: 19916 - DNA, 20 bp, synthetic construct
  source 1..20: mol_type = other DNA
ggtggagccgcctcggcgtt

SEQ ID NO: 19917 - DNA, 20 bp, synthetic construct
  source 1..20: mol_type = other DNA
caaagatcaactcccactga

SEQ ID NO: 19918 - DNA, 20 bp, synthetic construct
  source 1..20: mol_type = other DNA
gcagaaagggacggagaaca

SEQ ID NO: 19919 - DNA, 20 bp, synthetic construct
  source 1..20: mol_type = other DNA
ctggtaaatccacaggaatt

SEQ ID NO: 19920 - DNA, 20 bp, synthetic construct
  source 1..20: mol_type = other DNA
tgtactttgacgacaagaaa

SEQ ID NO: 19921 - DNA, 20 bp, synthetic construct
  source 1..20: mol_type = other DNA
gcttcagtggccaaagatct

SEQ ID NO: 19922 - DNA, 20 bp, synthetic construct
  source 1..20: mol_type = other DNA
agagtgatggctgttttagt

SEQ ID NO: 19923 - DNA, 20 bp, synthetic construct
  source 1..20: mol_type = other DNA
aaaccccgagtgctataccg

SEQ ID NO: 19924 - DNA, 20 bp, synthetic construct
  source 1..20: mol_type = other DNA
gactgacccaccatgacacc

SEQ ID NO: 19925 - DNA, 20 bp, synthetic construct
  source 1..20: mol_type = other DNA
cataaactgtcagaggcagc

SEQ ID NO: 19926 - DNA, 20 bp, synthetic construct
  source 1..20: mol_type = other DNA
ccgctcccaaactgtacctg

SEQ ID NO: 19927 - DNA, 20 bp, synthetic construct
  source 1..20: mol_type = other DNA
ggtacggggagctcgcaaat

SEQ ID NO: 19928 - DNA, 20 bp, synthetic construct
  source 1..20: mol_type = other DNA
gtatcagttctccgtcaact

SEQ ID NO: 19929 - DNA, 20 bp, synthetic construct
  source 1..20: mol_type = other DNA
agcccttgtctcgggaccgc

SEQ ID NO: 19930 - DNA, 20 bp, synthetic construct
  source 1..20: mol_type = other DNA
aagggaggaaggagtcccag

SEQ ID NO: 19931 - DNA, 20 bp, synthetic construct
  source 1..20: mol_type = other DNA
gtgtattcctgggacgatgc

SEQ ID NO: 19932 - DNA, 20 bp, synthetic construct
  source 1..20: mol_type = other DNA
cgggcgcaccgcggccccca

SEQ ID NO: 19933 - DNA, 20 bp, synthetic construct
  source 1..20: mol_type = other DNA
acagcaacttttctaagacc

SEQ ID NO: 19934 - DNA, 20 bp, synthetic construct
  source 1..20: mol_type = other DNA
tccaagatgtccacgccctg

SEQ ID NO: 19935 - DNA, 20 bp, synthetic construct
  source 1..20: mol_type = other DNA
gcgagccggagaccgagccc

SEQ ID NO: 19936 - DNA, 20 bp, synthetic construct
  source 1..20: mol_type = other DNA
acctgatttgtgaacctatc

SEQ ID NO: 19937 - DNA, 20 bp, synthetic construct
  source 1..20: mol_type = other DNA
agtttcgatgctgccggcgc

SEQ ID NO: 19938 - DNA, 20 bp, synthetic construct
  source 1..20: mol_type = other DNA
acccttaccggcacccggcc

SEQ ID NO: 19939 - DNA, 20 bp, synthetic construct
  source 1..20: mol_type = other DNA
cgcttccattgtcagaatgg

SEQ ID NO: 19940 - DNA, 20 bp, synthetic construct
  source 1..20: mol_type = other DNA
actggtgctgactgcaacca

SEQ ID NO: 19941 - DNA, 20 bp, synthetic construct
  source 1..20: mol_type = other DNA
gggctgtttggaaagaccca

SEQ ID NO: 19942 - DNA, 20 bp, synthetic construct
  source 1..20: mol_type = other DNA
attgccagtacctgcctcca

SEQ ID NO: 19943 - DNA, 20 bp, synthetic construct
  source 1..20: mol_type = other DNA
gtcggagcccgggcgggcga

SEQ ID NO: 19944 - DNA, 20 bp, synthetic construct
  source 1..20: mol_type = other DNA
tcggattgctcaaggaccca

SEQ ID NO: 19945 - DNA, 20 bp, synthetic construct
  source 1..20: mol_type = other DNA
agaccacccagcccagccaa

SEQ ID NO: 19946 - DNA, 20 bp, synthetic construct
  source 1..20: mol_type = other DNA
cggggccctggaagctccta

SEQ ID NO: 19947 - DNA, 20 bp, synthetic construct
  source 1..20: mol_type = other DNA
aagatcctgatcctcctgct

SEQ ID NO: 19948 - DNA, 20 bp, synthetic construct
  source 1..20: mol_type = other DNA
ccccttcatgggactcccaa

SEQ ID NO: 19949 - DNA, 20 bp, synthetic construct
  source 1..20: mol_type = other DNA
ggttgctgacaccctgtgcc

SEQ ID NO: 19950 - DNA, 20 bp, synthetic construct
  source 1..20: mol_type = other DNA
tctagccggaacctgggggc

SEQ ID NO: 19951 - DNA, 20 bp, synthetic construct
  source 1..20: mol_type = other DNA
cggggcgaccctgcagtggc

SEQ ID NO: 19952 - DNA, 20 bp, synthetic construct
  source 1..20: mol_type = other DNA
tcctgctcccccccacaccg

SEQ ID NO: 19953 - DNA, 20 bp, synthetic construct
  source 1..20: mol_type = other DNA
ttcgcctagcgcgtgctcag

SEQ ID NO: 19954 - DNA, 20 bp, synthetic construct
  source 1..20: mol_type = other DNA
gagcctggggaaactattat

SEQ ID NO: 19955 - DNA, 20 bp, synthetic construct
  source 1..20: mol_type = other DNA
accgatcccagggctgtggt

SEQ ID NO: 19956 - DNA, 20 bp, synthetic construct
  source 1..20: mol_type = other DNA
aacgtagagaaatcctttca

SEQ ID NO: 19957 - DNA, 20 bp, synthetic construct
  source 1..20: mol_type = other DNA
gtggggccgctgccggctcc

SEQ ID NO: 19958 - DNA, 20 bp, synthetic construct
  source 1..20: mol_type = other DNA
actgcctctgcctccaagct

SEQ ID NO: 19959 - DNA, 20 bp, synthetic construct
  source 1..20: mol_type = other DNA
tggtggccctcctggtggcc

SEQ ID NO: 19960 - DNA, 20 bp, synthetic construct
  source 1..20: mol_type = other DNA
cccgggagatcggggctggg

SEQ ID NO: 19961 - DNA, 20 bp, synthetic construct
  source 1..20: mol_type = other DNA
agaaaagcaggtggaaggag

SEQ ID NO: 19962 - DNA, 20 bp, synthetic construct
  source 1..20: mol_type = other DNA
aggaagcggatgccgtgggg

SEQ ID NO: 19963 - DNA, 20 bp, synthetic construct
  source 1..20: mol_type = other DNA
gtggacagctcacctagcgg

SEQ ID NO: 19964 - DNA, 20 bp, synthetic construct
  source 1..20: mol_type = other DNA
gcacgcaccgcgccaggcca

SEQ ID NO: 19965 - DNA, 20 bp, synthetic construct
  source 1..20: mol_type = other DNA
atccattccccctcagatct

SEQ ID NO: 19966 - DNA, 20 bp, synthetic construct
  source 1..20: mol_type = other DNA
gggcttggcgcggcggccag

SEQ ID NO: 19967 - DNA, 20 bp, synthetic construct
  source 1..20: mol_type = other DNA
tcccctccgggttttcacac

SEQ ID NO: 19968 - DNA, 20 bp, synthetic construct
  source 1..20: mol_type = other DNA
gagagcgtctaccccgaact

SEQ ID NO: 19969 - DNA, 20 bp, synthetic construct
  source 1..20: mol_type = other DNA
ccgccgccgccgccgcctcc

SEQ ID NO: 19970 - DNA, 20 bp, synthetic construct
  source 1..20: mol_type = other DNA
tcccgtctctccgtctcgac

SEQ ID NO: 19971 - DNA, 20 bp, synthetic construct
  source 1..20: mol_type = other DNA
ggcgccgcccgcctgctgcc

SEQ ID NO: 19972 - DNA, 20 bp, synthetic construct
  source 1..20: mol_type = other DNA
ggcagggaagctgagggccc

SEQ ID NO: 19973 - DNA, 20 bp, synthetic construct
  source 1..20: mol_type = other DNA
ctgggtgagtagccgggaac

SEQ ID NO: 19974 - DNA, 20 bp, synthetic construct
  source 1..20: mol_type = other DNA
agggccccaacccagaacga

SEQ ID NO: 19975 - DNA, 20 bp, synthetic construct
  source 1..20: mol_type = other DNA
attggaaatatgctacagat

SEQ ID NO: 19976 - DNA, 20 bp, synthetic construct
  source 1..20: mol_type = other DNA
gttttcaaaggagcattctt

SEQ ID NO: 19977 - DNA, 20 bp, synthetic construct
  source 1..20: mol_type = other DNA
ttcacctgtggattcgtcag

SEQ ID NO: 19978 - DNA, 20 bp, synthetic construct
  source 1..20: mol_type = other DNA
gattttggaagaaacgaatt

SEQ ID NO: 19979 - DNA, 20 bp, synthetic construct
  source 1..20: mol_type = other DNA
cacagagaatgctctgcacc

SEQ ID NO: 19980 - DNA, 20 bp, synthetic construct
  source 1..20: mol_type = other DNA
cgaagaaggtgagcgcagtg

SEQ ID NO: 19981 - DNA, 20 bp, synthetic construct
  source 1..20: mol_type = other DNA
gaggcgcagggaacctggag

SEQ ID NO: 19982 - DNA, 20 bp, synthetic construct
  source 1..20: mol_type = other DNA
catctcagtcctgacatcgc

SEQ ID NO: 19983 - DNA, 20 bp, synthetic construct
  source 1..20: mol_type = other DNA
acagagatcaatgcattttc

SEQ ID NO: 19984 - DNA, 20 bp, synthetic construct
  source 1..20: mol_type = other DNA
aggcactgcgggttttgcag

SEQ ID NO: 19985 - DNA, 20 bp, synthetic construct
  source 1..20: mol_type = other DNA
ccacatgcttccattgcttg

SEQ ID NO: 19986 - DNA, 20 bp, synthetic construct
  source 1..20: mol_type = other DNA
ctcccaggccgatacagtgc

SEQ ID NO: 19987 - DNA, 20 bp, synthetic construct
  source 1..20: mol_type = other DNA
ggttctccagcttcttgtcc

SEQ ID NO: 19988 - DNA, 20 bp, synthetic construct
  source 1..20: mol_type = other DNA
gtcgcgaggacttctaccgc

SEQ ID NO: 19989 - DNA, 20 bp, synthetic construct
  source 1..20: mol_type = other DNA
cacgtcgggagggtccgggc

SEQ ID NO: 19990 - DNA, 20 bp, synthetic construct
  source 1..20: mol_type = other DNA
gggtccccgagggcgctgcg

SEQ ID NO: 19991 - DNA, 20 bp, synthetic construct
  source 1..20: mol_type = other DNA
attccaagataaataggatt

SEQ ID NO: 19992 - DNA, 20 bp, synthetic construct
  source 1..20: mol_type = other DNA
caggctgccacacacgcact

SEQ ID NO: 19993 - DNA, 20 bp, synthetic construct
  source 1..20: mol_type = other DNA
gagccagagattcgagccgg

SEQ ID NO: 19994 - DNA, 20 bp, synthetic construct
  source 1..20: mol_type = other DNA
tacacgtggatgtgaaatga

SEQ ID NO: 19995 - DNA, 20 bp, synthetic construct
  source 1..20: mol_type = other DNA
aggagctccaggcccgtcgg

SEQ ID NO: 19996 - DNA, 20 bp, synthetic construct
  source 1..20: mol_type = other DNA
caccccctattttactgcag

SEQ ID NO: 19997 - DNA, 20 bp, synthetic construct
  source 1..20: mol_type = other DNA
gccccaactgctcttcccgc

SEQ ID NO: 19998 - DNA, 20 bp, synthetic construct
  source 1..20: mol_type = other DNA
gcccctcccacgagcccaag

SEQ ID NO: 19999 - DNA, 20 bp, synthetic construct
  source 1..20: mol_type = other DNA
agccagcagcagccggcggg

SEQ ID NO: 20000 - DNA, 20 bp, synthetic construct
  source 1..20: mol_type = other DNA
ggcagaagtacaagcgcagg

SEQ ID NO: 20001 - DNA, 20 bp, synthetic construct
  source 1..20: mol_type = other DNA
agtgaacaaaactttaatgt

SEQ ID NO: 20002 - DNA, 20 bp, synthetic construct
  source 1..20: mol_type = other DNA
taacctgctgcagttctgac

SEQ ID NO: 20003 - DNA, 20 bp, synthetic construct
  source 1..20: mol_type = other DNA
ccggtggcttcctcacctcc

SEQ ID NO: 20004 - DNA, 20 bp, synthetic construct
  source 1..20: mol_type = other DNA
atgagctgctccagtacatc

SEQ ID NO: 20005 - DNA, 20 bp, synthetic construct
  source 1..20: mol_type = other DNA
ttcttccggggttggtggcg

SEQ ID NO: 20006 - DNA, 20 bp, synthetic construct
  source 1..20: mol_type = other DNA
gacttcccttcccaaggact

SEQ ID NO: 20007 - DNA, 20 bp, synthetic construct
  source 1..20: mol_type = other DNA
gaactggggcctgggggatg

SEQ ID NO: 20008 - DNA, 20 bp, synthetic construct
  source 1..20: mol_type = other DNA
ggacgagcttgggcttagcg

SEQ ID NO: 20009 - DNA, 20 bp, synthetic construct
  source 1..20: mol_type = other DNA
aaagatggacaaacagagat

SEQ ID NO: 20010 - DNA, 20 bp, synthetic construct
  source 1..20: mol_type = other DNA
gctccagctgctttccaaaa

SEQ ID NO: 20011 - DNA, 20 bp, synthetic construct
  source 1..20: mol_type = other DNA
ctgcctggagtggagctgag

SEQ ID NO: 20012 - DNA, 20 bp, synthetic construct
  source 1..20: mol_type = other DNA
aggaaggaggaaacctggaa

SEQ ID NO: 20013 - DNA, 20 bp, synthetic construct
  source 1..20: mol_type = other DNA
agatgtggagccttgtcacc

SEQ ID NO: 20014 - DNA, 20 bp, synthetic construct
  source 1..20: mol_type = other DNA
ccgagacagctgcgcgggcg

SEQ ID NO: 20015 - DNA, 20 bp, synthetic construct
  source 1..20: mol_type = other DNA
aattctttctctgggtcatc

SEQ ID NO: 20016 - DNA, 20 bp, synthetic construct
  source 1..20: mol_type = other DNA
agaggggtgtcctgaaggtc

SEQ ID NO: 20017 - DNA, 20 bp, synthetic construct
  source 1..20: mol_type = other DNA
tccgagttgtcggaggaagg

SEQ ID NO: 20018 - DNA, 20 bp, synthetic construct
  source 1..20: mol_type = other DNA
gccagggcgcgcgtgcgcgg

SEQ ID NO: 20019 - DNA, 20 bp, synthetic construct
  source 1..20: mol_type = other DNA
ggccctcgccccctcctccc

SEQ ID NO: 20020 - DNA, 20 bp, synthetic construct
  source 1..20: mol_type = other DNA
tcgcatcgagcagtttccag

SEQ ID NO: 20021 - DNA, 20 bp, synthetic construct
  source 1..20: mol_type = other DNA
gcatccctaaaagcttcggc

SEQ ID NO: 20022 - DNA, 20 bp, synthetic construct
  source 1..20: mol_type = other DNA
atcagtcactcagccagggt

SEQ ID NO: 20023 - DNA, 20 bp, synthetic construct
  source 1..20: mol_type = other DNA
caagctgcgcgcccacgagc

SEQ ID NO: 20024 - DNA, 20 bp, synthetic construct
  source 1..20: mol_type = other DNA
ccggtgcacggcggctggcg

SEQ ID NO: 20025 - DNA, 20 bp, synthetic construct
  source 1..20: mol_type = other DNA
ggatggagctgaactttggg

SEQ ID NO: 20026 - DNA, 20 bp, synthetic construct
  source 1..20: mol_type = other DNA
caggattccttctggaactg

SEQ ID NO: 20027 - DNA, 20 bp, synthetic construct
  source 1..20: mol_type = other DNA
ctgccgccgccgaagctgga

SEQ ID NO: 20028 - DNA, 20 bp, synthetic construct
  source 1..20: mol_type = other DNA
aggctcgcgctctgcctgct

SEQ ID NO: 20029 - DNA, 20 bp, synthetic construct
  source 1..20: mol_type = other DNA
tatgaaaaggcctagtaagt

SEQ ID NO: 20030 - DNA, 20 bp, synthetic construct
  source 1..20: mol_type = other DNA
ggaaaggaacctcctccctg

SEQ ID NO: 20031 - DNA, 20 bp, synthetic construct
  source 1..20: mol_type = other DNA
aactcttgtttccaagctta

SEQ ID NO: 20032 - DNA, 20 bp, synthetic construct
  source 1..20: mol_type = other DNA
ggcagaattccttcctttag

SEQ ID NO: 20033 - DNA, 20 bp, synthetic construct
  source 1..20: mol_type = other DNA
aaacttggctcagcccactc

SEQ ID NO: 20034 - DNA, 20 bp, synthetic construct
  source 1..20: mol_type = other DNA
ggtctgtgatttcgaggcag

SEQ ID NO: 20035 - DNA, 20 bp, synthetic construct
  source 1..20: mol_type = other DNA
gaagcaagcaagcaaggaag

SEQ ID NO: 20036 - DNA, 20 bp, synthetic construct
  source 1..20: mol_type = other DNA
tgactattggtgttcctgtt

SEQ ID NO: 20037 - DNA, 20 bp, synthetic construct
  source 1..20: mol_type = other DNA
agcagccgctgtctccagtg

SEQ ID NO: 20038 - DNA, 20 bp, synthetic construct
  source 1..20: mol_type = other DNA
tggcatagtgagtttggagt

SEQ ID NO: 20039 - DNA, 20 bp, synthetic construct
  source 1..20: mol_type = other DNA
atttccgaagctcctgctca

SEQ ID NO: 20040 - DNA, 20 bp, synthetic construct
  source 1..20: mol_type = other DNA
ccagacttgaagccacacag

SEQ ID NO: 20041 - DNA, 20 bp, synthetic construct
  source 1..20: mol_type = other DNA
gagctgcctgacagtgacaa

SEQ ID NO: 20042 - DNA, 20 bp, synthetic construct
  source 1..20: mol_type = other DNA
tatgcctggataaggaggat

SEQ ID NO: 20043 - DNA, 20 bp, synthetic construct
  source 1..20: mol_type = other DNA
gctgagaagagggtgcagaa

SEQ ID NO: 20044 - DNA, 20 bp, synthetic construct
  source 1..20: mol_type = other DNA
gagaccgagccaaactcctg

SEQ ID NO: 20045 - DNA, 20 bp, synthetic construct
  source 1..20: mol_type = other DNA
acaatctctggacaaaattt

SEQ ID NO: 20046 - DNA, 20 bp, synthetic construct
  source 1..20: mol_type = other DNA
ccaattataccccgttggag

SEQ ID NO: 20047 - DNA, 20 bp, synthetic construct
  source 1..20: mol_type = other DNA
tcgctgggactcggaagtgc

SEQ ID NO: 20048 - DNA, 20 bp, synthetic construct
  source 1..20: mol_type = other DNA
gtgcgcacccactcgtaact

SEQ ID NO: 20049 - DNA, 20 bp, synthetic construct
  source 1..20: mol_type = other DNA
tgagagagggtcttagcagg

SEQ ID NO: 20050 - DNA, 20 bp, synthetic construct
  source 1..20: mol_type = other DNA
cgtcttgggtttggctccca

SEQ ID NO: 20051 - DNA, 20 bp, synthetic construct
  source 1..20: mol_type = other DNA
ttaaacgcgtagcattcctg

SEQ ID NO: 20052 - DNA, 20 bp, synthetic construct
  source 1..20: mol_type = other DNA
agtgctcccagtaaccttcc

SEQ ID NO: 20053 - DNA, 20 bp, synthetic construct
  source 1..20: mol_type = other DNA
ccgcggcgtggaggcaggga

SEQ ID NO: 20054 - DNA, 20 bp, synthetic construct
  source 1..20: mol_type = other DNA
tgggagggcggagggcgggg

SEQ ID NO: 20055 - DNA, 20 bp, synthetic construct
  source 1..20: mol_type = other DNA
aggagctggcctatcactac

SEQ ID NO: 20056 - DNA, 20 bp, synthetic construct
  source 1..20: mol_type = other DNA
cagataatgagaggaaatgc

SEQ ID NO: 20057 - DNA, 20 bp, synthetic construct
  source 1..20: mol_type = other DNA
gcatgcactgctgagcccga

SEQ ID NO: 20058 - DNA, 20 bp, synthetic construct
  source 1..20: mol_type = other DNA
ctctccgatgactttgccca

SEQ ID NO: 20059 - DNA, 20 bp, synthetic construct
  source 1..20: mol_type = other DNA
aggccctgccacccaccttc

SEQ ID NO: 20060 - DNA, 20 bp, synthetic construct
  source 1..20: mol_type = other DNA
cccatcccggctgcttttgc

SEQ ID NO: 20061 - DNA, 20 bp, synthetic construct
  source 1..20: mol_type = other DNA
cttcaagcccagcgagcatg

SEQ ID NO: 20062 - DNA, 20 bp, synthetic construct
  source 1..20: mol_type = other DNA
gccgaagcaggagccggcgg

SEQ ID NO: 20063 - DNA, 20 bp, synthetic construct
  source 1..20: mol_type = other DNA
tgtctgagcagtggaatgtg

SEQ ID NO: 20064 - DNA, 20 bp, synthetic construct
  source 1..20: mol_type = other DNA
atggaagaagttagctgtag

SEQ ID NO: 20065 - DNA, 20 bp, synthetic construct
  source 1..20: mol_type = other DNA
cagagctcagcttggtcccg

SEQ ID NO: 20066 - DNA, 20 bp, synthetic construct
  source 1..20: mol_type = other DNA
ggaggaggagccgccgccac

SEQ ID NO: 20067 - DNA, 20 bp, synthetic construct
  source 1..20: mol_type = other DNA
tcctcaaagcttctcgccat

SEQ ID NO: 20068 - DNA, 20 bp, synthetic construct
  source 1..20: mol_type = other DNA
ggctccgtccgctccctgga

SEQ ID NO: 20069 - DNA, 20 bp, synthetic construct
  source 1..20: mol_type = other DNA
tctttatatcctgacactat

SEQ ID NO: 20070 - DNA, 20 bp, synthetic construct
  source 1..20: mol_type = other DNA
ctttgcagcagatgtgtgac

SEQ ID NO: 20071 - DNA, 20 bp, synthetic construct
  source 1..20: mol_type = other DNA
cgctcccgtgcagacccgtg

SEQ ID NO: 20072 - DNA, 20 bp, synthetic construct
  source 1..20: mol_type = other DNA
agcggttattgagcattcgc

SEQ ID NO: 20073 - DNA, 20 bp, synthetic construct
  source 1..20: mol_type = other DNA
aagttctgagccccacaggt

SEQ ID NO: 20074 - DNA, 20 bp, synthetic construct
  source 1..20: mol_type = other DNA
atccccatagtgctgggtta

SEQ ID NO: 20075 - DNA, 20 bp, synthetic construct
  source 1..20: mol_type = other DNA
cccccacaggcagagctgac

SEQ ID NO: 20076 - DNA, 20 bp, synthetic construct
  source 1..20: mol_type = other DNA
cccacggaagccagttccaa

SEQ ID NO: 20077 - DNA, 20 bp, synthetic construct
  source 1..20: mol_type = other DNA
gttctctccatcgccttgtc

SEQ ID NO: 20078 - DNA, 20 bp, synthetic construct
  source 1..20: mol_type = other DNA
gcaaaaaaccgaatcttcag

SEQ ID NO: 20079 - DNA, 20 bp, synthetic construct
  source 1..20: mol_type = other DNA
acaagattattgatggcgcc

SEQ ID NO: 20080 - DNA, 20 bp, synthetic construct
  source 1..20: mol_type = other DNA
ccaggctggagtgcagtggt

SEQ ID NO: 20081 - DNA, 20 bp, synthetic construct
  source 1..20: mol_type = other DNA
tgcggggtgagaggccaggg

SEQ ID NO: 20082 - DNA, 20 bp, synthetic construct
  source 1..20: mol_type = other DNA
aggagggaggacagaggcca

SEQ ID NO: 20083 - DNA, 20 bp, synthetic construct
  source 1..20: mol_type = other DNA
aacaagtcaactaaggggtt

SEQ ID NO: 20084 - DNA, 20 bp, synthetic construct
  source 1..20: mol_type = other DNA
gtaggtttgctgtggaacgt

SEQ ID NO: 20085 - DNA, 20 bp, synthetic construct
  source 1..20: mol_type = other DNA
gtggcccagcctgctgagaa

SEQ ID NO: 20086 - DNA, 20 bp, synthetic construct
  source 1..20: mol_type = other DNA
acaggtgaaaattctggatc

SEQ ID NO: 20087 - DNA, 20 bp, synthetic construct
  source 1..20: mol_type = other DNA
ttcgtcagctgacaaagaca

SEQ ID NO: 20088 - DNA, 20 bp, synthetic construct
  source 1..20: mol_type = other DNA
ggaaggagacatcgaagcag

SEQ ID NO: 20089 - DNA, 20 bp, synthetic construct
  source 1..20: mol_type = other DNA
caggggacagggagagcaag

SEQ ID NO: 20090 - DNA, 20 bp, synthetic construct
  source 1..20: mol_type = other DNA
cacaggggcccccatgtagt

SEQ ID NO: 20091 - DNA, 20 bp, synthetic construct
  source 1..20: mol_type = other DNA
atccaggagtacaactcgaa

SEQ ID NO: 20092 - DNA, 20 bp, synthetic construct
  source 1..20: mol_type = other DNA
acctggaagagcggaagaag

SEQ ID NO: 20093 - DNA, 20 bp, synthetic construct
  source 1..20: mol_type = other DNA
actcctggcctcaagtgatc

SEQ ID NO: 20094 - DNA, 20 bp, synthetic construct
  source 1..20: mol_type = other DNA
ttggaagctggctcaagtac

SEQ ID NO: 20095 - DNA, 20 bp, synthetic construct
  source 1..20: mol_type = other DNA
tcaccacctgaaccacgggc

SEQ ID NO: 20096 - DNA, 20 bp, synthetic construct
  source 1..20: mol_type = other DNA
gccaggaggcgcctgagatt

SEQ ID NO: 20097 - DNA, 20 bp, synthetic construct
  source 1..20: mol_type = other DNA
atccagcacatgcacattga

SEQ ID NO: 20098 - DNA, 20 bp, synthetic construct
  source 1..20: mol_type = other DNA
tgctctcagccaaccgcctc

SEQ ID NO: 20099 - DNA, 20 bp, synthetic construct
  source 1..20: mol_type = other DNA
gccaggccacccgggactac

SEQ ID NO: 20100 - DNA, 20 bp, synthetic construct
  source 1..20: mol_type = other DNA
gaagaaaggtgcatggctgc

SEQ ID NO: 20101 - DNA, 20 bp, synthetic construct
  source 1..20: mol_type = other DNA
tgcaatcgcatctttgtaat

SEQ ID NO: 20102 - DNA, 20 bp, synthetic construct
  source 1..20: mol_type = other DNA
gagccaggagtccggggtcg

SEQ ID NO: 20103 - DNA, 20 bp, synthetic construct
  source 1..20: mol_type = other DNA
agaaaaggactctctggaac

SEQ ID NO: 20104 - DNA, 20 bp, synthetic construct
  source 1..20: mol_type = other DNA
gcggcggcggcatcagtcga

SEQ ID NO: 20105 - DNA, 20 bp, synthetic construct
  source 1..20: mol_type = other DNA
caggaggcttccgaccccac

SEQ ID NO: 20106 - DNA, 20 bp, synthetic construct
  source 1..20: mol_type = other DNA
cccaggctggagtgcagtgg

SEQ ID NO: 20107 - DNA, 20 bp, synthetic construct
  source 1..20: mol_type = other DNA
cctaggctggagtgcattgg

SEQ ID NO: 20108 - DNA, 20 bp, synthetic construct
  source 1..20: mol_type = other DNA
cgtcagtgcgcgctggcgca

SEQ ID NO: 20109 - DNA, 20 bp, synthetic construct
  source 1..20: mol_type = other DNA
cgcgcggcaggcgcggccat

SEQ ID NO: 20110 - DNA, 20 bp, synthetic construct
  source 1..20: mol_type = other DNA
gcaggccaggggcactgtga

SEQ ID NO: 20111 - DNA, 20 bp, synthetic construct
  source 1..20: mol_type = other DNA
ggggaccctcagccttgggg

SEQ ID NO: 20112 - DNA, 20 bp, synthetic construct
  source 1..20: mol_type = other DNA
tcctccttaccccgcctccc

SEQ ID NO: 20113 - DNA, 20 bp, synthetic construct
  source 1..20: mol_type = other DNA
gagaggcatgggcacgtggc

SEQ ID NO: 20114 - DNA, 20 bp, synthetic construct
  source 1..20: mol_type = other DNA
ggtggtgaggcaggctcgcc

SEQ ID NO: 20115 - DNA, 20 bp, synthetic construct
  source 1..20: mol_type = other DNA
cccgagcggcagccccaacc

SEQ ID NO: 20116 - DNA, 20 bp, synthetic construct
  source 1..20: mol_type = other DNA
ccgtcggccgcggtgaatcc

SEQ ID NO: 20117 - DNA, 20 bp, synthetic construct
  source 1..20: mol_type = other DNA
ctctggaggaagactggagc

SEQ ID NO: 20118 - DNA, 20 bp, synthetic construct
  source 1..20: mol_type = other DNA
gacagattgtccgggcaaac

SEQ ID NO: 20119 - DNA, 20 bp, synthetic construct
  source 1..20: mol_type = other DNA
agacacacacactcttggag

SEQ ID NO: 20120 - DNA, 20 bp, synthetic construct
  source 1..20: mol_type = other DNA
gaatcacatttcagcatgag

SEQ ID NO: 20121 - DNA, 20 bp, synthetic construct
  source 1..20: mol_type = other DNA
ggctggagcttccgggccct

SEQ ID NO: 20122 - DNA, 20 bp, synthetic construct
  source 1..20: mol_type = other DNA
tccatcgtgtgggaagaacg

SEQ ID NO: 20123 - DNA, 20 bp, synthetic construct
  source 1..20: mol_type = other DNA
cacccttctcccctcagaga

SEQ ID NO: 20124 - DNA, 20 bp, synthetic construct
  source 1..20: mol_type = other DNA
aagctcccggcgtctgcacc

SEQ ID NO: 20125 - DNA, 20 bp, synthetic construct
  source 1..20: mol_type = other DNA
gggggagggcgtcgcgggca

SEQ ID NO: 20126 - DNA, 20 bp, synthetic construct
  source 1..20: mol_type = other DNA
gggccgctggaccccgttgc

SEQ ID NO: 20127 - DNA, 20 bp, synthetic construct
  source 1..20: mol_type = other DNA
cccatctcgggcagaggctg

SEQ ID NO: 20128 - DNA, 20 bp, synthetic construct
  source 1..20: mol_type = other DNA
tgggctcagtaaggtcctcc

SEQ ID NO: 20129 - DNA, 20 bp, synthetic construct
  source 1..20: mol_type = other DNA
cgccgggcactgctgatgct

SEQ ID NO: 20130 - DNA, 20 bp, synthetic construct
  source 1..20: mol_type = other DNA
ataaagggggaagactttaa

SEQ ID NO: 20131 - DNA, 20 bp, synthetic construct
  source 1..20: mol_type = other DNA
tttaaaacagtttttgttaa

SEQ ID NO: 20132 - DNA, 20 bp, synthetic construct
  source 1..20: mol_type = other DNA
ccggttgtcttcctgtcggt

SEQ ID NO: 20133 - DNA, 20 bp, synthetic construct
  source 1..20: mol_type = other DNA
ctcatgtgccggcaccgggc

SEQ ID NO: 20134 - DNA, 20 bp, synthetic construct
  source 1..20: mol_type = other DNA
gttggctcgccgctctttgc

SEQ ID NO: 20135 - DNA, 20 bp, synthetic construct
  source 1..20: mol_type = other DNA
atcgatggacgcattcagaa

SEQ ID NO: 20136 - DNA, 20 bp, synthetic construct
  source 1..20: mol_type = other DNA
atccctccagagcattcaaa

SEQ ID NO: 20137 - DNA, 20 bp, synthetic construct
  source 1..20: mol_type = other DNA
tgagtggatgtgattggcga

SEQ ID NO: 20138 - DNA, 20 bp, synthetic construct
  source 1..20: mol_type = other DNA
aggcaccgtgatgtggagtc

SEQ ID NO: 20139 - DNA, 20 bp, synthetic construct
  source 1..20: mol_type = other DNA
cacggggctgcgtggaaaga

SEQ ID NO: 20140 - DNA, 20 bp, synthetic construct
  source 1..20: mol_type = other DNA
ctgggaggtctcctcccacc

SEQ ID NO: 20141 - DNA, 20 bp, synthetic construct
  source 1..20: mol_type = other DNA
gagtcctcgcgtgaaataag

SEQ ID NO: 20142 - DNA, 20 bp, synthetic construct
  source 1..20: mol_type = other DNA
gtaaattaccataaagcctc

SEQ ID NO: 20143 - DNA, 20 bp, synthetic construct
  source 1..20: mol_type = other DNA
ccatcctctgggtgaggagc

SEQ ID NO: 20144 - DNA, 20 bp, synthetic construct
  source 1..20: mol_type = other DNA
gcacggatgctgagcagaga

SEQ ID NO: 20145 - DNA, 20 bp, synthetic construct
  source 1..20: mol_type = other DNA
tcgttgtggctccttgggct

SEQ ID NO: 20146 - DNA, 20 bp, synthetic construct
  source 1..20: mol_type = other DNA
ccagggcctggagacccgtg

SEQ ID NO: 20147 - DNA, 20 bp, synthetic construct
  source 1..20: mol_type = other DNA
agagagattccctgctctcc

SEQ ID NO: 20148 - DNA, 20 bp, synthetic construct
  source 1..20: mol_type = other DNA
ggagctgcaaaagctgggga

SEQ ID NO: 20149 - DNA, 20 bp, synthetic construct
  source 1..20: mol_type = other DNA
gcctcatgcctctgacaacc

SEQ ID NO: 20150 - DNA, 20 bp, synthetic construct
  source 1..20: mol_type = other DNA
cgatcgcccagggccccgga

SEQ ID NO: 20151 - DNA, 20 bp, synthetic construct
  source 1..20: mol_type = other DNA
gcgagaagcagtcgggtttg

SEQ ID NO: 20152 - DNA, 20 bp, synthetic construct
  source 1..20: mol_type = other DNA
gctgcctctcccgtggtctg

SEQ ID NO: 20153 - DNA, 20 bp, synthetic construct
  source 1..20: mol_type = other DNA
cgtttcctgggtggctcccc

SEQ ID NO: 20154 - DNA, 20 bp, synthetic construct
  source 1..20: mol_type = other DNA
gtccacaatggaaggcttct

SEQ ID NO: 20155 - DNA, 20 bp, synthetic construct
  source 1..20: mol_type = other DNA
cggagagcgtagcgcggcct

SEQ ID NO: 20156 - DNA, 20 bp, synthetic construct
  source 1..20: mol_type = other DNA
gatgtaaatggaccaaaagt

SEQ ID NO: 20157 - DNA, 20 bp, synthetic construct
  source 1..20: mol_type = other DNA
acccaggcttcacacatttg

SEQ ID NO: 20158 - DNA, 20 bp, synthetic construct
  source 1..20: mol_type = other DNA
aacttgacaactttcctttc

SEQ ID NO: 20159 - DNA, 20 bp, synthetic construct
  source 1..20: mol_type = other DNA
ggggaccatgcagcggagcc

SEQ ID NO: 20160 - DNA, 20 bp, synthetic construct
  source 1..20: mol_type = other DNA
tcaccaacagatgaagacag

SEQ ID NO: 20161 - DNA, 20 bp, synthetic construct
  source 1..20: mol_type = other DNA
ctgcctttctcctcccgttg

SEQ ID NO: 20162 - DNA, 20 bp, synthetic construct
  source 1..20: mol_type = other DNA
tatgtaagaaggatggggca

SEQ ID NO: 20163 - DNA, 20 bp, synthetic construct
  source 1..20: mol_type = other DNA
ggcaagggtccacccagcca

SEQ ID NO: 20164 - DNA, 20 bp, synthetic construct
  source 1..20: mol_type = other DNA
aactccaattgctccagttc

SEQ ID NO: 20165 - DNA, 20 bp, synthetic construct
  source 1..20: mol_type = other DNA
gaagtaaaatagaaagaaga

SEQ ID NO: 20166 - DNA, 20 bp, synthetic construct
  source 1..20: mol_type = other DNA
tgctgcccttctgaggcctg

SEQ ID NO: 20167 - DNA, 20 bp, synthetic construct
  source 1..20: mol_type = other DNA
cggggccggaagacaggtgc

SEQ ID NO: 20168 - DNA, 20 bp, synthetic construct
  source 1..20: mol_type = other DNA
ccgcccccagacacgccggg

SEQ ID NO: 20169 - DNA, 20 bp, synthetic construct
  source 1..20: mol_type = other DNA
ggcggcgatggcggtcgggg

SEQ ID NO: 20170 - DNA, 20 bp, synthetic construct
  source 1..20: mol_type = other DNA
tcgccgtcttccagcgcaag

SEQ ID NO: 20171 - DNA, 20 bp, synthetic construct
  source 1..20: mol_type = other DNA
actgggcaaggcggtggtgg

SEQ ID NO: 20172 - DNA, 20 bp, synthetic construct
  source 1..20: mol_type = other DNA
acccgagttacctgtagtca

SEQ ID NO: 20173 - DNA, 20 bp, synthetic construct
  source 1..20: mol_type = other DNA
taaagaagcagccccgccct

SEQ ID NO: 20174 - DNA, 20 bp, synthetic construct
  source 1..20: mol_type = other DNA
gccccaactgcaccatccct

SEQ ID NO: 20175 - DNA, 20 bp, synthetic construct
  source 1..20: mol_type = other DNA
agggtccccgtggccccgag

SEQ ID NO: 20176 - DNA, 20 bp, synthetic construct
  source 1..20: mol_type = other DNA
acaaaagaaagaacgtcttc

SEQ ID NO: 20177 - DNA, 20 bp, synthetic construct
  source 1..20: mol_type = other DNA
ggcctgacctcagttgttcc

SEQ ID NO: 20178 - DNA, 20 bp, synthetic construct
  source 1..20: mol_type = other DNA
cgggaccgggggggatagat

SEQ ID NO: 20179 - DNA, 20 bp, synthetic construct
  source 1..20: mol_type = other DNA
tcacttctcgccggagtgtg

SEQ ID NO: 20180 - DNA, 20 bp, synthetic construct
  source 1..20: mol_type = other DNA
ttgggccctctgctcctctg

SEQ ID NO: 20181 - DNA, 20 bp, synthetic construct
  source 1..20: mol_type = other DNA
tgcccgggtcaccagtcggg

SEQ ID NO: 20182 - DNA, 20 bp, synthetic construct
  source 1..20: mol_type = other DNA
tgggctgggaacccgcggtg

SEQ ID NO: 20183 - DNA, 20 bp, synthetic construct
  source 1..20: mol_type = other DNA
tggctcggagactcctgcct

SEQ ID NO: 20184 - DNA, 20 bp, synthetic construct
  source 1..20: mol_type = other DNA
gtgcttccactgataacata

SEQ ID NO: 20185 - DNA, 20 bp, synthetic construct
  source 1..20: mol_type = other DNA
attacaggcctttgagccca

SEQ ID NO: 20186 - DNA, 20 bp, synthetic construct
  source 1..20: mol_type = other DNA
ctgttgctttgtaaaaatgc

SEQ ID NO: 20187 - DNA, 20 bp, synthetic construct
  source 1..20: mol_type = other DNA
gaactgcccagggaccatcc

SEQ ID NO: 20188 - DNA, 20 bp, synthetic construct
  source 1..20: mol_type = other DNA
cgctcttgttgcccaggctg

SEQ ID NO: 20189 - DNA, 20 bp, synthetic construct
  source 1..20: mol_type = other DNA
ccggcgactgcagcttcccc

SEQ ID NO: 20190 - DNA, 20 bp, synthetic construct
  source 1..20: mol_type = other DNA
ggagtttcttggtcacagga

SEQ ID NO: 20191 - DNA, 20 bp, synthetic construct
  source 1..20: mol_type = other DNA
ccaaggtggagaaaccagga

SEQ ID NO: 20192 - DNA, 20 bp, synthetic construct
  source 1..20: mol_type = other DNA
ggaatggccaaatatcaaga

SEQ ID NO: 20193 - DNA, 20 bp, synthetic construct
  source 1..20: mol_type = other DNA
ggtttctttcactacttatc

SEQ ID NO: 20194 - DNA, 20 bp, synthetic construct
  source 1..20: mol_type = other DNA
aggggtgaggcggtgtctcc

SEQ ID NO: 20195 - DNA, 20 bp, synthetic construct
  source 1..20: mol_type = other DNA
agaacactaccgttcaagag

SEQ ID NO: 20196 - DNA, 20 bp, synthetic construct
  source 1..20: mol_type = other DNA
tgtcccatgacgctctggga

SEQ ID NO: 20197 - DNA, 20 bp, synthetic construct
  source 1..20: mol_type = other DNA
tttccttaccaatcggctgc

SEQ ID NO: 20198 - DNA, 20 bp, synthetic construct
  source 1..20: mol_type = other DNA
cgtccgttccctaagcagac

SEQ ID NO: 20199 - DNA, 20 bp, synthetic construct
  source 1..20: mol_type = other DNA
ggctagtgcaaggatcagat

SEQ ID NO: 20200 - DNA, 20 bp, synthetic construct
  source 1..20: mol_type = other DNA
aacctggatctggagccggg

SEQ ID NO: 20201 - DNA, 20 bp, synthetic construct
  source 1..20: mol_type = other DNA
ccaggccccgcagcccatgg

SEQ ID NO: 20202 - DNA, 20 bp, synthetic construct
  source 1..20: mol_type = other DNA
cccggagcctctccctgggc

SEQ ID NO: 20203 - DNA, 20 bp, synthetic construct
  source 1..20: mol_type = other DNA
gtgggtcgctgatttcttgg

SEQ ID NO: 20204 - DNA, 20 bp, synthetic construct
  source 1..20: mol_type = other DNA
ctgcaccctccacctcccgc

SEQ ID NO: 20205 - DNA, 20 bp, synthetic construct
  source 1..20: mol_type = other DNA
gtacggcttgcggcttaagc

SEQ ID NO: 20206 - DNA, 20 bp, synthetic construct
  source 1..20: mol_type = other DNA
catgtctgtgttctggctcc

SEQ ID NO: 20207 - DNA, 20 bp, synthetic construct
  source 1..20: mol_type = other DNA
cctgcatcctcctctgctca

SEQ ID NO: 20208 - DNA, 20 bp, synthetic construct
  source 1..20: mol_type = other DNA
atggcggcgctggcagcagc

SEQ ID NO: 20209 - DNA, 20 bp, synthetic construct
  source 1..20: mol_type = other DNA
ttccctcaccaggaacccag

SEQ ID NO: 20210 - DNA, 20 bp, synthetic construct
  source 1..20: mol_type = other DNA
atgagatgaagtgagtttcc

SEQ ID NO: 20211 - DNA, 20 bp, synthetic construct
  source 1..20: mol_type = other DNA
catcttcacctccacaatcg

SEQ ID NO: 20212 - DNA, 20 bp, synthetic construct
  source 1..20: mol_type = other DNA
agtcgggggagtcgtaaaca

SEQ ID NO: 20213 - DNA, 20 bp, synthetic construct
  source 1..20: mol_type = other DNA
gaggaggtgagcgccaggtc

SEQ ID NO: 20214 - DNA, 20 bp, synthetic construct
  source 1..20: mol_type = other DNA
acaaccaccgccacctccta

SEQ ID NO: 20215 - DNA, 20 bp, synthetic construct
  source 1..20: mol_type = other DNA
agagttcagagagggggtgt

SEQ ID NO: 20216 - DNA, 20 bp, synthetic construct
  source 1..20: mol_type = other DNA
tcttgctgagcacattgaaa

SEQ ID NO: 20217 - DNA, 20 bp, synthetic construct
  source 1..20: mol_type = other DNA
gcggccctgcgcccccagcc

SEQ ID NO: 20218 - DNA, 20 bp, synthetic construct
  source 1..20: mol_type = other DNA
ctctggctacactgaaaggc

SEQ ID NO: 20219 - DNA, 20 bp, synthetic construct
  source 1..20: mol_type = other DNA
gaagataaatgttactcctc

SEQ ID NO: 20220 - DNA, 20 bp, synthetic construct
  source 1..20: mol_type = other DNA
cgcgatgggcctcttggaac

SEQ ID NO: 20221 - DNA, 20 bp, synthetic construct
  source 1..20: mol_type = other DNA
cccgccgatcaggttccttt

SEQ ID NO: 20222 - DNA, 20 bp, synthetic construct
  source 1..20: mol_type = other DNA
acggaggcttcgcgggaaga

SEQ ID NO: 20223 - DNA, 20 bp, synthetic construct
  source 1..20: mol_type = other DNA
ctctctctgccaccatttcg

SEQ ID NO: 20224 - DNA, 20 bp, synthetic construct
  source 1..20: mol_type = other DNA
tagggcgtggtgcttgctcc

SEQ ID NO: 20225 - DNA, 20 bp, synthetic construct
  source 1..20: mol_type = other DNA
tcattatacctctttatcca

SEQ ID NO: 20226 - DNA, 20 bp, synthetic construct
  source 1..20: mol_type = other DNA
gctgaactccctgaggtctc

SEQ ID NO: 20227 - DNA, 20 bp, synthetic construct
  source 1..20: mol_type = other DNA
agatccacttcttcctagcc

SEQ ID NO: 20228 - DNA, 20 bp, synthetic construct
  source 1..20: mol_type = other DNA
ccgttgcccggccctctccc

SEQ ID NO: 20229 - DNA, 20 bp, synthetic construct
  source 1..20: mol_type = other DNA
tccgccgcccgccccgaccc

SEQ ID NO: 20230 - DNA, 20 bp, synthetic construct
  source 1..20: mol_type = other DNA
cagggcaagctccccgtctc

SEQ ID NO: 20231 - DNA, 20 bp, synthetic construct
  source 1..20: mol_type = other DNA
tggccgctgcacaagaacct

SEQ ID NO: 20232 - DNA, 20 bp, synthetic construct
  source 1..20: mol_type = other DNA
aggcattgaggaactcaatc

SEQ ID NO: 20233 - DNA, 20 bp, synthetic construct
  source 1..20: mol_type = other DNA
aaatcgatcctcctaccttg

SEQ ID NO: 20234 - DNA, 20 bp, synthetic construct
  source 1..20: mol_type = other DNA
tcttgcttcaggaaggtgaa

SEQ ID NO: 20235 - DNA, 20 bp, synthetic construct
  source 1..20: mol_type = other DNA
ccttgggaacatgggagagg

SEQ ID NO: 20236 - DNA, 20 bp, synthetic construct
  source 1..20: mol_type = other DNA
aaaaaaaaggattcaatagt

SEQ ID NO: 20237 - DNA, 20 bp, synthetic construct
  source 1..20: mol_type = other DNA
tgtaagtaaaccagagcgaa

SEQ ID NO: 20238 - DNA, 20 bp, synthetic construct
  source 1..20: mol_type = other DNA
acgcggtggcttagacgcgc

SEQ ID NO: 20239 - DNA, 20 bp, synthetic construct
  source 1..20: mol_type = other DNA
atcactcctgaagatcttct

SEQ ID NO: 20240 - DNA, 20 bp, synthetic construct
  source 1..20: mol_type = other DNA
ccgtgtatgcctcccacaag

SEQ ID NO: 20241 - DNA, 20 bp, synthetic construct
  source 1..20: mol_type = other DNA
ccctcagagtgctcccttca

SEQ ID NO: 20242 - DNA, 20 bp, synthetic construct
  source 1..20: mol_type = other DNA
ccctttgcccatccttcctt

SEQ ID NO: 20243 - DNA, 20 bp, synthetic construct
  source 1..20: mol_type = other DNA
cattttcaatagaaacgaag

SEQ ID NO: 20244 - DNA, 20 bp, synthetic construct
  source 1..20: mol_type = other DNA
ggctggaatatagtggcaca

SEQ ID NO: 20245 - DNA, 20 bp, synthetic construct
  source 1..20: mol_type = other DNA
cactaagccgtagcggcagc

SEQ ID NO: 20246 - DNA, 20 bp, synthetic construct
  source 1..20: mol_type = other DNA
gtccctgcagacggcttccc

SEQ ID NO: 20247 - DNA, 20 bp, synthetic construct
  source 1..20: mol_type = other DNA
atagaaggcagaacaacaac

SEQ ID NO: 20248 - DNA, 20 bp, synthetic construct
  source 1..20: mol_type = other DNA
tgaggagctgtccgtgtgca

SEQ ID NO: 20249 - DNA, 20 bp, synthetic construct
  source 1..20: mol_type = other DNA
caaggctcccaccccgcctg

SEQ ID NO: 20250 - DNA, 20 bp, synthetic construct
  source 1..20: mol_type = other DNA
tcaagaaccagggtctgtca

SEQ ID NO: 20251 - DNA, 20 bp, synthetic construct
  source 1..20: mol_type = other DNA
tcagcctgcagacagcctat

SEQ ID NO: 20252 - DNA, 20 bp, synthetic construct
  source 1..20: mol_type = other DNA
gaccgcagtcgagtctgcag

SEQ ID NO: 20253 - DNA, 20 bp, synthetic construct
  source 1..20: mol_type = other DNA
tacagattgtggagagctgc

SEQ ID NO: 20254 - DNA, 20 bp, synthetic construct
  source 1..20: mol_type = other DNA
ggaggaaaggaaaagacaga

SEQ ID NO: 20255 - DNA, 20 bp, synthetic construct
  source 1..20: mol_type = other DNA
cgggaagggcgcggggcgga

SEQ ID NO: 20256 - DNA, 20 bp, synthetic construct
  source 1..20: mol_type = other DNA
acggccctgctcatcacatg

SEQ ID NO: 20257 - DNA, 20 bp, synthetic construct
  source 1..20: mol_type = other DNA
ggtctgaagacggatggagt

SEQ ID NO: 20258 - DNA, 20 bp, synthetic construct
  source 1..20: mol_type = other DNA
ttaagtgtatcgagctgata

SEQ ID NO: 20259 - DNA, 20 bp, synthetic construct
  source 1..20: mol_type = other DNA
gacgcgagcgcggggcgggt

SEQ ID NO: 20260 - DNA, 20 bp, synthetic construct
  source 1..20: mol_type = other DNA
cctaggagtgctacgggggg

SEQ ID NO: 20261 - DNA, 20 bp, synthetic construct
  source 1..20: mol_type = other DNA
cggagcccaggccgggagca

SEQ ID NO: 20262 - DNA, 20 bp, synthetic construct
  source 1..20: mol_type = other DNA
cctggcttccctgcgctgca

SEQ ID NO: 20263 - DNA, 20 bp, synthetic construct
  source 1..20: mol_type = other DNA
tcaatgacaggagccagcct

SEQ ID NO: 20264 - DNA, 20 bp, synthetic construct
  source 1..20: mol_type = other DNA
tgcggagcctctcccgctcg

SEQ ID NO: 20265 - DNA, 20 bp, synthetic construct
  source 1..20: mol_type = other DNA
tgtccttccgaacgcacact

SEQ ID NO: 20266 - DNA, 20 bp, synthetic construct
  source 1..20: mol_type = other DNA
cctctgaggttttccattta

SEQ ID NO: 20267 - DNA, 20 bp, synthetic construct
  source 1..20: mol_type = other DNA
gcctgaaaggcagctctcag

SEQ ID NO: 20268 - DNA, 20 bp, synthetic construct
  source 1..20: mol_type = other DNA
gtagagatgacttctacccg

SEQ ID NO: 20269 - DNA, 20 bp, synthetic construct
  source 1..20: mol_type = other DNA
accgtccctgtgttccccac

SEQ ID NO: 20270 - DNA, 20 bp, synthetic construct
  source 1..20: mol_type = other DNA
cccagctgggaggctgtggc

SEQ ID NO: 20271 - DNA, 20 bp, synthetic construct
  source 1..20: mol_type = other DNA
gagtgttgttctacctgcgc

SEQ ID NO: 20272 - DNA, 20 bp, synthetic construct
  source 1..20: mol_type = other DNA
cggctggcaagaagaggatg

SEQ ID NO: 20273 - DNA, 20 bp, synthetic construct
  source 1..20: mol_type = other DNA
agctcttctgcctggaacac

SEQ ID NO: 20274 - DNA, 20 bp, synthetic construct
  source 1..20: mol_type = other DNA
atggcatcgaccccagcggc

SEQ ID NO: 20275 - DNA, 20 bp, synthetic construct
  source 1..20: mol_type = other DNA
cagagttggaggtggtggcg

SEQ ID NO: 20276 - DNA, 20 bp, synthetic construct
  source 1..20: mol_type = other DNA
cctcaaactagccaatgaga

SEQ ID NO: 20277 - DNA, 20 bp, synthetic construct
  source 1..20: mol_type = other DNA
cgacgctcctcgggaagcca

SEQ ID NO: 20278 - DNA, 20 bp, synthetic construct
  source 1..20: mol_type = other DNA
cagaaaacagctgaaacgga

SEQ ID NO: 20279 - DNA, 20 bp, synthetic construct
  source 1..20: mol_type = other DNA
cccacccaccgcccccactg

SEQ ID NO: 20280 - DNA, 20 bp, synthetic construct
  source 1..20: mol_type = other DNA
atccagaggagtggaaggct

SEQ ID NO: 20281 - DNA, 20 bp, synthetic construct
  source 1..20: mol_type = other DNA
gctgttgtttccagcaagac

SEQ ID NO: 20282 - DNA, 20 bp, synthetic construct
  source 1..20: mol_type = other DNA
acacatttcctgaaggagtt

SEQ ID NO: 20283 - DNA, 20 bp, synthetic construct
  source 1..20: mol_type = other DNA
taggagggagcccgccgggg

SEQ ID NO: 20284 - DNA, 20 bp, synthetic construct
  source 1..20: mol_type = other DNA
ctcggaagggtctttgttcc

SEQ ID NO: 20285 - DNA, 20 bp, synthetic construct
  source 1..20: mol_type = other DNA
aggaggagaagcggcggcgc

SEQ ID NO: 20286 - DNA, 20 bp, synthetic construct
  source 1..20: mol_type = other DNA
ggggccggcggtggcggagc

SEQ ID NO: 20287 - DNA, 20 bp, synthetic construct
  source 1..20: mol_type = other DNA
tgttttcttgcataaaattc

SEQ ID NO: 20288 - DNA, 20 bp, synthetic construct
  source 1..20: mol_type = other DNA
tggtttcatagccttctccc

SEQ ID NO: 20289 - DNA, 20 bp, synthetic construct
  source 1..20: mol_type = other DNA
ccgacgaggagctgaaccag

SEQ ID NO: 20290 - DNA, 20 bp, synthetic construct
  source 1..20: mol_type = other DNA
ctgctaatgagacttgttga

SEQ ID NO: 20291 - DNA, 20 bp, synthetic construct
  source 1..20: mol_type = other DNA
cggcggcggcggcggtggag

SEQ ID NO: 20292 - DNA, 20 bp, synthetic construct
  source 1..20: mol_type = other DNA
cgcctgcacgtacgtagcct

SEQ ID NO: 20293 - DNA, 20 bp, synthetic construct
  source 1..20: mol_type = other DNA
tgaaccagttattaggggcg

SEQ ID NO: 20294 - DNA, 20 bp, synthetic construct
  source 1..20: mol_type = other DNA
accgggagatccagaagtga

SEQ ID NO: 20295 - DNA, 20 bp, synthetic construct
  source 1..20: mol_type = other DNA
ctcctggtctgcaacctctc

SEQ ID NO: 20296 - DNA, 20 bp, synthetic construct
  source 1..20: mol_type = other DNA
atttggacacacagagagat

SEQ ID NO: 20297 - DNA, 20 bp, synthetic construct
  source 1..20: mol_type = other DNA
gctagggagtgggactggca

SEQ ID NO: 20298 - DNA, 20 bp, synthetic construct
  source 1..20: mol_type = other DNA
gggtccagagagagggtcta

SEQ ID NO: 20299 - DNA, 20 bp, synthetic construct
  source 1..20: mol_type = other DNA
ttgacaaactgctgacagct

SEQ ID NO: 20300 - DNA, 20 bp, synthetic construct
  source 1..20: mol_type = other DNA
cccagtgctccataaaggat

SEQ ID NO: 20301 - DNA, 20 bp, synthetic construct
  source 1..20: mol_type = other DNA
ccatgtgttgctgagagatg

SEQ ID NO: 20302 - DNA, 20 bp, synthetic construct
  source 1..20: mol_type = other DNA
catgagttgctcctgacggc

SEQ ID NO: 20303 - DNA, 20 bp, synthetic construct
  source 1..20: mol_type = other DNA
caggaattcgaacgtttcgt

SEQ ID NO: 20304 - DNA, 20 bp, synthetic construct
  source 1..20: mol_type = other DNA
acgacatacaagatttttgc

SEQ ID NO: 20305 - DNA, 20 bp, synthetic construct
  source 1..20: mol_type = other DNA
agagaaaatttatgacattg

SEQ ID NO: 20306 - DNA, 20 bp, synthetic construct
  source 1..20: mol_type = other DNA
tcacggaggaggagaggaaa

SEQ ID NO: 20307 - DNA, 20 bp, synthetic construct
  source 1..20: mol_type = other DNA
tctacaagtccatctttgtc

SEQ ID NO: 20308 - DNA, 20 bp, synthetic construct
  source 1..20: mol_type = other DNA
gcaatgcctctccttgtttg

SEQ ID NO: 20309 - DNA, 20 bp, synthetic construct
  source 1..20: mol_type = other DNA
gcaaatgaaggggaaacaac

SEQ ID NO: 20310 - DNA, 20 bp, synthetic construct
  source 1..20: mol_type = other DNA
gtatgttgagtctaaaaagg

SEQ ID NO: 20311 - DNA, 20 bp, synthetic construct
  source 1..20: mol_type = other DNA
tggacaaaacaggacatgtt

SEQ ID NO: 20312 - DNA, 20 bp, synthetic construct
  source 1..20: mol_type = other DNA
gcagaggaagacaagaagaa

SEQ ID NO: 20313 - DNA, 20 bp, synthetic construct
  source 1..20: mol_type = other DNA
gagaaagaaagatctatgct

SEQ ID NO: 20314 - DNA, 20 bp, synthetic construct
  source 1..20: mol_type = other DNA
agccacgctattcaaagaca

SEQ ID NO: 20315 - DNA, 20 bp, synthetic construct
  source 1..20: mol_type = other DNA
agaacaatcaacctgtggag

SEQ ID NO: 20316 - DNA, 20 bp, synthetic construct
  source 1..20: mol_type = other DNA
agatctggacgatatgattg

SEQ ID NO: 20317 - DNA, 20 bp, synthetic construct
  source 1..20: mol_type = other DNA
aggaagaaagagggaagaca

SEQ ID NO: 20318 - DNA, 20 bp, synthetic construct
  source 1..20: mol_type = other DNA
gcctacatttaaaactgcaa

SEQ ID NO: 20319 - DNA, 20 bp, synthetic construct
  source 1..20: mol_type = other DNA
attgctggaaatcatcacca

SEQ ID NO: 20320 - DNA, 20 bp, synthetic construct
  source 1..20: mol_type = other DNA
ggtagcataaaaaaacaata

SEQ ID NO: 20321 - DNA, 20 bp, synthetic construct
  source 1..20: mol_type = other DNA
acgtggatagaatcacctaa

SEQ ID NO: 20322 - DNA, 20 bp, synthetic construct
  source 1..20: mol_type = other DNA
caaattcctccggaaacagg

SEQ ID NO: 20323 - DNA, 20 bp, synthetic construct
  source 1..20: mol_type = other DNA
gcagctggggccggacctgg

SEQ ID NO: 20324 - DNA, 20 bp, synthetic construct
  source 1..20: mol_type = other DNA
cgctgcgcaacagcatcgga

SEQ ID NO: 20325 - DNA, 20 bp, synthetic construct
  source 1..20: mol_type = other DNA
actgggtgcgcgactcggtt

SEQ ID NO: 20326 - DNA, 20 bp, synthetic construct
  source 1..20: mol_type = other DNA
gtcgccgccagaggagctgc

SEQ ID NO: 20327 - DNA, 20 bp, synthetic construct
  source 1..20: mol_type = other DNA
tgtggtgagctgtttgattc

SEQ ID NO: 20328 - DNA, 20 bp, synthetic construct
  source 1..20: mol_type = other DNA
gcgacggcgacggggacgac

SEQ ID NO: 20329 - DNA, 20 bp, synthetic construct
  source 1..20: mol_type = other DNA
cctcttcccgactggccatt

SEQ ID NO: 20330 - DNA, 20 bp, synthetic construct
  source 1..20: mol_type = other DNA
caacaaagcccgccaagagt

SEQ ID NO: 20331 - DNA, 20 bp, synthetic construct
  source 1..20: mol_type = other DNA
ttcccaactttgacgcggtg

SEQ ID NO: 20332 - DNA, 20 bp, synthetic construct
  source 1..20: mol_type = other DNA
gtttgtacctattgtcagct

SEQ ID NO: 20333 - DNA, 20 bp, synthetic construct
  source 1..20: mol_type = other DNA
gggatatgctccaggcgggc

SEQ ID NO: 20334 - DNA, 20 bp, synthetic construct
  source 1..20: mol_type = other DNA
atctgcagcctcgtcactgt

SEQ ID NO: 20335 - DNA, 20 bp, synthetic construct
  source 1..20: mol_type = other DNA
agatgccatgaaccacccta

SEQ ID NO: 20336 - DNA, 20 bp, synthetic construct
  source 1..20: mol_type = other DNA
gcgctggtccgtgcagacct

SEQ ID NO: 20337 - DNA, 20 bp, synthetic construct
  source 1..20: mol_type = other DNA
tacggtcacgccggcatggc

SEQ ID NO: 20338 - DNA, 20 bp, synthetic construct
  source 1..20: mol_type = other DNA
cgagtggtgttttttaatag

SEQ ID NO: 20339 - DNA, 20 bp, synthetic construct
  source 1..20: mol_type = other DNA
cgcgagccttcgtctcagag

SEQ ID NO: 20340 - DNA, 20 bp, synthetic construct
  source 1..20: mol_type = other DNA
acggggacacggacagcctt

SEQ ID NO: 20341 - DNA, 20 bp, synthetic construct
  source 1..20: mol_type = other DNA
gcgagtagagttttctcctc

SEQ ID NO: 20342 - DNA, 20 bp, synthetic construct
  source 1..20: mol_type = other DNA
aacgccacaacataaagaag

SEQ ID NO: 20343 - DNA, 20 bp, synthetic construct
  source 1..20: mol_type = other DNA
ggggttggggttattctctg

SEQ ID NO: 20344 - DNA, 20 bp, synthetic construct
  source 1..20: mol_type = other DNA
atttgcatttattgtcagct

SEQ ID NO: 20345 - DNA, 20 bp, synthetic construct
  source 1..20: mol_type = other DNA
ccacccaactttccccgcgc

SEQ ID NO: 20346 - DNA, 20 bp, synthetic construct
  source 1..20: mol_type = other DNA
cctcctgttcctgtccatcc

SEQ ID NO: 20347 - DNA, 20 bp, synthetic construct
  source 1..20: mol_type = other DNA
tgtgcaacatcttacaaatg

SEQ ID NO: 20348 - DNA, 20 bp, synthetic construct
  source 1..20: mol_type = other DNA
tcttcattttgaggttttgg

SEQ ID NO: 20349 - DNA, 20 bp, synthetic construct
  source 1..20: mol_type = other DNA
ttacgtcattttttagtcct

SEQ ID NO: 20350 - DNA, 20 bp, synthetic construct
  source 1..20: mol_type = other DNA
ggggtcttatgtagttttgt

SEQ ID NO: 20351 - DNA, 20 bp, synthetic construct
  source 1..20: mol_type = other DNA
tatgatctggaattggaaga

SEQ ID NO: 20352 - DNA, 20 bp, synthetic construct
  source 1..20: mol_type = other DNA
gcaacccgttcgctcatctg

SEQ ID NO: 20353 - DNA, 20 bp, synthetic construct
  source 1..20: mol_type = other DNA
gcgaccgagcgtgcgttcgt

SEQ ID NO: 20354 - DNA, 20 bp, synthetic construct
  source 1..20: mol_type = other DNA
tagtcgcgccgcgcgttctt

SEQ ID NO: 20355 - DNA, 20 bp, synthetic construct
  source 1..20: mol_type = other DNA
gtgtttatttaatgtgacgt

SEQ ID NO: 20356 - DNA, 20 bp, synthetic construct
  source 1..20: mol_type = other DNA
cagcaaattgactcccgccg

SEQ ID NO: 20357 - DNA, 20 bp, synthetic construct
  source 1..20: mol_type = other DNA
agaatggactctgacgctcc

SEQ ID NO: 20358 - DNA, 20 bp, synthetic construct
  source 1..20: mol_type = other DNA
agaggagaaaggaagaggtc

SEQ ID NO: 20359 - DNA, 20 bp, synthetic construct
  source 1..20: mol_type = other DNA
ctgcggtctggccttggaag

SEQ ID NO: 20360 - DNA, 20 bp, synthetic construct
  source 1..20: mol_type = other DNA
ggaactctccagttcgtgga

SEQ ID NO: 20361 - DNA, 20 bp, synthetic construct
  source 1..20: mol_type = other DNA
agtgcggattaccatcgaag

SEQ ID NO: 20362 - DNA, 20 bp, synthetic construct
  source 1..20: mol_type = other DNA
aaagagaaaatgccttaacc

SEQ ID NO: 20363 - DNA, 20 bp, synthetic construct
  source 1..20: mol_type = other DNA
tctaagatcttttttttttt

SEQ ID NO: 20364 - DNA, 20 bp, synthetic construct
  source 1..20: mol_type = other DNA
gtgtagcatagtctgcctgg

SEQ ID NO: 20365 - DNA, 20 bp, synthetic construct
  source 1..20: mol_type = other DNA
ataccgcaatcaaaatgttg

SEQ ID NO: 20366 - DNA, 20 bp, synthetic construct
  source 1..20: mol_type = other DNA
cagcacctcacttccctctt

SEQ ID NO: 20367 - DNA, 20 bp, synthetic construct
  source 1..20: mol_type = other DNA
aagcagtttggtgataatat

SEQ ID NO: 20368 - DNA, 20 bp, synthetic construct
  source 1..20: mol_type = other DNA
aggttttacgagggtcgagc

SEQ ID NO: 20369 - DNA, 20 bp, synthetic construct
  source 1..20: mol_type = other DNA
tggagcggagttcggttcca

SEQ ID NO: 20370 - DNA, 20 bp, synthetic construct
  source 1..20: mol_type = other DNA
gcctgttgctgcatcacgct

SEQ ID NO: 20371 - DNA, 20 bp, synthetic construct
  source 1..20: mol_type = other DNA
gtactagacacagataacaa

SEQ ID NO: 20372 - DNA, 20 bp, synthetic construct
  source 1..20: mol_type = other DNA
tcctgtgtttttacgtaggt

SEQ ID NO: 20373 - DNA, 20 bp, synthetic construct
  source 1..20: mol_type = other DNA
agaagagttttctccttcgc

SEQ ID NO: 20374 - DNA, 20 bp, synthetic construct
  source 1..20: mol_type = other DNA
aataggtgaccggaggtcgg

SEQ ID NO: 20375 - DNA, 20 bp, synthetic construct
  source 1..20: mol_type = other DNA
gatagggtccttgcgagggg

SEQ ID NO: 20376 - DNA, 20 bp, synthetic construct
  source 1..20: mol_type = other DNA
aaagaggttaaaacattaca

SEQ ID NO: 20377 - DNA, 20 bp, synthetic construct
  source 1..20: mol_type = other DNA
cgcctccgggtaagggacgc

SEQ ID NO: 20378 - DNA, 20 bp, synthetic construct
  source 1..20: mol_type = other DNA
aactcgtaagcggggcaacc

SEQ ID NO: 20379 - DNA, 20 bp, synthetic construct
  source 1..20: mol_type = other DNA
tggatccaccactctcgact

SEQ ID NO: 20380 - DNA, 20 bp, synthetic construct
  source 1..20: mol_type = other DNA
ccagtgtcttccgtttgtac

SEQ ID NO: 20381 - DNA, 20 bp, synthetic construct
  source 1..20: mol_type = other DNA
gaaagtggtgaaccgaaaac

SEQ ID NO: 20382 - DNA, 20 bp, synthetic construct
  source 1..20: mol_type = other DNA
ggaagggcaagttaattgta

SEQ ID NO: 20383 - DNA, 20 bp, synthetic construct
  source 1..20: mol_type = other DNA
acaggttttcccatttcctt

SEQ ID NO: 20384 - DNA, 20 bp, synthetic construct
  source 1..20: mol_type = other DNA
ttttgttgtcagtgtaagtc

SEQ ID NO: 20385 - DNA, 20 bp, synthetic construct
  source 1..20: mol_type = other DNA
ctccttaacttattgaaatt

SEQ ID NO: 20386 - DNA, 20 bp, synthetic construct
  source 1..20: mol_type = other DNA
aagaatgccctggaggcaag

SEQ ID NO: 20387 - DNA, 20 bp, synthetic construct
  source 1..20: mol_type = other DNA
cagcagcaggaacgcgggag

SEQ ID NO: 20388 - DNA, 20 bp, synthetic construct
  source 1..20: mol_type = other DNA
atttacatttccaaatccat

SEQ ID NO: 20389 - DNA, 20 bp, synthetic construct
  source 1..20: mol_type = other DNA
tttcctgccttttatataca

SEQ ID NO: 20390 - DNA, 20 bp, synthetic construct
  source 1..20: mol_type = other DNA
gggaacaccctttagtcctg

SEQ ID NO: 20391 - DNA, 20 bp, synthetic construct
  source 1..20: mol_type = other DNA
tgttgctgtggatgtgacag

SEQ ID NO: 20392 - DNA, 20 bp, synthetic construct
  source 1..20: mol_type = other DNA
ctgaggtactcaggggcatt

SEQ ID NO: 20393 - DNA, 20 bp, synthetic construct
  source 1..20: mol_type = other DNA
tactcaggggcatttaggtt

SEQ ID NO: 20394 - DNA, 20 bp, synthetic construct
  source 1..20: mol_type = other DNA
cgggccgaggtaccaaaggc

SEQ ID NO: 20395 - DNA, 20 bp, synthetic construct
  source 1..20: mol_type = other DNA
attggccagacaaggggagg

SEQ ID NO: 20396 - DNA, 20 bp, synthetic construct
  source 1..20: mol_type = other DNA
ccgccagctgattcgcctct

SEQ ID NO: 20397 - DNA, 20 bp, synthetic construct
  source 1..20: mol_type = other DNA
ggaaagtactaccccaaggg

SEQ ID NO: 20398 - DNA, 20 bp, synthetic construct
  source 1..20: mol_type = other DNA
cgaccactcatacaaccccc

SEQ ID NO: 20399 - DNA, 20 bp, synthetic construct
  source 1..20: mol_type = other DNA
gcccacggcaagtaccgcgg

SEQ ID NO: 20400 - DNA, 20 bp, synthetic construct
  source 1..20: mol_type = other DNA
ctatgaaaactgggcaataa

SEQ ID NO: 20401 - DNA, 20 bp, synthetic construct
  source 1..20: mol_type = other DNA
taatggatggaaatttcgag

SEQ ID NO: 20402 - DNA, 20 bp, synthetic construct
  source 1..20: mol_type = other DNA
taaccttaaaaattctccag

SEQ ID NO: 20403 - DNA, 20 bp, synthetic construct
  source 1..20: mol_type = other DNA
aattatgacagtaaccatga

SEQ ID NO: 20404 - DNA, 20 bp, synthetic construct
  source 1..20: mol_type = other DNA
gacgacgataagtcggcttt

SEQ ID NO: 20405 - DNA, 20 bp, synthetic construct
  source 1..20: mol_type = other DNA
aatgggcaaacccgagttct

SEQ ID NO: 20406 - DNA, 20 bp, synthetic construct
  source 1..20: mol_type = other DNA
agcagtttctttcgcctttc

SEQ ID NO: 20407 - DNA, 20 bp, synthetic construct
  source 1..20: mol_type = other DNA
ctcagtgcacttgtcatttc

SEQ ID NO: 20408 - DNA, 20 bp, synthetic construct
  source 1..20: mol_type = other DNA
tatatagaagaagaaatacc

SEQ ID NO: 20409 - DNA, 20 bp, synthetic construct
  source 1..20: mol_type = other DNA
tcaaaactcaccgccgagtc

SEQ ID NO: 20410 - DNA, 20 bp, synthetic construct
  source 1..20: mol_type = other DNA
ccatatcgttctttttgggt

SEQ ID NO: 20411 - DNA, 20 bp, synthetic construct
  source 1..20: mol_type = other DNA
cgtgtagcatttcaataaaa

SEQ ID NO: 20412 - DNA, 20 bp, synthetic construct
  source 1..20: mol_type = other DNA
tatgtcgaatgcgctgtaaa

SEQ ID NO: 20413 - DNA, 20 bp, synthetic construct
  source 1..20: mol_type = other DNA
tgcgacaaaaaaataaacgc

SEQ ID NO: 20414 - DNA, 20 bp, synthetic construct
  source 1..20: mol_type = other DNA
aaaaatccaaacaagcaaat

SEQ ID NO: 20415 - DNA, 20 bp, synthetic construct
  source 1..20: mol_type = other DNA
gtgtgggatttgccagactt

SEQ ID NO: 20416 - DNA, 20 bp, synthetic construct
  source 1..20: mol_type = other DNA
tgccttaatgtatgcaccct

SEQ ID NO: 20417 - DNA, 20 bp, synthetic construct
  source 1..20: mol_type = other DNA
aatgtcaccacgggtaaact

SEQ ID NO: 20418 - DNA, 20 bp, synthetic construct
  source 1..20: mol_type = other DNA
ataacacaggacatcgccgg

SEQ ID NO: 20419 - DNA, 20 bp, synthetic construct
  source 1..20: mol_type = other DNA
ccaacccgctgccccaccca

SEQ ID NO: 20420 - DNA, 20 bp, synthetic construct
  source 1..20: mol_type = other DNA
tctctctacatttctccgcc

SEQ ID NO: 20421 - DNA, 20 bp, synthetic construct
  source 1..20: mol_type = other DNA
taaatttcaagtttttcacc

SEQ ID NO: 20422 - DNA, 20 bp, synthetic construct
  source 1..20: mol_type = other DNA
tcagtctgttccacactacg

SEQ ID NO: 20423 - DNA, 20 bp, synthetic construct
  source 1..20: mol_type = other DNA
tttccgtgtcacggcgcgcg

SEQ ID NO: 20424 - DNA, 20 bp, synthetic construct
  source 1..20: mol_type = other DNA
gaggagtgcgtaatcgcaag

SEQ ID NO: 20425 - DNA, 20 bp, synthetic construct
  source 1..20: mol_type = other DNA
tgtccaacattcgcaggaaa

SEQ ID NO: 20426 - DNA, 20 bp, synthetic construct
  source 1..20: mol_type = other DNA
gtttttagtggcgcttcgag

SEQ ID NO: 20427 - DNA, 20 bp, synthetic construct
  source 1..20: mol_type = other DNA
cgcaaacgggatcgactgcg

SEQ ID NO: 20428 - DNA, 20 bp, synthetic construct
  source 1..20: mol_type = other DNA
tttaatagtcctttttttac

SEQ ID NO: 20429 - DNA, 20 bp, synthetic construct
  source 1..20: mol_type = other DNA
cggagagctgccgagctgag

SEQ ID NO: 20430 - DNA, 20 bp, synthetic construct
  source 1..20: mol_type = other DNA
cagattttttggaagaaatt

SEQ ID NO: 20431 - DNA, 20 bp, synthetic construct
  source 1..20: mol_type = other DNA
aaatcaatcggtgatggagt

SEQ ID NO: 20432 - DNA, 20 bp, synthetic construct
  source 1..20: mol_type = other DNA
atgcaaagacttgcagatga

SEQ ID NO: 20433 - DNA, 20 bp, synthetic construct
  source 1..20: mol_type = other DNA
aaggaacatacactctcgta

SEQ ID NO: 20434 - DNA, 20 bp, synthetic construct
  source 1..20: mol_type = other DNA
caatataaaataaccaacta

SEQ ID NO: 20435 - DNA, 20 bp, synthetic construct
  source 1..20: mol_type = other DNA
cggctagtaatgattctggg

SEQ ID NO: 20436 - DNA, 20 bp, synthetic construct
  source 1..20: mol_type = other DNA
taagcccgtgaatgttttct

SEQ ID NO: 20437 - DNA, 20 bp, synthetic construct
  source 1..20: mol_type = other DNA
gcttgtttcacacggttctg

SEQ ID NO: 20438 - DNA, 20 bp, synthetic construct
  source 1..20: mol_type = other DNA
tatctgtcaaggttgtcaga

SEQ ID NO: 20439 - DNA, 20 bp, synthetic construct
  source 1..20: mol_type = other DNA
ggttgcgattgtcagcatct

SEQ ID NO: 20440 - DNA, 20 bp, synthetic construct
  source 1..20: mol_type = other DNA
gctcatacaaaagttcaaga

SEQ ID NO: 20441 - DNA, 20 bp, synthetic construct
  source 1..20: mol_type = other DNA
aggatcaggtatagaggtta

SEQ ID NO: 20442 - DNA, 20 bp, synthetic construct
  source 1..20: mol_type = other DNA
cgaaacggatgagccgatga

SEQ ID NO: 20443 - DNA, 20 bp, synthetic construct
  source 1..20: mol_type = other DNA
agggcatttaaagccaaatt

SEQ ID NO: 20444 - DNA, 20 bp, synthetic construct
  source 1..20: mol_type = other DNA
gagctcgtttgtctctgtag

SEQ ID NO: 20445 - DNA, 20 bp, synthetic construct
  source 1..20: mol_type = other DNA
tagccagggcattcacaatc

SEQ ID NO: 20446 - DNA, 20 bp, synthetic construct
  source 1..20: mol_type = other DNA
tcaaagaatagcagaaccct

SEQ ID NO: 20447 - DNA, 20 bp, synthetic construct
  source 1..20: mol_type = other DNA
tttgtggaacgttgttcccg

SEQ ID NO: 20448 - DNA, 20 bp, synthetic construct
  source 1..20: mol_type = other DNA
tgatcccgccctcgtctgtt

SEQ ID NO: 20449 - DNA, 20 bp, synthetic construct
  source 1..20: mol_type = other DNA
attgtgagaacagcgcataa

SEQ ID NO: 20450 - DNA, 20 bp, synthetic construct
  source 1..20: mol_type = other DNA
tttaggtaaaatttcggtcg

SEQ ID NO: 20451 - DNA, 20 bp, synthetic construct
  source 1..20: mol_type = other DNA
acaaaaaaatacacacataa

SEQ ID NO: 20452 - DNA, 20 bp, synthetic construct
  source 1..20: mol_type = other DNA
tggagggatataggggtgtg

SEQ ID NO: 20453 - DNA, 20 bp, synthetic construct
  source 1..20: mol_type = other DNA
aaatatgcggtcgagggggg

SEQ ID NO: 20454 - DNA, 20 bp, synthetic construct
  source 1..20: mol_type = other DNA
cgagagcgtttggaaaactc

SEQ ID NO: 20455 - DNA, 20 bp, synthetic construct
  source 1..20: mol_type = other DNA
ggtctgccgtgtttggatat

SEQ ID NO: 20456 - DNA, 20 bp, synthetic construct
  source 1..20: mol_type = other DNA
ccattttacccaagtagcct

SEQ ID NO: 20457 - DNA, 20 bp, synthetic construct
  source 1..20: mol_type = other DNA
agcgtcgagtcggttttaag

SEQ ID NO: 20458 - DNA, 20 bp, synthetic construct
  source 1..20: mol_type = other DNA
atacaatggtttggctcgtg

SEQ ID NO: 20459 - DNA, 20 bp, synthetic construct
  source 1..20: mol_type = other DNA
ccccattacaacaaggataa

SEQ ID NO: 20460 - DNA, 20 bp, synthetic construct
  source 1..20: mol_type = other DNA
cgaattgcgtggttttaagt

SEQ ID NO: 20461 - DNA, 20 bp, synthetic construct
  source 1..20: mol_type = other DNA
gaacgtttcctagccacacc

SEQ ID NO: 20462 - DNA, 20 bp, synthetic construct
  source 1..20: mol_type = other DNA
ttaacaaaacccgcgccttt

SEQ ID NO: 20463 - DNA, 20 bp, synthetic construct
  source 1..20: mol_type = other DNA
ttacatatgattactttttc

SEQ ID NO: 20464 - DNA, 20 bp, synthetic construct
  source 1..20: mol_type = other DNA
gctgtgaaacctttcacaag

SEQ ID NO: 20465 - DNA, 20 bp, synthetic construct
  source 1..20: mol_type = other DNA
aagatacaggcaactgcaaa

SEQ ID NO: 20466 - DNA, 20 bp, synthetic construct
  source 1..20: mol_type = other DNA
ctgttgttgctagtattttc

SEQ ID NO: 20467 - DNA, 20 bp, synthetic construct
  source 1..20: mol_type = other DNA
aaccgtgtgatactacatcg

SEQ ID NO: 20468 - DNA, 20 bp, synthetic construct
  source 1..20: mol_type = other DNA
atgcttaatacatggggaaa

SEQ ID NO: 20469 - DNA, 20 bp, synthetic construct
  source 1..20: mol_type = other DNA
cagggcggctccttgggggt

SEQ ID NO: 20470 - DNA, 20 bp, synthetic construct
  source 1..20: mol_type = other DNA
tttaatttattaataaaaat

SEQ ID NO: 20471 - DNA, 20 bp, synthetic construct
  source 1..20: mol_type = other DNA
ctgttccgcatttaaaggtt

SEQ ID NO: 20472 - DNA, 20 bp, synthetic construct
  source 1..20: mol_type = other DNA
gcctccacaccgtgagtatt

SEQ ID NO: 20473 - DNA, 20 bp, synthetic construct
  source 1..20: mol_type = other DNA
gtaccggtttatattcacgc

SEQ ID NO: 20474 - DNA, 20 bp, synthetic construct
  source 1..20: mol_type = other DNA
ggttgtttttccaattccat

SEQ ID NO: 20475 - DNA, 20 bp, synthetic construct
  source 1..20: mol_type = other DNA
ctttttgagtacatcgtaaa

SEQ ID NO: 20476 - DNA, 20 bp, synthetic construct
  source 1..20: mol_type = other DNA
agttccgtcccagaagataa

SEQ ID NO: 20477 - DNA, 20 bp, synthetic construct
  source 1..20: mol_type = other DNA
tcacgggacggcaagttcga

SEQ ID NO: 20478 - DNA, 20 bp, synthetic construct
  source 1..20: mol_type = other DNA
caccccaagcccgcgtctcg

SEQ ID NO: 20479 - DNA, 20 bp, synthetic construct
  source 1..20: mol_type = other DNA
tatttataattaccgccccc

SEQ ID NO: 20480 - DNA, 20 bp, synthetic construct
  source 1..20: mol_type = other DNA
cttcctcttccgcgataatt

SEQ ID NO: 20481 - DNA, 20 bp, synthetic construct
  source 1..20: mol_type = other DNA
gcctgacatgaccaaagtga

SEQ ID NO: 20482 - DNA, 20 bp, synthetic construct
  source 1..20: mol_type = other DNA
cgtacatatttctttttttt

SEQ ID NO: 20483 - DNA, 20 bp, synthetic construct
  source 1..20: mol_type = other DNA
accagaatctcttcatatgt

SEQ ID NO: 20484 - DNA, 20 bp, synthetic construct
  source 1..20: mol_type = other DNA
caatgacatttaacatcaat

SEQ ID NO: 20485 - DNA, 20 bp, synthetic construct
  source 1..20: mol_type = other DNA
aaagacacaggaaacaacgc

SEQ ID NO: 20486 - DNA, 20 bp, synthetic construct
  source 1..20: mol_type = other DNA
ccaattgcagttccaggcta

SEQ ID NO: 20487 - DNA, 20 bp, synthetic construct
  source 1..20: mol_type = other DNA
tactggacgcatagacggcg

SEQ ID NO: 20488 - DNA, 20 bp, synthetic construct
  source 1..20: mol_type = other DNA
cgtacggcgagactttttca

SEQ ID NO: 20489 - DNA, 20 bp, synthetic construct
  source 1..20: mol_type = other DNA
aacggggcggtaaattttga

SEQ ID NO: 20490 - DNA, 20 bp, synthetic construct
  source 1..20: mol_type = other DNA
cgcagaaattagcgatcaca

SEQ ID NO: 20491 - DNA, 20 bp, synthetic construct
  source 1..20: mol_type = other DNA
tcgccattgtcccgtgttcc

SEQ ID NO: 20492 - DNA, 20 bp, synthetic construct
  source 1..20: mol_type = other DNA
tggtgtacgtgttaactatg

SEQ ID NO: 20493 - DNA, 20 bp, synthetic construct
  source 1..20: mol_type = other DNA
ggtggtaactacctgctgta

SEQ ID NO: 20494 - DNA, 20 bp, synthetic construct
  source 1..20: mol_type = other DNA
acacacacacagtatataag

SEQ ID NO: 20495 - DNA, 20 bp, synthetic construct
  source 1..20: mol_type = other DNA
ggcgtcacctaaatctaaaa

SEQ ID NO: 20496 - DNA, 20 bp, synthetic construct
  source 1..20: mol_type = other DNA
ggtcggggcgctttttttgt

SEQ ID NO: 20497 - DNA, 20 bp, synthetic construct
  source 1..20: mol_type = other DNA
tgtttcgcgcacacgcagaa

SEQ ID NO: 20498 - DNA, 20 bp, synthetic construct
  source 1..20: mol_type = other DNA
tgaattgcaggaaatagatt

SEQ ID NO: 20499 - DNA, 20 bp, synthetic construct
  source 1..20: mol_type = other DNA
aaaaaacgcaaacgtgttta

SEQ ID NO: 20500 - DNA, 20 bp, synthetic construct
  source 1..20: mol_type = other DNA
gtgcatagaattggcgggat

SEQ ID NO: 20501 - DNA, 20 bp, synthetic construct
  source 1..20: mol_type = other DNA
agagagtcagtgtccatttt

SEQ ID NO: 20502 - DNA, 20 bp, synthetic construct
  source 1..20: mol_type = other DNA
ggtcaacagtcaccttgacc

SEQ ID NO: 20503 - DNA, 20 bp, synthetic construct
  source 1..20: mol_type = other DNA
atcatacgatttgtatgcgt

SEQ ID NO: 20504 - DNA, 20 bp, synthetic construct
  source 1..20: mol_type = other DNA
cacgcctgtgtcgagcagaa

SEQ ID NO: 20505 - DNA, 20 bp, synthetic construct
  source 1..20: mol_type = other DNA
aacggttcaaccgaaaacgg

SEQ ID NO: 20506 - DNA, 20 bp, synthetic construct
  source 1..20: mol_type = other DNA
aacagtttttagatgttgta

SEQ ID NO: 20507 - DNA, 20 bp, synthetic construct
  source 1..20: mol_type = other DNA
tactgtcccgcattgtatat

SEQ ID NO: 20508 - DNA, 20 bp, synthetic construct
  source 1..20: mol_type = other DNA
agagtaaaccgttttttata

SEQ ID NO: 20509 - DNA, 20 bp, synthetic construct
  source 1..20: mol_type = other DNA
aagctaaattgtacgtggaa

SEQ ID NO: 20510 - DNA, 20 bp, synthetic construct
  source 1..20: mol_type = other DNA
gtattttgcacgtaaacgcc

SEQ ID NO: 20511 - DNA, 20 bp, synthetic construct
  source 1..20: mol_type = other DNA
acactaaacatagtgtgtcc

SEQ ID NO: 20512 - DNA, 20 bp, synthetic construct
  source 1..20: mol_type = other DNA
agaagtaagcctataaaata

SEQ ID NO: 20513 - DNA, 20 bp, synthetic construct
  source 1..20: mol_type = other DNA
ttcccctcctacccccacat

SEQ ID NO: 20514 - DNA, 20 bp, synthetic construct
  source 1..20: mol_type = other DNA
ggattttgagttacatccta

SEQ ID NO: 20515 - DNA, 20 bp, synthetic construct
  source 1..20: mol_type = other DNA
ttcctgtgcctattgcgaga

SEQ ID NO: 20516 - DNA, 20 bp, synthetic construct
  source 1..20: mol_type = other DNA
atctttgaacatcgtgtgcc

SEQ ID NO: 20517 - DNA, 20 bp, synthetic construct
  source 1..20: mol_type = other DNA
agggaggagagcgaaggagg

SEQ ID NO: 20518 - DNA, 20 bp, synthetic construct
  source 1..20: mol_type = other DNA
caatcagtcacaaacttaca

SEQ ID NO: 20519 - DNA, 20 bp, synthetic construct
  source 1..20: mol_type = other DNA
ggtcttggttttctcttttt

SEQ ID NO: 20520 - DNA, 20 bp, synthetic construct
  source 1..20: mol_type = other DNA
acaaccacgccgacgcggag

SEQ ID NO: 20521 - DNA, 20 bp, synthetic construct
  source 1..20: mol_type = other DNA
ggttgaggaacctgttaaga

SEQ ID NO: 20522 - DNA, 20 bp, synthetic construct
  source 1..20: mol_type = other DNA
gaaccggaaaggcgggccag

SEQ ID NO: 20523 - DNA, 20 bp, synthetic construct
  source 1..20: mol_type = other DNA
acgcagggtctccattttga

SEQ ID NO: 20524 - DNA, 20 bp, synthetic construct
  source 1..20: mol_type = other DNA
ccaattctgatgcgccggtg

SEQ ID NO: 20525 - DNA, 20 bp, synthetic construct
  source 1..20: mol_type = other DNA
tgagcagtccaccccaggcg

SEQ ID NO: 20526 - DNA, 20 bp, synthetic construct
  source 1..20: mol_type = other DNA
gtataggtctctacatcgta

SEQ ID NO: 20527 - DNA, 20 bp, synthetic construct
  source 1..20: mol_type = other DNA
cagatatgctcttgcatagg

SEQ ID NO: 20528 - DNA, 20 bp, synthetic construct
  source 1..20: mol_type = other DNA
gcgtaccactgtggccaggc

SEQ ID NO: 20529 - DNA, 20 bp, synthetic construct
  source 1..20: mol_type = other DNA
cgagacgggtctttggagcg

SEQ ID NO: 20530 - DNA, 20 bp, synthetic construct
  source 1..20: mol_type = other DNA
cccgacgaccaccccaggca

SEQ ID NO: 20531 - DNA, 20 bp, synthetic construct
  source 1..20: mol_type = other DNA
aaacaaaaaattgaaaagtg

SEQ ID NO: 20532 - DNA, 20 bp, synthetic construct
  source 1..20: mol_type = other DNA
tctgttggtacccgttagga

SEQ ID NO: 20533 - DNA, 20 bp, synthetic construct
  source 1..20: mol_type = other DNA
tggaggaaagccaattggct

SEQ ID NO: 20534 - DNA, 20 bp, synthetic construct
  source 1..20: mol_type = other DNA
tcggcgccctctagcggcca

SEQ ID NO: 20535 - DNA, 20 bp, synthetic construct
  source 1..20: mol_type = other DNA
gacccaccccctcggcggcg

SEQ ID NO: 20536 - DNA, 20 bp, synthetic construct
  source 1..20: mol_type = other DNA
cccggccctagtcgaagcct

SEQ ID NO: 20537 - DNA, 20 bp, synthetic construct
  source 1..20: mol_type = other DNA
atgcccaaagaacgacggtc

SEQ ID NO: 20538 - DNA, 20 bp, synthetic construct
  source 1..20: mol_type = other DNA
ctactgctattgagcaggct

SEQ ID NO: 20539 - DNA, 20 bp, synthetic construct
  source 1..20: mol_type = other DNA
tcaatcctgtgtcgggtgga

SEQ ID NO: 20540 - DNA, 20 bp, synthetic construct
  source 1..20: mol_type = other DNA
ggtggaatgaataacatgtc

SEQ ID NO: 20541 - DNA, 20 bp, synthetic construct
  source 1..20: mol_type = other DNA
cgaacagggacctgagaggg

SEQ ID NO: 20542 - DNA, 20 bp, synthetic construct
  source 1..20: mol_type = other DNA
aagtcttctggaggtgttcc

SEQ ID NO: 20543 - DNA, 20 bp, synthetic construct
  source 1..20: mol_type = other DNA
gtaattagggaagcacagat

SEQ ID NO: 20544 - DNA, 20 bp, synthetic construct
  source 1..20: mol_type = other DNA
cctggatctccagatacgga

SEQ ID NO: 20545 - DNA, 20 bp, synthetic construct
  source 1..20: mol_type = other DNA
ggacgaagactgagtttccc

SEQ ID NO: 20546 - DNA, 20 bp, synthetic construct
  source 1..20: mol_type = other DNA
gtccgccgccgctcaaggcg

SEQ ID NO: 20547 - DNA, 20 bp, synthetic construct
  source 1..20: mol_type = other DNA
taccaccctagcattctcgt

SEQ ID NO: 20548 - DNA, 20 bp, synthetic construct
  source 1..20: mol_type = other DNA
gttgattcccatcatcgccg

SEQ ID NO: 20549 - DNA, 20 bp, synthetic construct
  source 1..20: mol_type = other DNA
cgtacgccgttctcggccgg

SEQ ID NO: 20550 - DNA, 20 bp, synthetic construct
  source 1..20: mol_type = other DNA
ctccacttgctcattttcct

SEQ ID NO: 20551 - DNA, 20 bp, synthetic construct
  source 1..20: mol_type = other DNA
ctaaacacccgcgctttttt

SEQ ID NO: 20552 - DNA, 20 bp, synthetic construct
  source 1..20: mol_type = other DNA
tgtggacggctacgactgaa

SEQ ID NO: 20553 - DNA, 20 bp, synthetic construct
  source 1..20: mol_type = other DNA
ctccttccccttactactta

SEQ ID NO: 20554 - DNA, 20 bp, synthetic construct
  source 1..20: mol_type = other DNA
actgccatctgcagcattgc

SEQ ID NO: 20555 - DNA, 20 bp, synthetic construct
  source 1..20: mol_type = other DNA
gcagcgcgctccatcagtta

SEQ ID NO: 20556 - DNA, 20 bp, synthetic construct
  source 1..20: mol_type = other DNA
agacggggttgaagtcgtct

SEQ ID NO: 20557 - DNA, 20 bp, synthetic construct
  source 1..20: mol_type = other DNA
acagtgggtatgcttttacg

SEQ ID NO: 20558 - DNA, 20 bp, synthetic construct
  source 1..20: mol_type = other DNA
cttcgtgacttgcactttgg

SEQ ID NO: 20559 - DNA, 20 bp, synthetic construct
  source 1..20: mol_type = other DNA
ctgtttccatcacgctttcg

SEQ ID NO: 20560 - DNA, 20 bp, synthetic construct
  source 1..20: mol_type = other DNA
ccagctttttccttataaaa

SEQ ID NO: 20561 - DNA, 20 bp, synthetic construct
  source 1..20: mol_type = other DNA
tgaggtaatctatgatgagg

SEQ ID NO: 20562 - DNA, 20 bp, synthetic construct
  source 1..20: mol_type = other DNA
gggtaccatagcgaggaacc

SEQ ID NO: 20563 - DNA, 20 bp, synthetic construct
  source 1..20: mol_type = other DNA
gacccccagacacggagagg

SEQ ID NO: 20564 - DNA, 20 bp, synthetic construct
  source 1..20: mol_type = other DNA
gatgacgaagaccagtacga

SEQ ID NO: 20565 - DNA, 20 bp, synthetic construct
  source 1..20: mol_type = other DNA
attccacttattgctgcggc

SEQ ID NO: 20566 - DNA, 20 bp, synthetic construct
  source 1..20: mol_type = other DNA
ggcgggtaacgctaccacct

SEQ ID NO: 20567 - DNA, 20 bp, synthetic construct
  source 1..20: mol_type = other DNA
gtgcgtcttggggtatgagt

SEQ ID NO: 20568 - DNA, 20 bp, synthetic construct
  source 1..20: mol_type = other DNA
cctgtggctccagatccatc

SEQ ID NO: 20569 - DNA, 20 bp, synthetic construct
  source 1..20: mol_type = other DNA
gttcttcttcgctttcggaa

SEQ ID NO: 20570 - DNA, 20 bp, synthetic construct
  source 1..20: mol_type = other DNA
atacccaactttgacgcagt

SEQ ID NO: 20571 - DNA, 20 bp, synthetic construct
  source 1..20: mol_type = other DNA
tgtcagaataacagttgaaa

SEQ ID NO: 20572 - DNA, 20 bp, synthetic construct
  source 1..20: mol_type = other DNA
aggaataattggcttcagca

SEQ ID NO: 20573 - DNA, 20 bp, synthetic construct
  source 1..20: mol_type = other DNA
gaagaagtaaaagggggtgt

SEQ ID NO: 20574 - DNA, 20 bp, synthetic construct
  source 1..20: mol_type = other DNA
tctgtttcttcagcatactg

SEQ ID NO: 20575 - DNA, 20 bp, synthetic construct
  source 1..20: mol_type = other DNA
gcgagagtggttgtactttg

SEQ ID NO: 20576 - DNA, 20 bp, synthetic construct
  source 1..20: mol_type = other DNA
ctgttgttgaacatttggaa

SEQ ID NO: 20577 - DNA, 20 bp, synthetic construct
  source 1..20: mol_type = other DNA
tcattccgacgtgttttgcg

SEQ ID NO: 20578 - DNA, 20 bp, synthetic construct
  source 1..20: mol_type = other DNA
ttaccctgtcttgcctgcgg

SEQ ID NO: 20579 - DNA, 20 bp, synthetic construct
  source 1..20: mol_type = other DNA
gctaaaggccacgctacaga

SEQ ID NO: 20580 - DNA, 20 bp, synthetic construct
  source 1..20: mol_type = other DNA
tagggtggcgccgctgccat

SEQ ID NO: 20581 - DNA, 20 bp, synthetic construct
  source 1..20: mol_type = other DNA
cagaggcccactgtattgct

SEQ ID NO: 20582 - DNA, 20 bp, synthetic construct
  source 1..20: mol_type = other DNA
tgtgtttcaagtattgccat

SEQ ID NO: 20583 - DNA, 20 bp, synthetic construct
  source 1..20: mol_type = other DNA
gagacacataaggagagttc

SEQ ID NO: 20584 - DNA, 20 bp, synthetic construct
  source 1..20: mol_type = other DNA
gacggctccccccggtggat

SEQ ID NO: 20585 - DNA, 20 bp, synthetic construct
  source 1..20: mol_type = other DNA
tatgccacgatccagtggtt

SEQ ID NO: 20586 - DNA, 20 bp, synthetic construct
  source 1..20: mol_type = other DNA
cctaatttgtgcccacgctg

SEQ ID NO: 20587 - DNA, 20 bp, synthetic construct
  source 1..20: mol_type = other DNA
ccggtttcgggaaactgggt

SEQ ID NO: 20588 - DNA, 20 bp, synthetic construct
  source 1..20: mol_type = other DNA
gcgcccaacgtggggctcga

SEQ ID NO: 20589 - DNA, 20 bp, synthetic construct
  source 1..20: mol_type = other DNA
ccagcgtttttggggagaac

SEQ ID NO: 20590 - DNA, 20 bp, synthetic construct
  source 1..20: mol_type = other DNA
cacacagccgccagccaacc

SEQ ID NO: 20591 - DNA, 20 bp, synthetic construct
  source 1..20: mol_type = other DNA
gccgaggaccagaacaacat

SEQ ID NO: 20592 - DNA, 20 bp, synthetic construct
  source 1..20: mol_type = other DNA
aacgatatcggtagttaatt

SEQ ID NO: 20593 - DNA, 20 bp, synthetic construct
  source 1..20: mol_type = other DNA
tagacatcagaattaagaaa

SEQ ID NO: 20594 - DNA, 20 bp, synthetic construct
  source 1..20: mol_type = other DNA
gtcttcatcccctctcctgc

SEQ ID NO: 20595 - DNA, 20 bp, synthetic construct
  source 1..20: mol_type = other DNA
gagcatttcaaaggtctgca

SEQ ID NO: 20596 - DNA, 20 bp, synthetic construct
  source 1..20: mol_type = other DNA
acactccttatgaccctgag

SEQ ID NO: 20597 - DNA, 20 bp, synthetic construct
  source 1..20: mol_type = other DNA
gtaaaagcggcgacaacccc

SEQ ID NO: 20598 - DNA, 20 bp, synthetic construct
  source 1..20: mol_type = other DNA
ttctgtgttgtctctgtctg

SEQ ID NO: 20599 - DNA, 20 bp, synthetic construct
  source 1..20: mol_type = other DNA
cacgtgaaggctgccgaccc

SEQ ID NO: 20600 - DNA, 20 bp, synthetic construct
  source 1..20: mol_type = other DNA
tctggcggcagcctaccaag

SEQ ID NO: 20601 - DNA, 20 bp, synthetic construct
  source 1..20: mol_type = other DNA
tccatcgagccagtgtagag

SEQ ID NO: 20602 - DNA, 20 bp, synthetic construct
  source 1..20: mol_type = other DNA
atttctactattttgtgttc

SEQ ID NO: 20603 - DNA, 20 bp, synthetic construct
  source 1..20: mol_type = other DNA
gcagtctcgcctacagagaa

SEQ ID NO: 20604 - DNA, 20 bp, synthetic construct
  source 1..20: mol_type = other DNA
tataggtgttggagccctgc

SEQ ID NO: 20605 - DNA, 20 bp, synthetic construct
  source 1..20: mol_type = other DNA
cttgcaaaatggcgttactg

SEQ ID NO: 20606 - DNA, 20 bp, synthetic construct
  source 1..20: mol_type = other DNA
tttgtcatttgtctggttcg

SEQ ID NO: 20607 - DNA, 20 bp, synthetic construct
  source 1..20: mol_type = other DNA
aaggcgctgctgggggacag

SEQ ID NO: 20608 - DNA, 20 bp, synthetic construct
  source 1..20: mol_type = other DNA
aaggcagcgctagtaagaaa

SEQ ID NO: 20609 - DNA, 20 bp, synthetic construct
  source 1..20: mol_type = other DNA
ccttggtctatacaggattg

SEQ ID NO: 20610 - DNA, 20 bp, synthetic construct
  source 1..20: mol_type = other DNA
caggtagctggcgtctttta

SEQ ID NO: 20611 - DNA, 20 bp, synthetic construct
  source 1..20: mol_type = other DNA
tggctccctgagcgactaat

SEQ ID NO: 20612 - DNA, 20 bp, synthetic construct
  source 1..20: mol_type = other DNA
ccaaaaggctcgccctgagg

SEQ ID NO: 20613 - DNA, 20 bp, synthetic construct
  source 1..20: mol_type = other DNA
gtaaccggttccctgcacgg

SEQ ID NO: 20614 - DNA, 20 bp, synthetic construct
  source 1..20: mol_type = other DNA
gttcgttcctcatttcgacg

SEQ ID NO: 20615 - DNA, 20 bp, synthetic construct
  source 1..20: mol_type = other DNA
gacgtggtccagattaagtt

SEQ ID NO: 20616 - DNA, 20 bp, synthetic construct
  source 1..20: mol_type = other DNA
atatagtaaaaataaagtat

SEQ ID NO: 20617 - DNA, 20 bp, synthetic construct
  source 1..20: mol_type = other DNA
tttgttgcaagtgtgactct

SEQ ID NO: 20618 - DNA, 20 bp, synthetic construct
  source 1..20: mol_type = other DNA
tgctgacgatgcgaaaagat

SEQ ID NO: 20619 - DNA, 20 bp, synthetic construct
  source 1..20: mol_type = other DNA
acaaacaccacccccgcgac

SEQ ID NO: 20620 - DNA, 20 bp, synthetic construct
  source 1..20: mol_type = other DNA
gaggaacgcctggaagggaa

SEQ ID NO: 20621 - DNA, 20 bp, synthetic construct
  source 1..20: mol_type = other DNA
cggagatctgcagctcctgt

SEQ ID NO: 20622 - DNA, 20 bp, synthetic construct
  source 1..20: mol_type = other DNA
catgactcacagggaggagc

SEQ ID NO: 20623 - DNA, 20 bp, synthetic construct
  source 1..20: mol_type = other DNA
aaagactcctaggtaagtaa

SEQ ID NO: 20624 - DNA, 20 bp, synthetic construct
  source 1..20: mol_type = other DNA
ctggggctattgctgggttt

SEQ ID NO: 20625 - DNA, 20 bp, synthetic construct
  source 1..20: mol_type = other DNA
gatgtcctaaagtcaacatg

SEQ ID NO: 20626 - DNA, 20 bp, synthetic construct
  source 1..20: mol_type = other DNA
tcacaatcatctcgtgtttc

SEQ ID NO: 20627 - DNA, 20 bp, synthetic construct
  source 1..20: mol_type = other DNA
tcagaagaacaactggcaac

SEQ ID NO: 20628 - DNA, 20 bp, synthetic construct
  source 1..20: mol_type = other DNA
tattgcaaaaaatgctgtta

SEQ ID NO: 20629 - DNA, 20 bp, synthetic construct
  source 1..20: mol_type = other DNA
cctgaccctcctcatattca

SEQ ID NO: 20630 - DNA, 20 bp, synthetic construct
  source 1..20: mol_type = other DNA
tcaggtagggtgagagccta

SEQ ID NO: 20631 - DNA, 20 bp, synthetic construct
  source 1..20: mol_type = other DNA
tatgtggtagcctgtacgga

SEQ ID NO: 20632 - DNA, 20 bp, synthetic construct
  source 1..20: mol_type = other DNA
ttctttttctatttttgttt

SEQ ID NO: 20633 - DNA, 20 bp, synthetic construct
  source 1..20: mol_type = other DNA
aaaatatcagggtactggag

SEQ ID NO: 20634 - DNA, 20 bp, synthetic construct
  source 1..20: mol_type = other DNA
aaatgtaacaattccctttg

SEQ ID NO: 20635 - DNA, 20 bp, synthetic construct
  source 1..20: mol_type = other DNA
atatgtgcccctgtcacctg

SEQ ID NO: 20636 - DNA, 20 bp, synthetic construct
  source 1..20: mol_type = other DNA
cttctcccgacatcgtcgcc

SEQ ID NO: 20637 - DNA, 20 bp, synthetic construct
  source 1..20: mol_type = other DNA
tactaggcacattgaagctc

SEQ ID NO: 20638 - DNA, 20 bp, synthetic construct
  source 1..20: mol_type = other DNA
tactgtaatggtaattgcta

SEQ ID NO: 20639 - DNA, 20 bp, synthetic construct
  source 1..20: mol_type = other DNA
acaatgttgtatgtgtaata

SEQ ID NO: 20640 - DNA, 20 bp, synthetic construct
  source 1..20: mol_type = other DNA
gtctccgccctttattagta

SEQ ID NO: 20641 - DNA, 20 bp, synthetic construct
  source 1..20: mol_type = other DNA
ggttgtacacagtgtggacg

SEQ ID NO: 20642 - DNA, 20 bp, synthetic construct
  source 1..20: mol_type = other DNA
acactgggcattgtgtgtcc

SEQ ID NO: 20643 - DNA, 20 bp, synthetic construct
  source 1..20: mol_type = other DNA
ttttaccccaactgtacctg

SEQ ID NO: 20644 - DNA, 20 bp, synthetic construct
  source 1..20: mol_type = other DNA
aataggtttaggaccgaaaa

SEQ ID NO: 20645 - DNA, 20 bp, synthetic construct
  source 1..20: mol_type = other DNA
cgaaaacggtacatataaaa

SEQ ID NO: 20646 - DNA, 20 bp, synthetic construct
  source 1..20: mol_type = other DNA
aacatagtgtgtgtagcaga

SEQ ID NO: 20647 - DNA, 20 bp, synthetic construct
  source 1..20: mol_type = other DNA
gacatggtccagattagatt

SEQ ID NO: 20648 - DNA, 20 bp, synthetic construct
  source 1..20: mol_type = other DNA
cataaccacatttacactat

SEQ ID NO: 20649 - DNA, 20 bp, synthetic construct
  source 1..20: mol_type = other DNA
ataaatcacagtttttttgt

SEQ ID NO: 20650 - DNA, 20 bp, synthetic construct
  source 1..20: mol_type = other DNA
ttttttgaaacgtaggcgtc

SEQ ID NO: 20651 - DNA, 20 bp, synthetic construct
  source 1..20: mol_type = other DNA
ctgacatgctggagacacac

SEQ ID NO: 20652 - DNA, 20 bp, synthetic construct
  source 1..20: mol_type = other DNA
cagtgttgtaggtgtgagtc

SEQ ID NO: 20653 - DNA, 20 bp, synthetic construct
  source 1..20: mol_type = other DNA
agggtccgaccgaaaacggt

SEQ ID NO: 20654 - DNA, 20 bp, synthetic construct
  source 1..20: mol_type = other DNA
tcctgcaggtacaccatatt

SEQ ID NO: 20655 - DNA, 20 bp, synthetic construct
  source 1..20: mol_type = other DNA
tgcatactatttcagaaaac

SEQ ID NO: 20656 - DNA, 20 bp, synthetic construct
  source 1..20: mol_type = other DNA
cattgtgtattttgtcactg

SEQ ID NO: 20657 - DNA, 20 bp, synthetic construct
  source 1..20: mol_type = other DNA
ggcattgctactaacccata

SEQ ID NO: 20658 - DNA, 20 bp, synthetic construct
  source 1..20: mol_type = other DNA
cgtagctggctgtggttgcg

SEQ ID NO: 20659 - DNA, 20 bp, synthetic construct
  source 1..20: mol_type = other DNA
cgttgcctttcagtacagtc

SEQ ID NO: 20660 - DNA, 20 bp, synthetic construct
  source 1..20: mol_type = other DNA
gaatatattctcatatcact

SEQ ID NO: 20661 - DNA, 20 bp, synthetic construct
  source 1..20: mol_type = other DNA
tgcccataatccaatgggtt

SEQ ID NO: 20662 - DNA, 20 bp, synthetic construct
  source 1..20: mol_type = other DNA
ctcctcgcttcggtctcccc

SEQ ID NO: 20663 - DNA, 20 bp, synthetic construct
  source 1..20: mol_type = other DNA
cttagtctgtaagttttggg

SEQ ID NO: 20664 - DNA, 20 bp, synthetic construct
  source 1..20: mol_type = other DNA
cgtaaattaatggtgtctac

SEQ ID NO: 20665 - DNA, 20 bp, synthetic construct
  source 1..20: mol_type = other DNA
cagcgaaccgattttcgatt

SEQ ID NO: 20666 - DNA, 20 bp, synthetic construct
  source 1..20: mol_type = other DNA
tgcacagagcatcagcaaat

SEQ ID NO: 20667 - DNA, 20 bp, synthetic construct
  source 1..20: mol_type = other DNA
ggatttatatgggaatattc

SEQ ID NO: 20668 - DNA, 20 bp, synthetic construct
  source 1..20: mol_type = other DNA
aagatgttgttcccgtcgtg

SEQ ID NO: 20669 - DNA, 20 bp, synthetic construct
  source 1..20: mol_type = other DNA
aacaaaaatgcaaacaagga

SEQ ID NO: 20670 - DNA, 20 bp, synthetic construct
  source 1..20: mol_type = other DNA
cttattttccgtatacaact

SEQ ID NO: 20671 - DNA, 20 bp, synthetic construct
  source 1..20: mol_type = other DNA
cactaatcctcgcatccgca

SEQ ID NO: 20672 - DNA, 20 bp, synthetic construct
  source 1..20: mol_type = other DNA
gccccgcttgtttctacact

SEQ ID NO: 20673 - DNA, 20 bp, synthetic construct
  source 1..20: mol_type = other DNA
tcgacatcgcgggcggcaaa

SEQ ID NO: 20674 - DNA, 20 bp, synthetic construct
  source 1..20: mol_type = other DNA
gttccggcttctgtattgca

SEQ ID NO: 20675 - DNA, 20 bp, synthetic construct
  source 1..20: mol_type = other DNA
gtttgctttggatccgttgt

SEQ ID NO: 20676 - DNA, 20 bp, synthetic construct
  source 1..20: mol_type = other DNA
tcattttgtgtaattggtat

SEQ ID NO: 20677 - DNA, 20 bp, synthetic construct
  source 1..20: mol_type = other DNA
aaaataaccaactacatggt

SEQ ID NO: 20678 - DNA, 20 bp, synthetic construct
  source 1..20: mol_type = other DNA
tcggggttagtcgattaata

SEQ ID NO: 20679 - DNA, 20 bp, synthetic construct
  source 1..20: mol_type = other DNA
cgatagatatatattttctc

SEQ ID NO: 20680 - DNA, 20 bp, synthetic construct
  source 1..20: mol_type = other DNA
acaggagagtataaagcagt

SEQ ID NO: 20681 - DNA, 20 bp, synthetic construct
  source 1..20: mol_type = other DNA
cgatgctccggtctatgact

SEQ ID NO: 20682 - DNA, 20 bp, synthetic construct
  source 1..20: mol_type = other DNA
gacttctacataggatacta

SEQ ID NO: 20683 - DNA, 20 bp, synthetic construct
  source 1..20: mol_type = other DNA
agaatgtaaaagaggcagag

SEQ ID NO: 20684 - DNA, 20 bp, synthetic construct
  source 1..20: mol_type = other DNA
agaatgtgtgactaaaatag

SEQ ID NO: 20685 - DNA, 20 bp, synthetic construct
  source 1..20: mol_type = other DNA
cctaacagtcgtagtatcct

SEQ ID NO: 20686 - DNA, 20 bp, synthetic construct
  source 1..20: mol_type = other DNA
ttgttttccatttttaattt

SEQ ID NO: 20687 - DNA, 20 bp, synthetic construct
  source 1..20: mol_type = other DNA
cagtatttaaaaagggagat

SEQ ID NO: 20688 - DNA, 20 bp, synthetic construct
  source 1..20: mol_type = other DNA
tcctaatgtgcagtcaggtg

SEQ ID NO: 20689 - DNA, 20 bp, synthetic construct
  source 1..20: mol_type = other DNA
tcagaaggtacctaaccaag

SEQ ID NO: 20690 - DNA, 20 bp, synthetic construct
  source 1..20: mol_type = other DNA
gaaagttaactggtaagttt

SEQ ID NO: 20691 - DNA, 20 bp, synthetic construct
  source 1..20: mol_type = other DNA
tagcagcggttggtttgaaa

SEQ ID NO: 20692 - DNA, 20 bp, synthetic construct
  source 1..20: mol_type = other DNA
agagctttgtttattttgtc

SEQ ID NO: 20693 - DNA, 20 bp, synthetic construct
  source 1..20: mol_type = other DNA
tgaaatcgcaattcgctgtg

SEQ ID NO: 20694 - DNA, 20 bp, synthetic construct
  source 1..20: mol_type = other DNA
tacgtgtaagcattgtcatt

SEQ ID NO: 20695 - DNA, 20 bp, synthetic construct
  source 1..20: mol_type = other DNA
cgaaatgggattgttattaa

SEQ ID NO: 20696 - DNA, 20 bp, synthetic construct
  source 1..20: mol_type = other DNA
acatttggaacattaaactc

SEQ ID NO: 20697 - DNA, 20 bp, synthetic construct
  source 1..20: mol_type = other DNA
tctctttctgtacgctgttt

SEQ ID NO: 20698 - DNA, 20 bp, synthetic construct
  source 1..20: mol_type = other DNA
taggcgacgcaaacgaaaac

SEQ ID NO: 20699 - DNA, 20 bp, synthetic construct
  source 1..20: mol_type = other DNA
agaagtgttcctgacctgtt

SEQ ID NO: 20700 - DNA, 20 bp, synthetic construct
  source 1..20: mol_type = other DNA
tgtgcaatctggtgaattta

SEQ ID NO: 20701 - DNA, 20 bp, synthetic construct
  source 1..20: mol_type = other DNA
ccagccaagcatgagctcat

SEQ ID NO: 20702 - DNA, 20 bp, synthetic construct
  source 1..20: mol_type = other DNA
actgggatcataaagtttca

SEQ ID NO: 20703 - DNA, 20 bp, synthetic construct
  source 1..20: mol_type = other DNA
cacgccgctcacgtaaaggc

SEQ ID NO: 20704 - DNA, 20 bp, synthetic construct
  source 1..20: mol_type = other DNA
tggagagggactccaagtcc

SEQ ID NO: 20705 - DNA, 20 bp, synthetic construct
  source 1..20: mol_type = other DNA
aaagcgcaaaggaaaaatgc

SEQ ID NO: 20706 - DNA, 20 bp, synthetic construct
  source 1..20: mol_type = other DNA
ataattgatcattttgaagc

SEQ ID NO: 20707 - DNA, 20 bp, synthetic construct
  source 1..20: mol_type = other DNA
caatctgaaaacctacaaag

SEQ ID NO: 20708 - DNA, 20 bp, synthetic construct
  source 1..20: mol_type = other DNA
ccattccgaagcgagttttc

SEQ ID NO: 20709 - DNA, 20 bp, synthetic construct
  source 1..20: mol_type = other DNA
ggcaacattaataaaaagcc

SEQ ID NO: 20710 - DNA, 20 bp, synthetic construct
  source 1..20: mol_type = other DNA
taggaactcatcaacattga

SEQ ID NO: 20711 - DNA, 20 bp, synthetic construct
  source 1..20: mol_type = other DNA
acttttcgtcttagaaacaa

SEQ ID NO: 20712 - DNA, 20 bp, synthetic construct
  source 1..20: mol_type = other DNA
cctgcgcgcgcgggaactgt

SEQ ID NO: 20713 - DNA, 20 bp, synthetic construct
  source 1..20: mol_type = other DNA
actcacccttccatctcttc

SEQ ID NO: 20714 - DNA, 20 bp, synthetic construct
  source 1..20: mol_type = other DNA
caaatacaaccacaaccaaa

SEQ ID NO: 20715 - DNA, 20 bp, synthetic construct
  source 1..20: mol_type = other DNA
tcataccaggattttttgga

SEQ ID NO: 20716 - DNA, 20 bp, synthetic construct
  source 1..20: mol_type = other DNA
aacctagtcacaactgctgt

SEQ ID NO: 20717 - DNA, 20 bp, synthetic construct
  source 1..20: mol_type = other DNA
aatttcttcggggtatgtat

SEQ ID NO: 20718 - DNA, 20 bp, synthetic construct
  source 1..20: mol_type = other DNA
atgttcgatatgggggtacg

SEQ ID NO: 20719 - DNA, 20 bp, synthetic construct
  source 1..20: mol_type = other DNA
aagattgttggaaagggatt

SEQ ID NO: 20720 - DNA, 20 bp, synthetic construct
  source 1..20: mol_type = other DNA
tactatgcatgtatttcagt

SEQ ID NO: 20721 - DNA, 20 bp, synthetic construct
  source 1..20: mol_type = other DNA
taatattctttgtggttttt

SEQ ID NO: 20722 - DNA, 20 bp, synthetic construct
  source 1..20: mol_type = other DNA
gttctgagttcatagaaaag

SEQ ID NO: 20723 - DNA, 20 bp, synthetic construct
  source 1..20: mol_type = other DNA
atttcaggtttcaaaattaa

SEQ ID NO: 20724 - DNA, 20 bp, synthetic construct
  source 1..20: mol_type = other DNA
aatataaaaggccgtttatg

SEQ ID NO: 20725 - DNA, 20 bp, synthetic construct
  source 1..20: mol_type = other DNA
ttcactagggttcttacata

SEQ ID NO: 20726 - DNA, 20 bp, synthetic construct
  source 1..20: mol_type = other DNA
atggaatattcaaaccattt

SEQ ID NO: 20727 - DNA, 20 bp, synthetic construct
  source 1..20: mol_type = other DNA
gtacgatttgctcgacaacg

SEQ ID NO: 20728 - DNA, 20 bp, synthetic construct
  source 1..20: mol_type = other DNA
tttccctacgaacaaataca

SEQ ID NO: 20729 - DNA, 20 bp, synthetic construct
  source 1..20: mol_type = other DNA
ccttacacaagaaaaaacgt

SEQ ID NO: 20730 - DNA, 20 bp, synthetic construct
  source 1..20: mol_type = other DNA
tttacgttttattgtagaaa

SEQ ID NO: 20731 - DNA, 20 bp, synthetic construct
  source 1..20: mol_type = other DNA
tgatccccgcttgctaattg

SEQ ID NO: 20732 - DNA, 20 bp, synthetic construct
  source 1..20: mol_type = other DNA
gactcgcctcttgatcgggc

SEQ ID NO: 20733 - DNA, 20 bp, synthetic construct
  source 1..20: mol_type = other DNA
aagcgtcaaccccggggaga

SEQ ID NO: 20734 - DNA, 20 bp, synthetic construct
  source 1..20: mol_type = other DNA
cgtaggacgatcggctgaag

SEQ ID NO: 20735 - DNA, 20 bp, synthetic construct
  source 1..20: mol_type = other DNA
acaaccatttataccgccaa

SEQ ID NO: 20736 - DNA, 20 bp, synthetic construct
  source 1..20: mol_type = other DNA
aacactaaatcaacacatca

SEQ ID NO: 20737 - DNA, 20 bp, synthetic construct
  source 1..20: mol_type = other DNA
gacaaaaggaaaatataaaa

SEQ ID NO: 20738 - DNA, 20 bp, synthetic construct
  source 1..20: mol_type = other DNA
ccggttcctaccccccgctc

SEQ ID NO: 20739 - DNA, 20 bp, synthetic construct
  source 1..20: mol_type = other DNA
tccgtctgcggggagggcgt

SEQ ID NO: 20740 - DNA, 20 bp, synthetic construct
  source 1..20: mol_type = other DNA
ggcgattcccttcgcgaggg

SEQ ID NO: 20741 - DNA, 20 bp, synthetic construct
  source 1..20: mol_type = other DNA
caggccctcgctgctctccc

SEQ ID NO: 20742 - DNA, 20 bp, synthetic construct
  source 1..20: mol_type = other DNA
gcaccacccagcggcccagt

SEQ ID NO: 20743 - DNA, 20 bp, synthetic construct
  source 1..20: mol_type = other DNA
gggtggggtgggggaaagcc

SEQ ID NO: 20744 - DNA, 20 bp, synthetic construct
  source 1..20: mol_type = other DNA
ctgcgccggctttcccccac

SEQ ID NO: 20745 - DNA, 20 bp, synthetic construct
  source 1..20: mol_type = other DNA
ttgggacgtgccagcatttc

SEQ ID NO: 20746 - DNA, 20 bp, synthetic construct
  source 1..20: mol_type = other DNA
ccaggaactcacggcagacg

SEQ ID NO: 20747 - DNA, 20 bp, synthetic construct
  source 1..20: mol_type = other DNA
cacggggacctcggttgggc

SEQ ID NO: 20748 - DNA, 20 bp, synthetic construct
  source 1..20: mol_type = other DNA
gcgatgacgtcattagcgag

SEQ ID NO: 20749 - DNA, 20 bp, synthetic construct
  source 1..20: mol_type = other DNA
tgcgcacgccagccgggacg

SEQ ID NO: 20750 - DNA, 20 bp, synthetic construct
  source 1..20: mol_type = other DNA
cgtggacgggacaccggtgt

SEQ ID NO: 20751 - DNA, 20 bp, synthetic construct
  source 1..20: mol_type = other DNA
ggcccgtcgctcggggtgct

SEQ ID NO: 20752 - DNA, 20 bp, synthetic construct
  source 1..20: mol_type = other DNA
ttgcgaacgactagtcgccg

SEQ ID NO: 20753 - DNA, 20 bp, synthetic construct
  source 1..20: mol_type = other DNA
ctacccccacccaaccagcg

SEQ ID NO: 20754 - DNA, 20 bp, synthetic construct
  source 1..20: mol_type = other DNA
gttggaccccgtgcatggac

SEQ ID NO: 20755 - DNA, 20 bp, synthetic construct
  source 1..20: mol_type = other DNA
catcattctcgaggcggctc

SEQ ID NO: 20756 - DNA, 20 bp, synthetic construct
  source 1..20: mol_type = other DNA
ctggggccgcgctcgttcga

SEQ ID NO: 20757 - DNA, 20 bp, synthetic construct
  source 1..20: mol_type = other DNA
cggctacacccccgcgcacc

SEQ ID NO: 20758 - DNA, 20 bp, synthetic construct
  source 1..20: mol_type = other DNA
acacagaggccagcaccagg

SEQ ID NO: 20759 - DNA, 20 bp, synthetic construct
  source 1..20: mol_type = other DNA
ccgcattcgcaccccggcac

SEQ ID NO: 20760 - DNA, 20 bp, synthetic construct
  source 1..20: mol_type = other DNA
gtcggtgtcgctgccgcccg

SEQ ID NO: 20761 - DNA, 20 bp, synthetic construct
  source 1..20: mol_type = other DNA
ccacgccccttccggcaccg

SEQ ID NO: 20762 - DNA, 20 bp, synthetic construct
  source 1..20: mol_type = other DNA
tgctgctgagccctgccccg

SEQ ID NO: 20763 - DNA, 20 bp, synthetic construct
  source 1..20: mol_type = other DNA
gtcgggttgccccttggggt

SEQ ID NO: 20764 - DNA, 20 bp, synthetic construct
  source 1..20: mol_type = other DNA
ttcccgagctcggcttgatg

SEQ ID NO: 20765 - DNA, 20 bp, synthetic construct
  source 1..20: mol_type = other DNA
tgtgtgtagaacccgcgcgg

SEQ ID NO: 20766 - DNA, 20 bp, synthetic construct
  source 1..20: mol_type = other DNA
cagcactactttcggttttg

SEQ ID NO: 20767 - DNA, 20 bp, synthetic construct
  source 1..20: mol_type = other DNA
ccaccccactattccccccc

SEQ ID NO: 20768 - DNA, 20 bp, synthetic construct
  source 1..20: mol_type = other DNA
tcaccccaccccatcctttg

SEQ ID NO: 20769 - DNA, 20 bp, synthetic construct
  source 1..20: mol_type = other DNA
agcgtgggcagctccggatc

SEQ ID NO: 20770 - DNA, 20 bp, synthetic construct
  source 1..20: mol_type = other DNA
acagcccctgggtgtcgacc

SEQ ID NO: 20771 - DNA, 20 bp, synthetic construct
  source 1..20: mol_type = other DNA
ccccccccaaaccttaacta

SEQ ID NO: 20772 - DNA, 20 bp, synthetic construct
  source 1..20: mol_type = other DNA
catctacaccttcaagacgt

SEQ ID NO: 20773 - DNA, 20 bp, synthetic construct
  source 1..20: mol_type = other DNA
tacataacagtagggggtgg

SEQ ID NO: 20774 - DNA, 20 bp, synthetic construct
  source 1..20: mol_type = other DNA
acgcgataccgggtgtgtgg

SEQ ID NO: 20775 - DNA, 20 bp, synthetic construct
  source 1..20: mol_type = other DNA
tcgacagattgttggcgact

SEQ ID NO: 20776 - DNA, 20 bp, synthetic construct
  source 1..20: mol_type = other DNA
ccgctgtttccgttcatcgc

SEQ ID NO: 20777 - DNA, 20 bp, synthetic construct
  source 1..20: mol_type = other DNA
agcgctccgatcggggtcag

SEQ ID NO: 20778 - DNA, 20 bp, synthetic construct
  source 1..20: mol_type = other DNA
tatacagctctgtagagaga

SEQ ID NO: 20779 - DNA, 20 bp, synthetic construct
  source 1..20: mol_type = other DNA
ggtcccccggcccccctaac

SEQ ID NO: 20780 - DNA, 20 bp, synthetic construct
  source 1..20: mol_type = other DNA
ttttatgcgggaacaagggg

SEQ ID NO: 20781 - DNA, 20 bp, synthetic construct
  source 1..20: mol_type = other DNA
taggttgggaggtggcacaa

SEQ ID NO: 20782 - DNA, 20 bp, synthetic construct
  source 1..20: mol_type = other DNA
tccggaagagagcgccccgc

SEQ ID NO: 20783 - DNA, 20 bp, synthetic construct
  source 1..20: mol_type = other DNA
gcctgccaacaccacgtcaa

SEQ ID NO: 20784 - DNA, 20 bp, synthetic construct
  source 1..20: mol_type = other DNA
ggtgagtacgccaaaaattt

SEQ ID NO: 20785 - DNA, 20 bp, synthetic construct
  source 1..20: mol_type = other DNA
tgacataaaagtagtgccaa

SEQ ID NO: 20786 - DNA, 20 bp, synthetic construct
  source 1..20: mol_type = other DNA
gttagccctaggtgtgaata

SEQ ID NO: 20787 - DNA, 20 bp, synthetic construct
  source 1..20: mol_type = other DNA
aagataaagccacctttgcc

SEQ ID NO: 20788 - DNA, 20 bp, synthetic construct
  source 1..20: mol_type = other DNA
gccagtagatcctagactag

SEQ ID NO: 20789 - DNA, 20 bp, synthetic construct
  source 1..20: mol_type = other DNA
catacctagaagaataagac

SEQ ID NO: 20790 - DNA, 20 bp, synthetic construct
  source 1..20: mol_type = other DNA
cattgttcatcagatctagt

SEQ ID NO: 20791 - DNA, 20 bp, synthetic construct
  source 1..20: mol_type = other DNA
ttcaaaattttctacaacat

SEQ ID NO: 20792 - DNA, 20 bp, synthetic construct
  source 1..20: mol_type = other DNA
ccggccccgtcgctcccgtc

SEQ ID NO: 20793 - DNA, 20 bp, synthetic construct
  source 1..20: mol_type = other DNA
ccaggcctaattgtccgcgc

SEQ ID NO: 20794 - DNA, 20 bp, synthetic construct
  source 1..20: mol_type = other DNA
ggttcagttgcacgactccg

SEQ ID NO: 20795 - DNA, 20 bp, synthetic construct
  source 1..20: mol_type = other DNA
catcgcgcccgccctcctcg

SEQ ID NO: 20796 - DNA, 20 bp, synthetic construct
  source 1..20: mol_type = other DNA
tcctgccccattgcgtccgc

SEQ ID NO: 20797 - DNA, 20 bp, synthetic construct
  source 1..20: mol_type = other DNA
agagaagccatcgcgggcgg

SEQ ID NO: 20798 - DNA, 20 bp, synthetic construct
  source 1..20: mol_type = other DNA
catttcctcgtggcgaaccg

SEQ ID NO: 20799 - DNA, 20 bp, synthetic construct
  source 1..20: mol_type = other DNA
gacagcaaccgcctgcacac

SEQ ID NO: 20800 - DNA, 20 bp, synthetic construct
  source 1..20: mol_type = other DNA
tgtgcagccgtgttccaacc

SEQ ID NO: 20801 - DNA, 20 bp, synthetic construct
  source 1..20: mol_type = other DNA
acaaaatccgccggggtgcc

SEQ ID NO: 20802 - DNA, 20 bp, synthetic construct
  source 1..20: mol_type = other DNA
tttaaagcggtggcggcggg

SEQ ID NO: 20803 - DNA, 20 bp, synthetic construct
  source 1..20: mol_type = other DNA
agttccgcgtcgacggcggg

SEQ ID NO: 20804 - DNA, 20 bp, synthetic construct
  source 1..20: mol_type = other DNA
aaatctgcaagtgccccaaa

SEQ ID NO: 20805 - DNA, 20 bp, synthetic construct
  source 1..20: mol_type = other DNA
cgcgcttcgccccagcgccg

SEQ ID NO: 20806 - DNA, 20 bp, synthetic construct
  source 1..20: mol_type = other DNA
gttggcacaaaaagaccccg

SEQ ID NO: 20807 - DNA, 20 bp, synthetic construct
  source 1..20: mol_type = other DNA
aaatacatgcccgggaccca

SEQ ID NO: 20808 - DNA, 20 bp, synthetic construct
  source 1..20: mol_type = other DNA
tggctatccggagaaacagc

SEQ ID NO: 20809 - DNA, 20 bp, synthetic construct
  source 1..20: mol_type = other DNA
cgatcatcagttatccttaa

SEQ ID NO: 20810 - DNA, 20 bp, synthetic construct
  source 1..20: mol_type = other DNA
ttcaggaagccggggagagg

SEQ ID NO: 20811 - DNA, 20 bp, synthetic construct
  source 1..20: mol_type = other DNA
ttgttgggctcccattttac

SEQ ID NO: 20812 - DNA, 20 bp, synthetic construct
  source 1..20: mol_type = other DNA
tgtgggattgcgtggtatgt

SEQ ID NO: 20813 - DNA, 20 bp, synthetic construct
  source 1..20: mol_type = other DNA
cttgggtgtggcacatcgaa

SEQ ID NO: 20814 - DNA, 20 bp, synthetic construct
  source 1..20: mol_type = other DNA
cacccgagtctctgggcgga

SEQ ID NO: 20815 - DNA, 20 bp, synthetic construct
  source 1..20: mol_type = other DNA
cggcggcgaccgttgcgtgg

SEQ ID NO: 20816 - DNA, 20 bp, synthetic construct
  source 1..20: mol_type = other DNA
ggcagcatgggacccacaga

SEQ ID NO: 20817 - DNA, 20 bp, synthetic construct
  source 1..20: mol_type = other DNA
ctcggcactcggagcgagac

SEQ ID NO: 20818 - DNA, 20 bp, synthetic construct
  source 1..20: mol_type = other DNA
agcaaggcgtccattctccc

SEQ ID NO: 20819 - DNA, 20 bp, synthetic construct
  source 1..20: mol_type = other DNA
atccagcgaagcagccgcct

SEQ ID NO: 20820 - DNA, 20 bp, synthetic construct
  source 1..20: mol_type = other DNA
cgagcttaagcctctcctgg

SEQ ID NO: 20821 - DNA, 20 bp, synthetic construct
  source 1..20: mol_type = other DNA
cacccggcggcgcgctcaac

SEQ ID NO: 20822 - DNA, 20 bp, synthetic construct
  source 1..20: mol_type = other DNA
acgcgagactatcagagcac

SEQ ID NO: 20823 - DNA, 20 bp, synthetic construct
  source 1..20: mol_type = other DNA
cgtgatcggggtacttcgcc

SEQ ID NO: 20824 - DNA, 20 bp, synthetic construct
  source 1..20: mol_type = other DNA
ggttttgtcgcaaggtgtcg

SEQ ID NO: 20825 - DNA, 20 bp, synthetic construct
  source 1..20: mol_type = other DNA
actcgggggacccgcatcgc

SEQ ID NO: 20826 - DNA, 20 bp, synthetic construct
  source 1..20: mol_type = other DNA
tttgggtccgggcccgtcgt

SEQ ID NO: 20827 - DNA, 20 bp, synthetic construct
  source 1..20: mol_type = other DNA
ctccccgggccaatatcgct

SEQ ID NO: 20828 - DNA, 20 bp, synthetic construct
  source 1..20: mol_type = other DNA
tatcaaaacactcgcctccg

SEQ ID NO: 20829 - DNA, 20 bp, synthetic construct
  source 1..20: mol_type = other DNA
aagcgaccctttgcggtttc

SEQ ID NO: 20830 - DNA, 20 bp, synthetic construct
  source 1..20: mol_type = other DNA
cgcacgaggacgagtccgcg

SEQ ID NO: 20831 - DNA, 20 bp, synthetic construct
  source 1..20: mol_type = other DNA
acatccaccgtagggggcct

SEQ ID NO: 20832 - DNA, 20 bp, synthetic construct
  source 1..20: mol_type = other DNA
caatacgcccgcgtttcttc

SEQ ID NO: 20833 - DNA, 20 bp, synthetic construct
  source 1..20: mol_type = other DNA
agccctgccatagccacggg

SEQ ID NO: 20834 - DNA, 20 bp, synthetic construct
  source 1..20: mol_type = other DNA
gcgtgaaactcccgcacctc

SEQ ID NO: 20835 - DNA, 20 bp, synthetic construct
  source 1..20: mol_type = other DNA
gccagacgcgggtccgctgt

SEQ ID NO: 20836 - DNA, 20 bp, synthetic construct
  source 1..20: mol_type = other DNA
ccggcggttggcgtgaacgc

SEQ ID NO: 20837 - DNA, 20 bp, synthetic construct
  source 1..20: mol_type = other DNA
caaccccggtctccaaccct

SEQ ID NO: 20838 - DNA, 20 bp, synthetic construct
  source 1..20: mol_type = other DNA
cgtcgtgccgggattacctc

SEQ ID NO: 20839 - DNA, 20 bp, synthetic construct
  source 1..20: mol_type = other DNA
gagcctcgttaagagccagg

SEQ ID NO: 20840 - DNA, 20 bp, synthetic construct
  source 1..20: mol_type = other DNA
ccctttggtgggtttacgcg

SEQ ID NO: 20841 - DNA, 20 bp, synthetic construct
  source 1..20: mol_type = other DNA
gccctcccgaccgacacccc

SEQ ID NO: 20842 - DNA, 20 bp, synthetic construct
  source 1..20: mol_type = other DNA
ctcgcaacgcctgcgggggt

SEQ ID NO: 20843 - DNA, 20 bp, synthetic construct
  source 1..20: mol_type = other DNA
tctcgtcgttggtctacgct

SEQ ID NO: 20844 - DNA, 20 bp, synthetic construct
  source 1..20: mol_type = other DNA
ctgctctcgcctactcttct

SEQ ID NO: 20845 - DNA, 20 bp, synthetic construct
  source 1..20: mol_type = other DNA
gccgacgtcccctctcgagc

SEQ ID NO: 20846 - DNA, 20 bp, synthetic construct
  source 1..20: mol_type = other DNA
aggcccgccgccactgtcgt

SEQ ID NO: 20847 - DNA, 20 bp, synthetic construct
  source 1..20: mol_type = other DNA
ctaacggattattgtcctct

SEQ ID NO: 20848 - DNA, 20 bp, synthetic construct
  source 1..20: mol_type = other DNA
ccaaccacgccttagttagg

SEQ ID NO: 20849 - DNA, 20 bp, synthetic construct
  source 1..20: mol_type = other DNA
cctggctgccatcaaaaccc

SEQ ID NO: 20850 - DNA, 20 bp, synthetic construct
  source 1..20: mol_type = other DNA
accgaagcccacctcgtcac

SEQ ID NO: 20851 - DNA, 20 bp, synthetic construct
  source 1..20: mol_type = other DNA
ctatcccgcccaccgctggg

SEQ ID NO: 20852 - DNA, 20 bp, synthetic construct
  source 1..20: mol_type = other DNA
ggagcaaaacgcctccccct

SEQ ID NO: 20853 - DNA, 20 bp, synthetic construct
  source 1..20: mol_type = other DNA
acctaccaacggaacgtctg

SEQ ID NO: 20854 - DNA, 20 bp, synthetic construct
  source 1..20: mol_type = other DNA
tacaaactccctggtcttac

SEQ ID NO: 20855 - DNA, 20 bp, synthetic construct
  source 1..20: mol_type = other DNA
aacaagtgggggctcgtccg

SEQ ID NO: 20856 - DNA, 20 bp, synthetic construct
  source 1..20: mol_type = other DNA
ttctgtgttgtctctgtttg

SEQ ID NO: 20857 - DNA, 20 bp, synthetic construct
  source 1..20: mol_type = other DNA
caacctcgtcacggagaatc

SEQ ID NO: 20858 - DNA, 20 bp, synthetic construct
  source 1..20: mol_type = other DNA
tacttccggtattaagccct

SEQ ID NO: 20859 - DNA, 20 bp, synthetic construct
  source 1..20: mol_type = other DNA
actaaagattggagaaggtc

SEQ ID NO: 20860 - DNA, 20 bp, synthetic construct
  source 1..20: mol_type = other DNA
aaggctcttgcttactatcc

SEQ ID NO: 20861 - DNA, 20 bp, synthetic construct
  source 1..20: mol_type = other DNA
cagccggggtcccgcccccg

SEQ ID NO: 20862 - DNA, 20 bp, synthetic construct
  source 1..20: mol_type = other DNA
ccacagtgtgagattaacat

SEQ ID NO: 20863 - DNA, 20 bp, synthetic construct
  source 1..20: mol_type = other DNA
tcgttgtgggcatcgttgga

SEQ ID NO: 20864 - DNA, 20 bp, synthetic construct
  source 1..20: mol_type = other DNA
gggataatacttatcatttt

SEQ ID NO: 20865 - DNA, 20 bp, synthetic construct
  source 1..20: mol_type = other DNA
agcaagggagaaacacgtgg

SEQ ID NO: 20866 - DNA, 20 bp, synthetic construct
  source 1..20: mol_type = other DNA
tagggatggccgaaaggcag

SEQ ID NO: 20867 - DNA, 20 bp, synthetic construct
  source 1..20: mol_type = other DNA
tactattgagttcgcccgct

SEQ ID NO: 20868 - DNA, 20 bp, synthetic construct
  source 1..20: mol_type = other DNA
cattcactttgcagtttgtt

SEQ ID NO: 20869 - DNA, 20 bp, synthetic construct
  source 1..20: mol_type = other DNA
acgagtgaggtcgacgtcat

SEQ ID NO: 20870 - DNA, 20 bp, synthetic construct
  source 1..20: mol_type = other DNA
acaagcctccccccaggccc

SEQ ID NO: 20871 - DNA, 20 bp, synthetic construct
  source 1..20: mol_type = other DNA
atcctcctctctacaccaac

SEQ ID NO: 20872 - DNA, 20 bp, synthetic construct
  source 1..20: mol_type = other DNA
attaaggcctaagtggagga

SEQ ID NO: 20873 - DNA, 20 bp, synthetic construct
  source 1..20: mol_type = other DNA
gaaatctgtgagtattgaca

SEQ ID NO: 20874 - DNA, 20 bp, synthetic construct
  source 1..20: mol_type = other DNA
tacgtcacaggagagcatac

SEQ ID NO: 20875 - DNA, 20 bp, synthetic construct
  source 1..20: mol_type = other DNA
agacacctagggatggaaga

SEQ ID NO: 20876 - DNA, 20 bp, synthetic construct
  source 1..20: mol_type = other DNA
taccgtaacaatccctcacc

SEQ ID NO: 20877 - DNA, 20 bp, synthetic construct
  source 1..20: mol_type = other DNA
ttctggaaagcctctgtgtc

SEQ ID NO: 20878 - DNA, 20 bp, synthetic construct
  source 1..20: mol_type = other DNA
acagtgacaattggtcttgg

SEQ ID NO: 20879 - DNA, 20 bp, synthetic construct
  source 1..20: mol_type = other DNA
attaaacagtgtctcaggtt

SEQ ID NO: 20880 - DNA, 20 bp, synthetic construct
  source 1..20: mol_type = other DNA
agacaatcattcagccccgt

SEQ ID NO: 20881 - DNA, 20 bp, synthetic construct
  source 1..20: mol_type = other DNA
ctgaaagtggtcaggattga

SEQ ID NO: 20882 - DNA, 20 bp, synthetic construct
  source 1..20: mol_type = other DNA
taattgtctacgggtagttt

SEQ ID NO: 20883 - DNA, 20 bp, synthetic construct
  source 1..20: mol_type = other DNA
gtcctcctgaccacccccac

SEQ ID NO: 20884 - DNA, 20 bp, synthetic construct
  source 1..20: mol_type = other DNA
accaatcaagacctctcgga

SEQ ID NO: 20885 - DNA, 20 bp, synthetic construct
  source 1..20: mol_type = other DNA
ctggccggcgaccatacctg

SEQ ID NO: 20886 - DNA, 20 bp, synthetic construct
  source 1..20: mol_type = other DNA
cctcggattgtggacaggag

SEQ ID NO: 20887 - DNA, 20 bp, synthetic construct
  source 1..20: mol_type = other DNA
gctagcagtgaaaatgctaa

SEQ ID NO: 20888 - DNA, 20 bp, synthetic construct
  source 1..20: mol_type = other DNA
ggggctagctcgggtccaca

SEQ ID NO: 20889 - DNA, 20 bp, synthetic construct
  source 1..20: mol_type = other DNA
aaacctactggtcctgttat

SEQ ID NO: 20890 - DNA, 20 bp, synthetic construct
  source 1..20: mol_type = other DNA
tgctataagcacaactttcc

SEQ ID NO: 20891 - DNA, 20 bp, synthetic construct
  source 1..20: mol_type = other DNA
atcgagttgctaggcaataa

SEQ ID NO: 20892 - DNA, 20 bp, synthetic construct
  source 1..20: mol_type = other DNA
atgcccacggcacatcttaa

SEQ ID NO: 20893 - DNA, 20 bp, synthetic construct
  source 1..20: mol_type = other DNA
gaggacgtatcggaaactct

SEQ ID NO: 20894 - DNA, 20 bp, synthetic construct
  source 1..20: mol_type = other DNA
cgagcaggatctccattttg

SEQ ID NO: 20895 - DNA, 20 bp, synthetic construct
  source 1..20: mol_type = other DNA
cctcacctttcattgtcgat

SEQ ID NO: 20896 - DNA, 20 bp, synthetic construct
  source 1..20: mol_type = other DNA
acatcataagaagcgccata

SEQ ID NO: 20897 - DNA, 20 bp, synthetic construct
  source 1..20: mol_type = other DNA
cacagaaccccagctgctat

SEQ ID NO: 20898 - DNA, 20 bp, synthetic construct
  source 1..20: mol_type = other DNA
agcgaccgaacggaccatat

SEQ ID NO: 20899 - DNA, 20 bp, synthetic construct
  source 1..20: mol_type = other DNA
ggcatagttgttatcgttct

SEQ ID NO: 20900 - DNA, 20 bp, synthetic construct
  source 1..20: mol_type = other DNA
acacaattgcctacctgctt

SEQ ID NO: 20901 - DNA, 20 bp, synthetic construct
  source 1..20: mol_type = other DNA
ctcgaagcttattgtcttca

SEQ ID NO: 20902 - DNA, 20 bp, synthetic construct
  source 1..20: mol_type = other DNA
agattaagccgacagtgagc

SEQ ID NO: 20903 - DNA, 20 bp, synthetic construct
  source 1..20: mol_type = other DNA
taaccaaaataaactccact

SEQ ID NO: 20904 - DNA, 20 bp, synthetic construct
  source 1..20: mol_type = other DNA
gggaaagaagcctttttatt

SEQ ID NO: 20905 - DNA, 20 bp, synthetic construct
  source 1..20: mol_type = other DNA
gtgtggaagcaaagttctgt

SEQ ID NO: 20906 - DNA, 20 bp, synthetic construct
  source 1..20: mol_type = other DNA
acaaacacttttggtcttgg

SEQ ID NO: 20907 - DNA, 20 bp, synthetic construct
  source 1..20: mol_type = other DNA
tactatatgtgtctcctata

SEQ ID NO: 20908 - DNA, 20 bp, synthetic construct
  source 1..20: mol_type = other DNA
ttctccagttacggagcgag

SEQ ID NO: 20909 - DNA, 20 bp, synthetic construct
  source 1..20: mol_type = other DNA
atgggcgcggacctgcactg

SEQ ID NO: 20910 - DNA, 20 bp, synthetic construct
  source 1..20: mol_type = other DNA
gagggcgagtacctggaaga

SEQ ID NO: 20911 - DNA, 20 bp, synthetic construct
  source 1..20: mol_type = other DNA
gtggtggtggtaacccgttc

SEQ ID NO: 20912 - DNA, 20 bp, synthetic construct
  source 1..20: mol_type = other DNA
ggccatggcgaccagcgtgc

SEQ ID NO: 20913 - DNA, 20 bp, synthetic construct
  source 1..20: mol_type = other DNA
aggtgatgtcagtatttata

SEQ ID NO: 20914 - DNA, 20 bp, synthetic construct
  source 1..20: mol_type = other DNA
agatgttcacttcgcgatgt

SEQ ID NO: 20915 - DNA, 20 bp, synthetic construct
  source 1..20: mol_type = other DNA
ctaccacccgagcattacca

SEQ ID NO: 20916 - DNA, 20 bp, synthetic construct
  source 1..20: mol_type = other DNA
gaatggactctgacgctcct

SEQ ID NO: 20917 - DNA, 20 bp, synthetic construct
  source 1..20: mol_type = other DNA
gagtgtgaagcgccgccgct

SEQ ID NO: 20918 - DNA, 20 bp, synthetic construct
  source 1..20: mol_type = other DNA
tgtccagaaggaggagtgaa

SEQ ID NO: 20919 - DNA, 20 bp, synthetic construct
  source 1..20: mol_type = other DNA
tcagccggtaacgccaccac

SEQ ID NO: 20920 - DNA, 20 bp, synthetic construct
  source 1..20: mol_type = other DNA
ttcctccgcggccggccatt

SEQ ID NO: 20921 - DNA, 20 bp, synthetic construct
  source 1..20: mol_type = other DNA
cagcgcacgcttgaggacgc

SEQ ID NO: 20922 - DNA, 20 bp, synthetic construct
  source 1..20: mol_type = other DNA
tcccgaacttcgatgccatc

SEQ ID NO: 20923 - DNA, 20 bp, synthetic construct
  source 1..20: mol_type = other DNA
agtgcggatcgtcgtcgaag

SEQ ID NO: 20924 - DNA, 20 bp, synthetic construct
  source 1..20: mol_type = other DNA
cgtcggtgtgctttgtgggt

SEQ ID NO: 20925 - DNA, 20 bp, synthetic construct
  source 1..20: mol_type = other DNA
ttcatcttctgccgccgcat

SEQ ID NO: 20926 - DNA, 20 bp, synthetic construct
  source 1..20: mol_type = other DNA
ggtctaaggaatcttctctt

SEQ ID NO: 20927 - DNA, 20 bp, synthetic construct
  source 1..20: mol_type = other DNA
taccgcgaccaaagagtggc

SEQ ID NO: 20928 - DNA, 20 bp, synthetic construct
  source 1..20: mol_type = other DNA
ggaatccatctgaagagacg

SEQ ID NO: 20929 - DNA, 20 bp, synthetic construct
  source 1..20: mol_type = other DNA
catcatccacccgcgcgcgc

SEQ ID NO: 20930 - DNA, 20 bp, synthetic construct
  source 1..20: mol_type = other DNA
tgtcaaattcctcctgtccc

SEQ ID NO: 20931 - DNA, 20 bp, synthetic construct
  source 1..20: mol_type = other DNA
gacctgcattttgaagtgtt

SEQ ID NO: 20932 - DNA, 20 bp, synthetic construct
  source 1..20: mol_type = other DNA
aggggcagaatgattaaaat

SEQ ID NO: 20933 - DNA, 20 bp, synthetic construct
  source 1..20: mol_type = other DNA
aaaaatttcggagaagatat

SEQ ID NO: 20934 - DNA, 20 bp, synthetic construct
  source 1..20: mol_type = other DNA
cgtgttggcgggtattttta

SEQ ID NO: 20935 - DNA, 20 bp, synthetic construct
  source 1..20: mol_type = other DNA
agctcagctttttctctgac

SEQ ID NO: 20936 - DNA, 20 bp, synthetic construct
  source 1..20: mol_type = other DNA
acggggacacggacagcctc

SEQ ID NO: 20937 - DNA, 20 bp, synthetic construct
  source 1..20: mol_type = other DNA
agggcgagctcaacgagccg

SEQ ID NO: 20938 - DNA, 20 bp, synthetic construct
  source 1..20: mol_type = other DNA
gtgtaggtttccacatcgta

SEQ ID NO: 20939 - DNA, 20 bp, synthetic construct
  source 1..20: mol_type = other DNA
ggtggaagccatctctggat

SEQ ID NO: 20940 - DNA, 20 bp, synthetic construct
  source 1..20: mol_type = other DNA
gagattacccagctcggagt

SEQ ID NO: 20941 - DNA, 20 bp, synthetic construct
  source 1..20: mol_type = other DNA
tccgggatcgatcacctctc

SEQ ID NO: 20942 - DNA, 20 bp, synthetic construct
  source 1..20: mol_type = other DNA
gatcattctctatctctatt

SEQ ID NO: 20943 - DNA, 20 bp, synthetic construct
  source 1..20: mol_type = other DNA
agacagatcccaaaatcata

SEQ ID NO: 20944 - DNA, 20 bp, synthetic construct
  source 1..20: mol_type = other DNA
actaaacgttccacaataaa

SEQ ID NO: 20945 - DNA, 20 bp, synthetic construct
  source 1..20: mol_type = other DNA
cagtggatacctcagcatcc

SEQ ID NO: 20946 - DNA, 20 bp, synthetic construct
  source 1..20: mol_type = other DNA
tcctgaagccgaaggagagg

SEQ ID NO: 20947 - DNA, 20 bp, synthetic construct
  source 1..20: mol_type = other DNA
gtacattgtagcatacatac

SEQ ID NO: 20948 - DNA, 20 bp, synthetic construct
  source 1..20: mol_type = other DNA
ccagtcgttttgacagttgg

SEQ ID NO: 20949 - DNA, 20 bp, synthetic construct
  source 1..20: mol_type = other DNA
cccaaaggagaccacctcag

SEQ ID NO: 20950 - DNA, 20 bp, synthetic construct
  source 1..20: mol_type = other DNA
gaggcccacgaataggctag

SEQ ID NO: 20951 - DNA, 20 bp, synthetic construct
  source 1..20: mol_type = other DNA
tgtgttgagaaaaagacagc

SEQ ID NO: 20952 - DNA, 20 bp, synthetic construct
  source 1..20: mol_type = other DNA
cgtgaacgtgttgagaaaaa

SEQ ID NO: 20953 - DNA, 20 bp, synthetic construct
  source 1..20: mol_type = other DNA
aactagtctatgaccagacg

SEQ ID NO: 20954 - DNA, 20 bp, synthetic construct
  source 1..20: mol_type = other DNA
agtatgaaagctactctcag

SEQ ID NO: 20955 - DNA, 20 bp, synthetic construct
  source 1..20: mol_type = other DNA
gatctggggtatcacattcc

SEQ ID NO: 20956 - DNA, 20 bp, synthetic construct
  source 1..20: mol_type = other DNA
taagcgactatggatctgat

SEQ ID NO: 20957 - DNA, 20 bp, synthetic construct
  source 1..20: mol_type = other DNA
ccccccacagggatgtgggg

SEQ ID NO: 20958 - DNA, 20 bp, synthetic construct
  source 1..20: mol_type = other DNA
ggaacctttgtggctcctct

SEQ ID NO: 20959 - DNA, 20 bp, synthetic construct
  source 1..20: mol_type = other DNA
aggggcctatattttcctgc

SEQ ID NO: 20960 - DNA, 20 bp, synthetic construct
  source 1..20: mol_type = other DNA
tttgtactaggaggctgtag

SEQ ID NO: 20961 - DNA, 20 bp, synthetic construct
  source 1..20: mol_type = other DNA
tgcagttaatcattacttca

SEQ ID NO: 20962 - DNA, 20 bp, synthetic construct
  source 1..20: mol_type = other DNA
tggggtggagccctcaggct

SEQ ID NO: 20963 - DNA, 20 bp, synthetic construct
  source 1..20: mol_type = other DNA
gaagaatgtcctgaaggcaa

SEQ ID NO: 20964 - DNA, 20 bp, synthetic construct
  source 1..20: mol_type = other DNA
aagcagcagcagaaacgcgg

SEQ ID NO: 20965 - DNA, 20 bp, synthetic construct
  source 1..20: mol_type = other DNA
tcgacgcggggtcaaaaact

SEQ ID NO: 20966 - DNA, 20 bp, synthetic construct
  source 1..20: mol_type = other DNA
ttgcatatccctaggcacct

SEQ ID NO: 20967 - DNA, 20 bp, synthetic construct
  source 1..20: mol_type = other DNA
gtcgcggctggccgcctgta

SEQ ID NO: 20968 - DNA, 20 bp, synthetic construct
  source 1..20: mol_type = other DNA
tacctttcctaatgcatttc

SEQ ID NO: 20969 - DNA, 20 bp, synthetic construct
  source 1..20: mol_type = other DNA
tggccatgtggaccatgcag

SEQ ID NO: 20970 - DNA, 20 bp, synthetic construct
  source 1..20: mol_type = other DNA
tgggaacactggcacctggg

SEQ ID NO: 20971 - DNA, 20 bp, synthetic construct
  source 1..20: mol_type = other DNA
gggtttgtgggtgtcataca

SEQ ID NO: 20972 - DNA, 20 bp, synthetic construct
  source 1..20: mol_type = other DNA
tttgtatttttcattttttt

SEQ ID NO: 20973 - DNA, 20 bp, synthetic construct
  source 1..20: mol_type = other DNA
aggtttgctacctaaaaaac

SEQ ID NO: 20974 - DNA, 20 bp, synthetic construct
  source 1..20: mol_type = other DNA
gtggtaacaagttgttgtag

SEQ ID NO: 20975 - DNA, 20 bp, synthetic construct
  source 1..20: mol_type = other DNA
agttgaaaccttggtttccg

SEQ ID NO: 20976 - DNA, 20 bp, synthetic construct
  source 1..20: mol_type = other DNA
gacagtcaaaatgattatga

SEQ ID NO: 20977 - DNA, 20 bp, synthetic construct
  source 1..20: mol_type = other DNA
ctcaagaaaagaaactgggc

SEQ ID NO: 20978 - DNA, 20 bp, synthetic construct
  source 1..20: mol_type = other DNA
ccaataatatcgtacatctt

SEQ ID NO: 20979 - DNA, 20 bp, synthetic construct
  source 1..20: mol_type = other DNA
attaaggcgacaacgagccg

SEQ ID NO: 20980 - DNA, 20 bp, synthetic construct
  source 1..20: mol_type = other DNA
gagattgtaggtagaaagga

SEQ ID NO: 20981 - DNA, 20 bp, synthetic construct
  source 1..20: mol_type = other DNA
aagatggatcctgtatctgt

SEQ ID NO: 20982 - DNA, 20 bp, synthetic construct
  source 1..20: mol_type = other DNA
gtttaagagttgacaaggtc

SEQ ID NO: 20983 - DNA, 20 bp, synthetic construct
  source 1..20: mol_type = other DNA
gcaagcgtatagttcgggat

SEQ ID NO: 20984 - DNA, 20 bp, synthetic construct
  source 1..20: mol_type = other DNA
ttgtaaaaaatgtgcttacc

SEQ ID NO: 20985 - DNA, 20 bp, synthetic construct
  source 1..20: mol_type = other DNA
aaaatgaaacagggtttcaa

SEQ ID NO: 20986 - DNA, 20 bp, synthetic construct
  source 1..20: mol_type = other DNA
tactactttagttcaatatg

SEQ ID NO: 20987 - DNA, 20 bp, synthetic construct
  source 1..20: mol_type = other DNA
tgtctttaattgcctcttgt

SEQ ID NO: 20988 - DNA, 20 bp, synthetic construct
  source 1..20: mol_type = other DNA
tccgaatgtcctattttgat

SEQ ID NO: 20989 - DNA, 20 bp, synthetic construct
  source 1..20: mol_type = other DNA
aagctcctttggttgttcgc

SEQ ID NO: 20990 - DNA, 20 bp, synthetic construct
  source 1..20: mol_type = other DNA
gaaatcacagagtatcattt

SEQ ID NO: 20991 - DNA, 20 bp, synthetic construct
  source 1..20: mol_type = other DNA
tgtggagatctaggacacat

SEQ ID NO: 20992 - DNA, 20 bp, synthetic construct
  source 1..20: mol_type = other DNA
agctatgcaaagtatagata

SEQ ID NO: 20993 - DNA, 20 bp, synthetic construct
  source 1..20: mol_type = other DNA
tgagtttgtaaataagtttc

SEQ ID NO: 20994 - DNA, 20 bp, synthetic construct
  source 1..20: mol_type = other DNA
tgagggacatttggactatc

SEQ ID NO: 20995 - DNA, 20 bp, synthetic construct
  source 1..20: mol_type = other DNA
agagttagaggagcttggaa

SEQ ID NO: 20996 - DNA, 20 bp, synthetic construct
  source 1..20: mol_type = other DNA
ctacaagatagtttcctcgt

SEQ ID NO: 20997 - DNA, 20 bp, synthetic construct
  source 1..20: mol_type = other DNA
ttattaacctctatatttct

SEQ ID NO: 20998 - DNA, 20 bp, synthetic construct
  source 1..20: mol_type = other DNA
tggcgtcgcaaggcaccaaa

SEQ ID NO: 20999 - DNA, 20 bp, synthetic construct
  source 1..20: mol_type = other DNA
tctaaccgaggtcgaaacgt

SEQ ID NO: 21000 - DNA, 20 bp, synthetic construct
  source 1..20: mol_type = other DNA
caacctggccatcgggctgc

SEQ ID NO: 21001 - DNA, 20 bp, synthetic construct
  source 1..20: mol_type = other DNA
gcaggtggcgcccaacgtgg

SEQ ID NO: 21002 - DNA, 20 bp, synthetic construct
  source 1..20: mol_type = other DNA
agtaaaatgggtgtctattt

SEQ ID NO: 21003 - DNA, 20 bp, synthetic construct
  source 1..20: mol_type = other DNA
ggtaaacagcatcaaggtat

SEQ ID NO: 21004 - DNA, 20 bp, synthetic construct
  source 1..20: mol_type = other DNA
caatctgtggtatggaccag

SEQ ID NO: 21005 - DNA, 20 bp, synthetic construct
  source 1..20: mol_type = other DNA
gctaaccaatttaatttggt

SEQ ID NO: 21006 - DNA, 20 bp, synthetic construct
  source 1..20: mol_type = other DNA
ctaaccaatttaatttggtg

SEQ ID NO: 21007 - DNA, 20 bp, synthetic construct
  source 1..20: mol_type = other DNA
tgagtaaaattttaaacaca

SEQ ID NO: 21008 - DNA, 20 bp, synthetic construct
  source 1..20: mol_type = other DNA
cagtaaatgaaataaaaagc

SEQ ID NO: 21009 - DNA, 20 bp, synthetic construct
  source 1..20: mol_type = other DNA
agacttgctgctagaagaac

SEQ ID NO: 21010 - DNA, 20 bp, synthetic construct
  source 1..20: mol_type = other DNA
atacacatcctggcagttca

SEQ ID NO: 21011 - DNA, 20 bp, synthetic construct
  source 1..20: mol_type = other DNA
gaagttatatacactgagcc

SEQ ID NO: 21012 - DNA, 20 bp, synthetic construct
  source 1..20: mol_type = other DNA
gtggataatgttactaggct

SEQ ID NO: 21013 - DNA, 20 bp, synthetic construct
  source 1..20: mol_type = other DNA
aaaccaccagtccttgatgt

SEQ ID NO: 21014 - DNA, 20 bp, synthetic construct
  source 1..20: mol_type = other DNA
ttgacaggataagcgatact

SEQ ID NO: 21015 - DNA, 20 bp, synthetic construct
  source 1..20: mol_type = other DNA
aataatggtcgttttggtgg

SEQ ID NO: 21016 - DNA, 20 bp, synthetic construct
  source 1..20: mol_type = other DNA
aagtgttgtattttctgtgt

SEQ ID NO: 21017 - DNA, 20 bp, synthetic construct
  source 1..20: mol_type = other DNA
gatctgtctgctgagggtag

SEQ ID NO: 21018 - DNA, 20 bp, synthetic construct
  source 1..20: mol_type = other DNA
cgcgagacctggtgtttgac

SEQ ID NO: 21019 - DNA, 20 bp, synthetic construct
  source 1..20: mol_type = other DNA
gagtcgattcggtcggttaa

SEQ ID NO: 21020 - DNA, 20 bp, synthetic construct
  source 1..20: mol_type = other DNA
cgggagactaggtcgtcttg

SEQ ID NO: 21021 - DNA, 20 bp, synthetic construct
  source 1..20: mol_type = other DNA
aaccaaaccacaaggcagac

SEQ ID NO: 21022 - DNA, 20 bp, synthetic construct
  source 1..20: mol_type = other DNA
aaccaccacctggatcacgc

SEQ ID NO: 21023 - DNA, 20 bp, synthetic construct
  source 1..20: mol_type = other DNA
agtctggagcgtagtgccta

SEQ ID NO: 21024 - DNA, 20 bp, synthetic construct
  source 1..20: mol_type = other DNA
cgacttgtgtaccgattctg

SEQ ID NO: 21025 - DNA, 20 bp, synthetic construct
  source 1..20: mol_type = other DNA
tcggagagggtatattcgtt

SEQ ID NO: 21026 - DNA, 20 bp, synthetic construct
  source 1..20: mol_type = other DNA
cctcttcgtccccgtcgcct

SEQ ID NO: 21027 - DNA, 20 bp, synthetic construct
  source 1..20: mol_type = other DNA
gacacgcaacttttggccgc

SEQ ID NO: 21028 - DNA, 20 bp, synthetic construct
  source 1..20: mol_type = other DNA
gttcacctttgcgcatcccc

SEQ ID NO: 21029 - DNA, 20 bp, synthetic construct
  source 1..20: mol_type = other DNA
acactcaataatccgcggtt

SEQ ID NO: 21030 - DNA, 20 bp, synthetic construct
  source 1..20: mol_type = other DNA
accgcaggttagcggcgagt

SEQ ID NO: 21031 - DNA, 20 bp, synthetic construct
  source 1..20: mol_type = other DNA
gttcgtctccgcttctcctc

SEQ ID NO: 21032 - DNA, 20 bp, synthetic construct
  source 1..20: mol_type = other DNA
gctgctttccccgagctccg

SEQ ID NO: 21033 - DNA, 20 bp, synthetic construct
  source 1..20: mol_type = other DNA
gccacatcgggcctgtgttc

SEQ ID NO: 21034 - DNA, 20 bp, synthetic construct
  source 1..20: mol_type = other DNA
gacggcagttctgaacccac

SEQ ID NO: 21035 - DNA, 20 bp, synthetic construct
  source 1..20: mol_type = other DNA
cgcccgtcccacaagccacg

SEQ ID NO: 21036 - DNA, 20 bp, synthetic construct
  source 1..20: mol_type = other DNA
gtggagtgcgtcaacgacat

SEQ ID NO: 21037 - DNA, 20 bp, synthetic construct
  source 1..20: mol_type = other DNA
ccactatcagtgcaatattt

SEQ ID NO: 21038 - DNA, 20 bp, synthetic construct
  source 1..20: mol_type = other DNA
tcatctggtagcgcttgcgg

SEQ ID NO: 21039 - DNA, 20 bp, synthetic construct
  source 1..20: mol_type = other DNA
aggaccttgacggtgactgc

SEQ ID NO: 21040 - DNA, 20 bp, synthetic construct
  source 1..20: mol_type = other DNA
ttccactgcgaccacatccc

SEQ ID NO: 21041 - DNA, 20 bp, synthetic construct
  source 1..20: mol_type = other DNA
ttagaccgttggagtcgcga

SEQ ID NO: 21042 - DNA, 20 bp, synthetic construct
  source 1..20: mol_type = other DNA
ccgcgcgcccccatcgcctc

SEQ ID NO: 21043 - DNA, 20 bp, synthetic construct
  source 1..20: mol_type = other DNA
gccgatgacgacaggctcgc

SEQ ID NO: 21044 - DNA, 20 bp, synthetic construct
  source 1..20: mol_type = other DNA
ctatcaacgtcttgtcgcta

SEQ ID NO: 21045 - DNA, 20 bp, synthetic construct
  source 1..20: mol_type = other DNA
agtctgaaacggggtgggag

SEQ ID NO: 21046 - DNA, 20 bp, synthetic construct
  source 1..20: mol_type = other DNA
ggcagacgaggagcggcgcg

SEQ ID NO: 21047 - DNA, 20 bp, synthetic construct
  source 1..20: mol_type = other DNA
gcacgcgcgtgccgccggcc

SEQ ID NO: 21048 - DNA, 20 bp, synthetic construct
  source 1..20: mol_type = other DNA
tgcacactccgtagagcagc

SEQ ID NO: 21049 - DNA, 20 bp, synthetic construct
  source 1..20: mol_type = other DNA
cctgggacgcgcagttgggc

SEQ ID NO: 21050 - DNA, 20 bp, synthetic construct
  source 1..20: mol_type = other DNA
gggtgttgctaggcgggctg

SEQ ID NO: 21051 - DNA, 20 bp, synthetic construct
  source 1..20: mol_type = other DNA
gcccgagctgaagcagacgc

SEQ ID NO: 21052 - DNA, 20 bp, synthetic construct
  source 1..20: mol_type = other DNA
cgccaactggctccttaccg

SEQ ID NO: 21053 - DNA, 20 bp, synthetic construct
  source 1..20: mol_type = other DNA
accctgtgcgcttccatcgt

SEQ ID NO: 21054 - DNA, 20 bp, synthetic construct
  source 1..20: mol_type = other DNA
cacttgccgctgtacaacga

SEQ ID NO: 21055 - DNA, 20 bp, synthetic construct
  source 1..20: mol_type = other DNA
tcagcctctgtgttcccaac

SEQ ID NO: 21056 - DNA, 20 bp, synthetic construct
  source 1..20: mol_type = other DNA
tcctgccacatatagctcgt

SEQ ID NO: 21057 - DNA, 20 bp, synthetic construct
  source 1..20: mol_type = other DNA
gtttaataaaagtagctttt

SEQ ID NO: 21058 - DNA, 20 bp, synthetic construct
  source 1..20: mol_type = other DNA
agacgtcagaaccgtcgcgg

SEQ ID NO: 21059 - DNA, 20 bp, synthetic construct
  source 1..20: mol_type = other DNA
gatggcggcgatatgggctc

SEQ ID NO: 21060 - DNA, 20 bp, synthetic construct
  source 1..20: mol_type = other DNA
cgtcgttcgcggacatagca

SEQ ID NO: 21061 - DNA, 20 bp, synthetic construct
  source 1..20: mol_type = other DNA
atgagtcgggcggtggccgg

SEQ ID NO: 21062 - DNA, 20 bp, synthetic construct
  source 1..20: mol_type = other DNA
gaacaacgcatttacgacgt

SEQ ID NO: 21063 - DNA, 20 bp, synthetic construct
  source 1..20: mol_type = other DNA
atgttaatgtaacaagacaa

SEQ ID NO: 21064 - DNA, 20 bp, synthetic construct
  source 1..20: mol_type = other DNA
ataagagcccggtgctatcg

SEQ ID NO: 21065 - DNA, 20 bp, synthetic construct
  source 1..20: mol_type = other DNA
cgtaggtggactttgtagta

SEQ ID NO: 21066 - DNA, 20 bp, synthetic construct
  source 1..20: mol_type = other DNA
gacaccgttcggccccatga

SEQ ID NO: 21067 - DNA, 20 bp, synthetic construct
  source 1..20: mol_type = other DNA
gttgcgggcatcccgggcga

SEQ ID NO: 21068 - DNA, 20 bp, synthetic construct
  source 1..20: mol_type = other DNA
gaacaggcgggcagcgtctc

SEQ ID NO: 21069 - DNA, 20 bp, synthetic construct
  source 1..20: mol_type = other DNA
acagtccctacggaacctga

SEQ ID NO: 21070 - DNA, 20 bp, synthetic construct
  source 1..20: mol_type = other DNA
tgcagagcgtcatgaaggac

SEQ ID NO: 21071 - DNA, 20 bp, synthetic construct
  source 1..20: mol_type = other DNA
acacgccttccctctttttc

SEQ ID NO: 21072 - DNA, 20 bp, synthetic construct
  source 1..20: mol_type = other DNA
tctccttcctcagtgtttgg

SEQ ID NO: 21073 - DNA, 20 bp, synthetic construct
  source 1..20: mol_type = other DNA
tttaagtcacggaggaagtt

SEQ ID NO: 21074 - DNA, 20 bp, synthetic construct
  source 1..20: mol_type = other DNA
tagacccacgcagatagcca

SEQ ID NO: 21075 - DNA, 20 bp, synthetic construct
  source 1..20: mol_type = other DNA
ctttcgcggcggacacgggg

SEQ ID NO: 21076 - DNA, 20 bp, synthetic construct
  source 1..20: mol_type = other DNA
ttaacgtcttcatccccccg

SEQ ID NO: 21077 - DNA, 20 bp, synthetic construct
  source 1..20: mol_type = other DNA
tcaacagcagacgttgtggg

SEQ ID NO: 21078 - DNA, 20 bp, synthetic construct
  source 1..20: mol_type = other DNA
tttgtgttgcttttagcagc

SEQ ID NO: 21079 - DNA, 20 bp, synthetic construct
  source 1..20: mol_type = other DNA
cgcgggtttgcttcctatat

SEQ ID NO: 21080 - DNA, 20 bp, synthetic construct
  source 1..20: mol_type = other DNA
tgattcccttcataaagctg

SEQ ID NO: 21081 - DNA, 20 bp, synthetic construct
  source 1..20: mol_type = other DNA
tgcggccttagcggctcggg

SEQ ID NO: 21082 - DNA, 20 bp, synthetic construct
  source 1..20: mol_type = other DNA
aggaggtgacctggctgctt

SEQ ID NO: 21083 - DNA, 20 bp, synthetic construct
  source 1..20: mol_type = other DNA
gtaggggaaacaacgtcacc

SEQ ID NO: 21084 - DNA, 20 bp, synthetic construct
  source 1..20: mol_type = other DNA
gaaaaacacgacgaaagcgt

SEQ ID NO: 21085 - DNA, 20 bp, synthetic construct
  source 1..20: mol_type = other DNA
atataatcgccgtttcgtaa

SEQ ID NO: 21086 - DNA, 20 bp, synthetic construct
  source 1..20: mol_type = other DNA
tgtatgtgaaaggttggctg

SEQ ID NO: 21087 - DNA, 20 bp, synthetic construct
  source 1..20: mol_type = other DNA
agtcgctcggaaacgactca

SEQ ID NO: 21088 - DNA, 20 bp, synthetic construct
  source 1..20: mol_type = other DNA
cagcttttgagtctagacag

SEQ ID NO: 21089 - DNA, 20 bp, synthetic construct
  source 1..20: mol_type = other DNA
gaccgtctttgccgccttca

SEQ ID NO: 21090 - DNA, 20 bp, synthetic construct
  source 1..20: mol_type = other DNA
gacaacggcacgctcagcgt

SEQ ID NO: 21091 - DNA, 20 bp, synthetic construct
  source 1..20: mol_type = other DNA
actccaccgagacgctcacc

SEQ ID NO: 21092 - DNA, 20 bp, synthetic construct
  source 1..20: mol_type = other DNA
ctcagcctggttttcactct

SEQ ID NO: 21093 - DNA, 20 bp, synthetic construct
  source 1..20: mol_type = other DNA
tagcttcgagaccttgcgga

SEQ ID NO: 21094 - DNA, 20 bp, synthetic construct
  source 1..20: mol_type = other DNA
aactggttttcggacagagc

SEQ ID NO: 21095 - DNA, 20 bp, synthetic construct
  source 1..20: mol_type = other DNA
tcaacaataaagctttttca

SEQ ID NO: 21096 - DNA, 20 bp, synthetic construct
  source 1..20: mol_type = other DNA
cgggtcggatacagggtgcc

SEQ ID NO: 21097 - DNA, 20 bp, synthetic construct
  source 1..20: mol_type = other DNA
atgcctataaaaccgcgccc

SEQ ID NO: 21098 - DNA, 20 bp, synthetic construct
  source 1..20: mol_type = other DNA
agcggcgtcgccccagttcg

SEQ ID NO: 21099 - DNA, 20 bp, synthetic construct
  source 1..20: mol_type = other DNA
cgcgcagcgcgctttatccg

SEQ ID NO: 21100 - DNA, 20 bp, synthetic construct
  source 1..20: mol_type = other DNA
tttctctgcttcttttctgg

SEQ ID NO: 21101 - DNA, 20 bp, synthetic construct
  source 1..20: mol_type = other DNA
cgtcgatgtcagtcttttcg

SEQ ID NO: 21102 - DNA, 20 bp, synthetic construct
  source 1..20: mol_type = other DNA
ccgaatcgtaccggcgtctg

SEQ ID NO: 21103 - DNA, 20 bp, synthetic construct
  source 1..20: mol_type = other DNA
acaaaccccgtgtccgcccc

SEQ ID NO: 21104 - DNA, 20 bp, synthetic construct
  source 1..20: mol_type = other DNA
cctgggtacttatggggagc

SEQ ID NO: 21105 - DNA, 20 bp, synthetic construct
  source 1..20: mol_type = other DNA
catcggtgacacagcttcag

SEQ ID NO: 21106 - DNA, 20 bp, synthetic construct
  source 1..20: mol_type = other DNA
ctgtgtttccgcctgtataa

SEQ ID NO: 21107 - DNA, 20 bp, synthetic construct
  source 1..20: mol_type = other DNA
ggggtgaacaacactaatcg

SEQ ID NO: 21108 - DNA, 20 bp, synthetic construct
  source 1..20: mol_type = other DNA
cgtcggcacttggcttcaga

SEQ ID NO: 21109 - DNA, 20 bp, synthetic construct
  source 1..20: mol_type = other DNA
taccagcggttacgcaccga

SEQ ID NO: 21110 - DNA, 20 bp, synthetic construct
  source 1..20: mol_type = other DNA
atgaccatcagcagtgtcct

SEQ ID NO: 21111 - DNA, 20 bp, synthetic construct
  source 1..20: mol_type = other DNA
ctacgtaacctggcctttgc

SEQ ID NO: 21112 - DNA, 20 bp, synthetic construct
  source 1..20: mol_type = other DNA
catgcagcgtgcggcgcctc

SEQ ID NO: 21113 - DNA, 20 bp, synthetic construct
  source 1..20: mol_type = other DNA
acacagccagacgcgttcgt

SEQ ID NO: 21114 - DNA, 20 bp, synthetic construct
  source 1..20: mol_type = other DNA
cggcgtgtcctcgttgctcg

SEQ ID NO: 21115 - DNA, 20 bp, synthetic construct
  source 1..20: mol_type = other DNA
gtatgcaggtaagcaactga

SEQ ID NO: 21116 - DNA, 20 bp, synthetic construct
  source 1..20: mol_type = other DNA
cggcgcgttataagcaccgt

SEQ ID NO: 21117 - DNA, 20 bp, synthetic construct
  source 1..20: mol_type = other DNA
ccgtcgctccgcgtcgcttc

SEQ ID NO: 21118 - DNA, 20 bp, synthetic construct
  source 1..20: mol_type = other DNA
ccgagcgcgccggggagaag

SEQ ID NO: 21119 - DNA, 20 bp, synthetic construct
  source 1..20: mol_type = other DNA
gacgcggtttatatacaccg

SEQ ID NO: 21120 - DNA, 20 bp, synthetic construct
  source 1..20: mol_type = other DNA
ttaaactaccccccctccct

SEQ ID NO: 21121 - DNA, 20 bp, synthetic construct
  source 1..20: mol_type = other DNA
gcgcagtccggggcgacgac

SEQ ID NO: 21122 - DNA, 20 bp, synthetic construct
  source 1..20: mol_type = other DNA
aagcgtcgtcgccccggact

SEQ ID NO: 21123 - DNA, 20 bp, synthetic construct
  source 1..20: mol_type = other DNA
aaaacgacgtcccccgtcga

SEQ ID NO: 21124 - DNA, 20 bp, synthetic construct
  source 1..20: mol_type = other DNA
ctgctcgcacggacctatac

SEQ ID NO: 21125 - DNA, 20 bp, synthetic construct
  source 1..20: mol_type = other DNA
acgtcaacgctgatagtgtc

SEQ ID NO: 21126 - DNA, 20 bp, synthetic construct
  source 1..20: mol_type = other DNA
tcggctgctgcagcacaacg

SEQ ID NO: 21127 - DNA, 20 bp, synthetic construct
  source 1..20: mol_type = other DNA
ggtttcgctgtagctgtggt

SEQ ID NO: 21128 - DNA, 20 bp, synthetic construct
  source 1..20: mol_type = other DNA
gctacgacctggcctgtggt

SEQ ID NO: 21129 - DNA, 20 bp, synthetic construct
  source 1..20: mol_type = other DNA
gtaccgtctccaccacagtt

SEQ ID NO: 21130 - DNA, 20 bp, synthetic construct
  source 1..20: mol_type = other DNA
cttcaacgacgcgaaagagg

SEQ ID NO: 21131 - DNA, 20 bp, synthetic construct
  source 1..20: mol_type = other DNA
cgctcgctcgcgcccgctcc

SEQ ID NO: 21132 - DNA, 20 bp, synthetic construct
  source 1..20: mol_type = other DNA
gacagcatacggggaggaga

SEQ ID NO: 21133 - DNA, 20 bp, synthetic construct
  source 1..20: mol_type = other DNA
ctttattgaaatctacctga

SEQ ID NO: 21134 - DNA, 20 bp, synthetic construct
  source 1..20: mol_type = other DNA
tggcaacattccattgtggg

SEQ ID NO: 21135 - DNA, 20 bp, synthetic construct
  source 1..20: mol_type = other DNA
gcgcctggtgatcggcgtgg

SEQ ID NO: 21136 - DNA, 20 bp, synthetic construct
  source 1..20: mol_type = other DNA
gacccgcccgccggctcgac

SEQ ID NO: 21137 - DNA, 20 bp, synthetic construct
  source 1..20: mol_type = other DNA
agacggcgccccgctgtgtc

SEQ ID NO: 21138 - DNA, 20 bp, synthetic construct
  source 1..20: mol_type = other DNA
accgtcatcgtggtggcgag

SEQ ID NO: 21139 - DNA, 20 bp, synthetic construct
  source 1..20: mol_type = other DNA
gctggtgctggctcttctgc

SEQ ID NO: 21140 - DNA, 20 bp, synthetic construct
  source 1..20: mol_type = other DNA
gtcacggagagatcctccgt

SEQ ID NO: 21141 - DNA, 20 bp, synthetic construct
  source 1..20: mol_type = other DNA
aagacgagccggcgccgggt

SEQ ID NO: 21142 - DNA, 20 bp, synthetic construct
  source 1..20: mol_type = other DNA
tcggattcatggcgatcggc

SEQ ID NO: 21143 - DNA, 20 bp, synthetic construct
  source 1..20: mol_type = other DNA
gcgtcggcaccggagaatcc

SEQ ID NO: 21144 - DNA, 20 bp, synthetic construct
  source 1..20: mol_type = other DNA
cttcaaggcctttcagatta

SEQ ID NO: 21145 - DNA, 20 bp, synthetic construct
  source 1..20: mol_type = other DNA
gcctgcatgatcatcgtcat

SEQ ID NO: 21146 - DNA, 20 bp, synthetic construct
  source 1..20: mol_type = other DNA
acggtaattttcctttcttc

SEQ ID NO: 21147 - DNA, 20 bp, synthetic construct
  source 1..20: mol_type = other DNA
cagggagcgggaccgacctt

SEQ ID NO: 21148 - DNA, 20 bp, synthetic construct
  source 1..20: mol_type = other DNA
cactgtccatctccctgtct

SEQ ID NO: 21149 - DNA, 20 bp, synthetic construct
  source 1..20: mol_type = other DNA
cgggaaggattgacgtgtgc

SEQ ID NO: 21150 - DNA, 20 bp, synthetic construct
  source 1..20: mol_type = other DNA
gcaaccgcagccagaccgca

SEQ ID NO: 21151 - DNA, 20 bp, synthetic construct
  source 1..20: mol_type = other DNA
aaaattcactcagtggcggc

SEQ ID NO: 21152 - DNA, 20 bp, synthetic construct
  source 1..20: mol_type = other DNA
catctacgaacggattccat

SEQ ID NO: 21153 - DNA, 20 bp, synthetic construct
  source 1..20: mol_type = other DNA
cgaggacgacgacgtctgat

SEQ ID NO: 21154 - DNA, 20 bp, synthetic construct
  source 1..20: mol_type = other DNA
tgatctttgttggtgcactg

SEQ ID NO: 21155 - DNA, 20 bp, synthetic construct
  source 1..20: mol_type = other DNA
ccgacgcgcccatgccgccg

SEQ ID NO: 21156 - DNA, 20 bp, synthetic construct
  source 1..20: mol_type = other DNA
tatgccaagatgctaaggca

SEQ ID NO: 21157 - DNA, 20 bp, synthetic construct
  source 1..20: mol_type = other DNA
cccacttggaaaaagcaata

SEQ ID NO: 21158 - DNA, 20 bp, synthetic construct
  source 1..20: mol_type = other DNA
ggcagtcatgcaagaccccc

SEQ ID NO: 21159 - DNA, 20 bp, synthetic construct
  source 1..20: mol_type = other DNA
tgaaccacctcactggagca

SEQ ID NO: 21160 - DNA, 20 bp, synthetic construct
  source 1..20: mol_type = other DNA
tgataagggtacacttgcca

SEQ ID NO: 21161 - DNA, 20 bp, synthetic construct
  source 1..20: mol_type = other DNA
catttccaagaccacagata

SEQ ID NO: 21162 - DNA, 20 bp, synthetic construct
  source 1..20: mol_type = other DNA
gatgattagaatctcttgtc

SEQ ID NO: 21163 - DNA, 20 bp, synthetic construct
  source 1..20: mol_type = other DNA
tatttcccatagtaataatt

SEQ ID NO: 21164 - DNA, 20 bp, synthetic construct
  source 1..20: mol_type = other DNA
atcagcttctgaatttattg

SEQ ID NO: 21165 - DNA, 20 bp, synthetic construct
  source 1..20: mol_type = other DNA
tagtggttttgctgtttttg

SEQ ID NO: 21166 - DNA, 20 bp, synthetic construct
  source 1..20: mol_type = other DNA
cgaaacaagaggggacgtca

SEQ ID NO: 21167 - DNA, 20 bp, synthetic construct
  source 1..20: mol_type = other DNA
gcaagtggcgcccaacgtgg

SEQ ID NO: 21168 - DNA, 20 bp, synthetic construct
  source 1..20: mol_type = other DNA
aatagtttatcacaacttaa

SEQ ID NO: 21169 - DNA, 20 bp, synthetic construct
  source 1..20: mol_type = other DNA
ttatcacaacttaaaagtga

SEQ ID NO: 21170 - DNA, 20 bp, synthetic construct
  source 1..20: mol_type = other DNA
ataacgattggctctgtttc

SEQ ID NO: 21171 - DNA, 20 bp, synthetic construct
  source 1..20: mol_type = other DNA
tgccataagcaccacattcc

SEQ ID NO: 21172 - DNA, 20 bp, synthetic construct
  source 1..20: mol_type = other DNA
aaactgatggggaacgccag

SEQ ID NO: 21173 - DNA, 20 bp, synthetic construct
  source 1..20: mol_type = other DNA
tactattactttctttaaca

SEQ ID NO: 21174 - DNA, 20 bp, synthetic construct
  source 1..20: mol_type = other DNA
gataactgacgaggaaatgc

SEQ ID NO: 21175 - DNA, 20 bp, synthetic construct
  source 1..20: mol_type = other DNA
ccatggccgagctagcctgt

SEQ ID NO: 21176 - DNA, 20 bp, synthetic construct
  source 1..20: mol_type = other DNA
cttgatgccatttgcgacaa

SEQ ID NO: 21177 - DNA, 20 bp, synthetic construct
  source 1..20: mol_type = other DNA
gggtccctatcctcctgact

SEQ ID NO: 21178 - DNA, 20 bp, synthetic construct
  source 1..20: mol_type = other DNA
ggacctcggtcgaaaatact

SEQ ID NO: 21179 - DNA, 20 bp, synthetic construct
  source 1..20: mol_type = other DNA
ttgcctaattctaacgggag

SEQ ID NO: 21180 - DNA, 20 bp, synthetic construct
  source 1..20: mol_type = other DNA
ctaccccacgtatgatctgg

SEQ ID NO: 21181 - DNA, 20 bp, synthetic construct
  source 1..20: mol_type = other DNA
cccacctgtctgacttggcc

SEQ ID NO: 21182 - DNA, 20 bp, synthetic construct
  source 1..20: mol_type = other DNA
tggaactgacgggcactgcg

SEQ ID NO: 21183 - DNA, 20 bp, synthetic construct
  source 1..20: mol_type = other DNA
gtcgtgttgaccggctcagg

SEQ ID NO: 21184 - DNA, 20 bp, synthetic construct
  source 1..20: mol_type = other DNA
gagactagctataaaagagg

SEQ ID NO: 21185 - DNA, 20 bp, synthetic construct
  source 1..20: mol_type = other DNA
atcacgcatgcgtgtgatga

SEQ ID NO: 21186 - DNA, 20 bp, synthetic construct
  source 1..20: mol_type = other DNA
tcgatgagtttatgtctgtc

SEQ ID NO: 21187 - DNA, 20 bp, synthetic construct
  source 1..20: mol_type = other DNA
tattaaagtttggaaataag

SEQ ID NO: 21188 - DNA, 20 bp, synthetic construct
  source 1..20: mol_type = other DNA
ccaaccatttgattagaagg

SEQ ID NO: 21189 - DNA, 20 bp, synthetic construct
  source 1..20: mol_type = other DNA
aagagaagccctcgagacct

SEQ ID NO: 21190 - DNA, 20 bp, synthetic construct
  source 1..20: mol_type = other DNA
tggcatccttgcccaccagc

SEQ ID NO: 21191 - DNA, 20 bp, synthetic construct
  source 1..20: mol_type = other DNA
ccgtcagataggggaagggt

SEQ ID NO: 21192 - DNA, 20 bp, synthetic construct
  source 1..20: mol_type = other DNA
ctgctgtctcaggaggggcc

SEQ ID NO: 21193 - DNA, 20 bp, synthetic construct
  source 1..20: mol_type = other DNA
ggacgatttacctggatgct

SEQ ID NO: 21194 - DNA, 20 bp, synthetic construct
  source 1..20: mol_type = other DNA
agctcttaagagagagcagc

SEQ ID NO: 21195 - DNA, 20 bp, synthetic construct
  source 1..20: mol_type = other DNA
ttcgccagccgccgggcggg

SEQ ID NO: 21196 - DNA, 20 bp, synthetic construct
  source 1..20: mol_type = other DNA
ggaagtcttggcggcgttgg

SEQ ID NO: 21197 - DNA, 20 bp, synthetic construct
  source 1..20: mol_type = other DNA
ccccacctccaccaccggcc

SEQ ID NO: 21198 - DNA, 20 bp, synthetic construct
  source 1..20: mol_type = other DNA
agggcttcttcagagggagc

SEQ ID NO: 21199 - DNA, 20 bp, synthetic construct
  source 1..20: mol_type = other DNA
aaaacctgagctcgtcctcg

SEQ ID NO: 21200 - DNA, 20 bp, synthetic construct
  source 1..20: mol_type = other DNA
gcgcgtcatccccgcgcacc

SEQ ID NO: 21201 - DNA, 20 bp, synthetic construct
  source 1..20: mol_type = other DNA
acaaggcacttcagagccca

SEQ ID NO: 21202 - DNA, 20 bp, synthetic construct
  source 1..20: mol_type = other DNA
ttaaggtattgcacagagac

SEQ ID NO: 21203 - DNA, 20 bp, synthetic construct
  source 1..20: mol_type = other DNA
ttctggccggccgagcgaag

SEQ ID NO: 21204 - DNA, 20 bp, synthetic construct
  source 1..20: mol_type = other DNA
gtcgcccgccccccgactct

SEQ ID NO: 21205 - DNA, 20 bp, synthetic construct
  source 1..20: mol_type = other DNA
gccagatacttcagaagggt

SEQ ID NO: 21206 - DNA, 20 bp, synthetic construct
  source 1..20: mol_type = other DNA
gccgggacgctagtgctgca

SEQ ID NO: 21207 - DNA, 20 bp, synthetic construct
  source 1..20: mol_type = other DNA
tggacacgcaagggcgaatg

SEQ ID NO: 21208 - DNA, 20 bp, synthetic construct
  source 1..20: mol_type = other DNA
ttcctcttttgctgcagaca

SEQ ID NO: 21209 - DNA, 20 bp, synthetic construct
  source 1..20: mol_type = other DNA
gagaccgccgccgcactgct

SEQ ID NO: 21210 - DNA, 20 bp, synthetic construct
  source 1..20: mol_type = other DNA
cggccaggccctgcccccgg

SEQ ID NO: 21211 - DNA, 20 bp, synthetic construct
  source 1..20: mol_type = other DNA
atttaaggatctatatgccc

SEQ ID NO: 21212 - DNA, 20 bp, synthetic construct
  source 1..20: mol_type = other DNA
gccaccgttctccccggact

SEQ ID NO: 21213 - DNA, 20 bp, synthetic construct
  source 1..20: mol_type = other DNA
agggcctggccggggctgac

SEQ ID NO: 21214 - DNA, 20 bp, synthetic construct
  source 1..20: mol_type = other DNA
gcctcgcgcagcgcccggca

SEQ ID NO: 21215 - DNA, 20 bp, synthetic construct
  source 1..20: mol_type = other DNA
ccgtgacgtgggccctggcc

SEQ ID NO: 21216 - DNA, 20 bp, synthetic construct
  source 1..20: mol_type = other DNA
taacatttaatgtgggactg

SEQ ID NO: 21217 - DNA, 20 bp, synthetic construct
  source 1..20: mol_type = other DNA
ccaacaggaggagctgagcg

SEQ ID NO: 21218 - DNA, 20 bp, synthetic construct
  source 1..20: mol_type = other DNA
caaacacagaatctgtagac

SEQ ID NO: 21219 - DNA, 20 bp, synthetic construct
  source 1..20: mol_type = other DNA
aattggggtgatcctgtagc

SEQ ID NO: 21220 - DNA, 20 bp, synthetic construct
  source 1..20: mol_type = other DNA
gtgtcctgtttggactttta

SEQ ID NO: 21221 - DNA, 20 bp, synthetic construct
  source 1..20: mol_type = other DNA
cttcagaagagaccttctct

SEQ ID NO: 21222 - DNA, 20 bp, synthetic construct
  source 1..20: mol_type = other DNA
tttcccttactcttccttct

SEQ ID NO: 21223 - DNA, 20 bp, synthetic construct
  source 1..20: mol_type = other DNA
ctgccgctactgctgctact

SEQ ID NO: 21224 - DNA, 20 bp, synthetic construct
  source 1..20: mol_type = other DNA
aaccttctaagcacccgcgc

SEQ ID NO: 21225 - DNA, 20 bp, synthetic construct
  source 1..20: mol_type = other DNA
ggggcgcgctgggccgcggc

SEQ ID NO: 21226 - DNA, 20 bp, synthetic construct
  source 1..20: mol_type = other DNA
gttaacctgatagcatagcc

SEQ ID NO: 21227 - DNA, 20 bp, synthetic construct
  source 1..20: mol_type = other DNA
ttctagttccctcttaatta

SEQ ID NO: 21228 - DNA, 20 bp, synthetic construct
  source 1..20: mol_type = other DNA
tacagtcctatcaaacttcc

SEQ ID NO: 21229 - DNA, 20 bp, synthetic construct
  source 1..20: mol_type = other DNA
ccggtattaaaaacccagaa

SEQ ID NO: 21230 - DNA, 20 bp, synthetic construct
  source 1..20: mol_type = other DNA
ttccggtcagggggtttggc

SEQ ID NO: 21231 - DNA, 20 bp, synthetic construct
  source 1..20: mol_type = other DNA
gcgccgtggaagaaggaact

SEQ ID NO: 21232 - DNA, 20 bp, synthetic construct
  source 1..20: mol_type = other DNA
gtggaacacgtgccccccga

SEQ ID NO: 21233 - DNA, 20 bp, synthetic construct
  source 1..20: mol_type = other DNA
cgtttgctccatctgtcagc

SEQ ID NO: 21234 - DNA, 20 bp, synthetic construct
  source 1..20: mol_type = other DNA
gaccagaaggggggcgacaa

SEQ ID NO: 21235 - DNA, 20 bp, synthetic construct
  source 1..20: mol_type = other DNA
cccgttctctttcttagtat

SEQ ID NO: 21236 - DNA, 20 bp, synthetic construct
  source 1..20: mol_type = other DNA
gttcctcaaccagcccacga

SEQ ID NO: 21237 - DNA, 20 bp, synthetic construct
  source 1..20: mol_type = other DNA
gggcagcggggtcgtcccca

SEQ ID NO: 21238 - DNA, 20 bp, synthetic construct
  source 1..20: mol_type = other DNA
cccgtggtggagattgacag

SEQ ID NO: 21239 - DNA, 20 bp, synthetic construct
  source 1..20: mol_type = other DNA
gggggacaagagcacaaaag

SEQ ID NO: 21240 - DNA, 20 bp, synthetic construct
  source 1..20: mol_type = other DNA
gttttactgaacgagcctgt

SEQ ID NO: 21241 - DNA, 20 bp, synthetic construct
  source 1..20: mol_type = other DNA
aagagagttccgattacacc

SEQ ID NO: 21242 - DNA, 20 bp, synthetic construct
  source 1..20: mol_type = other DNA
ccactccagcaacaccgcac

SEQ ID NO: 21243 - DNA, 20 bp, synthetic construct
  source 1..20: mol_type = other DNA
gcaccccaagaaagtgaagc

SEQ ID NO: 21244 - DNA, 20 bp, synthetic construct
  source 1..20: mol_type = other DNA
cgccggtcgctgtggggcca

SEQ ID NO: 21245 - DNA, 20 bp, synthetic construct
  source 1..20: mol_type = other DNA
gccatcgttctgtttagccc

SEQ ID NO: 21246 - DNA, 20 bp, synthetic construct
  source 1..20: mol_type = other DNA
tcgtcaggccgcgagaggat

SEQ ID NO: 21247 - DNA, 20 bp, synthetic construct
  source 1..20: mol_type = other DNA
gacattatttaagaccggga

SEQ ID NO: 21248 - DNA, 20 bp, synthetic construct
  source 1..20: mol_type = other DNA
cagttcaaacccagagacac

SEQ ID NO: 21249 - DNA, 20 bp, synthetic construct
  source 1..20: mol_type = other DNA
acgatgagtgatttcgccca

SEQ ID NO: 21250 - DNA, 20 bp, synthetic construct
  source 1..20: mol_type = other DNA
tgacaattttagatgaggta

SEQ ID NO: 21251 - DNA, 20 bp, synthetic construct
  source 1..20: mol_type = other DNA
acacctaaatttagcacgtc

SEQ ID NO: 21252 - DNA, 20 bp, synthetic construct
  source 1..20: mol_type = other DNA
cactaaacattgcaccttgc

SEQ ID NO: 21253 - DNA, 20 bp, synthetic construct
  source 1..20: mol_type = other DNA
gagtaatctccacactcccg

SEQ ID NO: 21254 - DNA, 20 bp, synthetic construct
  source 1..20: mol_type = other DNA
ttctactttaaaaaggccgg

SEQ ID NO: 21255 - DNA, 20 bp, synthetic construct
  source 1..20: mol_type = other DNA
aacccgaaacagtgtttccc

SEQ ID NO: 21256 - DNA, 20 bp, synthetic construct
  source 1..20: mol_type = other DNA
ttctttatctccatcctgaa

SEQ ID NO: 21257 - DNA, 20 bp, synthetic construct
  source 1..20: mol_type = other DNA
cctggcccagaacagcaccc

SEQ ID NO: 21258 - DNA, 20 bp, synthetic construct
  source 1..20: mol_type = other DNA
cattaagcagtgaagtaaag

SEQ ID NO: 21259 - DNA, 20 bp, synthetic construct
  source 1..20: mol_type = other DNA
aatcaggcgcaccttggcac

SEQ ID NO: 21260 - DNA, 20 bp, synthetic construct
  source 1..20: mol_type = other DNA
tcgcctccaatttggctata

SEQ ID NO: 21261 - DNA, 20 bp, synthetic construct
  source 1..20: mol_type = other DNA
agtaaaatatggacaaaaag

SEQ ID NO: 21262 - DNA, 20 bp, synthetic construct
  source 1..20: mol_type = other DNA
tgcagatgaggcaacacaat

SEQ ID NO: 21263 - DNA, 20 bp, synthetic construct
  source 1..20: mol_type = other DNA
ccccccacggagcgacccga

SEQ ID NO: 21264 - DNA, 20 bp, synthetic construct
  source 1..20: mol_type = other DNA
ggtccctcctttggttcgtg

SEQ ID NO: 21265 - DNA, 20 bp, synthetic construct
  source 1..20: mol_type = other DNA
ttctgtgccttctgtacatc

SEQ ID NO: 21266 - DNA, 20 bp, synthetic construct
  source 1..20: mol_type = other DNA
agtgagcttctgttaagttg

SEQ ID NO: 21267 - DNA, 20 bp, synthetic construct
  source 1..20: mol_type = other DNA
ttgaataatttctactgaaa

SEQ ID NO: 21268 - DNA, 20 bp, synthetic construct
  source 1..20: mol_type = other DNA
gtcgaggtgccctatttagg

SEQ ID NO: 21269 - DNA, 20 bp, synthetic construct
  source 1..20: mol_type = other DNA
agagggcaggcaccggcagt

SEQ ID NO: 21270 - DNA, 20 bp, synthetic construct
  source 1..20: mol_type = other DNA
tggtaagcttttcaagagcg

SEQ ID NO: 21271 - DNA, 20 bp, synthetic construct
  source 1..20: mol_type = other DNA
aatcccgcacccccctggca

SEQ ID NO: 21272 - DNA, 20 bp, synthetic construct
  source 1..20: mol_type = other DNA
ccactgacgctggcaggcct

SEQ ID NO: 21273 - DNA, 20 bp, synthetic construct
  source 1..20: mol_type = other DNA
tttttgtggcggcccttgtg

SEQ ID NO: 21274 - DNA, 20 bp, synthetic construct
  source 1..20: mol_type = other DNA
gcctttcagtggagcttagg

SEQ ID NO: 21275 - DNA, 20 bp, synthetic construct
  source 1..20: mol_type = other DNA
cgggtgtcgcgctttggggg

SEQ ID NO: 21276 - DNA, 20 bp, synthetic construct
  source 1..20: mol_type = other DNA
aaaaccacctcactagacat

SEQ ID NO: 21277 - DNA, 20 bp, synthetic construct
  source 1..20: mol_type = other DNA
ggaacctggtgccctcctcc

SEQ ID NO: 21278 - DNA, 20 bp, synthetic construct
  source 1..20: mol_type = other DNA
gatcctaacatctgtttcgg

SEQ ID NO: 21279 - DNA, 20 bp, synthetic construct
  source 1..20: mol_type = other DNA
tcctttgtttttccacatcg

SEQ ID NO: 21280 - DNA, 20 bp, synthetic construct
  source 1..20: mol_type = other DNA
cagcctgctactgtgtgtaa

SEQ ID NO: 21281 - DNA, 20 bp, synthetic construct
  source 1..20: mol_type = other DNA
taaaaactgaagaaggcgtg

SEQ ID NO: 21282 - DNA, 20 bp, synthetic construct
  source 1..20: mol_type = other DNA
agacgttggtgtgttgaagg

SEQ ID NO: 21283 - DNA, 20 bp, synthetic construct
  source 1..20: mol_type = other DNA
ggcaagcagtggagcaagac

SEQ ID NO: 21284 - DNA, 20 bp, synthetic construct
  source 1..20: mol_type = other DNA
aaagaagagagctggcacgt

SEQ ID NO: 21285 - DNA, 20 bp, synthetic construct
  source 1..20: mol_type = other DNA
gtttgcttgggggtggctat

SEQ ID NO: 21286 - DNA, 20 bp, synthetic construct
  source 1..20: mol_type = other DNA
taagagcacactgtgtggtt

SEQ ID NO: 21287 - DNA, 20 bp, synthetic construct
  source 1..20: mol_type = other DNA
gttgcaggggttaatgccat

SEQ ID NO: 21288 - DNA, 20 bp, synthetic construct
  source 1..20: mol_type = other DNA
atcctggagtttacaggtag

SEQ ID NO: 21289 - DNA, 20 bp, synthetic construct
  source 1..20: mol_type = other DNA
ctggtctttatcgtcgcgtt

SEQ ID NO: 21290 - DNA, 20 bp, synthetic construct
  source 1..20: mol_type = other DNA
gtggcgtccgtgaatacgtt

SEQ ID NO: 21291 - DNA, 20 bp, synthetic construct
  source 1..20: mol_type = other DNA
gctcacctcccctttccctt

SEQ ID NO: 21292 - DNA, 20 bp, synthetic construct
  source 1..20: mol_type = other DNA
ataaaggggcgtggcttcca

SEQ ID NO: 21293 - DNA, 20 bp, synthetic construct
  source 1..20: mol_type = other DNA
cacccttggtgctgtgcgcg

SEQ ID NO: 21294 - DNA, 20 bp, synthetic construct
  source 1..20: mol_type = other DNA
atgccagcttcatacgggac

SEQ ID NO: 21295 - DNA, 20 bp, synthetic construct
  source 1..20: mol_type = other DNA
gccaattcccggtcggcatc

SEQ ID NO: 21296 - DNA, 20 bp, synthetic construct
  source 1..20: mol_type = other DNA
gtgaccacgcactatagtgc

SEQ ID NO: 21297 - DNA, 20 bp, synthetic construct
  source 1..20: mol_type = other DNA
gccattatacacacgggttt

SEQ ID NO: 21298 - DNA, 20 bp, synthetic construct
  source 1..20: mol_type = other DNA
ggcaggacacaacatctaca

SEQ ID NO: 21299 - DNA, 20 bp, synthetic construct
  source 1..20: mol_type = other DNA
cgtccatatccgtgctggtt

SEQ ID NO: 21300 - DNA, 20 bp, synthetic construct
  source 1..20: mol_type = other DNA
tttctccgccgcgccccacc

SEQ ID NO: 21301 - DNA, 20 bp, synthetic construct
  source 1..20: mol_type = other DNA
cgccagccgatccccgcgta

SEQ ID NO: 21302 - DNA, 20 bp, synthetic construct
  source 1..20: mol_type = other DNA
cttctctggcgtccttgccg

SEQ ID NO: 21303 - DNA, 20 bp, synthetic construct
  source 1..20: mol_type = other DNA
cctccgtggcgaggtacggg

SEQ ID NO: 21304 - DNA, 20 bp, synthetic construct
  source 1..20: mol_type = other DNA
cggaaacaaggtggtgtatt

SEQ ID NO: 21305 - DNA, 20 bp, synthetic construct
  source 1..20: mol_type = other DNA
ttctcctatcttcagagtct

SEQ ID NO: 21306 - DNA, 20 bp, synthetic construct
  source 1..20: mol_type = other DNA
tcctgttggtattccccacg

SEQ ID NO: 21307 - DNA, 20 bp, synthetic construct
  source 1..20: mol_type = other DNA
gcgggggtcagggcactcga

SEQ ID NO: 21308 - DNA, 20 bp, synthetic construct
  source 1..20: mol_type = other DNA
tacgccctggtctgtagcat

SEQ ID NO: 21309 - DNA, 20 bp, synthetic construct
  source 1..20: mol_type = other DNA
agtcagcgggagtcttgtgg

SEQ ID NO: 21310 - DNA, 20 bp, synthetic construct
  source 1..20: mol_type = other DNA
aagggtgcgccatccgtgcc

SEQ ID NO: 21311 - DNA, 20 bp, synthetic construct
  source 1..20: mol_type = other DNA
tctcctgcaggttggcggca

SEQ ID NO: 21312 - DNA, 20 bp, synthetic construct
  source 1..20: mol_type = other DNA
gggccagaggtttgaggcgc

SEQ ID NO: 21313 - DNA, 20 bp, synthetic construct
  source 1..20: mol_type = other DNA
ggtcgacgccgtcgcggacc

SEQ ID NO: 21314 - DNA, 20 bp, synthetic construct
  source 1..20: mol_type = other DNA
gacccgcacgtggagattcc

SEQ ID NO: 21315 - DNA, 20 bp, synthetic construct
  source 1..20: mol_type = other DNA
tctcccgccgcagcgccgcc

SEQ ID NO: 21316 - DNA, 20 bp, synthetic construct
  source 1..20: mol_type = other DNA
aaccgacgtgggacagaaat

SEQ ID NO: 21317 - DNA, 20 bp, synthetic construct
  source 1..20: mol_type = other DNA
acggcagaaaggggccttcg

SEQ ID NO: 21318 - DNA, 20 bp, synthetic construct
  source 1..20: mol_type = other DNA
acctgtcaatctgttccact

SEQ ID NO: 21319 - DNA, 20 bp, synthetic construct
  source 1..20: mol_type = other DNA
tacagttggccaatgcattc

SEQ ID NO: 21320 - DNA, 20 bp, synthetic construct
  source 1..20: mol_type = other DNA
gacctctgacataagaatac

SEQ ID NO: 21321 - DNA, 20 bp, synthetic construct
  source 1..20: mol_type = other DNA
ttgccttatccaaggacagt

SEQ ID NO: 21322 - DNA, 20 bp, synthetic construct
  source 1..20: mol_type = other DNA
tgtgctttgtaaatttccgc

SEQ ID NO: 21323 - DNA, 20 bp, synthetic construct
  source 1..20: mol_type = other DNA
atttcagtaattgtcctcat

SEQ ID NO: 21324 - DNA, 20 bp, synthetic construct
  source 1..20: mol_type = other DNA
ttgccacccagctactggtt

SEQ ID NO: 21325 - DNA, 20 bp, synthetic construct
  source 1..20: mol_type = other DNA
tcctatgggggttgggtggg

SEQ ID NO: 21326 - DNA, 20 bp, synthetic construct
  source 1..20: mol_type = other DNA
ctccgttgtcgactataacc

SEQ ID NO: 21327 - DNA, 20 bp, synthetic construct
  source 1..20: mol_type = other DNA
ttctaaatttgcttgtttcg

SEQ ID NO: 21328 - DNA, 20 bp, synthetic construct
  source 1..20: mol_type = other DNA
acgcggaacgttggatagac

SEQ ID NO: 21329 - DNA, 20 bp, synthetic construct
  source 1..20: mol_type = other DNA
gttgccgcgtccaaaaaggt

SEQ ID NO: 21330 - DNA, 20 bp, synthetic construct
  source 1..20: mol_type = other DNA
cactaatatgtcagccacct

SEQ ID NO: 21331 - DNA, 20 bp, synthetic construct
  source 1..20: mol_type = other DNA
tgcttaccactggacattgc

SEQ ID NO: 21332 - DNA, 20 bp, synthetic construct
  source 1..20: mol_type = other DNA
gggactgtgcctcaaagacg

SEQ ID NO: 21333 - DNA, 20 bp, synthetic construct
  source 1..20: mol_type = other DNA
agacctgtacgcccttctgt

SEQ ID NO: 21334 - DNA, 20 bp, synthetic construct
  source 1..20: mol_type = other DNA
tgtctaatacaggcaatgct

SEQ ID NO: 21335 - DNA, 20 bp, synthetic construct
  source 1..20: mol_type = other DNA
gttgaggtggggtaatgctc

SEQ ID NO: 21336 - DNA, 20 bp, synthetic construct
  source 1..20: mol_type = other DNA
gtcgcccacggaaaaggtgt

SEQ ID NO: 21337 - DNA, 20 bp, synthetic construct
  source 1..20: mol_type = other DNA
tcgtgggaaggtgcccaaaa

SEQ ID NO: 21338 - DNA, 20 bp, synthetic construct
  source 1..20: mol_type = other DNA
tacgctgggcacagttccct

SEQ ID NO: 21339 - DNA, 20 bp, synthetic construct
  source 1..20: mol_type = other DNA
gcaaggggggtgcggtgttg

SEQ ID NO: 21340 - DNA, 20 bp, synthetic construct
  source 1..20: mol_type = other DNA
gaatgatgagtgatttcaac

SEQ ID NO: 21341 - DNA, 20 bp, synthetic construct
  source 1..20: mol_type = other DNA
gttccaggtcggggaccaag

SEQ ID NO: 21342 - DNA, 20 bp, synthetic construct
  source 1..20: mol_type = other DNA
tcggcggcggcggaacgagt

SEQ ID NO: 21343 - DNA, 20 bp, synthetic construct
  source 1..20: mol_type = other DNA
cgggaggtaagctggccagc

SEQ ID NO: 21344 - DNA, 20 bp, synthetic construct
  source 1..20: mol_type = other DNA
tagagaggcgcgctctgcca

SEQ ID NO: 21345 - DNA, 20 bp, synthetic construct
  source 1..20: mol_type = other DNA
actgggtgttccagactagt

SEQ ID NO: 21346 - DNA, 20 bp, synthetic construct
  source 1..20: mol_type = other DNA
cggctggtcgagtcccatac

SEQ ID NO: 21347 - DNA, 20 bp, synthetic construct
  source 1..20: mol_type = other DNA
ccactctatgcccggccatt

SEQ ID NO: 21348 - DNA, 20 bp, synthetic construct
  source 1..20: mol_type = other DNA
aaagtgctaaagactctcaa

SEQ ID NO: 21349 - DNA, 20 bp, synthetic construct
  source 1..20: mol_type = other DNA
tgaatactggccgcggctcc

SEQ ID NO: 21350 - DNA, 20 bp, synthetic construct
  source 1..20: mol_type = other DNA
gtaagtgtgctggtgtggac

SEQ ID NO: 21351 - DNA, 20 bp, synthetic construct
  source 1..20: mol_type = other DNA
ggtacggcacgtagcattgc

SEQ ID NO: 21352 - DNA, 20 bp, synthetic construct
  source 1..20: mol_type = other DNA
ctccttttttgccactatgc

SEQ ID NO: 21353 - DNA, 20 bp, synthetic construct
  source 1..20: mol_type = other DNA
ccaaagggtacaacctacgc

SEQ ID NO: 21354 - DNA, 20 bp, synthetic construct
  source 1..20: mol_type = other DNA
cttgtgagaaacacttggag

SEQ ID NO: 21355 - DNA, 20 bp, synthetic construct
  source 1..20: mol_type = other DNA
cgcttatggttacaactaat

SEQ ID NO: 21356 - DNA, 20 bp, synthetic construct
  source 1..20: mol_type = other DNA
ttgtgtttatttgtgtaatt

SEQ ID NO: 21357 - DNA, 20 bp, synthetic construct
  source 1..20: mol_type = other DNA
agacacttgtgtttgtgagt

SEQ ID NO: 21358 - DNA, 20 bp, synthetic construct
  source 1..20: mol_type = other DNA
tacacaatattccacgacaa

SEQ ID NO: 21359 - DNA, 20 bp, synthetic construct
  source 1..20: mol_type = other DNA
acgtactgtaagtgttgaca

SEQ ID NO: 21360 - DNA, 20 bp, synthetic construct
  source 1..20: mol_type = other DNA
ggaataggagttatactgct

SEQ ID NO: 21361 - DNA, 20 bp, synthetic construct
  source 1..20: mol_type = other DNA
ggtcaataccccgaggtgtg

SEQ ID NO: 21362 - DNA, 20 bp, synthetic construct
  source 1..20: mol_type = other DNA
ggcggacctgcattggcagc

SEQ ID NO: 21363 - DNA, 20 bp, synthetic construct
  source 1..20: mol_type = other DNA
ggatgcacccgctgcggggt

SEQ ID NO: 21364 - DNA, 20 bp, synthetic construct
  source 1..20: mol_type = other DNA
accgctgcgcagcagtatcc

SEQ ID NO: 21365 - DNA, 20 bp, synthetic construct
  source 1..20: mol_type = other DNA
cctcctcgtccctgatctaa

SEQ ID NO: 21366 - DNA, 20 bp, synthetic construct
  source 1..20: mol_type = other DNA
atgtgtaaataaagttgtac

SEQ ID NO: 21367 - DNA, 20 bp, synthetic construct
  source 1..20: mol_type = other DNA
caccccagcatcctttaatt

SEQ ID NO: 21368 - DNA, 20 bp, synthetic construct
  source 1..20: mol_type = other DNA
gggagagcttaacttgtatg

SEQ ID NO: 21369 - DNA, 20 bp, synthetic construct
  source 1..20: mol_type = other DNA
atggatgagcccaccctcct

SEQ ID NO: 21370 - DNA, 20 bp, synthetic construct
  source 1..20: mol_type = other DNA
gtctacctgcgcacgccctt

SEQ ID NO: 21371 - DNA, 20 bp, synthetic construct
  source 1..20: mol_type = other DNA
accggcgcacgtcctgactg

SEQ ID NO: 21372 - DNA, 20 bp, synthetic construct
  source 1..20: mol_type = other DNA
catcacccagggcgcgatcc

SEQ ID NO: 21373 - DNA, 20 bp, synthetic construct
  source 1..20: mol_type = other DNA
aacgcgcgcccacccggaaa

SEQ ID NO: 21374 - DNA, 20 bp, synthetic construct
  source 1..20: mol_type = other DNA
gcttttgtgatcatggcctg

SEQ ID NO: 21375 - DNA, 20 bp, synthetic construct
  source 1..20: mol_type = other DNA
gaggagaaggaaaaattgct

SEQ ID NO: 21376 - DNA, 20 bp, synthetic construct
  source 1..20: mol_type = other DNA
gcgggctttgtaactctgat

SEQ ID NO: 21377 - DNA, 20 bp, synthetic construct
  source 1..20: mol_type = other DNA
ctactcagcttctcttactg

SEQ ID NO: 21378 - DNA, 20 bp, synthetic construct
  source 1..20: mol_type = other DNA
gtctgcagcattgtctgcgt

SEQ ID NO: 21379 - DNA, 20 bp, synthetic construct
  source 1..20: mol_type = other DNA
gaatacagggacgagaacgt

SEQ ID NO: 21380 - DNA, 20 bp, synthetic construct
  source 1..20: mol_type = other DNA
tccccggcccccttccactg

SEQ ID NO: 21381 - DNA, 20 bp, synthetic construct
  source 1..20: mol_type = other DNA
aagtcatcttccacccggag

SEQ ID NO: 21382 - DNA, 20 bp, synthetic construct
  source 1..20: mol_type = other DNA
tagttgttcagcagcacctc

SEQ ID NO: 21383 - DNA, 20 bp, synthetic construct
  source 1..20: mol_type = other DNA
gttttgaacacgctgcaggt

SEQ ID NO: 21384 - DNA, 20 bp, synthetic construct
  source 1..20: mol_type = other DNA
cgtaggagccatataccgcg

SEQ ID NO: 21385 - DNA, 20 bp, synthetic construct
  source 1..20: mol_type = other DNA
gtcaaagtccggtgtttatg

SEQ ID NO: 21386 - DNA, 20 bp, synthetic construct
  source 1..20: mol_type = other DNA
ggagccgcggctaacgtggt

SEQ ID NO: 21387 - DNA, 20 bp, synthetic construct
  source 1..20: mol_type = other DNA
gtcgcaccgcgcgtcctttc

SEQ ID NO: 21388 - DNA, 20 bp, synthetic construct
  source 1..20: mol_type = other DNA
tggcccaatcgcgaagaggc

SEQ ID NO: 21389 - DNA, 20 bp, synthetic construct
  source 1..20: mol_type = other DNA
atatttgtgtgacagtgcaa

SEQ ID NO: 21390 - DNA, 20 bp, synthetic construct
  source 1..20: mol_type = other DNA
gtagaagcagacctgtgtgg

SEQ ID NO: 21391 - DNA, 20 bp, synthetic construct
  source 1..20: mol_type = other DNA
aagcaaaccgactcccggcg

SEQ ID NO: 21392 - DNA, 20 bp, synthetic construct
  source 1..20: mol_type = other DNA
gaggaaaaaaggaagaggtc

SEQ ID NO: 21393 - DNA, 20 bp, synthetic construct
  source 1..20: mol_type = other DNA
ggtagaactgctgctgctgt

SEQ ID NO: 21394 - DNA, 20 bp, synthetic construct
  source 1..20: mol_type = other DNA
ggactgggcggtggaatgct

SEQ ID NO: 21395 - DNA, 20 bp, synthetic construct
  source 1..20: mol_type = other DNA
aatggctgagtttccatgtc

SEQ ID NO: 21396 - DNA, 20 bp, synthetic construct
  source 1..20: mol_type = other DNA
tgatcatccacaagacccag

SEQ ID NO: 21397 - DNA, 20 bp, synthetic construct
  source 1..20: mol_type = other DNA
agccagcattcttttgacca

SEQ ID NO: 21398 - DNA, 20 bp, synthetic construct
  source 1..20: mol_type = other DNA
ggtttggcgggattttttac

SEQ ID NO: 21399 - DNA, 20 bp, synthetic construct
  source 1..20: mol_type = other DNA
attgcccgcactggagcaga

SEQ ID NO: 21400 - DNA, 20 bp, synthetic construct
  source 1..20: mol_type = other DNA
gatggacagattgagtaaaa

SEQ ID NO: 21401 - DNA, 20 bp, synthetic construct
  source 1..20: mol_type = other DNA
aacggcgggaatcacgtcac

SEQ ID NO: 21402 - DNA, 20 bp, synthetic construct
  source 1..20: mol_type = other DNA
atctaagatctttttttttt

SEQ ID NO: 21403 - DNA, 20 bp, synthetic construct
  source 1..20: mol_type = other DNA
gtatttttttttcactttac

SEQ ID NO: 21404 - DNA, 20 bp, synthetic construct
  source 1..20: mol_type = other DNA
taggcgatgttgacgagccg

SEQ ID NO: 21405 - DNA, 20 bp, synthetic construct
  source 1..20: mol_type = other DNA
agggcgacggcctagtcgtg

SEQ ID NO: 21406 - DNA, 20 bp, synthetic construct
  source 1..20: mol_type = other DNA
tgacgagtcttccttctatt

SEQ ID NO: 21407 - DNA, 20 bp, synthetic construct
  source 1..20: mol_type = other DNA
tgtcagaatatctatcattt

SEQ ID NO: 21408 - DNA, 20 bp, synthetic construct
  source 1..20: mol_type = other DNA
ggtgtaaacatgaaagtact

SEQ ID NO: 21409 - DNA, 20 bp, synthetic construct
  source 1..20: mol_type = other DNA
gtaaccttaccatcatgctt

SEQ ID NO: 21410 - DNA, 20 bp, synthetic construct
  source 1..20: mol_type = other DNA
cggagacagcgtaaccaccg

SEQ ID NO: 21411 - DNA, 20 bp, synthetic construct
  source 1..20: mol_type = other DNA
aaggataagaccaaagttct

SEQ ID NO: 21412 - DNA, 20 bp, synthetic construct
  source 1..20: mol_type = other DNA
gacaccaagaatgagtggac

SEQ ID NO: 21413 - DNA, 20 bp, synthetic construct
  source 1..20: mol_type = other DNA
agcaggagcagctctccttc

SEQ ID NO: 21414 - DNA, 20 bp, synthetic construct
  source 1..20: mol_type = other DNA
cgacgaccccgaacccgcag

SEQ ID NO: 21415 - DNA, 20 bp, synthetic construct
  source 1..20: mol_type = other DNA
ggctcgtccgggatctgttc

SEQ ID NO: 21416 - DNA, 20 bp, synthetic construct
  source 1..20: mol_type = other DNA
atgtgtcccttccccaaaat

SEQ ID NO: 21417 - DNA, 20 bp, synthetic construct
  source 1..20: mol_type = other DNA
ccgggtggtgacagaatgtg

SEQ ID NO: 21418 - DNA, 20 bp, synthetic construct
  source 1..20: mol_type = other DNA
acgtatgtcagccaatcagc

SEQ ID NO: 21419 - DNA, 20 bp, synthetic construct
  source 1..20: mol_type = other DNA
gagtgaacatctctgggaag

SEQ ID NO: 21420 - DNA, 20 bp, synthetic construct
  source 1..20: mol_type = other DNA
tacttctgccttctttgata

SEQ ID NO: 21421 - DNA, 20 bp, synthetic construct
  source 1..20: mol_type = other DNA
agaagcatcggaagtggatt

SEQ ID NO: 21422 - DNA, 20 bp, synthetic construct
  source 1..20: mol_type = other DNA
tgaataatttctactgaaag

SEQ ID NO: 21423 - DNA, 20 bp, synthetic construct
  source 1..20: mol_type = other DNA
tccggtgctttacaccggag

SEQ ID NO: 21424 - DNA, 20 bp, synthetic construct
  source 1..20: mol_type = other DNA
ctcgctcagcacgagatctg

SEQ ID NO: 21425 - DNA, 20 bp, synthetic construct
  source 1..20: mol_type = other DNA
cggtgtatcttaacccaggc

SEQ ID NO: 21426 - DNA, 20 bp, synthetic construct
  source 1..20: mol_type = other DNA
gttcgcagacggccgcggcg

SEQ ID NO: 21427 - DNA, 20 bp, synthetic construct
  source 1..20: mol_type = other DNA
aataaaactcaccaaggcca

SEQ ID NO: 21428 - DNA, 20 bp, synthetic construct
  source 1..20: mol_type = other DNA
tgggcatagtcgcgccgcgc

SEQ ID NO: 21429 - DNA, 20 bp, synthetic construct
  source 1..20: mol_type = other DNA
caccccagcatcctttaatc

SEQ ID NO: 21430 - DNA, 20 bp, synthetic construct
  source 1..20: mol_type = other DNA
tgctattaagagaggaaaga

SEQ ID NO: 21431 - DNA, 20 bp, synthetic construct
  source 1..20: mol_type = other DNA
cctgtgggggttctagacga

SEQ ID NO: 21432 - DNA, 20 bp, synthetic construct
  source 1..20: mol_type = other DNA
acaaaaacgaagatcagctg

SEQ ID NO: 21433 - DNA, 20 bp, synthetic construct
  source 1..20: mol_type = other DNA
gcgcgcccacccggaaaaaa

SEQ ID NO: 21434 - DNA, 20 bp, synthetic construct
  source 1..20: mol_type = other DNA
taccgaacttcgacgcagtt

SEQ ID NO: 21435 - DNA, 20 bp, synthetic construct
  source 1..20: mol_type = other DNA
ttagcccatacaaggtggtc

SEQ ID NO: 21436 - DNA, 20 bp, synthetic construct
  source 1..20: mol_type = other DNA
ggggtctaaggaatcttctt

SEQ ID NO: 21437 - DNA, 20 bp, synthetic construct
  source 1..20: mol_type = other DNA
acctgcgtctgcagcattgt

SEQ ID NO: 21438 - DNA, 20 bp, synthetic construct
  source 1..20: mol_type = other DNA
atacacactacaaaacagtt

SEQ ID NO: 21439 - DNA, 20 bp, synthetic construct
  source 1..20: mol_type = other DNA
tggcctgtaccgggaccgag

SEQ ID NO: 21440 - DNA, 20 bp, synthetic construct
  source 1..20: mol_type = other DNA
taaaagcgcaccgcggcacg

SEQ ID NO: 21441 - DNA, 20 bp, synthetic construct
  source 1..20: mol_type = other DNA
aaggtcttagaaactctcaa

SEQ ID NO: 21442 - DNA, 20 bp, synthetic construct
  source 1..20: mol_type = other DNA
tttgtgaacttctttaaatc

SEQ ID NO: 21443 - DNA, 20 bp, synthetic construct
  source 1..20: mol_type = other DNA
aggggcacttgttctttgtc

SEQ ID NO: 21444 - DNA, 20 bp, synthetic construct
  source 1..20: mol_type = other DNA
agattaaggcaaccagtggt

SEQ ID NO: 21445 - DNA, 20 bp, synthetic construct
  source 1..20: mol_type = other DNA
caacaaccccctaacctccc

SEQ ID NO: 21446 - DNA, 20 bp, synthetic construct
  source 1..20: mol_type = other DNA
cccgcaccatcgtcgagcgt

SEQ ID NO: 21447 - DNA, 20 bp, synthetic construct
  source 1..20: mol_type = other DNA
tcactgcgaattgtgtggat

SEQ ID NO: 21448 - DNA, 20 bp, synthetic construct
  source 1..20: mol_type = other DNA
ggaaaacggggtcattttgc

SEQ ID NO: 21449 - DNA, 20 bp, synthetic construct
  source 1..20: mol_type = other DNA
aaactcatgatgtgtagtcc

SEQ ID NO: 21450 - DNA, 20 bp, synthetic construct
  source 1..20: mol_type = other DNA
ggggcttggatacgagggaa

SEQ ID NO: 21451 - DNA, 20 bp, synthetic construct
  source 1..20: mol_type = other DNA
tgggacggaaccgactactt

SEQ ID NO: 21452 - DNA, 20 bp, synthetic construct
  source 1..20: mol_type = other DNA
atgaaccattgagatttctc

SEQ ID NO: 21453 - DNA, 20 bp, synthetic construct
  source 1..20: mol_type = other DNA
tcgcggctggccgaccatga

SEQ ID NO: 21454 - DNA, 20 bp, synthetic construct
  source 1..20: mol_type = other DNA
tgaagtattgagatttctct

SEQ ID NO: 21455 - DNA, 20 bp, synthetic construct
  source 1..20: mol_type = other DNA
cgcggctggccgaccataac

SEQ ID NO: 21456 - DNA, 20 bp, synthetic construct
  source 1..20: mol_type = other DNA
gatcatgttttacaacagta

SEQ ID NO: 21457 - DNA, 20 bp, synthetic construct
  source 1..20: mol_type = other DNA
ccgaagtcgggcatcccaaa

SEQ ID NO: 21458 - DNA, 20 bp, synthetic construct
  source 1..20: mol_type = other DNA
cctcgcctagtcccaacaca

SEQ ID NO: 21459 - DNA, 20 bp, synthetic construct
  source 1..20: mol_type = other DNA
acacccgacgggacacaaat

SEQ ID NO: 21460 - DNA, 20 bp, synthetic construct
  source 1..20: mol_type = other DNA
ctccacaggccatccctctc

SEQ ID NO: 21461 - DNA, 20 bp, synthetic construct
  source 1..20: mol_type = other DNA
aaatcaagagaggctgagtt

SEQ ID NO: 21462 - DNA, 20 bp, synthetic construct
  source 1..20: mol_type = other DNA
ttcccagtacttcttatata

SEQ ID NO: 21463 - DNA, 20 bp, synthetic construct
  source 1..20: mol_type = other DNA
gaaacaaggtagcctagctt

SEQ ID NO: 21464 - DNA, 20 bp, synthetic construct
  source 1..20: mol_type = other DNA
cttaggtggtattgagaaac

SEQ ID NO: 21465 - DNA, 20 bp, synthetic construct
  source 1..20: mol_type = other DNA
agcctgccggcggatgcctg

SEQ ID NO: 21466 - DNA, 20 bp, synthetic construct
  source 1..20: mol_type = other DNA
tatcccattgccatcccaac

SEQ ID NO: 21467 - DNA, 20 bp, synthetic construct
  source 1..20: mol_type = other DNA
taagacttgttgtgtggaga

SEQ ID NO: 21468 - DNA, 20 bp, synthetic construct
  source 1..20: mol_type = other DNA
gaatgcgtatccggaacgcc

SEQ ID NO: 21469 - DNA, 20 bp, synthetic construct
  source 1..20: mol_type = other DNA
caagacacaccttaacctgg

SEQ ID NO: 21470 - DNA, 20 bp, synthetic construct
  source 1..20: mol_type = other DNA
agcacccctgggtcacgccc

SEQ ID NO: 21471 - DNA, 20 bp, synthetic construct
  source 1..20: mol_type = other DNA
cctggtactacgagcttggg

SEQ ID NO: 21472 - DNA, 20 bp, synthetic construct
  source 1..20: mol_type = other DNA
gagactggccgaaaggcagc

SEQ ID NO: 21473 - DNA, 20 bp, synthetic construct
  source 1..20: mol_type = other DNA
tagggtgacggtatttacat

SEQ ID NO: 21474 - DNA, 20 bp, synthetic construct
  source 1..20: mol_type = other DNA
tgttacagtaccattaacat

SEQ ID NO: 21475 - DNA, 20 bp, synthetic construct
  source 1..20: mol_type = other DNA
tagtacatctcctaccaatg

SEQ ID NO: 21476 - DNA, 20 bp, synthetic construct
  source 1..20: mol_type = other DNA
ctcacgcgctgtcaataccg

SEQ ID NO: 21477 - DNA, 20 bp, synthetic construct
  source 1..20: mol_type = other DNA
ttctttgagacctcgttggc

SEQ ID NO: 21478 - DNA, 20 bp, synthetic construct
  source 1..20: mol_type = other DNA
gacagtccctgcattgcact

SEQ ID NO: 21479 - DNA, 20 bp, synthetic construct
  source 1..20: mol_type = other DNA
acgttaaagggaggtaacca

SEQ ID NO: 21480 - DNA, 20 bp, synthetic construct
  source 1..20: mol_type = other DNA
aggtaacacgcgacactcgg

SEQ ID NO: 21481 - DNA, 20 bp, synthetic construct
  source 1..20: mol_type = other DNA
aagggtggaaggccagcgtt

SEQ ID NO: 21482 - DNA, 20 bp, synthetic construct
  source 1..20: mol_type = other DNA
tgcacaaggttgttctgccc

SEQ ID NO: 21483 - DNA, 20 bp, synthetic construct
  source 1..20: mol_type = other DNA
cccaacagatcaaagtgtat

SEQ ID NO: 21484 - DNA, 20 bp, synthetic construct
  source 1..20: mol_type = other DNA
tgaactccaagttcacgttt

SEQ ID NO: 21485 - DNA, 20 bp, synthetic construct
  source 1..20: mol_type = other DNA
ttgagctccggctacctgtg

SEQ ID NO: 21486 - DNA, 20 bp, synthetic construct
  source 1..20: mol_type = other DNA
ctgcctaccacaagggcccg

SEQ ID NO: 21487 - DNA, 20 bp, synthetic construct
  source 1..20: mol_type = other DNA
cagttaaagcagaaacaatc

SEQ ID NO: 21488 - DNA, 20 bp, synthetic construct
  source 1..20: mol_type = other DNA
tcgatgaggccaaaccctgg

SEQ ID NO: 21489 - DNA, 20 bp, synthetic construct
  source 1..20: mol_type = other DNA
ccagtctctttcacgtgccg

SEQ ID NO: 21490 - DNA, 20 bp, synthetic construct
  source 1..20: mol_type = other DNA
gcgagtggctggtcaagctg

SEQ ID NO: 21491 - DNA, 20 bp, synthetic construct
  source 1..20: mol_type = other DNA
ccggcaggaccgattctgtt

SEQ ID NO: 21492 - DNA, 20 bp, synthetic construct
  source 1..20: mol_type = other DNA
tcaaagcacttgaagacacc

SEQ ID NO: 21493 - DNA, 20 bp, synthetic construct
  source 1..20: mol_type = other DNA
catttgtgaaacgtgctttt

SEQ ID NO: 21494 - DNA, 20 bp, synthetic construct
  source 1..20: mol_type = other DNA
gtcagagacctctgaaagtg

SEQ ID NO: 21495 - DNA, 20 bp, synthetic construct
  source 1..20: mol_type = other DNA
tgattgtcactgagagtggt

SEQ ID NO: 21496 - DNA, 20 bp, synthetic construct
  source 1..20: mol_type = other DNA
aggacggagctgacaccttc

SEQ ID NO: 21497 - DNA, 20 bp, synthetic construct
  source 1..20: mol_type = other DNA
taatgcgcaaaaccaagctt

SEQ ID NO: 21498 - DNA, 20 bp, synthetic construct
  source 1..20: mol_type = other DNA
tgttccgccgctgcgctgct

SEQ ID NO: 21499 - DNA, 20 bp, synthetic construct
  source 1..20: mol_type = other DNA
tttacctgcgttgggtgaac

SEQ ID NO: 21500 - DNA, 20 bp, synthetic construct
  source 1..20: mol_type = other DNA
tcctggagcaccccccctag

SEQ ID NO: 21501 - DNA, 20 bp, synthetic construct
  source 1..20: mol_type = other DNA
gcaaagcgcaaagtccagcg

SEQ ID NO: 21502 - DNA, 20 bp, synthetic construct
  source 1..20: mol_type = other DNA
attggtgatgttacaactca

SEQ ID NO: 21503 - DNA, 20 bp, synthetic construct
  source 1..20: mol_type = other DNA
ctcccatcccagtcgtatct

SEQ ID NO: 21504 - DNA, 20 bp, synthetic construct
  source 1..20: mol_type = other DNA
gcagctgctgcccaaccaga

SEQ ID NO: 21505 - DNA, 20 bp, synthetic construct
  source 1..20: mol_type = other DNA
gagataattggagggctgac

SEQ ID NO: 21506 - DNA, 20 bp, synthetic construct
  source 1..20: mol_type = other DNA
gttcttaagtttttcctctt

SEQ ID NO: 21507 - DNA, 20 bp, synthetic construct
  source 1..20: mol_type = other DNA
ggggacacggttgatggttt

SEQ ID NO: 21508 - DNA, 20 bp, synthetic construct
  source 1..20: mol_type = other DNA
caaccaccatgtggagctgg

SEQ ID NO: 21509 - DNA, 20 bp, synthetic construct
  source 1..20: mol_type = other DNA
ctgtgctcctccgggcatgt

SEQ ID NO: 21510 - DNA, 20 bp, synthetic construct
  source 1..20: mol_type = other DNA
gtgaccagataccaaatgtg

SEQ ID NO: 21511 - DNA, 20 bp, synthetic construct
  source 1..20: mol_type = other DNA
gttgacgaagaagaaatcgt

SEQ ID NO: 21512 - DNA, 20 bp, synthetic construct
  source 1..20: mol_type = other DNA
attctggaggcatctacccc

SEQ ID NO: 21513 - DNA, 20 bp, synthetic construct
  source 1..20: mol_type = other DNA
aacattcctggttgtccttt

SEQ ID NO: 21514 - DNA, 20 bp, synthetic construct
  source 1..20: mol_type = other DNA
accttgagagctgcagtggc

SEQ ID NO: 21515 - DNA, 20 bp, synthetic construct
  source 1..20: mol_type = other DNA
ttgcgtgatgcacttgagac

SEQ ID NO: 21516 - DNA, 20 bp, synthetic construct
  source 1..20: mol_type = other DNA
ggtttcctcaaacaaagatc

SEQ ID NO: 21517 - DNA, 20 bp, synthetic construct
  source 1..20: mol_type = other DNA
cgtctgttgtcgatgtggtc

SEQ ID NO: 21518 - DNA, 20 bp, synthetic construct
  source 1..20: mol_type = other DNA
ggaggaccgatgatcgctta

SEQ ID NO: 21519 - DNA, 20 bp, synthetic construct
  source 1..20: mol_type = other DNA
accgtaatttggaaaagcgc

SEQ ID NO: 21520 - DNA, 20 bp, synthetic construct
  source 1..20: mol_type = other DNA
aagccttactactttcttac

SEQ ID NO: 21521 - DNA, 20 bp, synthetic construct
  source 1..20: mol_type = other DNA
gacaaacttcccgagactgt

SEQ ID NO: 21522 - DNA, 20 bp, synthetic construct
  source 1..20: mol_type = other DNA
tgggcgctagcactctggta

SEQ ID NO: 21523 - DNA, 20 bp, synthetic construct
  source 1..20: mol_type = other DNA
gtaaaagatatcatgattaa

SEQ ID NO: 21524 - DNA, 20 bp, synthetic construct
  source 1..20: mol_type = other DNA
agatccaatgaaggatctgg

SEQ ID NO: 21525 - DNA, 20 bp, synthetic construct
  source 1..20: mol_type = other DNA
gccgctatagggagagttgc

SEQ ID NO: 21526 - DNA, 20 bp, synthetic construct
  source 1..20: mol_type = other DNA
cagccctcaaccacacagaa

SEQ ID NO: 21527 - DNA, 20 bp, synthetic construct
  source 1..20: mol_type = other DNA
ttgagcattggcaacgccta

SEQ ID NO: 21528 - DNA, 20 bp, synthetic construct
  source 1..20: mol_type = other DNA
aacaatagctggcttaagaa

SEQ ID NO: 21529 - DNA, 20 bp, synthetic construct
  source 1..20: mol_type = other DNA
cagatcgccacaatcgagca

SEQ ID NO: 21530 - DNA, 20 bp, synthetic construct
  source 1..20: mol_type = other DNA
ttcagagacatcagaggctt

SEQ ID NO: 21531 - DNA, 20 bp, synthetic construct
  source 1..20: mol_type = other DNA
cccacaagagcaggccagtg

SEQ ID NO: 21532 - DNA, 20 bp, synthetic construct
  source 1..20: mol_type = other DNA
attaggacactaatgctaaa

SEQ ID NO: 21533 - DNA, 20 bp, synthetic construct
  source 1..20: mol_type = other DNA
gcttggcataacggggagca

SEQ ID NO: 21534 - DNA, 20 bp, synthetic construct
  source 1..20: mol_type = other DNA
caactctacgcaggaagtgg

SEQ ID NO: 21535 - DNA, 20 bp, synthetic construct
  source 1..20: mol_type = other DNA
cctgtcaaagacatcttcac

SEQ ID NO: 21536 - DNA, 20 bp, synthetic construct
  source 1..20: mol_type = other DNA
tctgatgctactgcagtgga

SEQ ID NO: 21537 - DNA, 20 bp, synthetic construct
  source 1..20: mol_type = other DNA
ggaggccccttacccaagga

SEQ ID NO: 21538 - DNA, 20 bp, synthetic construct
  source 1..20: mol_type = other DNA
tggtaccagacgaattatgt

SEQ ID NO: 21539 - DNA, 20 bp, synthetic construct
  source 1..20: mol_type = other DNA
ggggacagcgtgagcagagc

SEQ ID NO: 21540 - DNA, 20 bp, synthetic construct
  source 1..20: mol_type = other DNA
aattcacatagcacagctga

SEQ ID NO: 21541 - DNA, 20 bp, synthetic construct
  source 1..20: mol_type = other DNA
tgcccattggtgatcaggat

SEQ ID NO: 21542 - DNA, 20 bp, synthetic construct
  source 1..20: mol_type = other DNA
cagtccggagctatctacgt

SEQ ID NO: 21543 - DNA, 20 bp, synthetic construct
  source 1..20: mol_type = other DNA
gggatagtttccaccggggg

SEQ ID NO: 21544 - DNA, 20 bp, synthetic construct
  source 1..20: mol_type = other DNA
gcatcaattttgggcatacc

SEQ ID NO: 21545 - DNA, 20 bp, synthetic construct
  source 1..20: mol_type = other DNA
ctaggcatcaagaaaaagga

SEQ ID NO: 21546 - DNA, 20 bp, synthetic construct
  source 1..20: mol_type = other DNA
atgacccctgccgacaagtc

SEQ ID NO: 21547 - DNA, 20 bp, synthetic construct
  source 1..20: mol_type = other DNA
gtggcggctagtacactggt

SEQ ID NO: 21548 - DNA, 20 bp, synthetic construct
  source 1..20: mol_type = other DNA
aagtggccgatccgttatcc

SEQ ID NO: 21549 - DNA, 20 bp, synthetic construct
  source 1..20: mol_type = other DNA
ctaaaggacgtgctcataaa

SEQ ID NO: 21550 - DNA, 20 bp, synthetic construct
  source 1..20: mol_type = other DNA
gaagcaaacccggtggacca

SEQ ID NO: 21551 - DNA, 20 bp, synthetic construct
  source 1..20: mol_type = other DNA
atggacatgtacagagttac

SEQ ID NO: 21552 - DNA, 20 bp, synthetic construct
  source 1..20: mol_type = other DNA
ggtattgaagatttgatttc

SEQ ID NO: 21553 - DNA, 20 bp, synthetic construct
  source 1..20: mol_type = other DNA
accgactcaatagcaaggtg

SEQ ID NO: 21554 - DNA, 20 bp, synthetic construct
  source 1..20: mol_type = other DNA
ttgtacgcacttgaggccaa

SEQ ID NO: 21555 - DNA, 20 bp, synthetic construct
  source 1..20: mol_type = other DNA
aacacctccacctactcgct

SEQ ID NO: 21556 - DNA, 20 bp, synthetic construct
  source 1..20: mol_type = other DNA
gggtttgactatgcagtggc

SEQ ID NO: 21557 - DNA, 20 bp, synthetic construct
  source 1..20: mol_type = other DNA
gccctcgaagatcaggcagg

SEQ ID NO: 21558 - DNA, 20 bp, synthetic construct
  source 1..20: mol_type = other DNA
tcatacttcactcagagcca

SEQ ID NO: 21559 - DNA, 20 bp, synthetic construct
  source 1..20: mol_type = other DNA
acagactttgaagaagcaat

SEQ ID NO: 21560 - DNA, 20 bp, synthetic construct
  source 1..20: mol_type = other DNA
gtggaacagggaaaatccag

SEQ ID NO: 21561 - DNA, 20 bp, synthetic construct
  source 1..20: mol_type = other DNA
gaagaaaagctatttgcctt

SEQ ID NO: 21562 - DNA, 20 bp, synthetic construct
  source 1..20: mol_type = other DNA
ggcggcatgccatctggctg

SEQ ID NO: 21563 - DNA, 20 bp, synthetic construct
  source 1..20: mol_type = other DNA
aaccggacagcggcgtgctg

SEQ ID NO: 21564 - DNA, 20 bp, synthetic construct
  source 1..20: mol_type = other DNA
cgccttttgggatgcaggaa

SEQ ID NO: 21565 - DNA, 20 bp, synthetic construct
  source 1..20: mol_type = other DNA
attgtctaagcagcagcagg

SEQ ID NO: 21566 - DNA, 20 bp, synthetic construct
  source 1..20: mol_type = other DNA
acaagcgagggttggatctg

SEQ ID NO: 21567 - DNA, 20 bp, synthetic construct
  source 1..20: mol_type = other DNA
caccacctggtcaagaacgg

SEQ ID NO: 21568 - DNA, 20 bp, synthetic construct
  source 1..20: mol_type = other DNA
ccccaccagttgctaaattt

SEQ ID NO: 21569 - DNA, 20 bp, synthetic construct
  source 1..20: mol_type = other DNA
gatgtggcaaaacagacata

SEQ ID NO: 21570 - DNA, 20 bp, synthetic construct
  source 1..20: mol_type = other DNA
ccctcccctgctgacttcat

SEQ ID NO: 21571 - DNA, 20 bp, synthetic construct
  source 1..20: mol_type = other DNA
ccggcggacctgcccgacaa

SEQ ID NO: 21572 - DNA, 20 bp, synthetic construct
  source 1..20: mol_type = other DNA
tctcctgccacacatgttct

SEQ ID NO: 21573 - DNA, 20 bp, synthetic construct
  source 1..20: mol_type = other DNA
gttggagcaccaaccaagac

SEQ ID NO: 21574 - DNA, 20 bp, synthetic construct
  source 1..20: mol_type = other DNA
gacactgggtttttcttttc

SEQ ID NO: 21575 - DNA, 20 bp, synthetic construct
  source 1..20: mol_type = other DNA
aaattgaaggaacctgatac

SEQ ID NO: 21576 - DNA, 20 bp, synthetic construct
  source 1..20: mol_type = other DNA
actgactgctctgccttggg

SEQ ID NO: 21577 - DNA, 20 bp, synthetic construct
  source 1..20: mol_type = other DNA
gttagggctggaaagacccg

SEQ ID NO: 21578 - DNA, 20 bp, synthetic construct
  source 1..20: mol_type = other DNA
gaaattgatttccaacaact

SEQ ID NO: 21579 - DNA, 20 bp, synthetic construct
  source 1..20: mol_type = other DNA
gcaatcttaagctttgttcg

SEQ ID NO: 21580 - DNA, 20 bp, synthetic construct
  source 1..20: mol_type = other DNA
aggcttaattccagacctct

SEQ ID NO: 21581 - DNA, 20 bp, synthetic construct
  source 1..20: mol_type = other DNA
gaacatgtctagacaaggta

SEQ ID NO: 21582 - DNA, 20 bp, synthetic construct
  source 1..20: mol_type = other DNA
aggagcaactgatgtagatg

SEQ ID NO: 21583 - DNA, 20 bp, synthetic construct
  source 1..20: mol_type = other DNA
gaactcaaatgccatgttat

SEQ ID NO: 21584 - DNA, 20 bp, synthetic construct
  source 1..20: mol_type = other DNA
taaaaacttcaaggatgcaa

SEQ ID NO: 21585 - DNA, 20 bp, synthetic construct
  source 1..20: mol_type = other DNA
aggggatgtgcctagagctt

SEQ ID NO: 21586 - DNA, 20 bp, synthetic construct
  source 1..20: mol_type = other DNA
aggcgaaggtcttcctggaa

SEQ ID NO: 21587 - DNA, 20 bp, synthetic construct
  source 1..20: mol_type = other DNA
gaaagtggagtttactcagt

SEQ ID NO: 21588 - DNA, 20 bp, synthetic construct
  source 1..20: mol_type = other DNA
tgtagaagaaccagaggatt

SEQ ID NO: 21589 - DNA, 20 bp, synthetic construct
  source 1..20: mol_type = other DNA
attcggagatgttggtcttg

SEQ ID NO: 21590 - DNA, 20 bp, synthetic construct
  source 1..20: mol_type = other DNA
ttaccatgtctgtggttcaa

SEQ ID NO: 21591 - DNA, 20 bp, synthetic construct
  source 1..20: mol_type = other DNA
ggttggagatctaagtcaac

SEQ ID NO: 21592 - DNA, 20 bp, synthetic construct
  source 1..20: mol_type = other DNA
acctcttcttttctactcca

SEQ ID NO: 21593 - DNA, 20 bp, synthetic construct
  source 1..20: mol_type = other DNA
gctgtagcgaccacacaaag

SEQ ID NO: 21594 - DNA, 20 bp, synthetic construct
  source 1..20: mol_type = other DNA
accgctcatacgcgatattg

SEQ ID NO: 21595 - DNA, 20 bp, synthetic construct
  source 1..20: mol_type = other DNA
caacaccaacaacaagcgtt

SEQ ID NO: 21596 - DNA, 20 bp, synthetic construct
  source 1..20: mol_type = other DNA
acaaggagttgacaatgctg

SEQ ID NO: 21597 - DNA, 20 bp, synthetic construct
  source 1..20: mol_type = other DNA
ctaccaagaaaatgattacc

SEQ ID NO: 21598 - DNA, 20 bp, synthetic construct
  source 1..20: mol_type = other DNA
tacctctgcctccgtccgga

SEQ ID NO: 21599 - DNA, 20 bp, synthetic construct
  source 1..20: mol_type = other DNA
cttcactgatgagttcatca

SEQ ID NO: 21600 - DNA, 20 bp, synthetic construct
  source 1..20: mol_type = other DNA
tgctacttgctcttccttta

SEQ ID NO: 21601 - DNA, 20 bp, synthetic construct
  source 1..20: mol_type = other DNA
aacaaatccaggccctgtgc

SEQ ID NO: 21602 - DNA, 20 bp, synthetic construct
  source 1..20: mol_type = other DNA
ttggctcaaacaaaaattgt

SEQ ID NO: 21603 - DNA, 20 bp, synthetic construct
  source 1..20: mol_type = other DNA
ctctagcttcattgttgcta

SEQ ID NO: 21604 - DNA, 20 bp, synthetic construct
  source 1..20: mol_type = other DNA
tgctcagtctccaccagact

SEQ ID NO: 21605 - DNA, 20 bp, synthetic construct
  source 1..20: mol_type = other DNA
caaactcaaggatgtgagac

SEQ ID NO: 21606 - DNA, 20 bp, synthetic construct
  source 1..20: mol_type = other DNA
cactggaatcatgaacaccg

SEQ ID NO: 21607 - DNA, 20 bp, synthetic construct
  source 1..20: mol_type = other DNA
gaggacagtcgcccacgacg

SEQ ID NO: 21608 - DNA, 20 bp, synthetic construct
  source 1..20: mol_type = other DNA
ggactacgctcattccaaat

SEQ ID NO: 21609 - DNA, 20 bp, synthetic construct
  source 1..20: mol_type = other DNA
caatttctttacagagcaaa

SEQ ID NO: 21610 - DNA, 20 bp, synthetic construct
  source 1..20: mol_type = other DNA
gacctgggctcagcccgggt

SEQ ID NO: 21611 - DNA, 20 bp, synthetic construct
  source 1..20: mol_type = other DNA
agcctaccaagtgcgcaatt

SEQ ID NO: 21612 - DNA, 20 bp, synthetic construct
  source 1..20: mol_type = other DNA
cagggacggcaaactcccca

SEQ ID NO: 21613 - DNA, 20 bp, synthetic construct
  source 1..20: mol_type = other DNA
ggtggggaactgggcgaagg

SEQ ID NO: 21614 - DNA, 20 bp, synthetic construct
  source 1..20: mol_type = other DNA
caatagcacggccttgaact

SEQ ID NO: 21615 - DNA, 20 bp, synthetic construct
  source 1..20: mol_type = other DNA
ccttaacaacaccaggccac

SEQ ID NO: 21616 - DNA, 20 bp, synthetic construct
  source 1..20: mol_type = other DNA
ggaagacagggacaggtccg

SEQ ID NO: 21617 - DNA, 20 bp, synthetic construct
  source 1..20: mol_type = other DNA
ggccattaagtgggagtacg

SEQ ID NO: 21618 - DNA, 20 bp, synthetic construct
  source 1..20: mol_type = other DNA
gttcttctgctttgcgtggt

SEQ ID NO: 21619 - DNA, 20 bp, synthetic construct
  source 1..20: mol_type = other DNA
tgacatcaccaaactactcc

SEQ ID NO: 21620 - DNA, 20 bp, synthetic construct
  source 1..20: mol_type = other DNA
tactggcacctgtgtgtata

SEQ ID NO: 21621 - DNA, 20 bp, synthetic construct
  source 1..20: mol_type = other DNA
cggtaagagcaccaaggtcc

SEQ ID NO: 21622 - DNA, 20 bp, synthetic construct
  source 1..20: mol_type = other DNA
gtactccacctacggcaagt

SEQ ID NO: 21623 - DNA, 20 bp, synthetic construct
  source 1..20: mol_type = other DNA
ccctccgggctccgtcactg

SEQ ID NO: 21624 - DNA, 20 bp, synthetic construct
  source 1..20: mol_type = other DNA
cgcattgggcatcaatgccg

SEQ ID NO: 21625 - DNA, 20 bp, synthetic construct
  source 1..20: mol_type = other DNA
tgaccctacctttaccattg

SEQ ID NO: 21626 - DNA, 20 bp, synthetic construct
  source 1..20: mol_type = other DNA
aatcaccaaatacatcatga

SEQ ID NO: 21627 - DNA, 20 bp, synthetic construct
  source 1..20: mol_type = other DNA
ccccacacactacgtgccgg

SEQ ID NO: 21628 - DNA, 20 bp, synthetic construct
  source 1..20: mol_type = other DNA
gagcgactttaagacctggc

SEQ ID NO: 21629 - DNA, 20 bp, synthetic construct
  source 1..20: mol_type = other DNA
cgtcggtcctaggacctgca

SEQ ID NO: 21630 - DNA, 20 bp, synthetic construct
  source 1..20: mol_type = other DNA
catgactactgacaatctca

SEQ ID NO: 21631 - DNA, 20 bp, synthetic construct
  source 1..20: mol_type = other DNA
cgagcccgaaccggacgtag

SEQ ID NO: 21632 - DNA, 20 bp, synthetic construct
  source 1..20: mol_type = other DNA
ctcccctgacgccgagctca

SEQ ID NO: 21633 - DNA, 20 bp, synthetic construct
  source 1..20: mol_type = other DNA
tcggagattcgccccagccc

SEQ ID NO: 21634 - DNA, 20 bp, synthetic construct
  source 1..20: mol_type = other DNA
cctggcgcccccacattcag

SEQ ID NO: 21635 - DNA, 20 bp, synthetic construct
  source 1..20: mol_type = other DNA
gcctgagaaggggggtcgta

SEQ ID NO: 21636 - DNA, 20 bp, synthetic construct
  source 1..20: mol_type = other DNA
ggtctactaccttacccgtg

SEQ ID NO: 21637 - DNA, 20 bp, synthetic construct
  source 1..20: mol_type = other DNA
gcttgaacaggctctcaact

SEQ ID NO: 21638 - DNA, 20 bp, synthetic construct
  source 1..20: mol_type = other DNA
atcacagcgtgtctcatgcc

SEQ ID NO: 21639 - DNA, 20 bp, synthetic construct
  source 1..20: mol_type = other DNA
cagagggccaatacggtttg

SEQ ID NO: 21640 - DNA, 20 bp, synthetic construct
  source 1..20: mol_type = other DNA
gggcaaaaaacaaaagaaaa

SEQ ID NO: 21641 - DNA, 20 bp, synthetic construct
  source 1..20: mol_type = other DNA
caatcaatgctggattcgag

SEQ ID NO: 21642 - DNA, 20 bp, synthetic construct
  source 1..20: mol_type = other DNA
acccacccttgacataagaa

SEQ ID NO: 21643 - DNA, 20 bp, synthetic construct
  source 1..20: mol_type = other DNA
gaccgacagaggctggggta

SEQ ID NO: 21644 - DNA, 20 bp, synthetic construct
  source 1..20: mol_type = other DNA
agtgcatcgtgagtggttca

SEQ ID NO: 21645 - DNA, 20 bp, synthetic construct
  source 1..20: mol_type = other DNA
tacctcggagtgtgacagca

SEQ ID NO: 21646 - DNA, 20 bp, synthetic construct
  source 1..20: mol_type = other DNA
gcccgccacagaggtgttaa

SEQ ID NO: 21647 - DNA, 20 bp, synthetic construct
  source 1..20: mol_type = other DNA
cgcgtttgggtattggctga

SEQ ID NO: 21648 - DNA, 20 bp, synthetic construct
  source 1..20: mol_type = other DNA
tagtgccagtgctgcccaac

SEQ ID NO: 21649 - DNA, 20 bp, synthetic construct
  source 1..20: mol_type = other DNA
gtacggtcccgaaagagata

SEQ ID NO: 21650 - DNA, 20 bp, synthetic construct
  source 1..20: mol_type = other DNA
ctttgattttttcaccctgg

SEQ ID NO: 21651 - DNA, 20 bp, synthetic construct
  source 1..20: mol_type = other DNA
tcaggtgctcattggaagaa

SEQ ID NO: 21652 - DNA, 20 bp, synthetic construct
  source 1..20: mol_type = other DNA
gtgtcagatcgcgaaagcgc

SEQ ID NO: 21653 - DNA, 20 bp, synthetic construct
  source 1..20: mol_type = other DNA
ctcgccgaagctgtaaggcg

SEQ ID NO: 21654 - DNA, 20 bp, synthetic construct
  source 1..20: mol_type = other DNA
ctctcaaaagcatcaaacaa

SEQ ID NO: 21655 - DNA, 20 bp, synthetic construct
  source 1..20: mol_type = other DNA
gtatccaataaatcctcttg

SEQ ID NO: 21656 - DNA, 20 bp, synthetic construct
  source 1..20: mol_type = other DNA
gacccttcgtgcaccctaaa

SEQ ID NO: 21657 - DNA, 20 bp, synthetic construct
  source 1..20: mol_type = other DNA
atctactcacggaggaccct

SEQ ID NO: 21658 - DNA, 20 bp, synthetic construct
  source 1..20: mol_type = other DNA
cgttcccccttcgcctggga

SEQ ID NO: 21659 - DNA, 20 bp, synthetic construct
  source 1..20: mol_type = other DNA
tagtccactatcgccagttg

SEQ ID NO: 21660 - DNA, 20 bp, synthetic construct
  source 1..20: mol_type = other DNA
gagaaacagaggaaaaggaa

SEQ ID NO: 21661 - DNA, 20 bp, synthetic construct
  source 1..20: mol_type = other DNA
aaaacagtcccaccctgttt

SEQ ID NO: 21662 - DNA, 20 bp, synthetic construct
  source 1..20: mol_type = other DNA
tctgtcgcctctggatccct

SEQ ID NO: 21663 - DNA, 20 bp, synthetic construct
  source 1..20: mol_type = other DNA
gagaagtagccactagagaa

SEQ ID NO: 21664 - DNA, 20 bp, synthetic construct
  source 1..20: mol_type = other DNA
ccagcaagtctgccgtcaaa

SEQ ID NO: 21665 - DNA, 20 bp, synthetic construct
  source 1..20: mol_type = other DNA
ccaaagttgtaaccaagaag

SEQ ID NO: 21666 - DNA, 20 bp, synthetic construct
  source 1..20: mol_type = other DNA
gggtccgcagacaccaaact

SEQ ID NO: 21667 - DNA, 20 bp, synthetic construct
  source 1..20: mol_type = other DNA
ttcaacgctctcaaaatccc

SEQ ID NO: 21668 - DNA, 20 bp, synthetic construct
  source 1..20: mol_type = other DNA
aatatcaggcaaccaccctc

SEQ ID NO: 21669 - DNA, 20 bp, synthetic construct
  source 1..20: mol_type = other DNA
tacccttaaggcaggcaaag

SEQ ID NO: 21670 - DNA, 20 bp, synthetic construct
  source 1..20: mol_type = other DNA
tctcaaagaagtcgaaaagt

SEQ ID NO: 21671 - DNA, 20 bp, synthetic construct
  source 1..20: mol_type = other DNA
gtatacagtagtttgaatcc

SEQ ID NO: 21672 - DNA, 20 bp, synthetic construct
  source 1..20: mol_type = other DNA
agcagtcgctactctgttca

SEQ ID NO: 21673 - DNA, 20 bp, synthetic construct
  source 1..20: mol_type = other DNA
ctaaaccagatggaaggtgg

SEQ ID NO: 21674 - DNA, 20 bp, synthetic construct
  source 1..20: mol_type = other DNA
atgttacaccacccaaagat

SEQ ID NO: 21675 - DNA, 20 bp, synthetic construct
  source 1..20: mol_type = other DNA
gcaaagtaaaagtttccaga

SEQ ID NO: 21676 - DNA, 20 bp, synthetic construct
  source 1..20: mol_type = other DNA
gttttacatggttataccca

SEQ ID NO: 21677 - DNA, 20 bp, synthetic construct
  source 1..20: mol_type = other DNA
aactcttatttggtatagat

SEQ ID NO: 21678 - DNA, 20 bp, synthetic construct
  source 1..20: mol_type = other DNA
agagggtggctaggcctgca

SEQ ID NO: 21679 - DNA, 20 bp, synthetic construct
  source 1..20: mol_type = other DNA
attgcacgttctcttagaat

SEQ ID NO: 21680 - DNA, 20 bp, synthetic construct
  source 1..20: mol_type = other DNA
tataaaactccaaagtcctg

SEQ ID NO: 21681 - DNA, 20 bp, synthetic construct
  source 1..20: mol_type = other DNA
aagagagccctgcctaagga

SEQ ID NO: 21682 - DNA, 20 bp, synthetic construct
  source 1..20: mol_type = other DNA
ggtaggcctgtaaatgaaat

SEQ ID NO: 21683 - DNA, 20 bp, synthetic construct
  source 1..20: mol_type = other DNA
attgggttatattatgaatt

SEQ ID NO: 21684 - DNA, 20 bp, synthetic construct
  source 1..20: mol_type = other DNA
gggctaaaaatagaagtcac

SEQ ID NO: 21685 - DNA, 20 bp, synthetic construct
  source 1..20: mol_type = other DNA
gacttcaggacctgcagact

SEQ ID NO: 21686 - DNA, 20 bp, synthetic construct
  source 1..20: mol_type = other DNA
ctcaccacattaagctccaa

SEQ ID NO: 21687 - DNA, 20 bp, synthetic construct
  source 1..20: mol_type = other DNA
gttgcccagaaggtccaaaa

SEQ ID NO: 21688 - DNA, 20 bp, synthetic construct
  source 1..20: mol_type = other DNA
acactttttggactcctgga

SEQ ID NO: 21689 - DNA, 20 bp, synthetic construct
  source 1..20: mol_type = other DNA
attgtaacttgctgccaggc

SEQ ID NO: 21690 - DNA, 20 bp, synthetic construct
  source 1..20: mol_type = other DNA
ttcaaagctctgcagttcca

SEQ ID NO: 21691 - DNA, 20 bp, synthetic construct
  source 1..20: mol_type = other DNA
caatattatctttgtcagaa

SEQ ID NO: 21692 - DNA, 20 bp, synthetic construct
  source 1..20: mol_type = other DNA
tctcagggtgtgtgcggcgt

SEQ ID NO: 21693 - DNA, 20 bp, synthetic construct
  source 1..20: mol_type = other DNA
ggaagccaggaatgtccagg

SEQ ID NO: 21694 - DNA, 20 bp, synthetic construct
  source 1..20: mol_type = other DNA
tttcactggtgctgcaatgg

SEQ ID NO: 21695 - DNA, 20 bp, synthetic construct
  source 1..20: mol_type = other DNA
cgccttcctctgcttttccc

SEQ ID NO: 21696 - DNA, 20 bp, synthetic construct
  source 1..20: mol_type = other DNA
cccccacatgtggatcgttg

SEQ ID NO: 21697 - DNA, 20 bp, synthetic construct
  source 1..20: mol_type = other DNA
cacctttactgatgagctca

SEQ ID NO: 21698 - DNA, 20 bp, synthetic construct
  source 1..20: mol_type = other DNA
cacttccacttgcaattcct

SEQ ID NO: 21699 - DNA, 20 bp, synthetic construct
  source 1..20: mol_type = other DNA
atgggaaaaagcaaaaacca

SEQ ID NO: 21700 - DNA, 20 bp, synthetic construct
  source 1..20: mol_type = other DNA
tgattggcttaagagcaaat

SEQ ID NO: 21701 - DNA, 20 bp, synthetic construct
  source 1..20: mol_type = other DNA
ttctatgccccccgattcgg

SEQ ID NO: 21702 - DNA, 20 bp, synthetic construct
  source 1..20: mol_type = other DNA
gaggagaacagtcgctcatg

SEQ ID NO: 21703 - DNA, 20 bp, synthetic construct
  source 1..20: mol_type = other DNA
tgttttcaccatccttggta

SEQ ID NO: 21704 - DNA, 20 bp, synthetic construct
  source 1..20: mol_type = other DNA
cttatgtaacgatgagttag

SEQ ID NO: 21705 - DNA, 20 bp, synthetic construct
  source 1..20: mol_type = other DNA
gcagagatattgtatttaag

SEQ ID NO: 21706 - DNA, 20 bp, synthetic construct
  source 1..20: mol_type = other DNA
tggtcggccacaggcggcgt

SEQ ID NO: 21707 - DNA, 20 bp, synthetic construct
  source 1..20: mol_type = other DNA
cctcctgcttcccttccacc

SEQ ID NO: 21708 - DNA, 20 bp, synthetic construct
  source 1..20: mol_type = other DNA
aattccgcattgcagagata

SEQ ID NO: 21709 - DNA, 20 bp, synthetic construct
  source 1..20: mol_type = other DNA
gctgcggcttaggagggcag

SEQ ID NO: 21710 - DNA, 20 bp, synthetic construct
  source 1..20: mol_type = other DNA
cggcgaatcgacaagggaga

SEQ ID NO: 21711 - DNA, 20 bp, synthetic construct
  source 1..20: mol_type = other DNA
gttattttaggacccgcccc

SEQ ID NO: 21712 - DNA, 20 bp, synthetic construct
  source 1..20: mol_type = other DNA
tcccaccaggatcacagtgc

SEQ ID NO: 21713 - DNA, 20 bp, synthetic construct
  source 1..20: mol_type = other DNA
ttctctcagctggagaaaca

SEQ ID NO: 21714 - DNA, 20 bp, synthetic construct
  source 1..20: mol_type = other DNA
ctgcggggcgaggagctggc

SEQ ID NO: 21715 - DNA, 20 bp, synthetic construct
  source 1..20: mol_type = other DNA
tgccagcaggcctggtacca

SEQ ID NO: 21716 - DNA, 20 bp, synthetic construct
  source 1..20: mol_type = other DNA
cagcccatttacatcgtcat

SEQ ID NO: 21717 - DNA, 20 bp, synthetic construct
  source 1..20: mol_type = other DNA
aactgcctggtgacagaaaa

SEQ ID NO: 21718 - DNA, 20 bp, synthetic construct
  source 1..20: mol_type = other DNA
tttgggatcctgctgtggga

SEQ ID NO: 21719 - DNA, 20 bp, synthetic construct
  source 1..20: mol_type = other DNA
tgccacttagtcatcattac

SEQ ID NO: 21720 - DNA, 20 bp, synthetic construct
  source 1..20: mol_type = other DNA
gtggtggccatgcctgtagt

SEQ ID NO: 21721 - DNA, 20 bp, synthetic construct
  source 1..20: mol_type = other DNA
gcccctcttacggatcaagg

SEQ ID NO: 21722 - DNA, 20 bp, synthetic construct
  source 1..20: mol_type = other DNA
cggaagtcaggaaacagccg

SEQ ID NO: 21723 - DNA, 20 bp, synthetic construct
  source 1..20: mol_type = other DNA
cataaagatcgccccttggt

SEQ ID NO: 21724 - DNA, 20 bp, synthetic construct
  source 1..20: mol_type = other DNA
cacttagttgttggaacaca

SEQ ID NO: 21725 - DNA, 20 bp, synthetic construct
  source 1..20: mol_type = other DNA
aatatcttgggtacaagtta

SEQ ID NO: 21726 - DNA, 20 bp, synthetic construct
  source 1..20: mol_type = other DNA
ggtcagatcctaacgaggcg

SEQ ID NO: 21727 - DNA, 20 bp, synthetic construct
  source 1..20: mol_type = other DNA
ccacacacccaaggccatgc

SEQ ID NO: 21728 - DNA, 20 bp, synthetic construct
  source 1..20: mol_type = other DNA
cgctcccagaggggatcctg

SEQ ID NO: 21729 - DNA, 20 bp, synthetic construct
  source 1..20: mol_type = other DNA
agtgggaaaaaggatggaac

SEQ ID NO: 21730 - DNA, 20 bp, synthetic construct
  source 1..20: mol_type = other DNA
gagcagccagggaacctttg

SEQ ID NO: 21731 - DNA, 20 bp, synthetic construct
  source 1..20: mol_type = other DNA
ggaactgaccggttagtctt

SEQ ID NO: 21732 - DNA, 20 bp, synthetic construct
  source 1..20: mol_type = other DNA
actcaggtctctggcgtggc

SEQ ID NO: 21733 - DNA, 20 bp, synthetic construct
  source 1..20: mol_type = other DNA
tttatggggagtgagtactg

SEQ ID NO: 21734 - DNA, 20 bp, synthetic construct
  source 1..20: mol_type = other DNA
gcggtcctgcagaaccgagc

SEQ ID NO: 21735 - DNA, 20 bp, synthetic construct
  source 1..20: mol_type = other DNA
atcggaagttggctgcgagg

SEQ ID NO: 21736 - DNA, 20 bp, synthetic construct
  source 1..20: mol_type = other DNA
tgctcttgcatagggggaaa

SEQ ID NO: 21737 - DNA, 20 bp, synthetic construct
  source 1..20: mol_type = other DNA
agcgtgccggggcactggct

SEQ ID NO: 21738 - DNA, 20 bp, synthetic construct
  source 1..20: mol_type = other DNA
tccccagtaactatgtcgcg

SEQ ID NO: 21739 - DNA, 20 bp, synthetic construct
  source 1..20: mol_type = other DNA
tcgatatggctgctcagatt

SEQ ID NO: 21740 - DNA, 20 bp, synthetic construct
  source 1..20: mol_type = other DNA
ccaagttccccatcaagtgg

SEQ ID NO: 21741 - DNA, 20 bp, synthetic construct
  source 1..20: mol_type = other DNA
gcatgccctgcccgcccgag

SEQ ID NO: 21742 - DNA, 20 bp, synthetic construct
  source 1..20: mol_type = other DNA
cgtcttccctgttttgccct

SEQ ID NO: 21743 - DNA, 20 bp, synthetic construct
  source 1..20: mol_type = other DNA
acttgggaaatcgggagagt

SEQ ID NO: 21744 - DNA, 20 bp, synthetic construct
  source 1..20: mol_type = other DNA
cgacaaaggggaggaagtgg

SEQ ID NO: 21745 - DNA, 20 bp, synthetic construct
  source 1..20: mol_type = other DNA
ggcggttgaggggtcagatc

SEQ ID NO: 21746 - DNA, 20 bp, synthetic construct
  source 1..20: mol_type = other DNA
tacggatcaaggcatagccg

SEQ ID NO: 21747 - DNA, 20 bp, synthetic construct
  source 1..20: mol_type = other DNA
tgttggaacacacctgtctt

SEQ ID NO: 21748 - DNA, 20 bp, synthetic construct
  source 1..20: mol_type = other DNA
gggtacaagttaggcagtac

SEQ ID NO: 21749 - DNA, 20 bp, synthetic construct
  source 1..20: mol_type = other DNA
ccaaggccatgtttgtggtt

SEQ ID NO: 21750 - DNA, 20 bp, synthetic construct
  source 1..20: mol_type = other DNA
agagaggctaaagatcttca

SEQ ID NO: 21751 - DNA, 20 bp, synthetic construct
  source 1..20: mol_type = other DNA
agggaacctttggattacat

SEQ ID NO: 21752 - DNA, 20 bp, synthetic construct
  source 1..20: mol_type = other DNA
cggtataaccgggggatgcg

SEQ ID NO: 21753 - DNA, 20 bp, synthetic construct
  source 1..20: mol_type = other DNA
ccgagcggctattgacttct

SEQ ID NO: 21754 - DNA, 20 bp, synthetic construct
  source 1..20: mol_type = other DNA
acagcctgagaggcactggc

SEQ ID NO: 21755 - DNA, 20 bp, synthetic construct
  source 1..20: mol_type = other DNA
aaattaaactcctcttgaat

SEQ ID NO: 21756 - DNA, 20 bp, synthetic construct
  source 1..20: mol_type = other DNA
cagaaaccacaaaagaatac

SEQ ID NO: 21757 - DNA, 20 bp, synthetic construct
  source 1..20: mol_type = other DNA
gataattgatgtcttgttct

SEQ ID NO: 21758 - DNA, 20 bp, synthetic construct
  source 1..20: mol_type = other DNA
aatccagagatatacagttc

SEQ ID NO: 21759 - DNA, 20 bp, synthetic construct
  source 1..20: mol_type = other DNA
ggcagcttatcagggagatt

SEQ ID NO: 21760 - DNA, 20 bp, synthetic construct
  source 1..20: mol_type = other DNA
ctcttttggcttaggtactg

SEQ ID NO: 21761 - DNA, 20 bp, synthetic construct
  source 1..20: mol_type = other DNA
gcatgtctctgttggtaccc

SEQ ID NO: 21762 - DNA, 20 bp, synthetic construct
  source 1..20: mol_type = other DNA
ccacagcccaaagaaagctt

SEQ ID NO: 21763 - DNA, 20 bp, synthetic construct
  source 1..20: mol_type = other DNA
cgcggaacgcggggaaaggg

SEQ ID NO: 21764 - DNA, 20 bp, synthetic construct
  source 1..20: mol_type = other DNA
tgtaaaggtccccagctatg

SEQ ID NO: 21765 - DNA, 20 bp, synthetic construct
  source 1..20: mol_type = other DNA
actagacaacctgattcatt

SEQ ID NO: 21766 - DNA, 20 bp, synthetic construct
  source 1..20: mol_type = other DNA
tcctgagctctcttgctccc

SEQ ID NO: 21767 - DNA, 20 bp, synthetic construct
  source 1..20: mol_type = other DNA
ggcgtctggcttgcacccgc

SEQ ID NO: 21768 - DNA, 20 bp, synthetic construct
  source 1..20: mol_type = other DNA
cgttttgggtctttccttta

SEQ ID NO: 21769 - DNA, 20 bp, synthetic construct
  source 1..20: mol_type = other DNA
aactttgccaatatattgct

SEQ ID NO: 21770 - DNA, 20 bp, synthetic construct
  source 1..20: mol_type = other DNA
cccccaaaaggccccccccg

SEQ ID NO: 21771 - DNA, 20 bp, synthetic construct
  source 1..20: mol_type = other DNA
gggacttagcgccccccaaa

SEQ ID NO: 21772 - DNA, 20 bp, synthetic construct
  source 1..20: mol_type = other DNA
ggctgaaaatacggtcctcc

SEQ ID NO: 21773 - DNA, 20 bp, synthetic construct
  source 1..20: mol_type = other DNA
gcctggcgggtcctacctca

SEQ ID NO: 21774 - DNA, 20 bp, synthetic construct
  source 1..20: mol_type = other DNA
gccctggctgcccgcctccg

SEQ ID NO: 21775 - DNA, 20 bp, synthetic construct
  source 1..20: mol_type = other DNA
gtcttgggagacctccagtg

SEQ ID NO: 21776 - DNA, 20 bp, synthetic construct
  source 1..20: mol_type = other DNA
tctagatataacgagcaaga

SEQ ID NO: 21777 - DNA, 20 bp, synthetic construct
  source 1..20: mol_type = other DNA
ctgcagactcaggccttaag

SEQ ID NO: 21778 - DNA, 20 bp, synthetic construct
  source 1..20: mol_type = other DNA
tccctttctcatcacgttcc

SEQ ID NO: 21779 - DNA, 20 bp, synthetic construct
  source 1..20: mol_type = other DNA
atcaacaatggatgacaaca

SEQ ID NO: 21780 - DNA, 20 bp, synthetic construct
  source 1..20: mol_type = other DNA
taacctgggaaatatgggga

SEQ ID NO: 21781 - DNA, 20 bp, synthetic construct
  source 1..20: mol_type = other DNA
gggaaccttcccctccctgg

SEQ ID NO: 21782 - DNA, 20 bp, synthetic construct
  source 1..20: mol_type = other DNA
aaggcaacgccttattatta

SEQ ID NO: 21783 - DNA, 20 bp, synthetic construct
  source 1..20: mol_type = other DNA
cttgctgtttcctacgcatt

SEQ ID NO: 21784 - DNA, 20 bp, synthetic construct
  source 1..20: mol_type = other DNA
ccgattacatcaaccttcga

SEQ ID NO: 21785 - DNA, 20 bp, synthetic construct
  source 1..20: mol_type = other DNA
agtgtagcgcagagaggttg

SEQ ID NO: 21786 - DNA, 20 bp, synthetic construct
  source 1..20: mol_type = other DNA
ttcttgcagctgtgctaagc

SEQ ID NO: 21787 - DNA, 20 bp, synthetic construct
  source 1..20: mol_type = other DNA
cttcccatgtaacaagcccc

SEQ ID NO: 21788 - DNA, 20 bp, synthetic construct
  source 1..20: mol_type = other DNA
actttcccccttcgagcagt

SEQ ID NO: 21789 - DNA, 20 bp, synthetic construct
  source 1..20: mol_type = other DNA
cccccccttcgataccctcc

SEQ ID NO: 21790 - DNA, 20 bp, synthetic construct
  source 1..20: mol_type = other DNA
cacctggtcagaattggttg

SEQ ID NO: 21791 - DNA, 20 bp, synthetic construct
  source 1..20: mol_type = other DNA
ctcagctctcggtcctgagc

SEQ ID NO: 21792 - DNA, 20 bp, synthetic construct
  source 1..20: mol_type = other DNA
taaggcaaaccacggtttgg

SEQ ID NO: 21793 - DNA, 20 bp, synthetic construct
  source 1..20: mol_type = other DNA
tgaaagcgatgaatccgtta

SEQ ID NO: 21794 - DNA, 20 bp, synthetic construct
  source 1..20: mol_type = other DNA
acgtacaatgcaatgctaca

SEQ ID NO: 21795 - DNA, 20 bp, synthetic construct
  source 1..20: mol_type = other DNA
acacctatgtgccaattacc

SEQ ID NO: 21796 - DNA, 20 bp, synthetic construct
  source 1..20: mol_type = other DNA
acaagaatcactcaacaagt

SEQ ID NO: 21797 - DNA, 20 bp, synthetic construct
  source 1..20: mol_type = other DNA
cctgggcacctagggcgcct

SEQ ID NO: 21798 - DNA, 20 bp, synthetic construct
  source 1..20: mol_type = other DNA
caggcggtgagggaatagtt

SEQ ID NO: 21799 - DNA, 20 bp, synthetic construct
  source 1..20: mol_type = other DNA
gagaggacagtttattggaa

SEQ ID NO: 21800 - DNA, 20 bp, synthetic construct
  source 1..20: mol_type = other DNA
gcatcccatacacaataaga

SEQ ID NO: 21801 - DNA, 20 bp, synthetic construct
  source 1..20: mol_type = other DNA
ataaacaacagacagtggtc

SEQ ID NO: 21802 - DNA, 20 bp, synthetic construct
  source 1..20: mol_type = other DNA
gtccactgatttgtggaaag

SEQ ID NO: 21803 - DNA, 20 bp, synthetic construct
  source 1..20: mol_type = other DNA
attgccggcgttccgcactg

SEQ ID NO: 21804 - DNA, 20 bp, synthetic construct
  source 1..20: mol_type = other DNA
caacctcatgctccactaag

SEQ ID NO: 21805 - DNA, 20 bp, synthetic construct
  source 1..20: mol_type = other DNA
gctggaacgcctctgaggtc

SEQ ID NO: 21806 - DNA, 20 bp, synthetic construct
  source 1..20: mol_type = other DNA
gccgtgattatatccccggc

SEQ ID NO: 21807 - DNA, 20 bp, synthetic construct
  source 1..20: mol_type = other DNA
ccctatacaggtttaatcgc

SEQ ID NO: 21808 - DNA, 20 bp, synthetic construct
  source 1..20: mol_type = other DNA
ccccggccataacccaccag

SEQ ID NO: 21809 - DNA, 20 bp, synthetic construct
  source 1..20: mol_type = other DNA
accccgcatcctttgatgct

SEQ ID NO: 21810 - DNA, 20 bp, synthetic construct
  source 1..20: mol_type = other DNA
acccactcctcgggaccggc

SEQ ID NO: 21811 - DNA, 20 bp, synthetic construct
  source 1..20: mol_type = other DNA
cagcaaatctggctatcgaa

SEQ ID NO: 21812 - DNA, 20 bp, synthetic construct
  source 1..20: mol_type = other DNA
agatcccagccatcgacttt

SEQ ID NO: 21813 - DNA, 20 bp, synthetic construct
  source 1..20: mol_type = other DNA
ccttgacgcgccacactgag

SEQ ID NO: 21814 - DNA, 20 bp, synthetic construct
  source 1..20: mol_type = other DNA
cagatattgtgcactgtcgt

SEQ ID NO: 21815 - DNA, 20 bp, synthetic construct
  source 1..20: mol_type = other DNA
aattgtacgagctagtggag

SEQ ID NO: 21816 - DNA, 20 bp, synthetic construct
  source 1..20: mol_type = other DNA
agtttgattccacccagaat

SEQ ID NO: 21817 - DNA, 20 bp, synthetic construct
  source 1..20: mol_type = other DNA
gcacccttctatggaataca

SEQ ID NO: 21818 - DNA, 20 bp, synthetic construct
  source 1..20: mol_type = other DNA
atgtagctcagatgtgtgtg

SEQ ID NO: 21819 - DNA, 20 bp, synthetic construct
  source 1..20: mol_type = other DNA
gattctcagcccttcgcaat

SEQ ID NO: 21820 - DNA, 20 bp, synthetic construct
  source 1..20: mol_type = other DNA
gctggggccgcgccgctaac

SEQ ID NO: 21821 - DNA, 20 bp, synthetic construct
  source 1..20: mol_type = other DNA
tccgttgacatgaattcaat

SEQ ID NO: 21822 - DNA, 20 bp, synthetic construct
  source 1..20: mol_type = other DNA
gggactgccgagctcaccac

SEQ ID NO: 21823 - DNA, 20 bp, synthetic construct
  source 1..20: mol_type = other DNA
acaccttccccagccccatc

SEQ ID NO: 21824 - DNA, 20 bp, synthetic construct
  source 1..20: mol_type = other DNA
ctgctcgttgagaatgccgc

SEQ ID NO: 21825 - DNA, 20 bp, synthetic construct
  source 1..20: mol_type = other DNA
cagtctactgtcgctgagct

SEQ ID NO: 21826 - DNA, 20 bp, synthetic construct
  source 1..20: mol_type = other DNA
gggcagaaaacaaaacaaaa

SEQ ID NO: 21827 - DNA, 20 bp, synthetic construct
  source 1..20: mol_type = other DNA
tggcagtaacaacggtcaac

SEQ ID NO: 21828 - DNA, 20 bp, synthetic construct
  source 1..20: mol_type = other DNA
aggcttcactgatcgtgggt

SEQ ID NO: 21829 - DNA, 20 bp, synthetic construct
  source 1..20: mol_type = other DNA
agccatcgtggtggagtact

SEQ ID NO: 21830 - DNA, 20 bp, synthetic construct
  source 1..20: mol_type = other DNA
atcctactctgggagtgatg

SEQ ID NO: 21831 - DNA, 20 bp, synthetic construct
  source 1..20: mol_type = other DNA
ggttgggaggggagacaagc

SEQ ID NO: 21832 - DNA, 20 bp, synthetic construct
  source 1..20: mol_type = other DNA
tgacactggatgtgccattg

SEQ ID NO: 21833 - DNA, 20 bp, synthetic construct
  source 1..20: mol_type = other DNA
acaggttgatgctttcaatg

SEQ ID NO: 21834 - DNA, 20 bp, synthetic construct
  source 1..20: mol_type = other DNA
ggcgaggtatgtggtgctag

SEQ ID NO: 21835 - DNA, 20 bp, synthetic construct
  source 1..20: mol_type = other DNA
gtggccagccactgagtttt

SEQ ID NO: 21836 - DNA, 20 bp, synthetic construct
  source 1..20: mol_type = other DNA
tgttttccacacactatggc

SEQ ID NO: 21837 - DNA, 20 bp, synthetic construct
  source 1..20: mol_type = other DNA
tgatttgcaagatgagatac

SEQ ID NO: 21838 - DNA, 20 bp, synthetic construct
  source 1..20: mol_type = other DNA
tgggccgcgcacgaatgcca

SEQ ID NO: 21839 - DNA, 20 bp, synthetic construct
  source 1..20: mol_type = other DNA
accggaaaaacagaggtcac

SEQ ID NO: 21840 - DNA, 20 bp, synthetic construct
  source 1..20: mol_type = other DNA
aagcatggcactggacctgc

SEQ ID NO: 21841 - DNA, 20 bp, synthetic construct
  source 1..20: mol_type = other DNA
ggctacgctcactttgtggg

SEQ ID NO: 21842 - DNA, 20 bp, synthetic construct
  source 1..20: mol_type = other DNA
aaaagttctctgcccttaca

SEQ ID NO: 21843 - DNA, 20 bp, synthetic construct
  source 1..20: mol_type = other DNA
actactggggcgaatggatc

SEQ ID NO: 21844 - DNA, 20 bp, synthetic construct
  source 1..20: mol_type = other DNA
agtgttcgctgaacagaatc

SEQ ID NO: 21845 - DNA, 20 bp, synthetic construct
  source 1..20: mol_type = other DNA
agggaaaatgtacgctgatg

SEQ ID NO: 21846 - DNA, 20 bp, synthetic construct
  source 1..20: mol_type = other DNA
agaaggaaagaccgtaatgg

SEQ ID NO: 21847 - DNA, 20 bp, synthetic construct
  source 1..20: mol_type = other DNA
gatagctgtcaggacctggc

SEQ ID NO: 21848 - DNA, 20 bp, synthetic construct
  source 1..20: mol_type = other DNA
agcatatgcacagatgtggc

SEQ ID NO: 21849 - DNA, 20 bp, synthetic construct
  source 1..20: mol_type = other DNA
ccggatactgggtagacggt

SEQ ID NO: 21850 - DNA, 20 bp, synthetic construct
  source 1..20: mol_type = other DNA
tagaggttagaggagacccc

SEQ ID NO: 21851 - DNA, 20 bp, synthetic construct
  source 1..20: mol_type = other DNA
gaccccgcatttgcatcaaa

SEQ ID NO: 21852 - DNA, 20 bp, synthetic construct
  source 1..20: mol_type = other DNA
cccgaacagggacctgagag

SEQ ID NO: 21853 - DNA, 20 bp, synthetic construct
  source 1..20: mol_type = other DNA
gttagagaaggtgacggtac

SEQ ID NO: 21854 - DNA, 20 bp, synthetic construct
  source 1..20: mol_type = other DNA
tcagaaaaatctaagtgtga

SEQ ID NO: 21855 - DNA, 20 bp, synthetic construct
  source 1..20: mol_type = other DNA
gttgaggatgtaatgaacac

SEQ ID NO: 21856 - DNA, 20 bp, synthetic construct
  source 1..20: mol_type = other DNA
cctatagatattttatatgg

SEQ ID NO: 21857 - DNA, 20 bp, synthetic construct
  source 1..20: mol_type = other DNA
tttgaggtagaaaatagtac

SEQ ID NO: 21858 - DNA, 20 bp, synthetic construct
  source 1..20: mol_type = other DNA
catactggtcatccctggaa

SEQ ID NO: 21859 - DNA, 20 bp, synthetic construct
  source 1..20: mol_type = other DNA
aagagctgggtgaagtcaat

SEQ ID NO: 21860 - DNA, 20 bp, synthetic construct
  source 1..20: mol_type = other DNA
tatgactgttgcattaaagc

SEQ ID NO: 21861 - DNA, 20 bp, synthetic construct
  source 1..20: mol_type = other DNA
ctttgtaataaatataattc

SEQ ID NO: 21862 - DNA, 20 bp, synthetic construct
  source 1..20: mol_type = other DNA
ctccgggcctctcctgcctg

SEQ ID NO: 21863 - DNA, 20 bp, synthetic construct
  source 1..20: mol_type = other DNA
gaccccttaaaagacggagg

SEQ ID NO: 21864 - DNA, 20 bp, synthetic construct
  source 1..20: mol_type = other DNA
ggcaagacagatatgcctgc

SEQ ID NO: 21865 - DNA, 20 bp, synthetic construct
  source 1..20: mol_type = other DNA
gccacgtgtggtgccgtccg

SEQ ID NO: 21866 - DNA, 20 bp, synthetic construct
  source 1..20: mol_type = other DNA
attaagaagaaatcaggaaa

SEQ ID NO: 21867 - DNA, 20 bp, synthetic construct
  source 1..20: mol_type = other DNA
gctgtgtccttgcatttaga

SEQ ID NO: 21868 - DNA, 20 bp, synthetic construct
  source 1..20: mol_type = other DNA
ttgggcatagaacatactac

SEQ ID NO: 21869 - DNA, 20 bp, synthetic construct
  source 1..20: mol_type = other DNA
ttttgaatataaaagcctgt

SEQ ID NO: 21870 - DNA, 20 bp, synthetic construct
  source 1..20: mol_type = other DNA
aattaaaattacctctctct

SEQ ID NO: 21871 - DNA, 20 bp, synthetic construct
  source 1..20: mol_type = other DNA
acccagagagagggatatgt

SEQ ID NO: 21872 - DNA, 20 bp, synthetic construct
  source 1..20: mol_type = other DNA
aggcgcaaggggaaaacaag

SEQ ID NO: 21873 - DNA, 20 bp, synthetic construct
  source 1..20: mol_type = other DNA
acgcaactgctgcccagcag

SEQ ID NO: 21874 - DNA, 20 bp, synthetic construct
  source 1..20: mol_type = other DNA
tgtaaacaagttgcctatat

SEQ ID NO: 21875 - DNA, 20 bp, synthetic construct
  source 1..20: mol_type = other DNA
gagttgatcacaaatgaact

SEQ ID NO: 21876 - DNA, 20 bp, synthetic construct
  source 1..20: mol_type = other DNA
atagggagagtaactggaag

SEQ ID NO: 21877 - DNA, 20 bp, synthetic construct
  source 1..20: mol_type = other DNA
tgcaagaaaggaaagaactt

SEQ ID NO: 21878 - DNA, 20 bp, synthetic construct
  source 1..20: mol_type = other DNA
aagaacacaaaaattgtcgg

SEQ ID NO: 21879 - DNA, 20 bp, synthetic construct
  source 1..20: mol_type = other DNA
ccacaaagtcacgttgatgt

SEQ ID NO: 21880 - DNA, 20 bp, synthetic construct
  source 1..20: mol_type = other DNA
agccaggtggtgaagttagt

SEQ ID NO: 21881 - DNA, 20 bp, synthetic construct
  source 1..20: mol_type = other DNA
gacagtacctcttgcaatag

SEQ ID NO: 21882 - DNA, 20 bp, synthetic construct
  source 1..20: mol_type = other DNA
ttgcaatgtgtgcctatctt

SEQ ID NO: 21883 - DNA, 20 bp, synthetic construct
  source 1..20: mol_type = other DNA
cacaggaaagttatagaaga

SEQ ID NO: 21884 - DNA, 20 bp, synthetic construct
  source 1..20: mol_type = other DNA
ataacgtgtgggatgtcgct

SEQ ID NO: 21885 - DNA, 20 bp, synthetic construct
  source 1..20: mol_type = other DNA
cctgctgaggaaggtgactt

SEQ ID NO: 21886 - DNA, 20 bp, synthetic construct
  source 1..20: mol_type = other DNA
ccaaaagcagttatagagga

SEQ ID NO: 21887 - DNA, 20 bp, synthetic construct
  source 1..20: mol_type = other DNA
gctgttaagaacataatggc

SEQ ID NO: 21888 - DNA, 20 bp, synthetic construct
  source 1..20: mol_type = other DNA
caggctctctcaaagaggca

SEQ ID NO: 21889 - DNA, 20 bp, synthetic construct
  source 1..20: mol_type = other DNA
cacacagcactatacaaaag

SEQ ID NO: 21890 - DNA, 20 bp, synthetic construct
  source 1..20: mol_type = other DNA
tccgagacacagcaagaagg

SEQ ID NO: 21891 - DNA, 20 bp, synthetic construct
  source 1..20: mol_type = other DNA
ggcaaacttaccaaagtgga

SEQ ID NO: 21892 - DNA, 20 bp, synthetic construct
  source 1..20: mol_type = other DNA
gggactataaaaccagtact

SEQ ID NO: 21893 - DNA, 20 bp, synthetic construct
  source 1..20: mol_type = other DNA
gcttaccaattggcacaggg

SEQ ID NO: 21894 - DNA, 20 bp, synthetic construct
  source 1..20: mol_type = other DNA
cgcccaacacgcacagctaa

SEQ ID NO: 21895 - DNA, 20 bp, synthetic construct
  source 1..20: mol_type = other DNA
aggtaccgagacctcaaaat

SEQ ID NO: 21896 - DNA, 20 bp, synthetic construct
  source 1..20: mol_type = other DNA
caagcagcagcacaagctaa

SEQ ID NO: 21897 - DNA, 20 bp, synthetic construct
  source 1..20: mol_type = other DNA
aaaatgcaattgttagcaca

SEQ ID NO: 21898 - DNA, 20 bp, synthetic construct
  source 1..20: mol_type = other DNA
agagacataaggggaaaaca

SEQ ID NO: 21899 - DNA, 20 bp, synthetic construct
  source 1..20: mol_type = other DNA
aggcacccccacattggaca

SEQ ID NO: 21900 - DNA, 20 bp, synthetic construct
  source 1..20: mol_type = other DNA
tgtatcaggagaaagggaaa

SEQ ID NO: 21901 - DNA, 20 bp, synthetic construct
  source 1..20: mol_type = other DNA
gaattatggaaattgcccac

SEQ ID NO: 21902 - DNA, 20 bp, synthetic construct
  source 1..20: mol_type = other DNA
atagcagaaagcattaatgg

SEQ ID NO: 21903 - DNA, 20 bp, synthetic construct
  source 1..20: mol_type = other DNA
atacaagacaacaggagagg

SEQ ID NO: 21904 - DNA, 20 bp, synthetic construct
  source 1..20: mol_type = other DNA
tctctggcaaatggagaatg

SEQ ID NO: 21905 - DNA, 20 bp, synthetic construct
  source 1..20: mol_type = other DNA
caacctaaggtgtcagaaaa

SEQ ID NO: 21906 - DNA, 20 bp, synthetic construct
  source 1..20: mol_type = other DNA
attagggcaagaaacattcc

SEQ ID NO: 21907 - DNA, 20 bp, synthetic construct
  source 1..20: mol_type = other DNA
gaaaaaaagagaactcagcc

SEQ ID NO: 21908 - DNA, 20 bp, synthetic construct
  source 1..20: mol_type = other DNA
gcaggatgtgttagaggcaa

SEQ ID NO: 21909 - DNA, 20 bp, synthetic construct
  source 1..20: mol_type = other DNA
agcaaaatatatcaattgga

SEQ ID NO: 21910 - DNA, 20 bp, synthetic construct
  source 1..20: mol_type = other DNA
agacgtctttgattggtcag

SEQ ID NO: 21911 - DNA, 20 bp, synthetic construct
  source 1..20: mol_type = other DNA
actgtagctctgagctgtat

SEQ ID NO: 21912 - DNA, 20 bp, synthetic construct
  source 1..20: mol_type = other DNA
cccgtaggacgctctaatac

SEQ ID NO: 21913 - DNA, 20 bp, synthetic construct
  source 1..20: mol_type = other DNA
acaaaatgggggctcaagta

SEQ ID NO: 21914 - DNA, 20 bp, synthetic construct
  source 1..20: mol_type = other DNA
cttctgatgatttccaatcg

SEQ ID NO: 21915 - DNA, 20 bp, synthetic construct
  source 1..20: mol_type = other DNA
tcttgtgccgatctgcttgt

SEQ ID NO: 21916 - DNA, 20 bp, synthetic construct
  source 1..20: mol_type = other DNA
tcagtattggaaatgcttat

SEQ ID NO: 21917 - DNA, 20 bp, synthetic construct
  source 1..20: mol_type = other DNA
tacgcgacctgctgtggtta

SEQ ID NO: 21918 - DNA, 20 bp, synthetic construct
  source 1..20: mol_type = other DNA
ccctagtaaaaattgtgtca

SEQ ID NO: 21919 - DNA, 20 bp, synthetic construct
  source 1..20: mol_type = other DNA
ccattgagcaaagtgcacct

SEQ ID NO: 21920 - DNA, 20 bp, synthetic construct
  source 1..20: mol_type = other DNA
ttgaacctgtatgcttgctc

SEQ ID NO: 21921 - DNA, 20 bp, synthetic construct
  source 1..20: mol_type = other DNA
tatgccagaacccagatggt

SEQ ID NO: 21922 - DNA, 20 bp, synthetic construct
  source 1..20: mol_type = other DNA
gggcactggctaggaggttt

SEQ ID NO: 21923 - DNA, 20 bp, synthetic construct
  source 1..20: mol_type = other DNA
atagaaggacacaagtcaga

SEQ ID NO: 21924 - DNA, 20 bp, synthetic construct
  source 1..20: mol_type = other DNA
cagatctactcaaatcagta

SEQ ID NO: 21925 - DNA, 20 bp, synthetic construct
  source 1..20: mol_type = other DNA
caggtcagtgtggcggagtg

SEQ ID NO: 21926 - DNA, 20 bp, synthetic construct
  source 1..20: mol_type = other DNA
cgcctagcaaaactaaattg

SEQ ID NO: 21927 - DNA, 20 bp, synthetic construct
  source 1..20: mol_type = other DNA
tcacctgggctaatgtcaca

SEQ ID NO: 21928 - DNA, 20 bp, synthetic construct
  source 1..20: mol_type = other DNA
gtgaattgtgtgaagacaca

SEQ ID NO: 21929 - DNA, 20 bp, synthetic construct
  source 1..20: mol_type = other DNA
cggacacacaagggtcaaat

SEQ ID NO: 21930 - DNA, 20 bp, synthetic construct
  source 1..20: mol_type = other DNA
atctcaagtgcaggctgaga

SEQ ID NO: 21931 - DNA, 20 bp, synthetic construct
  source 1..20: mol_type = other DNA
ttgatggccccgaaacagca

SEQ ID NO: 21932 - DNA, 20 bp, synthetic construct
  source 1..20: mol_type = other DNA
ccgtccatgccgatatgggt

SEQ ID NO: 21933 - DNA, 20 bp, synthetic construct
  source 1..20: mol_type = other DNA
cttatcttgccctactagca

SEQ ID NO: 21934 - DNA, 20 bp, synthetic construct
  source 1..20: mol_type = other DNA
cagattggataccattagca

SEQ ID NO: 21935 - DNA, 20 bp, synthetic construct
  source 1..20: mol_type = other DNA
caggaccattagtggctgga

SEQ ID NO: 21936 - DNA, 20 bp, synthetic construct
  source 1..20: mol_type = other DNA
aaaatgaagaggaagaacaa

SEQ ID NO: 21937 - DNA, 20 bp, synthetic construct
  source 1..20: mol_type = other DNA
agaaagacctaatatcatat

SEQ ID NO: 21938 - DNA, 20 bp, synthetic construct
  source 1..20: mol_type = other DNA
ctcctggaacgtcaggatct

SEQ ID NO: 21939 - DNA, 20 bp, synthetic construct
  source 1..20: mol_type = other DNA
gggttatagaccccagacgc

SEQ ID NO: 21940 - DNA, 20 bp, synthetic construct
  source 1..20: mol_type = other DNA
tgagaagaggagacctacca

SEQ ID NO: 21941 - DNA, 20 bp, synthetic construct
  source 1..20: mol_type = other DNA
cctcagtgaatgtgtcccta

SEQ ID NO: 21942 - DNA, 20 bp, synthetic construct
  source 1..20: mol_type = other DNA
aaggcctaacaaaaggagga

SEQ ID NO: 21943 - DNA, 20 bp, synthetic construct
  source 1..20: mol_type = other DNA
ccaggatgtgcaccagagaa

SEQ ID NO: 21944 - DNA, 20 bp, synthetic construct
  source 1..20: mol_type = other DNA
tggaaggagaagggctgcac

SEQ ID NO: 21945 - DNA, 20 bp, synthetic construct
  source 1..20: mol_type = other DNA
ccgaggccattttcaaacta

SEQ ID NO: 21946 - DNA, 20 bp, synthetic construct
  source 1..20: mol_type = other DNA
taaatgacatgggaaagatt

SEQ ID NO: 21947 - DNA, 20 bp, synthetic construct
  source 1..20: mol_type = other DNA
aggtcggattaagccatagt

SEQ ID NO: 21948 - DNA, 20 bp, synthetic construct
  source 1..20: mol_type = other DNA
gcatggcgtagtggactagc

SEQ ID NO: 21949 - DNA, 20 bp, synthetic construct
  source 1..20: mol_type = other DNA
cagggaccaatgaaattggt

SEQ ID NO: 21950 - DNA, 20 bp, synthetic construct
  source 1..20: mol_type = other DNA
aaaaagacatcgctctgtct

SEQ ID NO: 21951 - DNA, 20 bp, synthetic construct
  source 1..20: mol_type = other DNA
atgggactggacacacgcac

SEQ ID NO: 21952 - DNA, 20 bp, synthetic construct
  source 1..20: mol_type = other DNA
atgctggtcaccccatccat

SEQ ID NO: 21953 - DNA, 20 bp, synthetic construct
  source 1..20: mol_type = other DNA
ggcaaaggaagcttggtaac

SEQ ID NO: 21954 - DNA, 20 bp, synthetic construct
  source 1..20: mol_type = other DNA
atgttcgaggccactgaaag

SEQ ID NO: 21955 - DNA, 20 bp, synthetic construct
  source 1..20: mol_type = other DNA
ccaaacacaccggagtgtcc

SEQ ID NO: 21956 - DNA, 20 bp, synthetic construct
  source 1..20: mol_type = other DNA
gccgacatgggctactggat

SEQ ID NO: 21957 - DNA, 20 bp, synthetic construct
  source 1..20: mol_type = other DNA
tgttgccgctcgtgcacact

SEQ ID NO: 21958 - DNA, 20 bp, synthetic construct
  source 1..20: mol_type = other DNA
ttagtggccgggggcttgct

SEQ ID NO: 21959 - DNA, 20 bp, synthetic construct
  source 1..20: mol_type = other DNA
ctgatttcatatggaggagg

SEQ ID NO: 21960 - DNA, 20 bp, synthetic construct
  source 1..20: mol_type = other DNA
atggatcttcatcctgggtc

SEQ ID NO: 21961 - DNA, 20 bp, synthetic construct
  source 1..20: mol_type = other DNA
tctgaacacacaggaagaga

SEQ ID NO: 21962 - DNA, 20 bp, synthetic construct
  source 1..20: mol_type = other DNA
ggagaggcagccgcaatctt

SEQ ID NO: 21963 - DNA, 20 bp, synthetic construct
  source 1..20: mol_type = other DNA
attaaagccggaaatgacat

SEQ ID NO: 21964 - DNA, 20 bp, synthetic construct
  source 1..20: mol_type = other DNA
aggggtgaccttccagtttg

SEQ ID NO: 21965 - DNA, 20 bp, synthetic construct
  source 1..20: mol_type = other DNA
gatgcccgcacttattcaga

SEQ ID NO: 21966 - DNA, 20 bp, synthetic construct
  source 1..20: mol_type = other DNA
ggcggtagggcttacaggca

SEQ ID NO: 21967 - DNA, 20 bp, synthetic construct
  source 1..20: mol_type = other DNA
tgcgcagtccaactcttgct

SEQ ID NO: 21968 - DNA, 20 bp, synthetic construct
  source 1..20: mol_type = other DNA
cttgctttttctattatgaa

SEQ ID NO: 21969 - DNA, 20 bp, synthetic construct
  source 1..20: mol_type = other DNA
ttgaaaagaggagagacaac

SEQ ID NO: 21970 - DNA, 20 bp, synthetic construct
  source 1..20: mol_type = other DNA
tacacaaaaggcggtccagg

SEQ ID NO: 21971 - DNA, 20 bp, synthetic construct
  source 1..20: mol_type = other DNA
tggatatctaatggcacagg

SEQ ID NO: 21972 - DNA, 20 bp, synthetic construct
  source 1..20: mol_type = other DNA
atattcaagctcacatacca

SEQ ID NO: 21973 - DNA, 20 bp, synthetic construct
  source 1..20: mol_type = other DNA
gctcaccatcagtggatgac

SEQ ID NO: 21974 - DNA, 20 bp, synthetic construct
  source 1..20: mol_type = other DNA
gcaacctgggcccagaacat

SEQ ID NO: 21975 - DNA, 20 bp, synthetic construct
  source 1..20: mol_type = other DNA
taagccacagtacggaagaa

SEQ ID NO: 21976 - DNA, 20 bp, synthetic construct
  source 1..20: mol_type = other DNA
gttagaggagaccccccgca

SEQ ID NO: 21977 - DNA, 20 bp, synthetic construct
  source 1..20: mol_type = other DNA
atgctggtaactccatccat

SEQ ID NO: 21978 - DNA, 20 bp, synthetic construct
  source 1..20: mol_type = other DNA
caagctcccacgtcggaaat

SEQ ID NO: 21979 - DNA, 20 bp, synthetic construct
  source 1..20: mol_type = other DNA
gaatggtgctgtagatcttg

SEQ ID NO: 21980 - DNA, 20 bp, synthetic construct
  source 1..20: mol_type = other DNA
ggcccactaatagctggagg

SEQ ID NO: 21981 - DNA, 20 bp, synthetic construct
  source 1..20: mol_type = other DNA
cccggcacatctggatctcc

SEQ ID NO: 21982 - DNA, 20 bp, synthetic construct
  source 1..20: mol_type = other DNA
acaataatggacctacatcc

SEQ ID NO: 21983 - DNA, 20 bp, synthetic construct
  source 1..20: mol_type = other DNA
agggtaatagacccgaggcg

SEQ ID NO: 21984 - DNA, 20 bp, synthetic construct
  source 1..20: mol_type = other DNA
aatgagatgggattactgga

SEQ ID NO: 21985 - DNA, 20 bp, synthetic construct
  source 1..20: mol_type = other DNA
gatgtcattcccatggtcac

SEQ ID NO: 21986 - DNA, 20 bp, synthetic construct
  source 1..20: mol_type = other DNA
atccatgcccaccatcaatg

SEQ ID NO: 21987 - DNA, 20 bp, synthetic construct
  source 1..20: mol_type = other DNA
cggccaaaagccacgtgtat

SEQ ID NO: 21988 - DNA, 20 bp, synthetic construct
  source 1..20: mol_type = other DNA
caccttcaaggttaatgatt

SEQ ID NO: 21989 - DNA, 20 bp, synthetic construct
  source 1..20: mol_type = other DNA
ccacgctggaggtttgctgg

SEQ ID NO: 21990 - DNA, 20 bp, synthetic construct
  source 1..20: mol_type = other DNA
cgaatacaaggacttcctgg

SEQ ID NO: 21991 - DNA, 20 bp, synthetic construct
  source 1..20: mol_type = other DNA
gtctagaaactttgctcagt

SEQ ID NO: 21992 - DNA, 20 bp, synthetic construct
  source 1..20: mol_type = other DNA
agggaaggatttctcactca

SEQ ID NO: 21993 - DNA, 20 bp, synthetic construct
  source 1..20: mol_type = other DNA
agaggagaacgttttcggtt

SEQ ID NO: 21994 - DNA, 20 bp, synthetic construct
  source 1..20: mol_type = other DNA
cagatgtgtgcagctgattg

SEQ ID NO: 21995 - DNA, 20 bp, synthetic construct
  source 1..20: mol_type = other DNA
ccccgaacatgcgaagcgca

SEQ ID NO: 21996 - DNA, 20 bp, synthetic construct
  source 1..20: mol_type = other DNA
agctgggctccagttcagag

SEQ ID NO: 21997 - DNA, 20 bp, synthetic construct
  source 1..20: mol_type = other DNA
taaagcaagacagcaagcga

SEQ ID NO: 21998 - DNA, 20 bp, synthetic construct
  source 1..20: mol_type = other DNA
ctaccccactggggtgagca

SEQ ID NO: 21999 - DNA, 20 bp, synthetic construct
  source 1..20: mol_type = other DNA
atctttcatccgcctctctt

SEQ ID NO: 22000 - DNA, 20 bp, synthetic construct
  source 1..20: mol_type = other DNA
cacctccccggggcttccat

SEQ ID NO: 22001 - DNA, 20 bp, synthetic construct
  source 1..20: mol_type = other DNA
aggagtctctttgttgagga

SEQ ID NO: 22002 - DNA, 20 bp, synthetic construct
  source 1..20: mol_type = other DNA
atctagcaagacaatgtaga

SEQ ID NO: 22003 - DNA, 20 bp, synthetic construct
  source 1..20: mol_type = other DNA
aaaaagagcagatccaaata

SEQ ID NO: 22004 - DNA, 20 bp, synthetic construct
  source 1..20: mol_type = other DNA
ttatcaagtatatcagaagg

SEQ ID NO: 22005 - DNA, 20 bp, synthetic construct
  source 1..20: mol_type = other DNA
agaagcctgggaatcaaatt

SEQ ID NO: 22006 - DNA, 20 bp, synthetic construct
  source 1..20: mol_type = other DNA
agcaaaagcagcctattgga

SEQ ID NO: 22007 - DNA, 20 bp, synthetic construct
  source 1..20: mol_type = other DNA
attacaaacagataatggac

SEQ ID NO: 22008 - DNA, 20 bp, synthetic construct
  source 1..20: mol_type = other DNA
gaagaatcagaaataatttt

SEQ ID NO: 22009 - DNA, 20 bp, synthetic construct
  source 1..20: mol_type = other DNA
acaaaaaacctaacctttgc

SEQ ID NO: 22010 - DNA, 20 bp, synthetic construct
  source 1..20: mol_type = other DNA
tggaaagcttgctaatgacg

SEQ ID NO: 22011 - DNA, 20 bp, synthetic construct
  source 1..20: mol_type = other DNA
ctgaaaaacaaggctctgac

SEQ ID NO: 22012 - DNA, 20 bp, synthetic construct
  source 1..20: mol_type = other DNA
cttccgcgttcttgtctcgt

SEQ ID NO: 22013 - DNA, 20 bp, synthetic construct
  source 1..20: mol_type = other DNA
gcattgtcttcccggggaag

SEQ ID NO: 22014 - DNA, 20 bp, synthetic construct
  source 1..20: mol_type = other DNA
ctcttgggcagctatcctac

SEQ ID NO: 22015 - DNA, 20 bp, synthetic construct
  source 1..20: mol_type = other DNA
acacactaacagcccccttg

SEQ ID NO: 22016 - DNA, 20 bp, synthetic construct
  source 1..20: mol_type = other DNA
gacatctcgatactcccact

SEQ ID NO: 22017 - DNA, 20 bp, synthetic construct
  source 1..20: mol_type = other DNA
accctgatcctaggcgccag

SEQ ID NO: 22018 - DNA, 20 bp, synthetic construct
  source 1..20: mol_type = other DNA
cttctatacctcccagacga

SEQ ID NO: 22019 - DNA, 20 bp, synthetic construct
  source 1..20: mol_type = other DNA
ttgaaccatactcaggacca

SEQ ID NO: 22020 - DNA, 20 bp, synthetic construct
  source 1..20: mol_type = other DNA
agaccatagatcttactgac

SEQ ID NO: 22021 - DNA, 20 bp, synthetic construct
  source 1..20: mol_type = other DNA
ccctatattctgcccttcac

SEQ ID NO: 22022 - DNA, 20 bp, synthetic construct
  source 1..20: mol_type = other DNA
catctgtcatctttcaaccc

SEQ ID NO: 22023 - DNA, 20 bp, synthetic construct
  source 1..20: mol_type = other DNA
caaagcaagccctttgcgac

SEQ ID NO: 22024 - DNA, 20 bp, synthetic construct
  source 1..20: mol_type = other DNA
gcagccacaccaacctcccc

SEQ ID NO: 22025 - DNA, 20 bp, synthetic construct
  source 1..20: mol_type = other DNA
tccaccacagtcctccacta

SEQ ID NO: 22026 - DNA, 20 bp, synthetic construct
  source 1..20: mol_type = other DNA
ggtggatcccgtggcgattc

SEQ ID NO: 22027 - DNA, 20 bp, synthetic construct
  source 1..20: mol_type = other DNA
gtgtcccttcgactacactt

SEQ ID NO: 22028 - DNA, 20 bp, synthetic construct
  source 1..20: mol_type = other DNA
cccgctcctccatcccaacc

SEQ ID NO: 22029 - DNA, 20 bp, synthetic construct
  source 1..20: mol_type = other DNA
tccgccctagcggccggaac

SEQ ID NO: 22030 - DNA, 20 bp, synthetic construct
  source 1..20: mol_type = other DNA
cgaggattagacctcctatt

SEQ ID NO: 22031 - DNA, 20 bp, synthetic construct
  source 1..20: mol_type = other DNA
gaaatccacataaccctgaa

SEQ ID NO: 22032 - DNA, 20 bp, synthetic construct
  source 1..20: mol_type = other DNA
ccacctgtccagagcaccaa

SEQ ID NO: 22033 - DNA, 20 bp, synthetic construct
  source 1..20: mol_type = other DNA
tctttcaatcaatgcgaaag

SEQ ID NO: 22034 - DNA, 20 bp, synthetic construct
  source 1..20: mol_type = other DNA
aaaaattcgaaaccaaagcc

SEQ ID NO: 22035 - DNA, 20 bp, synthetic construct
  source 1..20: mol_type = other DNA
ttcccctagcgctgaaaaac

SEQ ID NO: 22036 - DNA, 20 bp, synthetic construct
  source 1..20: mol_type = other DNA
gcggcctcggttgagacgcc

SEQ ID NO: 22037 - DNA, 20 bp, synthetic construct
  source 1..20: mol_type = other DNA
gtacccactgccaaaagcct

SEQ ID NO: 22038 - DNA, 20 bp, synthetic construct
  source 1..20: mol_type = other DNA
cagcttatgctgggacgccc

SEQ ID NO: 22039 - DNA, 20 bp, synthetic construct
  source 1..20: mol_type = other DNA
gttaaatacacattcacgca

SEQ ID NO: 22040 - DNA, 20 bp, synthetic construct
  source 1..20: mol_type = other DNA
agattctcttcgatgtatac

SEQ ID NO: 22041 - DNA, 20 bp, synthetic construct
  source 1..20: mol_type = other DNA
tacacatggcaaagtgcttc

SEQ ID NO: 22042 - DNA, 20 bp, synthetic construct
  source 1..20: mol_type = other DNA
atggcattcagaatagtaaa

SEQ ID NO: 22043 - DNA, 20 bp, synthetic construct
  source 1..20: mol_type = other DNA
ttcaccagtaattttgttct

SEQ ID NO: 22044 - DNA, 20 bp, synthetic construct
  source 1..20: mol_type = other DNA
gattgccatcaaccatctaa

SEQ ID NO: 22045 - DNA, 20 bp, synthetic construct
  source 1..20: mol_type = other DNA
ctatccctgttaaggaaaaa

SEQ ID NO: 22046 - DNA, 20 bp, synthetic construct
  source 1..20: mol_type = other DNA
attaatttgagtagcacccc

SEQ ID NO: 22047 - DNA, 20 bp, synthetic construct
  source 1..20: mol_type = other DNA
ttattctctaagtacaaggg

SEQ ID NO: 22048 - DNA, 20 bp, synthetic construct
  source 1..20: mol_type = other DNA
tttgattactctaattttga

SEQ ID NO: 22049 - DNA, 20 bp, synthetic construct
  source 1..20: mol_type = other DNA
tcttttgtctttctcagttt

SEQ ID NO: 22050 - DNA, 20 bp, synthetic construct
  source 1..20: mol_type = other DNA
tggtttcctagggaaggcac

SEQ ID NO: 22051 - DNA, 20 bp, synthetic construct
  source 1..20: mol_type = other DNA
aatttgttaaaacaggaaga

SEQ ID NO: 22052 - DNA, 20 bp, synthetic construct
  source 1..20: mol_type = other DNA
ctaaaagagttaaagattgc

SEQ ID NO: 22053 - DNA, 20 bp, synthetic construct
  source 1..20: mol_type = other DNA
actaagacagaggacctttc

SEQ ID NO: 22054 - DNA, 20 bp, synthetic construct
  source 1..20: mol_type = other DNA
agaccttatcgaaaaaaggg

SEQ ID NO: 22055 - DNA, 20 bp, synthetic construct
  source 1..20: mol_type = other DNA
tcgggttgctttgtttgtgg

SEQ ID NO: 22056 - DNA, 20 bp, synthetic construct
  source 1..20: mol_type = other DNA
attatttgacatccttaaag

SEQ ID NO: 22057 - DNA, 20 bp, synthetic construct
  source 1..20: mol_type = other DNA
tcaatatggtgtcaaccctc

SEQ ID NO: 22058 - DNA, 20 bp, synthetic construct
  source 1..20: mol_type = other DNA
tgagtgagcccacgagtgag

SEQ ID NO: 22059 - DNA, 20 bp, synthetic construct
  source 1..20: mol_type = other DNA
cgcagcatccccattgtata

SEQ ID NO: 22060 - DNA, 20 bp, synthetic construct
  source 1..20: mol_type = other DNA
ctttatgtcgagcccgggtt

SEQ ID NO: 22061 - DNA, 20 bp, synthetic construct
  source 1..20: mol_type = other DNA
gagctgcgggggacgacccg

SEQ ID NO: 22062 - DNA, 20 bp, synthetic construct
  source 1..20: mol_type = other DNA
agtaccaattcctggagatt

SEQ ID NO: 22063 - DNA, 20 bp, synthetic construct
  source 1..20: mol_type = other DNA
ctcagatattgaagtgcaag

SEQ ID NO: 22064 - DNA, 20 bp, synthetic construct
  source 1..20: mol_type = other DNA
aggatcataccctctgctct

SEQ ID NO: 22065 - DNA, 20 bp, synthetic construct
  source 1..20: mol_type = other DNA
accatccactcccacgactg

SEQ ID NO: 22066 - DNA, 20 bp, synthetic construct
  source 1..20: mol_type = other DNA
gcaaggaagaggaggcaggc

SEQ ID NO: 22067 - DNA, 20 bp, synthetic construct
  source 1..20: mol_type = other DNA
ccgagacacccattaaaaag

SEQ ID NO: 22068 - DNA, 20 bp, synthetic construct
  source 1..20: mol_type = other DNA
ccggccctgcatcacgcagt

SEQ ID NO: 22069 - DNA, 20 bp, synthetic construct
  source 1..20: mol_type = other DNA
acccgaggaactcctcaaag

SEQ ID NO: 22070 - DNA, 20 bp, synthetic construct
  source 1..20: mol_type = other DNA
taatctaataccgctggaca

SEQ ID NO: 22071 - DNA, 20 bp, synthetic construct
  source 1..20: mol_type = other DNA
acagccagcatcgcgaggaa

SEQ ID NO: 22072 - DNA, 20 bp, synthetic construct
  source 1..20: mol_type = other DNA
cagcacccaagagcgatccc

SEQ ID NO: 22073 - DNA, 20 bp, synthetic construct
  source 1..20: mol_type = other DNA
tcaagactcatccagtgtcc

SEQ ID NO: 22074 - DNA, 20 bp, synthetic construct
  source 1..20: mol_type = other DNA
gacacaagagatttgcggga

SEQ ID NO: 22075 - DNA, 20 bp, synthetic construct
  source 1..20: mol_type = other DNA
cagggcaggagatgatattg

SEQ ID NO: 22076 - DNA, 20 bp, synthetic construct
  source 1..20: mol_type = other DNA
tagcctatccgacgctgtcc

SEQ ID NO: 22077 - DNA, 20 bp, synthetic construct
  source 1..20: mol_type = other DNA
ccagagagaatcaaattgga

SEQ ID NO: 22078 - DNA, 20 bp, synthetic construct
  source 1..20: mol_type = other DNA
ccattgatcacacacggttc

SEQ ID NO: 22079 - DNA, 20 bp, synthetic construct
  source 1..20: mol_type = other DNA
ttttcttacttttatccttt

SEQ ID NO: 22080 - DNA, 20 bp, synthetic construct
  source 1..20: mol_type = other DNA
acagtcactcgggaagatgg

SEQ ID NO: 22081 - DNA, 20 bp, synthetic construct
  source 1..20: mol_type = other DNA
ataccctgaagttcacctag

SEQ ID NO: 22082 - DNA, 20 bp, synthetic construct
  source 1..20: mol_type = other DNA
tacttgccataggaggagac

SEQ ID NO: 22083 - DNA, 20 bp, synthetic construct
  source 1..20: mol_type = other DNA
gaccgctatgaccattgatg

SEQ ID NO: 22084 - DNA, 20 bp, synthetic construct
  source 1..20: mol_type = other DNA
tgctgcagacacaatccgga

SEQ ID NO: 22085 - DNA, 20 bp, synthetic construct
  source 1..20: mol_type = other DNA
tgtaagtgaccctcattgcc

SEQ ID NO: 22086 - DNA, 20 bp, synthetic construct
  source 1..20: mol_type = other DNA
aaggattgcttcgttagtgc

SEQ ID NO: 22087 - DNA, 20 bp, synthetic construct
  source 1..20: mol_type = other DNA
gagaggttatgaccgttatc

SEQ ID NO: 22088 - DNA, 20 bp, synthetic construct
  source 1..20: mol_type = other DNA
ggggatgaattatctgaata

SEQ ID NO: 22089 - DNA, 20 bp, synthetic construct
  source 1..20: mol_type = other DNA
cgacccttactcagcaaatc

SEQ ID NO: 22090 - DNA, 20 bp, synthetic construct
  source 1..20: mol_type = other DNA
tatagtacctagggcagctc

SEQ ID NO: 22091 - DNA, 20 bp, synthetic construct
  source 1..20: mol_type = other DNA
agcagggatggtgctattga

SEQ ID NO: 22092 - DNA, 20 bp, synthetic construct
  source 1..20: mol_type = other DNA
aagagccccaagtagatcct

SEQ ID NO: 22093 - DNA, 20 bp, synthetic construct
  source 1..20: mol_type = other DNA
agcgcataggttgagggatc

SEQ ID NO: 22094 - DNA, 20 bp, synthetic construct
  source 1..20: mol_type = other DNA
agaaacattgtttcgactcg

SEQ ID NO: 22095 - DNA, 20 bp, synthetic construct
  source 1..20: mol_type = other DNA
tgacgccctcgctgaggtaa

SEQ ID NO: 22096 - DNA, 20 bp, synthetic construct
  source 1..20: mol_type = other DNA
gcggacttcacctggactta

SEQ ID NO: 22097 - DNA, 20 bp, synthetic construct
  source 1..20: mol_type = other DNA
gatcactcgcaaattttggg

SEQ ID NO: 22098 - DNA, 20 bp, synthetic construct
  source 1..20: mol_type = other DNA
ctctgcagaatggccaacct

SEQ ID NO: 22099 - DNA, 20 bp, synthetic construct
  source 1..20: mol_type = other DNA
caagccctttgtacacccta

SEQ ID NO: 22100 - DNA, 20 bp, synthetic construct
  source 1..20: mol_type = other DNA
ggcattccccctccgcacag

SEQ ID NO: 22101 - DNA, 20 bp, synthetic construct
  source 1..20: mol_type = other DNA
cctcatcaccacactccact

SEQ ID NO: 22102 - DNA, 20 bp, synthetic construct
  source 1..20: mol_type = other DNA
cactgtggccgtgaagacct

SEQ ID NO: 22103 - DNA, 20 bp, synthetic construct
  source 1..20: mol_type = other DNA
ggactacctgagggagtgta

SEQ ID NO: 22104 - DNA, 20 bp, synthetic construct
  source 1..20: mol_type = other DNA
ggaatccagtatctcagatg

SEQ ID NO: 22105 - DNA, 20 bp, synthetic construct
  source 1..20: mol_type = other DNA
ggtcactgcctctccttcct

SEQ ID NO: 22106 - DNA, 20 bp, synthetic construct
  source 1..20: mol_type = other DNA
gtccccagggagagacaagg

SEQ ID NO: 22107 - DNA, 20 bp, synthetic construct
  source 1..20: mol_type = other DNA
tgaccccaccaaggccggcc

SEQ ID NO: 22108 - DNA, 20 bp, synthetic construct
  source 1..20: mol_type = other DNA
cgccttcatccccctcatat

SEQ ID NO: 22109 - DNA, 20 bp, synthetic construct
  source 1..20: mol_type = other DNA
ggctggcaagaacctgtaca

SEQ ID NO: 22110 - DNA, 20 bp, synthetic construct
  source 1..20: mol_type = other DNA
gagggagacctggatggagc

SEQ ID NO: 22111 - DNA, 20 bp, synthetic construct
  source 1..20: mol_type = other DNA
ccccggtgcctcagacccag

SEQ ID NO: 22112 - DNA, 20 bp, synthetic construct
  source 1..20: mol_type = other DNA
ttcattggaaggaagctgtc

SEQ ID NO: 22113 - DNA, 20 bp, synthetic construct
  source 1..20: mol_type = other DNA
cactggctggctaggcacat

SEQ ID NO: 22114 - DNA, 20 bp, synthetic construct
  source 1..20: mol_type = other DNA
agagtacgagccatagataa

SEQ ID NO: 22115 - DNA, 20 bp, synthetic construct
  source 1..20: mol_type = other DNA
cagctgaatatgggccaaac

SEQ ID NO: 22116 - DNA, 20 bp, synthetic construct
  source 1..20: mol_type = other DNA
cagtttctagagaaccatca

SEQ ID NO: 22117 - DNA, 20 bp, synthetic construct
  source 1..20: mol_type = other DNA
gcacgattctgggtgaaaga

SEQ ID NO: 22118 - DNA, 20 bp, synthetic construct
  source 1..20: mol_type = other DNA
tgccccggctcagggccaag

SEQ ID NO: 22119 - DNA, 20 bp, synthetic construct
  source 1..20: mol_type = other DNA
aacgccattttgcaaggcat

SEQ ID NO: 22120 - DNA, 20 bp, synthetic construct
  source 1..20: mol_type = other DNA
cccaccgtcgggaggtaagc

SEQ ID NO: 22121 - DNA, 20 bp, synthetic construct
  source 1..20: mol_type = other DNA
tttcggtttttcgccgaaac

SEQ ID NO: 22122 - DNA, 20 bp, synthetic construct
  source 1..20: mol_type = other DNA
agtccgtagatgtcaagaag

SEQ ID NO: 22123 - DNA, 20 bp, synthetic construct
  source 1..20: mol_type = other DNA
tcacctgggaggctattgcc

SEQ ID NO: 22124 - DNA, 20 bp, synthetic construct
  source 1..20: mol_type = other DNA
cgataatggcggacctctca

SEQ ID NO: 22125 - DNA, 20 bp, synthetic construct
  source 1..20: mol_type = other DNA
agcccacctgggatgattgc

SEQ ID NO: 22126 - DNA, 20 bp, synthetic construct
  source 1..20: mol_type = other DNA
aagaaagagagagaaggaga

SEQ ID NO: 22127 - DNA, 20 bp, synthetic construct
  source 1..20: mol_type = other DNA
cccaaaatcctggaccccta

SEQ ID NO: 22128 - DNA, 20 bp, synthetic construct
  source 1..20: mol_type = other DNA
cttctaaaagagggtcaggg

SEQ ID NO: 22129 - DNA, 20 bp, synthetic construct
  source 1..20: mol_type = other DNA
acggggactctgtttaaatg

SEQ ID NO: 22130 - DNA, 20 bp, synthetic construct
  source 1..20: mol_type = other DNA
tctgtatggggcacccccgc

SEQ ID NO: 22131 - DNA, 20 bp, synthetic construct
  source 1..20: mol_type = other DNA
ccccctccgtgtcggtgacg

SEQ ID NO: 22132 - DNA, 20 bp, synthetic construct
  source 1..20: mol_type = other DNA
aatatagggccccgcatccc

SEQ ID NO: 22133 - DNA, 20 bp, synthetic construct
  source 1..20: mol_type = other DNA
ttactaaatctagtacaggg

SEQ ID NO: 22134 - DNA, 20 bp, synthetic construct
  source 1..20: mol_type = other DNA
gaccatacaggcctagtaag

SEQ ID NO: 22135 - DNA, 20 bp, synthetic construct
  source 1..20: mol_type = other DNA
gccaagaacagatggtcccc

SEQ ID NO: 22136 - DNA, 20 bp, synthetic construct
  source 1..20: mol_type = other DNA
atctggcggacccgtggtgg

SEQ ID NO: 22137 - DNA, 20 bp, synthetic construct
  source 1..20: mol_type = other DNA
agacgagaacctaaaacagt

SEQ ID NO: 22138 - DNA, 20 bp, synthetic construct
  source 1..20: mol_type = other DNA
gaccttaggtcactggaaag

SEQ ID NO: 22139 - DNA, 20 bp, synthetic construct
  source 1..20: mol_type = other DNA
agggcccaatgagtctccct

SEQ ID NO: 22140 - DNA, 20 bp, synthetic construct
  source 1..20: mol_type = other DNA
cctgaccctagatgactagg

SEQ ID NO: 22141 - DNA, 20 bp, synthetic construct
  source 1..20: mol_type = other DNA
gatcatacctctgaaagcaa

SEQ ID NO: 22142 - DNA, 20 bp, synthetic construct
  source 1..20: mol_type = other DNA
cgtggatgacttactgctgg

SEQ ID NO: 22143 - DNA, 20 bp, synthetic construct
  source 1..20: mol_type = other DNA
gactgaggccagaaaagaga

SEQ ID NO: 22144 - DNA, 20 bp, synthetic construct
  source 1..20: mol_type = other DNA
gccgctcccagacgccgacc

SEQ ID NO: 22145 - DNA, 20 bp, synthetic construct
  source 1..20: mol_type = other DNA
agtgactgatataaaggacc

SEQ ID NO: 22146 - DNA, 20 bp, synthetic construct
  source 1..20: mol_type = other DNA
cttagccctgtaccgagccc

SEQ ID NO: 22147 - DNA, 20 bp, synthetic construct
  source 1..20: mol_type = other DNA
agtctggagacctctggcgg

SEQ ID NO: 22148 - DNA, 20 bp, synthetic construct
  source 1..20: mol_type = other DNA
cgcgtcccaatagggccaaa

SEQ ID NO: 22149 - DNA, 20 bp, synthetic construct
  source 1..20: mol_type = other DNA
caagccctcaacctcaccag

SEQ ID NO: 22150 - DNA, 20 bp, synthetic construct
  source 1..20: mol_type = other DNA
accattatgggacccctcat

SEQ ID NO: 22151 - DNA, 20 bp, synthetic construct
  source 1..20: mol_type = other DNA
ccagggtgccccaaggacct

SEQ ID NO: 22152 - DNA, 20 bp, synthetic construct
  source 1..20: mol_type = other DNA
ccaataaaccctcttgcagt

SEQ ID NO: 22153 - DNA, 20 bp, synthetic construct
  source 1..20: mol_type = other DNA
cgggggtctttcatttgggg

SEQ ID NO: 22154 - DNA, 20 bp, synthetic construct
  source 1..20: mol_type = other DNA
gtctcgctgttccttgggag

SEQ ID NO: 22155 - DNA, 20 bp, synthetic construct
  source 1..20: mol_type = other DNA
tgtttgatgttatgcgcctg

SEQ ID NO: 22156 - DNA, 20 bp, synthetic construct
  source 1..20: mol_type = other DNA
cgaccccgtcaggatatgtg

SEQ ID NO: 22157 - DNA, 20 bp, synthetic construct
  source 1..20: mol_type = other DNA
atcacccaggttaagatcaa

SEQ ID NO: 22158 - DNA, 20 bp, synthetic construct
  source 1..20: mol_type = other DNA
gaacctcctctttcgacccc

SEQ ID NO: 22159 - DNA, 20 bp, synthetic construct
  source 1..20: mol_type = other DNA
ggagatagtggagaagcgac

SEQ ID NO: 22160 - DNA, 20 bp, synthetic construct
  source 1..20: mol_type = other DNA
gcggtgcggggcgatgatgg

SEQ ID NO: 22161 - DNA, 20 bp, synthetic construct
  source 1..20: mol_type = other DNA
gatcgtaggagacatagaga

SEQ ID NO: 22162 - DNA, 20 bp, synthetic construct
  source 1..20: mol_type = other DNA
cggggaccaagaccccagac

SEQ ID NO: 22163 - DNA, 20 bp, synthetic construct
  source 1..20: mol_type = other DNA
gcctacggatggtagcagcc

SEQ ID NO: 22164 - DNA, 20 bp, synthetic construct
  source 1..20: mol_type = other DNA
gggaccgggtccagttcaga

SEQ ID NO: 22165 - DNA, 20 bp, synthetic construct
  source 1..20: mol_type = other DNA
gaagcagtcttttacaagag

SEQ ID NO: 22166 - DNA, 20 bp, synthetic construct
  source 1..20: mol_type = other DNA
gcccgcaacacgccgggccc

SEQ ID NO: 22167 - DNA, 20 bp, synthetic construct
  source 1..20: mol_type = other DNA
tgagctgtcgccatcggtag

SEQ ID NO: 22168 - DNA, 20 bp, synthetic construct
  source 1..20: mol_type = other DNA
cacgcccgaagactccaaca

SEQ ID NO: 22169 - DNA, 20 bp, synthetic construct
  source 1..20: mol_type = other DNA
ggagatcctaaaaggagaga

SEQ ID NO: 22170 - DNA, 20 bp, synthetic construct
  source 1..20: mol_type = other DNA
ctccctgactggaaaggcac

SEQ ID NO: 22171 - DNA, 20 bp, synthetic construct
  source 1..20: mol_type = other DNA
ggacctgaaaatgaccctgt

SEQ ID NO: 22172 - DNA, 20 bp, synthetic construct
  source 1..20: mol_type = other DNA
aaagttcagatcaaggtcag

SEQ ID NO: 22173 - DNA, 20 bp, synthetic construct
  source 1..20: mol_type = other DNA
ttatttgaactaaccaatca

SEQ ID NO: 22174 - DNA, 20 bp, synthetic construct
  source 1..20: mol_type = other DNA
ctctcctgcctgactgtgga

SEQ ID NO: 22175 - DNA, 20 bp, synthetic construct
  source 1..20: mol_type = other DNA
gtcatggaaggagttatggg

SEQ ID NO: 22176 - DNA, 20 bp, synthetic construct
  source 1..20: mol_type = other DNA
ttaaaatgcagctgttagca

SEQ ID NO: 22177 - DNA, 20 bp, synthetic construct
  source 1..20: mol_type = other DNA
agaaatattaagggattgga

SEQ ID NO: 22178 - DNA, 20 bp, synthetic construct
  source 1..20: mol_type = other DNA
agggtatccagcaaagtggc

SEQ ID NO: 22179 - DNA, 20 bp, synthetic construct
  source 1..20: mol_type = other DNA
aaagttaatggaaggggata

SEQ ID NO: 22180 - DNA, 20 bp, synthetic construct
  source 1..20: mol_type = other DNA
cgttaaatttagaaaacacg

SEQ ID NO: 22181 - DNA, 20 bp, synthetic construct
  source 1..20: mol_type = other DNA
ggtagtagtatataacagca

SEQ ID NO: 22182 - DNA, 20 bp, synthetic construct
  source 1..20: mol_type = other DNA
tattcccctagcagaggaag

SEQ ID NO: 22183 - DNA, 20 bp, synthetic construct
  source 1..20: mol_type = other DNA
gtggctgggaccaacacagg

SEQ ID NO: 22184 - DNA, 20 bp, synthetic construct
  source 1..20: mol_type = other DNA
gtaacaggtaaggaaaaatc

SEQ ID NO: 22185 - DNA, 20 bp, synthetic construct
  source 1..20: mol_type = other DNA
ggcgttgctaatgccgtgca

SEQ ID NO: 22186 - DNA, 20 bp, synthetic construct
  source 1..20: mol_type = other DNA
ggctgcaccaatggggtagc

SEQ ID NO: 22187 - DNA, 20 bp, synthetic construct
  source 1..20: mol_type = other DNA
tggacaacccattattaagc

SEQ ID NO: 22188 - DNA, 20 bp, synthetic construct
  source 1..20: mol_type = other DNA
agtgcaggactggacctctg

SEQ ID NO: 22189 - DNA, 20 bp, synthetic construct
  source 1..20: mol_type = other DNA
aacccccaacaaagtgctca

SEQ ID NO: 22190 - DNA, 20 bp, synthetic construct
  source 1..20: mol_type = other DNA
aagagccgttaataaggtaa

SEQ ID NO: 22191 - DNA, 20 bp, synthetic construct
  source 1..20: mol_type = other DNA
caacttccaaagtcctatgc

SEQ ID NO: 22192 - DNA, 20 bp, synthetic construct
  source 1..20: mol_type = other DNA
cttactcacctacccctcgc

SEQ ID NO: 22193 - DNA, 20 bp, synthetic construct
  source 1..20: mol_type = other DNA
aaaatccccctacctgtcag

SEQ ID NO: 22194 - DNA, 20 bp, synthetic construct
  source 1..20: mol_type = other DNA
ggggcgaggctcagcctgca

SEQ ID NO: 22195 - DNA, 20 bp, synthetic construct
  source 1..20: mol_type = other DNA
cagcaagcccctattcacgt

SEQ ID NO: 22196 - DNA, 20 bp, synthetic construct
  source 1..20: mol_type = other DNA
attctgtcagccacccacca

SEQ ID NO: 22197 - DNA, 20 bp, synthetic construct
  source 1..20: mol_type = other DNA
ctgcctgcaaactggacagg

SEQ ID NO: 22198 - DNA, 20 bp, synthetic construct
  source 1..20: mol_type = other DNA
gctaccggtacagcaggact

SEQ ID NO: 22199 - DNA, 20 bp, synthetic construct
  source 1..20: mol_type = other DNA
cccttccttggacccttatt

SEQ ID NO: 22200 - DNA, 20 bp, synthetic construct
  source 1..20: mol_type = other DNA
ccaaaaaggtacctgtaagc

SEQ ID NO: 22201 - DNA, 20 bp, synthetic construct
  source 1..20: mol_type = other DNA
ttaaataaagcatacaagtc

SEQ ID NO: 22202 - DNA, 20 bp, synthetic construct
  source 1..20: mol_type = other DNA
tctgttctagggggctatct

SEQ ID NO: 22203 - DNA, 20 bp, synthetic construct
  source 1..20: mol_type = other DNA
actaccggccgagagctcaa

SEQ ID NO: 22204 - DNA, 20 bp, synthetic construct
  source 1..20: mol_type = other DNA
ttctacctactgctccacta

SEQ ID NO: 22205 - DNA, 20 bp, synthetic construct
  source 1..20: mol_type = other DNA
cccttcaaaagggtgtttaa

SEQ ID NO: 22206 - DNA, 20 bp, synthetic construct
  source 1..20: mol_type = other DNA
tttcctgatgacatgctgga

SEQ ID NO: 22207 - DNA, 20 bp, synthetic construct
  source 1..20: mol_type = other DNA
caccttatacatgaacgccc

SEQ ID NO: 22208 - DNA, 20 bp, synthetic construct
  source 1..20: mol_type = other DNA
tgacagaaactacacactta

SEQ ID NO: 22209 - DNA, 20 bp, synthetic construct
  source 1..20: mol_type = other DNA
atcaatggatccatcagaaa

SEQ ID NO: 22210 - DNA, 20 bp, synthetic construct
  source 1..20: mol_type = other DNA
ctggagtctagtcagcttat

SEQ ID NO: 22211 - DNA, 20 bp, synthetic construct
  source 1..20: mol_type = other DNA
ccaaatagtcaacctcgcca

SEQ ID NO: 22212 - DNA, 20 bp, synthetic construct
  source 1..20: mol_type = other DNA
gtcctggattcacgcgttgt

SEQ ID NO: 22213 - DNA, 20 bp, synthetic construct
  source 1..20: mol_type = other DNA
ccgaacgataagaaggcagt

SEQ ID NO: 22214 - DNA, 20 bp, synthetic construct
  source 1..20: mol_type = other DNA
gggctcgtccacctctatgt

SEQ ID NO: 22215 - DNA, 20 bp, synthetic construct
  source 1..20: mol_type = other DNA
tattctcctgaggctagata

SEQ ID NO: 22216 - DNA, 20 bp, synthetic construct
  source 1..20: mol_type = other DNA
aggatgttcagaatgggtct

SEQ ID NO: 22217 - DNA, 20 bp, synthetic construct
  source 1..20: mol_type = other DNA
tattctagatgatctcaatg

SEQ ID NO: 22218 - DNA, 20 bp, synthetic construct
  source 1..20: mol_type = other DNA
acgcagatgcaggtcagtga

SEQ ID NO: 22219 - DNA, 20 bp, synthetic construct
  source 1..20: mol_type = other DNA
cccacgcccggctacacccg

SEQ ID NO: 22220 - DNA, 20 bp, synthetic construct
  source 1..20: mol_type = other DNA
cacttggacaccgtgcaacc

SEQ ID NO: 22221 - DNA, 20 bp, synthetic construct
  source 1..20: mol_type = other DNA
gcccgcgccgccggacccgt

SEQ ID NO: 22222 - DNA, 20 bp, synthetic construct
  source 1..20: mol_type = other DNA
ctcgctgccaggcgcgtcag

SEQ ID NO: 22223 - DNA, 20 bp, synthetic construct
  source 1..20: mol_type = other DNA
gtcaccaatgaccgcgccta

SEQ ID NO: 22224 - DNA, 20 bp, synthetic construct
  source 1..20: mol_type = other DNA
gcgcaggctgcgcgcgcctg

SEQ ID NO: 22225 - DNA, 20 bp, synthetic construct
  source 1..20: mol_type = other DNA
gcggtcggcggcggcccacg

SEQ ID NO: 22226 - DNA, 20 bp, synthetic construct
  source 1..20: mol_type = other DNA
gcatcagtccaacgccctcg

SEQ ID NO: 22227 - DNA, 20 bp, synthetic construct
  source 1..20: mol_type = other DNA
gaccttcacctcgccttctc

SEQ ID NO: 22228 - DNA, 20 bp, synthetic construct
  source 1..20: mol_type = other DNA
gagatgcccggaacggaacg

SEQ ID NO: 22229 - DNA, 20 bp, synthetic construct
  source 1..20: mol_type = other DNA
gagcccgaggtcgatgcgtg

SEQ ID NO: 22230 - DNA, 20 bp, synthetic construct
  source 1..20: mol_type = other DNA
tgccgccgtttcgacccaga

SEQ ID NO: 22231 - DNA, 20 bp, synthetic construct
  source 1..20: mol_type = other DNA
ggcgcggtcttttaccgcgt

SEQ ID NO: 22232 - DNA, 20 bp, synthetic construct
  source 1..20: mol_type = other DNA
gccccccaggccttccttgc

SEQ ID NO: 22233 - DNA, 20 bp, synthetic construct
  source 1..20: mol_type = other DNA
cgaccgccgcccgcgacccc

SEQ ID NO: 22234 - DNA, 20 bp, synthetic construct
  source 1..20: mol_type = other DNA
agccccatgggacgcgcgac

SEQ ID NO: 22235 - DNA, 20 bp, synthetic construct
  source 1..20: mol_type = other DNA
cctggcggcagctactacaa

SEQ ID NO: 22236 - DNA, 20 bp, synthetic construct
  source 1..20: mol_type = other DNA
cctgtcataggctctcaggc

SEQ ID NO: 22237 - DNA, 20 bp, synthetic construct
  source 1..20: mol_type = other DNA
cgcacgttagcgccaccccg

SEQ ID NO: 22238 - DNA, 20 bp, synthetic construct
  source 1..20: mol_type = other DNA
cccccgccctaccaagtcag

SEQ ID NO: 22239 - DNA, 20 bp, synthetic construct
  source 1..20: mol_type = other DNA
ctgggcgccatttgcgccct

SEQ ID NO: 22240 - DNA, 20 bp, synthetic construct
  source 1..20: mol_type = other DNA
gttgctgagcgtcggagagg

SEQ ID NO: 22241 - DNA, 20 bp, synthetic construct
  source 1..20: mol_type = other DNA
ctcagcactgtcagggagaa

SEQ ID NO: 22242 - DNA, 20 bp, synthetic construct
  source 1..20: mol_type = other DNA
caaatgctttaagtgcggca

SEQ ID NO: 22243 - DNA, 20 bp, synthetic construct
  source 1..20: mol_type = other DNA
tccagcaaagaagctcctcc

SEQ ID NO: 22244 - DNA, 20 bp, synthetic construct
  source 1..20: mol_type = other DNA
tctcaatatgtaatgaacat

SEQ ID NO: 22245 - DNA, 20 bp, synthetic construct
  source 1..20: mol_type = other DNA
caccccagaaagaggatggc

SEQ ID NO: 22246 - DNA, 20 bp, synthetic construct
  source 1..20: mol_type = other DNA
gtggtgcacattcaaggaag

SEQ ID NO: 22247 - DNA, 20 bp, synthetic construct
  source 1..20: mol_type = other DNA
ggagaggacctttttcccct

SEQ ID NO: 22248 - DNA, 20 bp, synthetic construct
  source 1..20: mol_type = other DNA
aacaaacgatgaggccttgt

SEQ ID NO: 22249 - DNA, 20 bp, synthetic construct
  source 1..20: mol_type = other DNA
aaacatattgggatacttta

SEQ ID NO: 22250 - DNA, 20 bp, synthetic construct
  source 1..20: mol_type = other DNA
gtagatcagaaaatagaaca

SEQ ID NO: 22251 - DNA, 20 bp, synthetic construct
  source 1..20: mol_type = other DNA
ctgtctctaaaaaggtatat

SEQ ID NO: 22252 - DNA, 20 bp, synthetic construct
  source 1..20: mol_type = other DNA
ggttctggtcatggttctca

SEQ ID NO: 22253 - DNA, 20 bp, synthetic construct
  source 1..20: mol_type = other DNA
ggccagacaacggaggaggg

SEQ ID NO: 22254 - DNA, 20 bp, synthetic construct
  source 1..20: mol_type = other DNA
aagcgctagtgtcagcactt

SEQ ID NO: 22255 - DNA, 20 bp, synthetic construct
  source 1..20: mol_type = other DNA
tgggtgttcgctggttagcc

SEQ ID NO: 22256 - DNA, 20 bp, synthetic construct
  source 1..20: mol_type = other DNA
tggcttcatatagctcaata

SEQ ID NO: 22257 - DNA, 20 bp, synthetic construct
  source 1..20: mol_type = other DNA
cactggccagggcaacatat

SEQ ID NO: 22258 - DNA, 20 bp, synthetic construct
  source 1..20: mol_type = other DNA
cttttggattaatcctaggc

SEQ ID NO: 22259 - DNA, 20 bp, synthetic construct
  source 1..20: mol_type = other DNA
tcgagacagacaataaggta

SEQ ID NO: 22260 - DNA, 20 bp, synthetic construct
  source 1..20: mol_type = other DNA
aggatttgaacttaatggtc

SEQ ID NO: 22261 - DNA, 20 bp, synthetic construct
  source 1..20: mol_type = other DNA
ctctgaccccaattcccata

SEQ ID NO: 22262 - DNA, 20 bp, synthetic construct
  source 1..20: mol_type = other DNA
gatggccgcatatactctta

SEQ ID NO: 22263 - DNA, 20 bp, synthetic construct
  source 1..20: mol_type = other DNA
tgtcgcacaaattaaacaca

SEQ ID NO: 22264 - DNA, 20 bp, synthetic construct
  source 1..20: mol_type = other DNA
aaagataaaaaagggggaat

SEQ ID NO: 22265 - DNA, 20 bp, synthetic construct
  source 1..20: mol_type = other DNA
attagataatacatggcatg

SEQ ID NO: 22266 - DNA, 20 bp, synthetic construct
  source 1..20: mol_type = other DNA
tatcaacaatgtaacattgg

SEQ ID NO: 22267 - DNA, 20 bp, synthetic construct
  source 1..20: mol_type = other DNA
tttcatggattcctccctta

SEQ ID NO: 22268 - DNA, 20 bp, synthetic construct
  source 1..20: mol_type = other DNA
cctaagacaggcgcagcctc

SEQ ID NO: 22269 - DNA, 20 bp, synthetic construct
  source 1..20: mol_type = other DNA
tgtctcttgttcccttcaat

SEQ ID NO: 22270 - DNA, 20 bp, synthetic construct
  source 1..20: mol_type = other DNA
ctccgtcttactttcccgcc

SEQ ID NO: 22271 - DNA, 20 bp, synthetic construct
  source 1..20: mol_type = other DNA
tgtgcatcgtaagggctatg

SEQ ID NO: 22272 - DNA, 20 bp, synthetic construct
  source 1..20: mol_type = other DNA
ccattgatgtcaaaatgatg

SEQ ID NO: 22273 - DNA, 20 bp, synthetic construct
  source 1..20: mol_type = other DNA
gtccctgcaaagtgcccatt

SEQ ID NO: 22274 - DNA, 20 bp, synthetic construct
  source 1..20: mol_type = other DNA
agataaaccatcactggcac

SEQ ID NO: 22275 - DNA, 20 bp, synthetic construct
  source 1..20: mol_type = other DNA
ttagatcactctttggaggg

SEQ ID NO: 22276 - DNA, 20 bp, synthetic construct
  source 1..20: mol_type = other DNA
cgaagatcataggaaccgcc

SEQ ID NO: 22277 - DNA, 20 bp, synthetic construct
  source 1..20: mol_type = other DNA
gtgatctcatcatacccatc

SEQ ID NO: 22278 - DNA, 20 bp, synthetic construct
  source 1..20: mol_type = other DNA
ccgacatgattgatcctttt

SEQ ID NO: 22279 - DNA, 20 bp, synthetic construct
  source 1..20: mol_type = other DNA
tcggcgccgcgtttgctgaa

SEQ ID NO: 22280 - DNA, 20 bp, synthetic construct
  source 1..20: mol_type = other DNA
tgctactcatggttggagtt

SEQ ID NO: 22281 - DNA, 20 bp, synthetic construct
  source 1..20: mol_type = other DNA
gggagagtgatgctgaaatc

SEQ ID NO: 22282 - DNA, 20 bp, synthetic construct
  source 1..20: mol_type = other DNA
gcgccattgtgcaaggagag

SEQ ID NO: 22283 - DNA, 20 bp, synthetic construct
  source 1..20: mol_type = other DNA
tgctggcacccaccagggtc

SEQ ID NO: 22284 - DNA, 20 bp, synthetic construct
  source 1..20: mol_type = other DNA
aaacagagatcccagacaga

SEQ ID NO: 22285 - DNA, 20 bp, synthetic construct
  source 1..20: mol_type = other DNA
ccagcgctgctcagcggaga

SEQ ID NO: 22286 - DNA, 20 bp, synthetic construct
  source 1..20: mol_type = other DNA
tcttacttgatctgcggccg

SEQ ID NO: 22287 - DNA, 20 bp, synthetic construct
  source 1..20: mol_type = other DNA
cagtcaccctatgggagaat

SEQ ID NO: 22288 - DNA, 20 bp, synthetic construct
  source 1..20: mol_type = other DNA
aaaggcgtttcctcgagcca

SEQ ID NO: 22289 - DNA, 20 bp, synthetic construct
  source 1..20: mol_type = other DNA
ccatgaagagtggagtcgac

SEQ ID NO: 22290 - DNA, 20 bp, synthetic construct
  source 1..20: mol_type = other DNA
tgctatgcccttacatgccc

SEQ ID NO: 22291 - DNA, 20 bp, synthetic construct
  source 1..20: mol_type = other DNA
tcaaggaaaaggtggacaca

SEQ ID NO: 22292 - DNA, 20 bp, synthetic construct
  source 1..20: mol_type = other DNA
ttgaagaacagaaccaatgg

SEQ ID NO: 22293 - DNA, 20 bp, synthetic construct
  source 1..20: mol_type = other DNA
ggaaaactgtgatggacgtc

SEQ ID NO: 22294 - DNA, 20 bp, synthetic construct
  source 1..20: mol_type = other DNA
aggtcagaacctggctgttt

SEQ ID NO: 22295 - DNA, 20 bp, synthetic construct
  source 1..20: mol_type = other DNA
ggtatgactggcagcaggtt

SEQ ID NO: 22296 - DNA, 20 bp, synthetic construct
  source 1..20: mol_type = other DNA
acgcgcagatgtggctgctg

SEQ ID NO: 22297 - DNA, 20 bp, synthetic construct
  source 1..20: mol_type = other DNA
cttgtttgcctccatcgacc

SEQ ID NO: 22298 - DNA, 20 bp, synthetic construct
  source 1..20: mol_type = other DNA
tcggagatgcgtcgtgaaga

SEQ ID NO: 22299 - DNA, 20 bp, synthetic construct
  source 1..20: mol_type = other DNA
cggggggcaatggctgcgcg

SEQ ID NO: 22300 - DNA, 20 bp, synthetic construct
  source 1..20: mol_type = other DNA
taggtccaatgagattctag

SEQ ID NO: 22301 - DNA, 20 bp, synthetic construct
  source 1..20: mol_type = other DNA
caacacagcccttctggtca

SEQ ID NO: 22302 - DNA, 20 bp, synthetic construct
  source 1..20: mol_type = other DNA
tgaacgggtgtatgtaaatg

SEQ ID NO: 22303 - DNA, 20 bp, synthetic construct
  source 1..20: mol_type = other DNA
cgcccaggtaattggaccga

SEQ ID NO: 22304 - DNA, 20 bp, synthetic construct
  source 1..20: mol_type = other DNA
aactcgcctatttctgacga

SEQ ID NO: 22305 - DNA, 20 bp, synthetic construct
  source 1..20: mol_type = other DNA
gtcaaccgaaaatgatgacg

SEQ ID NO: 22306 - DNA, 20 bp, synthetic construct
  source 1..20: mol_type = other DNA
gctcatcgcaaccagcacta

SEQ ID NO: 22307 - DNA, 20 bp, synthetic construct
  source 1..20: mol_type = other DNA
ccccaccaccacggaagacc

SEQ ID NO: 22308 - DNA, 20 bp, synthetic construct
  source 1..20: mol_type = other DNA
cgggttctatggttttgggt

SEQ ID NO: 22309 - DNA, 20 bp, synthetic construct
  source 1..20: mol_type = other DNA
gcctccggggagattcaccc

SEQ ID NO: 22310 - DNA, 20 bp, synthetic construct
  source 1..20: mol_type = other DNA
caaacaagagtatcgaccac

SEQ ID NO: 22311 - DNA, 20 bp, synthetic construct
  source 1..20: mol_type = other DNA
gggagctacaatgttggact

SEQ ID NO: 22312 - DNA, 20 bp, synthetic construct
  source 1..20: mol_type = other DNA
ccttccctctggttttgcca

SEQ ID NO: 22313 - DNA, 20 bp, synthetic construct
  source 1..20: mol_type = other DNA
aatcactagtagagtgccac

SEQ ID NO: 22314 - DNA, 20 bp, synthetic construct
  source 1..20: mol_type = other DNA
agtagtcacatatgcgttga

SEQ ID NO: 22315 - DNA, 20 bp, synthetic construct
  source 1..20: mol_type = other DNA
aaccaattggttcccactag

SEQ ID NO: 22316 - DNA, 20 bp, synthetic construct
  source 1..20: mol_type = other DNA
catttagacgtgatcgaata

SEQ ID NO: 22317 - DNA, 20 bp, synthetic construct
  source 1..20: mol_type = other DNA
gtaagagaagcctgtaaaca

SEQ ID NO: 22318 - DNA, 20 bp, synthetic construct
  source 1..20: mol_type = other DNA
ataatagatgcaataaactc

SEQ ID NO: 22319 - DNA, 20 bp, synthetic construct
  source 1..20: mol_type = other DNA
agtatcattagtaattcagt

SEQ ID NO: 22320 - DNA, 20 bp, synthetic construct
  source 1..20: mol_type = other DNA
gcccgacatggggaatacgc

SEQ ID NO: 22321 - DNA, 20 bp, synthetic construct
  source 1..20: mol_type = other DNA
gcggcacatgatgcggaagt

SEQ ID NO: 22322 - DNA, 20 bp, synthetic construct
  source 1..20: mol_type = other DNA
cgtctcgctgcagaaattga

SEQ ID NO: 22323 - DNA, 20 bp, synthetic construct
  source 1..20: mol_type = other DNA
ttgtcgcctgatttcacaaa

SEQ ID NO: 22324 - DNA, 20 bp, synthetic construct
  source 1..20: mol_type = other DNA
ttgttactattgtgtgagac

SEQ ID NO: 22325 - DNA, 20 bp, synthetic construct
  source 1..20: mol_type = other DNA
gtaatttcaactggaagaac

SEQ ID NO: 22326 - DNA, 20 bp, synthetic construct
  source 1..20: mol_type = other DNA
tgccatgctttcactttaga

SEQ ID NO: 22327 - DNA, 20 bp, synthetic construct
  source 1..20: mol_type = other DNA
cttcctgatgatgcctggcg

SEQ ID NO: 22328 - DNA, 20 bp, synthetic construct
  source 1..20: mol_type = other DNA
caagttgtgctagcgtatgc

SEQ ID NO: 22329 - DNA, 20 bp, synthetic construct
  source 1..20: mol_type = other DNA
actgacgataatactccttc

SEQ ID NO: 22330 - DNA, 20 bp, synthetic construct
  source 1..20: mol_type = other DNA
tccttatcagtcttatctta

SEQ ID NO: 22331 - DNA, 20 bp, synthetic construct
  source 1..20: mol_type = other DNA
tccatcatattcaaggtcaa

SEQ ID NO: 22332 - DNA, 20 bp, synthetic construct
  source 1..20: mol_type = other DNA
agcatttcaccagtcctccc

SEQ ID NO: 22333 - DNA, 20 bp, synthetic construct
  source 1..20: mol_type = other DNA
tcaatagacatgctattgac

SEQ ID NO: 22334 - DNA, 20 bp, synthetic construct
  source 1..20: mol_type = other DNA
ctactgaaatcaacttggga

SEQ ID NO: 22335 - DNA, 20 bp, synthetic construct
  source 1..20: mol_type = other DNA
caagaattaatttacttttt

SEQ ID NO: 22336 - DNA, 20 bp, synthetic construct
  source 1..20: mol_type = other DNA
caccgactatatatcatgaa

SEQ ID NO: 22337 - DNA, 20 bp, synthetic construct
  source 1..20: mol_type = other DNA
tatttttaaggttccagtaa

SEQ ID NO: 22338 - DNA, 20 bp, synthetic construct
  source 1..20: mol_type = other DNA
tgtcagctgtatacaaacac

SEQ ID NO: 22339 - DNA, 20 bp, synthetic construct
  source 1..20: mol_type = other DNA
catgatggttgtcactgaga

SEQ ID NO: 22340 - DNA, 20 bp, synthetic construct
  source 1..20: mol_type = other DNA
attgaatgcggcacgagttg

SEQ ID NO: 22341 - DNA, 20 bp, synthetic construct
  source 1..20: mol_type = other DNA
ggaactgcgacttgaaggaa

SEQ ID NO: 22342 - DNA, 20 bp, synthetic construct
  source 1..20: mol_type = other DNA
catagttcatagatataatg

SEQ ID NO: 22343 - DNA, 20 bp, synthetic construct
  source 1..20: mol_type = other DNA
aatcaggaatttatcacata

SEQ ID NO: 22344 - DNA, 20 bp, synthetic construct
  source 1..20: mol_type = other DNA
ctcgaagataatcttaaatt

SEQ ID NO: 22345 - DNA, 20 bp, synthetic construct
  source 1..20: mol_type = other DNA
gaaaccatatagctcaaatg

SEQ ID NO: 22346 - DNA, 20 bp, synthetic construct
  source 1..20: mol_type = other DNA
cagaccctgtgatggatgtc

SEQ ID NO: 22347 - DNA, 20 bp, synthetic construct
  source 1..20: mol_type = other DNA
tgcccgtagtaccactcgac

SEQ ID NO: 22348 - DNA, 20 bp, synthetic construct
  source 1..20: mol_type = other DNA
cgggggaattgtgtgctgtt

SEQ ID NO: 22349 - DNA, 20 bp, synthetic construct
  source 1..20: mol_type = other DNA
ctgtcacttcccgagttggt

SEQ ID NO: 22350 - DNA, 20 bp, synthetic construct
  source 1..20: mol_type = other DNA
catacatgcgctttgatgca

SEQ ID NO: 22351 - DNA, 20 bp, synthetic construct
  source 1..20: mol_type = other DNA
ccattgccactgtggtagca

SEQ ID NO: 22352 - DNA, 20 bp, synthetic construct
  source 1..20: mol_type = other DNA
tgaccctggttactcttgat

SEQ ID NO: 22353 - DNA, 20 bp, synthetic construct
  source 1..20: mol_type = other DNA
gggtcaagcccaataaagag

SEQ ID NO: 22354 - DNA, 20 bp, synthetic construct
  source 1..20: mol_type = other DNA
tagggaacacactgcatgag

SEQ ID NO: 22355 - DNA, 20 bp, synthetic construct
  source 1..20: mol_type = other DNA
atgatgctagtctcagtcca

SEQ ID NO: 22356 - DNA, 20 bp, synthetic construct
  source 1..20: mol_type = other DNA
tgactatgactcctgcagac

SEQ ID NO: 22357 - DNA, 20 bp, synthetic construct
  source 1..20: mol_type = other DNA
aaaccttagagatcgttatc

SEQ ID NO: 22358 - DNA, 20 bp, synthetic construct
  source 1..20: mol_type = other DNA
tgagaagcctaattattgac

SEQ ID NO: 22359 - DNA, 20 bp, synthetic construct
  source 1..20: mol_type = other DNA
tgtttttcttttgattgcat

SEQ ID NO: 22360 - DNA, 20 bp, synthetic construct
  source 1..20: mol_type = other DNA
atcacacccacccaggtgag

SEQ ID NO: 22361 - DNA, 20 bp, synthetic construct
  source 1..20: mol_type = other DNA
ttttaccttatgtcaatgct

SEQ ID NO: 22362 - DNA, 20 bp, synthetic construct
  source 1..20: mol_type = other DNA
tcattcctgttaacaataca

SEQ ID NO: 22363 - DNA, 20 bp, synthetic construct
  source 1..20: mol_type = other DNA
atactaacctacacacacaa

SEQ ID NO: 22364 - DNA, 20 bp, synthetic construct
  source 1..20: mol_type = other DNA
ggaggtttcttaaagagaaa

SEQ ID NO: 22365 - DNA, 20 bp, synthetic construct
  source 1..20: mol_type = other DNA
gaattaagaatttatatatc

SEQ ID NO: 22366 - DNA, 20 bp, synthetic construct
  source 1..20: mol_type = other DNA
ctaagtgctgtccatttatc

SEQ ID NO: 22367 - DNA, 20 bp, synthetic construct
  source 1..20: mol_type = other DNA
cacctccagccatagctgac

SEQ ID NO: 22368 - DNA, 20 bp, synthetic construct
  source 1..20: mol_type = other DNA
gtcttggcatatatgaccaa

SEQ ID NO: 22369 - DNA, 20 bp, synthetic construct
  source 1..20: mol_type = other DNA
atgtttcatctaaaacccga

SEQ ID NO: 22370 - DNA, 20 bp, synthetic construct
  source 1..20: mol_type = other DNA
tactagatgcttataagaac

SEQ ID NO: 22371 - DNA, 20 bp, synthetic construct
  source 1..20: mol_type = other DNA
gtagacatgcataccaggaa

SEQ ID NO: 22372 - DNA, 20 bp, synthetic construct
  source 1..20: mol_type = other DNA
gtcataaaggtgatttcgtc

SEQ ID NO: 22373 - DNA, 20 bp, synthetic construct
  source 1..20: mol_type = other DNA
gccagagatatctataaaaa

SEQ ID NO: 22374 - DNA, 20 bp, synthetic construct
  source 1..20: mol_type = other DNA
ggtctctccaatatagaagt

SEQ ID NO: 22375 - DNA, 20 bp, synthetic construct
  source 1..20: mol_type = other DNA
gtgttgtttcaatctgagtg

SEQ ID NO: 22376 - DNA, 20 bp, synthetic construct
  source 1..20: mol_type = other DNA
accatggtatgtataggcgg

SEQ ID NO: 22377 - DNA, 20 bp, synthetic construct
  source 1..20: mol_type = other DNA
aacccagagtccaaatgcca

SEQ ID NO: 22378 - DNA, 20 bp, synthetic construct
  source 1..20: mol_type = other DNA
tggttggcttgcaaaaacgt

SEQ ID NO: 22379 - DNA, 20 bp, synthetic construct
  source 1..20: mol_type = other DNA
agagtgtggtgaccagggtt

SEQ ID NO: 22380 - DNA, 20 bp, synthetic construct
  source 1..20: mol_type = other DNA
cttggcaggtccatagggac

SEQ ID NO: 22381 - DNA, 20 bp, synthetic construct
  source 1..20: mol_type = other DNA
gggttcctgtggcacacatt

SEQ ID NO: 22382 - DNA, 20 bp, synthetic construct
  source 1..20: mol_type = other DNA
ctttcaacagcatcttcggg

SEQ ID NO: 22383 - DNA, 20 bp, synthetic construct
  source 1..20: mol_type = other DNA
tggactcagagttattcctt

SEQ ID NO: 22384 - DNA, 20 bp, synthetic construct
  source 1..20: mol_type = other DNA
gagcatctgtgaggagtacc

SEQ ID NO: 22385 - DNA, 20 bp, synthetic construct
  source 1..20: mol_type = other DNA
tggtggcagtggggatcaca

SEQ ID NO: 22386 - DNA, 20 bp, synthetic construct
  source 1..20: mol_type = other DNA
tcctaagtgtagcttcggca

SEQ ID NO: 22387 - DNA, 20 bp, synthetic construct
  source 1..20: mol_type = other DNA
gtgtcttgcacacgatgtgg

SEQ ID NO: 22388 - DNA, 20 bp, synthetic construct
  source 1..20: mol_type = other DNA
gcctgagaacgttggtgttg

SEQ ID NO: 22389 - DNA, 20 bp, synthetic construct
  source 1..20: mol_type = other DNA
agggaagacaaaattgggag

SEQ ID NO: 22390 - DNA, 20 bp, synthetic construct
  source 1..20: mol_type = other DNA
ccattactagtgaggaaaga

SEQ ID NO: 22391 - DNA, 20 bp, synthetic construct
  source 1..20: mol_type = other DNA
cctttgaaaaggactactcc

SEQ ID NO: 22392 - DNA, 20 bp, synthetic construct
  source 1..20: mol_type = other DNA
ccctgggtgtcatctggtgc

SEQ ID NO: 22393 - DNA, 20 bp, synthetic construct
  source 1..20: mol_type = other DNA
cgggaaaacagagaagcagt

SEQ ID NO: 22394 - DNA, 20 bp, synthetic construct
  source 1..20: mol_type = other DNA
cgaatgtggacatccagcca

SEQ ID NO: 22395 - DNA, 20 bp, synthetic construct
  source 1..20: mol_type = other DNA
gtgtggcgggacatgtcatg

SEQ ID NO: 22396 - DNA, 20 bp, synthetic construct
  source 1..20: mol_type = other DNA
gatcaggaatggacgtgttc

SEQ ID NO: 22397 - DNA, 20 bp, synthetic construct
  source 1..20: mol_type = other DNA
aaaacagatgggcaagtgca

SEQ ID NO: 22398 - DNA, 20 bp, synthetic construct
  source 1..20: mol_type = other DNA
tcatggatgtcatcacaaga

SEQ ID NO: 22399 - DNA, 20 bp, synthetic construct
  source 1..20: mol_type = other DNA
tacccttttgttcacaccat

SEQ ID NO: 22400 - DNA, 20 bp, synthetic construct
  source 1..20: mol_type = other DNA
agccccagaaaccgacgcct

SEQ ID NO: 22401 - DNA, 20 bp, synthetic construct
  source 1..20: mol_type = other DNA
tacagtcacttgcgtgtggg

SEQ ID NO: 22402 - DNA, 20 bp, synthetic construct
  source 1..20: mol_type = other DNA
cgtgacgtgtgttctggacc

SEQ ID NO: 22403 - DNA, 20 bp, synthetic construct
  source 1..20: mol_type = other DNA
ggggcccctgggcaaccagg

SEQ ID NO: 22404 - DNA, 20 bp, synthetic construct
  source 1..20: mol_type = other DNA
tttcccgctggccctcttga

SEQ ID NO: 22405 - DNA, 20 bp, synthetic construct
  source 1..20: mol_type = other DNA
gtggaggcacaaagccgtga

SEQ ID NO: 22406 - DNA, 20 bp, synthetic construct
  source 1..20: mol_type = other DNA
tgaggttctcatcggcgtct

SEQ ID NO: 22407 - DNA, 20 bp, synthetic construct
  source 1..20: mol_type = other DNA
tacgtcgcgaagcatgggaa

SEQ ID NO: 22408 - DNA, 20 bp, synthetic construct
  source 1..20: mol_type = other DNA
tgggaggtttttggccaacc

SEQ ID NO: 22409 - DNA, 20 bp, synthetic construct
  source 1..20: mol_type = other DNA
ccctatgacgcagcaccctt

SEQ ID NO: 22410 - DNA, 20 bp, synthetic construct
  source 1..20: mol_type = other DNA
tgccattgcctattataggg

SEQ ID NO: 22411 - DNA, 20 bp, synthetic construct
  source 1..20: mol_type = other DNA
gggtgttcagcggaccatgt

SEQ ID NO: 22412 - DNA, 20 bp, synthetic construct
  source 1..20: mol_type = other DNA
ctacacagcaaccgccaagt

SEQ ID NO: 22413 - DNA, 20 bp, synthetic construct
  source 1..20: mol_type = other DNA
taacaactctggcactacca

SEQ ID NO: 22414 - DNA, 20 bp, synthetic construct
  source 1..20: mol_type = other DNA
ggtggatgaggtacaggtgg

SEQ ID NO: 22415 - DNA, 20 bp, synthetic construct
  source 1..20: mol_type = other DNA
tgagaagaccccgtcggtgt

SEQ ID NO: 22416 - DNA, 20 bp, synthetic construct
  source 1..20: mol_type = other DNA
gatgtcgtgctgcgttgaaa

SEQ ID NO: 22417 - DNA, 20 bp, synthetic construct
  source 1..20: mol_type = other DNA
tgaatgtgacaagtgtgagg

SEQ ID NO: 22418 - DNA, 20 bp, synthetic construct
  source 1..20: mol_type = other DNA
acggagggtggacaaggtga

SEQ ID NO: 22419 - DNA, 20 bp, synthetic construct
  source 1..20: mol_type = other DNA
ggtgtcggttaaggacttag

SEQ ID NO: 22420 - DNA, 20 bp, synthetic construct
  source 1..20: mol_type = other DNA
gtgcgagccctcatatcatg

SEQ ID NO: 22421 - DNA, 20 bp, synthetic construct
  source 1..20: mol_type = other DNA
cctcctttatccttggcacc

SEQ ID NO: 22422 - DNA, 20 bp, synthetic construct
  source 1..20: mol_type = other DNA
agcagcgttgagggttaccg

SEQ ID NO: 22423 - DNA, 20 bp, synthetic construct
  source 1..20: mol_type = other DNA
tccaggcctacggcttcctc

SEQ ID NO: 22424 - DNA, 20 bp, synthetic construct
  source 1..20: mol_type = other DNA
catctgttgcggcaaggtct

SEQ ID NO: 22425 - DNA, 20 bp, synthetic construct
  source 1..20: mol_type = other DNA
ctgcggagaggctggcagat

SEQ ID NO: 22426 - DNA, 20 bp, synthetic construct
  source 1..20: mol_type = other DNA
tgtgtgttcccatctctcct

SEQ ID NO: 22427 - DNA, 20 bp, synthetic construct
  source 1..20: mol_type = other DNA
agtgaaggcagtaagggcgg

SEQ ID NO: 22428 - DNA, 20 bp, synthetic construct
  source 1..20: mol_type = other DNA
gaaactggaactgcagagaa

SEQ ID NO: 22429 - DNA, 20 bp, synthetic construct
  source 1..20: mol_type = other DNA
gaagtagtgccaggatttca

SEQ ID NO: 22430 - DNA, 20 bp, synthetic construct
  source 1..20: mol_type = other DNA
cccaccctagaagagatgct

SEQ ID NO: 22431 - DNA, 20 bp, synthetic construct
  source 1..20: mol_type = other DNA
cctccggcagatccagcagc

SEQ ID NO: 22432 - DNA, 20 bp, synthetic construct
  source 1..20: mol_type = other DNA
tagtaggagatcctatacca

SEQ ID NO: 22433 - DNA, 20 bp, synthetic construct
  source 1..20: mol_type = other DNA
gccaacagaaaggagaagcc

SEQ ID NO: 22434 - DNA, 20 bp, synthetic construct
  source 1..20: mol_type = other DNA
tattaaaactggccagtagg

SEQ ID NO: 22435 - DNA, 20 bp, synthetic construct
  source 1..20: mol_type = other DNA
attcaaattttaaaaatttc

SEQ ID NO: 22436 - DNA, 20 bp, synthetic construct
  source 1..20: mol_type = other DNA
aggaactggatagtagtccc

SEQ ID NO: 22437 - DNA, 20 bp, synthetic construct
  source 1..20: mol_type = other DNA
gaagtaagaagagccatcag

SEQ ID NO: 22438 - DNA, 20 bp, synthetic construct
  source 1..20: mol_type = other DNA
ggccttcgagtggctagaga

SEQ ID NO: 22439 - DNA, 20 bp, synthetic construct
  source 1..20: mol_type = other DNA
tatatttacacatttcaaga

SEQ ID NO: 22440 - DNA, 20 bp, synthetic construct
  source 1..20: mol_type = other DNA
tgggtaatagaaactctgag

SEQ ID NO: 22441 - DNA, 20 bp, synthetic construct
  source 1..20: mol_type = other DNA
gactccaaggaaaactaaga

SEQ ID NO: 22442 - DNA, 20 bp, synthetic construct
  source 1..20: mol_type = other DNA
ccatgtgtcaagctaacacc

SEQ ID NO: 22443 - DNA, 20 bp, synthetic construct
  source 1..20: mol_type = other DNA
ttagggtatgaggagatgat

SEQ ID NO: 22444 - DNA, 20 bp, synthetic construct
  source 1..20: mol_type = other DNA
aagcactattgggatgctat

SEQ ID NO: 22445 - DNA, 20 bp, synthetic construct
  source 1..20: mol_type = other DNA
gtgcatatagtagtgggaat

SEQ ID NO: 22446 - DNA, 20 bp, synthetic construct
  source 1..20: mol_type = other DNA
tttccagaaggggctgtaac

SEQ ID NO: 22447 - DNA, 20 bp, synthetic construct
  source 1..20: mol_type = other DNA
cagtaccatattggcggcag

SEQ ID NO: 22448 - DNA, 20 bp, synthetic construct
  source 1..20: mol_type = other DNA
gccctgatttgaaacagatt

SEQ ID NO: 22449 - DNA, 20 bp, synthetic construct
  source 1..20: mol_type = other DNA
aaccatcccaaccctctcag

SEQ ID NO: 22450 - DNA, 20 bp, synthetic construct
  source 1..20: mol_type = other DNA
ctaagttaagacaaggaccc

SEQ ID NO: 22451 - DNA, 20 bp, synthetic construct
  source 1..20: mol_type = other DNA
tgtcattaacatcccttcaa

SEQ ID NO: 22452 - DNA, 20 bp, synthetic construct
  source 1..20: mol_type = other DNA
gactggcctcctgtaaaaca

SEQ ID NO: 22453 - DNA, 20 bp, synthetic construct
  source 1..20: mol_type = other DNA
agcaccagtgccgacctcat

SEQ ID NO: 22454 - DNA, 20 bp, synthetic construct
  source 1..20: mol_type = other DNA
tcagcaaccagaatatccta

SEQ ID NO: 22455 - DNA, 20 bp, synthetic construct
  source 1..20: mol_type = other DNA
acatgtcagtcatagcacct

SEQ ID NO: 22456 - DNA, 20 bp, synthetic construct
  source 1..20: mol_type = other DNA
tgaaaacatggataatgaat

SEQ ID NO: 22457 - DNA, 20 bp, synthetic construct
  source 1..20: mol_type = other DNA
tcacaaccatggttgatgtg

SEQ ID NO: 22458 - DNA, 20 bp, synthetic construct
  source 1..20: mol_type = other DNA
aagcagaagcccactcacac

SEQ ID NO: 22459 - DNA, 20 bp, synthetic construct
  source 1..20: mol_type = other DNA
tggcatctccatatgtgtgg

SEQ ID NO: 22460 - DNA, 20 bp, synthetic construct
  source 1..20: mol_type = other DNA
ggaacctatgtagccagtag

SEQ ID NO: 22461 - DNA, 20 bp, synthetic construct
  source 1..20: mol_type = other DNA
gaatggaaaatagcaactag

SEQ ID NO: 22462 - DNA, 20 bp, synthetic construct
  source 1..20: mol_type = other DNA
caacgaaggggacttaaccc

SEQ ID NO: 22463 - DNA, 20 bp, synthetic construct
  source 1..20: mol_type = other DNA
cttttacgggaatatcagaa

SEQ ID NO: 22464 - DNA, 20 bp, synthetic construct
  source 1..20: mol_type = other DNA
aacagatggaaggatttaca

SEQ ID NO: 22465 - DNA, 20 bp, synthetic construct
  source 1..20: mol_type = other DNA
aaaggcactaatactaccct

SEQ ID NO: 22466 - DNA, 20 bp, synthetic construct
  source 1..20: mol_type = other DNA
tatgtaagtggacgaaattg

SEQ ID NO: 22467 - DNA, 20 bp, synthetic construct
  source 1..20: mol_type = other DNA
atttgcttgggggggaacac

SEQ ID NO: 22468 - DNA, 20 bp, synthetic construct
  source 1..20: mol_type = other DNA
ccaagtaacaactgtattta

SEQ ID NO: 22469 - DNA, 20 bp, synthetic construct
  source 1..20: mol_type = other DNA
cttttccattgtatgaacta

SEQ ID NO: 22470 - DNA, 20 bp, synthetic construct
  source 1..20: mol_type = other DNA
tagttaatataaaaactcat

SEQ ID NO: 22471 - DNA, 20 bp, synthetic construct
  source 1..20: mol_type = other DNA
tttatcaatcatggcgggtt

SEQ ID NO: 22472 - DNA, 20 bp, synthetic construct
  source 1..20: mol_type = other DNA
acttcagctcgcgatggaat

SEQ ID NO: 22473 - DNA, 20 bp, synthetic construct
  source 1..20: mol_type = other DNA
ccaacttccaaaaaattgag

SEQ ID NO: 22474 - DNA, 20 bp, synthetic construct
  source 1..20: mol_type = other DNA
tggggtaaatagacattagt

SEQ ID NO: 22475 - DNA, 20 bp, synthetic construct
  source 1..20: mol_type = other DNA
gggatactctcaatcatcta

SEQ ID NO: 22476 - DNA, 20 bp, synthetic construct
  source 1..20: mol_type = other DNA
cagttcaaacaataaaaaac

SEQ ID NO: 22477 - DNA, 20 bp, synthetic construct
  source 1..20: mol_type = other DNA
ccactgtgctcgacacaacc

SEQ ID NO: 22478 - DNA, 20 bp, synthetic construct
  source 1..20: mol_type = other DNA
tagcagaaaaccgtgaccta

SEQ ID NO: 22479 - DNA, 20 bp, synthetic construct
  source 1..20: mol_type = other DNA
atatcatccatattgatttc

SEQ ID NO: 22480 - DNA, 20 bp, synthetic construct
  source 1..20: mol_type = other DNA
tcagaatctttggacatcca

SEQ ID NO: 22481 - DNA, 20 bp, synthetic construct
  source 1..20: mol_type = other DNA
gcagtgatgtattagatgaa

SEQ ID NO: 22482 - DNA, 20 bp, synthetic construct
  source 1..20: mol_type = other DNA
tgggtggtattgagggctgg

SEQ ID NO: 22483 - DNA, 20 bp, synthetic construct
  source 1..20: mol_type = other DNA
cagattatttgttagcatta

SEQ ID NO: 22484 - DNA, 20 bp, synthetic construct
  source 1..20: mol_type = other DNA
actgggtatatgcatccata

SEQ ID NO: 22485 - DNA, 20 bp, synthetic construct
  source 1..20: mol_type = other DNA
aacgaatcaggacgaaatag

SEQ ID NO: 22486 - DNA, 20 bp, synthetic construct
  source 1..20: mol_type = other DNA
ttgatggaaagcgatgctaa

SEQ ID NO: 22487 - DNA, 20 bp, synthetic construct
  source 1..20: mol_type = other DNA
caagaagatgacaaaagaat

SEQ ID NO: 22488 - DNA, 20 bp, synthetic construct
  source 1..20: mol_type = other DNA
aaacattgcaaaaatgatga

SEQ ID NO: 22489 - DNA, 20 bp, synthetic construct
  source 1..20: mol_type = other DNA
taaatacactgggaatgacc

SEQ ID NO: 22490 - DNA, 20 bp, synthetic construct
  source 1..20: mol_type = other DNA
ggttcagactgattccaaag

SEQ ID NO: 22491 - DNA, 20 bp, synthetic construct
  source 1..20: mol_type = other DNA
gtagattccatatcatataa

SEQ ID NO: 22492 - DNA, 20 bp, synthetic construct
  source 1..20: mol_type = other DNA
ctactaggtaacaagatcta

SEQ ID NO: 22493 - DNA, 20 bp, synthetic construct
  source 1..20: mol_type = other DNA
gtatatgataagtaatcagc

SEQ ID NO: 22494 - DNA, 20 bp, synthetic construct
  source 1..20: mol_type = other DNA
ccagaagaatttcttattga

SEQ ID NO: 22495 - DNA, 20 bp, synthetic construct
  source 1..20: mol_type = other DNA
gatatttgaatctggagaat

SEQ ID NO: 22496 - DNA, 20 bp, synthetic construct
  source 1..20: mol_type = other DNA
tggaatgttagatacgacaa

SEQ ID NO: 22497 - DNA, 20 bp, synthetic construct
  source 1..20: mol_type = other DNA
agtcagcagattcataacaa

SEQ ID NO: 22498 - DNA, 20 bp, synthetic construct
  source 1..20: mol_type = other DNA
atttaagaggttctgggatt

SEQ ID NO: 22499 - DNA, 20 bp, synthetic construct
  source 1..20: mol_type = other DNA
cactccgaattggtctagaa

SEQ ID NO: 22500 - DNA, 20 bp, synthetic construct
  source 1..20: mol_type = other DNA
agaatttttatcaactccag

SEQ ID NO: 22501 - DNA, 20 bp, synthetic construct
  source 1..20: mol_type = other DNA
tagagagtgtataggatcaa

SEQ ID NO: 22502 - DNA, 20 bp, synthetic construct
  source 1..20: mol_type = other DNA
gggacatcaagcagccatgc

SEQ ID NO: 22503 - DNA, 20 bp, synthetic construct
  source 1..20: mol_type = other DNA
aatgagccaagtaacaaatt

SEQ ID NO: 22504 - DNA, 20 bp, synthetic construct
  source 1..20: mol_type = other DNA
agattgtactgagagacagg

SEQ ID NO: 22505 - DNA, 20 bp, synthetic construct
  source 1..20: mol_type = other DNA
ttaaagccaggaatggatgg

SEQ ID NO: 22506 - DNA, 20 bp, synthetic construct
  source 1..20: mol_type = other DNA
gcatgggtaccagcacacaa

SEQ ID NO: 22507 - DNA, 20 bp, synthetic construct
  source 1..20: mol_type = other DNA
aagttcagaagtacacatcc

SEQ ID NO: 22508 - DNA, 20 bp, synthetic construct
  source 1..20: mol_type = other DNA
gaaactgacagaggatagat

SEQ ID NO: 22509 - DNA, 20 bp, synthetic construct
  source 1..20: mol_type = other DNA
ctgcttgtaccaattgctat

SEQ ID NO: 22510 - DNA, 20 bp, synthetic construct
  source 1..20: mol_type = other DNA
cttgatataataccaataga

SEQ ID NO: 22511 - DNA, 20 bp, synthetic construct
  source 1..20: mol_type = other DNA
tttggaaataataaaacaat

SEQ ID NO: 22512 - DNA, 20 bp, synthetic construct
  source 1..20: mol_type = other DNA
agtgacacaatcaccctccc

SEQ ID NO: 22513 - DNA, 20 bp, synthetic construct
  source 1..20: mol_type = other DNA
ggaagcactatgggcgcagc

SEQ ID NO: 22514 - DNA, 20 bp, synthetic construct
  source 1..20: mol_type = other DNA
gtactttctatagtgaatag

SEQ ID NO: 22515 - DNA, 20 bp, synthetic construct
  source 1..20: mol_type = other DNA
gatctgcggagcctgtgcct

SEQ ID NO: 22516 - DNA, 20 bp, synthetic construct
  source 1..20: mol_type = other DNA
tcatcacgtggcccgagagc

SEQ ID NO: 22517 - DNA, 20 bp, synthetic construct
  source 1..20: mol_type = other DNA
acagatttatatacttgata

SEQ ID NO: 22518 - DNA, 20 bp, synthetic construct
  source 1..20: mol_type = other DNA
cctaggcataatgggagaat

SEQ ID NO: 22519 - DNA, 20 bp, synthetic construct
  source 1..20: mol_type = other DNA
ttccaatcatccatgccagc

SEQ ID NO: 22520 - DNA, 20 bp, synthetic construct
  source 1..20: mol_type = other DNA
atactgaacaaactctgtga

SEQ ID NO: 22521 - DNA, 20 bp, synthetic construct
  source 1..20: mol_type = other DNA
cagcaagcccaccacaaaac

SEQ ID NO: 22522 - DNA, 20 bp, synthetic construct
  source 1..20: mol_type = other DNA
gagaactaccaaggtttatg

SEQ ID NO: 22523 - DNA, 20 bp, synthetic construct
  source 1..20: mol_type = other DNA
attatgtaaataagcaagaa

SEQ ID NO: 22524 - DNA, 20 bp, synthetic construct
  source 1..20: mol_type = other DNA
tttaatttatacacaaaatt

SEQ ID NO: 22525 - DNA, 20 bp, synthetic construct
  source 1..20: mol_type = other DNA
tataatcaattcttgacatg

SEQ ID NO: 22526 - DNA, 20 bp, synthetic construct
  source 1..20: mol_type = other DNA
aaactaaacacttatccttc

SEQ ID NO: 22527 - DNA, 20 bp, synthetic construct
  source 1..20: mol_type = other DNA
gaagctatatcactattgga

SEQ ID NO: 22528 - DNA, 20 bp, synthetic construct
  source 1..20: mol_type = other DNA
ctcttgtgttttcataaagg

SEQ ID NO: 22529 - DNA, 20 bp, synthetic construct
  source 1..20: mol_type = other DNA
gttgtgattgataaaattat

SEQ ID NO: 22530 - DNA, 20 bp, synthetic construct
  source 1..20: mol_type = other DNA
tttttaaggctgtacaatgg

SEQ ID NO: 22531 - DNA, 20 bp, synthetic construct
  source 1..20: mol_type = other DNA
tacttagtccttacaatagg

SEQ ID NO: 22532 - DNA, 20 bp, synthetic construct
  source 1..20: mol_type = other DNA
aaaaaaggaattaatactgc

SEQ ID NO: 22533 - DNA, 20 bp, synthetic construct
  source 1..20: mol_type = other DNA
ttggcttgcaaaggcgcgga

SEQ ID NO: 22534 - DNA, 20 bp, synthetic construct
  source 1..20: mol_type = other DNA
tcaacagcatctttggagga

SEQ ID NO: 22535 - DNA, 20 bp, synthetic construct
  source 1..20: mol_type = other DNA
tgatctggagtatccctgag

SEQ ID NO: 22536 - DNA, 20 bp, synthetic construct
  source 1..20: mol_type = other DNA
caggagtgatgggggccgcc

SEQ ID NO: 22537 - DNA, 20 bp, synthetic construct
  source 1..20: mol_type = other DNA
tggcggtggggattgcgttc

SEQ ID NO: 22538 - DNA, 20 bp, synthetic construct
  source 1..20: mol_type = other DNA
cactcacagaaataatgagg

SEQ ID NO: 22539 - DNA, 20 bp, synthetic construct
  source 1..20: mol_type = other DNA
gggcgcacgaggtgcaccag

SEQ ID NO: 22540 - DNA, 20 bp, synthetic construct
  source 1..20: mol_type = other DNA
tcagcagcatcgctcaggga

SEQ ID NO: 22541 - DNA, 20 bp, synthetic construct
  source 1..20: mol_type = other DNA
tgagtacgttggtgctggct

SEQ ID NO: 22542 - DNA, 20 bp, synthetic construct
  source 1..20: mol_type = other DNA
gccctgagcaggacaagatg

SEQ ID NO: 22543 - DNA, 20 bp, synthetic construct
  source 1..20: mol_type = other DNA
tgggtgtcgtctggtgtttc

SEQ ID NO: 22544 - DNA, 20 bp, synthetic construct
  source 1..20: mol_type = other DNA
tggcaggacatgttatgact

SEQ ID NO: 22545 - DNA, 20 bp, synthetic construct
  source 1..20: mol_type = other DNA
ggaagcgcaggctgaacaac

SEQ ID NO: 22546 - DNA, 20 bp, synthetic construct
  source 1..20: mol_type = other DNA
atcgcaccctcaagggagag

SEQ ID NO: 22547 - DNA, 20 bp, synthetic construct
  source 1..20: mol_type = other DNA
ctccataccgcccagaggta

SEQ ID NO: 22548 - DNA, 20 bp, synthetic construct
  source 1..20: mol_type = other DNA
ttgacacaaaagcacaggag

SEQ ID NO: 22549 - DNA, 20 bp, synthetic construct
  source 1..20: mol_type = other DNA
tcgaaagcacagtgcccctc

SEQ ID NO: 22550 - DNA, 20 bp, synthetic construct
  source 1..20: mol_type = other DNA
acccctgccctctcgcatta

SEQ ID NO: 22551 - DNA, 20 bp, synthetic construct
  source 1..20: mol_type = other DNA
cctccaacagccctcggctc

SEQ ID NO: 22552 - DNA, 20 bp, synthetic construct
  source 1..20: mol_type = other DNA
gagtccccagttcatgcaaa

SEQ ID NO: 22553 - DNA, 20 bp, synthetic construct
  source 1..20: mol_type = other DNA
caaggacaaagcccgggtcc

SEQ ID NO: 22554 - DNA, 20 bp, synthetic construct
  source 1..20: mol_type = other DNA
gtctccattgcaggcgcccc

SEQ ID NO: 22555 - DNA, 20 bp, synthetic construct
  source 1..20: mol_type = other DNA
tgcgtctacctacccttccg

SEQ ID NO: 22556 - DNA, 20 bp, synthetic construct
  source 1..20: mol_type = other DNA
cctccccgattattacccgt

SEQ ID NO: 22557 - DNA, 20 bp, synthetic construct
  source 1..20: mol_type = other DNA
accccgtctttccagtcaaa

SEQ ID NO: 22558 - DNA, 20 bp, synthetic construct
  source 1..20: mol_type = other DNA
tccaaatcccccttccaaaa

SEQ ID NO: 22559 - DNA, 20 bp, synthetic construct
  source 1..20: mol_type = other DNA
ccttccctatgtctactatc

SEQ ID NO: 22560 - DNA, 20 bp, synthetic construct
  source 1..20: mol_type = other DNA
aagttatatctcccaaccat

SEQ ID NO: 22561 - DNA, 20 bp, synthetic construct
  source 1..20: mol_type = other DNA
gatggcccctggtttggctg

SEQ ID NO: 22562 - DNA, 20 bp, synthetic construct
  source 1..20: mol_type = other DNA
tctccactcttaacgaatac

SEQ ID NO: 22563 - DNA, 20 bp, synthetic construct
  source 1..20: mol_type = other DNA
ctgaaactgtcagcgccctc

SEQ ID NO: 22564 - DNA, 20 bp, synthetic construct
  source 1..20: mol_type = other DNA
aaaggaccaatggcattgtt

SEQ ID NO: 22565 - DNA, 20 bp, synthetic construct
  source 1..20: mol_type = other DNA
tgcagtcttgcccaacctat

SEQ ID NO: 22566 - DNA, 20 bp, synthetic construct
  source 1..20: mol_type = other DNA
tgtggctcttctatgaccct

SEQ ID NO: 22567 - DNA, 20 bp, synthetic construct
  source 1..20: mol_type = other DNA
caactaactctacaaagtac

SEQ ID NO: 22568 - DNA, 20 bp, synthetic construct
  source 1..20: mol_type = other DNA
tggtctcactgttaccagcc

SEQ ID NO: 22569 - DNA, 20 bp, synthetic construct
  source 1..20: mol_type = other DNA
gcagggggaataaccggatc

SEQ ID NO: 22570 - DNA, 20 bp, synthetic construct
  source 1..20: mol_type = other DNA
acaatacccttcaaacccca

SEQ ID NO: 22571 - DNA, 20 bp, synthetic construct
  source 1..20: mol_type = other DNA
gcgaccatcccgtacatcct

SEQ ID NO: 22572 - DNA, 20 bp, synthetic construct
  source 1..20: mol_type = other DNA
tccaggtttcggacagagcc

SEQ ID NO: 22573 - DNA, 20 bp, synthetic construct
  source 1..20: mol_type = other DNA
cgttgtcggctctcctctcc

SEQ ID NO: 22574 - DNA, 20 bp, synthetic construct
  source 1..20: mol_type = other DNA
atacccaactctcggagacc

SEQ ID NO: 22575 - DNA, 20 bp, synthetic construct
  source 1..20: mol_type = other DNA
ctaccactctctcataacta

SEQ ID NO: 22576 - DNA, 20 bp, synthetic construct
  source 1..20: mol_type = other DNA
taggtagaatattgttttca

SEQ ID NO: 22577 - DNA, 20 bp, synthetic construct
  source 1..20: mol_type = other DNA
tgtcgtctccccctaagcaa

SEQ ID NO: 22578 - DNA, 20 bp, synthetic construct
  source 1..20: mol_type = other DNA
aagtaaagtatgattttgat

SEQ ID NO: 22579 - DNA, 20 bp, synthetic construct
  source 1..20: mol_type = other DNA
ctggacccgttcaatcgcgc

SEQ ID NO: 22580 - DNA, 20 bp, synthetic construct
  source 1..20: mol_type = other DNA
ccgcaaatcgtgttgaacaa

SEQ ID NO: 22581 - DNA, 20 bp, synthetic construct
  source 1..20: mol_type = other DNA
gtttatggttggtaggtgaa

SEQ ID NO: 22582 - DNA, 20 bp, synthetic construct
  source 1..20: mol_type = other DNA
aggttggaatttgggccgaa

SEQ ID NO: 22583 - DNA, 20 bp, synthetic construct
  source 1..20: mol_type = other DNA
ggaagttgtctgttcctaca

SEQ ID NO: 22584 - DNA, 20 bp, synthetic construct
  source 1..20: mol_type = other DNA
ttggtgaagaatttgatttt

SEQ ID NO: 22585 - DNA, 20 bp, synthetic construct
  source 1..20: mol_type = other DNA
gggactttggaaatttcgat

SEQ ID NO: 22586 - DNA, 20 bp, synthetic construct
  source 1..20: mol_type = other DNA
aatttcgttttagcccagaa

SEQ ID NO: 22587 - DNA, 20 bp, synthetic construct
  source 1..20: mol_type = other DNA
tgatggcgctgatacatcac

SEQ ID NO: 22588 - DNA, 20 bp, synthetic construct
  source 1..20: mol_type = other DNA
tagttttattccattttatt

SEQ ID NO: 22589 - DNA, 20 bp, synthetic construct
  source 1..20: mol_type = other DNA
tggtgttcatccaatgacta

SEQ ID NO: 22590 - DNA, 20 bp, synthetic construct
  source 1..20: mol_type = other DNA
gccctgcttacacgggtatt

SEQ ID NO: 22591 - DNA, 20 bp, synthetic construct
  source 1..20: mol_type = other DNA
ggtggtaagggtacgtctat

SEQ ID NO: 22592 - DNA, 20 bp, synthetic construct
  source 1..20: mol_type = other DNA
gagttgctacgcggcctggc

SEQ ID NO: 22593 - DNA, 20 bp, synthetic construct
  source 1..20: mol_type = other DNA
gtgctctttgcaccttctat

SEQ ID NO: 22594 - DNA, 20 bp, synthetic construct
  source 1..20: mol_type = other DNA
gttattggcacgcccttcag

SEQ ID NO: 22595 - DNA, 20 bp, synthetic construct
  source 1..20: mol_type = other DNA
gtgattcagtcagtaacgcc

SEQ ID NO: 22596 - DNA, 20 bp, synthetic construct
  source 1..20: mol_type = other DNA
cttacctaccgaccgtggag

SEQ ID NO: 22597 - DNA, 20 bp, synthetic construct
  source 1..20: mol_type = other DNA
caagaggtgcgctgccccta

SEQ ID NO: 22598 - DNA, 20 bp, synthetic construct
  source 1..20: mol_type = other DNA
tgacccacggtggcaaggag

SEQ ID NO: 22599 - DNA, 20 bp, synthetic construct
  source 1..20: mol_type = other DNA
tattcctgtttgagcacgct

SEQ ID NO: 22600 - DNA, 20 bp, synthetic construct
  source 1..20: mol_type = other DNA
gtaggggagacgaagtgctc

SEQ ID NO: 22601 - DNA, 20 bp, synthetic construct
  source 1..20: mol_type = other DNA
tggaaccttgcaaatgctca

SEQ ID NO: 22602 - DNA, 20 bp, synthetic construct
  source 1..20: mol_type = other DNA
gtacttatggaagattcatg

SEQ ID NO: 22603 - DNA, 20 bp, synthetic construct
  source 1..20: mol_type = other DNA
cgggggccccaatggccgca

SEQ ID NO: 22604 - DNA, 20 bp, synthetic construct
  source 1..20: mol_type = other DNA
taacaatttcactgcggaca

SEQ ID NO: 22605 - DNA, 20 bp, synthetic construct
  source 1..20: mol_type = other DNA
ccggggggtcgataaccagc

SEQ ID NO: 22606 - DNA, 20 bp, synthetic construct
  source 1..20: mol_type = other DNA
tctcttgggaggccccaatc

SEQ ID NO: 22607 - DNA, 20 bp, synthetic construct
  source 1..20: mol_type = other DNA
agcttcagtgtgcgaaggct

SEQ ID NO: 22608 - DNA, 20 bp, synthetic construct
  source 1..20: mol_type = other DNA
gcttcgacagcatgccaagc

SEQ ID NO: 22609 - DNA, 20 bp, synthetic construct
  source 1..20: mol_type = other DNA
ttgattcgtcaatcgacgaa

SEQ ID NO: 22610 - DNA, 20 bp, synthetic construct
  source 1..20: mol_type = other DNA
acttagaagtactagcaaaa

SEQ ID NO: 22611 - DNA, 20 bp, synthetic construct
  source 1..20: mol_type = other DNA
gatggactcggccattaggc

SEQ ID NO: 22612 - DNA, 20 bp, synthetic construct
  source 1..20: mol_type = other DNA
gggtgttgagcggtatgtca

SEQ ID NO: 22613 - DNA, 20 bp, synthetic construct
  source 1..20: mol_type = other DNA
tggcaccttcatgacaacag

SEQ ID NO: 22614 - DNA, 20 bp, synthetic construct
  source 1..20: mol_type = other DNA
cagtaatgacgatgtgctga

SEQ ID NO: 22615 - DNA, 20 bp, synthetic construct
  source 1..20: mol_type = other DNA
gagcatgattgagacccgca

SEQ ID NO: 22616 - DNA, 20 bp, synthetic construct
  source 1..20: mol_type = other DNA
ggtattcgcggacacggacg

SEQ ID NO: 22617 - DNA, 20 bp, synthetic construct
  source 1..20: mol_type = other DNA
tatctattactgcaaatcca

SEQ ID NO: 22618 - DNA, 20 bp, synthetic construct
  source 1..20: mol_type = other DNA
aaaggtttgccaaattcttg

SEQ ID NO: 22619 - DNA, 20 bp, synthetic construct
  source 1..20: mol_type = other DNA
ccatctagagaagcgcgtcc

SEQ ID NO: 22620 - DNA, 20 bp, synthetic construct
  source 1..20: mol_type = other DNA
ggcagtcattcagagtgtgt

SEQ ID NO: 22621 - DNA, 20 bp, synthetic construct
  source 1..20: mol_type = other DNA
cctgaaccttgctggcaggc

SEQ ID NO: 22622 - DNA, 20 bp, synthetic construct
  source 1..20: mol_type = other DNA
acaaggacaaattgaatata

SEQ ID NO: 22623 - DNA, 20 bp, synthetic construct
  source 1..20: mol_type = other DNA
ccgtttgatagaggcatcta

SEQ ID NO: 22624 - DNA, 20 bp, synthetic construct
  source 1..20: mol_type = other DNA
ttggtgaccccgacgtgatc

SEQ ID NO: 22625 - DNA, 20 bp, synthetic construct
  source 1..20: mol_type = other DNA
aacctaccgagaactcagag

SEQ ID NO: 22626 - DNA, 20 bp, synthetic construct
  source 1..20: mol_type = other DNA
caactccagacggttatagc

SEQ ID NO: 22627 - DNA, 20 bp, synthetic construct
  source 1..20: mol_type = other DNA
tgctttaggcagaagtcaca

SEQ ID NO: 22628 - DNA, 20 bp, synthetic construct
  source 1..20: mol_type = other DNA
gagaacttctacctggcggc

SEQ ID NO: 22629 - DNA, 20 bp, synthetic construct
  source 1..20: mol_type = other DNA
gaggagcactgtaagcccca

SEQ ID NO: 22630 - DNA, 20 bp, synthetic construct
  source 1..20: mol_type = other DNA
gagtacgttctgtctctcca

SEQ ID NO: 22631 - DNA, 20 bp, synthetic construct
  source 1..20: mol_type = other DNA
tgggacattcttcatgcttg

SEQ ID NO: 22632 - DNA, 20 bp, synthetic construct
  source 1..20: mol_type = other DNA
acagcacaaccctcacctat

SEQ ID NO: 22633 - DNA, 20 bp, synthetic construct
  source 1..20: mol_type = other DNA
cttctgcagaagatattaat

SEQ ID NO: 22634 - DNA, 20 bp, synthetic construct
  source 1..20: mol_type = other DNA
caggatgcaaaaattaaaca

SEQ ID NO: 22635 - DNA, 20 bp, synthetic construct
  source 1..20: mol_type = other DNA
acctgcttcttttgcaaaca

SEQ ID NO: 22636 - DNA, 20 bp, synthetic construct
  source 1..20: mol_type = other DNA
aatggccgcatggaccggtc

SEQ ID NO: 22637 - DNA, 20 bp, synthetic construct
  source 1..20: mol_type = other DNA
attcctatgttggtagatac

SEQ ID NO: 22638 - DNA, 20 bp, synthetic construct
  source 1..20: mol_type = other DNA
ctagaaaatcaaggaatatt

SEQ ID NO: 22639 - DNA, 20 bp, synthetic construct
  source 1..20: mol_type = other DNA
ccgcctcatgactgcgtttt

SEQ ID NO: 22640 - DNA, 20 bp, synthetic construct
  source 1..20: mol_type = other DNA
gttgaaggacgaccaacatg

SEQ ID NO: 22641 - DNA, 20 bp, synthetic construct
  source 1..20: mol_type = other DNA
agatcacggtacctaacagc

SEQ ID NO: 22642 - DNA, 20 bp, synthetic construct
  source 1..20: mol_type = other DNA
ctattactaccattcttgga

SEQ ID NO: 22643 - DNA, 20 bp, synthetic construct
  source 1..20: mol_type = other DNA
ttaaccaacatgctgaatac

SEQ ID NO: 22644 - DNA, 20 bp, synthetic construct
  source 1..20: mol_type = other DNA
agacaaaagaaatgggcaaa

SEQ ID NO: 22645 - DNA, 20 bp, synthetic construct
  source 1..20: mol_type = other DNA
tacattaaactatcttatcg

SEQ ID NO: 22646 - DNA, 20 bp, synthetic construct
  source 1..20: mol_type = other DNA
atcacgataaccacagccac

SEQ ID NO: 22647 - DNA, 20 bp, synthetic construct
  source 1..20: mol_type = other DNA
aaatgcacactgggtttagg

SEQ ID NO: 22648 - DNA, 20 bp, synthetic construct
  source 1..20: mol_type = other DNA
aggcctaaagtagaaataac

SEQ ID NO: 22649 - DNA, 20 bp, synthetic construct
  source 1..20: mol_type = other DNA
aaagtagaaataacaactga

SEQ ID NO: 22650 - DNA, 20 bp, synthetic construct
  source 1..20: mol_type = other DNA
tcctctccaattacagcaac

SEQ ID NO: 22651 - DNA, 20 bp, synthetic construct
  source 1..20: mol_type = other DNA
ggccgggagctggaatgctg

SEQ ID NO: 22652 - DNA, 20 bp, synthetic construct
  source 1..20: mol_type = other DNA
tggaggaggatataatttta

SEQ ID NO: 22653 - DNA, 20 bp, synthetic construct
  source 1..20: mol_type = other DNA
aggattattggattactgca

SEQ ID NO: 22654 - DNA, 20 bp, synthetic construct
  source 1..20: mol_type = other DNA
tccaggagagggtgtacagg

SEQ ID NO: 22655 - DNA, 20 bp, synthetic construct
  source 1..20: mol_type = other DNA
tacgtgcctgtggttataac

SEQ ID NO: 22656 - DNA, 20 bp, synthetic construct
  source 1..20: mol_type = other DNA
accaatgtcataaaggaatt

SEQ ID NO: 22657 - DNA, 20 bp, synthetic construct
  source 1..20: mol_type = other DNA
cggatcctactcgtcctgca

SEQ ID NO: 22658 - DNA, 20 bp, synthetic construct
  source 1..20: mol_type = other DNA
cgcgctatatgctgctcatt

SEQ ID NO: 22659 - DNA, 20 bp, synthetic construct
  source 1..20: mol_type = other DNA
tttatagaggttcccgaact

SEQ ID NO: 22660 - DNA, 20 bp, synthetic construct
  source 1..20: mol_type = other DNA
tgtcacgtcgtatagatttt

SEQ ID NO: 22661 - DNA, 20 bp, synthetic construct
  source 1..20: mol_type = other DNA
cggaaactgaaaagtcccgt

SEQ ID NO: 22662 - DNA, 20 bp, synthetic construct
  source 1..20: mol_type = other DNA
tcaattctttggatcgtaat

SEQ ID NO: 22663 - DNA, 20 bp, synthetic construct
  source 1..20: mol_type = other DNA
cgatatgtgtgggtgtcaac

SEQ ID NO: 22664 - DNA, 20 bp, synthetic construct
  source 1..20: mol_type = other DNA
tagctatttagctttactaa

SEQ ID NO: 22665 - DNA, 20 bp, synthetic construct
  source 1..20: mol_type = other DNA
tgaatccccgtcgtcatcca

SEQ ID NO: 22666 - DNA, 20 bp, synthetic construct
  source 1..20: mol_type = other DNA
ttacccttctaatgttgtta

SEQ ID NO: 22667 - DNA, 20 bp, synthetic construct
  source 1..20: mol_type = other DNA
ttattctccgttagtcgatt

SEQ ID NO: 22668 - DNA, 20 bp, synthetic construct
  source 1..20: mol_type = other DNA
gcagatccatgcgtgtaggt

SEQ ID NO: 22669 - DNA, 20 bp, synthetic construct
  source 1..20: mol_type = other DNA
tcgtcgtactgcttacgatt

SEQ ID NO: 22670 - DNA, 20 bp, synthetic construct
  source 1..20: mol_type = other DNA
aagtctacccccggcccgtc

SEQ ID NO: 22671 - DNA, 20 bp, synthetic construct
  source 1..20: mol_type = other DNA
agacgtgttcggggctcacc

SEQ ID NO: 22672 - DNA, 20 bp, synthetic construct
  source 1..20: mol_type = other DNA
ctcaggcgatgggaccgccg

SEQ ID NO: 22673 - DNA, 20 bp, synthetic construct
  source 1..20: mol_type = other DNA
tccctctacaatattggcct

SEQ ID NO: 22674 - DNA, 20 bp, synthetic construct
  source 1..20: mol_type = other DNA
aggaacgggaaagaattctc

SEQ ID NO: 22675 - DNA, 20 bp, synthetic construct
  source 1..20: mol_type = other DNA
caggtctcaaaggggcagct

SEQ ID NO: 22676 - DNA, 20 bp, synthetic construct
  source 1..20: mol_type = other DNA
gggcaagagaatgtccccga

SEQ ID NO: 22677 - DNA, 20 bp, synthetic construct
  source 1..20: mol_type = other DNA
aacccatgggaaaagtaggg

SEQ ID NO: 22678 - DNA, 20 bp, synthetic construct
  source 1..20: mol_type = other DNA
aactaaaggcccagatccag

SEQ ID NO: 22679 - DNA, 20 bp, synthetic construct
  source 1..20: mol_type = other DNA
gagccggcatgggactagcc

SEQ ID NO: 22680 - DNA, 20 bp, synthetic construct
  source 1..20: mol_type = other DNA
aggatgcctttttctgcctc

SEQ ID NO: 22681 - DNA, 20 bp, synthetic construct
  source 1..20: mol_type = other DNA
atctggggtacctactcaag

SEQ ID NO: 22682 - DNA, 20 bp, synthetic construct
  source 1..20: mol_type = other DNA
ccctaacaaaagagagcatc

SEQ ID NO: 22683 - DNA, 20 bp, synthetic construct
  source 1..20: mol_type = other DNA
atgaaattctctatggagga

SEQ ID NO: 22684 - DNA, 20 bp, synthetic construct
  source 1..20: mol_type = other DNA
acccgttccaggtcggggat

SEQ ID NO: 22685 - DNA, 20 bp, synthetic construct
  source 1..20: mol_type = other DNA
cagatgagtcctgggagctg

SEQ ID NO: 22686 - DNA, 20 bp, synthetic construct
  source 1..20: mol_type = other DNA
caaactcccacggtgagaaa

SEQ ID NO: 22687 - DNA, 20 bp, synthetic construct
  source 1..20: mol_type = other DNA
atagcctcatcaggagaggt

SEQ ID NO: 22688 - DNA, 20 bp, synthetic construct
  source 1..20: mol_type = other DNA
caattcatcaatgataggat

SEQ ID NO: 22689 - DNA, 20 bp, synthetic construct
  source 1..20: mol_type = other DNA
acaccccgacttgctgagtt

SEQ ID NO: 22690 - DNA, 20 bp, synthetic construct
  source 1..20: mol_type = other DNA
ttgaaaacagttattcatac

SEQ ID NO: 22691 - DNA, 20 bp, synthetic construct
  source 1..20: mol_type = other DNA
ttcttaactttaagtctatg

SEQ ID NO: 22692 - DNA, 20 bp, synthetic construct
  source 1..20: mol_type = other DNA
cctactttactggtgaatta

SEQ ID NO: 22693 - DNA, 20 bp, synthetic construct
  source 1..20: mol_type = other DNA
acaagccattacggacagtt

SEQ ID NO: 22694 - DNA, 20 bp, synthetic construct
  source 1..20: mol_type = other DNA
agacaaaaatgaaaacacaa

SEQ ID NO: 22695 - DNA, 20 bp, synthetic construct
  source 1..20: mol_type = other DNA
tgattgatgatttgggccaa

SEQ ID NO: 22696 - DNA, 20 bp, synthetic construct
  source 1..20: mol_type = other DNA
tattagattcaggtgctctg

SEQ ID NO: 22697 - DNA, 20 bp, synthetic construct
  source 1..20: mol_type = other DNA
acactagactagaagaacca

SEQ ID NO: 22698 - DNA, 20 bp, synthetic construct
  source 1..20: mol_type = other DNA
caaccatttttaatacatgt

SEQ ID NO: 22699 - DNA, 20 bp, synthetic construct
  source 1..20: mol_type = other DNA
ataagaatttttgtaccagc

SEQ ID NO: 22700 - DNA, 20 bp, synthetic construct
  source 1..20: mol_type = other DNA
aacgacccagacatagaagc

SEQ ID NO: 22701 - DNA, 20 bp, synthetic construct
  source 1..20: mol_type = other DNA
tatggactgaggatcaccga

SEQ ID NO: 22702 - DNA, 20 bp, synthetic construct
  source 1..20: mol_type = other DNA
ttctttgcgactatcagatt

SEQ ID NO: 22703 - DNA, 20 bp, synthetic construct
  source 1..20: mol_type = other DNA
ggtggttatccactcctgtg

SEQ ID NO: 22704 - DNA, 20 bp, synthetic construct
  source 1..20: mol_type = other DNA
aggcagtcagtgactttcaa

SEQ ID NO: 22705 - DNA, 20 bp, synthetic construct
  source 1..20: mol_type = other DNA
taggatcctttacaatctca

SEQ ID NO: 22706 - DNA, 20 bp, synthetic construct
  source 1..20: mol_type = other DNA
atcaagcatccaacaaccaa

SEQ ID NO: 22707 - DNA, 20 bp, synthetic construct
  source 1..20: mol_type = other DNA
tggacaaagagtgtcaaaca

SEQ ID NO: 22708 - DNA, 20 bp, synthetic construct
  source 1..20: mol_type = other DNA
gcctccagtcatcccggagt

SEQ ID NO: 22709 - DNA, 20 bp, synthetic construct
  source 1..20: mol_type = other DNA
cattgacactactcctgagg

SEQ ID NO: 22710 - DNA, 20 bp, synthetic construct
  source 1..20: mol_type = other DNA
aaattatcatgcagaccatc

SEQ ID NO: 22711 - DNA, 20 bp, synthetic construct
  source 1..20: mol_type = other DNA
tacacatcataatggccagt

SEQ ID NO: 22712 - DNA, 20 bp, synthetic construct
  source 1..20: mol_type = other DNA
agaagaacagctggggctac

SEQ ID NO: 22713 - DNA, 20 bp, synthetic construct
  source 1..20: mol_type = other DNA
ctaaaggggtgaaataaaac

SEQ ID NO: 22714 - DNA, 20 bp, synthetic construct
  source 1..20: mol_type = other DNA
ctgtgggatcatagttctgg

SEQ ID NO: 22715 - DNA, 20 bp, synthetic construct
  source 1..20: mol_type = other DNA
gtgcaccgggactgttatgg

SEQ ID NO: 22716 - DNA, 20 bp, synthetic construct
  source 1..20: mol_type = other DNA
cacagcaggtgttgccttat

SEQ ID NO: 22717 - DNA, 20 bp, synthetic construct
  source 1..20: mol_type = other DNA
aatagatcaaattagctgca

SEQ ID NO: 22718 - DNA, 20 bp, synthetic construct
  source 1..20: mol_type = other DNA
taacgataattcagaatgga

SEQ ID NO: 22719 - DNA, 20 bp, synthetic construct
  source 1..20: mol_type = other DNA
catcacaattcctgctaaca

SEQ ID NO: 22720 - DNA, 20 bp, synthetic construct
  source 1..20: mol_type = other DNA
gccttacggtccatcaggta

SEQ ID NO: 22721 - DNA, 20 bp, synthetic construct
  source 1..20: mol_type = other DNA
attaggcgatgttgataccg

SEQ ID NO: 22722 - DNA, 20 bp, synthetic construct
  source 1..20: mol_type = other DNA
atactaaatgtaatcaaact

SEQ ID NO: 22723 - DNA, 20 bp, synthetic construct
  source 1..20: mol_type = other DNA
gaaatacatgagtcaatcgc

SEQ ID NO: 22724 - DNA, 20 bp, synthetic construct
  source 1..20: mol_type = other DNA
gccaatcatgaaagcacacg

SEQ ID NO: 22725 - DNA, 20 bp, synthetic construct
  source 1..20: mol_type = other DNA
ctatcatatggaattcagtc

SEQ ID NO: 22726 - DNA, 20 bp, synthetic construct
  source 1..20: mol_type = other DNA
tgcagaaagacttgacgaaa

SEQ ID NO: 22727 - DNA, 20 bp, synthetic construct
  source 1..20: mol_type = other DNA
ttgtgcaaggcaagctcaat

SEQ ID NO: 22728 - DNA, 20 bp, synthetic construct
  source 1..20: mol_type = other DNA
aataagatcaggattgaaaa

SEQ ID NO: 22729 - DNA, 20 bp, synthetic construct
  source 1..20: mol_type = other DNA
gaataaagagcactcatcca

SEQ ID NO: 22730 - DNA, 20 bp, synthetic construct
  source 1..20: mol_type = other DNA
ttcagtcaagtgggcatttg

SEQ ID NO: 22731 - DNA, 20 bp, synthetic construct
  source 1..20: mol_type = other DNA
aatcttatcaatgaatacta

SEQ ID NO: 22732 - DNA, 20 bp, synthetic construct
  source 1..20: mol_type = other DNA
gagaaaagttttgattctag

SEQ ID NO: 22733 - DNA, 20 bp, synthetic construct
  source 1..20: mol_type = other DNA
ctccattcagcttcttcgga

SEQ ID NO: 22734 - DNA, 20 bp, synthetic construct
  source 1..20: mol_type = other DNA
ccgccctcccacatcctccc

SEQ ID NO: 22735 - DNA, 20 bp, synthetic construct
  source 1..20: mol_type = other DNA
cgctcccaatctcggccgcg

SEQ ID NO: 22736 - DNA, 20 bp, synthetic construct
  source 1..20: mol_type = other DNA
tggtgtaaggttcatgtgcc

SEQ ID NO: 22737 - DNA, 20 bp, synthetic construct
  source 1..20: mol_type = other DNA
tctgtgctcgctgctgtggc

SEQ ID NO: 22738 - DNA, 20 bp, synthetic construct
  source 1..20: mol_type = other DNA
ttggctctcctctctcttcc

SEQ ID NO: 22739 - DNA, 20 bp, synthetic construct
  source 1..20: mol_type = other DNA
ttcacccgcggctggaacat

SEQ ID NO: 22740 - DNA, 20 bp, synthetic construct
  source 1..20: mol_type = other DNA
tacaacacccactccatgtg

SEQ ID NO: 22741 - DNA, 20 bp, synthetic construct
  source 1..20: mol_type = other DNA
tatgaaagcaacaccgctac

SEQ ID NO: 22742 - DNA, 20 bp, synthetic construct
  source 1..20: mol_type = other DNA
tctttccacggtctccgcta

SEQ ID NO: 22743 - DNA, 20 bp, synthetic construct
  source 1..20: mol_type = other DNA
gcccaccggcctggtctcat

SEQ ID NO: 22744 - DNA, 20 bp, synthetic construct
  source 1..20: mol_type = other DNA
ttcactggctccgctcagca

SEQ ID NO: 22745 - DNA, 20 bp, synthetic construct
  source 1..20: mol_type = other DNA
tcccaaaccctcaccgaaga

SEQ ID NO: 22746 - DNA, 20 bp, synthetic construct
  source 1..20: mol_type = other DNA
aaccctgccaccatgcttgt

SEQ ID NO: 22747 - DNA, 20 bp, synthetic construct
  source 1..20: mol_type = other DNA
tcatacttcggatgggagga

SEQ ID NO: 22748 - DNA, 20 bp, synthetic construct
  source 1..20: mol_type = other DNA
gacggcagtgccaaacagat

SEQ ID NO: 22749 - DNA, 20 bp, synthetic construct
  source 1..20: mol_type = other DNA
gtcagctccatcactggcga

SEQ ID NO: 22750 - DNA, 20 bp, synthetic construct
  source 1..20: mol_type = other DNA
ttggtctccatcgcccagga

SEQ ID NO: 22751 - DNA, 20 bp, synthetic construct
  source 1..20: mol_type = other DNA
gcttcactcctcgctcaaac

SEQ ID NO: 22752 - DNA, 20 bp, synthetic construct
  source 1..20: mol_type = other DNA
ctcgtctcctctgccccctt

SEQ ID NO: 22753 - DNA, 20 bp, synthetic construct
  source 1..20: mol_type = other DNA
caagccatcgcaaacaacac

SEQ ID NO: 22754 - DNA, 20 bp, synthetic construct
  source 1..20: mol_type = other DNA
ggcgcccatccccaccccac

SEQ ID NO: 22755 - DNA, 20 bp, synthetic construct
  source 1..20: mol_type = other DNA
aaccggatgtcccgcttgca

SEQ ID NO: 22756 - DNA, 20 bp, synthetic construct
  source 1..20: mol_type = other DNA
atgctcctcggtggtctcat

SEQ ID NO: 22757 - DNA, 20 bp, synthetic construct
  source 1..20: mol_type = other DNA
ttcacccttgttgctgacca

SEQ ID NO: 22758 - DNA, 20 bp, synthetic construct
  source 1..20: mol_type = other DNA
atctgtgtcctctctgccct

SEQ ID NO: 22759 - DNA, 20 bp, synthetic construct
  source 1..20: mol_type = other DNA
caggatttcccacccacgtc

SEQ ID NO: 22760 - DNA, 20 bp, synthetic construct
  source 1..20: mol_type = other DNA
tagttagttagaaccctttg

SEQ ID NO: 22761 - DNA, 20 bp, synthetic construct
  source 1..20: mol_type = other DNA
aagccatggttgtactgcac

SEQ ID NO: 22762 - DNA, 20 bp, synthetic construct
  source 1..20: mol_type = other DNA
ataaacctcttgctgattgc

SEQ ID NO: 22763 - DNA, 20 bp, synthetic construct
  source 1..20: mol_type = other DNA
catacctgttgtccttgtat

SEQ ID NO: 22764 - DNA, 20 bp, synthetic construct
  source 1..20: mol_type = other DNA
taggggggcaaccggtgact

SEQ ID NO: 22765 - DNA, 20 bp, synthetic construct
  source 1..20: mol_type = other DNA
ttcctcaagggttcaagaat

SEQ ID NO: 22766 - DNA, 20 bp, synthetic construct
  source 1..20: mol_type = other DNA
ctttgggcaataaggggtac

SEQ ID NO: 22767 - DNA, 20 bp, synthetic construct
  source 1..20: mol_type = other DNA
tcaaggatgcagggaagcta

SEQ ID NO: 22768 - DNA, 20 bp, synthetic construct
  source 1..20: mol_type = other DNA
ttaaccctgctaccttgctc

SEQ ID NO: 22769 - DNA, 20 bp, synthetic construct
  source 1..20: mol_type = other DNA
gaggaaaaactatcatgcct

SEQ ID NO: 22770 - DNA, 20 bp, synthetic construct
  source 1..20: mol_type = other DNA
gtgctcaaatcaacgccgga

SEQ ID NO: 22771 - DNA, 20 bp, synthetic construct
  source 1..20: mol_type = other DNA
tggatgtaaaactacagata

SEQ ID NO: 22772 - DNA, 20 bp, synthetic construct
  source 1..20: mol_type = other DNA
tcccaaacggattgggaccg

SEQ ID NO: 22773 - DNA, 20 bp, synthetic construct
  source 1..20: mol_type = other DNA
ccccccatcctgcctatcta

SEQ ID NO: 22774 - DNA, 20 bp, synthetic construct
  source 1..20: mol_type = other DNA
taacactggactcaccccat

SEQ ID NO: 22775 - DNA, 20 bp, synthetic construct
  source 1..20: mol_type = other DNA
agtcttacaaaacagacggg

SEQ ID NO: 22776 - DNA, 20 bp, synthetic construct
  source 1..20: mol_type = other DNA
gggatggtttgaaggatggt

SEQ ID NO: 22777 - DNA, 20 bp, synthetic construct
  source 1..20: mol_type = other DNA
gttcccatgagatacaagga

SEQ ID NO: 22778 - DNA, 20 bp, synthetic construct
  source 1..20: mol_type = other DNA
ctttgctgagacttgaccgc

SEQ ID NO: 22779 - DNA, 20 bp, synthetic construct
  source 1..20: mol_type = other DNA
ccaagtacactacccactag

SEQ ID NO: 22780 - DNA, 20 bp, synthetic construct
  source 1..20: mol_type = other DNA
acccaagattggtcccgaga

SEQ ID NO: 22781 - DNA, 20 bp, synthetic construct
  source 1..20: mol_type = other DNA
atggctagggctgcattggc

SEQ ID NO: 22782 - DNA, 20 bp, synthetic construct
  source 1..20: mol_type = other DNA
gaggcagtggatcattggga

SEQ ID NO: 22783 - DNA, 20 bp, synthetic construct
  source 1..20: mol_type = other DNA
gctatagtcatcaccaccaa

SEQ ID NO: 22784 - DNA, 20 bp, synthetic construct
  source 1..20: mol_type = other DNA
ttctcacatctaaaaatgga

SEQ ID NO: 22785 - DNA, 20 bp, synthetic construct
  source 1..20: mol_type = other DNA
atggcgggatctgcgctcgt

SEQ ID NO: 22786 - DNA, 20 bp, synthetic construct
  source 1..20: mol_type = other DNA
caacggcgacaacttggtct

SEQ ID NO: 22787 - DNA, 20 bp, synthetic construct
  source 1..20: mol_type = other DNA
ggatggggcttttgggtcag

SEQ ID NO: 22788 - DNA, 20 bp, synthetic construct
  source 1..20: mol_type = other DNA
cttgaagaaggttgccctga

SEQ ID NO: 22789 - DNA, 20 bp, synthetic construct
  source 1..20: mol_type = other DNA
gccggccacgagattgtgag

SEQ ID NO: 22790 - DNA, 20 bp, synthetic construct
  source 1..20: mol_type = other DNA
aaaaggaagaatgatgattg

SEQ ID NO: 22791 - DNA, 20 bp, synthetic construct
  source 1..20: mol_type = other DNA
ctactatggggcgccgatct

SEQ ID NO: 22792 - DNA, 20 bp, synthetic construct
  source 1..20: mol_type = other DNA
gcagattatacagcatggga

SEQ ID NO: 22793 - DNA, 20 bp, synthetic construct
  source 1..20: mol_type = other DNA
ccatctggattcccatgtac

SEQ ID NO: 22794 - DNA, 20 bp, synthetic construct
  source 1..20: mol_type = other DNA
atcttctggacccgcgggcc

SEQ ID NO: 22795 - DNA, 20 bp, synthetic construct
  source 1..20: mol_type = other DNA
caatgtccagagtgtgcagt

SEQ ID NO: 22796 - DNA, 20 bp, synthetic construct
  source 1..20: mol_type = other DNA
ccccattgggtttccagacc

SEQ ID NO: 22797 - DNA, 20 bp, synthetic construct
  source 1..20: mol_type = other DNA
ctggatttcccccccatcac

SEQ ID NO: 22798 - DNA, 20 bp, synthetic construct
  source 1..20: mol_type = other DNA
ctgggagcgggcatacaggt

SEQ ID NO: 22799 - DNA, 20 bp, synthetic construct
  source 1..20: mol_type = other DNA
cgtgctgggggtttgaccag

SEQ ID NO: 22800 - DNA, 20 bp, synthetic construct
  source 1..20: mol_type = other DNA
gttttagccagcactacagc

SEQ ID NO: 22801 - DNA, 20 bp, synthetic construct
  source 1..20: mol_type = other DNA
caggcctatcagaaacgaat

SEQ ID NO: 22802 - DNA, 20 bp, synthetic construct
  source 1..20: mol_type = other DNA
ggagcaattgagctcagtgt

SEQ ID NO: 22803 - DNA, 20 bp, synthetic construct
  source 1..20: mol_type = other DNA
caaagtaagagatcaagctg

SEQ ID NO: 22804 - DNA, 20 bp, synthetic construct
  source 1..20: mol_type = other DNA
ccagttcactggtgcttttg

SEQ ID NO: 22805 - DNA, 20 bp, synthetic construct
  source 1..20: mol_type = other DNA
cttactgaatgacaggcatt

SEQ ID NO: 22806 - DNA, 20 bp, synthetic construct
  source 1..20: mol_type = other DNA
aggtccagataatggagcag

SEQ ID NO: 22807 - DNA, 20 bp, synthetic construct
  source 1..20: mol_type = other DNA
gggacgacctaaagaaaaaa

SEQ ID NO: 22808 - DNA, 20 bp, synthetic construct
  source 1..20: mol_type = other DNA
ctaggaggtctggagccgca

SEQ ID NO: 22809 - DNA, 20 bp, synthetic construct
  source 1..20: mol_type = other DNA
tcaaagggacgaaggtggtc

SEQ ID NO: 22810 - DNA, 20 bp, synthetic construct
  source 1..20: mol_type = other DNA
ccgaactttctttgaccatc

SEQ ID NO: 22811 - DNA, 20 bp, synthetic construct
  source 1..20: mol_type = other DNA
aagctggactgctggtctcc

SEQ ID NO: 22812 - DNA, 20 bp, synthetic construct
  source 1..20: mol_type = other DNA
gtcatgaaggagagggaata

SEQ ID NO: 22813 - DNA, 20 bp, synthetic construct
  source 1..20: mol_type = other DNA
tccagtcacttcaacaaatt

SEQ ID NO: 22814 - DNA, 20 bp, synthetic construct
  source 1..20: mol_type = other DNA
cggtatttaacagcttgtat

SEQ ID NO: 22815 - DNA, 20 bp, synthetic construct
  source 1..20: mol_type = other DNA
gaacatgctgggaacagatg

SEQ ID NO: 22816 - DNA, 20 bp, synthetic construct
  source 1..20: mol_type = other DNA
tagacatccttaagcagaac

SEQ ID NO: 22817 - DNA, 20 bp, synthetic construct
  source 1..20: mol_type = other DNA
agataagagtgcatgaggga

SEQ ID NO: 22818 - DNA, 20 bp, synthetic construct
  source 1..20: mol_type = other DNA
tgacaataacttactcatcg

SEQ ID NO: 22819 - DNA, 20 bp, synthetic construct
  source 1..20: mol_type = other DNA
acaggagatatgggccagca

SEQ ID NO: 22820 - DNA, 20 bp, synthetic construct
  source 1..20: mol_type = other DNA
ttgatgagaggattgtcctc

SEQ ID NO: 22821 - DNA, 20 bp, synthetic construct
  source 1..20: mol_type = other DNA
agcaacatgacgcaacgagt

SEQ ID NO: 22822 - DNA, 20 bp, synthetic construct
  source 1..20: mol_type = other DNA
aagccttcattggacatctc

SEQ ID NO: 22823 - DNA, 20 bp, synthetic construct
  source 1..20: mol_type = other DNA
tattctgatagaggctgggg

SEQ ID NO: 22824 - DNA, 20 bp, synthetic construct
  source 1..20: mol_type = other DNA
gccccctgcaggattccagt

SEQ ID NO: 22825 - DNA, 20 bp, synthetic construct
  source 1..20: mol_type = other DNA
ggcaagagagagctcaagtg

SEQ ID NO: 22826 - DNA, 20 bp, synthetic construct
  source 1..20: mol_type = other DNA
tccccagggaggaagaatgg

SEQ ID NO: 22827 - DNA, 20 bp, synthetic construct
  source 1..20: mol_type = other DNA
agatccaccacggatagcgg

SEQ ID NO: 22828 - DNA, 20 bp, synthetic construct
  source 1..20: mol_type = other DNA
catgagatgaacaatggagg

SEQ ID NO: 22829 - DNA, 20 bp, synthetic construct
  source 1..20: mol_type = other DNA
gatgaagcccattttttgga

SEQ ID NO: 22830 - DNA, 20 bp, synthetic construct
  source 1..20: mol_type = other DNA
gggcgcattgggagaaatcc

SEQ ID NO: 22831 - DNA, 20 bp, synthetic construct
  source 1..20: mol_type = other DNA
ccagtttcccctggtgaaat

SEQ ID NO: 22832 - DNA, 20 bp, synthetic construct
  source 1..20: mol_type = other DNA
gacagcggtgaaacagtgaa

SEQ ID NO: 22833 - DNA, 20 bp, synthetic construct
  source 1..20: mol_type = other DNA
gatttcctggctaaaaaagg

SEQ ID NO: 22834 - DNA, 20 bp, synthetic construct
  source 1..20: mol_type = other DNA
gacaaccaagtggcatacct

SEQ ID NO: 22835 - DNA, 20 bp, synthetic construct
  source 1..20: mol_type = other DNA
gcctggacagtgtacgttgg

SEQ ID NO: 22836 - DNA, 20 bp, synthetic construct
  source 1..20: mol_type = other DNA
ctggtcagtggctggaattc

SEQ ID NO: 22837 - DNA, 20 bp, synthetic construct
  source 1..20: mol_type = other DNA
gttgacattgaggaagctcc

SEQ ID NO: 22838 - DNA, 20 bp, synthetic construct
  source 1..20: mol_type = other DNA
aagcgacagtttgagttgta

SEQ ID NO: 22839 - DNA, 20 bp, synthetic construct
  source 1..20: mol_type = other DNA
ccagtgaaatgtgacaccct

SEQ ID NO: 22840 - DNA, 20 bp, synthetic construct
  source 1..20: mol_type = other DNA
cttgagtttgaggccctggg

SEQ ID NO: 22841 - DNA, 20 bp, synthetic construct
  source 1..20: mol_type = other DNA
atcacagaggcagaccttga

SEQ ID NO: 22842 - DNA, 20 bp, synthetic construct
  source 1..20: mol_type = other DNA
ctgaagaggatggcggtgag

SEQ ID NO: 22843 - DNA, 20 bp, synthetic construct
  source 1..20: mol_type = other DNA
ttccatgaactacagctgaa

SEQ ID NO: 22844 - DNA, 20 bp, synthetic construct
  source 1..20: mol_type = other DNA
atggtgaaaaaatggagaga

SEQ ID NO: 22845 - DNA, 20 bp, synthetic construct
  source 1..20: mol_type = other DNA
gacaggtattctgtggatgc

SEQ ID NO: 22846 - DNA, 20 bp, synthetic construct
  source 1..20: mol_type = other DNA
cgggataaaaactacggatg

SEQ ID NO: 22847 - DNA, 20 bp, synthetic construct
  source 1..20: mol_type = other DNA
acatataaacaaaaaccagc

SEQ ID NO: 22848 - DNA, 20 bp, synthetic construct
  source 1..20: mol_type = other DNA
cggagaggtaatgtgaatgg

SEQ ID NO: 22849 - DNA, 20 bp, synthetic construct
  source 1..20: mol_type = other DNA
tggatatggctgatgaacaa

SEQ ID NO: 22850 - DNA, 20 bp, synthetic construct
  source 1..20: mol_type = other DNA
ggtgttgtactggacaggcc

SEQ ID NO: 22851 - DNA, 20 bp, synthetic construct
  source 1..20: mol_type = other DNA
aagcaattagggatccttgg

SEQ ID NO: 22852 - DNA, 20 bp, synthetic construct
  source 1..20: mol_type = other DNA
accagtgctgagtttatgca

SEQ ID NO: 22853 - DNA, 20 bp, synthetic construct
  source 1..20: mol_type = other DNA
tttccatcaaggcataagag

SEQ ID NO: 22854 - DNA, 20 bp, synthetic construct
  source 1..20: mol_type = other DNA
cagataacattggccactgg

SEQ ID NO: 22855 - DNA, 20 bp, synthetic construct
  source 1..20: mol_type = other DNA
ggagatatgaaggaaggtga

SEQ ID NO: 22856 - DNA, 20 bp, synthetic construct
  source 1..20: mol_type = other DNA
aggtttgctgaaaatcttag

SEQ ID NO: 22857 - DNA, 20 bp, synthetic construct
  source 1..20: mol_type = other DNA
gagtcaggtgtgacattgcc

SEQ ID NO: 22858 - DNA, 20 bp, synthetic construct
  source 1..20: mol_type = other DNA
gaggtcctcaacaacctcct

SEQ ID NO: 22859 - DNA, 20 bp, synthetic construct
  source 1..20: mol_type = other DNA
tacacatacctcaatgcaag

SEQ ID NO: 22860 - DNA, 20 bp, synthetic construct
  source 1..20: mol_type = other DNA
aaggaattagctgtgggaga

SEQ ID NO: 22861 - DNA, 20 bp, synthetic construct
  source 1..20: mol_type = other DNA
tatgctacaagttccttgaa

SEQ ID NO: 22862 - DNA, 20 bp, synthetic construct
  source 1..20: mol_type = other DNA
tatcaagatcttgtcgatag

SEQ ID NO: 22863 - DNA, 20 bp, synthetic construct
  source 1..20: mol_type = other DNA
aacaaaggttctacctcaaa

SEQ ID NO: 22864 - DNA, 20 bp, synthetic construct
  source 1..20: mol_type = other DNA
aagtgccctccatgtagtaa

SEQ ID NO: 22865 - DNA, 20 bp, synthetic construct
  source 1..20: mol_type = other DNA
ggctcaacaatggcctctgc

SEQ ID NO: 22866 - DNA, 20 bp, synthetic construct
  source 1..20: mol_type = other DNA
cccggctatgaaggtaaaac

SEQ ID NO: 22867 - DNA, 20 bp, synthetic construct
  source 1..20: mol_type = other DNA
gcatatagatttgaggacat

SEQ ID NO: 22868 - DNA, 20 bp, synthetic construct
  source 1..20: mol_type = other DNA
gcgacggatccgttatccgc

SEQ ID NO: 22869 - DNA, 20 bp, synthetic construct
  source 1..20: mol_type = other DNA
catgggacgctagttgtgaa

SEQ ID NO: 22870 - DNA, 20 bp, synthetic construct
  source 1..20: mol_type = other DNA
tccgggtacaccgtgcatgt

SEQ ID NO: 22871 - DNA, 20 bp, synthetic construct
  source 1..20: mol_type = other DNA
atagatgatagtttcaccga

SEQ ID NO: 22872 - DNA, 20 bp, synthetic construct
  source 1..20: mol_type = other DNA
caggggttaggtcagatgct

SEQ ID NO: 22873 - DNA, 20 bp, synthetic construct
  source 1..20: mol_type = other DNA
tctgatacagtgcaaaccag

SEQ ID NO: 22874 - DNA, 20 bp, synthetic construct
  source 1..20: mol_type = other DNA
gtccagttacggaggaaatt

SEQ ID NO: 22875 - DNA, 20 bp, synthetic construct
  source 1..20: mol_type = other DNA
gcatctctaaatgacttcgg

SEQ ID NO: 22876 - DNA, 20 bp, synthetic construct
  source 1..20: mol_type = other DNA
acgcttacacccctctccac

SEQ ID NO: 22877 - DNA, 20 bp, synthetic construct
  source 1..20: mol_type = other DNA
gcccagggcaccgattcaat

SEQ ID NO: 22878 - DNA, 20 bp, synthetic construct
  source 1..20: mol_type = other DNA
cttgggtgtgatgcttcacc

SEQ ID NO: 22879 - DNA, 20 bp, synthetic construct
  source 1..20: mol_type = other DNA
ctggaggagaaaggaatcct

SEQ ID NO: 22880 - DNA, 20 bp, synthetic construct
  source 1..20: mol_type = other DNA
caaggaccagggttcgatta

SEQ ID NO: 22881 - DNA, 20 bp, synthetic construct
  source 1..20: mol_type = other DNA
aaaacaaaggttgagcaggg

SEQ ID NO: 22882 - DNA, 20 bp, synthetic construct
  source 1..20: mol_type = other DNA
gcaggcatgcaaaatcatat

SEQ ID NO: 22883 - DNA, 20 bp, synthetic construct
  source 1..20: mol_type = other DNA
accataaataatggaactcc

SEQ ID NO: 22884 - DNA, 20 bp, synthetic construct
  source 1..20: mol_type = other DNA
caacaaggcactgttgacaa

SEQ ID NO: 22885 - DNA, 20 bp, synthetic construct
  source 1..20: mol_type = other DNA
tttagcaggacggaaagtga

SEQ ID NO: 22886 - DNA, 20 bp, synthetic construct
  source 1..20: mol_type = other DNA
gacggcgtgcatgctgtcct

SEQ ID NO: 22887 - DNA, 20 bp, synthetic construct
  source 1..20: mol_type = other DNA
aatttaagagtgtaactcaa

SEQ ID NO: 22888 - DNA, 20 bp, synthetic construct
  source 1..20: mol_type = other DNA
ccgctgtctcattagttcaa

SEQ ID NO: 22889 - DNA, 20 bp, synthetic construct
  source 1..20: mol_type = other DNA
tgtccctagacggattggat

SEQ ID NO: 22890 - DNA, 20 bp, synthetic construct
  source 1..20: mol_type = other DNA
acctttgcacctgggcctgt

SEQ ID NO: 22891 - DNA, 20 bp, synthetic construct
  source 1..20: mol_type = other DNA
gcagacaagataagagagtc

SEQ ID NO: 22892 - DNA, 20 bp, synthetic construct
  source 1..20: mol_type = other DNA
gccccagaattagttgcttt

SEQ ID NO: 22893 - DNA, 20 bp, synthetic construct
  source 1..20: mol_type = other DNA
ttagttgatgaccttgctct

SEQ ID NO: 22894 - DNA, 20 bp, synthetic construct
  source 1..20: mol_type = other DNA
ttagatttccaaacaataat

SEQ ID NO: 22895 - DNA, 20 bp, synthetic construct
  source 1..20: mol_type = other DNA
ctaccacaaccattcaaccg

SEQ ID NO: 22896 - DNA, 20 bp, synthetic construct
  source 1..20: mol_type = other DNA
atcatcccctttgcgcgtac

SEQ ID NO: 22897 - DNA, 20 bp, synthetic construct
  source 1..20: mol_type = other DNA
tctcctcgtggaggaatcga

SEQ ID NO: 22898 - DNA, 20 bp, synthetic construct
  source 1..20: mol_type = other DNA
gtgagcaagatgtgcttaac

SEQ ID NO: 22899 - DNA, 20 bp, synthetic construct
  source 1..20: mol_type = other DNA
tttgttcatatatctaatga

SEQ ID NO: 22900 - DNA, 20 bp, synthetic construct
  source 1..20: mol_type = other DNA
tgcatcaatctggatgtcat

SEQ ID NO: 22901 - DNA, 20 bp, synthetic construct
  source 1..20: mol_type = other DNA
gatagagttctaaatctagt

SEQ ID NO: 22902 - DNA, 20 bp, synthetic construct
  source 1..20: mol_type = other DNA
ttcaatctaagttcatccga

SEQ ID NO: 22903 - DNA, 20 bp, synthetic construct
  source 1..20: mol_type = other DNA
gagtacattattcacaaggt

SEQ ID NO: 22904 - DNA, 20 bp, synthetic construct
  source 1..20: mol_type = other DNA
gacaatgatatacctgatta

SEQ ID NO: 22905 - DNA, 20 bp, synthetic construct
  source 1..20: mol_type = other DNA
aagtcaccaaaaggttccac

SEQ ID NO: 22906 - DNA, 20 bp, synthetic construct
  source 1..20: mol_type = other DNA
gtgagagttcaatactcacc

SEQ ID NO: 22907 - DNA, 20 bp, synthetic construct
  source 1..20: mol_type = other DNA
agtactggggcttgatcctc

SEQ ID NO: 22908 - DNA, 20 bp, synthetic construct
  source 1..20: mol_type = other DNA
tgaccagaatacagaaaaca

SEQ ID NO: 22909 - DNA, 20 bp, synthetic construct
  source 1..20: mol_type = other DNA
caatagctgactgtaaaaaa

SEQ ID NO: 22910 - DNA, 20 bp, synthetic construct
  source 1..20: mol_type = other DNA
tgctgcattctgatcaagga

SEQ ID NO: 22911 - DNA, 20 bp, synthetic construct
  source 1..20: mol_type = other DNA
ctacaaagtggtacccactt

SEQ ID NO: 22912 - DNA, 20 bp, synthetic construct
  source 1..20: mol_type = other DNA
atgactaagccattgcctct

SEQ ID NO: 22913 - DNA, 20 bp, synthetic construct
  source 1..20: mol_type = other DNA
gacaaggagagggttttggg

SEQ ID NO: 22914 - DNA, 20 bp, synthetic construct
  source 1..20: mol_type = other DNA
tcaactcaagaccaatatat

SEQ ID NO: 22915 - DNA, 20 bp, synthetic construct
  source 1..20: mol_type = other DNA
aaggaagaaacatataggaa

SEQ ID NO: 22916 - DNA, 20 bp, synthetic construct
  source 1..20: mol_type = other DNA
gggacctcatatgatttgga

SEQ ID NO: 22917 - DNA, 20 bp, synthetic construct
  source 1..20: mol_type = other DNA
gaaatagttaaccaagactg

SEQ ID NO: 22918 - DNA, 20 bp, synthetic construct
  source 1..20: mol_type = other DNA
agatttcagattcagctctt

SEQ ID NO: 22919 - DNA, 20 bp, synthetic construct
  source 1..20: mol_type = other DNA
cctcatcataggccactaca

SEQ ID NO: 22920 - DNA, 20 bp, synthetic construct
  source 1..20: mol_type = other DNA
tcgtgaggacccttatgtta

SEQ ID NO: 22921 - DNA, 20 bp, synthetic construct
  source 1..20: mol_type = other DNA
ggttttaagatgcttccgca

SEQ ID NO: 22922 - DNA, 20 bp, synthetic construct
  source 1..20: mol_type = other DNA
tcaggggagacagacctttg

SEQ ID NO: 22923 - DNA, 20 bp, synthetic construct
  source 1..20: mol_type = other DNA
taatatgctatctacagtat

SEQ ID NO: 22924 - DNA, 20 bp, synthetic construct
  source 1..20: mol_type = other DNA
ccacttggggccgaataacc

SEQ ID NO: 22925 - DNA, 20 bp, synthetic construct
  source 1..20: mol_type = other DNA
gtggatttgcaagagcagtg

SEQ ID NO: 22926 - DNA, 20 bp, synthetic construct
  source 1..20: mol_type = other DNA
atttcaaaaccattgaggaa

SEQ ID NO: 22927 - DNA, 20 bp, synthetic construct
  source 1..20: mol_type = other DNA
ccttagctaaggaatgtcta

SEQ ID NO: 22928 - DNA, 20 bp, synthetic construct
  source 1..20: mol_type = other DNA
taataccaatcaccaacaga

SEQ ID NO: 22929 - DNA, 20 bp, synthetic construct
  source 1..20: mol_type = other DNA
ccacacattatgtttctcag

SEQ ID NO: 22930 - DNA, 20 bp, synthetic construct
  source 1..20: mol_type = other DNA
cttttgccggaagcacacta

SEQ ID NO: 22931 - DNA, 20 bp, synthetic construct
  source 1..20: mol_type = other DNA
cacaaacgcatcaaatgccc

SEQ ID NO: 22932 - DNA, 20 bp, synthetic construct
  source 1..20: mol_type = other DNA
cttgataataagagaacctt

SEQ ID NO: 22933 - DNA, 20 bp, synthetic construct
  source 1..20: mol_type = other DNA
catagaatgtgcctgtagag

SEQ ID NO: 22934 - DNA, 20 bp, synthetic construct
  source 1..20: mol_type = other DNA
gcttggaggcatcaaaggag

SEQ ID NO: 22935 - DNA, 20 bp, synthetic construct
  source 1..20: mol_type = other DNA
tatgctttttaaaacccaaa

SEQ ID NO: 22936 - DNA, 20 bp, synthetic construct
  source 1..20: mol_type = other DNA
ggcaataaacagagaggtgt

SEQ ID NO: 22937 - DNA, 20 bp, synthetic construct
  source 1..20: mol_type = other DNA
gaataaagactcacaacaag

SEQ ID NO: 22938 - DNA, 20 bp, synthetic construct
  source 1..20: mol_type = other DNA
aaaccattttagtgtaacat

SEQ ID NO: 22939 - DNA, 20 bp, synthetic construct
  source 1..20: mol_type = other DNA
cttggagatttgggaagagc

SEQ ID NO: 22940 - DNA, 20 bp, synthetic construct
  source 1..20: mol_type = other DNA
aacatagctccatacccctt

SEQ ID NO: 22941 - DNA, 20 bp, synthetic construct
  source 1..20: mol_type = other DNA
cttactgttgtagggttttg

SEQ ID NO: 22942 - DNA, 20 bp, synthetic construct
  source 1..20: mol_type = other DNA
gatggaaaaattgttaatat

SEQ ID NO: 22943 - DNA, 20 bp, synthetic construct
  source 1..20: mol_type = other DNA
ataaccaatgaagtatccat

SEQ ID NO: 22944 - DNA, 20 bp, synthetic construct
  source 1..20: mol_type = other DNA
ttcctaaattactacttgta

SEQ ID NO: 22945 - DNA, 20 bp, synthetic construct
  source 1..20: mol_type = other DNA
atattgggtagttgtagcag

SEQ ID NO: 22946 - DNA, 20 bp, synthetic construct
  source 1..20: mol_type = other DNA
aatccacaaccatttgttaa

SEQ ID NO: 22947 - DNA, 20 bp, synthetic construct
  source 1..20: mol_type = other DNA
ctatatctatttacaataac

SEQ ID NO: 22948 - DNA, 20 bp, synthetic construct
  source 1..20: mol_type = other DNA
atgactacacgagacagtga

SEQ ID NO: 22949 - DNA, 20 bp, synthetic construct
  source 1..20: mol_type = other DNA
ggtcagtttctctcctttgc

SEQ ID NO: 22950 - DNA, 20 bp, synthetic construct
  source 1..20: mol_type = other DNA
ctccatcctcttgcaaggac

SEQ ID NO: 22951 - DNA, 20 bp, synthetic construct
  source 1..20: mol_type = other DNA
catcagaaaaagaacgaaat

SEQ ID NO: 22952 - DNA, 20 bp, synthetic construct
  source 1..20: mol_type = other DNA
aatcctggccatcaagatga

SEQ ID NO: 22953 - DNA, 20 bp, synthetic construct
  source 1..20: mol_type = other DNA
agagatcactctgaaaagaa

SEQ ID NO: 22954 - DNA, 20 bp, synthetic construct
  source 1..20: mol_type = other DNA
tcaaaacgacagaatgccag

SEQ ID NO: 22955 - DNA, 20 bp, synthetic construct
  source 1..20: mol_type = other DNA
agcttgccagaaaagcttgc

SEQ ID NO: 22956 - DNA, 20 bp, synthetic construct
  source 1..20: mol_type = other DNA
tacgttacattaatgataca

SEQ ID NO: 22957 - DNA, 20 bp, synthetic construct
  source 1..20: mol_type = other DNA
gctaatgaagcaaattccaa

SEQ ID NO: 22958 - DNA, 20 bp, synthetic construct
  source 1..20: mol_type = other DNA
tcccctcaggctcctgcgaa

SEQ ID NO: 22959 - DNA, 20 bp, synthetic construct
  source 1..20: mol_type = other DNA
cgaagtgccagaaactctgg

SEQ ID NO: 22960 - DNA, 20 bp, synthetic construct
  source 1..20: mol_type = other DNA
accaaaccaggtccggacaa

SEQ ID NO: 22961 - DNA, 20 bp, synthetic construct
  source 1..20: mol_type = other DNA
ttaatctgtgggttgagaca

SEQ ID NO: 22962 - DNA, 20 bp, synthetic construct
  source 1..20: mol_type = other DNA
aaagttctgctgtcgttgtt

SEQ ID NO: 22963 - DNA, 20 bp, synthetic construct
  source 1..20: mol_type = other DNA
ctccttttagcaaagtacta

SEQ ID NO: 22964 - DNA, 20 bp, synthetic construct
  source 1..20: mol_type = other DNA
aactacgcaactgtaaactc

SEQ ID NO: 22965 - DNA, 20 bp, synthetic construct
  source 1..20: mol_type = other DNA
aacatgccacagttagaggg

SEQ ID NO: 22966 - DNA, 20 bp, synthetic construct
  source 1..20: mol_type = other DNA
gctcagctgtgatgggtgac

SEQ ID NO: 22967 - DNA, 20 bp, synthetic construct
  source 1..20: mol_type = other DNA
gacatatctttccttgcagg

SEQ ID NO: 22968 - DNA, 20 bp, synthetic construct
  source 1..20: mol_type = other DNA
tttggctgaaaccctacgaa

SEQ ID NO: 22969 - DNA, 20 bp, synthetic construct
  source 1..20: mol_type = other DNA
tgaccccttcacattactca

SEQ ID NO: 22970 - DNA, 20 bp, synthetic construct
  source 1..20: mol_type = other DNA
ttatttcagatagcaacaat

SEQ ID NO: 22971 - DNA, 20 bp, synthetic construct
  source 1..20: mol_type = other DNA
gcacaaacaacagtgatggt

SEQ ID NO: 22972 - DNA, 20 bp, synthetic construct
  source 1..20: mol_type = other DNA
gtgctggtgccttactattg

SEQ ID NO: 22973 - DNA, 20 bp, synthetic construct
  source 1..20: mol_type = other DNA
actcagcaagccaaataaca

SEQ ID NO: 22974 - DNA, 20 bp, synthetic construct
  source 1..20: mol_type = other DNA
gagaaaaaggtcaacgataa

SEQ ID NO: 22975 - DNA, 20 bp, synthetic construct
  source 1..20: mol_type = other DNA
agccaaggaagtggctctgt

SEQ ID NO: 22976 - DNA, 20 bp, synthetic construct
  source 1..20: mol_type = other DNA
gtttggaaaaggaggagttg

SEQ ID NO: 22977 - DNA, 20 bp, synthetic construct
  source 1..20: mol_type = other DNA
acatcttaagtgcaaagtcc

SEQ ID NO: 22978 - DNA, 20 bp, synthetic construct
  source 1..20: mol_type = other DNA
aagagatgtaaacaaggaaa

SEQ ID NO: 22979 - DNA, 20 bp, synthetic construct
  source 1..20: mol_type = other DNA
cattggcaagatgtttgagt

SEQ ID NO: 22980 - DNA, 20 bp, synthetic construct
  source 1..20: mol_type = other DNA
tagaatcctaattgggttct

SEQ ID NO: 22981 - DNA, 20 bp, synthetic construct
  source 1..20: mol_type = other DNA
aatagacggaccagacacct

SEQ ID NO: 22982 - DNA, 20 bp, synthetic construct
  source 1..20: mol_type = other DNA
agctgtgcatgctgacatgg

SEQ ID NO: 22983 - DNA, 20 bp, synthetic construct
  source 1..20: mol_type = other DNA
cctgaccttgtttgtggaag

SEQ ID NO: 22984 - DNA, 20 bp, synthetic construct
  source 1..20: mol_type = other DNA
ccacctagccatcatggcag

SEQ ID NO: 22985 - DNA, 20 bp, synthetic construct
  source 1..20: mol_type = other DNA
aaaagccgcactgtctgaag

SEQ ID NO: 22986 - DNA, 20 bp, synthetic construct
  source 1..20: mol_type = other DNA
tgtgaaatcagaacacacag

SEQ ID NO: 22987 - DNA, 20 bp, synthetic construct
  source 1..20: mol_type = other DNA
ggaaatgggagaggcagcag

SEQ ID NO: 22988 - DNA, 20 bp, synthetic construct
  source 1..20: mol_type = other DNA
caacctatctctagcagcca

SEQ ID NO: 22989 - DNA, 20 bp, synthetic construct
  source 1..20: mol_type = other DNA
aataataggcccaggattgc

SEQ ID NO: 22990 - DNA, 20 bp, synthetic construct
  source 1..20: mol_type = other DNA
tccaatggtgactcagttag

SEQ ID NO: 22991 - DNA, 20 bp, synthetic construct
  source 1..20: mol_type = other DNA
gtgcacaagggaagagttca

SEQ ID NO: 22992 - DNA, 20 bp, synthetic construct
  source 1..20: mol_type = other DNA
cgctcatcaccagtggatga

SEQ ID NO: 22993 - DNA, 20 bp, synthetic construct
  source 1..20: mol_type = other DNA
ttgtgccacggtttgagcaa

SEQ ID NO: 22994 - DNA, 20 bp, synthetic construct
  source 1..20: mol_type = other DNA
ttttccaattcaaattacct

SEQ ID NO: 22995 - DNA, 20 bp, synthetic construct
  source 1..20: mol_type = other DNA
aatggtcatacttacgtttg

SEQ ID NO: 22996 - DNA, 20 bp, synthetic construct
  source 1..20: mol_type = other DNA
agtgtggattgctttgttgc

SEQ ID NO: 22997 - DNA, 20 bp, synthetic construct
  source 1..20: mol_type = other DNA
attagtaccggttggtttga

SEQ ID NO: 22998 - DNA, 20 bp, synthetic construct
  source 1..20: mol_type = other DNA
tcagctgttgctgtcgtggg

SEQ ID NO: 22999 - DNA, 20 bp, synthetic construct
  source 1..20: mol_type = other DNA
tatagtaacgagtcttggtt

SEQ ID NO: 23000 - DNA, 20 bp, synthetic construct
  source 1..20: mol_type = other DNA
tttaaaacatatgcttttga

SEQ ID NO: 23001 - DNA, 20 bp, synthetic construct
  source 1..20: mol_type = other DNA
attgaagaagttgaactttt

SEQ ID NO: 23002 - DNA, 20 bp, synthetic construct
  source 1..20: mol_type = other DNA
atttttgacattgagacagt

SEQ ID NO: 23003 - DNA, 20 bp, synthetic construct
  source 1..20: mol_type = other DNA
attgttttgtttactgactc

SEQ ID NO: 23004 - DNA, 20 bp, synthetic construct
  source 1..20: mol_type = other DNA
gttgtgccatccgaaaagga

SEQ ID NO: 23005 - DNA, 20 bp, synthetic construct
  source 1..20: mol_type = other DNA
ccccattttatttcacaagg

SEQ ID NO: 23006 - DNA, 20 bp, synthetic construct
  source 1..20: mol_type = other DNA
attatagtcagtgtcgaaca

SEQ ID NO: 23007 - DNA, 20 bp, synthetic construct
  source 1..20: mol_type = other DNA
ttgtactcagtagttttgct

SEQ ID NO: 23008 - DNA, 20 bp, synthetic construct
  source 1..20: mol_type = other DNA
gttgtgtggaagcatataac

SEQ ID NO: 23009 - DNA, 20 bp, synthetic construct
  source 1..20: mol_type = other DNA
gtgcaacgttcattttatgt

SEQ ID NO: 23010 - DNA, 20 bp, synthetic construct
  source 1..20: mol_type = other DNA
tgttataacacagcgcttat

SEQ ID NO: 23011 - DNA, 20 bp, synthetic construct
  source 1..20: mol_type = other DNA
tgttatgcctatttagcaaa

SEQ ID NO: 23012 - DNA, 20 bp, synthetic construct
  source 1..20: mol_type = other DNA
ggtgcgtgtggttcccctgg

SEQ ID NO: 23013 - DNA, 20 bp, synthetic construct
  source 1..20: mol_type = other DNA
attattgtggctgctattca

SEQ ID NO: 23014 - DNA, 20 bp, synthetic construct
  source 1..20: mol_type = other DNA
tgtacacattggtgcactta

SEQ ID NO: 23015 - DNA, 20 bp, synthetic construct
  source 1..20: mol_type = other DNA
aattcaaaggagtgggcata

SEQ ID NO: 23016 - DNA, 20 bp, synthetic construct
  source 1..20: mol_type = other DNA
gcattcatgtatgcatatgt

SEQ ID NO: 23017 - DNA, 20 bp, synthetic construct
  source 1..20: mol_type = other DNA
agaggtgctgttttgggtta

SEQ ID NO: 23018 - DNA, 20 bp, synthetic construct
  source 1..20: mol_type = other DNA
atgttgactaatggttctgg

SEQ ID NO: 23019 - DNA, 20 bp, synthetic construct
  source 1..20: mol_type = other DNA
gtcaagacttcaaaactttt

SEQ ID NO: 23020 - DNA, 20 bp, synthetic construct
  source 1..20: mol_type = other DNA
atgatcctaaattgatggga

SEQ ID NO: 23021 - DNA, 20 bp, synthetic construct
  source 1..20: mol_type = other DNA
tttttgtggatgacatcact

SEQ ID NO: 23022 - DNA, 20 bp, synthetic construct
  source 1..20: mol_type = other DNA
tggagtctttttctgttaca

SEQ ID NO: 23023 - DNA, 20 bp, synthetic construct
  source 1..20: mol_type = other DNA
gcactaagtgcgcctatgat

SEQ ID NO: 23024 - DNA, 20 bp, synthetic construct
  source 1..20: mol_type = other DNA
atgttagtgatgcttatgca

SEQ ID NO: 23025 - DNA, 20 bp, synthetic construct
  source 1..20: mol_type = other DNA
ctataggacccgatgtcttt

SEQ ID NO: 23026 - DNA, 20 bp, synthetic construct
  source 1..20: mol_type = other DNA
ataggcgtcaacttgatgtt

SEQ ID NO: 23027 - DNA, 20 bp, synthetic construct
  source 1..20: mol_type = other DNA
ctggtagtcatagtttgttc

SEQ ID NO: 23028 - DNA, 20 bp, synthetic construct
  source 1..20: mol_type = other DNA
ctaatgaaaatgccataaac

SEQ ID NO: 23029 - DNA, 20 bp, synthetic construct
  source 1..20: mol_type = other DNA
gttcatttgttggtgctgat

SEQ ID NO: 23030 - DNA, 20 bp, synthetic construct
  source 1..20: mol_type = other DNA
attttgtttctgtattgaag

SEQ ID NO: 23031 - DNA, 20 bp, synthetic construct
  source 1..20: mol_type = other DNA
ctttttggactatgttttgc

SEQ ID NO: 23032 - DNA, 20 bp, synthetic construct
  source 1..20: mol_type = other DNA
tttgttttgcttgttgcata

SEQ ID NO: 23033 - DNA, 20 bp, synthetic construct
  source 1..20: mol_type = other DNA
tcgctacctgtttatcataa

SEQ ID NO: 23034 - DNA, 20 bp, synthetic construct
  source 1..20: mol_type = other DNA
tacgttgctgtttatgccaa

SEQ ID NO: 23035 - DNA, 20 bp, synthetic construct
  source 1..20: mol_type = other DNA
agcgccaggctggagtctgc

SEQ ID NO: 23036 - DNA, 20 bp, synthetic construct
  source 1..20: mol_type = other DNA
agcaaacttgttacttctgg

SEQ ID NO: 23037 - DNA, 20 bp, synthetic construct
  source 1..20: mol_type = other DNA
gatgctattacacaaacttc

SEQ ID NO: 23038 - DNA, 20 bp, synthetic construct
  source 1..20: mol_type = other DNA
aattattatagaatcacatc

SEQ ID NO: 23039 - DNA, 20 bp, synthetic construct
  source 1..20: mol_type = other DNA
ccacatttaccaatcatata

SEQ ID NO: 23040 - DNA, 20 bp, synthetic construct
  source 1..20: mol_type = other DNA
ggacactataaatactccag

SEQ ID NO: 23041 - DNA, 20 bp, synthetic construct
  source 1..20: mol_type = other DNA
atgtacttcgcaaacagttt

SEQ ID NO: 23042 - DNA, 20 bp, synthetic construct
  source 1..20: mol_type = other DNA
tgtgcccaaagaccatccac

SEQ ID NO: 23043 - DNA, 20 bp, synthetic construct
  source 1..20: mol_type = other DNA
acaggtagtgacggaaagct

SEQ ID NO: 23044 - DNA, 20 bp, synthetic construct
  source 1..20: mol_type = other DNA
aagccagataggatcaacaa

SEQ ID NO: 23045 - DNA, 20 bp, synthetic construct
  source 1..20: mol_type = other DNA
aataaaccaccagaatctag

SEQ ID NO: 23046 - DNA, 20 bp, synthetic construct
  source 1..20: mol_type = other DNA
ttgcatgggatctggccgga

SEQ ID NO: 23047 - DNA, 20 bp, synthetic construct
  source 1..20: mol_type = other DNA
ttacgagcgctgagggattt

SEQ ID NO: 23048 - DNA, 20 bp, synthetic construct
  source 1..20: mol_type = other DNA
acatgtgtgaaaggtgaacc

SEQ ID NO: 23049 - DNA, 20 bp, synthetic construct
  source 1..20: mol_type = other DNA
ggcgttgtaatcagcacaga

SEQ ID NO: 23050 - DNA, 20 bp, synthetic construct
  source 1..20: mol_type = other DNA
gtgacctacatagttctaac

SEQ ID NO: 23051 - DNA, 20 bp, synthetic construct
  source 1..20: mol_type = other DNA
caatctggtgaaggggttta

SEQ ID NO: 23052 - DNA, 20 bp, synthetic construct
  source 1..20: mol_type = other DNA
tctgagtatggagttaaaac

SEQ ID NO: 23053 - DNA, 20 bp, synthetic construct
  source 1..20: mol_type = other DNA
gacagtctgatgattacaca

SEQ ID NO: 23054 - DNA, 20 bp, synthetic construct
  source 1..20: mol_type = other DNA
gaggtgactgatagttacga

SEQ ID NO: 23055 - DNA, 20 bp, synthetic construct
  source 1..20: mol_type = other DNA
acggaggggaaggagacaga

SEQ ID NO: 23056 - DNA, 20 bp, synthetic construct
  source 1..20: mol_type = other DNA
gaaccggctttggccactct

SEQ ID NO: 23057 - DNA, 20 bp, synthetic construct
  source 1..20: mol_type = other DNA
gaaataaagccagtgataag

SEQ ID NO: 23058 - DNA, 20 bp, synthetic construct
  source 1..20: mol_type = other DNA
cccttgtttgaagagctcct

SEQ ID NO: 23059 - DNA, 20 bp, synthetic construct
  source 1..20: mol_type = other DNA
ctgaaaaaaggcagaaacat

SEQ ID NO: 23060 - DNA, 20 bp, synthetic construct
  source 1..20: mol_type = other DNA
atacaaaagtactatttcaa

SEQ ID NO: 23061 - DNA, 20 bp, synthetic construct
  source 1..20: mol_type = other DNA
accatagcatatgagaaagc

SEQ ID NO: 23062 - DNA, 20 bp, synthetic construct
  source 1..20: mol_type = other DNA
ctaactcagcaatggctaac

SEQ ID NO: 23063 - DNA, 20 bp, synthetic construct
  source 1..20: mol_type = other DNA
ggactaagttcagatcaagt

SEQ ID NO: 23064 - DNA, 20 bp, synthetic construct
  source 1..20: mol_type = other DNA
agacagtcagttaccttcaa

SEQ ID NO: 23065 - DNA, 20 bp, synthetic construct
  source 1..20: mol_type = other DNA
gatccagcaatcagcaacag

SEQ ID NO: 23066 - DNA, 20 bp, synthetic construct
  source 1..20: mol_type = other DNA
tacctcttacctcatttctt

SEQ ID NO: 23067 - DNA, 20 bp, synthetic construct
  source 1..20: mol_type = other DNA
gtctgatcctgcaaaagact

SEQ ID NO: 23068 - DNA, 20 bp, synthetic construct
  source 1..20: mol_type = other DNA
agcagtgaaggaagaaccac

SEQ ID NO: 23069 - DNA, 20 bp, synthetic construct
  source 1..20: mol_type = other DNA
aagcccggataaaactgaga

SEQ ID NO: 23070 - DNA, 20 bp, synthetic construct
  source 1..20: mol_type = other DNA
tgttcgaggatcacccccct

SEQ ID NO: 23071 - DNA, 20 bp, synthetic construct
  source 1..20: mol_type = other DNA
cttcccgcacgacactgatc

SEQ ID NO: 23072 - DNA, 20 bp, synthetic construct
  source 1..20: mol_type = other DNA
tctaacaacaatctcccaca

SEQ ID NO: 23073 - DNA, 20 bp, synthetic construct
  source 1..20: mol_type = other DNA
ctctgttccctcaaagttac

SEQ ID NO: 23074 - DNA, 20 bp, synthetic construct
  source 1..20: mol_type = other DNA
atcagcaaacggctgtttgc

SEQ ID NO: 23075 - DNA, 20 bp, synthetic construct
  source 1..20: mol_type = other DNA
tcaggcattcggtggaaatt

SEQ ID NO: 23076 - DNA, 20 bp, synthetic construct
  source 1..20: mol_type = other DNA
gatttggtgcatatcattgg

SEQ ID NO: 23077 - DNA, 20 bp, synthetic construct
  source 1..20: mol_type = other DNA
gaatcttatctgcattttca

SEQ ID NO: 23078 - DNA, 20 bp, synthetic construct
  source 1..20: mol_type = other DNA
tacagatcagaagattcggt

SEQ ID NO: 23079 - DNA, 20 bp, synthetic construct
  source 1..20: mol_type = other DNA
tcttgaatatgcccctataa

SEQ ID NO: 23080 - DNA, 20 bp, synthetic construct
  source 1..20: mol_type = other DNA
aagaagattggttgacgttt

SEQ ID NO: 23081 - DNA, 20 bp, synthetic construct
  source 1..20: mol_type = other DNA
gcgtgcatgtcaagtcatag

SEQ ID NO: 23082 - DNA, 20 bp, synthetic construct
  source 1..20: mol_type = other DNA
aatggctatatttgctgaac

SEQ ID NO: 23083 - DNA, 20 bp, synthetic construct
  source 1..20: mol_type = other DNA
aaagaaagagatctgtgcaa

SEQ ID NO: 23084 - DNA, 20 bp, synthetic construct
  source 1..20: mol_type = other DNA
aatgtcaagatgttgctttt

SEQ ID NO: 23085 - DNA, 20 bp, synthetic construct
  source 1..20: mol_type = other DNA
gagaatgattgatcacagta

SEQ ID NO: 23086 - DNA, 20 bp, synthetic construct
  source 1..20: mol_type = other DNA
attgagatctcacatgtgga

SEQ ID NO: 23087 - DNA, 20 bp, synthetic construct
  source 1..20: mol_type = other DNA
attggatcaggtagatagag

SEQ ID NO: 23088 - DNA, 20 bp, synthetic construct
  source 1..20: mol_type = other DNA
tgaggaacttcatgatgtcc

SEQ ID NO: 23089 - DNA, 20 bp, synthetic construct
  source 1..20: mol_type = other DNA
agtttcaggaaatgttgtta

SEQ ID NO: 23090 - DNA, 20 bp, synthetic construct
  source 1..20: mol_type = other DNA
tttagtggcacgtaattatg

SEQ ID NO: 23091 - DNA, 20 bp, synthetic construct
  source 1..20: mol_type = other DNA
aaatttgttagatcagctac

SEQ ID NO: 23092 - DNA, 20 bp, synthetic construct
  source 1..20: mol_type = other DNA
cacattgaaccatgtgaata

SEQ ID NO: 23093 - DNA, 20 bp, synthetic construct
  source 1..20: mol_type = other DNA
tggtatattgtcatttatag

SEQ ID NO: 23094 - DNA, 20 bp, synthetic construct
  source 1..20: mol_type = other DNA
aattctttacgggaagagtc

SEQ ID NO: 23095 - DNA, 20 bp, synthetic construct
  source 1..20: mol_type = other DNA
aaagccaaatcctgagttat

SEQ ID NO: 23096 - DNA, 20 bp, synthetic construct
  source 1..20: mol_type = other DNA
tgcattcagacggcgtttag

SEQ ID NO: 23097 - DNA, 20 bp, synthetic construct
  source 1..20: mol_type = other DNA
atacaagatcactccggaga

SEQ ID NO: 23098 - DNA, 20 bp, synthetic construct
  source 1..20: mol_type = other DNA
catgttcatcccagccagtg

SEQ ID NO: 23099 - DNA, 20 bp, synthetic construct
  source 1..20: mol_type = other DNA
gagcgccgagcgttcagcac

SEQ ID NO: 23100 - DNA, 20 bp, synthetic construct
  source 1..20: mol_type = other DNA
ccatggatgtttccccgttc

SEQ ID NO: 23101 - DNA, 20 bp, synthetic construct
  source 1..20: mol_type = other DNA
gaattctcagattttatcac

SEQ ID NO: 23102 - DNA, 20 bp, synthetic construct
  source 1..20: mol_type = other DNA
tactctcatcaactgtgtat

SEQ ID NO: 23103 - DNA, 20 bp, synthetic construct
  source 1..20: mol_type = other DNA
ggagtggtttgctatttagc

SEQ ID NO: 23104 - DNA, 20 bp, synthetic construct
  source 1..20: mol_type = other DNA
ctaattccaggaggtagtgt

SEQ ID NO: 23105 - DNA, 20 bp, synthetic construct
  source 1..20: mol_type = other DNA
tctgtgacatcttcagtata

SEQ ID NO: 23106 - DNA, 20 bp, synthetic construct
  source 1..20: mol_type = other DNA
aacaatgccattgatcccac

SEQ ID NO: 23107 - DNA, 20 bp, synthetic construct
  source 1..20: mol_type = other DNA
caaccaatagaaagtatcct

SEQ ID NO: 23108 - DNA, 20 bp, synthetic construct
  source 1..20: mol_type = other DNA
acggtcgcattgcaattcgt

SEQ ID NO: 23109 - DNA, 20 bp, synthetic construct
  source 1..20: mol_type = other DNA
gacacatctacaatgttgac

SEQ ID NO: 23110 - DNA, 20 bp, synthetic construct
  source 1..20: mol_type = other DNA
agcttgccttattatagtcc

SEQ ID NO: 23111 - DNA, 20 bp, synthetic construct
  source 1..20: mol_type = other DNA
tttggacctgccgaattggc

SEQ ID NO: 23112 - DNA, 20 bp, synthetic construct
  source 1..20: mol_type = other DNA
tttgagccccaacgccttgg

SEQ ID NO: 23113 - DNA, 20 bp, synthetic construct
  source 1..20: mol_type = other DNA
tgccaatcggagggcgacag

SEQ ID NO: 23114 - DNA, 20 bp, synthetic construct
  source 1..20: mol_type = other DNA
ctaggggctaaggatgtcct

SEQ ID NO: 23115 - DNA, 20 bp, synthetic construct
  source 1..20: mol_type = other DNA
gacaatggcaggcaacatgg

SEQ ID NO: 23116 - DNA, 20 bp, synthetic construct
  source 1..20: mol_type = other DNA
agtcaaaatggcttcttcat

SEQ ID NO: 23117 - DNA, 20 bp, synthetic construct
  source 1..20: mol_type = other DNA
caattctggtacaatcgtga

SEQ ID NO: 23118 - DNA, 20 bp, synthetic construct
  source 1..20: mol_type = other DNA
tctctacccacaccagtttc

SEQ ID NO: 23119 - DNA, 20 bp, synthetic construct
  source 1..20: mol_type = other DNA
aaccatgaccataaccccca

SEQ ID NO: 23120 - DNA, 20 bp, synthetic construct
  source 1..20: mol_type = other DNA
gtttactgactttttgcagg

SEQ ID NO: 23121 - DNA, 20 bp, synthetic construct
  source 1..20: mol_type = other DNA
tttggctctcaattacaccc

SEQ ID NO: 23122 - DNA, 20 bp, synthetic construct
  source 1..20: mol_type = other DNA
ttctagctttaaatttgtta

SEQ ID NO: 23123 - DNA, 20 bp, synthetic construct
  source 1..20: mol_type = other DNA
gaacgcccgccccttgacgc

SEQ ID NO: 23124 - DNA, 20 bp, synthetic construct
  source 1..20: mol_type = other DNA
cgaatccaacccagggccta

SEQ ID NO: 23125 - DNA, 20 bp, synthetic construct
  source 1..20: mol_type = other DNA
ggacggtgaaccagaagttc

SEQ ID NO: 23126 - DNA, 20 bp, synthetic construct
  source 1..20: mol_type = other DNA
agacgaacagtataagacag

SEQ ID NO: 23127 - DNA, 20 bp, synthetic construct
  source 1..20: mol_type = other DNA
tttttctcttgtgatttatt

SEQ ID NO: 23128 - DNA, 20 bp, synthetic construct
  source 1..20: mol_type = other DNA
agtggatgtgattgatcaat

SEQ ID NO: 23129 - DNA, 20 bp, synthetic construct
  source 1..20: mol_type = other DNA
tcacggtacttacattggat

SEQ ID NO: 23130 - DNA, 20 bp, synthetic construct
  source 1..20: mol_type = other DNA
caatggacccatttcagagt

SEQ ID NO: 23131 - DNA, 20 bp, synthetic construct
  source 1..20: mol_type = other DNA
caactacgaggaaggtgacc

SEQ ID NO: 23132 - DNA, 20 bp, synthetic construct
  source 1..20: mol_type = other DNA
aaggctcttccgcccgtttg

SEQ ID NO: 23133 - DNA, 20 bp, synthetic construct
  source 1..20: mol_type = other DNA
ccgttaccctaaaattccct

SEQ ID NO: 23134 - DNA, 20 bp, synthetic construct
  source 1..20: mol_type = other DNA
acattcctgatacccttaat

SEQ ID NO: 23135 - DNA, 20 bp, synthetic construct
  source 1..20: mol_type = other DNA
tggtgggagacattggcaag

SEQ ID NO: 23136 - DNA, 20 bp, synthetic construct
  source 1..20: mol_type = other DNA
caaggaaacagcagggagct

SEQ ID NO: 23137 - DNA, 20 bp, synthetic construct
  source 1..20: mol_type = other DNA
tcaacccccccataccgcaa

SEQ ID NO: 23138 - DNA, 20 bp, synthetic construct
  source 1..20: mol_type = other DNA
ccaaaacccgccaaaaacga

SEQ ID NO: 23139 - DNA, 20 bp, synthetic construct
  source 1..20: mol_type = other DNA
atctgcttctgcatgatgca

SEQ ID NO: 23140 - DNA, 20 bp, synthetic construct
  source 1..20: mol_type = other DNA
cctatgtaatccgttatcac

SEQ ID NO: 23141 - DNA, 20 bp, synthetic construct
  source 1..20: mol_type = other DNA
ttgaaaggctctctatctta

SEQ ID NO: 23142 - DNA, 20 bp, synthetic construct
  source 1..20: mol_type = other DNA
aagcccccttcacaataatg

SEQ ID NO: 23143 - DNA, 20 bp, synthetic construct
  source 1..20: mol_type = other DNA
agttatcacccctgaacttg

SEQ ID NO: 23144 - DNA, 20 bp, synthetic construct
  source 1..20: mol_type = other DNA
aaaagcccttgataaggatg

SEQ ID NO: 23145 - DNA, 20 bp, synthetic construct
  source 1..20: mol_type = other DNA
tcctatgcccaatccattta

SEQ ID NO: 23146 - DNA, 20 bp, synthetic construct
  source 1..20: mol_type = other DNA
gaggttaattaaatgtggtg

SEQ ID NO: 23147 - DNA, 20 bp, synthetic construct
  source 1..20: mol_type = other DNA
atcttgttgtgttagaagtg

SEQ ID NO: 23148 - DNA, 20 bp, synthetic construct
  source 1..20: mol_type = other DNA
actaggagtgtcatccacag

SEQ ID NO: 23149 - DNA, 20 bp, synthetic construct
  source 1..20: mol_type = other DNA
tagtggagagaatcctccac

SEQ ID NO: 23150 - DNA, 20 bp, synthetic construct
  source 1..20: mol_type = other DNA
agttgcattcataatacata

SEQ ID NO: 23151 - DNA, 20 bp, synthetic construct
  source 1..20: mol_type = other DNA
tactcttcacaatgacggat

SEQ ID NO: 23152 - DNA, 20 bp, synthetic construct
  source 1..20: mol_type = other DNA
ggaggaagaactaggtgtga

SEQ ID NO: 23153 - DNA, 20 bp, synthetic construct
  source 1..20: mol_type = other DNA
caagaactggacaaatgaca

SEQ ID NO: 23154 - DNA, 20 bp, synthetic construct
  source 1..20: mol_type = other DNA
ggcaaacaataaacgagaca

SEQ ID NO: 23155 - DNA, 20 bp, synthetic construct
  source 1..20: mol_type = other DNA
tacaagcccacagaaattgg

SEQ ID NO: 23156 - DNA, 20 bp, synthetic construct
  source 1..20: mol_type = other DNA
attaccaacccaagtccaga

SEQ ID NO: 23157 - DNA, 20 bp, synthetic construct
  source 1..20: mol_type = other DNA
catggtagattcgatccatg

SEQ ID NO: 23158 - DNA, 20 bp, synthetic construct
  source 1..20: mol_type = other DNA
ggatgtaaatccacatatga

SEQ ID NO: 23159 - DNA, 20 bp, synthetic construct
  source 1..20: mol_type = other DNA
cccattagctctaaatcgta

SEQ ID NO: 23160 - DNA, 20 bp, synthetic construct
  source 1..20: mol_type = other DNA
atctgccacaaatttcctag

SEQ ID NO: 23161 - DNA, 20 bp, synthetic construct
  source 1..20: mol_type = other DNA
cagacaagaagtaatatcaa

SEQ ID NO: 23162 - DNA, 20 bp, synthetic construct
  source 1..20: mol_type = other DNA
ttcatcaaacttaatcactc

SEQ ID NO: 23163 - DNA, 20 bp, synthetic construct
  source 1..20: mol_type = other DNA
aaggggttatcagttatgct

SEQ ID NO: 23164 - DNA, 20 bp, synthetic construct
  source 1..20: mol_type = other DNA
tgtaggaagtgggataaaaa

SEQ ID NO: 23165 - DNA, 20 bp, synthetic construct
  source 1..20: mol_type = other DNA
tggtgaggatgtatataata

SEQ ID NO: 23166 - DNA, 20 bp, synthetic construct
  source 1..20: mol_type = other DNA
ttcaaatgggtattgggatg

SEQ ID NO: 23167 - DNA, 20 bp, synthetic construct
  source 1..20: mol_type = other DNA
tgccatacgtatcccttatt

SEQ ID NO: 23168 - DNA, 20 bp, synthetic construct
  source 1..20: mol_type = other DNA
cttgtgtagtttggcagaga

SEQ ID NO: 23169 - DNA, 20 bp, synthetic construct
  source 1..20: mol_type = other DNA
agtattaagagatacaatct

SEQ ID NO: 23170 - DNA, 20 bp, synthetic construct
  source 1..20: mol_type = other DNA
ggatggaccatgggtgtgat

SEQ ID NO: 23171 - DNA, 20 bp, synthetic construct
  source 1..20: mol_type = other DNA
ctaccatcatttgcaaccaa

SEQ ID NO: 23172 - DNA, 20 bp, synthetic construct
  source 1..20: mol_type = other DNA
atggccagcaaagaattctg

SEQ ID NO: 23173 - DNA, 20 bp, synthetic construct
  source 1..20: mol_type = other DNA
agtattgtgggctgcgctaa

SEQ ID NO: 23174 - DNA, 20 bp, synthetic construct
  source 1..20: mol_type = other DNA
caaggaactctgatcactac

SEQ ID NO: 23175 - DNA, 20 bp, synthetic construct
  source 1..20: mol_type = other DNA
cataaaacaattgtcgttgg

SEQ ID NO: 23176 - DNA, 20 bp, synthetic construct
  source 1..20: mol_type = other DNA
ccagatgatccagagacatt

SEQ ID NO: 23177 - DNA, 20 bp, synthetic construct
  source 1..20: mol_type = other DNA
ccccttaaattcaccatgga

SEQ ID NO: 23178 - DNA, 20 bp, synthetic construct
  source 1..20: mol_type = other DNA
atgctgcttggccttatgtt

SEQ ID NO: 23179 - DNA, 20 bp, synthetic construct
  source 1..20: mol_type = other DNA
gtgggaatgatagcaacaga

SEQ ID NO: 23180 - DNA, 20 bp, synthetic construct
  source 1..20: mol_type = other DNA
agaattacagcagcctccat

SEQ ID NO: 23181 - DNA, 20 bp, synthetic construct
  source 1..20: mol_type = other DNA
atggcaaaagtccttagagg

SEQ ID NO: 23182 - DNA, 20 bp, synthetic construct
  source 1..20: mol_type = other DNA
ttgaagcctgttgagaaagg

SEQ ID NO: 23183 - DNA, 20 bp, synthetic construct
  source 1..20: mol_type = other DNA
aaagtggcttcagatggcaa

SEQ ID NO: 23184 - DNA, 20 bp, synthetic construct
  source 1..20: mol_type = other DNA
cttcttactgtgatgcaagc

SEQ ID NO: 23185 - DNA, 20 bp, synthetic construct
  source 1..20: mol_type = other DNA
aaactggacacattgaatgg

SEQ ID NO: 23186 - DNA, 20 bp, synthetic construct
  source 1..20: mol_type = other DNA
gaaccatgggcaatgcttga

SEQ ID NO: 23187 - DNA, 20 bp, synthetic construct
  source 1..20: mol_type = other DNA
catgcggtctccagaggaac

SEQ ID NO: 23188 - DNA, 20 bp, synthetic construct
  source 1..20: mol_type = other DNA
atcaaggctgagaaatcagg

SEQ ID NO: 23189 - DNA, 20 bp, synthetic construct
  source 1..20: mol_type = other DNA
ttcatccaaaaagtaagatc

SEQ ID NO: 23190 - DNA, 20 bp, synthetic construct
  source 1..20: mol_type = other DNA
gcaacttttgaggacttcgg

SEQ ID NO: 23191 - DNA, 20 bp, synthetic construct
  source 1..20: mol_type = other DNA
ggctgtctagccaaggcgta

SEQ ID NO: 23192 - DNA, 20 bp, synthetic construct
  source 1..20: mol_type = other DNA
cctctgcattcttgtaaata

SEQ ID NO: 23193 - DNA, 20 bp, synthetic construct
  source 1..20: mol_type = other DNA
tcctccggactctgctaaac

SEQ ID NO: 23194 - DNA, 20 bp, synthetic construct
  source 1..20: mol_type = other DNA
acaggctaaaacgatcgctg

SEQ ID NO: 23195 - DNA, 20 bp, synthetic construct
  source 1..20: mol_type = other DNA
gcttcagtgatagaggctgg

SEQ ID NO: 23196 - DNA, 20 bp, synthetic construct
  source 1..20: mol_type = other DNA
ctagtaactcttaccatctc

SEQ ID NO: 23197 - DNA, 20 bp, synthetic construct
  source 1..20: mol_type = other DNA
actggtttctggaagatcag

SEQ ID NO: 23198 - DNA, 20 bp, synthetic construct
  source 1..20: mol_type = other DNA
ccacccaaggaggggtaaca

SEQ ID NO: 23199 - DNA, 20 bp, synthetic construct
  source 1..20: mol_type = other DNA
gagttctctctgtgatgttg

SEQ ID NO: 23200 - DNA, 20 bp, synthetic construct
  source 1..20: mol_type = other DNA
ttttggattccttgggcttt

SEQ ID NO: 23201 - DNA, 20 bp, synthetic construct
  source 1..20: mol_type = other DNA
gagcagccatttgcaaaaat

SEQ ID NO: 23202 - DNA, 20 bp, synthetic construct
  source 1..20: mol_type = other DNA
acatctgtgggaggaaaatc

SEQ ID NO: 23203 - DNA, 20 bp, synthetic construct
  source 1..20: mol_type = other DNA
cacaaccaaagacacttgaa

SEQ ID NO: 23204 - DNA, 20 bp, synthetic construct
  source 1..20: mol_type = other DNA
agatggaaagtgctctcaaa

SEQ ID NO: 23205 - DNA, 20 bp, synthetic construct
  source 1..20: mol_type = other DNA
gttatgaatggataacagac

SEQ ID NO: 23206 - DNA, 20 bp, synthetic construct
  source 1..20: mol_type = other DNA
tactcaccactgacatttcg

SEQ ID NO: 23207 - DNA, 20 bp, synthetic construct
  source 1..20: mol_type = other DNA
cagtggttagtggattaaca

SEQ ID NO: 23208 - DNA, 20 bp, synthetic construct
  source 1..20: mol_type = other DNA
gccgcggcggctggagctac

SEQ ID NO: 23209 - DNA, 20 bp, synthetic construct
  source 1..20: mol_type = other DNA
ccaggttttggaatatggtg

SEQ ID NO: 23210 - DNA, 20 bp, synthetic construct
  source 1..20: mol_type = other DNA
tggtaaacgcatgtgatgaa

SEQ ID NO: 23211 - DNA, 20 bp, synthetic construct
  source 1..20: mol_type = other DNA
tggtcgtcccctgcaggagt

SEQ ID NO: 23212 - DNA, 20 bp, synthetic construct
  source 1..20: mol_type = other DNA
ccagaggacaagacatgtgt

SEQ ID NO: 23213 - DNA, 20 bp, synthetic construct
  source 1..20: mol_type = other DNA
gagcaacttgggccaaactc

SEQ ID NO: 23214 - DNA, 20 bp, synthetic construct
  source 1..20: mol_type = other DNA
gtaagaggaacaccaggacc

SEQ ID NO: 23215 - DNA, 20 bp, synthetic construct
  source 1..20: mol_type = other DNA
tgctctatggatttgggaac

SEQ ID NO: 23216 - DNA, 20 bp, synthetic construct
  source 1..20: mol_type = other DNA
tgtgtaagcgaggtttcagt

SEQ ID NO: 23217 - DNA, 20 bp, synthetic construct
  source 1..20: mol_type = other DNA
atgaaatctccaagtccaac

SEQ ID NO: 23218 - DNA, 20 bp, synthetic construct
  source 1..20: mol_type = other DNA
agtacacaggtgaaggagcc

SEQ ID NO: 23219 - DNA, 20 bp, synthetic construct
  source 1..20: mol_type = other DNA
agctgacttgtggggatgga

SEQ ID NO: 23220 - DNA, 20 bp, synthetic construct
  source 1..20: mol_type = other DNA
ggaagccatggggtattatg

SEQ ID NO: 23221 - DNA, 20 bp, synthetic construct
  source 1..20: mol_type = other DNA
tgggggctgctgtggccaag

SEQ ID NO: 23222 - DNA, 20 bp, synthetic construct
  source 1..20: mol_type = other DNA
tagaagtcaagaagttgagc

SEQ ID NO: 23223 - DNA, 20 bp, synthetic construct
  source 1..20: mol_type = other DNA
aaaccgaacctgaagtgctg

SEQ ID NO: 23224 - DNA, 20 bp, synthetic construct
  source 1..20: mol_type = other DNA
agatggagcaggcactcaga

SEQ ID NO: 23225 - DNA, 20 bp, synthetic construct
  source 1..20: mol_type = other DNA
cagacccctctagcattgcg

SEQ ID NO: 23226 - DNA, 20 bp, synthetic construct
  source 1..20: mol_type = other DNA
gacgtcaagctgagtacgtc

SEQ ID NO: 23227 - DNA, 20 bp, synthetic construct
  source 1..20: mol_type = other DNA
taactgctggctcagcggtt

SEQ ID NO: 23228 - DNA, 20 bp, synthetic construct
  source 1..20: mol_type = other DNA
ccgctgttgtcgctaatgaa

SEQ ID NO: 23229 - DNA, 20 bp, synthetic construct
  source 1..20: mol_type = other DNA
acgaaattgacagagccgaa

SEQ ID NO: 23230 - DNA, 20 bp, synthetic construct
  source 1..20: mol_type = other DNA
atcatgttgtcaagcttctg

SEQ ID NO: 23231 - DNA, 20 bp, synthetic construct
  source 1..20: mol_type = other DNA
ttggcaaagctctgacatgg

SEQ ID NO: 23232 - DNA, 20 bp, synthetic construct
  source 1..20: mol_type = other DNA
atgaattggttggacggtca

SEQ ID NO: 23233 - DNA, 20 bp, synthetic construct
  source 1..20: mol_type = other DNA
gagcgcagtgggcaaaacta

SEQ ID NO: 23234 - DNA, 20 bp, synthetic construct
  source 1..20: mol_type = other DNA
gtcaccaaatatagatttgg

SEQ ID NO: 23235 - DNA, 20 bp, synthetic construct
  source 1..20: mol_type = other DNA
tttgcgtcttgatatgctgt

SEQ ID NO: 23236 - DNA, 20 bp, synthetic construct
  source 1..20: mol_type = other DNA
aaggacttgcccagaaaagg

SEQ ID NO: 23237 - DNA, 20 bp, synthetic construct
  source 1..20: mol_type = other DNA
ggtagaaccactggcagtga

SEQ ID NO: 23238 - DNA, 20 bp, synthetic construct
  source 1..20: mol_type = other DNA
aggagcttacacggaatatg

SEQ ID NO: 23239 - DNA, 20 bp, synthetic construct
  source 1..20: mol_type = other DNA
ttcaacatagaaccctggat

SEQ ID NO: 23240 - DNA, 20 bp, synthetic construct
  source 1..20: mol_type = other DNA
aacttctccttcgcaggtac

SEQ ID NO: 23241 - DNA, 20 bp, synthetic construct
  source 1..20: mol_type = other DNA
ctggtacttagggcattgag

SEQ ID NO: 23242 - DNA, 20 bp, synthetic construct
  source 1..20: mol_type = other DNA
gcactggcaaggagtaaaag

SEQ ID NO: 23243 - DNA, 20 bp, synthetic construct
  source 1..20: mol_type = other DNA
aagatacactggcgggcctt

SEQ ID NO: 23244 - DNA, 20 bp, synthetic construct
  source 1..20: mol_type = other DNA
caactagtctgccccatagg

SEQ ID NO: 23245 - DNA, 20 bp, synthetic construct
  source 1..20: mol_type = other DNA
aacagggaaggtgttgaaat

SEQ ID NO: 23246 - DNA, 20 bp, synthetic construct
  source 1..20: mol_type = other DNA
atctgtctataccactgctt

SEQ ID NO: 23247 - DNA, 20 bp, synthetic construct
  source 1..20: mol_type = other DNA
cccatgctcatccctttagt

SEQ ID NO: 23248 - DNA, 20 bp, synthetic construct
  source 1..20: mol_type = other DNA
gcagcagtgttccttataag

SEQ ID NO: 23249 - DNA, 20 bp, synthetic construct
  source 1..20: mol_type = other DNA
ctagcggactttgaagagag

SEQ ID NO: 23250 - DNA, 20 bp, synthetic construct
  source 1..20: mol_type = other DNA
gacttttgggcagagtcaag

SEQ ID NO: 23251 - DNA, 20 bp, synthetic construct
  source 1..20: mol_type = other DNA
aagaagatcacaagtcatga

SEQ ID NO: 23252 - DNA, 20 bp, synthetic construct
  source 1..20: mol_type = other DNA
aaggtagggaagaatgaagg

SEQ ID NO: 23253 - DNA, 20 bp, synthetic construct
  source 1..20: mol_type = other DNA
tcctatggatacttctgcca

SEQ ID NO: 23254 - DNA, 20 bp, synthetic construct
  source 1..20: mol_type = other DNA
gtcgagacagcaaagaaatt

SEQ ID NO: 23255 - DNA, 20 bp, synthetic construct
  source 1..20: mol_type = other DNA
taccattatgatctgctaca

SEQ ID NO: 23256 - DNA, 20 bp, synthetic construct
  source 1..20: mol_type = other DNA
tacatctatgccacggaaga

SEQ ID NO: 23257 - DNA, 20 bp, synthetic construct
  source 1..20: mol_type = other DNA
gcactatccaaaagacacat

SEQ ID NO: 23258 - DNA, 20 bp, synthetic construct
  source 1..20: mol_type = other DNA
actataaaaccgtgtttagg

SEQ ID NO: 23259 - DNA, 20 bp, synthetic construct
  source 1..20: mol_type = other DNA
gctacggatgacacaaagat

SEQ ID NO: 23260 - DNA, 20 bp, synthetic construct
  source 1..20: mol_type = other DNA
gttgtgagggcccaaacaga

SEQ ID NO: 23261 - DNA, 20 bp, synthetic construct
  source 1..20: mol_type = other DNA
gtgaagaaagaatgggatca

SEQ ID NO: 23262 - DNA, 20 bp, synthetic construct
  source 1..20: mol_type = other DNA
cccgtaagatgggctgacca

SEQ ID NO: 23263 - DNA, 20 bp, synthetic construct
  source 1..20: mol_type = other DNA
ctaagtatcactaagagacc

SEQ ID NO: 23264 - DNA, 20 bp, synthetic construct
  source 1..20: mol_type = other DNA
actttatgtaaatgcaaggc

SEQ ID NO: 23265 - DNA, 20 bp, synthetic construct
  source 1..20: mol_type = other DNA
caagtagagtagttagagtt

SEQ ID NO: 23266 - DNA, 20 bp, synthetic construct
  source 1..20: mol_type = other DNA
tgagatgctacgtggacgag

SEQ ID NO: 23267 - DNA, 20 bp, synthetic construct
  source 1..20: mol_type = other DNA
cctggctagggaagcaattg

SEQ ID NO: 23268 - DNA, 20 bp, synthetic construct
  source 1..20: mol_type = other DNA
tactaagggccataagggac

SEQ ID NO: 23269 - DNA, 20 bp, synthetic construct
  source 1..20: mol_type = other DNA
ggacgtgcatgagaggtgaa

SEQ ID NO: 23270 - DNA, 20 bp, synthetic construct
  source 1..20: mol_type = other DNA
gtggagtcgtgatcagcaaa

SEQ ID NO: 23271 - DNA, 20 bp, synthetic construct
  source 1..20: mol_type = other DNA
tggttgtctacatgatcctg

SEQ ID NO: 23272 - DNA, 20 bp, synthetic construct
  source 1..20: mol_type = other DNA
tctttcatgctatgaccaac

SEQ ID NO: 23273 - DNA, 20 bp, synthetic construct
  source 1..20: mol_type = other DNA
ccacataccctttgataata

SEQ ID NO: 23274 - DNA, 20 bp, synthetic construct
  source 1..20: mol_type = other DNA
aagccgtatatctgttcccc

SEQ ID NO: 23275 - DNA, 20 bp, synthetic construct
  source 1..20: mol_type = other DNA
atgaggaagaggtctatggg

SEQ ID NO: 23276 - DNA, 20 bp, synthetic construct
  source 1..20: mol_type = other DNA
gagtgaaaacggactcaggt

SEQ ID NO: 23277 - DNA, 20 bp, synthetic construct
  source 1..20: mol_type = other DNA
gaggggagtttaagcagatc

SEQ ID NO: 23278 - DNA, 20 bp, synthetic construct
  source 1..20: mol_type = other DNA
taggaaaaattcacaggttt

SEQ ID NO: 23279 - DNA, 20 bp, synthetic construct
  source 1..20: mol_type = other DNA
tgatcacgcaactagaaatc

SEQ ID NO: 23280 - DNA, 20 bp, synthetic construct
  source 1..20: mol_type = other DNA
acagctatgacagctattcg

SEQ ID NO: 23281 - DNA, 20 bp, synthetic construct
  source 1..20: mol_type = other DNA
aagaaactgagctaaaagaa

SEQ ID NO: 23282 - DNA, 20 bp, synthetic construct
  source 1..20: mol_type = other DNA
ctgcaaccgacttagttgta

SEQ ID NO: 23283 - DNA, 20 bp, synthetic construct
  source 1..20: mol_type = other DNA
ttgcttgtctgccctacgct

SEQ ID NO: 23284 - DNA, 20 bp, synthetic construct
  source 1..20: mol_type = other DNA
gagtcgtcaccaggtgcaga

SEQ ID NO: 23285 - DNA, 20 bp, synthetic construct
  source 1..20: mol_type = other DNA
gggatgaacccaaccacaaa

SEQ ID NO: 23286 - DNA, 20 bp, synthetic construct
  source 1..20: mol_type = other DNA
tcccggaacgaactgtaaca

SEQ ID NO: 23287 - DNA, 20 bp, synthetic construct
  source 1..20: mol_type = other DNA
ccaaaaatatgaccaccggg

SEQ ID NO: 23288 - DNA, 20 bp, synthetic construct
  source 1..20: mol_type = other DNA
tggtgataggttccaataag

SEQ ID NO: 23289 - DNA, 20 bp, synthetic construct
  source 1..20: mol_type = other DNA
aagaacttctgctacagtgc

SEQ ID NO: 23290 - DNA, 20 bp, synthetic construct
  source 1..20: mol_type = other DNA
agcttatagaagagtacaac

SEQ ID NO: 23291 - DNA, 20 bp, synthetic construct
  source 1..20: mol_type = other DNA
gaagacctatcaagtattac

SEQ ID NO: 23292 - DNA, 20 bp, synthetic construct
  source 1..20: mol_type = other DNA
caggaaaggtctacttgcaa

SEQ ID NO: 23293 - DNA, 20 bp, synthetic construct
  source 1..20: mol_type = other DNA
tcgtgctgtcgcgcatgctg

SEQ ID NO: 23294 - DNA, 20 bp, synthetic construct
  source 1..20: mol_type = other DNA
acatgggagagtggtgtgaa

SEQ ID NO: 23295 - DNA, 20 bp, synthetic construct
  source 1..20: mol_type = other DNA
tcctcttggcgttgagtcta

SEQ ID NO: 23296 - DNA, 20 bp, synthetic construct
  source 1..20: mol_type = other DNA
acatttttcaggaaagcccg

SEQ ID NO: 23297 - DNA, 20 bp, synthetic construct
  source 1..20: mol_type = other DNA
ttggattcatccctaagatg

SEQ ID NO: 23298 - DNA, 20 bp, synthetic construct
  source 1..20: mol_type = other DNA
gctgtggagaagggcttgtt

SEQ ID NO: 23299 - DNA, 20 bp, synthetic construct
  source 1..20: mol_type = other DNA
ctccggaactcaacttggtg

SEQ ID NO: 23300 - DNA, 20 bp, synthetic construct
  source 1..20: mol_type = other DNA
ccgtgaagaatggaaaagcc

SEQ ID NO: 23301 - DNA, 20 bp, synthetic construct
  source 1..20: mol_type = other DNA
tccacttggaattgggacca

SEQ ID NO: 23302 - DNA, 20 bp, synthetic construct
  source 1..20: mol_type = other DNA
gtgaggtaagcttgaaggtc

SEQ ID NO: 23303 - DNA, 20 bp, synthetic construct
  source 1..20: mol_type = other DNA
aatgccagccaggaaagctg

SEQ ID NO: 23304 - DNA, 20 bp, synthetic construct
  source 1..20: mol_type = other DNA
aggtggccataatggatgag

SEQ ID NO: 23305 - DNA, 20 bp, synthetic construct
  source 1..20: mol_type = other DNA
aacccattcccgaaggagag

SEQ ID NO: 23306 - DNA, 20 bp, synthetic construct
  source 1..20: mol_type = other DNA
aacgcagagggcgagttgga

SEQ ID NO: 23307 - DNA, 20 bp, synthetic construct
  source 1..20: mol_type = other DNA
atggtccaggcggcgaactg

SEQ ID NO: 23308 - DNA, 20 bp, synthetic construct
  source 1..20: mol_type = other DNA
gagaggataaccgactggcc

SEQ ID NO: 23309 - DNA, 20 bp, synthetic construct
  source 1..20: mol_type = other DNA
ctgcccgatcctggggaact

SEQ ID NO: 23310 - DNA, 20 bp, synthetic construct
  source 1..20: mol_type = other DNA
tggcactcggtgtgacctct

SEQ ID NO: 23311 - DNA, 20 bp, synthetic construct
  source 1..20: mol_type = other DNA
agatcatcaaccccattccg

SEQ ID NO: 23312 - DNA, 20 bp, synthetic construct
  source 1..20: mol_type = other DNA
actcatgcaccaaagaagaa

SEQ ID NO: 23313 - DNA, 20 bp, synthetic construct
  source 1..20: mol_type = other DNA
ggagagaccagaggggatca

SEQ ID NO: 23314 - DNA, 20 bp, synthetic construct
  source 1..20: mol_type = other DNA
gagaccttcgcacccttggt

SEQ ID NO: 23315 - DNA, 20 bp, synthetic construct
  source 1..20: mol_type = other DNA
cccccgagcataactcggga

SEQ ID NO: 23316 - DNA, 20 bp, synthetic construct
  source 1..20: mol_type = other DNA
gggatttttccgcctcctat

SEQ ID NO: 23317 - DNA, 20 bp, synthetic construct
  source 1..20: mol_type = other DNA
ttgcgggtccaaatgccaaa

SEQ ID NO: 23318 - DNA, 20 bp, synthetic construct
  source 1..20: mol_type = other DNA
gtaggcctgcaccgccgagg

SEQ ID NO: 23319 - DNA, 20 bp, synthetic construct
  source 1..20: mol_type = other DNA
ggcacttgtgtcattcttgc

SEQ ID NO: 23320 - DNA, 20 bp, synthetic construct
  source 1..20: mol_type = other DNA
tccaggcgctccgtgctgat

SEQ ID NO: 23321 - DNA, 20 bp, synthetic construct
  source 1..20: mol_type = other DNA
gacctgaaccatcagtggtt

SEQ ID NO: 23322 - DNA, 20 bp, synthetic construct
  source 1..20: mol_type = other DNA
gacacagagcgaatggagct

SEQ ID NO: 23323 - DNA, 20 bp, synthetic construct
  source 1..20: mol_type = other DNA
atggccatgtggagaagctc

SEQ ID NO: 23324 - DNA, 20 bp, synthetic construct
  source 1..20: mol_type = other DNA
gcgtcggtgagaagcactac

SEQ ID NO: 23325 - DNA, 20 bp, synthetic construct
  source 1..20: mol_type = other DNA
gtagcagtcggtctggtgtt

SEQ ID NO: 23326 - DNA, 20 bp, synthetic construct
  source 1..20: mol_type = other DNA
ggcattccagtgaagggtct

SEQ ID NO: 23327 - DNA, 20 bp, synthetic construct
  source 1..20: mol_type = other DNA
accatttcggagatgcttgg

SEQ ID NO: 23328 - DNA, 20 bp, synthetic construct
  source 1..20: mol_type = other DNA
gtgctacacaccatgtggca

SEQ ID NO: 23329 - DNA, 20 bp, synthetic construct
  source 1..20: mol_type = other DNA
gtcagcagcatagcacaggg

SEQ ID NO: 23330 - DNA, 20 bp, synthetic construct
  source 1..20: mol_type = other DNA
gggagacaaaactgggaggt

SEQ ID NO: 23331 - DNA, 20 bp, synthetic construct
  source 1..20: mol_type = other DNA
atagccagtgaggagagaca

SEQ ID NO: 23332 - DNA, 20 bp, synthetic construct
  source 1..20: mol_type = other DNA
tttgacaaggagtactcaag

SEQ ID NO: 23333 - DNA, 20 bp, synthetic construct
  source 1..20: mol_type = other DNA
accgcgtctgctgcacagcg

SEQ ID NO: 23334 - DNA, 20 bp, synthetic construct
  source 1..20: mol_type = other DNA
ctgggagttgtctggtgttt

SEQ ID NO: 23335 - DNA, 20 bp, synthetic construct
  source 1..20: mol_type = other DNA
aatttggacatccagccggc

SEQ ID NO: 23336 - DNA, 20 bp, synthetic construct
  source 1..20: mol_type = other DNA
atgcagttgctgagacctga

SEQ ID NO: 23337 - DNA, 20 bp, synthetic construct
  source 1..20: mol_type = other DNA
gcaggcatggatgtgttctc

SEQ ID NO: 23338 - DNA, 20 bp, synthetic construct
  source 1..20: mol_type = other DNA
gctccttatcgtcccgaggt

SEQ ID NO: 23339 - DNA, 20 bp, synthetic construct
  source 1..20: mol_type = other DNA
agctacttccacaggaggga

SEQ ID NO: 23340 - DNA, 20 bp, synthetic construct
  source 1..20: mol_type = other DNA
caacacacaagaaaaatggt

SEQ ID NO: 23341 - DNA, 20 bp, synthetic construct
  source 1..20: mol_type = other DNA
caggccacgaagggtatttg

SEQ ID NO: 23342 - DNA, 20 bp, synthetic construct
  source 1..20: mol_type = other DNA
acccctgtaagtagttgatc

SEQ ID NO: 23343 - DNA, 20 bp, synthetic construct
  source 1..20: mol_type = other DNA
gaaaagttttgaaacttttc

SEQ ID NO: 23344 - DNA, 20 bp, synthetic construct
  source 1..20: mol_type = other DNA
ccgcagagaacttgcaatcg

SEQ ID NO: 23345 - DNA, 20 bp, synthetic construct
  source 1..20: mol_type = other DNA
taacaatagaaccatcggaa

SEQ ID NO: 23346 - DNA, 20 bp, synthetic construct
  source 1..20: mol_type = other DNA
agcaaagtgtttttaacgcc

SEQ ID NO: 23347 - DNA, 20 bp, synthetic construct
  source 1..20: mol_type = other DNA
ttgaaacagcgtgtgaagga

SEQ ID NO: 23348 - DNA, 20 bp, synthetic construct
  source 1..20: mol_type = other DNA
gtatttttgtaaatatagct

SEQ ID NO: 23349 - DNA, 20 bp, synthetic construct
  source 1..20: mol_type = other DNA
atagtccattagtaagtaag

SEQ ID NO: 23350 - DNA, 20 bp, synthetic construct
  source 1..20: mol_type = other DNA
cctccccaactaccatttgg

SEQ ID NO: 23351 - DNA, 20 bp, synthetic construct
  source 1..20: mol_type = other DNA
tcaatgaagggtgggtaggc

SEQ ID NO: 23352 - DNA, 20 bp, synthetic construct
  source 1..20: mol_type = other DNA
caaccctaagtgtaatagcg

SEQ ID NO: 23353 - DNA, 20 bp, synthetic construct
  source 1..20: mol_type = other DNA
tgcgtataactctggtatca

SEQ ID NO: 23354 - DNA, 20 bp, synthetic construct
  source 1..20: mol_type = other DNA
ttgaatcggatttgaaaaat

SEQ ID NO: 23355 - DNA, 20 bp, synthetic construct
  source 1..20: mol_type = other DNA
gcttcccaagtggaagagtt

SEQ ID NO: 23356 - DNA, 20 bp, synthetic construct
  source 1..20: mol_type = other DNA
tcggatcgactgaagaagat

SEQ ID NO: 23357 - DNA, 20 bp, synthetic construct
  source 1..20: mol_type = other DNA
aggataaagatgcgactgtg

SEQ ID NO: 23358 - DNA, 20 bp, synthetic construct
  source 1..20: mol_type = other DNA
agaagtaagaaaattcctag

SEQ ID NO: 23359 - DNA, 20 bp, synthetic construct
  source 1..20: mol_type = other DNA
acgaatctcaaacctagttt

SEQ ID NO: 23360 - DNA, 20 bp, synthetic construct
  source 1..20: mol_type = other DNA
tatgacaagttagatggttt

SEQ ID NO: 23361 - DNA, 20 bp, synthetic construct
  source 1..20: mol_type = other DNA
ccgcatgttcaactcgacat

SEQ ID NO: 23362 - DNA, 20 bp, synthetic construct
  source 1..20: mol_type = other DNA
cagaaaggttctgatatctt

SEQ ID NO: 23363 - DNA, 20 bp, synthetic construct
  source 1..20: mol_type = other DNA
ggtaatgttgatggtgtaga

SEQ ID NO: 23364 - DNA, 20 bp, synthetic construct
  source 1..20: mol_type = other DNA
gatactctgtggtcaactgc

SEQ ID NO: 23365 - DNA, 20 bp, synthetic construct
  source 1..20: mol_type = other DNA
agacctgaaatcaaccctct

SEQ ID NO: 23366 - DNA, 20 bp, synthetic construct
  source 1..20: mol_type = other DNA
gagtgccctaacagcaccgg

SEQ ID NO: 23367 - DNA, 20 bp, synthetic construct
  source 1..20: mol_type = other DNA
gcgtaattcactcactaccg

SEQ ID NO: 23368 - DNA, 20 bp, synthetic construct
  source 1..20: mol_type = other DNA
tgagttcgcaagaatctctt

SEQ ID NO: 23369 - DNA, 20 bp, synthetic construct
  source 1..20: mol_type = other DNA
caaaagtacactatcttatc

SEQ ID NO: 23370 - DNA, 20 bp, synthetic construct
  source 1..20: mol_type = other DNA
atctgcatgggagtattcac

SEQ ID NO: 23371 - DNA, 20 bp, synthetic construct
  source 1..20: mol_type = other DNA
agctcataaaacaagagctt

SEQ ID NO: 23372 - DNA, 20 bp, synthetic construct
  source 1..20: mol_type = other DNA
tgcttatttaaaaagaagtt

SEQ ID NO: 23373 - DNA, 20 bp, synthetic construct
  source 1..20: mol_type = other DNA
ctggttttacatcttttagt

SEQ ID NO: 23374 - DNA, 20 bp, synthetic construct
  source 1..20: mol_type = other DNA
atgaatacgtctatcgtgta

SEQ ID NO: 23375 - DNA, 20 bp, synthetic construct
  source 1..20: mol_type = other DNA
ttcttgattcttcctgaggg

SEQ ID NO: 23376 - DNA, 20 bp, synthetic construct
  source 1..20: mol_type = other DNA
ttaagattcttgacctcaca

SEQ ID NO: 23377 - DNA, 20 bp, synthetic construct
  source 1..20: mol_type = other DNA
cacaaagtggccctgttatg

SEQ ID NO: 23378 - DNA, 20 bp, synthetic construct
  source 1..20: mol_type = other DNA
ttacaatgagctttatgaga

SEQ ID NO: 23379 - DNA, 20 bp, synthetic construct
  source 1..20: mol_type = other DNA
caaaacacatggaaaatgct

SEQ ID NO: 23380 - DNA, 20 bp, synthetic construct
  source 1..20: mol_type = other DNA
attttggtgatgctaaaata

SEQ ID NO: 23381 - DNA, 20 bp, synthetic construct
  source 1..20: mol_type = other DNA
attgttatactttcgtggaa

SEQ ID NO: 23382 - DNA, 20 bp, synthetic construct
  source 1..20: mol_type = other DNA
ggatacctggagaagactat

SEQ ID NO: 23383 - DNA, 20 bp, synthetic construct
  source 1..20: mol_type = other DNA
cgagacaagggaagatattg

SEQ ID NO: 23384 - DNA, 20 bp, synthetic construct
  source 1..20: mol_type = other DNA
tagaccatatttccgtgggg

SEQ ID NO: 23385 - DNA, 20 bp, synthetic construct
  source 1..20: mol_type = other DNA
acattgtaactaatgtattc

SEQ ID NO: 23386 - DNA, 20 bp, synthetic construct
  source 1..20: mol_type = other DNA
tttcaggttatgagtagttt

SEQ ID NO: 23387 - DNA, 20 bp, synthetic construct
  source 1..20: mol_type = other DNA
ccttatgcattccatggaca

SEQ ID NO: 23388 - DNA, 20 bp, synthetic construct
  source 1..20: mol_type = other DNA
catttacctttcctcaaatc

SEQ ID NO: 23389 - DNA, 20 bp, synthetic construct
  source 1..20: mol_type = other DNA
aagggagtcgcagagttcca

SEQ ID NO: 23390 - DNA, 20 bp, synthetic construct
  source 1..20: mol_type = other DNA
tccatctttatcggtacgcc

SEQ ID NO: 23391 - DNA, 20 bp, synthetic construct
  source 1..20: mol_type = other DNA
tgagctcctttagagggagg

SEQ ID NO: 23392 - DNA, 20 bp, synthetic construct
  source 1..20: mol_type = other DNA
caaccaacaacatcaactcc

SEQ ID NO: 23393 - DNA, 20 bp, synthetic construct
  source 1..20: mol_type = other DNA
tggaaaactctctaccgaca

SEQ ID NO: 23394 - DNA, 20 bp, synthetic construct
  source 1..20: mol_type = other DNA
ttatggcaggaaaatctctg

SEQ ID NO: 23395 - DNA, 20 bp, synthetic construct
  source 1..20: mol_type = other DNA
aagttggcaaagaacttgaa

SEQ ID NO: 23396 - DNA, 20 bp, synthetic construct
  source 1..20: mol_type = other DNA
gtcgtgcatatcagtggcta

SEQ ID NO: 23397 - DNA, 20 bp, synthetic construct
  source 1..20: mol_type = other DNA
atatcaaagataccatgagt

SEQ ID NO: 23398 - DNA, 20 bp, synthetic construct
  source 1..20: mol_type = other DNA
ttatttacgaaatgctaaac

SEQ ID NO: 23399 - DNA, 20 bp, synthetic construct
  source 1..20: mol_type = other DNA
aattgtatacagccaatttc

SEQ ID NO: 23400 - DNA, 20 bp, synthetic construct
  source 1..20: mol_type = other DNA
aagcagagagaacgcaagag

SEQ ID NO: 23401 - DNA, 20 bp, synthetic construct
  source 1..20: mol_type = other DNA
ctgcagtgacgaccacagtt

SEQ ID NO: 23402 - DNA, 20 bp, synthetic construct
  source 1..20: mol_type = other DNA
cacttcagtaggggctgtac

SEQ ID NO: 23403 - DNA, 20 bp, synthetic construct
  source 1..20: mol_type = other DNA
agcggattacccctagtggt

SEQ ID NO: 23404 - DNA, 20 bp, synthetic construct
  source 1..20: mol_type = other DNA
catgggggcagtctcgttat

SEQ ID NO: 23405 - DNA, 20 bp, synthetic construct
  source 1..20: mol_type = other DNA
tactcgacttggattttcag

SEQ ID NO: 23406 - DNA, 20 bp, synthetic construct
  source 1..20: mol_type = other DNA
tctcacctgttaattgggtt

SEQ ID NO: 23407 - DNA, 20 bp, synthetic construct
  source 1..20: mol_type = other DNA
aaggcgcctacacacaggat

SEQ ID NO: 23408 - DNA, 20 bp, synthetic construct
  source 1..20: mol_type = other DNA
ccggacttggttctctcttc

SEQ ID NO: 23409 - DNA, 20 bp, synthetic construct
  source 1..20: mol_type = other DNA
caggccctgacattgagttg

SEQ ID NO: 23410 - DNA, 20 bp, synthetic construct
  source 1..20: mol_type = other DNA
ctcttctttcattgcttgct

SEQ ID NO: 23411 - DNA, 20 bp, synthetic construct
  source 1..20: mol_type = other DNA
agattttggtgcggcttttg

SEQ ID NO: 23412 - DNA, 20 bp, synthetic construct
  source 1..20: mol_type = other DNA
tctggaaaattgctgagaat

SEQ ID NO: 23413 - DNA, 20 bp, synthetic construct
  source 1..20: mol_type = other DNA
tgaaacaaatcacggcagtt

SEQ ID NO: 23414 - DNA, 20 bp, synthetic construct
  source 1..20: mol_type = other DNA
agctctcattagtgaaaacc

SEQ ID NO: 23415 - DNA, 20 bp, synthetic construct
  source 1..20: mol_type = other DNA
tgcatggcacattcaaggtt

SEQ ID NO: 23416 - DNA, 20 bp, synthetic construct
  source 1..20: mol_type = other DNA
atcccagtcccttgaatggt

SEQ ID NO: 23417 - DNA, 20 bp, synthetic construct
  source 1..20: mol_type = other DNA
aaccgcaagcaattgcctgt

SEQ ID NO: 23418 - DNA, 20 bp, synthetic construct
  source 1..20: mol_type = other DNA
tgctcgtaatgagagcacat

SEQ ID NO: 23419 - DNA, 20 bp, synthetic construct
  source 1..20: mol_type = other DNA
ctactgctgtgaagaatgtc

SEQ ID NO: 23420 - DNA, 20 bp, synthetic construct
  source 1..20: mol_type = other DNA
tgcgagcagactctactagc

SEQ ID NO: 23421 - DNA, 20 bp, synthetic construct
  source 1..20: mol_type = other DNA
tatgactttgagtcattggg

SEQ ID NO: 23422 - DNA, 20 bp, synthetic construct
  source 1..20: mol_type = other DNA
cctcattcacaatcacacgg

SEQ ID NO: 23423 - DNA, 20 bp, synthetic construct
  source 1..20: mol_type = other DNA
gctgcgccaaaaacgcgcga

SEQ ID NO: 23424 - DNA, 20 bp, synthetic construct
  source 1..20: mol_type = other DNA
tcccctgtggacatgcatgt

SEQ ID NO: 23425 - DNA, 20 bp, synthetic construct
  source 1..20: mol_type = other DNA
ttcttctccgacttggagtt

SEQ ID NO: 23426 - DNA, 20 bp, synthetic construct
  source 1..20: mol_type = other DNA
tctatattgctgacatctga

SEQ ID NO: 23427 - DNA, 20 bp, synthetic construct
  source 1..20: mol_type = other DNA
tttaaacttgcaacactggc

SEQ ID NO: 23428 - DNA, 20 bp, synthetic construct
  source 1..20: mol_type = other DNA
aaaggcctcttttccctgct

SEQ ID NO: 23429 - DNA, 20 bp, synthetic construct
  source 1..20: mol_type = other DNA
tcccctgttgttatttgtac

SEQ ID NO: 23430 - DNA, 20 bp, synthetic construct
  source 1..20: mol_type = other DNA
tcgtggtctgacttgtttaa

SEQ ID NO: 23431 - DNA, 20 bp, synthetic construct
  source 1..20: mol_type = other DNA
cctgcccgcatcattggcat

SEQ ID NO: 23432 - DNA, 20 bp, synthetic construct
  source 1..20: mol_type = other DNA
cgggtctttgcccgtattgg

SEQ ID NO: 23433 - DNA, 20 bp, synthetic construct
  source 1..20: mol_type = other DNA
tttgtggcaaagtttcatga

SEQ ID NO: 23434 - DNA, 20 bp, synthetic construct
  source 1..20: mol_type = other DNA
attcttgcagctatgatgaa

SEQ ID NO: 23435 - DNA, 20 bp, synthetic construct
  source 1..20: mol_type = other DNA
gaaccagaacagtatgagcg

SEQ ID NO: 23436 - DNA, 20 bp, synthetic construct
  source 1..20: mol_type = other DNA
ttacgtttcagcttgcacag

SEQ ID NO: 23437 - DNA, 20 bp, synthetic construct
  source 1..20: mol_type = other DNA
ctgatttcctgcaagtagct

SEQ ID NO: 23438 - DNA, 20 bp, synthetic construct
  source 1..20: mol_type = other DNA
ttcagtacacccagtataga

SEQ ID NO: 23439 - DNA, 20 bp, synthetic construct
  source 1..20: mol_type = other DNA
acataacagcagaatttgtg

SEQ ID NO: 23440 - DNA, 20 bp, synthetic construct
  source 1..20: mol_type = other DNA
gggatgttgaacttaacccc

SEQ ID NO: 23441 - DNA, 20 bp, synthetic construct
  source 1..20: mol_type = other DNA
agtccgaagatggagaaccg

SEQ ID NO: 23442 - DNA, 20 bp, synthetic construct
  source 1..20: mol_type = other DNA
aggggatttcctccactctc

SEQ ID NO: 23443 - DNA, 20 bp, synthetic construct
  source 1..20: mol_type = other DNA
ttagcgcagatgatcagtat

SEQ ID NO: 23444 - DNA, 20 bp, synthetic construct
  source 1..20: mol_type = other DNA
cttttcattttaaggaaact

SEQ ID NO: 23445 - DNA, 20 bp, synthetic construct
  source 1..20: mol_type = other DNA
tggaggcagtggatgtaatt

SEQ ID NO: 23446 - DNA, 20 bp, synthetic construct
  source 1..20: mol_type = other DNA
gcgacgtggaaccagccgtc

SEQ ID NO: 23447 - DNA, 20 bp, synthetic construct
  source 1..20: mol_type = other DNA
gtactgacaatggaatcatt

SEQ ID NO: 23448 - DNA, 20 bp, synthetic construct
  source 1..20: mol_type = other DNA
ctaacaatggattaggcatt

SEQ ID NO: 23449 - DNA, 20 bp, synthetic construct
  source 1..20: mol_type = other DNA
gcggctggccgtctgtactt

SEQ ID NO: 23450 - DNA, 20 bp, synthetic construct
  source 1..20: mol_type = other DNA
caacactggagtgatcaatt

SEQ ID NO: 23451 - DNA, 20 bp, synthetic construct
  source 1..20: mol_type = other DNA
gtttgtgacccttagggccc

SEQ ID NO: 23452 - DNA, 20 bp, synthetic construct
  source 1..20: mol_type = other DNA
cacttttgatgatacagata

SEQ ID NO: 23453 - DNA, 20 bp, synthetic construct
  source 1..20: mol_type = other DNA
ccactgtccctgggctattg

SEQ ID NO: 23454 - DNA, 20 bp, synthetic construct
  source 1..20: mol_type = other DNA
taacgcaccaatgccaacca

SEQ ID NO: 23455 - DNA, 20 bp, synthetic construct
  source 1..20: mol_type = other DNA
aaacatggattctccacttc

SEQ ID NO: 23456 - DNA, 20 bp, synthetic construct
  source 1..20: mol_type = other DNA
tgacccgcaatacttgcggt

SEQ ID NO: 23457 - DNA, 20 bp, synthetic construct
  source 1..20: mol_type = other DNA
ccctgatgaactgaaccctt

SEQ ID NO: 23458 - DNA, 20 bp, synthetic construct
  source 1..20: mol_type = other DNA
catgtttcctgaatttgacc

SEQ ID NO: 23459 - DNA, 20 bp, synthetic construct
  source 1..20: mol_type = other DNA
agccaatatggaaatggaaa

SEQ ID NO: 23460 - DNA, 20 bp, synthetic construct
  source 1..20: mol_type = other DNA
cagttatatctggtctggtg

SEQ ID NO: 23461 - DNA, 20 bp, synthetic construct
  source 1..20: mol_type = other DNA
agatggtgccataggtgcag

SEQ ID NO: 23462 - DNA, 20 bp, synthetic construct
  source 1..20: mol_type = other DNA
aggatcagctgttggagtta

SEQ ID NO: 23463 - DNA, 20 bp, synthetic construct
  source 1..20: mol_type = other DNA
ttcctatattgattctctct

SEQ ID NO: 23464 - DNA, 20 bp, synthetic construct
  source 1..20: mol_type = other DNA
tagtctcgtgcgaccagtca

SEQ ID NO: 23465 - DNA, 20 bp, synthetic construct
  source 1..20: mol_type = other DNA
gctggatatgaaatccccag

SEQ ID NO: 23466 - DNA, 20 bp, synthetic construct
  source 1..20: mol_type = other DNA
ctgatagggtcgcggctggc

SEQ ID NO: 23467 - DNA, 20 bp, synthetic construct
  source 1..20: mol_type = other DNA
ctcagacatgattatgaaag

SEQ ID NO: 23468 - DNA, 20 bp, synthetic construct
  source 1..20: mol_type = other DNA
taattcttgcataacaacac

SEQ ID NO: 23469 - DNA, 20 bp, synthetic construct
  source 1..20: mol_type = other DNA
tgcatataccccacctggtg

SEQ ID NO: 23470 - DNA, 20 bp, synthetic construct
  source 1..20: mol_type = other DNA
atgggtaactgtattccagc

SEQ ID NO: 23471 - DNA, 20 bp, synthetic construct
  source 1..20: mol_type = other DNA
agcctcatttagaataccat

SEQ ID NO: 23472 - DNA, 20 bp, synthetic construct
  source 1..20: mol_type = other DNA
gaccaaatgggctaactatt

SEQ ID NO: 23473 - DNA, 20 bp, synthetic construct
  source 1..20: mol_type = other DNA
ctttactacttacttaaagg

SEQ ID NO: 23474 - DNA, 20 bp, synthetic construct
  source 1..20: mol_type = other DNA
accgttaaccgcccacctac

SEQ ID NO: 23475 - DNA, 20 bp, synthetic construct
  source 1..20: mol_type = other DNA
tctttaatcaatcttatggt

SEQ ID NO: 23476 - DNA, 20 bp, synthetic construct
  source 1..20: mol_type = other DNA
taatatcaattattatagag

SEQ ID NO: 23477 - DNA, 20 bp, synthetic construct
  source 1..20: mol_type = other DNA
ggtgtctaatgctgataggg

SEQ ID NO: 23478 - DNA, 20 bp, synthetic construct
  source 1..20: mol_type = other DNA
ccaagggctgccagtactca

SEQ ID NO: 23479 - DNA, 20 bp, synthetic construct
  source 1..20: mol_type = other DNA
gatttcgcaagacggatttc

SEQ ID NO: 23480 - DNA, 20 bp, synthetic construct
  source 1..20: mol_type = other DNA
gaacataaagactgttacca

SEQ ID NO: 23481 - DNA, 20 bp, synthetic construct
  source 1..20: mol_type = other DNA
ccgagattattgcagacgaa

SEQ ID NO: 23482 - DNA, 20 bp, synthetic construct
  source 1..20: mol_type = other DNA
tagggttcttggcatacatg

SEQ ID NO: 23483 - DNA, 20 bp, synthetic construct
  source 1..20: mol_type = other DNA
gatgatagcatatggtgatg

SEQ ID NO: 23484 - DNA, 20 bp, synthetic construct
  source 1..20: mol_type = other DNA
agatgagagatttcctttcc

SEQ ID NO: 23485 - DNA, 20 bp, synthetic construct
  source 1..20: mol_type = other DNA
cacagaaccatcctaaccat

SEQ ID NO: 23486 - DNA, 20 bp, synthetic construct
  source 1..20: mol_type = other DNA
gtgtatccgtcttggcacac

SEQ ID NO: 23487 - DNA, 20 bp, synthetic construct
  source 1..20: mol_type = other DNA
tattgatcagcgtgagtgga

SEQ ID NO: 23488 - DNA, 20 bp, synthetic construct
  source 1..20: mol_type = other DNA
ggcagggggtctcatagcag

SEQ ID NO: 23489 - DNA, 20 bp, synthetic construct
  source 1..20: mol_type = other DNA
cattgtcaatttggctaatt

SEQ ID NO: 23490 - DNA, 20 bp, synthetic construct
  source 1..20: mol_type = other DNA
gccaggcactcagatctggt

SEQ ID NO: 23491 - DNA, 20 bp, synthetic construct
  source 1..20: mol_type = other DNA
gtccctctggccttatgcaa

SEQ ID NO: 23492 - DNA, 20 bp, synthetic construct
  source 1..20: mol_type = other DNA
ccaactgtatcgtggttctc

SEQ ID NO: 23493 - DNA, 20 bp, synthetic construct
  source 1..20: mol_type = other DNA
acgcatagataggacactca

SEQ ID NO: 23494 - DNA, 20 bp, synthetic construct
  source 1..20: mol_type = other DNA
caactcaccattcattatag

SEQ ID NO: 23495 - DNA, 20 bp, synthetic construct
  source 1..20: mol_type = other DNA
caatcacttttctactgagg

SEQ ID NO: 23496 - DNA, 20 bp, synthetic construct
  source 1..20: mol_type = other DNA
caagaccagagccatagagg

SEQ ID NO: 23497 - DNA, 20 bp, synthetic construct
  source 1..20: mol_type = other DNA
tgtccatggttctatgccat

SEQ ID NO: 23498 - DNA, 20 bp, synthetic construct
  source 1..20: mol_type = other DNA
tatttctgaggagactgttt

SEQ ID NO: 23499 - DNA, 20 bp, synthetic construct
  source 1..20: mol_type = other DNA
tccaacttacaaagagctgg

SEQ ID NO: 23500 - DNA, 20 bp, synthetic construct
  source 1..20: mol_type = other DNA
tttccgcctgcctggtcgtt

SEQ ID NO: 23501 - DNA, 20 bp, synthetic construct
  source 1..20: mol_type = other DNA
acaggctaaggatgcccttc

SEQ ID NO: 23502 - DNA, 20 bp, synthetic construct
  source 1..20: mol_type = other DNA
acctttcttcgactgggtct

SEQ ID NO: 23503 - DNA, 20 bp, synthetic construct
  source 1..20: mol_type = other DNA
ggtatgcatggttgacggta

SEQ ID NO: 23504 - DNA, 20 bp, synthetic construct
  source 1..20: mol_type = other DNA
ggaccgcatcctcaccacga

SEQ ID NO: 23505 - DNA, 20 bp, synthetic construct
  source 1..20: mol_type = other DNA
aatctacggacatgtgtaca

SEQ ID NO: 23506 - DNA, 20 bp, synthetic construct
  source 1..20: mol_type = other DNA
tgcagcacactgttaccatt

SEQ ID NO: 23507 - DNA, 20 bp, synthetic construct
  source 1..20: mol_type = other DNA
tctccttgaccgcagcacac

SEQ ID NO: 23508 - DNA, 20 bp, synthetic construct
  source 1..20: mol_type = other DNA
cggtgcgccacgcacaaccc

SEQ ID NO: 23509 - DNA, 20 bp, synthetic construct
  source 1..20: mol_type = other DNA
ggcgcggaaatactcttccg

SEQ ID NO: 23510 - DNA, 20 bp, synthetic construct
  source 1..20: mol_type = other DNA
ccggttggtgaccgcatttg

SEQ ID NO: 23511 - DNA, 20 bp, synthetic construct
  source 1..20: mol_type = other DNA
gcgtgatctcaatgatccgt

SEQ ID NO: 23512 - DNA, 20 bp, synthetic construct
  source 1..20: mol_type = other DNA
tggccaaggtaaaagtttcc

SEQ ID NO: 23513 - DNA, 20 bp, synthetic construct
  source 1..20: mol_type = other DNA
cttcaagtacttcgcccaaa

SEQ ID NO: 23514 - DNA, 20 bp, synthetic construct
  source 1..20: mol_type = other DNA
tcaaccaccaattctcaacg

SEQ ID NO: 23515 - DNA, 20 bp, synthetic construct
  source 1..20: mol_type = other DNA
accatacgaggggccagtga

SEQ ID NO: 23516 - DNA, 20 bp, synthetic construct
  source 1..20: mol_type = other DNA
accacaccacgaggggttaa

SEQ ID NO: 23517 - DNA, 20 bp, synthetic construct
  source 1..20: mol_type = other DNA
ccattttgcccagtacaaaa

SEQ ID NO: 23518 - DNA, 20 bp, synthetic construct
  source 1..20: mol_type = other DNA
tgattacgatctggactttg

SEQ ID NO: 23519 - DNA, 20 bp, synthetic construct
  source 1..20: mol_type = other DNA
gcgttgggtgaacgccgtgt

SEQ ID NO: 23520 - DNA, 20 bp, synthetic construct
  source 1..20: mol_type = other DNA
ctaaaggagctgtggctata

SEQ ID NO: 23521 - DNA, 20 bp, synthetic construct
  source 1..20: mol_type = other DNA
tgtgtgtcgatttcaacaat

SEQ ID NO: 23522 - DNA, 20 bp, synthetic construct
  source 1..20: mol_type = other DNA
aagtttgtggattcatgggg

SEQ ID NO: 23523 - DNA, 20 bp, synthetic construct
  source 1..20: mol_type = other DNA
tgacaacattccttaaacat

SEQ ID NO: 23524 - DNA, 20 bp, synthetic construct
  source 1..20: mol_type = other DNA
taactttaattggtcttgat

SEQ ID NO: 23525 - DNA, 20 bp, synthetic construct
  source 1..20: mol_type = other DNA
actgggttgattgtaacact

SEQ ID NO: 23526 - DNA, 20 bp, synthetic construct
  source 1..20: mol_type = other DNA
taataacgtcaattgtctca

SEQ ID NO: 23527 - DNA, 20 bp, synthetic construct
  source 1..20: mol_type = other DNA
atggcactctcaccacccaa

SEQ ID NO: 23528 - DNA, 20 bp, synthetic construct
  source 1..20: mol_type = other DNA
tgggtgagaacccttccttt

SEQ ID NO: 23529 - DNA, 20 bp, synthetic construct
  source 1..20: mol_type = other DNA
gttgtgaattgttctcaatt

SEQ ID NO: 23530 - DNA, 20 bp, synthetic construct
  source 1..20: mol_type = other DNA
tagttgtggaaacagtttgt

SEQ ID NO: 23531 - DNA, 20 bp, synthetic construct
  source 1..20: mol_type = other DNA
gggaaattggagacttattt

SEQ ID NO: 23532 - DNA, 20 bp, synthetic construct
  source 1..20: mol_type = other DNA
atgaacaggtgctacatgct

SEQ ID NO: 23533 - DNA, 20 bp, synthetic construct
  source 1..20: mol_type = other DNA
agaagttcaaatgggttcaa

SEQ ID NO: 23534 - DNA, 20 bp, synthetic construct
  source 1..20: mol_type = other DNA
acaccaatgagagatcaaat

SEQ ID NO: 23535 - DNA, 20 bp, synthetic construct
  source 1..20: mol_type = other DNA
tttccgcctacttggtcgtc

SEQ ID NO: 23536 - DNA, 20 bp, synthetic construct
  source 1..20: mol_type = other DNA
gttctaccgtcgttcccgac

SEQ ID NO: 23537 - DNA, 20 bp, synthetic construct
  source 1..20: mol_type = other DNA
tagcggagcatggtggccgt

SEQ ID NO: 23538 - DNA, 20 bp, synthetic construct
  source 1..20: mol_type = other DNA
atgcccttcaggtaccccga

SEQ ID NO: 23539 - DNA, 20 bp, synthetic construct
  source 1..20: mol_type = other DNA
tctgctatacgctctcagag

SEQ ID NO: 23540 - DNA, 20 bp, synthetic construct
  source 1..20: mol_type = other DNA
cctcgaatgggtctacgact

SEQ ID NO: 23541 - DNA, 20 bp, synthetic construct
  source 1..20: mol_type = other DNA
cgatcaagaaccattcaacg

SEQ ID NO: 23542 - DNA, 20 bp, synthetic construct
  source 1..20: mol_type = other DNA
cagtgacccgtttgggcggt

SEQ ID NO: 23543 - DNA, 20 bp, synthetic construct
  source 1..20: mol_type = other DNA
gctagctagtgctggcaaag

SEQ ID NO: 23544 - DNA, 20 bp, synthetic construct
  source 1..20: mol_type = other DNA
cgtgaaagtcaagccaaagg

SEQ ID NO: 23545 - DNA, 20 bp, synthetic construct
  source 1..20: mol_type = other DNA
actggacaacactaccaacc

SEQ ID NO: 23546 - DNA, 20 bp, synthetic construct
  source 1..20: mol_type = other DNA
caccttcgtggtaaagaaga

SEQ ID NO: 23547 - DNA, 20 bp, synthetic construct
  source 1..20: mol_type = other DNA
tgacatcaacgacatatttg

SEQ ID NO: 23548 - DNA, 20 bp, synthetic construct
  source 1..20: mol_type = other DNA
atacaaggaggccaaggaat

SEQ ID NO: 23549 - DNA, 20 bp, synthetic construct
  source 1..20: mol_type = other DNA
gaacgttctcgcgcaggcaa

SEQ ID NO: 23550 - DNA, 20 bp, synthetic construct
  source 1..20: mol_type = other DNA
atccaccacggggttcatcc

SEQ ID NO: 23551 - DNA, 20 bp, synthetic construct
  source 1..20: mol_type = other DNA
agacgggtacaagatcaaca

SEQ ID NO: 23552 - DNA, 20 bp, synthetic construct
  source 1..20: mol_type = other DNA
cgacgtaactcttggcgacg

SEQ ID NO: 23553 - DNA, 20 bp, synthetic construct
  source 1..20: mol_type = other DNA
cgacaagatcatgttggacg

SEQ ID NO: 23554 - DNA, 20 bp, synthetic construct
  source 1..20: mol_type = other DNA
gaagggaacccccgtcgtcg

SEQ ID NO: 23555 - DNA, 20 bp, synthetic construct
  source 1..20: mol_type = other DNA
ccacgtgatgcgcaaaacca

SEQ ID NO: 23556 - DNA, 20 bp, synthetic construct
  source 1..20: mol_type = other DNA
cgccctgatcgacttcgaaa

SEQ ID NO: 23557 - DNA, 20 bp, synthetic construct
  source 1..20: mol_type = other DNA
acacattctctacaccagaa

SEQ ID NO: 23558 - DNA, 20 bp, synthetic construct
  source 1..20: mol_type = other DNA
aagcatcatcaacacaattt

SEQ ID NO: 23559 - DNA, 20 bp, synthetic construct
  source 1..20: mol_type = other DNA
gtgcggctccggtccctgga

SEQ ID NO: 23560 - DNA, 20 bp, synthetic construct
  source 1..20: mol_type = other DNA
ggaggttctctaccaggagt

SEQ ID NO: 23561 - DNA, 20 bp, synthetic construct
  source 1..20: mol_type = other DNA
ccttcttttttcctttcttt

SEQ ID NO: 23562 - DNA, 20 bp, synthetic construct
  source 1..20: mol_type = other DNA
cggtgtgggttctcttcagc

SEQ ID NO: 23563 - DNA, 20 bp, synthetic construct
  source 1..20: mol_type = other DNA
tacagtatgagtgtgttact

SEQ ID NO: 23564 - DNA, 20 bp, synthetic construct
  source 1..20: mol_type = other DNA
caacactgtggctgaaatgg

SEQ ID NO: 23565 - DNA, 20 bp, synthetic construct
  source 1..20: mol_type = other DNA
tgaagctaaagggaacaact

SEQ ID NO: 23566 - DNA, 20 bp, synthetic construct
  source 1..20: mol_type = other DNA
gaagtttgattacatcaaat

SEQ ID NO: 23567 - DNA, 20 bp, synthetic construct
  source 1..20: mol_type = other DNA
aggacccagaaacattcctg

SEQ ID NO: 23568 - DNA, 20 bp, synthetic construct
  source 1..20: mol_type = other DNA
atgaagtgaatggaactgtg

SEQ ID NO: 23569 - DNA, 20 bp, synthetic construct
  source 1..20: mol_type = other DNA
aacaaaacaagtgtccctgg

SEQ ID NO: 23570 - DNA, 20 bp, synthetic construct
  source 1..20: mol_type = other DNA
aagggaattggggaccttcc

SEQ ID NO: 23571 - DNA, 20 bp, synthetic construct
  source 1..20: mol_type = other DNA
ctgggtttgctgtagggttc

SEQ ID NO: 23572 - DNA, 20 bp, synthetic construct
  source 1..20: mol_type = other DNA
gacagagttatctctatgtc

SEQ ID NO: 23573 - DNA, 20 bp, synthetic construct
  source 1..20: mol_type = other DNA
ttcttttctttctttttcag

SEQ ID NO: 23574 - DNA, 20 bp, synthetic construct
  source 1..20: mol_type = other DNA
gaagtctgattgatgtgatg

SEQ ID NO: 23575 - DNA, 20 bp, synthetic construct
  source 1..20: mol_type = other DNA
ggattgcgaaaaccttaagg

SEQ ID NO: 23576 - DNA, 20 bp, synthetic construct
  source 1..20: mol_type = other DNA
aagatttggctgggttcata

SEQ ID NO: 23577 - DNA, 20 bp, synthetic construct
  source 1..20: mol_type = other DNA
ttttgatatcatttattttg

SEQ ID NO: 23578 - DNA, 20 bp, synthetic construct
  source 1..20: mol_type = other DNA
ctcaaactagtcctagtgtg

SEQ ID NO: 23579 - DNA, 20 bp, synthetic construct
  source 1..20: mol_type = other DNA
gaaaggagagtgcaatggaa

SEQ ID NO: 23580 - DNA, 20 bp, synthetic construct
  source 1..20: mol_type = other DNA
tgtggaaaccttcagcaggt

SEQ ID NO: 23581 - DNA, 20 bp, synthetic construct
  source 1..20: mol_type = other DNA
ctgcttgtttagctaaggca

SEQ ID NO: 23582 - DNA, 20 bp, synthetic construct
  source 1..20: mol_type = other DNA
gctcaatgggtgtgacgacc

SEQ ID NO: 23583 - DNA, 20 bp, synthetic construct
  source 1..20: mol_type = other DNA
catctctggtatcaaatttc

SEQ ID NO: 23584 - DNA, 20 bp, synthetic construct
  source 1..20: mol_type = other DNA
ccaaactagcatcaactata

SEQ ID NO: 23585 - DNA, 20 bp, synthetic construct
  source 1..20: mol_type = other DNA
acacagaactattttcagca

SEQ ID NO: 23586 - DNA, 20 bp, synthetic construct
  source 1..20: mol_type = other DNA
cttggagctgggacccaagt

SEQ ID NO: 23587 - DNA, 20 bp, synthetic construct
  source 1..20: mol_type = other DNA
aaattgagaatcccagacaa

SEQ ID NO: 23588 - DNA, 20 bp, synthetic construct
  source 1..20: mol_type = other DNA
atgctggaataacaccagca

SEQ ID NO: 23589 - DNA, 20 bp, synthetic construct
  source 1..20: mol_type = other DNA
gctacaaaggagtaagctgt

SEQ ID NO: 23590 - DNA, 20 bp, synthetic construct
  source 1..20: mol_type = other DNA
ccatgcaaatatgaagtgcg

SEQ ID NO: 23591 - DNA, 20 bp, synthetic construct
  source 1..20: mol_type = other DNA
actaataaactatatgaaac

SEQ ID NO: 23592 - DNA, 20 bp, synthetic construct
  source 1..20: mol_type = other DNA
attgaaggatggtgtcaaaa

SEQ ID NO: 23593 - DNA, 20 bp, synthetic construct
  source 1..20: mol_type = other DNA
cgcttagcagtaaaaatgct

SEQ ID NO: 23594 - DNA, 20 bp, synthetic construct
  source 1..20: mol_type = other DNA
atcaatagaacagcagttac

SEQ ID NO: 23595 - DNA, 20 bp, synthetic construct
  source 1..20: mol_type = other DNA
ttactcaacaagatctgtct

SEQ ID NO: 23596 - DNA, 20 bp, synthetic construct
  source 1..20: mol_type = other DNA
ttatgtagttggggatctca

SEQ ID NO: 23597 - DNA, 20 bp, synthetic construct
  source 1..20: mol_type = other DNA
gaaggagcaggaaattggat

SEQ ID NO: 23598 - DNA, 20 bp, synthetic construct
  source 1..20: mol_type = other DNA
attgggaagatcaaggaaac

SEQ ID NO: 23599 - DNA, 20 bp, synthetic construct
  source 1..20: mol_type = other DNA
tttctctcatttgcgagttt

SEQ ID NO: 23600 - DNA, 20 bp, synthetic construct
  source 1..20: mol_type = other DNA
ttcttgattaaatatttact

SEQ ID NO: 23601 - DNA, 20 bp, synthetic construct
  source 1..20: mol_type = other DNA
cctttggcccgaacagccaa

SEQ ID NO: 23602 - DNA, 20 bp, synthetic construct
  source 1..20: mol_type = other DNA
gatcatctggaggatgatcc

SEQ ID NO: 23603 - DNA, 20 bp, synthetic construct
  source 1..20: mol_type = other DNA
acgaccgccaatcgaagact

SEQ ID NO: 23604 - DNA, 20 bp, synthetic construct
  source 1..20: mol_type = other DNA
gtaccagatgctgtgcaaga

SEQ ID NO: 23605 - DNA, 20 bp, synthetic construct
  source 1..20: mol_type = other DNA
tgctcttcgtcctgggctct

SEQ ID NO: 23606 - DNA, 20 bp, synthetic construct
  source 1..20: mol_type = other DNA
atttcgttcaggtgtgcctc

SEQ ID NO: 23607 - DNA, 20 bp, synthetic construct
  source 1..20: mol_type = other DNA
gatcagagcccggcgggaac

SEQ ID NO: 23608 - DNA, 20 bp, synthetic construct
  source 1..20: mol_type = other DNA
gcgaacccaatgacaaccac

SEQ ID NO: 23609 - DNA, 20 bp, synthetic construct
  source 1..20: mol_type = other DNA
tccgcccagagcccacagac

SEQ ID NO: 23610 - DNA, 20 bp, synthetic construct
  source 1..20: mol_type = other DNA
acaggaccaagctgattctg

SEQ ID NO: 23611 - DNA, 20 bp, synthetic construct
  source 1..20: mol_type = other DNA
cttggggagacaaaaagagg

SEQ ID NO: 23612 - DNA, 20 bp, synthetic construct
  source 1..20: mol_type = other DNA
tcaaaacaaatgactttgct

SEQ ID NO: 23613 - DNA, 20 bp, synthetic construct
  source 1..20: mol_type = other DNA
tatcacgttaaagatttaga

SEQ ID NO: 23614 - DNA, 20 bp, synthetic construct
  source 1..20: mol_type = other DNA
tgggcggcttccatttttac

SEQ ID NO: 23615 - DNA, 20 bp, synthetic construct
  source 1..20: mol_type = other DNA
tcatgatgcagcctttcttg

SEQ ID NO: 23616 - DNA, 20 bp, synthetic construct
  source 1..20: mol_type = other DNA
aagggtgccggaacaatttc

SEQ ID NO: 23617 - DNA, 20 bp, synthetic construct
  source 1..20: mol_type = other DNA
aaccgtattgtctgtttttc

SEQ ID NO: 23618 - DNA, 20 bp, synthetic construct
  source 1..20: mol_type = other DNA
caggacaccgagtggtaaac

SEQ ID NO: 23619 - DNA, 20 bp, synthetic construct
  source 1..20: mol_type = other DNA
tgatatagaaggaatattat

SEQ ID NO: 23620 - DNA, 20 bp, synthetic construct
  source 1..20: mol_type = other DNA
tgttatcagagatgctttgc

SEQ ID NO: 23621 - DNA, 20 bp, synthetic construct
  source 1..20: mol_type = other DNA
gtcgtcagttattagacatt

SEQ ID NO: 23622 - DNA, 20 bp, synthetic construct
  source 1..20: mol_type = other DNA
gtataaaataaatttaatta

SEQ ID NO: 23623 - DNA, 20 bp, synthetic construct
  source 1..20: mol_type = other DNA
aagatttgtgtcttaattag

SEQ ID NO: 23624 - DNA, 20 bp, synthetic construct
  source 1..20: mol_type = other DNA
gttgacattgacgttcacca

SEQ ID NO: 23625 - DNA, 20 bp, synthetic construct
  source 1..20: mol_type = other DNA
agaacagtgttgaccctaac

SEQ ID NO: 23626 - DNA, 20 bp, synthetic construct
  source 1..20: mol_type = other DNA
aatggtgtgtgctgctaatc

SEQ ID NO: 23627 - DNA, 20 bp, synthetic construct
  source 1..20: mol_type = other DNA
agcttcgaaaggtaccgggc

SEQ ID NO: 23628 - DNA, 20 bp, synthetic construct
  source 1..20: mol_type = other DNA
tgcttattcttactgtaatg

SEQ ID NO: 23629 - DNA, 20 bp, synthetic construct
  source 1..20: mol_type = other DNA
caaatcctgataatatcatg

SEQ ID NO: 23630 - DNA, 20 bp, synthetic construct
  source 1..20: mol_type = other DNA
atttaacttactatgatact

SEQ ID NO: 23631 - DNA, 20 bp, synthetic construct
  source 1..20: mol_type = other DNA
atatttcatagggagtgaag

SEQ ID NO: 23632 - DNA, 20 bp, synthetic construct
  source 1..20: mol_type = other DNA
aatgatcgatccagtttata

SEQ ID NO: 23633 - DNA, 20 bp, synthetic construct
  source 1..20: mol_type = other DNA
attcaacttagttgatgatg

SEQ ID NO: 23634 - DNA, 20 bp, synthetic construct
  source 1..20: mol_type = other DNA
caagggtggtacatcatctg

SEQ ID NO: 23635 - DNA, 20 bp, synthetic construct
  source 1..20: mol_type = other DNA
tgttaggttattaagttcaa

SEQ ID NO: 23636 - DNA, 20 bp, synthetic construct
  source 1..20: mol_type = other DNA
agtgtacaagacgttagatg

SEQ ID NO: 23637 - DNA, 20 bp, synthetic construct
  source 1..20: mol_type = other DNA
cataacatccagcttgtcaa

SEQ ID NO: 23638 - DNA, 20 bp, synthetic construct
  source 1..20: mol_type = other DNA
catattcaaacccaaaacag

SEQ ID NO: 23639 - DNA, 20 bp, synthetic construct
  source 1..20: mol_type = other DNA
ataaattaaagttatttgaa

SEQ ID NO: 23640 - DNA, 20 bp, synthetic construct
  source 1..20: mol_type = other DNA
cctcatattacttcaaaaaa

SEQ ID NO: 23641 - DNA, 20 bp, synthetic construct
  source 1..20: mol_type = other DNA
cacggtacagaagcctaatt

SEQ ID NO: 23642 - DNA, 20 bp, synthetic construct
  source 1..20: mol_type = other DNA
tgactattgatggaactaca

SEQ ID NO: 23643 - DNA, 20 bp, synthetic construct
  source 1..20: mol_type = other DNA
gagtgtatattaaagaccca

SEQ ID NO: 23644 - DNA, 20 bp, synthetic construct
  source 1..20: mol_type = other DNA
cagcgagaaggatatcttcg

SEQ ID NO: 23645 - DNA, 20 bp, synthetic construct
  source 1..20: mol_type = other DNA
tgactttgttaacgccatca

SEQ ID NO: 23646 - DNA, 20 bp, synthetic construct
  source 1..20: mol_type = other DNA
aattaacaggattcgtgaga

SEQ ID NO: 23647 - DNA, 20 bp, synthetic construct
  source 1..20: mol_type = other DNA
taagcaaaatatcgctggat

SEQ ID NO: 23648 - DNA, 20 bp, synthetic construct
  source 1..20: mol_type = other DNA
taaaccgtaagtaaattatc

SEQ ID NO: 23649 - DNA, 20 bp, synthetic construct
  source 1..20: mol_type = other DNA
caacgcagaggtggtgtttg

SEQ ID NO: 23650 - DNA, 20 bp, synthetic construct
  source 1..20: mol_type = other DNA
cagttgaatgttgaagtcaa

SEQ ID NO: 23651 - DNA, 20 bp, synthetic construct
  source 1..20: mol_type = other DNA
ggatcacgttatatgtctgc

SEQ ID NO: 23652 - DNA, 20 bp, synthetic construct
  source 1..20: mol_type = other DNA
gttattgttaatgaaagcac

SEQ ID NO: 23653 - DNA, 20 bp, synthetic construct
  source 1..20: mol_type = other DNA
attctcatctcagaatgaga

SEQ ID NO: 23654 - DNA, 20 bp, synthetic construct
  source 1..20: mol_type = other DNA
cattagtgcgtgtttatcac

SEQ ID NO: 23655 - DNA, 20 bp, synthetic construct
  source 1..20: mol_type = other DNA
gctattgtgggcttgtcggg

SEQ ID NO: 23656 - DNA, 20 bp, synthetic construct
  source 1..20: mol_type = other DNA
ttctcgccacagacatgggg

SEQ ID NO: 23657 - DNA, 20 bp, synthetic construct
  source 1..20: mol_type = other DNA
tgtcgattccagtgcatgct

SEQ ID NO: 23658 - DNA, 20 bp, synthetic construct
  source 1..20: mol_type = other DNA
ggttcattgtcataacagtg

SEQ ID NO: 23659 - DNA, 20 bp, synthetic construct
  source 1..20: mol_type = other DNA
atcgaaaaacggcatctttt

SEQ ID NO: 23660 - DNA, 20 bp, synthetic construct
  source 1..20: mol_type = other DNA
acatagagggcagtaagtac

SEQ ID NO: 23661 - DNA, 20 bp, synthetic construct
  source 1..20: mol_type = other DNA
ttggaggagtgggatttctc

SEQ ID NO: 23662 - DNA, 20 bp, synthetic construct
  source 1..20: mol_type = other DNA
tggagctacgttgtggtgag

SEQ ID NO: 23663 - DNA, 20 bp, synthetic construct
  source 1..20: mol_type = other DNA
gacgtgtggaggctgtgctc

SEQ ID NO: 23664 - DNA, 20 bp, synthetic construct
  source 1..20: mol_type = other DNA
gtgtcccagaatcgccacgg

SEQ ID NO: 23665 - DNA, 20 bp, synthetic construct
  source 1..20: mol_type = other DNA
tgggggctgcagtcaagagc

SEQ ID NO: 23666 - DNA, 20 bp, synthetic construct
  source 1..20: mol_type = other DNA
taagtgaaggtggagtccct

SEQ ID NO: 23667 - DNA, 20 bp, synthetic construct
  source 1..20: mol_type = other DNA
aggcctcactgagcaacatt

SEQ ID NO: 23668 - DNA, 20 bp, synthetic construct
  source 1..20: mol_type = other DNA
ccacggcaatggcggtctgg

SEQ ID NO: 23669 - DNA, 20 bp, synthetic construct
  source 1..20: mol_type = other DNA
tggtgggcgtcatgctcact

SEQ ID NO: 23670 - DNA, 20 bp, synthetic construct
  source 1..20: mol_type = other DNA
atgaggggggagaggtcaat

SEQ ID NO: 23671 - DNA, 20 bp, synthetic construct
  source 1..20: mol_type = other DNA
agatgctgagctcggggcga

SEQ ID NO: 23672 - DNA, 20 bp, synthetic construct
  source 1..20: mol_type = other DNA
ccatgtggcacgtcacaagg

SEQ ID NO: 23673 - DNA, 20 bp, synthetic construct
  source 1..20: mol_type = other DNA
agacacaccaatgtcagccg

SEQ ID NO: 23674 - DNA, 20 bp, synthetic construct
  source 1..20: mol_type = other DNA
tagttcttgcccctacccgg

SEQ ID NO: 23675 - DNA, 20 bp, synthetic construct
  source 1..20: mol_type = other DNA
cagctcaacgccggggcagg

SEQ ID NO: 23676 - DNA, 20 bp, synthetic construct
  source 1..20: mol_type = other DNA
agatgaagatgccagaagtg

SEQ ID NO: 23677 - DNA, 20 bp, synthetic construct
  source 1..20: mol_type = other DNA
tgtggtgctttgtggcaaga

SEQ ID NO: 23678 - DNA, 20 bp, synthetic construct
  source 1..20: mol_type = other DNA
gaagtagcgatgataataga

SEQ ID NO: 23679 - DNA, 20 bp, synthetic construct
  source 1..20: mol_type = other DNA
tccagccagcacgatcctgg

SEQ ID NO: 23680 - DNA, 20 bp, synthetic construct
  source 1..20: mol_type = other DNA
tccatcccgagactgagaca

SEQ ID NO: 23681 - DNA, 20 bp, synthetic construct
  source 1..20: mol_type = other DNA
ggctgaatggttgctctagg

SEQ ID NO: 23682 - DNA, 20 bp, synthetic construct
  source 1..20: mol_type = other DNA
gaccagaggtacttgaggct

SEQ ID NO: 23683 - DNA, 20 bp, synthetic construct
  source 1..20: mol_type = other DNA
accagcggggacctgccaag

SEQ ID NO: 23684 - DNA, 20 bp, synthetic construct
  source 1..20: mol_type = other DNA
taactagaagagaccaacgt

SEQ ID NO: 23685 - DNA, 20 bp, synthetic construct
  source 1..20: mol_type = other DNA
ctcaccatttccatgagctg

SEQ ID NO: 23686 - DNA, 20 bp, synthetic construct
  source 1..20: mol_type = other DNA
acaggagggatctgagaacg

SEQ ID NO: 23687 - DNA, 20 bp, synthetic construct
  source 1..20: mol_type = other DNA
cgggaagctggtcgctcccg

SEQ ID NO: 23688 - DNA, 20 bp, synthetic construct
  source 1..20: mol_type = other DNA
gaactgggaggttatgaagg

SEQ ID NO: 23689 - DNA, 20 bp, synthetic construct
  source 1..20: mol_type = other DNA
gatgttgaaagctattgcta

SEQ ID NO: 23690 - DNA, 20 bp, synthetic construct
  source 1..20: mol_type = other DNA
ggacatgacatacgcacaag

SEQ ID NO: 23691 - DNA, 20 bp, synthetic construct
  source 1..20: mol_type = other DNA
taacgacccggaactattgg

SEQ ID NO: 23692 - DNA, 20 bp, synthetic construct
  source 1..20: mol_type = other DNA
aatcttagctgcacagaatc

SEQ ID NO: 23693 - DNA, 20 bp, synthetic construct
  source 1..20: mol_type = other DNA
agtttaccgcaatcttttca

SEQ ID NO: 23694 - DNA, 20 bp, synthetic construct
  source 1..20: mol_type = other DNA
ctcgttttttgagcatactt

SEQ ID NO: 23695 - DNA, 20 bp, synthetic construct
  source 1..20: mol_type = other DNA
tccaagctgggcgtttatta

SEQ ID NO: 23696 - DNA, 20 bp, synthetic construct
  source 1..20: mol_type = other DNA
ctgacacagatgtaacgttc

SEQ ID NO: 23697 - DNA, 20 bp, synthetic construct
  source 1..20: mol_type = other DNA
ttgttgaagtttctggagca

SEQ ID NO: 23698 - DNA, 20 bp, synthetic construct
  source 1..20: mol_type = other DNA
gtgaagtaggagaatctagt

SEQ ID NO: 23699 - DNA, 20 bp, synthetic construct
  source 1..20: mol_type = other DNA
aagctaatgctggtccagtt

SEQ ID NO: 23700 - DNA, 20 bp, synthetic construct
  source 1..20: mol_type = other DNA
aacttctggcacgttccacc

SEQ ID NO: 23701 - DNA, 20 bp, synthetic construct
  source 1..20: mol_type = other DNA
cgtagtgattgtaagatcct

SEQ ID NO: 23702 - DNA, 20 bp, synthetic construct
  source 1..20: mol_type = other DNA
tccctgtgatcagtatcaac

SEQ ID NO: 23703 - DNA, 20 bp, synthetic construct
  source 1..20: mol_type = other DNA
tcttacgtggaccccgcggt

SEQ ID NO: 23704 - DNA, 20 bp, synthetic construct
  source 1..20: mol_type = other DNA
tctggtgttcttgaccccaa

SEQ ID NO: 23705 - DNA, 20 bp, synthetic construct
  source 1..20: mol_type = other DNA
tcttcccacatctccaaact

SEQ ID NO: 23706 - DNA, 20 bp, synthetic construct
  source 1..20: mol_type = other DNA
accgccccagtggtcgtcgc

SEQ ID NO: 23707 - DNA, 20 bp, synthetic construct
  source 1..20: mol_type = other DNA
aacaccctagccaaccccac

SEQ ID NO: 23708 - DNA, 20 bp, synthetic construct
  source 1..20: mol_type = other DNA
caggtggtggtgaacggtac

SEQ ID NO: 23709 - DNA, 20 bp, synthetic construct
  source 1..20: mol_type = other DNA
ggttgcacacccaataccac

SEQ ID NO: 23710 - DNA, 20 bp, synthetic construct
  source 1..20: mol_type = other DNA
tgctactcaccgccaagcgg

SEQ ID NO: 23711 - DNA, 20 bp, synthetic construct
  source 1..20: mol_type = other DNA
ccctatgacgccacctctcc

SEQ ID NO: 23712 - DNA, 20 bp, synthetic construct
  source 1..20: mol_type = other DNA
gatgtgctcaacaccacgct

SEQ ID NO: 23713 - DNA, 20 bp, synthetic construct
  source 1..20: mol_type = other DNA
aagacgaacgccatcgtcaa

SEQ ID NO: 23714 - DNA, 20 bp, synthetic construct
  source 1..20: mol_type = other DNA
agcgatggaacacgccagat

SEQ ID NO: 23715 - DNA, 20 bp, synthetic construct
  source 1..20: mol_type = other DNA
gtctctaacatcaccggtgt

SEQ ID NO: 23716 - DNA, 20 bp, synthetic construct
  source 1..20: mol_type = other DNA
agaaacaccactctgggcgc

SEQ ID NO: 23717 - DNA, 20 bp, synthetic construct
  source 1..20: mol_type = other DNA
tccctccttgcctctgtcct

SEQ ID NO: 23718 - DNA, 20 bp, synthetic construct
  source 1..20: mol_type = other DNA
gctaggttggatcgggcctc

SEQ ID NO: 23719 - DNA, 20 bp, synthetic construct
  source 1..20: mol_type = other DNA
tattcgggcatgcctcaact

SEQ ID NO: 23720 - DNA, 20 bp, synthetic construct
  source 1..20: mol_type = other DNA
cgctttctgggctcccaccc

SEQ ID NO: 23721 - DNA, 20 bp, synthetic construct
  source 1..20: mol_type = other DNA
tcctgcgcattcagaattgt

SEQ ID NO: 23722 - DNA, 20 bp, synthetic construct
  source 1..20: mol_type = other DNA
ccactgttcgtcctggtaga

SEQ ID NO: 23723 - DNA, 20 bp, synthetic construct
  source 1..20: mol_type = other DNA
agacaagcttttcactatcc

SEQ ID NO: 23724 - DNA, 20 bp, synthetic construct
  source 1..20: mol_type = other DNA
cactactcaagaggcagcga

SEQ ID NO: 23725 - DNA, 20 bp, synthetic construct
  source 1..20: mol_type = other DNA
acttccagacgcactgacag

SEQ ID NO: 23726 - DNA, 20 bp, synthetic construct
  source 1..20: mol_type = other DNA
ttcctaccagttcctcacta

SEQ ID NO: 23727 - DNA, 20 bp, synthetic construct
  source 1..20: mol_type = other DNA
aacggggaagctgctgttag

SEQ ID NO: 23728 - DNA, 20 bp, synthetic construct
  source 1..20: mol_type = other DNA
caatacaaacacagtatcag

SEQ ID NO: 23729 - DNA, 20 bp, synthetic construct
  source 1..20: mol_type = other DNA
tagattcagcgtcccgtttg

SEQ ID NO: 23730 - DNA, 20 bp, synthetic construct
  source 1..20: mol_type = other DNA
gggccagggagtggttggat

SEQ ID NO: 23731 - DNA, 20 bp, synthetic construct
  source 1..20: mol_type = other DNA
tgacggtatggtggagaggt

SEQ ID NO: 23732 - DNA, 20 bp, synthetic construct
  source 1..20: mol_type = other DNA
tttaccattactggaagcgc

SEQ ID NO: 23733 - DNA, 20 bp, synthetic construct
  source 1..20: mol_type = other DNA
gcagcaggccgtggtagtta

SEQ ID NO: 23734 - DNA, 20 bp, synthetic construct
  source 1..20: mol_type = other DNA
taagaaacatgggtttccag

SEQ ID NO: 23735 - DNA, 20 bp, synthetic construct
  source 1..20: mol_type = other DNA
cattgagatgccagaggaaa

SEQ ID NO: 23736 - DNA, 20 bp, synthetic construct
  source 1..20: mol_type = other DNA
gcagagctcttcacttacca

SEQ ID NO: 23737 - DNA, 20 bp, synthetic construct
  source 1..20: mol_type = other DNA
caccccttctcttacgggag

SEQ ID NO: 23738 - DNA, 20 bp, synthetic construct
  source 1..20: mol_type = other DNA
tgacttgatatgaccaagag

SEQ ID NO: 23739 - DNA, 20 bp, synthetic construct
  source 1..20: mol_type = other DNA
cgtatggcgcatgctcatgg

SEQ ID NO: 23740 - DNA, 20 bp, synthetic construct
  source 1..20: mol_type = other DNA
ctaagatggcaatctatgag

SEQ ID NO: 23741 - DNA, 20 bp, synthetic construct
  source 1..20: mol_type = other DNA
ataaacataaaggtgagact

SEQ ID NO: 23742 - DNA, 20 bp, synthetic construct
  source 1..20: mol_type = other DNA
gagagtggacatgccccttg

SEQ ID NO: 23743 - DNA, 20 bp, synthetic construct
  source 1..20: mol_type = other DNA
aacagcaaaacaatgacttc

SEQ ID NO: 23744 - DNA, 20 bp, synthetic construct
  source 1..20: mol_type = other DNA
ataattttgttactttagta

SEQ ID NO: 23745 - DNA, 20 bp, synthetic construct
  source 1..20: mol_type = other DNA
cagactcaattccatctgct

SEQ ID NO: 23746 - DNA, 20 bp, synthetic construct
  source 1..20: mol_type = other DNA
ttataacctcatatcatgct

SEQ ID NO: 23747 - DNA, 20 bp, synthetic construct
  source 1..20: mol_type = other DNA
ttagagatcaccaacagaga

SEQ ID NO: 23748 - DNA, 20 bp, synthetic construct
  source 1..20: mol_type = other DNA
tgttttccattcttgttaag

SEQ ID NO: 23749 - DNA, 20 bp, synthetic construct
  source 1..20: mol_type = other DNA
tccctgtttgtacatccact

SEQ ID NO: 23750 - DNA, 20 bp, synthetic construct
  source 1..20: mol_type = other DNA
caatggggataaggaagaga

SEQ ID NO: 23751 - DNA, 20 bp, synthetic construct
  source 1..20: mol_type = other DNA
ccatttttaattctatcatt

SEQ ID NO: 23752 - DNA, 20 bp, synthetic construct
  source 1..20: mol_type = other DNA
tcacaatgaccccagctgat

SEQ ID NO: 23753 - DNA, 20 bp, synthetic construct
  source 1..20: mol_type = other DNA
caacacaggaacatgtgaca

SEQ ID NO: 23754 - DNA, 20 bp, synthetic construct
  source 1..20: mol_type = other DNA
acaaattttaaagatggttt

SEQ ID NO: 23755 - DNA, 20 bp, synthetic construct
  source 1..20: mol_type = other DNA
ggccgaatttgaacaagttt

SEQ ID NO: 23756 - DNA, 20 bp, synthetic construct
  source 1..20: mol_type = other DNA
atcaggagataatatgactc

SEQ ID NO: 23757 - DNA, 20 bp, synthetic construct
  source 1..20: mol_type = other DNA
atatatattgcgacaaggat

SEQ ID NO: 23758 - DNA, 20 bp, synthetic construct
  source 1..20: mol_type = other DNA
tacatttagtaaaatagatg

SEQ ID NO: 23759 - DNA, 20 bp, synthetic construct
  source 1..20: mol_type = other DNA
gaaaggaactaaaggaaaac

SEQ ID NO: 23760 - DNA, 20 bp, synthetic construct
  source 1..20: mol_type = other DNA
tggagatgataatgtaatta

SEQ ID NO: 23761 - DNA, 20 bp, synthetic construct
  source 1..20: mol_type = other DNA
taccaatgtacataacacga

SEQ ID NO: 23762 - DNA, 20 bp, synthetic construct
  source 1..20: mol_type = other DNA
acaacgccccgttctcattg

SEQ ID NO: 23763 - DNA, 20 bp, synthetic construct
  source 1..20: mol_type = other DNA
tttccaattagacaattcag

SEQ ID NO: 23764 - DNA, 20 bp, synthetic construct
  source 1..20: mol_type = other DNA
gtggttagataacatatctc

SEQ ID NO: 23765 - DNA, 20 bp, synthetic construct
  source 1..20: mol_type = other DNA
agtgggaatgccttgctact

SEQ ID NO: 23766 - DNA, 20 bp, synthetic construct
  source 1..20: mol_type = other DNA
acagtataacaatagagaga

SEQ ID NO: 23767 - DNA, 20 bp, synthetic construct
  source 1..20: mol_type = other DNA
ggagaatttggcgtcaagcg

SEQ ID NO: 23768 - DNA, 20 bp, synthetic construct
  source 1..20: mol_type = other DNA
cagcacaaagagcaatgatg

SEQ ID NO: 23769 - DNA, 20 bp, synthetic construct
  source 1..20: mol_type = other DNA
ttgagagggaagggtactct

SEQ ID NO: 23770 - DNA, 20 bp, synthetic construct
  source 1..20: mol_type = other DNA
gtgtacagcccactttctca

SEQ ID NO: 23771 - DNA, 20 bp, synthetic construct
  source 1..20: mol_type = other DNA
tatagtggagcggattctgg

SEQ ID NO: 23772 - DNA, 20 bp, synthetic construct
  source 1..20: mol_type = other DNA
ctcaactggtgcgcttgcca

SEQ ID NO: 23773 - DNA, 20 bp, synthetic construct
  source 1..20: mol_type = other DNA
cagaatggtactagccagca

SEQ ID NO: 23774 - DNA, 20 bp, synthetic construct
  source 1..20: mol_type = other DNA
acaagcctgggacatcccct

SEQ ID NO: 23775 - DNA, 20 bp, synthetic construct
  source 1..20: mol_type = other DNA
tggccaggactagtcgctgg

SEQ ID NO: 23776 - DNA, 20 bp, synthetic construct
  source 1..20: mol_type = other DNA
tacatgtttgtgtcactggg

SEQ ID NO: 23777 - DNA, 20 bp, synthetic construct
  source 1..20: mol_type = other DNA
gaacttgctgggagcagatg

SEQ ID NO: 23778 - DNA, 20 bp, synthetic construct
  source 1..20: mol_type = other DNA
gcaaggagacgtagtgttgg

SEQ ID NO: 23779 - DNA, 20 bp, synthetic construct
  source 1..20: mol_type = other DNA
gacccaaggtcgccagactt

SEQ ID NO: 23780 - DNA, 20 bp, synthetic construct
  source 1..20: mol_type = other DNA
agagctctcctttacagtta

SEQ ID NO: 23781 - DNA, 20 bp, synthetic construct
  source 1..20: mol_type = other DNA
caagctagttggaatcaaca

SEQ ID NO: 23782 - DNA, 20 bp, synthetic construct
  source 1..20: mol_type = other DNA
ggcaggactgttggtttcag

SEQ ID NO: 23783 - DNA, 20 bp, synthetic construct
  source 1..20: mol_type = other DNA
ggtaatgccagcccatggtc

SEQ ID NO: 23784 - DNA, 20 bp, synthetic construct
  source 1..20: mol_type = other DNA
cagttcatatcggaggccag

SEQ ID NO: 23785 - DNA, 20 bp, synthetic construct
  source 1..20: mol_type = other DNA
ggcatgtgaattgaccgatt

SEQ ID NO: 23786 - DNA, 20 bp, synthetic construct
  source 1..20: mol_type = other DNA
atctcttcaacagattgaga

SEQ ID NO: 23787 - DNA, 20 bp, synthetic construct
  source 1..20: mol_type = other DNA
cgcctacttggtcgtcagcg

SEQ ID NO: 23788 - DNA, 20 bp, synthetic construct
  source 1..20: mol_type = other DNA
gagcatgacggccgtgggaa

SEQ ID NO: 23789 - DNA, 20 bp, synthetic construct
  source 1..20: mol_type = other DNA
ggacggcacggacatgtgcc

SEQ ID NO: 23790 - DNA, 20 bp, synthetic construct
  source 1..20: mol_type = other DNA
agaaccactcaacggagaat

SEQ ID NO: 23791 - DNA, 20 bp, synthetic construct
  source 1..20: mol_type = other DNA
tattagcggaggctccaacg

SEQ ID NO: 23792 - DNA, 20 bp, synthetic construct
  source 1..20: mol_type = other DNA
atcgtttggacactgtcact

SEQ ID NO: 23793 - DNA, 20 bp, synthetic construct
  source 1..20: mol_type = other DNA
acttgacacgcggcagaagt

SEQ ID NO: 23794 - DNA, 20 bp, synthetic construct
  source 1..20: mol_type = other DNA
gtgggacactggtcttaatt

SEQ ID NO: 23795 - DNA, 20 bp, synthetic construct
  source 1..20: mol_type = other DNA
ctccttcaactacggtgctg

SEQ ID NO: 23796 - DNA, 20 bp, synthetic construct
  source 1..20: mol_type = other DNA
gaagaagatctccgactcgc

SEQ ID NO: 23797 - DNA, 20 bp, synthetic construct
  source 1..20: mol_type = other DNA
taaggagtggctcgacaacg

SEQ ID NO: 23798 - DNA, 20 bp, synthetic construct
  source 1..20: mol_type = other DNA
ggaggtgattgaccgggttg

SEQ ID NO: 23799 - DNA, 20 bp, synthetic construct
  source 1..20: mol_type = other DNA
accctacgccgggccgctcg

SEQ ID NO: 23800 - DNA, 20 bp, synthetic construct
  source 1..20: mol_type = other DNA
tttgaaagtgaaagctaaga

SEQ ID NO: 23801 - DNA, 20 bp, synthetic construct
  source 1..20: mol_type = other DNA
tcttttcgctgagaagtatg

SEQ ID NO: 23802 - DNA, 20 bp, synthetic construct
  source 1..20: mol_type = other DNA
ctgtggaggagctgttctcg

SEQ ID NO: 23803 - DNA, 20 bp, synthetic construct
  source 1..20: mol_type = other DNA
agatgtggaagagcgtgtgc

SEQ ID NO: 23804 - DNA, 20 bp, synthetic construct
  source 1..20: mol_type = other DNA
ccaggggaagcgccgcggcg

SEQ ID NO: 23805 - DNA, 20 bp, synthetic construct
  source 1..20: mol_type = other DNA
gtctggctgttccgcaacta

SEQ ID NO: 23806 - DNA, 20 bp, synthetic construct
  source 1..20: mol_type = other DNA
ccacttcaaatctcttggcc

SEQ ID NO: 23807 - DNA, 20 bp, synthetic construct
  source 1..20: mol_type = other DNA
ctttgcacgccgtgggacca

SEQ ID NO: 23808 - DNA, 20 bp, synthetic construct
  source 1..20: mol_type = other DNA
ggtgctatggagtgcccaac

SEQ ID NO: 23809 - DNA, 20 bp, synthetic construct
  source 1..20: mol_type = other DNA
gcccaacggcaggagaagcc

SEQ ID NO: 23810 - DNA, 20 bp, synthetic construct
  source 1..20: mol_type = other DNA
ggaaccaagaaggatccctg

SEQ ID NO: 23811 - DNA, 20 bp, synthetic construct
  source 1..20: mol_type = other DNA
aaacattctcaaatggcgca

SEQ ID NO: 23812 - DNA, 20 bp, synthetic construct
  source 1..20: mol_type = other DNA
gggaatgtctttggcctcca

SEQ ID NO: 23813 - DNA, 20 bp, synthetic construct
  source 1..20: mol_type = other DNA
tgtcaactgtgcacccagct

SEQ ID NO: 23814 - DNA, 20 bp, synthetic construct
  source 1..20: mol_type = other DNA
ccgctcttcttaggaaatgt

SEQ ID NO: 23815 - DNA, 20 bp, synthetic construct
  source 1..20: mol_type = other DNA
caagtgatccattcccggag

SEQ ID NO: 23816 - DNA, 20 bp, synthetic construct
  source 1..20: mol_type = other DNA
ataacatggaaatccctgga

SEQ ID NO: 23817 - DNA, 20 bp, synthetic construct
  source 1..20: mol_type = other DNA
agtacgcaacaacaacacga

SEQ ID NO: 23818 - DNA, 20 bp, synthetic construct
  source 1..20: mol_type = other DNA
taacgacattgtgcttggga

SEQ ID NO: 23819 - DNA, 20 bp, synthetic construct
  source 1..20: mol_type = other DNA
gagcggctgccctttttcag

SEQ ID NO: 23820 - DNA, 20 bp, synthetic construct
  source 1..20: mol_type = other DNA
caaatcgcagaggtggcaca

SEQ ID NO: 23821 - DNA, 20 bp, synthetic construct
  source 1..20: mol_type = other DNA
caataatgagaacaactcta

SEQ ID NO: 23822 - DNA, 20 bp, synthetic construct
  source 1..20: mol_type = other DNA
gagaagagtacaagaagacc

SEQ ID NO: 23823 - DNA, 20 bp, synthetic construct
  source 1..20: mol_type = other DNA
tgactgacacaacaccattt

SEQ ID NO: 23824 - DNA, 20 bp, synthetic construct
  source 1..20: mol_type = other DNA
agaagaaaccatctgaattt

SEQ ID NO: 23825 - DNA, 20 bp, synthetic construct
  source 1..20: mol_type = other DNA
tggttagagagactgcccca

SEQ ID NO: 23826 - DNA, 20 bp, synthetic construct
  source 1..20: mol_type = other DNA
ttcctcacactgtacaaaag

SEQ ID NO: 23827 - DNA, 20 bp, synthetic construct
  source 1..20: mol_type = other DNA
ttgccacagcttggcagact

SEQ ID NO: 23828 - DNA, 20 bp, synthetic construct
  source 1..20: mol_type = other DNA
ggtggctttacatattgagc

SEQ ID NO: 23829 - DNA, 20 bp, synthetic construct
  source 1..20: mol_type = other DNA
gcatggattttgcaatatgt

SEQ ID NO: 23830 - DNA, 20 bp, synthetic construct
  source 1..20: mol_type = other DNA
atgaaacccacagtgggagg

SEQ ID NO: 23831 - DNA, 20 bp, synthetic construct
  source 1..20: mol_type = other DNA
catggcaggttcacagagat

SEQ ID NO: 23832 - DNA, 20 bp, synthetic construct
  source 1..20: mol_type = other DNA
gggaactaaaacaccagtgg

SEQ ID NO: 23833 - DNA, 20 bp, synthetic construct
  source 1..20: mol_type = other DNA
tggacactgaaagaatggaa

SEQ ID NO: 23834 - DNA, 20 bp, synthetic construct
  source 1..20: mol_type = other DNA
atggagagctgctcagcgaa

SEQ ID NO: 23835 - DNA, 20 bp, synthetic construct
  source 1..20: mol_type = other DNA
ttattgctgtgggggtgaca

SEQ ID NO: 23836 - DNA, 20 bp, synthetic construct
  source 1..20: mol_type = other DNA
ttggtctgccgagcgcaaac

SEQ ID NO: 23837 - DNA, 20 bp, synthetic construct
  source 1..20: mol_type = other DNA
gcgtcctccacacaatgtgg

SEQ ID NO: 23838 - DNA, 20 bp, synthetic construct
  source 1..20: mol_type = other DNA
gaagagctcatgaagtgcat

SEQ ID NO: 23839 - DNA, 20 bp, synthetic construct
  source 1..20: mol_type = other DNA
cctttgaaaaagactattcc

SEQ ID NO: 23840 - DNA, 20 bp, synthetic construct
  source 1..20: mol_type = other DNA
tgacaggaatgtcaggggtt

SEQ ID NO: 23841 - DNA, 20 bp, synthetic construct
  source 1..20: mol_type = other DNA
ctggcaagcagaggagcagc

SEQ ID NO: 23842 - DNA, 20 bp, synthetic construct
  source 1..20: mol_type = other DNA
gagtggctggacacgtcctg

SEQ ID NO: 23843 - DNA, 20 bp, synthetic construct
  source 1..20: mol_type = other DNA
atcccatggtggacggagat

SEQ ID NO: 23844 - DNA, 20 bp, synthetic construct
  source 1..20: mol_type = other DNA
cagggcagcttatcaggcct

SEQ ID NO: 23845 - DNA, 20 bp, synthetic construct
  source 1..20: mol_type = other DNA
gggctggaatgaatgtgttt

SEQ ID NO: 23846 - DNA, 20 bp, synthetic construct
  source 1..20: mol_type = other DNA
accgaacgtggcagtactgg

SEQ ID NO: 23847 - DNA, 20 bp, synthetic construct
  source 1..20: mol_type = other DNA
cggacgacacagccggatgg

SEQ ID NO: 23848 - DNA, 20 bp, synthetic construct
  source 1..20: mol_type = other DNA
gtgaccacggagaagaacgc

SEQ ID NO: 23849 - DNA, 20 bp, synthetic construct
  source 1..20: mol_type = other DNA
ttcccttctgctcgcaccat

SEQ ID NO: 23850 - DNA, 20 bp, synthetic construct
  source 1..20: mol_type = other DNA
ggcaacacgccagtgagagt

SEQ ID NO: 23851 - DNA, 20 bp, synthetic construct
  source 1..20: mol_type = other DNA
gtcacatggagagaggactc

SEQ ID NO: 23852 - DNA, 20 bp, synthetic construct
  source 1..20: mol_type = other DNA
caacggcatctctcggacag

SEQ ID NO: 23853 - DNA, 20 bp, synthetic construct
  source 1..20: mol_type = other DNA
accgttgtgtgccccaagtg

SEQ ID NO: 23854 - DNA, 20 bp, synthetic construct
  source 1..20: mol_type = other DNA
ttggcaccatcacgctcacg

SEQ ID NO: 23855 - DNA, 20 bp, synthetic construct
  source 1..20: mol_type = other DNA
gaattacaactgctaatgaa

SEQ ID NO: 23856 - DNA, 20 bp, synthetic construct
  source 1..20: mol_type = other DNA
tcccgagtagctggctggtc

SEQ ID NO: 23857 - DNA, 20 bp, synthetic construct
  source 1..20: mol_type = other DNA
caactctctttgggtcattt

SEQ ID NO: 23858 - DNA, 20 bp, synthetic construct
  source 1..20: mol_type = other DNA
tggaggagccaataggagat

SEQ ID NO: 23859 - DNA, 20 bp, synthetic construct
  source 1..20: mol_type = other DNA
cgaaaacacgggtttctaca

SEQ ID NO: 23860 - DNA, 20 bp, synthetic construct
  source 1..20: mol_type = other DNA
tcggggcctacaacggaata

SEQ ID NO: 23861 - DNA, 20 bp, synthetic construct
  source 1..20: mol_type = other DNA
tctttcttggagccttgtac

SEQ ID NO: 23862 - DNA, 20 bp, synthetic construct
  source 1..20: mol_type = other DNA
tcttcattaatggtgacccc

SEQ ID NO: 23863 - DNA, 20 bp, synthetic construct
  source 1..20: mol_type = other DNA
ttgtcgaggaaaccaaacag

SEQ ID NO: 23864 - DNA, 20 bp, synthetic construct
  source 1..20: mol_type = other DNA
cactgcatcgtgcaaatttc

SEQ ID NO: 23865 - DNA, 20 bp, synthetic construct
  source 1..20: mol_type = other DNA
agcccacgaagatgtcttat

SEQ ID NO: 23866 - DNA, 20 bp, synthetic construct
  source 1..20: mol_type = other DNA
ggtcattcttcacttctcgc

SEQ ID NO: 23867 - DNA, 20 bp, synthetic construct
  source 1..20: mol_type = other DNA
tcagacttgacagaattccg

SEQ ID NO: 23868 - DNA, 20 bp, synthetic construct
  source 1..20: mol_type = other DNA
gtatcgtcctgccccctccc

SEQ ID NO: 23869 - DNA, 20 bp, synthetic construct
  source 1..20: mol_type = other DNA
gatcatttgtgactgatgat

SEQ ID NO: 23870 - DNA, 20 bp, synthetic construct
  source 1..20: mol_type = other DNA
aggatgccgttcaagatcaa

SEQ ID NO: 23871 - DNA, 20 bp, synthetic construct
  source 1..20: mol_type = other DNA
gccgtttcctcgaatttgag

SEQ ID NO: 23872 - DNA, 20 bp, synthetic construct
  source 1..20: mol_type = other DNA
caaaaatcagctctgaggac

SEQ ID NO: 23873 - DNA, 20 bp, synthetic construct
  source 1..20: mol_type = other DNA
tgggacggcgagatcaacga

SEQ ID NO: 23874 - DNA, 20 bp, synthetic construct
  source 1..20: mol_type = other DNA
tggttatagcaggggatgat

SEQ ID NO: 23875 - DNA, 20 bp, synthetic construct
  source 1..20: mol_type = other DNA
taggatttgtagccattacc

SEQ ID NO: 23876 - DNA, 20 bp, synthetic construct
  source 1..20: mol_type = other DNA
cctgggaagatatcccctat

SEQ ID NO: 23877 - DNA, 20 bp, synthetic construct
  source 1..20: mol_type = other DNA
taagacagggggtatttgga

SEQ ID NO: 23878 - DNA, 20 bp, synthetic construct
  source 1..20: mol_type = other DNA
tcccctggaaacagggtggg

SEQ ID NO: 23879 - DNA, 20 bp, synthetic construct
  source 1..20: mol_type = other DNA
tctcttgttagatctttttg

SEQ ID NO: 23880 - DNA, 20 bp, synthetic construct
  source 1..20: mol_type = other DNA
tggattgtcgccgacttctt

SEQ ID NO: 23881 - DNA, 20 bp, synthetic construct
  source 1..20: mol_type = other DNA
tgagaggttgtaatcctaaa

SEQ ID NO: 23882 - DNA, 20 bp, synthetic construct
  source 1..20: mol_type = other DNA
ttatgcctgtgcaatcccgg

SEQ ID NO: 23883 - DNA, 20 bp, synthetic construct
  source 1..20: mol_type = other DNA
ttagtgcctttttacagaaa

SEQ ID NO: 23884 - DNA, 20 bp, synthetic construct
  source 1..20: mol_type = other DNA
ctgtcacaagtgctggacag

SEQ ID NO: 23885 - DNA, 20 bp, synthetic construct
  source 1..20: mol_type = other DNA
atgtttgttttgagttttat

SEQ ID NO: 23886 - DNA, 20 bp, synthetic construct
  source 1..20: mol_type = other DNA
gcttggatgctatgttcttt

SEQ ID NO: 23887 - DNA, 20 bp, synthetic construct
  source 1..20: mol_type = other DNA
agctctttagcttgtttagg

SEQ ID NO: 23888 - DNA, 20 bp, synthetic construct
  source 1..20: mol_type = other DNA
ggaattgcattgattgtgat

SEQ ID NO: 23889 - DNA, 20 bp, synthetic construct
  source 1..20: mol_type = other DNA
ttgtggcagctgatttaggt

SEQ ID NO: 23890 - DNA, 20 bp, synthetic construct
  source 1..20: mol_type = other DNA
agcttacttataataagcag

SEQ ID NO: 23891 - DNA, 20 bp, synthetic construct
  source 1..20: mol_type = other DNA
gtatcgtgcgtactcgttct

SEQ ID NO: 23892 - DNA, 20 bp, synthetic construct
  source 1..20: mol_type = other DNA
ccaatggatttagccaagtt

SEQ ID NO: 23893 - DNA, 20 bp, synthetic construct
  source 1..20: mol_type = other DNA
atcaacaactcgctggtatc

SEQ ID NO: 23894 - DNA, 20 bp, synthetic construct
  source 1..20: mol_type = other DNA
ctactgaatatgcttccaac

SEQ ID NO: 23895 - DNA, 20 bp, synthetic construct
  source 1..20: mol_type = other DNA
gattttggcgggatggaagt

SEQ ID NO: 23896 - DNA, 20 bp, synthetic construct
  source 1..20: mol_type = other DNA
cgatttctttacatttgatg

SEQ ID NO: 23897 - DNA, 20 bp, synthetic construct
  source 1..20: mol_type = other DNA
ggatggtgtgccttttgttg

SEQ ID NO: 23898 - DNA, 20 bp, synthetic construct
  source 1..20: mol_type = other DNA
tatgccaaacctactacgta

SEQ ID NO: 23899 - DNA, 20 bp, synthetic construct
  source 1..20: mol_type = other DNA
tattgttccggccaaggtca

SEQ ID NO: 23900 - DNA, 20 bp, synthetic construct
  source 1..20: mol_type = other DNA
tattcgcgctaagcattatg

SEQ ID NO: 23901 - DNA, 20 bp, synthetic construct
  source 1..20: mol_type = other DNA
agaagctgttaaacgcgtgc

SEQ ID NO: 23902 - DNA, 20 bp, synthetic construct
  source 1..20: mol_type = other DNA
ggctgtggcgaaagctcctc

SEQ ID NO: 23903 - DNA, 20 bp, synthetic construct
  source 1..20: mol_type = other DNA
ttgtctccgctactttgcaa

SEQ ID NO: 23904 - DNA, 20 bp, synthetic construct
  source 1..20: mol_type = other DNA
acataaggactcttttaaag

SEQ ID NO: 23905 - DNA, 20 bp, synthetic construct
  source 1..20: mol_type = other DNA
tatgactttctatcctcgtt

SEQ ID NO: 23906 - DNA, 20 bp, synthetic construct
  source 1..20: mol_type = other DNA
gcatgccaattatttgtttt

SEQ ID NO: 23907 - DNA, 20 bp, synthetic construct
  source 1..20: mol_type = other DNA
agttttagatgttaaaggtg

SEQ ID NO: 23908 - DNA, 20 bp, synthetic construct
  source 1..20: mol_type = other DNA
attcaattataaaatcacca

SEQ ID NO: 23909 - DNA, 20 bp, synthetic construct
  source 1..20: mol_type = other DNA
tttagatgtggtacgtaaag

SEQ ID NO: 23910 - DNA, 20 bp, synthetic construct
  source 1..20: mol_type = other DNA
gtacttcagatactagttat

SEQ ID NO: 23911 - DNA, 20 bp, synthetic construct
  source 1..20: mol_type = other DNA
gtgttgtttcctgtttatat

SEQ ID NO: 23912 - DNA, 20 bp, synthetic construct
  source 1..20: mol_type = other DNA
tagcaccacctactggtgtt

SEQ ID NO: 23913 - DNA, 20 bp, synthetic construct
  source 1..20: mol_type = other DNA
atgcacaacactgtttcaaa

SEQ ID NO: 23914 - DNA, 20 bp, synthetic construct
  source 1..20: mol_type = other DNA
aaagttataaaggcatcaaa

SEQ ID NO: 23915 - DNA, 20 bp, synthetic construct
  source 1..20: mol_type = other DNA
catatgaatattatgtaaaa

SEQ ID NO: 23916 - DNA, 20 bp, synthetic construct
  source 1..20: mol_type = other DNA
ggaatgttgtaccctactat

SEQ ID NO: 23917 - DNA, 20 bp, synthetic construct
  source 1..20: mol_type = other DNA
cgactaggtttccgcctggc

SEQ ID NO: 23918 - DNA, 20 bp, synthetic construct
  source 1..20: mol_type = other DNA
aaaatgataatataagtgtt

SEQ ID NO: 23919 - DNA, 20 bp, synthetic construct
  source 1..20: mol_type = other DNA
cagaaaagtcgagataaggc

SEQ ID NO: 23920 - DNA, 20 bp, synthetic construct
  source 1..20: mol_type = other DNA
gctgcacaaggttttcaggc

SEQ ID NO: 23921 - DNA, 20 bp, synthetic construct
  source 1..20: mol_type = other DNA
aacagcaattatgttcttca

SEQ ID NO: 23922 - DNA, 20 bp, synthetic construct
  source 1..20: mol_type = other DNA
atgtttgtggcatcatcttc

SEQ ID NO: 23923 - DNA, 20 bp, synthetic construct
  source 1..20: mol_type = other DNA
cttgttcgtttgactactga

SEQ ID NO: 23924 - DNA, 20 bp, synthetic construct
  source 1..20: mol_type = other DNA
aagattgttgttattgctgg

SEQ ID NO: 23925 - DNA, 20 bp, synthetic construct
  source 1..20: mol_type = other DNA
tctgctacagatgccattat

SEQ ID NO: 23926 - DNA, 20 bp, synthetic construct
  source 1..20: mol_type = other DNA
gttgaaaagtttaattttgt

SEQ ID NO: 23927 - DNA, 20 bp, synthetic construct
  source 1..20: mol_type = other DNA
tgcatcaaatattatgctgt

SEQ ID NO: 23928 - DNA, 20 bp, synthetic construct
  source 1..20: mol_type = other DNA
gaggttgatataattgaaca

SEQ ID NO: 23929 - DNA, 20 bp, synthetic construct
  source 1..20: mol_type = other DNA
gaagctggtgaagttaaacc

SEQ ID NO: 23930 - DNA, 20 bp, synthetic construct
  source 1..20: mol_type = other DNA
attccacttatgcctcttct

SEQ ID NO: 23931 - DNA, 20 bp, synthetic construct
  source 1..20: mol_type = other DNA
ggttaccctaatgattttgt

SEQ ID NO: 23932 - DNA, 20 bp, synthetic construct
  source 1..20: mol_type = other DNA
gataacggtcactatgtagt

SEQ ID NO: 23933 - DNA, 20 bp, synthetic construct
  source 1..20: mol_type = other DNA
cttgatactggtgcacaaaa

SEQ ID NO: 23934 - DNA, 20 bp, synthetic construct
  source 1..20: mol_type = other DNA
tttgttagacatattattgt

SEQ ID NO: 23935 - DNA, 20 bp, synthetic construct
  source 1..20: mol_type = other DNA
gatggtcttatagaccttct

SEQ ID NO: 23936 - DNA, 20 bp, synthetic construct
  source 1..20: mol_type = other DNA
ggtgctcatgttggttctga

SEQ ID NO: 23937 - DNA, 20 bp, synthetic construct
  source 1..20: mol_type = other DNA
gatggttttaatgaatgggc

SEQ ID NO: 23938 - DNA, 20 bp, synthetic construct
  source 1..20: mol_type = other DNA
agtgctatgcactctttact

SEQ ID NO: 23939 - DNA, 20 bp, synthetic construct
  source 1..20: mol_type = other DNA
tgtgatggttctgttcatta

SEQ ID NO: 23940 - DNA, 20 bp, synthetic construct
  source 1..20: mol_type = other DNA
cttttaactgcttgtgcttt

SEQ ID NO: 23941 - DNA, 20 bp, synthetic construct
  source 1..20: mol_type = other DNA
gcgtctatttgtttgtattg

SEQ ID NO: 23942 - DNA, 20 bp, synthetic construct
  source 1..20: mol_type = other DNA
tgtgaccgtacaactattca

SEQ ID NO: 23943 - DNA, 20 bp, synthetic construct
  source 1..20: mol_type = other DNA
ttcgttttaaaaatgctgat

SEQ ID NO: 23944 - DNA, 20 bp, synthetic construct
  source 1..20: mol_type = other DNA
gacataatcttactaaatat

SEQ ID NO: 23945 - DNA, 20 bp, synthetic construct
  source 1..20: mol_type = other DNA
tttatgcatctcttggcaaa

SEQ ID NO: 23946 - DNA, 20 bp, synthetic construct
  source 1..20: mol_type = other DNA
ttttagatatttgtcaagct

SEQ ID NO: 23947 - DNA, 20 bp, synthetic construct
  source 1..20: mol_type = other DNA
tgttgggctctaagcatgtt

SEQ ID NO: 23948 - DNA, 20 bp, synthetic construct
  source 1..20: mol_type = other DNA
tttcaatgatgattctctct

SEQ ID NO: 23949 - DNA, 20 bp, synthetic construct
  source 1..20: mol_type = other DNA
ctggtagtggtaagtcacat

SEQ ID NO: 23950 - DNA, 20 bp, synthetic construct
  source 1..20: mol_type = other DNA
gtgatccacaacaacttcct

SEQ ID NO: 23951 - DNA, 20 bp, synthetic construct
  source 1..20: mol_type = other DNA
atgcctctggtgatgctgtt

SEQ ID NO: 23952 - DNA, 20 bp, synthetic construct
  source 1..20: mol_type = other DNA
gtgttattcatgacattggt

SEQ ID NO: 23953 - DNA, 20 bp, synthetic construct
  source 1..20: mol_type = other DNA
acagtgattgtgatgttgtg

SEQ ID NO: 23954 - DNA, 20 bp, synthetic construct
  source 1..20: mol_type = other DNA
cttttatagctggtaacact

SEQ ID NO: 23955 - DNA, 20 bp, synthetic construct
  source 1..20: mol_type = other DNA
caattcttcaactattgtta

SEQ ID NO: 23956 - DNA, 20 bp, synthetic construct
  source 1..20: mol_type = other DNA
tgattgtaatggttatactg

SEQ ID NO: 23957 - DNA, 20 bp, synthetic construct
  source 1..20: mol_type = other DNA
ccagttttatattaatggtt

SEQ ID NO: 23958 - DNA, 20 bp, synthetic construct
  source 1..20: mol_type = other DNA
tggtattcgtgagtttagta

SEQ ID NO: 23959 - DNA, 20 bp, synthetic construct
  source 1..20: mol_type = other DNA
ccttgcttgtgctcagtact

SEQ ID NO: 23960 - DNA, 20 bp, synthetic construct
  source 1..20: mol_type = other DNA
gttgcttgttttgttttaaa

SEQ ID NO: 23961 - DNA, 20 bp, synthetic construct
  source 1..20: mol_type = other DNA
ctacaacttatgcgtaaggt

SEQ ID NO: 23962 - DNA, 20 bp, synthetic construct
  source 1..20: mol_type = other DNA
accacaattgtttgtgaccg

SEQ ID NO: 23963 - DNA, 20 bp, synthetic construct
  source 1..20: mol_type = other DNA
tgtaaattgggccgatgaca

SEQ ID NO: 23964 - DNA, 20 bp, synthetic construct
  source 1..20: mol_type = other DNA
ttggaagcgtgttcctacca

SEQ ID NO: 23965 - DNA, 20 bp, synthetic construct
  source 1..20: mol_type = other DNA
taggccagtgatagtaaagt

SEQ ID NO: 23966 - DNA, 20 bp, synthetic construct
  source 1..20: mol_type = other DNA
acaattatggtctagtcaaa

SEQ ID NO: 23967 - DNA, 20 bp, synthetic construct
  source 1..20: mol_type = other DNA
tgtttgaaggaaggcttttc

SEQ ID NO: 23968 - DNA, 20 bp, synthetic construct
  source 1..20: mol_type = other DNA
taactggagacaatagtaaa

SEQ ID NO: 23969 - DNA, 20 bp, synthetic construct
  source 1..20: mol_type = other DNA
atggtgggaaactgatgaac

SEQ ID NO: 23970 - DNA, 20 bp, synthetic construct
  source 1..20: mol_type = other DNA
aaaatgaagcagtagtttca

SEQ ID NO: 23971 - DNA, 20 bp, synthetic construct
  source 1..20: mol_type = other DNA
cagtgtctttacaaaatgag

SEQ ID NO: 23972 - DNA, 20 bp, synthetic construct
  source 1..20: mol_type = other DNA
ttcgacaaatacgtctacca

SEQ ID NO: 23973 - DNA, 20 bp, synthetic construct
  source 1..20: mol_type = other DNA
aaggagagtcagttattgga

SEQ ID NO: 23974 - DNA, 20 bp, synthetic construct
  source 1..20: mol_type = other DNA
ttggagaagctgatgatcac

SEQ ID NO: 23975 - DNA, 20 bp, synthetic construct
  source 1..20: mol_type = other DNA
gttgtcaaaactttattttc

SEQ ID NO: 23976 - DNA, 20 bp, synthetic construct
  source 1..20: mol_type = other DNA
cccctcttgacacaaaaatt

SEQ ID NO: 23977 - DNA, 20 bp, synthetic construct
  source 1..20: mol_type = other DNA
agatgagtttgccaatttct

SEQ ID NO: 23978 - DNA, 20 bp, synthetic construct
  source 1..20: mol_type = other DNA
ttcaagagaaggcgctcaaa

SEQ ID NO: 23979 - DNA, 20 bp, synthetic construct
  source 1..20: mol_type = other DNA
tagtaaaaatcataattgaa

SEQ ID NO: 23980 - DNA, 20 bp, synthetic construct
  source 1..20: mol_type = other DNA
ccatcagccacaatgctcaa

SEQ ID NO: 23981 - DNA, 20 bp, synthetic construct
  source 1..20: mol_type = other DNA
ctgcaaaaatatcgtcagca

SEQ ID NO: 23982 - DNA, 20 bp, synthetic construct
  source 1..20: mol_type = other DNA
tatttggccctattggagtc

SEQ ID NO: 23983 - DNA, 20 bp, synthetic construct
  source 1..20: mol_type = other DNA
gctgcagcaacaggtgacac

SEQ ID NO: 23984 - DNA, 20 bp, synthetic construct
  source 1..20: mol_type = other DNA
cctatcgcaaccagttcccc

SEQ ID NO: 23985 - DNA, 20 bp, synthetic construct
  source 1..20: mol_type = other DNA
cagtgtccagtcacttgctc

SEQ ID NO: 23986 - DNA, 20 bp, synthetic construct
  source 1..20: mol_type = other DNA
aggaatgattacaactgtga

SEQ ID NO: 23987 - DNA, 20 bp, synthetic construct
  source 1..20: mol_type = other DNA
gaaagcaatcatccgcagtg

SEQ ID NO: 23988 - DNA, 20 bp, synthetic construct
  source 1..20: mol_type = other DNA
caatccacgtcaatcaataa

SEQ ID NO: 23989 - DNA, 20 bp, synthetic construct
  source 1..20: mol_type = other DNA
aattgttaagtatccgagaa

SEQ ID NO: 23990 - DNA, 20 bp, synthetic construct
  source 1..20: mol_type = other DNA
tctattggcaggagcaggca

SEQ ID NO: 23991 - DNA, 20 bp, synthetic construct
  source 1..20: mol_type = other DNA
ggcccaattaccaacacgtg

SEQ ID NO: 23992 - DNA, 20 bp, synthetic construct
  source 1..20: mol_type = other DNA
agtggttgggagctttctca

SEQ ID NO: 23993 - DNA, 20 bp, synthetic construct
  source 1..20: mol_type = other DNA
ctcacgatctgatctcagtg

SEQ ID NO: 23994 - DNA, 20 bp, synthetic construct
  source 1..20: mol_type = other DNA
ctgacacttggcccacttct

SEQ ID NO: 23995 - DNA, 20 bp, synthetic construct
  source 1..20: mol_type = other DNA
cctccagaacaacgaattat

SEQ ID NO: 23996 - DNA, 20 bp, synthetic construct
  source 1..20: mol_type = other DNA
accaatgagtgtttagttct

SEQ ID NO: 23997 - DNA, 20 bp, synthetic construct
  source 1..20: mol_type = other DNA
tatctcaacacagcaactca

SEQ ID NO: 23998 - DNA, 20 bp, synthetic construct
  source 1..20: mol_type = other DNA
tcctcatctctcttaggaca

SEQ ID NO: 23999 - DNA, 20 bp, synthetic construct
  source 1..20: mol_type = other DNA
tggcatgactcagactggaa

SEQ ID NO: 24000 - DNA, 20 bp, synthetic construct
  source 1..20: mol_type = other DNA
gagaatcatacactaacata

SEQ ID NO: 24001 - DNA, 20 bp, synthetic construct
  source 1..20: mol_type = other DNA
actaatttgatatccccatt

SEQ ID NO: 24002 - DNA, 20 bp, synthetic construct
  source 1..20: mol_type = other DNA
ttcaagaaatgttttgatgc

SEQ ID NO: 24003 - DNA, 20 bp, synthetic construct
  source 1..20: mol_type = other DNA
aacttattagggagaaaacc

SEQ ID NO: 24004 - DNA, 20 bp, synthetic construct
  source 1..20: mol_type = other DNA
tccaataggaagcttaatga

SEQ ID NO: 24005 - DNA, 20 bp, synthetic construct
  source 1..20: mol_type = other DNA
atccgtgtaccgtacattgg

SEQ ID NO: 24006 - DNA, 20 bp, synthetic construct
  source 1..20: mol_type = other DNA
agagttaacatcacacttga

SEQ ID NO: 24007 - DNA, 20 bp, synthetic construct
  source 1..20: mol_type = other DNA
caaatgtattatctgagggt

SEQ ID NO: 24008 - DNA, 20 bp, synthetic construct
  source 1..20: mol_type = other DNA
tttgcatctctggactacat

SEQ ID NO: 24009 - DNA, 20 bp, synthetic construct
  source 1..20: mol_type = other DNA
aggtaccttgagcgattaaa

SEQ ID NO: 24010 - DNA, 20 bp, synthetic construct
  source 1..20: mol_type = other DNA
gtacatgtagatttggaatc

SEQ ID NO: 24011 - DNA, 20 bp, synthetic construct
  source 1..20: mol_type = other DNA
atagaatttgaacaattgat

SEQ ID NO: 24012 - DNA, 20 bp, synthetic construct
  source 1..20: mol_type = other DNA
taacctggctcctcctacaa

SEQ ID NO: 24013 - DNA, 20 bp, synthetic construct
  source 1..20: mol_type = other DNA
tcctttgccagtttgtttct

SEQ ID NO: 24014 - DNA, 20 bp, synthetic construct
  source 1..20: mol_type = other DNA
atcaagttcctactaataca

SEQ ID NO: 24015 - DNA, 20 bp, synthetic construct
  source 1..20: mol_type = other DNA
gcccacgggagcacgctggc

SEQ ID NO: 24016 - DNA, 20 bp, synthetic construct
  source 1..20: mol_type = other DNA
tctgatgataatcctgatga

SEQ ID NO: 24017 - DNA, 20 bp, synthetic construct
  source 1..20: mol_type = other DNA
ccagacagggggcagagcaa

SEQ ID NO: 24018 - DNA, 20 bp, synthetic construct
  source 1..20: mol_type = other DNA
actctccagagtatgacccc

SEQ ID NO: 24019 - DNA, 20 bp, synthetic construct
  source 1..20: mol_type = other DNA
gagcccattgcttttagcac

SEQ ID NO: 24020 - DNA, 20 bp, synthetic construct
  source 1..20: mol_type = other DNA
cctagacataattcatgcag

SEQ ID NO: 24021 - DNA, 20 bp, synthetic construct
  source 1..20: mol_type = other DNA
aaccagcccaaagggcctcc

SEQ ID NO: 24022 - DNA, 20 bp, synthetic construct
  source 1..20: mol_type = other DNA
gggtacacttgccaatacgc

SEQ ID NO: 24023 - DNA, 20 bp, synthetic construct
  source 1..20: mol_type = other DNA
aatgggctgaaaattgctac

SEQ ID NO: 24024 - DNA, 20 bp, synthetic construct
  source 1..20: mol_type = other DNA
caccaggaagtattcggacc

SEQ ID NO: 24025 - DNA, 20 bp, synthetic construct
  source 1..20: mol_type = other DNA
caaccatatgcagatctcca

SEQ ID NO: 24026 - DNA, 20 bp, synthetic construct
  source 1..20: mol_type = other DNA
aacaacagaagcacccactc

SEQ ID NO: 24027 - DNA, 20 bp, synthetic construct
  source 1..20: mol_type = other DNA
taagtgcaatcccaacttac

SEQ ID NO: 24028 - DNA, 20 bp, synthetic construct
  source 1..20: mol_type = other DNA
atattgatgaagattaagaa

SEQ ID NO: 24029 - DNA, 20 bp, synthetic construct
  source 1..20: mol_type = other DNA
cctgcaccaggggaatatac

SEQ ID NO: 24030 - DNA, 20 bp, synthetic construct
  source 1..20: mol_type = other DNA
attatacagtctaaacttgt

SEQ ID NO: 24031 - DNA, 20 bp, synthetic construct
  source 1..20: mol_type = other DNA
agccacaggccggtacaact

SEQ ID NO: 24032 - DNA, 20 bp, synthetic construct
  source 1..20: mol_type = other DNA
cctctattttatgatggcta

SEQ ID NO: 24033 - DNA, 20 bp, synthetic construct
  source 1..20: mol_type = other DNA
aaaatacaatctggccttca

SEQ ID NO: 24034 - DNA, 20 bp, synthetic construct
  source 1..20: mol_type = other DNA
tttctctgttcggatcttac

SEQ ID NO: 24035 - DNA, 20 bp, synthetic construct
  source 1..20: mol_type = other DNA
tttccttcgtcagattgtca

SEQ ID NO: 24036 - DNA, 20 bp, synthetic construct
  source 1..20: mol_type = other DNA
agcaattcaaccaattaagt

SEQ ID NO: 24037 - DNA, 20 bp, synthetic construct
  source 1..20: mol_type = other DNA
aaacaattctagtccatatg

SEQ ID NO: 24038 - DNA, 20 bp, synthetic construct
  source 1..20: mol_type = other DNA
caactgcaacttatcgattg

SEQ ID NO: 24039 - DNA, 20 bp, synthetic construct
  source 1..20: mol_type = other DNA
tcaacagcaagtacaaagag

SEQ ID NO: 24040 - DNA, 20 bp, synthetic construct
  source 1..20: mol_type = other DNA
ttcaaggtttctaagacgcc

SEQ ID NO: 24041 - DNA, 20 bp, synthetic construct
  source 1..20: mol_type = other DNA
gaagaggaccagtgcgattc

SEQ ID NO: 24042 - DNA, 20 bp, synthetic construct
  source 1..20: mol_type = other DNA
ggggcacaaaaaagaagaga

SEQ ID NO: 24043 - DNA, 20 bp, synthetic construct
  source 1..20: mol_type = other DNA
gaagcaacaatggacaaagg

SEQ ID NO: 24044 - DNA, 20 bp, synthetic construct
  source 1..20: mol_type = other DNA
acaagccgaccattgacatt

SEQ ID NO: 24045 - DNA, 20 bp, synthetic construct
  source 1..20: mol_type = other DNA
tccttgtccatagagaatgg

SEQ ID NO: 24046 - DNA, 20 bp, synthetic construct
  source 1..20: mol_type = other DNA
ctgttccagtgtctttctcg

SEQ ID NO: 24047 - DNA, 20 bp, synthetic construct
  source 1..20: mol_type = other DNA
agtacacgggatctgacgga

SEQ ID NO: 24048 - DNA, 20 bp, synthetic construct
  source 1..20: mol_type = other DNA
aggtctttggaggagccttc

SEQ ID NO: 24049 - DNA, 20 bp, synthetic construct
  source 1..20: mol_type = other DNA
ccgtctcacgtctggaacac

SEQ ID NO: 24050 - DNA, 20 bp, synthetic construct
  source 1..20: mol_type = other DNA
acactactgactgcgacagc

SEQ ID NO: 24051 - DNA, 20 bp, synthetic construct
  source 1..20: mol_type = other DNA
gcgtcagtgcccatcggagt

SEQ ID NO: 24052 - DNA, 20 bp, synthetic construct
  source 1..20: mol_type = other DNA
tctttcagatggcggccacc

SEQ ID NO: 24053 - DNA, 20 bp, synthetic construct
  source 1..20: mol_type = other DNA
gaatcactctcatcatcatc

SEQ ID NO: 24054 - DNA, 20 bp, synthetic construct
  source 1..20: mol_type = other DNA
ttcttcacaccctgtggcac

SEQ ID NO: 24055 - DNA, 20 bp, synthetic construct
  source 1..20: mol_type = other DNA
gaaaggcagccataaacatc

SEQ ID NO: 24056 - DNA, 20 bp, synthetic construct
  source 1..20: mol_type = other DNA
atgtcagtgccatcgtgcaa

SEQ ID NO: 24057 - DNA, 20 bp, synthetic construct
  source 1..20: mol_type = other DNA
cagctgtgctggctccaacc

SEQ ID NO: 24058 - DNA, 20 bp, synthetic construct
  source 1..20: mol_type = other DNA
caaactacaacctctttgtg

SEQ ID NO: 24059 - DNA, 20 bp, synthetic construct
  source 1..20: mol_type = other DNA
ctagtgctagtgctgcccag

SEQ ID NO: 24060 - DNA, 20 bp, synthetic construct
  source 1..20: mol_type = other DNA
gaccaaggtcaaacatcatt

SEQ ID NO: 24061 - DNA, 20 bp, synthetic construct
  source 1..20: mol_type = other DNA
ttgaagtcctggggagaatg

SEQ ID NO: 24062 - DNA, 20 bp, synthetic construct
  source 1..20: mol_type = other DNA
cagcaggagttttcttgctc

SEQ ID NO: 24063 - DNA, 20 bp, synthetic construct
  source 1..20: mol_type = other DNA
ccatgaacgctttggcattg

SEQ ID NO: 24064 - DNA, 20 bp, synthetic construct
  source 1..20: mol_type = other DNA
gaatcatgaaaaatgctgtg

SEQ ID NO: 24065 - DNA, 20 bp, synthetic construct
  source 1..20: mol_type = other DNA
tatcagcggcactcctgact

SEQ ID NO: 24066 - DNA, 20 bp, synthetic construct
  source 1..20: mol_type = other DNA
ggaaccttgtcactatgaag

SEQ ID NO: 24067 - DNA, 20 bp, synthetic construct
  source 1..20: mol_type = other DNA
accatgacaaggaccaccca

SEQ ID NO: 24068 - DNA, 20 bp, synthetic construct
  source 1..20: mol_type = other DNA
ctggcacagatgggaagacc

SEQ ID NO: 24069 - DNA, 20 bp, synthetic construct
  source 1..20: mol_type = other DNA
tgagagccattattggccag

SEQ ID NO: 24070 - DNA, 20 bp, synthetic construct
  source 1..20: mol_type = other DNA
tcagaaccgtttcggagagg

SEQ ID NO: 24071 - DNA, 20 bp, synthetic construct
  source 1..20: mol_type = other DNA
aaggactagaggttagagga

SEQ ID NO: 24072 - DNA, 20 bp, synthetic construct
  source 1..20: mol_type = other DNA
tacaagaggacttcatttga

SEQ ID NO: 24073 - DNA, 20 bp, synthetic construct
  source 1..20: mol_type = other DNA
tcaagtgcaatccaatcaaa

SEQ ID NO: 24074 - DNA, 20 bp, synthetic construct
  source 1..20: mol_type = other DNA
agctggtgttccaaccacca

SEQ ID NO: 24075 - DNA, 20 bp, synthetic construct
  source 1..20: mol_type = other DNA
tgatgtagagtttttcttct

SEQ ID NO: 24076 - DNA, 20 bp, synthetic construct
  source 1..20: mol_type = other DNA
tctggagccgctagaagaga

SEQ ID NO: 24077 - DNA, 20 bp, synthetic construct
  source 1..20: mol_type = other DNA
gaaaatacttgagtcaaaga

SEQ ID NO: 24078 - DNA, 20 bp, synthetic construct
  source 1..20: mol_type = other DNA
gttgactggttacagaaggg

SEQ ID NO: 24079 - DNA, 20 bp, synthetic construct
  source 1..20: mol_type = other DNA
gcatgaccaacgcatcattg

SEQ ID NO: 24080 - DNA, 20 bp, synthetic construct
  source 1..20: mol_type = other DNA
actctggccaacatctgagc

SEQ ID NO: 24081 - DNA, 20 bp, synthetic construct
  source 1..20: mol_type = other DNA
aacttcacttcaaccatcgg

SEQ ID NO: 24082 - DNA, 20 bp, synthetic construct
  source 1..20: mol_type = other DNA
tctggtcttggacacctaca

SEQ ID NO: 24083 - DNA, 20 bp, synthetic construct
  source 1..20: mol_type = other DNA
gccaaagaaaatctgggagg

SEQ ID NO: 24084 - DNA, 20 bp, synthetic construct
  source 1..20: mol_type = other DNA
atagcccctcctaatgaggt

SEQ ID NO: 24085 - DNA, 20 bp, synthetic construct
  source 1..20: mol_type = other DNA
atgcacaaacgcagtataga

SEQ ID NO: 24086 - DNA, 20 bp, synthetic construct
  source 1..20: mol_type = other DNA
ctgactttccatatgctcca

SEQ ID NO: 24087 - DNA, 20 bp, synthetic construct
  source 1..20: mol_type = other DNA
atcgacaatcatccccaggt

SEQ ID NO: 24088 - DNA, 20 bp, synthetic construct
  source 1..20: mol_type = other DNA
ttgacacgctcaaggatgag

SEQ ID NO: 24089 - DNA, 20 bp, synthetic construct
  source 1..20: mol_type = other DNA
aaaacgtttctcttctggtt

SEQ ID NO: 24090 - DNA, 20 bp, synthetic construct
  source 1..20: mol_type = other DNA
ctcgcgtcgctcttccaatt

SEQ ID NO: 24091 - DNA, 20 bp, synthetic construct
  source 1..20: mol_type = other DNA
ataaagtagataaggcaaga

SEQ ID NO: 24092 - DNA, 20 bp, synthetic construct
  source 1..20: mol_type = other DNA
atagtgtagctttagctttg

SEQ ID NO: 24093 - DNA, 20 bp, synthetic construct
  source 1..20: mol_type = other DNA
acgataaagtggataccgca

SEQ ID NO: 24094 - DNA, 20 bp, synthetic construct
  source 1..20: mol_type = other DNA
ccaatgaagcatcaggaaac

SEQ ID NO: 24095 - DNA, 20 bp, synthetic construct
  source 1..20: mol_type = other DNA
ggtattaaatatgttgcaca

SEQ ID NO: 24096 - DNA, 20 bp, synthetic construct
  source 1..20: mol_type = other DNA
gtaggttgtaaatctattgt

SEQ ID NO: 24097 - DNA, 20 bp, synthetic construct
  source 1..20: mol_type = other DNA
tcatcttatgagtattgtca

SEQ ID NO: 24098 - DNA, 20 bp, synthetic construct
  source 1..20: mol_type = other DNA
ttaaactcttgtaaagagca

SEQ ID NO: 24099 - DNA, 20 bp, synthetic construct
  source 1..20: mol_type = other DNA
gaagatgttgttactggtga

SEQ ID NO: 24100 - DNA, 20 bp, synthetic construct
  source 1..20: mol_type = other DNA
gtagatgatattgaaagtat

SEQ ID NO: 24101 - DNA, 20 bp, synthetic construct
  source 1..20: mol_type = other DNA
acattacatttttcattatt

SEQ ID NO: 24102 - DNA, 20 bp, synthetic construct
  source 1..20: mol_type = other DNA
ggagttgcaaaagctatagc

SEQ ID NO: 24103 - DNA, 20 bp, synthetic construct
  source 1..20: mol_type = other DNA
cttcgtcatgatatacaatt

SEQ ID NO: 24104 - DNA, 20 bp, synthetic construct
  source 1..20: mol_type = other DNA
cattttaaatttgatgaacc

SEQ ID NO: 24105 - DNA, 20 bp, synthetic construct
  source 1..20: mol_type = other DNA
gatctttttaatggttataa

SEQ ID NO: 24106 - DNA, 20 bp, synthetic construct
  source 1..20: mol_type = other DNA
ttgaaatgtggttcacctta

SEQ ID NO: 24107 - DNA, 20 bp, synthetic construct
  source 1..20: mol_type = other DNA
agaattgttatgtggataaa

SEQ ID NO: 24108 - DNA, 20 bp, synthetic construct
  source 1..20: mol_type = other DNA
gaagtagatagacgtgtttt

SEQ ID NO: 24109 - DNA, 20 bp, synthetic construct
  source 1..20: mol_type = other DNA
tttgctagtgatagtgttca

SEQ ID NO: 24110 - DNA, 20 bp, synthetic construct
  source 1..20: mol_type = other DNA
tgggttttgaataatgatta

SEQ ID NO: 24111 - DNA, 20 bp, synthetic construct
  source 1..20: mol_type = other DNA
gacaaagtttattgtcctcg

SEQ ID NO: 24112 - DNA, 20 bp, synthetic construct
  source 1..20: mol_type = other DNA
tttagttgtataatttctgc

SEQ ID NO: 24113 - DNA, 20 bp, synthetic construct
  source 1..20: mol_type = other DNA
tatgtaaattatttagttgt

SEQ ID NO: 24114 - DNA, 20 bp, synthetic construct
  source 1..20: mol_type = other DNA
gaacgtgataaagctgtagc

SEQ ID NO: 24115 - DNA, 20 bp, synthetic construct
  source 1..20: mol_type = other DNA
gataatgctgttaaaggttg

SEQ ID NO: 24116 - DNA, 20 bp, synthetic construct
  source 1..20: mol_type = other DNA
gtttgtctcttaaagattta

SEQ ID NO: 24117 - DNA, 20 bp, synthetic construct
  source 1..20: mol_type = other DNA
ctagtaagggttatatagct

SEQ ID NO: 24118 - DNA, 20 bp, synthetic construct
  source 1..20: mol_type = other DNA
ctttgcgttgtggcagttgt

SEQ ID NO: 24119 - DNA, 20 bp, synthetic construct
  source 1..20: mol_type = other DNA
gtttaaagttatttgctgca

SEQ ID NO: 24120 - DNA, 20 bp, synthetic construct
  source 1..20: mol_type = other DNA
tagtttatactgctgctagt

SEQ ID NO: 24121 - DNA, 20 bp, synthetic construct
  source 1..20: mol_type = other DNA
agagagtctctttatggaat

SEQ ID NO: 24122 - DNA, 20 bp, synthetic construct
  source 1..20: mol_type = other DNA
ttttatcgtgccttatattc

SEQ ID NO: 24123 - DNA, 20 bp, synthetic construct
  source 1..20: mol_type = other DNA
ataattttgatgaatctaag

SEQ ID NO: 24124 - DNA, 20 bp, synthetic construct
  source 1..20: mol_type = other DNA
gtcataaaccaccttctgct

SEQ ID NO: 24125 - DNA, 20 bp, synthetic construct
  source 1..20: mol_type = other DNA
attgtgcagggttcggtgtt

SEQ ID NO: 24126 - DNA, 20 bp, synthetic construct
  source 1..20: mol_type = other DNA
agtatggcactttttgtgat

SEQ ID NO: 24127 - DNA, 20 bp, synthetic construct
  source 1..20: mol_type = other DNA
ctcctattttgtctgaatct

SEQ ID NO: 24128 - DNA, 20 bp, synthetic construct
  source 1..20: mol_type = other DNA
ttaatttttgtggtaatggt

SEQ ID NO: 24129 - DNA, 20 bp, synthetic construct
  source 1..20: mol_type = other DNA
ttggtgtcgcaagtttggca

SEQ ID NO: 24130 - DNA, 20 bp, synthetic construct
  source 1..20: mol_type = other DNA
ttgtgccattacaacaggca

SEQ ID NO: 24131 - DNA, 20 bp, synthetic construct
  source 1..20: mol_type = other DNA
caacgactgggccagcaacc

SEQ ID NO: 24132 - DNA, 20 bp, synthetic construct
  source 1..20: mol_type = other DNA
acatcaccaagattgtgtac

SEQ ID NO: 24133 - DNA, 20 bp, synthetic construct
  source 1..20: mol_type = other DNA
gcattgacgttgaccaaacc

SEQ ID NO: 24134 - DNA, 20 bp, synthetic construct
  source 1..20: mol_type = other DNA
agaatgaagggggtgggtac

SEQ ID NO: 24135 - DNA, 20 bp, synthetic construct
  source 1..20: mol_type = other DNA
ttggttccgtgggcggcttc

SEQ ID NO: 24136 - DNA, 20 bp, synthetic construct
  source 1..20: mol_type = other DNA
tggccacaggtggactcatc

SEQ ID NO: 24137 - DNA, 20 bp, synthetic construct
  source 1..20: mol_type = other DNA
ctgcagcgctcgtggaggca

SEQ ID NO: 24138 - DNA, 20 bp, synthetic construct
  source 1..20: mol_type = other DNA
tgcatgtcatggacttgcgt

SEQ ID NO: 24139 - DNA, 20 bp, synthetic construct
  source 1..20: mol_type = other DNA
tgcgcgtgaaacgagaacca

SEQ ID NO: 24140 - DNA, 20 bp, synthetic construct
  source 1..20: mol_type = other DNA
gtgcctggaacctgccaacc

SEQ ID NO: 24141 - DNA, 20 bp, synthetic construct
  source 1..20: mol_type = other DNA
atccaggtgcggggaagact

SEQ ID NO: 24142 - DNA, 20 bp, synthetic construct
  source 1..20: mol_type = other DNA
ggaataacatcaagcctgag

SEQ ID NO: 24143 - DNA, 20 bp, synthetic construct
  source 1..20: mol_type = other DNA
ggaaagaagcccaaatgctg

SEQ ID NO: 24144 - DNA, 20 bp, synthetic construct
  source 1..20: mol_type = other DNA
tggcatggcatgtggctaag

SEQ ID NO: 24145 - DNA, 20 bp, synthetic construct
  source 1..20: mol_type = other DNA
aggggcgtgacatccgagag

SEQ ID NO: 24146 - DNA, 20 bp, synthetic construct
  source 1..20: mol_type = other DNA
atggacatatggcgggggtt

SEQ ID NO: 24147 - DNA, 20 bp, synthetic construct
  source 1..20: mol_type = other DNA
aggctgacttaggccagctt

SEQ ID NO: 24148 - DNA, 20 bp, synthetic construct
  source 1..20: mol_type = other DNA
tggtcaacagtgccgtggtg

SEQ ID NO: 24149 - DNA, 20 bp, synthetic construct
  source 1..20: mol_type = other DNA
ccctggctgtgtccctcaac

SEQ ID NO: 24150 - DNA, 20 bp, synthetic construct
  source 1..20: mol_type = other DNA
gtggagagacaaacatgggg

SEQ ID NO: 24151 - DNA, 20 bp, synthetic construct
  source 1..20: mol_type = other DNA
ccatcggagggaaaggacac

SEQ ID NO: 24152 - DNA, 20 bp, synthetic construct
  source 1..20: mol_type = other DNA
gcagagtgatccagctcatg

SEQ ID NO: 24153 - DNA, 20 bp, synthetic construct
  source 1..20: mol_type = other DNA
tgtactacacgacgggggtt

SEQ ID NO: 24154 - DNA, 20 bp, synthetic construct
  source 1..20: mol_type = other DNA
tggaagagaggatcaacgcc

SEQ ID NO: 24155 - DNA, 20 bp, synthetic construct
  source 1..20: mol_type = other DNA
aaggtgagggcgtcattggg

SEQ ID NO: 24156 - DNA, 20 bp, synthetic construct
  source 1..20: mol_type = other DNA
acatggcgaaagtgagaaag

SEQ ID NO: 24157 - DNA, 20 bp, synthetic construct
  source 1..20: mol_type = other DNA
ctgactgggcacggcacata

SEQ ID NO: 24158 - DNA, 20 bp, synthetic construct
  source 1..20: mol_type = other DNA
ggccgagtgggatgcgtatg

SEQ ID NO: 24159 - DNA, 20 bp, synthetic construct
  source 1..20: mol_type = other DNA
taaaacaggaagaagaccct

SEQ ID NO: 24160 - DNA, 20 bp, synthetic construct
  source 1..20: mol_type = other DNA
cattttccttataattattt

SEQ ID NO: 24161 - DNA, 20 bp, synthetic construct
  source 1..20: mol_type = other DNA
caggattggctttttcaatt

SEQ ID NO: 24162 - DNA, 20 bp, synthetic construct
  source 1..20: mol_type = other DNA
acagacggctcttccaatgg

SEQ ID NO: 24163 - DNA, 20 bp, synthetic construct
  source 1..20: mol_type = other DNA
tatggtgtcaaccctcgagg

SEQ ID NO: 24164 - DNA, 20 bp, synthetic construct
  source 1..20: mol_type = other DNA
tggaaagatccacttaccaa

SEQ ID NO: 24165 - DNA, 20 bp, synthetic construct
  source 1..20: mol_type = other DNA
tgttttggttttgcaacatg

SEQ ID NO: 24166 - DNA, 20 bp, synthetic construct
  source 1..20: mol_type = other DNA
gttttgtgaaaaattacctg

SEQ ID NO: 24167 - DNA, 20 bp, synthetic construct
  source 1..20: mol_type = other DNA
ttgtagacttgttcctgacg

SEQ ID NO: 24168 - DNA, 20 bp, synthetic construct
  source 1..20: mol_type = other DNA
agtcaagccaaccgcggagg

SEQ ID NO: 24169 - DNA, 20 bp, synthetic construct
  source 1..20: mol_type = other DNA
agggtatggtacagagtgta

SEQ ID NO: 24170 - DNA, 20 bp, synthetic construct
  source 1..20: mol_type = other DNA
gtagaaaatattgatagatt

SEQ ID NO: 24171 - DNA, 20 bp, synthetic construct
  source 1..20: mol_type = other DNA
ccttcttcggaccaacaacc

SEQ ID NO: 24172 - DNA, 20 bp, synthetic construct
  source 1..20: mol_type = other DNA
gccatttggaaacgccctga

SEQ ID NO: 24173 - DNA, 20 bp, synthetic construct
  source 1..20: mol_type = other DNA
catcaaccatggtctgtccg

SEQ ID NO: 24174 - DNA, 20 bp, synthetic construct
  source 1..20: mol_type = other DNA
atatggactaaaattcctaa

SEQ ID NO: 24175 - DNA, 20 bp, synthetic construct
  source 1..20: mol_type = other DNA
tgcgccgcgcgatcaggagg

SEQ ID NO: 24176 - DNA, 20 bp, synthetic construct
  source 1..20: mol_type = other DNA
taagtacgtagatactagcc

SEQ ID NO: 24177 - DNA, 20 bp, synthetic construct
  source 1..20: mol_type = other DNA
cgtcaacatggtggcataca

SEQ ID NO: 24178 - DNA, 20 bp, synthetic construct
  source 1..20: mol_type = other DNA
ggctgttgacagcactacca

SEQ ID NO: 24179 - DNA, 20 bp, synthetic construct
  source 1..20: mol_type = other DNA
attggaccatccttacgggt

SEQ ID NO: 24180 - DNA, 20 bp, synthetic construct
  source 1..20: mol_type = other DNA
tgcaggtctatcaaccacta

SEQ ID NO: 24181 - DNA, 20 bp, synthetic construct
  source 1..20: mol_type = other DNA
gccagagtgtagccaaagag

SEQ ID NO: 24182 - DNA, 20 bp, synthetic construct
  source 1..20: mol_type = other DNA
agacgttggtgcatagggtg

SEQ ID NO: 24183 - DNA, 20 bp, synthetic construct
  source 1..20: mol_type = other DNA
agtatgtgagcaaacaagac

SEQ ID NO: 24184 - DNA, 20 bp, synthetic construct
  source 1..20: mol_type = other DNA
atctatccatcattgagaat

SEQ ID NO: 24185 - DNA, 20 bp, synthetic construct
  source 1..20: mol_type = other DNA
ttgcagtatgatggtgatct

SEQ ID NO: 24186 - DNA, 20 bp, synthetic construct
  source 1..20: mol_type = other DNA
cccaactcaatccgattgat

SEQ ID NO: 24187 - DNA, 20 bp, synthetic construct
  source 1..20: mol_type = other DNA
ggcgggcaattgcaacaccc

SEQ ID NO: 24188 - DNA, 20 bp, synthetic construct
  source 1..20: mol_type = other DNA
tcaatatgctgagtacagtc

SEQ ID NO: 24189 - DNA, 20 bp, synthetic construct
  source 1..20: mol_type = other DNA
gcaaactagttggaatcaat

SEQ ID NO: 24190 - DNA, 20 bp, synthetic construct
  source 1..20: mol_type = other DNA
aggcaggactgttggtttca

SEQ ID NO: 24191 - DNA, 20 bp, synthetic construct
  source 1..20: mol_type = other DNA
gtcatgagggggaggggata

SEQ ID NO: 24192 - DNA, 20 bp, synthetic construct
  source 1..20: mol_type = other DNA
ctgttttcaacagtctatat

SEQ ID NO: 24193 - DNA, 20 bp, synthetic construct
  source 1..20: mol_type = other DNA
aaacagcagcacaaagagca

SEQ ID NO: 24194 - DNA, 20 bp, synthetic construct
  source 1..20: mol_type = other DNA
tggtgtttggatcgggagaa

SEQ ID NO: 24195 - DNA, 20 bp, synthetic construct
  source 1..20: mol_type = other DNA
aatttggactagtgggagca

SEQ ID NO: 24196 - DNA, 20 bp, synthetic construct
  source 1..20: mol_type = other DNA
ttatagagggaggatggcag

SEQ ID NO: 24197 - DNA, 20 bp, synthetic construct
  source 1..20: mol_type = other DNA
agcttagggataatgcaaag

SEQ ID NO: 24198 - DNA, 20 bp, synthetic construct
  source 1..20: mol_type = other DNA
ggtgcacttgccagttgtat

SEQ ID NO: 24199 - DNA, 20 bp, synthetic construct
  source 1..20: mol_type = other DNA
agagggccttctacggaagg

SEQ ID NO: 24200 - DNA, 20 bp, synthetic construct
  source 1..20: mol_type = other DNA
ctcaacaggtggaatatgcg

SEQ ID NO: 24201 - DNA, 20 bp, synthetic construct
  source 1..20: mol_type = other DNA
gggtttcatagaaaatggtt

SEQ ID NO: 24202 - DNA, 20 bp, synthetic construct
  source 1..20: mol_type = other DNA
gaagcaactgagggaaaatg

SEQ ID NO: 24203 - DNA, 20 bp, synthetic construct
  source 1..20: mol_type = other DNA
tgcgaccctgacaagtgtta

SEQ ID NO: 24204 - DNA, 20 bp, synthetic construct
  source 1..20: mol_type = other DNA
gtaatgactgatgggagtgc

SEQ ID NO: 24205 - DNA, 20 bp, synthetic construct
  source 1..20: mol_type = other DNA
cgaacggctgcattgagggc

SEQ ID NO: 24206 - DNA, 20 bp, synthetic construct
  source 1..20: mol_type = other DNA
tcccaaggactaaaaacatg

SEQ ID NO: 24207 - DNA, 20 bp, synthetic construct
  source 1..20: mol_type = other DNA
cccaactcaacccaattgat

SEQ ID NO: 24208 - DNA, 20 bp, synthetic construct
  source 1..20: mol_type = other DNA
tcaacatgctaagtacggtt

SEQ ID NO: 24209 - DNA, 20 bp, synthetic construct
  source 1..20: mol_type = other DNA
gtagttcatataggagaccg

SEQ ID NO: 24210 - DNA, 20 bp, synthetic construct
  source 1..20: mol_type = other DNA
cagaatcgcaattaacaata

SEQ ID NO: 24211 - DNA, 20 bp, synthetic construct
  source 1..20: mol_type = other DNA
caagcacagagatgtcaatg

SEQ ID NO: 24212 - DNA, 20 bp, synthetic construct
  source 1..20: mol_type = other DNA
acagaagatacggaccagca

SEQ ID NO: 24213 - DNA, 20 bp, synthetic construct
  source 1..20: mol_type = other DNA
accaaatgccaaactccttt

SEQ ID NO: 24214 - DNA, 20 bp, synthetic construct
  source 1..20: mol_type = other DNA
gtagcaggttctctgtcact

SEQ ID NO: 24215 - DNA, 20 bp, synthetic construct
  source 1..20: mol_type = other DNA
gcaaggagacgtggtgttgg

SEQ ID NO: 24216 - DNA, 20 bp, synthetic construct
  source 1..20: mol_type = other DNA
acgagagaaggaataaatat

SEQ ID NO: 24217 - DNA, 20 bp, synthetic construct
  source 1..20: mol_type = other DNA
cagctgggctgactcacatg

SEQ ID NO: 24218 - DNA, 20 bp, synthetic construct
  source 1..20: mol_type = other DNA
ggaacccaggaaatgctgag

SEQ ID NO: 24219 - DNA, 20 bp, synthetic construct
  source 1..20: mol_type = other DNA
catggttgcatgtttgtgtc

SEQ ID NO: 24220 - DNA, 20 bp, synthetic construct
  source 1..20: mol_type = other DNA
cttcaggaagagccgatact

SEQ ID NO: 24221 - DNA, 20 bp, synthetic construct
  source 1..20: mol_type = other DNA
ggtgcttttatgtggagttg

SEQ ID NO: 24222 - DNA, 20 bp, synthetic construct
  source 1..20: mol_type = other DNA
aagatatcaccattgattta

SEQ ID NO: 24223 - DNA, 20 bp, synthetic construct
  source 1..20: mol_type = other DNA
taaaagaaatggctgcacat

SEQ ID NO: 24224 - DNA, 20 bp, synthetic construct
  source 1..20: mol_type = other DNA
catatcctttagactataaa

SEQ ID NO: 24225 - DNA, 20 bp, synthetic construct
  source 1..20: mol_type = other DNA
ttcgggatactccaatcata

SEQ ID NO: 24226 - DNA, 20 bp, synthetic construct
  source 1..20: mol_type = other DNA
cgataatgtcaatatggaaa

SEQ ID NO: 24227 - DNA, 20 bp, synthetic construct
  source 1..20: mol_type = other DNA
ttttatcgctcaacattcat

SEQ ID NO: 24228 - DNA, 20 bp, synthetic construct
  source 1..20: mol_type = other DNA
agggctaaacatcttctatg

SEQ ID NO: 24229 - DNA, 20 bp, synthetic construct
  source 1..20: mol_type = other DNA
tacattctcctacaacatac

SEQ ID NO: 24230 - DNA, 20 bp, synthetic construct
  source 1..20: mol_type = other DNA
gcggccaagcaagaagagag

SEQ ID NO: 24231 - DNA, 20 bp, synthetic construct
  source 1..20: mol_type = other DNA
cattgtgagggctctagatg

SEQ ID NO: 24232 - DNA, 20 bp, synthetic construct
  source 1..20: mol_type = other DNA
ggacttcaaggtgatgaaga

SEQ ID NO: 24233 - DNA, 20 bp, synthetic construct
  source 1..20: mol_type = other DNA
cggatggggtaacggatgtg

SEQ ID NO: 24234 - DNA, 20 bp, synthetic construct
  source 1..20: mol_type = other DNA
ggactggtttcacgacttga

SEQ ID NO: 24235 - DNA, 20 bp, synthetic construct
  source 1..20: mol_type = other DNA
tgttagcagctcaaccctaa

SEQ ID NO: 24236 - DNA, 20 bp, synthetic construct
  source 1..20: mol_type = other DNA
aagcaacggaccctgccgag

SEQ ID NO: 24237 - DNA, 20 bp, synthetic construct
  source 1..20: mol_type = other DNA
caccacccagattaactacc

SEQ ID NO: 24238 - DNA, 20 bp, synthetic construct
  source 1..20: mol_type = other DNA
atgcgattcggcaatcatcg

SEQ ID NO: 24239 - DNA, 20 bp, synthetic construct
  source 1..20: mol_type = other DNA
gggagcgtcgctgcgcacaa

SEQ ID NO: 24240 - DNA, 20 bp, synthetic construct
  source 1..20: mol_type = other DNA
tggagttgcaggagggatgg

SEQ ID NO: 24241 - DNA, 20 bp, synthetic construct
  source 1..20: mol_type = other DNA
ggcggccaatgacttgaagc

SEQ ID NO: 24242 - DNA, 20 bp, synthetic construct
  source 1..20: mol_type = other DNA
gttgataattgggattgtaa

SEQ ID NO: 24243 - DNA, 20 bp, synthetic construct
  source 1..20: mol_type = other DNA
gttttggctacttggcaaac

SEQ ID NO: 24244 - DNA, 20 bp, synthetic construct
  source 1..20: mol_type = other DNA
ccaggttccggataaggcgt

SEQ ID NO: 24245 - DNA, 20 bp, synthetic construct
  source 1..20: mol_type = other DNA
agcacagcgcagaggccgca

SEQ ID NO: 24246 - DNA, 20 bp, synthetic construct
  source 1..20: mol_type = other DNA
gcgagataaggttttcacca

SEQ ID NO: 24247 - DNA, 20 bp, synthetic construct
  source 1..20: mol_type = other DNA
cacaatcctggaagacaaca

SEQ ID NO: 24248 - DNA, 20 bp, synthetic construct
  source 1..20: mol_type = other DNA
tagaatgccaaatcacttct

SEQ ID NO: 24249 - DNA, 20 bp, synthetic construct
  source 1..20: mol_type = other DNA
tatggatctatcggtgccat

SEQ ID NO: 24250 - DNA, 20 bp, synthetic construct
  source 1..20: mol_type = other DNA
agagatctggaagtcaagac

SEQ ID NO: 24251 - DNA, 20 bp, synthetic construct
  source 1..20: mol_type = other DNA
aagaggattcgtcaaaccca

SEQ ID NO: 24252 - DNA, 20 bp, synthetic construct
  source 1..20: mol_type = other DNA
taaaacctacatggatgtca

SEQ ID NO: 24253 - DNA, 20 bp, synthetic construct
  source 1..20: mol_type = other DNA
agcggtcgagtggctgagga

SEQ ID NO: 24254 - DNA, 20 bp, synthetic construct
  source 1..20: mol_type = other DNA
gcacaactggcaagaggtgc

SEQ ID NO: 24255 - DNA, 20 bp, synthetic construct
  source 1..20: mol_type = other DNA
gtatctagaccagcgcatgc

SEQ ID NO: 24256 - DNA, 20 bp, synthetic construct
  source 1..20: mol_type = other DNA
gagagcgaaggacagcgaag

SEQ ID NO: 24257 - DNA, 20 bp, synthetic construct
  source 1..20: mol_type = other DNA
gaaggagggtggggtcccta

SEQ ID NO: 24258 - DNA, 20 bp, synthetic construct
  source 1..20: mol_type = other DNA
aaagggagaagtgcacctgg

SEQ ID NO: 24259 - DNA, 20 bp, synthetic construct
  source 1..20: mol_type = other DNA
cctacagttgcaaaccctga

SEQ ID NO: 24260 - DNA, 20 bp, synthetic construct
  source 1..20: mol_type = other DNA
acagtacccccaggcttatc

SEQ ID NO: 24261 - DNA, 20 bp, synthetic construct
  source 1..20: mol_type = other DNA
tgaggtccaacgttactctg

SEQ ID NO: 24262 - DNA, 20 bp, synthetic construct
  source 1..20: mol_type = other DNA
tgggagggtgcttctcctac

SEQ ID NO: 24263 - DNA, 20 bp, synthetic construct
  source 1..20: mol_type = other DNA
ggttcactgcaccatgaacg

SEQ ID NO: 24264 - DNA, 20 bp, synthetic construct
  source 1..20: mol_type = other DNA
ggcccctgactcatcacccc

SEQ ID NO: 24265 - DNA, 20 bp, synthetic construct
  source 1..20: mol_type = other DNA
aggccaacttcctgtttacc

SEQ ID NO: 24266 - DNA, 20 bp, synthetic construct
  source 1..20: mol_type = other DNA
tcaagacttccgagctgtca

SEQ ID NO: 24267 - DNA, 20 bp, synthetic construct
  source 1..20: mol_type = other DNA
gcccaccacagtctccggac

SEQ ID NO: 24268 - DNA, 20 bp, synthetic construct
  source 1..20: mol_type = other DNA
atgtaaaggccaccaggtat

SEQ ID NO: 24269 - DNA, 20 bp, synthetic construct
  source 1..20: mol_type = other DNA
actgatggccatgaggtcct

SEQ ID NO: 24270 - DNA, 20 bp, synthetic construct
  source 1..20: mol_type = other DNA
caaaggtaaatcaggcgcac

SEQ ID NO: 24271 - DNA, 20 bp, synthetic construct
  source 1..20: mol_type = other DNA
aggatggaggaaggtcctaa

SEQ ID NO: 24272 - DNA, 20 bp, synthetic construct
  source 1..20: mol_type = other DNA
taggactctgaatggtaaaa

SEQ ID NO: 24273 - DNA, 20 bp, synthetic construct
  source 1..20: mol_type = other DNA
cctcaaggtagtctcacaca

SEQ ID NO: 24274 - DNA, 20 bp, synthetic construct
  source 1..20: mol_type = other DNA
tgatcaagtcaaagcagaga

SEQ ID NO: 24275 - DNA, 20 bp, synthetic construct
  source 1..20: mol_type = other DNA
tcgcgctgttgtctcacaac

SEQ ID NO: 24276 - DNA, 20 bp, synthetic construct
  source 1..20: mol_type = other DNA
tgaaatcattcgagcaggaa

SEQ ID NO: 24277 - DNA, 20 bp, synthetic construct
  source 1..20: mol_type = other DNA
ggctgttggggtgtataaga

SEQ ID NO: 24278 - DNA, 20 bp, synthetic construct
  source 1..20: mol_type = other DNA
tgtgaaagcgacaggacaag

SEQ ID NO: 24279 - DNA, 20 bp, synthetic construct
  source 1..20: mol_type = other DNA
ggcaggaccacctgtctatg

SEQ ID NO: 24280 - DNA, 20 bp, synthetic construct
  source 1..20: mol_type = other DNA
ttcgcaactagattctggct

SEQ ID NO: 24281 - DNA, 20 bp, synthetic construct
  source 1..20: mol_type = other DNA
tccgttccctagcacaaatc

SEQ ID NO: 24282 - DNA, 20 bp, synthetic construct
  source 1..20: mol_type = other DNA
tcattaccgactggaaaagt

SEQ ID NO: 24283 - DNA, 20 bp, synthetic construct
  source 1..20: mol_type = other DNA
tcaacgagaacatgatgata

SEQ ID NO: 24284 - DNA, 20 bp, synthetic construct
  source 1..20: mol_type = other DNA
atcttcaaaattgacttcac

SEQ ID NO: 24285 - DNA, 20 bp, synthetic construct
  source 1..20: mol_type = other DNA
gagtagcgtagagtgggctt

SEQ ID NO: 24286 - DNA, 20 bp, synthetic construct
  source 1..20: mol_type = other DNA
accgacgcagtgacagaaat

SEQ ID NO: 24287 - DNA, 20 bp, synthetic construct
  source 1..20: mol_type = other DNA
tctgtgttgacgactatgta

SEQ ID NO: 24288 - DNA, 20 bp, synthetic construct
  source 1..20: mol_type = other DNA
ctcacaagactgacctcgtt

SEQ ID NO: 24289 - DNA, 20 bp, synthetic construct
  source 1..20: mol_type = other DNA
cagacaatcaacatctcaat

SEQ ID NO: 24290 - DNA, 20 bp, synthetic construct
  source 1..20: mol_type = other DNA
cagacagccggctcgggcga

SEQ ID NO: 24291 - DNA, 20 bp, synthetic construct
  source 1..20: mol_type = other DNA
atggcgcagtccgctgctgc

SEQ ID NO: 24292 - DNA, 20 bp, synthetic construct
  source 1..20: mol_type = other DNA
acagtctcagattgcgcttt

SEQ ID NO: 24293 - DNA, 20 bp, synthetic construct
  source 1..20: mol_type = other DNA
gggggcagcccttagctaac

SEQ ID NO: 24294 - DNA, 20 bp, synthetic construct
  source 1..20: mol_type = other DNA
cgactgagcagtccacccca

SEQ ID NO: 24295 - DNA, 20 bp, synthetic construct
  source 1..20: mol_type = other DNA
cccagccagcgccggcgcag

SEQ ID NO: 24296 - DNA, 20 bp, synthetic construct
  source 1..20: mol_type = other DNA
tgcctctccgtttctgactt

SEQ ID NO: 24297 - DNA, 20 bp, synthetic construct
  source 1..20: mol_type = other DNA
accatgtcctcggaggcctt

SEQ ID NO: 24298 - DNA, 20 bp, synthetic construct
  source 1..20: mol_type = other DNA
cctataggcctggagctcct

SEQ ID NO: 24299 - DNA, 20 bp, synthetic construct
  source 1..20: mol_type = other DNA
aaaggaaattaatgagacag

SEQ ID NO: 24300 - DNA, 20 bp, synthetic construct
  source 1..20: mol_type = other DNA
cgaggtatggcagatatgct

SEQ ID NO: 24301 - DNA, 20 bp, synthetic construct
  source 1..20: mol_type = other DNA
tcaggttgcctctgtggatt

SEQ ID NO: 24302 - DNA, 20 bp, synthetic construct
  source 1..20: mol_type = other DNA
agctggtatggcatgcatgc

SEQ ID NO: 24303 - DNA, 20 bp, synthetic construct
  source 1..20: mol_type = other DNA
accatgctctggtgtaatga

SEQ ID NO: 24304 - DNA, 20 bp, synthetic construct
  source 1..20: mol_type = other DNA
cactaattcagccattgcca

SEQ ID NO: 24305 - DNA, 20 bp, synthetic construct
  source 1..20: mol_type = other DNA
gaatccaccacaggagccaa

SEQ ID NO: 24306 - DNA, 20 bp, synthetic construct
  source 1..20: mol_type = other DNA
tcggttctttgcctattttt

SEQ ID NO: 24307 - DNA, 20 bp, synthetic construct
  source 1..20: mol_type = other DNA
gacaattgacgttgagggga

SEQ ID NO: 24308 - DNA, 20 bp, synthetic construct
  source 1..20: mol_type = other DNA
tattttgattttgaaccgag

SEQ ID NO: 24309 - DNA, 20 bp, synthetic construct
  source 1..20: mol_type = other DNA
tgagtttgtctctcatttgc

SEQ ID NO: 24310 - DNA, 20 bp, synthetic construct
  source 1..20: mol_type = other DNA
taaagaaatagccaaattaa

SEQ ID NO: 24311 - DNA, 20 bp, synthetic construct
  source 1..20: mol_type = other DNA
tccaaaagcaagtgtagagg

SEQ ID NO: 24312 - DNA, 20 bp, synthetic construct
  source 1..20: mol_type = other DNA
tttggatgtggcaacagcca

SEQ ID NO: 24313 - DNA, 20 bp, synthetic construct
  source 1..20: mol_type = other DNA
cattgaaaaactagaaactg

SEQ ID NO: 24314 - DNA, 20 bp, synthetic construct
  source 1..20: mol_type = other DNA
ccagtatatggtgcaagatg

SEQ ID NO: 24315 - DNA, 20 bp, synthetic construct
  source 1..20: mol_type = other DNA
tgtgagtagtgatgttatac

SEQ ID NO: 24316 - DNA, 20 bp, synthetic construct
  source 1..20: mol_type = other DNA
aaacctccaaccttataatt

SEQ ID NO: 24317 - DNA, 20 bp, synthetic construct
  source 1..20: mol_type = other DNA
atggcaggtagaaggaggga

SEQ ID NO: 24318 - DNA, 20 bp, synthetic construct
  source 1..20: mol_type = other DNA
ggaagggaagatacagtggt

SEQ ID NO: 24319 - DNA, 20 bp, synthetic construct
  source 1..20: mol_type = other DNA
agcacatctcagccggtctc

SEQ ID NO: 24320 - DNA, 20 bp, synthetic construct
  source 1..20: mol_type = other DNA
attgatcgacgcttgcgctc

SEQ ID NO: 24321 - DNA, 20 bp, synthetic construct
  source 1..20: mol_type = other DNA
tggatgcgtgaattgctcgc

SEQ ID NO: 24322 - DNA, 20 bp, synthetic construct
  source 1..20: mol_type = other DNA
gaagttttggtgaaaaacat

SEQ ID NO: 24323 - DNA, 20 bp, synthetic construct
  source 1..20: mol_type = other DNA
ttcggatacgacggagtggt

SEQ ID NO: 24324 - DNA, 20 bp, synthetic construct
  source 1..20: mol_type = other DNA
ccgacccgggaacattcagt

SEQ ID NO: 24325 - DNA, 20 bp, synthetic construct
  source 1..20: mol_type = other DNA
ctggccggatcgtttgtgaa

SEQ ID NO: 24326 - DNA, 20 bp, synthetic construct
  source 1..20: mol_type = other DNA
atgacatcaatgttcgggac

SEQ ID NO: 24327 - DNA, 20 bp, synthetic construct
  source 1..20: mol_type = other DNA
gtactgctgaactatgttgt

SEQ ID NO: 24328 - DNA, 20 bp, synthetic construct
  source 1..20: mol_type = other DNA
gggttgtacgtgctctcaac

SEQ ID NO: 24329 - DNA, 20 bp, synthetic construct
  source 1..20: mol_type = other DNA
acaacacttccgtctggatt

SEQ ID NO: 24330 - DNA, 20 bp, synthetic construct
  source 1..20: mol_type = other DNA
aacgcgcccgagtggctacc

SEQ ID NO: 24331 - DNA, 20 bp, synthetic construct
  source 1..20: mol_type = other DNA
attgacagcattcgattctc

SEQ ID NO: 24332 - DNA, 20 bp, synthetic construct
  source 1..20: mol_type = other DNA
cgcaagcaggagacacagtt

SEQ ID NO: 24333 - DNA, 20 bp, synthetic construct
  source 1..20: mol_type = other DNA
gcgcctgaaagtcgaccccg

SEQ ID NO: 24334 - DNA, 20 bp, synthetic construct
  source 1..20: mol_type = other DNA
attgagattctccatgaaat

SEQ ID NO: 24335 - DNA, 20 bp, synthetic construct
  source 1..20: mol_type = other DNA
acaactgcacaacaaagccc

SEQ ID NO: 24336 - DNA, 20 bp, synthetic construct
  source 1..20: mol_type = other DNA
agcgctaataacgtgcaccg

SEQ ID NO: 24337 - DNA, 20 bp, synthetic construct
  source 1..20: mol_type = other DNA
atcggaggcatccagctcgc

SEQ ID NO: 24338 - DNA, 20 bp, synthetic construct
  source 1..20: mol_type = other DNA
aagacagacgcttgcggact

SEQ ID NO: 24339 - DNA, 20 bp, synthetic construct
  source 1..20: mol_type = other DNA
gtgtacgcgactgagccgcg

SEQ ID NO: 24340 - DNA, 20 bp, synthetic construct
  source 1..20: mol_type = other DNA
aatgacccggtgcagcagga

SEQ ID NO: 24341 - DNA, 20 bp, synthetic construct
  source 1..20: mol_type = other DNA
aactaccacgggtcatttgt

SEQ ID NO: 24342 - DNA, 20 bp, synthetic construct
  source 1..20: mol_type = other DNA
ttgagtggaatggtcgtggc

SEQ ID NO: 24343 - DNA, 20 bp, synthetic construct
  source 1..20: mol_type = other DNA
taccatcctctcgtgctgca

SEQ ID NO: 24344 - DNA, 20 bp, synthetic construct
  source 1..20: mol_type = other DNA
ccagtgaagacatggtcaga

SEQ ID NO: 24345 - DNA, 20 bp, synthetic construct
  source 1..20: mol_type = other DNA
ttgcggatacttgggcgata

SEQ ID NO: 24346 - DNA, 20 bp, synthetic construct
  source 1..20: mol_type = other DNA
aggttatgggagaataaccc

SEQ ID NO: 24347 - DNA, 20 bp, synthetic construct
  source 1..20: mol_type = other DNA
cccgcgacgctcgagaaggt

SEQ ID NO: 24348 - DNA, 20 bp, synthetic construct
  source 1..20: mol_type = other DNA
ttcagctgactggaagagaa

SEQ ID NO: 24349 - DNA, 20 bp, synthetic construct
  source 1..20: mol_type = other DNA
ggccactgacctgccactgc

SEQ ID NO: 24350 - DNA, 20 bp, synthetic construct
  source 1..20: mol_type = other DNA
ccgatggcaccagcctggga

SEQ ID NO: 24351 - DNA, 20 bp, synthetic construct
  source 1..20: mol_type = other DNA
attcggaggggttaattgga

SEQ ID NO: 24352 - DNA, 20 bp, synthetic construct
  source 1..20: mol_type = other DNA
gaaggagctgaaatgcggtg

SEQ ID NO: 24353 - DNA, 20 bp, synthetic construct
  source 1..20: mol_type = other DNA
aatcggattcctagactgga

SEQ ID NO: 24354 - DNA, 20 bp, synthetic construct
  source 1..20: mol_type = other DNA
cgcaattttgcaaaagcggg

SEQ ID NO: 24355 - DNA, 20 bp, synthetic construct
  source 1..20: mol_type = other DNA
cgtgacaacaacgcctggag

SEQ ID NO: 24356 - DNA, 20 bp, synthetic construct
  source 1..20: mol_type = other DNA
cgctcaggctgactcatgtg

SEQ ID NO: 24357 - DNA, 20 bp, synthetic construct
  source 1..20: mol_type = other DNA
caaggtggtgctgacagaga

SEQ ID NO: 24358 - DNA, 20 bp, synthetic construct
  source 1..20: mol_type = other DNA
agggctcatgaaggacaact

SEQ ID NO: 24359 - DNA, 20 bp, synthetic construct
  source 1..20: mol_type = other DNA
gctcgctccaaagggaacgt

SEQ ID NO: 24360 - DNA, 20 bp, synthetic construct
  source 1..20: mol_type = other DNA
ggataactacttggcatatt

SEQ ID NO: 24361 - DNA, 20 bp, synthetic construct
  source 1..20: mol_type = other DNA
atgggcagtttatgcctttg

SEQ ID NO: 24362 - DNA, 20 bp, synthetic construct
  source 1..20: mol_type = other DNA
gccggtttggaacacgcaag

SEQ ID NO: 24363 - DNA, 20 bp, synthetic construct
  source 1..20: mol_type = other DNA
taaaaaacagtttgagtcct

SEQ ID NO: 24364 - DNA, 20 bp, synthetic construct
  source 1..20: mol_type = other DNA
cctggagtttgaagccctag

SEQ ID NO: 24365 - DNA, 20 bp, synthetic construct
  source 1..20: mol_type = other DNA
cctgaggctcatggcaaacg

SEQ ID NO: 24366 - DNA, 20 bp, synthetic construct
  source 1..20: mol_type = other DNA
attgtccggacgcaggaaaa

SEQ ID NO: 24367 - DNA, 20 bp, synthetic construct
  source 1..20: mol_type = other DNA
caataccttggaagccggaa

SEQ ID NO: 24368 - DNA, 20 bp, synthetic construct
  source 1..20: mol_type = other DNA
agtagtcatcgccatactgc

SEQ ID NO: 24369 - DNA, 20 bp, synthetic construct
  source 1..20: mol_type = other DNA
gtggctcagttcaattgtgg

SEQ ID NO: 24370 - DNA, 20 bp, synthetic construct
  source 1..20: mol_type = other DNA
gggcaacggctgtggtcttt

SEQ ID NO: 24371 - DNA, 20 bp, synthetic construct
  source 1..20: mol_type = other DNA
caagtttgttcccacaacag

SEQ ID NO: 24372 - DNA, 20 bp, synthetic construct
  source 1..20: mol_type = other DNA
atcagattcgatggctggca

SEQ ID NO: 24373 - DNA, 20 bp, synthetic construct
  source 1..20: mol_type = other DNA
tggaatgtttgtcttcaaag

SEQ ID NO: 24374 - DNA, 20 bp, synthetic construct
  source 1..20: mol_type = other DNA
tataattgacggaaagagca

SEQ ID NO: 24375 - DNA, 20 bp, synthetic construct
  source 1..20: mol_type = other DNA
cgggcccgttagccgccaca

SEQ ID NO: 24376 - DNA, 20 bp, synthetic construct
  source 1..20: mol_type = other DNA
cctcatgctttttctttgta

SEQ ID NO: 24377 - DNA, 20 bp, synthetic construct
  source 1..20: mol_type = other DNA
aggagatgtgacacacctgg

SEQ ID NO: 24378 - DNA, 20 bp, synthetic construct
  source 1..20: mol_type = other DNA
gctgaatgcagctggcatgt

SEQ ID NO: 24379 - DNA, 20 bp, synthetic construct
  source 1..20: mol_type = other DNA
cagcgtctcaacaagaaagt

SEQ ID NO: 24380 - DNA, 20 bp, synthetic construct
  source 1..20: mol_type = other DNA
gaaggaagccatgcctaaaa

SEQ ID NO: 24381 - DNA, 20 bp, synthetic construct
  source 1..20: mol_type = other DNA
ggacccagctagcattgccg

SEQ ID NO: 24382 - DNA, 20 bp, synthetic construct
  source 1..20: mol_type = other DNA
cagccgcatgtcgatggcaa

SEQ ID NO: 24383 - DNA, 20 bp, synthetic construct
  source 1..20: mol_type = other DNA
tctgcttgttggagtgatga

SEQ ID NO: 24384 - DNA, 20 bp, synthetic construct
  source 1..20: mol_type = other DNA
aacactgcttcccctgtttg

SEQ ID NO: 24385 - DNA, 20 bp, synthetic construct
  source 1..20: mol_type = other DNA
tgctgtagcattcactgggc

SEQ ID NO: 24386 - DNA, 20 bp, synthetic construct
  source 1..20: mol_type = other DNA
ctggagctattattcggctg

SEQ ID NO: 24387 - DNA, 20 bp, synthetic construct
  source 1..20: mol_type = other DNA
ttgtgacataggggaatcat

SEQ ID NO: 24388 - DNA, 20 bp, synthetic construct
  source 1..20: mol_type = other DNA
ttcatccatgctgaatggca

SEQ ID NO: 24389 - DNA, 20 bp, synthetic construct
  source 1..20: mol_type = other DNA
agttgtcaactcctggctgt

SEQ ID NO: 24390 - DNA, 20 bp, synthetic construct
  source 1..20: mol_type = other DNA
gcttgtggatgaagaacgga

SEQ ID NO: 24391 - DNA, 20 bp, synthetic construct
  source 1..20: mol_type = other DNA
gtcagcccgtcataatgacg

SEQ ID NO: 24392 - DNA, 20 bp, synthetic construct
  source 1..20: mol_type = other DNA
caattgtaccggttttacat

SEQ ID NO: 24393 - DNA, 20 bp, synthetic construct
  source 1..20: mol_type = other DNA
tagtacgaacagtcgaggaa

SEQ ID NO: 24394 - DNA, 20 bp, synthetic construct
  source 1..20: mol_type = other DNA
tattgatgtctgcatagata

SEQ ID NO: 24395 - DNA, 20 bp, synthetic construct
  source 1..20: mol_type = other DNA
tgagtttacgaaggaaggat

SEQ ID NO: 24396 - DNA, 20 bp, synthetic construct
  source 1..20: mol_type = other DNA
tttagatatgtgtttggaga

SEQ ID NO: 24397 - DNA, 20 bp, synthetic construct
  source 1..20: mol_type = other DNA
tgtcataaacttcagtgatg

SEQ ID NO: 24398 - DNA, 20 bp, synthetic construct
  source 1..20: mol_type = other DNA
acacaatacggaactcgctt

SEQ ID NO: 24399 - DNA, 20 bp, synthetic construct
  source 1..20: mol_type = other DNA
cctgcgatgtgatgttcagg

SEQ ID NO: 24400 - DNA, 20 bp, synthetic construct
  source 1..20: mol_type = other DNA
gcatgtcttgactggctatg

SEQ ID NO: 24401 - DNA, 20 bp, synthetic construct
  source 1..20: mol_type = other DNA
aggtccaccccagctacaag

SEQ ID NO: 24402 - DNA, 20 bp, synthetic construct
  source 1..20: mol_type = other DNA
tgaagggaaacccacactag

SEQ ID NO: 24403 - DNA, 20 bp, synthetic construct
  source 1..20: mol_type = other DNA
catcgtcattggggtcggag

SEQ ID NO: 24404 - DNA, 20 bp, synthetic construct
  source 1..20: mol_type = other DNA
aaggtcaaaagtctccgctg

SEQ ID NO: 24405 - DNA, 20 bp, synthetic construct
  source 1..20: mol_type = other DNA
ggcttgtttcttacacctcg

SEQ ID NO: 24406 - DNA, 20 bp, synthetic construct
  source 1..20: mol_type = other DNA
aactttcagaatggcagtgg

SEQ ID NO: 24407 - DNA, 20 bp, synthetic construct
  source 1..20: mol_type = other DNA
tgaaggggtgtttcacacca

SEQ ID NO: 24408 - DNA, 20 bp, synthetic construct
  source 1..20: mol_type = other DNA
cataacagacacagaagctc

SEQ ID NO: 24409 - DNA, 20 bp, synthetic construct
  source 1..20: mol_type = other DNA
agctcaattgtatggccctg

SEQ ID NO: 24410 - DNA, 20 bp, synthetic construct
  source 1..20: mol_type = other DNA
tgatggaccagacaacaatt

SEQ ID NO: 24411 - DNA, 20 bp, synthetic construct
  source 1..20: mol_type = other DNA
aggccttctagaaggagttg

SEQ ID NO: 24412 - DNA, 20 bp, synthetic construct
  source 1..20: mol_type = other DNA
actcctgactcctccggatt

SEQ ID NO: 24413 - DNA, 20 bp, synthetic construct
  source 1..20: mol_type = other DNA
attctcaaaaatggactggg

SEQ ID NO: 24414 - DNA, 20 bp, synthetic construct
  source 1..20: mol_type = other DNA
cgctgcagccgccacgcttt

SEQ ID NO: 24415 - DNA, 20 bp, synthetic construct
  source 1..20: mol_type = other DNA
tctaggggagaaatggaaac

SEQ ID NO: 24416 - DNA, 20 bp, synthetic construct
  source 1..20: mol_type = other DNA
agtgttgtgcccgtacagac

SEQ ID NO: 24417 - DNA, 20 bp, synthetic construct
  source 1..20: mol_type = other DNA
tgaggaggagcatcaatggc

SEQ ID NO: 24418 - DNA, 20 bp, synthetic construct
  source 1..20: mol_type = other DNA
gatgtacgctgatgacacag

SEQ ID NO: 24419 - DNA, 20 bp, synthetic construct
  source 1..20: mol_type = other DNA
aaaaacatacatggacatca

SEQ ID NO: 24420 - DNA, 20 bp, synthetic construct
  source 1..20: mol_type = other DNA
agctcttctcctatggttgg

SEQ ID NO: 24421 - DNA, 20 bp, synthetic construct
  source 1..20: mol_type = other DNA
ttatgcgcaaatgtggaagt

SEQ ID NO: 24422 - DNA, 20 bp, synthetic construct
  source 1..20: mol_type = other DNA
cggaaggaataaccgcagtc

SEQ ID NO: 24423 - DNA, 20 bp, synthetic construct
  source 1..20: mol_type = other DNA
ggactagaggttagaggaga

SEQ ID NO: 24424 - DNA, 20 bp, synthetic construct
  source 1..20: mol_type = other DNA
ggacgtaggctacacttgcg

SEQ ID NO: 24425 - DNA, 20 bp, synthetic construct
  source 1..20: mol_type = other DNA
aagaatggaagccaaggacc

SEQ ID NO: 24426 - DNA, 20 bp, synthetic construct
  source 1..20: mol_type = other DNA
tctggatctaccctggactg

SEQ ID NO: 24427 - DNA, 20 bp, synthetic construct
  source 1..20: mol_type = other DNA
acgtcgtgagctgaaatgtg

SEQ ID NO: 24428 - DNA, 20 bp, synthetic construct
  source 1..20: mol_type = other DNA
aaccgaaacagccaactcca

SEQ ID NO: 24429 - DNA, 20 bp, synthetic construct
  source 1..20: mol_type = other DNA
gattggaacagccgtcaagg

SEQ ID NO: 24430 - DNA, 20 bp, synthetic construct
  source 1..20: mol_type = other DNA
gattattccaatcacgctgg

SEQ ID NO: 24431 - DNA, 20 bp, synthetic construct
  source 1..20: mol_type = other DNA
taggacaacaacagcaagtg

SEQ ID NO: 24432 - DNA, 20 bp, synthetic construct
  source 1..20: mol_type = other DNA
gaccattgagcccttccaac

SEQ ID NO: 24433 - DNA, 20 bp, synthetic construct
  source 1..20: mol_type = other DNA
agccgtgggcatgactttcg

SEQ ID NO: 24434 - DNA, 20 bp, synthetic construct
  source 1..20: mol_type = other DNA
agtcgtcgccgctgaaatgg

SEQ ID NO: 24435 - DNA, 20 bp, synthetic construct
  source 1..20: mol_type = other DNA
ggatgaagcccacttcactg

SEQ ID NO: 24436 - DNA, 20 bp, synthetic construct
  source 1..20: mol_type = other DNA
caatgactgggacttcgtca

SEQ ID NO: 24437 - DNA, 20 bp, synthetic construct
  source 1..20: mol_type = other DNA
tcaccggaggggtctgggca

SEQ ID NO: 24438 - DNA, 20 bp, synthetic construct
  source 1..20: mol_type = other DNA
taaccatttggcaatctttc

SEQ ID NO: 24439 - DNA, 20 bp, synthetic construct
  source 1..20: mol_type = other DNA
cactgcatgggcaggttatg

SEQ ID NO: 24440 - DNA, 20 bp, synthetic construct
  source 1..20: mol_type = other DNA
ccacggaagctacgaggttc

SEQ ID NO: 24441 - DNA, 20 bp, synthetic construct
  source 1..20: mol_type = other DNA
cccagacccagcggtgggag

SEQ ID NO: 24442 - DNA, 20 bp, synthetic construct
  source 1..20: mol_type = other DNA
ggctagagaagcagtggaag

SEQ ID NO: 24443 - DNA, 20 bp, synthetic construct
  source 1..20: mol_type = other DNA
ctgggataccagaatcacga

SEQ ID NO: 24444 - DNA, 20 bp, synthetic construct
  source 1..20: mol_type = other DNA
cagggaggaccagagaggga

SEQ ID NO: 24445 - DNA, 20 bp, synthetic construct
  source 1..20: mol_type = other DNA
tggaagagagaggctttcgc

SEQ ID NO: 24446 - DNA, 20 bp, synthetic construct
  source 1..20: mol_type = other DNA
catggtgtcccagcacaggt

SEQ ID NO: 24447 - DNA, 20 bp, synthetic construct
  source 1..20: mol_type = other DNA
taggcccccacggcccattt

SEQ ID NO: 24448 - DNA, 20 bp, synthetic construct
  source 1..20: mol_type = other DNA
gagtggggtttccataattg

SEQ ID NO: 24449 - DNA, 20 bp, synthetic construct
  source 1..20: mol_type = other DNA
gggcgaggattgtgaggaca

SEQ ID NO: 24450 - DNA, 20 bp, synthetic construct
  source 1..20: mol_type = other DNA
gatagccaaatcgatggcag

SEQ ID NO: 24451 - DNA, 20 bp, synthetic construct
  source 1..20: mol_type = other DNA
gctctttgggaaaggtagca

SEQ ID NO: 24452 - DNA, 20 bp, synthetic construct
  source 1..20: mol_type = other DNA
ccttccatggataggaggag

SEQ ID NO: 24453 - DNA, 20 bp, synthetic construct
  source 1..20: mol_type = other DNA
tataaatagtggacatctaa

SEQ ID NO: 24454 - DNA, 20 bp, synthetic construct
  source 1..20: mol_type = other DNA
gcccatatcaatgtctgtga

SEQ ID NO: 24455 - DNA, 20 bp, synthetic construct
  source 1..20: mol_type = other DNA
ctggaggaaatcaggaagca

SEQ ID NO: 24456 - DNA, 20 bp, synthetic construct
  source 1..20: mol_type = other DNA
agccaatgctagggagataa

SEQ ID NO: 24457 - DNA, 20 bp, synthetic construct
  source 1..20: mol_type = other DNA
ggtcaaaggagaattagccg

SEQ ID NO: 24458 - DNA, 20 bp, synthetic construct
  source 1..20: mol_type = other DNA
caagagtagagcaggcccag

SEQ ID NO: 24459 - DNA, 20 bp, synthetic construct
  source 1..20: mol_type = other DNA
cctctttggagccctggcgg

SEQ ID NO: 24460 - DNA, 20 bp, synthetic construct
  source 1..20: mol_type = other DNA
ccacgtgagcctagatgttc

SEQ ID NO: 24461 - DNA, 20 bp, synthetic construct
  source 1..20: mol_type = other DNA
agctctttgggacatccctt

SEQ ID NO: 24462 - DNA, 20 bp, synthetic construct
  source 1..20: mol_type = other DNA
cagtgagggagaaatcgggg

SEQ ID NO: 24463 - DNA, 20 bp, synthetic construct
  source 1..20: mol_type = other DNA
agccttaagaggagagccta

SEQ ID NO: 24464 - DNA, 20 bp, synthetic construct
  source 1..20: mol_type = other DNA
tggagacatctatgcttaca

SEQ ID NO: 24465 - DNA, 20 bp, synthetic construct
  source 1..20: mol_type = other DNA
gcaaggacaaaggagagtgt

SEQ ID NO: 24466 - DNA, 20 bp, synthetic construct
  source 1..20: mol_type = other DNA
tgggatggtttccatcggcg

SEQ ID NO: 24467 - DNA, 20 bp, synthetic construct
  source 1..20: mol_type = other DNA
agcgaccatcctaggagggg

SEQ ID NO: 24468 - DNA, 20 bp, synthetic construct
  source 1..20: mol_type = other DNA
tcccctttttcagcatttga

SEQ ID NO: 24469 - DNA, 20 bp, synthetic construct
  source 1..20: mol_type = other DNA
tattctcgcatgcgtgctct

SEQ ID NO: 24470 - DNA, 20 bp, synthetic construct
  source 1..20: mol_type = other DNA
catcatggaagttgaccgag

SEQ ID NO: 24471 - DNA, 20 bp, synthetic construct
  source 1..20: mol_type = other DNA
ccaggtgaacggcgtggtca

SEQ ID NO: 24472 - DNA, 20 bp, synthetic construct
  source 1..20: mol_type = other DNA
catcatggaatacatggaaa

SEQ ID NO: 24473 - DNA, 20 bp, synthetic construct
  source 1..20: mol_type = other DNA
agtggtaccatgtcgttctc

SEQ ID NO: 24474 - DNA, 20 bp, synthetic construct
  source 1..20: mol_type = other DNA
ggttgccacaccttgtaaat

SEQ ID NO: 24475 - DNA, 20 bp, synthetic construct
  source 1..20: mol_type = other DNA
ttagaggagacccgtgatta

SEQ ID NO: 24476 - DNA, 20 bp, synthetic construct
  source 1..20: mol_type = other DNA
tgggagacgtcccaggatca

SEQ ID NO: 24477 - DNA, 20 bp, synthetic construct
  source 1..20: mol_type = other DNA
ccaagatcgctgttgtctct

SEQ ID NO: 24478 - DNA, 20 bp, synthetic construct
  source 1..20: mol_type = other DNA
cggcgccgggccaggcgccc

SEQ ID NO: 24479 - DNA, 20 bp, synthetic construct
  source 1..20: mol_type = other DNA
ccccggcgtgtactgggagg

SEQ ID NO: 24480 - DNA, 20 bp, synthetic construct
  source 1..20: mol_type = other DNA
tttaaaggctttagaagttg

SEQ ID NO: 24481 - DNA, 20 bp, synthetic construct
  source 1..20: mol_type = other DNA
gcgagctggagagcttggct

SEQ ID NO: 24482 - DNA, 20 bp, synthetic construct
  source 1..20: mol_type = other DNA
ggcaggagaatatgggcagc

SEQ ID NO: 24483 - DNA, 20 bp, synthetic construct
  source 1..20: mol_type = other DNA
ccttcctctgcacctggcct

SEQ ID NO: 24484 - DNA, 20 bp, synthetic construct
  source 1..20: mol_type = other DNA
gaagaaccaaaactggtatg

SEQ ID NO: 24485 - DNA, 20 bp, synthetic construct
  source 1..20: mol_type = other DNA
aggggaagtacagctaaagg

SEQ ID NO: 24486 - DNA, 20 bp, synthetic construct
  source 1..20: mol_type = other DNA
ccggagctcacccctggcct

SEQ ID NO: 24487 - DNA, 20 bp, synthetic construct
  source 1..20: mol_type = other DNA
tccgagagactgagtcgccc

SEQ ID NO: 24488 - DNA, 20 bp, synthetic construct
  source 1..20: mol_type = other DNA
tagcatcttcgcggtaaaga

SEQ ID NO: 24489 - DNA, 20 bp, synthetic construct
  source 1..20: mol_type = other DNA
ttcacgggttctatccgtga

SEQ ID NO: 24490 - DNA, 20 bp, synthetic construct
  source 1..20: mol_type = other DNA
agtagcagcggactcccctc

SEQ ID NO: 24491 - DNA, 20 bp, synthetic construct
  source 1..20: mol_type = other DNA
ctccaactcctcggacaaaa

SEQ ID NO: 24492 - DNA, 20 bp, synthetic construct
  source 1..20: mol_type = other DNA
acagcatgcaaattggacca

SEQ ID NO: 24493 - DNA, 20 bp, synthetic construct
  source 1..20: mol_type = other DNA
gatatcgtacacaccacctg

SEQ ID NO: 24494 - DNA, 20 bp, synthetic construct
  source 1..20: mol_type = other DNA
caatattctcttgacaccat

SEQ ID NO: 24495 - DNA, 20 bp, synthetic construct
  source 1..20: mol_type = other DNA
ttcgtttgttctgccttata

SEQ ID NO: 24496 - DNA, 20 bp, synthetic construct
  source 1..20: mol_type = other DNA
tgctacgataatcactcagg

SEQ ID NO: 24497 - DNA, 20 bp, synthetic construct
  source 1..20: mol_type = other DNA
cgtcctttcacgttacgacc

SEQ ID NO: 24498 - DNA, 20 bp, synthetic construct
  source 1..20: mol_type = other DNA
tacgcggccgttctgacgtt

SEQ ID NO: 24499 - DNA, 20 bp, synthetic construct
  source 1..20: mol_type = other DNA
gctatgggaaaacccctttg

SEQ ID NO: 24500 - DNA, 20 bp, synthetic construct
  source 1..20: mol_type = other DNA
ccacggcggaggccaatcca

SEQ ID NO: 24501 - DNA, 20 bp, synthetic construct
  source 1..20: mol_type = other DNA
tcatctgtggatgatatagt

SEQ ID NO: 24502 - DNA, 20 bp, synthetic construct
  source 1..20: mol_type = other DNA
tggcgaaaaagcacacgtga

SEQ ID NO: 24503 - DNA, 20 bp, synthetic construct
  source 1..20: mol_type = other DNA
cagggtgattccaatcagct

SEQ ID NO: 24504 - DNA, 20 bp, synthetic construct
  source 1..20: mol_type = other DNA
gtgcctgaccggggtcatgc

SEQ ID NO: 24505 - DNA, 20 bp, synthetic construct
  source 1..20: mol_type = other DNA
gcgaactctgccaagaatat

SEQ ID NO: 24506 - DNA, 20 bp, synthetic construct
  source 1..20: mol_type = other DNA
gcctttgagctccatttgga

SEQ ID NO: 24507 - DNA, 20 bp, synthetic construct
  source 1..20: mol_type = other DNA
ttggttgagatggtctctgg

SEQ ID NO: 24508 - DNA, 20 bp, synthetic construct
  source 1..20: mol_type = other DNA
ggtgttgggaagagtttttt

SEQ ID NO: 24509 - DNA, 20 bp, synthetic construct
  source 1..20: mol_type = other DNA
attaggccccttcagaaata

SEQ ID NO: 24510 - DNA, 20 bp, synthetic construct
  source 1..20: mol_type = other DNA
caggttagacatgaagtggc

SEQ ID NO: 24511 - DNA, 20 bp, synthetic construct
  source 1..20: mol_type = other DNA
tttggacattctaagtttac

SEQ ID NO: 24512 - DNA, 20 bp, synthetic construct
  source 1..20: mol_type = other DNA
cgaggtaatggctggttggt

SEQ ID NO: 24513 - DNA, 20 bp, synthetic construct
  source 1..20: mol_type = other DNA
gaaatacaaccatggggtgt

SEQ ID NO: 24514 - DNA, 20 bp, synthetic construct
  source 1..20: mol_type = other DNA
tgatttagttagtatttagt

SEQ ID NO: 24515 - DNA, 20 bp, synthetic construct
  source 1..20: mol_type = other DNA
tgcccggccatttgggcgtg

SEQ ID NO: 24516 - DNA, 20 bp, synthetic construct
  source 1..20: mol_type = other DNA
cgtcgcccacaagacgttaa

SEQ ID NO: 24517 - DNA, 20 bp, synthetic construct
  source 1..20: mol_type = other DNA
ctcatggggtacatccctgt

SEQ ID NO: 24518 - DNA, 20 bp, synthetic construct
  source 1..20: mol_type = other DNA
cagcggcccggcgccctcac

SEQ ID NO: 24519 - DNA, 20 bp, synthetic construct
  source 1..20: mol_type = other DNA
tccatctaccctggtaccat

SEQ ID NO: 24520 - DNA, 20 bp, synthetic construct
  source 1..20: mol_type = other DNA
acttacctcaaatgcggctc

SEQ ID NO: 24521 - DNA, 20 bp, synthetic construct
  source 1..20: mol_type = other DNA
cgttgcaacttggaggacag

SEQ ID NO: 24522 - DNA, 20 bp, synthetic construct
  source 1..20: mol_type = other DNA
ctcacaaaatacatcgtccg

SEQ ID NO: 24523 - DNA, 20 bp, synthetic construct
  source 1..20: mol_type = other DNA
atgatcactctctttactct

SEQ ID NO: 24524 - DNA, 20 bp, synthetic construct
  source 1..20: mol_type = other DNA
ggtgtggtgtttgacataac

SEQ ID NO: 24525 - DNA, 20 bp, synthetic construct
  source 1..20: mol_type = other DNA
cctgggactaaatctttgga

SEQ ID NO: 24526 - DNA, 20 bp, synthetic construct
  source 1..20: mol_type = other DNA
aggggccacgctgtcggagt

SEQ ID NO: 24527 - DNA, 20 bp, synthetic construct
  source 1..20: mol_type = other DNA
gctacagctacgccccctgg

SEQ ID NO: 24528 - DNA, 20 bp, synthetic construct
  source 1..20: mol_type = other DNA
gcggcccttcggggtatggg

SEQ ID NO: 24529 - DNA, 20 bp, synthetic construct
  source 1..20: mol_type = other DNA
tacgacgcaggggccgcatg

SEQ ID NO: 24530 - DNA, 20 bp, synthetic construct
  source 1..20: mol_type = other DNA
tcgggggaaaatttcgcata

SEQ ID NO: 24531 - DNA, 20 bp, synthetic construct
  source 1..20: mol_type = other DNA
gcgccggacaaggaggtcct

SEQ ID NO: 24532 - DNA, 20 bp, synthetic construct
  source 1..20: mol_type = other DNA
attttggggggctggctagc

SEQ ID NO: 24533 - DNA, 20 bp, synthetic construct
  source 1..20: mol_type = other DNA
atgtctggcgagaagccctc

SEQ ID NO: 24534 - DNA, 20 bp, synthetic construct
  source 1..20: mol_type = other DNA
aatcacgtcgcccccaccca

SEQ ID NO: 24535 - DNA, 20 bp, synthetic construct
  source 1..20: mol_type = other DNA
tgcaccatcctaacagactt

SEQ ID NO: 24536 - DNA, 20 bp, synthetic construct
  source 1..20: mol_type = other DNA
tacataacaggactcaccac

SEQ ID NO: 24537 - DNA, 20 bp, synthetic construct
  source 1..20: mol_type = other DNA
acccacggcaaagcctatga

SEQ ID NO: 24538 - DNA, 20 bp, synthetic construct
  source 1..20: mol_type = other DNA
aagaggttcccaccagcttt

SEQ ID NO: 24539 - DNA, 20 bp, synthetic construct
  source 1..20: mol_type = other DNA
ctcgagggggagcttggaga

SEQ ID NO: 24540 - DNA, 20 bp, synthetic construct
  source 1..20: mol_type = other DNA
gcggtgatgggggcttctta

SEQ ID NO: 24541 - DNA, 20 bp, synthetic construct
  source 1..20: mol_type = other DNA
gcggcttgtaaagctgcagg

SEQ ID NO: 24542 - DNA, 20 bp, synthetic construct
  source 1..20: mol_type = other DNA
aagctcaaactcactccatt

SEQ ID NO: 24543 - DNA, 20 bp, synthetic construct
  source 1..20: mol_type = other DNA
acccagaaatttgggcgtgc

SEQ ID NO: 24544 - DNA, 20 bp, synthetic construct
  source 1..20: mol_type = other DNA
tcatggggtacatcccgctc

SEQ ID NO: 24545 - DNA, 20 bp, synthetic construct
  source 1..20: mol_type = other DNA
gtctagagtggcggaatacg

SEQ ID NO: 24546 - DNA, 20 bp, synthetic construct
  source 1..20: mol_type = other DNA
cgctgtacccaggccatctt

SEQ ID NO: 24547 - DNA, 20 bp, synthetic construct
  source 1..20: mol_type = other DNA
ctgatgacagaccatactgc

SEQ ID NO: 24548 - DNA, 20 bp, synthetic construct
  source 1..20: mol_type = other DNA
agaccacgtacagccggtgt

SEQ ID NO: 24549 - DNA, 20 bp, synthetic construct
  source 1..20: mol_type = other DNA
tcggctggtacctggtagct

SEQ ID NO: 24550 - DNA, 20 bp, synthetic construct
  source 1..20: mol_type = other DNA
atccatccttaatttttgac

SEQ ID NO: 24551 - DNA, 20 bp, synthetic construct
  source 1..20: mol_type = other DNA
tgagcattggcagatggttc

SEQ ID NO: 24552 - DNA, 20 bp, synthetic construct
  source 1..20: mol_type = other DNA
tttgcgggctgcccgtctct

SEQ ID NO: 24553 - DNA, 20 bp, synthetic construct
  source 1..20: mol_type = other DNA
tgaccggtgaagtgcaggtg

SEQ ID NO: 24554 - DNA, 20 bp, synthetic construct
  source 1..20: mol_type = other DNA
gcccttcggggcatgttgcg

SEQ ID NO: 24555 - DNA, 20 bp, synthetic construct
  source 1..20: mol_type = other DNA
atgccccgaccggcagcggt

SEQ ID NO: 24556 - DNA, 20 bp, synthetic construct
  source 1..20: mol_type = other DNA
acgttgacttcagcctggac

SEQ ID NO: 24557 - DNA, 20 bp, synthetic construct
  source 1..20: mol_type = other DNA
cctgcttgacacaccccatc

SEQ ID NO: 24558 - DNA, 20 bp, synthetic construct
  source 1..20: mol_type = other DNA
ttaacatactcggggggtgg

SEQ ID NO: 24559 - DNA, 20 bp, synthetic construct
  source 1..20: mol_type = other DNA
agatcatgggaggagaatgc

SEQ ID NO: 24560 - DNA, 20 bp, synthetic construct
  source 1..20: mol_type = other DNA
ggggcaaccacgtctcaccg

SEQ ID NO: 24561 - DNA, 20 bp, synthetic construct
  source 1..20: mol_type = other DNA
gggtttgctcggtgttggcc

SEQ ID NO: 24562 - DNA, 20 bp, synthetic construct
  source 1..20: mol_type = other DNA
tccattacatcacgggggcc

SEQ ID NO: 24563 - DNA, 20 bp, synthetic construct
  source 1..20: mol_type = other DNA
gccagacgcataggcctcat

SEQ ID NO: 24564 - DNA, 20 bp, synthetic construct
  source 1..20: mol_type = other DNA
ggacaattcagctggacggc

SEQ ID NO: 24565 - DNA, 20 bp, synthetic construct
  source 1..20: mol_type = other DNA
catgctcgtctatgcctcct

SEQ ID NO: 24566 - DNA, 20 bp, synthetic construct
  source 1..20: mol_type = other DNA
gcatgctcaccatcgaggaa

SEQ ID NO: 24567 - DNA, 20 bp, synthetic construct
  source 1..20: mol_type = other DNA
tggcgaagaacgaggtgttt

SEQ ID NO: 24568 - DNA, 20 bp, synthetic construct
  source 1..20: mol_type = other DNA
ttcttgtctgcggagatgat

SEQ ID NO: 24569 - DNA, 20 bp, synthetic construct
  source 1..20: mol_type = other DNA
tggatttgtccagctggttt

SEQ ID NO: 24570 - DNA, 20 bp, synthetic construct
  source 1..20: mol_type = other DNA
cgcgtgcccgaacccgccat

SEQ ID NO: 24571 - DNA, 20 bp, synthetic construct
  source 1..20: mol_type = other DNA
tgccgcgcaggggccccaga

SEQ ID NO: 24572 - DNA, 20 bp, synthetic construct
  source 1..20: mol_type = other DNA
atggtgtcagggctttggag

SEQ ID NO: 24573 - DNA, 20 bp, synthetic construct
  source 1..20: mol_type = other DNA
gcatagtgtatgaggccgac

SEQ ID NO: 24574 - DNA, 20 bp, synthetic construct
  source 1..20: mol_type = other DNA
gtccaacaaccaccttagtt

SEQ ID NO: 24575 - DNA, 20 bp, synthetic construct
  source 1..20: mol_type = other DNA
acacccacaagtttaacagc

SEQ ID NO: 24576 - DNA, 20 bp, synthetic construct
  source 1..20: mol_type = other DNA
ccagtgtgtgtggccccgtg

SEQ ID NO: 24577 - DNA, 20 bp, synthetic construct
  source 1..20: mol_type = other DNA
ccgggttcaccaaaacctgt

SEQ ID NO: 24578 - DNA, 20 bp, synthetic construct
  source 1..20: mol_type = other DNA
cctacctatggatgatgttt

SEQ ID NO: 24579 - DNA, 20 bp, synthetic construct
  source 1..20: mol_type = other DNA
gcgggctgtggccctgtttt

SEQ ID NO: 24580 - DNA, 20 bp, synthetic construct
  source 1..20: mol_type = other DNA
tctaccacggggcgggtgcc

SEQ ID NO: 24581 - DNA, 20 bp, synthetic construct
  source 1..20: mol_type = other DNA
caccaggccttcctgtgtgc

SEQ ID NO: 24582 - DNA, 20 bp, synthetic construct
  source 1..20: mol_type = other DNA
tcttggtgggcggcgtcctg

SEQ ID NO: 24583 - DNA, 20 bp, synthetic construct
  source 1..20: mol_type = other DNA
agcacgggttacaactggct

SEQ ID NO: 24584 - DNA, 20 bp, synthetic construct
  source 1..20: mol_type = other DNA
cggaatcggcgcgtcggaga

SEQ ID NO: 24585 - DNA, 20 bp, synthetic construct
  source 1..20: mol_type = other DNA
accgtgatacagaccttacc

SEQ ID NO: 24586 - DNA, 20 bp, synthetic construct
  source 1..20: mol_type = other DNA
agagagcgcttcacgacgtc

SEQ ID NO: 24587 - DNA, 20 bp, synthetic construct
  source 1..20: mol_type = other DNA
gcttcgggaacacgctgacg

SEQ ID NO: 24588 - DNA, 20 bp, synthetic construct
  source 1..20: mol_type = other DNA
tcattcaaagactccatggc

SEQ ID NO: 24589 - DNA, 20 bp, synthetic construct
  source 1..20: mol_type = other DNA
tatgtggcatatacctcttt

SEQ ID NO: 24590 - DNA, 20 bp, synthetic construct
  source 1..20: mol_type = other DNA
gtctcatgcccgaccccgct

SEQ ID NO: 24591 - DNA, 20 bp, synthetic construct
  source 1..20: mol_type = other DNA
ggtggttgctctccccccga

SEQ ID NO: 24592 - DNA, 20 bp, synthetic construct
  source 1..20: mol_type = other DNA
acggtgtgaaggttcttgaa

SEQ ID NO: 24593 - DNA, 20 bp, synthetic construct
  source 1..20: mol_type = other DNA
gggatgtctgcggtccagtc

SEQ ID NO: 24594 - DNA, 20 bp, synthetic construct
  source 1..20: mol_type = other DNA
ggcattacccgtgcaccgta

SEQ ID NO: 24595 - DNA, 20 bp, synthetic construct
  source 1..20: mol_type = other DNA
gcttgggcgtttggccacta

SEQ ID NO: 24596 - DNA, 20 bp, synthetic construct
  source 1..20: mol_type = other DNA
atttcatagcccgagtggag

SEQ ID NO: 24597 - DNA, 20 bp, synthetic construct
  source 1..20: mol_type = other DNA
tccgcgaattaacggtggcc

SEQ ID NO: 24598 - DNA, 20 bp, synthetic construct
  source 1..20: mol_type = other DNA
gttggcgactcctcgcccct

SEQ ID NO: 24599 - DNA, 20 bp, synthetic construct
  source 1..20: mol_type = other DNA
taatcatatgcgacgagtgc

SEQ ID NO: 24600 - DNA, 20 bp, synthetic construct
  source 1..20: mol_type = other DNA
agcgtaggggccgtacaggg

SEQ ID NO: 24601 - DNA, 20 bp, synthetic construct
  source 1..20: mol_type = other DNA
acacccccgggctccctgtc

SEQ ID NO: 24602 - DNA, 20 bp, synthetic construct
  source 1..20: mol_type = other DNA
tggacgaggcacgtgccatc

SEQ ID NO: 24603 - DNA, 20 bp, synthetic construct
  source 1..20: mol_type = other DNA
ctggcctttcgaccttgccg

SEQ ID NO: 24604 - DNA, 20 bp, synthetic construct
  source 1..20: mol_type = other DNA
tcttctcatgccagaagggg

SEQ ID NO: 24605 - DNA, 20 bp, synthetic construct
  source 1..20: mol_type = other DNA
caacagggcccagcgtacct

SEQ ID NO: 24606 - DNA, 20 bp, synthetic construct
  source 1..20: mol_type = other DNA
cggcggaaacggccaagcgc

SEQ ID NO: 24607 - DNA, 20 bp, synthetic construct
  source 1..20: mol_type = other DNA
gcggtgaggacaacgtggtg

SEQ ID NO: 24608 - DNA, 20 bp, synthetic construct
  source 1..20: mol_type = other DNA
gagtccgcgtctgcgagaag

SEQ ID NO: 24609 - DNA, 20 bp, synthetic construct
  source 1..20: mol_type = other DNA
ctgaggctatgaccaggtac

SEQ ID NO: 24610 - DNA, 20 bp, synthetic construct
  source 1..20: mol_type = other DNA
cgctggatcttccagctatc

SEQ ID NO: 24611 - DNA, 20 bp, synthetic construct
  source 1..20: mol_type = other DNA
cgctggcgggggggacattt

SEQ ID NO: 24612 - DNA, 20 bp, synthetic construct
  source 1..20: mol_type = other DNA
ccctgtgaggaactactgtc

SEQ ID NO: 24613 - DNA, 20 bp, synthetic construct
  source 1..20: mol_type = other DNA
aatgcctggagatttgggcg

SEQ ID NO: 24614 - DNA, 20 bp, synthetic construct
  source 1..20: mol_type = other DNA
tgtcaggcaattggttgaag

SEQ ID NO: 24615 - DNA, 20 bp, synthetic construct
  source 1..20: mol_type = other DNA
ataggaccgctctaaactgt

SEQ ID NO: 24616 - DNA, 20 bp, synthetic construct
  source 1..20: mol_type = other DNA
cgtctgaggaccggccctac

SEQ ID NO: 24617 - DNA, 20 bp, synthetic construct
  source 1..20: mol_type = other DNA
aggccacatatcagaagtgt

SEQ ID NO: 24618 - DNA, 20 bp, synthetic construct
  source 1..20: mol_type = other DNA
ttctggtgttgacaatcttt

SEQ ID NO: 24619 - DNA, 20 bp, synthetic construct
  source 1..20: mol_type = other DNA
acccacatctcgggtttgag

SEQ ID NO: 24620 - DNA, 20 bp, synthetic construct
  source 1..20: mol_type = other DNA
tgaggttgggcgcctggact

SEQ ID NO: 24621 - DNA, 20 bp, synthetic construct
  source 1..20: mol_type = other DNA
tgaggggtctccctgtgtcc

SEQ ID NO: 24622 - DNA, 20 bp, synthetic construct
  source 1..20: mol_type = other DNA
acgctccgacgggtagcggt

SEQ ID NO: 24623 - DNA, 20 bp, synthetic construct
  source 1..20: mol_type = other DNA
tgtctaaacaactaacctca

SEQ ID NO: 24624 - DNA, 20 bp, synthetic construct
  source 1..20: mol_type = other DNA
agcaggggggcgagaacttt

SEQ ID NO: 24625 - DNA, 20 bp, synthetic construct
  source 1..20: mol_type = other DNA
tagtaacaacacatccaatc

SEQ ID NO: 24626 - DNA, 20 bp, synthetic construct
  source 1..20: mol_type = other DNA
cggttgtccctgatcgggag

SEQ ID NO: 24627 - DNA, 20 bp, synthetic construct
  source 1..20: mol_type = other DNA
acgggtctatgaagatcaca

SEQ ID NO: 24628 - DNA, 20 bp, synthetic construct
  source 1..20: mol_type = other DNA
ggtctcagctcccttgtgag

SEQ ID NO: 24629 - DNA, 20 bp, synthetic construct
  source 1..20: mol_type = other DNA
gcacggcgaacggagaccac

SEQ ID NO: 24630 - DNA, 20 bp, synthetic construct
  source 1..20: mol_type = other DNA
agtgccatagaccacctagg

SEQ ID NO: 24631 - DNA, 20 bp, synthetic construct
  source 1..20: mol_type = other DNA
agaggctcatacagctggac

SEQ ID NO: 24632 - DNA, 20 bp, synthetic construct
  source 1..20: mol_type = other DNA
gatcctttagctcaatgccc

SEQ ID NO: 24633 - DNA, 20 bp, synthetic construct
  source 1..20: mol_type = other DNA
cccaacgggtagagtacttg

SEQ ID NO: 24634 - DNA, 20 bp, synthetic construct
  source 1..20: mol_type = other DNA
tcacagaacgcctctattgt

SEQ ID NO: 24635 - DNA, 20 bp, synthetic construct
  source 1..20: mol_type = other DNA
tagcccacgatggcaccgga

SEQ ID NO: 24636 - DNA, 20 bp, synthetic construct
  source 1..20: mol_type = other DNA
gcctcaggaagcttggggcg

SEQ ID NO: 24637 - DNA, 20 bp, synthetic construct
  source 1..20: mol_type = other DNA
atttgtcaggctggtttgtc

SEQ ID NO: 24638 - DNA, 20 bp, synthetic construct
  source 1..20: mol_type = other DNA
tgtttccttttattcctata

SEQ ID NO: 24639 - DNA, 20 bp, synthetic construct
  source 1..20: mol_type = other DNA
cggtaaaggatatcatgtta

SEQ ID NO: 24640 - DNA, 20 bp, synthetic construct
  source 1..20: mol_type = other DNA
gatcagggtatacaatacac

SEQ ID NO: 24641 - DNA, 20 bp, synthetic construct
  source 1..20: mol_type = other DNA
acaatgctaacacaaccaca

SEQ ID NO: 24642 - DNA, 20 bp, synthetic construct
  source 1..20: mol_type = other DNA
tggcatattccccaccaggt

SEQ ID NO: 24643 - DNA, 20 bp, synthetic construct
  source 1..20: mol_type = other DNA
tggtggataccaaagctact

SEQ ID NO: 24644 - DNA, 20 bp, synthetic construct
  source 1..20: mol_type = other DNA
gtggtgagggcgttgttggt

SEQ ID NO: 24645 - DNA, 20 bp, synthetic construct
  source 1..20: mol_type = other DNA
aacagcaggctgtcgtgatc

SEQ ID NO: 24646 - DNA, 20 bp, synthetic construct
  source 1..20: mol_type = other DNA
ttgtctctgtggcggggata

SEQ ID NO: 24647 - DNA, 20 bp, synthetic construct
  source 1..20: mol_type = other DNA
taaaaaccgagtacggcgag

SEQ ID NO: 24648 - DNA, 20 bp, synthetic construct
  source 1..20: mol_type = other DNA
actcagtggccatgaggcag

SEQ ID NO: 24649 - DNA, 20 bp, synthetic construct
  source 1..20: mol_type = other DNA
tgagagctggctctcctgcc

SEQ ID NO: 24650 - DNA, 20 bp, synthetic construct
  source 1..20: mol_type = other DNA
aagacctcctcttggctcag

SEQ ID NO: 24651 - DNA, 20 bp, synthetic construct
  source 1..20: mol_type = other DNA
tgacacacacacccctggag

SEQ ID NO: 24652 - DNA, 20 bp, synthetic construct
  source 1..20: mol_type = other DNA
ttcggcaattttagcgaatt

SEQ ID NO: 24653 - DNA, 20 bp, synthetic construct
  source 1..20: mol_type = other DNA
ttcccagagtaattgctgta

SEQ ID NO: 24654 - DNA, 20 bp, synthetic construct
  source 1..20: mol_type = other DNA
gggctactacactcccgaca

SEQ ID NO: 24655 - DNA, 20 bp, synthetic construct
  source 1..20: mol_type = other DNA
tgttaatgccctgagtcttg

SEQ ID NO: 24656 - DNA, 20 bp, synthetic construct
  source 1..20: mol_type = other DNA
cactcatgctttctcatttg

SEQ ID NO: 24657 - DNA, 20 bp, synthetic construct
  source 1..20: mol_type = other DNA
tgcttcagttatcttggaca

SEQ ID NO: 24658 - DNA, 20 bp, synthetic construct
  source 1..20: mol_type = other DNA
agcactaggctttcacgctg

SEQ ID NO: 24659 - DNA, 20 bp, synthetic construct
  source 1..20: mol_type = other DNA
ggctaggtacatttgtgctc

SEQ ID NO: 24660 - DNA, 20 bp, synthetic construct
  source 1..20: mol_type = other DNA
gcaaggggccaatacgattt

SEQ ID NO: 24661 - DNA, 20 bp, synthetic construct
  source 1..20: mol_type = other DNA
ggagctcaaaacaaaagaaa

SEQ ID NO: 24662 - DNA, 20 bp, synthetic construct
  source 1..20: mol_type = other DNA
ggaggtcactgacagtgcag

SEQ ID NO: 24663 - DNA, 20 bp, synthetic construct
  source 1..20: mol_type = other DNA
ccatcgatgtgaagatgatg

SEQ ID NO: 24664 - DNA, 20 bp, synthetic construct
  source 1..20: mol_type = other DNA
acaggggctggggcaacggc

SEQ ID NO: 24665 - DNA, 20 bp, synthetic construct
  source 1..20: mol_type = other DNA
ccacacaggttggagccact

SEQ ID NO: 24666 - DNA, 20 bp, synthetic construct
  source 1..20: mol_type = other DNA
atcgtgagtggttcatggac

SEQ ID NO: 24667 - DNA, 20 bp, synthetic construct
  source 1..20: mol_type = other DNA
tggaattttcaagcaacact

SEQ ID NO: 24668 - DNA, 20 bp, synthetic construct
  source 1..20: mol_type = other DNA
tcggaggagcattccgctca

SEQ ID NO: 24669 - DNA, 20 bp, synthetic construct
  source 1..20: mol_type = other DNA
accgtggacctgccactcgc

SEQ ID NO: 24670 - DNA, 20 bp, synthetic construct
  source 1..20: mol_type = other DNA
aaatggcttatcacgatgcc

SEQ ID NO: 24671 - DNA, 20 bp, synthetic construct
  source 1..20: mol_type = other DNA
tgtacaggatactgctgttg

SEQ ID NO: 24672 - DNA, 20 bp, synthetic construct
  source 1..20: mol_type = other DNA
gcggatggcccgcaactgaa

SEQ ID NO: 24673 - DNA, 20 bp, synthetic construct
  source 1..20: mol_type = other DNA
aaggtgttttccacaccctt

SEQ ID NO: 24674 - DNA, 20 bp, synthetic construct
  source 1..20: mol_type = other DNA
tgagaacagccgtgctagcg

SEQ ID NO: 24675 - DNA, 20 bp, synthetic construct
  source 1..20: mol_type = other DNA
gggtgccgaactacaacctg

SEQ ID NO: 24676 - DNA, 20 bp, synthetic construct
  source 1..20: mol_type = other DNA
cagtgacagcagctagtgcc

SEQ ID NO: 24677 - DNA, 20 bp, synthetic construct
  source 1..20: mol_type = other DNA
ggctcattgaggttctggga

SEQ ID NO: 24678 - DNA, 20 bp, synthetic construct
  source 1..20: mol_type = other DNA
ccttcgtcgatgttggagtg

SEQ ID NO: 24679 - DNA, 20 bp, synthetic construct
  source 1..20: mol_type = other DNA
tcatgaagaacgctgtagtg

SEQ ID NO: 24680 - DNA, 20 bp, synthetic construct
  source 1..20: mol_type = other DNA
ggctggtcgaacggaggttt

SEQ ID NO: 24681 - DNA, 20 bp, synthetic construct
  source 1..20: mol_type = other DNA
agcgagtgttcaaagagaag

SEQ ID NO: 24682 - DNA, 20 bp, synthetic construct
  source 1..20: mol_type = other DNA
ccaagggaagcagagccatt

SEQ ID NO: 24683 - DNA, 20 bp, synthetic construct
  source 1..20: mol_type = other DNA
aaggacccaaagtcaggacc

SEQ ID NO: 24684 - DNA, 20 bp, synthetic construct
  source 1..20: mol_type = other DNA
caactggatggtatgattgg

SEQ ID NO: 24685 - DNA, 20 bp, synthetic construct
  source 1..20: mol_type = other DNA
ttaaagtgcacggcccagcc

SEQ ID NO: 24686 - DNA, 20 bp, synthetic construct
  source 1..20: mol_type = other DNA
ccgtgccacaaaacaccaca

SEQ ID NO: 24687 - DNA, 20 bp, synthetic construct
  source 1..20: mol_type = other DNA
gtggcgtggtgctcttgtat

SEQ ID NO: 24688 - DNA, 20 bp, synthetic construct
  source 1..20: mol_type = other DNA
gaagccataagcatcgttat

SEQ ID NO: 24689 - DNA, 20 bp, synthetic construct
  source 1..20: mol_type = other DNA
gaagccatttaagtgacaag

SEQ ID NO: 24690 - DNA, 20 bp, synthetic construct
  source 1..20: mol_type = other DNA
gcatcttcgggcaaaatctg

SEQ ID NO: 24691 - DNA, 20 bp, synthetic construct
  source 1..20: mol_type = other DNA
ctaaagctgacaattacacc

SEQ ID NO: 24692 - DNA, 20 bp, synthetic construct
  source 1..20: mol_type = other DNA
aaaacccagttgaggactac

SEQ ID NO: 24693 - DNA, 20 bp, synthetic construct
  source 1..20: mol_type = other DNA
ctgttgtcaccaacaacaca

SEQ ID NO: 24694 - DNA, 20 bp, synthetic construct
  source 1..20: mol_type = other DNA
atgcgcacttaaccagcttg

SEQ ID NO: 24695 - DNA, 20 bp, synthetic construct
  source 1..20: mol_type = other DNA
taagaccctattcatgttta

SEQ ID NO: 24696 - DNA, 20 bp, synthetic construct
  source 1..20: mol_type = other DNA
tcatcagtgcacttaccata

SEQ ID NO: 24697 - DNA, 20 bp, synthetic construct
  source 1..20: mol_type = other DNA
aagttgatgaaccagctcag

SEQ ID NO: 24698 - DNA, 20 bp, synthetic construct
  source 1..20: mol_type = other DNA
agaaacctgagttaagaaga

SEQ ID NO: 24699 - DNA, 20 bp, synthetic construct
  source 1..20: mol_type = other DNA
atattgatggaaggttagtt

SEQ ID NO: 24700 - DNA, 20 bp, synthetic construct
  source 1..20: mol_type = other DNA
tggaacaagcaatatatggt

SEQ ID NO: 24701 - DNA, 20 bp, synthetic construct
  source 1..20: mol_type = other DNA
taactttcctaaaggatgaa

SEQ ID NO: 24702 - DNA, 20 bp, synthetic construct
  source 1..20: mol_type = other DNA
atccagatgtgttttggtca

SEQ ID NO: 24703 - DNA, 20 bp, synthetic construct
  source 1..20: mol_type = other DNA
aactggatccgtaactggac

SEQ ID NO: 24704 - DNA, 20 bp, synthetic construct
  source 1..20: mol_type = other DNA
gacagcctaaggatgccctc

SEQ ID NO: 24705 - DNA, 20 bp, synthetic construct
  source 1..20: mol_type = other DNA
cggaaatgaaaagatcatac

SEQ ID NO: 24706 - DNA, 20 bp, synthetic construct
  source 1..20: mol_type = other DNA
cacccacgggtacgcacact

SEQ ID NO: 24707 - DNA, 20 bp, synthetic construct
  source 1..20: mol_type = other DNA
tcttgatgttcgggctagtt

SEQ ID NO: 24708 - DNA, 20 bp, synthetic construct
  source 1..20: mol_type = other DNA
ttctgagacagtgtttaata

SEQ ID NO: 24709 - DNA, 20 bp, synthetic construct
  source 1..20: mol_type = other DNA
gcgttgcccagttgagcctg

SEQ ID NO: 24710 - DNA, 20 bp, synthetic construct
  source 1..20: mol_type = other DNA
aagcaatacacaccagagat

SEQ ID NO: 24711 - DNA, 20 bp, synthetic construct
  source 1..20: mol_type = other DNA
tctctttgtaaaacaagaac

SEQ ID NO: 24712 - DNA, 20 bp, synthetic construct
  source 1..20: mol_type = other DNA
acgaaaacttaggctaacgg

SEQ ID NO: 24713 - DNA, 20 bp, synthetic construct
  source 1..20: mol_type = other DNA
tgtagacaggtttaaaccat

SEQ ID NO: 24714 - DNA, 20 bp, synthetic construct
  source 1..20: mol_type = other DNA
ggaaaggaaaagagaagttc

SEQ ID NO: 24715 - DNA, 20 bp, synthetic construct
  source 1..20: mol_type = other DNA
gaaccctccaactgacatgc

SEQ ID NO: 24716 - DNA, 20 bp, synthetic construct
  source 1..20: mol_type = other DNA
catccatagtgcaggaggta

SEQ ID NO: 24717 - DNA, 20 bp, synthetic construct
  source 1..20: mol_type = other DNA
tcacaatgttcttggcaaga

SEQ ID NO: 24718 - DNA, 20 bp, synthetic construct
  source 1..20: mol_type = other DNA
ggttttctcagacgcatacg

SEQ ID NO: 24719 - DNA, 20 bp, synthetic construct
  source 1..20: mol_type = other DNA
tttaggtaagaacattacag

SEQ ID NO: 24720 - DNA, 20 bp, synthetic construct
  source 1..20: mol_type = other DNA
cagtggagaagaagagtaca

SEQ ID NO: 24721 - DNA, 20 bp, synthetic construct
  source 1..20: mol_type = other DNA
aagtatgacctaccgttaac

SEQ ID NO: 24722 - DNA, 20 bp, synthetic construct
  source 1..20: mol_type = other DNA
cctagattactcagatggag

SEQ ID NO: 24723 - DNA, 20 bp, synthetic construct
  source 1..20: mol_type = other DNA
acctacagatcgaaagagtg

SEQ ID NO: 24724 - DNA, 20 bp, synthetic construct
  source 1..20: mol_type = other DNA
gattaacccttataatatac

SEQ ID NO: 24725 - DNA, 20 bp, synthetic construct
  source 1..20: mol_type = other DNA
tgtatgtttgttaatacatg

SEQ ID NO: 24726 - DNA, 20 bp, synthetic construct
  source 1..20: mol_type = other DNA
gacttcagtgcgttacacca

SEQ ID NO: 24727 - DNA, 20 bp, synthetic construct
  source 1..20: mol_type = other DNA
gccaaatgaaccaggagaaa

SEQ ID NO: 24728 - DNA, 20 bp, synthetic construct
  source 1..20: mol_type = other DNA
tggagtgctaatggcaacag

SEQ ID NO: 24729 - DNA, 20 bp, synthetic construct
  source 1..20: mol_type = other DNA
caaattggaacccagtgtgt

SEQ ID NO: 24730 - DNA, 20 bp, synthetic construct
  source 1..20: mol_type = other DNA
gttaggttacactagtgatg

SEQ ID NO: 24731 - DNA, 20 bp, synthetic construct
  source 1..20: mol_type = other DNA
gaaatgagccctaccgttaa

SEQ ID NO: 24732 - DNA, 20 bp, synthetic construct
  source 1..20: mol_type = other DNA
gtctactcaaaagactggtg

SEQ ID NO: 24733 - DNA, 20 bp, synthetic construct
  source 1..20: mol_type = other DNA
acaatgcaacgcttccaggt

SEQ ID NO: 24734 - DNA, 20 bp, synthetic construct
  source 1..20: mol_type = other DNA
agccgtttgcaacgcagcaa

SEQ ID NO: 24735 - DNA, 20 bp, synthetic construct
  source 1..20: mol_type = other DNA
tgttgagttagattactctg

SEQ ID NO: 24736 - DNA, 20 bp, synthetic construct
  source 1..20: mol_type = other DNA
tggtgccccaacaaacagga

SEQ ID NO: 24737 - DNA, 20 bp, synthetic construct
  source 1..20: mol_type = other DNA
ggcggcaaatgagtactacc

SEQ ID NO: 24738 - DNA, 20 bp, synthetic construct
  source 1..20: mol_type = other DNA
gctgttgcacggagctccag

SEQ ID NO: 24739 - DNA, 20 bp, synthetic construct
  source 1..20: mol_type = other DNA
tggaaaggatgtgtccctgt

SEQ ID NO: 24740 - DNA, 20 bp, synthetic construct
  source 1..20: mol_type = other DNA
attccattttgacatgaaca

SEQ ID NO: 24741 - DNA, 20 bp, synthetic construct
  source 1..20: mol_type = other DNA
cgtggatagtgaagaattga

SEQ ID NO: 24742 - DNA, 20 bp, synthetic construct
  source 1..20: mol_type = other DNA
aaaggaggaatctgagattg

SEQ ID NO: 24743 - DNA, 20 bp, synthetic construct
  source 1..20: mol_type = other DNA
gatactgatggccactggta

SEQ ID NO: 24744 - DNA, 20 bp, synthetic construct
  source 1..20: mol_type = other DNA
taagaacattgatcttgata

SEQ ID NO: 24745 - DNA, 20 bp, synthetic construct
  source 1..20: mol_type = other DNA
ttacgtagaaagtggcttga

SEQ ID NO: 24746 - DNA, 20 bp, synthetic construct
  source 1..20: mol_type = other DNA
gctcttatatacccacatca

SEQ ID NO: 24747 - DNA, 20 bp, synthetic construct
  source 1..20: mol_type = other DNA
cagtatatgtacataccacc

SEQ ID NO: 24748 - DNA, 20 bp, synthetic construct
  source 1..20: mol_type = other DNA
agccagccataccttctaaa

SEQ ID NO: 24749 - DNA, 20 bp, synthetic construct
  source 1..20: mol_type = other DNA
ctggtcatagtaatcaggag

SEQ ID NO: 24750 - DNA, 20 bp, synthetic construct
  source 1..20: mol_type = other DNA
cgcggcgctccaggcacagg

SEQ ID NO: 24751 - DNA, 20 bp, synthetic construct
  source 1..20: mol_type = other DNA
tcgggtatgcctaaaactgc

SEQ ID NO: 24752 - DNA, 20 bp, synthetic construct
  source 1..20: mol_type = other DNA
catgctgagccaagtggaac

SEQ ID NO: 24753 - DNA, 20 bp, synthetic construct
  source 1..20: mol_type = other DNA
aaaattattggaattcatgt

SEQ ID NO: 24754 - DNA, 20 bp, synthetic construct
  source 1..20: mol_type = other DNA
aacatagacacatccaaaat

SEQ ID NO: 24755 - DNA, 20 bp, synthetic construct
  source 1..20: mol_type = other DNA
attactggatctgctgtcgg

SEQ ID NO: 24756 - DNA, 20 bp, synthetic construct
  source 1..20: mol_type = other DNA
tgaaggggaaaacgctcgtt

SEQ ID NO: 24757 - DNA, 20 bp, synthetic construct
  source 1..20: mol_type = other DNA
atcagctgaagcgtgtgggt

SEQ ID NO: 24758 - DNA, 20 bp, synthetic construct
  source 1..20: mol_type = other DNA
tcagggtactctacttgttg

SEQ ID NO: 24759 - DNA, 20 bp, synthetic construct
  source 1..20: mol_type = other DNA
atgggaatcaacgttagtgg

SEQ ID NO: 24760 - DNA, 20 bp, synthetic construct
  source 1..20: mol_type = other DNA
aagcacacatcaagtagcga

SEQ ID NO: 24761 - DNA, 20 bp, synthetic construct
  source 1..20: mol_type = other DNA
tattagcatactgacatcaa

SEQ ID NO: 24762 - DNA, 20 bp, synthetic construct
  source 1..20: mol_type = other DNA
ccagtatatgtacatcccac

SEQ ID NO: 24763 - DNA, 20 bp, synthetic construct
  source 1..20: mol_type = other DNA
aaaccagccttatgtgctaa

SEQ ID NO: 24764 - DNA, 20 bp, synthetic construct
  source 1..20: mol_type = other DNA
agatgatgtcatggagcaag

SEQ ID NO: 24765 - DNA, 20 bp, synthetic construct
  source 1..20: mol_type = other DNA
tagaggcccaccaggcacag

SEQ ID NO: 24766 - DNA, 20 bp, synthetic construct
  source 1..20: mol_type = other DNA
ggacatctcccttttctgcc

SEQ ID NO: 24767 - DNA, 20 bp, synthetic construct
  source 1..20: mol_type = other DNA
tagcttagattctgttgttt

SEQ ID NO: 24768 - DNA, 20 bp, synthetic construct
  source 1..20: mol_type = other DNA
catatcagtgatagagggca

SEQ ID NO: 24769 - DNA, 20 bp, synthetic construct
  source 1..20: mol_type = other DNA
tgagttgaatatggtggcat

SEQ ID NO: 24770 - DNA, 20 bp, synthetic construct
  source 1..20: mol_type = other DNA
gtttaaaccagataaacagt

SEQ ID NO: 24771 - DNA, 20 bp, synthetic construct
  source 1..20: mol_type = other DNA
accagggggctttattagtg

SEQ ID NO: 24772 - DNA, 20 bp, synthetic construct
  source 1..20: mol_type = other DNA
tcaccatcgctcccatggca

SEQ ID NO: 24773 - DNA, 20 bp, synthetic construct
  source 1..20: mol_type = other DNA
ctgccaacacaccagcattg

SEQ ID NO: 24774 - DNA, 20 bp, synthetic construct
  source 1..20: mol_type = other DNA
acagcaactcacccaagttt

SEQ ID NO: 24775 - DNA, 20 bp, synthetic construct
  source 1..20: mol_type = other DNA
caccaggagcaccaataccc

SEQ ID NO: 24776 - DNA, 20 bp, synthetic construct
  source 1..20: mol_type = other DNA
cctcaccaaatggtaaagga

SEQ ID NO: 24777 - DNA, 20 bp, synthetic construct
  source 1..20: mol_type = other DNA
gggagagttatgagagagat

SEQ ID NO: 24778 - DNA, 20 bp, synthetic construct
  source 1..20: mol_type = other DNA
ttaggaatcatgaagatctc

SEQ ID NO: 24779 - DNA, 20 bp, synthetic construct
  source 1..20: mol_type = other DNA
tatgtcagatggtttccaca

SEQ ID NO: 24780 - DNA, 20 bp, synthetic construct
  source 1..20: mol_type = other DNA
aatactgtcaagagaagggt

SEQ ID NO: 24781 - DNA, 20 bp, synthetic construct
  source 1..20: mol_type = other DNA
ctttcaacaaacccaaagtt

SEQ ID NO: 24782 - DNA, 20 bp, synthetic construct
  source 1..20: mol_type = other DNA
gtattcacgttggtggtaat

SEQ ID NO: 24783 - DNA, 20 bp, synthetic construct
  source 1..20: mol_type = other DNA
ttagtgagatgtgccttgag

SEQ ID NO: 24784 - DNA, 20 bp, synthetic construct
  source 1..20: mol_type = other DNA
tttcgtacttgtgtcactca

SEQ ID NO: 24785 - DNA, 20 bp, synthetic construct
  source 1..20: mol_type = other DNA
caggcgcaagtggctcgacc

SEQ ID NO: 24786 - DNA, 20 bp, synthetic construct
  source 1..20: mol_type = other DNA
ccccagcaccctggttcgat

SEQ ID NO: 24787 - DNA, 20 bp, synthetic construct
  source 1..20: mol_type = other DNA
aactcaattgatctttcagc

SEQ ID NO: 24788 - DNA, 20 bp, synthetic construct
  source 1..20: mol_type = other DNA
gacaccgcaggcaacacggc

SEQ ID NO: 24789 - DNA, 20 bp, synthetic construct
  source 1..20: mol_type = other DNA
gcatttgatcatgtaaggat

SEQ ID NO: 24790 - DNA, 20 bp, synthetic construct
  source 1..20: mol_type = other DNA
ccacatcaaattcttaacct

SEQ ID NO: 24791 - DNA, 20 bp, synthetic construct
  source 1..20: mol_type = other DNA
tctgttcaacccgtaaagcc

SEQ ID NO: 24792 - DNA, 20 bp, synthetic construct
  source 1..20: mol_type = other DNA
aactctagctacaatttcac

SEQ ID NO: 24793 - DNA, 20 bp, synthetic construct
  source 1..20: mol_type = other DNA
ggtggggatgacttcactct

SEQ ID NO: 24794 - DNA, 20 bp, synthetic construct
  source 1..20: mol_type = other DNA
gcggtcctagcgtccgccct

SEQ ID NO: 24795 - DNA, 20 bp, synthetic construct
  source 1..20: mol_type = other DNA
actatcccctacactccatc

SEQ ID NO: 24796 - DNA, 20 bp, synthetic construct
  source 1..20: mol_type = other DNA
gttgcaccaaacgctgactt

SEQ ID NO: 24797 - DNA, 20 bp, synthetic construct
  source 1..20: mol_type = other DNA
cttcccgtctctactcccaa

SEQ ID NO: 24798 - DNA, 20 bp, synthetic construct
  source 1..20: mol_type = other DNA
ttgatggctggaatagatgt

SEQ ID NO: 24799 - DNA, 20 bp, synthetic construct
  source 1..20: mol_type = other DNA
ataaaaacaattaaaagaat

SEQ ID NO: 24800 - DNA, 20 bp, synthetic construct
  source 1..20: mol_type = other DNA
caagcagtctccaaactttt

SEQ ID NO: 24801 - DNA, 20 bp, synthetic construct
  source 1..20: mol_type = other DNA
ctcccaaacatggcccacct

SEQ ID NO: 24802 - DNA, 20 bp, synthetic construct
  source 1..20: mol_type = other DNA
gataacaaagtggaaaactt

SEQ ID NO: 24803 - DNA, 20 bp, synthetic construct
  source 1..20: mol_type = other DNA
caaattttggacgtacaagg

SEQ ID NO: 24804 - DNA, 20 bp, synthetic construct
  source 1..20: mol_type = other DNA
aaagatgatgacttcccggc

SEQ ID NO: 24805 - DNA, 20 bp, synthetic construct
  source 1..20: mol_type = other DNA
gggtcggcactcatctgtca

SEQ ID NO: 24806 - DNA, 20 bp, synthetic construct
  source 1..20: mol_type = other DNA
tgtatatggggacgtcaact

SEQ ID NO: 24807 - DNA, 20 bp, synthetic construct
  source 1..20: mol_type = other DNA
atgttgaacacaattataaa

SEQ ID NO: 24808 - DNA, 20 bp, synthetic construct
  source 1..20: mol_type = other DNA
cgtttctcccccgaccattc

SEQ ID NO: 24809 - DNA, 20 bp, synthetic construct
  source 1..20: mol_type = other DNA
actggagctcgaccctcctt

SEQ ID NO: 24810 - DNA, 20 bp, synthetic construct
  source 1..20: mol_type = other DNA
agcgagctacagcgggaact

SEQ ID NO: 24811 - DNA, 20 bp, synthetic construct
  source 1..20: mol_type = other DNA
atagacactttttgatgaag

SEQ ID NO: 24812 - DNA, 20 bp, synthetic construct
  source 1..20: mol_type = other DNA
ctgacgattacgggaccggg

SEQ ID NO: 24813 - DNA, 20 bp, synthetic construct
  source 1..20: mol_type = other DNA
tggcatttgagcgggtgcct

SEQ ID NO: 24814 - DNA, 20 bp, synthetic construct
  source 1..20: mol_type = other DNA
gtgggtgtatccaaatcact

SEQ ID NO: 24815 - DNA, 20 bp, synthetic construct
  source 1..20: mol_type = other DNA
cctacatctcgcccagtgac

SEQ ID NO: 24816 - DNA, 20 bp, synthetic construct
  source 1..20: mol_type = other DNA
aggtactggagaaggacgcc

SEQ ID NO: 24817 - DNA, 20 bp, synthetic construct
  source 1..20: mol_type = other DNA
ttactgggcgcactccccgc

SEQ ID NO: 24818 - DNA, 20 bp, synthetic construct
  source 1..20: mol_type = other DNA
caattttggagtttcttgaa

SEQ ID NO: 24819 - DNA, 20 bp, synthetic construct
  source 1..20: mol_type = other DNA
ccaaccaagcttcagtaaag

SEQ ID NO: 24820 - DNA, 20 bp, synthetic construct
  source 1..20: mol_type = other DNA
ccgctgcggtcgatgaggcg

SEQ ID NO: 24821 - DNA, 20 bp, synthetic construct
  source 1..20: mol_type = other DNA
ttcccaacagaccttctggg

SEQ ID NO: 24822 - DNA, 20 bp, synthetic construct
  source 1..20: mol_type = other DNA
gactagaccccatggatccc

SEQ ID NO: 24823 - DNA, 20 bp, synthetic construct
  source 1..20: mol_type = other DNA
aagatgagatcagaccctca

SEQ ID NO: 24824 - DNA, 20 bp, synthetic construct
  source 1..20: mol_type = other DNA
tctcggtgcacgcttacggc

SEQ ID NO: 24825 - DNA, 20 bp, synthetic construct
  source 1..20: mol_type = other DNA
cgcttgaggaggacttgtac

SEQ ID NO: 24826 - DNA, 20 bp, synthetic construct
  source 1..20: mol_type = other DNA
gcccttcaggtaccccgagg

SEQ ID NO: 24827 - DNA, 20 bp, synthetic construct
  source 1..20: mol_type = other DNA
gactgggtctataactcgcc

SEQ ID NO: 24828 - DNA, 20 bp, synthetic construct
  source 1..20: mol_type = other DNA
tcggctagcgccggcaaaga

SEQ ID NO: 24829 - DNA, 20 bp, synthetic construct
  source 1..20: mol_type = other DNA
gtgaagataaacagcctgag

SEQ ID NO: 24830 - DNA, 20 bp, synthetic construct
  source 1..20: mol_type = other DNA
gccactggggttaaagctat

SEQ ID NO: 24831 - DNA, 20 bp, synthetic construct
  source 1..20: mol_type = other DNA
ttcgtcgtgaagaaaatctc

SEQ ID NO: 24832 - DNA, 20 bp, synthetic construct
  source 1..20: mol_type = other DNA
attaacgacatcttcgccat

SEQ ID NO: 24833 - DNA, 20 bp, synthetic construct
  source 1..20: mol_type = other DNA
cctcgtcatcttttcgcaga

SEQ ID NO: 24834 - DNA, 20 bp, synthetic construct
  source 1..20: mol_type = other DNA
cactttcgtgatacagcaag

SEQ ID NO: 24835 - DNA, 20 bp, synthetic construct
  source 1..20: mol_type = other DNA
gctggctactgtggaggagc

SEQ ID NO: 24836 - DNA, 20 bp, synthetic construct
  source 1..20: mol_type = other DNA
gacgtaaagatgaccgaaga

SEQ ID NO: 24837 - DNA, 20 bp, synthetic construct
  source 1..20: mol_type = other DNA
tgggccctccagggaaaacg

SEQ ID NO: 24838 - DNA, 20 bp, synthetic construct
  source 1..20: mol_type = other DNA
tgggatgtggattactcggc

SEQ ID NO: 24839 - DNA, 20 bp, synthetic construct
  source 1..20: mol_type = other DNA
cgcccttctagggcctacga

SEQ ID NO: 24840 - DNA, 20 bp, synthetic construct
  source 1..20: mol_type = other DNA
atccttcacaggttcagaca

SEQ ID NO: 24841 - DNA, 20 bp, synthetic construct
  source 1..20: mol_type = other DNA
ctgtcacctgaaaataagac

SEQ ID NO: 24842 - DNA, 20 bp, synthetic construct
  source 1..20: mol_type = other DNA
gtcatgaccctggctgattt

SEQ ID NO: 24843 - DNA, 20 bp, synthetic construct
  source 1..20: mol_type = other DNA
acaacgcacattttggaact

SEQ ID NO: 24844 - DNA, 20 bp, synthetic construct
  source 1..20: mol_type = other DNA
agagagaaataccaactcac

SEQ ID NO: 24845 - DNA, 20 bp, synthetic construct
  source 1..20: mol_type = other DNA
attggctcactaaaagctga

SEQ ID NO: 24846 - DNA, 20 bp, synthetic construct
  source 1..20: mol_type = other DNA
tgggatactgggttgaactc

SEQ ID NO: 24847 - DNA, 20 bp, synthetic construct
  source 1..20: mol_type = other DNA
gggaaaaccatggaaaacaa

SEQ ID NO: 24848 - DNA, 20 bp, synthetic construct
  source 1..20: mol_type = other DNA
atcgccagtgagacccacat

SEQ ID NO: 24849 - DNA, 20 bp, synthetic construct
  source 1..20: mol_type = other DNA
tccgcatttgaggaattgac

SEQ ID NO: 24850 - DNA, 20 bp, synthetic construct
  source 1..20: mol_type = other DNA
caactcaaggcacgtgacat

SEQ ID NO: 24851 - DNA, 20 bp, synthetic construct
  source 1..20: mol_type = other DNA
aagagcttccttgctaatgt

SEQ ID NO: 24852 - DNA, 20 bp, synthetic construct
  source 1..20: mol_type = other DNA
gtacatgacagcattaaaga

SEQ ID NO: 24853 - DNA, 20 bp, synthetic construct
  source 1..20: mol_type = other DNA
gcggagaaaccacaagctga

SEQ ID NO: 24854 - DNA, 20 bp, synthetic construct
  source 1..20: mol_type = other DNA
ggaccagtgaagaagcctgt

SEQ ID NO: 24855 - DNA, 20 bp, synthetic construct
  source 1..20: mol_type = other DNA
acggcttacctcgtgcctcg

SEQ ID NO: 24856 - DNA, 20 bp, synthetic construct
  source 1..20: mol_type = other DNA
gaggggttggtagtggacac

SEQ ID NO: 24857 - DNA, 20 bp, synthetic construct
  source 1..20: mol_type = other DNA
tccaaacacaagggcgatgc

SEQ ID NO: 24858 - DNA, 20 bp, synthetic construct
  source 1..20: mol_type = other DNA
cagtacaaaaacgtttggga

SEQ ID NO: 24859 - DNA, 20 bp, synthetic construct
  source 1..20: mol_type = other DNA
ttggactttgaagctctcaa

SEQ ID NO: 24860 - DNA, 20 bp, synthetic construct
  source 1..20: mol_type = other DNA
cccttttagggcccacgacc

SEQ ID NO: 24861 - DNA, 20 bp, synthetic construct
  source 1..20: mol_type = other DNA
agcacatgagcggtgggaac

SEQ ID NO: 24862 - DNA, 20 bp, synthetic construct
  source 1..20: mol_type = other DNA
caccatgactctggccgatt

SEQ ID NO: 24863 - DNA, 20 bp, synthetic construct
  source 1..20: mol_type = other DNA
ggacgtagattggcaggacc

SEQ ID NO: 24864 - DNA, 20 bp, synthetic construct
  source 1..20: mol_type = other DNA
ccacaacacaactacatcca

SEQ ID NO: 24865 - DNA, 20 bp, synthetic construct
  source 1..20: mol_type = other DNA
gcgtgacgtttcacaactca

SEQ ID NO: 24866 - DNA, 20 bp, synthetic construct
  source 1..20: mol_type = other DNA
gggacaggacaacgtcgagg

SEQ ID NO: 24867 - DNA, 20 bp, synthetic construct
  source 1..20: mol_type = other DNA
accgcgcacagcgtttcccg

SEQ ID NO: 24868 - DNA, 20 bp, synthetic construct
  source 1..20: mol_type = other DNA
tggcgctgatcttgaatttc

SEQ ID NO: 24869 - DNA, 20 bp, synthetic construct
  source 1..20: mol_type = other DNA
tacgatcaccgcctcaaaga

SEQ ID NO: 24870 - DNA, 20 bp, synthetic construct
  source 1..20: mol_type = other DNA
ggacaacccagttgttcacg

SEQ ID NO: 24871 - DNA, 20 bp, synthetic construct
  source 1..20: mol_type = other DNA
aatcacaagatgcaggccca

SEQ ID NO: 24872 - DNA, 20 bp, synthetic construct
  source 1..20: mol_type = other DNA
cagcaccttcgtcgtgaaga

SEQ ID NO: 24873 - DNA, 20 bp, synthetic construct
  source 1..20: mol_type = other DNA
ggtctccaccacagggttca

SEQ ID NO: 24874 - DNA, 20 bp, synthetic construct
  source 1..20: mol_type = other DNA
tccctgggccctccagggga

SEQ ID NO: 24875 - DNA, 20 bp, synthetic construct
  source 1..20: mol_type = other DNA
aggtggaatgccctcgggtt

SEQ ID NO: 24876 - DNA, 20 bp, synthetic construct
  source 1..20: mol_type = other DNA
tgttgattcttggattgaat

SEQ ID NO: 24877 - DNA, 20 bp, synthetic construct
  source 1..20: mol_type = other DNA
cggaggaactgattgaaatg

SEQ ID NO: 24878 - DNA, 20 bp, synthetic construct
  source 1..20: mol_type = other DNA
atcttccaatcacaggctcc

SEQ ID NO: 24879 - DNA, 20 bp, synthetic construct
  source 1..20: mol_type = other DNA
gatccgtatattttaaagaa

SEQ ID NO: 24880 - DNA, 20 bp, synthetic construct
  source 1..20: mol_type = other DNA
tggttacattttgttaatta

SEQ ID NO: 24881 - DNA, 20 bp, synthetic construct
  source 1..20: mol_type = other DNA
ctaattggaaatgctacggt

SEQ ID NO: 24882 - DNA, 20 bp, synthetic construct
  source 1..20: mol_type = other DNA
aacatttaccgtatattcag

SEQ ID NO: 24883 - DNA, 20 bp, synthetic construct
  source 1..20: mol_type = other DNA
caattttttcaactaaaaag

SEQ ID NO: 24884 - DNA, 20 bp, synthetic construct
  source 1..20: mol_type = other DNA
accaccaaacatgacaccag

SEQ ID NO: 24885 - DNA, 20 bp, synthetic construct
  source 1..20: mol_type = other DNA
atcaatacacatatactcgt

SEQ ID NO: 24886 - DNA, 20 bp, synthetic construct
  source 1..20: mol_type = other DNA
cacaagcatttcgtaacgtg

SEQ ID NO: 24887 - DNA, 20 bp, synthetic construct
  source 1..20: mol_type = other DNA
ggacggatgtatcaacacaa

SEQ ID NO: 24888 - DNA, 20 bp, synthetic construct
  source 1..20: mol_type = other DNA
agcatttaatcttttaagat

SEQ ID NO: 24889 - DNA, 20 bp, synthetic construct
  source 1..20: mol_type = other DNA
atgcctacttgacctcccac

SEQ ID NO: 24890 - DNA, 20 bp, synthetic construct
  source 1..20: mol_type = other DNA
ggactgcggtgcatgtgact

SEQ ID NO: 24891 - DNA, 20 bp, synthetic construct
  source 1..20: mol_type = other DNA
agttgacaagacacatggct

SEQ ID NO: 24892 - DNA, 20 bp, synthetic construct
  source 1..20: mol_type = other DNA
acgaacaacaccggctcttc

SEQ ID NO: 24893 - DNA, 20 bp, synthetic construct
  source 1..20: mol_type = other DNA
cttcccttgcagggaaaatg

SEQ ID NO: 24894 - DNA, 20 bp, synthetic construct
  source 1..20: mol_type = other DNA
atggtcctgtctcctcttct

SEQ ID NO: 24895 - DNA, 20 bp, synthetic construct
  source 1..20: mol_type = other DNA
ttgagggcgccggcaaactt

SEQ ID NO: 24896 - DNA, 20 bp, synthetic construct
  source 1..20: mol_type = other DNA
ctgtccctctccccaatcca

SEQ ID NO: 24897 - DNA, 20 bp, synthetic construct
  source 1..20: mol_type = other DNA
tgattgaacctgtccttctt

SEQ ID NO: 24898 - DNA, 20 bp, synthetic construct
  source 1..20: mol_type = other DNA
ccggaccatcatccgctccc

SEQ ID NO: 24899 - DNA, 20 bp, synthetic construct
  source 1..20: mol_type = other DNA
aacctcgtaccaccttctcc

SEQ ID NO: 24900 - DNA, 20 bp, synthetic construct
  source 1..20: mol_type = other DNA
tgactaacgatgtccccacc

SEQ ID NO: 24901 - DNA, 20 bp, synthetic construct
  source 1..20: mol_type = other DNA
cccttctgtctggttgtgcc

SEQ ID NO: 24902 - DNA, 20 bp, synthetic construct
  source 1..20: mol_type = other DNA
atatctcaatggcagcaaac

SEQ ID NO: 24903 - DNA, 20 bp, synthetic construct
  source 1..20: mol_type = other DNA
ctttctccaaaaccttcact

SEQ ID NO: 24904 - DNA, 20 bp, synthetic construct
  source 1..20: mol_type = other DNA
tcacgcgctgtcgcgagctc

SEQ ID NO: 24905 - DNA, 20 bp, synthetic construct
  source 1..20: mol_type = other DNA
ctggcaagtccctccttgct

SEQ ID NO: 24906 - DNA, 20 bp, synthetic construct
  source 1..20: mol_type = other DNA
gccaacatcgcgatctccgt

SEQ ID NO: 24907 - DNA, 20 bp, synthetic construct
  source 1..20: mol_type = other DNA
ccttccagggtctctgtggt

SEQ ID NO: 24908 - DNA, 20 bp, synthetic construct
  source 1..20: mol_type = other DNA
ccatccacgctatcatcgct

SEQ ID NO: 24909 - DNA, 20 bp, synthetic construct
  source 1..20: mol_type = other DNA
ttgatgccaccctcccttcc

SEQ ID NO: 24910 - DNA, 20 bp, synthetic construct
  source 1..20: mol_type = other DNA
ttgttgtgactccagcaaac

SEQ ID NO: 24911 - DNA, 20 bp, synthetic construct
  source 1..20: mol_type = other DNA
gtgaacaagtgccacgtaca

SEQ ID NO: 24912 - DNA, 20 bp, synthetic construct
  source 1..20: mol_type = other DNA
gacaagccaacagtcgacat

SEQ ID NO: 24913 - DNA, 20 bp, synthetic construct
  source 1..20: mol_type = other DNA
cagatttttggagcagcctt

SEQ ID NO: 24914 - DNA, 20 bp, synthetic construct
  source 1..20: mol_type = other DNA
tccgtttcaagaatggaaaa

SEQ ID NO: 24915 - DNA, 20 bp, synthetic construct
  source 1..20: mol_type = other DNA
tgcggaactagaggaccatc

SEQ ID NO: 24916 - DNA, 20 bp, synthetic construct
  source 1..20: mol_type = other DNA
ccccctagtgaagttctcac

SEQ ID NO: 24917 - DNA, 20 bp, synthetic construct
  source 1..20: mol_type = other DNA
tgggaaaaggacgcggaagt

SEQ ID NO: 24918 - DNA, 20 bp, synthetic construct
  source 1..20: mol_type = other DNA
agggccagaaacattcagac

SEQ ID NO: 24919 - DNA, 20 bp, synthetic construct
  source 1..20: mol_type = other DNA
gaagtggaagtcccagagag

SEQ ID NO: 24920 - DNA, 20 bp, synthetic construct
  source 1..20: mol_type = other DNA
tttcagaaaacaaaaaatca

SEQ ID NO: 24921 - DNA, 20 bp, synthetic construct
  source 1..20: mol_type = other DNA
gctgctcagaggagaggacg

SEQ ID NO: 24922 - DNA, 20 bp, synthetic construct
  source 1..20: mol_type = other DNA
ctgggaacactgccaggaca

SEQ ID NO: 24923 - DNA, 20 bp, synthetic construct
  source 1..20: mol_type = other DNA
caaagatctccccaagataa

SEQ ID NO: 24924 - DNA, 20 bp, synthetic construct
  source 1..20: mol_type = other DNA
ggagtcccgctgctaatgat

SEQ ID NO: 24925 - DNA, 20 bp, synthetic construct
  source 1..20: mol_type = other DNA
gaaggctctccaaacaaata

SEQ ID NO: 24926 - DNA, 20 bp, synthetic construct
  source 1..20: mol_type = other DNA
cgtctgaatcagatgtcggc

SEQ ID NO: 24927 - DNA, 20 bp, synthetic construct
  source 1..20: mol_type = other DNA
ccctatgggaaggttgttga

SEQ ID NO: 24928 - DNA, 20 bp, synthetic construct
  source 1..20: mol_type = other DNA
gacgtcttccacatggcggc

SEQ ID NO: 24929 - DNA, 20 bp, synthetic construct
  source 1..20: mol_type = other DNA
agcactatgatggaaaccat

SEQ ID NO: 24930 - DNA, 20 bp, synthetic construct
  source 1..20: mol_type = other DNA
agggtgccagatccccaaga

SEQ ID NO: 24931 - DNA, 20 bp, synthetic construct
  source 1..20: mol_type = other DNA
atttcaagacaagaccagag

SEQ ID NO: 24932 - DNA, 20 bp, synthetic construct
  source 1..20: mol_type = other DNA
tgctcccaccacttcaacaa

SEQ ID NO: 24933 - DNA, 20 bp, synthetic construct
  source 1..20: mol_type = other DNA
ttccacagaagagaccttcg

SEQ ID NO: 24934 - DNA, 20 bp, synthetic construct
  source 1..20: mol_type = other DNA
cgccatggcacggaagaagc

SEQ ID NO: 24935 - DNA, 20 bp, synthetic construct
  source 1..20: mol_type = other DNA
gggtttggaccagttaggct

SEQ ID NO: 24936 - DNA, 20 bp, synthetic construct
  source 1..20: mol_type = other DNA
atggatgttggcgaactctg

SEQ ID NO: 24937 - DNA, 20 bp, synthetic construct
  source 1..20: mol_type = other DNA
cttctcaagacagctgcctc

SEQ ID NO: 24938 - DNA, 20 bp, synthetic construct
  source 1..20: mol_type = other DNA
aggacgctgtttggtggcat

SEQ ID NO: 24939 - DNA, 20 bp, synthetic construct
  source 1..20: mol_type = other DNA
catttgatcatcccacacac

SEQ ID NO: 24940 - DNA, 20 bp, synthetic construct
  source 1..20: mol_type = other DNA
gggacagcgttcgctgaagt

SEQ ID NO: 24941 - DNA, 20 bp, synthetic construct
  source 1..20: mol_type = other DNA
gggatgttgggcctggtgat

SEQ ID NO: 24942 - DNA, 20 bp, synthetic construct
  source 1..20: mol_type = other DNA
accagcccaaggcttgatgt

SEQ ID NO: 24943 - DNA, 20 bp, synthetic construct
  source 1..20: mol_type = other DNA
gggatattcaacacagccac

SEQ ID NO: 24944 - DNA, 20 bp, synthetic construct
  source 1..20: mol_type = other DNA
gagacccaaccacaggtggt

SEQ ID NO: 24945 - DNA, 20 bp, synthetic construct
  source 1..20: mol_type = other DNA
gagatgggtgaggctctgaa

SEQ ID NO: 24946 - DNA, 20 bp, synthetic construct
  source 1..20: mol_type = other DNA
aaagggtttgaatgggtcac

SEQ ID NO: 24947 - DNA, 20 bp, synthetic construct
  source 1..20: mol_type = other DNA
tttgtgatcacaacagacat

SEQ ID NO: 24948 - DNA, 20 bp, synthetic construct
  source 1..20: mol_type = other DNA
aatccgagtagaacaggtga

SEQ ID NO: 24949 - DNA, 20 bp, synthetic construct
  source 1..20: mol_type = other DNA
atctacagactgcgggagcc

SEQ ID NO: 24950 - DNA, 20 bp, synthetic construct
  source 1..20: mol_type = other DNA
atagggaaaatgactgcggg

SEQ ID NO: 24951 - DNA, 20 bp, synthetic construct
  source 1..20: mol_type = other DNA
ctgtacgcagtcattaccat

SEQ ID NO: 24952 - DNA, 20 bp, synthetic construct
  source 1..20: mol_type = other DNA
ccaaagggaacatccgcctc

SEQ ID NO: 24953 - DNA, 20 bp, synthetic construct
  source 1..20: mol_type = other DNA
gcagacttggatgacgaagc

SEQ ID NO: 24954 - DNA, 20 bp, synthetic construct
  source 1..20: mol_type = other DNA
caggtggtgacatacgcact

SEQ ID NO: 24955 - DNA, 20 bp, synthetic construct
  source 1..20: mol_type = other DNA
ctaaacaaaaaccgttgcac

SEQ ID NO: 24956 - DNA, 20 bp, synthetic construct
  source 1..20: mol_type = other DNA
cccgcgcccataaccaacat

SEQ ID NO: 24957 - DNA, 20 bp, synthetic construct
  source 1..20: mol_type = other DNA
ggagtaggaccagtcagaat

SEQ ID NO: 24958 - DNA, 20 bp, synthetic construct
  source 1..20: mol_type = other DNA
gttgtgaaagctctggatgt

SEQ ID NO: 24959 - DNA, 20 bp, synthetic construct
  source 1..20: mol_type = other DNA
tctatcacagtgcaccatca

SEQ ID NO: 24960 - DNA, 20 bp, synthetic construct
  source 1..20: mol_type = other DNA
gatgtgaagatgatgaacat

SEQ ID NO: 24961 - DNA, 20 bp, synthetic construct
  source 1..20: mol_type = other DNA
ggttggggtaatggttgtgg

SEQ ID NO: 24962 - DNA, 20 bp, synthetic construct
  source 1..20: mol_type = other DNA
tctgatggaccatgtcgtat

SEQ ID NO: 24963 - DNA, 20 bp, synthetic construct
  source 1..20: mol_type = other DNA
ctggagcataacatgtggaa

SEQ ID NO: 24964 - DNA, 20 bp, synthetic construct
  source 1..20: mol_type = other DNA
gttgcctccgccagaacaac

SEQ ID NO: 24965 - DNA, 20 bp, synthetic construct
  source 1..20: mol_type = other DNA
gcgttgcacgactggaacat

SEQ ID NO: 24966 - DNA, 20 bp, synthetic construct
  source 1..20: mol_type = other DNA
cttatcatcggagttatgtc

SEQ ID NO: 24967 - DNA, 20 bp, synthetic construct
  source 1..20: mol_type = other DNA
gaggatgcccaaataacagg

SEQ ID NO: 24968 - DNA, 20 bp, synthetic construct
  source 1..20: mol_type = other DNA
atgtggcatgtgacgaatgg

SEQ ID NO: 24969 - DNA, 20 bp, synthetic construct
  source 1..20: mol_type = other DNA
atttcccaaggccagcgaat

SEQ ID NO: 24970 - DNA, 20 bp, synthetic construct
  source 1..20: mol_type = other DNA
ttgtttgtgatggatgaagc

SEQ ID NO: 24971 - DNA, 20 bp, synthetic construct
  source 1..20: mol_type = other DNA
aaaatgcttccagagcattt

SEQ ID NO: 24972 - DNA, 20 bp, synthetic construct
  source 1..20: mol_type = other DNA
gatggaatcgtggcaacgga

SEQ ID NO: 24973 - DNA, 20 bp, synthetic construct
  source 1..20: mol_type = other DNA
acctggaactaccatggaag

SEQ ID NO: 24974 - DNA, 20 bp, synthetic construct
  source 1..20: mol_type = other DNA
aagtgggcatcagctcggga

SEQ ID NO: 24975 - DNA, 20 bp, synthetic construct
  source 1..20: mol_type = other DNA
gatgtgatttccagggaaga

SEQ ID NO: 24976 - DNA, 20 bp, synthetic construct
  source 1..20: mol_type = other DNA
gacgtccctttctgttcaca

SEQ ID NO: 24977 - DNA, 20 bp, synthetic construct
  source 1..20: mol_type = other DNA
ctactcatgtactttcacag

SEQ ID NO: 24978 - DNA, 20 bp, synthetic construct
  source 1..20: mol_type = other DNA
aacgaacacatggaagacaa

SEQ ID NO: 24979 - DNA, 20 bp, synthetic construct
  source 1..20: mol_type = other DNA
agtcaggccacaggttttgt

SEQ ID NO: 24980 - DNA, 20 bp, synthetic construct
  source 1..20: mol_type = other DNA
ggccaaaaggtctcgctccc

SEQ ID NO: 24981 - DNA, 20 bp, synthetic construct
  source 1..20: mol_type = other DNA
gccctgttcatgtccattga

SEQ ID NO: 24982 - DNA, 20 bp, synthetic construct
  source 1..20: mol_type = other DNA
atttacgaagggaaaacaaa

SEQ ID NO: 24983 - DNA, 20 bp, synthetic construct
  source 1..20: mol_type = other DNA
aatcgatgtgtgggaaagaa

SEQ ID NO: 24984 - DNA, 20 bp, synthetic construct
  source 1..20: mol_type = other DNA
gcggctatgacttgtcgctt

SEQ ID NO: 24985 - DNA, 20 bp, synthetic construct
  source 1..20: mol_type = other DNA
cagagtggctttggatacag

SEQ ID NO: 24986 - DNA, 20 bp, synthetic construct
  source 1..20: mol_type = other DNA
tcactcttgattggcggtgc

SEQ ID NO: 24987 - DNA, 20 bp, synthetic construct
  source 1..20: mol_type = other DNA
aactcgacgttgctcgtcct

SEQ ID NO: 24988 - DNA, 20 bp, synthetic construct
  source 1..20: mol_type = other DNA
ccgacgtacctggccggttc

SEQ ID NO: 24989 - DNA, 20 bp, synthetic construct
  source 1..20: mol_type = other DNA
aacgatagtacattgtttat

SEQ ID NO: 24990 - DNA, 20 bp, synthetic construct
  source 1..20: mol_type = other DNA
atagacgagatggatcagat

SEQ ID NO: 24991 - DNA, 20 bp, synthetic construct
  source 1..20: mol_type = other DNA
tggtttactgaagcatacgt

SEQ ID NO: 24992 - DNA, 20 bp, synthetic construct
  source 1..20: mol_type = other DNA
tttttcaagtatcacacagg

SEQ ID NO: 24993 - DNA, 20 bp, synthetic construct
  source 1..20: mol_type = other DNA
atcaaacaaacaaagagatt

SEQ ID NO: 24994 - DNA, 20 bp, synthetic construct
  source 1..20: mol_type = other DNA
gagaaaggcattgacagcat

SEQ ID NO: 24995 - DNA, 20 bp, synthetic construct
  source 1..20: mol_type = other DNA
cggcgtggaagaactggacg

SEQ ID NO: 24996 - DNA, 20 bp, synthetic construct
  source 1..20: mol_type = other DNA
gcccccaggttccacgacga

SEQ ID NO: 24997 - DNA, 20 bp, synthetic construct
  source 1..20: mol_type = other DNA
cgcgacacaatcgaaaacct

SEQ ID NO: 24998 - DNA, 20 bp, synthetic construct
  source 1..20: mol_type = other DNA
gcgtccgtgattggaggagt

SEQ ID NO: 24999 - DNA, 20 bp, synthetic construct
  source 1..20: mol_type = other DNA
tcgctggtgaagactgacac

SEQ ID NO: 25000 - DNA, 20 bp, synthetic construct
  source 1..20: mol_type = other DNA
ggcgtcgacgtgtatgccga

SEQ ID NO: 25001 - DNA, 20 bp, synthetic construct
  source 1..20: mol_type = other DNA
ccctatcacatcgaagtgct

SEQ ID NO: 25002 - DNA, 20 bp, synthetic construct
  source 1..20: mol_type = other DNA
cagtccttcaactaccacgg

SEQ ID NO: 25003 - DNA, 20 bp, synthetic construct
  source 1..20: mol_type = other DNA
gtcgacacgctaacagtcga

SEQ ID NO: 25004 - DNA, 20 bp, synthetic construct
  source 1..20: mol_type = other DNA
tcccaccatttccacgcctt

SEQ ID NO: 25005 - DNA, 20 bp, synthetic construct
  source 1..20: mol_type = other DNA
caccggcgagacctgcggct

SEQ ID NO: 25006 - DNA, 20 bp, synthetic construct
  source 1..20: mol_type = other DNA
accaaagaccttgtcaaagc

SEQ ID NO: 25007 - DNA, 20 bp, synthetic construct
  source 1..20: mol_type = other DNA
ggtttccagcccgcgcaagg

SEQ ID NO: 25008 - DNA, 20 bp, synthetic construct
  source 1..20: mol_type = other DNA
aaaacaaaacaaagtgcaag

SEQ ID NO: 25009 - DNA, 20 bp, synthetic construct
  source 1..20: mol_type = other DNA
ggactggctggtcgcaagaa

SEQ ID NO: 25010 - DNA, 20 bp, synthetic construct
  source 1..20: mol_type = other DNA
gtcaacactttggatgcggg

SEQ ID NO: 25011 - DNA, 20 bp, synthetic construct
  source 1..20: mol_type = other DNA
agggtagttattgccatctt

SEQ ID NO: 25012 - DNA, 20 bp, synthetic construct
  source 1..20: mol_type = other DNA
gtgacttttgttccgaccac

SEQ ID NO: 25013 - DNA, 20 bp, synthetic construct
  source 1..20: mol_type = other DNA
tggcagagtggaacaggagg

SEQ ID NO: 25014 - DNA, 20 bp, synthetic construct
  source 1..20: mol_type = other DNA
ggaggtcatgtgacgtgtaa

SEQ ID NO: 25015 - DNA, 20 bp, synthetic construct
  source 1..20: mol_type = other DNA
ataaccaagatattgattgg

SEQ ID NO: 25016 - DNA, 20 bp, synthetic construct
  source 1..20: mol_type = other DNA
aagatcatacctgaatggtg

SEQ ID NO: 25017 - DNA, 20 bp, synthetic construct
  source 1..20: mol_type = other DNA
gctggcatgggactgaagga

SEQ ID NO: 25018 - DNA, 20 bp, synthetic construct
  source 1..20: mol_type = other DNA
gtggaacaaactgacacagg

SEQ ID NO: 25019 - DNA, 20 bp, synthetic construct
  source 1..20: mol_type = other DNA
aaaaacggaaaagaaatagg

SEQ ID NO: 25020 - DNA, 20 bp, synthetic construct
  source 1..20: mol_type = other DNA
gaaacacgactaagagaaga

SEQ ID NO: 25021 - DNA, 20 bp, synthetic construct
  source 1..20: mol_type = other DNA
aaaatgcgggaagcgatcga

SEQ ID NO: 25022 - DNA, 20 bp, synthetic construct
  source 1..20: mol_type = other DNA
attgctgtagcgttttcagg

SEQ ID NO: 25023 - DNA, 20 bp, synthetic construct
  source 1..20: mol_type = other DNA
aaagtgccagacattactga

SEQ ID NO: 25024 - DNA, 20 bp, synthetic construct
  source 1..20: mol_type = other DNA
cccactggaacgcgaagcgt

SEQ ID NO: 25025 - DNA, 20 bp, synthetic construct
  source 1..20: mol_type = other DNA
aaactggttgatgatgagag

SEQ ID NO: 25026 - DNA, 20 bp, synthetic construct
  source 1..20: mol_type = other DNA
acttatgccctgaacaccgt

SEQ ID NO: 25027 - DNA, 20 bp, synthetic construct
  source 1..20: mol_type = other DNA
gcaatcaactcgaccgttcc

SEQ ID NO: 25028 - DNA, 20 bp, synthetic construct
  source 1..20: mol_type = other DNA
tgactctcacgcttactcca

SEQ ID NO: 25029 - DNA, 20 bp, synthetic construct
  source 1..20: mol_type = other DNA
tcatgccagccccaataaca

SEQ ID NO: 25030 - DNA, 20 bp, synthetic construct
  source 1..20: mol_type = other DNA
tgggtcgttactttggaaat

SEQ ID NO: 25031 - DNA, 20 bp, synthetic construct
  source 1..20: mol_type = other DNA
agtccacctttgaatttgtt

SEQ ID NO: 25032 - DNA, 20 bp, synthetic construct
  source 1..20: mol_type = other DNA
cctataccgtttttgctatg

SEQ ID NO: 25033 - DNA, 20 bp, synthetic construct
  source 1..20: mol_type = other DNA
atgtgcccagacctttaccc

SEQ ID NO: 25034 - DNA, 20 bp, synthetic construct
  source 1..20: mol_type = other DNA
ttggagtaacccccggttca

SEQ ID NO: 25035 - DNA, 20 bp, synthetic construct
  source 1..20: mol_type = other DNA
gcccggagtggaaaaacctt

SEQ ID NO: 25036 - DNA, 20 bp, synthetic construct
  source 1..20: mol_type = other DNA
ctaaacacgtgaataacgtg

SEQ ID NO: 25037 - DNA, 20 bp, synthetic construct
  source 1..20: mol_type = other DNA
caggtttgccctacaaaaag

SEQ ID NO: 25038 - DNA, 20 bp, synthetic construct
  source 1..20: mol_type = other DNA
tacgtggtgggctgccttca

SEQ ID NO: 25039 - DNA, 20 bp, synthetic construct
  source 1..20: mol_type = other DNA
tttcttggtataaacctgga

SEQ ID NO: 25040 - DNA, 20 bp, synthetic construct
  source 1..20: mol_type = other DNA
gatgctggatggtcacgttg

SEQ ID NO: 25041 - DNA, 20 bp, synthetic construct
  source 1..20: mol_type = other DNA
gtagcgatgctgtgtgtgtg

SEQ ID NO: 25042 - DNA, 20 bp, synthetic construct
  source 1..20: mol_type = other DNA
ttgatgcttctgcccaaggt

SEQ ID NO: 25043 - DNA, 20 bp, synthetic construct
  source 1..20: mol_type = other DNA
atcctaaagacacaaatgtt

SEQ ID NO: 25044 - DNA, 20 bp, synthetic construct
  source 1..20: mol_type = other DNA
ttgctaaagtgcccagtttt

SEQ ID NO: 25045 - DNA, 20 bp, synthetic construct
  source 1..20: mol_type = other DNA
attttgtagtcccttttata

SEQ ID NO: 25046 - DNA, 20 bp, synthetic construct
  source 1..20: mol_type = other DNA
cttccttcctgtttgctcaa

SEQ ID NO: 25047 - DNA, 20 bp, synthetic construct
  source 1..20: mol_type = other DNA
gtgactcctttcagagaccg

SEQ ID NO: 25048 - DNA, 20 bp, synthetic construct
  source 1..20: mol_type = other DNA
taggcaaatctgctgcagct

SEQ ID NO: 25049 - DNA, 20 bp, synthetic construct
  source 1..20: mol_type = other DNA
gtttctgtcaaatggtttct

SEQ ID NO: 25050 - DNA, 20 bp, synthetic construct
  source 1..20: mol_type = other DNA
cctttgtaatgctttacaaa

SEQ ID NO: 25051 - DNA, 20 bp, synthetic construct
  source 1..20: mol_type = other DNA
aggtgatcttctcaaaacat

SEQ ID NO: 25052 - DNA, 20 bp, synthetic construct
  source 1..20: mol_type = other DNA
aaaaggtcaaagcaggaaag

SEQ ID NO: 25053 - DNA, 20 bp, synthetic construct
  source 1..20: mol_type = other DNA
aactcagtggctttccttat

SEQ ID NO: 25054 - DNA, 20 bp, synthetic construct
  source 1..20: mol_type = other DNA
acaagagactccagattgct

SEQ ID NO: 25055 - DNA, 20 bp, synthetic construct
  source 1..20: mol_type = other DNA
acctcgaggcaatgttgtct

SEQ ID NO: 25056 - DNA, 20 bp, synthetic construct
  source 1..20: mol_type = other DNA
taaagttgtcaatatgggtg

SEQ ID NO: 25057 - DNA, 20 bp, synthetic construct
  source 1..20: mol_type = other DNA
tggaatggcaagttctgctt

SEQ ID NO: 25058 - DNA, 20 bp, synthetic construct
  source 1..20: mol_type = other DNA
ggaaattgcccactcacact

SEQ ID NO: 25059 - DNA, 20 bp, synthetic construct
  source 1..20: mol_type = other DNA
cagacctttccaccactctt

SEQ ID NO: 25060 - DNA, 20 bp, synthetic construct
  source 1..20: mol_type = other DNA
tcaaccttactttgagattt

SEQ ID NO: 25061 - DNA, 20 bp, synthetic construct
  source 1..20: mol_type = other DNA
taagggcaagttgcttcttt

SEQ ID NO: 25062 - DNA, 20 bp, synthetic construct
  source 1..20: mol_type = other DNA
ctccgtggtaaacacggatg

SEQ ID NO: 25063 - DNA, 20 bp, synthetic construct
  source 1..20: mol_type = other DNA
tgacaatgcggagaaaggta

SEQ ID NO: 25064 - DNA, 20 bp, synthetic construct
  source 1..20: mol_type = other DNA
tagtacaaccactgttacat

SEQ ID NO: 25065 - DNA, 20 bp, synthetic construct
  source 1..20: mol_type = other DNA
tgacaagaaatcactcaagg

SEQ ID NO: 25066 - DNA, 20 bp, synthetic construct
  source 1..20: mol_type = other DNA
tgtcagcaagctgaaaagaa

SEQ ID NO: 25067 - DNA, 20 bp, synthetic construct
  source 1..20: mol_type = other DNA
catatttgaaatcttggaag

SEQ ID NO: 25068 - DNA, 20 bp, synthetic construct
  source 1..20: mol_type = other DNA
tactgccatggaaacagctt

SEQ ID NO: 25069 - DNA, 20 bp, synthetic construct
  source 1..20: mol_type = other DNA
gcggcctccacgctctttgt

SEQ ID NO: 25070 - DNA, 20 bp, synthetic construct
  source 1..20: mol_type = other DNA
accagggtttaggtctttca

SEQ ID NO: 25071 - DNA, 20 bp, synthetic construct
  source 1..20: mol_type = other DNA
tgacacaaaattctggacag

SEQ ID NO: 25072 - DNA, 20 bp, synthetic construct
  source 1..20: mol_type = other DNA
gtgtggcccctgcaaaccac

SEQ ID NO: 25073 - DNA, 20 bp, synthetic construct
  source 1..20: mol_type = other DNA
acggcatttctttccttgac

SEQ ID NO: 25074 - DNA, 20 bp, synthetic construct
  source 1..20: mol_type = other DNA
tggtggtgcagtcgcccaaa

SEQ ID NO: 25075 - DNA, 20 bp, synthetic construct
  source 1..20: mol_type = other DNA
ccttgataaaacagtttctc

SEQ ID NO: 25076 - DNA, 20 bp, synthetic construct
  source 1..20: mol_type = other DNA
caattgactcagttgaacaa

SEQ ID NO: 25077 - DNA, 20 bp, synthetic construct
  source 1..20: mol_type = other DNA
ctctacacccaggaaccagg

SEQ ID NO: 25078 - DNA, 20 bp, synthetic construct
  source 1..20: mol_type = other DNA
ccagaattggtgattgtccc

SEQ ID NO: 25079 - DNA, 20 bp, synthetic construct
  source 1..20: mol_type = other DNA
agtccatctttgaacttctt

SEQ ID NO: 25080 - DNA, 20 bp, synthetic construct
  source 1..20: mol_type = other DNA
acgcgatttaccaaggaaag

SEQ ID NO: 25081 - DNA, 20 bp, synthetic construct
  source 1..20: mol_type = other DNA
gtgtaattggtataacatag

SEQ ID NO: 25082 - DNA, 20 bp, synthetic construct
  source 1..20: mol_type = other DNA
gaagggtaagaaattctctt

SEQ ID NO: 25083 - DNA, 20 bp, synthetic construct
  source 1..20: mol_type = other DNA
tactaggattgtgggaccag

SEQ ID NO: 25084 - DNA, 20 bp, synthetic construct
  source 1..20: mol_type = other DNA
cgcaccaatcgtgttaatgg

SEQ ID NO: 25085 - DNA, 20 bp, synthetic construct
  source 1..20: mol_type = other DNA
tagggcgtggtatgaggaag

SEQ ID NO: 25086 - DNA, 20 bp, synthetic construct
  source 1..20: mol_type = other DNA
cggaatgactctggctgact

SEQ ID NO: 25087 - DNA, 20 bp, synthetic construct
  source 1..20: mol_type = other DNA
ggtggggaacctgggatccg

SEQ ID NO: 25088 - DNA, 20 bp, synthetic construct
  source 1..20: mol_type = other DNA
caggttccctacatcactaa

SEQ ID NO: 25089 - DNA, 20 bp, synthetic construct
  source 1..20: mol_type = other DNA
tctgaagaacttaaaaggct

SEQ ID NO: 25090 - DNA, 20 bp, synthetic construct
  source 1..20: mol_type = other DNA
tcccagtattgccttcaacc

SEQ ID NO: 25091 - DNA, 20 bp, synthetic construct
  source 1..20: mol_type = other DNA
agctggacttaagataccaa

SEQ ID NO: 25092 - DNA, 20 bp, synthetic construct
  source 1..20: mol_type = other DNA
gcggggtagagtaggacggg

SEQ ID NO: 25093 - DNA, 20 bp, synthetic construct
  source 1..20: mol_type = other DNA
ggaagacagcttgttaataa

SEQ ID NO: 25094 - DNA, 20 bp, synthetic construct
  source 1..20: mol_type = other DNA
aaaacaggtatcaggtttat

SEQ ID NO: 25095 - DNA, 20 bp, synthetic construct
  source 1..20: mol_type = other DNA
aatgatgtcccaaaacccag

SEQ ID NO: 25096 - DNA, 20 bp, synthetic construct
  source 1..20: mol_type = other DNA
tgcagagttgaaaccggtaa

SEQ ID NO: 25097 - DNA, 20 bp, synthetic construct
  source 1..20: mol_type = other DNA
ggaggaaaaggcaatacccc

SEQ ID NO: 25098 - DNA, 20 bp, synthetic construct
  source 1..20: mol_type = other DNA
gagacccttatttgaggaac

SEQ ID NO: 25099 - DNA, 20 bp, synthetic construct
  source 1..20: mol_type = other DNA
cttgaaattaaaagatcttt

SEQ ID NO: 25100 - DNA, 20 bp, synthetic construct
  source 1..20: mol_type = other DNA
atgggtcaagcaaaaacctg

SEQ ID NO: 25101 - DNA, 20 bp, synthetic construct
  source 1..20: mol_type = other DNA
aatactagaaggagaccaaa

SEQ ID NO: 25102 - DNA, 20 bp, synthetic construct
  source 1..20: mol_type = other DNA
gggcactgccgcatatgaga

SEQ ID NO: 25103 - DNA, 20 bp, synthetic construct
  source 1..20: mol_type = other DNA
agtttctagcaagactggca

SEQ ID NO: 25104 - DNA, 20 bp, synthetic construct
  source 1..20: mol_type = other DNA
tcaattataaacttccggct

SEQ ID NO: 25105 - DNA, 20 bp, synthetic construct
  source 1..20: mol_type = other DNA
aaccacggccggcttcgcac

SEQ ID NO: 25106 - DNA, 20 bp, synthetic construct
  source 1..20: mol_type = other DNA
aatgcctgaccatggtaaat

SEQ ID NO: 25107 - DNA, 20 bp, synthetic construct
  source 1..20: mol_type = other DNA
gtctcgtcacaccggtagcc

SEQ ID NO: 25108 - DNA, 20 bp, synthetic construct
  source 1..20: mol_type = other DNA
aagatcactccgttgagctc

SEQ ID NO: 25109 - DNA, 20 bp, synthetic construct
  source 1..20: mol_type = other DNA
acaccactctatcgtacaac

SEQ ID NO: 25110 - DNA, 20 bp, synthetic construct
  source 1..20: mol_type = other DNA
caactgtcgcgatgcttact

SEQ ID NO: 25111 - DNA, 20 bp, synthetic construct
  source 1..20: mol_type = other DNA
agatcctcacgttttgcttg

SEQ ID NO: 25112 - DNA, 20 bp, synthetic construct
  source 1..20: mol_type = other DNA
aagggggaaacttccgtgac

SEQ ID NO: 25113 - DNA, 20 bp, synthetic construct
  source 1..20: mol_type = other DNA
agcgtggagtaggtgtggca

SEQ ID NO: 25114 - DNA, 20 bp, synthetic construct
  source 1..20: mol_type = other DNA
ggaccataatcctgacaccc

SEQ ID NO: 25115 - DNA, 20 bp, synthetic construct
  source 1..20: mol_type = other DNA
gggtggcgctcattgtcatg

SEQ ID NO: 25116 - DNA, 20 bp, synthetic construct
  source 1..20: mol_type = other DNA
ctagtagcgacgaaacctct

SEQ ID NO: 25117 - DNA, 20 bp, synthetic construct
  source 1..20: mol_type = other DNA
ccttagttggggaagacctg

SEQ ID NO: 25118 - DNA, 20 bp, synthetic construct
  source 1..20: mol_type = other DNA
caatgctgtcggccattgga

SEQ ID NO: 25119 - DNA, 20 bp, synthetic construct
  source 1..20: mol_type = other DNA
tggaggagacagtgacgtcc

SEQ ID NO: 25120 - DNA, 20 bp, synthetic construct
  source 1..20: mol_type = other DNA
acccaaatctcaccaaagag

SEQ ID NO: 25121 - DNA, 20 bp, synthetic construct
  source 1..20: mol_type = other DNA
gcttggcacacagtaggaat

SEQ ID NO: 25122 - DNA, 20 bp, synthetic construct
  source 1..20: mol_type = other DNA
cagcagctagcgtgtctgcc

SEQ ID NO: 25123 - DNA, 20 bp, synthetic construct
  source 1..20: mol_type = other DNA
gggtcagtcgtgaaaacttt

SEQ ID NO: 25124 - DNA, 20 bp, synthetic construct
  source 1..20: mol_type = other DNA
aactgactgcaaaccccttc

SEQ ID NO: 25125 - DNA, 20 bp, synthetic construct
  source 1..20: mol_type = other DNA
ttgcctcttccttagactac

SEQ ID NO: 25126 - DNA, 20 bp, synthetic construct
  source 1..20: mol_type = other DNA
tcgggcgaacatcctggtca

SEQ ID NO: 25127 - DNA, 20 bp, synthetic construct
  source 1..20: mol_type = other DNA
gcaagaatgccatcatctgt

SEQ ID NO: 25128 - DNA, 20 bp, synthetic construct
  source 1..20: mol_type = other DNA
tcgttggctggcctttcttc

SEQ ID NO: 25129 - DNA, 20 bp, synthetic construct
  source 1..20: mol_type = other DNA
tgcctggcggctttgcgcta

SEQ ID NO: 25130 - DNA, 20 bp, synthetic construct
  source 1..20: mol_type = other DNA
aacgacgtcaccacagacgt

SEQ ID NO: 25131 - DNA, 20 bp, synthetic construct
  source 1..20: mol_type = other DNA
gccggtggtgccccctctgc

SEQ ID NO: 25132 - DNA, 20 bp, synthetic construct
  source 1..20: mol_type = other DNA
tcttggtctgagacgatcgc

SEQ ID NO: 25133 - DNA, 20 bp, synthetic construct
  source 1..20: mol_type = other DNA
ttcaactgtggcttcgatgt

SEQ ID NO: 25134 - DNA, 20 bp, synthetic construct
  source 1..20: mol_type = other DNA
tcgggagccgatggtgcaga

SEQ ID NO: 25135 - DNA, 20 bp, synthetic construct
  source 1..20: mol_type = other DNA
ttctatgcccccccgggtgc

SEQ ID NO: 25136 - DNA, 20 bp, synthetic construct
  source 1..20: mol_type = other DNA
caaaacggcggagatgcagg

SEQ ID NO: 25137 - DNA, 20 bp, synthetic construct
  source 1..20: mol_type = other DNA
tccatcgttcgtgtcgctcg

SEQ ID NO: 25138 - DNA, 20 bp, synthetic construct
  source 1..20: mol_type = other DNA
atgttctctcatggcgacga

SEQ ID NO: 25139 - DNA, 20 bp, synthetic construct
  source 1..20: mol_type = other DNA
cgcgcagtccccccccttac

SEQ ID NO: 25140 - DNA, 20 bp, synthetic construct
  source 1..20: mol_type = other DNA
ctttccgccgcgctcgagag

SEQ ID NO: 25141 - DNA, 20 bp, synthetic construct
  source 1..20: mol_type = other DNA
ttctcagcggcggctgctct

SEQ ID NO: 25142 - DNA, 20 bp, synthetic construct
  source 1..20: mol_type = other DNA
agctcccttcgcgaccgggc

SEQ ID NO: 25143 - DNA, 20 bp, synthetic construct
  source 1..20: mol_type = other DNA
cgccctgtctctttcctctc

SEQ ID NO: 25144 - DNA, 20 bp, synthetic construct
  source 1..20: mol_type = other DNA
ctcccaaaacaacctgtgta

SEQ ID NO: 25145 - DNA, 20 bp, synthetic construct
  source 1..20: mol_type = other DNA
atcctcggtatccacgtcgc

SEQ ID NO: 25146 - DNA, 20 bp, synthetic construct
  source 1..20: mol_type = other DNA
atccctcccgcctttggtgc

SEQ ID NO: 25147 - DNA, 20 bp, synthetic construct
  source 1..20: mol_type = other DNA
tcccagcttcctgataacct

SEQ ID NO: 25148 - DNA, 20 bp, synthetic construct
  source 1..20: mol_type = other DNA
gccatcgattccgtctggga

SEQ ID NO: 25149 - DNA, 20 bp, synthetic construct
  source 1..20: mol_type = other DNA
ggtaaccctctccagcatgg

SEQ ID NO: 25150 - DNA, 20 bp, synthetic construct
  source 1..20: mol_type = other DNA
tttgacatcactttccttaa

SEQ ID NO: 25151 - DNA, 20 bp, synthetic construct
  source 1..20: mol_type = other DNA
aactactcggcttggtgtga

SEQ ID NO: 25152 - DNA, 20 bp, synthetic construct
  source 1..20: mol_type = other DNA
ggcccacccacagcaagaat

SEQ ID NO: 25153 - DNA, 20 bp, synthetic construct
  source 1..20: mol_type = other DNA
ttccccttcctcccataact

SEQ ID NO: 25154 - DNA, 20 bp, synthetic construct
  source 1..20: mol_type = other DNA
ccggtggggtaaggttggtg

SEQ ID NO: 25155 - DNA, 20 bp, synthetic construct
  source 1..20: mol_type = other DNA
ggattttcgagttcgttggc

SEQ ID NO: 25156 - DNA, 20 bp, synthetic construct
  source 1..20: mol_type = other DNA
tggtgggagcccgcggccgc

SEQ ID NO: 25157 - DNA, 20 bp, synthetic construct
  source 1..20: mol_type = other DNA
ctcaaacttccttacattgg

SEQ ID NO: 25158 - DNA, 20 bp, synthetic construct
  source 1..20: mol_type = other DNA
ggtcctgctcagtgctacgg

SEQ ID NO: 25159 - DNA, 20 bp, synthetic construct
  source 1..20: mol_type = other DNA
tcgggagctgatggcgcaga

SEQ ID NO: 25160 - DNA, 20 bp, synthetic construct
  source 1..20: mol_type = other DNA
ttttatgcccctcccggtgc

SEQ ID NO: 25161 - DNA, 20 bp, synthetic construct
  source 1..20: mol_type = other DNA
tccatcgttcgtgtcgcccg

SEQ ID NO: 25162 - DNA, 20 bp, synthetic construct
  source 1..20: mol_type = other DNA
caacacctctttgccaagct

SEQ ID NO: 25163 - DNA, 20 bp, synthetic construct
  source 1..20: mol_type = other DNA
cttggggtcctcgtcaaaga

SEQ ID NO: 25164 - DNA, 20 bp, synthetic construct
  source 1..20: mol_type = other DNA
gctgccaactctgtcaccca

SEQ ID NO: 25165 - DNA, 20 bp, synthetic construct
  source 1..20: mol_type = other DNA
tctactcttgctcaggccct

SEQ ID NO: 25166 - DNA, 20 bp, synthetic construct
  source 1..20: mol_type = other DNA
ggctctcttcgcgatcgggc

SEQ ID NO: 25167 - DNA, 20 bp, synthetic construct
  source 1..20: mol_type = other DNA
cgcccggtctctttcctctc

SEQ ID NO: 25168 - DNA, 20 bp, synthetic construct
  source 1..20: mol_type = other DNA
cagctccctgacagcctccc

SEQ ID NO: 25169 - DNA, 20 bp, synthetic construct
  source 1..20: mol_type = other DNA
aaccctctccagtatggcag

SEQ ID NO: 25170 - DNA, 20 bp, synthetic construct
  source 1..20: mol_type = other DNA
agcaaaatgggagctcaggt

SEQ ID NO: 25171 - DNA, 20 bp, synthetic construct
  source 1..20: mol_type = other DNA
acgggctacactgttcacgt

SEQ ID NO: 25172 - DNA, 20 bp, synthetic construct
  source 1..20: mol_type = other DNA
gatgactttcaatccccctc

SEQ ID NO: 25173 - DNA, 20 bp, synthetic construct
  source 1..20: mol_type = other DNA
attactgcttggtaccaaac

SEQ ID NO: 25174 - DNA, 20 bp, synthetic construct
  source 1..20: mol_type = other DNA
tatgtcggtaactatagagt

SEQ ID NO: 25175 - DNA, 20 bp, synthetic construct
  source 1..20: mol_type = other DNA
caagactccattctagagaa

SEQ ID NO: 25176 - DNA, 20 bp, synthetic construct
  source 1..20: mol_type = other DNA
ctagtgtgtggtaaagccat

SEQ ID NO: 25177 - DNA, 20 bp, synthetic construct
  source 1..20: mol_type = other DNA
cgcatgctaatgtacaactt

SEQ ID NO: 25178 - DNA, 20 bp, synthetic construct
  source 1..20: mol_type = other DNA
atcaagaagagagatatttt

SEQ ID NO: 25179 - DNA, 20 bp, synthetic construct
  source 1..20: mol_type = other DNA
gattcagtagctatgaggca

SEQ ID NO: 25180 - DNA, 20 bp, synthetic construct
  source 1..20: mol_type = other DNA
gtgcgatccttatgcctatt

SEQ ID NO: 25181 - DNA, 20 bp, synthetic construct
  source 1..20: mol_type = other DNA
cagcaaaatgggagctcaag

SEQ ID NO: 25182 - DNA, 20 bp, synthetic construct
  source 1..20: mol_type = other DNA
ggaggcgacagcggaggatc

SEQ ID NO: 25183 - DNA, 20 bp, synthetic construct
  source 1..20: mol_type = other DNA
ggcaggttacacgattcacg

SEQ ID NO: 25184 - DNA, 20 bp, synthetic construct
  source 1..20: mol_type = other DNA
tgacttccagtccccttgtg

SEQ ID NO: 25185 - DNA, 20 bp, synthetic construct
  source 1..20: mol_type = other DNA
gaacaagacccaagatcaag

SEQ ID NO: 25186 - DNA, 20 bp, synthetic construct
  source 1..20: mol_type = other DNA
gtactcccctccgggtgcgg

SEQ ID NO: 25187 - DNA, 20 bp, synthetic construct
  source 1..20: mol_type = other DNA
tgtccacgtggctgacacca

SEQ ID NO: 25188 - DNA, 20 bp, synthetic construct
  source 1..20: mol_type = other DNA
gagatcggcatgtgtgtaca

SEQ ID NO: 25189 - DNA, 20 bp, synthetic construct
  source 1..20: mol_type = other DNA
acacgtaagggtatggatcc

SEQ ID NO: 25190 - DNA, 20 bp, synthetic construct
  source 1..20: mol_type = other DNA
gtatgtgggcaattacagag

SEQ ID NO: 25191 - DNA, 20 bp, synthetic construct
  source 1..20: mol_type = other DNA
aaacaagcactatccagtcg

SEQ ID NO: 25192 - DNA, 20 bp, synthetic construct
  source 1..20: mol_type = other DNA
gggtggtgaaggtgttgttg

SEQ ID NO: 25193 - DNA, 20 bp, synthetic construct
  source 1..20: mol_type = other DNA
tcaagactccatcctggaaa

SEQ ID NO: 25194 - DNA, 20 bp, synthetic construct
  source 1..20: mol_type = other DNA
acaactgcccctgttggaaa

SEQ ID NO: 25195 - DNA, 20 bp, synthetic construct
  source 1..20: mol_type = other DNA
ggcaccagaaaccccccccc

SEQ ID NO: 25196 - DNA, 20 bp, synthetic construct
  source 1..20: mol_type = other DNA
ctccaaggaggctggtttcc

SEQ ID NO: 25197 - DNA, 20 bp, synthetic construct
  source 1..20: mol_type = other DNA
gaacacgaacgtggatgagt

SEQ ID NO: 25198 - DNA, 20 bp, synthetic construct
  source 1..20: mol_type = other DNA
tatcaaaaagagagacattt

SEQ ID NO: 25199 - DNA, 20 bp, synthetic construct
  source 1..20: mol_type = other DNA
tgattcagtggccatgaggc

SEQ ID NO: 25200 - DNA, 20 bp, synthetic construct
  source 1..20: mol_type = other DNA
tgtgcgatctttgtgcttat

SEQ ID NO: 25201 - DNA, 20 bp, synthetic construct
  source 1..20: mol_type = other DNA
agatgctctcaccgaagctg

SEQ ID NO: 25202 - DNA, 20 bp, synthetic construct
  source 1..20: mol_type = other DNA
gttcttggacaacggtacga

SEQ ID NO: 25203 - DNA, 20 bp, synthetic construct
  source 1..20: mol_type = other DNA
aaattttcattctactcccg

SEQ ID NO: 25204 - DNA, 20 bp, synthetic construct
  source 1..20: mol_type = other DNA
tttcacaattaatcctggta

SEQ ID NO: 25205 - DNA, 20 bp, synthetic construct
  source 1..20: mol_type = other DNA
ttacgatggttatccaagat

SEQ ID NO: 25206 - DNA, 20 bp, synthetic construct
  source 1..20: mol_type = other DNA
acccagaccatttaggatgt

SEQ ID NO: 25207 - DNA, 20 bp, synthetic construct
  source 1..20: mol_type = other DNA
atttattgaggccaatgagt

SEQ ID NO: 25208 - DNA, 20 bp, synthetic construct
  source 1..20: mol_type = other DNA
aaagtcagtggactcagagg

SEQ ID NO: 25209 - DNA, 20 bp, synthetic construct
  source 1..20: mol_type = other DNA
catactcatggctacaggta

SEQ ID NO: 25210 - DNA, 20 bp, synthetic construct
  source 1..20: mol_type = other DNA
actagaacccagcgtctttc

SEQ ID NO: 25211 - DNA, 20 bp, synthetic construct
  source 1..20: mol_type = other DNA
tggatacaccaacaatgaga

SEQ ID NO: 25212 - DNA, 20 bp, synthetic construct
  source 1..20: mol_type = other DNA
ttagacggaaatggcttgac

SEQ ID NO: 25213 - DNA, 20 bp, synthetic construct
  source 1..20: mol_type = other DNA
ttaaacctccgattcggcaa

SEQ ID NO: 25214 - DNA, 20 bp, synthetic construct
  source 1..20: mol_type = other DNA
ggcattgtgagacaacgggt

SEQ ID NO: 25215 - DNA, 20 bp, synthetic construct
  source 1..20: mol_type = other DNA
gaaagcaatgcagtcaagta

SEQ ID NO: 25216 - DNA, 20 bp, synthetic construct
  source 1..20: mol_type = other DNA
gcaacggcacacggcagtac

SEQ ID NO: 25217 - DNA, 20 bp, synthetic construct
  source 1..20: mol_type = other DNA
aaaatgcgttattaagaaaa

SEQ ID NO: 25218 - DNA, 20 bp, synthetic construct
  source 1..20: mol_type = other DNA
agacaattctgcattggaca

SEQ ID NO: 25219 - DNA, 20 bp, synthetic construct
  source 1..20: mol_type = other DNA
gtgagggaggcgcccggcga

SEQ ID NO: 25220 - DNA, 20 bp, synthetic construct
  source 1..20: mol_type = other DNA
aatcccaatctggcttcctc

SEQ ID NO: 25221 - DNA, 20 bp, synthetic construct
  source 1..20: mol_type = other DNA
ctcattccatcccaaattaa

SEQ ID NO: 25222 - DNA, 20 bp, synthetic construct
  source 1..20: mol_type = other DNA
actcctggttcacaggctga

SEQ ID NO: 25223 - DNA, 20 bp, synthetic construct
  source 1..20: mol_type = other DNA
attacacccgagcccaacac

SEQ ID NO: 25224 - DNA, 20 bp, synthetic construct
  source 1..20: mol_type = other DNA
aatcagctcaaaccgtctat

SEQ ID NO: 25225 - DNA, 20 bp, synthetic construct
  source 1..20: mol_type = other DNA
ttctaatactgttcttctgt

SEQ ID NO: 25226 - DNA, 20 bp, synthetic construct
  source 1..20: mol_type = other DNA
gggggttgtacacaacaata

SEQ ID NO: 25227 - DNA, 20 bp, synthetic construct
  source 1..20: mol_type = other DNA
cgcctttcacaaagaaggag

SEQ ID NO: 25228 - DNA, 20 bp, synthetic construct
  source 1..20: mol_type = other DNA
accacagaaagccacgccga

SEQ ID NO: 25229 - DNA, 20 bp, synthetic construct
  source 1..20: mol_type = other DNA
cgaagggatgtcactcccaa

SEQ ID NO: 25230 - DNA, 20 bp, synthetic construct
  source 1..20: mol_type = other DNA
ttgaggcagctggccaacga

SEQ ID NO: 25231 - DNA, 20 bp, synthetic construct
  source 1..20: mol_type = other DNA
gagaaggacttggtcaagac

SEQ ID NO: 25232 - DNA, 20 bp, synthetic construct
  source 1..20: mol_type = other DNA
tccatgaatcaaccttgaag

SEQ ID NO: 25233 - DNA, 20 bp, synthetic construct
  source 1..20: mol_type = other DNA
tttgacatgaggataagaac

SEQ ID NO: 25234 - DNA, 20 bp, synthetic construct
  source 1..20: mol_type = other DNA
gactaccgaaacatatatac

SEQ ID NO: 25235 - DNA, 20 bp, synthetic construct
  source 1..20: mol_type = other DNA
gagggcgactaaatagaggg

SEQ ID NO: 25236 - DNA, 20 bp, synthetic construct
  source 1..20: mol_type = other DNA
aggaggctattcaaggccat

SEQ ID NO: 25237 - DNA, 20 bp, synthetic construct
  source 1..20: mol_type = other DNA
acaaagcaggagattattta

SEQ ID NO: 25238 - DNA, 20 bp, synthetic construct
  source 1..20: mol_type = other DNA
ataaatttgctacaaaaagg

SEQ ID NO: 25239 - DNA, 20 bp, synthetic construct
  source 1..20: mol_type = other DNA
catatccaacacgcaatgtt

SEQ ID NO: 25240 - DNA, 20 bp, synthetic construct
  source 1..20: mol_type = other DNA
cacatggagtctctctcgaa

SEQ ID NO: 25241 - DNA, 20 bp, synthetic construct
  source 1..20: mol_type = other DNA
gtgacaatcaatgtataact

SEQ ID NO: 25242 - DNA, 20 bp, synthetic construct
  source 1..20: mol_type = other DNA
tttattttggcaaaaaacaa

SEQ ID NO: 25243 - DNA, 20 bp, synthetic construct
  source 1..20: mol_type = other DNA
atgagcattgccctaaatgt

SEQ ID NO: 25244 - DNA, 20 bp, synthetic construct
  source 1..20: mol_type = other DNA
attttgctgttgcacttttt

SEQ ID NO: 25245 - DNA, 20 bp, synthetic construct
  source 1..20: mol_type = other DNA
acaattcatcaacggatcca

SEQ ID NO: 25246 - DNA, 20 bp, synthetic construct
  source 1..20: mol_type = other DNA
tagctactcaaatacataat

SEQ ID NO: 25247 - DNA, 20 bp, synthetic construct
  source 1..20: mol_type = other DNA
cagagattgtaaggcttact

SEQ ID NO: 25248 - DNA, 20 bp, synthetic construct
  source 1..20: mol_type = other DNA
ttaccgatattactaatcca

SEQ ID NO: 25249 - DNA, 20 bp, synthetic construct
  source 1..20: mol_type = other DNA
agttctttctaataatacaa

SEQ ID NO: 25250 - DNA, 20 bp, synthetic construct
  source 1..20: mol_type = other DNA
tcaaactaatagatagattg

SEQ ID NO: 25251 - DNA, 20 bp, synthetic construct
  source 1..20: mol_type = other DNA
gagcctgcagaacacgcagg

SEQ ID NO: 25252 - DNA, 20 bp, synthetic construct
  source 1..20: mol_type = other DNA
tcatttgctagtctgtttct

SEQ ID NO: 25253 - DNA, 20 bp, synthetic construct
  source 1..20: mol_type = other DNA
gcgcgaacagccaaagtcaa

SEQ ID NO: 25254 - DNA, 20 bp, synthetic construct
  source 1..20: mol_type = other DNA
gagcccatcattttcagcac

SEQ ID NO: 25255 - DNA, 20 bp, synthetic construct
  source 1..20: mol_type = other DNA
ctttccagcaccggatgtaa

SEQ ID NO: 25256 - DNA, 20 bp, synthetic construct
  source 1..20: mol_type = other DNA
aataggaaatcaagccttct

SEQ ID NO: 25257 - DNA, 20 bp, synthetic construct
  source 1..20: mol_type = other DNA
tcatcccaaactgagaccta

SEQ ID NO: 25258 - DNA, 20 bp, synthetic construct
  source 1..20: mol_type = other DNA
ctgccgcagcatatagaccc

SEQ ID NO: 25259 - DNA, 20 bp, synthetic construct
  source 1..20: mol_type = other DNA
ccacaaagaaggcgctttct

SEQ ID NO: 25260 - DNA, 20 bp, synthetic construct
  source 1..20: mol_type = other DNA
accagcttcgccaacaacca

SEQ ID NO: 25261 - DNA, 20 bp, synthetic construct
  source 1..20: mol_type = other DNA
cagctagcaaatgagacgac

SEQ ID NO: 25262 - DNA, 20 bp, synthetic construct
  source 1..20: mol_type = other DNA
gctaggacaggatcaatcag

SEQ ID NO: 25263 - DNA, 20 bp, synthetic construct
  source 1..20: mol_type = other DNA
gcaaccgtaataaaagcatt

SEQ ID NO: 25264 - DNA, 20 bp, synthetic construct
  source 1..20: mol_type = other DNA
aacaagttctcaactaagag

SEQ ID NO: 25265 - DNA, 20 bp, synthetic construct
  source 1..20: mol_type = other DNA
aatgtccctgggtcacaaga

SEQ ID NO: 25266 - DNA, 20 bp, synthetic construct
  source 1..20: mol_type = other DNA
tattcagggaacatcgtaca

SEQ ID NO: 25267 - DNA, 20 bp, synthetic construct
  source 1..20: mol_type = other DNA
ttaacaactcaaatccataa

SEQ ID NO: 25268 - DNA, 20 bp, synthetic construct
  source 1..20: mol_type = other DNA
gtggccatttcttccttcct

SEQ ID NO: 25269 - DNA, 20 bp, synthetic construct
  source 1..20: mol_type = other DNA
ttccaagaagacagaaataa

SEQ ID NO: 25270 - DNA, 20 bp, synthetic construct
  source 1..20: mol_type = other DNA
gcaaaattaatggagagatt

SEQ ID NO: 25271 - DNA, 20 bp, synthetic construct
  source 1..20: mol_type = other DNA
caatgcgtaatttataccga

SEQ ID NO: 25272 - DNA, 20 bp, synthetic construct
  source 1..20: mol_type = other DNA
tctctcccgtttggctccac

SEQ ID NO: 25273 - DNA, 20 bp, synthetic construct
  source 1..20: mol_type = other DNA
gctgcctgggccttccacgc

SEQ ID NO: 25274 - DNA, 20 bp, synthetic construct
  source 1..20: mol_type = other DNA
cccgaccctatcttcgctga

SEQ ID NO: 25275 - DNA, 20 bp, synthetic construct
  source 1..20: mol_type = other DNA
gggccttccaactcctcccg

SEQ ID NO: 25276 - DNA, 20 bp, synthetic construct
  source 1..20: mol_type = other DNA
ctcaacttcccttactccat

SEQ ID NO: 25277 - DNA, 20 bp, synthetic construct
  source 1..20: mol_type = other DNA
acccctcaatccgcaaccca

SEQ ID NO: 25278 - DNA, 20 bp, synthetic construct
  source 1..20: mol_type = other DNA
ccctctttcctggacgtctc

SEQ ID NO: 25279 - DNA, 20 bp, synthetic construct
  source 1..20: mol_type = other DNA
cccctaggccaaacccttac

SEQ ID NO: 25280 - DNA, 20 bp, synthetic construct
  source 1..20: mol_type = other DNA
gacctcaccacctccgcctc

SEQ ID NO: 25281 - DNA, 20 bp, synthetic construct
  source 1..20: mol_type = other DNA
accattgccgtgttcatccg

SEQ ID NO: 25282 - DNA, 20 bp, synthetic construct
  source 1..20: mol_type = other DNA
gaggatcgtgctcacgtcac

SEQ ID NO: 25283 - DNA, 20 bp, synthetic construct
  source 1..20: mol_type = other DNA
aaccagcggctaacgtatgt

SEQ ID NO: 25284 - DNA, 20 bp, synthetic construct
  source 1..20: mol_type = other DNA
agcgagtacccctactccgc

SEQ ID NO: 25285 - DNA, 20 bp, synthetic construct
  source 1..20: mol_type = other DNA
gtcgtgatcgcctccgactt

SEQ ID NO: 25286 - DNA, 20 bp, synthetic construct
  source 1..20: mol_type = other DNA
agtcacgacaccatcatggc

SEQ ID NO: 25287 - DNA, 20 bp, synthetic construct
  source 1..20: mol_type = other DNA
ctgatcccgggcgtcaagcc

SEQ ID NO: 25288 - DNA, 20 bp, synthetic construct
  source 1..20: mol_type = other DNA
gacatccgtcgctttatccg

SEQ ID NO: 25289 - DNA, 20 bp, synthetic construct
  source 1..20: mol_type = other DNA
tggcccaccctccccgttgc

SEQ ID NO: 25290 - DNA, 20 bp, synthetic construct
  source 1..20: mol_type = other DNA
gcgatcatcgctggacgcat

SEQ ID NO: 25291 - DNA, 20 bp, synthetic construct
  source 1..20: mol_type = other DNA
actctcccctcctgcgcttt

SEQ ID NO: 25292 - DNA, 20 bp, synthetic construct
  source 1..20: mol_type = other DNA
gttggaacctcaatcctcaa

SEQ ID NO: 25293 - DNA, 20 bp, synthetic construct
  source 1..20: mol_type = other DNA
aacaccaccctaatcgtgac

SEQ ID NO: 25294 - DNA, 20 bp, synthetic construct
  source 1..20: mol_type = other DNA
tcttaagtctgtgccttcca

SEQ ID NO: 25295 - DNA, 20 bp, synthetic construct
  source 1..20: mol_type = other DNA
atggtaagtgatcaattcac

SEQ ID NO: 25296 - DNA, 20 bp, synthetic construct
  source 1..20: mol_type = other DNA
ctcgaagttctcggggttct

SEQ ID NO: 25297 - DNA, 20 bp, synthetic construct
  source 1..20: mol_type = other DNA
atctggaaaccggaattgcg

SEQ ID NO: 25298 - DNA, 20 bp, synthetic construct
  source 1..20: mol_type = other DNA
acctgaaacaggcactaaat

SEQ ID NO: 25299 - DNA, 20 bp, synthetic construct
  source 1..20: mol_type = other DNA
ggggtaccctggtggtagct

SEQ ID NO: 25300 - DNA, 20 bp, synthetic construct
  source 1..20: mol_type = other DNA
gagtccttgattttccacca

SEQ ID NO: 25301 - DNA, 20 bp, synthetic construct
  source 1..20: mol_type = other DNA
tgactggagttttccttatc

SEQ ID NO: 25302 - DNA, 20 bp, synthetic construct
  source 1..20: mol_type = other DNA
aaggtcctagtgggcaggct

SEQ ID NO: 25303 - DNA, 20 bp, synthetic construct
  source 1..20: mol_type = other DNA
aaaattctttgcagcgcact

SEQ ID NO: 25304 - DNA, 20 bp, synthetic construct
  source 1..20: mol_type = other DNA
taactgctaattttaatctt

SEQ ID NO: 25305 - DNA, 20 bp, synthetic construct
  source 1..20: mol_type = other DNA
tagatggtgttgtgttagat

SEQ ID NO: 25306 - DNA, 20 bp, synthetic construct
  source 1..20: mol_type = other DNA
atgagctgaggaaagttgag

SEQ ID NO: 25307 - DNA, 20 bp, synthetic construct
  source 1..20: mol_type = other DNA
tgtatggaaacaagatttat

SEQ ID NO: 25308 - DNA, 20 bp, synthetic construct
  source 1..20: mol_type = other DNA
tccgtccaagccgcggacgt

SEQ ID NO: 25309 - DNA, 20 bp, synthetic construct
  source 1..20: mol_type = other DNA
gcgacagttccggtcaactc

SEQ ID NO: 25310 - DNA, 20 bp, synthetic construct
  source 1..20: mol_type = other DNA
agatgtggctgggaagtgtt

SEQ ID NO: 25311 - DNA, 20 bp, synthetic construct
  source 1..20: mol_type = other DNA
ctgctcttgccatatgcttc

SEQ ID NO: 25312 - DNA, 20 bp, synthetic construct
  source 1..20: mol_type = other DNA
aatttgctggtccgtcctct

SEQ ID NO: 25313 - DNA, 20 bp, synthetic construct
  source 1..20: mol_type = other DNA
gtgattcctttttgcagctc

SEQ ID NO: 25314 - DNA, 20 bp, synthetic construct
  source 1..20: mol_type = other DNA
ttcctggatatgttattaga

SEQ ID NO: 25315 - DNA, 20 bp, synthetic construct
  source 1..20: mol_type = other DNA
aagctggaccgcatctctga

SEQ ID NO: 25316 - DNA, 20 bp, synthetic construct
  source 1..20: mol_type = other DNA
aaggtcgatgacatctatgc

SEQ ID NO: 25317 - DNA, 20 bp, synthetic construct
  source 1..20: mol_type = other DNA
atgagacatttcaaatctgg

SEQ ID NO: 25318 - DNA, 20 bp, synthetic construct
  source 1..20: mol_type = other DNA
gatgtgaagatgacccgcat

SEQ ID NO: 25319 - DNA, 20 bp, synthetic construct
  source 1..20: mol_type = other DNA
acgttccgtggaattgaaac

SEQ ID NO: 25320 - DNA, 20 bp, synthetic construct
  source 1..20: mol_type = other DNA
gggactcccctgctggatgg

SEQ ID NO: 25321 - DNA, 20 bp, synthetic construct
  source 1..20: mol_type = other DNA
ggtgatgatgtagtttatgc

SEQ ID NO: 25322 - DNA, 20 bp, synthetic construct
  source 1..20: mol_type = other DNA
ggagttcgcaaatctgctgc

SEQ ID NO: 25323 - DNA, 20 bp, synthetic construct
  source 1..20: mol_type = other DNA
tttgtcattgctacttctaa

SEQ ID NO: 25324 - DNA, 20 bp, synthetic construct
  source 1..20: mol_type = other DNA
cctattgctgcttgtgctta

SEQ ID NO: 25325 - DNA, 20 bp, synthetic construct
  source 1..20: mol_type = other DNA
atgttagaatcccatcagga

SEQ ID NO: 25326 - DNA, 20 bp, synthetic construct
  source 1..20: mol_type = other DNA
tcatcaaatgatcataatgc

SEQ ID NO: 25327 - DNA, 20 bp, synthetic construct
  source 1..20: mol_type = other DNA
ggcattgttgatactgagct

SEQ ID NO: 25328 - DNA, 20 bp, synthetic construct
  source 1..20: mol_type = other DNA
gtagacaatgagataggttt

SEQ ID NO: 25329 - DNA, 20 bp, synthetic construct
  source 1..20: mol_type = other DNA
cttcttgctcacgaggaaaa

SEQ ID NO: 25330 - DNA, 20 bp, synthetic construct
  source 1..20: mol_type = other DNA
gatgaaaccaagagtggttc

SEQ ID NO: 25331 - DNA, 20 bp, synthetic construct
  source 1..20: mol_type = other DNA
gattccgagcttctaagctt

SEQ ID NO: 25332 - DNA, 20 bp, synthetic construct
  source 1..20: mol_type = other DNA
ttggcagccaggttttaact

SEQ ID NO: 25333 - DNA, 20 bp, synthetic construct
  source 1..20: mol_type = other DNA
catcaattagacaaatttct

SEQ ID NO: 25334 - DNA, 20 bp, synthetic construct
  source 1..20: mol_type = other DNA
aaacttctaagattcgttcc

SEQ ID NO: 25335 - DNA, 20 bp, synthetic construct
  source 1..20: mol_type = other DNA
atattcctgctaagggtttc

SEQ ID NO: 25336 - DNA, 20 bp, synthetic construct
  source 1..20: mol_type = other DNA
gtggaaatactccctcgccg

SEQ ID NO: 25337 - DNA, 20 bp, synthetic construct
  source 1..20: mol_type = other DNA
agttcgcaaagacacaatac

SEQ ID NO: 25338 - DNA, 20 bp, synthetic construct
  source 1..20: mol_type = other DNA
cttatgatcctgccactgaa

SEQ ID NO: 25339 - DNA, 20 bp, synthetic construct
  source 1..20: mol_type = other DNA
cgataacagaggatcctact

SEQ ID NO: 25340 - DNA, 20 bp, synthetic construct
  source 1..20: mol_type = other DNA
atgtggagcttgatcctgct

SEQ ID NO: 25341 - DNA, 20 bp, synthetic construct
  source 1..20: mol_type = other DNA
taacccgtcgcgagacgcgt

SEQ ID NO: 25342 - DNA, 20 bp, synthetic construct
  source 1..20: mol_type = other DNA
cctaggtttacttttattag

SEQ ID NO: 25343 - DNA, 20 bp, synthetic construct
  source 1..20: mol_type = other DNA
tccgctgtcttggggtatgg

SEQ ID NO: 25344 - DNA, 20 bp, synthetic construct
  source 1..20: mol_type = other DNA
tgacactatatccgcaccaa

SEQ ID NO: 25345 - DNA, 20 bp, synthetic construct
  source 1..20: mol_type = other DNA
taccaggtaggatgacaaat

SEQ ID NO: 25346 - DNA, 20 bp, synthetic construct
  source 1..20: mol_type = other DNA
ggttgcaatcaacgtgtacg

SEQ ID NO: 25347 - DNA, 20 bp, synthetic construct
  source 1..20: mol_type = other DNA
gtattgctgccatcctggaa

SEQ ID NO: 25348 - DNA, 20 bp, synthetic construct
  source 1..20: mol_type = other DNA
tcacagccatcacacgatct

SEQ ID NO: 25349 - DNA, 20 bp, synthetic construct
  source 1..20: mol_type = other DNA
ttggactgcttattcatggg

SEQ ID NO: 25350 - DNA, 20 bp, synthetic construct
  source 1..20: mol_type = other DNA
aaaacccggatggtgaggac

SEQ ID NO: 25351 - DNA, 20 bp, synthetic construct
  source 1..20: mol_type = other DNA
aatcattacctgcaaaccca

SEQ ID NO: 25352 - DNA, 20 bp, synthetic construct
  source 1..20: mol_type = other DNA
acgctgcccaactccagccc

SEQ ID NO: 25353 - DNA, 20 bp, synthetic construct
  source 1..20: mol_type = other DNA
taggttttgacacggaagat

SEQ ID NO: 25354 - DNA, 20 bp, synthetic construct
  source 1..20: mol_type = other DNA
acaagtttattgccctggtt

SEQ ID NO: 25355 - DNA, 20 bp, synthetic construct
  source 1..20: mol_type = other DNA
cggaaggcgaaacgtcgggg

SEQ ID NO: 25356 - DNA, 20 bp, synthetic construct
  source 1..20: mol_type = other DNA
aacgtgcatcaccatggaga

SEQ ID NO: 25357 - DNA, 20 bp, synthetic construct
  source 1..20: mol_type = other DNA
ataattttcacaattatgtt

SEQ ID NO: 25358 - DNA, 20 bp, synthetic construct
  source 1..20: mol_type = other DNA
aagatgatgaacatggaggc

SEQ ID NO: 25359 - DNA, 20 bp, synthetic construct
  source 1..20: mol_type = other DNA
tttcatgatctcaacttacc

SEQ ID NO: 25360 - DNA, 20 bp, synthetic construct
  source 1..20: mol_type = other DNA
gggccctgtagagttcccat

SEQ ID NO: 25361 - DNA, 20 bp, synthetic construct
  source 1..20: mol_type = other DNA
tttaaaagcttatttggagg

SEQ ID NO: 25362 - DNA, 20 bp, synthetic construct
  source 1..20: mol_type = other DNA
gacttggctaggaaagaatt

SEQ ID NO: 25363 - DNA, 20 bp, synthetic construct
  source 1..20: mol_type = other DNA
cacaacatgtgggtaagcat

SEQ ID NO: 25364 - DNA, 20 bp, synthetic construct
  source 1..20: mol_type = other DNA
accgcagtaatgggcacagc

SEQ ID NO: 25365 - DNA, 20 bp, synthetic construct
  source 1..20: mol_type = other DNA
gtggcagctgcatttgctga

SEQ ID NO: 25366 - DNA, 20 bp, synthetic construct
  source 1..20: mol_type = other DNA
ctgggaatcctctcactatt

SEQ ID NO: 25367 - DNA, 20 bp, synthetic construct
  source 1..20: mol_type = other DNA
gcgagggtgactggagcatc

SEQ ID NO: 25368 - DNA, 20 bp, synthetic construct
  source 1..20: mol_type = other DNA
cacgtgacgaatggggccgt

SEQ ID NO: 25369 - DNA, 20 bp, synthetic construct
  source 1..20: mol_type = other DNA
attatggatgaggctcactt

SEQ ID NO: 25370 - DNA, 20 bp, synthetic construct
  source 1..20: mol_type = other DNA
aagagtggagaatgggattt

SEQ ID NO: 25371 - DNA, 20 bp, synthetic construct
  source 1..20: mol_type = other DNA
cagcgtcgtggacgggttgg

SEQ ID NO: 25372 - DNA, 20 bp, synthetic construct
  source 1..20: mol_type = other DNA
ccagcgacggcatgggcggc

SEQ ID NO: 25373 - DNA, 20 bp, synthetic construct
  source 1..20: mol_type = other DNA
tggaactatcatggaagcta

SEQ ID NO: 25374 - DNA, 20 bp, synthetic construct
  source 1..20: mol_type = other DNA
gtacccttttgctcacacca

SEQ ID NO: 25375 - DNA, 20 bp, synthetic construct
  source 1..20: mol_type = other DNA
ttgatgtacttccacaggag

SEQ ID NO: 25376 - DNA, 20 bp, synthetic construct
  source 1..20: mol_type = other DNA
aatccctgccaccggatgtt

SEQ ID NO: 25377 - DNA, 20 bp, synthetic construct
  source 1..20: mol_type = other DNA
aggggaaggactagaggtta

SEQ ID NO: 25378 - DNA, 20 bp, synthetic construct
  source 1..20: mol_type = other DNA
ctcaatgtctttatttacac

SEQ ID NO: 25379 - DNA, 20 bp, synthetic construct
  source 1..20: mol_type = other DNA
aactactatggtgcccaata

SEQ ID NO: 25380 - DNA, 20 bp, synthetic construct
  source 1..20: mol_type = other DNA
ggcaactccactcttacaac

SEQ ID NO: 25381 - DNA, 20 bp, synthetic construct
  source 1..20: mol_type = other DNA
cgcgtgattcgcttgcctgg

SEQ ID NO: 25382 - DNA, 20 bp, synthetic construct
  source 1..20: mol_type = other DNA
tctctatacattgttccaat

SEQ ID NO: 25383 - DNA, 20 bp, synthetic construct
  source 1..20: mol_type = other DNA
actatcaagaacgatggttt

SEQ ID NO: 25384 - DNA, 20 bp, synthetic construct
  source 1..20: mol_type = other DNA
ggagatgccccagcaacacg

SEQ ID NO: 25385 - DNA, 20 bp, synthetic construct
  source 1..20: mol_type = other DNA
caaaccaatatagttgttcc

SEQ ID NO: 25386 - DNA, 20 bp, synthetic construct
  source 1..20: mol_type = other DNA
gtacttcgccccgctacagg

SEQ ID NO: 25387 - DNA, 20 bp, synthetic construct
  source 1..20: mol_type = other DNA
atcgaggcatttatgtctcg

SEQ ID NO: 25388 - DNA, 20 bp, synthetic construct
  source 1..20: mol_type = other DNA
gatgtggtcgctattgtctc

SEQ ID NO: 25389 - DNA, 20 bp, synthetic construct
  source 1..20: mol_type = other DNA
cccccggcatccctacggct

SEQ ID NO: 25390 - DNA, 20 bp, synthetic construct
  source 1..20: mol_type = other DNA
caccttttcaacaacagact

SEQ ID NO: 25391 - DNA, 20 bp, synthetic construct
  source 1..20: mol_type = other DNA
gctatggccacagcaggcag

SEQ ID NO: 25392 - DNA, 20 bp, synthetic construct
  source 1..20: mol_type = other DNA
tacggggtgcagcgaaacca

SEQ ID NO: 25393 - DNA, 20 bp, synthetic construct
  source 1..20: mol_type = other DNA
cagaagttgggtggcaacag

SEQ ID NO: 25394 - DNA, 20 bp, synthetic construct
  source 1..20: mol_type = other DNA
aacactgcacttgacaggtg

SEQ ID NO: 25395 - DNA, 20 bp, synthetic construct
  source 1..20: mol_type = other DNA
aagctcgaggcaatcttcca

SEQ ID NO: 25396 - DNA, 20 bp, synthetic construct
  source 1..20: mol_type = other DNA
tccatcttgtcatccctcac

SEQ ID NO: 25397 - DNA, 20 bp, synthetic construct
  source 1..20: mol_type = other DNA
ggtaacacagacattcccat

SEQ ID NO: 25398 - DNA, 20 bp, synthetic construct
  source 1..20: mol_type = other DNA
tatgtcattaagaacaccag

SEQ ID NO: 25399 - DNA, 20 bp, synthetic construct
  source 1..20: mol_type = other DNA
tgcagttccatgaatgacac

SEQ ID NO: 25400 - DNA, 20 bp, synthetic construct
  source 1..20: mol_type = other DNA
gggacatccatcttcaattc

SEQ ID NO: 25401 - DNA, 20 bp, synthetic construct
  source 1..20: mol_type = other DNA
tacaatttgacaatgacacc

SEQ ID NO: 25402 - DNA, 20 bp, synthetic construct
  source 1..20: mol_type = other DNA
cctggtaacaggtgccccag

SEQ ID NO: 25403 - DNA, 20 bp, synthetic construct
  source 1..20: mol_type = other DNA
taccccctaccccgctcacc

SEQ ID NO: 25404 - DNA, 20 bp, synthetic construct
  source 1..20: mol_type = other DNA
cccgcacagatgcccctcgc

SEQ ID NO: 25405 - DNA, 20 bp, synthetic construct
  source 1..20: mol_type = other DNA
ggtcgctccgggggtgcgtc

SEQ ID NO: 25406 - DNA, 20 bp, synthetic construct
  source 1..20: mol_type = other DNA
aattggggcactcaatctgg

SEQ ID NO: 25407 - DNA, 20 bp, synthetic construct
  source 1..20: mol_type = other DNA
atcctttacatggtcccgga

SEQ ID NO: 25408 - DNA, 20 bp, synthetic construct
  source 1..20: mol_type = other DNA
tccccttctgccattgctgg

SEQ ID NO: 25409 - DNA, 20 bp, synthetic construct
  source 1..20: mol_type = other DNA
gatgtctccggcctcactgc

SEQ ID NO: 25410 - DNA, 20 bp, synthetic construct
  source 1..20: mol_type = other DNA
cttggtgacgtcccaccaga

SEQ ID NO: 25411 - DNA, 20 bp, synthetic construct
  source 1..20: mol_type = other DNA
cgggaagtcccactctcctc

SEQ ID NO: 25412 - DNA, 20 bp, synthetic construct
  source 1..20: mol_type = other DNA
ctctttggttccccctcccc

SEQ ID NO: 25413 - DNA, 20 bp, synthetic construct
  source 1..20: mol_type = other DNA
tctcaacaccgcaagcgcca

SEQ ID NO: 25414 - DNA, 20 bp, synthetic construct
  source 1..20: mol_type = other DNA
acctccaacttccatgagcc

SEQ ID NO: 25415 - DNA, 20 bp, synthetic construct
  source 1..20: mol_type = other DNA
acccttttccaagccaacgt

SEQ ID NO: 25416 - DNA, 20 bp, synthetic construct
  source 1..20: mol_type = other DNA
actccccgggaaatccccga

SEQ ID NO: 25417 - DNA, 20 bp, synthetic construct
  source 1..20: mol_type = other DNA
ttcctggcggtggtcggatt

SEQ ID NO: 25418 - DNA, 20 bp, synthetic construct
  source 1..20: mol_type = other DNA
atctctcccgcaatccctgg

SEQ ID NO: 25419 - DNA, 20 bp, synthetic construct
  source 1..20: mol_type = other DNA
tgggccaccctccctaccct

SEQ ID NO: 25420 - DNA, 20 bp, synthetic construct
  source 1..20: mol_type = other DNA
cttgacatgaacttccccgg

SEQ ID NO: 25421 - DNA, 20 bp, synthetic construct
  source 1..20: mol_type = other DNA
cataccattctccctgaaat

SEQ ID NO: 25422 - DNA, 20 bp, synthetic construct
  source 1..20: mol_type = other DNA
atggaagggcttgatatggg

SEQ ID NO: 25423 - DNA, 20 bp, synthetic construct
  source 1..20: mol_type = other DNA
tggaccgagttcttctacaa

SEQ ID NO: 25424 - DNA, 20 bp, synthetic construct
  source 1..20: mol_type = other DNA
cacatctatggcaaccagat

SEQ ID NO: 25425 - DNA, 20 bp, synthetic construct
  source 1..20: mol_type = other DNA
tacgcgacggaacccccaat

SEQ ID NO: 25426 - DNA, 20 bp, synthetic construct
  source 1..20: mol_type = other DNA
attcaccctgtgatggaccc

SEQ ID NO: 25427 - DNA, 20 bp, synthetic construct
  source 1..20: mol_type = other DNA
ccaaatttcctcccctactc

SEQ ID NO: 25428 - DNA, 20 bp, synthetic construct
  source 1..20: mol_type = other DNA
ccatggttgtactgtgctat

SEQ ID NO: 25429 - DNA, 20 bp, synthetic construct
  source 1..20: mol_type = other DNA
acttacctttttcccctctt

SEQ ID NO: 25430 - DNA, 20 bp, synthetic construct
  source 1..20: mol_type = other DNA
cgacaggttatggtagagta

SEQ ID NO: 25431 - DNA, 20 bp, synthetic construct
  source 1..20: mol_type = other DNA
gccattggattatgtcaccg

SEQ ID NO: 25432 - DNA, 20 bp, synthetic construct
  source 1..20: mol_type = other DNA
aaatgctgccatagcccatt

SEQ ID NO: 25433 - DNA, 20 bp, synthetic construct
  source 1..20: mol_type = other DNA
cggcggttcggcgccagcca

SEQ ID NO: 25434 - DNA, 20 bp, synthetic construct
  source 1..20: mol_type = other DNA
acatgccctgcagcccctag

SEQ ID NO: 25435 - DNA, 20 bp, synthetic construct
  source 1..20: mol_type = other DNA
catttctttgcgacttccct

SEQ ID NO: 25436 - DNA, 20 bp, synthetic construct
  source 1..20: mol_type = other DNA
acatcgcattttgatgcttg

SEQ ID NO: 25437 - DNA, 20 bp, synthetic construct
  source 1..20: mol_type = other DNA
agcagcaaattgtgggcccc

SEQ ID NO: 25438 - DNA, 20 bp, synthetic construct
  source 1..20: mol_type = other DNA
ttatgttgctgatcttgtgt

SEQ ID NO: 25439 - DNA, 20 bp, synthetic construct
  source 1..20: mol_type = other DNA
gggtcacagctttggtgatt

SEQ ID NO: 25440 - DNA, 20 bp, synthetic construct
  source 1..20: mol_type = other DNA
gcttgtccatggcacacctg

SEQ ID NO: 25441 - DNA, 20 bp, synthetic construct
  source 1..20: mol_type = other DNA
tagattttttgtggatgtta

SEQ ID NO: 25442 - DNA, 20 bp, synthetic construct
  source 1..20: mol_type = other DNA
tgaagaattgagaaaggaag

SEQ ID NO: 25443 - DNA, 20 bp, synthetic construct
  source 1..20: mol_type = other DNA
tgtcaataagctgttcaagc

SEQ ID NO: 25444 - DNA, 20 bp, synthetic construct
  source 1..20: mol_type = other DNA
gaagtcaaggctgattgagt

SEQ ID NO: 25445 - DNA, 20 bp, synthetic construct
  source 1..20: mol_type = other DNA
ctttccaatgaaggaaattt

SEQ ID NO: 25446 - DNA, 20 bp, synthetic construct
  source 1..20: mol_type = other DNA
gtacagtgtactgcgccagc

SEQ ID NO: 25447 - DNA, 20 bp, synthetic construct
  source 1..20: mol_type = other DNA
actgtgggcgacaggttatg

SEQ ID NO: 25448 - DNA, 20 bp, synthetic construct
  source 1..20: mol_type = other DNA
taacctgtatagtcagttga

SEQ ID NO: 25449 - DNA, 20 bp, synthetic construct
  source 1..20: mol_type = other DNA
tgcgtcggctcatggtgctg

SEQ ID NO: 25450 - DNA, 20 bp, synthetic construct
  source 1..20: mol_type = other DNA
tcttacagacttaggagttt

SEQ ID NO: 25451 - DNA, 20 bp, synthetic construct
  source 1..20: mol_type = other DNA
ggaagcaaaagatcttgaag

SEQ ID NO: 25452 - DNA, 20 bp, synthetic construct
  source 1..20: mol_type = other DNA
ggagctttcatatatgaatg

SEQ ID NO: 25453 - DNA, 20 bp, synthetic construct
  source 1..20: mol_type = other DNA
ggggtttcctattttaccgg

SEQ ID NO: 25454 - DNA, 20 bp, synthetic construct
  source 1..20: mol_type = other DNA
agctcccgccacacgcaaag

SEQ ID NO: 25455 - DNA, 20 bp, synthetic construct
  source 1..20: mol_type = other DNA
agttacatctgtaaatggtt

SEQ ID NO: 25456 - DNA, 20 bp, synthetic construct
  source 1..20: mol_type = other DNA
gaggacaaatggtgcttatc

SEQ ID NO: 25457 - DNA, 20 bp, synthetic construct
  source 1..20: mol_type = other DNA
tgttgcaatccgctgtgggg

SEQ ID NO: 25458 - DNA, 20 bp, synthetic construct
  source 1..20: mol_type = other DNA
taagtcattagtgacagaag

SEQ ID NO: 25459 - DNA, 20 bp, synthetic construct
  source 1..20: mol_type = other DNA
tcaaatggtatcctcaacag

SEQ ID NO: 25460 - DNA, 20 bp, synthetic construct
  source 1..20: mol_type = other DNA
accctcaaaggattacctta

SEQ ID NO: 25461 - DNA, 20 bp, synthetic construct
  source 1..20: mol_type = other DNA
ttctgttaagactaagaagg

SEQ ID NO: 25462 - DNA, 20 bp, synthetic construct
  source 1..20: mol_type = other DNA
gaatgataccatcctgatga

SEQ ID NO: 25463 - DNA, 20 bp, synthetic construct
  source 1..20: mol_type = other DNA
atccattcgctggtgcaagt

SEQ ID NO: 25464 - DNA, 20 bp, synthetic construct
  source 1..20: mol_type = other DNA
ggtcgcgtatggttgttggc

SEQ ID NO: 25465 - DNA, 20 bp, synthetic construct
  source 1..20: mol_type = other DNA
cgagtatagttcaggggcta

SEQ ID NO: 25466 - DNA, 20 bp, synthetic construct
  source 1..20: mol_type = other DNA
gtacccggagtaccagaaga

SEQ ID NO: 25467 - DNA, 20 bp, synthetic construct
  source 1..20: mol_type = other DNA
acagggtaatttattatccc

SEQ ID NO: 25468 - DNA, 20 bp, synthetic construct
  source 1..20: mol_type = other DNA
tcccaatcagtgtgcgcttg

SEQ ID NO: 25469 - DNA, 20 bp, synthetic construct
  source 1..20: mol_type = other DNA
gtcactaccacaacagctct

SEQ ID NO: 25470 - DNA, 20 bp, synthetic construct
  source 1..20: mol_type = other DNA
gggcatctcgtccgcttatg

SEQ ID NO: 25471 - DNA, 20 bp, synthetic construct
  source 1..20: mol_type = other DNA
ctgccggccagtcaattttg

SEQ ID NO: 25472 - DNA, 20 bp, synthetic construct
  source 1..20: mol_type = other DNA
ctccgagtacaaaccagtgt

SEQ ID NO: 25473 - DNA, 20 bp, synthetic construct
  source 1..20: mol_type = other DNA
gtctgagataccgtattttc

SEQ ID NO: 25474 - DNA, 20 bp, synthetic construct
  source 1..20: mol_type = other DNA
gaccacgatcaccacccttg

SEQ ID NO: 25475 - DNA, 20 bp, synthetic construct
  source 1..20: mol_type = other DNA
gcttatggagacctttgata

SEQ ID NO: 25476 - DNA, 20 bp, synthetic construct
  source 1..20: mol_type = other DNA
atgtggaaaggccgtgaaac

SEQ ID NO: 25477 - DNA, 20 bp, synthetic construct
  source 1..20: mol_type = other DNA
acaaaagatgaaggtaaaac

SEQ ID NO: 25478 - DNA, 20 bp, synthetic construct
  source 1..20: mol_type = other DNA
aaccctcgcctccttcatat

SEQ ID NO: 25479 - DNA, 20 bp, synthetic construct
  source 1..20: mol_type = other DNA
caaccgtcccaccaaattca

SEQ ID NO: 25480 - DNA, 20 bp, synthetic construct
  source 1..20: mol_type = other DNA
aaggcctatcaacctcaaca

SEQ ID NO: 25481 - DNA, 20 bp, synthetic construct
  source 1..20: mol_type = other DNA
agagctgtccctggctgtgg

SEQ ID NO: 25482 - DNA, 20 bp, synthetic construct
  source 1..20: mol_type = other DNA
caacaacctcattatcaaga

SEQ ID NO: 25483 - DNA, 20 bp, synthetic construct
  source 1..20: mol_type = other DNA
ctttgtcattgcccacctac

SEQ ID NO: 25484 - DNA, 20 bp, synthetic construct
  source 1..20: mol_type = other DNA
atggtgcactacatgatacg

SEQ ID NO: 25485 - DNA, 20 bp, synthetic construct
  source 1..20: mol_type = other DNA
gccgaagatgtattgtgacc

SEQ ID NO: 25486 - DNA, 20 bp, synthetic construct
  source 1..20: mol_type = other DNA
atgtgatgcacatctaggat

SEQ ID NO: 25487 - DNA, 20 bp, synthetic construct
  source 1..20: mol_type = other DNA
ccaaaacttggatccagcag

SEQ ID NO: 25488 - DNA, 20 bp, synthetic construct
  source 1..20: mol_type = other DNA
gtgtctacccaaaatccatt

SEQ ID NO: 25489 - DNA, 20 bp, synthetic construct
  source 1..20: mol_type = other DNA
acaatgggcaacatccctta

SEQ ID NO: 25490 - DNA, 20 bp, synthetic construct
  source 1..20: mol_type = other DNA
accggaagatgacaatcatg

SEQ ID NO: 25491 - DNA, 20 bp, synthetic construct
  source 1..20: mol_type = other DNA
aatgaagcaccaggaaacta

SEQ ID NO: 25492 - DNA, 20 bp, synthetic construct
  source 1..20: mol_type = other DNA
ctcgctcccacctgatccaa

SEQ ID NO: 25493 - DNA, 20 bp, synthetic construct
  source 1..20: mol_type = other DNA
tattagtgattttgttctag

SEQ ID NO: 25494 - DNA, 20 bp, synthetic construct
  source 1..20: mol_type = other DNA
tcatgaggtggatgtgcttt

SEQ ID NO: 25495 - DNA, 20 bp, synthetic construct
  source 1..20: mol_type = other DNA
gggaccaaccgctccaaaac

SEQ ID NO: 25496 - DNA, 20 bp, synthetic construct
  source 1..20: mol_type = other DNA
aggaccaggagcaccaaatc

SEQ ID NO: 25497 - DNA, 20 bp, synthetic construct
  source 1..20: mol_type = other DNA
cactgagcccctgaccctag

SEQ ID NO: 25498 - DNA, 20 bp, synthetic construct
  source 1..20: mol_type = other DNA
tggatgcaatccagacaggg

SEQ ID NO: 25499 - DNA, 20 bp, synthetic construct
  source 1..20: mol_type = other DNA
tgaccacatgtgcttttccg

SEQ ID NO: 25500 - DNA, 20 bp, synthetic construct
  source 1..20: mol_type = other DNA
agatgatgaatttgatttct

SEQ ID NO: 25501 - DNA, 20 bp, synthetic construct
  source 1..20: mol_type = other DNA
ctgaggacatcctcgaggat

SEQ ID NO: 25502 - DNA, 20 bp, synthetic construct
  source 1..20: mol_type = other DNA
ctgttcctcttcctaatcca

SEQ ID NO: 25503 - DNA, 20 bp, synthetic construct
  source 1..20: mol_type = other DNA
ctgctaattggggaacacaa

SEQ ID NO: 25504 - DNA, 20 bp, synthetic construct
  source 1..20: mol_type = other DNA
gtttagcattggtcatggtc

SEQ ID NO: 25505 - DNA, 20 bp, synthetic construct
  source 1..20: mol_type = other DNA
ccctcctgtctggttgcgca

SEQ ID NO: 25506 - DNA, 20 bp, synthetic construct
  source 1..20: mol_type = other DNA
ccttttccaagaccttcact

SEQ ID NO: 25507 - DNA, 20 bp, synthetic construct
  source 1..20: mol_type = other DNA
cctctgaatacttccactct

SEQ ID NO: 25508 - DNA, 20 bp, synthetic construct
  source 1..20: mol_type = other DNA
ttgagcgggctgtctcacag

SEQ ID NO: 25509 - DNA, 20 bp, synthetic construct
  source 1..20: mol_type = other DNA
gtcgcagcgcaagctgtggc

SEQ ID NO: 25510 - DNA, 20 bp, synthetic construct
  source 1..20: mol_type = other DNA
gccaacatcgtgacctccgt

SEQ ID NO: 25511 - DNA, 20 bp, synthetic construct
  source 1..20: mol_type = other DNA
gccgttcactctttgtccaa

SEQ ID NO: 25512 - DNA, 20 bp, synthetic construct
  source 1..20: mol_type = other DNA
ttgttgtaactccagcaaat

SEQ ID NO: 25513 - DNA, 20 bp, synthetic construct
  source 1..20: mol_type = other DNA
acaccagatacactcttgct

SEQ ID NO: 25514 - DNA, 20 bp, synthetic construct
  source 1..20: mol_type = other DNA
ttgactgctgtgggattgac

SEQ ID NO: 25515 - DNA, 20 bp, synthetic construct
  source 1..20: mol_type = other DNA
aaatctgatgaaaacccttc

SEQ ID NO: 25516 - DNA, 20 bp, synthetic construct
  source 1..20: mol_type = other DNA
gactaattccactaccccgg

SEQ ID NO: 25517 - DNA, 20 bp, synthetic construct
  source 1..20: mol_type = other DNA
ccgtaaaggatgcgtgacaa

SEQ ID NO: 25518 - DNA, 20 bp, synthetic construct
  source 1..20: mol_type = other DNA
ttacacggccgatatgtcag

SEQ ID NO: 25519 - DNA, 20 bp, synthetic construct
  source 1..20: mol_type = other DNA
aggagccatgtccactgccc

SEQ ID NO: 25520 - DNA, 20 bp, synthetic construct
  source 1..20: mol_type = other DNA
caccgccaccccgtatggaa

SEQ ID NO: 25521 - DNA, 20 bp, synthetic construct
  source 1..20: mol_type = other DNA
gaaaacaaaagtgtttttgg

SEQ ID NO: 25522 - DNA, 20 bp, synthetic construct
  source 1..20: mol_type = other DNA
taggaggtgtttgtggcctg

SEQ ID NO: 25523 - DNA, 20 bp, synthetic construct
  source 1..20: mol_type = other DNA
gacctgtcctggaacgacgg

SEQ ID NO: 25524 - DNA, 20 bp, synthetic construct
  source 1..20: mol_type = other DNA
tctggctccgttgcctttag

SEQ ID NO: 25525 - DNA, 20 bp, synthetic construct
  source 1..20: mol_type = other DNA
ggccaacgacatattccttg

SEQ ID NO: 25526 - DNA, 20 bp, synthetic construct
  source 1..20: mol_type = other DNA
catggccggcttccatcccc

SEQ ID NO: 25527 - DNA, 20 bp, synthetic construct
  source 1..20: mol_type = other DNA
gactactgaagtgcaactta

SEQ ID NO: 25528 - DNA, 20 bp, synthetic construct
  source 1..20: mol_type = other DNA
tgagatactgcgtgaagctg

SEQ ID NO: 25529 - DNA, 20 bp, synthetic construct
  source 1..20: mol_type = other DNA
aacattcacgtatcgtcagt

SEQ ID NO: 25530 - DNA, 20 bp, synthetic construct
  source 1..20: mol_type = other DNA
gacagacgctttccctgagt

SEQ ID NO: 25531 - DNA, 20 bp, synthetic construct
  source 1..20: mol_type = other DNA
ggacaacatcacagtgcctg

SEQ ID NO: 25532 - DNA, 20 bp, synthetic construct
  source 1..20: mol_type = other DNA
cacggaatttgcagagggca

SEQ ID NO: 25533 - DNA, 20 bp, synthetic construct
  source 1..20: mol_type = other DNA
ggctgaaactgctatgctta

SEQ ID NO: 25534 - DNA, 20 bp, synthetic construct
  source 1..20: mol_type = other DNA
taaagctgcccgggaagcac

SEQ ID NO: 25535 - DNA, 20 bp, synthetic construct
  source 1..20: mol_type = other DNA
tcgaagcacgctgcatatga

SEQ ID NO: 25536 - DNA, 20 bp, synthetic construct
  source 1..20: mol_type = other DNA
accaggacatgaggaaccag

SEQ ID NO: 25537 - DNA, 20 bp, synthetic construct
  source 1..20: mol_type = other DNA
agttacaagtgtttgcatga

SEQ ID NO: 25538 - DNA, 20 bp, synthetic construct
  source 1..20: mol_type = other DNA
aggcgtcattcatggagatg

SEQ ID NO: 25539 - DNA, 20 bp, synthetic construct
  source 1..20: mol_type = other DNA
agctacctgggctgataaca

SEQ ID NO: 25540 - DNA, 20 bp, synthetic construct
  source 1..20: mol_type = other DNA
acggatcatgcatcgttatg

SEQ ID NO: 25541 - DNA, 20 bp, synthetic construct
  source 1..20: mol_type = other DNA
gcagcagacgatctgttgct

SEQ ID NO: 25542 - DNA, 20 bp, synthetic construct
  source 1..20: mol_type = other DNA
gtaaaccaacagtggatttc

SEQ ID NO: 25543 - DNA, 20 bp, synthetic construct
  source 1..20: mol_type = other DNA
tggtcaagagagactggttc

SEQ ID NO: 25544 - DNA, 20 bp, synthetic construct
  source 1..20: mol_type = other DNA
cgtcagtcgagtggaactct

SEQ ID NO: 25545 - DNA, 20 bp, synthetic construct
  source 1..20: mol_type = other DNA
catatgctggaacagatgcg

SEQ ID NO: 25546 - DNA, 20 bp, synthetic construct
  source 1..20: mol_type = other DNA
ggggcaagacaatgtttgtt

SEQ ID NO: 25547 - DNA, 20 bp, synthetic construct
  source 1..20: mol_type = other DNA
cagaatactgcgacacggaa

SEQ ID NO: 25548 - DNA, 20 bp, synthetic construct
  source 1..20: mol_type = other DNA
ttctgcaaatttgtgcggct

SEQ ID NO: 25549 - DNA, 20 bp, synthetic construct
  source 1..20: mol_type = other DNA
taagagtcagcatggttaca

SEQ ID NO: 25550 - DNA, 20 bp, synthetic construct
  source 1..20: mol_type = other DNA
tgtttcacacaatgtggcac

SEQ ID NO: 25551 - DNA, 20 bp, synthetic construct
  source 1..20: mol_type = other DNA
aagatgaggaaagggaaatt

SEQ ID NO: 25552 - DNA, 20 bp, synthetic construct
  source 1..20: mol_type = other DNA
taagcccagctagtgcagca

SEQ ID NO: 25553 - DNA, 20 bp, synthetic construct
  source 1..20: mol_type = other DNA
agttctacgagccggaggct

SEQ ID NO: 25554 - DNA, 20 bp, synthetic construct
  source 1..20: mol_type = other DNA
gtgggccatctggacatctc

SEQ ID NO: 25555 - DNA, 20 bp, synthetic construct
  source 1..20: mol_type = other DNA
ctataatagaagtgctcggc

SEQ ID NO: 25556 - DNA, 20 bp, synthetic construct
  source 1..20: mol_type = other DNA
tcatgaccatgggaatacta

SEQ ID NO: 25557 - DNA, 20 bp, synthetic construct
  source 1..20: mol_type = other DNA
ttttcaacttggactggggc

SEQ ID NO: 25558 - DNA, 20 bp, synthetic construct
  source 1..20: mol_type = other DNA
acacccgagggatggaatgg

SEQ ID NO: 25559 - DNA, 20 bp, synthetic construct
  source 1..20: mol_type = other DNA
ggctggtagataaaggatat

SEQ ID NO: 25560 - DNA, 20 bp, synthetic construct
  source 1..20: mol_type = other DNA
acattgtcactctgcgtagc

SEQ ID NO: 25561 - DNA, 20 bp, synthetic construct
  source 1..20: mol_type = other DNA
tttgttgcaaggttcttgct

SEQ ID NO: 25562 - DNA, 20 bp, synthetic construct
  source 1..20: mol_type = other DNA
gcaagggaggaaagacgcta

SEQ ID NO: 25563 - DNA, 20 bp, synthetic construct
  source 1..20: mol_type = other DNA
caacaggctggaacagttgg

SEQ ID NO: 25564 - DNA, 20 bp, synthetic construct
  source 1..20: mol_type = other DNA
gtaaggcgtatgcgcaaatg

SEQ ID NO: 25565 - DNA, 20 bp, synthetic construct
  source 1..20: mol_type = other DNA
acccccccaaaaatgaaggg

SEQ ID NO: 25566 - DNA, 20 bp, synthetic construct
  source 1..20: mol_type = other DNA
ttctcttattttcactagtt

SEQ ID NO: 25567 - DNA, 20 bp, synthetic construct
  source 1..20: mol_type = other DNA
ccgtggaggatcgcccggga

SEQ ID NO: 25568 - DNA, 20 bp, synthetic construct
  source 1..20: mol_type = other DNA
cacgatattttcagttcttt

SEQ ID NO: 25569 - DNA, 20 bp, synthetic construct
  source 1..20: mol_type = other DNA
agtctccgatttttgggcgt

SEQ ID NO: 25570 - DNA, 20 bp, synthetic construct
  source 1..20: mol_type = other DNA
cttccaacgttataaaatgc

SEQ ID NO: 25571 - DNA, 20 bp, synthetic construct
  source 1..20: mol_type = other DNA
gtcgtggatggtatgtcatg

SEQ ID NO: 25572 - DNA, 20 bp, synthetic construct
  source 1..20: mol_type = other DNA
ctcatagttattcgcatgag

SEQ ID NO: 25573 - DNA, 20 bp, synthetic construct
  source 1..20: mol_type = other DNA
ccgcttttgtggatgccctt

SEQ ID NO: 25574 - DNA, 20 bp, synthetic construct
  source 1..20: mol_type = other DNA
ctttgtccttgagtgctcgt

SEQ ID NO: 25575 - DNA, 20 bp, synthetic construct
  source 1..20: mol_type = other DNA
aatatcagaatacgtgtgct

SEQ ID NO: 25576 - DNA, 20 bp, synthetic construct
  source 1..20: mol_type = other DNA
ggtatgctgggcaaccgatt

SEQ ID NO: 25577 - DNA, 20 bp, synthetic construct
  source 1..20: mol_type = other DNA
aatcagattggtcatctcgt

SEQ ID NO: 25578 - DNA, 20 bp, synthetic construct
  source 1..20: mol_type = other DNA
cagtgttcgactattgcgct

SEQ ID NO: 25579 - DNA, 20 bp, synthetic construct
  source 1..20: mol_type = other DNA
ctatgcttaaggaattggac

SEQ ID NO: 25580 - DNA, 20 bp, synthetic construct
  source 1..20: mol_type = other DNA
gccttgcatttggtggtaat

SEQ ID NO: 25581 - DNA, 20 bp, synthetic construct
  source 1..20: mol_type = other DNA
attttgactatgtttttagt

SEQ ID NO: 25582 - DNA, 20 bp, synthetic construct
  source 1..20: mol_type = other DNA
atggttctataccacgtcag

SEQ ID NO: 25583 - DNA, 20 bp, synthetic construct
  source 1..20: mol_type = other DNA
ctattgtcaatacagcttgt

SEQ ID NO: 25584 - DNA, 20 bp, synthetic construct
  source 1..20: mol_type = other DNA
ttgatggtgattatcccaag

SEQ ID NO: 25585 - DNA, 20 bp, synthetic construct
  source 1..20: mol_type = other DNA
tatcccagcgcgtggtggac

SEQ ID NO: 25586 - DNA, 20 bp, synthetic construct
  source 1..20: mol_type = other DNA
cttagtatcatggaaatgtg

SEQ ID NO: 25587 - DNA, 20 bp, synthetic construct
  source 1..20: mol_type = other DNA
atgggatctgatcagggcca

SEQ ID NO: 25588 - DNA, 20 bp, synthetic construct
  source 1..20: mol_type = other DNA
tgaccaaggattaatggctt

SEQ ID NO: 25589 - DNA, 20 bp, synthetic construct
  source 1..20: mol_type = other DNA
ctcctcccgcggtgtagata

SEQ ID NO: 25590 - DNA, 20 bp, synthetic construct
  source 1..20: mol_type = other DNA
tggttccggcgatggttaca

SEQ ID NO: 25591 - DNA, 20 bp, synthetic construct
  source 1..20: mol_type = other DNA
ccccggttttgctgccccat

SEQ ID NO: 25592 - DNA, 20 bp, synthetic construct
  source 1..20: mol_type = other DNA
cccaatcaagaccaatactc

SEQ ID NO: 25593 - DNA, 20 bp, synthetic construct
  source 1..20: mol_type = other DNA
atacaacctgcagaactcag

SEQ ID NO: 25594 - DNA, 20 bp, synthetic construct
  source 1..20: mol_type = other DNA
tgtccccgccccccgtcccg

SEQ ID NO: 25595 - DNA, 20 bp, synthetic construct
  source 1..20: mol_type = other DNA
tggtcaatctgttcacattg

SEQ ID NO: 25596 - DNA, 20 bp, synthetic construct
  source 1..20: mol_type = other DNA
taggcttactgtagatatgg

SEQ ID NO: 25597 - DNA, 20 bp, synthetic construct
  source 1..20: mol_type = other DNA
cgaggaagcgattcgtgaaa

SEQ ID NO: 25598 - DNA, 20 bp, synthetic construct
  source 1..20: mol_type = other DNA
tcgccttgtcggtgtacatg

SEQ ID NO: 25599 - DNA, 20 bp, synthetic construct
  source 1..20: mol_type = other DNA
ccattccaatcctggtatgt

SEQ ID NO: 25600 - DNA, 20 bp, synthetic construct
  source 1..20: mol_type = other DNA
gtctgccctcatctcccgtc

SEQ ID NO: 25601 - DNA, 20 bp, synthetic construct
  source 1..20: mol_type = other DNA
tttccctaactcctcttctc

SEQ ID NO: 25602 - DNA, 20 bp, synthetic construct
  source 1..20: mol_type = other DNA
tgctcaccacgctggtcccc

SEQ ID NO: 25603 - DNA, 20 bp, synthetic construct
  source 1..20: mol_type = other DNA
aggtgctctggccgagctaa

SEQ ID NO: 25604 - DNA, 20 bp, synthetic construct
  source 1..20: mol_type = other DNA
gctcattgggaagagttacc

SEQ ID NO: 25605 - DNA, 20 bp, synthetic construct
  source 1..20: mol_type = other DNA
gaaagtagttgtgtccgaga

SEQ ID NO: 25606 - DNA, 20 bp, synthetic construct
  source 1..20: mol_type = other DNA
ttgggtgattctcattctga

SEQ ID NO: 25607 - DNA, 20 bp, synthetic construct
  source 1..20: mol_type = other DNA
aagatttatgcatggcttcc

SEQ ID NO: 25608 - DNA, 20 bp, synthetic construct
  source 1..20: mol_type = other DNA
aggttggatatacaagtgcg

SEQ ID NO: 25609 - DNA, 20 bp, synthetic construct
  source 1..20: mol_type = other DNA
gaagagtatgcaggagcttt

SEQ ID NO: 25610 - DNA, 20 bp, synthetic construct
  source 1..20: mol_type = other DNA
atgcaattagtaggtgctcg

SEQ ID NO: 25611 - DNA, 20 bp, synthetic construct
  source 1..20: mol_type = other DNA
ggtgagttcatagtagataa

SEQ ID NO: 25612 - DNA, 20 bp, synthetic construct
  source 1..20: mol_type = other DNA
aatcaagggttggctttggc

SEQ ID NO: 25613 - DNA, 20 bp, synthetic construct
  source 1..20: mol_type = other DNA
aaggtgtgtgagtggtttaa

SEQ ID NO: 25614 - DNA, 20 bp, synthetic construct
  source 1..20: mol_type = other DNA
gaaaacacgcgtcaggagac

SEQ ID NO: 25615 - DNA, 20 bp, synthetic construct
  source 1..20: mol_type = other DNA
atagtgaactagtatcagat

SEQ ID NO: 25616 - DNA, 20 bp, synthetic construct
  source 1..20: mol_type = other DNA
cctatgtacttcagcgttac

SEQ ID NO: 25617 - DNA, 20 bp, synthetic construct
  source 1..20: mol_type = other DNA
cttcttatgtggcgcaagat

SEQ ID NO: 25618 - DNA, 20 bp, synthetic construct
  source 1..20: mol_type = other DNA
ttaccttacctggtatcaat

SEQ ID NO: 25619 - DNA, 20 bp, synthetic construct
  source 1..20: mol_type = other DNA
ctaatgcttatcagtttgat

SEQ ID NO: 25620 - DNA, 20 bp, synthetic construct
  source 1..20: mol_type = other DNA
atgaatattttgttcttgct

SEQ ID NO: 25621 - DNA, 20 bp, synthetic construct
  source 1..20: mol_type = other DNA
aatgtgatcacttcggtgag

SEQ ID NO: 25622 - DNA, 20 bp, synthetic construct
  source 1..20: mol_type = other DNA
agttttggatagtgaaggat

SEQ ID NO: 25623 - DNA, 20 bp, synthetic construct
  source 1..20: mol_type = other DNA
tggtgccacagtttgtttac

SEQ ID NO: 25624 - DNA, 20 bp, synthetic construct
  source 1..20: mol_type = other DNA
agactcctgaggttacagct

SEQ ID NO: 25625 - DNA, 20 bp, synthetic construct
  source 1..20: mol_type = other DNA
cacctttcccctcttcagat

SEQ ID NO: 25626 - DNA, 20 bp, synthetic construct
  source 1..20: mol_type = other DNA
ccaacatggggccaaagatt

SEQ ID NO: 25627 - DNA, 20 bp, synthetic construct
  source 1..20: mol_type = other DNA
gctttagggaaagaatgcaa

SEQ ID NO: 25628 - DNA, 20 bp, synthetic construct
  source 1..20: mol_type = other DNA
tgttctctagtgcgtgcttg

SEQ ID NO: 25629 - DNA, 20 bp, synthetic construct
  source 1..20: mol_type = other DNA
tgtggaatgatgcaacacac

SEQ ID NO: 25630 - DNA, 20 bp, synthetic construct
  source 1..20: mol_type = other DNA
gcagtgttgttgttgttgac

SEQ ID NO: 25631 - DNA, 20 bp, synthetic construct
  source 1..20: mol_type = other DNA
gaggagcccgcttttatgca

SEQ ID NO: 25632 - DNA, 20 bp, synthetic construct
  source 1..20: mol_type = other DNA
cggatgaaggcttggacatg

SEQ ID NO: 25633 - DNA, 20 bp, synthetic construct
  source 1..20: mol_type = other DNA
ctaccttttcctttcaatgc

SEQ ID NO: 25634 - DNA, 20 bp, synthetic construct
  source 1..20: mol_type = other DNA
aacatcgtggcgagcaggac

SEQ ID NO: 25635 - DNA, 20 bp, synthetic construct
  source 1..20: mol_type = other DNA
aaagaagaaaagaggaggaa

SEQ ID NO: 25636 - DNA, 20 bp, synthetic construct
  source 1..20: mol_type = other DNA
cacagtccatcatcatggcg

SEQ ID NO: 25637 - DNA, 20 bp, synthetic construct
  source 1..20: mol_type = other DNA
caaaatgatgaacatggagg

SEQ ID NO: 25638 - DNA, 20 bp, synthetic construct
  source 1..20: mol_type = other DNA
gttccatgatttaaatctgc

SEQ ID NO: 25639 - DNA, 20 bp, synthetic construct
  source 1..20: mol_type = other DNA
aagcagcaagctggaaatga

SEQ ID NO: 25640 - DNA, 20 bp, synthetic construct
  source 1..20: mol_type = other DNA
tcaaattaaatatcagtggc

SEQ ID NO: 25641 - DNA, 20 bp, synthetic construct
  source 1..20: mol_type = other DNA
acacaacatgtgggattcga

SEQ ID NO: 25642 - DNA, 20 bp, synthetic construct
  source 1..20: mol_type = other DNA
ctttacgagtccaggcatgt

SEQ ID NO: 25643 - DNA, 20 bp, synthetic construct
  source 1..20: mol_type = other DNA
atcagctcgaaccaccactg

SEQ ID NO: 25644 - DNA, 20 bp, synthetic construct
  source 1..20: mol_type = other DNA
aggcgatggcatggaaccat

SEQ ID NO: 25645 - DNA, 20 bp, synthetic construct
  source 1..20: mol_type = other DNA
gcaagattgggacatgacaa

SEQ ID NO: 25646 - DNA, 20 bp, synthetic construct
  source 1..20: mol_type = other DNA
catagggattatgtcgctga

SEQ ID NO: 25647 - DNA, 20 bp, synthetic construct
  source 1..20: mol_type = other DNA
actgacagccgttggattga

SEQ ID NO: 25648 - DNA, 20 bp, synthetic construct
  source 1..20: mol_type = other DNA
gctcacagtcaaggctccga

SEQ ID NO: 25649 - DNA, 20 bp, synthetic construct
  source 1..20: mol_type = other DNA
cgttatggatgaagcacatt

SEQ ID NO: 25650 - DNA, 20 bp, synthetic construct
  source 1..20: mol_type = other DNA
acaaaggaggggaagagtgg

SEQ ID NO: 25651 - DNA, 20 bp, synthetic construct
  source 1..20: mol_type = other DNA
agagaaggtcttttccattg

SEQ ID NO: 25652 - DNA, 20 bp, synthetic construct
  source 1..20: mol_type = other DNA
gcctcttcttttactcggat

SEQ ID NO: 25653 - DNA, 20 bp, synthetic construct
  source 1..20: mol_type = other DNA
aatagtcgccacagacatac

SEQ ID NO: 25654 - DNA, 20 bp, synthetic construct
  source 1..20: mol_type = other DNA
gccacacggaaaggttatag

SEQ ID NO: 25655 - DNA, 20 bp, synthetic construct
  source 1..20: mol_type = other DNA
gcccaaggtgcttaaagagc

SEQ ID NO: 25656 - DNA, 20 bp, synthetic construct
  source 1..20: mol_type = other DNA
ttggaactatcatggaagtt

SEQ ID NO: 25657 - DNA, 20 bp, synthetic construct
  source 1..20: mol_type = other DNA
catgtggttaggttcaagat

SEQ ID NO: 25658 - DNA, 20 bp, synthetic construct
  source 1..20: mol_type = other DNA
cgtcatctcacgggaagacc

SEQ ID NO: 25659 - DNA, 20 bp, synthetic construct
  source 1..20: mol_type = other DNA
ggcgatagtcaggccaggca

SEQ ID NO: 25660 - DNA, 20 bp, synthetic construct
  source 1..20: mol_type = other DNA
gtaggttttacgccactagc

SEQ ID NO: 25661 - DNA, 20 bp, synthetic construct
  source 1..20: mol_type = other DNA
atggtgtgccccttgtggaa

SEQ ID NO: 25662 - DNA, 20 bp, synthetic construct
  source 1..20: mol_type = other DNA
ttgagatgctacgtggacga

SEQ ID NO: 25663 - DNA, 20 bp, synthetic construct
  source 1..20: mol_type = other DNA
acttccacgtaagggagatt

SEQ ID NO: 25664 - DNA, 20 bp, synthetic construct
  source 1..20: mol_type = other DNA
gaagttttcttttgcgggta

SEQ ID NO: 25665 - DNA, 20 bp, synthetic construct
  source 1..20: mol_type = other DNA
gaaccccaaagactgtgata

SEQ ID NO: 25666 - DNA, 20 bp, synthetic construct
  source 1..20: mol_type = other DNA
tgctatagcaaaaacaactg

SEQ ID NO: 25667 - DNA, 20 bp, synthetic construct
  source 1..20: mol_type = other DNA
tctcgtttgcccaattgggt

SEQ ID NO: 25668 - DNA, 20 bp, synthetic construct
  source 1..20: mol_type = other DNA
cagacatggggtgataatag

SEQ ID NO: 25669 - DNA, 20 bp, synthetic construct
  source 1..20: mol_type = other DNA
ccccacgacaataccactta

SEQ ID NO: 25670 - DNA, 20 bp, synthetic construct
  source 1..20: mol_type = other DNA
agaagttgcagggggaacaa

SEQ ID NO: 25671 - DNA, 20 bp, synthetic construct
  source 1..20: mol_type = other DNA
tacgtcactgctgaaaatca

SEQ ID NO: 25672 - DNA, 20 bp, synthetic construct
  source 1..20: mol_type = other DNA
gaatagaggagaatttaaac

SEQ ID NO: 25673 - DNA, 20 bp, synthetic construct
  source 1..20: mol_type = other DNA
atcattcaatctgagaattg

SEQ ID NO: 25674 - DNA, 20 bp, synthetic construct
  source 1..20: mol_type = other DNA
acaagctgccactgatctag

SEQ ID NO: 25675 - DNA, 20 bp, synthetic construct
  source 1..20: mol_type = other DNA
acaaaatcctgtatcggttg

SEQ ID NO: 25676 - DNA, 20 bp, synthetic construct
  source 1..20: mol_type = other DNA
aataatggccctgtttgaag

SEQ ID NO: 25677 - DNA, 20 bp, synthetic construct
  source 1..20: mol_type = other DNA
caaaggtacattccttacta

SEQ ID NO: 25678 - DNA, 20 bp, synthetic construct
  source 1..20: mol_type = other DNA
gttcgaagagctcatgcttc

SEQ ID NO: 25679 - DNA, 20 bp, synthetic construct
  source 1..20: mol_type = other DNA
cgtgtacaacaagattatag

SEQ ID NO: 25680 - DNA, 20 bp, synthetic construct
  source 1..20: mol_type = other DNA
attcaacaccctgaagaaaa

SEQ ID NO: 25681 - DNA, 20 bp, synthetic construct
  source 1..20: mol_type = other DNA
acagaagccggtggtaatac

SEQ ID NO: 25682 - DNA, 20 bp, synthetic construct
  source 1..20: mol_type = other DNA
ggcatatgaaaaagccgttg

SEQ ID NO: 25683 - DNA, 20 bp, synthetic construct
  source 1..20: mol_type = other DNA
cagtcggcagggtcgacccc

SEQ ID NO: 25684 - DNA, 20 bp, synthetic construct
  source 1..20: mol_type = other DNA
ccgcccttttaacgcttcgg

SEQ ID NO: 25685 - DNA, 20 bp, synthetic construct
  source 1..20: mol_type = other DNA
gctgcataaatcccccccct

SEQ ID NO: 25686 - DNA, 20 bp, synthetic construct
  source 1..20: mol_type = other DNA
gggagctgtatggcgcgggg

SEQ ID NO: 25687 - DNA, 20 bp, synthetic construct
  source 1..20: mol_type = other DNA
agcttcctggcgctctctgg

SEQ ID NO: 25688 - DNA, 20 bp, synthetic construct
  source 1..20: mol_type = other DNA
gccctaaaatttctgaccat

SEQ ID NO: 25689 - DNA, 20 bp, synthetic construct
  source 1..20: mol_type = other DNA
tggcttggttccctgtggaa

SEQ ID NO: 25690 - DNA, 20 bp, synthetic construct
  source 1..20: mol_type = other DNA
gctttgactatgtcggccca

SEQ ID NO: 25691 - DNA, 20 bp, synthetic construct
  source 1..20: mol_type = other DNA
ggtctgccttgggcttggag

SEQ ID NO: 25692 - DNA, 20 bp, synthetic construct
  source 1..20: mol_type = other DNA
tccttgaagcttgcctctgt

SEQ ID NO: 25693 - DNA, 20 bp, synthetic construct
  source 1..20: mol_type = other DNA
tcctgaaggaattggagtgc

SEQ ID NO: 25694 - DNA, 20 bp, synthetic construct
  source 1..20: mol_type = other DNA
tgttcacaacgtggcactcc

SEQ ID NO: 25695 - DNA, 20 bp, synthetic construct
  source 1..20: mol_type = other DNA
atgggggcctagcccatgga

SEQ ID NO: 25696 - DNA, 20 bp, synthetic construct
  source 1..20: mol_type = other DNA
gctatgttgagccctggaag

SEQ ID NO: 25697 - DNA, 20 bp, synthetic construct
  source 1..20: mol_type = other DNA
tccttgttctaaatcctagc

SEQ ID NO: 25698 - DNA, 20 bp, synthetic construct
  source 1..20: mol_type = other DNA
gcctcctgcgggcctacgca

SEQ ID NO: 25699 - DNA, 20 bp, synthetic construct
  source 1..20: mol_type = other DNA
ctgctggaccgattctgttg

SEQ ID NO: 25700 - DNA, 20 bp, synthetic construct
  source 1..20: mol_type = other DNA
ggacggcgcttacaggaaat

SEQ ID NO: 25701 - DNA, 20 bp, synthetic construct
  source 1..20: mol_type = other DNA
gtactggtacccccgaagca

SEQ ID NO: 25702 - DNA, 20 bp, synthetic construct
  source 1..20: mol_type = other DNA
aggacgtcactgctcgtgca

SEQ ID NO: 25703 - DNA, 20 bp, synthetic construct
  source 1..20: mol_type = other DNA
ttgcttatgtgaaggacagg

SEQ ID NO: 25704 - DNA, 20 bp, synthetic construct
  source 1..20: mol_type = other DNA
tgcccgagattatcccccct

SEQ ID NO: 25705 - DNA, 20 bp, synthetic construct
  source 1..20: mol_type = other DNA
ccggcgtcacccccacgcag

SEQ ID NO: 25706 - DNA, 20 bp, synthetic construct
  source 1..20: mol_type = other DNA
tcttcgcgtgcaaccatgct

SEQ ID NO: 25707 - DNA, 20 bp, synthetic construct
  source 1..20: mol_type = other DNA
ctgcctgtcgcaagataggc

SEQ ID NO: 25708 - DNA, 20 bp, synthetic construct
  source 1..20: mol_type = other DNA
tgttgattccgacactgctt

SEQ ID NO: 25709 - DNA, 20 bp, synthetic construct
  source 1..20: mol_type = other DNA
cactgtcagaagcacaaaaa

SEQ ID NO: 25710 - DNA, 20 bp, synthetic construct
  source 1..20: mol_type = other DNA
acttaattgtggggatgtcg

SEQ ID NO: 25711 - DNA, 20 bp, synthetic construct
  source 1..20: mol_type = other DNA
ccgccaatctaactctacgt

SEQ ID NO: 25712 - DNA, 20 bp, synthetic construct
  source 1..20: mol_type = other DNA
ggagcgtgtggcccgcagcc

SEQ ID NO: 25713 - DNA, 20 bp, synthetic construct
  source 1..20: mol_type = other DNA
ccgaggggacgtgttccaga

SEQ ID NO: 25714 - DNA, 20 bp, synthetic construct
  source 1..20: mol_type = other DNA
gatgtacgccatgaagtgcc

SEQ ID NO: 25715 - DNA, 20 bp, synthetic construct
  source 1..20: mol_type = other DNA
catgaacggtggggacctgc

SEQ ID NO: 25716 - DNA, 20 bp, synthetic construct
  source 1..20: mol_type = other DNA
ccccttccggcagcacaaga

SEQ ID NO: 25717 - DNA, 20 bp, synthetic construct
  source 1..20: mol_type = other DNA
gaaagagagcccctttttcc

SEQ ID NO: 25718 - DNA, 20 bp, synthetic construct
  source 1..20: mol_type = other DNA
cctcaagatccgcggtggga

SEQ ID NO: 25719 - DNA, 20 bp, synthetic construct
  source 1..20: mol_type = other DNA
ctgcactctgtgcccatggg

SEQ ID NO: 25720 - DNA, 20 bp, synthetic construct
  source 1..20: mol_type = other DNA
ccagcacccgggctcaggga

SEQ ID NO: 25721 - DNA, 20 bp, synthetic construct
  source 1..20: mol_type = other DNA
cagctatgcgggttgacaat

SEQ ID NO: 25722 - DNA, 20 bp, synthetic construct
  source 1..20: mol_type = other DNA
atgtctggtggcttatggct

SEQ ID NO: 25723 - DNA, 20 bp, synthetic construct
  source 1..20: mol_type = other DNA
accttacagtttggccttct

SEQ ID NO: 25724 - DNA, 20 bp, synthetic construct
  source 1..20: mol_type = other DNA
atgtggttcctgcgtccgcg

SEQ ID NO: 25725 - DNA, 20 bp, synthetic construct
  source 1..20: mol_type = other DNA
ttcgccggcttggttgctta

SEQ ID NO: 25726 - DNA, 20 bp, synthetic construct
  source 1..20: mol_type = other DNA
gtcagactttcgcgggtctt

SEQ ID NO: 25727 - DNA, 20 bp, synthetic construct
  source 1..20: mol_type = other DNA
tcgggcgaggttactcgctc

SEQ ID NO: 25728 - DNA, 20 bp, synthetic construct
  source 1..20: mol_type = other DNA
tgacaccgtaacagactgtg

SEQ ID NO: 25729 - DNA, 20 bp, synthetic construct
  source 1..20: mol_type = other DNA
gaggacagtgcctgttggcg

SEQ ID NO: 25730 - DNA, 20 bp, synthetic construct
  source 1..20: mol_type = other DNA
cgttcggagggcggtgcgag

SEQ ID NO: 25731 - DNA, 20 bp, synthetic construct
  source 1..20: mol_type = other DNA
atctggcagtgttgccggta

SEQ ID NO: 25732 - DNA, 20 bp, synthetic construct
  source 1..20: mol_type = other DNA
agaggtatctactcctatat

SEQ ID NO: 25733 - DNA, 20 bp, synthetic construct
  source 1..20: mol_type = other DNA
taccaaagtttatgttactg

SEQ ID NO: 25734 - DNA, 20 bp, synthetic construct
  source 1..20: mol_type = other DNA
agttaggcgccgagcagccg

SEQ ID NO: 25735 - DNA, 20 bp, synthetic construct
  source 1..20: mol_type = other DNA
aagattcatagttttcccac

SEQ ID NO: 25736 - DNA, 20 bp, synthetic construct
  source 1..20: mol_type = other DNA
gtgtaggtcgtcgggcgtgt

SEQ ID NO: 25737 - DNA, 20 bp, synthetic construct
  source 1..20: mol_type = other DNA
cctactgaagtagacgtaat

SEQ ID NO: 25738 - DNA, 20 bp, synthetic construct
  source 1..20: mol_type = other DNA
tccacaggtgttggtcctac

SEQ ID NO: 25739 - DNA, 20 bp, synthetic construct
  source 1..20: mol_type = other DNA
gctggagcagcgtattgtca

SEQ ID NO: 25740 - DNA, 20 bp, synthetic construct
  source 1..20: mol_type = other DNA
tgggaacgtcacacttttgt

SEQ ID NO: 25741 - DNA, 20 bp, synthetic construct
  source 1..20: mol_type = other DNA
gggttctgtgtcttggtttg

SEQ ID NO: 25742 - DNA, 20 bp, synthetic construct
  source 1..20: mol_type = other DNA
caggcggcctgcctcgtgtg

SEQ ID NO: 25743 - DNA, 20 bp, synthetic construct
  source 1..20: mol_type = other DNA
ggatgcgggcaacttcattc

SEQ ID NO: 25744 - DNA, 20 bp, synthetic construct
  source 1..20: mol_type = other DNA
gatggggatttccgccactc

SEQ ID NO: 25745 - DNA, 20 bp, synthetic construct
  source 1..20: mol_type = other DNA
tttcgacgcgctcgattggg

SEQ ID NO: 25746 - DNA, 20 bp, synthetic construct
  source 1..20: mol_type = other DNA
gcacaaggtcctgattctca

SEQ ID NO: 25747 - DNA, 20 bp, synthetic construct
  source 1..20: mol_type = other DNA
atccataattgagacaaagc

SEQ ID NO: 25748 - DNA, 20 bp, synthetic construct
  source 1..20: mol_type = other DNA
gggtaaggacagttccatca

SEQ ID NO: 25749 - DNA, 20 bp, synthetic construct
  source 1..20: mol_type = other DNA
tgcttcggctgaattgtcga

SEQ ID NO: 25750 - DNA, 20 bp, synthetic construct
  source 1..20: mol_type = other DNA
cccggtagaccatcggccgg

SEQ ID NO: 25751 - DNA, 20 bp, synthetic construct
  source 1..20: mol_type = other DNA
gtggctcgctggctgctaca

SEQ ID NO: 25752 - DNA, 20 bp, synthetic construct
  source 1..20: mol_type = other DNA
ggggtacgtctgggatctgt

SEQ ID NO: 25753 - DNA, 20 bp, synthetic construct
  source 1..20: mol_type = other DNA
tgaggtggtggtgaccccta

SEQ ID NO: 25754 - DNA, 20 bp, synthetic construct
  source 1..20: mol_type = other DNA
tgttaccattgatggggagc

SEQ ID NO: 25755 - DNA, 20 bp, synthetic construct
  source 1..20: mol_type = other DNA
gacctcctcgcaggaggaca

SEQ ID NO: 25756 - DNA, 20 bp, synthetic construct
  source 1..20: mol_type = other DNA
ggcacgccaagagacccttg

SEQ ID NO: 25757 - DNA, 20 bp, synthetic construct
  source 1..20: mol_type = other DNA
gctcattctgggagacccgg

SEQ ID NO: 25758 - DNA, 20 bp, synthetic construct
  source 1..20: mol_type = other DNA
agggagtggtactctgttat

SEQ ID NO: 25759 - DNA, 20 bp, synthetic construct
  source 1..20: mol_type = other DNA
caaacaatggacaaggtgtg

SEQ ID NO: 25760 - DNA, 20 bp, synthetic construct
  source 1..20: mol_type = other DNA
ggtatttttggtgaaaacat

SEQ ID NO: 25761 - DNA, 20 bp, synthetic construct
  source 1..20: mol_type = other DNA
ttttgtggtactgccaacac

SEQ ID NO: 25762 - DNA, 20 bp, synthetic construct
  source 1..20: mol_type = other DNA
aacacatcaccaggtagatc

SEQ ID NO: 25763 - DNA, 20 bp, synthetic construct
  source 1..20: mol_type = other DNA
atagcacagaaccctgttga

SEQ ID NO: 25764 - DNA, 20 bp, synthetic construct
  source 1..20: mol_type = other DNA
ttcacctatactaggtttga

SEQ ID NO: 25765 - DNA, 20 bp, synthetic construct
  source 1..20: mol_type = other DNA
atgtatgttcatgtaggtaa

SEQ ID NO: 25766 - DNA, 20 bp, synthetic construct
  source 1..20: mol_type = other DNA
aaaattattaaatggatgtt

SEQ ID NO: 25767 - DNA, 20 bp, synthetic construct
  source 1..20: mol_type = other DNA
aatccagccggggatgacat

SEQ ID NO: 25768 - DNA, 20 bp, synthetic construct
  source 1..20: mol_type = other DNA
tcttgcaacaaatacagcct

SEQ ID NO: 25769 - DNA, 20 bp, synthetic construct
  source 1..20: mol_type = other DNA
attaagtattgtgagggtaa

SEQ ID NO: 25770 - DNA, 20 bp, synthetic construct
  source 1..20: mol_type = other DNA
cctggttcaaaagaaccagc

SEQ ID NO: 25771 - DNA, 20 bp, synthetic construct
  source 1..20: mol_type = other DNA
aaacctattacacttgagga

SEQ ID NO: 25772 - DNA, 20 bp, synthetic construct
  source 1..20: mol_type = other DNA
gcagttggatgtgatccaga

SEQ ID NO: 25773 - DNA, 20 bp, synthetic construct
  source 1..20: mol_type = other DNA
ctatgcaagtctaaacacat

SEQ ID NO: 25774 - DNA, 20 bp, synthetic construct
  source 1..20: mol_type = other DNA
tatggtgatgatgtcatatt

SEQ ID NO: 25775 - DNA, 20 bp, synthetic construct
  source 1..20: mol_type = other DNA
aagaacaggtactatgagcc

SEQ ID NO: 25776 - DNA, 20 bp, synthetic construct
  source 1..20: mol_type = other DNA
ggccacaacctttttgatct

SEQ ID NO: 25777 - DNA, 20 bp, synthetic construct
  source 1..20: mol_type = other DNA
cctctgctgcttctccttgg

SEQ ID NO: 25778 - DNA, 20 bp, synthetic construct
  source 1..20: mol_type = other DNA
tttttttgtttttccccttt

SEQ ID NO: 25779 - DNA, 20 bp, synthetic construct
  source 1..20: mol_type = other DNA
cttttacaacagggggagaa

SEQ ID NO: 25780 - DNA, 20 bp, synthetic construct
  source 1..20: mol_type = other DNA
ccgagccgcccgatctgttt

SEQ ID NO: 25781 - DNA, 20 bp, synthetic construct
  source 1..20: mol_type = other DNA
cttccgaagagtgcgtgttt

SEQ ID NO: 25782 - DNA, 20 bp, synthetic construct
  source 1..20: mol_type = other DNA
ccttcttatgattgttgttt

SEQ ID NO: 25783 - DNA, 20 bp, synthetic construct
  source 1..20: mol_type = other DNA
caaggctacttaaaaaaatc

SEQ ID NO: 25784 - DNA, 20 bp, synthetic construct
  source 1..20: mol_type = other DNA
agtctcagctcttgcttttc

SEQ ID NO: 25785 - DNA, 20 bp, synthetic construct
  source 1..20: mol_type = other DNA
tggccttgttacgggagata

SEQ ID NO: 25786 - DNA, 20 bp, synthetic construct
  source 1..20: mol_type = other DNA
tgtttgctgatcgttttact

SEQ ID NO: 25787 - DNA, 20 bp, synthetic construct
  source 1..20: mol_type = other DNA
ctgcaagcaagattcgtgga

SEQ ID NO: 25788 - DNA, 20 bp, synthetic construct
  source 1..20: mol_type = other DNA
gtggaaaactcctgttgccg

SEQ ID NO: 25789 - DNA, 20 bp, synthetic construct
  source 1..20: mol_type = other DNA
ccaggcgcgtcctgccttca

SEQ ID NO: 25790 - DNA, 20 bp, synthetic construct
  source 1..20: mol_type = other DNA
tgctgttcggagtttaatca

SEQ ID NO: 25791 - DNA, 20 bp, synthetic construct
  source 1..20: mol_type = other DNA
cgactcctgattcattggga

SEQ ID NO: 25792 - DNA, 20 bp, synthetic construct
  source 1..20: mol_type = other DNA
taacctttcagcatcacaga

SEQ ID NO: 25793 - DNA, 20 bp, synthetic construct
  source 1..20: mol_type = other DNA
atttcctgcgtctcatgcca

SEQ ID NO: 25794 - DNA, 20 bp, synthetic construct
  source 1..20: mol_type = other DNA
taaaaatcttagttcatgtg

SEQ ID NO: 25795 - DNA, 20 bp, synthetic construct
  source 1..20: mol_type = other DNA
cccatagcagcgggcgggca

SEQ ID NO: 25796 - DNA, 20 bp, synthetic construct
  source 1..20: mol_type = other DNA
aggacgcgactctcccgacg

SEQ ID NO: 25797 - DNA, 20 bp, synthetic construct
  source 1..20: mol_type = other DNA
gcggggaggctattctgccc

SEQ ID NO: 25798 - DNA, 20 bp, synthetic construct
  source 1..20: mol_type = other DNA
ctttcccctcccttccctat

SEQ ID NO: 25799 - DNA, 20 bp, synthetic construct
  source 1..20: mol_type = other DNA
acttggggactgctggtggg

SEQ ID NO: 25800 - DNA, 20 bp, synthetic construct
  source 1..20: mol_type = other DNA
gtgtatatatgtatgtgtgt

SEQ ID NO: 25801 - DNA, 20 bp, synthetic construct
  source 1..20: mol_type = other DNA
gaggccaacctactaacagg

SEQ ID NO: 25802 - DNA, 20 bp, synthetic construct
  source 1..20: mol_type = other DNA
ttcttctcatggggtttctc

SEQ ID NO: 25803 - DNA, 20 bp, synthetic construct
  source 1..20: mol_type = other DNA
gagagagaggacaagtggat

SEQ ID NO: 25804 - DNA, 20 bp, synthetic construct
  source 1..20: mol_type = other DNA
catcgcctccttttctggga

SEQ ID NO: 25805 - DNA, 20 bp, synthetic construct
  source 1..20: mol_type = other DNA
gctggccaccttcggaacca

SEQ ID NO: 25806 - DNA, 20 bp, synthetic construct
  source 1..20: mol_type = other DNA
gttcactgtgcagggattgt

SEQ ID NO: 25807 - DNA, 20 bp, synthetic construct
  source 1..20: mol_type = other DNA
tcgcgggaaactgaagtggt

SEQ ID NO: 25808 - DNA, 20 bp, synthetic construct
  source 1..20: mol_type = other DNA
tagtttcattgtggtataaa

SEQ ID NO: 25809 - DNA, 20 bp, synthetic construct
  source 1..20: mol_type = other DNA
cggtcctcgcagagttgcgg

SEQ ID NO: 25810 - DNA, 20 bp, synthetic construct
  source 1..20: mol_type = other DNA
ctaattcccttctttgggct

SEQ ID NO: 25811 - DNA, 20 bp, synthetic construct
  source 1..20: mol_type = other DNA
agctggccggcggaggcgtg

SEQ ID NO: 25812 - DNA, 20 bp, synthetic construct
  source 1..20: mol_type = other DNA
aaactcgacccgggaacaaa

SEQ ID NO: 25813 - DNA, 20 bp, synthetic construct
  source 1..20: mol_type = other DNA
ctccgcagtgccctccactg

SEQ ID NO: 25814 - DNA, 20 bp, synthetic construct
  source 1..20: mol_type = other DNA
gaagcgaaagggaagaaaat

SEQ ID NO: 25815 - DNA, 20 bp, synthetic construct
  source 1..20: mol_type = other DNA
gggtggctcctttttctttt

SEQ ID NO: 25816 - DNA, 20 bp, synthetic construct
  source 1..20: mol_type = other DNA
gtttcgttatcttctgatcc

SEQ ID NO: 25817 - DNA, 20 bp, synthetic construct
  source 1..20: mol_type = other DNA
atccggggtaactacagtgg

SEQ ID NO: 25818 - DNA, 20 bp, synthetic construct
  source 1..20: mol_type = other DNA
cgcgcgcaaatcccggcgac

SEQ ID NO: 25819 - DNA, 20 bp, synthetic construct
  source 1..20: mol_type = other DNA
agacattgatttttctcccc

SEQ ID NO: 25820 - DNA, 20 bp, synthetic construct
  source 1..20: mol_type = other DNA
cccagccctgtcgccccccg

SEQ ID NO: 25821 - DNA, 20 bp, synthetic construct
  source 1..20: mol_type = other DNA
aggcgcacgcgcccagcacc

SEQ ID NO: 25822 - DNA, 20 bp, synthetic construct
  source 1..20: mol_type = other DNA
tgatatatttcaatccattg

SEQ ID NO: 25823 - DNA, 20 bp, synthetic construct
  source 1..20: mol_type = other DNA
gctcactttgccagtaagag

SEQ ID NO: 25824 - DNA, 20 bp, synthetic construct
  source 1..20: mol_type = other DNA
atttctctaaggaccctgat

SEQ ID NO: 25825 - DNA, 20 bp, synthetic construct
  source 1..20: mol_type = other DNA
tattttagggccgattcttt

SEQ ID NO: 25826 - DNA, 20 bp, synthetic construct
  source 1..20: mol_type = other DNA
gattggcagccagactgcct

SEQ ID NO: 25827 - DNA, 20 bp, synthetic construct
  source 1..20: mol_type = other DNA
tgagtcaggaaacattttca

SEQ ID NO: 25828 - DNA, 20 bp, synthetic construct
  source 1..20: mol_type = other DNA
aaagccaactttggaaaaag

SEQ ID NO: 25829 - DNA, 20 bp, synthetic construct
  source 1..20: mol_type = other DNA
aaaagctaagccggcgggca

SEQ ID NO: 25830 - DNA, 20 bp, synthetic construct
  source 1..20: mol_type = other DNA
acgaaccatcgactgccgtg

SEQ ID NO: 25831 - DNA, 20 bp, synthetic construct
  source 1..20: mol_type = other DNA
tgggcgcccccacaccggta

SEQ ID NO: 25832 - DNA, 20 bp, synthetic construct
  source 1..20: mol_type = other DNA
ccggccgtggatgctcactc

SEQ ID NO: 25833 - DNA, 20 bp, synthetic construct
  source 1..20: mol_type = other DNA
ggagtcggtggcagcggcgg

SEQ ID NO: 25834 - DNA, 20 bp, synthetic construct
  source 1..20: mol_type = other DNA
cgagccgctcaccccgccgt

SEQ ID NO: 25835 - DNA, 20 bp, synthetic construct
  source 1..20: mol_type = other DNA
tcggccttccgcgccagccg

SEQ ID NO: 25836 - DNA, 20 bp, synthetic construct
  source 1..20: mol_type = other DNA
aagccagccactggagtcgc

SEQ ID NO: 25837 - DNA, 20 bp, synthetic construct
  source 1..20: mol_type = other DNA
ggacctgctgtccgacttac

SEQ ID NO: 25838 - DNA, 20 bp, synthetic construct
  source 1..20: mol_type = other DNA
aggaggaagaggaggaggag

SEQ ID NO: 25839 - DNA, 20 bp, synthetic construct
  source 1..20: mol_type = other DNA
gttttattctgcctgcttaa

SEQ ID NO: 25840 - DNA, 20 bp, synthetic construct
  source 1..20: mol_type = other DNA
agtatttagaattagaatgt

SEQ ID NO: 25841 - DNA, 20 bp, synthetic construct
  source 1..20: mol_type = other DNA
tcatcaaacttctccgtcag

SEQ ID NO: 25842 - DNA, 20 bp, synthetic construct
  source 1..20: mol_type = other DNA
gagtgccaccggggaagctt

SEQ ID NO: 25843 - DNA, 20 bp, synthetic construct
  source 1..20: mol_type = other DNA
ggaaaccgtgtgataagaac

SEQ ID NO: 25844 - DNA, 20 bp, synthetic construct
  source 1..20: mol_type = other DNA
gatgctgaatctctttgtcg

SEQ ID NO: 25845 - DNA, 20 bp, synthetic construct
  source 1..20: mol_type = other DNA
gtctgggccgagtatgaccc

SEQ ID NO: 25846 - DNA, 20 bp, synthetic construct
  source 1..20: mol_type = other DNA
catgtatcagatgctgagac

SEQ ID NO: 25847 - DNA, 20 bp, synthetic construct
  source 1..20: mol_type = other DNA
ccgcacagccctggacatca

SEQ ID NO: 25848 - DNA, 20 bp, synthetic construct
  source 1..20: mol_type = other DNA
cgtctcactccgctcgcgga

SEQ ID NO: 25849 - DNA, 20 bp, synthetic construct
  source 1..20: mol_type = other DNA
agcgaggggtgtgtgccatc

SEQ ID NO: 25850 - DNA, 20 bp, synthetic construct
  source 1..20: mol_type = other DNA
gggtgaagcggcgactggag

SEQ ID NO: 25851 - DNA, 20 bp, synthetic construct
  source 1..20: mol_type = other DNA
gacgccgcttggagatcccg

SEQ ID NO: 25852 - DNA, 20 bp, synthetic construct
  source 1..20: mol_type = other DNA
cagctagcaggtgtgagcgg

SEQ ID NO: 25853 - DNA, 20 bp, synthetic construct
  source 1..20: mol_type = other DNA
acgaggactctgcaataccc

SEQ ID NO: 25854 - DNA, 20 bp, synthetic construct
  source 1..20: mol_type = other DNA
gttccgtggatatttgggat

SEQ ID NO: 25855 - DNA, 20 bp, synthetic construct
  source 1..20: mol_type = other DNA
tttatttttcgcacttgctg

SEQ ID NO: 25856 - DNA, 20 bp, synthetic construct
  source 1..20: mol_type = other DNA
tgagtttgcctctgctggaa

SEQ ID NO: 25857 - DNA, 20 bp, synthetic construct
  source 1..20: mol_type = other DNA
gcaatggctgggcatatttt

SEQ ID NO: 25858 - DNA, 20 bp, synthetic construct
  source 1..20: mol_type = other DNA
ttttctaggcacaacttctg

SEQ ID NO: 25859 - DNA, 20 bp, synthetic construct
  source 1..20: mol_type = other DNA
gtggcgtcatcaccggacag

SEQ ID NO: 25860 - DNA, 20 bp, synthetic construct
  source 1..20: mol_type = other DNA
tgtttgaggaacactaggct

SEQ ID NO: 25861 - DNA, 20 bp, synthetic construct
  source 1..20: mol_type = other DNA
aacgccgagtctctgagaag

SEQ ID NO: 25862 - DNA, 20 bp, synthetic construct
  source 1..20: mol_type = other DNA
aatatcccacgtcttctaag

SEQ ID NO: 25863 - DNA, 20 bp, synthetic construct
  source 1..20: mol_type = other DNA
tgtgggcccaacgtgaggag

SEQ ID NO: 25864 - DNA, 20 bp, synthetic construct
  source 1..20: mol_type = other DNA
gtgcccctggctgggcaaaa

SEQ ID NO: 25865 - DNA, 20 bp, synthetic construct
  source 1..20: mol_type = other DNA
cactgccctcgaacgcctca

SEQ ID NO: 25866 - DNA, 20 bp, synthetic construct
  source 1..20: mol_type = other DNA
gagcgcgaggccggagggct

SEQ ID NO: 25867 - DNA, 20 bp, synthetic construct
  source 1..20: mol_type = other DNA
tccaccgggtatgaagctaa

SEQ ID NO: 25868 - DNA, 20 bp, synthetic construct
  source 1..20: mol_type = other DNA
cctccaccagggctgaggga

SEQ ID NO: 25869 - DNA, 20 bp, synthetic construct
  source 1..20: mol_type = other DNA
gaggccatggtgacctgaga

SEQ ID NO: 25870 - DNA, 20 bp, synthetic construct
  source 1..20: mol_type = other DNA
ctccttctgcctcccctctc

SEQ ID NO: 25871 - DNA, 20 bp, synthetic construct
  source 1..20: mol_type = other DNA
tggcagaagcagacaggagc

SEQ ID NO: 25872 - DNA, 20 bp, synthetic construct
  source 1..20: mol_type = other DNA
tccagctggctgcttgtttt

SEQ ID NO: 25873 - DNA, 20 bp, synthetic construct
  source 1..20: mol_type = other DNA
gctgacggggcggcggcggg

SEQ ID NO: 25874 - DNA, 20 bp, synthetic construct
  source 1..20: mol_type = other DNA
ggcggcttctccatgggtcc

SEQ ID NO: 25875 - DNA, 20 bp, synthetic construct
  source 1..20: mol_type = other DNA
gccgggcgcgggatttctcc

SEQ ID NO: 25876 - DNA, 20 bp, synthetic construct
  source 1..20: mol_type = other DNA
attcctgcagagggaaaact

SEQ ID NO: 25877 - DNA, 20 bp, synthetic construct
  source 1..20: mol_type = other DNA
cccctttggatcttgtcggg

SEQ ID NO: 25878 - DNA, 20 bp, synthetic construct
  source 1..20: mol_type = other DNA
taaaataaattcctaaagtc

SEQ ID NO: 25879 - DNA, 20 bp, synthetic construct
  source 1..20: mol_type = other DNA
tcaggacgagggccacacca

SEQ ID NO: 25880 - DNA, 20 bp, synthetic construct
  source 1..20: mol_type = other DNA
aatgacatggaaaattcgcc

SEQ ID NO: 25881 - DNA, 20 bp, synthetic construct
  source 1..20: mol_type = other DNA
caaagcacaaaattaatttc

SEQ ID NO: 25882 - DNA, 20 bp, synthetic construct
  source 1..20: mol_type = other DNA
ggacggtctgcggcaaattg

SEQ ID NO: 25883 - DNA, 20 bp, synthetic construct
  source 1..20: mol_type = other DNA
ggagatacggatacctctgg

SEQ ID NO: 25884 - DNA, 20 bp, synthetic construct
  source 1..20: mol_type = other DNA
cgtttgcaaaatctcaaaag

SEQ ID NO: 25885 - DNA, 20 bp, synthetic construct
  source 1..20: mol_type = other DNA
ggagacgagattttctacca

SEQ ID NO: 25886 - DNA, 20 bp, synthetic construct
  source 1..20: mol_type = other DNA
gaaaagtagctaaaagcacg

SEQ ID NO: 25887 - DNA, 20 bp, synthetic construct
  source 1..20: mol_type = other DNA
tagctaaaagcacgcggaca

SEQ ID NO: 25888 - DNA, 20 bp, synthetic construct
  source 1..20: mol_type = other DNA
agtccgcgctgcgagcataa

SEQ ID NO: 25889 - DNA, 20 bp, synthetic construct
  source 1..20: mol_type = other DNA
tgaacatatttcaagggact

SEQ ID NO: 25890 - DNA, 20 bp, synthetic construct
  source 1..20: mol_type = other DNA
aacgacaacaacagcaacga

SEQ ID NO: 25891 - DNA, 20 bp, synthetic construct
  source 1..20: mol_type = other DNA
agtagcagcaccagctaccc

SEQ ID NO: 25892 - DNA, 20 bp, synthetic construct
  source 1..20: mol_type = other DNA
actttacacttaataatata

SEQ ID NO: 25893 - DNA, 20 bp, synthetic construct
  source 1..20: mol_type = other DNA
tgtcacacagtaaacggcgc

SEQ ID NO: 25894 - DNA, 20 bp, synthetic construct
  source 1..20: mol_type = other DNA
ctttgttttattatccacat

SEQ ID NO: 25895 - DNA, 20 bp, synthetic construct
  source 1..20: mol_type = other DNA
tcagcgctttaccgctcgcc

SEQ ID NO: 25896 - DNA, 20 bp, synthetic construct
  source 1..20: mol_type = other DNA
aacactcaaataaaatccgc

SEQ ID NO: 25897 - DNA, 20 bp, synthetic construct
  source 1..20: mol_type = other DNA
cccctcccccaactgtaact

SEQ ID NO: 25898 - DNA, 20 bp, synthetic construct
  source 1..20: mol_type = other DNA
agtatcaatagactgctcac

SEQ ID NO: 25899 - DNA, 20 bp, synthetic construct
  source 1..20: mol_type = other DNA
cacgggcgaccgtggcggtg

SEQ ID NO: 25900 - DNA, 20 bp, synthetic construct
  source 1..20: mol_type = other DNA
tggtagtcctccggcccctg

SEQ ID NO: 25901 - DNA, 20 bp, synthetic construct
  source 1..20: mol_type = other DNA
catattgccgtcttttggca

SEQ ID NO: 25902 - DNA, 20 bp, synthetic construct
  source 1..20: mol_type = other DNA
tcttgacgagcattcctagg

SEQ ID NO: 25903 - DNA, 20 bp, synthetic construct
  source 1..20: mol_type = other DNA
gcgacaggtgcctctgcggc

SEQ ID NO: 25904 - DNA, 20 bp, synthetic construct
  source 1..20: mol_type = other DNA
gagtatcaataggctgctcg

SEQ ID NO: 25905 - DNA, 20 bp, synthetic construct
  source 1..20: mol_type = other DNA
tcgctcagcacaaccccagt

SEQ ID NO: 25906 - DNA, 20 bp, synthetic construct
  source 1..20: mol_type = other DNA
tgctcacaaaccagtgggtg

SEQ ID NO: 25907 - DNA, 20 bp, synthetic construct
  source 1..20: mol_type = other DNA
ggctccacgctcgatccact

SEQ ID NO: 25908 - DNA, 20 bp, synthetic construct
  source 1..20: mol_type = other DNA
gaccggccgggtggaaggcc

SEQ ID NO: 25909 - DNA, 20 bp, synthetic construct
  source 1..20: mol_type = other DNA
gaaggggtacgtctatgggt

SEQ ID NO: 25910 - DNA, 20 bp, synthetic construct
  source 1..20: mol_type = other DNA
agtgttagggttcgtaggtg

SEQ ID NO: 25911 - DNA, 20 bp, synthetic construct
  source 1..20: mol_type = other DNA
tttggacacggtccacaggt

SEQ ID NO: 25912 - DNA, 20 bp, synthetic construct
  source 1..20: mol_type = other DNA
tgaagcgtcagtcgttaaac

SEQ ID NO: 25913 - DNA, 20 bp, synthetic construct
  source 1..20: mol_type = other DNA
ctcttgagactggccgaaag

SEQ ID NO: 25914 - DNA, 20 bp, synthetic construct
  source 1..20: mol_type = other DNA
gctgcatgcggcaaggggaa

SEQ ID NO: 25915 - DNA, 20 bp, synthetic construct
  source 1..20: mol_type = other DNA
gacgtaatggccccggcccg

SEQ ID NO: 25916 - DNA, 20 bp, synthetic construct
  source 1..20: mol_type = other DNA
aaaagcgcacggtccacagg

SEQ ID NO: 25917 - DNA, 20 bp, synthetic construct
  source 1..20: mol_type = other DNA
gtagccggcgagttgacaag

SEQ ID NO: 25918 - DNA, 20 bp, synthetic construct
  source 1..20: mol_type = other DNA
cagctccgcggcggcctaca

SEQ ID NO: 25919 - DNA, 20 bp, synthetic construct
  source 1..20: mol_type = other DNA
ggcgggtggcattttctttt

SEQ ID NO: 25920 - DNA, 20 bp, synthetic construct
  source 1..20: mol_type = other DNA
caccttgcagtgttaacttg

SEQ ID NO: 25921 - DNA, 20 bp, synthetic construct
  source 1..20: mol_type = other DNA
agggcaaacatcatttggcc

SEQ ID NO: 25922 - DNA, 20 bp, synthetic construct
  source 1..20: mol_type = other DNA
tcctttcttggataaacccg

SEQ ID NO: 25923 - DNA, 20 bp, synthetic construct
  source 1..20: mol_type = other DNA
gcaagactgctagccgagta

SEQ ID NO: 25924 - DNA, 20 bp, synthetic construct
  source 1..20: mol_type = other DNA
agggacctgaaagcgaaagg

SEQ ID NO: 25925 - DNA, 20 bp, synthetic construct
  source 1..20: mol_type = other DNA
tgtaacttagaagtttttca

SEQ ID NO: 25926 - DNA, 20 bp, synthetic construct
  source 1..20: mol_type = other DNA
tactgaaggtcaagcacttc

SEQ ID NO: 25927 - DNA, 20 bp, synthetic construct
  source 1..20: mol_type = other DNA
acagggcaaaaacaactgcg

SEQ ID NO: 25928 - DNA, 20 bp, synthetic construct
  source 1..20: mol_type = other DNA
ttagtagcatctttgaaatc

SEQ ID NO: 25929 - DNA, 20 bp, synthetic construct
  source 1..20: mol_type = other DNA
gtggctaaccttaaccctgc

SEQ ID NO: 25930 - DNA, 20 bp, synthetic construct
  source 1..20: mol_type = other DNA
gcggctaatcccaacctcgg

SEQ ID NO: 25931 - DNA, 20 bp, synthetic construct
  source 1..20: mol_type = other DNA
cgcatagactgttcccacgg

SEQ ID NO: 25932 - DNA, 20 bp, synthetic construct
  source 1..20: mol_type = other DNA
gtacttcgagaagcctagta

SEQ ID NO: 25933 - DNA, 20 bp, synthetic construct
  source 1..20: mol_type = other DNA
actggcgacagtggtccagg

SEQ ID NO: 25934 - DNA, 20 bp, synthetic construct
  source 1..20: mol_type = other DNA
gagagtcctccggcccctga

SEQ ID NO: 25935 - DNA, 20 bp, synthetic construct
  source 1..20: mol_type = other DNA
gctgcaacccagcagccagc

SEQ ID NO: 25936 - DNA, 20 bp, synthetic construct
  source 1..20: mol_type = other DNA
attcgaatctgtaataaaag

SEQ ID NO: 25937 - DNA, 20 bp, synthetic construct
  source 1..20: mol_type = other DNA
gagaggagattttgttcgtg

SEQ ID NO: 25938 - DNA, 20 bp, synthetic construct
  source 1..20: mol_type = other DNA
atccggactgaatccgtagt

SEQ ID NO: 25939 - DNA, 20 bp, synthetic construct
  source 1..20: mol_type = other DNA
ccctggtctgagctctgtgg

SEQ ID NO: 25940 - DNA, 20 bp, synthetic construct
  source 1..20: mol_type = other DNA
cggtgatactataagtcgtg

SEQ ID NO: 25941 - DNA, 20 bp, synthetic construct
  source 1..20: mol_type = other DNA
cgtcacttgtcgacagcgcc

SEQ ID NO: 25942 - DNA, 20 bp, synthetic construct
  source 1..20: mol_type = other DNA
tatatgcattcccgcatggc

SEQ ID NO: 25943 - DNA, 20 bp, synthetic construct
  source 1..20: mol_type = other DNA
ggtatgcgtcatcatttgcc

SEQ ID NO: 25944 - DNA, 20 bp, synthetic construct
  source 1..20: mol_type = other DNA
cgtgccgaaaatccctttgc

SEQ ID NO: 25945 - DNA, 20 bp, synthetic construct
  source 1..20: mol_type = other DNA
gcacatcttaacctgagcgg

SEQ ID NO: 25946 - DNA, 20 bp, synthetic construct
  source 1..20: mol_type = other DNA
gtggcgagctccctgggtgg

SEQ ID NO: 25947 - DNA, 20 bp, synthetic construct
  source 1..20: mol_type = other DNA
ttcaggctttagcgcgccct

SEQ ID NO: 25948 - DNA, 20 bp, synthetic construct
  source 1..20: mol_type = other DNA
tgctctggatggtgtcacca

SEQ ID NO: 25949 - DNA, 20 bp, synthetic construct
  source 1..20: mol_type = other DNA
gcgacacgcctgtggtagcg

SEQ ID NO: 25950 - DNA, 20 bp, synthetic construct
  source 1..20: mol_type = other DNA
gcaggaaccccacctgccag

SEQ ID NO: 25951 - DNA, 20 bp, synthetic construct
  source 1..20: mol_type = other DNA
caagctggttacagccctga

SEQ ID NO: 25952 - DNA, 20 bp, synthetic construct
  source 1..20: mol_type = other DNA
cagggtcaaaaattgtctaa

SEQ ID NO: 25953 - DNA, 20 bp, synthetic construct
  source 1..20: mol_type = other DNA
gagcgtttcttttccttttg

SEQ ID NO: 25954 - DNA, 20 bp, synthetic construct
  source 1..20: mol_type = other DNA
cgtttgccaatcggagggcg

SEQ ID NO: 25955 - DNA, 20 bp, synthetic construct
  source 1..20: mol_type = other DNA
cgttccactttagcaggggt

SEQ ID NO: 25956 - DNA, 20 bp, synthetic construct
  source 1..20: mol_type = other DNA
ctagccgtcgcgtcttaacg

SEQ ID NO: 25957 - DNA, 20 bp, synthetic construct
  source 1..20: mol_type = other DNA
gtttacagcacctctcacat

SEQ ID NO: 25958 - DNA, 20 bp, synthetic construct
  source 1..20: mol_type = other DNA
tagtagtatggcttagtacg

SEQ ID NO: 25959 - DNA, 20 bp, synthetic construct
  source 1..20: mol_type = other DNA
ccttgttctgaatgcacaca

SEQ ID NO: 25960 - DNA, 20 bp, synthetic construct
  source 1..20: mol_type = other DNA
cccgcacgtaaccttcagag

SEQ ID NO: 25961 - DNA, 20 bp, synthetic construct
  source 1..20: mol_type = other DNA
aggagaccgtggtgcactgc

SEQ ID NO: 25962 - DNA, 20 bp, synthetic construct
  source 1..20: mol_type = other DNA
ggcctctcacgccatccagg

SEQ ID NO: 25963 - DNA, 20 bp, synthetic construct
  source 1..20: mol_type = other DNA
tccaggggaccttgtcctac

SEQ ID NO: 25964 - DNA, 20 bp, synthetic construct
  source 1..20: mol_type = other DNA
ggtactgcgatagtgccacc

SEQ ID NO: 25965 - DNA, 20 bp, synthetic construct
  source 1..20: mol_type = other DNA
ctgactaatcagaggaacgt

SEQ ID NO: 25966 - DNA, 20 bp, synthetic construct
  source 1..20: mol_type = other DNA
agataagttagaatccaaat

SEQ ID NO: 25967 - DNA, 20 bp, synthetic construct
  source 1..20: mol_type = other DNA
gattatgtgatgctttctgc

SEQ ID NO: 25968 - DNA, 20 bp, synthetic construct
  source 1..20: mol_type = other DNA
aaaccttcttcctttttcct

SEQ ID NO: 25969 - DNA, 20 bp, synthetic construct
  source 1..20: mol_type = other DNA
ggaatatgacagggttattt

SEQ ID NO: 25970 - DNA, 20 bp, synthetic construct
  source 1..20: mol_type = other DNA
tatactgtggaagggtatgt

SEQ ID NO: 25971 - DNA, 20 bp, synthetic construct
  source 1..20: mol_type = other DNA
tgcggccaaaagccacgtgg

SEQ ID NO: 25972 - DNA, 20 bp, synthetic construct
  source 1..20: mol_type = other DNA
ctcaagcgcctctgtaggga

SEQ ID NO: 25973 - DNA, 20 bp, synthetic construct
  source 1..20: mol_type = other DNA
gggaagccaagaatgtccag

SEQ ID NO: 25974 - DNA, 20 bp, synthetic construct
  source 1..20: mol_type = other DNA
gattgggaacacttggagga

SEQ ID NO: 25975 - DNA, 20 bp, synthetic construct
  source 1..20: mol_type = other DNA
ttcgttgaacaattgtgcgt

SEQ ID NO: 25976 - DNA, 20 bp, synthetic construct
  source 1..20: mol_type = other DNA
aacaattgtgcgtattacac

SEQ ID NO: 25977 - DNA, 20 bp, synthetic construct
  source 1..20: mol_type = other DNA
aaaaattagcttaatgcatt

SEQ ID NO: 25978 - DNA, 20 bp, synthetic construct
  source 1..20: mol_type = other DNA
tggacttagacttgctctat

SEQ ID NO: 25979 - DNA, 20 bp, synthetic construct
  source 1..20: mol_type = other DNA
cagtaggacataccccaaat

SEQ ID NO: 25980 - DNA, 20 bp, synthetic construct
  source 1..20: mol_type = other DNA
ccacaaggctagtgataata

SEQ ID NO: 25981 - DNA, 20 bp, synthetic construct
  source 1..20: mol_type = other DNA
ctctagacctactggaaata

SEQ ID NO: 25982 - DNA, 20 bp, synthetic construct
  source 1..20: mol_type = other DNA
acattaagagagagagtatt

SEQ ID NO: 25983 - DNA, 20 bp, synthetic construct
  source 1..20: mol_type = other DNA
actctggtgtaaggcttaga

SEQ ID NO: 25984 - DNA, 20 bp, synthetic construct
  source 1..20: mol_type = other DNA
tttaaattttttaattccga

SEQ ID NO: 25985 - DNA, 20 bp, synthetic construct
  source 1..20: mol_type = other DNA
taaacttgaatgtaaggctt

SEQ ID NO: 25986 - DNA, 20 bp, synthetic construct
  source 1..20: mol_type = other DNA
tggtttaattgagcgcattt

SEQ ID NO: 25987 - DNA, 20 bp, synthetic construct
  source 1..20: mol_type = other DNA
aataagggagtgtcctattt

SEQ ID NO: 25988 - DNA, 20 bp, synthetic construct
  source 1..20: mol_type = other DNA
acttatgtattgatgagagc

SEQ ID NO: 25989 - DNA, 20 bp, synthetic construct
  source 1..20: mol_type = other DNA
tggaagacaatgatctgggg

SEQ ID NO: 25990 - DNA, 20 bp, synthetic construct
  source 1..20: mol_type = other DNA
tggtttgctatttagcgtac

SEQ ID NO: 25991 - DNA, 20 bp, synthetic construct
  source 1..20: mol_type = other DNA
cataggcagccccaaaaaca

SEQ ID NO: 25992 - DNA, 20 bp, synthetic construct
  source 1..20: mol_type = other DNA
tagtcaagttcgaccgtctt

SEQ ID NO: 25993 - DNA, 20 bp, synthetic construct
  source 1..20: mol_type = other DNA
cgaccgtcttctcagcgctc

SEQ ID NO: 25994 - DNA, 20 bp, synthetic construct
  source 1..20: mol_type = other DNA
ctcagcgctccgccagggcc

SEQ ID NO: 25995 - DNA, 20 bp, synthetic construct
  source 1..20: mol_type = other DNA
cgccagggccgtgggccgac

SEQ ID NO: 25996 - DNA, 20 bp, synthetic construct
  source 1..20: mol_type = other DNA
gtgggccgaccccggcgggg

SEQ ID NO: 25997 - DNA, 20 bp, synthetic construct
  source 1..20: mol_type = other DNA
cccggcggggccgatccgag

SEQ ID NO: 25998 - DNA, 20 bp, synthetic construct
  source 1..20: mol_type = other DNA
tcggtagtagcgacgggcgg

SEQ ID NO: 25999 - DNA, 20 bp, synthetic construct
  source 1..20: mol_type = other DNA
tgtgtacaaagggcagggac

SEQ ID NO: 26000 - DNA, 20 bp, synthetic construct
  source 1..20: mol_type = other DNA
gggcagggacttaatcaacg

SEQ ID NO: 26001 - DNA, 20 bp, synthetic construct
  source 1..20: mol_type = other DNA
caagcttatgacccgcactt

SEQ ID NO: 26002 - DNA, 20 bp, synthetic construct
  source 1..20: mol_type = other DNA
actgggaattcctcgttcat

SEQ ID NO: 26003 - DNA, 20 bp, synthetic construct
  source 1..20: mol_type = other DNA
ggggaataattgcaatcccc

SEQ ID NO: 26004 - DNA, 20 bp, synthetic construct
  source 1..20: mol_type = other DNA
gatccccatcacgaatgggg

SEQ ID NO: 26005 - DNA, 20 bp, synthetic construct
  source 1..20: mol_type = other DNA
agtcagtgtagcgcgcgtgc

SEQ ID NO: 26006 - DNA, 20 bp, synthetic construct
  source 1..20: mol_type = other DNA
agccccggacatctaagggc

SEQ ID NO: 26007 - DNA, 20 bp, synthetic construct
  source 1..20: mol_type = other DNA
atctaagggcatcacagacc

SEQ ID NO: 26008 - DNA, 20 bp, synthetic construct
  source 1..20: mol_type = other DNA
caatctcgggtggctgaacg

SEQ ID NO: 26009 - DNA, 20 bp, synthetic construct
  source 1..20: mol_type = other DNA
ccacttgtccctctaagaag

SEQ ID NO: 26010 - DNA, 20 bp, synthetic construct
  source 1..20: mol_type = other DNA
ctctaagaagttgggggacg

SEQ ID NO: 26011 - DNA, 20 bp, synthetic construct
  source 1..20: mol_type = other DNA
ttgggggacgccgaccgctc

SEQ ID NO: 26012 - DNA, 20 bp, synthetic construct
  source 1..20: mol_type = other DNA
ccaactaagaacggccatgc

SEQ ID NO: 26013 - DNA, 20 bp, synthetic construct
  source 1..20: mol_type = other DNA
accaccacccacggaatcga

SEQ ID NO: 26014 - DNA, 20 bp, synthetic construct
  source 1..20: mol_type = other DNA
tcaatctgtcaatcctgtcc

SEQ ID NO: 26015 - DNA, 20 bp, synthetic construct
  source 1..20: mol_type = other DNA
cgggtgaggtttcccgtgtt

SEQ ID NO: 26016 - DNA, 20 bp, synthetic construct
  source 1..20: mol_type = other DNA
ttcccgtgttgagtcaaatt

SEQ ID NO: 26017 - DNA, 20 bp, synthetic construct
  source 1..20: mol_type = other DNA
gagtcaaattaagccgcagg

SEQ ID NO: 26018 - DNA, 20 bp, synthetic construct
  source 1..20: mol_type = other DNA
aagccgcaggctccactcct

SEQ ID NO: 26019 - DNA, 20 bp, synthetic construct
  source 1..20: mol_type = other DNA
ttcagctttgcaaccatact

SEQ ID NO: 26020 - DNA, 20 bp, synthetic construct
  source 1..20: mol_type = other DNA
ttggtttcccggaagctgcc

SEQ ID NO: 26021 - DNA, 20 bp, synthetic construct
  source 1..20: mol_type = other DNA
ggaagctgcccggcgggtca

SEQ ID NO: 26022 - DNA, 20 bp, synthetic construct
  source 1..20: mol_type = other DNA
gccgccgcatcgccggtcgg

SEQ ID NO: 26023 - DNA, 20 bp, synthetic construct
  source 1..20: mol_type = other DNA
cgccggtcggcatcgtttat

SEQ ID NO: 26024 - DNA, 20 bp, synthetic construct
  source 1..20: mol_type = other DNA
catcgtttatggtcggaact

SEQ ID NO: 26025 - DNA, 20 bp, synthetic construct
  source 1..20: mol_type = other DNA
acgacggtatctgatcgtct

SEQ ID NO: 26026 - DNA, 20 bp, synthetic construct
  source 1..20: mol_type = other DNA
ctgatcgtcttcgaacctcc

SEQ ID NO: 26027 - DNA, 20 bp, synthetic construct
  source 1..20: mol_type = other DNA
gactttcgttcttgattaat

SEQ ID NO: 26028 - DNA, 20 bp, synthetic construct
  source 1..20: mol_type = other DNA
cttgattaatgaaaacattc

SEQ ID NO: 26029 - DNA, 20 bp, synthetic construct
  source 1..20: mol_type = other DNA
gaaaacattcttggcaaatg

SEQ ID NO: 26030 - DNA, 20 bp, synthetic construct
  source 1..20: mol_type = other DNA
ttggcaaatgctttcgctct

SEQ ID NO: 26031 - DNA, 20 bp, synthetic construct
  source 1..20: mol_type = other DNA
gcgccggtccaagaatttca

SEQ ID NO: 26032 - DNA, 20 bp, synthetic construct
  source 1..20: mol_type = other DNA
aagaatttcacctctagcgg

SEQ ID NO: 26033 - DNA, 20 bp, synthetic construct
  source 1..20: mol_type = other DNA
cgcaatacgaatgcccccgg

SEQ ID NO: 26034 - DNA, 20 bp, synthetic construct
  source 1..20: mol_type = other DNA
atgcccccggccgtccctct

SEQ ID NO: 26035 - DNA, 20 bp, synthetic construct
  source 1..20: mol_type = other DNA
ctcagttccgaaaaccaaca

SEQ ID NO: 26036 - DNA, 20 bp, synthetic construct
  source 1..20: mol_type = other DNA
aaatagaaccgcggtcctat

SEQ ID NO: 26037 - DNA, 20 bp, synthetic construct
  source 1..20: mol_type = other DNA
gcggtcctattccattattc

SEQ ID NO: 26038 - DNA, 20 bp, synthetic construct
  source 1..20: mol_type = other DNA
tccattattcctagctgcgg

SEQ ID NO: 26039 - DNA, 20 bp, synthetic construct
  source 1..20: mol_type = other DNA
ctctaattttttcaaagtaa

SEQ ID NO: 26040 - DNA, 20 bp, synthetic construct
  source 1..20: mol_type = other DNA
agagcatcgagggggcgccg

SEQ ID NO: 26041 - DNA, 20 bp, synthetic construct
  source 1..20: mol_type = other DNA
ggcggggacgggcggtggct

SEQ ID NO: 26042 - DNA, 20 bp, synthetic construct
  source 1..20: mol_type = other DNA
ggcggtggctcgcctcgcgg

SEQ ID NO: 26043 - DNA, 20 bp, synthetic construct
  source 1..20: mol_type = other DNA
cgcctcgcgggggaccgccc

SEQ ID NO: 26044 - DNA, 20 bp, synthetic construct
  source 1..20: mol_type = other DNA
gggaccgcccgcccgctccc

SEQ ID NO: 26045 - DNA, 20 bp, synthetic construct
  source 1..20: mol_type = other DNA
ggagctggaattaccgcggc

SEQ ID NO: 26046 - DNA, 20 bp, synthetic construct
  source 1..20: mol_type = other DNA
agacttgccctccaatggat

SEQ ID NO: 26047 - DNA, 20 bp, synthetic construct
  source 1..20: mol_type = other DNA
tccaatggatcctcgttaaa

SEQ ID NO: 26048 - DNA, 20 bp, synthetic construct
  source 1..20: mol_type = other DNA
tggactcattccaattacag

SEQ ID NO: 26049 - DNA, 20 bp, synthetic construct
  source 1..20: mol_type = other DNA
ccaattacagggcctcgaaa

SEQ ID NO: 26050 - DNA, 20 bp, synthetic construct
  source 1..20: mol_type = other DNA
ctccccgggtcgggagtggg

SEQ ID NO: 26051 - DNA, 20 bp, synthetic construct
  source 1..20: mol_type = other DNA
gcctgctgccttccttggat

SEQ ID NO: 26052 - DNA, 20 bp, synthetic construct
  source 1..20: mol_type = other DNA
ctgattccccgtcacccgtg

SEQ ID NO: 26053 - DNA, 20 bp, synthetic construct
  source 1..20: mol_type = other DNA
taggcacggcgactaccatc

SEQ ID NO: 26054 - DNA, 20 bp, synthetic construct
  source 1..20: mol_type = other DNA
gactaccatcgaaagttgat

SEQ ID NO: 26055 - DNA, 20 bp, synthetic construct
  source 1..20: mol_type = other DNA
agggcagacgttcgaatggg

SEQ ID NO: 26056 - DNA, 20 bp, synthetic construct
  source 1..20: mol_type = other DNA
ccaaagccgccggcgcccgc

SEQ ID NO: 26057 - DNA, 20 bp, synthetic construct
  source 1..20: mol_type = other DNA
cccccggccggggccggaga

SEQ ID NO: 26058 - DNA, 20 bp, synthetic construct
  source 1..20: mol_type = other DNA
tcccccccgcgaagggggtc

SEQ ID NO: 26059 - DNA, 20 bp, synthetic construct
  source 1..20: mol_type = other DNA
agctctagaattaccacagt

SEQ ID NO: 26060 - DNA, 20 bp, synthetic construct
  source 1..20: mol_type = other DNA
cgaggccaaccgaggctccg

SEQ ID NO: 26061 - DNA, 20 bp, synthetic construct
  source 1..20: mol_type = other DNA
cgaggctccgcggcgctgcc

SEQ ID NO: 26062 - DNA, 20 bp, synthetic construct
  source 1..20: mol_type = other DNA
cggcgctgccgtatcgttcc

SEQ ID NO: 26063 - DNA, 20 bp, synthetic construct
  source 1..20: mol_type = other DNA
gattctgacttagaggcgtt

SEQ ID NO: 26064 - DNA, 20 bp, synthetic construct
  source 1..20: mol_type = other DNA
tagaggcgttcagtcataat

SEQ ID NO: 26065 - DNA, 20 bp, synthetic construct
  source 1..20: mol_type = other DNA
cagtcataatcccacagatg

SEQ ID NO: 26066 - DNA, 20 bp, synthetic construct
  source 1..20: mol_type = other DNA
cccacagatggtagcttcgc

SEQ ID NO: 26067 - DNA, 20 bp, synthetic construct
  source 1..20: mol_type = other DNA
ctgagcaggattaccatggc

SEQ ID NO: 26068 - DNA, 20 bp, synthetic construct
  source 1..20: mol_type = other DNA
catcagtagggtaaaactaa

SEQ ID NO: 26069 - DNA, 20 bp, synthetic construct
  source 1..20: mol_type = other DNA
cgttccctattagtgggtga

SEQ ID NO: 26070 - DNA, 20 bp, synthetic construct
  source 1..20: mol_type = other DNA
caatgataggaagagccgac

SEQ ID NO: 26071 - DNA, 20 bp, synthetic construct
  source 1..20: mol_type = other DNA
atcgaaggatcaaaaagcga

SEQ ID NO: 26072 - DNA, 20 bp, synthetic construct
  source 1..20: mol_type = other DNA
cgtcgctatgaacgcttggc

SEQ ID NO: 26073 - DNA, 20 bp, synthetic construct
  source 1..20: mol_type = other DNA
tgtggtaacttttctgacac

SEQ ID NO: 26074 - DNA, 20 bp, synthetic construct
  source 1..20: mol_type = other DNA
aaacccaaaaggtcagaagg

SEQ ID NO: 26075 - DNA, 20 bp, synthetic construct
  source 1..20: mol_type = other DNA
cccgctttcacggtctgtat

SEQ ID NO: 26076 - DNA, 20 bp, synthetic construct
  source 1..20: mol_type = other DNA
tcgtactgaaaatcaagatc

SEQ ID NO: 26077 - DNA, 20 bp, synthetic construct
  source 1..20: mol_type = other DNA
aatcaagatcaagcgagctt

SEQ ID NO: 26078 - DNA, 20 bp, synthetic construct
  source 1..20: mol_type = other DNA
aagcgagcttttgcccttct

SEQ ID NO: 26079 - DNA, 20 bp, synthetic construct
  source 1..20: mol_type = other DNA
ttgcccttctgctccacggg

SEQ ID NO: 26080 - DNA, 20 bp, synthetic construct
  source 1..20: mol_type = other DNA
tacacctctcatgtctcttc

SEQ ID NO: 26081 - DNA, 20 bp, synthetic construct
  source 1..20: mol_type = other DNA
atgtctcttcaccgtgccag

SEQ ID NO: 26082 - DNA, 20 bp, synthetic construct
  source 1..20: mol_type = other DNA
accgtgccagactagagtca

SEQ ID NO: 26083 - DNA, 20 bp, synthetic construct
  source 1..20: mol_type = other DNA
actagagtcaagctcaacag

SEQ ID NO: 26084 - DNA, 20 bp, synthetic construct
  source 1..20: mol_type = other DNA
agctcaacagggtcttcttt

SEQ ID NO: 26085 - DNA, 20 bp, synthetic construct
  source 1..20: mol_type = other DNA
ggtcttctttccccgctgat

SEQ ID NO: 26086 - DNA, 20 bp, synthetic construct
  source 1..20: mol_type = other DNA
ccccgctgattccgccaagc

SEQ ID NO: 26087 - DNA, 20 bp, synthetic construct
  source 1..20: mol_type = other DNA
ccgttcccttggctgtggtt

SEQ ID NO: 26088 - DNA, 20 bp, synthetic construct
  source 1..20: mol_type = other DNA
tcgctggatagtaggtaggg

SEQ ID NO: 26089 - DNA, 20 bp, synthetic construct
  source 1..20: mol_type = other DNA
acagtgggaatctcgttcat

SEQ ID NO: 26090 - DNA, 20 bp, synthetic construct
  source 1..20: mol_type = other DNA
tctcgttcatccattcatgc

SEQ ID NO: 26091 - DNA, 20 bp, synthetic construct
  source 1..20: mol_type = other DNA
ccattcatgcgcgtcactaa

SEQ ID NO: 26092 - DNA, 20 bp, synthetic construct
  source 1..20: mol_type = other DNA
gcgtcactaattagatgacg

SEQ ID NO: 26093 - DNA, 20 bp, synthetic construct
  source 1..20: mol_type = other DNA
agagtcatagttactcccgc

SEQ ID NO: 26094 - DNA, 20 bp, synthetic construct
  source 1..20: mol_type = other DNA
cgcttcattgaatttcttca

SEQ ID NO: 26095 - DNA, 20 bp, synthetic construct
  source 1..20: mol_type = other DNA
aatttcttcactttgacatt

SEQ ID NO: 26096 - DNA, 20 bp, synthetic construct
  source 1..20: mol_type = other DNA
ctttgacattcagagcactg

SEQ ID NO: 26097 - DNA, 20 bp, synthetic construct
  source 1..20: mol_type = other DNA
cgccccagcccgaccgaccc

SEQ ID NO: 26098 - DNA, 20 bp, synthetic construct
  source 1..20: mol_type = other DNA
cgaccgacccagcccttaga

SEQ ID NO: 26099 - DNA, 20 bp, synthetic construct
  source 1..20: mol_type = other DNA
atcccgaagttacggatccg

SEQ ID NO: 26100 - DNA, 20 bp, synthetic construct
  source 1..20: mol_type = other DNA
tacggatccggcttgccgac

SEQ ID NO: 26101 - DNA, 20 bp, synthetic construct
  source 1..20: mol_type = other DNA
gcttgccgacttcccttacc

SEQ ID NO: 26102 - DNA, 20 bp, synthetic construct
  source 1..20: mol_type = other DNA
accttggagacctgctgcgg

SEQ ID NO: 26103 - DNA, 20 bp, synthetic construct
  source 1..20: mol_type = other DNA
atatgggtacggcccggcgc

SEQ ID NO: 26104 - DNA, 20 bp, synthetic construct
  source 1..20: mol_type = other DNA
gagatttacaccctctcccc

SEQ ID NO: 26105 - DNA, 20 bp, synthetic construct
  source 1..20: mol_type = other DNA
agggccagcgagagctcacc

SEQ ID NO: 26106 - DNA, 20 bp, synthetic construct
  source 1..20: mol_type = other DNA
agagctcaccggacgccgcc

SEQ ID NO: 26107 - DNA, 20 bp, synthetic construct
  source 1..20: mol_type = other DNA
ggacgccgccggaaccgcga

SEQ ID NO: 26108 - DNA, 20 bp, synthetic construct
  source 1..20: mol_type = other DNA
cgctttccaaggcacgggcc

SEQ ID NO: 26109 - DNA, 20 bp, synthetic construct
  source 1..20: mol_type = other DNA
cctctctcggggcgaaccca

SEQ ID NO: 26110 - DNA, 20 bp, synthetic construct
  source 1..20: mol_type = other DNA
ggcgaacccattccagggcg

SEQ ID NO: 26111 - DNA, 20 bp, synthetic construct
  source 1..20: mol_type = other DNA
cacaaagaaaagagaactct

SEQ ID NO: 26112 - DNA, 20 bp, synthetic construct
  source 1..20: mol_type = other DNA
cccgccggcttctccgggat

SEQ ID NO: 26113 - DNA, 20 bp, synthetic construct
  source 1..20: mol_type = other DNA
accgcactggacgcctcgcg

SEQ ID NO: 26114 - DNA, 20 bp, synthetic construct
  source 1..20: mol_type = other DNA
acgcctcgcggcgcccatct

SEQ ID NO: 26115 - DNA, 20 bp, synthetic construct
  source 1..20: mol_type = other DNA
gcgcccatctccgccactcc

SEQ ID NO: 26116 - DNA, 20 bp, synthetic construct
  source 1..20: mol_type = other DNA
ccgccactccggattcgggg

SEQ ID NO: 26117 - DNA, 20 bp, synthetic construct
  source 1..20: mol_type = other DNA
ggaacggcgctcgcccatct

SEQ ID NO: 26118 - DNA, 20 bp, synthetic construct
  source 1..20: mol_type = other DNA
tcgcccatctctcaggaccg

SEQ ID NO: 26119 - DNA, 20 bp, synthetic construct
  source 1..20: mol_type = other DNA
actgacccatgttcaactgc

SEQ ID NO: 26120 - DNA, 20 bp, synthetic construct
  source 1..20: mol_type = other DNA
gttcaactgctgttcacatg

SEQ ID NO: 26121 - DNA, 20 bp, synthetic construct
  source 1..20: mol_type = other DNA
ccacttcggccttcaaagtt

SEQ ID NO: 26122 - DNA, 20 bp, synthetic construct
  source 1..20: mol_type = other DNA
taccaccaagatctgcacct

SEQ ID NO: 26123 - DNA, 20 bp, synthetic construct
  source 1..20: mol_type = other DNA
gcggcggctccacccgggcc

SEQ ID NO: 26124 - DNA, 20 bp, synthetic construct
  source 1..20: mol_type = other DNA
ggccctcctactcgtcgcgg

SEQ ID NO: 26125 - DNA, 20 bp, synthetic construct
  source 1..20: mol_type = other DNA
gccgctcccgtccactctcg

SEQ ID NO: 26126 - DNA, 20 bp, synthetic construct
  source 1..20: mol_type = other DNA
acggccgggtatgggcccga

SEQ ID NO: 26127 - DNA, 20 bp, synthetic construct
  source 1..20: mol_type = other DNA
cgctccagcgccatccattt

SEQ ID NO: 26128 - DNA, 20 bp, synthetic construct
  source 1..20: mol_type = other DNA
ccatccattttcagggctag

SEQ ID NO: 26129 - DNA, 20 bp, synthetic construct
  source 1..20: mol_type = other DNA
tcagggctagttgattcggc

SEQ ID NO: 26130 - DNA, 20 bp, synthetic construct
  source 1..20: mol_type = other DNA
ttacacactccttagcggat

SEQ ID NO: 26131 - DNA, 20 bp, synthetic construct
  source 1..20: mol_type = other DNA
cttagcggattccgacttcc

SEQ ID NO: 26132 - DNA, 20 bp, synthetic construct
  source 1..20: mol_type = other DNA
atggccaccgtcctgctgtc

SEQ ID NO: 26133 - DNA, 20 bp, synthetic construct
  source 1..20: mol_type = other DNA
aacaccttttctggggtctg

SEQ ID NO: 26134 - DNA, 20 bp, synthetic construct
  source 1..20: mol_type = other DNA
ccttaacccggcgttcggtt

SEQ ID NO: 26135 - DNA, 20 bp, synthetic construct
  source 1..20: mol_type = other DNA
gcgttcggttcatcccgcag

SEQ ID NO: 26136 - DNA, 20 bp, synthetic construct
  source 1..20: mol_type = other DNA
catcccgcagcgccagttct

SEQ ID NO: 26137 - DNA, 20 bp, synthetic construct
  source 1..20: mol_type = other DNA
gcttaccaaaagtggcccac

SEQ ID NO: 26138 - DNA, 20 bp, synthetic construct
  source 1..20: mol_type = other DNA
taggcactcgcattccacgc

SEQ ID NO: 26139 - DNA, 20 bp, synthetic construct
  source 1..20: mol_type = other DNA
acccatttaaagtttgagaa

SEQ ID NO: 26140 - DNA, 20 bp, synthetic construct
  source 1..20: mol_type = other DNA
taggttgagatcgtttcggc

SEQ ID NO: 26141 - DNA, 20 bp, synthetic construct
  source 1..20: mol_type = other DNA
tcgtttcggccccaagacct

SEQ ID NO: 26142 - DNA, 20 bp, synthetic construct
  source 1..20: mol_type = other DNA
cccaagacctctaatcattc

SEQ ID NO: 26143 - DNA, 20 bp, synthetic construct
  source 1..20: mol_type = other DNA
ctaatcattcgctttaccgg

SEQ ID NO: 26144 - DNA, 20 bp, synthetic construct
  source 1..20: mol_type = other DNA
gctttaccggataaaactgc

SEQ ID NO: 26145 - DNA, 20 bp, synthetic construct
  source 1..20: mol_type = other DNA
ataaaactgcgtggcggggg

SEQ ID NO: 26146 - DNA, 20 bp, synthetic construct
  source 1..20: mol_type = other DNA
tgcgtcgggtctgcgagagc

SEQ ID NO: 26147 - DNA, 20 bp, synthetic construct
  source 1..20: mol_type = other DNA
ctgcgagagcgccagctatc

SEQ ID NO: 26148 - DNA, 20 bp, synthetic construct
  source 1..20: mol_type = other DNA
gccagctatcctgagggaaa

SEQ ID NO: 26149 - DNA, 20 bp, synthetic construct
  source 1..20: mol_type = other DNA
ctgagggaaacttcggaggg

SEQ ID NO: 26150 - DNA, 20 bp, synthetic construct
  source 1..20: mol_type = other DNA
tcgcccctatacccaggtcg

SEQ ID NO: 26151 - DNA, 20 bp, synthetic construct
  source 1..20: mol_type = other DNA
gacgaccgatttgcacgtca

SEQ ID NO: 26152 - DNA, 20 bp, synthetic construct
  source 1..20: mol_type = other DNA
ggaccgctacggacctccac

SEQ ID NO: 26153 - DNA, 20 bp, synthetic construct
  source 1..20: mol_type = other DNA
cagagtttcctctggcttcg

SEQ ID NO: 26154 - DNA, 20 bp, synthetic construct
  source 1..20: mol_type = other DNA
tctggcttcgccctgcccag

SEQ ID NO: 26155 - DNA, 20 bp, synthetic construct
  source 1..20: mol_type = other DNA
tgctccacctccccggcgcg

SEQ ID NO: 26156 - DNA, 20 bp, synthetic construct
  source 1..20: mol_type = other DNA
tcggccggcgagcgcgccgg

SEQ ID NO: 26157 - DNA, 20 bp, synthetic construct
  source 1..20: mol_type = other DNA
ccttcaccttcattgcgcca

SEQ ID NO: 26158 - DNA, 20 bp, synthetic construct
  source 1..20: mol_type = other DNA
cggcggctttcgtgcgagcc

SEQ ID NO: 26159 - DNA, 20 bp, synthetic construct
  source 1..20: mol_type = other DNA
gcacgtgttagactccttgg

SEQ ID NO: 26160 - DNA, 20 bp, synthetic construct
  source 1..20: mol_type = other DNA
ggtggcccggcccccccacg

SEQ ID NO: 26161 - DNA, 20 bp, synthetic construct
  source 1..20: mol_type = other DNA
tgggcgccgggaggggggag

SEQ ID NO: 26162 - DNA, 20 bp, synthetic construct
  source 1..20: mol_type = other DNA
gcgagtgctgctgccggggg

SEQ ID NO: 26163 - DNA, 20 bp, synthetic construct
  source 1..20: mol_type = other DNA
acgcggggccggggggcgga

SEQ ID NO: 26164 - DNA, 20 bp, synthetic construct
  source 1..20: mol_type = other DNA
ggcgggaaagatccgccggg

SEQ ID NO: 26165 - DNA, 20 bp, synthetic construct
  source 1..20: mol_type = other DNA
gccgccgggttgaatcctcc

SEQ ID NO: 26166 - DNA, 20 bp, synthetic construct
  source 1..20: mol_type = other DNA
acccgtttacctcttaacgg

SEQ ID NO: 26167 - DNA, 20 bp, synthetic construct
  source 1..20: mol_type = other DNA
ctcttaacggtttcacgccc

SEQ ID NO: 26168 - DNA, 20 bp, synthetic construct
  source 1..20: mol_type = other DNA
tcttgaactctctcttcaaa

SEQ ID NO: 26169 - DNA, 20 bp, synthetic construct
  source 1..20: mol_type = other DNA
gttcttttcaactttccctt

SEQ ID NO: 26170 - DNA, 20 bp, synthetic construct
  source 1..20: mol_type = other DNA
actttcccttacggtacttg

SEQ ID NO: 26171 - DNA, 20 bp, synthetic construct
  source 1..20: mol_type = other DNA
acggtacttgttgactatcg

SEQ ID NO: 26172 - DNA, 20 bp, synthetic construct
  source 1..20: mol_type = other DNA
gtttaccacccgctttgggc

SEQ ID NO: 26173 - DNA, 20 bp, synthetic construct
  source 1..20: mol_type = other DNA
cgctttgggctgcattccca

SEQ ID NO: 26174 - DNA, 20 bp, synthetic construct
  source 1..20: mol_type = other DNA
acccgggccccgcgcgccgg

SEQ ID NO: 26175 - DNA, 20 bp, synthetic construct
  source 1..20: mol_type = other DNA
cgcgcgccgggggccgctac

SEQ ID NO: 26176 - DNA, 20 bp, synthetic construct
  source 1..20: mol_type = other DNA
gatcagaaggacttgggccc

SEQ ID NO: 26177 - DNA, 20 bp, synthetic construct
  source 1..20: mol_type = other DNA
cccacgagcggcgccgggga

SEQ ID NO: 26178 - DNA, 20 bp, synthetic construct
  source 1..20: mol_type = other DNA
cgtacgccacatgtcccgcg

SEQ ID NO: 26179 - DNA, 20 bp, synthetic construct
  source 1..20: mol_type = other DNA
atgtcccgcgccccgccgcg

SEQ ID NO: 26180 - DNA, 20 bp, synthetic construct
  source 1..20: mol_type = other DNA
aacattccgcgctaccgagt

SEQ ID NO: 26181 - DNA, 20 bp, synthetic construct
  source 1..20: mol_type = other DNA
tatctcgcttctgttatttt

SEQ ID NO: 26182 - DNA, 20 bp, synthetic construct
  source 1..20: mol_type = other DNA
cctgtgagggctacctgtgc

SEQ ID NO: 26183 - DNA, 20 bp, synthetic construct
  source 1..20: mol_type = other DNA
agtggagtcttgggagcgct

SEQ ID NO: 26184 - DNA, 20 bp, synthetic construct
  source 1..20: mol_type = other DNA
tgcaagagtaccatttgtcg

SEQ ID NO: 26185 - DNA, 20 bp, synthetic construct
  source 1..20: mol_type = other DNA
ttagattcctgaagcttctg

SEQ ID NO: 26186 - DNA, 20 bp, synthetic construct
  source 1..20: mol_type = other DNA
tggattcgccgccgtcctgc

SEQ ID NO: 26187 - DNA, 20 bp, synthetic construct
  source 1..20: mol_type = other DNA
gctgggtcctgtttactccc

SEQ ID NO: 26188 - DNA, 20 bp, synthetic construct
  source 1..20: mol_type = other DNA
ccttgtaagaacacagccag

SEQ ID NO: 26189 - DNA, 20 bp, synthetic construct
  source 1..20: mol_type = other DNA
ctgagtcgcgtggcaggccg

SEQ ID NO: 26190 - DNA, 20 bp, synthetic construct
  source 1..20: mol_type = other DNA
cctctgcccgtgctgctgct

SEQ ID NO: 26191 - DNA, 20 bp, synthetic construct
  source 1..20: mol_type = other DNA
gtcctgggaccacatgggga

SEQ ID NO: 26192 - DNA, 20 bp, synthetic construct
  source 1..20: mol_type = other DNA
agacctgcccccgctcttgc

SEQ ID NO: 26193 - DNA, 20 bp, synthetic construct
  source 1..20: mol_type = other DNA
agtgcctgaggcagagactg

SEQ ID NO: 26194 - DNA, 20 bp, synthetic construct
  source 1..20: mol_type = other DNA
tgaacttccaaccgtatgta

SEQ ID NO: 26195 - DNA, 20 bp, synthetic construct
  source 1..20: mol_type = other DNA
gcaggcccgatttgttgaag

SEQ ID NO: 26196 - DNA, 20 bp, synthetic construct
  source 1..20: mol_type = other DNA
gtgtgtgtgtgtgtgcatgc

SEQ ID NO: 26197 - DNA, 20 bp, synthetic construct
  source 1..20: mol_type = other DNA
tcaatcgggtactccctcca

SEQ ID NO: 26198 - DNA, 20 bp, synthetic construct
  source 1..20: mol_type = other DNA
aacttcctctttcaacaaca

SEQ ID NO: 26199 - DNA, 20 bp, synthetic construct
  source 1..20: mol_type = other DNA
gccatgctgctcttcctcct

SEQ ID NO: 26200 - DNA, 20 bp, synthetic construct
  source 1..20: mol_type = other DNA
gacaaagccacgccttgccc

SEQ ID NO: 26201 - DNA, 20 bp, synthetic construct
  source 1..20: mol_type = other DNA
acccgaaaggccggacctac

SEQ ID NO: 26202 - DNA, 20 bp, synthetic construct
  source 1..20: mol_type = other DNA
gagatccgctgtcccttgag

SEQ ID NO: 26203 - DNA, 20 bp, synthetic construct
  source 1..20: mol_type = other DNA
cctgccccgaactgcccacg

SEQ ID NO: 26204 - DNA, 20 bp, synthetic construct
  source 1..20: mol_type = other DNA
acaaagctcccgctgccatt

SEQ ID NO: 26205 - DNA, 20 bp, synthetic construct
  source 1..20: mol_type = other DNA
agcggctctttcagcattgg

SEQ ID NO: 26206 - DNA, 20 bp, synthetic construct
  source 1..20: mol_type = other DNA
aacagtggagaacctaacgt

SEQ ID NO: 26207 - DNA, 20 bp, synthetic construct
  source 1..20: mol_type = other DNA
gccccgcgcgtcctgcgccg

SEQ ID NO: 26208 - DNA, 20 bp, synthetic construct
  source 1..20: mol_type = other DNA
gatctcttggagacggcgac

SEQ ID NO: 26209 - DNA, 20 bp, synthetic construct
  source 1..20: mol_type = other DNA
tgcccgctccccagacacac

SEQ ID NO: 26210 - DNA, 20 bp, synthetic construct
  source 1..20: mol_type = other DNA
tgtgcctatccctgctgtcc

SEQ ID NO: 26211 - DNA, 20 bp, synthetic construct
  source 1..20: mol_type = other DNA
cacccgggatggagccatgt

SEQ ID NO: 26212 - DNA, 20 bp, synthetic construct
  source 1..20: mol_type = other DNA
cttccagcgaagtctactcc

SEQ ID NO: 26213 - DNA, 20 bp, synthetic construct
  source 1..20: mol_type = other DNA
ggcccagcctctcctctgtc

SEQ ID NO: 26214 - DNA, 20 bp, synthetic construct
  source 1..20: mol_type = other DNA
ttggagacgtagaaccgtta

SEQ ID NO: 26215 - DNA, 20 bp, synthetic construct
  source 1..20: mol_type = other DNA
cggctggcagaagggggtga

SEQ ID NO: 26216 - DNA, 20 bp, synthetic construct
  source 1..20: mol_type = other DNA
gcggcgctgagcgggtcccc

SEQ ID NO: 26217 - DNA, 20 bp, synthetic construct
  source 1..20: mol_type = other DNA
tagagactggacaggggaga

SEQ ID NO: 26218 - DNA, 20 bp, synthetic construct
  source 1..20: mol_type = other DNA
tatcaggttctcataccgga

SEQ ID NO: 26219 - DNA, 20 bp, synthetic construct
  source 1..20: mol_type = other DNA
gactcgcgggtatcggagct

SEQ ID NO: 26220 - DNA, 20 bp, synthetic construct
  source 1..20: mol_type = other DNA
gggagcacaagcgcttccgg

SEQ ID NO: 26221 - DNA, 20 bp, synthetic construct
  source 1..20: mol_type = other DNA
actcactgcacgccatgaac

SEQ ID NO: 26222 - DNA, 20 bp, synthetic construct
  source 1..20: mol_type = other DNA
gtctccgccggcgcccgccc

SEQ ID NO: 26223 - DNA, 20 bp, synthetic construct
  source 1..20: mol_type = other DNA
gacgaagctgccggccaatg

SEQ ID NO: 26224 - DNA, 20 bp, synthetic construct
  source 1..20: mol_type = other DNA
tcgcgggctcagctggttgg

SEQ ID NO: 26225 - DNA, 20 bp, synthetic construct
  source 1..20: mol_type = other DNA
cgcggctgcggtacggcgtg

SEQ ID NO: 26226 - DNA, 20 bp, synthetic construct
  source 1..20: mol_type = other DNA
gtgcgcggctgcggtacggc

SEQ ID NO: 26227 - DNA, 20 bp, synthetic construct
  source 1..20: mol_type = other DNA
caccggcccttacactgtgg

SEQ ID NO: 26228 - DNA, 20 bp, synthetic construct
  source 1..20: mol_type = other DNA
gagccccgagagacgccccg

SEQ ID NO: 26229 - DNA, 20 bp, synthetic construct
  source 1..20: mol_type = other DNA
cgccgacagcccgagaaacc

SEQ ID NO: 26230 - DNA, 20 bp, synthetic construct
  source 1..20: mol_type = other DNA
cgcagccacgggatgggtcg

SEQ ID NO: 26231 - DNA, 20 bp, synthetic construct
  source 1..20: mol_type = other DNA
tcatcggccaccccagaagc

SEQ ID NO: 26232 - DNA, 20 bp, synthetic construct
  source 1..20: mol_type = other DNA
actgggcggggagaccaagg

SEQ ID NO: 26233 - DNA, 20 bp, synthetic construct
  source 1..20: mol_type = other DNA
cgctggcgctctactcgtgc

SEQ ID NO: 26234 - DNA, 20 bp, synthetic construct
  source 1..20: mol_type = other DNA
ccagcgccgccgaagcagct

SEQ ID NO: 26235 - DNA, 20 bp, synthetic construct
  source 1..20: mol_type = other DNA
cctccaccggcccttgcagg

SEQ ID NO: 26236 - DNA, 20 bp, synthetic construct
  source 1..20: mol_type = other DNA
ctccaggccacgcgagccgg

SEQ ID NO: 26237 - DNA, 20 bp, synthetic construct
  source 1..20: mol_type = other DNA
ccgcgggtgtgagcgcgcgc

SEQ ID NO: 26238 - DNA, 20 bp, synthetic construct
  source 1..20: mol_type = other DNA
ccctctgaccccagcccgga

SEQ ID NO: 26239 - DNA, 20 bp, synthetic construct
  source 1..20: mol_type = other DNA
gacagggagcttccttggct

SEQ ID NO: 26240 - DNA, 20 bp, synthetic construct
  source 1..20: mol_type = other DNA
ctgggcagctgggcactggg

SEQ ID NO: 26241 - DNA, 20 bp, synthetic construct
  source 1..20: mol_type = other DNA
ttgttccctatcctgggcca

SEQ ID NO: 26242 - DNA, 20 bp, synthetic construct
  source 1..20: mol_type = other DNA
ccgggtccgggccattttcc

SEQ ID NO: 26243 - DNA, 20 bp, synthetic construct
  source 1..20: mol_type = other DNA
ttctgcagtcggcgctccct

SEQ ID NO: 26244 - DNA, 20 bp, synthetic construct
  source 1..20: mol_type = other DNA
ttgctgccctcacagacttg

SEQ ID NO: 26245 - DNA, 20 bp, synthetic construct
  source 1..20: mol_type = other DNA
tgatccacttcctcctcagg

SEQ ID NO: 26246 - DNA, 20 bp, synthetic construct
  source 1..20: mol_type = other DNA
caccggcggtaccagtaagt

SEQ ID NO: 26247 - DNA, 20 bp, synthetic construct
  source 1..20: mol_type = other DNA
gaaagccgccggcggggaat

SEQ ID NO: 26248 - DNA, 20 bp, synthetic construct
  source 1..20: mol_type = other DNA
actggggatcccgccgccgg

SEQ ID NO: 26249 - DNA, 20 bp, synthetic construct
  source 1..20: mol_type = other DNA
ctgtgttgaacggttcttgt

SEQ ID NO: 26250 - DNA, 20 bp, synthetic construct
  source 1..20: mol_type = other DNA
ggctcaccatggaccgccgg

SEQ ID NO: 26251 - DNA, 20 bp, synthetic construct
  source 1..20: mol_type = other DNA
cctgagccgggaccgctagg

SEQ ID NO: 26252 - DNA, 20 bp, synthetic construct
  source 1..20: mol_type = other DNA
accggccgccgggcctctgg

SEQ ID NO: 26253 - DNA, 20 bp, synthetic construct
  source 1..20: mol_type = other DNA
aggaggtgccggccgagcac

SEQ ID NO: 26254 - DNA, 20 bp, synthetic construct
  source 1..20: mol_type = other DNA
aaatagtgagatttccaatg

SEQ ID NO: 26255 - DNA, 20 bp, synthetic construct
  source 1..20: mol_type = other DNA
tctgcaccgtcatctcctgc

SEQ ID NO: 26256 - DNA, 20 bp, synthetic construct
  source 1..20: mol_type = other DNA
ccctgagagtctgagcgctc

SEQ ID NO: 26257 - DNA, 20 bp, synthetic construct
  source 1..20: mol_type = other DNA
gtaaagcgccacgcaagcag

SEQ ID NO: 26258 - DNA, 20 bp, synthetic construct
  source 1..20: mol_type = other DNA
gccgccgcctgccgcgcccc

SEQ ID NO: 26259 - DNA, 20 bp, synthetic construct
  source 1..20: mol_type = other DNA
tttttggatagggttgacgt

SEQ ID NO: 26260 - DNA, 20 bp, synthetic construct
  source 1..20: mol_type = other DNA
gggctgcgcgcgcttttggg

SEQ ID NO: 26261 - DNA, 20 bp, synthetic construct
  source 1..20: mol_type = other DNA
tccaccggcggcaaggctcc

SEQ ID NO: 26262 - DNA, 20 bp, synthetic construct
  source 1..20: mol_type = other DNA
cagccaccggttccttatcc

SEQ ID NO: 26263 - DNA, 20 bp, synthetic construct
  source 1..20: mol_type = other DNA
taactaggtggagtaggtgt

SEQ ID NO: 26264 - DNA, 20 bp, synthetic construct
  source 1..20: mol_type = other DNA
ctctccctctttcataccca

SEQ ID NO: 26265 - DNA, 20 bp, synthetic construct
  source 1..20: mol_type = other DNA
ccgttatttaatacctgtca

SEQ ID NO: 26266 - DNA, 20 bp, synthetic construct
  source 1..20: mol_type = other DNA
gtggccactgttggcttctg

SEQ ID NO: 26267 - DNA, 20 bp, synthetic construct
  source 1..20: mol_type = other DNA
ccagcacccagactccagca

SEQ ID NO: 26268 - DNA, 20 bp, synthetic construct
  source 1..20: mol_type = other DNA
cgcccggctgctcctcactt

SEQ ID NO: 26269 - DNA, 20 bp, synthetic construct
  source 1..20: mol_type = other DNA
gtggcggcgggcggcgggcg

SEQ ID NO: 26270 - DNA, 20 bp, synthetic construct
  source 1..20: mol_type = other DNA
gggaaacatctgccgttggt

SEQ ID NO: 26271 - DNA, 20 bp, synthetic construct
  source 1..20: mol_type = other DNA
cggtagctgccccctgagct

SEQ ID NO: 26272 - DNA, 20 bp, synthetic construct
  source 1..20: mol_type = other DNA
cagcacctcctgagaccggc

SEQ ID NO: 26273 - DNA, 20 bp, synthetic construct
  source 1..20: mol_type = other DNA
cgaaactctcagggttggca

SEQ ID NO: 26274 - DNA, 20 bp, synthetic construct
  source 1..20: mol_type = other DNA
cgtgttcgcgcctggtagag

SEQ ID NO: 26275 - DNA, 20 bp, synthetic construct
  source 1..20: mol_type = other DNA
cgcggggtccaagatggtgg

SEQ ID NO: 26276 - DNA, 20 bp, synthetic construct
  source 1..20: mol_type = other DNA
ggggtgagcgtccccgtccc

SEQ ID NO: 26277 - DNA, 20 bp, synthetic construct
  source 1..20: mol_type = other DNA
ggcgttatttttattaactg

SEQ ID NO: 26278 - DNA, 20 bp, synthetic construct
  source 1..20: mol_type = other DNA
cgcgtctcttcgccacattc

SEQ ID NO: 26279 - DNA, 20 bp, synthetic construct
  source 1..20: mol_type = other DNA
cccggccgtgcgcccagctt

SEQ ID NO: 26280 - DNA, 20 bp, synthetic construct
  source 1..20: mol_type = other DNA
ccctctcctataaagcagac

SEQ ID NO: 26281 - DNA, 20 bp, synthetic construct
  source 1..20: mol_type = other DNA
tggggtgcttggggcgcacc

SEQ ID NO: 26282 - DNA, 20 bp, synthetic construct
  source 1..20: mol_type = other DNA
ccccgcgccgcccgcgcccc

SEQ ID NO: 26283 - DNA, 20 bp, synthetic construct
  source 1..20: mol_type = other DNA
tctccaggcagcggccgtcg

SEQ ID NO: 26284 - DNA, 20 bp, synthetic construct
  source 1..20: mol_type = other DNA
gcttataacctgggatgggc

SEQ ID NO: 26285 - DNA, 20 bp, synthetic construct
  source 1..20: mol_type = other DNA
ctcaggaccctcgccatgaa

SEQ ID NO: 26286 - DNA, 20 bp, synthetic construct
  source 1..20: mol_type = other DNA
cccccatgtagaaggtgcac

SEQ ID NO: 26287 - DNA, 20 bp, synthetic construct
  source 1..20: mol_type = other DNA
gggatgcggggctgggaccc

SEQ ID NO: 26288 - DNA, 20 bp, synthetic construct
  source 1..20: mol_type = other DNA
cgcctcgagcggggtccgag

SEQ ID NO: 26289 - DNA, 20 bp, synthetic construct
  source 1..20: mol_type = other DNA
gcccgcctcccgcccgccct

SEQ ID NO: 26290 - DNA, 20 bp, synthetic construct
  source 1..20: mol_type = other DNA
tgggtgctgggaaggggcct

SEQ ID NO: 26291 - DNA, 20 bp, synthetic construct
  source 1..20: mol_type = other DNA
agccacagcccgacgcacgg

SEQ ID NO: 26292 - DNA, 20 bp, synthetic construct
  source 1..20: mol_type = other DNA
aagaaagacatggatgcata

SEQ ID NO: 26293 - DNA, 20 bp, synthetic construct
  source 1..20: mol_type = other DNA
aggaaaaaaaaatcccggga

SEQ ID NO: 26294 - DNA, 20 bp, synthetic construct
  source 1..20: mol_type = other DNA
gccttaagaacccggcaacc

SEQ ID NO: 26295 - DNA, 20 bp, synthetic construct
  source 1..20: mol_type = other DNA
ggaggggcggggaggtggac

SEQ ID NO: 26296 - DNA, 20 bp, synthetic construct
  source 1..20: mol_type = other DNA
atgtattgctgtgctctccg

SEQ ID NO: 26297 - DNA, 20 bp, synthetic construct
  source 1..20: mol_type = other DNA
caccttctctgcctccagtc

SEQ ID NO: 26298 - DNA, 20 bp, synthetic construct
  source 1..20: mol_type = other DNA
ctgccctgaaactctagtcg

SEQ ID NO: 26299 - DNA, 20 bp, synthetic construct
  source 1..20: mol_type = other DNA
ggtcgggtgccgtacgccga

SEQ ID NO: 26300 - DNA, 20 bp, synthetic construct
  source 1..20: mol_type = other DNA
gcccgggtgtagcgcatcac

SEQ ID NO: 26301 - DNA, 20 bp, synthetic construct
  source 1..20: mol_type = other DNA
gagaaaaccctgtcggtctt

SEQ ID NO: 26302 - DNA, 20 bp, synthetic construct
  source 1..20: mol_type = other DNA
gaggcagccgaaccctagcg

SEQ ID NO: 26303 - DNA, 20 bp, synthetic construct
  source 1..20: mol_type = other DNA
gggtgcccggccatgggctg

SEQ ID NO: 26304 - DNA, 20 bp, synthetic construct
  source 1..20: mol_type = other DNA
tgtatgggggacagcaggcg

SEQ ID NO: 26305 - DNA, 20 bp, synthetic construct
  source 1..20: mol_type = other DNA
gctggtcccctcagagggtt

SEQ ID NO: 26306 - DNA, 20 bp, synthetic construct
  source 1..20: mol_type = other DNA
ggcgttccagagagtgggga

SEQ ID NO: 26307 - DNA, 20 bp, synthetic construct
  source 1..20: mol_type = other DNA
ggggaggaggtttactcagc

SEQ ID NO: 26308 - DNA, 20 bp, synthetic construct
  source 1..20: mol_type = other DNA
acccgcaagcaagggggcgg

SEQ ID NO: 26309 - DNA, 20 bp, synthetic construct
  source 1..20: mol_type = other DNA
acatttaagtatcttcgacc

SEQ ID NO: 26310 - DNA, 20 bp, synthetic construct
  source 1..20: mol_type = other DNA
gccagcagctgcagcagcta

SEQ ID NO: 26311 - DNA, 20 bp, synthetic construct
  source 1..20: mol_type = other DNA
ctggggcgccggcgggtgcg

SEQ ID NO: 26312 - DNA, 20 bp, synthetic construct
  source 1..20: mol_type = other DNA
acacgttggactcgctgggc

SEQ ID NO: 26313 - DNA, 20 bp, synthetic construct
  source 1..20: mol_type = other DNA
ggtgcggtggcggaagtgca

SEQ ID NO: 26314 - DNA, 20 bp, synthetic construct
  source 1..20: mol_type = other DNA
gtgaaggcaaggtccctgga

SEQ ID NO: 26315 - DNA, 20 bp, synthetic construct
  source 1..20: mol_type = other DNA
aaatttctatcttcttttgt

SEQ ID NO: 26316 - DNA, 20 bp, synthetic construct
  source 1..20: mol_type = other DNA
gaaagactttctgggcaaaa

SEQ ID NO: 26317 - DNA, 20 bp, synthetic construct
  source 1..20: mol_type = other DNA
ccggagcatcctgcactgca

SEQ ID NO: 26318 - DNA, 20 bp, synthetic construct
  source 1..20: mol_type = other DNA
cgggagctggggagccaggg

SEQ ID NO: 26319 - DNA, 20 bp, synthetic construct
  source 1..20: mol_type = other DNA
ggggacagagcccctttttt

SEQ ID NO: 26320 - DNA, 20 bp, synthetic construct
  source 1..20: mol_type = other DNA
gcttcccaggcatggagaag

SEQ ID NO: 26321 - DNA, 20 bp, synthetic construct
  source 1..20: mol_type = other DNA
actttgattattggcaaata

SEQ ID NO: 26322 - DNA, 20 bp, synthetic construct
  source 1..20: mol_type = other DNA
gaggtgcaggcagagcagcc

SEQ ID NO: 26323 - DNA, 20 bp, synthetic construct
  source 1..20: mol_type = other DNA
gcgtcaccaccctgcccacc

SEQ ID NO: 26324 - DNA, 20 bp, synthetic construct
  source 1..20: mol_type = other DNA
caaggactaattggtcttta

SEQ ID NO: 26325 - DNA, 20 bp, synthetic construct
  source 1..20: mol_type = other DNA
gagtccatgaaggtccccgc

SEQ ID NO: 26326 - DNA, 20 bp, synthetic construct
  source 1..20: mol_type = other DNA
tcggtggtgagaggaagcct

SEQ ID NO: 26327 - DNA, 20 bp, synthetic construct
  source 1..20: mol_type = other DNA
ccactgcgcgccagcaggtc

SEQ ID NO: 26328 - DNA, 20 bp, synthetic construct
  source 1..20: mol_type = other DNA
ccaggttgctctgatgatat

SEQ ID NO: 26329 - DNA, 20 bp, synthetic construct
  source 1..20: mol_type = other DNA
cttggactttcgccgaaagt

SEQ ID NO: 26330 - DNA, 20 bp, synthetic construct
  source 1..20: mol_type = other DNA
tacttggagcactatctgga

SEQ ID NO: 26331 - DNA, 20 bp, synthetic construct
  source 1..20: mol_type = other DNA
ttttcagagtagttcacaac

SEQ ID NO: 26332 - DNA, 20 bp, synthetic construct
  source 1..20: mol_type = other DNA
agaagaagaacccatgaagg

SEQ ID NO: 26333 - DNA, 20 bp, synthetic construct
  source 1..20: mol_type = other DNA
gaagtaccgcgagcaaggag

SEQ ID NO: 26334 - DNA, 20 bp, synthetic construct
  source 1..20: mol_type = other DNA
gcccccaggacccctgggga

SEQ ID NO: 26335 - DNA, 20 bp, synthetic construct
  source 1..20: mol_type = other DNA
agtccagaagcaagacctgt

SEQ ID NO: 26336 - DNA, 20 bp, synthetic construct
  source 1..20: mol_type = other DNA
ctcccctttctcgcccagcg

SEQ ID NO: 26337 - DNA, 20 bp, synthetic construct
  source 1..20: mol_type = other DNA
tgcggccgctgccccagggc

SEQ ID NO: 26338 - DNA, 20 bp, synthetic construct
  source 1..20: mol_type = other DNA
agtgcagccactgccgccgc

SEQ ID NO: 26339 - DNA, 20 bp, synthetic construct
  source 1..20: mol_type = other DNA
gccttttccctcgggtagta

SEQ ID NO: 26340 - DNA, 20 bp, synthetic construct
  source 1..20: mol_type = other DNA
caacgatgactcctgggaag

SEQ ID NO: 26341 - DNA, 20 bp, synthetic construct
  source 1..20: mol_type = other DNA
agccctgactacagctcttg

SEQ ID NO: 26342 - DNA, 20 bp, synthetic construct
  source 1..20: mol_type = other DNA
cggccggcctcgggcaccgg

SEQ ID NO: 26343 - DNA, 20 bp, synthetic construct
  source 1..20: mol_type = other DNA
ggcgtgtgaagataacccaa

SEQ ID NO: 26344 - DNA, 20 bp, synthetic construct
  source 1..20: mol_type = other DNA
gtacctttgcactccagcct

SEQ ID NO: 26345 - DNA, 20 bp, synthetic construct
  source 1..20: mol_type = other DNA
acgcagggctctcccaagtt

SEQ ID NO: 26346 - DNA, 20 bp, synthetic construct
  source 1..20: mol_type = other DNA
gagtgaagcatacagtcaaa

SEQ ID NO: 26347 - DNA, 20 bp, synthetic construct
  source 1..20: mol_type = other DNA
gataggagcaacatgcatgt

SEQ ID NO: 26348 - DNA, 20 bp, synthetic construct
  source 1..20: mol_type = other DNA
catccgagcatgaaacgctg

SEQ ID NO: 26349 - DNA, 20 bp, synthetic construct
  source 1..20: mol_type = other DNA
caagtgaaagagattagtcc

SEQ ID NO: 26350 - DNA, 20 bp, synthetic construct
  source 1..20: mol_type = other DNA
gcaggacccaggcagaaaag

SEQ ID NO: 26351 - DNA, 20 bp, synthetic construct
  source 1..20: mol_type = other DNA
ctgccatcttctccgcgcta

SEQ ID NO: 26352 - DNA, 20 bp, synthetic construct
  source 1..20: mol_type = other DNA
ctcccctgccctctaaaacc

SEQ ID NO: 26353 - DNA, 20 bp, synthetic construct
  source 1..20: mol_type = other DNA
cttcagagtttgaaaaaaaa

SEQ ID NO: 26354 - DNA, 20 bp, synthetic construct
  source 1..20: mol_type = other DNA
tcctttataaagcctggctc

SEQ ID NO: 26355 - DNA, 20 bp, synthetic construct
  source 1..20: mol_type = other DNA
gggctgctgtggctgttctg

SEQ ID NO: 26356 - DNA, 20 bp, synthetic construct
  source 1..20: mol_type = other DNA
gattaacagatgaccccaat

SEQ ID NO: 26357 - DNA, 20 bp, synthetic construct
  source 1..20: mol_type = other DNA
gcccatggatgagaaattga

SEQ ID NO: 26358 - DNA, 20 bp, synthetic construct
  source 1..20: mol_type = other DNA
aggagaagtaaggccctgga

SEQ ID NO: 26359 - DNA, 20 bp, synthetic construct
  source 1..20: mol_type = other DNA
ttgaggggctcttcgatgac

SEQ ID NO: 26360 - DNA, 20 bp, synthetic construct
  source 1..20: mol_type = other DNA
atgccgcctacgtgccccct

SEQ ID NO: 26361 - DNA, 20 bp, synthetic construct
  source 1..20: mol_type = other DNA
ataaagagaaagactcttat

SEQ ID NO: 26362 - DNA, 20 bp, synthetic construct
  source 1..20: mol_type = other DNA
cgttacttctgctgtggaag

SEQ ID NO: 26363 - DNA, 20 bp, synthetic construct
  source 1..20: mol_type = other DNA
gtgagaaggggagcaaggga

SEQ ID NO: 26364 - DNA, 20 bp, synthetic construct
  source 1..20: mol_type = other DNA
agatggagaggctggcccca

SEQ ID NO: 26365 - DNA, 20 bp, synthetic construct
  source 1..20: mol_type = other DNA
ctgcaggaccacctgctgga

SEQ ID NO: 26366 - DNA, 20 bp, synthetic construct
  source 1..20: mol_type = other DNA
ccaagttcaaggtcaccttc

SEQ ID NO: 26367 - DNA, 20 bp, synthetic construct
  source 1..20: mol_type = other DNA
tactatgtaaggaattgtcg

SEQ ID NO: 26368 - DNA, 20 bp, synthetic construct
  source 1..20: mol_type = other DNA
cctccttggtagggatcctc

SEQ ID NO: 26369 - DNA, 20 bp, synthetic construct
  source 1..20: mol_type = other DNA
ctccagcatggccgcctcca

SEQ ID NO: 26370 - DNA, 20 bp, synthetic construct
  source 1..20: mol_type = other DNA
gcccaccaagaagaaagcag

SEQ ID NO: 26371 - DNA, 20 bp, synthetic construct
  source 1..20: mol_type = other DNA
gagacttttctccctgaagt

SEQ ID NO: 26372 - DNA, 20 bp, synthetic construct
  source 1..20: mol_type = other DNA
gaggtgactgaagcgagcct

SEQ ID NO: 26373 - DNA, 20 bp, synthetic construct
  source 1..20: mol_type = other DNA
acggacggtggacgctggga

SEQ ID NO: 26374 - DNA, 20 bp, synthetic construct
  source 1..20: mol_type = other DNA
tccctgcaccatgccctaca

SEQ ID NO: 26375 - DNA, 20 bp, synthetic construct
  source 1..20: mol_type = other DNA
aacattttgggaggacgaag

SEQ ID NO: 26376 - DNA, 20 bp, synthetic construct
  source 1..20: mol_type = other DNA
gcaccatgtcttacagttgt

SEQ ID NO: 26377 - DNA, 20 bp, synthetic construct
  source 1..20: mol_type = other DNA
gatgggaggatgctcagggt

SEQ ID NO: 26378 - DNA, 20 bp, synthetic construct
  source 1..20: mol_type = other DNA
tgggttcgtgcgccttctac

SEQ ID NO: 26379 - DNA, 20 bp, synthetic construct
  source 1..20: mol_type = other DNA
tgctcccggtgccatgaacg

SEQ ID NO: 26380 - DNA, 20 bp, synthetic construct
  source 1..20: mol_type = other DNA
gacactccctaatgaaaaag

SEQ ID NO: 26381 - DNA, 20 bp, synthetic construct
  source 1..20: mol_type = other DNA
tcctcttgcccgcgcaggca

SEQ ID NO: 26382 - DNA, 20 bp, synthetic construct
  source 1..20: mol_type = other DNA
aaatcaaacctttgagaagc

SEQ ID NO: 26383 - DNA, 20 bp, synthetic construct
  source 1..20: mol_type = other DNA
gagggccctgcgccgccttt

SEQ ID NO: 26384 - DNA, 20 bp, synthetic construct
  source 1..20: mol_type = other DNA
gcgctggcggagacgccggc

SEQ ID NO: 26385 - DNA, 20 bp, synthetic construct
  source 1..20: mol_type = other DNA
tccttcccagccgcgcggct

SEQ ID NO: 26386 - DNA, 20 bp, synthetic construct
  source 1..20: mol_type = other DNA
tctgaaattcatcacctctc

SEQ ID NO: 26387 - DNA, 20 bp, synthetic construct
  source 1..20: mol_type = other DNA
ccgctgccgccgtcacccgc

SEQ ID NO: 26388 - DNA, 20 bp, synthetic construct
  source 1..20: mol_type = other DNA
cacatagccgagcccgacgg

SEQ ID NO: 26389 - DNA, 20 bp, synthetic construct
  source 1..20: mol_type = other DNA
ggtctgggtcggccacacag

SEQ ID NO: 26390 - DNA, 20 bp, synthetic construct
  source 1..20: mol_type = other DNA
tccacattcctctgtgggct

SEQ ID NO: 26391 - DNA, 20 bp, synthetic construct
  source 1..20: mol_type = other DNA
caacagccgacttagatgtg

SEQ ID NO: 26392 - DNA, 20 bp, synthetic construct
  source 1..20: mol_type = other DNA
aggtccggcacctgctgcgc

SEQ ID NO: 26393 - DNA, 20 bp, synthetic construct
  source 1..20: mol_type = other DNA
cgccgcgggaacgctgtcct

SEQ ID NO: 26394 - DNA, 20 bp, synthetic construct
  source 1..20: mol_type = other DNA
gatcgtctgctccctcagcc

SEQ ID NO: 26395 - DNA, 20 bp, synthetic construct
  source 1..20: mol_type = other DNA
ccaggctgggagcatcccct

SEQ ID NO: 26396 - DNA, 20 bp, synthetic construct
  source 1..20: mol_type = other DNA
cggccccacgcttcccactt

SEQ ID NO: 26397 - DNA, 20 bp, synthetic construct
  source 1..20: mol_type = other DNA
tctctgggccaggtggaacc

SEQ ID NO: 26398 - DNA, 20 bp, synthetic construct
  source 1..20: mol_type = other DNA
gtacctgcacttatttattg

SEQ ID NO: 26399 - DNA, 20 bp, synthetic construct
  source 1..20: mol_type = other DNA
ttgctggaggggctaccagg

SEQ ID NO: 26400 - DNA, 20 bp, synthetic construct
  source 1..20: mol_type = other DNA
agtaacaccatcaggtccta

SEQ ID NO: 26401 - DNA, 20 bp, synthetic construct
  source 1..20: mol_type = other DNA
ggagagactggacctaaatg

SEQ ID NO: 26402 - DNA, 20 bp, synthetic construct
  source 1..20: mol_type = other DNA
gaatatttgagattgaagat

SEQ ID NO: 26403 - DNA, 20 bp, synthetic construct
  source 1..20: mol_type = other DNA
ccagctctgagatttccagc

SEQ ID NO: 26404 - DNA, 20 bp, synthetic construct
  source 1..20: mol_type = other DNA
tccttcccctgaccagccca

SEQ ID NO: 26405 - DNA, 20 bp, synthetic construct
  source 1..20: mol_type = other DNA
ctctcagcttcagagggaaa

SEQ ID NO: 26406 - DNA, 20 bp, synthetic construct
  source 1..20: mol_type = other DNA
gaccctacagcttggggcct

SEQ ID NO: 26407 - DNA, 20 bp, synthetic construct
  source 1..20: mol_type = other DNA
gtcccgagcgcgatgacttg

SEQ ID NO: 26408 - DNA, 20 bp, synthetic construct
  source 1..20: mol_type = other DNA
aggtctgaattccagactcc

SEQ ID NO: 26409 - DNA, 20 bp, synthetic construct
  source 1..20: mol_type = other DNA
gcggatcccgagagggaaag

SEQ ID NO: 26410 - DNA, 20 bp, synthetic construct
  source 1..20: mol_type = other DNA
tccggcagcttctcgcggct

SEQ ID NO: 26411 - DNA, 20 bp, synthetic construct
  source 1..20: mol_type = other DNA
tggactccctgctgagcaag

SEQ ID NO: 26412 - DNA, 20 bp, synthetic construct
  source 1..20: mol_type = other DNA
gactgcactgcttctcccag

SEQ ID NO: 26413 - DNA, 20 bp, synthetic construct
  source 1..20: mol_type = other DNA
ccctgcccaccttcctcacc

SEQ ID NO: 26414 - DNA, 20 bp, synthetic construct
  source 1..20: mol_type = other DNA
gcccctcctccctggtttga

SEQ ID NO: 26415 - DNA, 20 bp, synthetic construct
  source 1..20: mol_type = other DNA
ctttcgtaaccgcaccacac

SEQ ID NO: 26416 - DNA, 20 bp, synthetic construct
  source 1..20: mol_type = other DNA
tcatcctaggcctcaggagc

SEQ ID NO: 26417 - DNA, 20 bp, synthetic construct
  source 1..20: mol_type = other DNA
gcggggcgctccggggaggc

SEQ ID NO: 26418 - DNA, 20 bp, synthetic construct
  source 1..20: mol_type = other DNA
accagaggctgctctgcttg

SEQ ID NO: 26419 - DNA, 20 bp, synthetic construct
  source 1..20: mol_type = other DNA
tgggctctgggcggtgccaa

SEQ ID NO: 26420 - DNA, 20 bp, synthetic construct
  source 1..20: mol_type = other DNA
ccaccatgccacccatgctg

SEQ ID NO: 26421 - DNA, 20 bp, synthetic construct
  source 1..20: mol_type = other DNA
agcaccggggcatccccggg

SEQ ID NO: 26422 - DNA, 20 bp, synthetic construct
  source 1..20: mol_type = other DNA
cctttcctctctgcctctgg

SEQ ID NO: 26423 - DNA, 20 bp, synthetic construct
  source 1..20: mol_type = other DNA
ccgcacccggttcagctcgc

SEQ ID NO: 26424 - DNA, 20 bp, synthetic construct
  source 1..20: mol_type = other DNA
ggccccttccccgcgggcgt

SEQ ID NO: 26425 - DNA, 20 bp, synthetic construct
  source 1..20: mol_type = other DNA
aacaccccagggagtgaaag

SEQ ID NO: 26426 - DNA, 20 bp, synthetic construct
  source 1..20: mol_type = other DNA
ctcaggtctgcagctgggtc

SEQ ID NO: 26427 - DNA, 20 bp, synthetic construct
  source 1..20: mol_type = other DNA
gatgggagagaaaggccagg

SEQ ID NO: 26428 - DNA, 20 bp, synthetic construct
  source 1..20: mol_type = other DNA
ggggagactctgcaggagcc

SEQ ID NO: 26429 - DNA, 20 bp, synthetic construct
  source 1..20: mol_type = other DNA
cgcggattgtgcacagttct
